United States Patent Application Publication US 2025/0333448 A1 - sequence listing, part 11

SEQ ID NO: 224448 - protein, 15 aa, Artificial Sequence
  Description of Artificial Sequence: Synthetic peptide
  Seed: LRMKWMMAMKYPITA
LRMKFMMKMRYPATA

SEQ ID NO: 224449 - protein, 15 aa, Artificial Sequence
  Description of Artificial Sequence: Synthetic peptide
  Seed: LRMKWMMAMKYPITA
LRMKFMMKMRYPCTA

SEQ ID NO: 224450 - protein, 15 aa, Artificial Sequence
  Description of Artificial Sequence: Synthetic peptide
  Seed: LRMKWMMAMKYPITA
LRMKFMMKMRYPDTA

SEQ ID NO: 224451 - protein, 15 aa, Artificial Sequence
  Description of Artificial Sequence: Synthetic peptide
  Seed: LRMKWMMAMKYPITA
LRMKFMMKMRYPETA

SEQ ID NO: 224452 - protein, 15 aa, Artificial Sequence
  Description of Artificial Sequence: Synthetic peptide
  Seed: LRMKWMMAMKYPITA
LRMKFMMKMRYPFTA

SEQ ID NO: 224453 - protein, 15 aa, Artificial Sequence
  Description of Artificial Sequence: Synthetic peptide
  Seed: LRMKWMMAMKYPITA
LRMKFMMKMRYPGTA

SEQ ID NO: 224454 - protein, 15 aa, Artificial Sequence
  Description of Artificial Sequence: Synthetic peptide
  Seed: LRMKWMMAMKYPITA
LRMKFMMKMRYPHTA

SEQ ID NO: 224455 - protein, 15 aa, Artificial Sequence
  Description of Artificial Sequence: Synthetic peptide
  Seed: LRMKWMMAMKYPITA
LRMKFMMKMRYPITA

SEQ ID NO: 224456 - protein, 15 aa, Artificial Sequence
  Description of Artificial Sequence: Synthetic peptide
  Seed: LRMKWMMAMKYPITA
LRMKFMMKMRYPKTA

SEQ ID NO: 224457 - protein, 15 aa, Artificial Sequence
  Description of Artificial Sequence: Synthetic peptide
  Seed: LRMKWMMAMKYPITA
LRMKFMMKMRYPLTA

SEQ ID NO: 224458 - protein, 15 aa, Artificial Sequence
  Description of Artificial Sequence: Synthetic peptide
  Seed: LRMKWMMAMKYPITA
LRMKFMMKMRYPMTA

SEQ ID NO: 224459 - protein, 15 aa, Artificial Sequence
  Description of Artificial Sequence: Synthetic peptide
  Seed: LRMKWMMAMKYPITA
LRMKFMMKMRYPNTA

SEQ ID NO: 224460 - protein, 15 aa, Artificial Sequence
  Description of Artificial Sequence: Synthetic peptide
  Seed: LRMKWMMAMKYPITA
LRMKFMMKMRYPPTA

SEQ ID NO: 224461 - protein, 15 aa, Artificial Sequence
  Description of Artificial Sequence: Synthetic peptide
  Seed: LRMKWMMAMKYPITA
LRMKFMMKMRYPQTA

SEQ ID NO: 224462 - protein, 15 aa, Artificial Sequence
  Description of Artificial Sequence: Synthetic peptide
  Seed: LRMKWMMAMKYPITA
LRMKFMMKMRYPRTA

SEQ ID NO: 224463 - protein, 15 aa, Artificial Sequence
  Description of Artificial Sequence: Synthetic peptide
  Seed: LRMKWMMAMKYPITA
LRMKFMMKMRYPSTA

SEQ ID NO: 224464 - protein, 15 aa, Artificial Sequence
  Description of Artificial Sequence: Synthetic peptide
  Seed: LRMKWMMAMKYPITA
LRMKFMMKMRYPTTA

SEQ ID NO: 224465 - protein, 15 aa, Artificial Sequence
  Description of Artificial Sequence: Synthetic peptide
  Seed: LRMKWMMAMKYPITA
LRMKFMMKMRYPVTA

SEQ ID NO: 224466 - protein, 15 aa, Artificial Sequence
  Description of Artificial Sequence: Synthetic peptide
  Seed: LRMKWMMAMKYPITA
LRMKFMMKMRYPWTA

SEQ ID NO: 224467 - protein, 15 aa, Artificial Sequence
  Description of Artificial Sequence: Synthetic peptide
  Seed: LRMKWMMAMKYPITA
LRMKFMMKMRYPYTA

SEQ ID NO: 224468 - protein, 15 aa, Artificial Sequence
  Description of Artificial Sequence: Synthetic peptide
  Seed: LRMKWMMAMKYPITA
LRMKFMMKMSYPATA

SEQ ID NO: 224469 - protein, 15 aa, Artificial Sequence
  Description of Artificial Sequence: Synthetic peptide
  Seed: LRMKWMMAMKYPITA
LRMKFMMKMSYPCTA

SEQ ID NO: 224470 - protein, 15 aa, Artificial Sequence
  Description of Artificial Sequence: Synthetic peptide
  Seed: LRMKWMMAMKYPITA
LRMKFMMKMSYPFTA

SEQ ID NO: 224471 - protein, 15 aa, Artificial Sequence
  Description of Artificial Sequence: Synthetic peptide
  Seed: LRMKWMMAMKYPITA
LRMKFMMKMSYPGTA

SEQ ID NO: 224472 - protein, 15 aa, Artificial Sequence
  Description of Artificial Sequence: Synthetic peptide
  Seed: LRMKWMMAMKYPITA
LRMKFMMKMSYPHTA

SEQ ID NO: 224473 - protein, 15 aa, Artificial Sequence
  Description of Artificial Sequence: Synthetic peptide
  Seed: LRMKWMMAMKYPITA
LRMKFMMKMSYPITA

SEQ ID NO: 224474 - protein, 15 aa, Artificial Sequence
  Description of Artificial Sequence: Synthetic peptide
  Seed: LRMKWMMAMKYPITA
LRMKFMMKMSYPLTA

SEQ ID NO: 224475 - protein, 15 aa, Artificial Sequence
  Description of Artificial Sequence: Synthetic peptide
  Seed: LRMKWMMAMKYPITA
LRMKFMMKMSYPMTA

SEQ ID NO: 224476 - protein, 15 aa, Artificial Sequence
  Description of Artificial Sequence: Synthetic peptide
  Seed: LRMKWMMAMKYPITA
LRMKFMMKMSYPNTA

SEQ ID NO: 224477 - protein, 15 aa, Artificial Sequence
  Description of Artificial Sequence: Synthetic peptide
  Seed: LRMKWMMAMKYPITA
LRMKFMMKMSYPPTA

SEQ ID NO: 224478 - protein, 15 aa, Artificial Sequence
  Description of Artificial Sequence: Synthetic peptide
  Seed: LRMKWMMAMKYPITA
LRMKFMMKMSYPQTA

SEQ ID NO: 224479 - protein, 15 aa, Artificial Sequence
  Description of Artificial Sequence: Synthetic peptide
  Seed: LRMKWMMAMKYPITA
LRMKFMMKMSYPRTA

SEQ ID NO: 224480 - protein, 15 aa, Artificial Sequence
  Description of Artificial Sequence: Synthetic peptide
  Seed: LRMKWMMAMKYPITA
LRMKFMMKMSYPSTA

SEQ ID NO: 224481 - protein, 15 aa, Artificial Sequence
  Description of Artificial Sequence: Synthetic peptide
  Seed: LRMKWMMAMKYPITA
LRMKFMMKMSYPTTA

SEQ ID NO: 224482 - protein, 15 aa, Artificial Sequence
  Description of Artificial Sequence: Synthetic peptide
  Seed: LRMKWMMAMKYPITA
LRMKFMMKMSYPVTA

SEQ ID NO: 224483 - protein, 15 aa, Artificial Sequence
  Description of Artificial Sequence: Synthetic peptide
  Seed: LRMKWMMAMKYPITA
LRMKFMMKMSYPWTA

SEQ ID NO: 224484 - protein, 15 aa, Artificial Sequence
  Description of Artificial Sequence: Synthetic peptide
  Seed: LRMKWMMAMKYPITA
LRMKFMMKMSYPYTA

SEQ ID NO: 224485 - protein, 15 aa, Artificial Sequence
  Description of Artificial Sequence: Synthetic peptide
  Seed: LRMKWMMAMKYPITA
LRMKFMMKMTYPATA

SEQ ID NO: 224486 - protein, 15 aa, Artificial Sequence
  Description of Artificial Sequence: Synthetic peptide
  Seed: LRMKWMMAMKYPITA
LRMKFMMKMTYPCTA

SEQ ID NO: 224487 - protein, 15 aa, Artificial Sequence
  Description of Artificial Sequence: Synthetic peptide
  Seed: LRMKWMMAMKYPITA
LRMKFMMKMTYPETA

SEQ ID NO: 224488 - protein, 15 aa, Artificial Sequence
  Description of Artificial Sequence: Synthetic peptide
  Seed: LRMKWMMAMKYPITA
LRMKFMMKMTYPFTA

SEQ ID NO: 224489 - protein, 15 aa, Artificial Sequence
  Description of Artificial Sequence: Synthetic peptide
  Seed: LRMKWMMAMKYPITA
LRMKFMMKMTYPGTA

SEQ ID NO: 224490 - protein, 15 aa, Artificial Sequence
  Description of Artificial Sequence: Synthetic peptide
  Seed: LRMKWMMAMKYPITA
LRMKFMMKMTYPHTA

SEQ ID NO: 224491 - protein, 15 aa, Artificial Sequence
  Description of Artificial Sequence: Synthetic peptide
  Seed: LRMKWMMAMKYPITA
LRMKFMMKMTYPITA

SEQ ID NO: 224492 - protein, 15 aa, Artificial Sequence
  Description of Artificial Sequence: Synthetic peptide
  Seed: LRMKWMMAMKYPITA
LRMKFMMKMTYPKTA

SEQ ID NO: 224493 - protein, 15 aa, Artificial Sequence
  Description of Artificial Sequence: Synthetic peptide
  Seed: LRMKWMMAMKYPITA
LRMKFMMKMTYPLTA

SEQ ID NO: 224494 - protein, 15 aa, Artificial Sequence
  Description of Artificial Sequence: Synthetic peptide
  Seed: LRMKWMMAMKYPITA
LRMKFMMKMTYPMTA

SEQ ID NO: 224495 - protein, 15 aa, Artificial Sequence
  Description of Artificial Sequence: Synthetic peptide
  Seed: LRMKWMMAMKYPITA
LRMKFMMKMTYPNTA

SEQ ID NO: 224496 - protein, 15 aa, Artificial Sequence
  Description of Artificial Sequence: Synthetic peptide
  Seed: LRMKWMMAMKYPITA
LRMKFMMKMTYPPTA

SEQ ID NO: 224497 - protein, 15 aa, Artificial Sequence
  Description of Artificial Sequence: Synthetic peptide
  Seed: LRMKWMMAMKYPITA
LRMKFMMKMTYPQTA

SEQ ID NO: 224498 - protein, 15 aa, Artificial Sequence
  Description of Artificial Sequence: Synthetic peptide
  Seed: LRMKWMMAMKYPITA
LRMKFMMKMTYPRTA

SEQ ID NO: 224499 - protein, 15 aa, Artificial Sequence
  Description of Artificial Sequence: Synthetic peptide
  Seed: LRMKWMMAMKYPITA
LRMKFMMKMTYPSTA

SEQ ID NO: 224500 - protein, 15 aa, Artificial Sequence
  Description of Artificial Sequence: Synthetic peptide
  Seed: LRMKWMMAMKYPITA
LRMKFMMKMTYPTTA

SEQ ID NO: 224501 - protein, 15 aa, Artificial Sequence
  Description of Artificial Sequence: Synthetic peptide
  Seed: LRMKWMMAMKYPITA
LRMKFMMKMTYPVTA

SEQ ID NO: 224502 - protein, 15 aa, Artificial Sequence
  Description of Artificial Sequence: Synthetic peptide
  Seed: LRMKWMMAMKYPITA
LRMKFMMKMTYPWTA

SEQ ID NO: 224503 - protein, 15 aa, Artificial Sequence
  Description of Artificial Sequence: Synthetic peptide
  Seed: LRMKWMMAMKYPITA
LRMKFMMKMTYPYTA

SEQ ID NO: 224504 - protein, 15 aa, Artificial Sequence
  Description of Artificial Sequence: Synthetic peptide
  Seed: LRMKWMMAMKYPITA
LRMKFMMKMVYPATA

SEQ ID NO: 224505 - protein, 15 aa, Artificial Sequence
  Description of Artificial Sequence: Synthetic peptide
  Seed: LRMKWMMAMKYPITA
LRMKFMMKMVYPCTA

SEQ ID NO: 224506 - protein, 15 aa, Artificial Sequence
  Description of Artificial Sequence: Synthetic peptide
  Seed: LRMKWMMAMKYPITA
LRMKFMMKMVYPDTA

SEQ ID NO: 224507 - protein, 15 aa, Artificial Sequence
  Description of Artificial Sequence: Synthetic peptide
  Seed: LRMKWMMAMKYPITA
LRMKFMMKMVYPETA

SEQ ID NO: 224508 - protein, 15 aa, Artificial Sequence
  Description of Artificial Sequence: Synthetic peptide
  Seed: LRMKWMMAMKYPITA
LRMKFMMKMVYPFTA

SEQ ID NO: 224509 - protein, 15 aa, Artificial Sequence
  Description of Artificial Sequence: Synthetic peptide
  Seed: LRMKWMMAMKYPITA
LRMKFMMKMVYPGTA

SEQ ID NO: 224510 - protein, 15 aa, Artificial Sequence
  Description of Artificial Sequence: Synthetic peptide
  Seed: LRMKWMMAMKYPITA
LRMKFMMKMVYPHTA

SEQ ID NO: 224511 - protein, 15 aa, Artificial Sequence
  Description of Artificial Sequence: Synthetic peptide
  Seed: LRMKWMMAMKYPITA
LRMKFMMKMVYPITA

SEQ ID NO: 224512 - protein, 15 aa, Artificial Sequence
  Description of Artificial Sequence: Synthetic peptide
  Seed: LRMKWMMAMKYPITA
LRMKFMMKMVYPKTA

SEQ ID NO: 224513 - protein, 15 aa, Artificial Sequence
  Description of Artificial Sequence: Synthetic peptide
  Seed: LRMKWMMAMKYPITA
LRMKFMMKMVYPLTA

SEQ ID NO: 224514 - protein, 15 aa, Artificial Sequence
  Description of Artificial Sequence: Synthetic peptide
  Seed: LRMKWMMAMKYPITA
LRMKFMMKMVYPMTA

SEQ ID NO: 224515 - protein, 15 aa, Artificial Sequence
  Description of Artificial Sequence: Synthetic peptide
  Seed: LRMKWMMAMKYPITA
LRMKFMMKMVYPNTA

SEQ ID NO: 224516 - protein, 15 aa, Artificial Sequence
  Description of Artificial Sequence: Synthetic peptide
  Seed: LRMKWMMAMKYPITA
LRMKFMMKMVYPPTA

SEQ ID NO: 224517 - protein, 15 aa, Artificial Sequence
  Description of Artificial Sequence: Synthetic peptide
  Seed: LRMKWMMAMKYPITA
LRMKFMMKMVYPQTA

SEQ ID NO: 224518 - protein, 15 aa, Artificial Sequence
  Description of Artificial Sequence: Synthetic peptide
  Seed: LRMKWMMAMKYPITA
LRMKFMMKMVYPRTA

SEQ ID NO: 224519 - protein, 15 aa, Artificial Sequence
  Description of Artificial Sequence: Synthetic peptide
  Seed: LRMKWMMAMKYPITA
LRMKFMMKMVYPSTA

SEQ ID NO: 224520 - protein, 15 aa, Artificial Sequence
  Description of Artificial Sequence: Synthetic peptide
  Seed: LRMKWMMAMKYPITA
LRMKFMMKMVYPTTA

SEQ ID NO: 224521 - protein, 15 aa, Artificial Sequence
  Description of Artificial Sequence: Synthetic peptide
  Seed: LRMKWMMAMKYPITA
LRMKFMMKMVYPVTA

SEQ ID NO: 224522 - protein, 15 aa, Artificial Sequence
  Description of Artificial Sequence: Synthetic peptide
  Seed: LRMKWMMAMKYPITA
LRMKFMMKMVYPYTA

SEQ ID NO: 224523 - protein, 15 aa, Artificial Sequence
  Description of Artificial Sequence: Synthetic peptide
  Seed: LRMKWMMAMKYPITA
LRMKFMMLMAYPATA

SEQ ID NO: 224524 - protein, 15 aa, Artificial Sequence
  Description of Artificial Sequence: Synthetic peptide
  Seed: LRMKWMMAMKYPITA
LRMKFMMLMAYPCTA

SEQ ID NO: 224525 - protein, 15 aa, Artificial Sequence
  Description of Artificial Sequence: Synthetic peptide
  Seed: LRMKWMMAMKYPITA
LRMKFMMLMAYPDTA

SEQ ID NO: 224526 - protein, 15 aa, Artificial Sequence
  Description of Artificial Sequence: Synthetic peptide
  Seed: LRMKWMMAMKYPITA
LRMKFMMLMAYPETA

SEQ ID NO: 224527 - protein, 15 aa, Artificial Sequence
  Description of Artificial Sequence: Synthetic peptide
  Seed: LRMKWMMAMKYPITA
LRMKFMMLMAYPFTA

SEQ ID NO: 224528 - protein, 15 aa, Artificial Sequence
  Description of Artificial Sequence: Synthetic peptide
  Seed: LRMKWMMAMKYPITA
LRMKFMMLMAYPGTA

SEQ ID NO: 224529 - protein, 15 aa, Artificial Sequence
  Description of Artificial Sequence: Synthetic peptide
  Seed: LRMKWMMAMKYPITA
LRMKFMMLMAYPHTA

SEQ ID NO: 224530 - protein, 15 aa, Artificial Sequence
  Description of Artificial Sequence: Synthetic peptide
  Seed: LRMKWMMAMKYPITA
LRMKFMMLMAYPITA

SEQ ID NO: 224531 - protein, 15 aa, Artificial Sequence
  Description of Artificial Sequence: Synthetic peptide
  Seed: LRMKWMMAMKYPITA
LRMKFMMLMAYPKTA

SEQ ID NO: 224532 - protein, 15 aa, Artificial Sequence
  Description of Artificial Sequence: Synthetic peptide
  Seed: LRMKWMMAMKYPITA
LRMKFMMLMAYPLTA

SEQ ID NO: 224533 - protein, 15 aa, Artificial Sequence
  Description of Artificial Sequence: Synthetic peptide
  Seed: LRMKWMMAMKYPITA
LRMKFMMLMAYPMTA

SEQ ID NO: 224534 - protein, 15 aa, Artificial Sequence
  Description of Artificial Sequence: Synthetic peptide
  Seed: LRMKWMMAMKYPITA
LRMKFMMLMAYPNTA

SEQ ID NO: 224535 - protein, 15 aa, Artificial Sequence
  Description of Artificial Sequence: Synthetic peptide
  Seed: LRMKWMMAMKYPITA
LRMKFMMLMAYPPTA

SEQ ID NO: 224536 - protein, 15 aa, Artificial Sequence
  Description of Artificial Sequence: Synthetic peptide
  Seed: LRMKWMMAMKYPITA
LRMKFMMLMAYPQTA

SEQ ID NO: 224537 - protein, 15 aa, Artificial Sequence
  Description of Artificial Sequence: Synthetic peptide
  Seed: LRMKWMMAMKYPITA
LRMKFMMLMAYPRTA

SEQ ID NO: 224538 - protein, 15 aa, Artificial Sequence
  Description of Artificial Sequence: Synthetic peptide
  Seed: LRMKWMMAMKYPITA
LRMKFMMLMAYPSTA

SEQ ID NO: 224539 - protein, 15 aa, Artificial Sequence
  Description of Artificial Sequence: Synthetic peptide
  Seed: LRMKWMMAMKYPITA
LRMKFMMLMAYPTTA

SEQ ID NO: 224540 - protein, 15 aa, Artificial Sequence
  Description of Artificial Sequence: Synthetic peptide
  Seed: LRMKWMMAMKYPITA
LRMKFMMLMAYPVTA

SEQ ID NO: 224541 - protein, 15 aa, Artificial Sequence
  Description of Artificial Sequence: Synthetic peptide
  Seed: LRMKWMMAMKYPITA
LRMKFMMLMAYPWTA

SEQ ID NO: 224542 - protein, 15 aa, Artificial Sequence
  Description of Artificial Sequence: Synthetic peptide
  Seed: LRMKWMMAMKYPITA
LRMKFMMLMAYPYTA

SEQ ID NO: 224543 - protein, 15 aa, Artificial Sequence
  Description of Artificial Sequence: Synthetic peptide
  Seed: LRMKWMMAMKYPITA
LRMKFMMLMCYPATA

SEQ ID NO: 224544 - protein, 15 aa, Artificial Sequence
  Description of Artificial Sequence: Synthetic peptide
  Seed: LRMKWMMAMKYPITA
LRMKFMMLMCYPDTA

SEQ ID NO: 224545 - protein, 15 aa, Artificial Sequence
  Description of Artificial Sequence: Synthetic peptide
  Seed: LRMKWMMAMKYPITA
LRMKFMMLMCYPETA

SEQ ID NO: 224546 - protein, 15 aa, Artificial Sequence
  Description of Artificial Sequence: Synthetic peptide
  Seed: LRMKWMMAMKYPITA
LRMKFMMLMCYPGTA

SEQ ID NO: 224547 - protein, 15 aa, Artificial Sequence
  Description of Artificial Sequence: Synthetic peptide
  Seed: LRMKWMMAMKYPITA
LRMKFMMLMCYPHTA

SEQ ID NO: 224548 - protein, 15 aa, Artificial Sequence
  Description of Artificial Sequence: Synthetic peptide
  Seed: LRMKWMMAMKYPITA
LRMKFMMLMCYPITA

SEQ ID NO: 224549 - protein, 15 aa, Artificial Sequence
  Description of Artificial Sequence: Synthetic peptide
  Seed: LRMKWMMAMKYPITA
LRMKFMMLMCYPLTA

SEQ ID NO: 224550 - protein, 15 aa, Artificial Sequence
  Description of Artificial Sequence: Synthetic peptide
  Seed: LRMKWMMAMKYPITA
LRMKFMMLMCYPMTA

SEQ ID NO: 224551 - protein, 15 aa, Artificial Sequence
  Description of Artificial Sequence: Synthetic peptide
  Seed: LRMKWMMAMKYPITA
LRMKFMMLMCYPNTA

SEQ ID NO: 224552 - protein, 15 aa, Artificial Sequence
  Description of Artificial Sequence: Synthetic peptide
  Seed: LRMKWMMAMKYPITA
LRMKFMMLMCYPPTA

SEQ ID NO: 224553 - protein, 15 aa, Artificial Sequence
  Description of Artificial Sequence: Synthetic peptide
  Seed: LRMKWMMAMKYPITA
LRMKFMMLMCYPQTA

SEQ ID NO: 224554 - protein, 15 aa, Artificial Sequence
  Description of Artificial Sequence: Synthetic peptide
  Seed: LRMKWMMAMKYPITA
LRMKFMMLMCYPRTA

SEQ ID NO: 224555 - protein, 15 aa, Artificial Sequence
  Description of Artificial Sequence: Synthetic peptide
  Seed: LRMKWMMAMKYPITA
LRMKFMMLMCYPSTA

SEQ ID NO: 224556 - protein, 15 aa, Artificial Sequence
  Description of Artificial Sequence: Synthetic peptide
  Seed: LRMKWMMAMKYPITA
LRMKFMMLMCYPTTA

SEQ ID NO: 224557 - protein, 15 aa, Artificial Sequence
  Description of Artificial Sequence: Synthetic peptide
  Seed: LRMKWMMAMKYPITA
LRMKFMMLMCYPVTA

SEQ ID NO: 224558 - protein, 15 aa, Artificial Sequence
  Description of Artificial Sequence: Synthetic peptide
  Seed: LRMKWMMAMKYPITA
LRMKFMMLMDYPATA

SEQ ID NO: 224559 - protein, 15 aa, Artificial Sequence
  Description of Artificial Sequence: Synthetic peptide
  Seed: LRMKWMMAMKYPITA
LRMKFMMLMDYPCTA

SEQ ID NO: 224560 - protein, 15 aa, Artificial Sequence
  Description of Artificial Sequence: Synthetic peptide
  Seed: LRMKWMMAMKYPITA
LRMKFMMLMDYPDTA

SEQ ID NO: 224561 - protein, 15 aa, Artificial Sequence
  Description of Artificial Sequence: Synthetic peptide
  Seed: LRMKWMMAMKYPITA
LRMKFMMLMDYPETA

SEQ ID NO: 224562 - protein, 15 aa, Artificial Sequence
  Description of Artificial Sequence: Synthetic peptide
  Seed: LRMKWMMAMKYPITA
LRMKFMMLMDYPFTA

SEQ ID NO: 224563 - protein, 15 aa, Artificial Sequence
  Description of Artificial Sequence: Synthetic peptide
  Seed: LRMKWMMAMKYPITA
LRMKFMMLMDYPGTA

SEQ ID NO: 224564 - protein, 15 aa, Artificial Sequence
  Description of Artificial Sequence: Synthetic peptide
  Seed: LRMKWMMAMKYPITA
LRMKFMMLMDYPHTA

SEQ ID NO: 224565 - protein, 15 aa, Artificial Sequence
  Description of Artificial Sequence: Synthetic peptide
  Seed: LRMKWMMAMKYPITA
LRMKFMMLMDYPITA

SEQ ID NO: 224566 - protein, 15 aa, Artificial Sequence
  Description of Artificial Sequence: Synthetic peptide
  Seed: LRMKWMMAMKYPITA
LRMKFMMLMDYPLTA

SEQ ID NO: 224567 - protein, 15 aa, Artificial Sequence
  Description of Artificial Sequence: Synthetic peptide
  Seed: LRMKWMMAMKYPITA
LRMKFMMLMDYPMTA

SEQ ID NO: 224568 - protein, 15 aa, Artificial Sequence
  Description of Artificial Sequence: Synthetic peptide
  Seed: LRMKWMMAMKYPITA
LRMKFMMLMDYPNTA

SEQ ID NO: 224569 - protein, 15 aa, Artificial Sequence
  Description of Artificial Sequence: Synthetic peptide
  Seed: LRMKWMMAMKYPITA
LRMKFMMLMDYPPTA

SEQ ID NO: 224570 - protein, 15 aa, Artificial Sequence
  Description of Artificial Sequence: Synthetic peptide
  Seed: LRMKWMMAMKYPITA
LRMKFMMLMDYPQTA

SEQ ID NO: 224571 - protein, 15 aa, Artificial Sequence
  Description of Artificial Sequence: Synthetic peptide
  Seed: LRMKWMMAMKYPITA
LRMKFMMLMDYPSTA

SEQ ID NO: 224572 - protein, 15 aa, Artificial Sequence
  Description of Artificial Sequence: Synthetic peptide
  Seed: LRMKWMMAMKYPITA
LRMKFMMLMDYPTTA

SEQ ID NO: 224573 - protein, 15 aa, Artificial Sequence
  Description of Artificial Sequence: Synthetic peptide
  Seed: LRMKWMMAMKYPITA
LRMKFMMLMDYPVTA

SEQ ID NO: 224574 - protein, 15 aa, Artificial Sequence
  Description of Artificial Sequence: Synthetic peptide
  Seed: LRMKWMMAMKYPITA
LRMKFMMLMDYPYTA

SEQ ID NO: 224575 - protein, 15 aa, Artificial Sequence
  Description of Artificial Sequence: Synthetic peptide
  Seed: LRMKWMMAMKYPITA
LRMKFMMLMEYPATA

SEQ ID NO: 224576 - protein, 15 aa, Artificial Sequence
  Description of Artificial Sequence: Synthetic peptide
  Seed: LRMKWMMAMKYPITA
LRMKFMMLMEYPCTA

SEQ ID NO: 224577 - protein, 15 aa, Artificial Sequence
  Description of Artificial Sequence: Synthetic peptide
  Seed: LRMKWMMAMKYPITA
LRMKFMMLMEYPDTA

SEQ ID NO: 224578 - protein, 15 aa, Artificial Sequence
  Description of Artificial Sequence: Synthetic peptide
  Seed: LRMKWMMAMKYPITA
LRMKFMMLMEYPETA

SEQ ID NO: 224579 - protein, 15 aa, Artificial Sequence
  Description of Artificial Sequence: Synthetic peptide
  Seed: LRMKWMMAMKYPITA
LRMKFMMLMEYPFTA

SEQ ID NO: 224580 - protein, 15 aa, Artificial Sequence
  Description of Artificial Sequence: Synthetic peptide
  Seed: LRMKWMMAMKYPITA
LRMKFMMLMEYPGTA

SEQ ID NO: 224581 - protein, 15 aa, Artificial Sequence
  Description of Artificial Sequence: Synthetic peptide
  Seed: LRMKWMMAMKYPITA
LRMKFMMLMEYPHTA

SEQ ID NO: 224582 - protein, 15 aa, Artificial Sequence
  Description of Artificial Sequence: Synthetic peptide
  Seed: LRMKWMMAMKYPITA
LRMKFMMLMEYPITA

SEQ ID NO: 224583 - protein, 15 aa, Artificial Sequence
  Description of Artificial Sequence: Synthetic peptide
  Seed: LRMKWMMAMKYPITA
LRMKFMMLMEYPLTA

SEQ ID NO: 224584 - protein, 15 aa, Artificial Sequence
  Description of Artificial Sequence: Synthetic peptide
  Seed: LRMKWMMAMKYPITA
LRMKFMMLMEYPMTA

SEQ ID NO: 224585 - protein, 15 aa, Artificial Sequence
  Description of Artificial Sequence: Synthetic peptide
  Seed: LRMKWMMAMKYPITA
LRMKFMMLMEYPNTA

SEQ ID NO: 224586 - protein, 15 aa, Artificial Sequence
  Description of Artificial Sequence: Synthetic peptide
  Seed: LRMKWMMAMKYPITA
LRMKFMMLMEYPPTA

SEQ ID NO: 224587 - protein, 15 aa, Artificial Sequence
  Description of Artificial Sequence: Synthetic peptide
  Seed: LRMKWMMAMKYPITA
LRMKFMMLMEYPQTA

SEQ ID NO: 224588 - protein, 15 aa, Artificial Sequence
  Description of Artificial Sequence: Synthetic peptide
  Seed: LRMKWMMAMKYPITA
LRMKFMMLMEYPRTA

SEQ ID NO: 224589 - protein, 15 aa, Artificial Sequence
  Description of Artificial Sequence: Synthetic peptide
  Seed: LRMKWMMAMKYPITA
LRMKFMMLMEYPSTA

SEQ ID NO: 224590 - protein, 15 aa, Artificial Sequence
  Description of Artificial Sequence: Synthetic peptide
  Seed: LRMKWMMAMKYPITA
LRMKFMMLMEYPTTA

SEQ ID NO: 224591 - protein, 15 aa, Artificial Sequence
  Description of Artificial Sequence: Synthetic peptide
  Seed: LRMKWMMAMKYPITA
LRMKFMMLMEYPVTA

SEQ ID NO: 224592 - protein, 15 aa, Artificial Sequence
  Description of Artificial Sequence: Synthetic peptide
  Seed: LRMKWMMAMKYPITA
LRMKFMMLMEYPYTA

SEQ ID NO: 224593 - protein, 15 aa, Artificial Sequence
  Description of Artificial Sequence: Synthetic peptide
  Seed: LRMKWMMAMKYPITA
LRMKFMMLMFYPATA

SEQ ID NO: 224594 - protein, 15 aa, Artificial Sequence
  Description of Artificial Sequence: Synthetic peptide
  Seed: LRMKWMMAMKYPITA
LRMKFMMLMFYPETA

SEQ ID NO: 224595 - protein, 15 aa, Artificial Sequence
  Description of Artificial Sequence: Synthetic peptide
  Seed: LRMKWMMAMKYPITA
LRMKFMMLMFYPHTA

SEQ ID NO: 224596 - protein, 15 aa, Artificial Sequence
  Description of Artificial Sequence: Synthetic peptide
  Seed: LRMKWMMAMKYPITA
LRMKFMMLMFYPITA

SEQ ID NO: 224597 - protein, 15 aa, Artificial Sequence
  Description of Artificial Sequence: Synthetic peptide
  Seed: LRMKWMMAMKYPITA
LRMKFMMLMFYPMTA

SEQ ID NO: 224598 - protein, 15 aa, Artificial Sequence
  Description of Artificial Sequence: Synthetic peptide
  Seed: LRMKWMMAMKYPITA
LRMKFMMLMFYPNTA

SEQ ID NO: 224599 - protein, 15 aa, Artificial Sequence
  Description of Artificial Sequence: Synthetic peptide
  Seed: LRMKWMMAMKYPITA
LRMKFMMLMFYPQTA

SEQ ID NO: 224600 - protein, 15 aa, Artificial Sequence
  Description of Artificial Sequence: Synthetic peptide
  Seed: LRMKWMMAMKYPITA
LRMKFMMLMFYPSTA

SEQ ID NO: 224601 - protein, 15 aa, Artificial Sequence
  Description of Artificial Sequence: Synthetic peptide
  Seed: LRMKWMMAMKYPITA
LRMKFMMLMFYPTTA

SEQ ID NO: 224602 - protein, 15 aa, Artificial Sequence
  Description of Artificial Sequence: Synthetic peptide
  Seed: LRMKWMMAMKYPITA
LRMKFMMLMFYPVTA

SEQ ID NO: 224603 - protein, 15 aa, Artificial Sequence
  Description of Artificial Sequence: Synthetic peptide
  Seed: LRMKWMMAMKYPITA
LRMKFMMLMGYPATA

SEQ ID NO: 224604 - protein, 15 aa, Artificial Sequence
  Description of Artificial Sequence: Synthetic peptide
  Seed: LRMKWMMAMKYPITA
LRMKFMMLMGYPCTA

SEQ ID NO: 224605 - protein, 15 aa, Artificial Sequence
  Description of Artificial Sequence: Synthetic peptide
  Seed: LRMKWMMAMKYPITA
LRMKFMMLMGYPDTA

SEQ ID NO: 224606 - protein, 15 aa, Artificial Sequence
  Description of Artificial Sequence: Synthetic peptide
  Seed: LRMKWMMAMKYPITA
LRMKFMMLMGYPETA

SEQ ID NO: 224607 - protein, 15 aa, Artificial Sequence
  Description of Artificial Sequence: Synthetic peptide
  Seed: LRMKWMMAMKYPITA
LRMKFMMLMGYPFTA

SEQ ID NO: 224608 - protein, 15 aa, Artificial Sequence
  Description of Artificial Sequence: Synthetic peptide
  Seed: LRMKWMMAMKYPITA
LRMKFMMLMGYPGTA

SEQ ID NO: 224609 - protein, 15 aa, Artificial Sequence
  Description of Artificial Sequence: Synthetic peptide
  Seed: LRMKWMMAMKYPITA
LRMKFMMLMGYPHTA

SEQ ID NO: 224610 - protein, 15 aa, Artificial Sequence
  Description of Artificial Sequence: Synthetic peptide
  Seed: LRMKWMMAMKYPITA
LRMKFMMLMGYPITA

SEQ ID NO: 224611 - protein, 15 aa, Artificial Sequence
  Description of Artificial Sequence: Synthetic peptide
  Seed: LRMKWMMAMKYPITA
LRMKFMMLMGYPKTA

SEQ ID NO: 224612 - protein, 15 aa, Artificial Sequence
  Description of Artificial Sequence: Synthetic peptide
  Seed: LRMKWMMAMKYPITA
LRMKFMMLMGYPLTA

SEQ ID NO: 224613 - protein, 15 aa, Artificial Sequence
  Description of Artificial Sequence: Synthetic peptide
  Seed: LRMKWMMAMKYPITA
LRMKFMMLMGYPMTA

SEQ ID NO: 224614 - protein, 15 aa, Artificial Sequence
  Description of Artificial Sequence: Synthetic peptide
  Seed: LRMKWMMAMKYPITA
LRMKFMMLMGYPNTA

SEQ ID NO: 224615 - protein, 15 aa, Artificial Sequence
  Description of Artificial Sequence: Synthetic peptide
  Seed: LRMKWMMAMKYPITA
LRMKFMMLMGYPPTA

SEQ ID NO: 224616 - protein, 15 aa, Artificial Sequence
  Description of Artificial Sequence: Synthetic peptide
  Seed: LRMKWMMAMKYPITA
LRMKFMMLMGYPQTA

SEQ ID NO: 224617 - protein, 15 aa, Artificial Sequence
  Description of Artificial Sequence: Synthetic peptide
  Seed: LRMKWMMAMKYPITA
LRMKFMMLMGYPRTA

SEQ ID NO: 224618 - protein, 15 aa, Artificial Sequence
  Description of Artificial Sequence: Synthetic peptide
  Seed: LRMKWMMAMKYPITA
LRMKFMMLMGYPSTA

SEQ ID NO: 224619 - protein, 15 aa, Artificial Sequence
  Description of Artificial Sequence: Synthetic peptide
  Seed: LRMKWMMAMKYPITA
LRMKFMMLMGYPTTA

SEQ ID NO: 224620 - protein, 15 aa, Artificial Sequence
  Description of Artificial Sequence: Synthetic peptide
  Seed: LRMKWMMAMKYPITA
LRMKFMMLMGYPVTA

SEQ ID NO: 224621 - protein, 15 aa, Artificial Sequence
  Description of Artificial Sequence: Synthetic peptide
  Seed: LRMKWMMAMKYPITA
LRMKFMMLMGYPWTA

SEQ ID NO: 224622 - protein, 15 aa, Artificial Sequence
  Description of Artificial Sequence: Synthetic peptide
  Seed: LRMKWMMAMKYPITA
LRMKFMMLMGYPYTA

SEQ ID NO: 224623 - protein, 15 aa, Artificial Sequence
  Description of Artificial Sequence: Synthetic peptide
  Seed: LRMKWMMAMKYPITA
LRMKFMMLMHYPATA

SEQ ID NO: 224624 - protein, 15 aa, Artificial Sequence
  Description of Artificial Sequence: Synthetic peptide
  Seed: LRMKWMMAMKYPITA
LRMKFMMLMHYPCTA

SEQ ID NO: 224625 - protein, 15 aa, Artificial Sequence
  Description of Artificial Sequence: Synthetic peptide
  Seed: LRMKWMMAMKYPITA
LRMKFMMLMHYPDTA

SEQ ID NO: 224626 - protein, 15 aa, Artificial Sequence
  Description of Artificial Sequence: Synthetic peptide
  Seed: LRMKWMMAMKYPITA
LRMKFMMLMHYPETA

SEQ ID NO: 224627 - protein, 15 aa, Artificial Sequence
  Description of Artificial Sequence: Synthetic peptide
  Seed: LRMKWMMAMKYPITA
LRMKFMMLMHYPFTA

SEQ ID NO: 224628 - protein, 15 aa, Artificial Sequence
  Description of Artificial Sequence: Synthetic peptide
  Seed: LRMKWMMAMKYPITA
LRMKFMMLMHYPGTA

SEQ ID NO: 224629 - protein, 15 aa, Artificial Sequence
  Description of Artificial Sequence: Synthetic peptide
  Seed: LRMKWMMAMKYPITA
LRMKFMMLMHYPHTA

SEQ ID NO: 224630 - protein, 15 aa, Artificial Sequence
  Description of Artificial Sequence: Synthetic peptide
  Seed: LRMKWMMAMKYPITA
LRMKFMMLMHYPITA

SEQ ID NO: 224631 - protein, 15 aa, Artificial Sequence
  Description of Artificial Sequence: Synthetic peptide
  Seed: LRMKWMMAMKYPITA
LRMKFMMLMHYPKTA

SEQ ID NO: 224632 - protein, 15 aa, Artificial Sequence
  Description of Artificial Sequence: Synthetic peptide
  Seed: LRMKWMMAMKYPITA
LRMKFMMLMHYPLTA

SEQ ID NO: 224633 - protein, 15 aa, Artificial Sequence
  Description of Artificial Sequence: Synthetic peptide
  Seed: LRMKWMMAMKYPITA
LRMKFMMLMHYPMTA

SEQ ID NO: 224634 - protein, 15 aa, Artificial Sequence
  Description of Artificial Sequence: Synthetic peptide
  Seed: LRMKWMMAMKYPITA
LRMKFMMLMHYPNTA

SEQ ID NO: 224635 - protein, 15 aa, Artificial Sequence
  Description of Artificial Sequence: Synthetic peptide
  Seed: LRMKWMMAMKYPITA
LRMKFMMLMHYPPTA

SEQ ID NO: 224636 - protein, 15 aa, Artificial Sequence
  Description of Artificial Sequence: Synthetic peptide
  Seed: LRMKWMMAMKYPITA
LRMKFMMLMHYPQTA

SEQ ID NO: 224637 - protein, 15 aa, Artificial Sequence
  Description of Artificial Sequence: Synthetic peptide
  Seed: LRMKWMMAMKYPITA
LRMKFMMLMHYPRTA

SEQ ID NO: 224638 - protein, 15 aa, Artificial Sequence
  Description of Artificial Sequence: Synthetic peptide
  Seed: LRMKWMMAMKYPITA
LRMKFMMLMHYPSTA

SEQ ID NO: 224639 - protein, 15 aa, Artificial Sequence
  Description of Artificial Sequence: Synthetic peptide
  Seed: LRMKWMMAMKYPITA
LRMKFMMLMHYPTTA

SEQ ID NO: 224640 - protein, 15 aa, Artificial Sequence
  Description of Artificial Sequence: Synthetic peptide
  Seed: LRMKWMMAMKYPITA
LRMKFMMLMHYPVTA

SEQ ID NO: 224641 - protein, 15 aa, Artificial Sequence
  Description of Artificial Sequence: Synthetic peptide
  Seed: LRMKWMMAMKYPITA
LRMKFMMLMHYPYTA

SEQ ID NO: 224642 - protein, 15 aa, Artificial Sequence
  Description of Artificial Sequence: Synthetic peptide
  Seed: LRMKWMMAMKYPITA
LRMKFMMLMIYPATA

SEQ ID NO: 224643 - protein, 15 aa, Artificial Sequence
  Description of Artificial Sequence: Synthetic peptide
  Seed: LRMKWMMAMKYPITA
LRMKFMMLMIYPCTA

SEQ ID NO: 224644 - protein, 15 aa, Artificial Sequence
  Description of Artificial Sequence: Synthetic peptide
  Seed: LRMKWMMAMKYPITA
LRMKFMMLMIYPDTA

SEQ ID NO: 224645 - protein, 15 aa, Artificial Sequence
  Description of Artificial Sequence: Synthetic peptide
  Seed: LRMKWMMAMKYPITA
LRMKFMMLMIYPETA

SEQ ID NO: 224646 - protein, 15 aa, Artificial Sequence
  Description of Artificial Sequence: Synthetic peptide
  Seed: LRMKWMMAMKYPITA
LRMKFMMLMIYPFTA

SEQ ID NO: 224647 - protein, 15 aa, Artificial Sequence
  Description of Artificial Sequence: Synthetic peptide
  Seed: LRMKWMMAMKYPITA
LRMKFMMLMIYPGTA

SEQ ID NO: 224648 - protein, 15 aa, Artificial Sequence
  Description of Artificial Sequence: Synthetic peptide
  Seed: LRMKWMMAMKYPITA
LRMKFMMLMIYPHTA

SEQ ID NO: 224649 - protein, 15 aa, Artificial Sequence
  Description of Artificial Sequence: Synthetic peptide
  Seed: LRMKWMMAMKYPITA
LRMKFMMLMIYPITA

SEQ ID NO: 224650 - protein, 15 aa, Artificial Sequence
  Description of Artificial Sequence: Synthetic peptide
  Seed: LRMKWMMAMKYPITA
LRMKFMMLMIYPKTA

SEQ ID NO: 224651 - protein, 15 aa, Artificial Sequence
  Description of Artificial Sequence: Synthetic peptide
  Seed: LRMKWMMAMKYPITA
LRMKFMMLMIYPLTA

SEQ ID NO: 224652 - protein, 15 aa, Artificial Sequence
  Description of Artificial Sequence: Synthetic peptide
  Seed: LRMKWMMAMKYPITA
LRMKFMMLMIYPMTA

SEQ ID NO: 224653 - protein, 15 aa, Artificial Sequence
  Description of Artificial Sequence: Synthetic peptide
  Seed: LRMKWMMAMKYPITA
LRMKFMMLMIYPNTA

SEQ ID NO: 224654 - protein, 15 aa, Artificial Sequence
  Description of Artificial Sequence: Synthetic peptide
  Seed: LRMKWMMAMKYPITA
LRMKFMMLMIYPPTA

SEQ ID NO: 224655 - protein, 15 aa, Artificial Sequence
  Description of Artificial Sequence: Synthetic peptide
  Seed: LRMKWMMAMKYPITA
LRMKFMMLMIYPQTA

SEQ ID NO: 224656 - protein, 15 aa, Artificial Sequence
  Description of Artificial Sequence: Synthetic peptide
  Seed: LRMKWMMAMKYPITA
LRMKFMMLMIYPRTA

SEQ ID NO: 224657 - protein, 15 aa, Artificial Sequence
  Description of Artificial Sequence: Synthetic peptide
  Seed: LRMKWMMAMKYPITA
LRMKFMMLMIYPSTA

SEQ ID NO: 224658 - protein, 15 aa, Artificial Sequence
  Description of Artificial Sequence: Synthetic peptide
  Seed: LRMKWMMAMKYPITA
LRMKFMMLMIYPTTA

SEQ ID NO: 224659 - protein, 15 aa, Artificial Sequence
  Description of Artificial Sequence: Synthetic peptide
  Seed: LRMKWMMAMKYPITA
LRMKFMMLMIYPVTA

SEQ ID NO: 224660 - protein, 15 aa, Artificial Sequence
  Description of Artificial Sequence: Synthetic peptide
  Seed: LRMKWMMAMKYPITA
LRMKFMMLMIYPYTA

SEQ ID NO: 224661 - protein, 15 aa, Artificial Sequence
  Description of Artificial Sequence: Synthetic peptide
  Seed: LRMKWMMAMKYPITA
LRMKFMMLMKYPATA

SEQ ID NO: 224662 - protein, 15 aa, Artificial Sequence
  Description of Artificial Sequence: Synthetic peptide
  Seed: LRMKWMMAMKYPITA
LRMKFMMLMKYPCTA

SEQ ID NO: 224663 - protein, 15 aa, Artificial Sequence
  Description of Artificial Sequence: Synthetic peptide
  Seed: LRMKWMMAMKYPITA
LRMKFMMLMKYPDTA

SEQ ID NO: 224664 - protein, 15 aa, Artificial Sequence
  Description of Artificial Sequence: Synthetic peptide
  Seed: LRMKWMMAMKYPITA
LRMKFMMLMKYPETA

SEQ ID NO: 224665 - protein, 15 aa, Artificial Sequence
  Description of Artificial Sequence: Synthetic peptide
  Seed: LRMKWMMAMKYPITA
LRMKFMMLMKYPFTA

SEQ ID NO: 224666 - protein, 15 aa, Artificial Sequence
  Description of Artificial Sequence: Synthetic peptide
  Seed: LRMKWMMAMKYPITA
LRMKFMMLMKYPGTA

SEQ ID NO: 224667 - protein, 15 aa, Artificial Sequence
  Description of Artificial Sequence: Synthetic peptide
  Seed: LRMKWMMAMKYPITA
LRMKFMMLMKYPHTA

SEQ ID NO: 224668 - protein, 15 aa, Artificial Sequence
  Description of Artificial Sequence: Synthetic peptide
  Seed: LRMKWMMAMKYPITA
LRMKFMMLMKYPITA

SEQ ID NO: 224669 - protein, 15 aa, Artificial Sequence
  Description of Artificial Sequence: Synthetic peptide
  Seed: LRMKWMMAMKYPITA
LRMKFMMLMKYPKTA

SEQ ID NO: 224670 - protein, 15 aa, Artificial Sequence
  Description of Artificial Sequence: Synthetic peptide
  Seed: LRMKWMMAMKYPITA
LRMKFMMLMKYPLTA

SEQ ID NO: 224671 - protein, 15 aa, Artificial Sequence
  Description of Artificial Sequence: Synthetic peptide
  Seed: LRMKWMMAMKYPITA
LRMKFMMLMKYPMTA

SEQ ID NO: 224672 - protein, 15 aa, Artificial Sequence
  Description of Artificial Sequence: Synthetic peptide
  Seed: LRMKWMMAMKYPITA
LRMKFMMLMKYPNTA

SEQ ID NO: 224673 - protein, 15 aa, Artificial Sequence
  Description of Artificial Sequence: Synthetic peptide
  Seed: LRMKWMMAMKYPITA
LRMKFMMLMKYPPTA

SEQ ID NO: 224674 - protein, 15 aa, Artificial Sequence
  Description of Artificial Sequence: Synthetic peptide
  Seed: LRMKWMMAMKYPITA
LRMKFMMLMKYPQTA

SEQ ID NO: 224675 - protein, 15 aa, Artificial Sequence
  Description of Artificial Sequence: Synthetic peptide
  Seed: LRMKWMMAMKYPITA
LRMKFMMLMKYPRTA

SEQ ID NO: 224676 - protein, 15 aa, Artificial Sequence
  Description of Artificial Sequence: Synthetic peptide
  Seed: LRMKWMMAMKYPITA
LRMKFMMLMKYPSTA

SEQ ID NO: 224677 - protein, 15 aa, Artificial Sequence
  Description of Artificial Sequence: Synthetic peptide
  Seed: LRMKWMMAMKYPITA
LRMKFMMLMKYPTTA

SEQ ID NO: 224678 - protein, 15 aa, Artificial Sequence
  Description of Artificial Sequence: Synthetic peptide
  Seed: LRMKWMMAMKYPITA
LRMKFMMLMKYPVTA

SEQ ID NO: 224679 - protein, 15 aa, Artificial Sequence
  Description of Artificial Sequence: Synthetic peptide
  Seed: LRMKWMMAMKYPITA
LRMKFMMLMKYPWTA

SEQ ID NO: 224680 - protein, 15 aa, Artificial Sequence
  Description of Artificial Sequence: Synthetic peptide
  Seed: LRMKWMMAMKYPITA
LRMKFMMLMKYPYTA

SEQ ID NO: 224681 - protein, 15 aa, Artificial Sequence
  Description of Artificial Sequence: Synthetic peptide
  Seed: LRMKWMMAMKYPITA
LRMKFMMLMLYPATA

SEQ ID NO: 224682 - protein, 15 aa, Artificial Sequence
  Description of Artificial Sequence: Synthetic peptide
  Seed: LRMKWMMAMKYPITA
LRMKFMMLMLYPCTA

SEQ ID NO: 224683 - protein, 15 aa, Artificial Sequence
  Description of Artificial Sequence: Synthetic peptide
  Seed: LRMKWMMAMKYPITA
LRMKFMMLMLYPDTA

SEQ ID NO: 224684 - protein, 15 aa, Artificial Sequence
  Description of Artificial Sequence: Synthetic peptide
  Seed: LRMKWMMAMKYPITA
LRMKFMMLMLYPETA

SEQ ID NO: 224685 - protein, 15 aa, Artificial Sequence
  Description of Artificial Sequence: Synthetic peptide
  Seed: LRMKWMMAMKYPITA
LRMKFMMLMLYPGTA

SEQ ID NO: 224686 - protein, 15 aa, Artificial Sequence
  Description of Artificial Sequence: Synthetic peptide
  Seed: LRMKWMMAMKYPITA
LRMKFMMLMLYPHTA

SEQ ID NO: 224687 - protein, 15 aa, Artificial Sequence
  Description of Artificial Sequence: Synthetic peptide
  Seed: LRMKWMMAMKYPITA
LRMKFMMLMLYPITA

SEQ ID NO: 224688 - protein, 15 aa, Artificial Sequence
  Description of Artificial Sequence: Synthetic peptide
  Seed: LRMKWMMAMKYPITA
LRMKFMMLMLYPLTA

SEQ ID NO: 224689 - protein, 15 aa, Artificial Sequence
  Description of Artificial Sequence: Synthetic peptide
  Seed: LRMKWMMAMKYPITA
LRMKFMMLMLYPMTA

SEQ ID NO: 224690 - protein, 15 aa, Artificial Sequence
  Description of Artificial Sequence: Synthetic peptide
  Seed: LRMKWMMAMKYPITA
LRMKFMMLMLYPNTA

SEQ ID NO: 224691 - protein, 15 aa, Artificial Sequence
  Description of Artificial Sequence: Synthetic peptide
  Seed: LRMKWMMAMKYPITA
LRMKFMMLMLYPQTA

SEQ ID NO: 224692 - protein, 15 aa, Artificial Sequence
  Description of Artificial Sequence: Synthetic peptide
  Seed: LRMKWMMAMKYPITA
LRMKFMMLMLYPSTA

SEQ ID NO: 224693 - protein, 15 aa, Artificial Sequence
  Description of Artificial Sequence: Synthetic peptide
  Seed: LRMKWMMAMKYPITA
LRMKFMMLMLYPTTA

SEQ ID NO: 224694 - protein, 15 aa, Artificial Sequence
  Description of Artificial Sequence: Synthetic peptide
  Seed: LRMKWMMAMKYPITA
LRMKFMMLMLYPVTA

SEQ ID NO: 224695 - protein, 15 aa, Artificial Sequence
  Description of Artificial Sequence: Synthetic peptide
  Seed: LRMKWMMAMKYPITA
LRMKFMMLMMYPATA

SEQ ID NO: 224696 - protein, 15 aa, Artificial Sequence
  Description of Artificial Sequence: Synthetic peptide
  Seed: LRMKWMMAMKYPITA
LRMKFMMLMMYPCTA

SEQ ID NO: 224697 - protein, 15 aa, Artificial Sequence
  Description of Artificial Sequence: Synthetic peptide
  Seed: LRMKWMMAMKYPITA
LRMKFMMLMMYPDTA

SEQ ID NO: 224698 - protein, 15 aa, Artificial Sequence
  Description of Artificial Sequence: Synthetic peptide
  Seed: LRMKWMMAMKYPITA
LRMKFMMLMMYPETA

SEQ ID NO: 224699 - protein, 15 aa, Artificial Sequence
  Description of Artificial Sequence: Synthetic peptide
  Seed: LRMKWMMAMKYPITA
LRMKFMMLMMYPFTA

SEQ ID NO: 224700 - protein, 15 aa, Artificial Sequence
  Description of Artificial Sequence: Synthetic peptide
  Seed: LRMKWMMAMKYPITA
LRMKFMMLMMYPGTA

SEQ ID NO: 224701 - protein, 15 aa, Artificial Sequence
  Description of Artificial Sequence: Synthetic peptide
  Seed: LRMKWMMAMKYPITA
LRMKFMMLMMYPITA

SEQ ID NO: 224702 - protein, 15 aa, Artificial Sequence
  Description of Artificial Sequence: Synthetic peptide
  Seed: LRMKWMMAMKYPITA
LRMKFMMLMMYPLTA

SEQ ID NO: 224703 - protein, 15 aa, Artificial Sequence
  Description of Artificial Sequence: Synthetic peptide
  Seed: LRMKWMMAMKYPITA
LRMKFMMLMMYPMTA

SEQ ID NO: 224704 - protein, 15 aa, Artificial Sequence
  Description of Artificial Sequence: Synthetic peptide
  Seed: LRMKWMMAMKYPITA
LRMKFMMLMMYPNTA

SEQ ID NO: 224705 - protein, 15 aa, Artificial Sequence
  Description of Artificial Sequence: Synthetic peptide
  Seed: LRMKWMMAMKYPITA
LRMKFMMLMMYPQTA

SEQ ID NO: 224706 - protein, 15 aa, Artificial Sequence
  Description of Artificial Sequence: Synthetic peptide
  Seed: LRMKWMMAMKYPITA
LRMKFMMLMMYPRTA

SEQ ID NO: 224707 - protein, 15 aa, Artificial Sequence
  Description of Artificial Sequence: Synthetic peptide
  Seed: LRMKWMMAMKYPITA
LRMKFMMLMMYPSTA

SEQ ID NO: 224708 - protein, 15 aa, Artificial Sequence
  Description of Artificial Sequence: Synthetic peptide
  Seed: LRMKWMMAMKYPITA
LRMKFMMLMMYPTTA

SEQ ID NO: 224709 - protein, 15 aa, Artificial Sequence
  Description of Artificial Sequence: Synthetic peptide
  Seed: LRMKWMMAMKYPITA
LRMKFMMLMMYPVTA

SEQ ID NO: 224710 - protein, 15 aa, Artificial Sequence
  Description of Artificial Sequence: Synthetic peptide
  Seed: LRMKWMMAMKYPITA
LRMKFMMLMMYPYTA

SEQ ID NO: 224711 - protein, 15 aa, Artificial Sequence
  Description of Artificial Sequence: Synthetic peptide
  Seed: LRMKWMMAMKYPITA
LRMKFMMLMNYPATA

SEQ ID NO: 224712 - protein, 15 aa, Artificial Sequence
  Description of Artificial Sequence: Synthetic peptide
  Seed: LRMKWMMAMKYPITA
LRMKFMMLMNYPCTA

SEQ ID NO: 224713 - protein, 15 aa, Artificial Sequence
  Description of Artificial Sequence: Synthetic peptide
  Seed: LRMKWMMAMKYPITA
LRMKFMMLMNYPDTA

SEQ ID NO: 224714 - protein, 15 aa, Artificial Sequence
  Description of Artificial Sequence: Synthetic peptide
  Seed: LRMKWMMAMKYPITA
LRMKFMMLMNYPETA

SEQ ID NO: 224715 - protein, 15 aa, Artificial Sequence
  Description of Artificial Sequence: Synthetic peptide
  Seed: LRMKWMMAMKYPITA
LRMKFMMLMNYPFTA

SEQ ID NO: 224716 - protein, 15 aa, Artificial Sequence
  Description of Artificial Sequence: Synthetic peptide
  Seed: LRMKWMMAMKYPITA
LRMKFMMLMNYPGTA

SEQ ID NO: 224717 - protein, 15 aa, Artificial Sequence
  Description of Artificial Sequence: Synthetic peptide
  Seed: LRMKWMMAMKYPITA
LRMKFMMLMNYPHTA

SEQ ID NO: 224718 - protein, 15 aa, Artificial Sequence
  Description of Artificial Sequence: Synthetic peptide
  Seed: LRMKWMMAMKYPITA
LRMKFMMLMNYPITA

SEQ ID NO: 224719 - protein, 15 aa, Artificial Sequence
  Description of Artificial Sequence: Synthetic peptide
  Seed: LRMKWMMAMKYPITA
LRMKFMMLMNYPKTA

SEQ ID NO: 224720 - protein, 15 aa, Artificial Sequence
  Description of Artificial Sequence: Synthetic peptide
  Seed: LRMKWMMAMKYPITA
LRMKFMMLMNYPLTA

SEQ ID NO: 224721 - protein, 15 aa, Artificial Sequence
  Description of Artificial Sequence: Synthetic peptide
  Seed: LRMKWMMAMKYPITA
LRMKFMMLMNYPMTA

SEQ ID NO: 224722 - protein, 15 aa, Artificial Sequence
  Description of Artificial Sequence: Synthetic peptide
  Seed: LRMKWMMAMKYPITA
LRMKFMMLMNYPNTA

SEQ ID NO: 224723 - protein, 15 aa, Artificial Sequence
  Description of Artificial Sequence: Synthetic peptide
  Seed: LRMKWMMAMKYPITA
LRMKFMMLMNYPPTA

SEQ ID NO: 224724 - protein, 15 aa, Artificial Sequence
  Description of Artificial Sequence: Synthetic peptide
  Seed: LRMKWMMAMKYPITA
LRMKFMMLMNYPQTA

SEQ ID NO: 224725 - protein, 15 aa, Artificial Sequence
  Description of Artificial Sequence: Synthetic peptide
  Seed: LRMKWMMAMKYPITA
LRMKFMMLMNYPRTA

SEQ ID NO: 224726 - protein, 15 aa, Artificial Sequence
  Description of Artificial Sequence: Synthetic peptide
  Seed: LRMKWMMAMKYPITA
LRMKFMMLMNYPSTA

SEQ ID NO: 224727 - protein, 15 aa, Artificial Sequence
  Description of Artificial Sequence: Synthetic peptide
  Seed: LRMKWMMAMKYPITA
LRMKFMMLMNYPTTA

SEQ ID NO: 224728 - protein, 15 aa, Artificial Sequence
  Description of Artificial Sequence: Synthetic peptide
  Seed: LRMKWMMAMKYPITA
LRMKFMMLMNYPVTA

SEQ ID NO: 224729 - protein, 15 aa, Artificial Sequence
  Description of Artificial Sequence: Synthetic peptide
  Seed: LRMKWMMAMKYPITA
LRMKFMMLMNYPWTA

SEQ ID NO: 224730 - protein, 15 aa, Artificial Sequence
  Description of Artificial Sequence: Synthetic peptide
  Seed: LRMKWMMAMKYPITA
LRMKFMMLMNYPYTA

SEQ ID NO: 224731 - protein, 15 aa, Artificial Sequence
  Description of Artificial Sequence: Synthetic peptide
  Seed: LRMKWMMAMKYPITA
LRMKFMMLMPYPATA

SEQ ID NO: 224732 - protein, 15 aa, Artificial Sequence
  Description of Artificial Sequence: Synthetic peptide
  Seed: LRMKWMMAMKYPITA
LRMKFMMLMPYPCTA

SEQ ID NO: 224733 - protein, 15 aa, Artificial Sequence
  Description of Artificial Sequence: Synthetic peptide
  Seed: LRMKWMMAMKYPITA
LRMKFMMLMPYPDTA

SEQ ID NO: 224734 - protein, 15 aa, Artificial Sequence
  Description of Artificial Sequence: Synthetic peptide
  Seed: LRMKWMMAMKYPITA
LRMKFMMLMPYPETA

SEQ ID NO: 224735 - protein, 15 aa, Artificial Sequence
  Description of Artificial Sequence: Synthetic peptide
  Seed: LRMKWMMAMKYPITA
LRMKFMMLMPYPFTA

SEQ ID NO: 224736 - protein, 15 aa, Artificial Sequence
  Description of Artificial Sequence: Synthetic peptide
  Seed: LRMKWMMAMKYPITA
LRMKFMMLMPYPGTA

SEQ ID NO: 224737 - protein, 15 aa, Artificial Sequence
  Description of Artificial Sequence: Synthetic peptide
  Seed: LRMKWMMAMKYPITA
LRMKFMMLMPYPHTA

SEQ ID NO: 224738 - protein, 15 aa, Artificial Sequence
  Description of Artificial Sequence: Synthetic peptide
  Seed: LRMKWMMAMKYPITA
LRMKFMMLMPYPITA

SEQ ID NO: 224739 - protein, 15 aa, Artificial Sequence
  Description of Artificial Sequence: Synthetic peptide
  Seed: LRMKWMMAMKYPITA
LRMKFMMLMPYPKTA

SEQ ID NO: 224740 - protein, 15 aa, Artificial Sequence
  Description of Artificial Sequence: Synthetic peptide
  Seed: LRMKWMMAMKYPITA
LRMKFMMLMPYPLTA

SEQ ID NO: 224741 - protein, 15 aa, Artificial Sequence
  Description of Artificial Sequence: Synthetic peptide
  Seed: LRMKWMMAMKYPITA
LRMKFMMLMPYPMTA

SEQ ID NO: 224742 - protein, 15 aa, Artificial Sequence
  Description of Artificial Sequence: Synthetic peptide
  Seed: LRMKWMMAMKYPITA
LRMKFMMLMPYPNTA

SEQ ID NO: 224743 - protein, 15 aa, Artificial Sequence
  Description of Artificial Sequence: Synthetic peptide
  Seed: LRMKWMMAMKYPITA
LRMKFMMLMPYPPTA

SEQ ID NO: 224744 - protein, 15 aa, Artificial Sequence
  Description of Artificial Sequence: Synthetic peptide
  Seed: LRMKWMMAMKYPITA
LRMKFMMLMPYPQTA

SEQ ID NO: 224745 - protein, 15 aa, Artificial Sequence
  Description of Artificial Sequence: Synthetic peptide
  Seed: LRMKWMMAMKYPITA
LRMKFMMLMPYPRTA

SEQ ID NO: 224746 - protein, 15 aa, Artificial Sequence
  Description of Artificial Sequence: Synthetic peptide
  Seed: LRMKWMMAMKYPITA
LRMKFMMLMPYPSTA

SEQ ID NO: 224747 - protein, 15 aa, Artificial Sequence
  Description of Artificial Sequence: Synthetic peptide
  Seed: LRMKWMMAMKYPITA
LRMKFMMLMPYPTTA

SEQ ID NO: 224748 - protein, 15 aa, Artificial Sequence
  Description of Artificial Sequence: Synthetic peptide
  Seed: LRMKWMMAMKYPITA
LRMKFMMLMPYPVTA

SEQ ID NO: 224749 - protein, 15 aa, Artificial Sequence
  Description of Artificial Sequence: Synthetic peptide
  Seed: LRMKWMMAMKYPITA
LRMKFMMLMPYPWTA

SEQ ID NO: 224750 - protein, 15 aa, Artificial Sequence
  Description of Artificial Sequence: Synthetic peptide
  Seed: LRMKWMMAMKYPITA
LRMKFMMLMPYPYTA

SEQ ID NO: 224751 - protein, 15 aa, Artificial Sequence
  Description of Artificial Sequence: Synthetic peptide
  Seed: LRMKWMMAMKYPITA
LRMKFMMLMQYPATA

SEQ ID NO: 224752 - protein, 15 aa, Artificial Sequence
  Description of Artificial Sequence: Synthetic peptide
  Seed: LRMKWMMAMKYPITA
LRMKFMMLMQYPCTA

SEQ ID NO: 224753 - protein, 15 aa, Artificial Sequence
  Description of Artificial Sequence: Synthetic peptide
  Seed: LRMKWMMAMKYPITA
LRMKFMMLMQYPDTA

SEQ ID NO: 224754 - protein, 15 aa, Artificial Sequence
  Description of Artificial Sequence: Synthetic peptide
  Seed: LRMKWMMAMKYPITA
LRMKFMMLMQYPETA

SEQ ID NO: 224755 - protein, 15 aa, Artificial Sequence
  Description of Artificial Sequence: Synthetic peptide
  Seed: LRMKWMMAMKYPITA
LRMKFMMLMQYPFTA

SEQ ID NO: 224756 - protein, 15 aa, Artificial Sequence
  Description of Artificial Sequence: Synthetic peptide
  Seed: LRMKWMMAMKYPITA
LRMKFMMLMQYPGTA

SEQ ID NO: 224757 - protein, 15 aa, Artificial Sequence
  Description of Artificial Sequence: Synthetic peptide
  Seed: LRMKWMMAMKYPITA
LRMKFMMLMQYPHTA

SEQ ID NO: 224758 - protein, 15 aa, Artificial Sequence
  Description of Artificial Sequence: Synthetic peptide
  Seed: LRMKWMMAMKYPITA
LRMKFMMLMQYPITA

SEQ ID NO: 224759 - protein, 15 aa, Artificial Sequence
  Description of Artificial Sequence: Synthetic peptide
  Seed: LRMKWMMAMKYPITA
LRMKFMMLMQYPKTA

SEQ ID NO: 224760 - protein, 15 aa, Artificial Sequence
  Description of Artificial Sequence: Synthetic peptide
  Seed: LRMKWMMAMKYPITA
LRMKFMMLMQYPLTA

SEQ ID NO: 224761 - protein, 15 aa, Artificial Sequence
  Description of Artificial Sequence: Synthetic peptide
  Seed: LRMKWMMAMKYPITA
LRMKFMMLMQYPMTA

SEQ ID NO: 224762 - protein, 15 aa, Artificial Sequence
  Description of Artificial Sequence: Synthetic peptide
  Seed: LRMKWMMAMKYPITA
LRMKFMMLMQYPNTA

SEQ ID NO: 224763 - protein, 15 aa, Artificial Sequence
  Description of Artificial Sequence: Synthetic peptide
  Seed: LRMKWMMAMKYPITA
LRMKFMMLMQYPPTA

SEQ ID NO: 224764 - protein, 15 aa, Artificial Sequence
  Description of Artificial Sequence: Synthetic peptide
  Seed: LRMKWMMAMKYPITA
LRMKFMMLMQYPQTA

SEQ ID NO: 224765 - protein, 15 aa, Artificial Sequence
  Description of Artificial Sequence: Synthetic peptide
  Seed: LRMKWMMAMKYPITA
LRMKFMMLMQYPRTA

SEQ ID NO: 224766 - protein, 15 aa, Artificial Sequence
  Description of Artificial Sequence: Synthetic peptide
  Seed: LRMKWMMAMKYPITA
LRMKFMMLMQYPSTA

SEQ ID NO: 224767 - protein, 15 aa, Artificial Sequence
  Description of Artificial Sequence: Synthetic peptide
  Seed: LRMKWMMAMKYPITA
LRMKFMMLMQYPTTA

SEQ ID NO: 224768 - protein, 15 aa, Artificial Sequence
  Description of Artificial Sequence: Synthetic peptide
  Seed: LRMKWMMAMKYPITA
LRMKFMMLMQYPVTA

SEQ ID NO: 224769 - protein, 15 aa, Artificial Sequence
  Description of Artificial Sequence: Synthetic peptide
  Seed: LRMKWMMAMKYPITA
LRMKFMMLMQYPYTA

SEQ ID NO: 224770 - protein, 15 aa, Artificial Sequence
  Description of Artificial Sequence: Synthetic peptide
  Seed: LRMKWMMAMKYPITA
LRMKFMMLMRYPATA

SEQ ID NO: 224771 - protein, 15 aa, Artificial Sequence
  Description of Artificial Sequence: Synthetic peptide
  Seed: LRMKWMMAMKYPITA
LRMKFMMLMRYPCTA

SEQ ID NO: 224772 - protein, 15 aa, Artificial Sequence
  Description of Artificial Sequence: Synthetic peptide
  Seed: LRMKWMMAMKYPITA
LRMKFMMLMRYPDTA

SEQ ID NO: 224773 - protein, 15 aa, Artificial Sequence
  Description of Artificial Sequence: Synthetic peptide
  Seed: LRMKWMMAMKYPITA
LRMKFMMLMRYPETA

SEQ ID NO: 224774 - protein, 15 aa, Artificial Sequence
  Description of Artificial Sequence: Synthetic peptide
  Seed: LRMKWMMAMKYPITA
LRMKFMMLMRYPFTA

SEQ ID NO: 224775 - protein, 15 aa, Artificial Sequence
  Description of Artificial Sequence: Synthetic peptide
  Seed: LRMKWMMAMKYPITA
LRMKFMMLMRYPGTA

SEQ ID NO: 224776 - protein, 15 aa, Artificial Sequence
  Description of Artificial Sequence: Synthetic peptide
  Seed: LRMKWMMAMKYPITA
LRMKFMMLMRYPHTA

SEQ ID NO: 224777 - protein, 15 aa, Artificial Sequence
  Description of Artificial Sequence: Synthetic peptide
  Seed: LRMKWMMAMKYPITA
LRMKFMMLMRYPITA

SEQ ID NO: 224778 - protein, 15 aa, Artificial Sequence
  Description of Artificial Sequence: Synthetic peptide
  Seed: LRMKWMMAMKYPITA
LRMKFMMLMRYPKTA

SEQ ID NO: 224779 - protein, 15 aa, Artificial Sequence
  Description of Artificial Sequence: Synthetic peptide
  Seed: LRMKWMMAMKYPITA
LRMKFMMLMRYPLTA

SEQ ID NO: 224780 - protein, 15 aa, Artificial Sequence
  Description of Artificial Sequence: Synthetic peptide
  Seed: LRMKWMMAMKYPITA
LRMKFMMLMRYPMTA

SEQ ID NO: 224781 - protein, 15 aa, Artificial Sequence
  Description of Artificial Sequence: Synthetic peptide
  Seed: LRMKWMMAMKYPITA
LRMKFMMLMRYPNTA

SEQ ID NO: 224782 - protein, 15 aa, Artificial Sequence
  Description of Artificial Sequence: Synthetic peptide
  Seed: LRMKWMMAMKYPITA
LRMKFMMLMRYPPTA

SEQ ID NO: 224783 - protein, 15 aa, Artificial Sequence
  Description of Artificial Sequence: Synthetic peptide
  Seed: LRMKWMMAMKYPITA
LRMKFMMLMRYPQTA

SEQ ID NO: 224784 - protein, 15 aa, Artificial Sequence
  Description of Artificial Sequence: Synthetic peptide
  Seed: LRMKWMMAMKYPITA
LRMKFMMLMRYPRTA

SEQ ID NO: 224785 - protein, 15 aa, Artificial Sequence
  Description of Artificial Sequence: Synthetic peptide
  Seed: LRMKWMMAMKYPITA
LRMKFMMLMRYPSTA

SEQ ID NO: 224786 - protein, 15 aa, Artificial Sequence
  Description of Artificial Sequence: Synthetic peptide
  Seed: LRMKWMMAMKYPITA
LRMKFMMLMRYPTTA

SEQ ID NO: 224787 - protein, 15 aa, Artificial Sequence
  Description of Artificial Sequence: Synthetic peptide
  Seed: LRMKWMMAMKYPITA
LRMKFMMLMRYPVTA

SEQ ID NO: 224788 - protein, 15 aa, Artificial Sequence
  Description of Artificial Sequence: Synthetic peptide
  Seed: LRMKWMMAMKYPITA
LRMKFMMLMRYPWTA

SEQ ID NO: 224789 - protein, 15 aa, Artificial Sequence
  Description of Artificial Sequence: Synthetic peptide
  Seed: LRMKWMMAMKYPITA
LRMKFMMLMRYPYTA

SEQ ID NO: 224790 - protein, 15 aa, Artificial Sequence
  Description of Artificial Sequence: Synthetic peptide
  Seed: LRMKWMMAMKYPITA
LRMKFMMLMSYPATA

SEQ ID NO: 224791 - protein, 15 aa, Artificial Sequence
  Description of Artificial Sequence: Synthetic peptide
  Seed: LRMKWMMAMKYPITA
LRMKFMMLMSYPCTA

SEQ ID NO: 224792 - protein, 15 aa, Artificial Sequence
  Description of Artificial Sequence: Synthetic peptide
  Seed: LRMKWMMAMKYPITA
LRMKFMMLMSYPDTA

SEQ ID NO: 224793 - protein, 15 aa, Artificial Sequence
  Description of Artificial Sequence: Synthetic peptide
  Seed: LRMKWMMAMKYPITA
LRMKFMMLMSYPETA

SEQ ID NO: 224794 - protein, 15 aa, Artificial Sequence
  Description of Artificial Sequence: Synthetic peptide
  Seed: LRMKWMMAMKYPITA
LRMKFMMLMSYPFTA

SEQ ID NO: 224795 - protein, 15 aa, Artificial Sequence
  Description of Artificial Sequence: Synthetic peptide
  Seed: LRMKWMMAMKYPITA
LRMKFMMLMSYPGTA

SEQ ID NO: 224796 - protein, 15 aa, Artificial Sequence
  Description of Artificial Sequence: Synthetic peptide
  Seed: LRMKWMMAMKYPITA
LRMKFMMLMSYPHTA

SEQ ID NO: 224797 - protein, 15 aa, Artificial Sequence
  Description of Artificial Sequence: Synthetic peptide
  Seed: LRMKWMMAMKYPITA
LRMKFMMLMSYPITA

SEQ ID NO: 224798 - protein, 15 aa, Artificial Sequence
  Description of Artificial Sequence: Synthetic peptide
  Seed: LRMKWMMAMKYPITA
LRMKFMMLMSYPKTA

SEQ ID NO: 224799 - protein, 15 aa, Artificial Sequence
  Description of Artificial Sequence: Synthetic peptide
  Seed: LRMKWMMAMKYPITA
LRMKFMMLMSYPLTA

SEQ ID NO: 224800 - protein, 15 aa, Artificial Sequence
  Description of Artificial Sequence: Synthetic peptide
  Seed: LRMKWMMAMKYPITA
LRMKFMMLMSYPMTA

SEQ ID NO: 224801 - protein, 15 aa, Artificial Sequence
  Description of Artificial Sequence: Synthetic peptide
  Seed: LRMKWMMAMKYPITA
LRMKFMMLMSYPNTA

SEQ ID NO: 224802 - protein, 15 aa, Artificial Sequence
  Description of Artificial Sequence: Synthetic peptide
  Seed: LRMKWMMAMKYPITA
LRMKFMMLMSYPPTA

SEQ ID NO: 224803 - protein, 15 aa, Artificial Sequence
  Description of Artificial Sequence: Synthetic peptide
  Seed: LRMKWMMAMKYPITA
LRMKFMMLMSYPQTA

SEQ ID NO: 224804 - protein, 15 aa, Artificial Sequence
  Description of Artificial Sequence: Synthetic peptide
  Seed: LRMKWMMAMKYPITA
LRMKFMMLMSYPRTA

SEQ ID NO: 224805 - protein, 15 aa, Artificial Sequence
  Description of Artificial Sequence: Synthetic peptide
  Seed: LRMKWMMAMKYPITA
LRMKFMMLMSYPSTA

SEQ ID NO: 224806 - protein, 15 aa, Artificial Sequence
  Description of Artificial Sequence: Synthetic peptide
  Seed: LRMKWMMAMKYPITA
LRMKFMMLMSYPTTA

SEQ ID NO: 224807 - protein, 15 aa, Artificial Sequence
  Description of Artificial Sequence: Synthetic peptide
  Seed: LRMKWMMAMKYPITA
LRMKFMMLMSYPVTA

SEQ ID NO: 224808 - protein, 15 aa, Artificial Sequence
  Description of Artificial Sequence: Synthetic peptide
  Seed: LRMKWMMAMKYPITA
LRMKFMMLMSYPWTA

SEQ ID NO: 224809 - protein, 15 aa, Artificial Sequence
  Description of Artificial Sequence: Synthetic peptide
  Seed: LRMKWMMAMKYPITA
LRMKFMMLMSYPYTA

SEQ ID NO: 224810 - protein, 15 aa, Artificial Sequence
  Description of Artificial Sequence: Synthetic peptide
  Seed: LRMKWMMAMKYPITA
LRMKFMMLMTYPATA

SEQ ID NO: 224811 - protein, 15 aa, Artificial Sequence
  Description of Artificial Sequence: Synthetic peptide
  Seed: LRMKWMMAMKYPITA
LRMKFMMLMTYPCTA

SEQ ID NO: 224812 - protein, 15 aa, Artificial Sequence
  Description of Artificial Sequence: Synthetic peptide
  Seed: LRMKWMMAMKYPITA
LRMKFMMLMTYPDTA

SEQ ID NO: 224813 - protein, 15 aa, Artificial Sequence
  Description of Artificial Sequence: Synthetic peptide
  Seed: LRMKWMMAMKYPITA
LRMKFMMLMTYPETA

SEQ ID NO: 224814 - protein, 15 aa, Artificial Sequence
  Description of Artificial Sequence: Synthetic peptide
  Seed: LRMKWMMAMKYPITA
LRMKFMMLMTYPFTA

SEQ ID NO: 224815 - protein, 15 aa, Artificial Sequence
  Description of Artificial Sequence: Synthetic peptide
  Seed: LRMKWMMAMKYPITA
LRMKFMMLMTYPGTA

SEQ ID NO: 224816 - protein, 15 aa, Artificial Sequence
  Description of Artificial Sequence: Synthetic peptide
  Seed: LRMKWMMAMKYPITA
LRMKFMMLMTYPHTA

SEQ ID NO: 224817 - protein, 15 aa, Artificial Sequence
  Description of Artificial Sequence: Synthetic peptide
  Seed: LRMKWMMAMKYPITA
LRMKFMMLMTYPITA

SEQ ID NO: 224818 - protein, 15 aa, Artificial Sequence
  Description of Artificial Sequence: Synthetic peptide
  Seed: LRMKWMMAMKYPITA
LRMKFMMLMTYPKTA

SEQ ID NO: 224819 - protein, 15 aa, Artificial Sequence
  Description of Artificial Sequence: Synthetic peptide
  Seed: LRMKWMMAMKYPITA
LRMKFMMLMTYPLTA

SEQ ID NO: 224820 - protein, 15 aa, Artificial Sequence
  Description of Artificial Sequence: Synthetic peptide
  Seed: LRMKWMMAMKYPITA
LRMKFMMLMTYPMTA

SEQ ID NO: 224821 - protein, 15 aa, Artificial Sequence
  Description of Artificial Sequence: Synthetic peptide
  Seed: LRMKWMMAMKYPITA
LRMKFMMLMTYPNTA

SEQ ID NO: 224822 - protein, 15 aa, Artificial Sequence
  Description of Artificial Sequence: Synthetic peptide
  Seed: LRMKWMMAMKYPITA
LRMKFMMLMTYPPTA

SEQ ID NO: 224823 - protein, 15 aa, Artificial Sequence
  Description of Artificial Sequence: Synthetic peptide
  Seed: LRMKWMMAMKYPITA
LRMKFMMLMTYPQTA

SEQ ID NO: 224824 - protein, 15 aa, Artificial Sequence
  Description of Artificial Sequence: Synthetic peptide
  Seed: LRMKWMMAMKYPITA
LRMKFMMLMTYPRTA

SEQ ID NO: 224825 - protein, 15 aa, Artificial Sequence
  Description of Artificial Sequence: Synthetic peptide
  Seed: LRMKWMMAMKYPITA
LRMKFMMLMTYPSTA

SEQ ID NO: 224826 - protein, 15 aa, Artificial Sequence
  Description of Artificial Sequence: Synthetic peptide
  Seed: LRMKWMMAMKYPITA
LRMKFMMLMTYPTTA

SEQ ID NO: 224827 - protein, 15 aa, Artificial Sequence
  Description of Artificial Sequence: Synthetic peptide
  Seed: LRMKWMMAMKYPITA
LRMKFMMLMTYPVTA

SEQ ID NO: 224828 - protein, 15 aa, Artificial Sequence
  Description of Artificial Sequence: Synthetic peptide
  Seed: LRMKWMMAMKYPITA
LRMKFMMLMTYPWTA

SEQ ID NO: 224829 - protein, 15 aa, Artificial Sequence
  Description of Artificial Sequence: Synthetic peptide
  Seed: LRMKWMMAMKYPITA
LRMKFMMLMTYPYTA

SEQ ID NO: 224830 - protein, 15 aa, Artificial Sequence
  Description of Artificial Sequence: Synthetic peptide
  Seed: LRMKWMMAMKYPITA
LRMKFMMLMVYPATA

SEQ ID NO: 224831 - protein, 15 aa, Artificial Sequence
  Description of Artificial Sequence: Synthetic peptide
  Seed: LRMKWMMAMKYPITA
LRMKFMMLMVYPCTA

SEQ ID NO: 224832 - protein, 15 aa, Artificial Sequence
  Description of Artificial Sequence: Synthetic peptide
  Seed: LRMKWMMAMKYPITA
LRMKFMMLMVYPDTA

SEQ ID NO: 224833 - protein, 15 aa, Artificial Sequence
  Description of Artificial Sequence: Synthetic peptide
  Seed: LRMKWMMAMKYPITA
LRMKFMMLMVYPETA

SEQ ID NO: 224834 - protein, 15 aa, Artificial Sequence
  Description of Artificial Sequence: Synthetic peptide
  Seed: LRMKWMMAMKYPITA
LRMKFMMLMVYPFTA

SEQ ID NO: 224835 - protein, 15 aa, Artificial Sequence
  Description of Artificial Sequence: Synthetic peptide
  Seed: LRMKWMMAMKYPITA
LRMKFMMLMVYPGTA

SEQ ID NO: 224836 - protein, 15 aa, Artificial Sequence
  Description of Artificial Sequence: Synthetic peptide
  Seed: LRMKWMMAMKYPITA
LRMKFMMLMVYPHTA

SEQ ID NO: 224837 - protein, 15 aa, Artificial Sequence
  Description of Artificial Sequence: Synthetic peptide
  Seed: LRMKWMMAMKYPITA
LRMKFMMLMVYPITA

SEQ ID NO: 224838 - protein, 15 aa, Artificial Sequence
  Description of Artificial Sequence: Synthetic peptide
  Seed: LRMKWMMAMKYPITA
LRMKFMMLMVYPKTA

SEQ ID NO: 224839 - protein, 15 aa, Artificial Sequence
  Description of Artificial Sequence: Synthetic peptide
  Seed: LRMKWMMAMKYPITA
LRMKFMMLMVYPLTA

SEQ ID NO: 224840 - protein, 15 aa, Artificial Sequence
  Description of Artificial Sequence: Synthetic peptide
  Seed: LRMKWMMAMKYPITA
LRMKFMMLMVYPMTA

SEQ ID NO: 224841 - protein, 15 aa, Artificial Sequence
  Description of Artificial Sequence: Synthetic peptide
  Seed: LRMKWMMAMKYPITA
LRMKFMMLMVYPNTA

SEQ ID NO: 224842 - protein, 15 aa, Artificial Sequence
  Description of Artificial Sequence: Synthetic peptide
  Seed: LRMKWMMAMKYPITA
LRMKFMMLMVYPPTA

SEQ ID NO: 224843 - protein, 15 aa, Artificial Sequence
  Description of Artificial Sequence: Synthetic peptide
  Seed: LRMKWMMAMKYPITA
LRMKFMMLMVYPQTA

SEQ ID NO: 224844 - protein, 15 aa, Artificial Sequence
  Description of Artificial Sequence: Synthetic peptide
  Seed: LRMKWMMAMKYPITA
LRMKFMMLMVYPRTA

SEQ ID NO: 224845 - protein, 15 aa, Artificial Sequence
  Description of Artificial Sequence: Synthetic peptide
  Seed: LRMKWMMAMKYPITA
LRMKFMMLMVYPSTA

SEQ ID NO: 224846 - protein, 15 aa, Artificial Sequence
  Description of Artificial Sequence: Synthetic peptide
  Seed: LRMKWMMAMKYPITA
LRMKFMMLMVYPTTA

SEQ ID NO: 224847 - protein, 15 aa, Artificial Sequence
  Description of Artificial Sequence: Synthetic peptide
  Seed: LRMKWMMAMKYPITA
LRMKFMMLMVYPVTA

SEQ ID NO: 224848 - protein, 15 aa, Artificial Sequence
  Description of Artificial Sequence: Synthetic peptide
  Seed: LRMKWMMAMKYPITA
LRMKFMMLMVYPYTA

SEQ ID NO: 224849 - protein, 15 aa, Artificial Sequence
  Description of Artificial Sequence: Synthetic peptide
  Seed: LRMKWMMAMKYPITA
LRMKFMMLMWYPATA

SEQ ID NO: 224850 - protein, 15 aa, Artificial Sequence
  Description of Artificial Sequence: Synthetic peptide
  Seed: LRMKWMMAMKYPITA
LRMKFMMLMWYPHTA

SEQ ID NO: 224851 - protein, 15 aa, Artificial Sequence
  Description of Artificial Sequence: Synthetic peptide
  Seed: LRMKWMMAMKYPITA
LRMKFMMLMWYPITA

SEQ ID NO: 224852 - protein, 15 aa, Artificial Sequence
  Description of Artificial Sequence: Synthetic peptide
  Seed: LRMKWMMAMKYPITA
LRMKFMMLMWYPLTA

SEQ ID NO: 224853 - protein, 15 aa, Artificial Sequence
  Description of Artificial Sequence: Synthetic peptide
  Seed: LRMKWMMAMKYPITA
LRMKFMMLMWYPMTA

SEQ ID NO: 224854 - protein, 15 aa, Artificial Sequence
  Description of Artificial Sequence: Synthetic peptide
  Seed: LRMKWMMAMKYPITA
LRMKFMMLMWYPNTA

SEQ ID NO: 224855 - protein, 15 aa, Artificial Sequence
  Description of Artificial Sequence: Synthetic peptide
  Seed: LRMKWMMAMKYPITA
LRMKFMMLMWYPSTA

SEQ ID NO: 224856 - protein, 15 aa, Artificial Sequence
  Description of Artificial Sequence: Synthetic peptide
  Seed: LRMKWMMAMKYPITA
LRMKFMMLMWYPVTA

SEQ ID NO: 224857 - protein, 15 aa, Artificial Sequence
  Description of Artificial Sequence: Synthetic peptide
  Seed: LRMKWMMAMKYPITA
LRMKFMMLMYYPATA

SEQ ID NO: 224858 - protein, 15 aa, Artificial Sequence
  Description of Artificial Sequence: Synthetic peptide
  Seed: LRMKWMMAMKYPITA
LRMKFMMLMYYPDTA

SEQ ID NO: 224859 - protein, 15 aa, Artificial Sequence
  Description of Artificial Sequence: Synthetic peptide
  Seed: LRMKWMMAMKYPITA
LRMKFMMLMYYPGTA

SEQ ID NO: 224860 - protein, 15 aa, Artificial Sequence
  Description of Artificial Sequence: Synthetic peptide
  Seed: LRMKWMMAMKYPITA
LRMKFMMLMYYPHTA

SEQ ID NO: 224861 - protein, 15 aa, Artificial Sequence
  Description of Artificial Sequence: Synthetic peptide
  Seed: LRMKWMMAMKYPITA
LRMKFMMLMYYPITA

SEQ ID NO: 224862 - protein, 15 aa, Artificial Sequence
  Description of Artificial Sequence: Synthetic peptide
  Seed: LRMKWMMAMKYPITA
LRMKFMMLMYYPLTA

SEQ ID NO: 224863 - protein, 15 aa, Artificial Sequence
  Description of Artificial Sequence: Synthetic peptide
  Seed: LRMKWMMAMKYPITA
LRMKFMMLMYYPMTA

SEQ ID NO: 224864 - protein, 15 aa, Artificial Sequence
  Description of Artificial Sequence: Synthetic peptide
  Seed: LRMKWMMAMKYPITA
LRMKFMMLMYYPNTA

SEQ ID NO: 224865 - protein, 15 aa, Artificial Sequence
  Description of Artificial Sequence: Synthetic peptide
  Seed: LRMKWMMAMKYPITA
LRMKFMMLMYYPSTA

SEQ ID NO: 224866 - protein, 15 aa, Artificial Sequence
  Description of Artificial Sequence: Synthetic peptide
  Seed: LRMKWMMAMKYPITA
LRMKFMMLMYYPTTA

SEQ ID NO: 224867 - protein, 15 aa, Artificial Sequence
  Description of Artificial Sequence: Synthetic peptide
  Seed: LRMKWMMAMKYPITA
LRMKFMMLMYYPVTA

SEQ ID NO: 224868 - protein, 15 aa, Artificial Sequence
  Description of Artificial Sequence: Synthetic peptide
  Seed: LRMKWMMAMKYPITA
LRMKFMMMMAYPATA

SEQ ID NO: 224869 - protein, 15 aa, Artificial Sequence
  Description of Artificial Sequence: Synthetic peptide
  Seed: LRMKWMMAMKYPITA
LRMKFMMMMAYPCTA

SEQ ID NO: 224870 - protein, 15 aa, Artificial Sequence
  Description of Artificial Sequence: Synthetic peptide
  Seed: LRMKWMMAMKYPITA
LRMKFMMMMAYPDTA

SEQ ID NO: 224871 - protein, 15 aa, Artificial Sequence
  Description of Artificial Sequence: Synthetic peptide
  Seed: LRMKWMMAMKYPITA
LRMKFMMMMAYPETA

SEQ ID NO: 224872 - protein, 15 aa, Artificial Sequence
  Description of Artificial Sequence: Synthetic peptide
  Seed: LRMKWMMAMKYPITA
LRMKFMMMMAYPFTA

SEQ ID NO: 224873 - protein, 15 aa, Artificial Sequence
  Description of Artificial Sequence: Synthetic peptide
  Seed: LRMKWMMAMKYPITA
LRMKFMMMMAYPGTA

SEQ ID NO: 224874 - protein, 15 aa, Artificial Sequence
  Description of Artificial Sequence: Synthetic peptide
  Seed: LRMKWMMAMKYPITA
LRMKFMMMMAYPHTA

SEQ ID NO: 224875 - protein, 15 aa, Artificial Sequence
  Description of Artificial Sequence: Synthetic peptide
  Seed: LRMKWMMAMKYPITA
LRMKFMMMMAYPITA

SEQ ID NO: 224876 - protein, 15 aa, Artificial Sequence
  Description of Artificial Sequence: Synthetic peptide
  Seed: LRMKWMMAMKYPITA
LRMKFMMMMAYPKTA

SEQ ID NO: 224877 - protein, 15 aa, Artificial Sequence
  Description of Artificial Sequence: Synthetic peptide
  Seed: LRMKWMMAMKYPITA
LRMKFMMMMAYPLTA

SEQ ID NO: 224878 - protein, 15 aa, Artificial Sequence
  Description of Artificial Sequence: Synthetic peptide
  Seed: LRMKWMMAMKYPITA
LRMKFMMMMAYPMTA

SEQ ID NO: 224879 - protein, 15 aa, Artificial Sequence
  Description of Artificial Sequence: Synthetic peptide
  Seed: LRMKWMMAMKYPITA
LRMKFMMMMAYPNTA

SEQ ID NO: 224880 - protein, 15 aa, Artificial Sequence
  Description of Artificial Sequence: Synthetic peptide
  Seed: LRMKWMMAMKYPITA
LRMKFMMMMAYPPTA

SEQ ID NO: 224881 - protein, 15 aa, Artificial Sequence
  Description of Artificial Sequence: Synthetic peptide
  Seed: LRMKWMMAMKYPITA
LRMKFMMMMAYPQTA

SEQ ID NO: 224882 - protein, 15 aa, Artificial Sequence
  Description of Artificial Sequence: Synthetic peptide
  Seed: LRMKWMMAMKYPITA
LRMKFMMMMAYPRTA

SEQ ID NO: 224883 - protein, 15 aa, Artificial Sequence
  Description of Artificial Sequence: Synthetic peptide
  Seed: LRMKWMMAMKYPITA
LRMKFMMMMAYPSTA

SEQ ID NO: 224884 - protein, 15 aa, Artificial Sequence
  Description of Artificial Sequence: Synthetic peptide
  Seed: LRMKWMMAMKYPITA
LRMKFMMMMAYPTTA

SEQ ID NO: 224885 - protein, 15 aa, Artificial Sequence
  Description of Artificial Sequence: Synthetic peptide
  Seed: LRMKWMMAMKYPITA
LRMKFMMMMAYPVTA

SEQ ID NO: 224886 - protein, 15 aa, Artificial Sequence
  Description of Artificial Sequence: Synthetic peptide
  Seed: LRMKWMMAMKYPITA
LRMKFMMMMAYPWTA

SEQ ID NO: 224887 - protein, 15 aa, Artificial Sequence
  Description of Artificial Sequence: Synthetic peptide
  Seed: LRMKWMMAMKYPITA
LRMKFMMMMAYPYTA

SEQ ID NO: 224888 - protein, 15 aa, Artificial Sequence
  Description of Artificial Sequence: Synthetic peptide
  Seed: LRMKWMMAMKYPITA
LRMKFMMMMCYPATA

SEQ ID NO: 224889 - protein, 15 aa, Artificial Sequence
  Description of Artificial Sequence: Synthetic peptide
  Seed: LRMKWMMAMKYPITA
LRMKFMMMMCYPDTA

SEQ ID NO: 224890 - protein, 15 aa, Artificial Sequence
  Description of Artificial Sequence: Synthetic peptide
  Seed: LRMKWMMAMKYPITA
LRMKFMMMMCYPETA

SEQ ID NO: 224891 - protein, 15 aa, Artificial Sequence
  Description of Artificial Sequence: Synthetic peptide
  Seed: LRMKWMMAMKYPITA
LRMKFMMMMCYPFTA

SEQ ID NO: 224892 - protein, 15 aa, Artificial Sequence
  Description of Artificial Sequence: Synthetic peptide
  Seed: LRMKWMMAMKYPITA
LRMKFMMMMCYPGTA

SEQ ID NO: 224893 - protein, 15 aa, Artificial Sequence
  Description of Artificial Sequence: Synthetic peptide
  Seed: LRMKWMMAMKYPITA
LRMKFMMMMCYPHTA

SEQ ID NO: 224894 - protein, 15 aa, Artificial Sequence
  Description of Artificial Sequence: Synthetic peptide
  Seed: LRMKWMMAMKYPITA
LRMKFMMMMCYPITA

SEQ ID NO: 224895 - protein, 15 aa, Artificial Sequence
  Description of Artificial Sequence: Synthetic peptide
  Seed: LRMKWMMAMKYPITA
LRMKFMMMMCYPKTA

SEQ ID NO: 224896 - protein, 15 aa, Artificial Sequence
  Description of Artificial Sequence: Synthetic peptide
  Seed: LRMKWMMAMKYPITA
LRMKFMMMMCYPLTA

SEQ ID NO: 224897 - protein, 15 aa, Artificial Sequence
  Description of Artificial Sequence: Synthetic peptide
  Seed: LRMKWMMAMKYPITA
LRMKFMMMMCYPMTA

SEQ ID NO: 224898 - protein, 15 aa, Artificial Sequence
  Description of Artificial Sequence: Synthetic peptide
  Seed: LRMKWMMAMKYPITA
LRMKFMMMMCYPNTA

SEQ ID NO: 224899 - protein, 15 aa, Artificial Sequence
  Description of Artificial Sequence: Synthetic peptide
  Seed: LRMKWMMAMKYPITA
LRMKFMMMMCYPPTA

SEQ ID NO: 224900 - protein, 15 aa, Artificial Sequence
  Description of Artificial Sequence: Synthetic peptide
  Seed: LRMKWMMAMKYPITA
LRMKFMMMMCYPQTA

SEQ ID NO: 224901 - protein, 15 aa, Artificial Sequence
  Description of Artificial Sequence: Synthetic peptide
  Seed: LRMKWMMAMKYPITA
LRMKFMMMMCYPRTA

SEQ ID NO: 224902 - protein, 15 aa, Artificial Sequence
  Description of Artificial Sequence: Synthetic peptide
  Seed: LRMKWMMAMKYPITA
LRMKFMMMMCYPSTA

SEQ ID NO: 224903 - protein, 15 aa, Artificial Sequence
  Description of Artificial Sequence: Synthetic peptide
  Seed: LRMKWMMAMKYPITA
LRMKFMMMMCYPTTA

SEQ ID NO: 224904 - protein, 15 aa, Artificial Sequence
  Description of Artificial Sequence: Synthetic peptide
  Seed: LRMKWMMAMKYPITA
LRMKFMMMMCYPVTA

SEQ ID NO: 224905 - protein, 15 aa, Artificial Sequence
  Description of Artificial Sequence: Synthetic peptide
  Seed: LRMKWMMAMKYPITA
LRMKFMMMMCYPYTA

SEQ ID NO: 224906 - protein, 15 aa, Artificial Sequence
  Description of Artificial Sequence: Synthetic peptide
  Seed: LRMKWMMAMKYPITA
LRMKFMMMMDYPATA

SEQ ID NO: 224907 - protein, 15 aa, Artificial Sequence
  Description of Artificial Sequence: Synthetic peptide
  Seed: LRMKWMMAMKYPITA
LRMKFMMMMDYPCTA

SEQ ID NO: 224908 - protein, 15 aa, Artificial Sequence
  Description of Artificial Sequence: Synthetic peptide
  Seed: LRMKWMMAMKYPITA
LRMKFMMMMDYPDTA

SEQ ID NO: 224909 - protein, 15 aa, Artificial Sequence
  Description of Artificial Sequence: Synthetic peptide
  Seed: LRMKWMMAMKYPITA
LRMKFMMMMDYPETA

SEQ ID NO: 224910 - protein, 15 aa, Artificial Sequence
  Description of Artificial Sequence: Synthetic peptide
  Seed: LRMKWMMAMKYPITA
LRMKFMMMMDYPFTA

SEQ ID NO: 224911 - protein, 15 aa, Artificial Sequence
  Description of Artificial Sequence: Synthetic peptide
  Seed: LRMKWMMAMKYPITA
LRMKFMMMMDYPGTA

SEQ ID NO: 224912 - protein, 15 aa, Artificial Sequence
  Description of Artificial Sequence: Synthetic peptide
  Seed: LRMKWMMAMKYPITA
LRMKFMMMMDYPHTA

SEQ ID NO: 224913 - protein, 15 aa, Artificial Sequence
  Description of Artificial Sequence: Synthetic peptide
  Seed: LRMKWMMAMKYPITA
LRMKFMMMMDYPITA

SEQ ID NO: 224914 - protein, 15 aa, Artificial Sequence
  Description of Artificial Sequence: Synthetic peptide
  Seed: LRMKWMMAMKYPITA
LRMKFMMMMDYPLTA

SEQ ID NO: 224915 - protein, 15 aa, Artificial Sequence
  Description of Artificial Sequence: Synthetic peptide
  Seed: LRMKWMMAMKYPITA
LRMKFMMMMDYPMTA

SEQ ID NO: 224916 - protein, 15 aa, Artificial Sequence
  Description of Artificial Sequence: Synthetic peptide
  Seed: LRMKWMMAMKYPITA
LRMKFMMMMDYPNTA

SEQ ID NO: 224917 - protein, 15 aa, Artificial Sequence
  Description of Artificial Sequence: Synthetic peptide
  Seed: LRMKWMMAMKYPITA
LRMKFMMMMDYPPTA

SEQ ID NO: 224918 - protein, 15 aa, Artificial Sequence
  Description of Artificial Sequence: Synthetic peptide
  Seed: LRMKWMMAMKYPITA
LRMKFMMMMDYPQTA

SEQ ID NO: 224919 - protein, 15 aa, Artificial Sequence
  Description of Artificial Sequence: Synthetic peptide
  Seed: LRMKWMMAMKYPITA
LRMKFMMMMDYPSTA

SEQ ID NO: 224920 - protein, 15 aa, Artificial Sequence
  Description of Artificial Sequence: Synthetic peptide
  Seed: LRMKWMMAMKYPITA
LRMKFMMMMDYPTTA

SEQ ID NO: 224921 - protein, 15 aa, Artificial Sequence
  Description of Artificial Sequence: Synthetic peptide
  Seed: LRMKWMMAMKYPITA
LRMKFMMMMDYPVTA

SEQ ID NO: 224922 - protein, 15 aa, Artificial Sequence
  Description of Artificial Sequence: Synthetic peptide
  Seed: LRMKWMMAMKYPITA
LRMKFMMMMDYPYTA

SEQ ID NO: 224923 - protein, 15 aa, Artificial Sequence
  Description of Artificial Sequence: Synthetic peptide
  Seed: LRMKWMMAMKYPITA
LRMKFMMMMEYPATA

SEQ ID NO: 224924 - protein, 15 aa, Artificial Sequence
  Description of Artificial Sequence: Synthetic peptide
  Seed: LRMKWMMAMKYPITA
LRMKFMMMMEYPCTA

SEQ ID NO: 224925 - protein, 15 aa, Artificial Sequence
  Description of Artificial Sequence: Synthetic peptide
  Seed: LRMKWMMAMKYPITA
LRMKFMMMMEYPDTA

SEQ ID NO: 224926 - protein, 15 aa, Artificial Sequence
  Description of Artificial Sequence: Synthetic peptide
  Seed: LRMKWMMAMKYPITA
LRMKFMMMMEYPETA

SEQ ID NO: 224927 - protein, 15 aa, Artificial Sequence
  Description of Artificial Sequence: Synthetic peptide
  Seed: LRMKWMMAMKYPITA
LRMKFMMMMEYPFTA

SEQ ID NO: 224928 - protein, 15 aa, Artificial Sequence
  Description of Artificial Sequence: Synthetic peptide
  Seed: LRMKWMMAMKYPITA
LRMKFMMMMEYPGTA

SEQ ID NO: 224929 - protein, 15 aa, Artificial Sequence
  Description of Artificial Sequence: Synthetic peptide
  Seed: LRMKWMMAMKYPITA
LRMKFMMMMEYPHTA

SEQ ID NO: 224930 - protein, 15 aa, Artificial Sequence
  Description of Artificial Sequence: Synthetic peptide
  Seed: LRMKWMMAMKYPITA
LRMKFMMMMEYPITA

SEQ ID NO: 224931 - protein, 15 aa, Artificial Sequence
  Description of Artificial Sequence: Synthetic peptide
  Seed: LRMKWMMAMKYPITA
LRMKFMMMMEYPKTA

SEQ ID NO: 224932 - protein, 15 aa, Artificial Sequence
  Description of Artificial Sequence: Synthetic peptide
  Seed: LRMKWMMAMKYPITA
LRMKFMMMMEYPLTA

SEQ ID NO: 224933 - protein, 15 aa, Artificial Sequence
  Description of Artificial Sequence: Synthetic peptide
  Seed: LRMKWMMAMKYPITA
LRMKFMMMMEYPMTA

SEQ ID NO: 224934 - protein, 15 aa, Artificial Sequence
  Description of Artificial Sequence: Synthetic peptide
  Seed: LRMKWMMAMKYPITA
LRMKFMMMMEYPNTA

SEQ ID NO: 224935 - protein, 15 aa, Artificial Sequence
  Description of Artificial Sequence: Synthetic peptide
  Seed: LRMKWMMAMKYPITA
LRMKFMMMMEYPPTA

SEQ ID NO: 224936 - protein, 15 aa, Artificial Sequence
  Description of Artificial Sequence: Synthetic peptide
  Seed: LRMKWMMAMKYPITA
LRMKFMMMMEYPQTA

SEQ ID NO: 224937 - protein, 15 aa, Artificial Sequence
  Description of Artificial Sequence: Synthetic peptide
  Seed: LRMKWMMAMKYPITA
LRMKFMMMMEYPRTA

SEQ ID NO: 224938 - protein, 15 aa, Artificial Sequence
  Description of Artificial Sequence: Synthetic peptide
  Seed: LRMKWMMAMKYPITA
LRMKFMMMMEYPSTA

SEQ ID NO: 224939 - protein, 15 aa, Artificial Sequence
  Description of Artificial Sequence: Synthetic peptide
  Seed: LRMKWMMAMKYPITA
LRMKFMMMMEYPTTA

SEQ ID NO: 224940 - protein, 15 aa, Artificial Sequence
  Description of Artificial Sequence: Synthetic peptide
  Seed: LRMKWMMAMKYPITA
LRMKFMMMMEYPVTA

SEQ ID NO: 224941 - protein, 15 aa, Artificial Sequence
  Description of Artificial Sequence: Synthetic peptide
  Seed: LRMKWMMAMKYPITA
LRMKFMMMMEYPWTA

SEQ ID NO: 224942 - protein, 15 aa, Artificial Sequence
  Description of Artificial Sequence: Synthetic peptide
  Seed: LRMKWMMAMKYPITA
LRMKFMMMMEYPYTA

SEQ ID NO: 224943 - protein, 15 aa, Artificial Sequence
  Description of Artificial Sequence: Synthetic peptide
  Seed: LRMKWMMAMKYPITA
LRMKFMMMMFYPATA

SEQ ID NO: 224944 - protein, 15 aa, Artificial Sequence
  Description of Artificial Sequence: Synthetic peptide
  Seed: LRMKWMMAMKYPITA
LRMKFMMMMFYPDTA

SEQ ID NO: 224945 - protein, 15 aa, Artificial Sequence
  Description of Artificial Sequence: Synthetic peptide
  Seed: LRMKWMMAMKYPITA
LRMKFMMMMFYPETA

SEQ ID NO: 224946 - protein, 15 aa, Artificial Sequence
  Description of Artificial Sequence: Synthetic peptide
  Seed: LRMKWMMAMKYPITA
LRMKFMMMMFYPGTA

SEQ ID NO: 224947 - protein, 15 aa, Artificial Sequence
  Description of Artificial Sequence: Synthetic peptide
  Seed: LRMKWMMAMKYPITA
LRMKFMMMMFYPHTA

SEQ ID NO: 224948 - protein, 15 aa, Artificial Sequence
  Description of Artificial Sequence: Synthetic peptide
  Seed: LRMKWMMAMKYPITA
LRMKFMMMMFYPITA

SEQ ID NO: 224949 - protein, 15 aa, Artificial Sequence
  Description of Artificial Sequence: Synthetic peptide
  Seed: LRMKWMMAMKYPITA
LRMKFMMMMFYPLTA

SEQ ID NO: 224950 - protein, 15 aa, Artificial Sequence
  Description of Artificial Sequence: Synthetic peptide
  Seed: LRMKWMMAMKYPITA
LRMKFMMMMFYPMTA

SEQ ID NO: 224951 - protein, 15 aa, Artificial Sequence
  Description of Artificial Sequence: Synthetic peptide
  Seed: LRMKWMMAMKYPITA
LRMKFMMMMFYPNTA

SEQ ID NO: 224952 - protein, 15 aa, Artificial Sequence
  Description of Artificial Sequence: Synthetic peptide
  Seed: LRMKWMMAMKYPITA
LRMKFMMMMFYPQTA

SEQ ID NO: 224953 - protein, 15 aa, Artificial Sequence
  Description of Artificial Sequence: Synthetic peptide
  Seed: LRMKWMMAMKYPITA
LRMKFMMMMFYPSTA

SEQ ID NO: 224954 - protein, 15 aa, Artificial Sequence
  Description of Artificial Sequence: Synthetic peptide
  Seed: LRMKWMMAMKYPITA
LRMKFMMMMFYPTTA

SEQ ID NO: 224955 - protein, 15 aa, Artificial Sequence
  Description of Artificial Sequence: Synthetic peptide
  Seed: LRMKWMMAMKYPITA
LRMKFMMMMFYPVTA

SEQ ID NO: 224956 - protein, 15 aa, Artificial Sequence
  Description of Artificial Sequence: Synthetic peptide
  Seed: LRMKWMMAMKYPITA
LRMKFMMMMGYPATA

SEQ ID NO: 224957 - protein, 15 aa, Artificial Sequence
  Description of Artificial Sequence: Synthetic peptide
  Seed: LRMKWMMAMKYPITA
LRMKFMMMMGYPCTA

SEQ ID NO: 224958 - protein, 15 aa, Artificial Sequence
  Description of Artificial Sequence: Synthetic peptide
  Seed: LRMKWMMAMKYPITA
LRMKFMMMMGYPDTA

SEQ ID NO: 224959 - protein, 15 aa, Artificial Sequence
  Description of Artificial Sequence: Synthetic peptide
  Seed: LRMKWMMAMKYPITA
LRMKFMMMMGYPETA

SEQ ID NO: 224960 - protein, 15 aa, Artificial Sequence
  Description of Artificial Sequence: Synthetic peptide
  Seed: LRMKWMMAMKYPITA
LRMKFMMMMGYPFTA

SEQ ID NO: 224961 - protein, 15 aa, Artificial Sequence
  Description of Artificial Sequence: Synthetic peptide
  Seed: LRMKWMMAMKYPITA
LRMKFMMMMGYPGTA

SEQ ID NO: 224962 - protein, 15 aa, Artificial Sequence
  Description of Artificial Sequence: Synthetic peptide
  Seed: LRMKWMMAMKYPITA
LRMKFMMMMGYPHTA

SEQ ID NO: 224963 - protein, 15 aa, Artificial Sequence
  Description of Artificial Sequence: Synthetic peptide
  Seed: LRMKWMMAMKYPITA
LRMKFMMMMGYPITA

SEQ ID NO: 224964 - protein, 15 aa, Artificial Sequence
  Description of Artificial Sequence: Synthetic peptide
  Seed: LRMKWMMAMKYPITA
LRMKFMMMMGYPKTA

SEQ ID NO: 224965 - protein, 15 aa, Artificial Sequence
  Description of Artificial Sequence: Synthetic peptide
  Seed: LRMKWMMAMKYPITA
LRMKFMMMMGYPLTA

SEQ ID NO: 224966 - protein, 15 aa, Artificial Sequence
  Description of Artificial Sequence: Synthetic peptide
  Seed: LRMKWMMAMKYPITA
LRMKFMMMMGYPMTA

SEQ ID NO: 224967 - protein, 15 aa, Artificial Sequence
  Description of Artificial Sequence: Synthetic peptide
  Seed: LRMKWMMAMKYPITA
LRMKFMMMMGYPNTA

SEQ ID NO: 224968 - protein, 15 aa, Artificial Sequence
  Description of Artificial Sequence: Synthetic peptide
  Seed: LRMKWMMAMKYPITA
LRMKFMMMMGYPPTA

SEQ ID NO: 224969 - protein, 15 aa, Artificial Sequence
  Description of Artificial Sequence: Synthetic peptide
  Seed: LRMKWMMAMKYPITA
LRMKFMMMMGYPQTA

SEQ ID NO: 224970 - protein, 15 aa, Artificial Sequence
  Description of Artificial Sequence: Synthetic peptide
  Seed: LRMKWMMAMKYPITA
LRMKFMMMMGYPRTA

SEQ ID NO: 224971 - protein, 15 aa, Artificial Sequence
  Description of Artificial Sequence: Synthetic peptide
  Seed: LRMKWMMAMKYPITA
LRMKFMMMMGYPSTA

SEQ ID NO: 224972 - protein, 15 aa, Artificial Sequence
  Description of Artificial Sequence: Synthetic peptide
  Seed: LRMKWMMAMKYPITA
LRMKFMMMMGYPTTA

SEQ ID NO: 224973 - protein, 15 aa, Artificial Sequence
  Description of Artificial Sequence: Synthetic peptide
  Seed: LRMKWMMAMKYPITA
LRMKFMMMMGYPVTA

SEQ ID NO: 224974 - protein, 15 aa, Artificial Sequence
  Description of Artificial Sequence: Synthetic peptide
  Seed: LRMKWMMAMKYPITA
LRMKFMMMMGYPWTA

SEQ ID NO: 224975 - protein, 15 aa, Artificial Sequence
  Description of Artificial Sequence: Synthetic peptide
  Seed: LRMKWMMAMKYPITA
LRMKFMMMMGYPYTA

SEQ ID NO: 224976 - protein, 15 aa, Artificial Sequence
  Description of Artificial Sequence: Synthetic peptide
  Seed: LRMKWMMAMKYPITA
LRMKFMMMMHYPATA

SEQ ID NO: 224977 - protein, 15 aa, Artificial Sequence
  Description of Artificial Sequence: Synthetic peptide
  Seed: LRMKWMMAMKYPITA
LRMKFMMMMHYPCTA

SEQ ID NO: 224978 - protein, 15 aa, Artificial Sequence
  Description of Artificial Sequence: Synthetic peptide
  Seed: LRMKWMMAMKYPITA
LRMKFMMMMHYPDTA

SEQ ID NO: 224979 - protein, 15 aa, Artificial Sequence
  Description of Artificial Sequence: Synthetic peptide
  Seed: LRMKWMMAMKYPITA
LRMKFMMMMHYPETA

SEQ ID NO: 224980 - protein, 15 aa, Artificial Sequence
  Description of Artificial Sequence: Synthetic peptide
  Seed: LRMKWMMAMKYPITA
LRMKFMMMMHYPFTA

SEQ ID NO: 224981 - protein, 15 aa, Artificial Sequence
  Description of Artificial Sequence: Synthetic peptide
  Seed: LRMKWMMAMKYPITA
LRMKFMMMMHYPGTA

SEQ ID NO: 224982 - protein, 15 aa, Artificial Sequence
  Description of Artificial Sequence: Synthetic peptide
  Seed: LRMKWMMAMKYPITA
LRMKFMMMMHYPHTA

SEQ ID NO: 224983 - protein, 15 aa, Artificial Sequence
  Description of Artificial Sequence: Synthetic peptide
  Seed: LRMKWMMAMKYPITA
LRMKFMMMMHYPITA

SEQ ID NO: 224984 - protein, 15 aa, Artificial Sequence
  Description of Artificial Sequence: Synthetic peptide
  Seed: LRMKWMMAMKYPITA
LRMKFMMMMHYPKTA

SEQ ID NO: 224985 - protein, 15 aa, Artificial Sequence
  Description of Artificial Sequence: Synthetic peptide
  Seed: LRMKWMMAMKYPITA
LRMKFMMMMHYPLTA

SEQ ID NO: 224986 - protein, 15 aa, Artificial Sequence
  Description of Artificial Sequence: Synthetic peptide
  Seed: LRMKWMMAMKYPITA
LRMKFMMMMHYPMTA

SEQ ID NO: 224987 - protein, 15 aa, Artificial Sequence
  Description of Artificial Sequence: Synthetic peptide
  Seed: LRMKWMMAMKYPITA
LRMKFMMMMHYPNTA

SEQ ID NO: 224988 - protein, 15 aa, Artificial Sequence
  Description of Artificial Sequence: Synthetic peptide
  Seed: LRMKWMMAMKYPITA
LRMKFMMMMHYPPTA

SEQ ID NO: 224989 - protein, 15 aa, Artificial Sequence
  Description of Artificial Sequence: Synthetic peptide
  Seed: LRMKWMMAMKYPITA
LRMKFMMMMHYPQTA

SEQ ID NO: 224990 - protein, 15 aa, Artificial Sequence
  Description of Artificial Sequence: Synthetic peptide
  Seed: LRMKWMMAMKYPITA
LRMKFMMMMHYPRTA

SEQ ID NO: 224991 - protein, 15 aa, Artificial Sequence
  Description of Artificial Sequence: Synthetic peptide
  Seed: LRMKWMMAMKYPITA
LRMKFMMMMHYPSTA

SEQ ID NO: 224992 - protein, 15 aa, Artificial Sequence
  Description of Artificial Sequence: Synthetic peptide
  Seed: LRMKWMMAMKYPITA
LRMKFMMMMHYPTTA

SEQ ID NO: 224993 - protein, 15 aa, Artificial Sequence
  Description of Artificial Sequence: Synthetic peptide
  Seed: LRMKWMMAMKYPITA
LRMKFMMMMHYPVTA

SEQ ID NO: 224994 - protein, 15 aa, Artificial Sequence
  Description of Artificial Sequence: Synthetic peptide
  Seed: LRMKWMMAMKYPITA
LRMKFMMMMHYPWTA

SEQ ID NO: 224995 - protein, 15 aa, Artificial Sequence
  Description of Artificial Sequence: Synthetic peptide
  Seed: LRMKWMMAMKYPITA
LRMKFMMMMHYPYTA

SEQ ID NO: 224996 - protein, 15 aa, Artificial Sequence
  Description of Artificial Sequence: Synthetic peptide
  Seed: LRMKWMMAMKYPITA
LRMKFMMMMIYPATA

SEQ ID NO: 224997 - protein, 15 aa, Artificial Sequence
  Description of Artificial Sequence: Synthetic peptide
  Seed: LRMKWMMAMKYPITA
LRMKFMMMMIYPCTA

SEQ ID NO: 224998 - protein, 15 aa, Artificial Sequence
  Description of Artificial Sequence: Synthetic peptide
  Seed: LRMKWMMAMKYPITA
LRMKFMMMMIYPDTA

SEQ ID NO: 224999 - protein, 15 aa, Artificial Sequence
  Description of Artificial Sequence: Synthetic peptide
  Seed: LRMKWMMAMKYPITA
LRMKFMMMMIYPETA

SEQ ID NO: 225000 - protein, 15 aa, Artificial Sequence
  Description of Artificial Sequence: Synthetic peptide
  Seed: LRMKWMMAMKYPITA
LRMKFMMMMIYPFTA

SEQ ID NO: 225001 - protein, 15 aa, Artificial Sequence
  Description of Artificial Sequence: Synthetic peptide
  Seed: LRMKWMMAMKYPITA
LRMKFMMMMIYPGTA

SEQ ID NO: 225002 - protein, 15 aa, Artificial Sequence
  Description of Artificial Sequence: Synthetic peptide
  Seed: LRMKWMMAMKYPITA
LRMKFMMMMIYPHTA

SEQ ID NO: 225003 - protein, 15 aa, Artificial Sequence
  Description of Artificial Sequence: Synthetic peptide
  Seed: LRMKWMMAMKYPITA
LRMKFMMMMIYPITA

SEQ ID NO: 225004 - protein, 15 aa, Artificial Sequence
  Description of Artificial Sequence: Synthetic peptide
  Seed: LRMKWMMAMKYPITA
LRMKFMMMMIYPKTA

SEQ ID NO: 225005 - protein, 15 aa, Artificial Sequence
  Description of Artificial Sequence: Synthetic peptide
  Seed: LRMKWMMAMKYPITA
LRMKFMMMMIYPLTA

SEQ ID NO: 225006 - protein, 15 aa, Artificial Sequence
  Description of Artificial Sequence: Synthetic peptide
  Seed: LRMKWMMAMKYPITA
LRMKFMMMMIYPMTA

SEQ ID NO: 225007 - protein, 15 aa, Artificial Sequence
  Description of Artificial Sequence: Synthetic peptide
  Seed: LRMKWMMAMKYPITA
LRMKFMMMMIYPNTA

SEQ ID NO: 225008 - protein, 15 aa, Artificial Sequence
  Description of Artificial Sequence: Synthetic peptide
  Seed: LRMKWMMAMKYPITA
LRMKFMMMMIYPPTA

SEQ ID NO: 225009 - protein, 15 aa, Artificial Sequence
  Description of Artificial Sequence: Synthetic peptide
  Seed: LRMKWMMAMKYPITA
LRMKFMMMMIYPQTA

SEQ ID NO: 225010 - protein, 15 aa, Artificial Sequence
  Description of Artificial Sequence: Synthetic peptide
  Seed: LRMKWMMAMKYPITA
LRMKFMMMMIYPRTA

SEQ ID NO: 225011 - protein, 15 aa, Artificial Sequence
  Description of Artificial Sequence: Synthetic peptide
  Seed: LRMKWMMAMKYPITA
LRMKFMMMMIYPSTA

SEQ ID NO: 225012 - protein, 15 aa, Artificial Sequence
  Description of Artificial Sequence: Synthetic peptide
  Seed: LRMKWMMAMKYPITA
LRMKFMMMMIYPTTA

SEQ ID NO: 225013 - protein, 15 aa, Artificial Sequence
  Description of Artificial Sequence: Synthetic peptide
  Seed: LRMKWMMAMKYPITA
LRMKFMMMMIYPVTA

SEQ ID NO: 225014 - protein, 15 aa, Artificial Sequence
  Description of Artificial Sequence: Synthetic peptide
  Seed: LRMKWMMAMKYPITA
LRMKFMMMMIYPYTA

SEQ ID NO: 225015 - protein, 15 aa, Artificial Sequence
  Description of Artificial Sequence: Synthetic peptide
  Seed: LRMKWMMAMKYPITA
LRMKFMMMMKYPATA

SEQ ID NO: 225016 - protein, 15 aa, Artificial Sequence
  Description of Artificial Sequence: Synthetic peptide
  Seed: LRMKWMMAMKYPITA
LRMKFMMMMKYPCTA

SEQ ID NO: 225017 - protein, 15 aa, Artificial Sequence
  Description of Artificial Sequence: Synthetic peptide
  Seed: LRMKWMMAMKYPITA
LRMKFMMMMKYPDTA

SEQ ID NO: 225018 - protein, 15 aa, Artificial Sequence
  Description of Artificial Sequence: Synthetic peptide
  Seed: LRMKWMMAMKYPITA
LRMKFMMMMKYPETA

SEQ ID NO: 225019 - protein, 15 aa, Artificial Sequence
  Description of Artificial Sequence: Synthetic peptide
  Seed: LRMKWMMAMKYPITA
LRMKFMMMMKYPFTA

SEQ ID NO: 225020 - protein, 15 aa, Artificial Sequence
  Description of Artificial Sequence: Synthetic peptide
  Seed: LRMKWMMAMKYPITA
LRMKFMMMMKYPGTA

SEQ ID NO: 225021 - protein, 15 aa, Artificial Sequence
  Description of Artificial Sequence: Synthetic peptide
  Seed: LRMKWMMAMKYPITA
LRMKFMMMMKYPHTA

SEQ ID NO: 225022 - protein, 15 aa, Artificial Sequence
  Description of Artificial Sequence: Synthetic peptide
  Seed: LRMKWMMAMKYPITA
LRMKFMMMMKYPITA

SEQ ID NO: 225023 - protein, 15 aa, Artificial Sequence
  Description of Artificial Sequence: Synthetic peptide
  Seed: LRMKWMMAMKYPITA
LRMKFMMMMKYPKTA

SEQ ID NO: 225024 - protein, 15 aa, Artificial Sequence
  Description of Artificial Sequence: Synthetic peptide
  Seed: LRMKWMMAMKYPITA
LRMKFMMMMKYPLTA

SEQ ID NO: 225025 - protein, 15 aa, Artificial Sequence
  Description of Artificial Sequence: Synthetic peptide
  Seed: LRMKWMMAMKYPITA
LRMKFMMMMKYPMTA

SEQ ID NO: 225026 - protein, 15 aa, Artificial Sequence
  Description of Artificial Sequence: Synthetic peptide
  Seed: LRMKWMMAMKYPITA
LRMKFMMMMKYPNTA

SEQ ID NO: 225027 - protein, 15 aa, Artificial Sequence
  Description of Artificial Sequence: Synthetic peptide
  Seed: LRMKWMMAMKYPITA
LRMKFMMMMKYPPTA

SEQ ID NO: 225028 - protein, 15 aa, Artificial Sequence
  Description of Artificial Sequence: Synthetic peptide
  Seed: LRMKWMMAMKYPITA
LRMKFMMMMKYPQTA

SEQ ID NO: 225029 - protein, 15 aa, Artificial Sequence
  Description of Artificial Sequence: Synthetic peptide
  Seed: LRMKWMMAMKYPITA
LRMKFMMMMKYPRTA

SEQ ID NO: 225030 - protein, 15 aa, Artificial Sequence
  Description of Artificial Sequence: Synthetic peptide
  Seed: LRMKWMMAMKYPITA
LRMKFMMMMKYPSTA

SEQ ID NO: 225031 - protein, 15 aa, Artificial Sequence
  Description of Artificial Sequence: Synthetic peptide
  Seed: LRMKWMMAMKYPITA
LRMKFMMMMKYPTTA

SEQ ID NO: 225032 - protein, 15 aa, Artificial Sequence
  Description of Artificial Sequence: Synthetic peptide
  Seed: LRMKWMMAMKYPITA
LRMKFMMMMKYPVTA

SEQ ID NO: 225033 - protein, 15 aa, Artificial Sequence
  Description of Artificial Sequence: Synthetic peptide
  Seed: LRMKWMMAMKYPITA
LRMKFMMMMKYPWTA

SEQ ID NO: 225034 - protein, 15 aa, Artificial Sequence
  Description of Artificial Sequence: Synthetic peptide
  Seed: LRMKWMMAMKYPITA
LRMKFMMMMKYPYTA

SEQ ID NO: 225035 - protein, 15 aa, Artificial Sequence
  Description of Artificial Sequence: Synthetic peptide
  Seed: LRMKWMMAMKYPITA
LRMKFMMMMLYPATA

SEQ ID NO: 225036 - protein, 15 aa, Artificial Sequence
  Description of Artificial Sequence: Synthetic peptide
  Seed: LRMKWMMAMKYPITA
LRMKFMMMMLYPCTA

SEQ ID NO: 225037 - protein, 15 aa, Artificial Sequence
  Description of Artificial Sequence: Synthetic peptide
  Seed: LRMKWMMAMKYPITA
LRMKFMMMMLYPDTA

SEQ ID NO: 225038 - protein, 15 aa, Artificial Sequence
  Description of Artificial Sequence: Synthetic peptide
  Seed: LRMKWMMAMKYPITA
LRMKFMMMMLYPETA

SEQ ID NO: 225039 - protein, 15 aa, Artificial Sequence
  Description of Artificial Sequence: Synthetic peptide
  Seed: LRMKWMMAMKYPITA
LRMKFMMMMLYPGTA

SEQ ID NO: 225040 - protein, 15 aa, Artificial Sequence
  Description of Artificial Sequence: Synthetic peptide
  Seed: LRMKWMMAMKYPITA
LRMKFMMMMLYPHTA

SEQ ID NO: 225041 - protein, 15 aa, Artificial Sequence
  Description of Artificial Sequence: Synthetic peptide
  Seed: LRMKWMMAMKYPITA
LRMKFMMMMLYPITA

SEQ ID NO: 225042 - protein, 15 aa, Artificial Sequence
  Description of Artificial Sequence: Synthetic peptide
  Seed: LRMKWMMAMKYPITA
LRMKFMMMMLYPLTA

SEQ ID NO: 225043 - protein, 15 aa, Artificial Sequence
  Description of Artificial Sequence: Synthetic peptide
  Seed: LRMKWMMAMKYPITA
LRMKFMMMMLYPMTA

SEQ ID NO: 225044 - protein, 15 aa, Artificial Sequence
  Description of Artificial Sequence: Synthetic peptide
  Seed: LRMKWMMAMKYPITA
LRMKFMMMMLYPNTA

SEQ ID NO: 225045 - protein, 15 aa, Artificial Sequence
  Description of Artificial Sequence: Synthetic peptide
  Seed: LRMKWMMAMKYPITA
LRMKFMMMMLYPQTA

SEQ ID NO: 225046 - protein, 15 aa, Artificial Sequence
  Description of Artificial Sequence: Synthetic peptide
  Seed: LRMKWMMAMKYPITA
LRMKFMMMMLYPRTA

SEQ ID NO: 225047 - protein, 15 aa, Artificial Sequence
  Description of Artificial Sequence: Synthetic peptide
  Seed: LRMKWMMAMKYPITA
LRMKFMMMMLYPSTA

SEQ ID NO: 225048 - protein, 15 aa, Artificial Sequence
  Description of Artificial Sequence: Synthetic peptide
  Seed: LRMKWMMAMKYPITA
LRMKFMMMMLYPTTA

SEQ ID NO: 225049 - protein, 15 aa, Artificial Sequence
  Description of Artificial Sequence: Synthetic peptide
  Seed: LRMKWMMAMKYPITA
LRMKFMMMMLYPVTA

SEQ ID NO: 225050 - protein, 15 aa, Artificial Sequence
  Description of Artificial Sequence: Synthetic peptide
  Seed: LRMKWMMAMKYPITA
LRMKFMMMMMYPATA

SEQ ID NO: 225051 - protein, 15 aa, Artificial Sequence
  Description of Artificial Sequence: Synthetic peptide
  Seed: LRMKWMMAMKYPITA
LRMKFMMMMMYPCTA

SEQ ID NO: 225052 - protein, 15 aa, Artificial Sequence
  Description of Artificial Sequence: Synthetic peptide
  Seed: LRMKWMMAMKYPITA
LRMKFMMMMMYPDTA

SEQ ID NO: 225053 - protein, 15 aa, Artificial Sequence
  Description of Artificial Sequence: Synthetic peptide
  Seed: LRMKWMMAMKYPITA
LRMKFMMMMMYPETA

SEQ ID NO: 225054 - protein, 15 aa, Artificial Sequence
  Description of Artificial Sequence: Synthetic peptide
  Seed: LRMKWMMAMKYPITA
LRMKFMMMMMYPFTA

SEQ ID NO: 225055 - protein, 15 aa, Artificial Sequence
  Description of Artificial Sequence: Synthetic peptide
  Seed: LRMKWMMAMKYPITA
LRMKFMMMMMYPGTA

SEQ ID NO: 225056 - protein, 15 aa, Artificial Sequence
  Description of Artificial Sequence: Synthetic peptide
  Seed: LRMKWMMAMKYPITA
LRMKFMMMMMYPHTA

SEQ ID NO: 225057 - protein, 15 aa, Artificial Sequence
  Description of Artificial Sequence: Synthetic peptide
  Seed: LRMKWMMAMKYPITA
LRMKFMMMMMYPITA

SEQ ID NO: 225058 - protein, 15 aa, Artificial Sequence
  Description of Artificial Sequence: Synthetic peptide
  Seed: LRMKWMMAMKYPITA
LRMKFMMMMMYPKTA

SEQ ID NO: 225059 - protein, 15 aa, Artificial Sequence
  Description of Artificial Sequence: Synthetic peptide
  Seed: LRMKWMMAMKYPITA
LRMKFMMMMMYPLTA

SEQ ID NO: 225060 - protein, 15 aa, Artificial Sequence
  Description of Artificial Sequence: Synthetic peptide
  Seed: LRMKWMMAMKYPITA
LRMKFMMMMMYPMTA

SEQ ID NO: 225061 - protein, 15 aa, Artificial Sequence
  Description of Artificial Sequence: Synthetic peptide
  Seed: LRMKWMMAMKYPITA
LRMKFMMMMMYPNTA

SEQ ID NO: 225062 - protein, 15 aa, Artificial Sequence
  Description of Artificial Sequence: Synthetic peptide
  Seed: LRMKWMMAMKYPITA
LRMKFMMMMMYPQTA

SEQ ID NO: 225063 - protein, 15 aa, Artificial Sequence
  Description of Artificial Sequence: Synthetic peptide
  Seed: LRMKWMMAMKYPITA
LRMKFMMMMMYPRTA

SEQ ID NO: 225064 - protein, 15 aa, Artificial Sequence
  Description of Artificial Sequence: Synthetic peptide
  Seed: LRMKWMMAMKYPITA
LRMKFMMMMMYPSTA

SEQ ID NO: 225065 - protein, 15 aa, Artificial Sequence
  Description of Artificial Sequence: Synthetic peptide
  Seed: LRMKWMMAMKYPITA
LRMKFMMMMMYPTTA

SEQ ID NO: 225066 - protein, 15 aa, Artificial Sequence
  Description of Artificial Sequence: Synthetic peptide
  Seed: LRMKWMMAMKYPITA
LRMKFMMMMMYPVTA

SEQ ID NO: 225067 - protein, 15 aa, Artificial Sequence
  Description of Artificial Sequence: Synthetic peptide
  Seed: LRMKWMMAMKYPITA
LRMKFMMMMNYPATA

SEQ ID NO: 225068 - protein, 15 aa, Artificial Sequence
  Description of Artificial Sequence: Synthetic peptide
  Seed: LRMKWMMAMKYPITA
LRMKFMMMMNYPCTA

SEQ ID NO: 225069 - protein, 15 aa, Artificial Sequence
  Description of Artificial Sequence: Synthetic peptide
  Seed: LRMKWMMAMKYPITA
LRMKFMMMMNYPDTA

SEQ ID NO: 225070 - protein, 15 aa, Artificial Sequence
  Description of Artificial Sequence: Synthetic peptide
  Seed: LRMKWMMAMKYPITA
LRMKFMMMMNYPETA

SEQ ID NO: 225071 - protein, 15 aa, Artificial Sequence
  Description of Artificial Sequence: Synthetic peptide
  Seed: LRMKWMMAMKYPITA
LRMKFMMMMNYPFTA

SEQ ID NO: 225072 - protein, 15 aa, Artificial Sequence
  Description of Artificial Sequence: Synthetic peptide
  Seed: LRMKWMMAMKYPITA
LRMKFMMMMNYPGTA

SEQ ID NO: 225073 - protein, 15 aa, Artificial Sequence
  Description of Artificial Sequence: Synthetic peptide
  Seed: LRMKWMMAMKYPITA
LRMKFMMMMNYPHTA

SEQ ID NO: 225074 - protein, 15 aa, Artificial Sequence
  Description of Artificial Sequence: Synthetic peptide
  Seed: LRMKWMMAMKYPITA
LRMKFMMMMNYPITA

SEQ ID NO: 225075 - protein, 15 aa, Artificial Sequence
  Description of Artificial Sequence: Synthetic peptide
  Seed: LRMKWMMAMKYPITA
LRMKFMMMMNYPKTA

SEQ ID NO: 225076 - protein, 15 aa, Artificial Sequence
  Description of Artificial Sequence: Synthetic peptide
  Seed: LRMKWMMAMKYPITA
LRMKFMMMMNYPLTA

SEQ ID NO: 225077 - protein, 15 aa, Artificial Sequence
  Description of Artificial Sequence: Synthetic peptide
  Seed: LRMKWMMAMKYPITA
LRMKFMMMMNYPMTA

SEQ ID NO: 225078 - protein, 15 aa, Artificial Sequence
  Description of Artificial Sequence: Synthetic peptide
  Seed: LRMKWMMAMKYPITA
LRMKFMMMMNYPNTA

SEQ ID NO: 225079 - protein, 15 aa, Artificial Sequence
  Description of Artificial Sequence: Synthetic peptide
  Seed: LRMKWMMAMKYPITA
LRMKFMMMMNYPPTA

SEQ ID NO: 225080 - protein, 15 aa, Artificial Sequence
  Description of Artificial Sequence: Synthetic peptide
  Seed: LRMKWMMAMKYPITA
LRMKFMMMMNYPQTA

SEQ ID NO: 225081 - protein, 15 aa, Artificial Sequence
  Description of Artificial Sequence: Synthetic peptide
  Seed: LRMKWMMAMKYPITA
LRMKFMMMMNYPRTA

SEQ ID NO: 225082 - protein, 15 aa, Artificial Sequence
  Description of Artificial Sequence: Synthetic peptide
  Seed: LRMKWMMAMKYPITA
LRMKFMMMMNYPSTA

SEQ ID NO: 225083 - protein, 15 aa, Artificial Sequence
  Description of Artificial Sequence: Synthetic peptide
  Seed: LRMKWMMAMKYPITA
LRMKFMMMMNYPTTA

SEQ ID NO: 225084 - protein, 15 aa, Artificial Sequence
  Description of Artificial Sequence: Synthetic peptide
  Seed: LRMKWMMAMKYPITA
LRMKFMMMMNYPVTA

SEQ ID NO: 225085 - protein, 15 aa, Artificial Sequence
  Description of Artificial Sequence: Synthetic peptide
  Seed: LRMKWMMAMKYPITA
LRMKFMMMMNYPWTA

SEQ ID NO: 225086 - protein, 15 aa, Artificial Sequence
  Description of Artificial Sequence: Synthetic peptide
  Seed: LRMKWMMAMKYPITA
LRMKFMMMMNYPYTA

SEQ ID NO: 225087 - protein, 15 aa, Artificial Sequence
  Description of Artificial Sequence: Synthetic peptide
  Seed: LRMKWMMAMKYPITA
LRMKFMMMMPYPATA

SEQ ID NO: 225088 - protein, 15 aa, Artificial Sequence
  Description of Artificial Sequence: Synthetic peptide
  Seed: LRMKWMMAMKYPITA
LRMKFMMMMPYPCTA

SEQ ID NO: 225089 - protein, 15 aa, Artificial Sequence
  Description of Artificial Sequence: Synthetic peptide
  Seed: LRMKWMMAMKYPITA
LRMKFMMMMPYPDTA

SEQ ID NO: 225090 - protein, 15 aa, Artificial Sequence
  Description of Artificial Sequence: Synthetic peptide
  Seed: LRMKWMMAMKYPITA
LRMKFMMMMPYPETA

SEQ ID NO: 225091 - protein, 15 aa, Artificial Sequence
  Description of Artificial Sequence: Synthetic peptide
  Seed: LRMKWMMAMKYPITA
LRMKFMMMMPYPFTA

SEQ ID NO: 225092 - protein, 15 aa, Artificial Sequence
  Description of Artificial Sequence: Synthetic peptide
  Seed: LRMKWMMAMKYPITA
LRMKFMMMMPYPGTA

SEQ ID NO: 225093 - protein, 15 aa, Artificial Sequence
  Description of Artificial Sequence: Synthetic peptide
  Seed: LRMKWMMAMKYPITA
LRMKFMMMMPYPHTA

SEQ ID NO: 225094 - protein, 15 aa, Artificial Sequence
  Description of Artificial Sequence: Synthetic peptide
  Seed: LRMKWMMAMKYPITA
LRMKFMMMMPYPITA

SEQ ID NO: 225095 - protein, 15 aa, Artificial Sequence
  Description of Artificial Sequence: Synthetic peptide
  Seed: LRMKWMMAMKYPITA
LRMKFMMMMPYPKTA

SEQ ID NO: 225096 - protein, 15 aa, Artificial Sequence
  Description of Artificial Sequence: Synthetic peptide
  Seed: LRMKWMMAMKYPITA
LRMKFMMMMPYPLTA

SEQ ID NO: 225097 - protein, 15 aa, Artificial Sequence
  Description of Artificial Sequence: Synthetic peptide
  Seed: LRMKWMMAMKYPITA
LRMKFMMMMPYPMTA

SEQ ID NO: 225098 - protein, 15 aa, Artificial Sequence
  Description of Artificial Sequence: Synthetic peptide
  Seed: LRMKWMMAMKYPITA
LRMKFMMMMPYPNTA

SEQ ID NO: 225099 - protein, 15 aa, Artificial Sequence
  Description of Artificial Sequence: Synthetic peptide
  Seed: LRMKWMMAMKYPITA
LRMKFMMMMPYPPTA

SEQ ID NO: 225100 - protein, 15 aa, Artificial Sequence
  Description of Artificial Sequence: Synthetic peptide
  Seed: LRMKWMMAMKYPITA
LRMKFMMMMPYPQTA

SEQ ID NO: 225101 - protein, 15 aa, Artificial Sequence
  Description of Artificial Sequence: Synthetic peptide
  Seed: LRMKWMMAMKYPITA
LRMKFMMMMPYPRTA

SEQ ID NO: 225102 - protein, 15 aa, Artificial Sequence
  Description of Artificial Sequence: Synthetic peptide
  Seed: LRMKWMMAMKYPITA
LRMKFMMMMPYPSTA

SEQ ID NO: 225103 - protein, 15 aa, Artificial Sequence
  Description of Artificial Sequence: Synthetic peptide
  Seed: LRMKWMMAMKYPITA
LRMKFMMMMPYPTTA

SEQ ID NO: 225104 - protein, 15 aa, Artificial Sequence
  Description of Artificial Sequence: Synthetic peptide
  Seed: LRMKWMMAMKYPITA
LRMKFMMMMPYPVTA

SEQ ID NO: 225105 - protein, 15 aa, Artificial Sequence
  Description of Artificial Sequence: Synthetic peptide
  Seed: LRMKWMMAMKYPITA
LRMKFMMMMPYPWTA

SEQ ID NO: 225106 - protein, 15 aa, Artificial Sequence
  Description of Artificial Sequence: Synthetic peptide
  Seed: LRMKWMMAMKYPITA
LRMKFMMMMPYPYTA

SEQ ID NO: 225107 - protein, 15 aa, Artificial Sequence
  Description of Artificial Sequence: Synthetic peptide
  Seed: LRMKWMMAMKYPITA
LRMKFMMMMQYPATA

SEQ ID NO: 225108 - protein, 15 aa, Artificial Sequence
  Description of Artificial Sequence: Synthetic peptide
  Seed: LRMKWMMAMKYPITA
LRMKFMMMMQYPCTA

SEQ ID NO: 225109 - protein, 15 aa, Artificial Sequence
  Description of Artificial Sequence: Synthetic peptide
  Seed: LRMKWMMAMKYPITA
LRMKFMMMMQYPDTA

SEQ ID NO: 225110 - protein, 15 aa, Artificial Sequence
  Description of Artificial Sequence: Synthetic peptide
  Seed: LRMKWMMAMKYPITA
LRMKFMMMMQYPETA

SEQ ID NO: 225111 - protein, 15 aa, Artificial Sequence
  Description of Artificial Sequence: Synthetic peptide
  Seed: LRMKWMMAMKYPITA
LRMKFMMMMQYPFTA

SEQ ID NO: 225112 - protein, 15 aa, Artificial Sequence
  Description of Artificial Sequence: Synthetic peptide
  Seed: LRMKWMMAMKYPITA
LRMKFMMMMQYPGTA

SEQ ID NO: 225113 - protein, 15 aa, Artificial Sequence
  Description of Artificial Sequence: Synthetic peptide
  Seed: LRMKWMMAMKYPITA
LRMKFMMMMQYPHTA

SEQ ID NO: 225114 - protein, 15 aa, Artificial Sequence
  Description of Artificial Sequence: Synthetic peptide
  Seed: LRMKWMMAMKYPITA
LRMKFMMMMQYPITA

SEQ ID NO: 225115 - protein, 15 aa, Artificial Sequence
  Description of Artificial Sequence: Synthetic peptide
  Seed: LRMKWMMAMKYPITA
LRMKFMMMMQYPKTA

SEQ ID NO: 225116 - protein, 15 aa, Artificial Sequence
  Description of Artificial Sequence: Synthetic peptide
  Seed: LRMKWMMAMKYPITA
LRMKFMMMMQYPLTA

SEQ ID NO: 225117 - protein, 15 aa, Artificial Sequence
  Description of Artificial Sequence: Synthetic peptide
  Seed: LRMKWMMAMKYPITA
LRMKFMMMMQYPMTA

SEQ ID NO: 225118 - protein, 15 aa, Artificial Sequence
  Description of Artificial Sequence: Synthetic peptide
  Seed: LRMKWMMAMKYPITA
LRMKFMMMMQYPNTA

SEQ ID NO: 225119 - protein, 15 aa, Artificial Sequence
  Description of Artificial Sequence: Synthetic peptide
  Seed: LRMKWMMAMKYPITA
LRMKFMMMMQYPPTA

SEQ ID NO: 225120 - protein, 15 aa, Artificial Sequence
  Description of Artificial Sequence: Synthetic peptide
  Seed: LRMKWMMAMKYPITA
LRMKFMMMMQYPQTA

SEQ ID NO: 225121 - protein, 15 aa, Artificial Sequence
  Description of Artificial Sequence: Synthetic peptide
  Seed: LRMKWMMAMKYPITA
LRMKFMMMMQYPRTA

SEQ ID NO: 225122 - protein, 15 aa, Artificial Sequence
  Description of Artificial Sequence: Synthetic peptide
  Seed: LRMKWMMAMKYPITA
LRMKFMMMMQYPSTA

SEQ ID NO: 225123 - protein, 15 aa, Artificial Sequence
  Description of Artificial Sequence: Synthetic peptide
  Seed: LRMKWMMAMKYPITA
LRMKFMMMMQYPTTA

SEQ ID NO: 225124 - protein, 15 aa, Artificial Sequence
  Description of Artificial Sequence: Synthetic peptide
  Seed: LRMKWMMAMKYPITA
LRMKFMMMMQYPVTA

SEQ ID NO: 225125 - protein, 15 aa, Artificial Sequence
  Description of Artificial Sequence: Synthetic peptide
  Seed: LRMKWMMAMKYPITA
LRMKFMMMMQYPYTA

SEQ ID NO: 225126 - protein, 15 aa, Artificial Sequence
  Description of Artificial Sequence: Synthetic peptide
  Seed: LRMKWMMAMKYPITA
LRMKFMMMMRYPATA

SEQ ID NO: 225127 - protein, 15 aa, Artificial Sequence
  Description of Artificial Sequence: Synthetic peptide
  Seed: LRMKWMMAMKYPITA
LRMKFMMMMRYPCTA

SEQ ID NO: 225128 - protein, 15 aa, Artificial Sequence
  Description of Artificial Sequence: Synthetic peptide
  Seed: LRMKWMMAMKYPITA
LRMKFMMMMRYPDTA

SEQ ID NO: 225129 - protein, 15 aa, Artificial Sequence
  Description of Artificial Sequence: Synthetic peptide
  Seed: LRMKWMMAMKYPITA
LRMKFMMMMRYPETA

SEQ ID NO: 225130 - protein, 15 aa, Artificial Sequence
  Description of Artificial Sequence: Synthetic peptide
  Seed: LRMKWMMAMKYPITA
LRMKFMMMMRYPFTA

SEQ ID NO: 225131 - protein, 15 aa, Artificial Sequence
  Description of Artificial Sequence: Synthetic peptide
  Seed: LRMKWMMAMKYPITA
LRMKFMMMMRYPGTA

SEQ ID NO: 225132 - protein, 15 aa, Artificial Sequence
  Description of Artificial Sequence: Synthetic peptide
  Seed: LRMKWMMAMKYPITA
LRMKFMMMMRYPHTA

SEQ ID NO: 225133 - protein, 15 aa, Artificial Sequence
  Description of Artificial Sequence: Synthetic peptide
  Seed: LRMKWMMAMKYPITA
LRMKFMMMMRYPITA

SEQ ID NO: 225134 - protein, 15 aa, Artificial Sequence
  Description of Artificial Sequence: Synthetic peptide
  Seed: LRMKWMMAMKYPITA
LRMKFMMMMRYPKTA

SEQ ID NO: 225135 - protein, 15 aa, Artificial Sequence
  Description of Artificial Sequence: Synthetic peptide
  Seed: LRMKWMMAMKYPITA
LRMKFMMMMRYPLTA

SEQ ID NO: 225136 - protein, 15 aa, Artificial Sequence
  Description of Artificial Sequence: Synthetic peptide
  Seed: LRMKWMMAMKYPITA
LRMKFMMMMRYPMTA

SEQ ID NO: 225137 - protein, 15 aa, Artificial Sequence
  Description of Artificial Sequence: Synthetic peptide
  Seed: LRMKWMMAMKYPITA
LRMKFMMMMRYPNTA

SEQ ID NO: 225138 - protein, 15 aa, Artificial Sequence
  Description of Artificial Sequence: Synthetic peptide
  Seed: LRMKWMMAMKYPITA
LRMKFMMMMRYPPTA

SEQ ID NO: 225139 - protein, 15 aa, Artificial Sequence
  Description of Artificial Sequence: Synthetic peptide
  Seed: LRMKWMMAMKYPITA
LRMKFMMMMRYPQTA

SEQ ID NO: 225140 - protein, 15 aa, Artificial Sequence
  Description of Artificial Sequence: Synthetic peptide
  Seed: LRMKWMMAMKYPITA
LRMKFMMMMRYPRTA

SEQ ID NO: 225141 - protein, 15 aa, Artificial Sequence
  Description of Artificial Sequence: Synthetic peptide
  Seed: LRMKWMMAMKYPITA
LRMKFMMMMRYPSTA

SEQ ID NO: 225142 - protein, 15 aa, Artificial Sequence
  Description of Artificial Sequence: Synthetic peptide
  Seed: LRMKWMMAMKYPITA
LRMKFMMMMRYPTTA

SEQ ID NO: 225143 - protein, 15 aa, Artificial Sequence
  Description of Artificial Sequence: Synthetic peptide
  Seed: LRMKWMMAMKYPITA
LRMKFMMMMRYPVTA

SEQ ID NO: 225144 - protein, 15 aa, Artificial Sequence
  Description of Artificial Sequence: Synthetic peptide
  Seed: LRMKWMMAMKYPITA
LRMKFMMMMRYPWTA

SEQ ID NO: 225145 - protein, 15 aa, Artificial Sequence
  Description of Artificial Sequence: Synthetic peptide
  Seed: LRMKWMMAMKYPITA
LRMKFMMMMRYPYTA

SEQ ID NO: 225146 - protein, 15 aa, Artificial Sequence
  Description of Artificial Sequence: Synthetic peptide
  Seed: LRMKWMMAMKYPITA
LRMKFMMMMSYPATA

SEQ ID NO: 225147 - protein, 15 aa, Artificial Sequence
  Description of Artificial Sequence: Synthetic peptide
  Seed: LRMKWMMAMKYPITA
LRMKFMMMMSYPCTA

SEQ ID NO: 225148 - protein, 15 aa, Artificial Sequence
  Description of Artificial Sequence: Synthetic peptide
  Seed: LRMKWMMAMKYPITA
LRMKFMMMMSYPDTA

SEQ ID NO: 225149 - protein, 15 aa, Artificial Sequence
  Description of Artificial Sequence: Synthetic peptide
  Seed: LRMKWMMAMKYPITA
LRMKFMMMMSYPETA

SEQ ID NO: 225150 - protein, 15 aa, Artificial Sequence
  Description of Artificial Sequence: Synthetic peptide
  Seed: LRMKWMMAMKYPITA
LRMKFMMMMSYPFTA

SEQ ID NO: 225151 - protein, 15 aa, Artificial Sequence
  Description of Artificial Sequence: Synthetic peptide
  Seed: LRMKWMMAMKYPITA
LRMKFMMMMSYPGTA

SEQ ID NO: 225152 - protein, 15 aa, Artificial Sequence
  Description of Artificial Sequence: Synthetic peptide
  Seed: LRMKWMMAMKYPITA
LRMKFMMMMSYPHTA

SEQ ID NO: 225153 - protein, 15 aa, Artificial Sequence
  Description of Artificial Sequence: Synthetic peptide
  Seed: LRMKWMMAMKYPITA
LRMKFMMMMSYPITA

SEQ ID NO: 225154 - protein, 15 aa, Artificial Sequence
  Description of Artificial Sequence: Synthetic peptide
  Seed: LRMKWMMAMKYPITA
LRMKFMMMMSYPKTA

SEQ ID NO: 225155 - protein, 15 aa, Artificial Sequence
  Description of Artificial Sequence: Synthetic peptide
  Seed: LRMKWMMAMKYPITA
LRMKFMMMMSYPLTA

SEQ ID NO: 225156 - protein, 15 aa, Artificial Sequence
  Description of Artificial Sequence: Synthetic peptide
  Seed: LRMKWMMAMKYPITA
LRMKFMMMMSYPMTA

SEQ ID NO: 225157 - protein, 15 aa, Artificial Sequence
  Description of Artificial Sequence: Synthetic peptide
  Seed: LRMKWMMAMKYPITA
LRMKFMMMMSYPNTA

SEQ ID NO: 225158 - protein, 15 aa, Artificial Sequence
  Description of Artificial Sequence: Synthetic peptide
  Seed: LRMKWMMAMKYPITA
LRMKFMMMMSYPPTA

SEQ ID NO: 225159 - protein, 15 aa, Artificial Sequence
  Description of Artificial Sequence: Synthetic peptide
  Seed: LRMKWMMAMKYPITA
LRMKFMMMMSYPQTA

SEQ ID NO: 225160 - protein, 15 aa, Artificial Sequence
  Description of Artificial Sequence: Synthetic peptide
  Seed: LRMKWMMAMKYPITA
LRMKFMMMMSYPRTA

SEQ ID NO: 225161 - protein, 15 aa, Artificial Sequence
  Description of Artificial Sequence: Synthetic peptide
  Seed: LRMKWMMAMKYPITA
LRMKFMMMMSYPSTA

SEQ ID NO: 225162 - protein, 15 aa, Artificial Sequence
  Description of Artificial Sequence: Synthetic peptide
  Seed: LRMKWMMAMKYPITA
LRMKFMMMMSYPTTA

SEQ ID NO: 225163 - protein, 15 aa, Artificial Sequence
  Description of Artificial Sequence: Synthetic peptide
  Seed: LRMKWMMAMKYPITA
LRMKFMMMMSYPVTA

SEQ ID NO: 225164 - protein, 15 aa, Artificial Sequence
  Description of Artificial Sequence: Synthetic peptide
  Seed: LRMKWMMAMKYPITA
LRMKFMMMMSYPWTA

SEQ ID NO: 225165 - protein, 15 aa, Artificial Sequence
  Description of Artificial Sequence: Synthetic peptide
  Seed: LRMKWMMAMKYPITA
LRMKFMMMMSYPYTA

SEQ ID NO: 225166 - protein, 15 aa, Artificial Sequence
  Description of Artificial Sequence: Synthetic peptide
  Seed: LRMKWMMAMKYPITA
LRMKFMMMMTYPATA

SEQ ID NO: 225167 - protein, 15 aa, Artificial Sequence
  Description of Artificial Sequence: Synthetic peptide
  Seed: LRMKWMMAMKYPITA
LRMKFMMMMTYPCTA

SEQ ID NO: 225168 - protein, 15 aa, Artificial Sequence
  Description of Artificial Sequence: Synthetic peptide
  Seed: LRMKWMMAMKYPITA
LRMKFMMMMTYPDTA

SEQ ID NO: 225169 - protein, 15 aa, Artificial Sequence
  Description of Artificial Sequence: Synthetic peptide
  Seed: LRMKWMMAMKYPITA
LRMKFMMMMTYPETA

SEQ ID NO: 225170 - protein, 15 aa, Artificial Sequence
  Description of Artificial Sequence: Synthetic peptide
  Seed: LRMKWMMAMKYPITA
LRMKFMMMMTYPFTA

SEQ ID NO: 225171 - protein, 15 aa, Artificial Sequence
  Description of Artificial Sequence: Synthetic peptide
  Seed: LRMKWMMAMKYPITA
LRMKFMMMMTYPGTA

SEQ ID NO: 225172 - protein, 15 aa, Artificial Sequence
  Description of Artificial Sequence: Synthetic peptide
  Seed: LRMKWMMAMKYPITA
LRMKFMMMMTYPHTA

SEQ ID NO: 225173 - protein, 15 aa, Artificial Sequence
  Description of Artificial Sequence: Synthetic peptide
  Seed: LRMKWMMAMKYPITA
LRMKFMMMMTYPITA

SEQ ID NO: 225174 - protein, 15 aa, Artificial Sequence
  Description of Artificial Sequence: Synthetic peptide
  Seed: LRMKWMMAMKYPITA
LRMKFMMMMTYPKTA

SEQ ID NO: 225175 - protein, 15 aa, Artificial Sequence
  Description of Artificial Sequence: Synthetic peptide
  Seed: LRMKWMMAMKYPITA
LRMKFMMMMTYPLTA

SEQ ID NO: 225176 - protein, 15 aa, Artificial Sequence
  Description of Artificial Sequence: Synthetic peptide
  Seed: LRMKWMMAMKYPITA
LRMKFMMMMTYPMTA

SEQ ID NO: 225177 - protein, 15 aa, Artificial Sequence
  Description of Artificial Sequence: Synthetic peptide
  Seed: LRMKWMMAMKYPITA
LRMKFMMMMTYPNTA

SEQ ID NO: 225178 - protein, 15 aa, Artificial Sequence
  Description of Artificial Sequence: Synthetic peptide
  Seed: LRMKWMMAMKYPITA
LRMKFMMMMTYPPTA

SEQ ID NO: 225179 - protein, 15 aa, Artificial Sequence
  Description of Artificial Sequence: Synthetic peptide
  Seed: LRMKWMMAMKYPITA
LRMKFMMMMTYPQTA

SEQ ID NO: 225180 - protein, 15 aa, Artificial Sequence
  Description of Artificial Sequence: Synthetic peptide
  Seed: LRMKWMMAMKYPITA
LRMKFMMMMTYPRTA

SEQ ID NO: 225181 - protein, 15 aa, Artificial Sequence
  Description of Artificial Sequence: Synthetic peptide
  Seed: LRMKWMMAMKYPITA
LRMKFMMMMTYPSTA

SEQ ID NO: 225182 - protein, 15 aa, Artificial Sequence
  Description of Artificial Sequence: Synthetic peptide
  Seed: LRMKWMMAMKYPITA
LRMKFMMMMTYPTTA

SEQ ID NO: 225183 - protein, 15 aa, Artificial Sequence
  Description of Artificial Sequence: Synthetic peptide
  Seed: LRMKWMMAMKYPITA
LRMKFMMMMTYPVTA

SEQ ID NO: 225184 - protein, 15 aa, Artificial Sequence
  Description of Artificial Sequence: Synthetic peptide
  Seed: LRMKWMMAMKYPITA
LRMKFMMMMTYPWTA

SEQ ID NO: 225185 - protein, 15 aa, Artificial Sequence
  Description of Artificial Sequence: Synthetic peptide
  Seed: LRMKWMMAMKYPITA
LRMKFMMMMTYPYTA

SEQ ID NO: 225186 - protein, 15 aa, Artificial Sequence
  Description of Artificial Sequence: Synthetic peptide
  Seed: LRMKWMMAMKYPITA
LRMKFMMMMVYPATA

SEQ ID NO: 225187 - protein, 15 aa, Artificial Sequence
  Description of Artificial Sequence: Synthetic peptide
  Seed: LRMKWMMAMKYPITA
LRMKFMMMMVYPCTA

SEQ ID NO: 225188 - protein, 15 aa, Artificial Sequence
  Description of Artificial Sequence: Synthetic peptide
  Seed: LRMKWMMAMKYPITA
LRMKFMMMMVYPDTA

SEQ ID NO: 225189 - protein, 15 aa, Artificial Sequence
  Description of Artificial Sequence: Synthetic peptide
  Seed: LRMKWMMAMKYPITA
LRMKFMMMMVYPETA

SEQ ID NO: 225190 - protein, 15 aa, Artificial Sequence
  Description of Artificial Sequence: Synthetic peptide
  Seed: LRMKWMMAMKYPITA
LRMKFMMMMVYPFTA

SEQ ID NO: 225191 - protein, 15 aa, Artificial Sequence
  Description of Artificial Sequence: Synthetic peptide
  Seed: LRMKWMMAMKYPITA
LRMKFMMMMVYPGTA

SEQ ID NO: 225192 - protein, 15 aa, Artificial Sequence
  Description of Artificial Sequence: Synthetic peptide
  Seed: LRMKWMMAMKYPITA
LRMKFMMMMVYPHTA

SEQ ID NO: 225193 - protein, 15 aa, Artificial Sequence
  Description of Artificial Sequence: Synthetic peptide
  Seed: LRMKWMMAMKYPITA
LRMKFMMMMVYPITA

SEQ ID NO: 225194 - protein, 15 aa, Artificial Sequence
  Description of Artificial Sequence: Synthetic peptide
  Seed: LRMKWMMAMKYPITA
LRMKFMMMMVYPKTA

SEQ ID NO: 225195 - protein, 15 aa, Artificial Sequence
  Description of Artificial Sequence: Synthetic peptide
  Seed: LRMKWMMAMKYPITA
LRMKFMMMMVYPLTA

SEQ ID NO: 225196 - protein, 15 aa, Artificial Sequence
  Description of Artificial Sequence: Synthetic peptide
  Seed: LRMKWMMAMKYPITA
LRMKFMMMMVYPMTA

SEQ ID NO: 225197 - protein, 15 aa, Artificial Sequence
  Description of Artificial Sequence: Synthetic peptide
  Seed: LRMKWMMAMKYPITA
LRMKFMMMMVYPNTA

SEQ ID NO: 225198 - protein, 15 aa, Artificial Sequence
  Description of Artificial Sequence: Synthetic peptide
  Seed: LRMKWMMAMKYPITA
LRMKFMMMMVYPPTA

SEQ ID NO: 225199 - protein, 15 aa, Artificial Sequence
  Description of Artificial Sequence: Synthetic peptide
  Seed: LRMKWMMAMKYPITA
LRMKFMMMMVYPQTA

SEQ ID NO: 225200 - protein, 15 aa, Artificial Sequence
  Description of Artificial Sequence: Synthetic peptide
  Seed: LRMKWMMAMKYPITA
LRMKFMMMMVYPRTA

SEQ ID NO: 225201 - protein, 15 aa, Artificial Sequence
  Description of Artificial Sequence: Synthetic peptide
  Seed: LRMKWMMAMKYPITA
LRMKFMMMMVYPSTA

SEQ ID NO: 225202 - protein, 15 aa, Artificial Sequence
  Description of Artificial Sequence: Synthetic peptide
  Seed: LRMKWMMAMKYPITA
LRMKFMMMMVYPTTA

SEQ ID NO: 225203 - protein, 15 aa, Artificial Sequence
  Description of Artificial Sequence: Synthetic peptide
  Seed: LRMKWMMAMKYPITA
LRMKFMMMMVYPVTA

SEQ ID NO: 225204 - protein, 15 aa, Artificial Sequence
  Description of Artificial Sequence: Synthetic peptide
  Seed: LRMKWMMAMKYPITA
LRMKFMMMMVYPWTA

SEQ ID NO: 225205 - protein, 15 aa, Artificial Sequence
  Description of Artificial Sequence: Synthetic peptide
  Seed: LRMKWMMAMKYPITA
LRMKFMMMMVYPYTA

SEQ ID NO: 225206 - protein, 15 aa, Artificial Sequence
  Description of Artificial Sequence: Synthetic peptide
  Seed: LRMKWMMAMKYPITA
LRMKFMMMMWYPATA

SEQ ID NO: 225207 - protein, 15 aa, Artificial Sequence
  Description of Artificial Sequence: Synthetic peptide
  Seed: LRMKWMMAMKYPITA
LRMKFMMMMWYPDTA

SEQ ID NO: 225208 - protein, 15 aa, Artificial Sequence
  Description of Artificial Sequence: Synthetic peptide
  Seed: LRMKWMMAMKYPITA
LRMKFMMMMWYPETA

SEQ ID NO: 225209 - protein, 15 aa, Artificial Sequence
  Description of Artificial Sequence: Synthetic peptide
  Seed: LRMKWMMAMKYPITA
LRMKFMMMMWYPHTA

SEQ ID NO: 225210 - protein, 15 aa, Artificial Sequence
  Description of Artificial Sequence: Synthetic peptide
  Seed: LRMKWMMAMKYPITA
LRMKFMMMMWYPITA

SEQ ID NO: 225211 - protein, 15 aa, Artificial Sequence
  Description of Artificial Sequence: Synthetic peptide
  Seed: LRMKWMMAMKYPITA
LRMKFMMMMWYPLTA

SEQ ID NO: 225212 - protein, 15 aa, Artificial Sequence
  Description of Artificial Sequence: Synthetic peptide
  Seed: LRMKWMMAMKYPITA
LRMKFMMMMWYPMTA

SEQ ID NO: 225213 - protein, 15 aa, Artificial Sequence
  Description of Artificial Sequence: Synthetic peptide
  Seed: LRMKWMMAMKYPITA
LRMKFMMMMWYPNTA

SEQ ID NO: 225214 - protein, 15 aa, Artificial Sequence
  Description of Artificial Sequence: Synthetic peptide
  Seed: LRMKWMMAMKYPITA
LRMKFMMMMWYPQTA

SEQ ID NO: 225215 - protein, 15 aa, Artificial Sequence
  Description of Artificial Sequence: Synthetic peptide
  Seed: LRMKWMMAMKYPITA
LRMKFMMMMWYPSTA

SEQ ID NO: 225216 - protein, 15 aa, Artificial Sequence
  Description of Artificial Sequence: Synthetic peptide
  Seed: LRMKWMMAMKYPITA
LRMKFMMMMWYPTTA

SEQ ID NO: 225217 - protein, 15 aa, Artificial Sequence
  Description of Artificial Sequence: Synthetic peptide
  Seed: LRMKWMMAMKYPITA
LRMKFMMMMWYPVTA

SEQ ID NO: 225218 - protein, 15 aa, Artificial Sequence
  Description of Artificial Sequence: Synthetic peptide
  Seed: LRMKWMMAMKYPITA
LRMKFMMMMYYPATA

SEQ ID NO: 225219 - protein, 15 aa, Artificial Sequence
  Description of Artificial Sequence: Synthetic peptide
  Seed: LRMKWMMAMKYPITA
LRMKFMMMMYYPDTA

SEQ ID NO: 225220 - protein, 15 aa, Artificial Sequence
  Description of Artificial Sequence: Synthetic peptide
  Seed: LRMKWMMAMKYPITA
LRMKFMMMMYYPETA

SEQ ID NO: 225221 - protein, 15 aa, Artificial Sequence
  Description of Artificial Sequence: Synthetic peptide
  Seed: LRMKWMMAMKYPITA
LRMKFMMMMYYPFTA

SEQ ID NO: 225222 - protein, 15 aa, Artificial Sequence
  Description of Artificial Sequence: Synthetic peptide
  Seed: LRMKWMMAMKYPITA
LRMKFMMMMYYPGTA

SEQ ID NO: 225223 - protein, 15 aa, Artificial Sequence
  Description of Artificial Sequence: Synthetic peptide
  Seed: LRMKWMMAMKYPITA
LRMKFMMMMYYPHTA

SEQ ID NO: 225224 - protein, 15 aa, Artificial Sequence
  Description of Artificial Sequence: Synthetic peptide
  Seed: LRMKWMMAMKYPITA
LRMKFMMMMYYPITA

SEQ ID NO: 225225 - protein, 15 aa, Artificial Sequence
  Description of Artificial Sequence: Synthetic peptide
  Seed: LRMKWMMAMKYPITA
LRMKFMMMMYYPLTA

SEQ ID NO: 225226 - protein, 15 aa, Artificial Sequence
  Description of Artificial Sequence: Synthetic peptide
  Seed: LRMKWMMAMKYPITA
LRMKFMMMMYYPMTA

SEQ ID NO: 225227 - protein, 15 aa, Artificial Sequence
  Description of Artificial Sequence: Synthetic peptide
  Seed: LRMKWMMAMKYPITA
LRMKFMMMMYYPNTA

SEQ ID NO: 225228 - protein, 15 aa, Artificial Sequence
  Description of Artificial Sequence: Synthetic peptide
  Seed: LRMKWMMAMKYPITA
LRMKFMMMMYYPPTA

SEQ ID NO: 225229 - protein, 15 aa, Artificial Sequence
  Description of Artificial Sequence: Synthetic peptide
  Seed: LRMKWMMAMKYPITA
LRMKFMMMMYYPQTA

SEQ ID NO: 225230 - protein, 15 aa, Artificial Sequence
  Description of Artificial Sequence: Synthetic peptide
  Seed: LRMKWMMAMKYPITA
LRMKFMMMMYYPSTA

SEQ ID NO: 225231 - protein, 15 aa, Artificial Sequence
  Description of Artificial Sequence: Synthetic peptide
  Seed: LRMKWMMAMKYPITA
LRMKFMMMMYYPTTA

SEQ ID NO: 225232 - protein, 15 aa, Artificial Sequence
  Description of Artificial Sequence: Synthetic peptide
  Seed: LRMKWMMAMKYPITA
LRMKFMMMMYYPVTA

SEQ ID NO: 225233 - protein, 15 aa, Artificial Sequence
  Description of Artificial Sequence: Synthetic peptide
  Seed: LRMKWMMAMKYPITA
LRMKFMMMMYYPYTA

SEQ ID NO: 225234 - protein, 15 aa, Artificial Sequence
  Description of Artificial Sequence: Synthetic peptide
  Seed: LRMKWMMAMKYPITA
LRMKFMMNMAYPATA

SEQ ID NO: 225235 - protein, 15 aa, Artificial Sequence
  Description of Artificial Sequence: Synthetic peptide
  Seed: LRMKWMMAMKYPITA
LRMKFMMNMAYPCTA

SEQ ID NO: 225236 - protein, 15 aa, Artificial Sequence
  Description of Artificial Sequence: Synthetic peptide
  Seed: LRMKWMMAMKYPITA
LRMKFMMNMAYPDTA

SEQ ID NO: 225237 - protein, 15 aa, Artificial Sequence
  Description of Artificial Sequence: Synthetic peptide
  Seed: LRMKWMMAMKYPITA
LRMKFMMNMAYPETA

SEQ ID NO: 225238 - protein, 15 aa, Artificial Sequence
  Description of Artificial Sequence: Synthetic peptide
  Seed: LRMKWMMAMKYPITA
LRMKFMMNMAYPFTA

SEQ ID NO: 225239 - protein, 15 aa, Artificial Sequence
  Description of Artificial Sequence: Synthetic peptide
  Seed: LRMKWMMAMKYPITA
LRMKFMMNMAYPGTA

SEQ ID NO: 225240 - protein, 15 aa, Artificial Sequence
  Description of Artificial Sequence: Synthetic peptide
  Seed: LRMKWMMAMKYPITA
LRMKFMMNMAYPHTA

SEQ ID NO: 225241 - protein, 15 aa, Artificial Sequence
  Description of Artificial Sequence: Synthetic peptide
  Seed: LRMKWMMAMKYPITA
LRMKFMMNMAYPITA

SEQ ID NO: 225242 - protein, 15 aa, Artificial Sequence
  Description of Artificial Sequence: Synthetic peptide
  Seed: LRMKWMMAMKYPITA
LRMKFMMNMAYPKTA

SEQ ID NO: 225243 - protein, 15 aa, Artificial Sequence
  Description of Artificial Sequence: Synthetic peptide
  Seed: LRMKWMMAMKYPITA
LRMKFMMNMAYPLTA

SEQ ID NO: 225244 - protein, 15 aa, Artificial Sequence
  Description of Artificial Sequence: Synthetic peptide
  Seed: LRMKWMMAMKYPITA
LRMKFMMNMAYPMTA

SEQ ID NO: 225245 - protein, 15 aa, Artificial Sequence
  Description of Artificial Sequence: Synthetic peptide
  Seed: LRMKWMMAMKYPITA
LRMKFMMNMAYPNTA

SEQ ID NO: 225246 - protein, 15 aa, Artificial Sequence
  Description of Artificial Sequence: Synthetic peptide
  Seed: LRMKWMMAMKYPITA
LRMKFMMNMAYPPTA

SEQ ID NO: 225247 - protein, 15 aa, Artificial Sequence
  Description of Artificial Sequence: Synthetic peptide
  Seed: LRMKWMMAMKYPITA
LRMKFMMNMAYPQTA

SEQ ID NO: 225248 - protein, 15 aa, Artificial Sequence
  Description of Artificial Sequence: Synthetic peptide
  Seed: LRMKWMMAMKYPITA
LRMKFMMNMAYPRTA

SEQ ID NO: 225249 - protein, 15 aa, Artificial Sequence
  Description of Artificial Sequence: Synthetic peptide
  Seed: LRMKWMMAMKYPITA
LRMKFMMNMAYPSTA

SEQ ID NO: 225250 - protein, 15 aa, Artificial Sequence
  Description of Artificial Sequence: Synthetic peptide
  Seed: LRMKWMMAMKYPITA
LRMKFMMNMAYPTTA

SEQ ID NO: 225251 - protein, 15 aa, Artificial Sequence
  Description of Artificial Sequence: Synthetic peptide
  Seed: LRMKWMMAMKYPITA
LRMKFMMNMAYPVTA

SEQ ID NO: 225252 - protein, 15 aa, Artificial Sequence
  Description of Artificial Sequence: Synthetic peptide
  Seed: LRMKWMMAMKYPITA
LRMKFMMNMAYPWTA

SEQ ID NO: 225253 - protein, 15 aa, Artificial Sequence
  Description of Artificial Sequence: Synthetic peptide
  Seed: LRMKWMMAMKYPITA
LRMKFMMNMAYPYTA

SEQ ID NO: 225254 - protein, 15 aa, Artificial Sequence
  Description of Artificial Sequence: Synthetic peptide
  Seed: LRMKWMMAMKYPITA
LRMKFMMNMCYPATA

SEQ ID NO: 225255 - protein, 15 aa, Artificial Sequence
  Description of Artificial Sequence: Synthetic peptide
  Seed: LRMKWMMAMKYPITA
LRMKFMMNMCYPFTA

SEQ ID NO: 225256 - protein, 15 aa, Artificial Sequence
  Description of Artificial Sequence: Synthetic peptide
  Seed: LRMKWMMAMKYPITA
LRMKFMMNMCYPGTA

SEQ ID NO: 225257 - protein, 15 aa, Artificial Sequence
  Description of Artificial Sequence: Synthetic peptide
  Seed: LRMKWMMAMKYPITA
LRMKFMMNMCYPITA

SEQ ID NO: 225258 - protein, 15 aa, Artificial Sequence
  Description of Artificial Sequence: Synthetic peptide
  Seed: LRMKWMMAMKYPITA
LRMKFMMNMCYPLTA

SEQ ID NO: 225259 - protein, 15 aa, Artificial Sequence
  Description of Artificial Sequence: Synthetic peptide
  Seed: LRMKWMMAMKYPITA
LRMKFMMNMCYPMTA

SEQ ID NO: 225260 - protein, 15 aa, Artificial Sequence
  Description of Artificial Sequence: Synthetic peptide
  Seed: LRMKWMMAMKYPITA
LRMKFMMNMCYPNTA

SEQ ID NO: 225261 - protein, 15 aa, Artificial Sequence
  Description of Artificial Sequence: Synthetic peptide
  Seed: LRMKWMMAMKYPITA
LRMKFMMNMCYPSTA

SEQ ID NO: 225262 - protein, 15 aa, Artificial Sequence
  Description of Artificial Sequence: Synthetic peptide
  Seed: LRMKWMMAMKYPITA
LRMKFMMNMCYPTTA

SEQ ID NO: 225263 - protein, 15 aa, Artificial Sequence
  Description of Artificial Sequence: Synthetic peptide
  Seed: LRMKWMMAMKYPITA
LRMKFMMNMCYPVTA

SEQ ID NO: 225264 - protein, 15 aa, Artificial Sequence
  Description of Artificial Sequence: Synthetic peptide
  Seed: LRMKWMMAMKYPITA
LRMKFMMNMCYPYTA

SEQ ID NO: 225265 - protein, 15 aa, Artificial Sequence
  Description of Artificial Sequence: Synthetic peptide
  Seed: LRMKWMMAMKYPITA
LRMKFMMNMDYPATA

SEQ ID NO: 225266 - protein, 15 aa, Artificial Sequence
  Description of Artificial Sequence: Synthetic peptide
  Seed: LRMKWMMAMKYPITA
LRMKFMMNMDYPFTA

SEQ ID NO: 225267 - protein, 15 aa, Artificial Sequence
  Description of Artificial Sequence: Synthetic peptide
  Seed: LRMKWMMAMKYPITA
LRMKFMMNMDYPITA

SEQ ID NO: 225268 - protein, 15 aa, Artificial Sequence
  Description of Artificial Sequence: Synthetic peptide
  Seed: LRMKWMMAMKYPITA
LRMKFMMNMDYPLTA

SEQ ID NO: 225269 - protein, 15 aa, Artificial Sequence
  Description of Artificial Sequence: Synthetic peptide
  Seed: LRMKWMMAMKYPITA
LRMKFMMNMDYPMTA

SEQ ID NO: 225270 - protein, 15 aa, Artificial Sequence
  Description of Artificial Sequence: Synthetic peptide
  Seed: LRMKWMMAMKYPITA
LRMKFMMNMDYPSTA

SEQ ID NO: 225271 - protein, 15 aa, Artificial Sequence
  Description of Artificial Sequence: Synthetic peptide
  Seed: LRMKWMMAMKYPITA
LRMKFMMNMDYPVTA

SEQ ID NO: 225272 - protein, 15 aa, Artificial Sequence
  Description of Artificial Sequence: Synthetic peptide
  Seed: LRMKWMMAMKYPITA
LRMKFMMNMDYPYTA

SEQ ID NO: 225273 - protein, 15 aa, Artificial Sequence
  Description of Artificial Sequence: Synthetic peptide
  Seed: LRMKWMMAMKYPITA
LRMKFMMNMEYPATA

SEQ ID NO: 225274 - protein, 15 aa, Artificial Sequence
  Description of Artificial Sequence: Synthetic peptide
  Seed: LRMKWMMAMKYPITA
LRMKFMMNMEYPFTA

SEQ ID NO: 225275 - protein, 15 aa, Artificial Sequence
  Description of Artificial Sequence: Synthetic peptide
  Seed: LRMKWMMAMKYPITA
LRMKFMMNMEYPITA

SEQ ID NO: 225276 - protein, 15 aa, Artificial Sequence
  Description of Artificial Sequence: Synthetic peptide
  Seed: LRMKWMMAMKYPITA
LRMKFMMNMEYPLTA

SEQ ID NO: 225277 - protein, 15 aa, Artificial Sequence
  Description of Artificial Sequence: Synthetic peptide
  Seed: LRMKWMMAMKYPITA
LRMKFMMNMEYPMTA

SEQ ID NO: 225278 - protein, 15 aa, Artificial Sequence
  Description of Artificial Sequence: Synthetic peptide
  Seed: LRMKWMMAMKYPITA
LRMKFMMNMEYPVTA

SEQ ID NO: 225279 - protein, 15 aa, Artificial Sequence
  Description of Artificial Sequence: Synthetic peptide
  Seed: LRMKWMMAMKYPITA
LRMKFMMNMEYPYTA

SEQ ID NO: 225280 - protein, 15 aa, Artificial Sequence
  Description of Artificial Sequence: Synthetic peptide
  Seed: LRMKWMMAMKYPITA
LRMKFMMNMFYPATA

SEQ ID NO: 225281 - protein, 15 aa, Artificial Sequence
  Description of Artificial Sequence: Synthetic peptide
  Seed: LRMKWMMAMKYPITA
LRMKFMMNMFYPDTA

SEQ ID NO: 225282 - protein, 15 aa, Artificial Sequence
  Description of Artificial Sequence: Synthetic peptide
  Seed: LRMKWMMAMKYPITA
LRMKFMMNMFYPETA

SEQ ID NO: 225283 - protein, 15 aa, Artificial Sequence
  Description of Artificial Sequence: Synthetic peptide
  Seed: LRMKWMMAMKYPITA
LRMKFMMNMFYPFTA

SEQ ID NO: 225284 - protein, 15 aa, Artificial Sequence
  Description of Artificial Sequence: Synthetic peptide
  Seed: LRMKWMMAMKYPITA
LRMKFMMNMFYPITA

SEQ ID NO: 225285 - protein, 15 aa, Artificial Sequence
  Description of Artificial Sequence: Synthetic peptide
  Seed: LRMKWMMAMKYPITA
LRMKFMMNMFYPLTA

SEQ ID NO: 225286 - protein, 15 aa, Artificial Sequence
  Description of Artificial Sequence: Synthetic peptide
  Seed: LRMKWMMAMKYPITA
LRMKFMMNMFYPMTA

SEQ ID NO: 225287 - protein, 15 aa, Artificial Sequence
  Description of Artificial Sequence: Synthetic peptide
  Seed: LRMKWMMAMKYPITA
LRMKFMMNMFYPNTA

SEQ ID NO: 225288 - protein, 15 aa, Artificial Sequence
  Description of Artificial Sequence: Synthetic peptide
  Seed: LRMKWMMAMKYPITA
LRMKFMMNMFYPTTA

SEQ ID NO: 225289 - protein, 15 aa, Artificial Sequence
  Description of Artificial Sequence: Synthetic peptide
  Seed: LRMKWMMAMKYPITA
LRMKFMMNMFYPVTA

SEQ ID NO: 225290 - protein, 15 aa, Artificial Sequence
  Description of Artificial Sequence: Synthetic peptide
  Seed: LRMKWMMAMKYPITA
LRMKFMMNMFYPYTA

SEQ ID NO: 225291 - protein, 15 aa, Artificial Sequence
  Description of Artificial Sequence: Synthetic peptide
  Seed: LRMKWMMAMKYPITA
LRMKFMMNMGYPATA

SEQ ID NO: 225292 - protein, 15 aa, Artificial Sequence
  Description of Artificial Sequence: Synthetic peptide
  Seed: LRMKWMMAMKYPITA
LRMKFMMNMGYPCTA

SEQ ID NO: 225293 - protein, 15 aa, Artificial Sequence
  Description of Artificial Sequence: Synthetic peptide
  Seed: LRMKWMMAMKYPITA
LRMKFMMNMGYPDTA

SEQ ID NO: 225294 - protein, 15 aa, Artificial Sequence
  Description of Artificial Sequence: Synthetic peptide
  Seed: LRMKWMMAMKYPITA
LRMKFMMNMGYPETA

SEQ ID NO: 225295 - protein, 15 aa, Artificial Sequence
  Description of Artificial Sequence: Synthetic peptide
  Seed: LRMKWMMAMKYPITA
LRMKFMMNMGYPFTA

SEQ ID NO: 225296 - protein, 15 aa, Artificial Sequence
  Description of Artificial Sequence: Synthetic peptide
  Seed: LRMKWMMAMKYPITA
LRMKFMMNMGYPGTA

SEQ ID NO: 225297 - protein, 15 aa, Artificial Sequence
  Description of Artificial Sequence: Synthetic peptide
  Seed: LRMKWMMAMKYPITA
LRMKFMMNMGYPHTA

SEQ ID NO: 225298 - protein, 15 aa, Artificial Sequence
  Description of Artificial Sequence: Synthetic peptide
  Seed: LRMKWMMAMKYPITA
LRMKFMMNMGYPITA

SEQ ID NO: 225299 - protein, 15 aa, Artificial Sequence
  Description of Artificial Sequence: Synthetic peptide
  Seed: LRMKWMMAMKYPITA
LRMKFMMNMGYPKTA

SEQ ID NO: 225300 - protein, 15 aa, Artificial Sequence
  Description of Artificial Sequence: Synthetic peptide
  Seed: LRMKWMMAMKYPITA
LRMKFMMNMGYPLTA

SEQ ID NO: 225301 - protein, 15 aa, Artificial Sequence
  Description of Artificial Sequence: Synthetic peptide
  Seed: LRMKWMMAMKYPITA
LRMKFMMNMGYPMTA

SEQ ID NO: 225302 - protein, 15 aa, Artificial Sequence
  Description of Artificial Sequence: Synthetic peptide
  Seed: LRMKWMMAMKYPITA
LRMKFMMNMGYPNTA

SEQ ID NO: 225303 - protein, 15 aa, Artificial Sequence
  Description of Artificial Sequence: Synthetic peptide
  Seed: LRMKWMMAMKYPITA
LRMKFMMNMGYPPTA

SEQ ID NO: 225304 - protein, 15 aa, Artificial Sequence
  Description of Artificial Sequence: Synthetic peptide
  Seed: LRMKWMMAMKYPITA
LRMKFMMNMGYPQTA

SEQ ID NO: 225305 - protein, 15 aa, Artificial Sequence
  Description of Artificial Sequence: Synthetic peptide
  Seed: LRMKWMMAMKYPITA
LRMKFMMNMGYPRTA

SEQ ID NO: 225306 - protein, 15 aa, Artificial Sequence
  Description of Artificial Sequence: Synthetic peptide
  Seed: LRMKWMMAMKYPITA
LRMKFMMNMGYPSTA

SEQ ID NO: 225307 - protein, 15 aa, Artificial Sequence
  Description of Artificial Sequence: Synthetic peptide
  Seed: LRMKWMMAMKYPITA
LRMKFMMNMGYPTTA

SEQ ID NO: 225308 - protein, 15 aa, Artificial Sequence
  Description of Artificial Sequence: Synthetic peptide
  Seed: LRMKWMMAMKYPITA
LRMKFMMNMGYPVTA

SEQ ID NO: 225309 - protein, 15 aa, Artificial Sequence
  Description of Artificial Sequence: Synthetic peptide
  Seed: LRMKWMMAMKYPITA
LRMKFMMNMGYPWTA

SEQ ID NO: 225310 - protein, 15 aa, Artificial Sequence
  Description of Artificial Sequence: Synthetic peptide
  Seed: LRMKWMMAMKYPITA
LRMKFMMNMGYPYTA

SEQ ID NO: 225311 - protein, 15 aa, Artificial Sequence
  Description of Artificial Sequence: Synthetic peptide
  Seed: LRMKWMMAMKYPITA
LRMKFMMNMHYPATA

SEQ ID NO: 225312 - protein, 15 aa, Artificial Sequence
  Description of Artificial Sequence: Synthetic peptide
  Seed: LRMKWMMAMKYPITA
LRMKFMMNMHYPFTA

SEQ ID NO: 225313 - protein, 15 aa, Artificial Sequence
  Description of Artificial Sequence: Synthetic peptide
  Seed: LRMKWMMAMKYPITA
LRMKFMMNMHYPITA

SEQ ID NO: 225314 - protein, 15 aa, Artificial Sequence
  Description of Artificial Sequence: Synthetic peptide
  Seed: LRMKWMMAMKYPITA
LRMKFMMNMHYPLTA

SEQ ID NO: 225315 - protein, 15 aa, Artificial Sequence
  Description of Artificial Sequence: Synthetic peptide
  Seed: LRMKWMMAMKYPITA
LRMKFMMNMHYPMTA

SEQ ID NO: 225316 - protein, 15 aa, Artificial Sequence
  Description of Artificial Sequence: Synthetic peptide
  Seed: LRMKWMMAMKYPITA
LRMKFMMNMHYPRTA

SEQ ID NO: 225317 - protein, 15 aa, Artificial Sequence
  Description of Artificial Sequence: Synthetic peptide
  Seed: LRMKWMMAMKYPITA
LRMKFMMNMHYPSTA

SEQ ID NO: 225318 - protein, 15 aa, Artificial Sequence
  Description of Artificial Sequence: Synthetic peptide
  Seed: LRMKWMMAMKYPITA
LRMKFMMNMHYPTTA

SEQ ID NO: 225319 - protein, 15 aa, Artificial Sequence
  Description of Artificial Sequence: Synthetic peptide
  Seed: LRMKWMMAMKYPITA
LRMKFMMNMHYPVTA

SEQ ID NO: 225320 - protein, 15 aa, Artificial Sequence
  Description of Artificial Sequence: Synthetic peptide
  Seed: LRMKWMMAMKYPITA
LRMKFMMNMHYPWTA

SEQ ID NO: 225321 - protein, 15 aa, Artificial Sequence
  Description of Artificial Sequence: Synthetic peptide
  Seed: LRMKWMMAMKYPITA
LRMKFMMNMHYPYTA

SEQ ID NO: 225322 - protein, 15 aa, Artificial Sequence
  Description of Artificial Sequence: Synthetic peptide
  Seed: LRMKWMMAMKYPITA
LRMKFMMNMIYPATA

SEQ ID NO: 225323 - protein, 15 aa, Artificial Sequence
  Description of Artificial Sequence: Synthetic peptide
  Seed: LRMKWMMAMKYPITA
LRMKFMMNMIYPCTA

SEQ ID NO: 225324 - protein, 15 aa, Artificial Sequence
  Description of Artificial Sequence: Synthetic peptide
  Seed: LRMKWMMAMKYPITA
LRMKFMMNMIYPDTA

SEQ ID NO: 225325 - protein, 15 aa, Artificial Sequence
  Description of Artificial Sequence: Synthetic peptide
  Seed: LRMKWMMAMKYPITA
LRMKFMMNMIYPETA

SEQ ID NO: 225326 - protein, 15 aa, Artificial Sequence
  Description of Artificial Sequence: Synthetic peptide
  Seed: LRMKWMMAMKYPITA
LRMKFMMNMIYPFTA

SEQ ID NO: 225327 - protein, 15 aa, Artificial Sequence
  Description of Artificial Sequence: Synthetic peptide
  Seed: LRMKWMMAMKYPITA
LRMKFMMNMIYPGTA

SEQ ID NO: 225328 - protein, 15 aa, Artificial Sequence
  Description of Artificial Sequence: Synthetic peptide
  Seed: LRMKWMMAMKYPITA
LRMKFMMNMIYPHTA

SEQ ID NO: 225329 - protein, 15 aa, Artificial Sequence
  Description of Artificial Sequence: Synthetic peptide
  Seed: LRMKWMMAMKYPITA
LRMKFMMNMIYPITA

SEQ ID NO: 225330 - protein, 15 aa, Artificial Sequence
  Description of Artificial Sequence: Synthetic peptide
  Seed: LRMKWMMAMKYPITA
LRMKFMMNMIYPKTA

SEQ ID NO: 225331 - protein, 15 aa, Artificial Sequence
  Description of Artificial Sequence: Synthetic peptide
  Seed: LRMKWMMAMKYPITA
LRMKFMMNMIYPLTA

SEQ ID NO: 225332 - protein, 15 aa, Artificial Sequence
  Description of Artificial Sequence: Synthetic peptide
  Seed: LRMKWMMAMKYPITA
LRMKFMMNMIYPMTA

SEQ ID NO: 225333 - protein, 15 aa, Artificial Sequence
  Description of Artificial Sequence: Synthetic peptide
  Seed: LRMKWMMAMKYPITA
LRMKFMMNMIYPNTA

SEQ ID NO: 225334 - protein, 15 aa, Artificial Sequence
  Description of Artificial Sequence: Synthetic peptide
  Seed: LRMKWMMAMKYPITA
LRMKFMMNMIYPPTA

SEQ ID NO: 225335 - protein, 15 aa, Artificial Sequence
  Description of Artificial Sequence: Synthetic peptide
  Seed: LRMKWMMAMKYPITA
LRMKFMMNMIYPQTA

SEQ ID NO: 225336 - protein, 15 aa, Artificial Sequence
  Description of Artificial Sequence: Synthetic peptide
  Seed: LRMKWMMAMKYPITA
LRMKFMMNMIYPRTA

SEQ ID NO: 225337 - protein, 15 aa, Artificial Sequence
  Description of Artificial Sequence: Synthetic peptide
  Seed: LRMKWMMAMKYPITA
LRMKFMMNMIYPSTA

SEQ ID NO: 225338 - protein, 15 aa, Artificial Sequence
  Description of Artificial Sequence: Synthetic peptide
  Seed: LRMKWMMAMKYPITA
LRMKFMMNMIYPTTA

SEQ ID NO: 225339 - protein, 15 aa, Artificial Sequence
  Description of Artificial Sequence: Synthetic peptide
  Seed: LRMKWMMAMKYPITA
LRMKFMMNMIYPVTA

SEQ ID NO: 225340 - protein, 15 aa, Artificial Sequence
  Description of Artificial Sequence: Synthetic peptide
  Seed: LRMKWMMAMKYPITA
LRMKFMMNMIYPWTA

SEQ ID NO: 225341 - protein, 15 aa, Artificial Sequence
  Description of Artificial Sequence: Synthetic peptide
  Seed: LRMKWMMAMKYPITA
LRMKFMMNMIYPYTA

SEQ ID NO: 225342 - protein, 15 aa, Artificial Sequence
  Description of Artificial Sequence: Synthetic peptide
  Seed: LRMKWMMAMKYPITA
LRMKFMMNMKYPATA

SEQ ID NO: 225343 - protein, 15 aa, Artificial Sequence
  Description of Artificial Sequence: Synthetic peptide
  Seed: LRMKWMMAMKYPITA
LRMKFMMNMKYPFTA

SEQ ID NO: 225344 - protein, 15 aa, Artificial Sequence
  Description of Artificial Sequence: Synthetic peptide
  Seed: LRMKWMMAMKYPITA
LRMKFMMNMKYPGTA

SEQ ID NO: 225345 - protein, 15 aa, Artificial Sequence
  Description of Artificial Sequence: Synthetic peptide
  Seed: LRMKWMMAMKYPITA
LRMKFMMNMKYPHTA

SEQ ID NO: 225346 - protein, 15 aa, Artificial Sequence
  Description of Artificial Sequence: Synthetic peptide
  Seed: LRMKWMMAMKYPITA
LRMKFMMNMKYPITA

SEQ ID NO: 225347 - protein, 15 aa, Artificial Sequence
  Description of Artificial Sequence: Synthetic peptide
  Seed: LRMKWMMAMKYPITA
LRMKFMMNMKYPKTA

SEQ ID NO: 225348 - protein, 15 aa, Artificial Sequence
  Description of Artificial Sequence: Synthetic peptide
  Seed: LRMKWMMAMKYPITA
LRMKFMMNMKYPLTA

SEQ ID NO: 225349 - protein, 15 aa, Artificial Sequence
  Description of Artificial Sequence: Synthetic peptide
  Seed: LRMKWMMAMKYPITA
LRMKFMMNMKYPMTA

SEQ ID NO: 225350 - protein, 15 aa, Artificial Sequence
  Description of Artificial Sequence: Synthetic peptide
  Seed: LRMKWMMAMKYPITA
LRMKFMMNMKYPNTA

SEQ ID NO: 225351 - protein, 15 aa, Artificial Sequence
  Description of Artificial Sequence: Synthetic peptide
  Seed: LRMKWMMAMKYPITA
LRMKFMMNMKYPQTA

SEQ ID NO: 225352 - protein, 15 aa, Artificial Sequence
  Description of Artificial Sequence: Synthetic peptide
  Seed: LRMKWMMAMKYPITA
LRMKFMMNMKYPRTA

SEQ ID NO: 225353 - protein, 15 aa, Artificial Sequence
  Description of Artificial Sequence: Synthetic peptide
  Seed: LRMKWMMAMKYPITA
LRMKFMMNMKYPSTA

SEQ ID NO: 225354 - protein, 15 aa, Artificial Sequence
  Description of Artificial Sequence: Synthetic peptide
  Seed: LRMKWMMAMKYPITA
LRMKFMMNMKYPTTA

SEQ ID NO: 225355 - protein, 15 aa, Artificial Sequence
  Description of Artificial Sequence: Synthetic peptide
  Seed: LRMKWMMAMKYPITA
LRMKFMMNMKYPVTA

SEQ ID NO: 225356 - protein, 15 aa, Artificial Sequence
  Description of Artificial Sequence: Synthetic peptide
  Seed: LRMKWMMAMKYPITA
LRMKFMMNMKYPWTA

SEQ ID NO: 225357 - protein, 15 aa, Artificial Sequence
  Description of Artificial Sequence: Synthetic peptide
  Seed: LRMKWMMAMKYPITA
LRMKFMMNMKYPYTA

SEQ ID NO: 225358 - protein, 15 aa, Artificial Sequence
  Description of Artificial Sequence: Synthetic peptide
  Seed: LRMKWMMAMKYPITA
LRMKFMMNMLYPATA

SEQ ID NO: 225359 - protein, 15 aa, Artificial Sequence
  Description of Artificial Sequence: Synthetic peptide
  Seed: LRMKWMMAMKYPITA
LRMKFMMNMLYPCTA

SEQ ID NO: 225360 - protein, 15 aa, Artificial Sequence
  Description of Artificial Sequence: Synthetic peptide
  Seed: LRMKWMMAMKYPITA
LRMKFMMNMLYPFTA

SEQ ID NO: 225361 - protein, 15 aa, Artificial Sequence
  Description of Artificial Sequence: Synthetic peptide
  Seed: LRMKWMMAMKYPITA
LRMKFMMNMLYPGTA

SEQ ID NO: 225362 - protein, 15 aa, Artificial Sequence
  Description of Artificial Sequence: Synthetic peptide
  Seed: LRMKWMMAMKYPITA
LRMKFMMNMLYPITA

SEQ ID NO: 225363 - protein, 15 aa, Artificial Sequence
  Description of Artificial Sequence: Synthetic peptide
  Seed: LRMKWMMAMKYPITA
LRMKFMMNMLYPLTA

SEQ ID NO: 225364 - protein, 15 aa, Artificial Sequence
  Description of Artificial Sequence: Synthetic peptide
  Seed: LRMKWMMAMKYPITA
LRMKFMMNMLYPMTA

SEQ ID NO: 225365 - protein, 15 aa, Artificial Sequence
  Description of Artificial Sequence: Synthetic peptide
  Seed: LRMKWMMAMKYPITA
LRMKFMMNMLYPNTA

SEQ ID NO: 225366 - protein, 15 aa, Artificial Sequence
  Description of Artificial Sequence: Synthetic peptide
  Seed: LRMKWMMAMKYPITA
LRMKFMMNMLYPRTA

SEQ ID NO: 225367 - protein, 15 aa, Artificial Sequence
  Description of Artificial Sequence: Synthetic peptide
  Seed: LRMKWMMAMKYPITA
LRMKFMMNMLYPSTA

SEQ ID NO: 225368 - protein, 15 aa, Artificial Sequence
  Description of Artificial Sequence: Synthetic peptide
  Seed: LRMKWMMAMKYPITA
LRMKFMMNMLYPTTA

SEQ ID NO: 225369 - protein, 15 aa, Artificial Sequence
  Description of Artificial Sequence: Synthetic peptide
  Seed: LRMKWMMAMKYPITA
LRMKFMMNMLYPVTA

SEQ ID NO: 225370 - protein, 15 aa, Artificial Sequence
  Description of Artificial Sequence: Synthetic peptide
  Seed: LRMKWMMAMKYPITA
LRMKFMMNMLYPWTA

SEQ ID NO: 225371 - protein, 15 aa, Artificial Sequence
  Description of Artificial Sequence: Synthetic peptide
  Seed: LRMKWMMAMKYPITA
LRMKFMMNMLYPYTA

SEQ ID NO: 225372 - protein, 15 aa, Artificial Sequence
  Description of Artificial Sequence: Synthetic peptide
  Seed: LRMKWMMAMKYPITA
LRMKFMMNMMYPATA

SEQ ID NO: 225373 - protein, 15 aa, Artificial Sequence
  Description of Artificial Sequence: Synthetic peptide
  Seed: LRMKWMMAMKYPITA
LRMKFMMNMMYPCTA

SEQ ID NO: 225374 - protein, 15 aa, Artificial Sequence
  Description of Artificial Sequence: Synthetic peptide
  Seed: LRMKWMMAMKYPITA
LRMKFMMNMMYPFTA

SEQ ID NO: 225375 - protein, 15 aa, Artificial Sequence
  Description of Artificial Sequence: Synthetic peptide
  Seed: LRMKWMMAMKYPITA
LRMKFMMNMMYPGTA

SEQ ID NO: 225376 - protein, 15 aa, Artificial Sequence
  Description of Artificial Sequence: Synthetic peptide
  Seed: LRMKWMMAMKYPITA
LRMKFMMNMMYPITA

SEQ ID NO: 225377 - protein, 15 aa, Artificial Sequence
  Description of Artificial Sequence: Synthetic peptide
  Seed: LRMKWMMAMKYPITA
LRMKFMMNMMYPLTA

SEQ ID NO: 225378 - protein, 15 aa, Artificial Sequence
  Description of Artificial Sequence: Synthetic peptide
  Seed: LRMKWMMAMKYPITA
LRMKFMMNMMYPMTA

SEQ ID NO: 225379 - protein, 15 aa, Artificial Sequence
  Description of Artificial Sequence: Synthetic peptide
  Seed: LRMKWMMAMKYPITA
LRMKFMMNMMYPNTA

SEQ ID NO: 225380 - protein, 15 aa, Artificial Sequence
  Description of Artificial Sequence: Synthetic peptide
  Seed: LRMKWMMAMKYPITA
LRMKFMMNMMYPRTA

SEQ ID NO: 225381 - protein, 15 aa, Artificial Sequence
  Description of Artificial Sequence: Synthetic peptide
  Seed: LRMKWMMAMKYPITA
LRMKFMMNMMYPSTA

SEQ ID NO: 225382 - protein, 15 aa, Artificial Sequence
  Description of Artificial Sequence: Synthetic peptide
  Seed: LRMKWMMAMKYPITA
LRMKFMMNMMYPTTA

SEQ ID NO: 225383 - protein, 15 aa, Artificial Sequence
  Description of Artificial Sequence: Synthetic peptide
  Seed: LRMKWMMAMKYPITA
LRMKFMMNMMYPVTA

SEQ ID NO: 225384 - protein, 15 aa, Artificial Sequence
  Description of Artificial Sequence: Synthetic peptide
  Seed: LRMKWMMAMKYPITA
LRMKFMMNMMYPWTA

SEQ ID NO: 225385 - protein, 15 aa, Artificial Sequence
  Description of Artificial Sequence: Synthetic peptide
  Seed: LRMKWMMAMKYPITA
LRMKFMMNMMYPYTA

SEQ ID NO: 225386 - protein, 15 aa, Artificial Sequence
  Description of Artificial Sequence: Synthetic peptide
  Seed: LRMKWMMAMKYPITA
LRMKFMMNMNYPATA

SEQ ID NO: 225387 - protein, 15 aa, Artificial Sequence
  Description of Artificial Sequence: Synthetic peptide
  Seed: LRMKWMMAMKYPITA
LRMKFMMNMNYPCTA

SEQ ID NO: 225388 - protein, 15 aa, Artificial Sequence
  Description of Artificial Sequence: Synthetic peptide
  Seed: LRMKWMMAMKYPITA
LRMKFMMNMNYPDTA

SEQ ID NO: 225389 - protein, 15 aa, Artificial Sequence
  Description of Artificial Sequence: Synthetic peptide
  Seed: LRMKWMMAMKYPITA
LRMKFMMNMNYPETA

SEQ ID NO: 225390 - protein, 15 aa, Artificial Sequence
  Description of Artificial Sequence: Synthetic peptide
  Seed: LRMKWMMAMKYPITA
LRMKFMMNMNYPFTA

SEQ ID NO: 225391 - protein, 15 aa, Artificial Sequence
  Description of Artificial Sequence: Synthetic peptide
  Seed: LRMKWMMAMKYPITA
LRMKFMMNMNYPGTA

SEQ ID NO: 225392 - protein, 15 aa, Artificial Sequence
  Description of Artificial Sequence: Synthetic peptide
  Seed: LRMKWMMAMKYPITA
LRMKFMMNMNYPHTA

SEQ ID NO: 225393 - protein, 15 aa, Artificial Sequence
  Description of Artificial Sequence: Synthetic peptide
  Seed: LRMKWMMAMKYPITA
LRMKFMMNMNYPITA

SEQ ID NO: 225394 - protein, 15 aa, Artificial Sequence
  Description of Artificial Sequence: Synthetic peptide
  Seed: LRMKWMMAMKYPITA
LRMKFMMNMNYPKTA

SEQ ID NO: 225395 - protein, 15 aa, Artificial Sequence
  Description of Artificial Sequence: Synthetic peptide
  Seed: LRMKWMMAMKYPITA
LRMKFMMNMNYPLTA

SEQ ID NO: 225396 - protein, 15 aa, Artificial Sequence
  Description of Artificial Sequence: Synthetic peptide
  Seed: LRMKWMMAMKYPITA
LRMKFMMNMNYPMTA

SEQ ID NO: 225397 - protein, 15 aa, Artificial Sequence
  Description of Artificial Sequence: Synthetic peptide
  Seed: LRMKWMMAMKYPITA
LRMKFMMNMNYPNTA

SEQ ID NO: 225398 - protein, 15 aa, Artificial Sequence
  Description of Artificial Sequence: Synthetic peptide
  Seed: LRMKWMMAMKYPITA
LRMKFMMNMNYPPTA

SEQ ID NO: 225399 - protein, 15 aa, Artificial Sequence
  Description of Artificial Sequence: Synthetic peptide
  Seed: LRMKWMMAMKYPITA
LRMKFMMNMNYPQTA

SEQ ID NO: 225400 - protein, 15 aa, Artificial Sequence
  Description of Artificial Sequence: Synthetic peptide
  Seed: LRMKWMMAMKYPITA
LRMKFMMNMNYPRTA

SEQ ID NO: 225401 - protein, 15 aa, Artificial Sequence
  Description of Artificial Sequence: Synthetic peptide
  Seed: LRMKWMMAMKYPITA
LRMKFMMNMNYPSTA

SEQ ID NO: 225402 - protein, 15 aa, Artificial Sequence
  Description of Artificial Sequence: Synthetic peptide
  Seed: LRMKWMMAMKYPITA
LRMKFMMNMNYPTTA

SEQ ID NO: 225403 - protein, 15 aa, Artificial Sequence
  Description of Artificial Sequence: Synthetic peptide
  Seed: LRMKWMMAMKYPITA
LRMKFMMNMNYPVTA

SEQ ID NO: 225404 - protein, 15 aa, Artificial Sequence
  Description of Artificial Sequence: Synthetic peptide
  Seed: LRMKWMMAMKYPITA
LRMKFMMNMNYPWTA

SEQ ID NO: 225405 - protein, 15 aa, Artificial Sequence
  Description of Artificial Sequence: Synthetic peptide
  Seed: LRMKWMMAMKYPITA
LRMKFMMNMNYPYTA

SEQ ID NO: 225406 - protein, 15 aa, Artificial Sequence
  Description of Artificial Sequence: Synthetic peptide
  Seed: LRMKWMMAMKYPITA
LRMKFMMNMPYPATA

SEQ ID NO: 225407 - protein, 15 aa, Artificial Sequence
  Description of Artificial Sequence: Synthetic peptide
  Seed: LRMKWMMAMKYPITA
LRMKFMMNMPYPCTA

SEQ ID NO: 225408 - protein, 15 aa, Artificial Sequence
  Description of Artificial Sequence: Synthetic peptide
  Seed: LRMKWMMAMKYPITA
LRMKFMMNMPYPDTA

SEQ ID NO: 225409 - protein, 15 aa, Artificial Sequence
  Description of Artificial Sequence: Synthetic peptide
  Seed: LRMKWMMAMKYPITA
LRMKFMMNMPYPETA

SEQ ID NO: 225410 - protein, 15 aa, Artificial Sequence
  Description of Artificial Sequence: Synthetic peptide
  Seed: LRMKWMMAMKYPITA
LRMKFMMNMPYPFTA

SEQ ID NO: 225411 - protein, 15 aa, Artificial Sequence
  Description of Artificial Sequence: Synthetic peptide
  Seed: LRMKWMMAMKYPITA
LRMKFMMNMPYPGTA

SEQ ID NO: 225412 - protein, 15 aa, Artificial Sequence
  Description of Artificial Sequence: Synthetic peptide
  Seed: LRMKWMMAMKYPITA
LRMKFMMNMPYPHTA

SEQ ID NO: 225413 - protein, 15 aa, Artificial Sequence
  Description of Artificial Sequence: Synthetic peptide
  Seed: LRMKWMMAMKYPITA
LRMKFMMNMPYPITA

SEQ ID NO: 225414 - protein, 15 aa, Artificial Sequence
  Description of Artificial Sequence: Synthetic peptide
  Seed: LRMKWMMAMKYPITA
LRMKFMMNMPYPKTA

SEQ ID NO: 225415 - protein, 15 aa, Artificial Sequence
  Description of Artificial Sequence: Synthetic peptide
  Seed: LRMKWMMAMKYPITA
LRMKFMMNMPYPLTA

SEQ ID NO: 225416 - protein, 15 aa, Artificial Sequence
  Description of Artificial Sequence: Synthetic peptide
  Seed: LRMKWMMAMKYPITA
LRMKFMMNMPYPMTA

SEQ ID NO: 225417 - protein, 15 aa, Artificial Sequence
  Description of Artificial Sequence: Synthetic peptide
  Seed: LRMKWMMAMKYPITA
LRMKFMMNMPYPNTA

SEQ ID NO: 225418 - protein, 15 aa, Artificial Sequence
  Description of Artificial Sequence: Synthetic peptide
  Seed: LRMKWMMAMKYPITA
LRMKFMMNMPYPPTA

SEQ ID NO: 225419 - protein, 15 aa, Artificial Sequence
  Description of Artificial Sequence: Synthetic peptide
  Seed: LRMKWMMAMKYPITA
LRMKFMMNMPYPQTA

SEQ ID NO: 225420 - protein, 15 aa, Artificial Sequence
  Description of Artificial Sequence: Synthetic peptide
  Seed: LRMKWMMAMKYPITA
LRMKFMMNMPYPRTA

SEQ ID NO: 225421 - protein, 15 aa, Artificial Sequence
  Description of Artificial Sequence: Synthetic peptide
  Seed: LRMKWMMAMKYPITA
LRMKFMMNMPYPSTA

SEQ ID NO: 225422 - protein, 15 aa, Artificial Sequence
  Description of Artificial Sequence: Synthetic peptide
  Seed: LRMKWMMAMKYPITA
LRMKFMMNMPYPTTA

SEQ ID NO: 225423 - protein, 15 aa, Artificial Sequence
  Description of Artificial Sequence: Synthetic peptide
  Seed: LRMKWMMAMKYPITA
LRMKFMMNMPYPVTA

SEQ ID NO: 225424 - protein, 15 aa, Artificial Sequence
  Description of Artificial Sequence: Synthetic peptide
  Seed: LRMKWMMAMKYPITA
LRMKFMMNMPYPWTA

SEQ ID NO: 225425 - protein, 15 aa, Artificial Sequence
  Description of Artificial Sequence: Synthetic peptide
  Seed: LRMKWMMAMKYPITA
LRMKFMMNMPYPYTA

SEQ ID NO: 225426 - protein, 15 aa, Artificial Sequence
  Description of Artificial Sequence: Synthetic peptide
  Seed: LRMKWMMAMKYPITA
LRMKFMMNMQYPATA

SEQ ID NO: 225427 - protein, 15 aa, Artificial Sequence
  Description of Artificial Sequence: Synthetic peptide
  Seed: LRMKWMMAMKYPITA
LRMKFMMNMQYPFTA

SEQ ID NO: 225428 - protein, 15 aa, Artificial Sequence
  Description of Artificial Sequence: Synthetic peptide
  Seed: LRMKWMMAMKYPITA
LRMKFMMNMQYPITA

SEQ ID NO: 225429 - protein, 15 aa, Artificial Sequence
  Description of Artificial Sequence: Synthetic peptide
  Seed: LRMKWMMAMKYPITA
LRMKFMMNMQYPLTA

SEQ ID NO: 225430 - protein, 15 aa, Artificial Sequence
  Description of Artificial Sequence: Synthetic peptide
  Seed: LRMKWMMAMKYPITA
LRMKFMMNMQYPMTA

SEQ ID NO: 225431 - protein, 15 aa, Artificial Sequence
  Description of Artificial Sequence: Synthetic peptide
  Seed: LRMKWMMAMKYPITA
LRMKFMMNMQYPNTA

SEQ ID NO: 225432 - protein, 15 aa, Artificial Sequence
  Description of Artificial Sequence: Synthetic peptide
  Seed: LRMKWMMAMKYPITA
LRMKFMMNMQYPSTA

SEQ ID NO: 225433 - protein, 15 aa, Artificial Sequence
  Description of Artificial Sequence: Synthetic peptide
  Seed: LRMKWMMAMKYPITA
LRMKFMMNMQYPTTA

SEQ ID NO: 225434 - protein, 15 aa, Artificial Sequence
  Description of Artificial Sequence: Synthetic peptide
  Seed: LRMKWMMAMKYPITA
LRMKFMMNMQYPVTA

SEQ ID NO: 225435 - protein, 15 aa, Artificial Sequence
  Description of Artificial Sequence: Synthetic peptide
  Seed: LRMKWMMAMKYPITA
LRMKFMMNMQYPYTA

SEQ ID NO: 225436 - protein, 15 aa, Artificial Sequence
  Description of Artificial Sequence: Synthetic peptide
  Seed: LRMKWMMAMKYPITA
LRMKFMMNMRYPATA

SEQ ID NO: 225437 - protein, 15 aa, Artificial Sequence
  Description of Artificial Sequence: Synthetic peptide
  Seed: LRMKWMMAMKYPITA
LRMKFMMNMRYPDTA

SEQ ID NO: 225438 - protein, 15 aa, Artificial Sequence
  Description of Artificial Sequence: Synthetic peptide
  Seed: LRMKWMMAMKYPITA
LRMKFMMNMRYPETA

SEQ ID NO: 225439 - protein, 15 aa, Artificial Sequence
  Description of Artificial Sequence: Synthetic peptide
  Seed: LRMKWMMAMKYPITA
LRMKFMMNMRYPFTA

SEQ ID NO: 225440 - protein, 15 aa, Artificial Sequence
  Description of Artificial Sequence: Synthetic peptide
  Seed: LRMKWMMAMKYPITA
LRMKFMMNMRYPGTA

SEQ ID NO: 225441 - protein, 15 aa, Artificial Sequence
  Description of Artificial Sequence: Synthetic peptide
  Seed: LRMKWMMAMKYPITA
LRMKFMMNMRYPHTA

SEQ ID NO: 225442 - protein, 15 aa, Artificial Sequence
  Description of Artificial Sequence: Synthetic peptide
  Seed: LRMKWMMAMKYPITA
LRMKFMMNMRYPITA

SEQ ID NO: 225443 - protein, 15 aa, Artificial Sequence
  Description of Artificial Sequence: Synthetic peptide
  Seed: LRMKWMMAMKYPITA
LRMKFMMNMRYPKTA

SEQ ID NO: 225444 - protein, 15 aa, Artificial Sequence
  Description of Artificial Sequence: Synthetic peptide
  Seed: LRMKWMMAMKYPITA
LRMKFMMNMRYPLTA

SEQ ID NO: 225445 - protein, 15 aa, Artificial Sequence
  Description of Artificial Sequence: Synthetic peptide
  Seed: LRMKWMMAMKYPITA
LRMKFMMNMRYPMTA

SEQ ID NO: 225446 - protein, 15 aa, Artificial Sequence
  Description of Artificial Sequence: Synthetic peptide
  Seed: LRMKWMMAMKYPITA
LRMKFMMNMRYPNTA

SEQ ID NO: 225447 - protein, 15 aa, Artificial Sequence
  Description of Artificial Sequence: Synthetic peptide
  Seed: LRMKWMMAMKYPITA
LRMKFMMNMRYPPTA

SEQ ID NO: 225448 - protein, 15 aa, Artificial Sequence
  Description of Artificial Sequence: Synthetic peptide
  Seed: LRMKWMMAMKYPITA
LRMKFMMNMRYPQTA

SEQ ID NO: 225449 - protein, 15 aa, Artificial Sequence
  Description of Artificial Sequence: Synthetic peptide
  Seed: LRMKWMMAMKYPITA
LRMKFMMNMRYPRTA

SEQ ID NO: 225450 - protein, 15 aa, Artificial Sequence
  Description of Artificial Sequence: Synthetic peptide
  Seed: LRMKWMMAMKYPITA
LRMKFMMNMRYPSTA

SEQ ID NO: 225451 - protein, 15 aa, Artificial Sequence
  Description of Artificial Sequence: Synthetic peptide
  Seed: LRMKWMMAMKYPITA
LRMKFMMNMRYPTTA

SEQ ID NO: 225452 - protein, 15 aa, Artificial Sequence
  Description of Artificial Sequence: Synthetic peptide
  Seed: LRMKWMMAMKYPITA
LRMKFMMNMRYPVTA

SEQ ID NO: 225453 - protein, 15 aa, Artificial Sequence
  Description of Artificial Sequence: Synthetic peptide
  Seed: LRMKWMMAMKYPITA
LRMKFMMNMRYPWTA

SEQ ID NO: 225454 - protein, 15 aa, Artificial Sequence
  Description of Artificial Sequence: Synthetic peptide
  Seed: LRMKWMMAMKYPITA
LRMKFMMNMRYPYTA

SEQ ID NO: 225455 - protein, 15 aa, Artificial Sequence
  Description of Artificial Sequence: Synthetic peptide
  Seed: LRMKWMMAMKYPITA
LRMKFMMNMSYPATA

SEQ ID NO: 225456 - protein, 15 aa, Artificial Sequence
  Description of Artificial Sequence: Synthetic peptide
  Seed: LRMKWMMAMKYPITA
LRMKFMMNMSYPCTA

SEQ ID NO: 225457 - protein, 15 aa, Artificial Sequence
  Description of Artificial Sequence: Synthetic peptide
  Seed: LRMKWMMAMKYPITA
LRMKFMMNMSYPDTA

SEQ ID NO: 225458 - protein, 15 aa, Artificial Sequence
  Description of Artificial Sequence: Synthetic peptide
  Seed: LRMKWMMAMKYPITA
LRMKFMMNMSYPETA

SEQ ID NO: 225459 - protein, 15 aa, Artificial Sequence
  Description of Artificial Sequence: Synthetic peptide
  Seed: LRMKWMMAMKYPITA
LRMKFMMNMSYPFTA

SEQ ID NO: 225460 - protein, 15 aa, Artificial Sequence
  Description of Artificial Sequence: Synthetic peptide
  Seed: LRMKWMMAMKYPITA
LRMKFMMNMSYPGTA

SEQ ID NO: 225461 - protein, 15 aa, Artificial Sequence
  Description of Artificial Sequence: Synthetic peptide
  Seed: LRMKWMMAMKYPITA
LRMKFMMNMSYPHTA

SEQ ID NO: 225462 - protein, 15 aa, Artificial Sequence
  Description of Artificial Sequence: Synthetic peptide
  Seed: LRMKWMMAMKYPITA
LRMKFMMNMSYPITA

SEQ ID NO: 225463 - protein, 15 aa, Artificial Sequence
  Description of Artificial Sequence: Synthetic peptide
  Seed: LRMKWMMAMKYPITA
LRMKFMMNMSYPKTA

SEQ ID NO: 225464 - protein, 15 aa, Artificial Sequence
  Description of Artificial Sequence: Synthetic peptide
  Seed: LRMKWMMAMKYPITA
LRMKFMMNMSYPLTA

SEQ ID NO: 225465 - protein, 15 aa, Artificial Sequence
  Description of Artificial Sequence: Synthetic peptide
  Seed: LRMKWMMAMKYPITA
LRMKFMMNMSYPMTA

SEQ ID NO: 225466 - protein, 15 aa, Artificial Sequence
  Description of Artificial Sequence: Synthetic peptide
  Seed: LRMKWMMAMKYPITA
LRMKFMMNMSYPNTA

SEQ ID NO: 225467 - protein, 15 aa, Artificial Sequence
  Description of Artificial Sequence: Synthetic peptide
  Seed: LRMKWMMAMKYPITA
LRMKFMMNMSYPPTA

SEQ ID NO: 225468 - protein, 15 aa, Artificial Sequence
  Description of Artificial Sequence: Synthetic peptide
  Seed: LRMKWMMAMKYPITA
LRMKFMMNMSYPQTA

SEQ ID NO: 225469 - protein, 15 aa, Artificial Sequence
  Description of Artificial Sequence: Synthetic peptide
  Seed: LRMKWMMAMKYPITA
LRMKFMMNMSYPRTA

SEQ ID NO: 225470 - protein, 15 aa, Artificial Sequence
  Description of Artificial Sequence: Synthetic peptide
  Seed: LRMKWMMAMKYPITA
LRMKFMMNMSYPSTA

SEQ ID NO: 225471 - protein, 15 aa, Artificial Sequence
  Description of Artificial Sequence: Synthetic peptide
  Seed: LRMKWMMAMKYPITA
LRMKFMMNMSYPTTA

SEQ ID NO: 225472 - protein, 15 aa, Artificial Sequence
  Description of Artificial Sequence: Synthetic peptide
  Seed: LRMKWMMAMKYPITA
LRMKFMMNMSYPVTA

SEQ ID NO: 225473 - protein, 15 aa, Artificial Sequence
  Description of Artificial Sequence: Synthetic peptide
  Seed: LRMKWMMAMKYPITA
LRMKFMMNMSYPWTA

SEQ ID NO: 225474 - protein, 15 aa, Artificial Sequence
  Description of Artificial Sequence: Synthetic peptide
  Seed: LRMKWMMAMKYPITA
LRMKFMMNMSYPYTA

SEQ ID NO: 225475 - protein, 15 aa, Artificial Sequence
  Description of Artificial Sequence: Synthetic peptide
  Seed: LRMKWMMAMKYPITA
LRMKFMMNMTYPATA

SEQ ID NO: 225476 - protein, 15 aa, Artificial Sequence
  Description of Artificial Sequence: Synthetic peptide
  Seed: LRMKWMMAMKYPITA
LRMKFMMNMTYPCTA

SEQ ID NO: 225477 - protein, 15 aa, Artificial Sequence
  Description of Artificial Sequence: Synthetic peptide
  Seed: LRMKWMMAMKYPITA
LRMKFMMNMTYPDTA

SEQ ID NO: 225478 - protein, 15 aa, Artificial Sequence
  Description of Artificial Sequence: Synthetic peptide
  Seed: LRMKWMMAMKYPITA
LRMKFMMNMTYPETA

SEQ ID NO: 225479 - protein, 15 aa, Artificial Sequence
  Description of Artificial Sequence: Synthetic peptide
  Seed: LRMKWMMAMKYPITA
LRMKFMMNMTYPFTA

SEQ ID NO: 225480 - protein, 15 aa, Artificial Sequence
  Description of Artificial Sequence: Synthetic peptide
  Seed: LRMKWMMAMKYPITA
LRMKFMMNMTYPGTA

SEQ ID NO: 225481 - protein, 15 aa, Artificial Sequence
  Description of Artificial Sequence: Synthetic peptide
  Seed: LRMKWMMAMKYPITA
LRMKFMMNMTYPHTA

SEQ ID NO: 225482 - protein, 15 aa, Artificial Sequence
  Description of Artificial Sequence: Synthetic peptide
  Seed: LRMKWMMAMKYPITA
LRMKFMMNMTYPITA

SEQ ID NO: 225483 - protein, 15 aa, Artificial Sequence
  Description of Artificial Sequence: Synthetic peptide
  Seed: LRMKWMMAMKYPITA
LRMKFMMNMTYPKTA

SEQ ID NO: 225484 - protein, 15 aa, Artificial Sequence
  Description of Artificial Sequence: Synthetic peptide
  Seed: LRMKWMMAMKYPITA
LRMKFMMNMTYPLTA

SEQ ID NO: 225485 - protein, 15 aa, Artificial Sequence
  Description of Artificial Sequence: Synthetic peptide
  Seed: LRMKWMMAMKYPITA
LRMKFMMNMTYPMTA

SEQ ID NO: 225486 - protein, 15 aa, Artificial Sequence
  Description of Artificial Sequence: Synthetic peptide
  Seed: LRMKWMMAMKYPITA
LRMKFMMNMTYPNTA

SEQ ID NO: 225487 - protein, 15 aa, Artificial Sequence
  Description of Artificial Sequence: Synthetic peptide
  Seed: LRMKWMMAMKYPITA
LRMKFMMNMTYPPTA

SEQ ID NO: 225488 - protein, 15 aa, Artificial Sequence
  Description of Artificial Sequence: Synthetic peptide
  Seed: LRMKWMMAMKYPITA
LRMKFMMNMTYPQTA

SEQ ID NO: 225489 - protein, 15 aa, Artificial Sequence
  Description of Artificial Sequence: Synthetic peptide
  Seed: LRMKWMMAMKYPITA
LRMKFMMNMTYPRTA

SEQ ID NO: 225490 - protein, 15 aa, Artificial Sequence
  Description of Artificial Sequence: Synthetic peptide
  Seed: LRMKWMMAMKYPITA
LRMKFMMNMTYPSTA

SEQ ID NO: 225491 - protein, 15 aa, Artificial Sequence
  Description of Artificial Sequence: Synthetic peptide
  Seed: LRMKWMMAMKYPITA
LRMKFMMNMTYPTTA

SEQ ID NO: 225492 - protein, 15 aa, Artificial Sequence
  Description of Artificial Sequence: Synthetic peptide
  Seed: LRMKWMMAMKYPITA
LRMKFMMNMTYPVTA

SEQ ID NO: 225493 - protein, 15 aa, Artificial Sequence
  Description of Artificial Sequence: Synthetic peptide
  Seed: LRMKWMMAMKYPITA
LRMKFMMNMTYPWTA

SEQ ID NO: 225494 - protein, 15 aa, Artificial Sequence
  Description of Artificial Sequence: Synthetic peptide
  Seed: LRMKWMMAMKYPITA
LRMKFMMNMTYPYTA

SEQ ID NO: 225495 - protein, 15 aa, Artificial Sequence
  Description of Artificial Sequence: Synthetic peptide
  Seed: LRMKWMMAMKYPITA
LRMKFMMNMVYPATA

SEQ ID NO: 225496 - protein, 15 aa, Artificial Sequence
  Description of Artificial Sequence: Synthetic peptide
  Seed: LRMKWMMAMKYPITA
LRMKFMMNMVYPCTA

SEQ ID NO: 225497 - protein, 15 aa, Artificial Sequence
  Description of Artificial Sequence: Synthetic peptide
  Seed: LRMKWMMAMKYPITA
LRMKFMMNMVYPDTA

SEQ ID NO: 225498 - protein, 15 aa, Artificial Sequence
  Description of Artificial Sequence: Synthetic peptide
  Seed: LRMKWMMAMKYPITA
LRMKFMMNMVYPETA

SEQ ID NO: 225499 - protein, 15 aa, Artificial Sequence
  Description of Artificial Sequence: Synthetic peptide
  Seed: LRMKWMMAMKYPITA
LRMKFMMNMVYPFTA

SEQ ID NO: 225500 - protein, 15 aa, Artificial Sequence
  Description of Artificial Sequence: Synthetic peptide
  Seed: LRMKWMMAMKYPITA
LRMKFMMNMVYPGTA

SEQ ID NO: 225501 - protein, 15 aa, Artificial Sequence
  Description of Artificial Sequence: Synthetic peptide
  Seed: LRMKWMMAMKYPITA
LRMKFMMNMVYPHTA

SEQ ID NO: 225502 - protein, 15 aa, Artificial Sequence
  Description of Artificial Sequence: Synthetic peptide
  Seed: LRMKWMMAMKYPITA
LRMKFMMNMVYPITA

SEQ ID NO: 225503 - protein, 15 aa, Artificial Sequence
  Description of Artificial Sequence: Synthetic peptide
  Seed: LRMKWMMAMKYPITA
LRMKFMMNMVYPKTA

SEQ ID NO: 225504 - protein, 15 aa, Artificial Sequence
  Description of Artificial Sequence: Synthetic peptide
  Seed: LRMKWMMAMKYPITA
LRMKFMMNMVYPLTA

SEQ ID NO: 225505 - protein, 15 aa, Artificial Sequence
  Description of Artificial Sequence: Synthetic peptide
  Seed: LRMKWMMAMKYPITA
LRMKFMMNMVYPMTA

SEQ ID NO: 225506 - protein, 15 aa, Artificial Sequence
  Description of Artificial Sequence: Synthetic peptide
  Seed: LRMKWMMAMKYPITA
LRMKFMMNMVYPNTA

SEQ ID NO: 225507 - protein, 15 aa, Artificial Sequence
  Description of Artificial Sequence: Synthetic peptide
  Seed: LRMKWMMAMKYPITA
LRMKFMMNMVYPPTA

SEQ ID NO: 225508 - protein, 15 aa, Artificial Sequence
  Description of Artificial Sequence: Synthetic peptide
  Seed: LRMKWMMAMKYPITA
LRMKFMMNMVYPQTA

SEQ ID NO: 225509 - protein, 15 aa, Artificial Sequence
  Description of Artificial Sequence: Synthetic peptide
  Seed: LRMKWMMAMKYPITA
LRMKFMMNMVYPRTA

SEQ ID NO: 225510 - protein, 15 aa, Artificial Sequence
  Description of Artificial Sequence: Synthetic peptide
  Seed: LRMKWMMAMKYPITA
LRMKFMMNMVYPSTA

SEQ ID NO: 225511 - protein, 15 aa, Artificial Sequence
  Description of Artificial Sequence: Synthetic peptide
  Seed: LRMKWMMAMKYPITA
LRMKFMMNMVYPTTA

SEQ ID NO: 225512 - protein, 15 aa, Artificial Sequence
  Description of Artificial Sequence: Synthetic peptide
  Seed: LRMKWMMAMKYPITA
LRMKFMMNMVYPVTA

SEQ ID NO: 225513 - protein, 15 aa, Artificial Sequence
  Description of Artificial Sequence: Synthetic peptide
  Seed: LRMKWMMAMKYPITA
LRMKFMMNMVYPWTA

SEQ ID NO: 225514 - protein, 15 aa, Artificial Sequence
  Description of Artificial Sequence: Synthetic peptide
  Seed: LRMKWMMAMKYPITA
LRMKFMMNMVYPYTA

SEQ ID NO: 225515 - protein, 15 aa, Artificial Sequence
  Description of Artificial Sequence: Synthetic peptide
  Seed: LRMKWMMAMKYPITA
LRMKFMMNMWYPATA

SEQ ID NO: 225516 - protein, 15 aa, Artificial Sequence
  Description of Artificial Sequence: Synthetic peptide
  Seed: LRMKWMMAMKYPITA
LRMKFMMNMWYPFTA

SEQ ID NO: 225517 - protein, 15 aa, Artificial Sequence
  Description of Artificial Sequence: Synthetic peptide
  Seed: LRMKWMMAMKYPITA
LRMKFMMNMWYPITA

SEQ ID NO: 225518 - protein, 15 aa, Artificial Sequence
  Description of Artificial Sequence: Synthetic peptide
  Seed: LRMKWMMAMKYPITA
LRMKFMMNMWYPLTA

SEQ ID NO: 225519 - protein, 15 aa, Artificial Sequence
  Description of Artificial Sequence: Synthetic peptide
  Seed: LRMKWMMAMKYPITA
LRMKFMMNMWYPMTA

SEQ ID NO: 225520 - protein, 15 aa, Artificial Sequence
  Description of Artificial Sequence: Synthetic peptide
  Seed: LRMKWMMAMKYPITA
LRMKFMMNMWYPVTA

SEQ ID NO: 225521 - protein, 15 aa, Artificial Sequence
  Description of Artificial Sequence: Synthetic peptide
  Seed: LRMKWMMAMKYPITA
LRMKFMMNMWYPYTA

SEQ ID NO: 225522 - protein, 15 aa, Artificial Sequence
  Description of Artificial Sequence: Synthetic peptide
  Seed: LRMKWMMAMKYPITA
LRMKFMMNMYYPATA

SEQ ID NO: 225523 - protein, 15 aa, Artificial Sequence
  Description of Artificial Sequence: Synthetic peptide
  Seed: LRMKWMMAMKYPITA
LRMKFMMNMYYPFTA

SEQ ID NO: 225524 - protein, 15 aa, Artificial Sequence
  Description of Artificial Sequence: Synthetic peptide
  Seed: LRMKWMMAMKYPITA
LRMKFMMNMYYPITA

SEQ ID NO: 225525 - protein, 15 aa, Artificial Sequence
  Description of Artificial Sequence: Synthetic peptide
  Seed: LRMKWMMAMKYPITA
LRMKFMMNMYYPLTA

SEQ ID NO: 225526 - protein, 15 aa, Artificial Sequence
  Description of Artificial Sequence: Synthetic peptide
  Seed: LRMKWMMAMKYPITA
LRMKFMMNMYYPMTA

SEQ ID NO: 225527 - protein, 15 aa, Artificial Sequence
  Description of Artificial Sequence: Synthetic peptide
  Seed: LRMKWMMAMKYPITA
LRMKFMMNMYYPVTA

SEQ ID NO: 225528 - protein, 15 aa, Artificial Sequence
  Description of Artificial Sequence: Synthetic peptide
  Seed: LRMKWMMAMKYPITA
LRMKFMMNMYYPYTA

SEQ ID NO: 225529 - protein, 15 aa, Artificial Sequence
  Description of Artificial Sequence: Synthetic peptide
  Seed: LRMKWMMAMKYPITA
LRMKFMMPMAYPATA

SEQ ID NO: 225530 - protein, 15 aa, Artificial Sequence
  Description of Artificial Sequence: Synthetic peptide
  Seed: LRMKWMMAMKYPITA
LRMKFMMPMAYPCTA

SEQ ID NO: 225531 - protein, 15 aa, Artificial Sequence
  Description of Artificial Sequence: Synthetic peptide
  Seed: LRMKWMMAMKYPITA
LRMKFMMPMAYPDTA

SEQ ID NO: 225532 - protein, 15 aa, Artificial Sequence
  Description of Artificial Sequence: Synthetic peptide
  Seed: LRMKWMMAMKYPITA
LRMKFMMPMAYPETA

SEQ ID NO: 225533 - protein, 15 aa, Artificial Sequence
  Description of Artificial Sequence: Synthetic peptide
  Seed: LRMKWMMAMKYPITA
LRMKFMMPMAYPFTA

SEQ ID NO: 225534 - protein, 15 aa, Artificial Sequence
  Description of Artificial Sequence: Synthetic peptide
  Seed: LRMKWMMAMKYPITA
LRMKFMMPMAYPGTA

SEQ ID NO: 225535 - protein, 15 aa, Artificial Sequence
  Description of Artificial Sequence: Synthetic peptide
  Seed: LRMKWMMAMKYPITA
LRMKFMMPMAYPHTA

SEQ ID NO: 225536 - protein, 15 aa, Artificial Sequence
  Description of Artificial Sequence: Synthetic peptide
  Seed: LRMKWMMAMKYPITA
LRMKFMMPMAYPITA

SEQ ID NO: 225537 - protein, 15 aa, Artificial Sequence
  Description of Artificial Sequence: Synthetic peptide
  Seed: LRMKWMMAMKYPITA
LRMKFMMPMAYPKTA

SEQ ID NO: 225538 - protein, 15 aa, Artificial Sequence
  Description of Artificial Sequence: Synthetic peptide
  Seed: LRMKWMMAMKYPITA
LRMKFMMPMAYPLTA

SEQ ID NO: 225539 - protein, 15 aa, Artificial Sequence
  Description of Artificial Sequence: Synthetic peptide
  Seed: LRMKWMMAMKYPITA
LRMKFMMPMAYPMTA

SEQ ID NO: 225540 - protein, 15 aa, Artificial Sequence
  Description of Artificial Sequence: Synthetic peptide
  Seed: LRMKWMMAMKYPITA
LRMKFMMPMAYPNTA

SEQ ID NO: 225541 - protein, 15 aa, Artificial Sequence
  Description of Artificial Sequence: Synthetic peptide
  Seed: LRMKWMMAMKYPITA
LRMKFMMPMAYPPTA

SEQ ID NO: 225542 - protein, 15 aa, Artificial Sequence
  Description of Artificial Sequence: Synthetic peptide
  Seed: LRMKWMMAMKYPITA
LRMKFMMPMAYPQTA

SEQ ID NO: 225543 - protein, 15 aa, Artificial Sequence
  Description of Artificial Sequence: Synthetic peptide
  Seed: LRMKWMMAMKYPITA
LRMKFMMPMAYPRTA

SEQ ID NO: 225544 - protein, 15 aa, Artificial Sequence
  Description of Artificial Sequence: Synthetic peptide
  Seed: LRMKWMMAMKYPITA
LRMKFMMPMAYPSTA

SEQ ID NO: 225545 - protein, 15 aa, Artificial Sequence
  Description of Artificial Sequence: Synthetic peptide
  Seed: LRMKWMMAMKYPITA
LRMKFMMPMAYPTTA

SEQ ID NO: 225546 - protein, 15 aa, Artificial Sequence
  Description of Artificial Sequence: Synthetic peptide
  Seed: LRMKWMMAMKYPITA
LRMKFMMPMAYPVTA

SEQ ID NO: 225547 - protein, 15 aa, Artificial Sequence
  Description of Artificial Sequence: Synthetic peptide
  Seed: LRMKWMMAMKYPITA
LRMKFMMPMAYPWTA

SEQ ID NO: 225548 - protein, 15 aa, Artificial Sequence
  Description of Artificial Sequence: Synthetic peptide
  Seed: LRMKWMMAMKYPITA
LRMKFMMPMAYPYTA

SEQ ID NO: 225549 - protein, 15 aa, Artificial Sequence
  Description of Artificial Sequence: Synthetic peptide
  Seed: LRMKWMMAMKYPITA
LRMKFMMPMCYPITA

SEQ ID NO: 225550 - protein, 15 aa, Artificial Sequence
  Description of Artificial Sequence: Synthetic peptide
  Seed: LRMKWMMAMKYPITA
LRMKFMMPMCYPLTA

SEQ ID NO: 225551 - protein, 15 aa, Artificial Sequence
  Description of Artificial Sequence: Synthetic peptide
  Seed: LRMKWMMAMKYPITA
LRMKFMMPMCYPVTA

SEQ ID NO: 225552 - protein, 15 aa, Artificial Sequence
  Description of Artificial Sequence: Synthetic peptide
  Seed: LRMKWMMAMKYPITA
LRMKFMMPMFYPFTA

SEQ ID NO: 225553 - protein, 15 aa, Artificial Sequence
  Description of Artificial Sequence: Synthetic peptide
  Seed: LRMKWMMAMKYPITA
LRMKFMMPMFYPITA

SEQ ID NO: 225554 - protein, 15 aa, Artificial Sequence
  Description of Artificial Sequence: Synthetic peptide
  Seed: LRMKWMMAMKYPITA
LRMKFMMPMFYPLTA

SEQ ID NO: 225555 - protein, 15 aa, Artificial Sequence
  Description of Artificial Sequence: Synthetic peptide
  Seed: LRMKWMMAMKYPITA
LRMKFMMPMFYPMTA

SEQ ID NO: 225556 - protein, 15 aa, Artificial Sequence
  Description of Artificial Sequence: Synthetic peptide
  Seed: LRMKWMMAMKYPITA
LRMKFMMPMFYPVTA

SEQ ID NO: 225557 - protein, 15 aa, Artificial Sequence
  Description of Artificial Sequence: Synthetic peptide
  Seed: LRMKWMMAMKYPITA
LRMKFMMPMGYPATA

SEQ ID NO: 225558 - protein, 15 aa, Artificial Sequence
  Description of Artificial Sequence: Synthetic peptide
  Seed: LRMKWMMAMKYPITA
LRMKFMMPMGYPFTA

SEQ ID NO: 225559 - protein, 15 aa, Artificial Sequence
  Description of Artificial Sequence: Synthetic peptide
  Seed: LRMKWMMAMKYPITA
LRMKFMMPMGYPGTA

SEQ ID NO: 225560 - protein, 15 aa, Artificial Sequence
  Description of Artificial Sequence: Synthetic peptide
  Seed: LRMKWMMAMKYPITA
LRMKFMMPMGYPITA

SEQ ID NO: 225561 - protein, 15 aa, Artificial Sequence
  Description of Artificial Sequence: Synthetic peptide
  Seed: LRMKWMMAMKYPITA
LRMKFMMPMGYPLTA

SEQ ID NO: 225562 - protein, 15 aa, Artificial Sequence
  Description of Artificial Sequence: Synthetic peptide
  Seed: LRMKWMMAMKYPITA
LRMKFMMPMGYPMTA

SEQ ID NO: 225563 - protein, 15 aa, Artificial Sequence
  Description of Artificial Sequence: Synthetic peptide
  Seed: LRMKWMMAMKYPITA
LRMKFMMPMGYPSTA

SEQ ID NO: 225564 - protein, 15 aa, Artificial Sequence
  Description of Artificial Sequence: Synthetic peptide
  Seed: LRMKWMMAMKYPITA
LRMKFMMPMGYPTTA

SEQ ID NO: 225565 - protein, 15 aa, Artificial Sequence
  Description of Artificial Sequence: Synthetic peptide
  Seed: LRMKWMMAMKYPITA
LRMKFMMPMGYPVTA

SEQ ID NO: 225566 - protein, 15 aa, Artificial Sequence
  Description of Artificial Sequence: Synthetic peptide
  Seed: LRMKWMMAMKYPITA
LRMKFMMPMGYPYTA

SEQ ID NO: 225567 - protein, 15 aa, Artificial Sequence
  Description of Artificial Sequence: Synthetic peptide
  Seed: LRMKWMMAMKYPITA
LRMKFMMPMHYPITA

SEQ ID NO: 225568 - protein, 15 aa, Artificial Sequence
  Description of Artificial Sequence: Synthetic peptide
  Seed: LRMKWMMAMKYPITA
LRMKFMMPMHYPLTA

SEQ ID NO: 225569 - protein, 15 aa, Artificial Sequence
  Description of Artificial Sequence: Synthetic peptide
  Seed: LRMKWMMAMKYPITA
LRMKFMMPMHYPVTA

SEQ ID NO: 225570 - protein, 15 aa, Artificial Sequence
  Description of Artificial Sequence: Synthetic peptide
  Seed: LRMKWMMAMKYPITA
LRMKFMMPMIYPATA

SEQ ID NO: 225571 - protein, 15 aa, Artificial Sequence
  Description of Artificial Sequence: Synthetic peptide
  Seed: LRMKWMMAMKYPITA
LRMKFMMPMIYPFTA

SEQ ID NO: 225572 - protein, 15 aa, Artificial Sequence
  Description of Artificial Sequence: Synthetic peptide
  Seed: LRMKWMMAMKYPITA
LRMKFMMPMIYPGTA

SEQ ID NO: 225573 - protein, 15 aa, Artificial Sequence
  Description of Artificial Sequence: Synthetic peptide
  Seed: LRMKWMMAMKYPITA
LRMKFMMPMIYPITA

SEQ ID NO: 225574 - protein, 15 aa, Artificial Sequence
  Description of Artificial Sequence: Synthetic peptide
  Seed: LRMKWMMAMKYPITA
LRMKFMMPMIYPLTA

SEQ ID NO: 225575 - protein, 15 aa, Artificial Sequence
  Description of Artificial Sequence: Synthetic peptide
  Seed: LRMKWMMAMKYPITA
LRMKFMMPMIYPMTA

SEQ ID NO: 225576 - protein, 15 aa, Artificial Sequence
  Description of Artificial Sequence: Synthetic peptide
  Seed: LRMKWMMAMKYPITA
LRMKFMMPMIYPNTA

SEQ ID NO: 225577 - protein, 15 aa, Artificial Sequence
  Description of Artificial Sequence: Synthetic peptide
  Seed: LRMKWMMAMKYPITA
LRMKFMMPMIYPQTA

SEQ ID NO: 225578 - protein, 15 aa, Artificial Sequence
  Description of Artificial Sequence: Synthetic peptide
  Seed: LRMKWMMAMKYPITA
LRMKFMMPMIYPSTA

SEQ ID NO: 225579 - protein, 15 aa, Artificial Sequence
  Description of Artificial Sequence: Synthetic peptide
  Seed: LRMKWMMAMKYPITA
LRMKFMMPMIYPTTA

SEQ ID NO: 225580 - protein, 15 aa, Artificial Sequence
  Description of Artificial Sequence: Synthetic peptide
  Seed: LRMKWMMAMKYPITA
LRMKFMMPMIYPVTA

SEQ ID NO: 225581 - protein, 15 aa, Artificial Sequence
  Description of Artificial Sequence: Synthetic peptide
  Seed: LRMKWMMAMKYPITA
LRMKFMMPMLYPATA

SEQ ID NO: 225582 - protein, 15 aa, Artificial Sequence
  Description of Artificial Sequence: Synthetic peptide
  Seed: LRMKWMMAMKYPITA
LRMKFMMPMLYPITA

SEQ ID NO: 225583 - protein, 15 aa, Artificial Sequence
  Description of Artificial Sequence: Synthetic peptide
  Seed: LRMKWMMAMKYPITA
LRMKFMMPMLYPLTA

SEQ ID NO: 225584 - protein, 15 aa, Artificial Sequence
  Description of Artificial Sequence: Synthetic peptide
  Seed: LRMKWMMAMKYPITA
LRMKFMMPMLYPMTA

SEQ ID NO: 225585 - protein, 15 aa, Artificial Sequence
  Description of Artificial Sequence: Synthetic peptide
  Seed: LRMKWMMAMKYPITA
LRMKFMMPMLYPSTA

SEQ ID NO: 225586 - protein, 15 aa, Artificial Sequence
  Description of Artificial Sequence: Synthetic peptide
  Seed: LRMKWMMAMKYPITA
LRMKFMMPMLYPVTA

SEQ ID NO: 225587 - protein, 15 aa, Artificial Sequence
  Description of Artificial Sequence: Synthetic peptide
  Seed: LRMKWMMAMKYPITA
LRMKFMMPMMYPATA

SEQ ID NO: 225588 - protein, 15 aa, Artificial Sequence
  Description of Artificial Sequence: Synthetic peptide
  Seed: LRMKWMMAMKYPITA
LRMKFMMPMMYPCTA

SEQ ID NO: 225589 - protein, 15 aa, Artificial Sequence
  Description of Artificial Sequence: Synthetic peptide
  Seed: LRMKWMMAMKYPITA
LRMKFMMPMMYPGTA

SEQ ID NO: 225590 - protein, 15 aa, Artificial Sequence
  Description of Artificial Sequence: Synthetic peptide
  Seed: LRMKWMMAMKYPITA
LRMKFMMPMMYPITA

SEQ ID NO: 225591 - protein, 15 aa, Artificial Sequence
  Description of Artificial Sequence: Synthetic peptide
  Seed: LRMKWMMAMKYPITA
LRMKFMMPMMYPLTA

SEQ ID NO: 225592 - protein, 15 aa, Artificial Sequence
  Description of Artificial Sequence: Synthetic peptide
  Seed: LRMKWMMAMKYPITA
LRMKFMMPMMYPMTA

SEQ ID NO: 225593 - protein, 15 aa, Artificial Sequence
  Description of Artificial Sequence: Synthetic peptide
  Seed: LRMKWMMAMKYPITA
LRMKFMMPMMYPSTA

SEQ ID NO: 225594 - protein, 15 aa, Artificial Sequence
  Description of Artificial Sequence: Synthetic peptide
  Seed: LRMKWMMAMKYPITA
LRMKFMMPMMYPTTA

SEQ ID NO: 225595 - protein, 15 aa, Artificial Sequence
  Description of Artificial Sequence: Synthetic peptide
  Seed: LRMKWMMAMKYPITA
LRMKFMMPMMYPVTA

SEQ ID NO: 225596 - protein, 15 aa, Artificial Sequence
  Description of Artificial Sequence: Synthetic peptide
  Seed: LRMKWMMAMKYPITA
LRMKFMMPMNYPATA

SEQ ID NO: 225597 - protein, 15 aa, Artificial Sequence
  Description of Artificial Sequence: Synthetic peptide
  Seed: LRMKWMMAMKYPITA
LRMKFMMPMNYPFTA

SEQ ID NO: 225598 - protein, 15 aa, Artificial Sequence
  Description of Artificial Sequence: Synthetic peptide
  Seed: LRMKWMMAMKYPITA
LRMKFMMPMNYPGTA

SEQ ID NO: 225599 - protein, 15 aa, Artificial Sequence
  Description of Artificial Sequence: Synthetic peptide
  Seed: LRMKWMMAMKYPITA
LRMKFMMPMNYPITA

SEQ ID NO: 225600 - protein, 15 aa, Artificial Sequence
  Description of Artificial Sequence: Synthetic peptide
  Seed: LRMKWMMAMKYPITA
LRMKFMMPMNYPLTA

SEQ ID NO: 225601 - protein, 15 aa, Artificial Sequence
  Description of Artificial Sequence: Synthetic peptide
  Seed: LRMKWMMAMKYPITA
LRMKFMMPMNYPMTA

SEQ ID NO: 225602 - protein, 15 aa, Artificial Sequence
  Description of Artificial Sequence: Synthetic peptide
  Seed: LRMKWMMAMKYPITA
LRMKFMMPMNYPSTA

SEQ ID NO: 225603 - protein, 15 aa, Artificial Sequence
  Description of Artificial Sequence: Synthetic peptide
  Seed: LRMKWMMAMKYPITA
LRMKFMMPMNYPTTA

SEQ ID NO: 225604 - protein, 15 aa, Artificial Sequence
  Description of Artificial Sequence: Synthetic peptide
  Seed: LRMKWMMAMKYPITA
LRMKFMMPMNYPVTA

SEQ ID NO: 225605 - protein, 15 aa, Artificial Sequence
  Description of Artificial Sequence: Synthetic peptide
  Seed: LRMKWMMAMKYPITA
LRMKFMMPMPYPATA

SEQ ID NO: 225606 - protein, 15 aa, Artificial Sequence
  Description of Artificial Sequence: Synthetic peptide
  Seed: LRMKWMMAMKYPITA
LRMKFMMPMPYPFTA

SEQ ID NO: 225607 - protein, 15 aa, Artificial Sequence
  Description of Artificial Sequence: Synthetic peptide
  Seed: LRMKWMMAMKYPITA
LRMKFMMPMPYPGTA

SEQ ID NO: 225608 - protein, 15 aa, Artificial Sequence
  Description of Artificial Sequence: Synthetic peptide
  Seed: LRMKWMMAMKYPITA
LRMKFMMPMPYPITA

SEQ ID NO: 225609 - protein, 15 aa, Artificial Sequence
  Description of Artificial Sequence: Synthetic peptide
  Seed: LRMKWMMAMKYPITA
LRMKFMMPMPYPLTA

SEQ ID NO: 225610 - protein, 15 aa, Artificial Sequence
  Description of Artificial Sequence: Synthetic peptide
  Seed: LRMKWMMAMKYPITA
LRMKFMMPMPYPMTA

SEQ ID NO: 225611 - protein, 15 aa, Artificial Sequence
  Description of Artificial Sequence: Synthetic peptide
  Seed: LRMKWMMAMKYPITA
LRMKFMMPMPYPNTA

SEQ ID NO: 225612 - protein, 15 aa, Artificial Sequence
  Description of Artificial Sequence: Synthetic peptide
  Seed: LRMKWMMAMKYPITA
LRMKFMMPMPYPQTA

SEQ ID NO: 225613 - protein, 15 aa, Artificial Sequence
  Description of Artificial Sequence: Synthetic peptide
  Seed: LRMKWMMAMKYPITA
LRMKFMMPMPYPRTA

SEQ ID NO: 225614 - protein, 15 aa, Artificial Sequence
  Description of Artificial Sequence: Synthetic peptide
  Seed: LRMKWMMAMKYPITA
LRMKFMMPMPYPSTA

SEQ ID NO: 225615 - protein, 15 aa, Artificial Sequence
  Description of Artificial Sequence: Synthetic peptide
  Seed: LRMKWMMAMKYPITA
LRMKFMMPMPYPTTA

SEQ ID NO: 225616 - protein, 15 aa, Artificial Sequence
  Description of Artificial Sequence: Synthetic peptide
  Seed: LRMKWMMAMKYPITA
LRMKFMMPMPYPVTA

SEQ ID NO: 225617 - protein, 15 aa, Artificial Sequence
  Description of Artificial Sequence: Synthetic peptide
  Seed: LRMKWMMAMKYPITA
LRMKFMMPMPYPWTA

SEQ ID NO: 225618 - protein, 15 aa, Artificial Sequence
  Description of Artificial Sequence: Synthetic peptide
  Seed: LRMKWMMAMKYPITA
LRMKFMMPMPYPYTA

SEQ ID NO: 225619 - protein, 15 aa, Artificial Sequence
  Description of Artificial Sequence: Synthetic peptide
  Seed: LRMKWMMAMKYPITA
LRMKFMMPMQYPATA

SEQ ID NO: 225620 - protein, 15 aa, Artificial Sequence
  Description of Artificial Sequence: Synthetic peptide
  Seed: LRMKWMMAMKYPITA
LRMKFMMPMQYPITA

SEQ ID NO: 225621 - protein, 15 aa, Artificial Sequence
  Description of Artificial Sequence: Synthetic peptide
  Seed: LRMKWMMAMKYPITA
LRMKFMMPMQYPLTA

SEQ ID NO: 225622 - protein, 15 aa, Artificial Sequence
  Description of Artificial Sequence: Synthetic peptide
  Seed: LRMKWMMAMKYPITA
LRMKFMMPMQYPMTA

SEQ ID NO: 225623 - protein, 15 aa, Artificial Sequence
  Description of Artificial Sequence: Synthetic peptide
  Seed: LRMKWMMAMKYPITA
LRMKFMMPMQYPVTA

SEQ ID NO: 225624 - protein, 15 aa, Artificial Sequence
  Description of Artificial Sequence: Synthetic peptide
  Seed: LRMKWMMAMKYPITA
LRMKFMMPMRYPRTA

SEQ ID NO: 225625 - protein, 15 aa, Artificial Sequence
  Description of Artificial Sequence: Synthetic peptide
  Seed: LRMKWMMAMKYPITA
LRMKFMMPMSYPATA

SEQ ID NO: 225626 - protein, 15 aa, Artificial Sequence
  Description of Artificial Sequence: Synthetic peptide
  Seed: LRMKWMMAMKYPITA
LRMKFMMPMSYPCTA

SEQ ID NO: 225627 - protein, 15 aa, Artificial Sequence
  Description of Artificial Sequence: Synthetic peptide
  Seed: LRMKWMMAMKYPITA
LRMKFMMPMSYPFTA

SEQ ID NO: 225628 - protein, 15 aa, Artificial Sequence
  Description of Artificial Sequence: Synthetic peptide
  Seed: LRMKWMMAMKYPITA
LRMKFMMPMSYPGTA

SEQ ID NO: 225629 - protein, 15 aa, Artificial Sequence
  Description of Artificial Sequence: Synthetic peptide
  Seed: LRMKWMMAMKYPITA
LRMKFMMPMSYPHTA

SEQ ID NO: 225630 - protein, 15 aa, Artificial Sequence
  Description of Artificial Sequence: Synthetic peptide
  Seed: LRMKWMMAMKYPITA
LRMKFMMPMSYPITA

SEQ ID NO: 225631 - protein, 15 aa, Artificial Sequence
  Description of Artificial Sequence: Synthetic peptide
  Seed: LRMKWMMAMKYPITA
LRMKFMMPMSYPLTA

SEQ ID NO: 225632 - protein, 15 aa, Artificial Sequence
  Description of Artificial Sequence: Synthetic peptide
  Seed: LRMKWMMAMKYPITA
LRMKFMMPMSYPMTA

SEQ ID NO: 225633 - protein, 15 aa, Artificial Sequence
  Description of Artificial Sequence: Synthetic peptide
  Seed: LRMKWMMAMKYPITA
LRMKFMMPMSYPNTA

SEQ ID NO: 225634 - protein, 15 aa, Artificial Sequence
  Description of Artificial Sequence: Synthetic peptide
  Seed: LRMKWMMAMKYPITA
LRMKFMMPMSYPQTA

SEQ ID NO: 225635 - protein, 15 aa, Artificial Sequence
  Description of Artificial Sequence: Synthetic peptide
  Seed: LRMKWMMAMKYPITA
LRMKFMMPMSYPRTA

SEQ ID NO: 225636 - protein, 15 aa, Artificial Sequence
  Description of Artificial Sequence: Synthetic peptide
  Seed: LRMKWMMAMKYPITA
LRMKFMMPMSYPSTA

SEQ ID NO: 225637 - protein, 15 aa, Artificial Sequence
  Description of Artificial Sequence: Synthetic peptide
  Seed: LRMKWMMAMKYPITA
LRMKFMMPMSYPTTA

SEQ ID NO: 225638 - protein, 15 aa, Artificial Sequence
  Description of Artificial Sequence: Synthetic peptide
  Seed: LRMKWMMAMKYPITA
LRMKFMMPMSYPVTA

SEQ ID NO: 225639 - protein, 15 aa, Artificial Sequence
  Description of Artificial Sequence: Synthetic peptide
  Seed: LRMKWMMAMKYPITA
LRMKFMMPMSYPWTA

SEQ ID NO: 225640 - protein, 15 aa, Artificial Sequence
  Description of Artificial Sequence: Synthetic peptide
  Seed: LRMKWMMAMKYPITA
LRMKFMMPMSYPYTA

SEQ ID NO: 225641 - protein, 15 aa, Artificial Sequence
  Description of Artificial Sequence: Synthetic peptide
  Seed: LRMKWMMAMKYPITA
LRMKFMMPMTYPATA

SEQ ID NO: 225642 - protein, 15 aa, Artificial Sequence
  Description of Artificial Sequence: Synthetic peptide
  Seed: LRMKWMMAMKYPITA
LRMKFMMPMTYPFTA

SEQ ID NO: 225643 - protein, 15 aa, Artificial Sequence
  Description of Artificial Sequence: Synthetic peptide
  Seed: LRMKWMMAMKYPITA
LRMKFMMPMTYPGTA

SEQ ID NO: 225644 - protein, 15 aa, Artificial Sequence
  Description of Artificial Sequence: Synthetic peptide
  Seed: LRMKWMMAMKYPITA
LRMKFMMPMTYPITA

SEQ ID NO: 225645 - protein, 15 aa, Artificial Sequence
  Description of Artificial Sequence: Synthetic peptide
  Seed: LRMKWMMAMKYPITA
LRMKFMMPMTYPLTA

SEQ ID NO: 225646 - protein, 15 aa, Artificial Sequence
  Description of Artificial Sequence: Synthetic peptide
  Seed: LRMKWMMAMKYPITA
LRMKFMMPMTYPMTA

SEQ ID NO: 225647 - protein, 15 aa, Artificial Sequence
  Description of Artificial Sequence: Synthetic peptide
  Seed: LRMKWMMAMKYPITA
LRMKFMMPMTYPNTA

SEQ ID NO: 225648 - protein, 15 aa, Artificial Sequence
  Description of Artificial Sequence: Synthetic peptide
  Seed: LRMKWMMAMKYPITA
LRMKFMMPMTYPQTA

SEQ ID NO: 225649 - protein, 15 aa, Artificial Sequence
  Description of Artificial Sequence: Synthetic peptide
  Seed: LRMKWMMAMKYPITA
LRMKFMMPMTYPSTA

SEQ ID NO: 225650 - protein, 15 aa, Artificial Sequence
  Description of Artificial Sequence: Synthetic peptide
  Seed: LRMKWMMAMKYPITA
LRMKFMMPMTYPTTA

SEQ ID NO: 225651 - protein, 15 aa, Artificial Sequence
  Description of Artificial Sequence: Synthetic peptide
  Seed: LRMKWMMAMKYPITA
LRMKFMMPMTYPVTA

SEQ ID NO: 225652 - protein, 15 aa, Artificial Sequence
  Description of Artificial Sequence: Synthetic peptide
  Seed: LRMKWMMAMKYPITA
LRMKFMMPMTYPWTA

SEQ ID NO: 225653 - protein, 15 aa, Artificial Sequence
  Description of Artificial Sequence: Synthetic peptide
  Seed: LRMKWMMAMKYPITA
LRMKFMMPMTYPYTA

SEQ ID NO: 225654 - protein, 15 aa, Artificial Sequence
  Description of Artificial Sequence: Synthetic peptide
  Seed: LRMKWMMAMKYPITA
LRMKFMMPMVYPATA

SEQ ID NO: 225655 - protein, 15 aa, Artificial Sequence
  Description of Artificial Sequence: Synthetic peptide
  Seed: LRMKWMMAMKYPITA
LRMKFMMPMVYPDTA

SEQ ID NO: 225656 - protein, 15 aa, Artificial Sequence
  Description of Artificial Sequence: Synthetic peptide
  Seed: LRMKWMMAMKYPITA
LRMKFMMPMVYPETA

SEQ ID NO: 225657 - protein, 15 aa, Artificial Sequence
  Description of Artificial Sequence: Synthetic peptide
  Seed: LRMKWMMAMKYPITA
LRMKFMMPMVYPFTA

SEQ ID NO: 225658 - protein, 15 aa, Artificial Sequence
  Description of Artificial Sequence: Synthetic peptide
  Seed: LRMKWMMAMKYPITA
LRMKFMMPMVYPGTA

SEQ ID NO: 225659 - protein, 15 aa, Artificial Sequence
  Description of Artificial Sequence: Synthetic peptide
  Seed: LRMKWMMAMKYPITA
LRMKFMMPMVYPHTA

SEQ ID NO: 225660 - protein, 15 aa, Artificial Sequence
  Description of Artificial Sequence: Synthetic peptide
  Seed: LRMKWMMAMKYPITA
LRMKFMMPMVYPITA

SEQ ID NO: 225661 - protein, 15 aa, Artificial Sequence
  Description of Artificial Sequence: Synthetic peptide
  Seed: LRMKWMMAMKYPITA
LRMKFMMPMVYPLTA

SEQ ID NO: 225662 - protein, 15 aa, Artificial Sequence
  Description of Artificial Sequence: Synthetic peptide
  Seed: LRMKWMMAMKYPITA
LRMKFMMPMVYPMTA

SEQ ID NO: 225663 - protein, 15 aa, Artificial Sequence
  Description of Artificial Sequence: Synthetic peptide
  Seed: LRMKWMMAMKYPITA
LRMKFMMPMVYPNTA

SEQ ID NO: 225664 - protein, 15 aa, Artificial Sequence
  Description of Artificial Sequence: Synthetic peptide
  Seed: LRMKWMMAMKYPITA
LRMKFMMPMVYPQTA

SEQ ID NO: 225665 - protein, 15 aa, Artificial Sequence
  Description of Artificial Sequence: Synthetic peptide
  Seed: LRMKWMMAMKYPITA
LRMKFMMPMVYPRTA

SEQ ID NO: 225666 - protein, 15 aa, Artificial Sequence
  Description of Artificial Sequence: Synthetic peptide
  Seed: LRMKWMMAMKYPITA
LRMKFMMPMVYPSTA

SEQ ID NO: 225667 - protein, 15 aa, Artificial Sequence
  Description of Artificial Sequence: Synthetic peptide
  Seed: LRMKWMMAMKYPITA
LRMKFMMPMVYPTTA

SEQ ID NO: 225668 - protein, 15 aa, Artificial Sequence
  Description of Artificial Sequence: Synthetic peptide
  Seed: LRMKWMMAMKYPITA
LRMKFMMPMVYPVTA

SEQ ID NO: 225669 - protein, 15 aa, Artificial Sequence
  Description of Artificial Sequence: Synthetic peptide
  Seed: LRMKWMMAMKYPITA
LRMKFMMPMVYPYTA

SEQ ID NO: 225670 - protein, 15 aa, Artificial Sequence
  Description of Artificial Sequence: Synthetic peptide
  Seed: LRMKWMMAMKYPITA
LRMKFMMQMAYPATA

SEQ ID NO: 225671 - protein, 15 aa, Artificial Sequence
  Description of Artificial Sequence: Synthetic peptide
  Seed: LRMKWMMAMKYPITA
LRMKFMMQMAYPCTA

SEQ ID NO: 225672 - protein, 15 aa, Artificial Sequence
  Description of Artificial Sequence: Synthetic peptide
  Seed: LRMKWMMAMKYPITA
LRMKFMMQMAYPDTA

SEQ ID NO: 225673 - protein, 15 aa, Artificial Sequence
  Description of Artificial Sequence: Synthetic peptide
  Seed: LRMKWMMAMKYPITA
LRMKFMMQMAYPETA

SEQ ID NO: 225674 - protein, 15 aa, Artificial Sequence
  Description of Artificial Sequence: Synthetic peptide
  Seed: LRMKWMMAMKYPITA
LRMKFMMQMAYPFTA

SEQ ID NO: 225675 - protein, 15 aa, Artificial Sequence
  Description of Artificial Sequence: Synthetic peptide
  Seed: LRMKWMMAMKYPITA
LRMKFMMQMAYPGTA

SEQ ID NO: 225676 - protein, 15 aa, Artificial Sequence
  Description of Artificial Sequence: Synthetic peptide
  Seed: LRMKWMMAMKYPITA
LRMKFMMQMAYPHTA

SEQ ID NO: 225677 - protein, 15 aa, Artificial Sequence
  Description of Artificial Sequence: Synthetic peptide
  Seed: LRMKWMMAMKYPITA
LRMKFMMQMAYPITA

SEQ ID NO: 225678 - protein, 15 aa, Artificial Sequence
  Description of Artificial Sequence: Synthetic peptide
  Seed: LRMKWMMAMKYPITA
LRMKFMMQMAYPKTA

SEQ ID NO: 225679 - protein, 15 aa, Artificial Sequence
  Description of Artificial Sequence: Synthetic peptide
  Seed: LRMKWMMAMKYPITA
LRMKFMMQMAYPLTA

SEQ ID NO: 225680 - protein, 15 aa, Artificial Sequence
  Description of Artificial Sequence: Synthetic peptide
  Seed: LRMKWMMAMKYPITA
LRMKFMMQMAYPMTA

SEQ ID NO: 225681 - protein, 15 aa, Artificial Sequence
  Description of Artificial Sequence: Synthetic peptide
  Seed: LRMKWMMAMKYPITA
LRMKFMMQMAYPNTA

SEQ ID NO: 225682 - protein, 15 aa, Artificial Sequence
  Description of Artificial Sequence: Synthetic peptide
  Seed: LRMKWMMAMKYPITA
LRMKFMMQMAYPPTA

SEQ ID NO: 225683 - protein, 15 aa, Artificial Sequence
  Description of Artificial Sequence: Synthetic peptide
  Seed: LRMKWMMAMKYPITA
LRMKFMMQMAYPQTA

SEQ ID NO: 225684 - protein, 15 aa, Artificial Sequence
  Description of Artificial Sequence: Synthetic peptide
  Seed: LRMKWMMAMKYPITA
LRMKFMMQMAYPRTA

SEQ ID NO: 225685 - protein, 15 aa, Artificial Sequence
  Description of Artificial Sequence: Synthetic peptide
  Seed: LRMKWMMAMKYPITA
LRMKFMMQMAYPSTA

SEQ ID NO: 225686 - protein, 15 aa, Artificial Sequence
  Description of Artificial Sequence: Synthetic peptide
  Seed: LRMKWMMAMKYPITA
LRMKFMMQMAYPTTA

SEQ ID NO: 225687 - protein, 15 aa, Artificial Sequence
  Description of Artificial Sequence: Synthetic peptide
  Seed: LRMKWMMAMKYPITA
LRMKFMMQMAYPVTA

SEQ ID NO: 225688 - protein, 15 aa, Artificial Sequence
  Description of Artificial Sequence: Synthetic peptide
  Seed: LRMKWMMAMKYPITA
LRMKFMMQMAYPWTA

SEQ ID NO: 225689 - protein, 15 aa, Artificial Sequence
  Description of Artificial Sequence: Synthetic peptide
  Seed: LRMKWMMAMKYPITA
LRMKFMMQMAYPYTA

SEQ ID NO: 225690 - protein, 15 aa, Artificial Sequence
  Description of Artificial Sequence: Synthetic peptide
  Seed: LRMKWMMAMKYPITA
LRMKFMMQMCYPATA

SEQ ID NO: 225691 - protein, 15 aa, Artificial Sequence
  Description of Artificial Sequence: Synthetic peptide
  Seed: LRMKWMMAMKYPITA
LRMKFMMQMCYPGTA

SEQ ID NO: 225692 - protein, 15 aa, Artificial Sequence
  Description of Artificial Sequence: Synthetic peptide
  Seed: LRMKWMMAMKYPITA
LRMKFMMQMCYPHTA

SEQ ID NO: 225693 - protein, 15 aa, Artificial Sequence
  Description of Artificial Sequence: Synthetic peptide
  Seed: LRMKWMMAMKYPITA
LRMKFMMQMCYPITA

SEQ ID NO: 225694 - protein, 15 aa, Artificial Sequence
  Description of Artificial Sequence: Synthetic peptide
  Seed: LRMKWMMAMKYPITA
LRMKFMMQMCYPLTA

SEQ ID NO: 225695 - protein, 15 aa, Artificial Sequence
  Description of Artificial Sequence: Synthetic peptide
  Seed: LRMKWMMAMKYPITA
LRMKFMMQMCYPMTA

SEQ ID NO: 225696 - protein, 15 aa, Artificial Sequence
  Description of Artificial Sequence: Synthetic peptide
  Seed: LRMKWMMAMKYPITA
LRMKFMMQMCYPNTA

SEQ ID NO: 225697 - protein, 15 aa, Artificial Sequence
  Description of Artificial Sequence: Synthetic peptide
  Seed: LRMKWMMAMKYPITA
LRMKFMMQMCYPSTA

SEQ ID NO: 225698 - protein, 15 aa, Artificial Sequence
  Description of Artificial Sequence: Synthetic peptide
  Seed: LRMKWMMAMKYPITA
LRMKFMMQMCYPTTA

SEQ ID NO: 225699 - protein, 15 aa, Artificial Sequence
  Description of Artificial Sequence: Synthetic peptide
  Seed: LRMKWMMAMKYPITA
LRMKFMMQMCYPVTA

SEQ ID NO: 225700 - protein, 15 aa, Artificial Sequence
  Description of Artificial Sequence: Synthetic peptide
  Seed: LRMKWMMAMKYPITA
LRMKFMMQMDYPATA

SEQ ID NO: 225701 - protein, 15 aa, Artificial Sequence
  Description of Artificial Sequence: Synthetic peptide
  Seed: LRMKWMMAMKYPITA
LRMKFMMQMDYPDTA

SEQ ID NO: 225702 - protein, 15 aa, Artificial Sequence
  Description of Artificial Sequence: Synthetic peptide
  Seed: LRMKWMMAMKYPITA
LRMKFMMQMDYPITA

SEQ ID NO: 225703 - protein, 15 aa, Artificial Sequence
  Description of Artificial Sequence: Synthetic peptide
  Seed: LRMKWMMAMKYPITA
LRMKFMMQMDYPLTA

SEQ ID NO: 225704 - protein, 15 aa, Artificial Sequence
  Description of Artificial Sequence: Synthetic peptide
  Seed: LRMKWMMAMKYPITA
LRMKFMMQMDYPMTA

SEQ ID NO: 225705 - protein, 15 aa, Artificial Sequence
  Description of Artificial Sequence: Synthetic peptide
  Seed: LRMKWMMAMKYPITA
LRMKFMMQMDYPNTA

SEQ ID NO: 225706 - protein, 15 aa, Artificial Sequence
  Description of Artificial Sequence: Synthetic peptide
  Seed: LRMKWMMAMKYPITA
LRMKFMMQMDYPSTA

SEQ ID NO: 225707 - protein, 15 aa, Artificial Sequence
  Description of Artificial Sequence: Synthetic peptide
  Seed: LRMKWMMAMKYPITA
LRMKFMMQMDYPTTA

SEQ ID NO: 225708 - protein, 15 aa, Artificial Sequence
  Description of Artificial Sequence: Synthetic peptide
  Seed: LRMKWMMAMKYPITA
LRMKFMMQMDYPVTA

SEQ ID NO: 225709 - protein, 15 aa, Artificial Sequence
  Description of Artificial Sequence: Synthetic peptide
  Seed: LRMKWMMAMKYPITA
LRMKFMMQMEYPATA

SEQ ID NO: 225710 - protein, 15 aa, Artificial Sequence
  Description of Artificial Sequence: Synthetic peptide
  Seed: LRMKWMMAMKYPITA
LRMKFMMQMEYPITA

SEQ ID NO: 225711 - protein, 15 aa, Artificial Sequence
  Description of Artificial Sequence: Synthetic peptide
  Seed: LRMKWMMAMKYPITA
LRMKFMMQMEYPLTA

SEQ ID NO: 225712 - protein, 15 aa, Artificial Sequence
  Description of Artificial Sequence: Synthetic peptide
  Seed: LRMKWMMAMKYPITA
LRMKFMMQMEYPMTA

SEQ ID NO: 225713 - protein, 15 aa, Artificial Sequence
  Description of Artificial Sequence: Synthetic peptide
  Seed: LRMKWMMAMKYPITA
LRMKFMMQMEYPNTA

SEQ ID NO: 225714 - protein, 15 aa, Artificial Sequence
  Description of Artificial Sequence: Synthetic peptide
  Seed: LRMKWMMAMKYPITA
LRMKFMMQMEYPSTA

SEQ ID NO: 225715 - protein, 15 aa, Artificial Sequence
  Description of Artificial Sequence: Synthetic peptide
  Seed: LRMKWMMAMKYPITA
LRMKFMMQMEYPTTA

SEQ ID NO: 225716 - protein, 15 aa, Artificial Sequence
  Description of Artificial Sequence: Synthetic peptide
  Seed: LRMKWMMAMKYPITA
LRMKFMMQMEYPVTA

SEQ ID NO: 225717 - protein, 15 aa, Artificial Sequence
  Description of Artificial Sequence: Synthetic peptide
  Seed: LRMKWMMAMKYPITA
LRMKFMMQMFYPATA

SEQ ID NO: 225718 - protein, 15 aa, Artificial Sequence
  Description of Artificial Sequence: Synthetic peptide
  Seed: LRMKWMMAMKYPITA
LRMKFMMQMFYPETA

SEQ ID NO: 225719 - protein, 15 aa, Artificial Sequence
  Description of Artificial Sequence: Synthetic peptide
  Seed: LRMKWMMAMKYPITA
LRMKFMMQMFYPFTA

SEQ ID NO: 225720 - protein, 15 aa, Artificial Sequence
  Description of Artificial Sequence: Synthetic peptide
  Seed: LRMKWMMAMKYPITA
LRMKFMMQMFYPITA

SEQ ID NO: 225721 - protein, 15 aa, Artificial Sequence
  Description of Artificial Sequence: Synthetic peptide
  Seed: LRMKWMMAMKYPITA
LRMKFMMQMFYPLTA

SEQ ID NO: 225722 - protein, 15 aa, Artificial Sequence
  Description of Artificial Sequence: Synthetic peptide
  Seed: LRMKWMMAMKYPITA
LRMKFMMQMFYPMTA

SEQ ID NO: 225723 - protein, 15 aa, Artificial Sequence
  Description of Artificial Sequence: Synthetic peptide
  Seed: LRMKWMMAMKYPITA
LRMKFMMQMFYPNTA

SEQ ID NO: 225724 - protein, 15 aa, Artificial Sequence
  Description of Artificial Sequence: Synthetic peptide
  Seed: LRMKWMMAMKYPITA
LRMKFMMQMFYPSTA

SEQ ID NO: 225725 - protein, 15 aa, Artificial Sequence
  Description of Artificial Sequence: Synthetic peptide
  Seed: LRMKWMMAMKYPITA
LRMKFMMQMFYPTTA

SEQ ID NO: 225726 - protein, 15 aa, Artificial Sequence
  Description of Artificial Sequence: Synthetic peptide
  Seed: LRMKWMMAMKYPITA
LRMKFMMQMFYPVTA

SEQ ID NO: 225727 - protein, 15 aa, Artificial Sequence
  Description of Artificial Sequence: Synthetic peptide
  Seed: LRMKWMMAMKYPITA
LRMKFMMQMFYPYTA

SEQ ID NO: 225728 - protein, 15 aa, Artificial Sequence
  Description of Artificial Sequence: Synthetic peptide
  Seed: LRMKWMMAMKYPITA
LRMKFMMQMGYPATA

SEQ ID NO: 225729 - protein, 15 aa, Artificial Sequence
  Description of Artificial Sequence: Synthetic peptide
  Seed: LRMKWMMAMKYPITA
LRMKFMMQMGYPCTA

SEQ ID NO: 225730 - protein, 15 aa, Artificial Sequence
  Description of Artificial Sequence: Synthetic peptide
  Seed: LRMKWMMAMKYPITA
LRMKFMMQMGYPDTA

SEQ ID NO: 225731 - protein, 15 aa, Artificial Sequence
  Description of Artificial Sequence: Synthetic peptide
  Seed: LRMKWMMAMKYPITA
LRMKFMMQMGYPETA

SEQ ID NO: 225732 - protein, 15 aa, Artificial Sequence
  Description of Artificial Sequence: Synthetic peptide
  Seed: LRMKWMMAMKYPITA
LRMKFMMQMGYPFTA

SEQ ID NO: 225733 - protein, 15 aa, Artificial Sequence
  Description of Artificial Sequence: Synthetic peptide
  Seed: LRMKWMMAMKYPITA
LRMKFMMQMGYPGTA

SEQ ID NO: 225734 - protein, 15 aa, Artificial Sequence
  Description of Artificial Sequence: Synthetic peptide
  Seed: LRMKWMMAMKYPITA
LRMKFMMQMGYPHTA

SEQ ID NO: 225735 - protein, 15 aa, Artificial Sequence
  Description of Artificial Sequence: Synthetic peptide
  Seed: LRMKWMMAMKYPITA
LRMKFMMQMGYPITA

SEQ ID NO: 225736 - protein, 15 aa, Artificial Sequence
  Description of Artificial Sequence: Synthetic peptide
  Seed: LRMKWMMAMKYPITA
LRMKFMMQMGYPKTA

SEQ ID NO: 225737 - protein, 15 aa, Artificial Sequence
  Description of Artificial Sequence: Synthetic peptide
  Seed: LRMKWMMAMKYPITA
LRMKFMMQMGYPLTA

SEQ ID NO: 225738 - protein, 15 aa, Artificial Sequence
  Description of Artificial Sequence: Synthetic peptide
  Seed: LRMKWMMAMKYPITA
LRMKFMMQMGYPMTA

SEQ ID NO: 225739 - protein, 15 aa, Artificial Sequence
  Description of Artificial Sequence: Synthetic peptide
  Seed: LRMKWMMAMKYPITA
LRMKFMMQMGYPNTA

SEQ ID NO: 225740 - protein, 15 aa, Artificial Sequence
  Description of Artificial Sequence: Synthetic peptide
  Seed: LRMKWMMAMKYPITA
LRMKFMMQMGYPPTA

SEQ ID NO: 225741 - protein, 15 aa, Artificial Sequence
  Description of Artificial Sequence: Synthetic peptide
  Seed: LRMKWMMAMKYPITA
LRMKFMMQMGYPQTA

SEQ ID NO: 225742 - protein, 15 aa, Artificial Sequence
  Description of Artificial Sequence: Synthetic peptide
  Seed: LRMKWMMAMKYPITA
LRMKFMMQMGYPRTA

SEQ ID NO: 225743 - protein, 15 aa, Artificial Sequence
  Description of Artificial Sequence: Synthetic peptide
  Seed: LRMKWMMAMKYPITA
LRMKFMMQMGYPSTA

SEQ ID NO: 225744 - protein, 15 aa, Artificial Sequence
  Description of Artificial Sequence: Synthetic peptide
  Seed: LRMKWMMAMKYPITA
LRMKFMMQMGYPTTA

SEQ ID NO: 225745 - protein, 15 aa, Artificial Sequence
  Description of Artificial Sequence: Synthetic peptide
  Seed: LRMKWMMAMKYPITA
LRMKFMMQMGYPVTA

SEQ ID NO: 225746 - protein, 15 aa, Artificial Sequence
  Description of Artificial Sequence: Synthetic peptide
  Seed: LRMKWMMAMKYPITA
LRMKFMMQMGYPWTA

SEQ ID NO: 225747 - protein, 15 aa, Artificial Sequence
  Description of Artificial Sequence: Synthetic peptide
  Seed: LRMKWMMAMKYPITA
LRMKFMMQMGYPYTA

SEQ ID NO: 225748 - protein, 15 aa, Artificial Sequence
  Description of Artificial Sequence: Synthetic peptide
  Seed: LRMKWMMAMKYPITA
LRMKFMMQMHYPATA

SEQ ID NO: 225749 - protein, 15 aa, Artificial Sequence
  Description of Artificial Sequence: Synthetic peptide
  Seed: LRMKWMMAMKYPITA
LRMKFMMQMHYPFTA

SEQ ID NO: 225750 - protein, 15 aa, Artificial Sequence
  Description of Artificial Sequence: Synthetic peptide
  Seed: LRMKWMMAMKYPITA
LRMKFMMQMHYPGTA

SEQ ID NO: 225751 - protein, 15 aa, Artificial Sequence
  Description of Artificial Sequence: Synthetic peptide
  Seed: LRMKWMMAMKYPITA
LRMKFMMQMHYPITA

SEQ ID NO: 225752 - protein, 15 aa, Artificial Sequence
  Description of Artificial Sequence: Synthetic peptide
  Seed: LRMKWMMAMKYPITA
LRMKFMMQMHYPLTA

SEQ ID NO: 225753 - protein, 15 aa, Artificial Sequence
  Description of Artificial Sequence: Synthetic peptide
  Seed: LRMKWMMAMKYPITA
LRMKFMMQMHYPMTA

SEQ ID NO: 225754 - protein, 15 aa, Artificial Sequence
  Description of Artificial Sequence: Synthetic peptide
  Seed: LRMKWMMAMKYPITA
LRMKFMMQMHYPNTA

SEQ ID NO: 225755 - protein, 15 aa, Artificial Sequence
  Description of Artificial Sequence: Synthetic peptide
  Seed: LRMKWMMAMKYPITA
LRMKFMMQMHYPSTA

SEQ ID NO: 225756 - protein, 15 aa, Artificial Sequence
  Description of Artificial Sequence: Synthetic peptide
  Seed: LRMKWMMAMKYPITA
LRMKFMMQMHYPTTA

SEQ ID NO: 225757 - protein, 15 aa, Artificial Sequence
  Description of Artificial Sequence: Synthetic peptide
  Seed: LRMKWMMAMKYPITA
LRMKFMMQMHYPVTA

SEQ ID NO: 225758 - protein, 15 aa, Artificial Sequence
  Description of Artificial Sequence: Synthetic peptide
  Seed: LRMKWMMAMKYPITA
LRMKFMMQMHYPYTA

SEQ ID NO: 225759 - protein, 15 aa, Artificial Sequence
  Description of Artificial Sequence: Synthetic peptide
  Seed: LRMKWMMAMKYPITA
LRMKFMMQMIYPATA

SEQ ID NO: 225760 - protein, 15 aa, Artificial Sequence
  Description of Artificial Sequence: Synthetic peptide
  Seed: LRMKWMMAMKYPITA
LRMKFMMQMIYPCTA

SEQ ID NO: 225761 - protein, 15 aa, Artificial Sequence
  Description of Artificial Sequence: Synthetic peptide
  Seed: LRMKWMMAMKYPITA
LRMKFMMQMIYPDTA

SEQ ID NO: 225762 - protein, 15 aa, Artificial Sequence
  Description of Artificial Sequence: Synthetic peptide
  Seed: LRMKWMMAMKYPITA
LRMKFMMQMIYPETA

SEQ ID NO: 225763 - protein, 15 aa, Artificial Sequence
  Description of Artificial Sequence: Synthetic peptide
  Seed: LRMKWMMAMKYPITA
LRMKFMMQMIYPFTA

SEQ ID NO: 225764 - protein, 15 aa, Artificial Sequence
  Description of Artificial Sequence: Synthetic peptide
  Seed: LRMKWMMAMKYPITA
LRMKFMMQMIYPGTA

SEQ ID NO: 225765 - protein, 15 aa, Artificial Sequence
  Description of Artificial Sequence: Synthetic peptide
  Seed: LRMKWMMAMKYPITA
LRMKFMMQMIYPHTA

SEQ ID NO: 225766 - protein, 15 aa, Artificial Sequence
  Description of Artificial Sequence: Synthetic peptide
  Seed: LRMKWMMAMKYPITA
LRMKFMMQMIYPITA

SEQ ID NO: 225767 - protein, 15 aa, Artificial Sequence
  Description of Artificial Sequence: Synthetic peptide
  Seed: LRMKWMMAMKYPITA
LRMKFMMQMIYPKTA

SEQ ID NO: 225768 - protein, 15 aa, Artificial Sequence
  Description of Artificial Sequence: Synthetic peptide
  Seed: LRMKWMMAMKYPITA
LRMKFMMQMIYPLTA

SEQ ID NO: 225769 - protein, 15 aa, Artificial Sequence
  Description of Artificial Sequence: Synthetic peptide
  Seed: LRMKWMMAMKYPITA
LRMKFMMQMIYPMTA

SEQ ID NO: 225770 - protein, 15 aa, Artificial Sequence
  Description of Artificial Sequence: Synthetic peptide
  Seed: LRMKWMMAMKYPITA
LRMKFMMQMIYPNTA

SEQ ID NO: 225771 - protein, 15 aa, Artificial Sequence
  Description of Artificial Sequence: Synthetic peptide
  Seed: LRMKWMMAMKYPITA
LRMKFMMQMIYPPTA

SEQ ID NO: 225772 - protein, 15 aa, Artificial Sequence
  Description of Artificial Sequence: Synthetic peptide
  Seed: LRMKWMMAMKYPITA
LRMKFMMQMIYPQTA

SEQ ID NO: 225773 - protein, 15 aa, Artificial Sequence
  Description of Artificial Sequence: Synthetic peptide
  Seed: LRMKWMMAMKYPITA
LRMKFMMQMIYPRTA

SEQ ID NO: 225774 - protein, 15 aa, Artificial Sequence
  Description of Artificial Sequence: Synthetic peptide
  Seed: LRMKWMMAMKYPITA
LRMKFMMQMIYPSTA

SEQ ID NO: 225775 - protein, 15 aa, Artificial Sequence
  Description of Artificial Sequence: Synthetic peptide
  Seed: LRMKWMMAMKYPITA
LRMKFMMQMIYPTTA

SEQ ID NO: 225776 - protein, 15 aa, Artificial Sequence
  Description of Artificial Sequence: Synthetic peptide
  Seed: LRMKWMMAMKYPITA
LRMKFMMQMIYPVTA

SEQ ID NO: 225777 - protein, 15 aa, Artificial Sequence
  Description of Artificial Sequence: Synthetic peptide
  Seed: LRMKWMMAMKYPITA
LRMKFMMQMIYPYTA

SEQ ID NO: 225778 - protein, 15 aa, Artificial Sequence
  Description of Artificial Sequence: Synthetic peptide
  Seed: LRMKWMMAMKYPITA
LRMKFMMQMKYPATA

SEQ ID NO: 225779 - protein, 15 aa, Artificial Sequence
  Description of Artificial Sequence: Synthetic peptide
  Seed: LRMKWMMAMKYPITA
LRMKFMMQMKYPCTA

SEQ ID NO: 225780 - protein, 15 aa, Artificial Sequence
  Description of Artificial Sequence: Synthetic peptide
  Seed: LRMKWMMAMKYPITA
LRMKFMMQMKYPFTA

SEQ ID NO: 225781 - protein, 15 aa, Artificial Sequence
  Description of Artificial Sequence: Synthetic peptide
  Seed: LRMKWMMAMKYPITA
LRMKFMMQMKYPGTA

SEQ ID NO: 225782 - protein, 15 aa, Artificial Sequence
  Description of Artificial Sequence: Synthetic peptide
  Seed: LRMKWMMAMKYPITA
LRMKFMMQMKYPHTA

SEQ ID NO: 225783 - protein, 15 aa, Artificial Sequence
  Description of Artificial Sequence: Synthetic peptide
  Seed: LRMKWMMAMKYPITA
LRMKFMMQMKYPITA

SEQ ID NO: 225784 - protein, 15 aa, Artificial Sequence
  Description of Artificial Sequence: Synthetic peptide
  Seed: LRMKWMMAMKYPITA
LRMKFMMQMKYPKTA

SEQ ID NO: 225785 - protein, 15 aa, Artificial Sequence
  Description of Artificial Sequence: Synthetic peptide
  Seed: LRMKWMMAMKYPITA
LRMKFMMQMKYPLTA

SEQ ID NO: 225786 - protein, 15 aa, Artificial Sequence
  Description of Artificial Sequence: Synthetic peptide
  Seed: LRMKWMMAMKYPITA
LRMKFMMQMKYPMTA

SEQ ID NO: 225787 - protein, 15 aa, Artificial Sequence
  Description of Artificial Sequence: Synthetic peptide
  Seed: LRMKWMMAMKYPITA
LRMKFMMQMKYPNTA

SEQ ID NO: 225788 - protein, 15 aa, Artificial Sequence
  Description of Artificial Sequence: Synthetic peptide
  Seed: LRMKWMMAMKYPITA
LRMKFMMQMKYPPTA

SEQ ID NO: 225789 - protein, 15 aa, Artificial Sequence
  Description of Artificial Sequence: Synthetic peptide
  Seed: LRMKWMMAMKYPITA
LRMKFMMQMKYPQTA

SEQ ID NO: 225790 - protein, 15 aa, Artificial Sequence
  Description of Artificial Sequence: Synthetic peptide
  Seed: LRMKWMMAMKYPITA
LRMKFMMQMKYPRTA

SEQ ID NO: 225791 - protein, 15 aa, Artificial Sequence
  Description of Artificial Sequence: Synthetic peptide
  Seed: LRMKWMMAMKYPITA
LRMKFMMQMKYPSTA

SEQ ID NO: 225792 - protein, 15 aa, Artificial Sequence
  Description of Artificial Sequence: Synthetic peptide
  Seed: LRMKWMMAMKYPITA
LRMKFMMQMKYPTTA

SEQ ID NO: 225793 - protein, 15 aa, Artificial Sequence
  Description of Artificial Sequence: Synthetic peptide
  Seed: LRMKWMMAMKYPITA
LRMKFMMQMKYPVTA

SEQ ID NO: 225794 - protein, 15 aa, Artificial Sequence
  Description of Artificial Sequence: Synthetic peptide
  Seed: LRMKWMMAMKYPITA
LRMKFMMQMKYPWTA

SEQ ID NO: 225795 - protein, 15 aa, Artificial Sequence
  Description of Artificial Sequence: Synthetic peptide
  Seed: LRMKWMMAMKYPITA
LRMKFMMQMKYPYTA

SEQ ID NO: 225796 - protein, 15 aa, Artificial Sequence
  Description of Artificial Sequence: Synthetic peptide
  Seed: LRMKWMMAMKYPITA
LRMKFMMQMLYPATA

SEQ ID NO: 225797 - protein, 15 aa, Artificial Sequence
  Description of Artificial Sequence: Synthetic peptide
  Seed: LRMKWMMAMKYPITA
LRMKFMMQMLYPCTA

SEQ ID NO: 225798 - protein, 15 aa, Artificial Sequence
  Description of Artificial Sequence: Synthetic peptide
  Seed: LRMKWMMAMKYPITA
LRMKFMMQMLYPDTA

SEQ ID NO: 225799 - protein, 15 aa, Artificial Sequence
  Description of Artificial Sequence: Synthetic peptide
  Seed: LRMKWMMAMKYPITA
LRMKFMMQMLYPGTA

SEQ ID NO: 225800 - protein, 15 aa, Artificial Sequence
  Description of Artificial Sequence: Synthetic peptide
  Seed: LRMKWMMAMKYPITA
LRMKFMMQMLYPITA

SEQ ID NO: 225801 - protein, 15 aa, Artificial Sequence
  Description of Artificial Sequence: Synthetic peptide
  Seed: LRMKWMMAMKYPITA
LRMKFMMQMLYPLTA

SEQ ID NO: 225802 - protein, 15 aa, Artificial Sequence
  Description of Artificial Sequence: Synthetic peptide
  Seed: LRMKWMMAMKYPITA
LRMKFMMQMLYPMTA

SEQ ID NO: 225803 - protein, 15 aa, Artificial Sequence
  Description of Artificial Sequence: Synthetic peptide
  Seed: LRMKWMMAMKYPITA
LRMKFMMQMLYPNTA

SEQ ID NO: 225804 - protein, 15 aa, Artificial Sequence
  Description of Artificial Sequence: Synthetic peptide
  Seed: LRMKWMMAMKYPITA
LRMKFMMQMLYPSTA

SEQ ID NO: 225805 - protein, 15 aa, Artificial Sequence
  Description of Artificial Sequence: Synthetic peptide
  Seed: LRMKWMMAMKYPITA
LRMKFMMQMLYPTTA

SEQ ID NO: 225806 - protein, 15 aa, Artificial Sequence
  Description of Artificial Sequence: Synthetic peptide
  Seed: LRMKWMMAMKYPITA
LRMKFMMQMLYPVTA

SEQ ID NO: 225807 - protein, 15 aa, Artificial Sequence
  Description of Artificial Sequence: Synthetic peptide
  Seed: LRMKWMMAMKYPITA
LRMKFMMQMMYPATA

SEQ ID NO: 225808 - protein, 15 aa, Artificial Sequence
  Description of Artificial Sequence: Synthetic peptide
  Seed: LRMKWMMAMKYPITA
LRMKFMMQMMYPCTA

SEQ ID NO: 225809 - protein, 15 aa, Artificial Sequence
  Description of Artificial Sequence: Synthetic peptide
  Seed: LRMKWMMAMKYPITA
LRMKFMMQMMYPDTA

SEQ ID NO: 225810 - protein, 15 aa, Artificial Sequence
  Description of Artificial Sequence: Synthetic peptide
  Seed: LRMKWMMAMKYPITA
LRMKFMMQMMYPGTA

SEQ ID NO: 225811 - protein, 15 aa, Artificial Sequence
  Description of Artificial Sequence: Synthetic peptide
  Seed: LRMKWMMAMKYPITA
LRMKFMMQMMYPITA

SEQ ID NO: 225812 - protein, 15 aa, Artificial Sequence
  Description of Artificial Sequence: Synthetic peptide
  Seed: LRMKWMMAMKYPITA
LRMKFMMQMMYPLTA

SEQ ID NO: 225813 - protein, 15 aa, Artificial Sequence
  Description of Artificial Sequence: Synthetic peptide
  Seed: LRMKWMMAMKYPITA
LRMKFMMQMMYPMTA

SEQ ID NO: 225814 - protein, 15 aa, Artificial Sequence
  Description of Artificial Sequence: Synthetic peptide
  Seed: LRMKWMMAMKYPITA
LRMKFMMQMMYPNTA

SEQ ID NO: 225815 - protein, 15 aa, Artificial Sequence
  Description of Artificial Sequence: Synthetic peptide
  Seed: LRMKWMMAMKYPITA
LRMKFMMQMMYPSTA

SEQ ID NO: 225816 - protein, 15 aa, Artificial Sequence
  Description of Artificial Sequence: Synthetic peptide
  Seed: LRMKWMMAMKYPITA
LRMKFMMQMMYPTTA

SEQ ID NO: 225817 - protein, 15 aa, Artificial Sequence
  Description of Artificial Sequence: Synthetic peptide
  Seed: LRMKWMMAMKYPITA
LRMKFMMQMMYPVTA

SEQ ID NO: 225818 - protein, 15 aa, Artificial Sequence
  Description of Artificial Sequence: Synthetic peptide
  Seed: LRMKWMMAMKYPITA
LRMKFMMQMNYPATA

SEQ ID NO: 225819 - protein, 15 aa, Artificial Sequence
  Description of Artificial Sequence: Synthetic peptide
  Seed: LRMKWMMAMKYPITA
LRMKFMMQMNYPCTA

SEQ ID NO: 225820 - protein, 15 aa, Artificial Sequence
  Description of Artificial Sequence: Synthetic peptide
  Seed: LRMKWMMAMKYPITA
LRMKFMMQMNYPDTA

SEQ ID NO: 225821 - protein, 15 aa, Artificial Sequence
  Description of Artificial Sequence: Synthetic peptide
  Seed: LRMKWMMAMKYPITA
LRMKFMMQMNYPETA

SEQ ID NO: 225822 - protein, 15 aa, Artificial Sequence
  Description of Artificial Sequence: Synthetic peptide
  Seed: LRMKWMMAMKYPITA
LRMKFMMQMNYPFTA

SEQ ID NO: 225823 - protein, 15 aa, Artificial Sequence
  Description of Artificial Sequence: Synthetic peptide
  Seed: LRMKWMMAMKYPITA
LRMKFMMQMNYPGTA

SEQ ID NO: 225824 - protein, 15 aa, Artificial Sequence
  Description of Artificial Sequence: Synthetic peptide
  Seed: LRMKWMMAMKYPITA
LRMKFMMQMNYPHTA

SEQ ID NO: 225825 - protein, 15 aa, Artificial Sequence
  Description of Artificial Sequence: Synthetic peptide
  Seed: LRMKWMMAMKYPITA
LRMKFMMQMNYPITA

SEQ ID NO: 225826 - protein, 15 aa, Artificial Sequence
  Description of Artificial Sequence: Synthetic peptide
  Seed: LRMKWMMAMKYPITA
LRMKFMMQMNYPKTA

SEQ ID NO: 225827 - protein, 15 aa, Artificial Sequence
  Description of Artificial Sequence: Synthetic peptide
  Seed: LRMKWMMAMKYPITA
LRMKFMMQMNYPLTA

SEQ ID NO: 225828 - protein, 15 aa, Artificial Sequence
  Description of Artificial Sequence: Synthetic peptide
  Seed: LRMKWMMAMKYPITA
LRMKFMMQMNYPMTA

SEQ ID NO: 225829 - protein, 15 aa, Artificial Sequence
  Description of Artificial Sequence: Synthetic peptide
  Seed: LRMKWMMAMKYPITA
LRMKFMMQMNYPNTA

SEQ ID NO: 225830 - protein, 15 aa, Artificial Sequence
  Description of Artificial Sequence: Synthetic peptide
  Seed: LRMKWMMAMKYPITA
LRMKFMMQMNYPPTA

SEQ ID NO: 225831 - protein, 15 aa, Artificial Sequence
  Description of Artificial Sequence: Synthetic peptide
  Seed: LRMKWMMAMKYPITA
LRMKFMMQMNYPQTA

SEQ ID NO: 225832 - protein, 15 aa, Artificial Sequence
  Description of Artificial Sequence: Synthetic peptide
  Seed: LRMKWMMAMKYPITA
LRMKFMMQMNYPRTA

SEQ ID NO: 225833 - protein, 15 aa, Artificial Sequence
  Description of Artificial Sequence: Synthetic peptide
  Seed: LRMKWMMAMKYPITA
LRMKFMMQMNYPSTA

SEQ ID NO: 225834 - protein, 15 aa, Artificial Sequence
  Description of Artificial Sequence: Synthetic peptide
  Seed: LRMKWMMAMKYPITA
LRMKFMMQMNYPTTA

SEQ ID NO: 225835 - protein, 15 aa, Artificial Sequence
  Description of Artificial Sequence: Synthetic peptide
  Seed: LRMKWMMAMKYPITA
LRMKFMMQMNYPVTA

SEQ ID NO: 225836 - protein, 15 aa, Artificial Sequence
  Description of Artificial Sequence: Synthetic peptide
  Seed: LRMKWMMAMKYPITA
LRMKFMMQMNYPWTA

SEQ ID NO: 225837 - protein, 15 aa, Artificial Sequence
  Description of Artificial Sequence: Synthetic peptide
  Seed: LRMKWMMAMKYPITA
LRMKFMMQMNYPYTA

SEQ ID NO: 225838 - protein, 15 aa, Artificial Sequence
  Description of Artificial Sequence: Synthetic peptide
  Seed: LRMKWMMAMKYPITA
LRMKFMMQMPYPATA

SEQ ID NO: 225839 - protein, 15 aa, Artificial Sequence
  Description of Artificial Sequence: Synthetic peptide
  Seed: LRMKWMMAMKYPITA
LRMKFMMQMPYPCTA

SEQ ID NO: 225840 - protein, 15 aa, Artificial Sequence
  Description of Artificial Sequence: Synthetic peptide
  Seed: LRMKWMMAMKYPITA
LRMKFMMQMPYPDTA

SEQ ID NO: 225841 - protein, 15 aa, Artificial Sequence
  Description of Artificial Sequence: Synthetic peptide
  Seed: LRMKWMMAMKYPITA
LRMKFMMQMPYPETA

SEQ ID NO: 225842 - protein, 15 aa, Artificial Sequence
  Description of Artificial Sequence: Synthetic peptide
  Seed: LRMKWMMAMKYPITA
LRMKFMMQMPYPFTA

SEQ ID NO: 225843 - protein, 15 aa, Artificial Sequence
  Description of Artificial Sequence: Synthetic peptide
  Seed: LRMKWMMAMKYPITA
LRMKFMMQMPYPGTA

SEQ ID NO: 225844 - protein, 15 aa, Artificial Sequence
  Description of Artificial Sequence: Synthetic peptide
  Seed: LRMKWMMAMKYPITA
LRMKFMMQMPYPHTA

SEQ ID NO: 225845 - protein, 15 aa, Artificial Sequence
  Description of Artificial Sequence: Synthetic peptide
  Seed: LRMKWMMAMKYPITA
LRMKFMMQMPYPITA

SEQ ID NO: 225846 - protein, 15 aa, Artificial Sequence
  Description of Artificial Sequence: Synthetic peptide
  Seed: LRMKWMMAMKYPITA
LRMKFMMQMPYPKTA

SEQ ID NO: 225847 - protein, 15 aa, Artificial Sequence
  Description of Artificial Sequence: Synthetic peptide
  Seed: LRMKWMMAMKYPITA
LRMKFMMQMPYPLTA

SEQ ID NO: 225848 - protein, 15 aa, Artificial Sequence
  Description of Artificial Sequence: Synthetic peptide
  Seed: LRMKWMMAMKYPITA
LRMKFMMQMPYPMTA

SEQ ID NO: 225849 - protein, 15 aa, Artificial Sequence
  Description of Artificial Sequence: Synthetic peptide
  Seed: LRMKWMMAMKYPITA
LRMKFMMQMPYPNTA

SEQ ID NO: 225850 - protein, 15 aa, Artificial Sequence
  Description of Artificial Sequence: Synthetic peptide
  Seed: LRMKWMMAMKYPITA
LRMKFMMQMPYPPTA

SEQ ID NO: 225851 - protein, 15 aa, Artificial Sequence
  Description of Artificial Sequence: Synthetic peptide
  Seed: LRMKWMMAMKYPITA
LRMKFMMQMPYPQTA

SEQ ID NO: 225852 - protein, 15 aa, Artificial Sequence
  Description of Artificial Sequence: Synthetic peptide
  Seed: LRMKWMMAMKYPITA
LRMKFMMQMPYPRTA

SEQ ID NO: 225853 - protein, 15 aa, Artificial Sequence
  Description of Artificial Sequence: Synthetic peptide
  Seed: LRMKWMMAMKYPITA
LRMKFMMQMPYPSTA

SEQ ID NO: 225854 - protein, 15 aa, Artificial Sequence
  Description of Artificial Sequence: Synthetic peptide
  Seed: LRMKWMMAMKYPITA
LRMKFMMQMPYPTTA

SEQ ID NO: 225855 - protein, 15 aa, Artificial Sequence
  Description of Artificial Sequence: Synthetic peptide
  Seed: LRMKWMMAMKYPITA
LRMKFMMQMPYPVTA

SEQ ID NO: 225856 - protein, 15 aa, Artificial Sequence
  Description of Artificial Sequence: Synthetic peptide
  Seed: LRMKWMMAMKYPITA
LRMKFMMQMPYPWTA

SEQ ID NO: 225857 - protein, 15 aa, Artificial Sequence
  Description of Artificial Sequence: Synthetic peptide
  Seed: LRMKWMMAMKYPITA
LRMKFMMQMPYPYTA

SEQ ID NO: 225858 - protein, 15 aa, Artificial Sequence
  Description of Artificial Sequence: Synthetic peptide
  Seed: LRMKWMMAMKYPITA
LRMKFMMQMQYPATA

SEQ ID NO: 225859 - protein, 15 aa, Artificial Sequence
  Description of Artificial Sequence: Synthetic peptide
  Seed: LRMKWMMAMKYPITA
LRMKFMMQMQYPCTA

SEQ ID NO: 225860 - protein, 15 aa, Artificial Sequence
  Description of Artificial Sequence: Synthetic peptide
  Seed: LRMKWMMAMKYPITA
LRMKFMMQMQYPFTA

SEQ ID NO: 225861 - protein, 15 aa, Artificial Sequence
  Description of Artificial Sequence: Synthetic peptide
  Seed: LRMKWMMAMKYPITA
LRMKFMMQMQYPGTA

SEQ ID NO: 225862 - protein, 15 aa, Artificial Sequence
  Description of Artificial Sequence: Synthetic peptide
  Seed: LRMKWMMAMKYPITA
LRMKFMMQMQYPITA

SEQ ID NO: 225863 - protein, 15 aa, Artificial Sequence
  Description of Artificial Sequence: Synthetic peptide
  Seed: LRMKWMMAMKYPITA
LRMKFMMQMQYPLTA

SEQ ID NO: 225864 - protein, 15 aa, Artificial Sequence
  Description of Artificial Sequence: Synthetic peptide
  Seed: LRMKWMMAMKYPITA
LRMKFMMQMQYPMTA

SEQ ID NO: 225865 - protein, 15 aa, Artificial Sequence
  Description of Artificial Sequence: Synthetic peptide
  Seed: LRMKWMMAMKYPITA
LRMKFMMQMQYPNTA

SEQ ID NO: 225866 - protein, 15 aa, Artificial Sequence
  Description of Artificial Sequence: Synthetic peptide
  Seed: LRMKWMMAMKYPITA
LRMKFMMQMQYPSTA

SEQ ID NO: 225867 - protein, 15 aa, Artificial Sequence
  Description of Artificial Sequence: Synthetic peptide
  Seed: LRMKWMMAMKYPITA
LRMKFMMQMQYPTTA

SEQ ID NO: 225868 - protein, 15 aa, Artificial Sequence
  Description of Artificial Sequence: Synthetic peptide
  Seed: LRMKWMMAMKYPITA
LRMKFMMQMQYPVTA

SEQ ID NO: 225869 - protein, 15 aa, Artificial Sequence
  Description of Artificial Sequence: Synthetic peptide
  Seed: LRMKWMMAMKYPITA
LRMKFMMQMRYPATA

SEQ ID NO: 225870 - protein, 15 aa, Artificial Sequence
  Description of Artificial Sequence: Synthetic peptide
  Seed: LRMKWMMAMKYPITA
LRMKFMMQMRYPCTA

SEQ ID NO: 225871 - protein, 15 aa, Artificial Sequence
  Description of Artificial Sequence: Synthetic peptide
  Seed: LRMKWMMAMKYPITA
LRMKFMMQMRYPETA

SEQ ID NO: 225872 - protein, 15 aa, Artificial Sequence
  Description of Artificial Sequence: Synthetic peptide
  Seed: LRMKWMMAMKYPITA
LRMKFMMQMRYPFTA

SEQ ID NO: 225873 - protein, 15 aa, Artificial Sequence
  Description of Artificial Sequence: Synthetic peptide
  Seed: LRMKWMMAMKYPITA
LRMKFMMQMRYPGTA

SEQ ID NO: 225874 - protein, 15 aa, Artificial Sequence
  Description of Artificial Sequence: Synthetic peptide
  Seed: LRMKWMMAMKYPITA
LRMKFMMQMRYPHTA

SEQ ID NO: 225875 - protein, 15 aa, Artificial Sequence
  Description of Artificial Sequence: Synthetic peptide
  Seed: LRMKWMMAMKYPITA
LRMKFMMQMRYPITA

SEQ ID NO: 225876 - protein, 15 aa, Artificial Sequence
  Description of Artificial Sequence: Synthetic peptide
  Seed: LRMKWMMAMKYPITA
LRMKFMMQMRYPKTA

SEQ ID NO: 225877 - protein, 15 aa, Artificial Sequence
  Description of Artificial Sequence: Synthetic peptide
  Seed: LRMKWMMAMKYPITA
LRMKFMMQMRYPLTA

SEQ ID NO: 225878 - protein, 15 aa, Artificial Sequence
  Description of Artificial Sequence: Synthetic peptide
  Seed: LRMKWMMAMKYPITA
LRMKFMMQMRYPMTA

SEQ ID NO: 225879 - protein, 15 aa, Artificial Sequence
  Description of Artificial Sequence: Synthetic peptide
  Seed: LRMKWMMAMKYPITA
LRMKFMMQMRYPNTA

SEQ ID NO: 225880 - protein, 15 aa, Artificial Sequence
  Description of Artificial Sequence: Synthetic peptide
  Seed: LRMKWMMAMKYPITA
LRMKFMMQMRYPPTA

SEQ ID NO: 225881 - protein, 15 aa, Artificial Sequence
  Description of Artificial Sequence: Synthetic peptide
  Seed: LRMKWMMAMKYPITA
LRMKFMMQMRYPQTA

SEQ ID NO: 225882 - protein, 15 aa, Artificial Sequence
  Description of Artificial Sequence: Synthetic peptide
  Seed: LRMKWMMAMKYPITA
LRMKFMMQMRYPRTA

SEQ ID NO: 225883 - protein, 15 aa, Artificial Sequence
  Description of Artificial Sequence: Synthetic peptide
  Seed: LRMKWMMAMKYPITA
LRMKFMMQMRYPSTA

SEQ ID NO: 225884 - protein, 15 aa, Artificial Sequence
  Description of Artificial Sequence: Synthetic peptide
  Seed: LRMKWMMAMKYPITA
LRMKFMMQMRYPTTA

SEQ ID NO: 225885 - protein, 15 aa, Artificial Sequence
  Description of Artificial Sequence: Synthetic peptide
  Seed: LRMKWMMAMKYPITA
LRMKFMMQMRYPVTA

SEQ ID NO: 225886 - protein, 15 aa, Artificial Sequence
  Description of Artificial Sequence: Synthetic peptide
  Seed: LRMKWMMAMKYPITA
LRMKFMMQMRYPWTA

SEQ ID NO: 225887 - protein, 15 aa, Artificial Sequence
  Description of Artificial Sequence: Synthetic peptide
  Seed: LRMKWMMAMKYPITA
LRMKFMMQMRYPYTA

SEQ ID NO: 225888 - protein, 15 aa, Artificial Sequence
  Description of Artificial Sequence: Synthetic peptide
  Seed: LRMKWMMAMKYPITA
LRMKFMMQMSYPATA

SEQ ID NO: 225889 - protein, 15 aa, Artificial Sequence
  Description of Artificial Sequence: Synthetic peptide
  Seed: LRMKWMMAMKYPITA
LRMKFMMQMSYPCTA

SEQ ID NO: 225890 - protein, 15 aa, Artificial Sequence
  Description of Artificial Sequence: Synthetic peptide
  Seed: LRMKWMMAMKYPITA
LRMKFMMQMSYPDTA

SEQ ID NO: 225891 - protein, 15 aa, Artificial Sequence
  Description of Artificial Sequence: Synthetic peptide
  Seed: LRMKWMMAMKYPITA
LRMKFMMQMSYPETA

SEQ ID NO: 225892 - protein, 15 aa, Artificial Sequence
  Description of Artificial Sequence: Synthetic peptide
  Seed: LRMKWMMAMKYPITA
LRMKFMMQMSYPFTA

SEQ ID NO: 225893 - protein, 15 aa, Artificial Sequence
  Description of Artificial Sequence: Synthetic peptide
  Seed: LRMKWMMAMKYPITA
LRMKFMMQMSYPGTA

SEQ ID NO: 225894 - protein, 15 aa, Artificial Sequence
  Description of Artificial Sequence: Synthetic peptide
  Seed: LRMKWMMAMKYPITA
LRMKFMMQMSYPHTA

SEQ ID NO: 225895 - protein, 15 aa, Artificial Sequence
  Description of Artificial Sequence: Synthetic peptide
  Seed: LRMKWMMAMKYPITA
LRMKFMMQMSYPITA

SEQ ID NO: 225896 - protein, 15 aa, Artificial Sequence
  Description of Artificial Sequence: Synthetic peptide
  Seed: LRMKWMMAMKYPITA
LRMKFMMQMSYPKTA

SEQ ID NO: 225897 - protein, 15 aa, Artificial Sequence
  Description of Artificial Sequence: Synthetic peptide
  Seed: LRMKWMMAMKYPITA
LRMKFMMQMSYPLTA

SEQ ID NO: 225898 - protein, 15 aa, Artificial Sequence
  Description of Artificial Sequence: Synthetic peptide
  Seed: LRMKWMMAMKYPITA
LRMKFMMQMSYPMTA

SEQ ID NO: 225899 - protein, 15 aa, Artificial Sequence
  Description of Artificial Sequence: Synthetic peptide
  Seed: LRMKWMMAMKYPITA
LRMKFMMQMSYPNTA

SEQ ID NO: 225900 - protein, 15 aa, Artificial Sequence
  Description of Artificial Sequence: Synthetic peptide
  Seed: LRMKWMMAMKYPITA
LRMKFMMQMSYPPTA

SEQ ID NO: 225901 - protein, 15 aa, Artificial Sequence
  Description of Artificial Sequence: Synthetic peptide
  Seed: LRMKWMMAMKYPITA
LRMKFMMQMSYPQTA

SEQ ID NO: 225902 - protein, 15 aa, Artificial Sequence
  Description of Artificial Sequence: Synthetic peptide
  Seed: LRMKWMMAMKYPITA
LRMKFMMQMSYPRTA

SEQ ID NO: 225903 - protein, 15 aa, Artificial Sequence
  Description of Artificial Sequence: Synthetic peptide
  Seed: LRMKWMMAMKYPITA
LRMKFMMQMSYPSTA

SEQ ID NO: 225904 - protein, 15 aa, Artificial Sequence
  Description of Artificial Sequence: Synthetic peptide
  Seed: LRMKWMMAMKYPITA
LRMKFMMQMSYPTTA

SEQ ID NO: 225905 - protein, 15 aa, Artificial Sequence
  Description of Artificial Sequence: Synthetic peptide
  Seed: LRMKWMMAMKYPITA
LRMKFMMQMSYPVTA

SEQ ID NO: 225906 - protein, 15 aa, Artificial Sequence
  Description of Artificial Sequence: Synthetic peptide
  Seed: LRMKWMMAMKYPITA
LRMKFMMQMSYPWTA

SEQ ID NO: 225907 - protein, 15 aa, Artificial Sequence
  Description of Artificial Sequence: Synthetic peptide
  Seed: LRMKWMMAMKYPITA
LRMKFMMQMSYPYTA

SEQ ID NO: 225908 - protein, 15 aa, Artificial Sequence
  Description of Artificial Sequence: Synthetic peptide
  Seed: LRMKWMMAMKYPITA
LRMKFMMQMTYPATA

SEQ ID NO: 225909 - protein, 15 aa, Artificial Sequence
  Description of Artificial Sequence: Synthetic peptide
  Seed: LRMKWMMAMKYPITA
LRMKFMMQMTYPCTA

SEQ ID NO: 225910 - protein, 15 aa, Artificial Sequence
  Description of Artificial Sequence: Synthetic peptide
  Seed: LRMKWMMAMKYPITA
LRMKFMMQMTYPDTA

SEQ ID NO: 225911 - protein, 15 aa, Artificial Sequence
  Description of Artificial Sequence: Synthetic peptide
  Seed: LRMKWMMAMKYPITA
LRMKFMMQMTYPETA

SEQ ID NO: 225912 - protein, 15 aa, Artificial Sequence
  Description of Artificial Sequence: Synthetic peptide
  Seed: LRMKWMMAMKYPITA
LRMKFMMQMTYPFTA

SEQ ID NO: 225913 - protein, 15 aa, Artificial Sequence
  Description of Artificial Sequence: Synthetic peptide
  Seed: LRMKWMMAMKYPITA
LRMKFMMQMTYPGTA

SEQ ID NO: 225914 - protein, 15 aa, Artificial Sequence
  Description of Artificial Sequence: Synthetic peptide
  Seed: LRMKWMMAMKYPITA
LRMKFMMQMTYPHTA

SEQ ID NO: 225915 - protein, 15 aa, Artificial Sequence
  Description of Artificial Sequence: Synthetic peptide
  Seed: LRMKWMMAMKYPITA
LRMKFMMQMTYPITA

SEQ ID NO: 225916 - protein, 15 aa, Artificial Sequence
  Description of Artificial Sequence: Synthetic peptide
  Seed: LRMKWMMAMKYPITA
LRMKFMMQMTYPKTA

SEQ ID NO: 225917 - protein, 15 aa, Artificial Sequence
  Description of Artificial Sequence: Synthetic peptide
  Seed: LRMKWMMAMKYPITA
LRMKFMMQMTYPLTA

SEQ ID NO: 225918 - protein, 15 aa, Artificial Sequence
  Description of Artificial Sequence: Synthetic peptide
  Seed: LRMKWMMAMKYPITA
LRMKFMMQMTYPMTA

SEQ ID NO: 225919 - protein, 15 aa, Artificial Sequence
  Description of Artificial Sequence: Synthetic peptide
  Seed: LRMKWMMAMKYPITA
LRMKFMMQMTYPNTA

SEQ ID NO: 225920 - protein, 15 aa, Artificial Sequence
  Description of Artificial Sequence: Synthetic peptide
  Seed: LRMKWMMAMKYPITA
LRMKFMMQMTYPPTA

SEQ ID NO: 225921 - protein, 15 aa, Artificial Sequence
  Description of Artificial Sequence: Synthetic peptide
  Seed: LRMKWMMAMKYPITA
LRMKFMMQMTYPQTA

SEQ ID NO: 225922 - protein, 15 aa, Artificial Sequence
  Description of Artificial Sequence: Synthetic peptide
  Seed: LRMKWMMAMKYPITA
LRMKFMMQMTYPRTA

SEQ ID NO: 225923 - protein, 15 aa, Artificial Sequence
  Description of Artificial Sequence: Synthetic peptide
  Seed: LRMKWMMAMKYPITA
LRMKFMMQMTYPSTA

SEQ ID NO: 225924 - protein, 15 aa, Artificial Sequence
  Description of Artificial Sequence: Synthetic peptide
  Seed: LRMKWMMAMKYPITA
LRMKFMMQMTYPTTA

SEQ ID NO: 225925 - protein, 15 aa, Artificial Sequence
  Description of Artificial Sequence: Synthetic peptide
  Seed: LRMKWMMAMKYPITA
LRMKFMMQMTYPVTA

SEQ ID NO: 225926 - protein, 15 aa, Artificial Sequence
  Description of Artificial Sequence: Synthetic peptide
  Seed: LRMKWMMAMKYPITA
LRMKFMMQMTYPWTA

SEQ ID NO: 225927 - protein, 15 aa, Artificial Sequence
  Description of Artificial Sequence: Synthetic peptide
  Seed: LRMKWMMAMKYPITA
LRMKFMMQMTYPYTA

SEQ ID NO: 225928 - protein, 15 aa, Artificial Sequence
  Description of Artificial Sequence: Synthetic peptide
  Seed: LRMKWMMAMKYPITA
LRMKFMMQMVYPATA

SEQ ID NO: 225929 - protein, 15 aa, Artificial Sequence
  Description of Artificial Sequence: Synthetic peptide
  Seed: LRMKWMMAMKYPITA
LRMKFMMQMVYPCTA

SEQ ID NO: 225930 - protein, 15 aa, Artificial Sequence
  Description of Artificial Sequence: Synthetic peptide
  Seed: LRMKWMMAMKYPITA
LRMKFMMQMVYPDTA

SEQ ID NO: 225931 - protein, 15 aa, Artificial Sequence
  Description of Artificial Sequence: Synthetic peptide
  Seed: LRMKWMMAMKYPITA
LRMKFMMQMVYPETA

SEQ ID NO: 225932 - protein, 15 aa, Artificial Sequence
  Description of Artificial Sequence: Synthetic peptide
  Seed: LRMKWMMAMKYPITA
LRMKFMMQMVYPFTA

SEQ ID NO: 225933 - protein, 15 aa, Artificial Sequence
  Description of Artificial Sequence: Synthetic peptide
  Seed: LRMKWMMAMKYPITA
LRMKFMMQMVYPGTA

SEQ ID NO: 225934 - protein, 15 aa, Artificial Sequence
  Description of Artificial Sequence: Synthetic peptide
  Seed: LRMKWMMAMKYPITA
LRMKFMMQMVYPHTA

SEQ ID NO: 225935 - protein, 15 aa, Artificial Sequence
  Description of Artificial Sequence: Synthetic peptide
  Seed: LRMKWMMAMKYPITA
LRMKFMMQMVYPITA

SEQ ID NO: 225936 - protein, 15 aa, Artificial Sequence
  Description of Artificial Sequence: Synthetic peptide
  Seed: LRMKWMMAMKYPITA
LRMKFMMQMVYPKTA

SEQ ID NO: 225937 - protein, 15 aa, Artificial Sequence
  Description of Artificial Sequence: Synthetic peptide
  Seed: LRMKWMMAMKYPITA
LRMKFMMQMVYPLTA

SEQ ID NO: 225938 - protein, 15 aa, Artificial Sequence
  Description of Artificial Sequence: Synthetic peptide
  Seed: LRMKWMMAMKYPITA
LRMKFMMQMVYPMTA

SEQ ID NO: 225939 - protein, 15 aa, Artificial Sequence
  Description of Artificial Sequence: Synthetic peptide
  Seed: LRMKWMMAMKYPITA
LRMKFMMQMVYPNTA

SEQ ID NO: 225940 - protein, 15 aa, Artificial Sequence
  Description of Artificial Sequence: Synthetic peptide
  Seed: LRMKWMMAMKYPITA
LRMKFMMQMVYPPTA

SEQ ID NO: 225941 - protein, 15 aa, Artificial Sequence
  Description of Artificial Sequence: Synthetic peptide
  Seed: LRMKWMMAMKYPITA
LRMKFMMQMVYPQTA

SEQ ID NO: 225942 - protein, 15 aa, Artificial Sequence
  Description of Artificial Sequence: Synthetic peptide
  Seed: LRMKWMMAMKYPITA
LRMKFMMQMVYPRTA

SEQ ID NO: 225943 - protein, 15 aa, Artificial Sequence
  Description of Artificial Sequence: Synthetic peptide
  Seed: LRMKWMMAMKYPITA
LRMKFMMQMVYPSTA

SEQ ID NO: 225944 - protein, 15 aa, Artificial Sequence
  Description of Artificial Sequence: Synthetic peptide
  Seed: LRMKWMMAMKYPITA
LRMKFMMQMVYPTTA

SEQ ID NO: 225945 - protein, 15 aa, Artificial Sequence
  Description of Artificial Sequence: Synthetic peptide
  Seed: LRMKWMMAMKYPITA
LRMKFMMQMVYPVTA

SEQ ID NO: 225946 - protein, 15 aa, Artificial Sequence
  Description of Artificial Sequence: Synthetic peptide
  Seed: LRMKWMMAMKYPITA
LRMKFMMQMVYPWTA

SEQ ID NO: 225947 - protein, 15 aa, Artificial Sequence
  Description of Artificial Sequence: Synthetic peptide
  Seed: LRMKWMMAMKYPITA
LRMKFMMQMVYPYTA

SEQ ID NO: 225948 - protein, 15 aa, Artificial Sequence
  Description of Artificial Sequence: Synthetic peptide
  Seed: LRMKWMMAMKYPITA
LRMKFMMQMWYPATA

SEQ ID NO: 225949 - protein, 15 aa, Artificial Sequence
  Description of Artificial Sequence: Synthetic peptide
  Seed: LRMKWMMAMKYPITA
LRMKFMMQMWYPITA

SEQ ID NO: 225950 - protein, 15 aa, Artificial Sequence
  Description of Artificial Sequence: Synthetic peptide
  Seed: LRMKWMMAMKYPITA
LRMKFMMQMWYPLTA

SEQ ID NO: 225951 - protein, 15 aa, Artificial Sequence
  Description of Artificial Sequence: Synthetic peptide
  Seed: LRMKWMMAMKYPITA
LRMKFMMQMWYPMTA

SEQ ID NO: 225952 - protein, 15 aa, Artificial Sequence
  Description of Artificial Sequence: Synthetic peptide
  Seed: LRMKWMMAMKYPITA
LRMKFMMQMWYPSTA

SEQ ID NO: 225953 - protein, 15 aa, Artificial Sequence
  Description of Artificial Sequence: Synthetic peptide
  Seed: LRMKWMMAMKYPITA
LRMKFMMQMWYPVTA

SEQ ID NO: 225954 - protein, 15 aa, Artificial Sequence
  Description of Artificial Sequence: Synthetic peptide
  Seed: LRMKWMMAMKYPITA
LRMKFMMQMYYPATA

SEQ ID NO: 225955 - protein, 15 aa, Artificial Sequence
  Description of Artificial Sequence: Synthetic peptide
  Seed: LRMKWMMAMKYPITA
LRMKFMMQMYYPITA

SEQ ID NO: 225956 - protein, 15 aa, Artificial Sequence
  Description of Artificial Sequence: Synthetic peptide
  Seed: LRMKWMMAMKYPITA
LRMKFMMQMYYPLTA

SEQ ID NO: 225957 - protein, 15 aa, Artificial Sequence
  Description of Artificial Sequence: Synthetic peptide
  Seed: LRMKWMMAMKYPITA
LRMKFMMQMYYPSTA

SEQ ID NO: 225958 - protein, 15 aa, Artificial Sequence
  Description of Artificial Sequence: Synthetic peptide
  Seed: LRMKWMMAMKYPITA
LRMKFMMQMYYPVTA

SEQ ID NO: 225959 - protein, 15 aa, Artificial Sequence
  Description of Artificial Sequence: Synthetic peptide
  Seed: LRMKWMMAMKYPITA
LRMKFMMRMAYPATA

SEQ ID NO: 225960 - protein, 15 aa, Artificial Sequence
  Description of Artificial Sequence: Synthetic peptide
  Seed: LRMKWMMAMKYPITA
LRMKFMMRMAYPCTA

SEQ ID NO: 225961 - protein, 15 aa, Artificial Sequence
  Description of Artificial Sequence: Synthetic peptide
  Seed: LRMKWMMAMKYPITA
LRMKFMMRMAYPFTA

SEQ ID NO: 225962 - protein, 15 aa, Artificial Sequence
  Description of Artificial Sequence: Synthetic peptide
  Seed: LRMKWMMAMKYPITA
LRMKFMMRMAYPGTA

SEQ ID NO: 225963 - protein, 15 aa, Artificial Sequence
  Description of Artificial Sequence: Synthetic peptide
  Seed: LRMKWMMAMKYPITA
LRMKFMMRMAYPHTA

SEQ ID NO: 225964 - protein, 15 aa, Artificial Sequence
  Description of Artificial Sequence: Synthetic peptide
  Seed: LRMKWMMAMKYPITA
LRMKFMMRMAYPITA

SEQ ID NO: 225965 - protein, 15 aa, Artificial Sequence
  Description of Artificial Sequence: Synthetic peptide
  Seed: LRMKWMMAMKYPITA
LRMKFMMRMAYPLTA

SEQ ID NO: 225966 - protein, 15 aa, Artificial Sequence
  Description of Artificial Sequence: Synthetic peptide
  Seed: LRMKWMMAMKYPITA
LRMKFMMRMAYPMTA

SEQ ID NO: 225967 - protein, 15 aa, Artificial Sequence
  Description of Artificial Sequence: Synthetic peptide
  Seed: LRMKWMMAMKYPITA
LRMKFMMRMAYPNTA

SEQ ID NO: 225968 - protein, 15 aa, Artificial Sequence
  Description of Artificial Sequence: Synthetic peptide
  Seed: LRMKWMMAMKYPITA
LRMKFMMRMAYPPTA

SEQ ID NO: 225969 - protein, 15 aa, Artificial Sequence
  Description of Artificial Sequence: Synthetic peptide
  Seed: LRMKWMMAMKYPITA
LRMKFMMRMAYPQTA

SEQ ID NO: 225970 - protein, 15 aa, Artificial Sequence
  Description of Artificial Sequence: Synthetic peptide
  Seed: LRMKWMMAMKYPITA
LRMKFMMRMAYPRTA

SEQ ID NO: 225971 - protein, 15 aa, Artificial Sequence
  Description of Artificial Sequence: Synthetic peptide
  Seed: LRMKWMMAMKYPITA
LRMKFMMRMAYPSTA

SEQ ID NO: 225972 - protein, 15 aa, Artificial Sequence
  Description of Artificial Sequence: Synthetic peptide
  Seed: LRMKWMMAMKYPITA
LRMKFMMRMAYPTTA

SEQ ID NO: 225973 - protein, 15 aa, Artificial Sequence
  Description of Artificial Sequence: Synthetic peptide
  Seed: LRMKWMMAMKYPITA
LRMKFMMRMAYPVTA

SEQ ID NO: 225974 - protein, 15 aa, Artificial Sequence
  Description of Artificial Sequence: Synthetic peptide
  Seed: LRMKWMMAMKYPITA
LRMKFMMRMAYPYTA

SEQ ID NO: 225975 - protein, 15 aa, Artificial Sequence
  Description of Artificial Sequence: Synthetic peptide
  Seed: LRMKWMMAMKYPITA
LRMKFMMRMCYPLTA

SEQ ID NO: 225976 - protein, 15 aa, Artificial Sequence
  Description of Artificial Sequence: Synthetic peptide
  Seed: LRMKWMMAMKYPITA
LRMKFMMRMCYPVTA

SEQ ID NO: 225977 - protein, 15 aa, Artificial Sequence
  Description of Artificial Sequence: Synthetic peptide
  Seed: LRMKWMMAMKYPITA
LRMKFMMRMGYPATA

SEQ ID NO: 225978 - protein, 15 aa, Artificial Sequence
  Description of Artificial Sequence: Synthetic peptide
  Seed: LRMKWMMAMKYPITA
LRMKFMMRMGYPCTA

SEQ ID NO: 225979 - protein, 15 aa, Artificial Sequence
  Description of Artificial Sequence: Synthetic peptide
  Seed: LRMKWMMAMKYPITA
LRMKFMMRMGYPFTA

SEQ ID NO: 225980 - protein, 15 aa, Artificial Sequence
  Description of Artificial Sequence: Synthetic peptide
  Seed: LRMKWMMAMKYPITA
LRMKFMMRMGYPITA

SEQ ID NO: 225981 - protein, 15 aa, Artificial Sequence
  Description of Artificial Sequence: Synthetic peptide
  Seed: LRMKWMMAMKYPITA
LRMKFMMRMGYPLTA

SEQ ID NO: 225982 - protein, 15 aa, Artificial Sequence
  Description of Artificial Sequence: Synthetic peptide
  Seed: LRMKWMMAMKYPITA
LRMKFMMRMGYPMTA

SEQ ID NO: 225983 - protein, 15 aa, Artificial Sequence
  Description of Artificial Sequence: Synthetic peptide
  Seed: LRMKWMMAMKYPITA
LRMKFMMRMGYPSTA

SEQ ID NO: 225984 - protein, 15 aa, Artificial Sequence
  Description of Artificial Sequence: Synthetic peptide
  Seed: LRMKWMMAMKYPITA
LRMKFMMRMGYPTTA

SEQ ID NO: 225985 - protein, 15 aa, Artificial Sequence
  Description of Artificial Sequence: Synthetic peptide
  Seed: LRMKWMMAMKYPITA
LRMKFMMRMGYPVTA

SEQ ID NO: 225986 - protein, 15 aa, Artificial Sequence
  Description of Artificial Sequence: Synthetic peptide
  Seed: LRMKWMMAMKYPITA
LRMKFMMRMGYPYTA

SEQ ID NO: 225987 - protein, 15 aa, Artificial Sequence
  Description of Artificial Sequence: Synthetic peptide
  Seed: LRMKWMMAMKYPITA
LRMKFMMRMHYPATA

SEQ ID NO: 225988 - protein, 15 aa, Artificial Sequence
  Description of Artificial Sequence: Synthetic peptide
  Seed: LRMKWMMAMKYPITA
LRMKFMMRMHYPSTA

SEQ ID NO: 225989 - protein, 15 aa, Artificial Sequence
  Description of Artificial Sequence: Synthetic peptide
  Seed: LRMKWMMAMKYPITA
LRMKFMMRMIYPRTA

SEQ ID NO: 225990 - protein, 15 aa, Artificial Sequence
  Description of Artificial Sequence: Synthetic peptide
  Seed: LRMKWMMAMKYPITA
LRMKFMMRMIYPYTA

SEQ ID NO: 225991 - protein, 15 aa, Artificial Sequence
  Description of Artificial Sequence: Synthetic peptide
  Seed: LRMKWMMAMKYPITA
LRMKFMMRMKYPATA

SEQ ID NO: 225992 - protein, 15 aa, Artificial Sequence
  Description of Artificial Sequence: Synthetic peptide
  Seed: LRMKWMMAMKYPITA
LRMKFMMRMKYPCTA

SEQ ID NO: 225993 - protein, 15 aa, Artificial Sequence
  Description of Artificial Sequence: Synthetic peptide
  Seed: LRMKWMMAMKYPITA
LRMKFMMRMKYPETA

SEQ ID NO: 225994 - protein, 15 aa, Artificial Sequence
  Description of Artificial Sequence: Synthetic peptide
  Seed: LRMKWMMAMKYPITA
LRMKFMMRMKYPFTA

SEQ ID NO: 225995 - protein, 15 aa, Artificial Sequence
  Description of Artificial Sequence: Synthetic peptide
  Seed: LRMKWMMAMKYPITA
LRMKFMMRMKYPGTA

SEQ ID NO: 225996 - protein, 15 aa, Artificial Sequence
  Description of Artificial Sequence: Synthetic peptide
  Seed: LRMKWMMAMKYPITA
LRMKFMMRMKYPHTA

SEQ ID NO: 225997 - protein, 15 aa, Artificial Sequence
  Description of Artificial Sequence: Synthetic peptide
  Seed: LRMKWMMAMKYPITA
LRMKFMMRMKYPITA

SEQ ID NO: 225998 - protein, 15 aa, Artificial Sequence
  Description of Artificial Sequence: Synthetic peptide
  Seed: LRMKWMMAMKYPITA
LRMKFMMRMKYPLTA

SEQ ID NO: 225999 - protein, 15 aa, Artificial Sequence
  Description of Artificial Sequence: Synthetic peptide
  Seed: LRMKWMMAMKYPITA
LRMKFMMRMKYPMTA

SEQ ID NO: 226000 - protein, 15 aa, Artificial Sequence
  Description of Artificial Sequence: Synthetic peptide
  Seed: LRMKWMMAMKYPITA
LRMKFMMRMKYPNTA

SEQ ID NO: 226001 - protein, 15 aa, Artificial Sequence
  Description of Artificial Sequence: Synthetic peptide
  Seed: LRMKWMMAMKYPITA
LRMKFMMRMKYPPTA

SEQ ID NO: 226002 - protein, 15 aa, Artificial Sequence
  Description of Artificial Sequence: Synthetic peptide
  Seed: LRMKWMMAMKYPITA
LRMKFMMRMKYPQTA

SEQ ID NO: 226003 - protein, 15 aa, Artificial Sequence
  Description of Artificial Sequence: Synthetic peptide
  Seed: LRMKWMMAMKYPITA
LRMKFMMRMKYPRTA

SEQ ID NO: 226004 - protein, 15 aa, Artificial Sequence
  Description of Artificial Sequence: Synthetic peptide
  Seed: LRMKWMMAMKYPITA
LRMKFMMRMKYPSTA

SEQ ID NO: 226005 - protein, 15 aa, Artificial Sequence
  Description of Artificial Sequence: Synthetic peptide
  Seed: LRMKWMMAMKYPITA
LRMKFMMRMKYPTTA

SEQ ID NO: 226006 - protein, 15 aa, Artificial Sequence
  Description of Artificial Sequence: Synthetic peptide
  Seed: LRMKWMMAMKYPITA
LRMKFMMRMKYPVTA

SEQ ID NO: 226007 - protein, 15 aa, Artificial Sequence
  Description of Artificial Sequence: Synthetic peptide
  Seed: LRMKWMMAMKYPITA
LRMKFMMRMKYPYTA

SEQ ID NO: 226008 - protein, 15 aa, Artificial Sequence
  Description of Artificial Sequence: Synthetic peptide
  Seed: LRMKWMMAMKYPITA
LRMKFMMRMNYPATA

SEQ ID NO: 226009 - protein, 15 aa, Artificial Sequence
  Description of Artificial Sequence: Synthetic peptide
  Seed: LRMKWMMAMKYPITA
LRMKFMMRMNYPFTA

SEQ ID NO: 226010 - protein, 15 aa, Artificial Sequence
  Description of Artificial Sequence: Synthetic peptide
  Seed: LRMKWMMAMKYPITA
LRMKFMMRMNYPITA

SEQ ID NO: 226011 - protein, 15 aa, Artificial Sequence
  Description of Artificial Sequence: Synthetic peptide
  Seed: LRMKWMMAMKYPITA
LRMKFMMRMNYPLTA

SEQ ID NO: 226012 - protein, 15 aa, Artificial Sequence
  Description of Artificial Sequence: Synthetic peptide
  Seed: LRMKWMMAMKYPITA
LRMKFMMRMNYPMTA

SEQ ID NO: 226013 - protein, 15 aa, Artificial Sequence
  Description of Artificial Sequence: Synthetic peptide
  Seed: LRMKWMMAMKYPITA
LRMKFMMRMNYPRTA

SEQ ID NO: 226014 - protein, 15 aa, Artificial Sequence
  Description of Artificial Sequence: Synthetic peptide
  Seed: LRMKWMMAMKYPITA
LRMKFMMRMNYPSTA

SEQ ID NO: 226015 - protein, 15 aa, Artificial Sequence
  Description of Artificial Sequence: Synthetic peptide
  Seed: LRMKWMMAMKYPITA
LRMKFMMRMNYPTTA

SEQ ID NO: 226016 - protein, 15 aa, Artificial Sequence
  Description of Artificial Sequence: Synthetic peptide
  Seed: LRMKWMMAMKYPITA
LRMKFMMRMNYPVTA

SEQ ID NO: 226017 - protein, 15 aa, Artificial Sequence
  Description of Artificial Sequence: Synthetic peptide
  Seed: LRMKWMMAMKYPITA
LRMKFMMRMNYPYTA

SEQ ID NO: 226018 - protein, 15 aa, Artificial Sequence
  Description of Artificial Sequence: Synthetic peptide
  Seed: LRMKWMMAMKYPITA
LRMKFMMRMPYPATA

SEQ ID NO: 226019 - protein, 15 aa, Artificial Sequence
  Description of Artificial Sequence: Synthetic peptide
  Seed: LRMKWMMAMKYPITA
LRMKFMMRMPYPFTA

SEQ ID NO: 226020 - protein, 15 aa, Artificial Sequence
  Description of Artificial Sequence: Synthetic peptide
  Seed: LRMKWMMAMKYPITA
LRMKFMMRMPYPITA

SEQ ID NO: 226021 - protein, 15 aa, Artificial Sequence
  Description of Artificial Sequence: Synthetic peptide
  Seed: LRMKWMMAMKYPITA
LRMKFMMRMPYPLTA

SEQ ID NO: 226022 - protein, 15 aa, Artificial Sequence
  Description of Artificial Sequence: Synthetic peptide
  Seed: LRMKWMMAMKYPITA
LRMKFMMRMPYPMTA

SEQ ID NO: 226023 - protein, 15 aa, Artificial Sequence
  Description of Artificial Sequence: Synthetic peptide
  Seed: LRMKWMMAMKYPITA
LRMKFMMRMPYPSTA

SEQ ID NO: 226024 - protein, 15 aa, Artificial Sequence
  Description of Artificial Sequence: Synthetic peptide
  Seed: LRMKWMMAMKYPITA
LRMKFMMRMPYPTTA

SEQ ID NO: 226025 - protein, 15 aa, Artificial Sequence
  Description of Artificial Sequence: Synthetic peptide
  Seed: LRMKWMMAMKYPITA
LRMKFMMRMPYPVTA

SEQ ID NO: 226026 - protein, 15 aa, Artificial Sequence
  Description of Artificial Sequence: Synthetic peptide
  Seed: LRMKWMMAMKYPITA
LRMKFMMRMQYPRTA

SEQ ID NO: 226027 - protein, 15 aa, Artificial Sequence
  Description of Artificial Sequence: Synthetic peptide
  Seed: LRMKWMMAMKYPITA
LRMKFMMRMQYPYTA

SEQ ID NO: 226028 - protein, 15 aa, Artificial Sequence
  Description of Artificial Sequence: Synthetic peptide
  Seed: LRMKWMMAMKYPITA
LRMKFMMRMRYPATA

SEQ ID NO: 226029 - protein, 15 aa, Artificial Sequence
  Description of Artificial Sequence: Synthetic peptide
  Seed: LRMKWMMAMKYPITA
LRMKFMMRMRYPCTA

SEQ ID NO: 226030 - protein, 15 aa, Artificial Sequence
  Description of Artificial Sequence: Synthetic peptide
  Seed: LRMKWMMAMKYPITA
LRMKFMMRMRYPDTA

SEQ ID NO: 226031 - protein, 15 aa, Artificial Sequence
  Description of Artificial Sequence: Synthetic peptide
  Seed: LRMKWMMAMKYPITA
LRMKFMMRMRYPETA

SEQ ID NO: 226032 - protein, 15 aa, Artificial Sequence
  Description of Artificial Sequence: Synthetic peptide
  Seed: LRMKWMMAMKYPITA
LRMKFMMRMRYPFTA

SEQ ID NO: 226033 - protein, 15 aa, Artificial Sequence
  Description of Artificial Sequence: Synthetic peptide
  Seed: LRMKWMMAMKYPITA
LRMKFMMRMRYPGTA

SEQ ID NO: 226034 - protein, 15 aa, Artificial Sequence
  Description of Artificial Sequence: Synthetic peptide
  Seed: LRMKWMMAMKYPITA
LRMKFMMRMRYPHTA

SEQ ID NO: 226035 - protein, 15 aa, Artificial Sequence
  Description of Artificial Sequence: Synthetic peptide
  Seed: LRMKWMMAMKYPITA
LRMKFMMRMRYPITA

SEQ ID NO: 226036 - protein, 15 aa, Artificial Sequence
  Description of Artificial Sequence: Synthetic peptide
  Seed: LRMKWMMAMKYPITA
LRMKFMMRMRYPLTA

SEQ ID NO: 226037 - protein, 15 aa, Artificial Sequence
  Description of Artificial Sequence: Synthetic peptide
  Seed: LRMKWMMAMKYPITA
LRMKFMMRMRYPMTA

SEQ ID NO: 226038 - protein, 15 aa, Artificial Sequence
  Description of Artificial Sequence: Synthetic peptide
  Seed: LRMKWMMAMKYPITA
LRMKFMMRMRYPNTA

SEQ ID NO: 226039 - protein, 15 aa, Artificial Sequence
  Description of Artificial Sequence: Synthetic peptide
  Seed: LRMKWMMAMKYPITA
LRMKFMMRMRYPQTA

SEQ ID NO: 226040 - protein, 15 aa, Artificial Sequence
  Description of Artificial Sequence: Synthetic peptide
  Seed: LRMKWMMAMKYPITA
LRMKFMMRMRYPRTA

SEQ ID NO: 226041 - protein, 15 aa, Artificial Sequence
  Description of Artificial Sequence: Synthetic peptide
  Seed: LRMKWMMAMKYPITA
LRMKFMMRMRYPSTA

SEQ ID NO: 226042 - protein, 15 aa, Artificial Sequence
  Description of Artificial Sequence: Synthetic peptide
  Seed: LRMKWMMAMKYPITA
LRMKFMMRMRYPTTA

SEQ ID NO: 226043 - protein, 15 aa, Artificial Sequence
  Description of Artificial Sequence: Synthetic peptide
  Seed: LRMKWMMAMKYPITA
LRMKFMMRMRYPVTA

SEQ ID NO: 226044 - protein, 15 aa, Artificial Sequence
  Description of Artificial Sequence: Synthetic peptide
  Seed: LRMKWMMAMKYPITA
LRMKFMMRMRYPYTA

SEQ ID NO: 226045 - protein, 15 aa, Artificial Sequence
  Description of Artificial Sequence: Synthetic peptide
  Seed: LRMKWMMAMKYPITA
LRMKFMMRMSYPATA

SEQ ID NO: 226046 - protein, 15 aa, Artificial Sequence
  Description of Artificial Sequence: Synthetic peptide
  Seed: LRMKWMMAMKYPITA
LRMKFMMRMSYPCTA

SEQ ID NO: 226047 - protein, 15 aa, Artificial Sequence
  Description of Artificial Sequence: Synthetic peptide
  Seed: LRMKWMMAMKYPITA
LRMKFMMRMSYPFTA

SEQ ID NO: 226048 - protein, 15 aa, Artificial Sequence
  Description of Artificial Sequence: Synthetic peptide
  Seed: LRMKWMMAMKYPITA
LRMKFMMRMSYPGTA

SEQ ID NO: 226049 - protein, 15 aa, Artificial Sequence
  Description of Artificial Sequence: Synthetic peptide
  Seed: LRMKWMMAMKYPITA
LRMKFMMRMSYPITA

SEQ ID NO: 226050 - protein, 15 aa, Artificial Sequence
  Description of Artificial Sequence: Synthetic peptide
  Seed: LRMKWMMAMKYPITA
LRMKFMMRMSYPLTA

SEQ ID NO: 226051 - protein, 15 aa, Artificial Sequence
  Description of Artificial Sequence: Synthetic peptide
  Seed: LRMKWMMAMKYPITA
LRMKFMMRMSYPMTA

SEQ ID NO: 226052 - protein, 15 aa, Artificial Sequence
  Description of Artificial Sequence: Synthetic peptide
  Seed: LRMKWMMAMKYPITA
LRMKFMMRMSYPNTA

SEQ ID NO: 226053 - protein, 15 aa, Artificial Sequence
  Description of Artificial Sequence: Synthetic peptide
  Seed: LRMKWMMAMKYPITA
LRMKFMMRMSYPQTA

SEQ ID NO: 226054 - protein, 15 aa, Artificial Sequence
  Description of Artificial Sequence: Synthetic peptide
  Seed: LRMKWMMAMKYPITA
LRMKFMMRMSYPRTA

SEQ ID NO: 226055 - protein, 15 aa, Artificial Sequence
  Description of Artificial Sequence: Synthetic peptide
  Seed: LRMKWMMAMKYPITA
LRMKFMMRMSYPSTA

SEQ ID NO: 226056 - protein, 15 aa, Artificial Sequence
  Description of Artificial Sequence: Synthetic peptide
  Seed: LRMKWMMAMKYPITA
LRMKFMMRMSYPTTA

SEQ ID NO: 226057 - protein, 15 aa, Artificial Sequence
  Description of Artificial Sequence: Synthetic peptide
  Seed: LRMKWMMAMKYPITA
LRMKFMMRMSYPVTA

SEQ ID NO: 226058 - protein, 15 aa, Artificial Sequence
  Description of Artificial Sequence: Synthetic peptide
  Seed: LRMKWMMAMKYPITA
LRMKFMMRMSYPWTA

SEQ ID NO: 226059 - protein, 15 aa, Artificial Sequence
  Description of Artificial Sequence: Synthetic peptide
  Seed: LRMKWMMAMKYPITA
LRMKFMMRMSYPYTA

SEQ ID NO: 226060 - protein, 15 aa, Artificial Sequence
  Description of Artificial Sequence: Synthetic peptide
  Seed: LRMKWMMAMKYPITA
LRMKFMMRMTYPATA

SEQ ID NO: 226061 - protein, 15 aa, Artificial Sequence
  Description of Artificial Sequence: Synthetic peptide
  Seed: LRMKWMMAMKYPITA
LRMKFMMRMTYPFTA

SEQ ID NO: 226062 - protein, 15 aa, Artificial Sequence
  Description of Artificial Sequence: Synthetic peptide
  Seed: LRMKWMMAMKYPITA
LRMKFMMRMTYPITA

SEQ ID NO: 226063 - protein, 15 aa, Artificial Sequence
  Description of Artificial Sequence: Synthetic peptide
  Seed: LRMKWMMAMKYPITA
LRMKFMMRMTYPKTA

SEQ ID NO: 226064 - protein, 15 aa, Artificial Sequence
  Description of Artificial Sequence: Synthetic peptide
  Seed: LRMKWMMAMKYPITA
LRMKFMMRMTYPLTA

SEQ ID NO: 226065 - protein, 15 aa, Artificial Sequence
  Description of Artificial Sequence: Synthetic peptide
  Seed: LRMKWMMAMKYPITA
LRMKFMMRMTYPMTA

SEQ ID NO: 226066 - protein, 15 aa, Artificial Sequence
  Description of Artificial Sequence: Synthetic peptide
  Seed: LRMKWMMAMKYPITA
LRMKFMMRMTYPNTA

SEQ ID NO: 226067 - protein, 15 aa, Artificial Sequence
  Description of Artificial Sequence: Synthetic peptide
  Seed: LRMKWMMAMKYPITA
LRMKFMMRMTYPRTA

SEQ ID NO: 226068 - protein, 15 aa, Artificial Sequence
  Description of Artificial Sequence: Synthetic peptide
  Seed: LRMKWMMAMKYPITA
LRMKFMMRMTYPSTA

SEQ ID NO: 226069 - protein, 15 aa, Artificial Sequence
  Description of Artificial Sequence: Synthetic peptide
  Seed: LRMKWMMAMKYPITA
LRMKFMMRMTYPTTA

SEQ ID NO: 226070 - protein, 15 aa, Artificial Sequence
  Description of Artificial Sequence: Synthetic peptide
  Seed: LRMKWMMAMKYPITA
LRMKFMMRMTYPVTA

SEQ ID NO: 226071 - protein, 15 aa, Artificial Sequence
  Description of Artificial Sequence: Synthetic peptide
  Seed: LRMKWMMAMKYPITA
LRMKFMMRMTYPYTA

SEQ ID NO: 226072 - protein, 15 aa, Artificial Sequence
  Description of Artificial Sequence: Synthetic peptide
  Seed: LRMKWMMAMKYPITA
LRMKFMMRMVYPATA

SEQ ID NO: 226073 - protein, 15 aa, Artificial Sequence
  Description of Artificial Sequence: Synthetic peptide
  Seed: LRMKWMMAMKYPITA
LRMKFMMRMVYPITA

SEQ ID NO: 226074 - protein, 15 aa, Artificial Sequence
  Description of Artificial Sequence: Synthetic peptide
  Seed: LRMKWMMAMKYPITA
LRMKFMMRMVYPLTA

SEQ ID NO: 226075 - protein, 15 aa, Artificial Sequence
  Description of Artificial Sequence: Synthetic peptide
  Seed: LRMKWMMAMKYPITA
LRMKFMMRMVYPMTA

SEQ ID NO: 226076 - protein, 15 aa, Artificial Sequence
  Description of Artificial Sequence: Synthetic peptide
  Seed: LRMKWMMAMKYPITA
LRMKFMMRMVYPNTA

SEQ ID NO: 226077 - protein, 15 aa, Artificial Sequence
  Description of Artificial Sequence: Synthetic peptide
  Seed: LRMKWMMAMKYPITA
LRMKFMMRMVYPRTA

SEQ ID NO: 226078 - protein, 15 aa, Artificial Sequence
  Description of Artificial Sequence: Synthetic peptide
  Seed: LRMKWMMAMKYPITA
LRMKFMMRMVYPSTA

SEQ ID NO: 226079 - protein, 15 aa, Artificial Sequence
  Description of Artificial Sequence: Synthetic peptide
  Seed: LRMKWMMAMKYPITA
LRMKFMMRMVYPTTA

SEQ ID NO: 226080 - protein, 15 aa, Artificial Sequence
  Description of Artificial Sequence: Synthetic peptide
  Seed: LRMKWMMAMKYPITA
LRMKFMMRMVYPVTA

SEQ ID NO: 226081 - protein, 15 aa, Artificial Sequence
  Description of Artificial Sequence: Synthetic peptide
  Seed: LRMKWMMAMKYPITA
LRMKFMMRMVYPYTA

SEQ ID NO: 226082 - protein, 15 aa, Artificial Sequence
  Description of Artificial Sequence: Synthetic peptide
  Seed: LRMKWMMAMKYPITA
LRMKFMMSMAYPCTA

SEQ ID NO: 226083 - protein, 15 aa, Artificial Sequence
  Description of Artificial Sequence: Synthetic peptide
  Seed: LRMKWMMAMKYPITA
LRMKFMMSMAYPDTA

SEQ ID NO: 226084 - protein, 15 aa, Artificial Sequence
  Description of Artificial Sequence: Synthetic peptide
  Seed: LRMKWMMAMKYPITA
LRMKFMMSMAYPETA

SEQ ID NO: 226085 - protein, 15 aa, Artificial Sequence
  Description of Artificial Sequence: Synthetic peptide
  Seed: LRMKWMMAMKYPITA
LRMKFMMSMAYPFTA

SEQ ID NO: 226086 - protein, 15 aa, Artificial Sequence
  Description of Artificial Sequence: Synthetic peptide
  Seed: LRMKWMMAMKYPITA
LRMKFMMSMAYPGTA

SEQ ID NO: 226087 - protein, 15 aa, Artificial Sequence
  Description of Artificial Sequence: Synthetic peptide
  Seed: LRMKWMMAMKYPITA
LRMKFMMSMAYPHTA

SEQ ID NO: 226088 - protein, 15 aa, Artificial Sequence
  Description of Artificial Sequence: Synthetic peptide
  Seed: LRMKWMMAMKYPITA
LRMKFMMSMAYPKTA

SEQ ID NO: 226089 - protein, 15 aa, Artificial Sequence
  Description of Artificial Sequence: Synthetic peptide
  Seed: LRMKWMMAMKYPITA
LRMKFMMSMAYPMTA

SEQ ID NO: 226090 - protein, 15 aa, Artificial Sequence
  Description of Artificial Sequence: Synthetic peptide
  Seed: LRMKWMMAMKYPITA
LRMKFMMSMAYPNTA

SEQ ID NO: 226091 - protein, 15 aa, Artificial Sequence
  Description of Artificial Sequence: Synthetic peptide
  Seed: LRMKWMMAMKYPITA
LRMKFMMSMAYPPTA

SEQ ID NO: 226092 - protein, 15 aa, Artificial Sequence
  Description of Artificial Sequence: Synthetic peptide
  Seed: LRMKWMMAMKYPITA
LRMKFMMSMAYPQTA

SEQ ID NO: 226093 - protein, 15 aa, Artificial Sequence
  Description of Artificial Sequence: Synthetic peptide
  Seed: LRMKWMMAMKYPITA
LRMKFMMSMAYPRTA

SEQ ID NO: 226094 - protein, 15 aa, Artificial Sequence
  Description of Artificial Sequence: Synthetic peptide
  Seed: LRMKWMMAMKYPITA
LRMKFMMSMAYPSTA

SEQ ID NO: 226095 - protein, 15 aa, Artificial Sequence
  Description of Artificial Sequence: Synthetic peptide
  Seed: LRMKWMMAMKYPITA
LRMKFMMSMAYPTTA

SEQ ID NO: 226096 - protein, 15 aa, Artificial Sequence
  Description of Artificial Sequence: Synthetic peptide
  Seed: LRMKWMMAMKYPITA
LRMKFMMSMAYPVTA

SEQ ID NO: 226097 - protein, 15 aa, Artificial Sequence
  Description of Artificial Sequence: Synthetic peptide
  Seed: LRMKWMMAMKYPITA
LRMKFMMSMAYPWTA

SEQ ID NO: 226098 - protein, 15 aa, Artificial Sequence
  Description of Artificial Sequence: Synthetic peptide
  Seed: LRMKWMMAMKYPITA
LRMKFMMSMAYPYTA

SEQ ID NO: 226099 - protein, 15 aa, Artificial Sequence
  Description of Artificial Sequence: Synthetic peptide
  Seed: LRMKWMMAMKYPITA
LRMKFMMSMCYPATA

SEQ ID NO: 226100 - protein, 15 aa, Artificial Sequence
  Description of Artificial Sequence: Synthetic peptide
  Seed: LRMKWMMAMKYPITA
LRMKFMMSMCYPFTA

SEQ ID NO: 226101 - protein, 15 aa, Artificial Sequence
  Description of Artificial Sequence: Synthetic peptide
  Seed: LRMKWMMAMKYPITA
LRMKFMMSMCYPGTA

SEQ ID NO: 226102 - protein, 15 aa, Artificial Sequence
  Description of Artificial Sequence: Synthetic peptide
  Seed: LRMKWMMAMKYPITA
LRMKFMMSMCYPHTA

SEQ ID NO: 226103 - protein, 15 aa, Artificial Sequence
  Description of Artificial Sequence: Synthetic peptide
  Seed: LRMKWMMAMKYPITA
LRMKFMMSMCYPITA

SEQ ID NO: 226104 - protein, 15 aa, Artificial Sequence
  Description of Artificial Sequence: Synthetic peptide
  Seed: LRMKWMMAMKYPITA
LRMKFMMSMCYPKTA

SEQ ID NO: 226105 - protein, 15 aa, Artificial Sequence
  Description of Artificial Sequence: Synthetic peptide
  Seed: LRMKWMMAMKYPITA
LRMKFMMSMCYPLTA

SEQ ID NO: 226106 - protein, 15 aa, Artificial Sequence
  Description of Artificial Sequence: Synthetic peptide
  Seed: LRMKWMMAMKYPITA
LRMKFMMSMCYPMTA

SEQ ID NO: 226107 - protein, 15 aa, Artificial Sequence
  Description of Artificial Sequence: Synthetic peptide
  Seed: LRMKWMMAMKYPITA
LRMKFMMSMCYPNTA

SEQ ID NO: 226108 - protein, 15 aa, Artificial Sequence
  Description of Artificial Sequence: Synthetic peptide
  Seed: LRMKWMMAMKYPITA
LRMKFMMSMCYPQTA

SEQ ID NO: 226109 - protein, 15 aa, Artificial Sequence
  Description of Artificial Sequence: Synthetic peptide
  Seed: LRMKWMMAMKYPITA
LRMKFMMSMCYPRTA

SEQ ID NO: 226110 - protein, 15 aa, Artificial Sequence
  Description of Artificial Sequence: Synthetic peptide
  Seed: LRMKWMMAMKYPITA
LRMKFMMSMCYPSTA

SEQ ID NO: 226111 - protein, 15 aa, Artificial Sequence
  Description of Artificial Sequence: Synthetic peptide
  Seed: LRMKWMMAMKYPITA
LRMKFMMSMCYPTTA

SEQ ID NO: 226112 - protein, 15 aa, Artificial Sequence
  Description of Artificial Sequence: Synthetic peptide
  Seed: LRMKWMMAMKYPITA
LRMKFMMSMCYPVTA

SEQ ID NO: 226113 - protein, 15 aa, Artificial Sequence
  Description of Artificial Sequence: Synthetic peptide
  Seed: LRMKWMMAMKYPITA
LRMKFMMSMCYPYTA

SEQ ID NO: 226114 - protein, 15 aa, Artificial Sequence
  Description of Artificial Sequence: Synthetic peptide
  Seed: LRMKWMMAMKYPITA
LRMKFMMSMDYPATA

SEQ ID NO: 226115 - protein, 15 aa, Artificial Sequence
  Description of Artificial Sequence: Synthetic peptide
  Seed: LRMKWMMAMKYPITA
LRMKFMMSMDYPDTA

SEQ ID NO: 226116 - protein, 15 aa, Artificial Sequence
  Description of Artificial Sequence: Synthetic peptide
  Seed: LRMKWMMAMKYPITA
LRMKFMMSMDYPETA

SEQ ID NO: 226117 - protein, 15 aa, Artificial Sequence
  Description of Artificial Sequence: Synthetic peptide
  Seed: LRMKWMMAMKYPITA
LRMKFMMSMDYPFTA

SEQ ID NO: 226118 - protein, 15 aa, Artificial Sequence
  Description of Artificial Sequence: Synthetic peptide
  Seed: LRMKWMMAMKYPITA
LRMKFMMSMDYPGTA

SEQ ID NO: 226119 - protein, 15 aa, Artificial Sequence
  Description of Artificial Sequence: Synthetic peptide
  Seed: LRMKWMMAMKYPITA
LRMKFMMSMDYPITA

SEQ ID NO: 226120 - protein, 15 aa, Artificial Sequence
  Description of Artificial Sequence: Synthetic peptide
  Seed: LRMKWMMAMKYPITA
LRMKFMMSMDYPLTA

SEQ ID NO: 226121 - protein, 15 aa, Artificial Sequence
  Description of Artificial Sequence: Synthetic peptide
  Seed: LRMKWMMAMKYPITA
LRMKFMMSMDYPMTA

SEQ ID NO: 226122 - protein, 15 aa, Artificial Sequence
  Description of Artificial Sequence: Synthetic peptide
  Seed: LRMKWMMAMKYPITA
LRMKFMMSMDYPNTA

SEQ ID NO: 226123 - protein, 15 aa, Artificial Sequence
  Description of Artificial Sequence: Synthetic peptide
  Seed: LRMKWMMAMKYPITA
LRMKFMMSMDYPSTA

SEQ ID NO: 226124 - protein, 15 aa, Artificial Sequence
  Description of Artificial Sequence: Synthetic peptide
  Seed: LRMKWMMAMKYPITA
LRMKFMMSMDYPTTA

SEQ ID NO: 226125 - protein, 15 aa, Artificial Sequence
  Description of Artificial Sequence: Synthetic peptide
  Seed: LRMKWMMAMKYPITA
LRMKFMMSMDYPVTA

SEQ ID NO: 226126 - protein, 15 aa, Artificial Sequence
  Description of Artificial Sequence: Synthetic peptide
  Seed: LRMKWMMAMKYPITA
LRMKFMMSMEYPATA

SEQ ID NO: 226127 - protein, 15 aa, Artificial Sequence
  Description of Artificial Sequence: Synthetic peptide
  Seed: LRMKWMMAMKYPITA
LRMKFMMSMEYPFTA

SEQ ID NO: 226128 - protein, 15 aa, Artificial Sequence
  Description of Artificial Sequence: Synthetic peptide
  Seed: LRMKWMMAMKYPITA
LRMKFMMSMEYPGTA

SEQ ID NO: 226129 - protein, 15 aa, Artificial Sequence
  Description of Artificial Sequence: Synthetic peptide
  Seed: LRMKWMMAMKYPITA
LRMKFMMSMEYPITA

SEQ ID NO: 226130 - protein, 15 aa, Artificial Sequence
  Description of Artificial Sequence: Synthetic peptide
  Seed: LRMKWMMAMKYPITA
LRMKFMMSMEYPLTA

SEQ ID NO: 226131 - protein, 15 aa, Artificial Sequence
  Description of Artificial Sequence: Synthetic peptide
  Seed: LRMKWMMAMKYPITA
LRMKFMMSMEYPMTA

SEQ ID NO: 226132 - protein, 15 aa, Artificial Sequence
  Description of Artificial Sequence: Synthetic peptide
  Seed: LRMKWMMAMKYPITA
LRMKFMMSMEYPNTA

SEQ ID NO: 226133 - protein, 15 aa, Artificial Sequence
  Description of Artificial Sequence: Synthetic peptide
  Seed: LRMKWMMAMKYPITA
LRMKFMMSMEYPQTA

SEQ ID NO: 226134 - protein, 15 aa, Artificial Sequence
  Description of Artificial Sequence: Synthetic peptide
  Seed: LRMKWMMAMKYPITA
LRMKFMMSMEYPSTA

SEQ ID NO: 226135 - protein, 15 aa, Artificial Sequence
  Description of Artificial Sequence: Synthetic peptide
  Seed: LRMKWMMAMKYPITA
LRMKFMMSMEYPTTA

SEQ ID NO: 226136 - protein, 15 aa, Artificial Sequence
  Description of Artificial Sequence: Synthetic peptide
  Seed: LRMKWMMAMKYPITA
LRMKFMMSMEYPVTA

SEQ ID NO: 226137 - protein, 15 aa, Artificial Sequence
  Description of Artificial Sequence: Synthetic peptide
  Seed: LRMKWMMAMKYPITA
LRMKFMMSMFYPATA

SEQ ID NO: 226138 - protein, 15 aa, Artificial Sequence
  Description of Artificial Sequence: Synthetic peptide
  Seed: LRMKWMMAMKYPITA
LRMKFMMSMFYPCTA

SEQ ID NO: 226139 - protein, 15 aa, Artificial Sequence
  Description of Artificial Sequence: Synthetic peptide
  Seed: LRMKWMMAMKYPITA
LRMKFMMSMFYPDTA

SEQ ID NO: 226140 - protein, 15 aa, Artificial Sequence
  Description of Artificial Sequence: Synthetic peptide
  Seed: LRMKWMMAMKYPITA
LRMKFMMSMFYPETA

SEQ ID NO: 226141 - protein, 15 aa, Artificial Sequence
  Description of Artificial Sequence: Synthetic peptide
  Seed: LRMKWMMAMKYPITA
LRMKFMMSMFYPFTA

SEQ ID NO: 226142 - protein, 15 aa, Artificial Sequence
  Description of Artificial Sequence: Synthetic peptide
  Seed: LRMKWMMAMKYPITA
LRMKFMMSMFYPHTA

SEQ ID NO: 226143 - protein, 15 aa, Artificial Sequence
  Description of Artificial Sequence: Synthetic peptide
  Seed: LRMKWMMAMKYPITA
LRMKFMMSMFYPITA

SEQ ID NO: 226144 - protein, 15 aa, Artificial Sequence
  Description of Artificial Sequence: Synthetic peptide
  Seed: LRMKWMMAMKYPITA
LRMKFMMSMFYPLTA

SEQ ID NO: 226145 - protein, 15 aa, Artificial Sequence
  Description of Artificial Sequence: Synthetic peptide
  Seed: LRMKWMMAMKYPITA
LRMKFMMSMFYPMTA

SEQ ID NO: 226146 - protein, 15 aa, Artificial Sequence
  Description of Artificial Sequence: Synthetic peptide
  Seed: LRMKWMMAMKYPITA
LRMKFMMSMFYPNTA

SEQ ID NO: 226147 - protein, 15 aa, Artificial Sequence
  Description of Artificial Sequence: Synthetic peptide
  Seed: LRMKWMMAMKYPITA
LRMKFMMSMFYPPTA

SEQ ID NO: 226148 - protein, 15 aa, Artificial Sequence
  Description of Artificial Sequence: Synthetic peptide
  Seed: LRMKWMMAMKYPITA
LRMKFMMSMFYPQTA

SEQ ID NO: 226149 - protein, 15 aa, Artificial Sequence
  Description of Artificial Sequence: Synthetic peptide
  Seed: LRMKWMMAMKYPITA
LRMKFMMSMFYPRTA

SEQ ID NO: 226150 - protein, 15 aa, Artificial Sequence
  Description of Artificial Sequence: Synthetic peptide
  Seed: LRMKWMMAMKYPITA
LRMKFMMSMFYPSTA

SEQ ID NO: 226151 - protein, 15 aa, Artificial Sequence
  Description of Artificial Sequence: Synthetic peptide
  Seed: LRMKWMMAMKYPITA
LRMKFMMSMFYPTTA

SEQ ID NO: 226152 - protein, 15 aa, Artificial Sequence
  Description of Artificial Sequence: Synthetic peptide
  Seed: LRMKWMMAMKYPITA
LRMKFMMSMFYPVTA

SEQ ID NO: 226153 - protein, 15 aa, Artificial Sequence
  Description of Artificial Sequence: Synthetic peptide
  Seed: LRMKWMMAMKYPITA
LRMKFMMSMFYPWTA

SEQ ID NO: 226154 - protein, 15 aa, Artificial Sequence
  Description of Artificial Sequence: Synthetic peptide
  Seed: LRMKWMMAMKYPITA
LRMKFMMSMFYPYTA

SEQ ID NO: 226155 - protein, 15 aa, Artificial Sequence
  Description of Artificial Sequence: Synthetic peptide
  Seed: LRMKWMMAMKYPITA
LRMKFMMSMGYPATA

SEQ ID NO: 226156 - protein, 15 aa, Artificial Sequence
  Description of Artificial Sequence: Synthetic peptide
  Seed: LRMKWMMAMKYPITA
LRMKFMMSMGYPCTA

SEQ ID NO: 226157 - protein, 15 aa, Artificial Sequence
  Description of Artificial Sequence: Synthetic peptide
  Seed: LRMKWMMAMKYPITA
LRMKFMMSMGYPDTA

SEQ ID NO: 226158 - protein, 15 aa, Artificial Sequence
  Description of Artificial Sequence: Synthetic peptide
  Seed: LRMKWMMAMKYPITA
LRMKFMMSMGYPETA

SEQ ID NO: 226159 - protein, 15 aa, Artificial Sequence
  Description of Artificial Sequence: Synthetic peptide
  Seed: LRMKWMMAMKYPITA
LRMKFMMSMGYPFTA

SEQ ID NO: 226160 - protein, 15 aa, Artificial Sequence
  Description of Artificial Sequence: Synthetic peptide
  Seed: LRMKWMMAMKYPITA
LRMKFMMSMGYPGTA

SEQ ID NO: 226161 - protein, 15 aa, Artificial Sequence
  Description of Artificial Sequence: Synthetic peptide
  Seed: LRMKWMMAMKYPITA
LRMKFMMSMGYPHTA

SEQ ID NO: 226162 - protein, 15 aa, Artificial Sequence
  Description of Artificial Sequence: Synthetic peptide
  Seed: LRMKWMMAMKYPITA
LRMKFMMSMGYPITA

SEQ ID NO: 226163 - protein, 15 aa, Artificial Sequence
  Description of Artificial Sequence: Synthetic peptide
  Seed: LRMKWMMAMKYPITA
LRMKFMMSMGYPKTA

SEQ ID NO: 226164 - protein, 15 aa, Artificial Sequence
  Description of Artificial Sequence: Synthetic peptide
  Seed: LRMKWMMAMKYPITA
LRMKFMMSMGYPLTA

SEQ ID NO: 226165 - protein, 15 aa, Artificial Sequence
  Description of Artificial Sequence: Synthetic peptide
  Seed: LRMKWMMAMKYPITA
LRMKFMMSMGYPMTA

SEQ ID NO: 226166 - protein, 15 aa, Artificial Sequence
  Description of Artificial Sequence: Synthetic peptide
  Seed: LRMKWMMAMKYPITA
LRMKFMMSMGYPNTA

SEQ ID NO: 226167 - protein, 15 aa, Artificial Sequence
  Description of Artificial Sequence: Synthetic peptide
  Seed: LRMKWMMAMKYPITA
LRMKFMMSMGYPPTA

SEQ ID NO: 226168 - protein, 15 aa, Artificial Sequence
  Description of Artificial Sequence: Synthetic peptide
  Seed: LRMKWMMAMKYPITA
LRMKFMMSMGYPQTA

SEQ ID NO: 226169 - protein, 15 aa, Artificial Sequence
  Description of Artificial Sequence: Synthetic peptide
  Seed: LRMKWMMAMKYPITA
LRMKFMMSMGYPRTA

SEQ ID NO: 226170 - protein, 15 aa, Artificial Sequence
  Description of Artificial Sequence: Synthetic peptide
  Seed: LRMKWMMAMKYPITA
LRMKFMMSMGYPSTA

SEQ ID NO: 226171 - protein, 15 aa, Artificial Sequence
  Description of Artificial Sequence: Synthetic peptide
  Seed: LRMKWMMAMKYPITA
LRMKFMMSMGYPTTA

SEQ ID NO: 226172 - protein, 15 aa, Artificial Sequence
  Description of Artificial Sequence: Synthetic peptide
  Seed: LRMKWMMAMKYPITA
LRMKFMMSMGYPVTA

SEQ ID NO: 226173 - protein, 15 aa, Artificial Sequence
  Description of Artificial Sequence: Synthetic peptide
  Seed: LRMKWMMAMKYPITA
LRMKFMMSMGYPWTA

SEQ ID NO: 226174 - protein, 15 aa, Artificial Sequence
  Description of Artificial Sequence: Synthetic peptide
  Seed: LRMKWMMAMKYPITA
LRMKFMMSMGYPYTA

SEQ ID NO: 226175 - protein, 15 aa, Artificial Sequence
  Description of Artificial Sequence: Synthetic peptide
  Seed: LRMKWMMAMKYPITA
LRMKFMMSMHYPATA

SEQ ID NO: 226176 - protein, 15 aa, Artificial Sequence
  Description of Artificial Sequence: Synthetic peptide
  Seed: LRMKWMMAMKYPITA
LRMKFMMSMHYPCTA

SEQ ID NO: 226177 - protein, 15 aa, Artificial Sequence
  Description of Artificial Sequence: Synthetic peptide
  Seed: LRMKWMMAMKYPITA
LRMKFMMSMHYPDTA

SEQ ID NO: 226178 - protein, 15 aa, Artificial Sequence
  Description of Artificial Sequence: Synthetic peptide
  Seed: LRMKWMMAMKYPITA
LRMKFMMSMHYPETA

SEQ ID NO: 226179 - protein, 15 aa, Artificial Sequence
  Description of Artificial Sequence: Synthetic peptide
  Seed: LRMKWMMAMKYPITA
LRMKFMMSMHYPFTA

SEQ ID NO: 226180 - protein, 15 aa, Artificial Sequence
  Description of Artificial Sequence: Synthetic peptide
  Seed: LRMKWMMAMKYPITA
LRMKFMMSMHYPGTA

SEQ ID NO: 226181 - protein, 15 aa, Artificial Sequence
  Description of Artificial Sequence: Synthetic peptide
  Seed: LRMKWMMAMKYPITA
LRMKFMMSMHYPHTA

SEQ ID NO: 226182 - protein, 15 aa, Artificial Sequence
  Description of Artificial Sequence: Synthetic peptide
  Seed: LRMKWMMAMKYPITA
LRMKFMMSMHYPITA

SEQ ID NO: 226183 - protein, 15 aa, Artificial Sequence
  Description of Artificial Sequence: Synthetic peptide
  Seed: LRMKWMMAMKYPITA
LRMKFMMSMHYPKTA

SEQ ID NO: 226184 - protein, 15 aa, Artificial Sequence
  Description of Artificial Sequence: Synthetic peptide
  Seed: LRMKWMMAMKYPITA
LRMKFMMSMHYPLTA

SEQ ID NO: 226185 - protein, 15 aa, Artificial Sequence
  Description of Artificial Sequence: Synthetic peptide
  Seed: LRMKWMMAMKYPITA
LRMKFMMSMHYPMTA

SEQ ID NO: 226186 - protein, 15 aa, Artificial Sequence
  Description of Artificial Sequence: Synthetic peptide
  Seed: LRMKWMMAMKYPITA
LRMKFMMSMHYPNTA

SEQ ID NO: 226187 - protein, 15 aa, Artificial Sequence
  Description of Artificial Sequence: Synthetic peptide
  Seed: LRMKWMMAMKYPITA
LRMKFMMSMHYPQTA

SEQ ID NO: 226188 - protein, 15 aa, Artificial Sequence
  Description of Artificial Sequence: Synthetic peptide
  Seed: LRMKWMMAMKYPITA
LRMKFMMSMHYPRTA

SEQ ID NO: 226189 - protein, 15 aa, Artificial Sequence
  Description of Artificial Sequence: Synthetic peptide
  Seed: LRMKWMMAMKYPITA
LRMKFMMSMHYPSTA

SEQ ID NO: 226190 - protein, 15 aa, Artificial Sequence
  Description of Artificial Sequence: Synthetic peptide
  Seed: LRMKWMMAMKYPITA
LRMKFMMSMHYPTTA

SEQ ID NO: 226191 - protein, 15 aa, Artificial Sequence
  Description of Artificial Sequence: Synthetic peptide
  Seed: LRMKWMMAMKYPITA
LRMKFMMSMHYPVTA

SEQ ID NO: 226192 - protein, 15 aa, Artificial Sequence
  Description of Artificial Sequence: Synthetic peptide
  Seed: LRMKWMMAMKYPITA
LRMKFMMSMHYPYTA

SEQ ID NO: 226193 - protein, 15 aa, Artificial Sequence
  Description of Artificial Sequence: Synthetic peptide
  Seed: LRMKWMMAMKYPITA
LRMKFMMSMIYPATA

SEQ ID NO: 226194 - protein, 15 aa, Artificial Sequence
  Description of Artificial Sequence: Synthetic peptide
  Seed: LRMKWMMAMKYPITA
LRMKFMMSMIYPCTA

SEQ ID NO: 226195 - protein, 15 aa, Artificial Sequence
  Description of Artificial Sequence: Synthetic peptide
  Seed: LRMKWMMAMKYPITA
LRMKFMMSMIYPDTA

SEQ ID NO: 226196 - protein, 15 aa, Artificial Sequence
  Description of Artificial Sequence: Synthetic peptide
  Seed: LRMKWMMAMKYPITA
LRMKFMMSMIYPETA

SEQ ID NO: 226197 - protein, 15 aa, Artificial Sequence
  Description of Artificial Sequence: Synthetic peptide
  Seed: LRMKWMMAMKYPITA
LRMKFMMSMIYPFTA

SEQ ID NO: 226198 - protein, 15 aa, Artificial Sequence
  Description of Artificial Sequence: Synthetic peptide
  Seed: LRMKWMMAMKYPITA
LRMKFMMSMIYPGTA

SEQ ID NO: 226199 - protein, 15 aa, Artificial Sequence
  Description of Artificial Sequence: Synthetic peptide
  Seed: LRMKWMMAMKYPITA
LRMKFMMSMIYPHTA

SEQ ID NO: 226200 - protein, 15 aa, Artificial Sequence
  Description of Artificial Sequence: Synthetic peptide
  Seed: LRMKWMMAMKYPITA
LRMKFMMSMIYPITA

SEQ ID NO: 226201 - protein, 15 aa, Artificial Sequence
  Description of Artificial Sequence: Synthetic peptide
  Seed: LRMKWMMAMKYPITA
LRMKFMMSMIYPKTA

SEQ ID NO: 226202 - protein, 15 aa, Artificial Sequence
  Description of Artificial Sequence: Synthetic peptide
  Seed: LRMKWMMAMKYPITA
LRMKFMMSMIYPLTA

SEQ ID NO: 226203 - protein, 15 aa, Artificial Sequence
  Description of Artificial Sequence: Synthetic peptide
  Seed: LRMKWMMAMKYPITA
LRMKFMMSMIYPMTA

SEQ ID NO: 226204 - protein, 15 aa, Artificial Sequence
  Description of Artificial Sequence: Synthetic peptide
  Seed: LRMKWMMAMKYPITA
LRMKFMMSMIYPNTA

SEQ ID NO: 226205 - protein, 15 aa, Artificial Sequence
  Description of Artificial Sequence: Synthetic peptide
  Seed: LRMKWMMAMKYPITA
LRMKFMMSMIYPPTA

SEQ ID NO: 226206 - protein, 15 aa, Artificial Sequence
  Description of Artificial Sequence: Synthetic peptide
  Seed: LRMKWMMAMKYPITA
LRMKFMMSMIYPQTA

SEQ ID NO: 226207 - protein, 15 aa, Artificial Sequence
  Description of Artificial Sequence: Synthetic peptide
  Seed: LRMKWMMAMKYPITA
LRMKFMMSMIYPRTA

SEQ ID NO: 226208 - protein, 15 aa, Artificial Sequence
  Description of Artificial Sequence: Synthetic peptide
  Seed: LRMKWMMAMKYPITA
LRMKFMMSMIYPSTA

SEQ ID NO: 226209 - protein, 15 aa, Artificial Sequence
  Description of Artificial Sequence: Synthetic peptide
  Seed: LRMKWMMAMKYPITA
LRMKFMMSMIYPTTA

SEQ ID NO: 226210 - protein, 15 aa, Artificial Sequence
  Description of Artificial Sequence: Synthetic peptide
  Seed: LRMKWMMAMKYPITA
LRMKFMMSMIYPVTA

SEQ ID NO: 226211 - protein, 15 aa, Artificial Sequence
  Description of Artificial Sequence: Synthetic peptide
  Seed: LRMKWMMAMKYPITA
LRMKFMMSMIYPYTA

SEQ ID NO: 226212 - protein, 15 aa, Artificial Sequence
  Description of Artificial Sequence: Synthetic peptide
  Seed: LRMKWMMAMKYPITA
LRMKFMMSMKYPATA

SEQ ID NO: 226213 - protein, 15 aa, Artificial Sequence
  Description of Artificial Sequence: Synthetic peptide
  Seed: LRMKWMMAMKYPITA
LRMKFMMSMKYPCTA

SEQ ID NO: 226214 - protein, 15 aa, Artificial Sequence
  Description of Artificial Sequence: Synthetic peptide
  Seed: LRMKWMMAMKYPITA
LRMKFMMSMKYPETA

SEQ ID NO: 226215 - protein, 15 aa, Artificial Sequence
  Description of Artificial Sequence: Synthetic peptide
  Seed: LRMKWMMAMKYPITA
LRMKFMMSMKYPFTA

SEQ ID NO: 226216 - protein, 15 aa, Artificial Sequence
  Description of Artificial Sequence: Synthetic peptide
  Seed: LRMKWMMAMKYPITA
LRMKFMMSMKYPGTA

SEQ ID NO: 226217 - protein, 15 aa, Artificial Sequence
  Description of Artificial Sequence: Synthetic peptide
  Seed: LRMKWMMAMKYPITA
LRMKFMMSMKYPHTA

SEQ ID NO: 226218 - protein, 15 aa, Artificial Sequence
  Description of Artificial Sequence: Synthetic peptide
  Seed: LRMKWMMAMKYPITA
LRMKFMMSMKYPITA

SEQ ID NO: 226219 - protein, 15 aa, Artificial Sequence
  Description of Artificial Sequence: Synthetic peptide
  Seed: LRMKWMMAMKYPITA
LRMKFMMSMKYPKTA

SEQ ID NO: 226220 - protein, 15 aa, Artificial Sequence
  Description of Artificial Sequence: Synthetic peptide
  Seed: LRMKWMMAMKYPITA
LRMKFMMSMKYPLTA

SEQ ID NO: 226221 - protein, 15 aa, Artificial Sequence
  Description of Artificial Sequence: Synthetic peptide
  Seed: LRMKWMMAMKYPITA
LRMKFMMSMKYPMTA

SEQ ID NO: 226222 - protein, 15 aa, Artificial Sequence
  Description of Artificial Sequence: Synthetic peptide
  Seed: LRMKWMMAMKYPITA
LRMKFMMSMKYPNTA

SEQ ID NO: 226223 - protein, 15 aa, Artificial Sequence
  Description of Artificial Sequence: Synthetic peptide
  Seed: LRMKWMMAMKYPITA
LRMKFMMSMKYPPTA

SEQ ID NO: 226224 - protein, 15 aa, Artificial Sequence
  Description of Artificial Sequence: Synthetic peptide
  Seed: LRMKWMMAMKYPITA
LRMKFMMSMKYPQTA

SEQ ID NO: 226225 - protein, 15 aa, Artificial Sequence
  Description of Artificial Sequence: Synthetic peptide
  Seed: LRMKWMMAMKYPITA
LRMKFMMSMKYPRTA

SEQ ID NO: 226226 - protein, 15 aa, Artificial Sequence
  Description of Artificial Sequence: Synthetic peptide
  Seed: LRMKWMMAMKYPITA
LRMKFMMSMKYPSTA

SEQ ID NO: 226227 - protein, 15 aa, Artificial Sequence
  Description of Artificial Sequence: Synthetic peptide
  Seed: LRMKWMMAMKYPITA
LRMKFMMSMKYPTTA

SEQ ID NO: 226228 - protein, 15 aa, Artificial Sequence
  Description of Artificial Sequence: Synthetic peptide
  Seed: LRMKWMMAMKYPITA
LRMKFMMSMKYPVTA

SEQ ID NO: 226229 - protein, 15 aa, Artificial Sequence
  Description of Artificial Sequence: Synthetic peptide
  Seed: LRMKWMMAMKYPITA
LRMKFMMSMKYPWTA

SEQ ID NO: 226230 - protein, 15 aa, Artificial Sequence
  Description of Artificial Sequence: Synthetic peptide
  Seed: LRMKWMMAMKYPITA
LRMKFMMSMKYPYTA

SEQ ID NO: 226231 - protein, 15 aa, Artificial Sequence
  Description of Artificial Sequence: Synthetic peptide
  Seed: LRMKWMMAMKYPITA
LRMKFMMSMLYPATA

SEQ ID NO: 226232 - protein, 15 aa, Artificial Sequence
  Description of Artificial Sequence: Synthetic peptide
  Seed: LRMKWMMAMKYPITA
LRMKFMMSMLYPCTA

SEQ ID NO: 226233 - protein, 15 aa, Artificial Sequence
  Description of Artificial Sequence: Synthetic peptide
  Seed: LRMKWMMAMKYPITA
LRMKFMMSMLYPDTA

SEQ ID NO: 226234 - protein, 15 aa, Artificial Sequence
  Description of Artificial Sequence: Synthetic peptide
  Seed: LRMKWMMAMKYPITA
LRMKFMMSMLYPFTA

SEQ ID NO: 226235 - protein, 15 aa, Artificial Sequence
  Description of Artificial Sequence: Synthetic peptide
  Seed: LRMKWMMAMKYPITA
LRMKFMMSMLYPGTA

SEQ ID NO: 226236 - protein, 15 aa, Artificial Sequence
  Description of Artificial Sequence: Synthetic peptide
  Seed: LRMKWMMAMKYPITA
LRMKFMMSMLYPITA

SEQ ID NO: 226237 - protein, 15 aa, Artificial Sequence
  Description of Artificial Sequence: Synthetic peptide
  Seed: LRMKWMMAMKYPITA
LRMKFMMSMLYPLTA

SEQ ID NO: 226238 - protein, 15 aa, Artificial Sequence
  Description of Artificial Sequence: Synthetic peptide
  Seed: LRMKWMMAMKYPITA
LRMKFMMSMLYPMTA

SEQ ID NO: 226239 - protein, 15 aa, Artificial Sequence
  Description of Artificial Sequence: Synthetic peptide
  Seed: LRMKWMMAMKYPITA
LRMKFMMSMLYPNTA

SEQ ID NO: 226240 - protein, 15 aa, Artificial Sequence
  Description of Artificial Sequence: Synthetic peptide
  Seed: LRMKWMMAMKYPITA
LRMKFMMSMLYPRTA

SEQ ID NO: 226241 - protein, 15 aa, Artificial Sequence
  Description of Artificial Sequence: Synthetic peptide
  Seed: LRMKWMMAMKYPITA
LRMKFMMSMLYPSTA

SEQ ID NO: 226242 - protein, 15 aa, Artificial Sequence
  Description of Artificial Sequence: Synthetic peptide
  Seed: LRMKWMMAMKYPITA
LRMKFMMSMLYPTTA

SEQ ID NO: 226243 - protein, 15 aa, Artificial Sequence
  Description of Artificial Sequence: Synthetic peptide
  Seed: LRMKWMMAMKYPITA
LRMKFMMSMLYPVTA

SEQ ID NO: 226244 - protein, 15 aa, Artificial Sequence
  Description of Artificial Sequence: Synthetic peptide
  Seed: LRMKWMMAMKYPITA
LRMKFMMSMLYPYTA

SEQ ID NO: 226245 - protein, 15 aa, Artificial Sequence
  Description of Artificial Sequence: Synthetic peptide
  Seed: LRMKWMMAMKYPITA
LRMKFMMSMMYPATA

SEQ ID NO: 226246 - protein, 15 aa, Artificial Sequence
  Description of Artificial Sequence: Synthetic peptide
  Seed: LRMKWMMAMKYPITA
LRMKFMMSMMYPCTA

SEQ ID NO: 226247 - protein, 15 aa, Artificial Sequence
  Description of Artificial Sequence: Synthetic peptide
  Seed: LRMKWMMAMKYPITA
LRMKFMMSMMYPDTA

SEQ ID NO: 226248 - protein, 15 aa, Artificial Sequence
  Description of Artificial Sequence: Synthetic peptide
  Seed: LRMKWMMAMKYPITA
LRMKFMMSMMYPFTA

SEQ ID NO: 226249 - protein, 15 aa, Artificial Sequence
  Description of Artificial Sequence: Synthetic peptide
  Seed: LRMKWMMAMKYPITA
LRMKFMMSMMYPGTA

SEQ ID NO: 226250 - protein, 15 aa, Artificial Sequence
  Description of Artificial Sequence: Synthetic peptide
  Seed: LRMKWMMAMKYPITA
LRMKFMMSMMYPITA

SEQ ID NO: 226251 - protein, 15 aa, Artificial Sequence
  Description of Artificial Sequence: Synthetic peptide
  Seed: LRMKWMMAMKYPITA
LRMKFMMSMMYPLTA

SEQ ID NO: 226252 - protein, 15 aa, Artificial Sequence
  Description of Artificial Sequence: Synthetic peptide
  Seed: LRMKWMMAMKYPITA
LRMKFMMSMMYPMTA

SEQ ID NO: 226253 - protein, 15 aa, Artificial Sequence
  Description of Artificial Sequence: Synthetic peptide
  Seed: LRMKWMMAMKYPITA
LRMKFMMSMMYPNTA

SEQ ID NO: 226254 - protein, 15 aa, Artificial Sequence
  Description of Artificial Sequence: Synthetic peptide
  Seed: LRMKWMMAMKYPITA
LRMKFMMSMMYPRTA

SEQ ID NO: 226255 - protein, 15 aa, Artificial Sequence
  Description of Artificial Sequence: Synthetic peptide
  Seed: LRMKWMMAMKYPITA
LRMKFMMSMMYPSTA

SEQ ID NO: 226256 - protein, 15 aa, Artificial Sequence
  Description of Artificial Sequence: Synthetic peptide
  Seed: LRMKWMMAMKYPITA
LRMKFMMSMMYPTTA

SEQ ID NO: 226257 - protein, 15 aa, Artificial Sequence
  Description of Artificial Sequence: Synthetic peptide
  Seed: LRMKWMMAMKYPITA
LRMKFMMSMMYPVTA

SEQ ID NO: 226258 - protein, 15 aa, Artificial Sequence
  Description of Artificial Sequence: Synthetic peptide
  Seed: LRMKWMMAMKYPITA
LRMKFMMSMMYPYTA

SEQ ID NO: 226259 - protein, 15 aa, Artificial Sequence
  Description of Artificial Sequence: Synthetic peptide
  Seed: LRMKWMMAMKYPITA
LRMKFMMSMNYPATA

SEQ ID NO: 226260 - protein, 15 aa, Artificial Sequence
  Description of Artificial Sequence: Synthetic peptide
  Seed: LRMKWMMAMKYPITA
LRMKFMMSMNYPCTA

SEQ ID NO: 226261 - protein, 15 aa, Artificial Sequence
  Description of Artificial Sequence: Synthetic peptide
  Seed: LRMKWMMAMKYPITA
LRMKFMMSMNYPDTA

SEQ ID NO: 226262 - protein, 15 aa, Artificial Sequence
  Description of Artificial Sequence: Synthetic peptide
  Seed: LRMKWMMAMKYPITA
LRMKFMMSMNYPETA

SEQ ID NO: 226263 - protein, 15 aa, Artificial Sequence
  Description of Artificial Sequence: Synthetic peptide
  Seed: LRMKWMMAMKYPITA
LRMKFMMSMNYPFTA

SEQ ID NO: 226264 - protein, 15 aa, Artificial Sequence
  Description of Artificial Sequence: Synthetic peptide
  Seed: LRMKWMMAMKYPITA
LRMKFMMSMNYPGTA

SEQ ID NO: 226265 - protein, 15 aa, Artificial Sequence
  Description of Artificial Sequence: Synthetic peptide
  Seed: LRMKWMMAMKYPITA
LRMKFMMSMNYPHTA

SEQ ID NO: 226266 - protein, 15 aa, Artificial Sequence
  Description of Artificial Sequence: Synthetic peptide
  Seed: LRMKWMMAMKYPITA
LRMKFMMSMNYPITA

SEQ ID NO: 226267 - protein, 15 aa, Artificial Sequence
  Description of Artificial Sequence: Synthetic peptide
  Seed: LRMKWMMAMKYPITA
LRMKFMMSMNYPKTA

SEQ ID NO: 226268 - protein, 15 aa, Artificial Sequence
  Description of Artificial Sequence: Synthetic peptide
  Seed: LRMKWMMAMKYPITA
LRMKFMMSMNYPLTA

SEQ ID NO: 226269 - protein, 15 aa, Artificial Sequence
  Description of Artificial Sequence: Synthetic peptide
  Seed: LRMKWMMAMKYPITA
LRMKFMMSMNYPMTA

SEQ ID NO: 226270 - protein, 15 aa, Artificial Sequence
  Description of Artificial Sequence: Synthetic peptide
  Seed: LRMKWMMAMKYPITA
LRMKFMMSMNYPNTA

SEQ ID NO: 226271 - protein, 15 aa, Artificial Sequence
  Description of Artificial Sequence: Synthetic peptide
  Seed: LRMKWMMAMKYPITA
LRMKFMMSMNYPPTA

SEQ ID NO: 226272 - protein, 15 aa, Artificial Sequence
  Description of Artificial Sequence: Synthetic peptide
  Seed: LRMKWMMAMKYPITA
LRMKFMMSMNYPQTA

SEQ ID NO: 226273 - protein, 15 aa, Artificial Sequence
  Description of Artificial Sequence: Synthetic peptide
  Seed: LRMKWMMAMKYPITA
LRMKFMMSMNYPRTA

SEQ ID NO: 226274 - protein, 15 aa, Artificial Sequence
  Description of Artificial Sequence: Synthetic peptide
  Seed: LRMKWMMAMKYPITA
LRMKFMMSMNYPSTA

SEQ ID NO: 226275 - protein, 15 aa, Artificial Sequence
  Description of Artificial Sequence: Synthetic peptide
  Seed: LRMKWMMAMKYPITA
LRMKFMMSMNYPTTA

SEQ ID NO: 226276 - protein, 15 aa, Artificial Sequence
  Description of Artificial Sequence: Synthetic peptide
  Seed: LRMKWMMAMKYPITA
LRMKFMMSMNYPVTA

SEQ ID NO: 226277 - protein, 15 aa, Artificial Sequence
  Description of Artificial Sequence: Synthetic peptide
  Seed: LRMKWMMAMKYPITA
LRMKFMMSMNYPWTA

SEQ ID NO: 226278 - protein, 15 aa, Artificial Sequence
  Description of Artificial Sequence: Synthetic peptide
  Seed: LRMKWMMAMKYPITA
LRMKFMMSMNYPYTA

SEQ ID NO: 226279 - protein, 15 aa, Artificial Sequence
  Description of Artificial Sequence: Synthetic peptide
  Seed: LRMKWMMAMKYPITA
LRMKFMMSMPYPATA

SEQ ID NO: 226280 - protein, 15 aa, Artificial Sequence
  Description of Artificial Sequence: Synthetic peptide
  Seed: LRMKWMMAMKYPITA
LRMKFMMSMPYPCTA

SEQ ID NO: 226281 - protein, 15 aa, Artificial Sequence
  Description of Artificial Sequence: Synthetic peptide
  Seed: LRMKWMMAMKYPITA
LRMKFMMSMPYPDTA

SEQ ID NO: 226282 - protein, 15 aa, Artificial Sequence
  Description of Artificial Sequence: Synthetic peptide
  Seed: LRMKWMMAMKYPITA
LRMKFMMSMPYPETA

SEQ ID NO: 226283 - protein, 15 aa, Artificial Sequence
  Description of Artificial Sequence: Synthetic peptide
  Seed: LRMKWMMAMKYPITA
LRMKFMMSMPYPFTA

SEQ ID NO: 226284 - protein, 15 aa, Artificial Sequence
  Description of Artificial Sequence: Synthetic peptide
  Seed: LRMKWMMAMKYPITA
LRMKFMMSMPYPGTA

SEQ ID NO: 226285 - protein, 15 aa, Artificial Sequence
  Description of Artificial Sequence: Synthetic peptide
  Seed: LRMKWMMAMKYPITA
LRMKFMMSMPYPHTA

SEQ ID NO: 226286 - protein, 15 aa, Artificial Sequence
  Description of Artificial Sequence: Synthetic peptide
  Seed: LRMKWMMAMKYPITA
LRMKFMMSMPYPITA

SEQ ID NO: 226287 - protein, 15 aa, Artificial Sequence
  Description of Artificial Sequence: Synthetic peptide
  Seed: LRMKWMMAMKYPITA
LRMKFMMSMPYPKTA

SEQ ID NO: 226288 - protein, 15 aa, Artificial Sequence
  Description of Artificial Sequence: Synthetic peptide
  Seed: LRMKWMMAMKYPITA
LRMKFMMSMPYPLTA

SEQ ID NO: 226289 - protein, 15 aa, Artificial Sequence
  Description of Artificial Sequence: Synthetic peptide
  Seed: LRMKWMMAMKYPITA
LRMKFMMSMPYPMTA

SEQ ID NO: 226290 - protein, 15 aa, Artificial Sequence
  Description of Artificial Sequence: Synthetic peptide
  Seed: LRMKWMMAMKYPITA
LRMKFMMSMPYPNTA

SEQ ID NO: 226291 - protein, 15 aa, Artificial Sequence
  Description of Artificial Sequence: Synthetic peptide
  Seed: LRMKWMMAMKYPITA
LRMKFMMSMPYPPTA

SEQ ID NO: 226292 - protein, 15 aa, Artificial Sequence
  Description of Artificial Sequence: Synthetic peptide
  Seed: LRMKWMMAMKYPITA
LRMKFMMSMPYPQTA

SEQ ID NO: 226293 - protein, 15 aa, Artificial Sequence
  Description of Artificial Sequence: Synthetic peptide
  Seed: LRMKWMMAMKYPITA
LRMKFMMSMPYPRTA

SEQ ID NO: 226294 - protein, 15 aa, Artificial Sequence
  Description of Artificial Sequence: Synthetic peptide
  Seed: LRMKWMMAMKYPITA
LRMKFMMSMPYPSTA

SEQ ID NO: 226295 - protein, 15 aa, Artificial Sequence
  Description of Artificial Sequence: Synthetic peptide
  Seed: LRMKWMMAMKYPITA
LRMKFMMSMPYPTTA

SEQ ID NO: 226296 - protein, 15 aa, Artificial Sequence
  Description of Artificial Sequence: Synthetic peptide
  Seed: LRMKWMMAMKYPITA
LRMKFMMSMPYPVTA

SEQ ID NO: 226297 - protein, 15 aa, Artificial Sequence
  Description of Artificial Sequence: Synthetic peptide
  Seed: LRMKWMMAMKYPITA
LRMKFMMSMPYPWTA

SEQ ID NO: 226298 - protein, 15 aa, Artificial Sequence
  Description of Artificial Sequence: Synthetic peptide
  Seed: LRMKWMMAMKYPITA
LRMKFMMSMPYPYTA

SEQ ID NO: 226299 - protein, 15 aa, Artificial Sequence
  Description of Artificial Sequence: Synthetic peptide
  Seed: LRMKWMMAMKYPITA
LRMKFMMSMQYPATA

SEQ ID NO: 226300 - protein, 15 aa, Artificial Sequence
  Description of Artificial Sequence: Synthetic peptide
  Seed: LRMKWMMAMKYPITA
LRMKFMMSMQYPCTA

SEQ ID NO: 226301 - protein, 15 aa, Artificial Sequence
  Description of Artificial Sequence: Synthetic peptide
  Seed: LRMKWMMAMKYPITA
LRMKFMMSMQYPETA

SEQ ID NO: 226302 - protein, 15 aa, Artificial Sequence
  Description of Artificial Sequence: Synthetic peptide
  Seed: LRMKWMMAMKYPITA
LRMKFMMSMQYPFTA

SEQ ID NO: 226303 - protein, 15 aa, Artificial Sequence
  Description of Artificial Sequence: Synthetic peptide
  Seed: LRMKWMMAMKYPITA
LRMKFMMSMQYPGTA

SEQ ID NO: 226304 - protein, 15 aa, Artificial Sequence
  Description of Artificial Sequence: Synthetic peptide
  Seed: LRMKWMMAMKYPITA
LRMKFMMSMQYPHTA

SEQ ID NO: 226305 - protein, 15 aa, Artificial Sequence
  Description of Artificial Sequence: Synthetic peptide
  Seed: LRMKWMMAMKYPITA
LRMKFMMSMQYPITA

SEQ ID NO: 226306 - protein, 15 aa, Artificial Sequence
  Description of Artificial Sequence: Synthetic peptide
  Seed: LRMKWMMAMKYPITA
LRMKFMMSMQYPLTA

SEQ ID NO: 226307 - protein, 15 aa, Artificial Sequence
  Description of Artificial Sequence: Synthetic peptide
  Seed: LRMKWMMAMKYPITA
LRMKFMMSMQYPMTA

SEQ ID NO: 226308 - protein, 15 aa, Artificial Sequence
  Description of Artificial Sequence: Synthetic peptide
  Seed: LRMKWMMAMKYPITA
LRMKFMMSMQYPNTA

SEQ ID NO: 226309 - protein, 15 aa, Artificial Sequence
  Description of Artificial Sequence: Synthetic peptide
  Seed: LRMKWMMAMKYPITA
LRMKFMMSMQYPQTA

SEQ ID NO: 226310 - protein, 15 aa, Artificial Sequence
  Description of Artificial Sequence: Synthetic peptide
  Seed: LRMKWMMAMKYPITA
LRMKFMMSMQYPRTA

SEQ ID NO: 226311 - protein, 15 aa, Artificial Sequence
  Description of Artificial Sequence: Synthetic peptide
  Seed: LRMKWMMAMKYPITA
LRMKFMMSMQYPSTA

SEQ ID NO: 226312 - protein, 15 aa, Artificial Sequence
  Description of Artificial Sequence: Synthetic peptide
  Seed: LRMKWMMAMKYPITA
LRMKFMMSMQYPTTA

SEQ ID NO: 226313 - protein, 15 aa, Artificial Sequence
  Description of Artificial Sequence: Synthetic peptide
  Seed: LRMKWMMAMKYPITA
LRMKFMMSMQYPVTA

SEQ ID NO: 226314 - protein, 15 aa, Artificial Sequence
  Description of Artificial Sequence: Synthetic peptide
  Seed: LRMKWMMAMKYPITA
LRMKFMMSMQYPWTA

SEQ ID NO: 226315 - protein, 15 aa, Artificial Sequence
  Description of Artificial Sequence: Synthetic peptide
  Seed: LRMKWMMAMKYPITA
LRMKFMMSMQYPYTA

SEQ ID NO: 226316 - protein, 15 aa, Artificial Sequence
  Description of Artificial Sequence: Synthetic peptide
  Seed: LRMKWMMAMKYPITA
LRMKFMMSMRYPATA

SEQ ID NO: 226317 - protein, 15 aa, Artificial Sequence
  Description of Artificial Sequence: Synthetic peptide
  Seed: LRMKWMMAMKYPITA
LRMKFMMSMRYPCTA

SEQ ID NO: 226318 - protein, 15 aa, Artificial Sequence
  Description of Artificial Sequence: Synthetic peptide
  Seed: LRMKWMMAMKYPITA
LRMKFMMSMRYPDTA

SEQ ID NO: 226319 - protein, 15 aa, Artificial Sequence
  Description of Artificial Sequence: Synthetic peptide
  Seed: LRMKWMMAMKYPITA
LRMKFMMSMRYPETA

SEQ ID NO: 226320 - protein, 15 aa, Artificial Sequence
  Description of Artificial Sequence: Synthetic peptide
  Seed: LRMKWMMAMKYPITA
LRMKFMMSMRYPFTA

SEQ ID NO: 226321 - protein, 15 aa, Artificial Sequence
  Description of Artificial Sequence: Synthetic peptide
  Seed: LRMKWMMAMKYPITA
LRMKFMMSMRYPGTA

SEQ ID NO: 226322 - protein, 15 aa, Artificial Sequence
  Description of Artificial Sequence: Synthetic peptide
  Seed: LRMKWMMAMKYPITA
LRMKFMMSMRYPHTA

SEQ ID NO: 226323 - protein, 15 aa, Artificial Sequence
  Description of Artificial Sequence: Synthetic peptide
  Seed: LRMKWMMAMKYPITA
LRMKFMMSMRYPITA

SEQ ID NO: 226324 - protein, 15 aa, Artificial Sequence
  Description of Artificial Sequence: Synthetic peptide
  Seed: LRMKWMMAMKYPITA
LRMKFMMSMRYPKTA

SEQ ID NO: 226325 - protein, 15 aa, Artificial Sequence
  Description of Artificial Sequence: Synthetic peptide
  Seed: LRMKWMMAMKYPITA
LRMKFMMSMRYPLTA

SEQ ID NO: 226326 - protein, 15 aa, Artificial Sequence
  Description of Artificial Sequence: Synthetic peptide
  Seed: LRMKWMMAMKYPITA
LRMKFMMSMRYPMTA

SEQ ID NO: 226327 - protein, 15 aa, Artificial Sequence
  Description of Artificial Sequence: Synthetic peptide
  Seed: LRMKWMMAMKYPITA
LRMKFMMSMRYPNTA

SEQ ID NO: 226328 - protein, 15 aa, Artificial Sequence
  Description of Artificial Sequence: Synthetic peptide
  Seed: LRMKWMMAMKYPITA
LRMKFMMSMRYPPTA

SEQ ID NO: 226329 - protein, 15 aa, Artificial Sequence
  Description of Artificial Sequence: Synthetic peptide
  Seed: LRMKWMMAMKYPITA
LRMKFMMSMRYPQTA

SEQ ID NO: 226330 - protein, 15 aa, Artificial Sequence
  Description of Artificial Sequence: Synthetic peptide
  Seed: LRMKWMMAMKYPITA
LRMKFMMSMRYPRTA

SEQ ID NO: 226331 - protein, 15 aa, Artificial Sequence
  Description of Artificial Sequence: Synthetic peptide
  Seed: LRMKWMMAMKYPITA
LRMKFMMSMRYPSTA

SEQ ID NO: 226332 - protein, 15 aa, Artificial Sequence
  Description of Artificial Sequence: Synthetic peptide
  Seed: LRMKWMMAMKYPITA
LRMKFMMSMRYPTTA

SEQ ID NO: 226333 - protein, 15 aa, Artificial Sequence
  Description of Artificial Sequence: Synthetic peptide
  Seed: LRMKWMMAMKYPITA
LRMKFMMSMRYPVTA

SEQ ID NO: 226334 - protein, 15 aa, Artificial Sequence
  Description of Artificial Sequence: Synthetic peptide
  Seed: LRMKWMMAMKYPITA
LRMKFMMSMRYPWTA

SEQ ID NO: 226335 - protein, 15 aa, Artificial Sequence
  Description of Artificial Sequence: Synthetic peptide
  Seed: LRMKWMMAMKYPITA
LRMKFMMSMRYPYTA

SEQ ID NO: 226336 - protein, 15 aa, Artificial Sequence
  Description of Artificial Sequence: Synthetic peptide
  Seed: LRMKWMMAMKYPITA
LRMKFMMSMSYPATA

SEQ ID NO: 226337 - protein, 15 aa, Artificial Sequence
  Description of Artificial Sequence: Synthetic peptide
  Seed: LRMKWMMAMKYPITA
LRMKFMMSMSYPCTA

SEQ ID NO: 226338 - protein, 15 aa, Artificial Sequence
  Description of Artificial Sequence: Synthetic peptide
  Seed: LRMKWMMAMKYPITA
LRMKFMMSMSYPDTA

SEQ ID NO: 226339 - protein, 15 aa, Artificial Sequence
  Description of Artificial Sequence: Synthetic peptide
  Seed: LRMKWMMAMKYPITA
LRMKFMMSMSYPETA

SEQ ID NO: 226340 - protein, 15 aa, Artificial Sequence
  Description of Artificial Sequence: Synthetic peptide
  Seed: LRMKWMMAMKYPITA
LRMKFMMSMSYPFTA

SEQ ID NO: 226341 - protein, 15 aa, Artificial Sequence
  Description of Artificial Sequence: Synthetic peptide
  Seed: LRMKWMMAMKYPITA
LRMKFMMSMSYPGTA

SEQ ID NO: 226342 - protein, 15 aa, Artificial Sequence
  Description of Artificial Sequence: Synthetic peptide
  Seed: LRMKWMMAMKYPITA
LRMKFMMSMSYPHTA

SEQ ID NO: 226343 - protein, 15 aa, Artificial Sequence
  Description of Artificial Sequence: Synthetic peptide
  Seed: LRMKWMMAMKYPITA
LRMKFMMSMSYPITA

SEQ ID NO: 226344 - protein, 15 aa, Artificial Sequence
  Description of Artificial Sequence: Synthetic peptide
  Seed: LRMKWMMAMKYPITA
LRMKFMMSMSYPKTA

SEQ ID NO: 226345 - protein, 15 aa, Artificial Sequence
  Description of Artificial Sequence: Synthetic peptide
  Seed: LRMKWMMAMKYPITA
LRMKFMMSMSYPLTA

SEQ ID NO: 226346 - protein, 15 aa, Artificial Sequence
  Description of Artificial Sequence: Synthetic peptide
  Seed: LRMKWMMAMKYPITA
LRMKFMMSMSYPMTA

SEQ ID NO: 226347 - protein, 15 aa, Artificial Sequence
  Description of Artificial Sequence: Synthetic peptide
  Seed: LRMKWMMAMKYPITA
LRMKFMMSMSYPNTA

SEQ ID NO: 226348 - protein, 15 aa, Artificial Sequence
  Description of Artificial Sequence: Synthetic peptide
  Seed: LRMKWMMAMKYPITA
LRMKFMMSMSYPPTA

SEQ ID NO: 226349 - protein, 15 aa, Artificial Sequence
  Description of Artificial Sequence: Synthetic peptide
  Seed: LRMKWMMAMKYPITA
LRMKFMMSMSYPQTA

SEQ ID NO: 226350 - protein, 15 aa, Artificial Sequence
  Description of Artificial Sequence: Synthetic peptide
  Seed: LRMKWMMAMKYPITA
LRMKFMMSMSYPRTA

SEQ ID NO: 226351 - protein, 15 aa, Artificial Sequence
  Description of Artificial Sequence: Synthetic peptide
  Seed: LRMKWMMAMKYPITA
LRMKFMMSMSYPSTA

SEQ ID NO: 226352 - protein, 15 aa, Artificial Sequence
  Description of Artificial Sequence: Synthetic peptide
  Seed: LRMKWMMAMKYPITA
LRMKFMMSMSYPTTA

SEQ ID NO: 226353 - protein, 15 aa, Artificial Sequence
  Description of Artificial Sequence: Synthetic peptide
  Seed: LRMKWMMAMKYPITA
LRMKFMMSMSYPVTA

SEQ ID NO: 226354 - protein, 15 aa, Artificial Sequence
  Description of Artificial Sequence: Synthetic peptide
  Seed: LRMKWMMAMKYPITA
LRMKFMMSMSYPWTA

SEQ ID NO: 226355 - protein, 15 aa, Artificial Sequence
  Description of Artificial Sequence: Synthetic peptide
  Seed: LRMKWMMAMKYPITA
LRMKFMMSMSYPYTA

SEQ ID NO: 226356 - protein, 15 aa, Artificial Sequence
  Description of Artificial Sequence: Synthetic peptide
  Seed: LRMKWMMAMKYPITA
LRMKFMMSMTYPATA

SEQ ID NO: 226357 - protein, 15 aa, Artificial Sequence
  Description of Artificial Sequence: Synthetic peptide
  Seed: LRMKWMMAMKYPITA
LRMKFMMSMTYPCTA

SEQ ID NO: 226358 - protein, 15 aa, Artificial Sequence
  Description of Artificial Sequence: Synthetic peptide
  Seed: LRMKWMMAMKYPITA
LRMKFMMSMTYPDTA

SEQ ID NO: 226359 - protein, 15 aa, Artificial Sequence
  Description of Artificial Sequence: Synthetic peptide
  Seed: LRMKWMMAMKYPITA
LRMKFMMSMTYPETA

SEQ ID NO: 226360 - protein, 15 aa, Artificial Sequence
  Description of Artificial Sequence: Synthetic peptide
  Seed: LRMKWMMAMKYPITA
LRMKFMMSMTYPFTA

SEQ ID NO: 226361 - protein, 15 aa, Artificial Sequence
  Description of Artificial Sequence: Synthetic peptide
  Seed: LRMKWMMAMKYPITA
LRMKFMMSMTYPGTA

SEQ ID NO: 226362 - protein, 15 aa, Artificial Sequence
  Description of Artificial Sequence: Synthetic peptide
  Seed: LRMKWMMAMKYPITA
LRMKFMMSMTYPHTA

SEQ ID NO: 226363 - protein, 15 aa, Artificial Sequence
  Description of Artificial Sequence: Synthetic peptide
  Seed: LRMKWMMAMKYPITA
LRMKFMMSMTYPITA

SEQ ID NO: 226364 - protein, 15 aa, Artificial Sequence
  Description of Artificial Sequence: Synthetic peptide
  Seed: LRMKWMMAMKYPITA
LRMKFMMSMTYPKTA

SEQ ID NO: 226365 - protein, 15 aa, Artificial Sequence
  Description of Artificial Sequence: Synthetic peptide
  Seed: LRMKWMMAMKYPITA
LRMKFMMSMTYPLTA

SEQ ID NO: 226366 - protein, 15 aa, Artificial Sequence
  Description of Artificial Sequence: Synthetic peptide
  Seed: LRMKWMMAMKYPITA
LRMKFMMSMTYPMTA

SEQ ID NO: 226367 - protein, 15 aa, Artificial Sequence
  Description of Artificial Sequence: Synthetic peptide
  Seed: LRMKWMMAMKYPITA
LRMKFMMSMTYPNTA

SEQ ID NO: 226368 - protein, 15 aa, Artificial Sequence
  Description of Artificial Sequence: Synthetic peptide
  Seed: LRMKWMMAMKYPITA
LRMKFMMSMTYPPTA

SEQ ID NO: 226369 - protein, 15 aa, Artificial Sequence
  Description of Artificial Sequence: Synthetic peptide
  Seed: LRMKWMMAMKYPITA
LRMKFMMSMTYPQTA

SEQ ID NO: 226370 - protein, 15 aa, Artificial Sequence
  Description of Artificial Sequence: Synthetic peptide
  Seed: LRMKWMMAMKYPITA
LRMKFMMSMTYPRTA

SEQ ID NO: 226371 - protein, 15 aa, Artificial Sequence
  Description of Artificial Sequence: Synthetic peptide
  Seed: LRMKWMMAMKYPITA
LRMKFMMSMTYPSTA

SEQ ID NO: 226372 - protein, 15 aa, Artificial Sequence
  Description of Artificial Sequence: Synthetic peptide
  Seed: LRMKWMMAMKYPITA
LRMKFMMSMTYPTTA

SEQ ID NO: 226373 - protein, 15 aa, Artificial Sequence
  Description of Artificial Sequence: Synthetic peptide
  Seed: LRMKWMMAMKYPITA
LRMKFMMSMTYPVTA

SEQ ID NO: 226374 - protein, 15 aa, Artificial Sequence
  Description of Artificial Sequence: Synthetic peptide
  Seed: LRMKWMMAMKYPITA
LRMKFMMSMTYPWTA

SEQ ID NO: 226375 - protein, 15 aa, Artificial Sequence
  Description of Artificial Sequence: Synthetic peptide
  Seed: LRMKWMMAMKYPITA
LRMKFMMSMTYPYTA

SEQ ID NO: 226376 - protein, 15 aa, Artificial Sequence
  Description of Artificial Sequence: Synthetic peptide
  Seed: LRMKWMMAMKYPITA
LRMKFMMSMVYPATA

SEQ ID NO: 226377 - protein, 15 aa, Artificial Sequence
  Description of Artificial Sequence: Synthetic peptide
  Seed: LRMKWMMAMKYPITA
LRMKFMMSMVYPCTA

SEQ ID NO: 226378 - protein, 15 aa, Artificial Sequence
  Description of Artificial Sequence: Synthetic peptide
  Seed: LRMKWMMAMKYPITA
LRMKFMMSMVYPDTA

SEQ ID NO: 226379 - protein, 15 aa, Artificial Sequence
  Description of Artificial Sequence: Synthetic peptide
  Seed: LRMKWMMAMKYPITA
LRMKFMMSMVYPETA

SEQ ID NO: 226380 - protein, 15 aa, Artificial Sequence
  Description of Artificial Sequence: Synthetic peptide
  Seed: LRMKWMMAMKYPITA
LRMKFMMSMVYPFTA

SEQ ID NO: 226381 - protein, 15 aa, Artificial Sequence
  Description of Artificial Sequence: Synthetic peptide
  Seed: LRMKWMMAMKYPITA
LRMKFMMSMVYPGTA

SEQ ID NO: 226382 - protein, 15 aa, Artificial Sequence
  Description of Artificial Sequence: Synthetic peptide
  Seed: LRMKWMMAMKYPITA
LRMKFMMSMVYPHTA

SEQ ID NO: 226383 - protein, 15 aa, Artificial Sequence
  Description of Artificial Sequence: Synthetic peptide
  Seed: LRMKWMMAMKYPITA
LRMKFMMSMVYPITA

SEQ ID NO: 226384 - protein, 15 aa, Artificial Sequence
  Description of Artificial Sequence: Synthetic peptide
  Seed: LRMKWMMAMKYPITA
LRMKFMMSMVYPKTA

SEQ ID NO: 226385 - protein, 15 aa, Artificial Sequence
  Description of Artificial Sequence: Synthetic peptide
  Seed: LRMKWMMAMKYPITA
LRMKFMMSMVYPLTA

SEQ ID NO: 226386 - protein, 15 aa, Artificial Sequence
  Description of Artificial Sequence: Synthetic peptide
  Seed: LRMKWMMAMKYPITA
LRMKFMMSMVYPMTA

SEQ ID NO: 226387 - protein, 15 aa, Artificial Sequence
  Description of Artificial Sequence: Synthetic peptide
  Seed: LRMKWMMAMKYPITA
LRMKFMMSMVYPNTA

SEQ ID NO: 226388 - protein, 15 aa, Artificial Sequence
  Description of Artificial Sequence: Synthetic peptide
  Seed: LRMKWMMAMKYPITA
LRMKFMMSMVYPPTA

SEQ ID NO: 226389 - protein, 15 aa, Artificial Sequence
  Description of Artificial Sequence: Synthetic peptide
  Seed: LRMKWMMAMKYPITA
LRMKFMMSMVYPQTA

SEQ ID NO: 226390 - protein, 15 aa, Artificial Sequence
  Description of Artificial Sequence: Synthetic peptide
  Seed: LRMKWMMAMKYPITA
LRMKFMMSMVYPRTA

SEQ ID NO: 226391 - protein, 15 aa, Artificial Sequence
  Description of Artificial Sequence: Synthetic peptide
  Seed: LRMKWMMAMKYPITA
LRMKFMMSMVYPSTA

SEQ ID NO: 226392 - protein, 15 aa, Artificial Sequence
  Description of Artificial Sequence: Synthetic peptide
  Seed: LRMKWMMAMKYPITA
LRMKFMMSMVYPTTA

SEQ ID NO: 226393 - protein, 15 aa, Artificial Sequence
  Description of Artificial Sequence: Synthetic peptide
  Seed: LRMKWMMAMKYPITA
LRMKFMMSMVYPVTA

SEQ ID NO: 226394 - protein, 15 aa, Artificial Sequence
  Description of Artificial Sequence: Synthetic peptide
  Seed: LRMKWMMAMKYPITA
LRMKFMMSMVYPWTA

SEQ ID NO: 226395 - protein, 15 aa, Artificial Sequence
  Description of Artificial Sequence: Synthetic peptide
  Seed: LRMKWMMAMKYPITA
LRMKFMMSMVYPYTA

SEQ ID NO: 226396 - protein, 15 aa, Artificial Sequence
  Description of Artificial Sequence: Synthetic peptide
  Seed: LRMKWMMAMKYPITA
LRMKFMMSMWYPATA

SEQ ID NO: 226397 - protein, 15 aa, Artificial Sequence
  Description of Artificial Sequence: Synthetic peptide
  Seed: LRMKWMMAMKYPITA
LRMKFMMSMWYPFTA

SEQ ID NO: 226398 - protein, 15 aa, Artificial Sequence
  Description of Artificial Sequence: Synthetic peptide
  Seed: LRMKWMMAMKYPITA
LRMKFMMSMWYPGTA

SEQ ID NO: 226399 - protein, 15 aa, Artificial Sequence
  Description of Artificial Sequence: Synthetic peptide
  Seed: LRMKWMMAMKYPITA
LRMKFMMSMWYPITA

SEQ ID NO: 226400 - protein, 15 aa, Artificial Sequence
  Description of Artificial Sequence: Synthetic peptide
  Seed: LRMKWMMAMKYPITA
LRMKFMMSMWYPLTA

SEQ ID NO: 226401 - protein, 15 aa, Artificial Sequence
  Description of Artificial Sequence: Synthetic peptide
  Seed: LRMKWMMAMKYPITA
LRMKFMMSMWYPMTA

SEQ ID NO: 226402 - protein, 15 aa, Artificial Sequence
  Description of Artificial Sequence: Synthetic peptide
  Seed: LRMKWMMAMKYPITA
LRMKFMMSMWYPNTA

SEQ ID NO: 226403 - protein, 15 aa, Artificial Sequence
  Description of Artificial Sequence: Synthetic peptide
  Seed: LRMKWMMAMKYPITA
LRMKFMMSMWYPSTA

SEQ ID NO: 226404 - protein, 15 aa, Artificial Sequence
  Description of Artificial Sequence: Synthetic peptide
  Seed: LRMKWMMAMKYPITA
LRMKFMMSMWYPTTA

SEQ ID NO: 226405 - protein, 15 aa, Artificial Sequence
  Description of Artificial Sequence: Synthetic peptide
  Seed: LRMKWMMAMKYPITA
LRMKFMMSMWYPVTA

SEQ ID NO: 226406 - protein, 15 aa, Artificial Sequence
  Description of Artificial Sequence: Synthetic peptide
  Seed: LRMKWMMAMKYPITA
LRMKFMMSMYYPATA

SEQ ID NO: 226407 - protein, 15 aa, Artificial Sequence
  Description of Artificial Sequence: Synthetic peptide
  Seed: LRMKWMMAMKYPITA
LRMKFMMSMYYPFTA

SEQ ID NO: 226408 - protein, 15 aa, Artificial Sequence
  Description of Artificial Sequence: Synthetic peptide
  Seed: LRMKWMMAMKYPITA
LRMKFMMSMYYPITA

SEQ ID NO: 226409 - protein, 15 aa, Artificial Sequence
  Description of Artificial Sequence: Synthetic peptide
  Seed: LRMKWMMAMKYPITA
LRMKFMMSMYYPLTA

SEQ ID NO: 226410 - protein, 15 aa, Artificial Sequence
  Description of Artificial Sequence: Synthetic peptide
  Seed: LRMKWMMAMKYPITA
LRMKFMMSMYYPMTA

SEQ ID NO: 226411 - protein, 15 aa, Artificial Sequence
  Description of Artificial Sequence: Synthetic peptide
  Seed: LRMKWMMAMKYPITA
LRMKFMMSMYYPNTA

SEQ ID NO: 226412 - protein, 15 aa, Artificial Sequence
  Description of Artificial Sequence: Synthetic peptide
  Seed: LRMKWMMAMKYPITA
LRMKFMMSMYYPSTA

SEQ ID NO: 226413 - protein, 15 aa, Artificial Sequence
  Description of Artificial Sequence: Synthetic peptide
  Seed: LRMKWMMAMKYPITA
LRMKFMMSMYYPTTA

SEQ ID NO: 226414 - protein, 15 aa, Artificial Sequence
  Description of Artificial Sequence: Synthetic peptide
  Seed: LRMKWMMAMKYPITA
LRMKFMMSMYYPVTA

SEQ ID NO: 226415 - protein, 15 aa, Artificial Sequence
  Description of Artificial Sequence: Synthetic peptide
  Seed: LRMKWMMAMKYPITA
LRMKFMMSMYYPYTA

SEQ ID NO: 226416 - protein, 15 aa, Artificial Sequence
  Description of Artificial Sequence: Synthetic peptide
  Seed: LRMKWMMAMKYPITA
LRMKFMMTMAYPATA

SEQ ID NO: 226417 - protein, 15 aa, Artificial Sequence
  Description of Artificial Sequence: Synthetic peptide
  Seed: LRMKWMMAMKYPITA
LRMKFMMTMAYPCTA

SEQ ID NO: 226418 - protein, 15 aa, Artificial Sequence
  Description of Artificial Sequence: Synthetic peptide
  Seed: LRMKWMMAMKYPITA
LRMKFMMTMAYPDTA

SEQ ID NO: 226419 - protein, 15 aa, Artificial Sequence
  Description of Artificial Sequence: Synthetic peptide
  Seed: LRMKWMMAMKYPITA
LRMKFMMTMAYPETA

SEQ ID NO: 226420 - protein, 15 aa, Artificial Sequence
  Description of Artificial Sequence: Synthetic peptide
  Seed: LRMKWMMAMKYPITA
LRMKFMMTMAYPFTA

SEQ ID NO: 226421 - protein, 15 aa, Artificial Sequence
  Description of Artificial Sequence: Synthetic peptide
  Seed: LRMKWMMAMKYPITA
LRMKFMMTMAYPGTA

SEQ ID NO: 226422 - protein, 15 aa, Artificial Sequence
  Description of Artificial Sequence: Synthetic peptide
  Seed: LRMKWMMAMKYPITA
LRMKFMMTMAYPHTA

SEQ ID NO: 226423 - protein, 15 aa, Artificial Sequence
  Description of Artificial Sequence: Synthetic peptide
  Seed: LRMKWMMAMKYPITA
LRMKFMMTMAYPITA

SEQ ID NO: 226424 - protein, 15 aa, Artificial Sequence
  Description of Artificial Sequence: Synthetic peptide
  Seed: LRMKWMMAMKYPITA
LRMKFMMTMAYPKTA

SEQ ID NO: 226425 - protein, 15 aa, Artificial Sequence
  Description of Artificial Sequence: Synthetic peptide
  Seed: LRMKWMMAMKYPITA
LRMKFMMTMAYPMTA

SEQ ID NO: 226426 - protein, 15 aa, Artificial Sequence
  Description of Artificial Sequence: Synthetic peptide
  Seed: LRMKWMMAMKYPITA
LRMKFMMTMAYPNTA

SEQ ID NO: 226427 - protein, 15 aa, Artificial Sequence
  Description of Artificial Sequence: Synthetic peptide
  Seed: LRMKWMMAMKYPITA
LRMKFMMTMAYPPTA

SEQ ID NO: 226428 - protein, 15 aa, Artificial Sequence
  Description of Artificial Sequence: Synthetic peptide
  Seed: LRMKWMMAMKYPITA
LRMKFMMTMAYPQTA

SEQ ID NO: 226429 - protein, 15 aa, Artificial Sequence
  Description of Artificial Sequence: Synthetic peptide
  Seed: LRMKWMMAMKYPITA
LRMKFMMTMAYPRTA

SEQ ID NO: 226430 - protein, 15 aa, Artificial Sequence
  Description of Artificial Sequence: Synthetic peptide
  Seed: LRMKWMMAMKYPITA
LRMKFMMTMAYPSTA

SEQ ID NO: 226431 - protein, 15 aa, Artificial Sequence
  Description of Artificial Sequence: Synthetic peptide
  Seed: LRMKWMMAMKYPITA
LRMKFMMTMAYPTTA

SEQ ID NO: 226432 - protein, 15 aa, Artificial Sequence
  Description of Artificial Sequence: Synthetic peptide
  Seed: LRMKWMMAMKYPITA
LRMKFMMTMAYPVTA

SEQ ID NO: 226433 - protein, 15 aa, Artificial Sequence
  Description of Artificial Sequence: Synthetic peptide
  Seed: LRMKWMMAMKYPITA
LRMKFMMTMAYPWTA

SEQ ID NO: 226434 - protein, 15 aa, Artificial Sequence
  Description of Artificial Sequence: Synthetic peptide
  Seed: LRMKWMMAMKYPITA
LRMKFMMTMAYPYTA

SEQ ID NO: 226435 - protein, 15 aa, Artificial Sequence
  Description of Artificial Sequence: Synthetic peptide
  Seed: LRMKWMMAMKYPITA
LRMKFMMTMCYPATA

SEQ ID NO: 226436 - protein, 15 aa, Artificial Sequence
  Description of Artificial Sequence: Synthetic peptide
  Seed: LRMKWMMAMKYPITA
LRMKFMMTMCYPFTA

SEQ ID NO: 226437 - protein, 15 aa, Artificial Sequence
  Description of Artificial Sequence: Synthetic peptide
  Seed: LRMKWMMAMKYPITA
LRMKFMMTMCYPGTA

SEQ ID NO: 226438 - protein, 15 aa, Artificial Sequence
  Description of Artificial Sequence: Synthetic peptide
  Seed: LRMKWMMAMKYPITA
LRMKFMMTMCYPHTA

SEQ ID NO: 226439 - protein, 15 aa, Artificial Sequence
  Description of Artificial Sequence: Synthetic peptide
  Seed: LRMKWMMAMKYPITA
LRMKFMMTMCYPITA

SEQ ID NO: 226440 - protein, 15 aa, Artificial Sequence
  Description of Artificial Sequence: Synthetic peptide
  Seed: LRMKWMMAMKYPITA
LRMKFMMTMCYPLTA

SEQ ID NO: 226441 - protein, 15 aa, Artificial Sequence
  Description of Artificial Sequence: Synthetic peptide
  Seed: LRMKWMMAMKYPITA
LRMKFMMTMCYPMTA

SEQ ID NO: 226442 - protein, 15 aa, Artificial Sequence
  Description of Artificial Sequence: Synthetic peptide
  Seed: LRMKWMMAMKYPITA
LRMKFMMTMCYPNTA

SEQ ID NO: 226443 - protein, 15 aa, Artificial Sequence
  Description of Artificial Sequence: Synthetic peptide
  Seed: LRMKWMMAMKYPITA
LRMKFMMTMCYPSTA

SEQ ID NO: 226444 - protein, 15 aa, Artificial Sequence
  Description of Artificial Sequence: Synthetic peptide
  Seed: LRMKWMMAMKYPITA
LRMKFMMTMCYPTTA

SEQ ID NO: 226445 - protein, 15 aa, Artificial Sequence
  Description of Artificial Sequence: Synthetic peptide
  Seed: LRMKWMMAMKYPITA
LRMKFMMTMCYPVTA

SEQ ID NO: 226446 - protein, 15 aa, Artificial Sequence
  Description of Artificial Sequence: Synthetic peptide
  Seed: LRMKWMMAMKYPITA
LRMKFMMTMCYPYTA

SEQ ID NO: 226447 - protein, 15 aa, Artificial Sequence
  Description of Artificial Sequence: Synthetic peptide
  Seed: LRMKWMMAMKYPITA
LRMKFMMTMDYPATA

SEQ ID NO: 226448 - protein, 15 aa, Artificial Sequence
  Description of Artificial Sequence: Synthetic peptide
  Seed: LRMKWMMAMKYPITA
LRMKFMMTMDYPDTA

SEQ ID NO: 226449 - protein, 15 aa, Artificial Sequence
  Description of Artificial Sequence: Synthetic peptide
  Seed: LRMKWMMAMKYPITA
LRMKFMMTMDYPFTA

SEQ ID NO: 226450 - protein, 15 aa, Artificial Sequence
  Description of Artificial Sequence: Synthetic peptide
  Seed: LRMKWMMAMKYPITA
LRMKFMMTMDYPITA

SEQ ID NO: 226451 - protein, 15 aa, Artificial Sequence
  Description of Artificial Sequence: Synthetic peptide
  Seed: LRMKWMMAMKYPITA
LRMKFMMTMDYPLTA

SEQ ID NO: 226452 - protein, 15 aa, Artificial Sequence
  Description of Artificial Sequence: Synthetic peptide
  Seed: LRMKWMMAMKYPITA
LRMKFMMTMDYPMTA

SEQ ID NO: 226453 - protein, 15 aa, Artificial Sequence
  Description of Artificial Sequence: Synthetic peptide
  Seed: LRMKWMMAMKYPITA
LRMKFMMTMDYPNTA

SEQ ID NO: 226454 - protein, 15 aa, Artificial Sequence
  Description of Artificial Sequence: Synthetic peptide
  Seed: LRMKWMMAMKYPITA
LRMKFMMTMDYPSTA

SEQ ID NO: 226455 - protein, 15 aa, Artificial Sequence
  Description of Artificial Sequence: Synthetic peptide
  Seed: LRMKWMMAMKYPITA
LRMKFMMTMDYPTTA

SEQ ID NO: 226456 - protein, 15 aa, Artificial Sequence
  Description of Artificial Sequence: Synthetic peptide
  Seed: LRMKWMMAMKYPITA
LRMKFMMTMDYPVTA

SEQ ID NO: 226457 - protein, 15 aa, Artificial Sequence
  Description of Artificial Sequence: Synthetic peptide
  Seed: LRMKWMMAMKYPITA
LRMKFMMTMEYPATA

SEQ ID NO: 226458 - protein, 15 aa, Artificial Sequence
  Description of Artificial Sequence: Synthetic peptide
  Seed: LRMKWMMAMKYPITA
LRMKFMMTMEYPFTA

SEQ ID NO: 226459 - protein, 15 aa, Artificial Sequence
  Description of Artificial Sequence: Synthetic peptide
  Seed: LRMKWMMAMKYPITA
LRMKFMMTMEYPGTA

SEQ ID NO: 226460 - protein, 15 aa, Artificial Sequence
  Description of Artificial Sequence: Synthetic peptide
  Seed: LRMKWMMAMKYPITA
LRMKFMMTMEYPITA

SEQ ID NO: 226461 - protein, 15 aa, Artificial Sequence
  Description of Artificial Sequence: Synthetic peptide
  Seed: LRMKWMMAMKYPITA
LRMKFMMTMEYPLTA

SEQ ID NO: 226462 - protein, 15 aa, Artificial Sequence
  Description of Artificial Sequence: Synthetic peptide
  Seed: LRMKWMMAMKYPITA
LRMKFMMTMEYPMTA

SEQ ID NO: 226463 - protein, 15 aa, Artificial Sequence
  Description of Artificial Sequence: Synthetic peptide
  Seed: LRMKWMMAMKYPITA
LRMKFMMTMEYPNTA

SEQ ID NO: 226464 - protein, 15 aa, Artificial Sequence
  Description of Artificial Sequence: Synthetic peptide
  Seed: LRMKWMMAMKYPITA
LRMKFMMTMEYPSTA

SEQ ID NO: 226465 - protein, 15 aa, Artificial Sequence
  Description of Artificial Sequence: Synthetic peptide
  Seed: LRMKWMMAMKYPITA
LRMKFMMTMEYPTTA

SEQ ID NO: 226466 - protein, 15 aa, Artificial Sequence
  Description of Artificial Sequence: Synthetic peptide
  Seed: LRMKWMMAMKYPITA
LRMKFMMTMEYPVTA

SEQ ID NO: 226467 - protein, 15 aa, Artificial Sequence
  Description of Artificial Sequence: Synthetic peptide
  Seed: LRMKWMMAMKYPITA
LRMKFMMTMFYPATA

SEQ ID NO: 226468 - protein, 15 aa, Artificial Sequence
  Description of Artificial Sequence: Synthetic peptide
  Seed: LRMKWMMAMKYPITA
LRMKFMMTMFYPCTA

SEQ ID NO: 226469 - protein, 15 aa, Artificial Sequence
  Description of Artificial Sequence: Synthetic peptide
  Seed: LRMKWMMAMKYPITA
LRMKFMMTMFYPDTA

SEQ ID NO: 226470 - protein, 15 aa, Artificial Sequence
  Description of Artificial Sequence: Synthetic peptide
  Seed: LRMKWMMAMKYPITA
LRMKFMMTMFYPETA

SEQ ID NO: 226471 - protein, 15 aa, Artificial Sequence
  Description of Artificial Sequence: Synthetic peptide
  Seed: LRMKWMMAMKYPITA
LRMKFMMTMFYPFTA

SEQ ID NO: 226472 - protein, 15 aa, Artificial Sequence
  Description of Artificial Sequence: Synthetic peptide
  Seed: LRMKWMMAMKYPITA
LRMKFMMTMFYPGTA

SEQ ID NO: 226473 - protein, 15 aa, Artificial Sequence
  Description of Artificial Sequence: Synthetic peptide
  Seed: LRMKWMMAMKYPITA
LRMKFMMTMFYPHTA

SEQ ID NO: 226474 - protein, 15 aa, Artificial Sequence
  Description of Artificial Sequence: Synthetic peptide
  Seed: LRMKWMMAMKYPITA
LRMKFMMTMFYPITA

SEQ ID NO: 226475 - protein, 15 aa, Artificial Sequence
  Description of Artificial Sequence: Synthetic peptide
  Seed: LRMKWMMAMKYPITA
LRMKFMMTMFYPLTA

SEQ ID NO: 226476 - protein, 15 aa, Artificial Sequence
  Description of Artificial Sequence: Synthetic peptide
  Seed: LRMKWMMAMKYPITA
LRMKFMMTMFYPMTA

SEQ ID NO: 226477 - protein, 15 aa, Artificial Sequence
  Description of Artificial Sequence: Synthetic peptide
  Seed: LRMKWMMAMKYPITA
LRMKFMMTMFYPNTA

SEQ ID NO: 226478 - protein, 15 aa, Artificial Sequence
  Description of Artificial Sequence: Synthetic peptide
  Seed: LRMKWMMAMKYPITA
LRMKFMMTMFYPPTA

SEQ ID NO: 226479 - protein, 15 aa, Artificial Sequence
  Description of Artificial Sequence: Synthetic peptide
  Seed: LRMKWMMAMKYPITA
LRMKFMMTMFYPQTA

SEQ ID NO: 226480 - protein, 15 aa, Artificial Sequence
  Description of Artificial Sequence: Synthetic peptide
  Seed: LRMKWMMAMKYPITA
LRMKFMMTMFYPRTA

SEQ ID NO: 226481 - protein, 15 aa, Artificial Sequence
  Description of Artificial Sequence: Synthetic peptide
  Seed: LRMKWMMAMKYPITA
LRMKFMMTMFYPSTA

SEQ ID NO: 226482 - protein, 15 aa, Artificial Sequence
  Description of Artificial Sequence: Synthetic peptide
  Seed: LRMKWMMAMKYPITA
LRMKFMMTMFYPTTA

SEQ ID NO: 226483 - protein, 15 aa, Artificial Sequence
  Description of Artificial Sequence: Synthetic peptide
  Seed: LRMKWMMAMKYPITA
LRMKFMMTMFYPVTA

SEQ ID NO: 226484 - protein, 15 aa, Artificial Sequence
  Description of Artificial Sequence: Synthetic peptide
  Seed: LRMKWMMAMKYPITA
LRMKFMMTMFYPWTA

SEQ ID NO: 226485 - protein, 15 aa, Artificial Sequence
  Description of Artificial Sequence: Synthetic peptide
  Seed: LRMKWMMAMKYPITA
LRMKFMMTMFYPYTA

SEQ ID NO: 226486 - protein, 15 aa, Artificial Sequence
  Description of Artificial Sequence: Synthetic peptide
  Seed: LRMKWMMAMKYPITA
LRMKFMMTMGYPATA

SEQ ID NO: 226487 - protein, 15 aa, Artificial Sequence
  Description of Artificial Sequence: Synthetic peptide
  Seed: LRMKWMMAMKYPITA
LRMKFMMTMGYPCTA

SEQ ID NO: 226488 - protein, 15 aa, Artificial Sequence
  Description of Artificial Sequence: Synthetic peptide
  Seed: LRMKWMMAMKYPITA
LRMKFMMTMGYPDTA

SEQ ID NO: 226489 - protein, 15 aa, Artificial Sequence
  Description of Artificial Sequence: Synthetic peptide
  Seed: LRMKWMMAMKYPITA
LRMKFMMTMGYPETA

SEQ ID NO: 226490 - protein, 15 aa, Artificial Sequence
  Description of Artificial Sequence: Synthetic peptide
  Seed: LRMKWMMAMKYPITA
LRMKFMMTMGYPFTA

SEQ ID NO: 226491 - protein, 15 aa, Artificial Sequence
  Description of Artificial Sequence: Synthetic peptide
  Seed: LRMKWMMAMKYPITA
LRMKFMMTMGYPGTA

SEQ ID NO: 226492 - protein, 15 aa, Artificial Sequence
  Description of Artificial Sequence: Synthetic peptide
  Seed: LRMKWMMAMKYPITA
LRMKFMMTMGYPHTA

SEQ ID NO: 226493 - protein, 15 aa, Artificial Sequence
  Description of Artificial Sequence: Synthetic peptide
  Seed: LRMKWMMAMKYPITA
LRMKFMMTMGYPITA

SEQ ID NO: 226494 - protein, 15 aa, Artificial Sequence
  Description of Artificial Sequence: Synthetic peptide
  Seed: LRMKWMMAMKYPITA
LRMKFMMTMGYPKTA

SEQ ID NO: 226495 - protein, 15 aa, Artificial Sequence
  Description of Artificial Sequence: Synthetic peptide
  Seed: LRMKWMMAMKYPITA
LRMKFMMTMGYPLTA

SEQ ID NO: 226496 - protein, 15 aa, Artificial Sequence
  Description of Artificial Sequence: Synthetic peptide
  Seed: LRMKWMMAMKYPITA
LRMKFMMTMGYPMTA

SEQ ID NO: 226497 - protein, 15 aa, Artificial Sequence
  Description of Artificial Sequence: Synthetic peptide
  Seed: LRMKWMMAMKYPITA
LRMKFMMTMGYPNTA

SEQ ID NO: 226498 - protein, 15 aa, Artificial Sequence
  Description of Artificial Sequence: Synthetic peptide
  Seed: LRMKWMMAMKYPITA
LRMKFMMTMGYPPTA

SEQ ID NO: 226499 - protein, 15 aa, Artificial Sequence
  Description of Artificial Sequence: Synthetic peptide
  Seed: LRMKWMMAMKYPITA
LRMKFMMTMGYPQTA

SEQ ID NO: 226500 - protein, 15 aa, Artificial Sequence
  Description of Artificial Sequence: Synthetic peptide
  Seed: LRMKWMMAMKYPITA
LRMKFMMTMGYPRTA

SEQ ID NO: 226501 - protein, 15 aa, Artificial Sequence
  Description of Artificial Sequence: Synthetic peptide
  Seed: LRMKWMMAMKYPITA
LRMKFMMTMGYPSTA

SEQ ID NO: 226502 - protein, 15 aa, Artificial Sequence
  Description of Artificial Sequence: Synthetic peptide
  Seed: LRMKWMMAMKYPITA
LRMKFMMTMGYPTTA

SEQ ID NO: 226503 - protein, 15 aa, Artificial Sequence
  Description of Artificial Sequence: Synthetic peptide
  Seed: LRMKWMMAMKYPITA
LRMKFMMTMGYPVTA

SEQ ID NO: 226504 - protein, 15 aa, Artificial Sequence
  Description of Artificial Sequence: Synthetic peptide
  Seed: LRMKWMMAMKYPITA
LRMKFMMTMGYPWTA

SEQ ID NO: 226505 - protein, 15 aa, Artificial Sequence
  Description of Artificial Sequence: Synthetic peptide
  Seed: LRMKWMMAMKYPITA
LRMKFMMTMGYPYTA

SEQ ID NO: 226506 - protein, 15 aa, Artificial Sequence
  Description of Artificial Sequence: Synthetic peptide
  Seed: LRMKWMMAMKYPITA
LRMKFMMTMHYPATA

SEQ ID NO: 226507 - protein, 15 aa, Artificial Sequence
  Description of Artificial Sequence: Synthetic peptide
  Seed: LRMKWMMAMKYPITA
LRMKFMMTMHYPCTA

SEQ ID NO: 226508 - protein, 15 aa, Artificial Sequence
  Description of Artificial Sequence: Synthetic peptide
  Seed: LRMKWMMAMKYPITA
LRMKFMMTMHYPFTA

SEQ ID NO: 226509 - protein, 15 aa, Artificial Sequence
  Description of Artificial Sequence: Synthetic peptide
  Seed: LRMKWMMAMKYPITA
LRMKFMMTMHYPGTA

SEQ ID NO: 226510 - protein, 15 aa, Artificial Sequence
  Description of Artificial Sequence: Synthetic peptide
  Seed: LRMKWMMAMKYPITA
LRMKFMMTMHYPHTA

SEQ ID NO: 226511 - protein, 15 aa, Artificial Sequence
  Description of Artificial Sequence: Synthetic peptide
  Seed: LRMKWMMAMKYPITA
LRMKFMMTMHYPITA

SEQ ID NO: 226512 - protein, 15 aa, Artificial Sequence
  Description of Artificial Sequence: Synthetic peptide
  Seed: LRMKWMMAMKYPITA
LRMKFMMTMHYPLTA

SEQ ID NO: 226513 - protein, 15 aa, Artificial Sequence
  Description of Artificial Sequence: Synthetic peptide
  Seed: LRMKWMMAMKYPITA
LRMKFMMTMHYPMTA

SEQ ID NO: 226514 - protein, 15 aa, Artificial Sequence
  Description of Artificial Sequence: Synthetic peptide
  Seed: LRMKWMMAMKYPITA
LRMKFMMTMHYPNTA

SEQ ID NO: 226515 - protein, 15 aa, Artificial Sequence
  Description of Artificial Sequence: Synthetic peptide
  Seed: LRMKWMMAMKYPITA
LRMKFMMTMHYPQTA

SEQ ID NO: 226516 - protein, 15 aa, Artificial Sequence
  Description of Artificial Sequence: Synthetic peptide
  Seed: LRMKWMMAMKYPITA
LRMKFMMTMHYPRTA

SEQ ID NO: 226517 - protein, 15 aa, Artificial Sequence
  Description of Artificial Sequence: Synthetic peptide
  Seed: LRMKWMMAMKYPITA
LRMKFMMTMHYPSTA

SEQ ID NO: 226518 - protein, 15 aa, Artificial Sequence
  Description of Artificial Sequence: Synthetic peptide
  Seed: LRMKWMMAMKYPITA
LRMKFMMTMHYPTTA

SEQ ID NO: 226519 - protein, 15 aa, Artificial Sequence
  Description of Artificial Sequence: Synthetic peptide
  Seed: LRMKWMMAMKYPITA
LRMKFMMTMHYPVTA

SEQ ID NO: 226520 - protein, 15 aa, Artificial Sequence
  Description of Artificial Sequence: Synthetic peptide
  Seed: LRMKWMMAMKYPITA
LRMKFMMTMHYPYTA

SEQ ID NO: 226521 - protein, 15 aa, Artificial Sequence
  Description of Artificial Sequence: Synthetic peptide
  Seed: LRMKWMMAMKYPITA
LRMKFMMTMIYPATA

SEQ ID NO: 226522 - protein, 15 aa, Artificial Sequence
  Description of Artificial Sequence: Synthetic peptide
  Seed: LRMKWMMAMKYPITA
LRMKFMMTMIYPCTA

SEQ ID NO: 226523 - protein, 15 aa, Artificial Sequence
  Description of Artificial Sequence: Synthetic peptide
  Seed: LRMKWMMAMKYPITA
LRMKFMMTMIYPDTA

SEQ ID NO: 226524 - protein, 15 aa, Artificial Sequence
  Description of Artificial Sequence: Synthetic peptide
  Seed: LRMKWMMAMKYPITA
LRMKFMMTMIYPETA

SEQ ID NO: 226525 - protein, 15 aa, Artificial Sequence
  Description of Artificial Sequence: Synthetic peptide
  Seed: LRMKWMMAMKYPITA
LRMKFMMTMIYPFTA

SEQ ID NO: 226526 - protein, 15 aa, Artificial Sequence
  Description of Artificial Sequence: Synthetic peptide
  Seed: LRMKWMMAMKYPITA
LRMKFMMTMIYPGTA

SEQ ID NO: 226527 - protein, 15 aa, Artificial Sequence
  Description of Artificial Sequence: Synthetic peptide
  Seed: LRMKWMMAMKYPITA
LRMKFMMTMIYPHTA

SEQ ID NO: 226528 - protein, 15 aa, Artificial Sequence
  Description of Artificial Sequence: Synthetic peptide
  Seed: LRMKWMMAMKYPITA
LRMKFMMTMIYPITA

SEQ ID NO: 226529 - protein, 15 aa, Artificial Sequence
  Description of Artificial Sequence: Synthetic peptide
  Seed: LRMKWMMAMKYPITA
LRMKFMMTMIYPKTA

SEQ ID NO: 226530 - protein, 15 aa, Artificial Sequence
  Description of Artificial Sequence: Synthetic peptide
  Seed: LRMKWMMAMKYPITA
LRMKFMMTMIYPLTA

SEQ ID NO: 226531 - protein, 15 aa, Artificial Sequence
  Description of Artificial Sequence: Synthetic peptide
  Seed: LRMKWMMAMKYPITA
LRMKFMMTMIYPMTA

SEQ ID NO: 226532 - protein, 15 aa, Artificial Sequence
  Description of Artificial Sequence: Synthetic peptide
  Seed: LRMKWMMAMKYPITA
LRMKFMMTMIYPNTA

SEQ ID NO: 226533 - protein, 15 aa, Artificial Sequence
  Description of Artificial Sequence: Synthetic peptide
  Seed: LRMKWMMAMKYPITA
LRMKFMMTMIYPPTA

SEQ ID NO: 226534 - protein, 15 aa, Artificial Sequence
  Description of Artificial Sequence: Synthetic peptide
  Seed: LRMKWMMAMKYPITA
LRMKFMMTMIYPQTA

SEQ ID NO: 226535 - protein, 15 aa, Artificial Sequence
  Description of Artificial Sequence: Synthetic peptide
  Seed: LRMKWMMAMKYPITA
LRMKFMMTMIYPSTA

SEQ ID NO: 226536 - protein, 15 aa, Artificial Sequence
  Description of Artificial Sequence: Synthetic peptide
  Seed: LRMKWMMAMKYPITA
LRMKFMMTMIYPTTA

SEQ ID NO: 226537 - protein, 15 aa, Artificial Sequence
  Description of Artificial Sequence: Synthetic peptide
  Seed: LRMKWMMAMKYPITA
LRMKFMMTMIYPVTA

SEQ ID NO: 226538 - protein, 15 aa, Artificial Sequence
  Description of Artificial Sequence: Synthetic peptide
  Seed: LRMKWMMAMKYPITA
LRMKFMMTMIYPYTA

SEQ ID NO: 226539 - protein, 15 aa, Artificial Sequence
  Description of Artificial Sequence: Synthetic peptide
  Seed: LRMKWMMAMKYPITA
LRMKFMMTMKYPATA

SEQ ID NO: 226540 - protein, 15 aa, Artificial Sequence
  Description of Artificial Sequence: Synthetic peptide
  Seed: LRMKWMMAMKYPITA
LRMKFMMTMKYPCTA

SEQ ID NO: 226541 - protein, 15 aa, Artificial Sequence
  Description of Artificial Sequence: Synthetic peptide
  Seed: LRMKWMMAMKYPITA
LRMKFMMTMKYPFTA

SEQ ID NO: 226542 - protein, 15 aa, Artificial Sequence
  Description of Artificial Sequence: Synthetic peptide
  Seed: LRMKWMMAMKYPITA
LRMKFMMTMKYPGTA

SEQ ID NO: 226543 - protein, 15 aa, Artificial Sequence
  Description of Artificial Sequence: Synthetic peptide
  Seed: LRMKWMMAMKYPITA
LRMKFMMTMKYPHTA

SEQ ID NO: 226544 - protein, 15 aa, Artificial Sequence
  Description of Artificial Sequence: Synthetic peptide
  Seed: LRMKWMMAMKYPITA
LRMKFMMTMKYPITA

SEQ ID NO: 226545 - protein, 15 aa, Artificial Sequence
  Description of Artificial Sequence: Synthetic peptide
  Seed: LRMKWMMAMKYPITA
LRMKFMMTMKYPKTA

SEQ ID NO: 226546 - protein, 15 aa, Artificial Sequence
  Description of Artificial Sequence: Synthetic peptide
  Seed: LRMKWMMAMKYPITA
LRMKFMMTMKYPLTA

SEQ ID NO: 226547 - protein, 15 aa, Artificial Sequence
  Description of Artificial Sequence: Synthetic peptide
  Seed: LRMKWMMAMKYPITA
LRMKFMMTMKYPMTA

SEQ ID NO: 226548 - protein, 15 aa, Artificial Sequence
  Description of Artificial Sequence: Synthetic peptide
  Seed: LRMKWMMAMKYPITA
LRMKFMMTMKYPNTA

SEQ ID NO: 226549 - protein, 15 aa, Artificial Sequence
  Description of Artificial Sequence: Synthetic peptide
  Seed: LRMKWMMAMKYPITA
LRMKFMMTMKYPPTA

SEQ ID NO: 226550 - protein, 15 aa, Artificial Sequence
  Description of Artificial Sequence: Synthetic peptide
  Seed: LRMKWMMAMKYPITA
LRMKFMMTMKYPQTA

SEQ ID NO: 226551 - protein, 15 aa, Artificial Sequence
  Description of Artificial Sequence: Synthetic peptide
  Seed: LRMKWMMAMKYPITA
LRMKFMMTMKYPRTA

SEQ ID NO: 226552 - protein, 15 aa, Artificial Sequence
  Description of Artificial Sequence: Synthetic peptide
  Seed: LRMKWMMAMKYPITA
LRMKFMMTMKYPSTA

SEQ ID NO: 226553 - protein, 15 aa, Artificial Sequence
  Description of Artificial Sequence: Synthetic peptide
  Seed: LRMKWMMAMKYPITA
LRMKFMMTMKYPTTA

SEQ ID NO: 226554 - protein, 15 aa, Artificial Sequence
  Description of Artificial Sequence: Synthetic peptide
  Seed: LRMKWMMAMKYPITA
LRMKFMMTMKYPVTA

SEQ ID NO: 226555 - protein, 15 aa, Artificial Sequence
  Description of Artificial Sequence: Synthetic peptide
  Seed: LRMKWMMAMKYPITA
LRMKFMMTMKYPWTA

SEQ ID NO: 226556 - protein, 15 aa, Artificial Sequence
  Description of Artificial Sequence: Synthetic peptide
  Seed: LRMKWMMAMKYPITA
LRMKFMMTMKYPYTA

SEQ ID NO: 226557 - protein, 15 aa, Artificial Sequence
  Description of Artificial Sequence: Synthetic peptide
  Seed: LRMKWMMAMKYPITA
LRMKFMMTMLYPATA

SEQ ID NO: 226558 - protein, 15 aa, Artificial Sequence
  Description of Artificial Sequence: Synthetic peptide
  Seed: LRMKWMMAMKYPITA
LRMKFMMTMLYPCTA

SEQ ID NO: 226559 - protein, 15 aa, Artificial Sequence
  Description of Artificial Sequence: Synthetic peptide
  Seed: LRMKWMMAMKYPITA
LRMKFMMTMLYPDTA

SEQ ID NO: 226560 - protein, 15 aa, Artificial Sequence
  Description of Artificial Sequence: Synthetic peptide
  Seed: LRMKWMMAMKYPITA
LRMKFMMTMLYPFTA

SEQ ID NO: 226561 - protein, 15 aa, Artificial Sequence
  Description of Artificial Sequence: Synthetic peptide
  Seed: LRMKWMMAMKYPITA
LRMKFMMTMLYPGTA

SEQ ID NO: 226562 - protein, 15 aa, Artificial Sequence
  Description of Artificial Sequence: Synthetic peptide
  Seed: LRMKWMMAMKYPITA
LRMKFMMTMLYPITA

SEQ ID NO: 226563 - protein, 15 aa, Artificial Sequence
  Description of Artificial Sequence: Synthetic peptide
  Seed: LRMKWMMAMKYPITA
LRMKFMMTMLYPLTA

SEQ ID NO: 226564 - protein, 15 aa, Artificial Sequence
  Description of Artificial Sequence: Synthetic peptide
  Seed: LRMKWMMAMKYPITA
LRMKFMMTMLYPMTA

SEQ ID NO: 226565 - protein, 15 aa, Artificial Sequence
  Description of Artificial Sequence: Synthetic peptide
  Seed: LRMKWMMAMKYPITA
LRMKFMMTMLYPSTA

SEQ ID NO: 226566 - protein, 15 aa, Artificial Sequence
  Description of Artificial Sequence: Synthetic peptide
  Seed: LRMKWMMAMKYPITA
LRMKFMMTMLYPTTA

SEQ ID NO: 226567 - protein, 15 aa, Artificial Sequence
  Description of Artificial Sequence: Synthetic peptide
  Seed: LRMKWMMAMKYPITA
LRMKFMMTMLYPVTA

SEQ ID NO: 226568 - protein, 15 aa, Artificial Sequence
  Description of Artificial Sequence: Synthetic peptide
  Seed: LRMKWMMAMKYPITA
LRMKFMMTMLYPYTA

SEQ ID NO: 226569 - protein, 15 aa, Artificial Sequence
  Description of Artificial Sequence: Synthetic peptide
  Seed: LRMKWMMAMKYPITA
LRMKFMMTMMYPATA

SEQ ID NO: 226570 - protein, 15 aa, Artificial Sequence
  Description of Artificial Sequence: Synthetic peptide
  Seed: LRMKWMMAMKYPITA
LRMKFMMTMMYPCTA

SEQ ID NO: 226571 - protein, 15 aa, Artificial Sequence
  Description of Artificial Sequence: Synthetic peptide
  Seed: LRMKWMMAMKYPITA
LRMKFMMTMMYPDTA

SEQ ID NO: 226572 - protein, 15 aa, Artificial Sequence
  Description of Artificial Sequence: Synthetic peptide
  Seed: LRMKWMMAMKYPITA
LRMKFMMTMMYPFTA

SEQ ID NO: 226573 - protein, 15 aa, Artificial Sequence
  Description of Artificial Sequence: Synthetic peptide
  Seed: LRMKWMMAMKYPITA
LRMKFMMTMMYPGTA

SEQ ID NO: 226574 - protein, 15 aa, Artificial Sequence
  Description of Artificial Sequence: Synthetic peptide
  Seed: LRMKWMMAMKYPITA
LRMKFMMTMMYPITA

SEQ ID NO: 226575 - protein, 15 aa, Artificial Sequence
  Description of Artificial Sequence: Synthetic peptide
  Seed: LRMKWMMAMKYPITA
LRMKFMMTMMYPLTA

SEQ ID NO: 226576 - protein, 15 aa, Artificial Sequence
  Description of Artificial Sequence: Synthetic peptide
  Seed: LRMKWMMAMKYPITA
LRMKFMMTMMYPMTA

SEQ ID NO: 226577 - protein, 15 aa, Artificial Sequence
  Description of Artificial Sequence: Synthetic peptide
  Seed: LRMKWMMAMKYPITA
LRMKFMMTMMYPRTA

SEQ ID NO: 226578 - protein, 15 aa, Artificial Sequence
  Description of Artificial Sequence: Synthetic peptide
  Seed: LRMKWMMAMKYPITA
LRMKFMMTMMYPSTA

SEQ ID NO: 226579 - protein, 15 aa, Artificial Sequence
  Description of Artificial Sequence: Synthetic peptide
  Seed: LRMKWMMAMKYPITA
LRMKFMMTMMYPTTA

SEQ ID NO: 226580 - protein, 15 aa, Artificial Sequence
  Description of Artificial Sequence: Synthetic peptide
  Seed: LRMKWMMAMKYPITA
LRMKFMMTMMYPVTA

SEQ ID NO: 226581 - protein, 15 aa, Artificial Sequence
  Description of Artificial Sequence: Synthetic peptide
  Seed: LRMKWMMAMKYPITA
LRMKFMMTMMYPYTA

SEQ ID NO: 226582 - protein, 15 aa, Artificial Sequence
  Description of Artificial Sequence: Synthetic peptide
  Seed: LRMKWMMAMKYPITA
LRMKFMMTMNYPATA

SEQ ID NO: 226583 - protein, 15 aa, Artificial Sequence
  Description of Artificial Sequence: Synthetic peptide
  Seed: LRMKWMMAMKYPITA
LRMKFMMTMNYPCTA

SEQ ID NO: 226584 - protein, 15 aa, Artificial Sequence
  Description of Artificial Sequence: Synthetic peptide
  Seed: LRMKWMMAMKYPITA
LRMKFMMTMNYPDTA

SEQ ID NO: 226585 - protein, 15 aa, Artificial Sequence
  Description of Artificial Sequence: Synthetic peptide
  Seed: LRMKWMMAMKYPITA
LRMKFMMTMNYPETA

SEQ ID NO: 226586 - protein, 15 aa, Artificial Sequence
  Description of Artificial Sequence: Synthetic peptide
  Seed: LRMKWMMAMKYPITA
LRMKFMMTMNYPFTA

SEQ ID NO: 226587 - protein, 15 aa, Artificial Sequence
  Description of Artificial Sequence: Synthetic peptide
  Seed: LRMKWMMAMKYPITA
LRMKFMMTMNYPGTA

SEQ ID NO: 226588 - protein, 15 aa, Artificial Sequence
  Description of Artificial Sequence: Synthetic peptide
  Seed: LRMKWMMAMKYPITA
LRMKFMMTMNYPHTA

SEQ ID NO: 226589 - protein, 15 aa, Artificial Sequence
  Description of Artificial Sequence: Synthetic peptide
  Seed: LRMKWMMAMKYPITA
LRMKFMMTMNYPITA

SEQ ID NO: 226590 - protein, 15 aa, Artificial Sequence
  Description of Artificial Sequence: Synthetic peptide
  Seed: LRMKWMMAMKYPITA
LRMKFMMTMNYPKTA

SEQ ID NO: 226591 - protein, 15 aa, Artificial Sequence
  Description of Artificial Sequence: Synthetic peptide
  Seed: LRMKWMMAMKYPITA
LRMKFMMTMNYPLTA

SEQ ID NO: 226592 - protein, 15 aa, Artificial Sequence
  Description of Artificial Sequence: Synthetic peptide
  Seed: LRMKWMMAMKYPITA
LRMKFMMTMNYPMTA

SEQ ID NO: 226593 - protein, 15 aa, Artificial Sequence
  Description of Artificial Sequence: Synthetic peptide
  Seed: LRMKWMMAMKYPITA
LRMKFMMTMNYPNTA

SEQ ID NO: 226594 - protein, 15 aa, Artificial Sequence
  Description of Artificial Sequence: Synthetic peptide
  Seed: LRMKWMMAMKYPITA
LRMKFMMTMNYPPTA

SEQ ID NO: 226595 - protein, 15 aa, Artificial Sequence
  Description of Artificial Sequence: Synthetic peptide
  Seed: LRMKWMMAMKYPITA
LRMKFMMTMNYPQTA

SEQ ID NO: 226596 - protein, 15 aa, Artificial Sequence
  Description of Artificial Sequence: Synthetic peptide
  Seed: LRMKWMMAMKYPITA
LRMKFMMTMNYPRTA

SEQ ID NO: 226597 - protein, 15 aa, Artificial Sequence
  Description of Artificial Sequence: Synthetic peptide
  Seed: LRMKWMMAMKYPITA
LRMKFMMTMNYPSTA

SEQ ID NO: 226598 - protein, 15 aa, Artificial Sequence
  Description of Artificial Sequence: Synthetic peptide
  Seed: LRMKWMMAMKYPITA
LRMKFMMTMNYPTTA

SEQ ID NO: 226599 - protein, 15 aa, Artificial Sequence
  Description of Artificial Sequence: Synthetic peptide
  Seed: LRMKWMMAMKYPITA
LRMKFMMTMNYPVTA

SEQ ID NO: 226600 - protein, 15 aa, Artificial Sequence
  Description of Artificial Sequence: Synthetic peptide
  Seed: LRMKWMMAMKYPITA
LRMKFMMTMNYPWTA

SEQ ID NO: 226601 - protein, 15 aa, Artificial Sequence
  Description of Artificial Sequence: Synthetic peptide
  Seed: LRMKWMMAMKYPITA
LRMKFMMTMNYPYTA

SEQ ID NO: 226602 - protein, 15 aa, Artificial Sequence
  Description of Artificial Sequence: Synthetic peptide
  Seed: LRMKWMMAMKYPITA
LRMKFMMTMPYPATA

SEQ ID NO: 226603 - protein, 15 aa, Artificial Sequence
  Description of Artificial Sequence: Synthetic peptide
  Seed: LRMKWMMAMKYPITA
LRMKFMMTMPYPCTA

SEQ ID NO: 226604 - protein, 15 aa, Artificial Sequence
  Description of Artificial Sequence: Synthetic peptide
  Seed: LRMKWMMAMKYPITA
LRMKFMMTMPYPDTA

SEQ ID NO: 226605 - protein, 15 aa, Artificial Sequence
  Description of Artificial Sequence: Synthetic peptide
  Seed: LRMKWMMAMKYPITA
LRMKFMMTMPYPETA

SEQ ID NO: 226606 - protein, 15 aa, Artificial Sequence
  Description of Artificial Sequence: Synthetic peptide
  Seed: LRMKWMMAMKYPITA
LRMKFMMTMPYPFTA

SEQ ID NO: 226607 - protein, 15 aa, Artificial Sequence
  Description of Artificial Sequence: Synthetic peptide
  Seed: LRMKWMMAMKYPITA
LRMKFMMTMPYPGTA

SEQ ID NO: 226608 - protein, 15 aa, Artificial Sequence
  Description of Artificial Sequence: Synthetic peptide
  Seed: LRMKWMMAMKYPITA
LRMKFMMTMPYPHTA

SEQ ID NO: 226609 - protein, 15 aa, Artificial Sequence
  Description of Artificial Sequence: Synthetic peptide
  Seed: LRMKWMMAMKYPITA
LRMKFMMTMPYPITA

SEQ ID NO: 226610 - protein, 15 aa, Artificial Sequence
  Description of Artificial Sequence: Synthetic peptide
  Seed: LRMKWMMAMKYPITA
LRMKFMMTMPYPKTA

SEQ ID NO: 226611 - protein, 15 aa, Artificial Sequence
  Description of Artificial Sequence: Synthetic peptide
  Seed: LRMKWMMAMKYPITA
LRMKFMMTMPYPLTA

SEQ ID NO: 226612 - protein, 15 aa, Artificial Sequence
  Description of Artificial Sequence: Synthetic peptide
  Seed: LRMKWMMAMKYPITA
LRMKFMMTMPYPMTA

SEQ ID NO: 226613 - protein, 15 aa, Artificial Sequence
  Description of Artificial Sequence: Synthetic peptide
  Seed: LRMKWMMAMKYPITA
LRMKFMMTMPYPNTA

SEQ ID NO: 226614 - protein, 15 aa, Artificial Sequence
  Description of Artificial Sequence: Synthetic peptide
  Seed: LRMKWMMAMKYPITA
LRMKFMMTMPYPPTA

SEQ ID NO: 226615 - protein, 15 aa, Artificial Sequence
  Description of Artificial Sequence: Synthetic peptide
  Seed: LRMKWMMAMKYPITA
LRMKFMMTMPYPQTA

SEQ ID NO: 226616 - protein, 15 aa, Artificial Sequence
  Description of Artificial Sequence: Synthetic peptide
  Seed: LRMKWMMAMKYPITA
LRMKFMMTMPYPRTA

SEQ ID NO: 226617 - protein, 15 aa, Artificial Sequence
  Description of Artificial Sequence: Synthetic peptide
  Seed: LRMKWMMAMKYPITA
LRMKFMMTMPYPSTA

SEQ ID NO: 226618 - protein, 15 aa, Artificial Sequence
  Description of Artificial Sequence: Synthetic peptide
  Seed: LRMKWMMAMKYPITA
LRMKFMMTMPYPTTA

SEQ ID NO: 226619 - protein, 15 aa, Artificial Sequence
  Description of Artificial Sequence: Synthetic peptide
  Seed: LRMKWMMAMKYPITA
LRMKFMMTMPYPVTA

SEQ ID NO: 226620 - protein, 15 aa, Artificial Sequence
  Description of Artificial Sequence: Synthetic peptide
  Seed: LRMKWMMAMKYPITA
LRMKFMMTMPYPWTA

SEQ ID NO: 226621 - protein, 15 aa, Artificial Sequence
  Description of Artificial Sequence: Synthetic peptide
  Seed: LRMKWMMAMKYPITA
LRMKFMMTMPYPYTA

SEQ ID NO: 226622 - protein, 15 aa, Artificial Sequence
  Description of Artificial Sequence: Synthetic peptide
  Seed: LRMKWMMAMKYPITA
LRMKFMMTMQYPATA

SEQ ID NO: 226623 - protein, 15 aa, Artificial Sequence
  Description of Artificial Sequence: Synthetic peptide
  Seed: LRMKWMMAMKYPITA
LRMKFMMTMQYPCTA

SEQ ID NO: 226624 - protein, 15 aa, Artificial Sequence
  Description of Artificial Sequence: Synthetic peptide
  Seed: LRMKWMMAMKYPITA
LRMKFMMTMQYPFTA

SEQ ID NO: 226625 - protein, 15 aa, Artificial Sequence
  Description of Artificial Sequence: Synthetic peptide
  Seed: LRMKWMMAMKYPITA
LRMKFMMTMQYPGTA

SEQ ID NO: 226626 - protein, 15 aa, Artificial Sequence
  Description of Artificial Sequence: Synthetic peptide
  Seed: LRMKWMMAMKYPITA
LRMKFMMTMQYPITA

SEQ ID NO: 226627 - protein, 15 aa, Artificial Sequence
  Description of Artificial Sequence: Synthetic peptide
  Seed: LRMKWMMAMKYPITA
LRMKFMMTMQYPLTA

SEQ ID NO: 226628 - protein, 15 aa, Artificial Sequence
  Description of Artificial Sequence: Synthetic peptide
  Seed: LRMKWMMAMKYPITA
LRMKFMMTMQYPMTA

SEQ ID NO: 226629 - protein, 15 aa, Artificial Sequence
  Description of Artificial Sequence: Synthetic peptide
  Seed: LRMKWMMAMKYPITA
LRMKFMMTMQYPNTA

SEQ ID NO: 226630 - protein, 15 aa, Artificial Sequence
  Description of Artificial Sequence: Synthetic peptide
  Seed: LRMKWMMAMKYPITA
LRMKFMMTMQYPQTA

SEQ ID NO: 226631 - protein, 15 aa, Artificial Sequence
  Description of Artificial Sequence: Synthetic peptide
  Seed: LRMKWMMAMKYPITA
LRMKFMMTMQYPRTA

SEQ ID NO: 226632 - protein, 15 aa, Artificial Sequence
  Description of Artificial Sequence: Synthetic peptide
  Seed: LRMKWMMAMKYPITA
LRMKFMMTMQYPSTA

SEQ ID NO: 226633 - protein, 15 aa, Artificial Sequence
  Description of Artificial Sequence: Synthetic peptide
  Seed: LRMKWMMAMKYPITA
LRMKFMMTMQYPTTA

SEQ ID NO: 226634 - protein, 15 aa, Artificial Sequence
  Description of Artificial Sequence: Synthetic peptide
  Seed: LRMKWMMAMKYPITA
LRMKFMMTMQYPVTA

SEQ ID NO: 226635 - protein, 15 aa, Artificial Sequence
  Description of Artificial Sequence: Synthetic peptide
  Seed: LRMKWMMAMKYPITA
LRMKFMMTMQYPYTA

SEQ ID NO: 226636 - protein, 15 aa, Artificial Sequence
  Description of Artificial Sequence: Synthetic peptide
  Seed: LRMKWMMAMKYPITA
LRMKFMMTMRYPATA

SEQ ID NO: 226637 - protein, 15 aa, Artificial Sequence
  Description of Artificial Sequence: Synthetic peptide
  Seed: LRMKWMMAMKYPITA
LRMKFMMTMRYPCTA

SEQ ID NO: 226638 - protein, 15 aa, Artificial Sequence
  Description of Artificial Sequence: Synthetic peptide
  Seed: LRMKWMMAMKYPITA
LRMKFMMTMRYPDTA

SEQ ID NO: 226639 - protein, 15 aa, Artificial Sequence
  Description of Artificial Sequence: Synthetic peptide
  Seed: LRMKWMMAMKYPITA
LRMKFMMTMRYPETA

SEQ ID NO: 226640 - protein, 15 aa, Artificial Sequence
  Description of Artificial Sequence: Synthetic peptide
  Seed: LRMKWMMAMKYPITA
LRMKFMMTMRYPFTA

SEQ ID NO: 226641 - protein, 15 aa, Artificial Sequence
  Description of Artificial Sequence: Synthetic peptide
  Seed: LRMKWMMAMKYPITA
LRMKFMMTMRYPGTA

SEQ ID NO: 226642 - protein, 15 aa, Artificial Sequence
  Description of Artificial Sequence: Synthetic peptide
  Seed: LRMKWMMAMKYPITA
LRMKFMMTMRYPHTA

SEQ ID NO: 226643 - protein, 15 aa, Artificial Sequence
  Description of Artificial Sequence: Synthetic peptide
  Seed: LRMKWMMAMKYPITA
LRMKFMMTMRYPITA

SEQ ID NO: 226644 - protein, 15 aa, Artificial Sequence
  Description of Artificial Sequence: Synthetic peptide
  Seed: LRMKWMMAMKYPITA
LRMKFMMTMRYPKTA

SEQ ID NO: 226645 - protein, 15 aa, Artificial Sequence
  Description of Artificial Sequence: Synthetic peptide
  Seed: LRMKWMMAMKYPITA
LRMKFMMTMRYPLTA

SEQ ID NO: 226646 - protein, 15 aa, Artificial Sequence
  Description of Artificial Sequence: Synthetic peptide
  Seed: LRMKWMMAMKYPITA
LRMKFMMTMRYPMTA

SEQ ID NO: 226647 - protein, 15 aa, Artificial Sequence
  Description of Artificial Sequence: Synthetic peptide
  Seed: LRMKWMMAMKYPITA
LRMKFMMTMRYPNTA

SEQ ID NO: 226648 - protein, 15 aa, Artificial Sequence
  Description of Artificial Sequence: Synthetic peptide
  Seed: LRMKWMMAMKYPITA
LRMKFMMTMRYPPTA

SEQ ID NO: 226649 - protein, 15 aa, Artificial Sequence
  Description of Artificial Sequence: Synthetic peptide
  Seed: LRMKWMMAMKYPITA
LRMKFMMTMRYPQTA

SEQ ID NO: 226650 - protein, 15 aa, Artificial Sequence
  Description of Artificial Sequence: Synthetic peptide
  Seed: LRMKWMMAMKYPITA
LRMKFMMTMRYPRTA

SEQ ID NO: 226651 - protein, 15 aa, Artificial Sequence
  Description of Artificial Sequence: Synthetic peptide
  Seed: LRMKWMMAMKYPITA
LRMKFMMTMRYPSTA

SEQ ID NO: 226652 - protein, 15 aa, Artificial Sequence
  Description of Artificial Sequence: Synthetic peptide
  Seed: LRMKWMMAMKYPITA
LRMKFMMTMRYPTTA

SEQ ID NO: 226653 - protein, 15 aa, Artificial Sequence
  Description of Artificial Sequence: Synthetic peptide
  Seed: LRMKWMMAMKYPITA
LRMKFMMTMRYPVTA

SEQ ID NO: 226654 - protein, 15 aa, Artificial Sequence
  Description of Artificial Sequence: Synthetic peptide
  Seed: LRMKWMMAMKYPITA
LRMKFMMTMRYPWTA

SEQ ID NO: 226655 - protein, 15 aa, Artificial Sequence
  Description of Artificial Sequence: Synthetic peptide
  Seed: LRMKWMMAMKYPITA
LRMKFMMTMRYPYTA

SEQ ID NO: 226656 - protein, 15 aa, Artificial Sequence
  Description of Artificial Sequence: Synthetic peptide
  Seed: LRMKWMMAMKYPITA
LRMKFMMTMSYPATA

SEQ ID NO: 226657 - protein, 15 aa, Artificial Sequence
  Description of Artificial Sequence: Synthetic peptide
  Seed: LRMKWMMAMKYPITA
LRMKFMMTMSYPCTA

SEQ ID NO: 226658 - protein, 15 aa, Artificial Sequence
  Description of Artificial Sequence: Synthetic peptide
  Seed: LRMKWMMAMKYPITA
LRMKFMMTMSYPDTA

SEQ ID NO: 226659 - protein, 15 aa, Artificial Sequence
  Description of Artificial Sequence: Synthetic peptide
  Seed: LRMKWMMAMKYPITA
LRMKFMMTMSYPETA

SEQ ID NO: 226660 - protein, 15 aa, Artificial Sequence
  Description of Artificial Sequence: Synthetic peptide
  Seed: LRMKWMMAMKYPITA
LRMKFMMTMSYPFTA

SEQ ID NO: 226661 - protein, 15 aa, Artificial Sequence
  Description of Artificial Sequence: Synthetic peptide
  Seed: LRMKWMMAMKYPITA
LRMKFMMTMSYPGTA

SEQ ID NO: 226662 - protein, 15 aa, Artificial Sequence
  Description of Artificial Sequence: Synthetic peptide
  Seed: LRMKWMMAMKYPITA
LRMKFMMTMSYPHTA

SEQ ID NO: 226663 - protein, 15 aa, Artificial Sequence
  Description of Artificial Sequence: Synthetic peptide
  Seed: LRMKWMMAMKYPITA
LRMKFMMTMSYPITA

SEQ ID NO: 226664 - protein, 15 aa, Artificial Sequence
  Description of Artificial Sequence: Synthetic peptide
  Seed: LRMKWMMAMKYPITA
LRMKFMMTMSYPKTA

SEQ ID NO: 226665 - protein, 15 aa, Artificial Sequence
  Description of Artificial Sequence: Synthetic peptide
  Seed: LRMKWMMAMKYPITA
LRMKFMMTMSYPLTA

SEQ ID NO: 226666 - protein, 15 aa, Artificial Sequence
  Description of Artificial Sequence: Synthetic peptide
  Seed: LRMKWMMAMKYPITA
LRMKFMMTMSYPMTA

SEQ ID NO: 226667 - protein, 15 aa, Artificial Sequence
  Description of Artificial Sequence: Synthetic peptide
  Seed: LRMKWMMAMKYPITA
LRMKFMMTMSYPNTA

SEQ ID NO: 226668 - protein, 15 aa, Artificial Sequence
  Description of Artificial Sequence: Synthetic peptide
  Seed: LRMKWMMAMKYPITA
LRMKFMMTMSYPPTA

SEQ ID NO: 226669 - protein, 15 aa, Artificial Sequence
  Description of Artificial Sequence: Synthetic peptide
  Seed: LRMKWMMAMKYPITA
LRMKFMMTMSYPQTA

SEQ ID NO: 226670 - protein, 15 aa, Artificial Sequence
  Description of Artificial Sequence: Synthetic peptide
  Seed: LRMKWMMAMKYPITA
LRMKFMMTMSYPRTA

SEQ ID NO: 226671 - protein, 15 aa, Artificial Sequence
  Description of Artificial Sequence: Synthetic peptide
  Seed: LRMKWMMAMKYPITA
LRMKFMMTMSYPSTA

SEQ ID NO: 226672 - protein, 15 aa, Artificial Sequence
  Description of Artificial Sequence: Synthetic peptide
  Seed: LRMKWMMAMKYPITA
LRMKFMMTMSYPTTA

SEQ ID NO: 226673 - protein, 15 aa, Artificial Sequence
  Description of Artificial Sequence: Synthetic peptide
  Seed: LRMKWMMAMKYPITA
LRMKFMMTMSYPVTA

SEQ ID NO: 226674 - protein, 15 aa, Artificial Sequence
  Description of Artificial Sequence: Synthetic peptide
  Seed: LRMKWMMAMKYPITA
LRMKFMMTMSYPWTA

SEQ ID NO: 226675 - protein, 15 aa, Artificial Sequence
  Description of Artificial Sequence: Synthetic peptide
  Seed: LRMKWMMAMKYPITA
LRMKFMMTMSYPYTA

SEQ ID NO: 226676 - protein, 15 aa, Artificial Sequence
  Description of Artificial Sequence: Synthetic peptide
  Seed: LRMKWMMAMKYPITA
LRMKFMMTMTYPATA

SEQ ID NO: 226677 - protein, 15 aa, Artificial Sequence
  Description of Artificial Sequence: Synthetic peptide
  Seed: LRMKWMMAMKYPITA
LRMKFMMTMTYPCTA

SEQ ID NO: 226678 - protein, 15 aa, Artificial Sequence
  Description of Artificial Sequence: Synthetic peptide
  Seed: LRMKWMMAMKYPITA
LRMKFMMTMTYPDTA

SEQ ID NO: 226679 - protein, 15 aa, Artificial Sequence
  Description of Artificial Sequence: Synthetic peptide
  Seed: LRMKWMMAMKYPITA
LRMKFMMTMTYPETA

SEQ ID NO: 226680 - protein, 15 aa, Artificial Sequence
  Description of Artificial Sequence: Synthetic peptide
  Seed: LRMKWMMAMKYPITA
LRMKFMMTMTYPFTA

SEQ ID NO: 226681 - protein, 15 aa, Artificial Sequence
  Description of Artificial Sequence: Synthetic peptide
  Seed: LRMKWMMAMKYPITA
LRMKFMMTMTYPGTA

SEQ ID NO: 226682 - protein, 15 aa, Artificial Sequence
  Description of Artificial Sequence: Synthetic peptide
  Seed: LRMKWMMAMKYPITA
LRMKFMMTMTYPHTA

SEQ ID NO: 226683 - protein, 15 aa, Artificial Sequence
  Description of Artificial Sequence: Synthetic peptide
  Seed: LRMKWMMAMKYPITA
LRMKFMMTMTYPITA

SEQ ID NO: 226684 - protein, 15 aa, Artificial Sequence
  Description of Artificial Sequence: Synthetic peptide
  Seed: LRMKWMMAMKYPITA
LRMKFMMTMTYPKTA

SEQ ID NO: 226685 - protein, 15 aa, Artificial Sequence
  Description of Artificial Sequence: Synthetic peptide
  Seed: LRMKWMMAMKYPITA
LRMKFMMTMTYPLTA

SEQ ID NO: 226686 - protein, 15 aa, Artificial Sequence
  Description of Artificial Sequence: Synthetic peptide
  Seed: LRMKWMMAMKYPITA
LRMKFMMTMTYPMTA

SEQ ID NO: 226687 - protein, 15 aa, Artificial Sequence
  Description of Artificial Sequence: Synthetic peptide
  Seed: LRMKWMMAMKYPITA
LRMKFMMTMTYPNTA

SEQ ID NO: 226688 - protein, 15 aa, Artificial Sequence
  Description of Artificial Sequence: Synthetic peptide
  Seed: LRMKWMMAMKYPITA
LRMKFMMTMTYPPTA

SEQ ID NO: 226689 - protein, 15 aa, Artificial Sequence
  Description of Artificial Sequence: Synthetic peptide
  Seed: LRMKWMMAMKYPITA
LRMKFMMTMTYPQTA

SEQ ID NO: 226690 - protein, 15 aa, Artificial Sequence
  Description of Artificial Sequence: Synthetic peptide
  Seed: LRMKWMMAMKYPITA
LRMKFMMTMTYPRTA

SEQ ID NO: 226691 - protein, 15 aa, Artificial Sequence
  Description of Artificial Sequence: Synthetic peptide
  Seed: LRMKWMMAMKYPITA
LRMKFMMTMTYPSTA

SEQ ID NO: 226692 - protein, 15 aa, Artificial Sequence
  Description of Artificial Sequence: Synthetic peptide
  Seed: LRMKWMMAMKYPITA
LRMKFMMTMTYPTTA

SEQ ID NO: 226693 - protein, 15 aa, Artificial Sequence
  Description of Artificial Sequence: Synthetic peptide
  Seed: LRMKWMMAMKYPITA
LRMKFMMTMTYPVTA

SEQ ID NO: 226694 - protein, 15 aa, Artificial Sequence
  Description of Artificial Sequence: Synthetic peptide
  Seed: LRMKWMMAMKYPITA
LRMKFMMTMTYPWTA

SEQ ID NO: 226695 - protein, 15 aa, Artificial Sequence
  Description of Artificial Sequence: Synthetic peptide
  Seed: LRMKWMMAMKYPITA
LRMKFMMTMTYPYTA

SEQ ID NO: 226696 - protein, 15 aa, Artificial Sequence
  Description of Artificial Sequence: Synthetic peptide
  Seed: LRMKWMMAMKYPITA
LRMKFMMTMVYPATA

SEQ ID NO: 226697 - protein, 15 aa, Artificial Sequence
  Description of Artificial Sequence: Synthetic peptide
  Seed: LRMKWMMAMKYPITA
LRMKFMMTMVYPCTA

SEQ ID NO: 226698 - protein, 15 aa, Artificial Sequence
  Description of Artificial Sequence: Synthetic peptide
  Seed: LRMKWMMAMKYPITA
LRMKFMMTMVYPDTA

SEQ ID NO: 226699 - protein, 15 aa, Artificial Sequence
  Description of Artificial Sequence: Synthetic peptide
  Seed: LRMKWMMAMKYPITA
LRMKFMMTMVYPETA

SEQ ID NO: 226700 - protein, 15 aa, Artificial Sequence
  Description of Artificial Sequence: Synthetic peptide
  Seed: LRMKWMMAMKYPITA
LRMKFMMTMVYPFTA

SEQ ID NO: 226701 - protein, 15 aa, Artificial Sequence
  Description of Artificial Sequence: Synthetic peptide
  Seed: LRMKWMMAMKYPITA
LRMKFMMTMVYPGTA

SEQ ID NO: 226702 - protein, 15 aa, Artificial Sequence
  Description of Artificial Sequence: Synthetic peptide
  Seed: LRMKWMMAMKYPITA
LRMKFMMTMVYPHTA

SEQ ID NO: 226703 - protein, 15 aa, Artificial Sequence
  Description of Artificial Sequence: Synthetic peptide
  Seed: LRMKWMMAMKYPITA
LRMKFMMTMVYPITA

SEQ ID NO: 226704 - protein, 15 aa, Artificial Sequence
  Description of Artificial Sequence: Synthetic peptide
  Seed: LRMKWMMAMKYPITA
LRMKFMMTMVYPKTA

SEQ ID NO: 226705 - protein, 15 aa, Artificial Sequence
  Description of Artificial Sequence: Synthetic peptide
  Seed: LRMKWMMAMKYPITA
LRMKFMMTMVYPLTA

SEQ ID NO: 226706 - protein, 15 aa, Artificial Sequence
  Description of Artificial Sequence: Synthetic peptide
  Seed: LRMKWMMAMKYPITA
LRMKFMMTMVYPMTA

SEQ ID NO: 226707 - protein, 15 aa, Artificial Sequence
  Description of Artificial Sequence: Synthetic peptide
  Seed: LRMKWMMAMKYPITA
LRMKFMMTMVYPNTA

SEQ ID NO: 226708 - protein, 15 aa, Artificial Sequence
  Description of Artificial Sequence: Synthetic peptide
  Seed: LRMKWMMAMKYPITA
LRMKFMMTMVYPPTA

SEQ ID NO: 226709 - protein, 15 aa, Artificial Sequence
  Description of Artificial Sequence: Synthetic peptide
  Seed: LRMKWMMAMKYPITA
LRMKFMMTMVYPQTA

SEQ ID NO: 226710 - protein, 15 aa, Artificial Sequence
  Description of Artificial Sequence: Synthetic peptide
  Seed: LRMKWMMAMKYPITA
LRMKFMMTMVYPRTA

SEQ ID NO: 226711 - protein, 15 aa, Artificial Sequence
  Description of Artificial Sequence: Synthetic peptide
  Seed: LRMKWMMAMKYPITA
LRMKFMMTMVYPSTA

SEQ ID NO: 226712 - protein, 15 aa, Artificial Sequence
  Description of Artificial Sequence: Synthetic peptide
  Seed: LRMKWMMAMKYPITA
LRMKFMMTMVYPTTA

SEQ ID NO: 226713 - protein, 15 aa, Artificial Sequence
  Description of Artificial Sequence: Synthetic peptide
  Seed: LRMKWMMAMKYPITA
LRMKFMMTMVYPVTA

SEQ ID NO: 226714 - protein, 15 aa, Artificial Sequence
  Description of Artificial Sequence: Synthetic peptide
  Seed: LRMKWMMAMKYPITA
LRMKFMMTMVYPYTA

SEQ ID NO: 226715 - protein, 15 aa, Artificial Sequence
  Description of Artificial Sequence: Synthetic peptide
  Seed: LRMKWMMAMKYPITA
LRMKFMMTMWYPATA

SEQ ID NO: 226716 - protein, 15 aa, Artificial Sequence
  Description of Artificial Sequence: Synthetic peptide
  Seed: LRMKWMMAMKYPITA
LRMKFMMTMWYPFTA

SEQ ID NO: 226717 - protein, 15 aa, Artificial Sequence
  Description of Artificial Sequence: Synthetic peptide
  Seed: LRMKWMMAMKYPITA
LRMKFMMTMWYPITA

SEQ ID NO: 226718 - protein, 15 aa, Artificial Sequence
  Description of Artificial Sequence: Synthetic peptide
  Seed: LRMKWMMAMKYPITA
LRMKFMMTMWYPLTA

SEQ ID NO: 226719 - protein, 15 aa, Artificial Sequence
  Description of Artificial Sequence: Synthetic peptide
  Seed: LRMKWMMAMKYPITA
LRMKFMMTMWYPMTA

SEQ ID NO: 226720 - protein, 15 aa, Artificial Sequence
  Description of Artificial Sequence: Synthetic peptide
  Seed: LRMKWMMAMKYPITA
LRMKFMMTMWYPNTA

SEQ ID NO: 226721 - protein, 15 aa, Artificial Sequence
  Description of Artificial Sequence: Synthetic peptide
  Seed: LRMKWMMAMKYPITA
LRMKFMMTMWYPSTA

SEQ ID NO: 226722 - protein, 15 aa, Artificial Sequence
  Description of Artificial Sequence: Synthetic peptide
  Seed: LRMKWMMAMKYPITA
LRMKFMMTMWYPTTA

SEQ ID NO: 226723 - protein, 15 aa, Artificial Sequence
  Description of Artificial Sequence: Synthetic peptide
  Seed: LRMKWMMAMKYPITA
LRMKFMMTMWYPVTA

SEQ ID NO: 226724 - protein, 15 aa, Artificial Sequence
  Description of Artificial Sequence: Synthetic peptide
  Seed: LRMKWMMAMKYPITA
LRMKFMMTMWYPYTA

SEQ ID NO: 226725 - protein, 15 aa, Artificial Sequence
  Description of Artificial Sequence: Synthetic peptide
  Seed: LRMKWMMAMKYPITA
LRMKFMMTMYYPATA

SEQ ID NO: 226726 - protein, 15 aa, Artificial Sequence
  Description of Artificial Sequence: Synthetic peptide
  Seed: LRMKWMMAMKYPITA
LRMKFMMTMYYPDTA

SEQ ID NO: 226727 - protein, 15 aa, Artificial Sequence
  Description of Artificial Sequence: Synthetic peptide
  Seed: LRMKWMMAMKYPITA
LRMKFMMTMYYPETA

SEQ ID NO: 226728 - protein, 15 aa, Artificial Sequence
  Description of Artificial Sequence: Synthetic peptide
  Seed: LRMKWMMAMKYPITA
LRMKFMMTMYYPFTA

SEQ ID NO: 226729 - protein, 15 aa, Artificial Sequence
  Description of Artificial Sequence: Synthetic peptide
  Seed: LRMKWMMAMKYPITA
LRMKFMMTMYYPITA

SEQ ID NO: 226730 - protein, 15 aa, Artificial Sequence
  Description of Artificial Sequence: Synthetic peptide
  Seed: LRMKWMMAMKYPITA
LRMKFMMTMYYPLTA

SEQ ID NO: 226731 - protein, 15 aa, Artificial Sequence
  Description of Artificial Sequence: Synthetic peptide
  Seed: LRMKWMMAMKYPITA
LRMKFMMTMYYPMTA

SEQ ID NO: 226732 - protein, 15 aa, Artificial Sequence
  Description of Artificial Sequence: Synthetic peptide
  Seed: LRMKWMMAMKYPITA
LRMKFMMTMYYPNTA

SEQ ID NO: 226733 - protein, 15 aa, Artificial Sequence
  Description of Artificial Sequence: Synthetic peptide
  Seed: LRMKWMMAMKYPITA
LRMKFMMTMYYPSTA

SEQ ID NO: 226734 - protein, 15 aa, Artificial Sequence
  Description of Artificial Sequence: Synthetic peptide
  Seed: LRMKWMMAMKYPITA
LRMKFMMTMYYPTTA

SEQ ID NO: 226735 - protein, 15 aa, Artificial Sequence
  Description of Artificial Sequence: Synthetic peptide
  Seed: LRMKWMMAMKYPITA
LRMKFMMTMYYPVTA

SEQ ID NO: 226736 - protein, 15 aa, Artificial Sequence
  Description of Artificial Sequence: Synthetic peptide
  Seed: LRMKWMMAMKYPITA
LRMKFMMTMYYPYTA

SEQ ID NO: 226737 - protein, 15 aa, Artificial Sequence
  Description of Artificial Sequence: Synthetic peptide
  Seed: LRMKWMMAMKYPITA
LRMKFMMVMAYPATA

SEQ ID NO: 226738 - protein, 15 aa, Artificial Sequence
  Description of Artificial Sequence: Synthetic peptide
  Seed: LRMKWMMAMKYPITA
LRMKFMMVMAYPCTA

SEQ ID NO: 226739 - protein, 15 aa, Artificial Sequence
  Description of Artificial Sequence: Synthetic peptide
  Seed: LRMKWMMAMKYPITA
LRMKFMMVMAYPDTA

SEQ ID NO: 226740 - protein, 15 aa, Artificial Sequence
  Description of Artificial Sequence: Synthetic peptide
  Seed: LRMKWMMAMKYPITA
LRMKFMMVMAYPETA

SEQ ID NO: 226741 - protein, 15 aa, Artificial Sequence
  Description of Artificial Sequence: Synthetic peptide
  Seed: LRMKWMMAMKYPITA
LRMKFMMVMAYPFTA

SEQ ID NO: 226742 - protein, 15 aa, Artificial Sequence
  Description of Artificial Sequence: Synthetic peptide
  Seed: LRMKWMMAMKYPITA
LRMKFMMVMAYPGTA

SEQ ID NO: 226743 - protein, 15 aa, Artificial Sequence
  Description of Artificial Sequence: Synthetic peptide
  Seed: LRMKWMMAMKYPITA
LRMKFMMVMAYPHTA

SEQ ID NO: 226744 - protein, 15 aa, Artificial Sequence
  Description of Artificial Sequence: Synthetic peptide
  Seed: LRMKWMMAMKYPITA
LRMKFMMVMAYPITA

SEQ ID NO: 226745 - protein, 15 aa, Artificial Sequence
  Description of Artificial Sequence: Synthetic peptide
  Seed: LRMKWMMAMKYPITA
LRMKFMMVMAYPKTA

SEQ ID NO: 226746 - protein, 15 aa, Artificial Sequence
  Description of Artificial Sequence: Synthetic peptide
  Seed: LRMKWMMAMKYPITA
LRMKFMMVMAYPLTA

SEQ ID NO: 226747 - protein, 15 aa, Artificial Sequence
  Description of Artificial Sequence: Synthetic peptide
  Seed: LRMKWMMAMKYPITA
LRMKFMMVMAYPMTA

SEQ ID NO: 226748 - protein, 15 aa, Artificial Sequence
  Description of Artificial Sequence: Synthetic peptide
  Seed: LRMKWMMAMKYPITA
LRMKFMMVMAYPNTA

SEQ ID NO: 226749 - protein, 15 aa, Artificial Sequence
  Description of Artificial Sequence: Synthetic peptide
  Seed: LRMKWMMAMKYPITA
LRMKFMMVMAYPPTA

SEQ ID NO: 226750 - protein, 15 aa, Artificial Sequence
  Description of Artificial Sequence: Synthetic peptide
  Seed: LRMKWMMAMKYPITA
LRMKFMMVMAYPQTA

SEQ ID NO: 226751 - protein, 15 aa, Artificial Sequence
  Description of Artificial Sequence: Synthetic peptide
  Seed: LRMKWMMAMKYPITA
LRMKFMMVMAYPRTA

SEQ ID NO: 226752 - protein, 15 aa, Artificial Sequence
  Description of Artificial Sequence: Synthetic peptide
  Seed: LRMKWMMAMKYPITA
LRMKFMMVMAYPSTA

SEQ ID NO: 226753 - protein, 15 aa, Artificial Sequence
  Description of Artificial Sequence: Synthetic peptide
  Seed: LRMKWMMAMKYPITA
LRMKFMMVMAYPTTA

SEQ ID NO: 226754 - protein, 15 aa, Artificial Sequence
  Description of Artificial Sequence: Synthetic peptide
  Seed: LRMKWMMAMKYPITA
LRMKFMMVMAYPVTA

SEQ ID NO: 226755 - protein, 15 aa, Artificial Sequence
  Description of Artificial Sequence: Synthetic peptide
  Seed: LRMKWMMAMKYPITA
LRMKFMMVMAYPWTA

SEQ ID NO: 226756 - protein, 15 aa, Artificial Sequence
  Description of Artificial Sequence: Synthetic peptide
  Seed: LRMKWMMAMKYPITA
LRMKFMMVMAYPYTA

SEQ ID NO: 226757 - protein, 15 aa, Artificial Sequence
  Description of Artificial Sequence: Synthetic peptide
  Seed: LRMKWMMAMKYPITA
LRMKFMMVMCYPATA

SEQ ID NO: 226758 - protein, 15 aa, Artificial Sequence
  Description of Artificial Sequence: Synthetic peptide
  Seed: LRMKWMMAMKYPITA
LRMKFMMVMCYPGTA

SEQ ID NO: 226759 - protein, 15 aa, Artificial Sequence
  Description of Artificial Sequence: Synthetic peptide
  Seed: LRMKWMMAMKYPITA
LRMKFMMVMCYPHTA

SEQ ID NO: 226760 - protein, 15 aa, Artificial Sequence
  Description of Artificial Sequence: Synthetic peptide
  Seed: LRMKWMMAMKYPITA
LRMKFMMVMCYPITA

SEQ ID NO: 226761 - protein, 15 aa, Artificial Sequence
  Description of Artificial Sequence: Synthetic peptide
  Seed: LRMKWMMAMKYPITA
LRMKFMMVMCYPLTA

SEQ ID NO: 226762 - protein, 15 aa, Artificial Sequence
  Description of Artificial Sequence: Synthetic peptide
  Seed: LRMKWMMAMKYPITA
LRMKFMMVMCYPMTA

SEQ ID NO: 226763 - protein, 15 aa, Artificial Sequence
  Description of Artificial Sequence: Synthetic peptide
  Seed: LRMKWMMAMKYPITA
LRMKFMMVMCYPNTA

SEQ ID NO: 226764 - protein, 15 aa, Artificial Sequence
  Description of Artificial Sequence: Synthetic peptide
  Seed: LRMKWMMAMKYPITA
LRMKFMMVMCYPQTA

SEQ ID NO: 226765 - protein, 15 aa, Artificial Sequence
  Description of Artificial Sequence: Synthetic peptide
  Seed: LRMKWMMAMKYPITA
LRMKFMMVMCYPSTA

SEQ ID NO: 226766 - protein, 15 aa, Artificial Sequence
  Description of Artificial Sequence: Synthetic peptide
  Seed: LRMKWMMAMKYPITA
LRMKFMMVMCYPTTA

SEQ ID NO: 226767 - protein, 15 aa, Artificial Sequence
  Description of Artificial Sequence: Synthetic peptide
  Seed: LRMKWMMAMKYPITA
LRMKFMMVMCYPVTA

SEQ ID NO: 226768 - protein, 15 aa, Artificial Sequence
  Description of Artificial Sequence: Synthetic peptide
  Seed: LRMKWMMAMKYPITA
LRMKFMMVMDYPATA

SEQ ID NO: 226769 - protein, 15 aa, Artificial Sequence
  Description of Artificial Sequence: Synthetic peptide
  Seed: LRMKWMMAMKYPITA
LRMKFMMVMDYPDTA

SEQ ID NO: 226770 - protein, 15 aa, Artificial Sequence
  Description of Artificial Sequence: Synthetic peptide
  Seed: LRMKWMMAMKYPITA
LRMKFMMVMDYPETA

SEQ ID NO: 226771 - protein, 15 aa, Artificial Sequence
  Description of Artificial Sequence: Synthetic peptide
  Seed: LRMKWMMAMKYPITA
LRMKFMMVMDYPGTA

SEQ ID NO: 226772 - protein, 15 aa, Artificial Sequence
  Description of Artificial Sequence: Synthetic peptide
  Seed: LRMKWMMAMKYPITA
LRMKFMMVMDYPHTA

SEQ ID NO: 226773 - protein, 15 aa, Artificial Sequence
  Description of Artificial Sequence: Synthetic peptide
  Seed: LRMKWMMAMKYPITA
LRMKFMMVMDYPITA

SEQ ID NO: 226774 - protein, 15 aa, Artificial Sequence
  Description of Artificial Sequence: Synthetic peptide
  Seed: LRMKWMMAMKYPITA
LRMKFMMVMDYPLTA

SEQ ID NO: 226775 - protein, 15 aa, Artificial Sequence
  Description of Artificial Sequence: Synthetic peptide
  Seed: LRMKWMMAMKYPITA
LRMKFMMVMDYPMTA

SEQ ID NO: 226776 - protein, 15 aa, Artificial Sequence
  Description of Artificial Sequence: Synthetic peptide
  Seed: LRMKWMMAMKYPITA
LRMKFMMVMDYPNTA

SEQ ID NO: 226777 - protein, 15 aa, Artificial Sequence
  Description of Artificial Sequence: Synthetic peptide
  Seed: LRMKWMMAMKYPITA
LRMKFMMVMDYPQTA

SEQ ID NO: 226778 - protein, 15 aa, Artificial Sequence
  Description of Artificial Sequence: Synthetic peptide
  Seed: LRMKWMMAMKYPITA
LRMKFMMVMDYPSTA

SEQ ID NO: 226779 - protein, 15 aa, Artificial Sequence
  Description of Artificial Sequence: Synthetic peptide
  Seed: LRMKWMMAMKYPITA
LRMKFMMVMDYPTTA

SEQ ID NO: 226780 - protein, 15 aa, Artificial Sequence
  Description of Artificial Sequence: Synthetic peptide
  Seed: LRMKWMMAMKYPITA
LRMKFMMVMDYPVTA

SEQ ID NO: 226781 - protein, 15 aa, Artificial Sequence
  Description of Artificial Sequence: Synthetic peptide
  Seed: LRMKWMMAMKYPITA
LRMKFMMVMEYPATA

SEQ ID NO: 226782 - protein, 15 aa, Artificial Sequence
  Description of Artificial Sequence: Synthetic peptide
  Seed: LRMKWMMAMKYPITA
LRMKFMMVMEYPFTA

SEQ ID NO: 226783 - protein, 15 aa, Artificial Sequence
  Description of Artificial Sequence: Synthetic peptide
  Seed: LRMKWMMAMKYPITA
LRMKFMMVMEYPGTA

SEQ ID NO: 226784 - protein, 15 aa, Artificial Sequence
  Description of Artificial Sequence: Synthetic peptide
  Seed: LRMKWMMAMKYPITA
LRMKFMMVMEYPHTA

SEQ ID NO: 226785 - protein, 15 aa, Artificial Sequence
  Description of Artificial Sequence: Synthetic peptide
  Seed: LRMKWMMAMKYPITA
LRMKFMMVMEYPITA

SEQ ID NO: 226786 - protein, 15 aa, Artificial Sequence
  Description of Artificial Sequence: Synthetic peptide
  Seed: LRMKWMMAMKYPITA
LRMKFMMVMEYPLTA

SEQ ID NO: 226787 - protein, 15 aa, Artificial Sequence
  Description of Artificial Sequence: Synthetic peptide
  Seed: LRMKWMMAMKYPITA
LRMKFMMVMEYPMTA

SEQ ID NO: 226788 - protein, 15 aa, Artificial Sequence
  Description of Artificial Sequence: Synthetic peptide
  Seed: LRMKWMMAMKYPITA
LRMKFMMVMEYPNTA

SEQ ID NO: 226789 - protein, 15 aa, Artificial Sequence
  Description of Artificial Sequence: Synthetic peptide
  Seed: LRMKWMMAMKYPITA
LRMKFMMVMEYPPTA

SEQ ID NO: 226790 - protein, 15 aa, Artificial Sequence
  Description of Artificial Sequence: Synthetic peptide
  Seed: LRMKWMMAMKYPITA
LRMKFMMVMEYPQTA

SEQ ID NO: 226791 - protein, 15 aa, Artificial Sequence
  Description of Artificial Sequence: Synthetic peptide
  Seed: LRMKWMMAMKYPITA
LRMKFMMVMEYPSTA

SEQ ID NO: 226792 - protein, 15 aa, Artificial Sequence
  Description of Artificial Sequence: Synthetic peptide
  Seed: LRMKWMMAMKYPITA
LRMKFMMVMEYPTTA

SEQ ID NO: 226793 - protein, 15 aa, Artificial Sequence
  Description of Artificial Sequence: Synthetic peptide
  Seed: LRMKWMMAMKYPITA
LRMKFMMVMEYPVTA

SEQ ID NO: 226794 - protein, 15 aa, Artificial Sequence
  Description of Artificial Sequence: Synthetic peptide
  Seed: LRMKWMMAMKYPITA
LRMKFMMVMFYPDTA

SEQ ID NO: 226795 - protein, 15 aa, Artificial Sequence
  Description of Artificial Sequence: Synthetic peptide
  Seed: LRMKWMMAMKYPITA
LRMKFMMVMFYPETA

SEQ ID NO: 226796 - protein, 15 aa, Artificial Sequence
  Description of Artificial Sequence: Synthetic peptide
  Seed: LRMKWMMAMKYPITA
LRMKFMMVMFYPFTA

SEQ ID NO: 226797 - protein, 15 aa, Artificial Sequence
  Description of Artificial Sequence: Synthetic peptide
  Seed: LRMKWMMAMKYPITA
LRMKFMMVMFYPITA

SEQ ID NO: 226798 - protein, 15 aa, Artificial Sequence
  Description of Artificial Sequence: Synthetic peptide
  Seed: LRMKWMMAMKYPITA
LRMKFMMVMFYPLTA

SEQ ID NO: 226799 - protein, 15 aa, Artificial Sequence
  Description of Artificial Sequence: Synthetic peptide
  Seed: LRMKWMMAMKYPITA
LRMKFMMVMFYPMTA

SEQ ID NO: 226800 - protein, 15 aa, Artificial Sequence
  Description of Artificial Sequence: Synthetic peptide
  Seed: LRMKWMMAMKYPITA
LRMKFMMVMFYPNTA

SEQ ID NO: 226801 - protein, 15 aa, Artificial Sequence
  Description of Artificial Sequence: Synthetic peptide
  Seed: LRMKWMMAMKYPITA
LRMKFMMVMFYPSTA

SEQ ID NO: 226802 - protein, 15 aa, Artificial Sequence
  Description of Artificial Sequence: Synthetic peptide
  Seed: LRMKWMMAMKYPITA
LRMKFMMVMFYPTTA

SEQ ID NO: 226803 - protein, 15 aa, Artificial Sequence
  Description of Artificial Sequence: Synthetic peptide
  Seed: LRMKWMMAMKYPITA
LRMKFMMVMFYPVTA

SEQ ID NO: 226804 - protein, 15 aa, Artificial Sequence
  Description of Artificial Sequence: Synthetic peptide
  Seed: LRMKWMMAMKYPITA
LRMKFMMVMFYPYTA

SEQ ID NO: 226805 - protein, 15 aa, Artificial Sequence
  Description of Artificial Sequence: Synthetic peptide
  Seed: LRMKWMMAMKYPITA
LRMKFMMVMGYPATA

SEQ ID NO: 226806 - protein, 15 aa, Artificial Sequence
  Description of Artificial Sequence: Synthetic peptide
  Seed: LRMKWMMAMKYPITA
LRMKFMMVMGYPCTA

SEQ ID NO: 226807 - protein, 15 aa, Artificial Sequence
  Description of Artificial Sequence: Synthetic peptide
  Seed: LRMKWMMAMKYPITA
LRMKFMMVMGYPDTA

SEQ ID NO: 226808 - protein, 15 aa, Artificial Sequence
  Description of Artificial Sequence: Synthetic peptide
  Seed: LRMKWMMAMKYPITA
LRMKFMMVMGYPETA

SEQ ID NO: 226809 - protein, 15 aa, Artificial Sequence
  Description of Artificial Sequence: Synthetic peptide
  Seed: LRMKWMMAMKYPITA
LRMKFMMVMGYPFTA

SEQ ID NO: 226810 - protein, 15 aa, Artificial Sequence
  Description of Artificial Sequence: Synthetic peptide
  Seed: LRMKWMMAMKYPITA
LRMKFMMVMGYPGTA

SEQ ID NO: 226811 - protein, 15 aa, Artificial Sequence
  Description of Artificial Sequence: Synthetic peptide
  Seed: LRMKWMMAMKYPITA
LRMKFMMVMGYPHTA

SEQ ID NO: 226812 - protein, 15 aa, Artificial Sequence
  Description of Artificial Sequence: Synthetic peptide
  Seed: LRMKWMMAMKYPITA
LRMKFMMVMGYPITA

SEQ ID NO: 226813 - protein, 15 aa, Artificial Sequence
  Description of Artificial Sequence: Synthetic peptide
  Seed: LRMKWMMAMKYPITA
LRMKFMMVMGYPKTA

SEQ ID NO: 226814 - protein, 15 aa, Artificial Sequence
  Description of Artificial Sequence: Synthetic peptide
  Seed: LRMKWMMAMKYPITA
LRMKFMMVMGYPLTA

SEQ ID NO: 226815 - protein, 15 aa, Artificial Sequence
  Description of Artificial Sequence: Synthetic peptide
  Seed: LRMKWMMAMKYPITA
LRMKFMMVMGYPMTA

SEQ ID NO: 226816 - protein, 15 aa, Artificial Sequence
  Description of Artificial Sequence: Synthetic peptide
  Seed: LRMKWMMAMKYPITA
LRMKFMMVMGYPNTA

SEQ ID NO: 226817 - protein, 15 aa, Artificial Sequence
  Description of Artificial Sequence: Synthetic peptide
  Seed: LRMKWMMAMKYPITA
LRMKFMMVMGYPPTA

SEQ ID NO: 226818 - protein, 15 aa, Artificial Sequence
  Description of Artificial Sequence: Synthetic peptide
  Seed: LRMKWMMAMKYPITA
LRMKFMMVMGYPQTA

SEQ ID NO: 226819 - protein, 15 aa, Artificial Sequence
  Description of Artificial Sequence: Synthetic peptide
  Seed: LRMKWMMAMKYPITA
LRMKFMMVMGYPRTA

SEQ ID NO: 226820 - protein, 15 aa, Artificial Sequence
  Description of Artificial Sequence: Synthetic peptide
  Seed: LRMKWMMAMKYPITA
LRMKFMMVMGYPSTA

SEQ ID NO: 226821 - protein, 15 aa, Artificial Sequence
  Description of Artificial Sequence: Synthetic peptide
  Seed: LRMKWMMAMKYPITA
LRMKFMMVMGYPTTA

SEQ ID NO: 226822 - protein, 15 aa, Artificial Sequence
  Description of Artificial Sequence: Synthetic peptide
  Seed: LRMKWMMAMKYPITA
LRMKFMMVMGYPVTA

SEQ ID NO: 226823 - protein, 15 aa, Artificial Sequence
  Description of Artificial Sequence: Synthetic peptide
  Seed: LRMKWMMAMKYPITA
LRMKFMMVMGYPWTA

SEQ ID NO: 226824 - protein, 15 aa, Artificial Sequence
  Description of Artificial Sequence: Synthetic peptide
  Seed: LRMKWMMAMKYPITA
LRMKFMMVMGYPYTA

SEQ ID NO: 226825 - protein, 15 aa, Artificial Sequence
  Description of Artificial Sequence: Synthetic peptide
  Seed: LRMKWMMAMKYPITA
LRMKFMMVMHYPATA

SEQ ID NO: 226826 - protein, 15 aa, Artificial Sequence
  Description of Artificial Sequence: Synthetic peptide
  Seed: LRMKWMMAMKYPITA
LRMKFMMVMHYPCTA

SEQ ID NO: 226827 - protein, 15 aa, Artificial Sequence
  Description of Artificial Sequence: Synthetic peptide
  Seed: LRMKWMMAMKYPITA
LRMKFMMVMHYPDTA

SEQ ID NO: 226828 - protein, 15 aa, Artificial Sequence
  Description of Artificial Sequence: Synthetic peptide
  Seed: LRMKWMMAMKYPITA
LRMKFMMVMHYPETA

SEQ ID NO: 226829 - protein, 15 aa, Artificial Sequence
  Description of Artificial Sequence: Synthetic peptide
  Seed: LRMKWMMAMKYPITA
LRMKFMMVMHYPFTA

SEQ ID NO: 226830 - protein, 15 aa, Artificial Sequence
  Description of Artificial Sequence: Synthetic peptide
  Seed: LRMKWMMAMKYPITA
LRMKFMMVMHYPGTA

SEQ ID NO: 226831 - protein, 15 aa, Artificial Sequence
  Description of Artificial Sequence: Synthetic peptide
  Seed: LRMKWMMAMKYPITA
LRMKFMMVMHYPHTA

SEQ ID NO: 226832 - protein, 15 aa, Artificial Sequence
  Description of Artificial Sequence: Synthetic peptide
  Seed: LRMKWMMAMKYPITA
LRMKFMMVMHYPITA

SEQ ID NO: 226833 - protein, 15 aa, Artificial Sequence
  Description of Artificial Sequence: Synthetic peptide
  Seed: LRMKWMMAMKYPITA
LRMKFMMVMHYPKTA

SEQ ID NO: 226834 - protein, 15 aa, Artificial Sequence
  Description of Artificial Sequence: Synthetic peptide
  Seed: LRMKWMMAMKYPITA
LRMKFMMVMHYPLTA

SEQ ID NO: 226835 - protein, 15 aa, Artificial Sequence
  Description of Artificial Sequence: Synthetic peptide
  Seed: LRMKWMMAMKYPITA
LRMKFMMVMHYPMTA

SEQ ID NO: 226836 - protein, 15 aa, Artificial Sequence
  Description of Artificial Sequence: Synthetic peptide
  Seed: LRMKWMMAMKYPITA
LRMKFMMVMHYPNTA

SEQ ID NO: 226837 - protein, 15 aa, Artificial Sequence
  Description of Artificial Sequence: Synthetic peptide
  Seed: LRMKWMMAMKYPITA
LRMKFMMVMHYPPTA

SEQ ID NO: 226838 - protein, 15 aa, Artificial Sequence
  Description of Artificial Sequence: Synthetic peptide
  Seed: LRMKWMMAMKYPITA
LRMKFMMVMHYPQTA

SEQ ID NO: 226839 - protein, 15 aa, Artificial Sequence
  Description of Artificial Sequence: Synthetic peptide
  Seed: LRMKWMMAMKYPITA
LRMKFMMVMHYPRTA

SEQ ID NO: 226840 - protein, 15 aa, Artificial Sequence
  Description of Artificial Sequence: Synthetic peptide
  Seed: LRMKWMMAMKYPITA
LRMKFMMVMHYPSTA

SEQ ID NO: 226841 - protein, 15 aa, Artificial Sequence
  Description of Artificial Sequence: Synthetic peptide
  Seed: LRMKWMMAMKYPITA
LRMKFMMVMHYPTTA

SEQ ID NO: 226842 - protein, 15 aa, Artificial Sequence
  Description of Artificial Sequence: Synthetic peptide
  Seed: LRMKWMMAMKYPITA
LRMKFMMVMHYPVTA

SEQ ID NO: 226843 - protein, 15 aa, Artificial Sequence
  Description of Artificial Sequence: Synthetic peptide
  Seed: LRMKWMMAMKYPITA
LRMKFMMVMHYPYTA

SEQ ID NO: 226844 - protein, 15 aa, Artificial Sequence
  Description of Artificial Sequence: Synthetic peptide
  Seed: LRMKWMMAMKYPITA
LRMKFMMVMIYPATA

SEQ ID NO: 226845 - protein, 15 aa, Artificial Sequence
  Description of Artificial Sequence: Synthetic peptide
  Seed: LRMKWMMAMKYPITA
LRMKFMMVMIYPCTA

SEQ ID NO: 226846 - protein, 15 aa, Artificial Sequence
  Description of Artificial Sequence: Synthetic peptide
  Seed: LRMKWMMAMKYPITA
LRMKFMMVMIYPDTA

SEQ ID NO: 226847 - protein, 15 aa, Artificial Sequence
  Description of Artificial Sequence: Synthetic peptide
  Seed: LRMKWMMAMKYPITA
LRMKFMMVMIYPETA

SEQ ID NO: 226848 - protein, 15 aa, Artificial Sequence
  Description of Artificial Sequence: Synthetic peptide
  Seed: LRMKWMMAMKYPITA
LRMKFMMVMIYPGTA

SEQ ID NO: 226849 - protein, 15 aa, Artificial Sequence
  Description of Artificial Sequence: Synthetic peptide
  Seed: LRMKWMMAMKYPITA
LRMKFMMVMIYPHTA

SEQ ID NO: 226850 - protein, 15 aa, Artificial Sequence
  Description of Artificial Sequence: Synthetic peptide
  Seed: LRMKWMMAMKYPITA
LRMKFMMVMIYPITA

SEQ ID NO: 226851 - protein, 15 aa, Artificial Sequence
  Description of Artificial Sequence: Synthetic peptide
  Seed: LRMKWMMAMKYPITA
LRMKFMMVMIYPLTA

SEQ ID NO: 226852 - protein, 15 aa, Artificial Sequence
  Description of Artificial Sequence: Synthetic peptide
  Seed: LRMKWMMAMKYPITA
LRMKFMMVMIYPMTA

SEQ ID NO: 226853 - protein, 15 aa, Artificial Sequence
  Description of Artificial Sequence: Synthetic peptide
  Seed: LRMKWMMAMKYPITA
LRMKFMMVMIYPNTA

SEQ ID NO: 226854 - protein, 15 aa, Artificial Sequence
  Description of Artificial Sequence: Synthetic peptide
  Seed: LRMKWMMAMKYPITA
LRMKFMMVMIYPQTA

SEQ ID NO: 226855 - protein, 15 aa, Artificial Sequence
  Description of Artificial Sequence: Synthetic peptide
  Seed: LRMKWMMAMKYPITA
LRMKFMMVMIYPRTA

SEQ ID NO: 226856 - protein, 15 aa, Artificial Sequence
  Description of Artificial Sequence: Synthetic peptide
  Seed: LRMKWMMAMKYPITA
LRMKFMMVMIYPSTA

SEQ ID NO: 226857 - protein, 15 aa, Artificial Sequence
  Description of Artificial Sequence: Synthetic peptide
  Seed: LRMKWMMAMKYPITA
LRMKFMMVMIYPTTA

SEQ ID NO: 226858 - protein, 15 aa, Artificial Sequence
  Description of Artificial Sequence: Synthetic peptide
  Seed: LRMKWMMAMKYPITA
LRMKFMMVMIYPVTA

SEQ ID NO: 226859 - protein, 15 aa, Artificial Sequence
  Description of Artificial Sequence: Synthetic peptide
  Seed: LRMKWMMAMKYPITA
LRMKFMMVMIYPYTA

SEQ ID NO: 226860 - protein, 15 aa, Artificial Sequence
  Description of Artificial Sequence: Synthetic peptide
  Seed: LRMKWMMAMKYPITA
LRMKFMMVMKYPATA

SEQ ID NO: 226861 - protein, 15 aa, Artificial Sequence
  Description of Artificial Sequence: Synthetic peptide
  Seed: LRMKWMMAMKYPITA
LRMKFMMVMKYPCTA

SEQ ID NO: 226862 - protein, 15 aa, Artificial Sequence
  Description of Artificial Sequence: Synthetic peptide
  Seed: LRMKWMMAMKYPITA
LRMKFMMVMKYPDTA

SEQ ID NO: 226863 - protein, 15 aa, Artificial Sequence
  Description of Artificial Sequence: Synthetic peptide
  Seed: LRMKWMMAMKYPITA
LRMKFMMVMKYPETA

SEQ ID NO: 226864 - protein, 15 aa, Artificial Sequence
  Description of Artificial Sequence: Synthetic peptide
  Seed: LRMKWMMAMKYPITA
LRMKFMMVMKYPFTA

SEQ ID NO: 226865 - protein, 15 aa, Artificial Sequence
  Description of Artificial Sequence: Synthetic peptide
  Seed: LRMKWMMAMKYPITA
LRMKFMMVMKYPGTA

SEQ ID NO: 226866 - protein, 15 aa, Artificial Sequence
  Description of Artificial Sequence: Synthetic peptide
  Seed: LRMKWMMAMKYPITA
LRMKFMMVMKYPHTA

SEQ ID NO: 226867 - protein, 15 aa, Artificial Sequence
  Description of Artificial Sequence: Synthetic peptide
  Seed: LRMKWMMAMKYPITA
LRMKFMMVMKYPITA

SEQ ID NO: 226868 - protein, 15 aa, Artificial Sequence
  Description of Artificial Sequence: Synthetic peptide
  Seed: LRMKWMMAMKYPITA
LRMKFMMVMKYPKTA

SEQ ID NO: 226869 - protein, 15 aa, Artificial Sequence
  Description of Artificial Sequence: Synthetic peptide
  Seed: LRMKWMMAMKYPITA
LRMKFMMVMKYPLTA

SEQ ID NO: 226870 - protein, 15 aa, Artificial Sequence
  Description of Artificial Sequence: Synthetic peptide
  Seed: LRMKWMMAMKYPITA
LRMKFMMVMKYPMTA

SEQ ID NO: 226871 - protein, 15 aa, Artificial Sequence
  Description of Artificial Sequence: Synthetic peptide
  Seed: LRMKWMMAMKYPITA
LRMKFMMVMKYPNTA

SEQ ID NO: 226872 - protein, 15 aa, Artificial Sequence
  Description of Artificial Sequence: Synthetic peptide
  Seed: LRMKWMMAMKYPITA
LRMKFMMVMKYPPTA

SEQ ID NO: 226873 - protein, 15 aa, Artificial Sequence
  Description of Artificial Sequence: Synthetic peptide
  Seed: LRMKWMMAMKYPITA
LRMKFMMVMKYPQTA

SEQ ID NO: 226874 - protein, 15 aa, Artificial Sequence
  Description of Artificial Sequence: Synthetic peptide
  Seed: LRMKWMMAMKYPITA
LRMKFMMVMKYPRTA

SEQ ID NO: 226875 - protein, 15 aa, Artificial Sequence
  Description of Artificial Sequence: Synthetic peptide
  Seed: LRMKWMMAMKYPITA
LRMKFMMVMKYPSTA

SEQ ID NO: 226876 - protein, 15 aa, Artificial Sequence
  Description of Artificial Sequence: Synthetic peptide
  Seed: LRMKWMMAMKYPITA
LRMKFMMVMKYPTTA

SEQ ID NO: 226877 - protein, 15 aa, Artificial Sequence
  Description of Artificial Sequence: Synthetic peptide
  Seed: LRMKWMMAMKYPITA
LRMKFMMVMKYPVTA

SEQ ID NO: 226878 - protein, 15 aa, Artificial Sequence
  Description of Artificial Sequence: Synthetic peptide
  Seed: LRMKWMMAMKYPITA
LRMKFMMVMKYPWTA

SEQ ID NO: 226879 - protein, 15 aa, Artificial Sequence
  Description of Artificial Sequence: Synthetic peptide
  Seed: LRMKWMMAMKYPITA
LRMKFMMVMKYPYTA

SEQ ID NO: 226880 - protein, 15 aa, Artificial Sequence
  Description of Artificial Sequence: Synthetic peptide
  Seed: LRMKWMMAMKYPITA
LRMKFMMVMLYPCTA

SEQ ID NO: 226881 - protein, 15 aa, Artificial Sequence
  Description of Artificial Sequence: Synthetic peptide
  Seed: LRMKWMMAMKYPITA
LRMKFMMVMLYPDTA

SEQ ID NO: 226882 - protein, 15 aa, Artificial Sequence
  Description of Artificial Sequence: Synthetic peptide
  Seed: LRMKWMMAMKYPITA
LRMKFMMVMLYPGTA

SEQ ID NO: 226883 - protein, 15 aa, Artificial Sequence
  Description of Artificial Sequence: Synthetic peptide
  Seed: LRMKWMMAMKYPITA
LRMKFMMVMLYPMTA

SEQ ID NO: 226884 - protein, 15 aa, Artificial Sequence
  Description of Artificial Sequence: Synthetic peptide
  Seed: LRMKWMMAMKYPITA
LRMKFMMVMLYPSTA

SEQ ID NO: 226885 - protein, 15 aa, Artificial Sequence
  Description of Artificial Sequence: Synthetic peptide
  Seed: LRMKWMMAMKYPITA
LRMKFMMVMMYPATA

SEQ ID NO: 226886 - protein, 15 aa, Artificial Sequence
  Description of Artificial Sequence: Synthetic peptide
  Seed: LRMKWMMAMKYPITA
LRMKFMMVMMYPCTA

SEQ ID NO: 226887 - protein, 15 aa, Artificial Sequence
  Description of Artificial Sequence: Synthetic peptide
  Seed: LRMKWMMAMKYPITA
LRMKFMMVMMYPDTA

SEQ ID NO: 226888 - protein, 15 aa, Artificial Sequence
  Description of Artificial Sequence: Synthetic peptide
  Seed: LRMKWMMAMKYPITA
LRMKFMMVMMYPGTA

SEQ ID NO: 226889 - protein, 15 aa, Artificial Sequence
  Description of Artificial Sequence: Synthetic peptide
  Seed: LRMKWMMAMKYPITA
LRMKFMMVMMYPITA

SEQ ID NO: 226890 - protein, 15 aa, Artificial Sequence
  Description of Artificial Sequence: Synthetic peptide
  Seed: LRMKWMMAMKYPITA
LRMKFMMVMMYPLTA

SEQ ID NO: 226891 - protein, 15 aa, Artificial Sequence
  Description of Artificial Sequence: Synthetic peptide
  Seed: LRMKWMMAMKYPITA
LRMKFMMVMMYPMTA

SEQ ID NO: 226892 - protein, 15 aa, Artificial Sequence
  Description of Artificial Sequence: Synthetic peptide
  Seed: LRMKWMMAMKYPITA
LRMKFMMVMMYPRTA

SEQ ID NO: 226893 - protein, 15 aa, Artificial Sequence
  Description of Artificial Sequence: Synthetic peptide
  Seed: LRMKWMMAMKYPITA
LRMKFMMVMMYPSTA

SEQ ID NO: 226894 - protein, 15 aa, Artificial Sequence
  Description of Artificial Sequence: Synthetic peptide
  Seed: LRMKWMMAMKYPITA
LRMKFMMVMMYPVTA

SEQ ID NO: 226895 - protein, 15 aa, Artificial Sequence
  Description of Artificial Sequence: Synthetic peptide
  Seed: LRMKWMMAMKYPITA
LRMKFMMVMNYPATA

SEQ ID NO: 226896 - protein, 15 aa, Artificial Sequence
  Description of Artificial Sequence: Synthetic peptide
  Seed: LRMKWMMAMKYPITA
LRMKFMMVMNYPCTA

SEQ ID NO: 226897 - protein, 15 aa, Artificial Sequence
  Description of Artificial Sequence: Synthetic peptide
  Seed: LRMKWMMAMKYPITA
LRMKFMMVMNYPDTA

SEQ ID NO: 226898 - protein, 15 aa, Artificial Sequence
  Description of Artificial Sequence: Synthetic peptide
  Seed: LRMKWMMAMKYPITA
LRMKFMMVMNYPETA

SEQ ID NO: 226899 - protein, 15 aa, Artificial Sequence
  Description of Artificial Sequence: Synthetic peptide
  Seed: LRMKWMMAMKYPITA
LRMKFMMVMNYPFTA

SEQ ID NO: 226900 - protein, 15 aa, Artificial Sequence
  Description of Artificial Sequence: Synthetic peptide
  Seed: LRMKWMMAMKYPITA
LRMKFMMVMNYPGTA

SEQ ID NO: 226901 - protein, 15 aa, Artificial Sequence
  Description of Artificial Sequence: Synthetic peptide
  Seed: LRMKWMMAMKYPITA
LRMKFMMVMNYPHTA

SEQ ID NO: 226902 - protein, 15 aa, Artificial Sequence
  Description of Artificial Sequence: Synthetic peptide
  Seed: LRMKWMMAMKYPITA
LRMKFMMVMNYPITA

SEQ ID NO: 226903 - protein, 15 aa, Artificial Sequence
  Description of Artificial Sequence: Synthetic peptide
  Seed: LRMKWMMAMKYPITA
LRMKFMMVMNYPKTA

SEQ ID NO: 226904 - protein, 15 aa, Artificial Sequence
  Description of Artificial Sequence: Synthetic peptide
  Seed: LRMKWMMAMKYPITA
LRMKFMMVMNYPLTA

SEQ ID NO: 226905 - protein, 15 aa, Artificial Sequence
  Description of Artificial Sequence: Synthetic peptide
  Seed: LRMKWMMAMKYPITA
LRMKFMMVMNYPMTA

SEQ ID NO: 226906 - protein, 15 aa, Artificial Sequence
  Description of Artificial Sequence: Synthetic peptide
  Seed: LRMKWMMAMKYPITA
LRMKFMMVMNYPNTA

SEQ ID NO: 226907 - protein, 15 aa, Artificial Sequence
  Description of Artificial Sequence: Synthetic peptide
  Seed: LRMKWMMAMKYPITA
LRMKFMMVMNYPPTA

SEQ ID NO: 226908 - protein, 15 aa, Artificial Sequence
  Description of Artificial Sequence: Synthetic peptide
  Seed: LRMKWMMAMKYPITA
LRMKFMMVMNYPQTA

SEQ ID NO: 226909 - protein, 15 aa, Artificial Sequence
  Description of Artificial Sequence: Synthetic peptide
  Seed: LRMKWMMAMKYPITA
LRMKFMMVMNYPRTA

SEQ ID NO: 226910 - protein, 15 aa, Artificial Sequence
  Description of Artificial Sequence: Synthetic peptide
  Seed: LRMKWMMAMKYPITA
LRMKFMMVMNYPSTA

SEQ ID NO: 226911 - protein, 15 aa, Artificial Sequence
  Description of Artificial Sequence: Synthetic peptide
  Seed: LRMKWMMAMKYPITA
LRMKFMMVMNYPTTA

SEQ ID NO: 226912 - protein, 15 aa, Artificial Sequence
  Description of Artificial Sequence: Synthetic peptide
  Seed: LRMKWMMAMKYPITA
LRMKFMMVMNYPVTA

SEQ ID NO: 226913 - protein, 15 aa, Artificial Sequence
  Description of Artificial Sequence: Synthetic peptide
  Seed: LRMKWMMAMKYPITA
LRMKFMMVMNYPWTA

SEQ ID NO: 226914 - protein, 15 aa, Artificial Sequence
  Description of Artificial Sequence: Synthetic peptide
  Seed: LRMKWMMAMKYPITA
LRMKFMMVMNYPYTA

SEQ ID NO: 226915 - protein, 15 aa, Artificial Sequence
  Description of Artificial Sequence: Synthetic peptide
  Seed: LRMKWMMAMKYPITA
LRMKFMMVMPYPATA

SEQ ID NO: 226916 - protein, 15 aa, Artificial Sequence
  Description of Artificial Sequence: Synthetic peptide
  Seed: LRMKWMMAMKYPITA
LRMKFMMVMPYPCTA

SEQ ID NO: 226917 - protein, 15 aa, Artificial Sequence
  Description of Artificial Sequence: Synthetic peptide
  Seed: LRMKWMMAMKYPITA
LRMKFMMVMPYPDTA

SEQ ID NO: 226918 - protein, 15 aa, Artificial Sequence
  Description of Artificial Sequence: Synthetic peptide
  Seed: LRMKWMMAMKYPITA
LRMKFMMVMPYPETA

SEQ ID NO: 226919 - protein, 15 aa, Artificial Sequence
  Description of Artificial Sequence: Synthetic peptide
  Seed: LRMKWMMAMKYPITA
LRMKFMMVMPYPFTA

SEQ ID NO: 226920 - protein, 15 aa, Artificial Sequence
  Description of Artificial Sequence: Synthetic peptide
  Seed: LRMKWMMAMKYPITA
LRMKFMMVMPYPGTA

SEQ ID NO: 226921 - protein, 15 aa, Artificial Sequence
  Description of Artificial Sequence: Synthetic peptide
  Seed: LRMKWMMAMKYPITA
LRMKFMMVMPYPHTA

SEQ ID NO: 226922 - protein, 15 aa, Artificial Sequence
  Description of Artificial Sequence: Synthetic peptide
  Seed: LRMKWMMAMKYPITA
LRMKFMMVMPYPITA

SEQ ID NO: 226923 - protein, 15 aa, Artificial Sequence
  Description of Artificial Sequence: Synthetic peptide
  Seed: LRMKWMMAMKYPITA
LRMKFMMVMPYPKTA

SEQ ID NO: 226924 - protein, 15 aa, Artificial Sequence
  Description of Artificial Sequence: Synthetic peptide
  Seed: LRMKWMMAMKYPITA
LRMKFMMVMPYPLTA

SEQ ID NO: 226925 - protein, 15 aa, Artificial Sequence
  Description of Artificial Sequence: Synthetic peptide
  Seed: LRMKWMMAMKYPITA
LRMKFMMVMPYPMTA

SEQ ID NO: 226926 - protein, 15 aa, Artificial Sequence
  Description of Artificial Sequence: Synthetic peptide
  Seed: LRMKWMMAMKYPITA
LRMKFMMVMPYPNTA

SEQ ID NO: 226927 - protein, 15 aa, Artificial Sequence
  Description of Artificial Sequence: Synthetic peptide
  Seed: LRMKWMMAMKYPITA
LRMKFMMVMPYPPTA

SEQ ID NO: 226928 - protein, 15 aa, Artificial Sequence
  Description of Artificial Sequence: Synthetic peptide
  Seed: LRMKWMMAMKYPITA
LRMKFMMVMPYPQTA

SEQ ID NO: 226929 - protein, 15 aa, Artificial Sequence
  Description of Artificial Sequence: Synthetic peptide
  Seed: LRMKWMMAMKYPITA
LRMKFMMVMPYPRTA

SEQ ID NO: 226930 - protein, 15 aa, Artificial Sequence
  Description of Artificial Sequence: Synthetic peptide
  Seed: LRMKWMMAMKYPITA
LRMKFMMVMPYPSTA

SEQ ID NO: 226931 - protein, 15 aa, Artificial Sequence
  Description of Artificial Sequence: Synthetic peptide
  Seed: LRMKWMMAMKYPITA
LRMKFMMVMPYPTTA

SEQ ID NO: 226932 - protein, 15 aa, Artificial Sequence
  Description of Artificial Sequence: Synthetic peptide
  Seed: LRMKWMMAMKYPITA
LRMKFMMVMPYPVTA

SEQ ID NO: 226933 - protein, 15 aa, Artificial Sequence
  Description of Artificial Sequence: Synthetic peptide
  Seed: LRMKWMMAMKYPITA
LRMKFMMVMPYPWTA

SEQ ID NO: 226934 - protein, 15 aa, Artificial Sequence
  Description of Artificial Sequence: Synthetic peptide
  Seed: LRMKWMMAMKYPITA
LRMKFMMVMPYPYTA

SEQ ID NO: 226935 - protein, 15 aa, Artificial Sequence
  Description of Artificial Sequence: Synthetic peptide
  Seed: LRMKWMMAMKYPITA
LRMKFMMVMQYPATA

SEQ ID NO: 226936 - protein, 15 aa, Artificial Sequence
  Description of Artificial Sequence: Synthetic peptide
  Seed: LRMKWMMAMKYPITA
LRMKFMMVMQYPCTA

SEQ ID NO: 226937 - protein, 15 aa, Artificial Sequence
  Description of Artificial Sequence: Synthetic peptide
  Seed: LRMKWMMAMKYPITA
LRMKFMMVMQYPDTA

SEQ ID NO: 226938 - protein, 15 aa, Artificial Sequence
  Description of Artificial Sequence: Synthetic peptide
  Seed: LRMKWMMAMKYPITA
LRMKFMMVMQYPFTA

SEQ ID NO: 226939 - protein, 15 aa, Artificial Sequence
  Description of Artificial Sequence: Synthetic peptide
  Seed: LRMKWMMAMKYPITA
LRMKFMMVMQYPGTA

SEQ ID NO: 226940 - protein, 15 aa, Artificial Sequence
  Description of Artificial Sequence: Synthetic peptide
  Seed: LRMKWMMAMKYPITA
LRMKFMMVMQYPITA

SEQ ID NO: 226941 - protein, 15 aa, Artificial Sequence
  Description of Artificial Sequence: Synthetic peptide
  Seed: LRMKWMMAMKYPITA
LRMKFMMVMQYPKTA

SEQ ID NO: 226942 - protein, 15 aa, Artificial Sequence
  Description of Artificial Sequence: Synthetic peptide
  Seed: LRMKWMMAMKYPITA
LRMKFMMVMQYPLTA

SEQ ID NO: 226943 - protein, 15 aa, Artificial Sequence
  Description of Artificial Sequence: Synthetic peptide
  Seed: LRMKWMMAMKYPITA
LRMKFMMVMQYPMTA

SEQ ID NO: 226944 - protein, 15 aa, Artificial Sequence
  Description of Artificial Sequence: Synthetic peptide
  Seed: LRMKWMMAMKYPITA
LRMKFMMVMQYPNTA

SEQ ID NO: 226945 - protein, 15 aa, Artificial Sequence
  Description of Artificial Sequence: Synthetic peptide
  Seed: LRMKWMMAMKYPITA
LRMKFMMVMQYPQTA

SEQ ID NO: 226946 - protein, 15 aa, Artificial Sequence
  Description of Artificial Sequence: Synthetic peptide
  Seed: LRMKWMMAMKYPITA
LRMKFMMVMQYPRTA

SEQ ID NO: 226947 - protein, 15 aa, Artificial Sequence
  Description of Artificial Sequence: Synthetic peptide
  Seed: LRMKWMMAMKYPITA
LRMKFMMVMQYPSTA

SEQ ID NO: 226948 - protein, 15 aa, Artificial Sequence
  Description of Artificial Sequence: Synthetic peptide
  Seed: LRMKWMMAMKYPITA
LRMKFMMVMQYPTTA

SEQ ID NO: 226949 - protein, 15 aa, Artificial Sequence
  Description of Artificial Sequence: Synthetic peptide
  Seed: LRMKWMMAMKYPITA
LRMKFMMVMQYPVTA

SEQ ID NO: 226950 - protein, 15 aa, Artificial Sequence
  Description of Artificial Sequence: Synthetic peptide
  Seed: LRMKWMMAMKYPITA
LRMKFMMVMQYPYTA

SEQ ID NO: 226951 - protein, 15 aa, Artificial Sequence
  Description of Artificial Sequence: Synthetic peptide
  Seed: LRMKWMMAMKYPITA
LRMKFMMVMRYPATA

SEQ ID NO: 226952 - protein, 15 aa, Artificial Sequence
  Description of Artificial Sequence: Synthetic peptide
  Seed: LRMKWMMAMKYPITA
LRMKFMMVMRYPCTA

SEQ ID NO: 226953 - protein, 15 aa, Artificial Sequence
  Description of Artificial Sequence: Synthetic peptide
  Seed: LRMKWMMAMKYPITA
LRMKFMMVMRYPDTA

SEQ ID NO: 226954 - protein, 15 aa, Artificial Sequence
  Description of Artificial Sequence: Synthetic peptide
  Seed: LRMKWMMAMKYPITA
LRMKFMMVMRYPETA

SEQ ID NO: 226955 - protein, 15 aa, Artificial Sequence
  Description of Artificial Sequence: Synthetic peptide
  Seed: LRMKWMMAMKYPITA
LRMKFMMVMRYPFTA

SEQ ID NO: 226956 - protein, 15 aa, Artificial Sequence
  Description of Artificial Sequence: Synthetic peptide
  Seed: LRMKWMMAMKYPITA
LRMKFMMVMRYPGTA

SEQ ID NO: 226957 - protein, 15 aa, Artificial Sequence
  Description of Artificial Sequence: Synthetic peptide
  Seed: LRMKWMMAMKYPITA
LRMKFMMVMRYPHTA

SEQ ID NO: 226958 - protein, 15 aa, Artificial Sequence
  Description of Artificial Sequence: Synthetic peptide
  Seed: LRMKWMMAMKYPITA
LRMKFMMVMRYPITA

SEQ ID NO: 226959 - protein, 15 aa, Artificial Sequence
  Description of Artificial Sequence: Synthetic peptide
  Seed: LRMKWMMAMKYPITA
LRMKFMMVMRYPKTA

SEQ ID NO: 226960 - protein, 15 aa, Artificial Sequence
  Description of Artificial Sequence: Synthetic peptide
  Seed: LRMKWMMAMKYPITA
LRMKFMMVMRYPLTA

SEQ ID NO: 226961 - protein, 15 aa, Artificial Sequence
  Description of Artificial Sequence: Synthetic peptide
  Seed: LRMKWMMAMKYPITA
LRMKFMMVMRYPMTA

SEQ ID NO: 226962 - protein, 15 aa, Artificial Sequence
  Description of Artificial Sequence: Synthetic peptide
  Seed: LRMKWMMAMKYPITA
LRMKFMMVMRYPNTA

SEQ ID NO: 226963 - protein, 15 aa, Artificial Sequence
  Description of Artificial Sequence: Synthetic peptide
  Seed: LRMKWMMAMKYPITA
LRMKFMMVMRYPPTA

SEQ ID NO: 226964 - protein, 15 aa, Artificial Sequence
  Description of Artificial Sequence: Synthetic peptide
  Seed: LRMKWMMAMKYPITA
LRMKFMMVMRYPQTA

SEQ ID NO: 226965 - protein, 15 aa, Artificial Sequence
  Description of Artificial Sequence: Synthetic peptide
  Seed: LRMKWMMAMKYPITA
LRMKFMMVMRYPRTA

SEQ ID NO: 226966 - protein, 15 aa, Artificial Sequence
  Description of Artificial Sequence: Synthetic peptide
  Seed: LRMKWMMAMKYPITA
LRMKFMMVMRYPSTA

SEQ ID NO: 226967 - protein, 15 aa, Artificial Sequence
  Description of Artificial Sequence: Synthetic peptide
  Seed: LRMKWMMAMKYPITA
LRMKFMMVMRYPTTA

SEQ ID NO: 226968 - protein, 15 aa, Artificial Sequence
  Description of Artificial Sequence: Synthetic peptide
  Seed: LRMKWMMAMKYPITA
LRMKFMMVMRYPVTA

SEQ ID NO: 226969 - protein, 15 aa, Artificial Sequence
  Description of Artificial Sequence: Synthetic peptide
  Seed: LRMKWMMAMKYPITA
LRMKFMMVMRYPWTA

SEQ ID NO: 226970 - protein, 15 aa, Artificial Sequence
  Description of Artificial Sequence: Synthetic peptide
  Seed: LRMKWMMAMKYPITA
LRMKFMMVMRYPYTA

SEQ ID NO: 226971 - protein, 15 aa, Artificial Sequence
  Description of Artificial Sequence: Synthetic peptide
  Seed: LRMKWMMAMKYPITA
LRMKFMMVMSYPATA

SEQ ID NO: 226972 - protein, 15 aa, Artificial Sequence
  Description of Artificial Sequence: Synthetic peptide
  Seed: LRMKWMMAMKYPITA
LRMKFMMVMSYPCTA

SEQ ID NO: 226973 - protein, 15 aa, Artificial Sequence
  Description of Artificial Sequence: Synthetic peptide
  Seed: LRMKWMMAMKYPITA
LRMKFMMVMSYPDTA

SEQ ID NO: 226974 - protein, 15 aa, Artificial Sequence
  Description of Artificial Sequence: Synthetic peptide
  Seed: LRMKWMMAMKYPITA
LRMKFMMVMSYPETA

SEQ ID NO: 226975 - protein, 15 aa, Artificial Sequence
  Description of Artificial Sequence: Synthetic peptide
  Seed: LRMKWMMAMKYPITA
LRMKFMMVMSYPFTA

SEQ ID NO: 226976 - protein, 15 aa, Artificial Sequence
  Description of Artificial Sequence: Synthetic peptide
  Seed: LRMKWMMAMKYPITA
LRMKFMMVMSYPGTA

SEQ ID NO: 226977 - protein, 15 aa, Artificial Sequence
  Description of Artificial Sequence: Synthetic peptide
  Seed: LRMKWMMAMKYPITA
LRMKFMMVMSYPHTA

SEQ ID NO: 226978 - protein, 15 aa, Artificial Sequence
  Description of Artificial Sequence: Synthetic peptide
  Seed: LRMKWMMAMKYPITA
LRMKFMMVMSYPITA

SEQ ID NO: 226979 - protein, 15 aa, Artificial Sequence
  Description of Artificial Sequence: Synthetic peptide
  Seed: LRMKWMMAMKYPITA
LRMKFMMVMSYPKTA

SEQ ID NO: 226980 - protein, 15 aa, Artificial Sequence
  Description of Artificial Sequence: Synthetic peptide
  Seed: LRMKWMMAMKYPITA
LRMKFMMVMSYPLTA

SEQ ID NO: 226981 - protein, 15 aa, Artificial Sequence
  Description of Artificial Sequence: Synthetic peptide
  Seed: LRMKWMMAMKYPITA
LRMKFMMVMSYPMTA

SEQ ID NO: 226982 - protein, 15 aa, Artificial Sequence
  Description of Artificial Sequence: Synthetic peptide
  Seed: LRMKWMMAMKYPITA
LRMKFMMVMSYPNTA

SEQ ID NO: 226983 - protein, 15 aa, Artificial Sequence
  Description of Artificial Sequence: Synthetic peptide
  Seed: LRMKWMMAMKYPITA
LRMKFMMVMSYPPTA

SEQ ID NO: 226984 - protein, 15 aa, Artificial Sequence
  Description of Artificial Sequence: Synthetic peptide
  Seed: LRMKWMMAMKYPITA
LRMKFMMVMSYPQTA

SEQ ID NO: 226985 - protein, 15 aa, Artificial Sequence
  Description of Artificial Sequence: Synthetic peptide
  Seed: LRMKWMMAMKYPITA
LRMKFMMVMSYPRTA

SEQ ID NO: 226986 - protein, 15 aa, Artificial Sequence
  Description of Artificial Sequence: Synthetic peptide
  Seed: LRMKWMMAMKYPITA
LRMKFMMVMSYPSTA

SEQ ID NO: 226987 - protein, 15 aa, Artificial Sequence
  Description of Artificial Sequence: Synthetic peptide
  Seed: LRMKWMMAMKYPITA
LRMKFMMVMSYPTTA

SEQ ID NO: 226988 - protein, 15 aa, Artificial Sequence
  Description of Artificial Sequence: Synthetic peptide
  Seed: LRMKWMMAMKYPITA
LRMKFMMVMSYPVTA

SEQ ID NO: 226989 - protein, 15 aa, Artificial Sequence
  Description of Artificial Sequence: Synthetic peptide
  Seed: LRMKWMMAMKYPITA
LRMKFMMVMSYPWTA

SEQ ID NO: 226990 - protein, 15 aa, Artificial Sequence
  Description of Artificial Sequence: Synthetic peptide
  Seed: LRMKWMMAMKYPITA
LRMKFMMVMSYPYTA

SEQ ID NO: 226991 - protein, 15 aa, Artificial Sequence
  Description of Artificial Sequence: Synthetic peptide
  Seed: LRMKWMMAMKYPITA
LRMKFMMVMTYPATA

SEQ ID NO: 226992 - protein, 15 aa, Artificial Sequence
  Description of Artificial Sequence: Synthetic peptide
  Seed: LRMKWMMAMKYPITA
LRMKFMMVMTYPCTA

SEQ ID NO: 226993 - protein, 15 aa, Artificial Sequence
  Description of Artificial Sequence: Synthetic peptide
  Seed: LRMKWMMAMKYPITA
LRMKFMMVMTYPDTA

SEQ ID NO: 226994 - protein, 15 aa, Artificial Sequence
  Description of Artificial Sequence: Synthetic peptide
  Seed: LRMKWMMAMKYPITA
LRMKFMMVMTYPETA

SEQ ID NO: 226995 - protein, 15 aa, Artificial Sequence
  Description of Artificial Sequence: Synthetic peptide
  Seed: LRMKWMMAMKYPITA
LRMKFMMVMTYPFTA

SEQ ID NO: 226996 - protein, 15 aa, Artificial Sequence
  Description of Artificial Sequence: Synthetic peptide
  Seed: LRMKWMMAMKYPITA
LRMKFMMVMTYPGTA

SEQ ID NO: 226997 - protein, 15 aa, Artificial Sequence
  Description of Artificial Sequence: Synthetic peptide
  Seed: LRMKWMMAMKYPITA
LRMKFMMVMTYPHTA

SEQ ID NO: 226998 - protein, 15 aa, Artificial Sequence
  Description of Artificial Sequence: Synthetic peptide
  Seed: LRMKWMMAMKYPITA
LRMKFMMVMTYPITA

SEQ ID NO: 226999 - protein, 15 aa, Artificial Sequence
  Description of Artificial Sequence: Synthetic peptide
  Seed: LRMKWMMAMKYPITA
LRMKFMMVMTYPKTA

SEQ ID NO: 227000 - protein, 15 aa, Artificial Sequence
  Description of Artificial Sequence: Synthetic peptide
  Seed: LRMKWMMAMKYPITA
LRMKFMMVMTYPLTA

SEQ ID NO: 227001 - protein, 15 aa, Artificial Sequence
  Description of Artificial Sequence: Synthetic peptide
  Seed: LRMKWMMAMKYPITA
LRMKFMMVMTYPMTA

SEQ ID NO: 227002 - protein, 15 aa, Artificial Sequence
  Description of Artificial Sequence: Synthetic peptide
  Seed: LRMKWMMAMKYPITA
LRMKFMMVMTYPNTA

SEQ ID NO: 227003 - protein, 15 aa, Artificial Sequence
  Description of Artificial Sequence: Synthetic peptide
  Seed: LRMKWMMAMKYPITA
LRMKFMMVMTYPPTA

SEQ ID NO: 227004 - protein, 15 aa, Artificial Sequence
  Description of Artificial Sequence: Synthetic peptide
  Seed: LRMKWMMAMKYPITA
LRMKFMMVMTYPQTA

SEQ ID NO: 227005 - protein, 15 aa, Artificial Sequence
  Description of Artificial Sequence: Synthetic peptide
  Seed: LRMKWMMAMKYPITA
LRMKFMMVMTYPRTA

SEQ ID NO: 227006 - protein, 15 aa, Artificial Sequence
  Description of Artificial Sequence: Synthetic peptide
  Seed: LRMKWMMAMKYPITA
LRMKFMMVMTYPSTA

SEQ ID NO: 227007 - protein, 15 aa, Artificial Sequence
  Description of Artificial Sequence: Synthetic peptide
  Seed: LRMKWMMAMKYPITA
LRMKFMMVMTYPTTA

SEQ ID NO: 227008 - protein, 15 aa, Artificial Sequence
  Description of Artificial Sequence: Synthetic peptide
  Seed: LRMKWMMAMKYPITA
LRMKFMMVMTYPVTA

SEQ ID NO: 227009 - protein, 15 aa, Artificial Sequence
  Description of Artificial Sequence: Synthetic peptide
  Seed: LRMKWMMAMKYPITA
LRMKFMMVMTYPWTA

SEQ ID NO: 227010 - protein, 15 aa, Artificial Sequence
  Description of Artificial Sequence: Synthetic peptide
  Seed: LRMKWMMAMKYPITA
LRMKFMMVMTYPYTA

SEQ ID NO: 227011 - protein, 15 aa, Artificial Sequence
  Description of Artificial Sequence: Synthetic peptide
  Seed: LRMKWMMAMKYPITA
LRMKFMMVMVYPATA

SEQ ID NO: 227012 - protein, 15 aa, Artificial Sequence
  Description of Artificial Sequence: Synthetic peptide
  Seed: LRMKWMMAMKYPITA
LRMKFMMVMVYPCTA

SEQ ID NO: 227013 - protein, 15 aa, Artificial Sequence
  Description of Artificial Sequence: Synthetic peptide
  Seed: LRMKWMMAMKYPITA
LRMKFMMVMVYPDTA

SEQ ID NO: 227014 - protein, 15 aa, Artificial Sequence
  Description of Artificial Sequence: Synthetic peptide
  Seed: LRMKWMMAMKYPITA
LRMKFMMVMVYPETA

SEQ ID NO: 227015 - protein, 15 aa, Artificial Sequence
  Description of Artificial Sequence: Synthetic peptide
  Seed: LRMKWMMAMKYPITA
LRMKFMMVMVYPFTA

SEQ ID NO: 227016 - protein, 15 aa, Artificial Sequence
  Description of Artificial Sequence: Synthetic peptide
  Seed: LRMKWMMAMKYPITA
LRMKFMMVMVYPGTA

SEQ ID NO: 227017 - protein, 15 aa, Artificial Sequence
  Description of Artificial Sequence: Synthetic peptide
  Seed: LRMKWMMAMKYPITA
LRMKFMMVMVYPHTA

SEQ ID NO: 227018 - protein, 15 aa, Artificial Sequence
  Description of Artificial Sequence: Synthetic peptide
  Seed: LRMKWMMAMKYPITA
LRMKFMMVMVYPITA

SEQ ID NO: 227019 - protein, 15 aa, Artificial Sequence
  Description of Artificial Sequence: Synthetic peptide
  Seed: LRMKWMMAMKYPITA
LRMKFMMVMVYPKTA

SEQ ID NO: 227020 - protein, 15 aa, Artificial Sequence
  Description of Artificial Sequence: Synthetic peptide
  Seed: LRMKWMMAMKYPITA
LRMKFMMVMVYPLTA

SEQ ID NO: 227021 - protein, 15 aa, Artificial Sequence
  Description of Artificial Sequence: Synthetic peptide
  Seed: LRMKWMMAMKYPITA
LRMKFMMVMVYPMTA

SEQ ID NO: 227022 - protein, 15 aa, Artificial Sequence
  Description of Artificial Sequence: Synthetic peptide
  Seed: LRMKWMMAMKYPITA
LRMKFMMVMVYPNTA

SEQ ID NO: 227023 - protein, 15 aa, Artificial Sequence
  Description of Artificial Sequence: Synthetic peptide
  Seed: LRMKWMMAMKYPITA
LRMKFMMVMVYPPTA

SEQ ID NO: 227024 - protein, 15 aa, Artificial Sequence
  Description of Artificial Sequence: Synthetic peptide
  Seed: LRMKWMMAMKYPITA
LRMKFMMVMVYPQTA

SEQ ID NO: 227025 - protein, 15 aa, Artificial Sequence
  Description of Artificial Sequence: Synthetic peptide
  Seed: LRMKWMMAMKYPITA
LRMKFMMVMVYPRTA

SEQ ID NO: 227026 - protein, 15 aa, Artificial Sequence
  Description of Artificial Sequence: Synthetic peptide
  Seed: LRMKWMMAMKYPITA
LRMKFMMVMVYPSTA

SEQ ID NO: 227027 - protein, 15 aa, Artificial Sequence
  Description of Artificial Sequence: Synthetic peptide
  Seed: LRMKWMMAMKYPITA
LRMKFMMVMVYPTTA

SEQ ID NO: 227028 - protein, 15 aa, Artificial Sequence
  Description of Artificial Sequence: Synthetic peptide
  Seed: LRMKWMMAMKYPITA
LRMKFMMVMVYPVTA

SEQ ID NO: 227029 - protein, 15 aa, Artificial Sequence
  Description of Artificial Sequence: Synthetic peptide
  Seed: LRMKWMMAMKYPITA
LRMKFMMVMVYPYTA

SEQ ID NO: 227030 - protein, 15 aa, Artificial Sequence
  Description of Artificial Sequence: Synthetic peptide
  Seed: LRMKWMMAMKYPITA
LRMKFMMVMWYPATA

SEQ ID NO: 227031 - protein, 15 aa, Artificial Sequence
  Description of Artificial Sequence: Synthetic peptide
  Seed: LRMKWMMAMKYPITA
LRMKFMMVMWYPMTA

SEQ ID NO: 227032 - protein, 15 aa, Artificial Sequence
  Description of Artificial Sequence: Synthetic peptide
  Seed: LRMKWMMAMKYPITA
LRMKFMMVMWYPNTA

SEQ ID NO: 227033 - protein, 15 aa, Artificial Sequence
  Description of Artificial Sequence: Synthetic peptide
  Seed: LRMKWMMAMKYPITA
LRMKFMMVMWYPSTA

SEQ ID NO: 227034 - protein, 15 aa, Artificial Sequence
  Description of Artificial Sequence: Synthetic peptide
  Seed: LRMKWMMAMKYPITA
LRMKFMMVMWYPVTA

SEQ ID NO: 227035 - protein, 15 aa, Artificial Sequence
  Description of Artificial Sequence: Synthetic peptide
  Seed: LRMKWMMAMKYPITA
LRMKFMMVMYYPATA

SEQ ID NO: 227036 - protein, 15 aa, Artificial Sequence
  Description of Artificial Sequence: Synthetic peptide
  Seed: LRMKWMMAMKYPITA
LRMKFMMVMYYPHTA

SEQ ID NO: 227037 - protein, 15 aa, Artificial Sequence
  Description of Artificial Sequence: Synthetic peptide
  Seed: LRMKWMMAMKYPITA
LRMKFMMVMYYPITA

SEQ ID NO: 227038 - protein, 15 aa, Artificial Sequence
  Description of Artificial Sequence: Synthetic peptide
  Seed: LRMKWMMAMKYPITA
LRMKFMMVMYYPLTA

SEQ ID NO: 227039 - protein, 15 aa, Artificial Sequence
  Description of Artificial Sequence: Synthetic peptide
  Seed: LRMKWMMAMKYPITA
LRMKFMMVMYYPMTA

SEQ ID NO: 227040 - protein, 15 aa, Artificial Sequence
  Description of Artificial Sequence: Synthetic peptide
  Seed: LRMKWMMAMKYPITA
LRMKFMMVMYYPNTA

SEQ ID NO: 227041 - protein, 15 aa, Artificial Sequence
  Description of Artificial Sequence: Synthetic peptide
  Seed: LRMKWMMAMKYPITA
LRMKFMMVMYYPQTA

SEQ ID NO: 227042 - protein, 15 aa, Artificial Sequence
  Description of Artificial Sequence: Synthetic peptide
  Seed: LRMKWMMAMKYPITA
LRMKFMMVMYYPSTA

SEQ ID NO: 227043 - protein, 15 aa, Artificial Sequence
  Description of Artificial Sequence: Synthetic peptide
  Seed: LRMKWMMAMKYPITA
LRMKFMMVMYYPTTA

SEQ ID NO: 227044 - protein, 15 aa, Artificial Sequence
  Description of Artificial Sequence: Synthetic peptide
  Seed: LRMKWMMAMKYPITA
LRMKFMMVMYYPVTA

SEQ ID NO: 227045 - protein, 15 aa, Artificial Sequence
  Description of Artificial Sequence: Synthetic peptide
  Seed: LRMKWMMAMKYPITA
LRMKFMMWMAYPATA

SEQ ID NO: 227046 - protein, 15 aa, Artificial Sequence
  Description of Artificial Sequence: Synthetic peptide
  Seed: LRMKWMMAMKYPITA
LRMKFMMWMAYPCTA

SEQ ID NO: 227047 - protein, 15 aa, Artificial Sequence
  Description of Artificial Sequence: Synthetic peptide
  Seed: LRMKWMMAMKYPITA
LRMKFMMWMAYPDTA

SEQ ID NO: 227048 - protein, 15 aa, Artificial Sequence
  Description of Artificial Sequence: Synthetic peptide
  Seed: LRMKWMMAMKYPITA
LRMKFMMWMAYPETA

SEQ ID NO: 227049 - protein, 15 aa, Artificial Sequence
  Description of Artificial Sequence: Synthetic peptide
  Seed: LRMKWMMAMKYPITA
LRMKFMMWMAYPFTA

SEQ ID NO: 227050 - protein, 15 aa, Artificial Sequence
  Description of Artificial Sequence: Synthetic peptide
  Seed: LRMKWMMAMKYPITA
LRMKFMMWMAYPGTA

SEQ ID NO: 227051 - protein, 15 aa, Artificial Sequence
  Description of Artificial Sequence: Synthetic peptide
  Seed: LRMKWMMAMKYPITA
LRMKFMMWMAYPHTA

SEQ ID NO: 227052 - protein, 15 aa, Artificial Sequence
  Description of Artificial Sequence: Synthetic peptide
  Seed: LRMKWMMAMKYPITA
LRMKFMMWMAYPITA

SEQ ID NO: 227053 - protein, 15 aa, Artificial Sequence
  Description of Artificial Sequence: Synthetic peptide
  Seed: LRMKWMMAMKYPITA
LRMKFMMWMAYPKTA

SEQ ID NO: 227054 - protein, 15 aa, Artificial Sequence
  Description of Artificial Sequence: Synthetic peptide
  Seed: LRMKWMMAMKYPITA
LRMKFMMWMAYPLTA

SEQ ID NO: 227055 - protein, 15 aa, Artificial Sequence
  Description of Artificial Sequence: Synthetic peptide
  Seed: LRMKWMMAMKYPITA
LRMKFMMWMAYPMTA

SEQ ID NO: 227056 - protein, 15 aa, Artificial Sequence
  Description of Artificial Sequence: Synthetic peptide
  Seed: LRMKWMMAMKYPITA
LRMKFMMWMAYPNTA

SEQ ID NO: 227057 - protein, 15 aa, Artificial Sequence
  Description of Artificial Sequence: Synthetic peptide
  Seed: LRMKWMMAMKYPITA
LRMKFMMWMAYPPTA

SEQ ID NO: 227058 - protein, 15 aa, Artificial Sequence
  Description of Artificial Sequence: Synthetic peptide
  Seed: LRMKWMMAMKYPITA
LRMKFMMWMAYPQTA

SEQ ID NO: 227059 - protein, 15 aa, Artificial Sequence
  Description of Artificial Sequence: Synthetic peptide
  Seed: LRMKWMMAMKYPITA
LRMKFMMWMAYPRTA

SEQ ID NO: 227060 - protein, 15 aa, Artificial Sequence
  Description of Artificial Sequence: Synthetic peptide
  Seed: LRMKWMMAMKYPITA
LRMKFMMWMAYPSTA

SEQ ID NO: 227061 - protein, 15 aa, Artificial Sequence
  Description of Artificial Sequence: Synthetic peptide
  Seed: LRMKWMMAMKYPITA
LRMKFMMWMAYPTTA

SEQ ID NO: 227062 - protein, 15 aa, Artificial Sequence
  Description of Artificial Sequence: Synthetic peptide
  Seed: LRMKWMMAMKYPITA
LRMKFMMWMAYPVTA

SEQ ID NO: 227063 - protein, 15 aa, Artificial Sequence
  Description of Artificial Sequence: Synthetic peptide
  Seed: LRMKWMMAMKYPITA
LRMKFMMWMAYPYTA

SEQ ID NO: 227064 - protein, 15 aa, Artificial Sequence
  Description of Artificial Sequence: Synthetic peptide
  Seed: LRMKWMMAMKYPITA
LRMKFMMWMGYPATA

SEQ ID NO: 227065 - protein, 15 aa, Artificial Sequence
  Description of Artificial Sequence: Synthetic peptide
  Seed: LRMKWMMAMKYPITA
LRMKFMMWMGYPFTA

SEQ ID NO: 227066 - protein, 15 aa, Artificial Sequence
  Description of Artificial Sequence: Synthetic peptide
  Seed: LRMKWMMAMKYPITA
LRMKFMMWMGYPGTA

SEQ ID NO: 227067 - protein, 15 aa, Artificial Sequence
  Description of Artificial Sequence: Synthetic peptide
  Seed: LRMKWMMAMKYPITA
LRMKFMMWMGYPITA

SEQ ID NO: 227068 - protein, 15 aa, Artificial Sequence
  Description of Artificial Sequence: Synthetic peptide
  Seed: LRMKWMMAMKYPITA
LRMKFMMWMGYPKTA

SEQ ID NO: 227069 - protein, 15 aa, Artificial Sequence
  Description of Artificial Sequence: Synthetic peptide
  Seed: LRMKWMMAMKYPITA
LRMKFMMWMGYPLTA

SEQ ID NO: 227070 - protein, 15 aa, Artificial Sequence
  Description of Artificial Sequence: Synthetic peptide
  Seed: LRMKWMMAMKYPITA
LRMKFMMWMGYPMTA

SEQ ID NO: 227071 - protein, 15 aa, Artificial Sequence
  Description of Artificial Sequence: Synthetic peptide
  Seed: LRMKWMMAMKYPITA
LRMKFMMWMGYPNTA

SEQ ID NO: 227072 - protein, 15 aa, Artificial Sequence
  Description of Artificial Sequence: Synthetic peptide
  Seed: LRMKWMMAMKYPITA
LRMKFMMWMGYPRTA

SEQ ID NO: 227073 - protein, 15 aa, Artificial Sequence
  Description of Artificial Sequence: Synthetic peptide
  Seed: LRMKWMMAMKYPITA
LRMKFMMWMGYPSTA

SEQ ID NO: 227074 - protein, 15 aa, Artificial Sequence
  Description of Artificial Sequence: Synthetic peptide
  Seed: LRMKWMMAMKYPITA
LRMKFMMWMGYPTTA

SEQ ID NO: 227075 - protein, 15 aa, Artificial Sequence
  Description of Artificial Sequence: Synthetic peptide
  Seed: LRMKWMMAMKYPITA
LRMKFMMWMGYPVTA

SEQ ID NO: 227076 - protein, 15 aa, Artificial Sequence
  Description of Artificial Sequence: Synthetic peptide
  Seed: LRMKWMMAMKYPITA
LRMKFMMWMHYPFTA

SEQ ID NO: 227077 - protein, 15 aa, Artificial Sequence
  Description of Artificial Sequence: Synthetic peptide
  Seed: LRMKWMMAMKYPITA
LRMKFMMWMHYPLTA

SEQ ID NO: 227078 - protein, 15 aa, Artificial Sequence
  Description of Artificial Sequence: Synthetic peptide
  Seed: LRMKWMMAMKYPITA
LRMKFMMWMHYPRTA

SEQ ID NO: 227079 - protein, 15 aa, Artificial Sequence
  Description of Artificial Sequence: Synthetic peptide
  Seed: LRMKWMMAMKYPITA
LRMKFMMWMHYPYTA

SEQ ID NO: 227080 - protein, 15 aa, Artificial Sequence
  Description of Artificial Sequence: Synthetic peptide
  Seed: LRMKWMMAMKYPITA
LRMKFMMWMIYPATA

SEQ ID NO: 227081 - protein, 15 aa, Artificial Sequence
  Description of Artificial Sequence: Synthetic peptide
  Seed: LRMKWMMAMKYPITA
LRMKFMMWMIYPGTA

SEQ ID NO: 227082 - protein, 15 aa, Artificial Sequence
  Description of Artificial Sequence: Synthetic peptide
  Seed: LRMKWMMAMKYPITA
LRMKFMMWMIYPITA

SEQ ID NO: 227083 - protein, 15 aa, Artificial Sequence
  Description of Artificial Sequence: Synthetic peptide
  Seed: LRMKWMMAMKYPITA
LRMKFMMWMIYPLTA

SEQ ID NO: 227084 - protein, 15 aa, Artificial Sequence
  Description of Artificial Sequence: Synthetic peptide
  Seed: LRMKWMMAMKYPITA
LRMKFMMWMIYPMTA

SEQ ID NO: 227085 - protein, 15 aa, Artificial Sequence
  Description of Artificial Sequence: Synthetic peptide
  Seed: LRMKWMMAMKYPITA
LRMKFMMWMIYPNTA

SEQ ID NO: 227086 - protein, 15 aa, Artificial Sequence
  Description of Artificial Sequence: Synthetic peptide
  Seed: LRMKWMMAMKYPITA
LRMKFMMWMIYPQTA

SEQ ID NO: 227087 - protein, 15 aa, Artificial Sequence
  Description of Artificial Sequence: Synthetic peptide
  Seed: LRMKWMMAMKYPITA
LRMKFMMWMIYPSTA

SEQ ID NO: 227088 - protein, 15 aa, Artificial Sequence
  Description of Artificial Sequence: Synthetic peptide
  Seed: LRMKWMMAMKYPITA
LRMKFMMWMIYPTTA

SEQ ID NO: 227089 - protein, 15 aa, Artificial Sequence
  Description of Artificial Sequence: Synthetic peptide
  Seed: LRMKWMMAMKYPITA
LRMKFMMWMIYPVTA

SEQ ID NO: 227090 - protein, 15 aa, Artificial Sequence
  Description of Artificial Sequence: Synthetic peptide
  Seed: LRMKWMMAMKYPITA
LRMKFMMWMKYPATA

SEQ ID NO: 227091 - protein, 15 aa, Artificial Sequence
  Description of Artificial Sequence: Synthetic peptide
  Seed: LRMKWMMAMKYPITA
LRMKFMMWMKYPFTA

SEQ ID NO: 227092 - protein, 15 aa, Artificial Sequence
  Description of Artificial Sequence: Synthetic peptide
  Seed: LRMKWMMAMKYPITA
LRMKFMMWMKYPGTA

SEQ ID NO: 227093 - protein, 15 aa, Artificial Sequence
  Description of Artificial Sequence: Synthetic peptide
  Seed: LRMKWMMAMKYPITA
LRMKFMMWMKYPHTA

SEQ ID NO: 227094 - protein, 15 aa, Artificial Sequence
  Description of Artificial Sequence: Synthetic peptide
  Seed: LRMKWMMAMKYPITA
LRMKFMMWMKYPITA

SEQ ID NO: 227095 - protein, 15 aa, Artificial Sequence
  Description of Artificial Sequence: Synthetic peptide
  Seed: LRMKWMMAMKYPITA
LRMKFMMWMKYPKTA

SEQ ID NO: 227096 - protein, 15 aa, Artificial Sequence
  Description of Artificial Sequence: Synthetic peptide
  Seed: LRMKWMMAMKYPITA
LRMKFMMWMKYPLTA

SEQ ID NO: 227097 - protein, 15 aa, Artificial Sequence
  Description of Artificial Sequence: Synthetic peptide
  Seed: LRMKWMMAMKYPITA
LRMKFMMWMKYPMTA

SEQ ID NO: 227098 - protein, 15 aa, Artificial Sequence
  Description of Artificial Sequence: Synthetic peptide
  Seed: LRMKWMMAMKYPITA
LRMKFMMWMKYPNTA

SEQ ID NO: 227099 - protein, 15 aa, Artificial Sequence
  Description of Artificial Sequence: Synthetic peptide
  Seed: LRMKWMMAMKYPITA
LRMKFMMWMKYPQTA

SEQ ID NO: 227100 - protein, 15 aa, Artificial Sequence
  Description of Artificial Sequence: Synthetic peptide
  Seed: LRMKWMMAMKYPITA
LRMKFMMWMKYPRTA

SEQ ID NO: 227101 - protein, 15 aa, Artificial Sequence
  Description of Artificial Sequence: Synthetic peptide
  Seed: LRMKWMMAMKYPITA
LRMKFMMWMKYPSTA

SEQ ID NO: 227102 - protein, 15 aa, Artificial Sequence
  Description of Artificial Sequence: Synthetic peptide
  Seed: LRMKWMMAMKYPITA
LRMKFMMWMKYPTTA

SEQ ID NO: 227103 - protein, 15 aa, Artificial Sequence
  Description of Artificial Sequence: Synthetic peptide
  Seed: LRMKWMMAMKYPITA
LRMKFMMWMKYPVTA

SEQ ID NO: 227104 - protein, 15 aa, Artificial Sequence
  Description of Artificial Sequence: Synthetic peptide
  Seed: LRMKWMMAMKYPITA
LRMKFMMWMKYPYTA

SEQ ID NO: 227105 - protein, 15 aa, Artificial Sequence
  Description of Artificial Sequence: Synthetic peptide
  Seed: LRMKWMMAMKYPITA
LRMKFMMWMMYPATA

SEQ ID NO: 227106 - protein, 15 aa, Artificial Sequence
  Description of Artificial Sequence: Synthetic peptide
  Seed: LRMKWMMAMKYPITA
LRMKFMMWMMYPVTA

SEQ ID NO: 227107 - protein, 15 aa, Artificial Sequence
  Description of Artificial Sequence: Synthetic peptide
  Seed: LRMKWMMAMKYPITA
LRMKFMMWMNYPATA

SEQ ID NO: 227108 - protein, 15 aa, Artificial Sequence
  Description of Artificial Sequence: Synthetic peptide
  Seed: LRMKWMMAMKYPITA
LRMKFMMWMNYPFTA

SEQ ID NO: 227109 - protein, 15 aa, Artificial Sequence
  Description of Artificial Sequence: Synthetic peptide
  Seed: LRMKWMMAMKYPITA
LRMKFMMWMNYPITA

SEQ ID NO: 227110 - protein, 15 aa, Artificial Sequence
  Description of Artificial Sequence: Synthetic peptide
  Seed: LRMKWMMAMKYPITA
LRMKFMMWMNYPLTA

SEQ ID NO: 227111 - protein, 15 aa, Artificial Sequence
  Description of Artificial Sequence: Synthetic peptide
  Seed: LRMKWMMAMKYPITA
LRMKFMMWMNYPMTA

SEQ ID NO: 227112 - protein, 15 aa, Artificial Sequence
  Description of Artificial Sequence: Synthetic peptide
  Seed: LRMKWMMAMKYPITA
LRMKFMMWMNYPRTA

SEQ ID NO: 227113 - protein, 15 aa, Artificial Sequence
  Description of Artificial Sequence: Synthetic peptide
  Seed: LRMKWMMAMKYPITA
LRMKFMMWMNYPSTA

SEQ ID NO: 227114 - protein, 15 aa, Artificial Sequence
  Description of Artificial Sequence: Synthetic peptide
  Seed: LRMKWMMAMKYPITA
LRMKFMMWMNYPTTA

SEQ ID NO: 227115 - protein, 15 aa, Artificial Sequence
  Description of Artificial Sequence: Synthetic peptide
  Seed: LRMKWMMAMKYPITA
LRMKFMMWMNYPVTA

SEQ ID NO: 227116 - protein, 15 aa, Artificial Sequence
  Description of Artificial Sequence: Synthetic peptide
  Seed: LRMKWMMAMKYPITA
LRMKFMMWMNYPYTA

SEQ ID NO: 227117 - protein, 15 aa, Artificial Sequence
  Description of Artificial Sequence: Synthetic peptide
  Seed: LRMKWMMAMKYPITA
LRMKFMMWMPYPATA

SEQ ID NO: 227118 - protein, 15 aa, Artificial Sequence
  Description of Artificial Sequence: Synthetic peptide
  Seed: LRMKWMMAMKYPITA
LRMKFMMWMPYPCTA

SEQ ID NO: 227119 - protein, 15 aa, Artificial Sequence
  Description of Artificial Sequence: Synthetic peptide
  Seed: LRMKWMMAMKYPITA
LRMKFMMWMPYPFTA

SEQ ID NO: 227120 - protein, 15 aa, Artificial Sequence
  Description of Artificial Sequence: Synthetic peptide
  Seed: LRMKWMMAMKYPITA
LRMKFMMWMPYPGTA

SEQ ID NO: 227121 - protein, 15 aa, Artificial Sequence
  Description of Artificial Sequence: Synthetic peptide
  Seed: LRMKWMMAMKYPITA
LRMKFMMWMPYPHTA

SEQ ID NO: 227122 - protein, 15 aa, Artificial Sequence
  Description of Artificial Sequence: Synthetic peptide
  Seed: LRMKWMMAMKYPITA
LRMKFMMWMPYPITA

SEQ ID NO: 227123 - protein, 15 aa, Artificial Sequence
  Description of Artificial Sequence: Synthetic peptide
  Seed: LRMKWMMAMKYPITA
LRMKFMMWMPYPLTA

SEQ ID NO: 227124 - protein, 15 aa, Artificial Sequence
  Description of Artificial Sequence: Synthetic peptide
  Seed: LRMKWMMAMKYPITA
LRMKFMMWMPYPMTA

SEQ ID NO: 227125 - protein, 15 aa, Artificial Sequence
  Description of Artificial Sequence: Synthetic peptide
  Seed: LRMKWMMAMKYPITA
LRMKFMMWMPYPNTA

SEQ ID NO: 227126 - protein, 15 aa, Artificial Sequence
  Description of Artificial Sequence: Synthetic peptide
  Seed: LRMKWMMAMKYPITA
LRMKFMMWMPYPQTA

SEQ ID NO: 227127 - protein, 15 aa, Artificial Sequence
  Description of Artificial Sequence: Synthetic peptide
  Seed: LRMKWMMAMKYPITA
LRMKFMMWMPYPRTA

SEQ ID NO: 227128 - protein, 15 aa, Artificial Sequence
  Description of Artificial Sequence: Synthetic peptide
  Seed: LRMKWMMAMKYPITA
LRMKFMMWMPYPSTA

SEQ ID NO: 227129 - protein, 15 aa, Artificial Sequence
  Description of Artificial Sequence: Synthetic peptide
  Seed: LRMKWMMAMKYPITA
LRMKFMMWMPYPTTA

SEQ ID NO: 227130 - protein, 15 aa, Artificial Sequence
  Description of Artificial Sequence: Synthetic peptide
  Seed: LRMKWMMAMKYPITA
LRMKFMMWMPYPVTA

SEQ ID NO: 227131 - protein, 15 aa, Artificial Sequence
  Description of Artificial Sequence: Synthetic peptide
  Seed: LRMKWMMAMKYPITA
LRMKFMMWMPYPYTA

SEQ ID NO: 227132 - protein, 15 aa, Artificial Sequence
  Description of Artificial Sequence: Synthetic peptide
  Seed: LRMKWMMAMKYPITA
LRMKFMMWMRYPATA

SEQ ID NO: 227133 - protein, 15 aa, Artificial Sequence
  Description of Artificial Sequence: Synthetic peptide
  Seed: LRMKWMMAMKYPITA
LRMKFMMWMRYPFTA

SEQ ID NO: 227134 - protein, 15 aa, Artificial Sequence
  Description of Artificial Sequence: Synthetic peptide
  Seed: LRMKWMMAMKYPITA
LRMKFMMWMRYPGTA

SEQ ID NO: 227135 - protein, 15 aa, Artificial Sequence
  Description of Artificial Sequence: Synthetic peptide
  Seed: LRMKWMMAMKYPITA
LRMKFMMWMRYPHTA

SEQ ID NO: 227136 - protein, 15 aa, Artificial Sequence
  Description of Artificial Sequence: Synthetic peptide
  Seed: LRMKWMMAMKYPITA
LRMKFMMWMRYPITA

SEQ ID NO: 227137 - protein, 15 aa, Artificial Sequence
  Description of Artificial Sequence: Synthetic peptide
  Seed: LRMKWMMAMKYPITA
LRMKFMMWMRYPKTA

SEQ ID NO: 227138 - protein, 15 aa, Artificial Sequence
  Description of Artificial Sequence: Synthetic peptide
  Seed: LRMKWMMAMKYPITA
LRMKFMMWMRYPLTA

SEQ ID NO: 227139 - protein, 15 aa, Artificial Sequence
  Description of Artificial Sequence: Synthetic peptide
  Seed: LRMKWMMAMKYPITA
LRMKFMMWMRYPMTA

SEQ ID NO: 227140 - protein, 15 aa, Artificial Sequence
  Description of Artificial Sequence: Synthetic peptide
  Seed: LRMKWMMAMKYPITA
LRMKFMMWMRYPNTA

SEQ ID NO: 227141 - protein, 15 aa, Artificial Sequence
  Description of Artificial Sequence: Synthetic peptide
  Seed: LRMKWMMAMKYPITA
LRMKFMMWMRYPPTA

SEQ ID NO: 227142 - protein, 15 aa, Artificial Sequence
  Description of Artificial Sequence: Synthetic peptide
  Seed: LRMKWMMAMKYPITA
LRMKFMMWMRYPQTA

SEQ ID NO: 227143 - protein, 15 aa, Artificial Sequence
  Description of Artificial Sequence: Synthetic peptide
  Seed: LRMKWMMAMKYPITA
LRMKFMMWMRYPRTA

SEQ ID NO: 227144 - protein, 15 aa, Artificial Sequence
  Description of Artificial Sequence: Synthetic peptide
  Seed: LRMKWMMAMKYPITA
LRMKFMMWMRYPSTA

SEQ ID NO: 227145 - protein, 15 aa, Artificial Sequence
  Description of Artificial Sequence: Synthetic peptide
  Seed: LRMKWMMAMKYPITA
LRMKFMMWMRYPTTA

SEQ ID NO: 227146 - protein, 15 aa, Artificial Sequence
  Description of Artificial Sequence: Synthetic peptide
  Seed: LRMKWMMAMKYPITA
LRMKFMMWMRYPVTA

SEQ ID NO: 227147 - protein, 15 aa, Artificial Sequence
  Description of Artificial Sequence: Synthetic peptide
  Seed: LRMKWMMAMKYPITA
LRMKFMMWMRYPYTA

SEQ ID NO: 227148 - protein, 15 aa, Artificial Sequence
  Description of Artificial Sequence: Synthetic peptide
  Seed: LRMKWMMAMKYPITA
LRMKFMMWMSYPATA

SEQ ID NO: 227149 - protein, 15 aa, Artificial Sequence
  Description of Artificial Sequence: Synthetic peptide
  Seed: LRMKWMMAMKYPITA
LRMKFMMWMSYPFTA

SEQ ID NO: 227150 - protein, 15 aa, Artificial Sequence
  Description of Artificial Sequence: Synthetic peptide
  Seed: LRMKWMMAMKYPITA
LRMKFMMWMSYPGTA

SEQ ID NO: 227151 - protein, 15 aa, Artificial Sequence
  Description of Artificial Sequence: Synthetic peptide
  Seed: LRMKWMMAMKYPITA
LRMKFMMWMSYPHTA

SEQ ID NO: 227152 - protein, 15 aa, Artificial Sequence
  Description of Artificial Sequence: Synthetic peptide
  Seed: LRMKWMMAMKYPITA
LRMKFMMWMSYPITA

SEQ ID NO: 227153 - protein, 15 aa, Artificial Sequence
  Description of Artificial Sequence: Synthetic peptide
  Seed: LRMKWMMAMKYPITA
LRMKFMMWMSYPKTA

SEQ ID NO: 227154 - protein, 15 aa, Artificial Sequence
  Description of Artificial Sequence: Synthetic peptide
  Seed: LRMKWMMAMKYPITA
LRMKFMMWMSYPLTA

SEQ ID NO: 227155 - protein, 15 aa, Artificial Sequence
  Description of Artificial Sequence: Synthetic peptide
  Seed: LRMKWMMAMKYPITA
LRMKFMMWMSYPMTA

SEQ ID NO: 227156 - protein, 15 aa, Artificial Sequence
  Description of Artificial Sequence: Synthetic peptide
  Seed: LRMKWMMAMKYPITA
LRMKFMMWMSYPNTA

SEQ ID NO: 227157 - protein, 15 aa, Artificial Sequence
  Description of Artificial Sequence: Synthetic peptide
  Seed: LRMKWMMAMKYPITA
LRMKFMMWMSYPQTA

SEQ ID NO: 227158 - protein, 15 aa, Artificial Sequence
  Description of Artificial Sequence: Synthetic peptide
  Seed: LRMKWMMAMKYPITA
LRMKFMMWMSYPRTA

SEQ ID NO: 227159 - protein, 15 aa, Artificial Sequence
  Description of Artificial Sequence: Synthetic peptide
  Seed: LRMKWMMAMKYPITA
LRMKFMMWMSYPSTA

SEQ ID NO: 227160 - protein, 15 aa, Artificial Sequence
  Description of Artificial Sequence: Synthetic peptide
  Seed: LRMKWMMAMKYPITA
LRMKFMMWMSYPTTA

SEQ ID NO: 227161 - protein, 15 aa, Artificial Sequence
  Description of Artificial Sequence: Synthetic peptide
  Seed: LRMKWMMAMKYPITA
LRMKFMMWMSYPVTA

SEQ ID NO: 227162 - protein, 15 aa, Artificial Sequence
  Description of Artificial Sequence: Synthetic peptide
  Seed: LRMKWMMAMKYPITA
LRMKFMMWMSYPYTA

SEQ ID NO: 227163 - protein, 15 aa, Artificial Sequence
  Description of Artificial Sequence: Synthetic peptide
  Seed: LRMKWMMAMKYPITA
LRMKFMMWMTYPATA

SEQ ID NO: 227164 - protein, 15 aa, Artificial Sequence
  Description of Artificial Sequence: Synthetic peptide
  Seed: LRMKWMMAMKYPITA
LRMKFMMWMTYPDTA

SEQ ID NO: 227165 - protein, 15 aa, Artificial Sequence
  Description of Artificial Sequence: Synthetic peptide
  Seed: LRMKWMMAMKYPITA
LRMKFMMWMTYPETA

SEQ ID NO: 227166 - protein, 15 aa, Artificial Sequence
  Description of Artificial Sequence: Synthetic peptide
  Seed: LRMKWMMAMKYPITA
LRMKFMMWMTYPGTA

SEQ ID NO: 227167 - protein, 15 aa, Artificial Sequence
  Description of Artificial Sequence: Synthetic peptide
  Seed: LRMKWMMAMKYPITA
LRMKFMMWMTYPHTA

SEQ ID NO: 227168 - protein, 15 aa, Artificial Sequence
  Description of Artificial Sequence: Synthetic peptide
  Seed: LRMKWMMAMKYPITA
LRMKFMMWMTYPITA

SEQ ID NO: 227169 - protein, 15 aa, Artificial Sequence
  Description of Artificial Sequence: Synthetic peptide
  Seed: LRMKWMMAMKYPITA
LRMKFMMWMTYPKTA

SEQ ID NO: 227170 - protein, 15 aa, Artificial Sequence
  Description of Artificial Sequence: Synthetic peptide
  Seed: LRMKWMMAMKYPITA
LRMKFMMWMTYPLTA

SEQ ID NO: 227171 - protein, 15 aa, Artificial Sequence
  Description of Artificial Sequence: Synthetic peptide
  Seed: LRMKWMMAMKYPITA
LRMKFMMWMTYPMTA

SEQ ID NO: 227172 - protein, 15 aa, Artificial Sequence
  Description of Artificial Sequence: Synthetic peptide
  Seed: LRMKWMMAMKYPITA
LRMKFMMWMTYPNTA

SEQ ID NO: 227173 - protein, 15 aa, Artificial Sequence
  Description of Artificial Sequence: Synthetic peptide
  Seed: LRMKWMMAMKYPITA
LRMKFMMWMTYPPTA

SEQ ID NO: 227174 - protein, 15 aa, Artificial Sequence
  Description of Artificial Sequence: Synthetic peptide
  Seed: LRMKWMMAMKYPITA
LRMKFMMWMTYPQTA

SEQ ID NO: 227175 - protein, 15 aa, Artificial Sequence
  Description of Artificial Sequence: Synthetic peptide
  Seed: LRMKWMMAMKYPITA
LRMKFMMWMTYPRTA

SEQ ID NO: 227176 - protein, 15 aa, Artificial Sequence
  Description of Artificial Sequence: Synthetic peptide
  Seed: LRMKWMMAMKYPITA
LRMKFMMWMTYPSTA

SEQ ID NO: 227177 - protein, 15 aa, Artificial Sequence
  Description of Artificial Sequence: Synthetic peptide
  Seed: LRMKWMMAMKYPITA
LRMKFMMWMTYPTTA

SEQ ID NO: 227178 - protein, 15 aa, Artificial Sequence
  Description of Artificial Sequence: Synthetic peptide
  Seed: LRMKWMMAMKYPITA
LRMKFMMWMTYPVTA

SEQ ID NO: 227179 - protein, 15 aa, Artificial Sequence
  Description of Artificial Sequence: Synthetic peptide
  Seed: LRMKWMMAMKYPITA
LRMKFMMWMVYPATA

SEQ ID NO: 227180 - protein, 15 aa, Artificial Sequence
  Description of Artificial Sequence: Synthetic peptide
  Seed: LRMKWMMAMKYPITA
LRMKFMMWMVYPGTA

SEQ ID NO: 227181 - protein, 15 aa, Artificial Sequence
  Description of Artificial Sequence: Synthetic peptide
  Seed: LRMKWMMAMKYPITA
LRMKFMMWMVYPHTA

SEQ ID NO: 227182 - protein, 15 aa, Artificial Sequence
  Description of Artificial Sequence: Synthetic peptide
  Seed: LRMKWMMAMKYPITA
LRMKFMMWMVYPITA

SEQ ID NO: 227183 - protein, 15 aa, Artificial Sequence
  Description of Artificial Sequence: Synthetic peptide
  Seed: LRMKWMMAMKYPITA
LRMKFMMWMVYPLTA

SEQ ID NO: 227184 - protein, 15 aa, Artificial Sequence
  Description of Artificial Sequence: Synthetic peptide
  Seed: LRMKWMMAMKYPITA
LRMKFMMWMVYPMTA

SEQ ID NO: 227185 - protein, 15 aa, Artificial Sequence
  Description of Artificial Sequence: Synthetic peptide
  Seed: LRMKWMMAMKYPITA
LRMKFMMWMVYPNTA

SEQ ID NO: 227186 - protein, 15 aa, Artificial Sequence
  Description of Artificial Sequence: Synthetic peptide
  Seed: LRMKWMMAMKYPITA
LRMKFMMWMVYPPTA

SEQ ID NO: 227187 - protein, 15 aa, Artificial Sequence
  Description of Artificial Sequence: Synthetic peptide
  Seed: LRMKWMMAMKYPITA
LRMKFMMWMVYPQTA

SEQ ID NO: 227188 - protein, 15 aa, Artificial Sequence
  Description of Artificial Sequence: Synthetic peptide
  Seed: LRMKWMMAMKYPITA
LRMKFMMWMVYPRTA

SEQ ID NO: 227189 - protein, 15 aa, Artificial Sequence
  Description of Artificial Sequence: Synthetic peptide
  Seed: LRMKWMMAMKYPITA
LRMKFMMWMVYPSTA

SEQ ID NO: 227190 - protein, 15 aa, Artificial Sequence
  Description of Artificial Sequence: Synthetic peptide
  Seed: LRMKWMMAMKYPITA
LRMKFMMWMVYPTTA

SEQ ID NO: 227191 - protein, 15 aa, Artificial Sequence
  Description of Artificial Sequence: Synthetic peptide
  Seed: LRMKWMMAMKYPITA
LRMKFMMWMVYPVTA

SEQ ID NO: 227192 - protein, 15 aa, Artificial Sequence
  Description of Artificial Sequence: Synthetic peptide
  Seed: LRMKWMMAMKYPITA
LRMKFMMYMAYPATA

SEQ ID NO: 227193 - protein, 15 aa, Artificial Sequence
  Description of Artificial Sequence: Synthetic peptide
  Seed: LRMKWMMAMKYPITA
LRMKFMMYMAYPCTA

SEQ ID NO: 227194 - protein, 15 aa, Artificial Sequence
  Description of Artificial Sequence: Synthetic peptide
  Seed: LRMKWMMAMKYPITA
LRMKFMMYMAYPDTA

SEQ ID NO: 227195 - protein, 15 aa, Artificial Sequence
  Description of Artificial Sequence: Synthetic peptide
  Seed: LRMKWMMAMKYPITA
LRMKFMMYMAYPFTA

SEQ ID NO: 227196 - protein, 15 aa, Artificial Sequence
  Description of Artificial Sequence: Synthetic peptide
  Seed: LRMKWMMAMKYPITA
LRMKFMMYMAYPGTA

SEQ ID NO: 227197 - protein, 15 aa, Artificial Sequence
  Description of Artificial Sequence: Synthetic peptide
  Seed: LRMKWMMAMKYPITA
LRMKFMMYMAYPHTA

SEQ ID NO: 227198 - protein, 15 aa, Artificial Sequence
  Description of Artificial Sequence: Synthetic peptide
  Seed: LRMKWMMAMKYPITA
LRMKFMMYMAYPITA

SEQ ID NO: 227199 - protein, 15 aa, Artificial Sequence
  Description of Artificial Sequence: Synthetic peptide
  Seed: LRMKWMMAMKYPITA
LRMKFMMYMAYPKTA

SEQ ID NO: 227200 - protein, 15 aa, Artificial Sequence
  Description of Artificial Sequence: Synthetic peptide
  Seed: LRMKWMMAMKYPITA
LRMKFMMYMAYPLTA

SEQ ID NO: 227201 - protein, 15 aa, Artificial Sequence
  Description of Artificial Sequence: Synthetic peptide
  Seed: LRMKWMMAMKYPITA
LRMKFMMYMAYPMTA

SEQ ID NO: 227202 - protein, 15 aa, Artificial Sequence
  Description of Artificial Sequence: Synthetic peptide
  Seed: LRMKWMMAMKYPITA
LRMKFMMYMAYPNTA

SEQ ID NO: 227203 - protein, 15 aa, Artificial Sequence
  Description of Artificial Sequence: Synthetic peptide
  Seed: LRMKWMMAMKYPITA
LRMKFMMYMAYPPTA

SEQ ID NO: 227204 - protein, 15 aa, Artificial Sequence
  Description of Artificial Sequence: Synthetic peptide
  Seed: LRMKWMMAMKYPITA
LRMKFMMYMAYPQTA

SEQ ID NO: 227205 - protein, 15 aa, Artificial Sequence
  Description of Artificial Sequence: Synthetic peptide
  Seed: LRMKWMMAMKYPITA
LRMKFMMYMAYPRTA

SEQ ID NO: 227206 - protein, 15 aa, Artificial Sequence
  Description of Artificial Sequence: Synthetic peptide
  Seed: LRMKWMMAMKYPITA
LRMKFMMYMAYPSTA

SEQ ID NO: 227207 - protein, 15 aa, Artificial Sequence
  Description of Artificial Sequence: Synthetic peptide
  Seed: LRMKWMMAMKYPITA
LRMKFMMYMAYPTTA

SEQ ID NO: 227208 - protein, 15 aa, Artificial Sequence
  Description of Artificial Sequence: Synthetic peptide
  Seed: LRMKWMMAMKYPITA
LRMKFMMYMAYPVTA

SEQ ID NO: 227209 - protein, 15 aa, Artificial Sequence
  Description of Artificial Sequence: Synthetic peptide
  Seed: LRMKWMMAMKYPITA
LRMKFMMYMAYPYTA

SEQ ID NO: 227210 - protein, 15 aa, Artificial Sequence
  Description of Artificial Sequence: Synthetic peptide
  Seed: LRMKWMMAMKYPITA
LRMKFMMYMDYPITA

SEQ ID NO: 227211 - protein, 15 aa, Artificial Sequence
  Description of Artificial Sequence: Synthetic peptide
  Seed: LRMKWMMAMKYPITA
LRMKFMMYMDYPLTA

SEQ ID NO: 227212 - protein, 15 aa, Artificial Sequence
  Description of Artificial Sequence: Synthetic peptide
  Seed: LRMKWMMAMKYPITA
LRMKFMMYMDYPVTA

SEQ ID NO: 227213 - protein, 15 aa, Artificial Sequence
  Description of Artificial Sequence: Synthetic peptide
  Seed: LRMKWMMAMKYPITA
LRMKFMMYMGYPATA

SEQ ID NO: 227214 - protein, 15 aa, Artificial Sequence
  Description of Artificial Sequence: Synthetic peptide
  Seed: LRMKWMMAMKYPITA
LRMKFMMYMGYPFTA

SEQ ID NO: 227215 - protein, 15 aa, Artificial Sequence
  Description of Artificial Sequence: Synthetic peptide
  Seed: LRMKWMMAMKYPITA
LRMKFMMYMGYPGTA

SEQ ID NO: 227216 - protein, 15 aa, Artificial Sequence
  Description of Artificial Sequence: Synthetic peptide
  Seed: LRMKWMMAMKYPITA
LRMKFMMYMGYPHTA

SEQ ID NO: 227217 - protein, 15 aa, Artificial Sequence
  Description of Artificial Sequence: Synthetic peptide
  Seed: LRMKWMMAMKYPITA
LRMKFMMYMGYPITA

SEQ ID NO: 227218 - protein, 15 aa, Artificial Sequence
  Description of Artificial Sequence: Synthetic peptide
  Seed: LRMKWMMAMKYPITA
LRMKFMMYMGYPKTA

SEQ ID NO: 227219 - protein, 15 aa, Artificial Sequence
  Description of Artificial Sequence: Synthetic peptide
  Seed: LRMKWMMAMKYPITA
LRMKFMMYMGYPLTA

SEQ ID NO: 227220 - protein, 15 aa, Artificial Sequence
  Description of Artificial Sequence: Synthetic peptide
  Seed: LRMKWMMAMKYPITA
LRMKFMMYMGYPMTA

SEQ ID NO: 227221 - protein, 15 aa, Artificial Sequence
  Description of Artificial Sequence: Synthetic peptide
  Seed: LRMKWMMAMKYPITA
LRMKFMMYMGYPRTA

SEQ ID NO: 227222 - protein, 15 aa, Artificial Sequence
  Description of Artificial Sequence: Synthetic peptide
  Seed: LRMKWMMAMKYPITA
LRMKFMMYMGYPSTA

SEQ ID NO: 227223 - protein, 15 aa, Artificial Sequence
  Description of Artificial Sequence: Synthetic peptide
  Seed: LRMKWMMAMKYPITA
LRMKFMMYMGYPTTA

SEQ ID NO: 227224 - protein, 15 aa, Artificial Sequence
  Description of Artificial Sequence: Synthetic peptide
  Seed: LRMKWMMAMKYPITA
LRMKFMMYMGYPVTA

SEQ ID NO: 227225 - protein, 15 aa, Artificial Sequence
  Description of Artificial Sequence: Synthetic peptide
  Seed: LRMKWMMAMKYPITA
LRMKFMMYMGYPYTA

SEQ ID NO: 227226 - protein, 15 aa, Artificial Sequence
  Description of Artificial Sequence: Synthetic peptide
  Seed: LRMKWMMAMKYPITA
LRMKFMMYMHYPLTA

SEQ ID NO: 227227 - protein, 15 aa, Artificial Sequence
  Description of Artificial Sequence: Synthetic peptide
  Seed: LRMKWMMAMKYPITA
LRMKFMMYMHYPRTA

SEQ ID NO: 227228 - protein, 15 aa, Artificial Sequence
  Description of Artificial Sequence: Synthetic peptide
  Seed: LRMKWMMAMKYPITA
LRMKFMMYMHYPVTA

SEQ ID NO: 227229 - protein, 15 aa, Artificial Sequence
  Description of Artificial Sequence: Synthetic peptide
  Seed: LRMKWMMAMKYPITA
LRMKFMMYMHYPYTA

SEQ ID NO: 227230 - protein, 15 aa, Artificial Sequence
  Description of Artificial Sequence: Synthetic peptide
  Seed: LRMKWMMAMKYPITA
LRMKFMMYMIYPATA

SEQ ID NO: 227231 - protein, 15 aa, Artificial Sequence
  Description of Artificial Sequence: Synthetic peptide
  Seed: LRMKWMMAMKYPITA
LRMKFMMYMIYPGTA

SEQ ID NO: 227232 - protein, 15 aa, Artificial Sequence
  Description of Artificial Sequence: Synthetic peptide
  Seed: LRMKWMMAMKYPITA
LRMKFMMYMIYPRTA

SEQ ID NO: 227233 - protein, 15 aa, Artificial Sequence
  Description of Artificial Sequence: Synthetic peptide
  Seed: LRMKWMMAMKYPITA
LRMKFMMYMIYPVTA

SEQ ID NO: 227234 - protein, 15 aa, Artificial Sequence
  Description of Artificial Sequence: Synthetic peptide
  Seed: LRMKWMMAMKYPITA
LRMKFMMYMKYPATA

SEQ ID NO: 227235 - protein, 15 aa, Artificial Sequence
  Description of Artificial Sequence: Synthetic peptide
  Seed: LRMKWMMAMKYPITA
LRMKFMMYMKYPFTA

SEQ ID NO: 227236 - protein, 15 aa, Artificial Sequence
  Description of Artificial Sequence: Synthetic peptide
  Seed: LRMKWMMAMKYPITA
LRMKFMMYMKYPGTA

SEQ ID NO: 227237 - protein, 15 aa, Artificial Sequence
  Description of Artificial Sequence: Synthetic peptide
  Seed: LRMKWMMAMKYPITA
LRMKFMMYMKYPHTA

SEQ ID NO: 227238 - protein, 15 aa, Artificial Sequence
  Description of Artificial Sequence: Synthetic peptide
  Seed: LRMKWMMAMKYPITA
LRMKFMMYMKYPITA

SEQ ID NO: 227239 - protein, 15 aa, Artificial Sequence
  Description of Artificial Sequence: Synthetic peptide
  Seed: LRMKWMMAMKYPITA
LRMKFMMYMKYPKTA

SEQ ID NO: 227240 - protein, 15 aa, Artificial Sequence
  Description of Artificial Sequence: Synthetic peptide
  Seed: LRMKWMMAMKYPITA
LRMKFMMYMKYPLTA

SEQ ID NO: 227241 - protein, 15 aa, Artificial Sequence
  Description of Artificial Sequence: Synthetic peptide
  Seed: LRMKWMMAMKYPITA
LRMKFMMYMKYPMTA

SEQ ID NO: 227242 - protein, 15 aa, Artificial Sequence
  Description of Artificial Sequence: Synthetic peptide
  Seed: LRMKWMMAMKYPITA
LRMKFMMYMKYPQTA

SEQ ID NO: 227243 - protein, 15 aa, Artificial Sequence
  Description of Artificial Sequence: Synthetic peptide
  Seed: LRMKWMMAMKYPITA
LRMKFMMYMKYPRTA

SEQ ID NO: 227244 - protein, 15 aa, Artificial Sequence
  Description of Artificial Sequence: Synthetic peptide
  Seed: LRMKWMMAMKYPITA
LRMKFMMYMKYPSTA

SEQ ID NO: 227245 - protein, 15 aa, Artificial Sequence
  Description of Artificial Sequence: Synthetic peptide
  Seed: LRMKWMMAMKYPITA
LRMKFMMYMKYPVTA

SEQ ID NO: 227246 - protein, 15 aa, Artificial Sequence
  Description of Artificial Sequence: Synthetic peptide
  Seed: LRMKWMMAMKYPITA
LRMKFMMYMKYPYTA

SEQ ID NO: 227247 - protein, 15 aa, Artificial Sequence
  Description of Artificial Sequence: Synthetic peptide
  Seed: LRMKWMMAMKYPITA
LRMKFMMYMNYPATA

SEQ ID NO: 227248 - protein, 15 aa, Artificial Sequence
  Description of Artificial Sequence: Synthetic peptide
  Seed: LRMKWMMAMKYPITA
LRMKFMMYMNYPFTA

SEQ ID NO: 227249 - protein, 15 aa, Artificial Sequence
  Description of Artificial Sequence: Synthetic peptide
  Seed: LRMKWMMAMKYPITA
LRMKFMMYMNYPGTA

SEQ ID NO: 227250 - protein, 15 aa, Artificial Sequence
  Description of Artificial Sequence: Synthetic peptide
  Seed: LRMKWMMAMKYPITA
LRMKFMMYMNYPHTA

SEQ ID NO: 227251 - protein, 15 aa, Artificial Sequence
  Description of Artificial Sequence: Synthetic peptide
  Seed: LRMKWMMAMKYPITA
LRMKFMMYMNYPITA

SEQ ID NO: 227252 - protein, 15 aa, Artificial Sequence
  Description of Artificial Sequence: Synthetic peptide
  Seed: LRMKWMMAMKYPITA
LRMKFMMYMNYPKTA

SEQ ID NO: 227253 - protein, 15 aa, Artificial Sequence
  Description of Artificial Sequence: Synthetic peptide
  Seed: LRMKWMMAMKYPITA
LRMKFMMYMNYPLTA

SEQ ID NO: 227254 - protein, 15 aa, Artificial Sequence
  Description of Artificial Sequence: Synthetic peptide
  Seed: LRMKWMMAMKYPITA
LRMKFMMYMNYPMTA

SEQ ID NO: 227255 - protein, 15 aa, Artificial Sequence
  Description of Artificial Sequence: Synthetic peptide
  Seed: LRMKWMMAMKYPITA
LRMKFMMYMNYPRTA

SEQ ID NO: 227256 - protein, 15 aa, Artificial Sequence
  Description of Artificial Sequence: Synthetic peptide
  Seed: LRMKWMMAMKYPITA
LRMKFMMYMNYPSTA

SEQ ID NO: 227257 - protein, 15 aa, Artificial Sequence
  Description of Artificial Sequence: Synthetic peptide
  Seed: LRMKWMMAMKYPITA
LRMKFMMYMNYPTTA

SEQ ID NO: 227258 - protein, 15 aa, Artificial Sequence
  Description of Artificial Sequence: Synthetic peptide
  Seed: LRMKWMMAMKYPITA
LRMKFMMYMNYPVTA

SEQ ID NO: 227259 - protein, 15 aa, Artificial Sequence
  Description of Artificial Sequence: Synthetic peptide
  Seed: LRMKWMMAMKYPITA
LRMKFMMYMNYPYTA

SEQ ID NO: 227260 - protein, 15 aa, Artificial Sequence
  Description of Artificial Sequence: Synthetic peptide
  Seed: LRMKWMMAMKYPITA
LRMKFMMYMPYPATA

SEQ ID NO: 227261 - protein, 15 aa, Artificial Sequence
  Description of Artificial Sequence: Synthetic peptide
  Seed: LRMKWMMAMKYPITA
LRMKFMMYMPYPGTA

SEQ ID NO: 227262 - protein, 15 aa, Artificial Sequence
  Description of Artificial Sequence: Synthetic peptide
  Seed: LRMKWMMAMKYPITA
LRMKFMMYMPYPHTA

SEQ ID NO: 227263 - protein, 15 aa, Artificial Sequence
  Description of Artificial Sequence: Synthetic peptide
  Seed: LRMKWMMAMKYPITA
LRMKFMMYMPYPITA

SEQ ID NO: 227264 - protein, 15 aa, Artificial Sequence
  Description of Artificial Sequence: Synthetic peptide
  Seed: LRMKWMMAMKYPITA
LRMKFMMYMPYPKTA

SEQ ID NO: 227265 - protein, 15 aa, Artificial Sequence
  Description of Artificial Sequence: Synthetic peptide
  Seed: LRMKWMMAMKYPITA
LRMKFMMYMPYPLTA

SEQ ID NO: 227266 - protein, 15 aa, Artificial Sequence
  Description of Artificial Sequence: Synthetic peptide
  Seed: LRMKWMMAMKYPITA
LRMKFMMYMPYPMTA

SEQ ID NO: 227267 - protein, 15 aa, Artificial Sequence
  Description of Artificial Sequence: Synthetic peptide
  Seed: LRMKWMMAMKYPITA
LRMKFMMYMPYPNTA

SEQ ID NO: 227268 - protein, 15 aa, Artificial Sequence
  Description of Artificial Sequence: Synthetic peptide
  Seed: LRMKWMMAMKYPITA
LRMKFMMYMPYPQTA

SEQ ID NO: 227269 - protein, 15 aa, Artificial Sequence
  Description of Artificial Sequence: Synthetic peptide
  Seed: LRMKWMMAMKYPITA
LRMKFMMYMPYPRTA

SEQ ID NO: 227270 - protein, 15 aa, Artificial Sequence
  Description of Artificial Sequence: Synthetic peptide
  Seed: LRMKWMMAMKYPITA
LRMKFMMYMPYPSTA

SEQ ID NO: 227271 - protein, 15 aa, Artificial Sequence
  Description of Artificial Sequence: Synthetic peptide
  Seed: LRMKWMMAMKYPITA
LRMKFMMYMPYPTTA

SEQ ID NO: 227272 - protein, 15 aa, Artificial Sequence
  Description of Artificial Sequence: Synthetic peptide
  Seed: LRMKWMMAMKYPITA
LRMKFMMYMPYPVTA

SEQ ID NO: 227273 - protein, 15 aa, Artificial Sequence
  Description of Artificial Sequence: Synthetic peptide
  Seed: LRMKWMMAMKYPITA
LRMKFMMYMPYPYTA

SEQ ID NO: 227274 - protein, 15 aa, Artificial Sequence
  Description of Artificial Sequence: Synthetic peptide
  Seed: LRMKWMMAMKYPITA
LRMKFMMYMQYPATA

SEQ ID NO: 227275 - protein, 15 aa, Artificial Sequence
  Description of Artificial Sequence: Synthetic peptide
  Seed: LRMKWMMAMKYPITA
LRMKFMMYMQYPITA

SEQ ID NO: 227276 - protein, 15 aa, Artificial Sequence
  Description of Artificial Sequence: Synthetic peptide
  Seed: LRMKWMMAMKYPITA
LRMKFMMYMQYPLTA

SEQ ID NO: 227277 - protein, 15 aa, Artificial Sequence
  Description of Artificial Sequence: Synthetic peptide
  Seed: LRMKWMMAMKYPITA
LRMKFMMYMQYPVTA

SEQ ID NO: 227278 - protein, 15 aa, Artificial Sequence
  Description of Artificial Sequence: Synthetic peptide
  Seed: LRMKWMMAMKYPITA
LRMKFMMYMRYPATA

SEQ ID NO: 227279 - protein, 15 aa, Artificial Sequence
  Description of Artificial Sequence: Synthetic peptide
  Seed: LRMKWMMAMKYPITA
LRMKFMMYMRYPETA

SEQ ID NO: 227280 - protein, 15 aa, Artificial Sequence
  Description of Artificial Sequence: Synthetic peptide
  Seed: LRMKWMMAMKYPITA
LRMKFMMYMRYPFTA

SEQ ID NO: 227281 - protein, 15 aa, Artificial Sequence
  Description of Artificial Sequence: Synthetic peptide
  Seed: LRMKWMMAMKYPITA
LRMKFMMYMRYPGTA

SEQ ID NO: 227282 - protein, 15 aa, Artificial Sequence
  Description of Artificial Sequence: Synthetic peptide
  Seed: LRMKWMMAMKYPITA
LRMKFMMYMRYPHTA

SEQ ID NO: 227283 - protein, 15 aa, Artificial Sequence
  Description of Artificial Sequence: Synthetic peptide
  Seed: LRMKWMMAMKYPITA
LRMKFMMYMRYPITA

SEQ ID NO: 227284 - protein, 15 aa, Artificial Sequence
  Description of Artificial Sequence: Synthetic peptide
  Seed: LRMKWMMAMKYPITA
LRMKFMMYMRYPKTA

SEQ ID NO: 227285 - protein, 15 aa, Artificial Sequence
  Description of Artificial Sequence: Synthetic peptide
  Seed: LRMKWMMAMKYPITA
LRMKFMMYMRYPLTA

SEQ ID NO: 227286 - protein, 15 aa, Artificial Sequence
  Description of Artificial Sequence: Synthetic peptide
  Seed: LRMKWMMAMKYPITA
LRMKFMMYMRYPMTA

SEQ ID NO: 227287 - protein, 15 aa, Artificial Sequence
  Description of Artificial Sequence: Synthetic peptide
  Seed: LRMKWMMAMKYPITA
LRMKFMMYMRYPQTA

SEQ ID NO: 227288 - protein, 15 aa, Artificial Sequence
  Description of Artificial Sequence: Synthetic peptide
  Seed: LRMKWMMAMKYPITA
LRMKFMMYMRYPRTA

SEQ ID NO: 227289 - protein, 15 aa, Artificial Sequence
  Description of Artificial Sequence: Synthetic peptide
  Seed: LRMKWMMAMKYPITA
LRMKFMMYMRYPSTA

SEQ ID NO: 227290 - protein, 15 aa, Artificial Sequence
  Description of Artificial Sequence: Synthetic peptide
  Seed: LRMKWMMAMKYPITA
LRMKFMMYMRYPTTA

SEQ ID NO: 227291 - protein, 15 aa, Artificial Sequence
  Description of Artificial Sequence: Synthetic peptide
  Seed: LRMKWMMAMKYPITA
LRMKFMMYMRYPVTA

SEQ ID NO: 227292 - protein, 15 aa, Artificial Sequence
  Description of Artificial Sequence: Synthetic peptide
  Seed: LRMKWMMAMKYPITA
LRMKFMMYMRYPYTA

SEQ ID NO: 227293 - protein, 15 aa, Artificial Sequence
  Description of Artificial Sequence: Synthetic peptide
  Seed: LRMKWMMAMKYPITA
LRMKFMMYMSYPATA

SEQ ID NO: 227294 - protein, 15 aa, Artificial Sequence
  Description of Artificial Sequence: Synthetic peptide
  Seed: LRMKWMMAMKYPITA
LRMKFMMYMSYPFTA

SEQ ID NO: 227295 - protein, 15 aa, Artificial Sequence
  Description of Artificial Sequence: Synthetic peptide
  Seed: LRMKWMMAMKYPITA
LRMKFMMYMSYPGTA

SEQ ID NO: 227296 - protein, 15 aa, Artificial Sequence
  Description of Artificial Sequence: Synthetic peptide
  Seed: LRMKWMMAMKYPITA
LRMKFMMYMSYPHTA

SEQ ID NO: 227297 - protein, 15 aa, Artificial Sequence
  Description of Artificial Sequence: Synthetic peptide
  Seed: LRMKWMMAMKYPITA
LRMKFMMYMSYPITA

SEQ ID NO: 227298 - protein, 15 aa, Artificial Sequence
  Description of Artificial Sequence: Synthetic peptide
  Seed: LRMKWMMAMKYPITA
LRMKFMMYMSYPKTA

SEQ ID NO: 227299 - protein, 15 aa, Artificial Sequence
  Description of Artificial Sequence: Synthetic peptide
  Seed: LRMKWMMAMKYPITA
LRMKFMMYMSYPLTA

SEQ ID NO: 227300 - protein, 15 aa, Artificial Sequence
  Description of Artificial Sequence: Synthetic peptide
  Seed: LRMKWMMAMKYPITA
LRMKFMMYMSYPMTA

SEQ ID NO: 227301 - protein, 15 aa, Artificial Sequence
  Description of Artificial Sequence: Synthetic peptide
  Seed: LRMKWMMAMKYPITA
LRMKFMMYMSYPNTA

SEQ ID NO: 227302 - protein, 15 aa, Artificial Sequence
  Description of Artificial Sequence: Synthetic peptide
  Seed: LRMKWMMAMKYPITA
LRMKFMMYMSYPQTA

SEQ ID NO: 227303 - protein, 15 aa, Artificial Sequence
  Description of Artificial Sequence: Synthetic peptide
  Seed: LRMKWMMAMKYPITA
LRMKFMMYMSYPRTA

SEQ ID NO: 227304 - protein, 15 aa, Artificial Sequence
  Description of Artificial Sequence: Synthetic peptide
  Seed: LRMKWMMAMKYPITA
LRMKFMMYMSYPSTA

SEQ ID NO: 227305 - protein, 15 aa, Artificial Sequence
  Description of Artificial Sequence: Synthetic peptide
  Seed: LRMKWMMAMKYPITA
LRMKFMMYMSYPTTA

SEQ ID NO: 227306 - protein, 15 aa, Artificial Sequence
  Description of Artificial Sequence: Synthetic peptide
  Seed: LRMKWMMAMKYPITA
LRMKFMMYMSYPVTA

SEQ ID NO: 227307 - protein, 15 aa, Artificial Sequence
  Description of Artificial Sequence: Synthetic peptide
  Seed: LRMKWMMAMKYPITA
LRMKFMMYMSYPYTA

SEQ ID NO: 227308 - protein, 15 aa, Artificial Sequence
  Description of Artificial Sequence: Synthetic peptide
  Seed: LRMKWMMAMKYPITA
LRMKFMMYMTYPATA

SEQ ID NO: 227309 - protein, 15 aa, Artificial Sequence
  Description of Artificial Sequence: Synthetic peptide
  Seed: LRMKWMMAMKYPITA
LRMKFMMYMTYPDTA

SEQ ID NO: 227310 - protein, 15 aa, Artificial Sequence
  Description of Artificial Sequence: Synthetic peptide
  Seed: LRMKWMMAMKYPITA
LRMKFMMYMTYPETA

SEQ ID NO: 227311 - protein, 15 aa, Artificial Sequence
  Description of Artificial Sequence: Synthetic peptide
  Seed: LRMKWMMAMKYPITA
LRMKFMMYMTYPFTA

SEQ ID NO: 227312 - protein, 15 aa, Artificial Sequence
  Description of Artificial Sequence: Synthetic peptide
  Seed: LRMKWMMAMKYPITA
LRMKFMMYMTYPGTA

SEQ ID NO: 227313 - protein, 15 aa, Artificial Sequence
  Description of Artificial Sequence: Synthetic peptide
  Seed: LRMKWMMAMKYPITA
LRMKFMMYMTYPHTA

SEQ ID NO: 227314 - protein, 15 aa, Artificial Sequence
  Description of Artificial Sequence: Synthetic peptide
  Seed: LRMKWMMAMKYPITA
LRMKFMMYMTYPITA

SEQ ID NO: 227315 - protein, 15 aa, Artificial Sequence
  Description of Artificial Sequence: Synthetic peptide
  Seed: LRMKWMMAMKYPITA
LRMKFMMYMTYPKTA

SEQ ID NO: 227316 - protein, 15 aa, Artificial Sequence
  Description of Artificial Sequence: Synthetic peptide
  Seed: LRMKWMMAMKYPITA
LRMKFMMYMTYPLTA

SEQ ID NO: 227317 - protein, 15 aa, Artificial Sequence
  Description of Artificial Sequence: Synthetic peptide
  Seed: LRMKWMMAMKYPITA
LRMKFMMYMTYPMTA

SEQ ID NO: 227318 - protein, 15 aa, Artificial Sequence
  Description of Artificial Sequence: Synthetic peptide
  Seed: LRMKWMMAMKYPITA
LRMKFMMYMTYPNTA

SEQ ID NO: 227319 - protein, 15 aa, Artificial Sequence
  Description of Artificial Sequence: Synthetic peptide
  Seed: LRMKWMMAMKYPITA
LRMKFMMYMTYPQTA

SEQ ID NO: 227320 - protein, 15 aa, Artificial Sequence
  Description of Artificial Sequence: Synthetic peptide
  Seed: LRMKWMMAMKYPITA
LRMKFMMYMTYPRTA

SEQ ID NO: 227321 - protein, 15 aa, Artificial Sequence
  Description of Artificial Sequence: Synthetic peptide
  Seed: LRMKWMMAMKYPITA
LRMKFMMYMTYPSTA

SEQ ID NO: 227322 - protein, 15 aa, Artificial Sequence
  Description of Artificial Sequence: Synthetic peptide
  Seed: LRMKWMMAMKYPITA
LRMKFMMYMTYPTTA

SEQ ID NO: 227323 - protein, 15 aa, Artificial Sequence
  Description of Artificial Sequence: Synthetic peptide
  Seed: LRMKWMMAMKYPITA
LRMKFMMYMTYPVTA

SEQ ID NO: 227324 - protein, 15 aa, Artificial Sequence
  Description of Artificial Sequence: Synthetic peptide
  Seed: LRMKWMMAMKYPITA
LRMKFMMYMTYPYTA

SEQ ID NO: 227325 - protein, 15 aa, Artificial Sequence
  Description of Artificial Sequence: Synthetic peptide
  Seed: LRMKWMMAMKYPITA
LRMKFMMYMVYPATA

SEQ ID NO: 227326 - protein, 15 aa, Artificial Sequence
  Description of Artificial Sequence: Synthetic peptide
  Seed: LRMKWMMAMKYPITA
LRMKFMMYMVYPDTA

SEQ ID NO: 227327 - protein, 15 aa, Artificial Sequence
  Description of Artificial Sequence: Synthetic peptide
  Seed: LRMKWMMAMKYPITA
LRMKFMMYMVYPGTA

SEQ ID NO: 227328 - protein, 15 aa, Artificial Sequence
  Description of Artificial Sequence: Synthetic peptide
  Seed: LRMKWMMAMKYPITA
LRMKFMMYMVYPITA

SEQ ID NO: 227329 - protein, 15 aa, Artificial Sequence
  Description of Artificial Sequence: Synthetic peptide
  Seed: LRMKWMMAMKYPITA
LRMKFMMYMVYPKTA

SEQ ID NO: 227330 - protein, 15 aa, Artificial Sequence
  Description of Artificial Sequence: Synthetic peptide
  Seed: LRMKWMMAMKYPITA
LRMKFMMYMVYPLTA

SEQ ID NO: 227331 - protein, 15 aa, Artificial Sequence
  Description of Artificial Sequence: Synthetic peptide
  Seed: LRMKWMMAMKYPITA
LRMKFMMYMVYPMTA

SEQ ID NO: 227332 - protein, 15 aa, Artificial Sequence
  Description of Artificial Sequence: Synthetic peptide
  Seed: LRMKWMMAMKYPITA
LRMKFMMYMVYPNTA

SEQ ID NO: 227333 - protein, 15 aa, Artificial Sequence
  Description of Artificial Sequence: Synthetic peptide
  Seed: LRMKWMMAMKYPITA
LRMKFMMYMVYPRTA

SEQ ID NO: 227334 - protein, 15 aa, Artificial Sequence
  Description of Artificial Sequence: Synthetic peptide
  Seed: LRMKWMMAMKYPITA
LRMKFMMYMVYPSTA

SEQ ID NO: 227335 - protein, 15 aa, Artificial Sequence
  Description of Artificial Sequence: Synthetic peptide
  Seed: LRMKWMMAMKYPITA
LRMKFMMYMVYPTTA

SEQ ID NO: 227336 - protein, 15 aa, Artificial Sequence
  Description of Artificial Sequence: Synthetic peptide
  Seed: LRMKWMMAMKYPITA
LRMKFMMYMVYPVTA

SEQ ID NO: 227337 - protein, 15 aa, Artificial Sequence
  Description of Artificial Sequence: Synthetic peptide
  Seed: LRMKWMMAMKYPITA
LRMKGMMAMGYPATA

SEQ ID NO: 227338 - protein, 15 aa, Artificial Sequence
  Description of Artificial Sequence: Synthetic peptide
  Seed: LRMKWMMAMKYPITA
LRMKGMMAMGYPITA

SEQ ID NO: 227339 - protein, 15 aa, Artificial Sequence
  Description of Artificial Sequence: Synthetic peptide
  Seed: LRMKWMMAMKYPITA
LRMKGMMAMGYPLTA

SEQ ID NO: 227340 - protein, 15 aa, Artificial Sequence
  Description of Artificial Sequence: Synthetic peptide
  Seed: LRMKWMMAMKYPITA
LRMKGMMAMGYPMTA

SEQ ID NO: 227341 - protein, 15 aa, Artificial Sequence
  Description of Artificial Sequence: Synthetic peptide
  Seed: LRMKWMMAMKYPITA
LRMKGMMAMGYPVTA

SEQ ID NO: 227342 - protein, 15 aa, Artificial Sequence
  Description of Artificial Sequence: Synthetic peptide
  Seed: LRMKWMMAMKYPITA
LRMKGMMAMRYPATA

SEQ ID NO: 227343 - protein, 15 aa, Artificial Sequence
  Description of Artificial Sequence: Synthetic peptide
  Seed: LRMKWMMAMKYPITA
LRMKGMMAMSYPATA

SEQ ID NO: 227344 - protein, 15 aa, Artificial Sequence
  Description of Artificial Sequence: Synthetic peptide
  Seed: LRMKWMMAMKYPITA
LRMKGMMAMSYPITA

SEQ ID NO: 227345 - protein, 15 aa, Artificial Sequence
  Description of Artificial Sequence: Synthetic peptide
  Seed: LRMKWMMAMKYPITA
LRMKGMMAMSYPLTA

SEQ ID NO: 227346 - protein, 15 aa, Artificial Sequence
  Description of Artificial Sequence: Synthetic peptide
  Seed: LRMKWMMAMKYPITA
LRMKGMMAMSYPVTA

SEQ ID NO: 227347 - protein, 15 aa, Artificial Sequence
  Description of Artificial Sequence: Synthetic peptide
  Seed: LRMKWMMAMKYPITA
LRMKGMMGMAYPLTA

SEQ ID NO: 227348 - protein, 15 aa, Artificial Sequence
  Description of Artificial Sequence: Synthetic peptide
  Seed: LRMKWMMAMKYPITA
LRMKGMMHMRYPRTA

SEQ ID NO: 227349 - protein, 15 aa, Artificial Sequence
  Description of Artificial Sequence: Synthetic peptide
  Seed: LRMKWMMAMKYPITA
LRMKGMMHMRYPYTA

SEQ ID NO: 227350 - protein, 15 aa, Artificial Sequence
  Description of Artificial Sequence: Synthetic peptide
  Seed: LRMKWMMAMKYPITA
LRMKGMMIMGYPATA

SEQ ID NO: 227351 - protein, 15 aa, Artificial Sequence
  Description of Artificial Sequence: Synthetic peptide
  Seed: LRMKWMMAMKYPITA
LRMKGMMIMGYPITA

SEQ ID NO: 227352 - protein, 15 aa, Artificial Sequence
  Description of Artificial Sequence: Synthetic peptide
  Seed: LRMKWMMAMKYPITA
LRMKGMMIMGYPLTA

SEQ ID NO: 227353 - protein, 15 aa, Artificial Sequence
  Description of Artificial Sequence: Synthetic peptide
  Seed: LRMKWMMAMKYPITA
LRMKGMMIMGYPMTA

SEQ ID NO: 227354 - protein, 15 aa, Artificial Sequence
  Description of Artificial Sequence: Synthetic peptide
  Seed: LRMKWMMAMKYPITA
LRMKGMMIMGYPVTA

SEQ ID NO: 227355 - protein, 15 aa, Artificial Sequence
  Description of Artificial Sequence: Synthetic peptide
  Seed: LRMKWMMAMKYPITA
LRMKGMMIMKYPATA

SEQ ID NO: 227356 - protein, 15 aa, Artificial Sequence
  Description of Artificial Sequence: Synthetic peptide
  Seed: LRMKWMMAMKYPITA
LRMKGMMIMKYPRTA

SEQ ID NO: 227357 - protein, 15 aa, Artificial Sequence
  Description of Artificial Sequence: Synthetic peptide
  Seed: LRMKWMMAMKYPITA
LRMKGMMIMPYPITA

SEQ ID NO: 227358 - protein, 15 aa, Artificial Sequence
  Description of Artificial Sequence: Synthetic peptide
  Seed: LRMKWMMAMKYPITA
LRMKGMMIMPYPLTA

SEQ ID NO: 227359 - protein, 15 aa, Artificial Sequence
  Description of Artificial Sequence: Synthetic peptide
  Seed: LRMKWMMAMKYPITA
LRMKGMMIMPYPVTA

SEQ ID NO: 227360 - protein, 15 aa, Artificial Sequence
  Description of Artificial Sequence: Synthetic peptide
  Seed: LRMKWMMAMKYPITA
LRMKGMMIMRYPATA

SEQ ID NO: 227361 - protein, 15 aa, Artificial Sequence
  Description of Artificial Sequence: Synthetic peptide
  Seed: LRMKWMMAMKYPITA
LRMKGMMIMRYPFTA

SEQ ID NO: 227362 - protein, 15 aa, Artificial Sequence
  Description of Artificial Sequence: Synthetic peptide
  Seed: LRMKWMMAMKYPITA
LRMKGMMIMRYPHTA

SEQ ID NO: 227363 - protein, 15 aa, Artificial Sequence
  Description of Artificial Sequence: Synthetic peptide
  Seed: LRMKWMMAMKYPITA
LRMKGMMIMRYPITA

SEQ ID NO: 227364 - protein, 15 aa, Artificial Sequence
  Description of Artificial Sequence: Synthetic peptide
  Seed: LRMKWMMAMKYPITA
LRMKGMMIMRYPKTA

SEQ ID NO: 227365 - protein, 15 aa, Artificial Sequence
  Description of Artificial Sequence: Synthetic peptide
  Seed: LRMKWMMAMKYPITA
LRMKGMMIMRYPLTA

SEQ ID NO: 227366 - protein, 15 aa, Artificial Sequence
  Description of Artificial Sequence: Synthetic peptide
  Seed: LRMKWMMAMKYPITA
LRMKGMMIMRYPMTA

SEQ ID NO: 227367 - protein, 15 aa, Artificial Sequence
  Description of Artificial Sequence: Synthetic peptide
  Seed: LRMKWMMAMKYPITA
LRMKGMMIMRYPQTA

SEQ ID NO: 227368 - protein, 15 aa, Artificial Sequence
  Description of Artificial Sequence: Synthetic peptide
  Seed: LRMKWMMAMKYPITA
LRMKGMMIMRYPRTA

SEQ ID NO: 227369 - protein, 15 aa, Artificial Sequence
  Description of Artificial Sequence: Synthetic peptide
  Seed: LRMKWMMAMKYPITA
LRMKGMMIMRYPSTA

SEQ ID NO: 227370 - protein, 15 aa, Artificial Sequence
  Description of Artificial Sequence: Synthetic peptide
  Seed: LRMKWMMAMKYPITA
LRMKGMMIMRYPVTA

SEQ ID NO: 227371 - protein, 15 aa, Artificial Sequence
  Description of Artificial Sequence: Synthetic peptide
  Seed: LRMKWMMAMKYPITA
LRMKGMMIMRYPYTA

SEQ ID NO: 227372 - protein, 15 aa, Artificial Sequence
  Description of Artificial Sequence: Synthetic peptide
  Seed: LRMKWMMAMKYPITA
LRMKGMMLMAYPATA

SEQ ID NO: 227373 - protein, 15 aa, Artificial Sequence
  Description of Artificial Sequence: Synthetic peptide
  Seed: LRMKWMMAMKYPITA
LRMKGMMLMAYPCTA

SEQ ID NO: 227374 - protein, 15 aa, Artificial Sequence
  Description of Artificial Sequence: Synthetic peptide
  Seed: LRMKWMMAMKYPITA
LRMKGMMLMAYPITA

SEQ ID NO: 227375 - protein, 15 aa, Artificial Sequence
  Description of Artificial Sequence: Synthetic peptide
  Seed: LRMKWMMAMKYPITA
LRMKGMMLMAYPLTA

SEQ ID NO: 227376 - protein, 15 aa, Artificial Sequence
  Description of Artificial Sequence: Synthetic peptide
  Seed: LRMKWMMAMKYPITA
LRMKGMMLMAYPMTA

SEQ ID NO: 227377 - protein, 15 aa, Artificial Sequence
  Description of Artificial Sequence: Synthetic peptide
  Seed: LRMKWMMAMKYPITA
LRMKGMMLMAYPSTA

SEQ ID NO: 227378 - protein, 15 aa, Artificial Sequence
  Description of Artificial Sequence: Synthetic peptide
  Seed: LRMKWMMAMKYPITA
LRMKGMMLMAYPTTA

SEQ ID NO: 227379 - protein, 15 aa, Artificial Sequence
  Description of Artificial Sequence: Synthetic peptide
  Seed: LRMKWMMAMKYPITA
LRMKGMMLMAYPVTA

SEQ ID NO: 227380 - protein, 15 aa, Artificial Sequence
  Description of Artificial Sequence: Synthetic peptide
  Seed: LRMKWMMAMKYPITA
LRMKGMMLMGYPATA

SEQ ID NO: 227381 - protein, 15 aa, Artificial Sequence
  Description of Artificial Sequence: Synthetic peptide
  Seed: LRMKWMMAMKYPITA
LRMKGMMLMGYPITA

SEQ ID NO: 227382 - protein, 15 aa, Artificial Sequence
  Description of Artificial Sequence: Synthetic peptide
  Seed: LRMKWMMAMKYPITA
LRMKGMMLMGYPLTA

SEQ ID NO: 227383 - protein, 15 aa, Artificial Sequence
  Description of Artificial Sequence: Synthetic peptide
  Seed: LRMKWMMAMKYPITA
LRMKGMMLMGYPMTA

SEQ ID NO: 227384 - protein, 15 aa, Artificial Sequence
  Description of Artificial Sequence: Synthetic peptide
  Seed: LRMKWMMAMKYPITA
LRMKGMMLMGYPSTA

SEQ ID NO: 227385 - protein, 15 aa, Artificial Sequence
  Description of Artificial Sequence: Synthetic peptide
  Seed: LRMKWMMAMKYPITA
LRMKGMMLMGYPTTA

SEQ ID NO: 227386 - protein, 15 aa, Artificial Sequence
  Description of Artificial Sequence: Synthetic peptide
  Seed: LRMKWMMAMKYPITA
LRMKGMMLMGYPVTA

SEQ ID NO: 227387 - protein, 15 aa, Artificial Sequence
  Description of Artificial Sequence: Synthetic peptide
  Seed: LRMKWMMAMKYPITA
LRMKGMMLMNYPITA

SEQ ID NO: 227388 - protein, 15 aa, Artificial Sequence
  Description of Artificial Sequence: Synthetic peptide
  Seed: LRMKWMMAMKYPITA
LRMKGMMLMNYPLTA

SEQ ID NO: 227389 - protein, 15 aa, Artificial Sequence
  Description of Artificial Sequence: Synthetic peptide
  Seed: LRMKWMMAMKYPITA
LRMKGMMLMNYPVTA

SEQ ID NO: 227390 - protein, 15 aa, Artificial Sequence
  Description of Artificial Sequence: Synthetic peptide
  Seed: LRMKWMMAMKYPITA
LRMKGMMLMPYPATA

SEQ ID NO: 227391 - protein, 15 aa, Artificial Sequence
  Description of Artificial Sequence: Synthetic peptide
  Seed: LRMKWMMAMKYPITA
LRMKGMMLMPYPITA

SEQ ID NO: 227392 - protein, 15 aa, Artificial Sequence
  Description of Artificial Sequence: Synthetic peptide
  Seed: LRMKWMMAMKYPITA
LRMKGMMLMPYPLTA

SEQ ID NO: 227393 - protein, 15 aa, Artificial Sequence
  Description of Artificial Sequence: Synthetic peptide
  Seed: LRMKWMMAMKYPITA
LRMKGMMLMPYPMTA

SEQ ID NO: 227394 - protein, 15 aa, Artificial Sequence
  Description of Artificial Sequence: Synthetic peptide
  Seed: LRMKWMMAMKYPITA
LRMKGMMLMPYPVTA

SEQ ID NO: 227395 - protein, 15 aa, Artificial Sequence
  Description of Artificial Sequence: Synthetic peptide
  Seed: LRMKWMMAMKYPITA
LRMKGMMLMRYPATA

SEQ ID NO: 227396 - protein, 15 aa, Artificial Sequence
  Description of Artificial Sequence: Synthetic peptide
  Seed: LRMKWMMAMKYPITA
LRMKGMMLMRYPKTA

SEQ ID NO: 227397 - protein, 15 aa, Artificial Sequence
  Description of Artificial Sequence: Synthetic peptide
  Seed: LRMKWMMAMKYPITA
LRMKGMMLMRYPRTA

SEQ ID NO: 227398 - protein, 15 aa, Artificial Sequence
  Description of Artificial Sequence: Synthetic peptide
  Seed: LRMKWMMAMKYPITA
LRMKGMMLMRYPSTA

SEQ ID NO: 227399 - protein, 15 aa, Artificial Sequence
  Description of Artificial Sequence: Synthetic peptide
  Seed: LRMKWMMAMKYPITA
LRMKGMMLMSYPATA

SEQ ID NO: 227400 - protein, 15 aa, Artificial Sequence
  Description of Artificial Sequence: Synthetic peptide
  Seed: LRMKWMMAMKYPITA
LRMKGMMLMSYPITA

SEQ ID NO: 227401 - protein, 15 aa, Artificial Sequence
  Description of Artificial Sequence: Synthetic peptide
  Seed: LRMKWMMAMKYPITA
LRMKGMMLMSYPLTA

SEQ ID NO: 227402 - protein, 15 aa, Artificial Sequence
  Description of Artificial Sequence: Synthetic peptide
  Seed: LRMKWMMAMKYPITA
LRMKGMMLMSYPMTA

SEQ ID NO: 227403 - protein, 15 aa, Artificial Sequence
  Description of Artificial Sequence: Synthetic peptide
  Seed: LRMKWMMAMKYPITA
LRMKGMMLMSYPSTA

SEQ ID NO: 227404 - protein, 15 aa, Artificial Sequence
  Description of Artificial Sequence: Synthetic peptide
  Seed: LRMKWMMAMKYPITA
LRMKGMMLMSYPTTA

SEQ ID NO: 227405 - protein, 15 aa, Artificial Sequence
  Description of Artificial Sequence: Synthetic peptide
  Seed: LRMKWMMAMKYPITA
LRMKGMMLMSYPVTA

SEQ ID NO: 227406 - protein, 15 aa, Artificial Sequence
  Description of Artificial Sequence: Synthetic peptide
  Seed: LRMKWMMAMKYPITA
LRMKGMMLMTYPMTA

SEQ ID NO: 227407 - protein, 15 aa, Artificial Sequence
  Description of Artificial Sequence: Synthetic peptide
  Seed: LRMKWMMAMKYPITA
LRMKGMMMMAYPATA

SEQ ID NO: 227408 - protein, 15 aa, Artificial Sequence
  Description of Artificial Sequence: Synthetic peptide
  Seed: LRMKWMMAMKYPITA
LRMKGMMMMAYPLTA

SEQ ID NO: 227409 - protein, 15 aa, Artificial Sequence
  Description of Artificial Sequence: Synthetic peptide
  Seed: LRMKWMMAMKYPITA
LRMKGMMMMAYPSTA

SEQ ID NO: 227410 - protein, 15 aa, Artificial Sequence
  Description of Artificial Sequence: Synthetic peptide
  Seed: LRMKWMMAMKYPITA
LRMKGMMMMAYPTTA

SEQ ID NO: 227411 - protein, 15 aa, Artificial Sequence
  Description of Artificial Sequence: Synthetic peptide
  Seed: LRMKWMMAMKYPITA
LRMKGMMMMAYPVTA

SEQ ID NO: 227412 - protein, 15 aa, Artificial Sequence
  Description of Artificial Sequence: Synthetic peptide
  Seed: LRMKWMMAMKYPITA
LRMKGMMMMGYPATA

SEQ ID NO: 227413 - protein, 15 aa, Artificial Sequence
  Description of Artificial Sequence: Synthetic peptide
  Seed: LRMKWMMAMKYPITA
LRMKGMMMMGYPITA

SEQ ID NO: 227414 - protein, 15 aa, Artificial Sequence
  Description of Artificial Sequence: Synthetic peptide
  Seed: LRMKWMMAMKYPITA
LRMKGMMMMGYPLTA

SEQ ID NO: 227415 - protein, 15 aa, Artificial Sequence
  Description of Artificial Sequence: Synthetic peptide
  Seed: LRMKWMMAMKYPITA
LRMKGMMMMGYPMTA

SEQ ID NO: 227416 - protein, 15 aa, Artificial Sequence
  Description of Artificial Sequence: Synthetic peptide
  Seed: LRMKWMMAMKYPITA
LRMKGMMMMGYPTTA

SEQ ID NO: 227417 - protein, 15 aa, Artificial Sequence
  Description of Artificial Sequence: Synthetic peptide
  Seed: LRMKWMMAMKYPITA
LRMKGMMMMGYPVTA

SEQ ID NO: 227418 - protein, 15 aa, Artificial Sequence
  Description of Artificial Sequence: Synthetic peptide
  Seed: LRMKWMMAMKYPITA
LRMKGMMMMKYPATA

SEQ ID NO: 227419 - protein, 15 aa, Artificial Sequence
  Description of Artificial Sequence: Synthetic peptide
  Seed: LRMKWMMAMKYPITA
LRMKGMMMMNYPITA

SEQ ID NO: 227420 - protein, 15 aa, Artificial Sequence
  Description of Artificial Sequence: Synthetic peptide
  Seed: LRMKWMMAMKYPITA
LRMKGMMMMNYPLTA

SEQ ID NO: 227421 - protein, 15 aa, Artificial Sequence
  Description of Artificial Sequence: Synthetic peptide
  Seed: LRMKWMMAMKYPITA
LRMKGMMMMNYPVTA

SEQ ID NO: 227422 - protein, 15 aa, Artificial Sequence
  Description of Artificial Sequence: Synthetic peptide
  Seed: LRMKWMMAMKYPITA
LRMKGMMMMPYPITA

SEQ ID NO: 227423 - protein, 15 aa, Artificial Sequence
  Description of Artificial Sequence: Synthetic peptide
  Seed: LRMKWMMAMKYPITA
LRMKGMMMMPYPLTA

SEQ ID NO: 227424 - protein, 15 aa, Artificial Sequence
  Description of Artificial Sequence: Synthetic peptide
  Seed: LRMKWMMAMKYPITA
LRMKGMMMMPYPMTA

SEQ ID NO: 227425 - protein, 15 aa, Artificial Sequence
  Description of Artificial Sequence: Synthetic peptide
  Seed: LRMKWMMAMKYPITA
LRMKGMMMMPYPVTA

SEQ ID NO: 227426 - protein, 15 aa, Artificial Sequence
  Description of Artificial Sequence: Synthetic peptide
  Seed: LRMKWMMAMKYPITA
LRMKGMMMMRYPATA

SEQ ID NO: 227427 - protein, 15 aa, Artificial Sequence
  Description of Artificial Sequence: Synthetic peptide
  Seed: LRMKWMMAMKYPITA
LRMKGMMMMRYPKTA

SEQ ID NO: 227428 - protein, 15 aa, Artificial Sequence
  Description of Artificial Sequence: Synthetic peptide
  Seed: LRMKWMMAMKYPITA
LRMKGMMMMRYPRTA

SEQ ID NO: 227429 - protein, 15 aa, Artificial Sequence
  Description of Artificial Sequence: Synthetic peptide
  Seed: LRMKWMMAMKYPITA
LRMKGMMMMRYPSTA

SEQ ID NO: 227430 - protein, 15 aa, Artificial Sequence
  Description of Artificial Sequence: Synthetic peptide
  Seed: LRMKWMMAMKYPITA
LRMKGMMMMSYPATA

SEQ ID NO: 227431 - protein, 15 aa, Artificial Sequence
  Description of Artificial Sequence: Synthetic peptide
  Seed: LRMKWMMAMKYPITA
LRMKGMMMMSYPITA

SEQ ID NO: 227432 - protein, 15 aa, Artificial Sequence
  Description of Artificial Sequence: Synthetic peptide
  Seed: LRMKWMMAMKYPITA
LRMKGMMMMSYPLTA

SEQ ID NO: 227433 - protein, 15 aa, Artificial Sequence
  Description of Artificial Sequence: Synthetic peptide
  Seed: LRMKWMMAMKYPITA
LRMKGMMMMSYPMTA

SEQ ID NO: 227434 - protein, 15 aa, Artificial Sequence
  Description of Artificial Sequence: Synthetic peptide
  Seed: LRMKWMMAMKYPITA
LRMKGMMMMSYPTTA

SEQ ID NO: 227435 - protein, 15 aa, Artificial Sequence
  Description of Artificial Sequence: Synthetic peptide
  Seed: LRMKWMMAMKYPITA
LRMKGMMMMSYPVTA

SEQ ID NO: 227436 - protein, 15 aa, Artificial Sequence
  Description of Artificial Sequence: Synthetic peptide
  Seed: LRMKWMMAMKYPITA
LRMKGMMMMTYPATA

SEQ ID NO: 227437 - protein, 15 aa, Artificial Sequence
  Description of Artificial Sequence: Synthetic peptide
  Seed: LRMKWMMAMKYPITA
LRMKGMMMMTYPMTA

SEQ ID NO: 227438 - protein, 15 aa, Artificial Sequence
  Description of Artificial Sequence: Synthetic peptide
  Seed: LRMKWMMAMKYPITA
LRMKGMMNMAYPITA

SEQ ID NO: 227439 - protein, 15 aa, Artificial Sequence
  Description of Artificial Sequence: Synthetic peptide
  Seed: LRMKWMMAMKYPITA
LRMKGMMNMAYPLTA

SEQ ID NO: 227440 - protein, 15 aa, Artificial Sequence
  Description of Artificial Sequence: Synthetic peptide
  Seed: LRMKWMMAMKYPITA
LRMKGMMNMAYPVTA

SEQ ID NO: 227441 - protein, 15 aa, Artificial Sequence
  Description of Artificial Sequence: Synthetic peptide
  Seed: LRMKWMMAMKYPITA
LRMKGMMNMNYPITA

SEQ ID NO: 227442 - protein, 15 aa, Artificial Sequence
  Description of Artificial Sequence: Synthetic peptide
  Seed: LRMKWMMAMKYPITA
LRMKGMMNMNYPLTA

SEQ ID NO: 227443 - protein, 15 aa, Artificial Sequence
  Description of Artificial Sequence: Synthetic peptide
  Seed: LRMKWMMAMKYPITA
LRMKGMMNMNYPVTA

SEQ ID NO: 227444 - protein, 15 aa, Artificial Sequence
  Description of Artificial Sequence: Synthetic peptide
  Seed: LRMKWMMAMKYPITA
LRMKGMMNMSYPITA

SEQ ID NO: 227445 - protein, 15 aa, Artificial Sequence
  Description of Artificial Sequence: Synthetic peptide
  Seed: LRMKWMMAMKYPITA
LRMKGMMNMSYPVTA

SEQ ID NO: 227446 - protein, 15 aa, Artificial Sequence
  Description of Artificial Sequence: Synthetic peptide
  Seed: LRMKWMMAMKYPITA
LRMKGMMSMAYPITA

SEQ ID NO: 227447 - protein, 15 aa, Artificial Sequence
  Description of Artificial Sequence: Synthetic peptide
  Seed: LRMKWMMAMKYPITA
LRMKGMMSMGYPLTA

SEQ ID NO: 227448 - protein, 15 aa, Artificial Sequence
  Description of Artificial Sequence: Synthetic peptide
  Seed: LRMKWMMAMKYPITA
LRMKGMMSMSYPITA

SEQ ID NO: 227449 - protein, 15 aa, Artificial Sequence
  Description of Artificial Sequence: Synthetic peptide
  Seed: LRMKWMMAMKYPITA
LRMKGMMTMAYPITA

SEQ ID NO: 227450 - protein, 15 aa, Artificial Sequence
  Description of Artificial Sequence: Synthetic peptide
  Seed: LRMKWMMAMKYPITA
LRMKGMMTMAYPLTA

SEQ ID NO: 227451 - protein, 15 aa, Artificial Sequence
  Description of Artificial Sequence: Synthetic peptide
  Seed: LRMKWMMAMKYPITA
LRMKGMMTMAYPVTA

SEQ ID NO: 227452 - protein, 15 aa, Artificial Sequence
  Description of Artificial Sequence: Synthetic peptide
  Seed: LRMKWMMAMKYPITA
LRMKGMMTMSYPITA

SEQ ID NO: 227453 - protein, 15 aa, Artificial Sequence
  Description of Artificial Sequence: Synthetic peptide
  Seed: LRMKWMMAMKYPITA
LRMKGMMTMSYPLTA

SEQ ID NO: 227454 - protein, 15 aa, Artificial Sequence
  Description of Artificial Sequence: Synthetic peptide
  Seed: LRMKWMMAMKYPITA
LRMKGMMTMSYPVTA

SEQ ID NO: 227455 - protein, 15 aa, Artificial Sequence
  Description of Artificial Sequence: Synthetic peptide
  Seed: LRMKWMMAMKYPITA
LRMKGMMVMGYPITA

SEQ ID NO: 227456 - protein, 15 aa, Artificial Sequence
  Description of Artificial Sequence: Synthetic peptide
  Seed: LRMKWMMAMKYPITA
LRMKGMMVMGYPLTA

SEQ ID NO: 227457 - protein, 15 aa, Artificial Sequence
  Description of Artificial Sequence: Synthetic peptide
  Seed: LRMKWMMAMKYPITA
LRMKGMMVMGYPVTA

SEQ ID NO: 227458 - protein, 15 aa, Artificial Sequence
  Description of Artificial Sequence: Synthetic peptide
  Seed: LRMKWMMAMKYPITA
LRMKGMMVMRYPATA

SEQ ID NO: 227459 - protein, 15 aa, Artificial Sequence
  Description of Artificial Sequence: Synthetic peptide
  Seed: LRMKWMMAMKYPITA
LRMKGMMVMRYPFTA

SEQ ID NO: 227460 - protein, 15 aa, Artificial Sequence
  Description of Artificial Sequence: Synthetic peptide
  Seed: LRMKWMMAMKYPITA
LRMKGMMVMRYPITA

SEQ ID NO: 227461 - protein, 15 aa, Artificial Sequence
  Description of Artificial Sequence: Synthetic peptide
  Seed: LRMKWMMAMKYPITA
LRMKGMMVMRYPLTA

SEQ ID NO: 227462 - protein, 15 aa, Artificial Sequence
  Description of Artificial Sequence: Synthetic peptide
  Seed: LRMKWMMAMKYPITA
LRMKGMMVMRYPMTA

SEQ ID NO: 227463 - protein, 15 aa, Artificial Sequence
  Description of Artificial Sequence: Synthetic peptide
  Seed: LRMKWMMAMKYPITA
LRMKGMMVMRYPRTA

SEQ ID NO: 227464 - protein, 15 aa, Artificial Sequence
  Description of Artificial Sequence: Synthetic peptide
  Seed: LRMKWMMAMKYPITA
LRMKGMMVMRYPSTA

SEQ ID NO: 227465 - protein, 15 aa, Artificial Sequence
  Description of Artificial Sequence: Synthetic peptide
  Seed: LRMKWMMAMKYPITA
LRMKGMMVMRYPVTA

SEQ ID NO: 227466 - protein, 15 aa, Artificial Sequence
  Description of Artificial Sequence: Synthetic peptide
  Seed: LRMKWMMAMKYPITA
LRMKGMMVMRYPYTA

SEQ ID NO: 227467 - protein, 15 aa, Artificial Sequence
  Description of Artificial Sequence: Synthetic peptide
  Seed: LRMKWMMAMKYPITA
LRMKHMMAMAYPATA

SEQ ID NO: 227468 - protein, 15 aa, Artificial Sequence
  Description of Artificial Sequence: Synthetic peptide
  Seed: LRMKWMMAMKYPITA
LRMKHMMAMAYPCTA

SEQ ID NO: 227469 - protein, 15 aa, Artificial Sequence
  Description of Artificial Sequence: Synthetic peptide
  Seed: LRMKWMMAMKYPITA
LRMKHMMAMAYPGTA

SEQ ID NO: 227470 - protein, 15 aa, Artificial Sequence
  Description of Artificial Sequence: Synthetic peptide
  Seed: LRMKWMMAMKYPITA
LRMKHMMAMAYPITA

SEQ ID NO: 227471 - protein, 15 aa, Artificial Sequence
  Description of Artificial Sequence: Synthetic peptide
  Seed: LRMKWMMAMKYPITA
LRMKHMMAMAYPLTA

SEQ ID NO: 227472 - protein, 15 aa, Artificial Sequence
  Description of Artificial Sequence: Synthetic peptide
  Seed: LRMKWMMAMKYPITA
LRMKHMMAMAYPMTA

SEQ ID NO: 227473 - protein, 15 aa, Artificial Sequence
  Description of Artificial Sequence: Synthetic peptide
  Seed: LRMKWMMAMKYPITA
LRMKHMMAMAYPNTA

SEQ ID NO: 227474 - protein, 15 aa, Artificial Sequence
  Description of Artificial Sequence: Synthetic peptide
  Seed: LRMKWMMAMKYPITA
LRMKHMMAMAYPSTA

SEQ ID NO: 227475 - protein, 15 aa, Artificial Sequence
  Description of Artificial Sequence: Synthetic peptide
  Seed: LRMKWMMAMKYPITA
LRMKHMMAMAYPTTA

SEQ ID NO: 227476 - protein, 15 aa, Artificial Sequence
  Description of Artificial Sequence: Synthetic peptide
  Seed: LRMKWMMAMKYPITA
LRMKHMMAMAYPVTA

SEQ ID NO: 227477 - protein, 15 aa, Artificial Sequence
  Description of Artificial Sequence: Synthetic peptide
  Seed: LRMKWMMAMKYPITA
LRMKHMMAMCYPITA

SEQ ID NO: 227478 - protein, 15 aa, Artificial Sequence
  Description of Artificial Sequence: Synthetic peptide
  Seed: LRMKWMMAMKYPITA
LRMKHMMAMCYPLTA

SEQ ID NO: 227479 - protein, 15 aa, Artificial Sequence
  Description of Artificial Sequence: Synthetic peptide
  Seed: LRMKWMMAMKYPITA
LRMKHMMAMCYPMTA

SEQ ID NO: 227480 - protein, 15 aa, Artificial Sequence
  Description of Artificial Sequence: Synthetic peptide
  Seed: LRMKWMMAMKYPITA
LRMKHMMAMCYPVTA

SEQ ID NO: 227481 - protein, 15 aa, Artificial Sequence
  Description of Artificial Sequence: Synthetic peptide
  Seed: LRMKWMMAMKYPITA
LRMKHMMAMGYPATA

SEQ ID NO: 227482 - protein, 15 aa, Artificial Sequence
  Description of Artificial Sequence: Synthetic peptide
  Seed: LRMKWMMAMKYPITA
LRMKHMMAMGYPITA

SEQ ID NO: 227483 - protein, 15 aa, Artificial Sequence
  Description of Artificial Sequence: Synthetic peptide
  Seed: LRMKWMMAMKYPITA
LRMKHMMAMGYPLTA

SEQ ID NO: 227484 - protein, 15 aa, Artificial Sequence
  Description of Artificial Sequence: Synthetic peptide
  Seed: LRMKWMMAMKYPITA
LRMKHMMAMGYPMTA

SEQ ID NO: 227485 - protein, 15 aa, Artificial Sequence
  Description of Artificial Sequence: Synthetic peptide
  Seed: LRMKWMMAMKYPITA
LRMKHMMAMGYPSTA

SEQ ID NO: 227486 - protein, 15 aa, Artificial Sequence
  Description of Artificial Sequence: Synthetic peptide
  Seed: LRMKWMMAMKYPITA
LRMKHMMAMGYPTTA

SEQ ID NO: 227487 - protein, 15 aa, Artificial Sequence
  Description of Artificial Sequence: Synthetic peptide
  Seed: LRMKWMMAMKYPITA
LRMKHMMAMGYPVTA

SEQ ID NO: 227488 - protein, 15 aa, Artificial Sequence
  Description of Artificial Sequence: Synthetic peptide
  Seed: LRMKWMMAMKYPITA
LRMKHMMAMNYPATA

SEQ ID NO: 227489 - protein, 15 aa, Artificial Sequence
  Description of Artificial Sequence: Synthetic peptide
  Seed: LRMKWMMAMKYPITA
LRMKHMMAMNYPITA

SEQ ID NO: 227490 - protein, 15 aa, Artificial Sequence
  Description of Artificial Sequence: Synthetic peptide
  Seed: LRMKWMMAMKYPITA
LRMKHMMAMNYPLTA

SEQ ID NO: 227491 - protein, 15 aa, Artificial Sequence
  Description of Artificial Sequence: Synthetic peptide
  Seed: LRMKWMMAMKYPITA
LRMKHMMAMNYPVTA

SEQ ID NO: 227492 - protein, 15 aa, Artificial Sequence
  Description of Artificial Sequence: Synthetic peptide
  Seed: LRMKWMMAMKYPITA
LRMKHMMAMPYPATA

SEQ ID NO: 227493 - protein, 15 aa, Artificial Sequence
  Description of Artificial Sequence: Synthetic peptide
  Seed: LRMKWMMAMKYPITA
LRMKHMMAMPYPITA

SEQ ID NO: 227494 - protein, 15 aa, Artificial Sequence
  Description of Artificial Sequence: Synthetic peptide
  Seed: LRMKWMMAMKYPITA
LRMKHMMAMPYPLTA

SEQ ID NO: 227495 - protein, 15 aa, Artificial Sequence
  Description of Artificial Sequence: Synthetic peptide
  Seed: LRMKWMMAMKYPITA
LRMKHMMAMPYPMTA

SEQ ID NO: 227496 - protein, 15 aa, Artificial Sequence
  Description of Artificial Sequence: Synthetic peptide
  Seed: LRMKWMMAMKYPITA
LRMKHMMAMPYPSTA

SEQ ID NO: 227497 - protein, 15 aa, Artificial Sequence
  Description of Artificial Sequence: Synthetic peptide
  Seed: LRMKWMMAMKYPITA
LRMKHMMAMPYPTTA

SEQ ID NO: 227498 - protein, 15 aa, Artificial Sequence
  Description of Artificial Sequence: Synthetic peptide
  Seed: LRMKWMMAMKYPITA
LRMKHMMAMPYPVTA

SEQ ID NO: 227499 - protein, 15 aa, Artificial Sequence
  Description of Artificial Sequence: Synthetic peptide
  Seed: LRMKWMMAMKYPITA
LRMKHMMAMRYPATA

SEQ ID NO: 227500 - protein, 15 aa, Artificial Sequence
  Description of Artificial Sequence: Synthetic peptide
  Seed: LRMKWMMAMKYPITA
LRMKHMMAMRYPGTA

SEQ ID NO: 227501 - protein, 15 aa, Artificial Sequence
  Description of Artificial Sequence: Synthetic peptide
  Seed: LRMKWMMAMKYPITA
LRMKHMMAMRYPQTA

SEQ ID NO: 227502 - protein, 15 aa, Artificial Sequence
  Description of Artificial Sequence: Synthetic peptide
  Seed: LRMKWMMAMKYPITA
LRMKHMMAMRYPSTA

SEQ ID NO: 227503 - protein, 15 aa, Artificial Sequence
  Description of Artificial Sequence: Synthetic peptide
  Seed: LRMKWMMAMKYPITA
LRMKHMMAMSYPATA

SEQ ID NO: 227504 - protein, 15 aa, Artificial Sequence
  Description of Artificial Sequence: Synthetic peptide
  Seed: LRMKWMMAMKYPITA
LRMKHMMAMSYPITA

SEQ ID NO: 227505 - protein, 15 aa, Artificial Sequence
  Description of Artificial Sequence: Synthetic peptide
  Seed: LRMKWMMAMKYPITA
LRMKHMMAMSYPLTA

SEQ ID NO: 227506 - protein, 15 aa, Artificial Sequence
  Description of Artificial Sequence: Synthetic peptide
  Seed: LRMKWMMAMKYPITA
LRMKHMMAMSYPMTA

SEQ ID NO: 227507 - protein, 15 aa, Artificial Sequence
  Description of Artificial Sequence: Synthetic peptide
  Seed: LRMKWMMAMKYPITA
LRMKHMMAMSYPSTA

SEQ ID NO: 227508 - protein, 15 aa, Artificial Sequence
  Description of Artificial Sequence: Synthetic peptide
  Seed: LRMKWMMAMKYPITA
LRMKHMMAMSYPTTA

SEQ ID NO: 227509 - protein, 15 aa, Artificial Sequence
  Description of Artificial Sequence: Synthetic peptide
  Seed: LRMKWMMAMKYPITA
LRMKHMMAMSYPVTA

SEQ ID NO: 227510 - protein, 15 aa, Artificial Sequence
  Description of Artificial Sequence: Synthetic peptide
  Seed: LRMKWMMAMKYPITA
LRMKHMMAMTYPATA

SEQ ID NO: 227511 - protein, 15 aa, Artificial Sequence
  Description of Artificial Sequence: Synthetic peptide
  Seed: LRMKWMMAMKYPITA
LRMKHMMAMTYPITA

SEQ ID NO: 227512 - protein, 15 aa, Artificial Sequence
  Description of Artificial Sequence: Synthetic peptide
  Seed: LRMKWMMAMKYPITA
LRMKHMMAMTYPLTA

SEQ ID NO: 227513 - protein, 15 aa, Artificial Sequence
  Description of Artificial Sequence: Synthetic peptide
  Seed: LRMKWMMAMKYPITA
LRMKHMMAMTYPSTA

SEQ ID NO: 227514 - protein, 15 aa, Artificial Sequence
  Description of Artificial Sequence: Synthetic peptide
  Seed: LRMKWMMAMKYPITA
LRMKHMMAMTYPVTA

SEQ ID NO: 227515 - protein, 15 aa, Artificial Sequence
  Description of Artificial Sequence: Synthetic peptide
  Seed: LRMKWMMAMKYPITA
LRMKHMMAMVYPLTA

SEQ ID NO: 227516 - protein, 15 aa, Artificial Sequence
  Description of Artificial Sequence: Synthetic peptide
  Seed: LRMKWMMAMKYPITA
LRMKHMMAMVYPVTA

SEQ ID NO: 227517 - protein, 15 aa, Artificial Sequence
  Description of Artificial Sequence: Synthetic peptide
  Seed: LRMKWMMAMKYPITA
LRMKHMMCMAYPLTA

SEQ ID NO: 227518 - protein, 15 aa, Artificial Sequence
  Description of Artificial Sequence: Synthetic peptide
  Seed: LRMKWMMAMKYPITA
LRMKHMMEMAYPITA

SEQ ID NO: 227519 - protein, 15 aa, Artificial Sequence
  Description of Artificial Sequence: Synthetic peptide
  Seed: LRMKWMMAMKYPITA
LRMKHMMEMAYPLTA

SEQ ID NO: 227520 - protein, 15 aa, Artificial Sequence
  Description of Artificial Sequence: Synthetic peptide
  Seed: LRMKWMMAMKYPITA
LRMKHMMEMAYPVTA

SEQ ID NO: 227521 - protein, 15 aa, Artificial Sequence
  Description of Artificial Sequence: Synthetic peptide
  Seed: LRMKWMMAMKYPITA
LRMKHMMFMAYPLTA

SEQ ID NO: 227522 - protein, 15 aa, Artificial Sequence
  Description of Artificial Sequence: Synthetic peptide
  Seed: LRMKWMMAMKYPITA
LRMKHMMFMAYPVTA

SEQ ID NO: 227523 - protein, 15 aa, Artificial Sequence
  Description of Artificial Sequence: Synthetic peptide
  Seed: LRMKWMMAMKYPITA
LRMKHMMFMGYPVTA

SEQ ID NO: 227524 - protein, 15 aa, Artificial Sequence
  Description of Artificial Sequence: Synthetic peptide
  Seed: LRMKWMMAMKYPITA
LRMKHMMFMRYPFTA

SEQ ID NO: 227525 - protein, 15 aa, Artificial Sequence
  Description of Artificial Sequence: Synthetic peptide
  Seed: LRMKWMMAMKYPITA
LRMKHMMFMRYPITA

SEQ ID NO: 227526 - protein, 15 aa, Artificial Sequence
  Description of Artificial Sequence: Synthetic peptide
  Seed: LRMKWMMAMKYPITA
LRMKHMMFMRYPLTA

SEQ ID NO: 227527 - protein, 15 aa, Artificial Sequence
  Description of Artificial Sequence: Synthetic peptide
  Seed: LRMKWMMAMKYPITA
LRMKHMMFMRYPMTA

SEQ ID NO: 227528 - protein, 15 aa, Artificial Sequence
  Description of Artificial Sequence: Synthetic peptide
  Seed: LRMKWMMAMKYPITA
LRMKHMMFMRYPRTA

SEQ ID NO: 227529 - protein, 15 aa, Artificial Sequence
  Description of Artificial Sequence: Synthetic peptide
  Seed: LRMKWMMAMKYPITA
LRMKHMMFMRYPVTA

SEQ ID NO: 227530 - protein, 15 aa, Artificial Sequence
  Description of Artificial Sequence: Synthetic peptide
  Seed: LRMKWMMAMKYPITA
LRMKHMMFMRYPYTA

SEQ ID NO: 227531 - protein, 15 aa, Artificial Sequence
  Description of Artificial Sequence: Synthetic peptide
  Seed: LRMKWMMAMKYPITA
LRMKHMMFMSYPITA

SEQ ID NO: 227532 - protein, 15 aa, Artificial Sequence
  Description of Artificial Sequence: Synthetic peptide
  Seed: LRMKWMMAMKYPITA
LRMKHMMFMSYPLTA

SEQ ID NO: 227533 - protein, 15 aa, Artificial Sequence
  Description of Artificial Sequence: Synthetic peptide
  Seed: LRMKWMMAMKYPITA
LRMKHMMFMSYPVTA

SEQ ID NO: 227534 - protein, 15 aa, Artificial Sequence
  Description of Artificial Sequence: Synthetic peptide
  Seed: LRMKWMMAMKYPITA
LRMKHMMGMAYPATA

SEQ ID NO: 227535 - protein, 15 aa, Artificial Sequence
  Description of Artificial Sequence: Synthetic peptide
  Seed: LRMKWMMAMKYPITA
LRMKHMMGMAYPITA

SEQ ID NO: 227536 - protein, 15 aa, Artificial Sequence
  Description of Artificial Sequence: Synthetic peptide
  Seed: LRMKWMMAMKYPITA
LRMKHMMGMAYPLTA

SEQ ID NO: 227537 - protein, 15 aa, Artificial Sequence
  Description of Artificial Sequence: Synthetic peptide
  Seed: LRMKWMMAMKYPITA
LRMKHMMGMAYPMTA

SEQ ID NO: 227538 - protein, 15 aa, Artificial Sequence
  Description of Artificial Sequence: Synthetic peptide
  Seed: LRMKWMMAMKYPITA
LRMKHMMGMAYPVTA

SEQ ID NO: 227539 - protein, 15 aa, Artificial Sequence
  Description of Artificial Sequence: Synthetic peptide
  Seed: LRMKWMMAMKYPITA
LRMKHMMGMGYPITA

SEQ ID NO: 227540 - protein, 15 aa, Artificial Sequence
  Description of Artificial Sequence: Synthetic peptide
  Seed: LRMKWMMAMKYPITA
LRMKHMMGMGYPLTA

SEQ ID NO: 227541 - protein, 15 aa, Artificial Sequence
  Description of Artificial Sequence: Synthetic peptide
  Seed: LRMKWMMAMKYPITA
LRMKHMMGMGYPVTA

SEQ ID NO: 227542 - protein, 15 aa, Artificial Sequence
  Description of Artificial Sequence: Synthetic peptide
  Seed: LRMKWMMAMKYPITA
LRMKHMMGMPYPITA

SEQ ID NO: 227543 - protein, 15 aa, Artificial Sequence
  Description of Artificial Sequence: Synthetic peptide
  Seed: LRMKWMMAMKYPITA
LRMKHMMGMPYPLTA

SEQ ID NO: 227544 - protein, 15 aa, Artificial Sequence
  Description of Artificial Sequence: Synthetic peptide
  Seed: LRMKWMMAMKYPITA
LRMKHMMGMPYPVTA

SEQ ID NO: 227545 - protein, 15 aa, Artificial Sequence
  Description of Artificial Sequence: Synthetic peptide
  Seed: LRMKWMMAMKYPITA
LRMKHMMGMSYPITA

SEQ ID NO: 227546 - protein, 15 aa, Artificial Sequence
  Description of Artificial Sequence: Synthetic peptide
  Seed: LRMKWMMAMKYPITA
LRMKHMMGMSYPLTA

SEQ ID NO: 227547 - protein, 15 aa, Artificial Sequence
  Description of Artificial Sequence: Synthetic peptide
  Seed: LRMKWMMAMKYPITA
LRMKHMMGMSYPVTA

SEQ ID NO: 227548 - protein, 15 aa, Artificial Sequence
  Description of Artificial Sequence: Synthetic peptide
  Seed: LRMKWMMAMKYPITA
LRMKHMMHMRYPATA

SEQ ID NO: 227549 - protein, 15 aa, Artificial Sequence
  Description of Artificial Sequence: Synthetic peptide
  Seed: LRMKWMMAMKYPITA
LRMKHMMHMRYPRTA

SEQ ID NO: 227550 - protein, 15 aa, Artificial Sequence
  Description of Artificial Sequence: Synthetic peptide
  Seed: LRMKWMMAMKYPITA
LRMKHMMHMRYPYTA

SEQ ID NO: 227551 - protein, 15 aa, Artificial Sequence
  Description of Artificial Sequence: Synthetic peptide
  Seed: LRMKWMMAMKYPITA
LRMKHMMHMSYPITA

SEQ ID NO: 227552 - protein, 15 aa, Artificial Sequence
  Description of Artificial Sequence: Synthetic peptide
  Seed: LRMKWMMAMKYPITA
LRMKHMMIMAYPATA

SEQ ID NO: 227553 - protein, 15 aa, Artificial Sequence
  Description of Artificial Sequence: Synthetic peptide
  Seed: LRMKWMMAMKYPITA
LRMKHMMIMAYPCTA

SEQ ID NO: 227554 - protein, 15 aa, Artificial Sequence
  Description of Artificial Sequence: Synthetic peptide
  Seed: LRMKWMMAMKYPITA
LRMKHMMIMAYPGTA

SEQ ID NO: 227555 - protein, 15 aa, Artificial Sequence
  Description of Artificial Sequence: Synthetic peptide
  Seed: LRMKWMMAMKYPITA
LRMKHMMIMAYPITA

SEQ ID NO: 227556 - protein, 15 aa, Artificial Sequence
  Description of Artificial Sequence: Synthetic peptide
  Seed: LRMKWMMAMKYPITA
LRMKHMMIMAYPLTA

SEQ ID NO: 227557 - protein, 15 aa, Artificial Sequence
  Description of Artificial Sequence: Synthetic peptide
  Seed: LRMKWMMAMKYPITA
LRMKHMMIMAYPMTA

SEQ ID NO: 227558 - protein, 15 aa, Artificial Sequence
  Description of Artificial Sequence: Synthetic peptide
  Seed: LRMKWMMAMKYPITA
LRMKHMMIMAYPSTA

SEQ ID NO: 227559 - protein, 15 aa, Artificial Sequence
  Description of Artificial Sequence: Synthetic peptide
  Seed: LRMKWMMAMKYPITA
LRMKHMMIMAYPTTA

SEQ ID NO: 227560 - protein, 15 aa, Artificial Sequence
  Description of Artificial Sequence: Synthetic peptide
  Seed: LRMKWMMAMKYPITA
LRMKHMMIMAYPVTA

SEQ ID NO: 227561 - protein, 15 aa, Artificial Sequence
  Description of Artificial Sequence: Synthetic peptide
  Seed: LRMKWMMAMKYPITA
LRMKHMMIMGYPATA

SEQ ID NO: 227562 - protein, 15 aa, Artificial Sequence
  Description of Artificial Sequence: Synthetic peptide
  Seed: LRMKWMMAMKYPITA
LRMKHMMIMGYPITA

SEQ ID NO: 227563 - protein, 15 aa, Artificial Sequence
  Description of Artificial Sequence: Synthetic peptide
  Seed: LRMKWMMAMKYPITA
LRMKHMMIMGYPLTA

SEQ ID NO: 227564 - protein, 15 aa, Artificial Sequence
  Description of Artificial Sequence: Synthetic peptide
  Seed: LRMKWMMAMKYPITA
LRMKHMMIMGYPMTA

SEQ ID NO: 227565 - protein, 15 aa, Artificial Sequence
  Description of Artificial Sequence: Synthetic peptide
  Seed: LRMKWMMAMKYPITA
LRMKHMMIMGYPSTA

SEQ ID NO: 227566 - protein, 15 aa, Artificial Sequence
  Description of Artificial Sequence: Synthetic peptide
  Seed: LRMKWMMAMKYPITA
LRMKHMMIMGYPTTA

SEQ ID NO: 227567 - protein, 15 aa, Artificial Sequence
  Description of Artificial Sequence: Synthetic peptide
  Seed: LRMKWMMAMKYPITA
LRMKHMMIMGYPVTA

SEQ ID NO: 227568 - protein, 15 aa, Artificial Sequence
  Description of Artificial Sequence: Synthetic peptide
  Seed: LRMKWMMAMKYPITA
LRMKHMMIMKYPATA

SEQ ID NO: 227569 - protein, 15 aa, Artificial Sequence
  Description of Artificial Sequence: Synthetic peptide
  Seed: LRMKWMMAMKYPITA
LRMKHMMIMKYPFTA

SEQ ID NO: 227570 - protein, 15 aa, Artificial Sequence
  Description of Artificial Sequence: Synthetic peptide
  Seed: LRMKWMMAMKYPITA
LRMKHMMIMKYPITA

SEQ ID NO: 227571 - protein, 15 aa, Artificial Sequence
  Description of Artificial Sequence: Synthetic peptide
  Seed: LRMKWMMAMKYPITA
LRMKHMMIMKYPKTA

SEQ ID NO: 227572 - protein, 15 aa, Artificial Sequence
  Description of Artificial Sequence: Synthetic peptide
  Seed: LRMKWMMAMKYPITA
LRMKHMMIMKYPLTA

SEQ ID NO: 227573 - protein, 15 aa, Artificial Sequence
  Description of Artificial Sequence: Synthetic peptide
  Seed: LRMKWMMAMKYPITA
LRMKHMMIMKYPRTA

SEQ ID NO: 227574 - protein, 15 aa, Artificial Sequence
  Description of Artificial Sequence: Synthetic peptide
  Seed: LRMKWMMAMKYPITA
LRMKHMMIMKYPSTA

SEQ ID NO: 227575 - protein, 15 aa, Artificial Sequence
  Description of Artificial Sequence: Synthetic peptide
  Seed: LRMKWMMAMKYPITA
LRMKHMMIMKYPVTA

SEQ ID NO: 227576 - protein, 15 aa, Artificial Sequence
  Description of Artificial Sequence: Synthetic peptide
  Seed: LRMKWMMAMKYPITA
LRMKHMMIMKYPYTA

SEQ ID NO: 227577 - protein, 15 aa, Artificial Sequence
  Description of Artificial Sequence: Synthetic peptide
  Seed: LRMKWMMAMKYPITA
LRMKHMMIMNYPATA

SEQ ID NO: 227578 - protein, 15 aa, Artificial Sequence
  Description of Artificial Sequence: Synthetic peptide
  Seed: LRMKWMMAMKYPITA
LRMKHMMIMNYPITA

SEQ ID NO: 227579 - protein, 15 aa, Artificial Sequence
  Description of Artificial Sequence: Synthetic peptide
  Seed: LRMKWMMAMKYPITA
LRMKHMMIMNYPLTA

SEQ ID NO: 227580 - protein, 15 aa, Artificial Sequence
  Description of Artificial Sequence: Synthetic peptide
  Seed: LRMKWMMAMKYPITA
LRMKHMMIMNYPVTA

SEQ ID NO: 227581 - protein, 15 aa, Artificial Sequence
  Description of Artificial Sequence: Synthetic peptide
  Seed: LRMKWMMAMKYPITA
LRMKHMMIMPYPATA

SEQ ID NO: 227582 - protein, 15 aa, Artificial Sequence
  Description of Artificial Sequence: Synthetic peptide
  Seed: LRMKWMMAMKYPITA
LRMKHMMIMPYPITA

SEQ ID NO: 227583 - protein, 15 aa, Artificial Sequence
  Description of Artificial Sequence: Synthetic peptide
  Seed: LRMKWMMAMKYPITA
LRMKHMMIMPYPLTA

SEQ ID NO: 227584 - protein, 15 aa, Artificial Sequence
  Description of Artificial Sequence: Synthetic peptide
  Seed: LRMKWMMAMKYPITA
LRMKHMMIMPYPMTA

SEQ ID NO: 227585 - protein, 15 aa, Artificial Sequence
  Description of Artificial Sequence: Synthetic peptide
  Seed: LRMKWMMAMKYPITA
LRMKHMMIMPYPSTA

SEQ ID NO: 227586 - protein, 15 aa, Artificial Sequence
  Description of Artificial Sequence: Synthetic peptide
  Seed: LRMKWMMAMKYPITA
LRMKHMMIMPYPTTA

SEQ ID NO: 227587 - protein, 15 aa, Artificial Sequence
  Description of Artificial Sequence: Synthetic peptide
  Seed: LRMKWMMAMKYPITA
LRMKHMMIMPYPVTA

SEQ ID NO: 227588 - protein, 15 aa, Artificial Sequence
  Description of Artificial Sequence: Synthetic peptide
  Seed: LRMKWMMAMKYPITA
LRMKHMMIMRYPATA

SEQ ID NO: 227589 - protein, 15 aa, Artificial Sequence
  Description of Artificial Sequence: Synthetic peptide
  Seed: LRMKWMMAMKYPITA
LRMKHMMIMRYPFTA

SEQ ID NO: 227590 - protein, 15 aa, Artificial Sequence
  Description of Artificial Sequence: Synthetic peptide
  Seed: LRMKWMMAMKYPITA
LRMKHMMIMRYPGTA

SEQ ID NO: 227591 - protein, 15 aa, Artificial Sequence
  Description of Artificial Sequence: Synthetic peptide
  Seed: LRMKWMMAMKYPITA
LRMKHMMIMRYPHTA

SEQ ID NO: 227592 - protein, 15 aa, Artificial Sequence
  Description of Artificial Sequence: Synthetic peptide
  Seed: LRMKWMMAMKYPITA
LRMKHMMIMRYPITA

SEQ ID NO: 227593 - protein, 15 aa, Artificial Sequence
  Description of Artificial Sequence: Synthetic peptide
  Seed: LRMKWMMAMKYPITA
LRMKHMMIMRYPKTA

SEQ ID NO: 227594 - protein, 15 aa, Artificial Sequence
  Description of Artificial Sequence: Synthetic peptide
  Seed: LRMKWMMAMKYPITA
LRMKHMMIMRYPLTA

SEQ ID NO: 227595 - protein, 15 aa, Artificial Sequence
  Description of Artificial Sequence: Synthetic peptide
  Seed: LRMKWMMAMKYPITA
LRMKHMMIMRYPMTA

SEQ ID NO: 227596 - protein, 15 aa, Artificial Sequence
  Description of Artificial Sequence: Synthetic peptide
  Seed: LRMKWMMAMKYPITA
LRMKHMMIMRYPQTA

SEQ ID NO: 227597 - protein, 15 aa, Artificial Sequence
  Description of Artificial Sequence: Synthetic peptide
  Seed: LRMKWMMAMKYPITA
LRMKHMMIMRYPRTA

SEQ ID NO: 227598 - protein, 15 aa, Artificial Sequence
  Description of Artificial Sequence: Synthetic peptide
  Seed: LRMKWMMAMKYPITA
LRMKHMMIMRYPSTA

SEQ ID NO: 227599 - protein, 15 aa, Artificial Sequence
  Description of Artificial Sequence: Synthetic peptide
  Seed: LRMKWMMAMKYPITA
LRMKHMMIMRYPTTA

SEQ ID NO: 227600 - protein, 15 aa, Artificial Sequence
  Description of Artificial Sequence: Synthetic peptide
  Seed: LRMKWMMAMKYPITA
LRMKHMMIMRYPVTA

SEQ ID NO: 227601 - protein, 15 aa, Artificial Sequence
  Description of Artificial Sequence: Synthetic peptide
  Seed: LRMKWMMAMKYPITA
LRMKHMMIMRYPYTA

SEQ ID NO: 227602 - protein, 15 aa, Artificial Sequence
  Description of Artificial Sequence: Synthetic peptide
  Seed: LRMKWMMAMKYPITA
LRMKHMMIMSYPATA

SEQ ID NO: 227603 - protein, 15 aa, Artificial Sequence
  Description of Artificial Sequence: Synthetic peptide
  Seed: LRMKWMMAMKYPITA
LRMKHMMIMSYPITA

SEQ ID NO: 227604 - protein, 15 aa, Artificial Sequence
  Description of Artificial Sequence: Synthetic peptide
  Seed: LRMKWMMAMKYPITA
LRMKHMMIMSYPLTA

SEQ ID NO: 227605 - protein, 15 aa, Artificial Sequence
  Description of Artificial Sequence: Synthetic peptide
  Seed: LRMKWMMAMKYPITA
LRMKHMMIMSYPMTA

SEQ ID NO: 227606 - protein, 15 aa, Artificial Sequence
  Description of Artificial Sequence: Synthetic peptide
  Seed: LRMKWMMAMKYPITA
LRMKHMMIMSYPSTA

SEQ ID NO: 227607 - protein, 15 aa, Artificial Sequence
  Description of Artificial Sequence: Synthetic peptide
  Seed: LRMKWMMAMKYPITA
LRMKHMMIMSYPTTA

SEQ ID NO: 227608 - protein, 15 aa, Artificial Sequence
  Description of Artificial Sequence: Synthetic peptide
  Seed: LRMKWMMAMKYPITA
LRMKHMMIMSYPVTA

SEQ ID NO: 227609 - protein, 15 aa, Artificial Sequence
  Description of Artificial Sequence: Synthetic peptide
  Seed: LRMKWMMAMKYPITA
LRMKHMMIMTYPSTA

SEQ ID NO: 227610 - protein, 15 aa, Artificial Sequence
  Description of Artificial Sequence: Synthetic peptide
  Seed: LRMKWMMAMKYPITA
LRMKHMMLMAYPATA

SEQ ID NO: 227611 - protein, 15 aa, Artificial Sequence
  Description of Artificial Sequence: Synthetic peptide
  Seed: LRMKWMMAMKYPITA
LRMKHMMLMAYPCTA

SEQ ID NO: 227612 - protein, 15 aa, Artificial Sequence
  Description of Artificial Sequence: Synthetic peptide
  Seed: LRMKWMMAMKYPITA
LRMKHMMLMAYPFTA

SEQ ID NO: 227613 - protein, 15 aa, Artificial Sequence
  Description of Artificial Sequence: Synthetic peptide
  Seed: LRMKWMMAMKYPITA
LRMKHMMLMAYPGTA

SEQ ID NO: 227614 - protein, 15 aa, Artificial Sequence
  Description of Artificial Sequence: Synthetic peptide
  Seed: LRMKWMMAMKYPITA
LRMKHMMLMAYPITA

SEQ ID NO: 227615 - protein, 15 aa, Artificial Sequence
  Description of Artificial Sequence: Synthetic peptide
  Seed: LRMKWMMAMKYPITA
LRMKHMMLMAYPLTA

SEQ ID NO: 227616 - protein, 15 aa, Artificial Sequence
  Description of Artificial Sequence: Synthetic peptide
  Seed: LRMKWMMAMKYPITA
LRMKHMMLMAYPMTA

SEQ ID NO: 227617 - protein, 15 aa, Artificial Sequence
  Description of Artificial Sequence: Synthetic peptide
  Seed: LRMKWMMAMKYPITA
LRMKHMMLMAYPNTA

SEQ ID NO: 227618 - protein, 15 aa, Artificial Sequence
  Description of Artificial Sequence: Synthetic peptide
  Seed: LRMKWMMAMKYPITA
LRMKHMMLMAYPSTA

SEQ ID NO: 227619 - protein, 15 aa, Artificial Sequence
  Description of Artificial Sequence: Synthetic peptide
  Seed: LRMKWMMAMKYPITA
LRMKHMMLMAYPTTA

SEQ ID NO: 227620 - protein, 15 aa, Artificial Sequence
  Description of Artificial Sequence: Synthetic peptide
  Seed: LRMKWMMAMKYPITA
LRMKHMMLMAYPVTA

SEQ ID NO: 227621 - protein, 15 aa, Artificial Sequence
  Description of Artificial Sequence: Synthetic peptide
  Seed: LRMKWMMAMKYPITA
LRMKHMMLMGYPATA

SEQ ID NO: 227622 - protein, 15 aa, Artificial Sequence
  Description of Artificial Sequence: Synthetic peptide
  Seed: LRMKWMMAMKYPITA
LRMKHMMLMGYPCTA

SEQ ID NO: 227623 - protein, 15 aa, Artificial Sequence
  Description of Artificial Sequence: Synthetic peptide
  Seed: LRMKWMMAMKYPITA
LRMKHMMLMGYPFTA

SEQ ID NO: 227624 - protein, 15 aa, Artificial Sequence
  Description of Artificial Sequence: Synthetic peptide
  Seed: LRMKWMMAMKYPITA
LRMKHMMLMGYPITA

SEQ ID NO: 227625 - protein, 15 aa, Artificial Sequence
  Description of Artificial Sequence: Synthetic peptide
  Seed: LRMKWMMAMKYPITA
LRMKHMMLMGYPLTA

SEQ ID NO: 227626 - protein, 15 aa, Artificial Sequence
  Description of Artificial Sequence: Synthetic peptide
  Seed: LRMKWMMAMKYPITA
LRMKHMMLMGYPMTA

SEQ ID NO: 227627 - protein, 15 aa, Artificial Sequence
  Description of Artificial Sequence: Synthetic peptide
  Seed: LRMKWMMAMKYPITA
LRMKHMMLMGYPSTA

SEQ ID NO: 227628 - protein, 15 aa, Artificial Sequence
  Description of Artificial Sequence: Synthetic peptide
  Seed: LRMKWMMAMKYPITA
LRMKHMMLMGYPTTA

SEQ ID NO: 227629 - protein, 15 aa, Artificial Sequence
  Description of Artificial Sequence: Synthetic peptide
  Seed: LRMKWMMAMKYPITA
LRMKHMMLMGYPVTA

SEQ ID NO: 227630 - protein, 15 aa, Artificial Sequence
  Description of Artificial Sequence: Synthetic peptide
  Seed: LRMKWMMAMKYPITA
LRMKHMMLMHYPLTA

SEQ ID NO: 227631 - protein, 15 aa, Artificial Sequence
  Description of Artificial Sequence: Synthetic peptide
  Seed: LRMKWMMAMKYPITA
LRMKHMMLMHYPVTA

SEQ ID NO: 227632 - protein, 15 aa, Artificial Sequence
  Description of Artificial Sequence: Synthetic peptide
  Seed: LRMKWMMAMKYPITA
LRMKHMMLMKYPATA

SEQ ID NO: 227633 - protein, 15 aa, Artificial Sequence
  Description of Artificial Sequence: Synthetic peptide
  Seed: LRMKWMMAMKYPITA
LRMKHMMLMKYPRTA

SEQ ID NO: 227634 - protein, 15 aa, Artificial Sequence
  Description of Artificial Sequence: Synthetic peptide
  Seed: LRMKWMMAMKYPITA
LRMKHMMLMKYPSTA

SEQ ID NO: 227635 - protein, 15 aa, Artificial Sequence
  Description of Artificial Sequence: Synthetic peptide
  Seed: LRMKWMMAMKYPITA
LRMKHMMLMNYPATA

SEQ ID NO: 227636 - protein, 15 aa, Artificial Sequence
  Description of Artificial Sequence: Synthetic peptide
  Seed: LRMKWMMAMKYPITA
LRMKHMMLMNYPITA

SEQ ID NO: 227637 - protein, 15 aa, Artificial Sequence
  Description of Artificial Sequence: Synthetic peptide
  Seed: LRMKWMMAMKYPITA
LRMKHMMLMNYPLTA

SEQ ID NO: 227638 - protein, 15 aa, Artificial Sequence
  Description of Artificial Sequence: Synthetic peptide
  Seed: LRMKWMMAMKYPITA
LRMKHMMLMNYPMTA

SEQ ID NO: 227639 - protein, 15 aa, Artificial Sequence
  Description of Artificial Sequence: Synthetic peptide
  Seed: LRMKWMMAMKYPITA
LRMKHMMLMNYPVTA

SEQ ID NO: 227640 - protein, 15 aa, Artificial Sequence
  Description of Artificial Sequence: Synthetic peptide
  Seed: LRMKWMMAMKYPITA
LRMKHMMLMPYPATA

SEQ ID NO: 227641 - protein, 15 aa, Artificial Sequence
  Description of Artificial Sequence: Synthetic peptide
  Seed: LRMKWMMAMKYPITA
LRMKHMMLMPYPITA

SEQ ID NO: 227642 - protein, 15 aa, Artificial Sequence
  Description of Artificial Sequence: Synthetic peptide
  Seed: LRMKWMMAMKYPITA
LRMKHMMLMPYPLTA

SEQ ID NO: 227643 - protein, 15 aa, Artificial Sequence
  Description of Artificial Sequence: Synthetic peptide
  Seed: LRMKWMMAMKYPITA
LRMKHMMLMPYPMTA

SEQ ID NO: 227644 - protein, 15 aa, Artificial Sequence
  Description of Artificial Sequence: Synthetic peptide
  Seed: LRMKWMMAMKYPITA
LRMKHMMLMPYPSTA

SEQ ID NO: 227645 - protein, 15 aa, Artificial Sequence
  Description of Artificial Sequence: Synthetic peptide
  Seed: LRMKWMMAMKYPITA
LRMKHMMLMPYPTTA

SEQ ID NO: 227646 - protein, 15 aa, Artificial Sequence
  Description of Artificial Sequence: Synthetic peptide
  Seed: LRMKWMMAMKYPITA
LRMKHMMLMPYPVTA

SEQ ID NO: 227647 - protein, 15 aa, Artificial Sequence
  Description of Artificial Sequence: Synthetic peptide
  Seed: LRMKWMMAMKYPITA
LRMKHMMLMRYPATA

SEQ ID NO: 227648 - protein, 15 aa, Artificial Sequence
  Description of Artificial Sequence: Synthetic peptide
  Seed: LRMKWMMAMKYPITA
LRMKHMMLMRYPFTA

SEQ ID NO: 227649 - protein, 15 aa, Artificial Sequence
  Description of Artificial Sequence: Synthetic peptide
  Seed: LRMKWMMAMKYPITA
LRMKHMMLMRYPGTA

SEQ ID NO: 227650 - protein, 15 aa, Artificial Sequence
  Description of Artificial Sequence: Synthetic peptide
  Seed: LRMKWMMAMKYPITA
LRMKHMMLMRYPHTA

SEQ ID NO: 227651 - protein, 15 aa, Artificial Sequence
  Description of Artificial Sequence: Synthetic peptide
  Seed: LRMKWMMAMKYPITA
LRMKHMMLMRYPKTA

SEQ ID NO: 227652 - protein, 15 aa, Artificial Sequence
  Description of Artificial Sequence: Synthetic peptide
  Seed: LRMKWMMAMKYPITA
LRMKHMMLMRYPLTA

SEQ ID NO: 227653 - protein, 15 aa, Artificial Sequence
  Description of Artificial Sequence: Synthetic peptide
  Seed: LRMKWMMAMKYPITA
LRMKHMMLMRYPMTA

SEQ ID NO: 227654 - protein, 15 aa, Artificial Sequence
  Description of Artificial Sequence: Synthetic peptide
  Seed: LRMKWMMAMKYPITA
LRMKHMMLMRYPQTA

SEQ ID NO: 227655 - protein, 15 aa, Artificial Sequence
  Description of Artificial Sequence: Synthetic peptide
  Seed: LRMKWMMAMKYPITA
LRMKHMMLMRYPRTA

SEQ ID NO: 227656 - protein, 15 aa, Artificial Sequence
  Description of Artificial Sequence: Synthetic peptide
  Seed: LRMKWMMAMKYPITA
LRMKHMMLMRYPSTA

SEQ ID NO: 227657 - protein, 15 aa, Artificial Sequence
  Description of Artificial Sequence: Synthetic peptide
  Seed: LRMKWMMAMKYPITA
LRMKHMMLMRYPTTA

SEQ ID NO: 227658 - protein, 15 aa, Artificial Sequence
  Description of Artificial Sequence: Synthetic peptide
  Seed: LRMKWMMAMKYPITA
LRMKHMMLMRYPVTA

SEQ ID NO: 227659 - protein, 15 aa, Artificial Sequence
  Description of Artificial Sequence: Synthetic peptide
  Seed: LRMKWMMAMKYPITA
LRMKHMMLMRYPYTA

SEQ ID NO: 227660 - protein, 15 aa, Artificial Sequence
  Description of Artificial Sequence: Synthetic peptide
  Seed: LRMKWMMAMKYPITA
LRMKHMMLMSYPATA

SEQ ID NO: 227661 - protein, 15 aa, Artificial Sequence
  Description of Artificial Sequence: Synthetic peptide
  Seed: LRMKWMMAMKYPITA
LRMKHMMLMSYPCTA

SEQ ID NO: 227662 - protein, 15 aa, Artificial Sequence
  Description of Artificial Sequence: Synthetic peptide
  Seed: LRMKWMMAMKYPITA
LRMKHMMLMSYPFTA

SEQ ID NO: 227663 - protein, 15 aa, Artificial Sequence
  Description of Artificial Sequence: Synthetic peptide
  Seed: LRMKWMMAMKYPITA
LRMKHMMLMSYPITA

SEQ ID NO: 227664 - protein, 15 aa, Artificial Sequence
  Description of Artificial Sequence: Synthetic peptide
  Seed: LRMKWMMAMKYPITA
LRMKHMMLMSYPLTA

SEQ ID NO: 227665 - protein, 15 aa, Artificial Sequence
  Description of Artificial Sequence: Synthetic peptide
  Seed: LRMKWMMAMKYPITA
LRMKHMMLMSYPMTA

SEQ ID NO: 227666 - protein, 15 aa, Artificial Sequence
  Description of Artificial Sequence: Synthetic peptide
  Seed: LRMKWMMAMKYPITA
LRMKHMMLMSYPNTA

SEQ ID NO: 227667 - protein, 15 aa, Artificial Sequence
  Description of Artificial Sequence: Synthetic peptide
  Seed: LRMKWMMAMKYPITA
LRMKHMMLMSYPSTA

SEQ ID NO: 227668 - protein, 15 aa, Artificial Sequence
  Description of Artificial Sequence: Synthetic peptide
  Seed: LRMKWMMAMKYPITA
LRMKHMMLMSYPTTA

SEQ ID NO: 227669 - protein, 15 aa, Artificial Sequence
  Description of Artificial Sequence: Synthetic peptide
  Seed: LRMKWMMAMKYPITA
LRMKHMMLMSYPVTA

SEQ ID NO: 227670 - protein, 15 aa, Artificial Sequence
  Description of Artificial Sequence: Synthetic peptide
  Seed: LRMKWMMAMKYPITA
LRMKHMMLMTYPATA

SEQ ID NO: 227671 - protein, 15 aa, Artificial Sequence
  Description of Artificial Sequence: Synthetic peptide
  Seed: LRMKWMMAMKYPITA
LRMKHMMLMTYPITA

SEQ ID NO: 227672 - protein, 15 aa, Artificial Sequence
  Description of Artificial Sequence: Synthetic peptide
  Seed: LRMKWMMAMKYPITA
LRMKHMMLMTYPLTA

SEQ ID NO: 227673 - protein, 15 aa, Artificial Sequence
  Description of Artificial Sequence: Synthetic peptide
  Seed: LRMKWMMAMKYPITA
LRMKHMMLMTYPMTA

SEQ ID NO: 227674 - protein, 15 aa, Artificial Sequence
  Description of Artificial Sequence: Synthetic peptide
  Seed: LRMKWMMAMKYPITA
LRMKHMMLMTYPNTA

SEQ ID NO: 227675 - protein, 15 aa, Artificial Sequence
  Description of Artificial Sequence: Synthetic peptide
  Seed: LRMKWMMAMKYPITA
LRMKHMMLMTYPSTA

SEQ ID NO: 227676 - protein, 15 aa, Artificial Sequence
  Description of Artificial Sequence: Synthetic peptide
  Seed: LRMKWMMAMKYPITA
LRMKHMMLMTYPTTA

SEQ ID NO: 227677 - protein, 15 aa, Artificial Sequence
  Description of Artificial Sequence: Synthetic peptide
  Seed: LRMKWMMAMKYPITA
LRMKHMMLMTYPVTA

SEQ ID NO: 227678 - protein, 15 aa, Artificial Sequence
  Description of Artificial Sequence: Synthetic peptide
  Seed: LRMKWMMAMKYPITA
LRMKHMMLMVYPATA

SEQ ID NO: 227679 - protein, 15 aa, Artificial Sequence
  Description of Artificial Sequence: Synthetic peptide
  Seed: LRMKWMMAMKYPITA
LRMKHMMLMVYPITA

SEQ ID NO: 227680 - protein, 15 aa, Artificial Sequence
  Description of Artificial Sequence: Synthetic peptide
  Seed: LRMKWMMAMKYPITA
LRMKHMMLMVYPLTA

SEQ ID NO: 227681 - protein, 15 aa, Artificial Sequence
  Description of Artificial Sequence: Synthetic peptide
  Seed: LRMKWMMAMKYPITA
LRMKHMMLMVYPMTA

SEQ ID NO: 227682 - protein, 15 aa, Artificial Sequence
  Description of Artificial Sequence: Synthetic peptide
  Seed: LRMKWMMAMKYPITA
LRMKHMMLMVYPSTA

SEQ ID NO: 227683 - protein, 15 aa, Artificial Sequence
  Description of Artificial Sequence: Synthetic peptide
  Seed: LRMKWMMAMKYPITA
LRMKHMMLMVYPVTA

SEQ ID NO: 227684 - protein, 15 aa, Artificial Sequence
  Description of Artificial Sequence: Synthetic peptide
  Seed: LRMKWMMAMKYPITA
LRMKHMMMMAYPATA

SEQ ID NO: 227685 - protein, 15 aa, Artificial Sequence
  Description of Artificial Sequence: Synthetic peptide
  Seed: LRMKWMMAMKYPITA
LRMKHMMMMAYPCTA

SEQ ID NO: 227686 - protein, 15 aa, Artificial Sequence
  Description of Artificial Sequence: Synthetic peptide
  Seed: LRMKWMMAMKYPITA
LRMKHMMMMAYPFTA

SEQ ID NO: 227687 - protein, 15 aa, Artificial Sequence
  Description of Artificial Sequence: Synthetic peptide
  Seed: LRMKWMMAMKYPITA
LRMKHMMMMAYPGTA

SEQ ID NO: 227688 - protein, 15 aa, Artificial Sequence
  Description of Artificial Sequence: Synthetic peptide
  Seed: LRMKWMMAMKYPITA
LRMKHMMMMAYPITA

SEQ ID NO: 227689 - protein, 15 aa, Artificial Sequence
  Description of Artificial Sequence: Synthetic peptide
  Seed: LRMKWMMAMKYPITA
LRMKHMMMMAYPLTA

SEQ ID NO: 227690 - protein, 15 aa, Artificial Sequence
  Description of Artificial Sequence: Synthetic peptide
  Seed: LRMKWMMAMKYPITA
LRMKHMMMMAYPMTA

SEQ ID NO: 227691 - protein, 15 aa, Artificial Sequence
  Description of Artificial Sequence: Synthetic peptide
  Seed: LRMKWMMAMKYPITA
LRMKHMMMMAYPNTA

SEQ ID NO: 227692 - protein, 15 aa, Artificial Sequence
  Description of Artificial Sequence: Synthetic peptide
  Seed: LRMKWMMAMKYPITA
LRMKHMMMMAYPSTA

SEQ ID NO: 227693 - protein, 15 aa, Artificial Sequence
  Description of Artificial Sequence: Synthetic peptide
  Seed: LRMKWMMAMKYPITA
LRMKHMMMMAYPTTA

SEQ ID NO: 227694 - protein, 15 aa, Artificial Sequence
  Description of Artificial Sequence: Synthetic peptide
  Seed: LRMKWMMAMKYPITA
LRMKHMMMMAYPVTA

SEQ ID NO: 227695 - protein, 15 aa, Artificial Sequence
  Description of Artificial Sequence: Synthetic peptide
  Seed: LRMKWMMAMKYPITA
LRMKHMMMMGYPATA

SEQ ID NO: 227696 - protein, 15 aa, Artificial Sequence
  Description of Artificial Sequence: Synthetic peptide
  Seed: LRMKWMMAMKYPITA
LRMKHMMMMGYPCTA

SEQ ID NO: 227697 - protein, 15 aa, Artificial Sequence
  Description of Artificial Sequence: Synthetic peptide
  Seed: LRMKWMMAMKYPITA
LRMKHMMMMGYPFTA

SEQ ID NO: 227698 - protein, 15 aa, Artificial Sequence
  Description of Artificial Sequence: Synthetic peptide
  Seed: LRMKWMMAMKYPITA
LRMKHMMMMGYPITA

SEQ ID NO: 227699 - protein, 15 aa, Artificial Sequence
  Description of Artificial Sequence: Synthetic peptide
  Seed: LRMKWMMAMKYPITA
LRMKHMMMMGYPLTA

SEQ ID NO: 227700 - protein, 15 aa, Artificial Sequence
  Description of Artificial Sequence: Synthetic peptide
  Seed: LRMKWMMAMKYPITA
LRMKHMMMMGYPMTA

SEQ ID NO: 227701 - protein, 15 aa, Artificial Sequence
  Description of Artificial Sequence: Synthetic peptide
  Seed: LRMKWMMAMKYPITA
LRMKHMMMMGYPSTA

SEQ ID NO: 227702 - protein, 15 aa, Artificial Sequence
  Description of Artificial Sequence: Synthetic peptide
  Seed: LRMKWMMAMKYPITA
LRMKHMMMMGYPTTA

SEQ ID NO: 227703 - protein, 15 aa, Artificial Sequence
  Description of Artificial Sequence: Synthetic peptide
  Seed: LRMKWMMAMKYPITA
LRMKHMMMMGYPVTA

SEQ ID NO: 227704 - protein, 15 aa, Artificial Sequence
  Description of Artificial Sequence: Synthetic peptide
  Seed: LRMKWMMAMKYPITA
LRMKHMMMMGYPYTA

SEQ ID NO: 227705 - protein, 15 aa, Artificial Sequence
  Description of Artificial Sequence: Synthetic peptide
  Seed: LRMKWMMAMKYPITA
LRMKHMMMMHYPATA

SEQ ID NO: 227706 - protein, 15 aa, Artificial Sequence
  Description of Artificial Sequence: Synthetic peptide
  Seed: LRMKWMMAMKYPITA
LRMKHMMMMHYPITA

SEQ ID NO: 227707 - protein, 15 aa, Artificial Sequence
  Description of Artificial Sequence: Synthetic peptide
  Seed: LRMKWMMAMKYPITA
LRMKHMMMMHYPLTA

SEQ ID NO: 227708 - protein, 15 aa, Artificial Sequence
  Description of Artificial Sequence: Synthetic peptide
  Seed: LRMKWMMAMKYPITA
LRMKHMMMMHYPVTA

SEQ ID NO: 227709 - protein, 15 aa, Artificial Sequence
  Description of Artificial Sequence: Synthetic peptide
  Seed: LRMKWMMAMKYPITA
LRMKHMMMMKYPATA

SEQ ID NO: 227710 - protein, 15 aa, Artificial Sequence
  Description of Artificial Sequence: Synthetic peptide
  Seed: LRMKWMMAMKYPITA
LRMKHMMMMKYPKTA

SEQ ID NO: 227711 - protein, 15 aa, Artificial Sequence
  Description of Artificial Sequence: Synthetic peptide
  Seed: LRMKWMMAMKYPITA
LRMKHMMMMKYPRTA

SEQ ID NO: 227712 - protein, 15 aa, Artificial Sequence
  Description of Artificial Sequence: Synthetic peptide
  Seed: LRMKWMMAMKYPITA
LRMKHMMMMKYPSTA

SEQ ID NO: 227713 - protein, 15 aa, Artificial Sequence
  Description of Artificial Sequence: Synthetic peptide
  Seed: LRMKWMMAMKYPITA
LRMKHMMMMNYPATA

SEQ ID NO: 227714 - protein, 15 aa, Artificial Sequence
  Description of Artificial Sequence: Synthetic peptide
  Seed: LRMKWMMAMKYPITA
LRMKHMMMMNYPITA

SEQ ID NO: 227715 - protein, 15 aa, Artificial Sequence
  Description of Artificial Sequence: Synthetic peptide
  Seed: LRMKWMMAMKYPITA
LRMKHMMMMNYPLTA

SEQ ID NO: 227716 - protein, 15 aa, Artificial Sequence
  Description of Artificial Sequence: Synthetic peptide
  Seed: LRMKWMMAMKYPITA
LRMKHMMMMNYPMTA

SEQ ID NO: 227717 - protein, 15 aa, Artificial Sequence
  Description of Artificial Sequence: Synthetic peptide
  Seed: LRMKWMMAMKYPITA
LRMKHMMMMNYPVTA

SEQ ID NO: 227718 - protein, 15 aa, Artificial Sequence
  Description of Artificial Sequence: Synthetic peptide
  Seed: LRMKWMMAMKYPITA
LRMKHMMMMPYPATA

SEQ ID NO: 227719 - protein, 15 aa, Artificial Sequence
  Description of Artificial Sequence: Synthetic peptide
  Seed: LRMKWMMAMKYPITA
LRMKHMMMMPYPITA

SEQ ID NO: 227720 - protein, 15 aa, Artificial Sequence
  Description of Artificial Sequence: Synthetic peptide
  Seed: LRMKWMMAMKYPITA
LRMKHMMMMPYPLTA

SEQ ID NO: 227721 - protein, 15 aa, Artificial Sequence
  Description of Artificial Sequence: Synthetic peptide
  Seed: LRMKWMMAMKYPITA
LRMKHMMMMPYPMTA

SEQ ID NO: 227722 - protein, 15 aa, Artificial Sequence
  Description of Artificial Sequence: Synthetic peptide
  Seed: LRMKWMMAMKYPITA
LRMKHMMMMPYPSTA

SEQ ID NO: 227723 - protein, 15 aa, Artificial Sequence
  Description of Artificial Sequence: Synthetic peptide
  Seed: LRMKWMMAMKYPITA
LRMKHMMMMPYPTTA

SEQ ID NO: 227724 - protein, 15 aa, Artificial Sequence
  Description of Artificial Sequence: Synthetic peptide
  Seed: LRMKWMMAMKYPITA
LRMKHMMMMPYPVTA

SEQ ID NO: 227725 - protein, 15 aa, Artificial Sequence
  Description of Artificial Sequence: Synthetic peptide
  Seed: LRMKWMMAMKYPITA
LRMKHMMMMRYPATA

SEQ ID NO: 227726 - protein, 15 aa, Artificial Sequence
  Description of Artificial Sequence: Synthetic peptide
  Seed: LRMKWMMAMKYPITA
LRMKHMMMMRYPFTA

SEQ ID NO: 227727 - protein, 15 aa, Artificial Sequence
  Description of Artificial Sequence: Synthetic peptide
  Seed: LRMKWMMAMKYPITA
LRMKHMMMMRYPGTA

SEQ ID NO: 227728 - protein, 15 aa, Artificial Sequence
  Description of Artificial Sequence: Synthetic peptide
  Seed: LRMKWMMAMKYPITA
LRMKHMMMMRYPHTA

SEQ ID NO: 227729 - protein, 15 aa, Artificial Sequence
  Description of Artificial Sequence: Synthetic peptide
  Seed: LRMKWMMAMKYPITA
LRMKHMMMMRYPITA

SEQ ID NO: 227730 - protein, 15 aa, Artificial Sequence
  Description of Artificial Sequence: Synthetic peptide
  Seed: LRMKWMMAMKYPITA
LRMKHMMMMRYPKTA

SEQ ID NO: 227731 - protein, 15 aa, Artificial Sequence
  Description of Artificial Sequence: Synthetic peptide
  Seed: LRMKWMMAMKYPITA
LRMKHMMMMRYPLTA

SEQ ID NO: 227732 - protein, 15 aa, Artificial Sequence
  Description of Artificial Sequence: Synthetic peptide
  Seed: LRMKWMMAMKYPITA
LRMKHMMMMRYPMTA

SEQ ID NO: 227733 - protein, 15 aa, Artificial Sequence
  Description of Artificial Sequence: Synthetic peptide
  Seed: LRMKWMMAMKYPITA
LRMKHMMMMRYPQTA

SEQ ID NO: 227734 - protein, 15 aa, Artificial Sequence
  Description of Artificial Sequence: Synthetic peptide
  Seed: LRMKWMMAMKYPITA
LRMKHMMMMRYPRTA

SEQ ID NO: 227735 - protein, 15 aa, Artificial Sequence
  Description of Artificial Sequence: Synthetic peptide
  Seed: LRMKWMMAMKYPITA
LRMKHMMMMRYPSTA

SEQ ID NO: 227736 - protein, 15 aa, Artificial Sequence
  Description of Artificial Sequence: Synthetic peptide
  Seed: LRMKWMMAMKYPITA
LRMKHMMMMRYPTTA

SEQ ID NO: 227737 - protein, 15 aa, Artificial Sequence
  Description of Artificial Sequence: Synthetic peptide
  Seed: LRMKWMMAMKYPITA
LRMKHMMMMRYPVTA

SEQ ID NO: 227738 - protein, 15 aa, Artificial Sequence
  Description of Artificial Sequence: Synthetic peptide
  Seed: LRMKWMMAMKYPITA
LRMKHMMMMRYPYTA

SEQ ID NO: 227739 - protein, 15 aa, Artificial Sequence
  Description of Artificial Sequence: Synthetic peptide
  Seed: LRMKWMMAMKYPITA
LRMKHMMMMSYPATA

SEQ ID NO: 227740 - protein, 15 aa, Artificial Sequence
  Description of Artificial Sequence: Synthetic peptide
  Seed: LRMKWMMAMKYPITA
LRMKHMMMMSYPCTA

SEQ ID NO: 227741 - protein, 15 aa, Artificial Sequence
  Description of Artificial Sequence: Synthetic peptide
  Seed: LRMKWMMAMKYPITA
LRMKHMMMMSYPFTA

SEQ ID NO: 227742 - protein, 15 aa, Artificial Sequence
  Description of Artificial Sequence: Synthetic peptide
  Seed: LRMKWMMAMKYPITA
LRMKHMMMMSYPITA

SEQ ID NO: 227743 - protein, 15 aa, Artificial Sequence
  Description of Artificial Sequence: Synthetic peptide
  Seed: LRMKWMMAMKYPITA
LRMKHMMMMSYPLTA

SEQ ID NO: 227744 - protein, 15 aa, Artificial Sequence
  Description of Artificial Sequence: Synthetic peptide
  Seed: LRMKWMMAMKYPITA
LRMKHMMMMSYPMTA

SEQ ID NO: 227745 - protein, 15 aa, Artificial Sequence
  Description of Artificial Sequence: Synthetic peptide
  Seed: LRMKWMMAMKYPITA
LRMKHMMMMSYPNTA

SEQ ID NO: 227746 - protein, 15 aa, Artificial Sequence
  Description of Artificial Sequence: Synthetic peptide
  Seed: LRMKWMMAMKYPITA
LRMKHMMMMSYPSTA

SEQ ID NO: 227747 - protein, 15 aa, Artificial Sequence
  Description of Artificial Sequence: Synthetic peptide
  Seed: LRMKWMMAMKYPITA
LRMKHMMMMSYPTTA

SEQ ID NO: 227748 - protein, 15 aa, Artificial Sequence
  Description of Artificial Sequence: Synthetic peptide
  Seed: LRMKWMMAMKYPITA
LRMKHMMMMSYPVTA

SEQ ID NO: 227749 - protein, 15 aa, Artificial Sequence
  Description of Artificial Sequence: Synthetic peptide
  Seed: LRMKWMMAMKYPITA
LRMKHMMMMSYPYTA

SEQ ID NO: 227750 - protein, 15 aa, Artificial Sequence
  Description of Artificial Sequence: Synthetic peptide
  Seed: LRMKWMMAMKYPITA
LRMKHMMMMTYPATA

SEQ ID NO: 227751 - protein, 15 aa, Artificial Sequence
  Description of Artificial Sequence: Synthetic peptide
  Seed: LRMKWMMAMKYPITA
LRMKHMMMMTYPITA

SEQ ID NO: 227752 - protein, 15 aa, Artificial Sequence
  Description of Artificial Sequence: Synthetic peptide
  Seed: LRMKWMMAMKYPITA
LRMKHMMMMTYPLTA

SEQ ID NO: 227753 - protein, 15 aa, Artificial Sequence
  Description of Artificial Sequence: Synthetic peptide
  Seed: LRMKWMMAMKYPITA
LRMKHMMMMTYPMTA

SEQ ID NO: 227754 - protein, 15 aa, Artificial Sequence
  Description of Artificial Sequence: Synthetic peptide
  Seed: LRMKWMMAMKYPITA
LRMKHMMMMTYPNTA

SEQ ID NO: 227755 - protein, 15 aa, Artificial Sequence
  Description of Artificial Sequence: Synthetic peptide
  Seed: LRMKWMMAMKYPITA
LRMKHMMMMTYPSTA

SEQ ID NO: 227756 - protein, 15 aa, Artificial Sequence
  Description of Artificial Sequence: Synthetic peptide
  Seed: LRMKWMMAMKYPITA
LRMKHMMMMTYPTTA

SEQ ID NO: 227757 - protein, 15 aa, Artificial Sequence
  Description of Artificial Sequence: Synthetic peptide
  Seed: LRMKWMMAMKYPITA
LRMKHMMMMTYPVTA

SEQ ID NO: 227758 - protein, 15 aa, Artificial Sequence
  Description of Artificial Sequence: Synthetic peptide
  Seed: LRMKWMMAMKYPITA
LRMKHMMMMVYPATA

SEQ ID NO: 227759 - protein, 15 aa, Artificial Sequence
  Description of Artificial Sequence: Synthetic peptide
  Seed: LRMKWMMAMKYPITA
LRMKHMMMMVYPITA

SEQ ID NO: 227760 - protein, 15 aa, Artificial Sequence
  Description of Artificial Sequence: Synthetic peptide
  Seed: LRMKWMMAMKYPITA
LRMKHMMMMVYPMTA

SEQ ID NO: 227761 - protein, 15 aa, Artificial Sequence
  Description of Artificial Sequence: Synthetic peptide
  Seed: LRMKWMMAMKYPITA
LRMKHMMMMVYPSTA

SEQ ID NO: 227762 - protein, 15 aa, Artificial Sequence
  Description of Artificial Sequence: Synthetic peptide
  Seed: LRMKWMMAMKYPITA
LRMKHMMMMVYPTTA

SEQ ID NO: 227763 - protein, 15 aa, Artificial Sequence
  Description of Artificial Sequence: Synthetic peptide
  Seed: LRMKWMMAMKYPITA
LRMKHMMMMVYPVTA

SEQ ID NO: 227764 - protein, 15 aa, Artificial Sequence
  Description of Artificial Sequence: Synthetic peptide
  Seed: LRMKWMMAMKYPITA
LRMKHMMNMAYPATA

SEQ ID NO: 227765 - protein, 15 aa, Artificial Sequence
  Description of Artificial Sequence: Synthetic peptide
  Seed: LRMKWMMAMKYPITA
LRMKHMMNMAYPFTA

SEQ ID NO: 227766 - protein, 15 aa, Artificial Sequence
  Description of Artificial Sequence: Synthetic peptide
  Seed: LRMKWMMAMKYPITA
LRMKHMMNMAYPITA

SEQ ID NO: 227767 - protein, 15 aa, Artificial Sequence
  Description of Artificial Sequence: Synthetic peptide
  Seed: LRMKWMMAMKYPITA
LRMKHMMNMAYPLTA

SEQ ID NO: 227768 - protein, 15 aa, Artificial Sequence
  Description of Artificial Sequence: Synthetic peptide
  Seed: LRMKWMMAMKYPITA
LRMKHMMNMAYPVTA

SEQ ID NO: 227769 - protein, 15 aa, Artificial Sequence
  Description of Artificial Sequence: Synthetic peptide
  Seed: LRMKWMMAMKYPITA
LRMKHMMNMGYPITA

SEQ ID NO: 227770 - protein, 15 aa, Artificial Sequence
  Description of Artificial Sequence: Synthetic peptide
  Seed: LRMKWMMAMKYPITA
LRMKHMMNMGYPLTA

SEQ ID NO: 227771 - protein, 15 aa, Artificial Sequence
  Description of Artificial Sequence: Synthetic peptide
  Seed: LRMKWMMAMKYPITA
LRMKHMMNMIYPITA

SEQ ID NO: 227772 - protein, 15 aa, Artificial Sequence
  Description of Artificial Sequence: Synthetic peptide
  Seed: LRMKWMMAMKYPITA
LRMKHMMNMIYPVTA

SEQ ID NO: 227773 - protein, 15 aa, Artificial Sequence
  Description of Artificial Sequence: Synthetic peptide
  Seed: LRMKWMMAMKYPITA
LRMKHMMNMNYPFTA

SEQ ID NO: 227774 - protein, 15 aa, Artificial Sequence
  Description of Artificial Sequence: Synthetic peptide
  Seed: LRMKWMMAMKYPITA
LRMKHMMNMNYPITA

SEQ ID NO: 227775 - protein, 15 aa, Artificial Sequence
  Description of Artificial Sequence: Synthetic peptide
  Seed: LRMKWMMAMKYPITA
LRMKHMMNMNYPLTA

SEQ ID NO: 227776 - protein, 15 aa, Artificial Sequence
  Description of Artificial Sequence: Synthetic peptide
  Seed: LRMKWMMAMKYPITA
LRMKHMMNMNYPVTA

SEQ ID NO: 227777 - protein, 15 aa, Artificial Sequence
  Description of Artificial Sequence: Synthetic peptide
  Seed: LRMKWMMAMKYPITA
LRMKHMMNMPYPITA

SEQ ID NO: 227778 - protein, 15 aa, Artificial Sequence
  Description of Artificial Sequence: Synthetic peptide
  Seed: LRMKWMMAMKYPITA
LRMKHMMNMSYPITA

SEQ ID NO: 227779 - protein, 15 aa, Artificial Sequence
  Description of Artificial Sequence: Synthetic peptide
  Seed: LRMKWMMAMKYPITA
LRMKHMMNMSYPLTA

SEQ ID NO: 227780 - protein, 15 aa, Artificial Sequence
  Description of Artificial Sequence: Synthetic peptide
  Seed: LRMKWMMAMKYPITA
LRMKHMMNMSYPVTA

SEQ ID NO: 227781 - protein, 15 aa, Artificial Sequence
  Description of Artificial Sequence: Synthetic peptide
  Seed: LRMKWMMAMKYPITA
LRMKHMMNMVYPITA

SEQ ID NO: 227782 - protein, 15 aa, Artificial Sequence
  Description of Artificial Sequence: Synthetic peptide
  Seed: LRMKWMMAMKYPITA
LRMKHMMNMVYPVTA

SEQ ID NO: 227783 - protein, 15 aa, Artificial Sequence
  Description of Artificial Sequence: Synthetic peptide
  Seed: LRMKWMMAMKYPITA
LRMKHMMPMAYPITA

SEQ ID NO: 227784 - protein, 15 aa, Artificial Sequence
  Description of Artificial Sequence: Synthetic peptide
  Seed: LRMKWMMAMKYPITA
LRMKHMMPMAYPLTA

SEQ ID NO: 227785 - protein, 15 aa, Artificial Sequence
  Description of Artificial Sequence: Synthetic peptide
  Seed: LRMKWMMAMKYPITA
LRMKHMMPMAYPVTA

SEQ ID NO: 227786 - protein, 15 aa, Artificial Sequence
  Description of Artificial Sequence: Synthetic peptide
  Seed: LRMKWMMAMKYPITA
LRMKHMMQMAYPATA

SEQ ID NO: 227787 - protein, 15 aa, Artificial Sequence
  Description of Artificial Sequence: Synthetic peptide
  Seed: LRMKWMMAMKYPITA
LRMKHMMQMAYPITA

SEQ ID NO: 227788 - protein, 15 aa, Artificial Sequence
  Description of Artificial Sequence: Synthetic peptide
  Seed: LRMKWMMAMKYPITA
LRMKHMMQMAYPLTA

SEQ ID NO: 227789 - protein, 15 aa, Artificial Sequence
  Description of Artificial Sequence: Synthetic peptide
  Seed: LRMKWMMAMKYPITA
LRMKHMMQMAYPMTA

SEQ ID NO: 227790 - protein, 15 aa, Artificial Sequence
  Description of Artificial Sequence: Synthetic peptide
  Seed: LRMKWMMAMKYPITA
LRMKHMMQMAYPVTA

SEQ ID NO: 227791 - protein, 15 aa, Artificial Sequence
  Description of Artificial Sequence: Synthetic peptide
  Seed: LRMKWMMAMKYPITA
LRMKHMMQMGYPATA

SEQ ID NO: 227792 - protein, 15 aa, Artificial Sequence
  Description of Artificial Sequence: Synthetic peptide
  Seed: LRMKWMMAMKYPITA
LRMKHMMQMGYPITA

SEQ ID NO: 227793 - protein, 15 aa, Artificial Sequence
  Description of Artificial Sequence: Synthetic peptide
  Seed: LRMKWMMAMKYPITA
LRMKHMMQMGYPLTA

SEQ ID NO: 227794 - protein, 15 aa, Artificial Sequence
  Description of Artificial Sequence: Synthetic peptide
  Seed: LRMKWMMAMKYPITA
LRMKHMMQMGYPVTA

SEQ ID NO: 227795 - protein, 15 aa, Artificial Sequence
  Description of Artificial Sequence: Synthetic peptide
  Seed: LRMKWMMAMKYPITA
LRMKHMMQMSYPATA

SEQ ID NO: 227796 - protein, 15 aa, Artificial Sequence
  Description of Artificial Sequence: Synthetic peptide
  Seed: LRMKWMMAMKYPITA
LRMKHMMQMSYPITA

SEQ ID NO: 227797 - protein, 15 aa, Artificial Sequence
  Description of Artificial Sequence: Synthetic peptide
  Seed: LRMKWMMAMKYPITA
LRMKHMMQMSYPLTA

SEQ ID NO: 227798 - protein, 15 aa, Artificial Sequence
  Description of Artificial Sequence: Synthetic peptide
  Seed: LRMKWMMAMKYPITA
LRMKHMMQMSYPVTA

SEQ ID NO: 227799 - protein, 15 aa, Artificial Sequence
  Description of Artificial Sequence: Synthetic peptide
  Seed: LRMKWMMAMKYPITA
LRMKHMMSMAYPATA

SEQ ID NO: 227800 - protein, 15 aa, Artificial Sequence
  Description of Artificial Sequence: Synthetic peptide
  Seed: LRMKWMMAMKYPITA
LRMKHMMSMAYPFTA

SEQ ID NO: 227801 - protein, 15 aa, Artificial Sequence
  Description of Artificial Sequence: Synthetic peptide
  Seed: LRMKWMMAMKYPITA
LRMKHMMSMAYPITA

SEQ ID NO: 227802 - protein, 15 aa, Artificial Sequence
  Description of Artificial Sequence: Synthetic peptide
  Seed: LRMKWMMAMKYPITA
LRMKHMMSMAYPLTA

SEQ ID NO: 227803 - protein, 15 aa, Artificial Sequence
  Description of Artificial Sequence: Synthetic peptide
  Seed: LRMKWMMAMKYPITA
LRMKHMMSMAYPMTA

SEQ ID NO: 227804 - protein, 15 aa, Artificial Sequence
  Description of Artificial Sequence: Synthetic peptide
  Seed: LRMKWMMAMKYPITA
LRMKHMMSMAYPSTA

SEQ ID NO: 227805 - protein, 15 aa, Artificial Sequence
  Description of Artificial Sequence: Synthetic peptide
  Seed: LRMKWMMAMKYPITA
LRMKHMMSMAYPTTA

SEQ ID NO: 227806 - protein, 15 aa, Artificial Sequence
  Description of Artificial Sequence: Synthetic peptide
  Seed: LRMKWMMAMKYPITA
LRMKHMMSMAYPVTA

SEQ ID NO: 227807 - protein, 15 aa, Artificial Sequence
  Description of Artificial Sequence: Synthetic peptide
  Seed: LRMKWMMAMKYPITA
LRMKHMMSMGYPATA

SEQ ID NO: 227808 - protein, 15 aa, Artificial Sequence
  Description of Artificial Sequence: Synthetic peptide
  Seed: LRMKWMMAMKYPITA
LRMKHMMSMGYPITA

SEQ ID NO: 227809 - protein, 15 aa, Artificial Sequence
  Description of Artificial Sequence: Synthetic peptide
  Seed: LRMKWMMAMKYPITA
LRMKHMMSMGYPLTA

SEQ ID NO: 227810 - protein, 15 aa, Artificial Sequence
  Description of Artificial Sequence: Synthetic peptide
  Seed: LRMKWMMAMKYPITA
LRMKHMMSMGYPMTA

SEQ ID NO: 227811 - protein, 15 aa, Artificial Sequence
  Description of Artificial Sequence: Synthetic peptide
  Seed: LRMKWMMAMKYPITA
LRMKHMMSMGYPVTA

SEQ ID NO: 227812 - protein, 15 aa, Artificial Sequence
  Description of Artificial Sequence: Synthetic peptide
  Seed: LRMKWMMAMKYPITA
LRMKHMMSMPYPATA

SEQ ID NO: 227813 - protein, 15 aa, Artificial Sequence
  Description of Artificial Sequence: Synthetic peptide
  Seed: LRMKWMMAMKYPITA
LRMKHMMSMPYPITA

SEQ ID NO: 227814 - protein, 15 aa, Artificial Sequence
  Description of Artificial Sequence: Synthetic peptide
  Seed: LRMKWMMAMKYPITA
LRMKHMMSMPYPLTA

SEQ ID NO: 227815 - protein, 15 aa, Artificial Sequence
  Description of Artificial Sequence: Synthetic peptide
  Seed: LRMKWMMAMKYPITA
LRMKHMMSMPYPMTA

SEQ ID NO: 227816 - protein, 15 aa, Artificial Sequence
  Description of Artificial Sequence: Synthetic peptide
  Seed: LRMKWMMAMKYPITA
LRMKHMMSMPYPVTA

SEQ ID NO: 227817 - protein, 15 aa, Artificial Sequence
  Description of Artificial Sequence: Synthetic peptide
  Seed: LRMKWMMAMKYPITA
LRMKHMMSMSYPATA

SEQ ID NO: 227818 - protein, 15 aa, Artificial Sequence
  Description of Artificial Sequence: Synthetic peptide
  Seed: LRMKWMMAMKYPITA
LRMKHMMSMSYPFTA

SEQ ID NO: 227819 - protein, 15 aa, Artificial Sequence
  Description of Artificial Sequence: Synthetic peptide
  Seed: LRMKWMMAMKYPITA
LRMKHMMSMSYPITA

SEQ ID NO: 227820 - protein, 15 aa, Artificial Sequence
  Description of Artificial Sequence: Synthetic peptide
  Seed: LRMKWMMAMKYPITA
LRMKHMMSMSYPLTA

SEQ ID NO: 227821 - protein, 15 aa, Artificial Sequence
  Description of Artificial Sequence: Synthetic peptide
  Seed: LRMKWMMAMKYPITA
LRMKHMMSMSYPMTA

SEQ ID NO: 227822 - protein, 15 aa, Artificial Sequence
  Description of Artificial Sequence: Synthetic peptide
  Seed: LRMKWMMAMKYPITA
LRMKHMMSMSYPVTA

SEQ ID NO: 227823 - protein, 15 aa, Artificial Sequence
  Description of Artificial Sequence: Synthetic peptide
  Seed: LRMKWMMAMKYPITA
LRMKHMMSMTYPATA

SEQ ID NO: 227824 - protein, 15 aa, Artificial Sequence
  Description of Artificial Sequence: Synthetic peptide
  Seed: LRMKWMMAMKYPITA
LRMKHMMSMTYPITA

SEQ ID NO: 227825 - protein, 15 aa, Artificial Sequence
  Description of Artificial Sequence: Synthetic peptide
  Seed: LRMKWMMAMKYPITA
LRMKHMMSMTYPLTA

SEQ ID NO: 227826 - protein, 15 aa, Artificial Sequence
  Description of Artificial Sequence: Synthetic peptide
  Seed: LRMKWMMAMKYPITA
LRMKHMMSMTYPMTA

SEQ ID NO: 227827 - protein, 15 aa, Artificial Sequence
  Description of Artificial Sequence: Synthetic peptide
  Seed: LRMKWMMAMKYPITA
LRMKHMMSMTYPVTA

SEQ ID NO: 227828 - protein, 15 aa, Artificial Sequence
  Description of Artificial Sequence: Synthetic peptide
  Seed: LRMKWMMAMKYPITA
LRMKHMMSMVYPITA

SEQ ID NO: 227829 - protein, 15 aa, Artificial Sequence
  Description of Artificial Sequence: Synthetic peptide
  Seed: LRMKWMMAMKYPITA
LRMKHMMTMAYPATA

SEQ ID NO: 227830 - protein, 15 aa, Artificial Sequence
  Description of Artificial Sequence: Synthetic peptide
  Seed: LRMKWMMAMKYPITA
LRMKHMMTMAYPFTA

SEQ ID NO: 227831 - protein, 15 aa, Artificial Sequence
  Description of Artificial Sequence: Synthetic peptide
  Seed: LRMKWMMAMKYPITA
LRMKHMMTMAYPITA

SEQ ID NO: 227832 - protein, 15 aa, Artificial Sequence
  Description of Artificial Sequence: Synthetic peptide
  Seed: LRMKWMMAMKYPITA
LRMKHMMTMAYPLTA

SEQ ID NO: 227833 - protein, 15 aa, Artificial Sequence
  Description of Artificial Sequence: Synthetic peptide
  Seed: LRMKWMMAMKYPITA
LRMKHMMTMAYPMTA

SEQ ID NO: 227834 - protein, 15 aa, Artificial Sequence
  Description of Artificial Sequence: Synthetic peptide
  Seed: LRMKWMMAMKYPITA
LRMKHMMTMAYPSTA

SEQ ID NO: 227835 - protein, 15 aa, Artificial Sequence
  Description of Artificial Sequence: Synthetic peptide
  Seed: LRMKWMMAMKYPITA
LRMKHMMTMAYPTTA

SEQ ID NO: 227836 - protein, 15 aa, Artificial Sequence
  Description of Artificial Sequence: Synthetic peptide
  Seed: LRMKWMMAMKYPITA
LRMKHMMTMAYPVTA

SEQ ID NO: 227837 - protein, 15 aa, Artificial Sequence
  Description of Artificial Sequence: Synthetic peptide
  Seed: LRMKWMMAMKYPITA
LRMKHMMTMGYPATA

SEQ ID NO: 227838 - protein, 15 aa, Artificial Sequence
  Description of Artificial Sequence: Synthetic peptide
  Seed: LRMKWMMAMKYPITA
LRMKHMMTMGYPITA

SEQ ID NO: 227839 - protein, 15 aa, Artificial Sequence
  Description of Artificial Sequence: Synthetic peptide
  Seed: LRMKWMMAMKYPITA
LRMKHMMTMGYPLTA

SEQ ID NO: 227840 - protein, 15 aa, Artificial Sequence
  Description of Artificial Sequence: Synthetic peptide
  Seed: LRMKWMMAMKYPITA
LRMKHMMTMGYPMTA

SEQ ID NO: 227841 - protein, 15 aa, Artificial Sequence
  Description of Artificial Sequence: Synthetic peptide
  Seed: LRMKWMMAMKYPITA
LRMKHMMTMGYPVTA

SEQ ID NO: 227842 - protein, 15 aa, Artificial Sequence
  Description of Artificial Sequence: Synthetic peptide
  Seed: LRMKWMMAMKYPITA
LRMKHMMTMPYPITA

SEQ ID NO: 227843 - protein, 15 aa, Artificial Sequence
  Description of Artificial Sequence: Synthetic peptide
  Seed: LRMKWMMAMKYPITA
LRMKHMMTMPYPLTA

SEQ ID NO: 227844 - protein, 15 aa, Artificial Sequence
  Description of Artificial Sequence: Synthetic peptide
  Seed: LRMKWMMAMKYPITA
LRMKHMMTMPYPVTA

SEQ ID NO: 227845 - protein, 15 aa, Artificial Sequence
  Description of Artificial Sequence: Synthetic peptide
  Seed: LRMKWMMAMKYPITA
LRMKHMMTMSYPATA

SEQ ID NO: 227846 - protein, 15 aa, Artificial Sequence
  Description of Artificial Sequence: Synthetic peptide
  Seed: LRMKWMMAMKYPITA
LRMKHMMTMSYPFTA

SEQ ID NO: 227847 - protein, 15 aa, Artificial Sequence
  Description of Artificial Sequence: Synthetic peptide
  Seed: LRMKWMMAMKYPITA
LRMKHMMTMSYPITA

SEQ ID NO: 227848 - protein, 15 aa, Artificial Sequence
  Description of Artificial Sequence: Synthetic peptide
  Seed: LRMKWMMAMKYPITA
LRMKHMMTMSYPLTA

SEQ ID NO: 227849 - protein, 15 aa, Artificial Sequence
  Description of Artificial Sequence: Synthetic peptide
  Seed: LRMKWMMAMKYPITA
LRMKHMMTMSYPMTA

SEQ ID NO: 227850 - protein, 15 aa, Artificial Sequence
  Description of Artificial Sequence: Synthetic peptide
  Seed: LRMKWMMAMKYPITA
LRMKHMMTMSYPVTA

SEQ ID NO: 227851 - protein, 15 aa, Artificial Sequence
  Description of Artificial Sequence: Synthetic peptide
  Seed: LRMKWMMAMKYPITA
LRMKHMMTMTYPITA

SEQ ID NO: 227852 - protein, 15 aa, Artificial Sequence
  Description of Artificial Sequence: Synthetic peptide
  Seed: LRMKWMMAMKYPITA
LRMKHMMTMTYPLTA

SEQ ID NO: 227853 - protein, 15 aa, Artificial Sequence
  Description of Artificial Sequence: Synthetic peptide
  Seed: LRMKWMMAMKYPITA
LRMKHMMTMTYPVTA

SEQ ID NO: 227854 - protein, 15 aa, Artificial Sequence
  Description of Artificial Sequence: Synthetic peptide
  Seed: LRMKWMMAMKYPITA
LRMKHMMTMVYPITA

SEQ ID NO: 227855 - protein, 15 aa, Artificial Sequence
  Description of Artificial Sequence: Synthetic peptide
  Seed: LRMKWMMAMKYPITA
LRMKHMMTMVYPLTA

SEQ ID NO: 227856 - protein, 15 aa, Artificial Sequence
  Description of Artificial Sequence: Synthetic peptide
  Seed: LRMKWMMAMKYPITA
LRMKHMMVMAYPCTA

SEQ ID NO: 227857 - protein, 15 aa, Artificial Sequence
  Description of Artificial Sequence: Synthetic peptide
  Seed: LRMKWMMAMKYPITA
LRMKHMMVMAYPITA

SEQ ID NO: 227858 - protein, 15 aa, Artificial Sequence
  Description of Artificial Sequence: Synthetic peptide
  Seed: LRMKWMMAMKYPITA
LRMKHMMVMAYPLTA

SEQ ID NO: 227859 - protein, 15 aa, Artificial Sequence
  Description of Artificial Sequence: Synthetic peptide
  Seed: LRMKWMMAMKYPITA
LRMKHMMVMAYPVTA

SEQ ID NO: 227860 - protein, 15 aa, Artificial Sequence
  Description of Artificial Sequence: Synthetic peptide
  Seed: LRMKWMMAMKYPITA
LRMKHMMVMGYPATA

SEQ ID NO: 227861 - protein, 15 aa, Artificial Sequence
  Description of Artificial Sequence: Synthetic peptide
  Seed: LRMKWMMAMKYPITA
LRMKHMMVMGYPITA

SEQ ID NO: 227862 - protein, 15 aa, Artificial Sequence
  Description of Artificial Sequence: Synthetic peptide
  Seed: LRMKWMMAMKYPITA
LRMKHMMVMGYPLTA

SEQ ID NO: 227863 - protein, 15 aa, Artificial Sequence
  Description of Artificial Sequence: Synthetic peptide
  Seed: LRMKWMMAMKYPITA
LRMKHMMVMGYPMTA

SEQ ID NO: 227864 - protein, 15 aa, Artificial Sequence
  Description of Artificial Sequence: Synthetic peptide
  Seed: LRMKWMMAMKYPITA
LRMKHMMVMGYPTTA

SEQ ID NO: 227865 - protein, 15 aa, Artificial Sequence
  Description of Artificial Sequence: Synthetic peptide
  Seed: LRMKWMMAMKYPITA
LRMKHMMVMGYPVTA

SEQ ID NO: 227866 - protein, 15 aa, Artificial Sequence
  Description of Artificial Sequence: Synthetic peptide
  Seed: LRMKWMMAMKYPITA
LRMKHMMVMKYPATA

SEQ ID NO: 227867 - protein, 15 aa, Artificial Sequence
  Description of Artificial Sequence: Synthetic peptide
  Seed: LRMKWMMAMKYPITA
LRMKHMMVMKYPLTA

SEQ ID NO: 227868 - protein, 15 aa, Artificial Sequence
  Description of Artificial Sequence: Synthetic peptide
  Seed: LRMKWMMAMKYPITA
LRMKHMMVMKYPRTA

SEQ ID NO: 227869 - protein, 15 aa, Artificial Sequence
  Description of Artificial Sequence: Synthetic peptide
  Seed: LRMKWMMAMKYPITA
LRMKHMMVMKYPYTA

SEQ ID NO: 227870 - protein, 15 aa, Artificial Sequence
  Description of Artificial Sequence: Synthetic peptide
  Seed: LRMKWMMAMKYPITA
LRMKHMMVMPYPATA

SEQ ID NO: 227871 - protein, 15 aa, Artificial Sequence
  Description of Artificial Sequence: Synthetic peptide
  Seed: LRMKWMMAMKYPITA
LRMKHMMVMPYPITA

SEQ ID NO: 227872 - protein, 15 aa, Artificial Sequence
  Description of Artificial Sequence: Synthetic peptide
  Seed: LRMKWMMAMKYPITA
LRMKHMMVMPYPLTA

SEQ ID NO: 227873 - protein, 15 aa, Artificial Sequence
  Description of Artificial Sequence: Synthetic peptide
  Seed: LRMKWMMAMKYPITA
LRMKHMMVMPYPMTA

SEQ ID NO: 227874 - protein, 15 aa, Artificial Sequence
  Description of Artificial Sequence: Synthetic peptide
  Seed: LRMKWMMAMKYPITA
LRMKHMMVMPYPSTA

SEQ ID NO: 227875 - protein, 15 aa, Artificial Sequence
  Description of Artificial Sequence: Synthetic peptide
  Seed: LRMKWMMAMKYPITA
LRMKHMMVMPYPVTA

SEQ ID NO: 227876 - protein, 15 aa, Artificial Sequence
  Description of Artificial Sequence: Synthetic peptide
  Seed: LRMKWMMAMKYPITA
LRMKHMMVMRYPATA

SEQ ID NO: 227877 - protein, 15 aa, Artificial Sequence
  Description of Artificial Sequence: Synthetic peptide
  Seed: LRMKWMMAMKYPITA
LRMKHMMVMRYPGTA

SEQ ID NO: 227878 - protein, 15 aa, Artificial Sequence
  Description of Artificial Sequence: Synthetic peptide
  Seed: LRMKWMMAMKYPITA
LRMKHMMVMRYPITA

SEQ ID NO: 227879 - protein, 15 aa, Artificial Sequence
  Description of Artificial Sequence: Synthetic peptide
  Seed: LRMKWMMAMKYPITA
LRMKHMMVMRYPLTA

SEQ ID NO: 227880 - protein, 15 aa, Artificial Sequence
  Description of Artificial Sequence: Synthetic peptide
  Seed: LRMKWMMAMKYPITA
LRMKHMMVMRYPMTA

SEQ ID NO: 227881 - protein, 15 aa, Artificial Sequence
  Description of Artificial Sequence: Synthetic peptide
  Seed: LRMKWMMAMKYPITA
LRMKHMMVMRYPQTA

SEQ ID NO: 227882 - protein, 15 aa, Artificial Sequence
  Description of Artificial Sequence: Synthetic peptide
  Seed: LRMKWMMAMKYPITA
LRMKHMMVMRYPRTA

SEQ ID NO: 227883 - protein, 15 aa, Artificial Sequence
  Description of Artificial Sequence: Synthetic peptide
  Seed: LRMKWMMAMKYPITA
LRMKHMMVMRYPSTA

SEQ ID NO: 227884 - protein, 15 aa, Artificial Sequence
  Description of Artificial Sequence: Synthetic peptide
  Seed: LRMKWMMAMKYPITA
LRMKHMMVMRYPTTA

SEQ ID NO: 227885 - protein, 15 aa, Artificial Sequence
  Description of Artificial Sequence: Synthetic peptide
  Seed: LRMKWMMAMKYPITA
LRMKHMMVMRYPVTA

SEQ ID NO: 227886 - protein, 15 aa, Artificial Sequence
  Description of Artificial Sequence: Synthetic peptide
  Seed: LRMKWMMAMKYPITA
LRMKHMMVMRYPYTA

SEQ ID NO: 227887 - protein, 15 aa, Artificial Sequence
  Description of Artificial Sequence: Synthetic peptide
  Seed: LRMKWMMAMKYPITA
LRMKHMMVMSYPITA

SEQ ID NO: 227888 - protein, 15 aa, Artificial Sequence
  Description of Artificial Sequence: Synthetic peptide
  Seed: LRMKWMMAMKYPITA
LRMKHMMVMSYPLTA

SEQ ID NO: 227889 - protein, 15 aa, Artificial Sequence
  Description of Artificial Sequence: Synthetic peptide
  Seed: LRMKWMMAMKYPITA
LRMKHMMVMSYPMTA

SEQ ID NO: 227890 - protein, 15 aa, Artificial Sequence
  Description of Artificial Sequence: Synthetic peptide
  Seed: LRMKWMMAMKYPITA
LRMKHMMVMSYPSTA

SEQ ID NO: 227891 - protein, 15 aa, Artificial Sequence
  Description of Artificial Sequence: Synthetic peptide
  Seed: LRMKWMMAMKYPITA
LRMKHMMVMSYPTTA

SEQ ID NO: 227892 - protein, 15 aa, Artificial Sequence
  Description of Artificial Sequence: Synthetic peptide
  Seed: LRMKWMMAMKYPITA
LRMKHMMVMSYPVTA

SEQ ID NO: 227893 - protein, 15 aa, Artificial Sequence
  Description of Artificial Sequence: Synthetic peptide
  Seed: LRMKWMMAMKYPITA
LRMKHMMVMTYPITA

SEQ ID NO: 227894 - protein, 15 aa, Artificial Sequence
  Description of Artificial Sequence: Synthetic peptide
  Seed: LRMKWMMAMKYPITA
LRMKHMMYMRYPFTA

SEQ ID NO: 227895 - protein, 15 aa, Artificial Sequence
  Description of Artificial Sequence: Synthetic peptide
  Seed: LRMKWMMAMKYPITA
LRMKHMMYMRYPITA

SEQ ID NO: 227896 - protein, 15 aa, Artificial Sequence
  Description of Artificial Sequence: Synthetic peptide
  Seed: LRMKWMMAMKYPITA
LRMKHMMYMRYPLTA

SEQ ID NO: 227897 - protein, 15 aa, Artificial Sequence
  Description of Artificial Sequence: Synthetic peptide
  Seed: LRMKWMMAMKYPITA
LRMKHMMYMRYPMTA

SEQ ID NO: 227898 - protein, 15 aa, Artificial Sequence
  Description of Artificial Sequence: Synthetic peptide
  Seed: LRMKWMMAMKYPITA
LRMKHMMYMRYPRTA

SEQ ID NO: 227899 - protein, 15 aa, Artificial Sequence
  Description of Artificial Sequence: Synthetic peptide
  Seed: LRMKWMMAMKYPITA
LRMKHMMYMRYPVTA

SEQ ID NO: 227900 - protein, 15 aa, Artificial Sequence
  Description of Artificial Sequence: Synthetic peptide
  Seed: LRMKWMMAMKYPITA
LRMKHMMYMRYPYTA

SEQ ID NO: 227901 - protein, 15 aa, Artificial Sequence
  Description of Artificial Sequence: Synthetic peptide
  Seed: LRMKWMMAMKYPITA
LRMKIMMAMAYPATA

SEQ ID NO: 227902 - protein, 15 aa, Artificial Sequence
  Description of Artificial Sequence: Synthetic peptide
  Seed: LRMKWMMAMKYPITA
LRMKIMMAMAYPCTA

SEQ ID NO: 227903 - protein, 15 aa, Artificial Sequence
  Description of Artificial Sequence: Synthetic peptide
  Seed: LRMKWMMAMKYPITA
LRMKIMMAMAYPDTA

SEQ ID NO: 227904 - protein, 15 aa, Artificial Sequence
  Description of Artificial Sequence: Synthetic peptide
  Seed: LRMKWMMAMKYPITA
LRMKIMMAMAYPETA

SEQ ID NO: 227905 - protein, 15 aa, Artificial Sequence
  Description of Artificial Sequence: Synthetic peptide
  Seed: LRMKWMMAMKYPITA
LRMKIMMAMAYPFTA

SEQ ID NO: 227906 - protein, 15 aa, Artificial Sequence
  Description of Artificial Sequence: Synthetic peptide
  Seed: LRMKWMMAMKYPITA
LRMKIMMAMAYPGTA

SEQ ID NO: 227907 - protein, 15 aa, Artificial Sequence
  Description of Artificial Sequence: Synthetic peptide
  Seed: LRMKWMMAMKYPITA
LRMKIMMAMAYPHTA

SEQ ID NO: 227908 - protein, 15 aa, Artificial Sequence
  Description of Artificial Sequence: Synthetic peptide
  Seed: LRMKWMMAMKYPITA
LRMKIMMAMAYPITA

SEQ ID NO: 227909 - protein, 15 aa, Artificial Sequence
  Description of Artificial Sequence: Synthetic peptide
  Seed: LRMKWMMAMKYPITA
LRMKIMMAMAYPKTA

SEQ ID NO: 227910 - protein, 15 aa, Artificial Sequence
  Description of Artificial Sequence: Synthetic peptide
  Seed: LRMKWMMAMKYPITA
LRMKIMMAMAYPLTA

SEQ ID NO: 227911 - protein, 15 aa, Artificial Sequence
  Description of Artificial Sequence: Synthetic peptide
  Seed: LRMKWMMAMKYPITA
LRMKIMMAMAYPMTA

SEQ ID NO: 227912 - protein, 15 aa, Artificial Sequence
  Description of Artificial Sequence: Synthetic peptide
  Seed: LRMKWMMAMKYPITA
LRMKIMMAMAYPNTA

SEQ ID NO: 227913 - protein, 15 aa, Artificial Sequence
  Description of Artificial Sequence: Synthetic peptide
  Seed: LRMKWMMAMKYPITA
LRMKIMMAMAYPPTA

SEQ ID NO: 227914 - protein, 15 aa, Artificial Sequence
  Description of Artificial Sequence: Synthetic peptide
  Seed: LRMKWMMAMKYPITA
LRMKIMMAMAYPQTA

SEQ ID NO: 227915 - protein, 15 aa, Artificial Sequence
  Description of Artificial Sequence: Synthetic peptide
  Seed: LRMKWMMAMKYPITA
LRMKIMMAMAYPRTA

SEQ ID NO: 227916 - protein, 15 aa, Artificial Sequence
  Description of Artificial Sequence: Synthetic peptide
  Seed: LRMKWMMAMKYPITA
LRMKIMMAMAYPSTA

SEQ ID NO: 227917 - protein, 15 aa, Artificial Sequence
  Description of Artificial Sequence: Synthetic peptide
  Seed: LRMKWMMAMKYPITA
LRMKIMMAMAYPTTA

SEQ ID NO: 227918 - protein, 15 aa, Artificial Sequence
  Description of Artificial Sequence: Synthetic peptide
  Seed: LRMKWMMAMKYPITA
LRMKIMMAMAYPVTA

SEQ ID NO: 227919 - protein, 15 aa, Artificial Sequence
  Description of Artificial Sequence: Synthetic peptide
  Seed: LRMKWMMAMKYPITA
LRMKIMMAMAYPWTA

SEQ ID NO: 227920 - protein, 15 aa, Artificial Sequence
  Description of Artificial Sequence: Synthetic peptide
  Seed: LRMKWMMAMKYPITA
LRMKIMMAMAYPYTA

SEQ ID NO: 227921 - protein, 15 aa, Artificial Sequence
  Description of Artificial Sequence: Synthetic peptide
  Seed: LRMKWMMAMKYPITA
LRMKIMMAMCYPATA

SEQ ID NO: 227922 - protein, 15 aa, Artificial Sequence
  Description of Artificial Sequence: Synthetic peptide
  Seed: LRMKWMMAMKYPITA
LRMKIMMAMCYPITA

SEQ ID NO: 227923 - protein, 15 aa, Artificial Sequence
  Description of Artificial Sequence: Synthetic peptide
  Seed: LRMKWMMAMKYPITA
LRMKIMMAMCYPLTA

SEQ ID NO: 227924 - protein, 15 aa, Artificial Sequence
  Description of Artificial Sequence: Synthetic peptide
  Seed: LRMKWMMAMKYPITA
LRMKIMMAMCYPMTA

SEQ ID NO: 227925 - protein, 15 aa, Artificial Sequence
  Description of Artificial Sequence: Synthetic peptide
  Seed: LRMKWMMAMKYPITA
LRMKIMMAMCYPNTA

SEQ ID NO: 227926 - protein, 15 aa, Artificial Sequence
  Description of Artificial Sequence: Synthetic peptide
  Seed: LRMKWMMAMKYPITA
LRMKIMMAMCYPRTA

SEQ ID NO: 227927 - protein, 15 aa, Artificial Sequence
  Description of Artificial Sequence: Synthetic peptide
  Seed: LRMKWMMAMKYPITA
LRMKIMMAMCYPSTA

SEQ ID NO: 227928 - protein, 15 aa, Artificial Sequence
  Description of Artificial Sequence: Synthetic peptide
  Seed: LRMKWMMAMKYPITA
LRMKIMMAMCYPTTA

SEQ ID NO: 227929 - protein, 15 aa, Artificial Sequence
  Description of Artificial Sequence: Synthetic peptide
  Seed: LRMKWMMAMKYPITA
LRMKIMMAMCYPVTA

SEQ ID NO: 227930 - protein, 15 aa, Artificial Sequence
  Description of Artificial Sequence: Synthetic peptide
  Seed: LRMKWMMAMKYPITA
LRMKIMMAMDYPATA

SEQ ID NO: 227931 - protein, 15 aa, Artificial Sequence
  Description of Artificial Sequence: Synthetic peptide
  Seed: LRMKWMMAMKYPITA
LRMKIMMAMDYPETA

SEQ ID NO: 227932 - protein, 15 aa, Artificial Sequence
  Description of Artificial Sequence: Synthetic peptide
  Seed: LRMKWMMAMKYPITA
LRMKIMMAMDYPITA

SEQ ID NO: 227933 - protein, 15 aa, Artificial Sequence
  Description of Artificial Sequence: Synthetic peptide
  Seed: LRMKWMMAMKYPITA
LRMKIMMAMDYPLTA

SEQ ID NO: 227934 - protein, 15 aa, Artificial Sequence
  Description of Artificial Sequence: Synthetic peptide
  Seed: LRMKWMMAMKYPITA
LRMKIMMAMDYPMTA

SEQ ID NO: 227935 - protein, 15 aa, Artificial Sequence
  Description of Artificial Sequence: Synthetic peptide
  Seed: LRMKWMMAMKYPITA
LRMKIMMAMDYPSTA

SEQ ID NO: 227936 - protein, 15 aa, Artificial Sequence
  Description of Artificial Sequence: Synthetic peptide
  Seed: LRMKWMMAMKYPITA
LRMKIMMAMDYPTTA

SEQ ID NO: 227937 - protein, 15 aa, Artificial Sequence
  Description of Artificial Sequence: Synthetic peptide
  Seed: LRMKWMMAMKYPITA
LRMKIMMAMDYPVTA

SEQ ID NO: 227938 - protein, 15 aa, Artificial Sequence
  Description of Artificial Sequence: Synthetic peptide
  Seed: LRMKWMMAMKYPITA
LRMKIMMAMEYPATA

SEQ ID NO: 227939 - protein, 15 aa, Artificial Sequence
  Description of Artificial Sequence: Synthetic peptide
  Seed: LRMKWMMAMKYPITA
LRMKIMMAMEYPITA

SEQ ID NO: 227940 - protein, 15 aa, Artificial Sequence
  Description of Artificial Sequence: Synthetic peptide
  Seed: LRMKWMMAMKYPITA
LRMKIMMAMEYPLTA

SEQ ID NO: 227941 - protein, 15 aa, Artificial Sequence
  Description of Artificial Sequence: Synthetic peptide
  Seed: LRMKWMMAMKYPITA
LRMKIMMAMEYPMTA

SEQ ID NO: 227942 - protein, 15 aa, Artificial Sequence
  Description of Artificial Sequence: Synthetic peptide
  Seed: LRMKWMMAMKYPITA
LRMKIMMAMEYPRTA

SEQ ID NO: 227943 - protein, 15 aa, Artificial Sequence
  Description of Artificial Sequence: Synthetic peptide
  Seed: LRMKWMMAMKYPITA
LRMKIMMAMEYPSTA

SEQ ID NO: 227944 - protein, 15 aa, Artificial Sequence
  Description of Artificial Sequence: Synthetic peptide
  Seed: LRMKWMMAMKYPITA
LRMKIMMAMEYPTTA

SEQ ID NO: 227945 - protein, 15 aa, Artificial Sequence
  Description of Artificial Sequence: Synthetic peptide
  Seed: LRMKWMMAMKYPITA
LRMKIMMAMEYPVTA

SEQ ID NO: 227946 - protein, 15 aa, Artificial Sequence
  Description of Artificial Sequence: Synthetic peptide
  Seed: LRMKWMMAMKYPITA
LRMKIMMAMFYPLTA

SEQ ID NO: 227947 - protein, 15 aa, Artificial Sequence
  Description of Artificial Sequence: Synthetic peptide
  Seed: LRMKWMMAMKYPITA
LRMKIMMAMFYPSTA

SEQ ID NO: 227948 - protein, 15 aa, Artificial Sequence
  Description of Artificial Sequence: Synthetic peptide
  Seed: LRMKWMMAMKYPITA
LRMKIMMAMFYPVTA

SEQ ID NO: 227949 - protein, 15 aa, Artificial Sequence
  Description of Artificial Sequence: Synthetic peptide
  Seed: LRMKWMMAMKYPITA
LRMKIMMAMGYPATA

SEQ ID NO: 227950 - protein, 15 aa, Artificial Sequence
  Description of Artificial Sequence: Synthetic peptide
  Seed: LRMKWMMAMKYPITA
LRMKIMMAMGYPCTA

SEQ ID NO: 227951 - protein, 15 aa, Artificial Sequence
  Description of Artificial Sequence: Synthetic peptide
  Seed: LRMKWMMAMKYPITA
LRMKIMMAMGYPDTA

SEQ ID NO: 227952 - protein, 15 aa, Artificial Sequence
  Description of Artificial Sequence: Synthetic peptide
  Seed: LRMKWMMAMKYPITA
LRMKIMMAMGYPETA

SEQ ID NO: 227953 - protein, 15 aa, Artificial Sequence
  Description of Artificial Sequence: Synthetic peptide
  Seed: LRMKWMMAMKYPITA
LRMKIMMAMGYPFTA

SEQ ID NO: 227954 - protein, 15 aa, Artificial Sequence
  Description of Artificial Sequence: Synthetic peptide
  Seed: LRMKWMMAMKYPITA
LRMKIMMAMGYPGTA

SEQ ID NO: 227955 - protein, 15 aa, Artificial Sequence
  Description of Artificial Sequence: Synthetic peptide
  Seed: LRMKWMMAMKYPITA
LRMKIMMAMGYPHTA

SEQ ID NO: 227956 - protein, 15 aa, Artificial Sequence
  Description of Artificial Sequence: Synthetic peptide
  Seed: LRMKWMMAMKYPITA
LRMKIMMAMGYPITA

SEQ ID NO: 227957 - protein, 15 aa, Artificial Sequence
  Description of Artificial Sequence: Synthetic peptide
  Seed: LRMKWMMAMKYPITA
LRMKIMMAMGYPKTA

SEQ ID NO: 227958 - protein, 15 aa, Artificial Sequence
  Description of Artificial Sequence: Synthetic peptide
  Seed: LRMKWMMAMKYPITA
LRMKIMMAMGYPLTA

SEQ ID NO: 227959 - protein, 15 aa, Artificial Sequence
  Description of Artificial Sequence: Synthetic peptide
  Seed: LRMKWMMAMKYPITA
LRMKIMMAMGYPMTA

SEQ ID NO: 227960 - protein, 15 aa, Artificial Sequence
  Description of Artificial Sequence: Synthetic peptide
  Seed: LRMKWMMAMKYPITA
LRMKIMMAMGYPNTA

SEQ ID NO: 227961 - protein, 15 aa, Artificial Sequence
  Description of Artificial Sequence: Synthetic peptide
  Seed: LRMKWMMAMKYPITA
LRMKIMMAMGYPPTA

SEQ ID NO: 227962 - protein, 15 aa, Artificial Sequence
  Description of Artificial Sequence: Synthetic peptide
  Seed: LRMKWMMAMKYPITA
LRMKIMMAMGYPQTA

SEQ ID NO: 227963 - protein, 15 aa, Artificial Sequence
  Description of Artificial Sequence: Synthetic peptide
  Seed: LRMKWMMAMKYPITA
LRMKIMMAMGYPRTA

SEQ ID NO: 227964 - protein, 15 aa, Artificial Sequence
  Description of Artificial Sequence: Synthetic peptide
  Seed: LRMKWMMAMKYPITA
LRMKIMMAMGYPSTA

SEQ ID NO: 227965 - protein, 15 aa, Artificial Sequence
  Description of Artificial Sequence: Synthetic peptide
  Seed: LRMKWMMAMKYPITA
LRMKIMMAMGYPTTA

SEQ ID NO: 227966 - protein, 15 aa, Artificial Sequence
  Description of Artificial Sequence: Synthetic peptide
  Seed: LRMKWMMAMKYPITA
LRMKIMMAMGYPVTA

SEQ ID NO: 227967 - protein, 15 aa, Artificial Sequence
  Description of Artificial Sequence: Synthetic peptide
  Seed: LRMKWMMAMKYPITA
LRMKIMMAMGYPWTA

SEQ ID NO: 227968 - protein, 15 aa, Artificial Sequence
  Description of Artificial Sequence: Synthetic peptide
  Seed: LRMKWMMAMKYPITA
LRMKIMMAMGYPYTA

SEQ ID NO: 227969 - protein, 15 aa, Artificial Sequence
  Description of Artificial Sequence: Synthetic peptide
  Seed: LRMKWMMAMKYPITA
LRMKIMMAMHYPATA

SEQ ID NO: 227970 - protein, 15 aa, Artificial Sequence
  Description of Artificial Sequence: Synthetic peptide
  Seed: LRMKWMMAMKYPITA
LRMKIMMAMHYPCTA

SEQ ID NO: 227971 - protein, 15 aa, Artificial Sequence
  Description of Artificial Sequence: Synthetic peptide
  Seed: LRMKWMMAMKYPITA
LRMKIMMAMHYPETA

SEQ ID NO: 227972 - protein, 15 aa, Artificial Sequence
  Description of Artificial Sequence: Synthetic peptide
  Seed: LRMKWMMAMKYPITA
LRMKIMMAMHYPFTA

SEQ ID NO: 227973 - protein, 15 aa, Artificial Sequence
  Description of Artificial Sequence: Synthetic peptide
  Seed: LRMKWMMAMKYPITA
LRMKIMMAMHYPGTA

SEQ ID NO: 227974 - protein, 15 aa, Artificial Sequence
  Description of Artificial Sequence: Synthetic peptide
  Seed: LRMKWMMAMKYPITA
LRMKIMMAMHYPHTA

SEQ ID NO: 227975 - protein, 15 aa, Artificial Sequence
  Description of Artificial Sequence: Synthetic peptide
  Seed: LRMKWMMAMKYPITA
LRMKIMMAMHYPITA

SEQ ID NO: 227976 - protein, 15 aa, Artificial Sequence
  Description of Artificial Sequence: Synthetic peptide
  Seed: LRMKWMMAMKYPITA
LRMKIMMAMHYPKTA

SEQ ID NO: 227977 - protein, 15 aa, Artificial Sequence
  Description of Artificial Sequence: Synthetic peptide
  Seed: LRMKWMMAMKYPITA
LRMKIMMAMHYPLTA

SEQ ID NO: 227978 - protein, 15 aa, Artificial Sequence
  Description of Artificial Sequence: Synthetic peptide
  Seed: LRMKWMMAMKYPITA
LRMKIMMAMHYPMTA

SEQ ID NO: 227979 - protein, 15 aa, Artificial Sequence
  Description of Artificial Sequence: Synthetic peptide
  Seed: LRMKWMMAMKYPITA
LRMKIMMAMHYPNTA

SEQ ID NO: 227980 - protein, 15 aa, Artificial Sequence
  Description of Artificial Sequence: Synthetic peptide
  Seed: LRMKWMMAMKYPITA
LRMKIMMAMHYPQTA

SEQ ID NO: 227981 - protein, 15 aa, Artificial Sequence
  Description of Artificial Sequence: Synthetic peptide
  Seed: LRMKWMMAMKYPITA
LRMKIMMAMHYPRTA

SEQ ID NO: 227982 - protein, 15 aa, Artificial Sequence
  Description of Artificial Sequence: Synthetic peptide
  Seed: LRMKWMMAMKYPITA
LRMKIMMAMHYPSTA

SEQ ID NO: 227983 - protein, 15 aa, Artificial Sequence
  Description of Artificial Sequence: Synthetic peptide
  Seed: LRMKWMMAMKYPITA
LRMKIMMAMHYPTTA

SEQ ID NO: 227984 - protein, 15 aa, Artificial Sequence
  Description of Artificial Sequence: Synthetic peptide
  Seed: LRMKWMMAMKYPITA
LRMKIMMAMHYPVTA

SEQ ID NO: 227985 - protein, 15 aa, Artificial Sequence
  Description of Artificial Sequence: Synthetic peptide
  Seed: LRMKWMMAMKYPITA
LRMKIMMAMHYPYTA

SEQ ID NO: 227986 - protein, 15 aa, Artificial Sequence
  Description of Artificial Sequence: Synthetic peptide
  Seed: LRMKWMMAMKYPITA
LRMKIMMAMIYPATA

SEQ ID NO: 227987 - protein, 15 aa, Artificial Sequence
  Description of Artificial Sequence: Synthetic peptide
  Seed: LRMKWMMAMKYPITA
LRMKIMMAMIYPCTA

SEQ ID NO: 227988 - protein, 15 aa, Artificial Sequence
  Description of Artificial Sequence: Synthetic peptide
  Seed: LRMKWMMAMKYPITA
LRMKIMMAMIYPDTA

SEQ ID NO: 227989 - protein, 15 aa, Artificial Sequence
  Description of Artificial Sequence: Synthetic peptide
  Seed: LRMKWMMAMKYPITA
LRMKIMMAMIYPETA

SEQ ID NO: 227990 - protein, 15 aa, Artificial Sequence
  Description of Artificial Sequence: Synthetic peptide
  Seed: LRMKWMMAMKYPITA
LRMKIMMAMIYPFTA

SEQ ID NO: 227991 - protein, 15 aa, Artificial Sequence
  Description of Artificial Sequence: Synthetic peptide
  Seed: LRMKWMMAMKYPITA
LRMKIMMAMIYPGTA

SEQ ID NO: 227992 - protein, 15 aa, Artificial Sequence
  Description of Artificial Sequence: Synthetic peptide
  Seed: LRMKWMMAMKYPITA
LRMKIMMAMIYPHTA

SEQ ID NO: 227993 - protein, 15 aa, Artificial Sequence
  Description of Artificial Sequence: Synthetic peptide
  Seed: LRMKWMMAMKYPITA
LRMKIMMAMIYPITA

SEQ ID NO: 227994 - protein, 15 aa, Artificial Sequence
  Description of Artificial Sequence: Synthetic peptide
  Seed: LRMKWMMAMKYPITA
LRMKIMMAMIYPKTA

SEQ ID NO: 227995 - protein, 15 aa, Artificial Sequence
  Description of Artificial Sequence: Synthetic peptide
  Seed: LRMKWMMAMKYPITA
LRMKIMMAMIYPLTA

SEQ ID NO: 227996 - protein, 15 aa, Artificial Sequence
  Description of Artificial Sequence: Synthetic peptide
  Seed: LRMKWMMAMKYPITA
LRMKIMMAMIYPMTA

SEQ ID NO: 227997 - protein, 15 aa, Artificial Sequence
  Description of Artificial Sequence: Synthetic peptide
  Seed: LRMKWMMAMKYPITA
LRMKIMMAMIYPNTA

SEQ ID NO: 227998 - protein, 15 aa, Artificial Sequence
  Description of Artificial Sequence: Synthetic peptide
  Seed: LRMKWMMAMKYPITA
LRMKIMMAMIYPQTA

SEQ ID NO: 227999 - protein, 15 aa, Artificial Sequence
  Description of Artificial Sequence: Synthetic peptide
  Seed: LRMKWMMAMKYPITA
LRMKIMMAMIYPRTA

SEQ ID NO: 228000 - protein, 15 aa, Artificial Sequence
  Description of Artificial Sequence: Synthetic peptide
  Seed: LRMKWMMAMKYPITA
LRMKIMMAMIYPSTA

SEQ ID NO: 228001 - protein, 15 aa, Artificial Sequence
  Description of Artificial Sequence: Synthetic peptide
  Seed: LRMKWMMAMKYPITA
LRMKIMMAMIYPTTA

SEQ ID NO: 228002 - protein, 15 aa, Artificial Sequence
  Description of Artificial Sequence: Synthetic peptide
  Seed: LRMKWMMAMKYPITA
LRMKIMMAMIYPVTA

SEQ ID NO: 228003 - protein, 15 aa, Artificial Sequence
  Description of Artificial Sequence: Synthetic peptide
  Seed: LRMKWMMAMKYPITA
LRMKIMMAMIYPYTA

SEQ ID NO: 228004 - protein, 15 aa, Artificial Sequence
  Description of Artificial Sequence: Synthetic peptide
  Seed: LRMKWMMAMKYPITA
LRMKIMMAMKYPATA

SEQ ID NO: 228005 - protein, 15 aa, Artificial Sequence
  Description of Artificial Sequence: Synthetic peptide
  Seed: LRMKWMMAMKYPITA
LRMKIMMAMKYPCTA

SEQ ID NO: 228006 - protein, 15 aa, Artificial Sequence
  Description of Artificial Sequence: Synthetic peptide
  Seed: LRMKWMMAMKYPITA
LRMKIMMAMKYPDTA

SEQ ID NO: 228007 - protein, 15 aa, Artificial Sequence
  Description of Artificial Sequence: Synthetic peptide
  Seed: LRMKWMMAMKYPITA
LRMKIMMAMKYPETA

SEQ ID NO: 228008 - protein, 15 aa, Artificial Sequence
  Description of Artificial Sequence: Synthetic peptide
  Seed: LRMKWMMAMKYPITA
LRMKIMMAMKYPFTA

SEQ ID NO: 228009 - protein, 15 aa, Artificial Sequence
  Description of Artificial Sequence: Synthetic peptide
  Seed: LRMKWMMAMKYPITA
LRMKIMMAMKYPGTA

SEQ ID NO: 228010 - protein, 15 aa, Artificial Sequence
  Description of Artificial Sequence: Synthetic peptide
  Seed: LRMKWMMAMKYPITA
LRMKIMMAMKYPHTA

SEQ ID NO: 228011 - protein, 15 aa, Artificial Sequence
  Description of Artificial Sequence: Synthetic peptide
  Seed: LRMKWMMAMKYPITA
LRMKIMMAMKYPITA

SEQ ID NO: 228012 - protein, 15 aa, Artificial Sequence
  Description of Artificial Sequence: Synthetic peptide
  Seed: LRMKWMMAMKYPITA
LRMKIMMAMKYPKTA

SEQ ID NO: 228013 - protein, 15 aa, Artificial Sequence
  Description of Artificial Sequence: Synthetic peptide
  Seed: LRMKWMMAMKYPITA
LRMKIMMAMKYPLTA

SEQ ID NO: 228014 - protein, 15 aa, Artificial Sequence
  Description of Artificial Sequence: Synthetic peptide
  Seed: LRMKWMMAMKYPITA
LRMKIMMAMKYPMTA

SEQ ID NO: 228015 - protein, 15 aa, Artificial Sequence
  Description of Artificial Sequence: Synthetic peptide
  Seed: LRMKWMMAMKYPITA
LRMKIMMAMKYPNTA

SEQ ID NO: 228016 - protein, 15 aa, Artificial Sequence
  Description of Artificial Sequence: Synthetic peptide
  Seed: LRMKWMMAMKYPITA
LRMKIMMAMKYPPTA

SEQ ID NO: 228017 - protein, 15 aa, Artificial Sequence
  Description of Artificial Sequence: Synthetic peptide
  Seed: LRMKWMMAMKYPITA
LRMKIMMAMKYPQTA

SEQ ID NO: 228018 - protein, 15 aa, Artificial Sequence
  Description of Artificial Sequence: Synthetic peptide
  Seed: LRMKWMMAMKYPITA
LRMKIMMAMKYPRTA

SEQ ID NO: 228019 - protein, 15 aa, Artificial Sequence
  Description of Artificial Sequence: Synthetic peptide
  Seed: LRMKWMMAMKYPITA
LRMKIMMAMKYPSTA

SEQ ID NO: 228020 - protein, 15 aa, Artificial Sequence
  Description of Artificial Sequence: Synthetic peptide
  Seed: LRMKWMMAMKYPITA
LRMKIMMAMKYPTTA

SEQ ID NO: 228021 - protein, 15 aa, Artificial Sequence
  Description of Artificial Sequence: Synthetic peptide
  Seed: LRMKWMMAMKYPITA
LRMKIMMAMKYPVTA

SEQ ID NO: 228022 - protein, 15 aa, Artificial Sequence
  Description of Artificial Sequence: Synthetic peptide
  Seed: LRMKWMMAMKYPITA
LRMKIMMAMKYPWTA

SEQ ID NO: 228023 - protein, 15 aa, Artificial Sequence
  Description of Artificial Sequence: Synthetic peptide
  Seed: LRMKWMMAMKYPITA
LRMKIMMAMKYPYTA

SEQ ID NO: 228024 - protein, 15 aa, Artificial Sequence
  Description of Artificial Sequence: Synthetic peptide
  Seed: LRMKWMMAMKYPITA
LRMKIMMAMLYPCTA

SEQ ID NO: 228025 - protein, 15 aa, Artificial Sequence
  Description of Artificial Sequence: Synthetic peptide
  Seed: LRMKWMMAMKYPITA
LRMKIMMAMLYPGTA

SEQ ID NO: 228026 - protein, 15 aa, Artificial Sequence
  Description of Artificial Sequence: Synthetic peptide
  Seed: LRMKWMMAMKYPITA
LRMKIMMAMLYPKTA

SEQ ID NO: 228027 - protein, 15 aa, Artificial Sequence
  Description of Artificial Sequence: Synthetic peptide
  Seed: LRMKWMMAMKYPITA
LRMKIMMAMLYPMTA

SEQ ID NO: 228028 - protein, 15 aa, Artificial Sequence
  Description of Artificial Sequence: Synthetic peptide
  Seed: LRMKWMMAMKYPITA
LRMKIMMAMLYPRTA

SEQ ID NO: 228029 - protein, 15 aa, Artificial Sequence
  Description of Artificial Sequence: Synthetic peptide
  Seed: LRMKWMMAMKYPITA
LRMKIMMAMLYPSTA

SEQ ID NO: 228030 - protein, 15 aa, Artificial Sequence
  Description of Artificial Sequence: Synthetic peptide
  Seed: LRMKWMMAMKYPITA
LRMKIMMAMMYPATA

SEQ ID NO: 228031 - protein, 15 aa, Artificial Sequence
  Description of Artificial Sequence: Synthetic peptide
  Seed: LRMKWMMAMKYPITA
LRMKIMMAMMYPCTA

SEQ ID NO: 228032 - protein, 15 aa, Artificial Sequence
  Description of Artificial Sequence: Synthetic peptide
  Seed: LRMKWMMAMKYPITA
LRMKIMMAMMYPGTA

SEQ ID NO: 228033 - protein, 15 aa, Artificial Sequence
  Description of Artificial Sequence: Synthetic peptide
  Seed: LRMKWMMAMKYPITA
LRMKIMMAMMYPKTA

SEQ ID NO: 228034 - protein, 15 aa, Artificial Sequence
  Description of Artificial Sequence: Synthetic peptide
  Seed: LRMKWMMAMKYPITA
LRMKIMMAMMYPMTA

SEQ ID NO: 228035 - protein, 15 aa, Artificial Sequence
  Description of Artificial Sequence: Synthetic peptide
  Seed: LRMKWMMAMKYPITA
LRMKIMMAMMYPRTA

SEQ ID NO: 228036 - protein, 15 aa, Artificial Sequence
  Description of Artificial Sequence: Synthetic peptide
  Seed: LRMKWMMAMKYPITA
LRMKIMMAMMYPVTA

SEQ ID NO: 228037 - protein, 15 aa, Artificial Sequence
  Description of Artificial Sequence: Synthetic peptide
  Seed: LRMKWMMAMKYPITA
LRMKIMMAMMYPYTA

SEQ ID NO: 228038 - protein, 15 aa, Artificial Sequence
  Description of Artificial Sequence: Synthetic peptide
  Seed: LRMKWMMAMKYPITA
LRMKIMMAMNYPATA

SEQ ID NO: 228039 - protein, 15 aa, Artificial Sequence
  Description of Artificial Sequence: Synthetic peptide
  Seed: LRMKWMMAMKYPITA
LRMKIMMAMNYPCTA

SEQ ID NO: 228040 - protein, 15 aa, Artificial Sequence
  Description of Artificial Sequence: Synthetic peptide
  Seed: LRMKWMMAMKYPITA
LRMKIMMAMNYPDTA

SEQ ID NO: 228041 - protein, 15 aa, Artificial Sequence
  Description of Artificial Sequence: Synthetic peptide
  Seed: LRMKWMMAMKYPITA
LRMKIMMAMNYPETA

SEQ ID NO: 228042 - protein, 15 aa, Artificial Sequence
  Description of Artificial Sequence: Synthetic peptide
  Seed: LRMKWMMAMKYPITA
LRMKIMMAMNYPFTA

SEQ ID NO: 228043 - protein, 15 aa, Artificial Sequence
  Description of Artificial Sequence: Synthetic peptide
  Seed: LRMKWMMAMKYPITA
LRMKIMMAMNYPGTA

SEQ ID NO: 228044 - protein, 15 aa, Artificial Sequence
  Description of Artificial Sequence: Synthetic peptide
  Seed: LRMKWMMAMKYPITA
LRMKIMMAMNYPHTA

SEQ ID NO: 228045 - protein, 15 aa, Artificial Sequence
  Description of Artificial Sequence: Synthetic peptide
  Seed: LRMKWMMAMKYPITA
LRMKIMMAMNYPITA

SEQ ID NO: 228046 - protein, 15 aa, Artificial Sequence
  Description of Artificial Sequence: Synthetic peptide
  Seed: LRMKWMMAMKYPITA
LRMKIMMAMNYPKTA

SEQ ID NO: 228047 - protein, 15 aa, Artificial Sequence
  Description of Artificial Sequence: Synthetic peptide
  Seed: LRMKWMMAMKYPITA
LRMKIMMAMNYPLTA

SEQ ID NO: 228048 - protein, 15 aa, Artificial Sequence
  Description of Artificial Sequence: Synthetic peptide
  Seed: LRMKWMMAMKYPITA
LRMKIMMAMNYPMTA

SEQ ID NO: 228049 - protein, 15 aa, Artificial Sequence
  Description of Artificial Sequence: Synthetic peptide
  Seed: LRMKWMMAMKYPITA
LRMKIMMAMNYPNTA

SEQ ID NO: 228050 - protein, 15 aa, Artificial Sequence
  Description of Artificial Sequence: Synthetic peptide
  Seed: LRMKWMMAMKYPITA
LRMKIMMAMNYPPTA

SEQ ID NO: 228051 - protein, 15 aa, Artificial Sequence
  Description of Artificial Sequence: Synthetic peptide
  Seed: LRMKWMMAMKYPITA
LRMKIMMAMNYPQTA

SEQ ID NO: 228052 - protein, 15 aa, Artificial Sequence
  Description of Artificial Sequence: Synthetic peptide
  Seed: LRMKWMMAMKYPITA
LRMKIMMAMNYPRTA

SEQ ID NO: 228053 - protein, 15 aa, Artificial Sequence
  Description of Artificial Sequence: Synthetic peptide
  Seed: LRMKWMMAMKYPITA
LRMKIMMAMNYPSTA

SEQ ID NO: 228054 - protein, 15 aa, Artificial Sequence
  Description of Artificial Sequence: Synthetic peptide
  Seed: LRMKWMMAMKYPITA
LRMKIMMAMNYPTTA

SEQ ID NO: 228055 - protein, 15 aa, Artificial Sequence
  Description of Artificial Sequence: Synthetic peptide
  Seed: LRMKWMMAMKYPITA
LRMKIMMAMNYPVTA

SEQ ID NO: 228056 - protein, 15 aa, Artificial Sequence
  Description of Artificial Sequence: Synthetic peptide
  Seed: LRMKWMMAMKYPITA
LRMKIMMAMNYPWTA

SEQ ID NO: 228057 - protein, 15 aa, Artificial Sequence
  Description of Artificial Sequence: Synthetic peptide
  Seed: LRMKWMMAMKYPITA
LRMKIMMAMNYPYTA

SEQ ID NO: 228058 - protein, 15 aa, Artificial Sequence
  Description of Artificial Sequence: Synthetic peptide
  Seed: LRMKWMMAMKYPITA
LRMKIMMAMPYPATA

SEQ ID NO: 228059 - protein, 15 aa, Artificial Sequence
  Description of Artificial Sequence: Synthetic peptide
  Seed: LRMKWMMAMKYPITA
LRMKIMMAMPYPCTA

SEQ ID NO: 228060 - protein, 15 aa, Artificial Sequence
  Description of Artificial Sequence: Synthetic peptide
  Seed: LRMKWMMAMKYPITA
LRMKIMMAMPYPDTA

SEQ ID NO: 228061 - protein, 15 aa, Artificial Sequence
  Description of Artificial Sequence: Synthetic peptide
  Seed: LRMKWMMAMKYPITA
LRMKIMMAMPYPETA

SEQ ID NO: 228062 - protein, 15 aa, Artificial Sequence
  Description of Artificial Sequence: Synthetic peptide
  Seed: LRMKWMMAMKYPITA
LRMKIMMAMPYPFTA

SEQ ID NO: 228063 - protein, 15 aa, Artificial Sequence
  Description of Artificial Sequence: Synthetic peptide
  Seed: LRMKWMMAMKYPITA
LRMKIMMAMPYPGTA

SEQ ID NO: 228064 - protein, 15 aa, Artificial Sequence
  Description of Artificial Sequence: Synthetic peptide
  Seed: LRMKWMMAMKYPITA
LRMKIMMAMPYPHTA

SEQ ID NO: 228065 - protein, 15 aa, Artificial Sequence
  Description of Artificial Sequence: Synthetic peptide
  Seed: LRMKWMMAMKYPITA
LRMKIMMAMPYPITA

SEQ ID NO: 228066 - protein, 15 aa, Artificial Sequence
  Description of Artificial Sequence: Synthetic peptide
  Seed: LRMKWMMAMKYPITA
LRMKIMMAMPYPKTA

SEQ ID NO: 228067 - protein, 15 aa, Artificial Sequence
  Description of Artificial Sequence: Synthetic peptide
  Seed: LRMKWMMAMKYPITA
LRMKIMMAMPYPLTA

SEQ ID NO: 228068 - protein, 15 aa, Artificial Sequence
  Description of Artificial Sequence: Synthetic peptide
  Seed: LRMKWMMAMKYPITA
LRMKIMMAMPYPMTA

SEQ ID NO: 228069 - protein, 15 aa, Artificial Sequence
  Description of Artificial Sequence: Synthetic peptide
  Seed: LRMKWMMAMKYPITA
LRMKIMMAMPYPNTA

SEQ ID NO: 228070 - protein, 15 aa, Artificial Sequence
  Description of Artificial Sequence: Synthetic peptide
  Seed: LRMKWMMAMKYPITA
LRMKIMMAMPYPPTA

SEQ ID NO: 228071 - protein, 15 aa, Artificial Sequence
  Description of Artificial Sequence: Synthetic peptide
  Seed: LRMKWMMAMKYPITA
LRMKIMMAMPYPQTA

SEQ ID NO: 228072 - protein, 15 aa, Artificial Sequence
  Description of Artificial Sequence: Synthetic peptide
  Seed: LRMKWMMAMKYPITA
LRMKIMMAMPYPRTA

SEQ ID NO: 228073 - protein, 15 aa, Artificial Sequence
  Description of Artificial Sequence: Synthetic peptide
  Seed: LRMKWMMAMKYPITA
LRMKIMMAMPYPSTA

SEQ ID NO: 228074 - protein, 15 aa, Artificial Sequence
  Description of Artificial Sequence: Synthetic peptide
  Seed: LRMKWMMAMKYPITA
LRMKIMMAMPYPTTA

SEQ ID NO: 228075 - protein, 15 aa, Artificial Sequence
  Description of Artificial Sequence: Synthetic peptide
  Seed: LRMKWMMAMKYPITA
LRMKIMMAMPYPVTA

SEQ ID NO: 228076 - protein, 15 aa, Artificial Sequence
  Description of Artificial Sequence: Synthetic peptide
  Seed: LRMKWMMAMKYPITA
LRMKIMMAMPYPWTA

SEQ ID NO: 228077 - protein, 15 aa, Artificial Sequence
  Description of Artificial Sequence: Synthetic peptide
  Seed: LRMKWMMAMKYPITA
LRMKIMMAMPYPYTA

SEQ ID NO: 228078 - protein, 15 aa, Artificial Sequence
  Description of Artificial Sequence: Synthetic peptide
  Seed: LRMKWMMAMKYPITA
LRMKIMMAMQYPATA

SEQ ID NO: 228079 - protein, 15 aa, Artificial Sequence
  Description of Artificial Sequence: Synthetic peptide
  Seed: LRMKWMMAMKYPITA
LRMKIMMAMQYPCTA

SEQ ID NO: 228080 - protein, 15 aa, Artificial Sequence
  Description of Artificial Sequence: Synthetic peptide
  Seed: LRMKWMMAMKYPITA
LRMKIMMAMQYPFTA

SEQ ID NO: 228081 - protein, 15 aa, Artificial Sequence
  Description of Artificial Sequence: Synthetic peptide
  Seed: LRMKWMMAMKYPITA
LRMKIMMAMQYPITA

SEQ ID NO: 228082 - protein, 15 aa, Artificial Sequence
  Description of Artificial Sequence: Synthetic peptide
  Seed: LRMKWMMAMKYPITA
LRMKIMMAMQYPKTA

SEQ ID NO: 228083 - protein, 15 aa, Artificial Sequence
  Description of Artificial Sequence: Synthetic peptide
  Seed: LRMKWMMAMKYPITA
LRMKIMMAMQYPLTA

SEQ ID NO: 228084 - protein, 15 aa, Artificial Sequence
  Description of Artificial Sequence: Synthetic peptide
  Seed: LRMKWMMAMKYPITA
LRMKIMMAMQYPMTA

SEQ ID NO: 228085 - protein, 15 aa, Artificial Sequence
  Description of Artificial Sequence: Synthetic peptide
  Seed: LRMKWMMAMKYPITA
LRMKIMMAMQYPRTA

SEQ ID NO: 228086 - protein, 15 aa, Artificial Sequence
  Description of Artificial Sequence: Synthetic peptide
  Seed: LRMKWMMAMKYPITA
LRMKIMMAMQYPSTA

SEQ ID NO: 228087 - protein, 15 aa, Artificial Sequence
  Description of Artificial Sequence: Synthetic peptide
  Seed: LRMKWMMAMKYPITA
LRMKIMMAMQYPTTA

SEQ ID NO: 228088 - protein, 15 aa, Artificial Sequence
  Description of Artificial Sequence: Synthetic peptide
  Seed: LRMKWMMAMKYPITA
LRMKIMMAMQYPVTA

SEQ ID NO: 228089 - protein, 15 aa, Artificial Sequence
  Description of Artificial Sequence: Synthetic peptide
  Seed: LRMKWMMAMKYPITA
LRMKIMMAMQYPYTA

SEQ ID NO: 228090 - protein, 15 aa, Artificial Sequence
  Description of Artificial Sequence: Synthetic peptide
  Seed: LRMKWMMAMKYPITA
LRMKIMMAMRYPATA

SEQ ID NO: 228091 - protein, 15 aa, Artificial Sequence
  Description of Artificial Sequence: Synthetic peptide
  Seed: LRMKWMMAMKYPITA
LRMKIMMAMRYPCTA

SEQ ID NO: 228092 - protein, 15 aa, Artificial Sequence
  Description of Artificial Sequence: Synthetic peptide
  Seed: LRMKWMMAMKYPITA
LRMKIMMAMRYPDTA

SEQ ID NO: 228093 - protein, 15 aa, Artificial Sequence
  Description of Artificial Sequence: Synthetic peptide
  Seed: LRMKWMMAMKYPITA
LRMKIMMAMRYPETA

SEQ ID NO: 228094 - protein, 15 aa, Artificial Sequence
  Description of Artificial Sequence: Synthetic peptide
  Seed: LRMKWMMAMKYPITA
LRMKIMMAMRYPFTA

SEQ ID NO: 228095 - protein, 15 aa, Artificial Sequence
  Description of Artificial Sequence: Synthetic peptide
  Seed: LRMKWMMAMKYPITA
LRMKIMMAMRYPGTA

SEQ ID NO: 228096 - protein, 15 aa, Artificial Sequence
  Description of Artificial Sequence: Synthetic peptide
  Seed: LRMKWMMAMKYPITA
LRMKIMMAMRYPHTA

SEQ ID NO: 228097 - protein, 15 aa, Artificial Sequence
  Description of Artificial Sequence: Synthetic peptide
  Seed: LRMKWMMAMKYPITA
LRMKIMMAMRYPITA

SEQ ID NO: 228098 - protein, 15 aa, Artificial Sequence
  Description of Artificial Sequence: Synthetic peptide
  Seed: LRMKWMMAMKYPITA
LRMKIMMAMRYPKTA

SEQ ID NO: 228099 - protein, 15 aa, Artificial Sequence
  Description of Artificial Sequence: Synthetic peptide
  Seed: LRMKWMMAMKYPITA
LRMKIMMAMRYPLTA

SEQ ID NO: 228100 - protein, 15 aa, Artificial Sequence
  Description of Artificial Sequence: Synthetic peptide
  Seed: LRMKWMMAMKYPITA
LRMKIMMAMRYPMTA

SEQ ID NO: 228101 - protein, 15 aa, Artificial Sequence
  Description of Artificial Sequence: Synthetic peptide
  Seed: LRMKWMMAMKYPITA
LRMKIMMAMRYPNTA

SEQ ID NO: 228102 - protein, 15 aa, Artificial Sequence
  Description of Artificial Sequence: Synthetic peptide
  Seed: LRMKWMMAMKYPITA
LRMKIMMAMRYPPTA

SEQ ID NO: 228103 - protein, 15 aa, Artificial Sequence
  Description of Artificial Sequence: Synthetic peptide
  Seed: LRMKWMMAMKYPITA
LRMKIMMAMRYPQTA

SEQ ID NO: 228104 - protein, 15 aa, Artificial Sequence
  Description of Artificial Sequence: Synthetic peptide
  Seed: LRMKWMMAMKYPITA
LRMKIMMAMRYPRTA

SEQ ID NO: 228105 - protein, 15 aa, Artificial Sequence
  Description of Artificial Sequence: Synthetic peptide
  Seed: LRMKWMMAMKYPITA
LRMKIMMAMRYPSTA

SEQ ID NO: 228106 - protein, 15 aa, Artificial Sequence
  Description of Artificial Sequence: Synthetic peptide
  Seed: LRMKWMMAMKYPITA
LRMKIMMAMRYPTTA

SEQ ID NO: 228107 - protein, 15 aa, Artificial Sequence
  Description of Artificial Sequence: Synthetic peptide
  Seed: LRMKWMMAMKYPITA
LRMKIMMAMRYPVTA

SEQ ID NO: 228108 - protein, 15 aa, Artificial Sequence
  Description of Artificial Sequence: Synthetic peptide
  Seed: LRMKWMMAMKYPITA
LRMKIMMAMRYPWTA

SEQ ID NO: 228109 - protein, 15 aa, Artificial Sequence
  Description of Artificial Sequence: Synthetic peptide
  Seed: LRMKWMMAMKYPITA
LRMKIMMAMRYPYTA

SEQ ID NO: 228110 - protein, 15 aa, Artificial Sequence
  Description of Artificial Sequence: Synthetic peptide
  Seed: LRMKWMMAMKYPITA
LRMKIMMAMSYPATA

SEQ ID NO: 228111 - protein, 15 aa, Artificial Sequence
  Description of Artificial Sequence: Synthetic peptide
  Seed: LRMKWMMAMKYPITA
LRMKIMMAMSYPCTA

SEQ ID NO: 228112 - protein, 15 aa, Artificial Sequence
  Description of Artificial Sequence: Synthetic peptide
  Seed: LRMKWMMAMKYPITA
LRMKIMMAMSYPDTA

SEQ ID NO: 228113 - protein, 15 aa, Artificial Sequence
  Description of Artificial Sequence: Synthetic peptide
  Seed: LRMKWMMAMKYPITA
LRMKIMMAMSYPETA

SEQ ID NO: 228114 - protein, 15 aa, Artificial Sequence
  Description of Artificial Sequence: Synthetic peptide
  Seed: LRMKWMMAMKYPITA
LRMKIMMAMSYPFTA

SEQ ID NO: 228115 - protein, 15 aa, Artificial Sequence
  Description of Artificial Sequence: Synthetic peptide
  Seed: LRMKWMMAMKYPITA
LRMKIMMAMSYPGTA

SEQ ID NO: 228116 - protein, 15 aa, Artificial Sequence
  Description of Artificial Sequence: Synthetic peptide
  Seed: LRMKWMMAMKYPITA
LRMKIMMAMSYPHTA

SEQ ID NO: 228117 - protein, 15 aa, Artificial Sequence
  Description of Artificial Sequence: Synthetic peptide
  Seed: LRMKWMMAMKYPITA
LRMKIMMAMSYPITA

SEQ ID NO: 228118 - protein, 15 aa, Artificial Sequence
  Description of Artificial Sequence: Synthetic peptide
  Seed: LRMKWMMAMKYPITA
LRMKIMMAMSYPKTA

SEQ ID NO: 228119 - protein, 15 aa, Artificial Sequence
  Description of Artificial Sequence: Synthetic peptide
  Seed: LRMKWMMAMKYPITA
LRMKIMMAMSYPLTA

SEQ ID NO: 228120 - protein, 15 aa, Artificial Sequence
  Description of Artificial Sequence: Synthetic peptide
  Seed: LRMKWMMAMKYPITA
LRMKIMMAMSYPMTA

SEQ ID NO: 228121 - protein, 15 aa, Artificial Sequence
  Description of Artificial Sequence: Synthetic peptide
  Seed: LRMKWMMAMKYPITA
LRMKIMMAMSYPNTA

SEQ ID NO: 228122 - protein, 15 aa, Artificial Sequence
  Description of Artificial Sequence: Synthetic peptide
  Seed: LRMKWMMAMKYPITA
LRMKIMMAMSYPPTA

SEQ ID NO: 228123 - protein, 15 aa, Artificial Sequence
  Description of Artificial Sequence: Synthetic peptide
  Seed: LRMKWMMAMKYPITA
LRMKIMMAMSYPQTA

SEQ ID NO: 228124 - protein, 15 aa, Artificial Sequence
  Description of Artificial Sequence: Synthetic peptide
  Seed: LRMKWMMAMKYPITA
LRMKIMMAMSYPRTA

SEQ ID NO: 228125 - protein, 15 aa, Artificial Sequence
  Description of Artificial Sequence: Synthetic peptide
  Seed: LRMKWMMAMKYPITA
LRMKIMMAMSYPSTA

SEQ ID NO: 228126 - protein, 15 aa, Artificial Sequence
  Description of Artificial Sequence: Synthetic peptide
  Seed: LRMKWMMAMKYPITA
LRMKIMMAMSYPTTA

SEQ ID NO: 228127 - protein, 15 aa, Artificial Sequence
  Description of Artificial Sequence: Synthetic peptide
  Seed: LRMKWMMAMKYPITA
LRMKIMMAMSYPVTA

SEQ ID NO: 228128 - protein, 15 aa, Artificial Sequence
  Description of Artificial Sequence: Synthetic peptide
  Seed: LRMKWMMAMKYPITA
LRMKIMMAMSYPWTA

SEQ ID NO: 228129 - protein, 15 aa, Artificial Sequence
  Description of Artificial Sequence: Synthetic peptide
  Seed: LRMKWMMAMKYPITA
LRMKIMMAMSYPYTA

SEQ ID NO: 228130 - protein, 15 aa, Artificial Sequence
  Description of Artificial Sequence: Synthetic peptide
  Seed: LRMKWMMAMKYPITA
LRMKIMMAMTYPATA

SEQ ID NO: 228131 - protein, 15 aa, Artificial Sequence
  Description of Artificial Sequence: Synthetic peptide
  Seed: LRMKWMMAMKYPITA
LRMKIMMAMTYPCTA

SEQ ID NO: 228132 - protein, 15 aa, Artificial Sequence
  Description of Artificial Sequence: Synthetic peptide
  Seed: LRMKWMMAMKYPITA
LRMKIMMAMTYPDTA

SEQ ID NO: 228133 - protein, 15 aa, Artificial Sequence
  Description of Artificial Sequence: Synthetic peptide
  Seed: LRMKWMMAMKYPITA
LRMKIMMAMTYPETA

SEQ ID NO: 228134 - protein, 15 aa, Artificial Sequence
  Description of Artificial Sequence: Synthetic peptide
  Seed: LRMKWMMAMKYPITA
LRMKIMMAMTYPFTA

SEQ ID NO: 228135 - protein, 15 aa, Artificial Sequence
  Description of Artificial Sequence: Synthetic peptide
  Seed: LRMKWMMAMKYPITA
LRMKIMMAMTYPGTA

SEQ ID NO: 228136 - protein, 15 aa, Artificial Sequence
  Description of Artificial Sequence: Synthetic peptide
  Seed: LRMKWMMAMKYPITA
LRMKIMMAMTYPHTA

SEQ ID NO: 228137 - protein, 15 aa, Artificial Sequence
  Description of Artificial Sequence: Synthetic peptide
  Seed: LRMKWMMAMKYPITA
LRMKIMMAMTYPITA

SEQ ID NO: 228138 - protein, 15 aa, Artificial Sequence
  Description of Artificial Sequence: Synthetic peptide
  Seed: LRMKWMMAMKYPITA
LRMKIMMAMTYPKTA

SEQ ID NO: 228139 - protein, 15 aa, Artificial Sequence
  Description of Artificial Sequence: Synthetic peptide
  Seed: LRMKWMMAMKYPITA
LRMKIMMAMTYPLTA

SEQ ID NO: 228140 - protein, 15 aa, Artificial Sequence
  Description of Artificial Sequence: Synthetic peptide
  Seed: LRMKWMMAMKYPITA
LRMKIMMAMTYPMTA

SEQ ID NO: 228141 - protein, 15 aa, Artificial Sequence
  Description of Artificial Sequence: Synthetic peptide
  Seed: LRMKWMMAMKYPITA
LRMKIMMAMTYPNTA

SEQ ID NO: 228142 - protein, 15 aa, Artificial Sequence
  Description of Artificial Sequence: Synthetic peptide
  Seed: LRMKWMMAMKYPITA
LRMKIMMAMTYPPTA

SEQ ID NO: 228143 - protein, 15 aa, Artificial Sequence
  Description of Artificial Sequence: Synthetic peptide
  Seed: LRMKWMMAMKYPITA
LRMKIMMAMTYPQTA

SEQ ID NO: 228144 - protein, 15 aa, Artificial Sequence
  Description of Artificial Sequence: Synthetic peptide
  Seed: LRMKWMMAMKYPITA
LRMKIMMAMTYPRTA

SEQ ID NO: 228145 - protein, 15 aa, Artificial Sequence
  Description of Artificial Sequence: Synthetic peptide
  Seed: LRMKWMMAMKYPITA
LRMKIMMAMTYPSTA

SEQ ID NO: 228146 - protein, 15 aa, Artificial Sequence
  Description of Artificial Sequence: Synthetic peptide
  Seed: LRMKWMMAMKYPITA
LRMKIMMAMTYPTTA

SEQ ID NO: 228147 - protein, 15 aa, Artificial Sequence
  Description of Artificial Sequence: Synthetic peptide
  Seed: LRMKWMMAMKYPITA
LRMKIMMAMTYPVTA

SEQ ID NO: 228148 - protein, 15 aa, Artificial Sequence
  Description of Artificial Sequence: Synthetic peptide
  Seed: LRMKWMMAMKYPITA
LRMKIMMAMTYPYTA

SEQ ID NO: 228149 - protein, 15 aa, Artificial Sequence
  Description of Artificial Sequence: Synthetic peptide
  Seed: LRMKWMMAMKYPITA
LRMKIMMAMVYPATA

SEQ ID NO: 228150 - protein, 15 aa, Artificial Sequence
  Description of Artificial Sequence: Synthetic peptide
  Seed: LRMKWMMAMKYPITA
LRMKIMMAMVYPCTA

SEQ ID NO: 228151 - protein, 15 aa, Artificial Sequence
  Description of Artificial Sequence: Synthetic peptide
  Seed: LRMKWMMAMKYPITA
LRMKIMMAMVYPDTA

SEQ ID NO: 228152 - protein, 15 aa, Artificial Sequence
  Description of Artificial Sequence: Synthetic peptide
  Seed: LRMKWMMAMKYPITA
LRMKIMMAMVYPETA

SEQ ID NO: 228153 - protein, 15 aa, Artificial Sequence
  Description of Artificial Sequence: Synthetic peptide
  Seed: LRMKWMMAMKYPITA
LRMKIMMAMVYPFTA

SEQ ID NO: 228154 - protein, 15 aa, Artificial Sequence
  Description of Artificial Sequence: Synthetic peptide
  Seed: LRMKWMMAMKYPITA
LRMKIMMAMVYPGTA

SEQ ID NO: 228155 - protein, 15 aa, Artificial Sequence
  Description of Artificial Sequence: Synthetic peptide
  Seed: LRMKWMMAMKYPITA
LRMKIMMAMVYPHTA

SEQ ID NO: 228156 - protein, 15 aa, Artificial Sequence
  Description of Artificial Sequence: Synthetic peptide
  Seed: LRMKWMMAMKYPITA
LRMKIMMAMVYPITA

SEQ ID NO: 228157 - protein, 15 aa, Artificial Sequence
  Description of Artificial Sequence: Synthetic peptide
  Seed: LRMKWMMAMKYPITA
LRMKIMMAMVYPKTA

SEQ ID NO: 228158 - protein, 15 aa, Artificial Sequence
  Description of Artificial Sequence: Synthetic peptide
  Seed: LRMKWMMAMKYPITA
LRMKIMMAMVYPLTA

SEQ ID NO: 228159 - protein, 15 aa, Artificial Sequence
  Description of Artificial Sequence: Synthetic peptide
  Seed: LRMKWMMAMKYPITA
LRMKIMMAMVYPMTA

SEQ ID NO: 228160 - protein, 15 aa, Artificial Sequence
  Description of Artificial Sequence: Synthetic peptide
  Seed: LRMKWMMAMKYPITA
LRMKIMMAMVYPNTA

SEQ ID NO: 228161 - protein, 15 aa, Artificial Sequence
  Description of Artificial Sequence: Synthetic peptide
  Seed: LRMKWMMAMKYPITA
LRMKIMMAMVYPPTA

SEQ ID NO: 228162 - protein, 15 aa, Artificial Sequence
  Description of Artificial Sequence: Synthetic peptide
  Seed: LRMKWMMAMKYPITA
LRMKIMMAMVYPQTA

SEQ ID NO: 228163 - protein, 15 aa, Artificial Sequence
  Description of Artificial Sequence: Synthetic peptide
  Seed: LRMKWMMAMKYPITA
LRMKIMMAMVYPRTA

SEQ ID NO: 228164 - protein, 15 aa, Artificial Sequence
  Description of Artificial Sequence: Synthetic peptide
  Seed: LRMKWMMAMKYPITA
LRMKIMMAMVYPSTA

SEQ ID NO: 228165 - protein, 15 aa, Artificial Sequence
  Description of Artificial Sequence: Synthetic peptide
  Seed: LRMKWMMAMKYPITA
LRMKIMMAMVYPTTA

SEQ ID NO: 228166 - protein, 15 aa, Artificial Sequence
  Description of Artificial Sequence: Synthetic peptide
  Seed: LRMKWMMAMKYPITA
LRMKIMMAMVYPVTA

SEQ ID NO: 228167 - protein, 15 aa, Artificial Sequence
  Description of Artificial Sequence: Synthetic peptide
  Seed: LRMKWMMAMKYPITA
LRMKIMMAMVYPYTA

SEQ ID NO: 228168 - protein, 15 aa, Artificial Sequence
  Description of Artificial Sequence: Synthetic peptide
  Seed: LRMKWMMAMKYPITA
LRMKIMMAMWYPATA

SEQ ID NO: 228169 - protein, 15 aa, Artificial Sequence
  Description of Artificial Sequence: Synthetic peptide
  Seed: LRMKWMMAMKYPITA
LRMKIMMAMWYPRTA

SEQ ID NO: 228170 - protein, 15 aa, Artificial Sequence
  Description of Artificial Sequence: Synthetic peptide
  Seed: LRMKWMMAMKYPITA
LRMKIMMAMWYPVTA

SEQ ID NO: 228171 - protein, 15 aa, Artificial Sequence
  Description of Artificial Sequence: Synthetic peptide
  Seed: LRMKWMMAMKYPITA
LRMKIMMAMYYPATA

SEQ ID NO: 228172 - protein, 15 aa, Artificial Sequence
  Description of Artificial Sequence: Synthetic peptide
  Seed: LRMKWMMAMKYPITA
LRMKIMMAMYYPITA

SEQ ID NO: 228173 - protein, 15 aa, Artificial Sequence
  Description of Artificial Sequence: Synthetic peptide
  Seed: LRMKWMMAMKYPITA
LRMKIMMAMYYPLTA

SEQ ID NO: 228174 - protein, 15 aa, Artificial Sequence
  Description of Artificial Sequence: Synthetic peptide
  Seed: LRMKWMMAMKYPITA
LRMKIMMAMYYPMTA

SEQ ID NO: 228175 - protein, 15 aa, Artificial Sequence
  Description of Artificial Sequence: Synthetic peptide
  Seed: LRMKWMMAMKYPITA
LRMKIMMAMYYPVTA

SEQ ID NO: 228176 - protein, 15 aa, Artificial Sequence
  Description of Artificial Sequence: Synthetic peptide
  Seed: LRMKWMMAMKYPITA
LRMKIMMCMAYPATA

SEQ ID NO: 228177 - protein, 15 aa, Artificial Sequence
  Description of Artificial Sequence: Synthetic peptide
  Seed: LRMKWMMAMKYPITA
LRMKIMMCMAYPCTA

SEQ ID NO: 228178 - protein, 15 aa, Artificial Sequence
  Description of Artificial Sequence: Synthetic peptide
  Seed: LRMKWMMAMKYPITA
LRMKIMMCMAYPFTA

SEQ ID NO: 228179 - protein, 15 aa, Artificial Sequence
  Description of Artificial Sequence: Synthetic peptide
  Seed: LRMKWMMAMKYPITA
LRMKIMMCMAYPGTA

SEQ ID NO: 228180 - protein, 15 aa, Artificial Sequence
  Description of Artificial Sequence: Synthetic peptide
  Seed: LRMKWMMAMKYPITA
LRMKIMMCMAYPHTA

SEQ ID NO: 228181 - protein, 15 aa, Artificial Sequence
  Description of Artificial Sequence: Synthetic peptide
  Seed: LRMKWMMAMKYPITA
LRMKIMMCMAYPITA

SEQ ID NO: 228182 - protein, 15 aa, Artificial Sequence
  Description of Artificial Sequence: Synthetic peptide
  Seed: LRMKWMMAMKYPITA
LRMKIMMCMAYPLTA

SEQ ID NO: 228183 - protein, 15 aa, Artificial Sequence
  Description of Artificial Sequence: Synthetic peptide
  Seed: LRMKWMMAMKYPITA
LRMKIMMCMAYPMTA

SEQ ID NO: 228184 - protein, 15 aa, Artificial Sequence
  Description of Artificial Sequence: Synthetic peptide
  Seed: LRMKWMMAMKYPITA
LRMKIMMCMAYPNTA

SEQ ID NO: 228185 - protein, 15 aa, Artificial Sequence
  Description of Artificial Sequence: Synthetic peptide
  Seed: LRMKWMMAMKYPITA
LRMKIMMCMAYPQTA

SEQ ID NO: 228186 - protein, 15 aa, Artificial Sequence
  Description of Artificial Sequence: Synthetic peptide
  Seed: LRMKWMMAMKYPITA
LRMKIMMCMAYPRTA

SEQ ID NO: 228187 - protein, 15 aa, Artificial Sequence
  Description of Artificial Sequence: Synthetic peptide
  Seed: LRMKWMMAMKYPITA
LRMKIMMCMAYPSTA

SEQ ID NO: 228188 - protein, 15 aa, Artificial Sequence
  Description of Artificial Sequence: Synthetic peptide
  Seed: LRMKWMMAMKYPITA
LRMKIMMCMAYPTTA

SEQ ID NO: 228189 - protein, 15 aa, Artificial Sequence
  Description of Artificial Sequence: Synthetic peptide
  Seed: LRMKWMMAMKYPITA
LRMKIMMCMAYPVTA

SEQ ID NO: 228190 - protein, 15 aa, Artificial Sequence
  Description of Artificial Sequence: Synthetic peptide
  Seed: LRMKWMMAMKYPITA
LRMKIMMCMAYPYTA

SEQ ID NO: 228191 - protein, 15 aa, Artificial Sequence
  Description of Artificial Sequence: Synthetic peptide
  Seed: LRMKWMMAMKYPITA
LRMKIMMCMGYPATA

SEQ ID NO: 228192 - protein, 15 aa, Artificial Sequence
  Description of Artificial Sequence: Synthetic peptide
  Seed: LRMKWMMAMKYPITA
LRMKIMMCMGYPGTA

SEQ ID NO: 228193 - protein, 15 aa, Artificial Sequence
  Description of Artificial Sequence: Synthetic peptide
  Seed: LRMKWMMAMKYPITA
LRMKIMMCMGYPITA

SEQ ID NO: 228194 - protein, 15 aa, Artificial Sequence
  Description of Artificial Sequence: Synthetic peptide
  Seed: LRMKWMMAMKYPITA
LRMKIMMCMGYPLTA

SEQ ID NO: 228195 - protein, 15 aa, Artificial Sequence
  Description of Artificial Sequence: Synthetic peptide
  Seed: LRMKWMMAMKYPITA
LRMKIMMCMGYPMTA

SEQ ID NO: 228196 - protein, 15 aa, Artificial Sequence
  Description of Artificial Sequence: Synthetic peptide
  Seed: LRMKWMMAMKYPITA
LRMKIMMCMGYPSTA

SEQ ID NO: 228197 - protein, 15 aa, Artificial Sequence
  Description of Artificial Sequence: Synthetic peptide
  Seed: LRMKWMMAMKYPITA
LRMKIMMCMGYPTTA

SEQ ID NO: 228198 - protein, 15 aa, Artificial Sequence
  Description of Artificial Sequence: Synthetic peptide
  Seed: LRMKWMMAMKYPITA
LRMKIMMCMGYPVTA

SEQ ID NO: 228199 - protein, 15 aa, Artificial Sequence
  Description of Artificial Sequence: Synthetic peptide
  Seed: LRMKWMMAMKYPITA
LRMKIMMCMHYPATA

SEQ ID NO: 228200 - protein, 15 aa, Artificial Sequence
  Description of Artificial Sequence: Synthetic peptide
  Seed: LRMKWMMAMKYPITA
LRMKIMMCMHYPSTA

SEQ ID NO: 228201 - protein, 15 aa, Artificial Sequence
  Description of Artificial Sequence: Synthetic peptide
  Seed: LRMKWMMAMKYPITA
LRMKIMMCMIYPATA

SEQ ID NO: 228202 - protein, 15 aa, Artificial Sequence
  Description of Artificial Sequence: Synthetic peptide
  Seed: LRMKWMMAMKYPITA
LRMKIMMCMKYPATA

SEQ ID NO: 228203 - protein, 15 aa, Artificial Sequence
  Description of Artificial Sequence: Synthetic peptide
  Seed: LRMKWMMAMKYPITA
LRMKIMMCMKYPFTA

SEQ ID NO: 228204 - protein, 15 aa, Artificial Sequence
  Description of Artificial Sequence: Synthetic peptide
  Seed: LRMKWMMAMKYPITA
LRMKIMMCMKYPGTA

SEQ ID NO: 228205 - protein, 15 aa, Artificial Sequence
  Description of Artificial Sequence: Synthetic peptide
  Seed: LRMKWMMAMKYPITA
LRMKIMMCMKYPHTA

SEQ ID NO: 228206 - protein, 15 aa, Artificial Sequence
  Description of Artificial Sequence: Synthetic peptide
  Seed: LRMKWMMAMKYPITA
LRMKIMMCMKYPITA

SEQ ID NO: 228207 - protein, 15 aa, Artificial Sequence
  Description of Artificial Sequence: Synthetic peptide
  Seed: LRMKWMMAMKYPITA
LRMKIMMCMKYPKTA

SEQ ID NO: 228208 - protein, 15 aa, Artificial Sequence
  Description of Artificial Sequence: Synthetic peptide
  Seed: LRMKWMMAMKYPITA
LRMKIMMCMKYPLTA

SEQ ID NO: 228209 - protein, 15 aa, Artificial Sequence
  Description of Artificial Sequence: Synthetic peptide
  Seed: LRMKWMMAMKYPITA
LRMKIMMCMKYPMTA

SEQ ID NO: 228210 - protein, 15 aa, Artificial Sequence
  Description of Artificial Sequence: Synthetic peptide
  Seed: LRMKWMMAMKYPITA
LRMKIMMCMKYPNTA

SEQ ID NO: 228211 - protein, 15 aa, Artificial Sequence
  Description of Artificial Sequence: Synthetic peptide
  Seed: LRMKWMMAMKYPITA
LRMKIMMCMKYPPTA

SEQ ID NO: 228212 - protein, 15 aa, Artificial Sequence
  Description of Artificial Sequence: Synthetic peptide
  Seed: LRMKWMMAMKYPITA
LRMKIMMCMKYPQTA

SEQ ID NO: 228213 - protein, 15 aa, Artificial Sequence
  Description of Artificial Sequence: Synthetic peptide
  Seed: LRMKWMMAMKYPITA
LRMKIMMCMKYPRTA

SEQ ID NO: 228214 - protein, 15 aa, Artificial Sequence
  Description of Artificial Sequence: Synthetic peptide
  Seed: LRMKWMMAMKYPITA
LRMKIMMCMKYPSTA

SEQ ID NO: 228215 - protein, 15 aa, Artificial Sequence
  Description of Artificial Sequence: Synthetic peptide
  Seed: LRMKWMMAMKYPITA
LRMKIMMCMKYPTTA

SEQ ID NO: 228216 - protein, 15 aa, Artificial Sequence
  Description of Artificial Sequence: Synthetic peptide
  Seed: LRMKWMMAMKYPITA
LRMKIMMCMKYPVTA

SEQ ID NO: 228217 - protein, 15 aa, Artificial Sequence
  Description of Artificial Sequence: Synthetic peptide
  Seed: LRMKWMMAMKYPITA
LRMKIMMCMKYPYTA

SEQ ID NO: 228218 - protein, 15 aa, Artificial Sequence
  Description of Artificial Sequence: Synthetic peptide
  Seed: LRMKWMMAMKYPITA
LRMKIMMCMMYPATA

SEQ ID NO: 228219 - protein, 15 aa, Artificial Sequence
  Description of Artificial Sequence: Synthetic peptide
  Seed: LRMKWMMAMKYPITA
LRMKIMMCMMYPVTA

SEQ ID NO: 228220 - protein, 15 aa, Artificial Sequence
  Description of Artificial Sequence: Synthetic peptide
  Seed: LRMKWMMAMKYPITA
LRMKIMMCMNYPATA

SEQ ID NO: 228221 - protein, 15 aa, Artificial Sequence
  Description of Artificial Sequence: Synthetic peptide
  Seed: LRMKWMMAMKYPITA
LRMKIMMCMNYPDTA

SEQ ID NO: 228222 - protein, 15 aa, Artificial Sequence
  Description of Artificial Sequence: Synthetic peptide
  Seed: LRMKWMMAMKYPITA
LRMKIMMCMNYPETA

SEQ ID NO: 228223 - protein, 15 aa, Artificial Sequence
  Description of Artificial Sequence: Synthetic peptide
  Seed: LRMKWMMAMKYPITA
LRMKIMMCMNYPITA

SEQ ID NO: 228224 - protein, 15 aa, Artificial Sequence
  Description of Artificial Sequence: Synthetic peptide
  Seed: LRMKWMMAMKYPITA
LRMKIMMCMNYPLTA

SEQ ID NO: 228225 - protein, 15 aa, Artificial Sequence
  Description of Artificial Sequence: Synthetic peptide
  Seed: LRMKWMMAMKYPITA
LRMKIMMCMNYPVTA

SEQ ID NO: 228226 - protein, 15 aa, Artificial Sequence
  Description of Artificial Sequence: Synthetic peptide
  Seed: LRMKWMMAMKYPITA
LRMKIMMCMNYPYTA

SEQ ID NO: 228227 - protein, 15 aa, Artificial Sequence
  Description of Artificial Sequence: Synthetic peptide
  Seed: LRMKWMMAMKYPITA
LRMKIMMCMPYPATA

SEQ ID NO: 228228 - protein, 15 aa, Artificial Sequence
  Description of Artificial Sequence: Synthetic peptide
  Seed: LRMKWMMAMKYPITA
LRMKIMMCMPYPITA

SEQ ID NO: 228229 - protein, 15 aa, Artificial Sequence
  Description of Artificial Sequence: Synthetic peptide
  Seed: LRMKWMMAMKYPITA
LRMKIMMCMPYPLTA

SEQ ID NO: 228230 - protein, 15 aa, Artificial Sequence
  Description of Artificial Sequence: Synthetic peptide
  Seed: LRMKWMMAMKYPITA
LRMKIMMCMPYPMTA

SEQ ID NO: 228231 - protein, 15 aa, Artificial Sequence
  Description of Artificial Sequence: Synthetic peptide
  Seed: LRMKWMMAMKYPITA
LRMKIMMCMPYPSTA

SEQ ID NO: 228232 - protein, 15 aa, Artificial Sequence
  Description of Artificial Sequence: Synthetic peptide
  Seed: LRMKWMMAMKYPITA
LRMKIMMCMPYPTTA

SEQ ID NO: 228233 - protein, 15 aa, Artificial Sequence
  Description of Artificial Sequence: Synthetic peptide
  Seed: LRMKWMMAMKYPITA
LRMKIMMCMPYPVTA

SEQ ID NO: 228234 - protein, 15 aa, Artificial Sequence
  Description of Artificial Sequence: Synthetic peptide
  Seed: LRMKWMMAMKYPITA
LRMKIMMCMPYPYTA

SEQ ID NO: 228235 - protein, 15 aa, Artificial Sequence
  Description of Artificial Sequence: Synthetic peptide
  Seed: LRMKWMMAMKYPITA
LRMKIMMCMRYPATA

SEQ ID NO: 228236 - protein, 15 aa, Artificial Sequence
  Description of Artificial Sequence: Synthetic peptide
  Seed: LRMKWMMAMKYPITA
LRMKIMMCMRYPETA

SEQ ID NO: 228237 - protein, 15 aa, Artificial Sequence
  Description of Artificial Sequence: Synthetic peptide
  Seed: LRMKWMMAMKYPITA
LRMKIMMCMRYPFTA

SEQ ID NO: 228238 - protein, 15 aa, Artificial Sequence
  Description of Artificial Sequence: Synthetic peptide
  Seed: LRMKWMMAMKYPITA
LRMKIMMCMRYPGTA

SEQ ID NO: 228239 - protein, 15 aa, Artificial Sequence
  Description of Artificial Sequence: Synthetic peptide
  Seed: LRMKWMMAMKYPITA
LRMKIMMCMRYPHTA

SEQ ID NO: 228240 - protein, 15 aa, Artificial Sequence
  Description of Artificial Sequence: Synthetic peptide
  Seed: LRMKWMMAMKYPITA
LRMKIMMCMRYPITA

SEQ ID NO: 228241 - protein, 15 aa, Artificial Sequence
  Description of Artificial Sequence: Synthetic peptide
  Seed: LRMKWMMAMKYPITA
LRMKIMMCMRYPKTA

SEQ ID NO: 228242 - protein, 15 aa, Artificial Sequence
  Description of Artificial Sequence: Synthetic peptide
  Seed: LRMKWMMAMKYPITA
LRMKIMMCMRYPLTA

SEQ ID NO: 228243 - protein, 15 aa, Artificial Sequence
  Description of Artificial Sequence: Synthetic peptide
  Seed: LRMKWMMAMKYPITA
LRMKIMMCMRYPMTA

SEQ ID NO: 228244 - protein, 15 aa, Artificial Sequence
  Description of Artificial Sequence: Synthetic peptide
  Seed: LRMKWMMAMKYPITA
LRMKIMMCMRYPNTA

SEQ ID NO: 228245 - protein, 15 aa, Artificial Sequence
  Description of Artificial Sequence: Synthetic peptide
  Seed: LRMKWMMAMKYPITA
LRMKIMMCMRYPPTA

SEQ ID NO: 228246 - protein, 15 aa, Artificial Sequence
  Description of Artificial Sequence: Synthetic peptide
  Seed: LRMKWMMAMKYPITA
LRMKIMMCMRYPQTA

SEQ ID NO: 228247 - protein, 15 aa, Artificial Sequence
  Description of Artificial Sequence: Synthetic peptide
  Seed: LRMKWMMAMKYPITA
LRMKIMMCMRYPRTA

SEQ ID NO: 228248 - protein, 15 aa, Artificial Sequence
  Description of Artificial Sequence: Synthetic peptide
  Seed: LRMKWMMAMKYPITA
LRMKIMMCMRYPSTA

SEQ ID NO: 228249 - protein, 15 aa, Artificial Sequence
  Description of Artificial Sequence: Synthetic peptide
  Seed: LRMKWMMAMKYPITA
LRMKIMMCMRYPTTA

SEQ ID NO: 228250 - protein, 15 aa, Artificial Sequence
  Description of Artificial Sequence: Synthetic peptide
  Seed: LRMKWMMAMKYPITA
LRMKIMMCMRYPVTA

SEQ ID NO: 228251 - protein, 15 aa, Artificial Sequence
  Description of Artificial Sequence: Synthetic peptide
  Seed: LRMKWMMAMKYPITA
LRMKIMMCMRYPYTA

SEQ ID NO: 228252 - protein, 15 aa, Artificial Sequence
  Description of Artificial Sequence: Synthetic peptide
  Seed: LRMKWMMAMKYPITA
LRMKIMMCMSYPATA

SEQ ID NO: 228253 - protein, 15 aa, Artificial Sequence
  Description of Artificial Sequence: Synthetic peptide
  Seed: LRMKWMMAMKYPITA
LRMKIMMCMSYPDTA

SEQ ID NO: 228254 - protein, 15 aa, Artificial Sequence
  Description of Artificial Sequence: Synthetic peptide
  Seed: LRMKWMMAMKYPITA
LRMKIMMCMSYPETA

SEQ ID NO: 228255 - protein, 15 aa, Artificial Sequence
  Description of Artificial Sequence: Synthetic peptide
  Seed: LRMKWMMAMKYPITA
LRMKIMMCMSYPGTA

SEQ ID NO: 228256 - protein, 15 aa, Artificial Sequence
  Description of Artificial Sequence: Synthetic peptide
  Seed: LRMKWMMAMKYPITA
LRMKIMMCMSYPITA

SEQ ID NO: 228257 - protein, 15 aa, Artificial Sequence
  Description of Artificial Sequence: Synthetic peptide
  Seed: LRMKWMMAMKYPITA
LRMKIMMCMSYPLTA

SEQ ID NO: 228258 - protein, 15 aa, Artificial Sequence
  Description of Artificial Sequence: Synthetic peptide
  Seed: LRMKWMMAMKYPITA
LRMKIMMCMSYPMTA

SEQ ID NO: 228259 - protein, 15 aa, Artificial Sequence
  Description of Artificial Sequence: Synthetic peptide
  Seed: LRMKWMMAMKYPITA
LRMKIMMCMSYPRTA

SEQ ID NO: 228260 - protein, 15 aa, Artificial Sequence
  Description of Artificial Sequence: Synthetic peptide
  Seed: LRMKWMMAMKYPITA
LRMKIMMCMSYPSTA

SEQ ID NO: 228261 - protein, 15 aa, Artificial Sequence
  Description of Artificial Sequence: Synthetic peptide
  Seed: LRMKWMMAMKYPITA
LRMKIMMCMSYPTTA

SEQ ID NO: 228262 - protein, 15 aa, Artificial Sequence
  Description of Artificial Sequence: Synthetic peptide
  Seed: LRMKWMMAMKYPITA
LRMKIMMCMSYPVTA

SEQ ID NO: 228263 - protein, 15 aa, Artificial Sequence
  Description of Artificial Sequence: Synthetic peptide
  Seed: LRMKWMMAMKYPITA
LRMKIMMCMSYPYTA

SEQ ID NO: 228264 - protein, 15 aa, Artificial Sequence
  Description of Artificial Sequence: Synthetic peptide
  Seed: LRMKWMMAMKYPITA
LRMKIMMCMTYPATA

SEQ ID NO: 228265 - protein, 15 aa, Artificial Sequence
  Description of Artificial Sequence: Synthetic peptide
  Seed: LRMKWMMAMKYPITA
LRMKIMMCMTYPDTA

SEQ ID NO: 228266 - protein, 15 aa, Artificial Sequence
  Description of Artificial Sequence: Synthetic peptide
  Seed: LRMKWMMAMKYPITA
LRMKIMMCMTYPETA

SEQ ID NO: 228267 - protein, 15 aa, Artificial Sequence
  Description of Artificial Sequence: Synthetic peptide
  Seed: LRMKWMMAMKYPITA
LRMKIMMCMTYPITA

SEQ ID NO: 228268 - protein, 15 aa, Artificial Sequence
  Description of Artificial Sequence: Synthetic peptide
  Seed: LRMKWMMAMKYPITA
LRMKIMMCMTYPLTA

SEQ ID NO: 228269 - protein, 15 aa, Artificial Sequence
  Description of Artificial Sequence: Synthetic peptide
  Seed: LRMKWMMAMKYPITA
LRMKIMMCMTYPMTA

SEQ ID NO: 228270 - protein, 15 aa, Artificial Sequence
  Description of Artificial Sequence: Synthetic peptide
  Seed: LRMKWMMAMKYPITA
LRMKIMMCMTYPRTA

SEQ ID NO: 228271 - protein, 15 aa, Artificial Sequence
  Description of Artificial Sequence: Synthetic peptide
  Seed: LRMKWMMAMKYPITA
LRMKIMMCMTYPSTA

SEQ ID NO: 228272 - protein, 15 aa, Artificial Sequence
  Description of Artificial Sequence: Synthetic peptide
  Seed: LRMKWMMAMKYPITA
LRMKIMMCMTYPTTA

SEQ ID NO: 228273 - protein, 15 aa, Artificial Sequence
  Description of Artificial Sequence: Synthetic peptide
  Seed: LRMKWMMAMKYPITA
LRMKIMMCMTYPVTA

SEQ ID NO: 228274 - protein, 15 aa, Artificial Sequence
  Description of Artificial Sequence: Synthetic peptide
  Seed: LRMKWMMAMKYPITA
LRMKIMMCMTYPYTA

SEQ ID NO: 228275 - protein, 15 aa, Artificial Sequence
  Description of Artificial Sequence: Synthetic peptide
  Seed: LRMKWMMAMKYPITA
LRMKIMMCMVYPATA

SEQ ID NO: 228276 - protein, 15 aa, Artificial Sequence
  Description of Artificial Sequence: Synthetic peptide
  Seed: LRMKWMMAMKYPITA
LRMKIMMCMVYPITA

SEQ ID NO: 228277 - protein, 15 aa, Artificial Sequence
  Description of Artificial Sequence: Synthetic peptide
  Seed: LRMKWMMAMKYPITA
LRMKIMMCMVYPLTA

SEQ ID NO: 228278 - protein, 15 aa, Artificial Sequence
  Description of Artificial Sequence: Synthetic peptide
  Seed: LRMKWMMAMKYPITA
LRMKIMMCMVYPSTA

SEQ ID NO: 228279 - protein, 15 aa, Artificial Sequence
  Description of Artificial Sequence: Synthetic peptide
  Seed: LRMKWMMAMKYPITA
LRMKIMMCMVYPVTA

SEQ ID NO: 228280 - protein, 15 aa, Artificial Sequence
  Description of Artificial Sequence: Synthetic peptide
  Seed: LRMKWMMAMKYPITA
LRMKIMMDMAYPATA

SEQ ID NO: 228281 - protein, 15 aa, Artificial Sequence
  Description of Artificial Sequence: Synthetic peptide
  Seed: LRMKWMMAMKYPITA
LRMKIMMDMAYPFTA

SEQ ID NO: 228282 - protein, 15 aa, Artificial Sequence
  Description of Artificial Sequence: Synthetic peptide
  Seed: LRMKWMMAMKYPITA
LRMKIMMDMAYPGTA

SEQ ID NO: 228283 - protein, 15 aa, Artificial Sequence
  Description of Artificial Sequence: Synthetic peptide
  Seed: LRMKWMMAMKYPITA
LRMKIMMDMAYPHTA

SEQ ID NO: 228284 - protein, 15 aa, Artificial Sequence
  Description of Artificial Sequence: Synthetic peptide
  Seed: LRMKWMMAMKYPITA
LRMKIMMDMAYPITA

SEQ ID NO: 228285 - protein, 15 aa, Artificial Sequence
  Description of Artificial Sequence: Synthetic peptide
  Seed: LRMKWMMAMKYPITA
LRMKIMMDMAYPKTA

SEQ ID NO: 228286 - protein, 15 aa, Artificial Sequence
  Description of Artificial Sequence: Synthetic peptide
  Seed: LRMKWMMAMKYPITA
LRMKIMMDMAYPLTA

SEQ ID NO: 228287 - protein, 15 aa, Artificial Sequence
  Description of Artificial Sequence: Synthetic peptide
  Seed: LRMKWMMAMKYPITA
LRMKIMMDMAYPMTA

SEQ ID NO: 228288 - protein, 15 aa, Artificial Sequence
  Description of Artificial Sequence: Synthetic peptide
  Seed: LRMKWMMAMKYPITA
LRMKIMMDMAYPNTA

SEQ ID NO: 228289 - protein, 15 aa, Artificial Sequence
  Description of Artificial Sequence: Synthetic peptide
  Seed: LRMKWMMAMKYPITA
LRMKIMMDMAYPQTA

SEQ ID NO: 228290 - protein, 15 aa, Artificial Sequence
  Description of Artificial Sequence: Synthetic peptide
  Seed: LRMKWMMAMKYPITA
LRMKIMMDMAYPRTA

SEQ ID NO: 228291 - protein, 15 aa, Artificial Sequence
  Description of Artificial Sequence: Synthetic peptide
  Seed: LRMKWMMAMKYPITA
LRMKIMMDMAYPSTA

SEQ ID NO: 228292 - protein, 15 aa, Artificial Sequence
  Description of Artificial Sequence: Synthetic peptide
  Seed: LRMKWMMAMKYPITA
LRMKIMMDMAYPTTA

SEQ ID NO: 228293 - protein, 15 aa, Artificial Sequence
  Description of Artificial Sequence: Synthetic peptide
  Seed: LRMKWMMAMKYPITA
LRMKIMMDMAYPVTA

SEQ ID NO: 228294 - protein, 15 aa, Artificial Sequence
  Description of Artificial Sequence: Synthetic peptide
  Seed: LRMKWMMAMKYPITA
LRMKIMMDMAYPYTA

SEQ ID NO: 228295 - protein, 15 aa, Artificial Sequence
  Description of Artificial Sequence: Synthetic peptide
  Seed: LRMKWMMAMKYPITA
LRMKIMMDMDYPATA

SEQ ID NO: 228296 - protein, 15 aa, Artificial Sequence
  Description of Artificial Sequence: Synthetic peptide
  Seed: LRMKWMMAMKYPITA
LRMKIMMDMDYPFTA

SEQ ID NO: 228297 - protein, 15 aa, Artificial Sequence
  Description of Artificial Sequence: Synthetic peptide
  Seed: LRMKWMMAMKYPITA
LRMKIMMDMDYPITA

SEQ ID NO: 228298 - protein, 15 aa, Artificial Sequence
  Description of Artificial Sequence: Synthetic peptide
  Seed: LRMKWMMAMKYPITA
LRMKIMMDMDYPLTA

SEQ ID NO: 228299 - protein, 15 aa, Artificial Sequence
  Description of Artificial Sequence: Synthetic peptide
  Seed: LRMKWMMAMKYPITA
LRMKIMMDMDYPMTA

SEQ ID NO: 228300 - protein, 15 aa, Artificial Sequence
  Description of Artificial Sequence: Synthetic peptide
  Seed: LRMKWMMAMKYPITA
LRMKIMMDMDYPVTA

SEQ ID NO: 228301 - protein, 15 aa, Artificial Sequence
  Description of Artificial Sequence: Synthetic peptide
  Seed: LRMKWMMAMKYPITA
LRMKIMMDMDYPYTA

SEQ ID NO: 228302 - protein, 15 aa, Artificial Sequence
  Description of Artificial Sequence: Synthetic peptide
  Seed: LRMKWMMAMKYPITA
LRMKIMMDMEYPFTA

SEQ ID NO: 228303 - protein, 15 aa, Artificial Sequence
  Description of Artificial Sequence: Synthetic peptide
  Seed: LRMKWMMAMKYPITA
LRMKIMMDMEYPRTA

SEQ ID NO: 228304 - protein, 15 aa, Artificial Sequence
  Description of Artificial Sequence: Synthetic peptide
  Seed: LRMKWMMAMKYPITA
LRMKIMMDMEYPYTA

SEQ ID NO: 228305 - protein, 15 aa, Artificial Sequence
  Description of Artificial Sequence: Synthetic peptide
  Seed: LRMKWMMAMKYPITA
LRMKIMMDMFYPITA

SEQ ID NO: 228306 - protein, 15 aa, Artificial Sequence
  Description of Artificial Sequence: Synthetic peptide
  Seed: LRMKWMMAMKYPITA
LRMKIMMDMFYPLTA

SEQ ID NO: 228307 - protein, 15 aa, Artificial Sequence
  Description of Artificial Sequence: Synthetic peptide
  Seed: LRMKWMMAMKYPITA
LRMKIMMDMFYPVTA

SEQ ID NO: 228308 - protein, 15 aa, Artificial Sequence
  Description of Artificial Sequence: Synthetic peptide
  Seed: LRMKWMMAMKYPITA
LRMKIMMDMGYPATA

SEQ ID NO: 228309 - protein, 15 aa, Artificial Sequence
  Description of Artificial Sequence: Synthetic peptide
  Seed: LRMKWMMAMKYPITA
LRMKIMMDMGYPFTA

SEQ ID NO: 228310 - protein, 15 aa, Artificial Sequence
  Description of Artificial Sequence: Synthetic peptide
  Seed: LRMKWMMAMKYPITA
LRMKIMMDMGYPITA

SEQ ID NO: 228311 - protein, 15 aa, Artificial Sequence
  Description of Artificial Sequence: Synthetic peptide
  Seed: LRMKWMMAMKYPITA
LRMKIMMDMGYPLTA

SEQ ID NO: 228312 - protein, 15 aa, Artificial Sequence
  Description of Artificial Sequence: Synthetic peptide
  Seed: LRMKWMMAMKYPITA
LRMKIMMDMGYPMTA

SEQ ID NO: 228313 - protein, 15 aa, Artificial Sequence
  Description of Artificial Sequence: Synthetic peptide
  Seed: LRMKWMMAMKYPITA
LRMKIMMDMGYPRTA

SEQ ID NO: 228314 - protein, 15 aa, Artificial Sequence
  Description of Artificial Sequence: Synthetic peptide
  Seed: LRMKWMMAMKYPITA
LRMKIMMDMGYPSTA

SEQ ID NO: 228315 - protein, 15 aa, Artificial Sequence
  Description of Artificial Sequence: Synthetic peptide
  Seed: LRMKWMMAMKYPITA
LRMKIMMDMGYPVTA

SEQ ID NO: 228316 - protein, 15 aa, Artificial Sequence
  Description of Artificial Sequence: Synthetic peptide
  Seed: LRMKWMMAMKYPITA
LRMKIMMDMGYPYTA

SEQ ID NO: 228317 - protein, 15 aa, Artificial Sequence
  Description of Artificial Sequence: Synthetic peptide
  Seed: LRMKWMMAMKYPITA
LRMKIMMDMHYPATA

SEQ ID NO: 228318 - protein, 15 aa, Artificial Sequence
  Description of Artificial Sequence: Synthetic peptide
  Seed: LRMKWMMAMKYPITA
LRMKIMMDMHYPFTA

SEQ ID NO: 228319 - protein, 15 aa, Artificial Sequence
  Description of Artificial Sequence: Synthetic peptide
  Seed: LRMKWMMAMKYPITA
LRMKIMMDMHYPHTA

SEQ ID NO: 228320 - protein, 15 aa, Artificial Sequence
  Description of Artificial Sequence: Synthetic peptide
  Seed: LRMKWMMAMKYPITA
LRMKIMMDMHYPITA

SEQ ID NO: 228321 - protein, 15 aa, Artificial Sequence
  Description of Artificial Sequence: Synthetic peptide
  Seed: LRMKWMMAMKYPITA
LRMKIMMDMHYPLTA

SEQ ID NO: 228322 - protein, 15 aa, Artificial Sequence
  Description of Artificial Sequence: Synthetic peptide
  Seed: LRMKWMMAMKYPITA
LRMKIMMDMHYPMTA

SEQ ID NO: 228323 - protein, 15 aa, Artificial Sequence
  Description of Artificial Sequence: Synthetic peptide
  Seed: LRMKWMMAMKYPITA
LRMKIMMDMHYPQTA

SEQ ID NO: 228324 - protein, 15 aa, Artificial Sequence
  Description of Artificial Sequence: Synthetic peptide
  Seed: LRMKWMMAMKYPITA
LRMKIMMDMHYPRTA

SEQ ID NO: 228325 - protein, 15 aa, Artificial Sequence
  Description of Artificial Sequence: Synthetic peptide
  Seed: LRMKWMMAMKYPITA
LRMKIMMDMHYPSTA

SEQ ID NO: 228326 - protein, 15 aa, Artificial Sequence
  Description of Artificial Sequence: Synthetic peptide
  Seed: LRMKWMMAMKYPITA
LRMKIMMDMHYPVTA

SEQ ID NO: 228327 - protein, 15 aa, Artificial Sequence
  Description of Artificial Sequence: Synthetic peptide
  Seed: LRMKWMMAMKYPITA
LRMKIMMDMHYPYTA

SEQ ID NO: 228328 - protein, 15 aa, Artificial Sequence
  Description of Artificial Sequence: Synthetic peptide
  Seed: LRMKWMMAMKYPITA
LRMKIMMDMIYPFTA

SEQ ID NO: 228329 - protein, 15 aa, Artificial Sequence
  Description of Artificial Sequence: Synthetic peptide
  Seed: LRMKWMMAMKYPITA
LRMKIMMDMIYPHTA

SEQ ID NO: 228330 - protein, 15 aa, Artificial Sequence
  Description of Artificial Sequence: Synthetic peptide
  Seed: LRMKWMMAMKYPITA
LRMKIMMDMIYPITA

SEQ ID NO: 228331 - protein, 15 aa, Artificial Sequence
  Description of Artificial Sequence: Synthetic peptide
  Seed: LRMKWMMAMKYPITA
LRMKIMMDMIYPKTA

SEQ ID NO: 228332 - protein, 15 aa, Artificial Sequence
  Description of Artificial Sequence: Synthetic peptide
  Seed: LRMKWMMAMKYPITA
LRMKIMMDMIYPLTA

SEQ ID NO: 228333 - protein, 15 aa, Artificial Sequence
  Description of Artificial Sequence: Synthetic peptide
  Seed: LRMKWMMAMKYPITA
LRMKIMMDMIYPMTA

SEQ ID NO: 228334 - protein, 15 aa, Artificial Sequence
  Description of Artificial Sequence: Synthetic peptide
  Seed: LRMKWMMAMKYPITA
LRMKIMMDMIYPRTA

SEQ ID NO: 228335 - protein, 15 aa, Artificial Sequence
  Description of Artificial Sequence: Synthetic peptide
  Seed: LRMKWMMAMKYPITA
LRMKIMMDMIYPVTA

SEQ ID NO: 228336 - protein, 15 aa, Artificial Sequence
  Description of Artificial Sequence: Synthetic peptide
  Seed: LRMKWMMAMKYPITA
LRMKIMMDMIYPYTA

SEQ ID NO: 228337 - protein, 15 aa, Artificial Sequence
  Description of Artificial Sequence: Synthetic peptide
  Seed: LRMKWMMAMKYPITA
LRMKIMMDMKYPATA

SEQ ID NO: 228338 - protein, 15 aa, Artificial Sequence
  Description of Artificial Sequence: Synthetic peptide
  Seed: LRMKWMMAMKYPITA
LRMKIMMDMKYPETA

SEQ ID NO: 228339 - protein, 15 aa, Artificial Sequence
  Description of Artificial Sequence: Synthetic peptide
  Seed: LRMKWMMAMKYPITA
LRMKIMMDMKYPFTA

SEQ ID NO: 228340 - protein, 15 aa, Artificial Sequence
  Description of Artificial Sequence: Synthetic peptide
  Seed: LRMKWMMAMKYPITA
LRMKIMMDMKYPGTA

SEQ ID NO: 228341 - protein, 15 aa, Artificial Sequence
  Description of Artificial Sequence: Synthetic peptide
  Seed: LRMKWMMAMKYPITA
LRMKIMMDMKYPHTA

SEQ ID NO: 228342 - protein, 15 aa, Artificial Sequence
  Description of Artificial Sequence: Synthetic peptide
  Seed: LRMKWMMAMKYPITA
LRMKIMMDMKYPITA

SEQ ID NO: 228343 - protein, 15 aa, Artificial Sequence
  Description of Artificial Sequence: Synthetic peptide
  Seed: LRMKWMMAMKYPITA
LRMKIMMDMKYPKTA

SEQ ID NO: 228344 - protein, 15 aa, Artificial Sequence
  Description of Artificial Sequence: Synthetic peptide
  Seed: LRMKWMMAMKYPITA
LRMKIMMDMKYPLTA

SEQ ID NO: 228345 - protein, 15 aa, Artificial Sequence
  Description of Artificial Sequence: Synthetic peptide
  Seed: LRMKWMMAMKYPITA
LRMKIMMDMKYPMTA

SEQ ID NO: 228346 - protein, 15 aa, Artificial Sequence
  Description of Artificial Sequence: Synthetic peptide
  Seed: LRMKWMMAMKYPITA
LRMKIMMDMKYPNTA

SEQ ID NO: 228347 - protein, 15 aa, Artificial Sequence
  Description of Artificial Sequence: Synthetic peptide
  Seed: LRMKWMMAMKYPITA
LRMKIMMDMKYPPTA

SEQ ID NO: 228348 - protein, 15 aa, Artificial Sequence
  Description of Artificial Sequence: Synthetic peptide
  Seed: LRMKWMMAMKYPITA
LRMKIMMDMKYPQTA

SEQ ID NO: 228349 - protein, 15 aa, Artificial Sequence
  Description of Artificial Sequence: Synthetic peptide
  Seed: LRMKWMMAMKYPITA
LRMKIMMDMKYPRTA

SEQ ID NO: 228350 - protein, 15 aa, Artificial Sequence
  Description of Artificial Sequence: Synthetic peptide
  Seed: LRMKWMMAMKYPITA
LRMKIMMDMKYPSTA

SEQ ID NO: 228351 - protein, 15 aa, Artificial Sequence
  Description of Artificial Sequence: Synthetic peptide
  Seed: LRMKWMMAMKYPITA
LRMKIMMDMKYPTTA

SEQ ID NO: 228352 - protein, 15 aa, Artificial Sequence
  Description of Artificial Sequence: Synthetic peptide
  Seed: LRMKWMMAMKYPITA
LRMKIMMDMKYPVTA

SEQ ID NO: 228353 - protein, 15 aa, Artificial Sequence
  Description of Artificial Sequence: Synthetic peptide
  Seed: LRMKWMMAMKYPITA
LRMKIMMDMKYPWTA

SEQ ID NO: 228354 - protein, 15 aa, Artificial Sequence
  Description of Artificial Sequence: Synthetic peptide
  Seed: LRMKWMMAMKYPITA
LRMKIMMDMKYPYTA

SEQ ID NO: 228355 - protein, 15 aa, Artificial Sequence
  Description of Artificial Sequence: Synthetic peptide
  Seed: LRMKWMMAMKYPITA
LRMKIMMDMLYPITA

SEQ ID NO: 228356 - protein, 15 aa, Artificial Sequence
  Description of Artificial Sequence: Synthetic peptide
  Seed: LRMKWMMAMKYPITA
LRMKIMMDMLYPRTA

SEQ ID NO: 228357 - protein, 15 aa, Artificial Sequence
  Description of Artificial Sequence: Synthetic peptide
  Seed: LRMKWMMAMKYPITA
LRMKIMMDMLYPVTA

SEQ ID NO: 228358 - protein, 15 aa, Artificial Sequence
  Description of Artificial Sequence: Synthetic peptide
  Seed: LRMKWMMAMKYPITA
LRMKIMMDMLYPYTA

SEQ ID NO: 228359 - protein, 15 aa, Artificial Sequence
  Description of Artificial Sequence: Synthetic peptide
  Seed: LRMKWMMAMKYPITA
LRMKIMMDMMYPITA

SEQ ID NO: 228360 - protein, 15 aa, Artificial Sequence
  Description of Artificial Sequence: Synthetic peptide
  Seed: LRMKWMMAMKYPITA
LRMKIMMDMMYPRTA

SEQ ID NO: 228361 - protein, 15 aa, Artificial Sequence
  Description of Artificial Sequence: Synthetic peptide
  Seed: LRMKWMMAMKYPITA
LRMKIMMDMMYPVTA

SEQ ID NO: 228362 - protein, 15 aa, Artificial Sequence
  Description of Artificial Sequence: Synthetic peptide
  Seed: LRMKWMMAMKYPITA
LRMKIMMDMMYPYTA

SEQ ID NO: 228363 - protein, 15 aa, Artificial Sequence
  Description of Artificial Sequence: Synthetic peptide
  Seed: LRMKWMMAMKYPITA
LRMKIMMDMNYPATA

SEQ ID NO: 228364 - protein, 15 aa, Artificial Sequence
  Description of Artificial Sequence: Synthetic peptide
  Seed: LRMKWMMAMKYPITA
LRMKIMMDMNYPFTA

SEQ ID NO: 228365 - protein, 15 aa, Artificial Sequence
  Description of Artificial Sequence: Synthetic peptide
  Seed: LRMKWMMAMKYPITA
LRMKIMMDMNYPGTA

SEQ ID NO: 228366 - protein, 15 aa, Artificial Sequence
  Description of Artificial Sequence: Synthetic peptide
  Seed: LRMKWMMAMKYPITA
LRMKIMMDMNYPHTA

SEQ ID NO: 228367 - protein, 15 aa, Artificial Sequence
  Description of Artificial Sequence: Synthetic peptide
  Seed: LRMKWMMAMKYPITA
LRMKIMMDMNYPITA

SEQ ID NO: 228368 - protein, 15 aa, Artificial Sequence
  Description of Artificial Sequence: Synthetic peptide
  Seed: LRMKWMMAMKYPITA
LRMKIMMDMNYPKTA

SEQ ID NO: 228369 - protein, 15 aa, Artificial Sequence
  Description of Artificial Sequence: Synthetic peptide
  Seed: LRMKWMMAMKYPITA
LRMKIMMDMNYPLTA

SEQ ID NO: 228370 - protein, 15 aa, Artificial Sequence
  Description of Artificial Sequence: Synthetic peptide
  Seed: LRMKWMMAMKYPITA
LRMKIMMDMNYPMTA

SEQ ID NO: 228371 - protein, 15 aa, Artificial Sequence
  Description of Artificial Sequence: Synthetic peptide
  Seed: LRMKWMMAMKYPITA
LRMKIMMDMNYPQTA

SEQ ID NO: 228372 - protein, 15 aa, Artificial Sequence
  Description of Artificial Sequence: Synthetic peptide
  Seed: LRMKWMMAMKYPITA
LRMKIMMDMNYPRTA

SEQ ID NO: 228373 - protein, 15 aa, Artificial Sequence
  Description of Artificial Sequence: Synthetic peptide
  Seed: LRMKWMMAMKYPITA
LRMKIMMDMNYPSTA

SEQ ID NO: 228374 - protein, 15 aa, Artificial Sequence
  Description of Artificial Sequence: Synthetic peptide
  Seed: LRMKWMMAMKYPITA
LRMKIMMDMNYPTTA

SEQ ID NO: 228375 - protein, 15 aa, Artificial Sequence
  Description of Artificial Sequence: Synthetic peptide
  Seed: LRMKWMMAMKYPITA
LRMKIMMDMNYPVTA

SEQ ID NO: 228376 - protein, 15 aa, Artificial Sequence
  Description of Artificial Sequence: Synthetic peptide
  Seed: LRMKWMMAMKYPITA
LRMKIMMDMNYPYTA

SEQ ID NO: 228377 - protein, 15 aa, Artificial Sequence
  Description of Artificial Sequence: Synthetic peptide
  Seed: LRMKWMMAMKYPITA
LRMKIMMDMPYPATA

SEQ ID NO: 228378 - protein, 15 aa, Artificial Sequence
  Description of Artificial Sequence: Synthetic peptide
  Seed: LRMKWMMAMKYPITA
LRMKIMMDMPYPFTA

SEQ ID NO: 228379 - protein, 15 aa, Artificial Sequence
  Description of Artificial Sequence: Synthetic peptide
  Seed: LRMKWMMAMKYPITA
LRMKIMMDMPYPHTA

SEQ ID NO: 228380 - protein, 15 aa, Artificial Sequence
  Description of Artificial Sequence: Synthetic peptide
  Seed: LRMKWMMAMKYPITA
LRMKIMMDMPYPITA

SEQ ID NO: 228381 - protein, 15 aa, Artificial Sequence
  Description of Artificial Sequence: Synthetic peptide
  Seed: LRMKWMMAMKYPITA
LRMKIMMDMPYPKTA

SEQ ID NO: 228382 - protein, 15 aa, Artificial Sequence
  Description of Artificial Sequence: Synthetic peptide
  Seed: LRMKWMMAMKYPITA
LRMKIMMDMPYPLTA

SEQ ID NO: 228383 - protein, 15 aa, Artificial Sequence
  Description of Artificial Sequence: Synthetic peptide
  Seed: LRMKWMMAMKYPITA
LRMKIMMDMPYPMTA

SEQ ID NO: 228384 - protein, 15 aa, Artificial Sequence
  Description of Artificial Sequence: Synthetic peptide
  Seed: LRMKWMMAMKYPITA
LRMKIMMDMPYPQTA

SEQ ID NO: 228385 - protein, 15 aa, Artificial Sequence
  Description of Artificial Sequence: Synthetic peptide
  Seed: LRMKWMMAMKYPITA
LRMKIMMDMPYPRTA

SEQ ID NO: 228386 - protein, 15 aa, Artificial Sequence
  Description of Artificial Sequence: Synthetic peptide
  Seed: LRMKWMMAMKYPITA
LRMKIMMDMPYPSTA

SEQ ID NO: 228387 - protein, 15 aa, Artificial Sequence
  Description of Artificial Sequence: Synthetic peptide
  Seed: LRMKWMMAMKYPITA
LRMKIMMDMPYPVTA

SEQ ID NO: 228388 - protein, 15 aa, Artificial Sequence
  Description of Artificial Sequence: Synthetic peptide
  Seed: LRMKWMMAMKYPITA
LRMKIMMDMPYPYTA

SEQ ID NO: 228389 - protein, 15 aa, Artificial Sequence
  Description of Artificial Sequence: Synthetic peptide
  Seed: LRMKWMMAMKYPITA
LRMKIMMDMQYPFTA

SEQ ID NO: 228390 - protein, 15 aa, Artificial Sequence
  Description of Artificial Sequence: Synthetic peptide
  Seed: LRMKWMMAMKYPITA
LRMKIMMDMQYPITA

SEQ ID NO: 228391 - protein, 15 aa, Artificial Sequence
  Description of Artificial Sequence: Synthetic peptide
  Seed: LRMKWMMAMKYPITA
LRMKIMMDMQYPLTA

SEQ ID NO: 228392 - protein, 15 aa, Artificial Sequence
  Description of Artificial Sequence: Synthetic peptide
  Seed: LRMKWMMAMKYPITA
LRMKIMMDMQYPMTA

SEQ ID NO: 228393 - protein, 15 aa, Artificial Sequence
  Description of Artificial Sequence: Synthetic peptide
  Seed: LRMKWMMAMKYPITA
LRMKIMMDMQYPRTA

SEQ ID NO: 228394 - protein, 15 aa, Artificial Sequence
  Description of Artificial Sequence: Synthetic peptide
  Seed: LRMKWMMAMKYPITA
LRMKIMMDMQYPVTA

SEQ ID NO: 228395 - protein, 15 aa, Artificial Sequence
  Description of Artificial Sequence: Synthetic peptide
  Seed: LRMKWMMAMKYPITA
LRMKIMMDMQYPYTA

SEQ ID NO: 228396 - protein, 15 aa, Artificial Sequence
  Description of Artificial Sequence: Synthetic peptide
  Seed: LRMKWMMAMKYPITA
LRMKIMMDMRYPATA

SEQ ID NO: 228397 - protein, 15 aa, Artificial Sequence
  Description of Artificial Sequence: Synthetic peptide
  Seed: LRMKWMMAMKYPITA
LRMKIMMDMRYPETA

SEQ ID NO: 228398 - protein, 15 aa, Artificial Sequence
  Description of Artificial Sequence: Synthetic peptide
  Seed: LRMKWMMAMKYPITA
LRMKIMMDMRYPFTA

SEQ ID NO: 228399 - protein, 15 aa, Artificial Sequence
  Description of Artificial Sequence: Synthetic peptide
  Seed: LRMKWMMAMKYPITA
LRMKIMMDMRYPGTA

SEQ ID NO: 228400 - protein, 15 aa, Artificial Sequence
  Description of Artificial Sequence: Synthetic peptide
  Seed: LRMKWMMAMKYPITA
LRMKIMMDMRYPHTA

SEQ ID NO: 228401 - protein, 15 aa, Artificial Sequence
  Description of Artificial Sequence: Synthetic peptide
  Seed: LRMKWMMAMKYPITA
LRMKIMMDMRYPITA

SEQ ID NO: 228402 - protein, 15 aa, Artificial Sequence
  Description of Artificial Sequence: Synthetic peptide
  Seed: LRMKWMMAMKYPITA
LRMKIMMDMRYPKTA

SEQ ID NO: 228403 - protein, 15 aa, Artificial Sequence
  Description of Artificial Sequence: Synthetic peptide
  Seed: LRMKWMMAMKYPITA
LRMKIMMDMRYPLTA

SEQ ID NO: 228404 - protein, 15 aa, Artificial Sequence
  Description of Artificial Sequence: Synthetic peptide
  Seed: LRMKWMMAMKYPITA
LRMKIMMDMRYPMTA

SEQ ID NO: 228405 - protein, 15 aa, Artificial Sequence
  Description of Artificial Sequence: Synthetic peptide
  Seed: LRMKWMMAMKYPITA
LRMKIMMDMRYPNTA

SEQ ID NO: 228406 - protein, 15 aa, Artificial Sequence
  Description of Artificial Sequence: Synthetic peptide
  Seed: LRMKWMMAMKYPITA
LRMKIMMDMRYPPTA

SEQ ID NO: 228407 - protein, 15 aa, Artificial Sequence
  Description of Artificial Sequence: Synthetic peptide
  Seed: LRMKWMMAMKYPITA
LRMKIMMDMRYPQTA

SEQ ID NO: 228408 - protein, 15 aa, Artificial Sequence
  Description of Artificial Sequence: Synthetic peptide
  Seed: LRMKWMMAMKYPITA
LRMKIMMDMRYPRTA

SEQ ID NO: 228409 - protein, 15 aa, Artificial Sequence
  Description of Artificial Sequence: Synthetic peptide
  Seed: LRMKWMMAMKYPITA
LRMKIMMDMRYPSTA

SEQ ID NO: 228410 - protein, 15 aa, Artificial Sequence
  Description of Artificial Sequence: Synthetic peptide
  Seed: LRMKWMMAMKYPITA
LRMKIMMDMRYPTTA

SEQ ID NO: 228411 - protein, 15 aa, Artificial Sequence
  Description of Artificial Sequence: Synthetic peptide
  Seed: LRMKWMMAMKYPITA
LRMKIMMDMRYPVTA

SEQ ID NO: 228412 - protein, 15 aa, Artificial Sequence
  Description of Artificial Sequence: Synthetic peptide
  Seed: LRMKWMMAMKYPITA
LRMKIMMDMRYPWTA

SEQ ID NO: 228413 - protein, 15 aa, Artificial Sequence
  Description of Artificial Sequence: Synthetic peptide
  Seed: LRMKWMMAMKYPITA
LRMKIMMDMRYPYTA

SEQ ID NO: 228414 - protein, 15 aa, Artificial Sequence
  Description of Artificial Sequence: Synthetic peptide
  Seed: LRMKWMMAMKYPITA
LRMKIMMDMSYPATA

SEQ ID NO: 228415 - protein, 15 aa, Artificial Sequence
  Description of Artificial Sequence: Synthetic peptide
  Seed: LRMKWMMAMKYPITA
LRMKIMMDMSYPFTA

SEQ ID NO: 228416 - protein, 15 aa, Artificial Sequence
  Description of Artificial Sequence: Synthetic peptide
  Seed: LRMKWMMAMKYPITA
LRMKIMMDMSYPGTA

SEQ ID NO: 228417 - protein, 15 aa, Artificial Sequence
  Description of Artificial Sequence: Synthetic peptide
  Seed: LRMKWMMAMKYPITA
LRMKIMMDMSYPHTA

SEQ ID NO: 228418 - protein, 15 aa, Artificial Sequence
  Description of Artificial Sequence: Synthetic peptide
  Seed: LRMKWMMAMKYPITA
LRMKIMMDMSYPITA

SEQ ID NO: 228419 - protein, 15 aa, Artificial Sequence
  Description of Artificial Sequence: Synthetic peptide
  Seed: LRMKWMMAMKYPITA
LRMKIMMDMSYPKTA

SEQ ID NO: 228420 - protein, 15 aa, Artificial Sequence
  Description of Artificial Sequence: Synthetic peptide
  Seed: LRMKWMMAMKYPITA
LRMKIMMDMSYPLTA

SEQ ID NO: 228421 - protein, 15 aa, Artificial Sequence
  Description of Artificial Sequence: Synthetic peptide
  Seed: LRMKWMMAMKYPITA
LRMKIMMDMSYPMTA

SEQ ID NO: 228422 - protein, 15 aa, Artificial Sequence
  Description of Artificial Sequence: Synthetic peptide
  Seed: LRMKWMMAMKYPITA
LRMKIMMDMSYPRTA

SEQ ID NO: 228423 - protein, 15 aa, Artificial Sequence
  Description of Artificial Sequence: Synthetic peptide
  Seed: LRMKWMMAMKYPITA
LRMKIMMDMSYPSTA

SEQ ID NO: 228424 - protein, 15 aa, Artificial Sequence
  Description of Artificial Sequence: Synthetic peptide
  Seed: LRMKWMMAMKYPITA
LRMKIMMDMSYPTTA

SEQ ID NO: 228425 - protein, 15 aa, Artificial Sequence
  Description of Artificial Sequence: Synthetic peptide
  Seed: LRMKWMMAMKYPITA
LRMKIMMDMSYPVTA

SEQ ID NO: 228426 - protein, 15 aa, Artificial Sequence
  Description of Artificial Sequence: Synthetic peptide
  Seed: LRMKWMMAMKYPITA
LRMKIMMDMSYPYTA

SEQ ID NO: 228427 - protein, 15 aa, Artificial Sequence
  Description of Artificial Sequence: Synthetic peptide
  Seed: LRMKWMMAMKYPITA
LRMKIMMDMTYPATA

SEQ ID NO: 228428 - protein, 15 aa, Artificial Sequence
  Description of Artificial Sequence: Synthetic peptide
  Seed: LRMKWMMAMKYPITA
LRMKIMMDMTYPFTA

SEQ ID NO: 228429 - protein, 15 aa, Artificial Sequence
  Description of Artificial Sequence: Synthetic peptide
  Seed: LRMKWMMAMKYPITA
LRMKIMMDMTYPGTA

SEQ ID NO: 228430 - protein, 15 aa, Artificial Sequence
  Description of Artificial Sequence: Synthetic peptide
  Seed: LRMKWMMAMKYPITA
LRMKIMMDMTYPHTA

SEQ ID NO: 228431 - protein, 15 aa, Artificial Sequence
  Description of Artificial Sequence: Synthetic peptide
  Seed: LRMKWMMAMKYPITA
LRMKIMMDMTYPITA

SEQ ID NO: 228432 - protein, 15 aa, Artificial Sequence
  Description of Artificial Sequence: Synthetic peptide
  Seed: LRMKWMMAMKYPITA
LRMKIMMDMTYPKTA

SEQ ID NO: 228433 - protein, 15 aa, Artificial Sequence
  Description of Artificial Sequence: Synthetic peptide
  Seed: LRMKWMMAMKYPITA
LRMKIMMDMTYPLTA

SEQ ID NO: 228434 - protein, 15 aa, Artificial Sequence
  Description of Artificial Sequence: Synthetic peptide
  Seed: LRMKWMMAMKYPITA
LRMKIMMDMTYPMTA

SEQ ID NO: 228435 - protein, 15 aa, Artificial Sequence
  Description of Artificial Sequence: Synthetic peptide
  Seed: LRMKWMMAMKYPITA
LRMKIMMDMTYPQTA

SEQ ID NO: 228436 - protein, 15 aa, Artificial Sequence
  Description of Artificial Sequence: Synthetic peptide
  Seed: LRMKWMMAMKYPITA
LRMKIMMDMTYPRTA

SEQ ID NO: 228437 - protein, 15 aa, Artificial Sequence
  Description of Artificial Sequence: Synthetic peptide
  Seed: LRMKWMMAMKYPITA
LRMKIMMDMTYPSTA

SEQ ID NO: 228438 - protein, 15 aa, Artificial Sequence
  Description of Artificial Sequence: Synthetic peptide
  Seed: LRMKWMMAMKYPITA
LRMKIMMDMTYPTTA

SEQ ID NO: 228439 - protein, 15 aa, Artificial Sequence
  Description of Artificial Sequence: Synthetic peptide
  Seed: LRMKWMMAMKYPITA
LRMKIMMDMTYPVTA

SEQ ID NO: 228440 - protein, 15 aa, Artificial Sequence
  Description of Artificial Sequence: Synthetic peptide
  Seed: LRMKWMMAMKYPITA
LRMKIMMDMTYPYTA

SEQ ID NO: 228441 - protein, 15 aa, Artificial Sequence
  Description of Artificial Sequence: Synthetic peptide
  Seed: LRMKWMMAMKYPITA
LRMKIMMDMVYPATA

SEQ ID NO: 228442 - protein, 15 aa, Artificial Sequence
  Description of Artificial Sequence: Synthetic peptide
  Seed: LRMKWMMAMKYPITA
LRMKIMMDMVYPFTA

SEQ ID NO: 228443 - protein, 15 aa, Artificial Sequence
  Description of Artificial Sequence: Synthetic peptide
  Seed: LRMKWMMAMKYPITA
LRMKIMMDMVYPHTA

SEQ ID NO: 228444 - protein, 15 aa, Artificial Sequence
  Description of Artificial Sequence: Synthetic peptide
  Seed: LRMKWMMAMKYPITA
LRMKIMMDMVYPITA

SEQ ID NO: 228445 - protein, 15 aa, Artificial Sequence
  Description of Artificial Sequence: Synthetic peptide
  Seed: LRMKWMMAMKYPITA
LRMKIMMDMVYPKTA

SEQ ID NO: 228446 - protein, 15 aa, Artificial Sequence
  Description of Artificial Sequence: Synthetic peptide
  Seed: LRMKWMMAMKYPITA
LRMKIMMDMVYPLTA

SEQ ID NO: 228447 - protein, 15 aa, Artificial Sequence
  Description of Artificial Sequence: Synthetic peptide
  Seed: LRMKWMMAMKYPITA
LRMKIMMDMVYPMTA

SEQ ID NO: 228448 - protein, 15 aa, Artificial Sequence
  Description of Artificial Sequence: Synthetic peptide
  Seed: LRMKWMMAMKYPITA
LRMKIMMDMVYPQTA

SEQ ID NO: 228449 - protein, 15 aa, Artificial Sequence
  Description of Artificial Sequence: Synthetic peptide
  Seed: LRMKWMMAMKYPITA
LRMKIMMDMVYPRTA

SEQ ID NO: 228450 - protein, 15 aa, Artificial Sequence
  Description of Artificial Sequence: Synthetic peptide
  Seed: LRMKWMMAMKYPITA
LRMKIMMDMVYPSTA

SEQ ID NO: 228451 - protein, 15 aa, Artificial Sequence
  Description of Artificial Sequence: Synthetic peptide
  Seed: LRMKWMMAMKYPITA
LRMKIMMDMVYPVTA

SEQ ID NO: 228452 - protein, 15 aa, Artificial Sequence
  Description of Artificial Sequence: Synthetic peptide
  Seed: LRMKWMMAMKYPITA
LRMKIMMDMVYPYTA

SEQ ID NO: 228453 - protein, 15 aa, Artificial Sequence
  Description of Artificial Sequence: Synthetic peptide
  Seed: LRMKWMMAMKYPITA
LRMKIMMEMAYPATA

SEQ ID NO: 228454 - protein, 15 aa, Artificial Sequence
  Description of Artificial Sequence: Synthetic peptide
  Seed: LRMKWMMAMKYPITA
LRMKIMMEMAYPCTA

SEQ ID NO: 228455 - protein, 15 aa, Artificial Sequence
  Description of Artificial Sequence: Synthetic peptide
  Seed: LRMKWMMAMKYPITA
LRMKIMMEMAYPFTA

SEQ ID NO: 228456 - protein, 15 aa, Artificial Sequence
  Description of Artificial Sequence: Synthetic peptide
  Seed: LRMKWMMAMKYPITA
LRMKIMMEMAYPGTA

SEQ ID NO: 228457 - protein, 15 aa, Artificial Sequence
  Description of Artificial Sequence: Synthetic peptide
  Seed: LRMKWMMAMKYPITA
LRMKIMMEMAYPHTA

SEQ ID NO: 228458 - protein, 15 aa, Artificial Sequence
  Description of Artificial Sequence: Synthetic peptide
  Seed: LRMKWMMAMKYPITA
LRMKIMMEMAYPITA

SEQ ID NO: 228459 - protein, 15 aa, Artificial Sequence
  Description of Artificial Sequence: Synthetic peptide
  Seed: LRMKWMMAMKYPITA
LRMKIMMEMAYPLTA

SEQ ID NO: 228460 - protein, 15 aa, Artificial Sequence
  Description of Artificial Sequence: Synthetic peptide
  Seed: LRMKWMMAMKYPITA
LRMKIMMEMAYPMTA

SEQ ID NO: 228461 - protein, 15 aa, Artificial Sequence
  Description of Artificial Sequence: Synthetic peptide
  Seed: LRMKWMMAMKYPITA
LRMKIMMEMAYPNTA

SEQ ID NO: 228462 - protein, 15 aa, Artificial Sequence
  Description of Artificial Sequence: Synthetic peptide
  Seed: LRMKWMMAMKYPITA
LRMKIMMEMAYPPTA

SEQ ID NO: 228463 - protein, 15 aa, Artificial Sequence
  Description of Artificial Sequence: Synthetic peptide
  Seed: LRMKWMMAMKYPITA
LRMKIMMEMAYPQTA

SEQ ID NO: 228464 - protein, 15 aa, Artificial Sequence
  Description of Artificial Sequence: Synthetic peptide
  Seed: LRMKWMMAMKYPITA
LRMKIMMEMAYPRTA

SEQ ID NO: 228465 - protein, 15 aa, Artificial Sequence
  Description of Artificial Sequence: Synthetic peptide
  Seed: LRMKWMMAMKYPITA
LRMKIMMEMAYPSTA

SEQ ID NO: 228466 - protein, 15 aa, Artificial Sequence
  Description of Artificial Sequence: Synthetic peptide
  Seed: LRMKWMMAMKYPITA
LRMKIMMEMAYPTTA

SEQ ID NO: 228467 - protein, 15 aa, Artificial Sequence
  Description of Artificial Sequence: Synthetic peptide
  Seed: LRMKWMMAMKYPITA
LRMKIMMEMAYPVTA

SEQ ID NO: 228468 - protein, 15 aa, Artificial Sequence
  Description of Artificial Sequence: Synthetic peptide
  Seed: LRMKWMMAMKYPITA
LRMKIMMEMAYPYTA

SEQ ID NO: 228469 - protein, 15 aa, Artificial Sequence
  Description of Artificial Sequence: Synthetic peptide
  Seed: LRMKWMMAMKYPITA
LRMKIMMEMFYPFTA

SEQ ID NO: 228470 - protein, 15 aa, Artificial Sequence
  Description of Artificial Sequence: Synthetic peptide
  Seed: LRMKWMMAMKYPITA
LRMKIMMEMFYPITA

SEQ ID NO: 228471 - protein, 15 aa, Artificial Sequence
  Description of Artificial Sequence: Synthetic peptide
  Seed: LRMKWMMAMKYPITA
LRMKIMMEMFYPLTA

SEQ ID NO: 228472 - protein, 15 aa, Artificial Sequence
  Description of Artificial Sequence: Synthetic peptide
  Seed: LRMKWMMAMKYPITA
LRMKIMMEMFYPMTA

SEQ ID NO: 228473 - protein, 15 aa, Artificial Sequence
  Description of Artificial Sequence: Synthetic peptide
  Seed: LRMKWMMAMKYPITA
LRMKIMMEMFYPTTA

SEQ ID NO: 228474 - protein, 15 aa, Artificial Sequence
  Description of Artificial Sequence: Synthetic peptide
  Seed: LRMKWMMAMKYPITA
LRMKIMMEMFYPVTA

SEQ ID NO: 228475 - protein, 15 aa, Artificial Sequence
  Description of Artificial Sequence: Synthetic peptide
  Seed: LRMKWMMAMKYPITA
LRMKIMMEMGYPATA

SEQ ID NO: 228476 - protein, 15 aa, Artificial Sequence
  Description of Artificial Sequence: Synthetic peptide
  Seed: LRMKWMMAMKYPITA
LRMKIMMEMGYPCTA

SEQ ID NO: 228477 - protein, 15 aa, Artificial Sequence
  Description of Artificial Sequence: Synthetic peptide
  Seed: LRMKWMMAMKYPITA
LRMKIMMEMGYPFTA

SEQ ID NO: 228478 - protein, 15 aa, Artificial Sequence
  Description of Artificial Sequence: Synthetic peptide
  Seed: LRMKWMMAMKYPITA
LRMKIMMEMGYPGTA

SEQ ID NO: 228479 - protein, 15 aa, Artificial Sequence
  Description of Artificial Sequence: Synthetic peptide
  Seed: LRMKWMMAMKYPITA
LRMKIMMEMGYPHTA

SEQ ID NO: 228480 - protein, 15 aa, Artificial Sequence
  Description of Artificial Sequence: Synthetic peptide
  Seed: LRMKWMMAMKYPITA
LRMKIMMEMGYPITA

SEQ ID NO: 228481 - protein, 15 aa, Artificial Sequence
  Description of Artificial Sequence: Synthetic peptide
  Seed: LRMKWMMAMKYPITA
LRMKIMMEMGYPLTA

SEQ ID NO: 228482 - protein, 15 aa, Artificial Sequence
  Description of Artificial Sequence: Synthetic peptide
  Seed: LRMKWMMAMKYPITA
LRMKIMMEMGYPMTA

SEQ ID NO: 228483 - protein, 15 aa, Artificial Sequence
  Description of Artificial Sequence: Synthetic peptide
  Seed: LRMKWMMAMKYPITA
LRMKIMMEMGYPNTA

SEQ ID NO: 228484 - protein, 15 aa, Artificial Sequence
  Description of Artificial Sequence: Synthetic peptide
  Seed: LRMKWMMAMKYPITA
LRMKIMMEMGYPSTA

SEQ ID NO: 228485 - protein, 15 aa, Artificial Sequence
  Description of Artificial Sequence: Synthetic peptide
  Seed: LRMKWMMAMKYPITA
LRMKIMMEMGYPTTA

SEQ ID NO: 228486 - protein, 15 aa, Artificial Sequence
  Description of Artificial Sequence: Synthetic peptide
  Seed: LRMKWMMAMKYPITA
LRMKIMMEMGYPVTA

SEQ ID NO: 228487 - protein, 15 aa, Artificial Sequence
  Description of Artificial Sequence: Synthetic peptide
  Seed: LRMKWMMAMKYPITA
LRMKIMMEMGYPYTA

SEQ ID NO: 228488 - protein, 15 aa, Artificial Sequence
  Description of Artificial Sequence: Synthetic peptide
  Seed: LRMKWMMAMKYPITA
LRMKIMMEMIYPATA

SEQ ID NO: 228489 - protein, 15 aa, Artificial Sequence
  Description of Artificial Sequence: Synthetic peptide
  Seed: LRMKWMMAMKYPITA
LRMKIMMEMIYPITA

SEQ ID NO: 228490 - protein, 15 aa, Artificial Sequence
  Description of Artificial Sequence: Synthetic peptide
  Seed: LRMKWMMAMKYPITA
LRMKIMMEMIYPLTA

SEQ ID NO: 228491 - protein, 15 aa, Artificial Sequence
  Description of Artificial Sequence: Synthetic peptide
  Seed: LRMKWMMAMKYPITA
LRMKIMMEMIYPMTA

SEQ ID NO: 228492 - protein, 15 aa, Artificial Sequence
  Description of Artificial Sequence: Synthetic peptide
  Seed: LRMKWMMAMKYPITA
LRMKIMMEMIYPNTA

SEQ ID NO: 228493 - protein, 15 aa, Artificial Sequence
  Description of Artificial Sequence: Synthetic peptide
  Seed: LRMKWMMAMKYPITA
LRMKIMMEMIYPSTA

SEQ ID NO: 228494 - protein, 15 aa, Artificial Sequence
  Description of Artificial Sequence: Synthetic peptide
  Seed: LRMKWMMAMKYPITA
LRMKIMMEMIYPTTA

SEQ ID NO: 228495 - protein, 15 aa, Artificial Sequence
  Description of Artificial Sequence: Synthetic peptide
  Seed: LRMKWMMAMKYPITA
LRMKIMMEMIYPVTA

SEQ ID NO: 228496 - protein, 15 aa, Artificial Sequence
  Description of Artificial Sequence: Synthetic peptide
  Seed: LRMKWMMAMKYPITA
LRMKIMMEMKYPATA

SEQ ID NO: 228497 - protein, 15 aa, Artificial Sequence
  Description of Artificial Sequence: Synthetic peptide
  Seed: LRMKWMMAMKYPITA
LRMKIMMEMKYPFTA

SEQ ID NO: 228498 - protein, 15 aa, Artificial Sequence
  Description of Artificial Sequence: Synthetic peptide
  Seed: LRMKWMMAMKYPITA
LRMKIMMEMKYPGTA

SEQ ID NO: 228499 - protein, 15 aa, Artificial Sequence
  Description of Artificial Sequence: Synthetic peptide
  Seed: LRMKWMMAMKYPITA
LRMKIMMEMKYPHTA

SEQ ID NO: 228500 - protein, 15 aa, Artificial Sequence
  Description of Artificial Sequence: Synthetic peptide
  Seed: LRMKWMMAMKYPITA
LRMKIMMEMKYPITA

SEQ ID NO: 228501 - protein, 15 aa, Artificial Sequence
  Description of Artificial Sequence: Synthetic peptide
  Seed: LRMKWMMAMKYPITA
LRMKIMMEMKYPKTA

SEQ ID NO: 228502 - protein, 15 aa, Artificial Sequence
  Description of Artificial Sequence: Synthetic peptide
  Seed: LRMKWMMAMKYPITA
LRMKIMMEMKYPLTA

SEQ ID NO: 228503 - protein, 15 aa, Artificial Sequence
  Description of Artificial Sequence: Synthetic peptide
  Seed: LRMKWMMAMKYPITA
LRMKIMMEMKYPMTA

SEQ ID NO: 228504 - protein, 15 aa, Artificial Sequence
  Description of Artificial Sequence: Synthetic peptide
  Seed: LRMKWMMAMKYPITA
LRMKIMMEMKYPQTA

SEQ ID NO: 228505 - protein, 15 aa, Artificial Sequence
  Description of Artificial Sequence: Synthetic peptide
  Seed: LRMKWMMAMKYPITA
LRMKIMMEMKYPRTA

SEQ ID NO: 228506 - protein, 15 aa, Artificial Sequence
  Description of Artificial Sequence: Synthetic peptide
  Seed: LRMKWMMAMKYPITA
LRMKIMMEMKYPSTA

SEQ ID NO: 228507 - protein, 15 aa, Artificial Sequence
  Description of Artificial Sequence: Synthetic peptide
  Seed: LRMKWMMAMKYPITA
LRMKIMMEMKYPTTA

SEQ ID NO: 228508 - protein, 15 aa, Artificial Sequence
  Description of Artificial Sequence: Synthetic peptide
  Seed: LRMKWMMAMKYPITA
LRMKIMMEMKYPVTA

SEQ ID NO: 228509 - protein, 15 aa, Artificial Sequence
  Description of Artificial Sequence: Synthetic peptide
  Seed: LRMKWMMAMKYPITA
LRMKIMMEMKYPYTA

SEQ ID NO: 228510 - protein, 15 aa, Artificial Sequence
  Description of Artificial Sequence: Synthetic peptide
  Seed: LRMKWMMAMKYPITA
LRMKIMMEMNYPATA

SEQ ID NO: 228511 - protein, 15 aa, Artificial Sequence
  Description of Artificial Sequence: Synthetic peptide
  Seed: LRMKWMMAMKYPITA
LRMKIMMEMNYPFTA

SEQ ID NO: 228512 - protein, 15 aa, Artificial Sequence
  Description of Artificial Sequence: Synthetic peptide
  Seed: LRMKWMMAMKYPITA
LRMKIMMEMNYPGTA

SEQ ID NO: 228513 - protein, 15 aa, Artificial Sequence
  Description of Artificial Sequence: Synthetic peptide
  Seed: LRMKWMMAMKYPITA
LRMKIMMEMNYPITA

SEQ ID NO: 228514 - protein, 15 aa, Artificial Sequence
  Description of Artificial Sequence: Synthetic peptide
  Seed: LRMKWMMAMKYPITA
LRMKIMMEMNYPLTA

SEQ ID NO: 228515 - protein, 15 aa, Artificial Sequence
  Description of Artificial Sequence: Synthetic peptide
  Seed: LRMKWMMAMKYPITA
LRMKIMMEMNYPMTA

SEQ ID NO: 228516 - protein, 15 aa, Artificial Sequence
  Description of Artificial Sequence: Synthetic peptide
  Seed: LRMKWMMAMKYPITA
LRMKIMMEMNYPSTA

SEQ ID NO: 228517 - protein, 15 aa, Artificial Sequence
  Description of Artificial Sequence: Synthetic peptide
  Seed: LRMKWMMAMKYPITA
LRMKIMMEMNYPTTA

SEQ ID NO: 228518 - protein, 15 aa, Artificial Sequence
  Description of Artificial Sequence: Synthetic peptide
  Seed: LRMKWMMAMKYPITA
LRMKIMMEMNYPVTA

SEQ ID NO: 228519 - protein, 15 aa, Artificial Sequence
  Description of Artificial Sequence: Synthetic peptide
  Seed: LRMKWMMAMKYPITA
LRMKIMMEMPYPATA

SEQ ID NO: 228520 - protein, 15 aa, Artificial Sequence
  Description of Artificial Sequence: Synthetic peptide
  Seed: LRMKWMMAMKYPITA
LRMKIMMEMPYPCTA

SEQ ID NO: 228521 - protein, 15 aa, Artificial Sequence
  Description of Artificial Sequence: Synthetic peptide
  Seed: LRMKWMMAMKYPITA
LRMKIMMEMPYPFTA

SEQ ID NO: 228522 - protein, 15 aa, Artificial Sequence
  Description of Artificial Sequence: Synthetic peptide
  Seed: LRMKWMMAMKYPITA
LRMKIMMEMPYPGTA

SEQ ID NO: 228523 - protein, 15 aa, Artificial Sequence
  Description of Artificial Sequence: Synthetic peptide
  Seed: LRMKWMMAMKYPITA
LRMKIMMEMPYPITA

SEQ ID NO: 228524 - protein, 15 aa, Artificial Sequence
  Description of Artificial Sequence: Synthetic peptide
  Seed: LRMKWMMAMKYPITA
LRMKIMMEMPYPLTA

SEQ ID NO: 228525 - protein, 15 aa, Artificial Sequence
  Description of Artificial Sequence: Synthetic peptide
  Seed: LRMKWMMAMKYPITA
LRMKIMMEMPYPMTA

SEQ ID NO: 228526 - protein, 15 aa, Artificial Sequence
  Description of Artificial Sequence: Synthetic peptide
  Seed: LRMKWMMAMKYPITA
LRMKIMMEMPYPNTA

SEQ ID NO: 228527 - protein, 15 aa, Artificial Sequence
  Description of Artificial Sequence: Synthetic peptide
  Seed: LRMKWMMAMKYPITA
LRMKIMMEMPYPSTA

SEQ ID NO: 228528 - protein, 15 aa, Artificial Sequence
  Description of Artificial Sequence: Synthetic peptide
  Seed: LRMKWMMAMKYPITA
LRMKIMMEMPYPTTA

SEQ ID NO: 228529 - protein, 15 aa, Artificial Sequence
  Description of Artificial Sequence: Synthetic peptide
  Seed: LRMKWMMAMKYPITA
LRMKIMMEMPYPVTA

SEQ ID NO: 228530 - protein, 15 aa, Artificial Sequence
  Description of Artificial Sequence: Synthetic peptide
  Seed: LRMKWMMAMKYPITA
LRMKIMMEMRYPATA

SEQ ID NO: 228531 - protein, 15 aa, Artificial Sequence
  Description of Artificial Sequence: Synthetic peptide
  Seed: LRMKWMMAMKYPITA
LRMKIMMEMRYPFTA

SEQ ID NO: 228532 - protein, 15 aa, Artificial Sequence
  Description of Artificial Sequence: Synthetic peptide
  Seed: LRMKWMMAMKYPITA
LRMKIMMEMRYPGTA

SEQ ID NO: 228533 - protein, 15 aa, Artificial Sequence
  Description of Artificial Sequence: Synthetic peptide
  Seed: LRMKWMMAMKYPITA
LRMKIMMEMRYPHTA

SEQ ID NO: 228534 - protein, 15 aa, Artificial Sequence
  Description of Artificial Sequence: Synthetic peptide
  Seed: LRMKWMMAMKYPITA
LRMKIMMEMRYPITA

SEQ ID NO: 228535 - protein, 15 aa, Artificial Sequence
  Description of Artificial Sequence: Synthetic peptide
  Seed: LRMKWMMAMKYPITA
LRMKIMMEMRYPKTA

SEQ ID NO: 228536 - protein, 15 aa, Artificial Sequence
  Description of Artificial Sequence: Synthetic peptide
  Seed: LRMKWMMAMKYPITA
LRMKIMMEMRYPLTA

SEQ ID NO: 228537 - protein, 15 aa, Artificial Sequence
  Description of Artificial Sequence: Synthetic peptide
  Seed: LRMKWMMAMKYPITA
LRMKIMMEMRYPMTA

SEQ ID NO: 228538 - protein, 15 aa, Artificial Sequence
  Description of Artificial Sequence: Synthetic peptide
  Seed: LRMKWMMAMKYPITA
LRMKIMMEMRYPNTA

SEQ ID NO: 228539 - protein, 15 aa, Artificial Sequence
  Description of Artificial Sequence: Synthetic peptide
  Seed: LRMKWMMAMKYPITA
LRMKIMMEMRYPQTA

SEQ ID NO: 228540 - protein, 15 aa, Artificial Sequence
  Description of Artificial Sequence: Synthetic peptide
  Seed: LRMKWMMAMKYPITA
LRMKIMMEMRYPRTA

SEQ ID NO: 228541 - protein, 15 aa, Artificial Sequence
  Description of Artificial Sequence: Synthetic peptide
  Seed: LRMKWMMAMKYPITA
LRMKIMMEMRYPSTA

SEQ ID NO: 228542 - protein, 15 aa, Artificial Sequence
  Description of Artificial Sequence: Synthetic peptide
  Seed: LRMKWMMAMKYPITA
LRMKIMMEMRYPTTA

SEQ ID NO: 228543 - protein, 15 aa, Artificial Sequence
  Description of Artificial Sequence: Synthetic peptide
  Seed: LRMKWMMAMKYPITA
LRMKIMMEMRYPVTA

SEQ ID NO: 228544 - protein, 15 aa, Artificial Sequence
  Description of Artificial Sequence: Synthetic peptide
  Seed: LRMKWMMAMKYPITA
LRMKIMMEMRYPYTA

SEQ ID NO: 228545 - protein, 15 aa, Artificial Sequence
  Description of Artificial Sequence: Synthetic peptide
  Seed: LRMKWMMAMKYPITA
LRMKIMMEMSYPATA

SEQ ID NO: 228546 - protein, 15 aa, Artificial Sequence
  Description of Artificial Sequence: Synthetic peptide
  Seed: LRMKWMMAMKYPITA
LRMKIMMEMSYPCTA

SEQ ID NO: 228547 - protein, 15 aa, Artificial Sequence
  Description of Artificial Sequence: Synthetic peptide
  Seed: LRMKWMMAMKYPITA
LRMKIMMEMSYPFTA

SEQ ID NO: 228548 - protein, 15 aa, Artificial Sequence
  Description of Artificial Sequence: Synthetic peptide
  Seed: LRMKWMMAMKYPITA
LRMKIMMEMSYPGTA

SEQ ID NO: 228549 - protein, 15 aa, Artificial Sequence
  Description of Artificial Sequence: Synthetic peptide
  Seed: LRMKWMMAMKYPITA
LRMKIMMEMSYPITA

SEQ ID NO: 228550 - protein, 15 aa, Artificial Sequence
  Description of Artificial Sequence: Synthetic peptide
  Seed: LRMKWMMAMKYPITA
LRMKIMMEMSYPLTA

SEQ ID NO: 228551 - protein, 15 aa, Artificial Sequence
  Description of Artificial Sequence: Synthetic peptide
  Seed: LRMKWMMAMKYPITA
LRMKIMMEMSYPMTA

SEQ ID NO: 228552 - protein, 15 aa, Artificial Sequence
  Description of Artificial Sequence: Synthetic peptide
  Seed: LRMKWMMAMKYPITA
LRMKIMMEMSYPNTA

SEQ ID NO: 228553 - protein, 15 aa, Artificial Sequence
  Description of Artificial Sequence: Synthetic peptide
  Seed: LRMKWMMAMKYPITA
LRMKIMMEMSYPSTA

SEQ ID NO: 228554 - protein, 15 aa, Artificial Sequence
  Description of Artificial Sequence: Synthetic peptide
  Seed: LRMKWMMAMKYPITA
LRMKIMMEMSYPTTA

SEQ ID NO: 228555 - protein, 15 aa, Artificial Sequence
  Description of Artificial Sequence: Synthetic peptide
  Seed: LRMKWMMAMKYPITA
LRMKIMMEMSYPVTA

SEQ ID NO: 228556 - protein, 15 aa, Artificial Sequence
  Description of Artificial Sequence: Synthetic peptide
  Seed: LRMKWMMAMKYPITA
LRMKIMMEMTYPATA

SEQ ID NO: 228557 - protein, 15 aa, Artificial Sequence
  Description of Artificial Sequence: Synthetic peptide
  Seed: LRMKWMMAMKYPITA
LRMKIMMEMTYPITA

SEQ ID NO: 228558 - protein, 15 aa, Artificial Sequence
  Description of Artificial Sequence: Synthetic peptide
  Seed: LRMKWMMAMKYPITA
LRMKIMMEMTYPLTA

SEQ ID NO: 228559 - protein, 15 aa, Artificial Sequence
  Description of Artificial Sequence: Synthetic peptide
  Seed: LRMKWMMAMKYPITA
LRMKIMMEMTYPMTA

SEQ ID NO: 228560 - protein, 15 aa, Artificial Sequence
  Description of Artificial Sequence: Synthetic peptide
  Seed: LRMKWMMAMKYPITA
LRMKIMMEMTYPNTA

SEQ ID NO: 228561 - protein, 15 aa, Artificial Sequence
  Description of Artificial Sequence: Synthetic peptide
  Seed: LRMKWMMAMKYPITA
LRMKIMMEMTYPSTA

SEQ ID NO: 228562 - protein, 15 aa, Artificial Sequence
  Description of Artificial Sequence: Synthetic peptide
  Seed: LRMKWMMAMKYPITA
LRMKIMMEMTYPTTA

SEQ ID NO: 228563 - protein, 15 aa, Artificial Sequence
  Description of Artificial Sequence: Synthetic peptide
  Seed: LRMKWMMAMKYPITA
LRMKIMMEMTYPVTA

SEQ ID NO: 228564 - protein, 15 aa, Artificial Sequence
  Description of Artificial Sequence: Synthetic peptide
  Seed: LRMKWMMAMKYPITA
LRMKIMMEMVYPATA

SEQ ID NO: 228565 - protein, 15 aa, Artificial Sequence
  Description of Artificial Sequence: Synthetic peptide
  Seed: LRMKWMMAMKYPITA
LRMKIMMEMVYPITA

SEQ ID NO: 228566 - protein, 15 aa, Artificial Sequence
  Description of Artificial Sequence: Synthetic peptide
  Seed: LRMKWMMAMKYPITA
LRMKIMMEMVYPLTA

SEQ ID NO: 228567 - protein, 15 aa, Artificial Sequence
  Description of Artificial Sequence: Synthetic peptide
  Seed: LRMKWMMAMKYPITA
LRMKIMMEMVYPMTA

SEQ ID NO: 228568 - protein, 15 aa, Artificial Sequence
  Description of Artificial Sequence: Synthetic peptide
  Seed: LRMKWMMAMKYPITA
LRMKIMMEMVYPNTA

SEQ ID NO: 228569 - protein, 15 aa, Artificial Sequence
  Description of Artificial Sequence: Synthetic peptide
  Seed: LRMKWMMAMKYPITA
LRMKIMMEMVYPSTA

SEQ ID NO: 228570 - protein, 15 aa, Artificial Sequence
  Description of Artificial Sequence: Synthetic peptide
  Seed: LRMKWMMAMKYPITA
LRMKIMMEMVYPTTA

SEQ ID NO: 228571 - protein, 15 aa, Artificial Sequence
  Description of Artificial Sequence: Synthetic peptide
  Seed: LRMKWMMAMKYPITA
LRMKIMMEMVYPVTA

SEQ ID NO: 228572 - protein, 15 aa, Artificial Sequence
  Description of Artificial Sequence: Synthetic peptide
  Seed: LRMKWMMAMKYPITA
LRMKIMMFMAYPATA

SEQ ID NO: 228573 - protein, 15 aa, Artificial Sequence
  Description of Artificial Sequence: Synthetic peptide
  Seed: LRMKWMMAMKYPITA
LRMKIMMFMAYPDTA

SEQ ID NO: 228574 - protein, 15 aa, Artificial Sequence
  Description of Artificial Sequence: Synthetic peptide
  Seed: LRMKWMMAMKYPITA
LRMKIMMFMAYPETA

SEQ ID NO: 228575 - protein, 15 aa, Artificial Sequence
  Description of Artificial Sequence: Synthetic peptide
  Seed: LRMKWMMAMKYPITA
LRMKIMMFMAYPFTA

SEQ ID NO: 228576 - protein, 15 aa, Artificial Sequence
  Description of Artificial Sequence: Synthetic peptide
  Seed: LRMKWMMAMKYPITA
LRMKIMMFMAYPGTA

SEQ ID NO: 228577 - protein, 15 aa, Artificial Sequence
  Description of Artificial Sequence: Synthetic peptide
  Seed: LRMKWMMAMKYPITA
LRMKIMMFMAYPHTA

SEQ ID NO: 228578 - protein, 15 aa, Artificial Sequence
  Description of Artificial Sequence: Synthetic peptide
  Seed: LRMKWMMAMKYPITA
LRMKIMMFMAYPITA

SEQ ID NO: 228579 - protein, 15 aa, Artificial Sequence
  Description of Artificial Sequence: Synthetic peptide
  Seed: LRMKWMMAMKYPITA
LRMKIMMFMAYPKTA

SEQ ID NO: 228580 - protein, 15 aa, Artificial Sequence
  Description of Artificial Sequence: Synthetic peptide
  Seed: LRMKWMMAMKYPITA
LRMKIMMFMAYPLTA

SEQ ID NO: 228581 - protein, 15 aa, Artificial Sequence
  Description of Artificial Sequence: Synthetic peptide
  Seed: LRMKWMMAMKYPITA
LRMKIMMFMAYPMTA

SEQ ID NO: 228582 - protein, 15 aa, Artificial Sequence
  Description of Artificial Sequence: Synthetic peptide
  Seed: LRMKWMMAMKYPITA
LRMKIMMFMAYPNTA

SEQ ID NO: 228583 - protein, 15 aa, Artificial Sequence
  Description of Artificial Sequence: Synthetic peptide
  Seed: LRMKWMMAMKYPITA
LRMKIMMFMAYPPTA

SEQ ID NO: 228584 - protein, 15 aa, Artificial Sequence
  Description of Artificial Sequence: Synthetic peptide
  Seed: LRMKWMMAMKYPITA
LRMKIMMFMAYPQTA

SEQ ID NO: 228585 - protein, 15 aa, Artificial Sequence
  Description of Artificial Sequence: Synthetic peptide
  Seed: LRMKWMMAMKYPITA
LRMKIMMFMAYPRTA

SEQ ID NO: 228586 - protein, 15 aa, Artificial Sequence
  Description of Artificial Sequence: Synthetic peptide
  Seed: LRMKWMMAMKYPITA
LRMKIMMFMAYPSTA

SEQ ID NO: 228587 - protein, 15 aa, Artificial Sequence
  Description of Artificial Sequence: Synthetic peptide
  Seed: LRMKWMMAMKYPITA
LRMKIMMFMAYPTTA

SEQ ID NO: 228588 - protein, 15 aa, Artificial Sequence
  Description of Artificial Sequence: Synthetic peptide
  Seed: LRMKWMMAMKYPITA
LRMKIMMFMAYPVTA

SEQ ID NO: 228589 - protein, 15 aa, Artificial Sequence
  Description of Artificial Sequence: Synthetic peptide
  Seed: LRMKWMMAMKYPITA
LRMKIMMFMAYPYTA

SEQ ID NO: 228590 - protein, 15 aa, Artificial Sequence
  Description of Artificial Sequence: Synthetic peptide
  Seed: LRMKWMMAMKYPITA
LRMKIMMFMDYPATA

SEQ ID NO: 228591 - protein, 15 aa, Artificial Sequence
  Description of Artificial Sequence: Synthetic peptide
  Seed: LRMKWMMAMKYPITA
LRMKIMMFMDYPITA

SEQ ID NO: 228592 - protein, 15 aa, Artificial Sequence
  Description of Artificial Sequence: Synthetic peptide
  Seed: LRMKWMMAMKYPITA
LRMKIMMFMDYPLTA

SEQ ID NO: 228593 - protein, 15 aa, Artificial Sequence
  Description of Artificial Sequence: Synthetic peptide
  Seed: LRMKWMMAMKYPITA
LRMKIMMFMDYPMTA

SEQ ID NO: 228594 - protein, 15 aa, Artificial Sequence
  Description of Artificial Sequence: Synthetic peptide
  Seed: LRMKWMMAMKYPITA
LRMKIMMFMDYPSTA

SEQ ID NO: 228595 - protein, 15 aa, Artificial Sequence
  Description of Artificial Sequence: Synthetic peptide
  Seed: LRMKWMMAMKYPITA
LRMKIMMFMDYPVTA

SEQ ID NO: 228596 - protein, 15 aa, Artificial Sequence
  Description of Artificial Sequence: Synthetic peptide
  Seed: LRMKWMMAMKYPITA
LRMKIMMFMGYPATA

SEQ ID NO: 228597 - protein, 15 aa, Artificial Sequence
  Description of Artificial Sequence: Synthetic peptide
  Seed: LRMKWMMAMKYPITA
LRMKIMMFMGYPHTA

SEQ ID NO: 228598 - protein, 15 aa, Artificial Sequence
  Description of Artificial Sequence: Synthetic peptide
  Seed: LRMKWMMAMKYPITA
LRMKIMMFMGYPITA

SEQ ID NO: 228599 - protein, 15 aa, Artificial Sequence
  Description of Artificial Sequence: Synthetic peptide
  Seed: LRMKWMMAMKYPITA
LRMKIMMFMGYPKTA

SEQ ID NO: 228600 - protein, 15 aa, Artificial Sequence
  Description of Artificial Sequence: Synthetic peptide
  Seed: LRMKWMMAMKYPITA
LRMKIMMFMGYPLTA

SEQ ID NO: 228601 - protein, 15 aa, Artificial Sequence
  Description of Artificial Sequence: Synthetic peptide
  Seed: LRMKWMMAMKYPITA
LRMKIMMFMGYPMTA

SEQ ID NO: 228602 - protein, 15 aa, Artificial Sequence
  Description of Artificial Sequence: Synthetic peptide
  Seed: LRMKWMMAMKYPITA
LRMKIMMFMGYPRTA

SEQ ID NO: 228603 - protein, 15 aa, Artificial Sequence
  Description of Artificial Sequence: Synthetic peptide
  Seed: LRMKWMMAMKYPITA
LRMKIMMFMGYPSTA

SEQ ID NO: 228604 - protein, 15 aa, Artificial Sequence
  Description of Artificial Sequence: Synthetic peptide
  Seed: LRMKWMMAMKYPITA
LRMKIMMFMGYPTTA

SEQ ID NO: 228605 - protein, 15 aa, Artificial Sequence
  Description of Artificial Sequence: Synthetic peptide
  Seed: LRMKWMMAMKYPITA
LRMKIMMFMGYPVTA

SEQ ID NO: 228606 - protein, 15 aa, Artificial Sequence
  Description of Artificial Sequence: Synthetic peptide
  Seed: LRMKWMMAMKYPITA
LRMKIMMFMHYPATA

SEQ ID NO: 228607 - protein, 15 aa, Artificial Sequence
  Description of Artificial Sequence: Synthetic peptide
  Seed: LRMKWMMAMKYPITA
LRMKIMMFMHYPETA

SEQ ID NO: 228608 - protein, 15 aa, Artificial Sequence
  Description of Artificial Sequence: Synthetic peptide
  Seed: LRMKWMMAMKYPITA
LRMKIMMFMHYPHTA

SEQ ID NO: 228609 - protein, 15 aa, Artificial Sequence
  Description of Artificial Sequence: Synthetic peptide
  Seed: LRMKWMMAMKYPITA
LRMKIMMFMHYPKTA

SEQ ID NO: 228610 - protein, 15 aa, Artificial Sequence
  Description of Artificial Sequence: Synthetic peptide
  Seed: LRMKWMMAMKYPITA
LRMKIMMFMHYPLTA

SEQ ID NO: 228611 - protein, 15 aa, Artificial Sequence
  Description of Artificial Sequence: Synthetic peptide
  Seed: LRMKWMMAMKYPITA
LRMKIMMFMHYPMTA

SEQ ID NO: 228612 - protein, 15 aa, Artificial Sequence
  Description of Artificial Sequence: Synthetic peptide
  Seed: LRMKWMMAMKYPITA
LRMKIMMFMHYPRTA

SEQ ID NO: 228613 - protein, 15 aa, Artificial Sequence
  Description of Artificial Sequence: Synthetic peptide
  Seed: LRMKWMMAMKYPITA
LRMKIMMFMHYPSTA

SEQ ID NO: 228614 - protein, 15 aa, Artificial Sequence
  Description of Artificial Sequence: Synthetic peptide
  Seed: LRMKWMMAMKYPITA
LRMKIMMFMHYPVTA

SEQ ID NO: 228615 - protein, 15 aa, Artificial Sequence
  Description of Artificial Sequence: Synthetic peptide
  Seed: LRMKWMMAMKYPITA
LRMKIMMFMHYPYTA

SEQ ID NO: 228616 - protein, 15 aa, Artificial Sequence
  Description of Artificial Sequence: Synthetic peptide
  Seed: LRMKWMMAMKYPITA
LRMKIMMFMIYPDTA

SEQ ID NO: 228617 - protein, 15 aa, Artificial Sequence
  Description of Artificial Sequence: Synthetic peptide
  Seed: LRMKWMMAMKYPITA
LRMKIMMFMIYPETA

SEQ ID NO: 228618 - protein, 15 aa, Artificial Sequence
  Description of Artificial Sequence: Synthetic peptide
  Seed: LRMKWMMAMKYPITA
LRMKIMMFMIYPHTA

SEQ ID NO: 228619 - protein, 15 aa, Artificial Sequence
  Description of Artificial Sequence: Synthetic peptide
  Seed: LRMKWMMAMKYPITA
LRMKIMMFMIYPRTA

SEQ ID NO: 228620 - protein, 15 aa, Artificial Sequence
  Description of Artificial Sequence: Synthetic peptide
  Seed: LRMKWMMAMKYPITA
LRMKIMMFMIYPSTA

SEQ ID NO: 228621 - protein, 15 aa, Artificial Sequence
  Description of Artificial Sequence: Synthetic peptide
  Seed: LRMKWMMAMKYPITA
LRMKIMMFMKYPATA

SEQ ID NO: 228622 - protein, 15 aa, Artificial Sequence
  Description of Artificial Sequence: Synthetic peptide
  Seed: LRMKWMMAMKYPITA
LRMKIMMFMKYPDTA

SEQ ID NO: 228623 - protein, 15 aa, Artificial Sequence
  Description of Artificial Sequence: Synthetic peptide
  Seed: LRMKWMMAMKYPITA
LRMKIMMFMKYPETA

SEQ ID NO: 228624 - protein, 15 aa, Artificial Sequence
  Description of Artificial Sequence: Synthetic peptide
  Seed: LRMKWMMAMKYPITA
LRMKIMMFMKYPFTA

SEQ ID NO: 228625 - protein, 15 aa, Artificial Sequence
  Description of Artificial Sequence: Synthetic peptide
  Seed: LRMKWMMAMKYPITA
LRMKIMMFMKYPGTA

SEQ ID NO: 228626 - protein, 15 aa, Artificial Sequence
  Description of Artificial Sequence: Synthetic peptide
  Seed: LRMKWMMAMKYPITA
LRMKIMMFMKYPHTA

SEQ ID NO: 228627 - protein, 15 aa, Artificial Sequence
  Description of Artificial Sequence: Synthetic peptide
  Seed: LRMKWMMAMKYPITA
LRMKIMMFMKYPITA

SEQ ID NO: 228628 - protein, 15 aa, Artificial Sequence
  Description of Artificial Sequence: Synthetic peptide
  Seed: LRMKWMMAMKYPITA
LRMKIMMFMKYPKTA

SEQ ID NO: 228629 - protein, 15 aa, Artificial Sequence
  Description of Artificial Sequence: Synthetic peptide
  Seed: LRMKWMMAMKYPITA
LRMKIMMFMKYPLTA

SEQ ID NO: 228630 - protein, 15 aa, Artificial Sequence
  Description of Artificial Sequence: Synthetic peptide
  Seed: LRMKWMMAMKYPITA
LRMKIMMFMKYPMTA

SEQ ID NO: 228631 - protein, 15 aa, Artificial Sequence
  Description of Artificial Sequence: Synthetic peptide
  Seed: LRMKWMMAMKYPITA
LRMKIMMFMKYPNTA

SEQ ID NO: 228632 - protein, 15 aa, Artificial Sequence
  Description of Artificial Sequence: Synthetic peptide
  Seed: LRMKWMMAMKYPITA
LRMKIMMFMKYPPTA

SEQ ID NO: 228633 - protein, 15 aa, Artificial Sequence
  Description of Artificial Sequence: Synthetic peptide
  Seed: LRMKWMMAMKYPITA
LRMKIMMFMKYPQTA

SEQ ID NO: 228634 - protein, 15 aa, Artificial Sequence
  Description of Artificial Sequence: Synthetic peptide
  Seed: LRMKWMMAMKYPITA
LRMKIMMFMKYPRTA

SEQ ID NO: 228635 - protein, 15 aa, Artificial Sequence
  Description of Artificial Sequence: Synthetic peptide
  Seed: LRMKWMMAMKYPITA
LRMKIMMFMKYPSTA

SEQ ID NO: 228636 - protein, 15 aa, Artificial Sequence
  Description of Artificial Sequence: Synthetic peptide
  Seed: LRMKWMMAMKYPITA
LRMKIMMFMKYPTTA

SEQ ID NO: 228637 - protein, 15 aa, Artificial Sequence
  Description of Artificial Sequence: Synthetic peptide
  Seed: LRMKWMMAMKYPITA
LRMKIMMFMKYPVTA

SEQ ID NO: 228638 - protein, 15 aa, Artificial Sequence
  Description of Artificial Sequence: Synthetic peptide
  Seed: LRMKWMMAMKYPITA
LRMKIMMFMKYPYTA

SEQ ID NO: 228639 - protein, 15 aa, Artificial Sequence
  Description of Artificial Sequence: Synthetic peptide
  Seed: LRMKWMMAMKYPITA
LRMKIMMFMNYPATA

SEQ ID NO: 228640 - protein, 15 aa, Artificial Sequence
  Description of Artificial Sequence: Synthetic peptide
  Seed: LRMKWMMAMKYPITA
LRMKIMMFMNYPDTA

SEQ ID NO: 228641 - protein, 15 aa, Artificial Sequence
  Description of Artificial Sequence: Synthetic peptide
  Seed: LRMKWMMAMKYPITA
LRMKIMMFMNYPETA

SEQ ID NO: 228642 - protein, 15 aa, Artificial Sequence
  Description of Artificial Sequence: Synthetic peptide
  Seed: LRMKWMMAMKYPITA
LRMKIMMFMNYPFTA

SEQ ID NO: 228643 - protein, 15 aa, Artificial Sequence
  Description of Artificial Sequence: Synthetic peptide
  Seed: LRMKWMMAMKYPITA
LRMKIMMFMNYPGTA

SEQ ID NO: 228644 - protein, 15 aa, Artificial Sequence
  Description of Artificial Sequence: Synthetic peptide
  Seed: LRMKWMMAMKYPITA
LRMKIMMFMNYPHTA

SEQ ID NO: 228645 - protein, 15 aa, Artificial Sequence
  Description of Artificial Sequence: Synthetic peptide
  Seed: LRMKWMMAMKYPITA
LRMKIMMFMNYPITA

SEQ ID NO: 228646 - protein, 15 aa, Artificial Sequence
  Description of Artificial Sequence: Synthetic peptide
  Seed: LRMKWMMAMKYPITA
LRMKIMMFMNYPKTA

SEQ ID NO: 228647 - protein, 15 aa, Artificial Sequence
  Description of Artificial Sequence: Synthetic peptide
  Seed: LRMKWMMAMKYPITA
LRMKIMMFMNYPLTA

SEQ ID NO: 228648 - protein, 15 aa, Artificial Sequence
  Description of Artificial Sequence: Synthetic peptide
  Seed: LRMKWMMAMKYPITA
LRMKIMMFMNYPMTA

SEQ ID NO: 228649 - protein, 15 aa, Artificial Sequence
  Description of Artificial Sequence: Synthetic peptide
  Seed: LRMKWMMAMKYPITA
LRMKIMMFMNYPNTA

SEQ ID NO: 228650 - protein, 15 aa, Artificial Sequence
  Description of Artificial Sequence: Synthetic peptide
  Seed: LRMKWMMAMKYPITA
LRMKIMMFMNYPQTA

SEQ ID NO: 228651 - protein, 15 aa, Artificial Sequence
  Description of Artificial Sequence: Synthetic peptide
  Seed: LRMKWMMAMKYPITA
LRMKIMMFMNYPRTA

SEQ ID NO: 228652 - protein, 15 aa, Artificial Sequence
  Description of Artificial Sequence: Synthetic peptide
  Seed: LRMKWMMAMKYPITA
LRMKIMMFMNYPSTA

SEQ ID NO: 228653 - protein, 15 aa, Artificial Sequence
  Description of Artificial Sequence: Synthetic peptide
  Seed: LRMKWMMAMKYPITA
LRMKIMMFMNYPTTA

SEQ ID NO: 228654 - protein, 15 aa, Artificial Sequence
  Description of Artificial Sequence: Synthetic peptide
  Seed: LRMKWMMAMKYPITA
LRMKIMMFMNYPVTA

SEQ ID NO: 228655 - protein, 15 aa, Artificial Sequence
  Description of Artificial Sequence: Synthetic peptide
  Seed: LRMKWMMAMKYPITA
LRMKIMMFMNYPYTA

SEQ ID NO: 228656 - protein, 15 aa, Artificial Sequence
  Description of Artificial Sequence: Synthetic peptide
  Seed: LRMKWMMAMKYPITA
LRMKIMMFMPYPATA

SEQ ID NO: 228657 - protein, 15 aa, Artificial Sequence
  Description of Artificial Sequence: Synthetic peptide
  Seed: LRMKWMMAMKYPITA
LRMKIMMFMPYPDTA

SEQ ID NO: 228658 - protein, 15 aa, Artificial Sequence
  Description of Artificial Sequence: Synthetic peptide
  Seed: LRMKWMMAMKYPITA
LRMKIMMFMPYPFTA

SEQ ID NO: 228659 - protein, 15 aa, Artificial Sequence
  Description of Artificial Sequence: Synthetic peptide
  Seed: LRMKWMMAMKYPITA
LRMKIMMFMPYPGTA

SEQ ID NO: 228660 - protein, 15 aa, Artificial Sequence
  Description of Artificial Sequence: Synthetic peptide
  Seed: LRMKWMMAMKYPITA
LRMKIMMFMPYPHTA

SEQ ID NO: 228661 - protein, 15 aa, Artificial Sequence
  Description of Artificial Sequence: Synthetic peptide
  Seed: LRMKWMMAMKYPITA
LRMKIMMFMPYPITA

SEQ ID NO: 228662 - protein, 15 aa, Artificial Sequence
  Description of Artificial Sequence: Synthetic peptide
  Seed: LRMKWMMAMKYPITA
LRMKIMMFMPYPKTA

SEQ ID NO: 228663 - protein, 15 aa, Artificial Sequence
  Description of Artificial Sequence: Synthetic peptide
  Seed: LRMKWMMAMKYPITA
LRMKIMMFMPYPLTA

SEQ ID NO: 228664 - protein, 15 aa, Artificial Sequence
  Description of Artificial Sequence: Synthetic peptide
  Seed: LRMKWMMAMKYPITA
LRMKIMMFMPYPMTA

SEQ ID NO: 228665 - protein, 15 aa, Artificial Sequence
  Description of Artificial Sequence: Synthetic peptide
  Seed: LRMKWMMAMKYPITA
LRMKIMMFMPYPNTA

SEQ ID NO: 228666 - protein, 15 aa, Artificial Sequence
  Description of Artificial Sequence: Synthetic peptide
  Seed: LRMKWMMAMKYPITA
LRMKIMMFMPYPQTA

SEQ ID NO: 228667 - protein, 15 aa, Artificial Sequence
  Description of Artificial Sequence: Synthetic peptide
  Seed: LRMKWMMAMKYPITA
LRMKIMMFMPYPRTA

SEQ ID NO: 228668 - protein, 15 aa, Artificial Sequence
  Description of Artificial Sequence: Synthetic peptide
  Seed: LRMKWMMAMKYPITA
LRMKIMMFMPYPSTA

SEQ ID NO: 228669 - protein, 15 aa, Artificial Sequence
  Description of Artificial Sequence: Synthetic peptide
  Seed: LRMKWMMAMKYPITA
LRMKIMMFMPYPTTA

SEQ ID NO: 228670 - protein, 15 aa, Artificial Sequence
  Description of Artificial Sequence: Synthetic peptide
  Seed: LRMKWMMAMKYPITA
LRMKIMMFMPYPVTA

SEQ ID NO: 228671 - protein, 15 aa, Artificial Sequence
  Description of Artificial Sequence: Synthetic peptide
  Seed: LRMKWMMAMKYPITA
LRMKIMMFMPYPYTA

SEQ ID NO: 228672 - protein, 15 aa, Artificial Sequence
  Description of Artificial Sequence: Synthetic peptide
  Seed: LRMKWMMAMKYPITA
LRMKIMMFMQYPRTA

SEQ ID NO: 228673 - protein, 15 aa, Artificial Sequence
  Description of Artificial Sequence: Synthetic peptide
  Seed: LRMKWMMAMKYPITA
LRMKIMMFMRYPATA

SEQ ID NO: 228674 - protein, 15 aa, Artificial Sequence
  Description of Artificial Sequence: Synthetic peptide
  Seed: LRMKWMMAMKYPITA
LRMKIMMFMRYPDTA

SEQ ID NO: 228675 - protein, 15 aa, Artificial Sequence
  Description of Artificial Sequence: Synthetic peptide
  Seed: LRMKWMMAMKYPITA
LRMKIMMFMRYPETA

SEQ ID NO: 228676 - protein, 15 aa, Artificial Sequence
  Description of Artificial Sequence: Synthetic peptide
  Seed: LRMKWMMAMKYPITA
LRMKIMMFMRYPFTA

SEQ ID NO: 228677 - protein, 15 aa, Artificial Sequence
  Description of Artificial Sequence: Synthetic peptide
  Seed: LRMKWMMAMKYPITA
LRMKIMMFMRYPGTA

SEQ ID NO: 228678 - protein, 15 aa, Artificial Sequence
  Description of Artificial Sequence: Synthetic peptide
  Seed: LRMKWMMAMKYPITA
LRMKIMMFMRYPHTA

SEQ ID NO: 228679 - protein, 15 aa, Artificial Sequence
  Description of Artificial Sequence: Synthetic peptide
  Seed: LRMKWMMAMKYPITA
LRMKIMMFMRYPITA

SEQ ID NO: 228680 - protein, 15 aa, Artificial Sequence
  Description of Artificial Sequence: Synthetic peptide
  Seed: LRMKWMMAMKYPITA
LRMKIMMFMRYPKTA

SEQ ID NO: 228681 - protein, 15 aa, Artificial Sequence
  Description of Artificial Sequence: Synthetic peptide
  Seed: LRMKWMMAMKYPITA
LRMKIMMFMRYPLTA

SEQ ID NO: 228682 - protein, 15 aa, Artificial Sequence
  Description of Artificial Sequence: Synthetic peptide
  Seed: LRMKWMMAMKYPITA
LRMKIMMFMRYPMTA

SEQ ID NO: 228683 - protein, 15 aa, Artificial Sequence
  Description of Artificial Sequence: Synthetic peptide
  Seed: LRMKWMMAMKYPITA
LRMKIMMFMRYPNTA

SEQ ID NO: 228684 - protein, 15 aa, Artificial Sequence
  Description of Artificial Sequence: Synthetic peptide
  Seed: LRMKWMMAMKYPITA
LRMKIMMFMRYPPTA

SEQ ID NO: 228685 - protein, 15 aa, Artificial Sequence
  Description of Artificial Sequence: Synthetic peptide
  Seed: LRMKWMMAMKYPITA
LRMKIMMFMRYPQTA

SEQ ID NO: 228686 - protein, 15 aa, Artificial Sequence
  Description of Artificial Sequence: Synthetic peptide
  Seed: LRMKWMMAMKYPITA
LRMKIMMFMRYPRTA

SEQ ID NO: 228687 - protein, 15 aa, Artificial Sequence
  Description of Artificial Sequence: Synthetic peptide
  Seed: LRMKWMMAMKYPITA
LRMKIMMFMRYPSTA

SEQ ID NO: 228688 - protein, 15 aa, Artificial Sequence
  Description of Artificial Sequence: Synthetic peptide
  Seed: LRMKWMMAMKYPITA
LRMKIMMFMRYPTTA

SEQ ID NO: 228689 - protein, 15 aa, Artificial Sequence
  Description of Artificial Sequence: Synthetic peptide
  Seed: LRMKWMMAMKYPITA
LRMKIMMFMRYPVTA

SEQ ID NO: 228690 - protein, 15 aa, Artificial Sequence
  Description of Artificial Sequence: Synthetic peptide
  Seed: LRMKWMMAMKYPITA
LRMKIMMFMRYPYTA

SEQ ID NO: 228691 - protein, 15 aa, Artificial Sequence
  Description of Artificial Sequence: Synthetic peptide
  Seed: LRMKWMMAMKYPITA
LRMKIMMFMSYPATA

SEQ ID NO: 228692 - protein, 15 aa, Artificial Sequence
  Description of Artificial Sequence: Synthetic peptide
  Seed: LRMKWMMAMKYPITA
LRMKIMMFMSYPDTA

SEQ ID NO: 228693 - protein, 15 aa, Artificial Sequence
  Description of Artificial Sequence: Synthetic peptide
  Seed: LRMKWMMAMKYPITA
LRMKIMMFMSYPETA

SEQ ID NO: 228694 - protein, 15 aa, Artificial Sequence
  Description of Artificial Sequence: Synthetic peptide
  Seed: LRMKWMMAMKYPITA
LRMKIMMFMSYPFTA

SEQ ID NO: 228695 - protein, 15 aa, Artificial Sequence
  Description of Artificial Sequence: Synthetic peptide
  Seed: LRMKWMMAMKYPITA
LRMKIMMFMSYPGTA

SEQ ID NO: 228696 - protein, 15 aa, Artificial Sequence
  Description of Artificial Sequence: Synthetic peptide
  Seed: LRMKWMMAMKYPITA
LRMKIMMFMSYPHTA

SEQ ID NO: 228697 - protein, 15 aa, Artificial Sequence
  Description of Artificial Sequence: Synthetic peptide
  Seed: LRMKWMMAMKYPITA
LRMKIMMFMSYPITA

SEQ ID NO: 228698 - protein, 15 aa, Artificial Sequence
  Description of Artificial Sequence: Synthetic peptide
  Seed: LRMKWMMAMKYPITA
LRMKIMMFMSYPKTA

SEQ ID NO: 228699 - protein, 15 aa, Artificial Sequence
  Description of Artificial Sequence: Synthetic peptide
  Seed: LRMKWMMAMKYPITA
LRMKIMMFMSYPLTA

SEQ ID NO: 228700 - protein, 15 aa, Artificial Sequence
  Description of Artificial Sequence: Synthetic peptide
  Seed: LRMKWMMAMKYPITA
LRMKIMMFMSYPMTA

SEQ ID NO: 228701 - protein, 15 aa, Artificial Sequence
  Description of Artificial Sequence: Synthetic peptide
  Seed: LRMKWMMAMKYPITA
LRMKIMMFMSYPNTA

SEQ ID NO: 228702 - protein, 15 aa, Artificial Sequence
  Description of Artificial Sequence: Synthetic peptide
  Seed: LRMKWMMAMKYPITA
LRMKIMMFMSYPQTA

SEQ ID NO: 228703 - protein, 15 aa, Artificial Sequence
  Description of Artificial Sequence: Synthetic peptide
  Seed: LRMKWMMAMKYPITA
LRMKIMMFMSYPRTA

SEQ ID NO: 228704 - protein, 15 aa, Artificial Sequence
  Description of Artificial Sequence: Synthetic peptide
  Seed: LRMKWMMAMKYPITA
LRMKIMMFMSYPSTA

SEQ ID NO: 228705 - protein, 15 aa, Artificial Sequence
  Description of Artificial Sequence: Synthetic peptide
  Seed: LRMKWMMAMKYPITA
LRMKIMMFMSYPTTA

SEQ ID NO: 228706 - protein, 15 aa, Artificial Sequence
  Description of Artificial Sequence: Synthetic peptide
  Seed: LRMKWMMAMKYPITA
LRMKIMMFMSYPVTA

SEQ ID NO: 228707 - protein, 15 aa, Artificial Sequence
  Description of Artificial Sequence: Synthetic peptide
  Seed: LRMKWMMAMKYPITA
LRMKIMMFMSYPYTA

SEQ ID NO: 228708 - protein, 15 aa, Artificial Sequence
  Description of Artificial Sequence: Synthetic peptide
  Seed: LRMKWMMAMKYPITA
LRMKIMMFMTYPATA

SEQ ID NO: 228709 - protein, 15 aa, Artificial Sequence
  Description of Artificial Sequence: Synthetic peptide
  Seed: LRMKWMMAMKYPITA
LRMKIMMFMTYPDTA

SEQ ID NO: 228710 - protein, 15 aa, Artificial Sequence
  Description of Artificial Sequence: Synthetic peptide
  Seed: LRMKWMMAMKYPITA
LRMKIMMFMTYPETA

SEQ ID NO: 228711 - protein, 15 aa, Artificial Sequence
  Description of Artificial Sequence: Synthetic peptide
  Seed: LRMKWMMAMKYPITA
LRMKIMMFMTYPGTA

SEQ ID NO: 228712 - protein, 15 aa, Artificial Sequence
  Description of Artificial Sequence: Synthetic peptide
  Seed: LRMKWMMAMKYPITA
LRMKIMMFMTYPHTA

SEQ ID NO: 228713 - protein, 15 aa, Artificial Sequence
  Description of Artificial Sequence: Synthetic peptide
  Seed: LRMKWMMAMKYPITA
LRMKIMMFMTYPITA

SEQ ID NO: 228714 - protein, 15 aa, Artificial Sequence
  Description of Artificial Sequence: Synthetic peptide
  Seed: LRMKWMMAMKYPITA
LRMKIMMFMTYPKTA

SEQ ID NO: 228715 - protein, 15 aa, Artificial Sequence
  Description of Artificial Sequence: Synthetic peptide
  Seed: LRMKWMMAMKYPITA
LRMKIMMFMTYPLTA

SEQ ID NO: 228716 - protein, 15 aa, Artificial Sequence
  Description of Artificial Sequence: Synthetic peptide
  Seed: LRMKWMMAMKYPITA
LRMKIMMFMTYPMTA

SEQ ID NO: 228717 - protein, 15 aa, Artificial Sequence
  Description of Artificial Sequence: Synthetic peptide
  Seed: LRMKWMMAMKYPITA
LRMKIMMFMTYPNTA

SEQ ID NO: 228718 - protein, 15 aa, Artificial Sequence
  Description of Artificial Sequence: Synthetic peptide
  Seed: LRMKWMMAMKYPITA
LRMKIMMFMTYPQTA

SEQ ID NO: 228719 - protein, 15 aa, Artificial Sequence
  Description of Artificial Sequence: Synthetic peptide
  Seed: LRMKWMMAMKYPITA
LRMKIMMFMTYPRTA

SEQ ID NO: 228720 - protein, 15 aa, Artificial Sequence
  Description of Artificial Sequence: Synthetic peptide
  Seed: LRMKWMMAMKYPITA
LRMKIMMFMTYPSTA

SEQ ID NO: 228721 - protein, 15 aa, Artificial Sequence
  Description of Artificial Sequence: Synthetic peptide
  Seed: LRMKWMMAMKYPITA
LRMKIMMFMTYPTTA

SEQ ID NO: 228722 - protein, 15 aa, Artificial Sequence
  Description of Artificial Sequence: Synthetic peptide
  Seed: LRMKWMMAMKYPITA
LRMKIMMFMTYPVTA

SEQ ID NO: 228723 - protein, 15 aa, Artificial Sequence
  Description of Artificial Sequence: Synthetic peptide
  Seed: LRMKWMMAMKYPITA
LRMKIMMFMTYPYTA

SEQ ID NO: 228724 - protein, 15 aa, Artificial Sequence
  Description of Artificial Sequence: Synthetic peptide
  Seed: LRMKWMMAMKYPITA
LRMKIMMFMVYPATA

SEQ ID NO: 228725 - protein, 15 aa, Artificial Sequence
  Description of Artificial Sequence: Synthetic peptide
  Seed: LRMKWMMAMKYPITA
LRMKIMMFMVYPDTA

SEQ ID NO: 228726 - protein, 15 aa, Artificial Sequence
  Description of Artificial Sequence: Synthetic peptide
  Seed: LRMKWMMAMKYPITA
LRMKIMMFMVYPETA

SEQ ID NO: 228727 - protein, 15 aa, Artificial Sequence
  Description of Artificial Sequence: Synthetic peptide
  Seed: LRMKWMMAMKYPITA
LRMKIMMFMVYPHTA

SEQ ID NO: 228728 - protein, 15 aa, Artificial Sequence
  Description of Artificial Sequence: Synthetic peptide
  Seed: LRMKWMMAMKYPITA
LRMKIMMFMVYPMTA

SEQ ID NO: 228729 - protein, 15 aa, Artificial Sequence
  Description of Artificial Sequence: Synthetic peptide
  Seed: LRMKWMMAMKYPITA
LRMKIMMFMVYPNTA

SEQ ID NO: 228730 - protein, 15 aa, Artificial Sequence
  Description of Artificial Sequence: Synthetic peptide
  Seed: LRMKWMMAMKYPITA
LRMKIMMFMVYPQTA

SEQ ID NO: 228731 - protein, 15 aa, Artificial Sequence
  Description of Artificial Sequence: Synthetic peptide
  Seed: LRMKWMMAMKYPITA
LRMKIMMFMVYPRTA

SEQ ID NO: 228732 - protein, 15 aa, Artificial Sequence
  Description of Artificial Sequence: Synthetic peptide
  Seed: LRMKWMMAMKYPITA
LRMKIMMFMVYPSTA

SEQ ID NO: 228733 - protein, 15 aa, Artificial Sequence
  Description of Artificial Sequence: Synthetic peptide
  Seed: LRMKWMMAMKYPITA
LRMKIMMGMAYPATA

SEQ ID NO: 228734 - protein, 15 aa, Artificial Sequence
  Description of Artificial Sequence: Synthetic peptide
  Seed: LRMKWMMAMKYPITA
LRMKIMMGMAYPCTA

SEQ ID NO: 228735 - protein, 15 aa, Artificial Sequence
  Description of Artificial Sequence: Synthetic peptide
  Seed: LRMKWMMAMKYPITA
LRMKIMMGMAYPETA

SEQ ID NO: 228736 - protein, 15 aa, Artificial Sequence
  Description of Artificial Sequence: Synthetic peptide
  Seed: LRMKWMMAMKYPITA
LRMKIMMGMAYPFTA

SEQ ID NO: 228737 - protein, 15 aa, Artificial Sequence
  Description of Artificial Sequence: Synthetic peptide
  Seed: LRMKWMMAMKYPITA
LRMKIMMGMAYPGTA

SEQ ID NO: 228738 - protein, 15 aa, Artificial Sequence
  Description of Artificial Sequence: Synthetic peptide
  Seed: LRMKWMMAMKYPITA
LRMKIMMGMAYPHTA

SEQ ID NO: 228739 - protein, 15 aa, Artificial Sequence
  Description of Artificial Sequence: Synthetic peptide
  Seed: LRMKWMMAMKYPITA
LRMKIMMGMAYPITA

SEQ ID NO: 228740 - protein, 15 aa, Artificial Sequence
  Description of Artificial Sequence: Synthetic peptide
  Seed: LRMKWMMAMKYPITA
LRMKIMMGMAYPKTA

SEQ ID NO: 228741 - protein, 15 aa, Artificial Sequence
  Description of Artificial Sequence: Synthetic peptide
  Seed: LRMKWMMAMKYPITA
LRMKIMMGMAYPLTA

SEQ ID NO: 228742 - protein, 15 aa, Artificial Sequence
  Description of Artificial Sequence: Synthetic peptide
  Seed: LRMKWMMAMKYPITA
LRMKIMMGMAYPMTA

SEQ ID NO: 228743 - protein, 15 aa, Artificial Sequence
  Description of Artificial Sequence: Synthetic peptide
  Seed: LRMKWMMAMKYPITA
LRMKIMMGMAYPNTA

SEQ ID NO: 228744 - protein, 15 aa, Artificial Sequence
  Description of Artificial Sequence: Synthetic peptide
  Seed: LRMKWMMAMKYPITA
LRMKIMMGMAYPPTA

SEQ ID NO: 228745 - protein, 15 aa, Artificial Sequence
  Description of Artificial Sequence: Synthetic peptide
  Seed: LRMKWMMAMKYPITA
LRMKIMMGMAYPQTA

SEQ ID NO: 228746 - protein, 15 aa, Artificial Sequence
  Description of Artificial Sequence: Synthetic peptide
  Seed: LRMKWMMAMKYPITA
LRMKIMMGMAYPRTA

SEQ ID NO: 228747 - protein, 15 aa, Artificial Sequence
  Description of Artificial Sequence: Synthetic peptide
  Seed: LRMKWMMAMKYPITA
LRMKIMMGMAYPSTA

SEQ ID NO: 228748 - protein, 15 aa, Artificial Sequence
  Description of Artificial Sequence: Synthetic peptide
  Seed: LRMKWMMAMKYPITA
LRMKIMMGMAYPTTA

SEQ ID NO: 228749 - protein, 15 aa, Artificial Sequence
  Description of Artificial Sequence: Synthetic peptide
  Seed: LRMKWMMAMKYPITA
LRMKIMMGMAYPVTA

SEQ ID NO: 228750 - protein, 15 aa, Artificial Sequence
  Description of Artificial Sequence: Synthetic peptide
  Seed: LRMKWMMAMKYPITA
LRMKIMMGMAYPWTA

SEQ ID NO: 228751 - protein, 15 aa, Artificial Sequence
  Description of Artificial Sequence: Synthetic peptide
  Seed: LRMKWMMAMKYPITA
LRMKIMMGMAYPYTA

SEQ ID NO: 228752 - protein, 15 aa, Artificial Sequence
  Description of Artificial Sequence: Synthetic peptide
  Seed: LRMKWMMAMKYPITA
LRMKIMMGMCYPATA

SEQ ID NO: 228753 - protein, 15 aa, Artificial Sequence
  Description of Artificial Sequence: Synthetic peptide
  Seed: LRMKWMMAMKYPITA
LRMKIMMGMCYPITA

SEQ ID NO: 228754 - protein, 15 aa, Artificial Sequence
  Description of Artificial Sequence: Synthetic peptide
  Seed: LRMKWMMAMKYPITA
LRMKIMMGMCYPLTA

SEQ ID NO: 228755 - protein, 15 aa, Artificial Sequence
  Description of Artificial Sequence: Synthetic peptide
  Seed: LRMKWMMAMKYPITA
LRMKIMMGMCYPVTA

SEQ ID NO: 228756 - protein, 15 aa, Artificial Sequence
  Description of Artificial Sequence: Synthetic peptide
  Seed: LRMKWMMAMKYPITA
LRMKIMMGMDYPITA

SEQ ID NO: 228757 - protein, 15 aa, Artificial Sequence
  Description of Artificial Sequence: Synthetic peptide
  Seed: LRMKWMMAMKYPITA
LRMKIMMGMDYPLTA

SEQ ID NO: 228758 - protein, 15 aa, Artificial Sequence
  Description of Artificial Sequence: Synthetic peptide
  Seed: LRMKWMMAMKYPITA
LRMKIMMGMDYPVTA

SEQ ID NO: 228759 - protein, 15 aa, Artificial Sequence
  Description of Artificial Sequence: Synthetic peptide
  Seed: LRMKWMMAMKYPITA
LRMKIMMGMEYPLTA

SEQ ID NO: 228760 - protein, 15 aa, Artificial Sequence
  Description of Artificial Sequence: Synthetic peptide
  Seed: LRMKWMMAMKYPITA
LRMKIMMGMGYPATA

SEQ ID NO: 228761 - protein, 15 aa, Artificial Sequence
  Description of Artificial Sequence: Synthetic peptide
  Seed: LRMKWMMAMKYPITA
LRMKIMMGMGYPCTA

SEQ ID NO: 228762 - protein, 15 aa, Artificial Sequence
  Description of Artificial Sequence: Synthetic peptide
  Seed: LRMKWMMAMKYPITA
LRMKIMMGMGYPFTA

SEQ ID NO: 228763 - protein, 15 aa, Artificial Sequence
  Description of Artificial Sequence: Synthetic peptide
  Seed: LRMKWMMAMKYPITA
LRMKIMMGMGYPGTA

SEQ ID NO: 228764 - protein, 15 aa, Artificial Sequence
  Description of Artificial Sequence: Synthetic peptide
  Seed: LRMKWMMAMKYPITA
LRMKIMMGMGYPHTA

SEQ ID NO: 228765 - protein, 15 aa, Artificial Sequence
  Description of Artificial Sequence: Synthetic peptide
  Seed: LRMKWMMAMKYPITA
LRMKIMMGMGYPITA

SEQ ID NO: 228766 - protein, 15 aa, Artificial Sequence
  Description of Artificial Sequence: Synthetic peptide
  Seed: LRMKWMMAMKYPITA
LRMKIMMGMGYPLTA

SEQ ID NO: 228767 - protein, 15 aa, Artificial Sequence
  Description of Artificial Sequence: Synthetic peptide
  Seed: LRMKWMMAMKYPITA
LRMKIMMGMGYPMTA

SEQ ID NO: 228768 - protein, 15 aa, Artificial Sequence
  Description of Artificial Sequence: Synthetic peptide
  Seed: LRMKWMMAMKYPITA
LRMKIMMGMGYPNTA

SEQ ID NO: 228769 - protein, 15 aa, Artificial Sequence
  Description of Artificial Sequence: Synthetic peptide
  Seed: LRMKWMMAMKYPITA
LRMKIMMGMGYPQTA

SEQ ID NO: 228770 - protein, 15 aa, Artificial Sequence
  Description of Artificial Sequence: Synthetic peptide
  Seed: LRMKWMMAMKYPITA
LRMKIMMGMGYPRTA

SEQ ID NO: 228771 - protein, 15 aa, Artificial Sequence
  Description of Artificial Sequence: Synthetic peptide
  Seed: LRMKWMMAMKYPITA
LRMKIMMGMGYPSTA

SEQ ID NO: 228772 - protein, 15 aa, Artificial Sequence
  Description of Artificial Sequence: Synthetic peptide
  Seed: LRMKWMMAMKYPITA
LRMKIMMGMGYPTTA

SEQ ID NO: 228773 - protein, 15 aa, Artificial Sequence
  Description of Artificial Sequence: Synthetic peptide
  Seed: LRMKWMMAMKYPITA
LRMKIMMGMGYPVTA

SEQ ID NO: 228774 - protein, 15 aa, Artificial Sequence
  Description of Artificial Sequence: Synthetic peptide
  Seed: LRMKWMMAMKYPITA
LRMKIMMGMGYPYTA

SEQ ID NO: 228775 - protein, 15 aa, Artificial Sequence
  Description of Artificial Sequence: Synthetic peptide
  Seed: LRMKWMMAMKYPITA
LRMKIMMGMHYPFTA

SEQ ID NO: 228776 - protein, 15 aa, Artificial Sequence
  Description of Artificial Sequence: Synthetic peptide
  Seed: LRMKWMMAMKYPITA
LRMKIMMGMHYPITA

SEQ ID NO: 228777 - protein, 15 aa, Artificial Sequence
  Description of Artificial Sequence: Synthetic peptide
  Seed: LRMKWMMAMKYPITA
LRMKIMMGMHYPLTA

SEQ ID NO: 228778 - protein, 15 aa, Artificial Sequence
  Description of Artificial Sequence: Synthetic peptide
  Seed: LRMKWMMAMKYPITA
LRMKIMMGMHYPMTA

SEQ ID NO: 228779 - protein, 15 aa, Artificial Sequence
  Description of Artificial Sequence: Synthetic peptide
  Seed: LRMKWMMAMKYPITA
LRMKIMMGMHYPRTA

SEQ ID NO: 228780 - protein, 15 aa, Artificial Sequence
  Description of Artificial Sequence: Synthetic peptide
  Seed: LRMKWMMAMKYPITA
LRMKIMMGMHYPVTA

SEQ ID NO: 228781 - protein, 15 aa, Artificial Sequence
  Description of Artificial Sequence: Synthetic peptide
  Seed: LRMKWMMAMKYPITA
LRMKIMMGMHYPYTA

SEQ ID NO: 228782 - protein, 15 aa, Artificial Sequence
  Description of Artificial Sequence: Synthetic peptide
  Seed: LRMKWMMAMKYPITA
LRMKIMMGMIYPATA

SEQ ID NO: 228783 - protein, 15 aa, Artificial Sequence
  Description of Artificial Sequence: Synthetic peptide
  Seed: LRMKWMMAMKYPITA
LRMKIMMGMIYPITA

SEQ ID NO: 228784 - protein, 15 aa, Artificial Sequence
  Description of Artificial Sequence: Synthetic peptide
  Seed: LRMKWMMAMKYPITA
LRMKIMMGMIYPLTA

SEQ ID NO: 228785 - protein, 15 aa, Artificial Sequence
  Description of Artificial Sequence: Synthetic peptide
  Seed: LRMKWMMAMKYPITA
LRMKIMMGMIYPMTA

SEQ ID NO: 228786 - protein, 15 aa, Artificial Sequence
  Description of Artificial Sequence: Synthetic peptide
  Seed: LRMKWMMAMKYPITA
LRMKIMMGMIYPNTA

SEQ ID NO: 228787 - protein, 15 aa, Artificial Sequence
  Description of Artificial Sequence: Synthetic peptide
  Seed: LRMKWMMAMKYPITA
LRMKIMMGMIYPRTA

SEQ ID NO: 228788 - protein, 15 aa, Artificial Sequence
  Description of Artificial Sequence: Synthetic peptide
  Seed: LRMKWMMAMKYPITA
LRMKIMMGMIYPSTA

SEQ ID NO: 228789 - protein, 15 aa, Artificial Sequence
  Description of Artificial Sequence: Synthetic peptide
  Seed: LRMKWMMAMKYPITA
LRMKIMMGMIYPTTA

SEQ ID NO: 228790 - protein, 15 aa, Artificial Sequence
  Description of Artificial Sequence: Synthetic peptide
  Seed: LRMKWMMAMKYPITA
LRMKIMMGMIYPVTA

SEQ ID NO: 228791 - protein, 15 aa, Artificial Sequence
  Description of Artificial Sequence: Synthetic peptide
  Seed: LRMKWMMAMKYPITA
LRMKIMMGMKYPATA

SEQ ID NO: 228792 - protein, 15 aa, Artificial Sequence
  Description of Artificial Sequence: Synthetic peptide
  Seed: LRMKWMMAMKYPITA
LRMKIMMGMKYPFTA

SEQ ID NO: 228793 - protein, 15 aa, Artificial Sequence
  Description of Artificial Sequence: Synthetic peptide
  Seed: LRMKWMMAMKYPITA
LRMKIMMGMKYPGTA

SEQ ID NO: 228794 - protein, 15 aa, Artificial Sequence
  Description of Artificial Sequence: Synthetic peptide
  Seed: LRMKWMMAMKYPITA
LRMKIMMGMKYPHTA

SEQ ID NO: 228795 - protein, 15 aa, Artificial Sequence
  Description of Artificial Sequence: Synthetic peptide
  Seed: LRMKWMMAMKYPITA
LRMKIMMGMKYPITA

SEQ ID NO: 228796 - protein, 15 aa, Artificial Sequence
  Description of Artificial Sequence: Synthetic peptide
  Seed: LRMKWMMAMKYPITA
LRMKIMMGMKYPKTA

SEQ ID NO: 228797 - protein, 15 aa, Artificial Sequence
  Description of Artificial Sequence: Synthetic peptide
  Seed: LRMKWMMAMKYPITA
LRMKIMMGMKYPLTA

SEQ ID NO: 228798 - protein, 15 aa, Artificial Sequence
  Description of Artificial Sequence: Synthetic peptide
  Seed: LRMKWMMAMKYPITA
LRMKIMMGMKYPMTA

SEQ ID NO: 228799 - protein, 15 aa, Artificial Sequence
  Description of Artificial Sequence: Synthetic peptide
  Seed: LRMKWMMAMKYPITA
LRMKIMMGMKYPQTA

SEQ ID NO: 228800 - protein, 15 aa, Artificial Sequence
  Description of Artificial Sequence: Synthetic peptide
  Seed: LRMKWMMAMKYPITA
LRMKIMMGMKYPRTA

SEQ ID NO: 228801 - protein, 15 aa, Artificial Sequence
  Description of Artificial Sequence: Synthetic peptide
  Seed: LRMKWMMAMKYPITA
LRMKIMMGMKYPSTA

SEQ ID NO: 228802 - protein, 15 aa, Artificial Sequence
  Description of Artificial Sequence: Synthetic peptide
  Seed: LRMKWMMAMKYPITA
LRMKIMMGMKYPTTA

SEQ ID NO: 228803 - protein, 15 aa, Artificial Sequence
  Description of Artificial Sequence: Synthetic peptide
  Seed: LRMKWMMAMKYPITA
LRMKIMMGMKYPVTA

SEQ ID NO: 228804 - protein, 15 aa, Artificial Sequence
  Description of Artificial Sequence: Synthetic peptide
  Seed: LRMKWMMAMKYPITA
LRMKIMMGMKYPYTA

SEQ ID NO: 228805 - protein, 15 aa, Artificial Sequence
  Description of Artificial Sequence: Synthetic peptide
  Seed: LRMKWMMAMKYPITA
LRMKIMMGMLYPITA

SEQ ID NO: 228806 - protein, 15 aa, Artificial Sequence
  Description of Artificial Sequence: Synthetic peptide
  Seed: LRMKWMMAMKYPITA
LRMKIMMGMLYPLTA

SEQ ID NO: 228807 - protein, 15 aa, Artificial Sequence
  Description of Artificial Sequence: Synthetic peptide
  Seed: LRMKWMMAMKYPITA
LRMKIMMGMLYPSTA

SEQ ID NO: 228808 - protein, 15 aa, Artificial Sequence
  Description of Artificial Sequence: Synthetic peptide
  Seed: LRMKWMMAMKYPITA
LRMKIMMGMLYPVTA

SEQ ID NO: 228809 - protein, 15 aa, Artificial Sequence
  Description of Artificial Sequence: Synthetic peptide
  Seed: LRMKWMMAMKYPITA
LRMKIMMGMMYPATA

SEQ ID NO: 228810 - protein, 15 aa, Artificial Sequence
  Description of Artificial Sequence: Synthetic peptide
  Seed: LRMKWMMAMKYPITA
LRMKIMMGMMYPITA

SEQ ID NO: 228811 - protein, 15 aa, Artificial Sequence
  Description of Artificial Sequence: Synthetic peptide
  Seed: LRMKWMMAMKYPITA
LRMKIMMGMMYPLTA

SEQ ID NO: 228812 - protein, 15 aa, Artificial Sequence
  Description of Artificial Sequence: Synthetic peptide
  Seed: LRMKWMMAMKYPITA
LRMKIMMGMMYPMTA

SEQ ID NO: 228813 - protein, 15 aa, Artificial Sequence
  Description of Artificial Sequence: Synthetic peptide
  Seed: LRMKWMMAMKYPITA
LRMKIMMGMMYPRTA

SEQ ID NO: 228814 - protein, 15 aa, Artificial Sequence
  Description of Artificial Sequence: Synthetic peptide
  Seed: LRMKWMMAMKYPITA
LRMKIMMGMMYPVTA

SEQ ID NO: 228815 - protein, 15 aa, Artificial Sequence
  Description of Artificial Sequence: Synthetic peptide
  Seed: LRMKWMMAMKYPITA
LRMKIMMGMNYPATA

SEQ ID NO: 228816 - protein, 15 aa, Artificial Sequence
  Description of Artificial Sequence: Synthetic peptide
  Seed: LRMKWMMAMKYPITA
LRMKIMMGMNYPCTA

SEQ ID NO: 228817 - protein, 15 aa, Artificial Sequence
  Description of Artificial Sequence: Synthetic peptide
  Seed: LRMKWMMAMKYPITA
LRMKIMMGMNYPFTA

SEQ ID NO: 228818 - protein, 15 aa, Artificial Sequence
  Description of Artificial Sequence: Synthetic peptide
  Seed: LRMKWMMAMKYPITA
LRMKIMMGMNYPGTA

SEQ ID NO: 228819 - protein, 15 aa, Artificial Sequence
  Description of Artificial Sequence: Synthetic peptide
  Seed: LRMKWMMAMKYPITA
LRMKIMMGMNYPITA

SEQ ID NO: 228820 - protein, 15 aa, Artificial Sequence
  Description of Artificial Sequence: Synthetic peptide
  Seed: LRMKWMMAMKYPITA
LRMKIMMGMNYPLTA

SEQ ID NO: 228821 - protein, 15 aa, Artificial Sequence
  Description of Artificial Sequence: Synthetic peptide
  Seed: LRMKWMMAMKYPITA
LRMKIMMGMNYPMTA

SEQ ID NO: 228822 - protein, 15 aa, Artificial Sequence
  Description of Artificial Sequence: Synthetic peptide
  Seed: LRMKWMMAMKYPITA
LRMKIMMGMNYPRTA

SEQ ID NO: 228823 - protein, 15 aa, Artificial Sequence
  Description of Artificial Sequence: Synthetic peptide
  Seed: LRMKWMMAMKYPITA
LRMKIMMGMNYPSTA

SEQ ID NO: 228824 - protein, 15 aa, Artificial Sequence
  Description of Artificial Sequence: Synthetic peptide
  Seed: LRMKWMMAMKYPITA
LRMKIMMGMNYPTTA

SEQ ID NO: 228825 - protein, 15 aa, Artificial Sequence
  Description of Artificial Sequence: Synthetic peptide
  Seed: LRMKWMMAMKYPITA
LRMKIMMGMNYPVTA

SEQ ID NO: 228826 - protein, 15 aa, Artificial Sequence
  Description of Artificial Sequence: Synthetic peptide
  Seed: LRMKWMMAMKYPITA
LRMKIMMGMNYPYTA

SEQ ID NO: 228827 - protein, 15 aa, Artificial Sequence
  Description of Artificial Sequence: Synthetic peptide
  Seed: LRMKWMMAMKYPITA
LRMKIMMGMPYPATA

SEQ ID NO: 228828 - protein, 15 aa, Artificial Sequence
  Description of Artificial Sequence: Synthetic peptide
  Seed: LRMKWMMAMKYPITA
LRMKIMMGMPYPCTA

SEQ ID NO: 228829 - protein, 15 aa, Artificial Sequence
  Description of Artificial Sequence: Synthetic peptide
  Seed: LRMKWMMAMKYPITA
LRMKIMMGMPYPFTA

SEQ ID NO: 228830 - protein, 15 aa, Artificial Sequence
  Description of Artificial Sequence: Synthetic peptide
  Seed: LRMKWMMAMKYPITA
LRMKIMMGMPYPGTA

SEQ ID NO: 228831 - protein, 15 aa, Artificial Sequence
  Description of Artificial Sequence: Synthetic peptide
  Seed: LRMKWMMAMKYPITA
LRMKIMMGMPYPITA

SEQ ID NO: 228832 - protein, 15 aa, Artificial Sequence
  Description of Artificial Sequence: Synthetic peptide
  Seed: LRMKWMMAMKYPITA
LRMKIMMGMPYPLTA

SEQ ID NO: 228833 - protein, 15 aa, Artificial Sequence
  Description of Artificial Sequence: Synthetic peptide
  Seed: LRMKWMMAMKYPITA
LRMKIMMGMPYPMTA

SEQ ID NO: 228834 - protein, 15 aa, Artificial Sequence
  Description of Artificial Sequence: Synthetic peptide
  Seed: LRMKWMMAMKYPITA
LRMKIMMGMPYPNTA

SEQ ID NO: 228835 - protein, 15 aa, Artificial Sequence
  Description of Artificial Sequence: Synthetic peptide
  Seed: LRMKWMMAMKYPITA
LRMKIMMGMPYPQTA

SEQ ID NO: 228836 - protein, 15 aa, Artificial Sequence
  Description of Artificial Sequence: Synthetic peptide
  Seed: LRMKWMMAMKYPITA
LRMKIMMGMPYPRTA

SEQ ID NO: 228837 - protein, 15 aa, Artificial Sequence
  Description of Artificial Sequence: Synthetic peptide
  Seed: LRMKWMMAMKYPITA
LRMKIMMGMPYPSTA

SEQ ID NO: 228838 - protein, 15 aa, Artificial Sequence
  Description of Artificial Sequence: Synthetic peptide
  Seed: LRMKWMMAMKYPITA
LRMKIMMGMPYPTTA

SEQ ID NO: 228839 - protein, 15 aa, Artificial Sequence
  Description of Artificial Sequence: Synthetic peptide
  Seed: LRMKWMMAMKYPITA
LRMKIMMGMPYPVTA

SEQ ID NO: 228840 - protein, 15 aa, Artificial Sequence
  Description of Artificial Sequence: Synthetic peptide
  Seed: LRMKWMMAMKYPITA
LRMKIMMGMPYPWTA

SEQ ID NO: 228841 - protein, 15 aa, Artificial Sequence
  Description of Artificial Sequence: Synthetic peptide
  Seed: LRMKWMMAMKYPITA
LRMKIMMGMPYPYTA

SEQ ID NO: 228842 - protein, 15 aa, Artificial Sequence
  Description of Artificial Sequence: Synthetic peptide
  Seed: LRMKWMMAMKYPITA
LRMKIMMGMQYPITA

SEQ ID NO: 228843 - protein, 15 aa, Artificial Sequence
  Description of Artificial Sequence: Synthetic peptide
  Seed: LRMKWMMAMKYPITA
LRMKIMMGMQYPLTA

SEQ ID NO: 228844 - protein, 15 aa, Artificial Sequence
  Description of Artificial Sequence: Synthetic peptide
  Seed: LRMKWMMAMKYPITA
LRMKIMMGMQYPMTA

SEQ ID NO: 228845 - protein, 15 aa, Artificial Sequence
  Description of Artificial Sequence: Synthetic peptide
  Seed: LRMKWMMAMKYPITA
LRMKIMMGMQYPVTA

SEQ ID NO: 228846 - protein, 15 aa, Artificial Sequence
  Description of Artificial Sequence: Synthetic peptide
  Seed: LRMKWMMAMKYPITA
LRMKIMMGMRYPATA

SEQ ID NO: 228847 - protein, 15 aa, Artificial Sequence
  Description of Artificial Sequence: Synthetic peptide
  Seed: LRMKWMMAMKYPITA
LRMKIMMGMRYPCTA

SEQ ID NO: 228848 - protein, 15 aa, Artificial Sequence
  Description of Artificial Sequence: Synthetic peptide
  Seed: LRMKWMMAMKYPITA
LRMKIMMGMRYPETA

SEQ ID NO: 228849 - protein, 15 aa, Artificial Sequence
  Description of Artificial Sequence: Synthetic peptide
  Seed: LRMKWMMAMKYPITA
LRMKIMMGMRYPFTA

SEQ ID NO: 228850 - protein, 15 aa, Artificial Sequence
  Description of Artificial Sequence: Synthetic peptide
  Seed: LRMKWMMAMKYPITA
LRMKIMMGMRYPGTA

SEQ ID NO: 228851 - protein, 15 aa, Artificial Sequence
  Description of Artificial Sequence: Synthetic peptide
  Seed: LRMKWMMAMKYPITA
LRMKIMMGMRYPHTA

SEQ ID NO: 228852 - protein, 15 aa, Artificial Sequence
  Description of Artificial Sequence: Synthetic peptide
  Seed: LRMKWMMAMKYPITA
LRMKIMMGMRYPITA

SEQ ID NO: 228853 - protein, 15 aa, Artificial Sequence
  Description of Artificial Sequence: Synthetic peptide
  Seed: LRMKWMMAMKYPITA
LRMKIMMGMRYPKTA

SEQ ID NO: 228854 - protein, 15 aa, Artificial Sequence
  Description of Artificial Sequence: Synthetic peptide
  Seed: LRMKWMMAMKYPITA
LRMKIMMGMRYPLTA

SEQ ID NO: 228855 - protein, 15 aa, Artificial Sequence
  Description of Artificial Sequence: Synthetic peptide
  Seed: LRMKWMMAMKYPITA
LRMKIMMGMRYPMTA

SEQ ID NO: 228856 - protein, 15 aa, Artificial Sequence
  Description of Artificial Sequence: Synthetic peptide
  Seed: LRMKWMMAMKYPITA
LRMKIMMGMRYPNTA

SEQ ID NO: 228857 - protein, 15 aa, Artificial Sequence
  Description of Artificial Sequence: Synthetic peptide
  Seed: LRMKWMMAMKYPITA
LRMKIMMGMRYPPTA

SEQ ID NO: 228858 - protein, 15 aa, Artificial Sequence
  Description of Artificial Sequence: Synthetic peptide
  Seed: LRMKWMMAMKYPITA
LRMKIMMGMRYPQTA

SEQ ID NO: 228859 - protein, 15 aa, Artificial Sequence
  Description of Artificial Sequence: Synthetic peptide
  Seed: LRMKWMMAMKYPITA
LRMKIMMGMRYPRTA

SEQ ID NO: 228860 - protein, 15 aa, Artificial Sequence
  Description of Artificial Sequence: Synthetic peptide
  Seed: LRMKWMMAMKYPITA
LRMKIMMGMRYPSTA

SEQ ID NO: 228861 - protein, 15 aa, Artificial Sequence
  Description of Artificial Sequence: Synthetic peptide
  Seed: LRMKWMMAMKYPITA
LRMKIMMGMRYPTTA

SEQ ID NO: 228862 - protein, 15 aa, Artificial Sequence
  Description of Artificial Sequence: Synthetic peptide
  Seed: LRMKWMMAMKYPITA
LRMKIMMGMRYPVTA

SEQ ID NO: 228863 - protein, 15 aa, Artificial Sequence
  Description of Artificial Sequence: Synthetic peptide
  Seed: LRMKWMMAMKYPITA
LRMKIMMGMRYPWTA

SEQ ID NO: 228864 - protein, 15 aa, Artificial Sequence
  Description of Artificial Sequence: Synthetic peptide
  Seed: LRMKWMMAMKYPITA
LRMKIMMGMRYPYTA

SEQ ID NO: 228865 - protein, 15 aa, Artificial Sequence
  Description of Artificial Sequence: Synthetic peptide
  Seed: LRMKWMMAMKYPITA
LRMKIMMGMSYPATA

SEQ ID NO: 228866 - protein, 15 aa, Artificial Sequence
  Description of Artificial Sequence: Synthetic peptide
  Seed: LRMKWMMAMKYPITA
LRMKIMMGMSYPCTA

SEQ ID NO: 228867 - protein, 15 aa, Artificial Sequence
  Description of Artificial Sequence: Synthetic peptide
  Seed: LRMKWMMAMKYPITA
LRMKIMMGMSYPFTA

SEQ ID NO: 228868 - protein, 15 aa, Artificial Sequence
  Description of Artificial Sequence: Synthetic peptide
  Seed: LRMKWMMAMKYPITA
LRMKIMMGMSYPGTA

SEQ ID NO: 228869 - protein, 15 aa, Artificial Sequence
  Description of Artificial Sequence: Synthetic peptide
  Seed: LRMKWMMAMKYPITA
LRMKIMMGMSYPHTA

SEQ ID NO: 228870 - protein, 15 aa, Artificial Sequence
  Description of Artificial Sequence: Synthetic peptide
  Seed: LRMKWMMAMKYPITA
LRMKIMMGMSYPITA

SEQ ID NO: 228871 - protein, 15 aa, Artificial Sequence
  Description of Artificial Sequence: Synthetic peptide
  Seed: LRMKWMMAMKYPITA
LRMKIMMGMSYPLTA

SEQ ID NO: 228872 - protein, 15 aa, Artificial Sequence
  Description of Artificial Sequence: Synthetic peptide
  Seed: LRMKWMMAMKYPITA
LRMKIMMGMSYPMTA

SEQ ID NO: 228873 - protein, 15 aa, Artificial Sequence
  Description of Artificial Sequence: Synthetic peptide
  Seed: LRMKWMMAMKYPITA
LRMKIMMGMSYPNTA

SEQ ID NO: 228874 - protein, 15 aa, Artificial Sequence
  Description of Artificial Sequence: Synthetic peptide
  Seed: LRMKWMMAMKYPITA
LRMKIMMGMSYPQTA

SEQ ID NO: 228875 - protein, 15 aa, Artificial Sequence
  Description of Artificial Sequence: Synthetic peptide
  Seed: LRMKWMMAMKYPITA
LRMKIMMGMSYPRTA

SEQ ID NO: 228876 - protein, 15 aa, Artificial Sequence
  Description of Artificial Sequence: Synthetic peptide
  Seed: LRMKWMMAMKYPITA
LRMKIMMGMSYPSTA

SEQ ID NO: 228877 - protein, 15 aa, Artificial Sequence
  Description of Artificial Sequence: Synthetic peptide
  Seed: LRMKWMMAMKYPITA
LRMKIMMGMSYPTTA

SEQ ID NO: 228878 - protein, 15 aa, Artificial Sequence
  Description of Artificial Sequence: Synthetic peptide
  Seed: LRMKWMMAMKYPITA
LRMKIMMGMSYPVTA

SEQ ID NO: 228879 - protein, 15 aa, Artificial Sequence
  Description of Artificial Sequence: Synthetic peptide
  Seed: LRMKWMMAMKYPITA
LRMKIMMGMSYPYTA

SEQ ID NO: 228880 - protein, 15 aa, Artificial Sequence
  Description of Artificial Sequence: Synthetic peptide
  Seed: LRMKWMMAMKYPITA
LRMKIMMGMTYPATA

SEQ ID NO: 228881 - protein, 15 aa, Artificial Sequence
  Description of Artificial Sequence: Synthetic peptide
  Seed: LRMKWMMAMKYPITA
LRMKIMMGMTYPCTA

SEQ ID NO: 228882 - protein, 15 aa, Artificial Sequence
  Description of Artificial Sequence: Synthetic peptide
  Seed: LRMKWMMAMKYPITA
LRMKIMMGMTYPFTA

SEQ ID NO: 228883 - protein, 15 aa, Artificial Sequence
  Description of Artificial Sequence: Synthetic peptide
  Seed: LRMKWMMAMKYPITA
LRMKIMMGMTYPGTA

SEQ ID NO: 228884 - protein, 15 aa, Artificial Sequence
  Description of Artificial Sequence: Synthetic peptide
  Seed: LRMKWMMAMKYPITA
LRMKIMMGMTYPITA

SEQ ID NO: 228885 - protein, 15 aa, Artificial Sequence
  Description of Artificial Sequence: Synthetic peptide
  Seed: LRMKWMMAMKYPITA
LRMKIMMGMTYPLTA

SEQ ID NO: 228886 - protein, 15 aa, Artificial Sequence
  Description of Artificial Sequence: Synthetic peptide
  Seed: LRMKWMMAMKYPITA
LRMKIMMGMTYPMTA

SEQ ID NO: 228887 - protein, 15 aa, Artificial Sequence
  Description of Artificial Sequence: Synthetic peptide
  Seed: LRMKWMMAMKYPITA
LRMKIMMGMTYPNTA

SEQ ID NO: 228888 - protein, 15 aa, Artificial Sequence
  Description of Artificial Sequence: Synthetic peptide
  Seed: LRMKWMMAMKYPITA
LRMKIMMGMTYPRTA

SEQ ID NO: 228889 - protein, 15 aa, Artificial Sequence
  Description of Artificial Sequence: Synthetic peptide
  Seed: LRMKWMMAMKYPITA
LRMKIMMGMTYPSTA

SEQ ID NO: 228890 - protein, 15 aa, Artificial Sequence
  Description of Artificial Sequence: Synthetic peptide
  Seed: LRMKWMMAMKYPITA
LRMKIMMGMTYPTTA

SEQ ID NO: 228891 - protein, 15 aa, Artificial Sequence
  Description of Artificial Sequence: Synthetic peptide
  Seed: LRMKWMMAMKYPITA
LRMKIMMGMTYPVTA

SEQ ID NO: 228892 - protein, 15 aa, Artificial Sequence
  Description of Artificial Sequence: Synthetic peptide
  Seed: LRMKWMMAMKYPITA
LRMKIMMGMTYPYTA

SEQ ID NO: 228893 - protein, 15 aa, Artificial Sequence
  Description of Artificial Sequence: Synthetic peptide
  Seed: LRMKWMMAMKYPITA
LRMKIMMGMVYPATA

SEQ ID NO: 228894 - protein, 15 aa, Artificial Sequence
  Description of Artificial Sequence: Synthetic peptide
  Seed: LRMKWMMAMKYPITA
LRMKIMMGMVYPGTA

SEQ ID NO: 228895 - protein, 15 aa, Artificial Sequence
  Description of Artificial Sequence: Synthetic peptide
  Seed: LRMKWMMAMKYPITA
LRMKIMMGMVYPITA

SEQ ID NO: 228896 - protein, 15 aa, Artificial Sequence
  Description of Artificial Sequence: Synthetic peptide
  Seed: LRMKWMMAMKYPITA
LRMKIMMGMVYPLTA

SEQ ID NO: 228897 - protein, 15 aa, Artificial Sequence
  Description of Artificial Sequence: Synthetic peptide
  Seed: LRMKWMMAMKYPITA
LRMKIMMGMVYPMTA

SEQ ID NO: 228898 - protein, 15 aa, Artificial Sequence
  Description of Artificial Sequence: Synthetic peptide
  Seed: LRMKWMMAMKYPITA
LRMKIMMGMVYPNTA

SEQ ID NO: 228899 - protein, 15 aa, Artificial Sequence
  Description of Artificial Sequence: Synthetic peptide
  Seed: LRMKWMMAMKYPITA
LRMKIMMGMVYPRTA

SEQ ID NO: 228900 - protein, 15 aa, Artificial Sequence
  Description of Artificial Sequence: Synthetic peptide
  Seed: LRMKWMMAMKYPITA
LRMKIMMGMVYPSTA

SEQ ID NO: 228901 - protein, 15 aa, Artificial Sequence
  Description of Artificial Sequence: Synthetic peptide
  Seed: LRMKWMMAMKYPITA
LRMKIMMGMVYPTTA

SEQ ID NO: 228902 - protein, 15 aa, Artificial Sequence
  Description of Artificial Sequence: Synthetic peptide
  Seed: LRMKWMMAMKYPITA
LRMKIMMGMVYPVTA

SEQ ID NO: 228903 - protein, 15 aa, Artificial Sequence
  Description of Artificial Sequence: Synthetic peptide
  Seed: LRMKWMMAMKYPITA
LRMKIMMGMVYPYTA

SEQ ID NO: 228904 - protein, 15 aa, Artificial Sequence
  Description of Artificial Sequence: Synthetic peptide
  Seed: LRMKWMMAMKYPITA
LRMKIMMHMAYPATA

SEQ ID NO: 228905 - protein, 15 aa, Artificial Sequence
  Description of Artificial Sequence: Synthetic peptide
  Seed: LRMKWMMAMKYPITA
LRMKIMMHMAYPCTA

SEQ ID NO: 228906 - protein, 15 aa, Artificial Sequence
  Description of Artificial Sequence: Synthetic peptide
  Seed: LRMKWMMAMKYPITA
LRMKIMMHMAYPDTA

SEQ ID NO: 228907 - protein, 15 aa, Artificial Sequence
  Description of Artificial Sequence: Synthetic peptide
  Seed: LRMKWMMAMKYPITA
LRMKIMMHMAYPETA

SEQ ID NO: 228908 - protein, 15 aa, Artificial Sequence
  Description of Artificial Sequence: Synthetic peptide
  Seed: LRMKWMMAMKYPITA
LRMKIMMHMAYPFTA

SEQ ID NO: 228909 - protein, 15 aa, Artificial Sequence
  Description of Artificial Sequence: Synthetic peptide
  Seed: LRMKWMMAMKYPITA
LRMKIMMHMAYPGTA

SEQ ID NO: 228910 - protein, 15 aa, Artificial Sequence
  Description of Artificial Sequence: Synthetic peptide
  Seed: LRMKWMMAMKYPITA
LRMKIMMHMAYPHTA

SEQ ID NO: 228911 - protein, 15 aa, Artificial Sequence
  Description of Artificial Sequence: Synthetic peptide
  Seed: LRMKWMMAMKYPITA
LRMKIMMHMAYPITA

SEQ ID NO: 228912 - protein, 15 aa, Artificial Sequence
  Description of Artificial Sequence: Synthetic peptide
  Seed: LRMKWMMAMKYPITA
LRMKIMMHMAYPKTA

SEQ ID NO: 228913 - protein, 15 aa, Artificial Sequence
  Description of Artificial Sequence: Synthetic peptide
  Seed: LRMKWMMAMKYPITA
LRMKIMMHMAYPLTA

SEQ ID NO: 228914 - protein, 15 aa, Artificial Sequence
  Description of Artificial Sequence: Synthetic peptide
  Seed: LRMKWMMAMKYPITA
LRMKIMMHMAYPMTA

SEQ ID NO: 228915 - protein, 15 aa, Artificial Sequence
  Description of Artificial Sequence: Synthetic peptide
  Seed: LRMKWMMAMKYPITA
LRMKIMMHMAYPNTA

SEQ ID NO: 228916 - protein, 15 aa, Artificial Sequence
  Description of Artificial Sequence: Synthetic peptide
  Seed: LRMKWMMAMKYPITA
LRMKIMMHMAYPPTA

SEQ ID NO: 228917 - protein, 15 aa, Artificial Sequence
  Description of Artificial Sequence: Synthetic peptide
  Seed: LRMKWMMAMKYPITA
LRMKIMMHMAYPQTA

SEQ ID NO: 228918 - protein, 15 aa, Artificial Sequence
  Description of Artificial Sequence: Synthetic peptide
  Seed: LRMKWMMAMKYPITA
LRMKIMMHMAYPRTA

SEQ ID NO: 228919 - protein, 15 aa, Artificial Sequence
  Description of Artificial Sequence: Synthetic peptide
  Seed: LRMKWMMAMKYPITA
LRMKIMMHMAYPSTA

SEQ ID NO: 228920 - protein, 15 aa, Artificial Sequence
  Description of Artificial Sequence: Synthetic peptide
  Seed: LRMKWMMAMKYPITA
LRMKIMMHMAYPTTA

SEQ ID NO: 228921 - protein, 15 aa, Artificial Sequence
  Description of Artificial Sequence: Synthetic peptide
  Seed: LRMKWMMAMKYPITA
LRMKIMMHMAYPVTA

SEQ ID NO: 228922 - protein, 15 aa, Artificial Sequence
  Description of Artificial Sequence: Synthetic peptide
  Seed: LRMKWMMAMKYPITA
LRMKIMMHMAYPWTA

SEQ ID NO: 228923 - protein, 15 aa, Artificial Sequence
  Description of Artificial Sequence: Synthetic peptide
  Seed: LRMKWMMAMKYPITA
LRMKIMMHMAYPYTA

SEQ ID NO: 228924 - protein, 15 aa, Artificial Sequence
  Description of Artificial Sequence: Synthetic peptide
  Seed: LRMKWMMAMKYPITA
LRMKIMMHMCYPFTA

SEQ ID NO: 228925 - protein, 15 aa, Artificial Sequence
  Description of Artificial Sequence: Synthetic peptide
  Seed: LRMKWMMAMKYPITA
LRMKIMMHMCYPITA

SEQ ID NO: 228926 - protein, 15 aa, Artificial Sequence
  Description of Artificial Sequence: Synthetic peptide
  Seed: LRMKWMMAMKYPITA
LRMKIMMHMCYPLTA

SEQ ID NO: 228927 - protein, 15 aa, Artificial Sequence
  Description of Artificial Sequence: Synthetic peptide
  Seed: LRMKWMMAMKYPITA
LRMKIMMHMCYPMTA

SEQ ID NO: 228928 - protein, 15 aa, Artificial Sequence
  Description of Artificial Sequence: Synthetic peptide
  Seed: LRMKWMMAMKYPITA
LRMKIMMHMCYPRTA

SEQ ID NO: 228929 - protein, 15 aa, Artificial Sequence
  Description of Artificial Sequence: Synthetic peptide
  Seed: LRMKWMMAMKYPITA
LRMKIMMHMCYPVTA

SEQ ID NO: 228930 - protein, 15 aa, Artificial Sequence
  Description of Artificial Sequence: Synthetic peptide
  Seed: LRMKWMMAMKYPITA
LRMKIMMHMCYPYTA

SEQ ID NO: 228931 - protein, 15 aa, Artificial Sequence
  Description of Artificial Sequence: Synthetic peptide
  Seed: LRMKWMMAMKYPITA
LRMKIMMHMDYPATA

SEQ ID NO: 228932 - protein, 15 aa, Artificial Sequence
  Description of Artificial Sequence: Synthetic peptide
  Seed: LRMKWMMAMKYPITA
LRMKIMMHMDYPFTA

SEQ ID NO: 228933 - protein, 15 aa, Artificial Sequence
  Description of Artificial Sequence: Synthetic peptide
  Seed: LRMKWMMAMKYPITA
LRMKIMMHMDYPITA

SEQ ID NO: 228934 - protein, 15 aa, Artificial Sequence
  Description of Artificial Sequence: Synthetic peptide
  Seed: LRMKWMMAMKYPITA
LRMKIMMHMDYPLTA

SEQ ID NO: 228935 - protein, 15 aa, Artificial Sequence
  Description of Artificial Sequence: Synthetic peptide
  Seed: LRMKWMMAMKYPITA
LRMKIMMHMDYPMTA

SEQ ID NO: 228936 - protein, 15 aa, Artificial Sequence
  Description of Artificial Sequence: Synthetic peptide
  Seed: LRMKWMMAMKYPITA
LRMKIMMHMDYPRTA

SEQ ID NO: 228937 - protein, 15 aa, Artificial Sequence
  Description of Artificial Sequence: Synthetic peptide
  Seed: LRMKWMMAMKYPITA
LRMKIMMHMDYPVTA

SEQ ID NO: 228938 - protein, 15 aa, Artificial Sequence
  Description of Artificial Sequence: Synthetic peptide
  Seed: LRMKWMMAMKYPITA
LRMKIMMHMDYPYTA

SEQ ID NO: 228939 - protein, 15 aa, Artificial Sequence
  Description of Artificial Sequence: Synthetic peptide
  Seed: LRMKWMMAMKYPITA
LRMKIMMHMEYPFTA

SEQ ID NO: 228940 - protein, 15 aa, Artificial Sequence
  Description of Artificial Sequence: Synthetic peptide
  Seed: LRMKWMMAMKYPITA
LRMKIMMHMEYPITA

SEQ ID NO: 228941 - protein, 15 aa, Artificial Sequence
  Description of Artificial Sequence: Synthetic peptide
  Seed: LRMKWMMAMKYPITA
LRMKIMMHMEYPKTA

SEQ ID NO: 228942 - protein, 15 aa, Artificial Sequence
  Description of Artificial Sequence: Synthetic peptide
  Seed: LRMKWMMAMKYPITA
LRMKIMMHMEYPLTA

SEQ ID NO: 228943 - protein, 15 aa, Artificial Sequence
  Description of Artificial Sequence: Synthetic peptide
  Seed: LRMKWMMAMKYPITA
LRMKIMMHMEYPMTA

SEQ ID NO: 228944 - protein, 15 aa, Artificial Sequence
  Description of Artificial Sequence: Synthetic peptide
  Seed: LRMKWMMAMKYPITA
LRMKIMMHMEYPRTA

SEQ ID NO: 228945 - protein, 15 aa, Artificial Sequence
  Description of Artificial Sequence: Synthetic peptide
  Seed: LRMKWMMAMKYPITA
LRMKIMMHMEYPVTA

SEQ ID NO: 228946 - protein, 15 aa, Artificial Sequence
  Description of Artificial Sequence: Synthetic peptide
  Seed: LRMKWMMAMKYPITA
LRMKIMMHMEYPYTA

SEQ ID NO: 228947 - protein, 15 aa, Artificial Sequence
  Description of Artificial Sequence: Synthetic peptide
  Seed: LRMKWMMAMKYPITA
LRMKIMMHMFYPITA

SEQ ID NO: 228948 - protein, 15 aa, Artificial Sequence
  Description of Artificial Sequence: Synthetic peptide
  Seed: LRMKWMMAMKYPITA
LRMKIMMHMFYPLTA

SEQ ID NO: 228949 - protein, 15 aa, Artificial Sequence
  Description of Artificial Sequence: Synthetic peptide
  Seed: LRMKWMMAMKYPITA
LRMKIMMHMFYPVTA

SEQ ID NO: 228950 - protein, 15 aa, Artificial Sequence
  Description of Artificial Sequence: Synthetic peptide
  Seed: LRMKWMMAMKYPITA
LRMKIMMHMGYPATA

SEQ ID NO: 228951 - protein, 15 aa, Artificial Sequence
  Description of Artificial Sequence: Synthetic peptide
  Seed: LRMKWMMAMKYPITA
LRMKIMMHMGYPFTA

SEQ ID NO: 228952 - protein, 15 aa, Artificial Sequence
  Description of Artificial Sequence: Synthetic peptide
  Seed: LRMKWMMAMKYPITA
LRMKIMMHMGYPGTA

SEQ ID NO: 228953 - protein, 15 aa, Artificial Sequence
  Description of Artificial Sequence: Synthetic peptide
  Seed: LRMKWMMAMKYPITA
LRMKIMMHMGYPHTA

SEQ ID NO: 228954 - protein, 15 aa, Artificial Sequence
  Description of Artificial Sequence: Synthetic peptide
  Seed: LRMKWMMAMKYPITA
LRMKIMMHMGYPITA

SEQ ID NO: 228955 - protein, 15 aa, Artificial Sequence
  Description of Artificial Sequence: Synthetic peptide
  Seed: LRMKWMMAMKYPITA
LRMKIMMHMGYPKTA

SEQ ID NO: 228956 - protein, 15 aa, Artificial Sequence
  Description of Artificial Sequence: Synthetic peptide
  Seed: LRMKWMMAMKYPITA
LRMKIMMHMGYPLTA

SEQ ID NO: 228957 - protein, 15 aa, Artificial Sequence
  Description of Artificial Sequence: Synthetic peptide
  Seed: LRMKWMMAMKYPITA
LRMKIMMHMGYPMTA

SEQ ID NO: 228958 - protein, 15 aa, Artificial Sequence
  Description of Artificial Sequence: Synthetic peptide
  Seed: LRMKWMMAMKYPITA
LRMKIMMHMGYPNTA

SEQ ID NO: 228959 - protein, 15 aa, Artificial Sequence
  Description of Artificial Sequence: Synthetic peptide
  Seed: LRMKWMMAMKYPITA
LRMKIMMHMGYPQTA

SEQ ID NO: 228960 - protein, 15 aa, Artificial Sequence
  Description of Artificial Sequence: Synthetic peptide
  Seed: LRMKWMMAMKYPITA
LRMKIMMHMGYPRTA

SEQ ID NO: 228961 - protein, 15 aa, Artificial Sequence
  Description of Artificial Sequence: Synthetic peptide
  Seed: LRMKWMMAMKYPITA
LRMKIMMHMGYPSTA

SEQ ID NO: 228962 - protein, 15 aa, Artificial Sequence
  Description of Artificial Sequence: Synthetic peptide
  Seed: LRMKWMMAMKYPITA
LRMKIMMHMGYPTTA

SEQ ID NO: 228963 - protein, 15 aa, Artificial Sequence
  Description of Artificial Sequence: Synthetic peptide
  Seed: LRMKWMMAMKYPITA
LRMKIMMHMGYPVTA

SEQ ID NO: 228964 - protein, 15 aa, Artificial Sequence
  Description of Artificial Sequence: Synthetic peptide
  Seed: LRMKWMMAMKYPITA
LRMKIMMHMGYPWTA

SEQ ID NO: 228965 - protein, 15 aa, Artificial Sequence
  Description of Artificial Sequence: Synthetic peptide
  Seed: LRMKWMMAMKYPITA
LRMKIMMHMGYPYTA

SEQ ID NO: 228966 - protein, 15 aa, Artificial Sequence
  Description of Artificial Sequence: Synthetic peptide
  Seed: LRMKWMMAMKYPITA
LRMKIMMHMHYPATA

SEQ ID NO: 228967 - protein, 15 aa, Artificial Sequence
  Description of Artificial Sequence: Synthetic peptide
  Seed: LRMKWMMAMKYPITA
LRMKIMMHMHYPCTA

SEQ ID NO: 228968 - protein, 15 aa, Artificial Sequence
  Description of Artificial Sequence: Synthetic peptide
  Seed: LRMKWMMAMKYPITA
LRMKIMMHMHYPDTA

SEQ ID NO: 228969 - protein, 15 aa, Artificial Sequence
  Description of Artificial Sequence: Synthetic peptide
  Seed: LRMKWMMAMKYPITA
LRMKIMMHMHYPETA

SEQ ID NO: 228970 - protein, 15 aa, Artificial Sequence
  Description of Artificial Sequence: Synthetic peptide
  Seed: LRMKWMMAMKYPITA
LRMKIMMHMHYPFTA

SEQ ID NO: 228971 - protein, 15 aa, Artificial Sequence
  Description of Artificial Sequence: Synthetic peptide
  Seed: LRMKWMMAMKYPITA
LRMKIMMHMHYPGTA

SEQ ID NO: 228972 - protein, 15 aa, Artificial Sequence
  Description of Artificial Sequence: Synthetic peptide
  Seed: LRMKWMMAMKYPITA
LRMKIMMHMHYPHTA

SEQ ID NO: 228973 - protein, 15 aa, Artificial Sequence
  Description of Artificial Sequence: Synthetic peptide
  Seed: LRMKWMMAMKYPITA
LRMKIMMHMHYPITA

SEQ ID NO: 228974 - protein, 15 aa, Artificial Sequence
  Description of Artificial Sequence: Synthetic peptide
  Seed: LRMKWMMAMKYPITA
LRMKIMMHMHYPKTA

SEQ ID NO: 228975 - protein, 15 aa, Artificial Sequence
  Description of Artificial Sequence: Synthetic peptide
  Seed: LRMKWMMAMKYPITA
LRMKIMMHMHYPLTA

SEQ ID NO: 228976 - protein, 15 aa, Artificial Sequence
  Description of Artificial Sequence: Synthetic peptide
  Seed: LRMKWMMAMKYPITA
LRMKIMMHMHYPMTA

SEQ ID NO: 228977 - protein, 15 aa, Artificial Sequence
  Description of Artificial Sequence: Synthetic peptide
  Seed: LRMKWMMAMKYPITA
LRMKIMMHMHYPNTA

SEQ ID NO: 228978 - protein, 15 aa, Artificial Sequence
  Description of Artificial Sequence: Synthetic peptide
  Seed: LRMKWMMAMKYPITA
LRMKIMMHMHYPPTA

SEQ ID NO: 228979 - protein, 15 aa, Artificial Sequence
  Description of Artificial Sequence: Synthetic peptide
  Seed: LRMKWMMAMKYPITA
LRMKIMMHMHYPQTA

SEQ ID NO: 228980 - protein, 15 aa, Artificial Sequence
  Description of Artificial Sequence: Synthetic peptide
  Seed: LRMKWMMAMKYPITA
LRMKIMMHMHYPRTA

SEQ ID NO: 228981 - protein, 15 aa, Artificial Sequence
  Description of Artificial Sequence: Synthetic peptide
  Seed: LRMKWMMAMKYPITA
LRMKIMMHMHYPSTA

SEQ ID NO: 228982 - protein, 15 aa, Artificial Sequence
  Description of Artificial Sequence: Synthetic peptide
  Seed: LRMKWMMAMKYPITA
LRMKIMMHMHYPTTA

SEQ ID NO: 228983 - protein, 15 aa, Artificial Sequence
  Description of Artificial Sequence: Synthetic peptide
  Seed: LRMKWMMAMKYPITA
LRMKIMMHMHYPVTA

SEQ ID NO: 228984 - protein, 15 aa, Artificial Sequence
  Description of Artificial Sequence: Synthetic peptide
  Seed: LRMKWMMAMKYPITA
LRMKIMMHMHYPWTA

SEQ ID NO: 228985 - protein, 15 aa, Artificial Sequence
  Description of Artificial Sequence: Synthetic peptide
  Seed: LRMKWMMAMKYPITA
LRMKIMMHMHYPYTA

SEQ ID NO: 228986 - protein, 15 aa, Artificial Sequence
  Description of Artificial Sequence: Synthetic peptide
  Seed: LRMKWMMAMKYPITA
LRMKIMMHMIYPATA

SEQ ID NO: 228987 - protein, 15 aa, Artificial Sequence
  Description of Artificial Sequence: Synthetic peptide
  Seed: LRMKWMMAMKYPITA
LRMKIMMHMIYPETA

SEQ ID NO: 228988 - protein, 15 aa, Artificial Sequence
  Description of Artificial Sequence: Synthetic peptide
  Seed: LRMKWMMAMKYPITA
LRMKIMMHMIYPFTA

SEQ ID NO: 228989 - protein, 15 aa, Artificial Sequence
  Description of Artificial Sequence: Synthetic peptide
  Seed: LRMKWMMAMKYPITA
LRMKIMMHMIYPGTA

SEQ ID NO: 228990 - protein, 15 aa, Artificial Sequence
  Description of Artificial Sequence: Synthetic peptide
  Seed: LRMKWMMAMKYPITA
LRMKIMMHMIYPHTA

SEQ ID NO: 228991 - protein, 15 aa, Artificial Sequence
  Description of Artificial Sequence: Synthetic peptide
  Seed: LRMKWMMAMKYPITA
LRMKIMMHMIYPITA

SEQ ID NO: 228992 - protein, 15 aa, Artificial Sequence
  Description of Artificial Sequence: Synthetic peptide
  Seed: LRMKWMMAMKYPITA
LRMKIMMHMIYPKTA

SEQ ID NO: 228993 - protein, 15 aa, Artificial Sequence
  Description of Artificial Sequence: Synthetic peptide
  Seed: LRMKWMMAMKYPITA
LRMKIMMHMIYPLTA

SEQ ID NO: 228994 - protein, 15 aa, Artificial Sequence
  Description of Artificial Sequence: Synthetic peptide
  Seed: LRMKWMMAMKYPITA
LRMKIMMHMIYPMTA

SEQ ID NO: 228995 - protein, 15 aa, Artificial Sequence
  Description of Artificial Sequence: Synthetic peptide
  Seed: LRMKWMMAMKYPITA
LRMKIMMHMIYPQTA

SEQ ID NO: 228996 - protein, 15 aa, Artificial Sequence
  Description of Artificial Sequence: Synthetic peptide
  Seed: LRMKWMMAMKYPITA
LRMKIMMHMIYPRTA

SEQ ID NO: 228997 - protein, 15 aa, Artificial Sequence
  Description of Artificial Sequence: Synthetic peptide
  Seed: LRMKWMMAMKYPITA
LRMKIMMHMIYPSTA

SEQ ID NO: 228998 - protein, 15 aa, Artificial Sequence
  Description of Artificial Sequence: Synthetic peptide
  Seed: LRMKWMMAMKYPITA
LRMKIMMHMIYPTTA

SEQ ID NO: 228999 - protein, 15 aa, Artificial Sequence
  Description of Artificial Sequence: Synthetic peptide
  Seed: LRMKWMMAMKYPITA
LRMKIMMHMIYPVTA

SEQ ID NO: 229000 - protein, 15 aa, Artificial Sequence
  Description of Artificial Sequence: Synthetic peptide
  Seed: LRMKWMMAMKYPITA
LRMKIMMHMIYPYTA

SEQ ID NO: 229001 - protein, 15 aa, Artificial Sequence
  Description of Artificial Sequence: Synthetic peptide
  Seed: LRMKWMMAMKYPITA
LRMKIMMHMKYPATA

SEQ ID NO: 229002 - protein, 15 aa, Artificial Sequence
  Description of Artificial Sequence: Synthetic peptide
  Seed: LRMKWMMAMKYPITA
LRMKIMMHMKYPCTA

SEQ ID NO: 229003 - protein, 15 aa, Artificial Sequence
  Description of Artificial Sequence: Synthetic peptide
  Seed: LRMKWMMAMKYPITA
LRMKIMMHMKYPDTA

SEQ ID NO: 229004 - protein, 15 aa, Artificial Sequence
  Description of Artificial Sequence: Synthetic peptide
  Seed: LRMKWMMAMKYPITA
LRMKIMMHMKYPETA

SEQ ID NO: 229005 - protein, 15 aa, Artificial Sequence
  Description of Artificial Sequence: Synthetic peptide
  Seed: LRMKWMMAMKYPITA
LRMKIMMHMKYPFTA

SEQ ID NO: 229006 - protein, 15 aa, Artificial Sequence
  Description of Artificial Sequence: Synthetic peptide
  Seed: LRMKWMMAMKYPITA
LRMKIMMHMKYPGTA

SEQ ID NO: 229007 - protein, 15 aa, Artificial Sequence
  Description of Artificial Sequence: Synthetic peptide
  Seed: LRMKWMMAMKYPITA
LRMKIMMHMKYPHTA

SEQ ID NO: 229008 - protein, 15 aa, Artificial Sequence
  Description of Artificial Sequence: Synthetic peptide
  Seed: LRMKWMMAMKYPITA
LRMKIMMHMKYPITA

SEQ ID NO: 229009 - protein, 15 aa, Artificial Sequence
  Description of Artificial Sequence: Synthetic peptide
  Seed: LRMKWMMAMKYPITA
LRMKIMMHMKYPKTA

SEQ ID NO: 229010 - protein, 15 aa, Artificial Sequence
  Description of Artificial Sequence: Synthetic peptide
  Seed: LRMKWMMAMKYPITA
LRMKIMMHMKYPLTA

SEQ ID NO: 229011 - protein, 15 aa, Artificial Sequence
  Description of Artificial Sequence: Synthetic peptide
  Seed: LRMKWMMAMKYPITA
LRMKIMMHMKYPMTA

SEQ ID NO: 229012 - protein, 15 aa, Artificial Sequence
  Description of Artificial Sequence: Synthetic peptide
  Seed: LRMKWMMAMKYPITA
LRMKIMMHMKYPNTA

SEQ ID NO: 229013 - protein, 15 aa, Artificial Sequence
  Description of Artificial Sequence: Synthetic peptide
  Seed: LRMKWMMAMKYPITA
LRMKIMMHMKYPPTA

SEQ ID NO: 229014 - protein, 15 aa, Artificial Sequence
  Description of Artificial Sequence: Synthetic peptide
  Seed: LRMKWMMAMKYPITA
LRMKIMMHMKYPQTA

SEQ ID NO: 229015 - protein, 15 aa, Artificial Sequence
  Description of Artificial Sequence: Synthetic peptide
  Seed: LRMKWMMAMKYPITA
LRMKIMMHMKYPRTA

SEQ ID NO: 229016 - protein, 15 aa, Artificial Sequence
  Description of Artificial Sequence: Synthetic peptide
  Seed: LRMKWMMAMKYPITA
LRMKIMMHMKYPSTA

SEQ ID NO: 229017 - protein, 15 aa, Artificial Sequence
  Description of Artificial Sequence: Synthetic peptide
  Seed: LRMKWMMAMKYPITA
LRMKIMMHMKYPTTA

SEQ ID NO: 229018 - protein, 15 aa, Artificial Sequence
  Description of Artificial Sequence: Synthetic peptide
  Seed: LRMKWMMAMKYPITA
LRMKIMMHMKYPVTA

SEQ ID NO: 229019 - protein, 15 aa, Artificial Sequence
  Description of Artificial Sequence: Synthetic peptide
  Seed: LRMKWMMAMKYPITA
LRMKIMMHMKYPWTA

SEQ ID NO: 229020 - protein, 15 aa, Artificial Sequence
  Description of Artificial Sequence: Synthetic peptide
  Seed: LRMKWMMAMKYPITA
LRMKIMMHMKYPYTA

SEQ ID NO: 229021 - protein, 15 aa, Artificial Sequence
  Description of Artificial Sequence: Synthetic peptide
  Seed: LRMKWMMAMKYPITA
LRMKIMMHMLYPATA

SEQ ID NO: 229022 - protein, 15 aa, Artificial Sequence
  Description of Artificial Sequence: Synthetic peptide
  Seed: LRMKWMMAMKYPITA
LRMKIMMHMLYPFTA

SEQ ID NO: 229023 - protein, 15 aa, Artificial Sequence
  Description of Artificial Sequence: Synthetic peptide
  Seed: LRMKWMMAMKYPITA
LRMKIMMHMLYPHTA

SEQ ID NO: 229024 - protein, 15 aa, Artificial Sequence
  Description of Artificial Sequence: Synthetic peptide
  Seed: LRMKWMMAMKYPITA
LRMKIMMHMLYPITA

SEQ ID NO: 229025 - protein, 15 aa, Artificial Sequence
  Description of Artificial Sequence: Synthetic peptide
  Seed: LRMKWMMAMKYPITA
LRMKIMMHMLYPKTA

SEQ ID NO: 229026 - protein, 15 aa, Artificial Sequence
  Description of Artificial Sequence: Synthetic peptide
  Seed: LRMKWMMAMKYPITA
LRMKIMMHMLYPLTA

SEQ ID NO: 229027 - protein, 15 aa, Artificial Sequence
  Description of Artificial Sequence: Synthetic peptide
  Seed: LRMKWMMAMKYPITA
LRMKIMMHMLYPMTA

SEQ ID NO: 229028 - protein, 15 aa, Artificial Sequence
  Description of Artificial Sequence: Synthetic peptide
  Seed: LRMKWMMAMKYPITA
LRMKIMMHMLYPRTA

SEQ ID NO: 229029 - protein, 15 aa, Artificial Sequence
  Description of Artificial Sequence: Synthetic peptide
  Seed: LRMKWMMAMKYPITA
LRMKIMMHMLYPSTA

SEQ ID NO: 229030 - protein, 15 aa, Artificial Sequence
  Description of Artificial Sequence: Synthetic peptide
  Seed: LRMKWMMAMKYPITA
LRMKIMMHMLYPVTA

SEQ ID NO: 229031 - protein, 15 aa, Artificial Sequence
  Description of Artificial Sequence: Synthetic peptide
  Seed: LRMKWMMAMKYPITA
LRMKIMMHMLYPYTA

SEQ ID NO: 229032 - protein, 15 aa, Artificial Sequence
  Description of Artificial Sequence: Synthetic peptide
  Seed: LRMKWMMAMKYPITA
LRMKIMMHMMYPATA

SEQ ID NO: 229033 - protein, 15 aa, Artificial Sequence
  Description of Artificial Sequence: Synthetic peptide
  Seed: LRMKWMMAMKYPITA
LRMKIMMHMMYPFTA

SEQ ID NO: 229034 - protein, 15 aa, Artificial Sequence
  Description of Artificial Sequence: Synthetic peptide
  Seed: LRMKWMMAMKYPITA
LRMKIMMHMMYPHTA

SEQ ID NO: 229035 - protein, 15 aa, Artificial Sequence
  Description of Artificial Sequence: Synthetic peptide
  Seed: LRMKWMMAMKYPITA
LRMKIMMHMMYPITA

SEQ ID NO: 229036 - protein, 15 aa, Artificial Sequence
  Description of Artificial Sequence: Synthetic peptide
  Seed: LRMKWMMAMKYPITA
LRMKIMMHMMYPKTA

SEQ ID NO: 229037 - protein, 15 aa, Artificial Sequence
  Description of Artificial Sequence: Synthetic peptide
  Seed: LRMKWMMAMKYPITA
LRMKIMMHMMYPLTA

SEQ ID NO: 229038 - protein, 15 aa, Artificial Sequence
  Description of Artificial Sequence: Synthetic peptide
  Seed: LRMKWMMAMKYPITA
LRMKIMMHMMYPMTA

SEQ ID NO: 229039 - protein, 15 aa, Artificial Sequence
  Description of Artificial Sequence: Synthetic peptide
  Seed: LRMKWMMAMKYPITA
LRMKIMMHMMYPQTA

SEQ ID NO: 229040 - protein, 15 aa, Artificial Sequence
  Description of Artificial Sequence: Synthetic peptide
  Seed: LRMKWMMAMKYPITA
LRMKIMMHMMYPRTA

SEQ ID NO: 229041 - protein, 15 aa, Artificial Sequence
  Description of Artificial Sequence: Synthetic peptide
  Seed: LRMKWMMAMKYPITA
LRMKIMMHMMYPSTA

SEQ ID NO: 229042 - protein, 15 aa, Artificial Sequence
  Description of Artificial Sequence: Synthetic peptide
  Seed: LRMKWMMAMKYPITA
LRMKIMMHMMYPTTA

SEQ ID NO: 229043 - protein, 15 aa, Artificial Sequence
  Description of Artificial Sequence: Synthetic peptide
  Seed: LRMKWMMAMKYPITA
LRMKIMMHMMYPVTA

SEQ ID NO: 229044 - protein, 15 aa, Artificial Sequence
  Description of Artificial Sequence: Synthetic peptide
  Seed: LRMKWMMAMKYPITA
LRMKIMMHMMYPYTA

SEQ ID NO: 229045 - protein, 15 aa, Artificial Sequence
  Description of Artificial Sequence: Synthetic peptide
  Seed: LRMKWMMAMKYPITA
LRMKIMMHMNYPATA

SEQ ID NO: 229046 - protein, 15 aa, Artificial Sequence
  Description of Artificial Sequence: Synthetic peptide
  Seed: LRMKWMMAMKYPITA
LRMKIMMHMNYPETA

SEQ ID NO: 229047 - protein, 15 aa, Artificial Sequence
  Description of Artificial Sequence: Synthetic peptide
  Seed: LRMKWMMAMKYPITA
LRMKIMMHMNYPFTA

SEQ ID NO: 229048 - protein, 15 aa, Artificial Sequence
  Description of Artificial Sequence: Synthetic peptide
  Seed: LRMKWMMAMKYPITA
LRMKIMMHMNYPGTA

SEQ ID NO: 229049 - protein, 15 aa, Artificial Sequence
  Description of Artificial Sequence: Synthetic peptide
  Seed: LRMKWMMAMKYPITA
LRMKIMMHMNYPHTA

SEQ ID NO: 229050 - protein, 15 aa, Artificial Sequence
  Description of Artificial Sequence: Synthetic peptide
  Seed: LRMKWMMAMKYPITA
LRMKIMMHMNYPITA

SEQ ID NO: 229051 - protein, 15 aa, Artificial Sequence
  Description of Artificial Sequence: Synthetic peptide
  Seed: LRMKWMMAMKYPITA
LRMKIMMHMNYPKTA

SEQ ID NO: 229052 - protein, 15 aa, Artificial Sequence
  Description of Artificial Sequence: Synthetic peptide
  Seed: LRMKWMMAMKYPITA
LRMKIMMHMNYPLTA

SEQ ID NO: 229053 - protein, 15 aa, Artificial Sequence
  Description of Artificial Sequence: Synthetic peptide
  Seed: LRMKWMMAMKYPITA
LRMKIMMHMNYPMTA

SEQ ID NO: 229054 - protein, 15 aa, Artificial Sequence
  Description of Artificial Sequence: Synthetic peptide
  Seed: LRMKWMMAMKYPITA
LRMKIMMHMNYPNTA

SEQ ID NO: 229055 - protein, 15 aa, Artificial Sequence
  Description of Artificial Sequence: Synthetic peptide
  Seed: LRMKWMMAMKYPITA
LRMKIMMHMNYPQTA

SEQ ID NO: 229056 - protein, 15 aa, Artificial Sequence
  Description of Artificial Sequence: Synthetic peptide
  Seed: LRMKWMMAMKYPITA
LRMKIMMHMNYPRTA

SEQ ID NO: 229057 - protein, 15 aa, Artificial Sequence
  Description of Artificial Sequence: Synthetic peptide
  Seed: LRMKWMMAMKYPITA
LRMKIMMHMNYPSTA

SEQ ID NO: 229058 - protein, 15 aa, Artificial Sequence
  Description of Artificial Sequence: Synthetic peptide
  Seed: LRMKWMMAMKYPITA
LRMKIMMHMNYPTTA

SEQ ID NO: 229059 - protein, 15 aa, Artificial Sequence
  Description of Artificial Sequence: Synthetic peptide
  Seed: LRMKWMMAMKYPITA
LRMKIMMHMNYPVTA

SEQ ID NO: 229060 - protein, 15 aa, Artificial Sequence
  Description of Artificial Sequence: Synthetic peptide
  Seed: LRMKWMMAMKYPITA
LRMKIMMHMNYPWTA

SEQ ID NO: 229061 - protein, 15 aa, Artificial Sequence
  Description of Artificial Sequence: Synthetic peptide
  Seed: LRMKWMMAMKYPITA
LRMKIMMHMNYPYTA

SEQ ID NO: 229062 - protein, 15 aa, Artificial Sequence
  Description of Artificial Sequence: Synthetic peptide
  Seed: LRMKWMMAMKYPITA
LRMKIMMHMPYPATA

SEQ ID NO: 229063 - protein, 15 aa, Artificial Sequence
  Description of Artificial Sequence: Synthetic peptide
  Seed: LRMKWMMAMKYPITA
LRMKIMMHMPYPCTA

SEQ ID NO: 229064 - protein, 15 aa, Artificial Sequence
  Description of Artificial Sequence: Synthetic peptide
  Seed: LRMKWMMAMKYPITA
LRMKIMMHMPYPDTA

SEQ ID NO: 229065 - protein, 15 aa, Artificial Sequence
  Description of Artificial Sequence: Synthetic peptide
  Seed: LRMKWMMAMKYPITA
LRMKIMMHMPYPETA

SEQ ID NO: 229066 - protein, 15 aa, Artificial Sequence
  Description of Artificial Sequence: Synthetic peptide
  Seed: LRMKWMMAMKYPITA
LRMKIMMHMPYPFTA

SEQ ID NO: 229067 - protein, 15 aa, Artificial Sequence
  Description of Artificial Sequence: Synthetic peptide
  Seed: LRMKWMMAMKYPITA
LRMKIMMHMPYPGTA

SEQ ID NO: 229068 - protein, 15 aa, Artificial Sequence
  Description of Artificial Sequence: Synthetic peptide
  Seed: LRMKWMMAMKYPITA
LRMKIMMHMPYPHTA

SEQ ID NO: 229069 - protein, 15 aa, Artificial Sequence
  Description of Artificial Sequence: Synthetic peptide
  Seed: LRMKWMMAMKYPITA
LRMKIMMHMPYPITA

SEQ ID NO: 229070 - protein, 15 aa, Artificial Sequence
  Description of Artificial Sequence: Synthetic peptide
  Seed: LRMKWMMAMKYPITA
LRMKIMMHMPYPKTA

SEQ ID NO: 229071 - protein, 15 aa, Artificial Sequence
  Description of Artificial Sequence: Synthetic peptide
  Seed: LRMKWMMAMKYPITA
LRMKIMMHMPYPLTA

SEQ ID NO: 229072 - protein, 15 aa, Artificial Sequence
  Description of Artificial Sequence: Synthetic peptide
  Seed: LRMKWMMAMKYPITA
LRMKIMMHMPYPMTA

SEQ ID NO: 229073 - protein, 15 aa, Artificial Sequence
  Description of Artificial Sequence: Synthetic peptide
  Seed: LRMKWMMAMKYPITA
LRMKIMMHMPYPQTA

SEQ ID NO: 229074 - protein, 15 aa, Artificial Sequence
  Description of Artificial Sequence: Synthetic peptide
  Seed: LRMKWMMAMKYPITA
LRMKIMMHMPYPRTA

SEQ ID NO: 229075 - protein, 15 aa, Artificial Sequence
  Description of Artificial Sequence: Synthetic peptide
  Seed: LRMKWMMAMKYPITA
LRMKIMMHMPYPSTA

SEQ ID NO: 229076 - protein, 15 aa, Artificial Sequence
  Description of Artificial Sequence: Synthetic peptide
  Seed: LRMKWMMAMKYPITA
LRMKIMMHMPYPTTA

SEQ ID NO: 229077 - protein, 15 aa, Artificial Sequence
  Description of Artificial Sequence: Synthetic peptide
  Seed: LRMKWMMAMKYPITA
LRMKIMMHMPYPVTA

SEQ ID NO: 229078 - protein, 15 aa, Artificial Sequence
  Description of Artificial Sequence: Synthetic peptide
  Seed: LRMKWMMAMKYPITA
LRMKIMMHMPYPWTA

SEQ ID NO: 229079 - protein, 15 aa, Artificial Sequence
  Description of Artificial Sequence: Synthetic peptide
  Seed: LRMKWMMAMKYPITA
LRMKIMMHMPYPYTA

SEQ ID NO: 229080 - protein, 15 aa, Artificial Sequence
  Description of Artificial Sequence: Synthetic peptide
  Seed: LRMKWMMAMKYPITA
LRMKIMMHMQYPATA

SEQ ID NO: 229081 - protein, 15 aa, Artificial Sequence
  Description of Artificial Sequence: Synthetic peptide
  Seed: LRMKWMMAMKYPITA
LRMKIMMHMQYPFTA

SEQ ID NO: 229082 - protein, 15 aa, Artificial Sequence
  Description of Artificial Sequence: Synthetic peptide
  Seed: LRMKWMMAMKYPITA
LRMKIMMHMQYPHTA

SEQ ID NO: 229083 - protein, 15 aa, Artificial Sequence
  Description of Artificial Sequence: Synthetic peptide
  Seed: LRMKWMMAMKYPITA
LRMKIMMHMQYPITA

SEQ ID NO: 229084 - protein, 15 aa, Artificial Sequence
  Description of Artificial Sequence: Synthetic peptide
  Seed: LRMKWMMAMKYPITA
LRMKIMMHMQYPKTA

SEQ ID NO: 229085 - protein, 15 aa, Artificial Sequence
  Description of Artificial Sequence: Synthetic peptide
  Seed: LRMKWMMAMKYPITA
LRMKIMMHMQYPLTA

SEQ ID NO: 229086 - protein, 15 aa, Artificial Sequence
  Description of Artificial Sequence: Synthetic peptide
  Seed: LRMKWMMAMKYPITA
LRMKIMMHMQYPMTA

SEQ ID NO: 229087 - protein, 15 aa, Artificial Sequence
  Description of Artificial Sequence: Synthetic peptide
  Seed: LRMKWMMAMKYPITA
LRMKIMMHMQYPQTA

SEQ ID NO: 229088 - protein, 15 aa, Artificial Sequence
  Description of Artificial Sequence: Synthetic peptide
  Seed: LRMKWMMAMKYPITA
LRMKIMMHMQYPRTA

SEQ ID NO: 229089 - protein, 15 aa, Artificial Sequence
  Description of Artificial Sequence: Synthetic peptide
  Seed: LRMKWMMAMKYPITA
LRMKIMMHMQYPSTA

SEQ ID NO: 229090 - protein, 15 aa, Artificial Sequence
  Description of Artificial Sequence: Synthetic peptide
  Seed: LRMKWMMAMKYPITA
LRMKIMMHMQYPVTA

SEQ ID NO: 229091 - protein, 15 aa, Artificial Sequence
  Description of Artificial Sequence: Synthetic peptide
  Seed: LRMKWMMAMKYPITA
LRMKIMMHMQYPYTA

SEQ ID NO: 229092 - protein, 15 aa, Artificial Sequence
  Description of Artificial Sequence: Synthetic peptide
  Seed: LRMKWMMAMKYPITA
LRMKIMMHMRYPATA

SEQ ID NO: 229093 - protein, 15 aa, Artificial Sequence
  Description of Artificial Sequence: Synthetic peptide
  Seed: LRMKWMMAMKYPITA
LRMKIMMHMRYPCTA

SEQ ID NO: 229094 - protein, 15 aa, Artificial Sequence
  Description of Artificial Sequence: Synthetic peptide
  Seed: LRMKWMMAMKYPITA
LRMKIMMHMRYPDTA

SEQ ID NO: 229095 - protein, 15 aa, Artificial Sequence
  Description of Artificial Sequence: Synthetic peptide
  Seed: LRMKWMMAMKYPITA
LRMKIMMHMRYPETA

SEQ ID NO: 229096 - protein, 15 aa, Artificial Sequence
  Description of Artificial Sequence: Synthetic peptide
  Seed: LRMKWMMAMKYPITA
LRMKIMMHMRYPFTA

SEQ ID NO: 229097 - protein, 15 aa, Artificial Sequence
  Description of Artificial Sequence: Synthetic peptide
  Seed: LRMKWMMAMKYPITA
LRMKIMMHMRYPGTA

SEQ ID NO: 229098 - protein, 15 aa, Artificial Sequence
  Description of Artificial Sequence: Synthetic peptide
  Seed: LRMKWMMAMKYPITA
LRMKIMMHMRYPHTA

SEQ ID NO: 229099 - protein, 15 aa, Artificial Sequence
  Description of Artificial Sequence: Synthetic peptide
  Seed: LRMKWMMAMKYPITA
LRMKIMMHMRYPITA

SEQ ID NO: 229100 - protein, 15 aa, Artificial Sequence
  Description of Artificial Sequence: Synthetic peptide
  Seed: LRMKWMMAMKYPITA
LRMKIMMHMRYPKTA

SEQ ID NO: 229101 - protein, 15 aa, Artificial Sequence
  Description of Artificial Sequence: Synthetic peptide
  Seed: LRMKWMMAMKYPITA
LRMKIMMHMRYPLTA

SEQ ID NO: 229102 - protein, 15 aa, Artificial Sequence
  Description of Artificial Sequence: Synthetic peptide
  Seed: LRMKWMMAMKYPITA
LRMKIMMHMRYPMTA

SEQ ID NO: 229103 - protein, 15 aa, Artificial Sequence
  Description of Artificial Sequence: Synthetic peptide
  Seed: LRMKWMMAMKYPITA
LRMKIMMHMRYPNTA

SEQ ID NO: 229104 - protein, 15 aa, Artificial Sequence
  Description of Artificial Sequence: Synthetic peptide
  Seed: LRMKWMMAMKYPITA
LRMKIMMHMRYPPTA

SEQ ID NO: 229105 - protein, 15 aa, Artificial Sequence
  Description of Artificial Sequence: Synthetic peptide
  Seed: LRMKWMMAMKYPITA
LRMKIMMHMRYPQTA

SEQ ID NO: 229106 - protein, 15 aa, Artificial Sequence
  Description of Artificial Sequence: Synthetic peptide
  Seed: LRMKWMMAMKYPITA
LRMKIMMHMRYPRTA

SEQ ID NO: 229107 - protein, 15 aa, Artificial Sequence
  Description of Artificial Sequence: Synthetic peptide
  Seed: LRMKWMMAMKYPITA
LRMKIMMHMRYPSTA

SEQ ID NO: 229108 - protein, 15 aa, Artificial Sequence
  Description of Artificial Sequence: Synthetic peptide
  Seed: LRMKWMMAMKYPITA
LRMKIMMHMRYPTTA

SEQ ID NO: 229109 - protein, 15 aa, Artificial Sequence
  Description of Artificial Sequence: Synthetic peptide
  Seed: LRMKWMMAMKYPITA
LRMKIMMHMRYPVTA

SEQ ID NO: 229110 - protein, 15 aa, Artificial Sequence
  Description of Artificial Sequence: Synthetic peptide
  Seed: LRMKWMMAMKYPITA
LRMKIMMHMRYPWTA

SEQ ID NO: 229111 - protein, 15 aa, Artificial Sequence
  Description of Artificial Sequence: Synthetic peptide
  Seed: LRMKWMMAMKYPITA
LRMKIMMHMRYPYTA

SEQ ID NO: 229112 - protein, 15 aa, Artificial Sequence
  Description of Artificial Sequence: Synthetic peptide
  Seed: LRMKWMMAMKYPITA
LRMKIMMHMSYPATA

SEQ ID NO: 229113 - protein, 15 aa, Artificial Sequence
  Description of Artificial Sequence: Synthetic peptide
  Seed: LRMKWMMAMKYPITA
LRMKIMMHMSYPCTA

SEQ ID NO: 229114 - protein, 15 aa, Artificial Sequence
  Description of Artificial Sequence: Synthetic peptide
  Seed: LRMKWMMAMKYPITA
LRMKIMMHMSYPDTA

SEQ ID NO: 229115 - protein, 15 aa, Artificial Sequence
  Description of Artificial Sequence: Synthetic peptide
  Seed: LRMKWMMAMKYPITA
LRMKIMMHMSYPETA

SEQ ID NO: 229116 - protein, 15 aa, Artificial Sequence
  Description of Artificial Sequence: Synthetic peptide
  Seed: LRMKWMMAMKYPITA
LRMKIMMHMSYPFTA

SEQ ID NO: 229117 - protein, 15 aa, Artificial Sequence
  Description of Artificial Sequence: Synthetic peptide
  Seed: LRMKWMMAMKYPITA
LRMKIMMHMSYPGTA

SEQ ID NO: 229118 - protein, 15 aa, Artificial Sequence
  Description of Artificial Sequence: Synthetic peptide
  Seed: LRMKWMMAMKYPITA
LRMKIMMHMSYPHTA

SEQ ID NO: 229119 - protein, 15 aa, Artificial Sequence
  Description of Artificial Sequence: Synthetic peptide
  Seed: LRMKWMMAMKYPITA
LRMKIMMHMSYPITA

SEQ ID NO: 229120 - protein, 15 aa, Artificial Sequence
  Description of Artificial Sequence: Synthetic peptide
  Seed: LRMKWMMAMKYPITA
LRMKIMMHMSYPKTA

SEQ ID NO: 229121 - protein, 15 aa, Artificial Sequence
  Description of Artificial Sequence: Synthetic peptide
  Seed: LRMKWMMAMKYPITA
LRMKIMMHMSYPLTA

SEQ ID NO: 229122 - protein, 15 aa, Artificial Sequence
  Description of Artificial Sequence: Synthetic peptide
  Seed: LRMKWMMAMKYPITA
LRMKIMMHMSYPMTA

SEQ ID NO: 229123 - protein, 15 aa, Artificial Sequence
  Description of Artificial Sequence: Synthetic peptide
  Seed: LRMKWMMAMKYPITA
LRMKIMMHMSYPNTA

SEQ ID NO: 229124 - protein, 15 aa, Artificial Sequence
  Description of Artificial Sequence: Synthetic peptide
  Seed: LRMKWMMAMKYPITA
LRMKIMMHMSYPPTA

SEQ ID NO: 229125 - protein, 15 aa, Artificial Sequence
  Description of Artificial Sequence: Synthetic peptide
  Seed: LRMKWMMAMKYPITA
LRMKIMMHMSYPQTA

SEQ ID NO: 229126 - protein, 15 aa, Artificial Sequence
  Description of Artificial Sequence: Synthetic peptide
  Seed: LRMKWMMAMKYPITA
LRMKIMMHMSYPRTA

SEQ ID NO: 229127 - protein, 15 aa, Artificial Sequence
  Description of Artificial Sequence: Synthetic peptide
  Seed: LRMKWMMAMKYPITA
LRMKIMMHMSYPSTA

SEQ ID NO: 229128 - protein, 15 aa, Artificial Sequence
  Description of Artificial Sequence: Synthetic peptide
  Seed: LRMKWMMAMKYPITA
LRMKIMMHMSYPTTA

SEQ ID NO: 229129 - protein, 15 aa, Artificial Sequence
  Description of Artificial Sequence: Synthetic peptide
  Seed: LRMKWMMAMKYPITA
LRMKIMMHMSYPVTA

SEQ ID NO: 229130 - protein, 15 aa, Artificial Sequence
  Description of Artificial Sequence: Synthetic peptide
  Seed: LRMKWMMAMKYPITA
LRMKIMMHMSYPWTA

SEQ ID NO: 229131 - protein, 15 aa, Artificial Sequence
  Description of Artificial Sequence: Synthetic peptide
  Seed: LRMKWMMAMKYPITA
LRMKIMMHMSYPYTA

SEQ ID NO: 229132 - protein, 15 aa, Artificial Sequence
  Description of Artificial Sequence: Synthetic peptide
  Seed: LRMKWMMAMKYPITA
LRMKIMMHMTYPATA

SEQ ID NO: 229133 - protein, 15 aa, Artificial Sequence
  Description of Artificial Sequence: Synthetic peptide
  Seed: LRMKWMMAMKYPITA
LRMKIMMHMTYPETA

SEQ ID NO: 229134 - protein, 15 aa, Artificial Sequence
  Description of Artificial Sequence: Synthetic peptide
  Seed: LRMKWMMAMKYPITA
LRMKIMMHMTYPFTA

SEQ ID NO: 229135 - protein, 15 aa, Artificial Sequence
  Description of Artificial Sequence: Synthetic peptide
  Seed: LRMKWMMAMKYPITA
LRMKIMMHMTYPGTA

SEQ ID NO: 229136 - protein, 15 aa, Artificial Sequence
  Description of Artificial Sequence: Synthetic peptide
  Seed: LRMKWMMAMKYPITA
LRMKIMMHMTYPHTA

SEQ ID NO: 229137 - protein, 15 aa, Artificial Sequence
  Description of Artificial Sequence: Synthetic peptide
  Seed: LRMKWMMAMKYPITA
LRMKIMMHMTYPITA

SEQ ID NO: 229138 - protein, 15 aa, Artificial Sequence
  Description of Artificial Sequence: Synthetic peptide
  Seed: LRMKWMMAMKYPITA
LRMKIMMHMTYPKTA

SEQ ID NO: 229139 - protein, 15 aa, Artificial Sequence
  Description of Artificial Sequence: Synthetic peptide
  Seed: LRMKWMMAMKYPITA
LRMKIMMHMTYPLTA

SEQ ID NO: 229140 - protein, 15 aa, Artificial Sequence
  Description of Artificial Sequence: Synthetic peptide
  Seed: LRMKWMMAMKYPITA
LRMKIMMHMTYPMTA

SEQ ID NO: 229141 - protein, 15 aa, Artificial Sequence
  Description of Artificial Sequence: Synthetic peptide
  Seed: LRMKWMMAMKYPITA
LRMKIMMHMTYPNTA

SEQ ID NO: 229142 - protein, 15 aa, Artificial Sequence
  Description of Artificial Sequence: Synthetic peptide
  Seed: LRMKWMMAMKYPITA
LRMKIMMHMTYPQTA

SEQ ID NO: 229143 - protein, 15 aa, Artificial Sequence
  Description of Artificial Sequence: Synthetic peptide
  Seed: LRMKWMMAMKYPITA
LRMKIMMHMTYPRTA

SEQ ID NO: 229144 - protein, 15 aa, Artificial Sequence
  Description of Artificial Sequence: Synthetic peptide
  Seed: LRMKWMMAMKYPITA
LRMKIMMHMTYPSTA

SEQ ID NO: 229145 - protein, 15 aa, Artificial Sequence
  Description of Artificial Sequence: Synthetic peptide
  Seed: LRMKWMMAMKYPITA
LRMKIMMHMTYPTTA

SEQ ID NO: 229146 - protein, 15 aa, Artificial Sequence
  Description of Artificial Sequence: Synthetic peptide
  Seed: LRMKWMMAMKYPITA
LRMKIMMHMTYPVTA

SEQ ID NO: 229147 - protein, 15 aa, Artificial Sequence
  Description of Artificial Sequence: Synthetic peptide
  Seed: LRMKWMMAMKYPITA
LRMKIMMHMTYPWTA

SEQ ID NO: 229148 - protein, 15 aa, Artificial Sequence
  Description of Artificial Sequence: Synthetic peptide
  Seed: LRMKWMMAMKYPITA
LRMKIMMHMTYPYTA

SEQ ID NO: 229149 - protein, 15 aa, Artificial Sequence
  Description of Artificial Sequence: Synthetic peptide
  Seed: LRMKWMMAMKYPITA
LRMKIMMHMVYPATA

SEQ ID NO: 229150 - protein, 15 aa, Artificial Sequence
  Description of Artificial Sequence: Synthetic peptide
  Seed: LRMKWMMAMKYPITA
LRMKIMMHMVYPETA

SEQ ID NO: 229151 - protein, 15 aa, Artificial Sequence
  Description of Artificial Sequence: Synthetic peptide
  Seed: LRMKWMMAMKYPITA
LRMKIMMHMVYPFTA

SEQ ID NO: 229152 - protein, 15 aa, Artificial Sequence
  Description of Artificial Sequence: Synthetic peptide
  Seed: LRMKWMMAMKYPITA
LRMKIMMHMVYPGTA

SEQ ID NO: 229153 - protein, 15 aa, Artificial Sequence
  Description of Artificial Sequence: Synthetic peptide
  Seed: LRMKWMMAMKYPITA
LRMKIMMHMVYPHTA

SEQ ID NO: 229154 - protein, 15 aa, Artificial Sequence
  Description of Artificial Sequence: Synthetic peptide
  Seed: LRMKWMMAMKYPITA
LRMKIMMHMVYPITA

SEQ ID NO: 229155 - protein, 15 aa, Artificial Sequence
  Description of Artificial Sequence: Synthetic peptide
  Seed: LRMKWMMAMKYPITA
LRMKIMMHMVYPKTA

SEQ ID NO: 229156 - protein, 15 aa, Artificial Sequence
  Description of Artificial Sequence: Synthetic peptide
  Seed: LRMKWMMAMKYPITA
LRMKIMMHMVYPLTA

SEQ ID NO: 229157 - protein, 15 aa, Artificial Sequence
  Description of Artificial Sequence: Synthetic peptide
  Seed: LRMKWMMAMKYPITA
LRMKIMMHMVYPMTA

SEQ ID NO: 229158 - protein, 15 aa, Artificial Sequence
  Description of Artificial Sequence: Synthetic peptide
  Seed: LRMKWMMAMKYPITA
LRMKIMMHMVYPNTA

SEQ ID NO: 229159 - protein, 15 aa, Artificial Sequence
  Description of Artificial Sequence: Synthetic peptide
  Seed: LRMKWMMAMKYPITA
LRMKIMMHMVYPQTA

SEQ ID NO: 229160 - protein, 15 aa, Artificial Sequence
  Description of Artificial Sequence: Synthetic peptide
  Seed: LRMKWMMAMKYPITA
LRMKIMMHMVYPRTA

SEQ ID NO: 229161 - protein, 15 aa, Artificial Sequence
  Description of Artificial Sequence: Synthetic peptide
  Seed: LRMKWMMAMKYPITA
LRMKIMMHMVYPSTA

SEQ ID NO: 229162 - protein, 15 aa, Artificial Sequence
  Description of Artificial Sequence: Synthetic peptide
  Seed: LRMKWMMAMKYPITA
LRMKIMMHMVYPTTA

SEQ ID NO: 229163 - protein, 15 aa, Artificial Sequence
  Description of Artificial Sequence: Synthetic peptide
  Seed: LRMKWMMAMKYPITA
LRMKIMMHMVYPVTA

SEQ ID NO: 229164 - protein, 15 aa, Artificial Sequence
  Description of Artificial Sequence: Synthetic peptide
  Seed: LRMKWMMAMKYPITA
LRMKIMMHMVYPWTA

SEQ ID NO: 229165 - protein, 15 aa, Artificial Sequence
  Description of Artificial Sequence: Synthetic peptide
  Seed: LRMKWMMAMKYPITA
LRMKIMMHMVYPYTA

SEQ ID NO: 229166 - protein, 15 aa, Artificial Sequence
  Description of Artificial Sequence: Synthetic peptide
  Seed: LRMKWMMAMKYPITA
LRMKIMMHMWYPLTA

SEQ ID NO: 229167 - protein, 15 aa, Artificial Sequence
  Description of Artificial Sequence: Synthetic peptide
  Seed: LRMKWMMAMKYPITA
LRMKIMMHMWYPRTA

SEQ ID NO: 229168 - protein, 15 aa, Artificial Sequence
  Description of Artificial Sequence: Synthetic peptide
  Seed: LRMKWMMAMKYPITA
LRMKIMMHMWYPYTA

SEQ ID NO: 229169 - protein, 15 aa, Artificial Sequence
  Description of Artificial Sequence: Synthetic peptide
  Seed: LRMKWMMAMKYPITA
LRMKIMMHMYYPFTA

SEQ ID NO: 229170 - protein, 15 aa, Artificial Sequence
  Description of Artificial Sequence: Synthetic peptide
  Seed: LRMKWMMAMKYPITA
LRMKIMMHMYYPRTA

SEQ ID NO: 229171 - protein, 15 aa, Artificial Sequence
  Description of Artificial Sequence: Synthetic peptide
  Seed: LRMKWMMAMKYPITA
LRMKIMMHMYYPYTA

SEQ ID NO: 229172 - protein, 15 aa, Artificial Sequence
  Description of Artificial Sequence: Synthetic peptide
  Seed: LRMKWMMAMKYPITA
LRMKIMMIMAYPATA

SEQ ID NO: 229173 - protein, 15 aa, Artificial Sequence
  Description of Artificial Sequence: Synthetic peptide
  Seed: LRMKWMMAMKYPITA
LRMKIMMIMAYPCTA

SEQ ID NO: 229174 - protein, 15 aa, Artificial Sequence
  Description of Artificial Sequence: Synthetic peptide
  Seed: LRMKWMMAMKYPITA
LRMKIMMIMAYPDTA

SEQ ID NO: 229175 - protein, 15 aa, Artificial Sequence
  Description of Artificial Sequence: Synthetic peptide
  Seed: LRMKWMMAMKYPITA
LRMKIMMIMAYPETA

SEQ ID NO: 229176 - protein, 15 aa, Artificial Sequence
  Description of Artificial Sequence: Synthetic peptide
  Seed: LRMKWMMAMKYPITA
LRMKIMMIMAYPFTA

SEQ ID NO: 229177 - protein, 15 aa, Artificial Sequence
  Description of Artificial Sequence: Synthetic peptide
  Seed: LRMKWMMAMKYPITA
LRMKIMMIMAYPGTA

SEQ ID NO: 229178 - protein, 15 aa, Artificial Sequence
  Description of Artificial Sequence: Synthetic peptide
  Seed: LRMKWMMAMKYPITA
LRMKIMMIMAYPHTA

SEQ ID NO: 229179 - protein, 15 aa, Artificial Sequence
  Description of Artificial Sequence: Synthetic peptide
  Seed: LRMKWMMAMKYPITA
LRMKIMMIMAYPITA

SEQ ID NO: 229180 - protein, 15 aa, Artificial Sequence
  Description of Artificial Sequence: Synthetic peptide
  Seed: LRMKWMMAMKYPITA
LRMKIMMIMAYPKTA

SEQ ID NO: 229181 - protein, 15 aa, Artificial Sequence
  Description of Artificial Sequence: Synthetic peptide
  Seed: LRMKWMMAMKYPITA
LRMKIMMIMAYPLTA

SEQ ID NO: 229182 - protein, 15 aa, Artificial Sequence
  Description of Artificial Sequence: Synthetic peptide
  Seed: LRMKWMMAMKYPITA
LRMKIMMIMAYPMTA

SEQ ID NO: 229183 - protein, 15 aa, Artificial Sequence
  Description of Artificial Sequence: Synthetic peptide
  Seed: LRMKWMMAMKYPITA
LRMKIMMIMAYPNTA

SEQ ID NO: 229184 - protein, 15 aa, Artificial Sequence
  Description of Artificial Sequence: Synthetic peptide
  Seed: LRMKWMMAMKYPITA
LRMKIMMIMAYPPTA

SEQ ID NO: 229185 - protein, 15 aa, Artificial Sequence
  Description of Artificial Sequence: Synthetic peptide
  Seed: LRMKWMMAMKYPITA
LRMKIMMIMAYPQTA

SEQ ID NO: 229186 - protein, 15 aa, Artificial Sequence
  Description of Artificial Sequence: Synthetic peptide
  Seed: LRMKWMMAMKYPITA
LRMKIMMIMAYPRTA

SEQ ID NO: 229187 - protein, 15 aa, Artificial Sequence
  Description of Artificial Sequence: Synthetic peptide
  Seed: LRMKWMMAMKYPITA
LRMKIMMIMAYPSTA

SEQ ID NO: 229188 - protein, 15 aa, Artificial Sequence
  Description of Artificial Sequence: Synthetic peptide
  Seed: LRMKWMMAMKYPITA
LRMKIMMIMAYPTTA

SEQ ID NO: 229189 - protein, 15 aa, Artificial Sequence
  Description of Artificial Sequence: Synthetic peptide
  Seed: LRMKWMMAMKYPITA
LRMKIMMIMAYPVTA

SEQ ID NO: 229190 - protein, 15 aa, Artificial Sequence
  Description of Artificial Sequence: Synthetic peptide
  Seed: LRMKWMMAMKYPITA
LRMKIMMIMAYPWTA

SEQ ID NO: 229191 - protein, 15 aa, Artificial Sequence
  Description of Artificial Sequence: Synthetic peptide
  Seed: LRMKWMMAMKYPITA
LRMKIMMIMAYPYTA

SEQ ID NO: 229192 - protein, 15 aa, Artificial Sequence
  Description of Artificial Sequence: Synthetic peptide
  Seed: LRMKWMMAMKYPITA
LRMKIMMIMCYPATA

SEQ ID NO: 229193 - protein, 15 aa, Artificial Sequence
  Description of Artificial Sequence: Synthetic peptide
  Seed: LRMKWMMAMKYPITA
LRMKIMMIMCYPVTA

SEQ ID NO: 229194 - protein, 15 aa, Artificial Sequence
  Description of Artificial Sequence: Synthetic peptide
  Seed: LRMKWMMAMKYPITA
LRMKIMMIMDYPATA

SEQ ID NO: 229195 - protein, 15 aa, Artificial Sequence
  Description of Artificial Sequence: Synthetic peptide
  Seed: LRMKWMMAMKYPITA
LRMKIMMIMDYPDTA

SEQ ID NO: 229196 - protein, 15 aa, Artificial Sequence
  Description of Artificial Sequence: Synthetic peptide
  Seed: LRMKWMMAMKYPITA
LRMKIMMIMDYPETA

SEQ ID NO: 229197 - protein, 15 aa, Artificial Sequence
  Description of Artificial Sequence: Synthetic peptide
  Seed: LRMKWMMAMKYPITA
LRMKIMMIMDYPGTA

SEQ ID NO: 229198 - protein, 15 aa, Artificial Sequence
  Description of Artificial Sequence: Synthetic peptide
  Seed: LRMKWMMAMKYPITA
LRMKIMMIMDYPHTA

SEQ ID NO: 229199 - protein, 15 aa, Artificial Sequence
  Description of Artificial Sequence: Synthetic peptide
  Seed: LRMKWMMAMKYPITA
LRMKIMMIMDYPITA

SEQ ID NO: 229200 - protein, 15 aa, Artificial Sequence
  Description of Artificial Sequence: Synthetic peptide
  Seed: LRMKWMMAMKYPITA
LRMKIMMIMDYPLTA

SEQ ID NO: 229201 - protein, 15 aa, Artificial Sequence
  Description of Artificial Sequence: Synthetic peptide
  Seed: LRMKWMMAMKYPITA
LRMKIMMIMDYPMTA

SEQ ID NO: 229202 - protein, 15 aa, Artificial Sequence
  Description of Artificial Sequence: Synthetic peptide
  Seed: LRMKWMMAMKYPITA
LRMKIMMIMDYPQTA

SEQ ID NO: 229203 - protein, 15 aa, Artificial Sequence
  Description of Artificial Sequence: Synthetic peptide
  Seed: LRMKWMMAMKYPITA
LRMKIMMIMDYPSTA

SEQ ID NO: 229204 - protein, 15 aa, Artificial Sequence
  Description of Artificial Sequence: Synthetic peptide
  Seed: LRMKWMMAMKYPITA
LRMKIMMIMDYPTTA

SEQ ID NO: 229205 - protein, 15 aa, Artificial Sequence
  Description of Artificial Sequence: Synthetic peptide
  Seed: LRMKWMMAMKYPITA
LRMKIMMIMDYPVTA

SEQ ID NO: 229206 - protein, 15 aa, Artificial Sequence
  Description of Artificial Sequence: Synthetic peptide
  Seed: LRMKWMMAMKYPITA
LRMKIMMIMEYPATA

SEQ ID NO: 229207 - protein, 15 aa, Artificial Sequence
  Description of Artificial Sequence: Synthetic peptide
  Seed: LRMKWMMAMKYPITA
LRMKIMMIMEYPITA

SEQ ID NO: 229208 - protein, 15 aa, Artificial Sequence
  Description of Artificial Sequence: Synthetic peptide
  Seed: LRMKWMMAMKYPITA
LRMKIMMIMEYPLTA

SEQ ID NO: 229209 - protein, 15 aa, Artificial Sequence
  Description of Artificial Sequence: Synthetic peptide
  Seed: LRMKWMMAMKYPITA
LRMKIMMIMEYPVTA

SEQ ID NO: 229210 - protein, 15 aa, Artificial Sequence
  Description of Artificial Sequence: Synthetic peptide
  Seed: LRMKWMMAMKYPITA
LRMKIMMIMGYPATA

SEQ ID NO: 229211 - protein, 15 aa, Artificial Sequence
  Description of Artificial Sequence: Synthetic peptide
  Seed: LRMKWMMAMKYPITA
LRMKIMMIMGYPCTA

SEQ ID NO: 229212 - protein, 15 aa, Artificial Sequence
  Description of Artificial Sequence: Synthetic peptide
  Seed: LRMKWMMAMKYPITA
LRMKIMMIMGYPDTA

SEQ ID NO: 229213 - protein, 15 aa, Artificial Sequence
  Description of Artificial Sequence: Synthetic peptide
  Seed: LRMKWMMAMKYPITA
LRMKIMMIMGYPETA

SEQ ID NO: 229214 - protein, 15 aa, Artificial Sequence
  Description of Artificial Sequence: Synthetic peptide
  Seed: LRMKWMMAMKYPITA
LRMKIMMIMGYPFTA

SEQ ID NO: 229215 - protein, 15 aa, Artificial Sequence
  Description of Artificial Sequence: Synthetic peptide
  Seed: LRMKWMMAMKYPITA
LRMKIMMIMGYPGTA

SEQ ID NO: 229216 - protein, 15 aa, Artificial Sequence
  Description of Artificial Sequence: Synthetic peptide
  Seed: LRMKWMMAMKYPITA
LRMKIMMIMGYPHTA

SEQ ID NO: 229217 - protein, 15 aa, Artificial Sequence
  Description of Artificial Sequence: Synthetic peptide
  Seed: LRMKWMMAMKYPITA
LRMKIMMIMGYPITA

SEQ ID NO: 229218 - protein, 15 aa, Artificial Sequence
  Description of Artificial Sequence: Synthetic peptide
  Seed: LRMKWMMAMKYPITA
LRMKIMMIMGYPKTA

SEQ ID NO: 229219 - protein, 15 aa, Artificial Sequence
  Description of Artificial Sequence: Synthetic peptide
  Seed: LRMKWMMAMKYPITA
LRMKIMMIMGYPLTA

SEQ ID NO: 229220 - protein, 15 aa, Artificial Sequence
  Description of Artificial Sequence: Synthetic peptide
  Seed: LRMKWMMAMKYPITA
LRMKIMMIMGYPMTA

SEQ ID NO: 229221 - protein, 15 aa, Artificial Sequence
  Description of Artificial Sequence: Synthetic peptide
  Seed: LRMKWMMAMKYPITA
LRMKIMMIMGYPNTA

SEQ ID NO: 229222 - protein, 15 aa, Artificial Sequence
  Description of Artificial Sequence: Synthetic peptide
  Seed: LRMKWMMAMKYPITA
LRMKIMMIMGYPPTA

SEQ ID NO: 229223 - protein, 15 aa, Artificial Sequence
  Description of Artificial Sequence: Synthetic peptide
  Seed: LRMKWMMAMKYPITA
LRMKIMMIMGYPQTA

SEQ ID NO: 229224 - protein, 15 aa, Artificial Sequence
  Description of Artificial Sequence: Synthetic peptide
  Seed: LRMKWMMAMKYPITA
LRMKIMMIMGYPRTA

SEQ ID NO: 229225 - protein, 15 aa, Artificial Sequence
  Description of Artificial Sequence: Synthetic peptide
  Seed: LRMKWMMAMKYPITA
LRMKIMMIMGYPSTA

SEQ ID NO: 229226 - protein, 15 aa, Artificial Sequence
  Description of Artificial Sequence: Synthetic peptide
  Seed: LRMKWMMAMKYPITA
LRMKIMMIMGYPTTA

SEQ ID NO: 229227 - protein, 15 aa, Artificial Sequence
  Description of Artificial Sequence: Synthetic peptide
  Seed: LRMKWMMAMKYPITA
LRMKIMMIMGYPVTA

SEQ ID NO: 229228 - protein, 15 aa, Artificial Sequence
  Description of Artificial Sequence: Synthetic peptide
  Seed: LRMKWMMAMKYPITA
LRMKIMMIMGYPYTA

SEQ ID NO: 229229 - protein, 15 aa, Artificial Sequence
  Description of Artificial Sequence: Synthetic peptide
  Seed: LRMKWMMAMKYPITA
LRMKIMMIMHYPATA

SEQ ID NO: 229230 - protein, 15 aa, Artificial Sequence
  Description of Artificial Sequence: Synthetic peptide
  Seed: LRMKWMMAMKYPITA
LRMKIMMIMHYPETA

SEQ ID NO: 229231 - protein, 15 aa, Artificial Sequence
  Description of Artificial Sequence: Synthetic peptide
  Seed: LRMKWMMAMKYPITA
LRMKIMMIMHYPFTA

SEQ ID NO: 229232 - protein, 15 aa, Artificial Sequence
  Description of Artificial Sequence: Synthetic peptide
  Seed: LRMKWMMAMKYPITA
LRMKIMMIMHYPGTA

SEQ ID NO: 229233 - protein, 15 aa, Artificial Sequence
  Description of Artificial Sequence: Synthetic peptide
  Seed: LRMKWMMAMKYPITA
LRMKIMMIMHYPHTA

SEQ ID NO: 229234 - protein, 15 aa, Artificial Sequence
  Description of Artificial Sequence: Synthetic peptide
  Seed: LRMKWMMAMKYPITA
LRMKIMMIMHYPITA

SEQ ID NO: 229235 - protein, 15 aa, Artificial Sequence
  Description of Artificial Sequence: Synthetic peptide
  Seed: LRMKWMMAMKYPITA
LRMKIMMIMHYPKTA

SEQ ID NO: 229236 - protein, 15 aa, Artificial Sequence
  Description of Artificial Sequence: Synthetic peptide
  Seed: LRMKWMMAMKYPITA
LRMKIMMIMHYPLTA

SEQ ID NO: 229237 - protein, 15 aa, Artificial Sequence
  Description of Artificial Sequence: Synthetic peptide
  Seed: LRMKWMMAMKYPITA
LRMKIMMIMHYPMTA

SEQ ID NO: 229238 - protein, 15 aa, Artificial Sequence
  Description of Artificial Sequence: Synthetic peptide
  Seed: LRMKWMMAMKYPITA
LRMKIMMIMHYPNTA

SEQ ID NO: 229239 - protein, 15 aa, Artificial Sequence
  Description of Artificial Sequence: Synthetic peptide
  Seed: LRMKWMMAMKYPITA
LRMKIMMIMHYPPTA

SEQ ID NO: 229240 - protein, 15 aa, Artificial Sequence
  Description of Artificial Sequence: Synthetic peptide
  Seed: LRMKWMMAMKYPITA
LRMKIMMIMHYPQTA

SEQ ID NO: 229241 - protein, 15 aa, Artificial Sequence
  Description of Artificial Sequence: Synthetic peptide
  Seed: LRMKWMMAMKYPITA
LRMKIMMIMHYPRTA

SEQ ID NO: 229242 - protein, 15 aa, Artificial Sequence
  Description of Artificial Sequence: Synthetic peptide
  Seed: LRMKWMMAMKYPITA
LRMKIMMIMHYPSTA

SEQ ID NO: 229243 - protein, 15 aa, Artificial Sequence
  Description of Artificial Sequence: Synthetic peptide
  Seed: LRMKWMMAMKYPITA
LRMKIMMIMHYPTTA

SEQ ID NO: 229244 - protein, 15 aa, Artificial Sequence
  Description of Artificial Sequence: Synthetic peptide
  Seed: LRMKWMMAMKYPITA
LRMKIMMIMHYPVTA

SEQ ID NO: 229245 - protein, 15 aa, Artificial Sequence
  Description of Artificial Sequence: Synthetic peptide
  Seed: LRMKWMMAMKYPITA
LRMKIMMIMHYPYTA

SEQ ID NO: 229246 - protein, 15 aa, Artificial Sequence
  Description of Artificial Sequence: Synthetic peptide
  Seed: LRMKWMMAMKYPITA
LRMKIMMIMIYPATA

SEQ ID NO: 229247 - protein, 15 aa, Artificial Sequence
  Description of Artificial Sequence: Synthetic peptide
  Seed: LRMKWMMAMKYPITA
LRMKIMMIMIYPDTA

SEQ ID NO: 229248 - protein, 15 aa, Artificial Sequence
  Description of Artificial Sequence: Synthetic peptide
  Seed: LRMKWMMAMKYPITA
LRMKIMMIMIYPETA

SEQ ID NO: 229249 - protein, 15 aa, Artificial Sequence
  Description of Artificial Sequence: Synthetic peptide
  Seed: LRMKWMMAMKYPITA
LRMKIMMIMIYPGTA

SEQ ID NO: 229250 - protein, 15 aa, Artificial Sequence
  Description of Artificial Sequence: Synthetic peptide
  Seed: LRMKWMMAMKYPITA
LRMKIMMIMIYPHTA

SEQ ID NO: 229251 - protein, 15 aa, Artificial Sequence
  Description of Artificial Sequence: Synthetic peptide
  Seed: LRMKWMMAMKYPITA
LRMKIMMIMIYPITA

SEQ ID NO: 229252 - protein, 15 aa, Artificial Sequence
  Description of Artificial Sequence: Synthetic peptide
  Seed: LRMKWMMAMKYPITA
LRMKIMMIMIYPKTA

SEQ ID NO: 229253 - protein, 15 aa, Artificial Sequence
  Description of Artificial Sequence: Synthetic peptide
  Seed: LRMKWMMAMKYPITA
LRMKIMMIMIYPLTA

SEQ ID NO: 229254 - protein, 15 aa, Artificial Sequence
  Description of Artificial Sequence: Synthetic peptide
  Seed: LRMKWMMAMKYPITA
LRMKIMMIMIYPMTA

SEQ ID NO: 229255 - protein, 15 aa, Artificial Sequence
  Description of Artificial Sequence: Synthetic peptide
  Seed: LRMKWMMAMKYPITA
LRMKIMMIMIYPNTA

SEQ ID NO: 229256 - protein, 15 aa, Artificial Sequence
  Description of Artificial Sequence: Synthetic peptide
  Seed: LRMKWMMAMKYPITA
LRMKIMMIMIYPRTA

SEQ ID NO: 229257 - protein, 15 aa, Artificial Sequence
  Description of Artificial Sequence: Synthetic peptide
  Seed: LRMKWMMAMKYPITA
LRMKIMMIMIYPSTA

SEQ ID NO: 229258 - protein, 15 aa, Artificial Sequence
  Description of Artificial Sequence: Synthetic peptide
  Seed: LRMKWMMAMKYPITA
LRMKIMMIMIYPTTA

SEQ ID NO: 229259 - protein, 15 aa, Artificial Sequence
  Description of Artificial Sequence: Synthetic peptide
  Seed: LRMKWMMAMKYPITA
LRMKIMMIMIYPVTA

SEQ ID NO: 229260 - protein, 15 aa, Artificial Sequence
  Description of Artificial Sequence: Synthetic peptide
  Seed: LRMKWMMAMKYPITA
LRMKIMMIMKYPATA

SEQ ID NO: 229261 - protein, 15 aa, Artificial Sequence
  Description of Artificial Sequence: Synthetic peptide
  Seed: LRMKWMMAMKYPITA
LRMKIMMIMKYPCTA

SEQ ID NO: 229262 - protein, 15 aa, Artificial Sequence
  Description of Artificial Sequence: Synthetic peptide
  Seed: LRMKWMMAMKYPITA
LRMKIMMIMKYPDTA

SEQ ID NO: 229263 - protein, 15 aa, Artificial Sequence
  Description of Artificial Sequence: Synthetic peptide
  Seed: LRMKWMMAMKYPITA
LRMKIMMIMKYPETA

SEQ ID NO: 229264 - protein, 15 aa, Artificial Sequence
  Description of Artificial Sequence: Synthetic peptide
  Seed: LRMKWMMAMKYPITA
LRMKIMMIMKYPFTA

SEQ ID NO: 229265 - protein, 15 aa, Artificial Sequence
  Description of Artificial Sequence: Synthetic peptide
  Seed: LRMKWMMAMKYPITA
LRMKIMMIMKYPGTA

SEQ ID NO: 229266 - protein, 15 aa, Artificial Sequence
  Description of Artificial Sequence: Synthetic peptide
  Seed: LRMKWMMAMKYPITA
LRMKIMMIMKYPHTA

SEQ ID NO: 229267 - protein, 15 aa, Artificial Sequence
  Description of Artificial Sequence: Synthetic peptide
  Seed: LRMKWMMAMKYPITA
LRMKIMMIMKYPITA

SEQ ID NO: 229268 - protein, 15 aa, Artificial Sequence
  Description of Artificial Sequence: Synthetic peptide
  Seed: LRMKWMMAMKYPITA
LRMKIMMIMKYPKTA

SEQ ID NO: 229269 - protein, 15 aa, Artificial Sequence
  Description of Artificial Sequence: Synthetic peptide
  Seed: LRMKWMMAMKYPITA
LRMKIMMIMKYPLTA

SEQ ID NO: 229270 - protein, 15 aa, Artificial Sequence
  Description of Artificial Sequence: Synthetic peptide
  Seed: LRMKWMMAMKYPITA
LRMKIMMIMKYPMTA

SEQ ID NO: 229271 - protein, 15 aa, Artificial Sequence
  Description of Artificial Sequence: Synthetic peptide
  Seed: LRMKWMMAMKYPITA
LRMKIMMIMKYPNTA

SEQ ID NO: 229272 - protein, 15 aa, Artificial Sequence
  Description of Artificial Sequence: Synthetic peptide
  Seed: LRMKWMMAMKYPITA
LRMKIMMIMKYPPTA

SEQ ID NO: 229273 - protein, 15 aa, Artificial Sequence
  Description of Artificial Sequence: Synthetic peptide
  Seed: LRMKWMMAMKYPITA
LRMKIMMIMKYPQTA

SEQ ID NO: 229274 - protein, 15 aa, Artificial Sequence
  Description of Artificial Sequence: Synthetic peptide
  Seed: LRMKWMMAMKYPITA
LRMKIMMIMKYPRTA

SEQ ID NO: 229275 - protein, 15 aa, Artificial Sequence
  Description of Artificial Sequence: Synthetic peptide
  Seed: LRMKWMMAMKYPITA
LRMKIMMIMKYPSTA

SEQ ID NO: 229276 - protein, 15 aa, Artificial Sequence
  Description of Artificial Sequence: Synthetic peptide
  Seed: LRMKWMMAMKYPITA
LRMKIMMIMKYPTTA

SEQ ID NO: 229277 - protein, 15 aa, Artificial Sequence
  Description of Artificial Sequence: Synthetic peptide
  Seed: LRMKWMMAMKYPITA
LRMKIMMIMKYPVTA

SEQ ID NO: 229278 - protein, 15 aa, Artificial Sequence
  Description of Artificial Sequence: Synthetic peptide
  Seed: LRMKWMMAMKYPITA
LRMKIMMIMKYPWTA

SEQ ID NO: 229279 - protein, 15 aa, Artificial Sequence
  Description of Artificial Sequence: Synthetic peptide
  Seed: LRMKWMMAMKYPITA
LRMKIMMIMKYPYTA

SEQ ID NO: 229280 - protein, 15 aa, Artificial Sequence
  Description of Artificial Sequence: Synthetic peptide
  Seed: LRMKWMMAMKYPITA
LRMKIMMIMLYPKTA

SEQ ID NO: 229281 - protein, 15 aa, Artificial Sequence
  Description of Artificial Sequence: Synthetic peptide
  Seed: LRMKWMMAMKYPITA
LRMKIMMIMLYPRTA

SEQ ID NO: 229282 - protein, 15 aa, Artificial Sequence
  Description of Artificial Sequence: Synthetic peptide
  Seed: LRMKWMMAMKYPITA
LRMKIMMIMMYPKTA

SEQ ID NO: 229283 - protein, 15 aa, Artificial Sequence
  Description of Artificial Sequence: Synthetic peptide
  Seed: LRMKWMMAMKYPITA
LRMKIMMIMMYPRTA

SEQ ID NO: 229284 - protein, 15 aa, Artificial Sequence
  Description of Artificial Sequence: Synthetic peptide
  Seed: LRMKWMMAMKYPITA
LRMKIMMIMNYPATA

SEQ ID NO: 229285 - protein, 15 aa, Artificial Sequence
  Description of Artificial Sequence: Synthetic peptide
  Seed: LRMKWMMAMKYPITA
LRMKIMMIMNYPCTA

SEQ ID NO: 229286 - protein, 15 aa, Artificial Sequence
  Description of Artificial Sequence: Synthetic peptide
  Seed: LRMKWMMAMKYPITA
LRMKIMMIMNYPDTA

SEQ ID NO: 229287 - protein, 15 aa, Artificial Sequence
  Description of Artificial Sequence: Synthetic peptide
  Seed: LRMKWMMAMKYPITA
LRMKIMMIMNYPETA

SEQ ID NO: 229288 - protein, 15 aa, Artificial Sequence
  Description of Artificial Sequence: Synthetic peptide
  Seed: LRMKWMMAMKYPITA
LRMKIMMIMNYPFTA

SEQ ID NO: 229289 - protein, 15 aa, Artificial Sequence
  Description of Artificial Sequence: Synthetic peptide
  Seed: LRMKWMMAMKYPITA
LRMKIMMIMNYPGTA

SEQ ID NO: 229290 - protein, 15 aa, Artificial Sequence
  Description of Artificial Sequence: Synthetic peptide
  Seed: LRMKWMMAMKYPITA
LRMKIMMIMNYPHTA

SEQ ID NO: 229291 - protein, 15 aa, Artificial Sequence
  Description of Artificial Sequence: Synthetic peptide
  Seed: LRMKWMMAMKYPITA
LRMKIMMIMNYPITA

SEQ ID NO: 229292 - protein, 15 aa, Artificial Sequence
  Description of Artificial Sequence: Synthetic peptide
  Seed: LRMKWMMAMKYPITA
LRMKIMMIMNYPKTA

SEQ ID NO: 229293 - protein, 15 aa, Artificial Sequence
  Description of Artificial Sequence: Synthetic peptide
  Seed: LRMKWMMAMKYPITA
LRMKIMMIMNYPLTA

SEQ ID NO: 229294 - protein, 15 aa, Artificial Sequence
  Description of Artificial Sequence: Synthetic peptide
  Seed: LRMKWMMAMKYPITA
LRMKIMMIMNYPMTA

SEQ ID NO: 229295 - protein, 15 aa, Artificial Sequence
  Description of Artificial Sequence: Synthetic peptide
  Seed: LRMKWMMAMKYPITA
LRMKIMMIMNYPNTA

SEQ ID NO: 229296 - protein, 15 aa, Artificial Sequence
  Description of Artificial Sequence: Synthetic peptide
  Seed: LRMKWMMAMKYPITA
LRMKIMMIMNYPPTA

SEQ ID NO: 229297 - protein, 15 aa, Artificial Sequence
  Description of Artificial Sequence: Synthetic peptide
  Seed: LRMKWMMAMKYPITA
LRMKIMMIMNYPQTA

SEQ ID NO: 229298 - protein, 15 aa, Artificial Sequence
  Description of Artificial Sequence: Synthetic peptide
  Seed: LRMKWMMAMKYPITA
LRMKIMMIMNYPRTA

SEQ ID NO: 229299 - protein, 15 aa, Artificial Sequence
  Description of Artificial Sequence: Synthetic peptide
  Seed: LRMKWMMAMKYPITA
LRMKIMMIMNYPSTA

SEQ ID NO: 229300 - protein, 15 aa, Artificial Sequence
  Description of Artificial Sequence: Synthetic peptide
  Seed: LRMKWMMAMKYPITA
LRMKIMMIMNYPTTA

SEQ ID NO: 229301 - protein, 15 aa, Artificial Sequence
  Description of Artificial Sequence: Synthetic peptide
  Seed: LRMKWMMAMKYPITA
LRMKIMMIMNYPVTA

SEQ ID NO: 229302 - protein, 15 aa, Artificial Sequence
  Description of Artificial Sequence: Synthetic peptide
  Seed: LRMKWMMAMKYPITA
LRMKIMMIMNYPYTA

SEQ ID NO: 229303 - protein, 15 aa, Artificial Sequence
  Description of Artificial Sequence: Synthetic peptide
  Seed: LRMKWMMAMKYPITA
LRMKIMMIMPYPATA

SEQ ID NO: 229304 - protein, 15 aa, Artificial Sequence
  Description of Artificial Sequence: Synthetic peptide
  Seed: LRMKWMMAMKYPITA
LRMKIMMIMPYPCTA

SEQ ID NO: 229305 - protein, 15 aa, Artificial Sequence
  Description of Artificial Sequence: Synthetic peptide
  Seed: LRMKWMMAMKYPITA
LRMKIMMIMPYPDTA

SEQ ID NO: 229306 - protein, 15 aa, Artificial Sequence
  Description of Artificial Sequence: Synthetic peptide
  Seed: LRMKWMMAMKYPITA
LRMKIMMIMPYPETA

SEQ ID NO: 229307 - protein, 15 aa, Artificial Sequence
  Description of Artificial Sequence: Synthetic peptide
  Seed: LRMKWMMAMKYPITA
LRMKIMMIMPYPFTA

SEQ ID NO: 229308 - protein, 15 aa, Artificial Sequence
  Description of Artificial Sequence: Synthetic peptide
  Seed: LRMKWMMAMKYPITA
LRMKIMMIMPYPGTA

SEQ ID NO: 229309 - protein, 15 aa, Artificial Sequence
  Description of Artificial Sequence: Synthetic peptide
  Seed: LRMKWMMAMKYPITA
LRMKIMMIMPYPHTA

SEQ ID NO: 229310 - protein, 15 aa, Artificial Sequence
  Description of Artificial Sequence: Synthetic peptide
  Seed: LRMKWMMAMKYPITA
LRMKIMMIMPYPITA

SEQ ID NO: 229311 - protein, 15 aa, Artificial Sequence
  Description of Artificial Sequence: Synthetic peptide
  Seed: LRMKWMMAMKYPITA
LRMKIMMIMPYPKTA

SEQ ID NO: 229312 - protein, 15 aa, Artificial Sequence
  Description of Artificial Sequence: Synthetic peptide
  Seed: LRMKWMMAMKYPITA
LRMKIMMIMPYPLTA

SEQ ID NO: 229313 - protein, 15 aa, Artificial Sequence
  Description of Artificial Sequence: Synthetic peptide
  Seed: LRMKWMMAMKYPITA
LRMKIMMIMPYPMTA

SEQ ID NO: 229314 - protein, 15 aa, Artificial Sequence
  Description of Artificial Sequence: Synthetic peptide
  Seed: LRMKWMMAMKYPITA
LRMKIMMIMPYPNTA

SEQ ID NO: 229315 - protein, 15 aa, Artificial Sequence
  Description of Artificial Sequence: Synthetic peptide
  Seed: LRMKWMMAMKYPITA
LRMKIMMIMPYPPTA

SEQ ID NO: 229316 - protein, 15 aa, Artificial Sequence
  Description of Artificial Sequence: Synthetic peptide
  Seed: LRMKWMMAMKYPITA
LRMKIMMIMPYPQTA

SEQ ID NO: 229317 - protein, 15 aa, Artificial Sequence
  Description of Artificial Sequence: Synthetic peptide
  Seed: LRMKWMMAMKYPITA
LRMKIMMIMPYPRTA

SEQ ID NO: 229318 - protein, 15 aa, Artificial Sequence
  Description of Artificial Sequence: Synthetic peptide
  Seed: LRMKWMMAMKYPITA
LRMKIMMIMPYPSTA

SEQ ID NO: 229319 - protein, 15 aa, Artificial Sequence
  Description of Artificial Sequence: Synthetic peptide
  Seed: LRMKWMMAMKYPITA
LRMKIMMIMPYPTTA

SEQ ID NO: 229320 - protein, 15 aa, Artificial Sequence
  Description of Artificial Sequence: Synthetic peptide
  Seed: LRMKWMMAMKYPITA
LRMKIMMIMPYPVTA

SEQ ID NO: 229321 - protein, 15 aa, Artificial Sequence
  Description of Artificial Sequence: Synthetic peptide
  Seed: LRMKWMMAMKYPITA
LRMKIMMIMPYPWTA

SEQ ID NO: 229322 - protein, 15 aa, Artificial Sequence
  Description of Artificial Sequence: Synthetic peptide
  Seed: LRMKWMMAMKYPITA
LRMKIMMIMPYPYTA

SEQ ID NO: 229323 - protein, 15 aa, Artificial Sequence
  Description of Artificial Sequence: Synthetic peptide
  Seed: LRMKWMMAMKYPITA
LRMKIMMIMQYPATA

SEQ ID NO: 229324 - protein, 15 aa, Artificial Sequence
  Description of Artificial Sequence: Synthetic peptide
  Seed: LRMKWMMAMKYPITA
LRMKIMMIMQYPITA

SEQ ID NO: 229325 - protein, 15 aa, Artificial Sequence
  Description of Artificial Sequence: Synthetic peptide
  Seed: LRMKWMMAMKYPITA
LRMKIMMIMQYPKTA

SEQ ID NO: 229326 - protein, 15 aa, Artificial Sequence
  Description of Artificial Sequence: Synthetic peptide
  Seed: LRMKWMMAMKYPITA
LRMKIMMIMQYPLTA

SEQ ID NO: 229327 - protein, 15 aa, Artificial Sequence
  Description of Artificial Sequence: Synthetic peptide
  Seed: LRMKWMMAMKYPITA
LRMKIMMIMQYPMTA

SEQ ID NO: 229328 - protein, 15 aa, Artificial Sequence
  Description of Artificial Sequence: Synthetic peptide
  Seed: LRMKWMMAMKYPITA
LRMKIMMIMQYPRTA

SEQ ID NO: 229329 - protein, 15 aa, Artificial Sequence
  Description of Artificial Sequence: Synthetic peptide
  Seed: LRMKWMMAMKYPITA
LRMKIMMIMQYPSTA

SEQ ID NO: 229330 - protein, 15 aa, Artificial Sequence
  Description of Artificial Sequence: Synthetic peptide
  Seed: LRMKWMMAMKYPITA
LRMKIMMIMQYPVTA

SEQ ID NO: 229331 - protein, 15 aa, Artificial Sequence
  Description of Artificial Sequence: Synthetic peptide
  Seed: LRMKWMMAMKYPITA
LRMKIMMIMRYPATA

SEQ ID NO: 229332 - protein, 15 aa, Artificial Sequence
  Description of Artificial Sequence: Synthetic peptide
  Seed: LRMKWMMAMKYPITA
LRMKIMMIMRYPCTA

SEQ ID NO: 229333 - protein, 15 aa, Artificial Sequence
  Description of Artificial Sequence: Synthetic peptide
  Seed: LRMKWMMAMKYPITA
LRMKIMMIMRYPDTA

SEQ ID NO: 229334 - protein, 15 aa, Artificial Sequence
  Description of Artificial Sequence: Synthetic peptide
  Seed: LRMKWMMAMKYPITA
LRMKIMMIMRYPETA

SEQ ID NO: 229335 - protein, 15 aa, Artificial Sequence
  Description of Artificial Sequence: Synthetic peptide
  Seed: LRMKWMMAMKYPITA
LRMKIMMIMRYPFTA

SEQ ID NO: 229336 - protein, 15 aa, Artificial Sequence
  Description of Artificial Sequence: Synthetic peptide
  Seed: LRMKWMMAMKYPITA
LRMKIMMIMRYPGTA

SEQ ID NO: 229337 - protein, 15 aa, Artificial Sequence
  Description of Artificial Sequence: Synthetic peptide
  Seed: LRMKWMMAMKYPITA
LRMKIMMIMRYPHTA

SEQ ID NO: 229338 - protein, 15 aa, Artificial Sequence
  Description of Artificial Sequence: Synthetic peptide
  Seed: LRMKWMMAMKYPITA
LRMKIMMIMRYPITA

SEQ ID NO: 229339 - protein, 15 aa, Artificial Sequence
  Description of Artificial Sequence: Synthetic peptide
  Seed: LRMKWMMAMKYPITA
LRMKIMMIMRYPKTA

SEQ ID NO: 229340 - protein, 15 aa, Artificial Sequence
  Description of Artificial Sequence: Synthetic peptide
  Seed: LRMKWMMAMKYPITA
LRMKIMMIMRYPLTA

SEQ ID NO: 229341 - protein, 15 aa, Artificial Sequence
  Description of Artificial Sequence: Synthetic peptide
  Seed: LRMKWMMAMKYPITA
LRMKIMMIMRYPMTA

SEQ ID NO: 229342 - protein, 15 aa, Artificial Sequence
  Description of Artificial Sequence: Synthetic peptide
  Seed: LRMKWMMAMKYPITA
LRMKIMMIMRYPNTA

SEQ ID NO: 229343 - protein, 15 aa, Artificial Sequence
  Description of Artificial Sequence: Synthetic peptide
  Seed: LRMKWMMAMKYPITA
LRMKIMMIMRYPPTA

SEQ ID NO: 229344 - protein, 15 aa, Artificial Sequence
  Description of Artificial Sequence: Synthetic peptide
  Seed: LRMKWMMAMKYPITA
LRMKIMMIMRYPQTA

SEQ ID NO: 229345 - protein, 15 aa, Artificial Sequence
  Description of Artificial Sequence: Synthetic peptide
  Seed: LRMKWMMAMKYPITA
LRMKIMMIMRYPRTA

SEQ ID NO: 229346 - protein, 15 aa, Artificial Sequence
  Description of Artificial Sequence: Synthetic peptide
  Seed: LRMKWMMAMKYPITA
LRMKIMMIMRYPSTA

SEQ ID NO: 229347 - protein, 15 aa, Artificial Sequence
  Description of Artificial Sequence: Synthetic peptide
  Seed: LRMKWMMAMKYPITA
LRMKIMMIMRYPTTA

SEQ ID NO: 229348 - protein, 15 aa, Artificial Sequence
  Description of Artificial Sequence: Synthetic peptide
  Seed: LRMKWMMAMKYPITA
LRMKIMMIMRYPVTA

SEQ ID NO: 229349 - protein, 15 aa, Artificial Sequence
  Description of Artificial Sequence: Synthetic peptide
  Seed: LRMKWMMAMKYPITA
LRMKIMMIMRYPWTA

SEQ ID NO: 229350 - protein, 15 aa, Artificial Sequence
  Description of Artificial Sequence: Synthetic peptide
  Seed: LRMKWMMAMKYPITA
LRMKIMMIMRYPYTA

SEQ ID NO: 229351 - protein, 15 aa, Artificial Sequence
  Description of Artificial Sequence: Synthetic peptide
  Seed: LRMKWMMAMKYPITA
LRMKIMMIMSYPATA

SEQ ID NO: 229352 - protein, 15 aa, Artificial Sequence
  Description of Artificial Sequence: Synthetic peptide
  Seed: LRMKWMMAMKYPITA
LRMKIMMIMSYPCTA

SEQ ID NO: 229353 - protein, 15 aa, Artificial Sequence
  Description of Artificial Sequence: Synthetic peptide
  Seed: LRMKWMMAMKYPITA
LRMKIMMIMSYPDTA

SEQ ID NO: 229354 - protein, 15 aa, Artificial Sequence
  Description of Artificial Sequence: Synthetic peptide
  Seed: LRMKWMMAMKYPITA
LRMKIMMIMSYPETA

SEQ ID NO: 229355 - protein, 15 aa, Artificial Sequence
  Description of Artificial Sequence: Synthetic peptide
  Seed: LRMKWMMAMKYPITA
LRMKIMMIMSYPFTA

SEQ ID NO: 229356 - protein, 15 aa, Artificial Sequence
  Description of Artificial Sequence: Synthetic peptide
  Seed: LRMKWMMAMKYPITA
LRMKIMMIMSYPGTA

SEQ ID NO: 229357 - protein, 15 aa, Artificial Sequence
  Description of Artificial Sequence: Synthetic peptide
  Seed: LRMKWMMAMKYPITA
LRMKIMMIMSYPHTA

SEQ ID NO: 229358 - protein, 15 aa, Artificial Sequence
  Description of Artificial Sequence: Synthetic peptide
  Seed: LRMKWMMAMKYPITA
LRMKIMMIMSYPITA

SEQ ID NO: 229359 - protein, 15 aa, Artificial Sequence
  Description of Artificial Sequence: Synthetic peptide
  Seed: LRMKWMMAMKYPITA
LRMKIMMIMSYPKTA

SEQ ID NO: 229360 - protein, 15 aa, Artificial Sequence
  Description of Artificial Sequence: Synthetic peptide
  Seed: LRMKWMMAMKYPITA
LRMKIMMIMSYPLTA

SEQ ID NO: 229361 - protein, 15 aa, Artificial Sequence
  Description of Artificial Sequence: Synthetic peptide
  Seed: LRMKWMMAMKYPITA
LRMKIMMIMSYPMTA

SEQ ID NO: 229362 - protein, 15 aa, Artificial Sequence
  Description of Artificial Sequence: Synthetic peptide
  Seed: LRMKWMMAMKYPITA
LRMKIMMIMSYPNTA

SEQ ID NO: 229363 - protein, 15 aa, Artificial Sequence
  Description of Artificial Sequence: Synthetic peptide
  Seed: LRMKWMMAMKYPITA
LRMKIMMIMSYPPTA

SEQ ID NO: 229364 - protein, 15 aa, Artificial Sequence
  Description of Artificial Sequence: Synthetic peptide
  Seed: LRMKWMMAMKYPITA
LRMKIMMIMSYPQTA

SEQ ID NO: 229365 - protein, 15 aa, Artificial Sequence
  Description of Artificial Sequence: Synthetic peptide
  Seed: LRMKWMMAMKYPITA
LRMKIMMIMSYPRTA

SEQ ID NO: 229366 - protein, 15 aa, Artificial Sequence
  Description of Artificial Sequence: Synthetic peptide
  Seed: LRMKWMMAMKYPITA
LRMKIMMIMSYPSTA

SEQ ID NO: 229367 - protein, 15 aa, Artificial Sequence
  Description of Artificial Sequence: Synthetic peptide
  Seed: LRMKWMMAMKYPITA
LRMKIMMIMSYPTTA

SEQ ID NO: 229368 - protein, 15 aa, Artificial Sequence
  Description of Artificial Sequence: Synthetic peptide
  Seed: LRMKWMMAMKYPITA
LRMKIMMIMSYPVTA

SEQ ID NO: 229369 - protein, 15 aa, Artificial Sequence
  Description of Artificial Sequence: Synthetic peptide
  Seed: LRMKWMMAMKYPITA
LRMKIMMIMSYPYTA

SEQ ID NO: 229370 - protein, 15 aa, Artificial Sequence
  Description of Artificial Sequence: Synthetic peptide
  Seed: LRMKWMMAMKYPITA
LRMKIMMIMTYPATA

SEQ ID NO: 229371 - protein, 15 aa, Artificial Sequence
  Description of Artificial Sequence: Synthetic peptide
  Seed: LRMKWMMAMKYPITA
LRMKIMMIMTYPCTA

SEQ ID NO: 229372 - protein, 15 aa, Artificial Sequence
  Description of Artificial Sequence: Synthetic peptide
  Seed: LRMKWMMAMKYPITA
LRMKIMMIMTYPDTA

SEQ ID NO: 229373 - protein, 15 aa, Artificial Sequence
  Description of Artificial Sequence: Synthetic peptide
  Seed: LRMKWMMAMKYPITA
LRMKIMMIMTYPETA

SEQ ID NO: 229374 - protein, 15 aa, Artificial Sequence
  Description of Artificial Sequence: Synthetic peptide
  Seed: LRMKWMMAMKYPITA
LRMKIMMIMTYPFTA

SEQ ID NO: 229375 - protein, 15 aa, Artificial Sequence
  Description of Artificial Sequence: Synthetic peptide
  Seed: LRMKWMMAMKYPITA
LRMKIMMIMTYPGTA

SEQ ID NO: 229376 - protein, 15 aa, Artificial Sequence
  Description of Artificial Sequence: Synthetic peptide
  Seed: LRMKWMMAMKYPITA
LRMKIMMIMTYPHTA

SEQ ID NO: 229377 - protein, 15 aa, Artificial Sequence
  Description of Artificial Sequence: Synthetic peptide
  Seed: LRMKWMMAMKYPITA
LRMKIMMIMTYPITA

SEQ ID NO: 229378 - protein, 15 aa, Artificial Sequence
  Description of Artificial Sequence: Synthetic peptide
  Seed: LRMKWMMAMKYPITA
LRMKIMMIMTYPKTA

SEQ ID NO: 229379 - protein, 15 aa, Artificial Sequence
  Description of Artificial Sequence: Synthetic peptide
  Seed: LRMKWMMAMKYPITA
LRMKIMMIMTYPLTA

SEQ ID NO: 229380 - protein, 15 aa, Artificial Sequence
  Description of Artificial Sequence: Synthetic peptide
  Seed: LRMKWMMAMKYPITA
LRMKIMMIMTYPMTA

SEQ ID NO: 229381 - protein, 15 aa, Artificial Sequence
  Description of Artificial Sequence: Synthetic peptide
  Seed: LRMKWMMAMKYPITA
LRMKIMMIMTYPNTA

SEQ ID NO: 229382 - protein, 15 aa, Artificial Sequence
  Description of Artificial Sequence: Synthetic peptide
  Seed: LRMKWMMAMKYPITA
LRMKIMMIMTYPPTA

SEQ ID NO: 229383 - protein, 15 aa, Artificial Sequence
  Description of Artificial Sequence: Synthetic peptide
  Seed: LRMKWMMAMKYPITA
LRMKIMMIMTYPQTA

SEQ ID NO: 229384 - protein, 15 aa, Artificial Sequence
  Description of Artificial Sequence: Synthetic peptide
  Seed: LRMKWMMAMKYPITA
LRMKIMMIMTYPRTA

SEQ ID NO: 229385 - protein, 15 aa, Artificial Sequence
  Description of Artificial Sequence: Synthetic peptide
  Seed: LRMKWMMAMKYPITA
LRMKIMMIMTYPSTA

SEQ ID NO: 229386 - protein, 15 aa, Artificial Sequence
  Description of Artificial Sequence: Synthetic peptide
  Seed: LRMKWMMAMKYPITA
LRMKIMMIMTYPTTA

SEQ ID NO: 229387 - protein, 15 aa, Artificial Sequence
  Description of Artificial Sequence: Synthetic peptide
  Seed: LRMKWMMAMKYPITA
LRMKIMMIMTYPVTA

SEQ ID NO: 229388 - protein, 15 aa, Artificial Sequence
  Description of Artificial Sequence: Synthetic peptide
  Seed: LRMKWMMAMKYPITA
LRMKIMMIMTYPYTA

SEQ ID NO: 229389 - protein, 15 aa, Artificial Sequence
  Description of Artificial Sequence: Synthetic peptide
  Seed: LRMKWMMAMKYPITA
LRMKIMMIMVYPATA

SEQ ID NO: 229390 - protein, 15 aa, Artificial Sequence
  Description of Artificial Sequence: Synthetic peptide
  Seed: LRMKWMMAMKYPITA
LRMKIMMIMVYPDTA

SEQ ID NO: 229391 - protein, 15 aa, Artificial Sequence
  Description of Artificial Sequence: Synthetic peptide
  Seed: LRMKWMMAMKYPITA
LRMKIMMIMVYPETA

SEQ ID NO: 229392 - protein, 15 aa, Artificial Sequence
  Description of Artificial Sequence: Synthetic peptide
  Seed: LRMKWMMAMKYPITA
LRMKIMMIMVYPGTA

SEQ ID NO: 229393 - protein, 15 aa, Artificial Sequence
  Description of Artificial Sequence: Synthetic peptide
  Seed: LRMKWMMAMKYPITA
LRMKIMMIMVYPHTA

SEQ ID NO: 229394 - protein, 15 aa, Artificial Sequence
  Description of Artificial Sequence: Synthetic peptide
  Seed: LRMKWMMAMKYPITA
LRMKIMMIMVYPITA

SEQ ID NO: 229395 - protein, 15 aa, Artificial Sequence
  Description of Artificial Sequence: Synthetic peptide
  Seed: LRMKWMMAMKYPITA
LRMKIMMIMVYPKTA

SEQ ID NO: 229396 - protein, 15 aa, Artificial Sequence
  Description of Artificial Sequence: Synthetic peptide
  Seed: LRMKWMMAMKYPITA
LRMKIMMIMVYPLTA

SEQ ID NO: 229397 - protein, 15 aa, Artificial Sequence
  Description of Artificial Sequence: Synthetic peptide
  Seed: LRMKWMMAMKYPITA
LRMKIMMIMVYPMTA

SEQ ID NO: 229398 - protein, 15 aa, Artificial Sequence
  Description of Artificial Sequence: Synthetic peptide
  Seed: LRMKWMMAMKYPITA
LRMKIMMIMVYPNTA

SEQ ID NO: 229399 - protein, 15 aa, Artificial Sequence
  Description of Artificial Sequence: Synthetic peptide
  Seed: LRMKWMMAMKYPITA
LRMKIMMIMVYPQTA

SEQ ID NO: 229400 - protein, 15 aa, Artificial Sequence
  Description of Artificial Sequence: Synthetic peptide
  Seed: LRMKWMMAMKYPITA
LRMKIMMIMVYPRTA

SEQ ID NO: 229401 - protein, 15 aa, Artificial Sequence
  Description of Artificial Sequence: Synthetic peptide
  Seed: LRMKWMMAMKYPITA
LRMKIMMIMVYPSTA

SEQ ID NO: 229402 - protein, 15 aa, Artificial Sequence
  Description of Artificial Sequence: Synthetic peptide
  Seed: LRMKWMMAMKYPITA
LRMKIMMIMVYPTTA

SEQ ID NO: 229403 - protein, 15 aa, Artificial Sequence
  Description of Artificial Sequence: Synthetic peptide
  Seed: LRMKWMMAMKYPITA
LRMKIMMIMVYPVTA

SEQ ID NO: 229404 - protein, 15 aa, Artificial Sequence
  Description of Artificial Sequence: Synthetic peptide
  Seed: LRMKWMMAMKYPITA
LRMKIMMIMVYPYTA

SEQ ID NO: 229405 - protein, 15 aa, Artificial Sequence
  Description of Artificial Sequence: Synthetic peptide
  Seed: LRMKWMMAMKYPITA
LRMKIMMKMAYPATA

SEQ ID NO: 229406 - protein, 15 aa, Artificial Sequence
  Description of Artificial Sequence: Synthetic peptide
  Seed: LRMKWMMAMKYPITA
LRMKIMMKMAYPCTA

SEQ ID NO: 229407 - protein, 15 aa, Artificial Sequence
  Description of Artificial Sequence: Synthetic peptide
  Seed: LRMKWMMAMKYPITA
LRMKIMMKMAYPDTA

SEQ ID NO: 229408 - protein, 15 aa, Artificial Sequence
  Description of Artificial Sequence: Synthetic peptide
  Seed: LRMKWMMAMKYPITA
LRMKIMMKMAYPETA

SEQ ID NO: 229409 - protein, 15 aa, Artificial Sequence
  Description of Artificial Sequence: Synthetic peptide
  Seed: LRMKWMMAMKYPITA
LRMKIMMKMAYPFTA

SEQ ID NO: 229410 - protein, 15 aa, Artificial Sequence
  Description of Artificial Sequence: Synthetic peptide
  Seed: LRMKWMMAMKYPITA
LRMKIMMKMAYPGTA

SEQ ID NO: 229411 - protein, 15 aa, Artificial Sequence
  Description of Artificial Sequence: Synthetic peptide
  Seed: LRMKWMMAMKYPITA
LRMKIMMKMAYPHTA

SEQ ID NO: 229412 - protein, 15 aa, Artificial Sequence
  Description of Artificial Sequence: Synthetic peptide
  Seed: LRMKWMMAMKYPITA
LRMKIMMKMAYPITA

SEQ ID NO: 229413 - protein, 15 aa, Artificial Sequence
  Description of Artificial Sequence: Synthetic peptide
  Seed: LRMKWMMAMKYPITA
LRMKIMMKMAYPKTA

SEQ ID NO: 229414 - protein, 15 aa, Artificial Sequence
  Description of Artificial Sequence: Synthetic peptide
  Seed: LRMKWMMAMKYPITA
LRMKIMMKMAYPLTA

SEQ ID NO: 229415 - protein, 15 aa, Artificial Sequence
  Description of Artificial Sequence: Synthetic peptide
  Seed: LRMKWMMAMKYPITA
LRMKIMMKMAYPMTA

SEQ ID NO: 229416 - protein, 15 aa, Artificial Sequence
  Description of Artificial Sequence: Synthetic peptide
  Seed: LRMKWMMAMKYPITA
LRMKIMMKMAYPNTA

SEQ ID NO: 229417 - protein, 15 aa, Artificial Sequence
  Description of Artificial Sequence: Synthetic peptide
  Seed: LRMKWMMAMKYPITA
LRMKIMMKMAYPQTA

SEQ ID NO: 229418 - protein, 15 aa, Artificial Sequence
  Description of Artificial Sequence: Synthetic peptide
  Seed: LRMKWMMAMKYPITA
LRMKIMMKMAYPRTA

SEQ ID NO: 229419 - protein, 15 aa, Artificial Sequence
  Description of Artificial Sequence: Synthetic peptide
  Seed: LRMKWMMAMKYPITA
LRMKIMMKMAYPSTA

SEQ ID NO: 229420 - protein, 15 aa, Artificial Sequence
  Description of Artificial Sequence: Synthetic peptide
  Seed: LRMKWMMAMKYPITA
LRMKIMMKMAYPTTA

SEQ ID NO: 229421 - protein, 15 aa, Artificial Sequence
  Description of Artificial Sequence: Synthetic peptide
  Seed: LRMKWMMAMKYPITA
LRMKIMMKMAYPVTA

SEQ ID NO: 229422 - protein, 15 aa, Artificial Sequence
  Description of Artificial Sequence: Synthetic peptide
  Seed: LRMKWMMAMKYPITA
LRMKIMMKMAYPYTA

SEQ ID NO: 229423 - protein, 15 aa, Artificial Sequence
  Description of Artificial Sequence: Synthetic peptide
  Seed: LRMKWMMAMKYPITA
LRMKIMMKMCYPFTA

SEQ ID NO: 229424 - protein, 15 aa, Artificial Sequence
  Description of Artificial Sequence: Synthetic peptide
  Seed: LRMKWMMAMKYPITA
LRMKIMMKMCYPITA

SEQ ID NO: 229425 - protein, 15 aa, Artificial Sequence
  Description of Artificial Sequence: Synthetic peptide
  Seed: LRMKWMMAMKYPITA
LRMKIMMKMCYPKTA

SEQ ID NO: 229426 - protein, 15 aa, Artificial Sequence
  Description of Artificial Sequence: Synthetic peptide
  Seed: LRMKWMMAMKYPITA
LRMKIMMKMCYPLTA

SEQ ID NO: 229427 - protein, 15 aa, Artificial Sequence
  Description of Artificial Sequence: Synthetic peptide
  Seed: LRMKWMMAMKYPITA
LRMKIMMKMCYPMTA

SEQ ID NO: 229428 - protein, 15 aa, Artificial Sequence
  Description of Artificial Sequence: Synthetic peptide
  Seed: LRMKWMMAMKYPITA
LRMKIMMKMCYPQTA

SEQ ID NO: 229429 - protein, 15 aa, Artificial Sequence
  Description of Artificial Sequence: Synthetic peptide
  Seed: LRMKWMMAMKYPITA
LRMKIMMKMCYPRTA

SEQ ID NO: 229430 - protein, 15 aa, Artificial Sequence
  Description of Artificial Sequence: Synthetic peptide
  Seed: LRMKWMMAMKYPITA
LRMKIMMKMCYPVTA

SEQ ID NO: 229431 - protein, 15 aa, Artificial Sequence
  Description of Artificial Sequence: Synthetic peptide
  Seed: LRMKWMMAMKYPITA
LRMKIMMKMCYPYTA

SEQ ID NO: 229432 - protein, 15 aa, Artificial Sequence
  Description of Artificial Sequence: Synthetic peptide
  Seed: LRMKWMMAMKYPITA
LRMKIMMKMDYPFTA

SEQ ID NO: 229433 - protein, 15 aa, Artificial Sequence
  Description of Artificial Sequence: Synthetic peptide
  Seed: LRMKWMMAMKYPITA
LRMKIMMKMDYPITA

SEQ ID NO: 229434 - protein, 15 aa, Artificial Sequence
  Description of Artificial Sequence: Synthetic peptide
  Seed: LRMKWMMAMKYPITA
LRMKIMMKMDYPLTA

SEQ ID NO: 229435 - protein, 15 aa, Artificial Sequence
  Description of Artificial Sequence: Synthetic peptide
  Seed: LRMKWMMAMKYPITA
LRMKIMMKMDYPMTA

SEQ ID NO: 229436 - protein, 15 aa, Artificial Sequence
  Description of Artificial Sequence: Synthetic peptide
  Seed: LRMKWMMAMKYPITA
LRMKIMMKMDYPRTA

SEQ ID NO: 229437 - protein, 15 aa, Artificial Sequence
  Description of Artificial Sequence: Synthetic peptide
  Seed: LRMKWMMAMKYPITA
LRMKIMMKMDYPVTA

SEQ ID NO: 229438 - protein, 15 aa, Artificial Sequence
  Description of Artificial Sequence: Synthetic peptide
  Seed: LRMKWMMAMKYPITA
LRMKIMMKMDYPYTA

SEQ ID NO: 229439 - protein, 15 aa, Artificial Sequence
  Description of Artificial Sequence: Synthetic peptide
  Seed: LRMKWMMAMKYPITA
LRMKIMMKMEYPFTA

SEQ ID NO: 229440 - protein, 15 aa, Artificial Sequence
  Description of Artificial Sequence: Synthetic peptide
  Seed: LRMKWMMAMKYPITA
LRMKIMMKMEYPITA

SEQ ID NO: 229441 - protein, 15 aa, Artificial Sequence
  Description of Artificial Sequence: Synthetic peptide
  Seed: LRMKWMMAMKYPITA
LRMKIMMKMEYPKTA

SEQ ID NO: 229442 - protein, 15 aa, Artificial Sequence
  Description of Artificial Sequence: Synthetic peptide
  Seed: LRMKWMMAMKYPITA
LRMKIMMKMEYPLTA

SEQ ID NO: 229443 - protein, 15 aa, Artificial Sequence
  Description of Artificial Sequence: Synthetic peptide
  Seed: LRMKWMMAMKYPITA
LRMKIMMKMEYPMTA

SEQ ID NO: 229444 - protein, 15 aa, Artificial Sequence
  Description of Artificial Sequence: Synthetic peptide
  Seed: LRMKWMMAMKYPITA
LRMKIMMKMEYPQTA

SEQ ID NO: 229445 - protein, 15 aa, Artificial Sequence
  Description of Artificial Sequence: Synthetic peptide
  Seed: LRMKWMMAMKYPITA
LRMKIMMKMEYPRTA

SEQ ID NO: 229446 - protein, 15 aa, Artificial Sequence
  Description of Artificial Sequence: Synthetic peptide
  Seed: LRMKWMMAMKYPITA
LRMKIMMKMEYPVTA

SEQ ID NO: 229447 - protein, 15 aa, Artificial Sequence
  Description of Artificial Sequence: Synthetic peptide
  Seed: LRMKWMMAMKYPITA
LRMKIMMKMEYPYTA

SEQ ID NO: 229448 - protein, 15 aa, Artificial Sequence
  Description of Artificial Sequence: Synthetic peptide
  Seed: LRMKWMMAMKYPITA
LRMKIMMKMGYPATA

SEQ ID NO: 229449 - protein, 15 aa, Artificial Sequence
  Description of Artificial Sequence: Synthetic peptide
  Seed: LRMKWMMAMKYPITA
LRMKIMMKMGYPFTA

SEQ ID NO: 229450 - protein, 15 aa, Artificial Sequence
  Description of Artificial Sequence: Synthetic peptide
  Seed: LRMKWMMAMKYPITA
LRMKIMMKMGYPITA

SEQ ID NO: 229451 - protein, 15 aa, Artificial Sequence
  Description of Artificial Sequence: Synthetic peptide
  Seed: LRMKWMMAMKYPITA
LRMKIMMKMGYPLTA

SEQ ID NO: 229452 - protein, 15 aa, Artificial Sequence
  Description of Artificial Sequence: Synthetic peptide
  Seed: LRMKWMMAMKYPITA
LRMKIMMKMGYPMTA

SEQ ID NO: 229453 - protein, 15 aa, Artificial Sequence
  Description of Artificial Sequence: Synthetic peptide
  Seed: LRMKWMMAMKYPITA
LRMKIMMKMGYPQTA

SEQ ID NO: 229454 - protein, 15 aa, Artificial Sequence
  Description of Artificial Sequence: Synthetic peptide
  Seed: LRMKWMMAMKYPITA
LRMKIMMKMGYPRTA

SEQ ID NO: 229455 - protein, 15 aa, Artificial Sequence
  Description of Artificial Sequence: Synthetic peptide
  Seed: LRMKWMMAMKYPITA
LRMKIMMKMGYPSTA

SEQ ID NO: 229456 - protein, 15 aa, Artificial Sequence
  Description of Artificial Sequence: Synthetic peptide
  Seed: LRMKWMMAMKYPITA
LRMKIMMKMGYPTTA

SEQ ID NO: 229457 - protein, 15 aa, Artificial Sequence
  Description of Artificial Sequence: Synthetic peptide
  Seed: LRMKWMMAMKYPITA
LRMKIMMKMGYPVTA

SEQ ID NO: 229458 - protein, 15 aa, Artificial Sequence
  Description of Artificial Sequence: Synthetic peptide
  Seed: LRMKWMMAMKYPITA
LRMKIMMKMGYPYTA

SEQ ID NO: 229459 - protein, 15 aa, Artificial Sequence
  Description of Artificial Sequence: Synthetic peptide
  Seed: LRMKWMMAMKYPITA
LRMKIMMKMHYPATA

SEQ ID NO: 229460 - protein, 15 aa, Artificial Sequence
  Description of Artificial Sequence: Synthetic peptide
  Seed: LRMKWMMAMKYPITA
LRMKIMMKMHYPCTA

SEQ ID NO: 229461 - protein, 15 aa, Artificial Sequence
  Description of Artificial Sequence: Synthetic peptide
  Seed: LRMKWMMAMKYPITA
LRMKIMMKMHYPDTA

SEQ ID NO: 229462 - protein, 15 aa, Artificial Sequence
  Description of Artificial Sequence: Synthetic peptide
  Seed: LRMKWMMAMKYPITA
LRMKIMMKMHYPETA

SEQ ID NO: 229463 - protein, 15 aa, Artificial Sequence
  Description of Artificial Sequence: Synthetic peptide
  Seed: LRMKWMMAMKYPITA
LRMKIMMKMHYPFTA

SEQ ID NO: 229464 - protein, 15 aa, Artificial Sequence
  Description of Artificial Sequence: Synthetic peptide
  Seed: LRMKWMMAMKYPITA
LRMKIMMKMHYPGTA

SEQ ID NO: 229465 - protein, 15 aa, Artificial Sequence
  Description of Artificial Sequence: Synthetic peptide
  Seed: LRMKWMMAMKYPITA
LRMKIMMKMHYPHTA

SEQ ID NO: 229466 - protein, 15 aa, Artificial Sequence
  Description of Artificial Sequence: Synthetic peptide
  Seed: LRMKWMMAMKYPITA
LRMKIMMKMHYPITA

SEQ ID NO: 229467 - protein, 15 aa, Artificial Sequence
  Description of Artificial Sequence: Synthetic peptide
  Seed: LRMKWMMAMKYPITA
LRMKIMMKMHYPKTA

SEQ ID NO: 229468 - protein, 15 aa, Artificial Sequence
  Description of Artificial Sequence: Synthetic peptide
  Seed: LRMKWMMAMKYPITA
LRMKIMMKMHYPLTA

SEQ ID NO: 229469 - protein, 15 aa, Artificial Sequence
  Description of Artificial Sequence: Synthetic peptide
  Seed: LRMKWMMAMKYPITA
LRMKIMMKMHYPMTA

SEQ ID NO: 229470 - protein, 15 aa, Artificial Sequence
  Description of Artificial Sequence: Synthetic peptide
  Seed: LRMKWMMAMKYPITA
LRMKIMMKMHYPQTA

SEQ ID NO: 229471 - protein, 15 aa, Artificial Sequence
  Description of Artificial Sequence: Synthetic peptide
  Seed: LRMKWMMAMKYPITA
LRMKIMMKMHYPRTA

SEQ ID NO: 229472 - protein, 15 aa, Artificial Sequence
  Description of Artificial Sequence: Synthetic peptide
  Seed: LRMKWMMAMKYPITA
LRMKIMMKMHYPSTA

SEQ ID NO: 229473 - protein, 15 aa, Artificial Sequence
  Description of Artificial Sequence: Synthetic peptide
  Seed: LRMKWMMAMKYPITA
LRMKIMMKMHYPTTA

SEQ ID NO: 229474 - protein, 15 aa, Artificial Sequence
  Description of Artificial Sequence: Synthetic peptide
  Seed: LRMKWMMAMKYPITA
LRMKIMMKMHYPVTA

SEQ ID NO: 229475 - protein, 15 aa, Artificial Sequence
  Description of Artificial Sequence: Synthetic peptide
  Seed: LRMKWMMAMKYPITA
LRMKIMMKMHYPYTA

SEQ ID NO: 229476 - protein, 15 aa, Artificial Sequence
  Description of Artificial Sequence: Synthetic peptide
  Seed: LRMKWMMAMKYPITA
LRMKIMMKMIYPFTA

SEQ ID NO: 229477 - protein, 15 aa, Artificial Sequence
  Description of Artificial Sequence: Synthetic peptide
  Seed: LRMKWMMAMKYPITA
LRMKIMMKMIYPGTA

SEQ ID NO: 229478 - protein, 15 aa, Artificial Sequence
  Description of Artificial Sequence: Synthetic peptide
  Seed: LRMKWMMAMKYPITA
LRMKIMMKMIYPHTA

SEQ ID NO: 229479 - protein, 15 aa, Artificial Sequence
  Description of Artificial Sequence: Synthetic peptide
  Seed: LRMKWMMAMKYPITA
LRMKIMMKMIYPITA

SEQ ID NO: 229480 - protein, 15 aa, Artificial Sequence
  Description of Artificial Sequence: Synthetic peptide
  Seed: LRMKWMMAMKYPITA
LRMKIMMKMIYPKTA

SEQ ID NO: 229481 - protein, 15 aa, Artificial Sequence
  Description of Artificial Sequence: Synthetic peptide
  Seed: LRMKWMMAMKYPITA
LRMKIMMKMIYPLTA

SEQ ID NO: 229482 - protein, 15 aa, Artificial Sequence
  Description of Artificial Sequence: Synthetic peptide
  Seed: LRMKWMMAMKYPITA
LRMKIMMKMIYPMTA

SEQ ID NO: 229483 - protein, 15 aa, Artificial Sequence
  Description of Artificial Sequence: Synthetic peptide
  Seed: LRMKWMMAMKYPITA
LRMKIMMKMIYPQTA

SEQ ID NO: 229484 - protein, 15 aa, Artificial Sequence
  Description of Artificial Sequence: Synthetic peptide
  Seed: LRMKWMMAMKYPITA
LRMKIMMKMIYPRTA

SEQ ID NO: 229485 - protein, 15 aa, Artificial Sequence
  Description of Artificial Sequence: Synthetic peptide
  Seed: LRMKWMMAMKYPITA
LRMKIMMKMIYPVTA

SEQ ID NO: 229486 - protein, 15 aa, Artificial Sequence
  Description of Artificial Sequence: Synthetic peptide
  Seed: LRMKWMMAMKYPITA
LRMKIMMKMIYPYTA

SEQ ID NO: 229487 - protein, 15 aa, Artificial Sequence
  Description of Artificial Sequence: Synthetic peptide
  Seed: LRMKWMMAMKYPITA
LRMKIMMKMKYPATA

SEQ ID NO: 229488 - protein, 15 aa, Artificial Sequence
  Description of Artificial Sequence: Synthetic peptide
  Seed: LRMKWMMAMKYPITA
LRMKIMMKMKYPCTA

SEQ ID NO: 229489 - protein, 15 aa, Artificial Sequence
  Description of Artificial Sequence: Synthetic peptide
  Seed: LRMKWMMAMKYPITA
LRMKIMMKMKYPDTA

SEQ ID NO: 229490 - protein, 15 aa, Artificial Sequence
  Description of Artificial Sequence: Synthetic peptide
  Seed: LRMKWMMAMKYPITA
LRMKIMMKMKYPETA

SEQ ID NO: 229491 - protein, 15 aa, Artificial Sequence
  Description of Artificial Sequence: Synthetic peptide
  Seed: LRMKWMMAMKYPITA
LRMKIMMKMKYPFTA

SEQ ID NO: 229492 - protein, 15 aa, Artificial Sequence
  Description of Artificial Sequence: Synthetic peptide
  Seed: LRMKWMMAMKYPITA
LRMKIMMKMKYPGTA

SEQ ID NO: 229493 - protein, 15 aa, Artificial Sequence
  Description of Artificial Sequence: Synthetic peptide
  Seed: LRMKWMMAMKYPITA
LRMKIMMKMKYPHTA

SEQ ID NO: 229494 - protein, 15 aa, Artificial Sequence
  Description of Artificial Sequence: Synthetic peptide
  Seed: LRMKWMMAMKYPITA
LRMKIMMKMKYPITA

SEQ ID NO: 229495 - protein, 15 aa, Artificial Sequence
  Description of Artificial Sequence: Synthetic peptide
  Seed: LRMKWMMAMKYPITA
LRMKIMMKMKYPKTA

SEQ ID NO: 229496 - protein, 15 aa, Artificial Sequence
  Description of Artificial Sequence: Synthetic peptide
  Seed: LRMKWMMAMKYPITA
LRMKIMMKMKYPLTA

SEQ ID NO: 229497 - protein, 15 aa, Artificial Sequence
  Description of Artificial Sequence: Synthetic peptide
  Seed: LRMKWMMAMKYPITA
LRMKIMMKMKYPMTA

SEQ ID NO: 229498 - protein, 15 aa, Artificial Sequence
  Description of Artificial Sequence: Synthetic peptide
  Seed: LRMKWMMAMKYPITA
LRMKIMMKMKYPNTA

SEQ ID NO: 229499 - protein, 15 aa, Artificial Sequence
  Description of Artificial Sequence: Synthetic peptide
  Seed: LRMKWMMAMKYPITA
LRMKIMMKMKYPPTA

SEQ ID NO: 229500 - protein, 15 aa, Artificial Sequence
  Description of Artificial Sequence: Synthetic peptide
  Seed: LRMKWMMAMKYPITA
LRMKIMMKMKYPQTA

SEQ ID NO: 229501 - protein, 15 aa, Artificial Sequence
  Description of Artificial Sequence: Synthetic peptide
  Seed: LRMKWMMAMKYPITA
LRMKIMMKMKYPRTA

SEQ ID NO: 229502 - protein, 15 aa, Artificial Sequence
  Description of Artificial Sequence: Synthetic peptide
  Seed: LRMKWMMAMKYPITA
LRMKIMMKMKYPSTA

SEQ ID NO: 229503 - protein, 15 aa, Artificial Sequence
  Description of Artificial Sequence: Synthetic peptide
  Seed: LRMKWMMAMKYPITA
LRMKIMMKMKYPTTA

SEQ ID NO: 229504 - protein, 15 aa, Artificial Sequence
  Description of Artificial Sequence: Synthetic peptide
  Seed: LRMKWMMAMKYPITA
LRMKIMMKMKYPVTA

SEQ ID NO: 229505 - protein, 15 aa, Artificial Sequence
  Description of Artificial Sequence: Synthetic peptide
  Seed: LRMKWMMAMKYPITA
LRMKIMMKMKYPWTA

SEQ ID NO: 229506 - protein, 15 aa, Artificial Sequence
  Description of Artificial Sequence: Synthetic peptide
  Seed: LRMKWMMAMKYPITA
LRMKIMMKMKYPYTA

SEQ ID NO: 229507 - protein, 15 aa, Artificial Sequence
  Description of Artificial Sequence: Synthetic peptide
  Seed: LRMKWMMAMKYPITA
LRMKIMMKMLYPRTA

SEQ ID NO: 229508 - protein, 15 aa, Artificial Sequence
  Description of Artificial Sequence: Synthetic peptide
  Seed: LRMKWMMAMKYPITA
LRMKIMMKMLYPYTA

SEQ ID NO: 229509 - protein, 15 aa, Artificial Sequence
  Description of Artificial Sequence: Synthetic peptide
  Seed: LRMKWMMAMKYPITA
LRMKIMMKMMYPRTA

SEQ ID NO: 229510 - protein, 15 aa, Artificial Sequence
  Description of Artificial Sequence: Synthetic peptide
  Seed: LRMKWMMAMKYPITA
LRMKIMMKMMYPYTA

SEQ ID NO: 229511 - protein, 15 aa, Artificial Sequence
  Description of Artificial Sequence: Synthetic peptide
  Seed: LRMKWMMAMKYPITA
LRMKIMMKMNYPATA

SEQ ID NO: 229512 - protein, 15 aa, Artificial Sequence
  Description of Artificial Sequence: Synthetic peptide
  Seed: LRMKWMMAMKYPITA
LRMKIMMKMNYPCTA

SEQ ID NO: 229513 - protein, 15 aa, Artificial Sequence
  Description of Artificial Sequence: Synthetic peptide
  Seed: LRMKWMMAMKYPITA
LRMKIMMKMNYPETA

SEQ ID NO: 229514 - protein, 15 aa, Artificial Sequence
  Description of Artificial Sequence: Synthetic peptide
  Seed: LRMKWMMAMKYPITA
LRMKIMMKMNYPFTA

SEQ ID NO: 229515 - protein, 15 aa, Artificial Sequence
  Description of Artificial Sequence: Synthetic peptide
  Seed: LRMKWMMAMKYPITA
LRMKIMMKMNYPGTA

SEQ ID NO: 229516 - protein, 15 aa, Artificial Sequence
  Description of Artificial Sequence: Synthetic peptide
  Seed: LRMKWMMAMKYPITA
LRMKIMMKMNYPHTA

SEQ ID NO: 229517 - protein, 15 aa, Artificial Sequence
  Description of Artificial Sequence: Synthetic peptide
  Seed: LRMKWMMAMKYPITA
LRMKIMMKMNYPITA

SEQ ID NO: 229518 - protein, 15 aa, Artificial Sequence
  Description of Artificial Sequence: Synthetic peptide
  Seed: LRMKWMMAMKYPITA
LRMKIMMKMNYPKTA

SEQ ID NO: 229519 - protein, 15 aa, Artificial Sequence
  Description of Artificial Sequence: Synthetic peptide
  Seed: LRMKWMMAMKYPITA
LRMKIMMKMNYPLTA

SEQ ID NO: 229520 - protein, 15 aa, Artificial Sequence
  Description of Artificial Sequence: Synthetic peptide
  Seed: LRMKWMMAMKYPITA
LRMKIMMKMNYPMTA

SEQ ID NO: 229521 - protein, 15 aa, Artificial Sequence
  Description of Artificial Sequence: Synthetic peptide
  Seed: LRMKWMMAMKYPITA
LRMKIMMKMNYPQTA

SEQ ID NO: 229522 - protein, 15 aa, Artificial Sequence
  Description of Artificial Sequence: Synthetic peptide
  Seed: LRMKWMMAMKYPITA
LRMKIMMKMNYPRTA

SEQ ID NO: 229523 - protein, 15 aa, Artificial Sequence
  Description of Artificial Sequence: Synthetic peptide
  Seed: LRMKWMMAMKYPITA
LRMKIMMKMNYPSTA

SEQ ID NO: 229524 - protein, 15 aa, Artificial Sequence
  Description of Artificial Sequence: Synthetic peptide
  Seed: LRMKWMMAMKYPITA
LRMKIMMKMNYPTTA

SEQ ID NO: 229525 - protein, 15 aa, Artificial Sequence
  Description of Artificial Sequence: Synthetic peptide
  Seed: LRMKWMMAMKYPITA
LRMKIMMKMNYPVTA

SEQ ID NO: 229526 - protein, 15 aa, Artificial Sequence
  Description of Artificial Sequence: Synthetic peptide
  Seed: LRMKWMMAMKYPITA
LRMKIMMKMNYPYTA

SEQ ID NO: 229527 - protein, 15 aa, Artificial Sequence
  Description of Artificial Sequence: Synthetic peptide
  Seed: LRMKWMMAMKYPITA
LRMKIMMKMPYPATA

SEQ ID NO: 229528 - protein, 15 aa, Artificial Sequence
  Description of Artificial Sequence: Synthetic peptide
  Seed: LRMKWMMAMKYPITA
LRMKIMMKMPYPITA

SEQ ID NO: 229529 - protein, 15 aa, Artificial Sequence
  Description of Artificial Sequence: Synthetic peptide
  Seed: LRMKWMMAMKYPITA
LRMKIMMKMPYPLTA

SEQ ID NO: 229530 - protein, 15 aa, Artificial Sequence
  Description of Artificial Sequence: Synthetic peptide
  Seed: LRMKWMMAMKYPITA
LRMKIMMKMPYPQTA

SEQ ID NO: 229531 - protein, 15 aa, Artificial Sequence
  Description of Artificial Sequence: Synthetic peptide
  Seed: LRMKWMMAMKYPITA
LRMKIMMKMPYPRTA

SEQ ID NO: 229532 - protein, 15 aa, Artificial Sequence
  Description of Artificial Sequence: Synthetic peptide
  Seed: LRMKWMMAMKYPITA
LRMKIMMKMPYPVTA

SEQ ID NO: 229533 - protein, 15 aa, Artificial Sequence
  Description of Artificial Sequence: Synthetic peptide
  Seed: LRMKWMMAMKYPITA
LRMKIMMKMPYPYTA

SEQ ID NO: 229534 - protein, 15 aa, Artificial Sequence
  Description of Artificial Sequence: Synthetic peptide
  Seed: LRMKWMMAMKYPITA
LRMKIMMKMQYPATA

SEQ ID NO: 229535 - protein, 15 aa, Artificial Sequence
  Description of Artificial Sequence: Synthetic peptide
  Seed: LRMKWMMAMKYPITA
LRMKIMMKMQYPETA

SEQ ID NO: 229536 - protein, 15 aa, Artificial Sequence
  Description of Artificial Sequence: Synthetic peptide
  Seed: LRMKWMMAMKYPITA
LRMKIMMKMQYPFTA

SEQ ID NO: 229537 - protein, 15 aa, Artificial Sequence
  Description of Artificial Sequence: Synthetic peptide
  Seed: LRMKWMMAMKYPITA
LRMKIMMKMQYPGTA

SEQ ID NO: 229538 - protein, 15 aa, Artificial Sequence
  Description of Artificial Sequence: Synthetic peptide
  Seed: LRMKWMMAMKYPITA
LRMKIMMKMQYPITA

SEQ ID NO: 229539 - protein, 15 aa, Artificial Sequence
  Description of Artificial Sequence: Synthetic peptide
  Seed: LRMKWMMAMKYPITA
LRMKIMMKMQYPKTA

SEQ ID NO: 229540 - protein, 15 aa, Artificial Sequence
  Description of Artificial Sequence: Synthetic peptide
  Seed: LRMKWMMAMKYPITA
LRMKIMMKMQYPLTA

SEQ ID NO: 229541 - protein, 15 aa, Artificial Sequence
  Description of Artificial Sequence: Synthetic peptide
  Seed: LRMKWMMAMKYPITA
LRMKIMMKMQYPMTA

SEQ ID NO: 229542 - protein, 15 aa, Artificial Sequence
  Description of Artificial Sequence: Synthetic peptide
  Seed: LRMKWMMAMKYPITA
LRMKIMMKMQYPQTA

SEQ ID NO: 229543 - protein, 15 aa, Artificial Sequence
  Description of Artificial Sequence: Synthetic peptide
  Seed: LRMKWMMAMKYPITA
LRMKIMMKMQYPRTA

SEQ ID NO: 229544 - protein, 15 aa, Artificial Sequence
  Description of Artificial Sequence: Synthetic peptide
  Seed: LRMKWMMAMKYPITA
LRMKIMMKMQYPSTA

SEQ ID NO: 229545 - protein, 15 aa, Artificial Sequence
  Description of Artificial Sequence: Synthetic peptide
  Seed: LRMKWMMAMKYPITA
LRMKIMMKMQYPVTA

SEQ ID NO: 229546 - protein, 15 aa, Artificial Sequence
  Description of Artificial Sequence: Synthetic peptide
  Seed: LRMKWMMAMKYPITA
LRMKIMMKMQYPYTA

SEQ ID NO: 229547 - protein, 15 aa, Artificial Sequence
  Description of Artificial Sequence: Synthetic peptide
  Seed: LRMKWMMAMKYPITA
LRMKIMMKMRYPATA

SEQ ID NO: 229548 - protein, 15 aa, Artificial Sequence
  Description of Artificial Sequence: Synthetic peptide
  Seed: LRMKWMMAMKYPITA
LRMKIMMKMRYPCTA

SEQ ID NO: 229549 - protein, 15 aa, Artificial Sequence
  Description of Artificial Sequence: Synthetic peptide
  Seed: LRMKWMMAMKYPITA
LRMKIMMKMRYPDTA

SEQ ID NO: 229550 - protein, 15 aa, Artificial Sequence
  Description of Artificial Sequence: Synthetic peptide
  Seed: LRMKWMMAMKYPITA
LRMKIMMKMRYPETA

SEQ ID NO: 229551 - protein, 15 aa, Artificial Sequence
  Description of Artificial Sequence: Synthetic peptide
  Seed: LRMKWMMAMKYPITA
LRMKIMMKMRYPFTA

SEQ ID NO: 229552 - protein, 15 aa, Artificial Sequence
  Description of Artificial Sequence: Synthetic peptide
  Seed: LRMKWMMAMKYPITA
LRMKIMMKMRYPGTA

SEQ ID NO: 229553 - protein, 15 aa, Artificial Sequence
  Description of Artificial Sequence: Synthetic peptide
  Seed: LRMKWMMAMKYPITA
LRMKIMMKMRYPHTA

SEQ ID NO: 229554 - protein, 15 aa, Artificial Sequence
  Description of Artificial Sequence: Synthetic peptide
  Seed: LRMKWMMAMKYPITA
LRMKIMMKMRYPITA

SEQ ID NO: 229555 - protein, 15 aa, Artificial Sequence
  Description of Artificial Sequence: Synthetic peptide
  Seed: LRMKWMMAMKYPITA
LRMKIMMKMRYPKTA

SEQ ID NO: 229556 - protein, 15 aa, Artificial Sequence
  Description of Artificial Sequence: Synthetic peptide
  Seed: LRMKWMMAMKYPITA
LRMKIMMKMRYPLTA

SEQ ID NO: 229557 - protein, 15 aa, Artificial Sequence
  Description of Artificial Sequence: Synthetic peptide
  Seed: LRMKWMMAMKYPITA
LRMKIMMKMRYPMTA

SEQ ID NO: 229558 - protein, 15 aa, Artificial Sequence
  Description of Artificial Sequence: Synthetic peptide
  Seed: LRMKWMMAMKYPITA
LRMKIMMKMRYPNTA

SEQ ID NO: 229559 - protein, 15 aa, Artificial Sequence
  Description of Artificial Sequence: Synthetic peptide
  Seed: LRMKWMMAMKYPITA
LRMKIMMKMRYPPTA

SEQ ID NO: 229560 - protein, 15 aa, Artificial Sequence
  Description of Artificial Sequence: Synthetic peptide
  Seed: LRMKWMMAMKYPITA
LRMKIMMKMRYPQTA

SEQ ID NO: 229561 - protein, 15 aa, Artificial Sequence
  Description of Artificial Sequence: Synthetic peptide
  Seed: LRMKWMMAMKYPITA
LRMKIMMKMRYPRTA

SEQ ID NO: 229562 - protein, 15 aa, Artificial Sequence
  Description of Artificial Sequence: Synthetic peptide
  Seed: LRMKWMMAMKYPITA
LRMKIMMKMRYPSTA

SEQ ID NO: 229563 - protein, 15 aa, Artificial Sequence
  Description of Artificial Sequence: Synthetic peptide
  Seed: LRMKWMMAMKYPITA
LRMKIMMKMRYPTTA

SEQ ID NO: 229564 - protein, 15 aa, Artificial Sequence
  Description of Artificial Sequence: Synthetic peptide
  Seed: LRMKWMMAMKYPITA
LRMKIMMKMRYPVTA

SEQ ID NO: 229565 - protein, 15 aa, Artificial Sequence
  Description of Artificial Sequence: Synthetic peptide
  Seed: LRMKWMMAMKYPITA
LRMKIMMKMRYPWTA

SEQ ID NO: 229566 - protein, 15 aa, Artificial Sequence
  Description of Artificial Sequence: Synthetic peptide
  Seed: LRMKWMMAMKYPITA
LRMKIMMKMRYPYTA

SEQ ID NO: 229567 - protein, 15 aa, Artificial Sequence
  Description of Artificial Sequence: Synthetic peptide
  Seed: LRMKWMMAMKYPITA
LRMKIMMKMSYPATA

SEQ ID NO: 229568 - protein, 15 aa, Artificial Sequence
  Description of Artificial Sequence: Synthetic peptide
  Seed: LRMKWMMAMKYPITA
LRMKIMMKMSYPCTA

SEQ ID NO: 229569 - protein, 15 aa, Artificial Sequence
  Description of Artificial Sequence: Synthetic peptide
  Seed: LRMKWMMAMKYPITA
LRMKIMMKMSYPDTA

SEQ ID NO: 229570 - protein, 15 aa, Artificial Sequence
  Description of Artificial Sequence: Synthetic peptide
  Seed: LRMKWMMAMKYPITA
LRMKIMMKMSYPETA

SEQ ID NO: 229571 - protein, 15 aa, Artificial Sequence
  Description of Artificial Sequence: Synthetic peptide
  Seed: LRMKWMMAMKYPITA
LRMKIMMKMSYPFTA

SEQ ID NO: 229572 - protein, 15 aa, Artificial Sequence
  Description of Artificial Sequence: Synthetic peptide
  Seed: LRMKWMMAMKYPITA
LRMKIMMKMSYPGTA

SEQ ID NO: 229573 - protein, 15 aa, Artificial Sequence
  Description of Artificial Sequence: Synthetic peptide
  Seed: LRMKWMMAMKYPITA
LRMKIMMKMSYPHTA

SEQ ID NO: 229574 - protein, 15 aa, Artificial Sequence
  Description of Artificial Sequence: Synthetic peptide
  Seed: LRMKWMMAMKYPITA
LRMKIMMKMSYPITA

SEQ ID NO: 229575 - protein, 15 aa, Artificial Sequence
  Description of Artificial Sequence: Synthetic peptide
  Seed: LRMKWMMAMKYPITA
LRMKIMMKMSYPKTA

SEQ ID NO: 229576 - protein, 15 aa, Artificial Sequence
  Description of Artificial Sequence: Synthetic peptide
  Seed: LRMKWMMAMKYPITA
LRMKIMMKMSYPLTA

SEQ ID NO: 229577 - protein, 15 aa, Artificial Sequence
  Description of Artificial Sequence: Synthetic peptide
  Seed: LRMKWMMAMKYPITA
LRMKIMMKMSYPMTA

SEQ ID NO: 229578 - protein, 15 aa, Artificial Sequence
  Description of Artificial Sequence: Synthetic peptide
  Seed: LRMKWMMAMKYPITA
LRMKIMMKMSYPQTA

SEQ ID NO: 229579 - protein, 15 aa, Artificial Sequence
  Description of Artificial Sequence: Synthetic peptide
  Seed: LRMKWMMAMKYPITA
LRMKIMMKMSYPRTA

SEQ ID NO: 229580 - protein, 15 aa, Artificial Sequence
  Description of Artificial Sequence: Synthetic peptide
  Seed: LRMKWMMAMKYPITA
LRMKIMMKMSYPSTA

SEQ ID NO: 229581 - protein, 15 aa, Artificial Sequence
  Description of Artificial Sequence: Synthetic peptide
  Seed: LRMKWMMAMKYPITA
LRMKIMMKMSYPTTA

SEQ ID NO: 229582 - protein, 15 aa, Artificial Sequence
  Description of Artificial Sequence: Synthetic peptide
  Seed: LRMKWMMAMKYPITA
LRMKIMMKMSYPVTA

SEQ ID NO: 229583 - protein, 15 aa, Artificial Sequence
  Description of Artificial Sequence: Synthetic peptide
  Seed: LRMKWMMAMKYPITA
LRMKIMMKMSYPYTA

SEQ ID NO: 229584 - protein, 15 aa, Artificial Sequence
  Description of Artificial Sequence: Synthetic peptide
  Seed: LRMKWMMAMKYPITA
LRMKIMMKMTYPATA

SEQ ID NO: 229585 - protein, 15 aa, Artificial Sequence
  Description of Artificial Sequence: Synthetic peptide
  Seed: LRMKWMMAMKYPITA
LRMKIMMKMTYPCTA

SEQ ID NO: 229586 - protein, 15 aa, Artificial Sequence
  Description of Artificial Sequence: Synthetic peptide
  Seed: LRMKWMMAMKYPITA
LRMKIMMKMTYPFTA

SEQ ID NO: 229587 - protein, 15 aa, Artificial Sequence
  Description of Artificial Sequence: Synthetic peptide
  Seed: LRMKWMMAMKYPITA
LRMKIMMKMTYPGTA

SEQ ID NO: 229588 - protein, 15 aa, Artificial Sequence
  Description of Artificial Sequence: Synthetic peptide
  Seed: LRMKWMMAMKYPITA
LRMKIMMKMTYPHTA

SEQ ID NO: 229589 - protein, 15 aa, Artificial Sequence
  Description of Artificial Sequence: Synthetic peptide
  Seed: LRMKWMMAMKYPITA
LRMKIMMKMTYPITA

SEQ ID NO: 229590 - protein, 15 aa, Artificial Sequence
  Description of Artificial Sequence: Synthetic peptide
  Seed: LRMKWMMAMKYPITA
LRMKIMMKMTYPKTA

SEQ ID NO: 229591 - protein, 15 aa, Artificial Sequence
  Description of Artificial Sequence: Synthetic peptide
  Seed: LRMKWMMAMKYPITA
LRMKIMMKMTYPLTA

SEQ ID NO: 229592 - protein, 15 aa, Artificial Sequence
  Description of Artificial Sequence: Synthetic peptide
  Seed: LRMKWMMAMKYPITA
LRMKIMMKMTYPMTA

SEQ ID NO: 229593 - protein, 15 aa, Artificial Sequence
  Description of Artificial Sequence: Synthetic peptide
  Seed: LRMKWMMAMKYPITA
LRMKIMMKMTYPQTA

SEQ ID NO: 229594 - protein, 15 aa, Artificial Sequence
  Description of Artificial Sequence: Synthetic peptide
  Seed: LRMKWMMAMKYPITA
LRMKIMMKMTYPRTA

SEQ ID NO: 229595 - protein, 15 aa, Artificial Sequence
  Description of Artificial Sequence: Synthetic peptide
  Seed: LRMKWMMAMKYPITA
LRMKIMMKMTYPSTA

SEQ ID NO: 229596 - protein, 15 aa, Artificial Sequence
  Description of Artificial Sequence: Synthetic peptide
  Seed: LRMKWMMAMKYPITA
LRMKIMMKMTYPTTA

SEQ ID NO: 229597 - protein, 15 aa, Artificial Sequence
  Description of Artificial Sequence: Synthetic peptide
  Seed: LRMKWMMAMKYPITA
LRMKIMMKMTYPVTA

SEQ ID NO: 229598 - protein, 15 aa, Artificial Sequence
  Description of Artificial Sequence: Synthetic peptide
  Seed: LRMKWMMAMKYPITA
LRMKIMMKMTYPYTA

SEQ ID NO: 229599 - protein, 15 aa, Artificial Sequence
  Description of Artificial Sequence: Synthetic peptide
  Seed: LRMKWMMAMKYPITA
LRMKIMMKMVYPATA

SEQ ID NO: 229600 - protein, 15 aa, Artificial Sequence
  Description of Artificial Sequence: Synthetic peptide
  Seed: LRMKWMMAMKYPITA
LRMKIMMKMVYPETA

SEQ ID NO: 229601 - protein, 15 aa, Artificial Sequence
  Description of Artificial Sequence: Synthetic peptide
  Seed: LRMKWMMAMKYPITA
LRMKIMMKMVYPFTA

SEQ ID NO: 229602 - protein, 15 aa, Artificial Sequence
  Description of Artificial Sequence: Synthetic peptide
  Seed: LRMKWMMAMKYPITA
LRMKIMMKMVYPGTA

SEQ ID NO: 229603 - protein, 15 aa, Artificial Sequence
  Description of Artificial Sequence: Synthetic peptide
  Seed: LRMKWMMAMKYPITA
LRMKIMMKMVYPHTA

SEQ ID NO: 229604 - protein, 15 aa, Artificial Sequence
  Description of Artificial Sequence: Synthetic peptide
  Seed: LRMKWMMAMKYPITA
LRMKIMMKMVYPITA

SEQ ID NO: 229605 - protein, 15 aa, Artificial Sequence
  Description of Artificial Sequence: Synthetic peptide
  Seed: LRMKWMMAMKYPITA
LRMKIMMKMVYPKTA

SEQ ID NO: 229606 - protein, 15 aa, Artificial Sequence
  Description of Artificial Sequence: Synthetic peptide
  Seed: LRMKWMMAMKYPITA
LRMKIMMKMVYPLTA

SEQ ID NO: 229607 - protein, 15 aa, Artificial Sequence
  Description of Artificial Sequence: Synthetic peptide
  Seed: LRMKWMMAMKYPITA
LRMKIMMKMVYPMTA

SEQ ID NO: 229608 - protein, 15 aa, Artificial Sequence
  Description of Artificial Sequence: Synthetic peptide
  Seed: LRMKWMMAMKYPITA
LRMKIMMKMVYPQTA

SEQ ID NO: 229609 - protein, 15 aa, Artificial Sequence
  Description of Artificial Sequence: Synthetic peptide
  Seed: LRMKWMMAMKYPITA
LRMKIMMKMVYPRTA

SEQ ID NO: 229610 - protein, 15 aa, Artificial Sequence
  Description of Artificial Sequence: Synthetic peptide
  Seed: LRMKWMMAMKYPITA
LRMKIMMKMVYPSTA

SEQ ID NO: 229611 - protein, 15 aa, Artificial Sequence
  Description of Artificial Sequence: Synthetic peptide
  Seed: LRMKWMMAMKYPITA
LRMKIMMKMVYPVTA

SEQ ID NO: 229612 - protein, 15 aa, Artificial Sequence
  Description of Artificial Sequence: Synthetic peptide
  Seed: LRMKWMMAMKYPITA
LRMKIMMKMVYPYTA

SEQ ID NO: 229613 - protein, 15 aa, Artificial Sequence
  Description of Artificial Sequence: Synthetic peptide
  Seed: LRMKWMMAMKYPITA
LRMKIMMLMAYPATA

SEQ ID NO: 229614 - protein, 15 aa, Artificial Sequence
  Description of Artificial Sequence: Synthetic peptide
  Seed: LRMKWMMAMKYPITA
LRMKIMMLMAYPCTA

SEQ ID NO: 229615 - protein, 15 aa, Artificial Sequence
  Description of Artificial Sequence: Synthetic peptide
  Seed: LRMKWMMAMKYPITA
LRMKIMMLMAYPDTA

SEQ ID NO: 229616 - protein, 15 aa, Artificial Sequence
  Description of Artificial Sequence: Synthetic peptide
  Seed: LRMKWMMAMKYPITA
LRMKIMMLMAYPETA

SEQ ID NO: 229617 - protein, 15 aa, Artificial Sequence
  Description of Artificial Sequence: Synthetic peptide
  Seed: LRMKWMMAMKYPITA
LRMKIMMLMAYPFTA

SEQ ID NO: 229618 - protein, 15 aa, Artificial Sequence
  Description of Artificial Sequence: Synthetic peptide
  Seed: LRMKWMMAMKYPITA
LRMKIMMLMAYPGTA

SEQ ID NO: 229619 - protein, 15 aa, Artificial Sequence
  Description of Artificial Sequence: Synthetic peptide
  Seed: LRMKWMMAMKYPITA
LRMKIMMLMAYPHTA

SEQ ID NO: 229620 - protein, 15 aa, Artificial Sequence
  Description of Artificial Sequence: Synthetic peptide
  Seed: LRMKWMMAMKYPITA
LRMKIMMLMAYPITA

SEQ ID NO: 229621 - protein, 15 aa, Artificial Sequence
  Description of Artificial Sequence: Synthetic peptide
  Seed: LRMKWMMAMKYPITA
LRMKIMMLMAYPKTA

SEQ ID NO: 229622 - protein, 15 aa, Artificial Sequence
  Description of Artificial Sequence: Synthetic peptide
  Seed: LRMKWMMAMKYPITA
LRMKIMMLMAYPLTA

SEQ ID NO: 229623 - protein, 15 aa, Artificial Sequence
  Description of Artificial Sequence: Synthetic peptide
  Seed: LRMKWMMAMKYPITA
LRMKIMMLMAYPMTA

SEQ ID NO: 229624 - protein, 15 aa, Artificial Sequence
  Description of Artificial Sequence: Synthetic peptide
  Seed: LRMKWMMAMKYPITA
LRMKIMMLMAYPNTA

SEQ ID NO: 229625 - protein, 15 aa, Artificial Sequence
  Description of Artificial Sequence: Synthetic peptide
  Seed: LRMKWMMAMKYPITA
LRMKIMMLMAYPPTA

SEQ ID NO: 229626 - protein, 15 aa, Artificial Sequence
  Description of Artificial Sequence: Synthetic peptide
  Seed: LRMKWMMAMKYPITA
LRMKIMMLMAYPQTA

SEQ ID NO: 229627 - protein, 15 aa, Artificial Sequence
  Description of Artificial Sequence: Synthetic peptide
  Seed: LRMKWMMAMKYPITA
LRMKIMMLMAYPRTA

SEQ ID NO: 229628 - protein, 15 aa, Artificial Sequence
  Description of Artificial Sequence: Synthetic peptide
  Seed: LRMKWMMAMKYPITA
LRMKIMMLMAYPSTA

SEQ ID NO: 229629 - protein, 15 aa, Artificial Sequence
  Description of Artificial Sequence: Synthetic peptide
  Seed: LRMKWMMAMKYPITA
LRMKIMMLMAYPTTA

SEQ ID NO: 229630 - protein, 15 aa, Artificial Sequence
  Description of Artificial Sequence: Synthetic peptide
  Seed: LRMKWMMAMKYPITA
LRMKIMMLMAYPVTA

SEQ ID NO: 229631 - protein, 15 aa, Artificial Sequence
  Description of Artificial Sequence: Synthetic peptide
  Seed: LRMKWMMAMKYPITA
LRMKIMMLMAYPWTA

SEQ ID NO: 229632 - protein, 15 aa, Artificial Sequence
  Description of Artificial Sequence: Synthetic peptide
  Seed: LRMKWMMAMKYPITA
LRMKIMMLMAYPYTA

SEQ ID NO: 229633 - protein, 15 aa, Artificial Sequence
  Description of Artificial Sequence: Synthetic peptide
  Seed: LRMKWMMAMKYPITA
LRMKIMMLMCYPATA

SEQ ID NO: 229634 - protein, 15 aa, Artificial Sequence
  Description of Artificial Sequence: Synthetic peptide
  Seed: LRMKWMMAMKYPITA
LRMKIMMLMCYPITA

SEQ ID NO: 229635 - protein, 15 aa, Artificial Sequence
  Description of Artificial Sequence: Synthetic peptide
  Seed: LRMKWMMAMKYPITA
LRMKIMMLMCYPLTA

SEQ ID NO: 229636 - protein, 15 aa, Artificial Sequence
  Description of Artificial Sequence: Synthetic peptide
  Seed: LRMKWMMAMKYPITA
LRMKIMMLMCYPMTA

SEQ ID NO: 229637 - protein, 15 aa, Artificial Sequence
  Description of Artificial Sequence: Synthetic peptide
  Seed: LRMKWMMAMKYPITA
LRMKIMMLMCYPVTA

SEQ ID NO: 229638 - protein, 15 aa, Artificial Sequence
  Description of Artificial Sequence: Synthetic peptide
  Seed: LRMKWMMAMKYPITA
LRMKIMMLMDYPATA

SEQ ID NO: 229639 - protein, 15 aa, Artificial Sequence
  Description of Artificial Sequence: Synthetic peptide
  Seed: LRMKWMMAMKYPITA
LRMKIMMLMDYPDTA

SEQ ID NO: 229640 - protein, 15 aa, Artificial Sequence
  Description of Artificial Sequence: Synthetic peptide
  Seed: LRMKWMMAMKYPITA
LRMKIMMLMDYPETA

SEQ ID NO: 229641 - protein, 15 aa, Artificial Sequence
  Description of Artificial Sequence: Synthetic peptide
  Seed: LRMKWMMAMKYPITA
LRMKIMMLMDYPHTA

SEQ ID NO: 229642 - protein, 15 aa, Artificial Sequence
  Description of Artificial Sequence: Synthetic peptide
  Seed: LRMKWMMAMKYPITA
LRMKIMMLMDYPITA

SEQ ID NO: 229643 - protein, 15 aa, Artificial Sequence
  Description of Artificial Sequence: Synthetic peptide
  Seed: LRMKWMMAMKYPITA
LRMKIMMLMDYPLTA

SEQ ID NO: 229644 - protein, 15 aa, Artificial Sequence
  Description of Artificial Sequence: Synthetic peptide
  Seed: LRMKWMMAMKYPITA
LRMKIMMLMDYPMTA

SEQ ID NO: 229645 - protein, 15 aa, Artificial Sequence
  Description of Artificial Sequence: Synthetic peptide
  Seed: LRMKWMMAMKYPITA
LRMKIMMLMDYPSTA

SEQ ID NO: 229646 - protein, 15 aa, Artificial Sequence
  Description of Artificial Sequence: Synthetic peptide
  Seed: LRMKWMMAMKYPITA
LRMKIMMLMDYPTTA

SEQ ID NO: 229647 - protein, 15 aa, Artificial Sequence
  Description of Artificial Sequence: Synthetic peptide
  Seed: LRMKWMMAMKYPITA
LRMKIMMLMDYPVTA

SEQ ID NO: 229648 - protein, 15 aa, Artificial Sequence
  Description of Artificial Sequence: Synthetic peptide
  Seed: LRMKWMMAMKYPITA
LRMKIMMLMEYPATA

SEQ ID NO: 229649 - protein, 15 aa, Artificial Sequence
  Description of Artificial Sequence: Synthetic peptide
  Seed: LRMKWMMAMKYPITA
LRMKIMMLMEYPITA

SEQ ID NO: 229650 - protein, 15 aa, Artificial Sequence
  Description of Artificial Sequence: Synthetic peptide
  Seed: LRMKWMMAMKYPITA
LRMKIMMLMEYPLTA

SEQ ID NO: 229651 - protein, 15 aa, Artificial Sequence
  Description of Artificial Sequence: Synthetic peptide
  Seed: LRMKWMMAMKYPITA
LRMKIMMLMEYPMTA

SEQ ID NO: 229652 - protein, 15 aa, Artificial Sequence
  Description of Artificial Sequence: Synthetic peptide
  Seed: LRMKWMMAMKYPITA
LRMKIMMLMEYPTTA

SEQ ID NO: 229653 - protein, 15 aa, Artificial Sequence
  Description of Artificial Sequence: Synthetic peptide
  Seed: LRMKWMMAMKYPITA
LRMKIMMLMEYPVTA

SEQ ID NO: 229654 - protein, 15 aa, Artificial Sequence
  Description of Artificial Sequence: Synthetic peptide
  Seed: LRMKWMMAMKYPITA
LRMKIMMLMGYPATA

SEQ ID NO: 229655 - protein, 15 aa, Artificial Sequence
  Description of Artificial Sequence: Synthetic peptide
  Seed: LRMKWMMAMKYPITA
LRMKIMMLMGYPCTA

SEQ ID NO: 229656 - protein, 15 aa, Artificial Sequence
  Description of Artificial Sequence: Synthetic peptide
  Seed: LRMKWMMAMKYPITA
LRMKIMMLMGYPDTA

SEQ ID NO: 229657 - protein, 15 aa, Artificial Sequence
  Description of Artificial Sequence: Synthetic peptide
  Seed: LRMKWMMAMKYPITA
LRMKIMMLMGYPETA

SEQ ID NO: 229658 - protein, 15 aa, Artificial Sequence
  Description of Artificial Sequence: Synthetic peptide
  Seed: LRMKWMMAMKYPITA
LRMKIMMLMGYPFTA

SEQ ID NO: 229659 - protein, 15 aa, Artificial Sequence
  Description of Artificial Sequence: Synthetic peptide
  Seed: LRMKWMMAMKYPITA
LRMKIMMLMGYPGTA

SEQ ID NO: 229660 - protein, 15 aa, Artificial Sequence
  Description of Artificial Sequence: Synthetic peptide
  Seed: LRMKWMMAMKYPITA
LRMKIMMLMGYPHTA

SEQ ID NO: 229661 - protein, 15 aa, Artificial Sequence
  Description of Artificial Sequence: Synthetic peptide
  Seed: LRMKWMMAMKYPITA
LRMKIMMLMGYPITA

SEQ ID NO: 229662 - protein, 15 aa, Artificial Sequence
  Description of Artificial Sequence: Synthetic peptide
  Seed: LRMKWMMAMKYPITA
LRMKIMMLMGYPKTA

SEQ ID NO: 229663 - protein, 15 aa, Artificial Sequence
  Description of Artificial Sequence: Synthetic peptide
  Seed: LRMKWMMAMKYPITA
LRMKIMMLMGYPLTA

SEQ ID NO: 229664 - protein, 15 aa, Artificial Sequence
  Description of Artificial Sequence: Synthetic peptide
  Seed: LRMKWMMAMKYPITA
LRMKIMMLMGYPMTA

SEQ ID NO: 229665 - protein, 15 aa, Artificial Sequence
  Description of Artificial Sequence: Synthetic peptide
  Seed: LRMKWMMAMKYPITA
LRMKIMMLMGYPNTA

SEQ ID NO: 229666 - protein, 15 aa, Artificial Sequence
  Description of Artificial Sequence: Synthetic peptide
  Seed: LRMKWMMAMKYPITA
LRMKIMMLMGYPPTA

SEQ ID NO: 229667 - protein, 15 aa, Artificial Sequence
  Description of Artificial Sequence: Synthetic peptide
  Seed: LRMKWMMAMKYPITA
LRMKIMMLMGYPQTA

SEQ ID NO: 229668 - protein, 15 aa, Artificial Sequence
  Description of Artificial Sequence: Synthetic peptide
  Seed: LRMKWMMAMKYPITA
LRMKIMMLMGYPRTA

SEQ ID NO: 229669 - protein, 15 aa, Artificial Sequence
  Description of Artificial Sequence: Synthetic peptide
  Seed: LRMKWMMAMKYPITA
LRMKIMMLMGYPSTA

SEQ ID NO: 229670 - protein, 15 aa, Artificial Sequence
  Description of Artificial Sequence: Synthetic peptide
  Seed: LRMKWMMAMKYPITA
LRMKIMMLMGYPTTA

SEQ ID NO: 229671 - protein, 15 aa, Artificial Sequence
  Description of Artificial Sequence: Synthetic peptide
  Seed: LRMKWMMAMKYPITA
LRMKIMMLMGYPVTA

SEQ ID NO: 229672 - protein, 15 aa, Artificial Sequence
  Description of Artificial Sequence: Synthetic peptide
  Seed: LRMKWMMAMKYPITA
LRMKIMMLMGYPWTA

SEQ ID NO: 229673 - protein, 15 aa, Artificial Sequence
  Description of Artificial Sequence: Synthetic peptide
  Seed: LRMKWMMAMKYPITA
LRMKIMMLMGYPYTA

SEQ ID NO: 229674 - protein, 15 aa, Artificial Sequence
  Description of Artificial Sequence: Synthetic peptide
  Seed: LRMKWMMAMKYPITA
LRMKIMMLMHYPATA

SEQ ID NO: 229675 - protein, 15 aa, Artificial Sequence
  Description of Artificial Sequence: Synthetic peptide
  Seed: LRMKWMMAMKYPITA
LRMKIMMLMHYPGTA

SEQ ID NO: 229676 - protein, 15 aa, Artificial Sequence
  Description of Artificial Sequence: Synthetic peptide
  Seed: LRMKWMMAMKYPITA
LRMKIMMLMHYPHTA

SEQ ID NO: 229677 - protein, 15 aa, Artificial Sequence
  Description of Artificial Sequence: Synthetic peptide
  Seed: LRMKWMMAMKYPITA
LRMKIMMLMHYPITA

SEQ ID NO: 229678 - protein, 15 aa, Artificial Sequence
  Description of Artificial Sequence: Synthetic peptide
  Seed: LRMKWMMAMKYPITA
LRMKIMMLMHYPKTA

SEQ ID NO: 229679 - protein, 15 aa, Artificial Sequence
  Description of Artificial Sequence: Synthetic peptide
  Seed: LRMKWMMAMKYPITA
LRMKIMMLMHYPLTA

SEQ ID NO: 229680 - protein, 15 aa, Artificial Sequence
  Description of Artificial Sequence: Synthetic peptide
  Seed: LRMKWMMAMKYPITA
LRMKIMMLMHYPMTA

SEQ ID NO: 229681 - protein, 15 aa, Artificial Sequence
  Description of Artificial Sequence: Synthetic peptide
  Seed: LRMKWMMAMKYPITA
LRMKIMMLMHYPNTA

SEQ ID NO: 229682 - protein, 15 aa, Artificial Sequence
  Description of Artificial Sequence: Synthetic peptide
  Seed: LRMKWMMAMKYPITA
LRMKIMMLMHYPQTA

SEQ ID NO: 229683 - protein, 15 aa, Artificial Sequence
  Description of Artificial Sequence: Synthetic peptide
  Seed: LRMKWMMAMKYPITA
LRMKIMMLMHYPRTA

SEQ ID NO: 229684 - protein, 15 aa, Artificial Sequence
  Description of Artificial Sequence: Synthetic peptide
  Seed: LRMKWMMAMKYPITA
LRMKIMMLMHYPSTA

SEQ ID NO: 229685 - protein, 15 aa, Artificial Sequence
  Description of Artificial Sequence: Synthetic peptide
  Seed: LRMKWMMAMKYPITA
LRMKIMMLMHYPTTA

SEQ ID NO: 229686 - protein, 15 aa, Artificial Sequence
  Description of Artificial Sequence: Synthetic peptide
  Seed: LRMKWMMAMKYPITA
LRMKIMMLMHYPVTA

SEQ ID NO: 229687 - protein, 15 aa, Artificial Sequence
  Description of Artificial Sequence: Synthetic peptide
  Seed: LRMKWMMAMKYPITA
LRMKIMMLMHYPYTA

SEQ ID NO: 229688 - protein, 15 aa, Artificial Sequence
  Description of Artificial Sequence: Synthetic peptide
  Seed: LRMKWMMAMKYPITA
LRMKIMMLMIYPATA

SEQ ID NO: 229689 - protein, 15 aa, Artificial Sequence
  Description of Artificial Sequence: Synthetic peptide
  Seed: LRMKWMMAMKYPITA
LRMKIMMLMIYPDTA

SEQ ID NO: 229690 - protein, 15 aa, Artificial Sequence
  Description of Artificial Sequence: Synthetic peptide
  Seed: LRMKWMMAMKYPITA
LRMKIMMLMIYPETA

SEQ ID NO: 229691 - protein, 15 aa, Artificial Sequence
  Description of Artificial Sequence: Synthetic peptide
  Seed: LRMKWMMAMKYPITA
LRMKIMMLMIYPGTA

SEQ ID NO: 229692 - protein, 15 aa, Artificial Sequence
  Description of Artificial Sequence: Synthetic peptide
  Seed: LRMKWMMAMKYPITA
LRMKIMMLMIYPHTA

SEQ ID NO: 229693 - protein, 15 aa, Artificial Sequence
  Description of Artificial Sequence: Synthetic peptide
  Seed: LRMKWMMAMKYPITA
LRMKIMMLMIYPITA

SEQ ID NO: 229694 - protein, 15 aa, Artificial Sequence
  Description of Artificial Sequence: Synthetic peptide
  Seed: LRMKWMMAMKYPITA
LRMKIMMLMIYPKTA

SEQ ID NO: 229695 - protein, 15 aa, Artificial Sequence
  Description of Artificial Sequence: Synthetic peptide
  Seed: LRMKWMMAMKYPITA
LRMKIMMLMIYPLTA

SEQ ID NO: 229696 - protein, 15 aa, Artificial Sequence
  Description of Artificial Sequence: Synthetic peptide
  Seed: LRMKWMMAMKYPITA
LRMKIMMLMIYPMTA

SEQ ID NO: 229697 - protein, 15 aa, Artificial Sequence
  Description of Artificial Sequence: Synthetic peptide
  Seed: LRMKWMMAMKYPITA
LRMKIMMLMIYPNTA

SEQ ID NO: 229698 - protein, 15 aa, Artificial Sequence
  Description of Artificial Sequence: Synthetic peptide
  Seed: LRMKWMMAMKYPITA
LRMKIMMLMIYPQTA

SEQ ID NO: 229699 - protein, 15 aa, Artificial Sequence
  Description of Artificial Sequence: Synthetic peptide
  Seed: LRMKWMMAMKYPITA
LRMKIMMLMIYPRTA

SEQ ID NO: 229700 - protein, 15 aa, Artificial Sequence
  Description of Artificial Sequence: Synthetic peptide
  Seed: LRMKWMMAMKYPITA
LRMKIMMLMIYPSTA

SEQ ID NO: 229701 - protein, 15 aa, Artificial Sequence
  Description of Artificial Sequence: Synthetic peptide
  Seed: LRMKWMMAMKYPITA
LRMKIMMLMIYPTTA

SEQ ID NO: 229702 - protein, 15 aa, Artificial Sequence
  Description of Artificial Sequence: Synthetic peptide
  Seed: LRMKWMMAMKYPITA
LRMKIMMLMIYPVTA

SEQ ID NO: 229703 - protein, 15 aa, Artificial Sequence
  Description of Artificial Sequence: Synthetic peptide
  Seed: LRMKWMMAMKYPITA
LRMKIMMLMIYPYTA

SEQ ID NO: 229704 - protein, 15 aa, Artificial Sequence
  Description of Artificial Sequence: Synthetic peptide
  Seed: LRMKWMMAMKYPITA
LRMKIMMLMKYPATA

SEQ ID NO: 229705 - protein, 15 aa, Artificial Sequence
  Description of Artificial Sequence: Synthetic peptide
  Seed: LRMKWMMAMKYPITA
LRMKIMMLMKYPCTA

SEQ ID NO: 229706 - protein, 15 aa, Artificial Sequence
  Description of Artificial Sequence: Synthetic peptide
  Seed: LRMKWMMAMKYPITA
LRMKIMMLMKYPDTA

SEQ ID NO: 229707 - protein, 15 aa, Artificial Sequence
  Description of Artificial Sequence: Synthetic peptide
  Seed: LRMKWMMAMKYPITA
LRMKIMMLMKYPETA

SEQ ID NO: 229708 - protein, 15 aa, Artificial Sequence
  Description of Artificial Sequence: Synthetic peptide
  Seed: LRMKWMMAMKYPITA
LRMKIMMLMKYPFTA

SEQ ID NO: 229709 - protein, 15 aa, Artificial Sequence
  Description of Artificial Sequence: Synthetic peptide
  Seed: LRMKWMMAMKYPITA
LRMKIMMLMKYPGTA

SEQ ID NO: 229710 - protein, 15 aa, Artificial Sequence
  Description of Artificial Sequence: Synthetic peptide
  Seed: LRMKWMMAMKYPITA
LRMKIMMLMKYPHTA

SEQ ID NO: 229711 - protein, 15 aa, Artificial Sequence
  Description of Artificial Sequence: Synthetic peptide
  Seed: LRMKWMMAMKYPITA
LRMKIMMLMKYPITA

SEQ ID NO: 229712 - protein, 15 aa, Artificial Sequence
  Description of Artificial Sequence: Synthetic peptide
  Seed: LRMKWMMAMKYPITA
LRMKIMMLMKYPKTA

SEQ ID NO: 229713 - protein, 15 aa, Artificial Sequence
  Description of Artificial Sequence: Synthetic peptide
  Seed: LRMKWMMAMKYPITA
LRMKIMMLMKYPLTA

SEQ ID NO: 229714 - protein, 15 aa, Artificial Sequence
  Description of Artificial Sequence: Synthetic peptide
  Seed: LRMKWMMAMKYPITA
LRMKIMMLMKYPMTA

SEQ ID NO: 229715 - protein, 15 aa, Artificial Sequence
  Description of Artificial Sequence: Synthetic peptide
  Seed: LRMKWMMAMKYPITA
LRMKIMMLMKYPNTA

SEQ ID NO: 229716 - protein, 15 aa, Artificial Sequence
  Description of Artificial Sequence: Synthetic peptide
  Seed: LRMKWMMAMKYPITA
LRMKIMMLMKYPPTA

SEQ ID NO: 229717 - protein, 15 aa, Artificial Sequence
  Description of Artificial Sequence: Synthetic peptide
  Seed: LRMKWMMAMKYPITA
LRMKIMMLMKYPQTA

SEQ ID NO: 229718 - protein, 15 aa, Artificial Sequence
  Description of Artificial Sequence: Synthetic peptide
  Seed: LRMKWMMAMKYPITA
LRMKIMMLMKYPRTA

SEQ ID NO: 229719 - protein, 15 aa, Artificial Sequence
  Description of Artificial Sequence: Synthetic peptide
  Seed: LRMKWMMAMKYPITA
LRMKIMMLMKYPSTA

SEQ ID NO: 229720 - protein, 15 aa, Artificial Sequence
  Description of Artificial Sequence: Synthetic peptide
  Seed: LRMKWMMAMKYPITA
LRMKIMMLMKYPTTA

SEQ ID NO: 229721 - protein, 15 aa, Artificial Sequence
  Description of Artificial Sequence: Synthetic peptide
  Seed: LRMKWMMAMKYPITA
LRMKIMMLMKYPVTA

SEQ ID NO: 229722 - protein, 15 aa, Artificial Sequence
  Description of Artificial Sequence: Synthetic peptide
  Seed: LRMKWMMAMKYPITA
LRMKIMMLMKYPWTA

SEQ ID NO: 229723 - protein, 15 aa, Artificial Sequence
  Description of Artificial Sequence: Synthetic peptide
  Seed: LRMKWMMAMKYPITA
LRMKIMMLMKYPYTA

SEQ ID NO: 229724 - protein, 15 aa, Artificial Sequence
  Description of Artificial Sequence: Synthetic peptide
  Seed: LRMKWMMAMKYPITA
LRMKIMMLMLYPATA

SEQ ID NO: 229725 - protein, 15 aa, Artificial Sequence
  Description of Artificial Sequence: Synthetic peptide
  Seed: LRMKWMMAMKYPITA
LRMKIMMLMLYPDTA

SEQ ID NO: 229726 - protein, 15 aa, Artificial Sequence
  Description of Artificial Sequence: Synthetic peptide
  Seed: LRMKWMMAMKYPITA
LRMKIMMLMLYPGTA

SEQ ID NO: 229727 - protein, 15 aa, Artificial Sequence
  Description of Artificial Sequence: Synthetic peptide
  Seed: LRMKWMMAMKYPITA
LRMKIMMLMLYPLTA

SEQ ID NO: 229728 - protein, 15 aa, Artificial Sequence
  Description of Artificial Sequence: Synthetic peptide
  Seed: LRMKWMMAMKYPITA
LRMKIMMLMLYPMTA

SEQ ID NO: 229729 - protein, 15 aa, Artificial Sequence
  Description of Artificial Sequence: Synthetic peptide
  Seed: LRMKWMMAMKYPITA
LRMKIMMLMLYPRTA

SEQ ID NO: 229730 - protein, 15 aa, Artificial Sequence
  Description of Artificial Sequence: Synthetic peptide
  Seed: LRMKWMMAMKYPITA
LRMKIMMLMLYPSTA

SEQ ID NO: 229731 - protein, 15 aa, Artificial Sequence
  Description of Artificial Sequence: Synthetic peptide
  Seed: LRMKWMMAMKYPITA
LRMKIMMLMLYPVTA

SEQ ID NO: 229732 - protein, 15 aa, Artificial Sequence
  Description of Artificial Sequence: Synthetic peptide
  Seed: LRMKWMMAMKYPITA
LRMKIMMLMMYPATA

SEQ ID NO: 229733 - protein, 15 aa, Artificial Sequence
  Description of Artificial Sequence: Synthetic peptide
  Seed: LRMKWMMAMKYPITA
LRMKIMMLMMYPCTA

SEQ ID NO: 229734 - protein, 15 aa, Artificial Sequence
  Description of Artificial Sequence: Synthetic peptide
  Seed: LRMKWMMAMKYPITA
LRMKIMMLMMYPDTA

SEQ ID NO: 229735 - protein, 15 aa, Artificial Sequence
  Description of Artificial Sequence: Synthetic peptide
  Seed: LRMKWMMAMKYPITA
LRMKIMMLMMYPGTA

SEQ ID NO: 229736 - protein, 15 aa, Artificial Sequence
  Description of Artificial Sequence: Synthetic peptide
  Seed: LRMKWMMAMKYPITA
LRMKIMMLMMYPITA

SEQ ID NO: 229737 - protein, 15 aa, Artificial Sequence
  Description of Artificial Sequence: Synthetic peptide
  Seed: LRMKWMMAMKYPITA
LRMKIMMLMMYPKTA

SEQ ID NO: 229738 - protein, 15 aa, Artificial Sequence
  Description of Artificial Sequence: Synthetic peptide
  Seed: LRMKWMMAMKYPITA
LRMKIMMLMMYPLTA

SEQ ID NO: 229739 - protein, 15 aa, Artificial Sequence
  Description of Artificial Sequence: Synthetic peptide
  Seed: LRMKWMMAMKYPITA
LRMKIMMLMMYPMTA

SEQ ID NO: 229740 - protein, 15 aa, Artificial Sequence
  Description of Artificial Sequence: Synthetic peptide
  Seed: LRMKWMMAMKYPITA
LRMKIMMLMMYPRTA

SEQ ID NO: 229741 - protein, 15 aa, Artificial Sequence
  Description of Artificial Sequence: Synthetic peptide
  Seed: LRMKWMMAMKYPITA
LRMKIMMLMMYPSTA

SEQ ID NO: 229742 - protein, 15 aa, Artificial Sequence
  Description of Artificial Sequence: Synthetic peptide
  Seed: LRMKWMMAMKYPITA
LRMKIMMLMMYPTTA

SEQ ID NO: 229743 - protein, 15 aa, Artificial Sequence
  Description of Artificial Sequence: Synthetic peptide
  Seed: LRMKWMMAMKYPITA
LRMKIMMLMMYPVTA

SEQ ID NO: 229744 - protein, 15 aa, Artificial Sequence
  Description of Artificial Sequence: Synthetic peptide
  Seed: LRMKWMMAMKYPITA
LRMKIMMLMNYPATA

SEQ ID NO: 229745 - protein, 15 aa, Artificial Sequence
  Description of Artificial Sequence: Synthetic peptide
  Seed: LRMKWMMAMKYPITA
LRMKIMMLMNYPCTA

SEQ ID NO: 229746 - protein, 15 aa, Artificial Sequence
  Description of Artificial Sequence: Synthetic peptide
  Seed: LRMKWMMAMKYPITA
LRMKIMMLMNYPDTA

SEQ ID NO: 229747 - protein, 15 aa, Artificial Sequence
  Description of Artificial Sequence: Synthetic peptide
  Seed: LRMKWMMAMKYPITA
LRMKIMMLMNYPETA

SEQ ID NO: 229748 - protein, 15 aa, Artificial Sequence
  Description of Artificial Sequence: Synthetic peptide
  Seed: LRMKWMMAMKYPITA
LRMKIMMLMNYPFTA

SEQ ID NO: 229749 - protein, 15 aa, Artificial Sequence
  Description of Artificial Sequence: Synthetic peptide
  Seed: LRMKWMMAMKYPITA
LRMKIMMLMNYPGTA

SEQ ID NO: 229750 - protein, 15 aa, Artificial Sequence
  Description of Artificial Sequence: Synthetic peptide
  Seed: LRMKWMMAMKYPITA
LRMKIMMLMNYPHTA

SEQ ID NO: 229751 - protein, 15 aa, Artificial Sequence
  Description of Artificial Sequence: Synthetic peptide
  Seed: LRMKWMMAMKYPITA
LRMKIMMLMNYPITA

SEQ ID NO: 229752 - protein, 15 aa, Artificial Sequence
  Description of Artificial Sequence: Synthetic peptide
  Seed: LRMKWMMAMKYPITA
LRMKIMMLMNYPKTA

SEQ ID NO: 229753 - protein, 15 aa, Artificial Sequence
  Description of Artificial Sequence: Synthetic peptide
  Seed: LRMKWMMAMKYPITA
LRMKIMMLMNYPLTA

SEQ ID NO: 229754 - protein, 15 aa, Artificial Sequence
  Description of Artificial Sequence: Synthetic peptide
  Seed: LRMKWMMAMKYPITA
LRMKIMMLMNYPMTA

SEQ ID NO: 229755 - protein, 15 aa, Artificial Sequence
  Description of Artificial Sequence: Synthetic peptide
  Seed: LRMKWMMAMKYPITA
LRMKIMMLMNYPNTA

SEQ ID NO: 229756 - protein, 15 aa, Artificial Sequence
  Description of Artificial Sequence: Synthetic peptide
  Seed: LRMKWMMAMKYPITA
LRMKIMMLMNYPPTA

SEQ ID NO: 229757 - protein, 15 aa, Artificial Sequence
  Description of Artificial Sequence: Synthetic peptide
  Seed: LRMKWMMAMKYPITA
LRMKIMMLMNYPQTA

SEQ ID NO: 229758 - protein, 15 aa, Artificial Sequence
  Description of Artificial Sequence: Synthetic peptide
  Seed: LRMKWMMAMKYPITA
LRMKIMMLMNYPRTA

SEQ ID NO: 229759 - protein, 15 aa, Artificial Sequence
  Description of Artificial Sequence: Synthetic peptide
  Seed: LRMKWMMAMKYPITA
LRMKIMMLMNYPSTA

SEQ ID NO: 229760 - protein, 15 aa, Artificial Sequence
  Description of Artificial Sequence: Synthetic peptide
  Seed: LRMKWMMAMKYPITA
LRMKIMMLMNYPTTA

SEQ ID NO: 229761 - protein, 15 aa, Artificial Sequence
  Description of Artificial Sequence: Synthetic peptide
  Seed: LRMKWMMAMKYPITA
LRMKIMMLMNYPVTA

SEQ ID NO: 229762 - protein, 15 aa, Artificial Sequence
  Description of Artificial Sequence: Synthetic peptide
  Seed: LRMKWMMAMKYPITA
LRMKIMMLMNYPYTA

SEQ ID NO: 229763 - protein, 15 aa, Artificial Sequence
  Description of Artificial Sequence: Synthetic peptide
  Seed: LRMKWMMAMKYPITA
LRMKIMMLMPYPATA

SEQ ID NO: 229764 - protein, 15 aa, Artificial Sequence
  Description of Artificial Sequence: Synthetic peptide
  Seed: LRMKWMMAMKYPITA
LRMKIMMLMPYPCTA

SEQ ID NO: 229765 - protein, 15 aa, Artificial Sequence
  Description of Artificial Sequence: Synthetic peptide
  Seed: LRMKWMMAMKYPITA
LRMKIMMLMPYPDTA

SEQ ID NO: 229766 - protein, 15 aa, Artificial Sequence
  Description of Artificial Sequence: Synthetic peptide
  Seed: LRMKWMMAMKYPITA
LRMKIMMLMPYPETA

SEQ ID NO: 229767 - protein, 15 aa, Artificial Sequence
  Description of Artificial Sequence: Synthetic peptide
  Seed: LRMKWMMAMKYPITA
LRMKIMMLMPYPFTA

SEQ ID NO: 229768 - protein, 15 aa, Artificial Sequence
  Description of Artificial Sequence: Synthetic peptide
  Seed: LRMKWMMAMKYPITA
LRMKIMMLMPYPGTA

SEQ ID NO: 229769 - protein, 15 aa, Artificial Sequence
  Description of Artificial Sequence: Synthetic peptide
  Seed: LRMKWMMAMKYPITA
LRMKIMMLMPYPHTA

SEQ ID NO: 229770 - protein, 15 aa, Artificial Sequence
  Description of Artificial Sequence: Synthetic peptide
  Seed: LRMKWMMAMKYPITA
LRMKIMMLMPYPITA

SEQ ID NO: 229771 - protein, 15 aa, Artificial Sequence
  Description of Artificial Sequence: Synthetic peptide
  Seed: LRMKWMMAMKYPITA
LRMKIMMLMPYPKTA

SEQ ID NO: 229772 - protein, 15 aa, Artificial Sequence
  Description of Artificial Sequence: Synthetic peptide
  Seed: LRMKWMMAMKYPITA
LRMKIMMLMPYPLTA

SEQ ID NO: 229773 - protein, 15 aa, Artificial Sequence
  Description of Artificial Sequence: Synthetic peptide
  Seed: LRMKWMMAMKYPITA
LRMKIMMLMPYPMTA

SEQ ID NO: 229774 - protein, 15 aa, Artificial Sequence
  Description of Artificial Sequence: Synthetic peptide
  Seed: LRMKWMMAMKYPITA
LRMKIMMLMPYPNTA

SEQ ID NO: 229775 - protein, 15 aa, Artificial Sequence
  Description of Artificial Sequence: Synthetic peptide
  Seed: LRMKWMMAMKYPITA
LRMKIMMLMPYPPTA

SEQ ID NO: 229776 - protein, 15 aa, Artificial Sequence
  Description of Artificial Sequence: Synthetic peptide
  Seed: LRMKWMMAMKYPITA
LRMKIMMLMPYPQTA

SEQ ID NO: 229777 - protein, 15 aa, Artificial Sequence
  Description of Artificial Sequence: Synthetic peptide
  Seed: LRMKWMMAMKYPITA
LRMKIMMLMPYPRTA

SEQ ID NO: 229778 - protein, 15 aa, Artificial Sequence
  Description of Artificial Sequence: Synthetic peptide
  Seed: LRMKWMMAMKYPITA
LRMKIMMLMPYPSTA

SEQ ID NO: 229779 - protein, 15 aa, Artificial Sequence
  Description of Artificial Sequence: Synthetic peptide
  Seed: LRMKWMMAMKYPITA
LRMKIMMLMPYPTTA

SEQ ID NO: 229780 - protein, 15 aa, Artificial Sequence
  Description of Artificial Sequence: Synthetic peptide
  Seed: LRMKWMMAMKYPITA
LRMKIMMLMPYPVTA

SEQ ID NO: 229781 - protein, 15 aa, Artificial Sequence
  Description of Artificial Sequence: Synthetic peptide
  Seed: LRMKWMMAMKYPITA
LRMKIMMLMPYPWTA

SEQ ID NO: 229782 - protein, 15 aa, Artificial Sequence
  Description of Artificial Sequence: Synthetic peptide
  Seed: LRMKWMMAMKYPITA
LRMKIMMLMPYPYTA

SEQ ID NO: 229783 - protein, 15 aa, Artificial Sequence
  Description of Artificial Sequence: Synthetic peptide
  Seed: LRMKWMMAMKYPITA
LRMKIMMLMQYPATA

SEQ ID NO: 229784 - protein, 15 aa, Artificial Sequence
  Description of Artificial Sequence: Synthetic peptide
  Seed: LRMKWMMAMKYPITA
LRMKIMMLMQYPITA

SEQ ID NO: 229785 - protein, 15 aa, Artificial Sequence
  Description of Artificial Sequence: Synthetic peptide
  Seed: LRMKWMMAMKYPITA
LRMKIMMLMQYPKTA

SEQ ID NO: 229786 - protein, 15 aa, Artificial Sequence
  Description of Artificial Sequence: Synthetic peptide
  Seed: LRMKWMMAMKYPITA
LRMKIMMLMQYPLTA

SEQ ID NO: 229787 - protein, 15 aa, Artificial Sequence
  Description of Artificial Sequence: Synthetic peptide
  Seed: LRMKWMMAMKYPITA
LRMKIMMLMQYPMTA

SEQ ID NO: 229788 - protein, 15 aa, Artificial Sequence
  Description of Artificial Sequence: Synthetic peptide
  Seed: LRMKWMMAMKYPITA
LRMKIMMLMQYPNTA

SEQ ID NO: 229789 - protein, 15 aa, Artificial Sequence
  Description of Artificial Sequence: Synthetic peptide
  Seed: LRMKWMMAMKYPITA
LRMKIMMLMQYPRTA

SEQ ID NO: 229790 - protein, 15 aa, Artificial Sequence
  Description of Artificial Sequence: Synthetic peptide
  Seed: LRMKWMMAMKYPITA
LRMKIMMLMQYPSTA

SEQ ID NO: 229791 - protein, 15 aa, Artificial Sequence
  Description of Artificial Sequence: Synthetic peptide
  Seed: LRMKWMMAMKYPITA
LRMKIMMLMQYPTTA

SEQ ID NO: 229792 - protein, 15 aa, Artificial Sequence
  Description of Artificial Sequence: Synthetic peptide
  Seed: LRMKWMMAMKYPITA
LRMKIMMLMQYPVTA

SEQ ID NO: 229793 - protein, 15 aa, Artificial Sequence
  Description of Artificial Sequence: Synthetic peptide
  Seed: LRMKWMMAMKYPITA
LRMKIMMLMRYPATA

SEQ ID NO: 229794 - protein, 15 aa, Artificial Sequence
  Description of Artificial Sequence: Synthetic peptide
  Seed: LRMKWMMAMKYPITA
LRMKIMMLMRYPCTA

SEQ ID NO: 229795 - protein, 15 aa, Artificial Sequence
  Description of Artificial Sequence: Synthetic peptide
  Seed: LRMKWMMAMKYPITA
LRMKIMMLMRYPDTA

SEQ ID NO: 229796 - protein, 15 aa, Artificial Sequence
  Description of Artificial Sequence: Synthetic peptide
  Seed: LRMKWMMAMKYPITA
LRMKIMMLMRYPETA

SEQ ID NO: 229797 - protein, 15 aa, Artificial Sequence
  Description of Artificial Sequence: Synthetic peptide
  Seed: LRMKWMMAMKYPITA
LRMKIMMLMRYPFTA

SEQ ID NO: 229798 - protein, 15 aa, Artificial Sequence
  Description of Artificial Sequence: Synthetic peptide
  Seed: LRMKWMMAMKYPITA
LRMKIMMLMRYPGTA

SEQ ID NO: 229799 - protein, 15 aa, Artificial Sequence
  Description of Artificial Sequence: Synthetic peptide
  Seed: LRMKWMMAMKYPITA
LRMKIMMLMRYPHTA

SEQ ID NO: 229800 - protein, 15 aa, Artificial Sequence
  Description of Artificial Sequence: Synthetic peptide
  Seed: LRMKWMMAMKYPITA
LRMKIMMLMRYPITA

SEQ ID NO: 229801 - protein, 15 aa, Artificial Sequence
  Description of Artificial Sequence: Synthetic peptide
  Seed: LRMKWMMAMKYPITA
LRMKIMMLMRYPKTA

SEQ ID NO: 229802 - protein, 15 aa, Artificial Sequence
  Description of Artificial Sequence: Synthetic peptide
  Seed: LRMKWMMAMKYPITA
LRMKIMMLMRYPLTA

SEQ ID NO: 229803 - protein, 15 aa, Artificial Sequence
  Description of Artificial Sequence: Synthetic peptide
  Seed: LRMKWMMAMKYPITA
LRMKIMMLMRYPMTA

SEQ ID NO: 229804 - protein, 15 aa, Artificial Sequence
  Description of Artificial Sequence: Synthetic peptide
  Seed: LRMKWMMAMKYPITA
LRMKIMMLMRYPNTA

SEQ ID NO: 229805 - protein, 15 aa, Artificial Sequence
  Description of Artificial Sequence: Synthetic peptide
  Seed: LRMKWMMAMKYPITA
LRMKIMMLMRYPPTA

SEQ ID NO: 229806 - protein, 15 aa, Artificial Sequence
  Description of Artificial Sequence: Synthetic peptide
  Seed: LRMKWMMAMKYPITA
LRMKIMMLMRYPQTA

SEQ ID NO: 229807 - protein, 15 aa, Artificial Sequence
  Description of Artificial Sequence: Synthetic peptide
  Seed: LRMKWMMAMKYPITA
LRMKIMMLMRYPRTA

SEQ ID NO: 229808 - protein, 15 aa, Artificial Sequence
  Description of Artificial Sequence: Synthetic peptide
  Seed: LRMKWMMAMKYPITA
LRMKIMMLMRYPSTA

SEQ ID NO: 229809 - protein, 15 aa, Artificial Sequence
  Description of Artificial Sequence: Synthetic peptide
  Seed: LRMKWMMAMKYPITA
LRMKIMMLMRYPTTA

SEQ ID NO: 229810 - protein, 15 aa, Artificial Sequence
  Description of Artificial Sequence: Synthetic peptide
  Seed: LRMKWMMAMKYPITA
LRMKIMMLMRYPVTA

SEQ ID NO: 229811 - protein, 15 aa, Artificial Sequence
  Description of Artificial Sequence: Synthetic peptide
  Seed: LRMKWMMAMKYPITA
LRMKIMMLMRYPWTA

SEQ ID NO: 229812 - protein, 15 aa, Artificial Sequence
  Description of Artificial Sequence: Synthetic peptide
  Seed: LRMKWMMAMKYPITA
LRMKIMMLMRYPYTA

SEQ ID NO: 229813 - protein, 15 aa, Artificial Sequence
  Description of Artificial Sequence: Synthetic peptide
  Seed: LRMKWMMAMKYPITA
LRMKIMMLMSYPATA

SEQ ID NO: 229814 - protein, 15 aa, Artificial Sequence
  Description of Artificial Sequence: Synthetic peptide
  Seed: LRMKWMMAMKYPITA
LRMKIMMLMSYPCTA

SEQ ID NO: 229815 - protein, 15 aa, Artificial Sequence
  Description of Artificial Sequence: Synthetic peptide
  Seed: LRMKWMMAMKYPITA
LRMKIMMLMSYPDTA

SEQ ID NO: 229816 - protein, 15 aa, Artificial Sequence
  Description of Artificial Sequence: Synthetic peptide
  Seed: LRMKWMMAMKYPITA
LRMKIMMLMSYPETA

SEQ ID NO: 229817 - protein, 15 aa, Artificial Sequence
  Description of Artificial Sequence: Synthetic peptide
  Seed: LRMKWMMAMKYPITA
LRMKIMMLMSYPFTA

SEQ ID NO: 229818 - protein, 15 aa, Artificial Sequence
  Description of Artificial Sequence: Synthetic peptide
  Seed: LRMKWMMAMKYPITA
LRMKIMMLMSYPGTA

SEQ ID NO: 229819 - protein, 15 aa, Artificial Sequence
  Description of Artificial Sequence: Synthetic peptide
  Seed: LRMKWMMAMKYPITA
LRMKIMMLMSYPHTA

SEQ ID NO: 229820 - protein, 15 aa, Artificial Sequence
  Description of Artificial Sequence: Synthetic peptide
  Seed: LRMKWMMAMKYPITA
LRMKIMMLMSYPITA

SEQ ID NO: 229821 - protein, 15 aa, Artificial Sequence
  Description of Artificial Sequence: Synthetic peptide
  Seed: LRMKWMMAMKYPITA
LRMKIMMLMSYPKTA

SEQ ID NO: 229822 - protein, 15 aa, Artificial Sequence
  Description of Artificial Sequence: Synthetic peptide
  Seed: LRMKWMMAMKYPITA
LRMKIMMLMSYPLTA

SEQ ID NO: 229823 - protein, 15 aa, Artificial Sequence
  Description of Artificial Sequence: Synthetic peptide
  Seed: LRMKWMMAMKYPITA
LRMKIMMLMSYPMTA

SEQ ID NO: 229824 - protein, 15 aa, Artificial Sequence
  Description of Artificial Sequence: Synthetic peptide
  Seed: LRMKWMMAMKYPITA
LRMKIMMLMSYPNTA

SEQ ID NO: 229825 - protein, 15 aa, Artificial Sequence
  Description of Artificial Sequence: Synthetic peptide
  Seed: LRMKWMMAMKYPITA
LRMKIMMLMSYPPTA

SEQ ID NO: 229826 - protein, 15 aa, Artificial Sequence
  Description of Artificial Sequence: Synthetic peptide
  Seed: LRMKWMMAMKYPITA
LRMKIMMLMSYPQTA

SEQ ID NO: 229827 - protein, 15 aa, Artificial Sequence
  Description of Artificial Sequence: Synthetic peptide
  Seed: LRMKWMMAMKYPITA
LRMKIMMLMSYPRTA

SEQ ID NO: 229828 - protein, 15 aa, Artificial Sequence
  Description of Artificial Sequence: Synthetic peptide
  Seed: LRMKWMMAMKYPITA
LRMKIMMLMSYPSTA

SEQ ID NO: 229829 - protein, 15 aa, Artificial Sequence
  Description of Artificial Sequence: Synthetic peptide
  Seed: LRMKWMMAMKYPITA
LRMKIMMLMSYPTTA

SEQ ID NO: 229830 - protein, 15 aa, Artificial Sequence
  Description of Artificial Sequence: Synthetic peptide
  Seed: LRMKWMMAMKYPITA
LRMKIMMLMSYPVTA

SEQ ID NO: 229831 - protein, 15 aa, Artificial Sequence
  Description of Artificial Sequence: Synthetic peptide
  Seed: LRMKWMMAMKYPITA
LRMKIMMLMSYPYTA

SEQ ID NO: 229832 - protein, 15 aa, Artificial Sequence
  Description of Artificial Sequence: Synthetic peptide
  Seed: LRMKWMMAMKYPITA
LRMKIMMLMTYPATA

SEQ ID NO: 229833 - protein, 15 aa, Artificial Sequence
  Description of Artificial Sequence: Synthetic peptide
  Seed: LRMKWMMAMKYPITA
LRMKIMMLMTYPCTA

SEQ ID NO: 229834 - protein, 15 aa, Artificial Sequence
  Description of Artificial Sequence: Synthetic peptide
  Seed: LRMKWMMAMKYPITA
LRMKIMMLMTYPDTA

SEQ ID NO: 229835 - protein, 15 aa, Artificial Sequence
  Description of Artificial Sequence: Synthetic peptide
  Seed: LRMKWMMAMKYPITA
LRMKIMMLMTYPETA

SEQ ID NO: 229836 - protein, 15 aa, Artificial Sequence
  Description of Artificial Sequence: Synthetic peptide
  Seed: LRMKWMMAMKYPITA
LRMKIMMLMTYPFTA

SEQ ID NO: 229837 - protein, 15 aa, Artificial Sequence
  Description of Artificial Sequence: Synthetic peptide
  Seed: LRMKWMMAMKYPITA
LRMKIMMLMTYPGTA

SEQ ID NO: 229838 - protein, 15 aa, Artificial Sequence
  Description of Artificial Sequence: Synthetic peptide
  Seed: LRMKWMMAMKYPITA
LRMKIMMLMTYPHTA

SEQ ID NO: 229839 - protein, 15 aa, Artificial Sequence
  Description of Artificial Sequence: Synthetic peptide
  Seed: LRMKWMMAMKYPITA
LRMKIMMLMTYPITA

SEQ ID NO: 229840 - protein, 15 aa, Artificial Sequence
  Description of Artificial Sequence: Synthetic peptide
  Seed: LRMKWMMAMKYPITA
LRMKIMMLMTYPKTA

SEQ ID NO: 229841 - protein, 15 aa, Artificial Sequence
  Description of Artificial Sequence: Synthetic peptide
  Seed: LRMKWMMAMKYPITA
LRMKIMMLMTYPLTA

SEQ ID NO: 229842 - protein, 15 aa, Artificial Sequence
  Description of Artificial Sequence: Synthetic peptide
  Seed: LRMKWMMAMKYPITA
LRMKIMMLMTYPMTA

SEQ ID NO: 229843 - protein, 15 aa, Artificial Sequence
  Description of Artificial Sequence: Synthetic peptide
  Seed: LRMKWMMAMKYPITA
LRMKIMMLMTYPNTA

SEQ ID NO: 229844 - protein, 15 aa, Artificial Sequence
  Description of Artificial Sequence: Synthetic peptide
  Seed: LRMKWMMAMKYPITA
LRMKIMMLMTYPPTA

SEQ ID NO: 229845 - protein, 15 aa, Artificial Sequence
  Description of Artificial Sequence: Synthetic peptide
  Seed: LRMKWMMAMKYPITA
LRMKIMMLMTYPQTA

SEQ ID NO: 229846 - protein, 15 aa, Artificial Sequence
  Description of Artificial Sequence: Synthetic peptide
  Seed: LRMKWMMAMKYPITA
LRMKIMMLMTYPRTA

SEQ ID NO: 229847 - protein, 15 aa, Artificial Sequence
  Description of Artificial Sequence: Synthetic peptide
  Seed: LRMKWMMAMKYPITA
LRMKIMMLMTYPSTA

SEQ ID NO: 229848 - protein, 15 aa, Artificial Sequence
  Description of Artificial Sequence: Synthetic peptide
  Seed: LRMKWMMAMKYPITA
LRMKIMMLMTYPTTA

SEQ ID NO: 229849 - protein, 15 aa, Artificial Sequence
  Description of Artificial Sequence: Synthetic peptide
  Seed: LRMKWMMAMKYPITA
LRMKIMMLMTYPVTA

SEQ ID NO: 229850 - protein, 15 aa, Artificial Sequence
  Description of Artificial Sequence: Synthetic peptide
  Seed: LRMKWMMAMKYPITA
LRMKIMMLMTYPYTA

SEQ ID NO: 229851 - protein, 15 aa, Artificial Sequence
  Description of Artificial Sequence: Synthetic peptide
  Seed: LRMKWMMAMKYPITA
LRMKIMMLMVYPATA

SEQ ID NO: 229852 - protein, 15 aa, Artificial Sequence
  Description of Artificial Sequence: Synthetic peptide
  Seed: LRMKWMMAMKYPITA
LRMKIMMLMVYPCTA

SEQ ID NO: 229853 - protein, 15 aa, Artificial Sequence
  Description of Artificial Sequence: Synthetic peptide
  Seed: LRMKWMMAMKYPITA
LRMKIMMLMVYPDTA

SEQ ID NO: 229854 - protein, 15 aa, Artificial Sequence
  Description of Artificial Sequence: Synthetic peptide
  Seed: LRMKWMMAMKYPITA
LRMKIMMLMVYPETA

SEQ ID NO: 229855 - protein, 15 aa, Artificial Sequence
  Description of Artificial Sequence: Synthetic peptide
  Seed: LRMKWMMAMKYPITA
LRMKIMMLMVYPGTA

SEQ ID NO: 229856 - protein, 15 aa, Artificial Sequence
  Description of Artificial Sequence: Synthetic peptide
  Seed: LRMKWMMAMKYPITA
LRMKIMMLMVYPHTA

SEQ ID NO: 229857 - protein, 15 aa, Artificial Sequence
  Description of Artificial Sequence: Synthetic peptide
  Seed: LRMKWMMAMKYPITA
LRMKIMMLMVYPITA

SEQ ID NO: 229858 - protein, 15 aa, Artificial Sequence
  Description of Artificial Sequence: Synthetic peptide
  Seed: LRMKWMMAMKYPITA
LRMKIMMLMVYPKTA

SEQ ID NO: 229859 - protein, 15 aa, Artificial Sequence
  Description of Artificial Sequence: Synthetic peptide
  Seed: LRMKWMMAMKYPITA
LRMKIMMLMVYPLTA

SEQ ID NO: 229860 - protein, 15 aa, Artificial Sequence
  Description of Artificial Sequence: Synthetic peptide
  Seed: LRMKWMMAMKYPITA
LRMKIMMLMVYPMTA

SEQ ID NO: 229861 - protein, 15 aa, Artificial Sequence
  Description of Artificial Sequence: Synthetic peptide
  Seed: LRMKWMMAMKYPITA
LRMKIMMLMVYPNTA

SEQ ID NO: 229862 - protein, 15 aa, Artificial Sequence
  Description of Artificial Sequence: Synthetic peptide
  Seed: LRMKWMMAMKYPITA
LRMKIMMLMVYPPTA

SEQ ID NO: 229863 - protein, 15 aa, Artificial Sequence
  Description of Artificial Sequence: Synthetic peptide
  Seed: LRMKWMMAMKYPITA
LRMKIMMLMVYPQTA

SEQ ID NO: 229864 - protein, 15 aa, Artificial Sequence
  Description of Artificial Sequence: Synthetic peptide
  Seed: LRMKWMMAMKYPITA
LRMKIMMLMVYPRTA

SEQ ID NO: 229865 - protein, 15 aa, Artificial Sequence
  Description of Artificial Sequence: Synthetic peptide
  Seed: LRMKWMMAMKYPITA
LRMKIMMLMVYPSTA

SEQ ID NO: 229866 - protein, 15 aa, Artificial Sequence
  Description of Artificial Sequence: Synthetic peptide
  Seed: LRMKWMMAMKYPITA
LRMKIMMLMVYPTTA

SEQ ID NO: 229867 - protein, 15 aa, Artificial Sequence
  Description of Artificial Sequence: Synthetic peptide
  Seed: LRMKWMMAMKYPITA
LRMKIMMLMVYPVTA

SEQ ID NO: 229868 - protein, 15 aa, Artificial Sequence
  Description of Artificial Sequence: Synthetic peptide
  Seed: LRMKWMMAMKYPITA
LRMKIMMLMVYPYTA

SEQ ID NO: 229869 - protein, 15 aa, Artificial Sequence
  Description of Artificial Sequence: Synthetic peptide
  Seed: LRMKWMMAMKYPITA
LRMKIMMMMAYPATA

SEQ ID NO: 229870 - protein, 15 aa, Artificial Sequence
  Description of Artificial Sequence: Synthetic peptide
  Seed: LRMKWMMAMKYPITA
LRMKIMMMMAYPCTA

SEQ ID NO: 229871 - protein, 15 aa, Artificial Sequence
  Description of Artificial Sequence: Synthetic peptide
  Seed: LRMKWMMAMKYPITA
LRMKIMMMMAYPDTA

SEQ ID NO: 229872 - protein, 15 aa, Artificial Sequence
  Description of Artificial Sequence: Synthetic peptide
  Seed: LRMKWMMAMKYPITA
LRMKIMMMMAYPETA

SEQ ID NO: 229873 - protein, 15 aa, Artificial Sequence
  Description of Artificial Sequence: Synthetic peptide
  Seed: LRMKWMMAMKYPITA
LRMKIMMMMAYPFTA

SEQ ID NO: 229874 - protein, 15 aa, Artificial Sequence
  Description of Artificial Sequence: Synthetic peptide
  Seed: LRMKWMMAMKYPITA
LRMKIMMMMAYPGTA

SEQ ID NO: 229875 - protein, 15 aa, Artificial Sequence
  Description of Artificial Sequence: Synthetic peptide
  Seed: LRMKWMMAMKYPITA
LRMKIMMMMAYPHTA

SEQ ID NO: 229876 - protein, 15 aa, Artificial Sequence
  Description of Artificial Sequence: Synthetic peptide
  Seed: LRMKWMMAMKYPITA
LRMKIMMMMAYPITA

SEQ ID NO: 229877 - protein, 15 aa, Artificial Sequence
  Description of Artificial Sequence: Synthetic peptide
  Seed: LRMKWMMAMKYPITA
LRMKIMMMMAYPKTA

SEQ ID NO: 229878 - protein, 15 aa, Artificial Sequence
  Description of Artificial Sequence: Synthetic peptide
  Seed: LRMKWMMAMKYPITA
LRMKIMMMMAYPLTA

SEQ ID NO: 229879 - protein, 15 aa, Artificial Sequence
  Description of Artificial Sequence: Synthetic peptide
  Seed: LRMKWMMAMKYPITA
LRMKIMMMMAYPMTA

SEQ ID NO: 229880 - protein, 15 aa, Artificial Sequence
  Description of Artificial Sequence: Synthetic peptide
  Seed: LRMKWMMAMKYPITA
LRMKIMMMMAYPNTA

SEQ ID NO: 229881 - protein, 15 aa, Artificial Sequence
  Description of Artificial Sequence: Synthetic peptide
  Seed: LRMKWMMAMKYPITA
LRMKIMMMMAYPPTA

SEQ ID NO: 229882 - protein, 15 aa, Artificial Sequence
  Description of Artificial Sequence: Synthetic peptide
  Seed: LRMKWMMAMKYPITA
LRMKIMMMMAYPQTA

SEQ ID NO: 229883 - protein, 15 aa, Artificial Sequence
  Description of Artificial Sequence: Synthetic peptide
  Seed: LRMKWMMAMKYPITA
LRMKIMMMMAYPRTA

SEQ ID NO: 229884 - protein, 15 aa, Artificial Sequence
  Description of Artificial Sequence: Synthetic peptide
  Seed: LRMKWMMAMKYPITA
LRMKIMMMMAYPSTA

SEQ ID NO: 229885 - protein, 15 aa, Artificial Sequence
  Description of Artificial Sequence: Synthetic peptide
  Seed: LRMKWMMAMKYPITA
LRMKIMMMMAYPTTA

SEQ ID NO: 229886 - protein, 15 aa, Artificial Sequence
  Description of Artificial Sequence: Synthetic peptide
  Seed: LRMKWMMAMKYPITA
LRMKIMMMMAYPVTA

SEQ ID NO: 229887 - protein, 15 aa, Artificial Sequence
  Description of Artificial Sequence: Synthetic peptide
  Seed: LRMKWMMAMKYPITA
LRMKIMMMMAYPWTA

SEQ ID NO: 229888 - protein, 15 aa, Artificial Sequence
  Description of Artificial Sequence: Synthetic peptide
  Seed: LRMKWMMAMKYPITA
LRMKIMMMMAYPYTA

SEQ ID NO: 229889 - protein, 15 aa, Artificial Sequence
  Description of Artificial Sequence: Synthetic peptide
  Seed: LRMKWMMAMKYPITA
LRMKIMMMMCYPATA

SEQ ID NO: 229890 - protein, 15 aa, Artificial Sequence
  Description of Artificial Sequence: Synthetic peptide
  Seed: LRMKWMMAMKYPITA
LRMKIMMMMCYPITA

SEQ ID NO: 229891 - protein, 15 aa, Artificial Sequence
  Description of Artificial Sequence: Synthetic peptide
  Seed: LRMKWMMAMKYPITA
LRMKIMMMMCYPLTA

SEQ ID NO: 229892 - protein, 15 aa, Artificial Sequence
  Description of Artificial Sequence: Synthetic peptide
  Seed: LRMKWMMAMKYPITA
LRMKIMMMMCYPMTA

SEQ ID NO: 229893 - protein, 15 aa, Artificial Sequence
  Description of Artificial Sequence: Synthetic peptide
  Seed: LRMKWMMAMKYPITA
LRMKIMMMMCYPNTA

SEQ ID NO: 229894 - protein, 15 aa, Artificial Sequence
  Description of Artificial Sequence: Synthetic peptide
  Seed: LRMKWMMAMKYPITA
LRMKIMMMMCYPSTA

SEQ ID NO: 229895 - protein, 15 aa, Artificial Sequence
  Description of Artificial Sequence: Synthetic peptide
  Seed: LRMKWMMAMKYPITA
LRMKIMMMMCYPTTA

SEQ ID NO: 229896 - protein, 15 aa, Artificial Sequence
  Description of Artificial Sequence: Synthetic peptide
  Seed: LRMKWMMAMKYPITA
LRMKIMMMMCYPVTA

SEQ ID NO: 229897 - protein, 15 aa, Artificial Sequence
  Description of Artificial Sequence: Synthetic peptide
  Seed: LRMKWMMAMKYPITA
LRMKIMMMMDYPATA

SEQ ID NO: 229898 - protein, 15 aa, Artificial Sequence
  Description of Artificial Sequence: Synthetic peptide
  Seed: LRMKWMMAMKYPITA
LRMKIMMMMDYPDTA

SEQ ID NO: 229899 - protein, 15 aa, Artificial Sequence
  Description of Artificial Sequence: Synthetic peptide
  Seed: LRMKWMMAMKYPITA
LRMKIMMMMDYPETA

SEQ ID NO: 229900 - protein, 15 aa, Artificial Sequence
  Description of Artificial Sequence: Synthetic peptide
  Seed: LRMKWMMAMKYPITA
LRMKIMMMMDYPGTA

SEQ ID NO: 229901 - protein, 15 aa, Artificial Sequence
  Description of Artificial Sequence: Synthetic peptide
  Seed: LRMKWMMAMKYPITA
LRMKIMMMMDYPHTA

SEQ ID NO: 229902 - protein, 15 aa, Artificial Sequence
  Description of Artificial Sequence: Synthetic peptide
  Seed: LRMKWMMAMKYPITA
LRMKIMMMMDYPITA

SEQ ID NO: 229903 - protein, 15 aa, Artificial Sequence
  Description of Artificial Sequence: Synthetic peptide
  Seed: LRMKWMMAMKYPITA
LRMKIMMMMDYPLTA

SEQ ID NO: 229904 - protein, 15 aa, Artificial Sequence
  Description of Artificial Sequence: Synthetic peptide
  Seed: LRMKWMMAMKYPITA
LRMKIMMMMDYPMTA

SEQ ID NO: 229905 - protein, 15 aa, Artificial Sequence
  Description of Artificial Sequence: Synthetic peptide
  Seed: LRMKWMMAMKYPITA
LRMKIMMMMDYPNTA

SEQ ID NO: 229906 - protein, 15 aa, Artificial Sequence
  Description of Artificial Sequence: Synthetic peptide
  Seed: LRMKWMMAMKYPITA
LRMKIMMMMDYPQTA

SEQ ID NO: 229907 - protein, 15 aa, Artificial Sequence
  Description of Artificial Sequence: Synthetic peptide
  Seed: LRMKWMMAMKYPITA
LRMKIMMMMDYPSTA

SEQ ID NO: 229908 - protein, 15 aa, Artificial Sequence
  Description of Artificial Sequence: Synthetic peptide
  Seed: LRMKWMMAMKYPITA
LRMKIMMMMDYPTTA

SEQ ID NO: 229909 - protein, 15 aa, Artificial Sequence
  Description of Artificial Sequence: Synthetic peptide
  Seed: LRMKWMMAMKYPITA
LRMKIMMMMDYPVTA

SEQ ID NO: 229910 - protein, 15 aa, Artificial Sequence
  Description of Artificial Sequence: Synthetic peptide
  Seed: LRMKWMMAMKYPITA
LRMKIMMMMEYPATA

SEQ ID NO: 229911 - protein, 15 aa, Artificial Sequence
  Description of Artificial Sequence: Synthetic peptide
  Seed: LRMKWMMAMKYPITA
LRMKIMMMMEYPITA

SEQ ID NO: 229912 - protein, 15 aa, Artificial Sequence
  Description of Artificial Sequence: Synthetic peptide
  Seed: LRMKWMMAMKYPITA
LRMKIMMMMEYPLTA

SEQ ID NO: 229913 - protein, 15 aa, Artificial Sequence
  Description of Artificial Sequence: Synthetic peptide
  Seed: LRMKWMMAMKYPITA
LRMKIMMMMEYPMTA

SEQ ID NO: 229914 - protein, 15 aa, Artificial Sequence
  Description of Artificial Sequence: Synthetic peptide
  Seed: LRMKWMMAMKYPITA
LRMKIMMMMEYPNTA

SEQ ID NO: 229915 - protein, 15 aa, Artificial Sequence
  Description of Artificial Sequence: Synthetic peptide
  Seed: LRMKWMMAMKYPITA
LRMKIMMMMEYPSTA

SEQ ID NO: 229916 - protein, 15 aa, Artificial Sequence
  Description of Artificial Sequence: Synthetic peptide
  Seed: LRMKWMMAMKYPITA
LRMKIMMMMEYPTTA

SEQ ID NO: 229917 - protein, 15 aa, Artificial Sequence
  Description of Artificial Sequence: Synthetic peptide
  Seed: LRMKWMMAMKYPITA
LRMKIMMMMEYPVTA

SEQ ID NO: 229918 - protein, 15 aa, Artificial Sequence
  Description of Artificial Sequence: Synthetic peptide
  Seed: LRMKWMMAMKYPITA
LRMKIMMMMGYPATA

SEQ ID NO: 229919 - protein, 15 aa, Artificial Sequence
  Description of Artificial Sequence: Synthetic peptide
  Seed: LRMKWMMAMKYPITA
LRMKIMMMMGYPCTA

SEQ ID NO: 229920 - protein, 15 aa, Artificial Sequence
  Description of Artificial Sequence: Synthetic peptide
  Seed: LRMKWMMAMKYPITA
LRMKIMMMMGYPDTA

SEQ ID NO: 229921 - protein, 15 aa, Artificial Sequence
  Description of Artificial Sequence: Synthetic peptide
  Seed: LRMKWMMAMKYPITA
LRMKIMMMMGYPETA

SEQ ID NO: 229922 - protein, 15 aa, Artificial Sequence
  Description of Artificial Sequence: Synthetic peptide
  Seed: LRMKWMMAMKYPITA
LRMKIMMMMGYPFTA

SEQ ID NO: 229923 - protein, 15 aa, Artificial Sequence
  Description of Artificial Sequence: Synthetic peptide
  Seed: LRMKWMMAMKYPITA
LRMKIMMMMGYPGTA

SEQ ID NO: 229924 - protein, 15 aa, Artificial Sequence
  Description of Artificial Sequence: Synthetic peptide
  Seed: LRMKWMMAMKYPITA
LRMKIMMMMGYPHTA

SEQ ID NO: 229925 - protein, 15 aa, Artificial Sequence
  Description of Artificial Sequence: Synthetic peptide
  Seed: LRMKWMMAMKYPITA
LRMKIMMMMGYPITA

SEQ ID NO: 229926 - protein, 15 aa, Artificial Sequence
  Description of Artificial Sequence: Synthetic peptide
  Seed: LRMKWMMAMKYPITA
LRMKIMMMMGYPKTA

SEQ ID NO: 229927 - protein, 15 aa, Artificial Sequence
  Description of Artificial Sequence: Synthetic peptide
  Seed: LRMKWMMAMKYPITA
LRMKIMMMMGYPLTA

SEQ ID NO: 229928 - protein, 15 aa, Artificial Sequence
  Description of Artificial Sequence: Synthetic peptide
  Seed: LRMKWMMAMKYPITA
LRMKIMMMMGYPMTA

SEQ ID NO: 229929 - protein, 15 aa, Artificial Sequence
  Description of Artificial Sequence: Synthetic peptide
  Seed: LRMKWMMAMKYPITA
LRMKIMMMMGYPNTA

SEQ ID NO: 229930 - protein, 15 aa, Artificial Sequence
  Description of Artificial Sequence: Synthetic peptide
  Seed: LRMKWMMAMKYPITA
LRMKIMMMMGYPPTA

SEQ ID NO: 229931 - protein, 15 aa, Artificial Sequence
  Description of Artificial Sequence: Synthetic peptide
  Seed: LRMKWMMAMKYPITA
LRMKIMMMMGYPQTA

SEQ ID NO: 229932 - protein, 15 aa, Artificial Sequence
  Description of Artificial Sequence: Synthetic peptide
  Seed: LRMKWMMAMKYPITA
LRMKIMMMMGYPRTA

SEQ ID NO: 229933 - protein, 15 aa, Artificial Sequence
  Description of Artificial Sequence: Synthetic peptide
  Seed: LRMKWMMAMKYPITA
LRMKIMMMMGYPSTA

SEQ ID NO: 229934 - protein, 15 aa, Artificial Sequence
  Description of Artificial Sequence: Synthetic peptide
  Seed: LRMKWMMAMKYPITA
LRMKIMMMMGYPTTA

SEQ ID NO: 229935 - protein, 15 aa, Artificial Sequence
  Description of Artificial Sequence: Synthetic peptide
  Seed: LRMKWMMAMKYPITA
LRMKIMMMMGYPVTA

SEQ ID NO: 229936 - protein, 15 aa, Artificial Sequence
  Description of Artificial Sequence: Synthetic peptide
  Seed: LRMKWMMAMKYPITA
LRMKIMMMMGYPWTA

SEQ ID NO: 229937 - protein, 15 aa, Artificial Sequence
  Description of Artificial Sequence: Synthetic peptide
  Seed: LRMKWMMAMKYPITA
LRMKIMMMMGYPYTA

SEQ ID NO: 229938 - protein, 15 aa, Artificial Sequence
  Description of Artificial Sequence: Synthetic peptide
  Seed: LRMKWMMAMKYPITA
LRMKIMMMMHYPATA

SEQ ID NO: 229939 - protein, 15 aa, Artificial Sequence
  Description of Artificial Sequence: Synthetic peptide
  Seed: LRMKWMMAMKYPITA
LRMKIMMMMHYPCTA

SEQ ID NO: 229940 - protein, 15 aa, Artificial Sequence
  Description of Artificial Sequence: Synthetic peptide
  Seed: LRMKWMMAMKYPITA
LRMKIMMMMHYPFTA

SEQ ID NO: 229941 - protein, 15 aa, Artificial Sequence
  Description of Artificial Sequence: Synthetic peptide
  Seed: LRMKWMMAMKYPITA
LRMKIMMMMHYPGTA

SEQ ID NO: 229942 - protein, 15 aa, Artificial Sequence
  Description of Artificial Sequence: Synthetic peptide
  Seed: LRMKWMMAMKYPITA
LRMKIMMMMHYPHTA

SEQ ID NO: 229943 - protein, 15 aa, Artificial Sequence
  Description of Artificial Sequence: Synthetic peptide
  Seed: LRMKWMMAMKYPITA
LRMKIMMMMHYPITA

SEQ ID NO: 229944 - protein, 15 aa, Artificial Sequence
  Description of Artificial Sequence: Synthetic peptide
  Seed: LRMKWMMAMKYPITA
LRMKIMMMMHYPKTA

SEQ ID NO: 229945 - protein, 15 aa, Artificial Sequence
  Description of Artificial Sequence: Synthetic peptide
  Seed: LRMKWMMAMKYPITA
LRMKIMMMMHYPLTA

SEQ ID NO: 229946 - protein, 15 aa, Artificial Sequence
  Description of Artificial Sequence: Synthetic peptide
  Seed: LRMKWMMAMKYPITA
LRMKIMMMMHYPMTA

SEQ ID NO: 229947 - protein, 15 aa, Artificial Sequence
  Description of Artificial Sequence: Synthetic peptide
  Seed: LRMKWMMAMKYPITA
LRMKIMMMMHYPNTA

SEQ ID NO: 229948 - protein, 15 aa, Artificial Sequence
  Description of Artificial Sequence: Synthetic peptide
  Seed: LRMKWMMAMKYPITA
LRMKIMMMMHYPPTA

SEQ ID NO: 229949 - protein, 15 aa, Artificial Sequence
  Description of Artificial Sequence: Synthetic peptide
  Seed: LRMKWMMAMKYPITA
LRMKIMMMMHYPQTA

SEQ ID NO: 229950 - protein, 15 aa, Artificial Sequence
  Description of Artificial Sequence: Synthetic peptide
  Seed: LRMKWMMAMKYPITA
LRMKIMMMMHYPRTA

SEQ ID NO: 229951 - protein, 15 aa, Artificial Sequence
  Description of Artificial Sequence: Synthetic peptide
  Seed: LRMKWMMAMKYPITA
LRMKIMMMMHYPSTA

SEQ ID NO: 229952 - protein, 15 aa, Artificial Sequence
  Description of Artificial Sequence: Synthetic peptide
  Seed: LRMKWMMAMKYPITA
LRMKIMMMMHYPTTA

SEQ ID NO: 229953 - protein, 15 aa, Artificial Sequence
  Description of Artificial Sequence: Synthetic peptide
  Seed: LRMKWMMAMKYPITA
LRMKIMMMMHYPVTA

SEQ ID NO: 229954 - protein, 15 aa, Artificial Sequence
  Description of Artificial Sequence: Synthetic peptide
  Seed: LRMKWMMAMKYPITA
LRMKIMMMMHYPYTA

SEQ ID NO: 229955 - protein, 15 aa, Artificial Sequence
  Description of Artificial Sequence: Synthetic peptide
  Seed: LRMKWMMAMKYPITA
LRMKIMMMMIYPATA

SEQ ID NO: 229956 - protein, 15 aa, Artificial Sequence
  Description of Artificial Sequence: Synthetic peptide
  Seed: LRMKWMMAMKYPITA
LRMKIMMMMIYPCTA

SEQ ID NO: 229957 - protein, 15 aa, Artificial Sequence
  Description of Artificial Sequence: Synthetic peptide
  Seed: LRMKWMMAMKYPITA
LRMKIMMMMIYPDTA

SEQ ID NO: 229958 - protein, 15 aa, Artificial Sequence
  Description of Artificial Sequence: Synthetic peptide
  Seed: LRMKWMMAMKYPITA
LRMKIMMMMIYPETA

SEQ ID NO: 229959 - protein, 15 aa, Artificial Sequence
  Description of Artificial Sequence: Synthetic peptide
  Seed: LRMKWMMAMKYPITA
LRMKIMMMMIYPGTA

SEQ ID NO: 229960 - protein, 15 aa, Artificial Sequence
  Description of Artificial Sequence: Synthetic peptide
  Seed: LRMKWMMAMKYPITA
LRMKIMMMMIYPHTA

SEQ ID NO: 229961 - protein, 15 aa, Artificial Sequence
  Description of Artificial Sequence: Synthetic peptide
  Seed: LRMKWMMAMKYPITA
LRMKIMMMMIYPITA

SEQ ID NO: 229962 - protein, 15 aa, Artificial Sequence
  Description of Artificial Sequence: Synthetic peptide
  Seed: LRMKWMMAMKYPITA
LRMKIMMMMIYPKTA

SEQ ID NO: 229963 - protein, 15 aa, Artificial Sequence
  Description of Artificial Sequence: Synthetic peptide
  Seed: LRMKWMMAMKYPITA
LRMKIMMMMIYPLTA

SEQ ID NO: 229964 - protein, 15 aa, Artificial Sequence
  Description of Artificial Sequence: Synthetic peptide
  Seed: LRMKWMMAMKYPITA
LRMKIMMMMIYPMTA

SEQ ID NO: 229965 - protein, 15 aa, Artificial Sequence
  Description of Artificial Sequence: Synthetic peptide
  Seed: LRMKWMMAMKYPITA
LRMKIMMMMIYPNTA

SEQ ID NO: 229966 - protein, 15 aa, Artificial Sequence
  Description of Artificial Sequence: Synthetic peptide
  Seed: LRMKWMMAMKYPITA
LRMKIMMMMIYPQTA

SEQ ID NO: 229967 - protein, 15 aa, Artificial Sequence
  Description of Artificial Sequence: Synthetic peptide
  Seed: LRMKWMMAMKYPITA
LRMKIMMMMIYPRTA

SEQ ID NO: 229968 - protein, 15 aa, Artificial Sequence
  Description of Artificial Sequence: Synthetic peptide
  Seed: LRMKWMMAMKYPITA
LRMKIMMMMIYPSTA

SEQ ID NO: 229969 - protein, 15 aa, Artificial Sequence
  Description of Artificial Sequence: Synthetic peptide
  Seed: LRMKWMMAMKYPITA
LRMKIMMMMIYPTTA

SEQ ID NO: 229970 - protein, 15 aa, Artificial Sequence
  Description of Artificial Sequence: Synthetic peptide
  Seed: LRMKWMMAMKYPITA
LRMKIMMMMIYPVTA

SEQ ID NO: 229971 - protein, 15 aa, Artificial Sequence
  Description of Artificial Sequence: Synthetic peptide
  Seed: LRMKWMMAMKYPITA
LRMKIMMMMIYPYTA

SEQ ID NO: 229972 - protein, 15 aa, Artificial Sequence
  Description of Artificial Sequence: Synthetic peptide
  Seed: LRMKWMMAMKYPITA
LRMKIMMMMKYPATA

SEQ ID NO: 229973 - protein, 15 aa, Artificial Sequence
  Description of Artificial Sequence: Synthetic peptide
  Seed: LRMKWMMAMKYPITA
LRMKIMMMMKYPCTA

SEQ ID NO: 229974 - protein, 15 aa, Artificial Sequence
  Description of Artificial Sequence: Synthetic peptide
  Seed: LRMKWMMAMKYPITA
LRMKIMMMMKYPDTA

SEQ ID NO: 229975 - protein, 15 aa, Artificial Sequence
  Description of Artificial Sequence: Synthetic peptide
  Seed: LRMKWMMAMKYPITA
LRMKIMMMMKYPETA

SEQ ID NO: 229976 - protein, 15 aa, Artificial Sequence
  Description of Artificial Sequence: Synthetic peptide
  Seed: LRMKWMMAMKYPITA
LRMKIMMMMKYPFTA

SEQ ID NO: 229977 - protein, 15 aa, Artificial Sequence
  Description of Artificial Sequence: Synthetic peptide
  Seed: LRMKWMMAMKYPITA
LRMKIMMMMKYPGTA

SEQ ID NO: 229978 - protein, 15 aa, Artificial Sequence
  Description of Artificial Sequence: Synthetic peptide
  Seed: LRMKWMMAMKYPITA
LRMKIMMMMKYPHTA

SEQ ID NO: 229979 - protein, 15 aa, Artificial Sequence
  Description of Artificial Sequence: Synthetic peptide
  Seed: LRMKWMMAMKYPITA
LRMKIMMMMKYPITA

SEQ ID NO: 229980 - protein, 15 aa, Artificial Sequence
  Description of Artificial Sequence: Synthetic peptide
  Seed: LRMKWMMAMKYPITA
LRMKIMMMMKYPKTA

SEQ ID NO: 229981 - protein, 15 aa, Artificial Sequence
  Description of Artificial Sequence: Synthetic peptide
  Seed: LRMKWMMAMKYPITA
LRMKIMMMMKYPLTA

SEQ ID NO: 229982 - protein, 15 aa, Artificial Sequence
  Description of Artificial Sequence: Synthetic peptide
  Seed: LRMKWMMAMKYPITA
LRMKIMMMMKYPMTA

SEQ ID NO: 229983 - protein, 15 aa, Artificial Sequence
  Description of Artificial Sequence: Synthetic peptide
  Seed: LRMKWMMAMKYPITA
LRMKIMMMMKYPNTA

SEQ ID NO: 229984 - protein, 15 aa, Artificial Sequence
  Description of Artificial Sequence: Synthetic peptide
  Seed: LRMKWMMAMKYPITA
LRMKIMMMMKYPPTA

SEQ ID NO: 229985 - protein, 15 aa, Artificial Sequence
  Description of Artificial Sequence: Synthetic peptide
  Seed: LRMKWMMAMKYPITA
LRMKIMMMMKYPQTA

SEQ ID NO: 229986 - protein, 15 aa, Artificial Sequence
  Description of Artificial Sequence: Synthetic peptide
  Seed: LRMKWMMAMKYPITA
LRMKIMMMMKYPRTA

SEQ ID NO: 229987 - protein, 15 aa, Artificial Sequence
  Description of Artificial Sequence: Synthetic peptide
  Seed: LRMKWMMAMKYPITA
LRMKIMMMMKYPSTA

SEQ ID NO: 229988 - protein, 15 aa, Artificial Sequence
  Description of Artificial Sequence: Synthetic peptide
  Seed: LRMKWMMAMKYPITA
LRMKIMMMMKYPTTA

SEQ ID NO: 229989 - protein, 15 aa, Artificial Sequence
  Description of Artificial Sequence: Synthetic peptide
  Seed: LRMKWMMAMKYPITA
LRMKIMMMMKYPVTA

SEQ ID NO: 229990 - protein, 15 aa, Artificial Sequence
  Description of Artificial Sequence: Synthetic peptide
  Seed: LRMKWMMAMKYPITA
LRMKIMMMMKYPWTA

SEQ ID NO: 229991 - protein, 15 aa, Artificial Sequence
  Description of Artificial Sequence: Synthetic peptide
  Seed: LRMKWMMAMKYPITA
LRMKIMMMMKYPYTA

SEQ ID NO: 229992 - protein, 15 aa, Artificial Sequence
  Description of Artificial Sequence: Synthetic peptide
  Seed: LRMKWMMAMKYPITA
LRMKIMMMMLYPATA

SEQ ID NO: 229993 - protein, 15 aa, Artificial Sequence
  Description of Artificial Sequence: Synthetic peptide
  Seed: LRMKWMMAMKYPITA
LRMKIMMMMLYPDTA

SEQ ID NO: 229994 - protein, 15 aa, Artificial Sequence
  Description of Artificial Sequence: Synthetic peptide
  Seed: LRMKWMMAMKYPITA
LRMKIMMMMLYPGTA

SEQ ID NO: 229995 - protein, 15 aa, Artificial Sequence
  Description of Artificial Sequence: Synthetic peptide
  Seed: LRMKWMMAMKYPITA
LRMKIMMMMLYPITA

SEQ ID NO: 229996 - protein, 15 aa, Artificial Sequence
  Description of Artificial Sequence: Synthetic peptide
  Seed: LRMKWMMAMKYPITA
LRMKIMMMMLYPKTA

SEQ ID NO: 229997 - protein, 15 aa, Artificial Sequence
  Description of Artificial Sequence: Synthetic peptide
  Seed: LRMKWMMAMKYPITA
LRMKIMMMMLYPLTA

SEQ ID NO: 229998 - protein, 15 aa, Artificial Sequence
  Description of Artificial Sequence: Synthetic peptide
  Seed: LRMKWMMAMKYPITA
LRMKIMMMMLYPMTA

SEQ ID NO: 229999 - protein, 15 aa, Artificial Sequence
  Description of Artificial Sequence: Synthetic peptide
  Seed: LRMKWMMAMKYPITA
LRMKIMMMMLYPNTA

SEQ ID NO: 230000 - protein, 15 aa, Artificial Sequence
  Description of Artificial Sequence: Synthetic peptide
  Seed: LRMKWMMAMKYPITA
LRMKIMMMMLYPRTA

SEQ ID NO: 230001 - protein, 15 aa, Artificial Sequence
  Description of Artificial Sequence: Synthetic peptide
  Seed: LRMKWMMAMKYPITA
LRMKIMMMMLYPSTA

SEQ ID NO: 230002 - protein, 15 aa, Artificial Sequence
  Description of Artificial Sequence: Synthetic peptide
  Seed: LRMKWMMAMKYPITA
LRMKIMMMMLYPTTA

SEQ ID NO: 230003 - protein, 15 aa, Artificial Sequence
  Description of Artificial Sequence: Synthetic peptide
  Seed: LRMKWMMAMKYPITA
LRMKIMMMMLYPVTA

SEQ ID NO: 230004 - protein, 15 aa, Artificial Sequence
  Description of Artificial Sequence: Synthetic peptide
  Seed: LRMKWMMAMKYPITA
LRMKIMMMMMYPATA

SEQ ID NO: 230005 - protein, 15 aa, Artificial Sequence
  Description of Artificial Sequence: Synthetic peptide
  Seed: LRMKWMMAMKYPITA
LRMKIMMMMMYPCTA

SEQ ID NO: 230006 - protein, 15 aa, Artificial Sequence
  Description of Artificial Sequence: Synthetic peptide
  Seed: LRMKWMMAMKYPITA
LRMKIMMMMMYPDTA

SEQ ID NO: 230007 - protein, 15 aa, Artificial Sequence
  Description of Artificial Sequence: Synthetic peptide
  Seed: LRMKWMMAMKYPITA
LRMKIMMMMMYPGTA

SEQ ID NO: 230008 - protein, 15 aa, Artificial Sequence
  Description of Artificial Sequence: Synthetic peptide
  Seed: LRMKWMMAMKYPITA
LRMKIMMMMMYPHTA

SEQ ID NO: 230009 - protein, 15 aa, Artificial Sequence
  Description of Artificial Sequence: Synthetic peptide
  Seed: LRMKWMMAMKYPITA
LRMKIMMMMMYPITA

SEQ ID NO: 230010 - protein, 15 aa, Artificial Sequence
  Description of Artificial Sequence: Synthetic peptide
  Seed: LRMKWMMAMKYPITA
LRMKIMMMMMYPKTA

SEQ ID NO: 230011 - protein, 15 aa, Artificial Sequence
  Description of Artificial Sequence: Synthetic peptide
  Seed: LRMKWMMAMKYPITA
LRMKIMMMMMYPLTA

SEQ ID NO: 230012 - protein, 15 aa, Artificial Sequence
  Description of Artificial Sequence: Synthetic peptide
  Seed: LRMKWMMAMKYPITA
LRMKIMMMMMYPMTA

SEQ ID NO: 230013 - protein, 15 aa, Artificial Sequence
  Description of Artificial Sequence: Synthetic peptide
  Seed: LRMKWMMAMKYPITA
LRMKIMMMMMYPRTA

SEQ ID NO: 230014 - protein, 15 aa, Artificial Sequence
  Description of Artificial Sequence: Synthetic peptide
  Seed: LRMKWMMAMKYPITA
LRMKIMMMMMYPSTA

SEQ ID NO: 230015 - protein, 15 aa, Artificial Sequence
  Description of Artificial Sequence: Synthetic peptide
  Seed: LRMKWMMAMKYPITA
LRMKIMMMMMYPTTA

SEQ ID NO: 230016 - protein, 15 aa, Artificial Sequence
  Description of Artificial Sequence: Synthetic peptide
  Seed: LRMKWMMAMKYPITA
LRMKIMMMMMYPVTA

SEQ ID NO: 230017 - protein, 15 aa, Artificial Sequence
  Description of Artificial Sequence: Synthetic peptide
  Seed: LRMKWMMAMKYPITA
LRMKIMMMMNYPATA

SEQ ID NO: 230018 - protein, 15 aa, Artificial Sequence
  Description of Artificial Sequence: Synthetic peptide
  Seed: LRMKWMMAMKYPITA
LRMKIMMMMNYPCTA

SEQ ID NO: 230019 - protein, 15 aa, Artificial Sequence
  Description of Artificial Sequence: Synthetic peptide
  Seed: LRMKWMMAMKYPITA
LRMKIMMMMNYPDTA

SEQ ID NO: 230020 - protein, 15 aa, Artificial Sequence
  Description of Artificial Sequence: Synthetic peptide
  Seed: LRMKWMMAMKYPITA
LRMKIMMMMNYPETA

SEQ ID NO: 230021 - protein, 15 aa, Artificial Sequence
  Description of Artificial Sequence: Synthetic peptide
  Seed: LRMKWMMAMKYPITA
LRMKIMMMMNYPFTA

SEQ ID NO: 230022 - protein, 15 aa, Artificial Sequence
  Description of Artificial Sequence: Synthetic peptide
  Seed: LRMKWMMAMKYPITA
LRMKIMMMMNYPGTA

SEQ ID NO: 230023 - protein, 15 aa, Artificial Sequence
  Description of Artificial Sequence: Synthetic peptide
  Seed: LRMKWMMAMKYPITA
LRMKIMMMMNYPHTA

SEQ ID NO: 230024 - protein, 15 aa, Artificial Sequence
  Description of Artificial Sequence: Synthetic peptide
  Seed: LRMKWMMAMKYPITA
LRMKIMMMMNYPITA

SEQ ID NO: 230025 - protein, 15 aa, Artificial Sequence
  Description of Artificial Sequence: Synthetic peptide
  Seed: LRMKWMMAMKYPITA
LRMKIMMMMNYPKTA

SEQ ID NO: 230026 - protein, 15 aa, Artificial Sequence
  Description of Artificial Sequence: Synthetic peptide
  Seed: LRMKWMMAMKYPITA
LRMKIMMMMNYPLTA

SEQ ID NO: 230027 - protein, 15 aa, Artificial Sequence
  Description of Artificial Sequence: Synthetic peptide
  Seed: LRMKWMMAMKYPITA
LRMKIMMMMNYPMTA

SEQ ID NO: 230028 - protein, 15 aa, Artificial Sequence
  Description of Artificial Sequence: Synthetic peptide
  Seed: LRMKWMMAMKYPITA
LRMKIMMMMNYPNTA

SEQ ID NO: 230029 - protein, 15 aa, Artificial Sequence
  Description of Artificial Sequence: Synthetic peptide
  Seed: LRMKWMMAMKYPITA
LRMKIMMMMNYPPTA

SEQ ID NO: 230030 - protein, 15 aa, Artificial Sequence
  Description of Artificial Sequence: Synthetic peptide
  Seed: LRMKWMMAMKYPITA
LRMKIMMMMNYPQTA

SEQ ID NO: 230031 - protein, 15 aa, Artificial Sequence
  Description of Artificial Sequence: Synthetic peptide
  Seed: LRMKWMMAMKYPITA
LRMKIMMMMNYPRTA

SEQ ID NO: 230032 - protein, 15 aa, Artificial Sequence
  Description of Artificial Sequence: Synthetic peptide
  Seed: LRMKWMMAMKYPITA
LRMKIMMMMNYPSTA

SEQ ID NO: 230033 - protein, 15 aa, Artificial Sequence
  Description of Artificial Sequence: Synthetic peptide
  Seed: LRMKWMMAMKYPITA
LRMKIMMMMNYPTTA

SEQ ID NO: 230034 - protein, 15 aa, Artificial Sequence
  Description of Artificial Sequence: Synthetic peptide
  Seed: LRMKWMMAMKYPITA
LRMKIMMMMNYPVTA

SEQ ID NO: 230035 - protein, 15 aa, Artificial Sequence
  Description of Artificial Sequence: Synthetic peptide
  Seed: LRMKWMMAMKYPITA
LRMKIMMMMNYPYTA

SEQ ID NO: 230036 - protein, 15 aa, Artificial Sequence
  Description of Artificial Sequence: Synthetic peptide
  Seed: LRMKWMMAMKYPITA
LRMKIMMMMPYPATA

SEQ ID NO: 230037 - protein, 15 aa, Artificial Sequence
  Description of Artificial Sequence: Synthetic peptide
  Seed: LRMKWMMAMKYPITA
LRMKIMMMMPYPCTA

SEQ ID NO: 230038 - protein, 15 aa, Artificial Sequence
  Description of Artificial Sequence: Synthetic peptide
  Seed: LRMKWMMAMKYPITA
LRMKIMMMMPYPDTA

SEQ ID NO: 230039 - protein, 15 aa, Artificial Sequence
  Description of Artificial Sequence: Synthetic peptide
  Seed: LRMKWMMAMKYPITA
LRMKIMMMMPYPETA

SEQ ID NO: 230040 - protein, 15 aa, Artificial Sequence
  Description of Artificial Sequence: Synthetic peptide
  Seed: LRMKWMMAMKYPITA
LRMKIMMMMPYPFTA

SEQ ID NO: 230041 - protein, 15 aa, Artificial Sequence
  Description of Artificial Sequence: Synthetic peptide
  Seed: LRMKWMMAMKYPITA
LRMKIMMMMPYPGTA

SEQ ID NO: 230042 - protein, 15 aa, Artificial Sequence
  Description of Artificial Sequence: Synthetic peptide
  Seed: LRMKWMMAMKYPITA
LRMKIMMMMPYPHTA

SEQ ID NO: 230043 - protein, 15 aa, Artificial Sequence
  Description of Artificial Sequence: Synthetic peptide
  Seed: LRMKWMMAMKYPITA
LRMKIMMMMPYPITA

SEQ ID NO: 230044 - protein, 15 aa, Artificial Sequence
  Description of Artificial Sequence: Synthetic peptide
  Seed: LRMKWMMAMKYPITA
LRMKIMMMMPYPKTA

SEQ ID NO: 230045 - protein, 15 aa, Artificial Sequence
  Description of Artificial Sequence: Synthetic peptide
  Seed: LRMKWMMAMKYPITA
LRMKIMMMMPYPLTA

SEQ ID NO: 230046 - protein, 15 aa, Artificial Sequence
  Description of Artificial Sequence: Synthetic peptide
  Seed: LRMKWMMAMKYPITA
LRMKIMMMMPYPMTA

SEQ ID NO: 230047 - protein, 15 aa, Artificial Sequence
  Description of Artificial Sequence: Synthetic peptide
  Seed: LRMKWMMAMKYPITA
LRMKIMMMMPYPNTA

SEQ ID NO: 230048 - protein, 15 aa, Artificial Sequence
  Description of Artificial Sequence: Synthetic peptide
  Seed: LRMKWMMAMKYPITA
LRMKIMMMMPYPPTA

SEQ ID NO: 230049 - protein, 15 aa, Artificial Sequence
  Description of Artificial Sequence: Synthetic peptide
  Seed: LRMKWMMAMKYPITA
LRMKIMMMMPYPQTA

SEQ ID NO: 230050 - protein, 15 aa, Artificial Sequence
  Description of Artificial Sequence: Synthetic peptide
  Seed: LRMKWMMAMKYPITA
LRMKIMMMMPYPRTA

SEQ ID NO: 230051 - protein, 15 aa, Artificial Sequence
  Description of Artificial Sequence: Synthetic peptide
  Seed: LRMKWMMAMKYPITA
LRMKIMMMMPYPSTA

SEQ ID NO: 230052 - protein, 15 aa, Artificial Sequence
  Description of Artificial Sequence: Synthetic peptide
  Seed: LRMKWMMAMKYPITA
LRMKIMMMMPYPTTA

SEQ ID NO: 230053 - protein, 15 aa, Artificial Sequence
  Description of Artificial Sequence: Synthetic peptide
  Seed: LRMKWMMAMKYPITA
LRMKIMMMMPYPVTA

SEQ ID NO: 230054 - protein, 15 aa, Artificial Sequence
  Description of Artificial Sequence: Synthetic peptide
  Seed: LRMKWMMAMKYPITA
LRMKIMMMMPYPWTA

SEQ ID NO: 230055 - protein, 15 aa, Artificial Sequence
  Description of Artificial Sequence: Synthetic peptide
  Seed: LRMKWMMAMKYPITA
LRMKIMMMMPYPYTA

SEQ ID NO: 230056 - protein, 15 aa, Artificial Sequence
  Description of Artificial Sequence: Synthetic peptide
  Seed: LRMKWMMAMKYPITA
LRMKIMMMMQYPATA

SEQ ID NO: 230057 - protein, 15 aa, Artificial Sequence
  Description of Artificial Sequence: Synthetic peptide
  Seed: LRMKWMMAMKYPITA
LRMKIMMMMQYPHTA

SEQ ID NO: 230058 - protein, 15 aa, Artificial Sequence
  Description of Artificial Sequence: Synthetic peptide
  Seed: LRMKWMMAMKYPITA
LRMKIMMMMQYPITA

SEQ ID NO: 230059 - protein, 15 aa, Artificial Sequence
  Description of Artificial Sequence: Synthetic peptide
  Seed: LRMKWMMAMKYPITA
LRMKIMMMMQYPKTA

SEQ ID NO: 230060 - protein, 15 aa, Artificial Sequence
  Description of Artificial Sequence: Synthetic peptide
  Seed: LRMKWMMAMKYPITA
LRMKIMMMMQYPLTA

SEQ ID NO: 230061 - protein, 15 aa, Artificial Sequence
  Description of Artificial Sequence: Synthetic peptide
  Seed: LRMKWMMAMKYPITA
LRMKIMMMMQYPMTA

SEQ ID NO: 230062 - protein, 15 aa, Artificial Sequence
  Description of Artificial Sequence: Synthetic peptide
  Seed: LRMKWMMAMKYPITA
LRMKIMMMMQYPNTA

SEQ ID NO: 230063 - protein, 15 aa, Artificial Sequence
  Description of Artificial Sequence: Synthetic peptide
  Seed: LRMKWMMAMKYPITA
LRMKIMMMMQYPRTA

SEQ ID NO: 230064 - protein, 15 aa, Artificial Sequence
  Description of Artificial Sequence: Synthetic peptide
  Seed: LRMKWMMAMKYPITA
LRMKIMMMMQYPSTA

SEQ ID NO: 230065 - protein, 15 aa, Artificial Sequence
  Description of Artificial Sequence: Synthetic peptide
  Seed: LRMKWMMAMKYPITA
LRMKIMMMMQYPTTA

SEQ ID NO: 230066 - protein, 15 aa, Artificial Sequence
  Description of Artificial Sequence: Synthetic peptide
  Seed: LRMKWMMAMKYPITA
LRMKIMMMMQYPVTA

SEQ ID NO: 230067 - protein, 15 aa, Artificial Sequence
  Description of Artificial Sequence: Synthetic peptide
  Seed: LRMKWMMAMKYPITA
LRMKIMMMMRYPATA

SEQ ID NO: 230068 - protein, 15 aa, Artificial Sequence
  Description of Artificial Sequence: Synthetic peptide
  Seed: LRMKWMMAMKYPITA
LRMKIMMMMRYPCTA

SEQ ID NO: 230069 - protein, 15 aa, Artificial Sequence
  Description of Artificial Sequence: Synthetic peptide
  Seed: LRMKWMMAMKYPITA
LRMKIMMMMRYPDTA

SEQ ID NO: 230070 - protein, 15 aa, Artificial Sequence
  Description of Artificial Sequence: Synthetic peptide
  Seed: LRMKWMMAMKYPITA
LRMKIMMMMRYPETA

SEQ ID NO: 230071 - protein, 15 aa, Artificial Sequence
  Description of Artificial Sequence: Synthetic peptide
  Seed: LRMKWMMAMKYPITA
LRMKIMMMMRYPFTA

SEQ ID NO: 230072 - protein, 15 aa, Artificial Sequence
  Description of Artificial Sequence: Synthetic peptide
  Seed: LRMKWMMAMKYPITA
LRMKIMMMMRYPGTA

SEQ ID NO: 230073 - protein, 15 aa, Artificial Sequence
  Description of Artificial Sequence: Synthetic peptide
  Seed: LRMKWMMAMKYPITA
LRMKIMMMMRYPHTA

SEQ ID NO: 230074 - protein, 15 aa, Artificial Sequence
  Description of Artificial Sequence: Synthetic peptide
  Seed: LRMKWMMAMKYPITA
LRMKIMMMMRYPITA

SEQ ID NO: 230075 - protein, 15 aa, Artificial Sequence
  Description of Artificial Sequence: Synthetic peptide
  Seed: LRMKWMMAMKYPITA
LRMKIMMMMRYPKTA

SEQ ID NO: 230076 - protein, 15 aa, Artificial Sequence
  Description of Artificial Sequence: Synthetic peptide
  Seed: LRMKWMMAMKYPITA
LRMKIMMMMRYPLTA

SEQ ID NO: 230077 - protein, 15 aa, Artificial Sequence
  Description of Artificial Sequence: Synthetic peptide
  Seed: LRMKWMMAMKYPITA
LRMKIMMMMRYPMTA

SEQ ID NO: 230078 - protein, 15 aa, Artificial Sequence
  Description of Artificial Sequence: Synthetic peptide
  Seed: LRMKWMMAMKYPITA
LRMKIMMMMRYPNTA

SEQ ID NO: 230079 - protein, 15 aa, Artificial Sequence
  Description of Artificial Sequence: Synthetic peptide
  Seed: LRMKWMMAMKYPITA
LRMKIMMMMRYPPTA

SEQ ID NO: 230080 - protein, 15 aa, Artificial Sequence
  Description of Artificial Sequence: Synthetic peptide
  Seed: LRMKWMMAMKYPITA
LRMKIMMMMRYPQTA

SEQ ID NO: 230081 - protein, 15 aa, Artificial Sequence
  Description of Artificial Sequence: Synthetic peptide
  Seed: LRMKWMMAMKYPITA
LRMKIMMMMRYPRTA

SEQ ID NO: 230082 - protein, 15 aa, Artificial Sequence
  Description of Artificial Sequence: Synthetic peptide
  Seed: LRMKWMMAMKYPITA
LRMKIMMMMRYPSTA

SEQ ID NO: 230083 - protein, 15 aa, Artificial Sequence
  Description of Artificial Sequence: Synthetic peptide
  Seed: LRMKWMMAMKYPITA
LRMKIMMMMRYPTTA

SEQ ID NO: 230084 - protein, 15 aa, Artificial Sequence
  Description of Artificial Sequence: Synthetic peptide
  Seed: LRMKWMMAMKYPITA
LRMKIMMMMRYPVTA

SEQ ID NO: 230085 - protein, 15 aa, Artificial Sequence
  Description of Artificial Sequence: Synthetic peptide
  Seed: LRMKWMMAMKYPITA
LRMKIMMMMRYPWTA

SEQ ID NO: 230086 - protein, 15 aa, Artificial Sequence
  Description of Artificial Sequence: Synthetic peptide
  Seed: LRMKWMMAMKYPITA
LRMKIMMMMRYPYTA

SEQ ID NO: 230087 - protein, 15 aa, Artificial Sequence
  Description of Artificial Sequence: Synthetic peptide
  Seed: LRMKWMMAMKYPITA
LRMKIMMMMSYPATA

SEQ ID NO: 230088 - protein, 15 aa, Artificial Sequence
  Description of Artificial Sequence: Synthetic peptide
  Seed: LRMKWMMAMKYPITA
LRMKIMMMMSYPCTA

SEQ ID NO: 230089 - protein, 15 aa, Artificial Sequence
  Description of Artificial Sequence: Synthetic peptide
  Seed: LRMKWMMAMKYPITA
LRMKIMMMMSYPDTA

SEQ ID NO: 230090 - protein, 15 aa, Artificial Sequence
  Description of Artificial Sequence: Synthetic peptide
  Seed: LRMKWMMAMKYPITA
LRMKIMMMMSYPETA

SEQ ID NO: 230091 - protein, 15 aa, Artificial Sequence
  Description of Artificial Sequence: Synthetic peptide
  Seed: LRMKWMMAMKYPITA
LRMKIMMMMSYPFTA

SEQ ID NO: 230092 - protein, 15 aa, Artificial Sequence
  Description of Artificial Sequence: Synthetic peptide
  Seed: LRMKWMMAMKYPITA
LRMKIMMMMSYPGTA

SEQ ID NO: 230093 - protein, 15 aa, Artificial Sequence
  Description of Artificial Sequence: Synthetic peptide
  Seed: LRMKWMMAMKYPITA
LRMKIMMMMSYPHTA

SEQ ID NO: 230094 - protein, 15 aa, Artificial Sequence
  Description of Artificial Sequence: Synthetic peptide
  Seed: LRMKWMMAMKYPITA
LRMKIMMMMSYPITA

SEQ ID NO: 230095 - protein, 15 aa, Artificial Sequence
  Description of Artificial Sequence: Synthetic peptide
  Seed: LRMKWMMAMKYPITA
LRMKIMMMMSYPKTA

SEQ ID NO: 230096 - protein, 15 aa, Artificial Sequence
  Description of Artificial Sequence: Synthetic peptide
  Seed: LRMKWMMAMKYPITA
LRMKIMMMMSYPLTA

SEQ ID NO: 230097 - protein, 15 aa, Artificial Sequence
  Description of Artificial Sequence: Synthetic peptide
  Seed: LRMKWMMAMKYPITA
LRMKIMMMMSYPMTA

SEQ ID NO: 230098 - protein, 15 aa, Artificial Sequence
  Description of Artificial Sequence: Synthetic peptide
  Seed: LRMKWMMAMKYPITA
LRMKIMMMMSYPNTA

SEQ ID NO: 230099 - protein, 15 aa, Artificial Sequence
  Description of Artificial Sequence: Synthetic peptide
  Seed: LRMKWMMAMKYPITA
LRMKIMMMMSYPPTA

SEQ ID NO: 230100 - protein, 15 aa, Artificial Sequence
  Description of Artificial Sequence: Synthetic peptide
  Seed: LRMKWMMAMKYPITA
LRMKIMMMMSYPQTA

SEQ ID NO: 230101 - protein, 15 aa, Artificial Sequence
  Description of Artificial Sequence: Synthetic peptide
  Seed: LRMKWMMAMKYPITA
LRMKIMMMMSYPRTA

SEQ ID NO: 230102 - protein, 15 aa, Artificial Sequence
  Description of Artificial Sequence: Synthetic peptide
  Seed: LRMKWMMAMKYPITA
LRMKIMMMMSYPSTA

SEQ ID NO: 230103 - protein, 15 aa, Artificial Sequence
  Description of Artificial Sequence: Synthetic peptide
  Seed: LRMKWMMAMKYPITA
LRMKIMMMMSYPTTA

SEQ ID NO: 230104 - protein, 15 aa, Artificial Sequence
  Description of Artificial Sequence: Synthetic peptide
  Seed: LRMKWMMAMKYPITA
LRMKIMMMMSYPVTA

SEQ ID NO: 230105 - protein, 15 aa, Artificial Sequence
  Description of Artificial Sequence: Synthetic peptide
  Seed: LRMKWMMAMKYPITA
LRMKIMMMMSYPWTA

SEQ ID NO: 230106 - protein, 15 aa, Artificial Sequence
  Description of Artificial Sequence: Synthetic peptide
  Seed: LRMKWMMAMKYPITA
LRMKIMMMMSYPYTA

SEQ ID NO: 230107 - protein, 15 aa, Artificial Sequence
  Description of Artificial Sequence: Synthetic peptide
  Seed: LRMKWMMAMKYPITA
LRMKIMMMMTYPATA

SEQ ID NO: 230108 - protein, 15 aa, Artificial Sequence
  Description of Artificial Sequence: Synthetic peptide
  Seed: LRMKWMMAMKYPITA
LRMKIMMMMTYPCTA

SEQ ID NO: 230109 - protein, 15 aa, Artificial Sequence
  Description of Artificial Sequence: Synthetic peptide
  Seed: LRMKWMMAMKYPITA
LRMKIMMMMTYPDTA

SEQ ID NO: 230110 - protein, 15 aa, Artificial Sequence
  Description of Artificial Sequence: Synthetic peptide
  Seed: LRMKWMMAMKYPITA
LRMKIMMMMTYPETA

SEQ ID NO: 230111 - protein, 15 aa, Artificial Sequence
  Description of Artificial Sequence: Synthetic peptide
  Seed: LRMKWMMAMKYPITA
LRMKIMMMMTYPFTA

SEQ ID NO: 230112 - protein, 15 aa, Artificial Sequence
  Description of Artificial Sequence: Synthetic peptide
  Seed: LRMKWMMAMKYPITA
LRMKIMMMMTYPGTA

SEQ ID NO: 230113 - protein, 15 aa, Artificial Sequence
  Description of Artificial Sequence: Synthetic peptide
  Seed: LRMKWMMAMKYPITA
LRMKIMMMMTYPHTA

SEQ ID NO: 230114 - protein, 15 aa, Artificial Sequence
  Description of Artificial Sequence: Synthetic peptide
  Seed: LRMKWMMAMKYPITA
LRMKIMMMMTYPITA

SEQ ID NO: 230115 - protein, 15 aa, Artificial Sequence
  Description of Artificial Sequence: Synthetic peptide
  Seed: LRMKWMMAMKYPITA
LRMKIMMMMTYPKTA

SEQ ID NO: 230116 - protein, 15 aa, Artificial Sequence
  Description of Artificial Sequence: Synthetic peptide
  Seed: LRMKWMMAMKYPITA
LRMKIMMMMTYPLTA

SEQ ID NO: 230117 - protein, 15 aa, Artificial Sequence
  Description of Artificial Sequence: Synthetic peptide
  Seed: LRMKWMMAMKYPITA
LRMKIMMMMTYPMTA

SEQ ID NO: 230118 - protein, 15 aa, Artificial Sequence
  Description of Artificial Sequence: Synthetic peptide
  Seed: LRMKWMMAMKYPITA
LRMKIMMMMTYPNTA

SEQ ID NO: 230119 - protein, 15 aa, Artificial Sequence
  Description of Artificial Sequence: Synthetic peptide
  Seed: LRMKWMMAMKYPITA
LRMKIMMMMTYPPTA

SEQ ID NO: 230120 - protein, 15 aa, Artificial Sequence
  Description of Artificial Sequence: Synthetic peptide
  Seed: LRMKWMMAMKYPITA
LRMKIMMMMTYPQTA

SEQ ID NO: 230121 - protein, 15 aa, Artificial Sequence
  Description of Artificial Sequence: Synthetic peptide
  Seed: LRMKWMMAMKYPITA
LRMKIMMMMTYPRTA

SEQ ID NO: 230122 - protein, 15 aa, Artificial Sequence
  Description of Artificial Sequence: Synthetic peptide
  Seed: LRMKWMMAMKYPITA
LRMKIMMMMTYPSTA

SEQ ID NO: 230123 - protein, 15 aa, Artificial Sequence
  Description of Artificial Sequence: Synthetic peptide
  Seed: LRMKWMMAMKYPITA
LRMKIMMMMTYPTTA

SEQ ID NO: 230124 - protein, 15 aa, Artificial Sequence
  Description of Artificial Sequence: Synthetic peptide
  Seed: LRMKWMMAMKYPITA
LRMKIMMMMTYPVTA

SEQ ID NO: 230125 - protein, 15 aa, Artificial Sequence
  Description of Artificial Sequence: Synthetic peptide
  Seed: LRMKWMMAMKYPITA
LRMKIMMMMTYPYTA

SEQ ID NO: 230126 - protein, 15 aa, Artificial Sequence
  Description of Artificial Sequence: Synthetic peptide
  Seed: LRMKWMMAMKYPITA
LRMKIMMMMVYPATA

SEQ ID NO: 230127 - protein, 15 aa, Artificial Sequence
  Description of Artificial Sequence: Synthetic peptide
  Seed: LRMKWMMAMKYPITA
LRMKIMMMMVYPCTA

SEQ ID NO: 230128 - protein, 15 aa, Artificial Sequence
  Description of Artificial Sequence: Synthetic peptide
  Seed: LRMKWMMAMKYPITA
LRMKIMMMMVYPDTA

SEQ ID NO: 230129 - protein, 15 aa, Artificial Sequence
  Description of Artificial Sequence: Synthetic peptide
  Seed: LRMKWMMAMKYPITA
LRMKIMMMMVYPETA

SEQ ID NO: 230130 - protein, 15 aa, Artificial Sequence
  Description of Artificial Sequence: Synthetic peptide
  Seed: LRMKWMMAMKYPITA
LRMKIMMMMVYPFTA

SEQ ID NO: 230131 - protein, 15 aa, Artificial Sequence
  Description of Artificial Sequence: Synthetic peptide
  Seed: LRMKWMMAMKYPITA
LRMKIMMMMVYPGTA

SEQ ID NO: 230132 - protein, 15 aa, Artificial Sequence
  Description of Artificial Sequence: Synthetic peptide
  Seed: LRMKWMMAMKYPITA
LRMKIMMMMVYPHTA

SEQ ID NO: 230133 - protein, 15 aa, Artificial Sequence
  Description of Artificial Sequence: Synthetic peptide
  Seed: LRMKWMMAMKYPITA
LRMKIMMMMVYPITA

SEQ ID NO: 230134 - protein, 15 aa, Artificial Sequence
  Description of Artificial Sequence: Synthetic peptide
  Seed: LRMKWMMAMKYPITA
LRMKIMMMMVYPKTA

SEQ ID NO: 230135 - protein, 15 aa, Artificial Sequence
  Description of Artificial Sequence: Synthetic peptide
  Seed: LRMKWMMAMKYPITA
LRMKIMMMMVYPLTA

SEQ ID NO: 230136 - protein, 15 aa, Artificial Sequence
  Description of Artificial Sequence: Synthetic peptide
  Seed: LRMKWMMAMKYPITA
LRMKIMMMMVYPMTA

SEQ ID NO: 230137 - protein, 15 aa, Artificial Sequence
  Description of Artificial Sequence: Synthetic peptide
  Seed: LRMKWMMAMKYPITA
LRMKIMMMMVYPNTA

SEQ ID NO: 230138 - protein, 15 aa, Artificial Sequence
  Description of Artificial Sequence: Synthetic peptide
  Seed: LRMKWMMAMKYPITA
LRMKIMMMMVYPPTA

SEQ ID NO: 230139 - protein, 15 aa, Artificial Sequence
  Description of Artificial Sequence: Synthetic peptide
  Seed: LRMKWMMAMKYPITA
LRMKIMMMMVYPQTA

SEQ ID NO: 230140 - protein, 15 aa, Artificial Sequence
  Description of Artificial Sequence: Synthetic peptide
  Seed: LRMKWMMAMKYPITA
LRMKIMMMMVYPRTA

SEQ ID NO: 230141 - protein, 15 aa, Artificial Sequence
  Description of Artificial Sequence: Synthetic peptide
  Seed: LRMKWMMAMKYPITA
LRMKIMMMMVYPSTA

SEQ ID NO: 230142 - protein, 15 aa, Artificial Sequence
  Description of Artificial Sequence: Synthetic peptide
  Seed: LRMKWMMAMKYPITA
LRMKIMMMMVYPTTA

SEQ ID NO: 230143 - protein, 15 aa, Artificial Sequence
  Description of Artificial Sequence: Synthetic peptide
  Seed: LRMKWMMAMKYPITA
LRMKIMMMMVYPVTA

SEQ ID NO: 230144 - protein, 15 aa, Artificial Sequence
  Description of Artificial Sequence: Synthetic peptide
  Seed: LRMKWMMAMKYPITA
LRMKIMMMMVYPYTA

SEQ ID NO: 230145 - protein, 15 aa, Artificial Sequence
  Description of Artificial Sequence: Synthetic peptide
  Seed: LRMKWMMAMKYPITA
LRMKIMMMMYYPATA

SEQ ID NO: 230146 - protein, 15 aa, Artificial Sequence
  Description of Artificial Sequence: Synthetic peptide
  Seed: LRMKWMMAMKYPITA
LRMKIMMMMYYPITA

SEQ ID NO: 230147 - protein, 15 aa, Artificial Sequence
  Description of Artificial Sequence: Synthetic peptide
  Seed: LRMKWMMAMKYPITA
LRMKIMMMMYYPLTA

SEQ ID NO: 230148 - protein, 15 aa, Artificial Sequence
  Description of Artificial Sequence: Synthetic peptide
  Seed: LRMKWMMAMKYPITA
LRMKIMMMMYYPVTA

SEQ ID NO: 230149 - protein, 15 aa, Artificial Sequence
  Description of Artificial Sequence: Synthetic peptide
  Seed: LRMKWMMAMKYPITA
LRMKIMMNMAYPATA

SEQ ID NO: 230150 - protein, 15 aa, Artificial Sequence
  Description of Artificial Sequence: Synthetic peptide
  Seed: LRMKWMMAMKYPITA
LRMKIMMNMAYPCTA

SEQ ID NO: 230151 - protein, 15 aa, Artificial Sequence
  Description of Artificial Sequence: Synthetic peptide
  Seed: LRMKWMMAMKYPITA
LRMKIMMNMAYPDTA

SEQ ID NO: 230152 - protein, 15 aa, Artificial Sequence
  Description of Artificial Sequence: Synthetic peptide
  Seed: LRMKWMMAMKYPITA
LRMKIMMNMAYPETA

SEQ ID NO: 230153 - protein, 15 aa, Artificial Sequence
  Description of Artificial Sequence: Synthetic peptide
  Seed: LRMKWMMAMKYPITA
LRMKIMMNMAYPGTA

SEQ ID NO: 230154 - protein, 15 aa, Artificial Sequence
  Description of Artificial Sequence: Synthetic peptide
  Seed: LRMKWMMAMKYPITA
LRMKIMMNMAYPHTA

SEQ ID NO: 230155 - protein, 15 aa, Artificial Sequence
  Description of Artificial Sequence: Synthetic peptide
  Seed: LRMKWMMAMKYPITA
LRMKIMMNMAYPITA

SEQ ID NO: 230156 - protein, 15 aa, Artificial Sequence
  Description of Artificial Sequence: Synthetic peptide
  Seed: LRMKWMMAMKYPITA
LRMKIMMNMAYPKTA

SEQ ID NO: 230157 - protein, 15 aa, Artificial Sequence
  Description of Artificial Sequence: Synthetic peptide
  Seed: LRMKWMMAMKYPITA
LRMKIMMNMAYPLTA

SEQ ID NO: 230158 - protein, 15 aa, Artificial Sequence
  Description of Artificial Sequence: Synthetic peptide
  Seed: LRMKWMMAMKYPITA
LRMKIMMNMAYPMTA

SEQ ID NO: 230159 - protein, 15 aa, Artificial Sequence
  Description of Artificial Sequence: Synthetic peptide
  Seed: LRMKWMMAMKYPITA
LRMKIMMNMAYPNTA

SEQ ID NO: 230160 - protein, 15 aa, Artificial Sequence
  Description of Artificial Sequence: Synthetic peptide
  Seed: LRMKWMMAMKYPITA
LRMKIMMNMAYPPTA

SEQ ID NO: 230161 - protein, 15 aa, Artificial Sequence
  Description of Artificial Sequence: Synthetic peptide
  Seed: LRMKWMMAMKYPITA
LRMKIMMNMAYPQTA

SEQ ID NO: 230162 - protein, 15 aa, Artificial Sequence
  Description of Artificial Sequence: Synthetic peptide
  Seed: LRMKWMMAMKYPITA
LRMKIMMNMAYPRTA

SEQ ID NO: 230163 - protein, 15 aa, Artificial Sequence
  Description of Artificial Sequence: Synthetic peptide
  Seed: LRMKWMMAMKYPITA
LRMKIMMNMAYPSTA

SEQ ID NO: 230164 - protein, 15 aa, Artificial Sequence
  Description of Artificial Sequence: Synthetic peptide
  Seed: LRMKWMMAMKYPITA
LRMKIMMNMAYPTTA

SEQ ID NO: 230165 - protein, 15 aa, Artificial Sequence
  Description of Artificial Sequence: Synthetic peptide
  Seed: LRMKWMMAMKYPITA
LRMKIMMNMAYPVTA

SEQ ID NO: 230166 - protein, 15 aa, Artificial Sequence
  Description of Artificial Sequence: Synthetic peptide
  Seed: LRMKWMMAMKYPITA
LRMKIMMNMAYPWTA

SEQ ID NO: 230167 - protein, 15 aa, Artificial Sequence
  Description of Artificial Sequence: Synthetic peptide
  Seed: LRMKWMMAMKYPITA
LRMKIMMNMAYPYTA

SEQ ID NO: 230168 - protein, 15 aa, Artificial Sequence
  Description of Artificial Sequence: Synthetic peptide
  Seed: LRMKWMMAMKYPITA
LRMKIMMNMCYPATA

SEQ ID NO: 230169 - protein, 15 aa, Artificial Sequence
  Description of Artificial Sequence: Synthetic peptide
  Seed: LRMKWMMAMKYPITA
LRMKIMMNMCYPFTA

SEQ ID NO: 230170 - protein, 15 aa, Artificial Sequence
  Description of Artificial Sequence: Synthetic peptide
  Seed: LRMKWMMAMKYPITA
LRMKIMMNMCYPITA

SEQ ID NO: 230171 - protein, 15 aa, Artificial Sequence
  Description of Artificial Sequence: Synthetic peptide
  Seed: LRMKWMMAMKYPITA
LRMKIMMNMCYPLTA

SEQ ID NO: 230172 - protein, 15 aa, Artificial Sequence
  Description of Artificial Sequence: Synthetic peptide
  Seed: LRMKWMMAMKYPITA
LRMKIMMNMCYPMTA

SEQ ID NO: 230173 - protein, 15 aa, Artificial Sequence
  Description of Artificial Sequence: Synthetic peptide
  Seed: LRMKWMMAMKYPITA
LRMKIMMNMCYPRTA

SEQ ID NO: 230174 - protein, 15 aa, Artificial Sequence
  Description of Artificial Sequence: Synthetic peptide
  Seed: LRMKWMMAMKYPITA
LRMKIMMNMCYPSTA

SEQ ID NO: 230175 - protein, 15 aa, Artificial Sequence
  Description of Artificial Sequence: Synthetic peptide
  Seed: LRMKWMMAMKYPITA
LRMKIMMNMCYPTTA

SEQ ID NO: 230176 - protein, 15 aa, Artificial Sequence
  Description of Artificial Sequence: Synthetic peptide
  Seed: LRMKWMMAMKYPITA
LRMKIMMNMCYPVTA

SEQ ID NO: 230177 - protein, 15 aa, Artificial Sequence
  Description of Artificial Sequence: Synthetic peptide
  Seed: LRMKWMMAMKYPITA
LRMKIMMNMCYPYTA

SEQ ID NO: 230178 - protein, 15 aa, Artificial Sequence
  Description of Artificial Sequence: Synthetic peptide
  Seed: LRMKWMMAMKYPITA
LRMKIMMNMDYPATA

SEQ ID NO: 230179 - protein, 15 aa, Artificial Sequence
  Description of Artificial Sequence: Synthetic peptide
  Seed: LRMKWMMAMKYPITA
LRMKIMMNMDYPFTA

SEQ ID NO: 230180 - protein, 15 aa, Artificial Sequence
  Description of Artificial Sequence: Synthetic peptide
  Seed: LRMKWMMAMKYPITA
LRMKIMMNMDYPITA

SEQ ID NO: 230181 - protein, 15 aa, Artificial Sequence
  Description of Artificial Sequence: Synthetic peptide
  Seed: LRMKWMMAMKYPITA
LRMKIMMNMDYPLTA

SEQ ID NO: 230182 - protein, 15 aa, Artificial Sequence
  Description of Artificial Sequence: Synthetic peptide
  Seed: LRMKWMMAMKYPITA
LRMKIMMNMDYPMTA

SEQ ID NO: 230183 - protein, 15 aa, Artificial Sequence
  Description of Artificial Sequence: Synthetic peptide
  Seed: LRMKWMMAMKYPITA
LRMKIMMNMDYPSTA

SEQ ID NO: 230184 - protein, 15 aa, Artificial Sequence
  Description of Artificial Sequence: Synthetic peptide
  Seed: LRMKWMMAMKYPITA
LRMKIMMNMDYPTTA

SEQ ID NO: 230185 - protein, 15 aa, Artificial Sequence
  Description of Artificial Sequence: Synthetic peptide
  Seed: LRMKWMMAMKYPITA
LRMKIMMNMDYPVTA

SEQ ID NO: 230186 - protein, 15 aa, Artificial Sequence
  Description of Artificial Sequence: Synthetic peptide
  Seed: LRMKWMMAMKYPITA
LRMKIMMNMDYPWTA

SEQ ID NO: 230187 - protein, 15 aa, Artificial Sequence
  Description of Artificial Sequence: Synthetic peptide
  Seed: LRMKWMMAMKYPITA
LRMKIMMNMDYPYTA

SEQ ID NO: 230188 - protein, 15 aa, Artificial Sequence
  Description of Artificial Sequence: Synthetic peptide
  Seed: LRMKWMMAMKYPITA
LRMKIMMNMEYPATA

SEQ ID NO: 230189 - protein, 15 aa, Artificial Sequence
  Description of Artificial Sequence: Synthetic peptide
  Seed: LRMKWMMAMKYPITA
LRMKIMMNMEYPFTA

SEQ ID NO: 230190 - protein, 15 aa, Artificial Sequence
  Description of Artificial Sequence: Synthetic peptide
  Seed: LRMKWMMAMKYPITA
LRMKIMMNMEYPITA

SEQ ID NO: 230191 - protein, 15 aa, Artificial Sequence
  Description of Artificial Sequence: Synthetic peptide
  Seed: LRMKWMMAMKYPITA
LRMKIMMNMEYPLTA

SEQ ID NO: 230192 - protein, 15 aa, Artificial Sequence
  Description of Artificial Sequence: Synthetic peptide
  Seed: LRMKWMMAMKYPITA
LRMKIMMNMEYPMTA

SEQ ID NO: 230193 - protein, 15 aa, Artificial Sequence
  Description of Artificial Sequence: Synthetic peptide
  Seed: LRMKWMMAMKYPITA
LRMKIMMNMEYPTTA

SEQ ID NO: 230194 - protein, 15 aa, Artificial Sequence
  Description of Artificial Sequence: Synthetic peptide
  Seed: LRMKWMMAMKYPITA
LRMKIMMNMEYPVTA

SEQ ID NO: 230195 - protein, 15 aa, Artificial Sequence
  Description of Artificial Sequence: Synthetic peptide
  Seed: LRMKWMMAMKYPITA
LRMKIMMNMEYPYTA

SEQ ID NO: 230196 - protein, 15 aa, Artificial Sequence
  Description of Artificial Sequence: Synthetic peptide
  Seed: LRMKWMMAMKYPITA
LRMKIMMNMFYPATA

SEQ ID NO: 230197 - protein, 15 aa, Artificial Sequence
  Description of Artificial Sequence: Synthetic peptide
  Seed: LRMKWMMAMKYPITA
LRMKIMMNMFYPFTA

SEQ ID NO: 230198 - protein, 15 aa, Artificial Sequence
  Description of Artificial Sequence: Synthetic peptide
  Seed: LRMKWMMAMKYPITA
LRMKIMMNMFYPITA

SEQ ID NO: 230199 - protein, 15 aa, Artificial Sequence
  Description of Artificial Sequence: Synthetic peptide
  Seed: LRMKWMMAMKYPITA
LRMKIMMNMFYPLTA

SEQ ID NO: 230200 - protein, 15 aa, Artificial Sequence
  Description of Artificial Sequence: Synthetic peptide
  Seed: LRMKWMMAMKYPITA
LRMKIMMNMFYPMTA

SEQ ID NO: 230201 - protein, 15 aa, Artificial Sequence
  Description of Artificial Sequence: Synthetic peptide
  Seed: LRMKWMMAMKYPITA
LRMKIMMNMFYPNTA

SEQ ID NO: 230202 - protein, 15 aa, Artificial Sequence
  Description of Artificial Sequence: Synthetic peptide
  Seed: LRMKWMMAMKYPITA
LRMKIMMNMFYPSTA

SEQ ID NO: 230203 - protein, 15 aa, Artificial Sequence
  Description of Artificial Sequence: Synthetic peptide
  Seed: LRMKWMMAMKYPITA
LRMKIMMNMFYPTTA

SEQ ID NO: 230204 - protein, 15 aa, Artificial Sequence
  Description of Artificial Sequence: Synthetic peptide
  Seed: LRMKWMMAMKYPITA
LRMKIMMNMFYPVTA

SEQ ID NO: 230205 - protein, 15 aa, Artificial Sequence
  Description of Artificial Sequence: Synthetic peptide
  Seed: LRMKWMMAMKYPITA
LRMKIMMNMFYPYTA

SEQ ID NO: 230206 - protein, 15 aa, Artificial Sequence
  Description of Artificial Sequence: Synthetic peptide
  Seed: LRMKWMMAMKYPITA
LRMKIMMNMGYPATA

SEQ ID NO: 230207 - protein, 15 aa, Artificial Sequence
  Description of Artificial Sequence: Synthetic peptide
  Seed: LRMKWMMAMKYPITA
LRMKIMMNMGYPCTA

SEQ ID NO: 230208 - protein, 15 aa, Artificial Sequence
  Description of Artificial Sequence: Synthetic peptide
  Seed: LRMKWMMAMKYPITA
LRMKIMMNMGYPDTA

SEQ ID NO: 230209 - protein, 15 aa, Artificial Sequence
  Description of Artificial Sequence: Synthetic peptide
  Seed: LRMKWMMAMKYPITA
LRMKIMMNMGYPETA

SEQ ID NO: 230210 - protein, 15 aa, Artificial Sequence
  Description of Artificial Sequence: Synthetic peptide
  Seed: LRMKWMMAMKYPITA
LRMKIMMNMGYPFTA

SEQ ID NO: 230211 - protein, 15 aa, Artificial Sequence
  Description of Artificial Sequence: Synthetic peptide
  Seed: LRMKWMMAMKYPITA
LRMKIMMNMGYPGTA

SEQ ID NO: 230212 - protein, 15 aa, Artificial Sequence
  Description of Artificial Sequence: Synthetic peptide
  Seed: LRMKWMMAMKYPITA
LRMKIMMNMGYPHTA

SEQ ID NO: 230213 - protein, 15 aa, Artificial Sequence
  Description of Artificial Sequence: Synthetic peptide
  Seed: LRMKWMMAMKYPITA
LRMKIMMNMGYPITA

SEQ ID NO: 230214 - protein, 15 aa, Artificial Sequence
  Description of Artificial Sequence: Synthetic peptide
  Seed: LRMKWMMAMKYPITA
LRMKIMMNMGYPKTA

SEQ ID NO: 230215 - protein, 15 aa, Artificial Sequence
  Description of Artificial Sequence: Synthetic peptide
  Seed: LRMKWMMAMKYPITA
LRMKIMMNMGYPLTA

SEQ ID NO: 230216 - protein, 15 aa, Artificial Sequence
  Description of Artificial Sequence: Synthetic peptide
  Seed: LRMKWMMAMKYPITA
LRMKIMMNMGYPMTA

SEQ ID NO: 230217 - protein, 15 aa, Artificial Sequence
  Description of Artificial Sequence: Synthetic peptide
  Seed: LRMKWMMAMKYPITA
LRMKIMMNMGYPNTA

SEQ ID NO: 230218 - protein, 15 aa, Artificial Sequence
  Description of Artificial Sequence: Synthetic peptide
  Seed: LRMKWMMAMKYPITA
LRMKIMMNMGYPPTA

SEQ ID NO: 230219 - protein, 15 aa, Artificial Sequence
  Description of Artificial Sequence: Synthetic peptide
  Seed: LRMKWMMAMKYPITA
LRMKIMMNMGYPQTA

SEQ ID NO: 230220 - protein, 15 aa, Artificial Sequence
  Description of Artificial Sequence: Synthetic peptide
  Seed: LRMKWMMAMKYPITA
LRMKIMMNMGYPRTA

SEQ ID NO: 230221 - protein, 15 aa, Artificial Sequence
  Description of Artificial Sequence: Synthetic peptide
  Seed: LRMKWMMAMKYPITA
LRMKIMMNMGYPSTA

SEQ ID NO: 230222 - protein, 15 aa, Artificial Sequence
  Description of Artificial Sequence: Synthetic peptide
  Seed: LRMKWMMAMKYPITA
LRMKIMMNMGYPTTA

SEQ ID NO: 230223 - protein, 15 aa, Artificial Sequence
  Description of Artificial Sequence: Synthetic peptide
  Seed: LRMKWMMAMKYPITA
LRMKIMMNMGYPVTA

SEQ ID NO: 230224 - protein, 15 aa, Artificial Sequence
  Description of Artificial Sequence: Synthetic peptide
  Seed: LRMKWMMAMKYPITA
LRMKIMMNMGYPWTA

SEQ ID NO: 230225 - protein, 15 aa, Artificial Sequence
  Description of Artificial Sequence: Synthetic peptide
  Seed: LRMKWMMAMKYPITA
LRMKIMMNMGYPYTA

SEQ ID NO: 230226 - protein, 15 aa, Artificial Sequence
  Description of Artificial Sequence: Synthetic peptide
  Seed: LRMKWMMAMKYPITA
LRMKIMMNMHYPATA

SEQ ID NO: 230227 - protein, 15 aa, Artificial Sequence
  Description of Artificial Sequence: Synthetic peptide
  Seed: LRMKWMMAMKYPITA
LRMKIMMNMHYPCTA

SEQ ID NO: 230228 - protein, 15 aa, Artificial Sequence
  Description of Artificial Sequence: Synthetic peptide
  Seed: LRMKWMMAMKYPITA
LRMKIMMNMHYPFTA

SEQ ID NO: 230229 - protein, 15 aa, Artificial Sequence
  Description of Artificial Sequence: Synthetic peptide
  Seed: LRMKWMMAMKYPITA
LRMKIMMNMHYPGTA

SEQ ID NO: 230230 - protein, 15 aa, Artificial Sequence
  Description of Artificial Sequence: Synthetic peptide
  Seed: LRMKWMMAMKYPITA
LRMKIMMNMHYPHTA

SEQ ID NO: 230231 - protein, 15 aa, Artificial Sequence
  Description of Artificial Sequence: Synthetic peptide
  Seed: LRMKWMMAMKYPITA
LRMKIMMNMHYPITA

SEQ ID NO: 230232 - protein, 15 aa, Artificial Sequence
  Description of Artificial Sequence: Synthetic peptide
  Seed: LRMKWMMAMKYPITA
LRMKIMMNMHYPKTA

SEQ ID NO: 230233 - protein, 15 aa, Artificial Sequence
  Description of Artificial Sequence: Synthetic peptide
  Seed: LRMKWMMAMKYPITA
LRMKIMMNMHYPLTA

SEQ ID NO: 230234 - protein, 15 aa, Artificial Sequence
  Description of Artificial Sequence: Synthetic peptide
  Seed: LRMKWMMAMKYPITA
LRMKIMMNMHYPMTA

SEQ ID NO: 230235 - protein, 15 aa, Artificial Sequence
  Description of Artificial Sequence: Synthetic peptide
  Seed: LRMKWMMAMKYPITA
LRMKIMMNMHYPNTA

SEQ ID NO: 230236 - protein, 15 aa, Artificial Sequence
  Description of Artificial Sequence: Synthetic peptide
  Seed: LRMKWMMAMKYPITA
LRMKIMMNMHYPQTA

SEQ ID NO: 230237 - protein, 15 aa, Artificial Sequence
  Description of Artificial Sequence: Synthetic peptide
  Seed: LRMKWMMAMKYPITA
LRMKIMMNMHYPRTA

SEQ ID NO: 230238 - protein, 15 aa, Artificial Sequence
  Description of Artificial Sequence: Synthetic peptide
  Seed: LRMKWMMAMKYPITA
LRMKIMMNMHYPSTA

SEQ ID NO: 230239 - protein, 15 aa, Artificial Sequence
  Description of Artificial Sequence: Synthetic peptide
  Seed: LRMKWMMAMKYPITA
LRMKIMMNMHYPTTA

SEQ ID NO: 230240 - protein, 15 aa, Artificial Sequence
  Description of Artificial Sequence: Synthetic peptide
  Seed: LRMKWMMAMKYPITA
LRMKIMMNMHYPVTA

SEQ ID NO: 230241 - protein, 15 aa, Artificial Sequence
  Description of Artificial Sequence: Synthetic peptide
  Seed: LRMKWMMAMKYPITA
LRMKIMMNMHYPWTA

SEQ ID NO: 230242 - protein, 15 aa, Artificial Sequence
  Description of Artificial Sequence: Synthetic peptide
  Seed: LRMKWMMAMKYPITA
LRMKIMMNMHYPYTA

SEQ ID NO: 230243 - protein, 15 aa, Artificial Sequence
  Description of Artificial Sequence: Synthetic peptide
  Seed: LRMKWMMAMKYPITA
LRMKIMMNMIYPATA

SEQ ID NO: 230244 - protein, 15 aa, Artificial Sequence
  Description of Artificial Sequence: Synthetic peptide
  Seed: LRMKWMMAMKYPITA
LRMKIMMNMIYPCTA

SEQ ID NO: 230245 - protein, 15 aa, Artificial Sequence
  Description of Artificial Sequence: Synthetic peptide
  Seed: LRMKWMMAMKYPITA
LRMKIMMNMIYPDTA

SEQ ID NO: 230246 - protein, 15 aa, Artificial Sequence
  Description of Artificial Sequence: Synthetic peptide
  Seed: LRMKWMMAMKYPITA
LRMKIMMNMIYPETA

SEQ ID NO: 230247 - protein, 15 aa, Artificial Sequence
  Description of Artificial Sequence: Synthetic peptide
  Seed: LRMKWMMAMKYPITA
LRMKIMMNMIYPFTA

SEQ ID NO: 230248 - protein, 15 aa, Artificial Sequence
  Description of Artificial Sequence: Synthetic peptide
  Seed: LRMKWMMAMKYPITA
LRMKIMMNMIYPGTA

SEQ ID NO: 230249 - protein, 15 aa, Artificial Sequence
  Description of Artificial Sequence: Synthetic peptide
  Seed: LRMKWMMAMKYPITA
LRMKIMMNMIYPHTA

SEQ ID NO: 230250 - protein, 15 aa, Artificial Sequence
  Description of Artificial Sequence: Synthetic peptide
  Seed: LRMKWMMAMKYPITA
LRMKIMMNMIYPITA

SEQ ID NO: 230251 - protein, 15 aa, Artificial Sequence
  Description of Artificial Sequence: Synthetic peptide
  Seed: LRMKWMMAMKYPITA
LRMKIMMNMIYPKTA

SEQ ID NO: 230252 - protein, 15 aa, Artificial Sequence
  Description of Artificial Sequence: Synthetic peptide
  Seed: LRMKWMMAMKYPITA
LRMKIMMNMIYPLTA

SEQ ID NO: 230253 - protein, 15 aa, Artificial Sequence
  Description of Artificial Sequence: Synthetic peptide
  Seed: LRMKWMMAMKYPITA
LRMKIMMNMIYPMTA

SEQ ID NO: 230254 - protein, 15 aa, Artificial Sequence
  Description of Artificial Sequence: Synthetic peptide
  Seed: LRMKWMMAMKYPITA
LRMKIMMNMIYPNTA

SEQ ID NO: 230255 - protein, 15 aa, Artificial Sequence
  Description of Artificial Sequence: Synthetic peptide
  Seed: LRMKWMMAMKYPITA
LRMKIMMNMIYPPTA

SEQ ID NO: 230256 - protein, 15 aa, Artificial Sequence
  Description of Artificial Sequence: Synthetic peptide
  Seed: LRMKWMMAMKYPITA
LRMKIMMNMIYPQTA

SEQ ID NO: 230257 - protein, 15 aa, Artificial Sequence
  Description of Artificial Sequence: Synthetic peptide
  Seed: LRMKWMMAMKYPITA
LRMKIMMNMIYPRTA

SEQ ID NO: 230258 - protein, 15 aa, Artificial Sequence
  Description of Artificial Sequence: Synthetic peptide
  Seed: LRMKWMMAMKYPITA
LRMKIMMNMIYPSTA

SEQ ID NO: 230259 - protein, 15 aa, Artificial Sequence
  Description of Artificial Sequence: Synthetic peptide
  Seed: LRMKWMMAMKYPITA
LRMKIMMNMIYPTTA

SEQ ID NO: 230260 - protein, 15 aa, Artificial Sequence
  Description of Artificial Sequence: Synthetic peptide
  Seed: LRMKWMMAMKYPITA
LRMKIMMNMIYPVTA

SEQ ID NO: 230261 - protein, 15 aa, Artificial Sequence
  Description of Artificial Sequence: Synthetic peptide
  Seed: LRMKWMMAMKYPITA
LRMKIMMNMIYPWTA

SEQ ID NO: 230262 - protein, 15 aa, Artificial Sequence
  Description of Artificial Sequence: Synthetic peptide
  Seed: LRMKWMMAMKYPITA
LRMKIMMNMIYPYTA

SEQ ID NO: 230263 - protein, 15 aa, Artificial Sequence
  Description of Artificial Sequence: Synthetic peptide
  Seed: LRMKWMMAMKYPITA
LRMKIMMNMKYPATA

SEQ ID NO: 230264 - protein, 15 aa, Artificial Sequence
  Description of Artificial Sequence: Synthetic peptide
  Seed: LRMKWMMAMKYPITA
LRMKIMMNMKYPCTA

SEQ ID NO: 230265 - protein, 15 aa, Artificial Sequence
  Description of Artificial Sequence: Synthetic peptide
  Seed: LRMKWMMAMKYPITA
LRMKIMMNMKYPDTA

SEQ ID NO: 230266 - protein, 15 aa, Artificial Sequence
  Description of Artificial Sequence: Synthetic peptide
  Seed: LRMKWMMAMKYPITA
LRMKIMMNMKYPETA

SEQ ID NO: 230267 - protein, 15 aa, Artificial Sequence
  Description of Artificial Sequence: Synthetic peptide
  Seed: LRMKWMMAMKYPITA
LRMKIMMNMKYPFTA

SEQ ID NO: 230268 - protein, 15 aa, Artificial Sequence
  Description of Artificial Sequence: Synthetic peptide
  Seed: LRMKWMMAMKYPITA
LRMKIMMNMKYPGTA

SEQ ID NO: 230269 - protein, 15 aa, Artificial Sequence
  Description of Artificial Sequence: Synthetic peptide
  Seed: LRMKWMMAMKYPITA
LRMKIMMNMKYPHTA

SEQ ID NO: 230270 - protein, 15 aa, Artificial Sequence
  Description of Artificial Sequence: Synthetic peptide
  Seed: LRMKWMMAMKYPITA
LRMKIMMNMKYPITA

SEQ ID NO: 230271 - protein, 15 aa, Artificial Sequence
  Description of Artificial Sequence: Synthetic peptide
  Seed: LRMKWMMAMKYPITA
LRMKIMMNMKYPKTA

SEQ ID NO: 230272 - protein, 15 aa, Artificial Sequence
  Description of Artificial Sequence: Synthetic peptide
  Seed: LRMKWMMAMKYPITA
LRMKIMMNMKYPLTA

SEQ ID NO: 230273 - protein, 15 aa, Artificial Sequence
  Description of Artificial Sequence: Synthetic peptide
  Seed: LRMKWMMAMKYPITA
LRMKIMMNMKYPMTA

SEQ ID NO: 230274 - protein, 15 aa, Artificial Sequence
  Description of Artificial Sequence: Synthetic peptide
  Seed: LRMKWMMAMKYPITA
LRMKIMMNMKYPNTA

SEQ ID NO: 230275 - protein, 15 aa, Artificial Sequence
  Description of Artificial Sequence: Synthetic peptide
  Seed: LRMKWMMAMKYPITA
LRMKIMMNMKYPPTA

SEQ ID NO: 230276 - protein, 15 aa, Artificial Sequence
  Description of Artificial Sequence: Synthetic peptide
  Seed: LRMKWMMAMKYPITA
LRMKIMMNMKYPQTA

SEQ ID NO: 230277 - protein, 15 aa, Artificial Sequence
  Description of Artificial Sequence: Synthetic peptide
  Seed: LRMKWMMAMKYPITA
LRMKIMMNMKYPRTA

SEQ ID NO: 230278 - protein, 15 aa, Artificial Sequence
  Description of Artificial Sequence: Synthetic peptide
  Seed: LRMKWMMAMKYPITA
LRMKIMMNMKYPSTA

SEQ ID NO: 230279 - protein, 15 aa, Artificial Sequence
  Description of Artificial Sequence: Synthetic peptide
  Seed: LRMKWMMAMKYPITA
LRMKIMMNMKYPTTA

SEQ ID NO: 230280 - protein, 15 aa, Artificial Sequence
  Description of Artificial Sequence: Synthetic peptide
  Seed: LRMKWMMAMKYPITA
LRMKIMMNMKYPVTA

SEQ ID NO: 230281 - protein, 15 aa, Artificial Sequence
  Description of Artificial Sequence: Synthetic peptide
  Seed: LRMKWMMAMKYPITA
LRMKIMMNMKYPWTA

SEQ ID NO: 230282 - protein, 15 aa, Artificial Sequence
  Description of Artificial Sequence: Synthetic peptide
  Seed: LRMKWMMAMKYPITA
LRMKIMMNMKYPYTA

SEQ ID NO: 230283 - protein, 15 aa, Artificial Sequence
  Description of Artificial Sequence: Synthetic peptide
  Seed: LRMKWMMAMKYPITA
LRMKIMMNMLYPATA

SEQ ID NO: 230284 - protein, 15 aa, Artificial Sequence
  Description of Artificial Sequence: Synthetic peptide
  Seed: LRMKWMMAMKYPITA
LRMKIMMNMLYPDTA

SEQ ID NO: 230285 - protein, 15 aa, Artificial Sequence
  Description of Artificial Sequence: Synthetic peptide
  Seed: LRMKWMMAMKYPITA
LRMKIMMNMLYPFTA

SEQ ID NO: 230286 - protein, 15 aa, Artificial Sequence
  Description of Artificial Sequence: Synthetic peptide
  Seed: LRMKWMMAMKYPITA
LRMKIMMNMLYPGTA

SEQ ID NO: 230287 - protein, 15 aa, Artificial Sequence
  Description of Artificial Sequence: Synthetic peptide
  Seed: LRMKWMMAMKYPITA
LRMKIMMNMLYPHTA

SEQ ID NO: 230288 - protein, 15 aa, Artificial Sequence
  Description of Artificial Sequence: Synthetic peptide
  Seed: LRMKWMMAMKYPITA
LRMKIMMNMLYPITA

SEQ ID NO: 230289 - protein, 15 aa, Artificial Sequence
  Description of Artificial Sequence: Synthetic peptide
  Seed: LRMKWMMAMKYPITA
LRMKIMMNMLYPKTA

SEQ ID NO: 230290 - protein, 15 aa, Artificial Sequence
  Description of Artificial Sequence: Synthetic peptide
  Seed: LRMKWMMAMKYPITA
LRMKIMMNMLYPLTA

SEQ ID NO: 230291 - protein, 15 aa, Artificial Sequence
  Description of Artificial Sequence: Synthetic peptide
  Seed: LRMKWMMAMKYPITA
LRMKIMMNMLYPMTA

SEQ ID NO: 230292 - protein, 15 aa, Artificial Sequence
  Description of Artificial Sequence: Synthetic peptide
  Seed: LRMKWMMAMKYPITA
LRMKIMMNMLYPNTA

SEQ ID NO: 230293 - protein, 15 aa, Artificial Sequence
  Description of Artificial Sequence: Synthetic peptide
  Seed: LRMKWMMAMKYPITA
LRMKIMMNMLYPPTA

SEQ ID NO: 230294 - protein, 15 aa, Artificial Sequence
  Description of Artificial Sequence: Synthetic peptide
  Seed: LRMKWMMAMKYPITA
LRMKIMMNMLYPQTA

SEQ ID NO: 230295 - protein, 15 aa, Artificial Sequence
  Description of Artificial Sequence: Synthetic peptide
  Seed: LRMKWMMAMKYPITA
LRMKIMMNMLYPRTA

SEQ ID NO: 230296 - protein, 15 aa, Artificial Sequence
  Description of Artificial Sequence: Synthetic peptide
  Seed: LRMKWMMAMKYPITA
LRMKIMMNMLYPSTA

SEQ ID NO: 230297 - protein, 15 aa, Artificial Sequence
  Description of Artificial Sequence: Synthetic peptide
  Seed: LRMKWMMAMKYPITA
LRMKIMMNMLYPTTA

SEQ ID NO: 230298 - protein, 15 aa, Artificial Sequence
  Description of Artificial Sequence: Synthetic peptide
  Seed: LRMKWMMAMKYPITA
LRMKIMMNMLYPVTA

SEQ ID NO: 230299 - protein, 15 aa, Artificial Sequence
  Description of Artificial Sequence: Synthetic peptide
  Seed: LRMKWMMAMKYPITA
LRMKIMMNMLYPWTA

SEQ ID NO: 230300 - protein, 15 aa, Artificial Sequence
  Description of Artificial Sequence: Synthetic peptide
  Seed: LRMKWMMAMKYPITA
LRMKIMMNMLYPYTA

SEQ ID NO: 230301 - protein, 15 aa, Artificial Sequence
  Description of Artificial Sequence: Synthetic peptide
  Seed: LRMKWMMAMKYPITA
LRMKIMMNMMYPATA

SEQ ID NO: 230302 - protein, 15 aa, Artificial Sequence
  Description of Artificial Sequence: Synthetic peptide
  Seed: LRMKWMMAMKYPITA
LRMKIMMNMMYPDTA

SEQ ID NO: 230303 - protein, 15 aa, Artificial Sequence
  Description of Artificial Sequence: Synthetic peptide
  Seed: LRMKWMMAMKYPITA
LRMKIMMNMMYPETA

SEQ ID NO: 230304 - protein, 15 aa, Artificial Sequence
  Description of Artificial Sequence: Synthetic peptide
  Seed: LRMKWMMAMKYPITA
LRMKIMMNMMYPFTA

SEQ ID NO: 230305 - protein, 15 aa, Artificial Sequence
  Description of Artificial Sequence: Synthetic peptide
  Seed: LRMKWMMAMKYPITA
LRMKIMMNMMYPGTA

SEQ ID NO: 230306 - protein, 15 aa, Artificial Sequence
  Description of Artificial Sequence: Synthetic peptide
  Seed: LRMKWMMAMKYPITA
LRMKIMMNMMYPHTA

SEQ ID NO: 230307 - protein, 15 aa, Artificial Sequence
  Description of Artificial Sequence: Synthetic peptide
  Seed: LRMKWMMAMKYPITA
LRMKIMMNMMYPITA

SEQ ID NO: 230308 - protein, 15 aa, Artificial Sequence
  Description of Artificial Sequence: Synthetic peptide
  Seed: LRMKWMMAMKYPITA
LRMKIMMNMMYPKTA

SEQ ID NO: 230309 - protein, 15 aa, Artificial Sequence
  Description of Artificial Sequence: Synthetic peptide
  Seed: LRMKWMMAMKYPITA
LRMKIMMNMMYPLTA

SEQ ID NO: 230310 - protein, 15 aa, Artificial Sequence
  Description of Artificial Sequence: Synthetic peptide
  Seed: LRMKWMMAMKYPITA
LRMKIMMNMMYPMTA

SEQ ID NO: 230311 - protein, 15 aa, Artificial Sequence
  Description of Artificial Sequence: Synthetic peptide
  Seed: LRMKWMMAMKYPITA
LRMKIMMNMMYPNTA

SEQ ID NO: 230312 - protein, 15 aa, Artificial Sequence
  Description of Artificial Sequence: Synthetic peptide
  Seed: LRMKWMMAMKYPITA
LRMKIMMNMMYPPTA

SEQ ID NO: 230313 - protein, 15 aa, Artificial Sequence
  Description of Artificial Sequence: Synthetic peptide
  Seed: LRMKWMMAMKYPITA
LRMKIMMNMMYPQTA

SEQ ID NO: 230314 - protein, 15 aa, Artificial Sequence
  Description of Artificial Sequence: Synthetic peptide
  Seed: LRMKWMMAMKYPITA
LRMKIMMNMMYPRTA

SEQ ID NO: 230315 - protein, 15 aa, Artificial Sequence
  Description of Artificial Sequence: Synthetic peptide
  Seed: LRMKWMMAMKYPITA
LRMKIMMNMMYPSTA

SEQ ID NO: 230316 - protein, 15 aa, Artificial Sequence
  Description of Artificial Sequence: Synthetic peptide
  Seed: LRMKWMMAMKYPITA
LRMKIMMNMMYPTTA

SEQ ID NO: 230317 - protein, 15 aa, Artificial Sequence
  Description of Artificial Sequence: Synthetic peptide
  Seed: LRMKWMMAMKYPITA
LRMKIMMNMMYPVTA

SEQ ID NO: 230318 - protein, 15 aa, Artificial Sequence
  Description of Artificial Sequence: Synthetic peptide
  Seed: LRMKWMMAMKYPITA
LRMKIMMNMMYPWTA

SEQ ID NO: 230319 - protein, 15 aa, Artificial Sequence
  Description of Artificial Sequence: Synthetic peptide
  Seed: LRMKWMMAMKYPITA
LRMKIMMNMMYPYTA

SEQ ID NO: 230320 - protein, 15 aa, Artificial Sequence
  Description of Artificial Sequence: Synthetic peptide
  Seed: LRMKWMMAMKYPITA
LRMKIMMNMNYPATA

SEQ ID NO: 230321 - protein, 15 aa, Artificial Sequence
  Description of Artificial Sequence: Synthetic peptide
  Seed: LRMKWMMAMKYPITA
LRMKIMMNMNYPCTA

SEQ ID NO: 230322 - protein, 15 aa, Artificial Sequence
  Description of Artificial Sequence: Synthetic peptide
  Seed: LRMKWMMAMKYPITA
LRMKIMMNMNYPDTA

SEQ ID NO: 230323 - protein, 15 aa, Artificial Sequence
  Description of Artificial Sequence: Synthetic peptide
  Seed: LRMKWMMAMKYPITA
LRMKIMMNMNYPETA

SEQ ID NO: 230324 - protein, 15 aa, Artificial Sequence
  Description of Artificial Sequence: Synthetic peptide
  Seed: LRMKWMMAMKYPITA
LRMKIMMNMNYPFTA

SEQ ID NO: 230325 - protein, 15 aa, Artificial Sequence
  Description of Artificial Sequence: Synthetic peptide
  Seed: LRMKWMMAMKYPITA
LRMKIMMNMNYPGTA

SEQ ID NO: 230326 - protein, 15 aa, Artificial Sequence
  Description of Artificial Sequence: Synthetic peptide
  Seed: LRMKWMMAMKYPITA
LRMKIMMNMNYPHTA

SEQ ID NO: 230327 - protein, 15 aa, Artificial Sequence
  Description of Artificial Sequence: Synthetic peptide
  Seed: LRMKWMMAMKYPITA
LRMKIMMNMNYPITA

SEQ ID NO: 230328 - protein, 15 aa, Artificial Sequence
  Description of Artificial Sequence: Synthetic peptide
  Seed: LRMKWMMAMKYPITA
LRMKIMMNMNYPKTA

SEQ ID NO: 230329 - protein, 15 aa, Artificial Sequence
  Description of Artificial Sequence: Synthetic peptide
  Seed: LRMKWMMAMKYPITA
LRMKIMMNMNYPLTA

SEQ ID NO: 230330 - protein, 15 aa, Artificial Sequence
  Description of Artificial Sequence: Synthetic peptide
  Seed: LRMKWMMAMKYPITA
LRMKIMMNMNYPMTA

SEQ ID NO: 230331 - protein, 15 aa, Artificial Sequence
  Description of Artificial Sequence: Synthetic peptide
  Seed: LRMKWMMAMKYPITA
LRMKIMMNMNYPNTA

SEQ ID NO: 230332 - protein, 15 aa, Artificial Sequence
  Description of Artificial Sequence: Synthetic peptide
  Seed: LRMKWMMAMKYPITA
LRMKIMMNMNYPPTA

SEQ ID NO: 230333 - protein, 15 aa, Artificial Sequence
  Description of Artificial Sequence: Synthetic peptide
  Seed: LRMKWMMAMKYPITA
LRMKIMMNMNYPQTA

SEQ ID NO: 230334 - protein, 15 aa, Artificial Sequence
  Description of Artificial Sequence: Synthetic peptide
  Seed: LRMKWMMAMKYPITA
LRMKIMMNMNYPRTA

SEQ ID NO: 230335 - protein, 15 aa, Artificial Sequence
  Description of Artificial Sequence: Synthetic peptide
  Seed: LRMKWMMAMKYPITA
LRMKIMMNMNYPSTA

SEQ ID NO: 230336 - protein, 15 aa, Artificial Sequence
  Description of Artificial Sequence: Synthetic peptide
  Seed: LRMKWMMAMKYPITA
LRMKIMMNMNYPTTA

SEQ ID NO: 230337 - protein, 15 aa, Artificial Sequence
  Description of Artificial Sequence: Synthetic peptide
  Seed: LRMKWMMAMKYPITA
LRMKIMMNMNYPVTA

SEQ ID NO: 230338 - protein, 15 aa, Artificial Sequence
  Description of Artificial Sequence: Synthetic peptide
  Seed: LRMKWMMAMKYPITA
LRMKIMMNMNYPWTA

SEQ ID NO: 230339 - protein, 15 aa, Artificial Sequence
  Description of Artificial Sequence: Synthetic peptide
  Seed: LRMKWMMAMKYPITA
LRMKIMMNMNYPYTA

SEQ ID NO: 230340 - protein, 15 aa, Artificial Sequence
  Description of Artificial Sequence: Synthetic peptide
  Seed: LRMKWMMAMKYPITA
LRMKIMMNMPYPATA

SEQ ID NO: 230341 - protein, 15 aa, Artificial Sequence
  Description of Artificial Sequence: Synthetic peptide
  Seed: LRMKWMMAMKYPITA
LRMKIMMNMPYPCTA

SEQ ID NO: 230342 - protein, 15 aa, Artificial Sequence
  Description of Artificial Sequence: Synthetic peptide
  Seed: LRMKWMMAMKYPITA
LRMKIMMNMPYPDTA

SEQ ID NO: 230343 - protein, 15 aa, Artificial Sequence
  Description of Artificial Sequence: Synthetic peptide
  Seed: LRMKWMMAMKYPITA
LRMKIMMNMPYPETA

SEQ ID NO: 230344 - protein, 15 aa, Artificial Sequence
  Description of Artificial Sequence: Synthetic peptide
  Seed: LRMKWMMAMKYPITA
LRMKIMMNMPYPFTA

SEQ ID NO: 230345 - protein, 15 aa, Artificial Sequence
  Description of Artificial Sequence: Synthetic peptide
  Seed: LRMKWMMAMKYPITA
LRMKIMMNMPYPGTA

SEQ ID NO: 230346 - protein, 15 aa, Artificial Sequence
  Description of Artificial Sequence: Synthetic peptide
  Seed: LRMKWMMAMKYPITA
LRMKIMMNMPYPHTA

SEQ ID NO: 230347 - protein, 15 aa, Artificial Sequence
  Description of Artificial Sequence: Synthetic peptide
  Seed: LRMKWMMAMKYPITA
LRMKIMMNMPYPITA

SEQ ID NO: 230348 - protein, 15 aa, Artificial Sequence
  Description of Artificial Sequence: Synthetic peptide
  Seed: LRMKWMMAMKYPITA
LRMKIMMNMPYPKTA

SEQ ID NO: 230349 - protein, 15 aa, Artificial Sequence
  Description of Artificial Sequence: Synthetic peptide
  Seed: LRMKWMMAMKYPITA
LRMKIMMNMPYPLTA

SEQ ID NO: 230350 - protein, 15 aa, Artificial Sequence
  Description of Artificial Sequence: Synthetic peptide
  Seed: LRMKWMMAMKYPITA
LRMKIMMNMPYPMTA

SEQ ID NO: 230351 - protein, 15 aa, Artificial Sequence
  Description of Artificial Sequence: Synthetic peptide
  Seed: LRMKWMMAMKYPITA
LRMKIMMNMPYPNTA

SEQ ID NO: 230352 - protein, 15 aa, Artificial Sequence
  Description of Artificial Sequence: Synthetic peptide
  Seed: LRMKWMMAMKYPITA
LRMKIMMNMPYPPTA

SEQ ID NO: 230353 - protein, 15 aa, Artificial Sequence
  Description of Artificial Sequence: Synthetic peptide
  Seed: LRMKWMMAMKYPITA
LRMKIMMNMPYPQTA

SEQ ID NO: 230354 - protein, 15 aa, Artificial Sequence
  Description of Artificial Sequence: Synthetic peptide
  Seed: LRMKWMMAMKYPITA
LRMKIMMNMPYPRTA

SEQ ID NO: 230355 - protein, 15 aa, Artificial Sequence
  Description of Artificial Sequence: Synthetic peptide
  Seed: LRMKWMMAMKYPITA
LRMKIMMNMPYPSTA

SEQ ID NO: 230356 - protein, 15 aa, Artificial Sequence
  Description of Artificial Sequence: Synthetic peptide
  Seed: LRMKWMMAMKYPITA
LRMKIMMNMPYPTTA

SEQ ID NO: 230357 - protein, 15 aa, Artificial Sequence
  Description of Artificial Sequence: Synthetic peptide
  Seed: LRMKWMMAMKYPITA
LRMKIMMNMPYPVTA

SEQ ID NO: 230358 - protein, 15 aa, Artificial Sequence
  Description of Artificial Sequence: Synthetic peptide
  Seed: LRMKWMMAMKYPITA
LRMKIMMNMPYPWTA

SEQ ID NO: 230359 - protein, 15 aa, Artificial Sequence
  Description of Artificial Sequence: Synthetic peptide
  Seed: LRMKWMMAMKYPITA
LRMKIMMNMPYPYTA

SEQ ID NO: 230360 - protein, 15 aa, Artificial Sequence
  Description of Artificial Sequence: Synthetic peptide
  Seed: LRMKWMMAMKYPITA
LRMKIMMNMQYPATA

SEQ ID NO: 230361 - protein, 15 aa, Artificial Sequence
  Description of Artificial Sequence: Synthetic peptide
  Seed: LRMKWMMAMKYPITA
LRMKIMMNMQYPFTA

SEQ ID NO: 230362 - protein, 15 aa, Artificial Sequence
  Description of Artificial Sequence: Synthetic peptide
  Seed: LRMKWMMAMKYPITA
LRMKIMMNMQYPHTA

SEQ ID NO: 230363 - protein, 15 aa, Artificial Sequence
  Description of Artificial Sequence: Synthetic peptide
  Seed: LRMKWMMAMKYPITA
LRMKIMMNMQYPITA

SEQ ID NO: 230364 - protein, 15 aa, Artificial Sequence
  Description of Artificial Sequence: Synthetic peptide
  Seed: LRMKWMMAMKYPITA
LRMKIMMNMQYPKTA

SEQ ID NO: 230365 - protein, 15 aa, Artificial Sequence
  Description of Artificial Sequence: Synthetic peptide
  Seed: LRMKWMMAMKYPITA
LRMKIMMNMQYPLTA

SEQ ID NO: 230366 - protein, 15 aa, Artificial Sequence
  Description of Artificial Sequence: Synthetic peptide
  Seed: LRMKWMMAMKYPITA
LRMKIMMNMQYPMTA

SEQ ID NO: 230367 - protein, 15 aa, Artificial Sequence
  Description of Artificial Sequence: Synthetic peptide
  Seed: LRMKWMMAMKYPITA
LRMKIMMNMQYPRTA

SEQ ID NO: 230368 - protein, 15 aa, Artificial Sequence
  Description of Artificial Sequence: Synthetic peptide
  Seed: LRMKWMMAMKYPITA
LRMKIMMNMQYPSTA

SEQ ID NO: 230369 - protein, 15 aa, Artificial Sequence
  Description of Artificial Sequence: Synthetic peptide
  Seed: LRMKWMMAMKYPITA
LRMKIMMNMQYPTTA

SEQ ID NO: 230370 - protein, 15 aa, Artificial Sequence
  Description of Artificial Sequence: Synthetic peptide
  Seed: LRMKWMMAMKYPITA
LRMKIMMNMQYPVTA

SEQ ID NO: 230371 - protein, 15 aa, Artificial Sequence
  Description of Artificial Sequence: Synthetic peptide
  Seed: LRMKWMMAMKYPITA
LRMKIMMNMQYPYTA

SEQ ID NO: 230372 - protein, 15 aa, Artificial Sequence
  Description of Artificial Sequence: Synthetic peptide
  Seed: LRMKWMMAMKYPITA
LRMKIMMNMRYPATA

SEQ ID NO: 230373 - protein, 15 aa, Artificial Sequence
  Description of Artificial Sequence: Synthetic peptide
  Seed: LRMKWMMAMKYPITA
LRMKIMMNMRYPCTA

SEQ ID NO: 230374 - protein, 15 aa, Artificial Sequence
  Description of Artificial Sequence: Synthetic peptide
  Seed: LRMKWMMAMKYPITA
LRMKIMMNMRYPDTA

SEQ ID NO: 230375 - protein, 15 aa, Artificial Sequence
  Description of Artificial Sequence: Synthetic peptide
  Seed: LRMKWMMAMKYPITA
LRMKIMMNMRYPETA

SEQ ID NO: 230376 - protein, 15 aa, Artificial Sequence
  Description of Artificial Sequence: Synthetic peptide
  Seed: LRMKWMMAMKYPITA
LRMKIMMNMRYPFTA

SEQ ID NO: 230377 - protein, 15 aa, Artificial Sequence
  Description of Artificial Sequence: Synthetic peptide
  Seed: LRMKWMMAMKYPITA
LRMKIMMNMRYPGTA

SEQ ID NO: 230378 - protein, 15 aa, Artificial Sequence
  Description of Artificial Sequence: Synthetic peptide
  Seed: LRMKWMMAMKYPITA
LRMKIMMNMRYPHTA

SEQ ID NO: 230379 - protein, 15 aa, Artificial Sequence
  Description of Artificial Sequence: Synthetic peptide
  Seed: LRMKWMMAMKYPITA
LRMKIMMNMRYPITA

SEQ ID NO: 230380 - protein, 15 aa, Artificial Sequence
  Description of Artificial Sequence: Synthetic peptide
  Seed: LRMKWMMAMKYPITA
LRMKIMMNMRYPKTA

SEQ ID NO: 230381 - protein, 15 aa, Artificial Sequence
  Description of Artificial Sequence: Synthetic peptide
  Seed: LRMKWMMAMKYPITA
LRMKIMMNMRYPLTA

SEQ ID NO: 230382 - protein, 15 aa, Artificial Sequence
  Description of Artificial Sequence: Synthetic peptide
  Seed: LRMKWMMAMKYPITA
LRMKIMMNMRYPMTA

SEQ ID NO: 230383 - protein, 15 aa, Artificial Sequence
  Description of Artificial Sequence: Synthetic peptide
  Seed: LRMKWMMAMKYPITA
LRMKIMMNMRYPNTA

SEQ ID NO: 230384 - protein, 15 aa, Artificial Sequence
  Description of Artificial Sequence: Synthetic peptide
  Seed: LRMKWMMAMKYPITA
LRMKIMMNMRYPPTA

SEQ ID NO: 230385 - protein, 15 aa, Artificial Sequence
  Description of Artificial Sequence: Synthetic peptide
  Seed: LRMKWMMAMKYPITA
LRMKIMMNMRYPQTA

SEQ ID NO: 230386 - protein, 15 aa, Artificial Sequence
  Description of Artificial Sequence: Synthetic peptide
  Seed: LRMKWMMAMKYPITA
LRMKIMMNMRYPRTA

SEQ ID NO: 230387 - protein, 15 aa, Artificial Sequence
  Description of Artificial Sequence: Synthetic peptide
  Seed: LRMKWMMAMKYPITA
LRMKIMMNMRYPSTA

SEQ ID NO: 230388 - protein, 15 aa, Artificial Sequence
  Description of Artificial Sequence: Synthetic peptide
  Seed: LRMKWMMAMKYPITA
LRMKIMMNMRYPTTA

SEQ ID NO: 230389 - protein, 15 aa, Artificial Sequence
  Description of Artificial Sequence: Synthetic peptide
  Seed: LRMKWMMAMKYPITA
LRMKIMMNMRYPVTA

SEQ ID NO: 230390 - protein, 15 aa, Artificial Sequence
  Description of Artificial Sequence: Synthetic peptide
  Seed: LRMKWMMAMKYPITA
LRMKIMMNMRYPWTA

SEQ ID NO: 230391 - protein, 15 aa, Artificial Sequence
  Description of Artificial Sequence: Synthetic peptide
  Seed: LRMKWMMAMKYPITA
LRMKIMMNMRYPYTA

SEQ ID NO: 230392 - protein, 15 aa, Artificial Sequence
  Description of Artificial Sequence: Synthetic peptide
  Seed: LRMKWMMAMKYPITA
LRMKIMMNMSYPATA

SEQ ID NO: 230393 - protein, 15 aa, Artificial Sequence
  Description of Artificial Sequence: Synthetic peptide
  Seed: LRMKWMMAMKYPITA
LRMKIMMNMSYPCTA

SEQ ID NO: 230394 - protein, 15 aa, Artificial Sequence
  Description of Artificial Sequence: Synthetic peptide
  Seed: LRMKWMMAMKYPITA
LRMKIMMNMSYPDTA

SEQ ID NO: 230395 - protein, 15 aa, Artificial Sequence
  Description of Artificial Sequence: Synthetic peptide
  Seed: LRMKWMMAMKYPITA
LRMKIMMNMSYPETA

SEQ ID NO: 230396 - protein, 15 aa, Artificial Sequence
  Description of Artificial Sequence: Synthetic peptide
  Seed: LRMKWMMAMKYPITA
LRMKIMMNMSYPFTA

SEQ ID NO: 230397 - protein, 15 aa, Artificial Sequence
  Description of Artificial Sequence: Synthetic peptide
  Seed: LRMKWMMAMKYPITA
LRMKIMMNMSYPGTA

SEQ ID NO: 230398 - protein, 15 aa, Artificial Sequence
  Description of Artificial Sequence: Synthetic peptide
  Seed: LRMKWMMAMKYPITA
LRMKIMMNMSYPHTA

SEQ ID NO: 230399 - protein, 15 aa, Artificial Sequence
  Description of Artificial Sequence: Synthetic peptide
  Seed: LRMKWMMAMKYPITA
LRMKIMMNMSYPITA

SEQ ID NO: 230400 - protein, 15 aa, Artificial Sequence
  Description of Artificial Sequence: Synthetic peptide
  Seed: LRMKWMMAMKYPITA
LRMKIMMNMSYPKTA

SEQ ID NO: 230401 - protein, 15 aa, Artificial Sequence
  Description of Artificial Sequence: Synthetic peptide
  Seed: LRMKWMMAMKYPITA
LRMKIMMNMSYPLTA

SEQ ID NO: 230402 - protein, 15 aa, Artificial Sequence
  Description of Artificial Sequence: Synthetic peptide
  Seed: LRMKWMMAMKYPITA
LRMKIMMNMSYPMTA

SEQ ID NO: 230403 - protein, 15 aa, Artificial Sequence
  Description of Artificial Sequence: Synthetic peptide
  Seed: LRMKWMMAMKYPITA
LRMKIMMNMSYPNTA

SEQ ID NO: 230404 - protein, 15 aa, Artificial Sequence
  Description of Artificial Sequence: Synthetic peptide
  Seed: LRMKWMMAMKYPITA
LRMKIMMNMSYPPTA

SEQ ID NO: 230405 - protein, 15 aa, Artificial Sequence
  Description of Artificial Sequence: Synthetic peptide
  Seed: LRMKWMMAMKYPITA
LRMKIMMNMSYPQTA

SEQ ID NO: 230406 - protein, 15 aa, Artificial Sequence
  Description of Artificial Sequence: Synthetic peptide
  Seed: LRMKWMMAMKYPITA
LRMKIMMNMSYPRTA

SEQ ID NO: 230407 - protein, 15 aa, Artificial Sequence
  Description of Artificial Sequence: Synthetic peptide
  Seed: LRMKWMMAMKYPITA
LRMKIMMNMSYPSTA

SEQ ID NO: 230408 - protein, 15 aa, Artificial Sequence
  Description of Artificial Sequence: Synthetic peptide
  Seed: LRMKWMMAMKYPITA
LRMKIMMNMSYPTTA

SEQ ID NO: 230409 - protein, 15 aa, Artificial Sequence
  Description of Artificial Sequence: Synthetic peptide
  Seed: LRMKWMMAMKYPITA
LRMKIMMNMSYPVTA

SEQ ID NO: 230410 - protein, 15 aa, Artificial Sequence
  Description of Artificial Sequence: Synthetic peptide
  Seed: LRMKWMMAMKYPITA
LRMKIMMNMSYPWTA

SEQ ID NO: 230411 - protein, 15 aa, Artificial Sequence
  Description of Artificial Sequence: Synthetic peptide
  Seed: LRMKWMMAMKYPITA
LRMKIMMNMSYPYTA

SEQ ID NO: 230412 - protein, 15 aa, Artificial Sequence
  Description of Artificial Sequence: Synthetic peptide
  Seed: LRMKWMMAMKYPITA
LRMKIMMNMTYPATA

SEQ ID NO: 230413 - protein, 15 aa, Artificial Sequence
  Description of Artificial Sequence: Synthetic peptide
  Seed: LRMKWMMAMKYPITA
LRMKIMMNMTYPCTA

SEQ ID NO: 230414 - protein, 15 aa, Artificial Sequence
  Description of Artificial Sequence: Synthetic peptide
  Seed: LRMKWMMAMKYPITA
LRMKIMMNMTYPDTA

SEQ ID NO: 230415 - protein, 15 aa, Artificial Sequence
  Description of Artificial Sequence: Synthetic peptide
  Seed: LRMKWMMAMKYPITA
LRMKIMMNMTYPETA

SEQ ID NO: 230416 - protein, 15 aa, Artificial Sequence
  Description of Artificial Sequence: Synthetic peptide
  Seed: LRMKWMMAMKYPITA
LRMKIMMNMTYPFTA

SEQ ID NO: 230417 - protein, 15 aa, Artificial Sequence
  Description of Artificial Sequence: Synthetic peptide
  Seed: LRMKWMMAMKYPITA
LRMKIMMNMTYPGTA

SEQ ID NO: 230418 - protein, 15 aa, Artificial Sequence
  Description of Artificial Sequence: Synthetic peptide
  Seed: LRMKWMMAMKYPITA
LRMKIMMNMTYPHTA

SEQ ID NO: 230419 - protein, 15 aa, Artificial Sequence
  Description of Artificial Sequence: Synthetic peptide
  Seed: LRMKWMMAMKYPITA
LRMKIMMNMTYPITA

SEQ ID NO: 230420 - protein, 15 aa, Artificial Sequence
  Description of Artificial Sequence: Synthetic peptide
  Seed: LRMKWMMAMKYPITA
LRMKIMMNMTYPKTA

SEQ ID NO: 230421 - protein, 15 aa, Artificial Sequence
  Description of Artificial Sequence: Synthetic peptide
  Seed: LRMKWMMAMKYPITA
LRMKIMMNMTYPLTA

SEQ ID NO: 230422 - protein, 15 aa, Artificial Sequence
  Description of Artificial Sequence: Synthetic peptide
  Seed: LRMKWMMAMKYPITA
LRMKIMMNMTYPMTA

SEQ ID NO: 230423 - protein, 15 aa, Artificial Sequence
  Description of Artificial Sequence: Synthetic peptide
  Seed: LRMKWMMAMKYPITA
LRMKIMMNMTYPNTA

SEQ ID NO: 230424 - protein, 15 aa, Artificial Sequence
  Description of Artificial Sequence: Synthetic peptide
  Seed: LRMKWMMAMKYPITA
LRMKIMMNMTYPPTA

SEQ ID NO: 230425 - protein, 15 aa, Artificial Sequence
  Description of Artificial Sequence: Synthetic peptide
  Seed: LRMKWMMAMKYPITA
LRMKIMMNMTYPQTA

SEQ ID NO: 230426 - protein, 15 aa, Artificial Sequence
  Description of Artificial Sequence: Synthetic peptide
  Seed: LRMKWMMAMKYPITA
LRMKIMMNMTYPRTA

SEQ ID NO: 230427 - protein, 15 aa, Artificial Sequence
  Description of Artificial Sequence: Synthetic peptide
  Seed: LRMKWMMAMKYPITA
LRMKIMMNMTYPSTA

SEQ ID NO: 230428 - protein, 15 aa, Artificial Sequence
  Description of Artificial Sequence: Synthetic peptide
  Seed: LRMKWMMAMKYPITA
LRMKIMMNMTYPTTA

SEQ ID NO: 230429 - protein, 15 aa, Artificial Sequence
  Description of Artificial Sequence: Synthetic peptide
  Seed: LRMKWMMAMKYPITA
LRMKIMMNMTYPVTA

SEQ ID NO: 230430 - protein, 15 aa, Artificial Sequence
  Description of Artificial Sequence: Synthetic peptide
  Seed: LRMKWMMAMKYPITA
LRMKIMMNMTYPWTA

SEQ ID NO: 230431 - protein, 15 aa, Artificial Sequence
  Description of Artificial Sequence: Synthetic peptide
  Seed: LRMKWMMAMKYPITA
LRMKIMMNMTYPYTA

SEQ ID NO: 230432 - protein, 15 aa, Artificial Sequence
  Description of Artificial Sequence: Synthetic peptide
  Seed: LRMKWMMAMKYPITA
LRMKIMMNMVYPATA

SEQ ID NO: 230433 - protein, 15 aa, Artificial Sequence
  Description of Artificial Sequence: Synthetic peptide
  Seed: LRMKWMMAMKYPITA
LRMKIMMNMVYPCTA

SEQ ID NO: 230434 - protein, 15 aa, Artificial Sequence
  Description of Artificial Sequence: Synthetic peptide
  Seed: LRMKWMMAMKYPITA
LRMKIMMNMVYPDTA

SEQ ID NO: 230435 - protein, 15 aa, Artificial Sequence
  Description of Artificial Sequence: Synthetic peptide
  Seed: LRMKWMMAMKYPITA
LRMKIMMNMVYPETA

SEQ ID NO: 230436 - protein, 15 aa, Artificial Sequence
  Description of Artificial Sequence: Synthetic peptide
  Seed: LRMKWMMAMKYPITA
LRMKIMMNMVYPFTA

SEQ ID NO: 230437 - protein, 15 aa, Artificial Sequence
  Description of Artificial Sequence: Synthetic peptide
  Seed: LRMKWMMAMKYPITA
LRMKIMMNMVYPGTA

SEQ ID NO: 230438 - protein, 15 aa, Artificial Sequence
  Description of Artificial Sequence: Synthetic peptide
  Seed: LRMKWMMAMKYPITA
LRMKIMMNMVYPHTA

SEQ ID NO: 230439 - protein, 15 aa, Artificial Sequence
  Description of Artificial Sequence: Synthetic peptide
  Seed: LRMKWMMAMKYPITA
LRMKIMMNMVYPITA

SEQ ID NO: 230440 - protein, 15 aa, Artificial Sequence
  Description of Artificial Sequence: Synthetic peptide
  Seed: LRMKWMMAMKYPITA
LRMKIMMNMVYPKTA

SEQ ID NO: 230441 - protein, 15 aa, Artificial Sequence
  Description of Artificial Sequence: Synthetic peptide
  Seed: LRMKWMMAMKYPITA
LRMKIMMNMVYPLTA

SEQ ID NO: 230442 - protein, 15 aa, Artificial Sequence
  Description of Artificial Sequence: Synthetic peptide
  Seed: LRMKWMMAMKYPITA
LRMKIMMNMVYPMTA

SEQ ID NO: 230443 - protein, 15 aa, Artificial Sequence
  Description of Artificial Sequence: Synthetic peptide
  Seed: LRMKWMMAMKYPITA
LRMKIMMNMVYPNTA

SEQ ID NO: 230444 - protein, 15 aa, Artificial Sequence
  Description of Artificial Sequence: Synthetic peptide
  Seed: LRMKWMMAMKYPITA
LRMKIMMNMVYPPTA

SEQ ID NO: 230445 - protein, 15 aa, Artificial Sequence
  Description of Artificial Sequence: Synthetic peptide
  Seed: LRMKWMMAMKYPITA
LRMKIMMNMVYPQTA

SEQ ID NO: 230446 - protein, 15 aa, Artificial Sequence
  Description of Artificial Sequence: Synthetic peptide
  Seed: LRMKWMMAMKYPITA
LRMKIMMNMVYPRTA

SEQ ID NO: 230447 - protein, 15 aa, Artificial Sequence
  Description of Artificial Sequence: Synthetic peptide
  Seed: LRMKWMMAMKYPITA
LRMKIMMNMVYPSTA

SEQ ID NO: 230448 - protein, 15 aa, Artificial Sequence
  Description of Artificial Sequence: Synthetic peptide
  Seed: LRMKWMMAMKYPITA
LRMKIMMNMVYPTTA

SEQ ID NO: 230449 - protein, 15 aa, Artificial Sequence
  Description of Artificial Sequence: Synthetic peptide
  Seed: LRMKWMMAMKYPITA
LRMKIMMNMVYPVTA

SEQ ID NO: 230450 - protein, 15 aa, Artificial Sequence
  Description of Artificial Sequence: Synthetic peptide
  Seed: LRMKWMMAMKYPITA
LRMKIMMNMVYPWTA

SEQ ID NO: 230451 - protein, 15 aa, Artificial Sequence
  Description of Artificial Sequence: Synthetic peptide
  Seed: LRMKWMMAMKYPITA
LRMKIMMNMVYPYTA

SEQ ID NO: 230452 - protein, 15 aa, Artificial Sequence
  Description of Artificial Sequence: Synthetic peptide
  Seed: LRMKWMMAMKYPITA
LRMKIMMNMWYPATA

SEQ ID NO: 230453 - protein, 15 aa, Artificial Sequence
  Description of Artificial Sequence: Synthetic peptide
  Seed: LRMKWMMAMKYPITA
LRMKIMMNMWYPFTA

SEQ ID NO: 230454 - protein, 15 aa, Artificial Sequence
  Description of Artificial Sequence: Synthetic peptide
  Seed: LRMKWMMAMKYPITA
LRMKIMMNMWYPITA

SEQ ID NO: 230455 - protein, 15 aa, Artificial Sequence
  Description of Artificial Sequence: Synthetic peptide
  Seed: LRMKWMMAMKYPITA
LRMKIMMNMWYPLTA

SEQ ID NO: 230456 - protein, 15 aa, Artificial Sequence
  Description of Artificial Sequence: Synthetic peptide
  Seed: LRMKWMMAMKYPITA
LRMKIMMNMWYPMTA

SEQ ID NO: 230457 - protein, 15 aa, Artificial Sequence
  Description of Artificial Sequence: Synthetic peptide
  Seed: LRMKWMMAMKYPITA
LRMKIMMNMWYPRTA

SEQ ID NO: 230458 - protein, 15 aa, Artificial Sequence
  Description of Artificial Sequence: Synthetic peptide
  Seed: LRMKWMMAMKYPITA
LRMKIMMNMWYPSTA

SEQ ID NO: 230459 - protein, 15 aa, Artificial Sequence
  Description of Artificial Sequence: Synthetic peptide
  Seed: LRMKWMMAMKYPITA
LRMKIMMNMWYPTTA

SEQ ID NO: 230460 - protein, 15 aa, Artificial Sequence
  Description of Artificial Sequence: Synthetic peptide
  Seed: LRMKWMMAMKYPITA
LRMKIMMNMWYPVTA

SEQ ID NO: 230461 - protein, 15 aa, Artificial Sequence
  Description of Artificial Sequence: Synthetic peptide
  Seed: LRMKWMMAMKYPITA
LRMKIMMNMWYPYTA

SEQ ID NO: 230462 - protein, 15 aa, Artificial Sequence
  Description of Artificial Sequence: Synthetic peptide
  Seed: LRMKWMMAMKYPITA
LRMKIMMNMYYPATA

SEQ ID NO: 230463 - protein, 15 aa, Artificial Sequence
  Description of Artificial Sequence: Synthetic peptide
  Seed: LRMKWMMAMKYPITA
LRMKIMMNMYYPFTA

SEQ ID NO: 230464 - protein, 15 aa, Artificial Sequence
  Description of Artificial Sequence: Synthetic peptide
  Seed: LRMKWMMAMKYPITA
LRMKIMMNMYYPITA

SEQ ID NO: 230465 - protein, 15 aa, Artificial Sequence
  Description of Artificial Sequence: Synthetic peptide
  Seed: LRMKWMMAMKYPITA
LRMKIMMNMYYPLTA

SEQ ID NO: 230466 - protein, 15 aa, Artificial Sequence
  Description of Artificial Sequence: Synthetic peptide
  Seed: LRMKWMMAMKYPITA
LRMKIMMNMYYPMTA

SEQ ID NO: 230467 - protein, 15 aa, Artificial Sequence
  Description of Artificial Sequence: Synthetic peptide
  Seed: LRMKWMMAMKYPITA
LRMKIMMNMYYPNTA

SEQ ID NO: 230468 - protein, 15 aa, Artificial Sequence
  Description of Artificial Sequence: Synthetic peptide
  Seed: LRMKWMMAMKYPITA
LRMKIMMNMYYPRTA

SEQ ID NO: 230469 - protein, 15 aa, Artificial Sequence
  Description of Artificial Sequence: Synthetic peptide
  Seed: LRMKWMMAMKYPITA
LRMKIMMNMYYPSTA

SEQ ID NO: 230470 - protein, 15 aa, Artificial Sequence
  Description of Artificial Sequence: Synthetic peptide
  Seed: LRMKWMMAMKYPITA
LRMKIMMNMYYPTTA

SEQ ID NO: 230471 - protein, 15 aa, Artificial Sequence
  Description of Artificial Sequence: Synthetic peptide
  Seed: LRMKWMMAMKYPITA
LRMKIMMNMYYPVTA

SEQ ID NO: 230472 - protein, 15 aa, Artificial Sequence
  Description of Artificial Sequence: Synthetic peptide
  Seed: LRMKWMMAMKYPITA
LRMKIMMNMYYPYTA

SEQ ID NO: 230473 - protein, 15 aa, Artificial Sequence
  Description of Artificial Sequence: Synthetic peptide
  Seed: LRMKWMMAMKYPITA
LRMKIMMPMAYPATA

SEQ ID NO: 230474 - protein, 15 aa, Artificial Sequence
  Description of Artificial Sequence: Synthetic peptide
  Seed: LRMKWMMAMKYPITA
LRMKIMMPMAYPFTA

SEQ ID NO: 230475 - protein, 15 aa, Artificial Sequence
  Description of Artificial Sequence: Synthetic peptide
  Seed: LRMKWMMAMKYPITA
LRMKIMMPMAYPGTA

SEQ ID NO: 230476 - protein, 15 aa, Artificial Sequence
  Description of Artificial Sequence: Synthetic peptide
  Seed: LRMKWMMAMKYPITA
LRMKIMMPMAYPHTA

SEQ ID NO: 230477 - protein, 15 aa, Artificial Sequence
  Description of Artificial Sequence: Synthetic peptide
  Seed: LRMKWMMAMKYPITA
LRMKIMMPMAYPITA

SEQ ID NO: 230478 - protein, 15 aa, Artificial Sequence
  Description of Artificial Sequence: Synthetic peptide
  Seed: LRMKWMMAMKYPITA
LRMKIMMPMAYPKTA

SEQ ID NO: 230479 - protein, 15 aa, Artificial Sequence
  Description of Artificial Sequence: Synthetic peptide
  Seed: LRMKWMMAMKYPITA
LRMKIMMPMAYPLTA

SEQ ID NO: 230480 - protein, 15 aa, Artificial Sequence
  Description of Artificial Sequence: Synthetic peptide
  Seed: LRMKWMMAMKYPITA
LRMKIMMPMAYPMTA

SEQ ID NO: 230481 - protein, 15 aa, Artificial Sequence
  Description of Artificial Sequence: Synthetic peptide
  Seed: LRMKWMMAMKYPITA
LRMKIMMPMAYPNTA

SEQ ID NO: 230482 - protein, 15 aa, Artificial Sequence
  Description of Artificial Sequence: Synthetic peptide
  Seed: LRMKWMMAMKYPITA
LRMKIMMPMAYPQTA

SEQ ID NO: 230483 - protein, 15 aa, Artificial Sequence
  Description of Artificial Sequence: Synthetic peptide
  Seed: LRMKWMMAMKYPITA
LRMKIMMPMAYPRTA

SEQ ID NO: 230484 - protein, 15 aa, Artificial Sequence
  Description of Artificial Sequence: Synthetic peptide
  Seed: LRMKWMMAMKYPITA
LRMKIMMPMAYPSTA

SEQ ID NO: 230485 - protein, 15 aa, Artificial Sequence
  Description of Artificial Sequence: Synthetic peptide
  Seed: LRMKWMMAMKYPITA
LRMKIMMPMAYPTTA

SEQ ID NO: 230486 - protein, 15 aa, Artificial Sequence
  Description of Artificial Sequence: Synthetic peptide
  Seed: LRMKWMMAMKYPITA
LRMKIMMPMAYPVTA

SEQ ID NO: 230487 - protein, 15 aa, Artificial Sequence
  Description of Artificial Sequence: Synthetic peptide
  Seed: LRMKWMMAMKYPITA
LRMKIMMPMAYPWTA

SEQ ID NO: 230488 - protein, 15 aa, Artificial Sequence
  Description of Artificial Sequence: Synthetic peptide
  Seed: LRMKWMMAMKYPITA
LRMKIMMPMAYPYTA

SEQ ID NO: 230489 - protein, 15 aa, Artificial Sequence
  Description of Artificial Sequence: Synthetic peptide
  Seed: LRMKWMMAMKYPITA
LRMKIMMPMGYPATA

SEQ ID NO: 230490 - protein, 15 aa, Artificial Sequence
  Description of Artificial Sequence: Synthetic peptide
  Seed: LRMKWMMAMKYPITA
LRMKIMMPMGYPITA

SEQ ID NO: 230491 - protein, 15 aa, Artificial Sequence
  Description of Artificial Sequence: Synthetic peptide
  Seed: LRMKWMMAMKYPITA
LRMKIMMPMGYPLTA

SEQ ID NO: 230492 - protein, 15 aa, Artificial Sequence
  Description of Artificial Sequence: Synthetic peptide
  Seed: LRMKWMMAMKYPITA
LRMKIMMPMGYPMTA

SEQ ID NO: 230493 - protein, 15 aa, Artificial Sequence
  Description of Artificial Sequence: Synthetic peptide
  Seed: LRMKWMMAMKYPITA
LRMKIMMPMGYPVTA

SEQ ID NO: 230494 - protein, 15 aa, Artificial Sequence
  Description of Artificial Sequence: Synthetic peptide
  Seed: LRMKWMMAMKYPITA
LRMKIMMPMIYPATA

SEQ ID NO: 230495 - protein, 15 aa, Artificial Sequence
  Description of Artificial Sequence: Synthetic peptide
  Seed: LRMKWMMAMKYPITA
LRMKIMMPMIYPITA

SEQ ID NO: 230496 - protein, 15 aa, Artificial Sequence
  Description of Artificial Sequence: Synthetic peptide
  Seed: LRMKWMMAMKYPITA
LRMKIMMPMIYPLTA

SEQ ID NO: 230497 - protein, 15 aa, Artificial Sequence
  Description of Artificial Sequence: Synthetic peptide
  Seed: LRMKWMMAMKYPITA
LRMKIMMPMIYPMTA

SEQ ID NO: 230498 - protein, 15 aa, Artificial Sequence
  Description of Artificial Sequence: Synthetic peptide
  Seed: LRMKWMMAMKYPITA
LRMKIMMPMIYPVTA

SEQ ID NO: 230499 - protein, 15 aa, Artificial Sequence
  Description of Artificial Sequence: Synthetic peptide
  Seed: LRMKWMMAMKYPITA
LRMKIMMPMKYPLTA

SEQ ID NO: 230500 - protein, 15 aa, Artificial Sequence
  Description of Artificial Sequence: Synthetic peptide
  Seed: LRMKWMMAMKYPITA
LRMKIMMPMKYPRTA

SEQ ID NO: 230501 - protein, 15 aa, Artificial Sequence
  Description of Artificial Sequence: Synthetic peptide
  Seed: LRMKWMMAMKYPITA
LRMKIMMPMKYPYTA

SEQ ID NO: 230502 - protein, 15 aa, Artificial Sequence
  Description of Artificial Sequence: Synthetic peptide
  Seed: LRMKWMMAMKYPITA
LRMKIMMPMLYPLTA

SEQ ID NO: 230503 - protein, 15 aa, Artificial Sequence
  Description of Artificial Sequence: Synthetic peptide
  Seed: LRMKWMMAMKYPITA
LRMKIMMPMLYPMTA

SEQ ID NO: 230504 - protein, 15 aa, Artificial Sequence
  Description of Artificial Sequence: Synthetic peptide
  Seed: LRMKWMMAMKYPITA
LRMKIMMPMLYPVTA

SEQ ID NO: 230505 - protein, 15 aa, Artificial Sequence
  Description of Artificial Sequence: Synthetic peptide
  Seed: LRMKWMMAMKYPITA
LRMKIMMPMMYPATA

SEQ ID NO: 230506 - protein, 15 aa, Artificial Sequence
  Description of Artificial Sequence: Synthetic peptide
  Seed: LRMKWMMAMKYPITA
LRMKIMMPMMYPITA

SEQ ID NO: 230507 - protein, 15 aa, Artificial Sequence
  Description of Artificial Sequence: Synthetic peptide
  Seed: LRMKWMMAMKYPITA
LRMKIMMPMMYPLTA

SEQ ID NO: 230508 - protein, 15 aa, Artificial Sequence
  Description of Artificial Sequence: Synthetic peptide
  Seed: LRMKWMMAMKYPITA
LRMKIMMPMMYPMTA

SEQ ID NO: 230509 - protein, 15 aa, Artificial Sequence
  Description of Artificial Sequence: Synthetic peptide
  Seed: LRMKWMMAMKYPITA
LRMKIMMPMMYPVTA

SEQ ID NO: 230510 - protein, 15 aa, Artificial Sequence
  Description of Artificial Sequence: Synthetic peptide
  Seed: LRMKWMMAMKYPITA
LRMKIMMPMNYPATA

SEQ ID NO: 230511 - protein, 15 aa, Artificial Sequence
  Description of Artificial Sequence: Synthetic peptide
  Seed: LRMKWMMAMKYPITA
LRMKIMMPMNYPITA

SEQ ID NO: 230512 - protein, 15 aa, Artificial Sequence
  Description of Artificial Sequence: Synthetic peptide
  Seed: LRMKWMMAMKYPITA
LRMKIMMPMNYPLTA

SEQ ID NO: 230513 - protein, 15 aa, Artificial Sequence
  Description of Artificial Sequence: Synthetic peptide
  Seed: LRMKWMMAMKYPITA
LRMKIMMPMNYPVTA

SEQ ID NO: 230514 - protein, 15 aa, Artificial Sequence
  Description of Artificial Sequence: Synthetic peptide
  Seed: LRMKWMMAMKYPITA
LRMKIMMPMPYPATA

SEQ ID NO: 230515 - protein, 15 aa, Artificial Sequence
  Description of Artificial Sequence: Synthetic peptide
  Seed: LRMKWMMAMKYPITA
LRMKIMMPMPYPFTA

SEQ ID NO: 230516 - protein, 15 aa, Artificial Sequence
  Description of Artificial Sequence: Synthetic peptide
  Seed: LRMKWMMAMKYPITA
LRMKIMMPMPYPITA

SEQ ID NO: 230517 - protein, 15 aa, Artificial Sequence
  Description of Artificial Sequence: Synthetic peptide
  Seed: LRMKWMMAMKYPITA
LRMKIMMPMPYPLTA

SEQ ID NO: 230518 - protein, 15 aa, Artificial Sequence
  Description of Artificial Sequence: Synthetic peptide
  Seed: LRMKWMMAMKYPITA
LRMKIMMPMPYPMTA

SEQ ID NO: 230519 - protein, 15 aa, Artificial Sequence
  Description of Artificial Sequence: Synthetic peptide
  Seed: LRMKWMMAMKYPITA
LRMKIMMPMPYPSTA

SEQ ID NO: 230520 - protein, 15 aa, Artificial Sequence
  Description of Artificial Sequence: Synthetic peptide
  Seed: LRMKWMMAMKYPITA
LRMKIMMPMPYPTTA

SEQ ID NO: 230521 - protein, 15 aa, Artificial Sequence
  Description of Artificial Sequence: Synthetic peptide
  Seed: LRMKWMMAMKYPITA
LRMKIMMPMPYPVTA

SEQ ID NO: 230522 - protein, 15 aa, Artificial Sequence
  Description of Artificial Sequence: Synthetic peptide
  Seed: LRMKWMMAMKYPITA
LRMKIMMPMRYPATA

SEQ ID NO: 230523 - protein, 15 aa, Artificial Sequence
  Description of Artificial Sequence: Synthetic peptide
  Seed: LRMKWMMAMKYPITA
LRMKIMMPMRYPFTA

SEQ ID NO: 230524 - protein, 15 aa, Artificial Sequence
  Description of Artificial Sequence: Synthetic peptide
  Seed: LRMKWMMAMKYPITA
LRMKIMMPMRYPGTA

SEQ ID NO: 230525 - protein, 15 aa, Artificial Sequence
  Description of Artificial Sequence: Synthetic peptide
  Seed: LRMKWMMAMKYPITA
LRMKIMMPMRYPKTA

SEQ ID NO: 230526 - protein, 15 aa, Artificial Sequence
  Description of Artificial Sequence: Synthetic peptide
  Seed: LRMKWMMAMKYPITA
LRMKIMMPMRYPLTA

SEQ ID NO: 230527 - protein, 15 aa, Artificial Sequence
  Description of Artificial Sequence: Synthetic peptide
  Seed: LRMKWMMAMKYPITA
LRMKIMMPMRYPMTA

SEQ ID NO: 230528 - protein, 15 aa, Artificial Sequence
  Description of Artificial Sequence: Synthetic peptide
  Seed: LRMKWMMAMKYPITA
LRMKIMMPMRYPQTA

SEQ ID NO: 230529 - protein, 15 aa, Artificial Sequence
  Description of Artificial Sequence: Synthetic peptide
  Seed: LRMKWMMAMKYPITA
LRMKIMMPMRYPRTA

SEQ ID NO: 230530 - protein, 15 aa, Artificial Sequence
  Description of Artificial Sequence: Synthetic peptide
  Seed: LRMKWMMAMKYPITA
LRMKIMMPMRYPSTA

SEQ ID NO: 230531 - protein, 15 aa, Artificial Sequence
  Description of Artificial Sequence: Synthetic peptide
  Seed: LRMKWMMAMKYPITA
LRMKIMMPMRYPYTA

SEQ ID NO: 230532 - protein, 15 aa, Artificial Sequence
  Description of Artificial Sequence: Synthetic peptide
  Seed: LRMKWMMAMKYPITA
LRMKIMMPMSYPATA

SEQ ID NO: 230533 - protein, 15 aa, Artificial Sequence
  Description of Artificial Sequence: Synthetic peptide
  Seed: LRMKWMMAMKYPITA
LRMKIMMPMSYPFTA

SEQ ID NO: 230534 - protein, 15 aa, Artificial Sequence
  Description of Artificial Sequence: Synthetic peptide
  Seed: LRMKWMMAMKYPITA
LRMKIMMPMSYPITA

SEQ ID NO: 230535 - protein, 15 aa, Artificial Sequence
  Description of Artificial Sequence: Synthetic peptide
  Seed: LRMKWMMAMKYPITA
LRMKIMMPMSYPLTA

SEQ ID NO: 230536 - protein, 15 aa, Artificial Sequence
  Description of Artificial Sequence: Synthetic peptide
  Seed: LRMKWMMAMKYPITA
LRMKIMMPMSYPMTA

SEQ ID NO: 230537 - protein, 15 aa, Artificial Sequence
  Description of Artificial Sequence: Synthetic peptide
  Seed: LRMKWMMAMKYPITA
LRMKIMMPMSYPSTA

SEQ ID NO: 230538 - protein, 15 aa, Artificial Sequence
  Description of Artificial Sequence: Synthetic peptide
  Seed: LRMKWMMAMKYPITA
LRMKIMMPMSYPTTA

SEQ ID NO: 230539 - protein, 15 aa, Artificial Sequence
  Description of Artificial Sequence: Synthetic peptide
  Seed: LRMKWMMAMKYPITA
LRMKIMMPMSYPVTA

SEQ ID NO: 230540 - protein, 15 aa, Artificial Sequence
  Description of Artificial Sequence: Synthetic peptide
  Seed: LRMKWMMAMKYPITA
LRMKIMMPMTYPATA

SEQ ID NO: 230541 - protein, 15 aa, Artificial Sequence
  Description of Artificial Sequence: Synthetic peptide
  Seed: LRMKWMMAMKYPITA
LRMKIMMPMTYPITA

SEQ ID NO: 230542 - protein, 15 aa, Artificial Sequence
  Description of Artificial Sequence: Synthetic peptide
  Seed: LRMKWMMAMKYPITA
LRMKIMMPMTYPLTA

SEQ ID NO: 230543 - protein, 15 aa, Artificial Sequence
  Description of Artificial Sequence: Synthetic peptide
  Seed: LRMKWMMAMKYPITA
LRMKIMMPMTYPMTA

SEQ ID NO: 230544 - protein, 15 aa, Artificial Sequence
  Description of Artificial Sequence: Synthetic peptide
  Seed: LRMKWMMAMKYPITA
LRMKIMMPMTYPVTA

SEQ ID NO: 230545 - protein, 15 aa, Artificial Sequence
  Description of Artificial Sequence: Synthetic peptide
  Seed: LRMKWMMAMKYPITA
LRMKIMMPMVYPATA

SEQ ID NO: 230546 - protein, 15 aa, Artificial Sequence
  Description of Artificial Sequence: Synthetic peptide
  Seed: LRMKWMMAMKYPITA
LRMKIMMPMVYPITA

SEQ ID NO: 230547 - protein, 15 aa, Artificial Sequence
  Description of Artificial Sequence: Synthetic peptide
  Seed: LRMKWMMAMKYPITA
LRMKIMMPMVYPLTA

SEQ ID NO: 230548 - protein, 15 aa, Artificial Sequence
  Description of Artificial Sequence: Synthetic peptide
  Seed: LRMKWMMAMKYPITA
LRMKIMMPMVYPMTA

SEQ ID NO: 230549 - protein, 15 aa, Artificial Sequence
  Description of Artificial Sequence: Synthetic peptide
  Seed: LRMKWMMAMKYPITA
LRMKIMMPMVYPSTA

SEQ ID NO: 230550 - protein, 15 aa, Artificial Sequence
  Description of Artificial Sequence: Synthetic peptide
  Seed: LRMKWMMAMKYPITA
LRMKIMMPMVYPVTA

SEQ ID NO: 230551 - protein, 15 aa, Artificial Sequence
  Description of Artificial Sequence: Synthetic peptide
  Seed: LRMKWMMAMKYPITA
LRMKIMMQMAYPATA

SEQ ID NO: 230552 - protein, 15 aa, Artificial Sequence
  Description of Artificial Sequence: Synthetic peptide
  Seed: LRMKWMMAMKYPITA
LRMKIMMQMAYPCTA

SEQ ID NO: 230553 - protein, 15 aa, Artificial Sequence
  Description of Artificial Sequence: Synthetic peptide
  Seed: LRMKWMMAMKYPITA
LRMKIMMQMAYPDTA

SEQ ID NO: 230554 - protein, 15 aa, Artificial Sequence
  Description of Artificial Sequence: Synthetic peptide
  Seed: LRMKWMMAMKYPITA
LRMKIMMQMAYPETA

SEQ ID NO: 230555 - protein, 15 aa, Artificial Sequence
  Description of Artificial Sequence: Synthetic peptide
  Seed: LRMKWMMAMKYPITA
LRMKIMMQMAYPFTA

SEQ ID NO: 230556 - protein, 15 aa, Artificial Sequence
  Description of Artificial Sequence: Synthetic peptide
  Seed: LRMKWMMAMKYPITA
LRMKIMMQMAYPGTA

SEQ ID NO: 230557 - protein, 15 aa, Artificial Sequence
  Description of Artificial Sequence: Synthetic peptide
  Seed: LRMKWMMAMKYPITA
LRMKIMMQMAYPHTA

SEQ ID NO: 230558 - protein, 15 aa, Artificial Sequence
  Description of Artificial Sequence: Synthetic peptide
  Seed: LRMKWMMAMKYPITA
LRMKIMMQMAYPITA

SEQ ID NO: 230559 - protein, 15 aa, Artificial Sequence
  Description of Artificial Sequence: Synthetic peptide
  Seed: LRMKWMMAMKYPITA
LRMKIMMQMAYPKTA

SEQ ID NO: 230560 - protein, 15 aa, Artificial Sequence
  Description of Artificial Sequence: Synthetic peptide
  Seed: LRMKWMMAMKYPITA
LRMKIMMQMAYPLTA

SEQ ID NO: 230561 - protein, 15 aa, Artificial Sequence
  Description of Artificial Sequence: Synthetic peptide
  Seed: LRMKWMMAMKYPITA
LRMKIMMQMAYPMTA

SEQ ID NO: 230562 - protein, 15 aa, Artificial Sequence
  Description of Artificial Sequence: Synthetic peptide
  Seed: LRMKWMMAMKYPITA
LRMKIMMQMAYPNTA

SEQ ID NO: 230563 - protein, 15 aa, Artificial Sequence
  Description of Artificial Sequence: Synthetic peptide
  Seed: LRMKWMMAMKYPITA
LRMKIMMQMAYPPTA

SEQ ID NO: 230564 - protein, 15 aa, Artificial Sequence
  Description of Artificial Sequence: Synthetic peptide
  Seed: LRMKWMMAMKYPITA
LRMKIMMQMAYPQTA

SEQ ID NO: 230565 - protein, 15 aa, Artificial Sequence
  Description of Artificial Sequence: Synthetic peptide
  Seed: LRMKWMMAMKYPITA
LRMKIMMQMAYPRTA

SEQ ID NO: 230566 - protein, 15 aa, Artificial Sequence
  Description of Artificial Sequence: Synthetic peptide
  Seed: LRMKWMMAMKYPITA
LRMKIMMQMAYPSTA

SEQ ID NO: 230567 - protein, 15 aa, Artificial Sequence
  Description of Artificial Sequence: Synthetic peptide
  Seed: LRMKWMMAMKYPITA
LRMKIMMQMAYPTTA

SEQ ID NO: 230568 - protein, 15 aa, Artificial Sequence
  Description of Artificial Sequence: Synthetic peptide
  Seed: LRMKWMMAMKYPITA
LRMKIMMQMAYPVTA

SEQ ID NO: 230569 - protein, 15 aa, Artificial Sequence
  Description of Artificial Sequence: Synthetic peptide
  Seed: LRMKWMMAMKYPITA
LRMKIMMQMAYPWTA

SEQ ID NO: 230570 - protein, 15 aa, Artificial Sequence
  Description of Artificial Sequence: Synthetic peptide
  Seed: LRMKWMMAMKYPITA
LRMKIMMQMAYPYTA

SEQ ID NO: 230571 - protein, 15 aa, Artificial Sequence
  Description of Artificial Sequence: Synthetic peptide
  Seed: LRMKWMMAMKYPITA
LRMKIMMQMCYPATA

SEQ ID NO: 230572 - protein, 15 aa, Artificial Sequence
  Description of Artificial Sequence: Synthetic peptide
  Seed: LRMKWMMAMKYPITA
LRMKIMMQMCYPITA

SEQ ID NO: 230573 - protein, 15 aa, Artificial Sequence
  Description of Artificial Sequence: Synthetic peptide
  Seed: LRMKWMMAMKYPITA
LRMKIMMQMCYPLTA

SEQ ID NO: 230574 - protein, 15 aa, Artificial Sequence
  Description of Artificial Sequence: Synthetic peptide
  Seed: LRMKWMMAMKYPITA
LRMKIMMQMCYPVTA

SEQ ID NO: 230575 - protein, 15 aa, Artificial Sequence
  Description of Artificial Sequence: Synthetic peptide
  Seed: LRMKWMMAMKYPITA
LRMKIMMQMDYPITA

SEQ ID NO: 230576 - protein, 15 aa, Artificial Sequence
  Description of Artificial Sequence: Synthetic peptide
  Seed: LRMKWMMAMKYPITA
LRMKIMMQMDYPLTA

SEQ ID NO: 230577 - protein, 15 aa, Artificial Sequence
  Description of Artificial Sequence: Synthetic peptide
  Seed: LRMKWMMAMKYPITA
LRMKIMMQMDYPVTA

SEQ ID NO: 230578 - protein, 15 aa, Artificial Sequence
  Description of Artificial Sequence: Synthetic peptide
  Seed: LRMKWMMAMKYPITA
LRMKIMMQMEYPLTA

SEQ ID NO: 230579 - protein, 15 aa, Artificial Sequence
  Description of Artificial Sequence: Synthetic peptide
  Seed: LRMKWMMAMKYPITA
LRMKIMMQMEYPVTA

SEQ ID NO: 230580 - protein, 15 aa, Artificial Sequence
  Description of Artificial Sequence: Synthetic peptide
  Seed: LRMKWMMAMKYPITA
LRMKIMMQMFYPITA

SEQ ID NO: 230581 - protein, 15 aa, Artificial Sequence
  Description of Artificial Sequence: Synthetic peptide
  Seed: LRMKWMMAMKYPITA
LRMKIMMQMFYPLTA

SEQ ID NO: 230582 - protein, 15 aa, Artificial Sequence
  Description of Artificial Sequence: Synthetic peptide
  Seed: LRMKWMMAMKYPITA
LRMKIMMQMFYPVTA

SEQ ID NO: 230583 - protein, 15 aa, Artificial Sequence
  Description of Artificial Sequence: Synthetic peptide
  Seed: LRMKWMMAMKYPITA
LRMKIMMQMGYPATA

SEQ ID NO: 230584 - protein, 15 aa, Artificial Sequence
  Description of Artificial Sequence: Synthetic peptide
  Seed: LRMKWMMAMKYPITA
LRMKIMMQMGYPCTA

SEQ ID NO: 230585 - protein, 15 aa, Artificial Sequence
  Description of Artificial Sequence: Synthetic peptide
  Seed: LRMKWMMAMKYPITA
LRMKIMMQMGYPFTA

SEQ ID NO: 230586 - protein, 15 aa, Artificial Sequence
  Description of Artificial Sequence: Synthetic peptide
  Seed: LRMKWMMAMKYPITA
LRMKIMMQMGYPGTA

SEQ ID NO: 230587 - protein, 15 aa, Artificial Sequence
  Description of Artificial Sequence: Synthetic peptide
  Seed: LRMKWMMAMKYPITA
LRMKIMMQMGYPHTA

SEQ ID NO: 230588 - protein, 15 aa, Artificial Sequence
  Description of Artificial Sequence: Synthetic peptide
  Seed: LRMKWMMAMKYPITA
LRMKIMMQMGYPITA

SEQ ID NO: 230589 - protein, 15 aa, Artificial Sequence
  Description of Artificial Sequence: Synthetic peptide
  Seed: LRMKWMMAMKYPITA
LRMKIMMQMGYPLTA

SEQ ID NO: 230590 - protein, 15 aa, Artificial Sequence
  Description of Artificial Sequence: Synthetic peptide
  Seed: LRMKWMMAMKYPITA
LRMKIMMQMGYPMTA

SEQ ID NO: 230591 - protein, 15 aa, Artificial Sequence
  Description of Artificial Sequence: Synthetic peptide
  Seed: LRMKWMMAMKYPITA
LRMKIMMQMGYPNTA

SEQ ID NO: 230592 - protein, 15 aa, Artificial Sequence
  Description of Artificial Sequence: Synthetic peptide
  Seed: LRMKWMMAMKYPITA
LRMKIMMQMGYPPTA

SEQ ID NO: 230593 - protein, 15 aa, Artificial Sequence
  Description of Artificial Sequence: Synthetic peptide
  Seed: LRMKWMMAMKYPITA
LRMKIMMQMGYPQTA

SEQ ID NO: 230594 - protein, 15 aa, Artificial Sequence
  Description of Artificial Sequence: Synthetic peptide
  Seed: LRMKWMMAMKYPITA
LRMKIMMQMGYPRTA

SEQ ID NO: 230595 - protein, 15 aa, Artificial Sequence
  Description of Artificial Sequence: Synthetic peptide
  Seed: LRMKWMMAMKYPITA
LRMKIMMQMGYPSTA

SEQ ID NO: 230596 - protein, 15 aa, Artificial Sequence
  Description of Artificial Sequence: Synthetic peptide
  Seed: LRMKWMMAMKYPITA
LRMKIMMQMGYPTTA

SEQ ID NO: 230597 - protein, 15 aa, Artificial Sequence
  Description of Artificial Sequence: Synthetic peptide
  Seed: LRMKWMMAMKYPITA
LRMKIMMQMGYPVTA

SEQ ID NO: 230598 - protein, 15 aa, Artificial Sequence
  Description of Artificial Sequence: Synthetic peptide
  Seed: LRMKWMMAMKYPITA
LRMKIMMQMGYPWTA

SEQ ID NO: 230599 - protein, 15 aa, Artificial Sequence
  Description of Artificial Sequence: Synthetic peptide
  Seed: LRMKWMMAMKYPITA
LRMKIMMQMGYPYTA

SEQ ID NO: 230600 - protein, 15 aa, Artificial Sequence
  Description of Artificial Sequence: Synthetic peptide
  Seed: LRMKWMMAMKYPITA
LRMKIMMQMHYPATA

SEQ ID NO: 230601 - protein, 15 aa, Artificial Sequence
  Description of Artificial Sequence: Synthetic peptide
  Seed: LRMKWMMAMKYPITA
LRMKIMMQMHYPFTA

SEQ ID NO: 230602 - protein, 15 aa, Artificial Sequence
  Description of Artificial Sequence: Synthetic peptide
  Seed: LRMKWMMAMKYPITA
LRMKIMMQMHYPGTA

SEQ ID NO: 230603 - protein, 15 aa, Artificial Sequence
  Description of Artificial Sequence: Synthetic peptide
  Seed: LRMKWMMAMKYPITA
LRMKIMMQMHYPITA

SEQ ID NO: 230604 - protein, 15 aa, Artificial Sequence
  Description of Artificial Sequence: Synthetic peptide
  Seed: LRMKWMMAMKYPITA
LRMKIMMQMHYPLTA

SEQ ID NO: 230605 - protein, 15 aa, Artificial Sequence
  Description of Artificial Sequence: Synthetic peptide
  Seed: LRMKWMMAMKYPITA
LRMKIMMQMHYPMTA

SEQ ID NO: 230606 - protein, 15 aa, Artificial Sequence
  Description of Artificial Sequence: Synthetic peptide
  Seed: LRMKWMMAMKYPITA
LRMKIMMQMHYPRTA

SEQ ID NO: 230607 - protein, 15 aa, Artificial Sequence
  Description of Artificial Sequence: Synthetic peptide
  Seed: LRMKWMMAMKYPITA
LRMKIMMQMHYPSTA

SEQ ID NO: 230608 - protein, 15 aa, Artificial Sequence
  Description of Artificial Sequence: Synthetic peptide
  Seed: LRMKWMMAMKYPITA
LRMKIMMQMHYPVTA

SEQ ID NO: 230609 - protein, 15 aa, Artificial Sequence
  Description of Artificial Sequence: Synthetic peptide
  Seed: LRMKWMMAMKYPITA
LRMKIMMQMHYPYTA

SEQ ID NO: 230610 - protein, 15 aa, Artificial Sequence
  Description of Artificial Sequence: Synthetic peptide
  Seed: LRMKWMMAMKYPITA
LRMKIMMQMIYPATA

SEQ ID NO: 230611 - protein, 15 aa, Artificial Sequence
  Description of Artificial Sequence: Synthetic peptide
  Seed: LRMKWMMAMKYPITA
LRMKIMMQMIYPCTA

SEQ ID NO: 230612 - protein, 15 aa, Artificial Sequence
  Description of Artificial Sequence: Synthetic peptide
  Seed: LRMKWMMAMKYPITA
LRMKIMMQMIYPDTA

SEQ ID NO: 230613 - protein, 15 aa, Artificial Sequence
  Description of Artificial Sequence: Synthetic peptide
  Seed: LRMKWMMAMKYPITA
LRMKIMMQMIYPGTA

SEQ ID NO: 230614 - protein, 15 aa, Artificial Sequence
  Description of Artificial Sequence: Synthetic peptide
  Seed: LRMKWMMAMKYPITA
LRMKIMMQMIYPHTA

SEQ ID NO: 230615 - protein, 15 aa, Artificial Sequence
  Description of Artificial Sequence: Synthetic peptide
  Seed: LRMKWMMAMKYPITA
LRMKIMMQMIYPITA

SEQ ID NO: 230616 - protein, 15 aa, Artificial Sequence
  Description of Artificial Sequence: Synthetic peptide
  Seed: LRMKWMMAMKYPITA
LRMKIMMQMIYPLTA

SEQ ID NO: 230617 - protein, 15 aa, Artificial Sequence
  Description of Artificial Sequence: Synthetic peptide
  Seed: LRMKWMMAMKYPITA
LRMKIMMQMIYPMTA

SEQ ID NO: 230618 - protein, 15 aa, Artificial Sequence
  Description of Artificial Sequence: Synthetic peptide
  Seed: LRMKWMMAMKYPITA
LRMKIMMQMIYPNTA

SEQ ID NO: 230619 - protein, 15 aa, Artificial Sequence
  Description of Artificial Sequence: Synthetic peptide
  Seed: LRMKWMMAMKYPITA
LRMKIMMQMIYPQTA

SEQ ID NO: 230620 - protein, 15 aa, Artificial Sequence
  Description of Artificial Sequence: Synthetic peptide
  Seed: LRMKWMMAMKYPITA
LRMKIMMQMIYPRTA

SEQ ID NO: 230621 - protein, 15 aa, Artificial Sequence
  Description of Artificial Sequence: Synthetic peptide
  Seed: LRMKWMMAMKYPITA
LRMKIMMQMIYPSTA

SEQ ID NO: 230622 - protein, 15 aa, Artificial Sequence
  Description of Artificial Sequence: Synthetic peptide
  Seed: LRMKWMMAMKYPITA
LRMKIMMQMIYPTTA

SEQ ID NO: 230623 - protein, 15 aa, Artificial Sequence
  Description of Artificial Sequence: Synthetic peptide
  Seed: LRMKWMMAMKYPITA
LRMKIMMQMIYPVTA

SEQ ID NO: 230624 - protein, 15 aa, Artificial Sequence
  Description of Artificial Sequence: Synthetic peptide
  Seed: LRMKWMMAMKYPITA
LRMKIMMQMIYPYTA

SEQ ID NO: 230625 - protein, 15 aa, Artificial Sequence
  Description of Artificial Sequence: Synthetic peptide
  Seed: LRMKWMMAMKYPITA
LRMKIMMQMKYPATA

SEQ ID NO: 230626 - protein, 15 aa, Artificial Sequence
  Description of Artificial Sequence: Synthetic peptide
  Seed: LRMKWMMAMKYPITA
LRMKIMMQMKYPCTA

SEQ ID NO: 230627 - protein, 15 aa, Artificial Sequence
  Description of Artificial Sequence: Synthetic peptide
  Seed: LRMKWMMAMKYPITA
LRMKIMMQMKYPETA

SEQ ID NO: 230628 - protein, 15 aa, Artificial Sequence
  Description of Artificial Sequence: Synthetic peptide
  Seed: LRMKWMMAMKYPITA
LRMKIMMQMKYPFTA

SEQ ID NO: 230629 - protein, 15 aa, Artificial Sequence
  Description of Artificial Sequence: Synthetic peptide
  Seed: LRMKWMMAMKYPITA
LRMKIMMQMKYPGTA

SEQ ID NO: 230630 - protein, 15 aa, Artificial Sequence
  Description of Artificial Sequence: Synthetic peptide
  Seed: LRMKWMMAMKYPITA
LRMKIMMQMKYPHTA

SEQ ID NO: 230631 - protein, 15 aa, Artificial Sequence
  Description of Artificial Sequence: Synthetic peptide
  Seed: LRMKWMMAMKYPITA
LRMKIMMQMKYPITA

SEQ ID NO: 230632 - protein, 15 aa, Artificial Sequence
  Description of Artificial Sequence: Synthetic peptide
  Seed: LRMKWMMAMKYPITA
LRMKIMMQMKYPKTA

SEQ ID NO: 230633 - protein, 15 aa, Artificial Sequence
  Description of Artificial Sequence: Synthetic peptide
  Seed: LRMKWMMAMKYPITA
LRMKIMMQMKYPLTA

SEQ ID NO: 230634 - protein, 15 aa, Artificial Sequence
  Description of Artificial Sequence: Synthetic peptide
  Seed: LRMKWMMAMKYPITA
LRMKIMMQMKYPMTA

SEQ ID NO: 230635 - protein, 15 aa, Artificial Sequence
  Description of Artificial Sequence: Synthetic peptide
  Seed: LRMKWMMAMKYPITA
LRMKIMMQMKYPNTA

SEQ ID NO: 230636 - protein, 15 aa, Artificial Sequence
  Description of Artificial Sequence: Synthetic peptide
  Seed: LRMKWMMAMKYPITA
LRMKIMMQMKYPPTA

SEQ ID NO: 230637 - protein, 15 aa, Artificial Sequence
  Description of Artificial Sequence: Synthetic peptide
  Seed: LRMKWMMAMKYPITA
LRMKIMMQMKYPQTA

SEQ ID NO: 230638 - protein, 15 aa, Artificial Sequence
  Description of Artificial Sequence: Synthetic peptide
  Seed: LRMKWMMAMKYPITA
LRMKIMMQMKYPRTA

SEQ ID NO: 230639 - protein, 15 aa, Artificial Sequence
  Description of Artificial Sequence: Synthetic peptide
  Seed: LRMKWMMAMKYPITA
LRMKIMMQMKYPSTA

SEQ ID NO: 230640 - protein, 15 aa, Artificial Sequence
  Description of Artificial Sequence: Synthetic peptide
  Seed: LRMKWMMAMKYPITA
LRMKIMMQMKYPTTA

SEQ ID NO: 230641 - protein, 15 aa, Artificial Sequence
  Description of Artificial Sequence: Synthetic peptide
  Seed: LRMKWMMAMKYPITA
LRMKIMMQMKYPVTA

SEQ ID NO: 230642 - protein, 15 aa, Artificial Sequence
  Description of Artificial Sequence: Synthetic peptide
  Seed: LRMKWMMAMKYPITA
LRMKIMMQMKYPWTA

SEQ ID NO: 230643 - protein, 15 aa, Artificial Sequence
  Description of Artificial Sequence: Synthetic peptide
  Seed: LRMKWMMAMKYPITA
LRMKIMMQMKYPYTA

SEQ ID NO: 230644 - protein, 15 aa, Artificial Sequence
  Description of Artificial Sequence: Synthetic peptide
  Seed: LRMKWMMAMKYPITA
LRMKIMMQMLYPGTA

SEQ ID NO: 230645 - protein, 15 aa, Artificial Sequence
  Description of Artificial Sequence: Synthetic peptide
  Seed: LRMKWMMAMKYPITA
LRMKIMMQMMYPCTA

SEQ ID NO: 230646 - protein, 15 aa, Artificial Sequence
  Description of Artificial Sequence: Synthetic peptide
  Seed: LRMKWMMAMKYPITA
LRMKIMMQMMYPMTA

SEQ ID NO: 230647 - protein, 15 aa, Artificial Sequence
  Description of Artificial Sequence: Synthetic peptide
  Seed: LRMKWMMAMKYPITA
LRMKIMMQMMYPRTA

SEQ ID NO: 230648 - protein, 15 aa, Artificial Sequence
  Description of Artificial Sequence: Synthetic peptide
  Seed: LRMKWMMAMKYPITA
LRMKIMMQMNYPATA

SEQ ID NO: 230649 - protein, 15 aa, Artificial Sequence
  Description of Artificial Sequence: Synthetic peptide
  Seed: LRMKWMMAMKYPITA
LRMKIMMQMNYPCTA

SEQ ID NO: 230650 - protein, 15 aa, Artificial Sequence
  Description of Artificial Sequence: Synthetic peptide
  Seed: LRMKWMMAMKYPITA
LRMKIMMQMNYPDTA

SEQ ID NO: 230651 - protein, 15 aa, Artificial Sequence
  Description of Artificial Sequence: Synthetic peptide
  Seed: LRMKWMMAMKYPITA
LRMKIMMQMNYPETA

SEQ ID NO: 230652 - protein, 15 aa, Artificial Sequence
  Description of Artificial Sequence: Synthetic peptide
  Seed: LRMKWMMAMKYPITA
LRMKIMMQMNYPFTA

SEQ ID NO: 230653 - protein, 15 aa, Artificial Sequence
  Description of Artificial Sequence: Synthetic peptide
  Seed: LRMKWMMAMKYPITA
LRMKIMMQMNYPGTA

SEQ ID NO: 230654 - protein, 15 aa, Artificial Sequence
  Description of Artificial Sequence: Synthetic peptide
  Seed: LRMKWMMAMKYPITA
LRMKIMMQMNYPHTA

SEQ ID NO: 230655 - protein, 15 aa, Artificial Sequence
  Description of Artificial Sequence: Synthetic peptide
  Seed: LRMKWMMAMKYPITA
LRMKIMMQMNYPITA

SEQ ID NO: 230656 - protein, 15 aa, Artificial Sequence
  Description of Artificial Sequence: Synthetic peptide
  Seed: LRMKWMMAMKYPITA
LRMKIMMQMNYPLTA

SEQ ID NO: 230657 - protein, 15 aa, Artificial Sequence
  Description of Artificial Sequence: Synthetic peptide
  Seed: LRMKWMMAMKYPITA
LRMKIMMQMNYPMTA

SEQ ID NO: 230658 - protein, 15 aa, Artificial Sequence
  Description of Artificial Sequence: Synthetic peptide
  Seed: LRMKWMMAMKYPITA
LRMKIMMQMNYPNTA

SEQ ID NO: 230659 - protein, 15 aa, Artificial Sequence
  Description of Artificial Sequence: Synthetic peptide
  Seed: LRMKWMMAMKYPITA
LRMKIMMQMNYPQTA

SEQ ID NO: 230660 - protein, 15 aa, Artificial Sequence
  Description of Artificial Sequence: Synthetic peptide
  Seed: LRMKWMMAMKYPITA
LRMKIMMQMNYPRTA

SEQ ID NO: 230661 - protein, 15 aa, Artificial Sequence
  Description of Artificial Sequence: Synthetic peptide
  Seed: LRMKWMMAMKYPITA
LRMKIMMQMNYPSTA

SEQ ID NO: 230662 - protein, 15 aa, Artificial Sequence
  Description of Artificial Sequence: Synthetic peptide
  Seed: LRMKWMMAMKYPITA
LRMKIMMQMNYPTTA

SEQ ID NO: 230663 - protein, 15 aa, Artificial Sequence
  Description of Artificial Sequence: Synthetic peptide
  Seed: LRMKWMMAMKYPITA
LRMKIMMQMNYPVTA

SEQ ID NO: 230664 - protein, 15 aa, Artificial Sequence
  Description of Artificial Sequence: Synthetic peptide
  Seed: LRMKWMMAMKYPITA
LRMKIMMQMNYPYTA

SEQ ID NO: 230665 - protein, 15 aa, Artificial Sequence
  Description of Artificial Sequence: Synthetic peptide
  Seed: LRMKWMMAMKYPITA
LRMKIMMQMPYPATA

SEQ ID NO: 230666 - protein, 15 aa, Artificial Sequence
  Description of Artificial Sequence: Synthetic peptide
  Seed: LRMKWMMAMKYPITA
LRMKIMMQMPYPCTA

SEQ ID NO: 230667 - protein, 15 aa, Artificial Sequence
  Description of Artificial Sequence: Synthetic peptide
  Seed: LRMKWMMAMKYPITA
LRMKIMMQMPYPFTA

SEQ ID NO: 230668 - protein, 15 aa, Artificial Sequence
  Description of Artificial Sequence: Synthetic peptide
  Seed: LRMKWMMAMKYPITA
LRMKIMMQMPYPGTA

SEQ ID NO: 230669 - protein, 15 aa, Artificial Sequence
  Description of Artificial Sequence: Synthetic peptide
  Seed: LRMKWMMAMKYPITA
LRMKIMMQMPYPHTA

SEQ ID NO: 230670 - protein, 15 aa, Artificial Sequence
  Description of Artificial Sequence: Synthetic peptide
  Seed: LRMKWMMAMKYPITA
LRMKIMMQMPYPITA

SEQ ID NO: 230671 - protein, 15 aa, Artificial Sequence
  Description of Artificial Sequence: Synthetic peptide
  Seed: LRMKWMMAMKYPITA
LRMKIMMQMPYPKTA

SEQ ID NO: 230672 - protein, 15 aa, Artificial Sequence
  Description of Artificial Sequence: Synthetic peptide
  Seed: LRMKWMMAMKYPITA
LRMKIMMQMPYPLTA

SEQ ID NO: 230673 - protein, 15 aa, Artificial Sequence
  Description of Artificial Sequence: Synthetic peptide
  Seed: LRMKWMMAMKYPITA
LRMKIMMQMPYPMTA

SEQ ID NO: 230674 - protein, 15 aa, Artificial Sequence
  Description of Artificial Sequence: Synthetic peptide
  Seed: LRMKWMMAMKYPITA
LRMKIMMQMPYPNTA

SEQ ID NO: 230675 - protein, 15 aa, Artificial Sequence
  Description of Artificial Sequence: Synthetic peptide
  Seed: LRMKWMMAMKYPITA
LRMKIMMQMPYPQTA

SEQ ID NO: 230676 - protein, 15 aa, Artificial Sequence
  Description of Artificial Sequence: Synthetic peptide
  Seed: LRMKWMMAMKYPITA
LRMKIMMQMPYPRTA

SEQ ID NO: 230677 - protein, 15 aa, Artificial Sequence
  Description of Artificial Sequence: Synthetic peptide
  Seed: LRMKWMMAMKYPITA
LRMKIMMQMPYPSTA

SEQ ID NO: 230678 - protein, 15 aa, Artificial Sequence
  Description of Artificial Sequence: Synthetic peptide
  Seed: LRMKWMMAMKYPITA
LRMKIMMQMPYPTTA

SEQ ID NO: 230679 - protein, 15 aa, Artificial Sequence
  Description of Artificial Sequence: Synthetic peptide
  Seed: LRMKWMMAMKYPITA
LRMKIMMQMPYPVTA

SEQ ID NO: 230680 - protein, 15 aa, Artificial Sequence
  Description of Artificial Sequence: Synthetic peptide
  Seed: LRMKWMMAMKYPITA
LRMKIMMQMPYPWTA

SEQ ID NO: 230681 - protein, 15 aa, Artificial Sequence
  Description of Artificial Sequence: Synthetic peptide
  Seed: LRMKWMMAMKYPITA
LRMKIMMQMPYPYTA

SEQ ID NO: 230682 - protein, 15 aa, Artificial Sequence
  Description of Artificial Sequence: Synthetic peptide
  Seed: LRMKWMMAMKYPITA
LRMKIMMQMQYPATA

SEQ ID NO: 230683 - protein, 15 aa, Artificial Sequence
  Description of Artificial Sequence: Synthetic peptide
  Seed: LRMKWMMAMKYPITA
LRMKIMMQMQYPITA

SEQ ID NO: 230684 - protein, 15 aa, Artificial Sequence
  Description of Artificial Sequence: Synthetic peptide
  Seed: LRMKWMMAMKYPITA
LRMKIMMQMQYPLTA

SEQ ID NO: 230685 - protein, 15 aa, Artificial Sequence
  Description of Artificial Sequence: Synthetic peptide
  Seed: LRMKWMMAMKYPITA
LRMKIMMQMQYPVTA

SEQ ID NO: 230686 - protein, 15 aa, Artificial Sequence
  Description of Artificial Sequence: Synthetic peptide
  Seed: LRMKWMMAMKYPITA
LRMKIMMQMRYPATA

SEQ ID NO: 230687 - protein, 15 aa, Artificial Sequence
  Description of Artificial Sequence: Synthetic peptide
  Seed: LRMKWMMAMKYPITA
LRMKIMMQMRYPCTA

SEQ ID NO: 230688 - protein, 15 aa, Artificial Sequence
  Description of Artificial Sequence: Synthetic peptide
  Seed: LRMKWMMAMKYPITA
LRMKIMMQMRYPDTA

SEQ ID NO: 230689 - protein, 15 aa, Artificial Sequence
  Description of Artificial Sequence: Synthetic peptide
  Seed: LRMKWMMAMKYPITA
LRMKIMMQMRYPETA

SEQ ID NO: 230690 - protein, 15 aa, Artificial Sequence
  Description of Artificial Sequence: Synthetic peptide
  Seed: LRMKWMMAMKYPITA
LRMKIMMQMRYPFTA

SEQ ID NO: 230691 - protein, 15 aa, Artificial Sequence
  Description of Artificial Sequence: Synthetic peptide
  Seed: LRMKWMMAMKYPITA
LRMKIMMQMRYPGTA

SEQ ID NO: 230692 - protein, 15 aa, Artificial Sequence
  Description of Artificial Sequence: Synthetic peptide
  Seed: LRMKWMMAMKYPITA
LRMKIMMQMRYPHTA

SEQ ID NO: 230693 - protein, 15 aa, Artificial Sequence
  Description of Artificial Sequence: Synthetic peptide
  Seed: LRMKWMMAMKYPITA
LRMKIMMQMRYPITA

SEQ ID NO: 230694 - protein, 15 aa, Artificial Sequence
  Description of Artificial Sequence: Synthetic peptide
  Seed: LRMKWMMAMKYPITA
LRMKIMMQMRYPKTA

SEQ ID NO: 230695 - protein, 15 aa, Artificial Sequence
  Description of Artificial Sequence: Synthetic peptide
  Seed: LRMKWMMAMKYPITA
LRMKIMMQMRYPLTA

SEQ ID NO: 230696 - protein, 15 aa, Artificial Sequence
  Description of Artificial Sequence: Synthetic peptide
  Seed: LRMKWMMAMKYPITA
LRMKIMMQMRYPMTA

SEQ ID NO: 230697 - protein, 15 aa, Artificial Sequence
  Description of Artificial Sequence: Synthetic peptide
  Seed: LRMKWMMAMKYPITA
LRMKIMMQMRYPNTA

SEQ ID NO: 230698 - protein, 15 aa, Artificial Sequence
  Description of Artificial Sequence: Synthetic peptide
  Seed: LRMKWMMAMKYPITA
LRMKIMMQMRYPPTA

SEQ ID NO: 230699 - protein, 15 aa, Artificial Sequence
  Description of Artificial Sequence: Synthetic peptide
  Seed: LRMKWMMAMKYPITA
LRMKIMMQMRYPQTA

SEQ ID NO: 230700 - protein, 15 aa, Artificial Sequence
  Description of Artificial Sequence: Synthetic peptide
  Seed: LRMKWMMAMKYPITA
LRMKIMMQMRYPRTA

SEQ ID NO: 230701 - protein, 15 aa, Artificial Sequence
  Description of Artificial Sequence: Synthetic peptide
  Seed: LRMKWMMAMKYPITA
LRMKIMMQMRYPSTA

SEQ ID NO: 230702 - protein, 15 aa, Artificial Sequence
  Description of Artificial Sequence: Synthetic peptide
  Seed: LRMKWMMAMKYPITA
LRMKIMMQMRYPTTA

SEQ ID NO: 230703 - protein, 15 aa, Artificial Sequence
  Description of Artificial Sequence: Synthetic peptide
  Seed: LRMKWMMAMKYPITA
LRMKIMMQMRYPVTA

SEQ ID NO: 230704 - protein, 15 aa, Artificial Sequence
  Description of Artificial Sequence: Synthetic peptide
  Seed: LRMKWMMAMKYPITA
LRMKIMMQMRYPWTA

SEQ ID NO: 230705 - protein, 15 aa, Artificial Sequence
  Description of Artificial Sequence: Synthetic peptide
  Seed: LRMKWMMAMKYPITA
LRMKIMMQMRYPYTA

SEQ ID NO: 230706 - protein, 15 aa, Artificial Sequence
  Description of Artificial Sequence: Synthetic peptide
  Seed: LRMKWMMAMKYPITA
LRMKIMMQMSYPATA

SEQ ID NO: 230707 - protein, 15 aa, Artificial Sequence
  Description of Artificial Sequence: Synthetic peptide
  Seed: LRMKWMMAMKYPITA
LRMKIMMQMSYPCTA

SEQ ID NO: 230708 - protein, 15 aa, Artificial Sequence
  Description of Artificial Sequence: Synthetic peptide
  Seed: LRMKWMMAMKYPITA
LRMKIMMQMSYPDTA

SEQ ID NO: 230709 - protein, 15 aa, Artificial Sequence
  Description of Artificial Sequence: Synthetic peptide
  Seed: LRMKWMMAMKYPITA
LRMKIMMQMSYPETA

SEQ ID NO: 230710 - protein, 15 aa, Artificial Sequence
  Description of Artificial Sequence: Synthetic peptide
  Seed: LRMKWMMAMKYPITA
LRMKIMMQMSYPFTA

SEQ ID NO: 230711 - protein, 15 aa, Artificial Sequence
  Description of Artificial Sequence: Synthetic peptide
  Seed: LRMKWMMAMKYPITA
LRMKIMMQMSYPGTA

SEQ ID NO: 230712 - protein, 15 aa, Artificial Sequence
  Description of Artificial Sequence: Synthetic peptide
  Seed: LRMKWMMAMKYPITA
LRMKIMMQMSYPHTA

SEQ ID NO: 230713 - protein, 15 aa, Artificial Sequence
  Description of Artificial Sequence: Synthetic peptide
  Seed: LRMKWMMAMKYPITA
LRMKIMMQMSYPITA

SEQ ID NO: 230714 - protein, 15 aa, Artificial Sequence
  Description of Artificial Sequence: Synthetic peptide
  Seed: LRMKWMMAMKYPITA
LRMKIMMQMSYPKTA

SEQ ID NO: 230715 - protein, 15 aa, Artificial Sequence
  Description of Artificial Sequence: Synthetic peptide
  Seed: LRMKWMMAMKYPITA
LRMKIMMQMSYPLTA

SEQ ID NO: 230716 - protein, 15 aa, Artificial Sequence
  Description of Artificial Sequence: Synthetic peptide
  Seed: LRMKWMMAMKYPITA
LRMKIMMQMSYPMTA

SEQ ID NO: 230717 - protein, 15 aa, Artificial Sequence
  Description of Artificial Sequence: Synthetic peptide
  Seed: LRMKWMMAMKYPITA
LRMKIMMQMSYPNTA

SEQ ID NO: 230718 - protein, 15 aa, Artificial Sequence
  Description of Artificial Sequence: Synthetic peptide
  Seed: LRMKWMMAMKYPITA
LRMKIMMQMSYPPTA

SEQ ID NO: 230719 - protein, 15 aa, Artificial Sequence
  Description of Artificial Sequence: Synthetic peptide
  Seed: LRMKWMMAMKYPITA
LRMKIMMQMSYPQTA

SEQ ID NO: 230720 - protein, 15 aa, Artificial Sequence
  Description of Artificial Sequence: Synthetic peptide
  Seed: LRMKWMMAMKYPITA
LRMKIMMQMSYPRTA

SEQ ID NO: 230721 - protein, 15 aa, Artificial Sequence
  Description of Artificial Sequence: Synthetic peptide
  Seed: LRMKWMMAMKYPITA
LRMKIMMQMSYPSTA

SEQ ID NO: 230722 - protein, 15 aa, Artificial Sequence
  Description of Artificial Sequence: Synthetic peptide
  Seed: LRMKWMMAMKYPITA
LRMKIMMQMSYPTTA

SEQ ID NO: 230723 - protein, 15 aa, Artificial Sequence
  Description of Artificial Sequence: Synthetic peptide
  Seed: LRMKWMMAMKYPITA
LRMKIMMQMSYPVTA

SEQ ID NO: 230724 - protein, 15 aa, Artificial Sequence
  Description of Artificial Sequence: Synthetic peptide
  Seed: LRMKWMMAMKYPITA
LRMKIMMQMSYPYTA

SEQ ID NO: 230725 - protein, 15 aa, Artificial Sequence
  Description of Artificial Sequence: Synthetic peptide
  Seed: LRMKWMMAMKYPITA
LRMKIMMQMTYPATA

SEQ ID NO: 230726 - protein, 15 aa, Artificial Sequence
  Description of Artificial Sequence: Synthetic peptide
  Seed: LRMKWMMAMKYPITA
LRMKIMMQMTYPCTA

SEQ ID NO: 230727 - protein, 15 aa, Artificial Sequence
  Description of Artificial Sequence: Synthetic peptide
  Seed: LRMKWMMAMKYPITA
LRMKIMMQMTYPDTA

SEQ ID NO: 230728 - protein, 15 aa, Artificial Sequence
  Description of Artificial Sequence: Synthetic peptide
  Seed: LRMKWMMAMKYPITA
LRMKIMMQMTYPETA

SEQ ID NO: 230729 - protein, 15 aa, Artificial Sequence
  Description of Artificial Sequence: Synthetic peptide
  Seed: LRMKWMMAMKYPITA
LRMKIMMQMTYPFTA

SEQ ID NO: 230730 - protein, 15 aa, Artificial Sequence
  Description of Artificial Sequence: Synthetic peptide
  Seed: LRMKWMMAMKYPITA
LRMKIMMQMTYPGTA

SEQ ID NO: 230731 - protein, 15 aa, Artificial Sequence
  Description of Artificial Sequence: Synthetic peptide
  Seed: LRMKWMMAMKYPITA
LRMKIMMQMTYPHTA

SEQ ID NO: 230732 - protein, 15 aa, Artificial Sequence
  Description of Artificial Sequence: Synthetic peptide
  Seed: LRMKWMMAMKYPITA
LRMKIMMQMTYPITA

SEQ ID NO: 230733 - protein, 15 aa, Artificial Sequence
  Description of Artificial Sequence: Synthetic peptide
  Seed: LRMKWMMAMKYPITA
LRMKIMMQMTYPKTA

SEQ ID NO: 230734 - protein, 15 aa, Artificial Sequence
  Description of Artificial Sequence: Synthetic peptide
  Seed: LRMKWMMAMKYPITA
LRMKIMMQMTYPLTA

SEQ ID NO: 230735 - protein, 15 aa, Artificial Sequence
  Description of Artificial Sequence: Synthetic peptide
  Seed: LRMKWMMAMKYPITA
LRMKIMMQMTYPMTA

SEQ ID NO: 230736 - protein, 15 aa, Artificial Sequence
  Description of Artificial Sequence: Synthetic peptide
  Seed: LRMKWMMAMKYPITA
LRMKIMMQMTYPNTA

SEQ ID NO: 230737 - protein, 15 aa, Artificial Sequence
  Description of Artificial Sequence: Synthetic peptide
  Seed: LRMKWMMAMKYPITA
LRMKIMMQMTYPQTA

SEQ ID NO: 230738 - protein, 15 aa, Artificial Sequence
  Description of Artificial Sequence: Synthetic peptide
  Seed: LRMKWMMAMKYPITA
LRMKIMMQMTYPRTA

SEQ ID NO: 230739 - protein, 15 aa, Artificial Sequence
  Description of Artificial Sequence: Synthetic peptide
  Seed: LRMKWMMAMKYPITA
LRMKIMMQMTYPSTA

SEQ ID NO: 230740 - protein, 15 aa, Artificial Sequence
  Description of Artificial Sequence: Synthetic peptide
  Seed: LRMKWMMAMKYPITA
LRMKIMMQMTYPTTA

SEQ ID NO: 230741 - protein, 15 aa, Artificial Sequence
  Description of Artificial Sequence: Synthetic peptide
  Seed: LRMKWMMAMKYPITA
LRMKIMMQMTYPVTA

SEQ ID NO: 230742 - protein, 15 aa, Artificial Sequence
  Description of Artificial Sequence: Synthetic peptide
  Seed: LRMKWMMAMKYPITA
LRMKIMMQMTYPYTA

SEQ ID NO: 230743 - protein, 15 aa, Artificial Sequence
  Description of Artificial Sequence: Synthetic peptide
  Seed: LRMKWMMAMKYPITA
LRMKIMMQMVYPATA

SEQ ID NO: 230744 - protein, 15 aa, Artificial Sequence
  Description of Artificial Sequence: Synthetic peptide
  Seed: LRMKWMMAMKYPITA
LRMKIMMQMVYPCTA

SEQ ID NO: 230745 - protein, 15 aa, Artificial Sequence
  Description of Artificial Sequence: Synthetic peptide
  Seed: LRMKWMMAMKYPITA
LRMKIMMQMVYPDTA

SEQ ID NO: 230746 - protein, 15 aa, Artificial Sequence
  Description of Artificial Sequence: Synthetic peptide
  Seed: LRMKWMMAMKYPITA
LRMKIMMQMVYPETA

SEQ ID NO: 230747 - protein, 15 aa, Artificial Sequence
  Description of Artificial Sequence: Synthetic peptide
  Seed: LRMKWMMAMKYPITA
LRMKIMMQMVYPFTA

SEQ ID NO: 230748 - protein, 15 aa, Artificial Sequence
  Description of Artificial Sequence: Synthetic peptide
  Seed: LRMKWMMAMKYPITA
LRMKIMMQMVYPGTA

SEQ ID NO: 230749 - protein, 15 aa, Artificial Sequence
  Description of Artificial Sequence: Synthetic peptide
  Seed: LRMKWMMAMKYPITA
LRMKIMMQMVYPHTA

SEQ ID NO: 230750 - protein, 15 aa, Artificial Sequence
  Description of Artificial Sequence: Synthetic peptide
  Seed: LRMKWMMAMKYPITA
LRMKIMMQMVYPITA

SEQ ID NO: 230751 - protein, 15 aa, Artificial Sequence
  Description of Artificial Sequence: Synthetic peptide
  Seed: LRMKWMMAMKYPITA
LRMKIMMQMVYPKTA

SEQ ID NO: 230752 - protein, 15 aa, Artificial Sequence
  Description of Artificial Sequence: Synthetic peptide
  Seed: LRMKWMMAMKYPITA
LRMKIMMQMVYPLTA

SEQ ID NO: 230753 - protein, 15 aa, Artificial Sequence
  Description of Artificial Sequence: Synthetic peptide
  Seed: LRMKWMMAMKYPITA
LRMKIMMQMVYPMTA

SEQ ID NO: 230754 - protein, 15 aa, Artificial Sequence
  Description of Artificial Sequence: Synthetic peptide
  Seed: LRMKWMMAMKYPITA
LRMKIMMQMVYPNTA

SEQ ID NO: 230755 - protein, 15 aa, Artificial Sequence
  Description of Artificial Sequence: Synthetic peptide
  Seed: LRMKWMMAMKYPITA
LRMKIMMQMVYPQTA

SEQ ID NO: 230756 - protein, 15 aa, Artificial Sequence
  Description of Artificial Sequence: Synthetic peptide
  Seed: LRMKWMMAMKYPITA
LRMKIMMQMVYPRTA

SEQ ID NO: 230757 - protein, 15 aa, Artificial Sequence
  Description of Artificial Sequence: Synthetic peptide
  Seed: LRMKWMMAMKYPITA
LRMKIMMQMVYPSTA

SEQ ID NO: 230758 - protein, 15 aa, Artificial Sequence
  Description of Artificial Sequence: Synthetic peptide
  Seed: LRMKWMMAMKYPITA
LRMKIMMQMVYPTTA

SEQ ID NO: 230759 - protein, 15 aa, Artificial Sequence
  Description of Artificial Sequence: Synthetic peptide
  Seed: LRMKWMMAMKYPITA
LRMKIMMQMVYPVTA

SEQ ID NO: 230760 - protein, 15 aa, Artificial Sequence
  Description of Artificial Sequence: Synthetic peptide
  Seed: LRMKWMMAMKYPITA
LRMKIMMQMVYPYTA

SEQ ID NO: 230761 - protein, 15 aa, Artificial Sequence
  Description of Artificial Sequence: Synthetic peptide
  Seed: LRMKWMMAMKYPITA
LRMKIMMRMAYPATA

SEQ ID NO: 230762 - protein, 15 aa, Artificial Sequence
  Description of Artificial Sequence: Synthetic peptide
  Seed: LRMKWMMAMKYPITA
LRMKIMMRMAYPCTA

SEQ ID NO: 230763 - protein, 15 aa, Artificial Sequence
  Description of Artificial Sequence: Synthetic peptide
  Seed: LRMKWMMAMKYPITA
LRMKIMMRMAYPDTA

SEQ ID NO: 230764 - protein, 15 aa, Artificial Sequence
  Description of Artificial Sequence: Synthetic peptide
  Seed: LRMKWMMAMKYPITA
LRMKIMMRMAYPETA

SEQ ID NO: 230765 - protein, 15 aa, Artificial Sequence
  Description of Artificial Sequence: Synthetic peptide
  Seed: LRMKWMMAMKYPITA
LRMKIMMRMAYPFTA

SEQ ID NO: 230766 - protein, 15 aa, Artificial Sequence
  Description of Artificial Sequence: Synthetic peptide
  Seed: LRMKWMMAMKYPITA
LRMKIMMRMAYPGTA

SEQ ID NO: 230767 - protein, 15 aa, Artificial Sequence
  Description of Artificial Sequence: Synthetic peptide
  Seed: LRMKWMMAMKYPITA
LRMKIMMRMAYPHTA

SEQ ID NO: 230768 - protein, 15 aa, Artificial Sequence
  Description of Artificial Sequence: Synthetic peptide
  Seed: LRMKWMMAMKYPITA
LRMKIMMRMAYPITA

SEQ ID NO: 230769 - protein, 15 aa, Artificial Sequence
  Description of Artificial Sequence: Synthetic peptide
  Seed: LRMKWMMAMKYPITA
LRMKIMMRMAYPKTA

SEQ ID NO: 230770 - protein, 15 aa, Artificial Sequence
  Description of Artificial Sequence: Synthetic peptide
  Seed: LRMKWMMAMKYPITA
LRMKIMMRMAYPLTA

SEQ ID NO: 230771 - protein, 15 aa, Artificial Sequence
  Description of Artificial Sequence: Synthetic peptide
  Seed: LRMKWMMAMKYPITA
LRMKIMMRMAYPMTA

SEQ ID NO: 230772 - protein, 15 aa, Artificial Sequence
  Description of Artificial Sequence: Synthetic peptide
  Seed: LRMKWMMAMKYPITA
LRMKIMMRMAYPQTA

SEQ ID NO: 230773 - protein, 15 aa, Artificial Sequence
  Description of Artificial Sequence: Synthetic peptide
  Seed: LRMKWMMAMKYPITA
LRMKIMMRMAYPRTA

SEQ ID NO: 230774 - protein, 15 aa, Artificial Sequence
  Description of Artificial Sequence: Synthetic peptide
  Seed: LRMKWMMAMKYPITA
LRMKIMMRMAYPSTA

SEQ ID NO: 230775 - protein, 15 aa, Artificial Sequence
  Description of Artificial Sequence: Synthetic peptide
  Seed: LRMKWMMAMKYPITA
LRMKIMMRMAYPTTA

SEQ ID NO: 230776 - protein, 15 aa, Artificial Sequence
  Description of Artificial Sequence: Synthetic peptide
  Seed: LRMKWMMAMKYPITA
LRMKIMMRMAYPVTA

SEQ ID NO: 230777 - protein, 15 aa, Artificial Sequence
  Description of Artificial Sequence: Synthetic peptide
  Seed: LRMKWMMAMKYPITA
LRMKIMMRMAYPYTA

SEQ ID NO: 230778 - protein, 15 aa, Artificial Sequence
  Description of Artificial Sequence: Synthetic peptide
  Seed: LRMKWMMAMKYPITA
LRMKIMMRMCYPRTA

SEQ ID NO: 230779 - protein, 15 aa, Artificial Sequence
  Description of Artificial Sequence: Synthetic peptide
  Seed: LRMKWMMAMKYPITA
LRMKIMMRMCYPYTA

SEQ ID NO: 230780 - protein, 15 aa, Artificial Sequence
  Description of Artificial Sequence: Synthetic peptide
  Seed: LRMKWMMAMKYPITA
LRMKIMMRMDYPFTA

SEQ ID NO: 230781 - protein, 15 aa, Artificial Sequence
  Description of Artificial Sequence: Synthetic peptide
  Seed: LRMKWMMAMKYPITA
LRMKIMMRMDYPITA

SEQ ID NO: 230782 - protein, 15 aa, Artificial Sequence
  Description of Artificial Sequence: Synthetic peptide
  Seed: LRMKWMMAMKYPITA
LRMKIMMRMDYPLTA

SEQ ID NO: 230783 - protein, 15 aa, Artificial Sequence
  Description of Artificial Sequence: Synthetic peptide
  Seed: LRMKWMMAMKYPITA
LRMKIMMRMDYPMTA

SEQ ID NO: 230784 - protein, 15 aa, Artificial Sequence
  Description of Artificial Sequence: Synthetic peptide
  Seed: LRMKWMMAMKYPITA
LRMKIMMRMDYPRTA

SEQ ID NO: 230785 - protein, 15 aa, Artificial Sequence
  Description of Artificial Sequence: Synthetic peptide
  Seed: LRMKWMMAMKYPITA
LRMKIMMRMDYPVTA

SEQ ID NO: 230786 - protein, 15 aa, Artificial Sequence
  Description of Artificial Sequence: Synthetic peptide
  Seed: LRMKWMMAMKYPITA
LRMKIMMRMDYPYTA

SEQ ID NO: 230787 - protein, 15 aa, Artificial Sequence
  Description of Artificial Sequence: Synthetic peptide
  Seed: LRMKWMMAMKYPITA
LRMKIMMRMEYPFTA

SEQ ID NO: 230788 - protein, 15 aa, Artificial Sequence
  Description of Artificial Sequence: Synthetic peptide
  Seed: LRMKWMMAMKYPITA
LRMKIMMRMEYPITA

SEQ ID NO: 230789 - protein, 15 aa, Artificial Sequence
  Description of Artificial Sequence: Synthetic peptide
  Seed: LRMKWMMAMKYPITA
LRMKIMMRMEYPLTA

SEQ ID NO: 230790 - protein, 15 aa, Artificial Sequence
  Description of Artificial Sequence: Synthetic peptide
  Seed: LRMKWMMAMKYPITA
LRMKIMMRMEYPMTA

SEQ ID NO: 230791 - protein, 15 aa, Artificial Sequence
  Description of Artificial Sequence: Synthetic peptide
  Seed: LRMKWMMAMKYPITA
LRMKIMMRMEYPRTA

SEQ ID NO: 230792 - protein, 15 aa, Artificial Sequence
  Description of Artificial Sequence: Synthetic peptide
  Seed: LRMKWMMAMKYPITA
LRMKIMMRMEYPVTA

SEQ ID NO: 230793 - protein, 15 aa, Artificial Sequence
  Description of Artificial Sequence: Synthetic peptide
  Seed: LRMKWMMAMKYPITA
LRMKIMMRMEYPYTA

SEQ ID NO: 230794 - protein, 15 aa, Artificial Sequence
  Description of Artificial Sequence: Synthetic peptide
  Seed: LRMKWMMAMKYPITA
LRMKIMMRMGYPATA

SEQ ID NO: 230795 - protein, 15 aa, Artificial Sequence
  Description of Artificial Sequence: Synthetic peptide
  Seed: LRMKWMMAMKYPITA
LRMKIMMRMGYPITA

SEQ ID NO: 230796 - protein, 15 aa, Artificial Sequence
  Description of Artificial Sequence: Synthetic peptide
  Seed: LRMKWMMAMKYPITA
LRMKIMMRMGYPLTA

SEQ ID NO: 230797 - protein, 15 aa, Artificial Sequence
  Description of Artificial Sequence: Synthetic peptide
  Seed: LRMKWMMAMKYPITA
LRMKIMMRMGYPMTA

SEQ ID NO: 230798 - protein, 15 aa, Artificial Sequence
  Description of Artificial Sequence: Synthetic peptide
  Seed: LRMKWMMAMKYPITA
LRMKIMMRMGYPRTA

SEQ ID NO: 230799 - protein, 15 aa, Artificial Sequence
  Description of Artificial Sequence: Synthetic peptide
  Seed: LRMKWMMAMKYPITA
LRMKIMMRMGYPVTA

SEQ ID NO: 230800 - protein, 15 aa, Artificial Sequence
  Description of Artificial Sequence: Synthetic peptide
  Seed: LRMKWMMAMKYPITA
LRMKIMMRMGYPYTA

SEQ ID NO: 230801 - protein, 15 aa, Artificial Sequence
  Description of Artificial Sequence: Synthetic peptide
  Seed: LRMKWMMAMKYPITA
LRMKIMMRMHYPATA

SEQ ID NO: 230802 - protein, 15 aa, Artificial Sequence
  Description of Artificial Sequence: Synthetic peptide
  Seed: LRMKWMMAMKYPITA
LRMKIMMRMHYPDTA

SEQ ID NO: 230803 - protein, 15 aa, Artificial Sequence
  Description of Artificial Sequence: Synthetic peptide
  Seed: LRMKWMMAMKYPITA
LRMKIMMRMHYPETA

SEQ ID NO: 230804 - protein, 15 aa, Artificial Sequence
  Description of Artificial Sequence: Synthetic peptide
  Seed: LRMKWMMAMKYPITA
LRMKIMMRMHYPFTA

SEQ ID NO: 230805 - protein, 15 aa, Artificial Sequence
  Description of Artificial Sequence: Synthetic peptide
  Seed: LRMKWMMAMKYPITA
LRMKIMMRMHYPGTA

SEQ ID NO: 230806 - protein, 15 aa, Artificial Sequence
  Description of Artificial Sequence: Synthetic peptide
  Seed: LRMKWMMAMKYPITA
LRMKIMMRMHYPITA

SEQ ID NO: 230807 - protein, 15 aa, Artificial Sequence
  Description of Artificial Sequence: Synthetic peptide
  Seed: LRMKWMMAMKYPITA
LRMKIMMRMHYPLTA

SEQ ID NO: 230808 - protein, 15 aa, Artificial Sequence
  Description of Artificial Sequence: Synthetic peptide
  Seed: LRMKWMMAMKYPITA
LRMKIMMRMHYPMTA

SEQ ID NO: 230809 - protein, 15 aa, Artificial Sequence
  Description of Artificial Sequence: Synthetic peptide
  Seed: LRMKWMMAMKYPITA
LRMKIMMRMHYPQTA

SEQ ID NO: 230810 - protein, 15 aa, Artificial Sequence
  Description of Artificial Sequence: Synthetic peptide
  Seed: LRMKWMMAMKYPITA
LRMKIMMRMHYPRTA

SEQ ID NO: 230811 - protein, 15 aa, Artificial Sequence
  Description of Artificial Sequence: Synthetic peptide
  Seed: LRMKWMMAMKYPITA
LRMKIMMRMHYPSTA

SEQ ID NO: 230812 - protein, 15 aa, Artificial Sequence
  Description of Artificial Sequence: Synthetic peptide
  Seed: LRMKWMMAMKYPITA
LRMKIMMRMHYPVTA

SEQ ID NO: 230813 - protein, 15 aa, Artificial Sequence
  Description of Artificial Sequence: Synthetic peptide
  Seed: LRMKWMMAMKYPITA
LRMKIMMRMHYPYTA

SEQ ID NO: 230814 - protein, 15 aa, Artificial Sequence
  Description of Artificial Sequence: Synthetic peptide
  Seed: LRMKWMMAMKYPITA
LRMKIMMRMIYPFTA

SEQ ID NO: 230815 - protein, 15 aa, Artificial Sequence
  Description of Artificial Sequence: Synthetic peptide
  Seed: LRMKWMMAMKYPITA
LRMKIMMRMIYPITA

SEQ ID NO: 230816 - protein, 15 aa, Artificial Sequence
  Description of Artificial Sequence: Synthetic peptide
  Seed: LRMKWMMAMKYPITA
LRMKIMMRMIYPKTA

SEQ ID NO: 230817 - protein, 15 aa, Artificial Sequence
  Description of Artificial Sequence: Synthetic peptide
  Seed: LRMKWMMAMKYPITA
LRMKIMMRMIYPLTA

SEQ ID NO: 230818 - protein, 15 aa, Artificial Sequence
  Description of Artificial Sequence: Synthetic peptide
  Seed: LRMKWMMAMKYPITA
LRMKIMMRMIYPMTA

SEQ ID NO: 230819 - protein, 15 aa, Artificial Sequence
  Description of Artificial Sequence: Synthetic peptide
  Seed: LRMKWMMAMKYPITA
LRMKIMMRMIYPRTA

SEQ ID NO: 230820 - protein, 15 aa, Artificial Sequence
  Description of Artificial Sequence: Synthetic peptide
  Seed: LRMKWMMAMKYPITA
LRMKIMMRMIYPVTA

SEQ ID NO: 230821 - protein, 15 aa, Artificial Sequence
  Description of Artificial Sequence: Synthetic peptide
  Seed: LRMKWMMAMKYPITA
LRMKIMMRMIYPYTA

SEQ ID NO: 230822 - protein, 15 aa, Artificial Sequence
  Description of Artificial Sequence: Synthetic peptide
  Seed: LRMKWMMAMKYPITA
LRMKIMMRMKYPATA

SEQ ID NO: 230823 - protein, 15 aa, Artificial Sequence
  Description of Artificial Sequence: Synthetic peptide
  Seed: LRMKWMMAMKYPITA
LRMKIMMRMKYPCTA

SEQ ID NO: 230824 - protein, 15 aa, Artificial Sequence
  Description of Artificial Sequence: Synthetic peptide
  Seed: LRMKWMMAMKYPITA
LRMKIMMRMKYPDTA

SEQ ID NO: 230825 - protein, 15 aa, Artificial Sequence
  Description of Artificial Sequence: Synthetic peptide
  Seed: LRMKWMMAMKYPITA
LRMKIMMRMKYPETA

SEQ ID NO: 230826 - protein, 15 aa, Artificial Sequence
  Description of Artificial Sequence: Synthetic peptide
  Seed: LRMKWMMAMKYPITA
LRMKIMMRMKYPFTA

SEQ ID NO: 230827 - protein, 15 aa, Artificial Sequence
  Description of Artificial Sequence: Synthetic peptide
  Seed: LRMKWMMAMKYPITA
LRMKIMMRMKYPGTA

SEQ ID NO: 230828 - protein, 15 aa, Artificial Sequence
  Description of Artificial Sequence: Synthetic peptide
  Seed: LRMKWMMAMKYPITA
LRMKIMMRMKYPHTA

SEQ ID NO: 230829 - protein, 15 aa, Artificial Sequence
  Description of Artificial Sequence: Synthetic peptide
  Seed: LRMKWMMAMKYPITA
LRMKIMMRMKYPITA

SEQ ID NO: 230830 - protein, 15 aa, Artificial Sequence
  Description of Artificial Sequence: Synthetic peptide
  Seed: LRMKWMMAMKYPITA
LRMKIMMRMKYPKTA

SEQ ID NO: 230831 - protein, 15 aa, Artificial Sequence
  Description of Artificial Sequence: Synthetic peptide
  Seed: LRMKWMMAMKYPITA
LRMKIMMRMKYPLTA

SEQ ID NO: 230832 - protein, 15 aa, Artificial Sequence
  Description of Artificial Sequence: Synthetic peptide
  Seed: LRMKWMMAMKYPITA
LRMKIMMRMKYPMTA

SEQ ID NO: 230833 - protein, 15 aa, Artificial Sequence
  Description of Artificial Sequence: Synthetic peptide
  Seed: LRMKWMMAMKYPITA
LRMKIMMRMKYPNTA

SEQ ID NO: 230834 - protein, 15 aa, Artificial Sequence
  Description of Artificial Sequence: Synthetic peptide
  Seed: LRMKWMMAMKYPITA
LRMKIMMRMKYPPTA

SEQ ID NO: 230835 - protein, 15 aa, Artificial Sequence
  Description of Artificial Sequence: Synthetic peptide
  Seed: LRMKWMMAMKYPITA
LRMKIMMRMKYPQTA

SEQ ID NO: 230836 - protein, 15 aa, Artificial Sequence
  Description of Artificial Sequence: Synthetic peptide
  Seed: LRMKWMMAMKYPITA
LRMKIMMRMKYPRTA

SEQ ID NO: 230837 - protein, 15 aa, Artificial Sequence
  Description of Artificial Sequence: Synthetic peptide
  Seed: LRMKWMMAMKYPITA
LRMKIMMRMKYPSTA

SEQ ID NO: 230838 - protein, 15 aa, Artificial Sequence
  Description of Artificial Sequence: Synthetic peptide
  Seed: LRMKWMMAMKYPITA
LRMKIMMRMKYPTTA

SEQ ID NO: 230839 - protein, 15 aa, Artificial Sequence
  Description of Artificial Sequence: Synthetic peptide
  Seed: LRMKWMMAMKYPITA
LRMKIMMRMKYPVTA

SEQ ID NO: 230840 - protein, 15 aa, Artificial Sequence
  Description of Artificial Sequence: Synthetic peptide
  Seed: LRMKWMMAMKYPITA
LRMKIMMRMKYPYTA

SEQ ID NO: 230841 - protein, 15 aa, Artificial Sequence
  Description of Artificial Sequence: Synthetic peptide
  Seed: LRMKWMMAMKYPITA
LRMKIMMRMLYPRTA

SEQ ID NO: 230842 - protein, 15 aa, Artificial Sequence
  Description of Artificial Sequence: Synthetic peptide
  Seed: LRMKWMMAMKYPITA
LRMKIMMRMLYPYTA

SEQ ID NO: 230843 - protein, 15 aa, Artificial Sequence
  Description of Artificial Sequence: Synthetic peptide
  Seed: LRMKWMMAMKYPITA
LRMKIMMRMMYPRTA

SEQ ID NO: 230844 - protein, 15 aa, Artificial Sequence
  Description of Artificial Sequence: Synthetic peptide
  Seed: LRMKWMMAMKYPITA
LRMKIMMRMNYPATA

SEQ ID NO: 230845 - protein, 15 aa, Artificial Sequence
  Description of Artificial Sequence: Synthetic peptide
  Seed: LRMKWMMAMKYPITA
LRMKIMMRMNYPCTA

SEQ ID NO: 230846 - protein, 15 aa, Artificial Sequence
  Description of Artificial Sequence: Synthetic peptide
  Seed: LRMKWMMAMKYPITA
LRMKIMMRMNYPETA

SEQ ID NO: 230847 - protein, 15 aa, Artificial Sequence
  Description of Artificial Sequence: Synthetic peptide
  Seed: LRMKWMMAMKYPITA
LRMKIMMRMNYPFTA

SEQ ID NO: 230848 - protein, 15 aa, Artificial Sequence
  Description of Artificial Sequence: Synthetic peptide
  Seed: LRMKWMMAMKYPITA
LRMKIMMRMNYPGTA

SEQ ID NO: 230849 - protein, 15 aa, Artificial Sequence
  Description of Artificial Sequence: Synthetic peptide
  Seed: LRMKWMMAMKYPITA
LRMKIMMRMNYPHTA

SEQ ID NO: 230850 - protein, 15 aa, Artificial Sequence
  Description of Artificial Sequence: Synthetic peptide
  Seed: LRMKWMMAMKYPITA
LRMKIMMRMNYPITA

SEQ ID NO: 230851 - protein, 15 aa, Artificial Sequence
  Description of Artificial Sequence: Synthetic peptide
  Seed: LRMKWMMAMKYPITA
LRMKIMMRMNYPKTA

SEQ ID NO: 230852 - protein, 15 aa, Artificial Sequence
  Description of Artificial Sequence: Synthetic peptide
  Seed: LRMKWMMAMKYPITA
LRMKIMMRMNYPLTA

SEQ ID NO: 230853 - protein, 15 aa, Artificial Sequence
  Description of Artificial Sequence: Synthetic peptide
  Seed: LRMKWMMAMKYPITA
LRMKIMMRMNYPMTA

SEQ ID NO: 230854 - protein, 15 aa, Artificial Sequence
  Description of Artificial Sequence: Synthetic peptide
  Seed: LRMKWMMAMKYPITA
LRMKIMMRMNYPQTA

SEQ ID NO: 230855 - protein, 15 aa, Artificial Sequence
  Description of Artificial Sequence: Synthetic peptide
  Seed: LRMKWMMAMKYPITA
LRMKIMMRMNYPRTA

SEQ ID NO: 230856 - protein, 15 aa, Artificial Sequence
  Description of Artificial Sequence: Synthetic peptide
  Seed: LRMKWMMAMKYPITA
LRMKIMMRMNYPSTA

SEQ ID NO: 230857 - protein, 15 aa, Artificial Sequence
  Description of Artificial Sequence: Synthetic peptide
  Seed: LRMKWMMAMKYPITA
LRMKIMMRMNYPVTA

SEQ ID NO: 230858 - protein, 15 aa, Artificial Sequence
  Description of Artificial Sequence: Synthetic peptide
  Seed: LRMKWMMAMKYPITA
LRMKIMMRMNYPYTA

SEQ ID NO: 230859 - protein, 15 aa, Artificial Sequence
  Description of Artificial Sequence: Synthetic peptide
  Seed: LRMKWMMAMKYPITA
LRMKIMMRMPYPATA

SEQ ID NO: 230860 - protein, 15 aa, Artificial Sequence
  Description of Artificial Sequence: Synthetic peptide
  Seed: LRMKWMMAMKYPITA
LRMKIMMRMPYPLTA

SEQ ID NO: 230861 - protein, 15 aa, Artificial Sequence
  Description of Artificial Sequence: Synthetic peptide
  Seed: LRMKWMMAMKYPITA
LRMKIMMRMPYPQTA

SEQ ID NO: 230862 - protein, 15 aa, Artificial Sequence
  Description of Artificial Sequence: Synthetic peptide
  Seed: LRMKWMMAMKYPITA
LRMKIMMRMPYPRTA

SEQ ID NO: 230863 - protein, 15 aa, Artificial Sequence
  Description of Artificial Sequence: Synthetic peptide
  Seed: LRMKWMMAMKYPITA
LRMKIMMRMPYPYTA

SEQ ID NO: 230864 - protein, 15 aa, Artificial Sequence
  Description of Artificial Sequence: Synthetic peptide
  Seed: LRMKWMMAMKYPITA
LRMKIMMRMQYPATA

SEQ ID NO: 230865 - protein, 15 aa, Artificial Sequence
  Description of Artificial Sequence: Synthetic peptide
  Seed: LRMKWMMAMKYPITA
LRMKIMMRMQYPETA

SEQ ID NO: 230866 - protein, 15 aa, Artificial Sequence
  Description of Artificial Sequence: Synthetic peptide
  Seed: LRMKWMMAMKYPITA
LRMKIMMRMQYPFTA

SEQ ID NO: 230867 - protein, 15 aa, Artificial Sequence
  Description of Artificial Sequence: Synthetic peptide
  Seed: LRMKWMMAMKYPITA
LRMKIMMRMQYPITA

SEQ ID NO: 230868 - protein, 15 aa, Artificial Sequence
  Description of Artificial Sequence: Synthetic peptide
  Seed: LRMKWMMAMKYPITA
LRMKIMMRMQYPKTA

SEQ ID NO: 230869 - protein, 15 aa, Artificial Sequence
  Description of Artificial Sequence: Synthetic peptide
  Seed: LRMKWMMAMKYPITA
LRMKIMMRMQYPLTA

SEQ ID NO: 230870 - protein, 15 aa, Artificial Sequence
  Description of Artificial Sequence: Synthetic peptide
  Seed: LRMKWMMAMKYPITA
LRMKIMMRMQYPMTA

SEQ ID NO: 230871 - protein, 15 aa, Artificial Sequence
  Description of Artificial Sequence: Synthetic peptide
  Seed: LRMKWMMAMKYPITA
LRMKIMMRMQYPRTA

SEQ ID NO: 230872 - protein, 15 aa, Artificial Sequence
  Description of Artificial Sequence: Synthetic peptide
  Seed: LRMKWMMAMKYPITA
LRMKIMMRMQYPVTA

SEQ ID NO: 230873 - protein, 15 aa, Artificial Sequence
  Description of Artificial Sequence: Synthetic peptide
  Seed: LRMKWMMAMKYPITA
LRMKIMMRMQYPYTA

SEQ ID NO: 230874 - protein, 15 aa, Artificial Sequence
  Description of Artificial Sequence: Synthetic peptide
  Seed: LRMKWMMAMKYPITA
LRMKIMMRMRYPATA

SEQ ID NO: 230875 - protein, 15 aa, Artificial Sequence
  Description of Artificial Sequence: Synthetic peptide
  Seed: LRMKWMMAMKYPITA
LRMKIMMRMRYPCTA

SEQ ID NO: 230876 - protein, 15 aa, Artificial Sequence
  Description of Artificial Sequence: Synthetic peptide
  Seed: LRMKWMMAMKYPITA
LRMKIMMRMRYPDTA

SEQ ID NO: 230877 - protein, 15 aa, Artificial Sequence
  Description of Artificial Sequence: Synthetic peptide
  Seed: LRMKWMMAMKYPITA
LRMKIMMRMRYPETA

SEQ ID NO: 230878 - protein, 15 aa, Artificial Sequence
  Description of Artificial Sequence: Synthetic peptide
  Seed: LRMKWMMAMKYPITA
LRMKIMMRMRYPFTA

SEQ ID NO: 230879 - protein, 15 aa, Artificial Sequence
  Description of Artificial Sequence: Synthetic peptide
  Seed: LRMKWMMAMKYPITA
LRMKIMMRMRYPGTA

SEQ ID NO: 230880 - protein, 15 aa, Artificial Sequence
  Description of Artificial Sequence: Synthetic peptide
  Seed: LRMKWMMAMKYPITA
LRMKIMMRMRYPHTA

SEQ ID NO: 230881 - protein, 15 aa, Artificial Sequence
  Description of Artificial Sequence: Synthetic peptide
  Seed: LRMKWMMAMKYPITA
LRMKIMMRMRYPITA

SEQ ID NO: 230882 - protein, 15 aa, Artificial Sequence
  Description of Artificial Sequence: Synthetic peptide
  Seed: LRMKWMMAMKYPITA
LRMKIMMRMRYPKTA

SEQ ID NO: 230883 - protein, 15 aa, Artificial Sequence
  Description of Artificial Sequence: Synthetic peptide
  Seed: LRMKWMMAMKYPITA
LRMKIMMRMRYPLTA

SEQ ID NO: 230884 - protein, 15 aa, Artificial Sequence
  Description of Artificial Sequence: Synthetic peptide
  Seed: LRMKWMMAMKYPITA
LRMKIMMRMRYPMTA

SEQ ID NO: 230885 - protein, 15 aa, Artificial Sequence
  Description of Artificial Sequence: Synthetic peptide
  Seed: LRMKWMMAMKYPITA
LRMKIMMRMRYPNTA

SEQ ID NO: 230886 - protein, 15 aa, Artificial Sequence
  Description of Artificial Sequence: Synthetic peptide
  Seed: LRMKWMMAMKYPITA
LRMKIMMRMRYPQTA

SEQ ID NO: 230887 - protein, 15 aa, Artificial Sequence
  Description of Artificial Sequence: Synthetic peptide
  Seed: LRMKWMMAMKYPITA
LRMKIMMRMRYPRTA

SEQ ID NO: 230888 - protein, 15 aa, Artificial Sequence
  Description of Artificial Sequence: Synthetic peptide
  Seed: LRMKWMMAMKYPITA
LRMKIMMRMRYPSTA

SEQ ID NO: 230889 - protein, 15 aa, Artificial Sequence
  Description of Artificial Sequence: Synthetic peptide
  Seed: LRMKWMMAMKYPITA
LRMKIMMRMRYPTTA

SEQ ID NO: 230890 - protein, 15 aa, Artificial Sequence
  Description of Artificial Sequence: Synthetic peptide
  Seed: LRMKWMMAMKYPITA
LRMKIMMRMRYPVTA

SEQ ID NO: 230891 - protein, 15 aa, Artificial Sequence
  Description of Artificial Sequence: Synthetic peptide
  Seed: LRMKWMMAMKYPITA
LRMKIMMRMRYPYTA

SEQ ID NO: 230892 - protein, 15 aa, Artificial Sequence
  Description of Artificial Sequence: Synthetic peptide
  Seed: LRMKWMMAMKYPITA
LRMKIMMRMSYPATA

SEQ ID NO: 230893 - protein, 15 aa, Artificial Sequence
  Description of Artificial Sequence: Synthetic peptide
  Seed: LRMKWMMAMKYPITA
LRMKIMMRMSYPCTA

SEQ ID NO: 230894 - protein, 15 aa, Artificial Sequence
  Description of Artificial Sequence: Synthetic peptide
  Seed: LRMKWMMAMKYPITA
LRMKIMMRMSYPDTA

SEQ ID NO: 230895 - protein, 15 aa, Artificial Sequence
  Description of Artificial Sequence: Synthetic peptide
  Seed: LRMKWMMAMKYPITA
LRMKIMMRMSYPETA

SEQ ID NO: 230896 - protein, 15 aa, Artificial Sequence
  Description of Artificial Sequence: Synthetic peptide
  Seed: LRMKWMMAMKYPITA
LRMKIMMRMSYPFTA

SEQ ID NO: 230897 - protein, 15 aa, Artificial Sequence
  Description of Artificial Sequence: Synthetic peptide
  Seed: LRMKWMMAMKYPITA
LRMKIMMRMSYPGTA

SEQ ID NO: 230898 - protein, 15 aa, Artificial Sequence
  Description of Artificial Sequence: Synthetic peptide
  Seed: LRMKWMMAMKYPITA
LRMKIMMRMSYPHTA

SEQ ID NO: 230899 - protein, 15 aa, Artificial Sequence
  Description of Artificial Sequence: Synthetic peptide
  Seed: LRMKWMMAMKYPITA
LRMKIMMRMSYPITA

SEQ ID NO: 230900 - protein, 15 aa, Artificial Sequence
  Description of Artificial Sequence: Synthetic peptide
  Seed: LRMKWMMAMKYPITA
LRMKIMMRMSYPKTA

SEQ ID NO: 230901 - protein, 15 aa, Artificial Sequence
  Description of Artificial Sequence: Synthetic peptide
  Seed: LRMKWMMAMKYPITA
LRMKIMMRMSYPLTA

SEQ ID NO: 230902 - protein, 15 aa, Artificial Sequence
  Description of Artificial Sequence: Synthetic peptide
  Seed: LRMKWMMAMKYPITA
LRMKIMMRMSYPMTA

SEQ ID NO: 230903 - protein, 15 aa, Artificial Sequence
  Description of Artificial Sequence: Synthetic peptide
  Seed: LRMKWMMAMKYPITA
LRMKIMMRMSYPQTA

SEQ ID NO: 230904 - protein, 15 aa, Artificial Sequence
  Description of Artificial Sequence: Synthetic peptide
  Seed: LRMKWMMAMKYPITA
LRMKIMMRMSYPRTA

SEQ ID NO: 230905 - protein, 15 aa, Artificial Sequence
  Description of Artificial Sequence: Synthetic peptide
  Seed: LRMKWMMAMKYPITA
LRMKIMMRMSYPSTA

SEQ ID NO: 230906 - protein, 15 aa, Artificial Sequence
  Description of Artificial Sequence: Synthetic peptide
  Seed: LRMKWMMAMKYPITA
LRMKIMMRMSYPVTA

SEQ ID NO: 230907 - protein, 15 aa, Artificial Sequence
  Description of Artificial Sequence: Synthetic peptide
  Seed: LRMKWMMAMKYPITA
LRMKIMMRMSYPYTA

SEQ ID NO: 230908 - protein, 15 aa, Artificial Sequence
  Description of Artificial Sequence: Synthetic peptide
  Seed: LRMKWMMAMKYPITA
LRMKIMMRMTYPATA

SEQ ID NO: 230909 - protein, 15 aa, Artificial Sequence
  Description of Artificial Sequence: Synthetic peptide
  Seed: LRMKWMMAMKYPITA
LRMKIMMRMTYPETA

SEQ ID NO: 230910 - protein, 15 aa, Artificial Sequence
  Description of Artificial Sequence: Synthetic peptide
  Seed: LRMKWMMAMKYPITA
LRMKIMMRMTYPFTA

SEQ ID NO: 230911 - protein, 15 aa, Artificial Sequence
  Description of Artificial Sequence: Synthetic peptide
  Seed: LRMKWMMAMKYPITA
LRMKIMMRMTYPGTA

SEQ ID NO: 230912 - protein, 15 aa, Artificial Sequence
  Description of Artificial Sequence: Synthetic peptide
  Seed: LRMKWMMAMKYPITA
LRMKIMMRMTYPHTA

SEQ ID NO: 230913 - protein, 15 aa, Artificial Sequence
  Description of Artificial Sequence: Synthetic peptide
  Seed: LRMKWMMAMKYPITA
LRMKIMMRMTYPITA

SEQ ID NO: 230914 - protein, 15 aa, Artificial Sequence
  Description of Artificial Sequence: Synthetic peptide
  Seed: LRMKWMMAMKYPITA
LRMKIMMRMTYPKTA

SEQ ID NO: 230915 - protein, 15 aa, Artificial Sequence
  Description of Artificial Sequence: Synthetic peptide
  Seed: LRMKWMMAMKYPITA
LRMKIMMRMTYPLTA

SEQ ID NO: 230916 - protein, 15 aa, Artificial Sequence
  Description of Artificial Sequence: Synthetic peptide
  Seed: LRMKWMMAMKYPITA
LRMKIMMRMTYPMTA

SEQ ID NO: 230917 - protein, 15 aa, Artificial Sequence
  Description of Artificial Sequence: Synthetic peptide
  Seed: LRMKWMMAMKYPITA
LRMKIMMRMTYPQTA

SEQ ID NO: 230918 - protein, 15 aa, Artificial Sequence
  Description of Artificial Sequence: Synthetic peptide
  Seed: LRMKWMMAMKYPITA
LRMKIMMRMTYPRTA

SEQ ID NO: 230919 - protein, 15 aa, Artificial Sequence
  Description of Artificial Sequence: Synthetic peptide
  Seed: LRMKWMMAMKYPITA
LRMKIMMRMTYPSTA

SEQ ID NO: 230920 - protein, 15 aa, Artificial Sequence
  Description of Artificial Sequence: Synthetic peptide
  Seed: LRMKWMMAMKYPITA
LRMKIMMRMTYPVTA

SEQ ID NO: 230921 - protein, 15 aa, Artificial Sequence
  Description of Artificial Sequence: Synthetic peptide
  Seed: LRMKWMMAMKYPITA
LRMKIMMRMTYPYTA

SEQ ID NO: 230922 - protein, 15 aa, Artificial Sequence
  Description of Artificial Sequence: Synthetic peptide
  Seed: LRMKWMMAMKYPITA
LRMKIMMRMVYPATA

SEQ ID NO: 230923 - protein, 15 aa, Artificial Sequence
  Description of Artificial Sequence: Synthetic peptide
  Seed: LRMKWMMAMKYPITA
LRMKIMMRMVYPFTA

SEQ ID NO: 230924 - protein, 15 aa, Artificial Sequence
  Description of Artificial Sequence: Synthetic peptide
  Seed: LRMKWMMAMKYPITA
LRMKIMMRMVYPHTA

SEQ ID NO: 230925 - protein, 15 aa, Artificial Sequence
  Description of Artificial Sequence: Synthetic peptide
  Seed: LRMKWMMAMKYPITA
LRMKIMMRMVYPITA

SEQ ID NO: 230926 - protein, 15 aa, Artificial Sequence
  Description of Artificial Sequence: Synthetic peptide
  Seed: LRMKWMMAMKYPITA
LRMKIMMRMVYPKTA

SEQ ID NO: 230927 - protein, 15 aa, Artificial Sequence
  Description of Artificial Sequence: Synthetic peptide
  Seed: LRMKWMMAMKYPITA
LRMKIMMRMVYPLTA

SEQ ID NO: 230928 - protein, 15 aa, Artificial Sequence
  Description of Artificial Sequence: Synthetic peptide
  Seed: LRMKWMMAMKYPITA
LRMKIMMRMVYPMTA

SEQ ID NO: 230929 - protein, 15 aa, Artificial Sequence
  Description of Artificial Sequence: Synthetic peptide
  Seed: LRMKWMMAMKYPITA
LRMKIMMRMVYPRTA

SEQ ID NO: 230930 - protein, 15 aa, Artificial Sequence
  Description of Artificial Sequence: Synthetic peptide
  Seed: LRMKWMMAMKYPITA
LRMKIMMRMVYPVTA

SEQ ID NO: 230931 - protein, 15 aa, Artificial Sequence
  Description of Artificial Sequence: Synthetic peptide
  Seed: LRMKWMMAMKYPITA
LRMKIMMRMVYPYTA

SEQ ID NO: 230932 - protein, 15 aa, Artificial Sequence
  Description of Artificial Sequence: Synthetic peptide
  Seed: LRMKWMMAMKYPITA
LRMKIMMSMAYPATA

SEQ ID NO: 230933 - protein, 15 aa, Artificial Sequence
  Description of Artificial Sequence: Synthetic peptide
  Seed: LRMKWMMAMKYPITA
LRMKIMMSMAYPCTA

SEQ ID NO: 230934 - protein, 15 aa, Artificial Sequence
  Description of Artificial Sequence: Synthetic peptide
  Seed: LRMKWMMAMKYPITA
LRMKIMMSMAYPDTA

SEQ ID NO: 230935 - protein, 15 aa, Artificial Sequence
  Description of Artificial Sequence: Synthetic peptide
  Seed: LRMKWMMAMKYPITA
LRMKIMMSMAYPETA

SEQ ID NO: 230936 - protein, 15 aa, Artificial Sequence
  Description of Artificial Sequence: Synthetic peptide
  Seed: LRMKWMMAMKYPITA
LRMKIMMSMAYPFTA

SEQ ID NO: 230937 - protein, 15 aa, Artificial Sequence
  Description of Artificial Sequence: Synthetic peptide
  Seed: LRMKWMMAMKYPITA
LRMKIMMSMAYPGTA

SEQ ID NO: 230938 - protein, 15 aa, Artificial Sequence
  Description of Artificial Sequence: Synthetic peptide
  Seed: LRMKWMMAMKYPITA
LRMKIMMSMAYPHTA

SEQ ID NO: 230939 - protein, 15 aa, Artificial Sequence
  Description of Artificial Sequence: Synthetic peptide
  Seed: LRMKWMMAMKYPITA
LRMKIMMSMAYPITA

SEQ ID NO: 230940 - protein, 15 aa, Artificial Sequence
  Description of Artificial Sequence: Synthetic peptide
  Seed: LRMKWMMAMKYPITA
LRMKIMMSMAYPKTA

SEQ ID NO: 230941 - protein, 15 aa, Artificial Sequence
  Description of Artificial Sequence: Synthetic peptide
  Seed: LRMKWMMAMKYPITA
LRMKIMMSMAYPLTA

SEQ ID NO: 230942 - protein, 15 aa, Artificial Sequence
  Description of Artificial Sequence: Synthetic peptide
  Seed: LRMKWMMAMKYPITA
LRMKIMMSMAYPMTA

SEQ ID NO: 230943 - protein, 15 aa, Artificial Sequence
  Description of Artificial Sequence: Synthetic peptide
  Seed: LRMKWMMAMKYPITA
LRMKIMMSMAYPNTA

SEQ ID NO: 230944 - protein, 15 aa, Artificial Sequence
  Description of Artificial Sequence: Synthetic peptide
  Seed: LRMKWMMAMKYPITA
LRMKIMMSMAYPPTA

SEQ ID NO: 230945 - protein, 15 aa, Artificial Sequence
  Description of Artificial Sequence: Synthetic peptide
  Seed: LRMKWMMAMKYPITA
LRMKIMMSMAYPQTA

SEQ ID NO: 230946 - protein, 15 aa, Artificial Sequence
  Description of Artificial Sequence: Synthetic peptide
  Seed: LRMKWMMAMKYPITA
LRMKIMMSMAYPRTA

SEQ ID NO: 230947 - protein, 15 aa, Artificial Sequence
  Description of Artificial Sequence: Synthetic peptide
  Seed: LRMKWMMAMKYPITA
LRMKIMMSMAYPSTA

SEQ ID NO: 230948 - protein, 15 aa, Artificial Sequence
  Description of Artificial Sequence: Synthetic peptide
  Seed: LRMKWMMAMKYPITA
LRMKIMMSMAYPTTA

SEQ ID NO: 230949 - protein, 15 aa, Artificial Sequence
  Description of Artificial Sequence: Synthetic peptide
  Seed: LRMKWMMAMKYPITA
LRMKIMMSMAYPVTA

SEQ ID NO: 230950 - protein, 15 aa, Artificial Sequence
  Description of Artificial Sequence: Synthetic peptide
  Seed: LRMKWMMAMKYPITA
LRMKIMMSMAYPWTA

SEQ ID NO: 230951 - protein, 15 aa, Artificial Sequence
  Description of Artificial Sequence: Synthetic peptide
  Seed: LRMKWMMAMKYPITA
LRMKIMMSMAYPYTA

SEQ ID NO: 230952 - protein, 15 aa, Artificial Sequence
  Description of Artificial Sequence: Synthetic peptide
  Seed: LRMKWMMAMKYPITA
LRMKIMMSMCYPATA

SEQ ID NO: 230953 - protein, 15 aa, Artificial Sequence
  Description of Artificial Sequence: Synthetic peptide
  Seed: LRMKWMMAMKYPITA
LRMKIMMSMCYPITA

SEQ ID NO: 230954 - protein, 15 aa, Artificial Sequence
  Description of Artificial Sequence: Synthetic peptide
  Seed: LRMKWMMAMKYPITA
LRMKIMMSMCYPLTA

SEQ ID NO: 230955 - protein, 15 aa, Artificial Sequence
  Description of Artificial Sequence: Synthetic peptide
  Seed: LRMKWMMAMKYPITA
LRMKIMMSMCYPMTA

SEQ ID NO: 230956 - protein, 15 aa, Artificial Sequence
  Description of Artificial Sequence: Synthetic peptide
  Seed: LRMKWMMAMKYPITA
LRMKIMMSMCYPRTA

SEQ ID NO: 230957 - protein, 15 aa, Artificial Sequence
  Description of Artificial Sequence: Synthetic peptide
  Seed: LRMKWMMAMKYPITA
LRMKIMMSMCYPVTA

SEQ ID NO: 230958 - protein, 15 aa, Artificial Sequence
  Description of Artificial Sequence: Synthetic peptide
  Seed: LRMKWMMAMKYPITA
LRMKIMMSMCYPYTA

SEQ ID NO: 230959 - protein, 15 aa, Artificial Sequence
  Description of Artificial Sequence: Synthetic peptide
  Seed: LRMKWMMAMKYPITA
LRMKIMMSMDYPATA

SEQ ID NO: 230960 - protein, 15 aa, Artificial Sequence
  Description of Artificial Sequence: Synthetic peptide
  Seed: LRMKWMMAMKYPITA
LRMKIMMSMDYPITA

SEQ ID NO: 230961 - protein, 15 aa, Artificial Sequence
  Description of Artificial Sequence: Synthetic peptide
  Seed: LRMKWMMAMKYPITA
LRMKIMMSMDYPLTA

SEQ ID NO: 230962 - protein, 15 aa, Artificial Sequence
  Description of Artificial Sequence: Synthetic peptide
  Seed: LRMKWMMAMKYPITA
LRMKIMMSMDYPVTA

SEQ ID NO: 230963 - protein, 15 aa, Artificial Sequence
  Description of Artificial Sequence: Synthetic peptide
  Seed: LRMKWMMAMKYPITA
LRMKIMMSMDYPYTA

SEQ ID NO: 230964 - protein, 15 aa, Artificial Sequence
  Description of Artificial Sequence: Synthetic peptide
  Seed: LRMKWMMAMKYPITA
LRMKIMMSMEYPITA

SEQ ID NO: 230965 - protein, 15 aa, Artificial Sequence
  Description of Artificial Sequence: Synthetic peptide
  Seed: LRMKWMMAMKYPITA
LRMKIMMSMEYPLTA

SEQ ID NO: 230966 - protein, 15 aa, Artificial Sequence
  Description of Artificial Sequence: Synthetic peptide
  Seed: LRMKWMMAMKYPITA
LRMKIMMSMEYPRTA

SEQ ID NO: 230967 - protein, 15 aa, Artificial Sequence
  Description of Artificial Sequence: Synthetic peptide
  Seed: LRMKWMMAMKYPITA
LRMKIMMSMEYPVTA

SEQ ID NO: 230968 - protein, 15 aa, Artificial Sequence
  Description of Artificial Sequence: Synthetic peptide
  Seed: LRMKWMMAMKYPITA
LRMKIMMSMEYPYTA

SEQ ID NO: 230969 - protein, 15 aa, Artificial Sequence
  Description of Artificial Sequence: Synthetic peptide
  Seed: LRMKWMMAMKYPITA
LRMKIMMSMFYPATA

SEQ ID NO: 230970 - protein, 15 aa, Artificial Sequence
  Description of Artificial Sequence: Synthetic peptide
  Seed: LRMKWMMAMKYPITA
LRMKIMMSMFYPFTA

SEQ ID NO: 230971 - protein, 15 aa, Artificial Sequence
  Description of Artificial Sequence: Synthetic peptide
  Seed: LRMKWMMAMKYPITA
LRMKIMMSMFYPITA

SEQ ID NO: 230972 - protein, 15 aa, Artificial Sequence
  Description of Artificial Sequence: Synthetic peptide
  Seed: LRMKWMMAMKYPITA
LRMKIMMSMFYPLTA

SEQ ID NO: 230973 - protein, 15 aa, Artificial Sequence
  Description of Artificial Sequence: Synthetic peptide
  Seed: LRMKWMMAMKYPITA
LRMKIMMSMFYPMTA

SEQ ID NO: 230974 - protein, 15 aa, Artificial Sequence
  Description of Artificial Sequence: Synthetic peptide
  Seed: LRMKWMMAMKYPITA
LRMKIMMSMFYPSTA

SEQ ID NO: 230975 - protein, 15 aa, Artificial Sequence
  Description of Artificial Sequence: Synthetic peptide
  Seed: LRMKWMMAMKYPITA
LRMKIMMSMFYPTTA

SEQ ID NO: 230976 - protein, 15 aa, Artificial Sequence
  Description of Artificial Sequence: Synthetic peptide
  Seed: LRMKWMMAMKYPITA
LRMKIMMSMFYPVTA

SEQ ID NO: 230977 - protein, 15 aa, Artificial Sequence
  Description of Artificial Sequence: Synthetic peptide
  Seed: LRMKWMMAMKYPITA
LRMKIMMSMFYPYTA

SEQ ID NO: 230978 - protein, 15 aa, Artificial Sequence
  Description of Artificial Sequence: Synthetic peptide
  Seed: LRMKWMMAMKYPITA
LRMKIMMSMGYPATA

SEQ ID NO: 230979 - protein, 15 aa, Artificial Sequence
  Description of Artificial Sequence: Synthetic peptide
  Seed: LRMKWMMAMKYPITA
LRMKIMMSMGYPCTA

SEQ ID NO: 230980 - protein, 15 aa, Artificial Sequence
  Description of Artificial Sequence: Synthetic peptide
  Seed: LRMKWMMAMKYPITA
LRMKIMMSMGYPFTA

SEQ ID NO: 230981 - protein, 15 aa, Artificial Sequence
  Description of Artificial Sequence: Synthetic peptide
  Seed: LRMKWMMAMKYPITA
LRMKIMMSMGYPGTA

SEQ ID NO: 230982 - protein, 15 aa, Artificial Sequence
  Description of Artificial Sequence: Synthetic peptide
  Seed: LRMKWMMAMKYPITA
LRMKIMMSMGYPHTA

SEQ ID NO: 230983 - protein, 15 aa, Artificial Sequence
  Description of Artificial Sequence: Synthetic peptide
  Seed: LRMKWMMAMKYPITA
LRMKIMMSMGYPITA

SEQ ID NO: 230984 - protein, 15 aa, Artificial Sequence
  Description of Artificial Sequence: Synthetic peptide
  Seed: LRMKWMMAMKYPITA
LRMKIMMSMGYPKTA

SEQ ID NO: 230985 - protein, 15 aa, Artificial Sequence
  Description of Artificial Sequence: Synthetic peptide
  Seed: LRMKWMMAMKYPITA
LRMKIMMSMGYPLTA

SEQ ID NO: 230986 - protein, 15 aa, Artificial Sequence
  Description of Artificial Sequence: Synthetic peptide
  Seed: LRMKWMMAMKYPITA
LRMKIMMSMGYPMTA

SEQ ID NO: 230987 - protein, 15 aa, Artificial Sequence
  Description of Artificial Sequence: Synthetic peptide
  Seed: LRMKWMMAMKYPITA
LRMKIMMSMGYPNTA

SEQ ID NO: 230988 - protein, 15 aa, Artificial Sequence
  Description of Artificial Sequence: Synthetic peptide
  Seed: LRMKWMMAMKYPITA
LRMKIMMSMGYPPTA

SEQ ID NO: 230989 - protein, 15 aa, Artificial Sequence
  Description of Artificial Sequence: Synthetic peptide
  Seed: LRMKWMMAMKYPITA
LRMKIMMSMGYPQTA

SEQ ID NO: 230990 - protein, 15 aa, Artificial Sequence
  Description of Artificial Sequence: Synthetic peptide
  Seed: LRMKWMMAMKYPITA
LRMKIMMSMGYPRTA

SEQ ID NO: 230991 - protein, 15 aa, Artificial Sequence
  Description of Artificial Sequence: Synthetic peptide
  Seed: LRMKWMMAMKYPITA
LRMKIMMSMGYPSTA

SEQ ID NO: 230992 - protein, 15 aa, Artificial Sequence
  Description of Artificial Sequence: Synthetic peptide
  Seed: LRMKWMMAMKYPITA
LRMKIMMSMGYPTTA

SEQ ID NO: 230993 - protein, 15 aa, Artificial Sequence
  Description of Artificial Sequence: Synthetic peptide
  Seed: LRMKWMMAMKYPITA
LRMKIMMSMGYPVTA

SEQ ID NO: 230994 - protein, 15 aa, Artificial Sequence
  Description of Artificial Sequence: Synthetic peptide
  Seed: LRMKWMMAMKYPITA
LRMKIMMSMGYPWTA

SEQ ID NO: 230995 - protein, 15 aa, Artificial Sequence
  Description of Artificial Sequence: Synthetic peptide
  Seed: LRMKWMMAMKYPITA
LRMKIMMSMGYPYTA

SEQ ID NO: 230996 - protein, 15 aa, Artificial Sequence
  Description of Artificial Sequence: Synthetic peptide
  Seed: LRMKWMMAMKYPITA
LRMKIMMSMHYPATA

SEQ ID NO: 230997 - protein, 15 aa, Artificial Sequence
  Description of Artificial Sequence: Synthetic peptide
  Seed: LRMKWMMAMKYPITA
LRMKIMMSMHYPETA

SEQ ID NO: 230998 - protein, 15 aa, Artificial Sequence
  Description of Artificial Sequence: Synthetic peptide
  Seed: LRMKWMMAMKYPITA
LRMKIMMSMHYPFTA

SEQ ID NO: 230999 - protein, 15 aa, Artificial Sequence
  Description of Artificial Sequence: Synthetic peptide
  Seed: LRMKWMMAMKYPITA
LRMKIMMSMHYPGTA

SEQ ID NO: 231000 - protein, 15 aa, Artificial Sequence
  Description of Artificial Sequence: Synthetic peptide
  Seed: LRMKWMMAMKYPITA
LRMKIMMSMHYPHTA

SEQ ID NO: 231001 - protein, 15 aa, Artificial Sequence
  Description of Artificial Sequence: Synthetic peptide
  Seed: LRMKWMMAMKYPITA
LRMKIMMSMHYPITA

SEQ ID NO: 231002 - protein, 15 aa, Artificial Sequence
  Description of Artificial Sequence: Synthetic peptide
  Seed: LRMKWMMAMKYPITA
LRMKIMMSMHYPKTA

SEQ ID NO: 231003 - protein, 15 aa, Artificial Sequence
  Description of Artificial Sequence: Synthetic peptide
  Seed: LRMKWMMAMKYPITA
LRMKIMMSMHYPLTA

SEQ ID NO: 231004 - protein, 15 aa, Artificial Sequence
  Description of Artificial Sequence: Synthetic peptide
  Seed: LRMKWMMAMKYPITA
LRMKIMMSMHYPMTA

SEQ ID NO: 231005 - protein, 15 aa, Artificial Sequence
  Description of Artificial Sequence: Synthetic peptide
  Seed: LRMKWMMAMKYPITA
LRMKIMMSMHYPQTA

SEQ ID NO: 231006 - protein, 15 aa, Artificial Sequence
  Description of Artificial Sequence: Synthetic peptide
  Seed: LRMKWMMAMKYPITA
LRMKIMMSMHYPRTA

SEQ ID NO: 231007 - protein, 15 aa, Artificial Sequence
  Description of Artificial Sequence: Synthetic peptide
  Seed: LRMKWMMAMKYPITA
LRMKIMMSMHYPSTA

SEQ ID NO: 231008 - protein, 15 aa, Artificial Sequence
  Description of Artificial Sequence: Synthetic peptide
  Seed: LRMKWMMAMKYPITA
LRMKIMMSMHYPTTA

SEQ ID NO: 231009 - protein, 15 aa, Artificial Sequence
  Description of Artificial Sequence: Synthetic peptide
  Seed: LRMKWMMAMKYPITA
LRMKIMMSMHYPVTA

SEQ ID NO: 231010 - protein, 15 aa, Artificial Sequence
  Description of Artificial Sequence: Synthetic peptide
  Seed: LRMKWMMAMKYPITA
LRMKIMMSMHYPYTA

SEQ ID NO: 231011 - protein, 15 aa, Artificial Sequence
  Description of Artificial Sequence: Synthetic peptide
  Seed: LRMKWMMAMKYPITA
LRMKIMMSMIYPATA

SEQ ID NO: 231012 - protein, 15 aa, Artificial Sequence
  Description of Artificial Sequence: Synthetic peptide
  Seed: LRMKWMMAMKYPITA
LRMKIMMSMIYPCTA

SEQ ID NO: 231013 - protein, 15 aa, Artificial Sequence
  Description of Artificial Sequence: Synthetic peptide
  Seed: LRMKWMMAMKYPITA
LRMKIMMSMIYPFTA

SEQ ID NO: 231014 - protein, 15 aa, Artificial Sequence
  Description of Artificial Sequence: Synthetic peptide
  Seed: LRMKWMMAMKYPITA
LRMKIMMSMIYPGTA

SEQ ID NO: 231015 - protein, 15 aa, Artificial Sequence
  Description of Artificial Sequence: Synthetic peptide
  Seed: LRMKWMMAMKYPITA
LRMKIMMSMIYPHTA

SEQ ID NO: 231016 - protein, 15 aa, Artificial Sequence
  Description of Artificial Sequence: Synthetic peptide
  Seed: LRMKWMMAMKYPITA
LRMKIMMSMIYPITA

SEQ ID NO: 231017 - protein, 15 aa, Artificial Sequence
  Description of Artificial Sequence: Synthetic peptide
  Seed: LRMKWMMAMKYPITA
LRMKIMMSMIYPKTA

SEQ ID NO: 231018 - protein, 15 aa, Artificial Sequence
  Description of Artificial Sequence: Synthetic peptide
  Seed: LRMKWMMAMKYPITA
LRMKIMMSMIYPLTA

SEQ ID NO: 231019 - protein, 15 aa, Artificial Sequence
  Description of Artificial Sequence: Synthetic peptide
  Seed: LRMKWMMAMKYPITA
LRMKIMMSMIYPMTA

SEQ ID NO: 231020 - protein, 15 aa, Artificial Sequence
  Description of Artificial Sequence: Synthetic peptide
  Seed: LRMKWMMAMKYPITA
LRMKIMMSMIYPNTA

SEQ ID NO: 231021 - protein, 15 aa, Artificial Sequence
  Description of Artificial Sequence: Synthetic peptide
  Seed: LRMKWMMAMKYPITA
LRMKIMMSMIYPQTA

SEQ ID NO: 231022 - protein, 15 aa, Artificial Sequence
  Description of Artificial Sequence: Synthetic peptide
  Seed: LRMKWMMAMKYPITA
LRMKIMMSMIYPRTA

SEQ ID NO: 231023 - protein, 15 aa, Artificial Sequence
  Description of Artificial Sequence: Synthetic peptide
  Seed: LRMKWMMAMKYPITA
LRMKIMMSMIYPSTA

SEQ ID NO: 231024 - protein, 15 aa, Artificial Sequence
  Description of Artificial Sequence: Synthetic peptide
  Seed: LRMKWMMAMKYPITA
LRMKIMMSMIYPTTA

SEQ ID NO: 231025 - protein, 15 aa, Artificial Sequence
  Description of Artificial Sequence: Synthetic peptide
  Seed: LRMKWMMAMKYPITA
LRMKIMMSMIYPVTA

SEQ ID NO: 231026 - protein, 15 aa, Artificial Sequence
  Description of Artificial Sequence: Synthetic peptide
  Seed: LRMKWMMAMKYPITA
LRMKIMMSMIYPYTA

SEQ ID NO: 231027 - protein, 15 aa, Artificial Sequence
  Description of Artificial Sequence: Synthetic peptide
  Seed: LRMKWMMAMKYPITA
LRMKIMMSMKYPATA

SEQ ID NO: 231028 - protein, 15 aa, Artificial Sequence
  Description of Artificial Sequence: Synthetic peptide
  Seed: LRMKWMMAMKYPITA
LRMKIMMSMKYPCTA

SEQ ID NO: 231029 - protein, 15 aa, Artificial Sequence
  Description of Artificial Sequence: Synthetic peptide
  Seed: LRMKWMMAMKYPITA
LRMKIMMSMKYPDTA

SEQ ID NO: 231030 - protein, 15 aa, Artificial Sequence
  Description of Artificial Sequence: Synthetic peptide
  Seed: LRMKWMMAMKYPITA
LRMKIMMSMKYPETA

SEQ ID NO: 231031 - protein, 15 aa, Artificial Sequence
  Description of Artificial Sequence: Synthetic peptide
  Seed: LRMKWMMAMKYPITA
LRMKIMMSMKYPFTA

SEQ ID NO: 231032 - protein, 15 aa, Artificial Sequence
  Description of Artificial Sequence: Synthetic peptide
  Seed: LRMKWMMAMKYPITA
LRMKIMMSMKYPGTA

SEQ ID NO: 231033 - protein, 15 aa, Artificial Sequence
  Description of Artificial Sequence: Synthetic peptide
  Seed: LRMKWMMAMKYPITA
LRMKIMMSMKYPHTA

SEQ ID NO: 231034 - protein, 15 aa, Artificial Sequence
  Description of Artificial Sequence: Synthetic peptide
  Seed: LRMKWMMAMKYPITA
LRMKIMMSMKYPITA

SEQ ID NO: 231035 - protein, 15 aa, Artificial Sequence
  Description of Artificial Sequence: Synthetic peptide
  Seed: LRMKWMMAMKYPITA
LRMKIMMSMKYPKTA

SEQ ID NO: 231036 - protein, 15 aa, Artificial Sequence
  Description of Artificial Sequence: Synthetic peptide
  Seed: LRMKWMMAMKYPITA
LRMKIMMSMKYPLTA

SEQ ID NO: 231037 - protein, 15 aa, Artificial Sequence
  Description of Artificial Sequence: Synthetic peptide
  Seed: LRMKWMMAMKYPITA
LRMKIMMSMKYPMTA

SEQ ID NO: 231038 - protein, 15 aa, Artificial Sequence
  Description of Artificial Sequence: Synthetic peptide
  Seed: LRMKWMMAMKYPITA
LRMKIMMSMKYPNTA

SEQ ID NO: 231039 - protein, 15 aa, Artificial Sequence
  Description of Artificial Sequence: Synthetic peptide
  Seed: LRMKWMMAMKYPITA
LRMKIMMSMKYPPTA

SEQ ID NO: 231040 - protein, 15 aa, Artificial Sequence
  Description of Artificial Sequence: Synthetic peptide
  Seed: LRMKWMMAMKYPITA
LRMKIMMSMKYPQTA

SEQ ID NO: 231041 - protein, 15 aa, Artificial Sequence
  Description of Artificial Sequence: Synthetic peptide
  Seed: LRMKWMMAMKYPITA
LRMKIMMSMKYPRTA

SEQ ID NO: 231042 - protein, 15 aa, Artificial Sequence
  Description of Artificial Sequence: Synthetic peptide
  Seed: LRMKWMMAMKYPITA
LRMKIMMSMKYPSTA

SEQ ID NO: 231043 - protein, 15 aa, Artificial Sequence
  Description of Artificial Sequence: Synthetic peptide
  Seed: LRMKWMMAMKYPITA
LRMKIMMSMKYPTTA

SEQ ID NO: 231044 - protein, 15 aa, Artificial Sequence
  Description of Artificial Sequence: Synthetic peptide
  Seed: LRMKWMMAMKYPITA
LRMKIMMSMKYPVTA

SEQ ID NO: 231045 - protein, 15 aa, Artificial Sequence
  Description of Artificial Sequence: Synthetic peptide
  Seed: LRMKWMMAMKYPITA
LRMKIMMSMKYPWTA

SEQ ID NO: 231046 - protein, 15 aa, Artificial Sequence
  Description of Artificial Sequence: Synthetic peptide
  Seed: LRMKWMMAMKYPITA
LRMKIMMSMLYPITA

SEQ ID NO: 231047 - protein, 15 aa, Artificial Sequence
  Description of Artificial Sequence: Synthetic peptide
  Seed: LRMKWMMAMKYPITA
LRMKIMMSMLYPKTA

SEQ ID NO: 231048 - protein, 15 aa, Artificial Sequence
  Description of Artificial Sequence: Synthetic peptide
  Seed: LRMKWMMAMKYPITA
LRMKIMMSMLYPRTA

SEQ ID NO: 231049 - protein, 15 aa, Artificial Sequence
  Description of Artificial Sequence: Synthetic peptide
  Seed: LRMKWMMAMKYPITA
LRMKIMMSMLYPVTA

SEQ ID NO: 231050 - protein, 15 aa, Artificial Sequence
  Description of Artificial Sequence: Synthetic peptide
  Seed: LRMKWMMAMKYPITA
LRMKIMMSMLYPYTA

SEQ ID NO: 231051 - protein, 15 aa, Artificial Sequence
  Description of Artificial Sequence: Synthetic peptide
  Seed: LRMKWMMAMKYPITA
LRMKIMMSMMYPCTA

SEQ ID NO: 231052 - protein, 15 aa, Artificial Sequence
  Description of Artificial Sequence: Synthetic peptide
  Seed: LRMKWMMAMKYPITA
LRMKIMMSMMYPFTA

SEQ ID NO: 231053 - protein, 15 aa, Artificial Sequence
  Description of Artificial Sequence: Synthetic peptide
  Seed: LRMKWMMAMKYPITA
LRMKIMMSMMYPGTA

SEQ ID NO: 231054 - protein, 15 aa, Artificial Sequence
  Description of Artificial Sequence: Synthetic peptide
  Seed: LRMKWMMAMKYPITA
LRMKIMMSMMYPITA

SEQ ID NO: 231055 - protein, 15 aa, Artificial Sequence
  Description of Artificial Sequence: Synthetic peptide
  Seed: LRMKWMMAMKYPITA
LRMKIMMSMMYPKTA

SEQ ID NO: 231056 - protein, 15 aa, Artificial Sequence
  Description of Artificial Sequence: Synthetic peptide
  Seed: LRMKWMMAMKYPITA
LRMKIMMSMMYPLTA

SEQ ID NO: 231057 - protein, 15 aa, Artificial Sequence
  Description of Artificial Sequence: Synthetic peptide
  Seed: LRMKWMMAMKYPITA
LRMKIMMSMMYPMTA

SEQ ID NO: 231058 - protein, 15 aa, Artificial Sequence
  Description of Artificial Sequence: Synthetic peptide
  Seed: LRMKWMMAMKYPITA
LRMKIMMSMMYPRTA

SEQ ID NO: 231059 - protein, 15 aa, Artificial Sequence
  Description of Artificial Sequence: Synthetic peptide
  Seed: LRMKWMMAMKYPITA
LRMKIMMSMMYPVTA

SEQ ID NO: 231060 - protein, 15 aa, Artificial Sequence
  Description of Artificial Sequence: Synthetic peptide
  Seed: LRMKWMMAMKYPITA
LRMKIMMSMMYPYTA

SEQ ID NO: 231061 - protein, 15 aa, Artificial Sequence
  Description of Artificial Sequence: Synthetic peptide
  Seed: LRMKWMMAMKYPITA
LRMKIMMSMNYPATA

SEQ ID NO: 231062 - protein, 15 aa, Artificial Sequence
  Description of Artificial Sequence: Synthetic peptide
  Seed: LRMKWMMAMKYPITA
LRMKIMMSMNYPCTA

SEQ ID NO: 231063 - protein, 15 aa, Artificial Sequence
  Description of Artificial Sequence: Synthetic peptide
  Seed: LRMKWMMAMKYPITA
LRMKIMMSMNYPDTA

SEQ ID NO: 231064 - protein, 15 aa, Artificial Sequence
  Description of Artificial Sequence: Synthetic peptide
  Seed: LRMKWMMAMKYPITA
LRMKIMMSMNYPETA

SEQ ID NO: 231065 - protein, 15 aa, Artificial Sequence
  Description of Artificial Sequence: Synthetic peptide
  Seed: LRMKWMMAMKYPITA
LRMKIMMSMNYPFTA

SEQ ID NO: 231066 - protein, 15 aa, Artificial Sequence
  Description of Artificial Sequence: Synthetic peptide
  Seed: LRMKWMMAMKYPITA
LRMKIMMSMNYPGTA

SEQ ID NO: 231067 - protein, 15 aa, Artificial Sequence
  Description of Artificial Sequence: Synthetic peptide
  Seed: LRMKWMMAMKYPITA
LRMKIMMSMNYPHTA

SEQ ID NO: 231068 - protein, 15 aa, Artificial Sequence
  Description of Artificial Sequence: Synthetic peptide
  Seed: LRMKWMMAMKYPITA
LRMKIMMSMNYPITA

SEQ ID NO: 231069 - protein, 15 aa, Artificial Sequence
  Description of Artificial Sequence: Synthetic peptide
  Seed: LRMKWMMAMKYPITA
LRMKIMMSMNYPKTA

SEQ ID NO: 231070 - protein, 15 aa, Artificial Sequence
  Description of Artificial Sequence: Synthetic peptide
  Seed: LRMKWMMAMKYPITA
LRMKIMMSMNYPLTA

SEQ ID NO: 231071 - protein, 15 aa, Artificial Sequence
  Description of Artificial Sequence: Synthetic peptide
  Seed: LRMKWMMAMKYPITA
LRMKIMMSMNYPMTA

SEQ ID NO: 231072 - protein, 15 aa, Artificial Sequence
  Description of Artificial Sequence: Synthetic peptide
  Seed: LRMKWMMAMKYPITA
LRMKIMMSMNYPNTA

SEQ ID NO: 231073 - protein, 15 aa, Artificial Sequence
  Description of Artificial Sequence: Synthetic peptide
  Seed: LRMKWMMAMKYPITA
LRMKIMMSMNYPQTA

SEQ ID NO: 231074 - protein, 15 aa, Artificial Sequence
  Description of Artificial Sequence: Synthetic peptide
  Seed: LRMKWMMAMKYPITA
LRMKIMMSMNYPRTA

SEQ ID NO: 231075 - protein, 15 aa, Artificial Sequence
  Description of Artificial Sequence: Synthetic peptide
  Seed: LRMKWMMAMKYPITA
LRMKIMMSMNYPSTA

SEQ ID NO: 231076 - protein, 15 aa, Artificial Sequence
  Description of Artificial Sequence: Synthetic peptide
  Seed: LRMKWMMAMKYPITA
LRMKIMMSMNYPTTA

SEQ ID NO: 231077 - protein, 15 aa, Artificial Sequence
  Description of Artificial Sequence: Synthetic peptide
  Seed: LRMKWMMAMKYPITA
LRMKIMMSMNYPVTA

SEQ ID NO: 231078 - protein, 15 aa, Artificial Sequence
  Description of Artificial Sequence: Synthetic peptide
  Seed: LRMKWMMAMKYPITA
LRMKIMMSMNYPWTA

SEQ ID NO: 231079 - protein, 15 aa, Artificial Sequence
  Description of Artificial Sequence: Synthetic peptide
  Seed: LRMKWMMAMKYPITA
LRMKIMMSMNYPYTA

SEQ ID NO: 231080 - protein, 15 aa, Artificial Sequence
  Description of Artificial Sequence: Synthetic peptide
  Seed: LRMKWMMAMKYPITA
LRMKIMMSMPYPATA

SEQ ID NO: 231081 - protein, 15 aa, Artificial Sequence
  Description of Artificial Sequence: Synthetic peptide
  Seed: LRMKWMMAMKYPITA
LRMKIMMSMPYPCTA

SEQ ID NO: 231082 - protein, 15 aa, Artificial Sequence
  Description of Artificial Sequence: Synthetic peptide
  Seed: LRMKWMMAMKYPITA
LRMKIMMSMPYPDTA

SEQ ID NO: 231083 - protein, 15 aa, Artificial Sequence
  Description of Artificial Sequence: Synthetic peptide
  Seed: LRMKWMMAMKYPITA
LRMKIMMSMPYPETA

SEQ ID NO: 231084 - protein, 15 aa, Artificial Sequence
  Description of Artificial Sequence: Synthetic peptide
  Seed: LRMKWMMAMKYPITA
LRMKIMMSMPYPFTA

SEQ ID NO: 231085 - protein, 15 aa, Artificial Sequence
  Description of Artificial Sequence: Synthetic peptide
  Seed: LRMKWMMAMKYPITA
LRMKIMMSMPYPGTA

SEQ ID NO: 231086 - protein, 15 aa, Artificial Sequence
  Description of Artificial Sequence: Synthetic peptide
  Seed: LRMKWMMAMKYPITA
LRMKIMMSMPYPHTA

SEQ ID NO: 231087 - protein, 15 aa, Artificial Sequence
  Description of Artificial Sequence: Synthetic peptide
  Seed: LRMKWMMAMKYPITA
LRMKIMMSMPYPITA

SEQ ID NO: 231088 - protein, 15 aa, Artificial Sequence
  Description of Artificial Sequence: Synthetic peptide
  Seed: LRMKWMMAMKYPITA
LRMKIMMSMPYPKTA

SEQ ID NO: 231089 - protein, 15 aa, Artificial Sequence
  Description of Artificial Sequence: Synthetic peptide
  Seed: LRMKWMMAMKYPITA
LRMKIMMSMPYPLTA

SEQ ID NO: 231090 - protein, 15 aa, Artificial Sequence
  Description of Artificial Sequence: Synthetic peptide
  Seed: LRMKWMMAMKYPITA
LRMKIMMSMPYPMTA

SEQ ID NO: 231091 - protein, 15 aa, Artificial Sequence
  Description of Artificial Sequence: Synthetic peptide
  Seed: LRMKWMMAMKYPITA
LRMKIMMSMPYPNTA

SEQ ID NO: 231092 - protein, 15 aa, Artificial Sequence
  Description of Artificial Sequence: Synthetic peptide
  Seed: LRMKWMMAMKYPITA
LRMKIMMSMPYPPTA

SEQ ID NO: 231093 - protein, 15 aa, Artificial Sequence
  Description of Artificial Sequence: Synthetic peptide
  Seed: LRMKWMMAMKYPITA
LRMKIMMSMPYPQTA

SEQ ID NO: 231094 - protein, 15 aa, Artificial Sequence
  Description of Artificial Sequence: Synthetic peptide
  Seed: LRMKWMMAMKYPITA
LRMKIMMSMPYPRTA

SEQ ID NO: 231095 - protein, 15 aa, Artificial Sequence
  Description of Artificial Sequence: Synthetic peptide
  Seed: LRMKWMMAMKYPITA
LRMKIMMSMPYPSTA

SEQ ID NO: 231096 - protein, 15 aa, Artificial Sequence
  Description of Artificial Sequence: Synthetic peptide
  Seed: LRMKWMMAMKYPITA
LRMKIMMSMPYPTTA

SEQ ID NO: 231097 - protein, 15 aa, Artificial Sequence
  Description of Artificial Sequence: Synthetic peptide
  Seed: LRMKWMMAMKYPITA
LRMKIMMSMPYPVTA

SEQ ID NO: 231098 - protein, 15 aa, Artificial Sequence
  Description of Artificial Sequence: Synthetic peptide
  Seed: LRMKWMMAMKYPITA
LRMKIMMSMPYPWTA

SEQ ID NO: 231099 - protein, 15 aa, Artificial Sequence
  Description of Artificial Sequence: Synthetic peptide
  Seed: LRMKWMMAMKYPITA
LRMKIMMSMPYPYTA

SEQ ID NO: 231100 - protein, 15 aa, Artificial Sequence
  Description of Artificial Sequence: Synthetic peptide
  Seed: LRMKWMMAMKYPITA
LRMKIMMSMQYPATA

SEQ ID NO: 231101 - protein, 15 aa, Artificial Sequence
  Description of Artificial Sequence: Synthetic peptide
  Seed: LRMKWMMAMKYPITA
LRMKIMMSMQYPFTA

SEQ ID NO: 231102 - protein, 15 aa, Artificial Sequence
  Description of Artificial Sequence: Synthetic peptide
  Seed: LRMKWMMAMKYPITA
LRMKIMMSMQYPHTA

SEQ ID NO: 231103 - protein, 15 aa, Artificial Sequence
  Description of Artificial Sequence: Synthetic peptide
  Seed: LRMKWMMAMKYPITA
LRMKIMMSMQYPITA

SEQ ID NO: 231104 - protein, 15 aa, Artificial Sequence
  Description of Artificial Sequence: Synthetic peptide
  Seed: LRMKWMMAMKYPITA
LRMKIMMSMQYPKTA

SEQ ID NO: 231105 - protein, 15 aa, Artificial Sequence
  Description of Artificial Sequence: Synthetic peptide
  Seed: LRMKWMMAMKYPITA
LRMKIMMSMQYPLTA

SEQ ID NO: 231106 - protein, 15 aa, Artificial Sequence
  Description of Artificial Sequence: Synthetic peptide
  Seed: LRMKWMMAMKYPITA
LRMKIMMSMQYPMTA

SEQ ID NO: 231107 - protein, 15 aa, Artificial Sequence
  Description of Artificial Sequence: Synthetic peptide
  Seed: LRMKWMMAMKYPITA
LRMKIMMSMQYPRTA

SEQ ID NO: 231108 - protein, 15 aa, Artificial Sequence
  Description of Artificial Sequence: Synthetic peptide
  Seed: LRMKWMMAMKYPITA
LRMKIMMSMQYPSTA

SEQ ID NO: 231109 - protein, 15 aa, Artificial Sequence
  Description of Artificial Sequence: Synthetic peptide
  Seed: LRMKWMMAMKYPITA
LRMKIMMSMQYPVTA

SEQ ID NO: 231110 - protein, 15 aa, Artificial Sequence
  Description of Artificial Sequence: Synthetic peptide
  Seed: LRMKWMMAMKYPITA
LRMKIMMSMQYPYTA

SEQ ID NO: 231111 - protein, 15 aa, Artificial Sequence
  Description of Artificial Sequence: Synthetic peptide
  Seed: LRMKWMMAMKYPITA
LRMKIMMSMRYPATA

SEQ ID NO: 231112 - protein, 15 aa, Artificial Sequence
  Description of Artificial Sequence: Synthetic peptide
  Seed: LRMKWMMAMKYPITA
LRMKIMMSMRYPCTA

SEQ ID NO: 231113 - protein, 15 aa, Artificial Sequence
  Description of Artificial Sequence: Synthetic peptide
  Seed: LRMKWMMAMKYPITA
LRMKIMMSMRYPDTA

SEQ ID NO: 231114 - protein, 15 aa, Artificial Sequence
  Description of Artificial Sequence: Synthetic peptide
  Seed: LRMKWMMAMKYPITA
LRMKIMMSMRYPETA

SEQ ID NO: 231115 - protein, 15 aa, Artificial Sequence
  Description of Artificial Sequence: Synthetic peptide
  Seed: LRMKWMMAMKYPITA
LRMKIMMSMRYPFTA

SEQ ID NO: 231116 - protein, 15 aa, Artificial Sequence
  Description of Artificial Sequence: Synthetic peptide
  Seed: LRMKWMMAMKYPITA
LRMKIMMSMRYPGTA

SEQ ID NO: 231117 - protein, 15 aa, Artificial Sequence
  Description of Artificial Sequence: Synthetic peptide
  Seed: LRMKWMMAMKYPITA
LRMKIMMSMRYPHTA

SEQ ID NO: 231118 - protein, 15 aa, Artificial Sequence
  Description of Artificial Sequence: Synthetic peptide
  Seed: LRMKWMMAMKYPITA
LRMKIMMSMRYPITA

SEQ ID NO: 231119 - protein, 15 aa, Artificial Sequence
  Description of Artificial Sequence: Synthetic peptide
  Seed: LRMKWMMAMKYPITA
LRMKIMMSMRYPKTA

SEQ ID NO: 231120 - protein, 15 aa, Artificial Sequence
  Description of Artificial Sequence: Synthetic peptide
  Seed: LRMKWMMAMKYPITA
LRMKIMMSMRYPLTA

SEQ ID NO: 231121 - protein, 15 aa, Artificial Sequence
  Description of Artificial Sequence: Synthetic peptide
  Seed: LRMKWMMAMKYPITA
LRMKIMMSMRYPMTA

SEQ ID NO: 231122 - protein, 15 aa, Artificial Sequence
  Description of Artificial Sequence: Synthetic peptide
  Seed: LRMKWMMAMKYPITA
LRMKIMMSMRYPNTA

SEQ ID NO: 231123 - protein, 15 aa, Artificial Sequence
  Description of Artificial Sequence: Synthetic peptide
  Seed: LRMKWMMAMKYPITA
LRMKIMMSMRYPPTA

SEQ ID NO: 231124 - protein, 15 aa, Artificial Sequence
  Description of Artificial Sequence: Synthetic peptide
  Seed: LRMKWMMAMKYPITA
LRMKIMMSMRYPQTA

SEQ ID NO: 231125 - protein, 15 aa, Artificial Sequence
  Description of Artificial Sequence: Synthetic peptide
  Seed: LRMKWMMAMKYPITA
LRMKIMMSMRYPRTA

SEQ ID NO: 231126 - protein, 15 aa, Artificial Sequence
  Description of Artificial Sequence: Synthetic peptide
  Seed: LRMKWMMAMKYPITA
LRMKIMMSMRYPSTA

SEQ ID NO: 231127 - protein, 15 aa, Artificial Sequence
  Description of Artificial Sequence: Synthetic peptide
  Seed: LRMKWMMAMKYPITA
LRMKIMMSMRYPTTA

SEQ ID NO: 231128 - protein, 15 aa, Artificial Sequence
  Description of Artificial Sequence: Synthetic peptide
  Seed: LRMKWMMAMKYPITA
LRMKIMMSMRYPVTA

SEQ ID NO: 231129 - protein, 15 aa, Artificial Sequence
  Description of Artificial Sequence: Synthetic peptide
  Seed: LRMKWMMAMKYPITA
LRMKIMMSMRYPWTA

SEQ ID NO: 231130 - protein, 15 aa, Artificial Sequence
  Description of Artificial Sequence: Synthetic peptide
  Seed: LRMKWMMAMKYPITA
LRMKIMMSMRYPYTA

SEQ ID NO: 231131 - protein, 15 aa, Artificial Sequence
  Description of Artificial Sequence: Synthetic peptide
  Seed: LRMKWMMAMKYPITA
LRMKIMMSMSYPATA

SEQ ID NO: 231132 - protein, 15 aa, Artificial Sequence
  Description of Artificial Sequence: Synthetic peptide
  Seed: LRMKWMMAMKYPITA
LRMKIMMSMSYPCTA

SEQ ID NO: 231133 - protein, 15 aa, Artificial Sequence
  Description of Artificial Sequence: Synthetic peptide
  Seed: LRMKWMMAMKYPITA
LRMKIMMSMSYPDTA

SEQ ID NO: 231134 - protein, 15 aa, Artificial Sequence
  Description of Artificial Sequence: Synthetic peptide
  Seed: LRMKWMMAMKYPITA
LRMKIMMSMSYPETA

SEQ ID NO: 231135 - protein, 15 aa, Artificial Sequence
  Description of Artificial Sequence: Synthetic peptide
  Seed: LRMKWMMAMKYPITA
LRMKIMMSMSYPFTA

SEQ ID NO: 231136 - protein, 15 aa, Artificial Sequence
  Description of Artificial Sequence: Synthetic peptide
  Seed: LRMKWMMAMKYPITA
LRMKIMMSMSYPGTA

SEQ ID NO: 231137 - protein, 15 aa, Artificial Sequence
  Description of Artificial Sequence: Synthetic peptide
  Seed: LRMKWMMAMKYPITA
LRMKIMMSMSYPHTA

SEQ ID NO: 231138 - protein, 15 aa, Artificial Sequence
  Description of Artificial Sequence: Synthetic peptide
  Seed: LRMKWMMAMKYPITA
LRMKIMMSMSYPITA

SEQ ID NO: 231139 - protein, 15 aa, Artificial Sequence
  Description of Artificial Sequence: Synthetic peptide
  Seed: LRMKWMMAMKYPITA
LRMKIMMSMSYPKTA

SEQ ID NO: 231140 - protein, 15 aa, Artificial Sequence
  Description of Artificial Sequence: Synthetic peptide
  Seed: LRMKWMMAMKYPITA
LRMKIMMSMSYPLTA

SEQ ID NO: 231141 - protein, 15 aa, Artificial Sequence
  Description of Artificial Sequence: Synthetic peptide
  Seed: LRMKWMMAMKYPITA
LRMKIMMSMSYPMTA

SEQ ID NO: 231142 - protein, 15 aa, Artificial Sequence
  Description of Artificial Sequence: Synthetic peptide
  Seed: LRMKWMMAMKYPITA
LRMKIMMSMSYPNTA

SEQ ID NO: 231143 - protein, 15 aa, Artificial Sequence
  Description of Artificial Sequence: Synthetic peptide
  Seed: LRMKWMMAMKYPITA
LRMKIMMSMSYPPTA

SEQ ID NO: 231144 - protein, 15 aa, Artificial Sequence
  Description of Artificial Sequence: Synthetic peptide
  Seed: LRMKWMMAMKYPITA
LRMKIMMSMSYPQTA

SEQ ID NO: 231145 - protein, 15 aa, Artificial Sequence
  Description of Artificial Sequence: Synthetic peptide
  Seed: LRMKWMMAMKYPITA
LRMKIMMSMSYPRTA

SEQ ID NO: 231146 - protein, 15 aa, Artificial Sequence
  Description of Artificial Sequence: Synthetic peptide
  Seed: LRMKWMMAMKYPITA
LRMKIMMSMSYPSTA

SEQ ID NO: 231147 - protein, 15 aa, Artificial Sequence
  Description of Artificial Sequence: Synthetic peptide
  Seed: LRMKWMMAMKYPITA
LRMKIMMSMSYPTTA

SEQ ID NO: 231148 - protein, 15 aa, Artificial Sequence
  Description of Artificial Sequence: Synthetic peptide
  Seed: LRMKWMMAMKYPITA
LRMKIMMSMSYPVTA

SEQ ID NO: 231149 - protein, 15 aa, Artificial Sequence
  Description of Artificial Sequence: Synthetic peptide
  Seed: LRMKWMMAMKYPITA
LRMKIMMSMSYPWTA

SEQ ID NO: 231150 - protein, 15 aa, Artificial Sequence
  Description of Artificial Sequence: Synthetic peptide
  Seed: LRMKWMMAMKYPITA
LRMKIMMSMSYPYTA

SEQ ID NO: 231151 - protein, 15 aa, Artificial Sequence
  Description of Artificial Sequence: Synthetic peptide
  Seed: LRMKWMMAMKYPITA
LRMKIMMSMTYPATA

SEQ ID NO: 231152 - protein, 15 aa, Artificial Sequence
  Description of Artificial Sequence: Synthetic peptide
  Seed: LRMKWMMAMKYPITA
LRMKIMMSMTYPCTA

SEQ ID NO: 231153 - protein, 15 aa, Artificial Sequence
  Description of Artificial Sequence: Synthetic peptide
  Seed: LRMKWMMAMKYPITA
LRMKIMMSMTYPDTA

SEQ ID NO: 231154 - protein, 15 aa, Artificial Sequence
  Description of Artificial Sequence: Synthetic peptide
  Seed: LRMKWMMAMKYPITA
LRMKIMMSMTYPETA

SEQ ID NO: 231155 - protein, 15 aa, Artificial Sequence
  Description of Artificial Sequence: Synthetic peptide
  Seed: LRMKWMMAMKYPITA
LRMKIMMSMTYPFTA

SEQ ID NO: 231156 - protein, 15 aa, Artificial Sequence
  Description of Artificial Sequence: Synthetic peptide
  Seed: LRMKWMMAMKYPITA
LRMKIMMSMTYPGTA

SEQ ID NO: 231157 - protein, 15 aa, Artificial Sequence
  Description of Artificial Sequence: Synthetic peptide
  Seed: LRMKWMMAMKYPITA
LRMKIMMSMTYPHTA

SEQ ID NO: 231158 - protein, 15 aa, Artificial Sequence
  Description of Artificial Sequence: Synthetic peptide
  Seed: LRMKWMMAMKYPITA
LRMKIMMSMTYPITA

SEQ ID NO: 231159 - protein, 15 aa, Artificial Sequence
  Description of Artificial Sequence: Synthetic peptide
  Seed: LRMKWMMAMKYPITA
LRMKIMMSMTYPKTA

SEQ ID NO: 231160 - protein, 15 aa, Artificial Sequence
  Description of Artificial Sequence: Synthetic peptide
  Seed: LRMKWMMAMKYPITA
LRMKIMMSMTYPLTA

SEQ ID NO: 231161 - protein, 15 aa, Artificial Sequence
  Description of Artificial Sequence: Synthetic peptide
  Seed: LRMKWMMAMKYPITA
LRMKIMMSMTYPMTA

SEQ ID NO: 231162 - protein, 15 aa, Artificial Sequence
  Description of Artificial Sequence: Synthetic peptide
  Seed: LRMKWMMAMKYPITA
LRMKIMMSMTYPNTA

SEQ ID NO: 231163 - protein, 15 aa, Artificial Sequence
  Description of Artificial Sequence: Synthetic peptide
  Seed: LRMKWMMAMKYPITA
LRMKIMMSMTYPPTA

SEQ ID NO: 231164 - protein, 15 aa, Artificial Sequence
  Description of Artificial Sequence: Synthetic peptide
  Seed: LRMKWMMAMKYPITA
LRMKIMMSMTYPQTA

SEQ ID NO: 231165 - protein, 15 aa, Artificial Sequence
  Description of Artificial Sequence: Synthetic peptide
  Seed: LRMKWMMAMKYPITA
LRMKIMMSMTYPRTA

SEQ ID NO: 231166 - protein, 15 aa, Artificial Sequence
  Description of Artificial Sequence: Synthetic peptide
  Seed: LRMKWMMAMKYPITA
LRMKIMMSMTYPSTA

SEQ ID NO: 231167 - protein, 15 aa, Artificial Sequence
  Description of Artificial Sequence: Synthetic peptide
  Seed: LRMKWMMAMKYPITA
LRMKIMMSMTYPTTA

SEQ ID NO: 231168 - protein, 15 aa, Artificial Sequence
  Description of Artificial Sequence: Synthetic peptide
  Seed: LRMKWMMAMKYPITA
LRMKIMMSMTYPVTA

SEQ ID NO: 231169 - protein, 15 aa, Artificial Sequence
  Description of Artificial Sequence: Synthetic peptide
  Seed: LRMKWMMAMKYPITA
LRMKIMMSMTYPWTA

SEQ ID NO: 231170 - protein, 15 aa, Artificial Sequence
  Description of Artificial Sequence: Synthetic peptide
  Seed: LRMKWMMAMKYPITA
LRMKIMMSMTYPYTA

SEQ ID NO: 231171 - protein, 15 aa, Artificial Sequence
  Description of Artificial Sequence: Synthetic peptide
  Seed: LRMKWMMAMKYPITA
LRMKIMMSMVYPATA

SEQ ID NO: 231172 - protein, 15 aa, Artificial Sequence
  Description of Artificial Sequence: Synthetic peptide
  Seed: LRMKWMMAMKYPITA
LRMKIMMSMVYPCTA

SEQ ID NO: 231173 - protein, 15 aa, Artificial Sequence
  Description of Artificial Sequence: Synthetic peptide
  Seed: LRMKWMMAMKYPITA
LRMKIMMSMVYPDTA

SEQ ID NO: 231174 - protein, 15 aa, Artificial Sequence
  Description of Artificial Sequence: Synthetic peptide
  Seed: LRMKWMMAMKYPITA
LRMKIMMSMVYPETA

SEQ ID NO: 231175 - protein, 15 aa, Artificial Sequence
  Description of Artificial Sequence: Synthetic peptide
  Seed: LRMKWMMAMKYPITA
LRMKIMMSMVYPFTA

SEQ ID NO: 231176 - protein, 15 aa, Artificial Sequence
  Description of Artificial Sequence: Synthetic peptide
  Seed: LRMKWMMAMKYPITA
LRMKIMMSMVYPGTA

SEQ ID NO: 231177 - protein, 15 aa, Artificial Sequence
  Description of Artificial Sequence: Synthetic peptide
  Seed: LRMKWMMAMKYPITA
LRMKIMMSMVYPHTA

SEQ ID NO: 231178 - protein, 15 aa, Artificial Sequence
  Description of Artificial Sequence: Synthetic peptide
  Seed: LRMKWMMAMKYPITA
LRMKIMMSMVYPITA

SEQ ID NO: 231179 - protein, 15 aa, Artificial Sequence
  Description of Artificial Sequence: Synthetic peptide
  Seed: LRMKWMMAMKYPITA
LRMKIMMSMVYPKTA

SEQ ID NO: 231180 - protein, 15 aa, Artificial Sequence
  Description of Artificial Sequence: Synthetic peptide
  Seed: LRMKWMMAMKYPITA
LRMKIMMSMVYPLTA

SEQ ID NO: 231181 - protein, 15 aa, Artificial Sequence
  Description of Artificial Sequence: Synthetic peptide
  Seed: LRMKWMMAMKYPITA
LRMKIMMSMVYPMTA

SEQ ID NO: 231182 - protein, 15 aa, Artificial Sequence
  Description of Artificial Sequence: Synthetic peptide
  Seed: LRMKWMMAMKYPITA
LRMKIMMSMVYPNTA

SEQ ID NO: 231183 - protein, 15 aa, Artificial Sequence
  Description of Artificial Sequence: Synthetic peptide
  Seed: LRMKWMMAMKYPITA
LRMKIMMSMVYPPTA

SEQ ID NO: 231184 - protein, 15 aa, Artificial Sequence
  Description of Artificial Sequence: Synthetic peptide
  Seed: LRMKWMMAMKYPITA
LRMKIMMSMVYPQTA

SEQ ID NO: 231185 - protein, 15 aa, Artificial Sequence
  Description of Artificial Sequence: Synthetic peptide
  Seed: LRMKWMMAMKYPITA
LRMKIMMSMVYPRTA

SEQ ID NO: 231186 - protein, 15 aa, Artificial Sequence
  Description of Artificial Sequence: Synthetic peptide
  Seed: LRMKWMMAMKYPITA
LRMKIMMSMVYPSTA

SEQ ID NO: 231187 - protein, 15 aa, Artificial Sequence
  Description of Artificial Sequence: Synthetic peptide
  Seed: LRMKWMMAMKYPITA
LRMKIMMSMVYPTTA

SEQ ID NO: 231188 - protein, 15 aa, Artificial Sequence
  Description of Artificial Sequence: Synthetic peptide
  Seed: LRMKWMMAMKYPITA
LRMKIMMSMVYPVTA

SEQ ID NO: 231189 - protein, 15 aa, Artificial Sequence
  Description of Artificial Sequence: Synthetic peptide
  Seed: LRMKWMMAMKYPITA
LRMKIMMSMVYPYTA

SEQ ID NO: 231190 - protein, 15 aa, Artificial Sequence
  Description of Artificial Sequence: Synthetic peptide
  Seed: LRMKWMMAMKYPITA
LRMKIMMSMWYPATA

SEQ ID NO: 231191 - protein, 15 aa, Artificial Sequence
  Description of Artificial Sequence: Synthetic peptide
  Seed: LRMKWMMAMKYPITA
LRMKIMMSMWYPITA

SEQ ID NO: 231192 - protein, 15 aa, Artificial Sequence
  Description of Artificial Sequence: Synthetic peptide
  Seed: LRMKWMMAMKYPITA
LRMKIMMSMWYPLTA

SEQ ID NO: 231193 - protein, 15 aa, Artificial Sequence
  Description of Artificial Sequence: Synthetic peptide
  Seed: LRMKWMMAMKYPITA
LRMKIMMSMWYPRTA

SEQ ID NO: 231194 - protein, 15 aa, Artificial Sequence
  Description of Artificial Sequence: Synthetic peptide
  Seed: LRMKWMMAMKYPITA
LRMKIMMSMWYPVTA

SEQ ID NO: 231195 - protein, 15 aa, Artificial Sequence
  Description of Artificial Sequence: Synthetic peptide
  Seed: LRMKWMMAMKYPITA
LRMKIMMSMYYPITA

SEQ ID NO: 231196 - protein, 15 aa, Artificial Sequence
  Description of Artificial Sequence: Synthetic peptide
  Seed: LRMKWMMAMKYPITA
LRMKIMMSMYYPLTA

SEQ ID NO: 231197 - protein, 15 aa, Artificial Sequence
  Description of Artificial Sequence: Synthetic peptide
  Seed: LRMKWMMAMKYPITA
LRMKIMMSMYYPRTA

SEQ ID NO: 231198 - protein, 15 aa, Artificial Sequence
  Description of Artificial Sequence: Synthetic peptide
  Seed: LRMKWMMAMKYPITA
LRMKIMMSMYYPVTA

SEQ ID NO: 231199 - protein, 15 aa, Artificial Sequence
  Description of Artificial Sequence: Synthetic peptide
  Seed: LRMKWMMAMKYPITA
LRMKIMMSMYYPYTA

SEQ ID NO: 231200 - protein, 15 aa, Artificial Sequence
  Description of Artificial Sequence: Synthetic peptide
  Seed: LRMKWMMAMKYPITA
LRMKIMMTMAYPATA

SEQ ID NO: 231201 - protein, 15 aa, Artificial Sequence
  Description of Artificial Sequence: Synthetic peptide
  Seed: LRMKWMMAMKYPITA
LRMKIMMTMAYPCTA

SEQ ID NO: 231202 - protein, 15 aa, Artificial Sequence
  Description of Artificial Sequence: Synthetic peptide
  Seed: LRMKWMMAMKYPITA
LRMKIMMTMAYPDTA

SEQ ID NO: 231203 - protein, 15 aa, Artificial Sequence
  Description of Artificial Sequence: Synthetic peptide
  Seed: LRMKWMMAMKYPITA
LRMKIMMTMAYPETA

SEQ ID NO: 231204 - protein, 15 aa, Artificial Sequence
  Description of Artificial Sequence: Synthetic peptide
  Seed: LRMKWMMAMKYPITA
LRMKIMMTMAYPFTA

SEQ ID NO: 231205 - protein, 15 aa, Artificial Sequence
  Description of Artificial Sequence: Synthetic peptide
  Seed: LRMKWMMAMKYPITA
LRMKIMMTMAYPGTA

SEQ ID NO: 231206 - protein, 15 aa, Artificial Sequence
  Description of Artificial Sequence: Synthetic peptide
  Seed: LRMKWMMAMKYPITA
LRMKIMMTMAYPHTA

SEQ ID NO: 231207 - protein, 15 aa, Artificial Sequence
  Description of Artificial Sequence: Synthetic peptide
  Seed: LRMKWMMAMKYPITA
LRMKIMMTMAYPITA

SEQ ID NO: 231208 - protein, 15 aa, Artificial Sequence
  Description of Artificial Sequence: Synthetic peptide
  Seed: LRMKWMMAMKYPITA
LRMKIMMTMAYPKTA

SEQ ID NO: 231209 - protein, 15 aa, Artificial Sequence
  Description of Artificial Sequence: Synthetic peptide
  Seed: LRMKWMMAMKYPITA
LRMKIMMTMAYPLTA

SEQ ID NO: 231210 - protein, 15 aa, Artificial Sequence
  Description of Artificial Sequence: Synthetic peptide
  Seed: LRMKWMMAMKYPITA
LRMKIMMTMAYPMTA

SEQ ID NO: 231211 - protein, 15 aa, Artificial Sequence
  Description of Artificial Sequence: Synthetic peptide
  Seed: LRMKWMMAMKYPITA
LRMKIMMTMAYPNTA

SEQ ID NO: 231212 - protein, 15 aa, Artificial Sequence
  Description of Artificial Sequence: Synthetic peptide
  Seed: LRMKWMMAMKYPITA
LRMKIMMTMAYPPTA

SEQ ID NO: 231213 - protein, 15 aa, Artificial Sequence
  Description of Artificial Sequence: Synthetic peptide
  Seed: LRMKWMMAMKYPITA
LRMKIMMTMAYPQTA

SEQ ID NO: 231214 - protein, 15 aa, Artificial Sequence
  Description of Artificial Sequence: Synthetic peptide
  Seed: LRMKWMMAMKYPITA
LRMKIMMTMAYPRTA

SEQ ID NO: 231215 - protein, 15 aa, Artificial Sequence
  Description of Artificial Sequence: Synthetic peptide
  Seed: LRMKWMMAMKYPITA
LRMKIMMTMAYPSTA

SEQ ID NO: 231216 - protein, 15 aa, Artificial Sequence
  Description of Artificial Sequence: Synthetic peptide
  Seed: LRMKWMMAMKYPITA
LRMKIMMTMAYPTTA

SEQ ID NO: 231217 - protein, 15 aa, Artificial Sequence
  Description of Artificial Sequence: Synthetic peptide
  Seed: LRMKWMMAMKYPITA
LRMKIMMTMAYPVTA

SEQ ID NO: 231218 - protein, 15 aa, Artificial Sequence
  Description of Artificial Sequence: Synthetic peptide
  Seed: LRMKWMMAMKYPITA
LRMKIMMTMAYPWTA

SEQ ID NO: 231219 - protein, 15 aa, Artificial Sequence
  Description of Artificial Sequence: Synthetic peptide
  Seed: LRMKWMMAMKYPITA
LRMKIMMTMAYPYTA

SEQ ID NO: 231220 - protein, 15 aa, Artificial Sequence
  Description of Artificial Sequence: Synthetic peptide
  Seed: LRMKWMMAMKYPITA
LRMKIMMTMCYPATA

SEQ ID NO: 231221 - protein, 15 aa, Artificial Sequence
  Description of Artificial Sequence: Synthetic peptide
  Seed: LRMKWMMAMKYPITA
LRMKIMMTMCYPITA

SEQ ID NO: 231222 - protein, 15 aa, Artificial Sequence
  Description of Artificial Sequence: Synthetic peptide
  Seed: LRMKWMMAMKYPITA
LRMKIMMTMCYPLTA

SEQ ID NO: 231223 - protein, 15 aa, Artificial Sequence
  Description of Artificial Sequence: Synthetic peptide
  Seed: LRMKWMMAMKYPITA
LRMKIMMTMCYPVTA

SEQ ID NO: 231224 - protein, 15 aa, Artificial Sequence
  Description of Artificial Sequence: Synthetic peptide
  Seed: LRMKWMMAMKYPITA
LRMKIMMTMDYPATA

SEQ ID NO: 231225 - protein, 15 aa, Artificial Sequence
  Description of Artificial Sequence: Synthetic peptide
  Seed: LRMKWMMAMKYPITA
LRMKIMMTMDYPITA

SEQ ID NO: 231226 - protein, 15 aa, Artificial Sequence
  Description of Artificial Sequence: Synthetic peptide
  Seed: LRMKWMMAMKYPITA
LRMKIMMTMDYPLTA

SEQ ID NO: 231227 - protein, 15 aa, Artificial Sequence
  Description of Artificial Sequence: Synthetic peptide
  Seed: LRMKWMMAMKYPITA
LRMKIMMTMDYPVTA

SEQ ID NO: 231228 - protein, 15 aa, Artificial Sequence
  Description of Artificial Sequence: Synthetic peptide
  Seed: LRMKWMMAMKYPITA
LRMKIMMTMEYPITA

SEQ ID NO: 231229 - protein, 15 aa, Artificial Sequence
  Description of Artificial Sequence: Synthetic peptide
  Seed: LRMKWMMAMKYPITA
LRMKIMMTMEYPLTA

SEQ ID NO: 231230 - protein, 15 aa, Artificial Sequence
  Description of Artificial Sequence: Synthetic peptide
  Seed: LRMKWMMAMKYPITA
LRMKIMMTMEYPVTA

SEQ ID NO: 231231 - protein, 15 aa, Artificial Sequence
  Description of Artificial Sequence: Synthetic peptide
  Seed: LRMKWMMAMKYPITA
LRMKIMMTMFYPATA

SEQ ID NO: 231232 - protein, 15 aa, Artificial Sequence
  Description of Artificial Sequence: Synthetic peptide
  Seed: LRMKWMMAMKYPITA
LRMKIMMTMFYPETA

SEQ ID NO: 231233 - protein, 15 aa, Artificial Sequence
  Description of Artificial Sequence: Synthetic peptide
  Seed: LRMKWMMAMKYPITA
LRMKIMMTMFYPFTA

SEQ ID NO: 231234 - protein, 15 aa, Artificial Sequence
  Description of Artificial Sequence: Synthetic peptide
  Seed: LRMKWMMAMKYPITA
LRMKIMMTMFYPITA

SEQ ID NO: 231235 - protein, 15 aa, Artificial Sequence
  Description of Artificial Sequence: Synthetic peptide
  Seed: LRMKWMMAMKYPITA
LRMKIMMTMFYPLTA

SEQ ID NO: 231236 - protein, 15 aa, Artificial Sequence
  Description of Artificial Sequence: Synthetic peptide
  Seed: LRMKWMMAMKYPITA
LRMKIMMTMFYPMTA

SEQ ID NO: 231237 - protein, 15 aa, Artificial Sequence
  Description of Artificial Sequence: Synthetic peptide
  Seed: LRMKWMMAMKYPITA
LRMKIMMTMFYPNTA

SEQ ID NO: 231238 - protein, 15 aa, Artificial Sequence
  Description of Artificial Sequence: Synthetic peptide
  Seed: LRMKWMMAMKYPITA
LRMKIMMTMFYPSTA

SEQ ID NO: 231239 - protein, 15 aa, Artificial Sequence
  Description of Artificial Sequence: Synthetic peptide
  Seed: LRMKWMMAMKYPITA
LRMKIMMTMFYPTTA

SEQ ID NO: 231240 - protein, 15 aa, Artificial Sequence
  Description of Artificial Sequence: Synthetic peptide
  Seed: LRMKWMMAMKYPITA
LRMKIMMTMFYPVTA

SEQ ID NO: 231241 - protein, 15 aa, Artificial Sequence
  Description of Artificial Sequence: Synthetic peptide
  Seed: LRMKWMMAMKYPITA
LRMKIMMTMFYPYTA

SEQ ID NO: 231242 - protein, 15 aa, Artificial Sequence
  Description of Artificial Sequence: Synthetic peptide
  Seed: LRMKWMMAMKYPITA
LRMKIMMTMGYPATA

SEQ ID NO: 231243 - protein, 15 aa, Artificial Sequence
  Description of Artificial Sequence: Synthetic peptide
  Seed: LRMKWMMAMKYPITA
LRMKIMMTMGYPCTA

SEQ ID NO: 231244 - protein, 15 aa, Artificial Sequence
  Description of Artificial Sequence: Synthetic peptide
  Seed: LRMKWMMAMKYPITA
LRMKIMMTMGYPFTA

SEQ ID NO: 231245 - protein, 15 aa, Artificial Sequence
  Description of Artificial Sequence: Synthetic peptide
  Seed: LRMKWMMAMKYPITA
LRMKIMMTMGYPGTA

SEQ ID NO: 231246 - protein, 15 aa, Artificial Sequence
  Description of Artificial Sequence: Synthetic peptide
  Seed: LRMKWMMAMKYPITA
LRMKIMMTMGYPHTA

SEQ ID NO: 231247 - protein, 15 aa, Artificial Sequence
  Description of Artificial Sequence: Synthetic peptide
  Seed: LRMKWMMAMKYPITA
LRMKIMMTMGYPITA

SEQ ID NO: 231248 - protein, 15 aa, Artificial Sequence
  Description of Artificial Sequence: Synthetic peptide
  Seed: LRMKWMMAMKYPITA
LRMKIMMTMGYPKTA

SEQ ID NO: 231249 - protein, 15 aa, Artificial Sequence
  Description of Artificial Sequence: Synthetic peptide
  Seed: LRMKWMMAMKYPITA
LRMKIMMTMGYPLTA

SEQ ID NO: 231250 - protein, 15 aa, Artificial Sequence
  Description of Artificial Sequence: Synthetic peptide
  Seed: LRMKWMMAMKYPITA
LRMKIMMTMGYPMTA

SEQ ID NO: 231251 - protein, 15 aa, Artificial Sequence
  Description of Artificial Sequence: Synthetic peptide
  Seed: LRMKWMMAMKYPITA
LRMKIMMTMGYPNTA

SEQ ID NO: 231252 - protein, 15 aa, Artificial Sequence
  Description of Artificial Sequence: Synthetic peptide
  Seed: LRMKWMMAMKYPITA
LRMKIMMTMGYPPTA

SEQ ID NO: 231253 - protein, 15 aa, Artificial Sequence
  Description of Artificial Sequence: Synthetic peptide
  Seed: LRMKWMMAMKYPITA
LRMKIMMTMGYPQTA

SEQ ID NO: 231254 - protein, 15 aa, Artificial Sequence
  Description of Artificial Sequence: Synthetic peptide
  Seed: LRMKWMMAMKYPITA
LRMKIMMTMGYPRTA

SEQ ID NO: 231255 - protein, 15 aa, Artificial Sequence
  Description of Artificial Sequence: Synthetic peptide
  Seed: LRMKWMMAMKYPITA
LRMKIMMTMGYPSTA

SEQ ID NO: 231256 - protein, 15 aa, Artificial Sequence
  Description of Artificial Sequence: Synthetic peptide
  Seed: LRMKWMMAMKYPITA
LRMKIMMTMGYPTTA

SEQ ID NO: 231257 - protein, 15 aa, Artificial Sequence
  Description of Artificial Sequence: Synthetic peptide
  Seed: LRMKWMMAMKYPITA
LRMKIMMTMGYPVTA

SEQ ID NO: 231258 - protein, 15 aa, Artificial Sequence
  Description of Artificial Sequence: Synthetic peptide
  Seed: LRMKWMMAMKYPITA
LRMKIMMTMGYPYTA

SEQ ID NO: 231259 - protein, 15 aa, Artificial Sequence
  Description of Artificial Sequence: Synthetic peptide
  Seed: LRMKWMMAMKYPITA
LRMKIMMTMHYPATA

SEQ ID NO: 231260 - protein, 15 aa, Artificial Sequence
  Description of Artificial Sequence: Synthetic peptide
  Seed: LRMKWMMAMKYPITA
LRMKIMMTMHYPFTA

SEQ ID NO: 231261 - protein, 15 aa, Artificial Sequence
  Description of Artificial Sequence: Synthetic peptide
  Seed: LRMKWMMAMKYPITA
LRMKIMMTMHYPGTA

SEQ ID NO: 231262 - protein, 15 aa, Artificial Sequence
  Description of Artificial Sequence: Synthetic peptide
  Seed: LRMKWMMAMKYPITA
LRMKIMMTMHYPHTA

SEQ ID NO: 231263 - protein, 15 aa, Artificial Sequence
  Description of Artificial Sequence: Synthetic peptide
  Seed: LRMKWMMAMKYPITA
LRMKIMMTMHYPITA

SEQ ID NO: 231264 - protein, 15 aa, Artificial Sequence
  Description of Artificial Sequence: Synthetic peptide
  Seed: LRMKWMMAMKYPITA
LRMKIMMTMHYPKTA

SEQ ID NO: 231265 - protein, 15 aa, Artificial Sequence
  Description of Artificial Sequence: Synthetic peptide
  Seed: LRMKWMMAMKYPITA
LRMKIMMTMHYPLTA

SEQ ID NO: 231266 - protein, 15 aa, Artificial Sequence
  Description of Artificial Sequence: Synthetic peptide
  Seed: LRMKWMMAMKYPITA
LRMKIMMTMHYPMTA

SEQ ID NO: 231267 - protein, 15 aa, Artificial Sequence
  Description of Artificial Sequence: Synthetic peptide
  Seed: LRMKWMMAMKYPITA
LRMKIMMTMHYPNTA

SEQ ID NO: 231268 - protein, 15 aa, Artificial Sequence
  Description of Artificial Sequence: Synthetic peptide
  Seed: LRMKWMMAMKYPITA
LRMKIMMTMHYPQTA

SEQ ID NO: 231269 - protein, 15 aa, Artificial Sequence
  Description of Artificial Sequence: Synthetic peptide
  Seed: LRMKWMMAMKYPITA
LRMKIMMTMHYPRTA

SEQ ID NO: 231270 - protein, 15 aa, Artificial Sequence
  Description of Artificial Sequence: Synthetic peptide
  Seed: LRMKWMMAMKYPITA
LRMKIMMTMHYPSTA

SEQ ID NO: 231271 - protein, 15 aa, Artificial Sequence
  Description of Artificial Sequence: Synthetic peptide
  Seed: LRMKWMMAMKYPITA
LRMKIMMTMHYPTTA

SEQ ID NO: 231272 - protein, 15 aa, Artificial Sequence
  Description of Artificial Sequence: Synthetic peptide
  Seed: LRMKWMMAMKYPITA
LRMKIMMTMHYPVTA

SEQ ID NO: 231273 - protein, 15 aa, Artificial Sequence
  Description of Artificial Sequence: Synthetic peptide
  Seed: LRMKWMMAMKYPITA
LRMKIMMTMHYPYTA

SEQ ID NO: 231274 - protein, 15 aa, Artificial Sequence
  Description of Artificial Sequence: Synthetic peptide
  Seed: LRMKWMMAMKYPITA
LRMKIMMTMIYPATA

SEQ ID NO: 231275 - protein, 15 aa, Artificial Sequence
  Description of Artificial Sequence: Synthetic peptide
  Seed: LRMKWMMAMKYPITA
LRMKIMMTMIYPFTA

SEQ ID NO: 231276 - protein, 15 aa, Artificial Sequence
  Description of Artificial Sequence: Synthetic peptide
  Seed: LRMKWMMAMKYPITA
LRMKIMMTMIYPGTA

SEQ ID NO: 231277 - protein, 15 aa, Artificial Sequence
  Description of Artificial Sequence: Synthetic peptide
  Seed: LRMKWMMAMKYPITA
LRMKIMMTMIYPITA

SEQ ID NO: 231278 - protein, 15 aa, Artificial Sequence
  Description of Artificial Sequence: Synthetic peptide
  Seed: LRMKWMMAMKYPITA
LRMKIMMTMIYPKTA

SEQ ID NO: 231279 - protein, 15 aa, Artificial Sequence
  Description of Artificial Sequence: Synthetic peptide
  Seed: LRMKWMMAMKYPITA
LRMKIMMTMIYPLTA

SEQ ID NO: 231280 - protein, 15 aa, Artificial Sequence
  Description of Artificial Sequence: Synthetic peptide
  Seed: LRMKWMMAMKYPITA
LRMKIMMTMIYPMTA

SEQ ID NO: 231281 - protein, 15 aa, Artificial Sequence
  Description of Artificial Sequence: Synthetic peptide
  Seed: LRMKWMMAMKYPITA
LRMKIMMTMIYPNTA

SEQ ID NO: 231282 - protein, 15 aa, Artificial Sequence
  Description of Artificial Sequence: Synthetic peptide
  Seed: LRMKWMMAMKYPITA
LRMKIMMTMIYPRTA

SEQ ID NO: 231283 - protein, 15 aa, Artificial Sequence
  Description of Artificial Sequence: Synthetic peptide
  Seed: LRMKWMMAMKYPITA
LRMKIMMTMIYPSTA

SEQ ID NO: 231284 - protein, 15 aa, Artificial Sequence
  Description of Artificial Sequence: Synthetic peptide
  Seed: LRMKWMMAMKYPITA
LRMKIMMTMIYPTTA

SEQ ID NO: 231285 - protein, 15 aa, Artificial Sequence
  Description of Artificial Sequence: Synthetic peptide
  Seed: LRMKWMMAMKYPITA
LRMKIMMTMIYPVTA

SEQ ID NO: 231286 - protein, 15 aa, Artificial Sequence
  Description of Artificial Sequence: Synthetic peptide
  Seed: LRMKWMMAMKYPITA
LRMKIMMTMIYPYTA

SEQ ID NO: 231287 - protein, 15 aa, Artificial Sequence
  Description of Artificial Sequence: Synthetic peptide
  Seed: LRMKWMMAMKYPITA
LRMKIMMTMKYPATA

SEQ ID NO: 231288 - protein, 15 aa, Artificial Sequence
  Description of Artificial Sequence: Synthetic peptide
  Seed: LRMKWMMAMKYPITA
LRMKIMMTMKYPCTA

SEQ ID NO: 231289 - protein, 15 aa, Artificial Sequence
  Description of Artificial Sequence: Synthetic peptide
  Seed: LRMKWMMAMKYPITA
LRMKIMMTMKYPDTA

SEQ ID NO: 231290 - protein, 15 aa, Artificial Sequence
  Description of Artificial Sequence: Synthetic peptide
  Seed: LRMKWMMAMKYPITA
LRMKIMMTMKYPETA

SEQ ID NO: 231291 - protein, 15 aa, Artificial Sequence
  Description of Artificial Sequence: Synthetic peptide
  Seed: LRMKWMMAMKYPITA
LRMKIMMTMKYPFTA

SEQ ID NO: 231292 - protein, 15 aa, Artificial Sequence
  Description of Artificial Sequence: Synthetic peptide
  Seed: LRMKWMMAMKYPITA
LRMKIMMTMKYPGTA

SEQ ID NO: 231293 - protein, 15 aa, Artificial Sequence
  Description of Artificial Sequence: Synthetic peptide
  Seed: LRMKWMMAMKYPITA
LRMKIMMTMKYPHTA

SEQ ID NO: 231294 - protein, 15 aa, Artificial Sequence
  Description of Artificial Sequence: Synthetic peptide
  Seed: LRMKWMMAMKYPITA
LRMKIMMTMKYPITA

SEQ ID NO: 231295 - protein, 15 aa, Artificial Sequence
  Description of Artificial Sequence: Synthetic peptide
  Seed: LRMKWMMAMKYPITA
LRMKIMMTMKYPKTA

SEQ ID NO: 231296 - protein, 15 aa, Artificial Sequence
  Description of Artificial Sequence: Synthetic peptide
  Seed: LRMKWMMAMKYPITA
LRMKIMMTMKYPLTA

SEQ ID NO: 231297 - protein, 15 aa, Artificial Sequence
  Description of Artificial Sequence: Synthetic peptide
  Seed: LRMKWMMAMKYPITA
LRMKIMMTMKYPMTA

SEQ ID NO: 231298 - protein, 15 aa, Artificial Sequence
  Description of Artificial Sequence: Synthetic peptide
  Seed: LRMKWMMAMKYPITA
LRMKIMMTMKYPNTA

SEQ ID NO: 231299 - protein, 15 aa, Artificial Sequence
  Description of Artificial Sequence: Synthetic peptide
  Seed: LRMKWMMAMKYPITA
LRMKIMMTMKYPPTA

SEQ ID NO: 231300 - protein, 15 aa, Artificial Sequence
  Description of Artificial Sequence: Synthetic peptide
  Seed: LRMKWMMAMKYPITA
LRMKIMMTMKYPQTA

SEQ ID NO: 231301 - protein, 15 aa, Artificial Sequence
  Description of Artificial Sequence: Synthetic peptide
  Seed: LRMKWMMAMKYPITA
LRMKIMMTMKYPRTA

SEQ ID NO: 231302 - protein, 15 aa, Artificial Sequence
  Description of Artificial Sequence: Synthetic peptide
  Seed: LRMKWMMAMKYPITA
LRMKIMMTMKYPSTA

SEQ ID NO: 231303 - protein, 15 aa, Artificial Sequence
  Description of Artificial Sequence: Synthetic peptide
  Seed: LRMKWMMAMKYPITA
LRMKIMMTMKYPTTA

SEQ ID NO: 231304 - protein, 15 aa, Artificial Sequence
  Description of Artificial Sequence: Synthetic peptide
  Seed: LRMKWMMAMKYPITA
LRMKIMMTMKYPVTA

SEQ ID NO: 231305 - protein, 15 aa, Artificial Sequence
  Description of Artificial Sequence: Synthetic peptide
  Seed: LRMKWMMAMKYPITA
LRMKIMMTMKYPWTA

SEQ ID NO: 231306 - protein, 15 aa, Artificial Sequence
  Description of Artificial Sequence: Synthetic peptide
  Seed: LRMKWMMAMKYPITA
LRMKIMMTMKYPYTA

SEQ ID NO: 231307 - protein, 15 aa, Artificial Sequence
  Description of Artificial Sequence: Synthetic peptide
  Seed: LRMKWMMAMKYPITA
LRMKIMMTMLYPITA

SEQ ID NO: 231308 - protein, 15 aa, Artificial Sequence
  Description of Artificial Sequence: Synthetic peptide
  Seed: LRMKWMMAMKYPITA
LRMKIMMTMLYPRTA

SEQ ID NO: 231309 - protein, 15 aa, Artificial Sequence
  Description of Artificial Sequence: Synthetic peptide
  Seed: LRMKWMMAMKYPITA
LRMKIMMTMMYPITA

SEQ ID NO: 231310 - protein, 15 aa, Artificial Sequence
  Description of Artificial Sequence: Synthetic peptide
  Seed: LRMKWMMAMKYPITA
LRMKIMMTMMYPLTA

SEQ ID NO: 231311 - protein, 15 aa, Artificial Sequence
  Description of Artificial Sequence: Synthetic peptide
  Seed: LRMKWMMAMKYPITA
LRMKIMMTMMYPRTA

SEQ ID NO: 231312 - protein, 15 aa, Artificial Sequence
  Description of Artificial Sequence: Synthetic peptide
  Seed: LRMKWMMAMKYPITA
LRMKIMMTMMYPVTA

SEQ ID NO: 231313 - protein, 15 aa, Artificial Sequence
  Description of Artificial Sequence: Synthetic peptide
  Seed: LRMKWMMAMKYPITA
LRMKIMMTMMYPYTA

SEQ ID NO: 231314 - protein, 15 aa, Artificial Sequence
  Description of Artificial Sequence: Synthetic peptide
  Seed: LRMKWMMAMKYPITA
LRMKIMMTMNYPATA

SEQ ID NO: 231315 - protein, 15 aa, Artificial Sequence
  Description of Artificial Sequence: Synthetic peptide
  Seed: LRMKWMMAMKYPITA
LRMKIMMTMNYPDTA

SEQ ID NO: 231316 - protein, 15 aa, Artificial Sequence
  Description of Artificial Sequence: Synthetic peptide
  Seed: LRMKWMMAMKYPITA
LRMKIMMTMNYPETA

SEQ ID NO: 231317 - protein, 15 aa, Artificial Sequence
  Description of Artificial Sequence: Synthetic peptide
  Seed: LRMKWMMAMKYPITA
LRMKIMMTMNYPFTA

SEQ ID NO: 231318 - protein, 15 aa, Artificial Sequence
  Description of Artificial Sequence: Synthetic peptide
  Seed: LRMKWMMAMKYPITA
LRMKIMMTMNYPGTA

SEQ ID NO: 231319 - protein, 15 aa, Artificial Sequence
  Description of Artificial Sequence: Synthetic peptide
  Seed: LRMKWMMAMKYPITA
LRMKIMMTMNYPHTA

SEQ ID NO: 231320 - protein, 15 aa, Artificial Sequence
  Description of Artificial Sequence: Synthetic peptide
  Seed: LRMKWMMAMKYPITA
LRMKIMMTMNYPITA

SEQ ID NO: 231321 - protein, 15 aa, Artificial Sequence
  Description of Artificial Sequence: Synthetic peptide
  Seed: LRMKWMMAMKYPITA
LRMKIMMTMNYPKTA

SEQ ID NO: 231322 - protein, 15 aa, Artificial Sequence
  Description of Artificial Sequence: Synthetic peptide
  Seed: LRMKWMMAMKYPITA
LRMKIMMTMNYPLTA

SEQ ID NO: 231323 - protein, 15 aa, Artificial Sequence
  Description of Artificial Sequence: Synthetic peptide
  Seed: LRMKWMMAMKYPITA
LRMKIMMTMNYPMTA

SEQ ID NO: 231324 - protein, 15 aa, Artificial Sequence
  Description of Artificial Sequence: Synthetic peptide
  Seed: LRMKWMMAMKYPITA
LRMKIMMTMNYPNTA

SEQ ID NO: 231325 - protein, 15 aa, Artificial Sequence
  Description of Artificial Sequence: Synthetic peptide
  Seed: LRMKWMMAMKYPITA
LRMKIMMTMNYPQTA

SEQ ID NO: 231326 - protein, 15 aa, Artificial Sequence
  Description of Artificial Sequence: Synthetic peptide
  Seed: LRMKWMMAMKYPITA
LRMKIMMTMNYPRTA

SEQ ID NO: 231327 - protein, 15 aa, Artificial Sequence
  Description of Artificial Sequence: Synthetic peptide
  Seed: LRMKWMMAMKYPITA
LRMKIMMTMNYPSTA

SEQ ID NO: 231328 - protein, 15 aa, Artificial Sequence
  Description of Artificial Sequence: Synthetic peptide
  Seed: LRMKWMMAMKYPITA
LRMKIMMTMNYPTTA

SEQ ID NO: 231329 - protein, 15 aa, Artificial Sequence
  Description of Artificial Sequence: Synthetic peptide
  Seed: LRMKWMMAMKYPITA
LRMKIMMTMNYPVTA

SEQ ID NO: 231330 - protein, 15 aa, Artificial Sequence
  Description of Artificial Sequence: Synthetic peptide
  Seed: LRMKWMMAMKYPITA
LRMKIMMTMNYPYTA

SEQ ID NO: 231331 - protein, 15 aa, Artificial Sequence
  Description of Artificial Sequence: Synthetic peptide
  Seed: LRMKWMMAMKYPITA
LRMKIMMTMPYPATA

SEQ ID NO: 231332 - protein, 15 aa, Artificial Sequence
  Description of Artificial Sequence: Synthetic peptide
  Seed: LRMKWMMAMKYPITA
LRMKIMMTMPYPCTA

SEQ ID NO: 231333 - protein, 15 aa, Artificial Sequence
  Description of Artificial Sequence: Synthetic peptide
  Seed: LRMKWMMAMKYPITA
LRMKIMMTMPYPDTA

SEQ ID NO: 231334 - protein, 15 aa, Artificial Sequence
  Description of Artificial Sequence: Synthetic peptide
  Seed: LRMKWMMAMKYPITA
LRMKIMMTMPYPETA

SEQ ID NO: 231335 - protein, 15 aa, Artificial Sequence
  Description of Artificial Sequence: Synthetic peptide
  Seed: LRMKWMMAMKYPITA
LRMKIMMTMPYPFTA

SEQ ID NO: 231336 - protein, 15 aa, Artificial Sequence
  Description of Artificial Sequence: Synthetic peptide
  Seed: LRMKWMMAMKYPITA
LRMKIMMTMPYPGTA

SEQ ID NO: 231337 - protein, 15 aa, Artificial Sequence
  Description of Artificial Sequence: Synthetic peptide
  Seed: LRMKWMMAMKYPITA
LRMKIMMTMPYPHTA

SEQ ID NO: 231338 - protein, 15 aa, Artificial Sequence
  Description of Artificial Sequence: Synthetic peptide
  Seed: LRMKWMMAMKYPITA
LRMKIMMTMPYPITA

SEQ ID NO: 231339 - protein, 15 aa, Artificial Sequence
  Description of Artificial Sequence: Synthetic peptide
  Seed: LRMKWMMAMKYPITA
LRMKIMMTMPYPKTA

SEQ ID NO: 231340 - protein, 15 aa, Artificial Sequence
  Description of Artificial Sequence: Synthetic peptide
  Seed: LRMKWMMAMKYPITA
LRMKIMMTMPYPLTA

SEQ ID NO: 231341 - protein, 15 aa, Artificial Sequence
  Description of Artificial Sequence: Synthetic peptide
  Seed: LRMKWMMAMKYPITA
LRMKIMMTMPYPMTA

SEQ ID NO: 231342 - protein, 15 aa, Artificial Sequence
  Description of Artificial Sequence: Synthetic peptide
  Seed: LRMKWMMAMKYPITA
LRMKIMMTMPYPNTA

SEQ ID NO: 231343 - protein, 15 aa, Artificial Sequence
  Description of Artificial Sequence: Synthetic peptide
  Seed: LRMKWMMAMKYPITA
LRMKIMMTMPYPPTA

SEQ ID NO: 231344 - protein, 15 aa, Artificial Sequence
  Description of Artificial Sequence: Synthetic peptide
  Seed: LRMKWMMAMKYPITA
LRMKIMMTMPYPQTA

SEQ ID NO: 231345 - protein, 15 aa, Artificial Sequence
  Description of Artificial Sequence: Synthetic peptide
  Seed: LRMKWMMAMKYPITA
LRMKIMMTMPYPRTA

SEQ ID NO: 231346 - protein, 15 aa, Artificial Sequence
  Description of Artificial Sequence: Synthetic peptide
  Seed: LRMKWMMAMKYPITA
LRMKIMMTMPYPSTA

SEQ ID NO: 231347 - protein, 15 aa, Artificial Sequence
  Description of Artificial Sequence: Synthetic peptide
  Seed: LRMKWMMAMKYPITA
LRMKIMMTMPYPTTA

SEQ ID NO: 231348 - protein, 15 aa, Artificial Sequence
  Description of Artificial Sequence: Synthetic peptide
  Seed: LRMKWMMAMKYPITA
LRMKIMMTMPYPVTA

SEQ ID NO: 231349 - protein, 15 aa, Artificial Sequence
  Description of Artificial Sequence: Synthetic peptide
  Seed: LRMKWMMAMKYPITA
LRMKIMMTMPYPWTA

SEQ ID NO: 231350 - protein, 15 aa, Artificial Sequence
  Description of Artificial Sequence: Synthetic peptide
  Seed: LRMKWMMAMKYPITA
LRMKIMMTMPYPYTA

SEQ ID NO: 231351 - protein, 15 aa, Artificial Sequence
  Description of Artificial Sequence: Synthetic peptide
  Seed: LRMKWMMAMKYPITA
LRMKIMMTMQYPATA

SEQ ID NO: 231352 - protein, 15 aa, Artificial Sequence
  Description of Artificial Sequence: Synthetic peptide
  Seed: LRMKWMMAMKYPITA
LRMKIMMTMQYPITA

SEQ ID NO: 231353 - protein, 15 aa, Artificial Sequence
  Description of Artificial Sequence: Synthetic peptide
  Seed: LRMKWMMAMKYPITA
LRMKIMMTMQYPKTA

SEQ ID NO: 231354 - protein, 15 aa, Artificial Sequence
  Description of Artificial Sequence: Synthetic peptide
  Seed: LRMKWMMAMKYPITA
LRMKIMMTMQYPLTA

SEQ ID NO: 231355 - protein, 15 aa, Artificial Sequence
  Description of Artificial Sequence: Synthetic peptide
  Seed: LRMKWMMAMKYPITA
LRMKIMMTMQYPMTA

SEQ ID NO: 231356 - protein, 15 aa, Artificial Sequence
  Description of Artificial Sequence: Synthetic peptide
  Seed: LRMKWMMAMKYPITA
LRMKIMMTMQYPRTA

SEQ ID NO: 231357 - protein, 15 aa, Artificial Sequence
  Description of Artificial Sequence: Synthetic peptide
  Seed: LRMKWMMAMKYPITA
LRMKIMMTMQYPVTA

SEQ ID NO: 231358 - protein, 15 aa, Artificial Sequence
  Description of Artificial Sequence: Synthetic peptide
  Seed: LRMKWMMAMKYPITA
LRMKIMMTMQYPYTA

SEQ ID NO: 231359 - protein, 15 aa, Artificial Sequence
  Description of Artificial Sequence: Synthetic peptide
  Seed: LRMKWMMAMKYPITA
LRMKIMMTMRYPATA

SEQ ID NO: 231360 - protein, 15 aa, Artificial Sequence
  Description of Artificial Sequence: Synthetic peptide
  Seed: LRMKWMMAMKYPITA
LRMKIMMTMRYPCTA

SEQ ID NO: 231361 - protein, 15 aa, Artificial Sequence
  Description of Artificial Sequence: Synthetic peptide
  Seed: LRMKWMMAMKYPITA
LRMKIMMTMRYPDTA

SEQ ID NO: 231362 - protein, 15 aa, Artificial Sequence
  Description of Artificial Sequence: Synthetic peptide
  Seed: LRMKWMMAMKYPITA
LRMKIMMTMRYPETA

SEQ ID NO: 231363 - protein, 15 aa, Artificial Sequence
  Description of Artificial Sequence: Synthetic peptide
  Seed: LRMKWMMAMKYPITA
LRMKIMMTMRYPFTA

SEQ ID NO: 231364 - protein, 15 aa, Artificial Sequence
  Description of Artificial Sequence: Synthetic peptide
  Seed: LRMKWMMAMKYPITA
LRMKIMMTMRYPGTA

SEQ ID NO: 231365 - protein, 15 aa, Artificial Sequence
  Description of Artificial Sequence: Synthetic peptide
  Seed: LRMKWMMAMKYPITA
LRMKIMMTMRYPHTA

SEQ ID NO: 231366 - protein, 15 aa, Artificial Sequence
  Description of Artificial Sequence: Synthetic peptide
  Seed: LRMKWMMAMKYPITA
LRMKIMMTMRYPITA

SEQ ID NO: 231367 - protein, 15 aa, Artificial Sequence
  Description of Artificial Sequence: Synthetic peptide
  Seed: LRMKWMMAMKYPITA
LRMKIMMTMRYPKTA

SEQ ID NO: 231368 - protein, 15 aa, Artificial Sequence
  Description of Artificial Sequence: Synthetic peptide
  Seed: LRMKWMMAMKYPITA
LRMKIMMTMRYPLTA

SEQ ID NO: 231369 - protein, 15 aa, Artificial Sequence
  Description of Artificial Sequence: Synthetic peptide
  Seed: LRMKWMMAMKYPITA
LRMKIMMTMRYPMTA

SEQ ID NO: 231370 - protein, 15 aa, Artificial Sequence
  Description of Artificial Sequence: Synthetic peptide
  Seed: LRMKWMMAMKYPITA
LRMKIMMTMRYPNTA

SEQ ID NO: 231371 - protein, 15 aa, Artificial Sequence
  Description of Artificial Sequence: Synthetic peptide
  Seed: LRMKWMMAMKYPITA
LRMKIMMTMRYPPTA

SEQ ID NO: 231372 - protein, 15 aa, Artificial Sequence
  Description of Artificial Sequence: Synthetic peptide
  Seed: LRMKWMMAMKYPITA
LRMKIMMTMRYPQTA

SEQ ID NO: 231373 - protein, 15 aa, Artificial Sequence
  Description of Artificial Sequence: Synthetic peptide
  Seed: LRMKWMMAMKYPITA
LRMKIMMTMRYPRTA

SEQ ID NO: 231374 - protein, 15 aa, Artificial Sequence
  Description of Artificial Sequence: Synthetic peptide
  Seed: LRMKWMMAMKYPITA
LRMKIMMTMRYPSTA

SEQ ID NO: 231375 - protein, 15 aa, Artificial Sequence
  Description of Artificial Sequence: Synthetic peptide
  Seed: LRMKWMMAMKYPITA
LRMKIMMTMRYPTTA

SEQ ID NO: 231376 - protein, 15 aa, Artificial Sequence
  Description of Artificial Sequence: Synthetic peptide
  Seed: LRMKWMMAMKYPITA
LRMKIMMTMRYPVTA

SEQ ID NO: 231377 - protein, 15 aa, Artificial Sequence
  Description of Artificial Sequence: Synthetic peptide
  Seed: LRMKWMMAMKYPITA
LRMKIMMTMRYPWTA

SEQ ID NO: 231378 - protein, 15 aa, Artificial Sequence
  Description of Artificial Sequence: Synthetic peptide
  Seed: LRMKWMMAMKYPITA
LRMKIMMTMRYPYTA

SEQ ID NO: 231379 - protein, 15 aa, Artificial Sequence
  Description of Artificial Sequence: Synthetic peptide
  Seed: LRMKWMMAMKYPITA
LRMKIMMTMSYPATA

SEQ ID NO: 231380 - protein, 15 aa, Artificial Sequence
  Description of Artificial Sequence: Synthetic peptide
  Seed: LRMKWMMAMKYPITA
LRMKIMMTMSYPCTA

SEQ ID NO: 231381 - protein, 15 aa, Artificial Sequence
  Description of Artificial Sequence: Synthetic peptide
  Seed: LRMKWMMAMKYPITA
LRMKIMMTMSYPDTA

SEQ ID NO: 231382 - protein, 15 aa, Artificial Sequence
  Description of Artificial Sequence: Synthetic peptide
  Seed: LRMKWMMAMKYPITA
LRMKIMMTMSYPETA

SEQ ID NO: 231383 - protein, 15 aa, Artificial Sequence
  Description of Artificial Sequence: Synthetic peptide
  Seed: LRMKWMMAMKYPITA
LRMKIMMTMSYPFTA

SEQ ID NO: 231384 - protein, 15 aa, Artificial Sequence
  Description of Artificial Sequence: Synthetic peptide
  Seed: LRMKWMMAMKYPITA
LRMKIMMTMSYPGTA

SEQ ID NO: 231385 - protein, 15 aa, Artificial Sequence
  Description of Artificial Sequence: Synthetic peptide
  Seed: LRMKWMMAMKYPITA
LRMKIMMTMSYPHTA

SEQ ID NO: 231386 - protein, 15 aa, Artificial Sequence
  Description of Artificial Sequence: Synthetic peptide
  Seed: LRMKWMMAMKYPITA
LRMKIMMTMSYPITA

SEQ ID NO: 231387 - protein, 15 aa, Artificial Sequence
  Description of Artificial Sequence: Synthetic peptide
  Seed: LRMKWMMAMKYPITA
LRMKIMMTMSYPKTA

SEQ ID NO: 231388 - protein, 15 aa, Artificial Sequence
  Description of Artificial Sequence: Synthetic peptide
  Seed: LRMKWMMAMKYPITA
LRMKIMMTMSYPLTA

SEQ ID NO: 231389 - protein, 15 aa, Artificial Sequence
  Description of Artificial Sequence: Synthetic peptide
  Seed: LRMKWMMAMKYPITA
LRMKIMMTMSYPMTA

SEQ ID NO: 231390 - protein, 15 aa, Artificial Sequence
  Description of Artificial Sequence: Synthetic peptide
  Seed: LRMKWMMAMKYPITA
LRMKIMMTMSYPNTA

SEQ ID NO: 231391 - protein, 15 aa, Artificial Sequence
  Description of Artificial Sequence: Synthetic peptide
  Seed: LRMKWMMAMKYPITA
LRMKIMMTMSYPPTA

SEQ ID NO: 231392 - protein, 15 aa, Artificial Sequence
  Description of Artificial Sequence: Synthetic peptide
  Seed: LRMKWMMAMKYPITA
LRMKIMMTMSYPQTA

SEQ ID NO: 231393 - protein, 15 aa, Artificial Sequence
  Description of Artificial Sequence: Synthetic peptide
  Seed: LRMKWMMAMKYPITA
LRMKIMMTMSYPRTA

SEQ ID NO: 231394 - protein, 15 aa, Artificial Sequence
  Description of Artificial Sequence: Synthetic peptide
  Seed: LRMKWMMAMKYPITA
LRMKIMMTMSYPSTA

SEQ ID NO: 231395 - protein, 15 aa, Artificial Sequence
  Description of Artificial Sequence: Synthetic peptide
  Seed: LRMKWMMAMKYPITA
LRMKIMMTMSYPTTA

SEQ ID NO: 231396 - protein, 15 aa, Artificial Sequence
  Description of Artificial Sequence: Synthetic peptide
  Seed: LRMKWMMAMKYPITA
LRMKIMMTMSYPVTA

SEQ ID NO: 231397 - protein, 15 aa, Artificial Sequence
  Description of Artificial Sequence: Synthetic peptide
  Seed: LRMKWMMAMKYPITA
LRMKIMMTMSYPWTA

SEQ ID NO: 231398 - protein, 15 aa, Artificial Sequence
  Description of Artificial Sequence: Synthetic peptide
  Seed: LRMKWMMAMKYPITA
LRMKIMMTMSYPYTA

SEQ ID NO: 231399 - protein, 15 aa, Artificial Sequence
  Description of Artificial Sequence: Synthetic peptide
  Seed: LRMKWMMAMKYPITA
LRMKIMMTMTYPATA

SEQ ID NO: 231400 - protein, 15 aa, Artificial Sequence
  Description of Artificial Sequence: Synthetic peptide
  Seed: LRMKWMMAMKYPITA
LRMKIMMTMTYPCTA

SEQ ID NO: 231401 - protein, 15 aa, Artificial Sequence
  Description of Artificial Sequence: Synthetic peptide
  Seed: LRMKWMMAMKYPITA
LRMKIMMTMTYPDTA

SEQ ID NO: 231402 - protein, 15 aa, Artificial Sequence
  Description of Artificial Sequence: Synthetic peptide
  Seed: LRMKWMMAMKYPITA
LRMKIMMTMTYPETA

SEQ ID NO: 231403 - protein, 15 aa, Artificial Sequence
  Description of Artificial Sequence: Synthetic peptide
  Seed: LRMKWMMAMKYPITA
LRMKIMMTMTYPFTA

SEQ ID NO: 231404 - protein, 15 aa, Artificial Sequence
  Description of Artificial Sequence: Synthetic peptide
  Seed: LRMKWMMAMKYPITA
LRMKIMMTMTYPGTA

SEQ ID NO: 231405 - protein, 15 aa, Artificial Sequence
  Description of Artificial Sequence: Synthetic peptide
  Seed: LRMKWMMAMKYPITA
LRMKIMMTMTYPHTA

SEQ ID NO: 231406 - protein, 15 aa, Artificial Sequence
  Description of Artificial Sequence: Synthetic peptide
  Seed: LRMKWMMAMKYPITA
LRMKIMMTMTYPITA

SEQ ID NO: 231407 - protein, 15 aa, Artificial Sequence
  Description of Artificial Sequence: Synthetic peptide
  Seed: LRMKWMMAMKYPITA
LRMKIMMTMTYPKTA

SEQ ID NO: 231408 - protein, 15 aa, Artificial Sequence
  Description of Artificial Sequence: Synthetic peptide
  Seed: LRMKWMMAMKYPITA
LRMKIMMTMTYPLTA

SEQ ID NO: 231409 - protein, 15 aa, Artificial Sequence
  Description of Artificial Sequence: Synthetic peptide
  Seed: LRMKWMMAMKYPITA
LRMKIMMTMTYPMTA

SEQ ID NO: 231410 - protein, 15 aa, Artificial Sequence
  Description of Artificial Sequence: Synthetic peptide
  Seed: LRMKWMMAMKYPITA
LRMKIMMTMTYPNTA

SEQ ID NO: 231411 - protein, 15 aa, Artificial Sequence
  Description of Artificial Sequence: Synthetic peptide
  Seed: LRMKWMMAMKYPITA
LRMKIMMTMTYPPTA

SEQ ID NO: 231412 - protein, 15 aa, Artificial Sequence
  Description of Artificial Sequence: Synthetic peptide
  Seed: LRMKWMMAMKYPITA
LRMKIMMTMTYPQTA

SEQ ID NO: 231413 - protein, 15 aa, Artificial Sequence
  Description of Artificial Sequence: Synthetic peptide
  Seed: LRMKWMMAMKYPITA
LRMKIMMTMTYPRTA

SEQ ID NO: 231414 - protein, 15 aa, Artificial Sequence
  Description of Artificial Sequence: Synthetic peptide
  Seed: LRMKWMMAMKYPITA
LRMKIMMTMTYPSTA

SEQ ID NO: 231415 - protein, 15 aa, Artificial Sequence
  Description of Artificial Sequence: Synthetic peptide
  Seed: LRMKWMMAMKYPITA
LRMKIMMTMTYPTTA

SEQ ID NO: 231416 - protein, 15 aa, Artificial Sequence
  Description of Artificial Sequence: Synthetic peptide
  Seed: LRMKWMMAMKYPITA
LRMKIMMTMTYPVTA

SEQ ID NO: 231417 - protein, 15 aa, Artificial Sequence
  Description of Artificial Sequence: Synthetic peptide
  Seed: LRMKWMMAMKYPITA
LRMKIMMTMTYPYTA

SEQ ID NO: 231418 - protein, 15 aa, Artificial Sequence
  Description of Artificial Sequence: Synthetic peptide
  Seed: LRMKWMMAMKYPITA
LRMKIMMTMVYPATA

SEQ ID NO: 231419 - protein, 15 aa, Artificial Sequence
  Description of Artificial Sequence: Synthetic peptide
  Seed: LRMKWMMAMKYPITA
LRMKIMMTMVYPCTA

SEQ ID NO: 231420 - protein, 15 aa, Artificial Sequence
  Description of Artificial Sequence: Synthetic peptide
  Seed: LRMKWMMAMKYPITA
LRMKIMMTMVYPDTA

SEQ ID NO: 231421 - protein, 15 aa, Artificial Sequence
  Description of Artificial Sequence: Synthetic peptide
  Seed: LRMKWMMAMKYPITA
LRMKIMMTMVYPETA

SEQ ID NO: 231422 - protein, 15 aa, Artificial Sequence
  Description of Artificial Sequence: Synthetic peptide
  Seed: LRMKWMMAMKYPITA
LRMKIMMTMVYPFTA

SEQ ID NO: 231423 - protein, 15 aa, Artificial Sequence
  Description of Artificial Sequence: Synthetic peptide
  Seed: LRMKWMMAMKYPITA
LRMKIMMTMVYPGTA

SEQ ID NO: 231424 - protein, 15 aa, Artificial Sequence
  Description of Artificial Sequence: Synthetic peptide
  Seed: LRMKWMMAMKYPITA
LRMKIMMTMVYPHTA

SEQ ID NO: 231425 - protein, 15 aa, Artificial Sequence
  Description of Artificial Sequence: Synthetic peptide
  Seed: LRMKWMMAMKYPITA
LRMKIMMTMVYPITA

SEQ ID NO: 231426 - protein, 15 aa, Artificial Sequence
  Description of Artificial Sequence: Synthetic peptide
  Seed: LRMKWMMAMKYPITA
LRMKIMMTMVYPKTA

SEQ ID NO: 231427 - protein, 15 aa, Artificial Sequence
  Description of Artificial Sequence: Synthetic peptide
  Seed: LRMKWMMAMKYPITA
LRMKIMMTMVYPLTA

SEQ ID NO: 231428 - protein, 15 aa, Artificial Sequence
  Description of Artificial Sequence: Synthetic peptide
  Seed: LRMKWMMAMKYPITA
LRMKIMMTMVYPMTA

SEQ ID NO: 231429 - protein, 15 aa, Artificial Sequence
  Description of Artificial Sequence: Synthetic peptide
  Seed: LRMKWMMAMKYPITA
LRMKIMMTMVYPNTA

SEQ ID NO: 231430 - protein, 15 aa, Artificial Sequence
  Description of Artificial Sequence: Synthetic peptide
  Seed: LRMKWMMAMKYPITA
LRMKIMMTMVYPQTA

SEQ ID NO: 231431 - protein, 15 aa, Artificial Sequence
  Description of Artificial Sequence: Synthetic peptide
  Seed: LRMKWMMAMKYPITA
LRMKIMMTMVYPRTA

SEQ ID NO: 231432 - protein, 15 aa, Artificial Sequence
  Description of Artificial Sequence: Synthetic peptide
  Seed: LRMKWMMAMKYPITA
LRMKIMMTMVYPSTA

SEQ ID NO: 231433 - protein, 15 aa, Artificial Sequence
  Description of Artificial Sequence: Synthetic peptide
  Seed: LRMKWMMAMKYPITA
LRMKIMMTMVYPTTA

SEQ ID NO: 231434 - protein, 15 aa, Artificial Sequence
  Description of Artificial Sequence: Synthetic peptide
  Seed: LRMKWMMAMKYPITA
LRMKIMMTMVYPVTA

SEQ ID NO: 231435 - protein, 15 aa, Artificial Sequence
  Description of Artificial Sequence: Synthetic peptide
  Seed: LRMKWMMAMKYPITA
LRMKIMMTMVYPYTA

SEQ ID NO: 231436 - protein, 15 aa, Artificial Sequence
  Description of Artificial Sequence: Synthetic peptide
  Seed: LRMKWMMAMKYPITA
LRMKIMMTMWYPRTA

SEQ ID NO: 231437 - protein, 15 aa, Artificial Sequence
  Description of Artificial Sequence: Synthetic peptide
  Seed: LRMKWMMAMKYPITA
LRMKIMMTMYYPITA

SEQ ID NO: 231438 - protein, 15 aa, Artificial Sequence
  Description of Artificial Sequence: Synthetic peptide
  Seed: LRMKWMMAMKYPITA
LRMKIMMTMYYPLTA

SEQ ID NO: 231439 - protein, 15 aa, Artificial Sequence
  Description of Artificial Sequence: Synthetic peptide
  Seed: LRMKWMMAMKYPITA
LRMKIMMTMYYPVTA

SEQ ID NO: 231440 - protein, 15 aa, Artificial Sequence
  Description of Artificial Sequence: Synthetic peptide
  Seed: LRMKWMMAMKYPITA
LRMKIMMVMAYPATA

SEQ ID NO: 231441 - protein, 15 aa, Artificial Sequence
  Description of Artificial Sequence: Synthetic peptide
  Seed: LRMKWMMAMKYPITA
LRMKIMMVMAYPCTA

SEQ ID NO: 231442 - protein, 15 aa, Artificial Sequence
  Description of Artificial Sequence: Synthetic peptide
  Seed: LRMKWMMAMKYPITA
LRMKIMMVMAYPDTA

SEQ ID NO: 231443 - protein, 15 aa, Artificial Sequence
  Description of Artificial Sequence: Synthetic peptide
  Seed: LRMKWMMAMKYPITA
LRMKIMMVMAYPETA

SEQ ID NO: 231444 - protein, 15 aa, Artificial Sequence
  Description of Artificial Sequence: Synthetic peptide
  Seed: LRMKWMMAMKYPITA
LRMKIMMVMAYPFTA

SEQ ID NO: 231445 - protein, 15 aa, Artificial Sequence
  Description of Artificial Sequence: Synthetic peptide
  Seed: LRMKWMMAMKYPITA
LRMKIMMVMAYPGTA

SEQ ID NO: 231446 - protein, 15 aa, Artificial Sequence
  Description of Artificial Sequence: Synthetic peptide
  Seed: LRMKWMMAMKYPITA
LRMKIMMVMAYPHTA

SEQ ID NO: 231447 - protein, 15 aa, Artificial Sequence
  Description of Artificial Sequence: Synthetic peptide
  Seed: LRMKWMMAMKYPITA
LRMKIMMVMAYPITA

SEQ ID NO: 231448 - protein, 15 aa, Artificial Sequence
  Description of Artificial Sequence: Synthetic peptide
  Seed: LRMKWMMAMKYPITA
LRMKIMMVMAYPKTA

SEQ ID NO: 231449 - protein, 15 aa, Artificial Sequence
  Description of Artificial Sequence: Synthetic peptide
  Seed: LRMKWMMAMKYPITA
LRMKIMMVMAYPLTA

SEQ ID NO: 231450 - protein, 15 aa, Artificial Sequence
  Description of Artificial Sequence: Synthetic peptide
  Seed: LRMKWMMAMKYPITA
LRMKIMMVMAYPMTA

SEQ ID NO: 231451 - protein, 15 aa, Artificial Sequence
  Description of Artificial Sequence: Synthetic peptide
  Seed: LRMKWMMAMKYPITA
LRMKIMMVMAYPNTA

SEQ ID NO: 231452 - protein, 15 aa, Artificial Sequence
  Description of Artificial Sequence: Synthetic peptide
  Seed: LRMKWMMAMKYPITA
LRMKIMMVMAYPPTA

SEQ ID NO: 231453 - protein, 15 aa, Artificial Sequence
  Description of Artificial Sequence: Synthetic peptide
  Seed: LRMKWMMAMKYPITA
LRMKIMMVMAYPQTA

SEQ ID NO: 231454 - protein, 15 aa, Artificial Sequence
  Description of Artificial Sequence: Synthetic peptide
  Seed: LRMKWMMAMKYPITA
LRMKIMMVMAYPRTA

SEQ ID NO: 231455 - protein, 15 aa, Artificial Sequence
  Description of Artificial Sequence: Synthetic peptide
  Seed: LRMKWMMAMKYPITA
LRMKIMMVMAYPSTA

SEQ ID NO: 231456 - protein, 15 aa, Artificial Sequence
  Description of Artificial Sequence: Synthetic peptide
  Seed: LRMKWMMAMKYPITA
LRMKIMMVMAYPTTA

SEQ ID NO: 231457 - protein, 15 aa, Artificial Sequence
  Description of Artificial Sequence: Synthetic peptide
  Seed: LRMKWMMAMKYPITA
LRMKIMMVMAYPVTA

SEQ ID NO: 231458 - protein, 15 aa, Artificial Sequence
  Description of Artificial Sequence: Synthetic peptide
  Seed: LRMKWMMAMKYPITA
LRMKIMMVMAYPWTA

SEQ ID NO: 231459 - protein, 15 aa, Artificial Sequence
  Description of Artificial Sequence: Synthetic peptide
  Seed: LRMKWMMAMKYPITA
LRMKIMMVMAYPYTA

SEQ ID NO: 231460 - protein, 15 aa, Artificial Sequence
  Description of Artificial Sequence: Synthetic peptide
  Seed: LRMKWMMAMKYPITA
LRMKIMMVMDYPATA

SEQ ID NO: 231461 - protein, 15 aa, Artificial Sequence
  Description of Artificial Sequence: Synthetic peptide
  Seed: LRMKWMMAMKYPITA
LRMKIMMVMDYPDTA

SEQ ID NO: 231462 - protein, 15 aa, Artificial Sequence
  Description of Artificial Sequence: Synthetic peptide
  Seed: LRMKWMMAMKYPITA
LRMKIMMVMDYPETA

SEQ ID NO: 231463 - protein, 15 aa, Artificial Sequence
  Description of Artificial Sequence: Synthetic peptide
  Seed: LRMKWMMAMKYPITA
LRMKIMMVMDYPITA

SEQ ID NO: 231464 - protein, 15 aa, Artificial Sequence
  Description of Artificial Sequence: Synthetic peptide
  Seed: LRMKWMMAMKYPITA
LRMKIMMVMDYPLTA

SEQ ID NO: 231465 - protein, 15 aa, Artificial Sequence
  Description of Artificial Sequence: Synthetic peptide
  Seed: LRMKWMMAMKYPITA
LRMKIMMVMDYPMTA

SEQ ID NO: 231466 - protein, 15 aa, Artificial Sequence
  Description of Artificial Sequence: Synthetic peptide
  Seed: LRMKWMMAMKYPITA
LRMKIMMVMDYPSTA

SEQ ID NO: 231467 - protein, 15 aa, Artificial Sequence
  Description of Artificial Sequence: Synthetic peptide
  Seed: LRMKWMMAMKYPITA
LRMKIMMVMDYPVTA

SEQ ID NO: 231468 - protein, 15 aa, Artificial Sequence
  Description of Artificial Sequence: Synthetic peptide
  Seed: LRMKWMMAMKYPITA
LRMKIMMVMEYPATA

SEQ ID NO: 231469 - protein, 15 aa, Artificial Sequence
  Description of Artificial Sequence: Synthetic peptide
  Seed: LRMKWMMAMKYPITA
LRMKIMMVMEYPITA

SEQ ID NO: 231470 - protein, 15 aa, Artificial Sequence
  Description of Artificial Sequence: Synthetic peptide
  Seed: LRMKWMMAMKYPITA
LRMKIMMVMEYPLTA

SEQ ID NO: 231471 - protein, 15 aa, Artificial Sequence
  Description of Artificial Sequence: Synthetic peptide
  Seed: LRMKWMMAMKYPITA
LRMKIMMVMEYPVTA

SEQ ID NO: 231472 - protein, 15 aa, Artificial Sequence
  Description of Artificial Sequence: Synthetic peptide
  Seed: LRMKWMMAMKYPITA
LRMKIMMVMGYPATA

SEQ ID NO: 231473 - protein, 15 aa, Artificial Sequence
  Description of Artificial Sequence: Synthetic peptide
  Seed: LRMKWMMAMKYPITA
LRMKIMMVMGYPCTA

SEQ ID NO: 231474 - protein, 15 aa, Artificial Sequence
  Description of Artificial Sequence: Synthetic peptide
  Seed: LRMKWMMAMKYPITA
LRMKIMMVMGYPFTA

SEQ ID NO: 231475 - protein, 15 aa, Artificial Sequence
  Description of Artificial Sequence: Synthetic peptide
  Seed: LRMKWMMAMKYPITA
LRMKIMMVMGYPGTA

SEQ ID NO: 231476 - protein, 15 aa, Artificial Sequence
  Description of Artificial Sequence: Synthetic peptide
  Seed: LRMKWMMAMKYPITA
LRMKIMMVMGYPHTA

SEQ ID NO: 231477 - protein, 15 aa, Artificial Sequence
  Description of Artificial Sequence: Synthetic peptide
  Seed: LRMKWMMAMKYPITA
LRMKIMMVMGYPITA

SEQ ID NO: 231478 - protein, 15 aa, Artificial Sequence
  Description of Artificial Sequence: Synthetic peptide
  Seed: LRMKWMMAMKYPITA
LRMKIMMVMGYPKTA

SEQ ID NO: 231479 - protein, 15 aa, Artificial Sequence
  Description of Artificial Sequence: Synthetic peptide
  Seed: LRMKWMMAMKYPITA
LRMKIMMVMGYPLTA

SEQ ID NO: 231480 - protein, 15 aa, Artificial Sequence
  Description of Artificial Sequence: Synthetic peptide
  Seed: LRMKWMMAMKYPITA
LRMKIMMVMGYPMTA

SEQ ID NO: 231481 - protein, 15 aa, Artificial Sequence
  Description of Artificial Sequence: Synthetic peptide
  Seed: LRMKWMMAMKYPITA
LRMKIMMVMGYPNTA

SEQ ID NO: 231482 - protein, 15 aa, Artificial Sequence
  Description of Artificial Sequence: Synthetic peptide
  Seed: LRMKWMMAMKYPITA
LRMKIMMVMGYPPTA

SEQ ID NO: 231483 - protein, 15 aa, Artificial Sequence
  Description of Artificial Sequence: Synthetic peptide
  Seed: LRMKWMMAMKYPITA
LRMKIMMVMGYPQTA

SEQ ID NO: 231484 - protein, 15 aa, Artificial Sequence
  Description of Artificial Sequence: Synthetic peptide
  Seed: LRMKWMMAMKYPITA
LRMKIMMVMGYPRTA

SEQ ID NO: 231485 - protein, 15 aa, Artificial Sequence
  Description of Artificial Sequence: Synthetic peptide
  Seed: LRMKWMMAMKYPITA
LRMKIMMVMGYPSTA

SEQ ID NO: 231486 - protein, 15 aa, Artificial Sequence
  Description of Artificial Sequence: Synthetic peptide
  Seed: LRMKWMMAMKYPITA
LRMKIMMVMGYPTTA

SEQ ID NO: 231487 - protein, 15 aa, Artificial Sequence
  Description of Artificial Sequence: Synthetic peptide
  Seed: LRMKWMMAMKYPITA
LRMKIMMVMGYPVTA

SEQ ID NO: 231488 - protein, 15 aa, Artificial Sequence
  Description of Artificial Sequence: Synthetic peptide
  Seed: LRMKWMMAMKYPITA
LRMKIMMVMGYPYTA

SEQ ID NO: 231489 - protein, 15 aa, Artificial Sequence
  Description of Artificial Sequence: Synthetic peptide
  Seed: LRMKWMMAMKYPITA
LRMKIMMVMHYPATA

SEQ ID NO: 231490 - protein, 15 aa, Artificial Sequence
  Description of Artificial Sequence: Synthetic peptide
  Seed: LRMKWMMAMKYPITA
LRMKIMMVMHYPFTA

SEQ ID NO: 231491 - protein, 15 aa, Artificial Sequence
  Description of Artificial Sequence: Synthetic peptide
  Seed: LRMKWMMAMKYPITA
LRMKIMMVMHYPGTA

SEQ ID NO: 231492 - protein, 15 aa, Artificial Sequence
  Description of Artificial Sequence: Synthetic peptide
  Seed: LRMKWMMAMKYPITA
LRMKIMMVMHYPHTA

SEQ ID NO: 231493 - protein, 15 aa, Artificial Sequence
  Description of Artificial Sequence: Synthetic peptide
  Seed: LRMKWMMAMKYPITA
LRMKIMMVMHYPITA

SEQ ID NO: 231494 - protein, 15 aa, Artificial Sequence
  Description of Artificial Sequence: Synthetic peptide
  Seed: LRMKWMMAMKYPITA
LRMKIMMVMHYPKTA

SEQ ID NO: 231495 - protein, 15 aa, Artificial Sequence
  Description of Artificial Sequence: Synthetic peptide
  Seed: LRMKWMMAMKYPITA
LRMKIMMVMHYPLTA

SEQ ID NO: 231496 - protein, 15 aa, Artificial Sequence
  Description of Artificial Sequence: Synthetic peptide
  Seed: LRMKWMMAMKYPITA
LRMKIMMVMHYPMTA

SEQ ID NO: 231497 - protein, 15 aa, Artificial Sequence
  Description of Artificial Sequence: Synthetic peptide
  Seed: LRMKWMMAMKYPITA
LRMKIMMVMHYPNTA

SEQ ID NO: 231498 - protein, 15 aa, Artificial Sequence
  Description of Artificial Sequence: Synthetic peptide
  Seed: LRMKWMMAMKYPITA
LRMKIMMVMHYPQTA

SEQ ID NO: 231499 - protein, 15 aa, Artificial Sequence
  Description of Artificial Sequence: Synthetic peptide
  Seed: LRMKWMMAMKYPITA
LRMKIMMVMHYPRTA

SEQ ID NO: 231500 - protein, 15 aa, Artificial Sequence
  Description of Artificial Sequence: Synthetic peptide
  Seed: LRMKWMMAMKYPITA
LRMKIMMVMHYPSTA

SEQ ID NO: 231501 - protein, 15 aa, Artificial Sequence
  Description of Artificial Sequence: Synthetic peptide
  Seed: LRMKWMMAMKYPITA
LRMKIMMVMHYPTTA

SEQ ID NO: 231502 - protein, 15 aa, Artificial Sequence
  Description of Artificial Sequence: Synthetic peptide
  Seed: LRMKWMMAMKYPITA
LRMKIMMVMHYPVTA

SEQ ID NO: 231503 - protein, 15 aa, Artificial Sequence
  Description of Artificial Sequence: Synthetic peptide
  Seed: LRMKWMMAMKYPITA
LRMKIMMVMHYPYTA

SEQ ID NO: 231504 - protein, 15 aa, Artificial Sequence
  Description of Artificial Sequence: Synthetic peptide
  Seed: LRMKWMMAMKYPITA
LRMKIMMVMIYPATA

SEQ ID NO: 231505 - protein, 15 aa, Artificial Sequence
  Description of Artificial Sequence: Synthetic peptide
  Seed: LRMKWMMAMKYPITA
LRMKIMMVMIYPDTA

SEQ ID NO: 231506 - protein, 15 aa, Artificial Sequence
  Description of Artificial Sequence: Synthetic peptide
  Seed: LRMKWMMAMKYPITA
LRMKIMMVMIYPETA

SEQ ID NO: 231507 - protein, 15 aa, Artificial Sequence
  Description of Artificial Sequence: Synthetic peptide
  Seed: LRMKWMMAMKYPITA
LRMKIMMVMIYPGTA

SEQ ID NO: 231508 - protein, 15 aa, Artificial Sequence
  Description of Artificial Sequence: Synthetic peptide
  Seed: LRMKWMMAMKYPITA
LRMKIMMVMIYPITA

SEQ ID NO: 231509 - protein, 15 aa, Artificial Sequence
  Description of Artificial Sequence: Synthetic peptide
  Seed: LRMKWMMAMKYPITA
LRMKIMMVMIYPKTA

SEQ ID NO: 231510 - protein, 15 aa, Artificial Sequence
  Description of Artificial Sequence: Synthetic peptide
  Seed: LRMKWMMAMKYPITA
LRMKIMMVMIYPMTA

SEQ ID NO: 231511 - protein, 15 aa, Artificial Sequence
  Description of Artificial Sequence: Synthetic peptide
  Seed: LRMKWMMAMKYPITA
LRMKIMMVMIYPRTA

SEQ ID NO: 231512 - protein, 15 aa, Artificial Sequence
  Description of Artificial Sequence: Synthetic peptide
  Seed: LRMKWMMAMKYPITA
LRMKIMMVMIYPSTA

SEQ ID NO: 231513 - protein, 15 aa, Artificial Sequence
  Description of Artificial Sequence: Synthetic peptide
  Seed: LRMKWMMAMKYPITA
LRMKIMMVMIYPTTA

SEQ ID NO: 231514 - protein, 15 aa, Artificial Sequence
  Description of Artificial Sequence: Synthetic peptide
  Seed: LRMKWMMAMKYPITA
LRMKIMMVMIYPVTA

SEQ ID NO: 231515 - protein, 15 aa, Artificial Sequence
  Description of Artificial Sequence: Synthetic peptide
  Seed: LRMKWMMAMKYPITA
LRMKIMMVMKYPATA

SEQ ID NO: 231516 - protein, 15 aa, Artificial Sequence
  Description of Artificial Sequence: Synthetic peptide
  Seed: LRMKWMMAMKYPITA
LRMKIMMVMKYPCTA

SEQ ID NO: 231517 - protein, 15 aa, Artificial Sequence
  Description of Artificial Sequence: Synthetic peptide
  Seed: LRMKWMMAMKYPITA
LRMKIMMVMKYPDTA

SEQ ID NO: 231518 - protein, 15 aa, Artificial Sequence
  Description of Artificial Sequence: Synthetic peptide
  Seed: LRMKWMMAMKYPITA
LRMKIMMVMKYPETA

SEQ ID NO: 231519 - protein, 15 aa, Artificial Sequence
  Description of Artificial Sequence: Synthetic peptide
  Seed: LRMKWMMAMKYPITA
LRMKIMMVMKYPFTA

SEQ ID NO: 231520 - protein, 15 aa, Artificial Sequence
  Description of Artificial Sequence: Synthetic peptide
  Seed: LRMKWMMAMKYPITA
LRMKIMMVMKYPGTA

SEQ ID NO: 231521 - protein, 15 aa, Artificial Sequence
  Description of Artificial Sequence: Synthetic peptide
  Seed: LRMKWMMAMKYPITA
LRMKIMMVMKYPHTA

SEQ ID NO: 231522 - protein, 15 aa, Artificial Sequence
  Description of Artificial Sequence: Synthetic peptide
  Seed: LRMKWMMAMKYPITA
LRMKIMMVMKYPITA

SEQ ID NO: 231523 - protein, 15 aa, Artificial Sequence
  Description of Artificial Sequence: Synthetic peptide
  Seed: LRMKWMMAMKYPITA
LRMKIMMVMKYPKTA

SEQ ID NO: 231524 - protein, 15 aa, Artificial Sequence
  Description of Artificial Sequence: Synthetic peptide
  Seed: LRMKWMMAMKYPITA
LRMKIMMVMKYPLTA

SEQ ID NO: 231525 - protein, 15 aa, Artificial Sequence
  Description of Artificial Sequence: Synthetic peptide
  Seed: LRMKWMMAMKYPITA
LRMKIMMVMKYPMTA

SEQ ID NO: 231526 - protein, 15 aa, Artificial Sequence
  Description of Artificial Sequence: Synthetic peptide
  Seed: LRMKWMMAMKYPITA
LRMKIMMVMKYPNTA

SEQ ID NO: 231527 - protein, 15 aa, Artificial Sequence
  Description of Artificial Sequence: Synthetic peptide
  Seed: LRMKWMMAMKYPITA
LRMKIMMVMKYPPTA

SEQ ID NO: 231528 - protein, 15 aa, Artificial Sequence
  Description of Artificial Sequence: Synthetic peptide
  Seed: LRMKWMMAMKYPITA
LRMKIMMVMKYPQTA

SEQ ID NO: 231529 - protein, 15 aa, Artificial Sequence
  Description of Artificial Sequence: Synthetic peptide
  Seed: LRMKWMMAMKYPITA
LRMKIMMVMKYPRTA

SEQ ID NO: 231530 - protein, 15 aa, Artificial Sequence
  Description of Artificial Sequence: Synthetic peptide
  Seed: LRMKWMMAMKYPITA
LRMKIMMVMKYPSTA

SEQ ID NO: 231531 - protein, 15 aa, Artificial Sequence
  Description of Artificial Sequence: Synthetic peptide
  Seed: LRMKWMMAMKYPITA
LRMKIMMVMKYPTTA

SEQ ID NO: 231532 - protein, 15 aa, Artificial Sequence
  Description of Artificial Sequence: Synthetic peptide
  Seed: LRMKWMMAMKYPITA
LRMKIMMVMKYPVTA

SEQ ID NO: 231533 - protein, 15 aa, Artificial Sequence
  Description of Artificial Sequence: Synthetic peptide
  Seed: LRMKWMMAMKYPITA
LRMKIMMVMKYPWTA

SEQ ID NO: 231534 - protein, 15 aa, Artificial Sequence
  Description of Artificial Sequence: Synthetic peptide
  Seed: LRMKWMMAMKYPITA
LRMKIMMVMKYPYTA

SEQ ID NO: 231535 - protein, 15 aa, Artificial Sequence
  Description of Artificial Sequence: Synthetic peptide
  Seed: LRMKWMMAMKYPITA
LRMKIMMVMMYPKTA

SEQ ID NO: 231536 - protein, 15 aa, Artificial Sequence
  Description of Artificial Sequence: Synthetic peptide
  Seed: LRMKWMMAMKYPITA
LRMKIMMVMMYPRTA

SEQ ID NO: 231537 - protein, 15 aa, Artificial Sequence
  Description of Artificial Sequence: Synthetic peptide
  Seed: LRMKWMMAMKYPITA
LRMKIMMVMNYPATA

SEQ ID NO: 231538 - protein, 15 aa, Artificial Sequence
  Description of Artificial Sequence: Synthetic peptide
  Seed: LRMKWMMAMKYPITA
LRMKIMMVMNYPCTA

SEQ ID NO: 231539 - protein, 15 aa, Artificial Sequence
  Description of Artificial Sequence: Synthetic peptide
  Seed: LRMKWMMAMKYPITA
LRMKIMMVMNYPDTA

SEQ ID NO: 231540 - protein, 15 aa, Artificial Sequence
  Description of Artificial Sequence: Synthetic peptide
  Seed: LRMKWMMAMKYPITA
LRMKIMMVMNYPETA

SEQ ID NO: 231541 - protein, 15 aa, Artificial Sequence
  Description of Artificial Sequence: Synthetic peptide
  Seed: LRMKWMMAMKYPITA
LRMKIMMVMNYPFTA

SEQ ID NO: 231542 - protein, 15 aa, Artificial Sequence
  Description of Artificial Sequence: Synthetic peptide
  Seed: LRMKWMMAMKYPITA
LRMKIMMVMNYPGTA

SEQ ID NO: 231543 - protein, 15 aa, Artificial Sequence
  Description of Artificial Sequence: Synthetic peptide
  Seed: LRMKWMMAMKYPITA
LRMKIMMVMNYPHTA

SEQ ID NO: 231544 - protein, 15 aa, Artificial Sequence
  Description of Artificial Sequence: Synthetic peptide
  Seed: LRMKWMMAMKYPITA
LRMKIMMVMNYPITA

SEQ ID NO: 231545 - protein, 15 aa, Artificial Sequence
  Description of Artificial Sequence: Synthetic peptide
  Seed: LRMKWMMAMKYPITA
LRMKIMMVMNYPKTA

SEQ ID NO: 231546 - protein, 15 aa, Artificial Sequence
  Description of Artificial Sequence: Synthetic peptide
  Seed: LRMKWMMAMKYPITA
LRMKIMMVMNYPLTA

SEQ ID NO: 231547 - protein, 15 aa, Artificial Sequence
  Description of Artificial Sequence: Synthetic peptide
  Seed: LRMKWMMAMKYPITA
LRMKIMMVMNYPMTA

SEQ ID NO: 231548 - protein, 15 aa, Artificial Sequence
  Description of Artificial Sequence: Synthetic peptide
  Seed: LRMKWMMAMKYPITA
LRMKIMMVMNYPNTA

SEQ ID NO: 231549 - protein, 15 aa, Artificial Sequence
  Description of Artificial Sequence: Synthetic peptide
  Seed: LRMKWMMAMKYPITA
LRMKIMMVMNYPQTA

SEQ ID NO: 231550 - protein, 15 aa, Artificial Sequence
  Description of Artificial Sequence: Synthetic peptide
  Seed: LRMKWMMAMKYPITA
LRMKIMMVMNYPRTA

SEQ ID NO: 231551 - protein, 15 aa, Artificial Sequence
  Description of Artificial Sequence: Synthetic peptide
  Seed: LRMKWMMAMKYPITA
LRMKIMMVMNYPSTA

SEQ ID NO: 231552 - protein, 15 aa, Artificial Sequence
  Description of Artificial Sequence: Synthetic peptide
  Seed: LRMKWMMAMKYPITA
LRMKIMMVMNYPTTA

SEQ ID NO: 231553 - protein, 15 aa, Artificial Sequence
  Description of Artificial Sequence: Synthetic peptide
  Seed: LRMKWMMAMKYPITA
LRMKIMMVMNYPVTA

SEQ ID NO: 231554 - protein, 15 aa, Artificial Sequence
  Description of Artificial Sequence: Synthetic peptide
  Seed: LRMKWMMAMKYPITA
LRMKIMMVMNYPYTA

SEQ ID NO: 231555 - protein, 15 aa, Artificial Sequence
  Description of Artificial Sequence: Synthetic peptide
  Seed: LRMKWMMAMKYPITA
LRMKIMMVMPYPATA

SEQ ID NO: 231556 - protein, 15 aa, Artificial Sequence
  Description of Artificial Sequence: Synthetic peptide
  Seed: LRMKWMMAMKYPITA
LRMKIMMVMPYPCTA

SEQ ID NO: 231557 - protein, 15 aa, Artificial Sequence
  Description of Artificial Sequence: Synthetic peptide
  Seed: LRMKWMMAMKYPITA
LRMKIMMVMPYPDTA

SEQ ID NO: 231558 - protein, 15 aa, Artificial Sequence
  Description of Artificial Sequence: Synthetic peptide
  Seed: LRMKWMMAMKYPITA
LRMKIMMVMPYPETA

SEQ ID NO: 231559 - protein, 15 aa, Artificial Sequence
  Description of Artificial Sequence: Synthetic peptide
  Seed: LRMKWMMAMKYPITA
LRMKIMMVMPYPFTA

SEQ ID NO: 231560 - protein, 15 aa, Artificial Sequence
  Description of Artificial Sequence: Synthetic peptide
  Seed: LRMKWMMAMKYPITA
LRMKIMMVMPYPGTA

SEQ ID NO: 231561 - protein, 15 aa, Artificial Sequence
  Description of Artificial Sequence: Synthetic peptide
  Seed: LRMKWMMAMKYPITA
LRMKIMMVMPYPHTA

SEQ ID NO: 231562 - protein, 15 aa, Artificial Sequence
  Description of Artificial Sequence: Synthetic peptide
  Seed: LRMKWMMAMKYPITA
LRMKIMMVMPYPITA

SEQ ID NO: 231563 - protein, 15 aa, Artificial Sequence
  Description of Artificial Sequence: Synthetic peptide
  Seed: LRMKWMMAMKYPITA
LRMKIMMVMPYPKTA

SEQ ID NO: 231564 - protein, 15 aa, Artificial Sequence
  Description of Artificial Sequence: Synthetic peptide
  Seed: LRMKWMMAMKYPITA
LRMKIMMVMPYPLTA

SEQ ID NO: 231565 - protein, 15 aa, Artificial Sequence
  Description of Artificial Sequence: Synthetic peptide
  Seed: LRMKWMMAMKYPITA
LRMKIMMVMPYPMTA

SEQ ID NO: 231566 - protein, 15 aa, Artificial Sequence
  Description of Artificial Sequence: Synthetic peptide
  Seed: LRMKWMMAMKYPITA
LRMKIMMVMPYPNTA

SEQ ID NO: 231567 - protein, 15 aa, Artificial Sequence
  Description of Artificial Sequence: Synthetic peptide
  Seed: LRMKWMMAMKYPITA
LRMKIMMVMPYPPTA

SEQ ID NO: 231568 - protein, 15 aa, Artificial Sequence
  Description of Artificial Sequence: Synthetic peptide
  Seed: LRMKWMMAMKYPITA
LRMKIMMVMPYPQTA

SEQ ID NO: 231569 - protein, 15 aa, Artificial Sequence
  Description of Artificial Sequence: Synthetic peptide
  Seed: LRMKWMMAMKYPITA
LRMKIMMVMPYPRTA

SEQ ID NO: 231570 - protein, 15 aa, Artificial Sequence
  Description of Artificial Sequence: Synthetic peptide
  Seed: LRMKWMMAMKYPITA
LRMKIMMVMPYPSTA

SEQ ID NO: 231571 - protein, 15 aa, Artificial Sequence
  Description of Artificial Sequence: Synthetic peptide
  Seed: LRMKWMMAMKYPITA
LRMKIMMVMPYPTTA

SEQ ID NO: 231572 - protein, 15 aa, Artificial Sequence
  Description of Artificial Sequence: Synthetic peptide
  Seed: LRMKWMMAMKYPITA
LRMKIMMVMPYPVTA

SEQ ID NO: 231573 - protein, 15 aa, Artificial Sequence
  Description of Artificial Sequence: Synthetic peptide
  Seed: LRMKWMMAMKYPITA
LRMKIMMVMPYPWTA

SEQ ID NO: 231574 - protein, 15 aa, Artificial Sequence
  Description of Artificial Sequence: Synthetic peptide
  Seed: LRMKWMMAMKYPITA
LRMKIMMVMPYPYTA

SEQ ID NO: 231575 - protein, 15 aa, Artificial Sequence
  Description of Artificial Sequence: Synthetic peptide
  Seed: LRMKWMMAMKYPITA
LRMKIMMVMQYPATA

SEQ ID NO: 231576 - protein, 15 aa, Artificial Sequence
  Description of Artificial Sequence: Synthetic peptide
  Seed: LRMKWMMAMKYPITA
LRMKIMMVMQYPKTA

SEQ ID NO: 231577 - protein, 15 aa, Artificial Sequence
  Description of Artificial Sequence: Synthetic peptide
  Seed: LRMKWMMAMKYPITA
LRMKIMMVMQYPLTA

SEQ ID NO: 231578 - protein, 15 aa, Artificial Sequence
  Description of Artificial Sequence: Synthetic peptide
  Seed: LRMKWMMAMKYPITA
LRMKIMMVMQYPMTA

SEQ ID NO: 231579 - protein, 15 aa, Artificial Sequence
  Description of Artificial Sequence: Synthetic peptide
  Seed: LRMKWMMAMKYPITA
LRMKIMMVMQYPRTA

SEQ ID NO: 231580 - protein, 15 aa, Artificial Sequence
  Description of Artificial Sequence: Synthetic peptide
  Seed: LRMKWMMAMKYPITA
LRMKIMMVMQYPVTA

SEQ ID NO: 231581 - protein, 15 aa, Artificial Sequence
  Description of Artificial Sequence: Synthetic peptide
  Seed: LRMKWMMAMKYPITA
LRMKIMMVMRYPATA

SEQ ID NO: 231582 - protein, 15 aa, Artificial Sequence
  Description of Artificial Sequence: Synthetic peptide
  Seed: LRMKWMMAMKYPITA
LRMKIMMVMRYPCTA

SEQ ID NO: 231583 - protein, 15 aa, Artificial Sequence
  Description of Artificial Sequence: Synthetic peptide
  Seed: LRMKWMMAMKYPITA
LRMKIMMVMRYPDTA

SEQ ID NO: 231584 - protein, 15 aa, Artificial Sequence
  Description of Artificial Sequence: Synthetic peptide
  Seed: LRMKWMMAMKYPITA
LRMKIMMVMRYPETA

SEQ ID NO: 231585 - protein, 15 aa, Artificial Sequence
  Description of Artificial Sequence: Synthetic peptide
  Seed: LRMKWMMAMKYPITA
LRMKIMMVMRYPFTA

SEQ ID NO: 231586 - protein, 15 aa, Artificial Sequence
  Description of Artificial Sequence: Synthetic peptide
  Seed: LRMKWMMAMKYPITA
LRMKIMMVMRYPGTA

SEQ ID NO: 231587 - protein, 15 aa, Artificial Sequence
  Description of Artificial Sequence: Synthetic peptide
  Seed: LRMKWMMAMKYPITA
LRMKIMMVMRYPHTA

SEQ ID NO: 231588 - protein, 15 aa, Artificial Sequence
  Description of Artificial Sequence: Synthetic peptide
  Seed: LRMKWMMAMKYPITA
LRMKIMMVMRYPITA

SEQ ID NO: 231589 - protein, 15 aa, Artificial Sequence
  Description of Artificial Sequence: Synthetic peptide
  Seed: LRMKWMMAMKYPITA
LRMKIMMVMRYPKTA

SEQ ID NO: 231590 - protein, 15 aa, Artificial Sequence
  Description of Artificial Sequence: Synthetic peptide
  Seed: LRMKWMMAMKYPITA
LRMKIMMVMRYPLTA

SEQ ID NO: 231591 - protein, 15 aa, Artificial Sequence
  Description of Artificial Sequence: Synthetic peptide
  Seed: LRMKWMMAMKYPITA
LRMKIMMVMRYPMTA

SEQ ID NO: 231592 - protein, 15 aa, Artificial Sequence
  Description of Artificial Sequence: Synthetic peptide
  Seed: LRMKWMMAMKYPITA
LRMKIMMVMRYPNTA

SEQ ID NO: 231593 - protein, 15 aa, Artificial Sequence
  Description of Artificial Sequence: Synthetic peptide
  Seed: LRMKWMMAMKYPITA
LRMKIMMVMRYPPTA

SEQ ID NO: 231594 - protein, 15 aa, Artificial Sequence
  Description of Artificial Sequence: Synthetic peptide
  Seed: LRMKWMMAMKYPITA
LRMKIMMVMRYPQTA

SEQ ID NO: 231595 - protein, 15 aa, Artificial Sequence
  Description of Artificial Sequence: Synthetic peptide
  Seed: LRMKWMMAMKYPITA
LRMKIMMVMRYPRTA

SEQ ID NO: 231596 - protein, 15 aa, Artificial Sequence
  Description of Artificial Sequence: Synthetic peptide
  Seed: LRMKWMMAMKYPITA
LRMKIMMVMRYPSTA

SEQ ID NO: 231597 - protein, 15 aa, Artificial Sequence
  Description of Artificial Sequence: Synthetic peptide
  Seed: LRMKWMMAMKYPITA
LRMKIMMVMRYPTTA

SEQ ID NO: 231598 - protein, 15 aa, Artificial Sequence
  Description of Artificial Sequence: Synthetic peptide
  Seed: LRMKWMMAMKYPITA
LRMKIMMVMRYPVTA

SEQ ID NO: 231599 - protein, 15 aa, Artificial Sequence
  Description of Artificial Sequence: Synthetic peptide
  Seed: LRMKWMMAMKYPITA
LRMKIMMVMRYPWTA

SEQ ID NO: 231600 - protein, 15 aa, Artificial Sequence
  Description of Artificial Sequence: Synthetic peptide
  Seed: LRMKWMMAMKYPITA
LRMKIMMVMRYPYTA

SEQ ID NO: 231601 - protein, 15 aa, Artificial Sequence
  Description of Artificial Sequence: Synthetic peptide
  Seed: LRMKWMMAMKYPITA
LRMKIMMVMSYPATA

SEQ ID NO: 231602 - protein, 15 aa, Artificial Sequence
  Description of Artificial Sequence: Synthetic peptide
  Seed: LRMKWMMAMKYPITA
LRMKIMMVMSYPCTA

SEQ ID NO: 231603 - protein, 15 aa, Artificial Sequence
  Description of Artificial Sequence: Synthetic peptide
  Seed: LRMKWMMAMKYPITA
LRMKIMMVMSYPDTA

SEQ ID NO: 231604 - protein, 15 aa, Artificial Sequence
  Description of Artificial Sequence: Synthetic peptide
  Seed: LRMKWMMAMKYPITA
LRMKIMMVMSYPETA

SEQ ID NO: 231605 - protein, 15 aa, Artificial Sequence
  Description of Artificial Sequence: Synthetic peptide
  Seed: LRMKWMMAMKYPITA
LRMKIMMVMSYPFTA

SEQ ID NO: 231606 - protein, 15 aa, Artificial Sequence
  Description of Artificial Sequence: Synthetic peptide
  Seed: LRMKWMMAMKYPITA
LRMKIMMVMSYPGTA

SEQ ID NO: 231607 - protein, 15 aa, Artificial Sequence
  Description of Artificial Sequence: Synthetic peptide
  Seed: LRMKWMMAMKYPITA
LRMKIMMVMSYPHTA

SEQ ID NO: 231608 - protein, 15 aa, Artificial Sequence
  Description of Artificial Sequence: Synthetic peptide
  Seed: LRMKWMMAMKYPITA
LRMKIMMVMSYPITA

SEQ ID NO: 231609 - protein, 15 aa, Artificial Sequence
  Description of Artificial Sequence: Synthetic peptide
  Seed: LRMKWMMAMKYPITA
LRMKIMMVMSYPKTA

SEQ ID NO: 231610 - protein, 15 aa, Artificial Sequence
  Description of Artificial Sequence: Synthetic peptide
  Seed: LRMKWMMAMKYPITA
LRMKIMMVMSYPLTA

SEQ ID NO: 231611 - protein, 15 aa, Artificial Sequence
  Description of Artificial Sequence: Synthetic peptide
  Seed: LRMKWMMAMKYPITA
LRMKIMMVMSYPMTA

SEQ ID NO: 231612 - protein, 15 aa, Artificial Sequence
  Description of Artificial Sequence: Synthetic peptide
  Seed: LRMKWMMAMKYPITA
LRMKIMMVMSYPNTA

SEQ ID NO: 231613 - protein, 15 aa, Artificial Sequence
  Description of Artificial Sequence: Synthetic peptide
  Seed: LRMKWMMAMKYPITA
LRMKIMMVMSYPPTA

SEQ ID NO: 231614 - protein, 15 aa, Artificial Sequence
  Description of Artificial Sequence: Synthetic peptide
  Seed: LRMKWMMAMKYPITA
LRMKIMMVMSYPQTA

SEQ ID NO: 231615 - protein, 15 aa, Artificial Sequence
  Description of Artificial Sequence: Synthetic peptide
  Seed: LRMKWMMAMKYPITA
LRMKIMMVMSYPRTA

SEQ ID NO: 231616 - protein, 15 aa, Artificial Sequence
  Description of Artificial Sequence: Synthetic peptide
  Seed: LRMKWMMAMKYPITA
LRMKIMMVMSYPSTA

SEQ ID NO: 231617 - protein, 15 aa, Artificial Sequence
  Description of Artificial Sequence: Synthetic peptide
  Seed: LRMKWMMAMKYPITA
LRMKIMMVMSYPTTA

SEQ ID NO: 231618 - protein, 15 aa, Artificial Sequence
  Description of Artificial Sequence: Synthetic peptide
  Seed: LRMKWMMAMKYPITA
LRMKIMMVMSYPVTA

SEQ ID NO: 231619 - protein, 15 aa, Artificial Sequence
  Description of Artificial Sequence: Synthetic peptide
  Seed: LRMKWMMAMKYPITA
LRMKIMMVMSYPYTA

SEQ ID NO: 231620 - protein, 15 aa, Artificial Sequence
  Description of Artificial Sequence: Synthetic peptide
  Seed: LRMKWMMAMKYPITA
LRMKIMMVMTYPATA

SEQ ID NO: 231621 - protein, 15 aa, Artificial Sequence
  Description of Artificial Sequence: Synthetic peptide
  Seed: LRMKWMMAMKYPITA
LRMKIMMVMTYPCTA

SEQ ID NO: 231622 - protein, 15 aa, Artificial Sequence
  Description of Artificial Sequence: Synthetic peptide
  Seed: LRMKWMMAMKYPITA
LRMKIMMVMTYPDTA

SEQ ID NO: 231623 - protein, 15 aa, Artificial Sequence
  Description of Artificial Sequence: Synthetic peptide
  Seed: LRMKWMMAMKYPITA
LRMKIMMVMTYPETA

SEQ ID NO: 231624 - protein, 15 aa, Artificial Sequence
  Description of Artificial Sequence: Synthetic peptide
  Seed: LRMKWMMAMKYPITA
LRMKIMMVMTYPFTA

SEQ ID NO: 231625 - protein, 15 aa, Artificial Sequence
  Description of Artificial Sequence: Synthetic peptide
  Seed: LRMKWMMAMKYPITA
LRMKIMMVMTYPGTA

SEQ ID NO: 231626 - protein, 15 aa, Artificial Sequence
  Description of Artificial Sequence: Synthetic peptide
  Seed: LRMKWMMAMKYPITA
LRMKIMMVMTYPHTA

SEQ ID NO: 231627 - protein, 15 aa, Artificial Sequence
  Description of Artificial Sequence: Synthetic peptide
  Seed: LRMKWMMAMKYPITA
LRMKIMMVMTYPITA

SEQ ID NO: 231628 - protein, 15 aa, Artificial Sequence
  Description of Artificial Sequence: Synthetic peptide
  Seed: LRMKWMMAMKYPITA
LRMKIMMVMTYPKTA

SEQ ID NO: 231629 - protein, 15 aa, Artificial Sequence
  Description of Artificial Sequence: Synthetic peptide
  Seed: LRMKWMMAMKYPITA
LRMKIMMVMTYPLTA

SEQ ID NO: 231630 - protein, 15 aa, Artificial Sequence
  Description of Artificial Sequence: Synthetic peptide
  Seed: LRMKWMMAMKYPITA
LRMKIMMVMTYPMTA

SEQ ID NO: 231631 - protein, 15 aa, Artificial Sequence
  Description of Artificial Sequence: Synthetic peptide
  Seed: LRMKWMMAMKYPITA
LRMKIMMVMTYPNTA

SEQ ID NO: 231632 - protein, 15 aa, Artificial Sequence
  Description of Artificial Sequence: Synthetic peptide
  Seed: LRMKWMMAMKYPITA
LRMKIMMVMTYPPTA

SEQ ID NO: 231633 - protein, 15 aa, Artificial Sequence
  Description of Artificial Sequence: Synthetic peptide
  Seed: LRMKWMMAMKYPITA
LRMKIMMVMTYPQTA

SEQ ID NO: 231634 - protein, 15 aa, Artificial Sequence
  Description of Artificial Sequence: Synthetic peptide
  Seed: LRMKWMMAMKYPITA
LRMKIMMVMTYPRTA

SEQ ID NO: 231635 - protein, 15 aa, Artificial Sequence
  Description of Artificial Sequence: Synthetic peptide
  Seed: LRMKWMMAMKYPITA
LRMKIMMVMTYPSTA

SEQ ID NO: 231636 - protein, 15 aa, Artificial Sequence
  Description of Artificial Sequence: Synthetic peptide
  Seed: LRMKWMMAMKYPITA
LRMKIMMVMTYPTTA

SEQ ID NO: 231637 - protein, 15 aa, Artificial Sequence
  Description of Artificial Sequence: Synthetic peptide
  Seed: LRMKWMMAMKYPITA
LRMKIMMVMTYPVTA

SEQ ID NO: 231638 - protein, 15 aa, Artificial Sequence
  Description of Artificial Sequence: Synthetic peptide
  Seed: LRMKWMMAMKYPITA
LRMKIMMVMTYPYTA

SEQ ID NO: 231639 - protein, 15 aa, Artificial Sequence
  Description of Artificial Sequence: Synthetic peptide
  Seed: LRMKWMMAMKYPITA
LRMKIMMVMVYPATA

SEQ ID NO: 231640 - protein, 15 aa, Artificial Sequence
  Description of Artificial Sequence: Synthetic peptide
  Seed: LRMKWMMAMKYPITA
LRMKIMMVMVYPDTA

SEQ ID NO: 231641 - protein, 15 aa, Artificial Sequence
  Description of Artificial Sequence: Synthetic peptide
  Seed: LRMKWMMAMKYPITA
LRMKIMMVMVYPETA

SEQ ID NO: 231642 - protein, 15 aa, Artificial Sequence
  Description of Artificial Sequence: Synthetic peptide
  Seed: LRMKWMMAMKYPITA
LRMKIMMVMVYPGTA

SEQ ID NO: 231643 - protein, 15 aa, Artificial Sequence
  Description of Artificial Sequence: Synthetic peptide
  Seed: LRMKWMMAMKYPITA
LRMKIMMVMVYPHTA

SEQ ID NO: 231644 - protein, 15 aa, Artificial Sequence
  Description of Artificial Sequence: Synthetic peptide
  Seed: LRMKWMMAMKYPITA
LRMKIMMVMVYPITA

SEQ ID NO: 231645 - protein, 15 aa, Artificial Sequence
  Description of Artificial Sequence: Synthetic peptide
  Seed: LRMKWMMAMKYPITA
LRMKIMMVMVYPKTA

SEQ ID NO: 231646 - protein, 15 aa, Artificial Sequence
  Description of Artificial Sequence: Synthetic peptide
  Seed: LRMKWMMAMKYPITA
LRMKIMMVMVYPLTA

SEQ ID NO: 231647 - protein, 15 aa, Artificial Sequence
  Description of Artificial Sequence: Synthetic peptide
  Seed: LRMKWMMAMKYPITA
LRMKIMMVMVYPMTA

SEQ ID NO: 231648 - protein, 15 aa, Artificial Sequence
  Description of Artificial Sequence: Synthetic peptide
  Seed: LRMKWMMAMKYPITA
LRMKIMMVMVYPNTA

SEQ ID NO: 231649 - protein, 15 aa, Artificial Sequence
  Description of Artificial Sequence: Synthetic peptide
  Seed: LRMKWMMAMKYPITA
LRMKIMMVMVYPQTA

SEQ ID NO: 231650 - protein, 15 aa, Artificial Sequence
  Description of Artificial Sequence: Synthetic peptide
  Seed: LRMKWMMAMKYPITA
LRMKIMMVMVYPRTA

SEQ ID NO: 231651 - protein, 15 aa, Artificial Sequence
  Description of Artificial Sequence: Synthetic peptide
  Seed: LRMKWMMAMKYPITA
LRMKIMMVMVYPSTA

SEQ ID NO: 231652 - protein, 15 aa, Artificial Sequence
  Description of Artificial Sequence: Synthetic peptide
  Seed: LRMKWMMAMKYPITA
LRMKIMMVMVYPTTA

SEQ ID NO: 231653 - protein, 15 aa, Artificial Sequence
  Description of Artificial Sequence: Synthetic peptide
  Seed: LRMKWMMAMKYPITA
LRMKIMMVMVYPVTA

SEQ ID NO: 231654 - protein, 15 aa, Artificial Sequence
  Description of Artificial Sequence: Synthetic peptide
  Seed: LRMKWMMAMKYPITA
LRMKIMMWMAYPATA

SEQ ID NO: 231655 - protein, 15 aa, Artificial Sequence
  Description of Artificial Sequence: Synthetic peptide
  Seed: LRMKWMMAMKYPITA
LRMKIMMWMAYPFTA

SEQ ID NO: 231656 - protein, 15 aa, Artificial Sequence
  Description of Artificial Sequence: Synthetic peptide
  Seed: LRMKWMMAMKYPITA
LRMKIMMWMAYPHTA

SEQ ID NO: 231657 - protein, 15 aa, Artificial Sequence
  Description of Artificial Sequence: Synthetic peptide
  Seed: LRMKWMMAMKYPITA
LRMKIMMWMAYPITA

SEQ ID NO: 231658 - protein, 15 aa, Artificial Sequence
  Description of Artificial Sequence: Synthetic peptide
  Seed: LRMKWMMAMKYPITA
LRMKIMMWMAYPKTA

SEQ ID NO: 231659 - protein, 15 aa, Artificial Sequence
  Description of Artificial Sequence: Synthetic peptide
  Seed: LRMKWMMAMKYPITA
LRMKIMMWMAYPLTA

SEQ ID NO: 231660 - protein, 15 aa, Artificial Sequence
  Description of Artificial Sequence: Synthetic peptide
  Seed: LRMKWMMAMKYPITA
LRMKIMMWMAYPMTA

SEQ ID NO: 231661 - protein, 15 aa, Artificial Sequence
  Description of Artificial Sequence: Synthetic peptide
  Seed: LRMKWMMAMKYPITA
LRMKIMMWMAYPNTA

SEQ ID NO: 231662 - protein, 15 aa, Artificial Sequence
  Description of Artificial Sequence: Synthetic peptide
  Seed: LRMKWMMAMKYPITA
LRMKIMMWMAYPRTA

SEQ ID NO: 231663 - protein, 15 aa, Artificial Sequence
  Description of Artificial Sequence: Synthetic peptide
  Seed: LRMKWMMAMKYPITA
LRMKIMMWMAYPSTA

SEQ ID NO: 231664 - protein, 15 aa, Artificial Sequence
  Description of Artificial Sequence: Synthetic peptide
  Seed: LRMKWMMAMKYPITA
LRMKIMMWMAYPTTA

SEQ ID NO: 231665 - protein, 15 aa, Artificial Sequence
  Description of Artificial Sequence: Synthetic peptide
  Seed: LRMKWMMAMKYPITA
LRMKIMMWMAYPVTA

SEQ ID NO: 231666 - protein, 15 aa, Artificial Sequence
  Description of Artificial Sequence: Synthetic peptide
  Seed: LRMKWMMAMKYPITA
LRMKIMMWMAYPYTA

SEQ ID NO: 231667 - protein, 15 aa, Artificial Sequence
  Description of Artificial Sequence: Synthetic peptide
  Seed: LRMKWMMAMKYPITA
LRMKIMMWMDYPATA

SEQ ID NO: 231668 - protein, 15 aa, Artificial Sequence
  Description of Artificial Sequence: Synthetic peptide
  Seed: LRMKWMMAMKYPITA
LRMKIMMWMDYPITA

SEQ ID NO: 231669 - protein, 15 aa, Artificial Sequence
  Description of Artificial Sequence: Synthetic peptide
  Seed: LRMKWMMAMKYPITA
LRMKIMMWMDYPLTA

SEQ ID NO: 231670 - protein, 15 aa, Artificial Sequence
  Description of Artificial Sequence: Synthetic peptide
  Seed: LRMKWMMAMKYPITA
LRMKIMMWMDYPMTA

SEQ ID NO: 231671 - protein, 15 aa, Artificial Sequence
  Description of Artificial Sequence: Synthetic peptide
  Seed: LRMKWMMAMKYPITA
LRMKIMMWMDYPVTA

SEQ ID NO: 231672 - protein, 15 aa, Artificial Sequence
  Description of Artificial Sequence: Synthetic peptide
  Seed: LRMKWMMAMKYPITA
LRMKIMMWMGYPATA

SEQ ID NO: 231673 - protein, 15 aa, Artificial Sequence
  Description of Artificial Sequence: Synthetic peptide
  Seed: LRMKWMMAMKYPITA
LRMKIMMWMGYPITA

SEQ ID NO: 231674 - protein, 15 aa, Artificial Sequence
  Description of Artificial Sequence: Synthetic peptide
  Seed: LRMKWMMAMKYPITA
LRMKIMMWMGYPLTA

SEQ ID NO: 231675 - protein, 15 aa, Artificial Sequence
  Description of Artificial Sequence: Synthetic peptide
  Seed: LRMKWMMAMKYPITA
LRMKIMMWMGYPMTA

SEQ ID NO: 231676 - protein, 15 aa, Artificial Sequence
  Description of Artificial Sequence: Synthetic peptide
  Seed: LRMKWMMAMKYPITA
LRMKIMMWMGYPRTA

SEQ ID NO: 231677 - protein, 15 aa, Artificial Sequence
  Description of Artificial Sequence: Synthetic peptide
  Seed: LRMKWMMAMKYPITA
LRMKIMMWMGYPVTA

SEQ ID NO: 231678 - protein, 15 aa, Artificial Sequence
  Description of Artificial Sequence: Synthetic peptide
  Seed: LRMKWMMAMKYPITA
LRMKIMMWMHYPATA

SEQ ID NO: 231679 - protein, 15 aa, Artificial Sequence
  Description of Artificial Sequence: Synthetic peptide
  Seed: LRMKWMMAMKYPITA
LRMKIMMWMHYPFTA

SEQ ID NO: 231680 - protein, 15 aa, Artificial Sequence
  Description of Artificial Sequence: Synthetic peptide
  Seed: LRMKWMMAMKYPITA
LRMKIMMWMHYPHTA

SEQ ID NO: 231681 - protein, 15 aa, Artificial Sequence
  Description of Artificial Sequence: Synthetic peptide
  Seed: LRMKWMMAMKYPITA
LRMKIMMWMHYPITA

SEQ ID NO: 231682 - protein, 15 aa, Artificial Sequence
  Description of Artificial Sequence: Synthetic peptide
  Seed: LRMKWMMAMKYPITA
LRMKIMMWMHYPKTA

SEQ ID NO: 231683 - protein, 15 aa, Artificial Sequence
  Description of Artificial Sequence: Synthetic peptide
  Seed: LRMKWMMAMKYPITA
LRMKIMMWMHYPLTA

SEQ ID NO: 231684 - protein, 15 aa, Artificial Sequence
  Description of Artificial Sequence: Synthetic peptide
  Seed: LRMKWMMAMKYPITA
LRMKIMMWMHYPMTA

SEQ ID NO: 231685 - protein, 15 aa, Artificial Sequence
  Description of Artificial Sequence: Synthetic peptide
  Seed: LRMKWMMAMKYPITA
LRMKIMMWMHYPRTA

SEQ ID NO: 231686 - protein, 15 aa, Artificial Sequence
  Description of Artificial Sequence: Synthetic peptide
  Seed: LRMKWMMAMKYPITA
LRMKIMMWMHYPSTA

SEQ ID NO: 231687 - protein, 15 aa, Artificial Sequence
  Description of Artificial Sequence: Synthetic peptide
  Seed: LRMKWMMAMKYPITA
LRMKIMMWMHYPVTA

SEQ ID NO: 231688 - protein, 15 aa, Artificial Sequence
  Description of Artificial Sequence: Synthetic peptide
  Seed: LRMKWMMAMKYPITA
LRMKIMMWMHYPYTA

SEQ ID NO: 231689 - protein, 15 aa, Artificial Sequence
  Description of Artificial Sequence: Synthetic peptide
  Seed: LRMKWMMAMKYPITA
LRMKIMMWMIYPATA

SEQ ID NO: 231690 - protein, 15 aa, Artificial Sequence
  Description of Artificial Sequence: Synthetic peptide
  Seed: LRMKWMMAMKYPITA
LRMKIMMWMIYPRTA

SEQ ID NO: 231691 - protein, 15 aa, Artificial Sequence
  Description of Artificial Sequence: Synthetic peptide
  Seed: LRMKWMMAMKYPITA
LRMKIMMWMIYPSTA

SEQ ID NO: 231692 - protein, 15 aa, Artificial Sequence
  Description of Artificial Sequence: Synthetic peptide
  Seed: LRMKWMMAMKYPITA
LRMKIMMWMKYPATA

SEQ ID NO: 231693 - protein, 15 aa, Artificial Sequence
  Description of Artificial Sequence: Synthetic peptide
  Seed: LRMKWMMAMKYPITA
LRMKIMMWMKYPETA

SEQ ID NO: 231694 - protein, 15 aa, Artificial Sequence
  Description of Artificial Sequence: Synthetic peptide
  Seed: LRMKWMMAMKYPITA
LRMKIMMWMKYPFTA

SEQ ID NO: 231695 - protein, 15 aa, Artificial Sequence
  Description of Artificial Sequence: Synthetic peptide
  Seed: LRMKWMMAMKYPITA
LRMKIMMWMKYPGTA

SEQ ID NO: 231696 - protein, 15 aa, Artificial Sequence
  Description of Artificial Sequence: Synthetic peptide
  Seed: LRMKWMMAMKYPITA
LRMKIMMWMKYPHTA

SEQ ID NO: 231697 - protein, 15 aa, Artificial Sequence
  Description of Artificial Sequence: Synthetic peptide
  Seed: LRMKWMMAMKYPITA
LRMKIMMWMKYPITA

SEQ ID NO: 231698 - protein, 15 aa, Artificial Sequence
  Description of Artificial Sequence: Synthetic peptide
  Seed: LRMKWMMAMKYPITA
LRMKIMMWMKYPKTA

SEQ ID NO: 231699 - protein, 15 aa, Artificial Sequence
  Description of Artificial Sequence: Synthetic peptide
  Seed: LRMKWMMAMKYPITA
LRMKIMMWMKYPLTA

SEQ ID NO: 231700 - protein, 15 aa, Artificial Sequence
  Description of Artificial Sequence: Synthetic peptide
  Seed: LRMKWMMAMKYPITA
LRMKIMMWMKYPMTA

SEQ ID NO: 231701 - protein, 15 aa, Artificial Sequence
  Description of Artificial Sequence: Synthetic peptide
  Seed: LRMKWMMAMKYPITA
LRMKIMMWMKYPNTA

SEQ ID NO: 231702 - protein, 15 aa, Artificial Sequence
  Description of Artificial Sequence: Synthetic peptide
  Seed: LRMKWMMAMKYPITA
LRMKIMMWMKYPPTA

SEQ ID NO: 231703 - protein, 15 aa, Artificial Sequence
  Description of Artificial Sequence: Synthetic peptide
  Seed: LRMKWMMAMKYPITA
LRMKIMMWMKYPQTA

SEQ ID NO: 231704 - protein, 15 aa, Artificial Sequence
  Description of Artificial Sequence: Synthetic peptide
  Seed: LRMKWMMAMKYPITA
LRMKIMMWMKYPRTA

SEQ ID NO: 231705 - protein, 15 aa, Artificial Sequence
  Description of Artificial Sequence: Synthetic peptide
  Seed: LRMKWMMAMKYPITA
LRMKIMMWMKYPSTA

SEQ ID NO: 231706 - protein, 15 aa, Artificial Sequence
  Description of Artificial Sequence: Synthetic peptide
  Seed: LRMKWMMAMKYPITA
LRMKIMMWMKYPTTA

SEQ ID NO: 231707 - protein, 15 aa, Artificial Sequence
  Description of Artificial Sequence: Synthetic peptide
  Seed: LRMKWMMAMKYPITA
LRMKIMMWMKYPVTA

SEQ ID NO: 231708 - protein, 15 aa, Artificial Sequence
  Description of Artificial Sequence: Synthetic peptide
  Seed: LRMKWMMAMKYPITA
LRMKIMMWMKYPYTA

SEQ ID NO: 231709 - protein, 15 aa, Artificial Sequence
  Description of Artificial Sequence: Synthetic peptide
  Seed: LRMKWMMAMKYPITA
LRMKIMMWMMYPRTA

SEQ ID NO: 231710 - protein, 15 aa, Artificial Sequence
  Description of Artificial Sequence: Synthetic peptide
  Seed: LRMKWMMAMKYPITA
LRMKIMMWMNYPATA

SEQ ID NO: 231711 - protein, 15 aa, Artificial Sequence
  Description of Artificial Sequence: Synthetic peptide
  Seed: LRMKWMMAMKYPITA
LRMKIMMWMNYPFTA

SEQ ID NO: 231712 - protein, 15 aa, Artificial Sequence
  Description of Artificial Sequence: Synthetic peptide
  Seed: LRMKWMMAMKYPITA
LRMKIMMWMNYPHTA

SEQ ID NO: 231713 - protein, 15 aa, Artificial Sequence
  Description of Artificial Sequence: Synthetic peptide
  Seed: LRMKWMMAMKYPITA
LRMKIMMWMNYPITA

SEQ ID NO: 231714 - protein, 15 aa, Artificial Sequence
  Description of Artificial Sequence: Synthetic peptide
  Seed: LRMKWMMAMKYPITA
LRMKIMMWMNYPLTA

SEQ ID NO: 231715 - protein, 15 aa, Artificial Sequence
  Description of Artificial Sequence: Synthetic peptide
  Seed: LRMKWMMAMKYPITA
LRMKIMMWMNYPMTA

SEQ ID NO: 231716 - protein, 15 aa, Artificial Sequence
  Description of Artificial Sequence: Synthetic peptide
  Seed: LRMKWMMAMKYPITA
LRMKIMMWMNYPRTA

SEQ ID NO: 231717 - protein, 15 aa, Artificial Sequence
  Description of Artificial Sequence: Synthetic peptide
  Seed: LRMKWMMAMKYPITA
LRMKIMMWMNYPSTA

SEQ ID NO: 231718 - protein, 15 aa, Artificial Sequence
  Description of Artificial Sequence: Synthetic peptide
  Seed: LRMKWMMAMKYPITA
LRMKIMMWMNYPVTA

SEQ ID NO: 231719 - protein, 15 aa, Artificial Sequence
  Description of Artificial Sequence: Synthetic peptide
  Seed: LRMKWMMAMKYPITA
LRMKIMMWMNYPYTA

SEQ ID NO: 231720 - protein, 15 aa, Artificial Sequence
  Description of Artificial Sequence: Synthetic peptide
  Seed: LRMKWMMAMKYPITA
LRMKIMMWMPYPATA

SEQ ID NO: 231721 - protein, 15 aa, Artificial Sequence
  Description of Artificial Sequence: Synthetic peptide
  Seed: LRMKWMMAMKYPITA
LRMKIMMWMPYPFTA

SEQ ID NO: 231722 - protein, 15 aa, Artificial Sequence
  Description of Artificial Sequence: Synthetic peptide
  Seed: LRMKWMMAMKYPITA
LRMKIMMWMPYPHTA

SEQ ID NO: 231723 - protein, 15 aa, Artificial Sequence
  Description of Artificial Sequence: Synthetic peptide
  Seed: LRMKWMMAMKYPITA
LRMKIMMWMPYPITA

SEQ ID NO: 231724 - protein, 15 aa, Artificial Sequence
  Description of Artificial Sequence: Synthetic peptide
  Seed: LRMKWMMAMKYPITA
LRMKIMMWMPYPKTA

SEQ ID NO: 231725 - protein, 15 aa, Artificial Sequence
  Description of Artificial Sequence: Synthetic peptide
  Seed: LRMKWMMAMKYPITA
LRMKIMMWMPYPLTA

SEQ ID NO: 231726 - protein, 15 aa, Artificial Sequence
  Description of Artificial Sequence: Synthetic peptide
  Seed: LRMKWMMAMKYPITA
LRMKIMMWMPYPMTA

SEQ ID NO: 231727 - protein, 15 aa, Artificial Sequence
  Description of Artificial Sequence: Synthetic peptide
  Seed: LRMKWMMAMKYPITA
LRMKIMMWMPYPRTA

SEQ ID NO: 231728 - protein, 15 aa, Artificial Sequence
  Description of Artificial Sequence: Synthetic peptide
  Seed: LRMKWMMAMKYPITA
LRMKIMMWMPYPSTA

SEQ ID NO: 231729 - protein, 15 aa, Artificial Sequence
  Description of Artificial Sequence: Synthetic peptide
  Seed: LRMKWMMAMKYPITA
LRMKIMMWMPYPVTA

SEQ ID NO: 231730 - protein, 15 aa, Artificial Sequence
  Description of Artificial Sequence: Synthetic peptide
  Seed: LRMKWMMAMKYPITA
LRMKIMMWMPYPYTA

SEQ ID NO: 231731 - protein, 15 aa, Artificial Sequence
  Description of Artificial Sequence: Synthetic peptide
  Seed: LRMKWMMAMKYPITA
LRMKIMMWMRYPATA

SEQ ID NO: 231732 - protein, 15 aa, Artificial Sequence
  Description of Artificial Sequence: Synthetic peptide
  Seed: LRMKWMMAMKYPITA
LRMKIMMWMRYPDTA

SEQ ID NO: 231733 - protein, 15 aa, Artificial Sequence
  Description of Artificial Sequence: Synthetic peptide
  Seed: LRMKWMMAMKYPITA
LRMKIMMWMRYPETA

SEQ ID NO: 231734 - protein, 15 aa, Artificial Sequence
  Description of Artificial Sequence: Synthetic peptide
  Seed: LRMKWMMAMKYPITA
LRMKIMMWMRYPFTA

SEQ ID NO: 231735 - protein, 15 aa, Artificial Sequence
  Description of Artificial Sequence: Synthetic peptide
  Seed: LRMKWMMAMKYPITA
LRMKIMMWMRYPGTA

SEQ ID NO: 231736 - protein, 15 aa, Artificial Sequence
  Description of Artificial Sequence: Synthetic peptide
  Seed: LRMKWMMAMKYPITA
LRMKIMMWMRYPHTA

SEQ ID NO: 231737 - protein, 15 aa, Artificial Sequence
  Description of Artificial Sequence: Synthetic peptide
  Seed: LRMKWMMAMKYPITA
LRMKIMMWMRYPITA

SEQ ID NO: 231738 - protein, 15 aa, Artificial Sequence
  Description of Artificial Sequence: Synthetic peptide
  Seed: LRMKWMMAMKYPITA
LRMKIMMWMRYPKTA

SEQ ID NO: 231739 - protein, 15 aa, Artificial Sequence
  Description of Artificial Sequence: Synthetic peptide
  Seed: LRMKWMMAMKYPITA
LRMKIMMWMRYPLTA

SEQ ID NO: 231740 - protein, 15 aa, Artificial Sequence
  Description of Artificial Sequence: Synthetic peptide
  Seed: LRMKWMMAMKYPITA
LRMKIMMWMRYPMTA

SEQ ID NO: 231741 - protein, 15 aa, Artificial Sequence
  Description of Artificial Sequence: Synthetic peptide
  Seed: LRMKWMMAMKYPITA
LRMKIMMWMRYPNTA

SEQ ID NO: 231742 - protein, 15 aa, Artificial Sequence
  Description of Artificial Sequence: Synthetic peptide
  Seed: LRMKWMMAMKYPITA
LRMKIMMWMRYPPTA

SEQ ID NO: 231743 - protein, 15 aa, Artificial Sequence
  Description of Artificial Sequence: Synthetic peptide
  Seed: LRMKWMMAMKYPITA
LRMKIMMWMRYPQTA

SEQ ID NO: 231744 - protein, 15 aa, Artificial Sequence
  Description of Artificial Sequence: Synthetic peptide
  Seed: LRMKWMMAMKYPITA
LRMKIMMWMRYPRTA

SEQ ID NO: 231745 - protein, 15 aa, Artificial Sequence
  Description of Artificial Sequence: Synthetic peptide
  Seed: LRMKWMMAMKYPITA
LRMKIMMWMRYPSTA

SEQ ID NO: 231746 - protein, 15 aa, Artificial Sequence
  Description of Artificial Sequence: Synthetic peptide
  Seed: LRMKWMMAMKYPITA
LRMKIMMWMRYPTTA

SEQ ID NO: 231747 - protein, 15 aa, Artificial Sequence
  Description of Artificial Sequence: Synthetic peptide
  Seed: LRMKWMMAMKYPITA
LRMKIMMWMRYPVTA

SEQ ID NO: 231748 - protein, 15 aa, Artificial Sequence
  Description of Artificial Sequence: Synthetic peptide
  Seed: LRMKWMMAMKYPITA
LRMKIMMWMRYPYTA

SEQ ID NO: 231749 - protein, 15 aa, Artificial Sequence
  Description of Artificial Sequence: Synthetic peptide
  Seed: LRMKWMMAMKYPITA
LRMKIMMWMSYPATA

SEQ ID NO: 231750 - protein, 15 aa, Artificial Sequence
  Description of Artificial Sequence: Synthetic peptide
  Seed: LRMKWMMAMKYPITA
LRMKIMMWMSYPFTA

SEQ ID NO: 231751 - protein, 15 aa, Artificial Sequence
  Description of Artificial Sequence: Synthetic peptide
  Seed: LRMKWMMAMKYPITA
LRMKIMMWMSYPHTA

SEQ ID NO: 231752 - protein, 15 aa, Artificial Sequence
  Description of Artificial Sequence: Synthetic peptide
  Seed: LRMKWMMAMKYPITA
LRMKIMMWMSYPITA

SEQ ID NO: 231753 - protein, 15 aa, Artificial Sequence
  Description of Artificial Sequence: Synthetic peptide
  Seed: LRMKWMMAMKYPITA
LRMKIMMWMSYPKTA

SEQ ID NO: 231754 - protein, 15 aa, Artificial Sequence
  Description of Artificial Sequence: Synthetic peptide
  Seed: LRMKWMMAMKYPITA
LRMKIMMWMSYPLTA

SEQ ID NO: 231755 - protein, 15 aa, Artificial Sequence
  Description of Artificial Sequence: Synthetic peptide
  Seed: LRMKWMMAMKYPITA
LRMKIMMWMSYPMTA

SEQ ID NO: 231756 - protein, 15 aa, Artificial Sequence
  Description of Artificial Sequence: Synthetic peptide
  Seed: LRMKWMMAMKYPITA
LRMKIMMWMSYPRTA

SEQ ID NO: 231757 - protein, 15 aa, Artificial Sequence
  Description of Artificial Sequence: Synthetic peptide
  Seed: LRMKWMMAMKYPITA
LRMKIMMWMSYPSTA

SEQ ID NO: 231758 - protein, 15 aa, Artificial Sequence
  Description of Artificial Sequence: Synthetic peptide
  Seed: LRMKWMMAMKYPITA
LRMKIMMWMSYPVTA

SEQ ID NO: 231759 - protein, 15 aa, Artificial Sequence
  Description of Artificial Sequence: Synthetic peptide
  Seed: LRMKWMMAMKYPITA
LRMKIMMWMSYPYTA

SEQ ID NO: 231760 - protein, 15 aa, Artificial Sequence
  Description of Artificial Sequence: Synthetic peptide
  Seed: LRMKWMMAMKYPITA
LRMKIMMWMTYPATA

SEQ ID NO: 231761 - protein, 15 aa, Artificial Sequence
  Description of Artificial Sequence: Synthetic peptide
  Seed: LRMKWMMAMKYPITA
LRMKIMMWMTYPETA

SEQ ID NO: 231762 - protein, 15 aa, Artificial Sequence
  Description of Artificial Sequence: Synthetic peptide
  Seed: LRMKWMMAMKYPITA
LRMKIMMWMTYPHTA

SEQ ID NO: 231763 - protein, 15 aa, Artificial Sequence
  Description of Artificial Sequence: Synthetic peptide
  Seed: LRMKWMMAMKYPITA
LRMKIMMWMTYPITA

SEQ ID NO: 231764 - protein, 15 aa, Artificial Sequence
  Description of Artificial Sequence: Synthetic peptide
  Seed: LRMKWMMAMKYPITA
LRMKIMMWMTYPLTA

SEQ ID NO: 231765 - protein, 15 aa, Artificial Sequence
  Description of Artificial Sequence: Synthetic peptide
  Seed: LRMKWMMAMKYPITA
LRMKIMMWMTYPMTA

SEQ ID NO: 231766 - protein, 15 aa, Artificial Sequence
  Description of Artificial Sequence: Synthetic peptide
  Seed: LRMKWMMAMKYPITA
LRMKIMMWMTYPRTA

SEQ ID NO: 231767 - protein, 15 aa, Artificial Sequence
  Description of Artificial Sequence: Synthetic peptide
  Seed: LRMKWMMAMKYPITA
LRMKIMMWMTYPSTA

SEQ ID NO: 231768 - protein, 15 aa, Artificial Sequence
  Description of Artificial Sequence: Synthetic peptide
  Seed: LRMKWMMAMKYPITA
LRMKIMMWMTYPVTA

SEQ ID NO: 231769 - protein, 15 aa, Artificial Sequence
  Description of Artificial Sequence: Synthetic peptide
  Seed: LRMKWMMAMKYPITA
LRMKIMMWMTYPYTA

SEQ ID NO: 231770 - protein, 15 aa, Artificial Sequence
  Description of Artificial Sequence: Synthetic peptide
  Seed: LRMKWMMAMKYPITA
LRMKIMMWMVYPATA

SEQ ID NO: 231771 - protein, 15 aa, Artificial Sequence
  Description of Artificial Sequence: Synthetic peptide
  Seed: LRMKWMMAMKYPITA
LRMKIMMWMVYPRTA

SEQ ID NO: 231772 - protein, 15 aa, Artificial Sequence
  Description of Artificial Sequence: Synthetic peptide
  Seed: LRMKWMMAMKYPITA
LRMKIMMWMVYPSTA

SEQ ID NO: 231773 - protein, 15 aa, Artificial Sequence
  Description of Artificial Sequence: Synthetic peptide
  Seed: LRMKWMMAMKYPITA
LRMKIMMYMAYPATA

SEQ ID NO: 231774 - protein, 15 aa, Artificial Sequence
  Description of Artificial Sequence: Synthetic peptide
  Seed: LRMKWMMAMKYPITA
LRMKIMMYMAYPFTA

SEQ ID NO: 231775 - protein, 15 aa, Artificial Sequence
  Description of Artificial Sequence: Synthetic peptide
  Seed: LRMKWMMAMKYPITA
LRMKIMMYMAYPGTA

SEQ ID NO: 231776 - protein, 15 aa, Artificial Sequence
  Description of Artificial Sequence: Synthetic peptide
  Seed: LRMKWMMAMKYPITA
LRMKIMMYMAYPHTA

SEQ ID NO: 231777 - protein, 15 aa, Artificial Sequence
  Description of Artificial Sequence: Synthetic peptide
  Seed: LRMKWMMAMKYPITA
LRMKIMMYMAYPITA

SEQ ID NO: 231778 - protein, 15 aa, Artificial Sequence
  Description of Artificial Sequence: Synthetic peptide
  Seed: LRMKWMMAMKYPITA
LRMKIMMYMAYPKTA

SEQ ID NO: 231779 - protein, 15 aa, Artificial Sequence
  Description of Artificial Sequence: Synthetic peptide
  Seed: LRMKWMMAMKYPITA
LRMKIMMYMAYPLTA

SEQ ID NO: 231780 - protein, 15 aa, Artificial Sequence
  Description of Artificial Sequence: Synthetic peptide
  Seed: LRMKWMMAMKYPITA
LRMKIMMYMAYPMTA

SEQ ID NO: 231781 - protein, 15 aa, Artificial Sequence
  Description of Artificial Sequence: Synthetic peptide
  Seed: LRMKWMMAMKYPITA
LRMKIMMYMAYPNTA

SEQ ID NO: 231782 - protein, 15 aa, Artificial Sequence
  Description of Artificial Sequence: Synthetic peptide
  Seed: LRMKWMMAMKYPITA
LRMKIMMYMAYPRTA

SEQ ID NO: 231783 - protein, 15 aa, Artificial Sequence
  Description of Artificial Sequence: Synthetic peptide
  Seed: LRMKWMMAMKYPITA
LRMKIMMYMAYPSTA

SEQ ID NO: 231784 - protein, 15 aa, Artificial Sequence
  Description of Artificial Sequence: Synthetic peptide
  Seed: LRMKWMMAMKYPITA
LRMKIMMYMAYPTTA

SEQ ID NO: 231785 - protein, 15 aa, Artificial Sequence
  Description of Artificial Sequence: Synthetic peptide
  Seed: LRMKWMMAMKYPITA
LRMKIMMYMAYPVTA

SEQ ID NO: 231786 - protein, 15 aa, Artificial Sequence
  Description of Artificial Sequence: Synthetic peptide
  Seed: LRMKWMMAMKYPITA
LRMKIMMYMAYPYTA

SEQ ID NO: 231787 - protein, 15 aa, Artificial Sequence
  Description of Artificial Sequence: Synthetic peptide
  Seed: LRMKWMMAMKYPITA
LRMKIMMYMDYPATA

SEQ ID NO: 231788 - protein, 15 aa, Artificial Sequence
  Description of Artificial Sequence: Synthetic peptide
  Seed: LRMKWMMAMKYPITA
LRMKIMMYMDYPITA

SEQ ID NO: 231789 - protein, 15 aa, Artificial Sequence
  Description of Artificial Sequence: Synthetic peptide
  Seed: LRMKWMMAMKYPITA
LRMKIMMYMDYPLTA

SEQ ID NO: 231790 - protein, 15 aa, Artificial Sequence
  Description of Artificial Sequence: Synthetic peptide
  Seed: LRMKWMMAMKYPITA
LRMKIMMYMDYPSTA

SEQ ID NO: 231791 - protein, 15 aa, Artificial Sequence
  Description of Artificial Sequence: Synthetic peptide
  Seed: LRMKWMMAMKYPITA
LRMKIMMYMDYPVTA

SEQ ID NO: 231792 - protein, 15 aa, Artificial Sequence
  Description of Artificial Sequence: Synthetic peptide
  Seed: LRMKWMMAMKYPITA
LRMKIMMYMGYPATA

SEQ ID NO: 231793 - protein, 15 aa, Artificial Sequence
  Description of Artificial Sequence: Synthetic peptide
  Seed: LRMKWMMAMKYPITA
LRMKIMMYMGYPFTA

SEQ ID NO: 231794 - protein, 15 aa, Artificial Sequence
  Description of Artificial Sequence: Synthetic peptide
  Seed: LRMKWMMAMKYPITA
LRMKIMMYMGYPITA

SEQ ID NO: 231795 - protein, 15 aa, Artificial Sequence
  Description of Artificial Sequence: Synthetic peptide
  Seed: LRMKWMMAMKYPITA
LRMKIMMYMGYPKTA

SEQ ID NO: 231796 - protein, 15 aa, Artificial Sequence
  Description of Artificial Sequence: Synthetic peptide
  Seed: LRMKWMMAMKYPITA
LRMKIMMYMGYPLTA

SEQ ID NO: 231797 - protein, 15 aa, Artificial Sequence
  Description of Artificial Sequence: Synthetic peptide
  Seed: LRMKWMMAMKYPITA
LRMKIMMYMGYPMTA

SEQ ID NO: 231798 - protein, 15 aa, Artificial Sequence
  Description of Artificial Sequence: Synthetic peptide
  Seed: LRMKWMMAMKYPITA
LRMKIMMYMGYPRTA

SEQ ID NO: 231799 - protein, 15 aa, Artificial Sequence
  Description of Artificial Sequence: Synthetic peptide
  Seed: LRMKWMMAMKYPITA
LRMKIMMYMGYPVTA

SEQ ID NO: 231800 - protein, 15 aa, Artificial Sequence
  Description of Artificial Sequence: Synthetic peptide
  Seed: LRMKWMMAMKYPITA
LRMKIMMYMHYPATA

SEQ ID NO: 231801 - protein, 15 aa, Artificial Sequence
  Description of Artificial Sequence: Synthetic peptide
  Seed: LRMKWMMAMKYPITA
LRMKIMMYMHYPFTA

SEQ ID NO: 231802 - protein, 15 aa, Artificial Sequence
  Description of Artificial Sequence: Synthetic peptide
  Seed: LRMKWMMAMKYPITA
LRMKIMMYMHYPHTA

SEQ ID NO: 231803 - protein, 15 aa, Artificial Sequence
  Description of Artificial Sequence: Synthetic peptide
  Seed: LRMKWMMAMKYPITA
LRMKIMMYMHYPITA

SEQ ID NO: 231804 - protein, 15 aa, Artificial Sequence
  Description of Artificial Sequence: Synthetic peptide
  Seed: LRMKWMMAMKYPITA
LRMKIMMYMHYPKTA

SEQ ID NO: 231805 - protein, 15 aa, Artificial Sequence
  Description of Artificial Sequence: Synthetic peptide
  Seed: LRMKWMMAMKYPITA
LRMKIMMYMHYPLTA

SEQ ID NO: 231806 - protein, 15 aa, Artificial Sequence
  Description of Artificial Sequence: Synthetic peptide
  Seed: LRMKWMMAMKYPITA
LRMKIMMYMHYPMTA

SEQ ID NO: 231807 - protein, 15 aa, Artificial Sequence
  Description of Artificial Sequence: Synthetic peptide
  Seed: LRMKWMMAMKYPITA
LRMKIMMYMHYPRTA

SEQ ID NO: 231808 - protein, 15 aa, Artificial Sequence
  Description of Artificial Sequence: Synthetic peptide
  Seed: LRMKWMMAMKYPITA
LRMKIMMYMHYPSTA

SEQ ID NO: 231809 - protein, 15 aa, Artificial Sequence
  Description of Artificial Sequence: Synthetic peptide
  Seed: LRMKWMMAMKYPITA
LRMKIMMYMHYPVTA

SEQ ID NO: 231810 - protein, 15 aa, Artificial Sequence
  Description of Artificial Sequence: Synthetic peptide
  Seed: LRMKWMMAMKYPITA
LRMKIMMYMHYPYTA

SEQ ID NO: 231811 - protein, 15 aa, Artificial Sequence
  Description of Artificial Sequence: Synthetic peptide
  Seed: LRMKWMMAMKYPITA
LRMKIMMYMIYPRTA

SEQ ID NO: 231812 - protein, 15 aa, Artificial Sequence
  Description of Artificial Sequence: Synthetic peptide
  Seed: LRMKWMMAMKYPITA
LRMKIMMYMKYPATA

SEQ ID NO: 231813 - protein, 15 aa, Artificial Sequence
  Description of Artificial Sequence: Synthetic peptide
  Seed: LRMKWMMAMKYPITA
LRMKIMMYMKYPDTA

SEQ ID NO: 231814 - protein, 15 aa, Artificial Sequence
  Description of Artificial Sequence: Synthetic peptide
  Seed: LRMKWMMAMKYPITA
LRMKIMMYMKYPETA

SEQ ID NO: 231815 - protein, 15 aa, Artificial Sequence
  Description of Artificial Sequence: Synthetic peptide
  Seed: LRMKWMMAMKYPITA
LRMKIMMYMKYPFTA

SEQ ID NO: 231816 - protein, 15 aa, Artificial Sequence
  Description of Artificial Sequence: Synthetic peptide
  Seed: LRMKWMMAMKYPITA
LRMKIMMYMKYPGTA

SEQ ID NO: 231817 - protein, 15 aa, Artificial Sequence
  Description of Artificial Sequence: Synthetic peptide
  Seed: LRMKWMMAMKYPITA
LRMKIMMYMKYPHTA

SEQ ID NO: 231818 - protein, 15 aa, Artificial Sequence
  Description of Artificial Sequence: Synthetic peptide
  Seed: LRMKWMMAMKYPITA
LRMKIMMYMKYPITA

SEQ ID NO: 231819 - protein, 15 aa, Artificial Sequence
  Description of Artificial Sequence: Synthetic peptide
  Seed: LRMKWMMAMKYPITA
LRMKIMMYMKYPKTA

SEQ ID NO: 231820 - protein, 15 aa, Artificial Sequence
  Description of Artificial Sequence: Synthetic peptide
  Seed: LRMKWMMAMKYPITA
LRMKIMMYMKYPLTA

SEQ ID NO: 231821 - protein, 15 aa, Artificial Sequence
  Description of Artificial Sequence: Synthetic peptide
  Seed: LRMKWMMAMKYPITA
LRMKIMMYMKYPMTA

SEQ ID NO: 231822 - protein, 15 aa, Artificial Sequence
  Description of Artificial Sequence: Synthetic peptide
  Seed: LRMKWMMAMKYPITA
LRMKIMMYMKYPNTA

SEQ ID NO: 231823 - protein, 15 aa, Artificial Sequence
  Description of Artificial Sequence: Synthetic peptide
  Seed: LRMKWMMAMKYPITA
LRMKIMMYMKYPPTA

SEQ ID NO: 231824 - protein, 15 aa, Artificial Sequence
  Description of Artificial Sequence: Synthetic peptide
  Seed: LRMKWMMAMKYPITA
LRMKIMMYMKYPQTA

SEQ ID NO: 231825 - protein, 15 aa, Artificial Sequence
  Description of Artificial Sequence: Synthetic peptide
  Seed: LRMKWMMAMKYPITA
LRMKIMMYMKYPRTA

SEQ ID NO: 231826 - protein, 15 aa, Artificial Sequence
  Description of Artificial Sequence: Synthetic peptide
  Seed: LRMKWMMAMKYPITA
LRMKIMMYMKYPSTA

SEQ ID NO: 231827 - protein, 15 aa, Artificial Sequence
  Description of Artificial Sequence: Synthetic peptide
  Seed: LRMKWMMAMKYPITA
LRMKIMMYMKYPTTA

SEQ ID NO: 231828 - protein, 15 aa, Artificial Sequence
  Description of Artificial Sequence: Synthetic peptide
  Seed: LRMKWMMAMKYPITA
LRMKIMMYMKYPVTA

SEQ ID NO: 231829 - protein, 15 aa, Artificial Sequence
  Description of Artificial Sequence: Synthetic peptide
  Seed: LRMKWMMAMKYPITA
LRMKIMMYMKYPYTA

SEQ ID NO: 231830 - protein, 15 aa, Artificial Sequence
  Description of Artificial Sequence: Synthetic peptide
  Seed: LRMKWMMAMKYPITA
LRMKIMMYMMYPRTA

SEQ ID NO: 231831 - protein, 15 aa, Artificial Sequence
  Description of Artificial Sequence: Synthetic peptide
  Seed: LRMKWMMAMKYPITA
LRMKIMMYMNYPATA

SEQ ID NO: 231832 - protein, 15 aa, Artificial Sequence
  Description of Artificial Sequence: Synthetic peptide
  Seed: LRMKWMMAMKYPITA
LRMKIMMYMNYPFTA

SEQ ID NO: 231833 - protein, 15 aa, Artificial Sequence
  Description of Artificial Sequence: Synthetic peptide
  Seed: LRMKWMMAMKYPITA
LRMKIMMYMNYPHTA

SEQ ID NO: 231834 - protein, 15 aa, Artificial Sequence
  Description of Artificial Sequence: Synthetic peptide
  Seed: LRMKWMMAMKYPITA
LRMKIMMYMNYPITA

SEQ ID NO: 231835 - protein, 15 aa, Artificial Sequence
  Description of Artificial Sequence: Synthetic peptide
  Seed: LRMKWMMAMKYPITA
LRMKIMMYMNYPKTA

SEQ ID NO: 231836 - protein, 15 aa, Artificial Sequence
  Description of Artificial Sequence: Synthetic peptide
  Seed: LRMKWMMAMKYPITA
LRMKIMMYMNYPLTA

SEQ ID NO: 231837 - protein, 15 aa, Artificial Sequence
  Description of Artificial Sequence: Synthetic peptide
  Seed: LRMKWMMAMKYPITA
LRMKIMMYMNYPMTA

SEQ ID NO: 231838 - protein, 15 aa, Artificial Sequence
  Description of Artificial Sequence: Synthetic peptide
  Seed: LRMKWMMAMKYPITA
LRMKIMMYMNYPRTA

SEQ ID NO: 231839 - protein, 15 aa, Artificial Sequence
  Description of Artificial Sequence: Synthetic peptide
  Seed: LRMKWMMAMKYPITA
LRMKIMMYMNYPSTA

SEQ ID NO: 231840 - protein, 15 aa, Artificial Sequence
  Description of Artificial Sequence: Synthetic peptide
  Seed: LRMKWMMAMKYPITA
LRMKIMMYMNYPTTA

SEQ ID NO: 231841 - protein, 15 aa, Artificial Sequence
  Description of Artificial Sequence: Synthetic peptide
  Seed: LRMKWMMAMKYPITA
LRMKIMMYMNYPVTA

SEQ ID NO: 231842 - protein, 15 aa, Artificial Sequence
  Description of Artificial Sequence: Synthetic peptide
  Seed: LRMKWMMAMKYPITA
LRMKIMMYMNYPYTA

SEQ ID NO: 231843 - protein, 15 aa, Artificial Sequence
  Description of Artificial Sequence: Synthetic peptide
  Seed: LRMKWMMAMKYPITA
LRMKIMMYMPYPATA

SEQ ID NO: 231844 - protein, 15 aa, Artificial Sequence
  Description of Artificial Sequence: Synthetic peptide
  Seed: LRMKWMMAMKYPITA
LRMKIMMYMPYPFTA

SEQ ID NO: 231845 - protein, 15 aa, Artificial Sequence
  Description of Artificial Sequence: Synthetic peptide
  Seed: LRMKWMMAMKYPITA
LRMKIMMYMPYPHTA

SEQ ID NO: 231846 - protein, 15 aa, Artificial Sequence
  Description of Artificial Sequence: Synthetic peptide
  Seed: LRMKWMMAMKYPITA
LRMKIMMYMPYPITA

SEQ ID NO: 231847 - protein, 15 aa, Artificial Sequence
  Description of Artificial Sequence: Synthetic peptide
  Seed: LRMKWMMAMKYPITA
LRMKIMMYMPYPKTA

SEQ ID NO: 231848 - protein, 15 aa, Artificial Sequence
  Description of Artificial Sequence: Synthetic peptide
  Seed: LRMKWMMAMKYPITA
LRMKIMMYMPYPLTA

SEQ ID NO: 231849 - protein, 15 aa, Artificial Sequence
  Description of Artificial Sequence: Synthetic peptide
  Seed: LRMKWMMAMKYPITA
LRMKIMMYMPYPMTA

SEQ ID NO: 231850 - protein, 15 aa, Artificial Sequence
  Description of Artificial Sequence: Synthetic peptide
  Seed: LRMKWMMAMKYPITA
LRMKIMMYMPYPRTA

SEQ ID NO: 231851 - protein, 15 aa, Artificial Sequence
  Description of Artificial Sequence: Synthetic peptide
  Seed: LRMKWMMAMKYPITA
LRMKIMMYMPYPSTA

SEQ ID NO: 231852 - protein, 15 aa, Artificial Sequence
  Description of Artificial Sequence: Synthetic peptide
  Seed: LRMKWMMAMKYPITA
LRMKIMMYMPYPVTA

SEQ ID NO: 231853 - protein, 15 aa, Artificial Sequence
  Description of Artificial Sequence: Synthetic peptide
  Seed: LRMKWMMAMKYPITA
LRMKIMMYMPYPYTA

SEQ ID NO: 231854 - protein, 15 aa, Artificial Sequence
  Description of Artificial Sequence: Synthetic peptide
  Seed: LRMKWMMAMKYPITA
LRMKIMMYMQYPRTA

SEQ ID NO: 231855 - protein, 15 aa, Artificial Sequence
  Description of Artificial Sequence: Synthetic peptide
  Seed: LRMKWMMAMKYPITA
LRMKIMMYMQYPVTA

SEQ ID NO: 231856 - protein, 15 aa, Artificial Sequence
  Description of Artificial Sequence: Synthetic peptide
  Seed: LRMKWMMAMKYPITA
LRMKIMMYMRYPATA

SEQ ID NO: 231857 - protein, 15 aa, Artificial Sequence
  Description of Artificial Sequence: Synthetic peptide
  Seed: LRMKWMMAMKYPITA
LRMKIMMYMRYPDTA

SEQ ID NO: 231858 - protein, 15 aa, Artificial Sequence
  Description of Artificial Sequence: Synthetic peptide
  Seed: LRMKWMMAMKYPITA
LRMKIMMYMRYPETA

SEQ ID NO: 231859 - protein, 15 aa, Artificial Sequence
  Description of Artificial Sequence: Synthetic peptide
  Seed: LRMKWMMAMKYPITA
LRMKIMMYMRYPFTA

SEQ ID NO: 231860 - protein, 15 aa, Artificial Sequence
  Description of Artificial Sequence: Synthetic peptide
  Seed: LRMKWMMAMKYPITA
LRMKIMMYMRYPGTA

SEQ ID NO: 231861 - protein, 15 aa, Artificial Sequence
  Description of Artificial Sequence: Synthetic peptide
  Seed: LRMKWMMAMKYPITA
LRMKIMMYMRYPHTA

SEQ ID NO: 231862 - protein, 15 aa, Artificial Sequence
  Description of Artificial Sequence: Synthetic peptide
  Seed: LRMKWMMAMKYPITA
LRMKIMMYMRYPITA

SEQ ID NO: 231863 - protein, 15 aa, Artificial Sequence
  Description of Artificial Sequence: Synthetic peptide
  Seed: LRMKWMMAMKYPITA
LRMKIMMYMRYPKTA

SEQ ID NO: 231864 - protein, 15 aa, Artificial Sequence
  Description of Artificial Sequence: Synthetic peptide
  Seed: LRMKWMMAMKYPITA
LRMKIMMYMRYPLTA

SEQ ID NO: 231865 - protein, 15 aa, Artificial Sequence
  Description of Artificial Sequence: Synthetic peptide
  Seed: LRMKWMMAMKYPITA
LRMKIMMYMRYPMTA

SEQ ID NO: 231866 - protein, 15 aa, Artificial Sequence
  Description of Artificial Sequence: Synthetic peptide
  Seed: LRMKWMMAMKYPITA
LRMKIMMYMRYPNTA

SEQ ID NO: 231867 - protein, 15 aa, Artificial Sequence
  Description of Artificial Sequence: Synthetic peptide
  Seed: LRMKWMMAMKYPITA
LRMKIMMYMRYPPTA

SEQ ID NO: 231868 - protein, 15 aa, Artificial Sequence
  Description of Artificial Sequence: Synthetic peptide
  Seed: LRMKWMMAMKYPITA
LRMKIMMYMRYPQTA

SEQ ID NO: 231869 - protein, 15 aa, Artificial Sequence
  Description of Artificial Sequence: Synthetic peptide
  Seed: LRMKWMMAMKYPITA
LRMKIMMYMRYPRTA

SEQ ID NO: 231870 - protein, 15 aa, Artificial Sequence
  Description of Artificial Sequence: Synthetic peptide
  Seed: LRMKWMMAMKYPITA
LRMKIMMYMRYPSTA

SEQ ID NO: 231871 - protein, 15 aa, Artificial Sequence
  Description of Artificial Sequence: Synthetic peptide
  Seed: LRMKWMMAMKYPITA
LRMKIMMYMRYPTTA

SEQ ID NO: 231872 - protein, 15 aa, Artificial Sequence
  Description of Artificial Sequence: Synthetic peptide
  Seed: LRMKWMMAMKYPITA
LRMKIMMYMRYPVTA

SEQ ID NO: 231873 - protein, 15 aa, Artificial Sequence
  Description of Artificial Sequence: Synthetic peptide
  Seed: LRMKWMMAMKYPITA
LRMKIMMYMRYPYTA

SEQ ID NO: 231874 - protein, 15 aa, Artificial Sequence
  Description of Artificial Sequence: Synthetic peptide
  Seed: LRMKWMMAMKYPITA
LRMKIMMYMSYPATA

SEQ ID NO: 231875 - protein, 15 aa, Artificial Sequence
  Description of Artificial Sequence: Synthetic peptide
  Seed: LRMKWMMAMKYPITA
LRMKIMMYMSYPFTA

SEQ ID NO: 231876 - protein, 15 aa, Artificial Sequence
  Description of Artificial Sequence: Synthetic peptide
  Seed: LRMKWMMAMKYPITA
LRMKIMMYMSYPHTA

SEQ ID NO: 231877 - protein, 15 aa, Artificial Sequence
  Description of Artificial Sequence: Synthetic peptide
  Seed: LRMKWMMAMKYPITA
LRMKIMMYMSYPITA

SEQ ID NO: 231878 - protein, 15 aa, Artificial Sequence
  Description of Artificial Sequence: Synthetic peptide
  Seed: LRMKWMMAMKYPITA
LRMKIMMYMSYPKTA

SEQ ID NO: 231879 - protein, 15 aa, Artificial Sequence
  Description of Artificial Sequence: Synthetic peptide
  Seed: LRMKWMMAMKYPITA
LRMKIMMYMSYPLTA

SEQ ID NO: 231880 - protein, 15 aa, Artificial Sequence
  Description of Artificial Sequence: Synthetic peptide
  Seed: LRMKWMMAMKYPITA
LRMKIMMYMSYPMTA

SEQ ID NO: 231881 - protein, 15 aa, Artificial Sequence
  Description of Artificial Sequence: Synthetic peptide
  Seed: LRMKWMMAMKYPITA
LRMKIMMYMSYPRTA

SEQ ID NO: 231882 - protein, 15 aa, Artificial Sequence
  Description of Artificial Sequence: Synthetic peptide
  Seed: LRMKWMMAMKYPITA
LRMKIMMYMSYPSTA

SEQ ID NO: 231883 - protein, 15 aa, Artificial Sequence
  Description of Artificial Sequence: Synthetic peptide
  Seed: LRMKWMMAMKYPITA
LRMKIMMYMSYPTTA

SEQ ID NO: 231884 - protein, 15 aa, Artificial Sequence
  Description of Artificial Sequence: Synthetic peptide
  Seed: LRMKWMMAMKYPITA
LRMKIMMYMSYPVTA

SEQ ID NO: 231885 - protein, 15 aa, Artificial Sequence
  Description of Artificial Sequence: Synthetic peptide
  Seed: LRMKWMMAMKYPITA
LRMKIMMYMSYPYTA

SEQ ID NO: 231886 - protein, 15 aa, Artificial Sequence
  Description of Artificial Sequence: Synthetic peptide
  Seed: LRMKWMMAMKYPITA
LRMKIMMYMTYPATA

SEQ ID NO: 231887 - protein, 15 aa, Artificial Sequence
  Description of Artificial Sequence: Synthetic peptide
  Seed: LRMKWMMAMKYPITA
LRMKIMMYMTYPETA

SEQ ID NO: 231888 - protein, 15 aa, Artificial Sequence
  Description of Artificial Sequence: Synthetic peptide
  Seed: LRMKWMMAMKYPITA
LRMKIMMYMTYPFTA

SEQ ID NO: 231889 - protein, 15 aa, Artificial Sequence
  Description of Artificial Sequence: Synthetic peptide
  Seed: LRMKWMMAMKYPITA
LRMKIMMYMTYPHTA

SEQ ID NO: 231890 - protein, 15 aa, Artificial Sequence
  Description of Artificial Sequence: Synthetic peptide
  Seed: LRMKWMMAMKYPITA
LRMKIMMYMTYPITA

SEQ ID NO: 231891 - protein, 15 aa, Artificial Sequence
  Description of Artificial Sequence: Synthetic peptide
  Seed: LRMKWMMAMKYPITA
LRMKIMMYMTYPKTA

SEQ ID NO: 231892 - protein, 15 aa, Artificial Sequence
  Description of Artificial Sequence: Synthetic peptide
  Seed: LRMKWMMAMKYPITA
LRMKIMMYMTYPLTA

SEQ ID NO: 231893 - protein, 15 aa, Artificial Sequence
  Description of Artificial Sequence: Synthetic peptide
  Seed: LRMKWMMAMKYPITA
LRMKIMMYMTYPMTA

SEQ ID NO: 231894 - protein, 15 aa, Artificial Sequence
  Description of Artificial Sequence: Synthetic peptide
  Seed: LRMKWMMAMKYPITA
LRMKIMMYMTYPRTA

SEQ ID NO: 231895 - protein, 15 aa, Artificial Sequence
  Description of Artificial Sequence: Synthetic peptide
  Seed: LRMKWMMAMKYPITA
LRMKIMMYMTYPSTA

SEQ ID NO: 231896 - protein, 15 aa, Artificial Sequence
  Description of Artificial Sequence: Synthetic peptide
  Seed: LRMKWMMAMKYPITA
LRMKIMMYMTYPVTA

SEQ ID NO: 231897 - protein, 15 aa, Artificial Sequence
  Description of Artificial Sequence: Synthetic peptide
  Seed: LRMKWMMAMKYPITA
LRMKIMMYMTYPYTA

SEQ ID NO: 231898 - protein, 15 aa, Artificial Sequence
  Description of Artificial Sequence: Synthetic peptide
  Seed: LRMKWMMAMKYPITA
LRMKIMMYMVYPHTA

SEQ ID NO: 231899 - protein, 15 aa, Artificial Sequence
  Description of Artificial Sequence: Synthetic peptide
  Seed: LRMKWMMAMKYPITA
LRMKIMMYMVYPLTA

SEQ ID NO: 231900 - protein, 15 aa, Artificial Sequence
  Description of Artificial Sequence: Synthetic peptide
  Seed: LRMKWMMAMKYPITA
LRMKIMMYMVYPRTA

SEQ ID NO: 231901 - protein, 15 aa, Artificial Sequence
  Description of Artificial Sequence: Synthetic peptide
  Seed: LRMKWMMAMKYPITA
LRMKIMMYMVYPSTA

SEQ ID NO: 231902 - protein, 15 aa, Artificial Sequence
  Description of Artificial Sequence: Synthetic peptide
  Seed: LRMKWMMAMKYPITA
LRMKIMMYMVYPVTA

SEQ ID NO: 231903 - protein, 15 aa, Artificial Sequence
  Description of Artificial Sequence: Synthetic peptide
  Seed: LRMKWMMAMKYPITA
LRMKKMMAMAYPATA

SEQ ID NO: 231904 - protein, 15 aa, Artificial Sequence
  Description of Artificial Sequence: Synthetic peptide
  Seed: LRMKWMMAMKYPITA
LRMKKMMAMAYPCTA

SEQ ID NO: 231905 - protein, 15 aa, Artificial Sequence
  Description of Artificial Sequence: Synthetic peptide
  Seed: LRMKWMMAMKYPITA
LRMKKMMAMAYPGTA

SEQ ID NO: 231906 - protein, 15 aa, Artificial Sequence
  Description of Artificial Sequence: Synthetic peptide
  Seed: LRMKWMMAMKYPITA
LRMKKMMAMAYPITA

SEQ ID NO: 231907 - protein, 15 aa, Artificial Sequence
  Description of Artificial Sequence: Synthetic peptide
  Seed: LRMKWMMAMKYPITA
LRMKKMMAMAYPLTA

SEQ ID NO: 231908 - protein, 15 aa, Artificial Sequence
  Description of Artificial Sequence: Synthetic peptide
  Seed: LRMKWMMAMKYPITA
LRMKKMMAMAYPMTA

SEQ ID NO: 231909 - protein, 15 aa, Artificial Sequence
  Description of Artificial Sequence: Synthetic peptide
  Seed: LRMKWMMAMKYPITA
LRMKKMMAMAYPSTA

SEQ ID NO: 231910 - protein, 15 aa, Artificial Sequence
  Description of Artificial Sequence: Synthetic peptide
  Seed: LRMKWMMAMKYPITA
LRMKKMMAMAYPTTA

SEQ ID NO: 231911 - protein, 15 aa, Artificial Sequence
  Description of Artificial Sequence: Synthetic peptide
  Seed: LRMKWMMAMKYPITA
LRMKKMMAMAYPVTA

SEQ ID NO: 231912 - protein, 15 aa, Artificial Sequence
  Description of Artificial Sequence: Synthetic peptide
  Seed: LRMKWMMAMKYPITA
LRMKKMMAMGYPATA

SEQ ID NO: 231913 - protein, 15 aa, Artificial Sequence
  Description of Artificial Sequence: Synthetic peptide
  Seed: LRMKWMMAMKYPITA
LRMKKMMAMGYPITA

SEQ ID NO: 231914 - protein, 15 aa, Artificial Sequence
  Description of Artificial Sequence: Synthetic peptide
  Seed: LRMKWMMAMKYPITA
LRMKKMMAMGYPLTA

SEQ ID NO: 231915 - protein, 15 aa, Artificial Sequence
  Description of Artificial Sequence: Synthetic peptide
  Seed: LRMKWMMAMKYPITA
LRMKKMMAMGYPMTA

SEQ ID NO: 231916 - protein, 15 aa, Artificial Sequence
  Description of Artificial Sequence: Synthetic peptide
  Seed: LRMKWMMAMKYPITA
LRMKKMMAMGYPVTA

SEQ ID NO: 231917 - protein, 15 aa, Artificial Sequence
  Description of Artificial Sequence: Synthetic peptide
  Seed: LRMKWMMAMKYPITA
LRMKKMMAMNYPLTA

SEQ ID NO: 231918 - protein, 15 aa, Artificial Sequence
  Description of Artificial Sequence: Synthetic peptide
  Seed: LRMKWMMAMKYPITA
LRMKKMMAMNYPVTA

SEQ ID NO: 231919 - protein, 15 aa, Artificial Sequence
  Description of Artificial Sequence: Synthetic peptide
  Seed: LRMKWMMAMKYPITA
LRMKKMMAMPYPATA

SEQ ID NO: 231920 - protein, 15 aa, Artificial Sequence
  Description of Artificial Sequence: Synthetic peptide
  Seed: LRMKWMMAMKYPITA
LRMKKMMAMPYPITA

SEQ ID NO: 231921 - protein, 15 aa, Artificial Sequence
  Description of Artificial Sequence: Synthetic peptide
  Seed: LRMKWMMAMKYPITA
LRMKKMMAMPYPLTA

SEQ ID NO: 231922 - protein, 15 aa, Artificial Sequence
  Description of Artificial Sequence: Synthetic peptide
  Seed: LRMKWMMAMKYPITA
LRMKKMMAMPYPMTA

SEQ ID NO: 231923 - protein, 15 aa, Artificial Sequence
  Description of Artificial Sequence: Synthetic peptide
  Seed: LRMKWMMAMKYPITA
LRMKKMMAMPYPVTA

SEQ ID NO: 231924 - protein, 15 aa, Artificial Sequence
  Description of Artificial Sequence: Synthetic peptide
  Seed: LRMKWMMAMKYPITA
LRMKKMMAMSYPATA

SEQ ID NO: 231925 - protein, 15 aa, Artificial Sequence
  Description of Artificial Sequence: Synthetic peptide
  Seed: LRMKWMMAMKYPITA
LRMKKMMAMSYPITA

SEQ ID NO: 231926 - protein, 15 aa, Artificial Sequence
  Description of Artificial Sequence: Synthetic peptide
  Seed: LRMKWMMAMKYPITA
LRMKKMMAMSYPLTA

SEQ ID NO: 231927 - protein, 15 aa, Artificial Sequence
  Description of Artificial Sequence: Synthetic peptide
  Seed: LRMKWMMAMKYPITA
LRMKKMMAMSYPMTA

SEQ ID NO: 231928 - protein, 15 aa, Artificial Sequence
  Description of Artificial Sequence: Synthetic peptide
  Seed: LRMKWMMAMKYPITA
LRMKKMMAMSYPSTA

SEQ ID NO: 231929 - protein, 15 aa, Artificial Sequence
  Description of Artificial Sequence: Synthetic peptide
  Seed: LRMKWMMAMKYPITA
LRMKKMMAMSYPTTA

SEQ ID NO: 231930 - protein, 15 aa, Artificial Sequence
  Description of Artificial Sequence: Synthetic peptide
  Seed: LRMKWMMAMKYPITA
LRMKKMMAMSYPVTA

SEQ ID NO: 231931 - protein, 15 aa, Artificial Sequence
  Description of Artificial Sequence: Synthetic peptide
  Seed: LRMKWMMAMKYPITA
LRMKKMMAMTYPMTA

SEQ ID NO: 231932 - protein, 15 aa, Artificial Sequence
  Description of Artificial Sequence: Synthetic peptide
  Seed: LRMKWMMAMKYPITA
LRMKKMMFMSYPLTA

SEQ ID NO: 231933 - protein, 15 aa, Artificial Sequence
  Description of Artificial Sequence: Synthetic peptide
  Seed: LRMKWMMAMKYPITA
LRMKKMMFMSYPVTA

SEQ ID NO: 231934 - protein, 15 aa, Artificial Sequence
  Description of Artificial Sequence: Synthetic peptide
  Seed: LRMKWMMAMKYPITA
LRMKKMMGMAYPATA

SEQ ID NO: 231935 - protein, 15 aa, Artificial Sequence
  Description of Artificial Sequence: Synthetic peptide
  Seed: LRMKWMMAMKYPITA
LRMKKMMGMAYPITA

SEQ ID NO: 231936 - protein, 15 aa, Artificial Sequence
  Description of Artificial Sequence: Synthetic peptide
  Seed: LRMKWMMAMKYPITA
LRMKKMMGMAYPLTA

SEQ ID NO: 231937 - protein, 15 aa, Artificial Sequence
  Description of Artificial Sequence: Synthetic peptide
  Seed: LRMKWMMAMKYPITA
LRMKKMMGMAYPMTA

SEQ ID NO: 231938 - protein, 15 aa, Artificial Sequence
  Description of Artificial Sequence: Synthetic peptide
  Seed: LRMKWMMAMKYPITA
LRMKKMMGMAYPVTA

SEQ ID NO: 231939 - protein, 15 aa, Artificial Sequence
  Description of Artificial Sequence: Synthetic peptide
  Seed: LRMKWMMAMKYPITA
LRMKKMMGMSYPLTA

SEQ ID NO: 231940 - protein, 15 aa, Artificial Sequence
  Description of Artificial Sequence: Synthetic peptide
  Seed: LRMKWMMAMKYPITA
LRMKKMMIMGYPATA

SEQ ID NO: 231941 - protein, 15 aa, Artificial Sequence
  Description of Artificial Sequence: Synthetic peptide
  Seed: LRMKWMMAMKYPITA
LRMKKMMIMGYPITA

SEQ ID NO: 231942 - protein, 15 aa, Artificial Sequence
  Description of Artificial Sequence: Synthetic peptide
  Seed: LRMKWMMAMKYPITA
LRMKKMMIMGYPLTA

SEQ ID NO: 231943 - protein, 15 aa, Artificial Sequence
  Description of Artificial Sequence: Synthetic peptide
  Seed: LRMKWMMAMKYPITA
LRMKKMMIMGYPMTA

SEQ ID NO: 231944 - protein, 15 aa, Artificial Sequence
  Description of Artificial Sequence: Synthetic peptide
  Seed: LRMKWMMAMKYPITA
LRMKKMMIMGYPTTA

SEQ ID NO: 231945 - protein, 15 aa, Artificial Sequence
  Description of Artificial Sequence: Synthetic peptide
  Seed: LRMKWMMAMKYPITA
LRMKKMMIMGYPVTA

SEQ ID NO: 231946 - protein, 15 aa, Artificial Sequence
  Description of Artificial Sequence: Synthetic peptide
  Seed: LRMKWMMAMKYPITA
LRMKKMMIMKYPATA

SEQ ID NO: 231947 - protein, 15 aa, Artificial Sequence
  Description of Artificial Sequence: Synthetic peptide
  Seed: LRMKWMMAMKYPITA
LRMKKMMIMPYPATA

SEQ ID NO: 231948 - protein, 15 aa, Artificial Sequence
  Description of Artificial Sequence: Synthetic peptide
  Seed: LRMKWMMAMKYPITA
LRMKKMMIMPYPITA

SEQ ID NO: 231949 - protein, 15 aa, Artificial Sequence
  Description of Artificial Sequence: Synthetic peptide
  Seed: LRMKWMMAMKYPITA
LRMKKMMIMPYPLTA

SEQ ID NO: 231950 - protein, 15 aa, Artificial Sequence
  Description of Artificial Sequence: Synthetic peptide
  Seed: LRMKWMMAMKYPITA
LRMKKMMIMPYPMTA

SEQ ID NO: 231951 - protein, 15 aa, Artificial Sequence
  Description of Artificial Sequence: Synthetic peptide
  Seed: LRMKWMMAMKYPITA
LRMKKMMIMPYPVTA

SEQ ID NO: 231952 - protein, 15 aa, Artificial Sequence
  Description of Artificial Sequence: Synthetic peptide
  Seed: LRMKWMMAMKYPITA
LRMKKMMIMRYPATA

SEQ ID NO: 231953 - protein, 15 aa, Artificial Sequence
  Description of Artificial Sequence: Synthetic peptide
  Seed: LRMKWMMAMKYPITA
LRMKKMMIMRYPGTA

SEQ ID NO: 231954 - protein, 15 aa, Artificial Sequence
  Description of Artificial Sequence: Synthetic peptide
  Seed: LRMKWMMAMKYPITA
LRMKKMMIMRYPITA

SEQ ID NO: 231955 - protein, 15 aa, Artificial Sequence
  Description of Artificial Sequence: Synthetic peptide
  Seed: LRMKWMMAMKYPITA
LRMKKMMIMRYPLTA

SEQ ID NO: 231956 - protein, 15 aa, Artificial Sequence
  Description of Artificial Sequence: Synthetic peptide
  Seed: LRMKWMMAMKYPITA
LRMKKMMIMRYPMTA

SEQ ID NO: 231957 - protein, 15 aa, Artificial Sequence
  Description of Artificial Sequence: Synthetic peptide
  Seed: LRMKWMMAMKYPITA
LRMKKMMIMRYPQTA

SEQ ID NO: 231958 - protein, 15 aa, Artificial Sequence
  Description of Artificial Sequence: Synthetic peptide
  Seed: LRMKWMMAMKYPITA
LRMKKMMIMRYPRTA

SEQ ID NO: 231959 - protein, 15 aa, Artificial Sequence
  Description of Artificial Sequence: Synthetic peptide
  Seed: LRMKWMMAMKYPITA
LRMKKMMIMRYPSTA

SEQ ID NO: 231960 - protein, 15 aa, Artificial Sequence
  Description of Artificial Sequence: Synthetic peptide
  Seed: LRMKWMMAMKYPITA
LRMKKMMIMRYPVTA

SEQ ID NO: 231961 - protein, 15 aa, Artificial Sequence
  Description of Artificial Sequence: Synthetic peptide
  Seed: LRMKWMMAMKYPITA
LRMKKMMIMRYPYTA

SEQ ID NO: 231962 - protein, 15 aa, Artificial Sequence
  Description of Artificial Sequence: Synthetic peptide
  Seed: LRMKWMMAMKYPITA
LRMKKMMIMSYPITA

SEQ ID NO: 231963 - protein, 15 aa, Artificial Sequence
  Description of Artificial Sequence: Synthetic peptide
  Seed: LRMKWMMAMKYPITA
LRMKKMMLMAYPATA

SEQ ID NO: 231964 - protein, 15 aa, Artificial Sequence
  Description of Artificial Sequence: Synthetic peptide
  Seed: LRMKWMMAMKYPITA
LRMKKMMLMAYPCTA

SEQ ID NO: 231965 - protein, 15 aa, Artificial Sequence
  Description of Artificial Sequence: Synthetic peptide
  Seed: LRMKWMMAMKYPITA
LRMKKMMLMAYPGTA

SEQ ID NO: 231966 - protein, 15 aa, Artificial Sequence
  Description of Artificial Sequence: Synthetic peptide
  Seed: LRMKWMMAMKYPITA
LRMKKMMLMAYPITA

SEQ ID NO: 231967 - protein, 15 aa, Artificial Sequence
  Description of Artificial Sequence: Synthetic peptide
  Seed: LRMKWMMAMKYPITA
LRMKKMMLMAYPLTA

SEQ ID NO: 231968 - protein, 15 aa, Artificial Sequence
  Description of Artificial Sequence: Synthetic peptide
  Seed: LRMKWMMAMKYPITA
LRMKKMMLMAYPMTA

SEQ ID NO: 231969 - protein, 15 aa, Artificial Sequence
  Description of Artificial Sequence: Synthetic peptide
  Seed: LRMKWMMAMKYPITA
LRMKKMMLMAYPSTA

SEQ ID NO: 231970 - protein, 15 aa, Artificial Sequence
  Description of Artificial Sequence: Synthetic peptide
  Seed: LRMKWMMAMKYPITA
LRMKKMMLMAYPTTA

SEQ ID NO: 231971 - protein, 15 aa, Artificial Sequence
  Description of Artificial Sequence: Synthetic peptide
  Seed: LRMKWMMAMKYPITA
LRMKKMMLMAYPVTA

SEQ ID NO: 231972 - protein, 15 aa, Artificial Sequence
  Description of Artificial Sequence: Synthetic peptide
  Seed: LRMKWMMAMKYPITA
LRMKKMMLMGYPATA

SEQ ID NO: 231973 - protein, 15 aa, Artificial Sequence
  Description of Artificial Sequence: Synthetic peptide
  Seed: LRMKWMMAMKYPITA
LRMKKMMLMGYPITA

SEQ ID NO: 231974 - protein, 15 aa, Artificial Sequence
  Description of Artificial Sequence: Synthetic peptide
  Seed: LRMKWMMAMKYPITA
LRMKKMMLMGYPLTA

SEQ ID NO: 231975 - protein, 15 aa, Artificial Sequence
  Description of Artificial Sequence: Synthetic peptide
  Seed: LRMKWMMAMKYPITA
LRMKKMMLMGYPMTA

SEQ ID NO: 231976 - protein, 15 aa, Artificial Sequence
  Description of Artificial Sequence: Synthetic peptide
  Seed: LRMKWMMAMKYPITA
LRMKKMMLMGYPSTA

SEQ ID NO: 231977 - protein, 15 aa, Artificial Sequence
  Description of Artificial Sequence: Synthetic peptide
  Seed: LRMKWMMAMKYPITA
LRMKKMMLMGYPTTA

SEQ ID NO: 231978 - protein, 15 aa, Artificial Sequence
  Description of Artificial Sequence: Synthetic peptide
  Seed: LRMKWMMAMKYPITA
LRMKKMMLMGYPVTA

SEQ ID NO: 231979 - protein, 15 aa, Artificial Sequence
  Description of Artificial Sequence: Synthetic peptide
  Seed: LRMKWMMAMKYPITA
LRMKKMMLMKYPATA

SEQ ID NO: 231980 - protein, 15 aa, Artificial Sequence
  Description of Artificial Sequence: Synthetic peptide
  Seed: LRMKWMMAMKYPITA
LRMKKMMLMKYPMTA

SEQ ID NO: 231981 - protein, 15 aa, Artificial Sequence
  Description of Artificial Sequence: Synthetic peptide
  Seed: LRMKWMMAMKYPITA
LRMKKMMLMKYPRTA

SEQ ID NO: 231982 - protein, 15 aa, Artificial Sequence
  Description of Artificial Sequence: Synthetic peptide
  Seed: LRMKWMMAMKYPITA
LRMKKMMLMNYPATA

SEQ ID NO: 231983 - protein, 15 aa, Artificial Sequence
  Description of Artificial Sequence: Synthetic peptide
  Seed: LRMKWMMAMKYPITA
LRMKKMMLMNYPITA

SEQ ID NO: 231984 - protein, 15 aa, Artificial Sequence
  Description of Artificial Sequence: Synthetic peptide
  Seed: LRMKWMMAMKYPITA
LRMKKMMLMNYPLTA

SEQ ID NO: 231985 - protein, 15 aa, Artificial Sequence
  Description of Artificial Sequence: Synthetic peptide
  Seed: LRMKWMMAMKYPITA
LRMKKMMLMNYPVTA

SEQ ID NO: 231986 - protein, 15 aa, Artificial Sequence
  Description of Artificial Sequence: Synthetic peptide
  Seed: LRMKWMMAMKYPITA
LRMKKMMLMPYPATA

SEQ ID NO: 231987 - protein, 15 aa, Artificial Sequence
  Description of Artificial Sequence: Synthetic peptide
  Seed: LRMKWMMAMKYPITA
LRMKKMMLMPYPITA

SEQ ID NO: 231988 - protein, 15 aa, Artificial Sequence
  Description of Artificial Sequence: Synthetic peptide
  Seed: LRMKWMMAMKYPITA
LRMKKMMLMPYPLTA

SEQ ID NO: 231989 - protein, 15 aa, Artificial Sequence
  Description of Artificial Sequence: Synthetic peptide
  Seed: LRMKWMMAMKYPITA
LRMKKMMLMPYPMTA

SEQ ID NO: 231990 - protein, 15 aa, Artificial Sequence
  Description of Artificial Sequence: Synthetic peptide
  Seed: LRMKWMMAMKYPITA
LRMKKMMLMPYPVTA

SEQ ID NO: 231991 - protein, 15 aa, Artificial Sequence
  Description of Artificial Sequence: Synthetic peptide
  Seed: LRMKWMMAMKYPITA
LRMKKMMLMRYPATA

SEQ ID NO: 231992 - protein, 15 aa, Artificial Sequence
  Description of Artificial Sequence: Synthetic peptide
  Seed: LRMKWMMAMKYPITA
LRMKKMMLMRYPGTA

SEQ ID NO: 231993 - protein, 15 aa, Artificial Sequence
  Description of Artificial Sequence: Synthetic peptide
  Seed: LRMKWMMAMKYPITA
LRMKKMMLMRYPLTA

SEQ ID NO: 231994 - protein, 15 aa, Artificial Sequence
  Description of Artificial Sequence: Synthetic peptide
  Seed: LRMKWMMAMKYPITA
LRMKKMMLMRYPMTA

SEQ ID NO: 231995 - protein, 15 aa, Artificial Sequence
  Description of Artificial Sequence: Synthetic peptide
  Seed: LRMKWMMAMKYPITA
LRMKKMMLMRYPQTA

SEQ ID NO: 231996 - protein, 15 aa, Artificial Sequence
  Description of Artificial Sequence: Synthetic peptide
  Seed: LRMKWMMAMKYPITA
LRMKKMMLMRYPRTA

SEQ ID NO: 231997 - protein, 15 aa, Artificial Sequence
  Description of Artificial Sequence: Synthetic peptide
  Seed: LRMKWMMAMKYPITA
LRMKKMMLMRYPSTA

SEQ ID NO: 231998 - protein, 15 aa, Artificial Sequence
  Description of Artificial Sequence: Synthetic peptide
  Seed: LRMKWMMAMKYPITA
LRMKKMMLMRYPVTA

SEQ ID NO: 231999 - protein, 15 aa, Artificial Sequence
  Description of Artificial Sequence: Synthetic peptide
  Seed: LRMKWMMAMKYPITA
LRMKKMMLMSYPATA

SEQ ID NO: 232000 - protein, 15 aa, Artificial Sequence
  Description of Artificial Sequence: Synthetic peptide
  Seed: LRMKWMMAMKYPITA
LRMKKMMLMSYPITA

SEQ ID NO: 232001 - protein, 15 aa, Artificial Sequence
  Description of Artificial Sequence: Synthetic peptide
  Seed: LRMKWMMAMKYPITA
LRMKKMMLMSYPLTA

SEQ ID NO: 232002 - protein, 15 aa, Artificial Sequence
  Description of Artificial Sequence: Synthetic peptide
  Seed: LRMKWMMAMKYPITA
LRMKKMMLMSYPMTA

SEQ ID NO: 232003 - protein, 15 aa, Artificial Sequence
  Description of Artificial Sequence: Synthetic peptide
  Seed: LRMKWMMAMKYPITA
LRMKKMMLMSYPSTA

SEQ ID NO: 232004 - protein, 15 aa, Artificial Sequence
  Description of Artificial Sequence: Synthetic peptide
  Seed: LRMKWMMAMKYPITA
LRMKKMMLMSYPTTA

SEQ ID NO: 232005 - protein, 15 aa, Artificial Sequence
  Description of Artificial Sequence: Synthetic peptide
  Seed: LRMKWMMAMKYPITA
LRMKKMMLMSYPVTA

SEQ ID NO: 232006 - protein, 15 aa, Artificial Sequence
  Description of Artificial Sequence: Synthetic peptide
  Seed: LRMKWMMAMKYPITA
LRMKKMMLMTYPLTA

SEQ ID NO: 232007 - protein, 15 aa, Artificial Sequence
  Description of Artificial Sequence: Synthetic peptide
  Seed: LRMKWMMAMKYPITA
LRMKKMMLMTYPMTA

SEQ ID NO: 232008 - protein, 15 aa, Artificial Sequence
  Description of Artificial Sequence: Synthetic peptide
  Seed: LRMKWMMAMKYPITA
LRMKKMMLMTYPVTA

SEQ ID NO: 232009 - protein, 15 aa, Artificial Sequence
  Description of Artificial Sequence: Synthetic peptide
  Seed: LRMKWMMAMKYPITA
LRMKKMMMMAYPATA

SEQ ID NO: 232010 - protein, 15 aa, Artificial Sequence
  Description of Artificial Sequence: Synthetic peptide
  Seed: LRMKWMMAMKYPITA
LRMKKMMMMAYPCTA

SEQ ID NO: 232011 - protein, 15 aa, Artificial Sequence
  Description of Artificial Sequence: Synthetic peptide
  Seed: LRMKWMMAMKYPITA
LRMKKMMMMAYPGTA

SEQ ID NO: 232012 - protein, 15 aa, Artificial Sequence
  Description of Artificial Sequence: Synthetic peptide
  Seed: LRMKWMMAMKYPITA
LRMKKMMMMAYPITA

SEQ ID NO: 232013 - protein, 15 aa, Artificial Sequence
  Description of Artificial Sequence: Synthetic peptide
  Seed: LRMKWMMAMKYPITA
LRMKKMMMMAYPLTA

SEQ ID NO: 232014 - protein, 15 aa, Artificial Sequence
  Description of Artificial Sequence: Synthetic peptide
  Seed: LRMKWMMAMKYPITA
LRMKKMMMMAYPMTA

SEQ ID NO: 232015 - protein, 15 aa, Artificial Sequence
  Description of Artificial Sequence: Synthetic peptide
  Seed: LRMKWMMAMKYPITA
LRMKKMMMMAYPSTA

SEQ ID NO: 232016 - protein, 15 aa, Artificial Sequence
  Description of Artificial Sequence: Synthetic peptide
  Seed: LRMKWMMAMKYPITA
LRMKKMMMMAYPTTA

SEQ ID NO: 232017 - protein, 15 aa, Artificial Sequence
  Description of Artificial Sequence: Synthetic peptide
  Seed: LRMKWMMAMKYPITA
LRMKKMMMMAYPVTA

SEQ ID NO: 232018 - protein, 15 aa, Artificial Sequence
  Description of Artificial Sequence: Synthetic peptide
  Seed: LRMKWMMAMKYPITA
LRMKKMMMMGYPATA

SEQ ID NO: 232019 - protein, 15 aa, Artificial Sequence
  Description of Artificial Sequence: Synthetic peptide
  Seed: LRMKWMMAMKYPITA
LRMKKMMMMGYPITA

SEQ ID NO: 232020 - protein, 15 aa, Artificial Sequence
  Description of Artificial Sequence: Synthetic peptide
  Seed: LRMKWMMAMKYPITA
LRMKKMMMMGYPLTA

SEQ ID NO: 232021 - protein, 15 aa, Artificial Sequence
  Description of Artificial Sequence: Synthetic peptide
  Seed: LRMKWMMAMKYPITA
LRMKKMMMMGYPMTA

SEQ ID NO: 232022 - protein, 15 aa, Artificial Sequence
  Description of Artificial Sequence: Synthetic peptide
  Seed: LRMKWMMAMKYPITA
LRMKKMMMMGYPTTA

SEQ ID NO: 232023 - protein, 15 aa, Artificial Sequence
  Description of Artificial Sequence: Synthetic peptide
  Seed: LRMKWMMAMKYPITA
LRMKKMMMMGYPVTA

SEQ ID NO: 232024 - protein, 15 aa, Artificial Sequence
  Description of Artificial Sequence: Synthetic peptide
  Seed: LRMKWMMAMKYPITA
LRMKKMMMMKYPATA

SEQ ID NO: 232025 - protein, 15 aa, Artificial Sequence
  Description of Artificial Sequence: Synthetic peptide
  Seed: LRMKWMMAMKYPITA
LRMKKMMMMKYPMTA

SEQ ID NO: 232026 - protein, 15 aa, Artificial Sequence
  Description of Artificial Sequence: Synthetic peptide
  Seed: LRMKWMMAMKYPITA
LRMKKMMMMKYPRTA

SEQ ID NO: 232027 - protein, 15 aa, Artificial Sequence
  Description of Artificial Sequence: Synthetic peptide
  Seed: LRMKWMMAMKYPITA
LRMKKMMMMKYPSTA

SEQ ID NO: 232028 - protein, 15 aa, Artificial Sequence
  Description of Artificial Sequence: Synthetic peptide
  Seed: LRMKWMMAMKYPITA
LRMKKMMMMNYPITA

SEQ ID NO: 232029 - protein, 15 aa, Artificial Sequence
  Description of Artificial Sequence: Synthetic peptide
  Seed: LRMKWMMAMKYPITA
LRMKKMMMMNYPLTA

SEQ ID NO: 232030 - protein, 15 aa, Artificial Sequence
  Description of Artificial Sequence: Synthetic peptide
  Seed: LRMKWMMAMKYPITA
LRMKKMMMMNYPMTA

SEQ ID NO: 232031 - protein, 15 aa, Artificial Sequence
  Description of Artificial Sequence: Synthetic peptide
  Seed: LRMKWMMAMKYPITA
LRMKKMMMMNYPVTA

SEQ ID NO: 232032 - protein, 15 aa, Artificial Sequence
  Description of Artificial Sequence: Synthetic peptide
  Seed: LRMKWMMAMKYPITA
LRMKKMMMMPYPATA

SEQ ID NO: 232033 - protein, 15 aa, Artificial Sequence
  Description of Artificial Sequence: Synthetic peptide
  Seed: LRMKWMMAMKYPITA
LRMKKMMMMPYPITA

SEQ ID NO: 232034 - protein, 15 aa, Artificial Sequence
  Description of Artificial Sequence: Synthetic peptide
  Seed: LRMKWMMAMKYPITA
LRMKKMMMMPYPLTA

SEQ ID NO: 232035 - protein, 15 aa, Artificial Sequence
  Description of Artificial Sequence: Synthetic peptide
  Seed: LRMKWMMAMKYPITA
LRMKKMMMMPYPMTA

SEQ ID NO: 232036 - protein, 15 aa, Artificial Sequence
  Description of Artificial Sequence: Synthetic peptide
  Seed: LRMKWMMAMKYPITA
LRMKKMMMMPYPVTA

SEQ ID NO: 232037 - protein, 15 aa, Artificial Sequence
  Description of Artificial Sequence: Synthetic peptide
  Seed: LRMKWMMAMKYPITA
LRMKKMMMMRYPATA

SEQ ID NO: 232038 - protein, 15 aa, Artificial Sequence
  Description of Artificial Sequence: Synthetic peptide
  Seed: LRMKWMMAMKYPITA
LRMKKMMMMRYPGTA

SEQ ID NO: 232039 - protein, 15 aa, Artificial Sequence
  Description of Artificial Sequence: Synthetic peptide
  Seed: LRMKWMMAMKYPITA
LRMKKMMMMRYPHTA

SEQ ID NO: 232040 - protein, 15 aa, Artificial Sequence
  Description of Artificial Sequence: Synthetic peptide
  Seed: LRMKWMMAMKYPITA
LRMKKMMMMRYPITA

SEQ ID NO: 232041 - protein, 15 aa, Artificial Sequence
  Description of Artificial Sequence: Synthetic peptide
  Seed: LRMKWMMAMKYPITA
LRMKKMMMMRYPKTA

SEQ ID NO: 232042 - protein, 15 aa, Artificial Sequence
  Description of Artificial Sequence: Synthetic peptide
  Seed: LRMKWMMAMKYPITA
LRMKKMMMMRYPLTA

SEQ ID NO: 232043 - protein, 15 aa, Artificial Sequence
  Description of Artificial Sequence: Synthetic peptide
  Seed: LRMKWMMAMKYPITA
LRMKKMMMMRYPMTA

SEQ ID NO: 232044 - protein, 15 aa, Artificial Sequence
  Description of Artificial Sequence: Synthetic peptide
  Seed: LRMKWMMAMKYPITA
LRMKKMMMMRYPQTA

SEQ ID NO: 232045 - protein, 15 aa, Artificial Sequence
  Description of Artificial Sequence: Synthetic peptide
  Seed: LRMKWMMAMKYPITA
LRMKKMMMMRYPRTA

SEQ ID NO: 232046 - protein, 15 aa, Artificial Sequence
  Description of Artificial Sequence: Synthetic peptide
  Seed: LRMKWMMAMKYPITA
LRMKKMMMMRYPSTA

SEQ ID NO: 232047 - protein, 15 aa, Artificial Sequence
  Description of Artificial Sequence: Synthetic peptide
  Seed: LRMKWMMAMKYPITA
LRMKKMMMMRYPTTA

SEQ ID NO: 232048 - protein, 15 aa, Artificial Sequence
  Description of Artificial Sequence: Synthetic peptide
  Seed: LRMKWMMAMKYPITA
LRMKKMMMMRYPVTA

SEQ ID NO: 232049 - protein, 15 aa, Artificial Sequence
  Description of Artificial Sequence: Synthetic peptide
  Seed: LRMKWMMAMKYPITA
LRMKKMMMMRYPYTA

SEQ ID NO: 232050 - protein, 15 aa, Artificial Sequence
  Description of Artificial Sequence: Synthetic peptide
  Seed: LRMKWMMAMKYPITA
LRMKKMMMMSYPATA

SEQ ID NO: 232051 - protein, 15 aa, Artificial Sequence
  Description of Artificial Sequence: Synthetic peptide
  Seed: LRMKWMMAMKYPITA
LRMKKMMMMSYPITA

SEQ ID NO: 232052 - protein, 15 aa, Artificial Sequence
  Description of Artificial Sequence: Synthetic peptide
  Seed: LRMKWMMAMKYPITA
LRMKKMMMMSYPLTA

SEQ ID NO: 232053 - protein, 15 aa, Artificial Sequence
  Description of Artificial Sequence: Synthetic peptide
  Seed: LRMKWMMAMKYPITA
LRMKKMMMMSYPMTA

SEQ ID NO: 232054 - protein, 15 aa, Artificial Sequence
  Description of Artificial Sequence: Synthetic peptide
  Seed: LRMKWMMAMKYPITA
LRMKKMMMMSYPSTA

SEQ ID NO: 232055 - protein, 15 aa, Artificial Sequence
  Description of Artificial Sequence: Synthetic peptide
  Seed: LRMKWMMAMKYPITA
LRMKKMMMMSYPTTA

SEQ ID NO: 232056 - protein, 15 aa, Artificial Sequence
  Description of Artificial Sequence: Synthetic peptide
  Seed: LRMKWMMAMKYPITA
LRMKKMMMMSYPVTA

SEQ ID NO: 232057 - protein, 15 aa, Artificial Sequence
  Description of Artificial Sequence: Synthetic peptide
  Seed: LRMKWMMAMKYPITA
LRMKKMMMMTYPATA

SEQ ID NO: 232058 - protein, 15 aa, Artificial Sequence
  Description of Artificial Sequence: Synthetic peptide
  Seed: LRMKWMMAMKYPITA
LRMKKMMMMTYPLTA

SEQ ID NO: 232059 - protein, 15 aa, Artificial Sequence
  Description of Artificial Sequence: Synthetic peptide
  Seed: LRMKWMMAMKYPITA
LRMKKMMMMTYPMTA

SEQ ID NO: 232060 - protein, 15 aa, Artificial Sequence
  Description of Artificial Sequence: Synthetic peptide
  Seed: LRMKWMMAMKYPITA
LRMKKMMMMTYPVTA

SEQ ID NO: 232061 - protein, 15 aa, Artificial Sequence
  Description of Artificial Sequence: Synthetic peptide
  Seed: LRMKWMMAMKYPITA
LRMKKMMNMAYPFTA

SEQ ID NO: 232062 - protein, 15 aa, Artificial Sequence
  Description of Artificial Sequence: Synthetic peptide
  Seed: LRMKWMMAMKYPITA
LRMKKMMNMAYPITA

SEQ ID NO: 232063 - protein, 15 aa, Artificial Sequence
  Description of Artificial Sequence: Synthetic peptide
  Seed: LRMKWMMAMKYPITA
LRMKKMMNMAYPLTA

SEQ ID NO: 232064 - protein, 15 aa, Artificial Sequence
  Description of Artificial Sequence: Synthetic peptide
  Seed: LRMKWMMAMKYPITA
LRMKKMMNMAYPVTA

SEQ ID NO: 232065 - protein, 15 aa, Artificial Sequence
  Description of Artificial Sequence: Synthetic peptide
  Seed: LRMKWMMAMKYPITA
LRMKKMMNMGYPITA

SEQ ID NO: 232066 - protein, 15 aa, Artificial Sequence
  Description of Artificial Sequence: Synthetic peptide
  Seed: LRMKWMMAMKYPITA
LRMKKMMNMIYPITA

SEQ ID NO: 232067 - protein, 15 aa, Artificial Sequence
  Description of Artificial Sequence: Synthetic peptide
  Seed: LRMKWMMAMKYPITA
LRMKKMMNMIYPVTA

SEQ ID NO: 232068 - protein, 15 aa, Artificial Sequence
  Description of Artificial Sequence: Synthetic peptide
  Seed: LRMKWMMAMKYPITA
LRMKKMMNMNYPFTA

SEQ ID NO: 232069 - protein, 15 aa, Artificial Sequence
  Description of Artificial Sequence: Synthetic peptide
  Seed: LRMKWMMAMKYPITA
LRMKKMMNMNYPITA

SEQ ID NO: 232070 - protein, 15 aa, Artificial Sequence
  Description of Artificial Sequence: Synthetic peptide
  Seed: LRMKWMMAMKYPITA
LRMKKMMNMNYPLTA

SEQ ID NO: 232071 - protein, 15 aa, Artificial Sequence
  Description of Artificial Sequence: Synthetic peptide
  Seed: LRMKWMMAMKYPITA
LRMKKMMNMNYPMTA

SEQ ID NO: 232072 - protein, 15 aa, Artificial Sequence
  Description of Artificial Sequence: Synthetic peptide
  Seed: LRMKWMMAMKYPITA
LRMKKMMNMNYPVTA

SEQ ID NO: 232073 - protein, 15 aa, Artificial Sequence
  Description of Artificial Sequence: Synthetic peptide
  Seed: LRMKWMMAMKYPITA
LRMKKMMNMPYPITA

SEQ ID NO: 232074 - protein, 15 aa, Artificial Sequence
  Description of Artificial Sequence: Synthetic peptide
  Seed: LRMKWMMAMKYPITA
LRMKKMMNMSYPITA

SEQ ID NO: 232075 - protein, 15 aa, Artificial Sequence
  Description of Artificial Sequence: Synthetic peptide
  Seed: LRMKWMMAMKYPITA
LRMKKMMNMSYPLTA

SEQ ID NO: 232076 - protein, 15 aa, Artificial Sequence
  Description of Artificial Sequence: Synthetic peptide
  Seed: LRMKWMMAMKYPITA
LRMKKMMNMSYPVTA

SEQ ID NO: 232077 - protein, 15 aa, Artificial Sequence
  Description of Artificial Sequence: Synthetic peptide
  Seed: LRMKWMMAMKYPITA
LRMKKMMNMTYPITA

SEQ ID NO: 232078 - protein, 15 aa, Artificial Sequence
  Description of Artificial Sequence: Synthetic peptide
  Seed: LRMKWMMAMKYPITA
LRMKKMMNMVYPITA

SEQ ID NO: 232079 - protein, 15 aa, Artificial Sequence
  Description of Artificial Sequence: Synthetic peptide
  Seed: LRMKWMMAMKYPITA
LRMKKMMNMVYPVTA

SEQ ID NO: 232080 - protein, 15 aa, Artificial Sequence
  Description of Artificial Sequence: Synthetic peptide
  Seed: LRMKWMMAMKYPITA
LRMKKMMQMGYPLTA

SEQ ID NO: 232081 - protein, 15 aa, Artificial Sequence
  Description of Artificial Sequence: Synthetic peptide
  Seed: LRMKWMMAMKYPITA
LRMKKMMQMGYPVTA

SEQ ID NO: 232082 - protein, 15 aa, Artificial Sequence
  Description of Artificial Sequence: Synthetic peptide
  Seed: LRMKWMMAMKYPITA
LRMKKMMSMAYPITA

SEQ ID NO: 232083 - protein, 15 aa, Artificial Sequence
  Description of Artificial Sequence: Synthetic peptide
  Seed: LRMKWMMAMKYPITA
LRMKKMMSMAYPLTA

SEQ ID NO: 232084 - protein, 15 aa, Artificial Sequence
  Description of Artificial Sequence: Synthetic peptide
  Seed: LRMKWMMAMKYPITA
LRMKKMMSMAYPVTA

SEQ ID NO: 232085 - protein, 15 aa, Artificial Sequence
  Description of Artificial Sequence: Synthetic peptide
  Seed: LRMKWMMAMKYPITA
LRMKKMMSMGYPITA

SEQ ID NO: 232086 - protein, 15 aa, Artificial Sequence
  Description of Artificial Sequence: Synthetic peptide
  Seed: LRMKWMMAMKYPITA
LRMKKMMSMGYPLTA

SEQ ID NO: 232087 - protein, 15 aa, Artificial Sequence
  Description of Artificial Sequence: Synthetic peptide
  Seed: LRMKWMMAMKYPITA
LRMKKMMSMGYPMTA

SEQ ID NO: 232088 - protein, 15 aa, Artificial Sequence
  Description of Artificial Sequence: Synthetic peptide
  Seed: LRMKWMMAMKYPITA
LRMKKMMSMGYPVTA

SEQ ID NO: 232089 - protein, 15 aa, Artificial Sequence
  Description of Artificial Sequence: Synthetic peptide
  Seed: LRMKWMMAMKYPITA
LRMKKMMSMPYPITA

SEQ ID NO: 232090 - protein, 15 aa, Artificial Sequence
  Description of Artificial Sequence: Synthetic peptide
  Seed: LRMKWMMAMKYPITA
LRMKKMMSMPYPLTA

SEQ ID NO: 232091 - protein, 15 aa, Artificial Sequence
  Description of Artificial Sequence: Synthetic peptide
  Seed: LRMKWMMAMKYPITA
LRMKKMMSMPYPMTA

SEQ ID NO: 232092 - protein, 15 aa, Artificial Sequence
  Description of Artificial Sequence: Synthetic peptide
  Seed: LRMKWMMAMKYPITA
LRMKKMMSMPYPVTA

SEQ ID NO: 232093 - protein, 15 aa, Artificial Sequence
  Description of Artificial Sequence: Synthetic peptide
  Seed: LRMKWMMAMKYPITA
LRMKKMMSMSYPITA

SEQ ID NO: 232094 - protein, 15 aa, Artificial Sequence
  Description of Artificial Sequence: Synthetic peptide
  Seed: LRMKWMMAMKYPITA
LRMKKMMSMSYPLTA

SEQ ID NO: 232095 - protein, 15 aa, Artificial Sequence
  Description of Artificial Sequence: Synthetic peptide
  Seed: LRMKWMMAMKYPITA
LRMKKMMSMSYPVTA

SEQ ID NO: 232096 - protein, 15 aa, Artificial Sequence
  Description of Artificial Sequence: Synthetic peptide
  Seed: LRMKWMMAMKYPITA
LRMKKMMTMAYPITA

SEQ ID NO: 232097 - protein, 15 aa, Artificial Sequence
  Description of Artificial Sequence: Synthetic peptide
  Seed: LRMKWMMAMKYPITA
LRMKKMMTMAYPLTA

SEQ ID NO: 232098 - protein, 15 aa, Artificial Sequence
  Description of Artificial Sequence: Synthetic peptide
  Seed: LRMKWMMAMKYPITA
LRMKKMMTMAYPVTA

SEQ ID NO: 232099 - protein, 15 aa, Artificial Sequence
  Description of Artificial Sequence: Synthetic peptide
  Seed: LRMKWMMAMKYPITA
LRMKKMMTMGYPITA

SEQ ID NO: 232100 - protein, 15 aa, Artificial Sequence
  Description of Artificial Sequence: Synthetic peptide
  Seed: LRMKWMMAMKYPITA
LRMKKMMTMGYPVTA

SEQ ID NO: 232101 - protein, 15 aa, Artificial Sequence
  Description of Artificial Sequence: Synthetic peptide
  Seed: LRMKWMMAMKYPITA
LRMKKMMTMSYPITA

SEQ ID NO: 232102 - protein, 15 aa, Artificial Sequence
  Description of Artificial Sequence: Synthetic peptide
  Seed: LRMKWMMAMKYPITA
LRMKKMMTMSYPLTA

SEQ ID NO: 232103 - protein, 15 aa, Artificial Sequence
  Description of Artificial Sequence: Synthetic peptide
  Seed: LRMKWMMAMKYPITA
LRMKKMMTMSYPVTA

SEQ ID NO: 232104 - protein, 15 aa, Artificial Sequence
  Description of Artificial Sequence: Synthetic peptide
  Seed: LRMKWMMAMKYPITA
LRMKKMMTMTYPITA

SEQ ID NO: 232105 - protein, 15 aa, Artificial Sequence
  Description of Artificial Sequence: Synthetic peptide
  Seed: LRMKWMMAMKYPITA
LRMKKMMVMGYPATA

SEQ ID NO: 232106 - protein, 15 aa, Artificial Sequence
  Description of Artificial Sequence: Synthetic peptide
  Seed: LRMKWMMAMKYPITA
LRMKKMMVMGYPLTA

SEQ ID NO: 232107 - protein, 15 aa, Artificial Sequence
  Description of Artificial Sequence: Synthetic peptide
  Seed: LRMKWMMAMKYPITA
LRMKKMMVMKYPATA

SEQ ID NO: 232108 - protein, 15 aa, Artificial Sequence
  Description of Artificial Sequence: Synthetic peptide
  Seed: LRMKWMMAMKYPITA
LRMKKMMVMPYPLTA

SEQ ID NO: 232109 - protein, 15 aa, Artificial Sequence
  Description of Artificial Sequence: Synthetic peptide
  Seed: LRMKWMMAMKYPITA
LRMKKMMVMPYPVTA

SEQ ID NO: 232110 - protein, 15 aa, Artificial Sequence
  Description of Artificial Sequence: Synthetic peptide
  Seed: LRMKWMMAMKYPITA
LRMKKMMVMRYPATA

SEQ ID NO: 232111 - protein, 15 aa, Artificial Sequence
  Description of Artificial Sequence: Synthetic peptide
  Seed: LRMKWMMAMKYPITA
LRMKKMMVMRYPGTA

SEQ ID NO: 232112 - protein, 15 aa, Artificial Sequence
  Description of Artificial Sequence: Synthetic peptide
  Seed: LRMKWMMAMKYPITA
LRMKKMMVMRYPQTA

SEQ ID NO: 232113 - protein, 15 aa, Artificial Sequence
  Description of Artificial Sequence: Synthetic peptide
  Seed: LRMKWMMAMKYPITA
LRMKKMMVMRYPRTA

SEQ ID NO: 232114 - protein, 15 aa, Artificial Sequence
  Description of Artificial Sequence: Synthetic peptide
  Seed: LRMKWMMAMKYPITA
LRMKKMMVMRYPSTA

SEQ ID NO: 232115 - protein, 15 aa, Artificial Sequence
  Description of Artificial Sequence: Synthetic peptide
  Seed: LRMKWMMAMKYPITA
LRMKKMMVMSYPITA

SEQ ID NO: 232116 - protein, 15 aa, Artificial Sequence
  Description of Artificial Sequence: Synthetic peptide
  Seed: LRMKWMMAMKYPITA
LRMKKMMVMSYPLTA

SEQ ID NO: 232117 - protein, 15 aa, Artificial Sequence
  Description of Artificial Sequence: Synthetic peptide
  Seed: LRMKWMMAMKYPITA
LRMKKMMVMSYPVTA

SEQ ID NO: 232118 - protein, 15 aa, Artificial Sequence
  Description of Artificial Sequence: Synthetic peptide
  Seed: LRMKWMMAMKYPITA
LRMKLMMAMAYPATA

SEQ ID NO: 232119 - protein, 15 aa, Artificial Sequence
  Description of Artificial Sequence: Synthetic peptide
  Seed: LRMKWMMAMKYPITA
LRMKLMMAMAYPCTA

SEQ ID NO: 232120 - protein, 15 aa, Artificial Sequence
  Description of Artificial Sequence: Synthetic peptide
  Seed: LRMKWMMAMKYPITA
LRMKLMMAMAYPDTA

SEQ ID NO: 232121 - protein, 15 aa, Artificial Sequence
  Description of Artificial Sequence: Synthetic peptide
  Seed: LRMKWMMAMKYPITA
LRMKLMMAMAYPETA

SEQ ID NO: 232122 - protein, 15 aa, Artificial Sequence
  Description of Artificial Sequence: Synthetic peptide
  Seed: LRMKWMMAMKYPITA
LRMKLMMAMAYPFTA

SEQ ID NO: 232123 - protein, 15 aa, Artificial Sequence
  Description of Artificial Sequence: Synthetic peptide
  Seed: LRMKWMMAMKYPITA
LRMKLMMAMAYPGTA

SEQ ID NO: 232124 - protein, 15 aa, Artificial Sequence
  Description of Artificial Sequence: Synthetic peptide
  Seed: LRMKWMMAMKYPITA
LRMKLMMAMAYPHTA

SEQ ID NO: 232125 - protein, 15 aa, Artificial Sequence
  Description of Artificial Sequence: Synthetic peptide
  Seed: LRMKWMMAMKYPITA
LRMKLMMAMAYPITA

SEQ ID NO: 232126 - protein, 15 aa, Artificial Sequence
  Description of Artificial Sequence: Synthetic peptide
  Seed: LRMKWMMAMKYPITA
LRMKLMMAMAYPKTA

SEQ ID NO: 232127 - protein, 15 aa, Artificial Sequence
  Description of Artificial Sequence: Synthetic peptide
  Seed: LRMKWMMAMKYPITA
LRMKLMMAMAYPLTA

SEQ ID NO: 232128 - protein, 15 aa, Artificial Sequence
  Description of Artificial Sequence: Synthetic peptide
  Seed: LRMKWMMAMKYPITA
LRMKLMMAMAYPMTA

SEQ ID NO: 232129 - protein, 15 aa, Artificial Sequence
  Description of Artificial Sequence: Synthetic peptide
  Seed: LRMKWMMAMKYPITA
LRMKLMMAMAYPNTA

SEQ ID NO: 232130 - protein, 15 aa, Artificial Sequence
  Description of Artificial Sequence: Synthetic peptide
  Seed: LRMKWMMAMKYPITA
LRMKLMMAMAYPPTA

SEQ ID NO: 232131 - protein, 15 aa, Artificial Sequence
  Description of Artificial Sequence: Synthetic peptide
  Seed: LRMKWMMAMKYPITA
LRMKLMMAMAYPQTA

SEQ ID NO: 232132 - protein, 15 aa, Artificial Sequence
  Description of Artificial Sequence: Synthetic peptide
  Seed: LRMKWMMAMKYPITA
LRMKLMMAMAYPRTA

SEQ ID NO: 232133 - protein, 15 aa, Artificial Sequence
  Description of Artificial Sequence: Synthetic peptide
  Seed: LRMKWMMAMKYPITA
LRMKLMMAMAYPSTA

SEQ ID NO: 232134 - protein, 15 aa, Artificial Sequence
  Description of Artificial Sequence: Synthetic peptide
  Seed: LRMKWMMAMKYPITA
LRMKLMMAMAYPTTA

SEQ ID NO: 232135 - protein, 15 aa, Artificial Sequence
  Description of Artificial Sequence: Synthetic peptide
  Seed: LRMKWMMAMKYPITA
LRMKLMMAMAYPVTA

SEQ ID NO: 232136 - protein, 15 aa, Artificial Sequence
  Description of Artificial Sequence: Synthetic peptide
  Seed: LRMKWMMAMKYPITA
LRMKLMMAMAYPWTA

SEQ ID NO: 232137 - protein, 15 aa, Artificial Sequence
  Description of Artificial Sequence: Synthetic peptide
  Seed: LRMKWMMAMKYPITA
LRMKLMMAMAYPYTA

SEQ ID NO: 232138 - protein, 15 aa, Artificial Sequence
  Description of Artificial Sequence: Synthetic peptide
  Seed: LRMKWMMAMKYPITA
LRMKLMMAMCYPATA

SEQ ID NO: 232139 - protein, 15 aa, Artificial Sequence
  Description of Artificial Sequence: Synthetic peptide
  Seed: LRMKWMMAMKYPITA
LRMKLMMAMCYPITA

SEQ ID NO: 232140 - protein, 15 aa, Artificial Sequence
  Description of Artificial Sequence: Synthetic peptide
  Seed: LRMKWMMAMKYPITA
LRMKLMMAMCYPKTA

SEQ ID NO: 232141 - protein, 15 aa, Artificial Sequence
  Description of Artificial Sequence: Synthetic peptide
  Seed: LRMKWMMAMKYPITA
LRMKLMMAMCYPLTA

SEQ ID NO: 232142 - protein, 15 aa, Artificial Sequence
  Description of Artificial Sequence: Synthetic peptide
  Seed: LRMKWMMAMKYPITA
LRMKLMMAMCYPMTA

SEQ ID NO: 232143 - protein, 15 aa, Artificial Sequence
  Description of Artificial Sequence: Synthetic peptide
  Seed: LRMKWMMAMKYPITA
LRMKLMMAMCYPNTA

SEQ ID NO: 232144 - protein, 15 aa, Artificial Sequence
  Description of Artificial Sequence: Synthetic peptide
  Seed: LRMKWMMAMKYPITA
LRMKLMMAMCYPRTA

SEQ ID NO: 232145 - protein, 15 aa, Artificial Sequence
  Description of Artificial Sequence: Synthetic peptide
  Seed: LRMKWMMAMKYPITA
LRMKLMMAMCYPSTA

SEQ ID NO: 232146 - protein, 15 aa, Artificial Sequence
  Description of Artificial Sequence: Synthetic peptide
  Seed: LRMKWMMAMKYPITA
LRMKLMMAMCYPTTA

SEQ ID NO: 232147 - protein, 15 aa, Artificial Sequence
  Description of Artificial Sequence: Synthetic peptide
  Seed: LRMKWMMAMKYPITA
LRMKLMMAMCYPVTA

SEQ ID NO: 232148 - protein, 15 aa, Artificial Sequence
  Description of Artificial Sequence: Synthetic peptide
  Seed: LRMKWMMAMKYPITA
LRMKLMMAMDYPATA

SEQ ID NO: 232149 - protein, 15 aa, Artificial Sequence
  Description of Artificial Sequence: Synthetic peptide
  Seed: LRMKWMMAMKYPITA
LRMKLMMAMDYPITA

SEQ ID NO: 232150 - protein, 15 aa, Artificial Sequence
  Description of Artificial Sequence: Synthetic peptide
  Seed: LRMKWMMAMKYPITA
LRMKLMMAMDYPLTA

SEQ ID NO: 232151 - protein, 15 aa, Artificial Sequence
  Description of Artificial Sequence: Synthetic peptide
  Seed: LRMKWMMAMKYPITA
LRMKLMMAMDYPMTA

SEQ ID NO: 232152 - protein, 15 aa, Artificial Sequence
  Description of Artificial Sequence: Synthetic peptide
  Seed: LRMKWMMAMKYPITA
LRMKLMMAMDYPSTA

SEQ ID NO: 232153 - protein, 15 aa, Artificial Sequence
  Description of Artificial Sequence: Synthetic peptide
  Seed: LRMKWMMAMKYPITA
LRMKLMMAMDYPTTA

SEQ ID NO: 232154 - protein, 15 aa, Artificial Sequence
  Description of Artificial Sequence: Synthetic peptide
  Seed: LRMKWMMAMKYPITA
LRMKLMMAMDYPVTA

SEQ ID NO: 232155 - protein, 15 aa, Artificial Sequence
  Description of Artificial Sequence: Synthetic peptide
  Seed: LRMKWMMAMKYPITA
LRMKLMMAMEYPATA

SEQ ID NO: 232156 - protein, 15 aa, Artificial Sequence
  Description of Artificial Sequence: Synthetic peptide
  Seed: LRMKWMMAMKYPITA
LRMKLMMAMEYPITA

SEQ ID NO: 232157 - protein, 15 aa, Artificial Sequence
  Description of Artificial Sequence: Synthetic peptide
  Seed: LRMKWMMAMKYPITA
LRMKLMMAMEYPLTA

SEQ ID NO: 232158 - protein, 15 aa, Artificial Sequence
  Description of Artificial Sequence: Synthetic peptide
  Seed: LRMKWMMAMKYPITA
LRMKLMMAMEYPMTA

SEQ ID NO: 232159 - protein, 15 aa, Artificial Sequence
  Description of Artificial Sequence: Synthetic peptide
  Seed: LRMKWMMAMKYPITA
LRMKLMMAMEYPSTA

SEQ ID NO: 232160 - protein, 15 aa, Artificial Sequence
  Description of Artificial Sequence: Synthetic peptide
  Seed: LRMKWMMAMKYPITA
LRMKLMMAMEYPVTA

SEQ ID NO: 232161 - protein, 15 aa, Artificial Sequence
  Description of Artificial Sequence: Synthetic peptide
  Seed: LRMKWMMAMKYPITA
LRMKLMMAMFYPATA

SEQ ID NO: 232162 - protein, 15 aa, Artificial Sequence
  Description of Artificial Sequence: Synthetic peptide
  Seed: LRMKWMMAMKYPITA
LRMKLMMAMFYPITA

SEQ ID NO: 232163 - protein, 15 aa, Artificial Sequence
  Description of Artificial Sequence: Synthetic peptide
  Seed: LRMKWMMAMKYPITA
LRMKLMMAMFYPLTA

SEQ ID NO: 232164 - protein, 15 aa, Artificial Sequence
  Description of Artificial Sequence: Synthetic peptide
  Seed: LRMKWMMAMKYPITA
LRMKLMMAMFYPVTA

SEQ ID NO: 232165 - protein, 15 aa, Artificial Sequence
  Description of Artificial Sequence: Synthetic peptide
  Seed: LRMKWMMAMKYPITA
LRMKLMMAMGYPATA

SEQ ID NO: 232166 - protein, 15 aa, Artificial Sequence
  Description of Artificial Sequence: Synthetic peptide
  Seed: LRMKWMMAMKYPITA
LRMKLMMAMGYPCTA

SEQ ID NO: 232167 - protein, 15 aa, Artificial Sequence
  Description of Artificial Sequence: Synthetic peptide
  Seed: LRMKWMMAMKYPITA
LRMKLMMAMGYPDTA

SEQ ID NO: 232168 - protein, 15 aa, Artificial Sequence
  Description of Artificial Sequence: Synthetic peptide
  Seed: LRMKWMMAMKYPITA
LRMKLMMAMGYPETA

SEQ ID NO: 232169 - protein, 15 aa, Artificial Sequence
  Description of Artificial Sequence: Synthetic peptide
  Seed: LRMKWMMAMKYPITA
LRMKLMMAMGYPFTA

SEQ ID NO: 232170 - protein, 15 aa, Artificial Sequence
  Description of Artificial Sequence: Synthetic peptide
  Seed: LRMKWMMAMKYPITA
LRMKLMMAMGYPGTA

SEQ ID NO: 232171 - protein, 15 aa, Artificial Sequence
  Description of Artificial Sequence: Synthetic peptide
  Seed: LRMKWMMAMKYPITA
LRMKLMMAMGYPHTA

SEQ ID NO: 232172 - protein, 15 aa, Artificial Sequence
  Description of Artificial Sequence: Synthetic peptide
  Seed: LRMKWMMAMKYPITA
LRMKLMMAMGYPITA

SEQ ID NO: 232173 - protein, 15 aa, Artificial Sequence
  Description of Artificial Sequence: Synthetic peptide
  Seed: LRMKWMMAMKYPITA
LRMKLMMAMGYPKTA

SEQ ID NO: 232174 - protein, 15 aa, Artificial Sequence
  Description of Artificial Sequence: Synthetic peptide
  Seed: LRMKWMMAMKYPITA
LRMKLMMAMGYPLTA

SEQ ID NO: 232175 - protein, 15 aa, Artificial Sequence
  Description of Artificial Sequence: Synthetic peptide
  Seed: LRMKWMMAMKYPITA
LRMKLMMAMGYPMTA

SEQ ID NO: 232176 - protein, 15 aa, Artificial Sequence
  Description of Artificial Sequence: Synthetic peptide
  Seed: LRMKWMMAMKYPITA
LRMKLMMAMGYPNTA

SEQ ID NO: 232177 - protein, 15 aa, Artificial Sequence
  Description of Artificial Sequence: Synthetic peptide
  Seed: LRMKWMMAMKYPITA
LRMKLMMAMGYPPTA

SEQ ID NO: 232178 - protein, 15 aa, Artificial Sequence
  Description of Artificial Sequence: Synthetic peptide
  Seed: LRMKWMMAMKYPITA
LRMKLMMAMGYPQTA

SEQ ID NO: 232179 - protein, 15 aa, Artificial Sequence
  Description of Artificial Sequence: Synthetic peptide
  Seed: LRMKWMMAMKYPITA
LRMKLMMAMGYPRTA

SEQ ID NO: 232180 - protein, 15 aa, Artificial Sequence
  Description of Artificial Sequence: Synthetic peptide
  Seed: LRMKWMMAMKYPITA
LRMKLMMAMGYPSTA

SEQ ID NO: 232181 - protein, 15 aa, Artificial Sequence
  Description of Artificial Sequence: Synthetic peptide
  Seed: LRMKWMMAMKYPITA
LRMKLMMAMGYPTTA

SEQ ID NO: 232182 - protein, 15 aa, Artificial Sequence
  Description of Artificial Sequence: Synthetic peptide
  Seed: LRMKWMMAMKYPITA
LRMKLMMAMGYPVTA

SEQ ID NO: 232183 - protein, 15 aa, Artificial Sequence
  Description of Artificial Sequence: Synthetic peptide
  Seed: LRMKWMMAMKYPITA
LRMKLMMAMGYPWTA

SEQ ID NO: 232184 - protein, 15 aa, Artificial Sequence
  Description of Artificial Sequence: Synthetic peptide
  Seed: LRMKWMMAMKYPITA
LRMKLMMAMGYPYTA

SEQ ID NO: 232185 - protein, 15 aa, Artificial Sequence
  Description of Artificial Sequence: Synthetic peptide
  Seed: LRMKWMMAMKYPITA
LRMKLMMAMHYPATA

SEQ ID NO: 232186 - protein, 15 aa, Artificial Sequence
  Description of Artificial Sequence: Synthetic peptide
  Seed: LRMKWMMAMKYPITA
LRMKLMMAMHYPCTA

SEQ ID NO: 232187 - protein, 15 aa, Artificial Sequence
  Description of Artificial Sequence: Synthetic peptide
  Seed: LRMKWMMAMKYPITA
LRMKLMMAMHYPFTA

SEQ ID NO: 232188 - protein, 15 aa, Artificial Sequence
  Description of Artificial Sequence: Synthetic peptide
  Seed: LRMKWMMAMKYPITA
LRMKLMMAMHYPGTA

SEQ ID NO: 232189 - protein, 15 aa, Artificial Sequence
  Description of Artificial Sequence: Synthetic peptide
  Seed: LRMKWMMAMKYPITA
LRMKLMMAMHYPHTA

SEQ ID NO: 232190 - protein, 15 aa, Artificial Sequence
  Description of Artificial Sequence: Synthetic peptide
  Seed: LRMKWMMAMKYPITA
LRMKLMMAMHYPITA

SEQ ID NO: 232191 - protein, 15 aa, Artificial Sequence
  Description of Artificial Sequence: Synthetic peptide
  Seed: LRMKWMMAMKYPITA
LRMKLMMAMHYPKTA

SEQ ID NO: 232192 - protein, 15 aa, Artificial Sequence
  Description of Artificial Sequence: Synthetic peptide
  Seed: LRMKWMMAMKYPITA
LRMKLMMAMHYPLTA

SEQ ID NO: 232193 - protein, 15 aa, Artificial Sequence
  Description of Artificial Sequence: Synthetic peptide
  Seed: LRMKWMMAMKYPITA
LRMKLMMAMHYPMTA

SEQ ID NO: 232194 - protein, 15 aa, Artificial Sequence
  Description of Artificial Sequence: Synthetic peptide
  Seed: LRMKWMMAMKYPITA
LRMKLMMAMHYPNTA

SEQ ID NO: 232195 - protein, 15 aa, Artificial Sequence
  Description of Artificial Sequence: Synthetic peptide
  Seed: LRMKWMMAMKYPITA
LRMKLMMAMHYPQTA

SEQ ID NO: 232196 - protein, 15 aa, Artificial Sequence
  Description of Artificial Sequence: Synthetic peptide
  Seed: LRMKWMMAMKYPITA
LRMKLMMAMHYPRTA

SEQ ID NO: 232197 - protein, 15 aa, Artificial Sequence
  Description of Artificial Sequence: Synthetic peptide
  Seed: LRMKWMMAMKYPITA
LRMKLMMAMHYPSTA

SEQ ID NO: 232198 - protein, 15 aa, Artificial Sequence
  Description of Artificial Sequence: Synthetic peptide
  Seed: LRMKWMMAMKYPITA
LRMKLMMAMHYPTTA

SEQ ID NO: 232199 - protein, 15 aa, Artificial Sequence
  Description of Artificial Sequence: Synthetic peptide
  Seed: LRMKWMMAMKYPITA
LRMKLMMAMHYPVTA

SEQ ID NO: 232200 - protein, 15 aa, Artificial Sequence
  Description of Artificial Sequence: Synthetic peptide
  Seed: LRMKWMMAMKYPITA
LRMKLMMAMHYPYTA

SEQ ID NO: 232201 - protein, 15 aa, Artificial Sequence
  Description of Artificial Sequence: Synthetic peptide
  Seed: LRMKWMMAMKYPITA
LRMKLMMAMIYPATA

SEQ ID NO: 232202 - protein, 15 aa, Artificial Sequence
  Description of Artificial Sequence: Synthetic peptide
  Seed: LRMKWMMAMKYPITA
LRMKLMMAMIYPCTA

SEQ ID NO: 232203 - protein, 15 aa, Artificial Sequence
  Description of Artificial Sequence: Synthetic peptide
  Seed: LRMKWMMAMKYPITA
LRMKLMMAMIYPDTA

SEQ ID NO: 232204 - protein, 15 aa, Artificial Sequence
  Description of Artificial Sequence: Synthetic peptide
  Seed: LRMKWMMAMKYPITA
LRMKLMMAMIYPGTA

SEQ ID NO: 232205 - protein, 15 aa, Artificial Sequence
  Description of Artificial Sequence: Synthetic peptide
  Seed: LRMKWMMAMKYPITA
LRMKLMMAMIYPHTA

SEQ ID NO: 232206 - protein, 15 aa, Artificial Sequence
  Description of Artificial Sequence: Synthetic peptide
  Seed: LRMKWMMAMKYPITA
LRMKLMMAMIYPITA

SEQ ID NO: 232207 - protein, 15 aa, Artificial Sequence
  Description of Artificial Sequence: Synthetic peptide
  Seed: LRMKWMMAMKYPITA
LRMKLMMAMIYPKTA

SEQ ID NO: 232208 - protein, 15 aa, Artificial Sequence
  Description of Artificial Sequence: Synthetic peptide
  Seed: LRMKWMMAMKYPITA
LRMKLMMAMIYPLTA

SEQ ID NO: 232209 - protein, 15 aa, Artificial Sequence
  Description of Artificial Sequence: Synthetic peptide
  Seed: LRMKWMMAMKYPITA
LRMKLMMAMIYPMTA

SEQ ID NO: 232210 - protein, 15 aa, Artificial Sequence
  Description of Artificial Sequence: Synthetic peptide
  Seed: LRMKWMMAMKYPITA
LRMKLMMAMIYPNTA

SEQ ID NO: 232211 - protein, 15 aa, Artificial Sequence
  Description of Artificial Sequence: Synthetic peptide
  Seed: LRMKWMMAMKYPITA
LRMKLMMAMIYPQTA

SEQ ID NO: 232212 - protein, 15 aa, Artificial Sequence
  Description of Artificial Sequence: Synthetic peptide
  Seed: LRMKWMMAMKYPITA
LRMKLMMAMIYPRTA

SEQ ID NO: 232213 - protein, 15 aa, Artificial Sequence
  Description of Artificial Sequence: Synthetic peptide
  Seed: LRMKWMMAMKYPITA
LRMKLMMAMIYPSTA

SEQ ID NO: 232214 - protein, 15 aa, Artificial Sequence
  Description of Artificial Sequence: Synthetic peptide
  Seed: LRMKWMMAMKYPITA
LRMKLMMAMIYPTTA

SEQ ID NO: 232215 - protein, 15 aa, Artificial Sequence
  Description of Artificial Sequence: Synthetic peptide
  Seed: LRMKWMMAMKYPITA
LRMKLMMAMIYPVTA

SEQ ID NO: 232216 - protein, 15 aa, Artificial Sequence
  Description of Artificial Sequence: Synthetic peptide
  Seed: LRMKWMMAMKYPITA
LRMKLMMAMIYPYTA

SEQ ID NO: 232217 - protein, 15 aa, Artificial Sequence
  Description of Artificial Sequence: Synthetic peptide
  Seed: LRMKWMMAMKYPITA
LRMKLMMAMKYPATA

SEQ ID NO: 232218 - protein, 15 aa, Artificial Sequence
  Description of Artificial Sequence: Synthetic peptide
  Seed: LRMKWMMAMKYPITA
LRMKLMMAMKYPCTA

SEQ ID NO: 232219 - protein, 15 aa, Artificial Sequence
  Description of Artificial Sequence: Synthetic peptide
  Seed: LRMKWMMAMKYPITA
LRMKLMMAMKYPDTA

SEQ ID NO: 232220 - protein, 15 aa, Artificial Sequence
  Description of Artificial Sequence: Synthetic peptide
  Seed: LRMKWMMAMKYPITA
LRMKLMMAMKYPETA

SEQ ID NO: 232221 - protein, 15 aa, Artificial Sequence
  Description of Artificial Sequence: Synthetic peptide
  Seed: LRMKWMMAMKYPITA
LRMKLMMAMKYPFTA

SEQ ID NO: 232222 - protein, 15 aa, Artificial Sequence
  Description of Artificial Sequence: Synthetic peptide
  Seed: LRMKWMMAMKYPITA
LRMKLMMAMKYPGTA

SEQ ID NO: 232223 - protein, 15 aa, Artificial Sequence
  Description of Artificial Sequence: Synthetic peptide
  Seed: LRMKWMMAMKYPITA
LRMKLMMAMKYPHTA

SEQ ID NO: 232224 - protein, 15 aa, Artificial Sequence
  Description of Artificial Sequence: Synthetic peptide
  Seed: LRMKWMMAMKYPITA
LRMKLMMAMKYPITA

SEQ ID NO: 232225 - protein, 15 aa, Artificial Sequence
  Description of Artificial Sequence: Synthetic peptide
  Seed: LRMKWMMAMKYPITA
LRMKLMMAMKYPKTA

SEQ ID NO: 232226 - protein, 15 aa, Artificial Sequence
  Description of Artificial Sequence: Synthetic peptide
  Seed: LRMKWMMAMKYPITA
LRMKLMMAMKYPLTA

SEQ ID NO: 232227 - protein, 15 aa, Artificial Sequence
  Description of Artificial Sequence: Synthetic peptide
  Seed: LRMKWMMAMKYPITA
LRMKLMMAMKYPMTA

SEQ ID NO: 232228 - protein, 15 aa, Artificial Sequence
  Description of Artificial Sequence: Synthetic peptide
  Seed: LRMKWMMAMKYPITA
LRMKLMMAMKYPNTA

SEQ ID NO: 232229 - protein, 15 aa, Artificial Sequence
  Description of Artificial Sequence: Synthetic peptide
  Seed: LRMKWMMAMKYPITA
LRMKLMMAMKYPPTA

SEQ ID NO: 232230 - protein, 15 aa, Artificial Sequence
  Description of Artificial Sequence: Synthetic peptide
  Seed: LRMKWMMAMKYPITA
LRMKLMMAMKYPQTA

SEQ ID NO: 232231 - protein, 15 aa, Artificial Sequence
  Description of Artificial Sequence: Synthetic peptide
  Seed: LRMKWMMAMKYPITA
LRMKLMMAMKYPRTA

SEQ ID NO: 232232 - protein, 15 aa, Artificial Sequence
  Description of Artificial Sequence: Synthetic peptide
  Seed: LRMKWMMAMKYPITA
LRMKLMMAMKYPSTA

SEQ ID NO: 232233 - protein, 15 aa, Artificial Sequence
  Description of Artificial Sequence: Synthetic peptide
  Seed: LRMKWMMAMKYPITA
LRMKLMMAMKYPTTA

SEQ ID NO: 232234 - protein, 15 aa, Artificial Sequence
  Description of Artificial Sequence: Synthetic peptide
  Seed: LRMKWMMAMKYPITA
LRMKLMMAMKYPVTA

SEQ ID NO: 232235 - protein, 15 aa, Artificial Sequence
  Description of Artificial Sequence: Synthetic peptide
  Seed: LRMKWMMAMKYPITA
LRMKLMMAMKYPWTA

SEQ ID NO: 232236 - protein, 15 aa, Artificial Sequence
  Description of Artificial Sequence: Synthetic peptide
  Seed: LRMKWMMAMKYPITA
LRMKLMMAMKYPYTA

SEQ ID NO: 232237 - protein, 15 aa, Artificial Sequence
  Description of Artificial Sequence: Synthetic peptide
  Seed: LRMKWMMAMKYPITA
LRMKLMMAMLYPCTA

SEQ ID NO: 232238 - protein, 15 aa, Artificial Sequence
  Description of Artificial Sequence: Synthetic peptide
  Seed: LRMKWMMAMKYPITA
LRMKLMMAMLYPGTA

SEQ ID NO: 232239 - protein, 15 aa, Artificial Sequence
  Description of Artificial Sequence: Synthetic peptide
  Seed: LRMKWMMAMKYPITA
LRMKLMMAMLYPRTA

SEQ ID NO: 232240 - protein, 15 aa, Artificial Sequence
  Description of Artificial Sequence: Synthetic peptide
  Seed: LRMKWMMAMKYPITA
LRMKLMMAMMYPCTA

SEQ ID NO: 232241 - protein, 15 aa, Artificial Sequence
  Description of Artificial Sequence: Synthetic peptide
  Seed: LRMKWMMAMKYPITA
LRMKLMMAMMYPGTA

SEQ ID NO: 232242 - protein, 15 aa, Artificial Sequence
  Description of Artificial Sequence: Synthetic peptide
  Seed: LRMKWMMAMKYPITA
LRMKLMMAMMYPMTA

SEQ ID NO: 232243 - protein, 15 aa, Artificial Sequence
  Description of Artificial Sequence: Synthetic peptide
  Seed: LRMKWMMAMKYPITA
LRMKLMMAMMYPRTA

SEQ ID NO: 232244 - protein, 15 aa, Artificial Sequence
  Description of Artificial Sequence: Synthetic peptide
  Seed: LRMKWMMAMKYPITA
LRMKLMMAMNYPATA

SEQ ID NO: 232245 - protein, 15 aa, Artificial Sequence
  Description of Artificial Sequence: Synthetic peptide
  Seed: LRMKWMMAMKYPITA
LRMKLMMAMNYPCTA

SEQ ID NO: 232246 - protein, 15 aa, Artificial Sequence
  Description of Artificial Sequence: Synthetic peptide
  Seed: LRMKWMMAMKYPITA
LRMKLMMAMNYPDTA

SEQ ID NO: 232247 - protein, 15 aa, Artificial Sequence
  Description of Artificial Sequence: Synthetic peptide
  Seed: LRMKWMMAMKYPITA
LRMKLMMAMNYPETA

SEQ ID NO: 232248 - protein, 15 aa, Artificial Sequence
  Description of Artificial Sequence: Synthetic peptide
  Seed: LRMKWMMAMKYPITA
LRMKLMMAMNYPFTA

SEQ ID NO: 232249 - protein, 15 aa, Artificial Sequence
  Description of Artificial Sequence: Synthetic peptide
  Seed: LRMKWMMAMKYPITA
LRMKLMMAMNYPGTA

SEQ ID NO: 232250 - protein, 15 aa, Artificial Sequence
  Description of Artificial Sequence: Synthetic peptide
  Seed: LRMKWMMAMKYPITA
LRMKLMMAMNYPHTA

SEQ ID NO: 232251 - protein, 15 aa, Artificial Sequence
  Description of Artificial Sequence: Synthetic peptide
  Seed: LRMKWMMAMKYPITA
LRMKLMMAMNYPITA

SEQ ID NO: 232252 - protein, 15 aa, Artificial Sequence
  Description of Artificial Sequence: Synthetic peptide
  Seed: LRMKWMMAMKYPITA
LRMKLMMAMNYPKTA

SEQ ID NO: 232253 - protein, 15 aa, Artificial Sequence
  Description of Artificial Sequence: Synthetic peptide
  Seed: LRMKWMMAMKYPITA
LRMKLMMAMNYPLTA

SEQ ID NO: 232254 - protein, 15 aa, Artificial Sequence
  Description of Artificial Sequence: Synthetic peptide
  Seed: LRMKWMMAMKYPITA
LRMKLMMAMNYPMTA

SEQ ID NO: 232255 - protein, 15 aa, Artificial Sequence
  Description of Artificial Sequence: Synthetic peptide
  Seed: LRMKWMMAMKYPITA
LRMKLMMAMNYPNTA

SEQ ID NO: 232256 - protein, 15 aa, Artificial Sequence
  Description of Artificial Sequence: Synthetic peptide
  Seed: LRMKWMMAMKYPITA
LRMKLMMAMNYPPTA

SEQ ID NO: 232257 - protein, 15 aa, Artificial Sequence
  Description of Artificial Sequence: Synthetic peptide
  Seed: LRMKWMMAMKYPITA
LRMKLMMAMNYPQTA

SEQ ID NO: 232258 - protein, 15 aa, Artificial Sequence
  Description of Artificial Sequence: Synthetic peptide
  Seed: LRMKWMMAMKYPITA
LRMKLMMAMNYPRTA

SEQ ID NO: 232259 - protein, 15 aa, Artificial Sequence
  Description of Artificial Sequence: Synthetic peptide
  Seed: LRMKWMMAMKYPITA
LRMKLMMAMNYPSTA

SEQ ID NO: 232260 - protein, 15 aa, Artificial Sequence
  Description of Artificial Sequence: Synthetic peptide
  Seed: LRMKWMMAMKYPITA
LRMKLMMAMNYPTTA

SEQ ID NO: 232261 - protein, 15 aa, Artificial Sequence
  Description of Artificial Sequence: Synthetic peptide
  Seed: LRMKWMMAMKYPITA
LRMKLMMAMNYPVTA

SEQ ID NO: 232262 - protein, 15 aa, Artificial Sequence
  Description of Artificial Sequence: Synthetic peptide
  Seed: LRMKWMMAMKYPITA
LRMKLMMAMNYPYTA

SEQ ID NO: 232263 - protein, 15 aa, Artificial Sequence
  Description of Artificial Sequence: Synthetic peptide
  Seed: LRMKWMMAMKYPITA
LRMKLMMAMPYPATA

SEQ ID NO: 232264 - protein, 15 aa, Artificial Sequence
  Description of Artificial Sequence: Synthetic peptide
  Seed: LRMKWMMAMKYPITA
LRMKLMMAMPYPCTA

SEQ ID NO: 232265 - protein, 15 aa, Artificial Sequence
  Description of Artificial Sequence: Synthetic peptide
  Seed: LRMKWMMAMKYPITA
LRMKLMMAMPYPDTA

SEQ ID NO: 232266 - protein, 15 aa, Artificial Sequence
  Description of Artificial Sequence: Synthetic peptide
  Seed: LRMKWMMAMKYPITA
LRMKLMMAMPYPETA

SEQ ID NO: 232267 - protein, 15 aa, Artificial Sequence
  Description of Artificial Sequence: Synthetic peptide
  Seed: LRMKWMMAMKYPITA
LRMKLMMAMPYPFTA

SEQ ID NO: 232268 - protein, 15 aa, Artificial Sequence
  Description of Artificial Sequence: Synthetic peptide
  Seed: LRMKWMMAMKYPITA
LRMKLMMAMPYPGTA

SEQ ID NO: 232269 - protein, 15 aa, Artificial Sequence
  Description of Artificial Sequence: Synthetic peptide
  Seed: LRMKWMMAMKYPITA
LRMKLMMAMPYPHTA

SEQ ID NO: 232270 - protein, 15 aa, Artificial Sequence
  Description of Artificial Sequence: Synthetic peptide
  Seed: LRMKWMMAMKYPITA
LRMKLMMAMPYPITA

SEQ ID NO: 232271 - protein, 15 aa, Artificial Sequence
  Description of Artificial Sequence: Synthetic peptide
  Seed: LRMKWMMAMKYPITA
LRMKLMMAMPYPKTA

SEQ ID NO: 232272 - protein, 15 aa, Artificial Sequence
  Description of Artificial Sequence: Synthetic peptide
  Seed: LRMKWMMAMKYPITA
LRMKLMMAMPYPLTA

SEQ ID NO: 232273 - protein, 15 aa, Artificial Sequence
  Description of Artificial Sequence: Synthetic peptide
  Seed: LRMKWMMAMKYPITA
LRMKLMMAMPYPMTA

SEQ ID NO: 232274 - protein, 15 aa, Artificial Sequence
  Description of Artificial Sequence: Synthetic peptide
  Seed: LRMKWMMAMKYPITA
LRMKLMMAMPYPNTA

SEQ ID NO: 232275 - protein, 15 aa, Artificial Sequence
  Description of Artificial Sequence: Synthetic peptide
  Seed: LRMKWMMAMKYPITA
LRMKLMMAMPYPPTA

SEQ ID NO: 232276 - protein, 15 aa, Artificial Sequence
  Description of Artificial Sequence: Synthetic peptide
  Seed: LRMKWMMAMKYPITA
LRMKLMMAMPYPQTA

SEQ ID NO: 232277 - protein, 15 aa, Artificial Sequence
  Description of Artificial Sequence: Synthetic peptide
  Seed: LRMKWMMAMKYPITA
LRMKLMMAMPYPRTA

SEQ ID NO: 232278 - protein, 15 aa, Artificial Sequence
  Description of Artificial Sequence: Synthetic peptide
  Seed: LRMKWMMAMKYPITA
LRMKLMMAMPYPSTA

SEQ ID NO: 232279 - protein, 15 aa, Artificial Sequence
  Description of Artificial Sequence: Synthetic peptide
  Seed: LRMKWMMAMKYPITA
LRMKLMMAMPYPTTA

SEQ ID NO: 232280 - protein, 15 aa, Artificial Sequence
  Description of Artificial Sequence: Synthetic peptide
  Seed: LRMKWMMAMKYPITA
LRMKLMMAMPYPVTA

SEQ ID NO: 232281 - protein, 15 aa, Artificial Sequence
  Description of Artificial Sequence: Synthetic peptide
  Seed: LRMKWMMAMKYPITA
LRMKLMMAMPYPWTA

SEQ ID NO: 232282 - protein, 15 aa, Artificial Sequence
  Description of Artificial Sequence: Synthetic peptide
  Seed: LRMKWMMAMKYPITA
LRMKLMMAMPYPYTA

SEQ ID NO: 232283 - protein, 15 aa, Artificial Sequence
  Description of Artificial Sequence: Synthetic peptide
  Seed: LRMKWMMAMKYPITA
LRMKLMMAMQYPATA

SEQ ID NO: 232284 - protein, 15 aa, Artificial Sequence
  Description of Artificial Sequence: Synthetic peptide
  Seed: LRMKWMMAMKYPITA
LRMKLMMAMQYPCTA

SEQ ID NO: 232285 - protein, 15 aa, Artificial Sequence
  Description of Artificial Sequence: Synthetic peptide
  Seed: LRMKWMMAMKYPITA
LRMKLMMAMQYPGTA

SEQ ID NO: 232286 - protein, 15 aa, Artificial Sequence
  Description of Artificial Sequence: Synthetic peptide
  Seed: LRMKWMMAMKYPITA
LRMKLMMAMQYPITA

SEQ ID NO: 232287 - protein, 15 aa, Artificial Sequence
  Description of Artificial Sequence: Synthetic peptide
  Seed: LRMKWMMAMKYPITA
LRMKLMMAMQYPKTA

SEQ ID NO: 232288 - protein, 15 aa, Artificial Sequence
  Description of Artificial Sequence: Synthetic peptide
  Seed: LRMKWMMAMKYPITA
LRMKLMMAMQYPLTA

SEQ ID NO: 232289 - protein, 15 aa, Artificial Sequence
  Description of Artificial Sequence: Synthetic peptide
  Seed: LRMKWMMAMKYPITA
LRMKLMMAMQYPMTA

SEQ ID NO: 232290 - protein, 15 aa, Artificial Sequence
  Description of Artificial Sequence: Synthetic peptide
  Seed: LRMKWMMAMKYPITA
LRMKLMMAMQYPRTA

SEQ ID NO: 232291 - protein, 15 aa, Artificial Sequence
  Description of Artificial Sequence: Synthetic peptide
  Seed: LRMKWMMAMKYPITA
LRMKLMMAMQYPSTA

SEQ ID NO: 232292 - protein, 15 aa, Artificial Sequence
  Description of Artificial Sequence: Synthetic peptide
  Seed: LRMKWMMAMKYPITA
LRMKLMMAMQYPVTA

SEQ ID NO: 232293 - protein, 15 aa, Artificial Sequence
  Description of Artificial Sequence: Synthetic peptide
  Seed: LRMKWMMAMKYPITA
LRMKLMMAMQYPYTA

SEQ ID NO: 232294 - protein, 15 aa, Artificial Sequence
  Description of Artificial Sequence: Synthetic peptide
  Seed: LRMKWMMAMKYPITA
LRMKLMMAMRYPATA

SEQ ID NO: 232295 - protein, 15 aa, Artificial Sequence
  Description of Artificial Sequence: Synthetic peptide
  Seed: LRMKWMMAMKYPITA
LRMKLMMAMRYPCTA

SEQ ID NO: 232296 - protein, 15 aa, Artificial Sequence
  Description of Artificial Sequence: Synthetic peptide
  Seed: LRMKWMMAMKYPITA
LRMKLMMAMRYPDTA

SEQ ID NO: 232297 - protein, 15 aa, Artificial Sequence
  Description of Artificial Sequence: Synthetic peptide
  Seed: LRMKWMMAMKYPITA
LRMKLMMAMRYPETA

SEQ ID NO: 232298 - protein, 15 aa, Artificial Sequence
  Description of Artificial Sequence: Synthetic peptide
  Seed: LRMKWMMAMKYPITA
LRMKLMMAMRYPFTA

SEQ ID NO: 232299 - protein, 15 aa, Artificial Sequence
  Description of Artificial Sequence: Synthetic peptide
  Seed: LRMKWMMAMKYPITA
LRMKLMMAMRYPGTA

SEQ ID NO: 232300 - protein, 15 aa, Artificial Sequence
  Description of Artificial Sequence: Synthetic peptide
  Seed: LRMKWMMAMKYPITA
LRMKLMMAMRYPHTA

SEQ ID NO: 232301 - protein, 15 aa, Artificial Sequence
  Description of Artificial Sequence: Synthetic peptide
  Seed: LRMKWMMAMKYPITA
LRMKLMMAMRYPITA

SEQ ID NO: 232302 - protein, 15 aa, Artificial Sequence
  Description of Artificial Sequence: Synthetic peptide
  Seed: LRMKWMMAMKYPITA
LRMKLMMAMRYPKTA

SEQ ID NO: 232303 - protein, 15 aa, Artificial Sequence
  Description of Artificial Sequence: Synthetic peptide
  Seed: LRMKWMMAMKYPITA
LRMKLMMAMRYPLTA

SEQ ID NO: 232304 - protein, 15 aa, Artificial Sequence
  Description of Artificial Sequence: Synthetic peptide
  Seed: LRMKWMMAMKYPITA
LRMKLMMAMRYPMTA

SEQ ID NO: 232305 - protein, 15 aa, Artificial Sequence
  Description of Artificial Sequence: Synthetic peptide
  Seed: LRMKWMMAMKYPITA
LRMKLMMAMRYPNTA

SEQ ID NO: 232306 - protein, 15 aa, Artificial Sequence
  Description of Artificial Sequence: Synthetic peptide
  Seed: LRMKWMMAMKYPITA
LRMKLMMAMRYPPTA

SEQ ID NO: 232307 - protein, 15 aa, Artificial Sequence
  Description of Artificial Sequence: Synthetic peptide
  Seed: LRMKWMMAMKYPITA
LRMKLMMAMRYPQTA

SEQ ID NO: 232308 - protein, 15 aa, Artificial Sequence
  Description of Artificial Sequence: Synthetic peptide
  Seed: LRMKWMMAMKYPITA
LRMKLMMAMRYPRTA

SEQ ID NO: 232309 - protein, 15 aa, Artificial Sequence
  Description of Artificial Sequence: Synthetic peptide
  Seed: LRMKWMMAMKYPITA
LRMKLMMAMRYPSTA

SEQ ID NO: 232310 - protein, 15 aa, Artificial Sequence
  Description of Artificial Sequence: Synthetic peptide
  Seed: LRMKWMMAMKYPITA
LRMKLMMAMRYPTTA

SEQ ID NO: 232311 - protein, 15 aa, Artificial Sequence
  Description of Artificial Sequence: Synthetic peptide
  Seed: LRMKWMMAMKYPITA
LRMKLMMAMRYPVTA

SEQ ID NO: 232312 - protein, 15 aa, Artificial Sequence
  Description of Artificial Sequence: Synthetic peptide
  Seed: LRMKWMMAMKYPITA
LRMKLMMAMRYPWTA

SEQ ID NO: 232313 - protein, 15 aa, Artificial Sequence
  Description of Artificial Sequence: Synthetic peptide
  Seed: LRMKWMMAMKYPITA
LRMKLMMAMRYPYTA

SEQ ID NO: 232314 - protein, 15 aa, Artificial Sequence
  Description of Artificial Sequence: Synthetic peptide
  Seed: LRMKWMMAMKYPITA
LRMKLMMAMSYPATA

SEQ ID NO: 232315 - protein, 15 aa, Artificial Sequence
  Description of Artificial Sequence: Synthetic peptide
  Seed: LRMKWMMAMKYPITA
LRMKLMMAMSYPCTA

SEQ ID NO: 232316 - protein, 15 aa, Artificial Sequence
  Description of Artificial Sequence: Synthetic peptide
  Seed: LRMKWMMAMKYPITA
LRMKLMMAMSYPDTA

SEQ ID NO: 232317 - protein, 15 aa, Artificial Sequence
  Description of Artificial Sequence: Synthetic peptide
  Seed: LRMKWMMAMKYPITA
LRMKLMMAMSYPETA

SEQ ID NO: 232318 - protein, 15 aa, Artificial Sequence
  Description of Artificial Sequence: Synthetic peptide
  Seed: LRMKWMMAMKYPITA
LRMKLMMAMSYPFTA

SEQ ID NO: 232319 - protein, 15 aa, Artificial Sequence
  Description of Artificial Sequence: Synthetic peptide
  Seed: LRMKWMMAMKYPITA
LRMKLMMAMSYPGTA

SEQ ID NO: 232320 - protein, 15 aa, Artificial Sequence
  Description of Artificial Sequence: Synthetic peptide
  Seed: LRMKWMMAMKYPITA
LRMKLMMAMSYPHTA

SEQ ID NO: 232321 - protein, 15 aa, Artificial Sequence
  Description of Artificial Sequence: Synthetic peptide
  Seed: LRMKWMMAMKYPITA
LRMKLMMAMSYPITA

SEQ ID NO: 232322 - protein, 15 aa, Artificial Sequence
  Description of Artificial Sequence: Synthetic peptide
  Seed: LRMKWMMAMKYPITA
LRMKLMMAMSYPKTA

SEQ ID NO: 232323 - protein, 15 aa, Artificial Sequence
  Description of Artificial Sequence: Synthetic peptide
  Seed: LRMKWMMAMKYPITA
LRMKLMMAMSYPLTA

SEQ ID NO: 232324 - protein, 15 aa, Artificial Sequence
  Description of Artificial Sequence: Synthetic peptide
  Seed: LRMKWMMAMKYPITA
LRMKLMMAMSYPMTA

SEQ ID NO: 232325 - protein, 15 aa, Artificial Sequence
  Description of Artificial Sequence: Synthetic peptide
  Seed: LRMKWMMAMKYPITA
LRMKLMMAMSYPNTA

SEQ ID NO: 232326 - protein, 15 aa, Artificial Sequence
  Description of Artificial Sequence: Synthetic peptide
  Seed: LRMKWMMAMKYPITA
LRMKLMMAMSYPPTA

SEQ ID NO: 232327 - protein, 15 aa, Artificial Sequence
  Description of Artificial Sequence: Synthetic peptide
  Seed: LRMKWMMAMKYPITA
LRMKLMMAMSYPQTA

SEQ ID NO: 232328 - protein, 15 aa, Artificial Sequence
  Description of Artificial Sequence: Synthetic peptide
  Seed: LRMKWMMAMKYPITA
LRMKLMMAMSYPRTA

SEQ ID NO: 232329 - protein, 15 aa, Artificial Sequence
  Description of Artificial Sequence: Synthetic peptide
  Seed: LRMKWMMAMKYPITA
LRMKLMMAMSYPSTA

SEQ ID NO: 232330 - protein, 15 aa, Artificial Sequence
  Description of Artificial Sequence: Synthetic peptide
  Seed: LRMKWMMAMKYPITA
LRMKLMMAMSYPTTA

SEQ ID NO: 232331 - protein, 15 aa, Artificial Sequence
  Description of Artificial Sequence: Synthetic peptide
  Seed: LRMKWMMAMKYPITA
LRMKLMMAMSYPVTA

SEQ ID NO: 232332 - protein, 15 aa, Artificial Sequence
  Description of Artificial Sequence: Synthetic peptide
  Seed: LRMKWMMAMKYPITA
LRMKLMMAMSYPWTA

SEQ ID NO: 232333 - protein, 15 aa, Artificial Sequence
  Description of Artificial Sequence: Synthetic peptide
  Seed: LRMKWMMAMKYPITA
LRMKLMMAMSYPYTA

SEQ ID NO: 232334 - protein, 15 aa, Artificial Sequence
  Description of Artificial Sequence: Synthetic peptide
  Seed: LRMKWMMAMKYPITA
LRMKLMMAMTYPATA

SEQ ID NO: 232335 - protein, 15 aa, Artificial Sequence
  Description of Artificial Sequence: Synthetic peptide
  Seed: LRMKWMMAMKYPITA
LRMKLMMAMTYPCTA

SEQ ID NO: 232336 - protein, 15 aa, Artificial Sequence
  Description of Artificial Sequence: Synthetic peptide
  Seed: LRMKWMMAMKYPITA
LRMKLMMAMTYPDTA

SEQ ID NO: 232337 - protein, 15 aa, Artificial Sequence
  Description of Artificial Sequence: Synthetic peptide
  Seed: LRMKWMMAMKYPITA
LRMKLMMAMTYPETA

SEQ ID NO: 232338 - protein, 15 aa, Artificial Sequence
  Description of Artificial Sequence: Synthetic peptide
  Seed: LRMKWMMAMKYPITA
LRMKLMMAMTYPFTA

SEQ ID NO: 232339 - protein, 15 aa, Artificial Sequence
  Description of Artificial Sequence: Synthetic peptide
  Seed: LRMKWMMAMKYPITA
LRMKLMMAMTYPGTA

SEQ ID NO: 232340 - protein, 15 aa, Artificial Sequence
  Description of Artificial Sequence: Synthetic peptide
  Seed: LRMKWMMAMKYPITA
LRMKLMMAMTYPHTA

SEQ ID NO: 232341 - protein, 15 aa, Artificial Sequence
  Description of Artificial Sequence: Synthetic peptide
  Seed: LRMKWMMAMKYPITA
LRMKLMMAMTYPITA

SEQ ID NO: 232342 - protein, 15 aa, Artificial Sequence
  Description of Artificial Sequence: Synthetic peptide
  Seed: LRMKWMMAMKYPITA
LRMKLMMAMTYPKTA

SEQ ID NO: 232343 - protein, 15 aa, Artificial Sequence
  Description of Artificial Sequence: Synthetic peptide
  Seed: LRMKWMMAMKYPITA
LRMKLMMAMTYPLTA

SEQ ID NO: 232344 - protein, 15 aa, Artificial Sequence
  Description of Artificial Sequence: Synthetic peptide
  Seed: LRMKWMMAMKYPITA
LRMKLMMAMTYPMTA

SEQ ID NO: 232345 - protein, 15 aa, Artificial Sequence
  Description of Artificial Sequence: Synthetic peptide
  Seed: LRMKWMMAMKYPITA
LRMKLMMAMTYPNTA

SEQ ID NO: 232346 - protein, 15 aa, Artificial Sequence
  Description of Artificial Sequence: Synthetic peptide
  Seed: LRMKWMMAMKYPITA
LRMKLMMAMTYPPTA

SEQ ID NO: 232347 - protein, 15 aa, Artificial Sequence
  Description of Artificial Sequence: Synthetic peptide
  Seed: LRMKWMMAMKYPITA
LRMKLMMAMTYPQTA

SEQ ID NO: 232348 - protein, 15 aa, Artificial Sequence
  Description of Artificial Sequence: Synthetic peptide
  Seed: LRMKWMMAMKYPITA
LRMKLMMAMTYPRTA

SEQ ID NO: 232349 - protein, 15 aa, Artificial Sequence
  Description of Artificial Sequence: Synthetic peptide
  Seed: LRMKWMMAMKYPITA
LRMKLMMAMTYPSTA

SEQ ID NO: 232350 - protein, 15 aa, Artificial Sequence
  Description of Artificial Sequence: Synthetic peptide
  Seed: LRMKWMMAMKYPITA
LRMKLMMAMTYPTTA

SEQ ID NO: 232351 - protein, 15 aa, Artificial Sequence
  Description of Artificial Sequence: Synthetic peptide
  Seed: LRMKWMMAMKYPITA
LRMKLMMAMTYPVTA

SEQ ID NO: 232352 - protein, 15 aa, Artificial Sequence
  Description of Artificial Sequence: Synthetic peptide
  Seed: LRMKWMMAMKYPITA
LRMKLMMAMTYPWTA

SEQ ID NO: 232353 - protein, 15 aa, Artificial Sequence
  Description of Artificial Sequence: Synthetic peptide
  Seed: LRMKWMMAMKYPITA
LRMKLMMAMTYPYTA

SEQ ID NO: 232354 - protein, 15 aa, Artificial Sequence
  Description of Artificial Sequence: Synthetic peptide
  Seed: LRMKWMMAMKYPITA
LRMKLMMAMVYPATA

SEQ ID NO: 232355 - protein, 15 aa, Artificial Sequence
  Description of Artificial Sequence: Synthetic peptide
  Seed: LRMKWMMAMKYPITA
LRMKLMMAMVYPCTA

SEQ ID NO: 232356 - protein, 15 aa, Artificial Sequence
  Description of Artificial Sequence: Synthetic peptide
  Seed: LRMKWMMAMKYPITA
LRMKLMMAMVYPDTA

SEQ ID NO: 232357 - protein, 15 aa, Artificial Sequence
  Description of Artificial Sequence: Synthetic peptide
  Seed: LRMKWMMAMKYPITA
LRMKLMMAMVYPETA

SEQ ID NO: 232358 - protein, 15 aa, Artificial Sequence
  Description of Artificial Sequence: Synthetic peptide
  Seed: LRMKWMMAMKYPITA
LRMKLMMAMVYPFTA

SEQ ID NO: 232359 - protein, 15 aa, Artificial Sequence
  Description of Artificial Sequence: Synthetic peptide
  Seed: LRMKWMMAMKYPITA
LRMKLMMAMVYPGTA

SEQ ID NO: 232360 - protein, 15 aa, Artificial Sequence
  Description of Artificial Sequence: Synthetic peptide
  Seed: LRMKWMMAMKYPITA
LRMKLMMAMVYPHTA

SEQ ID NO: 232361 - protein, 15 aa, Artificial Sequence
  Description of Artificial Sequence: Synthetic peptide
  Seed: LRMKWMMAMKYPITA
LRMKLMMAMVYPITA

SEQ ID NO: 232362 - protein, 15 aa, Artificial Sequence
  Description of Artificial Sequence: Synthetic peptide
  Seed: LRMKWMMAMKYPITA
LRMKLMMAMVYPKTA

SEQ ID NO: 232363 - protein, 15 aa, Artificial Sequence
  Description of Artificial Sequence: Synthetic peptide
  Seed: LRMKWMMAMKYPITA
LRMKLMMAMVYPLTA

SEQ ID NO: 232364 - protein, 15 aa, Artificial Sequence
  Description of Artificial Sequence: Synthetic peptide
  Seed: LRMKWMMAMKYPITA
LRMKLMMAMVYPMTA

SEQ ID NO: 232365 - protein, 15 aa, Artificial Sequence
  Description of Artificial Sequence: Synthetic peptide
  Seed: LRMKWMMAMKYPITA
LRMKLMMAMVYPNTA

SEQ ID NO: 232366 - protein, 15 aa, Artificial Sequence
  Description of Artificial Sequence: Synthetic peptide
  Seed: LRMKWMMAMKYPITA
LRMKLMMAMVYPPTA

SEQ ID NO: 232367 - protein, 15 aa, Artificial Sequence
  Description of Artificial Sequence: Synthetic peptide
  Seed: LRMKWMMAMKYPITA
LRMKLMMAMVYPQTA

SEQ ID NO: 232368 - protein, 15 aa, Artificial Sequence
  Description of Artificial Sequence: Synthetic peptide
  Seed: LRMKWMMAMKYPITA
LRMKLMMAMVYPRTA

SEQ ID NO: 232369 - protein, 15 aa, Artificial Sequence
  Description of Artificial Sequence: Synthetic peptide
  Seed: LRMKWMMAMKYPITA
LRMKLMMAMVYPSTA

SEQ ID NO: 232370 - protein, 15 aa, Artificial Sequence
  Description of Artificial Sequence: Synthetic peptide
  Seed: LRMKWMMAMKYPITA
LRMKLMMAMVYPTTA

SEQ ID NO: 232371 - protein, 15 aa, Artificial Sequence
  Description of Artificial Sequence: Synthetic peptide
  Seed: LRMKWMMAMKYPITA
LRMKLMMAMVYPVTA

SEQ ID NO: 232372 - protein, 15 aa, Artificial Sequence
  Description of Artificial Sequence: Synthetic peptide
  Seed: LRMKWMMAMKYPITA
LRMKLMMAMVYPYTA

SEQ ID NO: 232373 - protein, 15 aa, Artificial Sequence
  Description of Artificial Sequence: Synthetic peptide
  Seed: LRMKWMMAMKYPITA
LRMKLMMAMWYPATA

SEQ ID NO: 232374 - protein, 15 aa, Artificial Sequence
  Description of Artificial Sequence: Synthetic peptide
  Seed: LRMKWMMAMKYPITA
LRMKLMMAMWYPITA

SEQ ID NO: 232375 - protein, 15 aa, Artificial Sequence
  Description of Artificial Sequence: Synthetic peptide
  Seed: LRMKWMMAMKYPITA
LRMKLMMAMWYPLTA

SEQ ID NO: 232376 - protein, 15 aa, Artificial Sequence
  Description of Artificial Sequence: Synthetic peptide
  Seed: LRMKWMMAMKYPITA
LRMKLMMAMWYPVTA

SEQ ID NO: 232377 - protein, 15 aa, Artificial Sequence
  Description of Artificial Sequence: Synthetic peptide
  Seed: LRMKWMMAMKYPITA
LRMKLMMAMYYPATA

SEQ ID NO: 232378 - protein, 15 aa, Artificial Sequence
  Description of Artificial Sequence: Synthetic peptide
  Seed: LRMKWMMAMKYPITA
LRMKLMMAMYYPITA

SEQ ID NO: 232379 - protein, 15 aa, Artificial Sequence
  Description of Artificial Sequence: Synthetic peptide
  Seed: LRMKWMMAMKYPITA
LRMKLMMAMYYPLTA

SEQ ID NO: 232380 - protein, 15 aa, Artificial Sequence
  Description of Artificial Sequence: Synthetic peptide
  Seed: LRMKWMMAMKYPITA
LRMKLMMAMYYPVTA

SEQ ID NO: 232381 - protein, 15 aa, Artificial Sequence
  Description of Artificial Sequence: Synthetic peptide
  Seed: LRMKWMMAMKYPITA
LRMKLMMCMAYPATA

SEQ ID NO: 232382 - protein, 15 aa, Artificial Sequence
  Description of Artificial Sequence: Synthetic peptide
  Seed: LRMKWMMAMKYPITA
LRMKLMMCMAYPCTA

SEQ ID NO: 232383 - protein, 15 aa, Artificial Sequence
  Description of Artificial Sequence: Synthetic peptide
  Seed: LRMKWMMAMKYPITA
LRMKLMMCMAYPFTA

SEQ ID NO: 232384 - protein, 15 aa, Artificial Sequence
  Description of Artificial Sequence: Synthetic peptide
  Seed: LRMKWMMAMKYPITA
LRMKLMMCMAYPGTA

SEQ ID NO: 232385 - protein, 15 aa, Artificial Sequence
  Description of Artificial Sequence: Synthetic peptide
  Seed: LRMKWMMAMKYPITA
LRMKLMMCMAYPITA

SEQ ID NO: 232386 - protein, 15 aa, Artificial Sequence
  Description of Artificial Sequence: Synthetic peptide
  Seed: LRMKWMMAMKYPITA
LRMKLMMCMAYPLTA

SEQ ID NO: 232387 - protein, 15 aa, Artificial Sequence
  Description of Artificial Sequence: Synthetic peptide
  Seed: LRMKWMMAMKYPITA
LRMKLMMCMAYPMTA

SEQ ID NO: 232388 - protein, 15 aa, Artificial Sequence
  Description of Artificial Sequence: Synthetic peptide
  Seed: LRMKWMMAMKYPITA
LRMKLMMCMAYPNTA

SEQ ID NO: 232389 - protein, 15 aa, Artificial Sequence
  Description of Artificial Sequence: Synthetic peptide
  Seed: LRMKWMMAMKYPITA
LRMKLMMCMAYPQTA

SEQ ID NO: 232390 - protein, 15 aa, Artificial Sequence
  Description of Artificial Sequence: Synthetic peptide
  Seed: LRMKWMMAMKYPITA
LRMKLMMCMAYPSTA

SEQ ID NO: 232391 - protein, 15 aa, Artificial Sequence
  Description of Artificial Sequence: Synthetic peptide
  Seed: LRMKWMMAMKYPITA
LRMKLMMCMAYPTTA

SEQ ID NO: 232392 - protein, 15 aa, Artificial Sequence
  Description of Artificial Sequence: Synthetic peptide
  Seed: LRMKWMMAMKYPITA
LRMKLMMCMAYPVTA

SEQ ID NO: 232393 - protein, 15 aa, Artificial Sequence
  Description of Artificial Sequence: Synthetic peptide
  Seed: LRMKWMMAMKYPITA
LRMKLMMCMGYPATA

SEQ ID NO: 232394 - protein, 15 aa, Artificial Sequence
  Description of Artificial Sequence: Synthetic peptide
  Seed: LRMKWMMAMKYPITA
LRMKLMMCMGYPGTA

SEQ ID NO: 232395 - protein, 15 aa, Artificial Sequence
  Description of Artificial Sequence: Synthetic peptide
  Seed: LRMKWMMAMKYPITA
LRMKLMMCMGYPITA

SEQ ID NO: 232396 - protein, 15 aa, Artificial Sequence
  Description of Artificial Sequence: Synthetic peptide
  Seed: LRMKWMMAMKYPITA
LRMKLMMCMGYPLTA

SEQ ID NO: 232397 - protein, 15 aa, Artificial Sequence
  Description of Artificial Sequence: Synthetic peptide
  Seed: LRMKWMMAMKYPITA
LRMKLMMCMGYPMTA

SEQ ID NO: 232398 - protein, 15 aa, Artificial Sequence
  Description of Artificial Sequence: Synthetic peptide
  Seed: LRMKWMMAMKYPITA
LRMKLMMCMGYPSTA

SEQ ID NO: 232399 - protein, 15 aa, Artificial Sequence
  Description of Artificial Sequence: Synthetic peptide
  Seed: LRMKWMMAMKYPITA
LRMKLMMCMGYPTTA

SEQ ID NO: 232400 - protein, 15 aa, Artificial Sequence
  Description of Artificial Sequence: Synthetic peptide
  Seed: LRMKWMMAMKYPITA
LRMKLMMCMGYPVTA

SEQ ID NO: 232401 - protein, 15 aa, Artificial Sequence
  Description of Artificial Sequence: Synthetic peptide
  Seed: LRMKWMMAMKYPITA
LRMKLMMCMIYPATA

SEQ ID NO: 232402 - protein, 15 aa, Artificial Sequence
  Description of Artificial Sequence: Synthetic peptide
  Seed: LRMKWMMAMKYPITA
LRMKLMMCMKYPATA

SEQ ID NO: 232403 - protein, 15 aa, Artificial Sequence
  Description of Artificial Sequence: Synthetic peptide
  Seed: LRMKWMMAMKYPITA
LRMKLMMCMKYPFTA

SEQ ID NO: 232404 - protein, 15 aa, Artificial Sequence
  Description of Artificial Sequence: Synthetic peptide
  Seed: LRMKWMMAMKYPITA
LRMKLMMCMKYPGTA

SEQ ID NO: 232405 - protein, 15 aa, Artificial Sequence
  Description of Artificial Sequence: Synthetic peptide
  Seed: LRMKWMMAMKYPITA
LRMKLMMCMKYPHTA

SEQ ID NO: 232406 - protein, 15 aa, Artificial Sequence
  Description of Artificial Sequence: Synthetic peptide
  Seed: LRMKWMMAMKYPITA
LRMKLMMCMKYPITA

SEQ ID NO: 232407 - protein, 15 aa, Artificial Sequence
  Description of Artificial Sequence: Synthetic peptide
  Seed: LRMKWMMAMKYPITA
LRMKLMMCMKYPKTA

SEQ ID NO: 232408 - protein, 15 aa, Artificial Sequence
  Description of Artificial Sequence: Synthetic peptide
  Seed: LRMKWMMAMKYPITA
LRMKLMMCMKYPLTA

SEQ ID NO: 232409 - protein, 15 aa, Artificial Sequence
  Description of Artificial Sequence: Synthetic peptide
  Seed: LRMKWMMAMKYPITA
LRMKLMMCMKYPMTA

SEQ ID NO: 232410 - protein, 15 aa, Artificial Sequence
  Description of Artificial Sequence: Synthetic peptide
  Seed: LRMKWMMAMKYPITA
LRMKLMMCMKYPQTA

SEQ ID NO: 232411 - protein, 15 aa, Artificial Sequence
  Description of Artificial Sequence: Synthetic peptide
  Seed: LRMKWMMAMKYPITA
LRMKLMMCMKYPRTA

SEQ ID NO: 232412 - protein, 15 aa, Artificial Sequence
  Description of Artificial Sequence: Synthetic peptide
  Seed: LRMKWMMAMKYPITA
LRMKLMMCMKYPSTA

SEQ ID NO: 232413 - protein, 15 aa, Artificial Sequence
  Description of Artificial Sequence: Synthetic peptide
  Seed: LRMKWMMAMKYPITA
LRMKLMMCMKYPTTA

SEQ ID NO: 232414 - protein, 15 aa, Artificial Sequence
  Description of Artificial Sequence: Synthetic peptide
  Seed: LRMKWMMAMKYPITA
LRMKLMMCMKYPVTA

SEQ ID NO: 232415 - protein, 15 aa, Artificial Sequence
  Description of Artificial Sequence: Synthetic peptide
  Seed: LRMKWMMAMKYPITA
LRMKLMMCMKYPYTA

SEQ ID NO: 232416 - protein, 15 aa, Artificial Sequence
  Description of Artificial Sequence: Synthetic peptide
  Seed: LRMKWMMAMKYPITA
LRMKLMMCMMYPATA

SEQ ID NO: 232417 - protein, 15 aa, Artificial Sequence
  Description of Artificial Sequence: Synthetic peptide
  Seed: LRMKWMMAMKYPITA
LRMKLMMCMNYPATA

SEQ ID NO: 232418 - protein, 15 aa, Artificial Sequence
  Description of Artificial Sequence: Synthetic peptide
  Seed: LRMKWMMAMKYPITA
LRMKLMMCMNYPITA

SEQ ID NO: 232419 - protein, 15 aa, Artificial Sequence
  Description of Artificial Sequence: Synthetic peptide
  Seed: LRMKWMMAMKYPITA
LRMKLMMCMNYPLTA

SEQ ID NO: 232420 - protein, 15 aa, Artificial Sequence
  Description of Artificial Sequence: Synthetic peptide
  Seed: LRMKWMMAMKYPITA
LRMKLMMCMNYPVTA

SEQ ID NO: 232421 - protein, 15 aa, Artificial Sequence
  Description of Artificial Sequence: Synthetic peptide
  Seed: LRMKWMMAMKYPITA
LRMKLMMCMPYPATA

SEQ ID NO: 232422 - protein, 15 aa, Artificial Sequence
  Description of Artificial Sequence: Synthetic peptide
  Seed: LRMKWMMAMKYPITA
LRMKLMMCMPYPITA

SEQ ID NO: 232423 - protein, 15 aa, Artificial Sequence
  Description of Artificial Sequence: Synthetic peptide
  Seed: LRMKWMMAMKYPITA
LRMKLMMCMPYPLTA

SEQ ID NO: 232424 - protein, 15 aa, Artificial Sequence
  Description of Artificial Sequence: Synthetic peptide
  Seed: LRMKWMMAMKYPITA
LRMKLMMCMPYPMTA

SEQ ID NO: 232425 - protein, 15 aa, Artificial Sequence
  Description of Artificial Sequence: Synthetic peptide
  Seed: LRMKWMMAMKYPITA
LRMKLMMCMPYPSTA

SEQ ID NO: 232426 - protein, 15 aa, Artificial Sequence
  Description of Artificial Sequence: Synthetic peptide
  Seed: LRMKWMMAMKYPITA
LRMKLMMCMPYPTTA

SEQ ID NO: 232427 - protein, 15 aa, Artificial Sequence
  Description of Artificial Sequence: Synthetic peptide
  Seed: LRMKWMMAMKYPITA
LRMKLMMCMPYPVTA

SEQ ID NO: 232428 - protein, 15 aa, Artificial Sequence
  Description of Artificial Sequence: Synthetic peptide
  Seed: LRMKWMMAMKYPITA
LRMKLMMCMRYPATA

SEQ ID NO: 232429 - protein, 15 aa, Artificial Sequence
  Description of Artificial Sequence: Synthetic peptide
  Seed: LRMKWMMAMKYPITA
LRMKLMMCMRYPFTA

SEQ ID NO: 232430 - protein, 15 aa, Artificial Sequence
  Description of Artificial Sequence: Synthetic peptide
  Seed: LRMKWMMAMKYPITA
LRMKLMMCMRYPGTA

SEQ ID NO: 232431 - protein, 15 aa, Artificial Sequence
  Description of Artificial Sequence: Synthetic peptide
  Seed: LRMKWMMAMKYPITA
LRMKLMMCMRYPHTA

SEQ ID NO: 232432 - protein, 15 aa, Artificial Sequence
  Description of Artificial Sequence: Synthetic peptide
  Seed: LRMKWMMAMKYPITA
LRMKLMMCMRYPITA

SEQ ID NO: 232433 - protein, 15 aa, Artificial Sequence
  Description of Artificial Sequence: Synthetic peptide
  Seed: LRMKWMMAMKYPITA
LRMKLMMCMRYPKTA

SEQ ID NO: 232434 - protein, 15 aa, Artificial Sequence
  Description of Artificial Sequence: Synthetic peptide
  Seed: LRMKWMMAMKYPITA
LRMKLMMCMRYPLTA

SEQ ID NO: 232435 - protein, 15 aa, Artificial Sequence
  Description of Artificial Sequence: Synthetic peptide
  Seed: LRMKWMMAMKYPITA
LRMKLMMCMRYPMTA

SEQ ID NO: 232436 - protein, 15 aa, Artificial Sequence
  Description of Artificial Sequence: Synthetic peptide
  Seed: LRMKWMMAMKYPITA
LRMKLMMCMRYPNTA

SEQ ID NO: 232437 - protein, 15 aa, Artificial Sequence
  Description of Artificial Sequence: Synthetic peptide
  Seed: LRMKWMMAMKYPITA
LRMKLMMCMRYPPTA

SEQ ID NO: 232438 - protein, 15 aa, Artificial Sequence
  Description of Artificial Sequence: Synthetic peptide
  Seed: LRMKWMMAMKYPITA
LRMKLMMCMRYPQTA

SEQ ID NO: 232439 - protein, 15 aa, Artificial Sequence
  Description of Artificial Sequence: Synthetic peptide
  Seed: LRMKWMMAMKYPITA
LRMKLMMCMRYPRTA

SEQ ID NO: 232440 - protein, 15 aa, Artificial Sequence
  Description of Artificial Sequence: Synthetic peptide
  Seed: LRMKWMMAMKYPITA
LRMKLMMCMRYPSTA

SEQ ID NO: 232441 - protein, 15 aa, Artificial Sequence
  Description of Artificial Sequence: Synthetic peptide
  Seed: LRMKWMMAMKYPITA
LRMKLMMCMRYPTTA

SEQ ID NO: 232442 - protein, 15 aa, Artificial Sequence
  Description of Artificial Sequence: Synthetic peptide
  Seed: LRMKWMMAMKYPITA
LRMKLMMCMRYPVTA

SEQ ID NO: 232443 - protein, 15 aa, Artificial Sequence
  Description of Artificial Sequence: Synthetic peptide
  Seed: LRMKWMMAMKYPITA
LRMKLMMCMRYPYTA

SEQ ID NO: 232444 - protein, 15 aa, Artificial Sequence
  Description of Artificial Sequence: Synthetic peptide
  Seed: LRMKWMMAMKYPITA
LRMKLMMCMSYPATA

SEQ ID NO: 232445 - protein, 15 aa, Artificial Sequence
  Description of Artificial Sequence: Synthetic peptide
  Seed: LRMKWMMAMKYPITA
LRMKLMMCMSYPITA

SEQ ID NO: 232446 - protein, 15 aa, Artificial Sequence
  Description of Artificial Sequence: Synthetic peptide
  Seed: LRMKWMMAMKYPITA
LRMKLMMCMSYPLTA

SEQ ID NO: 232447 - protein, 15 aa, Artificial Sequence
  Description of Artificial Sequence: Synthetic peptide
  Seed: LRMKWMMAMKYPITA
LRMKLMMCMSYPMTA

SEQ ID NO: 232448 - protein, 15 aa, Artificial Sequence
  Description of Artificial Sequence: Synthetic peptide
  Seed: LRMKWMMAMKYPITA
LRMKLMMCMSYPSTA

SEQ ID NO: 232449 - protein, 15 aa, Artificial Sequence
  Description of Artificial Sequence: Synthetic peptide
  Seed: LRMKWMMAMKYPITA
LRMKLMMCMSYPTTA

SEQ ID NO: 232450 - protein, 15 aa, Artificial Sequence
  Description of Artificial Sequence: Synthetic peptide
  Seed: LRMKWMMAMKYPITA
LRMKLMMCMSYPVTA

SEQ ID NO: 232451 - protein, 15 aa, Artificial Sequence
  Description of Artificial Sequence: Synthetic peptide
  Seed: LRMKWMMAMKYPITA
LRMKLMMCMTYPATA

SEQ ID NO: 232452 - protein, 15 aa, Artificial Sequence
  Description of Artificial Sequence: Synthetic peptide
  Seed: LRMKWMMAMKYPITA
LRMKLMMCMTYPITA

SEQ ID NO: 232453 - protein, 15 aa, Artificial Sequence
  Description of Artificial Sequence: Synthetic peptide
  Seed: LRMKWMMAMKYPITA
LRMKLMMCMTYPLTA

SEQ ID NO: 232454 - protein, 15 aa, Artificial Sequence
  Description of Artificial Sequence: Synthetic peptide
  Seed: LRMKWMMAMKYPITA
LRMKLMMCMTYPMTA

SEQ ID NO: 232455 - protein, 15 aa, Artificial Sequence
  Description of Artificial Sequence: Synthetic peptide
  Seed: LRMKWMMAMKYPITA
LRMKLMMCMTYPVTA

SEQ ID NO: 232456 - protein, 15 aa, Artificial Sequence
  Description of Artificial Sequence: Synthetic peptide
  Seed: LRMKWMMAMKYPITA
LRMKLMMCMVYPATA

SEQ ID NO: 232457 - protein, 15 aa, Artificial Sequence
  Description of Artificial Sequence: Synthetic peptide
  Seed: LRMKWMMAMKYPITA
LRMKLMMCMVYPLTA

SEQ ID NO: 232458 - protein, 15 aa, Artificial Sequence
  Description of Artificial Sequence: Synthetic peptide
  Seed: LRMKWMMAMKYPITA
LRMKLMMCMVYPSTA

SEQ ID NO: 232459 - protein, 15 aa, Artificial Sequence
  Description of Artificial Sequence: Synthetic peptide
  Seed: LRMKWMMAMKYPITA
LRMKLMMCMVYPVTA

SEQ ID NO: 232460 - protein, 15 aa, Artificial Sequence
  Description of Artificial Sequence: Synthetic peptide
  Seed: LRMKWMMAMKYPITA
LRMKLMMDMAYPATA

SEQ ID NO: 232461 - protein, 15 aa, Artificial Sequence
  Description of Artificial Sequence: Synthetic peptide
  Seed: LRMKWMMAMKYPITA
LRMKLMMDMAYPFTA

SEQ ID NO: 232462 - protein, 15 aa, Artificial Sequence
  Description of Artificial Sequence: Synthetic peptide
  Seed: LRMKWMMAMKYPITA
LRMKLMMDMAYPHTA

SEQ ID NO: 232463 - protein, 15 aa, Artificial Sequence
  Description of Artificial Sequence: Synthetic peptide
  Seed: LRMKWMMAMKYPITA
LRMKLMMDMAYPITA

SEQ ID NO: 232464 - protein, 15 aa, Artificial Sequence
  Description of Artificial Sequence: Synthetic peptide
  Seed: LRMKWMMAMKYPITA
LRMKLMMDMAYPKTA

SEQ ID NO: 232465 - protein, 15 aa, Artificial Sequence
  Description of Artificial Sequence: Synthetic peptide
  Seed: LRMKWMMAMKYPITA
LRMKLMMDMAYPLTA

SEQ ID NO: 232466 - protein, 15 aa, Artificial Sequence
  Description of Artificial Sequence: Synthetic peptide
  Seed: LRMKWMMAMKYPITA
LRMKLMMDMAYPMTA

SEQ ID NO: 232467 - protein, 15 aa, Artificial Sequence
  Description of Artificial Sequence: Synthetic peptide
  Seed: LRMKWMMAMKYPITA
LRMKLMMDMAYPRTA

SEQ ID NO: 232468 - protein, 15 aa, Artificial Sequence
  Description of Artificial Sequence: Synthetic peptide
  Seed: LRMKWMMAMKYPITA
LRMKLMMDMAYPSTA

SEQ ID NO: 232469 - protein, 15 aa, Artificial Sequence
  Description of Artificial Sequence: Synthetic peptide
  Seed: LRMKWMMAMKYPITA
LRMKLMMDMAYPTTA

SEQ ID NO: 232470 - protein, 15 aa, Artificial Sequence
  Description of Artificial Sequence: Synthetic peptide
  Seed: LRMKWMMAMKYPITA
LRMKLMMDMAYPVTA

SEQ ID NO: 232471 - protein, 15 aa, Artificial Sequence
  Description of Artificial Sequence: Synthetic peptide
  Seed: LRMKWMMAMKYPITA
LRMKLMMDMAYPYTA

SEQ ID NO: 232472 - protein, 15 aa, Artificial Sequence
  Description of Artificial Sequence: Synthetic peptide
  Seed: LRMKWMMAMKYPITA
LRMKLMMDMDYPFTA

SEQ ID NO: 232473 - protein, 15 aa, Artificial Sequence
  Description of Artificial Sequence: Synthetic peptide
  Seed: LRMKWMMAMKYPITA
LRMKLMMDMDYPYTA

SEQ ID NO: 232474 - protein, 15 aa, Artificial Sequence
  Description of Artificial Sequence: Synthetic peptide
  Seed: LRMKWMMAMKYPITA
LRMKLMMDMEYPRTA

SEQ ID NO: 232475 - protein, 15 aa, Artificial Sequence
  Description of Artificial Sequence: Synthetic peptide
  Seed: LRMKWMMAMKYPITA
LRMKLMMDMEYPYTA

SEQ ID NO: 232476 - protein, 15 aa, Artificial Sequence
  Description of Artificial Sequence: Synthetic peptide
  Seed: LRMKWMMAMKYPITA
LRMKLMMDMFYPITA

SEQ ID NO: 232477 - protein, 15 aa, Artificial Sequence
  Description of Artificial Sequence: Synthetic peptide
  Seed: LRMKWMMAMKYPITA
LRMKLMMDMFYPLTA

SEQ ID NO: 232478 - protein, 15 aa, Artificial Sequence
  Description of Artificial Sequence: Synthetic peptide
  Seed: LRMKWMMAMKYPITA
LRMKLMMDMFYPVTA

SEQ ID NO: 232479 - protein, 15 aa, Artificial Sequence
  Description of Artificial Sequence: Synthetic peptide
  Seed: LRMKWMMAMKYPITA
LRMKLMMDMGYPATA

SEQ ID NO: 232480 - protein, 15 aa, Artificial Sequence
  Description of Artificial Sequence: Synthetic peptide
  Seed: LRMKWMMAMKYPITA
LRMKLMMDMGYPFTA

SEQ ID NO: 232481 - protein, 15 aa, Artificial Sequence
  Description of Artificial Sequence: Synthetic peptide
  Seed: LRMKWMMAMKYPITA
LRMKLMMDMGYPITA

SEQ ID NO: 232482 - protein, 15 aa, Artificial Sequence
  Description of Artificial Sequence: Synthetic peptide
  Seed: LRMKWMMAMKYPITA
LRMKLMMDMGYPLTA

SEQ ID NO: 232483 - protein, 15 aa, Artificial Sequence
  Description of Artificial Sequence: Synthetic peptide
  Seed: LRMKWMMAMKYPITA
LRMKLMMDMGYPMTA

SEQ ID NO: 232484 - protein, 15 aa, Artificial Sequence
  Description of Artificial Sequence: Synthetic peptide
  Seed: LRMKWMMAMKYPITA
LRMKLMMDMGYPRTA

SEQ ID NO: 232485 - protein, 15 aa, Artificial Sequence
  Description of Artificial Sequence: Synthetic peptide
  Seed: LRMKWMMAMKYPITA
LRMKLMMDMGYPVTA

SEQ ID NO: 232486 - protein, 15 aa, Artificial Sequence
  Description of Artificial Sequence: Synthetic peptide
  Seed: LRMKWMMAMKYPITA
LRMKLMMDMGYPYTA

SEQ ID NO: 232487 - protein, 15 aa, Artificial Sequence
  Description of Artificial Sequence: Synthetic peptide
  Seed: LRMKWMMAMKYPITA
LRMKLMMDMHYPFTA

SEQ ID NO: 232488 - protein, 15 aa, Artificial Sequence
  Description of Artificial Sequence: Synthetic peptide
  Seed: LRMKWMMAMKYPITA
LRMKLMMDMHYPITA

SEQ ID NO: 232489 - protein, 15 aa, Artificial Sequence
  Description of Artificial Sequence: Synthetic peptide
  Seed: LRMKWMMAMKYPITA
LRMKLMMDMHYPLTA

SEQ ID NO: 232490 - protein, 15 aa, Artificial Sequence
  Description of Artificial Sequence: Synthetic peptide
  Seed: LRMKWMMAMKYPITA
LRMKLMMDMHYPMTA

SEQ ID NO: 232491 - protein, 15 aa, Artificial Sequence
  Description of Artificial Sequence: Synthetic peptide
  Seed: LRMKWMMAMKYPITA
LRMKLMMDMHYPRTA

SEQ ID NO: 232492 - protein, 15 aa, Artificial Sequence
  Description of Artificial Sequence: Synthetic peptide
  Seed: LRMKWMMAMKYPITA
LRMKLMMDMHYPVTA

SEQ ID NO: 232493 - protein, 15 aa, Artificial Sequence
  Description of Artificial Sequence: Synthetic peptide
  Seed: LRMKWMMAMKYPITA
LRMKLMMDMHYPYTA

SEQ ID NO: 232494 - protein, 15 aa, Artificial Sequence
  Description of Artificial Sequence: Synthetic peptide
  Seed: LRMKWMMAMKYPITA
LRMKLMMDMIYPFTA

SEQ ID NO: 232495 - protein, 15 aa, Artificial Sequence
  Description of Artificial Sequence: Synthetic peptide
  Seed: LRMKWMMAMKYPITA
LRMKLMMDMIYPITA

SEQ ID NO: 232496 - protein, 15 aa, Artificial Sequence
  Description of Artificial Sequence: Synthetic peptide
  Seed: LRMKWMMAMKYPITA
LRMKLMMDMIYPKTA

SEQ ID NO: 232497 - protein, 15 aa, Artificial Sequence
  Description of Artificial Sequence: Synthetic peptide
  Seed: LRMKWMMAMKYPITA
LRMKLMMDMIYPLTA

SEQ ID NO: 232498 - protein, 15 aa, Artificial Sequence
  Description of Artificial Sequence: Synthetic peptide
  Seed: LRMKWMMAMKYPITA
LRMKLMMDMIYPMTA

SEQ ID NO: 232499 - protein, 15 aa, Artificial Sequence
  Description of Artificial Sequence: Synthetic peptide
  Seed: LRMKWMMAMKYPITA
LRMKLMMDMIYPRTA

SEQ ID NO: 232500 - protein, 15 aa, Artificial Sequence
  Description of Artificial Sequence: Synthetic peptide
  Seed: LRMKWMMAMKYPITA
LRMKLMMDMIYPVTA

SEQ ID NO: 232501 - protein, 15 aa, Artificial Sequence
  Description of Artificial Sequence: Synthetic peptide
  Seed: LRMKWMMAMKYPITA
LRMKLMMDMIYPYTA

SEQ ID NO: 232502 - protein, 15 aa, Artificial Sequence
  Description of Artificial Sequence: Synthetic peptide
  Seed: LRMKWMMAMKYPITA
LRMKLMMDMKYPATA

SEQ ID NO: 232503 - protein, 15 aa, Artificial Sequence
  Description of Artificial Sequence: Synthetic peptide
  Seed: LRMKWMMAMKYPITA
LRMKLMMDMKYPFTA

SEQ ID NO: 232504 - protein, 15 aa, Artificial Sequence
  Description of Artificial Sequence: Synthetic peptide
  Seed: LRMKWMMAMKYPITA
LRMKLMMDMKYPHTA

SEQ ID NO: 232505 - protein, 15 aa, Artificial Sequence
  Description of Artificial Sequence: Synthetic peptide
  Seed: LRMKWMMAMKYPITA
LRMKLMMDMKYPITA

SEQ ID NO: 232506 - protein, 15 aa, Artificial Sequence
  Description of Artificial Sequence: Synthetic peptide
  Seed: LRMKWMMAMKYPITA
LRMKLMMDMKYPKTA

SEQ ID NO: 232507 - protein, 15 aa, Artificial Sequence
  Description of Artificial Sequence: Synthetic peptide
  Seed: LRMKWMMAMKYPITA
LRMKLMMDMKYPLTA

SEQ ID NO: 232508 - protein, 15 aa, Artificial Sequence
  Description of Artificial Sequence: Synthetic peptide
  Seed: LRMKWMMAMKYPITA
LRMKLMMDMKYPMTA

SEQ ID NO: 232509 - protein, 15 aa, Artificial Sequence
  Description of Artificial Sequence: Synthetic peptide
  Seed: LRMKWMMAMKYPITA
LRMKLMMDMKYPQTA

SEQ ID NO: 232510 - protein, 15 aa, Artificial Sequence
  Description of Artificial Sequence: Synthetic peptide
  Seed: LRMKWMMAMKYPITA
LRMKLMMDMKYPRTA

SEQ ID NO: 232511 - protein, 15 aa, Artificial Sequence
  Description of Artificial Sequence: Synthetic peptide
  Seed: LRMKWMMAMKYPITA
LRMKLMMDMKYPSTA

SEQ ID NO: 232512 - protein, 15 aa, Artificial Sequence
  Description of Artificial Sequence: Synthetic peptide
  Seed: LRMKWMMAMKYPITA
LRMKLMMDMKYPTTA

SEQ ID NO: 232513 - protein, 15 aa, Artificial Sequence
  Description of Artificial Sequence: Synthetic peptide
  Seed: LRMKWMMAMKYPITA
LRMKLMMDMKYPVTA

SEQ ID NO: 232514 - protein, 15 aa, Artificial Sequence
  Description of Artificial Sequence: Synthetic peptide
  Seed: LRMKWMMAMKYPITA
LRMKLMMDMKYPWTA

SEQ ID NO: 232515 - protein, 15 aa, Artificial Sequence
  Description of Artificial Sequence: Synthetic peptide
  Seed: LRMKWMMAMKYPITA
LRMKLMMDMKYPYTA

SEQ ID NO: 232516 - protein, 15 aa, Artificial Sequence
  Description of Artificial Sequence: Synthetic peptide
  Seed: LRMKWMMAMKYPITA
LRMKLMMDMLYPRTA

SEQ ID NO: 232517 - protein, 15 aa, Artificial Sequence
  Description of Artificial Sequence: Synthetic peptide
  Seed: LRMKWMMAMKYPITA
LRMKLMMDMMYPRTA

SEQ ID NO: 232518 - protein, 15 aa, Artificial Sequence
  Description of Artificial Sequence: Synthetic peptide
  Seed: LRMKWMMAMKYPITA
LRMKLMMDMNYPATA

SEQ ID NO: 232519 - protein, 15 aa, Artificial Sequence
  Description of Artificial Sequence: Synthetic peptide
  Seed: LRMKWMMAMKYPITA
LRMKLMMDMNYPFTA

SEQ ID NO: 232520 - protein, 15 aa, Artificial Sequence
  Description of Artificial Sequence: Synthetic peptide
  Seed: LRMKWMMAMKYPITA
LRMKLMMDMNYPGTA

SEQ ID NO: 232521 - protein, 15 aa, Artificial Sequence
  Description of Artificial Sequence: Synthetic peptide
  Seed: LRMKWMMAMKYPITA
LRMKLMMDMNYPITA

SEQ ID NO: 232522 - protein, 15 aa, Artificial Sequence
  Description of Artificial Sequence: Synthetic peptide
  Seed: LRMKWMMAMKYPITA
LRMKLMMDMNYPLTA

SEQ ID NO: 232523 - protein, 15 aa, Artificial Sequence
  Description of Artificial Sequence: Synthetic peptide
  Seed: LRMKWMMAMKYPITA
LRMKLMMDMNYPMTA

SEQ ID NO: 232524 - protein, 15 aa, Artificial Sequence
  Description of Artificial Sequence: Synthetic peptide
  Seed: LRMKWMMAMKYPITA
LRMKLMMDMNYPRTA

SEQ ID NO: 232525 - protein, 15 aa, Artificial Sequence
  Description of Artificial Sequence: Synthetic peptide
  Seed: LRMKWMMAMKYPITA
LRMKLMMDMNYPSTA

SEQ ID NO: 232526 - protein, 15 aa, Artificial Sequence
  Description of Artificial Sequence: Synthetic peptide
  Seed: LRMKWMMAMKYPITA
LRMKLMMDMNYPVTA

SEQ ID NO: 232527 - protein, 15 aa, Artificial Sequence
  Description of Artificial Sequence: Synthetic peptide
  Seed: LRMKWMMAMKYPITA
LRMKLMMDMNYPYTA

SEQ ID NO: 232528 - protein, 15 aa, Artificial Sequence
  Description of Artificial Sequence: Synthetic peptide
  Seed: LRMKWMMAMKYPITA
LRMKLMMDMPYPFTA

SEQ ID NO: 232529 - protein, 15 aa, Artificial Sequence
  Description of Artificial Sequence: Synthetic peptide
  Seed: LRMKWMMAMKYPITA
LRMKLMMDMPYPITA

SEQ ID NO: 232530 - protein, 15 aa, Artificial Sequence
  Description of Artificial Sequence: Synthetic peptide
  Seed: LRMKWMMAMKYPITA
LRMKLMMDMPYPLTA

SEQ ID NO: 232531 - protein, 15 aa, Artificial Sequence
  Description of Artificial Sequence: Synthetic peptide
  Seed: LRMKWMMAMKYPITA
LRMKLMMDMPYPMTA

SEQ ID NO: 232532 - protein, 15 aa, Artificial Sequence
  Description of Artificial Sequence: Synthetic peptide
  Seed: LRMKWMMAMKYPITA
LRMKLMMDMPYPRTA

SEQ ID NO: 232533 - protein, 15 aa, Artificial Sequence
  Description of Artificial Sequence: Synthetic peptide
  Seed: LRMKWMMAMKYPITA
LRMKLMMDMPYPVTA

SEQ ID NO: 232534 - protein, 15 aa, Artificial Sequence
  Description of Artificial Sequence: Synthetic peptide
  Seed: LRMKWMMAMKYPITA
LRMKLMMDMPYPYTA

SEQ ID NO: 232535 - protein, 15 aa, Artificial Sequence
  Description of Artificial Sequence: Synthetic peptide
  Seed: LRMKWMMAMKYPITA
LRMKLMMDMQYPFTA

SEQ ID NO: 232536 - protein, 15 aa, Artificial Sequence
  Description of Artificial Sequence: Synthetic peptide
  Seed: LRMKWMMAMKYPITA
LRMKLMMDMQYPMTA

SEQ ID NO: 232537 - protein, 15 aa, Artificial Sequence
  Description of Artificial Sequence: Synthetic peptide
  Seed: LRMKWMMAMKYPITA
LRMKLMMDMQYPRTA

SEQ ID NO: 232538 - protein, 15 aa, Artificial Sequence
  Description of Artificial Sequence: Synthetic peptide
  Seed: LRMKWMMAMKYPITA
LRMKLMMDMQYPYTA

SEQ ID NO: 232539 - protein, 15 aa, Artificial Sequence
  Description of Artificial Sequence: Synthetic peptide
  Seed: LRMKWMMAMKYPITA
LRMKLMMDMRYPATA

SEQ ID NO: 232540 - protein, 15 aa, Artificial Sequence
  Description of Artificial Sequence: Synthetic peptide
  Seed: LRMKWMMAMKYPITA
LRMKLMMDMRYPFTA

SEQ ID NO: 232541 - protein, 15 aa, Artificial Sequence
  Description of Artificial Sequence: Synthetic peptide
  Seed: LRMKWMMAMKYPITA
LRMKLMMDMRYPHTA

SEQ ID NO: 232542 - protein, 15 aa, Artificial Sequence
  Description of Artificial Sequence: Synthetic peptide
  Seed: LRMKWMMAMKYPITA
LRMKLMMDMRYPITA

SEQ ID NO: 232543 - protein, 15 aa, Artificial Sequence
  Description of Artificial Sequence: Synthetic peptide
  Seed: LRMKWMMAMKYPITA
LRMKLMMDMRYPKTA

SEQ ID NO: 232544 - protein, 15 aa, Artificial Sequence
  Description of Artificial Sequence: Synthetic peptide
  Seed: LRMKWMMAMKYPITA
LRMKLMMDMRYPLTA

SEQ ID NO: 232545 - protein, 15 aa, Artificial Sequence
  Description of Artificial Sequence: Synthetic peptide
  Seed: LRMKWMMAMKYPITA
LRMKLMMDMRYPMTA

SEQ ID NO: 232546 - protein, 15 aa, Artificial Sequence
  Description of Artificial Sequence: Synthetic peptide
  Seed: LRMKWMMAMKYPITA
LRMKLMMDMRYPQTA

SEQ ID NO: 232547 - protein, 15 aa, Artificial Sequence
  Description of Artificial Sequence: Synthetic peptide
  Seed: LRMKWMMAMKYPITA
LRMKLMMDMRYPRTA

SEQ ID NO: 232548 - protein, 15 aa, Artificial Sequence
  Description of Artificial Sequence: Synthetic peptide
  Seed: LRMKWMMAMKYPITA
LRMKLMMDMRYPSTA

SEQ ID NO: 232549 - protein, 15 aa, Artificial Sequence
  Description of Artificial Sequence: Synthetic peptide
  Seed: LRMKWMMAMKYPITA
LRMKLMMDMRYPTTA

SEQ ID NO: 232550 - protein, 15 aa, Artificial Sequence
  Description of Artificial Sequence: Synthetic peptide
  Seed: LRMKWMMAMKYPITA
LRMKLMMDMRYPVTA

SEQ ID NO: 232551 - protein, 15 aa, Artificial Sequence
  Description of Artificial Sequence: Synthetic peptide
  Seed: LRMKWMMAMKYPITA
LRMKLMMDMRYPWTA

SEQ ID NO: 232552 - protein, 15 aa, Artificial Sequence
  Description of Artificial Sequence: Synthetic peptide
  Seed: LRMKWMMAMKYPITA
LRMKLMMDMRYPYTA

SEQ ID NO: 232553 - protein, 15 aa, Artificial Sequence
  Description of Artificial Sequence: Synthetic peptide
  Seed: LRMKWMMAMKYPITA
LRMKLMMDMSYPATA

SEQ ID NO: 232554 - protein, 15 aa, Artificial Sequence
  Description of Artificial Sequence: Synthetic peptide
  Seed: LRMKWMMAMKYPITA
LRMKLMMDMSYPFTA

SEQ ID NO: 232555 - protein, 15 aa, Artificial Sequence
  Description of Artificial Sequence: Synthetic peptide
  Seed: LRMKWMMAMKYPITA
LRMKLMMDMSYPGTA

SEQ ID NO: 232556 - protein, 15 aa, Artificial Sequence
  Description of Artificial Sequence: Synthetic peptide
  Seed: LRMKWMMAMKYPITA
LRMKLMMDMSYPITA

SEQ ID NO: 232557 - protein, 15 aa, Artificial Sequence
  Description of Artificial Sequence: Synthetic peptide
  Seed: LRMKWMMAMKYPITA
LRMKLMMDMSYPLTA

SEQ ID NO: 232558 - protein, 15 aa, Artificial Sequence
  Description of Artificial Sequence: Synthetic peptide
  Seed: LRMKWMMAMKYPITA
LRMKLMMDMSYPMTA

SEQ ID NO: 232559 - protein, 15 aa, Artificial Sequence
  Description of Artificial Sequence: Synthetic peptide
  Seed: LRMKWMMAMKYPITA
LRMKLMMDMSYPRTA

SEQ ID NO: 232560 - protein, 15 aa, Artificial Sequence
  Description of Artificial Sequence: Synthetic peptide
  Seed: LRMKWMMAMKYPITA
LRMKLMMDMSYPSTA

SEQ ID NO: 232561 - protein, 15 aa, Artificial Sequence
  Description of Artificial Sequence: Synthetic peptide
  Seed: LRMKWMMAMKYPITA
LRMKLMMDMSYPVTA

SEQ ID NO: 232562 - protein, 15 aa, Artificial Sequence
  Description of Artificial Sequence: Synthetic peptide
  Seed: LRMKWMMAMKYPITA
LRMKLMMDMSYPYTA

SEQ ID NO: 232563 - protein, 15 aa, Artificial Sequence
  Description of Artificial Sequence: Synthetic peptide
  Seed: LRMKWMMAMKYPITA
LRMKLMMDMTYPATA

SEQ ID NO: 232564 - protein, 15 aa, Artificial Sequence
  Description of Artificial Sequence: Synthetic peptide
  Seed: LRMKWMMAMKYPITA
LRMKLMMDMTYPFTA

SEQ ID NO: 232565 - protein, 15 aa, Artificial Sequence
  Description of Artificial Sequence: Synthetic peptide
  Seed: LRMKWMMAMKYPITA
LRMKLMMDMTYPGTA

SEQ ID NO: 232566 - protein, 15 aa, Artificial Sequence
  Description of Artificial Sequence: Synthetic peptide
  Seed: LRMKWMMAMKYPITA
LRMKLMMDMTYPHTA

SEQ ID NO: 232567 - protein, 15 aa, Artificial Sequence
  Description of Artificial Sequence: Synthetic peptide
  Seed: LRMKWMMAMKYPITA
LRMKLMMDMTYPITA

SEQ ID NO: 232568 - protein, 15 aa, Artificial Sequence
  Description of Artificial Sequence: Synthetic peptide
  Seed: LRMKWMMAMKYPITA
LRMKLMMDMTYPKTA

SEQ ID NO: 232569 - protein, 15 aa, Artificial Sequence
  Description of Artificial Sequence: Synthetic peptide
  Seed: LRMKWMMAMKYPITA
LRMKLMMDMTYPLTA

SEQ ID NO: 232570 - protein, 15 aa, Artificial Sequence
  Description of Artificial Sequence: Synthetic peptide
  Seed: LRMKWMMAMKYPITA
LRMKLMMDMTYPMTA

SEQ ID NO: 232571 - protein, 15 aa, Artificial Sequence
  Description of Artificial Sequence: Synthetic peptide
  Seed: LRMKWMMAMKYPITA
LRMKLMMDMTYPQTA

SEQ ID NO: 232572 - protein, 15 aa, Artificial Sequence
  Description of Artificial Sequence: Synthetic peptide
  Seed: LRMKWMMAMKYPITA
LRMKLMMDMTYPRTA

SEQ ID NO: 232573 - protein, 15 aa, Artificial Sequence
  Description of Artificial Sequence: Synthetic peptide
  Seed: LRMKWMMAMKYPITA
LRMKLMMDMTYPSTA

SEQ ID NO: 232574 - protein, 15 aa, Artificial Sequence
  Description of Artificial Sequence: Synthetic peptide
  Seed: LRMKWMMAMKYPITA
LRMKLMMDMTYPVTA

SEQ ID NO: 232575 - protein, 15 aa, Artificial Sequence
  Description of Artificial Sequence: Synthetic peptide
  Seed: LRMKWMMAMKYPITA
LRMKLMMDMTYPYTA

SEQ ID NO: 232576 - protein, 15 aa, Artificial Sequence
  Description of Artificial Sequence: Synthetic peptide
  Seed: LRMKWMMAMKYPITA
LRMKLMMDMVYPATA

SEQ ID NO: 232577 - protein, 15 aa, Artificial Sequence
  Description of Artificial Sequence: Synthetic peptide
  Seed: LRMKWMMAMKYPITA
LRMKLMMDMVYPFTA

SEQ ID NO: 232578 - protein, 15 aa, Artificial Sequence
  Description of Artificial Sequence: Synthetic peptide
  Seed: LRMKWMMAMKYPITA
LRMKLMMDMVYPITA

SEQ ID NO: 232579 - protein, 15 aa, Artificial Sequence
  Description of Artificial Sequence: Synthetic peptide
  Seed: LRMKWMMAMKYPITA
LRMKLMMDMVYPKTA

SEQ ID NO: 232580 - protein, 15 aa, Artificial Sequence
  Description of Artificial Sequence: Synthetic peptide
  Seed: LRMKWMMAMKYPITA
LRMKLMMDMVYPLTA

SEQ ID NO: 232581 - protein, 15 aa, Artificial Sequence
  Description of Artificial Sequence: Synthetic peptide
  Seed: LRMKWMMAMKYPITA
LRMKLMMDMVYPMTA

SEQ ID NO: 232582 - protein, 15 aa, Artificial Sequence
  Description of Artificial Sequence: Synthetic peptide
  Seed: LRMKWMMAMKYPITA
LRMKLMMDMVYPRTA

SEQ ID NO: 232583 - protein, 15 aa, Artificial Sequence
  Description of Artificial Sequence: Synthetic peptide
  Seed: LRMKWMMAMKYPITA
LRMKLMMDMVYPSTA

SEQ ID NO: 232584 - protein, 15 aa, Artificial Sequence
  Description of Artificial Sequence: Synthetic peptide
  Seed: LRMKWMMAMKYPITA
LRMKLMMDMVYPVTA

SEQ ID NO: 232585 - protein, 15 aa, Artificial Sequence
  Description of Artificial Sequence: Synthetic peptide
  Seed: LRMKWMMAMKYPITA
LRMKLMMDMVYPYTA

SEQ ID NO: 232586 - protein, 15 aa, Artificial Sequence
  Description of Artificial Sequence: Synthetic peptide
  Seed: LRMKWMMAMKYPITA
LRMKLMMEMAYPATA

SEQ ID NO: 232587 - protein, 15 aa, Artificial Sequence
  Description of Artificial Sequence: Synthetic peptide
  Seed: LRMKWMMAMKYPITA
LRMKLMMEMAYPCTA

SEQ ID NO: 232588 - protein, 15 aa, Artificial Sequence
  Description of Artificial Sequence: Synthetic peptide
  Seed: LRMKWMMAMKYPITA
LRMKLMMEMAYPFTA

SEQ ID NO: 232589 - protein, 15 aa, Artificial Sequence
  Description of Artificial Sequence: Synthetic peptide
  Seed: LRMKWMMAMKYPITA
LRMKLMMEMAYPGTA

SEQ ID NO: 232590 - protein, 15 aa, Artificial Sequence
  Description of Artificial Sequence: Synthetic peptide
  Seed: LRMKWMMAMKYPITA
LRMKLMMEMAYPHTA

SEQ ID NO: 232591 - protein, 15 aa, Artificial Sequence
  Description of Artificial Sequence: Synthetic peptide
  Seed: LRMKWMMAMKYPITA
LRMKLMMEMAYPITA

SEQ ID NO: 232592 - protein, 15 aa, Artificial Sequence
  Description of Artificial Sequence: Synthetic peptide
  Seed: LRMKWMMAMKYPITA
LRMKLMMEMAYPLTA

SEQ ID NO: 232593 - protein, 15 aa, Artificial Sequence
  Description of Artificial Sequence: Synthetic peptide
  Seed: LRMKWMMAMKYPITA
LRMKLMMEMAYPMTA

SEQ ID NO: 232594 - protein, 15 aa, Artificial Sequence
  Description of Artificial Sequence: Synthetic peptide
  Seed: LRMKWMMAMKYPITA
LRMKLMMEMAYPNTA

SEQ ID NO: 232595 - protein, 15 aa, Artificial Sequence
  Description of Artificial Sequence: Synthetic peptide
  Seed: LRMKWMMAMKYPITA
LRMKLMMEMAYPQTA

SEQ ID NO: 232596 - protein, 15 aa, Artificial Sequence
  Description of Artificial Sequence: Synthetic peptide
  Seed: LRMKWMMAMKYPITA
LRMKLMMEMAYPSTA

SEQ ID NO: 232597 - protein, 15 aa, Artificial Sequence
  Description of Artificial Sequence: Synthetic peptide
  Seed: LRMKWMMAMKYPITA
LRMKLMMEMAYPTTA

SEQ ID NO: 232598 - protein, 15 aa, Artificial Sequence
  Description of Artificial Sequence: Synthetic peptide
  Seed: LRMKWMMAMKYPITA
LRMKLMMEMAYPVTA

SEQ ID NO: 232599 - protein, 15 aa, Artificial Sequence
  Description of Artificial Sequence: Synthetic peptide
  Seed: LRMKWMMAMKYPITA
LRMKLMMEMAYPYTA

SEQ ID NO: 232600 - protein, 15 aa, Artificial Sequence
  Description of Artificial Sequence: Synthetic peptide
  Seed: LRMKWMMAMKYPITA
LRMKLMMEMFYPFTA

SEQ ID NO: 232601 - protein, 15 aa, Artificial Sequence
  Description of Artificial Sequence: Synthetic peptide
  Seed: LRMKWMMAMKYPITA
LRMKLMMEMFYPITA

SEQ ID NO: 232602 - protein, 15 aa, Artificial Sequence
  Description of Artificial Sequence: Synthetic peptide
  Seed: LRMKWMMAMKYPITA
LRMKLMMEMFYPLTA

SEQ ID NO: 232603 - protein, 15 aa, Artificial Sequence
  Description of Artificial Sequence: Synthetic peptide
  Seed: LRMKWMMAMKYPITA
LRMKLMMEMFYPMTA

SEQ ID NO: 232604 - protein, 15 aa, Artificial Sequence
  Description of Artificial Sequence: Synthetic peptide
  Seed: LRMKWMMAMKYPITA
LRMKLMMEMFYPTTA

SEQ ID NO: 232605 - protein, 15 aa, Artificial Sequence
  Description of Artificial Sequence: Synthetic peptide
  Seed: LRMKWMMAMKYPITA
LRMKLMMEMFYPVTA

SEQ ID NO: 232606 - protein, 15 aa, Artificial Sequence
  Description of Artificial Sequence: Synthetic peptide
  Seed: LRMKWMMAMKYPITA
LRMKLMMEMGYPATA

SEQ ID NO: 232607 - protein, 15 aa, Artificial Sequence
  Description of Artificial Sequence: Synthetic peptide
  Seed: LRMKWMMAMKYPITA
LRMKLMMEMGYPCTA

SEQ ID NO: 232608 - protein, 15 aa, Artificial Sequence
  Description of Artificial Sequence: Synthetic peptide
  Seed: LRMKWMMAMKYPITA
LRMKLMMEMGYPFTA

SEQ ID NO: 232609 - protein, 15 aa, Artificial Sequence
  Description of Artificial Sequence: Synthetic peptide
  Seed: LRMKWMMAMKYPITA
LRMKLMMEMGYPGTA

SEQ ID NO: 232610 - protein, 15 aa, Artificial Sequence
  Description of Artificial Sequence: Synthetic peptide
  Seed: LRMKWMMAMKYPITA
LRMKLMMEMGYPITA

SEQ ID NO: 232611 - protein, 15 aa, Artificial Sequence
  Description of Artificial Sequence: Synthetic peptide
  Seed: LRMKWMMAMKYPITA
LRMKLMMEMGYPLTA

SEQ ID NO: 232612 - protein, 15 aa, Artificial Sequence
  Description of Artificial Sequence: Synthetic peptide
  Seed: LRMKWMMAMKYPITA
LRMKLMMEMGYPMTA

SEQ ID NO: 232613 - protein, 15 aa, Artificial Sequence
  Description of Artificial Sequence: Synthetic peptide
  Seed: LRMKWMMAMKYPITA
LRMKLMMEMGYPNTA

SEQ ID NO: 232614 - protein, 15 aa, Artificial Sequence
  Description of Artificial Sequence: Synthetic peptide
  Seed: LRMKWMMAMKYPITA
LRMKLMMEMGYPSTA

SEQ ID NO: 232615 - protein, 15 aa, Artificial Sequence
  Description of Artificial Sequence: Synthetic peptide
  Seed: LRMKWMMAMKYPITA
LRMKLMMEMGYPTTA

SEQ ID NO: 232616 - protein, 15 aa, Artificial Sequence
  Description of Artificial Sequence: Synthetic peptide
  Seed: LRMKWMMAMKYPITA
LRMKLMMEMGYPVTA

SEQ ID NO: 232617 - protein, 15 aa, Artificial Sequence
  Description of Artificial Sequence: Synthetic peptide
  Seed: LRMKWMMAMKYPITA
LRMKLMMEMIYPATA

SEQ ID NO: 232618 - protein, 15 aa, Artificial Sequence
  Description of Artificial Sequence: Synthetic peptide
  Seed: LRMKWMMAMKYPITA
LRMKLMMEMIYPITA

SEQ ID NO: 232619 - protein, 15 aa, Artificial Sequence
  Description of Artificial Sequence: Synthetic peptide
  Seed: LRMKWMMAMKYPITA
LRMKLMMEMIYPLTA

SEQ ID NO: 232620 - protein, 15 aa, Artificial Sequence
  Description of Artificial Sequence: Synthetic peptide
  Seed: LRMKWMMAMKYPITA
LRMKLMMEMIYPMTA

SEQ ID NO: 232621 - protein, 15 aa, Artificial Sequence
  Description of Artificial Sequence: Synthetic peptide
  Seed: LRMKWMMAMKYPITA
LRMKLMMEMIYPNTA

SEQ ID NO: 232622 - protein, 15 aa, Artificial Sequence
  Description of Artificial Sequence: Synthetic peptide
  Seed: LRMKWMMAMKYPITA
LRMKLMMEMIYPSTA

SEQ ID NO: 232623 - protein, 15 aa, Artificial Sequence
  Description of Artificial Sequence: Synthetic peptide
  Seed: LRMKWMMAMKYPITA
LRMKLMMEMIYPTTA

SEQ ID NO: 232624 - protein, 15 aa, Artificial Sequence
  Description of Artificial Sequence: Synthetic peptide
  Seed: LRMKWMMAMKYPITA
LRMKLMMEMIYPVTA

SEQ ID NO: 232625 - protein, 15 aa, Artificial Sequence
  Description of Artificial Sequence: Synthetic peptide
  Seed: LRMKWMMAMKYPITA
LRMKLMMEMKYPATA

SEQ ID NO: 232626 - protein, 15 aa, Artificial Sequence
  Description of Artificial Sequence: Synthetic peptide
  Seed: LRMKWMMAMKYPITA
LRMKLMMEMKYPFTA

SEQ ID NO: 232627 - protein, 15 aa, Artificial Sequence
  Description of Artificial Sequence: Synthetic peptide
  Seed: LRMKWMMAMKYPITA
LRMKLMMEMKYPGTA

SEQ ID NO: 232628 - protein, 15 aa, Artificial Sequence
  Description of Artificial Sequence: Synthetic peptide
  Seed: LRMKWMMAMKYPITA
LRMKLMMEMKYPHTA

SEQ ID NO: 232629 - protein, 15 aa, Artificial Sequence
  Description of Artificial Sequence: Synthetic peptide
  Seed: LRMKWMMAMKYPITA
LRMKLMMEMKYPLTA

SEQ ID NO: 232630 - protein, 15 aa, Artificial Sequence
  Description of Artificial Sequence: Synthetic peptide
  Seed: LRMKWMMAMKYPITA
LRMKLMMEMKYPQTA

SEQ ID NO: 232631 - protein, 15 aa, Artificial Sequence
  Description of Artificial Sequence: Synthetic peptide
  Seed: LRMKWMMAMKYPITA
LRMKLMMEMKYPSTA

SEQ ID NO: 232632 - protein, 15 aa, Artificial Sequence
  Description of Artificial Sequence: Synthetic peptide
  Seed: LRMKWMMAMKYPITA
LRMKLMMEMKYPVTA

SEQ ID NO: 232633 - protein, 15 aa, Artificial Sequence
  Description of Artificial Sequence: Synthetic peptide
  Seed: LRMKWMMAMKYPITA
LRMKLMMEMKYPYTA

SEQ ID NO: 232634 - protein, 15 aa, Artificial Sequence
  Description of Artificial Sequence: Synthetic peptide
  Seed: LRMKWMMAMKYPITA
LRMKLMMEMNYPATA

SEQ ID NO: 232635 - protein, 15 aa, Artificial Sequence
  Description of Artificial Sequence: Synthetic peptide
  Seed: LRMKWMMAMKYPITA
LRMKLMMEMNYPITA

SEQ ID NO: 232636 - protein, 15 aa, Artificial Sequence
  Description of Artificial Sequence: Synthetic peptide
  Seed: LRMKWMMAMKYPITA
LRMKLMMEMNYPLTA

SEQ ID NO: 232637 - protein, 15 aa, Artificial Sequence
  Description of Artificial Sequence: Synthetic peptide
  Seed: LRMKWMMAMKYPITA
LRMKLMMEMNYPMTA

SEQ ID NO: 232638 - protein, 15 aa, Artificial Sequence
  Description of Artificial Sequence: Synthetic peptide
  Seed: LRMKWMMAMKYPITA
LRMKLMMEMNYPSTA

SEQ ID NO: 232639 - protein, 15 aa, Artificial Sequence
  Description of Artificial Sequence: Synthetic peptide
  Seed: LRMKWMMAMKYPITA
LRMKLMMEMNYPTTA

SEQ ID NO: 232640 - protein, 15 aa, Artificial Sequence
  Description of Artificial Sequence: Synthetic peptide
  Seed: LRMKWMMAMKYPITA
LRMKLMMEMNYPVTA

SEQ ID NO: 232641 - protein, 15 aa, Artificial Sequence
  Description of Artificial Sequence: Synthetic peptide
  Seed: LRMKWMMAMKYPITA
LRMKLMMEMPYPATA

SEQ ID NO: 232642 - protein, 15 aa, Artificial Sequence
  Description of Artificial Sequence: Synthetic peptide
  Seed: LRMKWMMAMKYPITA
LRMKLMMEMPYPCTA

SEQ ID NO: 232643 - protein, 15 aa, Artificial Sequence
  Description of Artificial Sequence: Synthetic peptide
  Seed: LRMKWMMAMKYPITA
LRMKLMMEMPYPFTA

SEQ ID NO: 232644 - protein, 15 aa, Artificial Sequence
  Description of Artificial Sequence: Synthetic peptide
  Seed: LRMKWMMAMKYPITA
LRMKLMMEMPYPGTA

SEQ ID NO: 232645 - protein, 15 aa, Artificial Sequence
  Description of Artificial Sequence: Synthetic peptide
  Seed: LRMKWMMAMKYPITA
LRMKLMMEMPYPITA

SEQ ID NO: 232646 - protein, 15 aa, Artificial Sequence
  Description of Artificial Sequence: Synthetic peptide
  Seed: LRMKWMMAMKYPITA
LRMKLMMEMPYPLTA

SEQ ID NO: 232647 - protein, 15 aa, Artificial Sequence
  Description of Artificial Sequence: Synthetic peptide
  Seed: LRMKWMMAMKYPITA
LRMKLMMEMPYPMTA

SEQ ID NO: 232648 - protein, 15 aa, Artificial Sequence
  Description of Artificial Sequence: Synthetic peptide
  Seed: LRMKWMMAMKYPITA
LRMKLMMEMPYPNTA

SEQ ID NO: 232649 - protein, 15 aa, Artificial Sequence
  Description of Artificial Sequence: Synthetic peptide
  Seed: LRMKWMMAMKYPITA
LRMKLMMEMPYPSTA

SEQ ID NO: 232650 - protein, 15 aa, Artificial Sequence
  Description of Artificial Sequence: Synthetic peptide
  Seed: LRMKWMMAMKYPITA
LRMKLMMEMPYPTTA

SEQ ID NO: 232651 - protein, 15 aa, Artificial Sequence
  Description of Artificial Sequence: Synthetic peptide
  Seed: LRMKWMMAMKYPITA
LRMKLMMEMPYPVTA

SEQ ID NO: 232652 - protein, 15 aa, Artificial Sequence
  Description of Artificial Sequence: Synthetic peptide
  Seed: LRMKWMMAMKYPITA
LRMKLMMEMRYPATA

SEQ ID NO: 232653 - protein, 15 aa, Artificial Sequence
  Description of Artificial Sequence: Synthetic peptide
  Seed: LRMKWMMAMKYPITA
LRMKLMMEMRYPFTA

SEQ ID NO: 232654 - protein, 15 aa, Artificial Sequence
  Description of Artificial Sequence: Synthetic peptide
  Seed: LRMKWMMAMKYPITA
LRMKLMMEMRYPGTA

SEQ ID NO: 232655 - protein, 15 aa, Artificial Sequence
  Description of Artificial Sequence: Synthetic peptide
  Seed: LRMKWMMAMKYPITA
LRMKLMMEMRYPHTA

SEQ ID NO: 232656 - protein, 15 aa, Artificial Sequence
  Description of Artificial Sequence: Synthetic peptide
  Seed: LRMKWMMAMKYPITA
LRMKLMMEMRYPITA

SEQ ID NO: 232657 - protein, 15 aa, Artificial Sequence
  Description of Artificial Sequence: Synthetic peptide
  Seed: LRMKWMMAMKYPITA
LRMKLMMEMRYPKTA

SEQ ID NO: 232658 - protein, 15 aa, Artificial Sequence
  Description of Artificial Sequence: Synthetic peptide
  Seed: LRMKWMMAMKYPITA
LRMKLMMEMRYPLTA

SEQ ID NO: 232659 - protein, 15 aa, Artificial Sequence
  Description of Artificial Sequence: Synthetic peptide
  Seed: LRMKWMMAMKYPITA
LRMKLMMEMRYPMTA

SEQ ID NO: 232660 - protein, 15 aa, Artificial Sequence
  Description of Artificial Sequence: Synthetic peptide
  Seed: LRMKWMMAMKYPITA
LRMKLMMEMRYPQTA

SEQ ID NO: 232661 - protein, 15 aa, Artificial Sequence
  Description of Artificial Sequence: Synthetic peptide
  Seed: LRMKWMMAMKYPITA
LRMKLMMEMRYPRTA

SEQ ID NO: 232662 - protein, 15 aa, Artificial Sequence
  Description of Artificial Sequence: Synthetic peptide
  Seed: LRMKWMMAMKYPITA
LRMKLMMEMRYPSTA

SEQ ID NO: 232663 - protein, 15 aa, Artificial Sequence
  Description of Artificial Sequence: Synthetic peptide
  Seed: LRMKWMMAMKYPITA
LRMKLMMEMRYPTTA

SEQ ID NO: 232664 - protein, 15 aa, Artificial Sequence
  Description of Artificial Sequence: Synthetic peptide
  Seed: LRMKWMMAMKYPITA
LRMKLMMEMRYPVTA

SEQ ID NO: 232665 - protein, 15 aa, Artificial Sequence
  Description of Artificial Sequence: Synthetic peptide
  Seed: LRMKWMMAMKYPITA
LRMKLMMEMRYPYTA

SEQ ID NO: 232666 - protein, 15 aa, Artificial Sequence
  Description of Artificial Sequence: Synthetic peptide
  Seed: LRMKWMMAMKYPITA
LRMKLMMEMSYPATA

SEQ ID NO: 232667 - protein, 15 aa, Artificial Sequence
  Description of Artificial Sequence: Synthetic peptide
  Seed: LRMKWMMAMKYPITA
LRMKLMMEMSYPCTA

SEQ ID NO: 232668 - protein, 15 aa, Artificial Sequence
  Description of Artificial Sequence: Synthetic peptide
  Seed: LRMKWMMAMKYPITA
LRMKLMMEMSYPFTA

SEQ ID NO: 232669 - protein, 15 aa, Artificial Sequence
  Description of Artificial Sequence: Synthetic peptide
  Seed: LRMKWMMAMKYPITA
LRMKLMMEMSYPGTA

SEQ ID NO: 232670 - protein, 15 aa, Artificial Sequence
  Description of Artificial Sequence: Synthetic peptide
  Seed: LRMKWMMAMKYPITA
LRMKLMMEMSYPITA

SEQ ID NO: 232671 - protein, 15 aa, Artificial Sequence
  Description of Artificial Sequence: Synthetic peptide
  Seed: LRMKWMMAMKYPITA
LRMKLMMEMSYPLTA

SEQ ID NO: 232672 - protein, 15 aa, Artificial Sequence
  Description of Artificial Sequence: Synthetic peptide
  Seed: LRMKWMMAMKYPITA
LRMKLMMEMSYPMTA

SEQ ID NO: 232673 - protein, 15 aa, Artificial Sequence
  Description of Artificial Sequence: Synthetic peptide
  Seed: LRMKWMMAMKYPITA
LRMKLMMEMSYPNTA

SEQ ID NO: 232674 - protein, 15 aa, Artificial Sequence
  Description of Artificial Sequence: Synthetic peptide
  Seed: LRMKWMMAMKYPITA
LRMKLMMEMSYPSTA

SEQ ID NO: 232675 - protein, 15 aa, Artificial Sequence
  Description of Artificial Sequence: Synthetic peptide
  Seed: LRMKWMMAMKYPITA
LRMKLMMEMSYPTTA

SEQ ID NO: 232676 - protein, 15 aa, Artificial Sequence
  Description of Artificial Sequence: Synthetic peptide
  Seed: LRMKWMMAMKYPITA
LRMKLMMEMSYPVTA

SEQ ID NO: 232677 - protein, 15 aa, Artificial Sequence
  Description of Artificial Sequence: Synthetic peptide
  Seed: LRMKWMMAMKYPITA
LRMKLMMEMTYPATA

SEQ ID NO: 232678 - protein, 15 aa, Artificial Sequence
  Description of Artificial Sequence: Synthetic peptide
  Seed: LRMKWMMAMKYPITA
LRMKLMMEMTYPITA

SEQ ID NO: 232679 - protein, 15 aa, Artificial Sequence
  Description of Artificial Sequence: Synthetic peptide
  Seed: LRMKWMMAMKYPITA
LRMKLMMEMTYPLTA

SEQ ID NO: 232680 - protein, 15 aa, Artificial Sequence
  Description of Artificial Sequence: Synthetic peptide
  Seed: LRMKWMMAMKYPITA
LRMKLMMEMTYPMTA

SEQ ID NO: 232681 - protein, 15 aa, Artificial Sequence
  Description of Artificial Sequence: Synthetic peptide
  Seed: LRMKWMMAMKYPITA
LRMKLMMEMTYPNTA

SEQ ID NO: 232682 - protein, 15 aa, Artificial Sequence
  Description of Artificial Sequence: Synthetic peptide
  Seed: LRMKWMMAMKYPITA
LRMKLMMEMTYPSTA

SEQ ID NO: 232683 - protein, 15 aa, Artificial Sequence
  Description of Artificial Sequence: Synthetic peptide
  Seed: LRMKWMMAMKYPITA
LRMKLMMEMTYPTTA

SEQ ID NO: 232684 - protein, 15 aa, Artificial Sequence
  Description of Artificial Sequence: Synthetic peptide
  Seed: LRMKWMMAMKYPITA
LRMKLMMEMTYPVTA

SEQ ID NO: 232685 - protein, 15 aa, Artificial Sequence
  Description of Artificial Sequence: Synthetic peptide
  Seed: LRMKWMMAMKYPITA
LRMKLMMEMVYPATA

SEQ ID NO: 232686 - protein, 15 aa, Artificial Sequence
  Description of Artificial Sequence: Synthetic peptide
  Seed: LRMKWMMAMKYPITA
LRMKLMMEMVYPITA

SEQ ID NO: 232687 - protein, 15 aa, Artificial Sequence
  Description of Artificial Sequence: Synthetic peptide
  Seed: LRMKWMMAMKYPITA
LRMKLMMEMVYPLTA

SEQ ID NO: 232688 - protein, 15 aa, Artificial Sequence
  Description of Artificial Sequence: Synthetic peptide
  Seed: LRMKWMMAMKYPITA
LRMKLMMEMVYPMTA

SEQ ID NO: 232689 - protein, 15 aa, Artificial Sequence
  Description of Artificial Sequence: Synthetic peptide
  Seed: LRMKWMMAMKYPITA
LRMKLMMEMVYPNTA

SEQ ID NO: 232690 - protein, 15 aa, Artificial Sequence
  Description of Artificial Sequence: Synthetic peptide
  Seed: LRMKWMMAMKYPITA
LRMKLMMEMVYPSTA

SEQ ID NO: 232691 - protein, 15 aa, Artificial Sequence
  Description of Artificial Sequence: Synthetic peptide
  Seed: LRMKWMMAMKYPITA
LRMKLMMEMVYPTTA

SEQ ID NO: 232692 - protein, 15 aa, Artificial Sequence
  Description of Artificial Sequence: Synthetic peptide
  Seed: LRMKWMMAMKYPITA
LRMKLMMEMVYPVTA

SEQ ID NO: 232693 - protein, 15 aa, Artificial Sequence
  Description of Artificial Sequence: Synthetic peptide
  Seed: LRMKWMMAMKYPITA
LRMKLMMEMYYPITA

SEQ ID NO: 232694 - protein, 15 aa, Artificial Sequence
  Description of Artificial Sequence: Synthetic peptide
  Seed: LRMKWMMAMKYPITA
LRMKLMMEMYYPLTA

SEQ ID NO: 232695 - protein, 15 aa, Artificial Sequence
  Description of Artificial Sequence: Synthetic peptide
  Seed: LRMKWMMAMKYPITA
LRMKLMMEMYYPVTA

SEQ ID NO: 232696 - protein, 15 aa, Artificial Sequence
  Description of Artificial Sequence: Synthetic peptide
  Seed: LRMKWMMAMKYPITA
LRMKLMMFMAYPATA

SEQ ID NO: 232697 - protein, 15 aa, Artificial Sequence
  Description of Artificial Sequence: Synthetic peptide
  Seed: LRMKWMMAMKYPITA
LRMKLMMFMAYPDTA

SEQ ID NO: 232698 - protein, 15 aa, Artificial Sequence
  Description of Artificial Sequence: Synthetic peptide
  Seed: LRMKWMMAMKYPITA
LRMKLMMFMAYPETA

SEQ ID NO: 232699 - protein, 15 aa, Artificial Sequence
  Description of Artificial Sequence: Synthetic peptide
  Seed: LRMKWMMAMKYPITA
LRMKLMMFMAYPFTA

SEQ ID NO: 232700 - protein, 15 aa, Artificial Sequence
  Description of Artificial Sequence: Synthetic peptide
  Seed: LRMKWMMAMKYPITA
LRMKLMMFMAYPGTA

SEQ ID NO: 232701 - protein, 15 aa, Artificial Sequence
  Description of Artificial Sequence: Synthetic peptide
  Seed: LRMKWMMAMKYPITA
LRMKLMMFMAYPHTA

SEQ ID NO: 232702 - protein, 15 aa, Artificial Sequence
  Description of Artificial Sequence: Synthetic peptide
  Seed: LRMKWMMAMKYPITA
LRMKLMMFMAYPITA

SEQ ID NO: 232703 - protein, 15 aa, Artificial Sequence
  Description of Artificial Sequence: Synthetic peptide
  Seed: LRMKWMMAMKYPITA
LRMKLMMFMAYPKTA

SEQ ID NO: 232704 - protein, 15 aa, Artificial Sequence
  Description of Artificial Sequence: Synthetic peptide
  Seed: LRMKWMMAMKYPITA
LRMKLMMFMAYPLTA

SEQ ID NO: 232705 - protein, 15 aa, Artificial Sequence
  Description of Artificial Sequence: Synthetic peptide
  Seed: LRMKWMMAMKYPITA
LRMKLMMFMAYPMTA

SEQ ID NO: 232706 - protein, 15 aa, Artificial Sequence
  Description of Artificial Sequence: Synthetic peptide
  Seed: LRMKWMMAMKYPITA
LRMKLMMFMAYPNTA

SEQ ID NO: 232707 - protein, 15 aa, Artificial Sequence
  Description of Artificial Sequence: Synthetic peptide
  Seed: LRMKWMMAMKYPITA
LRMKLMMFMAYPQTA

SEQ ID NO: 232708 - protein, 15 aa, Artificial Sequence
  Description of Artificial Sequence: Synthetic peptide
  Seed: LRMKWMMAMKYPITA
LRMKLMMFMAYPRTA

SEQ ID NO: 232709 - protein, 15 aa, Artificial Sequence
  Description of Artificial Sequence: Synthetic peptide
  Seed: LRMKWMMAMKYPITA
LRMKLMMFMAYPSTA

SEQ ID NO: 232710 - protein, 15 aa, Artificial Sequence
  Description of Artificial Sequence: Synthetic peptide
  Seed: LRMKWMMAMKYPITA
LRMKLMMFMAYPTTA

SEQ ID NO: 232711 - protein, 15 aa, Artificial Sequence
  Description of Artificial Sequence: Synthetic peptide
  Seed: LRMKWMMAMKYPITA
LRMKLMMFMAYPVTA

SEQ ID NO: 232712 - protein, 15 aa, Artificial Sequence
  Description of Artificial Sequence: Synthetic peptide
  Seed: LRMKWMMAMKYPITA
LRMKLMMFMAYPYTA

SEQ ID NO: 232713 - protein, 15 aa, Artificial Sequence
  Description of Artificial Sequence: Synthetic peptide
  Seed: LRMKWMMAMKYPITA
LRMKLMMFMDYPATA

SEQ ID NO: 232714 - protein, 15 aa, Artificial Sequence
  Description of Artificial Sequence: Synthetic peptide
  Seed: LRMKWMMAMKYPITA
LRMKLMMFMDYPITA

SEQ ID NO: 232715 - protein, 15 aa, Artificial Sequence
  Description of Artificial Sequence: Synthetic peptide
  Seed: LRMKWMMAMKYPITA
LRMKLMMFMDYPSTA

SEQ ID NO: 232716 - protein, 15 aa, Artificial Sequence
  Description of Artificial Sequence: Synthetic peptide
  Seed: LRMKWMMAMKYPITA
LRMKLMMFMDYPVTA

SEQ ID NO: 232717 - protein, 15 aa, Artificial Sequence
  Description of Artificial Sequence: Synthetic peptide
  Seed: LRMKWMMAMKYPITA
LRMKLMMFMGYPATA

SEQ ID NO: 232718 - protein, 15 aa, Artificial Sequence
  Description of Artificial Sequence: Synthetic peptide
  Seed: LRMKWMMAMKYPITA
LRMKLMMFMGYPITA

SEQ ID NO: 232719 - protein, 15 aa, Artificial Sequence
  Description of Artificial Sequence: Synthetic peptide
  Seed: LRMKWMMAMKYPITA
LRMKLMMFMGYPKTA

SEQ ID NO: 232720 - protein, 15 aa, Artificial Sequence
  Description of Artificial Sequence: Synthetic peptide
  Seed: LRMKWMMAMKYPITA
LRMKLMMFMGYPLTA

SEQ ID NO: 232721 - protein, 15 aa, Artificial Sequence
  Description of Artificial Sequence: Synthetic peptide
  Seed: LRMKWMMAMKYPITA
LRMKLMMFMGYPMTA

SEQ ID NO: 232722 - protein, 15 aa, Artificial Sequence
  Description of Artificial Sequence: Synthetic peptide
  Seed: LRMKWMMAMKYPITA
LRMKLMMFMGYPRTA

SEQ ID NO: 232723 - protein, 15 aa, Artificial Sequence
  Description of Artificial Sequence: Synthetic peptide
  Seed: LRMKWMMAMKYPITA
LRMKLMMFMGYPSTA

SEQ ID NO: 232724 - protein, 15 aa, Artificial Sequence
  Description of Artificial Sequence: Synthetic peptide
  Seed: LRMKWMMAMKYPITA
LRMKLMMFMGYPTTA

SEQ ID NO: 232725 - protein, 15 aa, Artificial Sequence
  Description of Artificial Sequence: Synthetic peptide
  Seed: LRMKWMMAMKYPITA
LRMKLMMFMGYPVTA

SEQ ID NO: 232726 - protein, 15 aa, Artificial Sequence
  Description of Artificial Sequence: Synthetic peptide
  Seed: LRMKWMMAMKYPITA
LRMKLMMFMHYPATA

SEQ ID NO: 232727 - protein, 15 aa, Artificial Sequence
  Description of Artificial Sequence: Synthetic peptide
  Seed: LRMKWMMAMKYPITA
LRMKLMMFMHYPHTA

SEQ ID NO: 232728 - protein, 15 aa, Artificial Sequence
  Description of Artificial Sequence: Synthetic peptide
  Seed: LRMKWMMAMKYPITA
LRMKLMMFMHYPKTA

SEQ ID NO: 232729 - protein, 15 aa, Artificial Sequence
  Description of Artificial Sequence: Synthetic peptide
  Seed: LRMKWMMAMKYPITA
LRMKLMMFMHYPRTA

SEQ ID NO: 232730 - protein, 15 aa, Artificial Sequence
  Description of Artificial Sequence: Synthetic peptide
  Seed: LRMKWMMAMKYPITA
LRMKLMMFMHYPSTA

SEQ ID NO: 232731 - protein, 15 aa, Artificial Sequence
  Description of Artificial Sequence: Synthetic peptide
  Seed: LRMKWMMAMKYPITA
LRMKLMMFMHYPYTA

SEQ ID NO: 232732 - protein, 15 aa, Artificial Sequence
  Description of Artificial Sequence: Synthetic peptide
  Seed: LRMKWMMAMKYPITA
LRMKLMMFMIYPDTA

SEQ ID NO: 232733 - protein, 15 aa, Artificial Sequence
  Description of Artificial Sequence: Synthetic peptide
  Seed: LRMKWMMAMKYPITA
LRMKLMMFMIYPSTA

SEQ ID NO: 232734 - protein, 15 aa, Artificial Sequence
  Description of Artificial Sequence: Synthetic peptide
  Seed: LRMKWMMAMKYPITA
LRMKLMMFMKYPATA

SEQ ID NO: 232735 - protein, 15 aa, Artificial Sequence
  Description of Artificial Sequence: Synthetic peptide
  Seed: LRMKWMMAMKYPITA
LRMKLMMFMKYPDTA

SEQ ID NO: 232736 - protein, 15 aa, Artificial Sequence
  Description of Artificial Sequence: Synthetic peptide
  Seed: LRMKWMMAMKYPITA
LRMKLMMFMKYPETA

SEQ ID NO: 232737 - protein, 15 aa, Artificial Sequence
  Description of Artificial Sequence: Synthetic peptide
  Seed: LRMKWMMAMKYPITA
LRMKLMMFMKYPFTA

SEQ ID NO: 232738 - protein, 15 aa, Artificial Sequence
  Description of Artificial Sequence: Synthetic peptide
  Seed: LRMKWMMAMKYPITA
LRMKLMMFMKYPGTA

SEQ ID NO: 232739 - protein, 15 aa, Artificial Sequence
  Description of Artificial Sequence: Synthetic peptide
  Seed: LRMKWMMAMKYPITA
LRMKLMMFMKYPHTA

SEQ ID NO: 232740 - protein, 15 aa, Artificial Sequence
  Description of Artificial Sequence: Synthetic peptide
  Seed: LRMKWMMAMKYPITA
LRMKLMMFMKYPITA

SEQ ID NO: 232741 - protein, 15 aa, Artificial Sequence
  Description of Artificial Sequence: Synthetic peptide
  Seed: LRMKWMMAMKYPITA
LRMKLMMFMKYPKTA

SEQ ID NO: 232742 - protein, 15 aa, Artificial Sequence
  Description of Artificial Sequence: Synthetic peptide
  Seed: LRMKWMMAMKYPITA
LRMKLMMFMKYPLTA

SEQ ID NO: 232743 - protein, 15 aa, Artificial Sequence
  Description of Artificial Sequence: Synthetic peptide
  Seed: LRMKWMMAMKYPITA
LRMKLMMFMKYPMTA

SEQ ID NO: 232744 - protein, 15 aa, Artificial Sequence
  Description of Artificial Sequence: Synthetic peptide
  Seed: LRMKWMMAMKYPITA
LRMKLMMFMKYPNTA

SEQ ID NO: 232745 - protein, 15 aa, Artificial Sequence
  Description of Artificial Sequence: Synthetic peptide
  Seed: LRMKWMMAMKYPITA
LRMKLMMFMKYPPTA

SEQ ID NO: 232746 - protein, 15 aa, Artificial Sequence
  Description of Artificial Sequence: Synthetic peptide
  Seed: LRMKWMMAMKYPITA
LRMKLMMFMKYPQTA

SEQ ID NO: 232747 - protein, 15 aa, Artificial Sequence
  Description of Artificial Sequence: Synthetic peptide
  Seed: LRMKWMMAMKYPITA
LRMKLMMFMKYPRTA

SEQ ID NO: 232748 - protein, 15 aa, Artificial Sequence
  Description of Artificial Sequence: Synthetic peptide
  Seed: LRMKWMMAMKYPITA
LRMKLMMFMKYPSTA

SEQ ID NO: 232749 - protein, 15 aa, Artificial Sequence
  Description of Artificial Sequence: Synthetic peptide
  Seed: LRMKWMMAMKYPITA
LRMKLMMFMKYPTTA

SEQ ID NO: 232750 - protein, 15 aa, Artificial Sequence
  Description of Artificial Sequence: Synthetic peptide
  Seed: LRMKWMMAMKYPITA
LRMKLMMFMKYPVTA

SEQ ID NO: 232751 - protein, 15 aa, Artificial Sequence
  Description of Artificial Sequence: Synthetic peptide
  Seed: LRMKWMMAMKYPITA
LRMKLMMFMKYPYTA

SEQ ID NO: 232752 - protein, 15 aa, Artificial Sequence
  Description of Artificial Sequence: Synthetic peptide
  Seed: LRMKWMMAMKYPITA
LRMKLMMFMNYPATA

SEQ ID NO: 232753 - protein, 15 aa, Artificial Sequence
  Description of Artificial Sequence: Synthetic peptide
  Seed: LRMKWMMAMKYPITA
LRMKLMMFMNYPDTA

SEQ ID NO: 232754 - protein, 15 aa, Artificial Sequence
  Description of Artificial Sequence: Synthetic peptide
  Seed: LRMKWMMAMKYPITA
LRMKLMMFMNYPETA

SEQ ID NO: 232755 - protein, 15 aa, Artificial Sequence
  Description of Artificial Sequence: Synthetic peptide
  Seed: LRMKWMMAMKYPITA
LRMKLMMFMNYPGTA

SEQ ID NO: 232756 - protein, 15 aa, Artificial Sequence
  Description of Artificial Sequence: Synthetic peptide
  Seed: LRMKWMMAMKYPITA
LRMKLMMFMNYPHTA

SEQ ID NO: 232757 - protein, 15 aa, Artificial Sequence
  Description of Artificial Sequence: Synthetic peptide
  Seed: LRMKWMMAMKYPITA
LRMKLMMFMNYPITA

SEQ ID NO: 232758 - protein, 15 aa, Artificial Sequence
  Description of Artificial Sequence: Synthetic peptide
  Seed: LRMKWMMAMKYPITA
LRMKLMMFMNYPLTA

SEQ ID NO: 232759 - protein, 15 aa, Artificial Sequence
  Description of Artificial Sequence: Synthetic peptide
  Seed: LRMKWMMAMKYPITA
LRMKLMMFMNYPMTA

SEQ ID NO: 232760 - protein, 15 aa, Artificial Sequence
  Description of Artificial Sequence: Synthetic peptide
  Seed: LRMKWMMAMKYPITA
LRMKLMMFMNYPQTA

SEQ ID NO: 232761 - protein, 15 aa, Artificial Sequence
  Description of Artificial Sequence: Synthetic peptide
  Seed: LRMKWMMAMKYPITA
LRMKLMMFMNYPRTA

SEQ ID NO: 232762 - protein, 15 aa, Artificial Sequence
  Description of Artificial Sequence: Synthetic peptide
  Seed: LRMKWMMAMKYPITA
LRMKLMMFMNYPSTA

SEQ ID NO: 232763 - protein, 15 aa, Artificial Sequence
  Description of Artificial Sequence: Synthetic peptide
  Seed: LRMKWMMAMKYPITA
LRMKLMMFMNYPTTA

SEQ ID NO: 232764 - protein, 15 aa, Artificial Sequence
  Description of Artificial Sequence: Synthetic peptide
  Seed: LRMKWMMAMKYPITA
LRMKLMMFMNYPVTA

SEQ ID NO: 232765 - protein, 15 aa, Artificial Sequence
  Description of Artificial Sequence: Synthetic peptide
  Seed: LRMKWMMAMKYPITA
LRMKLMMFMNYPYTA

SEQ ID NO: 232766 - protein, 15 aa, Artificial Sequence
  Description of Artificial Sequence: Synthetic peptide
  Seed: LRMKWMMAMKYPITA
LRMKLMMFMPYPATA

SEQ ID NO: 232767 - protein, 15 aa, Artificial Sequence
  Description of Artificial Sequence: Synthetic peptide
  Seed: LRMKWMMAMKYPITA
LRMKLMMFMPYPFTA

SEQ ID NO: 232768 - protein, 15 aa, Artificial Sequence
  Description of Artificial Sequence: Synthetic peptide
  Seed: LRMKWMMAMKYPITA
LRMKLMMFMPYPGTA

SEQ ID NO: 232769 - protein, 15 aa, Artificial Sequence
  Description of Artificial Sequence: Synthetic peptide
  Seed: LRMKWMMAMKYPITA
LRMKLMMFMPYPHTA

SEQ ID NO: 232770 - protein, 15 aa, Artificial Sequence
  Description of Artificial Sequence: Synthetic peptide
  Seed: LRMKWMMAMKYPITA
LRMKLMMFMPYPITA

SEQ ID NO: 232771 - protein, 15 aa, Artificial Sequence
  Description of Artificial Sequence: Synthetic peptide
  Seed: LRMKWMMAMKYPITA
LRMKLMMFMPYPKTA

SEQ ID NO: 232772 - protein, 15 aa, Artificial Sequence
  Description of Artificial Sequence: Synthetic peptide
  Seed: LRMKWMMAMKYPITA
LRMKLMMFMPYPLTA

SEQ ID NO: 232773 - protein, 15 aa, Artificial Sequence
  Description of Artificial Sequence: Synthetic peptide
  Seed: LRMKWMMAMKYPITA
LRMKLMMFMPYPMTA

SEQ ID NO: 232774 - protein, 15 aa, Artificial Sequence
  Description of Artificial Sequence: Synthetic peptide
  Seed: LRMKWMMAMKYPITA
LRMKLMMFMPYPNTA

SEQ ID NO: 232775 - protein, 15 aa, Artificial Sequence
  Description of Artificial Sequence: Synthetic peptide
  Seed: LRMKWMMAMKYPITA
LRMKLMMFMPYPQTA

SEQ ID NO: 232776 - protein, 15 aa, Artificial Sequence
  Description of Artificial Sequence: Synthetic peptide
  Seed: LRMKWMMAMKYPITA
LRMKLMMFMPYPRTA

SEQ ID NO: 232777 - protein, 15 aa, Artificial Sequence
  Description of Artificial Sequence: Synthetic peptide
  Seed: LRMKWMMAMKYPITA
LRMKLMMFMPYPSTA

SEQ ID NO: 232778 - protein, 15 aa, Artificial Sequence
  Description of Artificial Sequence: Synthetic peptide
  Seed: LRMKWMMAMKYPITA
LRMKLMMFMPYPTTA

SEQ ID NO: 232779 - protein, 15 aa, Artificial Sequence
  Description of Artificial Sequence: Synthetic peptide
  Seed: LRMKWMMAMKYPITA
LRMKLMMFMPYPVTA

SEQ ID NO: 232780 - protein, 15 aa, Artificial Sequence
  Description of Artificial Sequence: Synthetic peptide
  Seed: LRMKWMMAMKYPITA
LRMKLMMFMPYPYTA

SEQ ID NO: 232781 - protein, 15 aa, Artificial Sequence
  Description of Artificial Sequence: Synthetic peptide
  Seed: LRMKWMMAMKYPITA
LRMKLMMFMRYPATA

SEQ ID NO: 232782 - protein, 15 aa, Artificial Sequence
  Description of Artificial Sequence: Synthetic peptide
  Seed: LRMKWMMAMKYPITA
LRMKLMMFMRYPDTA

SEQ ID NO: 232783 - protein, 15 aa, Artificial Sequence
  Description of Artificial Sequence: Synthetic peptide
  Seed: LRMKWMMAMKYPITA
LRMKLMMFMRYPETA

SEQ ID NO: 232784 - protein, 15 aa, Artificial Sequence
  Description of Artificial Sequence: Synthetic peptide
  Seed: LRMKWMMAMKYPITA
LRMKLMMFMRYPFTA

SEQ ID NO: 232785 - protein, 15 aa, Artificial Sequence
  Description of Artificial Sequence: Synthetic peptide
  Seed: LRMKWMMAMKYPITA
LRMKLMMFMRYPGTA

SEQ ID NO: 232786 - protein, 15 aa, Artificial Sequence
  Description of Artificial Sequence: Synthetic peptide
  Seed: LRMKWMMAMKYPITA
LRMKLMMFMRYPHTA

SEQ ID NO: 232787 - protein, 15 aa, Artificial Sequence
  Description of Artificial Sequence: Synthetic peptide
  Seed: LRMKWMMAMKYPITA
LRMKLMMFMRYPITA

SEQ ID NO: 232788 - protein, 15 aa, Artificial Sequence
  Description of Artificial Sequence: Synthetic peptide
  Seed: LRMKWMMAMKYPITA
LRMKLMMFMRYPKTA

SEQ ID NO: 232789 - protein, 15 aa, Artificial Sequence
  Description of Artificial Sequence: Synthetic peptide
  Seed: LRMKWMMAMKYPITA
LRMKLMMFMRYPLTA

SEQ ID NO: 232790 - protein, 15 aa, Artificial Sequence
  Description of Artificial Sequence: Synthetic peptide
  Seed: LRMKWMMAMKYPITA
LRMKLMMFMRYPMTA

SEQ ID NO: 232791 - protein, 15 aa, Artificial Sequence
  Description of Artificial Sequence: Synthetic peptide
  Seed: LRMKWMMAMKYPITA
LRMKLMMFMRYPNTA

SEQ ID NO: 232792 - protein, 15 aa, Artificial Sequence
  Description of Artificial Sequence: Synthetic peptide
  Seed: LRMKWMMAMKYPITA
LRMKLMMFMRYPPTA

SEQ ID NO: 232793 - protein, 15 aa, Artificial Sequence
  Description of Artificial Sequence: Synthetic peptide
  Seed: LRMKWMMAMKYPITA
LRMKLMMFMRYPQTA

SEQ ID NO: 232794 - protein, 15 aa, Artificial Sequence
  Description of Artificial Sequence: Synthetic peptide
  Seed: LRMKWMMAMKYPITA
LRMKLMMFMRYPRTA

SEQ ID NO: 232795 - protein, 15 aa, Artificial Sequence
  Description of Artificial Sequence: Synthetic peptide
  Seed: LRMKWMMAMKYPITA
LRMKLMMFMRYPSTA

SEQ ID NO: 232796 - protein, 15 aa, Artificial Sequence
  Description of Artificial Sequence: Synthetic peptide
  Seed: LRMKWMMAMKYPITA
LRMKLMMFMRYPTTA

SEQ ID NO: 232797 - protein, 15 aa, Artificial Sequence
  Description of Artificial Sequence: Synthetic peptide
  Seed: LRMKWMMAMKYPITA
LRMKLMMFMRYPVTA

SEQ ID NO: 232798 - protein, 15 aa, Artificial Sequence
  Description of Artificial Sequence: Synthetic peptide
  Seed: LRMKWMMAMKYPITA
LRMKLMMFMRYPYTA

SEQ ID NO: 232799 - protein, 15 aa, Artificial Sequence
  Description of Artificial Sequence: Synthetic peptide
  Seed: LRMKWMMAMKYPITA
LRMKLMMFMSYPATA

SEQ ID NO: 232800 - protein, 15 aa, Artificial Sequence
  Description of Artificial Sequence: Synthetic peptide
  Seed: LRMKWMMAMKYPITA
LRMKLMMFMSYPDTA

SEQ ID NO: 232801 - protein, 15 aa, Artificial Sequence
  Description of Artificial Sequence: Synthetic peptide
  Seed: LRMKWMMAMKYPITA
LRMKLMMFMSYPETA

SEQ ID NO: 232802 - protein, 15 aa, Artificial Sequence
  Description of Artificial Sequence: Synthetic peptide
  Seed: LRMKWMMAMKYPITA
LRMKLMMFMSYPGTA

SEQ ID NO: 232803 - protein, 15 aa, Artificial Sequence
  Description of Artificial Sequence: Synthetic peptide
  Seed: LRMKWMMAMKYPITA
LRMKLMMFMSYPHTA

SEQ ID NO: 232804 - protein, 15 aa, Artificial Sequence
  Description of Artificial Sequence: Synthetic peptide
  Seed: LRMKWMMAMKYPITA
LRMKLMMFMSYPITA

SEQ ID NO: 232805 - protein, 15 aa, Artificial Sequence
  Description of Artificial Sequence: Synthetic peptide
  Seed: LRMKWMMAMKYPITA
LRMKLMMFMSYPKTA

SEQ ID NO: 232806 - protein, 15 aa, Artificial Sequence
  Description of Artificial Sequence: Synthetic peptide
  Seed: LRMKWMMAMKYPITA
LRMKLMMFMSYPLTA

SEQ ID NO: 232807 - protein, 15 aa, Artificial Sequence
  Description of Artificial Sequence: Synthetic peptide
  Seed: LRMKWMMAMKYPITA
LRMKLMMFMSYPMTA

SEQ ID NO: 232808 - protein, 15 aa, Artificial Sequence
  Description of Artificial Sequence: Synthetic peptide
  Seed: LRMKWMMAMKYPITA
LRMKLMMFMSYPNTA

SEQ ID NO: 232809 - protein, 15 aa, Artificial Sequence
  Description of Artificial Sequence: Synthetic peptide
  Seed: LRMKWMMAMKYPITA
LRMKLMMFMSYPQTA

SEQ ID NO: 232810 - protein, 15 aa, Artificial Sequence
  Description of Artificial Sequence: Synthetic peptide
  Seed: LRMKWMMAMKYPITA
LRMKLMMFMSYPRTA

SEQ ID NO: 232811 - protein, 15 aa, Artificial Sequence
  Description of Artificial Sequence: Synthetic peptide
  Seed: LRMKWMMAMKYPITA
LRMKLMMFMSYPSTA

SEQ ID NO: 232812 - protein, 15 aa, Artificial Sequence
  Description of Artificial Sequence: Synthetic peptide
  Seed: LRMKWMMAMKYPITA
LRMKLMMFMSYPTTA

SEQ ID NO: 232813 - protein, 15 aa, Artificial Sequence
  Description of Artificial Sequence: Synthetic peptide
  Seed: LRMKWMMAMKYPITA
LRMKLMMFMSYPVTA

SEQ ID NO: 232814 - protein, 15 aa, Artificial Sequence
  Description of Artificial Sequence: Synthetic peptide
  Seed: LRMKWMMAMKYPITA
LRMKLMMFMSYPYTA

SEQ ID NO: 232815 - protein, 15 aa, Artificial Sequence
  Description of Artificial Sequence: Synthetic peptide
  Seed: LRMKWMMAMKYPITA
LRMKLMMFMTYPATA

SEQ ID NO: 232816 - protein, 15 aa, Artificial Sequence
  Description of Artificial Sequence: Synthetic peptide
  Seed: LRMKWMMAMKYPITA
LRMKLMMFMTYPDTA

SEQ ID NO: 232817 - protein, 15 aa, Artificial Sequence
  Description of Artificial Sequence: Synthetic peptide
  Seed: LRMKWMMAMKYPITA
LRMKLMMFMTYPETA

SEQ ID NO: 232818 - protein, 15 aa, Artificial Sequence
  Description of Artificial Sequence: Synthetic peptide
  Seed: LRMKWMMAMKYPITA
LRMKLMMFMTYPGTA

SEQ ID NO: 232819 - protein, 15 aa, Artificial Sequence
  Description of Artificial Sequence: Synthetic peptide
  Seed: LRMKWMMAMKYPITA
LRMKLMMFMTYPHTA

SEQ ID NO: 232820 - protein, 15 aa, Artificial Sequence
  Description of Artificial Sequence: Synthetic peptide
  Seed: LRMKWMMAMKYPITA
LRMKLMMFMTYPITA

SEQ ID NO: 232821 - protein, 15 aa, Artificial Sequence
  Description of Artificial Sequence: Synthetic peptide
  Seed: LRMKWMMAMKYPITA
LRMKLMMFMTYPKTA

SEQ ID NO: 232822 - protein, 15 aa, Artificial Sequence
  Description of Artificial Sequence: Synthetic peptide
  Seed: LRMKWMMAMKYPITA
LRMKLMMFMTYPLTA

SEQ ID NO: 232823 - protein, 15 aa, Artificial Sequence
  Description of Artificial Sequence: Synthetic peptide
  Seed: LRMKWMMAMKYPITA
LRMKLMMFMTYPMTA

SEQ ID NO: 232824 - protein, 15 aa, Artificial Sequence
  Description of Artificial Sequence: Synthetic peptide
  Seed: LRMKWMMAMKYPITA
LRMKLMMFMTYPNTA

SEQ ID NO: 232825 - protein, 15 aa, Artificial Sequence
  Description of Artificial Sequence: Synthetic peptide
  Seed: LRMKWMMAMKYPITA
LRMKLMMFMTYPQTA

SEQ ID NO: 232826 - protein, 15 aa, Artificial Sequence
  Description of Artificial Sequence: Synthetic peptide
  Seed: LRMKWMMAMKYPITA
LRMKLMMFMTYPRTA

SEQ ID NO: 232827 - protein, 15 aa, Artificial Sequence
  Description of Artificial Sequence: Synthetic peptide
  Seed: LRMKWMMAMKYPITA
LRMKLMMFMTYPSTA

SEQ ID NO: 232828 - protein, 15 aa, Artificial Sequence
  Description of Artificial Sequence: Synthetic peptide
  Seed: LRMKWMMAMKYPITA
LRMKLMMFMTYPTTA

SEQ ID NO: 232829 - protein, 15 aa, Artificial Sequence
  Description of Artificial Sequence: Synthetic peptide
  Seed: LRMKWMMAMKYPITA
LRMKLMMFMTYPVTA

SEQ ID NO: 232830 - protein, 15 aa, Artificial Sequence
  Description of Artificial Sequence: Synthetic peptide
  Seed: LRMKWMMAMKYPITA
LRMKLMMFMTYPYTA

SEQ ID NO: 232831 - protein, 15 aa, Artificial Sequence
  Description of Artificial Sequence: Synthetic peptide
  Seed: LRMKWMMAMKYPITA
LRMKLMMFMVYPATA

SEQ ID NO: 232832 - protein, 15 aa, Artificial Sequence
  Description of Artificial Sequence: Synthetic peptide
  Seed: LRMKWMMAMKYPITA
LRMKLMMFMVYPDTA

SEQ ID NO: 232833 - protein, 15 aa, Artificial Sequence
  Description of Artificial Sequence: Synthetic peptide
  Seed: LRMKWMMAMKYPITA
LRMKLMMFMVYPETA

SEQ ID NO: 232834 - protein, 15 aa, Artificial Sequence
  Description of Artificial Sequence: Synthetic peptide
  Seed: LRMKWMMAMKYPITA
LRMKLMMFMVYPHTA

SEQ ID NO: 232835 - protein, 15 aa, Artificial Sequence
  Description of Artificial Sequence: Synthetic peptide
  Seed: LRMKWMMAMKYPITA
LRMKLMMFMVYPMTA

SEQ ID NO: 232836 - protein, 15 aa, Artificial Sequence
  Description of Artificial Sequence: Synthetic peptide
  Seed: LRMKWMMAMKYPITA
LRMKLMMFMVYPNTA

SEQ ID NO: 232837 - protein, 15 aa, Artificial Sequence
  Description of Artificial Sequence: Synthetic peptide
  Seed: LRMKWMMAMKYPITA
LRMKLMMFMVYPQTA

SEQ ID NO: 232838 - protein, 15 aa, Artificial Sequence
  Description of Artificial Sequence: Synthetic peptide
  Seed: LRMKWMMAMKYPITA
LRMKLMMFMVYPRTA

SEQ ID NO: 232839 - protein, 15 aa, Artificial Sequence
  Description of Artificial Sequence: Synthetic peptide
  Seed: LRMKWMMAMKYPITA
LRMKLMMFMVYPSTA

SEQ ID NO: 232840 - protein, 15 aa, Artificial Sequence
  Description of Artificial Sequence: Synthetic peptide
  Seed: LRMKWMMAMKYPITA
LRMKLMMGMAYPATA

SEQ ID NO: 232841 - protein, 15 aa, Artificial Sequence
  Description of Artificial Sequence: Synthetic peptide
  Seed: LRMKWMMAMKYPITA
LRMKLMMGMAYPCTA

SEQ ID NO: 232842 - protein, 15 aa, Artificial Sequence
  Description of Artificial Sequence: Synthetic peptide
  Seed: LRMKWMMAMKYPITA
LRMKLMMGMAYPDTA

SEQ ID NO: 232843 - protein, 15 aa, Artificial Sequence
  Description of Artificial Sequence: Synthetic peptide
  Seed: LRMKWMMAMKYPITA
LRMKLMMGMAYPFTA

SEQ ID NO: 232844 - protein, 15 aa, Artificial Sequence
  Description of Artificial Sequence: Synthetic peptide
  Seed: LRMKWMMAMKYPITA
LRMKLMMGMAYPGTA

SEQ ID NO: 232845 - protein, 15 aa, Artificial Sequence
  Description of Artificial Sequence: Synthetic peptide
  Seed: LRMKWMMAMKYPITA
LRMKLMMGMAYPHTA

SEQ ID NO: 232846 - protein, 15 aa, Artificial Sequence
  Description of Artificial Sequence: Synthetic peptide
  Seed: LRMKWMMAMKYPITA
LRMKLMMGMAYPITA

SEQ ID NO: 232847 - protein, 15 aa, Artificial Sequence
  Description of Artificial Sequence: Synthetic peptide
  Seed: LRMKWMMAMKYPITA
LRMKLMMGMAYPKTA

SEQ ID NO: 232848 - protein, 15 aa, Artificial Sequence
  Description of Artificial Sequence: Synthetic peptide
  Seed: LRMKWMMAMKYPITA
LRMKLMMGMAYPLTA

SEQ ID NO: 232849 - protein, 15 aa, Artificial Sequence
  Description of Artificial Sequence: Synthetic peptide
  Seed: LRMKWMMAMKYPITA
LRMKLMMGMAYPMTA

SEQ ID NO: 232850 - protein, 15 aa, Artificial Sequence
  Description of Artificial Sequence: Synthetic peptide
  Seed: LRMKWMMAMKYPITA
LRMKLMMGMAYPNTA

SEQ ID NO: 232851 - protein, 15 aa, Artificial Sequence
  Description of Artificial Sequence: Synthetic peptide
  Seed: LRMKWMMAMKYPITA
LRMKLMMGMAYPPTA

SEQ ID NO: 232852 - protein, 15 aa, Artificial Sequence
  Description of Artificial Sequence: Synthetic peptide
  Seed: LRMKWMMAMKYPITA
LRMKLMMGMAYPQTA

SEQ ID NO: 232853 - protein, 15 aa, Artificial Sequence
  Description of Artificial Sequence: Synthetic peptide
  Seed: LRMKWMMAMKYPITA
LRMKLMMGMAYPRTA

SEQ ID NO: 232854 - protein, 15 aa, Artificial Sequence
  Description of Artificial Sequence: Synthetic peptide
  Seed: LRMKWMMAMKYPITA
LRMKLMMGMAYPSTA

SEQ ID NO: 232855 - protein, 15 aa, Artificial Sequence
  Description of Artificial Sequence: Synthetic peptide
  Seed: LRMKWMMAMKYPITA
LRMKLMMGMAYPTTA

SEQ ID NO: 232856 - protein, 15 aa, Artificial Sequence
  Description of Artificial Sequence: Synthetic peptide
  Seed: LRMKWMMAMKYPITA
LRMKLMMGMAYPVTA

SEQ ID NO: 232857 - protein, 15 aa, Artificial Sequence
  Description of Artificial Sequence: Synthetic peptide
  Seed: LRMKWMMAMKYPITA
LRMKLMMGMAYPWTA

SEQ ID NO: 232858 - protein, 15 aa, Artificial Sequence
  Description of Artificial Sequence: Synthetic peptide
  Seed: LRMKWMMAMKYPITA
LRMKLMMGMAYPYTA

SEQ ID NO: 232859 - protein, 15 aa, Artificial Sequence
  Description of Artificial Sequence: Synthetic peptide
  Seed: LRMKWMMAMKYPITA
LRMKLMMGMCYPATA

SEQ ID NO: 232860 - protein, 15 aa, Artificial Sequence
  Description of Artificial Sequence: Synthetic peptide
  Seed: LRMKWMMAMKYPITA
LRMKLMMGMCYPITA

SEQ ID NO: 232861 - protein, 15 aa, Artificial Sequence
  Description of Artificial Sequence: Synthetic peptide
  Seed: LRMKWMMAMKYPITA
LRMKLMMGMCYPLTA

SEQ ID NO: 232862 - protein, 15 aa, Artificial Sequence
  Description of Artificial Sequence: Synthetic peptide
  Seed: LRMKWMMAMKYPITA
LRMKLMMGMCYPVTA

SEQ ID NO: 232863 - protein, 15 aa, Artificial Sequence
  Description of Artificial Sequence: Synthetic peptide
  Seed: LRMKWMMAMKYPITA
LRMKLMMGMEYPLTA

SEQ ID NO: 232864 - protein, 15 aa, Artificial Sequence
  Description of Artificial Sequence: Synthetic peptide
  Seed: LRMKWMMAMKYPITA
LRMKLMMGMGYPATA

SEQ ID NO: 232865 - protein, 15 aa, Artificial Sequence
  Description of Artificial Sequence: Synthetic peptide
  Seed: LRMKWMMAMKYPITA
LRMKLMMGMGYPCTA

SEQ ID NO: 232866 - protein, 15 aa, Artificial Sequence
  Description of Artificial Sequence: Synthetic peptide
  Seed: LRMKWMMAMKYPITA
LRMKLMMGMGYPFTA

SEQ ID NO: 232867 - protein, 15 aa, Artificial Sequence
  Description of Artificial Sequence: Synthetic peptide
  Seed: LRMKWMMAMKYPITA
LRMKLMMGMGYPGTA

SEQ ID NO: 232868 - protein, 15 aa, Artificial Sequence
  Description of Artificial Sequence: Synthetic peptide
  Seed: LRMKWMMAMKYPITA
LRMKLMMGMGYPHTA

SEQ ID NO: 232869 - protein, 15 aa, Artificial Sequence
  Description of Artificial Sequence: Synthetic peptide
  Seed: LRMKWMMAMKYPITA
LRMKLMMGMGYPITA

SEQ ID NO: 232870 - protein, 15 aa, Artificial Sequence
  Description of Artificial Sequence: Synthetic peptide
  Seed: LRMKWMMAMKYPITA
LRMKLMMGMGYPLTA

SEQ ID NO: 232871 - protein, 15 aa, Artificial Sequence
  Description of Artificial Sequence: Synthetic peptide
  Seed: LRMKWMMAMKYPITA
LRMKLMMGMGYPMTA

SEQ ID NO: 232872 - protein, 15 aa, Artificial Sequence
  Description of Artificial Sequence: Synthetic peptide
  Seed: LRMKWMMAMKYPITA
LRMKLMMGMGYPNTA

SEQ ID NO: 232873 - protein, 15 aa, Artificial Sequence
  Description of Artificial Sequence: Synthetic peptide
  Seed: LRMKWMMAMKYPITA
LRMKLMMGMGYPQTA

SEQ ID NO: 232874 - protein, 15 aa, Artificial Sequence
  Description of Artificial Sequence: Synthetic peptide
  Seed: LRMKWMMAMKYPITA
LRMKLMMGMGYPRTA

SEQ ID NO: 232875 - protein, 15 aa, Artificial Sequence
  Description of Artificial Sequence: Synthetic peptide
  Seed: LRMKWMMAMKYPITA
LRMKLMMGMGYPSTA

SEQ ID NO: 232876 - protein, 15 aa, Artificial Sequence
  Description of Artificial Sequence: Synthetic peptide
  Seed: LRMKWMMAMKYPITA
LRMKLMMGMGYPTTA

SEQ ID NO: 232877 - protein, 15 aa, Artificial Sequence
  Description of Artificial Sequence: Synthetic peptide
  Seed: LRMKWMMAMKYPITA
LRMKLMMGMGYPVTA

SEQ ID NO: 232878 - protein, 15 aa, Artificial Sequence
  Description of Artificial Sequence: Synthetic peptide
  Seed: LRMKWMMAMKYPITA
LRMKLMMGMGYPYTA

SEQ ID NO: 232879 - protein, 15 aa, Artificial Sequence
  Description of Artificial Sequence: Synthetic peptide
  Seed: LRMKWMMAMKYPITA
LRMKLMMGMHYPFTA

SEQ ID NO: 232880 - protein, 15 aa, Artificial Sequence
  Description of Artificial Sequence: Synthetic peptide
  Seed: LRMKWMMAMKYPITA
LRMKLMMGMHYPRTA

SEQ ID NO: 232881 - protein, 15 aa, Artificial Sequence
  Description of Artificial Sequence: Synthetic peptide
  Seed: LRMKWMMAMKYPITA
LRMKLMMGMHYPYTA

SEQ ID NO: 232882 - protein, 15 aa, Artificial Sequence
  Description of Artificial Sequence: Synthetic peptide
  Seed: LRMKWMMAMKYPITA
LRMKLMMGMIYPATA

SEQ ID NO: 232883 - protein, 15 aa, Artificial Sequence
  Description of Artificial Sequence: Synthetic peptide
  Seed: LRMKWMMAMKYPITA
LRMKLMMGMIYPGTA

SEQ ID NO: 232884 - protein, 15 aa, Artificial Sequence
  Description of Artificial Sequence: Synthetic peptide
  Seed: LRMKWMMAMKYPITA
LRMKLMMGMIYPITA

SEQ ID NO: 232885 - protein, 15 aa, Artificial Sequence
  Description of Artificial Sequence: Synthetic peptide
  Seed: LRMKWMMAMKYPITA
LRMKLMMGMIYPLTA

SEQ ID NO: 232886 - protein, 15 aa, Artificial Sequence
  Description of Artificial Sequence: Synthetic peptide
  Seed: LRMKWMMAMKYPITA
LRMKLMMGMIYPMTA

SEQ ID NO: 232887 - protein, 15 aa, Artificial Sequence
  Description of Artificial Sequence: Synthetic peptide
  Seed: LRMKWMMAMKYPITA
LRMKLMMGMIYPNTA

SEQ ID NO: 232888 - protein, 15 aa, Artificial Sequence
  Description of Artificial Sequence: Synthetic peptide
  Seed: LRMKWMMAMKYPITA
LRMKLMMGMIYPQTA

SEQ ID NO: 232889 - protein, 15 aa, Artificial Sequence
  Description of Artificial Sequence: Synthetic peptide
  Seed: LRMKWMMAMKYPITA
LRMKLMMGMIYPSTA

SEQ ID NO: 232890 - protein, 15 aa, Artificial Sequence
  Description of Artificial Sequence: Synthetic peptide
  Seed: LRMKWMMAMKYPITA
LRMKLMMGMIYPTTA

SEQ ID NO: 232891 - protein, 15 aa, Artificial Sequence
  Description of Artificial Sequence: Synthetic peptide
  Seed: LRMKWMMAMKYPITA
LRMKLMMGMIYPVTA

SEQ ID NO: 232892 - protein, 15 aa, Artificial Sequence
  Description of Artificial Sequence: Synthetic peptide
  Seed: LRMKWMMAMKYPITA
LRMKLMMGMKYPATA

SEQ ID NO: 232893 - protein, 15 aa, Artificial Sequence
  Description of Artificial Sequence: Synthetic peptide
  Seed: LRMKWMMAMKYPITA
LRMKLMMGMKYPFTA

SEQ ID NO: 232894 - protein, 15 aa, Artificial Sequence
  Description of Artificial Sequence: Synthetic peptide
  Seed: LRMKWMMAMKYPITA
LRMKLMMGMKYPGTA

SEQ ID NO: 232895 - protein, 15 aa, Artificial Sequence
  Description of Artificial Sequence: Synthetic peptide
  Seed: LRMKWMMAMKYPITA
LRMKLMMGMKYPHTA

SEQ ID NO: 232896 - protein, 15 aa, Artificial Sequence
  Description of Artificial Sequence: Synthetic peptide
  Seed: LRMKWMMAMKYPITA
LRMKLMMGMKYPITA

SEQ ID NO: 232897 - protein, 15 aa, Artificial Sequence
  Description of Artificial Sequence: Synthetic peptide
  Seed: LRMKWMMAMKYPITA
LRMKLMMGMKYPKTA

SEQ ID NO: 232898 - protein, 15 aa, Artificial Sequence
  Description of Artificial Sequence: Synthetic peptide
  Seed: LRMKWMMAMKYPITA
LRMKLMMGMKYPLTA

SEQ ID NO: 232899 - protein, 15 aa, Artificial Sequence
  Description of Artificial Sequence: Synthetic peptide
  Seed: LRMKWMMAMKYPITA
LRMKLMMGMKYPMTA

SEQ ID NO: 232900 - protein, 15 aa, Artificial Sequence
  Description of Artificial Sequence: Synthetic peptide
  Seed: LRMKWMMAMKYPITA
LRMKLMMGMKYPQTA

SEQ ID NO: 232901 - protein, 15 aa, Artificial Sequence
  Description of Artificial Sequence: Synthetic peptide
  Seed: LRMKWMMAMKYPITA
LRMKLMMGMKYPRTA

SEQ ID NO: 232902 - protein, 15 aa, Artificial Sequence
  Description of Artificial Sequence: Synthetic peptide
  Seed: LRMKWMMAMKYPITA
LRMKLMMGMKYPSTA

SEQ ID NO: 232903 - protein, 15 aa, Artificial Sequence
  Description of Artificial Sequence: Synthetic peptide
  Seed: LRMKWMMAMKYPITA
LRMKLMMGMKYPTTA

SEQ ID NO: 232904 - protein, 15 aa, Artificial Sequence
  Description of Artificial Sequence: Synthetic peptide
  Seed: LRMKWMMAMKYPITA
LRMKLMMGMKYPVTA

SEQ ID NO: 232905 - protein, 15 aa, Artificial Sequence
  Description of Artificial Sequence: Synthetic peptide
  Seed: LRMKWMMAMKYPITA
LRMKLMMGMKYPYTA

SEQ ID NO: 232906 - protein, 15 aa, Artificial Sequence
  Description of Artificial Sequence: Synthetic peptide
  Seed: LRMKWMMAMKYPITA
LRMKLMMGMMYPVTA

SEQ ID NO: 232907 - protein, 15 aa, Artificial Sequence
  Description of Artificial Sequence: Synthetic peptide
  Seed: LRMKWMMAMKYPITA
LRMKLMMGMNYPATA

SEQ ID NO: 232908 - protein, 15 aa, Artificial Sequence
  Description of Artificial Sequence: Synthetic peptide
  Seed: LRMKWMMAMKYPITA
LRMKLMMGMNYPCTA

SEQ ID NO: 232909 - protein, 15 aa, Artificial Sequence
  Description of Artificial Sequence: Synthetic peptide
  Seed: LRMKWMMAMKYPITA
LRMKLMMGMNYPGTA

SEQ ID NO: 232910 - protein, 15 aa, Artificial Sequence
  Description of Artificial Sequence: Synthetic peptide
  Seed: LRMKWMMAMKYPITA
LRMKLMMGMNYPITA

SEQ ID NO: 232911 - protein, 15 aa, Artificial Sequence
  Description of Artificial Sequence: Synthetic peptide
  Seed: LRMKWMMAMKYPITA
LRMKLMMGMNYPLTA

SEQ ID NO: 232912 - protein, 15 aa, Artificial Sequence
  Description of Artificial Sequence: Synthetic peptide
  Seed: LRMKWMMAMKYPITA
LRMKLMMGMNYPMTA

SEQ ID NO: 232913 - protein, 15 aa, Artificial Sequence
  Description of Artificial Sequence: Synthetic peptide
  Seed: LRMKWMMAMKYPITA
LRMKLMMGMNYPSTA

SEQ ID NO: 232914 - protein, 15 aa, Artificial Sequence
  Description of Artificial Sequence: Synthetic peptide
  Seed: LRMKWMMAMKYPITA
LRMKLMMGMNYPTTA

SEQ ID NO: 232915 - protein, 15 aa, Artificial Sequence
  Description of Artificial Sequence: Synthetic peptide
  Seed: LRMKWMMAMKYPITA
LRMKLMMGMNYPVTA

SEQ ID NO: 232916 - protein, 15 aa, Artificial Sequence
  Description of Artificial Sequence: Synthetic peptide
  Seed: LRMKWMMAMKYPITA
LRMKLMMGMNYPYTA

SEQ ID NO: 232917 - protein, 15 aa, Artificial Sequence
  Description of Artificial Sequence: Synthetic peptide
  Seed: LRMKWMMAMKYPITA
LRMKLMMGMPYPATA

SEQ ID NO: 232918 - protein, 15 aa, Artificial Sequence
  Description of Artificial Sequence: Synthetic peptide
  Seed: LRMKWMMAMKYPITA
LRMKLMMGMPYPCTA

SEQ ID NO: 232919 - protein, 15 aa, Artificial Sequence
  Description of Artificial Sequence: Synthetic peptide
  Seed: LRMKWMMAMKYPITA
LRMKLMMGMPYPFTA

SEQ ID NO: 232920 - protein, 15 aa, Artificial Sequence
  Description of Artificial Sequence: Synthetic peptide
  Seed: LRMKWMMAMKYPITA
LRMKLMMGMPYPGTA

SEQ ID NO: 232921 - protein, 15 aa, Artificial Sequence
  Description of Artificial Sequence: Synthetic peptide
  Seed: LRMKWMMAMKYPITA
LRMKLMMGMPYPITA

SEQ ID NO: 232922 - protein, 15 aa, Artificial Sequence
  Description of Artificial Sequence: Synthetic peptide
  Seed: LRMKWMMAMKYPITA
LRMKLMMGMPYPLTA

SEQ ID NO: 232923 - protein, 15 aa, Artificial Sequence
  Description of Artificial Sequence: Synthetic peptide
  Seed: LRMKWMMAMKYPITA
LRMKLMMGMPYPMTA

SEQ ID NO: 232924 - protein, 15 aa, Artificial Sequence
  Description of Artificial Sequence: Synthetic peptide
  Seed: LRMKWMMAMKYPITA
LRMKLMMGMPYPNTA

SEQ ID NO: 232925 - protein, 15 aa, Artificial Sequence
  Description of Artificial Sequence: Synthetic peptide
  Seed: LRMKWMMAMKYPITA
LRMKLMMGMPYPQTA

SEQ ID NO: 232926 - protein, 15 aa, Artificial Sequence
  Description of Artificial Sequence: Synthetic peptide
  Seed: LRMKWMMAMKYPITA
LRMKLMMGMPYPRTA

SEQ ID NO: 232927 - protein, 15 aa, Artificial Sequence
  Description of Artificial Sequence: Synthetic peptide
  Seed: LRMKWMMAMKYPITA
LRMKLMMGMPYPSTA

SEQ ID NO: 232928 - protein, 15 aa, Artificial Sequence
  Description of Artificial Sequence: Synthetic peptide
  Seed: LRMKWMMAMKYPITA
LRMKLMMGMPYPTTA

SEQ ID NO: 232929 - protein, 15 aa, Artificial Sequence
  Description of Artificial Sequence: Synthetic peptide
  Seed: LRMKWMMAMKYPITA
LRMKLMMGMPYPVTA

SEQ ID NO: 232930 - protein, 15 aa, Artificial Sequence
  Description of Artificial Sequence: Synthetic peptide
  Seed: LRMKWMMAMKYPITA
LRMKLMMGMPYPYTA

SEQ ID NO: 232931 - protein, 15 aa, Artificial Sequence
  Description of Artificial Sequence: Synthetic peptide
  Seed: LRMKWMMAMKYPITA
LRMKLMMGMRYPATA

SEQ ID NO: 232932 - protein, 15 aa, Artificial Sequence
  Description of Artificial Sequence: Synthetic peptide
  Seed: LRMKWMMAMKYPITA
LRMKLMMGMRYPETA

SEQ ID NO: 232933 - protein, 15 aa, Artificial Sequence
  Description of Artificial Sequence: Synthetic peptide
  Seed: LRMKWMMAMKYPITA
LRMKLMMGMRYPFTA

SEQ ID NO: 232934 - protein, 15 aa, Artificial Sequence
  Description of Artificial Sequence: Synthetic peptide
  Seed: LRMKWMMAMKYPITA
LRMKLMMGMRYPGTA

SEQ ID NO: 232935 - protein, 15 aa, Artificial Sequence
  Description of Artificial Sequence: Synthetic peptide
  Seed: LRMKWMMAMKYPITA
LRMKLMMGMRYPHTA

SEQ ID NO: 232936 - protein, 15 aa, Artificial Sequence
  Description of Artificial Sequence: Synthetic peptide
  Seed: LRMKWMMAMKYPITA
LRMKLMMGMRYPITA

SEQ ID NO: 232937 - protein, 15 aa, Artificial Sequence
  Description of Artificial Sequence: Synthetic peptide
  Seed: LRMKWMMAMKYPITA
LRMKLMMGMRYPKTA

SEQ ID NO: 232938 - protein, 15 aa, Artificial Sequence
  Description of Artificial Sequence: Synthetic peptide
  Seed: LRMKWMMAMKYPITA
LRMKLMMGMRYPLTA

SEQ ID NO: 232939 - protein, 15 aa, Artificial Sequence
  Description of Artificial Sequence: Synthetic peptide
  Seed: LRMKWMMAMKYPITA
LRMKLMMGMRYPMTA

SEQ ID NO: 232940 - protein, 15 aa, Artificial Sequence
  Description of Artificial Sequence: Synthetic peptide
  Seed: LRMKWMMAMKYPITA
LRMKLMMGMRYPNTA

SEQ ID NO: 232941 - protein, 15 aa, Artificial Sequence
  Description of Artificial Sequence: Synthetic peptide
  Seed: LRMKWMMAMKYPITA
LRMKLMMGMRYPQTA

SEQ ID NO: 232942 - protein, 15 aa, Artificial Sequence
  Description of Artificial Sequence: Synthetic peptide
  Seed: LRMKWMMAMKYPITA
LRMKLMMGMRYPRTA

SEQ ID NO: 232943 - protein, 15 aa, Artificial Sequence
  Description of Artificial Sequence: Synthetic peptide
  Seed: LRMKWMMAMKYPITA
LRMKLMMGMRYPSTA

SEQ ID NO: 232944 - protein, 15 aa, Artificial Sequence
  Description of Artificial Sequence: Synthetic peptide
  Seed: LRMKWMMAMKYPITA
LRMKLMMGMRYPTTA

SEQ ID NO: 232945 - protein, 15 aa, Artificial Sequence
  Description of Artificial Sequence: Synthetic peptide
  Seed: LRMKWMMAMKYPITA
LRMKLMMGMRYPVTA

SEQ ID NO: 232946 - protein, 15 aa, Artificial Sequence
  Description of Artificial Sequence: Synthetic peptide
  Seed: LRMKWMMAMKYPITA
LRMKLMMGMRYPWTA

SEQ ID NO: 232947 - protein, 15 aa, Artificial Sequence
  Description of Artificial Sequence: Synthetic peptide
  Seed: LRMKWMMAMKYPITA
LRMKLMMGMRYPYTA

SEQ ID NO: 232948 - protein, 15 aa, Artificial Sequence
  Description of Artificial Sequence: Synthetic peptide
  Seed: LRMKWMMAMKYPITA
LRMKLMMGMSYPATA

SEQ ID NO: 232949 - protein, 15 aa, Artificial Sequence
  Description of Artificial Sequence: Synthetic peptide
  Seed: LRMKWMMAMKYPITA
LRMKLMMGMSYPCTA

SEQ ID NO: 232950 - protein, 15 aa, Artificial Sequence
  Description of Artificial Sequence: Synthetic peptide
  Seed: LRMKWMMAMKYPITA
LRMKLMMGMSYPFTA

SEQ ID NO: 232951 - protein, 15 aa, Artificial Sequence
  Description of Artificial Sequence: Synthetic peptide
  Seed: LRMKWMMAMKYPITA
LRMKLMMGMSYPGTA

SEQ ID NO: 232952 - protein, 15 aa, Artificial Sequence
  Description of Artificial Sequence: Synthetic peptide
  Seed: LRMKWMMAMKYPITA
LRMKLMMGMSYPITA

SEQ ID NO: 232953 - protein, 15 aa, Artificial Sequence
  Description of Artificial Sequence: Synthetic peptide
  Seed: LRMKWMMAMKYPITA
LRMKLMMGMSYPLTA

SEQ ID NO: 232954 - protein, 15 aa, Artificial Sequence
  Description of Artificial Sequence: Synthetic peptide
  Seed: LRMKWMMAMKYPITA
LRMKLMMGMSYPMTA

SEQ ID NO: 232955 - protein, 15 aa, Artificial Sequence
  Description of Artificial Sequence: Synthetic peptide
  Seed: LRMKWMMAMKYPITA
LRMKLMMGMSYPNTA

SEQ ID NO: 232956 - protein, 15 aa, Artificial Sequence
  Description of Artificial Sequence: Synthetic peptide
  Seed: LRMKWMMAMKYPITA
LRMKLMMGMSYPQTA

SEQ ID NO: 232957 - protein, 15 aa, Artificial Sequence
  Description of Artificial Sequence: Synthetic peptide
  Seed: LRMKWMMAMKYPITA
LRMKLMMGMSYPRTA

SEQ ID NO: 232958 - protein, 15 aa, Artificial Sequence
  Description of Artificial Sequence: Synthetic peptide
  Seed: LRMKWMMAMKYPITA
LRMKLMMGMSYPSTA

SEQ ID NO: 232959 - protein, 15 aa, Artificial Sequence
  Description of Artificial Sequence: Synthetic peptide
  Seed: LRMKWMMAMKYPITA
LRMKLMMGMSYPTTA

SEQ ID NO: 232960 - protein, 15 aa, Artificial Sequence
  Description of Artificial Sequence: Synthetic peptide
  Seed: LRMKWMMAMKYPITA
LRMKLMMGMSYPVTA

SEQ ID NO: 232961 - protein, 15 aa, Artificial Sequence
  Description of Artificial Sequence: Synthetic peptide
  Seed: LRMKWMMAMKYPITA
LRMKLMMGMSYPYTA

SEQ ID NO: 232962 - protein, 15 aa, Artificial Sequence
  Description of Artificial Sequence: Synthetic peptide
  Seed: LRMKWMMAMKYPITA
LRMKLMMGMTYPATA

SEQ ID NO: 232963 - protein, 15 aa, Artificial Sequence
  Description of Artificial Sequence: Synthetic peptide
  Seed: LRMKWMMAMKYPITA
LRMKLMMGMTYPCTA

SEQ ID NO: 232964 - protein, 15 aa, Artificial Sequence
  Description of Artificial Sequence: Synthetic peptide
  Seed: LRMKWMMAMKYPITA
LRMKLMMGMTYPFTA

SEQ ID NO: 232965 - protein, 15 aa, Artificial Sequence
  Description of Artificial Sequence: Synthetic peptide
  Seed: LRMKWMMAMKYPITA
LRMKLMMGMTYPGTA

SEQ ID NO: 232966 - protein, 15 aa, Artificial Sequence
  Description of Artificial Sequence: Synthetic peptide
  Seed: LRMKWMMAMKYPITA
LRMKLMMGMTYPITA

SEQ ID NO: 232967 - protein, 15 aa, Artificial Sequence
  Description of Artificial Sequence: Synthetic peptide
  Seed: LRMKWMMAMKYPITA
LRMKLMMGMTYPLTA

SEQ ID NO: 232968 - protein, 15 aa, Artificial Sequence
  Description of Artificial Sequence: Synthetic peptide
  Seed: LRMKWMMAMKYPITA
LRMKLMMGMTYPMTA

SEQ ID NO: 232969 - protein, 15 aa, Artificial Sequence
  Description of Artificial Sequence: Synthetic peptide
  Seed: LRMKWMMAMKYPITA
LRMKLMMGMTYPNTA

SEQ ID NO: 232970 - protein, 15 aa, Artificial Sequence
  Description of Artificial Sequence: Synthetic peptide
  Seed: LRMKWMMAMKYPITA
LRMKLMMGMTYPQTA

SEQ ID NO: 232971 - protein, 15 aa, Artificial Sequence
  Description of Artificial Sequence: Synthetic peptide
  Seed: LRMKWMMAMKYPITA
LRMKLMMGMTYPSTA

SEQ ID NO: 232972 - protein, 15 aa, Artificial Sequence
  Description of Artificial Sequence: Synthetic peptide
  Seed: LRMKWMMAMKYPITA
LRMKLMMGMTYPTTA

SEQ ID NO: 232973 - protein, 15 aa, Artificial Sequence
  Description of Artificial Sequence: Synthetic peptide
  Seed: LRMKWMMAMKYPITA
LRMKLMMGMTYPVTA

SEQ ID NO: 232974 - protein, 15 aa, Artificial Sequence
  Description of Artificial Sequence: Synthetic peptide
  Seed: LRMKWMMAMKYPITA
LRMKLMMGMTYPYTA

SEQ ID NO: 232975 - protein, 15 aa, Artificial Sequence
  Description of Artificial Sequence: Synthetic peptide
  Seed: LRMKWMMAMKYPITA
LRMKLMMGMVYPATA

SEQ ID NO: 232976 - protein, 15 aa, Artificial Sequence
  Description of Artificial Sequence: Synthetic peptide
  Seed: LRMKWMMAMKYPITA
LRMKLMMGMVYPGTA

SEQ ID NO: 232977 - protein, 15 aa, Artificial Sequence
  Description of Artificial Sequence: Synthetic peptide
  Seed: LRMKWMMAMKYPITA
LRMKLMMGMVYPITA

SEQ ID NO: 232978 - protein, 15 aa, Artificial Sequence
  Description of Artificial Sequence: Synthetic peptide
  Seed: LRMKWMMAMKYPITA
LRMKLMMGMVYPLTA

SEQ ID NO: 232979 - protein, 15 aa, Artificial Sequence
  Description of Artificial Sequence: Synthetic peptide
  Seed: LRMKWMMAMKYPITA
LRMKLMMGMVYPMTA

SEQ ID NO: 232980 - protein, 15 aa, Artificial Sequence
  Description of Artificial Sequence: Synthetic peptide
  Seed: LRMKWMMAMKYPITA
LRMKLMMGMVYPNTA

SEQ ID NO: 232981 - protein, 15 aa, Artificial Sequence
  Description of Artificial Sequence: Synthetic peptide
  Seed: LRMKWMMAMKYPITA
LRMKLMMGMVYPQTA

SEQ ID NO: 232982 - protein, 15 aa, Artificial Sequence
  Description of Artificial Sequence: Synthetic peptide
  Seed: LRMKWMMAMKYPITA
LRMKLMMGMVYPSTA

SEQ ID NO: 232983 - protein, 15 aa, Artificial Sequence
  Description of Artificial Sequence: Synthetic peptide
  Seed: LRMKWMMAMKYPITA
LRMKLMMGMVYPTTA

SEQ ID NO: 232984 - protein, 15 aa, Artificial Sequence
  Description of Artificial Sequence: Synthetic peptide
  Seed: LRMKWMMAMKYPITA
LRMKLMMGMVYPVTA

SEQ ID NO: 232985 - protein, 15 aa, Artificial Sequence
  Description of Artificial Sequence: Synthetic peptide
  Seed: LRMKWMMAMKYPITA
LRMKLMMGMVYPYTA

SEQ ID NO: 232986 - protein, 15 aa, Artificial Sequence
  Description of Artificial Sequence: Synthetic peptide
  Seed: LRMKWMMAMKYPITA
LRMKLMMHMAYPATA

SEQ ID NO: 232987 - protein, 15 aa, Artificial Sequence
  Description of Artificial Sequence: Synthetic peptide
  Seed: LRMKWMMAMKYPITA
LRMKLMMHMAYPCTA

SEQ ID NO: 232988 - protein, 15 aa, Artificial Sequence
  Description of Artificial Sequence: Synthetic peptide
  Seed: LRMKWMMAMKYPITA
LRMKLMMHMAYPDTA

SEQ ID NO: 232989 - protein, 15 aa, Artificial Sequence
  Description of Artificial Sequence: Synthetic peptide
  Seed: LRMKWMMAMKYPITA
LRMKLMMHMAYPETA

SEQ ID NO: 232990 - protein, 15 aa, Artificial Sequence
  Description of Artificial Sequence: Synthetic peptide
  Seed: LRMKWMMAMKYPITA
LRMKLMMHMAYPFTA

SEQ ID NO: 232991 - protein, 15 aa, Artificial Sequence
  Description of Artificial Sequence: Synthetic peptide
  Seed: LRMKWMMAMKYPITA
LRMKLMMHMAYPGTA

SEQ ID NO: 232992 - protein, 15 aa, Artificial Sequence
  Description of Artificial Sequence: Synthetic peptide
  Seed: LRMKWMMAMKYPITA
LRMKLMMHMAYPHTA

SEQ ID NO: 232993 - protein, 15 aa, Artificial Sequence
  Description of Artificial Sequence: Synthetic peptide
  Seed: LRMKWMMAMKYPITA
LRMKLMMHMAYPITA

SEQ ID NO: 232994 - protein, 15 aa, Artificial Sequence
  Description of Artificial Sequence: Synthetic peptide
  Seed: LRMKWMMAMKYPITA
LRMKLMMHMAYPKTA

SEQ ID NO: 232995 - protein, 15 aa, Artificial Sequence
  Description of Artificial Sequence: Synthetic peptide
  Seed: LRMKWMMAMKYPITA
LRMKLMMHMAYPLTA

SEQ ID NO: 232996 - protein, 15 aa, Artificial Sequence
  Description of Artificial Sequence: Synthetic peptide
  Seed: LRMKWMMAMKYPITA
LRMKLMMHMAYPMTA

SEQ ID NO: 232997 - protein, 15 aa, Artificial Sequence
  Description of Artificial Sequence: Synthetic peptide
  Seed: LRMKWMMAMKYPITA
LRMKLMMHMAYPNTA

SEQ ID NO: 232998 - protein, 15 aa, Artificial Sequence
  Description of Artificial Sequence: Synthetic peptide
  Seed: LRMKWMMAMKYPITA
LRMKLMMHMAYPQTA

SEQ ID NO: 232999 - protein, 15 aa, Artificial Sequence
  Description of Artificial Sequence: Synthetic peptide
  Seed: LRMKWMMAMKYPITA
LRMKLMMHMAYPRTA

SEQ ID NO: 233000 - protein, 15 aa, Artificial Sequence
  Description of Artificial Sequence: Synthetic peptide
  Seed: LRMKWMMAMKYPITA
LRMKLMMHMAYPSTA

SEQ ID NO: 233001 - protein, 15 aa, Artificial Sequence
  Description of Artificial Sequence: Synthetic peptide
  Seed: LRMKWMMAMKYPITA
LRMKLMMHMAYPTTA

SEQ ID NO: 233002 - protein, 15 aa, Artificial Sequence
  Description of Artificial Sequence: Synthetic peptide
  Seed: LRMKWMMAMKYPITA
LRMKLMMHMAYPVTA

SEQ ID NO: 233003 - protein, 15 aa, Artificial Sequence
  Description of Artificial Sequence: Synthetic peptide
  Seed: LRMKWMMAMKYPITA
LRMKLMMHMAYPWTA

SEQ ID NO: 233004 - protein, 15 aa, Artificial Sequence
  Description of Artificial Sequence: Synthetic peptide
  Seed: LRMKWMMAMKYPITA
LRMKLMMHMAYPYTA

SEQ ID NO: 233005 - protein, 15 aa, Artificial Sequence
  Description of Artificial Sequence: Synthetic peptide
  Seed: LRMKWMMAMKYPITA
LRMKLMMHMCYPRTA

SEQ ID NO: 233006 - protein, 15 aa, Artificial Sequence
  Description of Artificial Sequence: Synthetic peptide
  Seed: LRMKWMMAMKYPITA
LRMKLMMHMDYPFTA

SEQ ID NO: 233007 - protein, 15 aa, Artificial Sequence
  Description of Artificial Sequence: Synthetic peptide
  Seed: LRMKWMMAMKYPITA
LRMKLMMHMDYPITA

SEQ ID NO: 233008 - protein, 15 aa, Artificial Sequence
  Description of Artificial Sequence: Synthetic peptide
  Seed: LRMKWMMAMKYPITA
LRMKLMMHMDYPLTA

SEQ ID NO: 233009 - protein, 15 aa, Artificial Sequence
  Description of Artificial Sequence: Synthetic peptide
  Seed: LRMKWMMAMKYPITA
LRMKLMMHMDYPVTA

SEQ ID NO: 233010 - protein, 15 aa, Artificial Sequence
  Description of Artificial Sequence: Synthetic peptide
  Seed: LRMKWMMAMKYPITA
LRMKLMMHMDYPYTA

SEQ ID NO: 233011 - protein, 15 aa, Artificial Sequence
  Description of Artificial Sequence: Synthetic peptide
  Seed: LRMKWMMAMKYPITA
LRMKLMMHMEYPFTA

SEQ ID NO: 233012 - protein, 15 aa, Artificial Sequence
  Description of Artificial Sequence: Synthetic peptide
  Seed: LRMKWMMAMKYPITA
LRMKLMMHMEYPITA

SEQ ID NO: 233013 - protein, 15 aa, Artificial Sequence
  Description of Artificial Sequence: Synthetic peptide
  Seed: LRMKWMMAMKYPITA
LRMKLMMHMEYPLTA

SEQ ID NO: 233014 - protein, 15 aa, Artificial Sequence
  Description of Artificial Sequence: Synthetic peptide
  Seed: LRMKWMMAMKYPITA
LRMKLMMHMEYPRTA

SEQ ID NO: 233015 - protein, 15 aa, Artificial Sequence
  Description of Artificial Sequence: Synthetic peptide
  Seed: LRMKWMMAMKYPITA
LRMKLMMHMEYPYTA

SEQ ID NO: 233016 - protein, 15 aa, Artificial Sequence
  Description of Artificial Sequence: Synthetic peptide
  Seed: LRMKWMMAMKYPITA
LRMKLMMHMFYPITA

SEQ ID NO: 233017 - protein, 15 aa, Artificial Sequence
  Description of Artificial Sequence: Synthetic peptide
  Seed: LRMKWMMAMKYPITA
LRMKLMMHMFYPLTA

SEQ ID NO: 233018 - protein, 15 aa, Artificial Sequence
  Description of Artificial Sequence: Synthetic peptide
  Seed: LRMKWMMAMKYPITA
LRMKLMMHMFYPVTA

SEQ ID NO: 233019 - protein, 15 aa, Artificial Sequence
  Description of Artificial Sequence: Synthetic peptide
  Seed: LRMKWMMAMKYPITA
LRMKLMMHMGYPATA

SEQ ID NO: 233020 - protein, 15 aa, Artificial Sequence
  Description of Artificial Sequence: Synthetic peptide
  Seed: LRMKWMMAMKYPITA
LRMKLMMHMGYPFTA

SEQ ID NO: 233021 - protein, 15 aa, Artificial Sequence
  Description of Artificial Sequence: Synthetic peptide
  Seed: LRMKWMMAMKYPITA
LRMKLMMHMGYPGTA

SEQ ID NO: 233022 - protein, 15 aa, Artificial Sequence
  Description of Artificial Sequence: Synthetic peptide
  Seed: LRMKWMMAMKYPITA
LRMKLMMHMGYPHTA

SEQ ID NO: 233023 - protein, 15 aa, Artificial Sequence
  Description of Artificial Sequence: Synthetic peptide
  Seed: LRMKWMMAMKYPITA
LRMKLMMHMGYPITA

SEQ ID NO: 233024 - protein, 15 aa, Artificial Sequence
  Description of Artificial Sequence: Synthetic peptide
  Seed: LRMKWMMAMKYPITA
LRMKLMMHMGYPKTA

SEQ ID NO: 233025 - protein, 15 aa, Artificial Sequence
  Description of Artificial Sequence: Synthetic peptide
  Seed: LRMKWMMAMKYPITA
LRMKLMMHMGYPLTA

SEQ ID NO: 233026 - protein, 15 aa, Artificial Sequence
  Description of Artificial Sequence: Synthetic peptide
  Seed: LRMKWMMAMKYPITA
LRMKLMMHMGYPMTA

SEQ ID NO: 233027 - protein, 15 aa, Artificial Sequence
  Description of Artificial Sequence: Synthetic peptide
  Seed: LRMKWMMAMKYPITA
LRMKLMMHMGYPRTA

SEQ ID NO: 233028 - protein, 15 aa, Artificial Sequence
  Description of Artificial Sequence: Synthetic peptide
  Seed: LRMKWMMAMKYPITA
LRMKLMMHMGYPSTA

SEQ ID NO: 233029 - protein, 15 aa, Artificial Sequence
  Description of Artificial Sequence: Synthetic peptide
  Seed: LRMKWMMAMKYPITA
LRMKLMMHMGYPTTA

SEQ ID NO: 233030 - protein, 15 aa, Artificial Sequence
  Description of Artificial Sequence: Synthetic peptide
  Seed: LRMKWMMAMKYPITA
LRMKLMMHMGYPVTA

SEQ ID NO: 233031 - protein, 15 aa, Artificial Sequence
  Description of Artificial Sequence: Synthetic peptide
  Seed: LRMKWMMAMKYPITA
LRMKLMMHMGYPYTA

SEQ ID NO: 233032 - protein, 15 aa, Artificial Sequence
  Description of Artificial Sequence: Synthetic peptide
  Seed: LRMKWMMAMKYPITA
LRMKLMMHMHYPATA

SEQ ID NO: 233033 - protein, 15 aa, Artificial Sequence
  Description of Artificial Sequence: Synthetic peptide
  Seed: LRMKWMMAMKYPITA
LRMKLMMHMHYPETA

SEQ ID NO: 233034 - protein, 15 aa, Artificial Sequence
  Description of Artificial Sequence: Synthetic peptide
  Seed: LRMKWMMAMKYPITA
LRMKLMMHMHYPFTA

SEQ ID NO: 233035 - protein, 15 aa, Artificial Sequence
  Description of Artificial Sequence: Synthetic peptide
  Seed: LRMKWMMAMKYPITA
LRMKLMMHMHYPGTA

SEQ ID NO: 233036 - protein, 15 aa, Artificial Sequence
  Description of Artificial Sequence: Synthetic peptide
  Seed: LRMKWMMAMKYPITA
LRMKLMMHMHYPHTA

SEQ ID NO: 233037 - protein, 15 aa, Artificial Sequence
  Description of Artificial Sequence: Synthetic peptide
  Seed: LRMKWMMAMKYPITA
LRMKLMMHMHYPITA

SEQ ID NO: 233038 - protein, 15 aa, Artificial Sequence
  Description of Artificial Sequence: Synthetic peptide
  Seed: LRMKWMMAMKYPITA
LRMKLMMHMHYPKTA

SEQ ID NO: 233039 - protein, 15 aa, Artificial Sequence
  Description of Artificial Sequence: Synthetic peptide
  Seed: LRMKWMMAMKYPITA
LRMKLMMHMHYPLTA

SEQ ID NO: 233040 - protein, 15 aa, Artificial Sequence
  Description of Artificial Sequence: Synthetic peptide
  Seed: LRMKWMMAMKYPITA
LRMKLMMHMHYPMTA

SEQ ID NO: 233041 - protein, 15 aa, Artificial Sequence
  Description of Artificial Sequence: Synthetic peptide
  Seed: LRMKWMMAMKYPITA
LRMKLMMHMHYPQTA

SEQ ID NO: 233042 - protein, 15 aa, Artificial Sequence
  Description of Artificial Sequence: Synthetic peptide
  Seed: LRMKWMMAMKYPITA
LRMKLMMHMHYPRTA

SEQ ID NO: 233043 - protein, 15 aa, Artificial Sequence
  Description of Artificial Sequence: Synthetic peptide
  Seed: LRMKWMMAMKYPITA
LRMKLMMHMHYPSTA

SEQ ID NO: 233044 - protein, 15 aa, Artificial Sequence
  Description of Artificial Sequence: Synthetic peptide
  Seed: LRMKWMMAMKYPITA
LRMKLMMHMHYPTTA

SEQ ID NO: 233045 - protein, 15 aa, Artificial Sequence
  Description of Artificial Sequence: Synthetic peptide
  Seed: LRMKWMMAMKYPITA
LRMKLMMHMHYPVTA

SEQ ID NO: 233046 - protein, 15 aa, Artificial Sequence
  Description of Artificial Sequence: Synthetic peptide
  Seed: LRMKWMMAMKYPITA
LRMKLMMHMHYPWTA

SEQ ID NO: 233047 - protein, 15 aa, Artificial Sequence
  Description of Artificial Sequence: Synthetic peptide
  Seed: LRMKWMMAMKYPITA
LRMKLMMHMHYPYTA

SEQ ID NO: 233048 - protein, 15 aa, Artificial Sequence
  Description of Artificial Sequence: Synthetic peptide
  Seed: LRMKWMMAMKYPITA
LRMKLMMHMIYPATA

SEQ ID NO: 233049 - protein, 15 aa, Artificial Sequence
  Description of Artificial Sequence: Synthetic peptide
  Seed: LRMKWMMAMKYPITA
LRMKLMMHMIYPFTA

SEQ ID NO: 233050 - protein, 15 aa, Artificial Sequence
  Description of Artificial Sequence: Synthetic peptide
  Seed: LRMKWMMAMKYPITA
LRMKLMMHMIYPHTA

SEQ ID NO: 233051 - protein, 15 aa, Artificial Sequence
  Description of Artificial Sequence: Synthetic peptide
  Seed: LRMKWMMAMKYPITA
LRMKLMMHMIYPITA

SEQ ID NO: 233052 - protein, 15 aa, Artificial Sequence
  Description of Artificial Sequence: Synthetic peptide
  Seed: LRMKWMMAMKYPITA
LRMKLMMHMIYPKTA

SEQ ID NO: 233053 - protein, 15 aa, Artificial Sequence
  Description of Artificial Sequence: Synthetic peptide
  Seed: LRMKWMMAMKYPITA
LRMKLMMHMIYPLTA

SEQ ID NO: 233054 - protein, 15 aa, Artificial Sequence
  Description of Artificial Sequence: Synthetic peptide
  Seed: LRMKWMMAMKYPITA
LRMKLMMHMIYPMTA

SEQ ID NO: 233055 - protein, 15 aa, Artificial Sequence
  Description of Artificial Sequence: Synthetic peptide
  Seed: LRMKWMMAMKYPITA
LRMKLMMHMIYPRTA

SEQ ID NO: 233056 - protein, 15 aa, Artificial Sequence
  Description of Artificial Sequence: Synthetic peptide
  Seed: LRMKWMMAMKYPITA
LRMKLMMHMIYPSTA

SEQ ID NO: 233057 - protein, 15 aa, Artificial Sequence
  Description of Artificial Sequence: Synthetic peptide
  Seed: LRMKWMMAMKYPITA
LRMKLMMHMIYPVTA

SEQ ID NO: 233058 - protein, 15 aa, Artificial Sequence
  Description of Artificial Sequence: Synthetic peptide
  Seed: LRMKWMMAMKYPITA
LRMKLMMHMIYPYTA

SEQ ID NO: 233059 - protein, 15 aa, Artificial Sequence
  Description of Artificial Sequence: Synthetic peptide
  Seed: LRMKWMMAMKYPITA
LRMKLMMHMKYPATA

SEQ ID NO: 233060 - protein, 15 aa, Artificial Sequence
  Description of Artificial Sequence: Synthetic peptide
  Seed: LRMKWMMAMKYPITA
LRMKLMMHMKYPCTA

SEQ ID NO: 233061 - protein, 15 aa, Artificial Sequence
  Description of Artificial Sequence: Synthetic peptide
  Seed: LRMKWMMAMKYPITA
LRMKLMMHMKYPDTA

SEQ ID NO: 233062 - protein, 15 aa, Artificial Sequence
  Description of Artificial Sequence: Synthetic peptide
  Seed: LRMKWMMAMKYPITA
LRMKLMMHMKYPETA

SEQ ID NO: 233063 - protein, 15 aa, Artificial Sequence
  Description of Artificial Sequence: Synthetic peptide
  Seed: LRMKWMMAMKYPITA
LRMKLMMHMKYPFTA

SEQ ID NO: 233064 - protein, 15 aa, Artificial Sequence
  Description of Artificial Sequence: Synthetic peptide
  Seed: LRMKWMMAMKYPITA
LRMKLMMHMKYPGTA

SEQ ID NO: 233065 - protein, 15 aa, Artificial Sequence
  Description of Artificial Sequence: Synthetic peptide
  Seed: LRMKWMMAMKYPITA
LRMKLMMHMKYPHTA

SEQ ID NO: 233066 - protein, 15 aa, Artificial Sequence
  Description of Artificial Sequence: Synthetic peptide
  Seed: LRMKWMMAMKYPITA
LRMKLMMHMKYPITA

SEQ ID NO: 233067 - protein, 15 aa, Artificial Sequence
  Description of Artificial Sequence: Synthetic peptide
  Seed: LRMKWMMAMKYPITA
LRMKLMMHMKYPKTA

SEQ ID NO: 233068 - protein, 15 aa, Artificial Sequence
  Description of Artificial Sequence: Synthetic peptide
  Seed: LRMKWMMAMKYPITA
LRMKLMMHMKYPLTA

SEQ ID NO: 233069 - protein, 15 aa, Artificial Sequence
  Description of Artificial Sequence: Synthetic peptide
  Seed: LRMKWMMAMKYPITA
LRMKLMMHMKYPMTA

SEQ ID NO: 233070 - protein, 15 aa, Artificial Sequence
  Description of Artificial Sequence: Synthetic peptide
  Seed: LRMKWMMAMKYPITA
LRMKLMMHMKYPNTA

SEQ ID NO: 233071 - protein, 15 aa, Artificial Sequence
  Description of Artificial Sequence: Synthetic peptide
  Seed: LRMKWMMAMKYPITA
LRMKLMMHMKYPPTA

SEQ ID NO: 233072 - protein, 15 aa, Artificial Sequence
  Description of Artificial Sequence: Synthetic peptide
  Seed: LRMKWMMAMKYPITA
LRMKLMMHMKYPQTA

SEQ ID NO: 233073 - protein, 15 aa, Artificial Sequence
  Description of Artificial Sequence: Synthetic peptide
  Seed: LRMKWMMAMKYPITA
LRMKLMMHMKYPRTA

SEQ ID NO: 233074 - protein, 15 aa, Artificial Sequence
  Description of Artificial Sequence: Synthetic peptide
  Seed: LRMKWMMAMKYPITA
LRMKLMMHMKYPSTA

SEQ ID NO: 233075 - protein, 15 aa, Artificial Sequence
  Description of Artificial Sequence: Synthetic peptide
  Seed: LRMKWMMAMKYPITA
LRMKLMMHMKYPTTA

SEQ ID NO: 233076 - protein, 15 aa, Artificial Sequence
  Description of Artificial Sequence: Synthetic peptide
  Seed: LRMKWMMAMKYPITA
LRMKLMMHMKYPVTA

SEQ ID NO: 233077 - protein, 15 aa, Artificial Sequence
  Description of Artificial Sequence: Synthetic peptide
  Seed: LRMKWMMAMKYPITA
LRMKLMMHMKYPWTA

SEQ ID NO: 233078 - protein, 15 aa, Artificial Sequence
  Description of Artificial Sequence: Synthetic peptide
  Seed: LRMKWMMAMKYPITA
LRMKLMMHMKYPYTA

SEQ ID NO: 233079 - protein, 15 aa, Artificial Sequence
  Description of Artificial Sequence: Synthetic peptide
  Seed: LRMKWMMAMKYPITA
LRMKLMMHMLYPFTA

SEQ ID NO: 233080 - protein, 15 aa, Artificial Sequence
  Description of Artificial Sequence: Synthetic peptide
  Seed: LRMKWMMAMKYPITA
LRMKLMMHMLYPHTA

SEQ ID NO: 233081 - protein, 15 aa, Artificial Sequence
  Description of Artificial Sequence: Synthetic peptide
  Seed: LRMKWMMAMKYPITA
LRMKLMMHMLYPITA

SEQ ID NO: 233082 - protein, 15 aa, Artificial Sequence
  Description of Artificial Sequence: Synthetic peptide
  Seed: LRMKWMMAMKYPITA
LRMKLMMHMLYPKTA

SEQ ID NO: 233083 - protein, 15 aa, Artificial Sequence
  Description of Artificial Sequence: Synthetic peptide
  Seed: LRMKWMMAMKYPITA
LRMKLMMHMLYPLTA

SEQ ID NO: 233084 - protein, 15 aa, Artificial Sequence
  Description of Artificial Sequence: Synthetic peptide
  Seed: LRMKWMMAMKYPITA
LRMKLMMHMLYPMTA

SEQ ID NO: 233085 - protein, 15 aa, Artificial Sequence
  Description of Artificial Sequence: Synthetic peptide
  Seed: LRMKWMMAMKYPITA
LRMKLMMHMLYPRTA

SEQ ID NO: 233086 - protein, 15 aa, Artificial Sequence
  Description of Artificial Sequence: Synthetic peptide
  Seed: LRMKWMMAMKYPITA
LRMKLMMHMLYPVTA

SEQ ID NO: 233087 - protein, 15 aa, Artificial Sequence
  Description of Artificial Sequence: Synthetic peptide
  Seed: LRMKWMMAMKYPITA
LRMKLMMHMLYPYTA

SEQ ID NO: 233088 - protein, 15 aa, Artificial Sequence
  Description of Artificial Sequence: Synthetic peptide
  Seed: LRMKWMMAMKYPITA
LRMKLMMHMMYPATA

SEQ ID NO: 233089 - protein, 15 aa, Artificial Sequence
  Description of Artificial Sequence: Synthetic peptide
  Seed: LRMKWMMAMKYPITA
LRMKLMMHMMYPFTA

SEQ ID NO: 233090 - protein, 15 aa, Artificial Sequence
  Description of Artificial Sequence: Synthetic peptide
  Seed: LRMKWMMAMKYPITA
LRMKLMMHMMYPHTA

SEQ ID NO: 233091 - protein, 15 aa, Artificial Sequence
  Description of Artificial Sequence: Synthetic peptide
  Seed: LRMKWMMAMKYPITA
LRMKLMMHMMYPITA

SEQ ID NO: 233092 - protein, 15 aa, Artificial Sequence
  Description of Artificial Sequence: Synthetic peptide
  Seed: LRMKWMMAMKYPITA
LRMKLMMHMMYPKTA

SEQ ID NO: 233093 - protein, 15 aa, Artificial Sequence
  Description of Artificial Sequence: Synthetic peptide
  Seed: LRMKWMMAMKYPITA
LRMKLMMHMMYPLTA

SEQ ID NO: 233094 - protein, 15 aa, Artificial Sequence
  Description of Artificial Sequence: Synthetic peptide
  Seed: LRMKWMMAMKYPITA
LRMKLMMHMMYPMTA

SEQ ID NO: 233095 - protein, 15 aa, Artificial Sequence
  Description of Artificial Sequence: Synthetic peptide
  Seed: LRMKWMMAMKYPITA
LRMKLMMHMMYPRTA

SEQ ID NO: 233096 - protein, 15 aa, Artificial Sequence
  Description of Artificial Sequence: Synthetic peptide
  Seed: LRMKWMMAMKYPITA
LRMKLMMHMMYPVTA

SEQ ID NO: 233097 - protein, 15 aa, Artificial Sequence
  Description of Artificial Sequence: Synthetic peptide
  Seed: LRMKWMMAMKYPITA
LRMKLMMHMMYPYTA

SEQ ID NO: 233098 - protein, 15 aa, Artificial Sequence
  Description of Artificial Sequence: Synthetic peptide
  Seed: LRMKWMMAMKYPITA
LRMKLMMHMNYPATA

SEQ ID NO: 233099 - protein, 15 aa, Artificial Sequence
  Description of Artificial Sequence: Synthetic peptide
  Seed: LRMKWMMAMKYPITA
LRMKLMMHMNYPFTA

SEQ ID NO: 233100 - protein, 15 aa, Artificial Sequence
  Description of Artificial Sequence: Synthetic peptide
  Seed: LRMKWMMAMKYPITA
LRMKLMMHMNYPGTA

SEQ ID NO: 233101 - protein, 15 aa, Artificial Sequence
  Description of Artificial Sequence: Synthetic peptide
  Seed: LRMKWMMAMKYPITA
LRMKLMMHMNYPHTA

SEQ ID NO: 233102 - protein, 15 aa, Artificial Sequence
  Description of Artificial Sequence: Synthetic peptide
  Seed: LRMKWMMAMKYPITA
LRMKLMMHMNYPITA

SEQ ID NO: 233103 - protein, 15 aa, Artificial Sequence
  Description of Artificial Sequence: Synthetic peptide
  Seed: LRMKWMMAMKYPITA
LRMKLMMHMNYPKTA

SEQ ID NO: 233104 - protein, 15 aa, Artificial Sequence
  Description of Artificial Sequence: Synthetic peptide
  Seed: LRMKWMMAMKYPITA
LRMKLMMHMNYPLTA

SEQ ID NO: 233105 - protein, 15 aa, Artificial Sequence
  Description of Artificial Sequence: Synthetic peptide
  Seed: LRMKWMMAMKYPITA
LRMKLMMHMNYPMTA

SEQ ID NO: 233106 - protein, 15 aa, Artificial Sequence
  Description of Artificial Sequence: Synthetic peptide
  Seed: LRMKWMMAMKYPITA
LRMKLMMHMNYPQTA

SEQ ID NO: 233107 - protein, 15 aa, Artificial Sequence
  Description of Artificial Sequence: Synthetic peptide
  Seed: LRMKWMMAMKYPITA
LRMKLMMHMNYPRTA

SEQ ID NO: 233108 - protein, 15 aa, Artificial Sequence
  Description of Artificial Sequence: Synthetic peptide
  Seed: LRMKWMMAMKYPITA
LRMKLMMHMNYPSTA

SEQ ID NO: 233109 - protein, 15 aa, Artificial Sequence
  Description of Artificial Sequence: Synthetic peptide
  Seed: LRMKWMMAMKYPITA
LRMKLMMHMNYPTTA

SEQ ID NO: 233110 - protein, 15 aa, Artificial Sequence
  Description of Artificial Sequence: Synthetic peptide
  Seed: LRMKWMMAMKYPITA
LRMKLMMHMNYPVTA

SEQ ID NO: 233111 - protein, 15 aa, Artificial Sequence
  Description of Artificial Sequence: Synthetic peptide
  Seed: LRMKWMMAMKYPITA
LRMKLMMHMNYPWTA

SEQ ID NO: 233112 - protein, 15 aa, Artificial Sequence
  Description of Artificial Sequence: Synthetic peptide
  Seed: LRMKWMMAMKYPITA
LRMKLMMHMNYPYTA

SEQ ID NO: 233113 - protein, 15 aa, Artificial Sequence
  Description of Artificial Sequence: Synthetic peptide
  Seed: LRMKWMMAMKYPITA
LRMKLMMHMPYPATA

SEQ ID NO: 233114 - protein, 15 aa, Artificial Sequence
  Description of Artificial Sequence: Synthetic peptide
  Seed: LRMKWMMAMKYPITA
LRMKLMMHMPYPETA

SEQ ID NO: 233115 - protein, 15 aa, Artificial Sequence
  Description of Artificial Sequence: Synthetic peptide
  Seed: LRMKWMMAMKYPITA
LRMKLMMHMPYPFTA

SEQ ID NO: 233116 - protein, 15 aa, Artificial Sequence
  Description of Artificial Sequence: Synthetic peptide
  Seed: LRMKWMMAMKYPITA
LRMKLMMHMPYPGTA

SEQ ID NO: 233117 - protein, 15 aa, Artificial Sequence
  Description of Artificial Sequence: Synthetic peptide
  Seed: LRMKWMMAMKYPITA
LRMKLMMHMPYPHTA

SEQ ID NO: 233118 - protein, 15 aa, Artificial Sequence
  Description of Artificial Sequence: Synthetic peptide
  Seed: LRMKWMMAMKYPITA
LRMKLMMHMPYPITA

SEQ ID NO: 233119 - protein, 15 aa, Artificial Sequence
  Description of Artificial Sequence: Synthetic peptide
  Seed: LRMKWMMAMKYPITA
LRMKLMMHMPYPKTA

SEQ ID NO: 233120 - protein, 15 aa, Artificial Sequence
  Description of Artificial Sequence: Synthetic peptide
  Seed: LRMKWMMAMKYPITA
LRMKLMMHMPYPLTA

SEQ ID NO: 233121 - protein, 15 aa, Artificial Sequence
  Description of Artificial Sequence: Synthetic peptide
  Seed: LRMKWMMAMKYPITA
LRMKLMMHMPYPMTA

SEQ ID NO: 233122 - protein, 15 aa, Artificial Sequence
  Description of Artificial Sequence: Synthetic peptide
  Seed: LRMKWMMAMKYPITA
LRMKLMMHMPYPQTA

SEQ ID NO: 233123 - protein, 15 aa, Artificial Sequence
  Description of Artificial Sequence: Synthetic peptide
  Seed: LRMKWMMAMKYPITA
LRMKLMMHMPYPRTA

SEQ ID NO: 233124 - protein, 15 aa, Artificial Sequence
  Description of Artificial Sequence: Synthetic peptide
  Seed: LRMKWMMAMKYPITA
LRMKLMMHMPYPSTA

SEQ ID NO: 233125 - protein, 15 aa, Artificial Sequence
  Description of Artificial Sequence: Synthetic peptide
  Seed: LRMKWMMAMKYPITA
LRMKLMMHMPYPTTA

SEQ ID NO: 233126 - protein, 15 aa, Artificial Sequence
  Description of Artificial Sequence: Synthetic peptide
  Seed: LRMKWMMAMKYPITA
LRMKLMMHMPYPVTA

SEQ ID NO: 233127 - protein, 15 aa, Artificial Sequence
  Description of Artificial Sequence: Synthetic peptide
  Seed: LRMKWMMAMKYPITA
LRMKLMMHMPYPYTA

SEQ ID NO: 233128 - protein, 15 aa, Artificial Sequence
  Description of Artificial Sequence: Synthetic peptide
  Seed: LRMKWMMAMKYPITA
LRMKLMMHMQYPATA

SEQ ID NO: 233129 - protein, 15 aa, Artificial Sequence
  Description of Artificial Sequence: Synthetic peptide
  Seed: LRMKWMMAMKYPITA
LRMKLMMHMQYPFTA

SEQ ID NO: 233130 - protein, 15 aa, Artificial Sequence
  Description of Artificial Sequence: Synthetic peptide
  Seed: LRMKWMMAMKYPITA
LRMKLMMHMQYPHTA

SEQ ID NO: 233131 - protein, 15 aa, Artificial Sequence
  Description of Artificial Sequence: Synthetic peptide
  Seed: LRMKWMMAMKYPITA
LRMKLMMHMQYPITA

SEQ ID NO: 233132 - protein, 15 aa, Artificial Sequence
  Description of Artificial Sequence: Synthetic peptide
  Seed: LRMKWMMAMKYPITA
LRMKLMMHMQYPKTA

SEQ ID NO: 233133 - protein, 15 aa, Artificial Sequence
  Description of Artificial Sequence: Synthetic peptide
  Seed: LRMKWMMAMKYPITA
LRMKLMMHMQYPLTA

SEQ ID NO: 233134 - protein, 15 aa, Artificial Sequence
  Description of Artificial Sequence: Synthetic peptide
  Seed: LRMKWMMAMKYPITA
LRMKLMMHMQYPMTA

SEQ ID NO: 233135 - protein, 15 aa, Artificial Sequence
  Description of Artificial Sequence: Synthetic peptide
  Seed: LRMKWMMAMKYPITA
LRMKLMMHMQYPRTA

SEQ ID NO: 233136 - protein, 15 aa, Artificial Sequence
  Description of Artificial Sequence: Synthetic peptide
  Seed: LRMKWMMAMKYPITA
LRMKLMMHMQYPSTA

SEQ ID NO: 233137 - protein, 15 aa, Artificial Sequence
  Description of Artificial Sequence: Synthetic peptide
  Seed: LRMKWMMAMKYPITA
LRMKLMMHMQYPVTA

SEQ ID NO: 233138 - protein, 15 aa, Artificial Sequence
  Description of Artificial Sequence: Synthetic peptide
  Seed: LRMKWMMAMKYPITA
LRMKLMMHMQYPYTA

SEQ ID NO: 233139 - protein, 15 aa, Artificial Sequence
  Description of Artificial Sequence: Synthetic peptide
  Seed: LRMKWMMAMKYPITA
LRMKLMMHMRYPATA

SEQ ID NO: 233140 - protein, 15 aa, Artificial Sequence
  Description of Artificial Sequence: Synthetic peptide
  Seed: LRMKWMMAMKYPITA
LRMKLMMHMRYPCTA

SEQ ID NO: 233141 - protein, 15 aa, Artificial Sequence
  Description of Artificial Sequence: Synthetic peptide
  Seed: LRMKWMMAMKYPITA
LRMKLMMHMRYPDTA

SEQ ID NO: 233142 - protein, 15 aa, Artificial Sequence
  Description of Artificial Sequence: Synthetic peptide
  Seed: LRMKWMMAMKYPITA
LRMKLMMHMRYPETA

SEQ ID NO: 233143 - protein, 15 aa, Artificial Sequence
  Description of Artificial Sequence: Synthetic peptide
  Seed: LRMKWMMAMKYPITA
LRMKLMMHMRYPFTA

SEQ ID NO: 233144 - protein, 15 aa, Artificial Sequence
  Description of Artificial Sequence: Synthetic peptide
  Seed: LRMKWMMAMKYPITA
LRMKLMMHMRYPGTA

SEQ ID NO: 233145 - protein, 15 aa, Artificial Sequence
  Description of Artificial Sequence: Synthetic peptide
  Seed: LRMKWMMAMKYPITA
LRMKLMMHMRYPHTA

SEQ ID NO: 233146 - protein, 15 aa, Artificial Sequence
  Description of Artificial Sequence: Synthetic peptide
  Seed: LRMKWMMAMKYPITA
LRMKLMMHMRYPITA

SEQ ID NO: 233147 - protein, 15 aa, Artificial Sequence
  Description of Artificial Sequence: Synthetic peptide
  Seed: LRMKWMMAMKYPITA
LRMKLMMHMRYPKTA

SEQ ID NO: 233148 - protein, 15 aa, Artificial Sequence
  Description of Artificial Sequence: Synthetic peptide
  Seed: LRMKWMMAMKYPITA
LRMKLMMHMRYPLTA

SEQ ID NO: 233149 - protein, 15 aa, Artificial Sequence
  Description of Artificial Sequence: Synthetic peptide
  Seed: LRMKWMMAMKYPITA
LRMKLMMHMRYPMTA

SEQ ID NO: 233150 - protein, 15 aa, Artificial Sequence
  Description of Artificial Sequence: Synthetic peptide
  Seed: LRMKWMMAMKYPITA
LRMKLMMHMRYPNTA

SEQ ID NO: 233151 - protein, 15 aa, Artificial Sequence
  Description of Artificial Sequence: Synthetic peptide
  Seed: LRMKWMMAMKYPITA
LRMKLMMHMRYPPTA

SEQ ID NO: 233152 - protein, 15 aa, Artificial Sequence
  Description of Artificial Sequence: Synthetic peptide
  Seed: LRMKWMMAMKYPITA
LRMKLMMHMRYPQTA

SEQ ID NO: 233153 - protein, 15 aa, Artificial Sequence
  Description of Artificial Sequence: Synthetic peptide
  Seed: LRMKWMMAMKYPITA
LRMKLMMHMRYPRTA

SEQ ID NO: 233154 - protein, 15 aa, Artificial Sequence
  Description of Artificial Sequence: Synthetic peptide
  Seed: LRMKWMMAMKYPITA
LRMKLMMHMRYPSTA

SEQ ID NO: 233155 - protein, 15 aa, Artificial Sequence
  Description of Artificial Sequence: Synthetic peptide
  Seed: LRMKWMMAMKYPITA
LRMKLMMHMRYPTTA

SEQ ID NO: 233156 - protein, 15 aa, Artificial Sequence
  Description of Artificial Sequence: Synthetic peptide
  Seed: LRMKWMMAMKYPITA
LRMKLMMHMRYPVTA

SEQ ID NO: 233157 - protein, 15 aa, Artificial Sequence
  Description of Artificial Sequence: Synthetic peptide
  Seed: LRMKWMMAMKYPITA
LRMKLMMHMRYPWTA

SEQ ID NO: 233158 - protein, 15 aa, Artificial Sequence
  Description of Artificial Sequence: Synthetic peptide
  Seed: LRMKWMMAMKYPITA
LRMKLMMHMRYPYTA

SEQ ID NO: 233159 - protein, 15 aa, Artificial Sequence
  Description of Artificial Sequence: Synthetic peptide
  Seed: LRMKWMMAMKYPITA
LRMKLMMHMSYPATA

SEQ ID NO: 233160 - protein, 15 aa, Artificial Sequence
  Description of Artificial Sequence: Synthetic peptide
  Seed: LRMKWMMAMKYPITA
LRMKLMMHMSYPETA

SEQ ID NO: 233161 - protein, 15 aa, Artificial Sequence
  Description of Artificial Sequence: Synthetic peptide
  Seed: LRMKWMMAMKYPITA
LRMKLMMHMSYPFTA

SEQ ID NO: 233162 - protein, 15 aa, Artificial Sequence
  Description of Artificial Sequence: Synthetic peptide
  Seed: LRMKWMMAMKYPITA
LRMKLMMHMSYPGTA

SEQ ID NO: 233163 - protein, 15 aa, Artificial Sequence
  Description of Artificial Sequence: Synthetic peptide
  Seed: LRMKWMMAMKYPITA
LRMKLMMHMSYPHTA

SEQ ID NO: 233164 - protein, 15 aa, Artificial Sequence
  Description of Artificial Sequence: Synthetic peptide
  Seed: LRMKWMMAMKYPITA
LRMKLMMHMSYPITA

SEQ ID NO: 233165 - protein, 15 aa, Artificial Sequence
  Description of Artificial Sequence: Synthetic peptide
  Seed: LRMKWMMAMKYPITA
LRMKLMMHMSYPKTA

SEQ ID NO: 233166 - protein, 15 aa, Artificial Sequence
  Description of Artificial Sequence: Synthetic peptide
  Seed: LRMKWMMAMKYPITA
LRMKLMMHMSYPLTA

SEQ ID NO: 233167 - protein, 15 aa, Artificial Sequence
  Description of Artificial Sequence: Synthetic peptide
  Seed: LRMKWMMAMKYPITA
LRMKLMMHMSYPMTA

SEQ ID NO: 233168 - protein, 15 aa, Artificial Sequence
  Description of Artificial Sequence: Synthetic peptide
  Seed: LRMKWMMAMKYPITA
LRMKLMMHMSYPNTA

SEQ ID NO: 233169 - protein, 15 aa, Artificial Sequence
  Description of Artificial Sequence: Synthetic peptide
  Seed: LRMKWMMAMKYPITA
LRMKLMMHMSYPQTA

SEQ ID NO: 233170 - protein, 15 aa, Artificial Sequence
  Description of Artificial Sequence: Synthetic peptide
  Seed: LRMKWMMAMKYPITA
LRMKLMMHMSYPRTA

SEQ ID NO: 233171 - protein, 15 aa, Artificial Sequence
  Description of Artificial Sequence: Synthetic peptide
  Seed: LRMKWMMAMKYPITA
LRMKLMMHMSYPSTA

SEQ ID NO: 233172 - protein, 15 aa, Artificial Sequence
  Description of Artificial Sequence: Synthetic peptide
  Seed: LRMKWMMAMKYPITA
LRMKLMMHMSYPTTA

SEQ ID NO: 233173 - protein, 15 aa, Artificial Sequence
  Description of Artificial Sequence: Synthetic peptide
  Seed: LRMKWMMAMKYPITA
LRMKLMMHMSYPVTA

SEQ ID NO: 233174 - protein, 15 aa, Artificial Sequence
  Description of Artificial Sequence: Synthetic peptide
  Seed: LRMKWMMAMKYPITA
LRMKLMMHMSYPWTA

SEQ ID NO: 233175 - protein, 15 aa, Artificial Sequence
  Description of Artificial Sequence: Synthetic peptide
  Seed: LRMKWMMAMKYPITA
LRMKLMMHMSYPYTA

SEQ ID NO: 233176 - protein, 15 aa, Artificial Sequence
  Description of Artificial Sequence: Synthetic peptide
  Seed: LRMKWMMAMKYPITA
LRMKLMMHMTYPATA

SEQ ID NO: 233177 - protein, 15 aa, Artificial Sequence
  Description of Artificial Sequence: Synthetic peptide
  Seed: LRMKWMMAMKYPITA
LRMKLMMHMTYPFTA

SEQ ID NO: 233178 - protein, 15 aa, Artificial Sequence
  Description of Artificial Sequence: Synthetic peptide
  Seed: LRMKWMMAMKYPITA
LRMKLMMHMTYPGTA

SEQ ID NO: 233179 - protein, 15 aa, Artificial Sequence
  Description of Artificial Sequence: Synthetic peptide
  Seed: LRMKWMMAMKYPITA
LRMKLMMHMTYPHTA

SEQ ID NO: 233180 - protein, 15 aa, Artificial Sequence
  Description of Artificial Sequence: Synthetic peptide
  Seed: LRMKWMMAMKYPITA
LRMKLMMHMTYPITA

SEQ ID NO: 233181 - protein, 15 aa, Artificial Sequence
  Description of Artificial Sequence: Synthetic peptide
  Seed: LRMKWMMAMKYPITA
LRMKLMMHMTYPKTA

SEQ ID NO: 233182 - protein, 15 aa, Artificial Sequence
  Description of Artificial Sequence: Synthetic peptide
  Seed: LRMKWMMAMKYPITA
LRMKLMMHMTYPLTA

SEQ ID NO: 233183 - protein, 15 aa, Artificial Sequence
  Description of Artificial Sequence: Synthetic peptide
  Seed: LRMKWMMAMKYPITA
LRMKLMMHMTYPMTA

SEQ ID NO: 233184 - protein, 15 aa, Artificial Sequence
  Description of Artificial Sequence: Synthetic peptide
  Seed: LRMKWMMAMKYPITA
LRMKLMMHMTYPQTA

SEQ ID NO: 233185 - protein, 15 aa, Artificial Sequence
  Description of Artificial Sequence: Synthetic peptide
  Seed: LRMKWMMAMKYPITA
LRMKLMMHMTYPRTA

SEQ ID NO: 233186 - protein, 15 aa, Artificial Sequence
  Description of Artificial Sequence: Synthetic peptide
  Seed: LRMKWMMAMKYPITA
LRMKLMMHMTYPSTA

SEQ ID NO: 233187 - protein, 15 aa, Artificial Sequence
  Description of Artificial Sequence: Synthetic peptide
  Seed: LRMKWMMAMKYPITA
LRMKLMMHMTYPTTA

SEQ ID NO: 233188 - protein, 15 aa, Artificial Sequence
  Description of Artificial Sequence: Synthetic peptide
  Seed: LRMKWMMAMKYPITA
LRMKLMMHMTYPVTA

SEQ ID NO: 233189 - protein, 15 aa, Artificial Sequence
  Description of Artificial Sequence: Synthetic peptide
  Seed: LRMKWMMAMKYPITA
LRMKLMMHMTYPWTA

SEQ ID NO: 233190 - protein, 15 aa, Artificial Sequence
  Description of Artificial Sequence: Synthetic peptide
  Seed: LRMKWMMAMKYPITA
LRMKLMMHMTYPYTA

SEQ ID NO: 233191 - protein, 15 aa, Artificial Sequence
  Description of Artificial Sequence: Synthetic peptide
  Seed: LRMKWMMAMKYPITA
LRMKLMMHMVYPATA

SEQ ID NO: 233192 - protein, 15 aa, Artificial Sequence
  Description of Artificial Sequence: Synthetic peptide
  Seed: LRMKWMMAMKYPITA
LRMKLMMHMVYPFTA

SEQ ID NO: 233193 - protein, 15 aa, Artificial Sequence
  Description of Artificial Sequence: Synthetic peptide
  Seed: LRMKWMMAMKYPITA
LRMKLMMHMVYPGTA

SEQ ID NO: 233194 - protein, 15 aa, Artificial Sequence
  Description of Artificial Sequence: Synthetic peptide
  Seed: LRMKWMMAMKYPITA
LRMKLMMHMVYPHTA

SEQ ID NO: 233195 - protein, 15 aa, Artificial Sequence
  Description of Artificial Sequence: Synthetic peptide
  Seed: LRMKWMMAMKYPITA
LRMKLMMHMVYPITA

SEQ ID NO: 233196 - protein, 15 aa, Artificial Sequence
  Description of Artificial Sequence: Synthetic peptide
  Seed: LRMKWMMAMKYPITA
LRMKLMMHMVYPKTA

SEQ ID NO: 233197 - protein, 15 aa, Artificial Sequence
  Description of Artificial Sequence: Synthetic peptide
  Seed: LRMKWMMAMKYPITA
LRMKLMMHMVYPLTA

SEQ ID NO: 233198 - protein, 15 aa, Artificial Sequence
  Description of Artificial Sequence: Synthetic peptide
  Seed: LRMKWMMAMKYPITA
LRMKLMMHMVYPMTA

SEQ ID NO: 233199 - protein, 15 aa, Artificial Sequence
  Description of Artificial Sequence: Synthetic peptide
  Seed: LRMKWMMAMKYPITA
LRMKLMMHMVYPNTA

SEQ ID NO: 233200 - protein, 15 aa, Artificial Sequence
  Description of Artificial Sequence: Synthetic peptide
  Seed: LRMKWMMAMKYPITA
LRMKLMMHMVYPQTA

SEQ ID NO: 233201 - protein, 15 aa, Artificial Sequence
  Description of Artificial Sequence: Synthetic peptide
  Seed: LRMKWMMAMKYPITA
LRMKLMMHMVYPRTA

SEQ ID NO: 233202 - protein, 15 aa, Artificial Sequence
  Description of Artificial Sequence: Synthetic peptide
  Seed: LRMKWMMAMKYPITA
LRMKLMMHMVYPSTA

SEQ ID NO: 233203 - protein, 15 aa, Artificial Sequence
  Description of Artificial Sequence: Synthetic peptide
  Seed: LRMKWMMAMKYPITA
LRMKLMMHMVYPTTA

SEQ ID NO: 233204 - protein, 15 aa, Artificial Sequence
  Description of Artificial Sequence: Synthetic peptide
  Seed: LRMKWMMAMKYPITA
LRMKLMMHMVYPVTA

SEQ ID NO: 233205 - protein, 15 aa, Artificial Sequence
  Description of Artificial Sequence: Synthetic peptide
  Seed: LRMKWMMAMKYPITA
LRMKLMMHMVYPYTA

SEQ ID NO: 233206 - protein, 15 aa, Artificial Sequence
  Description of Artificial Sequence: Synthetic peptide
  Seed: LRMKWMMAMKYPITA
LRMKLMMHMWYPRTA

SEQ ID NO: 233207 - protein, 15 aa, Artificial Sequence
  Description of Artificial Sequence: Synthetic peptide
  Seed: LRMKWMMAMKYPITA
LRMKLMMIMAYPATA

SEQ ID NO: 233208 - protein, 15 aa, Artificial Sequence
  Description of Artificial Sequence: Synthetic peptide
  Seed: LRMKWMMAMKYPITA
LRMKLMMIMAYPCTA

SEQ ID NO: 233209 - protein, 15 aa, Artificial Sequence
  Description of Artificial Sequence: Synthetic peptide
  Seed: LRMKWMMAMKYPITA
LRMKLMMIMAYPDTA

SEQ ID NO: 233210 - protein, 15 aa, Artificial Sequence
  Description of Artificial Sequence: Synthetic peptide
  Seed: LRMKWMMAMKYPITA
LRMKLMMIMAYPETA

SEQ ID NO: 233211 - protein, 15 aa, Artificial Sequence
  Description of Artificial Sequence: Synthetic peptide
  Seed: LRMKWMMAMKYPITA
LRMKLMMIMAYPFTA

SEQ ID NO: 233212 - protein, 15 aa, Artificial Sequence
  Description of Artificial Sequence: Synthetic peptide
  Seed: LRMKWMMAMKYPITA
LRMKLMMIMAYPGTA

SEQ ID NO: 233213 - protein, 15 aa, Artificial Sequence
  Description of Artificial Sequence: Synthetic peptide
  Seed: LRMKWMMAMKYPITA
LRMKLMMIMAYPHTA

SEQ ID NO: 233214 - protein, 15 aa, Artificial Sequence
  Description of Artificial Sequence: Synthetic peptide
  Seed: LRMKWMMAMKYPITA
LRMKLMMIMAYPITA

SEQ ID NO: 233215 - protein, 15 aa, Artificial Sequence
  Description of Artificial Sequence: Synthetic peptide
  Seed: LRMKWMMAMKYPITA
LRMKLMMIMAYPKTA

SEQ ID NO: 233216 - protein, 15 aa, Artificial Sequence
  Description of Artificial Sequence: Synthetic peptide
  Seed: LRMKWMMAMKYPITA
LRMKLMMIMAYPLTA

SEQ ID NO: 233217 - protein, 15 aa, Artificial Sequence
  Description of Artificial Sequence: Synthetic peptide
  Seed: LRMKWMMAMKYPITA
LRMKLMMIMAYPMTA

SEQ ID NO: 233218 - protein, 15 aa, Artificial Sequence
  Description of Artificial Sequence: Synthetic peptide
  Seed: LRMKWMMAMKYPITA
LRMKLMMIMAYPNTA

SEQ ID NO: 233219 - protein, 15 aa, Artificial Sequence
  Description of Artificial Sequence: Synthetic peptide
  Seed: LRMKWMMAMKYPITA
LRMKLMMIMAYPPTA

SEQ ID NO: 233220 - protein, 15 aa, Artificial Sequence
  Description of Artificial Sequence: Synthetic peptide
  Seed: LRMKWMMAMKYPITA
LRMKLMMIMAYPQTA

SEQ ID NO: 233221 - protein, 15 aa, Artificial Sequence
  Description of Artificial Sequence: Synthetic peptide
  Seed: LRMKWMMAMKYPITA
LRMKLMMIMAYPRTA

SEQ ID NO: 233222 - protein, 15 aa, Artificial Sequence
  Description of Artificial Sequence: Synthetic peptide
  Seed: LRMKWMMAMKYPITA
LRMKLMMIMAYPSTA

SEQ ID NO: 233223 - protein, 15 aa, Artificial Sequence
  Description of Artificial Sequence: Synthetic peptide
  Seed: LRMKWMMAMKYPITA
LRMKLMMIMAYPTTA

SEQ ID NO: 233224 - protein, 15 aa, Artificial Sequence
  Description of Artificial Sequence: Synthetic peptide
  Seed: LRMKWMMAMKYPITA
LRMKLMMIMAYPVTA

SEQ ID NO: 233225 - protein, 15 aa, Artificial Sequence
  Description of Artificial Sequence: Synthetic peptide
  Seed: LRMKWMMAMKYPITA
LRMKLMMIMAYPYTA

SEQ ID NO: 233226 - protein, 15 aa, Artificial Sequence
  Description of Artificial Sequence: Synthetic peptide
  Seed: LRMKWMMAMKYPITA
LRMKLMMIMCYPATA

SEQ ID NO: 233227 - protein, 15 aa, Artificial Sequence
  Description of Artificial Sequence: Synthetic peptide
  Seed: LRMKWMMAMKYPITA
LRMKLMMIMCYPVTA

SEQ ID NO: 233228 - protein, 15 aa, Artificial Sequence
  Description of Artificial Sequence: Synthetic peptide
  Seed: LRMKWMMAMKYPITA
LRMKLMMIMDYPATA

SEQ ID NO: 233229 - protein, 15 aa, Artificial Sequence
  Description of Artificial Sequence: Synthetic peptide
  Seed: LRMKWMMAMKYPITA
LRMKLMMIMDYPDTA

SEQ ID NO: 233230 - protein, 15 aa, Artificial Sequence
  Description of Artificial Sequence: Synthetic peptide
  Seed: LRMKWMMAMKYPITA
LRMKLMMIMDYPETA

SEQ ID NO: 233231 - protein, 15 aa, Artificial Sequence
  Description of Artificial Sequence: Synthetic peptide
  Seed: LRMKWMMAMKYPITA
LRMKLMMIMDYPITA

SEQ ID NO: 233232 - protein, 15 aa, Artificial Sequence
  Description of Artificial Sequence: Synthetic peptide
  Seed: LRMKWMMAMKYPITA
LRMKLMMIMDYPLTA

SEQ ID NO: 233233 - protein, 15 aa, Artificial Sequence
  Description of Artificial Sequence: Synthetic peptide
  Seed: LRMKWMMAMKYPITA
LRMKLMMIMDYPMTA

SEQ ID NO: 233234 - protein, 15 aa, Artificial Sequence
  Description of Artificial Sequence: Synthetic peptide
  Seed: LRMKWMMAMKYPITA
LRMKLMMIMDYPSTA

SEQ ID NO: 233235 - protein, 15 aa, Artificial Sequence
  Description of Artificial Sequence: Synthetic peptide
  Seed: LRMKWMMAMKYPITA
LRMKLMMIMDYPVTA

SEQ ID NO: 233236 - protein, 15 aa, Artificial Sequence
  Description of Artificial Sequence: Synthetic peptide
  Seed: LRMKWMMAMKYPITA
LRMKLMMIMEYPATA

SEQ ID NO: 233237 - protein, 15 aa, Artificial Sequence
  Description of Artificial Sequence: Synthetic peptide
  Seed: LRMKWMMAMKYPITA
LRMKLMMIMEYPITA

SEQ ID NO: 233238 - protein, 15 aa, Artificial Sequence
  Description of Artificial Sequence: Synthetic peptide
  Seed: LRMKWMMAMKYPITA
LRMKLMMIMEYPLTA

SEQ ID NO: 233239 - protein, 15 aa, Artificial Sequence
  Description of Artificial Sequence: Synthetic peptide
  Seed: LRMKWMMAMKYPITA
LRMKLMMIMEYPVTA

SEQ ID NO: 233240 - protein, 15 aa, Artificial Sequence
  Description of Artificial Sequence: Synthetic peptide
  Seed: LRMKWMMAMKYPITA
LRMKLMMIMGYPATA

SEQ ID NO: 233241 - protein, 15 aa, Artificial Sequence
  Description of Artificial Sequence: Synthetic peptide
  Seed: LRMKWMMAMKYPITA
LRMKLMMIMGYPCTA

SEQ ID NO: 233242 - protein, 15 aa, Artificial Sequence
  Description of Artificial Sequence: Synthetic peptide
  Seed: LRMKWMMAMKYPITA
LRMKLMMIMGYPDTA

SEQ ID NO: 233243 - protein, 15 aa, Artificial Sequence
  Description of Artificial Sequence: Synthetic peptide
  Seed: LRMKWMMAMKYPITA
LRMKLMMIMGYPETA

SEQ ID NO: 233244 - protein, 15 aa, Artificial Sequence
  Description of Artificial Sequence: Synthetic peptide
  Seed: LRMKWMMAMKYPITA
LRMKLMMIMGYPFTA

SEQ ID NO: 233245 - protein, 15 aa, Artificial Sequence
  Description of Artificial Sequence: Synthetic peptide
  Seed: LRMKWMMAMKYPITA
LRMKLMMIMGYPGTA

SEQ ID NO: 233246 - protein, 15 aa, Artificial Sequence
  Description of Artificial Sequence: Synthetic peptide
  Seed: LRMKWMMAMKYPITA
LRMKLMMIMGYPHTA

SEQ ID NO: 233247 - protein, 15 aa, Artificial Sequence
  Description of Artificial Sequence: Synthetic peptide
  Seed: LRMKWMMAMKYPITA
LRMKLMMIMGYPITA

SEQ ID NO: 233248 - protein, 15 aa, Artificial Sequence
  Description of Artificial Sequence: Synthetic peptide
  Seed: LRMKWMMAMKYPITA
LRMKLMMIMGYPKTA

SEQ ID NO: 233249 - protein, 15 aa, Artificial Sequence
  Description of Artificial Sequence: Synthetic peptide
  Seed: LRMKWMMAMKYPITA
LRMKLMMIMGYPLTA

SEQ ID NO: 233250 - protein, 15 aa, Artificial Sequence
  Description of Artificial Sequence: Synthetic peptide
  Seed: LRMKWMMAMKYPITA
LRMKLMMIMGYPMTA

SEQ ID NO: 233251 - protein, 15 aa, Artificial Sequence
  Description of Artificial Sequence: Synthetic peptide
  Seed: LRMKWMMAMKYPITA
LRMKLMMIMGYPNTA

SEQ ID NO: 233252 - protein, 15 aa, Artificial Sequence
  Description of Artificial Sequence: Synthetic peptide
  Seed: LRMKWMMAMKYPITA
LRMKLMMIMGYPPTA

SEQ ID NO: 233253 - protein, 15 aa, Artificial Sequence
  Description of Artificial Sequence: Synthetic peptide
  Seed: LRMKWMMAMKYPITA
LRMKLMMIMGYPQTA

SEQ ID NO: 233254 - protein, 15 aa, Artificial Sequence
  Description of Artificial Sequence: Synthetic peptide
  Seed: LRMKWMMAMKYPITA
LRMKLMMIMGYPRTA

SEQ ID NO: 233255 - protein, 15 aa, Artificial Sequence
  Description of Artificial Sequence: Synthetic peptide
  Seed: LRMKWMMAMKYPITA
LRMKLMMIMGYPSTA

SEQ ID NO: 233256 - protein, 15 aa, Artificial Sequence
  Description of Artificial Sequence: Synthetic peptide
  Seed: LRMKWMMAMKYPITA
LRMKLMMIMGYPTTA

SEQ ID NO: 233257 - protein, 15 aa, Artificial Sequence
  Description of Artificial Sequence: Synthetic peptide
  Seed: LRMKWMMAMKYPITA
LRMKLMMIMGYPVTA

SEQ ID NO: 233258 - protein, 15 aa, Artificial Sequence
  Description of Artificial Sequence: Synthetic peptide
  Seed: LRMKWMMAMKYPITA
LRMKLMMIMGYPYTA

SEQ ID NO: 233259 - protein, 15 aa, Artificial Sequence
  Description of Artificial Sequence: Synthetic peptide
  Seed: LRMKWMMAMKYPITA
LRMKLMMIMHYPATA

SEQ ID NO: 233260 - protein, 15 aa, Artificial Sequence
  Description of Artificial Sequence: Synthetic peptide
  Seed: LRMKWMMAMKYPITA
LRMKLMMIMHYPGTA

SEQ ID NO: 233261 - protein, 15 aa, Artificial Sequence
  Description of Artificial Sequence: Synthetic peptide
  Seed: LRMKWMMAMKYPITA
LRMKLMMIMHYPHTA

SEQ ID NO: 233262 - protein, 15 aa, Artificial Sequence
  Description of Artificial Sequence: Synthetic peptide
  Seed: LRMKWMMAMKYPITA
LRMKLMMIMHYPITA

SEQ ID NO: 233263 - protein, 15 aa, Artificial Sequence
  Description of Artificial Sequence: Synthetic peptide
  Seed: LRMKWMMAMKYPITA
LRMKLMMIMHYPKTA

SEQ ID NO: 233264 - protein, 15 aa, Artificial Sequence
  Description of Artificial Sequence: Synthetic peptide
  Seed: LRMKWMMAMKYPITA
LRMKLMMIMHYPLTA

SEQ ID NO: 233265 - protein, 15 aa, Artificial Sequence
  Description of Artificial Sequence: Synthetic peptide
  Seed: LRMKWMMAMKYPITA
LRMKLMMIMHYPMTA

SEQ ID NO: 233266 - protein, 15 aa, Artificial Sequence
  Description of Artificial Sequence: Synthetic peptide
  Seed: LRMKWMMAMKYPITA
LRMKLMMIMHYPNTA

SEQ ID NO: 233267 - protein, 15 aa, Artificial Sequence
  Description of Artificial Sequence: Synthetic peptide
  Seed: LRMKWMMAMKYPITA
LRMKLMMIMHYPQTA

SEQ ID NO: 233268 - protein, 15 aa, Artificial Sequence
  Description of Artificial Sequence: Synthetic peptide
  Seed: LRMKWMMAMKYPITA
LRMKLMMIMHYPRTA

SEQ ID NO: 233269 - protein, 15 aa, Artificial Sequence
  Description of Artificial Sequence: Synthetic peptide
  Seed: LRMKWMMAMKYPITA
LRMKLMMIMHYPSTA

SEQ ID NO: 233270 - protein, 15 aa, Artificial Sequence
  Description of Artificial Sequence: Synthetic peptide
  Seed: LRMKWMMAMKYPITA
LRMKLMMIMHYPTTA

SEQ ID NO: 233271 - protein, 15 aa, Artificial Sequence
  Description of Artificial Sequence: Synthetic peptide
  Seed: LRMKWMMAMKYPITA
LRMKLMMIMHYPVTA

SEQ ID NO: 233272 - protein, 15 aa, Artificial Sequence
  Description of Artificial Sequence: Synthetic peptide
  Seed: LRMKWMMAMKYPITA
LRMKLMMIMHYPYTA

SEQ ID NO: 233273 - protein, 15 aa, Artificial Sequence
  Description of Artificial Sequence: Synthetic peptide
  Seed: LRMKWMMAMKYPITA
LRMKLMMIMIYPATA

SEQ ID NO: 233274 - protein, 15 aa, Artificial Sequence
  Description of Artificial Sequence: Synthetic peptide
  Seed: LRMKWMMAMKYPITA
LRMKLMMIMIYPDTA

SEQ ID NO: 233275 - protein, 15 aa, Artificial Sequence
  Description of Artificial Sequence: Synthetic peptide
  Seed: LRMKWMMAMKYPITA
LRMKLMMIMIYPETA

SEQ ID NO: 233276 - protein, 15 aa, Artificial Sequence
  Description of Artificial Sequence: Synthetic peptide
  Seed: LRMKWMMAMKYPITA
LRMKLMMIMIYPGTA

SEQ ID NO: 233277 - protein, 15 aa, Artificial Sequence
  Description of Artificial Sequence: Synthetic peptide
  Seed: LRMKWMMAMKYPITA
LRMKLMMIMIYPKTA

SEQ ID NO: 233278 - protein, 15 aa, Artificial Sequence
  Description of Artificial Sequence: Synthetic peptide
  Seed: LRMKWMMAMKYPITA
LRMKLMMIMIYPMTA

SEQ ID NO: 233279 - protein, 15 aa, Artificial Sequence
  Description of Artificial Sequence: Synthetic peptide
  Seed: LRMKWMMAMKYPITA
LRMKLMMIMIYPNTA

SEQ ID NO: 233280 - protein, 15 aa, Artificial Sequence
  Description of Artificial Sequence: Synthetic peptide
  Seed: LRMKWMMAMKYPITA
LRMKLMMIMIYPRTA

SEQ ID NO: 233281 - protein, 15 aa, Artificial Sequence
  Description of Artificial Sequence: Synthetic peptide
  Seed: LRMKWMMAMKYPITA
LRMKLMMIMIYPSTA

SEQ ID NO: 233282 - protein, 15 aa, Artificial Sequence
  Description of Artificial Sequence: Synthetic peptide
  Seed: LRMKWMMAMKYPITA
LRMKLMMIMIYPTTA

SEQ ID NO: 233283 - protein, 15 aa, Artificial Sequence
  Description of Artificial Sequence: Synthetic peptide
  Seed: LRMKWMMAMKYPITA
LRMKLMMIMIYPVTA

SEQ ID NO: 233284 - protein, 15 aa, Artificial Sequence
  Description of Artificial Sequence: Synthetic peptide
  Seed: LRMKWMMAMKYPITA
LRMKLMMIMKYPATA

SEQ ID NO: 233285 - protein, 15 aa, Artificial Sequence
  Description of Artificial Sequence: Synthetic peptide
  Seed: LRMKWMMAMKYPITA
LRMKLMMIMKYPCTA

SEQ ID NO: 233286 - protein, 15 aa, Artificial Sequence
  Description of Artificial Sequence: Synthetic peptide
  Seed: LRMKWMMAMKYPITA
LRMKLMMIMKYPDTA

SEQ ID NO: 233287 - protein, 15 aa, Artificial Sequence
  Description of Artificial Sequence: Synthetic peptide
  Seed: LRMKWMMAMKYPITA
LRMKLMMIMKYPETA

SEQ ID NO: 233288 - protein, 15 aa, Artificial Sequence
  Description of Artificial Sequence: Synthetic peptide
  Seed: LRMKWMMAMKYPITA
LRMKLMMIMKYPFTA

SEQ ID NO: 233289 - protein, 15 aa, Artificial Sequence
  Description of Artificial Sequence: Synthetic peptide
  Seed: LRMKWMMAMKYPITA
LRMKLMMIMKYPGTA

SEQ ID NO: 233290 - protein, 15 aa, Artificial Sequence
  Description of Artificial Sequence: Synthetic peptide
  Seed: LRMKWMMAMKYPITA
LRMKLMMIMKYPHTA

SEQ ID NO: 233291 - protein, 15 aa, Artificial Sequence
  Description of Artificial Sequence: Synthetic peptide
  Seed: LRMKWMMAMKYPITA
LRMKLMMIMKYPITA

SEQ ID NO: 233292 - protein, 15 aa, Artificial Sequence
  Description of Artificial Sequence: Synthetic peptide
  Seed: LRMKWMMAMKYPITA
LRMKLMMIMKYPKTA

SEQ ID NO: 233293 - protein, 15 aa, Artificial Sequence
  Description of Artificial Sequence: Synthetic peptide
  Seed: LRMKWMMAMKYPITA
LRMKLMMIMKYPLTA

SEQ ID NO: 233294 - protein, 15 aa, Artificial Sequence
  Description of Artificial Sequence: Synthetic peptide
  Seed: LRMKWMMAMKYPITA
LRMKLMMIMKYPMTA

SEQ ID NO: 233295 - protein, 15 aa, Artificial Sequence
  Description of Artificial Sequence: Synthetic peptide
  Seed: LRMKWMMAMKYPITA
LRMKLMMIMKYPNTA

SEQ ID NO: 233296 - protein, 15 aa, Artificial Sequence
  Description of Artificial Sequence: Synthetic peptide
  Seed: LRMKWMMAMKYPITA
LRMKLMMIMKYPPTA

SEQ ID NO: 233297 - protein, 15 aa, Artificial Sequence
  Description of Artificial Sequence: Synthetic peptide
  Seed: LRMKWMMAMKYPITA
LRMKLMMIMKYPQTA

SEQ ID NO: 233298 - protein, 15 aa, Artificial Sequence
  Description of Artificial Sequence: Synthetic peptide
  Seed: LRMKWMMAMKYPITA
LRMKLMMIMKYPRTA

SEQ ID NO: 233299 - protein, 15 aa, Artificial Sequence
  Description of Artificial Sequence: Synthetic peptide
  Seed: LRMKWMMAMKYPITA
LRMKLMMIMKYPSTA

SEQ ID NO: 233300 - protein, 15 aa, Artificial Sequence
  Description of Artificial Sequence: Synthetic peptide
  Seed: LRMKWMMAMKYPITA
LRMKLMMIMKYPTTA

SEQ ID NO: 233301 - protein, 15 aa, Artificial Sequence
  Description of Artificial Sequence: Synthetic peptide
  Seed: LRMKWMMAMKYPITA
LRMKLMMIMKYPVTA

SEQ ID NO: 233302 - protein, 15 aa, Artificial Sequence
  Description of Artificial Sequence: Synthetic peptide
  Seed: LRMKWMMAMKYPITA
LRMKLMMIMKYPWTA

SEQ ID NO: 233303 - protein, 15 aa, Artificial Sequence
  Description of Artificial Sequence: Synthetic peptide
  Seed: LRMKWMMAMKYPITA
LRMKLMMIMKYPYTA

SEQ ID NO: 233304 - protein, 15 aa, Artificial Sequence
  Description of Artificial Sequence: Synthetic peptide
  Seed: LRMKWMMAMKYPITA
LRMKLMMIMMYPKTA

SEQ ID NO: 233305 - protein, 15 aa, Artificial Sequence
  Description of Artificial Sequence: Synthetic peptide
  Seed: LRMKWMMAMKYPITA
LRMKLMMIMMYPRTA

SEQ ID NO: 233306 - protein, 15 aa, Artificial Sequence
  Description of Artificial Sequence: Synthetic peptide
  Seed: LRMKWMMAMKYPITA
LRMKLMMIMNYPATA

SEQ ID NO: 233307 - protein, 15 aa, Artificial Sequence
  Description of Artificial Sequence: Synthetic peptide
  Seed: LRMKWMMAMKYPITA
LRMKLMMIMNYPCTA

SEQ ID NO: 233308 - protein, 15 aa, Artificial Sequence
  Description of Artificial Sequence: Synthetic peptide
  Seed: LRMKWMMAMKYPITA
LRMKLMMIMNYPDTA

SEQ ID NO: 233309 - protein, 15 aa, Artificial Sequence
  Description of Artificial Sequence: Synthetic peptide
  Seed: LRMKWMMAMKYPITA
LRMKLMMIMNYPETA

SEQ ID NO: 233310 - protein, 15 aa, Artificial Sequence
  Description of Artificial Sequence: Synthetic peptide
  Seed: LRMKWMMAMKYPITA
LRMKLMMIMNYPFTA

SEQ ID NO: 233311 - protein, 15 aa, Artificial Sequence
  Description of Artificial Sequence: Synthetic peptide
  Seed: LRMKWMMAMKYPITA
LRMKLMMIMNYPGTA

SEQ ID NO: 233312 - protein, 15 aa, Artificial Sequence
  Description of Artificial Sequence: Synthetic peptide
  Seed: LRMKWMMAMKYPITA
LRMKLMMIMNYPHTA

SEQ ID NO: 233313 - protein, 15 aa, Artificial Sequence
  Description of Artificial Sequence: Synthetic peptide
  Seed: LRMKWMMAMKYPITA
LRMKLMMIMNYPITA

SEQ ID NO: 233314 - protein, 15 aa, Artificial Sequence
  Description of Artificial Sequence: Synthetic peptide
  Seed: LRMKWMMAMKYPITA
LRMKLMMIMNYPKTA

SEQ ID NO: 233315 - protein, 15 aa, Artificial Sequence
  Description of Artificial Sequence: Synthetic peptide
  Seed: LRMKWMMAMKYPITA
LRMKLMMIMNYPLTA

SEQ ID NO: 233316 - protein, 15 aa, Artificial Sequence
  Description of Artificial Sequence: Synthetic peptide
  Seed: LRMKWMMAMKYPITA
LRMKLMMIMNYPMTA

SEQ ID NO: 233317 - protein, 15 aa, Artificial Sequence
  Description of Artificial Sequence: Synthetic peptide
  Seed: LRMKWMMAMKYPITA
LRMKLMMIMNYPNTA

SEQ ID NO: 233318 - protein, 15 aa, Artificial Sequence
  Description of Artificial Sequence: Synthetic peptide
  Seed: LRMKWMMAMKYPITA
LRMKLMMIMNYPQTA

SEQ ID NO: 233319 - protein, 15 aa, Artificial Sequence
  Description of Artificial Sequence: Synthetic peptide
  Seed: LRMKWMMAMKYPITA
LRMKLMMIMNYPRTA

SEQ ID NO: 233320 - protein, 15 aa, Artificial Sequence
  Description of Artificial Sequence: Synthetic peptide
  Seed: LRMKWMMAMKYPITA
LRMKLMMIMNYPSTA

SEQ ID NO: 233321 - protein, 15 aa, Artificial Sequence
  Description of Artificial Sequence: Synthetic peptide
  Seed: LRMKWMMAMKYPITA
LRMKLMMIMNYPTTA

SEQ ID NO: 233322 - protein, 15 aa, Artificial Sequence
  Description of Artificial Sequence: Synthetic peptide
  Seed: LRMKWMMAMKYPITA
LRMKLMMIMNYPVTA

SEQ ID NO: 233323 - protein, 15 aa, Artificial Sequence
  Description of Artificial Sequence: Synthetic peptide
  Seed: LRMKWMMAMKYPITA
LRMKLMMIMNYPYTA

SEQ ID NO: 233324 - protein, 15 aa, Artificial Sequence
  Description of Artificial Sequence: Synthetic peptide
  Seed: LRMKWMMAMKYPITA
LRMKLMMIMPYPATA

SEQ ID NO: 233325 - protein, 15 aa, Artificial Sequence
  Description of Artificial Sequence: Synthetic peptide
  Seed: LRMKWMMAMKYPITA
LRMKLMMIMPYPCTA

SEQ ID NO: 233326 - protein, 15 aa, Artificial Sequence
  Description of Artificial Sequence: Synthetic peptide
  Seed: LRMKWMMAMKYPITA
LRMKLMMIMPYPDTA

SEQ ID NO: 233327 - protein, 15 aa, Artificial Sequence
  Description of Artificial Sequence: Synthetic peptide
  Seed: LRMKWMMAMKYPITA
LRMKLMMIMPYPETA

SEQ ID NO: 233328 - protein, 15 aa, Artificial Sequence
  Description of Artificial Sequence: Synthetic peptide
  Seed: LRMKWMMAMKYPITA
LRMKLMMIMPYPFTA

SEQ ID NO: 233329 - protein, 15 aa, Artificial Sequence
  Description of Artificial Sequence: Synthetic peptide
  Seed: LRMKWMMAMKYPITA
LRMKLMMIMPYPGTA

SEQ ID NO: 233330 - protein, 15 aa, Artificial Sequence
  Description of Artificial Sequence: Synthetic peptide
  Seed: LRMKWMMAMKYPITA
LRMKLMMIMPYPHTA

SEQ ID NO: 233331 - protein, 15 aa, Artificial Sequence
  Description of Artificial Sequence: Synthetic peptide
  Seed: LRMKWMMAMKYPITA
LRMKLMMIMPYPITA

SEQ ID NO: 233332 - protein, 15 aa, Artificial Sequence
  Description of Artificial Sequence: Synthetic peptide
  Seed: LRMKWMMAMKYPITA
LRMKLMMIMPYPKTA

SEQ ID NO: 233333 - protein, 15 aa, Artificial Sequence
  Description of Artificial Sequence: Synthetic peptide
  Seed: LRMKWMMAMKYPITA
LRMKLMMIMPYPLTA

SEQ ID NO: 233334 - protein, 15 aa, Artificial Sequence
  Description of Artificial Sequence: Synthetic peptide
  Seed: LRMKWMMAMKYPITA
LRMKLMMIMPYPMTA

SEQ ID NO: 233335 - protein, 15 aa, Artificial Sequence
  Description of Artificial Sequence: Synthetic peptide
  Seed: LRMKWMMAMKYPITA
LRMKLMMIMPYPNTA

SEQ ID NO: 233336 - protein, 15 aa, Artificial Sequence
  Description of Artificial Sequence: Synthetic peptide
  Seed: LRMKWMMAMKYPITA
LRMKLMMIMPYPPTA

SEQ ID NO: 233337 - protein, 15 aa, Artificial Sequence
  Description of Artificial Sequence: Synthetic peptide
  Seed: LRMKWMMAMKYPITA
LRMKLMMIMPYPQTA

SEQ ID NO: 233338 - protein, 15 aa, Artificial Sequence
  Description of Artificial Sequence: Synthetic peptide
  Seed: LRMKWMMAMKYPITA
LRMKLMMIMPYPRTA

SEQ ID NO: 233339 - protein, 15 aa, Artificial Sequence
  Description of Artificial Sequence: Synthetic peptide
  Seed: LRMKWMMAMKYPITA
LRMKLMMIMPYPSTA

SEQ ID NO: 233340 - protein, 15 aa, Artificial Sequence
  Description of Artificial Sequence: Synthetic peptide
  Seed: LRMKWMMAMKYPITA
LRMKLMMIMPYPTTA

SEQ ID NO: 233341 - protein, 15 aa, Artificial Sequence
  Description of Artificial Sequence: Synthetic peptide
  Seed: LRMKWMMAMKYPITA
LRMKLMMIMPYPVTA

SEQ ID NO: 233342 - protein, 15 aa, Artificial Sequence
  Description of Artificial Sequence: Synthetic peptide
  Seed: LRMKWMMAMKYPITA
LRMKLMMIMPYPWTA

SEQ ID NO: 233343 - protein, 15 aa, Artificial Sequence
  Description of Artificial Sequence: Synthetic peptide
  Seed: LRMKWMMAMKYPITA
LRMKLMMIMPYPYTA

SEQ ID NO: 233344 - protein, 15 aa, Artificial Sequence
  Description of Artificial Sequence: Synthetic peptide
  Seed: LRMKWMMAMKYPITA
LRMKLMMIMQYPATA

SEQ ID NO: 233345 - protein, 15 aa, Artificial Sequence
  Description of Artificial Sequence: Synthetic peptide
  Seed: LRMKWMMAMKYPITA
LRMKLMMIMQYPKTA

SEQ ID NO: 233346 - protein, 15 aa, Artificial Sequence
  Description of Artificial Sequence: Synthetic peptide
  Seed: LRMKWMMAMKYPITA
LRMKLMMIMQYPLTA

SEQ ID NO: 233347 - protein, 15 aa, Artificial Sequence
  Description of Artificial Sequence: Synthetic peptide
  Seed: LRMKWMMAMKYPITA
LRMKLMMIMQYPRTA

SEQ ID NO: 233348 - protein, 15 aa, Artificial Sequence
  Description of Artificial Sequence: Synthetic peptide
  Seed: LRMKWMMAMKYPITA
LRMKLMMIMQYPSTA

SEQ ID NO: 233349 - protein, 15 aa, Artificial Sequence
  Description of Artificial Sequence: Synthetic peptide
  Seed: LRMKWMMAMKYPITA
LRMKLMMIMQYPVTA

SEQ ID NO: 233350 - protein, 15 aa, Artificial Sequence
  Description of Artificial Sequence: Synthetic peptide
  Seed: LRMKWMMAMKYPITA
LRMKLMMIMRYPATA

SEQ ID NO: 233351 - protein, 15 aa, Artificial Sequence
  Description of Artificial Sequence: Synthetic peptide
  Seed: LRMKWMMAMKYPITA
LRMKLMMIMRYPCTA

SEQ ID NO: 233352 - protein, 15 aa, Artificial Sequence
  Description of Artificial Sequence: Synthetic peptide
  Seed: LRMKWMMAMKYPITA
LRMKLMMIMRYPDTA

SEQ ID NO: 233353 - protein, 15 aa, Artificial Sequence
  Description of Artificial Sequence: Synthetic peptide
  Seed: LRMKWMMAMKYPITA
LRMKLMMIMRYPETA

SEQ ID NO: 233354 - protein, 15 aa, Artificial Sequence
  Description of Artificial Sequence: Synthetic peptide
  Seed: LRMKWMMAMKYPITA
LRMKLMMIMRYPFTA

SEQ ID NO: 233355 - protein, 15 aa, Artificial Sequence
  Description of Artificial Sequence: Synthetic peptide
  Seed: LRMKWMMAMKYPITA
LRMKLMMIMRYPGTA

SEQ ID NO: 233356 - protein, 15 aa, Artificial Sequence
  Description of Artificial Sequence: Synthetic peptide
  Seed: LRMKWMMAMKYPITA
LRMKLMMIMRYPHTA

SEQ ID NO: 233357 - protein, 15 aa, Artificial Sequence
  Description of Artificial Sequence: Synthetic peptide
  Seed: LRMKWMMAMKYPITA
LRMKLMMIMRYPITA

SEQ ID NO: 233358 - protein, 15 aa, Artificial Sequence
  Description of Artificial Sequence: Synthetic peptide
  Seed: LRMKWMMAMKYPITA
LRMKLMMIMRYPKTA

SEQ ID NO: 233359 - protein, 15 aa, Artificial Sequence
  Description of Artificial Sequence: Synthetic peptide
  Seed: LRMKWMMAMKYPITA
LRMKLMMIMRYPLTA

SEQ ID NO: 233360 - protein, 15 aa, Artificial Sequence
  Description of Artificial Sequence: Synthetic peptide
  Seed: LRMKWMMAMKYPITA
LRMKLMMIMRYPMTA

SEQ ID NO: 233361 - protein, 15 aa, Artificial Sequence
  Description of Artificial Sequence: Synthetic peptide
  Seed: LRMKWMMAMKYPITA
LRMKLMMIMRYPNTA

SEQ ID NO: 233362 - protein, 15 aa, Artificial Sequence
  Description of Artificial Sequence: Synthetic peptide
  Seed: LRMKWMMAMKYPITA
LRMKLMMIMRYPPTA

SEQ ID NO: 233363 - protein, 15 aa, Artificial Sequence
  Description of Artificial Sequence: Synthetic peptide
  Seed: LRMKWMMAMKYPITA
LRMKLMMIMRYPQTA

SEQ ID NO: 233364 - protein, 15 aa, Artificial Sequence
  Description of Artificial Sequence: Synthetic peptide
  Seed: LRMKWMMAMKYPITA
LRMKLMMIMRYPRTA

SEQ ID NO: 233365 - protein, 15 aa, Artificial Sequence
  Description of Artificial Sequence: Synthetic peptide
  Seed: LRMKWMMAMKYPITA
LRMKLMMIMRYPSTA

SEQ ID NO: 233366 - protein, 15 aa, Artificial Sequence
  Description of Artificial Sequence: Synthetic peptide
  Seed: LRMKWMMAMKYPITA
LRMKLMMIMRYPTTA

SEQ ID NO: 233367 - protein, 15 aa, Artificial Sequence
  Description of Artificial Sequence: Synthetic peptide
  Seed: LRMKWMMAMKYPITA
LRMKLMMIMRYPVTA

SEQ ID NO: 233368 - protein, 15 aa, Artificial Sequence
  Description of Artificial Sequence: Synthetic peptide
  Seed: LRMKWMMAMKYPITA
LRMKLMMIMRYPWTA

SEQ ID NO: 233369 - protein, 15 aa, Artificial Sequence
  Description of Artificial Sequence: Synthetic peptide
  Seed: LRMKWMMAMKYPITA
LRMKLMMIMRYPYTA

SEQ ID NO: 233370 - protein, 15 aa, Artificial Sequence
  Description of Artificial Sequence: Synthetic peptide
  Seed: LRMKWMMAMKYPITA
LRMKLMMIMSYPATA

SEQ ID NO: 233371 - protein, 15 aa, Artificial Sequence
  Description of Artificial Sequence: Synthetic peptide
  Seed: LRMKWMMAMKYPITA
LRMKLMMIMSYPCTA

SEQ ID NO: 233372 - protein, 15 aa, Artificial Sequence
  Description of Artificial Sequence: Synthetic peptide
  Seed: LRMKWMMAMKYPITA
LRMKLMMIMSYPDTA

SEQ ID NO: 233373 - protein, 15 aa, Artificial Sequence
  Description of Artificial Sequence: Synthetic peptide
  Seed: LRMKWMMAMKYPITA
LRMKLMMIMSYPETA

SEQ ID NO: 233374 - protein, 15 aa, Artificial Sequence
  Description of Artificial Sequence: Synthetic peptide
  Seed: LRMKWMMAMKYPITA
LRMKLMMIMSYPFTA

SEQ ID NO: 233375 - protein, 15 aa, Artificial Sequence
  Description of Artificial Sequence: Synthetic peptide
  Seed: LRMKWMMAMKYPITA
LRMKLMMIMSYPGTA

SEQ ID NO: 233376 - protein, 15 aa, Artificial Sequence
  Description of Artificial Sequence: Synthetic peptide
  Seed: LRMKWMMAMKYPITA
LRMKLMMIMSYPHTA

SEQ ID NO: 233377 - protein, 15 aa, Artificial Sequence
  Description of Artificial Sequence: Synthetic peptide
  Seed: LRMKWMMAMKYPITA
LRMKLMMIMSYPITA

SEQ ID NO: 233378 - protein, 15 aa, Artificial Sequence
  Description of Artificial Sequence: Synthetic peptide
  Seed: LRMKWMMAMKYPITA
LRMKLMMIMSYPKTA

SEQ ID NO: 233379 - protein, 15 aa, Artificial Sequence
  Description of Artificial Sequence: Synthetic peptide
  Seed: LRMKWMMAMKYPITA
LRMKLMMIMSYPLTA

SEQ ID NO: 233380 - protein, 15 aa, Artificial Sequence
  Description of Artificial Sequence: Synthetic peptide
  Seed: LRMKWMMAMKYPITA
LRMKLMMIMSYPMTA

SEQ ID NO: 233381 - protein, 15 aa, Artificial Sequence
  Description of Artificial Sequence: Synthetic peptide
  Seed: LRMKWMMAMKYPITA
LRMKLMMIMSYPNTA

SEQ ID NO: 233382 - protein, 15 aa, Artificial Sequence
  Description of Artificial Sequence: Synthetic peptide
  Seed: LRMKWMMAMKYPITA
LRMKLMMIMSYPPTA

SEQ ID NO: 233383 - protein, 15 aa, Artificial Sequence
  Description of Artificial Sequence: Synthetic peptide
  Seed: LRMKWMMAMKYPITA
LRMKLMMIMSYPQTA

SEQ ID NO: 233384 - protein, 15 aa, Artificial Sequence
  Description of Artificial Sequence: Synthetic peptide
  Seed: LRMKWMMAMKYPITA
LRMKLMMIMSYPRTA

SEQ ID NO: 233385 - protein, 15 aa, Artificial Sequence
  Description of Artificial Sequence: Synthetic peptide
  Seed: LRMKWMMAMKYPITA
LRMKLMMIMSYPSTA

SEQ ID NO: 233386 - protein, 15 aa, Artificial Sequence
  Description of Artificial Sequence: Synthetic peptide
  Seed: LRMKWMMAMKYPITA
LRMKLMMIMSYPTTA

SEQ ID NO: 233387 - protein, 15 aa, Artificial Sequence
  Description of Artificial Sequence: Synthetic peptide
  Seed: LRMKWMMAMKYPITA
LRMKLMMIMSYPVTA

SEQ ID NO: 233388 - protein, 15 aa, Artificial Sequence
  Description of Artificial Sequence: Synthetic peptide
  Seed: LRMKWMMAMKYPITA
LRMKLMMIMSYPYTA

SEQ ID NO: 233389 - protein, 15 aa, Artificial Sequence
  Description of Artificial Sequence: Synthetic peptide
  Seed: LRMKWMMAMKYPITA
LRMKLMMIMTYPATA

SEQ ID NO: 233390 - protein, 15 aa, Artificial Sequence
  Description of Artificial Sequence: Synthetic peptide
  Seed: LRMKWMMAMKYPITA
LRMKLMMIMTYPCTA

SEQ ID NO: 233391 - protein, 15 aa, Artificial Sequence
  Description of Artificial Sequence: Synthetic peptide
  Seed: LRMKWMMAMKYPITA
LRMKLMMIMTYPDTA

SEQ ID NO: 233392 - protein, 15 aa, Artificial Sequence
  Description of Artificial Sequence: Synthetic peptide
  Seed: LRMKWMMAMKYPITA
LRMKLMMIMTYPETA

SEQ ID NO: 233393 - protein, 15 aa, Artificial Sequence
  Description of Artificial Sequence: Synthetic peptide
  Seed: LRMKWMMAMKYPITA
LRMKLMMIMTYPFTA

SEQ ID NO: 233394 - protein, 15 aa, Artificial Sequence
  Description of Artificial Sequence: Synthetic peptide
  Seed: LRMKWMMAMKYPITA
LRMKLMMIMTYPGTA

SEQ ID NO: 233395 - protein, 15 aa, Artificial Sequence
  Description of Artificial Sequence: Synthetic peptide
  Seed: LRMKWMMAMKYPITA
LRMKLMMIMTYPHTA

SEQ ID NO: 233396 - protein, 15 aa, Artificial Sequence
  Description of Artificial Sequence: Synthetic peptide
  Seed: LRMKWMMAMKYPITA
LRMKLMMIMTYPITA

SEQ ID NO: 233397 - protein, 15 aa, Artificial Sequence
  Description of Artificial Sequence: Synthetic peptide
  Seed: LRMKWMMAMKYPITA
LRMKLMMIMTYPKTA

SEQ ID NO: 233398 - protein, 15 aa, Artificial Sequence
  Description of Artificial Sequence: Synthetic peptide
  Seed: LRMKWMMAMKYPITA
LRMKLMMIMTYPLTA

SEQ ID NO: 233399 - protein, 15 aa, Artificial Sequence
  Description of Artificial Sequence: Synthetic peptide
  Seed: LRMKWMMAMKYPITA
LRMKLMMIMTYPMTA

SEQ ID NO: 233400 - protein, 15 aa, Artificial Sequence
  Description of Artificial Sequence: Synthetic peptide
  Seed: LRMKWMMAMKYPITA
LRMKLMMIMTYPNTA

SEQ ID NO: 233401 - protein, 15 aa, Artificial Sequence
  Description of Artificial Sequence: Synthetic peptide
  Seed: LRMKWMMAMKYPITA
LRMKLMMIMTYPPTA

SEQ ID NO: 233402 - protein, 15 aa, Artificial Sequence
  Description of Artificial Sequence: Synthetic peptide
  Seed: LRMKWMMAMKYPITA
LRMKLMMIMTYPQTA

SEQ ID NO: 233403 - protein, 15 aa, Artificial Sequence
  Description of Artificial Sequence: Synthetic peptide
  Seed: LRMKWMMAMKYPITA
LRMKLMMIMTYPRTA

SEQ ID NO: 233404 - protein, 15 aa, Artificial Sequence
  Description of Artificial Sequence: Synthetic peptide
  Seed: LRMKWMMAMKYPITA
LRMKLMMIMTYPSTA

SEQ ID NO: 233405 - protein, 15 aa, Artificial Sequence
  Description of Artificial Sequence: Synthetic peptide
  Seed: LRMKWMMAMKYPITA
LRMKLMMIMTYPTTA

SEQ ID NO: 233406 - protein, 15 aa, Artificial Sequence
  Description of Artificial Sequence: Synthetic peptide
  Seed: LRMKWMMAMKYPITA
LRMKLMMIMTYPVTA

SEQ ID NO: 233407 - protein, 15 aa, Artificial Sequence
  Description of Artificial Sequence: Synthetic peptide
  Seed: LRMKWMMAMKYPITA
LRMKLMMIMTYPYTA

SEQ ID NO: 233408 - protein, 15 aa, Artificial Sequence
  Description of Artificial Sequence: Synthetic peptide
  Seed: LRMKWMMAMKYPITA
LRMKLMMIMVYPATA

SEQ ID NO: 233409 - protein, 15 aa, Artificial Sequence
  Description of Artificial Sequence: Synthetic peptide
  Seed: LRMKWMMAMKYPITA
LRMKLMMIMVYPDTA

SEQ ID NO: 233410 - protein, 15 aa, Artificial Sequence
  Description of Artificial Sequence: Synthetic peptide
  Seed: LRMKWMMAMKYPITA
LRMKLMMIMVYPETA

SEQ ID NO: 233411 - protein, 15 aa, Artificial Sequence
  Description of Artificial Sequence: Synthetic peptide
  Seed: LRMKWMMAMKYPITA
LRMKLMMIMVYPGTA

SEQ ID NO: 233412 - protein, 15 aa, Artificial Sequence
  Description of Artificial Sequence: Synthetic peptide
  Seed: LRMKWMMAMKYPITA
LRMKLMMIMVYPHTA

SEQ ID NO: 233413 - protein, 15 aa, Artificial Sequence
  Description of Artificial Sequence: Synthetic peptide
  Seed: LRMKWMMAMKYPITA
LRMKLMMIMVYPITA

SEQ ID NO: 233414 - protein, 15 aa, Artificial Sequence
  Description of Artificial Sequence: Synthetic peptide
  Seed: LRMKWMMAMKYPITA
LRMKLMMIMVYPKTA

SEQ ID NO: 233415 - protein, 15 aa, Artificial Sequence
  Description of Artificial Sequence: Synthetic peptide
  Seed: LRMKWMMAMKYPITA
LRMKLMMIMVYPLTA

SEQ ID NO: 233416 - protein, 15 aa, Artificial Sequence
  Description of Artificial Sequence: Synthetic peptide
  Seed: LRMKWMMAMKYPITA
LRMKLMMIMVYPMTA

SEQ ID NO: 233417 - protein, 15 aa, Artificial Sequence
  Description of Artificial Sequence: Synthetic peptide
  Seed: LRMKWMMAMKYPITA
LRMKLMMIMVYPNTA

SEQ ID NO: 233418 - protein, 15 aa, Artificial Sequence
  Description of Artificial Sequence: Synthetic peptide
  Seed: LRMKWMMAMKYPITA
LRMKLMMIMVYPQTA

SEQ ID NO: 233419 - protein, 15 aa, Artificial Sequence
  Description of Artificial Sequence: Synthetic peptide
  Seed: LRMKWMMAMKYPITA
LRMKLMMIMVYPRTA

SEQ ID NO: 233420 - protein, 15 aa, Artificial Sequence
  Description of Artificial Sequence: Synthetic peptide
  Seed: LRMKWMMAMKYPITA
LRMKLMMIMVYPSTA

SEQ ID NO: 233421 - protein, 15 aa, Artificial Sequence
  Description of Artificial Sequence: Synthetic peptide
  Seed: LRMKWMMAMKYPITA
LRMKLMMIMVYPTTA

SEQ ID NO: 233422 - protein, 15 aa, Artificial Sequence
  Description of Artificial Sequence: Synthetic peptide
  Seed: LRMKWMMAMKYPITA
LRMKLMMIMVYPVTA

SEQ ID NO: 233423 - protein, 15 aa, Artificial Sequence
  Description of Artificial Sequence: Synthetic peptide
  Seed: LRMKWMMAMKYPITA
LRMKLMMKMAYPATA

SEQ ID NO: 233424 - protein, 15 aa, Artificial Sequence
  Description of Artificial Sequence: Synthetic peptide
  Seed: LRMKWMMAMKYPITA
LRMKLMMKMAYPCTA

SEQ ID NO: 233425 - protein, 15 aa, Artificial Sequence
  Description of Artificial Sequence: Synthetic peptide
  Seed: LRMKWMMAMKYPITA
LRMKLMMKMAYPFTA

SEQ ID NO: 233426 - protein, 15 aa, Artificial Sequence
  Description of Artificial Sequence: Synthetic peptide
  Seed: LRMKWMMAMKYPITA
LRMKLMMKMAYPGTA

SEQ ID NO: 233427 - protein, 15 aa, Artificial Sequence
  Description of Artificial Sequence: Synthetic peptide
  Seed: LRMKWMMAMKYPITA
LRMKLMMKMAYPHTA

SEQ ID NO: 233428 - protein, 15 aa, Artificial Sequence
  Description of Artificial Sequence: Synthetic peptide
  Seed: LRMKWMMAMKYPITA
LRMKLMMKMAYPITA

SEQ ID NO: 233429 - protein, 15 aa, Artificial Sequence
  Description of Artificial Sequence: Synthetic peptide
  Seed: LRMKWMMAMKYPITA
LRMKLMMKMAYPKTA

SEQ ID NO: 233430 - protein, 15 aa, Artificial Sequence
  Description of Artificial Sequence: Synthetic peptide
  Seed: LRMKWMMAMKYPITA
LRMKLMMKMAYPLTA

SEQ ID NO: 233431 - protein, 15 aa, Artificial Sequence
  Description of Artificial Sequence: Synthetic peptide
  Seed: LRMKWMMAMKYPITA
LRMKLMMKMAYPMTA

SEQ ID NO: 233432 - protein, 15 aa, Artificial Sequence
  Description of Artificial Sequence: Synthetic peptide
  Seed: LRMKWMMAMKYPITA
LRMKLMMKMAYPNTA

SEQ ID NO: 233433 - protein, 15 aa, Artificial Sequence
  Description of Artificial Sequence: Synthetic peptide
  Seed: LRMKWMMAMKYPITA
LRMKLMMKMAYPQTA

SEQ ID NO: 233434 - protein, 15 aa, Artificial Sequence
  Description of Artificial Sequence: Synthetic peptide
  Seed: LRMKWMMAMKYPITA
LRMKLMMKMAYPRTA

SEQ ID NO: 233435 - protein, 15 aa, Artificial Sequence
  Description of Artificial Sequence: Synthetic peptide
  Seed: LRMKWMMAMKYPITA
LRMKLMMKMAYPSTA

SEQ ID NO: 233436 - protein, 15 aa, Artificial Sequence
  Description of Artificial Sequence: Synthetic peptide
  Seed: LRMKWMMAMKYPITA
LRMKLMMKMAYPTTA

SEQ ID NO: 233437 - protein, 15 aa, Artificial Sequence
  Description of Artificial Sequence: Synthetic peptide
  Seed: LRMKWMMAMKYPITA
LRMKLMMKMAYPVTA

SEQ ID NO: 233438 - protein, 15 aa, Artificial Sequence
  Description of Artificial Sequence: Synthetic peptide
  Seed: LRMKWMMAMKYPITA
LRMKLMMKMAYPYTA

SEQ ID NO: 233439 - protein, 15 aa, Artificial Sequence
  Description of Artificial Sequence: Synthetic peptide
  Seed: LRMKWMMAMKYPITA
LRMKLMMKMCYPRTA

SEQ ID NO: 233440 - protein, 15 aa, Artificial Sequence
  Description of Artificial Sequence: Synthetic peptide
  Seed: LRMKWMMAMKYPITA
LRMKLMMKMCYPYTA

SEQ ID NO: 233441 - protein, 15 aa, Artificial Sequence
  Description of Artificial Sequence: Synthetic peptide
  Seed: LRMKWMMAMKYPITA
LRMKLMMKMDYPFTA

SEQ ID NO: 233442 - protein, 15 aa, Artificial Sequence
  Description of Artificial Sequence: Synthetic peptide
  Seed: LRMKWMMAMKYPITA
LRMKLMMKMDYPITA

SEQ ID NO: 233443 - protein, 15 aa, Artificial Sequence
  Description of Artificial Sequence: Synthetic peptide
  Seed: LRMKWMMAMKYPITA
LRMKLMMKMDYPLTA

SEQ ID NO: 233444 - protein, 15 aa, Artificial Sequence
  Description of Artificial Sequence: Synthetic peptide
  Seed: LRMKWMMAMKYPITA
LRMKLMMKMDYPMTA

SEQ ID NO: 233445 - protein, 15 aa, Artificial Sequence
  Description of Artificial Sequence: Synthetic peptide
  Seed: LRMKWMMAMKYPITA
LRMKLMMKMDYPRTA

SEQ ID NO: 233446 - protein, 15 aa, Artificial Sequence
  Description of Artificial Sequence: Synthetic peptide
  Seed: LRMKWMMAMKYPITA
LRMKLMMKMDYPVTA

SEQ ID NO: 233447 - protein, 15 aa, Artificial Sequence
  Description of Artificial Sequence: Synthetic peptide
  Seed: LRMKWMMAMKYPITA
LRMKLMMKMDYPYTA

SEQ ID NO: 233448 - protein, 15 aa, Artificial Sequence
  Description of Artificial Sequence: Synthetic peptide
  Seed: LRMKWMMAMKYPITA
LRMKLMMKMEYPRTA

SEQ ID NO: 233449 - protein, 15 aa, Artificial Sequence
  Description of Artificial Sequence: Synthetic peptide
  Seed: LRMKWMMAMKYPITA
LRMKLMMKMEYPYTA

SEQ ID NO: 233450 - protein, 15 aa, Artificial Sequence
  Description of Artificial Sequence: Synthetic peptide
  Seed: LRMKWMMAMKYPITA
LRMKLMMKMGYPATA

SEQ ID NO: 233451 - protein, 15 aa, Artificial Sequence
  Description of Artificial Sequence: Synthetic peptide
  Seed: LRMKWMMAMKYPITA
LRMKLMMKMGYPITA

SEQ ID NO: 233452 - protein, 15 aa, Artificial Sequence
  Description of Artificial Sequence: Synthetic peptide
  Seed: LRMKWMMAMKYPITA
LRMKLMMKMGYPLTA

SEQ ID NO: 233453 - protein, 15 aa, Artificial Sequence
  Description of Artificial Sequence: Synthetic peptide
  Seed: LRMKWMMAMKYPITA
LRMKLMMKMGYPMTA

SEQ ID NO: 233454 - protein, 15 aa, Artificial Sequence
  Description of Artificial Sequence: Synthetic peptide
  Seed: LRMKWMMAMKYPITA
LRMKLMMKMGYPQTA

SEQ ID NO: 233455 - protein, 15 aa, Artificial Sequence
  Description of Artificial Sequence: Synthetic peptide
  Seed: LRMKWMMAMKYPITA
LRMKLMMKMGYPRTA

SEQ ID NO: 233456 - protein, 15 aa, Artificial Sequence
  Description of Artificial Sequence: Synthetic peptide
  Seed: LRMKWMMAMKYPITA
LRMKLMMKMGYPVTA

SEQ ID NO: 233457 - protein, 15 aa, Artificial Sequence
  Description of Artificial Sequence: Synthetic peptide
  Seed: LRMKWMMAMKYPITA
LRMKLMMKMGYPYTA

SEQ ID NO: 233458 - protein, 15 aa, Artificial Sequence
  Description of Artificial Sequence: Synthetic peptide
  Seed: LRMKWMMAMKYPITA
LRMKLMMKMHYPATA

SEQ ID NO: 233459 - protein, 15 aa, Artificial Sequence
  Description of Artificial Sequence: Synthetic peptide
  Seed: LRMKWMMAMKYPITA
LRMKLMMKMHYPCTA

SEQ ID NO: 233460 - protein, 15 aa, Artificial Sequence
  Description of Artificial Sequence: Synthetic peptide
  Seed: LRMKWMMAMKYPITA
LRMKLMMKMHYPDTA

SEQ ID NO: 233461 - protein, 15 aa, Artificial Sequence
  Description of Artificial Sequence: Synthetic peptide
  Seed: LRMKWMMAMKYPITA
LRMKLMMKMHYPETA

SEQ ID NO: 233462 - protein, 15 aa, Artificial Sequence
  Description of Artificial Sequence: Synthetic peptide
  Seed: LRMKWMMAMKYPITA
LRMKLMMKMHYPFTA

SEQ ID NO: 233463 - protein, 15 aa, Artificial Sequence
  Description of Artificial Sequence: Synthetic peptide
  Seed: LRMKWMMAMKYPITA
LRMKLMMKMHYPGTA

SEQ ID NO: 233464 - protein, 15 aa, Artificial Sequence
  Description of Artificial Sequence: Synthetic peptide
  Seed: LRMKWMMAMKYPITA
LRMKLMMKMHYPLTA

SEQ ID NO: 233465 - protein, 15 aa, Artificial Sequence
  Description of Artificial Sequence: Synthetic peptide
  Seed: LRMKWMMAMKYPITA
LRMKLMMKMHYPMTA

SEQ ID NO: 233466 - protein, 15 aa, Artificial Sequence
  Description of Artificial Sequence: Synthetic peptide
  Seed: LRMKWMMAMKYPITA
LRMKLMMKMHYPQTA

SEQ ID NO: 233467 - protein, 15 aa, Artificial Sequence
  Description of Artificial Sequence: Synthetic peptide
  Seed: LRMKWMMAMKYPITA
LRMKLMMKMHYPRTA

SEQ ID NO: 233468 - protein, 15 aa, Artificial Sequence
  Description of Artificial Sequence: Synthetic peptide
  Seed: LRMKWMMAMKYPITA
LRMKLMMKMHYPSTA

SEQ ID NO: 233469 - protein, 15 aa, Artificial Sequence
  Description of Artificial Sequence: Synthetic peptide
  Seed: LRMKWMMAMKYPITA
LRMKLMMKMHYPVTA

SEQ ID NO: 233470 - protein, 15 aa, Artificial Sequence
  Description of Artificial Sequence: Synthetic peptide
  Seed: LRMKWMMAMKYPITA
LRMKLMMKMHYPYTA

SEQ ID NO: 233471 - protein, 15 aa, Artificial Sequence
  Description of Artificial Sequence: Synthetic peptide
  Seed: LRMKWMMAMKYPITA
LRMKLMMKMIYPFTA

SEQ ID NO: 233472 - protein, 15 aa, Artificial Sequence
  Description of Artificial Sequence: Synthetic peptide
  Seed: LRMKWMMAMKYPITA
LRMKLMMKMIYPKTA

SEQ ID NO: 233473 - protein, 15 aa, Artificial Sequence
  Description of Artificial Sequence: Synthetic peptide
  Seed: LRMKWMMAMKYPITA
LRMKLMMKMIYPRTA

SEQ ID NO: 233474 - protein, 15 aa, Artificial Sequence
  Description of Artificial Sequence: Synthetic peptide
  Seed: LRMKWMMAMKYPITA
LRMKLMMKMIYPVTA

SEQ ID NO: 233475 - protein, 15 aa, Artificial Sequence
  Description of Artificial Sequence: Synthetic peptide
  Seed: LRMKWMMAMKYPITA
LRMKLMMKMIYPYTA

SEQ ID NO: 233476 - protein, 15 aa, Artificial Sequence
  Description of Artificial Sequence: Synthetic peptide
  Seed: LRMKWMMAMKYPITA
LRMKLMMKMKYPATA

SEQ ID NO: 233477 - protein, 15 aa, Artificial Sequence
  Description of Artificial Sequence: Synthetic peptide
  Seed: LRMKWMMAMKYPITA
LRMKLMMKMKYPCTA

SEQ ID NO: 233478 - protein, 15 aa, Artificial Sequence
  Description of Artificial Sequence: Synthetic peptide
  Seed: LRMKWMMAMKYPITA
LRMKLMMKMKYPDTA

SEQ ID NO: 233479 - protein, 15 aa, Artificial Sequence
  Description of Artificial Sequence: Synthetic peptide
  Seed: LRMKWMMAMKYPITA
LRMKLMMKMKYPETA

SEQ ID NO: 233480 - protein, 15 aa, Artificial Sequence
  Description of Artificial Sequence: Synthetic peptide
  Seed: LRMKWMMAMKYPITA
LRMKLMMKMKYPFTA

SEQ ID NO: 233481 - protein, 15 aa, Artificial Sequence
  Description of Artificial Sequence: Synthetic peptide
  Seed: LRMKWMMAMKYPITA
LRMKLMMKMKYPGTA

SEQ ID NO: 233482 - protein, 15 aa, Artificial Sequence
  Description of Artificial Sequence: Synthetic peptide
  Seed: LRMKWMMAMKYPITA
LRMKLMMKMKYPHTA

SEQ ID NO: 233483 - protein, 15 aa, Artificial Sequence
  Description of Artificial Sequence: Synthetic peptide
  Seed: LRMKWMMAMKYPITA
LRMKLMMKMKYPITA

SEQ ID NO: 233484 - protein, 15 aa, Artificial Sequence
  Description of Artificial Sequence: Synthetic peptide
  Seed: LRMKWMMAMKYPITA
LRMKLMMKMKYPKTA

SEQ ID NO: 233485 - protein, 15 aa, Artificial Sequence
  Description of Artificial Sequence: Synthetic peptide
  Seed: LRMKWMMAMKYPITA
LRMKLMMKMKYPLTA

SEQ ID NO: 233486 - protein, 15 aa, Artificial Sequence
  Description of Artificial Sequence: Synthetic peptide
  Seed: LRMKWMMAMKYPITA
LRMKLMMKMKYPMTA

SEQ ID NO: 233487 - protein, 15 aa, Artificial Sequence
  Description of Artificial Sequence: Synthetic peptide
  Seed: LRMKWMMAMKYPITA
LRMKLMMKMKYPNTA

SEQ ID NO: 233488 - protein, 15 aa, Artificial Sequence
  Description of Artificial Sequence: Synthetic peptide
  Seed: LRMKWMMAMKYPITA
LRMKLMMKMKYPPTA

SEQ ID NO: 233489 - protein, 15 aa, Artificial Sequence
  Description of Artificial Sequence: Synthetic peptide
  Seed: LRMKWMMAMKYPITA
LRMKLMMKMKYPQTA

SEQ ID NO: 233490 - protein, 15 aa, Artificial Sequence
  Description of Artificial Sequence: Synthetic peptide
  Seed: LRMKWMMAMKYPITA
LRMKLMMKMKYPRTA

SEQ ID NO: 233491 - protein, 15 aa, Artificial Sequence
  Description of Artificial Sequence: Synthetic peptide
  Seed: LRMKWMMAMKYPITA
LRMKLMMKMKYPSTA

SEQ ID NO: 233492 - protein, 15 aa, Artificial Sequence
  Description of Artificial Sequence: Synthetic peptide
  Seed: LRMKWMMAMKYPITA
LRMKLMMKMKYPTTA

SEQ ID NO: 233493 - protein, 15 aa, Artificial Sequence
  Description of Artificial Sequence: Synthetic peptide
  Seed: LRMKWMMAMKYPITA
LRMKLMMKMKYPVTA

SEQ ID NO: 233494 - protein, 15 aa, Artificial Sequence
  Description of Artificial Sequence: Synthetic peptide
  Seed: LRMKWMMAMKYPITA
LRMKLMMKMKYPWTA

SEQ ID NO: 233495 - protein, 15 aa, Artificial Sequence
  Description of Artificial Sequence: Synthetic peptide
  Seed: LRMKWMMAMKYPITA
LRMKLMMKMKYPYTA

SEQ ID NO: 233496 - protein, 15 aa, Artificial Sequence
  Description of Artificial Sequence: Synthetic peptide
  Seed: LRMKWMMAMKYPITA
LRMKLMMKMLYPRTA

SEQ ID NO: 233497 - protein, 15 aa, Artificial Sequence
  Description of Artificial Sequence: Synthetic peptide
  Seed: LRMKWMMAMKYPITA
LRMKLMMKMMYPRTA

SEQ ID NO: 233498 - protein, 15 aa, Artificial Sequence
  Description of Artificial Sequence: Synthetic peptide
  Seed: LRMKWMMAMKYPITA
LRMKLMMKMNYPATA

SEQ ID NO: 233499 - protein, 15 aa, Artificial Sequence
  Description of Artificial Sequence: Synthetic peptide
  Seed: LRMKWMMAMKYPITA
LRMKLMMKMNYPCTA

SEQ ID NO: 233500 - protein, 15 aa, Artificial Sequence
  Description of Artificial Sequence: Synthetic peptide
  Seed: LRMKWMMAMKYPITA
LRMKLMMKMNYPDTA

SEQ ID NO: 233501 - protein, 15 aa, Artificial Sequence
  Description of Artificial Sequence: Synthetic peptide
  Seed: LRMKWMMAMKYPITA
LRMKLMMKMNYPETA

SEQ ID NO: 233502 - protein, 15 aa, Artificial Sequence
  Description of Artificial Sequence: Synthetic peptide
  Seed: LRMKWMMAMKYPITA
LRMKLMMKMNYPFTA

SEQ ID NO: 233503 - protein, 15 aa, Artificial Sequence
  Description of Artificial Sequence: Synthetic peptide
  Seed: LRMKWMMAMKYPITA
LRMKLMMKMNYPGTA

SEQ ID NO: 233504 - protein, 15 aa, Artificial Sequence
  Description of Artificial Sequence: Synthetic peptide
  Seed: LRMKWMMAMKYPITA
LRMKLMMKMNYPHTA

SEQ ID NO: 233505 - protein, 15 aa, Artificial Sequence
  Description of Artificial Sequence: Synthetic peptide
  Seed: LRMKWMMAMKYPITA
LRMKLMMKMNYPITA

SEQ ID NO: 233506 - protein, 15 aa, Artificial Sequence
  Description of Artificial Sequence: Synthetic peptide
  Seed: LRMKWMMAMKYPITA
LRMKLMMKMNYPKTA

SEQ ID NO: 233507 - protein, 15 aa, Artificial Sequence
  Description of Artificial Sequence: Synthetic peptide
  Seed: LRMKWMMAMKYPITA
LRMKLMMKMNYPLTA

SEQ ID NO: 233508 - protein, 15 aa, Artificial Sequence
  Description of Artificial Sequence: Synthetic peptide
  Seed: LRMKWMMAMKYPITA
LRMKLMMKMNYPMTA

SEQ ID NO: 233509 - protein, 15 aa, Artificial Sequence
  Description of Artificial Sequence: Synthetic peptide
  Seed: LRMKWMMAMKYPITA
LRMKLMMKMNYPQTA

SEQ ID NO: 233510 - protein, 15 aa, Artificial Sequence
  Description of Artificial Sequence: Synthetic peptide
  Seed: LRMKWMMAMKYPITA
LRMKLMMKMNYPRTA

SEQ ID NO: 233511 - protein, 15 aa, Artificial Sequence
  Description of Artificial Sequence: Synthetic peptide
  Seed: LRMKWMMAMKYPITA
LRMKLMMKMNYPSTA

SEQ ID NO: 233512 - protein, 15 aa, Artificial Sequence
  Description of Artificial Sequence: Synthetic peptide
  Seed: LRMKWMMAMKYPITA
LRMKLMMKMNYPTTA

SEQ ID NO: 233513 - protein, 15 aa, Artificial Sequence
  Description of Artificial Sequence: Synthetic peptide
  Seed: LRMKWMMAMKYPITA
LRMKLMMKMNYPVTA

SEQ ID NO: 233514 - protein, 15 aa, Artificial Sequence
  Description of Artificial Sequence: Synthetic peptide
  Seed: LRMKWMMAMKYPITA
LRMKLMMKMNYPYTA

SEQ ID NO: 233515 - protein, 15 aa, Artificial Sequence
  Description of Artificial Sequence: Synthetic peptide
  Seed: LRMKWMMAMKYPITA
LRMKLMMKMPYPITA

SEQ ID NO: 233516 - protein, 15 aa, Artificial Sequence
  Description of Artificial Sequence: Synthetic peptide
  Seed: LRMKWMMAMKYPITA
LRMKLMMKMPYPLTA

SEQ ID NO: 233517 - protein, 15 aa, Artificial Sequence
  Description of Artificial Sequence: Synthetic peptide
  Seed: LRMKWMMAMKYPITA
LRMKLMMKMPYPRTA

SEQ ID NO: 233518 - protein, 15 aa, Artificial Sequence
  Description of Artificial Sequence: Synthetic peptide
  Seed: LRMKWMMAMKYPITA
LRMKLMMKMPYPVTA

SEQ ID NO: 233519 - protein, 15 aa, Artificial Sequence
  Description of Artificial Sequence: Synthetic peptide
  Seed: LRMKWMMAMKYPITA
LRMKLMMKMPYPYTA

SEQ ID NO: 233520 - protein, 15 aa, Artificial Sequence
  Description of Artificial Sequence: Synthetic peptide
  Seed: LRMKWMMAMKYPITA
LRMKLMMKMQYPATA

SEQ ID NO: 233521 - protein, 15 aa, Artificial Sequence
  Description of Artificial Sequence: Synthetic peptide
  Seed: LRMKWMMAMKYPITA
LRMKLMMKMQYPETA

SEQ ID NO: 233522 - protein, 15 aa, Artificial Sequence
  Description of Artificial Sequence: Synthetic peptide
  Seed: LRMKWMMAMKYPITA
LRMKLMMKMQYPFTA

SEQ ID NO: 233523 - protein, 15 aa, Artificial Sequence
  Description of Artificial Sequence: Synthetic peptide
  Seed: LRMKWMMAMKYPITA
LRMKLMMKMQYPGTA

SEQ ID NO: 233524 - protein, 15 aa, Artificial Sequence
  Description of Artificial Sequence: Synthetic peptide
  Seed: LRMKWMMAMKYPITA
LRMKLMMKMQYPQTA

SEQ ID NO: 233525 - protein, 15 aa, Artificial Sequence
  Description of Artificial Sequence: Synthetic peptide
  Seed: LRMKWMMAMKYPITA
LRMKLMMKMQYPRTA

SEQ ID NO: 233526 - protein, 15 aa, Artificial Sequence
  Description of Artificial Sequence: Synthetic peptide
  Seed: LRMKWMMAMKYPITA
LRMKLMMKMQYPSTA

SEQ ID NO: 233527 - protein, 15 aa, Artificial Sequence
  Description of Artificial Sequence: Synthetic peptide
  Seed: LRMKWMMAMKYPITA
LRMKLMMKMQYPVTA

SEQ ID NO: 233528 - protein, 15 aa, Artificial Sequence
  Description of Artificial Sequence: Synthetic peptide
  Seed: LRMKWMMAMKYPITA
LRMKLMMKMQYPYTA

SEQ ID NO: 233529 - protein, 15 aa, Artificial Sequence
  Description of Artificial Sequence: Synthetic peptide
  Seed: LRMKWMMAMKYPITA
LRMKLMMKMRYPATA

SEQ ID NO: 233530 - protein, 15 aa, Artificial Sequence
  Description of Artificial Sequence: Synthetic peptide
  Seed: LRMKWMMAMKYPITA
LRMKLMMKMRYPCTA

SEQ ID NO: 233531 - protein, 15 aa, Artificial Sequence
  Description of Artificial Sequence: Synthetic peptide
  Seed: LRMKWMMAMKYPITA
LRMKLMMKMRYPDTA

SEQ ID NO: 233532 - protein, 15 aa, Artificial Sequence
  Description of Artificial Sequence: Synthetic peptide
  Seed: LRMKWMMAMKYPITA
LRMKLMMKMRYPETA

SEQ ID NO: 233533 - protein, 15 aa, Artificial Sequence
  Description of Artificial Sequence: Synthetic peptide
  Seed: LRMKWMMAMKYPITA
LRMKLMMKMRYPFTA

SEQ ID NO: 233534 - protein, 15 aa, Artificial Sequence
  Description of Artificial Sequence: Synthetic peptide
  Seed: LRMKWMMAMKYPITA
LRMKLMMKMRYPGTA

SEQ ID NO: 233535 - protein, 15 aa, Artificial Sequence
  Description of Artificial Sequence: Synthetic peptide
  Seed: LRMKWMMAMKYPITA
LRMKLMMKMRYPHTA

SEQ ID NO: 233536 - protein, 15 aa, Artificial Sequence
  Description of Artificial Sequence: Synthetic peptide
  Seed: LRMKWMMAMKYPITA
LRMKLMMKMRYPITA

SEQ ID NO: 233537 - protein, 15 aa, Artificial Sequence
  Description of Artificial Sequence: Synthetic peptide
  Seed: LRMKWMMAMKYPITA
LRMKLMMKMRYPKTA

SEQ ID NO: 233538 - protein, 15 aa, Artificial Sequence
  Description of Artificial Sequence: Synthetic peptide
  Seed: LRMKWMMAMKYPITA
LRMKLMMKMRYPLTA

SEQ ID NO: 233539 - protein, 15 aa, Artificial Sequence
  Description of Artificial Sequence: Synthetic peptide
  Seed: LRMKWMMAMKYPITA
LRMKLMMKMRYPMTA

SEQ ID NO: 233540 - protein, 15 aa, Artificial Sequence
  Description of Artificial Sequence: Synthetic peptide
  Seed: LRMKWMMAMKYPITA
LRMKLMMKMRYPNTA

SEQ ID NO: 233541 - protein, 15 aa, Artificial Sequence
  Description of Artificial Sequence: Synthetic peptide
  Seed: LRMKWMMAMKYPITA
LRMKLMMKMRYPPTA

SEQ ID NO: 233542 - protein, 15 aa, Artificial Sequence
  Description of Artificial Sequence: Synthetic peptide
  Seed: LRMKWMMAMKYPITA
LRMKLMMKMRYPQTA

SEQ ID NO: 233543 - protein, 15 aa, Artificial Sequence
  Description of Artificial Sequence: Synthetic peptide
  Seed: LRMKWMMAMKYPITA
LRMKLMMKMRYPRTA

SEQ ID NO: 233544 - protein, 15 aa, Artificial Sequence
  Description of Artificial Sequence: Synthetic peptide
  Seed: LRMKWMMAMKYPITA
LRMKLMMKMRYPSTA

SEQ ID NO: 233545 - protein, 15 aa, Artificial Sequence
  Description of Artificial Sequence: Synthetic peptide
  Seed: LRMKWMMAMKYPITA
LRMKLMMKMRYPTTA

SEQ ID NO: 233546 - protein, 15 aa, Artificial Sequence
  Description of Artificial Sequence: Synthetic peptide
  Seed: LRMKWMMAMKYPITA
LRMKLMMKMRYPVTA

SEQ ID NO: 233547 - protein, 15 aa, Artificial Sequence
  Description of Artificial Sequence: Synthetic peptide
  Seed: LRMKWMMAMKYPITA
LRMKLMMKMRYPYTA

SEQ ID NO: 233548 - protein, 15 aa, Artificial Sequence
  Description of Artificial Sequence: Synthetic peptide
  Seed: LRMKWMMAMKYPITA
LRMKLMMKMSYPATA

SEQ ID NO: 233549 - protein, 15 aa, Artificial Sequence
  Description of Artificial Sequence: Synthetic peptide
  Seed: LRMKWMMAMKYPITA
LRMKLMMKMSYPCTA

SEQ ID NO: 233550 - protein, 15 aa, Artificial Sequence
  Description of Artificial Sequence: Synthetic peptide
  Seed: LRMKWMMAMKYPITA
LRMKLMMKMSYPDTA

SEQ ID NO: 233551 - protein, 15 aa, Artificial Sequence
  Description of Artificial Sequence: Synthetic peptide
  Seed: LRMKWMMAMKYPITA
LRMKLMMKMSYPETA

SEQ ID NO: 233552 - protein, 15 aa, Artificial Sequence
  Description of Artificial Sequence: Synthetic peptide
  Seed: LRMKWMMAMKYPITA
LRMKLMMKMSYPFTA

SEQ ID NO: 233553 - protein, 15 aa, Artificial Sequence
  Description of Artificial Sequence: Synthetic peptide
  Seed: LRMKWMMAMKYPITA
LRMKLMMKMSYPGTA

SEQ ID NO: 233554 - protein, 15 aa, Artificial Sequence
  Description of Artificial Sequence: Synthetic peptide
  Seed: LRMKWMMAMKYPITA
LRMKLMMKMSYPHTA

SEQ ID NO: 233555 - protein, 15 aa, Artificial Sequence
  Description of Artificial Sequence: Synthetic peptide
  Seed: LRMKWMMAMKYPITA
LRMKLMMKMSYPITA

SEQ ID NO: 233556 - protein, 15 aa, Artificial Sequence
  Description of Artificial Sequence: Synthetic peptide
  Seed: LRMKWMMAMKYPITA
LRMKLMMKMSYPKTA

SEQ ID NO: 233557 - protein, 15 aa, Artificial Sequence
  Description of Artificial Sequence: Synthetic peptide
  Seed: LRMKWMMAMKYPITA
LRMKLMMKMSYPLTA

SEQ ID NO: 233558 - protein, 15 aa, Artificial Sequence
  Description of Artificial Sequence: Synthetic peptide
  Seed: LRMKWMMAMKYPITA
LRMKLMMKMSYPMTA

SEQ ID NO: 233559 - protein, 15 aa, Artificial Sequence
  Description of Artificial Sequence: Synthetic peptide
  Seed: LRMKWMMAMKYPITA
LRMKLMMKMSYPQTA

SEQ ID NO: 233560 - protein, 15 aa, Artificial Sequence
  Description of Artificial Sequence: Synthetic peptide
  Seed: LRMKWMMAMKYPITA
LRMKLMMKMSYPRTA

SEQ ID NO: 233561 - protein, 15 aa, Artificial Sequence
  Description of Artificial Sequence: Synthetic peptide
  Seed: LRMKWMMAMKYPITA
LRMKLMMKMSYPSTA

SEQ ID NO: 233562 - protein, 15 aa, Artificial Sequence
  Description of Artificial Sequence: Synthetic peptide
  Seed: LRMKWMMAMKYPITA
LRMKLMMKMSYPTTA

SEQ ID NO: 233563 - protein, 15 aa, Artificial Sequence
  Description of Artificial Sequence: Synthetic peptide
  Seed: LRMKWMMAMKYPITA
LRMKLMMKMSYPVTA

SEQ ID NO: 233564 - protein, 15 aa, Artificial Sequence
  Description of Artificial Sequence: Synthetic peptide
  Seed: LRMKWMMAMKYPITA
LRMKLMMKMSYPYTA

SEQ ID NO: 233565 - protein, 15 aa, Artificial Sequence
  Description of Artificial Sequence: Synthetic peptide
  Seed: LRMKWMMAMKYPITA
LRMKLMMKMTYPATA

SEQ ID NO: 233566 - protein, 15 aa, Artificial Sequence
  Description of Artificial Sequence: Synthetic peptide
  Seed: LRMKWMMAMKYPITA
LRMKLMMKMTYPFTA

SEQ ID NO: 233567 - protein, 15 aa, Artificial Sequence
  Description of Artificial Sequence: Synthetic peptide
  Seed: LRMKWMMAMKYPITA
LRMKLMMKMTYPGTA

SEQ ID NO: 233568 - protein, 15 aa, Artificial Sequence
  Description of Artificial Sequence: Synthetic peptide
  Seed: LRMKWMMAMKYPITA
LRMKLMMKMTYPHTA

SEQ ID NO: 233569 - protein, 15 aa, Artificial Sequence
  Description of Artificial Sequence: Synthetic peptide
  Seed: LRMKWMMAMKYPITA
LRMKLMMKMTYPITA

SEQ ID NO: 233570 - protein, 15 aa, Artificial Sequence
  Description of Artificial Sequence: Synthetic peptide
  Seed: LRMKWMMAMKYPITA
LRMKLMMKMTYPKTA

SEQ ID NO: 233571 - protein, 15 aa, Artificial Sequence
  Description of Artificial Sequence: Synthetic peptide
  Seed: LRMKWMMAMKYPITA
LRMKLMMKMTYPLTA

SEQ ID NO: 233572 - protein, 15 aa, Artificial Sequence
  Description of Artificial Sequence: Synthetic peptide
  Seed: LRMKWMMAMKYPITA
LRMKLMMKMTYPMTA

SEQ ID NO: 233573 - protein, 15 aa, Artificial Sequence
  Description of Artificial Sequence: Synthetic peptide
  Seed: LRMKWMMAMKYPITA
LRMKLMMKMTYPQTA

SEQ ID NO: 233574 - protein, 15 aa, Artificial Sequence
  Description of Artificial Sequence: Synthetic peptide
  Seed: LRMKWMMAMKYPITA
LRMKLMMKMTYPRTA

SEQ ID NO: 233575 - protein, 15 aa, Artificial Sequence
  Description of Artificial Sequence: Synthetic peptide
  Seed: LRMKWMMAMKYPITA
LRMKLMMKMTYPSTA

SEQ ID NO: 233576 - protein, 15 aa, Artificial Sequence
  Description of Artificial Sequence: Synthetic peptide
  Seed: LRMKWMMAMKYPITA
LRMKLMMKMTYPTTA

SEQ ID NO: 233577 - protein, 15 aa, Artificial Sequence
  Description of Artificial Sequence: Synthetic peptide
  Seed: LRMKWMMAMKYPITA
LRMKLMMKMTYPVTA

SEQ ID NO: 233578 - protein, 15 aa, Artificial Sequence
  Description of Artificial Sequence: Synthetic peptide
  Seed: LRMKWMMAMKYPITA
LRMKLMMKMTYPYTA

SEQ ID NO: 233579 - protein, 15 aa, Artificial Sequence
  Description of Artificial Sequence: Synthetic peptide
  Seed: LRMKWMMAMKYPITA
LRMKLMMKMVYPATA

SEQ ID NO: 233580 - protein, 15 aa, Artificial Sequence
  Description of Artificial Sequence: Synthetic peptide
  Seed: LRMKWMMAMKYPITA
LRMKLMMKMVYPETA

SEQ ID NO: 233581 - protein, 15 aa, Artificial Sequence
  Description of Artificial Sequence: Synthetic peptide
  Seed: LRMKWMMAMKYPITA
LRMKLMMKMVYPFTA

SEQ ID NO: 233582 - protein, 15 aa, Artificial Sequence
  Description of Artificial Sequence: Synthetic peptide
  Seed: LRMKWMMAMKYPITA
LRMKLMMKMVYPGTA

SEQ ID NO: 233583 - protein, 15 aa, Artificial Sequence
  Description of Artificial Sequence: Synthetic peptide
  Seed: LRMKWMMAMKYPITA
LRMKLMMKMVYPHTA

SEQ ID NO: 233584 - protein, 15 aa, Artificial Sequence
  Description of Artificial Sequence: Synthetic peptide
  Seed: LRMKWMMAMKYPITA
LRMKLMMKMVYPITA

SEQ ID NO: 233585 - protein, 15 aa, Artificial Sequence
  Description of Artificial Sequence: Synthetic peptide
  Seed: LRMKWMMAMKYPITA
LRMKLMMKMVYPKTA

SEQ ID NO: 233586 - protein, 15 aa, Artificial Sequence
  Description of Artificial Sequence: Synthetic peptide
  Seed: LRMKWMMAMKYPITA
LRMKLMMKMVYPLTA

SEQ ID NO: 233587 - protein, 15 aa, Artificial Sequence
  Description of Artificial Sequence: Synthetic peptide
  Seed: LRMKWMMAMKYPITA
LRMKLMMKMVYPMTA

SEQ ID NO: 233588 - protein, 15 aa, Artificial Sequence
  Description of Artificial Sequence: Synthetic peptide
  Seed: LRMKWMMAMKYPITA
LRMKLMMKMVYPQTA

SEQ ID NO: 233589 - protein, 15 aa, Artificial Sequence
  Description of Artificial Sequence: Synthetic peptide
  Seed: LRMKWMMAMKYPITA
LRMKLMMKMVYPRTA

SEQ ID NO: 233590 - protein, 15 aa, Artificial Sequence
  Description of Artificial Sequence: Synthetic peptide
  Seed: LRMKWMMAMKYPITA
LRMKLMMKMVYPSTA

SEQ ID NO: 233591 - protein, 15 aa, Artificial Sequence
  Description of Artificial Sequence: Synthetic peptide
  Seed: LRMKWMMAMKYPITA
LRMKLMMKMVYPVTA

SEQ ID NO: 233592 - protein, 15 aa, Artificial Sequence
  Description of Artificial Sequence: Synthetic peptide
  Seed: LRMKWMMAMKYPITA
LRMKLMMKMVYPYTA

SEQ ID NO: 233593 - protein, 15 aa, Artificial Sequence
  Description of Artificial Sequence: Synthetic peptide
  Seed: LRMKWMMAMKYPITA
LRMKLMMLMAYPATA

SEQ ID NO: 233594 - protein, 15 aa, Artificial Sequence
  Description of Artificial Sequence: Synthetic peptide
  Seed: LRMKWMMAMKYPITA
LRMKLMMLMAYPCTA

SEQ ID NO: 233595 - protein, 15 aa, Artificial Sequence
  Description of Artificial Sequence: Synthetic peptide
  Seed: LRMKWMMAMKYPITA
LRMKLMMLMAYPDTA

SEQ ID NO: 233596 - protein, 15 aa, Artificial Sequence
  Description of Artificial Sequence: Synthetic peptide
  Seed: LRMKWMMAMKYPITA
LRMKLMMLMAYPETA

SEQ ID NO: 233597 - protein, 15 aa, Artificial Sequence
  Description of Artificial Sequence: Synthetic peptide
  Seed: LRMKWMMAMKYPITA
LRMKLMMLMAYPFTA

SEQ ID NO: 233598 - protein, 15 aa, Artificial Sequence
  Description of Artificial Sequence: Synthetic peptide
  Seed: LRMKWMMAMKYPITA
LRMKLMMLMAYPGTA

SEQ ID NO: 233599 - protein, 15 aa, Artificial Sequence
  Description of Artificial Sequence: Synthetic peptide
  Seed: LRMKWMMAMKYPITA
LRMKLMMLMAYPHTA

SEQ ID NO: 233600 - protein, 15 aa, Artificial Sequence
  Description of Artificial Sequence: Synthetic peptide
  Seed: LRMKWMMAMKYPITA
LRMKLMMLMAYPITA

SEQ ID NO: 233601 - protein, 15 aa, Artificial Sequence
  Description of Artificial Sequence: Synthetic peptide
  Seed: LRMKWMMAMKYPITA
LRMKLMMLMAYPKTA

SEQ ID NO: 233602 - protein, 15 aa, Artificial Sequence
  Description of Artificial Sequence: Synthetic peptide
  Seed: LRMKWMMAMKYPITA
LRMKLMMLMAYPLTA

SEQ ID NO: 233603 - protein, 15 aa, Artificial Sequence
  Description of Artificial Sequence: Synthetic peptide
  Seed: LRMKWMMAMKYPITA
LRMKLMMLMAYPMTA

SEQ ID NO: 233604 - protein, 15 aa, Artificial Sequence
  Description of Artificial Sequence: Synthetic peptide
  Seed: LRMKWMMAMKYPITA
LRMKLMMLMAYPNTA

SEQ ID NO: 233605 - protein, 15 aa, Artificial Sequence
  Description of Artificial Sequence: Synthetic peptide
  Seed: LRMKWMMAMKYPITA
LRMKLMMLMAYPPTA

SEQ ID NO: 233606 - protein, 15 aa, Artificial Sequence
  Description of Artificial Sequence: Synthetic peptide
  Seed: LRMKWMMAMKYPITA
LRMKLMMLMAYPQTA

SEQ ID NO: 233607 - protein, 15 aa, Artificial Sequence
  Description of Artificial Sequence: Synthetic peptide
  Seed: LRMKWMMAMKYPITA
LRMKLMMLMAYPRTA

SEQ ID NO: 233608 - protein, 15 aa, Artificial Sequence
  Description of Artificial Sequence: Synthetic peptide
  Seed: LRMKWMMAMKYPITA
LRMKLMMLMAYPSTA

SEQ ID NO: 233609 - protein, 15 aa, Artificial Sequence
  Description of Artificial Sequence: Synthetic peptide
  Seed: LRMKWMMAMKYPITA
LRMKLMMLMAYPTTA

SEQ ID NO: 233610 - protein, 15 aa, Artificial Sequence
  Description of Artificial Sequence: Synthetic peptide
  Seed: LRMKWMMAMKYPITA
LRMKLMMLMAYPVTA

SEQ ID NO: 233611 - protein, 15 aa, Artificial Sequence
  Description of Artificial Sequence: Synthetic peptide
  Seed: LRMKWMMAMKYPITA
LRMKLMMLMAYPWTA

SEQ ID NO: 233612 - protein, 15 aa, Artificial Sequence
  Description of Artificial Sequence: Synthetic peptide
  Seed: LRMKWMMAMKYPITA
LRMKLMMLMAYPYTA

SEQ ID NO: 233613 - protein, 15 aa, Artificial Sequence
  Description of Artificial Sequence: Synthetic peptide
  Seed: LRMKWMMAMKYPITA
LRMKLMMLMCYPATA

SEQ ID NO: 233614 - protein, 15 aa, Artificial Sequence
  Description of Artificial Sequence: Synthetic peptide
  Seed: LRMKWMMAMKYPITA
LRMKLMMLMCYPITA

SEQ ID NO: 233615 - protein, 15 aa, Artificial Sequence
  Description of Artificial Sequence: Synthetic peptide
  Seed: LRMKWMMAMKYPITA
LRMKLMMLMCYPLTA

SEQ ID NO: 233616 - protein, 15 aa, Artificial Sequence
  Description of Artificial Sequence: Synthetic peptide
  Seed: LRMKWMMAMKYPITA
LRMKLMMLMCYPVTA

SEQ ID NO: 233617 - protein, 15 aa, Artificial Sequence
  Description of Artificial Sequence: Synthetic peptide
  Seed: LRMKWMMAMKYPITA
LRMKLMMLMDYPATA

SEQ ID NO: 233618 - protein, 15 aa, Artificial Sequence
  Description of Artificial Sequence: Synthetic peptide
  Seed: LRMKWMMAMKYPITA
LRMKLMMLMDYPDTA

SEQ ID NO: 233619 - protein, 15 aa, Artificial Sequence
  Description of Artificial Sequence: Synthetic peptide
  Seed: LRMKWMMAMKYPITA
LRMKLMMLMDYPETA

SEQ ID NO: 233620 - protein, 15 aa, Artificial Sequence
  Description of Artificial Sequence: Synthetic peptide
  Seed: LRMKWMMAMKYPITA
LRMKLMMLMDYPITA

SEQ ID NO: 233621 - protein, 15 aa, Artificial Sequence
  Description of Artificial Sequence: Synthetic peptide
  Seed: LRMKWMMAMKYPITA
LRMKLMMLMDYPLTA

SEQ ID NO: 233622 - protein, 15 aa, Artificial Sequence
  Description of Artificial Sequence: Synthetic peptide
  Seed: LRMKWMMAMKYPITA
LRMKLMMLMDYPMTA

SEQ ID NO: 233623 - protein, 15 aa, Artificial Sequence
  Description of Artificial Sequence: Synthetic peptide
  Seed: LRMKWMMAMKYPITA
LRMKLMMLMDYPSTA

SEQ ID NO: 233624 - protein, 15 aa, Artificial Sequence
  Description of Artificial Sequence: Synthetic peptide
  Seed: LRMKWMMAMKYPITA
LRMKLMMLMDYPTTA

SEQ ID NO: 233625 - protein, 15 aa, Artificial Sequence
  Description of Artificial Sequence: Synthetic peptide
  Seed: LRMKWMMAMKYPITA
LRMKLMMLMDYPVTA

SEQ ID NO: 233626 - protein, 15 aa, Artificial Sequence
  Description of Artificial Sequence: Synthetic peptide
  Seed: LRMKWMMAMKYPITA
LRMKLMMLMEYPATA

SEQ ID NO: 233627 - protein, 15 aa, Artificial Sequence
  Description of Artificial Sequence: Synthetic peptide
  Seed: LRMKWMMAMKYPITA
LRMKLMMLMEYPITA

SEQ ID NO: 233628 - protein, 15 aa, Artificial Sequence
  Description of Artificial Sequence: Synthetic peptide
  Seed: LRMKWMMAMKYPITA
LRMKLMMLMEYPLTA

SEQ ID NO: 233629 - protein, 15 aa, Artificial Sequence
  Description of Artificial Sequence: Synthetic peptide
  Seed: LRMKWMMAMKYPITA
LRMKLMMLMEYPMTA

SEQ ID NO: 233630 - protein, 15 aa, Artificial Sequence
  Description of Artificial Sequence: Synthetic peptide
  Seed: LRMKWMMAMKYPITA
LRMKLMMLMEYPVTA

SEQ ID NO: 233631 - protein, 15 aa, Artificial Sequence
  Description of Artificial Sequence: Synthetic peptide
  Seed: LRMKWMMAMKYPITA
LRMKLMMLMGYPATA

SEQ ID NO: 233632 - protein, 15 aa, Artificial Sequence
  Description of Artificial Sequence: Synthetic peptide
  Seed: LRMKWMMAMKYPITA
LRMKLMMLMGYPCTA

SEQ ID NO: 233633 - protein, 15 aa, Artificial Sequence
  Description of Artificial Sequence: Synthetic peptide
  Seed: LRMKWMMAMKYPITA
LRMKLMMLMGYPDTA

SEQ ID NO: 233634 - protein, 15 aa, Artificial Sequence
  Description of Artificial Sequence: Synthetic peptide
  Seed: LRMKWMMAMKYPITA
LRMKLMMLMGYPETA

SEQ ID NO: 233635 - protein, 15 aa, Artificial Sequence
  Description of Artificial Sequence: Synthetic peptide
  Seed: LRMKWMMAMKYPITA
LRMKLMMLMGYPFTA

SEQ ID NO: 233636 - protein, 15 aa, Artificial Sequence
  Description of Artificial Sequence: Synthetic peptide
  Seed: LRMKWMMAMKYPITA
LRMKLMMLMGYPGTA

SEQ ID NO: 233637 - protein, 15 aa, Artificial Sequence
  Description of Artificial Sequence: Synthetic peptide
  Seed: LRMKWMMAMKYPITA
LRMKLMMLMGYPHTA

SEQ ID NO: 233638 - protein, 15 aa, Artificial Sequence
  Description of Artificial Sequence: Synthetic peptide
  Seed: LRMKWMMAMKYPITA
LRMKLMMLMGYPITA

SEQ ID NO: 233639 - protein, 15 aa, Artificial Sequence
  Description of Artificial Sequence: Synthetic peptide
  Seed: LRMKWMMAMKYPITA
LRMKLMMLMGYPKTA

SEQ ID NO: 233640 - protein, 15 aa, Artificial Sequence
  Description of Artificial Sequence: Synthetic peptide
  Seed: LRMKWMMAMKYPITA
LRMKLMMLMGYPLTA

SEQ ID NO: 233641 - protein, 15 aa, Artificial Sequence
  Description of Artificial Sequence: Synthetic peptide
  Seed: LRMKWMMAMKYPITA
LRMKLMMLMGYPMTA

SEQ ID NO: 233642 - protein, 15 aa, Artificial Sequence
  Description of Artificial Sequence: Synthetic peptide
  Seed: LRMKWMMAMKYPITA
LRMKLMMLMGYPNTA

SEQ ID NO: 233643 - protein, 15 aa, Artificial Sequence
  Description of Artificial Sequence: Synthetic peptide
  Seed: LRMKWMMAMKYPITA
LRMKLMMLMGYPPTA

SEQ ID NO: 233644 - protein, 15 aa, Artificial Sequence
  Description of Artificial Sequence: Synthetic peptide
  Seed: LRMKWMMAMKYPITA
LRMKLMMLMGYPQTA

SEQ ID NO: 233645 - protein, 15 aa, Artificial Sequence
  Description of Artificial Sequence: Synthetic peptide
  Seed: LRMKWMMAMKYPITA
LRMKLMMLMGYPRTA

SEQ ID NO: 233646 - protein, 15 aa, Artificial Sequence
  Description of Artificial Sequence: Synthetic peptide
  Seed: LRMKWMMAMKYPITA
LRMKLMMLMGYPSTA

SEQ ID NO: 233647 - protein, 15 aa, Artificial Sequence
  Description of Artificial Sequence: Synthetic peptide
  Seed: LRMKWMMAMKYPITA
LRMKLMMLMGYPTTA

SEQ ID NO: 233648 - protein, 15 aa, Artificial Sequence
  Description of Artificial Sequence: Synthetic peptide
  Seed: LRMKWMMAMKYPITA
LRMKLMMLMGYPVTA

SEQ ID NO: 233649 - protein, 15 aa, Artificial Sequence
  Description of Artificial Sequence: Synthetic peptide
  Seed: LRMKWMMAMKYPITA
LRMKLMMLMGYPWTA

SEQ ID NO: 233650 - protein, 15 aa, Artificial Sequence
  Description of Artificial Sequence: Synthetic peptide
  Seed: LRMKWMMAMKYPITA
LRMKLMMLMGYPYTA

SEQ ID NO: 233651 - protein, 15 aa, Artificial Sequence
  Description of Artificial Sequence: Synthetic peptide
  Seed: LRMKWMMAMKYPITA
LRMKLMMLMHYPATA

SEQ ID NO: 233652 - protein, 15 aa, Artificial Sequence
  Description of Artificial Sequence: Synthetic peptide
  Seed: LRMKWMMAMKYPITA
LRMKLMMLMHYPGTA

SEQ ID NO: 233653 - protein, 15 aa, Artificial Sequence
  Description of Artificial Sequence: Synthetic peptide
  Seed: LRMKWMMAMKYPITA
LRMKLMMLMHYPHTA

SEQ ID NO: 233654 - protein, 15 aa, Artificial Sequence
  Description of Artificial Sequence: Synthetic peptide
  Seed: LRMKWMMAMKYPITA
LRMKLMMLMHYPITA

SEQ ID NO: 233655 - protein, 15 aa, Artificial Sequence
  Description of Artificial Sequence: Synthetic peptide
  Seed: LRMKWMMAMKYPITA
LRMKLMMLMHYPKTA

SEQ ID NO: 233656 - protein, 15 aa, Artificial Sequence
  Description of Artificial Sequence: Synthetic peptide
  Seed: LRMKWMMAMKYPITA
LRMKLMMLMHYPLTA

SEQ ID NO: 233657 - protein, 15 aa, Artificial Sequence
  Description of Artificial Sequence: Synthetic peptide
  Seed: LRMKWMMAMKYPITA
LRMKLMMLMHYPMTA

SEQ ID NO: 233658 - protein, 15 aa, Artificial Sequence
  Description of Artificial Sequence: Synthetic peptide
  Seed: LRMKWMMAMKYPITA
LRMKLMMLMHYPQTA

SEQ ID NO: 233659 - protein, 15 aa, Artificial Sequence
  Description of Artificial Sequence: Synthetic peptide
  Seed: LRMKWMMAMKYPITA
LRMKLMMLMHYPRTA

SEQ ID NO: 233660 - protein, 15 aa, Artificial Sequence
  Description of Artificial Sequence: Synthetic peptide
  Seed: LRMKWMMAMKYPITA
LRMKLMMLMHYPSTA

SEQ ID NO: 233661 - protein, 15 aa, Artificial Sequence
  Description of Artificial Sequence: Synthetic peptide
  Seed: LRMKWMMAMKYPITA
LRMKLMMLMHYPTTA

SEQ ID NO: 233662 - protein, 15 aa, Artificial Sequence
  Description of Artificial Sequence: Synthetic peptide
  Seed: LRMKWMMAMKYPITA
LRMKLMMLMHYPVTA

SEQ ID NO: 233663 - protein, 15 aa, Artificial Sequence
  Description of Artificial Sequence: Synthetic peptide
  Seed: LRMKWMMAMKYPITA
LRMKLMMLMHYPYTA

SEQ ID NO: 233664 - protein, 15 aa, Artificial Sequence
  Description of Artificial Sequence: Synthetic peptide
  Seed: LRMKWMMAMKYPITA
LRMKLMMLMIYPATA

SEQ ID NO: 233665 - protein, 15 aa, Artificial Sequence
  Description of Artificial Sequence: Synthetic peptide
  Seed: LRMKWMMAMKYPITA
LRMKLMMLMIYPDTA

SEQ ID NO: 233666 - protein, 15 aa, Artificial Sequence
  Description of Artificial Sequence: Synthetic peptide
  Seed: LRMKWMMAMKYPITA
LRMKLMMLMIYPETA

SEQ ID NO: 233667 - protein, 15 aa, Artificial Sequence
  Description of Artificial Sequence: Synthetic peptide
  Seed: LRMKWMMAMKYPITA
LRMKLMMLMIYPGTA

SEQ ID NO: 233668 - protein, 15 aa, Artificial Sequence
  Description of Artificial Sequence: Synthetic peptide
  Seed: LRMKWMMAMKYPITA
LRMKLMMLMIYPHTA

SEQ ID NO: 233669 - protein, 15 aa, Artificial Sequence
  Description of Artificial Sequence: Synthetic peptide
  Seed: LRMKWMMAMKYPITA
LRMKLMMLMIYPITA

SEQ ID NO: 233670 - protein, 15 aa, Artificial Sequence
  Description of Artificial Sequence: Synthetic peptide
  Seed: LRMKWMMAMKYPITA
LRMKLMMLMIYPKTA

SEQ ID NO: 233671 - protein, 15 aa, Artificial Sequence
  Description of Artificial Sequence: Synthetic peptide
  Seed: LRMKWMMAMKYPITA
LRMKLMMLMIYPLTA

SEQ ID NO: 233672 - protein, 15 aa, Artificial Sequence
  Description of Artificial Sequence: Synthetic peptide
  Seed: LRMKWMMAMKYPITA
LRMKLMMLMIYPMTA

SEQ ID NO: 233673 - protein, 15 aa, Artificial Sequence
  Description of Artificial Sequence: Synthetic peptide
  Seed: LRMKWMMAMKYPITA
LRMKLMMLMIYPNTA

SEQ ID NO: 233674 - protein, 15 aa, Artificial Sequence
  Description of Artificial Sequence: Synthetic peptide
  Seed: LRMKWMMAMKYPITA
LRMKLMMLMIYPQTA

SEQ ID NO: 233675 - protein, 15 aa, Artificial Sequence
  Description of Artificial Sequence: Synthetic peptide
  Seed: LRMKWMMAMKYPITA
LRMKLMMLMIYPRTA

SEQ ID NO: 233676 - protein, 15 aa, Artificial Sequence
  Description of Artificial Sequence: Synthetic peptide
  Seed: LRMKWMMAMKYPITA
LRMKLMMLMIYPSTA

SEQ ID NO: 233677 - protein, 15 aa, Artificial Sequence
  Description of Artificial Sequence: Synthetic peptide
  Seed: LRMKWMMAMKYPITA
LRMKLMMLMIYPTTA

SEQ ID NO: 233678 - protein, 15 aa, Artificial Sequence
  Description of Artificial Sequence: Synthetic peptide
  Seed: LRMKWMMAMKYPITA
LRMKLMMLMIYPVTA

SEQ ID NO: 233679 - protein, 15 aa, Artificial Sequence
  Description of Artificial Sequence: Synthetic peptide
  Seed: LRMKWMMAMKYPITA
LRMKLMMLMIYPYTA

SEQ ID NO: 233680 - protein, 15 aa, Artificial Sequence
  Description of Artificial Sequence: Synthetic peptide
  Seed: LRMKWMMAMKYPITA
LRMKLMMLMKYPATA

SEQ ID NO: 233681 - protein, 15 aa, Artificial Sequence
  Description of Artificial Sequence: Synthetic peptide
  Seed: LRMKWMMAMKYPITA
LRMKLMMLMKYPCTA

SEQ ID NO: 233682 - protein, 15 aa, Artificial Sequence
  Description of Artificial Sequence: Synthetic peptide
  Seed: LRMKWMMAMKYPITA
LRMKLMMLMKYPDTA

SEQ ID NO: 233683 - protein, 15 aa, Artificial Sequence
  Description of Artificial Sequence: Synthetic peptide
  Seed: LRMKWMMAMKYPITA
LRMKLMMLMKYPETA

SEQ ID NO: 233684 - protein, 15 aa, Artificial Sequence
  Description of Artificial Sequence: Synthetic peptide
  Seed: LRMKWMMAMKYPITA
LRMKLMMLMKYPFTA

SEQ ID NO: 233685 - protein, 15 aa, Artificial Sequence
  Description of Artificial Sequence: Synthetic peptide
  Seed: LRMKWMMAMKYPITA
LRMKLMMLMKYPGTA

SEQ ID NO: 233686 - protein, 15 aa, Artificial Sequence
  Description of Artificial Sequence: Synthetic peptide
  Seed: LRMKWMMAMKYPITA
LRMKLMMLMKYPHTA

SEQ ID NO: 233687 - protein, 15 aa, Artificial Sequence
  Description of Artificial Sequence: Synthetic peptide
  Seed: LRMKWMMAMKYPITA
LRMKLMMLMKYPITA

SEQ ID NO: 233688 - protein, 15 aa, Artificial Sequence
  Description of Artificial Sequence: Synthetic peptide
  Seed: LRMKWMMAMKYPITA
LRMKLMMLMKYPKTA

SEQ ID NO: 233689 - protein, 15 aa, Artificial Sequence
  Description of Artificial Sequence: Synthetic peptide
  Seed: LRMKWMMAMKYPITA
LRMKLMMLMKYPLTA

SEQ ID NO: 233690 - protein, 15 aa, Artificial Sequence
  Description of Artificial Sequence: Synthetic peptide
  Seed: LRMKWMMAMKYPITA
LRMKLMMLMKYPMTA

SEQ ID NO: 233691 - protein, 15 aa, Artificial Sequence
  Description of Artificial Sequence: Synthetic peptide
  Seed: LRMKWMMAMKYPITA
LRMKLMMLMKYPNTA

SEQ ID NO: 233692 - protein, 15 aa, Artificial Sequence
  Description of Artificial Sequence: Synthetic peptide
  Seed: LRMKWMMAMKYPITA
LRMKLMMLMKYPPTA

SEQ ID NO: 233693 - protein, 15 aa, Artificial Sequence
  Description of Artificial Sequence: Synthetic peptide
  Seed: LRMKWMMAMKYPITA
LRMKLMMLMKYPQTA

SEQ ID NO: 233694 - protein, 15 aa, Artificial Sequence
  Description of Artificial Sequence: Synthetic peptide
  Seed: LRMKWMMAMKYPITA
LRMKLMMLMKYPRTA

SEQ ID NO: 233695 - protein, 15 aa, Artificial Sequence
  Description of Artificial Sequence: Synthetic peptide
  Seed: LRMKWMMAMKYPITA
LRMKLMMLMKYPSTA

SEQ ID NO: 233696 - protein, 15 aa, Artificial Sequence
  Description of Artificial Sequence: Synthetic peptide
  Seed: LRMKWMMAMKYPITA
LRMKLMMLMKYPTTA

SEQ ID NO: 233697 - protein, 15 aa, Artificial Sequence
  Description of Artificial Sequence: Synthetic peptide
  Seed: LRMKWMMAMKYPITA
LRMKLMMLMKYPVTA

SEQ ID NO: 233698 - protein, 15 aa, Artificial Sequence
  Description of Artificial Sequence: Synthetic peptide
  Seed: LRMKWMMAMKYPITA
LRMKLMMLMKYPWTA

SEQ ID NO: 233699 - protein, 15 aa, Artificial Sequence
  Description of Artificial Sequence: Synthetic peptide
  Seed: LRMKWMMAMKYPITA
LRMKLMMLMKYPYTA

SEQ ID NO: 233700 - protein, 15 aa, Artificial Sequence
  Description of Artificial Sequence: Synthetic peptide
  Seed: LRMKWMMAMKYPITA
LRMKLMMLMLYPDTA

SEQ ID NO: 233701 - protein, 15 aa, Artificial Sequence
  Description of Artificial Sequence: Synthetic peptide
  Seed: LRMKWMMAMKYPITA
LRMKLMMLMLYPGTA

SEQ ID NO: 233702 - protein, 15 aa, Artificial Sequence
  Description of Artificial Sequence: Synthetic peptide
  Seed: LRMKWMMAMKYPITA
LRMKLMMLMLYPMTA

SEQ ID NO: 233703 - protein, 15 aa, Artificial Sequence
  Description of Artificial Sequence: Synthetic peptide
  Seed: LRMKWMMAMKYPITA
LRMKLMMLMLYPSTA

SEQ ID NO: 233704 - protein, 15 aa, Artificial Sequence
  Description of Artificial Sequence: Synthetic peptide
  Seed: LRMKWMMAMKYPITA
LRMKLMMLMMYPATA

SEQ ID NO: 233705 - protein, 15 aa, Artificial Sequence
  Description of Artificial Sequence: Synthetic peptide
  Seed: LRMKWMMAMKYPITA
LRMKLMMLMMYPGTA

SEQ ID NO: 233706 - protein, 15 aa, Artificial Sequence
  Description of Artificial Sequence: Synthetic peptide
  Seed: LRMKWMMAMKYPITA
LRMKLMMLMMYPITA

SEQ ID NO: 233707 - protein, 15 aa, Artificial Sequence
  Description of Artificial Sequence: Synthetic peptide
  Seed: LRMKWMMAMKYPITA
LRMKLMMLMMYPLTA

SEQ ID NO: 233708 - protein, 15 aa, Artificial Sequence
  Description of Artificial Sequence: Synthetic peptide
  Seed: LRMKWMMAMKYPITA
LRMKLMMLMMYPMTA

SEQ ID NO: 233709 - protein, 15 aa, Artificial Sequence
  Description of Artificial Sequence: Synthetic peptide
  Seed: LRMKWMMAMKYPITA
LRMKLMMLMMYPRTA

SEQ ID NO: 233710 - protein, 15 aa, Artificial Sequence
  Description of Artificial Sequence: Synthetic peptide
  Seed: LRMKWMMAMKYPITA
LRMKLMMLMMYPTTA

SEQ ID NO: 233711 - protein, 15 aa, Artificial Sequence
  Description of Artificial Sequence: Synthetic peptide
  Seed: LRMKWMMAMKYPITA
LRMKLMMLMMYPVTA

SEQ ID NO: 233712 - protein, 15 aa, Artificial Sequence
  Description of Artificial Sequence: Synthetic peptide
  Seed: LRMKWMMAMKYPITA
LRMKLMMLMNYPATA

SEQ ID NO: 233713 - protein, 15 aa, Artificial Sequence
  Description of Artificial Sequence: Synthetic peptide
  Seed: LRMKWMMAMKYPITA
LRMKLMMLMNYPCTA

SEQ ID NO: 233714 - protein, 15 aa, Artificial Sequence
  Description of Artificial Sequence: Synthetic peptide
  Seed: LRMKWMMAMKYPITA
LRMKLMMLMNYPDTA

SEQ ID NO: 233715 - protein, 15 aa, Artificial Sequence
  Description of Artificial Sequence: Synthetic peptide
  Seed: LRMKWMMAMKYPITA
LRMKLMMLMNYPETA

SEQ ID NO: 233716 - protein, 15 aa, Artificial Sequence
  Description of Artificial Sequence: Synthetic peptide
  Seed: LRMKWMMAMKYPITA
LRMKLMMLMNYPFTA

SEQ ID NO: 233717 - protein, 15 aa, Artificial Sequence
  Description of Artificial Sequence: Synthetic peptide
  Seed: LRMKWMMAMKYPITA
LRMKLMMLMNYPGTA

SEQ ID NO: 233718 - protein, 15 aa, Artificial Sequence
  Description of Artificial Sequence: Synthetic peptide
  Seed: LRMKWMMAMKYPITA
LRMKLMMLMNYPHTA

SEQ ID NO: 233719 - protein, 15 aa, Artificial Sequence
  Description of Artificial Sequence: Synthetic peptide
  Seed: LRMKWMMAMKYPITA
LRMKLMMLMNYPITA

SEQ ID NO: 233720 - protein, 15 aa, Artificial Sequence
  Description of Artificial Sequence: Synthetic peptide
  Seed: LRMKWMMAMKYPITA
LRMKLMMLMNYPKTA

SEQ ID NO: 233721 - protein, 15 aa, Artificial Sequence
  Description of Artificial Sequence: Synthetic peptide
  Seed: LRMKWMMAMKYPITA
LRMKLMMLMNYPLTA

SEQ ID NO: 233722 - protein, 15 aa, Artificial Sequence
  Description of Artificial Sequence: Synthetic peptide
  Seed: LRMKWMMAMKYPITA
LRMKLMMLMNYPMTA

SEQ ID NO: 233723 - protein, 15 aa, Artificial Sequence
  Description of Artificial Sequence: Synthetic peptide
  Seed: LRMKWMMAMKYPITA
LRMKLMMLMNYPNTA

SEQ ID NO: 233724 - protein, 15 aa, Artificial Sequence
  Description of Artificial Sequence: Synthetic peptide
  Seed: LRMKWMMAMKYPITA
LRMKLMMLMNYPPTA

SEQ ID NO: 233725 - protein, 15 aa, Artificial Sequence
  Description of Artificial Sequence: Synthetic peptide
  Seed: LRMKWMMAMKYPITA
LRMKLMMLMNYPQTA

SEQ ID NO: 233726 - protein, 15 aa, Artificial Sequence
  Description of Artificial Sequence: Synthetic peptide
  Seed: LRMKWMMAMKYPITA
LRMKLMMLMNYPRTA

SEQ ID NO: 233727 - protein, 15 aa, Artificial Sequence
  Description of Artificial Sequence: Synthetic peptide
  Seed: LRMKWMMAMKYPITA
LRMKLMMLMNYPSTA

SEQ ID NO: 233728 - protein, 15 aa, Artificial Sequence
  Description of Artificial Sequence: Synthetic peptide
  Seed: LRMKWMMAMKYPITA
LRMKLMMLMNYPTTA

SEQ ID NO: 233729 - protein, 15 aa, Artificial Sequence
  Description of Artificial Sequence: Synthetic peptide
  Seed: LRMKWMMAMKYPITA
LRMKLMMLMNYPVTA

SEQ ID NO: 233730 - protein, 15 aa, Artificial Sequence
  Description of Artificial Sequence: Synthetic peptide
  Seed: LRMKWMMAMKYPITA
LRMKLMMLMNYPYTA

SEQ ID NO: 233731 - protein, 15 aa, Artificial Sequence
  Description of Artificial Sequence: Synthetic peptide
  Seed: LRMKWMMAMKYPITA
LRMKLMMLMPYPATA

SEQ ID NO: 233732 - protein, 15 aa, Artificial Sequence
  Description of Artificial Sequence: Synthetic peptide
  Seed: LRMKWMMAMKYPITA
LRMKLMMLMPYPCTA

SEQ ID NO: 233733 - protein, 15 aa, Artificial Sequence
  Description of Artificial Sequence: Synthetic peptide
  Seed: LRMKWMMAMKYPITA
LRMKLMMLMPYPDTA

SEQ ID NO: 233734 - protein, 15 aa, Artificial Sequence
  Description of Artificial Sequence: Synthetic peptide
  Seed: LRMKWMMAMKYPITA
LRMKLMMLMPYPETA

SEQ ID NO: 233735 - protein, 15 aa, Artificial Sequence
  Description of Artificial Sequence: Synthetic peptide
  Seed: LRMKWMMAMKYPITA
LRMKLMMLMPYPFTA

SEQ ID NO: 233736 - protein, 15 aa, Artificial Sequence
  Description of Artificial Sequence: Synthetic peptide
  Seed: LRMKWMMAMKYPITA
LRMKLMMLMPYPGTA

SEQ ID NO: 233737 - protein, 15 aa, Artificial Sequence
  Description of Artificial Sequence: Synthetic peptide
  Seed: LRMKWMMAMKYPITA
LRMKLMMLMPYPHTA

SEQ ID NO: 233738 - protein, 15 aa, Artificial Sequence
  Description of Artificial Sequence: Synthetic peptide
  Seed: LRMKWMMAMKYPITA
LRMKLMMLMPYPITA

SEQ ID NO: 233739 - protein, 15 aa, Artificial Sequence
  Description of Artificial Sequence: Synthetic peptide
  Seed: LRMKWMMAMKYPITA
LRMKLMMLMPYPKTA

SEQ ID NO: 233740 - protein, 15 aa, Artificial Sequence
  Description of Artificial Sequence: Synthetic peptide
  Seed: LRMKWMMAMKYPITA
LRMKLMMLMPYPLTA

SEQ ID NO: 233741 - protein, 15 aa, Artificial Sequence
  Description of Artificial Sequence: Synthetic peptide
  Seed: LRMKWMMAMKYPITA
LRMKLMMLMPYPMTA

SEQ ID NO: 233742 - protein, 15 aa, Artificial Sequence
  Description of Artificial Sequence: Synthetic peptide
  Seed: LRMKWMMAMKYPITA
LRMKLMMLMPYPNTA

SEQ ID NO: 233743 - protein, 15 aa, Artificial Sequence
  Description of Artificial Sequence: Synthetic peptide
  Seed: LRMKWMMAMKYPITA
LRMKLMMLMPYPPTA

SEQ ID NO: 233744 - protein, 15 aa, Artificial Sequence
  Description of Artificial Sequence: Synthetic peptide
  Seed: LRMKWMMAMKYPITA
LRMKLMMLMPYPQTA

SEQ ID NO: 233745 - protein, 15 aa, Artificial Sequence
  Description of Artificial Sequence: Synthetic peptide
  Seed: LRMKWMMAMKYPITA
LRMKLMMLMPYPRTA

SEQ ID NO: 233746 - protein, 15 aa, Artificial Sequence
  Description of Artificial Sequence: Synthetic peptide
  Seed: LRMKWMMAMKYPITA
LRMKLMMLMPYPSTA

SEQ ID NO: 233747 - protein, 15 aa, Artificial Sequence
  Description of Artificial Sequence: Synthetic peptide
  Seed: LRMKWMMAMKYPITA
LRMKLMMLMPYPTTA

SEQ ID NO: 233748 - protein, 15 aa, Artificial Sequence
  Description of Artificial Sequence: Synthetic peptide
  Seed: LRMKWMMAMKYPITA
LRMKLMMLMPYPVTA

SEQ ID NO: 233749 - protein, 15 aa, Artificial Sequence
  Description of Artificial Sequence: Synthetic peptide
  Seed: LRMKWMMAMKYPITA
LRMKLMMLMPYPWTA

SEQ ID NO: 233750 - protein, 15 aa, Artificial Sequence
  Description of Artificial Sequence: Synthetic peptide
  Seed: LRMKWMMAMKYPITA
LRMKLMMLMPYPYTA

SEQ ID NO: 233751 - protein, 15 aa, Artificial Sequence
  Description of Artificial Sequence: Synthetic peptide
  Seed: LRMKWMMAMKYPITA
LRMKLMMLMQYPATA

SEQ ID NO: 233752 - protein, 15 aa, Artificial Sequence
  Description of Artificial Sequence: Synthetic peptide
  Seed: LRMKWMMAMKYPITA
LRMKLMMLMQYPITA

SEQ ID NO: 233753 - protein, 15 aa, Artificial Sequence
  Description of Artificial Sequence: Synthetic peptide
  Seed: LRMKWMMAMKYPITA
LRMKLMMLMQYPKTA

SEQ ID NO: 233754 - protein, 15 aa, Artificial Sequence
  Description of Artificial Sequence: Synthetic peptide
  Seed: LRMKWMMAMKYPITA
LRMKLMMLMQYPLTA

SEQ ID NO: 233755 - protein, 15 aa, Artificial Sequence
  Description of Artificial Sequence: Synthetic peptide
  Seed: LRMKWMMAMKYPITA
LRMKLMMLMQYPMTA

SEQ ID NO: 233756 - protein, 15 aa, Artificial Sequence
  Description of Artificial Sequence: Synthetic peptide
  Seed: LRMKWMMAMKYPITA
LRMKLMMLMQYPNTA

SEQ ID NO: 233757 - protein, 15 aa, Artificial Sequence
  Description of Artificial Sequence: Synthetic peptide
  Seed: LRMKWMMAMKYPITA
LRMKLMMLMQYPRTA

SEQ ID NO: 233758 - protein, 15 aa, Artificial Sequence
  Description of Artificial Sequence: Synthetic peptide
  Seed: LRMKWMMAMKYPITA
LRMKLMMLMQYPSTA

SEQ ID NO: 233759 - protein, 15 aa, Artificial Sequence
  Description of Artificial Sequence: Synthetic peptide
  Seed: LRMKWMMAMKYPITA
LRMKLMMLMQYPTTA

SEQ ID NO: 233760 - protein, 15 aa, Artificial Sequence
  Description of Artificial Sequence: Synthetic peptide
  Seed: LRMKWMMAMKYPITA
LRMKLMMLMQYPVTA

SEQ ID NO: 233761 - protein, 15 aa, Artificial Sequence
  Description of Artificial Sequence: Synthetic peptide
  Seed: LRMKWMMAMKYPITA
LRMKLMMLMRYPATA

SEQ ID NO: 233762 - protein, 15 aa, Artificial Sequence
  Description of Artificial Sequence: Synthetic peptide
  Seed: LRMKWMMAMKYPITA
LRMKLMMLMRYPCTA

SEQ ID NO: 233763 - protein, 15 aa, Artificial Sequence
  Description of Artificial Sequence: Synthetic peptide
  Seed: LRMKWMMAMKYPITA
LRMKLMMLMRYPDTA

SEQ ID NO: 233764 - protein, 15 aa, Artificial Sequence
  Description of Artificial Sequence: Synthetic peptide
  Seed: LRMKWMMAMKYPITA
LRMKLMMLMRYPETA

SEQ ID NO: 233765 - protein, 15 aa, Artificial Sequence
  Description of Artificial Sequence: Synthetic peptide
  Seed: LRMKWMMAMKYPITA
LRMKLMMLMRYPFTA

SEQ ID NO: 233766 - protein, 15 aa, Artificial Sequence
  Description of Artificial Sequence: Synthetic peptide
  Seed: LRMKWMMAMKYPITA
LRMKLMMLMRYPGTA

SEQ ID NO: 233767 - protein, 15 aa, Artificial Sequence
  Description of Artificial Sequence: Synthetic peptide
  Seed: LRMKWMMAMKYPITA
LRMKLMMLMRYPHTA

SEQ ID NO: 233768 - protein, 15 aa, Artificial Sequence
  Description of Artificial Sequence: Synthetic peptide
  Seed: LRMKWMMAMKYPITA
LRMKLMMLMRYPITA

SEQ ID NO: 233769 - protein, 15 aa, Artificial Sequence
  Description of Artificial Sequence: Synthetic peptide
  Seed: LRMKWMMAMKYPITA
LRMKLMMLMRYPKTA

SEQ ID NO: 233770 - protein, 15 aa, Artificial Sequence
  Description of Artificial Sequence: Synthetic peptide
  Seed: LRMKWMMAMKYPITA
LRMKLMMLMRYPLTA

SEQ ID NO: 233771 - protein, 15 aa, Artificial Sequence
  Description of Artificial Sequence: Synthetic peptide
  Seed: LRMKWMMAMKYPITA
LRMKLMMLMRYPMTA

SEQ ID NO: 233772 - protein, 15 aa, Artificial Sequence
  Description of Artificial Sequence: Synthetic peptide
  Seed: LRMKWMMAMKYPITA
LRMKLMMLMRYPNTA

SEQ ID NO: 233773 - protein, 15 aa, Artificial Sequence
  Description of Artificial Sequence: Synthetic peptide
  Seed: LRMKWMMAMKYPITA
LRMKLMMLMRYPPTA

SEQ ID NO: 233774 - protein, 15 aa, Artificial Sequence
  Description of Artificial Sequence: Synthetic peptide
  Seed: LRMKWMMAMKYPITA
LRMKLMMLMRYPQTA

SEQ ID NO: 233775 - protein, 15 aa, Artificial Sequence
  Description of Artificial Sequence: Synthetic peptide
  Seed: LRMKWMMAMKYPITA
LRMKLMMLMRYPRTA

SEQ ID NO: 233776 - protein, 15 aa, Artificial Sequence
  Description of Artificial Sequence: Synthetic peptide
  Seed: LRMKWMMAMKYPITA
LRMKLMMLMRYPSTA

SEQ ID NO: 233777 - protein, 15 aa, Artificial Sequence
  Description of Artificial Sequence: Synthetic peptide
  Seed: LRMKWMMAMKYPITA
LRMKLMMLMRYPTTA

SEQ ID NO: 233778 - protein, 15 aa, Artificial Sequence
  Description of Artificial Sequence: Synthetic peptide
  Seed: LRMKWMMAMKYPITA
LRMKLMMLMRYPVTA

SEQ ID NO: 233779 - protein, 15 aa, Artificial Sequence
  Description of Artificial Sequence: Synthetic peptide
  Seed: LRMKWMMAMKYPITA
LRMKLMMLMRYPWTA

SEQ ID NO: 233780 - protein, 15 aa, Artificial Sequence
  Description of Artificial Sequence: Synthetic peptide
  Seed: LRMKWMMAMKYPITA
LRMKLMMLMRYPYTA

SEQ ID NO: 233781 - protein, 15 aa, Artificial Sequence
  Description of Artificial Sequence: Synthetic peptide
  Seed: LRMKWMMAMKYPITA
LRMKLMMLMSYPATA

SEQ ID NO: 233782 - protein, 15 aa, Artificial Sequence
  Description of Artificial Sequence: Synthetic peptide
  Seed: LRMKWMMAMKYPITA
LRMKLMMLMSYPCTA

SEQ ID NO: 233783 - protein, 15 aa, Artificial Sequence
  Description of Artificial Sequence: Synthetic peptide
  Seed: LRMKWMMAMKYPITA
LRMKLMMLMSYPDTA

SEQ ID NO: 233784 - protein, 15 aa, Artificial Sequence
  Description of Artificial Sequence: Synthetic peptide
  Seed: LRMKWMMAMKYPITA
LRMKLMMLMSYPETA

SEQ ID NO: 233785 - protein, 15 aa, Artificial Sequence
  Description of Artificial Sequence: Synthetic peptide
  Seed: LRMKWMMAMKYPITA
LRMKLMMLMSYPFTA

SEQ ID NO: 233786 - protein, 15 aa, Artificial Sequence
  Description of Artificial Sequence: Synthetic peptide
  Seed: LRMKWMMAMKYPITA
LRMKLMMLMSYPGTA

SEQ ID NO: 233787 - protein, 15 aa, Artificial Sequence
  Description of Artificial Sequence: Synthetic peptide
  Seed: LRMKWMMAMKYPITA
LRMKLMMLMSYPHTA

SEQ ID NO: 233788 - protein, 15 aa, Artificial Sequence
  Description of Artificial Sequence: Synthetic peptide
  Seed: LRMKWMMAMKYPITA
LRMKLMMLMSYPITA

SEQ ID NO: 233789 - protein, 15 aa, Artificial Sequence
  Description of Artificial Sequence: Synthetic peptide
  Seed: LRMKWMMAMKYPITA
LRMKLMMLMSYPKTA

SEQ ID NO: 233790 - protein, 15 aa, Artificial Sequence
  Description of Artificial Sequence: Synthetic peptide
  Seed: LRMKWMMAMKYPITA
LRMKLMMLMSYPLTA

SEQ ID NO: 233791 - protein, 15 aa, Artificial Sequence
  Description of Artificial Sequence: Synthetic peptide
  Seed: LRMKWMMAMKYPITA
LRMKLMMLMSYPMTA

SEQ ID NO: 233792 - protein, 15 aa, Artificial Sequence
  Description of Artificial Sequence: Synthetic peptide
  Seed: LRMKWMMAMKYPITA
LRMKLMMLMSYPNTA

SEQ ID NO: 233793 - protein, 15 aa, Artificial Sequence
  Description of Artificial Sequence: Synthetic peptide
  Seed: LRMKWMMAMKYPITA
LRMKLMMLMSYPPTA

SEQ ID NO: 233794 - protein, 15 aa, Artificial Sequence
  Description of Artificial Sequence: Synthetic peptide
  Seed: LRMKWMMAMKYPITA
LRMKLMMLMSYPQTA

SEQ ID NO: 233795 - protein, 15 aa, Artificial Sequence
  Description of Artificial Sequence: Synthetic peptide
  Seed: LRMKWMMAMKYPITA
LRMKLMMLMSYPRTA

SEQ ID NO: 233796 - protein, 15 aa, Artificial Sequence
  Description of Artificial Sequence: Synthetic peptide
  Seed: LRMKWMMAMKYPITA
LRMKLMMLMSYPSTA

SEQ ID NO: 233797 - protein, 15 aa, Artificial Sequence
  Description of Artificial Sequence: Synthetic peptide
  Seed: LRMKWMMAMKYPITA
LRMKLMMLMSYPTTA

SEQ ID NO: 233798 - protein, 15 aa, Artificial Sequence
  Description of Artificial Sequence: Synthetic peptide
  Seed: LRMKWMMAMKYPITA
LRMKLMMLMSYPVTA

SEQ ID NO: 233799 - protein, 15 aa, Artificial Sequence
  Description of Artificial Sequence: Synthetic peptide
  Seed: LRMKWMMAMKYPITA
LRMKLMMLMSYPYTA

SEQ ID NO: 233800 - protein, 15 aa, Artificial Sequence
  Description of Artificial Sequence: Synthetic peptide
  Seed: LRMKWMMAMKYPITA
LRMKLMMLMTYPATA

SEQ ID NO: 233801 - protein, 15 aa, Artificial Sequence
  Description of Artificial Sequence: Synthetic peptide
  Seed: LRMKWMMAMKYPITA
LRMKLMMLMTYPCTA

SEQ ID NO: 233802 - protein, 15 aa, Artificial Sequence
  Description of Artificial Sequence: Synthetic peptide
  Seed: LRMKWMMAMKYPITA
LRMKLMMLMTYPDTA

SEQ ID NO: 233803 - protein, 15 aa, Artificial Sequence
  Description of Artificial Sequence: Synthetic peptide
  Seed: LRMKWMMAMKYPITA
LRMKLMMLMTYPETA

SEQ ID NO: 233804 - protein, 15 aa, Artificial Sequence
  Description of Artificial Sequence: Synthetic peptide
  Seed: LRMKWMMAMKYPITA
LRMKLMMLMTYPFTA

SEQ ID NO: 233805 - protein, 15 aa, Artificial Sequence
  Description of Artificial Sequence: Synthetic peptide
  Seed: LRMKWMMAMKYPITA
LRMKLMMLMTYPGTA

SEQ ID NO: 233806 - protein, 15 aa, Artificial Sequence
  Description of Artificial Sequence: Synthetic peptide
  Seed: LRMKWMMAMKYPITA
LRMKLMMLMTYPHTA

SEQ ID NO: 233807 - protein, 15 aa, Artificial Sequence
  Description of Artificial Sequence: Synthetic peptide
  Seed: LRMKWMMAMKYPITA
LRMKLMMLMTYPITA

SEQ ID NO: 233808 - protein, 15 aa, Artificial Sequence
  Description of Artificial Sequence: Synthetic peptide
  Seed: LRMKWMMAMKYPITA
LRMKLMMLMTYPKTA

SEQ ID NO: 233809 - protein, 15 aa, Artificial Sequence
  Description of Artificial Sequence: Synthetic peptide
  Seed: LRMKWMMAMKYPITA
LRMKLMMLMTYPLTA

SEQ ID NO: 233810 - protein, 15 aa, Artificial Sequence
  Description of Artificial Sequence: Synthetic peptide
  Seed: LRMKWMMAMKYPITA
LRMKLMMLMTYPMTA

SEQ ID NO: 233811 - protein, 15 aa, Artificial Sequence
  Description of Artificial Sequence: Synthetic peptide
  Seed: LRMKWMMAMKYPITA
LRMKLMMLMTYPNTA

SEQ ID NO: 233812 - protein, 15 aa, Artificial Sequence
  Description of Artificial Sequence: Synthetic peptide
  Seed: LRMKWMMAMKYPITA
LRMKLMMLMTYPPTA

SEQ ID NO: 233813 - protein, 15 aa, Artificial Sequence
  Description of Artificial Sequence: Synthetic peptide
  Seed: LRMKWMMAMKYPITA
LRMKLMMLMTYPQTA

SEQ ID NO: 233814 - protein, 15 aa, Artificial Sequence
  Description of Artificial Sequence: Synthetic peptide
  Seed: LRMKWMMAMKYPITA
LRMKLMMLMTYPRTA

SEQ ID NO: 233815 - protein, 15 aa, Artificial Sequence
  Description of Artificial Sequence: Synthetic peptide
  Seed: LRMKWMMAMKYPITA
LRMKLMMLMTYPSTA

SEQ ID NO: 233816 - protein, 15 aa, Artificial Sequence
  Description of Artificial Sequence: Synthetic peptide
  Seed: LRMKWMMAMKYPITA
LRMKLMMLMTYPTTA

SEQ ID NO: 233817 - protein, 15 aa, Artificial Sequence
  Description of Artificial Sequence: Synthetic peptide
  Seed: LRMKWMMAMKYPITA
LRMKLMMLMTYPVTA

SEQ ID NO: 233818 - protein, 15 aa, Artificial Sequence
  Description of Artificial Sequence: Synthetic peptide
  Seed: LRMKWMMAMKYPITA
LRMKLMMLMTYPYTA

SEQ ID NO: 233819 - protein, 15 aa, Artificial Sequence
  Description of Artificial Sequence: Synthetic peptide
  Seed: LRMKWMMAMKYPITA
LRMKLMMLMVYPATA

SEQ ID NO: 233820 - protein, 15 aa, Artificial Sequence
  Description of Artificial Sequence: Synthetic peptide
  Seed: LRMKWMMAMKYPITA
LRMKLMMLMVYPCTA

SEQ ID NO: 233821 - protein, 15 aa, Artificial Sequence
  Description of Artificial Sequence: Synthetic peptide
  Seed: LRMKWMMAMKYPITA
LRMKLMMLMVYPDTA

SEQ ID NO: 233822 - protein, 15 aa, Artificial Sequence
  Description of Artificial Sequence: Synthetic peptide
  Seed: LRMKWMMAMKYPITA
LRMKLMMLMVYPETA

SEQ ID NO: 233823 - protein, 15 aa, Artificial Sequence
  Description of Artificial Sequence: Synthetic peptide
  Seed: LRMKWMMAMKYPITA
LRMKLMMLMVYPGTA

SEQ ID NO: 233824 - protein, 15 aa, Artificial Sequence
  Description of Artificial Sequence: Synthetic peptide
  Seed: LRMKWMMAMKYPITA
LRMKLMMLMVYPHTA

SEQ ID NO: 233825 - protein, 15 aa, Artificial Sequence
  Description of Artificial Sequence: Synthetic peptide
  Seed: LRMKWMMAMKYPITA
LRMKLMMLMVYPITA

SEQ ID NO: 233826 - protein, 15 aa, Artificial Sequence
  Description of Artificial Sequence: Synthetic peptide
  Seed: LRMKWMMAMKYPITA
LRMKLMMLMVYPKTA

SEQ ID NO: 233827 - protein, 15 aa, Artificial Sequence
  Description of Artificial Sequence: Synthetic peptide
  Seed: LRMKWMMAMKYPITA
LRMKLMMLMVYPLTA

SEQ ID NO: 233828 - protein, 15 aa, Artificial Sequence
  Description of Artificial Sequence: Synthetic peptide
  Seed: LRMKWMMAMKYPITA
LRMKLMMLMVYPMTA

SEQ ID NO: 233829 - protein, 15 aa, Artificial Sequence
  Description of Artificial Sequence: Synthetic peptide
  Seed: LRMKWMMAMKYPITA
LRMKLMMLMVYPNTA

SEQ ID NO: 233830 - protein, 15 aa, Artificial Sequence
  Description of Artificial Sequence: Synthetic peptide
  Seed: LRMKWMMAMKYPITA
LRMKLMMLMVYPPTA

SEQ ID NO: 233831 - protein, 15 aa, Artificial Sequence
  Description of Artificial Sequence: Synthetic peptide
  Seed: LRMKWMMAMKYPITA
LRMKLMMLMVYPQTA

SEQ ID NO: 233832 - protein, 15 aa, Artificial Sequence
  Description of Artificial Sequence: Synthetic peptide
  Seed: LRMKWMMAMKYPITA
LRMKLMMLMVYPRTA

SEQ ID NO: 233833 - protein, 15 aa, Artificial Sequence
  Description of Artificial Sequence: Synthetic peptide
  Seed: LRMKWMMAMKYPITA
LRMKLMMLMVYPSTA

SEQ ID NO: 233834 - protein, 15 aa, Artificial Sequence
  Description of Artificial Sequence: Synthetic peptide
  Seed: LRMKWMMAMKYPITA
LRMKLMMLMVYPTTA

SEQ ID NO: 233835 - protein, 15 aa, Artificial Sequence
  Description of Artificial Sequence: Synthetic peptide
  Seed: LRMKWMMAMKYPITA
LRMKLMMLMVYPVTA

SEQ ID NO: 233836 - protein, 15 aa, Artificial Sequence
  Description of Artificial Sequence: Synthetic peptide
  Seed: LRMKWMMAMKYPITA
LRMKLMMLMVYPYTA

SEQ ID NO: 233837 - protein, 15 aa, Artificial Sequence
  Description of Artificial Sequence: Synthetic peptide
  Seed: LRMKWMMAMKYPITA
LRMKLMMMMAYPATA

SEQ ID NO: 233838 - protein, 15 aa, Artificial Sequence
  Description of Artificial Sequence: Synthetic peptide
  Seed: LRMKWMMAMKYPITA
LRMKLMMMMAYPCTA

SEQ ID NO: 233839 - protein, 15 aa, Artificial Sequence
  Description of Artificial Sequence: Synthetic peptide
  Seed: LRMKWMMAMKYPITA
LRMKLMMMMAYPDTA

SEQ ID NO: 233840 - protein, 15 aa, Artificial Sequence
  Description of Artificial Sequence: Synthetic peptide
  Seed: LRMKWMMAMKYPITA
LRMKLMMMMAYPETA

SEQ ID NO: 233841 - protein, 15 aa, Artificial Sequence
  Description of Artificial Sequence: Synthetic peptide
  Seed: LRMKWMMAMKYPITA
LRMKLMMMMAYPFTA

SEQ ID NO: 233842 - protein, 15 aa, Artificial Sequence
  Description of Artificial Sequence: Synthetic peptide
  Seed: LRMKWMMAMKYPITA
LRMKLMMMMAYPGTA

SEQ ID NO: 233843 - protein, 15 aa, Artificial Sequence
  Description of Artificial Sequence: Synthetic peptide
  Seed: LRMKWMMAMKYPITA
LRMKLMMMMAYPHTA

SEQ ID NO: 233844 - protein, 15 aa, Artificial Sequence
  Description of Artificial Sequence: Synthetic peptide
  Seed: LRMKWMMAMKYPITA
LRMKLMMMMAYPITA

SEQ ID NO: 233845 - protein, 15 aa, Artificial Sequence
  Description of Artificial Sequence: Synthetic peptide
  Seed: LRMKWMMAMKYPITA
LRMKLMMMMAYPKTA

SEQ ID NO: 233846 - protein, 15 aa, Artificial Sequence
  Description of Artificial Sequence: Synthetic peptide
  Seed: LRMKWMMAMKYPITA
LRMKLMMMMAYPLTA

SEQ ID NO: 233847 - protein, 15 aa, Artificial Sequence
  Description of Artificial Sequence: Synthetic peptide
  Seed: LRMKWMMAMKYPITA
LRMKLMMMMAYPMTA

SEQ ID NO: 233848 - protein, 15 aa, Artificial Sequence
  Description of Artificial Sequence: Synthetic peptide
  Seed: LRMKWMMAMKYPITA
LRMKLMMMMAYPNTA

SEQ ID NO: 233849 - protein, 15 aa, Artificial Sequence
  Description of Artificial Sequence: Synthetic peptide
  Seed: LRMKWMMAMKYPITA
LRMKLMMMMAYPPTA

SEQ ID NO: 233850 - protein, 15 aa, Artificial Sequence
  Description of Artificial Sequence: Synthetic peptide
  Seed: LRMKWMMAMKYPITA
LRMKLMMMMAYPQTA

SEQ ID NO: 233851 - protein, 15 aa, Artificial Sequence
  Description of Artificial Sequence: Synthetic peptide
  Seed: LRMKWMMAMKYPITA
LRMKLMMMMAYPRTA

SEQ ID NO: 233852 - protein, 15 aa, Artificial Sequence
  Description of Artificial Sequence: Synthetic peptide
  Seed: LRMKWMMAMKYPITA
LRMKLMMMMAYPSTA

SEQ ID NO: 233853 - protein, 15 aa, Artificial Sequence
  Description of Artificial Sequence: Synthetic peptide
  Seed: LRMKWMMAMKYPITA
LRMKLMMMMAYPTTA

SEQ ID NO: 233854 - protein, 15 aa, Artificial Sequence
  Description of Artificial Sequence: Synthetic peptide
  Seed: LRMKWMMAMKYPITA
LRMKLMMMMAYPVTA

SEQ ID NO: 233855 - protein, 15 aa, Artificial Sequence
  Description of Artificial Sequence: Synthetic peptide
  Seed: LRMKWMMAMKYPITA
LRMKLMMMMAYPWTA

SEQ ID NO: 233856 - protein, 15 aa, Artificial Sequence
  Description of Artificial Sequence: Synthetic peptide
  Seed: LRMKWMMAMKYPITA
LRMKLMMMMAYPYTA

SEQ ID NO: 233857 - protein, 15 aa, Artificial Sequence
  Description of Artificial Sequence: Synthetic peptide
  Seed: LRMKWMMAMKYPITA
LRMKLMMMMCYPATA

SEQ ID NO: 233858 - protein, 15 aa, Artificial Sequence
  Description of Artificial Sequence: Synthetic peptide
  Seed: LRMKWMMAMKYPITA
LRMKLMMMMCYPITA

SEQ ID NO: 233859 - protein, 15 aa, Artificial Sequence
  Description of Artificial Sequence: Synthetic peptide
  Seed: LRMKWMMAMKYPITA
LRMKLMMMMCYPLTA

SEQ ID NO: 233860 - protein, 15 aa, Artificial Sequence
  Description of Artificial Sequence: Synthetic peptide
  Seed: LRMKWMMAMKYPITA
LRMKLMMMMCYPMTA

SEQ ID NO: 233861 - protein, 15 aa, Artificial Sequence
  Description of Artificial Sequence: Synthetic peptide
  Seed: LRMKWMMAMKYPITA
LRMKLMMMMCYPNTA

SEQ ID NO: 233862 - protein, 15 aa, Artificial Sequence
  Description of Artificial Sequence: Synthetic peptide
  Seed: LRMKWMMAMKYPITA
LRMKLMMMMCYPSTA

SEQ ID NO: 233863 - protein, 15 aa, Artificial Sequence
  Description of Artificial Sequence: Synthetic peptide
  Seed: LRMKWMMAMKYPITA
LRMKLMMMMCYPTTA

SEQ ID NO: 233864 - protein, 15 aa, Artificial Sequence
  Description of Artificial Sequence: Synthetic peptide
  Seed: LRMKWMMAMKYPITA
LRMKLMMMMCYPVTA

SEQ ID NO: 233865 - protein, 15 aa, Artificial Sequence
  Description of Artificial Sequence: Synthetic peptide
  Seed: LRMKWMMAMKYPITA
LRMKLMMMMDYPATA

SEQ ID NO: 233866 - protein, 15 aa, Artificial Sequence
  Description of Artificial Sequence: Synthetic peptide
  Seed: LRMKWMMAMKYPITA
LRMKLMMMMDYPDTA

SEQ ID NO: 233867 - protein, 15 aa, Artificial Sequence
  Description of Artificial Sequence: Synthetic peptide
  Seed: LRMKWMMAMKYPITA
LRMKLMMMMDYPETA

SEQ ID NO: 233868 - protein, 15 aa, Artificial Sequence
  Description of Artificial Sequence: Synthetic peptide
  Seed: LRMKWMMAMKYPITA
LRMKLMMMMDYPHTA

SEQ ID NO: 233869 - protein, 15 aa, Artificial Sequence
  Description of Artificial Sequence: Synthetic peptide
  Seed: LRMKWMMAMKYPITA
LRMKLMMMMDYPITA

SEQ ID NO: 233870 - protein, 15 aa, Artificial Sequence
  Description of Artificial Sequence: Synthetic peptide
  Seed: LRMKWMMAMKYPITA
LRMKLMMMMDYPLTA

SEQ ID NO: 233871 - protein, 15 aa, Artificial Sequence
  Description of Artificial Sequence: Synthetic peptide
  Seed: LRMKWMMAMKYPITA
LRMKLMMMMDYPMTA

SEQ ID NO: 233872 - protein, 15 aa, Artificial Sequence
  Description of Artificial Sequence: Synthetic peptide
  Seed: LRMKWMMAMKYPITA
LRMKLMMMMDYPQTA

SEQ ID NO: 233873 - protein, 15 aa, Artificial Sequence
  Description of Artificial Sequence: Synthetic peptide
  Seed: LRMKWMMAMKYPITA
LRMKLMMMMDYPSTA

SEQ ID NO: 233874 - protein, 15 aa, Artificial Sequence
  Description of Artificial Sequence: Synthetic peptide
  Seed: LRMKWMMAMKYPITA
LRMKLMMMMDYPTTA

SEQ ID NO: 233875 - protein, 15 aa, Artificial Sequence
  Description of Artificial Sequence: Synthetic peptide
  Seed: LRMKWMMAMKYPITA
LRMKLMMMMDYPVTA

SEQ ID NO: 233876 - protein, 15 aa, Artificial Sequence
  Description of Artificial Sequence: Synthetic peptide
  Seed: LRMKWMMAMKYPITA
LRMKLMMMMEYPATA

SEQ ID NO: 233877 - protein, 15 aa, Artificial Sequence
  Description of Artificial Sequence: Synthetic peptide
  Seed: LRMKWMMAMKYPITA
LRMKLMMMMEYPITA

SEQ ID NO: 233878 - protein, 15 aa, Artificial Sequence
  Description of Artificial Sequence: Synthetic peptide
  Seed: LRMKWMMAMKYPITA
LRMKLMMMMEYPLTA

SEQ ID NO: 233879 - protein, 15 aa, Artificial Sequence
  Description of Artificial Sequence: Synthetic peptide
  Seed: LRMKWMMAMKYPITA
LRMKLMMMMEYPMTA

SEQ ID NO: 233880 - protein, 15 aa, Artificial Sequence
  Description of Artificial Sequence: Synthetic peptide
  Seed: LRMKWMMAMKYPITA
LRMKLMMMMEYPNTA

SEQ ID NO: 233881 - protein, 15 aa, Artificial Sequence
  Description of Artificial Sequence: Synthetic peptide
  Seed: LRMKWMMAMKYPITA
LRMKLMMMMEYPSTA

SEQ ID NO: 233882 - protein, 15 aa, Artificial Sequence
  Description of Artificial Sequence: Synthetic peptide
  Seed: LRMKWMMAMKYPITA
LRMKLMMMMEYPVTA

SEQ ID NO: 233883 - protein, 15 aa, Artificial Sequence
  Description of Artificial Sequence: Synthetic peptide
  Seed: LRMKWMMAMKYPITA
LRMKLMMMMGYPATA

SEQ ID NO: 233884 - protein, 15 aa, Artificial Sequence
  Description of Artificial Sequence: Synthetic peptide
  Seed: LRMKWMMAMKYPITA
LRMKLMMMMGYPCTA

SEQ ID NO: 233885 - protein, 15 aa, Artificial Sequence
  Description of Artificial Sequence: Synthetic peptide
  Seed: LRMKWMMAMKYPITA
LRMKLMMMMGYPDTA

SEQ ID NO: 233886 - protein, 15 aa, Artificial Sequence
  Description of Artificial Sequence: Synthetic peptide
  Seed: LRMKWMMAMKYPITA
LRMKLMMMMGYPETA

SEQ ID NO: 233887 - protein, 15 aa, Artificial Sequence
  Description of Artificial Sequence: Synthetic peptide
  Seed: LRMKWMMAMKYPITA
LRMKLMMMMGYPFTA

SEQ ID NO: 233888 - protein, 15 aa, Artificial Sequence
  Description of Artificial Sequence: Synthetic peptide
  Seed: LRMKWMMAMKYPITA
LRMKLMMMMGYPGTA

SEQ ID NO: 233889 - protein, 15 aa, Artificial Sequence
  Description of Artificial Sequence: Synthetic peptide
  Seed: LRMKWMMAMKYPITA
LRMKLMMMMGYPHTA

SEQ ID NO: 233890 - protein, 15 aa, Artificial Sequence
  Description of Artificial Sequence: Synthetic peptide
  Seed: LRMKWMMAMKYPITA
LRMKLMMMMGYPITA

SEQ ID NO: 233891 - protein, 15 aa, Artificial Sequence
  Description of Artificial Sequence: Synthetic peptide
  Seed: LRMKWMMAMKYPITA
LRMKLMMMMGYPKTA

SEQ ID NO: 233892 - protein, 15 aa, Artificial Sequence
  Description of Artificial Sequence: Synthetic peptide
  Seed: LRMKWMMAMKYPITA
LRMKLMMMMGYPLTA

SEQ ID NO: 233893 - protein, 15 aa, Artificial Sequence
  Description of Artificial Sequence: Synthetic peptide
  Seed: LRMKWMMAMKYPITA
LRMKLMMMMGYPMTA

SEQ ID NO: 233894 - protein, 15 aa, Artificial Sequence
  Description of Artificial Sequence: Synthetic peptide
  Seed: LRMKWMMAMKYPITA
LRMKLMMMMGYPNTA

SEQ ID NO: 233895 - protein, 15 aa, Artificial Sequence
  Description of Artificial Sequence: Synthetic peptide
  Seed: LRMKWMMAMKYPITA
LRMKLMMMMGYPPTA

SEQ ID NO: 233896 - protein, 15 aa, Artificial Sequence
  Description of Artificial Sequence: Synthetic peptide
  Seed: LRMKWMMAMKYPITA
LRMKLMMMMGYPQTA

SEQ ID NO: 233897 - protein, 15 aa, Artificial Sequence
  Description of Artificial Sequence: Synthetic peptide
  Seed: LRMKWMMAMKYPITA
LRMKLMMMMGYPRTA

SEQ ID NO: 233898 - protein, 15 aa, Artificial Sequence
  Description of Artificial Sequence: Synthetic peptide
  Seed: LRMKWMMAMKYPITA
LRMKLMMMMGYPSTA

SEQ ID NO: 233899 - protein, 15 aa, Artificial Sequence
  Description of Artificial Sequence: Synthetic peptide
  Seed: LRMKWMMAMKYPITA
LRMKLMMMMGYPTTA

SEQ ID NO: 233900 - protein, 15 aa, Artificial Sequence
  Description of Artificial Sequence: Synthetic peptide
  Seed: LRMKWMMAMKYPITA
LRMKLMMMMGYPVTA

SEQ ID NO: 233901 - protein, 15 aa, Artificial Sequence
  Description of Artificial Sequence: Synthetic peptide
  Seed: LRMKWMMAMKYPITA
LRMKLMMMMGYPWTA

SEQ ID NO: 233902 - protein, 15 aa, Artificial Sequence
  Description of Artificial Sequence: Synthetic peptide
  Seed: LRMKWMMAMKYPITA
LRMKLMMMMGYPYTA

SEQ ID NO: 233903 - protein, 15 aa, Artificial Sequence
  Description of Artificial Sequence: Synthetic peptide
  Seed: LRMKWMMAMKYPITA
LRMKLMMMMHYPATA

SEQ ID NO: 233904 - protein, 15 aa, Artificial Sequence
  Description of Artificial Sequence: Synthetic peptide
  Seed: LRMKWMMAMKYPITA
LRMKLMMMMHYPCTA

SEQ ID NO: 233905 - protein, 15 aa, Artificial Sequence
  Description of Artificial Sequence: Synthetic peptide
  Seed: LRMKWMMAMKYPITA
LRMKLMMMMHYPGTA

SEQ ID NO: 233906 - protein, 15 aa, Artificial Sequence
  Description of Artificial Sequence: Synthetic peptide
  Seed: LRMKWMMAMKYPITA
LRMKLMMMMHYPHTA

SEQ ID NO: 233907 - protein, 15 aa, Artificial Sequence
  Description of Artificial Sequence: Synthetic peptide
  Seed: LRMKWMMAMKYPITA
LRMKLMMMMHYPITA

SEQ ID NO: 233908 - protein, 15 aa, Artificial Sequence
  Description of Artificial Sequence: Synthetic peptide
  Seed: LRMKWMMAMKYPITA
LRMKLMMMMHYPKTA

SEQ ID NO: 233909 - protein, 15 aa, Artificial Sequence
  Description of Artificial Sequence: Synthetic peptide
  Seed: LRMKWMMAMKYPITA
LRMKLMMMMHYPLTA

SEQ ID NO: 233910 - protein, 15 aa, Artificial Sequence
  Description of Artificial Sequence: Synthetic peptide
  Seed: LRMKWMMAMKYPITA
LRMKLMMMMHYPMTA

SEQ ID NO: 233911 - protein, 15 aa, Artificial Sequence
  Description of Artificial Sequence: Synthetic peptide
  Seed: LRMKWMMAMKYPITA
LRMKLMMMMHYPNTA

SEQ ID NO: 233912 - protein, 15 aa, Artificial Sequence
  Description of Artificial Sequence: Synthetic peptide
  Seed: LRMKWMMAMKYPITA
LRMKLMMMMHYPQTA

SEQ ID NO: 233913 - protein, 15 aa, Artificial Sequence
  Description of Artificial Sequence: Synthetic peptide
  Seed: LRMKWMMAMKYPITA
LRMKLMMMMHYPRTA

SEQ ID NO: 233914 - protein, 15 aa, Artificial Sequence
  Description of Artificial Sequence: Synthetic peptide
  Seed: LRMKWMMAMKYPITA
LRMKLMMMMHYPSTA

SEQ ID NO: 233915 - protein, 15 aa, Artificial Sequence
  Description of Artificial Sequence: Synthetic peptide
  Seed: LRMKWMMAMKYPITA
LRMKLMMMMHYPTTA

SEQ ID NO: 233916 - protein, 15 aa, Artificial Sequence
  Description of Artificial Sequence: Synthetic peptide
  Seed: LRMKWMMAMKYPITA
LRMKLMMMMHYPVTA

SEQ ID NO: 233917 - protein, 15 aa, Artificial Sequence
  Description of Artificial Sequence: Synthetic peptide
  Seed: LRMKWMMAMKYPITA
LRMKLMMMMHYPYTA

SEQ ID NO: 233918 - protein, 15 aa, Artificial Sequence
  Description of Artificial Sequence: Synthetic peptide
  Seed: LRMKWMMAMKYPITA
LRMKLMMMMIYPATA

SEQ ID NO: 233919 - protein, 15 aa, Artificial Sequence
  Description of Artificial Sequence: Synthetic peptide
  Seed: LRMKWMMAMKYPITA
LRMKLMMMMIYPCTA

SEQ ID NO: 233920 - protein, 15 aa, Artificial Sequence
  Description of Artificial Sequence: Synthetic peptide
  Seed: LRMKWMMAMKYPITA
LRMKLMMMMIYPDTA

SEQ ID NO: 233921 - protein, 15 aa, Artificial Sequence
  Description of Artificial Sequence: Synthetic peptide
  Seed: LRMKWMMAMKYPITA
LRMKLMMMMIYPETA

SEQ ID NO: 233922 - protein, 15 aa, Artificial Sequence
  Description of Artificial Sequence: Synthetic peptide
  Seed: LRMKWMMAMKYPITA
LRMKLMMMMIYPGTA

SEQ ID NO: 233923 - protein, 15 aa, Artificial Sequence
  Description of Artificial Sequence: Synthetic peptide
  Seed: LRMKWMMAMKYPITA
LRMKLMMMMIYPHTA

SEQ ID NO: 233924 - protein, 15 aa, Artificial Sequence
  Description of Artificial Sequence: Synthetic peptide
  Seed: LRMKWMMAMKYPITA
LRMKLMMMMIYPITA

SEQ ID NO: 233925 - protein, 15 aa, Artificial Sequence
  Description of Artificial Sequence: Synthetic peptide
  Seed: LRMKWMMAMKYPITA
LRMKLMMMMIYPKTA

SEQ ID NO: 233926 - protein, 15 aa, Artificial Sequence
  Description of Artificial Sequence: Synthetic peptide
  Seed: LRMKWMMAMKYPITA
LRMKLMMMMIYPLTA

SEQ ID NO: 233927 - protein, 15 aa, Artificial Sequence
  Description of Artificial Sequence: Synthetic peptide
  Seed: LRMKWMMAMKYPITA
LRMKLMMMMIYPMTA

SEQ ID NO: 233928 - protein, 15 aa, Artificial Sequence
  Description of Artificial Sequence: Synthetic peptide
  Seed: LRMKWMMAMKYPITA
LRMKLMMMMIYPNTA

SEQ ID NO: 233929 - protein, 15 aa, Artificial Sequence
  Description of Artificial Sequence: Synthetic peptide
  Seed: LRMKWMMAMKYPITA
LRMKLMMMMIYPQTA

SEQ ID NO: 233930 - protein, 15 aa, Artificial Sequence
  Description of Artificial Sequence: Synthetic peptide
  Seed: LRMKWMMAMKYPITA
LRMKLMMMMIYPRTA

SEQ ID NO: 233931 - protein, 15 aa, Artificial Sequence
  Description of Artificial Sequence: Synthetic peptide
  Seed: LRMKWMMAMKYPITA
LRMKLMMMMIYPSTA

SEQ ID NO: 233932 - protein, 15 aa, Artificial Sequence
  Description of Artificial Sequence: Synthetic peptide
  Seed: LRMKWMMAMKYPITA
LRMKLMMMMIYPTTA

SEQ ID NO: 233933 - protein, 15 aa, Artificial Sequence
  Description of Artificial Sequence: Synthetic peptide
  Seed: LRMKWMMAMKYPITA
LRMKLMMMMIYPVTA

SEQ ID NO: 233934 - protein, 15 aa, Artificial Sequence
  Description of Artificial Sequence: Synthetic peptide
  Seed: LRMKWMMAMKYPITA
LRMKLMMMMKYPATA

SEQ ID NO: 233935 - protein, 15 aa, Artificial Sequence
  Description of Artificial Sequence: Synthetic peptide
  Seed: LRMKWMMAMKYPITA
LRMKLMMMMKYPCTA

SEQ ID NO: 233936 - protein, 15 aa, Artificial Sequence
  Description of Artificial Sequence: Synthetic peptide
  Seed: LRMKWMMAMKYPITA
LRMKLMMMMKYPDTA

SEQ ID NO: 233937 - protein, 15 aa, Artificial Sequence
  Description of Artificial Sequence: Synthetic peptide
  Seed: LRMKWMMAMKYPITA
LRMKLMMMMKYPETA

SEQ ID NO: 233938 - protein, 15 aa, Artificial Sequence
  Description of Artificial Sequence: Synthetic peptide
  Seed: LRMKWMMAMKYPITA
LRMKLMMMMKYPFTA

SEQ ID NO: 233939 - protein, 15 aa, Artificial Sequence
  Description of Artificial Sequence: Synthetic peptide
  Seed: LRMKWMMAMKYPITA
LRMKLMMMMKYPGTA

SEQ ID NO: 233940 - protein, 15 aa, Artificial Sequence
  Description of Artificial Sequence: Synthetic peptide
  Seed: LRMKWMMAMKYPITA
LRMKLMMMMKYPHTA

SEQ ID NO: 233941 - protein, 15 aa, Artificial Sequence
  Description of Artificial Sequence: Synthetic peptide
  Seed: LRMKWMMAMKYPITA
LRMKLMMMMKYPITA

SEQ ID NO: 233942 - protein, 15 aa, Artificial Sequence
  Description of Artificial Sequence: Synthetic peptide
  Seed: LRMKWMMAMKYPITA
LRMKLMMMMKYPKTA

SEQ ID NO: 233943 - protein, 15 aa, Artificial Sequence
  Description of Artificial Sequence: Synthetic peptide
  Seed: LRMKWMMAMKYPITA
LRMKLMMMMKYPLTA

SEQ ID NO: 233944 - protein, 15 aa, Artificial Sequence
  Description of Artificial Sequence: Synthetic peptide
  Seed: LRMKWMMAMKYPITA
LRMKLMMMMKYPMTA

SEQ ID NO: 233945 - protein, 15 aa, Artificial Sequence
  Description of Artificial Sequence: Synthetic peptide
  Seed: LRMKWMMAMKYPITA
LRMKLMMMMKYPNTA

SEQ ID NO: 233946 - protein, 15 aa, Artificial Sequence
  Description of Artificial Sequence: Synthetic peptide
  Seed: LRMKWMMAMKYPITA
LRMKLMMMMKYPPTA

SEQ ID NO: 233947 - protein, 15 aa, Artificial Sequence
  Description of Artificial Sequence: Synthetic peptide
  Seed: LRMKWMMAMKYPITA
LRMKLMMMMKYPQTA

SEQ ID NO: 233948 - protein, 15 aa, Artificial Sequence
  Description of Artificial Sequence: Synthetic peptide
  Seed: LRMKWMMAMKYPITA
LRMKLMMMMKYPRTA

SEQ ID NO: 233949 - protein, 15 aa, Artificial Sequence
  Description of Artificial Sequence: Synthetic peptide
  Seed: LRMKWMMAMKYPITA
LRMKLMMMMKYPSTA

SEQ ID NO: 233950 - protein, 15 aa, Artificial Sequence
  Description of Artificial Sequence: Synthetic peptide
  Seed: LRMKWMMAMKYPITA
LRMKLMMMMKYPTTA

SEQ ID NO: 233951 - protein, 15 aa, Artificial Sequence
  Description of Artificial Sequence: Synthetic peptide
  Seed: LRMKWMMAMKYPITA
LRMKLMMMMKYPVTA

SEQ ID NO: 233952 - protein, 15 aa, Artificial Sequence
  Description of Artificial Sequence: Synthetic peptide
  Seed: LRMKWMMAMKYPITA
LRMKLMMMMKYPWTA

SEQ ID NO: 233953 - protein, 15 aa, Artificial Sequence
  Description of Artificial Sequence: Synthetic peptide
  Seed: LRMKWMMAMKYPITA
LRMKLMMMMKYPYTA

SEQ ID NO: 233954 - protein, 15 aa, Artificial Sequence
  Description of Artificial Sequence: Synthetic peptide
  Seed: LRMKWMMAMKYPITA
LRMKLMMMMLYPATA

SEQ ID NO: 233955 - protein, 15 aa, Artificial Sequence
  Description of Artificial Sequence: Synthetic peptide
  Seed: LRMKWMMAMKYPITA
LRMKLMMMMLYPDTA

SEQ ID NO: 233956 - protein, 15 aa, Artificial Sequence
  Description of Artificial Sequence: Synthetic peptide
  Seed: LRMKWMMAMKYPITA
LRMKLMMMMLYPGTA

SEQ ID NO: 233957 - protein, 15 aa, Artificial Sequence
  Description of Artificial Sequence: Synthetic peptide
  Seed: LRMKWMMAMKYPITA
LRMKLMMMMLYPKTA

SEQ ID NO: 233958 - protein, 15 aa, Artificial Sequence
  Description of Artificial Sequence: Synthetic peptide
  Seed: LRMKWMMAMKYPITA
LRMKLMMMMLYPMTA

SEQ ID NO: 233959 - protein, 15 aa, Artificial Sequence
  Description of Artificial Sequence: Synthetic peptide
  Seed: LRMKWMMAMKYPITA
LRMKLMMMMLYPRTA

SEQ ID NO: 233960 - protein, 15 aa, Artificial Sequence
  Description of Artificial Sequence: Synthetic peptide
  Seed: LRMKWMMAMKYPITA
LRMKLMMMMLYPSTA

SEQ ID NO: 233961 - protein, 15 aa, Artificial Sequence
  Description of Artificial Sequence: Synthetic peptide
  Seed: LRMKWMMAMKYPITA
LRMKLMMMMLYPVTA

SEQ ID NO: 233962 - protein, 15 aa, Artificial Sequence
  Description of Artificial Sequence: Synthetic peptide
  Seed: LRMKWMMAMKYPITA
LRMKLMMMMMYPATA

SEQ ID NO: 233963 - protein, 15 aa, Artificial Sequence
  Description of Artificial Sequence: Synthetic peptide
  Seed: LRMKWMMAMKYPITA
LRMKLMMMMMYPCTA

SEQ ID NO: 233964 - protein, 15 aa, Artificial Sequence
  Description of Artificial Sequence: Synthetic peptide
  Seed: LRMKWMMAMKYPITA
LRMKLMMMMMYPDTA

SEQ ID NO: 233965 - protein, 15 aa, Artificial Sequence
  Description of Artificial Sequence: Synthetic peptide
  Seed: LRMKWMMAMKYPITA
LRMKLMMMMMYPGTA

SEQ ID NO: 233966 - protein, 15 aa, Artificial Sequence
  Description of Artificial Sequence: Synthetic peptide
  Seed: LRMKWMMAMKYPITA
LRMKLMMMMMYPITA

SEQ ID NO: 233967 - protein, 15 aa, Artificial Sequence
  Description of Artificial Sequence: Synthetic peptide
  Seed: LRMKWMMAMKYPITA
LRMKLMMMMMYPKTA

SEQ ID NO: 233968 - protein, 15 aa, Artificial Sequence
  Description of Artificial Sequence: Synthetic peptide
  Seed: LRMKWMMAMKYPITA
LRMKLMMMMMYPLTA

SEQ ID NO: 233969 - protein, 15 aa, Artificial Sequence
  Description of Artificial Sequence: Synthetic peptide
  Seed: LRMKWMMAMKYPITA
LRMKLMMMMMYPMTA

SEQ ID NO: 233970 - protein, 15 aa, Artificial Sequence
  Description of Artificial Sequence: Synthetic peptide
  Seed: LRMKWMMAMKYPITA
LRMKLMMMMMYPRTA

SEQ ID NO: 233971 - protein, 15 aa, Artificial Sequence
  Description of Artificial Sequence: Synthetic peptide
  Seed: LRMKWMMAMKYPITA
LRMKLMMMMMYPSTA

SEQ ID NO: 233972 - protein, 15 aa, Artificial Sequence
  Description of Artificial Sequence: Synthetic peptide
  Seed: LRMKWMMAMKYPITA
LRMKLMMMMMYPTTA

SEQ ID NO: 233973 - protein, 15 aa, Artificial Sequence
  Description of Artificial Sequence: Synthetic peptide
  Seed: LRMKWMMAMKYPITA
LRMKLMMMMMYPVTA

SEQ ID NO: 233974 - protein, 15 aa, Artificial Sequence
  Description of Artificial Sequence: Synthetic peptide
  Seed: LRMKWMMAMKYPITA
LRMKLMMMMNYPATA

SEQ ID NO: 233975 - protein, 15 aa, Artificial Sequence
  Description of Artificial Sequence: Synthetic peptide
  Seed: LRMKWMMAMKYPITA
LRMKLMMMMNYPCTA

SEQ ID NO: 233976 - protein, 15 aa, Artificial Sequence
  Description of Artificial Sequence: Synthetic peptide
  Seed: LRMKWMMAMKYPITA
LRMKLMMMMNYPDTA

SEQ ID NO: 233977 - protein, 15 aa, Artificial Sequence
  Description of Artificial Sequence: Synthetic peptide
  Seed: LRMKWMMAMKYPITA
LRMKLMMMMNYPETA

SEQ ID NO: 233978 - protein, 15 aa, Artificial Sequence
  Description of Artificial Sequence: Synthetic peptide
  Seed: LRMKWMMAMKYPITA
LRMKLMMMMNYPFTA

SEQ ID NO: 233979 - protein, 15 aa, Artificial Sequence
  Description of Artificial Sequence: Synthetic peptide
  Seed: LRMKWMMAMKYPITA
LRMKLMMMMNYPGTA

SEQ ID NO: 233980 - protein, 15 aa, Artificial Sequence
  Description of Artificial Sequence: Synthetic peptide
  Seed: LRMKWMMAMKYPITA
LRMKLMMMMNYPHTA

SEQ ID NO: 233981 - protein, 15 aa, Artificial Sequence
  Description of Artificial Sequence: Synthetic peptide
  Seed: LRMKWMMAMKYPITA
LRMKLMMMMNYPITA

SEQ ID NO: 233982 - protein, 15 aa, Artificial Sequence
  Description of Artificial Sequence: Synthetic peptide
  Seed: LRMKWMMAMKYPITA
LRMKLMMMMNYPKTA

SEQ ID NO: 233983 - protein, 15 aa, Artificial Sequence
  Description of Artificial Sequence: Synthetic peptide
  Seed: LRMKWMMAMKYPITA
LRMKLMMMMNYPLTA

SEQ ID NO: 233984 - protein, 15 aa, Artificial Sequence
  Description of Artificial Sequence: Synthetic peptide
  Seed: LRMKWMMAMKYPITA
LRMKLMMMMNYPMTA

SEQ ID NO: 233985 - protein, 15 aa, Artificial Sequence
  Description of Artificial Sequence: Synthetic peptide
  Seed: LRMKWMMAMKYPITA
LRMKLMMMMNYPNTA

SEQ ID NO: 233986 - protein, 15 aa, Artificial Sequence
  Description of Artificial Sequence: Synthetic peptide
  Seed: LRMKWMMAMKYPITA
LRMKLMMMMNYPPTA

SEQ ID NO: 233987 - protein, 15 aa, Artificial Sequence
  Description of Artificial Sequence: Synthetic peptide
  Seed: LRMKWMMAMKYPITA
LRMKLMMMMNYPQTA

SEQ ID NO: 233988 - protein, 15 aa, Artificial Sequence
  Description of Artificial Sequence: Synthetic peptide
  Seed: LRMKWMMAMKYPITA
LRMKLMMMMNYPRTA

SEQ ID NO: 233989 - protein, 15 aa, Artificial Sequence
  Description of Artificial Sequence: Synthetic peptide
  Seed: LRMKWMMAMKYPITA
LRMKLMMMMNYPSTA

SEQ ID NO: 233990 - protein, 15 aa, Artificial Sequence
  Description of Artificial Sequence: Synthetic peptide
  Seed: LRMKWMMAMKYPITA
LRMKLMMMMNYPTTA

SEQ ID NO: 233991 - protein, 15 aa, Artificial Sequence
  Description of Artificial Sequence: Synthetic peptide
  Seed: LRMKWMMAMKYPITA
LRMKLMMMMNYPVTA

SEQ ID NO: 233992 - protein, 15 aa, Artificial Sequence
  Description of Artificial Sequence: Synthetic peptide
  Seed: LRMKWMMAMKYPITA
LRMKLMMMMNYPYTA

SEQ ID NO: 233993 - protein, 15 aa, Artificial Sequence
  Description of Artificial Sequence: Synthetic peptide
  Seed: LRMKWMMAMKYPITA
LRMKLMMMMPYPATA

SEQ ID NO: 233994 - protein, 15 aa, Artificial Sequence
  Description of Artificial Sequence: Synthetic peptide
  Seed: LRMKWMMAMKYPITA
LRMKLMMMMPYPCTA

SEQ ID NO: 233995 - protein, 15 aa, Artificial Sequence
  Description of Artificial Sequence: Synthetic peptide
  Seed: LRMKWMMAMKYPITA
LRMKLMMMMPYPDTA

SEQ ID NO: 233996 - protein, 15 aa, Artificial Sequence
  Description of Artificial Sequence: Synthetic peptide
  Seed: LRMKWMMAMKYPITA
LRMKLMMMMPYPETA

SEQ ID NO: 233997 - protein, 15 aa, Artificial Sequence
  Description of Artificial Sequence: Synthetic peptide
  Seed: LRMKWMMAMKYPITA
LRMKLMMMMPYPFTA

SEQ ID NO: 233998 - protein, 15 aa, Artificial Sequence
  Description of Artificial Sequence: Synthetic peptide
  Seed: LRMKWMMAMKYPITA
LRMKLMMMMPYPGTA

SEQ ID NO: 233999 - protein, 15 aa, Artificial Sequence
  Description of Artificial Sequence: Synthetic peptide
  Seed: LRMKWMMAMKYPITA
LRMKLMMMMPYPHTA

SEQ ID NO: 234000 - protein, 15 aa, Artificial Sequence
  Description of Artificial Sequence: Synthetic peptide
  Seed: LRMKWMMAMKYPITA
LRMKLMMMMPYPITA

SEQ ID NO: 234001 - protein, 15 aa, Artificial Sequence
  Description of Artificial Sequence: Synthetic peptide
  Seed: LRMKWMMAMKYPITA
LRMKLMMMMPYPKTA

SEQ ID NO: 234002 - protein, 15 aa, Artificial Sequence
  Description of Artificial Sequence: Synthetic peptide
  Seed: LRMKWMMAMKYPITA
LRMKLMMMMPYPLTA

SEQ ID NO: 234003 - protein, 15 aa, Artificial Sequence
  Description of Artificial Sequence: Synthetic peptide
  Seed: LRMKWMMAMKYPITA
LRMKLMMMMPYPMTA

SEQ ID NO: 234004 - protein, 15 aa, Artificial Sequence
  Description of Artificial Sequence: Synthetic peptide
  Seed: LRMKWMMAMKYPITA
LRMKLMMMMPYPNTA

SEQ ID NO: 234005 - protein, 15 aa, Artificial Sequence
  Description of Artificial Sequence: Synthetic peptide
  Seed: LRMKWMMAMKYPITA
LRMKLMMMMPYPPTA

SEQ ID NO: 234006 - protein, 15 aa, Artificial Sequence
  Description of Artificial Sequence: Synthetic peptide
  Seed: LRMKWMMAMKYPITA
LRMKLMMMMPYPQTA

SEQ ID NO: 234007 - protein, 15 aa, Artificial Sequence
  Description of Artificial Sequence: Synthetic peptide
  Seed: LRMKWMMAMKYPITA
LRMKLMMMMPYPRTA

SEQ ID NO: 234008 - protein, 15 aa, Artificial Sequence
  Description of Artificial Sequence: Synthetic peptide
  Seed: LRMKWMMAMKYPITA
LRMKLMMMMPYPSTA

SEQ ID NO: 234009 - protein, 15 aa, Artificial Sequence
  Description of Artificial Sequence: Synthetic peptide
  Seed: LRMKWMMAMKYPITA
LRMKLMMMMPYPTTA

SEQ ID NO: 234010 - protein, 15 aa, Artificial Sequence
  Description of Artificial Sequence: Synthetic peptide
  Seed: LRMKWMMAMKYPITA
LRMKLMMMMPYPVTA

SEQ ID NO: 234011 - protein, 15 aa, Artificial Sequence
  Description of Artificial Sequence: Synthetic peptide
  Seed: LRMKWMMAMKYPITA
LRMKLMMMMPYPWTA

SEQ ID NO: 234012 - protein, 15 aa, Artificial Sequence
  Description of Artificial Sequence: Synthetic peptide
  Seed: LRMKWMMAMKYPITA
LRMKLMMMMPYPYTA

SEQ ID NO: 234013 - protein, 15 aa, Artificial Sequence
  Description of Artificial Sequence: Synthetic peptide
  Seed: LRMKWMMAMKYPITA
LRMKLMMMMQYPATA

SEQ ID NO: 234014 - protein, 15 aa, Artificial Sequence
  Description of Artificial Sequence: Synthetic peptide
  Seed: LRMKWMMAMKYPITA
LRMKLMMMMQYPITA

SEQ ID NO: 234015 - protein, 15 aa, Artificial Sequence
  Description of Artificial Sequence: Synthetic peptide
  Seed: LRMKWMMAMKYPITA
LRMKLMMMMQYPKTA

SEQ ID NO: 234016 - protein, 15 aa, Artificial Sequence
  Description of Artificial Sequence: Synthetic peptide
  Seed: LRMKWMMAMKYPITA
LRMKLMMMMQYPLTA

SEQ ID NO: 234017 - protein, 15 aa, Artificial Sequence
  Description of Artificial Sequence: Synthetic peptide
  Seed: LRMKWMMAMKYPITA
LRMKLMMMMQYPMTA

SEQ ID NO: 234018 - protein, 15 aa, Artificial Sequence
  Description of Artificial Sequence: Synthetic peptide
  Seed: LRMKWMMAMKYPITA
LRMKLMMMMQYPNTA

SEQ ID NO: 234019 - protein, 15 aa, Artificial Sequence
  Description of Artificial Sequence: Synthetic peptide
  Seed: LRMKWMMAMKYPITA
LRMKLMMMMQYPRTA

SEQ ID NO: 234020 - protein, 15 aa, Artificial Sequence
  Description of Artificial Sequence: Synthetic peptide
  Seed: LRMKWMMAMKYPITA
LRMKLMMMMQYPSTA

SEQ ID NO: 234021 - protein, 15 aa, Artificial Sequence
  Description of Artificial Sequence: Synthetic peptide
  Seed: LRMKWMMAMKYPITA
LRMKLMMMMQYPTTA

SEQ ID NO: 234022 - protein, 15 aa, Artificial Sequence
  Description of Artificial Sequence: Synthetic peptide
  Seed: LRMKWMMAMKYPITA
LRMKLMMMMQYPVTA

SEQ ID NO: 234023 - protein, 15 aa, Artificial Sequence
  Description of Artificial Sequence: Synthetic peptide
  Seed: LRMKWMMAMKYPITA
LRMKLMMMMRYPATA

SEQ ID NO: 234024 - protein, 15 aa, Artificial Sequence
  Description of Artificial Sequence: Synthetic peptide
  Seed: LRMKWMMAMKYPITA
LRMKLMMMMRYPCTA

SEQ ID NO: 234025 - protein, 15 aa, Artificial Sequence
  Description of Artificial Sequence: Synthetic peptide
  Seed: LRMKWMMAMKYPITA
LRMKLMMMMRYPDTA

SEQ ID NO: 234026 - protein, 15 aa, Artificial Sequence
  Description of Artificial Sequence: Synthetic peptide
  Seed: LRMKWMMAMKYPITA
LRMKLMMMMRYPETA

SEQ ID NO: 234027 - protein, 15 aa, Artificial Sequence
  Description of Artificial Sequence: Synthetic peptide
  Seed: LRMKWMMAMKYPITA
LRMKLMMMMRYPFTA

SEQ ID NO: 234028 - protein, 15 aa, Artificial Sequence
  Description of Artificial Sequence: Synthetic peptide
  Seed: LRMKWMMAMKYPITA
LRMKLMMMMRYPGTA

SEQ ID NO: 234029 - protein, 15 aa, Artificial Sequence
  Description of Artificial Sequence: Synthetic peptide
  Seed: LRMKWMMAMKYPITA
LRMKLMMMMRYPHTA

SEQ ID NO: 234030 - protein, 15 aa, Artificial Sequence
  Description of Artificial Sequence: Synthetic peptide
  Seed: LRMKWMMAMKYPITA
LRMKLMMMMRYPITA

SEQ ID NO: 234031 - protein, 15 aa, Artificial Sequence
  Description of Artificial Sequence: Synthetic peptide
  Seed: LRMKWMMAMKYPITA
LRMKLMMMMRYPKTA

SEQ ID NO: 234032 - protein, 15 aa, Artificial Sequence
  Description of Artificial Sequence: Synthetic peptide
  Seed: LRMKWMMAMKYPITA
LRMKLMMMMRYPLTA

SEQ ID NO: 234033 - protein, 15 aa, Artificial Sequence
  Description of Artificial Sequence: Synthetic peptide
  Seed: LRMKWMMAMKYPITA
LRMKLMMMMRYPMTA

SEQ ID NO: 234034 - protein, 15 aa, Artificial Sequence
  Description of Artificial Sequence: Synthetic peptide
  Seed: LRMKWMMAMKYPITA
LRMKLMMMMRYPNTA

SEQ ID NO: 234035 - protein, 15 aa, Artificial Sequence
  Description of Artificial Sequence: Synthetic peptide
  Seed: LRMKWMMAMKYPITA
LRMKLMMMMRYPPTA

SEQ ID NO: 234036 - protein, 15 aa, Artificial Sequence
  Description of Artificial Sequence: Synthetic peptide
  Seed: LRMKWMMAMKYPITA
LRMKLMMMMRYPQTA

SEQ ID NO: 234037 - protein, 15 aa, Artificial Sequence
  Description of Artificial Sequence: Synthetic peptide
  Seed: LRMKWMMAMKYPITA
LRMKLMMMMRYPRTA

SEQ ID NO: 234038 - protein, 15 aa, Artificial Sequence
  Description of Artificial Sequence: Synthetic peptide
  Seed: LRMKWMMAMKYPITA
LRMKLMMMMRYPSTA

SEQ ID NO: 234039 - protein, 15 aa, Artificial Sequence
  Description of Artificial Sequence: Synthetic peptide
  Seed: LRMKWMMAMKYPITA
LRMKLMMMMRYPTTA

SEQ ID NO: 234040 - protein, 15 aa, Artificial Sequence
  Description of Artificial Sequence: Synthetic peptide
  Seed: LRMKWMMAMKYPITA
LRMKLMMMMRYPVTA

SEQ ID NO: 234041 - protein, 15 aa, Artificial Sequence
  Description of Artificial Sequence: Synthetic peptide
  Seed: LRMKWMMAMKYPITA
LRMKLMMMMRYPWTA

SEQ ID NO: 234042 - protein, 15 aa, Artificial Sequence
  Description of Artificial Sequence: Synthetic peptide
  Seed: LRMKWMMAMKYPITA
LRMKLMMMMRYPYTA

SEQ ID NO: 234043 - protein, 15 aa, Artificial Sequence
  Description of Artificial Sequence: Synthetic peptide
  Seed: LRMKWMMAMKYPITA
LRMKLMMMMSYPATA

SEQ ID NO: 234044 - protein, 15 aa, Artificial Sequence
  Description of Artificial Sequence: Synthetic peptide
  Seed: LRMKWMMAMKYPITA
LRMKLMMMMSYPCTA

SEQ ID NO: 234045 - protein, 15 aa, Artificial Sequence
  Description of Artificial Sequence: Synthetic peptide
  Seed: LRMKWMMAMKYPITA
LRMKLMMMMSYPDTA

SEQ ID NO: 234046 - protein, 15 aa, Artificial Sequence
  Description of Artificial Sequence: Synthetic peptide
  Seed: LRMKWMMAMKYPITA
LRMKLMMMMSYPETA

SEQ ID NO: 234047 - protein, 15 aa, Artificial Sequence
  Description of Artificial Sequence: Synthetic peptide
  Seed: LRMKWMMAMKYPITA
LRMKLMMMMSYPFTA

SEQ ID NO: 234048 - protein, 15 aa, Artificial Sequence
  Description of Artificial Sequence: Synthetic peptide
  Seed: LRMKWMMAMKYPITA
LRMKLMMMMSYPGTA

SEQ ID NO: 234049 - protein, 15 aa, Artificial Sequence
  Description of Artificial Sequence: Synthetic peptide
  Seed: LRMKWMMAMKYPITA
LRMKLMMMMSYPHTA

SEQ ID NO: 234050 - protein, 15 aa, Artificial Sequence
  Description of Artificial Sequence: Synthetic peptide
  Seed: LRMKWMMAMKYPITA
LRMKLMMMMSYPITA

SEQ ID NO: 234051 - protein, 15 aa, Artificial Sequence
  Description of Artificial Sequence: Synthetic peptide
  Seed: LRMKWMMAMKYPITA
LRMKLMMMMSYPKTA

SEQ ID NO: 234052 - protein, 15 aa, Artificial Sequence
  Description of Artificial Sequence: Synthetic peptide
  Seed: LRMKWMMAMKYPITA
LRMKLMMMMSYPLTA

SEQ ID NO: 234053 - protein, 15 aa, Artificial Sequence
  Description of Artificial Sequence: Synthetic peptide
  Seed: LRMKWMMAMKYPITA
LRMKLMMMMSYPMTA

SEQ ID NO: 234054 - protein, 15 aa, Artificial Sequence
  Description of Artificial Sequence: Synthetic peptide
  Seed: LRMKWMMAMKYPITA
LRMKLMMMMSYPNTA

SEQ ID NO: 234055 - protein, 15 aa, Artificial Sequence
  Description of Artificial Sequence: Synthetic peptide
  Seed: LRMKWMMAMKYPITA
LRMKLMMMMSYPPTA

SEQ ID NO: 234056 - protein, 15 aa, Artificial Sequence
  Description of Artificial Sequence: Synthetic peptide
  Seed: LRMKWMMAMKYPITA
LRMKLMMMMSYPQTA

SEQ ID NO: 234057 - protein, 15 aa, Artificial Sequence
  Description of Artificial Sequence: Synthetic peptide
  Seed: LRMKWMMAMKYPITA
LRMKLMMMMSYPRTA

SEQ ID NO: 234058 - protein, 15 aa, Artificial Sequence
  Description of Artificial Sequence: Synthetic peptide
  Seed: LRMKWMMAMKYPITA
LRMKLMMMMSYPSTA

SEQ ID NO: 234059 - protein, 15 aa, Artificial Sequence
  Description of Artificial Sequence: Synthetic peptide
  Seed: LRMKWMMAMKYPITA
LRMKLMMMMSYPTTA

SEQ ID NO: 234060 - protein, 15 aa, Artificial Sequence
  Description of Artificial Sequence: Synthetic peptide
  Seed: LRMKWMMAMKYPITA
LRMKLMMMMSYPVTA

SEQ ID NO: 234061 - protein, 15 aa, Artificial Sequence
  Description of Artificial Sequence: Synthetic peptide
  Seed: LRMKWMMAMKYPITA
LRMKLMMMMSYPYTA

SEQ ID NO: 234062 - protein, 15 aa, Artificial Sequence
  Description of Artificial Sequence: Synthetic peptide
  Seed: LRMKWMMAMKYPITA
LRMKLMMMMTYPATA

SEQ ID NO: 234063 - protein, 15 aa, Artificial Sequence
  Description of Artificial Sequence: Synthetic peptide
  Seed: LRMKWMMAMKYPITA
LRMKLMMMMTYPCTA

SEQ ID NO: 234064 - protein, 15 aa, Artificial Sequence
  Description of Artificial Sequence: Synthetic peptide
  Seed: LRMKWMMAMKYPITA
LRMKLMMMMTYPDTA

SEQ ID NO: 234065 - protein, 15 aa, Artificial Sequence
  Description of Artificial Sequence: Synthetic peptide
  Seed: LRMKWMMAMKYPITA
LRMKLMMMMTYPETA

SEQ ID NO: 234066 - protein, 15 aa, Artificial Sequence
  Description of Artificial Sequence: Synthetic peptide
  Seed: LRMKWMMAMKYPITA
LRMKLMMMMTYPFTA

SEQ ID NO: 234067 - protein, 15 aa, Artificial Sequence
  Description of Artificial Sequence: Synthetic peptide
  Seed: LRMKWMMAMKYPITA
LRMKLMMMMTYPGTA

SEQ ID NO: 234068 - protein, 15 aa, Artificial Sequence
  Description of Artificial Sequence: Synthetic peptide
  Seed: LRMKWMMAMKYPITA
LRMKLMMMMTYPHTA

SEQ ID NO: 234069 - protein, 15 aa, Artificial Sequence
  Description of Artificial Sequence: Synthetic peptide
  Seed: LRMKWMMAMKYPITA
LRMKLMMMMTYPITA

SEQ ID NO: 234070 - protein, 15 aa, Artificial Sequence
  Description of Artificial Sequence: Synthetic peptide
  Seed: LRMKWMMAMKYPITA
LRMKLMMMMTYPKTA

SEQ ID NO: 234071 - protein, 15 aa, Artificial Sequence
  Description of Artificial Sequence: Synthetic peptide
  Seed: LRMKWMMAMKYPITA
LRMKLMMMMTYPLTA

SEQ ID NO: 234072 - protein, 15 aa, Artificial Sequence
  Description of Artificial Sequence: Synthetic peptide
  Seed: LRMKWMMAMKYPITA
LRMKLMMMMTYPMTA

SEQ ID NO: 234073 - protein, 15 aa, Artificial Sequence
  Description of Artificial Sequence: Synthetic peptide
  Seed: LRMKWMMAMKYPITA
LRMKLMMMMTYPNTA

SEQ ID NO: 234074 - protein, 15 aa, Artificial Sequence
  Description of Artificial Sequence: Synthetic peptide
  Seed: LRMKWMMAMKYPITA
LRMKLMMMMTYPPTA

SEQ ID NO: 234075 - protein, 15 aa, Artificial Sequence
  Description of Artificial Sequence: Synthetic peptide
  Seed: LRMKWMMAMKYPITA
LRMKLMMMMTYPQTA

SEQ ID NO: 234076 - protein, 15 aa, Artificial Sequence
  Description of Artificial Sequence: Synthetic peptide
  Seed: LRMKWMMAMKYPITA
LRMKLMMMMTYPRTA

SEQ ID NO: 234077 - protein, 15 aa, Artificial Sequence
  Description of Artificial Sequence: Synthetic peptide
  Seed: LRMKWMMAMKYPITA
LRMKLMMMMTYPSTA

SEQ ID NO: 234078 - protein, 15 aa, Artificial Sequence
  Description of Artificial Sequence: Synthetic peptide
  Seed: LRMKWMMAMKYPITA
LRMKLMMMMTYPTTA

SEQ ID NO: 234079 - protein, 15 aa, Artificial Sequence
  Description of Artificial Sequence: Synthetic peptide
  Seed: LRMKWMMAMKYPITA
LRMKLMMMMTYPVTA

SEQ ID NO: 234080 - protein, 15 aa, Artificial Sequence
  Description of Artificial Sequence: Synthetic peptide
  Seed: LRMKWMMAMKYPITA
LRMKLMMMMTYPYTA

SEQ ID NO: 234081 - protein, 15 aa, Artificial Sequence
  Description of Artificial Sequence: Synthetic peptide
  Seed: LRMKWMMAMKYPITA
LRMKLMMMMVYPATA

SEQ ID NO: 234082 - protein, 15 aa, Artificial Sequence
  Description of Artificial Sequence: Synthetic peptide
  Seed: LRMKWMMAMKYPITA
LRMKLMMMMVYPCTA

SEQ ID NO: 234083 - protein, 15 aa, Artificial Sequence
  Description of Artificial Sequence: Synthetic peptide
  Seed: LRMKWMMAMKYPITA
LRMKLMMMMVYPDTA

SEQ ID NO: 234084 - protein, 15 aa, Artificial Sequence
  Description of Artificial Sequence: Synthetic peptide
  Seed: LRMKWMMAMKYPITA
LRMKLMMMMVYPETA

SEQ ID NO: 234085 - protein, 15 aa, Artificial Sequence
  Description of Artificial Sequence: Synthetic peptide
  Seed: LRMKWMMAMKYPITA
LRMKLMMMMVYPFTA

SEQ ID NO: 234086 - protein, 15 aa, Artificial Sequence
  Description of Artificial Sequence: Synthetic peptide
  Seed: LRMKWMMAMKYPITA
LRMKLMMMMVYPGTA

SEQ ID NO: 234087 - protein, 15 aa, Artificial Sequence
  Description of Artificial Sequence: Synthetic peptide
  Seed: LRMKWMMAMKYPITA
LRMKLMMMMVYPHTA

SEQ ID NO: 234088 - protein, 15 aa, Artificial Sequence
  Description of Artificial Sequence: Synthetic peptide
  Seed: LRMKWMMAMKYPITA
LRMKLMMMMVYPITA

SEQ ID NO: 234089 - protein, 15 aa, Artificial Sequence
  Description of Artificial Sequence: Synthetic peptide
  Seed: LRMKWMMAMKYPITA
LRMKLMMMMVYPKTA

SEQ ID NO: 234090 - protein, 15 aa, Artificial Sequence
  Description of Artificial Sequence: Synthetic peptide
  Seed: LRMKWMMAMKYPITA
LRMKLMMMMVYPLTA

SEQ ID NO: 234091 - protein, 15 aa, Artificial Sequence
  Description of Artificial Sequence: Synthetic peptide
  Seed: LRMKWMMAMKYPITA
LRMKLMMMMVYPMTA

SEQ ID NO: 234092 - protein, 15 aa, Artificial Sequence
  Description of Artificial Sequence: Synthetic peptide
  Seed: LRMKWMMAMKYPITA
LRMKLMMMMVYPNTA

SEQ ID NO: 234093 - protein, 15 aa, Artificial Sequence
  Description of Artificial Sequence: Synthetic peptide
  Seed: LRMKWMMAMKYPITA
LRMKLMMMMVYPPTA

SEQ ID NO: 234094 - protein, 15 aa, Artificial Sequence
  Description of Artificial Sequence: Synthetic peptide
  Seed: LRMKWMMAMKYPITA
LRMKLMMMMVYPQTA

SEQ ID NO: 234095 - protein, 15 aa, Artificial Sequence
  Description of Artificial Sequence: Synthetic peptide
  Seed: LRMKWMMAMKYPITA
LRMKLMMMMVYPRTA

SEQ ID NO: 234096 - protein, 15 aa, Artificial Sequence
  Description of Artificial Sequence: Synthetic peptide
  Seed: LRMKWMMAMKYPITA
LRMKLMMMMVYPSTA

SEQ ID NO: 234097 - protein, 15 aa, Artificial Sequence
  Description of Artificial Sequence: Synthetic peptide
  Seed: LRMKWMMAMKYPITA
LRMKLMMMMVYPTTA

SEQ ID NO: 234098 - protein, 15 aa, Artificial Sequence
  Description of Artificial Sequence: Synthetic peptide
  Seed: LRMKWMMAMKYPITA
LRMKLMMMMVYPVTA

SEQ ID NO: 234099 - protein, 15 aa, Artificial Sequence
  Description of Artificial Sequence: Synthetic peptide
  Seed: LRMKWMMAMKYPITA
LRMKLMMMMVYPYTA

SEQ ID NO: 234100 - protein, 15 aa, Artificial Sequence
  Description of Artificial Sequence: Synthetic peptide
  Seed: LRMKWMMAMKYPITA
LRMKLMMMMYYPATA

SEQ ID NO: 234101 - protein, 15 aa, Artificial Sequence
  Description of Artificial Sequence: Synthetic peptide
  Seed: LRMKWMMAMKYPITA
LRMKLMMMMYYPVTA

SEQ ID NO: 234102 - protein, 15 aa, Artificial Sequence
  Description of Artificial Sequence: Synthetic peptide
  Seed: LRMKWMMAMKYPITA
LRMKLMMNMAYPATA

SEQ ID NO: 234103 - protein, 15 aa, Artificial Sequence
  Description of Artificial Sequence: Synthetic peptide
  Seed: LRMKWMMAMKYPITA
LRMKLMMNMAYPCTA

SEQ ID NO: 234104 - protein, 15 aa, Artificial Sequence
  Description of Artificial Sequence: Synthetic peptide
  Seed: LRMKWMMAMKYPITA
LRMKLMMNMAYPDTA

SEQ ID NO: 234105 - protein, 15 aa, Artificial Sequence
  Description of Artificial Sequence: Synthetic peptide
  Seed: LRMKWMMAMKYPITA
LRMKLMMNMAYPETA

SEQ ID NO: 234106 - protein, 15 aa, Artificial Sequence
  Description of Artificial Sequence: Synthetic peptide
  Seed: LRMKWMMAMKYPITA
LRMKLMMNMAYPFTA

SEQ ID NO: 234107 - protein, 15 aa, Artificial Sequence
  Description of Artificial Sequence: Synthetic peptide
  Seed: LRMKWMMAMKYPITA
LRMKLMMNMAYPGTA

SEQ ID NO: 234108 - protein, 15 aa, Artificial Sequence
  Description of Artificial Sequence: Synthetic peptide
  Seed: LRMKWMMAMKYPITA
LRMKLMMNMAYPHTA

SEQ ID NO: 234109 - protein, 15 aa, Artificial Sequence
  Description of Artificial Sequence: Synthetic peptide
  Seed: LRMKWMMAMKYPITA
LRMKLMMNMAYPITA

SEQ ID NO: 234110 - protein, 15 aa, Artificial Sequence
  Description of Artificial Sequence: Synthetic peptide
  Seed: LRMKWMMAMKYPITA
LRMKLMMNMAYPKTA

SEQ ID NO: 234111 - protein, 15 aa, Artificial Sequence
  Description of Artificial Sequence: Synthetic peptide
  Seed: LRMKWMMAMKYPITA
LRMKLMMNMAYPLTA

SEQ ID NO: 234112 - protein, 15 aa, Artificial Sequence
  Description of Artificial Sequence: Synthetic peptide
  Seed: LRMKWMMAMKYPITA
LRMKLMMNMAYPMTA

SEQ ID NO: 234113 - protein, 15 aa, Artificial Sequence
  Description of Artificial Sequence: Synthetic peptide
  Seed: LRMKWMMAMKYPITA
LRMKLMMNMAYPNTA

SEQ ID NO: 234114 - protein, 15 aa, Artificial Sequence
  Description of Artificial Sequence: Synthetic peptide
  Seed: LRMKWMMAMKYPITA
LRMKLMMNMAYPPTA

SEQ ID NO: 234115 - protein, 15 aa, Artificial Sequence
  Description of Artificial Sequence: Synthetic peptide
  Seed: LRMKWMMAMKYPITA
LRMKLMMNMAYPQTA

SEQ ID NO: 234116 - protein, 15 aa, Artificial Sequence
  Description of Artificial Sequence: Synthetic peptide
  Seed: LRMKWMMAMKYPITA
LRMKLMMNMAYPRTA

SEQ ID NO: 234117 - protein, 15 aa, Artificial Sequence
  Description of Artificial Sequence: Synthetic peptide
  Seed: LRMKWMMAMKYPITA
LRMKLMMNMAYPSTA

SEQ ID NO: 234118 - protein, 15 aa, Artificial Sequence
  Description of Artificial Sequence: Synthetic peptide
  Seed: LRMKWMMAMKYPITA
LRMKLMMNMAYPTTA

SEQ ID NO: 234119 - protein, 15 aa, Artificial Sequence
  Description of Artificial Sequence: Synthetic peptide
  Seed: LRMKWMMAMKYPITA
LRMKLMMNMAYPVTA

SEQ ID NO: 234120 - protein, 15 aa, Artificial Sequence
  Description of Artificial Sequence: Synthetic peptide
  Seed: LRMKWMMAMKYPITA
LRMKLMMNMAYPWTA

SEQ ID NO: 234121 - protein, 15 aa, Artificial Sequence
  Description of Artificial Sequence: Synthetic peptide
  Seed: LRMKWMMAMKYPITA
LRMKLMMNMAYPYTA

SEQ ID NO: 234122 - protein, 15 aa, Artificial Sequence
  Description of Artificial Sequence: Synthetic peptide
  Seed: LRMKWMMAMKYPITA
LRMKLMMNMCYPATA

SEQ ID NO: 234123 - protein, 15 aa, Artificial Sequence
  Description of Artificial Sequence: Synthetic peptide
  Seed: LRMKWMMAMKYPITA
LRMKLMMNMCYPFTA

SEQ ID NO: 234124 - protein, 15 aa, Artificial Sequence
  Description of Artificial Sequence: Synthetic peptide
  Seed: LRMKWMMAMKYPITA
LRMKLMMNMCYPITA

SEQ ID NO: 234125 - protein, 15 aa, Artificial Sequence
  Description of Artificial Sequence: Synthetic peptide
  Seed: LRMKWMMAMKYPITA
LRMKLMMNMCYPLTA

SEQ ID NO: 234126 - protein, 15 aa, Artificial Sequence
  Description of Artificial Sequence: Synthetic peptide
  Seed: LRMKWMMAMKYPITA
LRMKLMMNMCYPMTA

SEQ ID NO: 234127 - protein, 15 aa, Artificial Sequence
  Description of Artificial Sequence: Synthetic peptide
  Seed: LRMKWMMAMKYPITA
LRMKLMMNMCYPVTA

SEQ ID NO: 234128 - protein, 15 aa, Artificial Sequence
  Description of Artificial Sequence: Synthetic peptide
  Seed: LRMKWMMAMKYPITA
LRMKLMMNMCYPYTA

SEQ ID NO: 234129 - protein, 15 aa, Artificial Sequence
  Description of Artificial Sequence: Synthetic peptide
  Seed: LRMKWMMAMKYPITA
LRMKLMMNMDYPATA

SEQ ID NO: 234130 - protein, 15 aa, Artificial Sequence
  Description of Artificial Sequence: Synthetic peptide
  Seed: LRMKWMMAMKYPITA
LRMKLMMNMDYPFTA

SEQ ID NO: 234131 - protein, 15 aa, Artificial Sequence
  Description of Artificial Sequence: Synthetic peptide
  Seed: LRMKWMMAMKYPITA
LRMKLMMNMDYPITA

SEQ ID NO: 234132 - protein, 15 aa, Artificial Sequence
  Description of Artificial Sequence: Synthetic peptide
  Seed: LRMKWMMAMKYPITA
LRMKLMMNMDYPLTA

SEQ ID NO: 234133 - protein, 15 aa, Artificial Sequence
  Description of Artificial Sequence: Synthetic peptide
  Seed: LRMKWMMAMKYPITA
LRMKLMMNMDYPMTA

SEQ ID NO: 234134 - protein, 15 aa, Artificial Sequence
  Description of Artificial Sequence: Synthetic peptide
  Seed: LRMKWMMAMKYPITA
LRMKLMMNMDYPVTA

SEQ ID NO: 234135 - protein, 15 aa, Artificial Sequence
  Description of Artificial Sequence: Synthetic peptide
  Seed: LRMKWMMAMKYPITA
LRMKLMMNMDYPYTA

SEQ ID NO: 234136 - protein, 15 aa, Artificial Sequence
  Description of Artificial Sequence: Synthetic peptide
  Seed: LRMKWMMAMKYPITA
LRMKLMMNMEYPFTA

SEQ ID NO: 234137 - protein, 15 aa, Artificial Sequence
  Description of Artificial Sequence: Synthetic peptide
  Seed: LRMKWMMAMKYPITA
LRMKLMMNMEYPITA

SEQ ID NO: 234138 - protein, 15 aa, Artificial Sequence
  Description of Artificial Sequence: Synthetic peptide
  Seed: LRMKWMMAMKYPITA
LRMKLMMNMEYPLTA

SEQ ID NO: 234139 - protein, 15 aa, Artificial Sequence
  Description of Artificial Sequence: Synthetic peptide
  Seed: LRMKWMMAMKYPITA
LRMKLMMNMEYPMTA

SEQ ID NO: 234140 - protein, 15 aa, Artificial Sequence
  Description of Artificial Sequence: Synthetic peptide
  Seed: LRMKWMMAMKYPITA
LRMKLMMNMEYPVTA

SEQ ID NO: 234141 - protein, 15 aa, Artificial Sequence
  Description of Artificial Sequence: Synthetic peptide
  Seed: LRMKWMMAMKYPITA
LRMKLMMNMEYPYTA

SEQ ID NO: 234142 - protein, 15 aa, Artificial Sequence
  Description of Artificial Sequence: Synthetic peptide
  Seed: LRMKWMMAMKYPITA
LRMKLMMNMFYPATA

SEQ ID NO: 234143 - protein, 15 aa, Artificial Sequence
  Description of Artificial Sequence: Synthetic peptide
  Seed: LRMKWMMAMKYPITA
LRMKLMMNMFYPFTA

SEQ ID NO: 234144 - protein, 15 aa, Artificial Sequence
  Description of Artificial Sequence: Synthetic peptide
  Seed: LRMKWMMAMKYPITA
LRMKLMMNMFYPITA

SEQ ID NO: 234145 - protein, 15 aa, Artificial Sequence
  Description of Artificial Sequence: Synthetic peptide
  Seed: LRMKWMMAMKYPITA
LRMKLMMNMFYPLTA

SEQ ID NO: 234146 - protein, 15 aa, Artificial Sequence
  Description of Artificial Sequence: Synthetic peptide
  Seed: LRMKWMMAMKYPITA
LRMKLMMNMFYPMTA

SEQ ID NO: 234147 - protein, 15 aa, Artificial Sequence
  Description of Artificial Sequence: Synthetic peptide
  Seed: LRMKWMMAMKYPITA
LRMKLMMNMFYPVTA

SEQ ID NO: 234148 - protein, 15 aa, Artificial Sequence
  Description of Artificial Sequence: Synthetic peptide
  Seed: LRMKWMMAMKYPITA
LRMKLMMNMFYPYTA

SEQ ID NO: 234149 - protein, 15 aa, Artificial Sequence
  Description of Artificial Sequence: Synthetic peptide
  Seed: LRMKWMMAMKYPITA
LRMKLMMNMGYPATA

SEQ ID NO: 234150 - protein, 15 aa, Artificial Sequence
  Description of Artificial Sequence: Synthetic peptide
  Seed: LRMKWMMAMKYPITA
LRMKLMMNMGYPCTA

SEQ ID NO: 234151 - protein, 15 aa, Artificial Sequence
  Description of Artificial Sequence: Synthetic peptide
  Seed: LRMKWMMAMKYPITA
LRMKLMMNMGYPDTA

SEQ ID NO: 234152 - protein, 15 aa, Artificial Sequence
  Description of Artificial Sequence: Synthetic peptide
  Seed: LRMKWMMAMKYPITA
LRMKLMMNMGYPETA

SEQ ID NO: 234153 - protein, 15 aa, Artificial Sequence
  Description of Artificial Sequence: Synthetic peptide
  Seed: LRMKWMMAMKYPITA
LRMKLMMNMGYPFTA

SEQ ID NO: 234154 - protein, 15 aa, Artificial Sequence
  Description of Artificial Sequence: Synthetic peptide
  Seed: LRMKWMMAMKYPITA
LRMKLMMNMGYPGTA

SEQ ID NO: 234155 - protein, 15 aa, Artificial Sequence
  Description of Artificial Sequence: Synthetic peptide
  Seed: LRMKWMMAMKYPITA
LRMKLMMNMGYPHTA

SEQ ID NO: 234156 - protein, 15 aa, Artificial Sequence
  Description of Artificial Sequence: Synthetic peptide
  Seed: LRMKWMMAMKYPITA
LRMKLMMNMGYPITA

SEQ ID NO: 234157 - protein, 15 aa, Artificial Sequence
  Description of Artificial Sequence: Synthetic peptide
  Seed: LRMKWMMAMKYPITA
LRMKLMMNMGYPKTA

SEQ ID NO: 234158 - protein, 15 aa, Artificial Sequence
  Description of Artificial Sequence: Synthetic peptide
  Seed: LRMKWMMAMKYPITA
LRMKLMMNMGYPLTA

SEQ ID NO: 234159 - protein, 15 aa, Artificial Sequence
  Description of Artificial Sequence: Synthetic peptide
  Seed: LRMKWMMAMKYPITA
LRMKLMMNMGYPMTA

SEQ ID NO: 234160 - protein, 15 aa, Artificial Sequence
  Description of Artificial Sequence: Synthetic peptide
  Seed: LRMKWMMAMKYPITA
LRMKLMMNMGYPNTA

SEQ ID NO: 234161 - protein, 15 aa, Artificial Sequence
  Description of Artificial Sequence: Synthetic peptide
  Seed: LRMKWMMAMKYPITA
LRMKLMMNMGYPPTA

SEQ ID NO: 234162 - protein, 15 aa, Artificial Sequence
  Description of Artificial Sequence: Synthetic peptide
  Seed: LRMKWMMAMKYPITA
LRMKLMMNMGYPQTA

SEQ ID NO: 234163 - protein, 15 aa, Artificial Sequence
  Description of Artificial Sequence: Synthetic peptide
  Seed: LRMKWMMAMKYPITA
LRMKLMMNMGYPRTA

SEQ ID NO: 234164 - protein, 15 aa, Artificial Sequence
  Description of Artificial Sequence: Synthetic peptide
  Seed: LRMKWMMAMKYPITA
LRMKLMMNMGYPSTA

SEQ ID NO: 234165 - protein, 15 aa, Artificial Sequence
  Description of Artificial Sequence: Synthetic peptide
  Seed: LRMKWMMAMKYPITA
LRMKLMMNMGYPTTA

SEQ ID NO: 234166 - protein, 15 aa, Artificial Sequence
  Description of Artificial Sequence: Synthetic peptide
  Seed: LRMKWMMAMKYPITA
LRMKLMMNMGYPVTA

SEQ ID NO: 234167 - protein, 15 aa, Artificial Sequence
  Description of Artificial Sequence: Synthetic peptide
  Seed: LRMKWMMAMKYPITA
LRMKLMMNMGYPWTA

SEQ ID NO: 234168 - protein, 15 aa, Artificial Sequence
  Description of Artificial Sequence: Synthetic peptide
  Seed: LRMKWMMAMKYPITA
LRMKLMMNMGYPYTA

SEQ ID NO: 234169 - protein, 15 aa, Artificial Sequence
  Description of Artificial Sequence: Synthetic peptide
  Seed: LRMKWMMAMKYPITA
LRMKLMMNMHYPATA

SEQ ID NO: 234170 - protein, 15 aa, Artificial Sequence
  Description of Artificial Sequence: Synthetic peptide
  Seed: LRMKWMMAMKYPITA
LRMKLMMNMHYPFTA

SEQ ID NO: 234171 - protein, 15 aa, Artificial Sequence
  Description of Artificial Sequence: Synthetic peptide
  Seed: LRMKWMMAMKYPITA
LRMKLMMNMHYPGTA

SEQ ID NO: 234172 - protein, 15 aa, Artificial Sequence
  Description of Artificial Sequence: Synthetic peptide
  Seed: LRMKWMMAMKYPITA
LRMKLMMNMHYPHTA

SEQ ID NO: 234173 - protein, 15 aa, Artificial Sequence
  Description of Artificial Sequence: Synthetic peptide
  Seed: LRMKWMMAMKYPITA
LRMKLMMNMHYPITA

SEQ ID NO: 234174 - protein, 15 aa, Artificial Sequence
  Description of Artificial Sequence: Synthetic peptide
  Seed: LRMKWMMAMKYPITA
LRMKLMMNMHYPKTA

SEQ ID NO: 234175 - protein, 15 aa, Artificial Sequence
  Description of Artificial Sequence: Synthetic peptide
  Seed: LRMKWMMAMKYPITA
LRMKLMMNMHYPLTA

SEQ ID NO: 234176 - protein, 15 aa, Artificial Sequence
  Description of Artificial Sequence: Synthetic peptide
  Seed: LRMKWMMAMKYPITA
LRMKLMMNMHYPMTA

SEQ ID NO: 234177 - protein, 15 aa, Artificial Sequence
  Description of Artificial Sequence: Synthetic peptide
  Seed: LRMKWMMAMKYPITA
LRMKLMMNMHYPNTA

SEQ ID NO: 234178 - protein, 15 aa, Artificial Sequence
  Description of Artificial Sequence: Synthetic peptide
  Seed: LRMKWMMAMKYPITA
LRMKLMMNMHYPQTA

SEQ ID NO: 234179 - protein, 15 aa, Artificial Sequence
  Description of Artificial Sequence: Synthetic peptide
  Seed: LRMKWMMAMKYPITA
LRMKLMMNMHYPRTA

SEQ ID NO: 234180 - protein, 15 aa, Artificial Sequence
  Description of Artificial Sequence: Synthetic peptide
  Seed: LRMKWMMAMKYPITA
LRMKLMMNMHYPSTA

SEQ ID NO: 234181 - protein, 15 aa, Artificial Sequence
  Description of Artificial Sequence: Synthetic peptide
  Seed: LRMKWMMAMKYPITA
LRMKLMMNMHYPTTA

SEQ ID NO: 234182 - protein, 15 aa, Artificial Sequence
  Description of Artificial Sequence: Synthetic peptide
  Seed: LRMKWMMAMKYPITA
LRMKLMMNMHYPVTA

SEQ ID NO: 234183 - protein, 15 aa, Artificial Sequence
  Description of Artificial Sequence: Synthetic peptide
  Seed: LRMKWMMAMKYPITA
LRMKLMMNMHYPWTA

SEQ ID NO: 234184 - protein, 15 aa, Artificial Sequence
  Description of Artificial Sequence: Synthetic peptide
  Seed: LRMKWMMAMKYPITA
LRMKLMMNMHYPYTA

SEQ ID NO: 234185 - protein, 15 aa, Artificial Sequence
  Description of Artificial Sequence: Synthetic peptide
  Seed: LRMKWMMAMKYPITA
LRMKLMMNMIYPATA

SEQ ID NO: 234186 - protein, 15 aa, Artificial Sequence
  Description of Artificial Sequence: Synthetic peptide
  Seed: LRMKWMMAMKYPITA
LRMKLMMNMIYPCTA

SEQ ID NO: 234187 - protein, 15 aa, Artificial Sequence
  Description of Artificial Sequence: Synthetic peptide
  Seed: LRMKWMMAMKYPITA
LRMKLMMNMIYPDTA

SEQ ID NO: 234188 - protein, 15 aa, Artificial Sequence
  Description of Artificial Sequence: Synthetic peptide
  Seed: LRMKWMMAMKYPITA
LRMKLMMNMIYPETA

SEQ ID NO: 234189 - protein, 15 aa, Artificial Sequence
  Description of Artificial Sequence: Synthetic peptide
  Seed: LRMKWMMAMKYPITA
LRMKLMMNMIYPFTA

SEQ ID NO: 234190 - protein, 15 aa, Artificial Sequence
  Description of Artificial Sequence: Synthetic peptide
  Seed: LRMKWMMAMKYPITA
LRMKLMMNMIYPGTA

SEQ ID NO: 234191 - protein, 15 aa, Artificial Sequence
  Description of Artificial Sequence: Synthetic peptide
  Seed: LRMKWMMAMKYPITA
LRMKLMMNMIYPHTA

SEQ ID NO: 234192 - protein, 15 aa, Artificial Sequence
  Description of Artificial Sequence: Synthetic peptide
  Seed: LRMKWMMAMKYPITA
LRMKLMMNMIYPITA

SEQ ID NO: 234193 - protein, 15 aa, Artificial Sequence
  Description of Artificial Sequence: Synthetic peptide
  Seed: LRMKWMMAMKYPITA
LRMKLMMNMIYPKTA

SEQ ID NO: 234194 - protein, 15 aa, Artificial Sequence
  Description of Artificial Sequence: Synthetic peptide
  Seed: LRMKWMMAMKYPITA
LRMKLMMNMIYPLTA

SEQ ID NO: 234195 - protein, 15 aa, Artificial Sequence
  Description of Artificial Sequence: Synthetic peptide
  Seed: LRMKWMMAMKYPITA
LRMKLMMNMIYPMTA

SEQ ID NO: 234196 - protein, 15 aa, Artificial Sequence
  Description of Artificial Sequence: Synthetic peptide
  Seed: LRMKWMMAMKYPITA
LRMKLMMNMIYPNTA

SEQ ID NO: 234197 - protein, 15 aa, Artificial Sequence
  Description of Artificial Sequence: Synthetic peptide
  Seed: LRMKWMMAMKYPITA
LRMKLMMNMIYPPTA

SEQ ID NO: 234198 - protein, 15 aa, Artificial Sequence
  Description of Artificial Sequence: Synthetic peptide
  Seed: LRMKWMMAMKYPITA
LRMKLMMNMIYPQTA

SEQ ID NO: 234199 - protein, 15 aa, Artificial Sequence
  Description of Artificial Sequence: Synthetic peptide
  Seed: LRMKWMMAMKYPITA
LRMKLMMNMIYPRTA

SEQ ID NO: 234200 - protein, 15 aa, Artificial Sequence
  Description of Artificial Sequence: Synthetic peptide
  Seed: LRMKWMMAMKYPITA
LRMKLMMNMIYPSTA

SEQ ID NO: 234201 - protein, 15 aa, Artificial Sequence
  Description of Artificial Sequence: Synthetic peptide
  Seed: LRMKWMMAMKYPITA
LRMKLMMNMIYPTTA

SEQ ID NO: 234202 - protein, 15 aa, Artificial Sequence
  Description of Artificial Sequence: Synthetic peptide
  Seed: LRMKWMMAMKYPITA
LRMKLMMNMIYPVTA

SEQ ID NO: 234203 - protein, 15 aa, Artificial Sequence
  Description of Artificial Sequence: Synthetic peptide
  Seed: LRMKWMMAMKYPITA
LRMKLMMNMIYPWTA

SEQ ID NO: 234204 - protein, 15 aa, Artificial Sequence
  Description of Artificial Sequence: Synthetic peptide
  Seed: LRMKWMMAMKYPITA
LRMKLMMNMIYPYTA

SEQ ID NO: 234205 - protein, 15 aa, Artificial Sequence
  Description of Artificial Sequence: Synthetic peptide
  Seed: LRMKWMMAMKYPITA
LRMKLMMNMKYPATA

SEQ ID NO: 234206 - protein, 15 aa, Artificial Sequence
  Description of Artificial Sequence: Synthetic peptide
  Seed: LRMKWMMAMKYPITA
LRMKLMMNMKYPCTA

SEQ ID NO: 234207 - protein, 15 aa, Artificial Sequence
  Description of Artificial Sequence: Synthetic peptide
  Seed: LRMKWMMAMKYPITA
LRMKLMMNMKYPDTA

SEQ ID NO: 234208 - protein, 15 aa, Artificial Sequence
  Description of Artificial Sequence: Synthetic peptide
  Seed: LRMKWMMAMKYPITA
LRMKLMMNMKYPETA

SEQ ID NO: 234209 - protein, 15 aa, Artificial Sequence
  Description of Artificial Sequence: Synthetic peptide
  Seed: LRMKWMMAMKYPITA
LRMKLMMNMKYPFTA

SEQ ID NO: 234210 - protein, 15 aa, Artificial Sequence
  Description of Artificial Sequence: Synthetic peptide
  Seed: LRMKWMMAMKYPITA
LRMKLMMNMKYPGTA

SEQ ID NO: 234211 - protein, 15 aa, Artificial Sequence
  Description of Artificial Sequence: Synthetic peptide
  Seed: LRMKWMMAMKYPITA
LRMKLMMNMKYPHTA

SEQ ID NO: 234212 - protein, 15 aa, Artificial Sequence
  Description of Artificial Sequence: Synthetic peptide
  Seed: LRMKWMMAMKYPITA
LRMKLMMNMKYPITA

SEQ ID NO: 234213 - protein, 15 aa, Artificial Sequence
  Description of Artificial Sequence: Synthetic peptide
  Seed: LRMKWMMAMKYPITA
LRMKLMMNMKYPKTA

SEQ ID NO: 234214 - protein, 15 aa, Artificial Sequence
  Description of Artificial Sequence: Synthetic peptide
  Seed: LRMKWMMAMKYPITA
LRMKLMMNMKYPLTA

SEQ ID NO: 234215 - protein, 15 aa, Artificial Sequence
  Description of Artificial Sequence: Synthetic peptide
  Seed: LRMKWMMAMKYPITA
LRMKLMMNMKYPMTA

SEQ ID NO: 234216 - protein, 15 aa, Artificial Sequence
  Description of Artificial Sequence: Synthetic peptide
  Seed: LRMKWMMAMKYPITA
LRMKLMMNMKYPNTA

SEQ ID NO: 234217 - protein, 15 aa, Artificial Sequence
  Description of Artificial Sequence: Synthetic peptide
  Seed: LRMKWMMAMKYPITA
LRMKLMMNMKYPPTA

SEQ ID NO: 234218 - protein, 15 aa, Artificial Sequence
  Description of Artificial Sequence: Synthetic peptide
  Seed: LRMKWMMAMKYPITA
LRMKLMMNMKYPQTA

SEQ ID NO: 234219 - protein, 15 aa, Artificial Sequence
  Description of Artificial Sequence: Synthetic peptide
  Seed: LRMKWMMAMKYPITA
LRMKLMMNMKYPRTA

SEQ ID NO: 234220 - protein, 15 aa, Artificial Sequence
  Description of Artificial Sequence: Synthetic peptide
  Seed: LRMKWMMAMKYPITA
LRMKLMMNMKYPSTA

SEQ ID NO: 234221 - protein, 15 aa, Artificial Sequence
  Description of Artificial Sequence: Synthetic peptide
  Seed: LRMKWMMAMKYPITA
LRMKLMMNMKYPTTA

SEQ ID NO: 234222 - protein, 15 aa, Artificial Sequence
  Description of Artificial Sequence: Synthetic peptide
  Seed: LRMKWMMAMKYPITA
LRMKLMMNMKYPVTA

SEQ ID NO: 234223 - protein, 15 aa, Artificial Sequence
  Description of Artificial Sequence: Synthetic peptide
  Seed: LRMKWMMAMKYPITA
LRMKLMMNMKYPWTA

SEQ ID NO: 234224 - protein, 15 aa, Artificial Sequence
  Description of Artificial Sequence: Synthetic peptide
  Seed: LRMKWMMAMKYPITA
LRMKLMMNMKYPYTA

SEQ ID NO: 234225 - protein, 15 aa, Artificial Sequence
  Description of Artificial Sequence: Synthetic peptide
  Seed: LRMKWMMAMKYPITA
LRMKLMMNMLYPATA

SEQ ID NO: 234226 - protein, 15 aa, Artificial Sequence
  Description of Artificial Sequence: Synthetic peptide
  Seed: LRMKWMMAMKYPITA
LRMKLMMNMLYPFTA

SEQ ID NO: 234227 - protein, 15 aa, Artificial Sequence
  Description of Artificial Sequence: Synthetic peptide
  Seed: LRMKWMMAMKYPITA
LRMKLMMNMLYPITA

SEQ ID NO: 234228 - protein, 15 aa, Artificial Sequence
  Description of Artificial Sequence: Synthetic peptide
  Seed: LRMKWMMAMKYPITA
LRMKLMMNMLYPKTA

SEQ ID NO: 234229 - protein, 15 aa, Artificial Sequence
  Description of Artificial Sequence: Synthetic peptide
  Seed: LRMKWMMAMKYPITA
LRMKLMMNMLYPLTA

SEQ ID NO: 234230 - protein, 15 aa, Artificial Sequence
  Description of Artificial Sequence: Synthetic peptide
  Seed: LRMKWMMAMKYPITA
LRMKLMMNMLYPMTA

SEQ ID NO: 234231 - protein, 15 aa, Artificial Sequence
  Description of Artificial Sequence: Synthetic peptide
  Seed: LRMKWMMAMKYPITA
LRMKLMMNMLYPNTA

SEQ ID NO: 234232 - protein, 15 aa, Artificial Sequence
  Description of Artificial Sequence: Synthetic peptide
  Seed: LRMKWMMAMKYPITA
LRMKLMMNMLYPRTA

SEQ ID NO: 234233 - protein, 15 aa, Artificial Sequence
  Description of Artificial Sequence: Synthetic peptide
  Seed: LRMKWMMAMKYPITA
LRMKLMMNMLYPSTA

SEQ ID NO: 234234 - protein, 15 aa, Artificial Sequence
  Description of Artificial Sequence: Synthetic peptide
  Seed: LRMKWMMAMKYPITA
LRMKLMMNMLYPTTA

SEQ ID NO: 234235 - protein, 15 aa, Artificial Sequence
  Description of Artificial Sequence: Synthetic peptide
  Seed: LRMKWMMAMKYPITA
LRMKLMMNMLYPVTA

SEQ ID NO: 234236 - protein, 15 aa, Artificial Sequence
  Description of Artificial Sequence: Synthetic peptide
  Seed: LRMKWMMAMKYPITA
LRMKLMMNMLYPYTA

SEQ ID NO: 234237 - protein, 15 aa, Artificial Sequence
  Description of Artificial Sequence: Synthetic peptide
  Seed: LRMKWMMAMKYPITA
LRMKLMMNMMYPATA

SEQ ID NO: 234238 - protein, 15 aa, Artificial Sequence
  Description of Artificial Sequence: Synthetic peptide
  Seed: LRMKWMMAMKYPITA
LRMKLMMNMMYPFTA

SEQ ID NO: 234239 - protein, 15 aa, Artificial Sequence
  Description of Artificial Sequence: Synthetic peptide
  Seed: LRMKWMMAMKYPITA
LRMKLMMNMMYPGTA

SEQ ID NO: 234240 - protein, 15 aa, Artificial Sequence
  Description of Artificial Sequence: Synthetic peptide
  Seed: LRMKWMMAMKYPITA
LRMKLMMNMMYPHTA

SEQ ID NO: 234241 - protein, 15 aa, Artificial Sequence
  Description of Artificial Sequence: Synthetic peptide
  Seed: LRMKWMMAMKYPITA
LRMKLMMNMMYPITA

SEQ ID NO: 234242 - protein, 15 aa, Artificial Sequence
  Description of Artificial Sequence: Synthetic peptide
  Seed: LRMKWMMAMKYPITA
LRMKLMMNMMYPLTA

SEQ ID NO: 234243 - protein, 15 aa, Artificial Sequence
  Description of Artificial Sequence: Synthetic peptide
  Seed: LRMKWMMAMKYPITA
LRMKLMMNMMYPMTA

SEQ ID NO: 234244 - protein, 15 aa, Artificial Sequence
  Description of Artificial Sequence: Synthetic peptide
  Seed: LRMKWMMAMKYPITA
LRMKLMMNMMYPNTA

SEQ ID NO: 234245 - protein, 15 aa, Artificial Sequence
  Description of Artificial Sequence: Synthetic peptide
  Seed: LRMKWMMAMKYPITA
LRMKLMMNMMYPQTA

SEQ ID NO: 234246 - protein, 15 aa, Artificial Sequence
  Description of Artificial Sequence: Synthetic peptide
  Seed: LRMKWMMAMKYPITA
LRMKLMMNMMYPRTA

SEQ ID NO: 234247 - protein, 15 aa, Artificial Sequence
  Description of Artificial Sequence: Synthetic peptide
  Seed: LRMKWMMAMKYPITA
LRMKLMMNMMYPSTA

SEQ ID NO: 234248 - protein, 15 aa, Artificial Sequence
  Description of Artificial Sequence: Synthetic peptide
  Seed: LRMKWMMAMKYPITA
LRMKLMMNMMYPTTA

SEQ ID NO: 234249 - protein, 15 aa, Artificial Sequence
  Description of Artificial Sequence: Synthetic peptide
  Seed: LRMKWMMAMKYPITA
LRMKLMMNMMYPVTA

SEQ ID NO: 234250 - protein, 15 aa, Artificial Sequence
  Description of Artificial Sequence: Synthetic peptide
  Seed: LRMKWMMAMKYPITA
LRMKLMMNMMYPWTA

SEQ ID NO: 234251 - protein, 15 aa, Artificial Sequence
  Description of Artificial Sequence: Synthetic peptide
  Seed: LRMKWMMAMKYPITA
LRMKLMMNMMYPYTA

SEQ ID NO: 234252 - protein, 15 aa, Artificial Sequence
  Description of Artificial Sequence: Synthetic peptide
  Seed: LRMKWMMAMKYPITA
LRMKLMMNMNYPATA

SEQ ID NO: 234253 - protein, 15 aa, Artificial Sequence
  Description of Artificial Sequence: Synthetic peptide
  Seed: LRMKWMMAMKYPITA
LRMKLMMNMNYPCTA

SEQ ID NO: 234254 - protein, 15 aa, Artificial Sequence
  Description of Artificial Sequence: Synthetic peptide
  Seed: LRMKWMMAMKYPITA
LRMKLMMNMNYPDTA

SEQ ID NO: 234255 - protein, 15 aa, Artificial Sequence
  Description of Artificial Sequence: Synthetic peptide
  Seed: LRMKWMMAMKYPITA
LRMKLMMNMNYPETA

SEQ ID NO: 234256 - protein, 15 aa, Artificial Sequence
  Description of Artificial Sequence: Synthetic peptide
  Seed: LRMKWMMAMKYPITA
LRMKLMMNMNYPFTA

SEQ ID NO: 234257 - protein, 15 aa, Artificial Sequence
  Description of Artificial Sequence: Synthetic peptide
  Seed: LRMKWMMAMKYPITA
LRMKLMMNMNYPGTA

SEQ ID NO: 234258 - protein, 15 aa, Artificial Sequence
  Description of Artificial Sequence: Synthetic peptide
  Seed: LRMKWMMAMKYPITA
LRMKLMMNMNYPHTA

SEQ ID NO: 234259 - protein, 15 aa, Artificial Sequence
  Description of Artificial Sequence: Synthetic peptide
  Seed: LRMKWMMAMKYPITA
LRMKLMMNMNYPITA

SEQ ID NO: 234260 - protein, 15 aa, Artificial Sequence
  Description of Artificial Sequence: Synthetic peptide
  Seed: LRMKWMMAMKYPITA
LRMKLMMNMNYPKTA

SEQ ID NO: 234261 - protein, 15 aa, Artificial Sequence
  Description of Artificial Sequence: Synthetic peptide
  Seed: LRMKWMMAMKYPITA
LRMKLMMNMNYPLTA

SEQ ID NO: 234262 - protein, 15 aa, Artificial Sequence
  Description of Artificial Sequence: Synthetic peptide
  Seed: LRMKWMMAMKYPITA
LRMKLMMNMNYPMTA

SEQ ID NO: 234263 - protein, 15 aa, Artificial Sequence
  Description of Artificial Sequence: Synthetic peptide
  Seed: LRMKWMMAMKYPITA
LRMKLMMNMNYPNTA

SEQ ID NO: 234264 - protein, 15 aa, Artificial Sequence
  Description of Artificial Sequence: Synthetic peptide
  Seed: LRMKWMMAMKYPITA
LRMKLMMNMNYPPTA

SEQ ID NO: 234265 - protein, 15 aa, Artificial Sequence
  Description of Artificial Sequence: Synthetic peptide
  Seed: LRMKWMMAMKYPITA
LRMKLMMNMNYPQTA

SEQ ID NO: 234266 - protein, 15 aa, Artificial Sequence
  Description of Artificial Sequence: Synthetic peptide
  Seed: LRMKWMMAMKYPITA
LRMKLMMNMNYPRTA

SEQ ID NO: 234267 - protein, 15 aa, Artificial Sequence
  Description of Artificial Sequence: Synthetic peptide
  Seed: LRMKWMMAMKYPITA
LRMKLMMNMNYPSTA

SEQ ID NO: 234268 - protein, 15 aa, Artificial Sequence
  Description of Artificial Sequence: Synthetic peptide
  Seed: LRMKWMMAMKYPITA
LRMKLMMNMNYPTTA

SEQ ID NO: 234269 - protein, 15 aa, Artificial Sequence
  Description of Artificial Sequence: Synthetic peptide
  Seed: LRMKWMMAMKYPITA
LRMKLMMNMNYPVTA

SEQ ID NO: 234270 - protein, 15 aa, Artificial Sequence
  Description of Artificial Sequence: Synthetic peptide
  Seed: LRMKWMMAMKYPITA
LRMKLMMNMNYPWTA

SEQ ID NO: 234271 - protein, 15 aa, Artificial Sequence
  Description of Artificial Sequence: Synthetic peptide
  Seed: LRMKWMMAMKYPITA
LRMKLMMNMNYPYTA

SEQ ID NO: 234272 - protein, 15 aa, Artificial Sequence
  Description of Artificial Sequence: Synthetic peptide
  Seed: LRMKWMMAMKYPITA
LRMKLMMNMPYPATA

SEQ ID NO: 234273 - protein, 15 aa, Artificial Sequence
  Description of Artificial Sequence: Synthetic peptide
  Seed: LRMKWMMAMKYPITA
LRMKLMMNMPYPCTA

SEQ ID NO: 234274 - protein, 15 aa, Artificial Sequence
  Description of Artificial Sequence: Synthetic peptide
  Seed: LRMKWMMAMKYPITA
LRMKLMMNMPYPDTA

SEQ ID NO: 234275 - protein, 15 aa, Artificial Sequence
  Description of Artificial Sequence: Synthetic peptide
  Seed: LRMKWMMAMKYPITA
LRMKLMMNMPYPETA

SEQ ID NO: 234276 - protein, 15 aa, Artificial Sequence
  Description of Artificial Sequence: Synthetic peptide
  Seed: LRMKWMMAMKYPITA
LRMKLMMNMPYPFTA

SEQ ID NO: 234277 - protein, 15 aa, Artificial Sequence
  Description of Artificial Sequence: Synthetic peptide
  Seed: LRMKWMMAMKYPITA
LRMKLMMNMPYPGTA

SEQ ID NO: 234278 - protein, 15 aa, Artificial Sequence
  Description of Artificial Sequence: Synthetic peptide
  Seed: LRMKWMMAMKYPITA
LRMKLMMNMPYPHTA

SEQ ID NO: 234279 - protein, 15 aa, Artificial Sequence
  Description of Artificial Sequence: Synthetic peptide
  Seed: LRMKWMMAMKYPITA
LRMKLMMNMPYPITA

SEQ ID NO: 234280 - protein, 15 aa, Artificial Sequence
  Description of Artificial Sequence: Synthetic peptide
  Seed: LRMKWMMAMKYPITA
LRMKLMMNMPYPKTA

SEQ ID NO: 234281 - protein, 15 aa, Artificial Sequence
  Description of Artificial Sequence: Synthetic peptide
  Seed: LRMKWMMAMKYPITA
LRMKLMMNMPYPLTA

SEQ ID NO: 234282 - protein, 15 aa, Artificial Sequence
  Description of Artificial Sequence: Synthetic peptide
  Seed: LRMKWMMAMKYPITA
LRMKLMMNMPYPMTA

SEQ ID NO: 234283 - protein, 15 aa, Artificial Sequence
  Description of Artificial Sequence: Synthetic peptide
  Seed: LRMKWMMAMKYPITA
LRMKLMMNMPYPNTA

SEQ ID NO: 234284 - protein, 15 aa, Artificial Sequence
  Description of Artificial Sequence: Synthetic peptide
  Seed: LRMKWMMAMKYPITA
LRMKLMMNMPYPPTA

SEQ ID NO: 234285 - protein, 15 aa, Artificial Sequence
  Description of Artificial Sequence: Synthetic peptide
  Seed: LRMKWMMAMKYPITA
LRMKLMMNMPYPQTA

SEQ ID NO: 234286 - protein, 15 aa, Artificial Sequence
  Description of Artificial Sequence: Synthetic peptide
  Seed: LRMKWMMAMKYPITA
LRMKLMMNMPYPRTA

SEQ ID NO: 234287 - protein, 15 aa, Artificial Sequence
  Description of Artificial Sequence: Synthetic peptide
  Seed: LRMKWMMAMKYPITA
LRMKLMMNMPYPSTA

SEQ ID NO: 234288 - protein, 15 aa, Artificial Sequence
  Description of Artificial Sequence: Synthetic peptide
  Seed: LRMKWMMAMKYPITA
LRMKLMMNMPYPTTA

SEQ ID NO: 234289 - protein, 15 aa, Artificial Sequence
  Description of Artificial Sequence: Synthetic peptide
  Seed: LRMKWMMAMKYPITA
LRMKLMMNMPYPVTA

SEQ ID NO: 234290 - protein, 15 aa, Artificial Sequence
  Description of Artificial Sequence: Synthetic peptide
  Seed: LRMKWMMAMKYPITA
LRMKLMMNMPYPWTA

SEQ ID NO: 234291 - protein, 15 aa, Artificial Sequence
  Description of Artificial Sequence: Synthetic peptide
  Seed: LRMKWMMAMKYPITA
LRMKLMMNMPYPYTA

SEQ ID NO: 234292 - protein, 15 aa, Artificial Sequence
  Description of Artificial Sequence: Synthetic peptide
  Seed: LRMKWMMAMKYPITA
LRMKLMMNMQYPATA

SEQ ID NO: 234293 - protein, 15 aa, Artificial Sequence
  Description of Artificial Sequence: Synthetic peptide
  Seed: LRMKWMMAMKYPITA
LRMKLMMNMQYPFTA

SEQ ID NO: 234294 - protein, 15 aa, Artificial Sequence
  Description of Artificial Sequence: Synthetic peptide
  Seed: LRMKWMMAMKYPITA
LRMKLMMNMQYPITA

SEQ ID NO: 234295 - protein, 15 aa, Artificial Sequence
  Description of Artificial Sequence: Synthetic peptide
  Seed: LRMKWMMAMKYPITA
LRMKLMMNMQYPKTA

SEQ ID NO: 234296 - protein, 15 aa, Artificial Sequence
  Description of Artificial Sequence: Synthetic peptide
  Seed: LRMKWMMAMKYPITA
LRMKLMMNMQYPLTA

SEQ ID NO: 234297 - protein, 15 aa, Artificial Sequence
  Description of Artificial Sequence: Synthetic peptide
  Seed: LRMKWMMAMKYPITA
LRMKLMMNMQYPMTA

SEQ ID NO: 234298 - protein, 15 aa, Artificial Sequence
  Description of Artificial Sequence: Synthetic peptide
  Seed: LRMKWMMAMKYPITA
LRMKLMMNMQYPRTA

SEQ ID NO: 234299 - protein, 15 aa, Artificial Sequence
  Description of Artificial Sequence: Synthetic peptide
  Seed: LRMKWMMAMKYPITA
LRMKLMMNMQYPTTA

SEQ ID NO: 234300 - protein, 15 aa, Artificial Sequence
  Description of Artificial Sequence: Synthetic peptide
  Seed: LRMKWMMAMKYPITA
LRMKLMMNMQYPVTA

SEQ ID NO: 234301 - protein, 15 aa, Artificial Sequence
  Description of Artificial Sequence: Synthetic peptide
  Seed: LRMKWMMAMKYPITA
LRMKLMMNMQYPYTA

SEQ ID NO: 234302 - protein, 15 aa, Artificial Sequence
  Description of Artificial Sequence: Synthetic peptide
  Seed: LRMKWMMAMKYPITA
LRMKLMMNMRYPATA

SEQ ID NO: 234303 - protein, 15 aa, Artificial Sequence
  Description of Artificial Sequence: Synthetic peptide
  Seed: LRMKWMMAMKYPITA
LRMKLMMNMRYPCTA

SEQ ID NO: 234304 - protein, 15 aa, Artificial Sequence
  Description of Artificial Sequence: Synthetic peptide
  Seed: LRMKWMMAMKYPITA
LRMKLMMNMRYPDTA

SEQ ID NO: 234305 - protein, 15 aa, Artificial Sequence
  Description of Artificial Sequence: Synthetic peptide
  Seed: LRMKWMMAMKYPITA
LRMKLMMNMRYPETA

SEQ ID NO: 234306 - protein, 15 aa, Artificial Sequence
  Description of Artificial Sequence: Synthetic peptide
  Seed: LRMKWMMAMKYPITA
LRMKLMMNMRYPFTA

SEQ ID NO: 234307 - protein, 15 aa, Artificial Sequence
  Description of Artificial Sequence: Synthetic peptide
  Seed: LRMKWMMAMKYPITA
LRMKLMMNMRYPGTA

SEQ ID NO: 234308 - protein, 15 aa, Artificial Sequence
  Description of Artificial Sequence: Synthetic peptide
  Seed: LRMKWMMAMKYPITA
LRMKLMMNMRYPHTA

SEQ ID NO: 234309 - protein, 15 aa, Artificial Sequence
  Description of Artificial Sequence: Synthetic peptide
  Seed: LRMKWMMAMKYPITA
LRMKLMMNMRYPITA

SEQ ID NO: 234310 - protein, 15 aa, Artificial Sequence
  Description of Artificial Sequence: Synthetic peptide
  Seed: LRMKWMMAMKYPITA
LRMKLMMNMRYPKTA

SEQ ID NO: 234311 - protein, 15 aa, Artificial Sequence
  Description of Artificial Sequence: Synthetic peptide
  Seed: LRMKWMMAMKYPITA
LRMKLMMNMRYPLTA

SEQ ID NO: 234312 - protein, 15 aa, Artificial Sequence
  Description of Artificial Sequence: Synthetic peptide
  Seed: LRMKWMMAMKYPITA
LRMKLMMNMRYPMTA

SEQ ID NO: 234313 - protein, 15 aa, Artificial Sequence
  Description of Artificial Sequence: Synthetic peptide
  Seed: LRMKWMMAMKYPITA
LRMKLMMNMRYPNTA

SEQ ID NO: 234314 - protein, 15 aa, Artificial Sequence
  Description of Artificial Sequence: Synthetic peptide
  Seed: LRMKWMMAMKYPITA
LRMKLMMNMRYPPTA

SEQ ID NO: 234315 - protein, 15 aa, Artificial Sequence
  Description of Artificial Sequence: Synthetic peptide
  Seed: LRMKWMMAMKYPITA
LRMKLMMNMRYPQTA

SEQ ID NO: 234316 - protein, 15 aa, Artificial Sequence
  Description of Artificial Sequence: Synthetic peptide
  Seed: LRMKWMMAMKYPITA
LRMKLMMNMRYPRTA

SEQ ID NO: 234317 - protein, 15 aa, Artificial Sequence
  Description of Artificial Sequence: Synthetic peptide
  Seed: LRMKWMMAMKYPITA
LRMKLMMNMRYPSTA

SEQ ID NO: 234318 - protein, 15 aa, Artificial Sequence
  Description of Artificial Sequence: Synthetic peptide
  Seed: LRMKWMMAMKYPITA
LRMKLMMNMRYPTTA

SEQ ID NO: 234319 - protein, 15 aa, Artificial Sequence
  Description of Artificial Sequence: Synthetic peptide
  Seed: LRMKWMMAMKYPITA
LRMKLMMNMRYPVTA

SEQ ID NO: 234320 - protein, 15 aa, Artificial Sequence
  Description of Artificial Sequence: Synthetic peptide
  Seed: LRMKWMMAMKYPITA
LRMKLMMNMRYPWTA

SEQ ID NO: 234321 - protein, 15 aa, Artificial Sequence
  Description of Artificial Sequence: Synthetic peptide
  Seed: LRMKWMMAMKYPITA
LRMKLMMNMRYPYTA

SEQ ID NO: 234322 - protein, 15 aa, Artificial Sequence
  Description of Artificial Sequence: Synthetic peptide
  Seed: LRMKWMMAMKYPITA
LRMKLMMNMSYPATA

SEQ ID NO: 234323 - protein, 15 aa, Artificial Sequence
  Description of Artificial Sequence: Synthetic peptide
  Seed: LRMKWMMAMKYPITA
LRMKLMMNMSYPCTA

SEQ ID NO: 234324 - protein, 15 aa, Artificial Sequence
  Description of Artificial Sequence: Synthetic peptide
  Seed: LRMKWMMAMKYPITA
LRMKLMMNMSYPDTA

SEQ ID NO: 234325 - protein, 15 aa, Artificial Sequence
  Description of Artificial Sequence: Synthetic peptide
  Seed: LRMKWMMAMKYPITA
LRMKLMMNMSYPETA

SEQ ID NO: 234326 - protein, 15 aa, Artificial Sequence
  Description of Artificial Sequence: Synthetic peptide
  Seed: LRMKWMMAMKYPITA
LRMKLMMNMSYPFTA

SEQ ID NO: 234327 - protein, 15 aa, Artificial Sequence
  Description of Artificial Sequence: Synthetic peptide
  Seed: LRMKWMMAMKYPITA
LRMKLMMNMSYPGTA

SEQ ID NO: 234328 - protein, 15 aa, Artificial Sequence
  Description of Artificial Sequence: Synthetic peptide
  Seed: LRMKWMMAMKYPITA
LRMKLMMNMSYPHTA

SEQ ID NO: 234329 - protein, 15 aa, Artificial Sequence
  Description of Artificial Sequence: Synthetic peptide
  Seed: LRMKWMMAMKYPITA
LRMKLMMNMSYPITA

SEQ ID NO: 234330 - protein, 15 aa, Artificial Sequence
  Description of Artificial Sequence: Synthetic peptide
  Seed: LRMKWMMAMKYPITA
LRMKLMMNMSYPKTA

SEQ ID NO: 234331 - protein, 15 aa, Artificial Sequence
  Description of Artificial Sequence: Synthetic peptide
  Seed: LRMKWMMAMKYPITA
LRMKLMMNMSYPLTA

SEQ ID NO: 234332 - protein, 15 aa, Artificial Sequence
  Description of Artificial Sequence: Synthetic peptide
  Seed: LRMKWMMAMKYPITA
LRMKLMMNMSYPMTA

SEQ ID NO: 234333 - protein, 15 aa, Artificial Sequence
  Description of Artificial Sequence: Synthetic peptide
  Seed: LRMKWMMAMKYPITA
LRMKLMMNMSYPNTA

SEQ ID NO: 234334 - protein, 15 aa, Artificial Sequence
  Description of Artificial Sequence: Synthetic peptide
  Seed: LRMKWMMAMKYPITA
LRMKLMMNMSYPPTA

SEQ ID NO: 234335 - protein, 15 aa, Artificial Sequence
  Description of Artificial Sequence: Synthetic peptide
  Seed: LRMKWMMAMKYPITA
LRMKLMMNMSYPQTA

SEQ ID NO: 234336 - protein, 15 aa, Artificial Sequence
  Description of Artificial Sequence: Synthetic peptide
  Seed: LRMKWMMAMKYPITA
LRMKLMMNMSYPRTA

SEQ ID NO: 234337 - protein, 15 aa, Artificial Sequence
  Description of Artificial Sequence: Synthetic peptide
  Seed: LRMKWMMAMKYPITA
LRMKLMMNMSYPSTA

SEQ ID NO: 234338 - protein, 15 aa, Artificial Sequence
  Description of Artificial Sequence: Synthetic peptide
  Seed: LRMKWMMAMKYPITA
LRMKLMMNMSYPTTA

SEQ ID NO: 234339 - protein, 15 aa, Artificial Sequence
  Description of Artificial Sequence: Synthetic peptide
  Seed: LRMKWMMAMKYPITA
LRMKLMMNMSYPVTA

SEQ ID NO: 234340 - protein, 15 aa, Artificial Sequence
  Description of Artificial Sequence: Synthetic peptide
  Seed: LRMKWMMAMKYPITA
LRMKLMMNMSYPWTA

SEQ ID NO: 234341 - protein, 15 aa, Artificial Sequence
  Description of Artificial Sequence: Synthetic peptide
  Seed: LRMKWMMAMKYPITA
LRMKLMMNMSYPYTA

SEQ ID NO: 234342 - protein, 15 aa, Artificial Sequence
  Description of Artificial Sequence: Synthetic peptide
  Seed: LRMKWMMAMKYPITA
LRMKLMMNMTYPATA

SEQ ID NO: 234343 - protein, 15 aa, Artificial Sequence
  Description of Artificial Sequence: Synthetic peptide
  Seed: LRMKWMMAMKYPITA
LRMKLMMNMTYPCTA

SEQ ID NO: 234344 - protein, 15 aa, Artificial Sequence
  Description of Artificial Sequence: Synthetic peptide
  Seed: LRMKWMMAMKYPITA
LRMKLMMNMTYPETA

SEQ ID NO: 234345 - protein, 15 aa, Artificial Sequence
  Description of Artificial Sequence: Synthetic peptide
  Seed: LRMKWMMAMKYPITA
LRMKLMMNMTYPFTA

SEQ ID NO: 234346 - protein, 15 aa, Artificial Sequence
  Description of Artificial Sequence: Synthetic peptide
  Seed: LRMKWMMAMKYPITA
LRMKLMMNMTYPGTA

SEQ ID NO: 234347 - protein, 15 aa, Artificial Sequence
  Description of Artificial Sequence: Synthetic peptide
  Seed: LRMKWMMAMKYPITA
LRMKLMMNMTYPHTA

SEQ ID NO: 234348 - protein, 15 aa, Artificial Sequence
  Description of Artificial Sequence: Synthetic peptide
  Seed: LRMKWMMAMKYPITA
LRMKLMMNMTYPITA

SEQ ID NO: 234349 - protein, 15 aa, Artificial Sequence
  Description of Artificial Sequence: Synthetic peptide
  Seed: LRMKWMMAMKYPITA
LRMKLMMNMTYPKTA

SEQ ID NO: 234350 - protein, 15 aa, Artificial Sequence
  Description of Artificial Sequence: Synthetic peptide
  Seed: LRMKWMMAMKYPITA
LRMKLMMNMTYPLTA

SEQ ID NO: 234351 - protein, 15 aa, Artificial Sequence
  Description of Artificial Sequence: Synthetic peptide
  Seed: LRMKWMMAMKYPITA
LRMKLMMNMTYPMTA

SEQ ID NO: 234352 - protein, 15 aa, Artificial Sequence
  Description of Artificial Sequence: Synthetic peptide
  Seed: LRMKWMMAMKYPITA
LRMKLMMNMTYPNTA

SEQ ID NO: 234353 - protein, 15 aa, Artificial Sequence
  Description of Artificial Sequence: Synthetic peptide
  Seed: LRMKWMMAMKYPITA
LRMKLMMNMTYPPTA

SEQ ID NO: 234354 - protein, 15 aa, Artificial Sequence
  Description of Artificial Sequence: Synthetic peptide
  Seed: LRMKWMMAMKYPITA
LRMKLMMNMTYPQTA

SEQ ID NO: 234355 - protein, 15 aa, Artificial Sequence
  Description of Artificial Sequence: Synthetic peptide
  Seed: LRMKWMMAMKYPITA
LRMKLMMNMTYPRTA

SEQ ID NO: 234356 - protein, 15 aa, Artificial Sequence
  Description of Artificial Sequence: Synthetic peptide
  Seed: LRMKWMMAMKYPITA
LRMKLMMNMTYPSTA

SEQ ID NO: 234357 - protein, 15 aa, Artificial Sequence
  Description of Artificial Sequence: Synthetic peptide
  Seed: LRMKWMMAMKYPITA
LRMKLMMNMTYPTTA

SEQ ID NO: 234358 - protein, 15 aa, Artificial Sequence
  Description of Artificial Sequence: Synthetic peptide
  Seed: LRMKWMMAMKYPITA
LRMKLMMNMTYPVTA

SEQ ID NO: 234359 - protein, 15 aa, Artificial Sequence
  Description of Artificial Sequence: Synthetic peptide
  Seed: LRMKWMMAMKYPITA
LRMKLMMNMTYPWTA

SEQ ID NO: 234360 - protein, 15 aa, Artificial Sequence
  Description of Artificial Sequence: Synthetic peptide
  Seed: LRMKWMMAMKYPITA
LRMKLMMNMTYPYTA

SEQ ID NO: 234361 - protein, 15 aa, Artificial Sequence
  Description of Artificial Sequence: Synthetic peptide
  Seed: LRMKWMMAMKYPITA
LRMKLMMNMVYPATA

SEQ ID NO: 234362 - protein, 15 aa, Artificial Sequence
  Description of Artificial Sequence: Synthetic peptide
  Seed: LRMKWMMAMKYPITA
LRMKLMMNMVYPCTA

SEQ ID NO: 234363 - protein, 15 aa, Artificial Sequence
  Description of Artificial Sequence: Synthetic peptide
  Seed: LRMKWMMAMKYPITA
LRMKLMMNMVYPDTA

SEQ ID NO: 234364 - protein, 15 aa, Artificial Sequence
  Description of Artificial Sequence: Synthetic peptide
  Seed: LRMKWMMAMKYPITA
LRMKLMMNMVYPETA

SEQ ID NO: 234365 - protein, 15 aa, Artificial Sequence
  Description of Artificial Sequence: Synthetic peptide
  Seed: LRMKWMMAMKYPITA
LRMKLMMNMVYPFTA

SEQ ID NO: 234366 - protein, 15 aa, Artificial Sequence
  Description of Artificial Sequence: Synthetic peptide
  Seed: LRMKWMMAMKYPITA
LRMKLMMNMVYPGTA

SEQ ID NO: 234367 - protein, 15 aa, Artificial Sequence
  Description of Artificial Sequence: Synthetic peptide
  Seed: LRMKWMMAMKYPITA
LRMKLMMNMVYPHTA

SEQ ID NO: 234368 - protein, 15 aa, Artificial Sequence
  Description of Artificial Sequence: Synthetic peptide
  Seed: LRMKWMMAMKYPITA
LRMKLMMNMVYPITA

SEQ ID NO: 234369 - protein, 15 aa, Artificial Sequence
  Description of Artificial Sequence: Synthetic peptide
  Seed: LRMKWMMAMKYPITA
LRMKLMMNMVYPKTA

SEQ ID NO: 234370 - protein, 15 aa, Artificial Sequence
  Description of Artificial Sequence: Synthetic peptide
  Seed: LRMKWMMAMKYPITA
LRMKLMMNMVYPLTA

SEQ ID NO: 234371 - protein, 15 aa, Artificial Sequence
  Description of Artificial Sequence: Synthetic peptide
  Seed: LRMKWMMAMKYPITA
LRMKLMMNMVYPMTA

SEQ ID NO: 234372 - protein, 15 aa, Artificial Sequence
  Description of Artificial Sequence: Synthetic peptide
  Seed: LRMKWMMAMKYPITA
LRMKLMMNMVYPNTA

SEQ ID NO: 234373 - protein, 15 aa, Artificial Sequence
  Description of Artificial Sequence: Synthetic peptide
  Seed: LRMKWMMAMKYPITA
LRMKLMMNMVYPPTA

SEQ ID NO: 234374 - protein, 15 aa, Artificial Sequence
  Description of Artificial Sequence: Synthetic peptide
  Seed: LRMKWMMAMKYPITA
LRMKLMMNMVYPQTA

SEQ ID NO: 234375 - protein, 15 aa, Artificial Sequence
  Description of Artificial Sequence: Synthetic peptide
  Seed: LRMKWMMAMKYPITA
LRMKLMMNMVYPRTA

SEQ ID NO: 234376 - protein, 15 aa, Artificial Sequence
  Description of Artificial Sequence: Synthetic peptide
  Seed: LRMKWMMAMKYPITA
LRMKLMMNMVYPSTA

SEQ ID NO: 234377 - protein, 15 aa, Artificial Sequence
  Description of Artificial Sequence: Synthetic peptide
  Seed: LRMKWMMAMKYPITA
LRMKLMMNMVYPTTA

SEQ ID NO: 234378 - protein, 15 aa, Artificial Sequence
  Description of Artificial Sequence: Synthetic peptide
  Seed: LRMKWMMAMKYPITA
LRMKLMMNMVYPVTA

SEQ ID NO: 234379 - protein, 15 aa, Artificial Sequence
  Description of Artificial Sequence: Synthetic peptide
  Seed: LRMKWMMAMKYPITA
LRMKLMMNMVYPWTA

SEQ ID NO: 234380 - protein, 15 aa, Artificial Sequence
  Description of Artificial Sequence: Synthetic peptide
  Seed: LRMKWMMAMKYPITA
LRMKLMMNMVYPYTA

SEQ ID NO: 234381 - protein, 15 aa, Artificial Sequence
  Description of Artificial Sequence: Synthetic peptide
  Seed: LRMKWMMAMKYPITA
LRMKLMMNMWYPFTA

SEQ ID NO: 234382 - protein, 15 aa, Artificial Sequence
  Description of Artificial Sequence: Synthetic peptide
  Seed: LRMKWMMAMKYPITA
LRMKLMMNMWYPITA

SEQ ID NO: 234383 - protein, 15 aa, Artificial Sequence
  Description of Artificial Sequence: Synthetic peptide
  Seed: LRMKWMMAMKYPITA
LRMKLMMNMWYPLTA

SEQ ID NO: 234384 - protein, 15 aa, Artificial Sequence
  Description of Artificial Sequence: Synthetic peptide
  Seed: LRMKWMMAMKYPITA
LRMKLMMNMWYPMTA

SEQ ID NO: 234385 - protein, 15 aa, Artificial Sequence
  Description of Artificial Sequence: Synthetic peptide
  Seed: LRMKWMMAMKYPITA
LRMKLMMNMWYPVTA

SEQ ID NO: 234386 - protein, 15 aa, Artificial Sequence
  Description of Artificial Sequence: Synthetic peptide
  Seed: LRMKWMMAMKYPITA
LRMKLMMNMYYPATA

SEQ ID NO: 234387 - protein, 15 aa, Artificial Sequence
  Description of Artificial Sequence: Synthetic peptide
  Seed: LRMKWMMAMKYPITA
LRMKLMMNMYYPFTA

SEQ ID NO: 234388 - protein, 15 aa, Artificial Sequence
  Description of Artificial Sequence: Synthetic peptide
  Seed: LRMKWMMAMKYPITA
LRMKLMMNMYYPITA

SEQ ID NO: 234389 - protein, 15 aa, Artificial Sequence
  Description of Artificial Sequence: Synthetic peptide
  Seed: LRMKWMMAMKYPITA
LRMKLMMNMYYPLTA

SEQ ID NO: 234390 - protein, 15 aa, Artificial Sequence
  Description of Artificial Sequence: Synthetic peptide
  Seed: LRMKWMMAMKYPITA
LRMKLMMNMYYPMTA

SEQ ID NO: 234391 - protein, 15 aa, Artificial Sequence
  Description of Artificial Sequence: Synthetic peptide
  Seed: LRMKWMMAMKYPITA
LRMKLMMNMYYPSTA

SEQ ID NO: 234392 - protein, 15 aa, Artificial Sequence
  Description of Artificial Sequence: Synthetic peptide
  Seed: LRMKWMMAMKYPITA
LRMKLMMNMYYPTTA

SEQ ID NO: 234393 - protein, 15 aa, Artificial Sequence
  Description of Artificial Sequence: Synthetic peptide
  Seed: LRMKWMMAMKYPITA
LRMKLMMNMYYPVTA

SEQ ID NO: 234394 - protein, 15 aa, Artificial Sequence
  Description of Artificial Sequence: Synthetic peptide
  Seed: LRMKWMMAMKYPITA
LRMKLMMNMYYPYTA

SEQ ID NO: 234395 - protein, 15 aa, Artificial Sequence
  Description of Artificial Sequence: Synthetic peptide
  Seed: LRMKWMMAMKYPITA
LRMKLMMPMAYPATA

SEQ ID NO: 234396 - protein, 15 aa, Artificial Sequence
  Description of Artificial Sequence: Synthetic peptide
  Seed: LRMKWMMAMKYPITA
LRMKLMMPMAYPFTA

SEQ ID NO: 234397 - protein, 15 aa, Artificial Sequence
  Description of Artificial Sequence: Synthetic peptide
  Seed: LRMKWMMAMKYPITA
LRMKLMMPMAYPGTA

SEQ ID NO: 234398 - protein, 15 aa, Artificial Sequence
  Description of Artificial Sequence: Synthetic peptide
  Seed: LRMKWMMAMKYPITA
LRMKLMMPMAYPITA

SEQ ID NO: 234399 - protein, 15 aa, Artificial Sequence
  Description of Artificial Sequence: Synthetic peptide
  Seed: LRMKWMMAMKYPITA
LRMKLMMPMAYPLTA

SEQ ID NO: 234400 - protein, 15 aa, Artificial Sequence
  Description of Artificial Sequence: Synthetic peptide
  Seed: LRMKWMMAMKYPITA
LRMKLMMPMAYPMTA

SEQ ID NO: 234401 - protein, 15 aa, Artificial Sequence
  Description of Artificial Sequence: Synthetic peptide
  Seed: LRMKWMMAMKYPITA
LRMKLMMPMAYPNTA

SEQ ID NO: 234402 - protein, 15 aa, Artificial Sequence
  Description of Artificial Sequence: Synthetic peptide
  Seed: LRMKWMMAMKYPITA
LRMKLMMPMAYPQTA

SEQ ID NO: 234403 - protein, 15 aa, Artificial Sequence
  Description of Artificial Sequence: Synthetic peptide
  Seed: LRMKWMMAMKYPITA
LRMKLMMPMAYPRTA

SEQ ID NO: 234404 - protein, 15 aa, Artificial Sequence
  Description of Artificial Sequence: Synthetic peptide
  Seed: LRMKWMMAMKYPITA
LRMKLMMPMAYPSTA

SEQ ID NO: 234405 - protein, 15 aa, Artificial Sequence
  Description of Artificial Sequence: Synthetic peptide
  Seed: LRMKWMMAMKYPITA
LRMKLMMPMAYPTTA

SEQ ID NO: 234406 - protein, 15 aa, Artificial Sequence
  Description of Artificial Sequence: Synthetic peptide
  Seed: LRMKWMMAMKYPITA
LRMKLMMPMAYPVTA

SEQ ID NO: 234407 - protein, 15 aa, Artificial Sequence
  Description of Artificial Sequence: Synthetic peptide
  Seed: LRMKWMMAMKYPITA
LRMKLMMPMAYPWTA

SEQ ID NO: 234408 - protein, 15 aa, Artificial Sequence
  Description of Artificial Sequence: Synthetic peptide
  Seed: LRMKWMMAMKYPITA
LRMKLMMPMAYPYTA

SEQ ID NO: 234409 - protein, 15 aa, Artificial Sequence
  Description of Artificial Sequence: Synthetic peptide
  Seed: LRMKWMMAMKYPITA
LRMKLMMPMGYPATA

SEQ ID NO: 234410 - protein, 15 aa, Artificial Sequence
  Description of Artificial Sequence: Synthetic peptide
  Seed: LRMKWMMAMKYPITA
LRMKLMMPMGYPITA

SEQ ID NO: 234411 - protein, 15 aa, Artificial Sequence
  Description of Artificial Sequence: Synthetic peptide
  Seed: LRMKWMMAMKYPITA
LRMKLMMPMGYPLTA

SEQ ID NO: 234412 - protein, 15 aa, Artificial Sequence
  Description of Artificial Sequence: Synthetic peptide
  Seed: LRMKWMMAMKYPITA
LRMKLMMPMGYPMTA

SEQ ID NO: 234413 - protein, 15 aa, Artificial Sequence
  Description of Artificial Sequence: Synthetic peptide
  Seed: LRMKWMMAMKYPITA
LRMKLMMPMGYPVTA

SEQ ID NO: 234414 - protein, 15 aa, Artificial Sequence
  Description of Artificial Sequence: Synthetic peptide
  Seed: LRMKWMMAMKYPITA
LRMKLMMPMIYPATA

SEQ ID NO: 234415 - protein, 15 aa, Artificial Sequence
  Description of Artificial Sequence: Synthetic peptide
  Seed: LRMKWMMAMKYPITA
LRMKLMMPMIYPITA

SEQ ID NO: 234416 - protein, 15 aa, Artificial Sequence
  Description of Artificial Sequence: Synthetic peptide
  Seed: LRMKWMMAMKYPITA
LRMKLMMPMIYPLTA

SEQ ID NO: 234417 - protein, 15 aa, Artificial Sequence
  Description of Artificial Sequence: Synthetic peptide
  Seed: LRMKWMMAMKYPITA
LRMKLMMPMIYPMTA

SEQ ID NO: 234418 - protein, 15 aa, Artificial Sequence
  Description of Artificial Sequence: Synthetic peptide
  Seed: LRMKWMMAMKYPITA
LRMKLMMPMIYPSTA

SEQ ID NO: 234419 - protein, 15 aa, Artificial Sequence
  Description of Artificial Sequence: Synthetic peptide
  Seed: LRMKWMMAMKYPITA
LRMKLMMPMIYPVTA

SEQ ID NO: 234420 - protein, 15 aa, Artificial Sequence
  Description of Artificial Sequence: Synthetic peptide
  Seed: LRMKWMMAMKYPITA
LRMKLMMPMKYPRTA

SEQ ID NO: 234421 - protein, 15 aa, Artificial Sequence
  Description of Artificial Sequence: Synthetic peptide
  Seed: LRMKWMMAMKYPITA
LRMKLMMPMMYPITA

SEQ ID NO: 234422 - protein, 15 aa, Artificial Sequence
  Description of Artificial Sequence: Synthetic peptide
  Seed: LRMKWMMAMKYPITA
LRMKLMMPMMYPLTA

SEQ ID NO: 234423 - protein, 15 aa, Artificial Sequence
  Description of Artificial Sequence: Synthetic peptide
  Seed: LRMKWMMAMKYPITA
LRMKLMMPMMYPMTA

SEQ ID NO: 234424 - protein, 15 aa, Artificial Sequence
  Description of Artificial Sequence: Synthetic peptide
  Seed: LRMKWMMAMKYPITA
LRMKLMMPMMYPVTA

SEQ ID NO: 234425 - protein, 15 aa, Artificial Sequence
  Description of Artificial Sequence: Synthetic peptide
  Seed: LRMKWMMAMKYPITA
LRMKLMMPMNYPATA

SEQ ID NO: 234426 - protein, 15 aa, Artificial Sequence
  Description of Artificial Sequence: Synthetic peptide
  Seed: LRMKWMMAMKYPITA
LRMKLMMPMNYPITA

SEQ ID NO: 234427 - protein, 15 aa, Artificial Sequence
  Description of Artificial Sequence: Synthetic peptide
  Seed: LRMKWMMAMKYPITA
LRMKLMMPMNYPLTA

SEQ ID NO: 234428 - protein, 15 aa, Artificial Sequence
  Description of Artificial Sequence: Synthetic peptide
  Seed: LRMKWMMAMKYPITA
LRMKLMMPMNYPVTA

SEQ ID NO: 234429 - protein, 15 aa, Artificial Sequence
  Description of Artificial Sequence: Synthetic peptide
  Seed: LRMKWMMAMKYPITA
LRMKLMMPMPYPATA

SEQ ID NO: 234430 - protein, 15 aa, Artificial Sequence
  Description of Artificial Sequence: Synthetic peptide
  Seed: LRMKWMMAMKYPITA
LRMKLMMPMPYPFTA

SEQ ID NO: 234431 - protein, 15 aa, Artificial Sequence
  Description of Artificial Sequence: Synthetic peptide
  Seed: LRMKWMMAMKYPITA
LRMKLMMPMPYPITA

SEQ ID NO: 234432 - protein, 15 aa, Artificial Sequence
  Description of Artificial Sequence: Synthetic peptide
  Seed: LRMKWMMAMKYPITA
LRMKLMMPMPYPLTA

SEQ ID NO: 234433 - protein, 15 aa, Artificial Sequence
  Description of Artificial Sequence: Synthetic peptide
  Seed: LRMKWMMAMKYPITA
LRMKLMMPMPYPMTA

SEQ ID NO: 234434 - protein, 15 aa, Artificial Sequence
  Description of Artificial Sequence: Synthetic peptide
  Seed: LRMKWMMAMKYPITA
LRMKLMMPMPYPQTA

SEQ ID NO: 234435 - protein, 15 aa, Artificial Sequence
  Description of Artificial Sequence: Synthetic peptide
  Seed: LRMKWMMAMKYPITA
LRMKLMMPMPYPSTA

SEQ ID NO: 234436 - protein, 15 aa, Artificial Sequence
  Description of Artificial Sequence: Synthetic peptide
  Seed: LRMKWMMAMKYPITA
LRMKLMMPMPYPTTA

SEQ ID NO: 234437 - protein, 15 aa, Artificial Sequence
  Description of Artificial Sequence: Synthetic peptide
  Seed: LRMKWMMAMKYPITA
LRMKLMMPMPYPVTA

SEQ ID NO: 234438 - protein, 15 aa, Artificial Sequence
  Description of Artificial Sequence: Synthetic peptide
  Seed: LRMKWMMAMKYPITA
LRMKLMMPMRYPATA

SEQ ID NO: 234439 - protein, 15 aa, Artificial Sequence
  Description of Artificial Sequence: Synthetic peptide
  Seed: LRMKWMMAMKYPITA
LRMKLMMPMRYPQTA

SEQ ID NO: 234440 - protein, 15 aa, Artificial Sequence
  Description of Artificial Sequence: Synthetic peptide
  Seed: LRMKWMMAMKYPITA
LRMKLMMPMRYPRTA

SEQ ID NO: 234441 - protein, 15 aa, Artificial Sequence
  Description of Artificial Sequence: Synthetic peptide
  Seed: LRMKWMMAMKYPITA
LRMKLMMPMRYPSTA

SEQ ID NO: 234442 - protein, 15 aa, Artificial Sequence
  Description of Artificial Sequence: Synthetic peptide
  Seed: LRMKWMMAMKYPITA
LRMKLMMPMRYPYTA

SEQ ID NO: 234443 - protein, 15 aa, Artificial Sequence
  Description of Artificial Sequence: Synthetic peptide
  Seed: LRMKWMMAMKYPITA
LRMKLMMPMSYPATA

SEQ ID NO: 234444 - protein, 15 aa, Artificial Sequence
  Description of Artificial Sequence: Synthetic peptide
  Seed: LRMKWMMAMKYPITA
LRMKLMMPMSYPFTA

SEQ ID NO: 234445 - protein, 15 aa, Artificial Sequence
  Description of Artificial Sequence: Synthetic peptide
  Seed: LRMKWMMAMKYPITA
LRMKLMMPMSYPITA

SEQ ID NO: 234446 - protein, 15 aa, Artificial Sequence
  Description of Artificial Sequence: Synthetic peptide
  Seed: LRMKWMMAMKYPITA
LRMKLMMPMSYPLTA

SEQ ID NO: 234447 - protein, 15 aa, Artificial Sequence
  Description of Artificial Sequence: Synthetic peptide
  Seed: LRMKWMMAMKYPITA
LRMKLMMPMSYPMTA

SEQ ID NO: 234448 - protein, 15 aa, Artificial Sequence
  Description of Artificial Sequence: Synthetic peptide
  Seed: LRMKWMMAMKYPITA
LRMKLMMPMSYPSTA

SEQ ID NO: 234449 - protein, 15 aa, Artificial Sequence
  Description of Artificial Sequence: Synthetic peptide
  Seed: LRMKWMMAMKYPITA
LRMKLMMPMSYPTTA

SEQ ID NO: 234450 - protein, 15 aa, Artificial Sequence
  Description of Artificial Sequence: Synthetic peptide
  Seed: LRMKWMMAMKYPITA
LRMKLMMPMSYPVTA

SEQ ID NO: 234451 - protein, 15 aa, Artificial Sequence
  Description of Artificial Sequence: Synthetic peptide
  Seed: LRMKWMMAMKYPITA
LRMKLMMPMTYPATA

SEQ ID NO: 234452 - protein, 15 aa, Artificial Sequence
  Description of Artificial Sequence: Synthetic peptide
  Seed: LRMKWMMAMKYPITA
LRMKLMMPMTYPITA

SEQ ID NO: 234453 - protein, 15 aa, Artificial Sequence
  Description of Artificial Sequence: Synthetic peptide
  Seed: LRMKWMMAMKYPITA
LRMKLMMPMTYPLTA

SEQ ID NO: 234454 - protein, 15 aa, Artificial Sequence
  Description of Artificial Sequence: Synthetic peptide
  Seed: LRMKWMMAMKYPITA
LRMKLMMPMTYPMTA

SEQ ID NO: 234455 - protein, 15 aa, Artificial Sequence
  Description of Artificial Sequence: Synthetic peptide
  Seed: LRMKWMMAMKYPITA
LRMKLMMPMTYPVTA

SEQ ID NO: 234456 - protein, 15 aa, Artificial Sequence
  Description of Artificial Sequence: Synthetic peptide
  Seed: LRMKWMMAMKYPITA
LRMKLMMPMVYPATA

SEQ ID NO: 234457 - protein, 15 aa, Artificial Sequence
  Description of Artificial Sequence: Synthetic peptide
  Seed: LRMKWMMAMKYPITA
LRMKLMMPMVYPITA

SEQ ID NO: 234458 - protein, 15 aa, Artificial Sequence
  Description of Artificial Sequence: Synthetic peptide
  Seed: LRMKWMMAMKYPITA
LRMKLMMPMVYPLTA

SEQ ID NO: 234459 - protein, 15 aa, Artificial Sequence
  Description of Artificial Sequence: Synthetic peptide
  Seed: LRMKWMMAMKYPITA
LRMKLMMPMVYPMTA

SEQ ID NO: 234460 - protein, 15 aa, Artificial Sequence
  Description of Artificial Sequence: Synthetic peptide
  Seed: LRMKWMMAMKYPITA
LRMKLMMPMVYPNTA

SEQ ID NO: 234461 - protein, 15 aa, Artificial Sequence
  Description of Artificial Sequence: Synthetic peptide
  Seed: LRMKWMMAMKYPITA
LRMKLMMPMVYPQTA

SEQ ID NO: 234462 - protein, 15 aa, Artificial Sequence
  Description of Artificial Sequence: Synthetic peptide
  Seed: LRMKWMMAMKYPITA
LRMKLMMPMVYPSTA

SEQ ID NO: 234463 - protein, 15 aa, Artificial Sequence
  Description of Artificial Sequence: Synthetic peptide
  Seed: LRMKWMMAMKYPITA
LRMKLMMPMVYPVTA

SEQ ID NO: 234464 - protein, 15 aa, Artificial Sequence
  Description of Artificial Sequence: Synthetic peptide
  Seed: LRMKWMMAMKYPITA
LRMKLMMQMAYPATA

SEQ ID NO: 234465 - protein, 15 aa, Artificial Sequence
  Description of Artificial Sequence: Synthetic peptide
  Seed: LRMKWMMAMKYPITA
LRMKLMMQMAYPCTA

SEQ ID NO: 234466 - protein, 15 aa, Artificial Sequence
  Description of Artificial Sequence: Synthetic peptide
  Seed: LRMKWMMAMKYPITA
LRMKLMMQMAYPDTA

SEQ ID NO: 234467 - protein, 15 aa, Artificial Sequence
  Description of Artificial Sequence: Synthetic peptide
  Seed: LRMKWMMAMKYPITA
LRMKLMMQMAYPETA

SEQ ID NO: 234468 - protein, 15 aa, Artificial Sequence
  Description of Artificial Sequence: Synthetic peptide
  Seed: LRMKWMMAMKYPITA
LRMKLMMQMAYPFTA

SEQ ID NO: 234469 - protein, 15 aa, Artificial Sequence
  Description of Artificial Sequence: Synthetic peptide
  Seed: LRMKWMMAMKYPITA
LRMKLMMQMAYPGTA

SEQ ID NO: 234470 - protein, 15 aa, Artificial Sequence
  Description of Artificial Sequence: Synthetic peptide
  Seed: LRMKWMMAMKYPITA
LRMKLMMQMAYPHTA

SEQ ID NO: 234471 - protein, 15 aa, Artificial Sequence
  Description of Artificial Sequence: Synthetic peptide
  Seed: LRMKWMMAMKYPITA
LRMKLMMQMAYPITA

SEQ ID NO: 234472 - protein, 15 aa, Artificial Sequence
  Description of Artificial Sequence: Synthetic peptide
  Seed: LRMKWMMAMKYPITA
LRMKLMMQMAYPKTA

SEQ ID NO: 234473 - protein, 15 aa, Artificial Sequence
  Description of Artificial Sequence: Synthetic peptide
  Seed: LRMKWMMAMKYPITA
LRMKLMMQMAYPLTA

SEQ ID NO: 234474 - protein, 15 aa, Artificial Sequence
  Description of Artificial Sequence: Synthetic peptide
  Seed: LRMKWMMAMKYPITA
LRMKLMMQMAYPMTA

SEQ ID NO: 234475 - protein, 15 aa, Artificial Sequence
  Description of Artificial Sequence: Synthetic peptide
  Seed: LRMKWMMAMKYPITA
LRMKLMMQMAYPNTA

SEQ ID NO: 234476 - protein, 15 aa, Artificial Sequence
  Description of Artificial Sequence: Synthetic peptide
  Seed: LRMKWMMAMKYPITA
LRMKLMMQMAYPPTA

SEQ ID NO: 234477 - protein, 15 aa, Artificial Sequence
  Description of Artificial Sequence: Synthetic peptide
  Seed: LRMKWMMAMKYPITA
LRMKLMMQMAYPQTA

SEQ ID NO: 234478 - protein, 15 aa, Artificial Sequence
  Description of Artificial Sequence: Synthetic peptide
  Seed: LRMKWMMAMKYPITA
LRMKLMMQMAYPRTA

SEQ ID NO: 234479 - protein, 15 aa, Artificial Sequence
  Description of Artificial Sequence: Synthetic peptide
  Seed: LRMKWMMAMKYPITA
LRMKLMMQMAYPSTA

SEQ ID NO: 234480 - protein, 15 aa, Artificial Sequence
  Description of Artificial Sequence: Synthetic peptide
  Seed: LRMKWMMAMKYPITA
LRMKLMMQMAYPTTA

SEQ ID NO: 234481 - protein, 15 aa, Artificial Sequence
  Description of Artificial Sequence: Synthetic peptide
  Seed: LRMKWMMAMKYPITA
LRMKLMMQMAYPVTA

SEQ ID NO: 234482 - protein, 15 aa, Artificial Sequence
  Description of Artificial Sequence: Synthetic peptide
  Seed: LRMKWMMAMKYPITA
LRMKLMMQMAYPWTA

SEQ ID NO: 234483 - protein, 15 aa, Artificial Sequence
  Description of Artificial Sequence: Synthetic peptide
  Seed: LRMKWMMAMKYPITA
LRMKLMMQMAYPYTA

SEQ ID NO: 234484 - protein, 15 aa, Artificial Sequence
  Description of Artificial Sequence: Synthetic peptide
  Seed: LRMKWMMAMKYPITA
LRMKLMMQMCYPITA

SEQ ID NO: 234485 - protein, 15 aa, Artificial Sequence
  Description of Artificial Sequence: Synthetic peptide
  Seed: LRMKWMMAMKYPITA
LRMKLMMQMCYPLTA

SEQ ID NO: 234486 - protein, 15 aa, Artificial Sequence
  Description of Artificial Sequence: Synthetic peptide
  Seed: LRMKWMMAMKYPITA
LRMKLMMQMCYPVTA

SEQ ID NO: 234487 - protein, 15 aa, Artificial Sequence
  Description of Artificial Sequence: Synthetic peptide
  Seed: LRMKWMMAMKYPITA
LRMKLMMQMFYPITA

SEQ ID NO: 234488 - protein, 15 aa, Artificial Sequence
  Description of Artificial Sequence: Synthetic peptide
  Seed: LRMKWMMAMKYPITA
LRMKLMMQMFYPLTA

SEQ ID NO: 234489 - protein, 15 aa, Artificial Sequence
  Description of Artificial Sequence: Synthetic peptide
  Seed: LRMKWMMAMKYPITA
LRMKLMMQMFYPVTA

SEQ ID NO: 234490 - protein, 15 aa, Artificial Sequence
  Description of Artificial Sequence: Synthetic peptide
  Seed: LRMKWMMAMKYPITA
LRMKLMMQMGYPATA

SEQ ID NO: 234491 - protein, 15 aa, Artificial Sequence
  Description of Artificial Sequence: Synthetic peptide
  Seed: LRMKWMMAMKYPITA
LRMKLMMQMGYPCTA

SEQ ID NO: 234492 - protein, 15 aa, Artificial Sequence
  Description of Artificial Sequence: Synthetic peptide
  Seed: LRMKWMMAMKYPITA
LRMKLMMQMGYPFTA

SEQ ID NO: 234493 - protein, 15 aa, Artificial Sequence
  Description of Artificial Sequence: Synthetic peptide
  Seed: LRMKWMMAMKYPITA
LRMKLMMQMGYPGTA

SEQ ID NO: 234494 - protein, 15 aa, Artificial Sequence
  Description of Artificial Sequence: Synthetic peptide
  Seed: LRMKWMMAMKYPITA
LRMKLMMQMGYPHTA

SEQ ID NO: 234495 - protein, 15 aa, Artificial Sequence
  Description of Artificial Sequence: Synthetic peptide
  Seed: LRMKWMMAMKYPITA
LRMKLMMQMGYPITA

SEQ ID NO: 234496 - protein, 15 aa, Artificial Sequence
  Description of Artificial Sequence: Synthetic peptide
  Seed: LRMKWMMAMKYPITA
LRMKLMMQMGYPLTA

SEQ ID NO: 234497 - protein, 15 aa, Artificial Sequence
  Description of Artificial Sequence: Synthetic peptide
  Seed: LRMKWMMAMKYPITA
LRMKLMMQMGYPMTA

SEQ ID NO: 234498 - protein, 15 aa, Artificial Sequence
  Description of Artificial Sequence: Synthetic peptide
  Seed: LRMKWMMAMKYPITA
LRMKLMMQMGYPNTA

SEQ ID NO: 234499 - protein, 15 aa, Artificial Sequence
  Description of Artificial Sequence: Synthetic peptide
  Seed: LRMKWMMAMKYPITA
LRMKLMMQMGYPPTA

SEQ ID NO: 234500 - protein, 15 aa, Artificial Sequence
  Description of Artificial Sequence: Synthetic peptide
  Seed: LRMKWMMAMKYPITA
LRMKLMMQMGYPQTA

SEQ ID NO: 234501 - protein, 15 aa, Artificial Sequence
  Description of Artificial Sequence: Synthetic peptide
  Seed: LRMKWMMAMKYPITA
LRMKLMMQMGYPSTA

SEQ ID NO: 234502 - protein, 15 aa, Artificial Sequence
  Description of Artificial Sequence: Synthetic peptide
  Seed: LRMKWMMAMKYPITA
LRMKLMMQMGYPTTA

SEQ ID NO: 234503 - protein, 15 aa, Artificial Sequence
  Description of Artificial Sequence: Synthetic peptide
  Seed: LRMKWMMAMKYPITA
LRMKLMMQMGYPVTA

SEQ ID NO: 234504 - protein, 15 aa, Artificial Sequence
  Description of Artificial Sequence: Synthetic peptide
  Seed: LRMKWMMAMKYPITA
LRMKLMMQMGYPYTA

SEQ ID NO: 234505 - protein, 15 aa, Artificial Sequence
  Description of Artificial Sequence: Synthetic peptide
  Seed: LRMKWMMAMKYPITA
LRMKLMMQMHYPATA

SEQ ID NO: 234506 - protein, 15 aa, Artificial Sequence
  Description of Artificial Sequence: Synthetic peptide
  Seed: LRMKWMMAMKYPITA
LRMKLMMQMHYPFTA

SEQ ID NO: 234507 - protein, 15 aa, Artificial Sequence
  Description of Artificial Sequence: Synthetic peptide
  Seed: LRMKWMMAMKYPITA
LRMKLMMQMHYPITA

SEQ ID NO: 234508 - protein, 15 aa, Artificial Sequence
  Description of Artificial Sequence: Synthetic peptide
  Seed: LRMKWMMAMKYPITA
LRMKLMMQMHYPLTA

SEQ ID NO: 234509 - protein, 15 aa, Artificial Sequence
  Description of Artificial Sequence: Synthetic peptide
  Seed: LRMKWMMAMKYPITA
LRMKLMMQMHYPRTA

SEQ ID NO: 234510 - protein, 15 aa, Artificial Sequence
  Description of Artificial Sequence: Synthetic peptide
  Seed: LRMKWMMAMKYPITA
LRMKLMMQMHYPSTA

SEQ ID NO: 234511 - protein, 15 aa, Artificial Sequence
  Description of Artificial Sequence: Synthetic peptide
  Seed: LRMKWMMAMKYPITA
LRMKLMMQMHYPVTA

SEQ ID NO: 234512 - protein, 15 aa, Artificial Sequence
  Description of Artificial Sequence: Synthetic peptide
  Seed: LRMKWMMAMKYPITA
LRMKLMMQMHYPYTA

SEQ ID NO: 234513 - protein, 15 aa, Artificial Sequence
  Description of Artificial Sequence: Synthetic peptide
  Seed: LRMKWMMAMKYPITA
LRMKLMMQMIYPATA

SEQ ID NO: 234514 - protein, 15 aa, Artificial Sequence
  Description of Artificial Sequence: Synthetic peptide
  Seed: LRMKWMMAMKYPITA
LRMKLMMQMIYPCTA

SEQ ID NO: 234515 - protein, 15 aa, Artificial Sequence
  Description of Artificial Sequence: Synthetic peptide
  Seed: LRMKWMMAMKYPITA
LRMKLMMQMIYPGTA

SEQ ID NO: 234516 - protein, 15 aa, Artificial Sequence
  Description of Artificial Sequence: Synthetic peptide
  Seed: LRMKWMMAMKYPITA
LRMKLMMQMIYPHTA

SEQ ID NO: 234517 - protein, 15 aa, Artificial Sequence
  Description of Artificial Sequence: Synthetic peptide
  Seed: LRMKWMMAMKYPITA
LRMKLMMQMIYPITA

SEQ ID NO: 234518 - protein, 15 aa, Artificial Sequence
  Description of Artificial Sequence: Synthetic peptide
  Seed: LRMKWMMAMKYPITA
LRMKLMMQMIYPLTA

SEQ ID NO: 234519 - protein, 15 aa, Artificial Sequence
  Description of Artificial Sequence: Synthetic peptide
  Seed: LRMKWMMAMKYPITA
LRMKLMMQMIYPMTA

SEQ ID NO: 234520 - protein, 15 aa, Artificial Sequence
  Description of Artificial Sequence: Synthetic peptide
  Seed: LRMKWMMAMKYPITA
LRMKLMMQMIYPNTA

SEQ ID NO: 234521 - protein, 15 aa, Artificial Sequence
  Description of Artificial Sequence: Synthetic peptide
  Seed: LRMKWMMAMKYPITA
LRMKLMMQMIYPQTA

SEQ ID NO: 234522 - protein, 15 aa, Artificial Sequence
  Description of Artificial Sequence: Synthetic peptide
  Seed: LRMKWMMAMKYPITA
LRMKLMMQMIYPSTA

SEQ ID NO: 234523 - protein, 15 aa, Artificial Sequence
  Description of Artificial Sequence: Synthetic peptide
  Seed: LRMKWMMAMKYPITA
LRMKLMMQMIYPTTA

SEQ ID NO: 234524 - protein, 15 aa, Artificial Sequence
  Description of Artificial Sequence: Synthetic peptide
  Seed: LRMKWMMAMKYPITA
LRMKLMMQMIYPVTA

SEQ ID NO: 234525 - protein, 15 aa, Artificial Sequence
  Description of Artificial Sequence: Synthetic peptide
  Seed: LRMKWMMAMKYPITA
LRMKLMMQMKYPATA

SEQ ID NO: 234526 - protein, 15 aa, Artificial Sequence
  Description of Artificial Sequence: Synthetic peptide
  Seed: LRMKWMMAMKYPITA
LRMKLMMQMKYPFTA

SEQ ID NO: 234527 - protein, 15 aa, Artificial Sequence
  Description of Artificial Sequence: Synthetic peptide
  Seed: LRMKWMMAMKYPITA
LRMKLMMQMKYPGTA

SEQ ID NO: 234528 - protein, 15 aa, Artificial Sequence
  Description of Artificial Sequence: Synthetic peptide
  Seed: LRMKWMMAMKYPITA
LRMKLMMQMKYPHTA

SEQ ID NO: 234529 - protein, 15 aa, Artificial Sequence
  Description of Artificial Sequence: Synthetic peptide
  Seed: LRMKWMMAMKYPITA
LRMKLMMQMKYPITA

SEQ ID NO: 234530 - protein, 15 aa, Artificial Sequence
  Description of Artificial Sequence: Synthetic peptide
  Seed: LRMKWMMAMKYPITA
LRMKLMMQMKYPKTA

SEQ ID NO: 234531 - protein, 15 aa, Artificial Sequence
  Description of Artificial Sequence: Synthetic peptide
  Seed: LRMKWMMAMKYPITA
LRMKLMMQMKYPLTA

SEQ ID NO: 234532 - protein, 15 aa, Artificial Sequence
  Description of Artificial Sequence: Synthetic peptide
  Seed: LRMKWMMAMKYPITA
LRMKLMMQMKYPMTA

SEQ ID NO: 234533 - protein, 15 aa, Artificial Sequence
  Description of Artificial Sequence: Synthetic peptide
  Seed: LRMKWMMAMKYPITA
LRMKLMMQMKYPNTA

SEQ ID NO: 234534 - protein, 15 aa, Artificial Sequence
  Description of Artificial Sequence: Synthetic peptide
  Seed: LRMKWMMAMKYPITA
LRMKLMMQMKYPPTA

SEQ ID NO: 234535 - protein, 15 aa, Artificial Sequence
  Description of Artificial Sequence: Synthetic peptide
  Seed: LRMKWMMAMKYPITA
LRMKLMMQMKYPQTA

SEQ ID NO: 234536 - protein, 15 aa, Artificial Sequence
  Description of Artificial Sequence: Synthetic peptide
  Seed: LRMKWMMAMKYPITA
LRMKLMMQMKYPRTA

SEQ ID NO: 234537 - protein, 15 aa, Artificial Sequence
  Description of Artificial Sequence: Synthetic peptide
  Seed: LRMKWMMAMKYPITA
LRMKLMMQMKYPSTA

SEQ ID NO: 234538 - protein, 15 aa, Artificial Sequence
  Description of Artificial Sequence: Synthetic peptide
  Seed: LRMKWMMAMKYPITA
LRMKLMMQMKYPTTA

SEQ ID NO: 234539 - protein, 15 aa, Artificial Sequence
  Description of Artificial Sequence: Synthetic peptide
  Seed: LRMKWMMAMKYPITA
LRMKLMMQMKYPVTA

SEQ ID NO: 234540 - protein, 15 aa, Artificial Sequence
  Description of Artificial Sequence: Synthetic peptide
  Seed: LRMKWMMAMKYPITA
LRMKLMMQMKYPWTA

SEQ ID NO: 234541 - protein, 15 aa, Artificial Sequence
  Description of Artificial Sequence: Synthetic peptide
  Seed: LRMKWMMAMKYPITA
LRMKLMMQMKYPYTA

SEQ ID NO: 234542 - protein, 15 aa, Artificial Sequence
  Description of Artificial Sequence: Synthetic peptide
  Seed: LRMKWMMAMKYPITA
LRMKLMMQMNYPATA

SEQ ID NO: 234543 - protein, 15 aa, Artificial Sequence
  Description of Artificial Sequence: Synthetic peptide
  Seed: LRMKWMMAMKYPITA
LRMKLMMQMNYPCTA

SEQ ID NO: 234544 - protein, 15 aa, Artificial Sequence
  Description of Artificial Sequence: Synthetic peptide
  Seed: LRMKWMMAMKYPITA
LRMKLMMQMNYPDTA

SEQ ID NO: 234545 - protein, 15 aa, Artificial Sequence
  Description of Artificial Sequence: Synthetic peptide
  Seed: LRMKWMMAMKYPITA
LRMKLMMQMNYPETA

SEQ ID NO: 234546 - protein, 15 aa, Artificial Sequence
  Description of Artificial Sequence: Synthetic peptide
  Seed: LRMKWMMAMKYPITA
LRMKLMMQMNYPFTA

SEQ ID NO: 234547 - protein, 15 aa, Artificial Sequence
  Description of Artificial Sequence: Synthetic peptide
  Seed: LRMKWMMAMKYPITA
LRMKLMMQMNYPGTA

SEQ ID NO: 234548 - protein, 15 aa, Artificial Sequence
  Description of Artificial Sequence: Synthetic peptide
  Seed: LRMKWMMAMKYPITA
LRMKLMMQMNYPITA

SEQ ID NO: 234549 - protein, 15 aa, Artificial Sequence
  Description of Artificial Sequence: Synthetic peptide
  Seed: LRMKWMMAMKYPITA
LRMKLMMQMNYPLTA

SEQ ID NO: 234550 - protein, 15 aa, Artificial Sequence
  Description of Artificial Sequence: Synthetic peptide
  Seed: LRMKWMMAMKYPITA
LRMKLMMQMNYPMTA

SEQ ID NO: 234551 - protein, 15 aa, Artificial Sequence
  Description of Artificial Sequence: Synthetic peptide
  Seed: LRMKWMMAMKYPITA
LRMKLMMQMNYPRTA

SEQ ID NO: 234552 - protein, 15 aa, Artificial Sequence
  Description of Artificial Sequence: Synthetic peptide
  Seed: LRMKWMMAMKYPITA
LRMKLMMQMNYPSTA

SEQ ID NO: 234553 - protein, 15 aa, Artificial Sequence
  Description of Artificial Sequence: Synthetic peptide
  Seed: LRMKWMMAMKYPITA
LRMKLMMQMNYPTTA

SEQ ID NO: 234554 - protein, 15 aa, Artificial Sequence
  Description of Artificial Sequence: Synthetic peptide
  Seed: LRMKWMMAMKYPITA
LRMKLMMQMNYPVTA

SEQ ID NO: 234555 - protein, 15 aa, Artificial Sequence
  Description of Artificial Sequence: Synthetic peptide
  Seed: LRMKWMMAMKYPITA
LRMKLMMQMNYPYTA

SEQ ID NO: 234556 - protein, 15 aa, Artificial Sequence
  Description of Artificial Sequence: Synthetic peptide
  Seed: LRMKWMMAMKYPITA
LRMKLMMQMPYPATA

SEQ ID NO: 234557 - protein, 15 aa, Artificial Sequence
  Description of Artificial Sequence: Synthetic peptide
  Seed: LRMKWMMAMKYPITA
LRMKLMMQMPYPCTA

SEQ ID NO: 234558 - protein, 15 aa, Artificial Sequence
  Description of Artificial Sequence: Synthetic peptide
  Seed: LRMKWMMAMKYPITA
LRMKLMMQMPYPFTA

SEQ ID NO: 234559 - protein, 15 aa, Artificial Sequence
  Description of Artificial Sequence: Synthetic peptide
  Seed: LRMKWMMAMKYPITA
LRMKLMMQMPYPGTA

SEQ ID NO: 234560 - protein, 15 aa, Artificial Sequence
  Description of Artificial Sequence: Synthetic peptide
  Seed: LRMKWMMAMKYPITA
LRMKLMMQMPYPHTA

SEQ ID NO: 234561 - protein, 15 aa, Artificial Sequence
  Description of Artificial Sequence: Synthetic peptide
  Seed: LRMKWMMAMKYPITA
LRMKLMMQMPYPITA

SEQ ID NO: 234562 - protein, 15 aa, Artificial Sequence
  Description of Artificial Sequence: Synthetic peptide
  Seed: LRMKWMMAMKYPITA
LRMKLMMQMPYPLTA

SEQ ID NO: 234563 - protein, 15 aa, Artificial Sequence
  Description of Artificial Sequence: Synthetic peptide
  Seed: LRMKWMMAMKYPITA
LRMKLMMQMPYPMTA

SEQ ID NO: 234564 - protein, 15 aa, Artificial Sequence
  Description of Artificial Sequence: Synthetic peptide
  Seed: LRMKWMMAMKYPITA
LRMKLMMQMPYPNTA

SEQ ID NO: 234565 - protein, 15 aa, Artificial Sequence
  Description of Artificial Sequence: Synthetic peptide
  Seed: LRMKWMMAMKYPITA
LRMKLMMQMPYPQTA

SEQ ID NO: 234566 - protein, 15 aa, Artificial Sequence
  Description of Artificial Sequence: Synthetic peptide
  Seed: LRMKWMMAMKYPITA
LRMKLMMQMPYPRTA

SEQ ID NO: 234567 - protein, 15 aa, Artificial Sequence
  Description of Artificial Sequence: Synthetic peptide
  Seed: LRMKWMMAMKYPITA
LRMKLMMQMPYPSTA

SEQ ID NO: 234568 - protein, 15 aa, Artificial Sequence
  Description of Artificial Sequence: Synthetic peptide
  Seed: LRMKWMMAMKYPITA
LRMKLMMQMPYPTTA

SEQ ID NO: 234569 - protein, 15 aa, Artificial Sequence
  Description of Artificial Sequence: Synthetic peptide
  Seed: LRMKWMMAMKYPITA
LRMKLMMQMPYPVTA

SEQ ID NO: 234570 - protein, 15 aa, Artificial Sequence
  Description of Artificial Sequence: Synthetic peptide
  Seed: LRMKWMMAMKYPITA
LRMKLMMQMPYPYTA

SEQ ID NO: 234571 - protein, 15 aa, Artificial Sequence
  Description of Artificial Sequence: Synthetic peptide
  Seed: LRMKWMMAMKYPITA
LRMKLMMQMQYPITA

SEQ ID NO: 234572 - protein, 15 aa, Artificial Sequence
  Description of Artificial Sequence: Synthetic peptide
  Seed: LRMKWMMAMKYPITA
LRMKLMMQMQYPLTA

SEQ ID NO: 234573 - protein, 15 aa, Artificial Sequence
  Description of Artificial Sequence: Synthetic peptide
  Seed: LRMKWMMAMKYPITA
LRMKLMMQMQYPVTA

SEQ ID NO: 234574 - protein, 15 aa, Artificial Sequence
  Description of Artificial Sequence: Synthetic peptide
  Seed: LRMKWMMAMKYPITA
LRMKLMMQMRYPATA

SEQ ID NO: 234575 - protein, 15 aa, Artificial Sequence
  Description of Artificial Sequence: Synthetic peptide
  Seed: LRMKWMMAMKYPITA
LRMKLMMQMRYPCTA

SEQ ID NO: 234576 - protein, 15 aa, Artificial Sequence
  Description of Artificial Sequence: Synthetic peptide
  Seed: LRMKWMMAMKYPITA
LRMKLMMQMRYPDTA

SEQ ID NO: 234577 - protein, 15 aa, Artificial Sequence
  Description of Artificial Sequence: Synthetic peptide
  Seed: LRMKWMMAMKYPITA
LRMKLMMQMRYPETA

SEQ ID NO: 234578 - protein, 15 aa, Artificial Sequence
  Description of Artificial Sequence: Synthetic peptide
  Seed: LRMKWMMAMKYPITA
LRMKLMMQMRYPFTA

SEQ ID NO: 234579 - protein, 15 aa, Artificial Sequence
  Description of Artificial Sequence: Synthetic peptide
  Seed: LRMKWMMAMKYPITA
LRMKLMMQMRYPGTA

SEQ ID NO: 234580 - protein, 15 aa, Artificial Sequence
  Description of Artificial Sequence: Synthetic peptide
  Seed: LRMKWMMAMKYPITA
LRMKLMMQMRYPHTA

SEQ ID NO: 234581 - protein, 15 aa, Artificial Sequence
  Description of Artificial Sequence: Synthetic peptide
  Seed: LRMKWMMAMKYPITA
LRMKLMMQMRYPITA

SEQ ID NO: 234582 - protein, 15 aa, Artificial Sequence
  Description of Artificial Sequence: Synthetic peptide
  Seed: LRMKWMMAMKYPITA
LRMKLMMQMRYPKTA

SEQ ID NO: 234583 - protein, 15 aa, Artificial Sequence
  Description of Artificial Sequence: Synthetic peptide
  Seed: LRMKWMMAMKYPITA
LRMKLMMQMRYPLTA

SEQ ID NO: 234584 - protein, 15 aa, Artificial Sequence
  Description of Artificial Sequence: Synthetic peptide
  Seed: LRMKWMMAMKYPITA
LRMKLMMQMRYPMTA

SEQ ID NO: 234585 - protein, 15 aa, Artificial Sequence
  Description of Artificial Sequence: Synthetic peptide
  Seed: LRMKWMMAMKYPITA
LRMKLMMQMRYPNTA

SEQ ID NO: 234586 - protein, 15 aa, Artificial Sequence
  Description of Artificial Sequence: Synthetic peptide
  Seed: LRMKWMMAMKYPITA
LRMKLMMQMRYPPTA

SEQ ID NO: 234587 - protein, 15 aa, Artificial Sequence
  Description of Artificial Sequence: Synthetic peptide
  Seed: LRMKWMMAMKYPITA
LRMKLMMQMRYPQTA

SEQ ID NO: 234588 - protein, 15 aa, Artificial Sequence
  Description of Artificial Sequence: Synthetic peptide
  Seed: LRMKWMMAMKYPITA
LRMKLMMQMRYPRTA

SEQ ID NO: 234589 - protein, 15 aa, Artificial Sequence
  Description of Artificial Sequence: Synthetic peptide
  Seed: LRMKWMMAMKYPITA
LRMKLMMQMRYPSTA

SEQ ID NO: 234590 - protein, 15 aa, Artificial Sequence
  Description of Artificial Sequence: Synthetic peptide
  Seed: LRMKWMMAMKYPITA
LRMKLMMQMRYPTTA

SEQ ID NO: 234591 - protein, 15 aa, Artificial Sequence
  Description of Artificial Sequence: Synthetic peptide
  Seed: LRMKWMMAMKYPITA
LRMKLMMQMRYPVTA

SEQ ID NO: 234592 - protein, 15 aa, Artificial Sequence
  Description of Artificial Sequence: Synthetic peptide
  Seed: LRMKWMMAMKYPITA
LRMKLMMQMRYPWTA

SEQ ID NO: 234593 - protein, 15 aa, Artificial Sequence
  Description of Artificial Sequence: Synthetic peptide
  Seed: LRMKWMMAMKYPITA
LRMKLMMQMRYPYTA

SEQ ID NO: 234594 - protein, 15 aa, Artificial Sequence
  Description of Artificial Sequence: Synthetic peptide
  Seed: LRMKWMMAMKYPITA
LRMKLMMQMSYPATA

SEQ ID NO: 234595 - protein, 15 aa, Artificial Sequence
  Description of Artificial Sequence: Synthetic peptide
  Seed: LRMKWMMAMKYPITA
LRMKLMMQMSYPCTA

SEQ ID NO: 234596 - protein, 15 aa, Artificial Sequence
  Description of Artificial Sequence: Synthetic peptide
  Seed: LRMKWMMAMKYPITA
LRMKLMMQMSYPDTA

SEQ ID NO: 234597 - protein, 15 aa, Artificial Sequence
  Description of Artificial Sequence: Synthetic peptide
  Seed: LRMKWMMAMKYPITA
LRMKLMMQMSYPFTA

SEQ ID NO: 234598 - protein, 15 aa, Artificial Sequence
  Description of Artificial Sequence: Synthetic peptide
  Seed: LRMKWMMAMKYPITA
LRMKLMMQMSYPGTA

SEQ ID NO: 234599 - protein, 15 aa, Artificial Sequence
  Description of Artificial Sequence: Synthetic peptide
  Seed: LRMKWMMAMKYPITA
LRMKLMMQMSYPHTA

SEQ ID NO: 234600 - protein, 15 aa, Artificial Sequence
  Description of Artificial Sequence: Synthetic peptide
  Seed: LRMKWMMAMKYPITA
LRMKLMMQMSYPITA

SEQ ID NO: 234601 - protein, 15 aa, Artificial Sequence
  Description of Artificial Sequence: Synthetic peptide
  Seed: LRMKWMMAMKYPITA
LRMKLMMQMSYPLTA

SEQ ID NO: 234602 - protein, 15 aa, Artificial Sequence
  Description of Artificial Sequence: Synthetic peptide
  Seed: LRMKWMMAMKYPITA
LRMKLMMQMSYPMTA

SEQ ID NO: 234603 - protein, 15 aa, Artificial Sequence
  Description of Artificial Sequence: Synthetic peptide
  Seed: LRMKWMMAMKYPITA
LRMKLMMQMSYPNTA

SEQ ID NO: 234604 - protein, 15 aa, Artificial Sequence
  Description of Artificial Sequence: Synthetic peptide
  Seed: LRMKWMMAMKYPITA
LRMKLMMQMSYPQTA

SEQ ID NO: 234605 - protein, 15 aa, Artificial Sequence
  Description of Artificial Sequence: Synthetic peptide
  Seed: LRMKWMMAMKYPITA
LRMKLMMQMSYPRTA

SEQ ID NO: 234606 - protein, 15 aa, Artificial Sequence
  Description of Artificial Sequence: Synthetic peptide
  Seed: LRMKWMMAMKYPITA
LRMKLMMQMSYPSTA

SEQ ID NO: 234607 - protein, 15 aa, Artificial Sequence
  Description of Artificial Sequence: Synthetic peptide
  Seed: LRMKWMMAMKYPITA
LRMKLMMQMSYPTTA

SEQ ID NO: 234608 - protein, 15 aa, Artificial Sequence
  Description of Artificial Sequence: Synthetic peptide
  Seed: LRMKWMMAMKYPITA
LRMKLMMQMSYPVTA

SEQ ID NO: 234609 - protein, 15 aa, Artificial Sequence
  Description of Artificial Sequence: Synthetic peptide
  Seed: LRMKWMMAMKYPITA
LRMKLMMQMSYPYTA

SEQ ID NO: 234610 - protein, 15 aa, Artificial Sequence
  Description of Artificial Sequence: Synthetic peptide
  Seed: LRMKWMMAMKYPITA
LRMKLMMQMTYPATA

SEQ ID NO: 234611 - protein, 15 aa, Artificial Sequence
  Description of Artificial Sequence: Synthetic peptide
  Seed: LRMKWMMAMKYPITA
LRMKLMMQMTYPCTA

SEQ ID NO: 234612 - protein, 15 aa, Artificial Sequence
  Description of Artificial Sequence: Synthetic peptide
  Seed: LRMKWMMAMKYPITA
LRMKLMMQMTYPDTA

SEQ ID NO: 234613 - protein, 15 aa, Artificial Sequence
  Description of Artificial Sequence: Synthetic peptide
  Seed: LRMKWMMAMKYPITA
LRMKLMMQMTYPETA

SEQ ID NO: 234614 - protein, 15 aa, Artificial Sequence
  Description of Artificial Sequence: Synthetic peptide
  Seed: LRMKWMMAMKYPITA
LRMKLMMQMTYPFTA

SEQ ID NO: 234615 - protein, 15 aa, Artificial Sequence
  Description of Artificial Sequence: Synthetic peptide
  Seed: LRMKWMMAMKYPITA
LRMKLMMQMTYPGTA

SEQ ID NO: 234616 - protein, 15 aa, Artificial Sequence
  Description of Artificial Sequence: Synthetic peptide
  Seed: LRMKWMMAMKYPITA
LRMKLMMQMTYPHTA

SEQ ID NO: 234617 - protein, 15 aa, Artificial Sequence
  Description of Artificial Sequence: Synthetic peptide
  Seed: LRMKWMMAMKYPITA
LRMKLMMQMTYPITA

SEQ ID NO: 234618 - protein, 15 aa, Artificial Sequence
  Description of Artificial Sequence: Synthetic peptide
  Seed: LRMKWMMAMKYPITA
LRMKLMMQMTYPLTA

SEQ ID NO: 234619 - protein, 15 aa, Artificial Sequence
  Description of Artificial Sequence: Synthetic peptide
  Seed: LRMKWMMAMKYPITA
LRMKLMMQMTYPMTA

SEQ ID NO: 234620 - protein, 15 aa, Artificial Sequence
  Description of Artificial Sequence: Synthetic peptide
  Seed: LRMKWMMAMKYPITA
LRMKLMMQMTYPNTA

SEQ ID NO: 234621 - protein, 15 aa, Artificial Sequence
  Description of Artificial Sequence: Synthetic peptide
  Seed: LRMKWMMAMKYPITA
LRMKLMMQMTYPQTA

SEQ ID NO: 234622 - protein, 15 aa, Artificial Sequence
  Description of Artificial Sequence: Synthetic peptide
  Seed: LRMKWMMAMKYPITA
LRMKLMMQMTYPRTA

SEQ ID NO: 234623 - protein, 15 aa, Artificial Sequence
  Description of Artificial Sequence: Synthetic peptide
  Seed: LRMKWMMAMKYPITA
LRMKLMMQMTYPSTA

SEQ ID NO: 234624 - protein, 15 aa, Artificial Sequence
  Description of Artificial Sequence: Synthetic peptide
  Seed: LRMKWMMAMKYPITA
LRMKLMMQMTYPTTA

SEQ ID NO: 234625 - protein, 15 aa, Artificial Sequence
  Description of Artificial Sequence: Synthetic peptide
  Seed: LRMKWMMAMKYPITA
LRMKLMMQMTYPVTA

SEQ ID NO: 234626 - protein, 15 aa, Artificial Sequence
  Description of Artificial Sequence: Synthetic peptide
  Seed: LRMKWMMAMKYPITA
LRMKLMMQMTYPYTA

SEQ ID NO: 234627 - protein, 15 aa, Artificial Sequence
  Description of Artificial Sequence: Synthetic peptide
  Seed: LRMKWMMAMKYPITA
LRMKLMMQMVYPATA

SEQ ID NO: 234628 - protein, 15 aa, Artificial Sequence
  Description of Artificial Sequence: Synthetic peptide
  Seed: LRMKWMMAMKYPITA
LRMKLMMQMVYPCTA

SEQ ID NO: 234629 - protein, 15 aa, Artificial Sequence
  Description of Artificial Sequence: Synthetic peptide
  Seed: LRMKWMMAMKYPITA
LRMKLMMQMVYPDTA

SEQ ID NO: 234630 - protein, 15 aa, Artificial Sequence
  Description of Artificial Sequence: Synthetic peptide
  Seed: LRMKWMMAMKYPITA
LRMKLMMQMVYPGTA

SEQ ID NO: 234631 - protein, 15 aa, Artificial Sequence
  Description of Artificial Sequence: Synthetic peptide
  Seed: LRMKWMMAMKYPITA
LRMKLMMQMVYPHTA

SEQ ID NO: 234632 - protein, 15 aa, Artificial Sequence
  Description of Artificial Sequence: Synthetic peptide
  Seed: LRMKWMMAMKYPITA
LRMKLMMQMVYPITA

SEQ ID NO: 234633 - protein, 15 aa, Artificial Sequence
  Description of Artificial Sequence: Synthetic peptide
  Seed: LRMKWMMAMKYPITA
LRMKLMMQMVYPLTA

SEQ ID NO: 234634 - protein, 15 aa, Artificial Sequence
  Description of Artificial Sequence: Synthetic peptide
  Seed: LRMKWMMAMKYPITA
LRMKLMMQMVYPMTA

SEQ ID NO: 234635 - protein, 15 aa, Artificial Sequence
  Description of Artificial Sequence: Synthetic peptide
  Seed: LRMKWMMAMKYPITA
LRMKLMMQMVYPNTA

SEQ ID NO: 234636 - protein, 15 aa, Artificial Sequence
  Description of Artificial Sequence: Synthetic peptide
  Seed: LRMKWMMAMKYPITA
LRMKLMMQMVYPQTA

SEQ ID NO: 234637 - protein, 15 aa, Artificial Sequence
  Description of Artificial Sequence: Synthetic peptide
  Seed: LRMKWMMAMKYPITA
LRMKLMMQMVYPRTA

SEQ ID NO: 234638 - protein, 15 aa, Artificial Sequence
  Description of Artificial Sequence: Synthetic peptide
  Seed: LRMKWMMAMKYPITA
LRMKLMMQMVYPSTA

SEQ ID NO: 234639 - protein, 15 aa, Artificial Sequence
  Description of Artificial Sequence: Synthetic peptide
  Seed: LRMKWMMAMKYPITA
LRMKLMMQMVYPTTA

SEQ ID NO: 234640 - protein, 15 aa, Artificial Sequence
  Description of Artificial Sequence: Synthetic peptide
  Seed: LRMKWMMAMKYPITA
LRMKLMMQMVYPVTA

SEQ ID NO: 234641 - protein, 15 aa, Artificial Sequence
  Description of Artificial Sequence: Synthetic peptide
  Seed: LRMKWMMAMKYPITA
LRMKLMMQMVYPYTA

SEQ ID NO: 234642 - protein, 15 aa, Artificial Sequence
  Description of Artificial Sequence: Synthetic peptide
  Seed: LRMKWMMAMKYPITA
LRMKLMMRMAYPATA

SEQ ID NO: 234643 - protein, 15 aa, Artificial Sequence
  Description of Artificial Sequence: Synthetic peptide
  Seed: LRMKWMMAMKYPITA
LRMKLMMRMAYPCTA

SEQ ID NO: 234644 - protein, 15 aa, Artificial Sequence
  Description of Artificial Sequence: Synthetic peptide
  Seed: LRMKWMMAMKYPITA
LRMKLMMRMAYPFTA

SEQ ID NO: 234645 - protein, 15 aa, Artificial Sequence
  Description of Artificial Sequence: Synthetic peptide
  Seed: LRMKWMMAMKYPITA
LRMKLMMRMAYPGTA

SEQ ID NO: 234646 - protein, 15 aa, Artificial Sequence
  Description of Artificial Sequence: Synthetic peptide
  Seed: LRMKWMMAMKYPITA
LRMKLMMRMAYPHTA

SEQ ID NO: 234647 - protein, 15 aa, Artificial Sequence
  Description of Artificial Sequence: Synthetic peptide
  Seed: LRMKWMMAMKYPITA
LRMKLMMRMAYPITA

SEQ ID NO: 234648 - protein, 15 aa, Artificial Sequence
  Description of Artificial Sequence: Synthetic peptide
  Seed: LRMKWMMAMKYPITA
LRMKLMMRMAYPLTA

SEQ ID NO: 234649 - protein, 15 aa, Artificial Sequence
  Description of Artificial Sequence: Synthetic peptide
  Seed: LRMKWMMAMKYPITA
LRMKLMMRMAYPMTA

SEQ ID NO: 234650 - protein, 15 aa, Artificial Sequence
  Description of Artificial Sequence: Synthetic peptide
  Seed: LRMKWMMAMKYPITA
LRMKLMMRMAYPQTA

SEQ ID NO: 234651 - protein, 15 aa, Artificial Sequence
  Description of Artificial Sequence: Synthetic peptide
  Seed: LRMKWMMAMKYPITA
LRMKLMMRMAYPRTA

SEQ ID NO: 234652 - protein, 15 aa, Artificial Sequence
  Description of Artificial Sequence: Synthetic peptide
  Seed: LRMKWMMAMKYPITA
LRMKLMMRMAYPSTA

SEQ ID NO: 234653 - protein, 15 aa, Artificial Sequence
  Description of Artificial Sequence: Synthetic peptide
  Seed: LRMKWMMAMKYPITA
LRMKLMMRMAYPTTA

SEQ ID NO: 234654 - protein, 15 aa, Artificial Sequence
  Description of Artificial Sequence: Synthetic peptide
  Seed: LRMKWMMAMKYPITA
LRMKLMMRMAYPVTA

SEQ ID NO: 234655 - protein, 15 aa, Artificial Sequence
  Description of Artificial Sequence: Synthetic peptide
  Seed: LRMKWMMAMKYPITA
LRMKLMMRMAYPYTA

SEQ ID NO: 234656 - protein, 15 aa, Artificial Sequence
  Description of Artificial Sequence: Synthetic peptide
  Seed: LRMKWMMAMKYPITA
LRMKLMMRMCYPRTA

SEQ ID NO: 234657 - protein, 15 aa, Artificial Sequence
  Description of Artificial Sequence: Synthetic peptide
  Seed: LRMKWMMAMKYPITA
LRMKLMMRMDYPFTA

SEQ ID NO: 234658 - protein, 15 aa, Artificial Sequence
  Description of Artificial Sequence: Synthetic peptide
  Seed: LRMKWMMAMKYPITA
LRMKLMMRMDYPLTA

SEQ ID NO: 234659 - protein, 15 aa, Artificial Sequence
  Description of Artificial Sequence: Synthetic peptide
  Seed: LRMKWMMAMKYPITA
LRMKLMMRMDYPRTA

SEQ ID NO: 234660 - protein, 15 aa, Artificial Sequence
  Description of Artificial Sequence: Synthetic peptide
  Seed: LRMKWMMAMKYPITA
LRMKLMMRMDYPVTA

SEQ ID NO: 234661 - protein, 15 aa, Artificial Sequence
  Description of Artificial Sequence: Synthetic peptide
  Seed: LRMKWMMAMKYPITA
LRMKLMMRMDYPYTA

SEQ ID NO: 234662 - protein, 15 aa, Artificial Sequence
  Description of Artificial Sequence: Synthetic peptide
  Seed: LRMKWMMAMKYPITA
LRMKLMMRMEYPRTA

SEQ ID NO: 234663 - protein, 15 aa, Artificial Sequence
  Description of Artificial Sequence: Synthetic peptide
  Seed: LRMKWMMAMKYPITA
LRMKLMMRMEYPYTA

SEQ ID NO: 234664 - protein, 15 aa, Artificial Sequence
  Description of Artificial Sequence: Synthetic peptide
  Seed: LRMKWMMAMKYPITA
LRMKLMMRMGYPATA

SEQ ID NO: 234665 - protein, 15 aa, Artificial Sequence
  Description of Artificial Sequence: Synthetic peptide
  Seed: LRMKWMMAMKYPITA
LRMKLMMRMGYPITA

SEQ ID NO: 234666 - protein, 15 aa, Artificial Sequence
  Description of Artificial Sequence: Synthetic peptide
  Seed: LRMKWMMAMKYPITA
LRMKLMMRMGYPLTA

SEQ ID NO: 234667 - protein, 15 aa, Artificial Sequence
  Description of Artificial Sequence: Synthetic peptide
  Seed: LRMKWMMAMKYPITA
LRMKLMMRMGYPMTA

SEQ ID NO: 234668 - protein, 15 aa, Artificial Sequence
  Description of Artificial Sequence: Synthetic peptide
  Seed: LRMKWMMAMKYPITA
LRMKLMMRMGYPRTA

SEQ ID NO: 234669 - protein, 15 aa, Artificial Sequence
  Description of Artificial Sequence: Synthetic peptide
  Seed: LRMKWMMAMKYPITA
LRMKLMMRMGYPVTA

SEQ ID NO: 234670 - protein, 15 aa, Artificial Sequence
  Description of Artificial Sequence: Synthetic peptide
  Seed: LRMKWMMAMKYPITA
LRMKLMMRMGYPYTA

SEQ ID NO: 234671 - protein, 15 aa, Artificial Sequence
  Description of Artificial Sequence: Synthetic peptide
  Seed: LRMKWMMAMKYPITA
LRMKLMMRMHYPATA

SEQ ID NO: 234672 - protein, 15 aa, Artificial Sequence
  Description of Artificial Sequence: Synthetic peptide
  Seed: LRMKWMMAMKYPITA
LRMKLMMRMHYPGTA

SEQ ID NO: 234673 - protein, 15 aa, Artificial Sequence
  Description of Artificial Sequence: Synthetic peptide
  Seed: LRMKWMMAMKYPITA
LRMKLMMRMHYPQTA

SEQ ID NO: 234674 - protein, 15 aa, Artificial Sequence
  Description of Artificial Sequence: Synthetic peptide
  Seed: LRMKWMMAMKYPITA
LRMKLMMRMHYPRTA

SEQ ID NO: 234675 - protein, 15 aa, Artificial Sequence
  Description of Artificial Sequence: Synthetic peptide
  Seed: LRMKWMMAMKYPITA
LRMKLMMRMHYPSTA

SEQ ID NO: 234676 - protein, 15 aa, Artificial Sequence
  Description of Artificial Sequence: Synthetic peptide
  Seed: LRMKWMMAMKYPITA
LRMKLMMRMHYPYTA

SEQ ID NO: 234677 - protein, 15 aa, Artificial Sequence
  Description of Artificial Sequence: Synthetic peptide
  Seed: LRMKWMMAMKYPITA
LRMKLMMRMIYPRTA

SEQ ID NO: 234678 - protein, 15 aa, Artificial Sequence
  Description of Artificial Sequence: Synthetic peptide
  Seed: LRMKWMMAMKYPITA
LRMKLMMRMIYPYTA

SEQ ID NO: 234679 - protein, 15 aa, Artificial Sequence
  Description of Artificial Sequence: Synthetic peptide
  Seed: LRMKWMMAMKYPITA
LRMKLMMRMKYPATA

SEQ ID NO: 234680 - protein, 15 aa, Artificial Sequence
  Description of Artificial Sequence: Synthetic peptide
  Seed: LRMKWMMAMKYPITA
LRMKLMMRMKYPCTA

SEQ ID NO: 234681 - protein, 15 aa, Artificial Sequence
  Description of Artificial Sequence: Synthetic peptide
  Seed: LRMKWMMAMKYPITA
LRMKLMMRMKYPDTA

SEQ ID NO: 234682 - protein, 15 aa, Artificial Sequence
  Description of Artificial Sequence: Synthetic peptide
  Seed: LRMKWMMAMKYPITA
LRMKLMMRMKYPETA

SEQ ID NO: 234683 - protein, 15 aa, Artificial Sequence
  Description of Artificial Sequence: Synthetic peptide
  Seed: LRMKWMMAMKYPITA
LRMKLMMRMKYPFTA

SEQ ID NO: 234684 - protein, 15 aa, Artificial Sequence
  Description of Artificial Sequence: Synthetic peptide
  Seed: LRMKWMMAMKYPITA
LRMKLMMRMKYPGTA

SEQ ID NO: 234685 - protein, 15 aa, Artificial Sequence
  Description of Artificial Sequence: Synthetic peptide
  Seed: LRMKWMMAMKYPITA
LRMKLMMRMKYPHTA

SEQ ID NO: 234686 - protein, 15 aa, Artificial Sequence
  Description of Artificial Sequence: Synthetic peptide
  Seed: LRMKWMMAMKYPITA
LRMKLMMRMKYPITA

SEQ ID NO: 234687 - protein, 15 aa, Artificial Sequence
  Description of Artificial Sequence: Synthetic peptide
  Seed: LRMKWMMAMKYPITA
LRMKLMMRMKYPKTA

SEQ ID NO: 234688 - protein, 15 aa, Artificial Sequence
  Description of Artificial Sequence: Synthetic peptide
  Seed: LRMKWMMAMKYPITA
LRMKLMMRMKYPLTA

SEQ ID NO: 234689 - protein, 15 aa, Artificial Sequence
  Description of Artificial Sequence: Synthetic peptide
  Seed: LRMKWMMAMKYPITA
LRMKLMMRMKYPMTA

SEQ ID NO: 234690 - protein, 15 aa, Artificial Sequence
  Description of Artificial Sequence: Synthetic peptide
  Seed: LRMKWMMAMKYPITA
LRMKLMMRMKYPNTA

SEQ ID NO: 234691 - protein, 15 aa, Artificial Sequence
  Description of Artificial Sequence: Synthetic peptide
  Seed: LRMKWMMAMKYPITA
LRMKLMMRMKYPQTA

SEQ ID NO: 234692 - protein, 15 aa, Artificial Sequence
  Description of Artificial Sequence: Synthetic peptide
  Seed: LRMKWMMAMKYPITA
LRMKLMMRMKYPRTA

SEQ ID NO: 234693 - protein, 15 aa, Artificial Sequence
  Description of Artificial Sequence: Synthetic peptide
  Seed: LRMKWMMAMKYPITA
LRMKLMMRMKYPSTA

SEQ ID NO: 234694 - protein, 15 aa, Artificial Sequence
  Description of Artificial Sequence: Synthetic peptide
  Seed: LRMKWMMAMKYPITA
LRMKLMMRMKYPTTA

SEQ ID NO: 234695 - protein, 15 aa, Artificial Sequence
  Description of Artificial Sequence: Synthetic peptide
  Seed: LRMKWMMAMKYPITA
LRMKLMMRMKYPVTA

SEQ ID NO: 234696 - protein, 15 aa, Artificial Sequence
  Description of Artificial Sequence: Synthetic peptide
  Seed: LRMKWMMAMKYPITA
LRMKLMMRMKYPYTA

SEQ ID NO: 234697 - protein, 15 aa, Artificial Sequence
  Description of Artificial Sequence: Synthetic peptide
  Seed: LRMKWMMAMKYPITA
LRMKLMMRMLYPRTA

SEQ ID NO: 234698 - protein, 15 aa, Artificial Sequence
  Description of Artificial Sequence: Synthetic peptide
  Seed: LRMKWMMAMKYPITA
LRMKLMMRMMYPRTA

SEQ ID NO: 234699 - protein, 15 aa, Artificial Sequence
  Description of Artificial Sequence: Synthetic peptide
  Seed: LRMKWMMAMKYPITA
LRMKLMMRMNYPATA

SEQ ID NO: 234700 - protein, 15 aa, Artificial Sequence
  Description of Artificial Sequence: Synthetic peptide
  Seed: LRMKWMMAMKYPITA
LRMKLMMRMNYPETA

SEQ ID NO: 234701 - protein, 15 aa, Artificial Sequence
  Description of Artificial Sequence: Synthetic peptide
  Seed: LRMKWMMAMKYPITA
LRMKLMMRMNYPFTA

SEQ ID NO: 234702 - protein, 15 aa, Artificial Sequence
  Description of Artificial Sequence: Synthetic peptide
  Seed: LRMKWMMAMKYPITA
LRMKLMMRMNYPITA

SEQ ID NO: 234703 - protein, 15 aa, Artificial Sequence
  Description of Artificial Sequence: Synthetic peptide
  Seed: LRMKWMMAMKYPITA
LRMKLMMRMNYPLTA

SEQ ID NO: 234704 - protein, 15 aa, Artificial Sequence
  Description of Artificial Sequence: Synthetic peptide
  Seed: LRMKWMMAMKYPITA
LRMKLMMRMNYPMTA

SEQ ID NO: 234705 - protein, 15 aa, Artificial Sequence
  Description of Artificial Sequence: Synthetic peptide
  Seed: LRMKWMMAMKYPITA
LRMKLMMRMNYPQTA

SEQ ID NO: 234706 - protein, 15 aa, Artificial Sequence
  Description of Artificial Sequence: Synthetic peptide
  Seed: LRMKWMMAMKYPITA
LRMKLMMRMNYPRTA

SEQ ID NO: 234707 - protein, 15 aa, Artificial Sequence
  Description of Artificial Sequence: Synthetic peptide
  Seed: LRMKWMMAMKYPITA
LRMKLMMRMNYPSTA

SEQ ID NO: 234708 - protein, 15 aa, Artificial Sequence
  Description of Artificial Sequence: Synthetic peptide
  Seed: LRMKWMMAMKYPITA
LRMKLMMRMNYPVTA

SEQ ID NO: 234709 - protein, 15 aa, Artificial Sequence
  Description of Artificial Sequence: Synthetic peptide
  Seed: LRMKWMMAMKYPITA
LRMKLMMRMNYPYTA

SEQ ID NO: 234710 - protein, 15 aa, Artificial Sequence
  Description of Artificial Sequence: Synthetic peptide
  Seed: LRMKWMMAMKYPITA
LRMKLMMRMQYPRTA

SEQ ID NO: 234711 - protein, 15 aa, Artificial Sequence
  Description of Artificial Sequence: Synthetic peptide
  Seed: LRMKWMMAMKYPITA
LRMKLMMRMQYPYTA

SEQ ID NO: 234712 - protein, 15 aa, Artificial Sequence
  Description of Artificial Sequence: Synthetic peptide
  Seed: LRMKWMMAMKYPITA
LRMKLMMRMRYPATA

SEQ ID NO: 234713 - protein, 15 aa, Artificial Sequence
  Description of Artificial Sequence: Synthetic peptide
  Seed: LRMKWMMAMKYPITA
LRMKLMMRMRYPCTA

SEQ ID NO: 234714 - protein, 15 aa, Artificial Sequence
  Description of Artificial Sequence: Synthetic peptide
  Seed: LRMKWMMAMKYPITA
LRMKLMMRMRYPDTA

SEQ ID NO: 234715 - protein, 15 aa, Artificial Sequence
  Description of Artificial Sequence: Synthetic peptide
  Seed: LRMKWMMAMKYPITA
LRMKLMMRMRYPETA

SEQ ID NO: 234716 - protein, 15 aa, Artificial Sequence
  Description of Artificial Sequence: Synthetic peptide
  Seed: LRMKWMMAMKYPITA
LRMKLMMRMRYPFTA

SEQ ID NO: 234717 - protein, 15 aa, Artificial Sequence
  Description of Artificial Sequence: Synthetic peptide
  Seed: LRMKWMMAMKYPITA
LRMKLMMRMRYPGTA

SEQ ID NO: 234718 - protein, 15 aa, Artificial Sequence
  Description of Artificial Sequence: Synthetic peptide
  Seed: LRMKWMMAMKYPITA
LRMKLMMRMRYPHTA

SEQ ID NO: 234719 - protein, 15 aa, Artificial Sequence
  Description of Artificial Sequence: Synthetic peptide
  Seed: LRMKWMMAMKYPITA
LRMKLMMRMRYPITA

SEQ ID NO: 234720 - protein, 15 aa, Artificial Sequence
  Description of Artificial Sequence: Synthetic peptide
  Seed: LRMKWMMAMKYPITA
LRMKLMMRMRYPKTA

SEQ ID NO: 234721 - protein, 15 aa, Artificial Sequence
  Description of Artificial Sequence: Synthetic peptide
  Seed: LRMKWMMAMKYPITA
LRMKLMMRMRYPLTA

SEQ ID NO: 234722 - protein, 15 aa, Artificial Sequence
  Description of Artificial Sequence: Synthetic peptide
  Seed: LRMKWMMAMKYPITA
LRMKLMMRMRYPMTA

SEQ ID NO: 234723 - protein, 15 aa, Artificial Sequence
  Description of Artificial Sequence: Synthetic peptide
  Seed: LRMKWMMAMKYPITA
LRMKLMMRMRYPNTA

SEQ ID NO: 234724 - protein, 15 aa, Artificial Sequence
  Description of Artificial Sequence: Synthetic peptide
  Seed: LRMKWMMAMKYPITA
LRMKLMMRMRYPQTA

SEQ ID NO: 234725 - protein, 15 aa, Artificial Sequence
  Description of Artificial Sequence: Synthetic peptide
  Seed: LRMKWMMAMKYPITA
LRMKLMMRMRYPRTA

SEQ ID NO: 234726 - protein, 15 aa, Artificial Sequence
  Description of Artificial Sequence: Synthetic peptide
  Seed: LRMKWMMAMKYPITA
LRMKLMMRMRYPSTA

SEQ ID NO: 234727 - protein, 15 aa, Artificial Sequence
  Description of Artificial Sequence: Synthetic peptide
  Seed: LRMKWMMAMKYPITA
LRMKLMMRMRYPTTA

SEQ ID NO: 234728 - protein, 15 aa, Artificial Sequence
  Description of Artificial Sequence: Synthetic peptide
  Seed: LRMKWMMAMKYPITA
LRMKLMMRMRYPVTA

SEQ ID NO: 234729 - protein, 15 aa, Artificial Sequence
  Description of Artificial Sequence: Synthetic peptide
  Seed: LRMKWMMAMKYPITA
LRMKLMMRMRYPYTA

SEQ ID NO: 234730 - protein, 15 aa, Artificial Sequence
  Description of Artificial Sequence: Synthetic peptide
  Seed: LRMKWMMAMKYPITA
LRMKLMMRMSYPATA

SEQ ID NO: 234731 - protein, 15 aa, Artificial Sequence
  Description of Artificial Sequence: Synthetic peptide
  Seed: LRMKWMMAMKYPITA
LRMKLMMRMSYPETA

SEQ ID NO: 234732 - protein, 15 aa, Artificial Sequence
  Description of Artificial Sequence: Synthetic peptide
  Seed: LRMKWMMAMKYPITA
LRMKLMMRMSYPFTA

SEQ ID NO: 234733 - protein, 15 aa, Artificial Sequence
  Description of Artificial Sequence: Synthetic peptide
  Seed: LRMKWMMAMKYPITA
LRMKLMMRMSYPGTA

SEQ ID NO: 234734 - protein, 15 aa, Artificial Sequence
  Description of Artificial Sequence: Synthetic peptide
  Seed: LRMKWMMAMKYPITA
LRMKLMMRMSYPHTA

SEQ ID NO: 234735 - protein, 15 aa, Artificial Sequence
  Description of Artificial Sequence: Synthetic peptide
  Seed: LRMKWMMAMKYPITA
LRMKLMMRMSYPITA

SEQ ID NO: 234736 - protein, 15 aa, Artificial Sequence
  Description of Artificial Sequence: Synthetic peptide
  Seed: LRMKWMMAMKYPITA
LRMKLMMRMSYPLTA

SEQ ID NO: 234737 - protein, 15 aa, Artificial Sequence
  Description of Artificial Sequence: Synthetic peptide
  Seed: LRMKWMMAMKYPITA
LRMKLMMRMSYPMTA

SEQ ID NO: 234738 - protein, 15 aa, Artificial Sequence
  Description of Artificial Sequence: Synthetic peptide
  Seed: LRMKWMMAMKYPITA
LRMKLMMRMSYPQTA

SEQ ID NO: 234739 - protein, 15 aa, Artificial Sequence
  Description of Artificial Sequence: Synthetic peptide
  Seed: LRMKWMMAMKYPITA
LRMKLMMRMSYPRTA

SEQ ID NO: 234740 - protein, 15 aa, Artificial Sequence
  Description of Artificial Sequence: Synthetic peptide
  Seed: LRMKWMMAMKYPITA
LRMKLMMRMSYPSTA

SEQ ID NO: 234741 - protein, 15 aa, Artificial Sequence
  Description of Artificial Sequence: Synthetic peptide
  Seed: LRMKWMMAMKYPITA
LRMKLMMRMSYPVTA

SEQ ID NO: 234742 - protein, 15 aa, Artificial Sequence
  Description of Artificial Sequence: Synthetic peptide
  Seed: LRMKWMMAMKYPITA
LRMKLMMRMSYPYTA

SEQ ID NO: 234743 - protein, 15 aa, Artificial Sequence
  Description of Artificial Sequence: Synthetic peptide
  Seed: LRMKWMMAMKYPITA
LRMKLMMRMTYPATA

SEQ ID NO: 234744 - protein, 15 aa, Artificial Sequence
  Description of Artificial Sequence: Synthetic peptide
  Seed: LRMKWMMAMKYPITA
LRMKLMMRMTYPFTA

SEQ ID NO: 234745 - protein, 15 aa, Artificial Sequence
  Description of Artificial Sequence: Synthetic peptide
  Seed: LRMKWMMAMKYPITA
LRMKLMMRMTYPGTA

SEQ ID NO: 234746 - protein, 15 aa, Artificial Sequence
  Description of Artificial Sequence: Synthetic peptide
  Seed: LRMKWMMAMKYPITA
LRMKLMMRMTYPHTA

SEQ ID NO: 234747 - protein, 15 aa, Artificial Sequence
  Description of Artificial Sequence: Synthetic peptide
  Seed: LRMKWMMAMKYPITA
LRMKLMMRMTYPITA

SEQ ID NO: 234748 - protein, 15 aa, Artificial Sequence
  Description of Artificial Sequence: Synthetic peptide
  Seed: LRMKWMMAMKYPITA
LRMKLMMRMTYPKTA

SEQ ID NO: 234749 - protein, 15 aa, Artificial Sequence
  Description of Artificial Sequence: Synthetic peptide
  Seed: LRMKWMMAMKYPITA
LRMKLMMRMTYPLTA

SEQ ID NO: 234750 - protein, 15 aa, Artificial Sequence
  Description of Artificial Sequence: Synthetic peptide
  Seed: LRMKWMMAMKYPITA
LRMKLMMRMTYPMTA

SEQ ID NO: 234751 - protein, 15 aa, Artificial Sequence
  Description of Artificial Sequence: Synthetic peptide
  Seed: LRMKWMMAMKYPITA
LRMKLMMRMTYPQTA

SEQ ID NO: 234752 - protein, 15 aa, Artificial Sequence
  Description of Artificial Sequence: Synthetic peptide
  Seed: LRMKWMMAMKYPITA
LRMKLMMRMTYPRTA

SEQ ID NO: 234753 - protein, 15 aa, Artificial Sequence
  Description of Artificial Sequence: Synthetic peptide
  Seed: LRMKWMMAMKYPITA
LRMKLMMRMTYPSTA

SEQ ID NO: 234754 - protein, 15 aa, Artificial Sequence
  Description of Artificial Sequence: Synthetic peptide
  Seed: LRMKWMMAMKYPITA
LRMKLMMRMTYPVTA

SEQ ID NO: 234755 - protein, 15 aa, Artificial Sequence
  Description of Artificial Sequence: Synthetic peptide
  Seed: LRMKWMMAMKYPITA
LRMKLMMRMTYPYTA

SEQ ID NO: 234756 - protein, 15 aa, Artificial Sequence
  Description of Artificial Sequence: Synthetic peptide
  Seed: LRMKWMMAMKYPITA
LRMKLMMRMVYPFTA

SEQ ID NO: 234757 - protein, 15 aa, Artificial Sequence
  Description of Artificial Sequence: Synthetic peptide
  Seed: LRMKWMMAMKYPITA
LRMKLMMRMVYPITA

SEQ ID NO: 234758 - protein, 15 aa, Artificial Sequence
  Description of Artificial Sequence: Synthetic peptide
  Seed: LRMKWMMAMKYPITA
LRMKLMMRMVYPKTA

SEQ ID NO: 234759 - protein, 15 aa, Artificial Sequence
  Description of Artificial Sequence: Synthetic peptide
  Seed: LRMKWMMAMKYPITA
LRMKLMMRMVYPLTA

SEQ ID NO: 234760 - protein, 15 aa, Artificial Sequence
  Description of Artificial Sequence: Synthetic peptide
  Seed: LRMKWMMAMKYPITA
LRMKLMMRMVYPMTA

SEQ ID NO: 234761 - protein, 15 aa, Artificial Sequence
  Description of Artificial Sequence: Synthetic peptide
  Seed: LRMKWMMAMKYPITA
LRMKLMMRMVYPRTA

SEQ ID NO: 234762 - protein, 15 aa, Artificial Sequence
  Description of Artificial Sequence: Synthetic peptide
  Seed: LRMKWMMAMKYPITA
LRMKLMMRMVYPVTA

SEQ ID NO: 234763 - protein, 15 aa, Artificial Sequence
  Description of Artificial Sequence: Synthetic peptide
  Seed: LRMKWMMAMKYPITA
LRMKLMMRMVYPYTA

SEQ ID NO: 234764 - protein, 15 aa, Artificial Sequence
  Description of Artificial Sequence: Synthetic peptide
  Seed: LRMKWMMAMKYPITA
LRMKLMMSMAYPATA

SEQ ID NO: 234765 - protein, 15 aa, Artificial Sequence
  Description of Artificial Sequence: Synthetic peptide
  Seed: LRMKWMMAMKYPITA
LRMKLMMSMAYPCTA

SEQ ID NO: 234766 - protein, 15 aa, Artificial Sequence
  Description of Artificial Sequence: Synthetic peptide
  Seed: LRMKWMMAMKYPITA
LRMKLMMSMAYPDTA

SEQ ID NO: 234767 - protein, 15 aa, Artificial Sequence
  Description of Artificial Sequence: Synthetic peptide
  Seed: LRMKWMMAMKYPITA
LRMKLMMSMAYPETA

SEQ ID NO: 234768 - protein, 15 aa, Artificial Sequence
  Description of Artificial Sequence: Synthetic peptide
  Seed: LRMKWMMAMKYPITA
LRMKLMMSMAYPFTA

SEQ ID NO: 234769 - protein, 15 aa, Artificial Sequence
  Description of Artificial Sequence: Synthetic peptide
  Seed: LRMKWMMAMKYPITA
LRMKLMMSMAYPGTA

SEQ ID NO: 234770 - protein, 15 aa, Artificial Sequence
  Description of Artificial Sequence: Synthetic peptide
  Seed: LRMKWMMAMKYPITA
LRMKLMMSMAYPHTA

SEQ ID NO: 234771 - protein, 15 aa, Artificial Sequence
  Description of Artificial Sequence: Synthetic peptide
  Seed: LRMKWMMAMKYPITA
LRMKLMMSMAYPITA

SEQ ID NO: 234772 - protein, 15 aa, Artificial Sequence
  Description of Artificial Sequence: Synthetic peptide
  Seed: LRMKWMMAMKYPITA
LRMKLMMSMAYPKTA

SEQ ID NO: 234773 - protein, 15 aa, Artificial Sequence
  Description of Artificial Sequence: Synthetic peptide
  Seed: LRMKWMMAMKYPITA
LRMKLMMSMAYPLTA

SEQ ID NO: 234774 - protein, 15 aa, Artificial Sequence
  Description of Artificial Sequence: Synthetic peptide
  Seed: LRMKWMMAMKYPITA
LRMKLMMSMAYPMTA

SEQ ID NO: 234775 - protein, 15 aa, Artificial Sequence
  Description of Artificial Sequence: Synthetic peptide
  Seed: LRMKWMMAMKYPITA
LRMKLMMSMAYPNTA

SEQ ID NO: 234776 - protein, 15 aa, Artificial Sequence
  Description of Artificial Sequence: Synthetic peptide
  Seed: LRMKWMMAMKYPITA
LRMKLMMSMAYPPTA

SEQ ID NO: 234777 - protein, 15 aa, Artificial Sequence
  Description of Artificial Sequence: Synthetic peptide
  Seed: LRMKWMMAMKYPITA
LRMKLMMSMAYPQTA

SEQ ID NO: 234778 - protein, 15 aa, Artificial Sequence
  Description of Artificial Sequence: Synthetic peptide
  Seed: LRMKWMMAMKYPITA
LRMKLMMSMAYPRTA

SEQ ID NO: 234779 - protein, 15 aa, Artificial Sequence
  Description of Artificial Sequence: Synthetic peptide
  Seed: LRMKWMMAMKYPITA
LRMKLMMSMAYPSTA

SEQ ID NO: 234780 - protein, 15 aa, Artificial Sequence
  Description of Artificial Sequence: Synthetic peptide
  Seed: LRMKWMMAMKYPITA
LRMKLMMSMAYPTTA

SEQ ID NO: 234781 - protein, 15 aa, Artificial Sequence
  Description of Artificial Sequence: Synthetic peptide
  Seed: LRMKWMMAMKYPITA
LRMKLMMSMAYPVTA

SEQ ID NO: 234782 - protein, 15 aa, Artificial Sequence
  Description of Artificial Sequence: Synthetic peptide
  Seed: LRMKWMMAMKYPITA
LRMKLMMSMAYPWTA

SEQ ID NO: 234783 - protein, 15 aa, Artificial Sequence
  Description of Artificial Sequence: Synthetic peptide
  Seed: LRMKWMMAMKYPITA
LRMKLMMSMAYPYTA

SEQ ID NO: 234784 - protein, 15 aa, Artificial Sequence
  Description of Artificial Sequence: Synthetic peptide
  Seed: LRMKWMMAMKYPITA
LRMKLMMSMCYPATA

SEQ ID NO: 234785 - protein, 15 aa, Artificial Sequence
  Description of Artificial Sequence: Synthetic peptide
  Seed: LRMKWMMAMKYPITA
LRMKLMMSMCYPITA

SEQ ID NO: 234786 - protein, 15 aa, Artificial Sequence
  Description of Artificial Sequence: Synthetic peptide
  Seed: LRMKWMMAMKYPITA
LRMKLMMSMCYPLTA

SEQ ID NO: 234787 - protein, 15 aa, Artificial Sequence
  Description of Artificial Sequence: Synthetic peptide
  Seed: LRMKWMMAMKYPITA
LRMKLMMSMCYPMTA

SEQ ID NO: 234788 - protein, 15 aa, Artificial Sequence
  Description of Artificial Sequence: Synthetic peptide
  Seed: LRMKWMMAMKYPITA
LRMKLMMSMCYPVTA

SEQ ID NO: 234789 - protein, 15 aa, Artificial Sequence
  Description of Artificial Sequence: Synthetic peptide
  Seed: LRMKWMMAMKYPITA
LRMKLMMSMDYPITA

SEQ ID NO: 234790 - protein, 15 aa, Artificial Sequence
  Description of Artificial Sequence: Synthetic peptide
  Seed: LRMKWMMAMKYPITA
LRMKLMMSMDYPVTA

SEQ ID NO: 234791 - protein, 15 aa, Artificial Sequence
  Description of Artificial Sequence: Synthetic peptide
  Seed: LRMKWMMAMKYPITA
LRMKLMMSMEYPITA

SEQ ID NO: 234792 - protein, 15 aa, Artificial Sequence
  Description of Artificial Sequence: Synthetic peptide
  Seed: LRMKWMMAMKYPITA
LRMKLMMSMEYPLTA

SEQ ID NO: 234793 - protein, 15 aa, Artificial Sequence
  Description of Artificial Sequence: Synthetic peptide
  Seed: LRMKWMMAMKYPITA
LRMKLMMSMEYPVTA

SEQ ID NO: 234794 - protein, 15 aa, Artificial Sequence
  Description of Artificial Sequence: Synthetic peptide
  Seed: LRMKWMMAMKYPITA
LRMKLMMSMFYPATA

SEQ ID NO: 234795 - protein, 15 aa, Artificial Sequence
  Description of Artificial Sequence: Synthetic peptide
  Seed: LRMKWMMAMKYPITA
LRMKLMMSMFYPFTA

SEQ ID NO: 234796 - protein, 15 aa, Artificial Sequence
  Description of Artificial Sequence: Synthetic peptide
  Seed: LRMKWMMAMKYPITA
LRMKLMMSMFYPITA

SEQ ID NO: 234797 - protein, 15 aa, Artificial Sequence
  Description of Artificial Sequence: Synthetic peptide
  Seed: LRMKWMMAMKYPITA
LRMKLMMSMFYPLTA

SEQ ID NO: 234798 - protein, 15 aa, Artificial Sequence
  Description of Artificial Sequence: Synthetic peptide
  Seed: LRMKWMMAMKYPITA
LRMKLMMSMFYPMTA

SEQ ID NO: 234799 - protein, 15 aa, Artificial Sequence
  Description of Artificial Sequence: Synthetic peptide
  Seed: LRMKWMMAMKYPITA
LRMKLMMSMFYPSTA

SEQ ID NO: 234800 - protein, 15 aa, Artificial Sequence
  Description of Artificial Sequence: Synthetic peptide
  Seed: LRMKWMMAMKYPITA
LRMKLMMSMFYPTTA

SEQ ID NO: 234801 - protein, 15 aa, Artificial Sequence
  Description of Artificial Sequence: Synthetic peptide
  Seed: LRMKWMMAMKYPITA
LRMKLMMSMFYPVTA

SEQ ID NO: 234802 - protein, 15 aa, Artificial Sequence
  Description of Artificial Sequence: Synthetic peptide
  Seed: LRMKWMMAMKYPITA
LRMKLMMSMFYPYTA

SEQ ID NO: 234803 - protein, 15 aa, Artificial Sequence
  Description of Artificial Sequence: Synthetic peptide
  Seed: LRMKWMMAMKYPITA
LRMKLMMSMGYPATA

SEQ ID NO: 234804 - protein, 15 aa, Artificial Sequence
  Description of Artificial Sequence: Synthetic peptide
  Seed: LRMKWMMAMKYPITA
LRMKLMMSMGYPCTA

SEQ ID NO: 234805 - protein, 15 aa, Artificial Sequence
  Description of Artificial Sequence: Synthetic peptide
  Seed: LRMKWMMAMKYPITA
LRMKLMMSMGYPFTA

SEQ ID NO: 234806 - protein, 15 aa, Artificial Sequence
  Description of Artificial Sequence: Synthetic peptide
  Seed: LRMKWMMAMKYPITA
LRMKLMMSMGYPGTA

SEQ ID NO: 234807 - protein, 15 aa, Artificial Sequence
  Description of Artificial Sequence: Synthetic peptide
  Seed: LRMKWMMAMKYPITA
LRMKLMMSMGYPHTA

SEQ ID NO: 234808 - protein, 15 aa, Artificial Sequence
  Description of Artificial Sequence: Synthetic peptide
  Seed: LRMKWMMAMKYPITA
LRMKLMMSMGYPITA

SEQ ID NO: 234809 - protein, 15 aa, Artificial Sequence
  Description of Artificial Sequence: Synthetic peptide
  Seed: LRMKWMMAMKYPITA
LRMKLMMSMGYPKTA

SEQ ID NO: 234810 - protein, 15 aa, Artificial Sequence
  Description of Artificial Sequence: Synthetic peptide
  Seed: LRMKWMMAMKYPITA
LRMKLMMSMGYPLTA

SEQ ID NO: 234811 - protein, 15 aa, Artificial Sequence
  Description of Artificial Sequence: Synthetic peptide
  Seed: LRMKWMMAMKYPITA
LRMKLMMSMGYPMTA

SEQ ID NO: 234812 - protein, 15 aa, Artificial Sequence
  Description of Artificial Sequence: Synthetic peptide
  Seed: LRMKWMMAMKYPITA
LRMKLMMSMGYPNTA

SEQ ID NO: 234813 - protein, 15 aa, Artificial Sequence
  Description of Artificial Sequence: Synthetic peptide
  Seed: LRMKWMMAMKYPITA
LRMKLMMSMGYPPTA

SEQ ID NO: 234814 - protein, 15 aa, Artificial Sequence
  Description of Artificial Sequence: Synthetic peptide
  Seed: LRMKWMMAMKYPITA
LRMKLMMSMGYPQTA

SEQ ID NO: 234815 - protein, 15 aa, Artificial Sequence
  Description of Artificial Sequence: Synthetic peptide
  Seed: LRMKWMMAMKYPITA
LRMKLMMSMGYPRTA

SEQ ID NO: 234816 - protein, 15 aa, Artificial Sequence
  Description of Artificial Sequence: Synthetic peptide
  Seed: LRMKWMMAMKYPITA
LRMKLMMSMGYPSTA

SEQ ID NO: 234817 - protein, 15 aa, Artificial Sequence
  Description of Artificial Sequence: Synthetic peptide
  Seed: LRMKWMMAMKYPITA
LRMKLMMSMGYPTTA

SEQ ID NO: 234818 - protein, 15 aa, Artificial Sequence
  Description of Artificial Sequence: Synthetic peptide
  Seed: LRMKWMMAMKYPITA
LRMKLMMSMGYPVTA

SEQ ID NO: 234819 - protein, 15 aa, Artificial Sequence
  Description of Artificial Sequence: Synthetic peptide
  Seed: LRMKWMMAMKYPITA
LRMKLMMSMGYPWTA

SEQ ID NO: 234820 - protein, 15 aa, Artificial Sequence
  Description of Artificial Sequence: Synthetic peptide
  Seed: LRMKWMMAMKYPITA
LRMKLMMSMGYPYTA

SEQ ID NO: 234821 - protein, 15 aa, Artificial Sequence
  Description of Artificial Sequence: Synthetic peptide
  Seed: LRMKWMMAMKYPITA
LRMKLMMSMHYPATA

SEQ ID NO: 234822 - protein, 15 aa, Artificial Sequence
  Description of Artificial Sequence: Synthetic peptide
  Seed: LRMKWMMAMKYPITA
LRMKLMMSMHYPFTA

SEQ ID NO: 234823 - protein, 15 aa, Artificial Sequence
  Description of Artificial Sequence: Synthetic peptide
  Seed: LRMKWMMAMKYPITA
LRMKLMMSMHYPGTA

SEQ ID NO: 234824 - protein, 15 aa, Artificial Sequence
  Description of Artificial Sequence: Synthetic peptide
  Seed: LRMKWMMAMKYPITA
LRMKLMMSMHYPHTA

SEQ ID NO: 234825 - protein, 15 aa, Artificial Sequence
  Description of Artificial Sequence: Synthetic peptide
  Seed: LRMKWMMAMKYPITA
LRMKLMMSMHYPITA

SEQ ID NO: 234826 - protein, 15 aa, Artificial Sequence
  Description of Artificial Sequence: Synthetic peptide
  Seed: LRMKWMMAMKYPITA
LRMKLMMSMHYPKTA

SEQ ID NO: 234827 - protein, 15 aa, Artificial Sequence
  Description of Artificial Sequence: Synthetic peptide
  Seed: LRMKWMMAMKYPITA
LRMKLMMSMHYPLTA

SEQ ID NO: 234828 - protein, 15 aa, Artificial Sequence
  Description of Artificial Sequence: Synthetic peptide
  Seed: LRMKWMMAMKYPITA
LRMKLMMSMHYPMTA

SEQ ID NO: 234829 - protein, 15 aa, Artificial Sequence
  Description of Artificial Sequence: Synthetic peptide
  Seed: LRMKWMMAMKYPITA
LRMKLMMSMHYPQTA

SEQ ID NO: 234830 - protein, 15 aa, Artificial Sequence
  Description of Artificial Sequence: Synthetic peptide
  Seed: LRMKWMMAMKYPITA
LRMKLMMSMHYPRTA

SEQ ID NO: 234831 - protein, 15 aa, Artificial Sequence
  Description of Artificial Sequence: Synthetic peptide
  Seed: LRMKWMMAMKYPITA
LRMKLMMSMHYPSTA

SEQ ID NO: 234832 - protein, 15 aa, Artificial Sequence
  Description of Artificial Sequence: Synthetic peptide
  Seed: LRMKWMMAMKYPITA
LRMKLMMSMHYPVTA

SEQ ID NO: 234833 - protein, 15 aa, Artificial Sequence
  Description of Artificial Sequence: Synthetic peptide
  Seed: LRMKWMMAMKYPITA
LRMKLMMSMHYPYTA

SEQ ID NO: 234834 - protein, 15 aa, Artificial Sequence
  Description of Artificial Sequence: Synthetic peptide
  Seed: LRMKWMMAMKYPITA
LRMKLMMSMIYPATA

SEQ ID NO: 234835 - protein, 15 aa, Artificial Sequence
  Description of Artificial Sequence: Synthetic peptide
  Seed: LRMKWMMAMKYPITA
LRMKLMMSMIYPCTA

SEQ ID NO: 234836 - protein, 15 aa, Artificial Sequence
  Description of Artificial Sequence: Synthetic peptide
  Seed: LRMKWMMAMKYPITA
LRMKLMMSMIYPFTA

SEQ ID NO: 234837 - protein, 15 aa, Artificial Sequence
  Description of Artificial Sequence: Synthetic peptide
  Seed: LRMKWMMAMKYPITA
LRMKLMMSMIYPGTA

SEQ ID NO: 234838 - protein, 15 aa, Artificial Sequence
  Description of Artificial Sequence: Synthetic peptide
  Seed: LRMKWMMAMKYPITA
LRMKLMMSMIYPITA

SEQ ID NO: 234839 - protein, 15 aa, Artificial Sequence
  Description of Artificial Sequence: Synthetic peptide
  Seed: LRMKWMMAMKYPITA
LRMKLMMSMIYPKTA

SEQ ID NO: 234840 - protein, 15 aa, Artificial Sequence
  Description of Artificial Sequence: Synthetic peptide
  Seed: LRMKWMMAMKYPITA
LRMKLMMSMIYPLTA

SEQ ID NO: 234841 - protein, 15 aa, Artificial Sequence
  Description of Artificial Sequence: Synthetic peptide
  Seed: LRMKWMMAMKYPITA
LRMKLMMSMIYPMTA

SEQ ID NO: 234842 - protein, 15 aa, Artificial Sequence
  Description of Artificial Sequence: Synthetic peptide
  Seed: LRMKWMMAMKYPITA
LRMKLMMSMIYPNTA

SEQ ID NO: 234843 - protein, 15 aa, Artificial Sequence
  Description of Artificial Sequence: Synthetic peptide
  Seed: LRMKWMMAMKYPITA
LRMKLMMSMIYPRTA

SEQ ID NO: 234844 - protein, 15 aa, Artificial Sequence
  Description of Artificial Sequence: Synthetic peptide
  Seed: LRMKWMMAMKYPITA
LRMKLMMSMIYPSTA

SEQ ID NO: 234845 - protein, 15 aa, Artificial Sequence
  Description of Artificial Sequence: Synthetic peptide
  Seed: LRMKWMMAMKYPITA
LRMKLMMSMIYPTTA

SEQ ID NO: 234846 - protein, 15 aa, Artificial Sequence
  Description of Artificial Sequence: Synthetic peptide
  Seed: LRMKWMMAMKYPITA
LRMKLMMSMIYPVTA

SEQ ID NO: 234847 - protein, 15 aa, Artificial Sequence
  Description of Artificial Sequence: Synthetic peptide
  Seed: LRMKWMMAMKYPITA
LRMKLMMSMIYPYTA

SEQ ID NO: 234848 - protein, 15 aa, Artificial Sequence
  Description of Artificial Sequence: Synthetic peptide
  Seed: LRMKWMMAMKYPITA
LRMKLMMSMKYPATA

SEQ ID NO: 234849 - protein, 15 aa, Artificial Sequence
  Description of Artificial Sequence: Synthetic peptide
  Seed: LRMKWMMAMKYPITA
LRMKLMMSMKYPCTA

SEQ ID NO: 234850 - protein, 15 aa, Artificial Sequence
  Description of Artificial Sequence: Synthetic peptide
  Seed: LRMKWMMAMKYPITA
LRMKLMMSMKYPDTA

SEQ ID NO: 234851 - protein, 15 aa, Artificial Sequence
  Description of Artificial Sequence: Synthetic peptide
  Seed: LRMKWMMAMKYPITA
LRMKLMMSMKYPETA

SEQ ID NO: 234852 - protein, 15 aa, Artificial Sequence
  Description of Artificial Sequence: Synthetic peptide
  Seed: LRMKWMMAMKYPITA
LRMKLMMSMKYPFTA

SEQ ID NO: 234853 - protein, 15 aa, Artificial Sequence
  Description of Artificial Sequence: Synthetic peptide
  Seed: LRMKWMMAMKYPITA
LRMKLMMSMKYPGTA

SEQ ID NO: 234854 - protein, 15 aa, Artificial Sequence
  Description of Artificial Sequence: Synthetic peptide
  Seed: LRMKWMMAMKYPITA
LRMKLMMSMKYPHTA

SEQ ID NO: 234855 - protein, 15 aa, Artificial Sequence
  Description of Artificial Sequence: Synthetic peptide
  Seed: LRMKWMMAMKYPITA
LRMKLMMSMKYPITA

SEQ ID NO: 234856 - protein, 15 aa, Artificial Sequence
  Description of Artificial Sequence: Synthetic peptide
  Seed: LRMKWMMAMKYPITA
LRMKLMMSMKYPKTA

SEQ ID NO: 234857 - protein, 15 aa, Artificial Sequence
  Description of Artificial Sequence: Synthetic peptide
  Seed: LRMKWMMAMKYPITA
LRMKLMMSMKYPLTA

SEQ ID NO: 234858 - protein, 15 aa, Artificial Sequence
  Description of Artificial Sequence: Synthetic peptide
  Seed: LRMKWMMAMKYPITA
LRMKLMMSMKYPMTA

SEQ ID NO: 234859 - protein, 15 aa, Artificial Sequence
  Description of Artificial Sequence: Synthetic peptide
  Seed: LRMKWMMAMKYPITA
LRMKLMMSMKYPNTA

SEQ ID NO: 234860 - protein, 15 aa, Artificial Sequence
  Description of Artificial Sequence: Synthetic peptide
  Seed: LRMKWMMAMKYPITA
LRMKLMMSMKYPPTA

SEQ ID NO: 234861 - protein, 15 aa, Artificial Sequence
  Description of Artificial Sequence: Synthetic peptide
  Seed: LRMKWMMAMKYPITA
LRMKLMMSMKYPQTA

SEQ ID NO: 234862 - protein, 15 aa, Artificial Sequence
  Description of Artificial Sequence: Synthetic peptide
  Seed: LRMKWMMAMKYPITA
LRMKLMMSMKYPRTA

SEQ ID NO: 234863 - protein, 15 aa, Artificial Sequence
  Description of Artificial Sequence: Synthetic peptide
  Seed: LRMKWMMAMKYPITA
LRMKLMMSMKYPSTA

SEQ ID NO: 234864 - protein, 15 aa, Artificial Sequence
  Description of Artificial Sequence: Synthetic peptide
  Seed: LRMKWMMAMKYPITA
LRMKLMMSMKYPTTA

SEQ ID NO: 234865 - protein, 15 aa, Artificial Sequence
  Description of Artificial Sequence: Synthetic peptide
  Seed: LRMKWMMAMKYPITA
LRMKLMMSMKYPVTA

SEQ ID NO: 234866 - protein, 15 aa, Artificial Sequence
  Description of Artificial Sequence: Synthetic peptide
  Seed: LRMKWMMAMKYPITA
LRMKLMMSMKYPWTA

SEQ ID NO: 234867 - protein, 15 aa, Artificial Sequence
  Description of Artificial Sequence: Synthetic peptide
  Seed: LRMKWMMAMKYPITA
LRMKLMMSMKYPYTA

SEQ ID NO: 234868 - protein, 15 aa, Artificial Sequence
  Description of Artificial Sequence: Synthetic peptide
  Seed: LRMKWMMAMKYPITA
LRMKLMMSMLYPITA

SEQ ID NO: 234869 - protein, 15 aa, Artificial Sequence
  Description of Artificial Sequence: Synthetic peptide
  Seed: LRMKWMMAMKYPITA
LRMKLMMSMLYPKTA

SEQ ID NO: 234870 - protein, 15 aa, Artificial Sequence
  Description of Artificial Sequence: Synthetic peptide
  Seed: LRMKWMMAMKYPITA
LRMKLMMSMLYPRTA

SEQ ID NO: 234871 - protein, 15 aa, Artificial Sequence
  Description of Artificial Sequence: Synthetic peptide
  Seed: LRMKWMMAMKYPITA
LRMKLMMSMLYPVTA

SEQ ID NO: 234872 - protein, 15 aa, Artificial Sequence
  Description of Artificial Sequence: Synthetic peptide
  Seed: LRMKWMMAMKYPITA
LRMKLMMSMLYPYTA

SEQ ID NO: 234873 - protein, 15 aa, Artificial Sequence
  Description of Artificial Sequence: Synthetic peptide
  Seed: LRMKWMMAMKYPITA
LRMKLMMSMMYPITA

SEQ ID NO: 234874 - protein, 15 aa, Artificial Sequence
  Description of Artificial Sequence: Synthetic peptide
  Seed: LRMKWMMAMKYPITA
LRMKLMMSMMYPLTA

SEQ ID NO: 234875 - protein, 15 aa, Artificial Sequence
  Description of Artificial Sequence: Synthetic peptide
  Seed: LRMKWMMAMKYPITA
LRMKLMMSMMYPRTA

SEQ ID NO: 234876 - protein, 15 aa, Artificial Sequence
  Description of Artificial Sequence: Synthetic peptide
  Seed: LRMKWMMAMKYPITA
LRMKLMMSMMYPVTA

SEQ ID NO: 234877 - protein, 15 aa, Artificial Sequence
  Description of Artificial Sequence: Synthetic peptide
  Seed: LRMKWMMAMKYPITA
LRMKLMMSMMYPYTA

SEQ ID NO: 234878 - protein, 15 aa, Artificial Sequence
  Description of Artificial Sequence: Synthetic peptide
  Seed: LRMKWMMAMKYPITA
LRMKLMMSMNYPATA

SEQ ID NO: 234879 - protein, 15 aa, Artificial Sequence
  Description of Artificial Sequence: Synthetic peptide
  Seed: LRMKWMMAMKYPITA
LRMKLMMSMNYPCTA

SEQ ID NO: 234880 - protein, 15 aa, Artificial Sequence
  Description of Artificial Sequence: Synthetic peptide
  Seed: LRMKWMMAMKYPITA
LRMKLMMSMNYPDTA

SEQ ID NO: 234881 - protein, 15 aa, Artificial Sequence
  Description of Artificial Sequence: Synthetic peptide
  Seed: LRMKWMMAMKYPITA
LRMKLMMSMNYPETA

SEQ ID NO: 234882 - protein, 15 aa, Artificial Sequence
  Description of Artificial Sequence: Synthetic peptide
  Seed: LRMKWMMAMKYPITA
LRMKLMMSMNYPFTA

SEQ ID NO: 234883 - protein, 15 aa, Artificial Sequence
  Description of Artificial Sequence: Synthetic peptide
  Seed: LRMKWMMAMKYPITA
LRMKLMMSMNYPGTA

SEQ ID NO: 234884 - protein, 15 aa, Artificial Sequence
  Description of Artificial Sequence: Synthetic peptide
  Seed: LRMKWMMAMKYPITA
LRMKLMMSMNYPHTA

SEQ ID NO: 234885 - protein, 15 aa, Artificial Sequence
  Description of Artificial Sequence: Synthetic peptide
  Seed: LRMKWMMAMKYPITA
LRMKLMMSMNYPITA

SEQ ID NO: 234886 - protein, 15 aa, Artificial Sequence
  Description of Artificial Sequence: Synthetic peptide
  Seed: LRMKWMMAMKYPITA
LRMKLMMSMNYPKTA

SEQ ID NO: 234887 - protein, 15 aa, Artificial Sequence
  Description of Artificial Sequence: Synthetic peptide
  Seed: LRMKWMMAMKYPITA
LRMKLMMSMNYPLTA

SEQ ID NO: 234888 - protein, 15 aa, Artificial Sequence
  Description of Artificial Sequence: Synthetic peptide
  Seed: LRMKWMMAMKYPITA
LRMKLMMSMNYPMTA

SEQ ID NO: 234889 - protein, 15 aa, Artificial Sequence
  Description of Artificial Sequence: Synthetic peptide
  Seed: LRMKWMMAMKYPITA
LRMKLMMSMNYPNTA

SEQ ID NO: 234890 - protein, 15 aa, Artificial Sequence
  Description of Artificial Sequence: Synthetic peptide
  Seed: LRMKWMMAMKYPITA
LRMKLMMSMNYPRTA

SEQ ID NO: 234891 - protein, 15 aa, Artificial Sequence
  Description of Artificial Sequence: Synthetic peptide
  Seed: LRMKWMMAMKYPITA
LRMKLMMSMNYPSTA

SEQ ID NO: 234892 - protein, 15 aa, Artificial Sequence
  Description of Artificial Sequence: Synthetic peptide
  Seed: LRMKWMMAMKYPITA
LRMKLMMSMNYPTTA

SEQ ID NO: 234893 - protein, 15 aa, Artificial Sequence
  Description of Artificial Sequence: Synthetic peptide
  Seed: LRMKWMMAMKYPITA
LRMKLMMSMNYPVTA

SEQ ID NO: 234894 - protein, 15 aa, Artificial Sequence
  Description of Artificial Sequence: Synthetic peptide
  Seed: LRMKWMMAMKYPITA
LRMKLMMSMNYPWTA

SEQ ID NO: 234895 - protein, 15 aa, Artificial Sequence
  Description of Artificial Sequence: Synthetic peptide
  Seed: LRMKWMMAMKYPITA
LRMKLMMSMNYPYTA

SEQ ID NO: 234896 - protein, 15 aa, Artificial Sequence
  Description of Artificial Sequence: Synthetic peptide
  Seed: LRMKWMMAMKYPITA
LRMKLMMSMPYPATA

SEQ ID NO: 234897 - protein, 15 aa, Artificial Sequence
  Description of Artificial Sequence: Synthetic peptide
  Seed: LRMKWMMAMKYPITA
LRMKLMMSMPYPCTA

SEQ ID NO: 234898 - protein, 15 aa, Artificial Sequence
  Description of Artificial Sequence: Synthetic peptide
  Seed: LRMKWMMAMKYPITA
LRMKLMMSMPYPDTA

SEQ ID NO: 234899 - protein, 15 aa, Artificial Sequence
  Description of Artificial Sequence: Synthetic peptide
  Seed: LRMKWMMAMKYPITA
LRMKLMMSMPYPETA

SEQ ID NO: 234900 - protein, 15 aa, Artificial Sequence
  Description of Artificial Sequence: Synthetic peptide
  Seed: LRMKWMMAMKYPITA
LRMKLMMSMPYPFTA

SEQ ID NO: 234901 - protein, 15 aa, Artificial Sequence
  Description of Artificial Sequence: Synthetic peptide
  Seed: LRMKWMMAMKYPITA
LRMKLMMSMPYPGTA

SEQ ID NO: 234902 - protein, 15 aa, Artificial Sequence
  Description of Artificial Sequence: Synthetic peptide
  Seed: LRMKWMMAMKYPITA
LRMKLMMSMPYPHTA

SEQ ID NO: 234903 - protein, 15 aa, Artificial Sequence
  Description of Artificial Sequence: Synthetic peptide
  Seed: LRMKWMMAMKYPITA
LRMKLMMSMPYPITA

SEQ ID NO: 234904 - protein, 15 aa, Artificial Sequence
  Description of Artificial Sequence: Synthetic peptide
  Seed: LRMKWMMAMKYPITA
LRMKLMMSMPYPKTA

SEQ ID NO: 234905 - protein, 15 aa, Artificial Sequence
  Description of Artificial Sequence: Synthetic peptide
  Seed: LRMKWMMAMKYPITA
LRMKLMMSMPYPLTA

SEQ ID NO: 234906 - protein, 15 aa, Artificial Sequence
  Description of Artificial Sequence: Synthetic peptide
  Seed: LRMKWMMAMKYPITA
LRMKLMMSMPYPMTA

SEQ ID NO: 234907 - protein, 15 aa, Artificial Sequence
  Description of Artificial Sequence: Synthetic peptide
  Seed: LRMKWMMAMKYPITA
LRMKLMMSMPYPNTA

SEQ ID NO: 234908 - protein, 15 aa, Artificial Sequence
  Description of Artificial Sequence: Synthetic peptide
  Seed: LRMKWMMAMKYPITA
LRMKLMMSMPYPPTA

SEQ ID NO: 234909 - protein, 15 aa, Artificial Sequence
  Description of Artificial Sequence: Synthetic peptide
  Seed: LRMKWMMAMKYPITA
LRMKLMMSMPYPQTA

SEQ ID NO: 234910 - protein, 15 aa, Artificial Sequence
  Description of Artificial Sequence: Synthetic peptide
  Seed: LRMKWMMAMKYPITA
LRMKLMMSMPYPRTA

SEQ ID NO: 234911 - protein, 15 aa, Artificial Sequence
  Description of Artificial Sequence: Synthetic peptide
  Seed: LRMKWMMAMKYPITA
LRMKLMMSMPYPSTA

SEQ ID NO: 234912 - protein, 15 aa, Artificial Sequence
  Description of Artificial Sequence: Synthetic peptide
  Seed: LRMKWMMAMKYPITA
LRMKLMMSMPYPTTA

SEQ ID NO: 234913 - protein, 15 aa, Artificial Sequence
  Description of Artificial Sequence: Synthetic peptide
  Seed: LRMKWMMAMKYPITA
LRMKLMMSMPYPVTA

SEQ ID NO: 234914 - protein, 15 aa, Artificial Sequence
  Description of Artificial Sequence: Synthetic peptide
  Seed: LRMKWMMAMKYPITA
LRMKLMMSMPYPWTA

SEQ ID NO: 234915 - protein, 15 aa, Artificial Sequence
  Description of Artificial Sequence: Synthetic peptide
  Seed: LRMKWMMAMKYPITA
LRMKLMMSMPYPYTA

SEQ ID NO: 234916 - protein, 15 aa, Artificial Sequence
  Description of Artificial Sequence: Synthetic peptide
  Seed: LRMKWMMAMKYPITA
LRMKLMMSMQYPATA

SEQ ID NO: 234917 - protein, 15 aa, Artificial Sequence
  Description of Artificial Sequence: Synthetic peptide
  Seed: LRMKWMMAMKYPITA
LRMKLMMSMQYPFTA

SEQ ID NO: 234918 - protein, 15 aa, Artificial Sequence
  Description of Artificial Sequence: Synthetic peptide
  Seed: LRMKWMMAMKYPITA
LRMKLMMSMQYPITA

SEQ ID NO: 234919 - protein, 15 aa, Artificial Sequence
  Description of Artificial Sequence: Synthetic peptide
  Seed: LRMKWMMAMKYPITA
LRMKLMMSMQYPKTA

SEQ ID NO: 234920 - protein, 15 aa, Artificial Sequence
  Description of Artificial Sequence: Synthetic peptide
  Seed: LRMKWMMAMKYPITA
LRMKLMMSMQYPLTA

SEQ ID NO: 234921 - protein, 15 aa, Artificial Sequence
  Description of Artificial Sequence: Synthetic peptide
  Seed: LRMKWMMAMKYPITA
LRMKLMMSMQYPMTA

SEQ ID NO: 234922 - protein, 15 aa, Artificial Sequence
  Description of Artificial Sequence: Synthetic peptide
  Seed: LRMKWMMAMKYPITA
LRMKLMMSMQYPRTA

SEQ ID NO: 234923 - protein, 15 aa, Artificial Sequence
  Description of Artificial Sequence: Synthetic peptide
  Seed: LRMKWMMAMKYPITA
LRMKLMMSMQYPVTA

SEQ ID NO: 234924 - protein, 15 aa, Artificial Sequence
  Description of Artificial Sequence: Synthetic peptide
  Seed: LRMKWMMAMKYPITA
LRMKLMMSMQYPYTA

SEQ ID NO: 234925 - protein, 15 aa, Artificial Sequence
  Description of Artificial Sequence: Synthetic peptide
  Seed: LRMKWMMAMKYPITA
LRMKLMMSMRYPATA

SEQ ID NO: 234926 - protein, 15 aa, Artificial Sequence
  Description of Artificial Sequence: Synthetic peptide
  Seed: LRMKWMMAMKYPITA
LRMKLMMSMRYPCTA

SEQ ID NO: 234927 - protein, 15 aa, Artificial Sequence
  Description of Artificial Sequence: Synthetic peptide
  Seed: LRMKWMMAMKYPITA
LRMKLMMSMRYPDTA

SEQ ID NO: 234928 - protein, 15 aa, Artificial Sequence
  Description of Artificial Sequence: Synthetic peptide
  Seed: LRMKWMMAMKYPITA
LRMKLMMSMRYPETA

SEQ ID NO: 234929 - protein, 15 aa, Artificial Sequence
  Description of Artificial Sequence: Synthetic peptide
  Seed: LRMKWMMAMKYPITA
LRMKLMMSMRYPFTA

SEQ ID NO: 234930 - protein, 15 aa, Artificial Sequence
  Description of Artificial Sequence: Synthetic peptide
  Seed: LRMKWMMAMKYPITA
LRMKLMMSMRYPGTA

SEQ ID NO: 234931 - protein, 15 aa, Artificial Sequence
  Description of Artificial Sequence: Synthetic peptide
  Seed: LRMKWMMAMKYPITA
LRMKLMMSMRYPHTA

SEQ ID NO: 234932 - protein, 15 aa, Artificial Sequence
  Description of Artificial Sequence: Synthetic peptide
  Seed: LRMKWMMAMKYPITA
LRMKLMMSMRYPITA

SEQ ID NO: 234933 - protein, 15 aa, Artificial Sequence
  Description of Artificial Sequence: Synthetic peptide
  Seed: LRMKWMMAMKYPITA
LRMKLMMSMRYPKTA

SEQ ID NO: 234934 - protein, 15 aa, Artificial Sequence
  Description of Artificial Sequence: Synthetic peptide
  Seed: LRMKWMMAMKYPITA
LRMKLMMSMRYPLTA

SEQ ID NO: 234935 - protein, 15 aa, Artificial Sequence
  Description of Artificial Sequence: Synthetic peptide
  Seed: LRMKWMMAMKYPITA
LRMKLMMSMRYPMTA

SEQ ID NO: 234936 - protein, 15 aa, Artificial Sequence
  Description of Artificial Sequence: Synthetic peptide
  Seed: LRMKWMMAMKYPITA
LRMKLMMSMRYPNTA

SEQ ID NO: 234937 - protein, 15 aa, Artificial Sequence
  Description of Artificial Sequence: Synthetic peptide
  Seed: LRMKWMMAMKYPITA
LRMKLMMSMRYPPTA

SEQ ID NO: 234938 - protein, 15 aa, Artificial Sequence
  Description of Artificial Sequence: Synthetic peptide
  Seed: LRMKWMMAMKYPITA
LRMKLMMSMRYPQTA

SEQ ID NO: 234939 - protein, 15 aa, Artificial Sequence
  Description of Artificial Sequence: Synthetic peptide
  Seed: LRMKWMMAMKYPITA
LRMKLMMSMRYPRTA

SEQ ID NO: 234940 - protein, 15 aa, Artificial Sequence
  Description of Artificial Sequence: Synthetic peptide
  Seed: LRMKWMMAMKYPITA
LRMKLMMSMRYPSTA

SEQ ID NO: 234941 - protein, 15 aa, Artificial Sequence
  Description of Artificial Sequence: Synthetic peptide
  Seed: LRMKWMMAMKYPITA
LRMKLMMSMRYPTTA

SEQ ID NO: 234942 - protein, 15 aa, Artificial Sequence
  Description of Artificial Sequence: Synthetic peptide
  Seed: LRMKWMMAMKYPITA
LRMKLMMSMRYPVTA

SEQ ID NO: 234943 - protein, 15 aa, Artificial Sequence
  Description of Artificial Sequence: Synthetic peptide
  Seed: LRMKWMMAMKYPITA
LRMKLMMSMRYPWTA

SEQ ID NO: 234944 - protein, 15 aa, Artificial Sequence
  Description of Artificial Sequence: Synthetic peptide
  Seed: LRMKWMMAMKYPITA
LRMKLMMSMRYPYTA

SEQ ID NO: 234945 - protein, 15 aa, Artificial Sequence
  Description of Artificial Sequence: Synthetic peptide
  Seed: LRMKWMMAMKYPITA
LRMKLMMSMSYPATA

SEQ ID NO: 234946 - protein, 15 aa, Artificial Sequence
  Description of Artificial Sequence: Synthetic peptide
  Seed: LRMKWMMAMKYPITA
LRMKLMMSMSYPCTA

SEQ ID NO: 234947 - protein, 15 aa, Artificial Sequence
  Description of Artificial Sequence: Synthetic peptide
  Seed: LRMKWMMAMKYPITA
LRMKLMMSMSYPDTA

SEQ ID NO: 234948 - protein, 15 aa, Artificial Sequence
  Description of Artificial Sequence: Synthetic peptide
  Seed: LRMKWMMAMKYPITA
LRMKLMMSMSYPETA

SEQ ID NO: 234949 - protein, 15 aa, Artificial Sequence
  Description of Artificial Sequence: Synthetic peptide
  Seed: LRMKWMMAMKYPITA
LRMKLMMSMSYPFTA

SEQ ID NO: 234950 - protein, 15 aa, Artificial Sequence
  Description of Artificial Sequence: Synthetic peptide
  Seed: LRMKWMMAMKYPITA
LRMKLMMSMSYPGTA

SEQ ID NO: 234951 - protein, 15 aa, Artificial Sequence
  Description of Artificial Sequence: Synthetic peptide
  Seed: LRMKWMMAMKYPITA
LRMKLMMSMSYPHTA

SEQ ID NO: 234952 - protein, 15 aa, Artificial Sequence
  Description of Artificial Sequence: Synthetic peptide
  Seed: LRMKWMMAMKYPITA
LRMKLMMSMSYPITA

SEQ ID NO: 234953 - protein, 15 aa, Artificial Sequence
  Description of Artificial Sequence: Synthetic peptide
  Seed: LRMKWMMAMKYPITA
LRMKLMMSMSYPKTA

SEQ ID NO: 234954 - protein, 15 aa, Artificial Sequence
  Description of Artificial Sequence: Synthetic peptide
  Seed: LRMKWMMAMKYPITA
LRMKLMMSMSYPLTA

SEQ ID NO: 234955 - protein, 15 aa, Artificial Sequence
  Description of Artificial Sequence: Synthetic peptide
  Seed: LRMKWMMAMKYPITA
LRMKLMMSMSYPMTA

SEQ ID NO: 234956 - protein, 15 aa, Artificial Sequence
  Description of Artificial Sequence: Synthetic peptide
  Seed: LRMKWMMAMKYPITA
LRMKLMMSMSYPNTA

SEQ ID NO: 234957 - protein, 15 aa, Artificial Sequence
  Description of Artificial Sequence: Synthetic peptide
  Seed: LRMKWMMAMKYPITA
LRMKLMMSMSYPPTA

SEQ ID NO: 234958 - protein, 15 aa, Artificial Sequence
  Description of Artificial Sequence: Synthetic peptide
  Seed: LRMKWMMAMKYPITA
LRMKLMMSMSYPQTA

SEQ ID NO: 234959 - protein, 15 aa, Artificial Sequence
  Description of Artificial Sequence: Synthetic peptide
  Seed: LRMKWMMAMKYPITA
LRMKLMMSMSYPRTA

SEQ ID NO: 234960 - protein, 15 aa, Artificial Sequence
  Description of Artificial Sequence: Synthetic peptide
  Seed: LRMKWMMAMKYPITA
LRMKLMMSMSYPSTA

SEQ ID NO: 234961 - protein, 15 aa, Artificial Sequence
  Description of Artificial Sequence: Synthetic peptide
  Seed: LRMKWMMAMKYPITA
LRMKLMMSMSYPTTA

SEQ ID NO: 234962 - protein, 15 aa, Artificial Sequence
  Description of Artificial Sequence: Synthetic peptide
  Seed: LRMKWMMAMKYPITA
LRMKLMMSMSYPVTA

SEQ ID NO: 234963 - protein, 15 aa, Artificial Sequence
  Description of Artificial Sequence: Synthetic peptide
  Seed: LRMKWMMAMKYPITA
LRMKLMMSMSYPWTA

SEQ ID NO: 234964 - protein, 15 aa, Artificial Sequence
  Description of Artificial Sequence: Synthetic peptide
  Seed: LRMKWMMAMKYPITA
LRMKLMMSMSYPYTA

SEQ ID NO: 234965 - protein, 15 aa, Artificial Sequence
  Description of Artificial Sequence: Synthetic peptide
  Seed: LRMKWMMAMKYPITA
LRMKLMMSMTYPATA

SEQ ID NO: 234966 - protein, 15 aa, Artificial Sequence
  Description of Artificial Sequence: Synthetic peptide
  Seed: LRMKWMMAMKYPITA
LRMKLMMSMTYPCTA

SEQ ID NO: 234967 - protein, 15 aa, Artificial Sequence
  Description of Artificial Sequence: Synthetic peptide
  Seed: LRMKWMMAMKYPITA
LRMKLMMSMTYPDTA

SEQ ID NO: 234968 - protein, 15 aa, Artificial Sequence
  Description of Artificial Sequence: Synthetic peptide
  Seed: LRMKWMMAMKYPITA
LRMKLMMSMTYPETA

SEQ ID NO: 234969 - protein, 15 aa, Artificial Sequence
  Description of Artificial Sequence: Synthetic peptide
  Seed: LRMKWMMAMKYPITA
LRMKLMMSMTYPFTA

SEQ ID NO: 234970 - protein, 15 aa, Artificial Sequence
  Description of Artificial Sequence: Synthetic peptide
  Seed: LRMKWMMAMKYPITA
LRMKLMMSMTYPGTA

SEQ ID NO: 234971 - protein, 15 aa, Artificial Sequence
  Description of Artificial Sequence: Synthetic peptide
  Seed: LRMKWMMAMKYPITA
LRMKLMMSMTYPHTA

SEQ ID NO: 234972 - protein, 15 aa, Artificial Sequence
  Description of Artificial Sequence: Synthetic peptide
  Seed: LRMKWMMAMKYPITA
LRMKLMMSMTYPITA

SEQ ID NO: 234973 - protein, 15 aa, Artificial Sequence
  Description of Artificial Sequence: Synthetic peptide
  Seed: LRMKWMMAMKYPITA
LRMKLMMSMTYPKTA

SEQ ID NO: 234974 - protein, 15 aa, Artificial Sequence
  Description of Artificial Sequence: Synthetic peptide
  Seed: LRMKWMMAMKYPITA
LRMKLMMSMTYPLTA

SEQ ID NO: 234975 - protein, 15 aa, Artificial Sequence
  Description of Artificial Sequence: Synthetic peptide
  Seed: LRMKWMMAMKYPITA
LRMKLMMSMTYPMTA

SEQ ID NO: 234976 - protein, 15 aa, Artificial Sequence
  Description of Artificial Sequence: Synthetic peptide
  Seed: LRMKWMMAMKYPITA
LRMKLMMSMTYPNTA

SEQ ID NO: 234977 - protein, 15 aa, Artificial Sequence
  Description of Artificial Sequence: Synthetic peptide
  Seed: LRMKWMMAMKYPITA
LRMKLMMSMTYPPTA

SEQ ID NO: 234978 - protein, 15 aa, Artificial Sequence
  Description of Artificial Sequence: Synthetic peptide
  Seed: LRMKWMMAMKYPITA
LRMKLMMSMTYPQTA

SEQ ID NO: 234979 - protein, 15 aa, Artificial Sequence
  Description of Artificial Sequence: Synthetic peptide
  Seed: LRMKWMMAMKYPITA
LRMKLMMSMTYPRTA

SEQ ID NO: 234980 - protein, 15 aa, Artificial Sequence
  Description of Artificial Sequence: Synthetic peptide
  Seed: LRMKWMMAMKYPITA
LRMKLMMSMTYPSTA

SEQ ID NO: 234981 - protein, 15 aa, Artificial Sequence
  Description of Artificial Sequence: Synthetic peptide
  Seed: LRMKWMMAMKYPITA
LRMKLMMSMTYPTTA

SEQ ID NO: 234982 - protein, 15 aa, Artificial Sequence
  Description of Artificial Sequence: Synthetic peptide
  Seed: LRMKWMMAMKYPITA
LRMKLMMSMTYPVTA

SEQ ID NO: 234983 - protein, 15 aa, Artificial Sequence
  Description of Artificial Sequence: Synthetic peptide
  Seed: LRMKWMMAMKYPITA
LRMKLMMSMTYPYTA

SEQ ID NO: 234984 - protein, 15 aa, Artificial Sequence
  Description of Artificial Sequence: Synthetic peptide
  Seed: LRMKWMMAMKYPITA
LRMKLMMSMVYPATA

SEQ ID NO: 234985 - protein, 15 aa, Artificial Sequence
  Description of Artificial Sequence: Synthetic peptide
  Seed: LRMKWMMAMKYPITA
LRMKLMMSMVYPCTA

SEQ ID NO: 234986 - protein, 15 aa, Artificial Sequence
  Description of Artificial Sequence: Synthetic peptide
  Seed: LRMKWMMAMKYPITA
LRMKLMMSMVYPDTA

SEQ ID NO: 234987 - protein, 15 aa, Artificial Sequence
  Description of Artificial Sequence: Synthetic peptide
  Seed: LRMKWMMAMKYPITA
LRMKLMMSMVYPETA

SEQ ID NO: 234988 - protein, 15 aa, Artificial Sequence
  Description of Artificial Sequence: Synthetic peptide
  Seed: LRMKWMMAMKYPITA
LRMKLMMSMVYPFTA

SEQ ID NO: 234989 - protein, 15 aa, Artificial Sequence
  Description of Artificial Sequence: Synthetic peptide
  Seed: LRMKWMMAMKYPITA
LRMKLMMSMVYPGTA

SEQ ID NO: 234990 - protein, 15 aa, Artificial Sequence
  Description of Artificial Sequence: Synthetic peptide
  Seed: LRMKWMMAMKYPITA
LRMKLMMSMVYPHTA

SEQ ID NO: 234991 - protein, 15 aa, Artificial Sequence
  Description of Artificial Sequence: Synthetic peptide
  Seed: LRMKWMMAMKYPITA
LRMKLMMSMVYPITA

SEQ ID NO: 234992 - protein, 15 aa, Artificial Sequence
  Description of Artificial Sequence: Synthetic peptide
  Seed: LRMKWMMAMKYPITA
LRMKLMMSMVYPKTA

SEQ ID NO: 234993 - protein, 15 aa, Artificial Sequence
  Description of Artificial Sequence: Synthetic peptide
  Seed: LRMKWMMAMKYPITA
LRMKLMMSMVYPLTA

SEQ ID NO: 234994 - protein, 15 aa, Artificial Sequence
  Description of Artificial Sequence: Synthetic peptide
  Seed: LRMKWMMAMKYPITA
LRMKLMMSMVYPMTA

SEQ ID NO: 234995 - protein, 15 aa, Artificial Sequence
  Description of Artificial Sequence: Synthetic peptide
  Seed: LRMKWMMAMKYPITA
LRMKLMMSMVYPNTA

SEQ ID NO: 234996 - protein, 15 aa, Artificial Sequence
  Description of Artificial Sequence: Synthetic peptide
  Seed: LRMKWMMAMKYPITA
LRMKLMMSMVYPPTA

SEQ ID NO: 234997 - protein, 15 aa, Artificial Sequence
  Description of Artificial Sequence: Synthetic peptide
  Seed: LRMKWMMAMKYPITA
LRMKLMMSMVYPQTA

SEQ ID NO: 234998 - protein, 15 aa, Artificial Sequence
  Description of Artificial Sequence: Synthetic peptide
  Seed: LRMKWMMAMKYPITA
LRMKLMMSMVYPRTA

SEQ ID NO: 234999 - protein, 15 aa, Artificial Sequence
  Description of Artificial Sequence: Synthetic peptide
  Seed: LRMKWMMAMKYPITA
LRMKLMMSMVYPSTA

SEQ ID NO: 235000 - protein, 15 aa, Artificial Sequence
  Description of Artificial Sequence: Synthetic peptide
  Seed: LRMKWMMAMKYPITA
LRMKLMMSMVYPTTA

SEQ ID NO: 235001 - protein, 15 aa, Artificial Sequence
  Description of Artificial Sequence: Synthetic peptide
  Seed: LRMKWMMAMKYPITA
LRMKLMMSMVYPVTA

SEQ ID NO: 235002 - protein, 15 aa, Artificial Sequence
  Description of Artificial Sequence: Synthetic peptide
  Seed: LRMKWMMAMKYPITA
LRMKLMMSMVYPYTA

SEQ ID NO: 235003 - protein, 15 aa, Artificial Sequence
  Description of Artificial Sequence: Synthetic peptide
  Seed: LRMKWMMAMKYPITA
LRMKLMMSMWYPATA

SEQ ID NO: 235004 - protein, 15 aa, Artificial Sequence
  Description of Artificial Sequence: Synthetic peptide
  Seed: LRMKWMMAMKYPITA
LRMKLMMSMWYPLTA

SEQ ID NO: 235005 - protein, 15 aa, Artificial Sequence
  Description of Artificial Sequence: Synthetic peptide
  Seed: LRMKWMMAMKYPITA
LRMKLMMSMWYPVTA

SEQ ID NO: 235006 - protein, 15 aa, Artificial Sequence
  Description of Artificial Sequence: Synthetic peptide
  Seed: LRMKWMMAMKYPITA
LRMKLMMSMYYPITA

SEQ ID NO: 235007 - protein, 15 aa, Artificial Sequence
  Description of Artificial Sequence: Synthetic peptide
  Seed: LRMKWMMAMKYPITA
LRMKLMMSMYYPLTA

SEQ ID NO: 235008 - protein, 15 aa, Artificial Sequence
  Description of Artificial Sequence: Synthetic peptide
  Seed: LRMKWMMAMKYPITA
LRMKLMMSMYYPVTA

SEQ ID NO: 235009 - protein, 15 aa, Artificial Sequence
  Description of Artificial Sequence: Synthetic peptide
  Seed: LRMKWMMAMKYPITA
LRMKLMMTMAYPATA

SEQ ID NO: 235010 - protein, 15 aa, Artificial Sequence
  Description of Artificial Sequence: Synthetic peptide
  Seed: LRMKWMMAMKYPITA
LRMKLMMTMAYPCTA

SEQ ID NO: 235011 - protein, 15 aa, Artificial Sequence
  Description of Artificial Sequence: Synthetic peptide
  Seed: LRMKWMMAMKYPITA
LRMKLMMTMAYPDTA

SEQ ID NO: 235012 - protein, 15 aa, Artificial Sequence
  Description of Artificial Sequence: Synthetic peptide
  Seed: LRMKWMMAMKYPITA
LRMKLMMTMAYPETA

SEQ ID NO: 235013 - protein, 15 aa, Artificial Sequence
  Description of Artificial Sequence: Synthetic peptide
  Seed: LRMKWMMAMKYPITA
LRMKLMMTMAYPFTA

SEQ ID NO: 235014 - protein, 15 aa, Artificial Sequence
  Description of Artificial Sequence: Synthetic peptide
  Seed: LRMKWMMAMKYPITA
LRMKLMMTMAYPGTA

SEQ ID NO: 235015 - protein, 15 aa, Artificial Sequence
  Description of Artificial Sequence: Synthetic peptide
  Seed: LRMKWMMAMKYPITA
LRMKLMMTMAYPHTA

SEQ ID NO: 235016 - protein, 15 aa, Artificial Sequence
  Description of Artificial Sequence: Synthetic peptide
  Seed: LRMKWMMAMKYPITA
LRMKLMMTMAYPITA

SEQ ID NO: 235017 - protein, 15 aa, Artificial Sequence
  Description of Artificial Sequence: Synthetic peptide
  Seed: LRMKWMMAMKYPITA
LRMKLMMTMAYPKTA

SEQ ID NO: 235018 - protein, 15 aa, Artificial Sequence
  Description of Artificial Sequence: Synthetic peptide
  Seed: LRMKWMMAMKYPITA
LRMKLMMTMAYPLTA

SEQ ID NO: 235019 - protein, 15 aa, Artificial Sequence
  Description of Artificial Sequence: Synthetic peptide
  Seed: LRMKWMMAMKYPITA
LRMKLMMTMAYPMTA

SEQ ID NO: 235020 - protein, 15 aa, Artificial Sequence
  Description of Artificial Sequence: Synthetic peptide
  Seed: LRMKWMMAMKYPITA
LRMKLMMTMAYPNTA

SEQ ID NO: 235021 - protein, 15 aa, Artificial Sequence
  Description of Artificial Sequence: Synthetic peptide
  Seed: LRMKWMMAMKYPITA
LRMKLMMTMAYPPTA

SEQ ID NO: 235022 - protein, 15 aa, Artificial Sequence
  Description of Artificial Sequence: Synthetic peptide
  Seed: LRMKWMMAMKYPITA
LRMKLMMTMAYPQTA

SEQ ID NO: 235023 - protein, 15 aa, Artificial Sequence
  Description of Artificial Sequence: Synthetic peptide
  Seed: LRMKWMMAMKYPITA
LRMKLMMTMAYPRTA

SEQ ID NO: 235024 - protein, 15 aa, Artificial Sequence
  Description of Artificial Sequence: Synthetic peptide
  Seed: LRMKWMMAMKYPITA
LRMKLMMTMAYPSTA

SEQ ID NO: 235025 - protein, 15 aa, Artificial Sequence
  Description of Artificial Sequence: Synthetic peptide
  Seed: LRMKWMMAMKYPITA
LRMKLMMTMAYPTTA

SEQ ID NO: 235026 - protein, 15 aa, Artificial Sequence
  Description of Artificial Sequence: Synthetic peptide
  Seed: LRMKWMMAMKYPITA
LRMKLMMTMAYPVTA

SEQ ID NO: 235027 - protein, 15 aa, Artificial Sequence
  Description of Artificial Sequence: Synthetic peptide
  Seed: LRMKWMMAMKYPITA
LRMKLMMTMAYPWTA

SEQ ID NO: 235028 - protein, 15 aa, Artificial Sequence
  Description of Artificial Sequence: Synthetic peptide
  Seed: LRMKWMMAMKYPITA
LRMKLMMTMAYPYTA

SEQ ID NO: 235029 - protein, 15 aa, Artificial Sequence
  Description of Artificial Sequence: Synthetic peptide
  Seed: LRMKWMMAMKYPITA
LRMKLMMTMCYPITA

SEQ ID NO: 235030 - protein, 15 aa, Artificial Sequence
  Description of Artificial Sequence: Synthetic peptide
  Seed: LRMKWMMAMKYPITA
LRMKLMMTMCYPVTA

SEQ ID NO: 235031 - protein, 15 aa, Artificial Sequence
  Description of Artificial Sequence: Synthetic peptide
  Seed: LRMKWMMAMKYPITA
LRMKLMMTMDYPITA

SEQ ID NO: 235032 - protein, 15 aa, Artificial Sequence
  Description of Artificial Sequence: Synthetic peptide
  Seed: LRMKWMMAMKYPITA
LRMKLMMTMDYPVTA

SEQ ID NO: 235033 - protein, 15 aa, Artificial Sequence
  Description of Artificial Sequence: Synthetic peptide
  Seed: LRMKWMMAMKYPITA
LRMKLMMTMEYPITA

SEQ ID NO: 235034 - protein, 15 aa, Artificial Sequence
  Description of Artificial Sequence: Synthetic peptide
  Seed: LRMKWMMAMKYPITA
LRMKLMMTMFYPATA

SEQ ID NO: 235035 - protein, 15 aa, Artificial Sequence
  Description of Artificial Sequence: Synthetic peptide
  Seed: LRMKWMMAMKYPITA
LRMKLMMTMFYPDTA

SEQ ID NO: 235036 - protein, 15 aa, Artificial Sequence
  Description of Artificial Sequence: Synthetic peptide
  Seed: LRMKWMMAMKYPITA
LRMKLMMTMFYPETA

SEQ ID NO: 235037 - protein, 15 aa, Artificial Sequence
  Description of Artificial Sequence: Synthetic peptide
  Seed: LRMKWMMAMKYPITA
LRMKLMMTMFYPFTA

SEQ ID NO: 235038 - protein, 15 aa, Artificial Sequence
  Description of Artificial Sequence: Synthetic peptide
  Seed: LRMKWMMAMKYPITA
LRMKLMMTMFYPITA

SEQ ID NO: 235039 - protein, 15 aa, Artificial Sequence
  Description of Artificial Sequence: Synthetic peptide
  Seed: LRMKWMMAMKYPITA
LRMKLMMTMFYPLTA

SEQ ID NO: 235040 - protein, 15 aa, Artificial Sequence
  Description of Artificial Sequence: Synthetic peptide
  Seed: LRMKWMMAMKYPITA
LRMKLMMTMFYPMTA

SEQ ID NO: 235041 - protein, 15 aa, Artificial Sequence
  Description of Artificial Sequence: Synthetic peptide
  Seed: LRMKWMMAMKYPITA
LRMKLMMTMFYPNTA

SEQ ID NO: 235042 - protein, 15 aa, Artificial Sequence
  Description of Artificial Sequence: Synthetic peptide
  Seed: LRMKWMMAMKYPITA
LRMKLMMTMFYPSTA

SEQ ID NO: 235043 - protein, 15 aa, Artificial Sequence
  Description of Artificial Sequence: Synthetic peptide
  Seed: LRMKWMMAMKYPITA
LRMKLMMTMFYPTTA

SEQ ID NO: 235044 - protein, 15 aa, Artificial Sequence
  Description of Artificial Sequence: Synthetic peptide
  Seed: LRMKWMMAMKYPITA
LRMKLMMTMFYPVTA

SEQ ID NO: 235045 - protein, 15 aa, Artificial Sequence
  Description of Artificial Sequence: Synthetic peptide
  Seed: LRMKWMMAMKYPITA
LRMKLMMTMFYPYTA

SEQ ID NO: 235046 - protein, 15 aa, Artificial Sequence
  Description of Artificial Sequence: Synthetic peptide
  Seed: LRMKWMMAMKYPITA
LRMKLMMTMGYPATA

SEQ ID NO: 235047 - protein, 15 aa, Artificial Sequence
  Description of Artificial Sequence: Synthetic peptide
  Seed: LRMKWMMAMKYPITA
LRMKLMMTMGYPCTA

SEQ ID NO: 235048 - protein, 15 aa, Artificial Sequence
  Description of Artificial Sequence: Synthetic peptide
  Seed: LRMKWMMAMKYPITA
LRMKLMMTMGYPFTA

SEQ ID NO: 235049 - protein, 15 aa, Artificial Sequence
  Description of Artificial Sequence: Synthetic peptide
  Seed: LRMKWMMAMKYPITA
LRMKLMMTMGYPGTA

SEQ ID NO: 235050 - protein, 15 aa, Artificial Sequence
  Description of Artificial Sequence: Synthetic peptide
  Seed: LRMKWMMAMKYPITA
LRMKLMMTMGYPHTA

SEQ ID NO: 235051 - protein, 15 aa, Artificial Sequence
  Description of Artificial Sequence: Synthetic peptide
  Seed: LRMKWMMAMKYPITA
LRMKLMMTMGYPITA

SEQ ID NO: 235052 - protein, 15 aa, Artificial Sequence
  Description of Artificial Sequence: Synthetic peptide
  Seed: LRMKWMMAMKYPITA
LRMKLMMTMGYPKTA

SEQ ID NO: 235053 - protein, 15 aa, Artificial Sequence
  Description of Artificial Sequence: Synthetic peptide
  Seed: LRMKWMMAMKYPITA
LRMKLMMTMGYPLTA

SEQ ID NO: 235054 - protein, 15 aa, Artificial Sequence
  Description of Artificial Sequence: Synthetic peptide
  Seed: LRMKWMMAMKYPITA
LRMKLMMTMGYPMTA

SEQ ID NO: 235055 - protein, 15 aa, Artificial Sequence
  Description of Artificial Sequence: Synthetic peptide
  Seed: LRMKWMMAMKYPITA
LRMKLMMTMGYPNTA

SEQ ID NO: 235056 - protein, 15 aa, Artificial Sequence
  Description of Artificial Sequence: Synthetic peptide
  Seed: LRMKWMMAMKYPITA
LRMKLMMTMGYPPTA

SEQ ID NO: 235057 - protein, 15 aa, Artificial Sequence
  Description of Artificial Sequence: Synthetic peptide
  Seed: LRMKWMMAMKYPITA
LRMKLMMTMGYPQTA

SEQ ID NO: 235058 - protein, 15 aa, Artificial Sequence
  Description of Artificial Sequence: Synthetic peptide
  Seed: LRMKWMMAMKYPITA
LRMKLMMTMGYPRTA

SEQ ID NO: 235059 - protein, 15 aa, Artificial Sequence
  Description of Artificial Sequence: Synthetic peptide
  Seed: LRMKWMMAMKYPITA
LRMKLMMTMGYPSTA

SEQ ID NO: 235060 - protein, 15 aa, Artificial Sequence
  Description of Artificial Sequence: Synthetic peptide
  Seed: LRMKWMMAMKYPITA
LRMKLMMTMGYPTTA

SEQ ID NO: 235061 - protein, 15 aa, Artificial Sequence
  Description of Artificial Sequence: Synthetic peptide
  Seed: LRMKWMMAMKYPITA
LRMKLMMTMGYPVTA

SEQ ID NO: 235062 - protein, 15 aa, Artificial Sequence
  Description of Artificial Sequence: Synthetic peptide
  Seed: LRMKWMMAMKYPITA
LRMKLMMTMGYPYTA

SEQ ID NO: 235063 - protein, 15 aa, Artificial Sequence
  Description of Artificial Sequence: Synthetic peptide
  Seed: LRMKWMMAMKYPITA
LRMKLMMTMHYPATA

SEQ ID NO: 235064 - protein, 15 aa, Artificial Sequence
  Description of Artificial Sequence: Synthetic peptide
  Seed: LRMKWMMAMKYPITA
LRMKLMMTMHYPFTA

SEQ ID NO: 235065 - protein, 15 aa, Artificial Sequence
  Description of Artificial Sequence: Synthetic peptide
  Seed: LRMKWMMAMKYPITA
LRMKLMMTMHYPGTA

SEQ ID NO: 235066 - protein, 15 aa, Artificial Sequence
  Description of Artificial Sequence: Synthetic peptide
  Seed: LRMKWMMAMKYPITA
LRMKLMMTMHYPHTA

SEQ ID NO: 235067 - protein, 15 aa, Artificial Sequence
  Description of Artificial Sequence: Synthetic peptide
  Seed: LRMKWMMAMKYPITA
LRMKLMMTMHYPITA

SEQ ID NO: 235068 - protein, 15 aa, Artificial Sequence
  Description of Artificial Sequence: Synthetic peptide
  Seed: LRMKWMMAMKYPITA
LRMKLMMTMHYPKTA

SEQ ID NO: 235069 - protein, 15 aa, Artificial Sequence
  Description of Artificial Sequence: Synthetic peptide
  Seed: LRMKWMMAMKYPITA
LRMKLMMTMHYPLTA

SEQ ID NO: 235070 - protein, 15 aa, Artificial Sequence
  Description of Artificial Sequence: Synthetic peptide
  Seed: LRMKWMMAMKYPITA
LRMKLMMTMHYPMTA

SEQ ID NO: 235071 - protein, 15 aa, Artificial Sequence
  Description of Artificial Sequence: Synthetic peptide
  Seed: LRMKWMMAMKYPITA
LRMKLMMTMHYPQTA

SEQ ID NO: 235072 - protein, 15 aa, Artificial Sequence
  Description of Artificial Sequence: Synthetic peptide
  Seed: LRMKWMMAMKYPITA
LRMKLMMTMHYPRTA

SEQ ID NO: 235073 - protein, 15 aa, Artificial Sequence
  Description of Artificial Sequence: Synthetic peptide
  Seed: LRMKWMMAMKYPITA
LRMKLMMTMHYPSTA

SEQ ID NO: 235074 - protein, 15 aa, Artificial Sequence
  Description of Artificial Sequence: Synthetic peptide
  Seed: LRMKWMMAMKYPITA
LRMKLMMTMHYPTTA

SEQ ID NO: 235075 - protein, 15 aa, Artificial Sequence
  Description of Artificial Sequence: Synthetic peptide
  Seed: LRMKWMMAMKYPITA
LRMKLMMTMHYPVTA

SEQ ID NO: 235076 - protein, 15 aa, Artificial Sequence
  Description of Artificial Sequence: Synthetic peptide
  Seed: LRMKWMMAMKYPITA
LRMKLMMTMHYPYTA

SEQ ID NO: 235077 - protein, 15 aa, Artificial Sequence
  Description of Artificial Sequence: Synthetic peptide
  Seed: LRMKWMMAMKYPITA
LRMKLMMTMIYPATA

SEQ ID NO: 235078 - protein, 15 aa, Artificial Sequence
  Description of Artificial Sequence: Synthetic peptide
  Seed: LRMKWMMAMKYPITA
LRMKLMMTMIYPFTA

SEQ ID NO: 235079 - protein, 15 aa, Artificial Sequence
  Description of Artificial Sequence: Synthetic peptide
  Seed: LRMKWMMAMKYPITA
LRMKLMMTMIYPGTA

SEQ ID NO: 235080 - protein, 15 aa, Artificial Sequence
  Description of Artificial Sequence: Synthetic peptide
  Seed: LRMKWMMAMKYPITA
LRMKLMMTMIYPITA

SEQ ID NO: 235081 - protein, 15 aa, Artificial Sequence
  Description of Artificial Sequence: Synthetic peptide
  Seed: LRMKWMMAMKYPITA
LRMKLMMTMIYPLTA

SEQ ID NO: 235082 - protein, 15 aa, Artificial Sequence
  Description of Artificial Sequence: Synthetic peptide
  Seed: LRMKWMMAMKYPITA
LRMKLMMTMIYPMTA

SEQ ID NO: 235083 - protein, 15 aa, Artificial Sequence
  Description of Artificial Sequence: Synthetic peptide
  Seed: LRMKWMMAMKYPITA
LRMKLMMTMIYPRTA

SEQ ID NO: 235084 - protein, 15 aa, Artificial Sequence
  Description of Artificial Sequence: Synthetic peptide
  Seed: LRMKWMMAMKYPITA
LRMKLMMTMIYPSTA

SEQ ID NO: 235085 - protein, 15 aa, Artificial Sequence
  Description of Artificial Sequence: Synthetic peptide
  Seed: LRMKWMMAMKYPITA
LRMKLMMTMIYPTTA

SEQ ID NO: 235086 - protein, 15 aa, Artificial Sequence
  Description of Artificial Sequence: Synthetic peptide
  Seed: LRMKWMMAMKYPITA
LRMKLMMTMIYPVTA

SEQ ID NO: 235087 - protein, 15 aa, Artificial Sequence
  Description of Artificial Sequence: Synthetic peptide
  Seed: LRMKWMMAMKYPITA
LRMKLMMTMKYPATA

SEQ ID NO: 235088 - protein, 15 aa, Artificial Sequence
  Description of Artificial Sequence: Synthetic peptide
  Seed: LRMKWMMAMKYPITA
LRMKLMMTMKYPCTA

SEQ ID NO: 235089 - protein, 15 aa, Artificial Sequence
  Description of Artificial Sequence: Synthetic peptide
  Seed: LRMKWMMAMKYPITA
LRMKLMMTMKYPDTA

SEQ ID NO: 235090 - protein, 15 aa, Artificial Sequence
  Description of Artificial Sequence: Synthetic peptide
  Seed: LRMKWMMAMKYPITA
LRMKLMMTMKYPETA

SEQ ID NO: 235091 - protein, 15 aa, Artificial Sequence
  Description of Artificial Sequence: Synthetic peptide
  Seed: LRMKWMMAMKYPITA
LRMKLMMTMKYPFTA

SEQ ID NO: 235092 - protein, 15 aa, Artificial Sequence
  Description of Artificial Sequence: Synthetic peptide
  Seed: LRMKWMMAMKYPITA
LRMKLMMTMKYPGTA

SEQ ID NO: 235093 - protein, 15 aa, Artificial Sequence
  Description of Artificial Sequence: Synthetic peptide
  Seed: LRMKWMMAMKYPITA
LRMKLMMTMKYPHTA

SEQ ID NO: 235094 - protein, 15 aa, Artificial Sequence
  Description of Artificial Sequence: Synthetic peptide
  Seed: LRMKWMMAMKYPITA
LRMKLMMTMKYPITA

SEQ ID NO: 235095 - protein, 15 aa, Artificial Sequence
  Description of Artificial Sequence: Synthetic peptide
  Seed: LRMKWMMAMKYPITA
LRMKLMMTMKYPKTA

SEQ ID NO: 235096 - protein, 15 aa, Artificial Sequence
  Description of Artificial Sequence: Synthetic peptide
  Seed: LRMKWMMAMKYPITA
LRMKLMMTMKYPLTA

SEQ ID NO: 235097 - protein, 15 aa, Artificial Sequence
  Description of Artificial Sequence: Synthetic peptide
  Seed: LRMKWMMAMKYPITA
LRMKLMMTMKYPMTA

SEQ ID NO: 235098 - protein, 15 aa, Artificial Sequence
  Description of Artificial Sequence: Synthetic peptide
  Seed: LRMKWMMAMKYPITA
LRMKLMMTMKYPNTA

SEQ ID NO: 235099 - protein, 15 aa, Artificial Sequence
  Description of Artificial Sequence: Synthetic peptide
  Seed: LRMKWMMAMKYPITA
LRMKLMMTMKYPPTA

SEQ ID NO: 235100 - protein, 15 aa, Artificial Sequence
  Description of Artificial Sequence: Synthetic peptide
  Seed: LRMKWMMAMKYPITA
LRMKLMMTMKYPQTA

SEQ ID NO: 235101 - protein, 15 aa, Artificial Sequence
  Description of Artificial Sequence: Synthetic peptide
  Seed: LRMKWMMAMKYPITA
LRMKLMMTMKYPRTA

SEQ ID NO: 235102 - protein, 15 aa, Artificial Sequence
  Description of Artificial Sequence: Synthetic peptide
  Seed: LRMKWMMAMKYPITA
LRMKLMMTMKYPSTA

SEQ ID NO: 235103 - protein, 15 aa, Artificial Sequence
  Description of Artificial Sequence: Synthetic peptide
  Seed: LRMKWMMAMKYPITA
LRMKLMMTMKYPTTA

SEQ ID NO: 235104 - protein, 15 aa, Artificial Sequence
  Description of Artificial Sequence: Synthetic peptide
  Seed: LRMKWMMAMKYPITA
LRMKLMMTMKYPVTA

SEQ ID NO: 235105 - protein, 15 aa, Artificial Sequence
  Description of Artificial Sequence: Synthetic peptide
  Seed: LRMKWMMAMKYPITA
LRMKLMMTMKYPWTA

SEQ ID NO: 235106 - protein, 15 aa, Artificial Sequence
  Description of Artificial Sequence: Synthetic peptide
  Seed: LRMKWMMAMKYPITA
LRMKLMMTMKYPYTA

SEQ ID NO: 235107 - protein, 15 aa, Artificial Sequence
  Description of Artificial Sequence: Synthetic peptide
  Seed: LRMKWMMAMKYPITA
LRMKLMMTMLYPITA

SEQ ID NO: 235108 - protein, 15 aa, Artificial Sequence
  Description of Artificial Sequence: Synthetic peptide
  Seed: LRMKWMMAMKYPITA
LRMKLMMTMLYPRTA

SEQ ID NO: 235109 - protein, 15 aa, Artificial Sequence
  Description of Artificial Sequence: Synthetic peptide
  Seed: LRMKWMMAMKYPITA
LRMKLMMTMMYPITA

SEQ ID NO: 235110 - protein, 15 aa, Artificial Sequence
  Description of Artificial Sequence: Synthetic peptide
  Seed: LRMKWMMAMKYPITA
LRMKLMMTMMYPLTA

SEQ ID NO: 235111 - protein, 15 aa, Artificial Sequence
  Description of Artificial Sequence: Synthetic peptide
  Seed: LRMKWMMAMKYPITA
LRMKLMMTMMYPRTA

SEQ ID NO: 235112 - protein, 15 aa, Artificial Sequence
  Description of Artificial Sequence: Synthetic peptide
  Seed: LRMKWMMAMKYPITA
LRMKLMMTMMYPVTA

SEQ ID NO: 235113 - protein, 15 aa, Artificial Sequence
  Description of Artificial Sequence: Synthetic peptide
  Seed: LRMKWMMAMKYPITA
LRMKLMMTMNYPATA

SEQ ID NO: 235114 - protein, 15 aa, Artificial Sequence
  Description of Artificial Sequence: Synthetic peptide
  Seed: LRMKWMMAMKYPITA
LRMKLMMTMNYPDTA

SEQ ID NO: 235115 - protein, 15 aa, Artificial Sequence
  Description of Artificial Sequence: Synthetic peptide
  Seed: LRMKWMMAMKYPITA
LRMKLMMTMNYPETA

SEQ ID NO: 235116 - protein, 15 aa, Artificial Sequence
  Description of Artificial Sequence: Synthetic peptide
  Seed: LRMKWMMAMKYPITA
LRMKLMMTMNYPFTA

SEQ ID NO: 235117 - protein, 15 aa, Artificial Sequence
  Description of Artificial Sequence: Synthetic peptide
  Seed: LRMKWMMAMKYPITA
LRMKLMMTMNYPGTA

SEQ ID NO: 235118 - protein, 15 aa, Artificial Sequence
  Description of Artificial Sequence: Synthetic peptide
  Seed: LRMKWMMAMKYPITA
LRMKLMMTMNYPITA

SEQ ID NO: 235119 - protein, 15 aa, Artificial Sequence
  Description of Artificial Sequence: Synthetic peptide
  Seed: LRMKWMMAMKYPITA
LRMKLMMTMNYPKTA

SEQ ID NO: 235120 - protein, 15 aa, Artificial Sequence
  Description of Artificial Sequence: Synthetic peptide
  Seed: LRMKWMMAMKYPITA
LRMKLMMTMNYPLTA

SEQ ID NO: 235121 - protein, 15 aa, Artificial Sequence
  Description of Artificial Sequence: Synthetic peptide
  Seed: LRMKWMMAMKYPITA
LRMKLMMTMNYPMTA

SEQ ID NO: 235122 - protein, 15 aa, Artificial Sequence
  Description of Artificial Sequence: Synthetic peptide
  Seed: LRMKWMMAMKYPITA
LRMKLMMTMNYPNTA

SEQ ID NO: 235123 - protein, 15 aa, Artificial Sequence
  Description of Artificial Sequence: Synthetic peptide
  Seed: LRMKWMMAMKYPITA
LRMKLMMTMNYPRTA

SEQ ID NO: 235124 - protein, 15 aa, Artificial Sequence
  Description of Artificial Sequence: Synthetic peptide
  Seed: LRMKWMMAMKYPITA
LRMKLMMTMNYPSTA

SEQ ID NO: 235125 - protein, 15 aa, Artificial Sequence
  Description of Artificial Sequence: Synthetic peptide
  Seed: LRMKWMMAMKYPITA
LRMKLMMTMNYPTTA

SEQ ID NO: 235126 - protein, 15 aa, Artificial Sequence
  Description of Artificial Sequence: Synthetic peptide
  Seed: LRMKWMMAMKYPITA
LRMKLMMTMNYPVTA

SEQ ID NO: 235127 - protein, 15 aa, Artificial Sequence
  Description of Artificial Sequence: Synthetic peptide
  Seed: LRMKWMMAMKYPITA
LRMKLMMTMNYPYTA

SEQ ID NO: 235128 - protein, 15 aa, Artificial Sequence
  Description of Artificial Sequence: Synthetic peptide
  Seed: LRMKWMMAMKYPITA
LRMKLMMTMPYPATA

SEQ ID NO: 235129 - protein, 15 aa, Artificial Sequence
  Description of Artificial Sequence: Synthetic peptide
  Seed: LRMKWMMAMKYPITA
LRMKLMMTMPYPCTA

SEQ ID NO: 235130 - protein, 15 aa, Artificial Sequence
  Description of Artificial Sequence: Synthetic peptide
  Seed: LRMKWMMAMKYPITA
LRMKLMMTMPYPDTA

SEQ ID NO: 235131 - protein, 15 aa, Artificial Sequence
  Description of Artificial Sequence: Synthetic peptide
  Seed: LRMKWMMAMKYPITA
LRMKLMMTMPYPETA

SEQ ID NO: 235132 - protein, 15 aa, Artificial Sequence
  Description of Artificial Sequence: Synthetic peptide
  Seed: LRMKWMMAMKYPITA
LRMKLMMTMPYPFTA

SEQ ID NO: 235133 - protein, 15 aa, Artificial Sequence
  Description of Artificial Sequence: Synthetic peptide
  Seed: LRMKWMMAMKYPITA
LRMKLMMTMPYPGTA

SEQ ID NO: 235134 - protein, 15 aa, Artificial Sequence
  Description of Artificial Sequence: Synthetic peptide
  Seed: LRMKWMMAMKYPITA
LRMKLMMTMPYPHTA

SEQ ID NO: 235135 - protein, 15 aa, Artificial Sequence
  Description of Artificial Sequence: Synthetic peptide
  Seed: LRMKWMMAMKYPITA
LRMKLMMTMPYPITA

SEQ ID NO: 235136 - protein, 15 aa, Artificial Sequence
  Description of Artificial Sequence: Synthetic peptide
  Seed: LRMKWMMAMKYPITA
LRMKLMMTMPYPLTA

SEQ ID NO: 235137 - protein, 15 aa, Artificial Sequence
  Description of Artificial Sequence: Synthetic peptide
  Seed: LRMKWMMAMKYPITA
LRMKLMMTMPYPMTA

SEQ ID NO: 235138 - protein, 15 aa, Artificial Sequence
  Description of Artificial Sequence: Synthetic peptide
  Seed: LRMKWMMAMKYPITA
LRMKLMMTMPYPNTA

SEQ ID NO: 235139 - protein, 15 aa, Artificial Sequence
  Description of Artificial Sequence: Synthetic peptide
  Seed: LRMKWMMAMKYPITA
LRMKLMMTMPYPPTA

SEQ ID NO: 235140 - protein, 15 aa, Artificial Sequence
  Description of Artificial Sequence: Synthetic peptide
  Seed: LRMKWMMAMKYPITA
LRMKLMMTMPYPQTA

SEQ ID NO: 235141 - protein, 15 aa, Artificial Sequence
  Description of Artificial Sequence: Synthetic peptide
  Seed: LRMKWMMAMKYPITA
LRMKLMMTMPYPRTA

SEQ ID NO: 235142 - protein, 15 aa, Artificial Sequence
  Description of Artificial Sequence: Synthetic peptide
  Seed: LRMKWMMAMKYPITA
LRMKLMMTMPYPSTA

SEQ ID NO: 235143 - protein, 15 aa, Artificial Sequence
  Description of Artificial Sequence: Synthetic peptide
  Seed: LRMKWMMAMKYPITA
LRMKLMMTMPYPTTA

SEQ ID NO: 235144 - protein, 15 aa, Artificial Sequence
  Description of Artificial Sequence: Synthetic peptide
  Seed: LRMKWMMAMKYPITA
LRMKLMMTMPYPVTA

SEQ ID NO: 235145 - protein, 15 aa, Artificial Sequence
  Description of Artificial Sequence: Synthetic peptide
  Seed: LRMKWMMAMKYPITA
LRMKLMMTMPYPWTA

SEQ ID NO: 235146 - protein, 15 aa, Artificial Sequence
  Description of Artificial Sequence: Synthetic peptide
  Seed: LRMKWMMAMKYPITA
LRMKLMMTMPYPYTA

SEQ ID NO: 235147 - protein, 15 aa, Artificial Sequence
  Description of Artificial Sequence: Synthetic peptide
  Seed: LRMKWMMAMKYPITA
LRMKLMMTMQYPITA

SEQ ID NO: 235148 - protein, 15 aa, Artificial Sequence
  Description of Artificial Sequence: Synthetic peptide
  Seed: LRMKWMMAMKYPITA
LRMKLMMTMQYPKTA

SEQ ID NO: 235149 - protein, 15 aa, Artificial Sequence
  Description of Artificial Sequence: Synthetic peptide
  Seed: LRMKWMMAMKYPITA
LRMKLMMTMQYPLTA

SEQ ID NO: 235150 - protein, 15 aa, Artificial Sequence
  Description of Artificial Sequence: Synthetic peptide
  Seed: LRMKWMMAMKYPITA
LRMKLMMTMQYPRTA

SEQ ID NO: 235151 - protein, 15 aa, Artificial Sequence
  Description of Artificial Sequence: Synthetic peptide
  Seed: LRMKWMMAMKYPITA
LRMKLMMTMQYPVTA

SEQ ID NO: 235152 - protein, 15 aa, Artificial Sequence
  Description of Artificial Sequence: Synthetic peptide
  Seed: LRMKWMMAMKYPITA
LRMKLMMTMRYPATA

SEQ ID NO: 235153 - protein, 15 aa, Artificial Sequence
  Description of Artificial Sequence: Synthetic peptide
  Seed: LRMKWMMAMKYPITA
LRMKLMMTMRYPCTA

SEQ ID NO: 235154 - protein, 15 aa, Artificial Sequence
  Description of Artificial Sequence: Synthetic peptide
  Seed: LRMKWMMAMKYPITA
LRMKLMMTMRYPDTA

SEQ ID NO: 235155 - protein, 15 aa, Artificial Sequence
  Description of Artificial Sequence: Synthetic peptide
  Seed: LRMKWMMAMKYPITA
LRMKLMMTMRYPETA

SEQ ID NO: 235156 - protein, 15 aa, Artificial Sequence
  Description of Artificial Sequence: Synthetic peptide
  Seed: LRMKWMMAMKYPITA
LRMKLMMTMRYPFTA

SEQ ID NO: 235157 - protein, 15 aa, Artificial Sequence
  Description of Artificial Sequence: Synthetic peptide
  Seed: LRMKWMMAMKYPITA
LRMKLMMTMRYPGTA

SEQ ID NO: 235158 - protein, 15 aa, Artificial Sequence
  Description of Artificial Sequence: Synthetic peptide
  Seed: LRMKWMMAMKYPITA
LRMKLMMTMRYPHTA

SEQ ID NO: 235159 - protein, 15 aa, Artificial Sequence
  Description of Artificial Sequence: Synthetic peptide
  Seed: LRMKWMMAMKYPITA
LRMKLMMTMRYPITA

SEQ ID NO: 235160 - protein, 15 aa, Artificial Sequence
  Description of Artificial Sequence: Synthetic peptide
  Seed: LRMKWMMAMKYPITA
LRMKLMMTMRYPKTA

SEQ ID NO: 235161 - protein, 15 aa, Artificial Sequence
  Description of Artificial Sequence: Synthetic peptide
  Seed: LRMKWMMAMKYPITA
LRMKLMMTMRYPLTA

SEQ ID NO: 235162 - protein, 15 aa, Artificial Sequence
  Description of Artificial Sequence: Synthetic peptide
  Seed: LRMKWMMAMKYPITA
LRMKLMMTMRYPMTA

SEQ ID NO: 235163 - protein, 15 aa, Artificial Sequence
  Description of Artificial Sequence: Synthetic peptide
  Seed: LRMKWMMAMKYPITA
LRMKLMMTMRYPNTA

SEQ ID NO: 235164 - protein, 15 aa, Artificial Sequence
  Description of Artificial Sequence: Synthetic peptide
  Seed: LRMKWMMAMKYPITA
LRMKLMMTMRYPPTA

SEQ ID NO: 235165 - protein, 15 aa, Artificial Sequence
  Description of Artificial Sequence: Synthetic peptide
  Seed: LRMKWMMAMKYPITA
LRMKLMMTMRYPQTA

SEQ ID NO: 235166 - protein, 15 aa, Artificial Sequence
  Description of Artificial Sequence: Synthetic peptide
  Seed: LRMKWMMAMKYPITA
LRMKLMMTMRYPRTA

SEQ ID NO: 235167 - protein, 15 aa, Artificial Sequence
  Description of Artificial Sequence: Synthetic peptide
  Seed: LRMKWMMAMKYPITA
LRMKLMMTMRYPSTA

SEQ ID NO: 235168 - protein, 15 aa, Artificial Sequence
  Description of Artificial Sequence: Synthetic peptide
  Seed: LRMKWMMAMKYPITA
LRMKLMMTMRYPTTA

SEQ ID NO: 235169 - protein, 15 aa, Artificial Sequence
  Description of Artificial Sequence: Synthetic peptide
  Seed: LRMKWMMAMKYPITA
LRMKLMMTMRYPVTA

SEQ ID NO: 235170 - protein, 15 aa, Artificial Sequence
  Description of Artificial Sequence: Synthetic peptide
  Seed: LRMKWMMAMKYPITA
LRMKLMMTMRYPWTA

SEQ ID NO: 235171 - protein, 15 aa, Artificial Sequence
  Description of Artificial Sequence: Synthetic peptide
  Seed: LRMKWMMAMKYPITA
LRMKLMMTMRYPYTA

SEQ ID NO: 235172 - protein, 15 aa, Artificial Sequence
  Description of Artificial Sequence: Synthetic peptide
  Seed: LRMKWMMAMKYPITA
LRMKLMMTMSYPATA

SEQ ID NO: 235173 - protein, 15 aa, Artificial Sequence
  Description of Artificial Sequence: Synthetic peptide
  Seed: LRMKWMMAMKYPITA
LRMKLMMTMSYPCTA

SEQ ID NO: 235174 - protein, 15 aa, Artificial Sequence
  Description of Artificial Sequence: Synthetic peptide
  Seed: LRMKWMMAMKYPITA
LRMKLMMTMSYPDTA

SEQ ID NO: 235175 - protein, 15 aa, Artificial Sequence
  Description of Artificial Sequence: Synthetic peptide
  Seed: LRMKWMMAMKYPITA
LRMKLMMTMSYPETA

SEQ ID NO: 235176 - protein, 15 aa, Artificial Sequence
  Description of Artificial Sequence: Synthetic peptide
  Seed: LRMKWMMAMKYPITA
LRMKLMMTMSYPFTA

SEQ ID NO: 235177 - protein, 15 aa, Artificial Sequence
  Description of Artificial Sequence: Synthetic peptide
  Seed: LRMKWMMAMKYPITA
LRMKLMMTMSYPGTA

SEQ ID NO: 235178 - protein, 15 aa, Artificial Sequence
  Description of Artificial Sequence: Synthetic peptide
  Seed: LRMKWMMAMKYPITA
LRMKLMMTMSYPHTA

SEQ ID NO: 235179 - protein, 15 aa, Artificial Sequence
  Description of Artificial Sequence: Synthetic peptide
  Seed: LRMKWMMAMKYPITA
LRMKLMMTMSYPITA

SEQ ID NO: 235180 - protein, 15 aa, Artificial Sequence
  Description of Artificial Sequence: Synthetic peptide
  Seed: LRMKWMMAMKYPITA
LRMKLMMTMSYPKTA

SEQ ID NO: 235181 - protein, 15 aa, Artificial Sequence
  Description of Artificial Sequence: Synthetic peptide
  Seed: LRMKWMMAMKYPITA
LRMKLMMTMSYPLTA

SEQ ID NO: 235182 - protein, 15 aa, Artificial Sequence
  Description of Artificial Sequence: Synthetic peptide
  Seed: LRMKWMMAMKYPITA
LRMKLMMTMSYPMTA

SEQ ID NO: 235183 - protein, 15 aa, Artificial Sequence
  Description of Artificial Sequence: Synthetic peptide
  Seed: LRMKWMMAMKYPITA
LRMKLMMTMSYPNTA

SEQ ID NO: 235184 - protein, 15 aa, Artificial Sequence
  Description of Artificial Sequence: Synthetic peptide
  Seed: LRMKWMMAMKYPITA
LRMKLMMTMSYPPTA

SEQ ID NO: 235185 - protein, 15 aa, Artificial Sequence
  Description of Artificial Sequence: Synthetic peptide
  Seed: LRMKWMMAMKYPITA
LRMKLMMTMSYPQTA

SEQ ID NO: 235186 - protein, 15 aa, Artificial Sequence
  Description of Artificial Sequence: Synthetic peptide
  Seed: LRMKWMMAMKYPITA
LRMKLMMTMSYPRTA

SEQ ID NO: 235187 - protein, 15 aa, Artificial Sequence
  Description of Artificial Sequence: Synthetic peptide
  Seed: LRMKWMMAMKYPITA
LRMKLMMTMSYPSTA

SEQ ID NO: 235188 - protein, 15 aa, Artificial Sequence
  Description of Artificial Sequence: Synthetic peptide
  Seed: LRMKWMMAMKYPITA
LRMKLMMTMSYPTTA

SEQ ID NO: 235189 - protein, 15 aa, Artificial Sequence
  Description of Artificial Sequence: Synthetic peptide
  Seed: LRMKWMMAMKYPITA
LRMKLMMTMSYPVTA

SEQ ID NO: 235190 - protein, 15 aa, Artificial Sequence
  Description of Artificial Sequence: Synthetic peptide
  Seed: LRMKWMMAMKYPITA
LRMKLMMTMSYPWTA

SEQ ID NO: 235191 - protein, 15 aa, Artificial Sequence
  Description of Artificial Sequence: Synthetic peptide
  Seed: LRMKWMMAMKYPITA
LRMKLMMTMSYPYTA

SEQ ID NO: 235192 - protein, 15 aa, Artificial Sequence
  Description of Artificial Sequence: Synthetic peptide
  Seed: LRMKWMMAMKYPITA
LRMKLMMTMTYPATA

SEQ ID NO: 235193 - protein, 15 aa, Artificial Sequence
  Description of Artificial Sequence: Synthetic peptide
  Seed: LRMKWMMAMKYPITA
LRMKLMMTMTYPCTA

SEQ ID NO: 235194 - protein, 15 aa, Artificial Sequence
  Description of Artificial Sequence: Synthetic peptide
  Seed: LRMKWMMAMKYPITA
LRMKLMMTMTYPDTA

SEQ ID NO: 235195 - protein, 15 aa, Artificial Sequence
  Description of Artificial Sequence: Synthetic peptide
  Seed: LRMKWMMAMKYPITA
LRMKLMMTMTYPETA

SEQ ID NO: 235196 - protein, 15 aa, Artificial Sequence
  Description of Artificial Sequence: Synthetic peptide
  Seed: LRMKWMMAMKYPITA
LRMKLMMTMTYPFTA

SEQ ID NO: 235197 - protein, 15 aa, Artificial Sequence
  Description of Artificial Sequence: Synthetic peptide
  Seed: LRMKWMMAMKYPITA
LRMKLMMTMTYPGTA

SEQ ID NO: 235198 - protein, 15 aa, Artificial Sequence
  Description of Artificial Sequence: Synthetic peptide
  Seed: LRMKWMMAMKYPITA
LRMKLMMTMTYPHTA

SEQ ID NO: 235199 - protein, 15 aa, Artificial Sequence
  Description of Artificial Sequence: Synthetic peptide
  Seed: LRMKWMMAMKYPITA
LRMKLMMTMTYPITA

SEQ ID NO: 235200 - protein, 15 aa, Artificial Sequence
  Description of Artificial Sequence: Synthetic peptide
  Seed: LRMKWMMAMKYPITA
LRMKLMMTMTYPKTA

SEQ ID NO: 235201 - protein, 15 aa, Artificial Sequence
  Description of Artificial Sequence: Synthetic peptide
  Seed: LRMKWMMAMKYPITA
LRMKLMMTMTYPLTA

SEQ ID NO: 235202 - protein, 15 aa, Artificial Sequence
  Description of Artificial Sequence: Synthetic peptide
  Seed: LRMKWMMAMKYPITA
LRMKLMMTMTYPMTA

SEQ ID NO: 235203 - protein, 15 aa, Artificial Sequence
  Description of Artificial Sequence: Synthetic peptide
  Seed: LRMKWMMAMKYPITA
LRMKLMMTMTYPNTA

SEQ ID NO: 235204 - protein, 15 aa, Artificial Sequence
  Description of Artificial Sequence: Synthetic peptide
  Seed: LRMKWMMAMKYPITA
LRMKLMMTMTYPPTA

SEQ ID NO: 235205 - protein, 15 aa, Artificial Sequence
  Description of Artificial Sequence: Synthetic peptide
  Seed: LRMKWMMAMKYPITA
LRMKLMMTMTYPQTA

SEQ ID NO: 235206 - protein, 15 aa, Artificial Sequence
  Description of Artificial Sequence: Synthetic peptide
  Seed: LRMKWMMAMKYPITA
LRMKLMMTMTYPRTA

SEQ ID NO: 235207 - protein, 15 aa, Artificial Sequence
  Description of Artificial Sequence: Synthetic peptide
  Seed: LRMKWMMAMKYPITA
LRMKLMMTMTYPSTA

SEQ ID NO: 235208 - protein, 15 aa, Artificial Sequence
  Description of Artificial Sequence: Synthetic peptide
  Seed: LRMKWMMAMKYPITA
LRMKLMMTMTYPTTA

SEQ ID NO: 235209 - protein, 15 aa, Artificial Sequence
  Description of Artificial Sequence: Synthetic peptide
  Seed: LRMKWMMAMKYPITA
LRMKLMMTMTYPVTA

SEQ ID NO: 235210 - protein, 15 aa, Artificial Sequence
  Description of Artificial Sequence: Synthetic peptide
  Seed: LRMKWMMAMKYPITA
LRMKLMMTMTYPYTA

SEQ ID NO: 235211 - protein, 15 aa, Artificial Sequence
  Description of Artificial Sequence: Synthetic peptide
  Seed: LRMKWMMAMKYPITA
LRMKLMMTMVYPATA

SEQ ID NO: 235212 - protein, 15 aa, Artificial Sequence
  Description of Artificial Sequence: Synthetic peptide
  Seed: LRMKWMMAMKYPITA
LRMKLMMTMVYPCTA

SEQ ID NO: 235213 - protein, 15 aa, Artificial Sequence
  Description of Artificial Sequence: Synthetic peptide
  Seed: LRMKWMMAMKYPITA
LRMKLMMTMVYPDTA

SEQ ID NO: 235214 - protein, 15 aa, Artificial Sequence
  Description of Artificial Sequence: Synthetic peptide
  Seed: LRMKWMMAMKYPITA
LRMKLMMTMVYPFTA

SEQ ID NO: 235215 - protein, 15 aa, Artificial Sequence
  Description of Artificial Sequence: Synthetic peptide
  Seed: LRMKWMMAMKYPITA
LRMKLMMTMVYPGTA

SEQ ID NO: 235216 - protein, 15 aa, Artificial Sequence
  Description of Artificial Sequence: Synthetic peptide
  Seed: LRMKWMMAMKYPITA
LRMKLMMTMVYPHTA

SEQ ID NO: 235217 - protein, 15 aa, Artificial Sequence
  Description of Artificial Sequence: Synthetic peptide
  Seed: LRMKWMMAMKYPITA
LRMKLMMTMVYPITA

SEQ ID NO: 235218 - protein, 15 aa, Artificial Sequence
  Description of Artificial Sequence: Synthetic peptide
  Seed: LRMKWMMAMKYPITA
LRMKLMMTMVYPKTA

SEQ ID NO: 235219 - protein, 15 aa, Artificial Sequence
  Description of Artificial Sequence: Synthetic peptide
  Seed: LRMKWMMAMKYPITA
LRMKLMMTMVYPLTA

SEQ ID NO: 235220 - protein, 15 aa, Artificial Sequence
  Description of Artificial Sequence: Synthetic peptide
  Seed: LRMKWMMAMKYPITA
LRMKLMMTMVYPMTA

SEQ ID NO: 235221 - protein, 15 aa, Artificial Sequence
  Description of Artificial Sequence: Synthetic peptide
  Seed: LRMKWMMAMKYPITA
LRMKLMMTMVYPNTA

SEQ ID NO: 235222 - protein, 15 aa, Artificial Sequence
  Description of Artificial Sequence: Synthetic peptide
  Seed: LRMKWMMAMKYPITA
LRMKLMMTMVYPQTA

SEQ ID NO: 235223 - protein, 15 aa, Artificial Sequence
  Description of Artificial Sequence: Synthetic peptide
  Seed: LRMKWMMAMKYPITA
LRMKLMMTMVYPRTA

SEQ ID NO: 235224 - protein, 15 aa, Artificial Sequence
  Description of Artificial Sequence: Synthetic peptide
  Seed: LRMKWMMAMKYPITA
LRMKLMMTMVYPSTA

SEQ ID NO: 235225 - protein, 15 aa, Artificial Sequence
  Description of Artificial Sequence: Synthetic peptide
  Seed: LRMKWMMAMKYPITA
LRMKLMMTMVYPTTA

SEQ ID NO: 235226 - protein, 15 aa, Artificial Sequence
  Description of Artificial Sequence: Synthetic peptide
  Seed: LRMKWMMAMKYPITA
LRMKLMMTMVYPVTA

SEQ ID NO: 235227 - protein, 15 aa, Artificial Sequence
  Description of Artificial Sequence: Synthetic peptide
  Seed: LRMKWMMAMKYPITA
LRMKLMMTMVYPYTA

SEQ ID NO: 235228 - protein, 15 aa, Artificial Sequence
  Description of Artificial Sequence: Synthetic peptide
  Seed: LRMKWMMAMKYPITA
LRMKLMMTMYYPITA

SEQ ID NO: 235229 - protein, 15 aa, Artificial Sequence
  Description of Artificial Sequence: Synthetic peptide
  Seed: LRMKWMMAMKYPITA
LRMKLMMTMYYPLTA

SEQ ID NO: 235230 - protein, 15 aa, Artificial Sequence
  Description of Artificial Sequence: Synthetic peptide
  Seed: LRMKWMMAMKYPITA
LRMKLMMTMYYPVTA

SEQ ID NO: 235231 - protein, 15 aa, Artificial Sequence
  Description of Artificial Sequence: Synthetic peptide
  Seed: LRMKWMMAMKYPITA
LRMKLMMVMAYPATA

SEQ ID NO: 235232 - protein, 15 aa, Artificial Sequence
  Description of Artificial Sequence: Synthetic peptide
  Seed: LRMKWMMAMKYPITA
LRMKLMMVMAYPCTA

SEQ ID NO: 235233 - protein, 15 aa, Artificial Sequence
  Description of Artificial Sequence: Synthetic peptide
  Seed: LRMKWMMAMKYPITA
LRMKLMMVMAYPDTA

SEQ ID NO: 235234 - protein, 15 aa, Artificial Sequence
  Description of Artificial Sequence: Synthetic peptide
  Seed: LRMKWMMAMKYPITA
LRMKLMMVMAYPETA

SEQ ID NO: 235235 - protein, 15 aa, Artificial Sequence
  Description of Artificial Sequence: Synthetic peptide
  Seed: LRMKWMMAMKYPITA
LRMKLMMVMAYPFTA

SEQ ID NO: 235236 - protein, 15 aa, Artificial Sequence
  Description of Artificial Sequence: Synthetic peptide
  Seed: LRMKWMMAMKYPITA
LRMKLMMVMAYPGTA

SEQ ID NO: 235237 - protein, 15 aa, Artificial Sequence
  Description of Artificial Sequence: Synthetic peptide
  Seed: LRMKWMMAMKYPITA
LRMKLMMVMAYPHTA

SEQ ID NO: 235238 - protein, 15 aa, Artificial Sequence
  Description of Artificial Sequence: Synthetic peptide
  Seed: LRMKWMMAMKYPITA
LRMKLMMVMAYPITA

SEQ ID NO: 235239 - protein, 15 aa, Artificial Sequence
  Description of Artificial Sequence: Synthetic peptide
  Seed: LRMKWMMAMKYPITA
LRMKLMMVMAYPKTA

SEQ ID NO: 235240 - protein, 15 aa, Artificial Sequence
  Description of Artificial Sequence: Synthetic peptide
  Seed: LRMKWMMAMKYPITA
LRMKLMMVMAYPLTA

SEQ ID NO: 235241 - protein, 15 aa, Artificial Sequence
  Description of Artificial Sequence: Synthetic peptide
  Seed: LRMKWMMAMKYPITA
LRMKLMMVMAYPMTA

SEQ ID NO: 235242 - protein, 15 aa, Artificial Sequence
  Description of Artificial Sequence: Synthetic peptide
  Seed: LRMKWMMAMKYPITA
LRMKLMMVMAYPNTA

SEQ ID NO: 235243 - protein, 15 aa, Artificial Sequence
  Description of Artificial Sequence: Synthetic peptide
  Seed: LRMKWMMAMKYPITA
LRMKLMMVMAYPPTA

SEQ ID NO: 235244 - protein, 15 aa, Artificial Sequence
  Description of Artificial Sequence: Synthetic peptide
  Seed: LRMKWMMAMKYPITA
LRMKLMMVMAYPQTA

SEQ ID NO: 235245 - protein, 15 aa, Artificial Sequence
  Description of Artificial Sequence: Synthetic peptide
  Seed: LRMKWMMAMKYPITA
LRMKLMMVMAYPRTA

SEQ ID NO: 235246 - protein, 15 aa, Artificial Sequence
  Description of Artificial Sequence: Synthetic peptide
  Seed: LRMKWMMAMKYPITA
LRMKLMMVMAYPSTA

SEQ ID NO: 235247 - protein, 15 aa, Artificial Sequence
  Description of Artificial Sequence: Synthetic peptide
  Seed: LRMKWMMAMKYPITA
LRMKLMMVMAYPTTA

SEQ ID NO: 235248 - protein, 15 aa, Artificial Sequence
  Description of Artificial Sequence: Synthetic peptide
  Seed: LRMKWMMAMKYPITA
LRMKLMMVMAYPVTA

SEQ ID NO: 235249 - protein, 15 aa, Artificial Sequence
  Description of Artificial Sequence: Synthetic peptide
  Seed: LRMKWMMAMKYPITA
LRMKLMMVMAYPWTA

SEQ ID NO: 235250 - protein, 15 aa, Artificial Sequence
  Description of Artificial Sequence: Synthetic peptide
  Seed: LRMKWMMAMKYPITA
LRMKLMMVMAYPYTA

SEQ ID NO: 235251 - protein, 15 aa, Artificial Sequence
  Description of Artificial Sequence: Synthetic peptide
  Seed: LRMKWMMAMKYPITA
LRMKLMMVMDYPATA

SEQ ID NO: 235252 - protein, 15 aa, Artificial Sequence
  Description of Artificial Sequence: Synthetic peptide
  Seed: LRMKWMMAMKYPITA
LRMKLMMVMEYPLTA

SEQ ID NO: 235253 - protein, 15 aa, Artificial Sequence
  Description of Artificial Sequence: Synthetic peptide
  Seed: LRMKWMMAMKYPITA
LRMKLMMVMEYPVTA

SEQ ID NO: 235254 - protein, 15 aa, Artificial Sequence
  Description of Artificial Sequence: Synthetic peptide
  Seed: LRMKWMMAMKYPITA
LRMKLMMVMGYPATA

SEQ ID NO: 235255 - protein, 15 aa, Artificial Sequence
  Description of Artificial Sequence: Synthetic peptide
  Seed: LRMKWMMAMKYPITA
LRMKLMMVMGYPCTA

SEQ ID NO: 235256 - protein, 15 aa, Artificial Sequence
  Description of Artificial Sequence: Synthetic peptide
  Seed: LRMKWMMAMKYPITA
LRMKLMMVMGYPFTA

SEQ ID NO: 235257 - protein, 15 aa, Artificial Sequence
  Description of Artificial Sequence: Synthetic peptide
  Seed: LRMKWMMAMKYPITA
LRMKLMMVMGYPGTA

SEQ ID NO: 235258 - protein, 15 aa, Artificial Sequence
  Description of Artificial Sequence: Synthetic peptide
  Seed: LRMKWMMAMKYPITA
LRMKLMMVMGYPHTA

SEQ ID NO: 235259 - protein, 15 aa, Artificial Sequence
  Description of Artificial Sequence: Synthetic peptide
  Seed: LRMKWMMAMKYPITA
LRMKLMMVMGYPITA

SEQ ID NO: 235260 - protein, 15 aa, Artificial Sequence
  Description of Artificial Sequence: Synthetic peptide
  Seed: LRMKWMMAMKYPITA
LRMKLMMVMGYPKTA

SEQ ID NO: 235261 - protein, 15 aa, Artificial Sequence
  Description of Artificial Sequence: Synthetic peptide
  Seed: LRMKWMMAMKYPITA
LRMKLMMVMGYPLTA

SEQ ID NO: 235262 - protein, 15 aa, Artificial Sequence
  Description of Artificial Sequence: Synthetic peptide
  Seed: LRMKWMMAMKYPITA
LRMKLMMVMGYPMTA

SEQ ID NO: 235263 - protein, 15 aa, Artificial Sequence
  Description of Artificial Sequence: Synthetic peptide
  Seed: LRMKWMMAMKYPITA
LRMKLMMVMGYPNTA

SEQ ID NO: 235264 - protein, 15 aa, Artificial Sequence
  Description of Artificial Sequence: Synthetic peptide
  Seed: LRMKWMMAMKYPITA
LRMKLMMVMGYPPTA

SEQ ID NO: 235265 - protein, 15 aa, Artificial Sequence
  Description of Artificial Sequence: Synthetic peptide
  Seed: LRMKWMMAMKYPITA
LRMKLMMVMGYPQTA

SEQ ID NO: 235266 - protein, 15 aa, Artificial Sequence
  Description of Artificial Sequence: Synthetic peptide
  Seed: LRMKWMMAMKYPITA
LRMKLMMVMGYPRTA

SEQ ID NO: 235267 - protein, 15 aa, Artificial Sequence
  Description of Artificial Sequence: Synthetic peptide
  Seed: LRMKWMMAMKYPITA
LRMKLMMVMGYPSTA

SEQ ID NO: 235268 - protein, 15 aa, Artificial Sequence
  Description of Artificial Sequence: Synthetic peptide
  Seed: LRMKWMMAMKYPITA
LRMKLMMVMGYPTTA

SEQ ID NO: 235269 - protein, 15 aa, Artificial Sequence
  Description of Artificial Sequence: Synthetic peptide
  Seed: LRMKWMMAMKYPITA
LRMKLMMVMGYPVTA

SEQ ID NO: 235270 - protein, 15 aa, Artificial Sequence
  Description of Artificial Sequence: Synthetic peptide
  Seed: LRMKWMMAMKYPITA
LRMKLMMVMGYPYTA

SEQ ID NO: 235271 - protein, 15 aa, Artificial Sequence
  Description of Artificial Sequence: Synthetic peptide
  Seed: LRMKWMMAMKYPITA
LRMKLMMVMHYPATA

SEQ ID NO: 235272 - protein, 15 aa, Artificial Sequence
  Description of Artificial Sequence: Synthetic peptide
  Seed: LRMKWMMAMKYPITA
LRMKLMMVMHYPGTA

SEQ ID NO: 235273 - protein, 15 aa, Artificial Sequence
  Description of Artificial Sequence: Synthetic peptide
  Seed: LRMKWMMAMKYPITA
LRMKLMMVMHYPHTA

SEQ ID NO: 235274 - protein, 15 aa, Artificial Sequence
  Description of Artificial Sequence: Synthetic peptide
  Seed: LRMKWMMAMKYPITA
LRMKLMMVMHYPITA

SEQ ID NO: 235275 - protein, 15 aa, Artificial Sequence
  Description of Artificial Sequence: Synthetic peptide
  Seed: LRMKWMMAMKYPITA
LRMKLMMVMHYPKTA

SEQ ID NO: 235276 - protein, 15 aa, Artificial Sequence
  Description of Artificial Sequence: Synthetic peptide
  Seed: LRMKWMMAMKYPITA
LRMKLMMVMHYPLTA

SEQ ID NO: 235277 - protein, 15 aa, Artificial Sequence
  Description of Artificial Sequence: Synthetic peptide
  Seed: LRMKWMMAMKYPITA
LRMKLMMVMHYPMTA

SEQ ID NO: 235278 - protein, 15 aa, Artificial Sequence
  Description of Artificial Sequence: Synthetic peptide
  Seed: LRMKWMMAMKYPITA
LRMKLMMVMHYPQTA

SEQ ID NO: 235279 - protein, 15 aa, Artificial Sequence
  Description of Artificial Sequence: Synthetic peptide
  Seed: LRMKWMMAMKYPITA
LRMKLMMVMHYPRTA

SEQ ID NO: 235280 - protein, 15 aa, Artificial Sequence
  Description of Artificial Sequence: Synthetic peptide
  Seed: LRMKWMMAMKYPITA
LRMKLMMVMHYPSTA

SEQ ID NO: 235281 - protein, 15 aa, Artificial Sequence
  Description of Artificial Sequence: Synthetic peptide
  Seed: LRMKWMMAMKYPITA
LRMKLMMVMHYPTTA

SEQ ID NO: 235282 - protein, 15 aa, Artificial Sequence
  Description of Artificial Sequence: Synthetic peptide
  Seed: LRMKWMMAMKYPITA
LRMKLMMVMHYPVTA

SEQ ID NO: 235283 - protein, 15 aa, Artificial Sequence
  Description of Artificial Sequence: Synthetic peptide
  Seed: LRMKWMMAMKYPITA
LRMKLMMVMHYPYTA

SEQ ID NO: 235284 - protein, 15 aa, Artificial Sequence
  Description of Artificial Sequence: Synthetic peptide
  Seed: LRMKWMMAMKYPITA
LRMKLMMVMIYPDTA

SEQ ID NO: 235285 - protein, 15 aa, Artificial Sequence
  Description of Artificial Sequence: Synthetic peptide
  Seed: LRMKWMMAMKYPITA
LRMKLMMVMIYPGTA

SEQ ID NO: 235286 - protein, 15 aa, Artificial Sequence
  Description of Artificial Sequence: Synthetic peptide
  Seed: LRMKWMMAMKYPITA
LRMKLMMVMIYPRTA

SEQ ID NO: 235287 - protein, 15 aa, Artificial Sequence
  Description of Artificial Sequence: Synthetic peptide
  Seed: LRMKWMMAMKYPITA
LRMKLMMVMIYPSTA

SEQ ID NO: 235288 - protein, 15 aa, Artificial Sequence
  Description of Artificial Sequence: Synthetic peptide
  Seed: LRMKWMMAMKYPITA
LRMKLMMVMIYPTTA

SEQ ID NO: 235289 - protein, 15 aa, Artificial Sequence
  Description of Artificial Sequence: Synthetic peptide
  Seed: LRMKWMMAMKYPITA
LRMKLMMVMIYPVTA

SEQ ID NO: 235290 - protein, 15 aa, Artificial Sequence
  Description of Artificial Sequence: Synthetic peptide
  Seed: LRMKWMMAMKYPITA
LRMKLMMVMKYPATA

SEQ ID NO: 235291 - protein, 15 aa, Artificial Sequence
  Description of Artificial Sequence: Synthetic peptide
  Seed: LRMKWMMAMKYPITA
LRMKLMMVMKYPCTA

SEQ ID NO: 235292 - protein, 15 aa, Artificial Sequence
  Description of Artificial Sequence: Synthetic peptide
  Seed: LRMKWMMAMKYPITA
LRMKLMMVMKYPDTA

SEQ ID NO: 235293 - protein, 15 aa, Artificial Sequence
  Description of Artificial Sequence: Synthetic peptide
  Seed: LRMKWMMAMKYPITA
LRMKLMMVMKYPETA

SEQ ID NO: 235294 - protein, 15 aa, Artificial Sequence
  Description of Artificial Sequence: Synthetic peptide
  Seed: LRMKWMMAMKYPITA
LRMKLMMVMKYPFTA

SEQ ID NO: 235295 - protein, 15 aa, Artificial Sequence
  Description of Artificial Sequence: Synthetic peptide
  Seed: LRMKWMMAMKYPITA
LRMKLMMVMKYPGTA

SEQ ID NO: 235296 - protein, 15 aa, Artificial Sequence
  Description of Artificial Sequence: Synthetic peptide
  Seed: LRMKWMMAMKYPITA
LRMKLMMVMKYPHTA

SEQ ID NO: 235297 - protein, 15 aa, Artificial Sequence
  Description of Artificial Sequence: Synthetic peptide
  Seed: LRMKWMMAMKYPITA
LRMKLMMVMKYPITA

SEQ ID NO: 235298 - protein, 15 aa, Artificial Sequence
  Description of Artificial Sequence: Synthetic peptide
  Seed: LRMKWMMAMKYPITA
LRMKLMMVMKYPKTA

SEQ ID NO: 235299 - protein, 15 aa, Artificial Sequence
  Description of Artificial Sequence: Synthetic peptide
  Seed: LRMKWMMAMKYPITA
LRMKLMMVMKYPLTA

SEQ ID NO: 235300 - protein, 15 aa, Artificial Sequence
  Description of Artificial Sequence: Synthetic peptide
  Seed: LRMKWMMAMKYPITA
LRMKLMMVMKYPMTA

SEQ ID NO: 235301 - protein, 15 aa, Artificial Sequence
  Description of Artificial Sequence: Synthetic peptide
  Seed: LRMKWMMAMKYPITA
LRMKLMMVMKYPNTA

SEQ ID NO: 235302 - protein, 15 aa, Artificial Sequence
  Description of Artificial Sequence: Synthetic peptide
  Seed: LRMKWMMAMKYPITA
LRMKLMMVMKYPPTA

SEQ ID NO: 235303 - protein, 15 aa, Artificial Sequence
  Description of Artificial Sequence: Synthetic peptide
  Seed: LRMKWMMAMKYPITA
LRMKLMMVMKYPQTA

SEQ ID NO: 235304 - protein, 15 aa, Artificial Sequence
  Description of Artificial Sequence: Synthetic peptide
  Seed: LRMKWMMAMKYPITA
LRMKLMMVMKYPRTA

SEQ ID NO: 235305 - protein, 15 aa, Artificial Sequence
  Description of Artificial Sequence: Synthetic peptide
  Seed: LRMKWMMAMKYPITA
LRMKLMMVMKYPSTA

SEQ ID NO: 235306 - protein, 15 aa, Artificial Sequence
  Description of Artificial Sequence: Synthetic peptide
  Seed: LRMKWMMAMKYPITA
LRMKLMMVMKYPTTA

SEQ ID NO: 235307 - protein, 15 aa, Artificial Sequence
  Description of Artificial Sequence: Synthetic peptide
  Seed: LRMKWMMAMKYPITA
LRMKLMMVMKYPVTA

SEQ ID NO: 235308 - protein, 15 aa, Artificial Sequence
  Description of Artificial Sequence: Synthetic peptide
  Seed: LRMKWMMAMKYPITA
LRMKLMMVMKYPWTA

SEQ ID NO: 235309 - protein, 15 aa, Artificial Sequence
  Description of Artificial Sequence: Synthetic peptide
  Seed: LRMKWMMAMKYPITA
LRMKLMMVMKYPYTA

SEQ ID NO: 235310 - protein, 15 aa, Artificial Sequence
  Description of Artificial Sequence: Synthetic peptide
  Seed: LRMKWMMAMKYPITA
LRMKLMMVMMYPRTA

SEQ ID NO: 235311 - protein, 15 aa, Artificial Sequence
  Description of Artificial Sequence: Synthetic peptide
  Seed: LRMKWMMAMKYPITA
LRMKLMMVMNYPATA

SEQ ID NO: 235312 - protein, 15 aa, Artificial Sequence
  Description of Artificial Sequence: Synthetic peptide
  Seed: LRMKWMMAMKYPITA
LRMKLMMVMNYPCTA

SEQ ID NO: 235313 - protein, 15 aa, Artificial Sequence
  Description of Artificial Sequence: Synthetic peptide
  Seed: LRMKWMMAMKYPITA
LRMKLMMVMNYPDTA

SEQ ID NO: 235314 - protein, 15 aa, Artificial Sequence
  Description of Artificial Sequence: Synthetic peptide
  Seed: LRMKWMMAMKYPITA
LRMKLMMVMNYPETA

SEQ ID NO: 235315 - protein, 15 aa, Artificial Sequence
  Description of Artificial Sequence: Synthetic peptide
  Seed: LRMKWMMAMKYPITA
LRMKLMMVMNYPFTA

SEQ ID NO: 235316 - protein, 15 aa, Artificial Sequence
  Description of Artificial Sequence: Synthetic peptide
  Seed: LRMKWMMAMKYPITA
LRMKLMMVMNYPGTA

SEQ ID NO: 235317 - protein, 15 aa, Artificial Sequence
  Description of Artificial Sequence: Synthetic peptide
  Seed: LRMKWMMAMKYPITA
LRMKLMMVMNYPHTA

SEQ ID NO: 235318 - protein, 15 aa, Artificial Sequence
  Description of Artificial Sequence: Synthetic peptide
  Seed: LRMKWMMAMKYPITA
LRMKLMMVMNYPITA

SEQ ID NO: 235319 - protein, 15 aa, Artificial Sequence
  Description of Artificial Sequence: Synthetic peptide
  Seed: LRMKWMMAMKYPITA
LRMKLMMVMNYPKTA

SEQ ID NO: 235320 - protein, 15 aa, Artificial Sequence
  Description of Artificial Sequence: Synthetic peptide
  Seed: LRMKWMMAMKYPITA
LRMKLMMVMNYPLTA

SEQ ID NO: 235321 - protein, 15 aa, Artificial Sequence
  Description of Artificial Sequence: Synthetic peptide
  Seed: LRMKWMMAMKYPITA
LRMKLMMVMNYPMTA

SEQ ID NO: 235322 - protein, 15 aa, Artificial Sequence
  Description of Artificial Sequence: Synthetic peptide
  Seed: LRMKWMMAMKYPITA
LRMKLMMVMNYPNTA

SEQ ID NO: 235323 - protein, 15 aa, Artificial Sequence
  Description of Artificial Sequence: Synthetic peptide
  Seed: LRMKWMMAMKYPITA
LRMKLMMVMNYPQTA

SEQ ID NO: 235324 - protein, 15 aa, Artificial Sequence
  Description of Artificial Sequence: Synthetic peptide
  Seed: LRMKWMMAMKYPITA
LRMKLMMVMNYPRTA

SEQ ID NO: 235325 - protein, 15 aa, Artificial Sequence
  Description of Artificial Sequence: Synthetic peptide
  Seed: LRMKWMMAMKYPITA
LRMKLMMVMNYPSTA

SEQ ID NO: 235326 - protein, 15 aa, Artificial Sequence
  Description of Artificial Sequence: Synthetic peptide
  Seed: LRMKWMMAMKYPITA
LRMKLMMVMNYPTTA

SEQ ID NO: 235327 - protein, 15 aa, Artificial Sequence
  Description of Artificial Sequence: Synthetic peptide
  Seed: LRMKWMMAMKYPITA
LRMKLMMVMNYPVTA

SEQ ID NO: 235328 - protein, 15 aa, Artificial Sequence
  Description of Artificial Sequence: Synthetic peptide
  Seed: LRMKWMMAMKYPITA
LRMKLMMVMNYPYTA

SEQ ID NO: 235329 - protein, 15 aa, Artificial Sequence
  Description of Artificial Sequence: Synthetic peptide
  Seed: LRMKWMMAMKYPITA
LRMKLMMVMPYPATA

SEQ ID NO: 235330 - protein, 15 aa, Artificial Sequence
  Description of Artificial Sequence: Synthetic peptide
  Seed: LRMKWMMAMKYPITA
LRMKLMMVMPYPCTA

SEQ ID NO: 235331 - protein, 15 aa, Artificial Sequence
  Description of Artificial Sequence: Synthetic peptide
  Seed: LRMKWMMAMKYPITA
LRMKLMMVMPYPDTA

SEQ ID NO: 235332 - protein, 15 aa, Artificial Sequence
  Description of Artificial Sequence: Synthetic peptide
  Seed: LRMKWMMAMKYPITA
LRMKLMMVMPYPETA

SEQ ID NO: 235333 - protein, 15 aa, Artificial Sequence
  Description of Artificial Sequence: Synthetic peptide
  Seed: LRMKWMMAMKYPITA
LRMKLMMVMPYPFTA

SEQ ID NO: 235334 - protein, 15 aa, Artificial Sequence
  Description of Artificial Sequence: Synthetic peptide
  Seed: LRMKWMMAMKYPITA
LRMKLMMVMPYPGTA

SEQ ID NO: 235335 - protein, 15 aa, Artificial Sequence
  Description of Artificial Sequence: Synthetic peptide
  Seed: LRMKWMMAMKYPITA
LRMKLMMVMPYPHTA

SEQ ID NO: 235336 - protein, 15 aa, Artificial Sequence
  Description of Artificial Sequence: Synthetic peptide
  Seed: LRMKWMMAMKYPITA
LRMKLMMVMPYPITA

SEQ ID NO: 235337 - protein, 15 aa, Artificial Sequence
  Description of Artificial Sequence: Synthetic peptide
  Seed: LRMKWMMAMKYPITA
LRMKLMMVMPYPKTA

SEQ ID NO: 235338 - protein, 15 aa, Artificial Sequence
  Description of Artificial Sequence: Synthetic peptide
  Seed: LRMKWMMAMKYPITA
LRMKLMMVMPYPLTA

SEQ ID NO: 235339 - protein, 15 aa, Artificial Sequence
  Description of Artificial Sequence: Synthetic peptide
  Seed: LRMKWMMAMKYPITA
LRMKLMMVMPYPMTA

SEQ ID NO: 235340 - protein, 15 aa, Artificial Sequence
  Description of Artificial Sequence: Synthetic peptide
  Seed: LRMKWMMAMKYPITA
LRMKLMMVMPYPNTA

SEQ ID NO: 235341 - protein, 15 aa, Artificial Sequence
  Description of Artificial Sequence: Synthetic peptide
  Seed: LRMKWMMAMKYPITA
LRMKLMMVMPYPPTA

SEQ ID NO: 235342 - protein, 15 aa, Artificial Sequence
  Description of Artificial Sequence: Synthetic peptide
  Seed: LRMKWMMAMKYPITA
LRMKLMMVMPYPQTA

SEQ ID NO: 235343 - protein, 15 aa, Artificial Sequence
  Description of Artificial Sequence: Synthetic peptide
  Seed: LRMKWMMAMKYPITA
LRMKLMMVMPYPRTA

SEQ ID NO: 235344 - protein, 15 aa, Artificial Sequence
  Description of Artificial Sequence: Synthetic peptide
  Seed: LRMKWMMAMKYPITA
LRMKLMMVMPYPSTA

SEQ ID NO: 235345 - protein, 15 aa, Artificial Sequence
  Description of Artificial Sequence: Synthetic peptide
  Seed: LRMKWMMAMKYPITA
LRMKLMMVMPYPTTA

SEQ ID NO: 235346 - protein, 15 aa, Artificial Sequence
  Description of Artificial Sequence: Synthetic peptide
  Seed: LRMKWMMAMKYPITA
LRMKLMMVMPYPVTA

SEQ ID NO: 235347 - protein, 15 aa, Artificial Sequence
  Description of Artificial Sequence: Synthetic peptide
  Seed: LRMKWMMAMKYPITA
LRMKLMMVMPYPWTA

SEQ ID NO: 235348 - protein, 15 aa, Artificial Sequence
  Description of Artificial Sequence: Synthetic peptide
  Seed: LRMKWMMAMKYPITA
LRMKLMMVMPYPYTA

SEQ ID NO: 235349 - protein, 15 aa, Artificial Sequence
  Description of Artificial Sequence: Synthetic peptide
  Seed: LRMKWMMAMKYPITA
LRMKLMMVMQYPKTA

SEQ ID NO: 235350 - protein, 15 aa, Artificial Sequence
  Description of Artificial Sequence: Synthetic peptide
  Seed: LRMKWMMAMKYPITA
LRMKLMMVMQYPRTA

SEQ ID NO: 235351 - protein, 15 aa, Artificial Sequence
  Description of Artificial Sequence: Synthetic peptide
  Seed: LRMKWMMAMKYPITA
LRMKLMMVMRYPATA

SEQ ID NO: 235352 - protein, 15 aa, Artificial Sequence
  Description of Artificial Sequence: Synthetic peptide
  Seed: LRMKWMMAMKYPITA
LRMKLMMVMRYPCTA

SEQ ID NO: 235353 - protein, 15 aa, Artificial Sequence
  Description of Artificial Sequence: Synthetic peptide
  Seed: LRMKWMMAMKYPITA
LRMKLMMVMRYPDTA

SEQ ID NO: 235354 - protein, 15 aa, Artificial Sequence
  Description of Artificial Sequence: Synthetic peptide
  Seed: LRMKWMMAMKYPITA
LRMKLMMVMRYPETA

SEQ ID NO: 235355 - protein, 15 aa, Artificial Sequence
  Description of Artificial Sequence: Synthetic peptide
  Seed: LRMKWMMAMKYPITA
LRMKLMMVMRYPFTA

SEQ ID NO: 235356 - protein, 15 aa, Artificial Sequence
  Description of Artificial Sequence: Synthetic peptide
  Seed: LRMKWMMAMKYPITA
LRMKLMMVMRYPGTA

SEQ ID NO: 235357 - protein, 15 aa, Artificial Sequence
  Description of Artificial Sequence: Synthetic peptide
  Seed: LRMKWMMAMKYPITA
LRMKLMMVMRYPHTA

SEQ ID NO: 235358 - protein, 15 aa, Artificial Sequence
  Description of Artificial Sequence: Synthetic peptide
  Seed: LRMKWMMAMKYPITA
LRMKLMMVMRYPITA

SEQ ID NO: 235359 - protein, 15 aa, Artificial Sequence
  Description of Artificial Sequence: Synthetic peptide
  Seed: LRMKWMMAMKYPITA
LRMKLMMVMRYPKTA

SEQ ID NO: 235360 - protein, 15 aa, Artificial Sequence
  Description of Artificial Sequence: Synthetic peptide
  Seed: LRMKWMMAMKYPITA
LRMKLMMVMRYPLTA

SEQ ID NO: 235361 - protein, 15 aa, Artificial Sequence
  Description of Artificial Sequence: Synthetic peptide
  Seed: LRMKWMMAMKYPITA
LRMKLMMVMRYPMTA

SEQ ID NO: 235362 - protein, 15 aa, Artificial Sequence
  Description of Artificial Sequence: Synthetic peptide
  Seed: LRMKWMMAMKYPITA
LRMKLMMVMRYPNTA

SEQ ID NO: 235363 - protein, 15 aa, Artificial Sequence
  Description of Artificial Sequence: Synthetic peptide
  Seed: LRMKWMMAMKYPITA
LRMKLMMVMRYPPTA

SEQ ID NO: 235364 - protein, 15 aa, Artificial Sequence
  Description of Artificial Sequence: Synthetic peptide
  Seed: LRMKWMMAMKYPITA
LRMKLMMVMRYPQTA

SEQ ID NO: 235365 - protein, 15 aa, Artificial Sequence
  Description of Artificial Sequence: Synthetic peptide
  Seed: LRMKWMMAMKYPITA
LRMKLMMVMRYPRTA

SEQ ID NO: 235366 - protein, 15 aa, Artificial Sequence
  Description of Artificial Sequence: Synthetic peptide
  Seed: LRMKWMMAMKYPITA
LRMKLMMVMRYPSTA

SEQ ID NO: 235367 - protein, 15 aa, Artificial Sequence
  Description of Artificial Sequence: Synthetic peptide
  Seed: LRMKWMMAMKYPITA
LRMKLMMVMRYPTTA

SEQ ID NO: 235368 - protein, 15 aa, Artificial Sequence
  Description of Artificial Sequence: Synthetic peptide
  Seed: LRMKWMMAMKYPITA
LRMKLMMVMRYPVTA

SEQ ID NO: 235369 - protein, 15 aa, Artificial Sequence
  Description of Artificial Sequence: Synthetic peptide
  Seed: LRMKWMMAMKYPITA
LRMKLMMVMRYPWTA

SEQ ID NO: 235370 - protein, 15 aa, Artificial Sequence
  Description of Artificial Sequence: Synthetic peptide
  Seed: LRMKWMMAMKYPITA
LRMKLMMVMRYPYTA

SEQ ID NO: 235371 - protein, 15 aa, Artificial Sequence
  Description of Artificial Sequence: Synthetic peptide
  Seed: LRMKWMMAMKYPITA
LRMKLMMVMSYPATA

SEQ ID NO: 235372 - protein, 15 aa, Artificial Sequence
  Description of Artificial Sequence: Synthetic peptide
  Seed: LRMKWMMAMKYPITA
LRMKLMMVMSYPCTA

SEQ ID NO: 235373 - protein, 15 aa, Artificial Sequence
  Description of Artificial Sequence: Synthetic peptide
  Seed: LRMKWMMAMKYPITA
LRMKLMMVMSYPDTA

SEQ ID NO: 235374 - protein, 15 aa, Artificial Sequence
  Description of Artificial Sequence: Synthetic peptide
  Seed: LRMKWMMAMKYPITA
LRMKLMMVMSYPETA

SEQ ID NO: 235375 - protein, 15 aa, Artificial Sequence
  Description of Artificial Sequence: Synthetic peptide
  Seed: LRMKWMMAMKYPITA
LRMKLMMVMSYPFTA

SEQ ID NO: 235376 - protein, 15 aa, Artificial Sequence
  Description of Artificial Sequence: Synthetic peptide
  Seed: LRMKWMMAMKYPITA
LRMKLMMVMSYPGTA

SEQ ID NO: 235377 - protein, 15 aa, Artificial Sequence
  Description of Artificial Sequence: Synthetic peptide
  Seed: LRMKWMMAMKYPITA
LRMKLMMVMSYPHTA

SEQ ID NO: 235378 - protein, 15 aa, Artificial Sequence
  Description of Artificial Sequence: Synthetic peptide
  Seed: LRMKWMMAMKYPITA
LRMKLMMVMSYPITA

SEQ ID NO: 235379 - protein, 15 aa, Artificial Sequence
  Description of Artificial Sequence: Synthetic peptide
  Seed: LRMKWMMAMKYPITA
LRMKLMMVMSYPKTA

SEQ ID NO: 235380 - protein, 15 aa, Artificial Sequence
  Description of Artificial Sequence: Synthetic peptide
  Seed: LRMKWMMAMKYPITA
LRMKLMMVMSYPLTA

SEQ ID NO: 235381 - protein, 15 aa, Artificial Sequence
  Description of Artificial Sequence: Synthetic peptide
  Seed: LRMKWMMAMKYPITA
LRMKLMMVMSYPMTA

SEQ ID NO: 235382 - protein, 15 aa, Artificial Sequence
  Description of Artificial Sequence: Synthetic peptide
  Seed: LRMKWMMAMKYPITA
LRMKLMMVMSYPNTA

SEQ ID NO: 235383 - protein, 15 aa, Artificial Sequence
  Description of Artificial Sequence: Synthetic peptide
  Seed: LRMKWMMAMKYPITA
LRMKLMMVMSYPPTA

SEQ ID NO: 235384 - protein, 15 aa, Artificial Sequence
  Description of Artificial Sequence: Synthetic peptide
  Seed: LRMKWMMAMKYPITA
LRMKLMMVMSYPQTA

SEQ ID NO: 235385 - protein, 15 aa, Artificial Sequence
  Description of Artificial Sequence: Synthetic peptide
  Seed: LRMKWMMAMKYPITA
LRMKLMMVMSYPRTA

SEQ ID NO: 235386 - protein, 15 aa, Artificial Sequence
  Description of Artificial Sequence: Synthetic peptide
  Seed: LRMKWMMAMKYPITA
LRMKLMMVMSYPSTA

SEQ ID NO: 235387 - protein, 15 aa, Artificial Sequence
  Description of Artificial Sequence: Synthetic peptide
  Seed: LRMKWMMAMKYPITA
LRMKLMMVMSYPTTA

SEQ ID NO: 235388 - protein, 15 aa, Artificial Sequence
  Description of Artificial Sequence: Synthetic peptide
  Seed: LRMKWMMAMKYPITA
LRMKLMMVMSYPVTA

SEQ ID NO: 235389 - protein, 15 aa, Artificial Sequence
  Description of Artificial Sequence: Synthetic peptide
  Seed: LRMKWMMAMKYPITA
LRMKLMMVMSYPYTA

SEQ ID NO: 235390 - protein, 15 aa, Artificial Sequence
  Description of Artificial Sequence: Synthetic peptide
  Seed: LRMKWMMAMKYPITA
LRMKLMMVMTYPATA

SEQ ID NO: 235391 - protein, 15 aa, Artificial Sequence
  Description of Artificial Sequence: Synthetic peptide
  Seed: LRMKWMMAMKYPITA
LRMKLMMVMTYPCTA

SEQ ID NO: 235392 - protein, 15 aa, Artificial Sequence
  Description of Artificial Sequence: Synthetic peptide
  Seed: LRMKWMMAMKYPITA
LRMKLMMVMTYPDTA

SEQ ID NO: 235393 - protein, 15 aa, Artificial Sequence
  Description of Artificial Sequence: Synthetic peptide
  Seed: LRMKWMMAMKYPITA
LRMKLMMVMTYPETA

SEQ ID NO: 235394 - protein, 15 aa, Artificial Sequence
  Description of Artificial Sequence: Synthetic peptide
  Seed: LRMKWMMAMKYPITA
LRMKLMMVMTYPFTA

SEQ ID NO: 235395 - protein, 15 aa, Artificial Sequence
  Description of Artificial Sequence: Synthetic peptide
  Seed: LRMKWMMAMKYPITA
LRMKLMMVMTYPGTA

SEQ ID NO: 235396 - protein, 15 aa, Artificial Sequence
  Description of Artificial Sequence: Synthetic peptide
  Seed: LRMKWMMAMKYPITA
LRMKLMMVMTYPHTA

SEQ ID NO: 235397 - protein, 15 aa, Artificial Sequence
  Description of Artificial Sequence: Synthetic peptide
  Seed: LRMKWMMAMKYPITA
LRMKLMMVMTYPITA

SEQ ID NO: 235398 - protein, 15 aa, Artificial Sequence
  Description of Artificial Sequence: Synthetic peptide
  Seed: LRMKWMMAMKYPITA
LRMKLMMVMTYPKTA

SEQ ID NO: 235399 - protein, 15 aa, Artificial Sequence
  Description of Artificial Sequence: Synthetic peptide
  Seed: LRMKWMMAMKYPITA
LRMKLMMVMTYPLTA

SEQ ID NO: 235400 - protein, 15 aa, Artificial Sequence
  Description of Artificial Sequence: Synthetic peptide
  Seed: LRMKWMMAMKYPITA
LRMKLMMVMTYPMTA

SEQ ID NO: 235401 - protein, 15 aa, Artificial Sequence
  Description of Artificial Sequence: Synthetic peptide
  Seed: LRMKWMMAMKYPITA
LRMKLMMVMTYPNTA

SEQ ID NO: 235402 - protein, 15 aa, Artificial Sequence
  Description of Artificial Sequence: Synthetic peptide
  Seed: LRMKWMMAMKYPITA
LRMKLMMVMTYPPTA

SEQ ID NO: 235403 - protein, 15 aa, Artificial Sequence
  Description of Artificial Sequence: Synthetic peptide
  Seed: LRMKWMMAMKYPITA
LRMKLMMVMTYPQTA

SEQ ID NO: 235404 - protein, 15 aa, Artificial Sequence
  Description of Artificial Sequence: Synthetic peptide
  Seed: LRMKWMMAMKYPITA
LRMKLMMVMTYPRTA

SEQ ID NO: 235405 - protein, 15 aa, Artificial Sequence
  Description of Artificial Sequence: Synthetic peptide
  Seed: LRMKWMMAMKYPITA
LRMKLMMVMTYPSTA

SEQ ID NO: 235406 - protein, 15 aa, Artificial Sequence
  Description of Artificial Sequence: Synthetic peptide
  Seed: LRMKWMMAMKYPITA
LRMKLMMVMTYPTTA

SEQ ID NO: 235407 - protein, 15 aa, Artificial Sequence
  Description of Artificial Sequence: Synthetic peptide
  Seed: LRMKWMMAMKYPITA
LRMKLMMVMTYPVTA

SEQ ID NO: 235408 - protein, 15 aa, Artificial Sequence
  Description of Artificial Sequence: Synthetic peptide
  Seed: LRMKWMMAMKYPITA
LRMKLMMVMTYPYTA

SEQ ID NO: 235409 - protein, 15 aa, Artificial Sequence
  Description of Artificial Sequence: Synthetic peptide
  Seed: LRMKWMMAMKYPITA
LRMKLMMVMVYPATA

SEQ ID NO: 235410 - protein, 15 aa, Artificial Sequence
  Description of Artificial Sequence: Synthetic peptide
  Seed: LRMKWMMAMKYPITA
LRMKLMMVMVYPDTA

SEQ ID NO: 235411 - protein, 15 aa, Artificial Sequence
  Description of Artificial Sequence: Synthetic peptide
  Seed: LRMKWMMAMKYPITA
LRMKLMMVMVYPETA

SEQ ID NO: 235412 - protein, 15 aa, Artificial Sequence
  Description of Artificial Sequence: Synthetic peptide
  Seed: LRMKWMMAMKYPITA
LRMKLMMVMVYPGTA

SEQ ID NO: 235413 - protein, 15 aa, Artificial Sequence
  Description of Artificial Sequence: Synthetic peptide
  Seed: LRMKWMMAMKYPITA
LRMKLMMVMVYPHTA

SEQ ID NO: 235414 - protein, 15 aa, Artificial Sequence
  Description of Artificial Sequence: Synthetic peptide
  Seed: LRMKWMMAMKYPITA
LRMKLMMVMVYPITA

SEQ ID NO: 235415 - protein, 15 aa, Artificial Sequence
  Description of Artificial Sequence: Synthetic peptide
  Seed: LRMKWMMAMKYPITA
LRMKLMMVMVYPKTA

SEQ ID NO: 235416 - protein, 15 aa, Artificial Sequence
  Description of Artificial Sequence: Synthetic peptide
  Seed: LRMKWMMAMKYPITA
LRMKLMMVMVYPLTA

SEQ ID NO: 235417 - protein, 15 aa, Artificial Sequence
  Description of Artificial Sequence: Synthetic peptide
  Seed: LRMKWMMAMKYPITA
LRMKLMMVMVYPMTA

SEQ ID NO: 235418 - protein, 15 aa, Artificial Sequence
  Description of Artificial Sequence: Synthetic peptide
  Seed: LRMKWMMAMKYPITA
LRMKLMMVMVYPNTA

SEQ ID NO: 235419 - protein, 15 aa, Artificial Sequence
  Description of Artificial Sequence: Synthetic peptide
  Seed: LRMKWMMAMKYPITA
LRMKLMMVMVYPQTA

SEQ ID NO: 235420 - protein, 15 aa, Artificial Sequence
  Description of Artificial Sequence: Synthetic peptide
  Seed: LRMKWMMAMKYPITA
LRMKLMMVMVYPRTA

SEQ ID NO: 235421 - protein, 15 aa, Artificial Sequence
  Description of Artificial Sequence: Synthetic peptide
  Seed: LRMKWMMAMKYPITA
LRMKLMMVMVYPSTA

SEQ ID NO: 235422 - protein, 15 aa, Artificial Sequence
  Description of Artificial Sequence: Synthetic peptide
  Seed: LRMKWMMAMKYPITA
LRMKLMMVMVYPTTA

SEQ ID NO: 235423 - protein, 15 aa, Artificial Sequence
  Description of Artificial Sequence: Synthetic peptide
  Seed: LRMKWMMAMKYPITA
LRMKLMMVMVYPVTA

SEQ ID NO: 235424 - protein, 15 aa, Artificial Sequence
  Description of Artificial Sequence: Synthetic peptide
  Seed: LRMKWMMAMKYPITA
LRMKLMMWMAYPATA

SEQ ID NO: 235425 - protein, 15 aa, Artificial Sequence
  Description of Artificial Sequence: Synthetic peptide
  Seed: LRMKWMMAMKYPITA
LRMKLMMWMAYPFTA

SEQ ID NO: 235426 - protein, 15 aa, Artificial Sequence
  Description of Artificial Sequence: Synthetic peptide
  Seed: LRMKWMMAMKYPITA
LRMKLMMWMAYPITA

SEQ ID NO: 235427 - protein, 15 aa, Artificial Sequence
  Description of Artificial Sequence: Synthetic peptide
  Seed: LRMKWMMAMKYPITA
LRMKLMMWMAYPLTA

SEQ ID NO: 235428 - protein, 15 aa, Artificial Sequence
  Description of Artificial Sequence: Synthetic peptide
  Seed: LRMKWMMAMKYPITA
LRMKLMMWMAYPMTA

SEQ ID NO: 235429 - protein, 15 aa, Artificial Sequence
  Description of Artificial Sequence: Synthetic peptide
  Seed: LRMKWMMAMKYPITA
LRMKLMMWMAYPRTA

SEQ ID NO: 235430 - protein, 15 aa, Artificial Sequence
  Description of Artificial Sequence: Synthetic peptide
  Seed: LRMKWMMAMKYPITA
LRMKLMMWMAYPSTA

SEQ ID NO: 235431 - protein, 15 aa, Artificial Sequence
  Description of Artificial Sequence: Synthetic peptide
  Seed: LRMKWMMAMKYPITA
LRMKLMMWMAYPTTA

SEQ ID NO: 235432 - protein, 15 aa, Artificial Sequence
  Description of Artificial Sequence: Synthetic peptide
  Seed: LRMKWMMAMKYPITA
LRMKLMMWMAYPVTA

SEQ ID NO: 235433 - protein, 15 aa, Artificial Sequence
  Description of Artificial Sequence: Synthetic peptide
  Seed: LRMKWMMAMKYPITA
LRMKLMMWMAYPYTA

SEQ ID NO: 235434 - protein, 15 aa, Artificial Sequence
  Description of Artificial Sequence: Synthetic peptide
  Seed: LRMKWMMAMKYPITA
LRMKLMMWMDYPATA

SEQ ID NO: 235435 - protein, 15 aa, Artificial Sequence
  Description of Artificial Sequence: Synthetic peptide
  Seed: LRMKWMMAMKYPITA
LRMKLMMWMGYPATA

SEQ ID NO: 235436 - protein, 15 aa, Artificial Sequence
  Description of Artificial Sequence: Synthetic peptide
  Seed: LRMKWMMAMKYPITA
LRMKLMMWMGYPITA

SEQ ID NO: 235437 - protein, 15 aa, Artificial Sequence
  Description of Artificial Sequence: Synthetic peptide
  Seed: LRMKWMMAMKYPITA
LRMKLMMWMGYPLTA

SEQ ID NO: 235438 - protein, 15 aa, Artificial Sequence
  Description of Artificial Sequence: Synthetic peptide
  Seed: LRMKWMMAMKYPITA
LRMKLMMWMGYPMTA

SEQ ID NO: 235439 - protein, 15 aa, Artificial Sequence
  Description of Artificial Sequence: Synthetic peptide
  Seed: LRMKWMMAMKYPITA
LRMKLMMWMGYPVTA

SEQ ID NO: 235440 - protein, 15 aa, Artificial Sequence
  Description of Artificial Sequence: Synthetic peptide
  Seed: LRMKWMMAMKYPITA
LRMKLMMWMHYPATA

SEQ ID NO: 235441 - protein, 15 aa, Artificial Sequence
  Description of Artificial Sequence: Synthetic peptide
  Seed: LRMKWMMAMKYPITA
LRMKLMMWMHYPFTA

SEQ ID NO: 235442 - protein, 15 aa, Artificial Sequence
  Description of Artificial Sequence: Synthetic peptide
  Seed: LRMKWMMAMKYPITA
LRMKLMMWMHYPITA

SEQ ID NO: 235443 - protein, 15 aa, Artificial Sequence
  Description of Artificial Sequence: Synthetic peptide
  Seed: LRMKWMMAMKYPITA
LRMKLMMWMHYPLTA

SEQ ID NO: 235444 - protein, 15 aa, Artificial Sequence
  Description of Artificial Sequence: Synthetic peptide
  Seed: LRMKWMMAMKYPITA
LRMKLMMWMHYPMTA

SEQ ID NO: 235445 - protein, 15 aa, Artificial Sequence
  Description of Artificial Sequence: Synthetic peptide
  Seed: LRMKWMMAMKYPITA
LRMKLMMWMHYPRTA

SEQ ID NO: 235446 - protein, 15 aa, Artificial Sequence
  Description of Artificial Sequence: Synthetic peptide
  Seed: LRMKWMMAMKYPITA
LRMKLMMWMHYPVTA

SEQ ID NO: 235447 - protein, 15 aa, Artificial Sequence
  Description of Artificial Sequence: Synthetic peptide
  Seed: LRMKWMMAMKYPITA
LRMKLMMWMHYPYTA

SEQ ID NO: 235448 - protein, 15 aa, Artificial Sequence
  Description of Artificial Sequence: Synthetic peptide
  Seed: LRMKWMMAMKYPITA
LRMKLMMWMIYPATA

SEQ ID NO: 235449 - protein, 15 aa, Artificial Sequence
  Description of Artificial Sequence: Synthetic peptide
  Seed: LRMKWMMAMKYPITA
LRMKLMMWMIYPRTA

SEQ ID NO: 235450 - protein, 15 aa, Artificial Sequence
  Description of Artificial Sequence: Synthetic peptide
  Seed: LRMKWMMAMKYPITA
LRMKLMMWMKYPATA

SEQ ID NO: 235451 - protein, 15 aa, Artificial Sequence
  Description of Artificial Sequence: Synthetic peptide
  Seed: LRMKWMMAMKYPITA
LRMKLMMWMKYPETA

SEQ ID NO: 235452 - protein, 15 aa, Artificial Sequence
  Description of Artificial Sequence: Synthetic peptide
  Seed: LRMKWMMAMKYPITA
LRMKLMMWMKYPFTA

SEQ ID NO: 235453 - protein, 15 aa, Artificial Sequence
  Description of Artificial Sequence: Synthetic peptide
  Seed: LRMKWMMAMKYPITA
LRMKLMMWMKYPGTA

SEQ ID NO: 235454 - protein, 15 aa, Artificial Sequence
  Description of Artificial Sequence: Synthetic peptide
  Seed: LRMKWMMAMKYPITA
LRMKLMMWMKYPHTA

SEQ ID NO: 235455 - protein, 15 aa, Artificial Sequence
  Description of Artificial Sequence: Synthetic peptide
  Seed: LRMKWMMAMKYPITA
LRMKLMMWMKYPITA

SEQ ID NO: 235456 - protein, 15 aa, Artificial Sequence
  Description of Artificial Sequence: Synthetic peptide
  Seed: LRMKWMMAMKYPITA
LRMKLMMWMKYPKTA

SEQ ID NO: 235457 - protein, 15 aa, Artificial Sequence
  Description of Artificial Sequence: Synthetic peptide
  Seed: LRMKWMMAMKYPITA
LRMKLMMWMKYPLTA

SEQ ID NO: 235458 - protein, 15 aa, Artificial Sequence
  Description of Artificial Sequence: Synthetic peptide
  Seed: LRMKWMMAMKYPITA
LRMKLMMWMKYPMTA

SEQ ID NO: 235459 - protein, 15 aa, Artificial Sequence
  Description of Artificial Sequence: Synthetic peptide
  Seed: LRMKWMMAMKYPITA
LRMKLMMWMKYPPTA

SEQ ID NO: 235460 - protein, 15 aa, Artificial Sequence
  Description of Artificial Sequence: Synthetic peptide
  Seed: LRMKWMMAMKYPITA
LRMKLMMWMKYPQTA

SEQ ID NO: 235461 - protein, 15 aa, Artificial Sequence
  Description of Artificial Sequence: Synthetic peptide
  Seed: LRMKWMMAMKYPITA
LRMKLMMWMKYPRTA

SEQ ID NO: 235462 - protein, 15 aa, Artificial Sequence
  Description of Artificial Sequence: Synthetic peptide
  Seed: LRMKWMMAMKYPITA
LRMKLMMWMKYPSTA

SEQ ID NO: 235463 - protein, 15 aa, Artificial Sequence
  Description of Artificial Sequence: Synthetic peptide
  Seed: LRMKWMMAMKYPITA
LRMKLMMWMKYPTTA

SEQ ID NO: 235464 - protein, 15 aa, Artificial Sequence
  Description of Artificial Sequence: Synthetic peptide
  Seed: LRMKWMMAMKYPITA
LRMKLMMWMKYPVTA

SEQ ID NO: 235465 - protein, 15 aa, Artificial Sequence
  Description of Artificial Sequence: Synthetic peptide
  Seed: LRMKWMMAMKYPITA
LRMKLMMWMKYPYTA

SEQ ID NO: 235466 - protein, 15 aa, Artificial Sequence
  Description of Artificial Sequence: Synthetic peptide
  Seed: LRMKWMMAMKYPITA
LRMKLMMWMNYPATA

SEQ ID NO: 235467 - protein, 15 aa, Artificial Sequence
  Description of Artificial Sequence: Synthetic peptide
  Seed: LRMKWMMAMKYPITA
LRMKLMMWMNYPFTA

SEQ ID NO: 235468 - protein, 15 aa, Artificial Sequence
  Description of Artificial Sequence: Synthetic peptide
  Seed: LRMKWMMAMKYPITA
LRMKLMMWMNYPITA

SEQ ID NO: 235469 - protein, 15 aa, Artificial Sequence
  Description of Artificial Sequence: Synthetic peptide
  Seed: LRMKWMMAMKYPITA
LRMKLMMWMNYPLTA

SEQ ID NO: 235470 - protein, 15 aa, Artificial Sequence
  Description of Artificial Sequence: Synthetic peptide
  Seed: LRMKWMMAMKYPITA
LRMKLMMWMNYPMTA

SEQ ID NO: 235471 - protein, 15 aa, Artificial Sequence
  Description of Artificial Sequence: Synthetic peptide
  Seed: LRMKWMMAMKYPITA
LRMKLMMWMNYPRTA

SEQ ID NO: 235472 - protein, 15 aa, Artificial Sequence
  Description of Artificial Sequence: Synthetic peptide
  Seed: LRMKWMMAMKYPITA
LRMKLMMWMNYPVTA

SEQ ID NO: 235473 - protein, 15 aa, Artificial Sequence
  Description of Artificial Sequence: Synthetic peptide
  Seed: LRMKWMMAMKYPITA
LRMKLMMWMNYPYTA

SEQ ID NO: 235474 - protein, 15 aa, Artificial Sequence
  Description of Artificial Sequence: Synthetic peptide
  Seed: LRMKWMMAMKYPITA
LRMKLMMWMPYPATA

SEQ ID NO: 235475 - protein, 15 aa, Artificial Sequence
  Description of Artificial Sequence: Synthetic peptide
  Seed: LRMKWMMAMKYPITA
LRMKLMMWMPYPFTA

SEQ ID NO: 235476 - protein, 15 aa, Artificial Sequence
  Description of Artificial Sequence: Synthetic peptide
  Seed: LRMKWMMAMKYPITA
LRMKLMMWMPYPITA

SEQ ID NO: 235477 - protein, 15 aa, Artificial Sequence
  Description of Artificial Sequence: Synthetic peptide
  Seed: LRMKWMMAMKYPITA
LRMKLMMWMPYPLTA

SEQ ID NO: 235478 - protein, 15 aa, Artificial Sequence
  Description of Artificial Sequence: Synthetic peptide
  Seed: LRMKWMMAMKYPITA
LRMKLMMWMPYPMTA

SEQ ID NO: 235479 - protein, 15 aa, Artificial Sequence
  Description of Artificial Sequence: Synthetic peptide
  Seed: LRMKWMMAMKYPITA
LRMKLMMWMPYPRTA

SEQ ID NO: 235480 - protein, 15 aa, Artificial Sequence
  Description of Artificial Sequence: Synthetic peptide
  Seed: LRMKWMMAMKYPITA
LRMKLMMWMPYPVTA

SEQ ID NO: 235481 - protein, 15 aa, Artificial Sequence
  Description of Artificial Sequence: Synthetic peptide
  Seed: LRMKWMMAMKYPITA
LRMKLMMWMPYPYTA

SEQ ID NO: 235482 - protein, 15 aa, Artificial Sequence
  Description of Artificial Sequence: Synthetic peptide
  Seed: LRMKWMMAMKYPITA
LRMKLMMWMRYPATA

SEQ ID NO: 235483 - protein, 15 aa, Artificial Sequence
  Description of Artificial Sequence: Synthetic peptide
  Seed: LRMKWMMAMKYPITA
LRMKLMMWMRYPDTA

SEQ ID NO: 235484 - protein, 15 aa, Artificial Sequence
  Description of Artificial Sequence: Synthetic peptide
  Seed: LRMKWMMAMKYPITA
LRMKLMMWMRYPETA

SEQ ID NO: 235485 - protein, 15 aa, Artificial Sequence
  Description of Artificial Sequence: Synthetic peptide
  Seed: LRMKWMMAMKYPITA
LRMKLMMWMRYPFTA

SEQ ID NO: 235486 - protein, 15 aa, Artificial Sequence
  Description of Artificial Sequence: Synthetic peptide
  Seed: LRMKWMMAMKYPITA
LRMKLMMWMRYPGTA

SEQ ID NO: 235487 - protein, 15 aa, Artificial Sequence
  Description of Artificial Sequence: Synthetic peptide
  Seed: LRMKWMMAMKYPITA
LRMKLMMWMRYPHTA

SEQ ID NO: 235488 - protein, 15 aa, Artificial Sequence
  Description of Artificial Sequence: Synthetic peptide
  Seed: LRMKWMMAMKYPITA
LRMKLMMWMRYPITA

SEQ ID NO: 235489 - protein, 15 aa, Artificial Sequence
  Description of Artificial Sequence: Synthetic peptide
  Seed: LRMKWMMAMKYPITA
LRMKLMMWMRYPKTA

SEQ ID NO: 235490 - protein, 15 aa, Artificial Sequence
  Description of Artificial Sequence: Synthetic peptide
  Seed: LRMKWMMAMKYPITA
LRMKLMMWMRYPLTA

SEQ ID NO: 235491 - protein, 15 aa, Artificial Sequence
  Description of Artificial Sequence: Synthetic peptide
  Seed: LRMKWMMAMKYPITA
LRMKLMMWMRYPMTA

SEQ ID NO: 235492 - protein, 15 aa, Artificial Sequence
  Description of Artificial Sequence: Synthetic peptide
  Seed: LRMKWMMAMKYPITA
LRMKLMMWMRYPNTA

SEQ ID NO: 235493 - protein, 15 aa, Artificial Sequence
  Description of Artificial Sequence: Synthetic peptide
  Seed: LRMKWMMAMKYPITA
LRMKLMMWMRYPPTA

SEQ ID NO: 235494 - protein, 15 aa, Artificial Sequence
  Description of Artificial Sequence: Synthetic peptide
  Seed: LRMKWMMAMKYPITA
LRMKLMMWMRYPQTA

SEQ ID NO: 235495 - protein, 15 aa, Artificial Sequence
  Description of Artificial Sequence: Synthetic peptide
  Seed: LRMKWMMAMKYPITA
LRMKLMMWMRYPRTA

SEQ ID NO: 235496 - protein, 15 aa, Artificial Sequence
  Description of Artificial Sequence: Synthetic peptide
  Seed: LRMKWMMAMKYPITA
LRMKLMMWMRYPSTA

SEQ ID NO: 235497 - protein, 15 aa, Artificial Sequence
  Description of Artificial Sequence: Synthetic peptide
  Seed: LRMKWMMAMKYPITA
LRMKLMMWMRYPTTA

SEQ ID NO: 235498 - protein, 15 aa, Artificial Sequence
  Description of Artificial Sequence: Synthetic peptide
  Seed: LRMKWMMAMKYPITA
LRMKLMMWMRYPVTA

SEQ ID NO: 235499 - protein, 15 aa, Artificial Sequence
  Description of Artificial Sequence: Synthetic peptide
  Seed: LRMKWMMAMKYPITA
LRMKLMMWMRYPYTA

SEQ ID NO: 235500 - protein, 15 aa, Artificial Sequence
  Description of Artificial Sequence: Synthetic peptide
  Seed: LRMKWMMAMKYPITA
LRMKLMMWMSYPATA

SEQ ID NO: 235501 - protein, 15 aa, Artificial Sequence
  Description of Artificial Sequence: Synthetic peptide
  Seed: LRMKWMMAMKYPITA
LRMKLMMWMSYPITA

SEQ ID NO: 235502 - protein, 15 aa, Artificial Sequence
  Description of Artificial Sequence: Synthetic peptide
  Seed: LRMKWMMAMKYPITA
LRMKLMMWMSYPLTA

SEQ ID NO: 235503 - protein, 15 aa, Artificial Sequence
  Description of Artificial Sequence: Synthetic peptide
  Seed: LRMKWMMAMKYPITA
LRMKLMMWMSYPMTA

SEQ ID NO: 235504 - protein, 15 aa, Artificial Sequence
  Description of Artificial Sequence: Synthetic peptide
  Seed: LRMKWMMAMKYPITA
LRMKLMMWMSYPRTA

SEQ ID NO: 235505 - protein, 15 aa, Artificial Sequence
  Description of Artificial Sequence: Synthetic peptide
  Seed: LRMKWMMAMKYPITA
LRMKLMMWMSYPVTA

SEQ ID NO: 235506 - protein, 15 aa, Artificial Sequence
  Description of Artificial Sequence: Synthetic peptide
  Seed: LRMKWMMAMKYPITA
LRMKLMMWMSYPYTA

SEQ ID NO: 235507 - protein, 15 aa, Artificial Sequence
  Description of Artificial Sequence: Synthetic peptide
  Seed: LRMKWMMAMKYPITA
LRMKLMMWMTYPATA

SEQ ID NO: 235508 - protein, 15 aa, Artificial Sequence
  Description of Artificial Sequence: Synthetic peptide
  Seed: LRMKWMMAMKYPITA
LRMKLMMWMTYPMTA

SEQ ID NO: 235509 - protein, 15 aa, Artificial Sequence
  Description of Artificial Sequence: Synthetic peptide
  Seed: LRMKWMMAMKYPITA
LRMKLMMWMTYPRTA

SEQ ID NO: 235510 - protein, 15 aa, Artificial Sequence
  Description of Artificial Sequence: Synthetic peptide
  Seed: LRMKWMMAMKYPITA
LRMKLMMWMTYPSTA

SEQ ID NO: 235511 - protein, 15 aa, Artificial Sequence
  Description of Artificial Sequence: Synthetic peptide
  Seed: LRMKWMMAMKYPITA
LRMKLMMWMTYPYTA

SEQ ID NO: 235512 - protein, 15 aa, Artificial Sequence
  Description of Artificial Sequence: Synthetic peptide
  Seed: LRMKWMMAMKYPITA
LRMKLMMWMVYPATA

SEQ ID NO: 235513 - protein, 15 aa, Artificial Sequence
  Description of Artificial Sequence: Synthetic peptide
  Seed: LRMKWMMAMKYPITA
LRMKLMMWMVYPRTA

SEQ ID NO: 235514 - protein, 15 aa, Artificial Sequence
  Description of Artificial Sequence: Synthetic peptide
  Seed: LRMKWMMAMKYPITA
LRMKLMMWMVYPSTA

SEQ ID NO: 235515 - protein, 15 aa, Artificial Sequence
  Description of Artificial Sequence: Synthetic peptide
  Seed: LRMKWMMAMKYPITA
LRMKLMMYMAYPATA

SEQ ID NO: 235516 - protein, 15 aa, Artificial Sequence
  Description of Artificial Sequence: Synthetic peptide
  Seed: LRMKWMMAMKYPITA
LRMKLMMYMAYPFTA

SEQ ID NO: 235517 - protein, 15 aa, Artificial Sequence
  Description of Artificial Sequence: Synthetic peptide
  Seed: LRMKWMMAMKYPITA
LRMKLMMYMAYPGTA

SEQ ID NO: 235518 - protein, 15 aa, Artificial Sequence
  Description of Artificial Sequence: Synthetic peptide
  Seed: LRMKWMMAMKYPITA
LRMKLMMYMAYPHTA

SEQ ID NO: 235519 - protein, 15 aa, Artificial Sequence
  Description of Artificial Sequence: Synthetic peptide
  Seed: LRMKWMMAMKYPITA
LRMKLMMYMAYPITA

SEQ ID NO: 235520 - protein, 15 aa, Artificial Sequence
  Description of Artificial Sequence: Synthetic peptide
  Seed: LRMKWMMAMKYPITA
LRMKLMMYMAYPKTA

SEQ ID NO: 235521 - protein, 15 aa, Artificial Sequence
  Description of Artificial Sequence: Synthetic peptide
  Seed: LRMKWMMAMKYPITA
LRMKLMMYMAYPLTA

SEQ ID NO: 235522 - protein, 15 aa, Artificial Sequence
  Description of Artificial Sequence: Synthetic peptide
  Seed: LRMKWMMAMKYPITA
LRMKLMMYMAYPMTA

SEQ ID NO: 235523 - protein, 15 aa, Artificial Sequence
  Description of Artificial Sequence: Synthetic peptide
  Seed: LRMKWMMAMKYPITA
LRMKLMMYMAYPRTA

SEQ ID NO: 235524 - protein, 15 aa, Artificial Sequence
  Description of Artificial Sequence: Synthetic peptide
  Seed: LRMKWMMAMKYPITA
LRMKLMMYMAYPSTA

SEQ ID NO: 235525 - protein, 15 aa, Artificial Sequence
  Description of Artificial Sequence: Synthetic peptide
  Seed: LRMKWMMAMKYPITA
LRMKLMMYMAYPTTA

SEQ ID NO: 235526 - protein, 15 aa, Artificial Sequence
  Description of Artificial Sequence: Synthetic peptide
  Seed: LRMKWMMAMKYPITA
LRMKLMMYMAYPVTA

SEQ ID NO: 235527 - protein, 15 aa, Artificial Sequence
  Description of Artificial Sequence: Synthetic peptide
  Seed: LRMKWMMAMKYPITA
LRMKLMMYMAYPYTA

SEQ ID NO: 235528 - protein, 15 aa, Artificial Sequence
  Description of Artificial Sequence: Synthetic peptide
  Seed: LRMKWMMAMKYPITA
LRMKLMMYMDYPATA

SEQ ID NO: 235529 - protein, 15 aa, Artificial Sequence
  Description of Artificial Sequence: Synthetic peptide
  Seed: LRMKWMMAMKYPITA
LRMKLMMYMDYPITA

SEQ ID NO: 235530 - protein, 15 aa, Artificial Sequence
  Description of Artificial Sequence: Synthetic peptide
  Seed: LRMKWMMAMKYPITA
LRMKLMMYMDYPVTA

SEQ ID NO: 235531 - protein, 15 aa, Artificial Sequence
  Description of Artificial Sequence: Synthetic peptide
  Seed: LRMKWMMAMKYPITA
LRMKLMMYMGYPATA

SEQ ID NO: 235532 - protein, 15 aa, Artificial Sequence
  Description of Artificial Sequence: Synthetic peptide
  Seed: LRMKWMMAMKYPITA
LRMKLMMYMGYPITA

SEQ ID NO: 235533 - protein, 15 aa, Artificial Sequence
  Description of Artificial Sequence: Synthetic peptide
  Seed: LRMKWMMAMKYPITA
LRMKLMMYMGYPLTA

SEQ ID NO: 235534 - protein, 15 aa, Artificial Sequence
  Description of Artificial Sequence: Synthetic peptide
  Seed: LRMKWMMAMKYPITA
LRMKLMMYMGYPMTA

SEQ ID NO: 235535 - protein, 15 aa, Artificial Sequence
  Description of Artificial Sequence: Synthetic peptide
  Seed: LRMKWMMAMKYPITA
LRMKLMMYMGYPRTA

SEQ ID NO: 235536 - protein, 15 aa, Artificial Sequence
  Description of Artificial Sequence: Synthetic peptide
  Seed: LRMKWMMAMKYPITA
LRMKLMMYMGYPVTA

SEQ ID NO: 235537 - protein, 15 aa, Artificial Sequence
  Description of Artificial Sequence: Synthetic peptide
  Seed: LRMKWMMAMKYPITA
LRMKLMMYMHYPATA

SEQ ID NO: 235538 - protein, 15 aa, Artificial Sequence
  Description of Artificial Sequence: Synthetic peptide
  Seed: LRMKWMMAMKYPITA
LRMKLMMYMHYPFTA

SEQ ID NO: 235539 - protein, 15 aa, Artificial Sequence
  Description of Artificial Sequence: Synthetic peptide
  Seed: LRMKWMMAMKYPITA
LRMKLMMYMHYPHTA

SEQ ID NO: 235540 - protein, 15 aa, Artificial Sequence
  Description of Artificial Sequence: Synthetic peptide
  Seed: LRMKWMMAMKYPITA
LRMKLMMYMHYPITA

SEQ ID NO: 235541 - protein, 15 aa, Artificial Sequence
  Description of Artificial Sequence: Synthetic peptide
  Seed: LRMKWMMAMKYPITA
LRMKLMMYMHYPLTA

SEQ ID NO: 235542 - protein, 15 aa, Artificial Sequence
  Description of Artificial Sequence: Synthetic peptide
  Seed: LRMKWMMAMKYPITA
LRMKLMMYMHYPMTA

SEQ ID NO: 235543 - protein, 15 aa, Artificial Sequence
  Description of Artificial Sequence: Synthetic peptide
  Seed: LRMKWMMAMKYPITA
LRMKLMMYMHYPRTA

SEQ ID NO: 235544 - protein, 15 aa, Artificial Sequence
  Description of Artificial Sequence: Synthetic peptide
  Seed: LRMKWMMAMKYPITA
LRMKLMMYMHYPVTA

SEQ ID NO: 235545 - protein, 15 aa, Artificial Sequence
  Description of Artificial Sequence: Synthetic peptide
  Seed: LRMKWMMAMKYPITA
LRMKLMMYMHYPYTA

SEQ ID NO: 235546 - protein, 15 aa, Artificial Sequence
  Description of Artificial Sequence: Synthetic peptide
  Seed: LRMKWMMAMKYPITA
LRMKLMMYMIYPRTA

SEQ ID NO: 235547 - protein, 15 aa, Artificial Sequence
  Description of Artificial Sequence: Synthetic peptide
  Seed: LRMKWMMAMKYPITA
LRMKLMMYMKYPATA

SEQ ID NO: 235548 - protein, 15 aa, Artificial Sequence
  Description of Artificial Sequence: Synthetic peptide
  Seed: LRMKWMMAMKYPITA
LRMKLMMYMKYPDTA

SEQ ID NO: 235549 - protein, 15 aa, Artificial Sequence
  Description of Artificial Sequence: Synthetic peptide
  Seed: LRMKWMMAMKYPITA
LRMKLMMYMKYPETA

SEQ ID NO: 235550 - protein, 15 aa, Artificial Sequence
  Description of Artificial Sequence: Synthetic peptide
  Seed: LRMKWMMAMKYPITA
LRMKLMMYMKYPFTA

SEQ ID NO: 235551 - protein, 15 aa, Artificial Sequence
  Description of Artificial Sequence: Synthetic peptide
  Seed: LRMKWMMAMKYPITA
LRMKLMMYMKYPGTA

SEQ ID NO: 235552 - protein, 15 aa, Artificial Sequence
  Description of Artificial Sequence: Synthetic peptide
  Seed: LRMKWMMAMKYPITA
LRMKLMMYMKYPHTA

SEQ ID NO: 235553 - protein, 15 aa, Artificial Sequence
  Description of Artificial Sequence: Synthetic peptide
  Seed: LRMKWMMAMKYPITA
LRMKLMMYMKYPITA

SEQ ID NO: 235554 - protein, 15 aa, Artificial Sequence
  Description of Artificial Sequence: Synthetic peptide
  Seed: LRMKWMMAMKYPITA
LRMKLMMYMKYPKTA

SEQ ID NO: 235555 - protein, 15 aa, Artificial Sequence
  Description of Artificial Sequence: Synthetic peptide
  Seed: LRMKWMMAMKYPITA
LRMKLMMYMKYPLTA

SEQ ID NO: 235556 - protein, 15 aa, Artificial Sequence
  Description of Artificial Sequence: Synthetic peptide
  Seed: LRMKWMMAMKYPITA
LRMKLMMYMKYPMTA

SEQ ID NO: 235557 - protein, 15 aa, Artificial Sequence
  Description of Artificial Sequence: Synthetic peptide
  Seed: LRMKWMMAMKYPITA
LRMKLMMYMKYPNTA

SEQ ID NO: 235558 - protein, 15 aa, Artificial Sequence
  Description of Artificial Sequence: Synthetic peptide
  Seed: LRMKWMMAMKYPITA
LRMKLMMYMKYPPTA

SEQ ID NO: 235559 - protein, 15 aa, Artificial Sequence
  Description of Artificial Sequence: Synthetic peptide
  Seed: LRMKWMMAMKYPITA
LRMKLMMYMKYPQTA

SEQ ID NO: 235560 - protein, 15 aa, Artificial Sequence
  Description of Artificial Sequence: Synthetic peptide
  Seed: LRMKWMMAMKYPITA
LRMKLMMYMKYPRTA

SEQ ID NO: 235561 - protein, 15 aa, Artificial Sequence
  Description of Artificial Sequence: Synthetic peptide
  Seed: LRMKWMMAMKYPITA
LRMKLMMYMKYPSTA

SEQ ID NO: 235562 - protein, 15 aa, Artificial Sequence
  Description of Artificial Sequence: Synthetic peptide
  Seed: LRMKWMMAMKYPITA
LRMKLMMYMKYPTTA

SEQ ID NO: 235563 - protein, 15 aa, Artificial Sequence
  Description of Artificial Sequence: Synthetic peptide
  Seed: LRMKWMMAMKYPITA
LRMKLMMYMKYPVTA

SEQ ID NO: 235564 - protein, 15 aa, Artificial Sequence
  Description of Artificial Sequence: Synthetic peptide
  Seed: LRMKWMMAMKYPITA
LRMKLMMYMKYPYTA

SEQ ID NO: 235565 - protein, 15 aa, Artificial Sequence
  Description of Artificial Sequence: Synthetic peptide
  Seed: LRMKWMMAMKYPITA
LRMKLMMYMNYPATA

SEQ ID NO: 235566 - protein, 15 aa, Artificial Sequence
  Description of Artificial Sequence: Synthetic peptide
  Seed: LRMKWMMAMKYPITA
LRMKLMMYMNYPFTA

SEQ ID NO: 235567 - protein, 15 aa, Artificial Sequence
  Description of Artificial Sequence: Synthetic peptide
  Seed: LRMKWMMAMKYPITA
LRMKLMMYMNYPHTA

SEQ ID NO: 235568 - protein, 15 aa, Artificial Sequence
  Description of Artificial Sequence: Synthetic peptide
  Seed: LRMKWMMAMKYPITA
LRMKLMMYMNYPITA

SEQ ID NO: 235569 - protein, 15 aa, Artificial Sequence
  Description of Artificial Sequence: Synthetic peptide
  Seed: LRMKWMMAMKYPITA
LRMKLMMYMNYPLTA

SEQ ID NO: 235570 - protein, 15 aa, Artificial Sequence
  Description of Artificial Sequence: Synthetic peptide
  Seed: LRMKWMMAMKYPITA
LRMKLMMYMNYPMTA

SEQ ID NO: 235571 - protein, 15 aa, Artificial Sequence
  Description of Artificial Sequence: Synthetic peptide
  Seed: LRMKWMMAMKYPITA
LRMKLMMYMNYPRTA

SEQ ID NO: 235572 - protein, 15 aa, Artificial Sequence
  Description of Artificial Sequence: Synthetic peptide
  Seed: LRMKWMMAMKYPITA
LRMKLMMYMNYPTTA

SEQ ID NO: 235573 - protein, 15 aa, Artificial Sequence
  Description of Artificial Sequence: Synthetic peptide
  Seed: LRMKWMMAMKYPITA
LRMKLMMYMNYPVTA

SEQ ID NO: 235574 - protein, 15 aa, Artificial Sequence
  Description of Artificial Sequence: Synthetic peptide
  Seed: LRMKWMMAMKYPITA
LRMKLMMYMNYPYTA

SEQ ID NO: 235575 - protein, 15 aa, Artificial Sequence
  Description of Artificial Sequence: Synthetic peptide
  Seed: LRMKWMMAMKYPITA
LRMKLMMYMPYPATA

SEQ ID NO: 235576 - protein, 15 aa, Artificial Sequence
  Description of Artificial Sequence: Synthetic peptide
  Seed: LRMKWMMAMKYPITA
LRMKLMMYMPYPFTA

SEQ ID NO: 235577 - protein, 15 aa, Artificial Sequence
  Description of Artificial Sequence: Synthetic peptide
  Seed: LRMKWMMAMKYPITA
LRMKLMMYMPYPHTA

SEQ ID NO: 235578 - protein, 15 aa, Artificial Sequence
  Description of Artificial Sequence: Synthetic peptide
  Seed: LRMKWMMAMKYPITA
LRMKLMMYMPYPITA

SEQ ID NO: 235579 - protein, 15 aa, Artificial Sequence
  Description of Artificial Sequence: Synthetic peptide
  Seed: LRMKWMMAMKYPITA
LRMKLMMYMPYPKTA

SEQ ID NO: 235580 - protein, 15 aa, Artificial Sequence
  Description of Artificial Sequence: Synthetic peptide
  Seed: LRMKWMMAMKYPITA
LRMKLMMYMPYPLTA

SEQ ID NO: 235581 - protein, 15 aa, Artificial Sequence
  Description of Artificial Sequence: Synthetic peptide
  Seed: LRMKWMMAMKYPITA
LRMKLMMYMPYPMTA

SEQ ID NO: 235582 - protein, 15 aa, Artificial Sequence
  Description of Artificial Sequence: Synthetic peptide
  Seed: LRMKWMMAMKYPITA
LRMKLMMYMPYPRTA

SEQ ID NO: 235583 - protein, 15 aa, Artificial Sequence
  Description of Artificial Sequence: Synthetic peptide
  Seed: LRMKWMMAMKYPITA
LRMKLMMYMPYPVTA

SEQ ID NO: 235584 - protein, 15 aa, Artificial Sequence
  Description of Artificial Sequence: Synthetic peptide
  Seed: LRMKWMMAMKYPITA
LRMKLMMYMPYPYTA

SEQ ID NO: 235585 - protein, 15 aa, Artificial Sequence
  Description of Artificial Sequence: Synthetic peptide
  Seed: LRMKWMMAMKYPITA
LRMKLMMYMQYPRTA

SEQ ID NO: 235586 - protein, 15 aa, Artificial Sequence
  Description of Artificial Sequence: Synthetic peptide
  Seed: LRMKWMMAMKYPITA
LRMKLMMYMRYPATA

SEQ ID NO: 235587 - protein, 15 aa, Artificial Sequence
  Description of Artificial Sequence: Synthetic peptide
  Seed: LRMKWMMAMKYPITA
LRMKLMMYMRYPDTA

SEQ ID NO: 235588 - protein, 15 aa, Artificial Sequence
  Description of Artificial Sequence: Synthetic peptide
  Seed: LRMKWMMAMKYPITA
LRMKLMMYMRYPETA

SEQ ID NO: 235589 - protein, 15 aa, Artificial Sequence
  Description of Artificial Sequence: Synthetic peptide
  Seed: LRMKWMMAMKYPITA
LRMKLMMYMRYPFTA

SEQ ID NO: 235590 - protein, 15 aa, Artificial Sequence
  Description of Artificial Sequence: Synthetic peptide
  Seed: LRMKWMMAMKYPITA
LRMKLMMYMRYPGTA

SEQ ID NO: 235591 - protein, 15 aa, Artificial Sequence
  Description of Artificial Sequence: Synthetic peptide
  Seed: LRMKWMMAMKYPITA
LRMKLMMYMRYPHTA

SEQ ID NO: 235592 - protein, 15 aa, Artificial Sequence
  Description of Artificial Sequence: Synthetic peptide
  Seed: LRMKWMMAMKYPITA
LRMKLMMYMRYPITA

SEQ ID NO: 235593 - protein, 15 aa, Artificial Sequence
  Description of Artificial Sequence: Synthetic peptide
  Seed: LRMKWMMAMKYPITA
LRMKLMMYMRYPKTA

SEQ ID NO: 235594 - protein, 15 aa, Artificial Sequence
  Description of Artificial Sequence: Synthetic peptide
  Seed: LRMKWMMAMKYPITA
LRMKLMMYMRYPLTA

SEQ ID NO: 235595 - protein, 15 aa, Artificial Sequence
  Description of Artificial Sequence: Synthetic peptide
  Seed: LRMKWMMAMKYPITA
LRMKLMMYMRYPMTA

SEQ ID NO: 235596 - protein, 15 aa, Artificial Sequence
  Description of Artificial Sequence: Synthetic peptide
  Seed: LRMKWMMAMKYPITA
LRMKLMMYMRYPNTA

SEQ ID NO: 235597 - protein, 15 aa, Artificial Sequence
  Description of Artificial Sequence: Synthetic peptide
  Seed: LRMKWMMAMKYPITA
LRMKLMMYMRYPPTA

SEQ ID NO: 235598 - protein, 15 aa, Artificial Sequence
  Description of Artificial Sequence: Synthetic peptide
  Seed: LRMKWMMAMKYPITA
LRMKLMMYMRYPQTA

SEQ ID NO: 235599 - protein, 15 aa, Artificial Sequence
  Description of Artificial Sequence: Synthetic peptide
  Seed: LRMKWMMAMKYPITA
LRMKLMMYMRYPRTA

SEQ ID NO: 235600 - protein, 15 aa, Artificial Sequence
  Description of Artificial Sequence: Synthetic peptide
  Seed: LRMKWMMAMKYPITA
LRMKLMMYMRYPSTA

SEQ ID NO: 235601 - protein, 15 aa, Artificial Sequence
  Description of Artificial Sequence: Synthetic peptide
  Seed: LRMKWMMAMKYPITA
LRMKLMMYMRYPTTA

SEQ ID NO: 235602 - protein, 15 aa, Artificial Sequence
  Description of Artificial Sequence: Synthetic peptide
  Seed: LRMKWMMAMKYPITA
LRMKLMMYMRYPVTA

SEQ ID NO: 235603 - protein, 15 aa, Artificial Sequence
  Description of Artificial Sequence: Synthetic peptide
  Seed: LRMKWMMAMKYPITA
LRMKLMMYMRYPYTA

SEQ ID NO: 235604 - protein, 15 aa, Artificial Sequence
  Description of Artificial Sequence: Synthetic peptide
  Seed: LRMKWMMAMKYPITA
LRMKLMMYMSYPATA

SEQ ID NO: 235605 - protein, 15 aa, Artificial Sequence
  Description of Artificial Sequence: Synthetic peptide
  Seed: LRMKWMMAMKYPITA
LRMKLMMYMSYPFTA

SEQ ID NO: 235606 - protein, 15 aa, Artificial Sequence
  Description of Artificial Sequence: Synthetic peptide
  Seed: LRMKWMMAMKYPITA
LRMKLMMYMSYPHTA

SEQ ID NO: 235607 - protein, 15 aa, Artificial Sequence
  Description of Artificial Sequence: Synthetic peptide
  Seed: LRMKWMMAMKYPITA
LRMKLMMYMSYPITA

SEQ ID NO: 235608 - protein, 15 aa, Artificial Sequence
  Description of Artificial Sequence: Synthetic peptide
  Seed: LRMKWMMAMKYPITA
LRMKLMMYMSYPKTA

SEQ ID NO: 235609 - protein, 15 aa, Artificial Sequence
  Description of Artificial Sequence: Synthetic peptide
  Seed: LRMKWMMAMKYPITA
LRMKLMMYMSYPLTA

SEQ ID NO: 235610 - protein, 15 aa, Artificial Sequence
  Description of Artificial Sequence: Synthetic peptide
  Seed: LRMKWMMAMKYPITA
LRMKLMMYMSYPMTA

SEQ ID NO: 235611 - protein, 15 aa, Artificial Sequence
  Description of Artificial Sequence: Synthetic peptide
  Seed: LRMKWMMAMKYPITA
LRMKLMMYMSYPRTA

SEQ ID NO: 235612 - protein, 15 aa, Artificial Sequence
  Description of Artificial Sequence: Synthetic peptide
  Seed: LRMKWMMAMKYPITA
LRMKLMMYMSYPSTA

SEQ ID NO: 235613 - protein, 15 aa, Artificial Sequence
  Description of Artificial Sequence: Synthetic peptide
  Seed: LRMKWMMAMKYPITA
LRMKLMMYMSYPTTA

SEQ ID NO: 235614 - protein, 15 aa, Artificial Sequence
  Description of Artificial Sequence: Synthetic peptide
  Seed: LRMKWMMAMKYPITA
LRMKLMMYMSYPVTA

SEQ ID NO: 235615 - protein, 15 aa, Artificial Sequence
  Description of Artificial Sequence: Synthetic peptide
  Seed: LRMKWMMAMKYPITA
LRMKLMMYMSYPYTA

SEQ ID NO: 235616 - protein, 15 aa, Artificial Sequence
  Description of Artificial Sequence: Synthetic peptide
  Seed: LRMKWMMAMKYPITA
LRMKLMMYMTYPATA

SEQ ID NO: 235617 - protein, 15 aa, Artificial Sequence
  Description of Artificial Sequence: Synthetic peptide
  Seed: LRMKWMMAMKYPITA
LRMKLMMYMTYPITA

SEQ ID NO: 235618 - protein, 15 aa, Artificial Sequence
  Description of Artificial Sequence: Synthetic peptide
  Seed: LRMKWMMAMKYPITA
LRMKLMMYMTYPLTA

SEQ ID NO: 235619 - protein, 15 aa, Artificial Sequence
  Description of Artificial Sequence: Synthetic peptide
  Seed: LRMKWMMAMKYPITA
LRMKLMMYMTYPMTA

SEQ ID NO: 235620 - protein, 15 aa, Artificial Sequence
  Description of Artificial Sequence: Synthetic peptide
  Seed: LRMKWMMAMKYPITA
LRMKLMMYMTYPRTA

SEQ ID NO: 235621 - protein, 15 aa, Artificial Sequence
  Description of Artificial Sequence: Synthetic peptide
  Seed: LRMKWMMAMKYPITA
LRMKLMMYMTYPSTA

SEQ ID NO: 235622 - protein, 15 aa, Artificial Sequence
  Description of Artificial Sequence: Synthetic peptide
  Seed: LRMKWMMAMKYPITA
LRMKLMMYMTYPVTA

SEQ ID NO: 235623 - protein, 15 aa, Artificial Sequence
  Description of Artificial Sequence: Synthetic peptide
  Seed: LRMKWMMAMKYPITA
LRMKLMMYMTYPYTA

SEQ ID NO: 235624 - protein, 15 aa, Artificial Sequence
  Description of Artificial Sequence: Synthetic peptide
  Seed: LRMKWMMAMKYPITA
LRMKLMMYMVYPRTA

SEQ ID NO: 235625 - protein, 15 aa, Artificial Sequence
  Description of Artificial Sequence: Synthetic peptide
  Seed: LRMKWMMAMKYPITA
LRMKLMMYMVYPSTA

SEQ ID NO: 235626 - protein, 15 aa, Artificial Sequence
  Description of Artificial Sequence: Synthetic peptide
  Seed: LRMKWMMAMKYPITA
LRMKMMMAMAYPATA

SEQ ID NO: 235627 - protein, 15 aa, Artificial Sequence
  Description of Artificial Sequence: Synthetic peptide
  Seed: LRMKWMMAMKYPITA
LRMKMMMAMAYPCTA

SEQ ID NO: 235628 - protein, 15 aa, Artificial Sequence
  Description of Artificial Sequence: Synthetic peptide
  Seed: LRMKWMMAMKYPITA
LRMKMMMAMAYPDTA

SEQ ID NO: 235629 - protein, 15 aa, Artificial Sequence
  Description of Artificial Sequence: Synthetic peptide
  Seed: LRMKWMMAMKYPITA
LRMKMMMAMAYPETA

SEQ ID NO: 235630 - protein, 15 aa, Artificial Sequence
  Description of Artificial Sequence: Synthetic peptide
  Seed: LRMKWMMAMKYPITA
LRMKMMMAMAYPFTA

SEQ ID NO: 235631 - protein, 15 aa, Artificial Sequence
  Description of Artificial Sequence: Synthetic peptide
  Seed: LRMKWMMAMKYPITA
LRMKMMMAMAYPGTA

SEQ ID NO: 235632 - protein, 15 aa, Artificial Sequence
  Description of Artificial Sequence: Synthetic peptide
  Seed: LRMKWMMAMKYPITA
LRMKMMMAMAYPHTA

SEQ ID NO: 235633 - protein, 15 aa, Artificial Sequence
  Description of Artificial Sequence: Synthetic peptide
  Seed: LRMKWMMAMKYPITA
LRMKMMMAMAYPITA

SEQ ID NO: 235634 - protein, 15 aa, Artificial Sequence
  Description of Artificial Sequence: Synthetic peptide
  Seed: LRMKWMMAMKYPITA
LRMKMMMAMAYPKTA

SEQ ID NO: 235635 - protein, 15 aa, Artificial Sequence
  Description of Artificial Sequence: Synthetic peptide
  Seed: LRMKWMMAMKYPITA
LRMKMMMAMAYPLTA

SEQ ID NO: 235636 - protein, 15 aa, Artificial Sequence
  Description of Artificial Sequence: Synthetic peptide
  Seed: LRMKWMMAMKYPITA
LRMKMMMAMAYPMTA

SEQ ID NO: 235637 - protein, 15 aa, Artificial Sequence
  Description of Artificial Sequence: Synthetic peptide
  Seed: LRMKWMMAMKYPITA
LRMKMMMAMAYPNTA

SEQ ID NO: 235638 - protein, 15 aa, Artificial Sequence
  Description of Artificial Sequence: Synthetic peptide
  Seed: LRMKWMMAMKYPITA
LRMKMMMAMAYPPTA

SEQ ID NO: 235639 - protein, 15 aa, Artificial Sequence
  Description of Artificial Sequence: Synthetic peptide
  Seed: LRMKWMMAMKYPITA
LRMKMMMAMAYPQTA

SEQ ID NO: 235640 - protein, 15 aa, Artificial Sequence
  Description of Artificial Sequence: Synthetic peptide
  Seed: LRMKWMMAMKYPITA
LRMKMMMAMAYPRTA

SEQ ID NO: 235641 - protein, 15 aa, Artificial Sequence
  Description of Artificial Sequence: Synthetic peptide
  Seed: LRMKWMMAMKYPITA
LRMKMMMAMAYPSTA

SEQ ID NO: 235642 - protein, 15 aa, Artificial Sequence
  Description of Artificial Sequence: Synthetic peptide
  Seed: LRMKWMMAMKYPITA
LRMKMMMAMAYPTTA

SEQ ID NO: 235643 - protein, 15 aa, Artificial Sequence
  Description of Artificial Sequence: Synthetic peptide
  Seed: LRMKWMMAMKYPITA
LRMKMMMAMAYPVTA

SEQ ID NO: 235644 - protein, 15 aa, Artificial Sequence
  Description of Artificial Sequence: Synthetic peptide
  Seed: LRMKWMMAMKYPITA
LRMKMMMAMAYPWTA

SEQ ID NO: 235645 - protein, 15 aa, Artificial Sequence
  Description of Artificial Sequence: Synthetic peptide
  Seed: LRMKWMMAMKYPITA
LRMKMMMAMAYPYTA

SEQ ID NO: 235646 - protein, 15 aa, Artificial Sequence
  Description of Artificial Sequence: Synthetic peptide
  Seed: LRMKWMMAMKYPITA
LRMKMMMAMCYPATA

SEQ ID NO: 235647 - protein, 15 aa, Artificial Sequence
  Description of Artificial Sequence: Synthetic peptide
  Seed: LRMKWMMAMKYPITA
LRMKMMMAMCYPFTA

SEQ ID NO: 235648 - protein, 15 aa, Artificial Sequence
  Description of Artificial Sequence: Synthetic peptide
  Seed: LRMKWMMAMKYPITA
LRMKMMMAMCYPGTA

SEQ ID NO: 235649 - protein, 15 aa, Artificial Sequence
  Description of Artificial Sequence: Synthetic peptide
  Seed: LRMKWMMAMKYPITA
LRMKMMMAMCYPHTA

SEQ ID NO: 235650 - protein, 15 aa, Artificial Sequence
  Description of Artificial Sequence: Synthetic peptide
  Seed: LRMKWMMAMKYPITA
LRMKMMMAMCYPITA

SEQ ID NO: 235651 - protein, 15 aa, Artificial Sequence
  Description of Artificial Sequence: Synthetic peptide
  Seed: LRMKWMMAMKYPITA
LRMKMMMAMCYPLTA

SEQ ID NO: 235652 - protein, 15 aa, Artificial Sequence
  Description of Artificial Sequence: Synthetic peptide
  Seed: LRMKWMMAMKYPITA
LRMKMMMAMCYPMTA

SEQ ID NO: 235653 - protein, 15 aa, Artificial Sequence
  Description of Artificial Sequence: Synthetic peptide
  Seed: LRMKWMMAMKYPITA
LRMKMMMAMCYPNTA

SEQ ID NO: 235654 - protein, 15 aa, Artificial Sequence
  Description of Artificial Sequence: Synthetic peptide
  Seed: LRMKWMMAMKYPITA
LRMKMMMAMCYPQTA

SEQ ID NO: 235655 - protein, 15 aa, Artificial Sequence
  Description of Artificial Sequence: Synthetic peptide
  Seed: LRMKWMMAMKYPITA
LRMKMMMAMCYPRTA

SEQ ID NO: 235656 - protein, 15 aa, Artificial Sequence
  Description of Artificial Sequence: Synthetic peptide
  Seed: LRMKWMMAMKYPITA
LRMKMMMAMCYPSTA

SEQ ID NO: 235657 - protein, 15 aa, Artificial Sequence
  Description of Artificial Sequence: Synthetic peptide
  Seed: LRMKWMMAMKYPITA
LRMKMMMAMCYPTTA

SEQ ID NO: 235658 - protein, 15 aa, Artificial Sequence
  Description of Artificial Sequence: Synthetic peptide
  Seed: LRMKWMMAMKYPITA
LRMKMMMAMCYPVTA

SEQ ID NO: 235659 - protein, 15 aa, Artificial Sequence
  Description of Artificial Sequence: Synthetic peptide
  Seed: LRMKWMMAMKYPITA
LRMKMMMAMCYPYTA

SEQ ID NO: 235660 - protein, 15 aa, Artificial Sequence
  Description of Artificial Sequence: Synthetic peptide
  Seed: LRMKWMMAMKYPITA
LRMKMMMAMDYPATA

SEQ ID NO: 235661 - protein, 15 aa, Artificial Sequence
  Description of Artificial Sequence: Synthetic peptide
  Seed: LRMKWMMAMKYPITA
LRMKMMMAMDYPITA

SEQ ID NO: 235662 - protein, 15 aa, Artificial Sequence
  Description of Artificial Sequence: Synthetic peptide
  Seed: LRMKWMMAMKYPITA
LRMKMMMAMDYPLTA

SEQ ID NO: 235663 - protein, 15 aa, Artificial Sequence
  Description of Artificial Sequence: Synthetic peptide
  Seed: LRMKWMMAMKYPITA
LRMKMMMAMDYPMTA

SEQ ID NO: 235664 - protein, 15 aa, Artificial Sequence
  Description of Artificial Sequence: Synthetic peptide
  Seed: LRMKWMMAMKYPITA
LRMKMMMAMDYPSTA

SEQ ID NO: 235665 - protein, 15 aa, Artificial Sequence
  Description of Artificial Sequence: Synthetic peptide
  Seed: LRMKWMMAMKYPITA
LRMKMMMAMDYPVTA

SEQ ID NO: 235666 - protein, 15 aa, Artificial Sequence
  Description of Artificial Sequence: Synthetic peptide
  Seed: LRMKWMMAMKYPITA
LRMKMMMAMEYPATA

SEQ ID NO: 235667 - protein, 15 aa, Artificial Sequence
  Description of Artificial Sequence: Synthetic peptide
  Seed: LRMKWMMAMKYPITA
LRMKMMMAMEYPITA

SEQ ID NO: 235668 - protein, 15 aa, Artificial Sequence
  Description of Artificial Sequence: Synthetic peptide
  Seed: LRMKWMMAMKYPITA
LRMKMMMAMEYPLTA

SEQ ID NO: 235669 - protein, 15 aa, Artificial Sequence
  Description of Artificial Sequence: Synthetic peptide
  Seed: LRMKWMMAMKYPITA
LRMKMMMAMEYPMTA

SEQ ID NO: 235670 - protein, 15 aa, Artificial Sequence
  Description of Artificial Sequence: Synthetic peptide
  Seed: LRMKWMMAMKYPITA
LRMKMMMAMEYPNTA

SEQ ID NO: 235671 - protein, 15 aa, Artificial Sequence
  Description of Artificial Sequence: Synthetic peptide
  Seed: LRMKWMMAMKYPITA
LRMKMMMAMEYPSTA

SEQ ID NO: 235672 - protein, 15 aa, Artificial Sequence
  Description of Artificial Sequence: Synthetic peptide
  Seed: LRMKWMMAMKYPITA
LRMKMMMAMEYPVTA

SEQ ID NO: 235673 - protein, 15 aa, Artificial Sequence
  Description of Artificial Sequence: Synthetic peptide
  Seed: LRMKWMMAMKYPITA
LRMKMMMAMFYPLTA

SEQ ID NO: 235674 - protein, 15 aa, Artificial Sequence
  Description of Artificial Sequence: Synthetic peptide
  Seed: LRMKWMMAMKYPITA
LRMKMMMAMFYPVTA

SEQ ID NO: 235675 - protein, 15 aa, Artificial Sequence
  Description of Artificial Sequence: Synthetic peptide
  Seed: LRMKWMMAMKYPITA
LRMKMMMAMGYPATA

SEQ ID NO: 235676 - protein, 15 aa, Artificial Sequence
  Description of Artificial Sequence: Synthetic peptide
  Seed: LRMKWMMAMKYPITA
LRMKMMMAMGYPCTA

SEQ ID NO: 235677 - protein, 15 aa, Artificial Sequence
  Description of Artificial Sequence: Synthetic peptide
  Seed: LRMKWMMAMKYPITA
LRMKMMMAMGYPDTA

SEQ ID NO: 235678 - protein, 15 aa, Artificial Sequence
  Description of Artificial Sequence: Synthetic peptide
  Seed: LRMKWMMAMKYPITA
LRMKMMMAMGYPETA

SEQ ID NO: 235679 - protein, 15 aa, Artificial Sequence
  Description of Artificial Sequence: Synthetic peptide
  Seed: LRMKWMMAMKYPITA
LRMKMMMAMGYPFTA

SEQ ID NO: 235680 - protein, 15 aa, Artificial Sequence
  Description of Artificial Sequence: Synthetic peptide
  Seed: LRMKWMMAMKYPITA
LRMKMMMAMGYPGTA

SEQ ID NO: 235681 - protein, 15 aa, Artificial Sequence
  Description of Artificial Sequence: Synthetic peptide
  Seed: LRMKWMMAMKYPITA
LRMKMMMAMGYPHTA

SEQ ID NO: 235682 - protein, 15 aa, Artificial Sequence
  Description of Artificial Sequence: Synthetic peptide
  Seed: LRMKWMMAMKYPITA
LRMKMMMAMGYPITA

SEQ ID NO: 235683 - protein, 15 aa, Artificial Sequence
  Description of Artificial Sequence: Synthetic peptide
  Seed: LRMKWMMAMKYPITA
LRMKMMMAMGYPLTA

SEQ ID NO: 235684 - protein, 15 aa, Artificial Sequence
  Description of Artificial Sequence: Synthetic peptide
  Seed: LRMKWMMAMKYPITA
LRMKMMMAMGYPMTA

SEQ ID NO: 235685 - protein, 15 aa, Artificial Sequence
  Description of Artificial Sequence: Synthetic peptide
  Seed: LRMKWMMAMKYPITA
LRMKMMMAMGYPNTA

SEQ ID NO: 235686 - protein, 15 aa, Artificial Sequence
  Description of Artificial Sequence: Synthetic peptide
  Seed: LRMKWMMAMKYPITA
LRMKMMMAMGYPQTA

SEQ ID NO: 235687 - protein, 15 aa, Artificial Sequence
  Description of Artificial Sequence: Synthetic peptide
  Seed: LRMKWMMAMKYPITA
LRMKMMMAMGYPRTA

SEQ ID NO: 235688 - protein, 15 aa, Artificial Sequence
  Description of Artificial Sequence: Synthetic peptide
  Seed: LRMKWMMAMKYPITA
LRMKMMMAMGYPSTA

SEQ ID NO: 235689 - protein, 15 aa, Artificial Sequence
  Description of Artificial Sequence: Synthetic peptide
  Seed: LRMKWMMAMKYPITA
LRMKMMMAMGYPTTA

SEQ ID NO: 235690 - protein, 15 aa, Artificial Sequence
  Description of Artificial Sequence: Synthetic peptide
  Seed: LRMKWMMAMKYPITA
LRMKMMMAMGYPVTA

SEQ ID NO: 235691 - protein, 15 aa, Artificial Sequence
  Description of Artificial Sequence: Synthetic peptide
  Seed: LRMKWMMAMKYPITA
LRMKMMMAMGYPYTA

SEQ ID NO: 235692 - protein, 15 aa, Artificial Sequence
  Description of Artificial Sequence: Synthetic peptide
  Seed: LRMKWMMAMKYPITA
LRMKMMMAMHYPATA

SEQ ID NO: 235693 - protein, 15 aa, Artificial Sequence
  Description of Artificial Sequence: Synthetic peptide
  Seed: LRMKWMMAMKYPITA
LRMKMMMAMHYPCTA

SEQ ID NO: 235694 - protein, 15 aa, Artificial Sequence
  Description of Artificial Sequence: Synthetic peptide
  Seed: LRMKWMMAMKYPITA
LRMKMMMAMHYPFTA

SEQ ID NO: 235695 - protein, 15 aa, Artificial Sequence
  Description of Artificial Sequence: Synthetic peptide
  Seed: LRMKWMMAMKYPITA
LRMKMMMAMHYPGTA

SEQ ID NO: 235696 - protein, 15 aa, Artificial Sequence
  Description of Artificial Sequence: Synthetic peptide
  Seed: LRMKWMMAMKYPITA
LRMKMMMAMHYPHTA

SEQ ID NO: 235697 - protein, 15 aa, Artificial Sequence
  Description of Artificial Sequence: Synthetic peptide
  Seed: LRMKWMMAMKYPITA
LRMKMMMAMHYPITA

SEQ ID NO: 235698 - protein, 15 aa, Artificial Sequence
  Description of Artificial Sequence: Synthetic peptide
  Seed: LRMKWMMAMKYPITA
LRMKMMMAMHYPKTA

SEQ ID NO: 235699 - protein, 15 aa, Artificial Sequence
  Description of Artificial Sequence: Synthetic peptide
  Seed: LRMKWMMAMKYPITA
LRMKMMMAMHYPLTA

SEQ ID NO: 235700 - protein, 15 aa, Artificial Sequence
  Description of Artificial Sequence: Synthetic peptide
  Seed: LRMKWMMAMKYPITA
LRMKMMMAMHYPMTA

SEQ ID NO: 235701 - protein, 15 aa, Artificial Sequence
  Description of Artificial Sequence: Synthetic peptide
  Seed: LRMKWMMAMKYPITA
LRMKMMMAMHYPQTA

SEQ ID NO: 235702 - protein, 15 aa, Artificial Sequence
  Description of Artificial Sequence: Synthetic peptide
  Seed: LRMKWMMAMKYPITA
LRMKMMMAMHYPRTA

SEQ ID NO: 235703 - protein, 15 aa, Artificial Sequence
  Description of Artificial Sequence: Synthetic peptide
  Seed: LRMKWMMAMKYPITA
LRMKMMMAMHYPSTA

SEQ ID NO: 235704 - protein, 15 aa, Artificial Sequence
  Description of Artificial Sequence: Synthetic peptide
  Seed: LRMKWMMAMKYPITA
LRMKMMMAMHYPTTA

SEQ ID NO: 235705 - protein, 15 aa, Artificial Sequence
  Description of Artificial Sequence: Synthetic peptide
  Seed: LRMKWMMAMKYPITA
LRMKMMMAMHYPVTA

SEQ ID NO: 235706 - protein, 15 aa, Artificial Sequence
  Description of Artificial Sequence: Synthetic peptide
  Seed: LRMKWMMAMKYPITA
LRMKMMMAMHYPYTA

SEQ ID NO: 235707 - protein, 15 aa, Artificial Sequence
  Description of Artificial Sequence: Synthetic peptide
  Seed: LRMKWMMAMKYPITA
LRMKMMMAMIYPATA

SEQ ID NO: 235708 - protein, 15 aa, Artificial Sequence
  Description of Artificial Sequence: Synthetic peptide
  Seed: LRMKWMMAMKYPITA
LRMKMMMAMIYPCTA

SEQ ID NO: 235709 - protein, 15 aa, Artificial Sequence
  Description of Artificial Sequence: Synthetic peptide
  Seed: LRMKWMMAMKYPITA
LRMKMMMAMIYPDTA

SEQ ID NO: 235710 - protein, 15 aa, Artificial Sequence
  Description of Artificial Sequence: Synthetic peptide
  Seed: LRMKWMMAMKYPITA
LRMKMMMAMIYPGTA

SEQ ID NO: 235711 - protein, 15 aa, Artificial Sequence
  Description of Artificial Sequence: Synthetic peptide
  Seed: LRMKWMMAMKYPITA
LRMKMMMAMIYPITA

SEQ ID NO: 235712 - protein, 15 aa, Artificial Sequence
  Description of Artificial Sequence: Synthetic peptide
  Seed: LRMKWMMAMKYPITA
LRMKMMMAMIYPKTA

SEQ ID NO: 235713 - protein, 15 aa, Artificial Sequence
  Description of Artificial Sequence: Synthetic peptide
  Seed: LRMKWMMAMKYPITA
LRMKMMMAMIYPLTA

SEQ ID NO: 235714 - protein, 15 aa, Artificial Sequence
  Description of Artificial Sequence: Synthetic peptide
  Seed: LRMKWMMAMKYPITA
LRMKMMMAMIYPMTA

SEQ ID NO: 235715 - protein, 15 aa, Artificial Sequence
  Description of Artificial Sequence: Synthetic peptide
  Seed: LRMKWMMAMKYPITA
LRMKMMMAMIYPNTA

SEQ ID NO: 235716 - protein, 15 aa, Artificial Sequence
  Description of Artificial Sequence: Synthetic peptide
  Seed: LRMKWMMAMKYPITA
LRMKMMMAMIYPRTA

SEQ ID NO: 235717 - protein, 15 aa, Artificial Sequence
  Description of Artificial Sequence: Synthetic peptide
  Seed: LRMKWMMAMKYPITA
LRMKMMMAMIYPSTA

SEQ ID NO: 235718 - protein, 15 aa, Artificial Sequence
  Description of Artificial Sequence: Synthetic peptide
  Seed: LRMKWMMAMKYPITA
LRMKMMMAMIYPTTA

SEQ ID NO: 235719 - protein, 15 aa, Artificial Sequence
  Description of Artificial Sequence: Synthetic peptide
  Seed: LRMKWMMAMKYPITA
LRMKMMMAMIYPVTA

SEQ ID NO: 235720 - protein, 15 aa, Artificial Sequence
  Description of Artificial Sequence: Synthetic peptide
  Seed: LRMKWMMAMKYPITA
LRMKMMMAMIYPYTA

SEQ ID NO: 235721 - protein, 15 aa, Artificial Sequence
  Description of Artificial Sequence: Synthetic peptide
  Seed: LRMKWMMAMKYPITA
LRMKMMMAMKYPATA

SEQ ID NO: 235722 - protein, 15 aa, Artificial Sequence
  Description of Artificial Sequence: Synthetic peptide
  Seed: LRMKWMMAMKYPITA
LRMKMMMAMKYPCTA

SEQ ID NO: 235723 - protein, 15 aa, Artificial Sequence
  Description of Artificial Sequence: Synthetic peptide
  Seed: LRMKWMMAMKYPITA
LRMKMMMAMKYPDTA

SEQ ID NO: 235724 - protein, 15 aa, Artificial Sequence
  Description of Artificial Sequence: Synthetic peptide
  Seed: LRMKWMMAMKYPITA
LRMKMMMAMKYPETA

SEQ ID NO: 235725 - protein, 15 aa, Artificial Sequence
  Description of Artificial Sequence: Synthetic peptide
  Seed: LRMKWMMAMKYPITA
LRMKMMMAMKYPFTA

SEQ ID NO: 235726 - protein, 15 aa, Artificial Sequence
  Description of Artificial Sequence: Synthetic peptide
  Seed: LRMKWMMAMKYPITA
LRMKMMMAMKYPGTA

SEQ ID NO: 235727 - protein, 15 aa, Artificial Sequence
  Description of Artificial Sequence: Synthetic peptide
  Seed: LRMKWMMAMKYPITA
LRMKMMMAMKYPHTA

SEQ ID NO: 235728 - protein, 15 aa, Artificial Sequence
  Description of Artificial Sequence: Synthetic peptide
  Seed: LRMKWMMAMKYPITA
LRMKMMMAMKYPITA

SEQ ID NO: 235729 - protein, 15 aa, Artificial Sequence
  Description of Artificial Sequence: Synthetic peptide
  Seed: LRMKWMMAMKYPITA
LRMKMMMAMKYPKTA

SEQ ID NO: 235730 - protein, 15 aa, Artificial Sequence
  Description of Artificial Sequence: Synthetic peptide
  Seed: LRMKWMMAMKYPITA
LRMKMMMAMKYPLTA

SEQ ID NO: 235731 - protein, 15 aa, Artificial Sequence
  Description of Artificial Sequence: Synthetic peptide
  Seed: LRMKWMMAMKYPITA
LRMKMMMAMKYPMTA

SEQ ID NO: 235732 - protein, 15 aa, Artificial Sequence
  Description of Artificial Sequence: Synthetic peptide
  Seed: LRMKWMMAMKYPITA
LRMKMMMAMKYPNTA

SEQ ID NO: 235733 - protein, 15 aa, Artificial Sequence
  Description of Artificial Sequence: Synthetic peptide
  Seed: LRMKWMMAMKYPITA
LRMKMMMAMKYPPTA

SEQ ID NO: 235734 - protein, 15 aa, Artificial Sequence
  Description of Artificial Sequence: Synthetic peptide
  Seed: LRMKWMMAMKYPITA
LRMKMMMAMKYPQTA

SEQ ID NO: 235735 - protein, 15 aa, Artificial Sequence
  Description of Artificial Sequence: Synthetic peptide
  Seed: LRMKWMMAMKYPITA
LRMKMMMAMKYPRTA

SEQ ID NO: 235736 - protein, 15 aa, Artificial Sequence
  Description of Artificial Sequence: Synthetic peptide
  Seed: LRMKWMMAMKYPITA
LRMKMMMAMKYPSTA

SEQ ID NO: 235737 - protein, 15 aa, Artificial Sequence
  Description of Artificial Sequence: Synthetic peptide
  Seed: LRMKWMMAMKYPITA
LRMKMMMAMKYPTTA

SEQ ID NO: 235738 - protein, 15 aa, Artificial Sequence
  Description of Artificial Sequence: Synthetic peptide
  Seed: LRMKWMMAMKYPITA
LRMKMMMAMKYPVTA

SEQ ID NO: 235739 - protein, 15 aa, Artificial Sequence
  Description of Artificial Sequence: Synthetic peptide
  Seed: LRMKWMMAMKYPITA
LRMKMMMAMKYPWTA

SEQ ID NO: 235740 - protein, 15 aa, Artificial Sequence
  Description of Artificial Sequence: Synthetic peptide
  Seed: LRMKWMMAMKYPITA
LRMKMMMAMKYPYTA

SEQ ID NO: 235741 - protein, 15 aa, Artificial Sequence
  Description of Artificial Sequence: Synthetic peptide
  Seed: LRMKWMMAMKYPITA
LRMKMMMAMLYPATA

SEQ ID NO: 235742 - protein, 15 aa, Artificial Sequence
  Description of Artificial Sequence: Synthetic peptide
  Seed: LRMKWMMAMKYPITA
LRMKMMMAMLYPCTA

SEQ ID NO: 235743 - protein, 15 aa, Artificial Sequence
  Description of Artificial Sequence: Synthetic peptide
  Seed: LRMKWMMAMKYPITA
LRMKMMMAMLYPGTA

SEQ ID NO: 235744 - protein, 15 aa, Artificial Sequence
  Description of Artificial Sequence: Synthetic peptide
  Seed: LRMKWMMAMKYPITA
LRMKMMMAMLYPRTA

SEQ ID NO: 235745 - protein, 15 aa, Artificial Sequence
  Description of Artificial Sequence: Synthetic peptide
  Seed: LRMKWMMAMKYPITA
LRMKMMMAMLYPSTA

SEQ ID NO: 235746 - protein, 15 aa, Artificial Sequence
  Description of Artificial Sequence: Synthetic peptide
  Seed: LRMKWMMAMKYPITA
LRMKMMMAMMYPATA

SEQ ID NO: 235747 - protein, 15 aa, Artificial Sequence
  Description of Artificial Sequence: Synthetic peptide
  Seed: LRMKWMMAMKYPITA
LRMKMMMAMMYPSTA

SEQ ID NO: 235748 - protein, 15 aa, Artificial Sequence
  Description of Artificial Sequence: Synthetic peptide
  Seed: LRMKWMMAMKYPITA
LRMKMMMAMNYPATA

SEQ ID NO: 235749 - protein, 15 aa, Artificial Sequence
  Description of Artificial Sequence: Synthetic peptide
  Seed: LRMKWMMAMKYPITA
LRMKMMMAMNYPCTA

SEQ ID NO: 235750 - protein, 15 aa, Artificial Sequence
  Description of Artificial Sequence: Synthetic peptide
  Seed: LRMKWMMAMKYPITA
LRMKMMMAMNYPDTA

SEQ ID NO: 235751 - protein, 15 aa, Artificial Sequence
  Description of Artificial Sequence: Synthetic peptide
  Seed: LRMKWMMAMKYPITA
LRMKMMMAMNYPETA

SEQ ID NO: 235752 - protein, 15 aa, Artificial Sequence
  Description of Artificial Sequence: Synthetic peptide
  Seed: LRMKWMMAMKYPITA
LRMKMMMAMNYPFTA

SEQ ID NO: 235753 - protein, 15 aa, Artificial Sequence
  Description of Artificial Sequence: Synthetic peptide
  Seed: LRMKWMMAMKYPITA
LRMKMMMAMNYPGTA

SEQ ID NO: 235754 - protein, 15 aa, Artificial Sequence
  Description of Artificial Sequence: Synthetic peptide
  Seed: LRMKWMMAMKYPITA
LRMKMMMAMNYPHTA

SEQ ID NO: 235755 - protein, 15 aa, Artificial Sequence
  Description of Artificial Sequence: Synthetic peptide
  Seed: LRMKWMMAMKYPITA
LRMKMMMAMNYPITA

SEQ ID NO: 235756 - protein, 15 aa, Artificial Sequence
  Description of Artificial Sequence: Synthetic peptide
  Seed: LRMKWMMAMKYPITA
LRMKMMMAMNYPKTA

SEQ ID NO: 235757 - protein, 15 aa, Artificial Sequence
  Description of Artificial Sequence: Synthetic peptide
  Seed: LRMKWMMAMKYPITA
LRMKMMMAMNYPLTA

SEQ ID NO: 235758 - protein, 15 aa, Artificial Sequence
  Description of Artificial Sequence: Synthetic peptide
  Seed: LRMKWMMAMKYPITA
LRMKMMMAMNYPMTA

SEQ ID NO: 235759 - protein, 15 aa, Artificial Sequence
  Description of Artificial Sequence: Synthetic peptide
  Seed: LRMKWMMAMKYPITA
LRMKMMMAMNYPNTA

SEQ ID NO: 235760 - protein, 15 aa, Artificial Sequence
  Description of Artificial Sequence: Synthetic peptide
  Seed: LRMKWMMAMKYPITA
LRMKMMMAMNYPQTA

SEQ ID NO: 235761 - protein, 15 aa, Artificial Sequence
  Description of Artificial Sequence: Synthetic peptide
  Seed: LRMKWMMAMKYPITA
LRMKMMMAMNYPRTA

SEQ ID NO: 235762 - protein, 15 aa, Artificial Sequence
  Description of Artificial Sequence: Synthetic peptide
  Seed: LRMKWMMAMKYPITA
LRMKMMMAMNYPSTA

SEQ ID NO: 235763 - protein, 15 aa, Artificial Sequence
  Description of Artificial Sequence: Synthetic peptide
  Seed: LRMKWMMAMKYPITA
LRMKMMMAMNYPTTA

SEQ ID NO: 235764 - protein, 15 aa, Artificial Sequence
  Description of Artificial Sequence: Synthetic peptide
  Seed: LRMKWMMAMKYPITA
LRMKMMMAMNYPVTA

SEQ ID NO: 235765 - protein, 15 aa, Artificial Sequence
  Description of Artificial Sequence: Synthetic peptide
  Seed: LRMKWMMAMKYPITA
LRMKMMMAMNYPYTA

SEQ ID NO: 235766 - protein, 15 aa, Artificial Sequence
  Description of Artificial Sequence: Synthetic peptide
  Seed: LRMKWMMAMKYPITA
LRMKMMMAMPYPATA

SEQ ID NO: 235767 - protein, 15 aa, Artificial Sequence
  Description of Artificial Sequence: Synthetic peptide
  Seed: LRMKWMMAMKYPITA
LRMKMMMAMPYPCTA

SEQ ID NO: 235768 - protein, 15 aa, Artificial Sequence
  Description of Artificial Sequence: Synthetic peptide
  Seed: LRMKWMMAMKYPITA
LRMKMMMAMPYPDTA

SEQ ID NO: 235769 - protein, 15 aa, Artificial Sequence
  Description of Artificial Sequence: Synthetic peptide
  Seed: LRMKWMMAMKYPITA
LRMKMMMAMPYPETA

SEQ ID NO: 235770 - protein, 15 aa, Artificial Sequence
  Description of Artificial Sequence: Synthetic peptide
  Seed: LRMKWMMAMKYPITA
LRMKMMMAMPYPFTA

SEQ ID NO: 235771 - protein, 15 aa, Artificial Sequence
  Description of Artificial Sequence: Synthetic peptide
  Seed: LRMKWMMAMKYPITA
LRMKMMMAMPYPGTA

SEQ ID NO: 235772 - protein, 15 aa, Artificial Sequence
  Description of Artificial Sequence: Synthetic peptide
  Seed: LRMKWMMAMKYPITA
LRMKMMMAMPYPHTA

SEQ ID NO: 235773 - protein, 15 aa, Artificial Sequence
  Description of Artificial Sequence: Synthetic peptide
  Seed: LRMKWMMAMKYPITA
LRMKMMMAMPYPITA

SEQ ID NO: 235774 - protein, 15 aa, Artificial Sequence
  Description of Artificial Sequence: Synthetic peptide
  Seed: LRMKWMMAMKYPITA
LRMKMMMAMPYPLTA

SEQ ID NO: 235775 - protein, 15 aa, Artificial Sequence
  Description of Artificial Sequence: Synthetic peptide
  Seed: LRMKWMMAMKYPITA
LRMKMMMAMPYPMTA

SEQ ID NO: 235776 - protein, 15 aa, Artificial Sequence
  Description of Artificial Sequence: Synthetic peptide
  Seed: LRMKWMMAMKYPITA
LRMKMMMAMPYPNTA

SEQ ID NO: 235777 - protein, 15 aa, Artificial Sequence
  Description of Artificial Sequence: Synthetic peptide
  Seed: LRMKWMMAMKYPITA
LRMKMMMAMPYPPTA

SEQ ID NO: 235778 - protein, 15 aa, Artificial Sequence
  Description of Artificial Sequence: Synthetic peptide
  Seed: LRMKWMMAMKYPITA
LRMKMMMAMPYPQTA

SEQ ID NO: 235779 - protein, 15 aa, Artificial Sequence
  Description of Artificial Sequence: Synthetic peptide
  Seed: LRMKWMMAMKYPITA
LRMKMMMAMPYPRTA

SEQ ID NO: 235780 - protein, 15 aa, Artificial Sequence
  Description of Artificial Sequence: Synthetic peptide
  Seed: LRMKWMMAMKYPITA
LRMKMMMAMPYPSTA

SEQ ID NO: 235781 - protein, 15 aa, Artificial Sequence
  Description of Artificial Sequence: Synthetic peptide
  Seed: LRMKWMMAMKYPITA
LRMKMMMAMPYPTTA

SEQ ID NO: 235782 - protein, 15 aa, Artificial Sequence
  Description of Artificial Sequence: Synthetic peptide
  Seed: LRMKWMMAMKYPITA
LRMKMMMAMPYPVTA

SEQ ID NO: 235783 - protein, 15 aa, Artificial Sequence
  Description of Artificial Sequence: Synthetic peptide
  Seed: LRMKWMMAMKYPITA
LRMKMMMAMPYPYTA

SEQ ID NO: 235784 - protein, 15 aa, Artificial Sequence
  Description of Artificial Sequence: Synthetic peptide
  Seed: LRMKWMMAMKYPITA
LRMKMMMAMQYPCTA

SEQ ID NO: 235785 - protein, 15 aa, Artificial Sequence
  Description of Artificial Sequence: Synthetic peptide
  Seed: LRMKWMMAMKYPITA
LRMKMMMAMQYPITA

SEQ ID NO: 235786 - protein, 15 aa, Artificial Sequence
  Description of Artificial Sequence: Synthetic peptide
  Seed: LRMKWMMAMKYPITA
LRMKMMMAMQYPLTA

SEQ ID NO: 235787 - protein, 15 aa, Artificial Sequence
  Description of Artificial Sequence: Synthetic peptide
  Seed: LRMKWMMAMKYPITA
LRMKMMMAMQYPRTA

SEQ ID NO: 235788 - protein, 15 aa, Artificial Sequence
  Description of Artificial Sequence: Synthetic peptide
  Seed: LRMKWMMAMKYPITA
LRMKMMMAMQYPVTA

SEQ ID NO: 235789 - protein, 15 aa, Artificial Sequence
  Description of Artificial Sequence: Synthetic peptide
  Seed: LRMKWMMAMKYPITA
LRMKMMMAMQYPYTA

SEQ ID NO: 235790 - protein, 15 aa, Artificial Sequence
  Description of Artificial Sequence: Synthetic peptide
  Seed: LRMKWMMAMKYPITA
LRMKMMMAMRYPATA

SEQ ID NO: 235791 - protein, 15 aa, Artificial Sequence
  Description of Artificial Sequence: Synthetic peptide
  Seed: LRMKWMMAMKYPITA
LRMKMMMAMRYPCTA

SEQ ID NO: 235792 - protein, 15 aa, Artificial Sequence
  Description of Artificial Sequence: Synthetic peptide
  Seed: LRMKWMMAMKYPITA
LRMKMMMAMRYPDTA

SEQ ID NO: 235793 - protein, 15 aa, Artificial Sequence
  Description of Artificial Sequence: Synthetic peptide
  Seed: LRMKWMMAMKYPITA
LRMKMMMAMRYPETA

SEQ ID NO: 235794 - protein, 15 aa, Artificial Sequence
  Description of Artificial Sequence: Synthetic peptide
  Seed: LRMKWMMAMKYPITA
LRMKMMMAMRYPFTA

SEQ ID NO: 235795 - protein, 15 aa, Artificial Sequence
  Description of Artificial Sequence: Synthetic peptide
  Seed: LRMKWMMAMKYPITA
LRMKMMMAMRYPGTA

SEQ ID NO: 235796 - protein, 15 aa, Artificial Sequence
  Description of Artificial Sequence: Synthetic peptide
  Seed: LRMKWMMAMKYPITA
LRMKMMMAMRYPHTA

SEQ ID NO: 235797 - protein, 15 aa, Artificial Sequence
  Description of Artificial Sequence: Synthetic peptide
  Seed: LRMKWMMAMKYPITA
LRMKMMMAMRYPITA

SEQ ID NO: 235798 - protein, 15 aa, Artificial Sequence
  Description of Artificial Sequence: Synthetic peptide
  Seed: LRMKWMMAMKYPITA
LRMKMMMAMRYPKTA

SEQ ID NO: 235799 - protein, 15 aa, Artificial Sequence
  Description of Artificial Sequence: Synthetic peptide
  Seed: LRMKWMMAMKYPITA
LRMKMMMAMRYPLTA

SEQ ID NO: 235800 - protein, 15 aa, Artificial Sequence
  Description of Artificial Sequence: Synthetic peptide
  Seed: LRMKWMMAMKYPITA
LRMKMMMAMRYPMTA

SEQ ID NO: 235801 - protein, 15 aa, Artificial Sequence
  Description of Artificial Sequence: Synthetic peptide
  Seed: LRMKWMMAMKYPITA
LRMKMMMAMRYPNTA

SEQ ID NO: 235802 - protein, 15 aa, Artificial Sequence
  Description of Artificial Sequence: Synthetic peptide
  Seed: LRMKWMMAMKYPITA
LRMKMMMAMRYPPTA

SEQ ID NO: 235803 - protein, 15 aa, Artificial Sequence
  Description of Artificial Sequence: Synthetic peptide
  Seed: LRMKWMMAMKYPITA
LRMKMMMAMRYPQTA

SEQ ID NO: 235804 - protein, 15 aa, Artificial Sequence
  Description of Artificial Sequence: Synthetic peptide
  Seed: LRMKWMMAMKYPITA
LRMKMMMAMRYPRTA

SEQ ID NO: 235805 - protein, 15 aa, Artificial Sequence
  Description of Artificial Sequence: Synthetic peptide
  Seed: LRMKWMMAMKYPITA
LRMKMMMAMRYPSTA

SEQ ID NO: 235806 - protein, 15 aa, Artificial Sequence
  Description of Artificial Sequence: Synthetic peptide
  Seed: LRMKWMMAMKYPITA
LRMKMMMAMRYPTTA

SEQ ID NO: 235807 - protein, 15 aa, Artificial Sequence
  Description of Artificial Sequence: Synthetic peptide
  Seed: LRMKWMMAMKYPITA
LRMKMMMAMRYPVTA

SEQ ID NO: 235808 - protein, 15 aa, Artificial Sequence
  Description of Artificial Sequence: Synthetic peptide
  Seed: LRMKWMMAMKYPITA
LRMKMMMAMRYPWTA

SEQ ID NO: 235809 - protein, 15 aa, Artificial Sequence
  Description of Artificial Sequence: Synthetic peptide
  Seed: LRMKWMMAMKYPITA
LRMKMMMAMRYPYTA

SEQ ID NO: 235810 - protein, 15 aa, Artificial Sequence
  Description of Artificial Sequence: Synthetic peptide
  Seed: LRMKWMMAMKYPITA
LRMKMMMAMSYPATA

SEQ ID NO: 235811 - protein, 15 aa, Artificial Sequence
  Description of Artificial Sequence: Synthetic peptide
  Seed: LRMKWMMAMKYPITA
LRMKMMMAMSYPCTA

SEQ ID NO: 235812 - protein, 15 aa, Artificial Sequence
  Description of Artificial Sequence: Synthetic peptide
  Seed: LRMKWMMAMKYPITA
LRMKMMMAMSYPDTA

SEQ ID NO: 235813 - protein, 15 aa, Artificial Sequence
  Description of Artificial Sequence: Synthetic peptide
  Seed: LRMKWMMAMKYPITA
LRMKMMMAMSYPETA

SEQ ID NO: 235814 - protein, 15 aa, Artificial Sequence
  Description of Artificial Sequence: Synthetic peptide
  Seed: LRMKWMMAMKYPITA
LRMKMMMAMSYPFTA

SEQ ID NO: 235815 - protein, 15 aa, Artificial Sequence
  Description of Artificial Sequence: Synthetic peptide
  Seed: LRMKWMMAMKYPITA
LRMKMMMAMSYPGTA

SEQ ID NO: 235816 - protein, 15 aa, Artificial Sequence
  Description of Artificial Sequence: Synthetic peptide
  Seed: LRMKWMMAMKYPITA
LRMKMMMAMSYPHTA

SEQ ID NO: 235817 - protein, 15 aa, Artificial Sequence
  Description of Artificial Sequence: Synthetic peptide
  Seed: LRMKWMMAMKYPITA
LRMKMMMAMSYPITA

SEQ ID NO: 235818 - protein, 15 aa, Artificial Sequence
  Description of Artificial Sequence: Synthetic peptide
  Seed: LRMKWMMAMKYPITA
LRMKMMMAMSYPKTA

SEQ ID NO: 235819 - protein, 15 aa, Artificial Sequence
  Description of Artificial Sequence: Synthetic peptide
  Seed: LRMKWMMAMKYPITA
LRMKMMMAMSYPLTA

SEQ ID NO: 235820 - protein, 15 aa, Artificial Sequence
  Description of Artificial Sequence: Synthetic peptide
  Seed: LRMKWMMAMKYPITA
LRMKMMMAMSYPMTA

SEQ ID NO: 235821 - protein, 15 aa, Artificial Sequence
  Description of Artificial Sequence: Synthetic peptide
  Seed: LRMKWMMAMKYPITA
LRMKMMMAMSYPNTA

SEQ ID NO: 235822 - protein, 15 aa, Artificial Sequence
  Description of Artificial Sequence: Synthetic peptide
  Seed: LRMKWMMAMKYPITA
LRMKMMMAMSYPPTA

SEQ ID NO: 235823 - protein, 15 aa, Artificial Sequence
  Description of Artificial Sequence: Synthetic peptide
  Seed: LRMKWMMAMKYPITA
LRMKMMMAMSYPQTA

SEQ ID NO: 235824 - protein, 15 aa, Artificial Sequence
  Description of Artificial Sequence: Synthetic peptide
  Seed: LRMKWMMAMKYPITA
LRMKMMMAMSYPRTA

SEQ ID NO: 235825 - protein, 15 aa, Artificial Sequence
  Description of Artificial Sequence: Synthetic peptide
  Seed: LRMKWMMAMKYPITA
LRMKMMMAMSYPSTA

SEQ ID NO: 235826 - protein, 15 aa, Artificial Sequence
  Description of Artificial Sequence: Synthetic peptide
  Seed: LRMKWMMAMKYPITA
LRMKMMMAMSYPTTA

SEQ ID NO: 235827 - protein, 15 aa, Artificial Sequence
  Description of Artificial Sequence: Synthetic peptide
  Seed: LRMKWMMAMKYPITA
LRMKMMMAMSYPVTA

SEQ ID NO: 235828 - protein, 15 aa, Artificial Sequence
  Description of Artificial Sequence: Synthetic peptide
  Seed: LRMKWMMAMKYPITA
LRMKMMMAMSYPYTA

SEQ ID NO: 235829 - protein, 15 aa, Artificial Sequence
  Description of Artificial Sequence: Synthetic peptide
  Seed: LRMKWMMAMKYPITA
LRMKMMMAMTYPATA

SEQ ID NO: 235830 - protein, 15 aa, Artificial Sequence
  Description of Artificial Sequence: Synthetic peptide
  Seed: LRMKWMMAMKYPITA
LRMKMMMAMTYPCTA

SEQ ID NO: 235831 - protein, 15 aa, Artificial Sequence
  Description of Artificial Sequence: Synthetic peptide
  Seed: LRMKWMMAMKYPITA
LRMKMMMAMTYPDTA

SEQ ID NO: 235832 - protein, 15 aa, Artificial Sequence
  Description of Artificial Sequence: Synthetic peptide
  Seed: LRMKWMMAMKYPITA
LRMKMMMAMTYPETA

SEQ ID NO: 235833 - protein, 15 aa, Artificial Sequence
  Description of Artificial Sequence: Synthetic peptide
  Seed: LRMKWMMAMKYPITA
LRMKMMMAMTYPFTA

SEQ ID NO: 235834 - protein, 15 aa, Artificial Sequence
  Description of Artificial Sequence: Synthetic peptide
  Seed: LRMKWMMAMKYPITA
LRMKMMMAMTYPGTA

SEQ ID NO: 235835 - protein, 15 aa, Artificial Sequence
  Description of Artificial Sequence: Synthetic peptide
  Seed: LRMKWMMAMKYPITA
LRMKMMMAMTYPHTA

SEQ ID NO: 235836 - protein, 15 aa, Artificial Sequence
  Description of Artificial Sequence: Synthetic peptide
  Seed: LRMKWMMAMKYPITA
LRMKMMMAMTYPITA

SEQ ID NO: 235837 - protein, 15 aa, Artificial Sequence
  Description of Artificial Sequence: Synthetic peptide
  Seed: LRMKWMMAMKYPITA
LRMKMMMAMTYPKTA

SEQ ID NO: 235838 - protein, 15 aa, Artificial Sequence
  Description of Artificial Sequence: Synthetic peptide
  Seed: LRMKWMMAMKYPITA
LRMKMMMAMTYPLTA

SEQ ID NO: 235839 - protein, 15 aa, Artificial Sequence
  Description of Artificial Sequence: Synthetic peptide
  Seed: LRMKWMMAMKYPITA
LRMKMMMAMTYPMTA

SEQ ID NO: 235840 - protein, 15 aa, Artificial Sequence
  Description of Artificial Sequence: Synthetic peptide
  Seed: LRMKWMMAMKYPITA
LRMKMMMAMTYPNTA

SEQ ID NO: 235841 - protein, 15 aa, Artificial Sequence
  Description of Artificial Sequence: Synthetic peptide
  Seed: LRMKWMMAMKYPITA
LRMKMMMAMTYPPTA

SEQ ID NO: 235842 - protein, 15 aa, Artificial Sequence
  Description of Artificial Sequence: Synthetic peptide
  Seed: LRMKWMMAMKYPITA
LRMKMMMAMTYPQTA

SEQ ID NO: 235843 - protein, 15 aa, Artificial Sequence
  Description of Artificial Sequence: Synthetic peptide
  Seed: LRMKWMMAMKYPITA
LRMKMMMAMTYPRTA

SEQ ID NO: 235844 - protein, 15 aa, Artificial Sequence
  Description of Artificial Sequence: Synthetic peptide
  Seed: LRMKWMMAMKYPITA
LRMKMMMAMTYPSTA

SEQ ID NO: 235845 - protein, 15 aa, Artificial Sequence
  Description of Artificial Sequence: Synthetic peptide
  Seed: LRMKWMMAMKYPITA
LRMKMMMAMTYPTTA

SEQ ID NO: 235846 - protein, 15 aa, Artificial Sequence
  Description of Artificial Sequence: Synthetic peptide
  Seed: LRMKWMMAMKYPITA
LRMKMMMAMTYPVTA

SEQ ID NO: 235847 - protein, 15 aa, Artificial Sequence
  Description of Artificial Sequence: Synthetic peptide
  Seed: LRMKWMMAMKYPITA
LRMKMMMAMTYPYTA

SEQ ID NO: 235848 - protein, 15 aa, Artificial Sequence
  Description of Artificial Sequence: Synthetic peptide
  Seed: LRMKWMMAMKYPITA
LRMKMMMAMVYPATA

SEQ ID NO: 235849 - protein, 15 aa, Artificial Sequence
  Description of Artificial Sequence: Synthetic peptide
  Seed: LRMKWMMAMKYPITA
LRMKMMMAMVYPCTA

SEQ ID NO: 235850 - protein, 15 aa, Artificial Sequence
  Description of Artificial Sequence: Synthetic peptide
  Seed: LRMKWMMAMKYPITA
LRMKMMMAMVYPDTA

SEQ ID NO: 235851 - protein, 15 aa, Artificial Sequence
  Description of Artificial Sequence: Synthetic peptide
  Seed: LRMKWMMAMKYPITA
LRMKMMMAMVYPETA

SEQ ID NO: 235852 - protein, 15 aa, Artificial Sequence
  Description of Artificial Sequence: Synthetic peptide
  Seed: LRMKWMMAMKYPITA
LRMKMMMAMVYPGTA

SEQ ID NO: 235853 - protein, 15 aa, Artificial Sequence
  Description of Artificial Sequence: Synthetic peptide
  Seed: LRMKWMMAMKYPITA
LRMKMMMAMVYPHTA

SEQ ID NO: 235854 - protein, 15 aa, Artificial Sequence
  Description of Artificial Sequence: Synthetic peptide
  Seed: LRMKWMMAMKYPITA
LRMKMMMAMVYPITA

SEQ ID NO: 235855 - protein, 15 aa, Artificial Sequence
  Description of Artificial Sequence: Synthetic peptide
  Seed: LRMKWMMAMKYPITA
LRMKMMMAMVYPKTA

SEQ ID NO: 235856 - protein, 15 aa, Artificial Sequence
  Description of Artificial Sequence: Synthetic peptide
  Seed: LRMKWMMAMKYPITA
LRMKMMMAMVYPLTA

SEQ ID NO: 235857 - protein, 15 aa, Artificial Sequence
  Description of Artificial Sequence: Synthetic peptide
  Seed: LRMKWMMAMKYPITA
LRMKMMMAMVYPMTA

SEQ ID NO: 235858 - protein, 15 aa, Artificial Sequence
  Description of Artificial Sequence: Synthetic peptide
  Seed: LRMKWMMAMKYPITA
LRMKMMMAMVYPNTA

SEQ ID NO: 235859 - protein, 15 aa, Artificial Sequence
  Description of Artificial Sequence: Synthetic peptide
  Seed: LRMKWMMAMKYPITA
LRMKMMMAMVYPPTA

SEQ ID NO: 235860 - protein, 15 aa, Artificial Sequence
  Description of Artificial Sequence: Synthetic peptide
  Seed: LRMKWMMAMKYPITA
LRMKMMMAMVYPQTA

SEQ ID NO: 235861 - protein, 15 aa, Artificial Sequence
  Description of Artificial Sequence: Synthetic peptide
  Seed: LRMKWMMAMKYPITA
LRMKMMMAMVYPRTA

SEQ ID NO: 235862 - protein, 15 aa, Artificial Sequence
  Description of Artificial Sequence: Synthetic peptide
  Seed: LRMKWMMAMKYPITA
LRMKMMMAMVYPSTA

SEQ ID NO: 235863 - protein, 15 aa, Artificial Sequence
  Description of Artificial Sequence: Synthetic peptide
  Seed: LRMKWMMAMKYPITA
LRMKMMMAMVYPTTA

SEQ ID NO: 235864 - protein, 15 aa, Artificial Sequence
  Description of Artificial Sequence: Synthetic peptide
  Seed: LRMKWMMAMKYPITA
LRMKMMMAMVYPVTA

SEQ ID NO: 235865 - protein, 15 aa, Artificial Sequence
  Description of Artificial Sequence: Synthetic peptide
  Seed: LRMKWMMAMKYPITA
LRMKMMMAMVYPYTA

SEQ ID NO: 235866 - protein, 15 aa, Artificial Sequence
  Description of Artificial Sequence: Synthetic peptide
  Seed: LRMKWMMAMKYPITA
LRMKMMMAMWYPATA

SEQ ID NO: 235867 - protein, 15 aa, Artificial Sequence
  Description of Artificial Sequence: Synthetic peptide
  Seed: LRMKWMMAMKYPITA
LRMKMMMAMWYPITA

SEQ ID NO: 235868 - protein, 15 aa, Artificial Sequence
  Description of Artificial Sequence: Synthetic peptide
  Seed: LRMKWMMAMKYPITA
LRMKMMMAMWYPLTA

SEQ ID NO: 235869 - protein, 15 aa, Artificial Sequence
  Description of Artificial Sequence: Synthetic peptide
  Seed: LRMKWMMAMKYPITA
LRMKMMMAMWYPVTA

SEQ ID NO: 235870 - protein, 15 aa, Artificial Sequence
  Description of Artificial Sequence: Synthetic peptide
  Seed: LRMKWMMAMKYPITA
LRMKMMMAMYYPATA

SEQ ID NO: 235871 - protein, 15 aa, Artificial Sequence
  Description of Artificial Sequence: Synthetic peptide
  Seed: LRMKWMMAMKYPITA
LRMKMMMCMAYPATA

SEQ ID NO: 235872 - protein, 15 aa, Artificial Sequence
  Description of Artificial Sequence: Synthetic peptide
  Seed: LRMKWMMAMKYPITA
LRMKMMMCMAYPGTA

SEQ ID NO: 235873 - protein, 15 aa, Artificial Sequence
  Description of Artificial Sequence: Synthetic peptide
  Seed: LRMKWMMAMKYPITA
LRMKMMMCMAYPITA

SEQ ID NO: 235874 - protein, 15 aa, Artificial Sequence
  Description of Artificial Sequence: Synthetic peptide
  Seed: LRMKWMMAMKYPITA
LRMKMMMCMAYPLTA

SEQ ID NO: 235875 - protein, 15 aa, Artificial Sequence
  Description of Artificial Sequence: Synthetic peptide
  Seed: LRMKWMMAMKYPITA
LRMKMMMCMAYPMTA

SEQ ID NO: 235876 - protein, 15 aa, Artificial Sequence
  Description of Artificial Sequence: Synthetic peptide
  Seed: LRMKWMMAMKYPITA
LRMKMMMCMAYPNTA

SEQ ID NO: 235877 - protein, 15 aa, Artificial Sequence
  Description of Artificial Sequence: Synthetic peptide
  Seed: LRMKWMMAMKYPITA
LRMKMMMCMAYPSTA

SEQ ID NO: 235878 - protein, 15 aa, Artificial Sequence
  Description of Artificial Sequence: Synthetic peptide
  Seed: LRMKWMMAMKYPITA
LRMKMMMCMAYPTTA

SEQ ID NO: 235879 - protein, 15 aa, Artificial Sequence
  Description of Artificial Sequence: Synthetic peptide
  Seed: LRMKWMMAMKYPITA
LRMKMMMCMAYPVTA

SEQ ID NO: 235880 - protein, 15 aa, Artificial Sequence
  Description of Artificial Sequence: Synthetic peptide
  Seed: LRMKWMMAMKYPITA
LRMKMMMCMGYPATA

SEQ ID NO: 235881 - protein, 15 aa, Artificial Sequence
  Description of Artificial Sequence: Synthetic peptide
  Seed: LRMKWMMAMKYPITA
LRMKMMMCMGYPITA

SEQ ID NO: 235882 - protein, 15 aa, Artificial Sequence
  Description of Artificial Sequence: Synthetic peptide
  Seed: LRMKWMMAMKYPITA
LRMKMMMCMGYPLTA

SEQ ID NO: 235883 - protein, 15 aa, Artificial Sequence
  Description of Artificial Sequence: Synthetic peptide
  Seed: LRMKWMMAMKYPITA
LRMKMMMCMGYPMTA

SEQ ID NO: 235884 - protein, 15 aa, Artificial Sequence
  Description of Artificial Sequence: Synthetic peptide
  Seed: LRMKWMMAMKYPITA
LRMKMMMCMGYPVTA

SEQ ID NO: 235885 - protein, 15 aa, Artificial Sequence
  Description of Artificial Sequence: Synthetic peptide
  Seed: LRMKWMMAMKYPITA
LRMKMMMCMIYPATA

SEQ ID NO: 235886 - protein, 15 aa, Artificial Sequence
  Description of Artificial Sequence: Synthetic peptide
  Seed: LRMKWMMAMKYPITA
LRMKMMMCMKYPATA

SEQ ID NO: 235887 - protein, 15 aa, Artificial Sequence
  Description of Artificial Sequence: Synthetic peptide
  Seed: LRMKWMMAMKYPITA
LRMKMMMCMKYPGTA

SEQ ID NO: 235888 - protein, 15 aa, Artificial Sequence
  Description of Artificial Sequence: Synthetic peptide
  Seed: LRMKWMMAMKYPITA
LRMKMMMCMKYPHTA

SEQ ID NO: 235889 - protein, 15 aa, Artificial Sequence
  Description of Artificial Sequence: Synthetic peptide
  Seed: LRMKWMMAMKYPITA
LRMKMMMCMKYPKTA

SEQ ID NO: 235890 - protein, 15 aa, Artificial Sequence
  Description of Artificial Sequence: Synthetic peptide
  Seed: LRMKWMMAMKYPITA
LRMKMMMCMKYPQTA

SEQ ID NO: 235891 - protein, 15 aa, Artificial Sequence
  Description of Artificial Sequence: Synthetic peptide
  Seed: LRMKWMMAMKYPITA
LRMKMMMCMKYPRTA

SEQ ID NO: 235892 - protein, 15 aa, Artificial Sequence
  Description of Artificial Sequence: Synthetic peptide
  Seed: LRMKWMMAMKYPITA
LRMKMMMCMKYPSTA

SEQ ID NO: 235893 - protein, 15 aa, Artificial Sequence
  Description of Artificial Sequence: Synthetic peptide
  Seed: LRMKWMMAMKYPITA
LRMKMMMCMKYPTTA

SEQ ID NO: 235894 - protein, 15 aa, Artificial Sequence
  Description of Artificial Sequence: Synthetic peptide
  Seed: LRMKWMMAMKYPITA
LRMKMMMCMKYPVTA

SEQ ID NO: 235895 - protein, 15 aa, Artificial Sequence
  Description of Artificial Sequence: Synthetic peptide
  Seed: LRMKWMMAMKYPITA
LRMKMMMCMKYPYTA

SEQ ID NO: 235896 - protein, 15 aa, Artificial Sequence
  Description of Artificial Sequence: Synthetic peptide
  Seed: LRMKWMMAMKYPITA
LRMKMMMCMPYPATA

SEQ ID NO: 235897 - protein, 15 aa, Artificial Sequence
  Description of Artificial Sequence: Synthetic peptide
  Seed: LRMKWMMAMKYPITA
LRMKMMMCMPYPITA

SEQ ID NO: 235898 - protein, 15 aa, Artificial Sequence
  Description of Artificial Sequence: Synthetic peptide
  Seed: LRMKWMMAMKYPITA
LRMKMMMCMPYPLTA

SEQ ID NO: 235899 - protein, 15 aa, Artificial Sequence
  Description of Artificial Sequence: Synthetic peptide
  Seed: LRMKWMMAMKYPITA
LRMKMMMCMPYPMTA

SEQ ID NO: 235900 - protein, 15 aa, Artificial Sequence
  Description of Artificial Sequence: Synthetic peptide
  Seed: LRMKWMMAMKYPITA
LRMKMMMCMPYPVTA

SEQ ID NO: 235901 - protein, 15 aa, Artificial Sequence
  Description of Artificial Sequence: Synthetic peptide
  Seed: LRMKWMMAMKYPITA
LRMKMMMCMRYPATA

SEQ ID NO: 235902 - protein, 15 aa, Artificial Sequence
  Description of Artificial Sequence: Synthetic peptide
  Seed: LRMKWMMAMKYPITA
LRMKMMMCMRYPFTA

SEQ ID NO: 235903 - protein, 15 aa, Artificial Sequence
  Description of Artificial Sequence: Synthetic peptide
  Seed: LRMKWMMAMKYPITA
LRMKMMMCMRYPGTA

SEQ ID NO: 235904 - protein, 15 aa, Artificial Sequence
  Description of Artificial Sequence: Synthetic peptide
  Seed: LRMKWMMAMKYPITA
LRMKMMMCMRYPHTA

SEQ ID NO: 235905 - protein, 15 aa, Artificial Sequence
  Description of Artificial Sequence: Synthetic peptide
  Seed: LRMKWMMAMKYPITA
LRMKMMMCMRYPITA

SEQ ID NO: 235906 - protein, 15 aa, Artificial Sequence
  Description of Artificial Sequence: Synthetic peptide
  Seed: LRMKWMMAMKYPITA
LRMKMMMCMRYPKTA

SEQ ID NO: 235907 - protein, 15 aa, Artificial Sequence
  Description of Artificial Sequence: Synthetic peptide
  Seed: LRMKWMMAMKYPITA
LRMKMMMCMRYPLTA

SEQ ID NO: 235908 - protein, 15 aa, Artificial Sequence
  Description of Artificial Sequence: Synthetic peptide
  Seed: LRMKWMMAMKYPITA
LRMKMMMCMRYPMTA

SEQ ID NO: 235909 - protein, 15 aa, Artificial Sequence
  Description of Artificial Sequence: Synthetic peptide
  Seed: LRMKWMMAMKYPITA
LRMKMMMCMRYPNTA

SEQ ID NO: 235910 - protein, 15 aa, Artificial Sequence
  Description of Artificial Sequence: Synthetic peptide
  Seed: LRMKWMMAMKYPITA
LRMKMMMCMRYPQTA

SEQ ID NO: 235911 - protein, 15 aa, Artificial Sequence
  Description of Artificial Sequence: Synthetic peptide
  Seed: LRMKWMMAMKYPITA
LRMKMMMCMRYPRTA

SEQ ID NO: 235912 - protein, 15 aa, Artificial Sequence
  Description of Artificial Sequence: Synthetic peptide
  Seed: LRMKWMMAMKYPITA
LRMKMMMCMRYPSTA

SEQ ID NO: 235913 - protein, 15 aa, Artificial Sequence
  Description of Artificial Sequence: Synthetic peptide
  Seed: LRMKWMMAMKYPITA
LRMKMMMCMRYPTTA

SEQ ID NO: 235914 - protein, 15 aa, Artificial Sequence
  Description of Artificial Sequence: Synthetic peptide
  Seed: LRMKWMMAMKYPITA
LRMKMMMCMRYPVTA

SEQ ID NO: 235915 - protein, 15 aa, Artificial Sequence
  Description of Artificial Sequence: Synthetic peptide
  Seed: LRMKWMMAMKYPITA
LRMKMMMCMRYPYTA

SEQ ID NO: 235916 - protein, 15 aa, Artificial Sequence
  Description of Artificial Sequence: Synthetic peptide
  Seed: LRMKWMMAMKYPITA
LRMKMMMCMSYPATA

SEQ ID NO: 235917 - protein, 15 aa, Artificial Sequence
  Description of Artificial Sequence: Synthetic peptide
  Seed: LRMKWMMAMKYPITA
LRMKMMMCMSYPITA

SEQ ID NO: 235918 - protein, 15 aa, Artificial Sequence
  Description of Artificial Sequence: Synthetic peptide
  Seed: LRMKWMMAMKYPITA
LRMKMMMCMSYPLTA

SEQ ID NO: 235919 - protein, 15 aa, Artificial Sequence
  Description of Artificial Sequence: Synthetic peptide
  Seed: LRMKWMMAMKYPITA
LRMKMMMCMSYPMTA

SEQ ID NO: 235920 - protein, 15 aa, Artificial Sequence
  Description of Artificial Sequence: Synthetic peptide
  Seed: LRMKWMMAMKYPITA
LRMKMMMCMSYPTTA

SEQ ID NO: 235921 - protein, 15 aa, Artificial Sequence
  Description of Artificial Sequence: Synthetic peptide
  Seed: LRMKWMMAMKYPITA
LRMKMMMCMSYPVTA

SEQ ID NO: 235922 - protein, 15 aa, Artificial Sequence
  Description of Artificial Sequence: Synthetic peptide
  Seed: LRMKWMMAMKYPITA
LRMKMMMCMTYPATA

SEQ ID NO: 235923 - protein, 15 aa, Artificial Sequence
  Description of Artificial Sequence: Synthetic peptide
  Seed: LRMKWMMAMKYPITA
LRMKMMMCMTYPITA

SEQ ID NO: 235924 - protein, 15 aa, Artificial Sequence
  Description of Artificial Sequence: Synthetic peptide
  Seed: LRMKWMMAMKYPITA
LRMKMMMCMTYPLTA

SEQ ID NO: 235925 - protein, 15 aa, Artificial Sequence
  Description of Artificial Sequence: Synthetic peptide
  Seed: LRMKWMMAMKYPITA
LRMKMMMCMTYPVTA

SEQ ID NO: 235926 - protein, 15 aa, Artificial Sequence
  Description of Artificial Sequence: Synthetic peptide
  Seed: LRMKWMMAMKYPITA
LRMKMMMCMVYPATA

SEQ ID NO: 235927 - protein, 15 aa, Artificial Sequence
  Description of Artificial Sequence: Synthetic peptide
  Seed: LRMKWMMAMKYPITA
LRMKMMMDMAYPATA

SEQ ID NO: 235928 - protein, 15 aa, Artificial Sequence
  Description of Artificial Sequence: Synthetic peptide
  Seed: LRMKWMMAMKYPITA
LRMKMMMDMAYPFTA

SEQ ID NO: 235929 - protein, 15 aa, Artificial Sequence
  Description of Artificial Sequence: Synthetic peptide
  Seed: LRMKWMMAMKYPITA
LRMKMMMDMAYPITA

SEQ ID NO: 235930 - protein, 15 aa, Artificial Sequence
  Description of Artificial Sequence: Synthetic peptide
  Seed: LRMKWMMAMKYPITA
LRMKMMMDMAYPLTA

SEQ ID NO: 235931 - protein, 15 aa, Artificial Sequence
  Description of Artificial Sequence: Synthetic peptide
  Seed: LRMKWMMAMKYPITA
LRMKMMMDMAYPMTA

SEQ ID NO: 235932 - protein, 15 aa, Artificial Sequence
  Description of Artificial Sequence: Synthetic peptide
  Seed: LRMKWMMAMKYPITA
LRMKMMMDMAYPRTA

SEQ ID NO: 235933 - protein, 15 aa, Artificial Sequence
  Description of Artificial Sequence: Synthetic peptide
  Seed: LRMKWMMAMKYPITA
LRMKMMMDMAYPVTA

SEQ ID NO: 235934 - protein, 15 aa, Artificial Sequence
  Description of Artificial Sequence: Synthetic peptide
  Seed: LRMKWMMAMKYPITA
LRMKMMMDMAYPYTA

SEQ ID NO: 235935 - protein, 15 aa, Artificial Sequence
  Description of Artificial Sequence: Synthetic peptide
  Seed: LRMKWMMAMKYPITA
LRMKMMMDMFYPITA

SEQ ID NO: 235936 - protein, 15 aa, Artificial Sequence
  Description of Artificial Sequence: Synthetic peptide
  Seed: LRMKWMMAMKYPITA
LRMKMMMDMFYPLTA

SEQ ID NO: 235937 - protein, 15 aa, Artificial Sequence
  Description of Artificial Sequence: Synthetic peptide
  Seed: LRMKWMMAMKYPITA
LRMKMMMDMFYPVTA

SEQ ID NO: 235938 - protein, 15 aa, Artificial Sequence
  Description of Artificial Sequence: Synthetic peptide
  Seed: LRMKWMMAMKYPITA
LRMKMMMDMGYPFTA

SEQ ID NO: 235939 - protein, 15 aa, Artificial Sequence
  Description of Artificial Sequence: Synthetic peptide
  Seed: LRMKWMMAMKYPITA
LRMKMMMDMGYPITA

SEQ ID NO: 235940 - protein, 15 aa, Artificial Sequence
  Description of Artificial Sequence: Synthetic peptide
  Seed: LRMKWMMAMKYPITA
LRMKMMMDMGYPLTA

SEQ ID NO: 235941 - protein, 15 aa, Artificial Sequence
  Description of Artificial Sequence: Synthetic peptide
  Seed: LRMKWMMAMKYPITA
LRMKMMMDMGYPRTA

SEQ ID NO: 235942 - protein, 15 aa, Artificial Sequence
  Description of Artificial Sequence: Synthetic peptide
  Seed: LRMKWMMAMKYPITA
LRMKMMMDMGYPVTA

SEQ ID NO: 235943 - protein, 15 aa, Artificial Sequence
  Description of Artificial Sequence: Synthetic peptide
  Seed: LRMKWMMAMKYPITA
LRMKMMMDMGYPYTA

SEQ ID NO: 235944 - protein, 15 aa, Artificial Sequence
  Description of Artificial Sequence: Synthetic peptide
  Seed: LRMKWMMAMKYPITA
LRMKMMMDMHYPFTA

SEQ ID NO: 235945 - protein, 15 aa, Artificial Sequence
  Description of Artificial Sequence: Synthetic peptide
  Seed: LRMKWMMAMKYPITA
LRMKMMMDMHYPYTA

SEQ ID NO: 235946 - protein, 15 aa, Artificial Sequence
  Description of Artificial Sequence: Synthetic peptide
  Seed: LRMKWMMAMKYPITA
LRMKMMMDMIYPFTA

SEQ ID NO: 235947 - protein, 15 aa, Artificial Sequence
  Description of Artificial Sequence: Synthetic peptide
  Seed: LRMKWMMAMKYPITA
LRMKMMMDMIYPITA

SEQ ID NO: 235948 - protein, 15 aa, Artificial Sequence
  Description of Artificial Sequence: Synthetic peptide
  Seed: LRMKWMMAMKYPITA
LRMKMMMDMIYPRTA

SEQ ID NO: 235949 - protein, 15 aa, Artificial Sequence
  Description of Artificial Sequence: Synthetic peptide
  Seed: LRMKWMMAMKYPITA
LRMKMMMDMIYPVTA

SEQ ID NO: 235950 - protein, 15 aa, Artificial Sequence
  Description of Artificial Sequence: Synthetic peptide
  Seed: LRMKWMMAMKYPITA
LRMKMMMDMIYPYTA

SEQ ID NO: 235951 - protein, 15 aa, Artificial Sequence
  Description of Artificial Sequence: Synthetic peptide
  Seed: LRMKWMMAMKYPITA
LRMKMMMDMKYPATA

SEQ ID NO: 235952 - protein, 15 aa, Artificial Sequence
  Description of Artificial Sequence: Synthetic peptide
  Seed: LRMKWMMAMKYPITA
LRMKMMMDMKYPFTA

SEQ ID NO: 235953 - protein, 15 aa, Artificial Sequence
  Description of Artificial Sequence: Synthetic peptide
  Seed: LRMKWMMAMKYPITA
LRMKMMMDMKYPHTA

SEQ ID NO: 235954 - protein, 15 aa, Artificial Sequence
  Description of Artificial Sequence: Synthetic peptide
  Seed: LRMKWMMAMKYPITA
LRMKMMMDMKYPITA

SEQ ID NO: 235955 - protein, 15 aa, Artificial Sequence
  Description of Artificial Sequence: Synthetic peptide
  Seed: LRMKWMMAMKYPITA
LRMKMMMDMKYPLTA

SEQ ID NO: 235956 - protein, 15 aa, Artificial Sequence
  Description of Artificial Sequence: Synthetic peptide
  Seed: LRMKWMMAMKYPITA
LRMKMMMDMKYPMTA

SEQ ID NO: 235957 - protein, 15 aa, Artificial Sequence
  Description of Artificial Sequence: Synthetic peptide
  Seed: LRMKWMMAMKYPITA
LRMKMMMDMKYPRTA

SEQ ID NO: 235958 - protein, 15 aa, Artificial Sequence
  Description of Artificial Sequence: Synthetic peptide
  Seed: LRMKWMMAMKYPITA
LRMKMMMDMKYPSTA

SEQ ID NO: 235959 - protein, 15 aa, Artificial Sequence
  Description of Artificial Sequence: Synthetic peptide
  Seed: LRMKWMMAMKYPITA
LRMKMMMDMKYPVTA

SEQ ID NO: 235960 - protein, 15 aa, Artificial Sequence
  Description of Artificial Sequence: Synthetic peptide
  Seed: LRMKWMMAMKYPITA
LRMKMMMDMKYPWTA

SEQ ID NO: 235961 - protein, 15 aa, Artificial Sequence
  Description of Artificial Sequence: Synthetic peptide
  Seed: LRMKWMMAMKYPITA
LRMKMMMDMKYPYTA

SEQ ID NO: 235962 - protein, 15 aa, Artificial Sequence
  Description of Artificial Sequence: Synthetic peptide
  Seed: LRMKWMMAMKYPITA
LRMKMMMDMNYPATA

SEQ ID NO: 235963 - protein, 15 aa, Artificial Sequence
  Description of Artificial Sequence: Synthetic peptide
  Seed: LRMKWMMAMKYPITA
LRMKMMMDMNYPFTA

SEQ ID NO: 235964 - protein, 15 aa, Artificial Sequence
  Description of Artificial Sequence: Synthetic peptide
  Seed: LRMKWMMAMKYPITA
LRMKMMMDMNYPITA

SEQ ID NO: 235965 - protein, 15 aa, Artificial Sequence
  Description of Artificial Sequence: Synthetic peptide
  Seed: LRMKWMMAMKYPITA
LRMKMMMDMNYPLTA

SEQ ID NO: 235966 - protein, 15 aa, Artificial Sequence
  Description of Artificial Sequence: Synthetic peptide
  Seed: LRMKWMMAMKYPITA
LRMKMMMDMNYPMTA

SEQ ID NO: 235967 - protein, 15 aa, Artificial Sequence
  Description of Artificial Sequence: Synthetic peptide
  Seed: LRMKWMMAMKYPITA
LRMKMMMDMNYPRTA

SEQ ID NO: 235968 - protein, 15 aa, Artificial Sequence
  Description of Artificial Sequence: Synthetic peptide
  Seed: LRMKWMMAMKYPITA
LRMKMMMDMNYPSTA

SEQ ID NO: 235969 - protein, 15 aa, Artificial Sequence
  Description of Artificial Sequence: Synthetic peptide
  Seed: LRMKWMMAMKYPITA
LRMKMMMDMNYPVTA

SEQ ID NO: 235970 - protein, 15 aa, Artificial Sequence
  Description of Artificial Sequence: Synthetic peptide
  Seed: LRMKWMMAMKYPITA
LRMKMMMDMNYPYTA

SEQ ID NO: 235971 - protein, 15 aa, Artificial Sequence
  Description of Artificial Sequence: Synthetic peptide
  Seed: LRMKWMMAMKYPITA
LRMKMMMDMPYPFTA

SEQ ID NO: 235972 - protein, 15 aa, Artificial Sequence
  Description of Artificial Sequence: Synthetic peptide
  Seed: LRMKWMMAMKYPITA
LRMKMMMDMPYPITA

SEQ ID NO: 235973 - protein, 15 aa, Artificial Sequence
  Description of Artificial Sequence: Synthetic peptide
  Seed: LRMKWMMAMKYPITA
LRMKMMMDMPYPMTA

SEQ ID NO: 235974 - protein, 15 aa, Artificial Sequence
  Description of Artificial Sequence: Synthetic peptide
  Seed: LRMKWMMAMKYPITA
LRMKMMMDMPYPRTA

SEQ ID NO: 235975 - protein, 15 aa, Artificial Sequence
  Description of Artificial Sequence: Synthetic peptide
  Seed: LRMKWMMAMKYPITA
LRMKMMMDMPYPVTA

SEQ ID NO: 235976 - protein, 15 aa, Artificial Sequence
  Description of Artificial Sequence: Synthetic peptide
  Seed: LRMKWMMAMKYPITA
LRMKMMMDMPYPYTA

SEQ ID NO: 235977 - protein, 15 aa, Artificial Sequence
  Description of Artificial Sequence: Synthetic peptide
  Seed: LRMKWMMAMKYPITA
LRMKMMMDMRYPATA

SEQ ID NO: 235978 - protein, 15 aa, Artificial Sequence
  Description of Artificial Sequence: Synthetic peptide
  Seed: LRMKWMMAMKYPITA
LRMKMMMDMRYPFTA

SEQ ID NO: 235979 - protein, 15 aa, Artificial Sequence
  Description of Artificial Sequence: Synthetic peptide
  Seed: LRMKWMMAMKYPITA
LRMKMMMDMRYPHTA

SEQ ID NO: 235980 - protein, 15 aa, Artificial Sequence
  Description of Artificial Sequence: Synthetic peptide
  Seed: LRMKWMMAMKYPITA
LRMKMMMDMRYPITA

SEQ ID NO: 235981 - protein, 15 aa, Artificial Sequence
  Description of Artificial Sequence: Synthetic peptide
  Seed: LRMKWMMAMKYPITA
LRMKMMMDMRYPLTA

SEQ ID NO: 235982 - protein, 15 aa, Artificial Sequence
  Description of Artificial Sequence: Synthetic peptide
  Seed: LRMKWMMAMKYPITA
LRMKMMMDMRYPMTA

SEQ ID NO: 235983 - protein, 15 aa, Artificial Sequence
  Description of Artificial Sequence: Synthetic peptide
  Seed: LRMKWMMAMKYPITA
LRMKMMMDMRYPRTA

SEQ ID NO: 235984 - protein, 15 aa, Artificial Sequence
  Description of Artificial Sequence: Synthetic peptide
  Seed: LRMKWMMAMKYPITA
LRMKMMMDMRYPSTA

SEQ ID NO: 235985 - protein, 15 aa, Artificial Sequence
  Description of Artificial Sequence: Synthetic peptide
  Seed: LRMKWMMAMKYPITA
LRMKMMMDMRYPVTA

SEQ ID NO: 235986 - protein, 15 aa, Artificial Sequence
  Description of Artificial Sequence: Synthetic peptide
  Seed: LRMKWMMAMKYPITA
LRMKMMMDMRYPYTA

SEQ ID NO: 235987 - protein, 15 aa, Artificial Sequence
  Description of Artificial Sequence: Synthetic peptide
  Seed: LRMKWMMAMKYPITA
LRMKMMMDMSYPATA

SEQ ID NO: 235988 - protein, 15 aa, Artificial Sequence
  Description of Artificial Sequence: Synthetic peptide
  Seed: LRMKWMMAMKYPITA
LRMKMMMDMSYPFTA

SEQ ID NO: 235989 - protein, 15 aa, Artificial Sequence
  Description of Artificial Sequence: Synthetic peptide
  Seed: LRMKWMMAMKYPITA
LRMKMMMDMSYPITA

SEQ ID NO: 235990 - protein, 15 aa, Artificial Sequence
  Description of Artificial Sequence: Synthetic peptide
  Seed: LRMKWMMAMKYPITA
LRMKMMMDMSYPLTA

SEQ ID NO: 235991 - protein, 15 aa, Artificial Sequence
  Description of Artificial Sequence: Synthetic peptide
  Seed: LRMKWMMAMKYPITA
LRMKMMMDMSYPMTA

SEQ ID NO: 235992 - protein, 15 aa, Artificial Sequence
  Description of Artificial Sequence: Synthetic peptide
  Seed: LRMKWMMAMKYPITA
LRMKMMMDMSYPRTA

SEQ ID NO: 235993 - protein, 15 aa, Artificial Sequence
  Description of Artificial Sequence: Synthetic peptide
  Seed: LRMKWMMAMKYPITA
LRMKMMMDMSYPSTA

SEQ ID NO: 235994 - protein, 15 aa, Artificial Sequence
  Description of Artificial Sequence: Synthetic peptide
  Seed: LRMKWMMAMKYPITA
LRMKMMMDMSYPVTA

SEQ ID NO: 235995 - protein, 15 aa, Artificial Sequence
  Description of Artificial Sequence: Synthetic peptide
  Seed: LRMKWMMAMKYPITA
LRMKMMMDMSYPYTA

SEQ ID NO: 235996 - protein, 15 aa, Artificial Sequence
  Description of Artificial Sequence: Synthetic peptide
  Seed: LRMKWMMAMKYPITA
LRMKMMMDMTYPATA

SEQ ID NO: 235997 - protein, 15 aa, Artificial Sequence
  Description of Artificial Sequence: Synthetic peptide
  Seed: LRMKWMMAMKYPITA
LRMKMMMDMTYPFTA

SEQ ID NO: 235998 - protein, 15 aa, Artificial Sequence
  Description of Artificial Sequence: Synthetic peptide
  Seed: LRMKWMMAMKYPITA
LRMKMMMDMTYPITA

SEQ ID NO: 235999 - protein, 15 aa, Artificial Sequence
  Description of Artificial Sequence: Synthetic peptide
  Seed: LRMKWMMAMKYPITA
LRMKMMMDMTYPLTA

SEQ ID NO: 236000 - protein, 15 aa, Artificial Sequence
  Description of Artificial Sequence: Synthetic peptide
  Seed: LRMKWMMAMKYPITA
LRMKMMMDMTYPMTA

SEQ ID NO: 236001 - protein, 15 aa, Artificial Sequence
  Description of Artificial Sequence: Synthetic peptide
  Seed: LRMKWMMAMKYPITA
LRMKMMMDMTYPRTA

SEQ ID NO: 236002 - protein, 15 aa, Artificial Sequence
  Description of Artificial Sequence: Synthetic peptide
  Seed: LRMKWMMAMKYPITA
LRMKMMMDMTYPSTA

SEQ ID NO: 236003 - protein, 15 aa, Artificial Sequence
  Description of Artificial Sequence: Synthetic peptide
  Seed: LRMKWMMAMKYPITA
LRMKMMMDMTYPVTA

SEQ ID NO: 236004 - protein, 15 aa, Artificial Sequence
  Description of Artificial Sequence: Synthetic peptide
  Seed: LRMKWMMAMKYPITA
LRMKMMMDMTYPYTA

SEQ ID NO: 236005 - protein, 15 aa, Artificial Sequence
  Description of Artificial Sequence: Synthetic peptide
  Seed: LRMKWMMAMKYPITA
LRMKMMMDMVYPFTA

SEQ ID NO: 236006 - protein, 15 aa, Artificial Sequence
  Description of Artificial Sequence: Synthetic peptide
  Seed: LRMKWMMAMKYPITA
LRMKMMMDMVYPITA

SEQ ID NO: 236007 - protein, 15 aa, Artificial Sequence
  Description of Artificial Sequence: Synthetic peptide
  Seed: LRMKWMMAMKYPITA
LRMKMMMDMVYPMTA

SEQ ID NO: 236008 - protein, 15 aa, Artificial Sequence
  Description of Artificial Sequence: Synthetic peptide
  Seed: LRMKWMMAMKYPITA
LRMKMMMDMVYPRTA

SEQ ID NO: 236009 - protein, 15 aa, Artificial Sequence
  Description of Artificial Sequence: Synthetic peptide
  Seed: LRMKWMMAMKYPITA
LRMKMMMDMVYPVTA

SEQ ID NO: 236010 - protein, 15 aa, Artificial Sequence
  Description of Artificial Sequence: Synthetic peptide
  Seed: LRMKWMMAMKYPITA
LRMKMMMDMVYPYTA

SEQ ID NO: 236011 - protein, 15 aa, Artificial Sequence
  Description of Artificial Sequence: Synthetic peptide
  Seed: LRMKWMMAMKYPITA
LRMKMMMEMAYPATA

SEQ ID NO: 236012 - protein, 15 aa, Artificial Sequence
  Description of Artificial Sequence: Synthetic peptide
  Seed: LRMKWMMAMKYPITA
LRMKMMMEMAYPCTA

SEQ ID NO: 236013 - protein, 15 aa, Artificial Sequence
  Description of Artificial Sequence: Synthetic peptide
  Seed: LRMKWMMAMKYPITA
LRMKMMMEMAYPFTA

SEQ ID NO: 236014 - protein, 15 aa, Artificial Sequence
  Description of Artificial Sequence: Synthetic peptide
  Seed: LRMKWMMAMKYPITA
LRMKMMMEMAYPGTA

SEQ ID NO: 236015 - protein, 15 aa, Artificial Sequence
  Description of Artificial Sequence: Synthetic peptide
  Seed: LRMKWMMAMKYPITA
LRMKMMMEMAYPHTA

SEQ ID NO: 236016 - protein, 15 aa, Artificial Sequence
  Description of Artificial Sequence: Synthetic peptide
  Seed: LRMKWMMAMKYPITA
LRMKMMMEMAYPITA

SEQ ID NO: 236017 - protein, 15 aa, Artificial Sequence
  Description of Artificial Sequence: Synthetic peptide
  Seed: LRMKWMMAMKYPITA
LRMKMMMEMAYPLTA

SEQ ID NO: 236018 - protein, 15 aa, Artificial Sequence
  Description of Artificial Sequence: Synthetic peptide
  Seed: LRMKWMMAMKYPITA
LRMKMMMEMAYPMTA

SEQ ID NO: 236019 - protein, 15 aa, Artificial Sequence
  Description of Artificial Sequence: Synthetic peptide
  Seed: LRMKWMMAMKYPITA
LRMKMMMEMAYPNTA

SEQ ID NO: 236020 - protein, 15 aa, Artificial Sequence
  Description of Artificial Sequence: Synthetic peptide
  Seed: LRMKWMMAMKYPITA
LRMKMMMEMAYPQTA

SEQ ID NO: 236021 - protein, 15 aa, Artificial Sequence
  Description of Artificial Sequence: Synthetic peptide
  Seed: LRMKWMMAMKYPITA
LRMKMMMEMAYPSTA

SEQ ID NO: 236022 - protein, 15 aa, Artificial Sequence
  Description of Artificial Sequence: Synthetic peptide
  Seed: LRMKWMMAMKYPITA
LRMKMMMEMAYPTTA

SEQ ID NO: 236023 - protein, 15 aa, Artificial Sequence
  Description of Artificial Sequence: Synthetic peptide
  Seed: LRMKWMMAMKYPITA
LRMKMMMEMAYPVTA

SEQ ID NO: 236024 - protein, 15 aa, Artificial Sequence
  Description of Artificial Sequence: Synthetic peptide
  Seed: LRMKWMMAMKYPITA
LRMKMMMEMAYPYTA

SEQ ID NO: 236025 - protein, 15 aa, Artificial Sequence
  Description of Artificial Sequence: Synthetic peptide
  Seed: LRMKWMMAMKYPITA
LRMKMMMEMFYPFTA

SEQ ID NO: 236026 - protein, 15 aa, Artificial Sequence
  Description of Artificial Sequence: Synthetic peptide
  Seed: LRMKWMMAMKYPITA
LRMKMMMEMFYPITA

SEQ ID NO: 236027 - protein, 15 aa, Artificial Sequence
  Description of Artificial Sequence: Synthetic peptide
  Seed: LRMKWMMAMKYPITA
LRMKMMMEMFYPLTA

SEQ ID NO: 236028 - protein, 15 aa, Artificial Sequence
  Description of Artificial Sequence: Synthetic peptide
  Seed: LRMKWMMAMKYPITA
LRMKMMMEMFYPVTA

SEQ ID NO: 236029 - protein, 15 aa, Artificial Sequence
  Description of Artificial Sequence: Synthetic peptide
  Seed: LRMKWMMAMKYPITA
LRMKMMMEMGYPATA

SEQ ID NO: 236030 - protein, 15 aa, Artificial Sequence
  Description of Artificial Sequence: Synthetic peptide
  Seed: LRMKWMMAMKYPITA
LRMKMMMEMGYPCTA

SEQ ID NO: 236031 - protein, 15 aa, Artificial Sequence
  Description of Artificial Sequence: Synthetic peptide
  Seed: LRMKWMMAMKYPITA
LRMKMMMEMGYPGTA

SEQ ID NO: 236032 - protein, 15 aa, Artificial Sequence
  Description of Artificial Sequence: Synthetic peptide
  Seed: LRMKWMMAMKYPITA
LRMKMMMEMGYPITA

SEQ ID NO: 236033 - protein, 15 aa, Artificial Sequence
  Description of Artificial Sequence: Synthetic peptide
  Seed: LRMKWMMAMKYPITA
LRMKMMMEMGYPLTA

SEQ ID NO: 236034 - protein, 15 aa, Artificial Sequence
  Description of Artificial Sequence: Synthetic peptide
  Seed: LRMKWMMAMKYPITA
LRMKMMMEMGYPMTA

SEQ ID NO: 236035 - protein, 15 aa, Artificial Sequence
  Description of Artificial Sequence: Synthetic peptide
  Seed: LRMKWMMAMKYPITA
LRMKMMMEMGYPSTA

SEQ ID NO: 236036 - protein, 15 aa, Artificial Sequence
  Description of Artificial Sequence: Synthetic peptide
  Seed: LRMKWMMAMKYPITA
LRMKMMMEMGYPTTA

SEQ ID NO: 236037 - protein, 15 aa, Artificial Sequence
  Description of Artificial Sequence: Synthetic peptide
  Seed: LRMKWMMAMKYPITA
LRMKMMMEMGYPVTA

SEQ ID NO: 236038 - protein, 15 aa, Artificial Sequence
  Description of Artificial Sequence: Synthetic peptide
  Seed: LRMKWMMAMKYPITA
LRMKMMMEMIYPATA

SEQ ID NO: 236039 - protein, 15 aa, Artificial Sequence
  Description of Artificial Sequence: Synthetic peptide
  Seed: LRMKWMMAMKYPITA
LRMKMMMEMIYPLTA

SEQ ID NO: 236040 - protein, 15 aa, Artificial Sequence
  Description of Artificial Sequence: Synthetic peptide
  Seed: LRMKWMMAMKYPITA
LRMKMMMEMIYPMTA

SEQ ID NO: 236041 - protein, 15 aa, Artificial Sequence
  Description of Artificial Sequence: Synthetic peptide
  Seed: LRMKWMMAMKYPITA
LRMKMMMEMIYPNTA

SEQ ID NO: 236042 - protein, 15 aa, Artificial Sequence
  Description of Artificial Sequence: Synthetic peptide
  Seed: LRMKWMMAMKYPITA
LRMKMMMEMIYPSTA

SEQ ID NO: 236043 - protein, 15 aa, Artificial Sequence
  Description of Artificial Sequence: Synthetic peptide
  Seed: LRMKWMMAMKYPITA
LRMKMMMEMIYPTTA

SEQ ID NO: 236044 - protein, 15 aa, Artificial Sequence
  Description of Artificial Sequence: Synthetic peptide
  Seed: LRMKWMMAMKYPITA
LRMKMMMEMIYPVTA

SEQ ID NO: 236045 - protein, 15 aa, Artificial Sequence
  Description of Artificial Sequence: Synthetic peptide
  Seed: LRMKWMMAMKYPITA
LRMKMMMEMKYPATA

SEQ ID NO: 236046 - protein, 15 aa, Artificial Sequence
  Description of Artificial Sequence: Synthetic peptide
  Seed: LRMKWMMAMKYPITA
LRMKMMMEMKYPSTA

SEQ ID NO: 236047 - protein, 15 aa, Artificial Sequence
  Description of Artificial Sequence: Synthetic peptide
  Seed: LRMKWMMAMKYPITA
LRMKMMMEMNYPATA

SEQ ID NO: 236048 - protein, 15 aa, Artificial Sequence
  Description of Artificial Sequence: Synthetic peptide
  Seed: LRMKWMMAMKYPITA
LRMKMMMEMNYPITA

SEQ ID NO: 236049 - protein, 15 aa, Artificial Sequence
  Description of Artificial Sequence: Synthetic peptide
  Seed: LRMKWMMAMKYPITA
LRMKMMMEMNYPLTA

SEQ ID NO: 236050 - protein, 15 aa, Artificial Sequence
  Description of Artificial Sequence: Synthetic peptide
  Seed: LRMKWMMAMKYPITA
LRMKMMMEMNYPVTA

SEQ ID NO: 236051 - protein, 15 aa, Artificial Sequence
  Description of Artificial Sequence: Synthetic peptide
  Seed: LRMKWMMAMKYPITA
LRMKMMMEMPYPATA

SEQ ID NO: 236052 - protein, 15 aa, Artificial Sequence
  Description of Artificial Sequence: Synthetic peptide
  Seed: LRMKWMMAMKYPITA
LRMKMMMEMPYPITA

SEQ ID NO: 236053 - protein, 15 aa, Artificial Sequence
  Description of Artificial Sequence: Synthetic peptide
  Seed: LRMKWMMAMKYPITA
LRMKMMMEMPYPLTA

SEQ ID NO: 236054 - protein, 15 aa, Artificial Sequence
  Description of Artificial Sequence: Synthetic peptide
  Seed: LRMKWMMAMKYPITA
LRMKMMMEMPYPMTA

SEQ ID NO: 236055 - protein, 15 aa, Artificial Sequence
  Description of Artificial Sequence: Synthetic peptide
  Seed: LRMKWMMAMKYPITA
LRMKMMMEMPYPNTA

SEQ ID NO: 236056 - protein, 15 aa, Artificial Sequence
  Description of Artificial Sequence: Synthetic peptide
  Seed: LRMKWMMAMKYPITA
LRMKMMMEMPYPSTA

SEQ ID NO: 236057 - protein, 15 aa, Artificial Sequence
  Description of Artificial Sequence: Synthetic peptide
  Seed: LRMKWMMAMKYPITA
LRMKMMMEMPYPTTA

SEQ ID NO: 236058 - protein, 15 aa, Artificial Sequence
  Description of Artificial Sequence: Synthetic peptide
  Seed: LRMKWMMAMKYPITA
LRMKMMMEMPYPVTA

SEQ ID NO: 236059 - protein, 15 aa, Artificial Sequence
  Description of Artificial Sequence: Synthetic peptide
  Seed: LRMKWMMAMKYPITA
LRMKMMMEMRYPATA

SEQ ID NO: 236060 - protein, 15 aa, Artificial Sequence
  Description of Artificial Sequence: Synthetic peptide
  Seed: LRMKWMMAMKYPITA
LRMKMMMEMRYPFTA

SEQ ID NO: 236061 - protein, 15 aa, Artificial Sequence
  Description of Artificial Sequence: Synthetic peptide
  Seed: LRMKWMMAMKYPITA
LRMKMMMEMRYPGTA

SEQ ID NO: 236062 - protein, 15 aa, Artificial Sequence
  Description of Artificial Sequence: Synthetic peptide
  Seed: LRMKWMMAMKYPITA
LRMKMMMEMRYPHTA

SEQ ID NO: 236063 - protein, 15 aa, Artificial Sequence
  Description of Artificial Sequence: Synthetic peptide
  Seed: LRMKWMMAMKYPITA
LRMKMMMEMRYPITA

SEQ ID NO: 236064 - protein, 15 aa, Artificial Sequence
  Description of Artificial Sequence: Synthetic peptide
  Seed: LRMKWMMAMKYPITA
LRMKMMMEMRYPKTA

SEQ ID NO: 236065 - protein, 15 aa, Artificial Sequence
  Description of Artificial Sequence: Synthetic peptide
  Seed: LRMKWMMAMKYPITA
LRMKMMMEMRYPLTA

SEQ ID NO: 236066 - protein, 15 aa, Artificial Sequence
  Description of Artificial Sequence: Synthetic peptide
  Seed: LRMKWMMAMKYPITA
LRMKMMMEMRYPMTA

SEQ ID NO: 236067 - protein, 15 aa, Artificial Sequence
  Description of Artificial Sequence: Synthetic peptide
  Seed: LRMKWMMAMKYPITA
LRMKMMMEMRYPQTA

SEQ ID NO: 236068 - protein, 15 aa, Artificial Sequence
  Description of Artificial Sequence: Synthetic peptide
  Seed: LRMKWMMAMKYPITA
LRMKMMMEMRYPRTA

SEQ ID NO: 236069 - protein, 15 aa, Artificial Sequence
  Description of Artificial Sequence: Synthetic peptide
  Seed: LRMKWMMAMKYPITA
LRMKMMMEMRYPSTA

SEQ ID NO: 236070 - protein, 15 aa, Artificial Sequence
  Description of Artificial Sequence: Synthetic peptide
  Seed: LRMKWMMAMKYPITA
LRMKMMMEMRYPTTA

SEQ ID NO: 236071 - protein, 15 aa, Artificial Sequence
  Description of Artificial Sequence: Synthetic peptide
  Seed: LRMKWMMAMKYPITA
LRMKMMMEMRYPVTA

SEQ ID NO: 236072 - protein, 15 aa, Artificial Sequence
  Description of Artificial Sequence: Synthetic peptide
  Seed: LRMKWMMAMKYPITA
LRMKMMMEMRYPYTA

SEQ ID NO: 236073 - protein, 15 aa, Artificial Sequence
  Description of Artificial Sequence: Synthetic peptide
  Seed: LRMKWMMAMKYPITA
LRMKMMMEMSYPATA

SEQ ID NO: 236074 - protein, 15 aa, Artificial Sequence
  Description of Artificial Sequence: Synthetic peptide
  Seed: LRMKWMMAMKYPITA
LRMKMMMEMSYPGTA

SEQ ID NO: 236075 - protein, 15 aa, Artificial Sequence
  Description of Artificial Sequence: Synthetic peptide
  Seed: LRMKWMMAMKYPITA
LRMKMMMEMSYPITA

SEQ ID NO: 236076 - protein, 15 aa, Artificial Sequence
  Description of Artificial Sequence: Synthetic peptide
  Seed: LRMKWMMAMKYPITA
LRMKMMMEMSYPLTA

SEQ ID NO: 236077 - protein, 15 aa, Artificial Sequence
  Description of Artificial Sequence: Synthetic peptide
  Seed: LRMKWMMAMKYPITA
LRMKMMMEMSYPMTA

SEQ ID NO: 236078 - protein, 15 aa, Artificial Sequence
  Description of Artificial Sequence: Synthetic peptide
  Seed: LRMKWMMAMKYPITA
LRMKMMMEMSYPNTA

SEQ ID NO: 236079 - protein, 15 aa, Artificial Sequence
  Description of Artificial Sequence: Synthetic peptide
  Seed: LRMKWMMAMKYPITA
LRMKMMMEMSYPSTA

SEQ ID NO: 236080 - protein, 15 aa, Artificial Sequence
  Description of Artificial Sequence: Synthetic peptide
  Seed: LRMKWMMAMKYPITA
LRMKMMMEMSYPTTA

SEQ ID NO: 236081 - protein, 15 aa, Artificial Sequence
  Description of Artificial Sequence: Synthetic peptide
  Seed: LRMKWMMAMKYPITA
LRMKMMMEMSYPVTA

SEQ ID NO: 236082 - protein, 15 aa, Artificial Sequence
  Description of Artificial Sequence: Synthetic peptide
  Seed: LRMKWMMAMKYPITA
LRMKMMMEMTYPATA

SEQ ID NO: 236083 - protein, 15 aa, Artificial Sequence
  Description of Artificial Sequence: Synthetic peptide
  Seed: LRMKWMMAMKYPITA
LRMKMMMEMTYPITA

SEQ ID NO: 236084 - protein, 15 aa, Artificial Sequence
  Description of Artificial Sequence: Synthetic peptide
  Seed: LRMKWMMAMKYPITA
LRMKMMMEMTYPLTA

SEQ ID NO: 236085 - protein, 15 aa, Artificial Sequence
  Description of Artificial Sequence: Synthetic peptide
  Seed: LRMKWMMAMKYPITA
LRMKMMMEMTYPMTA

SEQ ID NO: 236086 - protein, 15 aa, Artificial Sequence
  Description of Artificial Sequence: Synthetic peptide
  Seed: LRMKWMMAMKYPITA
LRMKMMMEMTYPNTA

SEQ ID NO: 236087 - protein, 15 aa, Artificial Sequence
  Description of Artificial Sequence: Synthetic peptide
  Seed: LRMKWMMAMKYPITA
LRMKMMMEMTYPSTA

SEQ ID NO: 236088 - protein, 15 aa, Artificial Sequence
  Description of Artificial Sequence: Synthetic peptide
  Seed: LRMKWMMAMKYPITA
LRMKMMMEMTYPTTA

SEQ ID NO: 236089 - protein, 15 aa, Artificial Sequence
  Description of Artificial Sequence: Synthetic peptide
  Seed: LRMKWMMAMKYPITA
LRMKMMMEMTYPVTA

SEQ ID NO: 236090 - protein, 15 aa, Artificial Sequence
  Description of Artificial Sequence: Synthetic peptide
  Seed: LRMKWMMAMKYPITA
LRMKMMMEMVYPATA

SEQ ID NO: 236091 - protein, 15 aa, Artificial Sequence
  Description of Artificial Sequence: Synthetic peptide
  Seed: LRMKWMMAMKYPITA
LRMKMMMEMVYPITA

SEQ ID NO: 236092 - protein, 15 aa, Artificial Sequence
  Description of Artificial Sequence: Synthetic peptide
  Seed: LRMKWMMAMKYPITA
LRMKMMMEMVYPLTA

SEQ ID NO: 236093 - protein, 15 aa, Artificial Sequence
  Description of Artificial Sequence: Synthetic peptide
  Seed: LRMKWMMAMKYPITA
LRMKMMMEMVYPMTA

SEQ ID NO: 236094 - protein, 15 aa, Artificial Sequence
  Description of Artificial Sequence: Synthetic peptide
  Seed: LRMKWMMAMKYPITA
LRMKMMMEMVYPNTA

SEQ ID NO: 236095 - protein, 15 aa, Artificial Sequence
  Description of Artificial Sequence: Synthetic peptide
  Seed: LRMKWMMAMKYPITA
LRMKMMMEMVYPSTA

SEQ ID NO: 236096 - protein, 15 aa, Artificial Sequence
  Description of Artificial Sequence: Synthetic peptide
  Seed: LRMKWMMAMKYPITA
LRMKMMMEMVYPTTA

SEQ ID NO: 236097 - protein, 15 aa, Artificial Sequence
  Description of Artificial Sequence: Synthetic peptide
  Seed: LRMKWMMAMKYPITA
LRMKMMMEMVYPVTA

SEQ ID NO: 236098 - protein, 15 aa, Artificial Sequence
  Description of Artificial Sequence: Synthetic peptide
  Seed: LRMKWMMAMKYPITA
LRMKMMMFMAYPATA

SEQ ID NO: 236099 - protein, 15 aa, Artificial Sequence
  Description of Artificial Sequence: Synthetic peptide
  Seed: LRMKWMMAMKYPITA
LRMKMMMFMAYPFTA

SEQ ID NO: 236100 - protein, 15 aa, Artificial Sequence
  Description of Artificial Sequence: Synthetic peptide
  Seed: LRMKWMMAMKYPITA
LRMKMMMFMAYPGTA

SEQ ID NO: 236101 - protein, 15 aa, Artificial Sequence
  Description of Artificial Sequence: Synthetic peptide
  Seed: LRMKWMMAMKYPITA
LRMKMMMFMAYPITA

SEQ ID NO: 236102 - protein, 15 aa, Artificial Sequence
  Description of Artificial Sequence: Synthetic peptide
  Seed: LRMKWMMAMKYPITA
LRMKMMMFMAYPKTA

SEQ ID NO: 236103 - protein, 15 aa, Artificial Sequence
  Description of Artificial Sequence: Synthetic peptide
  Seed: LRMKWMMAMKYPITA
LRMKMMMFMAYPLTA

SEQ ID NO: 236104 - protein, 15 aa, Artificial Sequence
  Description of Artificial Sequence: Synthetic peptide
  Seed: LRMKWMMAMKYPITA
LRMKMMMFMAYPMTA

SEQ ID NO: 236105 - protein, 15 aa, Artificial Sequence
  Description of Artificial Sequence: Synthetic peptide
  Seed: LRMKWMMAMKYPITA
LRMKMMMFMAYPNTA

SEQ ID NO: 236106 - protein, 15 aa, Artificial Sequence
  Description of Artificial Sequence: Synthetic peptide
  Seed: LRMKWMMAMKYPITA
LRMKMMMFMAYPRTA

SEQ ID NO: 236107 - protein, 15 aa, Artificial Sequence
  Description of Artificial Sequence: Synthetic peptide
  Seed: LRMKWMMAMKYPITA
LRMKMMMFMAYPSTA

SEQ ID NO: 236108 - protein, 15 aa, Artificial Sequence
  Description of Artificial Sequence: Synthetic peptide
  Seed: LRMKWMMAMKYPITA
LRMKMMMFMAYPTTA

SEQ ID NO: 236109 - protein, 15 aa, Artificial Sequence
  Description of Artificial Sequence: Synthetic peptide
  Seed: LRMKWMMAMKYPITA
LRMKMMMFMAYPVTA

SEQ ID NO: 236110 - protein, 15 aa, Artificial Sequence
  Description of Artificial Sequence: Synthetic peptide
  Seed: LRMKWMMAMKYPITA
LRMKMMMFMAYPYTA

SEQ ID NO: 236111 - protein, 15 aa, Artificial Sequence
  Description of Artificial Sequence: Synthetic peptide
  Seed: LRMKWMMAMKYPITA
LRMKMMMFMDYPATA

SEQ ID NO: 236112 - protein, 15 aa, Artificial Sequence
  Description of Artificial Sequence: Synthetic peptide
  Seed: LRMKWMMAMKYPITA
LRMKMMMFMGYPATA

SEQ ID NO: 236113 - protein, 15 aa, Artificial Sequence
  Description of Artificial Sequence: Synthetic peptide
  Seed: LRMKWMMAMKYPITA
LRMKMMMFMGYPITA

SEQ ID NO: 236114 - protein, 15 aa, Artificial Sequence
  Description of Artificial Sequence: Synthetic peptide
  Seed: LRMKWMMAMKYPITA
LRMKMMMFMGYPLTA

SEQ ID NO: 236115 - protein, 15 aa, Artificial Sequence
  Description of Artificial Sequence: Synthetic peptide
  Seed: LRMKWMMAMKYPITA
LRMKMMMFMGYPMTA

SEQ ID NO: 236116 - protein, 15 aa, Artificial Sequence
  Description of Artificial Sequence: Synthetic peptide
  Seed: LRMKWMMAMKYPITA
LRMKMMMFMGYPRTA

SEQ ID NO: 236117 - protein, 15 aa, Artificial Sequence
  Description of Artificial Sequence: Synthetic peptide
  Seed: LRMKWMMAMKYPITA
LRMKMMMFMGYPSTA

SEQ ID NO: 236118 - protein, 15 aa, Artificial Sequence
  Description of Artificial Sequence: Synthetic peptide
  Seed: LRMKWMMAMKYPITA
LRMKMMMFMGYPTTA

SEQ ID NO: 236119 - protein, 15 aa, Artificial Sequence
  Description of Artificial Sequence: Synthetic peptide
  Seed: LRMKWMMAMKYPITA
LRMKMMMFMGYPVTA

SEQ ID NO: 236120 - protein, 15 aa, Artificial Sequence
  Description of Artificial Sequence: Synthetic peptide
  Seed: LRMKWMMAMKYPITA
LRMKMMMFMHYPKTA

SEQ ID NO: 236121 - protein, 15 aa, Artificial Sequence
  Description of Artificial Sequence: Synthetic peptide
  Seed: LRMKWMMAMKYPITA
LRMKMMMFMHYPRTA

SEQ ID NO: 236122 - protein, 15 aa, Artificial Sequence
  Description of Artificial Sequence: Synthetic peptide
  Seed: LRMKWMMAMKYPITA
LRMKMMMFMHYPYTA

SEQ ID NO: 236123 - protein, 15 aa, Artificial Sequence
  Description of Artificial Sequence: Synthetic peptide
  Seed: LRMKWMMAMKYPITA
LRMKMMMFMIYPSTA

SEQ ID NO: 236124 - protein, 15 aa, Artificial Sequence
  Description of Artificial Sequence: Synthetic peptide
  Seed: LRMKWMMAMKYPITA
LRMKMMMFMKYPATA

SEQ ID NO: 236125 - protein, 15 aa, Artificial Sequence
  Description of Artificial Sequence: Synthetic peptide
  Seed: LRMKWMMAMKYPITA
LRMKMMMFMKYPETA

SEQ ID NO: 236126 - protein, 15 aa, Artificial Sequence
  Description of Artificial Sequence: Synthetic peptide
  Seed: LRMKWMMAMKYPITA
LRMKMMMFMKYPFTA

SEQ ID NO: 236127 - protein, 15 aa, Artificial Sequence
  Description of Artificial Sequence: Synthetic peptide
  Seed: LRMKWMMAMKYPITA
LRMKMMMFMKYPGTA

SEQ ID NO: 236128 - protein, 15 aa, Artificial Sequence
  Description of Artificial Sequence: Synthetic peptide
  Seed: LRMKWMMAMKYPITA
LRMKMMMFMKYPHTA

SEQ ID NO: 236129 - protein, 15 aa, Artificial Sequence
  Description of Artificial Sequence: Synthetic peptide
  Seed: LRMKWMMAMKYPITA
LRMKMMMFMKYPITA

SEQ ID NO: 236130 - protein, 15 aa, Artificial Sequence
  Description of Artificial Sequence: Synthetic peptide
  Seed: LRMKWMMAMKYPITA
LRMKMMMFMKYPKTA

SEQ ID NO: 236131 - protein, 15 aa, Artificial Sequence
  Description of Artificial Sequence: Synthetic peptide
  Seed: LRMKWMMAMKYPITA
LRMKMMMFMKYPLTA

SEQ ID NO: 236132 - protein, 15 aa, Artificial Sequence
  Description of Artificial Sequence: Synthetic peptide
  Seed: LRMKWMMAMKYPITA
LRMKMMMFMKYPMTA

SEQ ID NO: 236133 - protein, 15 aa, Artificial Sequence
  Description of Artificial Sequence: Synthetic peptide
  Seed: LRMKWMMAMKYPITA
LRMKMMMFMKYPNTA

SEQ ID NO: 236134 - protein, 15 aa, Artificial Sequence
  Description of Artificial Sequence: Synthetic peptide
  Seed: LRMKWMMAMKYPITA
LRMKMMMFMKYPPTA

SEQ ID NO: 236135 - protein, 15 aa, Artificial Sequence
  Description of Artificial Sequence: Synthetic peptide
  Seed: LRMKWMMAMKYPITA
LRMKMMMFMKYPQTA

SEQ ID NO: 236136 - protein, 15 aa, Artificial Sequence
  Description of Artificial Sequence: Synthetic peptide
  Seed: LRMKWMMAMKYPITA
LRMKMMMFMKYPRTA

SEQ ID NO: 236137 - protein, 15 aa, Artificial Sequence
  Description of Artificial Sequence: Synthetic peptide
  Seed: LRMKWMMAMKYPITA
LRMKMMMFMKYPSTA

SEQ ID NO: 236138 - protein, 15 aa, Artificial Sequence
  Description of Artificial Sequence: Synthetic peptide
  Seed: LRMKWMMAMKYPITA
LRMKMMMFMKYPTTA

SEQ ID NO: 236139 - protein, 15 aa, Artificial Sequence
  Description of Artificial Sequence: Synthetic peptide
  Seed: LRMKWMMAMKYPITA
LRMKMMMFMKYPVTA

SEQ ID NO: 236140 - protein, 15 aa, Artificial Sequence
  Description of Artificial Sequence: Synthetic peptide
  Seed: LRMKWMMAMKYPITA
LRMKMMMFMKYPYTA

SEQ ID NO: 236141 - protein, 15 aa, Artificial Sequence
  Description of Artificial Sequence: Synthetic peptide
  Seed: LRMKWMMAMKYPITA
LRMKMMMFMNYPATA

SEQ ID NO: 236142 - protein, 15 aa, Artificial Sequence
  Description of Artificial Sequence: Synthetic peptide
  Seed: LRMKWMMAMKYPITA
LRMKMMMFMNYPDTA

SEQ ID NO: 236143 - protein, 15 aa, Artificial Sequence
  Description of Artificial Sequence: Synthetic peptide
  Seed: LRMKWMMAMKYPITA
LRMKMMMFMNYPETA

SEQ ID NO: 236144 - protein, 15 aa, Artificial Sequence
  Description of Artificial Sequence: Synthetic peptide
  Seed: LRMKWMMAMKYPITA
LRMKMMMFMNYPGTA

SEQ ID NO: 236145 - protein, 15 aa, Artificial Sequence
  Description of Artificial Sequence: Synthetic peptide
  Seed: LRMKWMMAMKYPITA
LRMKMMMFMNYPITA

SEQ ID NO: 236146 - protein, 15 aa, Artificial Sequence
  Description of Artificial Sequence: Synthetic peptide
  Seed: LRMKWMMAMKYPITA
LRMKMMMFMNYPLTA

SEQ ID NO: 236147 - protein, 15 aa, Artificial Sequence
  Description of Artificial Sequence: Synthetic peptide
  Seed: LRMKWMMAMKYPITA
LRMKMMMFMNYPMTA

SEQ ID NO: 236148 - protein, 15 aa, Artificial Sequence
  Description of Artificial Sequence: Synthetic peptide
  Seed: LRMKWMMAMKYPITA
LRMKMMMFMNYPRTA

SEQ ID NO: 236149 - protein, 15 aa, Artificial Sequence
  Description of Artificial Sequence: Synthetic peptide
  Seed: LRMKWMMAMKYPITA
LRMKMMMFMNYPSTA

SEQ ID NO: 236150 - protein, 15 aa, Artificial Sequence
  Description of Artificial Sequence: Synthetic peptide
  Seed: LRMKWMMAMKYPITA
LRMKMMMFMNYPVTA

SEQ ID NO: 236151 - protein, 15 aa, Artificial Sequence
  Description of Artificial Sequence: Synthetic peptide
  Seed: LRMKWMMAMKYPITA
LRMKMMMFMNYPYTA

SEQ ID NO: 236152 - protein, 15 aa, Artificial Sequence
  Description of Artificial Sequence: Synthetic peptide
  Seed: LRMKWMMAMKYPITA
LRMKMMMFMPYPATA

SEQ ID NO: 236153 - protein, 15 aa, Artificial Sequence
  Description of Artificial Sequence: Synthetic peptide
  Seed: LRMKWMMAMKYPITA
LRMKMMMFMPYPFTA

SEQ ID NO: 236154 - protein, 15 aa, Artificial Sequence
  Description of Artificial Sequence: Synthetic peptide
  Seed: LRMKWMMAMKYPITA
LRMKMMMFMPYPGTA

SEQ ID NO: 236155 - protein, 15 aa, Artificial Sequence
  Description of Artificial Sequence: Synthetic peptide
  Seed: LRMKWMMAMKYPITA
LRMKMMMFMPYPHTA

SEQ ID NO: 236156 - protein, 15 aa, Artificial Sequence
  Description of Artificial Sequence: Synthetic peptide
  Seed: LRMKWMMAMKYPITA
LRMKMMMFMPYPITA

SEQ ID NO: 236157 - protein, 15 aa, Artificial Sequence
  Description of Artificial Sequence: Synthetic peptide
  Seed: LRMKWMMAMKYPITA
LRMKMMMFMPYPLTA

SEQ ID NO: 236158 - protein, 15 aa, Artificial Sequence
  Description of Artificial Sequence: Synthetic peptide
  Seed: LRMKWMMAMKYPITA
LRMKMMMFMPYPMTA

SEQ ID NO: 236159 - protein, 15 aa, Artificial Sequence
  Description of Artificial Sequence: Synthetic peptide
  Seed: LRMKWMMAMKYPITA
LRMKMMMFMPYPNTA

SEQ ID NO: 236160 - protein, 15 aa, Artificial Sequence
  Description of Artificial Sequence: Synthetic peptide
  Seed: LRMKWMMAMKYPITA
LRMKMMMFMPYPQTA

SEQ ID NO: 236161 - protein, 15 aa, Artificial Sequence
  Description of Artificial Sequence: Synthetic peptide
  Seed: LRMKWMMAMKYPITA
LRMKMMMFMPYPRTA

SEQ ID NO: 236162 - protein, 15 aa, Artificial Sequence
  Description of Artificial Sequence: Synthetic peptide
  Seed: LRMKWMMAMKYPITA
LRMKMMMFMPYPSTA

SEQ ID NO: 236163 - protein, 15 aa, Artificial Sequence
  Description of Artificial Sequence: Synthetic peptide
  Seed: LRMKWMMAMKYPITA
LRMKMMMFMPYPTTA

SEQ ID NO: 236164 - protein, 15 aa, Artificial Sequence
  Description of Artificial Sequence: Synthetic peptide
  Seed: LRMKWMMAMKYPITA
LRMKMMMFMPYPVTA

SEQ ID NO: 236165 - protein, 15 aa, Artificial Sequence
  Description of Artificial Sequence: Synthetic peptide
  Seed: LRMKWMMAMKYPITA
LRMKMMMFMPYPYTA

SEQ ID NO: 236166 - protein, 15 aa, Artificial Sequence
  Description of Artificial Sequence: Synthetic peptide
  Seed: LRMKWMMAMKYPITA
LRMKMMMFMRYPATA

SEQ ID NO: 236167 - protein, 15 aa, Artificial Sequence
  Description of Artificial Sequence: Synthetic peptide
  Seed: LRMKWMMAMKYPITA
LRMKMMMFMRYPDTA

SEQ ID NO: 236168 - protein, 15 aa, Artificial Sequence
  Description of Artificial Sequence: Synthetic peptide
  Seed: LRMKWMMAMKYPITA
LRMKMMMFMRYPETA

SEQ ID NO: 236169 - protein, 15 aa, Artificial Sequence
  Description of Artificial Sequence: Synthetic peptide
  Seed: LRMKWMMAMKYPITA
LRMKMMMFMRYPFTA

SEQ ID NO: 236170 - protein, 15 aa, Artificial Sequence
  Description of Artificial Sequence: Synthetic peptide
  Seed: LRMKWMMAMKYPITA
LRMKMMMFMRYPGTA

SEQ ID NO: 236171 - protein, 15 aa, Artificial Sequence
  Description of Artificial Sequence: Synthetic peptide
  Seed: LRMKWMMAMKYPITA
LRMKMMMFMRYPHTA

SEQ ID NO: 236172 - protein, 15 aa, Artificial Sequence
  Description of Artificial Sequence: Synthetic peptide
  Seed: LRMKWMMAMKYPITA
LRMKMMMFMRYPITA

SEQ ID NO: 236173 - protein, 15 aa, Artificial Sequence
  Description of Artificial Sequence: Synthetic peptide
  Seed: LRMKWMMAMKYPITA
LRMKMMMFMRYPKTA

SEQ ID NO: 236174 - protein, 15 aa, Artificial Sequence
  Description of Artificial Sequence: Synthetic peptide
  Seed: LRMKWMMAMKYPITA
LRMKMMMFMRYPLTA

SEQ ID NO: 236175 - protein, 15 aa, Artificial Sequence
  Description of Artificial Sequence: Synthetic peptide
  Seed: LRMKWMMAMKYPITA
LRMKMMMFMRYPMTA

SEQ ID NO: 236176 - protein, 15 aa, Artificial Sequence
  Description of Artificial Sequence: Synthetic peptide
  Seed: LRMKWMMAMKYPITA
LRMKMMMFMRYPNTA

SEQ ID NO: 236177 - protein, 15 aa, Artificial Sequence
  Description of Artificial Sequence: Synthetic peptide
  Seed: LRMKWMMAMKYPITA
LRMKMMMFMRYPPTA

SEQ ID NO: 236178 - protein, 15 aa, Artificial Sequence
  Description of Artificial Sequence: Synthetic peptide
  Seed: LRMKWMMAMKYPITA
LRMKMMMFMRYPQTA

SEQ ID NO: 236179 - protein, 15 aa, Artificial Sequence
  Description of Artificial Sequence: Synthetic peptide
  Seed: LRMKWMMAMKYPITA
LRMKMMMFMRYPRTA

SEQ ID NO: 236180 - protein, 15 aa, Artificial Sequence
  Description of Artificial Sequence: Synthetic peptide
  Seed: LRMKWMMAMKYPITA
LRMKMMMFMRYPSTA

SEQ ID NO: 236181 - protein, 15 aa, Artificial Sequence
  Description of Artificial Sequence: Synthetic peptide
  Seed: LRMKWMMAMKYPITA
LRMKMMMFMRYPTTA

SEQ ID NO: 236182 - protein, 15 aa, Artificial Sequence
  Description of Artificial Sequence: Synthetic peptide
  Seed: LRMKWMMAMKYPITA
LRMKMMMFMRYPVTA

SEQ ID NO: 236183 - protein, 15 aa, Artificial Sequence
  Description of Artificial Sequence: Synthetic peptide
  Seed: LRMKWMMAMKYPITA
LRMKMMMFMRYPYTA

SEQ ID NO: 236184 - protein, 15 aa, Artificial Sequence
  Description of Artificial Sequence: Synthetic peptide
  Seed: LRMKWMMAMKYPITA
LRMKMMMFMSYPATA

SEQ ID NO: 236185 - protein, 15 aa, Artificial Sequence
  Description of Artificial Sequence: Synthetic peptide
  Seed: LRMKWMMAMKYPITA
LRMKMMMFMSYPDTA

SEQ ID NO: 236186 - protein, 15 aa, Artificial Sequence
  Description of Artificial Sequence: Synthetic peptide
  Seed: LRMKWMMAMKYPITA
LRMKMMMFMSYPETA

SEQ ID NO: 236187 - protein, 15 aa, Artificial Sequence
  Description of Artificial Sequence: Synthetic peptide
  Seed: LRMKWMMAMKYPITA
LRMKMMMFMSYPHTA

SEQ ID NO: 236188 - protein, 15 aa, Artificial Sequence
  Description of Artificial Sequence: Synthetic peptide
  Seed: LRMKWMMAMKYPITA
LRMKMMMFMSYPITA

SEQ ID NO: 236189 - protein, 15 aa, Artificial Sequence
  Description of Artificial Sequence: Synthetic peptide
  Seed: LRMKWMMAMKYPITA
LRMKMMMFMSYPKTA

SEQ ID NO: 236190 - protein, 15 aa, Artificial Sequence
  Description of Artificial Sequence: Synthetic peptide
  Seed: LRMKWMMAMKYPITA
LRMKMMMFMSYPLTA

SEQ ID NO: 236191 - protein, 15 aa, Artificial Sequence
  Description of Artificial Sequence: Synthetic peptide
  Seed: LRMKWMMAMKYPITA
LRMKMMMFMSYPMTA

SEQ ID NO: 236192 - protein, 15 aa, Artificial Sequence
  Description of Artificial Sequence: Synthetic peptide
  Seed: LRMKWMMAMKYPITA
LRMKMMMFMSYPNTA

SEQ ID NO: 236193 - protein, 15 aa, Artificial Sequence
  Description of Artificial Sequence: Synthetic peptide
  Seed: LRMKWMMAMKYPITA
LRMKMMMFMSYPQTA

SEQ ID NO: 236194 - protein, 15 aa, Artificial Sequence
  Description of Artificial Sequence: Synthetic peptide
  Seed: LRMKWMMAMKYPITA
LRMKMMMFMSYPRTA

SEQ ID NO: 236195 - protein, 15 aa, Artificial Sequence
  Description of Artificial Sequence: Synthetic peptide
  Seed: LRMKWMMAMKYPITA
LRMKMMMFMSYPSTA

SEQ ID NO: 236196 - protein, 15 aa, Artificial Sequence
  Description of Artificial Sequence: Synthetic peptide
  Seed: LRMKWMMAMKYPITA
LRMKMMMFMSYPTTA

SEQ ID NO: 236197 - protein, 15 aa, Artificial Sequence
  Description of Artificial Sequence: Synthetic peptide
  Seed: LRMKWMMAMKYPITA
LRMKMMMFMSYPVTA

SEQ ID NO: 236198 - protein, 15 aa, Artificial Sequence
  Description of Artificial Sequence: Synthetic peptide
  Seed: LRMKWMMAMKYPITA
LRMKMMMFMTYPATA

SEQ ID NO: 236199 - protein, 15 aa, Artificial Sequence
  Description of Artificial Sequence: Synthetic peptide
  Seed: LRMKWMMAMKYPITA
LRMKMMMFMTYPDTA

SEQ ID NO: 236200 - protein, 15 aa, Artificial Sequence
  Description of Artificial Sequence: Synthetic peptide
  Seed: LRMKWMMAMKYPITA
LRMKMMMFMTYPETA

SEQ ID NO: 236201 - protein, 15 aa, Artificial Sequence
  Description of Artificial Sequence: Synthetic peptide
  Seed: LRMKWMMAMKYPITA
LRMKMMMFMTYPGTA

SEQ ID NO: 236202 - protein, 15 aa, Artificial Sequence
  Description of Artificial Sequence: Synthetic peptide
  Seed: LRMKWMMAMKYPITA
LRMKMMMFMTYPHTA

SEQ ID NO: 236203 - protein, 15 aa, Artificial Sequence
  Description of Artificial Sequence: Synthetic peptide
  Seed: LRMKWMMAMKYPITA
LRMKMMMFMTYPITA

SEQ ID NO: 236204 - protein, 15 aa, Artificial Sequence
  Description of Artificial Sequence: Synthetic peptide
  Seed: LRMKWMMAMKYPITA
LRMKMMMFMTYPLTA

SEQ ID NO: 236205 - protein, 15 aa, Artificial Sequence
  Description of Artificial Sequence: Synthetic peptide
  Seed: LRMKWMMAMKYPITA
LRMKMMMFMTYPMTA

SEQ ID NO: 236206 - protein, 15 aa, Artificial Sequence
  Description of Artificial Sequence: Synthetic peptide
  Seed: LRMKWMMAMKYPITA
LRMKMMMFMTYPNTA

SEQ ID NO: 236207 - protein, 15 aa, Artificial Sequence
  Description of Artificial Sequence: Synthetic peptide
  Seed: LRMKWMMAMKYPITA
LRMKMMMFMTYPQTA

SEQ ID NO: 236208 - protein, 15 aa, Artificial Sequence
  Description of Artificial Sequence: Synthetic peptide
  Seed: LRMKWMMAMKYPITA
LRMKMMMFMTYPRTA

SEQ ID NO: 236209 - protein, 15 aa, Artificial Sequence
  Description of Artificial Sequence: Synthetic peptide
  Seed: LRMKWMMAMKYPITA
LRMKMMMFMTYPSTA

SEQ ID NO: 236210 - protein, 15 aa, Artificial Sequence
  Description of Artificial Sequence: Synthetic peptide
  Seed: LRMKWMMAMKYPITA
LRMKMMMFMTYPTTA

SEQ ID NO: 236211 - protein, 15 aa, Artificial Sequence
  Description of Artificial Sequence: Synthetic peptide
  Seed: LRMKWMMAMKYPITA
LRMKMMMFMTYPVTA

SEQ ID NO: 236212 - protein, 15 aa, Artificial Sequence
  Description of Artificial Sequence: Synthetic peptide
  Seed: LRMKWMMAMKYPITA
LRMKMMMFMVYPATA

SEQ ID NO: 236213 - protein, 15 aa, Artificial Sequence
  Description of Artificial Sequence: Synthetic peptide
  Seed: LRMKWMMAMKYPITA
LRMKMMMFMVYPDTA

SEQ ID NO: 236214 - protein, 15 aa, Artificial Sequence
  Description of Artificial Sequence: Synthetic peptide
  Seed: LRMKWMMAMKYPITA
LRMKMMMFMVYPETA

SEQ ID NO: 236215 - protein, 15 aa, Artificial Sequence
  Description of Artificial Sequence: Synthetic peptide
  Seed: LRMKWMMAMKYPITA
LRMKMMMFMVYPHTA

SEQ ID NO: 236216 - protein, 15 aa, Artificial Sequence
  Description of Artificial Sequence: Synthetic peptide
  Seed: LRMKWMMAMKYPITA
LRMKMMMFMVYPMTA

SEQ ID NO: 236217 - protein, 15 aa, Artificial Sequence
  Description of Artificial Sequence: Synthetic peptide
  Seed: LRMKWMMAMKYPITA
LRMKMMMFMVYPNTA

SEQ ID NO: 236218 - protein, 15 aa, Artificial Sequence
  Description of Artificial Sequence: Synthetic peptide
  Seed: LRMKWMMAMKYPITA
LRMKMMMFMVYPSTA

SEQ ID NO: 236219 - protein, 15 aa, Artificial Sequence
  Description of Artificial Sequence: Synthetic peptide
  Seed: LRMKWMMAMKYPITA
LRMKMMMFMVYPTTA

SEQ ID NO: 236220 - protein, 15 aa, Artificial Sequence
  Description of Artificial Sequence: Synthetic peptide
  Seed: LRMKWMMAMKYPITA
LRMKMMMFMVYPVTA

SEQ ID NO: 236221 - protein, 15 aa, Artificial Sequence
  Description of Artificial Sequence: Synthetic peptide
  Seed: LRMKWMMAMKYPITA
LRMKMMMGMAYPATA

SEQ ID NO: 236222 - protein, 15 aa, Artificial Sequence
  Description of Artificial Sequence: Synthetic peptide
  Seed: LRMKWMMAMKYPITA
LRMKMMMGMAYPCTA

SEQ ID NO: 236223 - protein, 15 aa, Artificial Sequence
  Description of Artificial Sequence: Synthetic peptide
  Seed: LRMKWMMAMKYPITA
LRMKMMMGMAYPFTA

SEQ ID NO: 236224 - protein, 15 aa, Artificial Sequence
  Description of Artificial Sequence: Synthetic peptide
  Seed: LRMKWMMAMKYPITA
LRMKMMMGMAYPGTA

SEQ ID NO: 236225 - protein, 15 aa, Artificial Sequence
  Description of Artificial Sequence: Synthetic peptide
  Seed: LRMKWMMAMKYPITA
LRMKMMMGMAYPHTA

SEQ ID NO: 236226 - protein, 15 aa, Artificial Sequence
  Description of Artificial Sequence: Synthetic peptide
  Seed: LRMKWMMAMKYPITA
LRMKMMMGMAYPITA

SEQ ID NO: 236227 - protein, 15 aa, Artificial Sequence
  Description of Artificial Sequence: Synthetic peptide
  Seed: LRMKWMMAMKYPITA
LRMKMMMGMAYPLTA

SEQ ID NO: 236228 - protein, 15 aa, Artificial Sequence
  Description of Artificial Sequence: Synthetic peptide
  Seed: LRMKWMMAMKYPITA
LRMKMMMGMAYPMTA

SEQ ID NO: 236229 - protein, 15 aa, Artificial Sequence
  Description of Artificial Sequence: Synthetic peptide
  Seed: LRMKWMMAMKYPITA
LRMKMMMGMAYPNTA

SEQ ID NO: 236230 - protein, 15 aa, Artificial Sequence
  Description of Artificial Sequence: Synthetic peptide
  Seed: LRMKWMMAMKYPITA
LRMKMMMGMAYPQTA

SEQ ID NO: 236231 - protein, 15 aa, Artificial Sequence
  Description of Artificial Sequence: Synthetic peptide
  Seed: LRMKWMMAMKYPITA
LRMKMMMGMAYPRTA

SEQ ID NO: 236232 - protein, 15 aa, Artificial Sequence
  Description of Artificial Sequence: Synthetic peptide
  Seed: LRMKWMMAMKYPITA
LRMKMMMGMAYPSTA

SEQ ID NO: 236233 - protein, 15 aa, Artificial Sequence
  Description of Artificial Sequence: Synthetic peptide
  Seed: LRMKWMMAMKYPITA
LRMKMMMGMAYPTTA

SEQ ID NO: 236234 - protein, 15 aa, Artificial Sequence
  Description of Artificial Sequence: Synthetic peptide
  Seed: LRMKWMMAMKYPITA
LRMKMMMGMAYPVTA

SEQ ID NO: 236235 - protein, 15 aa, Artificial Sequence
  Description of Artificial Sequence: Synthetic peptide
  Seed: LRMKWMMAMKYPITA
LRMKMMMGMAYPYTA

SEQ ID NO: 236236 - protein, 15 aa, Artificial Sequence
  Description of Artificial Sequence: Synthetic peptide
  Seed: LRMKWMMAMKYPITA
LRMKMMMGMCYPATA

SEQ ID NO: 236237 - protein, 15 aa, Artificial Sequence
  Description of Artificial Sequence: Synthetic peptide
  Seed: LRMKWMMAMKYPITA
LRMKMMMGMCYPITA

SEQ ID NO: 236238 - protein, 15 aa, Artificial Sequence
  Description of Artificial Sequence: Synthetic peptide
  Seed: LRMKWMMAMKYPITA
LRMKMMMGMCYPLTA

SEQ ID NO: 236239 - protein, 15 aa, Artificial Sequence
  Description of Artificial Sequence: Synthetic peptide
  Seed: LRMKWMMAMKYPITA
LRMKMMMGMCYPMTA

SEQ ID NO: 236240 - protein, 15 aa, Artificial Sequence
  Description of Artificial Sequence: Synthetic peptide
  Seed: LRMKWMMAMKYPITA
LRMKMMMGMCYPSTA

SEQ ID NO: 236241 - protein, 15 aa, Artificial Sequence
  Description of Artificial Sequence: Synthetic peptide
  Seed: LRMKWMMAMKYPITA
LRMKMMMGMCYPVTA

SEQ ID NO: 236242 - protein, 15 aa, Artificial Sequence
  Description of Artificial Sequence: Synthetic peptide
  Seed: LRMKWMMAMKYPITA
LRMKMMMGMGYPATA

SEQ ID NO: 236243 - protein, 15 aa, Artificial Sequence
  Description of Artificial Sequence: Synthetic peptide
  Seed: LRMKWMMAMKYPITA
LRMKMMMGMGYPCTA

SEQ ID NO: 236244 - protein, 15 aa, Artificial Sequence
  Description of Artificial Sequence: Synthetic peptide
  Seed: LRMKWMMAMKYPITA
LRMKMMMGMGYPGTA

SEQ ID NO: 236245 - protein, 15 aa, Artificial Sequence
  Description of Artificial Sequence: Synthetic peptide
  Seed: LRMKWMMAMKYPITA
LRMKMMMGMGYPITA

SEQ ID NO: 236246 - protein, 15 aa, Artificial Sequence
  Description of Artificial Sequence: Synthetic peptide
  Seed: LRMKWMMAMKYPITA
LRMKMMMGMGYPLTA

SEQ ID NO: 236247 - protein, 15 aa, Artificial Sequence
  Description of Artificial Sequence: Synthetic peptide
  Seed: LRMKWMMAMKYPITA
LRMKMMMGMGYPMTA

SEQ ID NO: 236248 - protein, 15 aa, Artificial Sequence
  Description of Artificial Sequence: Synthetic peptide
  Seed: LRMKWMMAMKYPITA
LRMKMMMGMGYPSTA

SEQ ID NO: 236249 - protein, 15 aa, Artificial Sequence
  Description of Artificial Sequence: Synthetic peptide
  Seed: LRMKWMMAMKYPITA
LRMKMMMGMGYPTTA

SEQ ID NO: 236250 - protein, 15 aa, Artificial Sequence
  Description of Artificial Sequence: Synthetic peptide
  Seed: LRMKWMMAMKYPITA
LRMKMMMGMGYPVTA

SEQ ID NO: 236251 - protein, 15 aa, Artificial Sequence
  Description of Artificial Sequence: Synthetic peptide
  Seed: LRMKWMMAMKYPITA
LRMKMMMGMIYPATA

SEQ ID NO: 236252 - protein, 15 aa, Artificial Sequence
  Description of Artificial Sequence: Synthetic peptide
  Seed: LRMKWMMAMKYPITA
LRMKMMMGMIYPITA

SEQ ID NO: 236253 - protein, 15 aa, Artificial Sequence
  Description of Artificial Sequence: Synthetic peptide
  Seed: LRMKWMMAMKYPITA
LRMKMMMGMIYPLTA

SEQ ID NO: 236254 - protein, 15 aa, Artificial Sequence
  Description of Artificial Sequence: Synthetic peptide
  Seed: LRMKWMMAMKYPITA
LRMKMMMGMIYPMTA

SEQ ID NO: 236255 - protein, 15 aa, Artificial Sequence
  Description of Artificial Sequence: Synthetic peptide
  Seed: LRMKWMMAMKYPITA
LRMKMMMGMIYPNTA

SEQ ID NO: 236256 - protein, 15 aa, Artificial Sequence
  Description of Artificial Sequence: Synthetic peptide
  Seed: LRMKWMMAMKYPITA
LRMKMMMGMIYPSTA

SEQ ID NO: 236257 - protein, 15 aa, Artificial Sequence
  Description of Artificial Sequence: Synthetic peptide
  Seed: LRMKWMMAMKYPITA
LRMKMMMGMIYPVTA

SEQ ID NO: 236258 - protein, 15 aa, Artificial Sequence
  Description of Artificial Sequence: Synthetic peptide
  Seed: LRMKWMMAMKYPITA
LRMKMMMGMKYPATA

SEQ ID NO: 236259 - protein, 15 aa, Artificial Sequence
  Description of Artificial Sequence: Synthetic peptide
  Seed: LRMKWMMAMKYPITA
LRMKMMMGMKYPFTA

SEQ ID NO: 236260 - protein, 15 aa, Artificial Sequence
  Description of Artificial Sequence: Synthetic peptide
  Seed: LRMKWMMAMKYPITA
LRMKMMMGMKYPGTA

SEQ ID NO: 236261 - protein, 15 aa, Artificial Sequence
  Description of Artificial Sequence: Synthetic peptide
  Seed: LRMKWMMAMKYPITA
LRMKMMMGMKYPHTA

SEQ ID NO: 236262 - protein, 15 aa, Artificial Sequence
  Description of Artificial Sequence: Synthetic peptide
  Seed: LRMKWMMAMKYPITA
LRMKMMMGMKYPITA

SEQ ID NO: 236263 - protein, 15 aa, Artificial Sequence
  Description of Artificial Sequence: Synthetic peptide
  Seed: LRMKWMMAMKYPITA
LRMKMMMGMKYPKTA

SEQ ID NO: 236264 - protein, 15 aa, Artificial Sequence
  Description of Artificial Sequence: Synthetic peptide
  Seed: LRMKWMMAMKYPITA
LRMKMMMGMKYPLTA

SEQ ID NO: 236265 - protein, 15 aa, Artificial Sequence
  Description of Artificial Sequence: Synthetic peptide
  Seed: LRMKWMMAMKYPITA
LRMKMMMGMKYPMTA

SEQ ID NO: 236266 - protein, 15 aa, Artificial Sequence
  Description of Artificial Sequence: Synthetic peptide
  Seed: LRMKWMMAMKYPITA
LRMKMMMGMKYPQTA

SEQ ID NO: 236267 - protein, 15 aa, Artificial Sequence
  Description of Artificial Sequence: Synthetic peptide
  Seed: LRMKWMMAMKYPITA
LRMKMMMGMKYPRTA

SEQ ID NO: 236268 - protein, 15 aa, Artificial Sequence
  Description of Artificial Sequence: Synthetic peptide
  Seed: LRMKWMMAMKYPITA
LRMKMMMGMKYPSTA

SEQ ID NO: 236269 - protein, 15 aa, Artificial Sequence
  Description of Artificial Sequence: Synthetic peptide
  Seed: LRMKWMMAMKYPITA
LRMKMMMGMKYPVTA

SEQ ID NO: 236270 - protein, 15 aa, Artificial Sequence
  Description of Artificial Sequence: Synthetic peptide
  Seed: LRMKWMMAMKYPITA
LRMKMMMGMKYPYTA

SEQ ID NO: 236271 - protein, 15 aa, Artificial Sequence
  Description of Artificial Sequence: Synthetic peptide
  Seed: LRMKWMMAMKYPITA
LRMKMMMGMNYPATA

SEQ ID NO: 236272 - protein, 15 aa, Artificial Sequence
  Description of Artificial Sequence: Synthetic peptide
  Seed: LRMKWMMAMKYPITA
LRMKMMMGMNYPITA

SEQ ID NO: 236273 - protein, 15 aa, Artificial Sequence
  Description of Artificial Sequence: Synthetic peptide
  Seed: LRMKWMMAMKYPITA
LRMKMMMGMNYPLTA

SEQ ID NO: 236274 - protein, 15 aa, Artificial Sequence
  Description of Artificial Sequence: Synthetic peptide
  Seed: LRMKWMMAMKYPITA
LRMKMMMGMNYPMTA

SEQ ID NO: 236275 - protein, 15 aa, Artificial Sequence
  Description of Artificial Sequence: Synthetic peptide
  Seed: LRMKWMMAMKYPITA
LRMKMMMGMNYPTTA

SEQ ID NO: 236276 - protein, 15 aa, Artificial Sequence
  Description of Artificial Sequence: Synthetic peptide
  Seed: LRMKWMMAMKYPITA
LRMKMMMGMNYPVTA

SEQ ID NO: 236277 - protein, 15 aa, Artificial Sequence
  Description of Artificial Sequence: Synthetic peptide
  Seed: LRMKWMMAMKYPITA
LRMKMMMGMPYPATA

SEQ ID NO: 236278 - protein, 15 aa, Artificial Sequence
  Description of Artificial Sequence: Synthetic peptide
  Seed: LRMKWMMAMKYPITA
LRMKMMMGMPYPCTA

SEQ ID NO: 236279 - protein, 15 aa, Artificial Sequence
  Description of Artificial Sequence: Synthetic peptide
  Seed: LRMKWMMAMKYPITA
LRMKMMMGMPYPITA

SEQ ID NO: 236280 - protein, 15 aa, Artificial Sequence
  Description of Artificial Sequence: Synthetic peptide
  Seed: LRMKWMMAMKYPITA
LRMKMMMGMPYPLTA

SEQ ID NO: 236281 - protein, 15 aa, Artificial Sequence
  Description of Artificial Sequence: Synthetic peptide
  Seed: LRMKWMMAMKYPITA
LRMKMMMGMPYPMTA

SEQ ID NO: 236282 - protein, 15 aa, Artificial Sequence
  Description of Artificial Sequence: Synthetic peptide
  Seed: LRMKWMMAMKYPITA
LRMKMMMGMPYPNTA

SEQ ID NO: 236283 - protein, 15 aa, Artificial Sequence
  Description of Artificial Sequence: Synthetic peptide
  Seed: LRMKWMMAMKYPITA
LRMKMMMGMPYPQTA

SEQ ID NO: 236284 - protein, 15 aa, Artificial Sequence
  Description of Artificial Sequence: Synthetic peptide
  Seed: LRMKWMMAMKYPITA
LRMKMMMGMPYPSTA

SEQ ID NO: 236285 - protein, 15 aa, Artificial Sequence
  Description of Artificial Sequence: Synthetic peptide
  Seed: LRMKWMMAMKYPITA
LRMKMMMGMPYPTTA

SEQ ID NO: 236286 - protein, 15 aa, Artificial Sequence
  Description of Artificial Sequence: Synthetic peptide
  Seed: LRMKWMMAMKYPITA
LRMKMMMGMPYPVTA

SEQ ID NO: 236287 - protein, 15 aa, Artificial Sequence
  Description of Artificial Sequence: Synthetic peptide
  Seed: LRMKWMMAMKYPITA
LRMKMMMGMRYPATA

SEQ ID NO: 236288 - protein, 15 aa, Artificial Sequence
  Description of Artificial Sequence: Synthetic peptide
  Seed: LRMKWMMAMKYPITA
LRMKMMMGMRYPFTA

SEQ ID NO: 236289 - protein, 15 aa, Artificial Sequence
  Description of Artificial Sequence: Synthetic peptide
  Seed: LRMKWMMAMKYPITA
LRMKMMMGMRYPGTA

SEQ ID NO: 236290 - protein, 15 aa, Artificial Sequence
  Description of Artificial Sequence: Synthetic peptide
  Seed: LRMKWMMAMKYPITA
LRMKMMMGMRYPHTA

SEQ ID NO: 236291 - protein, 15 aa, Artificial Sequence
  Description of Artificial Sequence: Synthetic peptide
  Seed: LRMKWMMAMKYPITA
LRMKMMMGMRYPITA

SEQ ID NO: 236292 - protein, 15 aa, Artificial Sequence
  Description of Artificial Sequence: Synthetic peptide
  Seed: LRMKWMMAMKYPITA
LRMKMMMGMRYPKTA

SEQ ID NO: 236293 - protein, 15 aa, Artificial Sequence
  Description of Artificial Sequence: Synthetic peptide
  Seed: LRMKWMMAMKYPITA
LRMKMMMGMRYPLTA

SEQ ID NO: 236294 - protein, 15 aa, Artificial Sequence
  Description of Artificial Sequence: Synthetic peptide
  Seed: LRMKWMMAMKYPITA
LRMKMMMGMRYPMTA

SEQ ID NO: 236295 - protein, 15 aa, Artificial Sequence
  Description of Artificial Sequence: Synthetic peptide
  Seed: LRMKWMMAMKYPITA
LRMKMMMGMRYPNTA

SEQ ID NO: 236296 - protein, 15 aa, Artificial Sequence
  Description of Artificial Sequence: Synthetic peptide
  Seed: LRMKWMMAMKYPITA
LRMKMMMGMRYPQTA

SEQ ID NO: 236297 - protein, 15 aa, Artificial Sequence
  Description of Artificial Sequence: Synthetic peptide
  Seed: LRMKWMMAMKYPITA
LRMKMMMGMRYPRTA

SEQ ID NO: 236298 - protein, 15 aa, Artificial Sequence
  Description of Artificial Sequence: Synthetic peptide
  Seed: LRMKWMMAMKYPITA
LRMKMMMGMRYPSTA

SEQ ID NO: 236299 - protein, 15 aa, Artificial Sequence
  Description of Artificial Sequence: Synthetic peptide
  Seed: LRMKWMMAMKYPITA
LRMKMMMGMRYPTTA

SEQ ID NO: 236300 - protein, 15 aa, Artificial Sequence
  Description of Artificial Sequence: Synthetic peptide
  Seed: LRMKWMMAMKYPITA
LRMKMMMGMRYPVTA

SEQ ID NO: 236301 - protein, 15 aa, Artificial Sequence
  Description of Artificial Sequence: Synthetic peptide
  Seed: LRMKWMMAMKYPITA
LRMKMMMGMRYPYTA

SEQ ID NO: 236302 - protein, 15 aa, Artificial Sequence
  Description of Artificial Sequence: Synthetic peptide
  Seed: LRMKWMMAMKYPITA
LRMKMMMGMSYPATA

SEQ ID NO: 236303 - protein, 15 aa, Artificial Sequence
  Description of Artificial Sequence: Synthetic peptide
  Seed: LRMKWMMAMKYPITA
LRMKMMMGMSYPCTA

SEQ ID NO: 236304 - protein, 15 aa, Artificial Sequence
  Description of Artificial Sequence: Synthetic peptide
  Seed: LRMKWMMAMKYPITA
LRMKMMMGMSYPFTA

SEQ ID NO: 236305 - protein, 15 aa, Artificial Sequence
  Description of Artificial Sequence: Synthetic peptide
  Seed: LRMKWMMAMKYPITA
LRMKMMMGMSYPGTA

SEQ ID NO: 236306 - protein, 15 aa, Artificial Sequence
  Description of Artificial Sequence: Synthetic peptide
  Seed: LRMKWMMAMKYPITA
LRMKMMMGMSYPITA

SEQ ID NO: 236307 - protein, 15 aa, Artificial Sequence
  Description of Artificial Sequence: Synthetic peptide
  Seed: LRMKWMMAMKYPITA
LRMKMMMGMSYPLTA

SEQ ID NO: 236308 - protein, 15 aa, Artificial Sequence
  Description of Artificial Sequence: Synthetic peptide
  Seed: LRMKWMMAMKYPITA
LRMKMMMGMSYPMTA

SEQ ID NO: 236309 - protein, 15 aa, Artificial Sequence
  Description of Artificial Sequence: Synthetic peptide
  Seed: LRMKWMMAMKYPITA
LRMKMMMGMSYPSTA

SEQ ID NO: 236310 - protein, 15 aa, Artificial Sequence
  Description of Artificial Sequence: Synthetic peptide
  Seed: LRMKWMMAMKYPITA
LRMKMMMGMSYPTTA

SEQ ID NO: 236311 - protein, 15 aa, Artificial Sequence
  Description of Artificial Sequence: Synthetic peptide
  Seed: LRMKWMMAMKYPITA
LRMKMMMGMSYPVTA

SEQ ID NO: 236312 - protein, 15 aa, Artificial Sequence
  Description of Artificial Sequence: Synthetic peptide
  Seed: LRMKWMMAMKYPITA
LRMKMMMGMTYPATA

SEQ ID NO: 236313 - protein, 15 aa, Artificial Sequence
  Description of Artificial Sequence: Synthetic peptide
  Seed: LRMKWMMAMKYPITA
LRMKMMMGMTYPGTA

SEQ ID NO: 236314 - protein, 15 aa, Artificial Sequence
  Description of Artificial Sequence: Synthetic peptide
  Seed: LRMKWMMAMKYPITA
LRMKMMMGMTYPITA

SEQ ID NO: 236315 - protein, 15 aa, Artificial Sequence
  Description of Artificial Sequence: Synthetic peptide
  Seed: LRMKWMMAMKYPITA
LRMKMMMGMTYPLTA

SEQ ID NO: 236316 - protein, 15 aa, Artificial Sequence
  Description of Artificial Sequence: Synthetic peptide
  Seed: LRMKWMMAMKYPITA
LRMKMMMGMTYPMTA

SEQ ID NO: 236317 - protein, 15 aa, Artificial Sequence
  Description of Artificial Sequence: Synthetic peptide
  Seed: LRMKWMMAMKYPITA
LRMKMMMGMTYPNTA

SEQ ID NO: 236318 - protein, 15 aa, Artificial Sequence
  Description of Artificial Sequence: Synthetic peptide
  Seed: LRMKWMMAMKYPITA
LRMKMMMGMTYPSTA

SEQ ID NO: 236319 - protein, 15 aa, Artificial Sequence
  Description of Artificial Sequence: Synthetic peptide
  Seed: LRMKWMMAMKYPITA
LRMKMMMGMTYPTTA

SEQ ID NO: 236320 - protein, 15 aa, Artificial Sequence
  Description of Artificial Sequence: Synthetic peptide
  Seed: LRMKWMMAMKYPITA
LRMKMMMGMTYPVTA

SEQ ID NO: 236321 - protein, 15 aa, Artificial Sequence
  Description of Artificial Sequence: Synthetic peptide
  Seed: LRMKWMMAMKYPITA
LRMKMMMGMVYPATA

SEQ ID NO: 236322 - protein, 15 aa, Artificial Sequence
  Description of Artificial Sequence: Synthetic peptide
  Seed: LRMKWMMAMKYPITA
LRMKMMMGMVYPGTA

SEQ ID NO: 236323 - protein, 15 aa, Artificial Sequence
  Description of Artificial Sequence: Synthetic peptide
  Seed: LRMKWMMAMKYPITA
LRMKMMMGMVYPHTA

SEQ ID NO: 236324 - protein, 15 aa, Artificial Sequence
  Description of Artificial Sequence: Synthetic peptide
  Seed: LRMKWMMAMKYPITA
LRMKMMMGMVYPITA

SEQ ID NO: 236325 - protein, 15 aa, Artificial Sequence
  Description of Artificial Sequence: Synthetic peptide
  Seed: LRMKWMMAMKYPITA
LRMKMMMGMVYPLTA

SEQ ID NO: 236326 - protein, 15 aa, Artificial Sequence
  Description of Artificial Sequence: Synthetic peptide
  Seed: LRMKWMMAMKYPITA
LRMKMMMGMVYPMTA

SEQ ID NO: 236327 - protein, 15 aa, Artificial Sequence
  Description of Artificial Sequence: Synthetic peptide
  Seed: LRMKWMMAMKYPITA
LRMKMMMGMVYPNTA

SEQ ID NO: 236328 - protein, 15 aa, Artificial Sequence
  Description of Artificial Sequence: Synthetic peptide
  Seed: LRMKWMMAMKYPITA
LRMKMMMGMVYPQTA

SEQ ID NO: 236329 - protein, 15 aa, Artificial Sequence
  Description of Artificial Sequence: Synthetic peptide
  Seed: LRMKWMMAMKYPITA
LRMKMMMGMVYPSTA

SEQ ID NO: 236330 - protein, 15 aa, Artificial Sequence
  Description of Artificial Sequence: Synthetic peptide
  Seed: LRMKWMMAMKYPITA
LRMKMMMGMVYPTTA

SEQ ID NO: 236331 - protein, 15 aa, Artificial Sequence
  Description of Artificial Sequence: Synthetic peptide
  Seed: LRMKWMMAMKYPITA
LRMKMMMGMVYPVTA

SEQ ID NO: 236332 - protein, 15 aa, Artificial Sequence
  Description of Artificial Sequence: Synthetic peptide
  Seed: LRMKWMMAMKYPITA
LRMKMMMHMAYPATA

SEQ ID NO: 236333 - protein, 15 aa, Artificial Sequence
  Description of Artificial Sequence: Synthetic peptide
  Seed: LRMKWMMAMKYPITA
LRMKMMMHMAYPCTA

SEQ ID NO: 236334 - protein, 15 aa, Artificial Sequence
  Description of Artificial Sequence: Synthetic peptide
  Seed: LRMKWMMAMKYPITA
LRMKMMMHMAYPFTA

SEQ ID NO: 236335 - protein, 15 aa, Artificial Sequence
  Description of Artificial Sequence: Synthetic peptide
  Seed: LRMKWMMAMKYPITA
LRMKMMMHMAYPGTA

SEQ ID NO: 236336 - protein, 15 aa, Artificial Sequence
  Description of Artificial Sequence: Synthetic peptide
  Seed: LRMKWMMAMKYPITA
LRMKMMMHMAYPHTA

SEQ ID NO: 236337 - protein, 15 aa, Artificial Sequence
  Description of Artificial Sequence: Synthetic peptide
  Seed: LRMKWMMAMKYPITA
LRMKMMMHMAYPITA

SEQ ID NO: 236338 - protein, 15 aa, Artificial Sequence
  Description of Artificial Sequence: Synthetic peptide
  Seed: LRMKWMMAMKYPITA
LRMKMMMHMAYPKTA

SEQ ID NO: 236339 - protein, 15 aa, Artificial Sequence
  Description of Artificial Sequence: Synthetic peptide
  Seed: LRMKWMMAMKYPITA
LRMKMMMHMAYPLTA

SEQ ID NO: 236340 - protein, 15 aa, Artificial Sequence
  Description of Artificial Sequence: Synthetic peptide
  Seed: LRMKWMMAMKYPITA
LRMKMMMHMAYPMTA

SEQ ID NO: 236341 - protein, 15 aa, Artificial Sequence
  Description of Artificial Sequence: Synthetic peptide
  Seed: LRMKWMMAMKYPITA
LRMKMMMHMAYPQTA

SEQ ID NO: 236342 - protein, 15 aa, Artificial Sequence
  Description of Artificial Sequence: Synthetic peptide
  Seed: LRMKWMMAMKYPITA
LRMKMMMHMAYPRTA

SEQ ID NO: 236343 - protein, 15 aa, Artificial Sequence
  Description of Artificial Sequence: Synthetic peptide
  Seed: LRMKWMMAMKYPITA
LRMKMMMHMAYPSTA

SEQ ID NO: 236344 - protein, 15 aa, Artificial Sequence
  Description of Artificial Sequence: Synthetic peptide
  Seed: LRMKWMMAMKYPITA
LRMKMMMHMAYPTTA

SEQ ID NO: 236345 - protein, 15 aa, Artificial Sequence
  Description of Artificial Sequence: Synthetic peptide
  Seed: LRMKWMMAMKYPITA
LRMKMMMHMAYPVTA

SEQ ID NO: 236346 - protein, 15 aa, Artificial Sequence
  Description of Artificial Sequence: Synthetic peptide
  Seed: LRMKWMMAMKYPITA
LRMKMMMHMAYPYTA

SEQ ID NO: 236347 - protein, 15 aa, Artificial Sequence
  Description of Artificial Sequence: Synthetic peptide
  Seed: LRMKWMMAMKYPITA
LRMKMMMHMCYPRTA

SEQ ID NO: 236348 - protein, 15 aa, Artificial Sequence
  Description of Artificial Sequence: Synthetic peptide
  Seed: LRMKWMMAMKYPITA
LRMKMMMHMGYPATA

SEQ ID NO: 236349 - protein, 15 aa, Artificial Sequence
  Description of Artificial Sequence: Synthetic peptide
  Seed: LRMKWMMAMKYPITA
LRMKMMMHMGYPFTA

SEQ ID NO: 236350 - protein, 15 aa, Artificial Sequence
  Description of Artificial Sequence: Synthetic peptide
  Seed: LRMKWMMAMKYPITA
LRMKMMMHMGYPITA

SEQ ID NO: 236351 - protein, 15 aa, Artificial Sequence
  Description of Artificial Sequence: Synthetic peptide
  Seed: LRMKWMMAMKYPITA
LRMKMMMHMGYPKTA

SEQ ID NO: 236352 - protein, 15 aa, Artificial Sequence
  Description of Artificial Sequence: Synthetic peptide
  Seed: LRMKWMMAMKYPITA
LRMKMMMHMGYPLTA

SEQ ID NO: 236353 - protein, 15 aa, Artificial Sequence
  Description of Artificial Sequence: Synthetic peptide
  Seed: LRMKWMMAMKYPITA
LRMKMMMHMGYPMTA

SEQ ID NO: 236354 - protein, 15 aa, Artificial Sequence
  Description of Artificial Sequence: Synthetic peptide
  Seed: LRMKWMMAMKYPITA
LRMKMMMHMGYPRTA

SEQ ID NO: 236355 - protein, 15 aa, Artificial Sequence
  Description of Artificial Sequence: Synthetic peptide
  Seed: LRMKWMMAMKYPITA
LRMKMMMHMGYPSTA

SEQ ID NO: 236356 - protein, 15 aa, Artificial Sequence
  Description of Artificial Sequence: Synthetic peptide
  Seed: LRMKWMMAMKYPITA
LRMKMMMHMGYPTTA

SEQ ID NO: 236357 - protein, 15 aa, Artificial Sequence
  Description of Artificial Sequence: Synthetic peptide
  Seed: LRMKWMMAMKYPITA
LRMKMMMHMGYPVTA

SEQ ID NO: 236358 - protein, 15 aa, Artificial Sequence
  Description of Artificial Sequence: Synthetic peptide
  Seed: LRMKWMMAMKYPITA
LRMKMMMHMGYPYTA

SEQ ID NO: 236359 - protein, 15 aa, Artificial Sequence
  Description of Artificial Sequence: Synthetic peptide
  Seed: LRMKWMMAMKYPITA
LRMKMMMHMHYPATA

SEQ ID NO: 236360 - protein, 15 aa, Artificial Sequence
  Description of Artificial Sequence: Synthetic peptide
  Seed: LRMKWMMAMKYPITA
LRMKMMMHMHYPFTA

SEQ ID NO: 236361 - protein, 15 aa, Artificial Sequence
  Description of Artificial Sequence: Synthetic peptide
  Seed: LRMKWMMAMKYPITA
LRMKMMMHMHYPHTA

SEQ ID NO: 236362 - protein, 15 aa, Artificial Sequence
  Description of Artificial Sequence: Synthetic peptide
  Seed: LRMKWMMAMKYPITA
LRMKMMMHMHYPITA

SEQ ID NO: 236363 - protein, 15 aa, Artificial Sequence
  Description of Artificial Sequence: Synthetic peptide
  Seed: LRMKWMMAMKYPITA
LRMKMMMHMHYPKTA

SEQ ID NO: 236364 - protein, 15 aa, Artificial Sequence
  Description of Artificial Sequence: Synthetic peptide
  Seed: LRMKWMMAMKYPITA
LRMKMMMHMHYPLTA

SEQ ID NO: 236365 - protein, 15 aa, Artificial Sequence
  Description of Artificial Sequence: Synthetic peptide
  Seed: LRMKWMMAMKYPITA
LRMKMMMHMHYPMTA

SEQ ID NO: 236366 - protein, 15 aa, Artificial Sequence
  Description of Artificial Sequence: Synthetic peptide
  Seed: LRMKWMMAMKYPITA
LRMKMMMHMHYPQTA

SEQ ID NO: 236367 - protein, 15 aa, Artificial Sequence
  Description of Artificial Sequence: Synthetic peptide
  Seed: LRMKWMMAMKYPITA
LRMKMMMHMHYPRTA

SEQ ID NO: 236368 - protein, 15 aa, Artificial Sequence
  Description of Artificial Sequence: Synthetic peptide
  Seed: LRMKWMMAMKYPITA
LRMKMMMHMHYPSTA

SEQ ID NO: 236369 - protein, 15 aa, Artificial Sequence
  Description of Artificial Sequence: Synthetic peptide
  Seed: LRMKWMMAMKYPITA
LRMKMMMHMHYPTTA

SEQ ID NO: 236370 - protein, 15 aa, Artificial Sequence
  Description of Artificial Sequence: Synthetic peptide
  Seed: LRMKWMMAMKYPITA
LRMKMMMHMHYPVTA

SEQ ID NO: 236371 - protein, 15 aa, Artificial Sequence
  Description of Artificial Sequence: Synthetic peptide
  Seed: LRMKWMMAMKYPITA
LRMKMMMHMHYPWTA

SEQ ID NO: 236372 - protein, 15 aa, Artificial Sequence
  Description of Artificial Sequence: Synthetic peptide
  Seed: LRMKWMMAMKYPITA
LRMKMMMHMHYPYTA

SEQ ID NO: 236373 - protein, 15 aa, Artificial Sequence
  Description of Artificial Sequence: Synthetic peptide
  Seed: LRMKWMMAMKYPITA
LRMKMMMHMIYPATA

SEQ ID NO: 236374 - protein, 15 aa, Artificial Sequence
  Description of Artificial Sequence: Synthetic peptide
  Seed: LRMKWMMAMKYPITA
LRMKMMMHMIYPFTA

SEQ ID NO: 236375 - protein, 15 aa, Artificial Sequence
  Description of Artificial Sequence: Synthetic peptide
  Seed: LRMKWMMAMKYPITA
LRMKMMMHMIYPHTA

SEQ ID NO: 236376 - protein, 15 aa, Artificial Sequence
  Description of Artificial Sequence: Synthetic peptide
  Seed: LRMKWMMAMKYPITA
LRMKMMMHMIYPITA

SEQ ID NO: 236377 - protein, 15 aa, Artificial Sequence
  Description of Artificial Sequence: Synthetic peptide
  Seed: LRMKWMMAMKYPITA
LRMKMMMHMIYPKTA

SEQ ID NO: 236378 - protein, 15 aa, Artificial Sequence
  Description of Artificial Sequence: Synthetic peptide
  Seed: LRMKWMMAMKYPITA
LRMKMMMHMIYPLTA

SEQ ID NO: 236379 - protein, 15 aa, Artificial Sequence
  Description of Artificial Sequence: Synthetic peptide
  Seed: LRMKWMMAMKYPITA
LRMKMMMHMIYPMTA

SEQ ID NO: 236380 - protein, 15 aa, Artificial Sequence
  Description of Artificial Sequence: Synthetic peptide
  Seed: LRMKWMMAMKYPITA
LRMKMMMHMIYPRTA

SEQ ID NO: 236381 - protein, 15 aa, Artificial Sequence
  Description of Artificial Sequence: Synthetic peptide
  Seed: LRMKWMMAMKYPITA
LRMKMMMHMIYPSTA

SEQ ID NO: 236382 - protein, 15 aa, Artificial Sequence
  Description of Artificial Sequence: Synthetic peptide
  Seed: LRMKWMMAMKYPITA
LRMKMMMHMIYPVTA

SEQ ID NO: 236383 - protein, 15 aa, Artificial Sequence
  Description of Artificial Sequence: Synthetic peptide
  Seed: LRMKWMMAMKYPITA
LRMKMMMHMIYPYTA

SEQ ID NO: 236384 - protein, 15 aa, Artificial Sequence
  Description of Artificial Sequence: Synthetic peptide
  Seed: LRMKWMMAMKYPITA
LRMKMMMHMKYPATA

SEQ ID NO: 236385 - protein, 15 aa, Artificial Sequence
  Description of Artificial Sequence: Synthetic peptide
  Seed: LRMKWMMAMKYPITA
LRMKMMMHMKYPCTA

SEQ ID NO: 236386 - protein, 15 aa, Artificial Sequence
  Description of Artificial Sequence: Synthetic peptide
  Seed: LRMKWMMAMKYPITA
LRMKMMMHMKYPDTA

SEQ ID NO: 236387 - protein, 15 aa, Artificial Sequence
  Description of Artificial Sequence: Synthetic peptide
  Seed: LRMKWMMAMKYPITA
LRMKMMMHMKYPETA

SEQ ID NO: 236388 - protein, 15 aa, Artificial Sequence
  Description of Artificial Sequence: Synthetic peptide
  Seed: LRMKWMMAMKYPITA
LRMKMMMHMKYPFTA

SEQ ID NO: 236389 - protein, 15 aa, Artificial Sequence
  Description of Artificial Sequence: Synthetic peptide
  Seed: LRMKWMMAMKYPITA
LRMKMMMHMKYPGTA

SEQ ID NO: 236390 - protein, 15 aa, Artificial Sequence
  Description of Artificial Sequence: Synthetic peptide
  Seed: LRMKWMMAMKYPITA
LRMKMMMHMKYPHTA

SEQ ID NO: 236391 - protein, 15 aa, Artificial Sequence
  Description of Artificial Sequence: Synthetic peptide
  Seed: LRMKWMMAMKYPITA
LRMKMMMHMKYPITA

SEQ ID NO: 236392 - protein, 15 aa, Artificial Sequence
  Description of Artificial Sequence: Synthetic peptide
  Seed: LRMKWMMAMKYPITA
LRMKMMMHMKYPKTA

SEQ ID NO: 236393 - protein, 15 aa, Artificial Sequence
  Description of Artificial Sequence: Synthetic peptide
  Seed: LRMKWMMAMKYPITA
LRMKMMMHMKYPLTA

SEQ ID NO: 236394 - protein, 15 aa, Artificial Sequence
  Description of Artificial Sequence: Synthetic peptide
  Seed: LRMKWMMAMKYPITA
LRMKMMMHMKYPMTA

SEQ ID NO: 236395 - protein, 15 aa, Artificial Sequence
  Description of Artificial Sequence: Synthetic peptide
  Seed: LRMKWMMAMKYPITA
LRMKMMMHMKYPNTA

SEQ ID NO: 236396 - protein, 15 aa, Artificial Sequence
  Description of Artificial Sequence: Synthetic peptide
  Seed: LRMKWMMAMKYPITA
LRMKMMMHMKYPPTA

SEQ ID NO: 236397 - protein, 15 aa, Artificial Sequence
  Description of Artificial Sequence: Synthetic peptide
  Seed: LRMKWMMAMKYPITA
LRMKMMMHMKYPQTA

SEQ ID NO: 236398 - protein, 15 aa, Artificial Sequence
  Description of Artificial Sequence: Synthetic peptide
  Seed: LRMKWMMAMKYPITA
LRMKMMMHMKYPRTA

SEQ ID NO: 236399 - protein, 15 aa, Artificial Sequence
  Description of Artificial Sequence: Synthetic peptide
  Seed: LRMKWMMAMKYPITA
LRMKMMMHMKYPSTA

SEQ ID NO: 236400 - protein, 15 aa, Artificial Sequence
  Description of Artificial Sequence: Synthetic peptide
  Seed: LRMKWMMAMKYPITA
LRMKMMMHMKYPTTA

SEQ ID NO: 236401 - protein, 15 aa, Artificial Sequence
  Description of Artificial Sequence: Synthetic peptide
  Seed: LRMKWMMAMKYPITA
LRMKMMMHMKYPVTA

SEQ ID NO: 236402 - protein, 15 aa, Artificial Sequence
  Description of Artificial Sequence: Synthetic peptide
  Seed: LRMKWMMAMKYPITA
LRMKMMMHMKYPWTA

SEQ ID NO: 236403 - protein, 15 aa, Artificial Sequence
  Description of Artificial Sequence: Synthetic peptide
  Seed: LRMKWMMAMKYPITA
LRMKMMMHMKYPYTA

SEQ ID NO: 236404 - protein, 15 aa, Artificial Sequence
  Description of Artificial Sequence: Synthetic peptide
  Seed: LRMKWMMAMKYPITA
LRMKMMMHMLYPFTA

SEQ ID NO: 236405 - protein, 15 aa, Artificial Sequence
  Description of Artificial Sequence: Synthetic peptide
  Seed: LRMKWMMAMKYPITA
LRMKMMMHMLYPITA

SEQ ID NO: 236406 - protein, 15 aa, Artificial Sequence
  Description of Artificial Sequence: Synthetic peptide
  Seed: LRMKWMMAMKYPITA
LRMKMMMHMLYPKTA

SEQ ID NO: 236407 - protein, 15 aa, Artificial Sequence
  Description of Artificial Sequence: Synthetic peptide
  Seed: LRMKWMMAMKYPITA
LRMKMMMHMLYPLTA

SEQ ID NO: 236408 - protein, 15 aa, Artificial Sequence
  Description of Artificial Sequence: Synthetic peptide
  Seed: LRMKWMMAMKYPITA
LRMKMMMHMLYPMTA

SEQ ID NO: 236409 - protein, 15 aa, Artificial Sequence
  Description of Artificial Sequence: Synthetic peptide
  Seed: LRMKWMMAMKYPITA
LRMKMMMHMLYPRTA

SEQ ID NO: 236410 - protein, 15 aa, Artificial Sequence
  Description of Artificial Sequence: Synthetic peptide
  Seed: LRMKWMMAMKYPITA
LRMKMMMHMLYPVTA

SEQ ID NO: 236411 - protein, 15 aa, Artificial Sequence
  Description of Artificial Sequence: Synthetic peptide
  Seed: LRMKWMMAMKYPITA
LRMKMMMHMLYPYTA

SEQ ID NO: 236412 - protein, 15 aa, Artificial Sequence
  Description of Artificial Sequence: Synthetic peptide
  Seed: LRMKWMMAMKYPITA
LRMKMMMHMMYPITA

SEQ ID NO: 236413 - protein, 15 aa, Artificial Sequence
  Description of Artificial Sequence: Synthetic peptide
  Seed: LRMKWMMAMKYPITA
LRMKMMMHMMYPKTA

SEQ ID NO: 236414 - protein, 15 aa, Artificial Sequence
  Description of Artificial Sequence: Synthetic peptide
  Seed: LRMKWMMAMKYPITA
LRMKMMMHMMYPLTA

SEQ ID NO: 236415 - protein, 15 aa, Artificial Sequence
  Description of Artificial Sequence: Synthetic peptide
  Seed: LRMKWMMAMKYPITA
LRMKMMMHMMYPRTA

SEQ ID NO: 236416 - protein, 15 aa, Artificial Sequence
  Description of Artificial Sequence: Synthetic peptide
  Seed: LRMKWMMAMKYPITA
LRMKMMMHMMYPVTA

SEQ ID NO: 236417 - protein, 15 aa, Artificial Sequence
  Description of Artificial Sequence: Synthetic peptide
  Seed: LRMKWMMAMKYPITA
LRMKMMMHMMYPYTA

SEQ ID NO: 236418 - protein, 15 aa, Artificial Sequence
  Description of Artificial Sequence: Synthetic peptide
  Seed: LRMKWMMAMKYPITA
LRMKMMMHMNYPATA

SEQ ID NO: 236419 - protein, 15 aa, Artificial Sequence
  Description of Artificial Sequence: Synthetic peptide
  Seed: LRMKWMMAMKYPITA
LRMKMMMHMNYPFTA

SEQ ID NO: 236420 - protein, 15 aa, Artificial Sequence
  Description of Artificial Sequence: Synthetic peptide
  Seed: LRMKWMMAMKYPITA
LRMKMMMHMNYPHTA

SEQ ID NO: 236421 - protein, 15 aa, Artificial Sequence
  Description of Artificial Sequence: Synthetic peptide
  Seed: LRMKWMMAMKYPITA
LRMKMMMHMNYPITA

SEQ ID NO: 236422 - protein, 15 aa, Artificial Sequence
  Description of Artificial Sequence: Synthetic peptide
  Seed: LRMKWMMAMKYPITA
LRMKMMMHMNYPKTA

SEQ ID NO: 236423 - protein, 15 aa, Artificial Sequence
  Description of Artificial Sequence: Synthetic peptide
  Seed: LRMKWMMAMKYPITA
LRMKMMMHMNYPLTA

SEQ ID NO: 236424 - protein, 15 aa, Artificial Sequence
  Description of Artificial Sequence: Synthetic peptide
  Seed: LRMKWMMAMKYPITA
LRMKMMMHMNYPMTA

SEQ ID NO: 236425 - protein, 15 aa, Artificial Sequence
  Description of Artificial Sequence: Synthetic peptide
  Seed: LRMKWMMAMKYPITA
LRMKMMMHMNYPRTA

SEQ ID NO: 236426 - protein, 15 aa, Artificial Sequence
  Description of Artificial Sequence: Synthetic peptide
  Seed: LRMKWMMAMKYPITA
LRMKMMMHMNYPSTA

SEQ ID NO: 236427 - protein, 15 aa, Artificial Sequence
  Description of Artificial Sequence: Synthetic peptide
  Seed: LRMKWMMAMKYPITA
LRMKMMMHMNYPTTA

SEQ ID NO: 236428 - protein, 15 aa, Artificial Sequence
  Description of Artificial Sequence: Synthetic peptide
  Seed: LRMKWMMAMKYPITA
LRMKMMMHMNYPVTA

SEQ ID NO: 236429 - protein, 15 aa, Artificial Sequence
  Description of Artificial Sequence: Synthetic peptide
  Seed: LRMKWMMAMKYPITA
LRMKMMMHMNYPYTA

SEQ ID NO: 236430 - protein, 15 aa, Artificial Sequence
  Description of Artificial Sequence: Synthetic peptide
  Seed: LRMKWMMAMKYPITA
LRMKMMMHMPYPATA

SEQ ID NO: 236431 - protein, 15 aa, Artificial Sequence
  Description of Artificial Sequence: Synthetic peptide
  Seed: LRMKWMMAMKYPITA
LRMKMMMHMPYPFTA

SEQ ID NO: 236432 - protein, 15 aa, Artificial Sequence
  Description of Artificial Sequence: Synthetic peptide
  Seed: LRMKWMMAMKYPITA
LRMKMMMHMPYPITA

SEQ ID NO: 236433 - protein, 15 aa, Artificial Sequence
  Description of Artificial Sequence: Synthetic peptide
  Seed: LRMKWMMAMKYPITA
LRMKMMMHMPYPKTA

SEQ ID NO: 236434 - protein, 15 aa, Artificial Sequence
  Description of Artificial Sequence: Synthetic peptide
  Seed: LRMKWMMAMKYPITA
LRMKMMMHMPYPLTA

SEQ ID NO: 236435 - protein, 15 aa, Artificial Sequence
  Description of Artificial Sequence: Synthetic peptide
  Seed: LRMKWMMAMKYPITA
LRMKMMMHMPYPMTA

SEQ ID NO: 236436 - protein, 15 aa, Artificial Sequence
  Description of Artificial Sequence: Synthetic peptide
  Seed: LRMKWMMAMKYPITA
LRMKMMMHMPYPRTA

SEQ ID NO: 236437 - protein, 15 aa, Artificial Sequence
  Description of Artificial Sequence: Synthetic peptide
  Seed: LRMKWMMAMKYPITA
LRMKMMMHMPYPVTA

SEQ ID NO: 236438 - protein, 15 aa, Artificial Sequence
  Description of Artificial Sequence: Synthetic peptide
  Seed: LRMKWMMAMKYPITA
LRMKMMMHMPYPYTA

SEQ ID NO: 236439 - protein, 15 aa, Artificial Sequence
  Description of Artificial Sequence: Synthetic peptide
  Seed: LRMKWMMAMKYPITA
LRMKMMMHMQYPATA

SEQ ID NO: 236440 - protein, 15 aa, Artificial Sequence
  Description of Artificial Sequence: Synthetic peptide
  Seed: LRMKWMMAMKYPITA
LRMKMMMHMQYPFTA

SEQ ID NO: 236441 - protein, 15 aa, Artificial Sequence
  Description of Artificial Sequence: Synthetic peptide
  Seed: LRMKWMMAMKYPITA
LRMKMMMHMQYPHTA

SEQ ID NO: 236442 - protein, 15 aa, Artificial Sequence
  Description of Artificial Sequence: Synthetic peptide
  Seed: LRMKWMMAMKYPITA
LRMKMMMHMQYPITA

SEQ ID NO: 236443 - protein, 15 aa, Artificial Sequence
  Description of Artificial Sequence: Synthetic peptide
  Seed: LRMKWMMAMKYPITA
LRMKMMMHMQYPKTA

SEQ ID NO: 236444 - protein, 15 aa, Artificial Sequence
  Description of Artificial Sequence: Synthetic peptide
  Seed: LRMKWMMAMKYPITA
LRMKMMMHMQYPLTA

SEQ ID NO: 236445 - protein, 15 aa, Artificial Sequence
  Description of Artificial Sequence: Synthetic peptide
  Seed: LRMKWMMAMKYPITA
LRMKMMMHMQYPMTA

SEQ ID NO: 236446 - protein, 15 aa, Artificial Sequence
  Description of Artificial Sequence: Synthetic peptide
  Seed: LRMKWMMAMKYPITA
LRMKMMMHMQYPRTA

SEQ ID NO: 236447 - protein, 15 aa, Artificial Sequence
  Description of Artificial Sequence: Synthetic peptide
  Seed: LRMKWMMAMKYPITA
LRMKMMMHMQYPVTA

SEQ ID NO: 236448 - protein, 15 aa, Artificial Sequence
  Description of Artificial Sequence: Synthetic peptide
  Seed: LRMKWMMAMKYPITA
LRMKMMMHMQYPYTA

SEQ ID NO: 236449 - protein, 15 aa, Artificial Sequence
  Description of Artificial Sequence: Synthetic peptide
  Seed: LRMKWMMAMKYPITA
LRMKMMMHMRYPATA

SEQ ID NO: 236450 - protein, 15 aa, Artificial Sequence
  Description of Artificial Sequence: Synthetic peptide
  Seed: LRMKWMMAMKYPITA
LRMKMMMHMRYPCTA

SEQ ID NO: 236451 - protein, 15 aa, Artificial Sequence
  Description of Artificial Sequence: Synthetic peptide
  Seed: LRMKWMMAMKYPITA
LRMKMMMHMRYPDTA

SEQ ID NO: 236452 - protein, 15 aa, Artificial Sequence
  Description of Artificial Sequence: Synthetic peptide
  Seed: LRMKWMMAMKYPITA
LRMKMMMHMRYPETA

SEQ ID NO: 236453 - protein, 15 aa, Artificial Sequence
  Description of Artificial Sequence: Synthetic peptide
  Seed: LRMKWMMAMKYPITA
LRMKMMMHMRYPFTA

SEQ ID NO: 236454 - protein, 15 aa, Artificial Sequence
  Description of Artificial Sequence: Synthetic peptide
  Seed: LRMKWMMAMKYPITA
LRMKMMMHMRYPGTA

SEQ ID NO: 236455 - protein, 15 aa, Artificial Sequence
  Description of Artificial Sequence: Synthetic peptide
  Seed: LRMKWMMAMKYPITA
LRMKMMMHMRYPHTA

SEQ ID NO: 236456 - protein, 15 aa, Artificial Sequence
  Description of Artificial Sequence: Synthetic peptide
  Seed: LRMKWMMAMKYPITA
LRMKMMMHMRYPITA

SEQ ID NO: 236457 - protein, 15 aa, Artificial Sequence
  Description of Artificial Sequence: Synthetic peptide
  Seed: LRMKWMMAMKYPITA
LRMKMMMHMRYPKTA

SEQ ID NO: 236458 - protein, 15 aa, Artificial Sequence
  Description of Artificial Sequence: Synthetic peptide
  Seed: LRMKWMMAMKYPITA
LRMKMMMHMRYPLTA

SEQ ID NO: 236459 - protein, 15 aa, Artificial Sequence
  Description of Artificial Sequence: Synthetic peptide
  Seed: LRMKWMMAMKYPITA
LRMKMMMHMRYPMTA

SEQ ID NO: 236460 - protein, 15 aa, Artificial Sequence
  Description of Artificial Sequence: Synthetic peptide
  Seed: LRMKWMMAMKYPITA
LRMKMMMHMRYPNTA

SEQ ID NO: 236461 - protein, 15 aa, Artificial Sequence
  Description of Artificial Sequence: Synthetic peptide
  Seed: LRMKWMMAMKYPITA
LRMKMMMHMRYPPTA

SEQ ID NO: 236462 - protein, 15 aa, Artificial Sequence
  Description of Artificial Sequence: Synthetic peptide
  Seed: LRMKWMMAMKYPITA
LRMKMMMHMRYPQTA

SEQ ID NO: 236463 - protein, 15 aa, Artificial Sequence
  Description of Artificial Sequence: Synthetic peptide
  Seed: LRMKWMMAMKYPITA
LRMKMMMHMRYPRTA

SEQ ID NO: 236464 - protein, 15 aa, Artificial Sequence
  Description of Artificial Sequence: Synthetic peptide
  Seed: LRMKWMMAMKYPITA
LRMKMMMHMRYPSTA

SEQ ID NO: 236465 - protein, 15 aa, Artificial Sequence
  Description of Artificial Sequence: Synthetic peptide
  Seed: LRMKWMMAMKYPITA
LRMKMMMHMRYPTTA

SEQ ID NO: 236466 - protein, 15 aa, Artificial Sequence
  Description of Artificial Sequence: Synthetic peptide
  Seed: LRMKWMMAMKYPITA
LRMKMMMHMRYPVTA

SEQ ID NO: 236467 - protein, 15 aa, Artificial Sequence
  Description of Artificial Sequence: Synthetic peptide
  Seed: LRMKWMMAMKYPITA
LRMKMMMHMRYPWTA

SEQ ID NO: 236468 - protein, 15 aa, Artificial Sequence
  Description of Artificial Sequence: Synthetic peptide
  Seed: LRMKWMMAMKYPITA
LRMKMMMHMRYPYTA

SEQ ID NO: 236469 - protein, 15 aa, Artificial Sequence
  Description of Artificial Sequence: Synthetic peptide
  Seed: LRMKWMMAMKYPITA
LRMKMMMHMSYPATA

SEQ ID NO: 236470 - protein, 15 aa, Artificial Sequence
  Description of Artificial Sequence: Synthetic peptide
  Seed: LRMKWMMAMKYPITA
LRMKMMMHMSYPFTA

SEQ ID NO: 236471 - protein, 15 aa, Artificial Sequence
  Description of Artificial Sequence: Synthetic peptide
  Seed: LRMKWMMAMKYPITA
LRMKMMMHMSYPGTA

SEQ ID NO: 236472 - protein, 15 aa, Artificial Sequence
  Description of Artificial Sequence: Synthetic peptide
  Seed: LRMKWMMAMKYPITA
LRMKMMMHMSYPHTA

SEQ ID NO: 236473 - protein, 15 aa, Artificial Sequence
  Description of Artificial Sequence: Synthetic peptide
  Seed: LRMKWMMAMKYPITA
LRMKMMMHMSYPITA

SEQ ID NO: 236474 - protein, 15 aa, Artificial Sequence
  Description of Artificial Sequence: Synthetic peptide
  Seed: LRMKWMMAMKYPITA
LRMKMMMHMSYPKTA

SEQ ID NO: 236475 - protein, 15 aa, Artificial Sequence
  Description of Artificial Sequence: Synthetic peptide
  Seed: LRMKWMMAMKYPITA
LRMKMMMHMSYPLTA

SEQ ID NO: 236476 - protein, 15 aa, Artificial Sequence
  Description of Artificial Sequence: Synthetic peptide
  Seed: LRMKWMMAMKYPITA
LRMKMMMHMSYPMTA

SEQ ID NO: 236477 - protein, 15 aa, Artificial Sequence
  Description of Artificial Sequence: Synthetic peptide
  Seed: LRMKWMMAMKYPITA
LRMKMMMHMSYPQTA

SEQ ID NO: 236478 - protein, 15 aa, Artificial Sequence
  Description of Artificial Sequence: Synthetic peptide
  Seed: LRMKWMMAMKYPITA
LRMKMMMHMSYPRTA

SEQ ID NO: 236479 - protein, 15 aa, Artificial Sequence
  Description of Artificial Sequence: Synthetic peptide
  Seed: LRMKWMMAMKYPITA
LRMKMMMHMSYPSTA

SEQ ID NO: 236480 - protein, 15 aa, Artificial Sequence
  Description of Artificial Sequence: Synthetic peptide
  Seed: LRMKWMMAMKYPITA
LRMKMMMHMSYPTTA

SEQ ID NO: 236481 - protein, 15 aa, Artificial Sequence
  Description of Artificial Sequence: Synthetic peptide
  Seed: LRMKWMMAMKYPITA
LRMKMMMHMSYPVTA

SEQ ID NO: 236482 - protein, 15 aa, Artificial Sequence
  Description of Artificial Sequence: Synthetic peptide
  Seed: LRMKWMMAMKYPITA
LRMKMMMHMSYPWTA

SEQ ID NO: 236483 - protein, 15 aa, Artificial Sequence
  Description of Artificial Sequence: Synthetic peptide
  Seed: LRMKWMMAMKYPITA
LRMKMMMHMSYPYTA

SEQ ID NO: 236484 - protein, 15 aa, Artificial Sequence
  Description of Artificial Sequence: Synthetic peptide
  Seed: LRMKWMMAMKYPITA
LRMKMMMHMTYPATA

SEQ ID NO: 236485 - protein, 15 aa, Artificial Sequence
  Description of Artificial Sequence: Synthetic peptide
  Seed: LRMKWMMAMKYPITA
LRMKMMMHMTYPFTA

SEQ ID NO: 236486 - protein, 15 aa, Artificial Sequence
  Description of Artificial Sequence: Synthetic peptide
  Seed: LRMKWMMAMKYPITA
LRMKMMMHMTYPHTA

SEQ ID NO: 236487 - protein, 15 aa, Artificial Sequence
  Description of Artificial Sequence: Synthetic peptide
  Seed: LRMKWMMAMKYPITA
LRMKMMMHMTYPITA

SEQ ID NO: 236488 - protein, 15 aa, Artificial Sequence
  Description of Artificial Sequence: Synthetic peptide
  Seed: LRMKWMMAMKYPITA
LRMKMMMHMTYPKTA

SEQ ID NO: 236489 - protein, 15 aa, Artificial Sequence
  Description of Artificial Sequence: Synthetic peptide
  Seed: LRMKWMMAMKYPITA
LRMKMMMHMTYPLTA

SEQ ID NO: 236490 - protein, 15 aa, Artificial Sequence
  Description of Artificial Sequence: Synthetic peptide
  Seed: LRMKWMMAMKYPITA
LRMKMMMHMTYPMTA

SEQ ID NO: 236491 - protein, 15 aa, Artificial Sequence
  Description of Artificial Sequence: Synthetic peptide
  Seed: LRMKWMMAMKYPITA
LRMKMMMHMTYPRTA

SEQ ID NO: 236492 - protein, 15 aa, Artificial Sequence
  Description of Artificial Sequence: Synthetic peptide
  Seed: LRMKWMMAMKYPITA
LRMKMMMHMTYPSTA

SEQ ID NO: 236493 - protein, 15 aa, Artificial Sequence
  Description of Artificial Sequence: Synthetic peptide
  Seed: LRMKWMMAMKYPITA
LRMKMMMHMTYPVTA

SEQ ID NO: 236494 - protein, 15 aa, Artificial Sequence
  Description of Artificial Sequence: Synthetic peptide
  Seed: LRMKWMMAMKYPITA
LRMKMMMHMTYPWTA

SEQ ID NO: 236495 - protein, 15 aa, Artificial Sequence
  Description of Artificial Sequence: Synthetic peptide
  Seed: LRMKWMMAMKYPITA
LRMKMMMHMTYPYTA

SEQ ID NO: 236496 - protein, 15 aa, Artificial Sequence
  Description of Artificial Sequence: Synthetic peptide
  Seed: LRMKWMMAMKYPITA
LRMKMMMHMVYPATA

SEQ ID NO: 236497 - protein, 15 aa, Artificial Sequence
  Description of Artificial Sequence: Synthetic peptide
  Seed: LRMKWMMAMKYPITA
LRMKMMMHMVYPFTA

SEQ ID NO: 236498 - protein, 15 aa, Artificial Sequence
  Description of Artificial Sequence: Synthetic peptide
  Seed: LRMKWMMAMKYPITA
LRMKMMMHMVYPHTA

SEQ ID NO: 236499 - protein, 15 aa, Artificial Sequence
  Description of Artificial Sequence: Synthetic peptide
  Seed: LRMKWMMAMKYPITA
LRMKMMMHMVYPITA

SEQ ID NO: 236500 - protein, 15 aa, Artificial Sequence
  Description of Artificial Sequence: Synthetic peptide
  Seed: LRMKWMMAMKYPITA
LRMKMMMHMVYPKTA

SEQ ID NO: 236501 - protein, 15 aa, Artificial Sequence
  Description of Artificial Sequence: Synthetic peptide
  Seed: LRMKWMMAMKYPITA
LRMKMMMHMVYPLTA

SEQ ID NO: 236502 - protein, 15 aa, Artificial Sequence
  Description of Artificial Sequence: Synthetic peptide
  Seed: LRMKWMMAMKYPITA
LRMKMMMHMVYPMTA

SEQ ID NO: 236503 - protein, 15 aa, Artificial Sequence
  Description of Artificial Sequence: Synthetic peptide
  Seed: LRMKWMMAMKYPITA
LRMKMMMHMVYPNTA

SEQ ID NO: 236504 - protein, 15 aa, Artificial Sequence
  Description of Artificial Sequence: Synthetic peptide
  Seed: LRMKWMMAMKYPITA
LRMKMMMHMVYPRTA

SEQ ID NO: 236505 - protein, 15 aa, Artificial Sequence
  Description of Artificial Sequence: Synthetic peptide
  Seed: LRMKWMMAMKYPITA
LRMKMMMHMVYPSTA

SEQ ID NO: 236506 - protein, 15 aa, Artificial Sequence
  Description of Artificial Sequence: Synthetic peptide
  Seed: LRMKWMMAMKYPITA
LRMKMMMHMVYPTTA

SEQ ID NO: 236507 - protein, 15 aa, Artificial Sequence
  Description of Artificial Sequence: Synthetic peptide
  Seed: LRMKWMMAMKYPITA
LRMKMMMHMVYPVTA

SEQ ID NO: 236508 - protein, 15 aa, Artificial Sequence
  Description of Artificial Sequence: Synthetic peptide
  Seed: LRMKWMMAMKYPITA
LRMKMMMHMVYPYTA

SEQ ID NO: 236509 - protein, 15 aa, Artificial Sequence
  Description of Artificial Sequence: Synthetic peptide
  Seed: LRMKWMMAMKYPITA
LRMKMMMHMWYPRTA

SEQ ID NO: 236510 - protein, 15 aa, Artificial Sequence
  Description of Artificial Sequence: Synthetic peptide
  Seed: LRMKWMMAMKYPITA
LRMKMMMIMAYPATA

SEQ ID NO: 236511 - protein, 15 aa, Artificial Sequence
  Description of Artificial Sequence: Synthetic peptide
  Seed: LRMKWMMAMKYPITA
LRMKMMMIMAYPCTA

SEQ ID NO: 236512 - protein, 15 aa, Artificial Sequence
  Description of Artificial Sequence: Synthetic peptide
  Seed: LRMKWMMAMKYPITA
LRMKMMMIMAYPDTA

SEQ ID NO: 236513 - protein, 15 aa, Artificial Sequence
  Description of Artificial Sequence: Synthetic peptide
  Seed: LRMKWMMAMKYPITA
LRMKMMMIMAYPETA

SEQ ID NO: 236514 - protein, 15 aa, Artificial Sequence
  Description of Artificial Sequence: Synthetic peptide
  Seed: LRMKWMMAMKYPITA
LRMKMMMIMAYPFTA

SEQ ID NO: 236515 - protein, 15 aa, Artificial Sequence
  Description of Artificial Sequence: Synthetic peptide
  Seed: LRMKWMMAMKYPITA
LRMKMMMIMAYPGTA

SEQ ID NO: 236516 - protein, 15 aa, Artificial Sequence
  Description of Artificial Sequence: Synthetic peptide
  Seed: LRMKWMMAMKYPITA
LRMKMMMIMAYPHTA

SEQ ID NO: 236517 - protein, 15 aa, Artificial Sequence
  Description of Artificial Sequence: Synthetic peptide
  Seed: LRMKWMMAMKYPITA
LRMKMMMIMAYPITA

SEQ ID NO: 236518 - protein, 15 aa, Artificial Sequence
  Description of Artificial Sequence: Synthetic peptide
  Seed: LRMKWMMAMKYPITA
LRMKMMMIMAYPKTA

SEQ ID NO: 236519 - protein, 15 aa, Artificial Sequence
  Description of Artificial Sequence: Synthetic peptide
  Seed: LRMKWMMAMKYPITA
LRMKMMMIMAYPLTA

SEQ ID NO: 236520 - protein, 15 aa, Artificial Sequence
  Description of Artificial Sequence: Synthetic peptide
  Seed: LRMKWMMAMKYPITA
LRMKMMMIMAYPMTA

SEQ ID NO: 236521 - protein, 15 aa, Artificial Sequence
  Description of Artificial Sequence: Synthetic peptide
  Seed: LRMKWMMAMKYPITA
LRMKMMMIMAYPNTA

SEQ ID NO: 236522 - protein, 15 aa, Artificial Sequence
  Description of Artificial Sequence: Synthetic peptide
  Seed: LRMKWMMAMKYPITA
LRMKMMMIMAYPPTA

SEQ ID NO: 236523 - protein, 15 aa, Artificial Sequence
  Description of Artificial Sequence: Synthetic peptide
  Seed: LRMKWMMAMKYPITA
LRMKMMMIMAYPQTA

SEQ ID NO: 236524 - protein, 15 aa, Artificial Sequence
  Description of Artificial Sequence: Synthetic peptide
  Seed: LRMKWMMAMKYPITA
LRMKMMMIMAYPRTA

SEQ ID NO: 236525 - protein, 15 aa, Artificial Sequence
  Description of Artificial Sequence: Synthetic peptide
  Seed: LRMKWMMAMKYPITA
LRMKMMMIMAYPSTA

SEQ ID NO: 236526 - protein, 15 aa, Artificial Sequence
  Description of Artificial Sequence: Synthetic peptide
  Seed: LRMKWMMAMKYPITA
LRMKMMMIMAYPTTA

SEQ ID NO: 236527 - protein, 15 aa, Artificial Sequence
  Description of Artificial Sequence: Synthetic peptide
  Seed: LRMKWMMAMKYPITA
LRMKMMMIMAYPVTA

SEQ ID NO: 236528 - protein, 15 aa, Artificial Sequence
  Description of Artificial Sequence: Synthetic peptide
  Seed: LRMKWMMAMKYPITA
LRMKMMMIMAYPYTA

SEQ ID NO: 236529 - protein, 15 aa, Artificial Sequence
  Description of Artificial Sequence: Synthetic peptide
  Seed: LRMKWMMAMKYPITA
LRMKMMMIMCYPATA

SEQ ID NO: 236530 - protein, 15 aa, Artificial Sequence
  Description of Artificial Sequence: Synthetic peptide
  Seed: LRMKWMMAMKYPITA
LRMKMMMIMCYPVTA

SEQ ID NO: 236531 - protein, 15 aa, Artificial Sequence
  Description of Artificial Sequence: Synthetic peptide
  Seed: LRMKWMMAMKYPITA
LRMKMMMIMDYPATA

SEQ ID NO: 236532 - protein, 15 aa, Artificial Sequence
  Description of Artificial Sequence: Synthetic peptide
  Seed: LRMKWMMAMKYPITA
LRMKMMMIMEYPATA

SEQ ID NO: 236533 - protein, 15 aa, Artificial Sequence
  Description of Artificial Sequence: Synthetic peptide
  Seed: LRMKWMMAMKYPITA
LRMKMMMIMEYPLTA

SEQ ID NO: 236534 - protein, 15 aa, Artificial Sequence
  Description of Artificial Sequence: Synthetic peptide
  Seed: LRMKWMMAMKYPITA
LRMKMMMIMEYPSTA

SEQ ID NO: 236535 - protein, 15 aa, Artificial Sequence
  Description of Artificial Sequence: Synthetic peptide
  Seed: LRMKWMMAMKYPITA
LRMKMMMIMEYPVTA

SEQ ID NO: 236536 - protein, 15 aa, Artificial Sequence
  Description of Artificial Sequence: Synthetic peptide
  Seed: LRMKWMMAMKYPITA
LRMKMMMIMGYPATA

SEQ ID NO: 236537 - protein, 15 aa, Artificial Sequence
  Description of Artificial Sequence: Synthetic peptide
  Seed: LRMKWMMAMKYPITA
LRMKMMMIMGYPCTA

SEQ ID NO: 236538 - protein, 15 aa, Artificial Sequence
  Description of Artificial Sequence: Synthetic peptide
  Seed: LRMKWMMAMKYPITA
LRMKMMMIMGYPDTA

SEQ ID NO: 236539 - protein, 15 aa, Artificial Sequence
  Description of Artificial Sequence: Synthetic peptide
  Seed: LRMKWMMAMKYPITA
LRMKMMMIMGYPETA

SEQ ID NO: 236540 - protein, 15 aa, Artificial Sequence
  Description of Artificial Sequence: Synthetic peptide
  Seed: LRMKWMMAMKYPITA
LRMKMMMIMGYPFTA

SEQ ID NO: 236541 - protein, 15 aa, Artificial Sequence
  Description of Artificial Sequence: Synthetic peptide
  Seed: LRMKWMMAMKYPITA
LRMKMMMIMGYPGTA

SEQ ID NO: 236542 - protein, 15 aa, Artificial Sequence
  Description of Artificial Sequence: Synthetic peptide
  Seed: LRMKWMMAMKYPITA
LRMKMMMIMGYPHTA

SEQ ID NO: 236543 - protein, 15 aa, Artificial Sequence
  Description of Artificial Sequence: Synthetic peptide
  Seed: LRMKWMMAMKYPITA
LRMKMMMIMGYPITA

SEQ ID NO: 236544 - protein, 15 aa, Artificial Sequence
  Description of Artificial Sequence: Synthetic peptide
  Seed: LRMKWMMAMKYPITA
LRMKMMMIMGYPKTA

SEQ ID NO: 236545 - protein, 15 aa, Artificial Sequence
  Description of Artificial Sequence: Synthetic peptide
  Seed: LRMKWMMAMKYPITA
LRMKMMMIMGYPLTA

SEQ ID NO: 236546 - protein, 15 aa, Artificial Sequence
  Description of Artificial Sequence: Synthetic peptide
  Seed: LRMKWMMAMKYPITA
LRMKMMMIMGYPMTA

SEQ ID NO: 236547 - protein, 15 aa, Artificial Sequence
  Description of Artificial Sequence: Synthetic peptide
  Seed: LRMKWMMAMKYPITA
LRMKMMMIMGYPNTA

SEQ ID NO: 236548 - protein, 15 aa, Artificial Sequence
  Description of Artificial Sequence: Synthetic peptide
  Seed: LRMKWMMAMKYPITA
LRMKMMMIMGYPPTA

SEQ ID NO: 236549 - protein, 15 aa, Artificial Sequence
  Description of Artificial Sequence: Synthetic peptide
  Seed: LRMKWMMAMKYPITA
LRMKMMMIMGYPQTA

SEQ ID NO: 236550 - protein, 15 aa, Artificial Sequence
  Description of Artificial Sequence: Synthetic peptide
  Seed: LRMKWMMAMKYPITA
LRMKMMMIMGYPRTA

SEQ ID NO: 236551 - protein, 15 aa, Artificial Sequence
  Description of Artificial Sequence: Synthetic peptide
  Seed: LRMKWMMAMKYPITA
LRMKMMMIMGYPSTA

SEQ ID NO: 236552 - protein, 15 aa, Artificial Sequence
  Description of Artificial Sequence: Synthetic peptide
  Seed: LRMKWMMAMKYPITA
LRMKMMMIMGYPTTA

SEQ ID NO: 236553 - protein, 15 aa, Artificial Sequence
  Description of Artificial Sequence: Synthetic peptide
  Seed: LRMKWMMAMKYPITA
LRMKMMMIMGYPVTA

SEQ ID NO: 236554 - protein, 15 aa, Artificial Sequence
  Description of Artificial Sequence: Synthetic peptide
  Seed: LRMKWMMAMKYPITA
LRMKMMMIMGYPYTA

SEQ ID NO: 236555 - protein, 15 aa, Artificial Sequence
  Description of Artificial Sequence: Synthetic peptide
  Seed: LRMKWMMAMKYPITA
LRMKMMMIMHYPATA

SEQ ID NO: 236556 - protein, 15 aa, Artificial Sequence
  Description of Artificial Sequence: Synthetic peptide
  Seed: LRMKWMMAMKYPITA
LRMKMMMIMHYPFTA

SEQ ID NO: 236557 - protein, 15 aa, Artificial Sequence
  Description of Artificial Sequence: Synthetic peptide
  Seed: LRMKWMMAMKYPITA
LRMKMMMIMHYPGTA

SEQ ID NO: 236558 - protein, 15 aa, Artificial Sequence
  Description of Artificial Sequence: Synthetic peptide
  Seed: LRMKWMMAMKYPITA
LRMKMMMIMHYPHTA

SEQ ID NO: 236559 - protein, 15 aa, Artificial Sequence
  Description of Artificial Sequence: Synthetic peptide
  Seed: LRMKWMMAMKYPITA
LRMKMMMIMHYPITA

SEQ ID NO: 236560 - protein, 15 aa, Artificial Sequence
  Description of Artificial Sequence: Synthetic peptide
  Seed: LRMKWMMAMKYPITA
LRMKMMMIMHYPKTA

SEQ ID NO: 236561 - protein, 15 aa, Artificial Sequence
  Description of Artificial Sequence: Synthetic peptide
  Seed: LRMKWMMAMKYPITA
LRMKMMMIMHYPLTA

SEQ ID NO: 236562 - protein, 15 aa, Artificial Sequence
  Description of Artificial Sequence: Synthetic peptide
  Seed: LRMKWMMAMKYPITA
LRMKMMMIMHYPMTA

SEQ ID NO: 236563 - protein, 15 aa, Artificial Sequence
  Description of Artificial Sequence: Synthetic peptide
  Seed: LRMKWMMAMKYPITA
LRMKMMMIMHYPNTA

SEQ ID NO: 236564 - protein, 15 aa, Artificial Sequence
  Description of Artificial Sequence: Synthetic peptide
  Seed: LRMKWMMAMKYPITA
LRMKMMMIMHYPQTA

SEQ ID NO: 236565 - protein, 15 aa, Artificial Sequence
  Description of Artificial Sequence: Synthetic peptide
  Seed: LRMKWMMAMKYPITA
LRMKMMMIMHYPRTA

SEQ ID NO: 236566 - protein, 15 aa, Artificial Sequence
  Description of Artificial Sequence: Synthetic peptide
  Seed: LRMKWMMAMKYPITA
LRMKMMMIMHYPSTA

SEQ ID NO: 236567 - protein, 15 aa, Artificial Sequence
  Description of Artificial Sequence: Synthetic peptide
  Seed: LRMKWMMAMKYPITA
LRMKMMMIMHYPTTA

SEQ ID NO: 236568 - protein, 15 aa, Artificial Sequence
  Description of Artificial Sequence: Synthetic peptide
  Seed: LRMKWMMAMKYPITA
LRMKMMMIMHYPVTA

SEQ ID NO: 236569 - protein, 15 aa, Artificial Sequence
  Description of Artificial Sequence: Synthetic peptide
  Seed: LRMKWMMAMKYPITA
LRMKMMMIMHYPYTA

SEQ ID NO: 236570 - protein, 15 aa, Artificial Sequence
  Description of Artificial Sequence: Synthetic peptide
  Seed: LRMKWMMAMKYPITA
LRMKMMMIMIYPATA

SEQ ID NO: 236571 - protein, 15 aa, Artificial Sequence
  Description of Artificial Sequence: Synthetic peptide
  Seed: LRMKWMMAMKYPITA
LRMKMMMIMIYPDTA

SEQ ID NO: 236572 - protein, 15 aa, Artificial Sequence
  Description of Artificial Sequence: Synthetic peptide
  Seed: LRMKWMMAMKYPITA
LRMKMMMIMIYPGTA

SEQ ID NO: 236573 - protein, 15 aa, Artificial Sequence
  Description of Artificial Sequence: Synthetic peptide
  Seed: LRMKWMMAMKYPITA
LRMKMMMIMIYPITA

SEQ ID NO: 236574 - protein, 15 aa, Artificial Sequence
  Description of Artificial Sequence: Synthetic peptide
  Seed: LRMKWMMAMKYPITA
LRMKMMMIMIYPKTA

SEQ ID NO: 236575 - protein, 15 aa, Artificial Sequence
  Description of Artificial Sequence: Synthetic peptide
  Seed: LRMKWMMAMKYPITA
LRMKMMMIMIYPLTA

SEQ ID NO: 236576 - protein, 15 aa, Artificial Sequence
  Description of Artificial Sequence: Synthetic peptide
  Seed: LRMKWMMAMKYPITA
LRMKMMMIMIYPMTA

SEQ ID NO: 236577 - protein, 15 aa, Artificial Sequence
  Description of Artificial Sequence: Synthetic peptide
  Seed: LRMKWMMAMKYPITA
LRMKMMMIMIYPNTA

SEQ ID NO: 236578 - protein, 15 aa, Artificial Sequence
  Description of Artificial Sequence: Synthetic peptide
  Seed: LRMKWMMAMKYPITA
LRMKMMMIMIYPRTA

SEQ ID NO: 236579 - protein, 15 aa, Artificial Sequence
  Description of Artificial Sequence: Synthetic peptide
  Seed: LRMKWMMAMKYPITA
LRMKMMMIMIYPSTA

SEQ ID NO: 236580 - protein, 15 aa, Artificial Sequence
  Description of Artificial Sequence: Synthetic peptide
  Seed: LRMKWMMAMKYPITA
LRMKMMMIMIYPTTA

SEQ ID NO: 236581 - protein, 15 aa, Artificial Sequence
  Description of Artificial Sequence: Synthetic peptide
  Seed: LRMKWMMAMKYPITA
LRMKMMMIMIYPVTA

SEQ ID NO: 236582 - protein, 15 aa, Artificial Sequence
  Description of Artificial Sequence: Synthetic peptide
  Seed: LRMKWMMAMKYPITA
LRMKMMMIMKYPATA

SEQ ID NO: 236583 - protein, 15 aa, Artificial Sequence
  Description of Artificial Sequence: Synthetic peptide
  Seed: LRMKWMMAMKYPITA
LRMKMMMIMKYPCTA

SEQ ID NO: 236584 - protein, 15 aa, Artificial Sequence
  Description of Artificial Sequence: Synthetic peptide
  Seed: LRMKWMMAMKYPITA
LRMKMMMIMKYPDTA

SEQ ID NO: 236585 - protein, 15 aa, Artificial Sequence
  Description of Artificial Sequence: Synthetic peptide
  Seed: LRMKWMMAMKYPITA
LRMKMMMIMKYPETA

SEQ ID NO: 236586 - protein, 15 aa, Artificial Sequence
  Description of Artificial Sequence: Synthetic peptide
  Seed: LRMKWMMAMKYPITA
LRMKMMMIMKYPFTA

SEQ ID NO: 236587 - protein, 15 aa, Artificial Sequence
  Description of Artificial Sequence: Synthetic peptide
  Seed: LRMKWMMAMKYPITA
LRMKMMMIMKYPGTA

SEQ ID NO: 236588 - protein, 15 aa, Artificial Sequence
  Description of Artificial Sequence: Synthetic peptide
  Seed: LRMKWMMAMKYPITA
LRMKMMMIMKYPHTA

SEQ ID NO: 236589 - protein, 15 aa, Artificial Sequence
  Description of Artificial Sequence: Synthetic peptide
  Seed: LRMKWMMAMKYPITA
LRMKMMMIMKYPITA

SEQ ID NO: 236590 - protein, 15 aa, Artificial Sequence
  Description of Artificial Sequence: Synthetic peptide
  Seed: LRMKWMMAMKYPITA
LRMKMMMIMKYPKTA

SEQ ID NO: 236591 - protein, 15 aa, Artificial Sequence
  Description of Artificial Sequence: Synthetic peptide
  Seed: LRMKWMMAMKYPITA
LRMKMMMIMKYPLTA

SEQ ID NO: 236592 - protein, 15 aa, Artificial Sequence
  Description of Artificial Sequence: Synthetic peptide
  Seed: LRMKWMMAMKYPITA
LRMKMMMIMKYPMTA

SEQ ID NO: 236593 - protein, 15 aa, Artificial Sequence
  Description of Artificial Sequence: Synthetic peptide
  Seed: LRMKWMMAMKYPITA
LRMKMMMIMKYPNTA

SEQ ID NO: 236594 - protein, 15 aa, Artificial Sequence
  Description of Artificial Sequence: Synthetic peptide
  Seed: LRMKWMMAMKYPITA
LRMKMMMIMKYPPTA

SEQ ID NO: 236595 - protein, 15 aa, Artificial Sequence
  Description of Artificial Sequence: Synthetic peptide
  Seed: LRMKWMMAMKYPITA
LRMKMMMIMKYPQTA

SEQ ID NO: 236596 - protein, 15 aa, Artificial Sequence
  Description of Artificial Sequence: Synthetic peptide
  Seed: LRMKWMMAMKYPITA
LRMKMMMIMKYPRTA

SEQ ID NO: 236597 - protein, 15 aa, Artificial Sequence
  Description of Artificial Sequence: Synthetic peptide
  Seed: LRMKWMMAMKYPITA
LRMKMMMIMKYPSTA

SEQ ID NO: 236598 - protein, 15 aa, Artificial Sequence
  Description of Artificial Sequence: Synthetic peptide
  Seed: LRMKWMMAMKYPITA
LRMKMMMIMKYPTTA

SEQ ID NO: 236599 - protein, 15 aa, Artificial Sequence
  Description of Artificial Sequence: Synthetic peptide
  Seed: LRMKWMMAMKYPITA
LRMKMMMIMKYPVTA

SEQ ID NO: 236600 - protein, 15 aa, Artificial Sequence
  Description of Artificial Sequence: Synthetic peptide
  Seed: LRMKWMMAMKYPITA
LRMKMMMIMKYPWTA

SEQ ID NO: 236601 - protein, 15 aa, Artificial Sequence
  Description of Artificial Sequence: Synthetic peptide
  Seed: LRMKWMMAMKYPITA
LRMKMMMIMKYPYTA

SEQ ID NO: 236602 - protein, 15 aa, Artificial Sequence
  Description of Artificial Sequence: Synthetic peptide
  Seed: LRMKWMMAMKYPITA
LRMKMMMIMLYPRTA

SEQ ID NO: 236603 - protein, 15 aa, Artificial Sequence
  Description of Artificial Sequence: Synthetic peptide
  Seed: LRMKWMMAMKYPITA
LRMKMMMIMMYPRTA

SEQ ID NO: 236604 - protein, 15 aa, Artificial Sequence
  Description of Artificial Sequence: Synthetic peptide
  Seed: LRMKWMMAMKYPITA
LRMKMMMIMNYPATA

SEQ ID NO: 236605 - protein, 15 aa, Artificial Sequence
  Description of Artificial Sequence: Synthetic peptide
  Seed: LRMKWMMAMKYPITA
LRMKMMMIMNYPCTA

SEQ ID NO: 236606 - protein, 15 aa, Artificial Sequence
  Description of Artificial Sequence: Synthetic peptide
  Seed: LRMKWMMAMKYPITA
LRMKMMMIMNYPDTA

SEQ ID NO: 236607 - protein, 15 aa, Artificial Sequence
  Description of Artificial Sequence: Synthetic peptide
  Seed: LRMKWMMAMKYPITA
LRMKMMMIMNYPETA

SEQ ID NO: 236608 - protein, 15 aa, Artificial Sequence
  Description of Artificial Sequence: Synthetic peptide
  Seed: LRMKWMMAMKYPITA
LRMKMMMIMNYPGTA

SEQ ID NO: 236609 - protein, 15 aa, Artificial Sequence
  Description of Artificial Sequence: Synthetic peptide
  Seed: LRMKWMMAMKYPITA
LRMKMMMIMNYPHTA

SEQ ID NO: 236610 - protein, 15 aa, Artificial Sequence
  Description of Artificial Sequence: Synthetic peptide
  Seed: LRMKWMMAMKYPITA
LRMKMMMIMNYPITA

SEQ ID NO: 236611 - protein, 15 aa, Artificial Sequence
  Description of Artificial Sequence: Synthetic peptide
  Seed: LRMKWMMAMKYPITA
LRMKMMMIMNYPLTA

SEQ ID NO: 236612 - protein, 15 aa, Artificial Sequence
  Description of Artificial Sequence: Synthetic peptide
  Seed: LRMKWMMAMKYPITA
LRMKMMMIMNYPMTA

SEQ ID NO: 236613 - protein, 15 aa, Artificial Sequence
  Description of Artificial Sequence: Synthetic peptide
  Seed: LRMKWMMAMKYPITA
LRMKMMMIMNYPNTA

SEQ ID NO: 236614 - protein, 15 aa, Artificial Sequence
  Description of Artificial Sequence: Synthetic peptide
  Seed: LRMKWMMAMKYPITA
LRMKMMMIMNYPQTA

SEQ ID NO: 236615 - protein, 15 aa, Artificial Sequence
  Description of Artificial Sequence: Synthetic peptide
  Seed: LRMKWMMAMKYPITA
LRMKMMMIMNYPRTA

SEQ ID NO: 236616 - protein, 15 aa, Artificial Sequence
  Description of Artificial Sequence: Synthetic peptide
  Seed: LRMKWMMAMKYPITA
LRMKMMMIMNYPSTA

SEQ ID NO: 236617 - protein, 15 aa, Artificial Sequence
  Description of Artificial Sequence: Synthetic peptide
  Seed: LRMKWMMAMKYPITA
LRMKMMMIMNYPTTA

SEQ ID NO: 236618 - protein, 15 aa, Artificial Sequence
  Description of Artificial Sequence: Synthetic peptide
  Seed: LRMKWMMAMKYPITA
LRMKMMMIMNYPVTA

SEQ ID NO: 236619 - protein, 15 aa, Artificial Sequence
  Description of Artificial Sequence: Synthetic peptide
  Seed: LRMKWMMAMKYPITA
LRMKMMMIMNYPYTA

SEQ ID NO: 236620 - protein, 15 aa, Artificial Sequence
  Description of Artificial Sequence: Synthetic peptide
  Seed: LRMKWMMAMKYPITA
LRMKMMMIMPYPATA

SEQ ID NO: 236621 - protein, 15 aa, Artificial Sequence
  Description of Artificial Sequence: Synthetic peptide
  Seed: LRMKWMMAMKYPITA
LRMKMMMIMPYPCTA

SEQ ID NO: 236622 - protein, 15 aa, Artificial Sequence
  Description of Artificial Sequence: Synthetic peptide
  Seed: LRMKWMMAMKYPITA
LRMKMMMIMPYPDTA

SEQ ID NO: 236623 - protein, 15 aa, Artificial Sequence
  Description of Artificial Sequence: Synthetic peptide
  Seed: LRMKWMMAMKYPITA
LRMKMMMIMPYPETA

SEQ ID NO: 236624 - protein, 15 aa, Artificial Sequence
  Description of Artificial Sequence: Synthetic peptide
  Seed: LRMKWMMAMKYPITA
LRMKMMMIMPYPFTA

SEQ ID NO: 236625 - protein, 15 aa, Artificial Sequence
  Description of Artificial Sequence: Synthetic peptide
  Seed: LRMKWMMAMKYPITA
LRMKMMMIMPYPGTA

SEQ ID NO: 236626 - protein, 15 aa, Artificial Sequence
  Description of Artificial Sequence: Synthetic peptide
  Seed: LRMKWMMAMKYPITA
LRMKMMMIMPYPHTA

SEQ ID NO: 236627 - protein, 15 aa, Artificial Sequence
  Description of Artificial Sequence: Synthetic peptide
  Seed: LRMKWMMAMKYPITA
LRMKMMMIMPYPITA

SEQ ID NO: 236628 - protein, 15 aa, Artificial Sequence
  Description of Artificial Sequence: Synthetic peptide
  Seed: LRMKWMMAMKYPITA
LRMKMMMIMPYPKTA

SEQ ID NO: 236629 - protein, 15 aa, Artificial Sequence
  Description of Artificial Sequence: Synthetic peptide
  Seed: LRMKWMMAMKYPITA
LRMKMMMIMPYPLTA

SEQ ID NO: 236630 - protein, 15 aa, Artificial Sequence
  Description of Artificial Sequence: Synthetic peptide
  Seed: LRMKWMMAMKYPITA
LRMKMMMIMPYPMTA

SEQ ID NO: 236631 - protein, 15 aa, Artificial Sequence
  Description of Artificial Sequence: Synthetic peptide
  Seed: LRMKWMMAMKYPITA
LRMKMMMIMPYPNTA

SEQ ID NO: 236632 - protein, 15 aa, Artificial Sequence
  Description of Artificial Sequence: Synthetic peptide
  Seed: LRMKWMMAMKYPITA
LRMKMMMIMPYPPTA

SEQ ID NO: 236633 - protein, 15 aa, Artificial Sequence
  Description of Artificial Sequence: Synthetic peptide
  Seed: LRMKWMMAMKYPITA
LRMKMMMIMPYPQTA

SEQ ID NO: 236634 - protein, 15 aa, Artificial Sequence
  Description of Artificial Sequence: Synthetic peptide
  Seed: LRMKWMMAMKYPITA
LRMKMMMIMPYPRTA

SEQ ID NO: 236635 - protein, 15 aa, Artificial Sequence
  Description of Artificial Sequence: Synthetic peptide
  Seed: LRMKWMMAMKYPITA
LRMKMMMIMPYPSTA

SEQ ID NO: 236636 - protein, 15 aa, Artificial Sequence
  Description of Artificial Sequence: Synthetic peptide
  Seed: LRMKWMMAMKYPITA
LRMKMMMIMPYPTTA

SEQ ID NO: 236637 - protein, 15 aa, Artificial Sequence
  Description of Artificial Sequence: Synthetic peptide
  Seed: LRMKWMMAMKYPITA
LRMKMMMIMPYPVTA

SEQ ID NO: 236638 - protein, 15 aa, Artificial Sequence
  Description of Artificial Sequence: Synthetic peptide
  Seed: LRMKWMMAMKYPITA
LRMKMMMIMPYPWTA

SEQ ID NO: 236639 - protein, 15 aa, Artificial Sequence
  Description of Artificial Sequence: Synthetic peptide
  Seed: LRMKWMMAMKYPITA
LRMKMMMIMPYPYTA

SEQ ID NO: 236640 - protein, 15 aa, Artificial Sequence
  Description of Artificial Sequence: Synthetic peptide
  Seed: LRMKWMMAMKYPITA
LRMKMMMIMQYPKTA

SEQ ID NO: 236641 - protein, 15 aa, Artificial Sequence
  Description of Artificial Sequence: Synthetic peptide
  Seed: LRMKWMMAMKYPITA
LRMKMMMIMQYPRTA

SEQ ID NO: 236642 - protein, 15 aa, Artificial Sequence
  Description of Artificial Sequence: Synthetic peptide
  Seed: LRMKWMMAMKYPITA
LRMKMMMIMRYPATA

SEQ ID NO: 236643 - protein, 15 aa, Artificial Sequence
  Description of Artificial Sequence: Synthetic peptide
  Seed: LRMKWMMAMKYPITA
LRMKMMMIMRYPCTA

SEQ ID NO: 236644 - protein, 15 aa, Artificial Sequence
  Description of Artificial Sequence: Synthetic peptide
  Seed: LRMKWMMAMKYPITA
LRMKMMMIMRYPDTA

SEQ ID NO: 236645 - protein, 15 aa, Artificial Sequence
  Description of Artificial Sequence: Synthetic peptide
  Seed: LRMKWMMAMKYPITA
LRMKMMMIMRYPETA

SEQ ID NO: 236646 - protein, 15 aa, Artificial Sequence
  Description of Artificial Sequence: Synthetic peptide
  Seed: LRMKWMMAMKYPITA
LRMKMMMIMRYPFTA

SEQ ID NO: 236647 - protein, 15 aa, Artificial Sequence
  Description of Artificial Sequence: Synthetic peptide
  Seed: LRMKWMMAMKYPITA
LRMKMMMIMRYPGTA

SEQ ID NO: 236648 - protein, 15 aa, Artificial Sequence
  Description of Artificial Sequence: Synthetic peptide
  Seed: LRMKWMMAMKYPITA
LRMKMMMIMRYPHTA

SEQ ID NO: 236649 - protein, 15 aa, Artificial Sequence
  Description of Artificial Sequence: Synthetic peptide
  Seed: LRMKWMMAMKYPITA
LRMKMMMIMRYPITA

SEQ ID NO: 236650 - protein, 15 aa, Artificial Sequence
  Description of Artificial Sequence: Synthetic peptide
  Seed: LRMKWMMAMKYPITA
LRMKMMMIMRYPKTA

SEQ ID NO: 236651 - protein, 15 aa, Artificial Sequence
  Description of Artificial Sequence: Synthetic peptide
  Seed: LRMKWMMAMKYPITA
LRMKMMMIMRYPLTA

SEQ ID NO: 236652 - protein, 15 aa, Artificial Sequence
  Description of Artificial Sequence: Synthetic peptide
  Seed: LRMKWMMAMKYPITA
LRMKMMMIMRYPMTA

SEQ ID NO: 236653 - protein, 15 aa, Artificial Sequence
  Description of Artificial Sequence: Synthetic peptide
  Seed: LRMKWMMAMKYPITA
LRMKMMMIMRYPNTA

SEQ ID NO: 236654 - protein, 15 aa, Artificial Sequence
  Description of Artificial Sequence: Synthetic peptide
  Seed: LRMKWMMAMKYPITA
LRMKMMMIMRYPPTA

SEQ ID NO: 236655 - protein, 15 aa, Artificial Sequence
  Description of Artificial Sequence: Synthetic peptide
  Seed: LRMKWMMAMKYPITA
LRMKMMMIMRYPQTA

SEQ ID NO: 236656 - protein, 15 aa, Artificial Sequence
  Description of Artificial Sequence: Synthetic peptide
  Seed: LRMKWMMAMKYPITA
LRMKMMMIMRYPRTA

SEQ ID NO: 236657 - protein, 15 aa, Artificial Sequence
  Description of Artificial Sequence: Synthetic peptide
  Seed: LRMKWMMAMKYPITA
LRMKMMMIMRYPSTA

SEQ ID NO: 236658 - protein, 15 aa, Artificial Sequence
  Description of Artificial Sequence: Synthetic peptide
  Seed: LRMKWMMAMKYPITA
LRMKMMMIMRYPTTA

SEQ ID NO: 236659 - protein, 15 aa, Artificial Sequence
  Description of Artificial Sequence: Synthetic peptide
  Seed: LRMKWMMAMKYPITA
LRMKMMMIMRYPVTA

SEQ ID NO: 236660 - protein, 15 aa, Artificial Sequence
  Description of Artificial Sequence: Synthetic peptide
  Seed: LRMKWMMAMKYPITA
LRMKMMMIMRYPWTA

SEQ ID NO: 236661 - protein, 15 aa, Artificial Sequence
  Description of Artificial Sequence: Synthetic peptide
  Seed: LRMKWMMAMKYPITA
LRMKMMMIMRYPYTA

SEQ ID NO: 236662 - protein, 15 aa, Artificial Sequence
  Description of Artificial Sequence: Synthetic peptide
  Seed: LRMKWMMAMKYPITA
LRMKMMMIMSYPATA

SEQ ID NO: 236663 - protein, 15 aa, Artificial Sequence
  Description of Artificial Sequence: Synthetic peptide
  Seed: LRMKWMMAMKYPITA
LRMKMMMIMSYPCTA

SEQ ID NO: 236664 - protein, 15 aa, Artificial Sequence
  Description of Artificial Sequence: Synthetic peptide
  Seed: LRMKWMMAMKYPITA
LRMKMMMIMSYPDTA

SEQ ID NO: 236665 - protein, 15 aa, Artificial Sequence
  Description of Artificial Sequence: Synthetic peptide
  Seed: LRMKWMMAMKYPITA
LRMKMMMIMSYPETA

SEQ ID NO: 236666 - protein, 15 aa, Artificial Sequence
  Description of Artificial Sequence: Synthetic peptide
  Seed: LRMKWMMAMKYPITA
LRMKMMMIMSYPFTA

SEQ ID NO: 236667 - protein, 15 aa, Artificial Sequence
  Description of Artificial Sequence: Synthetic peptide
  Seed: LRMKWMMAMKYPITA
LRMKMMMIMSYPGTA

SEQ ID NO: 236668 - protein, 15 aa, Artificial Sequence
  Description of Artificial Sequence: Synthetic peptide
  Seed: LRMKWMMAMKYPITA
LRMKMMMIMSYPHTA

SEQ ID NO: 236669 - protein, 15 aa, Artificial Sequence
  Description of Artificial Sequence: Synthetic peptide
  Seed: LRMKWMMAMKYPITA
LRMKMMMIMSYPITA

SEQ ID NO: 236670 - protein, 15 aa, Artificial Sequence
  Description of Artificial Sequence: Synthetic peptide
  Seed: LRMKWMMAMKYPITA
LRMKMMMIMSYPKTA

SEQ ID NO: 236671 - protein, 15 aa, Artificial Sequence
  Description of Artificial Sequence: Synthetic peptide
  Seed: LRMKWMMAMKYPITA
LRMKMMMIMSYPLTA

SEQ ID NO: 236672 - protein, 15 aa, Artificial Sequence
  Description of Artificial Sequence: Synthetic peptide
  Seed: LRMKWMMAMKYPITA
LRMKMMMIMSYPMTA

SEQ ID NO: 236673 - protein, 15 aa, Artificial Sequence
  Description of Artificial Sequence: Synthetic peptide
  Seed: LRMKWMMAMKYPITA
LRMKMMMIMSYPNTA

SEQ ID NO: 236674 - protein, 15 aa, Artificial Sequence
  Description of Artificial Sequence: Synthetic peptide
  Seed: LRMKWMMAMKYPITA
LRMKMMMIMSYPPTA

SEQ ID NO: 236675 - protein, 15 aa, Artificial Sequence
  Description of Artificial Sequence: Synthetic peptide
  Seed: LRMKWMMAMKYPITA
LRMKMMMIMSYPQTA

SEQ ID NO: 236676 - protein, 15 aa, Artificial Sequence
  Description of Artificial Sequence: Synthetic peptide
  Seed: LRMKWMMAMKYPITA
LRMKMMMIMSYPRTA

SEQ ID NO: 236677 - protein, 15 aa, Artificial Sequence
  Description of Artificial Sequence: Synthetic peptide
  Seed: LRMKWMMAMKYPITA
LRMKMMMIMSYPSTA

SEQ ID NO: 236678 - protein, 15 aa, Artificial Sequence
  Description of Artificial Sequence: Synthetic peptide
  Seed: LRMKWMMAMKYPITA
LRMKMMMIMSYPTTA

SEQ ID NO: 236679 - protein, 15 aa, Artificial Sequence
  Description of Artificial Sequence: Synthetic peptide
  Seed: LRMKWMMAMKYPITA
LRMKMMMIMSYPVTA

SEQ ID NO: 236680 - protein, 15 aa, Artificial Sequence
  Description of Artificial Sequence: Synthetic peptide
  Seed: LRMKWMMAMKYPITA
LRMKMMMIMSYPYTA

SEQ ID NO: 236681 - protein, 15 aa, Artificial Sequence
  Description of Artificial Sequence: Synthetic peptide
  Seed: LRMKWMMAMKYPITA
LRMKMMMIMTYPATA

SEQ ID NO: 236682 - protein, 15 aa, Artificial Sequence
  Description of Artificial Sequence: Synthetic peptide
  Seed: LRMKWMMAMKYPITA
LRMKMMMIMTYPCTA

SEQ ID NO: 236683 - protein, 15 aa, Artificial Sequence
  Description of Artificial Sequence: Synthetic peptide
  Seed: LRMKWMMAMKYPITA
LRMKMMMIMTYPDTA

SEQ ID NO: 236684 - protein, 15 aa, Artificial Sequence
  Description of Artificial Sequence: Synthetic peptide
  Seed: LRMKWMMAMKYPITA
LRMKMMMIMTYPETA

SEQ ID NO: 236685 - protein, 15 aa, Artificial Sequence
  Description of Artificial Sequence: Synthetic peptide
  Seed: LRMKWMMAMKYPITA
LRMKMMMIMTYPFTA

SEQ ID NO: 236686 - protein, 15 aa, Artificial Sequence
  Description of Artificial Sequence: Synthetic peptide
  Seed: LRMKWMMAMKYPITA
LRMKMMMIMTYPGTA

SEQ ID NO: 236687 - protein, 15 aa, Artificial Sequence
  Description of Artificial Sequence: Synthetic peptide
  Seed: LRMKWMMAMKYPITA
LRMKMMMIMTYPHTA

SEQ ID NO: 236688 - protein, 15 aa, Artificial Sequence
  Description of Artificial Sequence: Synthetic peptide
  Seed: LRMKWMMAMKYPITA
LRMKMMMIMTYPITA

SEQ ID NO: 236689 - protein, 15 aa, Artificial Sequence
  Description of Artificial Sequence: Synthetic peptide
  Seed: LRMKWMMAMKYPITA
LRMKMMMIMTYPKTA

SEQ ID NO: 236690 - protein, 15 aa, Artificial Sequence
  Description of Artificial Sequence: Synthetic peptide
  Seed: LRMKWMMAMKYPITA
LRMKMMMIMTYPLTA

SEQ ID NO: 236691 - protein, 15 aa, Artificial Sequence
  Description of Artificial Sequence: Synthetic peptide
  Seed: LRMKWMMAMKYPITA
LRMKMMMIMTYPMTA

SEQ ID NO: 236692 - protein, 15 aa, Artificial Sequence
  Description of Artificial Sequence: Synthetic peptide
  Seed: LRMKWMMAMKYPITA
LRMKMMMIMTYPNTA

SEQ ID NO: 236693 - protein, 15 aa, Artificial Sequence
  Description of Artificial Sequence: Synthetic peptide
  Seed: LRMKWMMAMKYPITA
LRMKMMMIMTYPPTA

SEQ ID NO: 236694 - protein, 15 aa, Artificial Sequence
  Description of Artificial Sequence: Synthetic peptide
  Seed: LRMKWMMAMKYPITA
LRMKMMMIMTYPQTA

SEQ ID NO: 236695 - protein, 15 aa, Artificial Sequence
  Description of Artificial Sequence: Synthetic peptide
  Seed: LRMKWMMAMKYPITA
LRMKMMMIMTYPRTA

SEQ ID NO: 236696 - protein, 15 aa, Artificial Sequence
  Description of Artificial Sequence: Synthetic peptide
  Seed: LRMKWMMAMKYPITA
LRMKMMMIMTYPSTA

SEQ ID NO: 236697 - protein, 15 aa, Artificial Sequence
  Description of Artificial Sequence: Synthetic peptide
  Seed: LRMKWMMAMKYPITA
LRMKMMMIMTYPTTA

SEQ ID NO: 236698 - protein, 15 aa, Artificial Sequence
  Description of Artificial Sequence: Synthetic peptide
  Seed: LRMKWMMAMKYPITA
LRMKMMMIMTYPVTA

SEQ ID NO: 236699 - protein, 15 aa, Artificial Sequence
  Description of Artificial Sequence: Synthetic peptide
  Seed: LRMKWMMAMKYPITA
LRMKMMMIMTYPYTA

SEQ ID NO: 236700 - protein, 15 aa, Artificial Sequence
  Description of Artificial Sequence: Synthetic peptide
  Seed: LRMKWMMAMKYPITA
LRMKMMMIMVYPATA

SEQ ID NO: 236701 - protein, 15 aa, Artificial Sequence
  Description of Artificial Sequence: Synthetic peptide
  Seed: LRMKWMMAMKYPITA
LRMKMMMIMVYPCTA

SEQ ID NO: 236702 - protein, 15 aa, Artificial Sequence
  Description of Artificial Sequence: Synthetic peptide
  Seed: LRMKWMMAMKYPITA
LRMKMMMIMVYPDTA

SEQ ID NO: 236703 - protein, 15 aa, Artificial Sequence
  Description of Artificial Sequence: Synthetic peptide
  Seed: LRMKWMMAMKYPITA
LRMKMMMIMVYPETA

SEQ ID NO: 236704 - protein, 15 aa, Artificial Sequence
  Description of Artificial Sequence: Synthetic peptide
  Seed: LRMKWMMAMKYPITA
LRMKMMMIMVYPGTA

SEQ ID NO: 236705 - protein, 15 aa, Artificial Sequence
  Description of Artificial Sequence: Synthetic peptide
  Seed: LRMKWMMAMKYPITA
LRMKMMMIMVYPITA

SEQ ID NO: 236706 - protein, 15 aa, Artificial Sequence
  Description of Artificial Sequence: Synthetic peptide
  Seed: LRMKWMMAMKYPITA
LRMKMMMIMVYPKTA

SEQ ID NO: 236707 - protein, 15 aa, Artificial Sequence
  Description of Artificial Sequence: Synthetic peptide
  Seed: LRMKWMMAMKYPITA
LRMKMMMIMVYPLTA

SEQ ID NO: 236708 - protein, 15 aa, Artificial Sequence
  Description of Artificial Sequence: Synthetic peptide
  Seed: LRMKWMMAMKYPITA
LRMKMMMIMVYPMTA

SEQ ID NO: 236709 - protein, 15 aa, Artificial Sequence
  Description of Artificial Sequence: Synthetic peptide
  Seed: LRMKWMMAMKYPITA
LRMKMMMIMVYPNTA

SEQ ID NO: 236710 - protein, 15 aa, Artificial Sequence
  Description of Artificial Sequence: Synthetic peptide
  Seed: LRMKWMMAMKYPITA
LRMKMMMIMVYPQTA

SEQ ID NO: 236711 - protein, 15 aa, Artificial Sequence
  Description of Artificial Sequence: Synthetic peptide
  Seed: LRMKWMMAMKYPITA
LRMKMMMIMVYPRTA

SEQ ID NO: 236712 - protein, 15 aa, Artificial Sequence
  Description of Artificial Sequence: Synthetic peptide
  Seed: LRMKWMMAMKYPITA
LRMKMMMIMVYPSTA

SEQ ID NO: 236713 - protein, 15 aa, Artificial Sequence
  Description of Artificial Sequence: Synthetic peptide
  Seed: LRMKWMMAMKYPITA
LRMKMMMIMVYPTTA

SEQ ID NO: 236714 - protein, 15 aa, Artificial Sequence
  Description of Artificial Sequence: Synthetic peptide
  Seed: LRMKWMMAMKYPITA
LRMKMMMIMVYPVTA

SEQ ID NO: 236715 - protein, 15 aa, Artificial Sequence
  Description of Artificial Sequence: Synthetic peptide
  Seed: LRMKWMMAMKYPITA
LRMKMMMIMYYPATA

SEQ ID NO: 236716 - protein, 15 aa, Artificial Sequence
  Description of Artificial Sequence: Synthetic peptide
  Seed: LRMKWMMAMKYPITA
LRMKMMMKMAYPATA

SEQ ID NO: 236717 - protein, 15 aa, Artificial Sequence
  Description of Artificial Sequence: Synthetic peptide
  Seed: LRMKWMMAMKYPITA
LRMKMMMKMAYPFTA

SEQ ID NO: 236718 - protein, 15 aa, Artificial Sequence
  Description of Artificial Sequence: Synthetic peptide
  Seed: LRMKWMMAMKYPITA
LRMKMMMKMAYPITA

SEQ ID NO: 236719 - protein, 15 aa, Artificial Sequence
  Description of Artificial Sequence: Synthetic peptide
  Seed: LRMKWMMAMKYPITA
LRMKMMMKMAYPLTA

SEQ ID NO: 236720 - protein, 15 aa, Artificial Sequence
  Description of Artificial Sequence: Synthetic peptide
  Seed: LRMKWMMAMKYPITA
LRMKMMMKMAYPMTA

SEQ ID NO: 236721 - protein, 15 aa, Artificial Sequence
  Description of Artificial Sequence: Synthetic peptide
  Seed: LRMKWMMAMKYPITA
LRMKMMMKMAYPRTA

SEQ ID NO: 236722 - protein, 15 aa, Artificial Sequence
  Description of Artificial Sequence: Synthetic peptide
  Seed: LRMKWMMAMKYPITA
LRMKMMMKMAYPSTA

SEQ ID NO: 236723 - protein, 15 aa, Artificial Sequence
  Description of Artificial Sequence: Synthetic peptide
  Seed: LRMKWMMAMKYPITA
LRMKMMMKMAYPTTA

SEQ ID NO: 236724 - protein, 15 aa, Artificial Sequence
  Description of Artificial Sequence: Synthetic peptide
  Seed: LRMKWMMAMKYPITA
LRMKMMMKMAYPVTA

SEQ ID NO: 236725 - protein, 15 aa, Artificial Sequence
  Description of Artificial Sequence: Synthetic peptide
  Seed: LRMKWMMAMKYPITA
LRMKMMMKMAYPYTA

SEQ ID NO: 236726 - protein, 15 aa, Artificial Sequence
  Description of Artificial Sequence: Synthetic peptide
  Seed: LRMKWMMAMKYPITA
LRMKMMMKMCYPRTA

SEQ ID NO: 236727 - protein, 15 aa, Artificial Sequence
  Description of Artificial Sequence: Synthetic peptide
  Seed: LRMKWMMAMKYPITA
LRMKMMMKMCYPYTA

SEQ ID NO: 236728 - protein, 15 aa, Artificial Sequence
  Description of Artificial Sequence: Synthetic peptide
  Seed: LRMKWMMAMKYPITA
LRMKMMMKMDYPRTA

SEQ ID NO: 236729 - protein, 15 aa, Artificial Sequence
  Description of Artificial Sequence: Synthetic peptide
  Seed: LRMKWMMAMKYPITA
LRMKMMMKMDYPYTA

SEQ ID NO: 236730 - protein, 15 aa, Artificial Sequence
  Description of Artificial Sequence: Synthetic peptide
  Seed: LRMKWMMAMKYPITA
LRMKMMMKMEYPRTA

SEQ ID NO: 236731 - protein, 15 aa, Artificial Sequence
  Description of Artificial Sequence: Synthetic peptide
  Seed: LRMKWMMAMKYPITA
LRMKMMMKMEYPYTA

SEQ ID NO: 236732 - protein, 15 aa, Artificial Sequence
  Description of Artificial Sequence: Synthetic peptide
  Seed: LRMKWMMAMKYPITA
LRMKMMMKMGYPATA

SEQ ID NO: 236733 - protein, 15 aa, Artificial Sequence
  Description of Artificial Sequence: Synthetic peptide
  Seed: LRMKWMMAMKYPITA
LRMKMMMKMGYPITA

SEQ ID NO: 236734 - protein, 15 aa, Artificial Sequence
  Description of Artificial Sequence: Synthetic peptide
  Seed: LRMKWMMAMKYPITA
LRMKMMMKMGYPLTA

SEQ ID NO: 236735 - protein, 15 aa, Artificial Sequence
  Description of Artificial Sequence: Synthetic peptide
  Seed: LRMKWMMAMKYPITA
LRMKMMMKMGYPMTA

SEQ ID NO: 236736 - protein, 15 aa, Artificial Sequence
  Description of Artificial Sequence: Synthetic peptide
  Seed: LRMKWMMAMKYPITA
LRMKMMMKMGYPVTA

SEQ ID NO: 236737 - protein, 15 aa, Artificial Sequence
  Description of Artificial Sequence: Synthetic peptide
  Seed: LRMKWMMAMKYPITA
LRMKMMMKMHYPQTA

SEQ ID NO: 236738 - protein, 15 aa, Artificial Sequence
  Description of Artificial Sequence: Synthetic peptide
  Seed: LRMKWMMAMKYPITA
LRMKMMMKMIYPRTA

SEQ ID NO: 236739 - protein, 15 aa, Artificial Sequence
  Description of Artificial Sequence: Synthetic peptide
  Seed: LRMKWMMAMKYPITA
LRMKMMMKMKYPATA

SEQ ID NO: 236740 - protein, 15 aa, Artificial Sequence
  Description of Artificial Sequence: Synthetic peptide
  Seed: LRMKWMMAMKYPITA
LRMKMMMKMKYPCTA

SEQ ID NO: 236741 - protein, 15 aa, Artificial Sequence
  Description of Artificial Sequence: Synthetic peptide
  Seed: LRMKWMMAMKYPITA
LRMKMMMKMKYPDTA

SEQ ID NO: 236742 - protein, 15 aa, Artificial Sequence
  Description of Artificial Sequence: Synthetic peptide
  Seed: LRMKWMMAMKYPITA
LRMKMMMKMKYPETA

SEQ ID NO: 236743 - protein, 15 aa, Artificial Sequence
  Description of Artificial Sequence: Synthetic peptide
  Seed: LRMKWMMAMKYPITA
LRMKMMMKMKYPFTA

SEQ ID NO: 236744 - protein, 15 aa, Artificial Sequence
  Description of Artificial Sequence: Synthetic peptide
  Seed: LRMKWMMAMKYPITA
LRMKMMMKMKYPGTA

SEQ ID NO: 236745 - protein, 15 aa, Artificial Sequence
  Description of Artificial Sequence: Synthetic peptide
  Seed: LRMKWMMAMKYPITA
LRMKMMMKMKYPHTA

SEQ ID NO: 236746 - protein, 15 aa, Artificial Sequence
  Description of Artificial Sequence: Synthetic peptide
  Seed: LRMKWMMAMKYPITA
LRMKMMMKMKYPITA

SEQ ID NO: 236747 - protein, 15 aa, Artificial Sequence
  Description of Artificial Sequence: Synthetic peptide
  Seed: LRMKWMMAMKYPITA
LRMKMMMKMKYPKTA

SEQ ID NO: 236748 - protein, 15 aa, Artificial Sequence
  Description of Artificial Sequence: Synthetic peptide
  Seed: LRMKWMMAMKYPITA
LRMKMMMKMKYPLTA

SEQ ID NO: 236749 - protein, 15 aa, Artificial Sequence
  Description of Artificial Sequence: Synthetic peptide
  Seed: LRMKWMMAMKYPITA
LRMKMMMKMKYPMTA

SEQ ID NO: 236750 - protein, 15 aa, Artificial Sequence
  Description of Artificial Sequence: Synthetic peptide
  Seed: LRMKWMMAMKYPITA
LRMKMMMKMKYPNTA

SEQ ID NO: 236751 - protein, 15 aa, Artificial Sequence
  Description of Artificial Sequence: Synthetic peptide
  Seed: LRMKWMMAMKYPITA
LRMKMMMKMKYPQTA

SEQ ID NO: 236752 - protein, 15 aa, Artificial Sequence
  Description of Artificial Sequence: Synthetic peptide
  Seed: LRMKWMMAMKYPITA
LRMKMMMKMKYPRTA

SEQ ID NO: 236753 - protein, 15 aa, Artificial Sequence
  Description of Artificial Sequence: Synthetic peptide
  Seed: LRMKWMMAMKYPITA
LRMKMMMKMKYPSTA

SEQ ID NO: 236754 - protein, 15 aa, Artificial Sequence
  Description of Artificial Sequence: Synthetic peptide
  Seed: LRMKWMMAMKYPITA
LRMKMMMKMKYPTTA

SEQ ID NO: 236755 - protein, 15 aa, Artificial Sequence
  Description of Artificial Sequence: Synthetic peptide
  Seed: LRMKWMMAMKYPITA
LRMKMMMKMKYPVTA

SEQ ID NO: 236756 - protein, 15 aa, Artificial Sequence
  Description of Artificial Sequence: Synthetic peptide
  Seed: LRMKWMMAMKYPITA
LRMKMMMKMKYPYTA

SEQ ID NO: 236757 - protein, 15 aa, Artificial Sequence
  Description of Artificial Sequence: Synthetic peptide
  Seed: LRMKWMMAMKYPITA
LRMKMMMKMNYPATA

SEQ ID NO: 236758 - protein, 15 aa, Artificial Sequence
  Description of Artificial Sequence: Synthetic peptide
  Seed: LRMKWMMAMKYPITA
LRMKMMMKMNYPGTA

SEQ ID NO: 236759 - protein, 15 aa, Artificial Sequence
  Description of Artificial Sequence: Synthetic peptide
  Seed: LRMKWMMAMKYPITA
LRMKMMMKMNYPITA

SEQ ID NO: 236760 - protein, 15 aa, Artificial Sequence
  Description of Artificial Sequence: Synthetic peptide
  Seed: LRMKWMMAMKYPITA
LRMKMMMKMNYPLTA

SEQ ID NO: 236761 - protein, 15 aa, Artificial Sequence
  Description of Artificial Sequence: Synthetic peptide
  Seed: LRMKWMMAMKYPITA
LRMKMMMKMNYPQTA

SEQ ID NO: 236762 - protein, 15 aa, Artificial Sequence
  Description of Artificial Sequence: Synthetic peptide
  Seed: LRMKWMMAMKYPITA
LRMKMMMKMNYPRTA

SEQ ID NO: 236763 - protein, 15 aa, Artificial Sequence
  Description of Artificial Sequence: Synthetic peptide
  Seed: LRMKWMMAMKYPITA
LRMKMMMKMNYPVTA

SEQ ID NO: 236764 - protein, 15 aa, Artificial Sequence
  Description of Artificial Sequence: Synthetic peptide
  Seed: LRMKWMMAMKYPITA
LRMKMMMKMNYPYTA

SEQ ID NO: 236765 - protein, 15 aa, Artificial Sequence
  Description of Artificial Sequence: Synthetic peptide
  Seed: LRMKWMMAMKYPITA
LRMKMMMKMPYPLTA

SEQ ID NO: 236766 - protein, 15 aa, Artificial Sequence
  Description of Artificial Sequence: Synthetic peptide
  Seed: LRMKWMMAMKYPITA
LRMKMMMKMPYPVTA

SEQ ID NO: 236767 - protein, 15 aa, Artificial Sequence
  Description of Artificial Sequence: Synthetic peptide
  Seed: LRMKWMMAMKYPITA
LRMKMMMKMQYPRTA

SEQ ID NO: 236768 - protein, 15 aa, Artificial Sequence
  Description of Artificial Sequence: Synthetic peptide
  Seed: LRMKWMMAMKYPITA
LRMKMMMKMQYPYTA

SEQ ID NO: 236769 - protein, 15 aa, Artificial Sequence
  Description of Artificial Sequence: Synthetic peptide
  Seed: LRMKWMMAMKYPITA
LRMKMMMKMRYPATA

SEQ ID NO: 236770 - protein, 15 aa, Artificial Sequence
  Description of Artificial Sequence: Synthetic peptide
  Seed: LRMKWMMAMKYPITA
LRMKMMMKMRYPCTA

SEQ ID NO: 236771 - protein, 15 aa, Artificial Sequence
  Description of Artificial Sequence: Synthetic peptide
  Seed: LRMKWMMAMKYPITA
LRMKMMMKMRYPDTA

SEQ ID NO: 236772 - protein, 15 aa, Artificial Sequence
  Description of Artificial Sequence: Synthetic peptide
  Seed: LRMKWMMAMKYPITA
LRMKMMMKMRYPETA

SEQ ID NO: 236773 - protein, 15 aa, Artificial Sequence
  Description of Artificial Sequence: Synthetic peptide
  Seed: LRMKWMMAMKYPITA
LRMKMMMKMRYPFTA

SEQ ID NO: 236774 - protein, 15 aa, Artificial Sequence
  Description of Artificial Sequence: Synthetic peptide
  Seed: LRMKWMMAMKYPITA
LRMKMMMKMRYPGTA

SEQ ID NO: 236775 - protein, 15 aa, Artificial Sequence
  Description of Artificial Sequence: Synthetic peptide
  Seed: LRMKWMMAMKYPITA
LRMKMMMKMRYPHTA

SEQ ID NO: 236776 - protein, 15 aa, Artificial Sequence
  Description of Artificial Sequence: Synthetic peptide
  Seed: LRMKWMMAMKYPITA
LRMKMMMKMRYPITA

SEQ ID NO: 236777 - protein, 15 aa, Artificial Sequence
  Description of Artificial Sequence: Synthetic peptide
  Seed: LRMKWMMAMKYPITA
LRMKMMMKMRYPKTA

SEQ ID NO: 236778 - protein, 15 aa, Artificial Sequence
  Description of Artificial Sequence: Synthetic peptide
  Seed: LRMKWMMAMKYPITA
LRMKMMMKMRYPLTA

SEQ ID NO: 236779 - protein, 15 aa, Artificial Sequence
  Description of Artificial Sequence: Synthetic peptide
  Seed: LRMKWMMAMKYPITA
LRMKMMMKMRYPMTA

SEQ ID NO: 236780 - protein, 15 aa, Artificial Sequence
  Description of Artificial Sequence: Synthetic peptide
  Seed: LRMKWMMAMKYPITA
LRMKMMMKMRYPQTA

SEQ ID NO: 236781 - protein, 15 aa, Artificial Sequence
  Description of Artificial Sequence: Synthetic peptide
  Seed: LRMKWMMAMKYPITA
LRMKMMMKMRYPRTA

SEQ ID NO: 236782 - protein, 15 aa, Artificial Sequence
  Description of Artificial Sequence: Synthetic peptide
  Seed: LRMKWMMAMKYPITA
LRMKMMMKMRYPSTA

SEQ ID NO: 236783 - protein, 15 aa, Artificial Sequence
  Description of Artificial Sequence: Synthetic peptide
  Seed: LRMKWMMAMKYPITA
LRMKMMMKMRYPTTA

SEQ ID NO: 236784 - protein, 15 aa, Artificial Sequence
  Description of Artificial Sequence: Synthetic peptide
  Seed: LRMKWMMAMKYPITA
LRMKMMMKMRYPVTA

SEQ ID NO: 236785 - protein, 15 aa, Artificial Sequence
  Description of Artificial Sequence: Synthetic peptide
  Seed: LRMKWMMAMKYPITA
LRMKMMMKMRYPYTA

SEQ ID NO: 236786 - protein, 15 aa, Artificial Sequence
  Description of Artificial Sequence: Synthetic peptide
  Seed: LRMKWMMAMKYPITA
LRMKMMMKMSYPATA

SEQ ID NO: 236787 - protein, 15 aa, Artificial Sequence
  Description of Artificial Sequence: Synthetic peptide
  Seed: LRMKWMMAMKYPITA
LRMKMMMKMSYPGTA

SEQ ID NO: 236788 - protein, 15 aa, Artificial Sequence
  Description of Artificial Sequence: Synthetic peptide
  Seed: LRMKWMMAMKYPITA
LRMKMMMKMSYPITA

SEQ ID NO: 236789 - protein, 15 aa, Artificial Sequence
  Description of Artificial Sequence: Synthetic peptide
  Seed: LRMKWMMAMKYPITA
LRMKMMMKMSYPLTA

SEQ ID NO: 236790 - protein, 15 aa, Artificial Sequence
  Description of Artificial Sequence: Synthetic peptide
  Seed: LRMKWMMAMKYPITA
LRMKMMMKMSYPMTA

SEQ ID NO: 236791 - protein, 15 aa, Artificial Sequence
  Description of Artificial Sequence: Synthetic peptide
  Seed: LRMKWMMAMKYPITA
LRMKMMMKMSYPQTA

SEQ ID NO: 236792 - protein, 15 aa, Artificial Sequence
  Description of Artificial Sequence: Synthetic peptide
  Seed: LRMKWMMAMKYPITA
LRMKMMMKMSYPRTA

SEQ ID NO: 236793 - protein, 15 aa, Artificial Sequence
  Description of Artificial Sequence: Synthetic peptide
  Seed: LRMKWMMAMKYPITA
LRMKMMMKMSYPVTA

SEQ ID NO: 236794 - protein, 15 aa, Artificial Sequence
  Description of Artificial Sequence: Synthetic peptide
  Seed: LRMKWMMAMKYPITA
LRMKMMMKMSYPYTA

SEQ ID NO: 236795 - protein, 15 aa, Artificial Sequence
  Description of Artificial Sequence: Synthetic peptide
  Seed: LRMKWMMAMKYPITA
LRMKMMMKMTYPATA

SEQ ID NO: 236796 - protein, 15 aa, Artificial Sequence
  Description of Artificial Sequence: Synthetic peptide
  Seed: LRMKWMMAMKYPITA
LRMKMMMKMTYPFTA

SEQ ID NO: 236797 - protein, 15 aa, Artificial Sequence
  Description of Artificial Sequence: Synthetic peptide
  Seed: LRMKWMMAMKYPITA
LRMKMMMKMTYPGTA

SEQ ID NO: 236798 - protein, 15 aa, Artificial Sequence
  Description of Artificial Sequence: Synthetic peptide
  Seed: LRMKWMMAMKYPITA
LRMKMMMKMTYPITA

SEQ ID NO: 236799 - protein, 15 aa, Artificial Sequence
  Description of Artificial Sequence: Synthetic peptide
  Seed: LRMKWMMAMKYPITA
LRMKMMMKMTYPLTA

SEQ ID NO: 236800 - protein, 15 aa, Artificial Sequence
  Description of Artificial Sequence: Synthetic peptide
  Seed: LRMKWMMAMKYPITA
LRMKMMMKMTYPMTA

SEQ ID NO: 236801 - protein, 15 aa, Artificial Sequence
  Description of Artificial Sequence: Synthetic peptide
  Seed: LRMKWMMAMKYPITA
LRMKMMMKMTYPQTA

SEQ ID NO: 236802 - protein, 15 aa, Artificial Sequence
  Description of Artificial Sequence: Synthetic peptide
  Seed: LRMKWMMAMKYPITA
LRMKMMMKMTYPRTA

SEQ ID NO: 236803 - protein, 15 aa, Artificial Sequence
  Description of Artificial Sequence: Synthetic peptide
  Seed: LRMKWMMAMKYPITA
LRMKMMMKMTYPSTA

SEQ ID NO: 236804 - protein, 15 aa, Artificial Sequence
  Description of Artificial Sequence: Synthetic peptide
  Seed: LRMKWMMAMKYPITA
LRMKMMMKMTYPVTA

SEQ ID NO: 236805 - protein, 15 aa, Artificial Sequence
  Description of Artificial Sequence: Synthetic peptide
  Seed: LRMKWMMAMKYPITA
LRMKMMMKMTYPYTA

SEQ ID NO: 236806 - protein, 15 aa, Artificial Sequence
  Description of Artificial Sequence: Synthetic peptide
  Seed: LRMKWMMAMKYPITA
LRMKMMMKMVYPRTA

SEQ ID NO: 236807 - protein, 15 aa, Artificial Sequence
  Description of Artificial Sequence: Synthetic peptide
  Seed: LRMKWMMAMKYPITA
LRMKMMMKMVYPYTA

SEQ ID NO: 236808 - protein, 15 aa, Artificial Sequence
  Description of Artificial Sequence: Synthetic peptide
  Seed: LRMKWMMAMKYPITA
LRMKMMMLMAYPATA

SEQ ID NO: 236809 - protein, 15 aa, Artificial Sequence
  Description of Artificial Sequence: Synthetic peptide
  Seed: LRMKWMMAMKYPITA
LRMKMMMLMAYPCTA

SEQ ID NO: 236810 - protein, 15 aa, Artificial Sequence
  Description of Artificial Sequence: Synthetic peptide
  Seed: LRMKWMMAMKYPITA
LRMKMMMLMAYPDTA

SEQ ID NO: 236811 - protein, 15 aa, Artificial Sequence
  Description of Artificial Sequence: Synthetic peptide
  Seed: LRMKWMMAMKYPITA
LRMKMMMLMAYPETA

SEQ ID NO: 236812 - protein, 15 aa, Artificial Sequence
  Description of Artificial Sequence: Synthetic peptide
  Seed: LRMKWMMAMKYPITA
LRMKMMMLMAYPFTA

SEQ ID NO: 236813 - protein, 15 aa, Artificial Sequence
  Description of Artificial Sequence: Synthetic peptide
  Seed: LRMKWMMAMKYPITA
LRMKMMMLMAYPGTA

SEQ ID NO: 236814 - protein, 15 aa, Artificial Sequence
  Description of Artificial Sequence: Synthetic peptide
  Seed: LRMKWMMAMKYPITA
LRMKMMMLMAYPHTA

SEQ ID NO: 236815 - protein, 15 aa, Artificial Sequence
  Description of Artificial Sequence: Synthetic peptide
  Seed: LRMKWMMAMKYPITA
LRMKMMMLMAYPITA

SEQ ID NO: 236816 - protein, 15 aa, Artificial Sequence
  Description of Artificial Sequence: Synthetic peptide
  Seed: LRMKWMMAMKYPITA
LRMKMMMLMAYPKTA

SEQ ID NO: 236817 - protein, 15 aa, Artificial Sequence
  Description of Artificial Sequence: Synthetic peptide
  Seed: LRMKWMMAMKYPITA
LRMKMMMLMAYPLTA

SEQ ID NO: 236818 - protein, 15 aa, Artificial Sequence
  Description of Artificial Sequence: Synthetic peptide
  Seed: LRMKWMMAMKYPITA
LRMKMMMLMAYPMTA

SEQ ID NO: 236819 - protein, 15 aa, Artificial Sequence
  Description of Artificial Sequence: Synthetic peptide
  Seed: LRMKWMMAMKYPITA
LRMKMMMLMAYPNTA

SEQ ID NO: 236820 - protein, 15 aa, Artificial Sequence
  Description of Artificial Sequence: Synthetic peptide
  Seed: LRMKWMMAMKYPITA
LRMKMMMLMAYPPTA

SEQ ID NO: 236821 - protein, 15 aa, Artificial Sequence
  Description of Artificial Sequence: Synthetic peptide
  Seed: LRMKWMMAMKYPITA
LRMKMMMLMAYPQTA

SEQ ID NO: 236822 - protein, 15 aa, Artificial Sequence
  Description of Artificial Sequence: Synthetic peptide
  Seed: LRMKWMMAMKYPITA
LRMKMMMLMAYPRTA

SEQ ID NO: 236823 - protein, 15 aa, Artificial Sequence
  Description of Artificial Sequence: Synthetic peptide
  Seed: LRMKWMMAMKYPITA
LRMKMMMLMAYPSTA

SEQ ID NO: 236824 - protein, 15 aa, Artificial Sequence
  Description of Artificial Sequence: Synthetic peptide
  Seed: LRMKWMMAMKYPITA
LRMKMMMLMAYPTTA

SEQ ID NO: 236825 - protein, 15 aa, Artificial Sequence
  Description of Artificial Sequence: Synthetic peptide
  Seed: LRMKWMMAMKYPITA
LRMKMMMLMAYPVTA

SEQ ID NO: 236826 - protein, 15 aa, Artificial Sequence
  Description of Artificial Sequence: Synthetic peptide
  Seed: LRMKWMMAMKYPITA
LRMKMMMLMAYPWTA

SEQ ID NO: 236827 - protein, 15 aa, Artificial Sequence
  Description of Artificial Sequence: Synthetic peptide
  Seed: LRMKWMMAMKYPITA
LRMKMMMLMAYPYTA

SEQ ID NO: 236828 - protein, 15 aa, Artificial Sequence
  Description of Artificial Sequence: Synthetic peptide
  Seed: LRMKWMMAMKYPITA
LRMKMMMLMCYPATA

SEQ ID NO: 236829 - protein, 15 aa, Artificial Sequence
  Description of Artificial Sequence: Synthetic peptide
  Seed: LRMKWMMAMKYPITA
LRMKMMMLMCYPITA

SEQ ID NO: 236830 - protein, 15 aa, Artificial Sequence
  Description of Artificial Sequence: Synthetic peptide
  Seed: LRMKWMMAMKYPITA
LRMKMMMLMCYPLTA

SEQ ID NO: 236831 - protein, 15 aa, Artificial Sequence
  Description of Artificial Sequence: Synthetic peptide
  Seed: LRMKWMMAMKYPITA
LRMKMMMLMCYPVTA

SEQ ID NO: 236832 - protein, 15 aa, Artificial Sequence
  Description of Artificial Sequence: Synthetic peptide
  Seed: LRMKWMMAMKYPITA
LRMKMMMLMDYPATA

SEQ ID NO: 236833 - protein, 15 aa, Artificial Sequence
  Description of Artificial Sequence: Synthetic peptide
  Seed: LRMKWMMAMKYPITA
LRMKMMMLMDYPITA

SEQ ID NO: 236834 - protein, 15 aa, Artificial Sequence
  Description of Artificial Sequence: Synthetic peptide
  Seed: LRMKWMMAMKYPITA
LRMKMMMLMDYPLTA

SEQ ID NO: 236835 - protein, 15 aa, Artificial Sequence
  Description of Artificial Sequence: Synthetic peptide
  Seed: LRMKWMMAMKYPITA
LRMKMMMLMDYPVTA

SEQ ID NO: 236836 - protein, 15 aa, Artificial Sequence
  Description of Artificial Sequence: Synthetic peptide
  Seed: LRMKWMMAMKYPITA
LRMKMMMLMEYPATA

SEQ ID NO: 236837 - protein, 15 aa, Artificial Sequence
  Description of Artificial Sequence: Synthetic peptide
  Seed: LRMKWMMAMKYPITA
LRMKMMMLMEYPITA

SEQ ID NO: 236838 - protein, 15 aa, Artificial Sequence
  Description of Artificial Sequence: Synthetic peptide
  Seed: LRMKWMMAMKYPITA
LRMKMMMLMEYPLTA

SEQ ID NO: 236839 - protein, 15 aa, Artificial Sequence
  Description of Artificial Sequence: Synthetic peptide
  Seed: LRMKWMMAMKYPITA
LRMKMMMLMEYPMTA

SEQ ID NO: 236840 - protein, 15 aa, Artificial Sequence
  Description of Artificial Sequence: Synthetic peptide
  Seed: LRMKWMMAMKYPITA
LRMKMMMLMEYPVTA

SEQ ID NO: 236841 - protein, 15 aa, Artificial Sequence
  Description of Artificial Sequence: Synthetic peptide
  Seed: LRMKWMMAMKYPITA
LRMKMMMLMGYPATA

SEQ ID NO: 236842 - protein, 15 aa, Artificial Sequence
  Description of Artificial Sequence: Synthetic peptide
  Seed: LRMKWMMAMKYPITA
LRMKMMMLMGYPCTA

SEQ ID NO: 236843 - protein, 15 aa, Artificial Sequence
  Description of Artificial Sequence: Synthetic peptide
  Seed: LRMKWMMAMKYPITA
LRMKMMMLMGYPDTA

SEQ ID NO: 236844 - protein, 15 aa, Artificial Sequence
  Description of Artificial Sequence: Synthetic peptide
  Seed: LRMKWMMAMKYPITA
LRMKMMMLMGYPETA

SEQ ID NO: 236845 - protein, 15 aa, Artificial Sequence
  Description of Artificial Sequence: Synthetic peptide
  Seed: LRMKWMMAMKYPITA
LRMKMMMLMGYPFTA

SEQ ID NO: 236846 - protein, 15 aa, Artificial Sequence
  Description of Artificial Sequence: Synthetic peptide
  Seed: LRMKWMMAMKYPITA
LRMKMMMLMGYPGTA

SEQ ID NO: 236847 - protein, 15 aa, Artificial Sequence
  Description of Artificial Sequence: Synthetic peptide
  Seed: LRMKWMMAMKYPITA
LRMKMMMLMGYPHTA

SEQ ID NO: 236848 - protein, 15 aa, Artificial Sequence
  Description of Artificial Sequence: Synthetic peptide
  Seed: LRMKWMMAMKYPITA
LRMKMMMLMGYPITA

SEQ ID NO: 236849 - protein, 15 aa, Artificial Sequence
  Description of Artificial Sequence: Synthetic peptide
  Seed: LRMKWMMAMKYPITA
LRMKMMMLMGYPKTA

SEQ ID NO: 236850 - protein, 15 aa, Artificial Sequence
  Description of Artificial Sequence: Synthetic peptide
  Seed: LRMKWMMAMKYPITA
LRMKMMMLMGYPLTA

SEQ ID NO: 236851 - protein, 15 aa, Artificial Sequence
  Description of Artificial Sequence: Synthetic peptide
  Seed: LRMKWMMAMKYPITA
LRMKMMMLMGYPMTA

SEQ ID NO: 236852 - protein, 15 aa, Artificial Sequence
  Description of Artificial Sequence: Synthetic peptide
  Seed: LRMKWMMAMKYPITA
LRMKMMMLMGYPNTA

SEQ ID NO: 236853 - protein, 15 aa, Artificial Sequence
  Description of Artificial Sequence: Synthetic peptide
  Seed: LRMKWMMAMKYPITA
LRMKMMMLMGYPPTA

SEQ ID NO: 236854 - protein, 15 aa, Artificial Sequence
  Description of Artificial Sequence: Synthetic peptide
  Seed: LRMKWMMAMKYPITA
LRMKMMMLMGYPQTA

SEQ ID NO: 236855 - protein, 15 aa, Artificial Sequence
  Description of Artificial Sequence: Synthetic peptide
  Seed: LRMKWMMAMKYPITA
LRMKMMMLMGYPRTA

SEQ ID NO: 236856 - protein, 15 aa, Artificial Sequence
  Description of Artificial Sequence: Synthetic peptide
  Seed: LRMKWMMAMKYPITA
LRMKMMMLMGYPSTA

SEQ ID NO: 236857 - protein, 15 aa, Artificial Sequence
  Description of Artificial Sequence: Synthetic peptide
  Seed: LRMKWMMAMKYPITA
LRMKMMMLMGYPTTA

SEQ ID NO: 236858 - protein, 15 aa, Artificial Sequence
  Description of Artificial Sequence: Synthetic peptide
  Seed: LRMKWMMAMKYPITA
LRMKMMMLMGYPVTA

SEQ ID NO: 236859 - protein, 15 aa, Artificial Sequence
  Description of Artificial Sequence: Synthetic peptide
  Seed: LRMKWMMAMKYPITA
LRMKMMMLMGYPWTA

SEQ ID NO: 236860 - protein, 15 aa, Artificial Sequence
  Description of Artificial Sequence: Synthetic peptide
  Seed: LRMKWMMAMKYPITA
LRMKMMMLMGYPYTA

SEQ ID NO: 236861 - protein, 15 aa, Artificial Sequence
  Description of Artificial Sequence: Synthetic peptide
  Seed: LRMKWMMAMKYPITA
LRMKMMMLMHYPATA

SEQ ID NO: 236862 - protein, 15 aa, Artificial Sequence
  Description of Artificial Sequence: Synthetic peptide
  Seed: LRMKWMMAMKYPITA
LRMKMMMLMHYPGTA

SEQ ID NO: 236863 - protein, 15 aa, Artificial Sequence
  Description of Artificial Sequence: Synthetic peptide
  Seed: LRMKWMMAMKYPITA
LRMKMMMLMHYPHTA

SEQ ID NO: 236864 - protein, 15 aa, Artificial Sequence
  Description of Artificial Sequence: Synthetic peptide
  Seed: LRMKWMMAMKYPITA
LRMKMMMLMHYPITA

SEQ ID NO: 236865 - protein, 15 aa, Artificial Sequence
  Description of Artificial Sequence: Synthetic peptide
  Seed: LRMKWMMAMKYPITA
LRMKMMMLMHYPKTA

SEQ ID NO: 236866 - protein, 15 aa, Artificial Sequence
  Description of Artificial Sequence: Synthetic peptide
  Seed: LRMKWMMAMKYPITA
LRMKMMMLMHYPLTA

SEQ ID NO: 236867 - protein, 15 aa, Artificial Sequence
  Description of Artificial Sequence: Synthetic peptide
  Seed: LRMKWMMAMKYPITA
LRMKMMMLMHYPMTA

SEQ ID NO: 236868 - protein, 15 aa, Artificial Sequence
  Description of Artificial Sequence: Synthetic peptide
  Seed: LRMKWMMAMKYPITA
LRMKMMMLMHYPQTA

SEQ ID NO: 236869 - protein, 15 aa, Artificial Sequence
  Description of Artificial Sequence: Synthetic peptide
  Seed: LRMKWMMAMKYPITA
LRMKMMMLMHYPRTA

SEQ ID NO: 236870 - protein, 15 aa, Artificial Sequence
  Description of Artificial Sequence: Synthetic peptide
  Seed: LRMKWMMAMKYPITA
LRMKMMMLMHYPSTA

SEQ ID NO: 236871 - protein, 15 aa, Artificial Sequence
  Description of Artificial Sequence: Synthetic peptide
  Seed: LRMKWMMAMKYPITA
LRMKMMMLMHYPTTA

SEQ ID NO: 236872 - protein, 15 aa, Artificial Sequence
  Description of Artificial Sequence: Synthetic peptide
  Seed: LRMKWMMAMKYPITA
LRMKMMMLMHYPVTA

SEQ ID NO: 236873 - protein, 15 aa, Artificial Sequence
  Description of Artificial Sequence: Synthetic peptide
  Seed: LRMKWMMAMKYPITA
LRMKMMMLMHYPYTA

SEQ ID NO: 236874 - protein, 15 aa, Artificial Sequence
  Description of Artificial Sequence: Synthetic peptide
  Seed: LRMKWMMAMKYPITA
LRMKMMMLMIYPATA

SEQ ID NO: 236875 - protein, 15 aa, Artificial Sequence
  Description of Artificial Sequence: Synthetic peptide
  Seed: LRMKWMMAMKYPITA
LRMKMMMLMIYPDTA

SEQ ID NO: 236876 - protein, 15 aa, Artificial Sequence
  Description of Artificial Sequence: Synthetic peptide
  Seed: LRMKWMMAMKYPITA
LRMKMMMLMIYPETA

SEQ ID NO: 236877 - protein, 15 aa, Artificial Sequence
  Description of Artificial Sequence: Synthetic peptide
  Seed: LRMKWMMAMKYPITA
LRMKMMMLMIYPGTA

SEQ ID NO: 236878 - protein, 15 aa, Artificial Sequence
  Description of Artificial Sequence: Synthetic peptide
  Seed: LRMKWMMAMKYPITA
LRMKMMMLMIYPHTA

SEQ ID NO: 236879 - protein, 15 aa, Artificial Sequence
  Description of Artificial Sequence: Synthetic peptide
  Seed: LRMKWMMAMKYPITA
LRMKMMMLMIYPITA

SEQ ID NO: 236880 - protein, 15 aa, Artificial Sequence
  Description of Artificial Sequence: Synthetic peptide
  Seed: LRMKWMMAMKYPITA
LRMKMMMLMIYPLTA

SEQ ID NO: 236881 - protein, 15 aa, Artificial Sequence
  Description of Artificial Sequence: Synthetic peptide
  Seed: LRMKWMMAMKYPITA
LRMKMMMLMIYPMTA

SEQ ID NO: 236882 - protein, 15 aa, Artificial Sequence
  Description of Artificial Sequence: Synthetic peptide
  Seed: LRMKWMMAMKYPITA
LRMKMMMLMIYPNTA

SEQ ID NO: 236883 - protein, 15 aa, Artificial Sequence
  Description of Artificial Sequence: Synthetic peptide
  Seed: LRMKWMMAMKYPITA
LRMKMMMLMIYPQTA

SEQ ID NO: 236884 - protein, 15 aa, Artificial Sequence
  Description of Artificial Sequence: Synthetic peptide
  Seed: LRMKWMMAMKYPITA
LRMKMMMLMIYPRTA

SEQ ID NO: 236885 - protein, 15 aa, Artificial Sequence
  Description of Artificial Sequence: Synthetic peptide
  Seed: LRMKWMMAMKYPITA
LRMKMMMLMIYPSTA

SEQ ID NO: 236886 - protein, 15 aa, Artificial Sequence
  Description of Artificial Sequence: Synthetic peptide
  Seed: LRMKWMMAMKYPITA
LRMKMMMLMIYPTTA

SEQ ID NO: 236887 - protein, 15 aa, Artificial Sequence
  Description of Artificial Sequence: Synthetic peptide
  Seed: LRMKWMMAMKYPITA
LRMKMMMLMIYPVTA

SEQ ID NO: 236888 - protein, 15 aa, Artificial Sequence
  Description of Artificial Sequence: Synthetic peptide
  Seed: LRMKWMMAMKYPITA
LRMKMMMLMIYPYTA

SEQ ID NO: 236889 - protein, 15 aa, Artificial Sequence
  Description of Artificial Sequence: Synthetic peptide
  Seed: LRMKWMMAMKYPITA
LRMKMMMLMKYPATA

SEQ ID NO: 236890 - protein, 15 aa, Artificial Sequence
  Description of Artificial Sequence: Synthetic peptide
  Seed: LRMKWMMAMKYPITA
LRMKMMMLMKYPCTA

SEQ ID NO: 236891 - protein, 15 aa, Artificial Sequence
  Description of Artificial Sequence: Synthetic peptide
  Seed: LRMKWMMAMKYPITA
LRMKMMMLMKYPDTA

SEQ ID NO: 236892 - protein, 15 aa, Artificial Sequence
  Description of Artificial Sequence: Synthetic peptide
  Seed: LRMKWMMAMKYPITA
LRMKMMMLMKYPETA

SEQ ID NO: 236893 - protein, 15 aa, Artificial Sequence
  Description of Artificial Sequence: Synthetic peptide
  Seed: LRMKWMMAMKYPITA
LRMKMMMLMKYPFTA

SEQ ID NO: 236894 - protein, 15 aa, Artificial Sequence
  Description of Artificial Sequence: Synthetic peptide
  Seed: LRMKWMMAMKYPITA
LRMKMMMLMKYPGTA

SEQ ID NO: 236895 - protein, 15 aa, Artificial Sequence
  Description of Artificial Sequence: Synthetic peptide
  Seed: LRMKWMMAMKYPITA
LRMKMMMLMKYPHTA

SEQ ID NO: 236896 - protein, 15 aa, Artificial Sequence
  Description of Artificial Sequence: Synthetic peptide
  Seed: LRMKWMMAMKYPITA
LRMKMMMLMKYPITA

SEQ ID NO: 236897 - protein, 15 aa, Artificial Sequence
  Description of Artificial Sequence: Synthetic peptide
  Seed: LRMKWMMAMKYPITA
LRMKMMMLMKYPKTA

SEQ ID NO: 236898 - protein, 15 aa, Artificial Sequence
  Description of Artificial Sequence: Synthetic peptide
  Seed: LRMKWMMAMKYPITA
LRMKMMMLMKYPLTA

SEQ ID NO: 236899 - protein, 15 aa, Artificial Sequence
  Description of Artificial Sequence: Synthetic peptide
  Seed: LRMKWMMAMKYPITA
LRMKMMMLMKYPMTA

SEQ ID NO: 236900 - protein, 15 aa, Artificial Sequence
  Description of Artificial Sequence: Synthetic peptide
  Seed: LRMKWMMAMKYPITA
LRMKMMMLMKYPNTA

SEQ ID NO: 236901 - protein, 15 aa, Artificial Sequence
  Description of Artificial Sequence: Synthetic peptide
  Seed: LRMKWMMAMKYPITA
LRMKMMMLMKYPPTA

SEQ ID NO: 236902 - protein, 15 aa, Artificial Sequence
  Description of Artificial Sequence: Synthetic peptide
  Seed: LRMKWMMAMKYPITA
LRMKMMMLMKYPQTA

SEQ ID NO: 236903 - protein, 15 aa, Artificial Sequence
  Description of Artificial Sequence: Synthetic peptide
  Seed: LRMKWMMAMKYPITA
LRMKMMMLMKYPRTA

SEQ ID NO: 236904 - protein, 15 aa, Artificial Sequence
  Description of Artificial Sequence: Synthetic peptide
  Seed: LRMKWMMAMKYPITA
LRMKMMMLMKYPSTA

SEQ ID NO: 236905 - protein, 15 aa, Artificial Sequence
  Description of Artificial Sequence: Synthetic peptide
  Seed: LRMKWMMAMKYPITA
LRMKMMMLMKYPTTA

SEQ ID NO: 236906 - protein, 15 aa, Artificial Sequence
  Description of Artificial Sequence: Synthetic peptide
  Seed: LRMKWMMAMKYPITA
LRMKMMMLMKYPVTA

SEQ ID NO: 236907 - protein, 15 aa, Artificial Sequence
  Description of Artificial Sequence: Synthetic peptide
  Seed: LRMKWMMAMKYPITA
LRMKMMMLMKYPWTA

SEQ ID NO: 236908 - protein, 15 aa, Artificial Sequence
  Description of Artificial Sequence: Synthetic peptide
  Seed: LRMKWMMAMKYPITA
LRMKMMMLMKYPYTA

SEQ ID NO: 236909 - protein, 15 aa, Artificial Sequence
  Description of Artificial Sequence: Synthetic peptide
  Seed: LRMKWMMAMKYPITA
LRMKMMMLMLYPGTA

SEQ ID NO: 236910 - protein, 15 aa, Artificial Sequence
  Description of Artificial Sequence: Synthetic peptide
  Seed: LRMKWMMAMKYPITA
LRMKMMMLMLYPMTA

SEQ ID NO: 236911 - protein, 15 aa, Artificial Sequence
  Description of Artificial Sequence: Synthetic peptide
  Seed: LRMKWMMAMKYPITA
LRMKMMMLMMYPGTA

SEQ ID NO: 236912 - protein, 15 aa, Artificial Sequence
  Description of Artificial Sequence: Synthetic peptide
  Seed: LRMKWMMAMKYPITA
LRMKMMMLMMYPITA

SEQ ID NO: 236913 - protein, 15 aa, Artificial Sequence
  Description of Artificial Sequence: Synthetic peptide
  Seed: LRMKWMMAMKYPITA
LRMKMMMLMMYPKTA

SEQ ID NO: 236914 - protein, 15 aa, Artificial Sequence
  Description of Artificial Sequence: Synthetic peptide
  Seed: LRMKWMMAMKYPITA
LRMKMMMLMMYPLTA

SEQ ID NO: 236915 - protein, 15 aa, Artificial Sequence
  Description of Artificial Sequence: Synthetic peptide
  Seed: LRMKWMMAMKYPITA
LRMKMMMLMMYPMTA

SEQ ID NO: 236916 - protein, 15 aa, Artificial Sequence
  Description of Artificial Sequence: Synthetic peptide
  Seed: LRMKWMMAMKYPITA
LRMKMMMLMMYPRTA

SEQ ID NO: 236917 - protein, 15 aa, Artificial Sequence
  Description of Artificial Sequence: Synthetic peptide
  Seed: LRMKWMMAMKYPITA
LRMKMMMLMMYPVTA

SEQ ID NO: 236918 - protein, 15 aa, Artificial Sequence
  Description of Artificial Sequence: Synthetic peptide
  Seed: LRMKWMMAMKYPITA
LRMKMMMLMNYPATA

SEQ ID NO: 236919 - protein, 15 aa, Artificial Sequence
  Description of Artificial Sequence: Synthetic peptide
  Seed: LRMKWMMAMKYPITA
LRMKMMMLMNYPCTA

SEQ ID NO: 236920 - protein, 15 aa, Artificial Sequence
  Description of Artificial Sequence: Synthetic peptide
  Seed: LRMKWMMAMKYPITA
LRMKMMMLMNYPDTA

SEQ ID NO: 236921 - protein, 15 aa, Artificial Sequence
  Description of Artificial Sequence: Synthetic peptide
  Seed: LRMKWMMAMKYPITA
LRMKMMMLMNYPETA

SEQ ID NO: 236922 - protein, 15 aa, Artificial Sequence
  Description of Artificial Sequence: Synthetic peptide
  Seed: LRMKWMMAMKYPITA
LRMKMMMLMNYPFTA

SEQ ID NO: 236923 - protein, 15 aa, Artificial Sequence
  Description of Artificial Sequence: Synthetic peptide
  Seed: LRMKWMMAMKYPITA
LRMKMMMLMNYPGTA

SEQ ID NO: 236924 - protein, 15 aa, Artificial Sequence
  Description of Artificial Sequence: Synthetic peptide
  Seed: LRMKWMMAMKYPITA
LRMKMMMLMNYPHTA

SEQ ID NO: 236925 - protein, 15 aa, Artificial Sequence
  Description of Artificial Sequence: Synthetic peptide
  Seed: LRMKWMMAMKYPITA
LRMKMMMLMNYPITA

SEQ ID NO: 236926 - protein, 15 aa, Artificial Sequence
  Description of Artificial Sequence: Synthetic peptide
  Seed: LRMKWMMAMKYPITA
LRMKMMMLMNYPLTA

SEQ ID NO: 236927 - protein, 15 aa, Artificial Sequence
  Description of Artificial Sequence: Synthetic peptide
  Seed: LRMKWMMAMKYPITA
LRMKMMMLMNYPMTA

SEQ ID NO: 236928 - protein, 15 aa, Artificial Sequence
  Description of Artificial Sequence: Synthetic peptide
  Seed: LRMKWMMAMKYPITA
LRMKMMMLMNYPNTA

SEQ ID NO: 236929 - protein, 15 aa, Artificial Sequence
  Description of Artificial Sequence: Synthetic peptide
  Seed: LRMKWMMAMKYPITA
LRMKMMMLMNYPPTA

SEQ ID NO: 236930 - protein, 15 aa, Artificial Sequence
  Description of Artificial Sequence: Synthetic peptide
  Seed: LRMKWMMAMKYPITA
LRMKMMMLMNYPQTA

SEQ ID NO: 236931 - protein, 15 aa, Artificial Sequence
  Description of Artificial Sequence: Synthetic peptide
  Seed: LRMKWMMAMKYPITA
LRMKMMMLMNYPRTA

SEQ ID NO: 236932 - protein, 15 aa, Artificial Sequence
  Description of Artificial Sequence: Synthetic peptide
  Seed: LRMKWMMAMKYPITA
LRMKMMMLMNYPSTA

SEQ ID NO: 236933 - protein, 15 aa, Artificial Sequence
  Description of Artificial Sequence: Synthetic peptide
  Seed: LRMKWMMAMKYPITA
LRMKMMMLMNYPTTA

SEQ ID NO: 236934 - protein, 15 aa, Artificial Sequence
  Description of Artificial Sequence: Synthetic peptide
  Seed: LRMKWMMAMKYPITA
LRMKMMMLMNYPVTA

SEQ ID NO: 236935 - protein, 15 aa, Artificial Sequence
  Description of Artificial Sequence: Synthetic peptide
  Seed: LRMKWMMAMKYPITA
LRMKMMMLMNYPYTA

SEQ ID NO: 236936 - protein, 15 aa, Artificial Sequence
  Description of Artificial Sequence: Synthetic peptide
  Seed: LRMKWMMAMKYPITA
LRMKMMMLMPYPATA

SEQ ID NO: 236937 - protein, 15 aa, Artificial Sequence
  Description of Artificial Sequence: Synthetic peptide
  Seed: LRMKWMMAMKYPITA
LRMKMMMLMPYPCTA

SEQ ID NO: 236938 - protein, 15 aa, Artificial Sequence
  Description of Artificial Sequence: Synthetic peptide
  Seed: LRMKWMMAMKYPITA
LRMKMMMLMPYPDTA

SEQ ID NO: 236939 - protein, 15 aa, Artificial Sequence
  Description of Artificial Sequence: Synthetic peptide
  Seed: LRMKWMMAMKYPITA
LRMKMMMLMPYPETA

SEQ ID NO: 236940 - protein, 15 aa, Artificial Sequence
  Description of Artificial Sequence: Synthetic peptide
  Seed: LRMKWMMAMKYPITA
LRMKMMMLMPYPFTA

SEQ ID NO: 236941 - protein, 15 aa, Artificial Sequence
  Description of Artificial Sequence: Synthetic peptide
  Seed: LRMKWMMAMKYPITA
LRMKMMMLMPYPGTA

SEQ ID NO: 236942 - protein, 15 aa, Artificial Sequence
  Description of Artificial Sequence: Synthetic peptide
  Seed: LRMKWMMAMKYPITA
LRMKMMMLMPYPHTA

SEQ ID NO: 236943 - protein, 15 aa, Artificial Sequence
  Description of Artificial Sequence: Synthetic peptide
  Seed: LRMKWMMAMKYPITA
LRMKMMMLMPYPITA

SEQ ID NO: 236944 - protein, 15 aa, Artificial Sequence
  Description of Artificial Sequence: Synthetic peptide
  Seed: LRMKWMMAMKYPITA
LRMKMMMLMPYPKTA

SEQ ID NO: 236945 - protein, 15 aa, Artificial Sequence
  Description of Artificial Sequence: Synthetic peptide
  Seed: LRMKWMMAMKYPITA
LRMKMMMLMPYPLTA

SEQ ID NO: 236946 - protein, 15 aa, Artificial Sequence
  Description of Artificial Sequence: Synthetic peptide
  Seed: LRMKWMMAMKYPITA
LRMKMMMLMPYPMTA

SEQ ID NO: 236947 - protein, 15 aa, Artificial Sequence
  Description of Artificial Sequence: Synthetic peptide
  Seed: LRMKWMMAMKYPITA
LRMKMMMLMPYPNTA

SEQ ID NO: 236948 - protein, 15 aa, Artificial Sequence
  Description of Artificial Sequence: Synthetic peptide
  Seed: LRMKWMMAMKYPITA
LRMKMMMLMPYPPTA

SEQ ID NO: 236949 - protein, 15 aa, Artificial Sequence
  Description of Artificial Sequence: Synthetic peptide
  Seed: LRMKWMMAMKYPITA
LRMKMMMLMPYPQTA

SEQ ID NO: 236950 - protein, 15 aa, Artificial Sequence
  Description of Artificial Sequence: Synthetic peptide
  Seed: LRMKWMMAMKYPITA
LRMKMMMLMPYPRTA

SEQ ID NO: 236951 - protein, 15 aa, Artificial Sequence
  Description of Artificial Sequence: Synthetic peptide
  Seed: LRMKWMMAMKYPITA
LRMKMMMLMPYPSTA

SEQ ID NO: 236952 - protein, 15 aa, Artificial Sequence
  Description of Artificial Sequence: Synthetic peptide
  Seed: LRMKWMMAMKYPITA
LRMKMMMLMPYPTTA

SEQ ID NO: 236953 - protein, 15 aa, Artificial Sequence
  Description of Artificial Sequence: Synthetic peptide
  Seed: LRMKWMMAMKYPITA
LRMKMMMLMPYPVTA

SEQ ID NO: 236954 - protein, 15 aa, Artificial Sequence
  Description of Artificial Sequence: Synthetic peptide
  Seed: LRMKWMMAMKYPITA
LRMKMMMLMPYPWTA

SEQ ID NO: 236955 - protein, 15 aa, Artificial Sequence
  Description of Artificial Sequence: Synthetic peptide
  Seed: LRMKWMMAMKYPITA
LRMKMMMLMPYPYTA

SEQ ID NO: 236956 - protein, 15 aa, Artificial Sequence
  Description of Artificial Sequence: Synthetic peptide
  Seed: LRMKWMMAMKYPITA
LRMKMMMLMQYPATA

SEQ ID NO: 236957 - protein, 15 aa, Artificial Sequence
  Description of Artificial Sequence: Synthetic peptide
  Seed: LRMKWMMAMKYPITA
LRMKMMMLMQYPITA

SEQ ID NO: 236958 - protein, 15 aa, Artificial Sequence
  Description of Artificial Sequence: Synthetic peptide
  Seed: LRMKWMMAMKYPITA
LRMKMMMLMQYPLTA

SEQ ID NO: 236959 - protein, 15 aa, Artificial Sequence
  Description of Artificial Sequence: Synthetic peptide
  Seed: LRMKWMMAMKYPITA
LRMKMMMLMQYPMTA

SEQ ID NO: 236960 - protein, 15 aa, Artificial Sequence
  Description of Artificial Sequence: Synthetic peptide
  Seed: LRMKWMMAMKYPITA
LRMKMMMLMQYPRTA

SEQ ID NO: 236961 - protein, 15 aa, Artificial Sequence
  Description of Artificial Sequence: Synthetic peptide
  Seed: LRMKWMMAMKYPITA
LRMKMMMLMQYPSTA

SEQ ID NO: 236962 - protein, 15 aa, Artificial Sequence
  Description of Artificial Sequence: Synthetic peptide
  Seed: LRMKWMMAMKYPITA
LRMKMMMLMQYPVTA

SEQ ID NO: 236963 - protein, 15 aa, Artificial Sequence
  Description of Artificial Sequence: Synthetic peptide
  Seed: LRMKWMMAMKYPITA
LRMKMMMLMRYPATA

SEQ ID NO: 236964 - protein, 15 aa, Artificial Sequence
  Description of Artificial Sequence: Synthetic peptide
  Seed: LRMKWMMAMKYPITA
LRMKMMMLMRYPCTA

SEQ ID NO: 236965 - protein, 15 aa, Artificial Sequence
  Description of Artificial Sequence: Synthetic peptide
  Seed: LRMKWMMAMKYPITA
LRMKMMMLMRYPDTA

SEQ ID NO: 236966 - protein, 15 aa, Artificial Sequence
  Description of Artificial Sequence: Synthetic peptide
  Seed: LRMKWMMAMKYPITA
LRMKMMMLMRYPETA

SEQ ID NO: 236967 - protein, 15 aa, Artificial Sequence
  Description of Artificial Sequence: Synthetic peptide
  Seed: LRMKWMMAMKYPITA
LRMKMMMLMRYPFTA

SEQ ID NO: 236968 - protein, 15 aa, Artificial Sequence
  Description of Artificial Sequence: Synthetic peptide
  Seed: LRMKWMMAMKYPITA
LRMKMMMLMRYPGTA

SEQ ID NO: 236969 - protein, 15 aa, Artificial Sequence
  Description of Artificial Sequence: Synthetic peptide
  Seed: LRMKWMMAMKYPITA
LRMKMMMLMRYPHTA

SEQ ID NO: 236970 - protein, 15 aa, Artificial Sequence
  Description of Artificial Sequence: Synthetic peptide
  Seed: LRMKWMMAMKYPITA
LRMKMMMLMRYPITA

SEQ ID NO: 236971 - protein, 15 aa, Artificial Sequence
  Description of Artificial Sequence: Synthetic peptide
  Seed: LRMKWMMAMKYPITA
LRMKMMMLMRYPKTA

SEQ ID NO: 236972 - protein, 15 aa, Artificial Sequence
  Description of Artificial Sequence: Synthetic peptide
  Seed: LRMKWMMAMKYPITA
LRMKMMMLMRYPLTA

SEQ ID NO: 236973 - protein, 15 aa, Artificial Sequence
  Description of Artificial Sequence: Synthetic peptide
  Seed: LRMKWMMAMKYPITA
LRMKMMMLMRYPMTA

SEQ ID NO: 236974 - protein, 15 aa, Artificial Sequence
  Description of Artificial Sequence: Synthetic peptide
  Seed: LRMKWMMAMKYPITA
LRMKMMMLMRYPNTA

SEQ ID NO: 236975 - protein, 15 aa, Artificial Sequence
  Description of Artificial Sequence: Synthetic peptide
  Seed: LRMKWMMAMKYPITA
LRMKMMMLMRYPPTA

SEQ ID NO: 236976 - protein, 15 aa, Artificial Sequence
  Description of Artificial Sequence: Synthetic peptide
  Seed: LRMKWMMAMKYPITA
LRMKMMMLMRYPQTA

SEQ ID NO: 236977 - protein, 15 aa, Artificial Sequence
  Description of Artificial Sequence: Synthetic peptide
  Seed: LRMKWMMAMKYPITA
LRMKMMMLMRYPRTA

SEQ ID NO: 236978 - protein, 15 aa, Artificial Sequence
  Description of Artificial Sequence: Synthetic peptide
  Seed: LRMKWMMAMKYPITA
LRMKMMMLMRYPSTA

SEQ ID NO: 236979 - protein, 15 aa, Artificial Sequence
  Description of Artificial Sequence: Synthetic peptide
  Seed: LRMKWMMAMKYPITA
LRMKMMMLMRYPTTA

SEQ ID NO: 236980 - protein, 15 aa, Artificial Sequence
  Description of Artificial Sequence: Synthetic peptide
  Seed: LRMKWMMAMKYPITA
LRMKMMMLMRYPVTA

SEQ ID NO: 236981 - protein, 15 aa, Artificial Sequence
  Description of Artificial Sequence: Synthetic peptide
  Seed: LRMKWMMAMKYPITA
LRMKMMMLMRYPWTA

SEQ ID NO: 236982 - protein, 15 aa, Artificial Sequence
  Description of Artificial Sequence: Synthetic peptide
  Seed: LRMKWMMAMKYPITA
LRMKMMMLMRYPYTA

SEQ ID NO: 236983 - protein, 15 aa, Artificial Sequence
  Description of Artificial Sequence: Synthetic peptide
  Seed: LRMKWMMAMKYPITA
LRMKMMMLMSYPATA

SEQ ID NO: 236984 - protein, 15 aa, Artificial Sequence
  Description of Artificial Sequence: Synthetic peptide
  Seed: LRMKWMMAMKYPITA
LRMKMMMLMSYPCTA

SEQ ID NO: 236985 - protein, 15 aa, Artificial Sequence
  Description of Artificial Sequence: Synthetic peptide
  Seed: LRMKWMMAMKYPITA
LRMKMMMLMSYPDTA

SEQ ID NO: 236986 - protein, 15 aa, Artificial Sequence
  Description of Artificial Sequence: Synthetic peptide
  Seed: LRMKWMMAMKYPITA
LRMKMMMLMSYPETA

SEQ ID NO: 236987 - protein, 15 aa, Artificial Sequence
  Description of Artificial Sequence: Synthetic peptide
  Seed: LRMKWMMAMKYPITA
LRMKMMMLMSYPFTA

SEQ ID NO: 236988 - protein, 15 aa, Artificial Sequence
  Description of Artificial Sequence: Synthetic peptide
  Seed: LRMKWMMAMKYPITA
LRMKMMMLMSYPGTA

SEQ ID NO: 236989 - protein, 15 aa, Artificial Sequence
  Description of Artificial Sequence: Synthetic peptide
  Seed: LRMKWMMAMKYPITA
LRMKMMMLMSYPHTA

SEQ ID NO: 236990 - protein, 15 aa, Artificial Sequence
  Description of Artificial Sequence: Synthetic peptide
  Seed: LRMKWMMAMKYPITA
LRMKMMMLMSYPITA

SEQ ID NO: 236991 - protein, 15 aa, Artificial Sequence
  Description of Artificial Sequence: Synthetic peptide
  Seed: LRMKWMMAMKYPITA
LRMKMMMLMSYPKTA

SEQ ID NO: 236992 - protein, 15 aa, Artificial Sequence
  Description of Artificial Sequence: Synthetic peptide
  Seed: LRMKWMMAMKYPITA
LRMKMMMLMSYPLTA

SEQ ID NO: 236993 - protein, 15 aa, Artificial Sequence
  Description of Artificial Sequence: Synthetic peptide
  Seed: LRMKWMMAMKYPITA
LRMKMMMLMSYPMTA

SEQ ID NO: 236994 - protein, 15 aa, Artificial Sequence
  Description of Artificial Sequence: Synthetic peptide
  Seed: LRMKWMMAMKYPITA
LRMKMMMLMSYPNTA

SEQ ID NO: 236995 - protein, 15 aa, Artificial Sequence
  Description of Artificial Sequence: Synthetic peptide
  Seed: LRMKWMMAMKYPITA
LRMKMMMLMSYPPTA

SEQ ID NO: 236996 - protein, 15 aa, Artificial Sequence
  Description of Artificial Sequence: Synthetic peptide
  Seed: LRMKWMMAMKYPITA
LRMKMMMLMSYPQTA

SEQ ID NO: 236997 - protein, 15 aa, Artificial Sequence
  Description of Artificial Sequence: Synthetic peptide
  Seed: LRMKWMMAMKYPITA
LRMKMMMLMSYPRTA

SEQ ID NO: 236998 - protein, 15 aa, Artificial Sequence
  Description of Artificial Sequence: Synthetic peptide
  Seed: LRMKWMMAMKYPITA
LRMKMMMLMSYPSTA

SEQ ID NO: 236999 - protein, 15 aa, Artificial Sequence
  Description of Artificial Sequence: Synthetic peptide
  Seed: LRMKWMMAMKYPITA
LRMKMMMLMSYPTTA

SEQ ID NO: 237000 - protein, 15 aa, Artificial Sequence
  Description of Artificial Sequence: Synthetic peptide
  Seed: LRMKWMMAMKYPITA
LRMKMMMLMSYPVTA

SEQ ID NO: 237001 - protein, 15 aa, Artificial Sequence
  Description of Artificial Sequence: Synthetic peptide
  Seed: LRMKWMMAMKYPITA
LRMKMMMLMSYPYTA

SEQ ID NO: 237002 - protein, 15 aa, Artificial Sequence
  Description of Artificial Sequence: Synthetic peptide
  Seed: LRMKWMMAMKYPITA
LRMKMMMLMTYPATA

SEQ ID NO: 237003 - protein, 15 aa, Artificial Sequence
  Description of Artificial Sequence: Synthetic peptide
  Seed: LRMKWMMAMKYPITA
LRMKMMMLMTYPCTA

SEQ ID NO: 237004 - protein, 15 aa, Artificial Sequence
  Description of Artificial Sequence: Synthetic peptide
  Seed: LRMKWMMAMKYPITA
LRMKMMMLMTYPDTA

SEQ ID NO: 237005 - protein, 15 aa, Artificial Sequence
  Description of Artificial Sequence: Synthetic peptide
  Seed: LRMKWMMAMKYPITA
LRMKMMMLMTYPETA

SEQ ID NO: 237006 - protein, 15 aa, Artificial Sequence
  Description of Artificial Sequence: Synthetic peptide
  Seed: LRMKWMMAMKYPITA
LRMKMMMLMTYPFTA

SEQ ID NO: 237007 - protein, 15 aa, Artificial Sequence
  Description of Artificial Sequence: Synthetic peptide
  Seed: LRMKWMMAMKYPITA
LRMKMMMLMTYPGTA

SEQ ID NO: 237008 - protein, 15 aa, Artificial Sequence
  Description of Artificial Sequence: Synthetic peptide
  Seed: LRMKWMMAMKYPITA
LRMKMMMLMTYPHTA

SEQ ID NO: 237009 - protein, 15 aa, Artificial Sequence
  Description of Artificial Sequence: Synthetic peptide
  Seed: LRMKWMMAMKYPITA
LRMKMMMLMTYPITA

SEQ ID NO: 237010 - protein, 15 aa, Artificial Sequence
  Description of Artificial Sequence: Synthetic peptide
  Seed: LRMKWMMAMKYPITA
LRMKMMMLMTYPKTA

SEQ ID NO: 237011 - protein, 15 aa, Artificial Sequence
  Description of Artificial Sequence: Synthetic peptide
  Seed: LRMKWMMAMKYPITA
LRMKMMMLMTYPLTA

SEQ ID NO: 237012 - protein, 15 aa, Artificial Sequence
  Description of Artificial Sequence: Synthetic peptide
  Seed: LRMKWMMAMKYPITA
LRMKMMMLMTYPMTA

SEQ ID NO: 237013 - protein, 15 aa, Artificial Sequence
  Description of Artificial Sequence: Synthetic peptide
  Seed: LRMKWMMAMKYPITA
LRMKMMMLMTYPNTA

SEQ ID NO: 237014 - protein, 15 aa, Artificial Sequence
  Description of Artificial Sequence: Synthetic peptide
  Seed: LRMKWMMAMKYPITA
LRMKMMMLMTYPPTA

SEQ ID NO: 237015 - protein, 15 aa, Artificial Sequence
  Description of Artificial Sequence: Synthetic peptide
  Seed: LRMKWMMAMKYPITA
LRMKMMMLMTYPQTA

SEQ ID NO: 237016 - protein, 15 aa, Artificial Sequence
  Description of Artificial Sequence: Synthetic peptide
  Seed: LRMKWMMAMKYPITA
LRMKMMMLMTYPRTA

SEQ ID NO: 237017 - protein, 15 aa, Artificial Sequence
  Description of Artificial Sequence: Synthetic peptide
  Seed: LRMKWMMAMKYPITA
LRMKMMMLMTYPSTA

SEQ ID NO: 237018 - protein, 15 aa, Artificial Sequence
  Description of Artificial Sequence: Synthetic peptide
  Seed: LRMKWMMAMKYPITA
LRMKMMMLMTYPTTA

SEQ ID NO: 237019 - protein, 15 aa, Artificial Sequence
  Description of Artificial Sequence: Synthetic peptide
  Seed: LRMKWMMAMKYPITA
LRMKMMMLMTYPVTA

SEQ ID NO: 237020 - protein, 15 aa, Artificial Sequence
  Description of Artificial Sequence: Synthetic peptide
  Seed: LRMKWMMAMKYPITA
LRMKMMMLMTYPYTA

SEQ ID NO: 237021 - protein, 15 aa, Artificial Sequence
  Description of Artificial Sequence: Synthetic peptide
  Seed: LRMKWMMAMKYPITA
LRMKMMMLMVYPATA

SEQ ID NO: 237022 - protein, 15 aa, Artificial Sequence
  Description of Artificial Sequence: Synthetic peptide
  Seed: LRMKWMMAMKYPITA
LRMKMMMLMVYPCTA

SEQ ID NO: 237023 - protein, 15 aa, Artificial Sequence
  Description of Artificial Sequence: Synthetic peptide
  Seed: LRMKWMMAMKYPITA
LRMKMMMLMVYPDTA

SEQ ID NO: 237024 - protein, 15 aa, Artificial Sequence
  Description of Artificial Sequence: Synthetic peptide
  Seed: LRMKWMMAMKYPITA
LRMKMMMLMVYPETA

SEQ ID NO: 237025 - protein, 15 aa, Artificial Sequence
  Description of Artificial Sequence: Synthetic peptide
  Seed: LRMKWMMAMKYPITA
LRMKMMMLMVYPGTA

SEQ ID NO: 237026 - protein, 15 aa, Artificial Sequence
  Description of Artificial Sequence: Synthetic peptide
  Seed: LRMKWMMAMKYPITA
LRMKMMMLMVYPHTA

SEQ ID NO: 237027 - protein, 15 aa, Artificial Sequence
  Description of Artificial Sequence: Synthetic peptide
  Seed: LRMKWMMAMKYPITA
LRMKMMMLMVYPITA

SEQ ID NO: 237028 - protein, 15 aa, Artificial Sequence
  Description of Artificial Sequence: Synthetic peptide
  Seed: LRMKWMMAMKYPITA
LRMKMMMLMVYPKTA

SEQ ID NO: 237029 - protein, 15 aa, Artificial Sequence
  Description of Artificial Sequence: Synthetic peptide
  Seed: LRMKWMMAMKYPITA
LRMKMMMLMVYPLTA

SEQ ID NO: 237030 - protein, 15 aa, Artificial Sequence
  Description of Artificial Sequence: Synthetic peptide
  Seed: LRMKWMMAMKYPITA
LRMKMMMLMVYPMTA

SEQ ID NO: 237031 - protein, 15 aa, Artificial Sequence
  Description of Artificial Sequence: Synthetic peptide
  Seed: LRMKWMMAMKYPITA
LRMKMMMLMVYPNTA

SEQ ID NO: 237032 - protein, 15 aa, Artificial Sequence
  Description of Artificial Sequence: Synthetic peptide
  Seed: LRMKWMMAMKYPITA
LRMKMMMLMVYPPTA

SEQ ID NO: 237033 - protein, 15 aa, Artificial Sequence
  Description of Artificial Sequence: Synthetic peptide
  Seed: LRMKWMMAMKYPITA
LRMKMMMLMVYPQTA

SEQ ID NO: 237034 - protein, 15 aa, Artificial Sequence
  Description of Artificial Sequence: Synthetic peptide
  Seed: LRMKWMMAMKYPITA
LRMKMMMLMVYPRTA

SEQ ID NO: 237035 - protein, 15 aa, Artificial Sequence
  Description of Artificial Sequence: Synthetic peptide
  Seed: LRMKWMMAMKYPITA
LRMKMMMLMVYPSTA

SEQ ID NO: 237036 - protein, 15 aa, Artificial Sequence
  Description of Artificial Sequence: Synthetic peptide
  Seed: LRMKWMMAMKYPITA
LRMKMMMLMVYPTTA

SEQ ID NO: 237037 - protein, 15 aa, Artificial Sequence
  Description of Artificial Sequence: Synthetic peptide
  Seed: LRMKWMMAMKYPITA
LRMKMMMLMVYPVTA

SEQ ID NO: 237038 - protein, 15 aa, Artificial Sequence
  Description of Artificial Sequence: Synthetic peptide
  Seed: LRMKWMMAMKYPITA
LRMKMMMLMVYPYTA

SEQ ID NO: 237039 - protein, 15 aa, Artificial Sequence
  Description of Artificial Sequence: Synthetic peptide
  Seed: LRMKWMMAMKYPITA
LRMKMMMMMAYPATA

SEQ ID NO: 237040 - protein, 15 aa, Artificial Sequence
  Description of Artificial Sequence: Synthetic peptide
  Seed: LRMKWMMAMKYPITA
LRMKMMMMMAYPCTA

SEQ ID NO: 237041 - protein, 15 aa, Artificial Sequence
  Description of Artificial Sequence: Synthetic peptide
  Seed: LRMKWMMAMKYPITA
LRMKMMMMMAYPDTA

SEQ ID NO: 237042 - protein, 15 aa, Artificial Sequence
  Description of Artificial Sequence: Synthetic peptide
  Seed: LRMKWMMAMKYPITA
LRMKMMMMMAYPETA

SEQ ID NO: 237043 - protein, 15 aa, Artificial Sequence
  Description of Artificial Sequence: Synthetic peptide
  Seed: LRMKWMMAMKYPITA
LRMKMMMMMAYPFTA

SEQ ID NO: 237044 - protein, 15 aa, Artificial Sequence
  Description of Artificial Sequence: Synthetic peptide
  Seed: LRMKWMMAMKYPITA
LRMKMMMMMAYPGTA

SEQ ID NO: 237045 - protein, 15 aa, Artificial Sequence
  Description of Artificial Sequence: Synthetic peptide
  Seed: LRMKWMMAMKYPITA
LRMKMMMMMAYPHTA

SEQ ID NO: 237046 - protein, 15 aa, Artificial Sequence
  Description of Artificial Sequence: Synthetic peptide
  Seed: LRMKWMMAMKYPITA
LRMKMMMMMAYPITA

SEQ ID NO: 237047 - protein, 15 aa, Artificial Sequence
  Description of Artificial Sequence: Synthetic peptide
  Seed: LRMKWMMAMKYPITA
LRMKMMMMMAYPKTA

SEQ ID NO: 237048 - protein, 15 aa, Artificial Sequence
  Description of Artificial Sequence: Synthetic peptide
  Seed: LRMKWMMAMKYPITA
LRMKMMMMMAYPLTA

SEQ ID NO: 237049 - protein, 15 aa, Artificial Sequence
  Description of Artificial Sequence: Synthetic peptide
  Seed: LRMKWMMAMKYPITA
LRMKMMMMMAYPMTA

SEQ ID NO: 237050 - protein, 15 aa, Artificial Sequence
  Description of Artificial Sequence: Synthetic peptide
  Seed: LRMKWMMAMKYPITA
LRMKMMMMMAYPNTA

SEQ ID NO: 237051 - protein, 15 aa, Artificial Sequence
  Description of Artificial Sequence: Synthetic peptide
  Seed: LRMKWMMAMKYPITA
LRMKMMMMMAYPPTA

SEQ ID NO: 237052 - protein, 15 aa, Artificial Sequence
  Description of Artificial Sequence: Synthetic peptide
  Seed: LRMKWMMAMKYPITA
LRMKMMMMMAYPQTA

SEQ ID NO: 237053 - protein, 15 aa, Artificial Sequence
  Description of Artificial Sequence: Synthetic peptide
  Seed: LRMKWMMAMKYPITA
LRMKMMMMMAYPRTA

SEQ ID NO: 237054 - protein, 15 aa, Artificial Sequence
  Description of Artificial Sequence: Synthetic peptide
  Seed: LRMKWMMAMKYPITA
LRMKMMMMMAYPSTA

SEQ ID NO: 237055 - protein, 15 aa, Artificial Sequence
  Description of Artificial Sequence: Synthetic peptide
  Seed: LRMKWMMAMKYPITA
LRMKMMMMMAYPTTA

SEQ ID NO: 237056 - protein, 15 aa, Artificial Sequence
  Description of Artificial Sequence: Synthetic peptide
  Seed: LRMKWMMAMKYPITA
LRMKMMMMMAYPVTA

SEQ ID NO: 237057 - protein, 15 aa, Artificial Sequence
  Description of Artificial Sequence: Synthetic peptide
  Seed: LRMKWMMAMKYPITA
LRMKMMMMMAYPWTA

SEQ ID NO: 237058 - protein, 15 aa, Artificial Sequence
  Description of Artificial Sequence: Synthetic peptide
  Seed: LRMKWMMAMKYPITA
LRMKMMMMMAYPYTA

SEQ ID NO: 237059 - protein, 15 aa, Artificial Sequence
  Description of Artificial Sequence: Synthetic peptide
  Seed: LRMKWMMAMKYPITA
LRMKMMMMMCYPATA

SEQ ID NO: 237060 - protein, 15 aa, Artificial Sequence
  Description of Artificial Sequence: Synthetic peptide
  Seed: LRMKWMMAMKYPITA
LRMKMMMMMCYPITA

SEQ ID NO: 237061 - protein, 15 aa, Artificial Sequence
  Description of Artificial Sequence: Synthetic peptide
  Seed: LRMKWMMAMKYPITA
LRMKMMMMMCYPLTA

SEQ ID NO: 237062 - protein, 15 aa, Artificial Sequence
  Description of Artificial Sequence: Synthetic peptide
  Seed: LRMKWMMAMKYPITA
LRMKMMMMMCYPMTA

SEQ ID NO: 237063 - protein, 15 aa, Artificial Sequence
  Description of Artificial Sequence: Synthetic peptide
  Seed: LRMKWMMAMKYPITA
LRMKMMMMMCYPNTA

SEQ ID NO: 237064 - protein, 15 aa, Artificial Sequence
  Description of Artificial Sequence: Synthetic peptide
  Seed: LRMKWMMAMKYPITA
LRMKMMMMMCYPSTA

SEQ ID NO: 237065 - protein, 15 aa, Artificial Sequence
  Description of Artificial Sequence: Synthetic peptide
  Seed: LRMKWMMAMKYPITA
LRMKMMMMMCYPVTA

SEQ ID NO: 237066 - protein, 15 aa, Artificial Sequence
  Description of Artificial Sequence: Synthetic peptide
  Seed: LRMKWMMAMKYPITA
LRMKMMMMMDYPATA

SEQ ID NO: 237067 - protein, 15 aa, Artificial Sequence
  Description of Artificial Sequence: Synthetic peptide
  Seed: LRMKWMMAMKYPITA
LRMKMMMMMDYPITA

SEQ ID NO: 237068 - protein, 15 aa, Artificial Sequence
  Description of Artificial Sequence: Synthetic peptide
  Seed: LRMKWMMAMKYPITA
LRMKMMMMMDYPLTA

SEQ ID NO: 237069 - protein, 15 aa, Artificial Sequence
  Description of Artificial Sequence: Synthetic peptide
  Seed: LRMKWMMAMKYPITA
LRMKMMMMMDYPSTA

SEQ ID NO: 237070 - protein, 15 aa, Artificial Sequence
  Description of Artificial Sequence: Synthetic peptide
  Seed: LRMKWMMAMKYPITA
LRMKMMMMMDYPVTA

SEQ ID NO: 237071 - protein, 15 aa, Artificial Sequence
  Description of Artificial Sequence: Synthetic peptide
  Seed: LRMKWMMAMKYPITA
LRMKMMMMMEYPATA

SEQ ID NO: 237072 - protein, 15 aa, Artificial Sequence
  Description of Artificial Sequence: Synthetic peptide
  Seed: LRMKWMMAMKYPITA
LRMKMMMMMEYPITA

SEQ ID NO: 237073 - protein, 15 aa, Artificial Sequence
  Description of Artificial Sequence: Synthetic peptide
  Seed: LRMKWMMAMKYPITA
LRMKMMMMMEYPLTA

SEQ ID NO: 237074 - protein, 15 aa, Artificial Sequence
  Description of Artificial Sequence: Synthetic peptide
  Seed: LRMKWMMAMKYPITA
LRMKMMMMMEYPMTA

SEQ ID NO: 237075 - protein, 15 aa, Artificial Sequence
  Description of Artificial Sequence: Synthetic peptide
  Seed: LRMKWMMAMKYPITA
LRMKMMMMMEYPSTA

SEQ ID NO: 237076 - protein, 15 aa, Artificial Sequence
  Description of Artificial Sequence: Synthetic peptide
  Seed: LRMKWMMAMKYPITA
LRMKMMMMMEYPVTA

SEQ ID NO: 237077 - protein, 15 aa, Artificial Sequence
  Description of Artificial Sequence: Synthetic peptide
  Seed: LRMKWMMAMKYPITA
LRMKMMMMMGYPATA

SEQ ID NO: 237078 - protein, 15 aa, Artificial Sequence
  Description of Artificial Sequence: Synthetic peptide
  Seed: LRMKWMMAMKYPITA
LRMKMMMMMGYPCTA

SEQ ID NO: 237079 - protein, 15 aa, Artificial Sequence
  Description of Artificial Sequence: Synthetic peptide
  Seed: LRMKWMMAMKYPITA
LRMKMMMMMGYPDTA

SEQ ID NO: 237080 - protein, 15 aa, Artificial Sequence
  Description of Artificial Sequence: Synthetic peptide
  Seed: LRMKWMMAMKYPITA
LRMKMMMMMGYPETA

SEQ ID NO: 237081 - protein, 15 aa, Artificial Sequence
  Description of Artificial Sequence: Synthetic peptide
  Seed: LRMKWMMAMKYPITA
LRMKMMMMMGYPFTA

SEQ ID NO: 237082 - protein, 15 aa, Artificial Sequence
  Description of Artificial Sequence: Synthetic peptide
  Seed: LRMKWMMAMKYPITA
LRMKMMMMMGYPGTA

SEQ ID NO: 237083 - protein, 15 aa, Artificial Sequence
  Description of Artificial Sequence: Synthetic peptide
  Seed: LRMKWMMAMKYPITA
LRMKMMMMMGYPHTA

SEQ ID NO: 237084 - protein, 15 aa, Artificial Sequence
  Description of Artificial Sequence: Synthetic peptide
  Seed: LRMKWMMAMKYPITA
LRMKMMMMMGYPITA

SEQ ID NO: 237085 - protein, 15 aa, Artificial Sequence
  Description of Artificial Sequence: Synthetic peptide
  Seed: LRMKWMMAMKYPITA
LRMKMMMMMGYPKTA

SEQ ID NO: 237086 - protein, 15 aa, Artificial Sequence
  Description of Artificial Sequence: Synthetic peptide
  Seed: LRMKWMMAMKYPITA
LRMKMMMMMGYPLTA

SEQ ID NO: 237087 - protein, 15 aa, Artificial Sequence
  Description of Artificial Sequence: Synthetic peptide
  Seed: LRMKWMMAMKYPITA
LRMKMMMMMGYPMTA

SEQ ID NO: 237088 - protein, 15 aa, Artificial Sequence
  Description of Artificial Sequence: Synthetic peptide
  Seed: LRMKWMMAMKYPITA
LRMKMMMMMGYPNTA

SEQ ID NO: 237089 - protein, 15 aa, Artificial Sequence
  Description of Artificial Sequence: Synthetic peptide
  Seed: LRMKWMMAMKYPITA
LRMKMMMMMGYPPTA

SEQ ID NO: 237090 - protein, 15 aa, Artificial Sequence
  Description of Artificial Sequence: Synthetic peptide
  Seed: LRMKWMMAMKYPITA
LRMKMMMMMGYPQTA

SEQ ID NO: 237091 - protein, 15 aa, Artificial Sequence
  Description of Artificial Sequence: Synthetic peptide
  Seed: LRMKWMMAMKYPITA
LRMKMMMMMGYPRTA

SEQ ID NO: 237092 - protein, 15 aa, Artificial Sequence
  Description of Artificial Sequence: Synthetic peptide
  Seed: LRMKWMMAMKYPITA
LRMKMMMMMGYPSTA

SEQ ID NO: 237093 - protein, 15 aa, Artificial Sequence
  Description of Artificial Sequence: Synthetic peptide
  Seed: LRMKWMMAMKYPITA
LRMKMMMMMGYPTTA

SEQ ID NO: 237094 - protein, 15 aa, Artificial Sequence
  Description of Artificial Sequence: Synthetic peptide
  Seed: LRMKWMMAMKYPITA
LRMKMMMMMGYPVTA

SEQ ID NO: 237095 - protein, 15 aa, Artificial Sequence
  Description of Artificial Sequence: Synthetic peptide
  Seed: LRMKWMMAMKYPITA
LRMKMMMMMGYPWTA

SEQ ID NO: 237096 - protein, 15 aa, Artificial Sequence
  Description of Artificial Sequence: Synthetic peptide
  Seed: LRMKWMMAMKYPITA
LRMKMMMMMGYPYTA

SEQ ID NO: 237097 - protein, 15 aa, Artificial Sequence
  Description of Artificial Sequence: Synthetic peptide
  Seed: LRMKWMMAMKYPITA
LRMKMMMMMHYPATA

SEQ ID NO: 237098 - protein, 15 aa, Artificial Sequence
  Description of Artificial Sequence: Synthetic peptide
  Seed: LRMKWMMAMKYPITA
LRMKMMMMMHYPGTA

SEQ ID NO: 237099 - protein, 15 aa, Artificial Sequence
  Description of Artificial Sequence: Synthetic peptide
  Seed: LRMKWMMAMKYPITA
LRMKMMMMMHYPHTA

SEQ ID NO: 237100 - protein, 15 aa, Artificial Sequence
  Description of Artificial Sequence: Synthetic peptide
  Seed: LRMKWMMAMKYPITA
LRMKMMMMMHYPITA

SEQ ID NO: 237101 - protein, 15 aa, Artificial Sequence
  Description of Artificial Sequence: Synthetic peptide
  Seed: LRMKWMMAMKYPITA
LRMKMMMMMHYPKTA

SEQ ID NO: 237102 - protein, 15 aa, Artificial Sequence
  Description of Artificial Sequence: Synthetic peptide
  Seed: LRMKWMMAMKYPITA
LRMKMMMMMHYPLTA

SEQ ID NO: 237103 - protein, 15 aa, Artificial Sequence
  Description of Artificial Sequence: Synthetic peptide
  Seed: LRMKWMMAMKYPITA
LRMKMMMMMHYPMTA

SEQ ID NO: 237104 - protein, 15 aa, Artificial Sequence
  Description of Artificial Sequence: Synthetic peptide
  Seed: LRMKWMMAMKYPITA
LRMKMMMMMHYPNTA

SEQ ID NO: 237105 - protein, 15 aa, Artificial Sequence
  Description of Artificial Sequence: Synthetic peptide
  Seed: LRMKWMMAMKYPITA
LRMKMMMMMHYPQTA

SEQ ID NO: 237106 - protein, 15 aa, Artificial Sequence
  Description of Artificial Sequence: Synthetic peptide
  Seed: LRMKWMMAMKYPITA
LRMKMMMMMHYPRTA

SEQ ID NO: 237107 - protein, 15 aa, Artificial Sequence
  Description of Artificial Sequence: Synthetic peptide
  Seed: LRMKWMMAMKYPITA
LRMKMMMMMHYPSTA

SEQ ID NO: 237108 - protein, 15 aa, Artificial Sequence
  Description of Artificial Sequence: Synthetic peptide
  Seed: LRMKWMMAMKYPITA
LRMKMMMMMHYPTTA

SEQ ID NO: 237109 - protein, 15 aa, Artificial Sequence
  Description of Artificial Sequence: Synthetic peptide
  Seed: LRMKWMMAMKYPITA
LRMKMMMMMHYPVTA

SEQ ID NO: 237110 - protein, 15 aa, Artificial Sequence
  Description of Artificial Sequence: Synthetic peptide
  Seed: LRMKWMMAMKYPITA
LRMKMMMMMHYPYTA

SEQ ID NO: 237111 - protein, 15 aa, Artificial Sequence
  Description of Artificial Sequence: Synthetic peptide
  Seed: LRMKWMMAMKYPITA
LRMKMMMMMIYPATA

SEQ ID NO: 237112 - protein, 15 aa, Artificial Sequence
  Description of Artificial Sequence: Synthetic peptide
  Seed: LRMKWMMAMKYPITA
LRMKMMMMMIYPCTA

SEQ ID NO: 237113 - protein, 15 aa, Artificial Sequence
  Description of Artificial Sequence: Synthetic peptide
  Seed: LRMKWMMAMKYPITA
LRMKMMMMMIYPDTA

SEQ ID NO: 237114 - protein, 15 aa, Artificial Sequence
  Description of Artificial Sequence: Synthetic peptide
  Seed: LRMKWMMAMKYPITA
LRMKMMMMMIYPETA

SEQ ID NO: 237115 - protein, 15 aa, Artificial Sequence
  Description of Artificial Sequence: Synthetic peptide
  Seed: LRMKWMMAMKYPITA
LRMKMMMMMIYPGTA

SEQ ID NO: 237116 - protein, 15 aa, Artificial Sequence
  Description of Artificial Sequence: Synthetic peptide
  Seed: LRMKWMMAMKYPITA
LRMKMMMMMIYPHTA

SEQ ID NO: 237117 - protein, 15 aa, Artificial Sequence
  Description of Artificial Sequence: Synthetic peptide
  Seed: LRMKWMMAMKYPITA
LRMKMMMMMIYPITA

SEQ ID NO: 237118 - protein, 15 aa, Artificial Sequence
  Description of Artificial Sequence: Synthetic peptide
  Seed: LRMKWMMAMKYPITA
LRMKMMMMMIYPKTA

SEQ ID NO: 237119 - protein, 15 aa, Artificial Sequence
  Description of Artificial Sequence: Synthetic peptide
  Seed: LRMKWMMAMKYPITA
LRMKMMMMMIYPLTA

SEQ ID NO: 237120 - protein, 15 aa, Artificial Sequence
  Description of Artificial Sequence: Synthetic peptide
  Seed: LRMKWMMAMKYPITA
LRMKMMMMMIYPMTA

SEQ ID NO: 237121 - protein, 15 aa, Artificial Sequence
  Description of Artificial Sequence: Synthetic peptide
  Seed: LRMKWMMAMKYPITA
LRMKMMMMMIYPNTA

SEQ ID NO: 237122 - protein, 15 aa, Artificial Sequence
  Description of Artificial Sequence: Synthetic peptide
  Seed: LRMKWMMAMKYPITA
LRMKMMMMMIYPQTA

SEQ ID NO: 237123 - protein, 15 aa, Artificial Sequence
  Description of Artificial Sequence: Synthetic peptide
  Seed: LRMKWMMAMKYPITA
LRMKMMMMMIYPRTA

SEQ ID NO: 237124 - protein, 15 aa, Artificial Sequence
  Description of Artificial Sequence: Synthetic peptide
  Seed: LRMKWMMAMKYPITA
LRMKMMMMMIYPSTA

SEQ ID NO: 237125 - protein, 15 aa, Artificial Sequence
  Description of Artificial Sequence: Synthetic peptide
  Seed: LRMKWMMAMKYPITA
LRMKMMMMMIYPTTA

SEQ ID NO: 237126 - protein, 15 aa, Artificial Sequence
  Description of Artificial Sequence: Synthetic peptide
  Seed: LRMKWMMAMKYPITA
LRMKMMMMMIYPVTA

SEQ ID NO: 237127 - protein, 15 aa, Artificial Sequence
  Description of Artificial Sequence: Synthetic peptide
  Seed: LRMKWMMAMKYPITA
LRMKMMMMMKYPATA

SEQ ID NO: 237128 - protein, 15 aa, Artificial Sequence
  Description of Artificial Sequence: Synthetic peptide
  Seed: LRMKWMMAMKYPITA
LRMKMMMMMKYPCTA

SEQ ID NO: 237129 - protein, 15 aa, Artificial Sequence
  Description of Artificial Sequence: Synthetic peptide
  Seed: LRMKWMMAMKYPITA
LRMKMMMMMKYPDTA

SEQ ID NO: 237130 - protein, 15 aa, Artificial Sequence
  Description of Artificial Sequence: Synthetic peptide
  Seed: LRMKWMMAMKYPITA
LRMKMMMMMKYPETA

SEQ ID NO: 237131 - protein, 15 aa, Artificial Sequence
  Description of Artificial Sequence: Synthetic peptide
  Seed: LRMKWMMAMKYPITA
LRMKMMMMMKYPFTA

SEQ ID NO: 237132 - protein, 15 aa, Artificial Sequence
  Description of Artificial Sequence: Synthetic peptide
  Seed: LRMKWMMAMKYPITA
LRMKMMMMMKYPGTA

SEQ ID NO: 237133 - protein, 15 aa, Artificial Sequence
  Description of Artificial Sequence: Synthetic peptide
  Seed: LRMKWMMAMKYPITA
LRMKMMMMMKYPHTA

SEQ ID NO: 237134 - protein, 15 aa, Artificial Sequence
  Description of Artificial Sequence: Synthetic peptide
  Seed: LRMKWMMAMKYPITA
LRMKMMMMMKYPITA

SEQ ID NO: 237135 - protein, 15 aa, Artificial Sequence
  Description of Artificial Sequence: Synthetic peptide
  Seed: LRMKWMMAMKYPITA
LRMKMMMMMKYPKTA

SEQ ID NO: 237136 - protein, 15 aa, Artificial Sequence
  Description of Artificial Sequence: Synthetic peptide
  Seed: LRMKWMMAMKYPITA
LRMKMMMMMKYPLTA

SEQ ID NO: 237137 - protein, 15 aa, Artificial Sequence
  Description of Artificial Sequence: Synthetic peptide
  Seed: LRMKWMMAMKYPITA
LRMKMMMMMKYPMTA

SEQ ID NO: 237138 - protein, 15 aa, Artificial Sequence
  Description of Artificial Sequence: Synthetic peptide
  Seed: LRMKWMMAMKYPITA
LRMKMMMMMKYPNTA

SEQ ID NO: 237139 - protein, 15 aa, Artificial Sequence
  Description of Artificial Sequence: Synthetic peptide
  Seed: LRMKWMMAMKYPITA
LRMKMMMMMKYPPTA

SEQ ID NO: 237140 - protein, 15 aa, Artificial Sequence
  Description of Artificial Sequence: Synthetic peptide
  Seed: LRMKWMMAMKYPITA
LRMKMMMMMKYPQTA

SEQ ID NO: 237141 - protein, 15 aa, Artificial Sequence
  Description of Artificial Sequence: Synthetic peptide
  Seed: LRMKWMMAMKYPITA
LRMKMMMMMKYPRTA

SEQ ID NO: 237142 - protein, 15 aa, Artificial Sequence
  Description of Artificial Sequence: Synthetic peptide
  Seed: LRMKWMMAMKYPITA
LRMKMMMMMKYPSTA

SEQ ID NO: 237143 - protein, 15 aa, Artificial Sequence
  Description of Artificial Sequence: Synthetic peptide
  Seed: LRMKWMMAMKYPITA
LRMKMMMMMKYPTTA

SEQ ID NO: 237144 - protein, 15 aa, Artificial Sequence
  Description of Artificial Sequence: Synthetic peptide
  Seed: LRMKWMMAMKYPITA
LRMKMMMMMKYPVTA

SEQ ID NO: 237145 - protein, 15 aa, Artificial Sequence
  Description of Artificial Sequence: Synthetic peptide
  Seed: LRMKWMMAMKYPITA
LRMKMMMMMKYPWTA

SEQ ID NO: 237146 - protein, 15 aa, Artificial Sequence
  Description of Artificial Sequence: Synthetic peptide
  Seed: LRMKWMMAMKYPITA
LRMKMMMMMKYPYTA

SEQ ID NO: 237147 - protein, 15 aa, Artificial Sequence
  Description of Artificial Sequence: Synthetic peptide
  Seed: LRMKWMMAMKYPITA
LRMKMMMMMLYPCTA

SEQ ID NO: 237148 - protein, 15 aa, Artificial Sequence
  Description of Artificial Sequence: Synthetic peptide
  Seed: LRMKWMMAMKYPITA
LRMKMMMMMLYPGTA

SEQ ID NO: 237149 - protein, 15 aa, Artificial Sequence
  Description of Artificial Sequence: Synthetic peptide
  Seed: LRMKWMMAMKYPITA
LRMKMMMMMLYPKTA

SEQ ID NO: 237150 - protein, 15 aa, Artificial Sequence
  Description of Artificial Sequence: Synthetic peptide
  Seed: LRMKWMMAMKYPITA
LRMKMMMMMLYPMTA

SEQ ID NO: 237151 - protein, 15 aa, Artificial Sequence
  Description of Artificial Sequence: Synthetic peptide
  Seed: LRMKWMMAMKYPITA
LRMKMMMMMLYPRTA

SEQ ID NO: 237152 - protein, 15 aa, Artificial Sequence
  Description of Artificial Sequence: Synthetic peptide
  Seed: LRMKWMMAMKYPITA
LRMKMMMMMLYPSTA

SEQ ID NO: 237153 - protein, 15 aa, Artificial Sequence
  Description of Artificial Sequence: Synthetic peptide
  Seed: LRMKWMMAMKYPITA
LRMKMMMMMMYPATA

SEQ ID NO: 237154 - protein, 15 aa, Artificial Sequence
  Description of Artificial Sequence: Synthetic peptide
  Seed: LRMKWMMAMKYPITA
LRMKMMMMMMYPCTA

SEQ ID NO: 237155 - protein, 15 aa, Artificial Sequence
  Description of Artificial Sequence: Synthetic peptide
  Seed: LRMKWMMAMKYPITA
LRMKMMMMMMYPGTA

SEQ ID NO: 237156 - protein, 15 aa, Artificial Sequence
  Description of Artificial Sequence: Synthetic peptide
  Seed: LRMKWMMAMKYPITA
LRMKMMMMMMYPITA

SEQ ID NO: 237157 - protein, 15 aa, Artificial Sequence
  Description of Artificial Sequence: Synthetic peptide
  Seed: LRMKWMMAMKYPITA
LRMKMMMMMMYPKTA

SEQ ID NO: 237158 - protein, 15 aa, Artificial Sequence
  Description of Artificial Sequence: Synthetic peptide
  Seed: LRMKWMMAMKYPITA
LRMKMMMMMMYPLTA

SEQ ID NO: 237159 - protein, 15 aa, Artificial Sequence
  Description of Artificial Sequence: Synthetic peptide
  Seed: LRMKWMMAMKYPITA
LRMKMMMMMMYPMTA

SEQ ID NO: 237160 - protein, 15 aa, Artificial Sequence
  Description of Artificial Sequence: Synthetic peptide
  Seed: LRMKWMMAMKYPITA
LRMKMMMMMMYPRTA

SEQ ID NO: 237161 - protein, 15 aa, Artificial Sequence
  Description of Artificial Sequence: Synthetic peptide
  Seed: LRMKWMMAMKYPITA
LRMKMMMMMMYPSTA

SEQ ID NO: 237162 - protein, 15 aa, Artificial Sequence
  Description of Artificial Sequence: Synthetic peptide
  Seed: LRMKWMMAMKYPITA
LRMKMMMMMMYPVTA

SEQ ID NO: 237163 - protein, 15 aa, Artificial Sequence
  Description of Artificial Sequence: Synthetic peptide
  Seed: LRMKWMMAMKYPITA
LRMKMMMMMNYPATA

SEQ ID NO: 237164 - protein, 15 aa, Artificial Sequence
  Description of Artificial Sequence: Synthetic peptide
  Seed: LRMKWMMAMKYPITA
LRMKMMMMMNYPCTA

SEQ ID NO: 237165 - protein, 15 aa, Artificial Sequence
  Description of Artificial Sequence: Synthetic peptide
  Seed: LRMKWMMAMKYPITA
LRMKMMMMMNYPDTA

SEQ ID NO: 237166 - protein, 15 aa, Artificial Sequence
  Description of Artificial Sequence: Synthetic peptide
  Seed: LRMKWMMAMKYPITA
LRMKMMMMMNYPETA

SEQ ID NO: 237167 - protein, 15 aa, Artificial Sequence
  Description of Artificial Sequence: Synthetic peptide
  Seed: LRMKWMMAMKYPITA
LRMKMMMMMNYPFTA

SEQ ID NO: 237168 - protein, 15 aa, Artificial Sequence
  Description of Artificial Sequence: Synthetic peptide
  Seed: LRMKWMMAMKYPITA
LRMKMMMMMNYPGTA

SEQ ID NO: 237169 - protein, 15 aa, Artificial Sequence
  Description of Artificial Sequence: Synthetic peptide
  Seed: LRMKWMMAMKYPITA
LRMKMMMMMNYPHTA

SEQ ID NO: 237170 - protein, 15 aa, Artificial Sequence
  Description of Artificial Sequence: Synthetic peptide
  Seed: LRMKWMMAMKYPITA
LRMKMMMMMNYPITA

SEQ ID NO: 237171 - protein, 15 aa, Artificial Sequence
  Description of Artificial Sequence: Synthetic peptide
  Seed: LRMKWMMAMKYPITA
LRMKMMMMMNYPLTA

SEQ ID NO: 237172 - protein, 15 aa, Artificial Sequence
  Description of Artificial Sequence: Synthetic peptide
  Seed: LRMKWMMAMKYPITA
LRMKMMMMMNYPMTA

SEQ ID NO: 237173 - protein, 15 aa, Artificial Sequence
  Description of Artificial Sequence: Synthetic peptide
  Seed: LRMKWMMAMKYPITA
LRMKMMMMMNYPNTA

SEQ ID NO: 237174 - protein, 15 aa, Artificial Sequence
  Description of Artificial Sequence: Synthetic peptide
  Seed: LRMKWMMAMKYPITA
LRMKMMMMMNYPPTA

SEQ ID NO: 237175 - protein, 15 aa, Artificial Sequence
  Description of Artificial Sequence: Synthetic peptide
  Seed: LRMKWMMAMKYPITA
LRMKMMMMMNYPQTA

SEQ ID NO: 237176 - protein, 15 aa, Artificial Sequence
  Description of Artificial Sequence: Synthetic peptide
  Seed: LRMKWMMAMKYPITA
LRMKMMMMMNYPRTA

SEQ ID NO: 237177 - protein, 15 aa, Artificial Sequence
  Description of Artificial Sequence: Synthetic peptide
  Seed: LRMKWMMAMKYPITA
LRMKMMMMMNYPSTA

SEQ ID NO: 237178 - protein, 15 aa, Artificial Sequence
  Description of Artificial Sequence: Synthetic peptide
  Seed: LRMKWMMAMKYPITA
LRMKMMMMMNYPTTA

SEQ ID NO: 237179 - protein, 15 aa, Artificial Sequence
  Description of Artificial Sequence: Synthetic peptide
  Seed: LRMKWMMAMKYPITA
LRMKMMMMMNYPVTA

SEQ ID NO: 237180 - protein, 15 aa, Artificial Sequence
  Description of Artificial Sequence: Synthetic peptide
  Seed: LRMKWMMAMKYPITA
LRMKMMMMMNYPYTA

SEQ ID NO: 237181 - protein, 15 aa, Artificial Sequence
  Description of Artificial Sequence: Synthetic peptide
  Seed: LRMKWMMAMKYPITA
LRMKMMMMMPYPATA

SEQ ID NO: 237182 - protein, 15 aa, Artificial Sequence
  Description of Artificial Sequence: Synthetic peptide
  Seed: LRMKWMMAMKYPITA
LRMKMMMMMPYPCTA

SEQ ID NO: 237183 - protein, 15 aa, Artificial Sequence
  Description of Artificial Sequence: Synthetic peptide
  Seed: LRMKWMMAMKYPITA
LRMKMMMMMPYPDTA

SEQ ID NO: 237184 - protein, 15 aa, Artificial Sequence
  Description of Artificial Sequence: Synthetic peptide
  Seed: LRMKWMMAMKYPITA
LRMKMMMMMPYPETA

SEQ ID NO: 237185 - protein, 15 aa, Artificial Sequence
  Description of Artificial Sequence: Synthetic peptide
  Seed: LRMKWMMAMKYPITA
LRMKMMMMMPYPFTA

SEQ ID NO: 237186 - protein, 15 aa, Artificial Sequence
  Description of Artificial Sequence: Synthetic peptide
  Seed: LRMKWMMAMKYPITA
LRMKMMMMMPYPGTA

SEQ ID NO: 237187 - protein, 15 aa, Artificial Sequence
  Description of Artificial Sequence: Synthetic peptide
  Seed: LRMKWMMAMKYPITA
LRMKMMMMMPYPHTA

SEQ ID NO: 237188 - protein, 15 aa, Artificial Sequence
  Description of Artificial Sequence: Synthetic peptide
  Seed: LRMKWMMAMKYPITA
LRMKMMMMMPYPITA

SEQ ID NO: 237189 - protein, 15 aa, Artificial Sequence
  Description of Artificial Sequence: Synthetic peptide
  Seed: LRMKWMMAMKYPITA
LRMKMMMMMPYPKTA

SEQ ID NO: 237190 - protein, 15 aa, Artificial Sequence
  Description of Artificial Sequence: Synthetic peptide
  Seed: LRMKWMMAMKYPITA
LRMKMMMMMPYPLTA

SEQ ID NO: 237191 - protein, 15 aa, Artificial Sequence
  Description of Artificial Sequence: Synthetic peptide
  Seed: LRMKWMMAMKYPITA
LRMKMMMMMPYPMTA

SEQ ID NO: 237192 - protein, 15 aa, Artificial Sequence
  Description of Artificial Sequence: Synthetic peptide
  Seed: LRMKWMMAMKYPITA
LRMKMMMMMPYPNTA

SEQ ID NO: 237193 - protein, 15 aa, Artificial Sequence
  Description of Artificial Sequence: Synthetic peptide
  Seed: LRMKWMMAMKYPITA
LRMKMMMMMPYPPTA

SEQ ID NO: 237194 - protein, 15 aa, Artificial Sequence
  Description of Artificial Sequence: Synthetic peptide
  Seed: LRMKWMMAMKYPITA
LRMKMMMMMPYPQTA

SEQ ID NO: 237195 - protein, 15 aa, Artificial Sequence
  Description of Artificial Sequence: Synthetic peptide
  Seed: LRMKWMMAMKYPITA
LRMKMMMMMPYPRTA

SEQ ID NO: 237196 - protein, 15 aa, Artificial Sequence
  Description of Artificial Sequence: Synthetic peptide
  Seed: LRMKWMMAMKYPITA
LRMKMMMMMPYPSTA

SEQ ID NO: 237197 - protein, 15 aa, Artificial Sequence
  Description of Artificial Sequence: Synthetic peptide
  Seed: LRMKWMMAMKYPITA
LRMKMMMMMPYPTTA

SEQ ID NO: 237198 - protein, 15 aa, Artificial Sequence
  Description of Artificial Sequence: Synthetic peptide
  Seed: LRMKWMMAMKYPITA
LRMKMMMMMPYPVTA

SEQ ID NO: 237199 - protein, 15 aa, Artificial Sequence
  Description of Artificial Sequence: Synthetic peptide
  Seed: LRMKWMMAMKYPITA
LRMKMMMMMPYPWTA

SEQ ID NO: 237200 - protein, 15 aa, Artificial Sequence
  Description of Artificial Sequence: Synthetic peptide
  Seed: LRMKWMMAMKYPITA
LRMKMMMMMPYPYTA

SEQ ID NO: 237201 - protein, 15 aa, Artificial Sequence
  Description of Artificial Sequence: Synthetic peptide
  Seed: LRMKWMMAMKYPITA
LRMKMMMMMQYPATA

SEQ ID NO: 237202 - protein, 15 aa, Artificial Sequence
  Description of Artificial Sequence: Synthetic peptide
  Seed: LRMKWMMAMKYPITA
LRMKMMMMMQYPITA

SEQ ID NO: 237203 - protein, 15 aa, Artificial Sequence
  Description of Artificial Sequence: Synthetic peptide
  Seed: LRMKWMMAMKYPITA
LRMKMMMMMQYPKTA

SEQ ID NO: 237204 - protein, 15 aa, Artificial Sequence
  Description of Artificial Sequence: Synthetic peptide
  Seed: LRMKWMMAMKYPITA
LRMKMMMMMQYPLTA

SEQ ID NO: 237205 - protein, 15 aa, Artificial Sequence
  Description of Artificial Sequence: Synthetic peptide
  Seed: LRMKWMMAMKYPITA
LRMKMMMMMQYPMTA

SEQ ID NO: 237206 - protein, 15 aa, Artificial Sequence
  Description of Artificial Sequence: Synthetic peptide
  Seed: LRMKWMMAMKYPITA
LRMKMMMMMQYPRTA

SEQ ID NO: 237207 - protein, 15 aa, Artificial Sequence
  Description of Artificial Sequence: Synthetic peptide
  Seed: LRMKWMMAMKYPITA
LRMKMMMMMQYPSTA

SEQ ID NO: 237208 - protein, 15 aa, Artificial Sequence
  Description of Artificial Sequence: Synthetic peptide
  Seed: LRMKWMMAMKYPITA
LRMKMMMMMQYPTTA

SEQ ID NO: 237209 - protein, 15 aa, Artificial Sequence
  Description of Artificial Sequence: Synthetic peptide
  Seed: LRMKWMMAMKYPITA
LRMKMMMMMQYPVTA

SEQ ID NO: 237210 - protein, 15 aa, Artificial Sequence
  Description of Artificial Sequence: Synthetic peptide
  Seed: LRMKWMMAMKYPITA
LRMKMMMMMRYPATA

SEQ ID NO: 237211 - protein, 15 aa, Artificial Sequence
  Description of Artificial Sequence: Synthetic peptide
  Seed: LRMKWMMAMKYPITA
LRMKMMMMMRYPCTA

SEQ ID NO: 237212 - protein, 15 aa, Artificial Sequence
  Description of Artificial Sequence: Synthetic peptide
  Seed: LRMKWMMAMKYPITA
LRMKMMMMMRYPDTA

SEQ ID NO: 237213 - protein, 15 aa, Artificial Sequence
  Description of Artificial Sequence: Synthetic peptide
  Seed: LRMKWMMAMKYPITA
LRMKMMMMMRYPETA

SEQ ID NO: 237214 - protein, 15 aa, Artificial Sequence
  Description of Artificial Sequence: Synthetic peptide
  Seed: LRMKWMMAMKYPITA
LRMKMMMMMRYPFTA

SEQ ID NO: 237215 - protein, 15 aa, Artificial Sequence
  Description of Artificial Sequence: Synthetic peptide
  Seed: LRMKWMMAMKYPITA
LRMKMMMMMRYPGTA

SEQ ID NO: 237216 - protein, 15 aa, Artificial Sequence
  Description of Artificial Sequence: Synthetic peptide
  Seed: LRMKWMMAMKYPITA
LRMKMMMMMRYPHTA

SEQ ID NO: 237217 - protein, 15 aa, Artificial Sequence
  Description of Artificial Sequence: Synthetic peptide
  Seed: LRMKWMMAMKYPITA
LRMKMMMMMRYPITA

SEQ ID NO: 237218 - protein, 15 aa, Artificial Sequence
  Description of Artificial Sequence: Synthetic peptide
  Seed: LRMKWMMAMKYPITA
LRMKMMMMMRYPKTA

SEQ ID NO: 237219 - protein, 15 aa, Artificial Sequence
  Description of Artificial Sequence: Synthetic peptide
  Seed: LRMKWMMAMKYPITA
LRMKMMMMMRYPLTA

SEQ ID NO: 237220 - protein, 15 aa, Artificial Sequence
  Description of Artificial Sequence: Synthetic peptide
  Seed: LRMKWMMAMKYPITA
LRMKMMMMMRYPMTA

SEQ ID NO: 237221 - protein, 15 aa, Artificial Sequence
  Description of Artificial Sequence: Synthetic peptide
  Seed: LRMKWMMAMKYPITA
LRMKMMMMMRYPNTA

SEQ ID NO: 237222 - protein, 15 aa, Artificial Sequence
  Description of Artificial Sequence: Synthetic peptide
  Seed: LRMKWMMAMKYPITA
LRMKMMMMMRYPPTA

SEQ ID NO: 237223 - protein, 15 aa, Artificial Sequence
  Description of Artificial Sequence: Synthetic peptide
  Seed: LRMKWMMAMKYPITA
LRMKMMMMMRYPQTA

SEQ ID NO: 237224 - protein, 15 aa, Artificial Sequence
  Description of Artificial Sequence: Synthetic peptide
  Seed: LRMKWMMAMKYPITA
LRMKMMMMMRYPRTA

SEQ ID NO: 237225 - protein, 15 aa, Artificial Sequence
  Description of Artificial Sequence: Synthetic peptide
  Seed: LRMKWMMAMKYPITA
LRMKMMMMMRYPSTA

SEQ ID NO: 237226 - protein, 15 aa, Artificial Sequence
  Description of Artificial Sequence: Synthetic peptide
  Seed: LRMKWMMAMKYPITA
LRMKMMMMMRYPTTA

SEQ ID NO: 237227 - protein, 15 aa, Artificial Sequence
  Description of Artificial Sequence: Synthetic peptide
  Seed: LRMKWMMAMKYPITA
LRMKMMMMMRYPVTA

SEQ ID NO: 237228 - protein, 15 aa, Artificial Sequence
  Description of Artificial Sequence: Synthetic peptide
  Seed: LRMKWMMAMKYPITA
LRMKMMMMMRYPWTA

SEQ ID NO: 237229 - protein, 15 aa, Artificial Sequence
  Description of Artificial Sequence: Synthetic peptide
  Seed: LRMKWMMAMKYPITA
LRMKMMMMMRYPYTA

SEQ ID NO: 237230 - protein, 15 aa, Artificial Sequence
  Description of Artificial Sequence: Synthetic peptide
  Seed: LRMKWMMAMKYPITA
LRMKMMMMMSYPATA

SEQ ID NO: 237231 - protein, 15 aa, Artificial Sequence
  Description of Artificial Sequence: Synthetic peptide
  Seed: LRMKWMMAMKYPITA
LRMKMMMMMSYPCTA

SEQ ID NO: 237232 - protein, 15 aa, Artificial Sequence
  Description of Artificial Sequence: Synthetic peptide
  Seed: LRMKWMMAMKYPITA
LRMKMMMMMSYPDTA

SEQ ID NO: 237233 - protein, 15 aa, Artificial Sequence
  Description of Artificial Sequence: Synthetic peptide
  Seed: LRMKWMMAMKYPITA
LRMKMMMMMSYPETA

SEQ ID NO: 237234 - protein, 15 aa, Artificial Sequence
  Description of Artificial Sequence: Synthetic peptide
  Seed: LRMKWMMAMKYPITA
LRMKMMMMMSYPFTA

SEQ ID NO: 237235 - protein, 15 aa, Artificial Sequence
  Description of Artificial Sequence: Synthetic peptide
  Seed: LRMKWMMAMKYPITA
LRMKMMMMMSYPGTA

SEQ ID NO: 237236 - protein, 15 aa, Artificial Sequence
  Description of Artificial Sequence: Synthetic peptide
  Seed: LRMKWMMAMKYPITA
LRMKMMMMMSYPHTA

SEQ ID NO: 237237 - protein, 15 aa, Artificial Sequence
  Description of Artificial Sequence: Synthetic peptide
  Seed: LRMKWMMAMKYPITA
LRMKMMMMMSYPITA

SEQ ID NO: 237238 - protein, 15 aa, Artificial Sequence
  Description of Artificial Sequence: Synthetic peptide
  Seed: LRMKWMMAMKYPITA
LRMKMMMMMSYPKTA

SEQ ID NO: 237239 - protein, 15 aa, Artificial Sequence
  Description of Artificial Sequence: Synthetic peptide
  Seed: LRMKWMMAMKYPITA
LRMKMMMMMSYPLTA

SEQ ID NO: 237240 - protein, 15 aa, Artificial Sequence
  Description of Artificial Sequence: Synthetic peptide
  Seed: LRMKWMMAMKYPITA
LRMKMMMMMSYPMTA

SEQ ID NO: 237241 - protein, 15 aa, Artificial Sequence
  Description of Artificial Sequence: Synthetic peptide
  Seed: LRMKWMMAMKYPITA
LRMKMMMMMSYPNTA

SEQ ID NO: 237242 - protein, 15 aa, Artificial Sequence
  Description of Artificial Sequence: Synthetic peptide
  Seed: LRMKWMMAMKYPITA
LRMKMMMMMSYPPTA

SEQ ID NO: 237243 - protein, 15 aa, Artificial Sequence
  Description of Artificial Sequence: Synthetic peptide
  Seed: LRMKWMMAMKYPITA
LRMKMMMMMSYPQTA

SEQ ID NO: 237244 - protein, 15 aa, Artificial Sequence
  Description of Artificial Sequence: Synthetic peptide
  Seed: LRMKWMMAMKYPITA
LRMKMMMMMSYPRTA

SEQ ID NO: 237245 - protein, 15 aa, Artificial Sequence
  Description of Artificial Sequence: Synthetic peptide
  Seed: LRMKWMMAMKYPITA
LRMKMMMMMSYPSTA

SEQ ID NO: 237246 - protein, 15 aa, Artificial Sequence
  Description of Artificial Sequence: Synthetic peptide
  Seed: LRMKWMMAMKYPITA
LRMKMMMMMSYPTTA

SEQ ID NO: 237247 - protein, 15 aa, Artificial Sequence
  Description of Artificial Sequence: Synthetic peptide
  Seed: LRMKWMMAMKYPITA
LRMKMMMMMSYPVTA

SEQ ID NO: 237248 - protein, 15 aa, Artificial Sequence
  Description of Artificial Sequence: Synthetic peptide
  Seed: LRMKWMMAMKYPITA
LRMKMMMMMSYPWTA

SEQ ID NO: 237249 - protein, 15 aa, Artificial Sequence
  Description of Artificial Sequence: Synthetic peptide
  Seed: LRMKWMMAMKYPITA
LRMKMMMMMSYPYTA

SEQ ID NO: 237250 - protein, 15 aa, Artificial Sequence
  Description of Artificial Sequence: Synthetic peptide
  Seed: LRMKWMMAMKYPITA
LRMKMMMMMTYPATA

SEQ ID NO: 237251 - protein, 15 aa, Artificial Sequence
  Description of Artificial Sequence: Synthetic peptide
  Seed: LRMKWMMAMKYPITA
LRMKMMMMMTYPCTA

SEQ ID NO: 237252 - protein, 15 aa, Artificial Sequence
  Description of Artificial Sequence: Synthetic peptide
  Seed: LRMKWMMAMKYPITA
LRMKMMMMMTYPDTA

SEQ ID NO: 237253 - protein, 15 aa, Artificial Sequence
  Description of Artificial Sequence: Synthetic peptide
  Seed: LRMKWMMAMKYPITA
LRMKMMMMMTYPETA

SEQ ID NO: 237254 - protein, 15 aa, Artificial Sequence
  Description of Artificial Sequence: Synthetic peptide
  Seed: LRMKWMMAMKYPITA
LRMKMMMMMTYPFTA

SEQ ID NO: 237255 - protein, 15 aa, Artificial Sequence
  Description of Artificial Sequence: Synthetic peptide
  Seed: LRMKWMMAMKYPITA
LRMKMMMMMTYPGTA

SEQ ID NO: 237256 - protein, 15 aa, Artificial Sequence
  Description of Artificial Sequence: Synthetic peptide
  Seed: LRMKWMMAMKYPITA
LRMKMMMMMTYPHTA

SEQ ID NO: 237257 - protein, 15 aa, Artificial Sequence
  Description of Artificial Sequence: Synthetic peptide
  Seed: LRMKWMMAMKYPITA
LRMKMMMMMTYPITA

SEQ ID NO: 237258 - protein, 15 aa, Artificial Sequence
  Description of Artificial Sequence: Synthetic peptide
  Seed: LRMKWMMAMKYPITA
LRMKMMMMMTYPKTA

SEQ ID NO: 237259 - protein, 15 aa, Artificial Sequence
  Description of Artificial Sequence: Synthetic peptide
  Seed: LRMKWMMAMKYPITA
LRMKMMMMMTYPLTA

SEQ ID NO: 237260 - protein, 15 aa, Artificial Sequence
  Description of Artificial Sequence: Synthetic peptide
  Seed: LRMKWMMAMKYPITA
LRMKMMMMMTYPMTA

SEQ ID NO: 237261 - protein, 15 aa, Artificial Sequence
  Description of Artificial Sequence: Synthetic peptide
  Seed: LRMKWMMAMKYPITA
LRMKMMMMMTYPNTA

SEQ ID NO: 237262 - protein, 15 aa, Artificial Sequence
  Description of Artificial Sequence: Synthetic peptide
  Seed: LRMKWMMAMKYPITA
LRMKMMMMMTYPPTA

SEQ ID NO: 237263 - protein, 15 aa, Artificial Sequence
  Description of Artificial Sequence: Synthetic peptide
  Seed: LRMKWMMAMKYPITA
LRMKMMMMMTYPQTA

SEQ ID NO: 237264 - protein, 15 aa, Artificial Sequence
  Description of Artificial Sequence: Synthetic peptide
  Seed: LRMKWMMAMKYPITA
LRMKMMMMMTYPRTA

SEQ ID NO: 237265 - protein, 15 aa, Artificial Sequence
  Description of Artificial Sequence: Synthetic peptide
  Seed: LRMKWMMAMKYPITA
LRMKMMMMMTYPSTA

SEQ ID NO: 237266 - protein, 15 aa, Artificial Sequence
  Description of Artificial Sequence: Synthetic peptide
  Seed: LRMKWMMAMKYPITA
LRMKMMMMMTYPTTA

SEQ ID NO: 237267 - protein, 15 aa, Artificial Sequence
  Description of Artificial Sequence: Synthetic peptide
  Seed: LRMKWMMAMKYPITA
LRMKMMMMMTYPVTA

SEQ ID NO: 237268 - protein, 15 aa, Artificial Sequence
  Description of Artificial Sequence: Synthetic peptide
  Seed: LRMKWMMAMKYPITA
LRMKMMMMMTYPYTA

SEQ ID NO: 237269 - protein, 15 aa, Artificial Sequence
  Description of Artificial Sequence: Synthetic peptide
  Seed: LRMKWMMAMKYPITA
LRMKMMMMMVYPATA

SEQ ID NO: 237270 - protein, 15 aa, Artificial Sequence
  Description of Artificial Sequence: Synthetic peptide
  Seed: LRMKWMMAMKYPITA
LRMKMMMMMVYPCTA

SEQ ID NO: 237271 - protein, 15 aa, Artificial Sequence
  Description of Artificial Sequence: Synthetic peptide
  Seed: LRMKWMMAMKYPITA
LRMKMMMMMVYPDTA

SEQ ID NO: 237272 - protein, 15 aa, Artificial Sequence
  Description of Artificial Sequence: Synthetic peptide
  Seed: LRMKWMMAMKYPITA
LRMKMMMMMVYPETA

SEQ ID NO: 237273 - protein, 15 aa, Artificial Sequence
  Description of Artificial Sequence: Synthetic peptide
  Seed: LRMKWMMAMKYPITA
LRMKMMMMMVYPFTA

SEQ ID NO: 237274 - protein, 15 aa, Artificial Sequence
  Description of Artificial Sequence: Synthetic peptide
  Seed: LRMKWMMAMKYPITA
LRMKMMMMMVYPGTA

SEQ ID NO: 237275 - protein, 15 aa, Artificial Sequence
  Description of Artificial Sequence: Synthetic peptide
  Seed: LRMKWMMAMKYPITA
LRMKMMMMMVYPHTA

SEQ ID NO: 237276 - protein, 15 aa, Artificial Sequence
  Description of Artificial Sequence: Synthetic peptide
  Seed: LRMKWMMAMKYPITA
LRMKMMMMMVYPITA

SEQ ID NO: 237277 - protein, 15 aa, Artificial Sequence
  Description of Artificial Sequence: Synthetic peptide
  Seed: LRMKWMMAMKYPITA
LRMKMMMMMVYPKTA

SEQ ID NO: 237278 - protein, 15 aa, Artificial Sequence
  Description of Artificial Sequence: Synthetic peptide
  Seed: LRMKWMMAMKYPITA
LRMKMMMMMVYPLTA

SEQ ID NO: 237279 - protein, 15 aa, Artificial Sequence
  Description of Artificial Sequence: Synthetic peptide
  Seed: LRMKWMMAMKYPITA
LRMKMMMMMVYPMTA

SEQ ID NO: 237280 - protein, 15 aa, Artificial Sequence
  Description of Artificial Sequence: Synthetic peptide
  Seed: LRMKWMMAMKYPITA
LRMKMMMMMVYPNTA

SEQ ID NO: 237281 - protein, 15 aa, Artificial Sequence
  Description of Artificial Sequence: Synthetic peptide
  Seed: LRMKWMMAMKYPITA
LRMKMMMMMVYPPTA

SEQ ID NO: 237282 - protein, 15 aa, Artificial Sequence
  Description of Artificial Sequence: Synthetic peptide
  Seed: LRMKWMMAMKYPITA
LRMKMMMMMVYPQTA

SEQ ID NO: 237283 - protein, 15 aa, Artificial Sequence
  Description of Artificial Sequence: Synthetic peptide
  Seed: LRMKWMMAMKYPITA
LRMKMMMMMVYPRTA

SEQ ID NO: 237284 - protein, 15 aa, Artificial Sequence
  Description of Artificial Sequence: Synthetic peptide
  Seed: LRMKWMMAMKYPITA
LRMKMMMMMVYPSTA

SEQ ID NO: 237285 - protein, 15 aa, Artificial Sequence
  Description of Artificial Sequence: Synthetic peptide
  Seed: LRMKWMMAMKYPITA
LRMKMMMMMVYPTTA

SEQ ID NO: 237286 - protein, 15 aa, Artificial Sequence
  Description of Artificial Sequence: Synthetic peptide
  Seed: LRMKWMMAMKYPITA
LRMKMMMMMVYPVTA

SEQ ID NO: 237287 - protein, 15 aa, Artificial Sequence
  Description of Artificial Sequence: Synthetic peptide
  Seed: LRMKWMMAMKYPITA
LRMKMMMMMVYPYTA

SEQ ID NO: 237288 - protein, 15 aa, Artificial Sequence
  Description of Artificial Sequence: Synthetic peptide
  Seed: LRMKWMMAMKYPITA
LRMKMMMMMYYPATA

SEQ ID NO: 237289 - protein, 15 aa, Artificial Sequence
  Description of Artificial Sequence: Synthetic peptide
  Seed: LRMKWMMAMKYPITA
LRMKMMMMMYYPVTA

SEQ ID NO: 237290 - protein, 15 aa, Artificial Sequence
  Description of Artificial Sequence: Synthetic peptide
  Seed: LRMKWMMAMKYPITA
LRMKMMMNMAYPATA

SEQ ID NO: 237291 - protein, 15 aa, Artificial Sequence
  Description of Artificial Sequence: Synthetic peptide
  Seed: LRMKWMMAMKYPITA
LRMKMMMNMAYPCTA

SEQ ID NO: 237292 - protein, 15 aa, Artificial Sequence
  Description of Artificial Sequence: Synthetic peptide
  Seed: LRMKWMMAMKYPITA
LRMKMMMNMAYPDTA

SEQ ID NO: 237293 - protein, 15 aa, Artificial Sequence
  Description of Artificial Sequence: Synthetic peptide
  Seed: LRMKWMMAMKYPITA
LRMKMMMNMAYPETA

SEQ ID NO: 237294 - protein, 15 aa, Artificial Sequence
  Description of Artificial Sequence: Synthetic peptide
  Seed: LRMKWMMAMKYPITA
LRMKMMMNMAYPFTA

SEQ ID NO: 237295 - protein, 15 aa, Artificial Sequence
  Description of Artificial Sequence: Synthetic peptide
  Seed: LRMKWMMAMKYPITA
LRMKMMMNMAYPGTA

SEQ ID NO: 237296 - protein, 15 aa, Artificial Sequence
  Description of Artificial Sequence: Synthetic peptide
  Seed: LRMKWMMAMKYPITA
LRMKMMMNMAYPHTA

SEQ ID NO: 237297 - protein, 15 aa, Artificial Sequence
  Description of Artificial Sequence: Synthetic peptide
  Seed: LRMKWMMAMKYPITA
LRMKMMMNMAYPITA

SEQ ID NO: 237298 - protein, 15 aa, Artificial Sequence
  Description of Artificial Sequence: Synthetic peptide
  Seed: LRMKWMMAMKYPITA
LRMKMMMNMAYPKTA

SEQ ID NO: 237299 - protein, 15 aa, Artificial Sequence
  Description of Artificial Sequence: Synthetic peptide
  Seed: LRMKWMMAMKYPITA
LRMKMMMNMAYPLTA

SEQ ID NO: 237300 - protein, 15 aa, Artificial Sequence
  Description of Artificial Sequence: Synthetic peptide
  Seed: LRMKWMMAMKYPITA
LRMKMMMNMAYPMTA

SEQ ID NO: 237301 - protein, 15 aa, Artificial Sequence
  Description of Artificial Sequence: Synthetic peptide
  Seed: LRMKWMMAMKYPITA
LRMKMMMNMAYPNTA

SEQ ID NO: 237302 - protein, 15 aa, Artificial Sequence
  Description of Artificial Sequence: Synthetic peptide
  Seed: LRMKWMMAMKYPITA
LRMKMMMNMAYPPTA

SEQ ID NO: 237303 - protein, 15 aa, Artificial Sequence
  Description of Artificial Sequence: Synthetic peptide
  Seed: LRMKWMMAMKYPITA
LRMKMMMNMAYPQTA

SEQ ID NO: 237304 - protein, 15 aa, Artificial Sequence
  Description of Artificial Sequence: Synthetic peptide
  Seed: LRMKWMMAMKYPITA
LRMKMMMNMAYPRTA

SEQ ID NO: 237305 - protein, 15 aa, Artificial Sequence
  Description of Artificial Sequence: Synthetic peptide
  Seed: LRMKWMMAMKYPITA
LRMKMMMNMAYPSTA

SEQ ID NO: 237306 - protein, 15 aa, Artificial Sequence
  Description of Artificial Sequence: Synthetic peptide
  Seed: LRMKWMMAMKYPITA
LRMKMMMNMAYPTTA

SEQ ID NO: 237307 - protein, 15 aa, Artificial Sequence
  Description of Artificial Sequence: Synthetic peptide
  Seed: LRMKWMMAMKYPITA
LRMKMMMNMAYPVTA

SEQ ID NO: 237308 - protein, 15 aa, Artificial Sequence
  Description of Artificial Sequence: Synthetic peptide
  Seed: LRMKWMMAMKYPITA
LRMKMMMNMAYPWTA

SEQ ID NO: 237309 - protein, 15 aa, Artificial Sequence
  Description of Artificial Sequence: Synthetic peptide
  Seed: LRMKWMMAMKYPITA
LRMKMMMNMAYPYTA

SEQ ID NO: 237310 - protein, 15 aa, Artificial Sequence
  Description of Artificial Sequence: Synthetic peptide
  Seed: LRMKWMMAMKYPITA
LRMKMMMNMCYPFTA

SEQ ID NO: 237311 - protein, 15 aa, Artificial Sequence
  Description of Artificial Sequence: Synthetic peptide
  Seed: LRMKWMMAMKYPITA
LRMKMMMNMCYPITA

SEQ ID NO: 237312 - protein, 15 aa, Artificial Sequence
  Description of Artificial Sequence: Synthetic peptide
  Seed: LRMKWMMAMKYPITA
LRMKMMMNMCYPLTA

SEQ ID NO: 237313 - protein, 15 aa, Artificial Sequence
  Description of Artificial Sequence: Synthetic peptide
  Seed: LRMKWMMAMKYPITA
LRMKMMMNMCYPMTA

SEQ ID NO: 237314 - protein, 15 aa, Artificial Sequence
  Description of Artificial Sequence: Synthetic peptide
  Seed: LRMKWMMAMKYPITA
LRMKMMMNMCYPVTA

SEQ ID NO: 237315 - protein, 15 aa, Artificial Sequence
  Description of Artificial Sequence: Synthetic peptide
  Seed: LRMKWMMAMKYPITA
LRMKMMMNMCYPYTA

SEQ ID NO: 237316 - protein, 15 aa, Artificial Sequence
  Description of Artificial Sequence: Synthetic peptide
  Seed: LRMKWMMAMKYPITA
LRMKMMMNMDYPFTA

SEQ ID NO: 237317 - protein, 15 aa, Artificial Sequence
  Description of Artificial Sequence: Synthetic peptide
  Seed: LRMKWMMAMKYPITA
LRMKMMMNMDYPITA

SEQ ID NO: 237318 - protein, 15 aa, Artificial Sequence
  Description of Artificial Sequence: Synthetic peptide
  Seed: LRMKWMMAMKYPITA
LRMKMMMNMDYPLTA

SEQ ID NO: 237319 - protein, 15 aa, Artificial Sequence
  Description of Artificial Sequence: Synthetic peptide
  Seed: LRMKWMMAMKYPITA
LRMKMMMNMDYPMTA

SEQ ID NO: 237320 - protein, 15 aa, Artificial Sequence
  Description of Artificial Sequence: Synthetic peptide
  Seed: LRMKWMMAMKYPITA
LRMKMMMNMDYPVTA

SEQ ID NO: 237321 - protein, 15 aa, Artificial Sequence
  Description of Artificial Sequence: Synthetic peptide
  Seed: LRMKWMMAMKYPITA
LRMKMMMNMDYPYTA

SEQ ID NO: 237322 - protein, 15 aa, Artificial Sequence
  Description of Artificial Sequence: Synthetic peptide
  Seed: LRMKWMMAMKYPITA
LRMKMMMNMEYPITA

SEQ ID NO: 237323 - protein, 15 aa, Artificial Sequence
  Description of Artificial Sequence: Synthetic peptide
  Seed: LRMKWMMAMKYPITA
LRMKMMMNMEYPLTA

SEQ ID NO: 237324 - protein, 15 aa, Artificial Sequence
  Description of Artificial Sequence: Synthetic peptide
  Seed: LRMKWMMAMKYPITA
LRMKMMMNMEYPVTA

SEQ ID NO: 237325 - protein, 15 aa, Artificial Sequence
  Description of Artificial Sequence: Synthetic peptide
  Seed: LRMKWMMAMKYPITA
LRMKMMMNMFYPFTA

SEQ ID NO: 237326 - protein, 15 aa, Artificial Sequence
  Description of Artificial Sequence: Synthetic peptide
  Seed: LRMKWMMAMKYPITA
LRMKMMMNMFYPITA

SEQ ID NO: 237327 - protein, 15 aa, Artificial Sequence
  Description of Artificial Sequence: Synthetic peptide
  Seed: LRMKWMMAMKYPITA
LRMKMMMNMFYPLTA

SEQ ID NO: 237328 - protein, 15 aa, Artificial Sequence
  Description of Artificial Sequence: Synthetic peptide
  Seed: LRMKWMMAMKYPITA
LRMKMMMNMFYPVTA

SEQ ID NO: 237329 - protein, 15 aa, Artificial Sequence
  Description of Artificial Sequence: Synthetic peptide
  Seed: LRMKWMMAMKYPITA
LRMKMMMNMGYPATA

SEQ ID NO: 237330 - protein, 15 aa, Artificial Sequence
  Description of Artificial Sequence: Synthetic peptide
  Seed: LRMKWMMAMKYPITA
LRMKMMMNMGYPFTA

SEQ ID NO: 237331 - protein, 15 aa, Artificial Sequence
  Description of Artificial Sequence: Synthetic peptide
  Seed: LRMKWMMAMKYPITA
LRMKMMMNMGYPITA

SEQ ID NO: 237332 - protein, 15 aa, Artificial Sequence
  Description of Artificial Sequence: Synthetic peptide
  Seed: LRMKWMMAMKYPITA
LRMKMMMNMGYPLTA

SEQ ID NO: 237333 - protein, 15 aa, Artificial Sequence
  Description of Artificial Sequence: Synthetic peptide
  Seed: LRMKWMMAMKYPITA
LRMKMMMNMGYPMTA

SEQ ID NO: 237334 - protein, 15 aa, Artificial Sequence
  Description of Artificial Sequence: Synthetic peptide
  Seed: LRMKWMMAMKYPITA
LRMKMMMNMGYPNTA

SEQ ID NO: 237335 - protein, 15 aa, Artificial Sequence
  Description of Artificial Sequence: Synthetic peptide
  Seed: LRMKWMMAMKYPITA
LRMKMMMNMGYPRTA

SEQ ID NO: 237336 - protein, 15 aa, Artificial Sequence
  Description of Artificial Sequence: Synthetic peptide
  Seed: LRMKWMMAMKYPITA
LRMKMMMNMGYPSTA

SEQ ID NO: 237337 - protein, 15 aa, Artificial Sequence
  Description of Artificial Sequence: Synthetic peptide
  Seed: LRMKWMMAMKYPITA
LRMKMMMNMGYPTTA

SEQ ID NO: 237338 - protein, 15 aa, Artificial Sequence
  Description of Artificial Sequence: Synthetic peptide
  Seed: LRMKWMMAMKYPITA
LRMKMMMNMGYPVTA

SEQ ID NO: 237339 - protein, 15 aa, Artificial Sequence
  Description of Artificial Sequence: Synthetic peptide
  Seed: LRMKWMMAMKYPITA
LRMKMMMNMGYPWTA

SEQ ID NO: 237340 - protein, 15 aa, Artificial Sequence
  Description of Artificial Sequence: Synthetic peptide
  Seed: LRMKWMMAMKYPITA
LRMKMMMNMGYPYTA

SEQ ID NO: 237341 - protein, 15 aa, Artificial Sequence
  Description of Artificial Sequence: Synthetic peptide
  Seed: LRMKWMMAMKYPITA
LRMKMMMNMHYPATA

SEQ ID NO: 237342 - protein, 15 aa, Artificial Sequence
  Description of Artificial Sequence: Synthetic peptide
  Seed: LRMKWMMAMKYPITA
LRMKMMMNMHYPFTA

SEQ ID NO: 237343 - protein, 15 aa, Artificial Sequence
  Description of Artificial Sequence: Synthetic peptide
  Seed: LRMKWMMAMKYPITA
LRMKMMMNMHYPITA

SEQ ID NO: 237344 - protein, 15 aa, Artificial Sequence
  Description of Artificial Sequence: Synthetic peptide
  Seed: LRMKWMMAMKYPITA
LRMKMMMNMHYPLTA

SEQ ID NO: 237345 - protein, 15 aa, Artificial Sequence
  Description of Artificial Sequence: Synthetic peptide
  Seed: LRMKWMMAMKYPITA
LRMKMMMNMHYPMTA

SEQ ID NO: 237346 - protein, 15 aa, Artificial Sequence
  Description of Artificial Sequence: Synthetic peptide
  Seed: LRMKWMMAMKYPITA
LRMKMMMNMHYPRTA

SEQ ID NO: 237347 - protein, 15 aa, Artificial Sequence
  Description of Artificial Sequence: Synthetic peptide
  Seed: LRMKWMMAMKYPITA
LRMKMMMNMHYPVTA

SEQ ID NO: 237348 - protein, 15 aa, Artificial Sequence
  Description of Artificial Sequence: Synthetic peptide
  Seed: LRMKWMMAMKYPITA
LRMKMMMNMHYPYTA

SEQ ID NO: 237349 - protein, 15 aa, Artificial Sequence
  Description of Artificial Sequence: Synthetic peptide
  Seed: LRMKWMMAMKYPITA
LRMKMMMNMIYPATA

SEQ ID NO: 237350 - protein, 15 aa, Artificial Sequence
  Description of Artificial Sequence: Synthetic peptide
  Seed: LRMKWMMAMKYPITA
LRMKMMMNMIYPFTA

SEQ ID NO: 237351 - protein, 15 aa, Artificial Sequence
  Description of Artificial Sequence: Synthetic peptide
  Seed: LRMKWMMAMKYPITA
LRMKMMMNMIYPHTA

SEQ ID NO: 237352 - protein, 15 aa, Artificial Sequence
  Description of Artificial Sequence: Synthetic peptide
  Seed: LRMKWMMAMKYPITA
LRMKMMMNMIYPITA

SEQ ID NO: 237353 - protein, 15 aa, Artificial Sequence
  Description of Artificial Sequence: Synthetic peptide
  Seed: LRMKWMMAMKYPITA
LRMKMMMNMIYPLTA

SEQ ID NO: 237354 - protein, 15 aa, Artificial Sequence
  Description of Artificial Sequence: Synthetic peptide
  Seed: LRMKWMMAMKYPITA
LRMKMMMNMIYPMTA

SEQ ID NO: 237355 - protein, 15 aa, Artificial Sequence
  Description of Artificial Sequence: Synthetic peptide
  Seed: LRMKWMMAMKYPITA
LRMKMMMNMIYPNTA

SEQ ID NO: 237356 - protein, 15 aa, Artificial Sequence
  Description of Artificial Sequence: Synthetic peptide
  Seed: LRMKWMMAMKYPITA
LRMKMMMNMIYPRTA

SEQ ID NO: 237357 - protein, 15 aa, Artificial Sequence
  Description of Artificial Sequence: Synthetic peptide
  Seed: LRMKWMMAMKYPITA
LRMKMMMNMIYPSTA

SEQ ID NO: 237358 - protein, 15 aa, Artificial Sequence
  Description of Artificial Sequence: Synthetic peptide
  Seed: LRMKWMMAMKYPITA
LRMKMMMNMIYPTTA

SEQ ID NO: 237359 - protein, 15 aa, Artificial Sequence
  Description of Artificial Sequence: Synthetic peptide
  Seed: LRMKWMMAMKYPITA
LRMKMMMNMIYPVTA

SEQ ID NO: 237360 - protein, 15 aa, Artificial Sequence
  Description of Artificial Sequence: Synthetic peptide
  Seed: LRMKWMMAMKYPITA
LRMKMMMNMIYPWTA

SEQ ID NO: 237361 - protein, 15 aa, Artificial Sequence
  Description of Artificial Sequence: Synthetic peptide
  Seed: LRMKWMMAMKYPITA
LRMKMMMNMIYPYTA

SEQ ID NO: 237362 - protein, 15 aa, Artificial Sequence
  Description of Artificial Sequence: Synthetic peptide
  Seed: LRMKWMMAMKYPITA
LRMKMMMNMKYPATA

SEQ ID NO: 237363 - protein, 15 aa, Artificial Sequence
  Description of Artificial Sequence: Synthetic peptide
  Seed: LRMKWMMAMKYPITA
LRMKMMMNMKYPCTA

SEQ ID NO: 237364 - protein, 15 aa, Artificial Sequence
  Description of Artificial Sequence: Synthetic peptide
  Seed: LRMKWMMAMKYPITA
LRMKMMMNMKYPETA

SEQ ID NO: 237365 - protein, 15 aa, Artificial Sequence
  Description of Artificial Sequence: Synthetic peptide
  Seed: LRMKWMMAMKYPITA
LRMKMMMNMKYPFTA

SEQ ID NO: 237366 - protein, 15 aa, Artificial Sequence
  Description of Artificial Sequence: Synthetic peptide
  Seed: LRMKWMMAMKYPITA
LRMKMMMNMKYPGTA

SEQ ID NO: 237367 - protein, 15 aa, Artificial Sequence
  Description of Artificial Sequence: Synthetic peptide
  Seed: LRMKWMMAMKYPITA
LRMKMMMNMKYPHTA

SEQ ID NO: 237368 - protein, 15 aa, Artificial Sequence
  Description of Artificial Sequence: Synthetic peptide
  Seed: LRMKWMMAMKYPITA
LRMKMMMNMKYPITA

SEQ ID NO: 237369 - protein, 15 aa, Artificial Sequence
  Description of Artificial Sequence: Synthetic peptide
  Seed: LRMKWMMAMKYPITA
LRMKMMMNMKYPKTA

SEQ ID NO: 237370 - protein, 15 aa, Artificial Sequence
  Description of Artificial Sequence: Synthetic peptide
  Seed: LRMKWMMAMKYPITA
LRMKMMMNMKYPLTA

SEQ ID NO: 237371 - protein, 15 aa, Artificial Sequence
  Description of Artificial Sequence: Synthetic peptide
  Seed: LRMKWMMAMKYPITA
LRMKMMMNMKYPMTA

SEQ ID NO: 237372 - protein, 15 aa, Artificial Sequence
  Description of Artificial Sequence: Synthetic peptide
  Seed: LRMKWMMAMKYPITA
LRMKMMMNMKYPNTA

SEQ ID NO: 237373 - protein, 15 aa, Artificial Sequence
  Description of Artificial Sequence: Synthetic peptide
  Seed: LRMKWMMAMKYPITA
LRMKMMMNMKYPQTA

SEQ ID NO: 237374 - protein, 15 aa, Artificial Sequence
  Description of Artificial Sequence: Synthetic peptide
  Seed: LRMKWMMAMKYPITA
LRMKMMMNMKYPRTA

SEQ ID NO: 237375 - protein, 15 aa, Artificial Sequence
  Description of Artificial Sequence: Synthetic peptide
  Seed: LRMKWMMAMKYPITA
LRMKMMMNMKYPSTA

SEQ ID NO: 237376 - protein, 15 aa, Artificial Sequence
  Description of Artificial Sequence: Synthetic peptide
  Seed: LRMKWMMAMKYPITA
LRMKMMMNMKYPTTA

SEQ ID NO: 237377 - protein, 15 aa, Artificial Sequence
  Description of Artificial Sequence: Synthetic peptide
  Seed: LRMKWMMAMKYPITA
LRMKMMMNMKYPVTA

SEQ ID NO: 237378 - protein, 15 aa, Artificial Sequence
  Description of Artificial Sequence: Synthetic peptide
  Seed: LRMKWMMAMKYPITA
LRMKMMMNMKYPWTA

SEQ ID NO: 237379 - protein, 15 aa, Artificial Sequence
  Description of Artificial Sequence: Synthetic peptide
  Seed: LRMKWMMAMKYPITA
LRMKMMMNMKYPYTA

SEQ ID NO: 237380 - protein, 15 aa, Artificial Sequence
  Description of Artificial Sequence: Synthetic peptide
  Seed: LRMKWMMAMKYPITA
LRMKMMMNMLYPATA

SEQ ID NO: 237381 - protein, 15 aa, Artificial Sequence
  Description of Artificial Sequence: Synthetic peptide
  Seed: LRMKWMMAMKYPITA
LRMKMMMNMLYPFTA

SEQ ID NO: 237382 - protein, 15 aa, Artificial Sequence
  Description of Artificial Sequence: Synthetic peptide
  Seed: LRMKWMMAMKYPITA
LRMKMMMNMLYPITA

SEQ ID NO: 237383 - protein, 15 aa, Artificial Sequence
  Description of Artificial Sequence: Synthetic peptide
  Seed: LRMKWMMAMKYPITA
LRMKMMMNMLYPLTA

SEQ ID NO: 237384 - protein, 15 aa, Artificial Sequence
  Description of Artificial Sequence: Synthetic peptide
  Seed: LRMKWMMAMKYPITA
LRMKMMMNMLYPMTA

SEQ ID NO: 237385 - protein, 15 aa, Artificial Sequence
  Description of Artificial Sequence: Synthetic peptide
  Seed: LRMKWMMAMKYPITA
LRMKMMMNMLYPRTA

SEQ ID NO: 237386 - protein, 15 aa, Artificial Sequence
  Description of Artificial Sequence: Synthetic peptide
  Seed: LRMKWMMAMKYPITA
LRMKMMMNMLYPSTA

SEQ ID NO: 237387 - protein, 15 aa, Artificial Sequence
  Description of Artificial Sequence: Synthetic peptide
  Seed: LRMKWMMAMKYPITA
LRMKMMMNMLYPTTA

SEQ ID NO: 237388 - protein, 15 aa, Artificial Sequence
  Description of Artificial Sequence: Synthetic peptide
  Seed: LRMKWMMAMKYPITA
LRMKMMMNMLYPVTA

SEQ ID NO: 237389 - protein, 15 aa, Artificial Sequence
  Description of Artificial Sequence: Synthetic peptide
  Seed: LRMKWMMAMKYPITA
LRMKMMMNMLYPYTA

SEQ ID NO: 237390 - protein, 15 aa, Artificial Sequence
  Description of Artificial Sequence: Synthetic peptide
  Seed: LRMKWMMAMKYPITA
LRMKMMMNMMYPATA

SEQ ID NO: 237391 - protein, 15 aa, Artificial Sequence
  Description of Artificial Sequence: Synthetic peptide
  Seed: LRMKWMMAMKYPITA
LRMKMMMNMMYPFTA

SEQ ID NO: 237392 - protein, 15 aa, Artificial Sequence
  Description of Artificial Sequence: Synthetic peptide
  Seed: LRMKWMMAMKYPITA
LRMKMMMNMMYPITA

SEQ ID NO: 237393 - protein, 15 aa, Artificial Sequence
  Description of Artificial Sequence: Synthetic peptide
  Seed: LRMKWMMAMKYPITA
LRMKMMMNMMYPLTA

SEQ ID NO: 237394 - protein, 15 aa, Artificial Sequence
  Description of Artificial Sequence: Synthetic peptide
  Seed: LRMKWMMAMKYPITA
LRMKMMMNMMYPMTA

SEQ ID NO: 237395 - protein, 15 aa, Artificial Sequence
  Description of Artificial Sequence: Synthetic peptide
  Seed: LRMKWMMAMKYPITA
LRMKMMMNMMYPRTA

SEQ ID NO: 237396 - protein, 15 aa, Artificial Sequence
  Description of Artificial Sequence: Synthetic peptide
  Seed: LRMKWMMAMKYPITA
LRMKMMMNMMYPSTA

SEQ ID NO: 237397 - protein, 15 aa, Artificial Sequence
  Description of Artificial Sequence: Synthetic peptide
  Seed: LRMKWMMAMKYPITA
LRMKMMMNMMYPTTA

SEQ ID NO: 237398 - protein, 15 aa, Artificial Sequence
  Description of Artificial Sequence: Synthetic peptide
  Seed: LRMKWMMAMKYPITA
LRMKMMMNMMYPVTA

SEQ ID NO: 237399 - protein, 15 aa, Artificial Sequence
  Description of Artificial Sequence: Synthetic peptide
  Seed: LRMKWMMAMKYPITA
LRMKMMMNMMYPYTA

SEQ ID NO: 237400 - protein, 15 aa, Artificial Sequence
  Description of Artificial Sequence: Synthetic peptide
  Seed: LRMKWMMAMKYPITA
LRMKMMMNMNYPATA

SEQ ID NO: 237401 - protein, 15 aa, Artificial Sequence
  Description of Artificial Sequence: Synthetic peptide
  Seed: LRMKWMMAMKYPITA
LRMKMMMNMNYPFTA

SEQ ID NO: 237402 - protein, 15 aa, Artificial Sequence
  Description of Artificial Sequence: Synthetic peptide
  Seed: LRMKWMMAMKYPITA
LRMKMMMNMNYPGTA

SEQ ID NO: 237403 - protein, 15 aa, Artificial Sequence
  Description of Artificial Sequence: Synthetic peptide
  Seed: LRMKWMMAMKYPITA
LRMKMMMNMNYPHTA

SEQ ID NO: 237404 - protein, 15 aa, Artificial Sequence
  Description of Artificial Sequence: Synthetic peptide
  Seed: LRMKWMMAMKYPITA
LRMKMMMNMNYPITA

SEQ ID NO: 237405 - protein, 15 aa, Artificial Sequence
  Description of Artificial Sequence: Synthetic peptide
  Seed: LRMKWMMAMKYPITA
LRMKMMMNMNYPKTA

SEQ ID NO: 237406 - protein, 15 aa, Artificial Sequence
  Description of Artificial Sequence: Synthetic peptide
  Seed: LRMKWMMAMKYPITA
LRMKMMMNMNYPLTA

SEQ ID NO: 237407 - protein, 15 aa, Artificial Sequence
  Description of Artificial Sequence: Synthetic peptide
  Seed: LRMKWMMAMKYPITA
LRMKMMMNMNYPMTA

SEQ ID NO: 237408 - protein, 15 aa, Artificial Sequence
  Description of Artificial Sequence: Synthetic peptide
  Seed: LRMKWMMAMKYPITA
LRMKMMMNMNYPNTA

SEQ ID NO: 237409 - protein, 15 aa, Artificial Sequence
  Description of Artificial Sequence: Synthetic peptide
  Seed: LRMKWMMAMKYPITA
LRMKMMMNMNYPQTA

SEQ ID NO: 237410 - protein, 15 aa, Artificial Sequence
  Description of Artificial Sequence: Synthetic peptide
  Seed: LRMKWMMAMKYPITA
LRMKMMMNMNYPRTA

SEQ ID NO: 237411 - protein, 15 aa, Artificial Sequence
  Description of Artificial Sequence: Synthetic peptide
  Seed: LRMKWMMAMKYPITA
LRMKMMMNMNYPSTA

SEQ ID NO: 237412 - protein, 15 aa, Artificial Sequence
  Description of Artificial Sequence: Synthetic peptide
  Seed: LRMKWMMAMKYPITA
LRMKMMMNMNYPTTA

SEQ ID NO: 237413 - protein, 15 aa, Artificial Sequence
  Description of Artificial Sequence: Synthetic peptide
  Seed: LRMKWMMAMKYPITA
LRMKMMMNMNYPVTA

SEQ ID NO: 237414 - protein, 15 aa, Artificial Sequence
  Description of Artificial Sequence: Synthetic peptide
  Seed: LRMKWMMAMKYPITA
LRMKMMMNMNYPWTA

SEQ ID NO: 237415 - protein, 15 aa, Artificial Sequence
  Description of Artificial Sequence: Synthetic peptide
  Seed: LRMKWMMAMKYPITA
LRMKMMMNMNYPYTA

SEQ ID NO: 237416 - protein, 15 aa, Artificial Sequence
  Description of Artificial Sequence: Synthetic peptide
  Seed: LRMKWMMAMKYPITA
LRMKMMMNMPYPATA

SEQ ID NO: 237417 - protein, 15 aa, Artificial Sequence
  Description of Artificial Sequence: Synthetic peptide
  Seed: LRMKWMMAMKYPITA
LRMKMMMNMPYPFTA

SEQ ID NO: 237418 - protein, 15 aa, Artificial Sequence
  Description of Artificial Sequence: Synthetic peptide
  Seed: LRMKWMMAMKYPITA
LRMKMMMNMPYPGTA

SEQ ID NO: 237419 - protein, 15 aa, Artificial Sequence
  Description of Artificial Sequence: Synthetic peptide
  Seed: LRMKWMMAMKYPITA
LRMKMMMNMPYPHTA

SEQ ID NO: 237420 - protein, 15 aa, Artificial Sequence
  Description of Artificial Sequence: Synthetic peptide
  Seed: LRMKWMMAMKYPITA
LRMKMMMNMPYPITA

SEQ ID NO: 237421 - protein, 15 aa, Artificial Sequence
  Description of Artificial Sequence: Synthetic peptide
  Seed: LRMKWMMAMKYPITA
LRMKMMMNMPYPLTA

SEQ ID NO: 237422 - protein, 15 aa, Artificial Sequence
  Description of Artificial Sequence: Synthetic peptide
  Seed: LRMKWMMAMKYPITA
LRMKMMMNMPYPMTA

SEQ ID NO: 237423 - protein, 15 aa, Artificial Sequence
  Description of Artificial Sequence: Synthetic peptide
  Seed: LRMKWMMAMKYPITA
LRMKMMMNMPYPNTA

SEQ ID NO: 237424 - protein, 15 aa, Artificial Sequence
  Description of Artificial Sequence: Synthetic peptide
  Seed: LRMKWMMAMKYPITA
LRMKMMMNMPYPQTA

SEQ ID NO: 237425 - protein, 15 aa, Artificial Sequence
  Description of Artificial Sequence: Synthetic peptide
  Seed: LRMKWMMAMKYPITA
LRMKMMMNMPYPRTA

SEQ ID NO: 237426 - protein, 15 aa, Artificial Sequence
  Description of Artificial Sequence: Synthetic peptide
  Seed: LRMKWMMAMKYPITA
LRMKMMMNMPYPSTA

SEQ ID NO: 237427 - protein, 15 aa, Artificial Sequence
  Description of Artificial Sequence: Synthetic peptide
  Seed: LRMKWMMAMKYPITA
LRMKMMMNMPYPTTA

SEQ ID NO: 237428 - protein, 15 aa, Artificial Sequence
  Description of Artificial Sequence: Synthetic peptide
  Seed: LRMKWMMAMKYPITA
LRMKMMMNMPYPVTA

SEQ ID NO: 237429 - protein, 15 aa, Artificial Sequence
  Description of Artificial Sequence: Synthetic peptide
  Seed: LRMKWMMAMKYPITA
LRMKMMMNMPYPWTA

SEQ ID NO: 237430 - protein, 15 aa, Artificial Sequence
  Description of Artificial Sequence: Synthetic peptide
  Seed: LRMKWMMAMKYPITA
LRMKMMMNMPYPYTA

SEQ ID NO: 237431 - protein, 15 aa, Artificial Sequence
  Description of Artificial Sequence: Synthetic peptide
  Seed: LRMKWMMAMKYPITA
LRMKMMMNMQYPFTA

SEQ ID NO: 237432 - protein, 15 aa, Artificial Sequence
  Description of Artificial Sequence: Synthetic peptide
  Seed: LRMKWMMAMKYPITA
LRMKMMMNMQYPITA

SEQ ID NO: 237433 - protein, 15 aa, Artificial Sequence
  Description of Artificial Sequence: Synthetic peptide
  Seed: LRMKWMMAMKYPITA
LRMKMMMNMQYPLTA

SEQ ID NO: 237434 - protein, 15 aa, Artificial Sequence
  Description of Artificial Sequence: Synthetic peptide
  Seed: LRMKWMMAMKYPITA
LRMKMMMNMQYPMTA

SEQ ID NO: 237435 - protein, 15 aa, Artificial Sequence
  Description of Artificial Sequence: Synthetic peptide
  Seed: LRMKWMMAMKYPITA
LRMKMMMNMQYPRTA

SEQ ID NO: 237436 - protein, 15 aa, Artificial Sequence
  Description of Artificial Sequence: Synthetic peptide
  Seed: LRMKWMMAMKYPITA
LRMKMMMNMQYPVTA

SEQ ID NO: 237437 - protein, 15 aa, Artificial Sequence
  Description of Artificial Sequence: Synthetic peptide
  Seed: LRMKWMMAMKYPITA
LRMKMMMNMQYPYTA

SEQ ID NO: 237438 - protein, 15 aa, Artificial Sequence
  Description of Artificial Sequence: Synthetic peptide
  Seed: LRMKWMMAMKYPITA
LRMKMMMNMRYPATA

SEQ ID NO: 237439 - protein, 15 aa, Artificial Sequence
  Description of Artificial Sequence: Synthetic peptide
  Seed: LRMKWMMAMKYPITA
LRMKMMMNMRYPCTA

SEQ ID NO: 237440 - protein, 15 aa, Artificial Sequence
  Description of Artificial Sequence: Synthetic peptide
  Seed: LRMKWMMAMKYPITA
LRMKMMMNMRYPDTA

SEQ ID NO: 237441 - protein, 15 aa, Artificial Sequence
  Description of Artificial Sequence: Synthetic peptide
  Seed: LRMKWMMAMKYPITA
LRMKMMMNMRYPETA

SEQ ID NO: 237442 - protein, 15 aa, Artificial Sequence
  Description of Artificial Sequence: Synthetic peptide
  Seed: LRMKWMMAMKYPITA
LRMKMMMNMRYPFTA

SEQ ID NO: 237443 - protein, 15 aa, Artificial Sequence
  Description of Artificial Sequence: Synthetic peptide
  Seed: LRMKWMMAMKYPITA
LRMKMMMNMRYPGTA

SEQ ID NO: 237444 - protein, 15 aa, Artificial Sequence
  Description of Artificial Sequence: Synthetic peptide
  Seed: LRMKWMMAMKYPITA
LRMKMMMNMRYPHTA

SEQ ID NO: 237445 - protein, 15 aa, Artificial Sequence
  Description of Artificial Sequence: Synthetic peptide
  Seed: LRMKWMMAMKYPITA
LRMKMMMNMRYPITA

SEQ ID NO: 237446 - protein, 15 aa, Artificial Sequence
  Description of Artificial Sequence: Synthetic peptide
  Seed: LRMKWMMAMKYPITA
LRMKMMMNMRYPKTA

SEQ ID NO: 237447 - protein, 15 aa, Artificial Sequence
  Description of Artificial Sequence: Synthetic peptide
  Seed: LRMKWMMAMKYPITA
LRMKMMMNMRYPLTA

SEQ ID NO: 237448 - protein, 15 aa, Artificial Sequence
  Description of Artificial Sequence: Synthetic peptide
  Seed: LRMKWMMAMKYPITA
LRMKMMMNMRYPMTA

SEQ ID NO: 237449 - protein, 15 aa, Artificial Sequence
  Description of Artificial Sequence: Synthetic peptide
  Seed: LRMKWMMAMKYPITA
LRMKMMMNMRYPNTA

SEQ ID NO: 237450 - protein, 15 aa, Artificial Sequence
  Description of Artificial Sequence: Synthetic peptide
  Seed: LRMKWMMAMKYPITA
LRMKMMMNMRYPQTA

SEQ ID NO: 237451 - protein, 15 aa, Artificial Sequence
  Description of Artificial Sequence: Synthetic peptide
  Seed: LRMKWMMAMKYPITA
LRMKMMMNMRYPRTA

SEQ ID NO: 237452 - protein, 15 aa, Artificial Sequence
  Description of Artificial Sequence: Synthetic peptide
  Seed: LRMKWMMAMKYPITA
LRMKMMMNMRYPSTA

SEQ ID NO: 237453 - protein, 15 aa, Artificial Sequence
  Description of Artificial Sequence: Synthetic peptide
  Seed: LRMKWMMAMKYPITA
LRMKMMMNMRYPTTA

SEQ ID NO: 237454 - protein, 15 aa, Artificial Sequence
  Description of Artificial Sequence: Synthetic peptide
  Seed: LRMKWMMAMKYPITA
LRMKMMMNMRYPVTA

SEQ ID NO: 237455 - protein, 15 aa, Artificial Sequence
  Description of Artificial Sequence: Synthetic peptide
  Seed: LRMKWMMAMKYPITA
LRMKMMMNMRYPWTA

SEQ ID NO: 237456 - protein, 15 aa, Artificial Sequence
  Description of Artificial Sequence: Synthetic peptide
  Seed: LRMKWMMAMKYPITA
LRMKMMMNMRYPYTA

SEQ ID NO: 237457 - protein, 15 aa, Artificial Sequence
  Description of Artificial Sequence: Synthetic peptide
  Seed: LRMKWMMAMKYPITA
LRMKMMMNMSYPATA

SEQ ID NO: 237458 - protein, 15 aa, Artificial Sequence
  Description of Artificial Sequence: Synthetic peptide
  Seed: LRMKWMMAMKYPITA
LRMKMMMNMSYPFTA

SEQ ID NO: 237459 - protein, 15 aa, Artificial Sequence
  Description of Artificial Sequence: Synthetic peptide
  Seed: LRMKWMMAMKYPITA
LRMKMMMNMSYPGTA

SEQ ID NO: 237460 - protein, 15 aa, Artificial Sequence
  Description of Artificial Sequence: Synthetic peptide
  Seed: LRMKWMMAMKYPITA
LRMKMMMNMSYPHTA

SEQ ID NO: 237461 - protein, 15 aa, Artificial Sequence
  Description of Artificial Sequence: Synthetic peptide
  Seed: LRMKWMMAMKYPITA
LRMKMMMNMSYPITA

SEQ ID NO: 237462 - protein, 15 aa, Artificial Sequence
  Description of Artificial Sequence: Synthetic peptide
  Seed: LRMKWMMAMKYPITA
LRMKMMMNMSYPKTA

SEQ ID NO: 237463 - protein, 15 aa, Artificial Sequence
  Description of Artificial Sequence: Synthetic peptide
  Seed: LRMKWMMAMKYPITA
LRMKMMMNMSYPLTA

SEQ ID NO: 237464 - protein, 15 aa, Artificial Sequence
  Description of Artificial Sequence: Synthetic peptide
  Seed: LRMKWMMAMKYPITA
LRMKMMMNMSYPMTA

SEQ ID NO: 237465 - protein, 15 aa, Artificial Sequence
  Description of Artificial Sequence: Synthetic peptide
  Seed: LRMKWMMAMKYPITA
LRMKMMMNMSYPNTA

SEQ ID NO: 237466 - protein, 15 aa, Artificial Sequence
  Description of Artificial Sequence: Synthetic peptide
  Seed: LRMKWMMAMKYPITA
LRMKMMMNMSYPQTA

SEQ ID NO: 237467 - protein, 15 aa, Artificial Sequence
  Description of Artificial Sequence: Synthetic peptide
  Seed: LRMKWMMAMKYPITA
LRMKMMMNMSYPRTA

SEQ ID NO: 237468 - protein, 15 aa, Artificial Sequence
  Description of Artificial Sequence: Synthetic peptide
  Seed: LRMKWMMAMKYPITA
LRMKMMMNMSYPSTA

SEQ ID NO: 237469 - protein, 15 aa, Artificial Sequence
  Description of Artificial Sequence: Synthetic peptide
  Seed: LRMKWMMAMKYPITA
LRMKMMMNMSYPTTA

SEQ ID NO: 237470 - protein, 15 aa, Artificial Sequence
  Description of Artificial Sequence: Synthetic peptide
  Seed: LRMKWMMAMKYPITA
LRMKMMMNMSYPVTA

SEQ ID NO: 237471 - protein, 15 aa, Artificial Sequence
  Description of Artificial Sequence: Synthetic peptide
  Seed: LRMKWMMAMKYPITA
LRMKMMMNMSYPWTA

SEQ ID NO: 237472 - protein, 15 aa, Artificial Sequence
  Description of Artificial Sequence: Synthetic peptide
  Seed: LRMKWMMAMKYPITA
LRMKMMMNMSYPYTA

SEQ ID NO: 237473 - protein, 15 aa, Artificial Sequence
  Description of Artificial Sequence: Synthetic peptide
  Seed: LRMKWMMAMKYPITA
LRMKMMMNMTYPATA

SEQ ID NO: 237474 - protein, 15 aa, Artificial Sequence
  Description of Artificial Sequence: Synthetic peptide
  Seed: LRMKWMMAMKYPITA
LRMKMMMNMTYPFTA

SEQ ID NO: 237475 - protein, 15 aa, Artificial Sequence
  Description of Artificial Sequence: Synthetic peptide
  Seed: LRMKWMMAMKYPITA
LRMKMMMNMTYPITA

SEQ ID NO: 237476 - protein, 15 aa, Artificial Sequence
  Description of Artificial Sequence: Synthetic peptide
  Seed: LRMKWMMAMKYPITA
LRMKMMMNMTYPKTA

SEQ ID NO: 237477 - protein, 15 aa, Artificial Sequence
  Description of Artificial Sequence: Synthetic peptide
  Seed: LRMKWMMAMKYPITA
LRMKMMMNMTYPLTA

SEQ ID NO: 237478 - protein, 15 aa, Artificial Sequence
  Description of Artificial Sequence: Synthetic peptide
  Seed: LRMKWMMAMKYPITA
LRMKMMMNMTYPMTA

SEQ ID NO: 237479 - protein, 15 aa, Artificial Sequence
  Description of Artificial Sequence: Synthetic peptide
  Seed: LRMKWMMAMKYPITA
LRMKMMMNMTYPNTA

SEQ ID NO: 237480 - protein, 15 aa, Artificial Sequence
  Description of Artificial Sequence: Synthetic peptide
  Seed: LRMKWMMAMKYPITA
LRMKMMMNMTYPRTA

SEQ ID NO: 237481 - protein, 15 aa, Artificial Sequence
  Description of Artificial Sequence: Synthetic peptide
  Seed: LRMKWMMAMKYPITA
LRMKMMMNMTYPSTA

SEQ ID NO: 237482 - protein, 15 aa, Artificial Sequence
  Description of Artificial Sequence: Synthetic peptide
  Seed: LRMKWMMAMKYPITA
LRMKMMMNMTYPTTA

SEQ ID NO: 237483 - protein, 15 aa, Artificial Sequence
  Description of Artificial Sequence: Synthetic peptide
  Seed: LRMKWMMAMKYPITA
LRMKMMMNMTYPVTA

SEQ ID NO: 237484 - protein, 15 aa, Artificial Sequence
  Description of Artificial Sequence: Synthetic peptide
  Seed: LRMKWMMAMKYPITA
LRMKMMMNMTYPWTA

SEQ ID NO: 237485 - protein, 15 aa, Artificial Sequence
  Description of Artificial Sequence: Synthetic peptide
  Seed: LRMKWMMAMKYPITA
LRMKMMMNMTYPYTA

SEQ ID NO: 237486 - protein, 15 aa, Artificial Sequence
  Description of Artificial Sequence: Synthetic peptide
  Seed: LRMKWMMAMKYPITA
LRMKMMMNMVYPATA

SEQ ID NO: 237487 - protein, 15 aa, Artificial Sequence
  Description of Artificial Sequence: Synthetic peptide
  Seed: LRMKWMMAMKYPITA
LRMKMMMNMVYPFTA

SEQ ID NO: 237488 - protein, 15 aa, Artificial Sequence
  Description of Artificial Sequence: Synthetic peptide
  Seed: LRMKWMMAMKYPITA
LRMKMMMNMVYPGTA

SEQ ID NO: 237489 - protein, 15 aa, Artificial Sequence
  Description of Artificial Sequence: Synthetic peptide
  Seed: LRMKWMMAMKYPITA
LRMKMMMNMVYPHTA

SEQ ID NO: 237490 - protein, 15 aa, Artificial Sequence
  Description of Artificial Sequence: Synthetic peptide
  Seed: LRMKWMMAMKYPITA
LRMKMMMNMVYPITA

SEQ ID NO: 237491 - protein, 15 aa, Artificial Sequence
  Description of Artificial Sequence: Synthetic peptide
  Seed: LRMKWMMAMKYPITA
LRMKMMMNMVYPKTA

SEQ ID NO: 237492 - protein, 15 aa, Artificial Sequence
  Description of Artificial Sequence: Synthetic peptide
  Seed: LRMKWMMAMKYPITA
LRMKMMMNMVYPLTA

SEQ ID NO: 237493 - protein, 15 aa, Artificial Sequence
  Description of Artificial Sequence: Synthetic peptide
  Seed: LRMKWMMAMKYPITA
LRMKMMMNMVYPMTA

SEQ ID NO: 237494 - protein, 15 aa, Artificial Sequence
  Description of Artificial Sequence: Synthetic peptide
  Seed: LRMKWMMAMKYPITA
LRMKMMMNMVYPNTA

SEQ ID NO: 237495 - protein, 15 aa, Artificial Sequence
  Description of Artificial Sequence: Synthetic peptide
  Seed: LRMKWMMAMKYPITA
LRMKMMMNMVYPRTA

SEQ ID NO: 237496 - protein, 15 aa, Artificial Sequence
  Description of Artificial Sequence: Synthetic peptide
  Seed: LRMKWMMAMKYPITA
LRMKMMMNMVYPSTA

SEQ ID NO: 237497 - protein, 15 aa, Artificial Sequence
  Description of Artificial Sequence: Synthetic peptide
  Seed: LRMKWMMAMKYPITA
LRMKMMMNMVYPTTA

SEQ ID NO: 237498 - protein, 15 aa, Artificial Sequence
  Description of Artificial Sequence: Synthetic peptide
  Seed: LRMKWMMAMKYPITA
LRMKMMMNMVYPVTA

SEQ ID NO: 237499 - protein, 15 aa, Artificial Sequence
  Description of Artificial Sequence: Synthetic peptide
  Seed: LRMKWMMAMKYPITA
LRMKMMMNMVYPWTA

SEQ ID NO: 237500 - protein, 15 aa, Artificial Sequence
  Description of Artificial Sequence: Synthetic peptide
  Seed: LRMKWMMAMKYPITA
LRMKMMMNMVYPYTA

SEQ ID NO: 237501 - protein, 15 aa, Artificial Sequence
  Description of Artificial Sequence: Synthetic peptide
  Seed: LRMKWMMAMKYPITA
LRMKMMMNMWYPITA

SEQ ID NO: 237502 - protein, 15 aa, Artificial Sequence
  Description of Artificial Sequence: Synthetic peptide
  Seed: LRMKWMMAMKYPITA
LRMKMMMNMWYPLTA

SEQ ID NO: 237503 - protein, 15 aa, Artificial Sequence
  Description of Artificial Sequence: Synthetic peptide
  Seed: LRMKWMMAMKYPITA
LRMKMMMNMWYPVTA

SEQ ID NO: 237504 - protein, 15 aa, Artificial Sequence
  Description of Artificial Sequence: Synthetic peptide
  Seed: LRMKWMMAMKYPITA
LRMKMMMNMYYPFTA

SEQ ID NO: 237505 - protein, 15 aa, Artificial Sequence
  Description of Artificial Sequence: Synthetic peptide
  Seed: LRMKWMMAMKYPITA
LRMKMMMNMYYPITA

SEQ ID NO: 237506 - protein, 15 aa, Artificial Sequence
  Description of Artificial Sequence: Synthetic peptide
  Seed: LRMKWMMAMKYPITA
LRMKMMMNMYYPLTA

SEQ ID NO: 237507 - protein, 15 aa, Artificial Sequence
  Description of Artificial Sequence: Synthetic peptide
  Seed: LRMKWMMAMKYPITA
LRMKMMMNMYYPMTA

SEQ ID NO: 237508 - protein, 15 aa, Artificial Sequence
  Description of Artificial Sequence: Synthetic peptide
  Seed: LRMKWMMAMKYPITA
LRMKMMMNMYYPVTA

SEQ ID NO: 237509 - protein, 15 aa, Artificial Sequence
  Description of Artificial Sequence: Synthetic peptide
  Seed: LRMKWMMAMKYPITA
LRMKMMMNMYYPYTA

SEQ ID NO: 237510 - protein, 15 aa, Artificial Sequence
  Description of Artificial Sequence: Synthetic peptide
  Seed: LRMKWMMAMKYPITA
LRMKMMMPMAYPATA

SEQ ID NO: 237511 - protein, 15 aa, Artificial Sequence
  Description of Artificial Sequence: Synthetic peptide
  Seed: LRMKWMMAMKYPITA
LRMKMMMPMAYPFTA

SEQ ID NO: 237512 - protein, 15 aa, Artificial Sequence
  Description of Artificial Sequence: Synthetic peptide
  Seed: LRMKWMMAMKYPITA
LRMKMMMPMAYPITA

SEQ ID NO: 237513 - protein, 15 aa, Artificial Sequence
  Description of Artificial Sequence: Synthetic peptide
  Seed: LRMKWMMAMKYPITA
LRMKMMMPMAYPLTA

SEQ ID NO: 237514 - protein, 15 aa, Artificial Sequence
  Description of Artificial Sequence: Synthetic peptide
  Seed: LRMKWMMAMKYPITA
LRMKMMMPMAYPMTA

SEQ ID NO: 237515 - protein, 15 aa, Artificial Sequence
  Description of Artificial Sequence: Synthetic peptide
  Seed: LRMKWMMAMKYPITA
LRMKMMMPMAYPSTA

SEQ ID NO: 237516 - protein, 15 aa, Artificial Sequence
  Description of Artificial Sequence: Synthetic peptide
  Seed: LRMKWMMAMKYPITA
LRMKMMMPMAYPTTA

SEQ ID NO: 237517 - protein, 15 aa, Artificial Sequence
  Description of Artificial Sequence: Synthetic peptide
  Seed: LRMKWMMAMKYPITA
LRMKMMMPMAYPVTA

SEQ ID NO: 237518 - protein, 15 aa, Artificial Sequence
  Description of Artificial Sequence: Synthetic peptide
  Seed: LRMKWMMAMKYPITA
LRMKMMMPMGYPATA

SEQ ID NO: 237519 - protein, 15 aa, Artificial Sequence
  Description of Artificial Sequence: Synthetic peptide
  Seed: LRMKWMMAMKYPITA
LRMKMMMPMGYPITA

SEQ ID NO: 237520 - protein, 15 aa, Artificial Sequence
  Description of Artificial Sequence: Synthetic peptide
  Seed: LRMKWMMAMKYPITA
LRMKMMMPMGYPLTA

SEQ ID NO: 237521 - protein, 15 aa, Artificial Sequence
  Description of Artificial Sequence: Synthetic peptide
  Seed: LRMKWMMAMKYPITA
LRMKMMMPMGYPMTA

SEQ ID NO: 237522 - protein, 15 aa, Artificial Sequence
  Description of Artificial Sequence: Synthetic peptide
  Seed: LRMKWMMAMKYPITA
LRMKMMMPMGYPVTA

SEQ ID NO: 237523 - protein, 15 aa, Artificial Sequence
  Description of Artificial Sequence: Synthetic peptide
  Seed: LRMKWMMAMKYPITA
LRMKMMMPMNYPITA

SEQ ID NO: 237524 - protein, 15 aa, Artificial Sequence
  Description of Artificial Sequence: Synthetic peptide
  Seed: LRMKWMMAMKYPITA
LRMKMMMPMNYPLTA

SEQ ID NO: 237525 - protein, 15 aa, Artificial Sequence
  Description of Artificial Sequence: Synthetic peptide
  Seed: LRMKWMMAMKYPITA
LRMKMMMPMNYPVTA

SEQ ID NO: 237526 - protein, 15 aa, Artificial Sequence
  Description of Artificial Sequence: Synthetic peptide
  Seed: LRMKWMMAMKYPITA
LRMKMMMPMPYPITA

SEQ ID NO: 237527 - protein, 15 aa, Artificial Sequence
  Description of Artificial Sequence: Synthetic peptide
  Seed: LRMKWMMAMKYPITA
LRMKMMMPMPYPLTA

SEQ ID NO: 237528 - protein, 15 aa, Artificial Sequence
  Description of Artificial Sequence: Synthetic peptide
  Seed: LRMKWMMAMKYPITA
LRMKMMMPMPYPMTA

SEQ ID NO: 237529 - protein, 15 aa, Artificial Sequence
  Description of Artificial Sequence: Synthetic peptide
  Seed: LRMKWMMAMKYPITA
LRMKMMMPMPYPVTA

SEQ ID NO: 237530 - protein, 15 aa, Artificial Sequence
  Description of Artificial Sequence: Synthetic peptide
  Seed: LRMKWMMAMKYPITA
LRMKMMMPMSYPATA

SEQ ID NO: 237531 - protein, 15 aa, Artificial Sequence
  Description of Artificial Sequence: Synthetic peptide
  Seed: LRMKWMMAMKYPITA
LRMKMMMPMSYPFTA

SEQ ID NO: 237532 - protein, 15 aa, Artificial Sequence
  Description of Artificial Sequence: Synthetic peptide
  Seed: LRMKWMMAMKYPITA
LRMKMMMPMSYPITA

SEQ ID NO: 237533 - protein, 15 aa, Artificial Sequence
  Description of Artificial Sequence: Synthetic peptide
  Seed: LRMKWMMAMKYPITA
LRMKMMMPMSYPLTA

SEQ ID NO: 237534 - protein, 15 aa, Artificial Sequence
  Description of Artificial Sequence: Synthetic peptide
  Seed: LRMKWMMAMKYPITA
LRMKMMMPMSYPMTA

SEQ ID NO: 237535 - protein, 15 aa, Artificial Sequence
  Description of Artificial Sequence: Synthetic peptide
  Seed: LRMKWMMAMKYPITA
LRMKMMMPMSYPSTA

SEQ ID NO: 237536 - protein, 15 aa, Artificial Sequence
  Description of Artificial Sequence: Synthetic peptide
  Seed: LRMKWMMAMKYPITA
LRMKMMMPMSYPTTA

SEQ ID NO: 237537 - protein, 15 aa, Artificial Sequence
  Description of Artificial Sequence: Synthetic peptide
  Seed: LRMKWMMAMKYPITA
LRMKMMMPMSYPVTA

SEQ ID NO: 237538 - protein, 15 aa, Artificial Sequence
  Description of Artificial Sequence: Synthetic peptide
  Seed: LRMKWMMAMKYPITA
LRMKMMMPMTYPATA

SEQ ID NO: 237539 - protein, 15 aa, Artificial Sequence
  Description of Artificial Sequence: Synthetic peptide
  Seed: LRMKWMMAMKYPITA
LRMKMMMPMTYPITA

SEQ ID NO: 237540 - protein, 15 aa, Artificial Sequence
  Description of Artificial Sequence: Synthetic peptide
  Seed: LRMKWMMAMKYPITA
LRMKMMMPMTYPLTA

SEQ ID NO: 237541 - protein, 15 aa, Artificial Sequence
  Description of Artificial Sequence: Synthetic peptide
  Seed: LRMKWMMAMKYPITA
LRMKMMMPMTYPVTA

SEQ ID NO: 237542 - protein, 15 aa, Artificial Sequence
  Description of Artificial Sequence: Synthetic peptide
  Seed: LRMKWMMAMKYPITA
LRMKMMMPMVYPATA

SEQ ID NO: 237543 - protein, 15 aa, Artificial Sequence
  Description of Artificial Sequence: Synthetic peptide
  Seed: LRMKWMMAMKYPITA
LRMKMMMPMVYPLTA

SEQ ID NO: 237544 - protein, 15 aa, Artificial Sequence
  Description of Artificial Sequence: Synthetic peptide
  Seed: LRMKWMMAMKYPITA
LRMKMMMQMAYPATA

SEQ ID NO: 237545 - protein, 15 aa, Artificial Sequence
  Description of Artificial Sequence: Synthetic peptide
  Seed: LRMKWMMAMKYPITA
LRMKMMMQMAYPCTA

SEQ ID NO: 237546 - protein, 15 aa, Artificial Sequence
  Description of Artificial Sequence: Synthetic peptide
  Seed: LRMKWMMAMKYPITA
LRMKMMMQMAYPETA

SEQ ID NO: 237547 - protein, 15 aa, Artificial Sequence
  Description of Artificial Sequence: Synthetic peptide
  Seed: LRMKWMMAMKYPITA
LRMKMMMQMAYPFTA

SEQ ID NO: 237548 - protein, 15 aa, Artificial Sequence
  Description of Artificial Sequence: Synthetic peptide
  Seed: LRMKWMMAMKYPITA
LRMKMMMQMAYPGTA

SEQ ID NO: 237549 - protein, 15 aa, Artificial Sequence
  Description of Artificial Sequence: Synthetic peptide
  Seed: LRMKWMMAMKYPITA
LRMKMMMQMAYPHTA

SEQ ID NO: 237550 - protein, 15 aa, Artificial Sequence
  Description of Artificial Sequence: Synthetic peptide
  Seed: LRMKWMMAMKYPITA
LRMKMMMQMAYPITA

SEQ ID NO: 237551 - protein, 15 aa, Artificial Sequence
  Description of Artificial Sequence: Synthetic peptide
  Seed: LRMKWMMAMKYPITA
LRMKMMMQMAYPLTA

SEQ ID NO: 237552 - protein, 15 aa, Artificial Sequence
  Description of Artificial Sequence: Synthetic peptide
  Seed: LRMKWMMAMKYPITA
LRMKMMMQMAYPMTA

SEQ ID NO: 237553 - protein, 15 aa, Artificial Sequence
  Description of Artificial Sequence: Synthetic peptide
  Seed: LRMKWMMAMKYPITA
LRMKMMMQMAYPNTA

SEQ ID NO: 237554 - protein, 15 aa, Artificial Sequence
  Description of Artificial Sequence: Synthetic peptide
  Seed: LRMKWMMAMKYPITA
LRMKMMMQMAYPPTA

SEQ ID NO: 237555 - protein, 15 aa, Artificial Sequence
  Description of Artificial Sequence: Synthetic peptide
  Seed: LRMKWMMAMKYPITA
LRMKMMMQMAYPQTA

SEQ ID NO: 237556 - protein, 15 aa, Artificial Sequence
  Description of Artificial Sequence: Synthetic peptide
  Seed: LRMKWMMAMKYPITA
LRMKMMMQMAYPRTA

SEQ ID NO: 237557 - protein, 15 aa, Artificial Sequence
  Description of Artificial Sequence: Synthetic peptide
  Seed: LRMKWMMAMKYPITA
LRMKMMMQMAYPSTA

SEQ ID NO: 237558 - protein, 15 aa, Artificial Sequence
  Description of Artificial Sequence: Synthetic peptide
  Seed: LRMKWMMAMKYPITA
LRMKMMMQMAYPTTA

SEQ ID NO: 237559 - protein, 15 aa, Artificial Sequence
  Description of Artificial Sequence: Synthetic peptide
  Seed: LRMKWMMAMKYPITA
LRMKMMMQMAYPVTA

SEQ ID NO: 237560 - protein, 15 aa, Artificial Sequence
  Description of Artificial Sequence: Synthetic peptide
  Seed: LRMKWMMAMKYPITA
LRMKMMMQMAYPWTA

SEQ ID NO: 237561 - protein, 15 aa, Artificial Sequence
  Description of Artificial Sequence: Synthetic peptide
  Seed: LRMKWMMAMKYPITA
LRMKMMMQMAYPYTA

SEQ ID NO: 237562 - protein, 15 aa, Artificial Sequence
  Description of Artificial Sequence: Synthetic peptide
  Seed: LRMKWMMAMKYPITA
LRMKMMMQMCYPVTA

SEQ ID NO: 237563 - protein, 15 aa, Artificial Sequence
  Description of Artificial Sequence: Synthetic peptide
  Seed: LRMKWMMAMKYPITA
LRMKMMMQMFYPLTA

SEQ ID NO: 237564 - protein, 15 aa, Artificial Sequence
  Description of Artificial Sequence: Synthetic peptide
  Seed: LRMKWMMAMKYPITA
LRMKMMMQMGYPATA

SEQ ID NO: 237565 - protein, 15 aa, Artificial Sequence
  Description of Artificial Sequence: Synthetic peptide
  Seed: LRMKWMMAMKYPITA
LRMKMMMQMGYPCTA

SEQ ID NO: 237566 - protein, 15 aa, Artificial Sequence
  Description of Artificial Sequence: Synthetic peptide
  Seed: LRMKWMMAMKYPITA
LRMKMMMQMGYPFTA

SEQ ID NO: 237567 - protein, 15 aa, Artificial Sequence
  Description of Artificial Sequence: Synthetic peptide
  Seed: LRMKWMMAMKYPITA
LRMKMMMQMGYPGTA

SEQ ID NO: 237568 - protein, 15 aa, Artificial Sequence
  Description of Artificial Sequence: Synthetic peptide
  Seed: LRMKWMMAMKYPITA
LRMKMMMQMGYPITA

SEQ ID NO: 237569 - protein, 15 aa, Artificial Sequence
  Description of Artificial Sequence: Synthetic peptide
  Seed: LRMKWMMAMKYPITA
LRMKMMMQMGYPLTA

SEQ ID NO: 237570 - protein, 15 aa, Artificial Sequence
  Description of Artificial Sequence: Synthetic peptide
  Seed: LRMKWMMAMKYPITA
LRMKMMMQMGYPMTA

SEQ ID NO: 237571 - protein, 15 aa, Artificial Sequence
  Description of Artificial Sequence: Synthetic peptide
  Seed: LRMKWMMAMKYPITA
LRMKMMMQMGYPNTA

SEQ ID NO: 237572 - protein, 15 aa, Artificial Sequence
  Description of Artificial Sequence: Synthetic peptide
  Seed: LRMKWMMAMKYPITA
LRMKMMMQMGYPSTA

SEQ ID NO: 237573 - protein, 15 aa, Artificial Sequence
  Description of Artificial Sequence: Synthetic peptide
  Seed: LRMKWMMAMKYPITA
LRMKMMMQMGYPTTA

SEQ ID NO: 237574 - protein, 15 aa, Artificial Sequence
  Description of Artificial Sequence: Synthetic peptide
  Seed: LRMKWMMAMKYPITA
LRMKMMMQMGYPVTA

SEQ ID NO: 237575 - protein, 15 aa, Artificial Sequence
  Description of Artificial Sequence: Synthetic peptide
  Seed: LRMKWMMAMKYPITA
LRMKMMMQMGYPYTA

SEQ ID NO: 237576 - protein, 15 aa, Artificial Sequence
  Description of Artificial Sequence: Synthetic peptide
  Seed: LRMKWMMAMKYPITA
LRMKMMMQMHYPFTA

SEQ ID NO: 237577 - protein, 15 aa, Artificial Sequence
  Description of Artificial Sequence: Synthetic peptide
  Seed: LRMKWMMAMKYPITA
LRMKMMMQMHYPITA

SEQ ID NO: 237578 - protein, 15 aa, Artificial Sequence
  Description of Artificial Sequence: Synthetic peptide
  Seed: LRMKWMMAMKYPITA
LRMKMMMQMHYPLTA

SEQ ID NO: 237579 - protein, 15 aa, Artificial Sequence
  Description of Artificial Sequence: Synthetic peptide
  Seed: LRMKWMMAMKYPITA
LRMKMMMQMHYPVTA

SEQ ID NO: 237580 - protein, 15 aa, Artificial Sequence
  Description of Artificial Sequence: Synthetic peptide
  Seed: LRMKWMMAMKYPITA
LRMKMMMQMHYPYTA

SEQ ID NO: 237581 - protein, 15 aa, Artificial Sequence
  Description of Artificial Sequence: Synthetic peptide
  Seed: LRMKWMMAMKYPITA
LRMKMMMQMIYPATA

SEQ ID NO: 237582 - protein, 15 aa, Artificial Sequence
  Description of Artificial Sequence: Synthetic peptide
  Seed: LRMKWMMAMKYPITA
LRMKMMMQMIYPCTA

SEQ ID NO: 237583 - protein, 15 aa, Artificial Sequence
  Description of Artificial Sequence: Synthetic peptide
  Seed: LRMKWMMAMKYPITA
LRMKMMMQMIYPGTA

SEQ ID NO: 237584 - protein, 15 aa, Artificial Sequence
  Description of Artificial Sequence: Synthetic peptide
  Seed: LRMKWMMAMKYPITA
LRMKMMMQMIYPITA

SEQ ID NO: 237585 - protein, 15 aa, Artificial Sequence
  Description of Artificial Sequence: Synthetic peptide
  Seed: LRMKWMMAMKYPITA
LRMKMMMQMIYPLTA

SEQ ID NO: 237586 - protein, 15 aa, Artificial Sequence
  Description of Artificial Sequence: Synthetic peptide
  Seed: LRMKWMMAMKYPITA
LRMKMMMQMIYPMTA

SEQ ID NO: 237587 - protein, 15 aa, Artificial Sequence
  Description of Artificial Sequence: Synthetic peptide
  Seed: LRMKWMMAMKYPITA
LRMKMMMQMIYPNTA

SEQ ID NO: 237588 - protein, 15 aa, Artificial Sequence
  Description of Artificial Sequence: Synthetic peptide
  Seed: LRMKWMMAMKYPITA
LRMKMMMQMIYPSTA

SEQ ID NO: 237589 - protein, 15 aa, Artificial Sequence
  Description of Artificial Sequence: Synthetic peptide
  Seed: LRMKWMMAMKYPITA
LRMKMMMQMIYPTTA

SEQ ID NO: 237590 - protein, 15 aa, Artificial Sequence
  Description of Artificial Sequence: Synthetic peptide
  Seed: LRMKWMMAMKYPITA
LRMKMMMQMIYPVTA

SEQ ID NO: 237591 - protein, 15 aa, Artificial Sequence
  Description of Artificial Sequence: Synthetic peptide
  Seed: LRMKWMMAMKYPITA
LRMKMMMQMKYPATA

SEQ ID NO: 237592 - protein, 15 aa, Artificial Sequence
  Description of Artificial Sequence: Synthetic peptide
  Seed: LRMKWMMAMKYPITA
LRMKMMMQMKYPFTA

SEQ ID NO: 237593 - protein, 15 aa, Artificial Sequence
  Description of Artificial Sequence: Synthetic peptide
  Seed: LRMKWMMAMKYPITA
LRMKMMMQMKYPGTA

SEQ ID NO: 237594 - protein, 15 aa, Artificial Sequence
  Description of Artificial Sequence: Synthetic peptide
  Seed: LRMKWMMAMKYPITA
LRMKMMMQMKYPHTA

SEQ ID NO: 237595 - protein, 15 aa, Artificial Sequence
  Description of Artificial Sequence: Synthetic peptide
  Seed: LRMKWMMAMKYPITA
LRMKMMMQMKYPITA

SEQ ID NO: 237596 - protein, 15 aa, Artificial Sequence
  Description of Artificial Sequence: Synthetic peptide
  Seed: LRMKWMMAMKYPITA
LRMKMMMQMKYPKTA

SEQ ID NO: 237597 - protein, 15 aa, Artificial Sequence
  Description of Artificial Sequence: Synthetic peptide
  Seed: LRMKWMMAMKYPITA
LRMKMMMQMKYPLTA

SEQ ID NO: 237598 - protein, 15 aa, Artificial Sequence
  Description of Artificial Sequence: Synthetic peptide
  Seed: LRMKWMMAMKYPITA
LRMKMMMQMKYPMTA

SEQ ID NO: 237599 - protein, 15 aa, Artificial Sequence
  Description of Artificial Sequence: Synthetic peptide
  Seed: LRMKWMMAMKYPITA
LRMKMMMQMKYPNTA

SEQ ID NO: 237600 - protein, 15 aa, Artificial Sequence
  Description of Artificial Sequence: Synthetic peptide
  Seed: LRMKWMMAMKYPITA
LRMKMMMQMKYPQTA

SEQ ID NO: 237601 - protein, 15 aa, Artificial Sequence
  Description of Artificial Sequence: Synthetic peptide
  Seed: LRMKWMMAMKYPITA
LRMKMMMQMKYPRTA

SEQ ID NO: 237602 - protein, 15 aa, Artificial Sequence
  Description of Artificial Sequence: Synthetic peptide
  Seed: LRMKWMMAMKYPITA
LRMKMMMQMKYPSTA

SEQ ID NO: 237603 - protein, 15 aa, Artificial Sequence
  Description of Artificial Sequence: Synthetic peptide
  Seed: LRMKWMMAMKYPITA
LRMKMMMQMKYPTTA

SEQ ID NO: 237604 - protein, 15 aa, Artificial Sequence
  Description of Artificial Sequence: Synthetic peptide
  Seed: LRMKWMMAMKYPITA
LRMKMMMQMKYPVTA

SEQ ID NO: 237605 - protein, 15 aa, Artificial Sequence
  Description of Artificial Sequence: Synthetic peptide
  Seed: LRMKWMMAMKYPITA
LRMKMMMQMKYPWTA

SEQ ID NO: 237606 - protein, 15 aa, Artificial Sequence
  Description of Artificial Sequence: Synthetic peptide
  Seed: LRMKWMMAMKYPITA
LRMKMMMQMKYPYTA

SEQ ID NO: 237607 - protein, 15 aa, Artificial Sequence
  Description of Artificial Sequence: Synthetic peptide
  Seed: LRMKWMMAMKYPITA
LRMKMMMQMNYPATA

SEQ ID NO: 237608 - protein, 15 aa, Artificial Sequence
  Description of Artificial Sequence: Synthetic peptide
  Seed: LRMKWMMAMKYPITA
LRMKMMMQMNYPFTA

SEQ ID NO: 237609 - protein, 15 aa, Artificial Sequence
  Description of Artificial Sequence: Synthetic peptide
  Seed: LRMKWMMAMKYPITA
LRMKMMMQMNYPITA

SEQ ID NO: 237610 - protein, 15 aa, Artificial Sequence
  Description of Artificial Sequence: Synthetic peptide
  Seed: LRMKWMMAMKYPITA
LRMKMMMQMNYPLTA

SEQ ID NO: 237611 - protein, 15 aa, Artificial Sequence
  Description of Artificial Sequence: Synthetic peptide
  Seed: LRMKWMMAMKYPITA
LRMKMMMQMNYPMTA

SEQ ID NO: 237612 - protein, 15 aa, Artificial Sequence
  Description of Artificial Sequence: Synthetic peptide
  Seed: LRMKWMMAMKYPITA
LRMKMMMQMNYPSTA

SEQ ID NO: 237613 - protein, 15 aa, Artificial Sequence
  Description of Artificial Sequence: Synthetic peptide
  Seed: LRMKWMMAMKYPITA
LRMKMMMQMNYPTTA

SEQ ID NO: 237614 - protein, 15 aa, Artificial Sequence
  Description of Artificial Sequence: Synthetic peptide
  Seed: LRMKWMMAMKYPITA
LRMKMMMQMNYPVTA

SEQ ID NO: 237615 - protein, 15 aa, Artificial Sequence
  Description of Artificial Sequence: Synthetic peptide
  Seed: LRMKWMMAMKYPITA
LRMKMMMQMNYPYTA

SEQ ID NO: 237616 - protein, 15 aa, Artificial Sequence
  Description of Artificial Sequence: Synthetic peptide
  Seed: LRMKWMMAMKYPITA
LRMKMMMQMPYPATA

SEQ ID NO: 237617 - protein, 15 aa, Artificial Sequence
  Description of Artificial Sequence: Synthetic peptide
  Seed: LRMKWMMAMKYPITA
LRMKMMMQMPYPCTA

SEQ ID NO: 237618 - protein, 15 aa, Artificial Sequence
  Description of Artificial Sequence: Synthetic peptide
  Seed: LRMKWMMAMKYPITA
LRMKMMMQMPYPFTA

SEQ ID NO: 237619 - protein, 15 aa, Artificial Sequence
  Description of Artificial Sequence: Synthetic peptide
  Seed: LRMKWMMAMKYPITA
LRMKMMMQMPYPGTA

SEQ ID NO: 237620 - protein, 15 aa, Artificial Sequence
  Description of Artificial Sequence: Synthetic peptide
  Seed: LRMKWMMAMKYPITA
LRMKMMMQMPYPITA

SEQ ID NO: 237621 - protein, 15 aa, Artificial Sequence
  Description of Artificial Sequence: Synthetic peptide
  Seed: LRMKWMMAMKYPITA
LRMKMMMQMPYPLTA

SEQ ID NO: 237622 - protein, 15 aa, Artificial Sequence
  Description of Artificial Sequence: Synthetic peptide
  Seed: LRMKWMMAMKYPITA
LRMKMMMQMPYPMTA

SEQ ID NO: 237623 - protein, 15 aa, Artificial Sequence
  Description of Artificial Sequence: Synthetic peptide
  Seed: LRMKWMMAMKYPITA
LRMKMMMQMPYPNTA

SEQ ID NO: 237624 - protein, 15 aa, Artificial Sequence
  Description of Artificial Sequence: Synthetic peptide
  Seed: LRMKWMMAMKYPITA
LRMKMMMQMPYPSTA

SEQ ID NO: 237625 - protein, 15 aa, Artificial Sequence
  Description of Artificial Sequence: Synthetic peptide
  Seed: LRMKWMMAMKYPITA
LRMKMMMQMPYPTTA

SEQ ID NO: 237626 - protein, 15 aa, Artificial Sequence
  Description of Artificial Sequence: Synthetic peptide
  Seed: LRMKWMMAMKYPITA
LRMKMMMQMPYPVTA

SEQ ID NO: 237627 - protein, 15 aa, Artificial Sequence
  Description of Artificial Sequence: Synthetic peptide
  Seed: LRMKWMMAMKYPITA
LRMKMMMQMPYPYTA

SEQ ID NO: 237628 - protein, 15 aa, Artificial Sequence
  Description of Artificial Sequence: Synthetic peptide
  Seed: LRMKWMMAMKYPITA
LRMKMMMQMQYPLTA

SEQ ID NO: 237629 - protein, 15 aa, Artificial Sequence
  Description of Artificial Sequence: Synthetic peptide
  Seed: LRMKWMMAMKYPITA
LRMKMMMQMRYPATA

SEQ ID NO: 237630 - protein, 15 aa, Artificial Sequence
  Description of Artificial Sequence: Synthetic peptide
  Seed: LRMKWMMAMKYPITA
LRMKMMMQMRYPCTA

SEQ ID NO: 237631 - protein, 15 aa, Artificial Sequence
  Description of Artificial Sequence: Synthetic peptide
  Seed: LRMKWMMAMKYPITA
LRMKMMMQMRYPDTA

SEQ ID NO: 237632 - protein, 15 aa, Artificial Sequence
  Description of Artificial Sequence: Synthetic peptide
  Seed: LRMKWMMAMKYPITA
LRMKMMMQMRYPETA

SEQ ID NO: 237633 - protein, 15 aa, Artificial Sequence
  Description of Artificial Sequence: Synthetic peptide
  Seed: LRMKWMMAMKYPITA
LRMKMMMQMRYPFTA

SEQ ID NO: 237634 - protein, 15 aa, Artificial Sequence
  Description of Artificial Sequence: Synthetic peptide
  Seed: LRMKWMMAMKYPITA
LRMKMMMQMRYPGTA

SEQ ID NO: 237635 - protein, 15 aa, Artificial Sequence
  Description of Artificial Sequence: Synthetic peptide
  Seed: LRMKWMMAMKYPITA
LRMKMMMQMRYPHTA

SEQ ID NO: 237636 - protein, 15 aa, Artificial Sequence
  Description of Artificial Sequence: Synthetic peptide
  Seed: LRMKWMMAMKYPITA
LRMKMMMQMRYPITA

SEQ ID NO: 237637 - protein, 15 aa, Artificial Sequence
  Description of Artificial Sequence: Synthetic peptide
  Seed: LRMKWMMAMKYPITA
LRMKMMMQMRYPKTA

SEQ ID NO: 237638 - protein, 15 aa, Artificial Sequence
  Description of Artificial Sequence: Synthetic peptide
  Seed: LRMKWMMAMKYPITA
LRMKMMMQMRYPLTA

SEQ ID NO: 237639 - protein, 15 aa, Artificial Sequence
  Description of Artificial Sequence: Synthetic peptide
  Seed: LRMKWMMAMKYPITA
LRMKMMMQMRYPMTA

SEQ ID NO: 237640 - protein, 15 aa, Artificial Sequence
  Description of Artificial Sequence: Synthetic peptide
  Seed: LRMKWMMAMKYPITA
LRMKMMMQMRYPNTA

SEQ ID NO: 237641 - protein, 15 aa, Artificial Sequence
  Description of Artificial Sequence: Synthetic peptide
  Seed: LRMKWMMAMKYPITA
LRMKMMMQMRYPPTA

SEQ ID NO: 237642 - protein, 15 aa, Artificial Sequence
  Description of Artificial Sequence: Synthetic peptide
  Seed: LRMKWMMAMKYPITA
LRMKMMMQMRYPQTA

SEQ ID NO: 237643 - protein, 15 aa, Artificial Sequence
  Description of Artificial Sequence: Synthetic peptide
  Seed: LRMKWMMAMKYPITA
LRMKMMMQMRYPRTA

SEQ ID NO: 237644 - protein, 15 aa, Artificial Sequence
  Description of Artificial Sequence: Synthetic peptide
  Seed: LRMKWMMAMKYPITA
LRMKMMMQMRYPSTA

SEQ ID NO: 237645 - protein, 15 aa, Artificial Sequence
  Description of Artificial Sequence: Synthetic peptide
  Seed: LRMKWMMAMKYPITA
LRMKMMMQMRYPTTA

SEQ ID NO: 237646 - protein, 15 aa, Artificial Sequence
  Description of Artificial Sequence: Synthetic peptide
  Seed: LRMKWMMAMKYPITA
LRMKMMMQMRYPVTA

SEQ ID NO: 237647 - protein, 15 aa, Artificial Sequence
  Description of Artificial Sequence: Synthetic peptide
  Seed: LRMKWMMAMKYPITA
LRMKMMMQMRYPWTA

SEQ ID NO: 237648 - protein, 15 aa, Artificial Sequence
  Description of Artificial Sequence: Synthetic peptide
  Seed: LRMKWMMAMKYPITA
LRMKMMMQMRYPYTA

SEQ ID NO: 237649 - protein, 15 aa, Artificial Sequence
  Description of Artificial Sequence: Synthetic peptide
  Seed: LRMKWMMAMKYPITA
LRMKMMMQMSYPATA

SEQ ID NO: 237650 - protein, 15 aa, Artificial Sequence
  Description of Artificial Sequence: Synthetic peptide
  Seed: LRMKWMMAMKYPITA
LRMKMMMQMSYPCTA

SEQ ID NO: 237651 - protein, 15 aa, Artificial Sequence
  Description of Artificial Sequence: Synthetic peptide
  Seed: LRMKWMMAMKYPITA
LRMKMMMQMSYPFTA

SEQ ID NO: 237652 - protein, 15 aa, Artificial Sequence
  Description of Artificial Sequence: Synthetic peptide
  Seed: LRMKWMMAMKYPITA
LRMKMMMQMSYPGTA

SEQ ID NO: 237653 - protein, 15 aa, Artificial Sequence
  Description of Artificial Sequence: Synthetic peptide
  Seed: LRMKWMMAMKYPITA
LRMKMMMQMSYPITA

SEQ ID NO: 237654 - protein, 15 aa, Artificial Sequence
  Description of Artificial Sequence: Synthetic peptide
  Seed: LRMKWMMAMKYPITA
LRMKMMMQMSYPLTA

SEQ ID NO: 237655 - protein, 15 aa, Artificial Sequence
  Description of Artificial Sequence: Synthetic peptide
  Seed: LRMKWMMAMKYPITA
LRMKMMMQMSYPMTA

SEQ ID NO: 237656 - protein, 15 aa, Artificial Sequence
  Description of Artificial Sequence: Synthetic peptide
  Seed: LRMKWMMAMKYPITA
LRMKMMMQMSYPNTA

SEQ ID NO: 237657 - protein, 15 aa, Artificial Sequence
  Description of Artificial Sequence: Synthetic peptide
  Seed: LRMKWMMAMKYPITA
LRMKMMMQMSYPRTA

SEQ ID NO: 237658 - protein, 15 aa, Artificial Sequence
  Description of Artificial Sequence: Synthetic peptide
  Seed: LRMKWMMAMKYPITA
LRMKMMMQMSYPSTA

SEQ ID NO: 237659 - protein, 15 aa, Artificial Sequence
  Description of Artificial Sequence: Synthetic peptide
  Seed: LRMKWMMAMKYPITA
LRMKMMMQMSYPTTA

SEQ ID NO: 237660 - protein, 15 aa, Artificial Sequence
  Description of Artificial Sequence: Synthetic peptide
  Seed: LRMKWMMAMKYPITA
LRMKMMMQMSYPVTA

SEQ ID NO: 237661 - protein, 15 aa, Artificial Sequence
  Description of Artificial Sequence: Synthetic peptide
  Seed: LRMKWMMAMKYPITA
LRMKMMMQMSYPYTA

SEQ ID NO: 237662 - protein, 15 aa, Artificial Sequence
  Description of Artificial Sequence: Synthetic peptide
  Seed: LRMKWMMAMKYPITA
LRMKMMMQMTYPATA

SEQ ID NO: 237663 - protein, 15 aa, Artificial Sequence
  Description of Artificial Sequence: Synthetic peptide
  Seed: LRMKWMMAMKYPITA
LRMKMMMQMTYPITA

SEQ ID NO: 237664 - protein, 15 aa, Artificial Sequence
  Description of Artificial Sequence: Synthetic peptide
  Seed: LRMKWMMAMKYPITA
LRMKMMMQMTYPLTA

SEQ ID NO: 237665 - protein, 15 aa, Artificial Sequence
  Description of Artificial Sequence: Synthetic peptide
  Seed: LRMKWMMAMKYPITA
LRMKMMMQMTYPMTA

SEQ ID NO: 237666 - protein, 15 aa, Artificial Sequence
  Description of Artificial Sequence: Synthetic peptide
  Seed: LRMKWMMAMKYPITA
LRMKMMMQMTYPNTA

SEQ ID NO: 237667 - protein, 15 aa, Artificial Sequence
  Description of Artificial Sequence: Synthetic peptide
  Seed: LRMKWMMAMKYPITA
LRMKMMMQMTYPSTA

SEQ ID NO: 237668 - protein, 15 aa, Artificial Sequence
  Description of Artificial Sequence: Synthetic peptide
  Seed: LRMKWMMAMKYPITA
LRMKMMMQMTYPTTA

SEQ ID NO: 237669 - protein, 15 aa, Artificial Sequence
  Description of Artificial Sequence: Synthetic peptide
  Seed: LRMKWMMAMKYPITA
LRMKMMMQMTYPVTA

SEQ ID NO: 237670 - protein, 15 aa, Artificial Sequence
  Description of Artificial Sequence: Synthetic peptide
  Seed: LRMKWMMAMKYPITA
LRMKMMMQMVYPATA

SEQ ID NO: 237671 - protein, 15 aa, Artificial Sequence
  Description of Artificial Sequence: Synthetic peptide
  Seed: LRMKWMMAMKYPITA
LRMKMMMQMVYPCTA

SEQ ID NO: 237672 - protein, 15 aa, Artificial Sequence
  Description of Artificial Sequence: Synthetic peptide
  Seed: LRMKWMMAMKYPITA
LRMKMMMQMVYPGTA

SEQ ID NO: 237673 - protein, 15 aa, Artificial Sequence
  Description of Artificial Sequence: Synthetic peptide
  Seed: LRMKWMMAMKYPITA
LRMKMMMQMVYPHTA

SEQ ID NO: 237674 - protein, 15 aa, Artificial Sequence
  Description of Artificial Sequence: Synthetic peptide
  Seed: LRMKWMMAMKYPITA
LRMKMMMQMVYPITA

SEQ ID NO: 237675 - protein, 15 aa, Artificial Sequence
  Description of Artificial Sequence: Synthetic peptide
  Seed: LRMKWMMAMKYPITA
LRMKMMMQMVYPLTA

SEQ ID NO: 237676 - protein, 15 aa, Artificial Sequence
  Description of Artificial Sequence: Synthetic peptide
  Seed: LRMKWMMAMKYPITA
LRMKMMMQMVYPMTA

SEQ ID NO: 237677 - protein, 15 aa, Artificial Sequence
  Description of Artificial Sequence: Synthetic peptide
  Seed: LRMKWMMAMKYPITA
LRMKMMMQMVYPNTA

SEQ ID NO: 237678 - protein, 15 aa, Artificial Sequence
  Description of Artificial Sequence: Synthetic peptide
  Seed: LRMKWMMAMKYPITA
LRMKMMMQMVYPQTA

SEQ ID NO: 237679 - protein, 15 aa, Artificial Sequence
  Description of Artificial Sequence: Synthetic peptide
  Seed: LRMKWMMAMKYPITA
LRMKMMMQMVYPSTA

SEQ ID NO: 237680 - protein, 15 aa, Artificial Sequence
  Description of Artificial Sequence: Synthetic peptide
  Seed: LRMKWMMAMKYPITA
LRMKMMMQMVYPTTA

SEQ ID NO: 237681 - protein, 15 aa, Artificial Sequence
  Description of Artificial Sequence: Synthetic peptide
  Seed: LRMKWMMAMKYPITA
LRMKMMMQMVYPVTA

SEQ ID NO: 237682 - protein, 15 aa, Artificial Sequence
  Description of Artificial Sequence: Synthetic peptide
  Seed: LRMKWMMAMKYPITA
LRMKMMMRMAYPATA

SEQ ID NO: 237683 - protein, 15 aa, Artificial Sequence
  Description of Artificial Sequence: Synthetic peptide
  Seed: LRMKWMMAMKYPITA
LRMKMMMRMAYPLTA

SEQ ID NO: 237684 - protein, 15 aa, Artificial Sequence
  Description of Artificial Sequence: Synthetic peptide
  Seed: LRMKWMMAMKYPITA
LRMKMMMRMAYPMTA

SEQ ID NO: 237685 - protein, 15 aa, Artificial Sequence
  Description of Artificial Sequence: Synthetic peptide
  Seed: LRMKWMMAMKYPITA
LRMKMMMRMAYPQTA

SEQ ID NO: 237686 - protein, 15 aa, Artificial Sequence
  Description of Artificial Sequence: Synthetic peptide
  Seed: LRMKWMMAMKYPITA
LRMKMMMRMAYPRTA

SEQ ID NO: 237687 - protein, 15 aa, Artificial Sequence
  Description of Artificial Sequence: Synthetic peptide
  Seed: LRMKWMMAMKYPITA
LRMKMMMRMAYPSTA

SEQ ID NO: 237688 - protein, 15 aa, Artificial Sequence
  Description of Artificial Sequence: Synthetic peptide
  Seed: LRMKWMMAMKYPITA
LRMKMMMRMAYPYTA

SEQ ID NO: 237689 - protein, 15 aa, Artificial Sequence
  Description of Artificial Sequence: Synthetic peptide
  Seed: LRMKWMMAMKYPITA
LRMKMMMRMCYPRTA

SEQ ID NO: 237690 - protein, 15 aa, Artificial Sequence
  Description of Artificial Sequence: Synthetic peptide
  Seed: LRMKWMMAMKYPITA
LRMKMMMRMDYPRTA

SEQ ID NO: 237691 - protein, 15 aa, Artificial Sequence
  Description of Artificial Sequence: Synthetic peptide
  Seed: LRMKWMMAMKYPITA
LRMKMMMRMEYPRTA

SEQ ID NO: 237692 - protein, 15 aa, Artificial Sequence
  Description of Artificial Sequence: Synthetic peptide
  Seed: LRMKWMMAMKYPITA
LRMKMMMRMGYPITA

SEQ ID NO: 237693 - protein, 15 aa, Artificial Sequence
  Description of Artificial Sequence: Synthetic peptide
  Seed: LRMKWMMAMKYPITA
LRMKMMMRMGYPLTA

SEQ ID NO: 237694 - protein, 15 aa, Artificial Sequence
  Description of Artificial Sequence: Synthetic peptide
  Seed: LRMKWMMAMKYPITA
LRMKMMMRMGYPVTA

SEQ ID NO: 237695 - protein, 15 aa, Artificial Sequence
  Description of Artificial Sequence: Synthetic peptide
  Seed: LRMKWMMAMKYPITA
LRMKMMMRMIYPRTA

SEQ ID NO: 237696 - protein, 15 aa, Artificial Sequence
  Description of Artificial Sequence: Synthetic peptide
  Seed: LRMKWMMAMKYPITA
LRMKMMMRMKYPATA

SEQ ID NO: 237697 - protein, 15 aa, Artificial Sequence
  Description of Artificial Sequence: Synthetic peptide
  Seed: LRMKWMMAMKYPITA
LRMKMMMRMKYPCTA

SEQ ID NO: 237698 - protein, 15 aa, Artificial Sequence
  Description of Artificial Sequence: Synthetic peptide
  Seed: LRMKWMMAMKYPITA
LRMKMMMRMKYPDTA

SEQ ID NO: 237699 - protein, 15 aa, Artificial Sequence
  Description of Artificial Sequence: Synthetic peptide
  Seed: LRMKWMMAMKYPITA
LRMKMMMRMKYPETA

SEQ ID NO: 237700 - protein, 15 aa, Artificial Sequence
  Description of Artificial Sequence: Synthetic peptide
  Seed: LRMKWMMAMKYPITA
LRMKMMMRMKYPFTA

SEQ ID NO: 237701 - protein, 15 aa, Artificial Sequence
  Description of Artificial Sequence: Synthetic peptide
  Seed: LRMKWMMAMKYPITA
LRMKMMMRMKYPGTA

SEQ ID NO: 237702 - protein, 15 aa, Artificial Sequence
  Description of Artificial Sequence: Synthetic peptide
  Seed: LRMKWMMAMKYPITA
LRMKMMMRMKYPITA

SEQ ID NO: 237703 - protein, 15 aa, Artificial Sequence
  Description of Artificial Sequence: Synthetic peptide
  Seed: LRMKWMMAMKYPITA
LRMKMMMRMKYPLTA

SEQ ID NO: 237704 - protein, 15 aa, Artificial Sequence
  Description of Artificial Sequence: Synthetic peptide
  Seed: LRMKWMMAMKYPITA
LRMKMMMRMKYPMTA

SEQ ID NO: 237705 - protein, 15 aa, Artificial Sequence
  Description of Artificial Sequence: Synthetic peptide
  Seed: LRMKWMMAMKYPITA
LRMKMMMRMKYPQTA

SEQ ID NO: 237706 - protein, 15 aa, Artificial Sequence
  Description of Artificial Sequence: Synthetic peptide
  Seed: LRMKWMMAMKYPITA
LRMKMMMRMKYPRTA

SEQ ID NO: 237707 - protein, 15 aa, Artificial Sequence
  Description of Artificial Sequence: Synthetic peptide
  Seed: LRMKWMMAMKYPITA
LRMKMMMRMKYPSTA

SEQ ID NO: 237708 - protein, 15 aa, Artificial Sequence
  Description of Artificial Sequence: Synthetic peptide
  Seed: LRMKWMMAMKYPITA
LRMKMMMRMKYPVTA

SEQ ID NO: 237709 - protein, 15 aa, Artificial Sequence
  Description of Artificial Sequence: Synthetic peptide
  Seed: LRMKWMMAMKYPITA
LRMKMMMRMKYPYTA

SEQ ID NO: 237710 - protein, 15 aa, Artificial Sequence
  Description of Artificial Sequence: Synthetic peptide
  Seed: LRMKWMMAMKYPITA
LRMKMMMRMNYPRTA

SEQ ID NO: 237711 - protein, 15 aa, Artificial Sequence
  Description of Artificial Sequence: Synthetic peptide
  Seed: LRMKWMMAMKYPITA
LRMKMMMRMNYPVTA

SEQ ID NO: 237712 - protein, 15 aa, Artificial Sequence
  Description of Artificial Sequence: Synthetic peptide
  Seed: LRMKWMMAMKYPITA
LRMKMMMRMNYPYTA

SEQ ID NO: 237713 - protein, 15 aa, Artificial Sequence
  Description of Artificial Sequence: Synthetic peptide
  Seed: LRMKWMMAMKYPITA
LRMKMMMRMQYPRTA

SEQ ID NO: 237714 - protein, 15 aa, Artificial Sequence
  Description of Artificial Sequence: Synthetic peptide
  Seed: LRMKWMMAMKYPITA
LRMKMMMRMRYPATA

SEQ ID NO: 237715 - protein, 15 aa, Artificial Sequence
  Description of Artificial Sequence: Synthetic peptide
  Seed: LRMKWMMAMKYPITA
LRMKMMMRMRYPCTA

SEQ ID NO: 237716 - protein, 15 aa, Artificial Sequence
  Description of Artificial Sequence: Synthetic peptide
  Seed: LRMKWMMAMKYPITA
LRMKMMMRMRYPDTA

SEQ ID NO: 237717 - protein, 15 aa, Artificial Sequence
  Description of Artificial Sequence: Synthetic peptide
  Seed: LRMKWMMAMKYPITA
LRMKMMMRMRYPETA

SEQ ID NO: 237718 - protein, 15 aa, Artificial Sequence
  Description of Artificial Sequence: Synthetic peptide
  Seed: LRMKWMMAMKYPITA
LRMKMMMRMRYPFTA

SEQ ID NO: 237719 - protein, 15 aa, Artificial Sequence
  Description of Artificial Sequence: Synthetic peptide
  Seed: LRMKWMMAMKYPITA
LRMKMMMRMRYPGTA

SEQ ID NO: 237720 - protein, 15 aa, Artificial Sequence
  Description of Artificial Sequence: Synthetic peptide
  Seed: LRMKWMMAMKYPITA
LRMKMMMRMRYPITA

SEQ ID NO: 237721 - protein, 15 aa, Artificial Sequence
  Description of Artificial Sequence: Synthetic peptide
  Seed: LRMKWMMAMKYPITA
LRMKMMMRMRYPLTA

SEQ ID NO: 237722 - protein, 15 aa, Artificial Sequence
  Description of Artificial Sequence: Synthetic peptide
  Seed: LRMKWMMAMKYPITA
LRMKMMMRMRYPMTA

SEQ ID NO: 237723 - protein, 15 aa, Artificial Sequence
  Description of Artificial Sequence: Synthetic peptide
  Seed: LRMKWMMAMKYPITA
LRMKMMMRMRYPQTA

SEQ ID NO: 237724 - protein, 15 aa, Artificial Sequence
  Description of Artificial Sequence: Synthetic peptide
  Seed: LRMKWMMAMKYPITA
LRMKMMMRMRYPRTA

SEQ ID NO: 237725 - protein, 15 aa, Artificial Sequence
  Description of Artificial Sequence: Synthetic peptide
  Seed: LRMKWMMAMKYPITA
LRMKMMMRMRYPSTA

SEQ ID NO: 237726 - protein, 15 aa, Artificial Sequence
  Description of Artificial Sequence: Synthetic peptide
  Seed: LRMKWMMAMKYPITA
LRMKMMMRMRYPVTA

SEQ ID NO: 237727 - protein, 15 aa, Artificial Sequence
  Description of Artificial Sequence: Synthetic peptide
  Seed: LRMKWMMAMKYPITA
LRMKMMMRMRYPYTA

SEQ ID NO: 237728 - protein, 15 aa, Artificial Sequence
  Description of Artificial Sequence: Synthetic peptide
  Seed: LRMKWMMAMKYPITA
LRMKMMMRMSYPATA

SEQ ID NO: 237729 - protein, 15 aa, Artificial Sequence
  Description of Artificial Sequence: Synthetic peptide
  Seed: LRMKWMMAMKYPITA
LRMKMMMRMSYPITA

SEQ ID NO: 237730 - protein, 15 aa, Artificial Sequence
  Description of Artificial Sequence: Synthetic peptide
  Seed: LRMKWMMAMKYPITA
LRMKMMMRMSYPLTA

SEQ ID NO: 237731 - protein, 15 aa, Artificial Sequence
  Description of Artificial Sequence: Synthetic peptide
  Seed: LRMKWMMAMKYPITA
LRMKMMMRMSYPMTA

SEQ ID NO: 237732 - protein, 15 aa, Artificial Sequence
  Description of Artificial Sequence: Synthetic peptide
  Seed: LRMKWMMAMKYPITA
LRMKMMMRMSYPRTA

SEQ ID NO: 237733 - protein, 15 aa, Artificial Sequence
  Description of Artificial Sequence: Synthetic peptide
  Seed: LRMKWMMAMKYPITA
LRMKMMMRMSYPVTA

SEQ ID NO: 237734 - protein, 15 aa, Artificial Sequence
  Description of Artificial Sequence: Synthetic peptide
  Seed: LRMKWMMAMKYPITA
LRMKMMMRMSYPYTA

SEQ ID NO: 237735 - protein, 15 aa, Artificial Sequence
  Description of Artificial Sequence: Synthetic peptide
  Seed: LRMKWMMAMKYPITA
LRMKMMMRMTYPFTA

SEQ ID NO: 237736 - protein, 15 aa, Artificial Sequence
  Description of Artificial Sequence: Synthetic peptide
  Seed: LRMKWMMAMKYPITA
LRMKMMMRMTYPGTA

SEQ ID NO: 237737 - protein, 15 aa, Artificial Sequence
  Description of Artificial Sequence: Synthetic peptide
  Seed: LRMKWMMAMKYPITA
LRMKMMMRMTYPLTA

SEQ ID NO: 237738 - protein, 15 aa, Artificial Sequence
  Description of Artificial Sequence: Synthetic peptide
  Seed: LRMKWMMAMKYPITA
LRMKMMMRMTYPQTA

SEQ ID NO: 237739 - protein, 15 aa, Artificial Sequence
  Description of Artificial Sequence: Synthetic peptide
  Seed: LRMKWMMAMKYPITA
LRMKMMMRMTYPRTA

SEQ ID NO: 237740 - protein, 15 aa, Artificial Sequence
  Description of Artificial Sequence: Synthetic peptide
  Seed: LRMKWMMAMKYPITA
LRMKMMMRMTYPVTA

SEQ ID NO: 237741 - protein, 15 aa, Artificial Sequence
  Description of Artificial Sequence: Synthetic peptide
  Seed: LRMKWMMAMKYPITA
LRMKMMMRMTYPYTA

SEQ ID NO: 237742 - protein, 15 aa, Artificial Sequence
  Description of Artificial Sequence: Synthetic peptide
  Seed: LRMKWMMAMKYPITA
LRMKMMMRMVYPRTA

SEQ ID NO: 237743 - protein, 15 aa, Artificial Sequence
  Description of Artificial Sequence: Synthetic peptide
  Seed: LRMKWMMAMKYPITA
LRMKMMMRMVYPYTA

SEQ ID NO: 237744 - protein, 15 aa, Artificial Sequence
  Description of Artificial Sequence: Synthetic peptide
  Seed: LRMKWMMAMKYPITA
LRMKMMMSMAYPATA

SEQ ID NO: 237745 - protein, 15 aa, Artificial Sequence
  Description of Artificial Sequence: Synthetic peptide
  Seed: LRMKWMMAMKYPITA
LRMKMMMSMAYPCTA

SEQ ID NO: 237746 - protein, 15 aa, Artificial Sequence
  Description of Artificial Sequence: Synthetic peptide
  Seed: LRMKWMMAMKYPITA
LRMKMMMSMAYPDTA

SEQ ID NO: 237747 - protein, 15 aa, Artificial Sequence
  Description of Artificial Sequence: Synthetic peptide
  Seed: LRMKWMMAMKYPITA
LRMKMMMSMAYPETA

SEQ ID NO: 237748 - protein, 15 aa, Artificial Sequence
  Description of Artificial Sequence: Synthetic peptide
  Seed: LRMKWMMAMKYPITA
LRMKMMMSMAYPFTA

SEQ ID NO: 237749 - protein, 15 aa, Artificial Sequence
  Description of Artificial Sequence: Synthetic peptide
  Seed: LRMKWMMAMKYPITA
LRMKMMMSMAYPGTA

SEQ ID NO: 237750 - protein, 15 aa, Artificial Sequence
  Description of Artificial Sequence: Synthetic peptide
  Seed: LRMKWMMAMKYPITA
LRMKMMMSMAYPHTA

SEQ ID NO: 237751 - protein, 15 aa, Artificial Sequence
  Description of Artificial Sequence: Synthetic peptide
  Seed: LRMKWMMAMKYPITA
LRMKMMMSMAYPITA

SEQ ID NO: 237752 - protein, 15 aa, Artificial Sequence
  Description of Artificial Sequence: Synthetic peptide
  Seed: LRMKWMMAMKYPITA
LRMKMMMSMAYPKTA

SEQ ID NO: 237753 - protein, 15 aa, Artificial Sequence
  Description of Artificial Sequence: Synthetic peptide
  Seed: LRMKWMMAMKYPITA
LRMKMMMSMAYPLTA

SEQ ID NO: 237754 - protein, 15 aa, Artificial Sequence
  Description of Artificial Sequence: Synthetic peptide
  Seed: LRMKWMMAMKYPITA
LRMKMMMSMAYPMTA

SEQ ID NO: 237755 - protein, 15 aa, Artificial Sequence
  Description of Artificial Sequence: Synthetic peptide
  Seed: LRMKWMMAMKYPITA
LRMKMMMSMAYPNTA

SEQ ID NO: 237756 - protein, 15 aa, Artificial Sequence
  Description of Artificial Sequence: Synthetic peptide
  Seed: LRMKWMMAMKYPITA
LRMKMMMSMAYPPTA

SEQ ID NO: 237757 - protein, 15 aa, Artificial Sequence
  Description of Artificial Sequence: Synthetic peptide
  Seed: LRMKWMMAMKYPITA
LRMKMMMSMAYPQTA

SEQ ID NO: 237758 - protein, 15 aa, Artificial Sequence
  Description of Artificial Sequence: Synthetic peptide
  Seed: LRMKWMMAMKYPITA
LRMKMMMSMAYPRTA

SEQ ID NO: 237759 - protein, 15 aa, Artificial Sequence
  Description of Artificial Sequence: Synthetic peptide
  Seed: LRMKWMMAMKYPITA
LRMKMMMSMAYPSTA

SEQ ID NO: 237760 - protein, 15 aa, Artificial Sequence
  Description of Artificial Sequence: Synthetic peptide
  Seed: LRMKWMMAMKYPITA
LRMKMMMSMAYPTTA

SEQ ID NO: 237761 - protein, 15 aa, Artificial Sequence
  Description of Artificial Sequence: Synthetic peptide
  Seed: LRMKWMMAMKYPITA
LRMKMMMSMAYPVTA

SEQ ID NO: 237762 - protein, 15 aa, Artificial Sequence
  Description of Artificial Sequence: Synthetic peptide
  Seed: LRMKWMMAMKYPITA
LRMKMMMSMAYPWTA

SEQ ID NO: 237763 - protein, 15 aa, Artificial Sequence
  Description of Artificial Sequence: Synthetic peptide
  Seed: LRMKWMMAMKYPITA
LRMKMMMSMAYPYTA

SEQ ID NO: 237764 - protein, 15 aa, Artificial Sequence
  Description of Artificial Sequence: Synthetic peptide
  Seed: LRMKWMMAMKYPITA
LRMKMMMSMCYPATA

SEQ ID NO: 237765 - protein, 15 aa, Artificial Sequence
  Description of Artificial Sequence: Synthetic peptide
  Seed: LRMKWMMAMKYPITA
LRMKMMMSMCYPITA

SEQ ID NO: 237766 - protein, 15 aa, Artificial Sequence
  Description of Artificial Sequence: Synthetic peptide
  Seed: LRMKWMMAMKYPITA
LRMKMMMSMCYPLTA

SEQ ID NO: 237767 - protein, 15 aa, Artificial Sequence
  Description of Artificial Sequence: Synthetic peptide
  Seed: LRMKWMMAMKYPITA
LRMKMMMSMCYPMTA

SEQ ID NO: 237768 - protein, 15 aa, Artificial Sequence
  Description of Artificial Sequence: Synthetic peptide
  Seed: LRMKWMMAMKYPITA
LRMKMMMSMCYPSTA

SEQ ID NO: 237769 - protein, 15 aa, Artificial Sequence
  Description of Artificial Sequence: Synthetic peptide
  Seed: LRMKWMMAMKYPITA
LRMKMMMSMCYPVTA

SEQ ID NO: 237770 - protein, 15 aa, Artificial Sequence
  Description of Artificial Sequence: Synthetic peptide
  Seed: LRMKWMMAMKYPITA
LRMKMMMSMEYPLTA

SEQ ID NO: 237771 - protein, 15 aa, Artificial Sequence
  Description of Artificial Sequence: Synthetic peptide
  Seed: LRMKWMMAMKYPITA
LRMKMMMSMFYPFTA

SEQ ID NO: 237772 - protein, 15 aa, Artificial Sequence
  Description of Artificial Sequence: Synthetic peptide
  Seed: LRMKWMMAMKYPITA
LRMKMMMSMFYPITA

SEQ ID NO: 237773 - protein, 15 aa, Artificial Sequence
  Description of Artificial Sequence: Synthetic peptide
  Seed: LRMKWMMAMKYPITA
LRMKMMMSMFYPLTA

SEQ ID NO: 237774 - protein, 15 aa, Artificial Sequence
  Description of Artificial Sequence: Synthetic peptide
  Seed: LRMKWMMAMKYPITA
LRMKMMMSMFYPMTA

SEQ ID NO: 237775 - protein, 15 aa, Artificial Sequence
  Description of Artificial Sequence: Synthetic peptide
  Seed: LRMKWMMAMKYPITA
LRMKMMMSMFYPVTA

SEQ ID NO: 237776 - protein, 15 aa, Artificial Sequence
  Description of Artificial Sequence: Synthetic peptide
  Seed: LRMKWMMAMKYPITA
LRMKMMMSMGYPATA

SEQ ID NO: 237777 - protein, 15 aa, Artificial Sequence
  Description of Artificial Sequence: Synthetic peptide
  Seed: LRMKWMMAMKYPITA
LRMKMMMSMGYPCTA

SEQ ID NO: 237778 - protein, 15 aa, Artificial Sequence
  Description of Artificial Sequence: Synthetic peptide
  Seed: LRMKWMMAMKYPITA
LRMKMMMSMGYPFTA

SEQ ID NO: 237779 - protein, 15 aa, Artificial Sequence
  Description of Artificial Sequence: Synthetic peptide
  Seed: LRMKWMMAMKYPITA
LRMKMMMSMGYPGTA

SEQ ID NO: 237780 - protein, 15 aa, Artificial Sequence
  Description of Artificial Sequence: Synthetic peptide
  Seed: LRMKWMMAMKYPITA
LRMKMMMSMGYPHTA

SEQ ID NO: 237781 - protein, 15 aa, Artificial Sequence
  Description of Artificial Sequence: Synthetic peptide
  Seed: LRMKWMMAMKYPITA
LRMKMMMSMGYPITA

SEQ ID NO: 237782 - protein, 15 aa, Artificial Sequence
  Description of Artificial Sequence: Synthetic peptide
  Seed: LRMKWMMAMKYPITA
LRMKMMMSMGYPLTA

SEQ ID NO: 237783 - protein, 15 aa, Artificial Sequence
  Description of Artificial Sequence: Synthetic peptide
  Seed: LRMKWMMAMKYPITA
LRMKMMMSMGYPMTA

SEQ ID NO: 237784 - protein, 15 aa, Artificial Sequence
  Description of Artificial Sequence: Synthetic peptide
  Seed: LRMKWMMAMKYPITA
LRMKMMMSMGYPNTA

SEQ ID NO: 237785 - protein, 15 aa, Artificial Sequence
  Description of Artificial Sequence: Synthetic peptide
  Seed: LRMKWMMAMKYPITA
LRMKMMMSMGYPQTA

SEQ ID NO: 237786 - protein, 15 aa, Artificial Sequence
  Description of Artificial Sequence: Synthetic peptide
  Seed: LRMKWMMAMKYPITA
LRMKMMMSMGYPRTA

SEQ ID NO: 237787 - protein, 15 aa, Artificial Sequence
  Description of Artificial Sequence: Synthetic peptide
  Seed: LRMKWMMAMKYPITA
LRMKMMMSMGYPSTA

SEQ ID NO: 237788 - protein, 15 aa, Artificial Sequence
  Description of Artificial Sequence: Synthetic peptide
  Seed: LRMKWMMAMKYPITA
LRMKMMMSMGYPTTA

SEQ ID NO: 237789 - protein, 15 aa, Artificial Sequence
  Description of Artificial Sequence: Synthetic peptide
  Seed: LRMKWMMAMKYPITA
LRMKMMMSMGYPVTA

SEQ ID NO: 237790 - protein, 15 aa, Artificial Sequence
  Description of Artificial Sequence: Synthetic peptide
  Seed: LRMKWMMAMKYPITA
LRMKMMMSMGYPWTA

SEQ ID NO: 237791 - protein, 15 aa, Artificial Sequence
  Description of Artificial Sequence: Synthetic peptide
  Seed: LRMKWMMAMKYPITA
LRMKMMMSMGYPYTA

SEQ ID NO: 237792 - protein, 15 aa, Artificial Sequence
  Description of Artificial Sequence: Synthetic peptide
  Seed: LRMKWMMAMKYPITA
LRMKMMMSMHYPATA

SEQ ID NO: 237793 - protein, 15 aa, Artificial Sequence
  Description of Artificial Sequence: Synthetic peptide
  Seed: LRMKWMMAMKYPITA
LRMKMMMSMHYPITA

SEQ ID NO: 237794 - protein, 15 aa, Artificial Sequence
  Description of Artificial Sequence: Synthetic peptide
  Seed: LRMKWMMAMKYPITA
LRMKMMMSMHYPLTA

SEQ ID NO: 237795 - protein, 15 aa, Artificial Sequence
  Description of Artificial Sequence: Synthetic peptide
  Seed: LRMKWMMAMKYPITA
LRMKMMMSMHYPMTA

SEQ ID NO: 237796 - protein, 15 aa, Artificial Sequence
  Description of Artificial Sequence: Synthetic peptide
  Seed: LRMKWMMAMKYPITA
LRMKMMMSMHYPQTA

SEQ ID NO: 237797 - protein, 15 aa, Artificial Sequence
  Description of Artificial Sequence: Synthetic peptide
  Seed: LRMKWMMAMKYPITA
LRMKMMMSMHYPRTA

SEQ ID NO: 237798 - protein, 15 aa, Artificial Sequence
  Description of Artificial Sequence: Synthetic peptide
  Seed: LRMKWMMAMKYPITA
LRMKMMMSMHYPSTA

SEQ ID NO: 237799 - protein, 15 aa, Artificial Sequence
  Description of Artificial Sequence: Synthetic peptide
  Seed: LRMKWMMAMKYPITA
LRMKMMMSMHYPVTA

SEQ ID NO: 237800 - protein, 15 aa, Artificial Sequence
  Description of Artificial Sequence: Synthetic peptide
  Seed: LRMKWMMAMKYPITA
LRMKMMMSMHYPYTA

SEQ ID NO: 237801 - protein, 15 aa, Artificial Sequence
  Description of Artificial Sequence: Synthetic peptide
  Seed: LRMKWMMAMKYPITA
LRMKMMMSMIYPATA

SEQ ID NO: 237802 - protein, 15 aa, Artificial Sequence
  Description of Artificial Sequence: Synthetic peptide
  Seed: LRMKWMMAMKYPITA
LRMKMMMSMIYPCTA

SEQ ID NO: 237803 - protein, 15 aa, Artificial Sequence
  Description of Artificial Sequence: Synthetic peptide
  Seed: LRMKWMMAMKYPITA
LRMKMMMSMIYPFTA

SEQ ID NO: 237804 - protein, 15 aa, Artificial Sequence
  Description of Artificial Sequence: Synthetic peptide
  Seed: LRMKWMMAMKYPITA
LRMKMMMSMIYPGTA

SEQ ID NO: 237805 - protein, 15 aa, Artificial Sequence
  Description of Artificial Sequence: Synthetic peptide
  Seed: LRMKWMMAMKYPITA
LRMKMMMSMIYPITA

SEQ ID NO: 237806 - protein, 15 aa, Artificial Sequence
  Description of Artificial Sequence: Synthetic peptide
  Seed: LRMKWMMAMKYPITA
LRMKMMMSMIYPLTA

SEQ ID NO: 237807 - protein, 15 aa, Artificial Sequence
  Description of Artificial Sequence: Synthetic peptide
  Seed: LRMKWMMAMKYPITA
LRMKMMMSMIYPMTA

SEQ ID NO: 237808 - protein, 15 aa, Artificial Sequence
  Description of Artificial Sequence: Synthetic peptide
  Seed: LRMKWMMAMKYPITA
LRMKMMMSMIYPNTA

SEQ ID NO: 237809 - protein, 15 aa, Artificial Sequence
  Description of Artificial Sequence: Synthetic peptide
  Seed: LRMKWMMAMKYPITA
LRMKMMMSMIYPRTA

SEQ ID NO: 237810 - protein, 15 aa, Artificial Sequence
  Description of Artificial Sequence: Synthetic peptide
  Seed: LRMKWMMAMKYPITA
LRMKMMMSMIYPSTA

SEQ ID NO: 237811 - protein, 15 aa, Artificial Sequence
  Description of Artificial Sequence: Synthetic peptide
  Seed: LRMKWMMAMKYPITA
LRMKMMMSMIYPTTA

SEQ ID NO: 237812 - protein, 15 aa, Artificial Sequence
  Description of Artificial Sequence: Synthetic peptide
  Seed: LRMKWMMAMKYPITA
LRMKMMMSMIYPVTA

SEQ ID NO: 237813 - protein, 15 aa, Artificial Sequence
  Description of Artificial Sequence: Synthetic peptide
  Seed: LRMKWMMAMKYPITA
LRMKMMMSMIYPYTA

SEQ ID NO: 237814 - protein, 15 aa, Artificial Sequence
  Description of Artificial Sequence: Synthetic peptide
  Seed: LRMKWMMAMKYPITA
LRMKMMMSMKYPATA

SEQ ID NO: 237815 - protein, 15 aa, Artificial Sequence
  Description of Artificial Sequence: Synthetic peptide
  Seed: LRMKWMMAMKYPITA
LRMKMMMSMKYPCTA

SEQ ID NO: 237816 - protein, 15 aa, Artificial Sequence
  Description of Artificial Sequence: Synthetic peptide
  Seed: LRMKWMMAMKYPITA
LRMKMMMSMKYPDTA

SEQ ID NO: 237817 - protein, 15 aa, Artificial Sequence
  Description of Artificial Sequence: Synthetic peptide
  Seed: LRMKWMMAMKYPITA
LRMKMMMSMKYPETA

SEQ ID NO: 237818 - protein, 15 aa, Artificial Sequence
  Description of Artificial Sequence: Synthetic peptide
  Seed: LRMKWMMAMKYPITA
LRMKMMMSMKYPFTA

SEQ ID NO: 237819 - protein, 15 aa, Artificial Sequence
  Description of Artificial Sequence: Synthetic peptide
  Seed: LRMKWMMAMKYPITA
LRMKMMMSMKYPGTA

SEQ ID NO: 237820 - protein, 15 aa, Artificial Sequence
  Description of Artificial Sequence: Synthetic peptide
  Seed: LRMKWMMAMKYPITA
LRMKMMMSMKYPHTA

SEQ ID NO: 237821 - protein, 15 aa, Artificial Sequence
  Description of Artificial Sequence: Synthetic peptide
  Seed: LRMKWMMAMKYPITA
LRMKMMMSMKYPITA

SEQ ID NO: 237822 - protein, 15 aa, Artificial Sequence
  Description of Artificial Sequence: Synthetic peptide
  Seed: LRMKWMMAMKYPITA
LRMKMMMSMKYPKTA

SEQ ID NO: 237823 - protein, 15 aa, Artificial Sequence
  Description of Artificial Sequence: Synthetic peptide
  Seed: LRMKWMMAMKYPITA
LRMKMMMSMKYPLTA

SEQ ID NO: 237824 - protein, 15 aa, Artificial Sequence
  Description of Artificial Sequence: Synthetic peptide
  Seed: LRMKWMMAMKYPITA
LRMKMMMSMKYPMTA

SEQ ID NO: 237825 - protein, 15 aa, Artificial Sequence
  Description of Artificial Sequence: Synthetic peptide
  Seed: LRMKWMMAMKYPITA
LRMKMMMSMKYPNTA

SEQ ID NO: 237826 - protein, 15 aa, Artificial Sequence
  Description of Artificial Sequence: Synthetic peptide
  Seed: LRMKWMMAMKYPITA
LRMKMMMSMKYPPTA

SEQ ID NO: 237827 - protein, 15 aa, Artificial Sequence
  Description of Artificial Sequence: Synthetic peptide
  Seed: LRMKWMMAMKYPITA
LRMKMMMSMKYPQTA

SEQ ID NO: 237828 - protein, 15 aa, Artificial Sequence
  Description of Artificial Sequence: Synthetic peptide
  Seed: LRMKWMMAMKYPITA
LRMKMMMSMKYPRTA

SEQ ID NO: 237829 - protein, 15 aa, Artificial Sequence
  Description of Artificial Sequence: Synthetic peptide
  Seed: LRMKWMMAMKYPITA
LRMKMMMSMKYPSTA

SEQ ID NO: 237830 - protein, 15 aa, Artificial Sequence
  Description of Artificial Sequence: Synthetic peptide
  Seed: LRMKWMMAMKYPITA
LRMKMMMSMKYPTTA

SEQ ID NO: 237831 - protein, 15 aa, Artificial Sequence
  Description of Artificial Sequence: Synthetic peptide
  Seed: LRMKWMMAMKYPITA
LRMKMMMSMKYPVTA

SEQ ID NO: 237832 - protein, 15 aa, Artificial Sequence
  Description of Artificial Sequence: Synthetic peptide
  Seed: LRMKWMMAMKYPITA
LRMKMMMSMKYPWTA

SEQ ID NO: 237833 - protein, 15 aa, Artificial Sequence
  Description of Artificial Sequence: Synthetic peptide
  Seed: LRMKWMMAMKYPITA
LRMKMMMSMKYPYTA

SEQ ID NO: 237834 - protein, 15 aa, Artificial Sequence
  Description of Artificial Sequence: Synthetic peptide
  Seed: LRMKWMMAMKYPITA
LRMKMMMSMLYPITA

SEQ ID NO: 237835 - protein, 15 aa, Artificial Sequence
  Description of Artificial Sequence: Synthetic peptide
  Seed: LRMKWMMAMKYPITA
LRMKMMMSMLYPRTA

SEQ ID NO: 237836 - protein, 15 aa, Artificial Sequence
  Description of Artificial Sequence: Synthetic peptide
  Seed: LRMKWMMAMKYPITA
LRMKMMMSMLYPVTA

SEQ ID NO: 237837 - protein, 15 aa, Artificial Sequence
  Description of Artificial Sequence: Synthetic peptide
  Seed: LRMKWMMAMKYPITA
LRMKMMMSMMYPITA

SEQ ID NO: 237838 - protein, 15 aa, Artificial Sequence
  Description of Artificial Sequence: Synthetic peptide
  Seed: LRMKWMMAMKYPITA
LRMKMMMSMMYPLTA

SEQ ID NO: 237839 - protein, 15 aa, Artificial Sequence
  Description of Artificial Sequence: Synthetic peptide
  Seed: LRMKWMMAMKYPITA
LRMKMMMSMMYPVTA

SEQ ID NO: 237840 - protein, 15 aa, Artificial Sequence
  Description of Artificial Sequence: Synthetic peptide
  Seed: LRMKWMMAMKYPITA
LRMKMMMSMNYPATA

SEQ ID NO: 237841 - protein, 15 aa, Artificial Sequence
  Description of Artificial Sequence: Synthetic peptide
  Seed: LRMKWMMAMKYPITA
LRMKMMMSMNYPETA

SEQ ID NO: 237842 - protein, 15 aa, Artificial Sequence
  Description of Artificial Sequence: Synthetic peptide
  Seed: LRMKWMMAMKYPITA
LRMKMMMSMNYPFTA

SEQ ID NO: 237843 - protein, 15 aa, Artificial Sequence
  Description of Artificial Sequence: Synthetic peptide
  Seed: LRMKWMMAMKYPITA
LRMKMMMSMNYPGTA

SEQ ID NO: 237844 - protein, 15 aa, Artificial Sequence
  Description of Artificial Sequence: Synthetic peptide
  Seed: LRMKWMMAMKYPITA
LRMKMMMSMNYPITA

SEQ ID NO: 237845 - protein, 15 aa, Artificial Sequence
  Description of Artificial Sequence: Synthetic peptide
  Seed: LRMKWMMAMKYPITA
LRMKMMMSMNYPKTA

SEQ ID NO: 237846 - protein, 15 aa, Artificial Sequence
  Description of Artificial Sequence: Synthetic peptide
  Seed: LRMKWMMAMKYPITA
LRMKMMMSMNYPLTA

SEQ ID NO: 237847 - protein, 15 aa, Artificial Sequence
  Description of Artificial Sequence: Synthetic peptide
  Seed: LRMKWMMAMKYPITA
LRMKMMMSMNYPMTA

SEQ ID NO: 237848 - protein, 15 aa, Artificial Sequence
  Description of Artificial Sequence: Synthetic peptide
  Seed: LRMKWMMAMKYPITA
LRMKMMMSMNYPNTA

SEQ ID NO: 237849 - protein, 15 aa, Artificial Sequence
  Description of Artificial Sequence: Synthetic peptide
  Seed: LRMKWMMAMKYPITA
LRMKMMMSMNYPRTA

SEQ ID NO: 237850 - protein, 15 aa, Artificial Sequence
  Description of Artificial Sequence: Synthetic peptide
  Seed: LRMKWMMAMKYPITA
LRMKMMMSMNYPSTA

SEQ ID NO: 237851 - protein, 15 aa, Artificial Sequence
  Description of Artificial Sequence: Synthetic peptide
  Seed: LRMKWMMAMKYPITA
LRMKMMMSMNYPTTA

SEQ ID NO: 237852 - protein, 15 aa, Artificial Sequence
  Description of Artificial Sequence: Synthetic peptide
  Seed: LRMKWMMAMKYPITA
LRMKMMMSMNYPVTA

SEQ ID NO: 237853 - protein, 15 aa, Artificial Sequence
  Description of Artificial Sequence: Synthetic peptide
  Seed: LRMKWMMAMKYPITA
LRMKMMMSMNYPYTA

SEQ ID NO: 237854 - protein, 15 aa, Artificial Sequence
  Description of Artificial Sequence: Synthetic peptide
  Seed: LRMKWMMAMKYPITA
LRMKMMMSMPYPATA

SEQ ID NO: 237855 - protein, 15 aa, Artificial Sequence
  Description of Artificial Sequence: Synthetic peptide
  Seed: LRMKWMMAMKYPITA
LRMKMMMSMPYPCTA

SEQ ID NO: 237856 - protein, 15 aa, Artificial Sequence
  Description of Artificial Sequence: Synthetic peptide
  Seed: LRMKWMMAMKYPITA
LRMKMMMSMPYPDTA

SEQ ID NO: 237857 - protein, 15 aa, Artificial Sequence
  Description of Artificial Sequence: Synthetic peptide
  Seed: LRMKWMMAMKYPITA
LRMKMMMSMPYPETA

SEQ ID NO: 237858 - protein, 15 aa, Artificial Sequence
  Description of Artificial Sequence: Synthetic peptide
  Seed: LRMKWMMAMKYPITA
LRMKMMMSMPYPFTA

SEQ ID NO: 237859 - protein, 15 aa, Artificial Sequence
  Description of Artificial Sequence: Synthetic peptide
  Seed: LRMKWMMAMKYPITA
LRMKMMMSMPYPGTA

SEQ ID NO: 237860 - protein, 15 aa, Artificial Sequence
  Description of Artificial Sequence: Synthetic peptide
  Seed: LRMKWMMAMKYPITA
LRMKMMMSMPYPHTA

SEQ ID NO: 237861 - protein, 15 aa, Artificial Sequence
  Description of Artificial Sequence: Synthetic peptide
  Seed: LRMKWMMAMKYPITA
LRMKMMMSMPYPITA

SEQ ID NO: 237862 - protein, 15 aa, Artificial Sequence
  Description of Artificial Sequence: Synthetic peptide
  Seed: LRMKWMMAMKYPITA
LRMKMMMSMPYPLTA

SEQ ID NO: 237863 - protein, 15 aa, Artificial Sequence
  Description of Artificial Sequence: Synthetic peptide
  Seed: LRMKWMMAMKYPITA
LRMKMMMSMPYPMTA

SEQ ID NO: 237864 - protein, 15 aa, Artificial Sequence
  Description of Artificial Sequence: Synthetic peptide
  Seed: LRMKWMMAMKYPITA
LRMKMMMSMPYPNTA

SEQ ID NO: 237865 - protein, 15 aa, Artificial Sequence
  Description of Artificial Sequence: Synthetic peptide
  Seed: LRMKWMMAMKYPITA
LRMKMMMSMPYPPTA

SEQ ID NO: 237866 - protein, 15 aa, Artificial Sequence
  Description of Artificial Sequence: Synthetic peptide
  Seed: LRMKWMMAMKYPITA
LRMKMMMSMPYPQTA

SEQ ID NO: 237867 - protein, 15 aa, Artificial Sequence
  Description of Artificial Sequence: Synthetic peptide
  Seed: LRMKWMMAMKYPITA
LRMKMMMSMPYPRTA

SEQ ID NO: 237868 - protein, 15 aa, Artificial Sequence
  Description of Artificial Sequence: Synthetic peptide
  Seed: LRMKWMMAMKYPITA
LRMKMMMSMPYPSTA

SEQ ID NO: 237869 - protein, 15 aa, Artificial Sequence
  Description of Artificial Sequence: Synthetic peptide
  Seed: LRMKWMMAMKYPITA
LRMKMMMSMPYPTTA

SEQ ID NO: 237870 - protein, 15 aa, Artificial Sequence
  Description of Artificial Sequence: Synthetic peptide
  Seed: LRMKWMMAMKYPITA
LRMKMMMSMPYPVTA

SEQ ID NO: 237871 - protein, 15 aa, Artificial Sequence
  Description of Artificial Sequence: Synthetic peptide
  Seed: LRMKWMMAMKYPITA
LRMKMMMSMPYPYTA

SEQ ID NO: 237872 - protein, 15 aa, Artificial Sequence
  Description of Artificial Sequence: Synthetic peptide
  Seed: LRMKWMMAMKYPITA
LRMKMMMSMQYPITA

SEQ ID NO: 237873 - protein, 15 aa, Artificial Sequence
  Description of Artificial Sequence: Synthetic peptide
  Seed: LRMKWMMAMKYPITA
LRMKMMMSMQYPLTA

SEQ ID NO: 237874 - protein, 15 aa, Artificial Sequence
  Description of Artificial Sequence: Synthetic peptide
  Seed: LRMKWMMAMKYPITA
LRMKMMMSMQYPRTA

SEQ ID NO: 237875 - protein, 15 aa, Artificial Sequence
  Description of Artificial Sequence: Synthetic peptide
  Seed: LRMKWMMAMKYPITA
LRMKMMMSMQYPVTA

SEQ ID NO: 237876 - protein, 15 aa, Artificial Sequence
  Description of Artificial Sequence: Synthetic peptide
  Seed: LRMKWMMAMKYPITA
LRMKMMMSMQYPYTA

SEQ ID NO: 237877 - protein, 15 aa, Artificial Sequence
  Description of Artificial Sequence: Synthetic peptide
  Seed: LRMKWMMAMKYPITA
LRMKMMMSMRYPATA

SEQ ID NO: 237878 - protein, 15 aa, Artificial Sequence
  Description of Artificial Sequence: Synthetic peptide
  Seed: LRMKWMMAMKYPITA
LRMKMMMSMRYPCTA

SEQ ID NO: 237879 - protein, 15 aa, Artificial Sequence
  Description of Artificial Sequence: Synthetic peptide
  Seed: LRMKWMMAMKYPITA
LRMKMMMSMRYPDTA

SEQ ID NO: 237880 - protein, 15 aa, Artificial Sequence
  Description of Artificial Sequence: Synthetic peptide
  Seed: LRMKWMMAMKYPITA
LRMKMMMSMRYPETA

SEQ ID NO: 237881 - protein, 15 aa, Artificial Sequence
  Description of Artificial Sequence: Synthetic peptide
  Seed: LRMKWMMAMKYPITA
LRMKMMMSMRYPFTA

SEQ ID NO: 237882 - protein, 15 aa, Artificial Sequence
  Description of Artificial Sequence: Synthetic peptide
  Seed: LRMKWMMAMKYPITA
LRMKMMMSMRYPGTA

SEQ ID NO: 237883 - protein, 15 aa, Artificial Sequence
  Description of Artificial Sequence: Synthetic peptide
  Seed: LRMKWMMAMKYPITA
LRMKMMMSMRYPHTA

SEQ ID NO: 237884 - protein, 15 aa, Artificial Sequence
  Description of Artificial Sequence: Synthetic peptide
  Seed: LRMKWMMAMKYPITA
LRMKMMMSMRYPITA

SEQ ID NO: 237885 - protein, 15 aa, Artificial Sequence
  Description of Artificial Sequence: Synthetic peptide
  Seed: LRMKWMMAMKYPITA
LRMKMMMSMRYPKTA

SEQ ID NO: 237886 - protein, 15 aa, Artificial Sequence
  Description of Artificial Sequence: Synthetic peptide
  Seed: LRMKWMMAMKYPITA
LRMKMMMSMRYPLTA

SEQ ID NO: 237887 - protein, 15 aa, Artificial Sequence
  Description of Artificial Sequence: Synthetic peptide
  Seed: LRMKWMMAMKYPITA
LRMKMMMSMRYPMTA

SEQ ID NO: 237888 - protein, 15 aa, Artificial Sequence
  Description of Artificial Sequence: Synthetic peptide
  Seed: LRMKWMMAMKYPITA
LRMKMMMSMRYPNTA

SEQ ID NO: 237889 - protein, 15 aa, Artificial Sequence
  Description of Artificial Sequence: Synthetic peptide
  Seed: LRMKWMMAMKYPITA
LRMKMMMSMRYPPTA

SEQ ID NO: 237890 - protein, 15 aa, Artificial Sequence
  Description of Artificial Sequence: Synthetic peptide
  Seed: LRMKWMMAMKYPITA
LRMKMMMSMRYPQTA

SEQ ID NO: 237891 - protein, 15 aa, Artificial Sequence
  Description of Artificial Sequence: Synthetic peptide
  Seed: LRMKWMMAMKYPITA
LRMKMMMSMRYPRTA

SEQ ID NO: 237892 - protein, 15 aa, Artificial Sequence
  Description of Artificial Sequence: Synthetic peptide
  Seed: LRMKWMMAMKYPITA
LRMKMMMSMRYPSTA

SEQ ID NO: 237893 - protein, 15 aa, Artificial Sequence
  Description of Artificial Sequence: Synthetic peptide
  Seed: LRMKWMMAMKYPITA
LRMKMMMSMRYPTTA

SEQ ID NO: 237894 - protein, 15 aa, Artificial Sequence
  Description of Artificial Sequence: Synthetic peptide
  Seed: LRMKWMMAMKYPITA
LRMKMMMSMRYPVTA

SEQ ID NO: 237895 - protein, 15 aa, Artificial Sequence
  Description of Artificial Sequence: Synthetic peptide
  Seed: LRMKWMMAMKYPITA
LRMKMMMSMRYPWTA

SEQ ID NO: 237896 - protein, 15 aa, Artificial Sequence
  Description of Artificial Sequence: Synthetic peptide
  Seed: LRMKWMMAMKYPITA
LRMKMMMSMRYPYTA

SEQ ID NO: 237897 - protein, 15 aa, Artificial Sequence
  Description of Artificial Sequence: Synthetic peptide
  Seed: LRMKWMMAMKYPITA
LRMKMMMSMSYPATA

SEQ ID NO: 237898 - protein, 15 aa, Artificial Sequence
  Description of Artificial Sequence: Synthetic peptide
  Seed: LRMKWMMAMKYPITA
LRMKMMMSMSYPCTA

SEQ ID NO: 237899 - protein, 15 aa, Artificial Sequence
  Description of Artificial Sequence: Synthetic peptide
  Seed: LRMKWMMAMKYPITA
LRMKMMMSMSYPFTA

SEQ ID NO: 237900 - protein, 15 aa, Artificial Sequence
  Description of Artificial Sequence: Synthetic peptide
  Seed: LRMKWMMAMKYPITA
LRMKMMMSMSYPGTA

SEQ ID NO: 237901 - protein, 15 aa, Artificial Sequence
  Description of Artificial Sequence: Synthetic peptide
  Seed: LRMKWMMAMKYPITA
LRMKMMMSMSYPHTA

SEQ ID NO: 237902 - protein, 15 aa, Artificial Sequence
  Description of Artificial Sequence: Synthetic peptide
  Seed: LRMKWMMAMKYPITA
LRMKMMMSMSYPITA

SEQ ID NO: 237903 - protein, 15 aa, Artificial Sequence
  Description of Artificial Sequence: Synthetic peptide
  Seed: LRMKWMMAMKYPITA
LRMKMMMSMSYPKTA

SEQ ID NO: 237904 - protein, 15 aa, Artificial Sequence
  Description of Artificial Sequence: Synthetic peptide
  Seed: LRMKWMMAMKYPITA
LRMKMMMSMSYPLTA

SEQ ID NO: 237905 - protein, 15 aa, Artificial Sequence
  Description of Artificial Sequence: Synthetic peptide
  Seed: LRMKWMMAMKYPITA
LRMKMMMSMSYPMTA

SEQ ID NO: 237906 - protein, 15 aa, Artificial Sequence
  Description of Artificial Sequence: Synthetic peptide
  Seed: LRMKWMMAMKYPITA
LRMKMMMSMSYPNTA

SEQ ID NO: 237907 - protein, 15 aa, Artificial Sequence
  Description of Artificial Sequence: Synthetic peptide
  Seed: LRMKWMMAMKYPITA
LRMKMMMSMSYPPTA

SEQ ID NO: 237908 - protein, 15 aa, Artificial Sequence
  Description of Artificial Sequence: Synthetic peptide
  Seed: LRMKWMMAMKYPITA
LRMKMMMSMSYPQTA

SEQ ID NO: 237909 - protein, 15 aa, Artificial Sequence
  Description of Artificial Sequence: Synthetic peptide
  Seed: LRMKWMMAMKYPITA
LRMKMMMSMSYPRTA

SEQ ID NO: 237910 - protein, 15 aa, Artificial Sequence
  Description of Artificial Sequence: Synthetic peptide
  Seed: LRMKWMMAMKYPITA
LRMKMMMSMSYPSTA

SEQ ID NO: 237911 - protein, 15 aa, Artificial Sequence
  Description of Artificial Sequence: Synthetic peptide
  Seed: LRMKWMMAMKYPITA
LRMKMMMSMSYPTTA

SEQ ID NO: 237912 - protein, 15 aa, Artificial Sequence
  Description of Artificial Sequence: Synthetic peptide
  Seed: LRMKWMMAMKYPITA
LRMKMMMSMSYPVTA

SEQ ID NO: 237913 - protein, 15 aa, Artificial Sequence
  Description of Artificial Sequence: Synthetic peptide
  Seed: LRMKWMMAMKYPITA
LRMKMMMSMSYPWTA

SEQ ID NO: 237914 - protein, 15 aa, Artificial Sequence
  Description of Artificial Sequence: Synthetic peptide
  Seed: LRMKWMMAMKYPITA
LRMKMMMSMSYPYTA

SEQ ID NO: 237915 - protein, 15 aa, Artificial Sequence
  Description of Artificial Sequence: Synthetic peptide
  Seed: LRMKWMMAMKYPITA
LRMKMMMSMTYPATA

SEQ ID NO: 237916 - protein, 15 aa, Artificial Sequence
  Description of Artificial Sequence: Synthetic peptide
  Seed: LRMKWMMAMKYPITA
LRMKMMMSMTYPCTA

SEQ ID NO: 237917 - protein, 15 aa, Artificial Sequence
  Description of Artificial Sequence: Synthetic peptide
  Seed: LRMKWMMAMKYPITA
LRMKMMMSMTYPETA

SEQ ID NO: 237918 - protein, 15 aa, Artificial Sequence
  Description of Artificial Sequence: Synthetic peptide
  Seed: LRMKWMMAMKYPITA
LRMKMMMSMTYPFTA

SEQ ID NO: 237919 - protein, 15 aa, Artificial Sequence
  Description of Artificial Sequence: Synthetic peptide
  Seed: LRMKWMMAMKYPITA
LRMKMMMSMTYPGTA

SEQ ID NO: 237920 - protein, 15 aa, Artificial Sequence
  Description of Artificial Sequence: Synthetic peptide
  Seed: LRMKWMMAMKYPITA
LRMKMMMSMTYPHTA

SEQ ID NO: 237921 - protein, 15 aa, Artificial Sequence
  Description of Artificial Sequence: Synthetic peptide
  Seed: LRMKWMMAMKYPITA
LRMKMMMSMTYPITA

SEQ ID NO: 237922 - protein, 15 aa, Artificial Sequence
  Description of Artificial Sequence: Synthetic peptide
  Seed: LRMKWMMAMKYPITA
LRMKMMMSMTYPKTA

SEQ ID NO: 237923 - protein, 15 aa, Artificial Sequence
  Description of Artificial Sequence: Synthetic peptide
  Seed: LRMKWMMAMKYPITA
LRMKMMMSMTYPLTA

SEQ ID NO: 237924 - protein, 15 aa, Artificial Sequence
  Description of Artificial Sequence: Synthetic peptide
  Seed: LRMKWMMAMKYPITA
LRMKMMMSMTYPMTA

SEQ ID NO: 237925 - protein, 15 aa, Artificial Sequence
  Description of Artificial Sequence: Synthetic peptide
  Seed: LRMKWMMAMKYPITA
LRMKMMMSMTYPNTA

SEQ ID NO: 237926 - protein, 15 aa, Artificial Sequence
  Description of Artificial Sequence: Synthetic peptide
  Seed: LRMKWMMAMKYPITA
LRMKMMMSMTYPPTA

SEQ ID NO: 237927 - protein, 15 aa, Artificial Sequence
  Description of Artificial Sequence: Synthetic peptide
  Seed: LRMKWMMAMKYPITA
LRMKMMMSMTYPQTA

SEQ ID NO: 237928 - protein, 15 aa, Artificial Sequence
  Description of Artificial Sequence: Synthetic peptide
  Seed: LRMKWMMAMKYPITA
LRMKMMMSMTYPRTA

SEQ ID NO: 237929 - protein, 15 aa, Artificial Sequence
  Description of Artificial Sequence: Synthetic peptide
  Seed: LRMKWMMAMKYPITA
LRMKMMMSMTYPSTA

SEQ ID NO: 237930 - protein, 15 aa, Artificial Sequence
  Description of Artificial Sequence: Synthetic peptide
  Seed: LRMKWMMAMKYPITA
LRMKMMMSMTYPTTA

SEQ ID NO: 237931 - protein, 15 aa, Artificial Sequence
  Description of Artificial Sequence: Synthetic peptide
  Seed: LRMKWMMAMKYPITA
LRMKMMMSMTYPVTA

SEQ ID NO: 237932 - protein, 15 aa, Artificial Sequence
  Description of Artificial Sequence: Synthetic peptide
  Seed: LRMKWMMAMKYPITA
LRMKMMMSMTYPYTA

SEQ ID NO: 237933 - protein, 15 aa, Artificial Sequence
  Description of Artificial Sequence: Synthetic peptide
  Seed: LRMKWMMAMKYPITA
LRMKMMMSMVYPATA

SEQ ID NO: 237934 - protein, 15 aa, Artificial Sequence
  Description of Artificial Sequence: Synthetic peptide
  Seed: LRMKWMMAMKYPITA
LRMKMMMSMVYPCTA

SEQ ID NO: 237935 - protein, 15 aa, Artificial Sequence
  Description of Artificial Sequence: Synthetic peptide
  Seed: LRMKWMMAMKYPITA
LRMKMMMSMVYPDTA

SEQ ID NO: 237936 - protein, 15 aa, Artificial Sequence
  Description of Artificial Sequence: Synthetic peptide
  Seed: LRMKWMMAMKYPITA
LRMKMMMSMVYPFTA

SEQ ID NO: 237937 - protein, 15 aa, Artificial Sequence
  Description of Artificial Sequence: Synthetic peptide
  Seed: LRMKWMMAMKYPITA
LRMKMMMSMVYPGTA

SEQ ID NO: 237938 - protein, 15 aa, Artificial Sequence
  Description of Artificial Sequence: Synthetic peptide
  Seed: LRMKWMMAMKYPITA
LRMKMMMSMVYPHTA

SEQ ID NO: 237939 - protein, 15 aa, Artificial Sequence
  Description of Artificial Sequence: Synthetic peptide
  Seed: LRMKWMMAMKYPITA
LRMKMMMSMVYPITA

SEQ ID NO: 237940 - protein, 15 aa, Artificial Sequence
  Description of Artificial Sequence: Synthetic peptide
  Seed: LRMKWMMAMKYPITA
LRMKMMMSMVYPKTA

SEQ ID NO: 237941 - protein, 15 aa, Artificial Sequence
  Description of Artificial Sequence: Synthetic peptide
  Seed: LRMKWMMAMKYPITA
LRMKMMMSMVYPLTA

SEQ ID NO: 237942 - protein, 15 aa, Artificial Sequence
  Description of Artificial Sequence: Synthetic peptide
  Seed: LRMKWMMAMKYPITA
LRMKMMMSMVYPMTA

SEQ ID NO: 237943 - protein, 15 aa, Artificial Sequence
  Description of Artificial Sequence: Synthetic peptide
  Seed: LRMKWMMAMKYPITA
LRMKMMMSMVYPNTA

SEQ ID NO: 237944 - protein, 15 aa, Artificial Sequence
  Description of Artificial Sequence: Synthetic peptide
  Seed: LRMKWMMAMKYPITA
LRMKMMMSMVYPQTA

SEQ ID NO: 237945 - protein, 15 aa, Artificial Sequence
  Description of Artificial Sequence: Synthetic peptide
  Seed: LRMKWMMAMKYPITA
LRMKMMMSMVYPRTA

SEQ ID NO: 237946 - protein, 15 aa, Artificial Sequence
  Description of Artificial Sequence: Synthetic peptide
  Seed: LRMKWMMAMKYPITA
LRMKMMMSMVYPSTA

SEQ ID NO: 237947 - protein, 15 aa, Artificial Sequence
  Description of Artificial Sequence: Synthetic peptide
  Seed: LRMKWMMAMKYPITA
LRMKMMMSMVYPTTA

SEQ ID NO: 237948 - protein, 15 aa, Artificial Sequence
  Description of Artificial Sequence: Synthetic peptide
  Seed: LRMKWMMAMKYPITA
LRMKMMMSMVYPVTA

SEQ ID NO: 237949 - protein, 15 aa, Artificial Sequence
  Description of Artificial Sequence: Synthetic peptide
  Seed: LRMKWMMAMKYPITA
LRMKMMMSMVYPYTA

SEQ ID NO: 237950 - protein, 15 aa, Artificial Sequence
  Description of Artificial Sequence: Synthetic peptide
  Seed: LRMKWMMAMKYPITA
LRMKMMMSMWYPITA

SEQ ID NO: 237951 - protein, 15 aa, Artificial Sequence
  Description of Artificial Sequence: Synthetic peptide
  Seed: LRMKWMMAMKYPITA
LRMKMMMSMYYPITA

SEQ ID NO: 237952 - protein, 15 aa, Artificial Sequence
  Description of Artificial Sequence: Synthetic peptide
  Seed: LRMKWMMAMKYPITA
LRMKMMMTMAYPATA

SEQ ID NO: 237953 - protein, 15 aa, Artificial Sequence
  Description of Artificial Sequence: Synthetic peptide
  Seed: LRMKWMMAMKYPITA
LRMKMMMTMAYPCTA

SEQ ID NO: 237954 - protein, 15 aa, Artificial Sequence
  Description of Artificial Sequence: Synthetic peptide
  Seed: LRMKWMMAMKYPITA
LRMKMMMTMAYPDTA

SEQ ID NO: 237955 - protein, 15 aa, Artificial Sequence
  Description of Artificial Sequence: Synthetic peptide
  Seed: LRMKWMMAMKYPITA
LRMKMMMTMAYPFTA

SEQ ID NO: 237956 - protein, 15 aa, Artificial Sequence
  Description of Artificial Sequence: Synthetic peptide
  Seed: LRMKWMMAMKYPITA
LRMKMMMTMAYPGTA

SEQ ID NO: 237957 - protein, 15 aa, Artificial Sequence
  Description of Artificial Sequence: Synthetic peptide
  Seed: LRMKWMMAMKYPITA
LRMKMMMTMAYPHTA

SEQ ID NO: 237958 - protein, 15 aa, Artificial Sequence
  Description of Artificial Sequence: Synthetic peptide
  Seed: LRMKWMMAMKYPITA
LRMKMMMTMAYPITA

SEQ ID NO: 237959 - protein, 15 aa, Artificial Sequence
  Description of Artificial Sequence: Synthetic peptide
  Seed: LRMKWMMAMKYPITA
LRMKMMMTMAYPKTA

SEQ ID NO: 237960 - protein, 15 aa, Artificial Sequence
  Description of Artificial Sequence: Synthetic peptide
  Seed: LRMKWMMAMKYPITA
LRMKMMMTMAYPLTA

SEQ ID NO: 237961 - protein, 15 aa, Artificial Sequence
  Description of Artificial Sequence: Synthetic peptide
  Seed: LRMKWMMAMKYPITA
LRMKMMMTMAYPMTA

SEQ ID NO: 237962 - protein, 15 aa, Artificial Sequence
  Description of Artificial Sequence: Synthetic peptide
  Seed: LRMKWMMAMKYPITA
LRMKMMMTMAYPNTA

SEQ ID NO: 237963 - protein, 15 aa, Artificial Sequence
  Description of Artificial Sequence: Synthetic peptide
  Seed: LRMKWMMAMKYPITA
LRMKMMMTMAYPPTA

SEQ ID NO: 237964 - protein, 15 aa, Artificial Sequence
  Description of Artificial Sequence: Synthetic peptide
  Seed: LRMKWMMAMKYPITA
LRMKMMMTMAYPQTA

SEQ ID NO: 237965 - protein, 15 aa, Artificial Sequence
  Description of Artificial Sequence: Synthetic peptide
  Seed: LRMKWMMAMKYPITA
LRMKMMMTMAYPRTA

SEQ ID NO: 237966 - protein, 15 aa, Artificial Sequence
  Description of Artificial Sequence: Synthetic peptide
  Seed: LRMKWMMAMKYPITA
LRMKMMMTMAYPSTA

SEQ ID NO: 237967 - protein, 15 aa, Artificial Sequence
  Description of Artificial Sequence: Synthetic peptide
  Seed: LRMKWMMAMKYPITA
LRMKMMMTMAYPTTA

SEQ ID NO: 237968 - protein, 15 aa, Artificial Sequence
  Description of Artificial Sequence: Synthetic peptide
  Seed: LRMKWMMAMKYPITA
LRMKMMMTMAYPVTA

SEQ ID NO: 237969 - protein, 15 aa, Artificial Sequence
  Description of Artificial Sequence: Synthetic peptide
  Seed: LRMKWMMAMKYPITA
LRMKMMMTMAYPWTA

SEQ ID NO: 237970 - protein, 15 aa, Artificial Sequence
  Description of Artificial Sequence: Synthetic peptide
  Seed: LRMKWMMAMKYPITA
LRMKMMMTMAYPYTA

SEQ ID NO: 237971 - protein, 15 aa, Artificial Sequence
  Description of Artificial Sequence: Synthetic peptide
  Seed: LRMKWMMAMKYPITA
LRMKMMMTMCYPATA

SEQ ID NO: 237972 - protein, 15 aa, Artificial Sequence
  Description of Artificial Sequence: Synthetic peptide
  Seed: LRMKWMMAMKYPITA
LRMKMMMTMCYPITA

SEQ ID NO: 237973 - protein, 15 aa, Artificial Sequence
  Description of Artificial Sequence: Synthetic peptide
  Seed: LRMKWMMAMKYPITA
LRMKMMMTMCYPLTA

SEQ ID NO: 237974 - protein, 15 aa, Artificial Sequence
  Description of Artificial Sequence: Synthetic peptide
  Seed: LRMKWMMAMKYPITA
LRMKMMMTMCYPVTA

SEQ ID NO: 237975 - protein, 15 aa, Artificial Sequence
  Description of Artificial Sequence: Synthetic peptide
  Seed: LRMKWMMAMKYPITA
LRMKMMMTMFYPFTA

SEQ ID NO: 237976 - protein, 15 aa, Artificial Sequence
  Description of Artificial Sequence: Synthetic peptide
  Seed: LRMKWMMAMKYPITA
LRMKMMMTMFYPITA

SEQ ID NO: 237977 - protein, 15 aa, Artificial Sequence
  Description of Artificial Sequence: Synthetic peptide
  Seed: LRMKWMMAMKYPITA
LRMKMMMTMFYPLTA

SEQ ID NO: 237978 - protein, 15 aa, Artificial Sequence
  Description of Artificial Sequence: Synthetic peptide
  Seed: LRMKWMMAMKYPITA
LRMKMMMTMFYPMTA

SEQ ID NO: 237979 - protein, 15 aa, Artificial Sequence
  Description of Artificial Sequence: Synthetic peptide
  Seed: LRMKWMMAMKYPITA
LRMKMMMTMFYPTTA

SEQ ID NO: 237980 - protein, 15 aa, Artificial Sequence
  Description of Artificial Sequence: Synthetic peptide
  Seed: LRMKWMMAMKYPITA
LRMKMMMTMFYPVTA

SEQ ID NO: 237981 - protein, 15 aa, Artificial Sequence
  Description of Artificial Sequence: Synthetic peptide
  Seed: LRMKWMMAMKYPITA
LRMKMMMTMGYPATA

SEQ ID NO: 237982 - protein, 15 aa, Artificial Sequence
  Description of Artificial Sequence: Synthetic peptide
  Seed: LRMKWMMAMKYPITA
LRMKMMMTMGYPCTA

SEQ ID NO: 237983 - protein, 15 aa, Artificial Sequence
  Description of Artificial Sequence: Synthetic peptide
  Seed: LRMKWMMAMKYPITA
LRMKMMMTMGYPFTA

SEQ ID NO: 237984 - protein, 15 aa, Artificial Sequence
  Description of Artificial Sequence: Synthetic peptide
  Seed: LRMKWMMAMKYPITA
LRMKMMMTMGYPGTA

SEQ ID NO: 237985 - protein, 15 aa, Artificial Sequence
  Description of Artificial Sequence: Synthetic peptide
  Seed: LRMKWMMAMKYPITA
LRMKMMMTMGYPITA

SEQ ID NO: 237986 - protein, 15 aa, Artificial Sequence
  Description of Artificial Sequence: Synthetic peptide
  Seed: LRMKWMMAMKYPITA
LRMKMMMTMGYPLTA

SEQ ID NO: 237987 - protein, 15 aa, Artificial Sequence
  Description of Artificial Sequence: Synthetic peptide
  Seed: LRMKWMMAMKYPITA
LRMKMMMTMGYPMTA

SEQ ID NO: 237988 - protein, 15 aa, Artificial Sequence
  Description of Artificial Sequence: Synthetic peptide
  Seed: LRMKWMMAMKYPITA
LRMKMMMTMGYPNTA

SEQ ID NO: 237989 - protein, 15 aa, Artificial Sequence
  Description of Artificial Sequence: Synthetic peptide
  Seed: LRMKWMMAMKYPITA
LRMKMMMTMGYPRTA

SEQ ID NO: 237990 - protein, 15 aa, Artificial Sequence
  Description of Artificial Sequence: Synthetic peptide
  Seed: LRMKWMMAMKYPITA
LRMKMMMTMGYPSTA

SEQ ID NO: 237991 - protein, 15 aa, Artificial Sequence
  Description of Artificial Sequence: Synthetic peptide
  Seed: LRMKWMMAMKYPITA
LRMKMMMTMGYPTTA

SEQ ID NO: 237992 - protein, 15 aa, Artificial Sequence
  Description of Artificial Sequence: Synthetic peptide
  Seed: LRMKWMMAMKYPITA
LRMKMMMTMGYPVTA

SEQ ID NO: 237993 - protein, 15 aa, Artificial Sequence
  Description of Artificial Sequence: Synthetic peptide
  Seed: LRMKWMMAMKYPITA
LRMKMMMTMGYPYTA

SEQ ID NO: 237994 - protein, 15 aa, Artificial Sequence
  Description of Artificial Sequence: Synthetic peptide
  Seed: LRMKWMMAMKYPITA
LRMKMMMTMHYPATA

SEQ ID NO: 237995 - protein, 15 aa, Artificial Sequence
  Description of Artificial Sequence: Synthetic peptide
  Seed: LRMKWMMAMKYPITA
LRMKMMMTMHYPGTA

SEQ ID NO: 237996 - protein, 15 aa, Artificial Sequence
  Description of Artificial Sequence: Synthetic peptide
  Seed: LRMKWMMAMKYPITA
LRMKMMMTMHYPITA

SEQ ID NO: 237997 - protein, 15 aa, Artificial Sequence
  Description of Artificial Sequence: Synthetic peptide
  Seed: LRMKWMMAMKYPITA
LRMKMMMTMHYPKTA

SEQ ID NO: 237998 - protein, 15 aa, Artificial Sequence
  Description of Artificial Sequence: Synthetic peptide
  Seed: LRMKWMMAMKYPITA
LRMKMMMTMHYPLTA

SEQ ID NO: 237999 - protein, 15 aa, Artificial Sequence
  Description of Artificial Sequence: Synthetic peptide
  Seed: LRMKWMMAMKYPITA
LRMKMMMTMHYPMTA

SEQ ID NO: 238000 - protein, 15 aa, Artificial Sequence
  Description of Artificial Sequence: Synthetic peptide
  Seed: LRMKWMMAMKYPITA
LRMKMMMTMHYPQTA

SEQ ID NO: 238001 - protein, 15 aa, Artificial Sequence
  Description of Artificial Sequence: Synthetic peptide
  Seed: LRMKWMMAMKYPITA
LRMKMMMTMHYPRTA

SEQ ID NO: 238002 - protein, 15 aa, Artificial Sequence
  Description of Artificial Sequence: Synthetic peptide
  Seed: LRMKWMMAMKYPITA
LRMKMMMTMHYPSTA

SEQ ID NO: 238003 - protein, 15 aa, Artificial Sequence
  Description of Artificial Sequence: Synthetic peptide
  Seed: LRMKWMMAMKYPITA
LRMKMMMTMHYPVTA

SEQ ID NO: 238004 - protein, 15 aa, Artificial Sequence
  Description of Artificial Sequence: Synthetic peptide
  Seed: LRMKWMMAMKYPITA
LRMKMMMTMHYPYTA

SEQ ID NO: 238005 - protein, 15 aa, Artificial Sequence
  Description of Artificial Sequence: Synthetic peptide
  Seed: LRMKWMMAMKYPITA
LRMKMMMTMIYPATA

SEQ ID NO: 238006 - protein, 15 aa, Artificial Sequence
  Description of Artificial Sequence: Synthetic peptide
  Seed: LRMKWMMAMKYPITA
LRMKMMMTMIYPCTA

SEQ ID NO: 238007 - protein, 15 aa, Artificial Sequence
  Description of Artificial Sequence: Synthetic peptide
  Seed: LRMKWMMAMKYPITA
LRMKMMMTMIYPGTA

SEQ ID NO: 238008 - protein, 15 aa, Artificial Sequence
  Description of Artificial Sequence: Synthetic peptide
  Seed: LRMKWMMAMKYPITA
LRMKMMMTMIYPITA

SEQ ID NO: 238009 - protein, 15 aa, Artificial Sequence
  Description of Artificial Sequence: Synthetic peptide
  Seed: LRMKWMMAMKYPITA
LRMKMMMTMIYPLTA

SEQ ID NO: 238010 - protein, 15 aa, Artificial Sequence
  Description of Artificial Sequence: Synthetic peptide
  Seed: LRMKWMMAMKYPITA
LRMKMMMTMIYPMTA

SEQ ID NO: 238011 - protein, 15 aa, Artificial Sequence
  Description of Artificial Sequence: Synthetic peptide
  Seed: LRMKWMMAMKYPITA
LRMKMMMTMIYPRTA

SEQ ID NO: 238012 - protein, 15 aa, Artificial Sequence
  Description of Artificial Sequence: Synthetic peptide
  Seed: LRMKWMMAMKYPITA
LRMKMMMTMIYPSTA

SEQ ID NO: 238013 - protein, 15 aa, Artificial Sequence
  Description of Artificial Sequence: Synthetic peptide
  Seed: LRMKWMMAMKYPITA
LRMKMMMTMIYPTTA

SEQ ID NO: 238014 - protein, 15 aa, Artificial Sequence
  Description of Artificial Sequence: Synthetic peptide
  Seed: LRMKWMMAMKYPITA
LRMKMMMTMIYPVTA

SEQ ID NO: 238015 - protein, 15 aa, Artificial Sequence
  Description of Artificial Sequence: Synthetic peptide
  Seed: LRMKWMMAMKYPITA
LRMKMMMTMKYPATA

SEQ ID NO: 238016 - protein, 15 aa, Artificial Sequence
  Description of Artificial Sequence: Synthetic peptide
  Seed: LRMKWMMAMKYPITA
LRMKMMMTMKYPCTA

SEQ ID NO: 238017 - protein, 15 aa, Artificial Sequence
  Description of Artificial Sequence: Synthetic peptide
  Seed: LRMKWMMAMKYPITA
LRMKMMMTMKYPDTA

SEQ ID NO: 238018 - protein, 15 aa, Artificial Sequence
  Description of Artificial Sequence: Synthetic peptide
  Seed: LRMKWMMAMKYPITA
LRMKMMMTMKYPETA

SEQ ID NO: 238019 - protein, 15 aa, Artificial Sequence
  Description of Artificial Sequence: Synthetic peptide
  Seed: LRMKWMMAMKYPITA
LRMKMMMTMKYPFTA

SEQ ID NO: 238020 - protein, 15 aa, Artificial Sequence
  Description of Artificial Sequence: Synthetic peptide
  Seed: LRMKWMMAMKYPITA
LRMKMMMTMKYPGTA

SEQ ID NO: 238021 - protein, 15 aa, Artificial Sequence
  Description of Artificial Sequence: Synthetic peptide
  Seed: LRMKWMMAMKYPITA
LRMKMMMTMKYPHTA

SEQ ID NO: 238022 - protein, 15 aa, Artificial Sequence
  Description of Artificial Sequence: Synthetic peptide
  Seed: LRMKWMMAMKYPITA
LRMKMMMTMKYPITA

SEQ ID NO: 238023 - protein, 15 aa, Artificial Sequence
  Description of Artificial Sequence: Synthetic peptide
  Seed: LRMKWMMAMKYPITA
LRMKMMMTMKYPKTA

SEQ ID NO: 238024 - protein, 15 aa, Artificial Sequence
  Description of Artificial Sequence: Synthetic peptide
  Seed: LRMKWMMAMKYPITA
LRMKMMMTMKYPLTA

SEQ ID NO: 238025 - protein, 15 aa, Artificial Sequence
  Description of Artificial Sequence: Synthetic peptide
  Seed: LRMKWMMAMKYPITA
LRMKMMMTMKYPMTA

SEQ ID NO: 238026 - protein, 15 aa, Artificial Sequence
  Description of Artificial Sequence: Synthetic peptide
  Seed: LRMKWMMAMKYPITA
LRMKMMMTMKYPNTA

SEQ ID NO: 238027 - protein, 15 aa, Artificial Sequence
  Description of Artificial Sequence: Synthetic peptide
  Seed: LRMKWMMAMKYPITA
LRMKMMMTMKYPQTA

SEQ ID NO: 238028 - protein, 15 aa, Artificial Sequence
  Description of Artificial Sequence: Synthetic peptide
  Seed: LRMKWMMAMKYPITA
LRMKMMMTMKYPRTA

SEQ ID NO: 238029 - protein, 15 aa, Artificial Sequence
  Description of Artificial Sequence: Synthetic peptide
  Seed: LRMKWMMAMKYPITA
LRMKMMMTMKYPSTA

SEQ ID NO: 238030 - protein, 15 aa, Artificial Sequence
  Description of Artificial Sequence: Synthetic peptide
  Seed: LRMKWMMAMKYPITA
LRMKMMMTMKYPTTA

SEQ ID NO: 238031 - protein, 15 aa, Artificial Sequence
  Description of Artificial Sequence: Synthetic peptide
  Seed: LRMKWMMAMKYPITA
LRMKMMMTMKYPVTA

SEQ ID NO: 238032 - protein, 15 aa, Artificial Sequence
  Description of Artificial Sequence: Synthetic peptide
  Seed: LRMKWMMAMKYPITA
LRMKMMMTMKYPWTA

SEQ ID NO: 238033 - protein, 15 aa, Artificial Sequence
  Description of Artificial Sequence: Synthetic peptide
  Seed: LRMKWMMAMKYPITA
LRMKMMMTMKYPYTA

SEQ ID NO: 238034 - protein, 15 aa, Artificial Sequence
  Description of Artificial Sequence: Synthetic peptide
  Seed: LRMKWMMAMKYPITA
LRMKMMMTMLYPITA

SEQ ID NO: 238035 - protein, 15 aa, Artificial Sequence
  Description of Artificial Sequence: Synthetic peptide
  Seed: LRMKWMMAMKYPITA
LRMKMMMTMMYPITA

SEQ ID NO: 238036 - protein, 15 aa, Artificial Sequence
  Description of Artificial Sequence: Synthetic peptide
  Seed: LRMKWMMAMKYPITA
LRMKMMMTMMYPLTA

SEQ ID NO: 238037 - protein, 15 aa, Artificial Sequence
  Description of Artificial Sequence: Synthetic peptide
  Seed: LRMKWMMAMKYPITA
LRMKMMMTMMYPVTA

SEQ ID NO: 238038 - protein, 15 aa, Artificial Sequence
  Description of Artificial Sequence: Synthetic peptide
  Seed: LRMKWMMAMKYPITA
LRMKMMMTMNYPATA

SEQ ID NO: 238039 - protein, 15 aa, Artificial Sequence
  Description of Artificial Sequence: Synthetic peptide
  Seed: LRMKWMMAMKYPITA
LRMKMMMTMNYPFTA

SEQ ID NO: 238040 - protein, 15 aa, Artificial Sequence
  Description of Artificial Sequence: Synthetic peptide
  Seed: LRMKWMMAMKYPITA
LRMKMMMTMNYPITA

SEQ ID NO: 238041 - protein, 15 aa, Artificial Sequence
  Description of Artificial Sequence: Synthetic peptide
  Seed: LRMKWMMAMKYPITA
LRMKMMMTMNYPLTA

SEQ ID NO: 238042 - protein, 15 aa, Artificial Sequence
  Description of Artificial Sequence: Synthetic peptide
  Seed: LRMKWMMAMKYPITA
LRMKMMMTMNYPMTA

SEQ ID NO: 238043 - protein, 15 aa, Artificial Sequence
  Description of Artificial Sequence: Synthetic peptide
  Seed: LRMKWMMAMKYPITA
LRMKMMMTMNYPNTA

SEQ ID NO: 238044 - protein, 15 aa, Artificial Sequence
  Description of Artificial Sequence: Synthetic peptide
  Seed: LRMKWMMAMKYPITA
LRMKMMMTMNYPRTA

SEQ ID NO: 238045 - protein, 15 aa, Artificial Sequence
  Description of Artificial Sequence: Synthetic peptide
  Seed: LRMKWMMAMKYPITA
LRMKMMMTMNYPSTA

SEQ ID NO: 238046 - protein, 15 aa, Artificial Sequence
  Description of Artificial Sequence: Synthetic peptide
  Seed: LRMKWMMAMKYPITA
LRMKMMMTMNYPTTA

SEQ ID NO: 238047 - protein, 15 aa, Artificial Sequence
  Description of Artificial Sequence: Synthetic peptide
  Seed: LRMKWMMAMKYPITA
LRMKMMMTMNYPVTA

SEQ ID NO: 238048 - protein, 15 aa, Artificial Sequence
  Description of Artificial Sequence: Synthetic peptide
  Seed: LRMKWMMAMKYPITA
LRMKMMMTMNYPYTA

SEQ ID NO: 238049 - protein, 15 aa, Artificial Sequence
  Description of Artificial Sequence: Synthetic peptide
  Seed: LRMKWMMAMKYPITA
LRMKMMMTMPYPATA

SEQ ID NO: 238050 - protein, 15 aa, Artificial Sequence
  Description of Artificial Sequence: Synthetic peptide
  Seed: LRMKWMMAMKYPITA
LRMKMMMTMPYPCTA

SEQ ID NO: 238051 - protein, 15 aa, Artificial Sequence
  Description of Artificial Sequence: Synthetic peptide
  Seed: LRMKWMMAMKYPITA
LRMKMMMTMPYPDTA

SEQ ID NO: 238052 - protein, 15 aa, Artificial Sequence
  Description of Artificial Sequence: Synthetic peptide
  Seed: LRMKWMMAMKYPITA
LRMKMMMTMPYPETA

SEQ ID NO: 238053 - protein, 15 aa, Artificial Sequence
  Description of Artificial Sequence: Synthetic peptide
  Seed: LRMKWMMAMKYPITA
LRMKMMMTMPYPFTA

SEQ ID NO: 238054 - protein, 15 aa, Artificial Sequence
  Description of Artificial Sequence: Synthetic peptide
  Seed: LRMKWMMAMKYPITA
LRMKMMMTMPYPGTA

SEQ ID NO: 238055 - protein, 15 aa, Artificial Sequence
  Description of Artificial Sequence: Synthetic peptide
  Seed: LRMKWMMAMKYPITA
LRMKMMMTMPYPHTA

SEQ ID NO: 238056 - protein, 15 aa, Artificial Sequence
  Description of Artificial Sequence: Synthetic peptide
  Seed: LRMKWMMAMKYPITA
LRMKMMMTMPYPITA

SEQ ID NO: 238057 - protein, 15 aa, Artificial Sequence
  Description of Artificial Sequence: Synthetic peptide
  Seed: LRMKWMMAMKYPITA
LRMKMMMTMPYPLTA

SEQ ID NO: 238058 - protein, 15 aa, Artificial Sequence
  Description of Artificial Sequence: Synthetic peptide
  Seed: LRMKWMMAMKYPITA
LRMKMMMTMPYPMTA

SEQ ID NO: 238059 - protein, 15 aa, Artificial Sequence
  Description of Artificial Sequence: Synthetic peptide
  Seed: LRMKWMMAMKYPITA
LRMKMMMTMPYPNTA

SEQ ID NO: 238060 - protein, 15 aa, Artificial Sequence
  Description of Artificial Sequence: Synthetic peptide
  Seed: LRMKWMMAMKYPITA
LRMKMMMTMPYPQTA

SEQ ID NO: 238061 - protein, 15 aa, Artificial Sequence
  Description of Artificial Sequence: Synthetic peptide
  Seed: LRMKWMMAMKYPITA
LRMKMMMTMPYPSTA

SEQ ID NO: 238062 - protein, 15 aa, Artificial Sequence
  Description of Artificial Sequence: Synthetic peptide
  Seed: LRMKWMMAMKYPITA
LRMKMMMTMPYPTTA

SEQ ID NO: 238063 - protein, 15 aa, Artificial Sequence
  Description of Artificial Sequence: Synthetic peptide
  Seed: LRMKWMMAMKYPITA
LRMKMMMTMPYPVTA

SEQ ID NO: 238064 - protein, 15 aa, Artificial Sequence
  Description of Artificial Sequence: Synthetic peptide
  Seed: LRMKWMMAMKYPITA
LRMKMMMTMPYPYTA

SEQ ID NO: 238065 - protein, 15 aa, Artificial Sequence
  Description of Artificial Sequence: Synthetic peptide
  Seed: LRMKWMMAMKYPITA
LRMKMMMTMQYPITA

SEQ ID NO: 238066 - protein, 15 aa, Artificial Sequence
  Description of Artificial Sequence: Synthetic peptide
  Seed: LRMKWMMAMKYPITA
LRMKMMMTMQYPRTA

SEQ ID NO: 238067 - protein, 15 aa, Artificial Sequence
  Description of Artificial Sequence: Synthetic peptide
  Seed: LRMKWMMAMKYPITA
LRMKMMMTMQYPVTA

SEQ ID NO: 238068 - protein, 15 aa, Artificial Sequence
  Description of Artificial Sequence: Synthetic peptide
  Seed: LRMKWMMAMKYPITA
LRMKMMMTMRYPATA

SEQ ID NO: 238069 - protein, 15 aa, Artificial Sequence
  Description of Artificial Sequence: Synthetic peptide
  Seed: LRMKWMMAMKYPITA
LRMKMMMTMRYPCTA

SEQ ID NO: 238070 - protein, 15 aa, Artificial Sequence
  Description of Artificial Sequence: Synthetic peptide
  Seed: LRMKWMMAMKYPITA
LRMKMMMTMRYPDTA

SEQ ID NO: 238071 - protein, 15 aa, Artificial Sequence
  Description of Artificial Sequence: Synthetic peptide
  Seed: LRMKWMMAMKYPITA
LRMKMMMTMRYPETA

SEQ ID NO: 238072 - protein, 15 aa, Artificial Sequence
  Description of Artificial Sequence: Synthetic peptide
  Seed: LRMKWMMAMKYPITA
LRMKMMMTMRYPFTA

SEQ ID NO: 238073 - protein, 15 aa, Artificial Sequence
  Description of Artificial Sequence: Synthetic peptide
  Seed: LRMKWMMAMKYPITA
LRMKMMMTMRYPGTA

SEQ ID NO: 238074 - protein, 15 aa, Artificial Sequence
  Description of Artificial Sequence: Synthetic peptide
  Seed: LRMKWMMAMKYPITA
LRMKMMMTMRYPHTA

SEQ ID NO: 238075 - protein, 15 aa, Artificial Sequence
  Description of Artificial Sequence: Synthetic peptide
  Seed: LRMKWMMAMKYPITA
LRMKMMMTMRYPITA

SEQ ID NO: 238076 - protein, 15 aa, Artificial Sequence
  Description of Artificial Sequence: Synthetic peptide
  Seed: LRMKWMMAMKYPITA
LRMKMMMTMRYPKTA

SEQ ID NO: 238077 - protein, 15 aa, Artificial Sequence
  Description of Artificial Sequence: Synthetic peptide
  Seed: LRMKWMMAMKYPITA
LRMKMMMTMRYPLTA

SEQ ID NO: 238078 - protein, 15 aa, Artificial Sequence
  Description of Artificial Sequence: Synthetic peptide
  Seed: LRMKWMMAMKYPITA
LRMKMMMTMRYPMTA

SEQ ID NO: 238079 - protein, 15 aa, Artificial Sequence
  Description of Artificial Sequence: Synthetic peptide
  Seed: LRMKWMMAMKYPITA
LRMKMMMTMRYPNTA

SEQ ID NO: 238080 - protein, 15 aa, Artificial Sequence
  Description of Artificial Sequence: Synthetic peptide
  Seed: LRMKWMMAMKYPITA
LRMKMMMTMRYPPTA

SEQ ID NO: 238081 - protein, 15 aa, Artificial Sequence
  Description of Artificial Sequence: Synthetic peptide
  Seed: LRMKWMMAMKYPITA
LRMKMMMTMRYPQTA

SEQ ID NO: 238082 - protein, 15 aa, Artificial Sequence
  Description of Artificial Sequence: Synthetic peptide
  Seed: LRMKWMMAMKYPITA
LRMKMMMTMRYPRTA

SEQ ID NO: 238083 - protein, 15 aa, Artificial Sequence
  Description of Artificial Sequence: Synthetic peptide
  Seed: LRMKWMMAMKYPITA
LRMKMMMTMRYPSTA

SEQ ID NO: 238084 - protein, 15 aa, Artificial Sequence
  Description of Artificial Sequence: Synthetic peptide
  Seed: LRMKWMMAMKYPITA
LRMKMMMTMRYPTTA

SEQ ID NO: 238085 - protein, 15 aa, Artificial Sequence
  Description of Artificial Sequence: Synthetic peptide
  Seed: LRMKWMMAMKYPITA
LRMKMMMTMRYPVTA

SEQ ID NO: 238086 - protein, 15 aa, Artificial Sequence
  Description of Artificial Sequence: Synthetic peptide
  Seed: LRMKWMMAMKYPITA
LRMKMMMTMRYPWTA

SEQ ID NO: 238087 - protein, 15 aa, Artificial Sequence
  Description of Artificial Sequence: Synthetic peptide
  Seed: LRMKWMMAMKYPITA
LRMKMMMTMRYPYTA

SEQ ID NO: 238088 - protein, 15 aa, Artificial Sequence
  Description of Artificial Sequence: Synthetic peptide
  Seed: LRMKWMMAMKYPITA
LRMKMMMTMSYPATA

SEQ ID NO: 238089 - protein, 15 aa, Artificial Sequence
  Description of Artificial Sequence: Synthetic peptide
  Seed: LRMKWMMAMKYPITA
LRMKMMMTMSYPCTA

SEQ ID NO: 238090 - protein, 15 aa, Artificial Sequence
  Description of Artificial Sequence: Synthetic peptide
  Seed: LRMKWMMAMKYPITA
LRMKMMMTMSYPFTA

SEQ ID NO: 238091 - protein, 15 aa, Artificial Sequence
  Description of Artificial Sequence: Synthetic peptide
  Seed: LRMKWMMAMKYPITA
LRMKMMMTMSYPGTA

SEQ ID NO: 238092 - protein, 15 aa, Artificial Sequence
  Description of Artificial Sequence: Synthetic peptide
  Seed: LRMKWMMAMKYPITA
LRMKMMMTMSYPHTA

SEQ ID NO: 238093 - protein, 15 aa, Artificial Sequence
  Description of Artificial Sequence: Synthetic peptide
  Seed: LRMKWMMAMKYPITA
LRMKMMMTMSYPITA

SEQ ID NO: 238094 - protein, 15 aa, Artificial Sequence
  Description of Artificial Sequence: Synthetic peptide
  Seed: LRMKWMMAMKYPITA
LRMKMMMTMSYPLTA

SEQ ID NO: 238095 - protein, 15 aa, Artificial Sequence
  Description of Artificial Sequence: Synthetic peptide
  Seed: LRMKWMMAMKYPITA
LRMKMMMTMSYPMTA

SEQ ID NO: 238096 - protein, 15 aa, Artificial Sequence
  Description of Artificial Sequence: Synthetic peptide
  Seed: LRMKWMMAMKYPITA
LRMKMMMTMSYPNTA

SEQ ID NO: 238097 - protein, 15 aa, Artificial Sequence
  Description of Artificial Sequence: Synthetic peptide
  Seed: LRMKWMMAMKYPITA
LRMKMMMTMSYPQTA

SEQ ID NO: 238098 - protein, 15 aa, Artificial Sequence
  Description of Artificial Sequence: Synthetic peptide
  Seed: LRMKWMMAMKYPITA
LRMKMMMTMSYPRTA

SEQ ID NO: 238099 - protein, 15 aa, Artificial Sequence
  Description of Artificial Sequence: Synthetic peptide
  Seed: LRMKWMMAMKYPITA
LRMKMMMTMSYPSTA

SEQ ID NO: 238100 - protein, 15 aa, Artificial Sequence
  Description of Artificial Sequence: Synthetic peptide
  Seed: LRMKWMMAMKYPITA
LRMKMMMTMSYPTTA

SEQ ID NO: 238101 - protein, 15 aa, Artificial Sequence
  Description of Artificial Sequence: Synthetic peptide
  Seed: LRMKWMMAMKYPITA
LRMKMMMTMSYPVTA

SEQ ID NO: 238102 - protein, 15 aa, Artificial Sequence
  Description of Artificial Sequence: Synthetic peptide
  Seed: LRMKWMMAMKYPITA
LRMKMMMTMSYPWTA

SEQ ID NO: 238103 - protein, 15 aa, Artificial Sequence
  Description of Artificial Sequence: Synthetic peptide
  Seed: LRMKWMMAMKYPITA
LRMKMMMTMSYPYTA

SEQ ID NO: 238104 - protein, 15 aa, Artificial Sequence
  Description of Artificial Sequence: Synthetic peptide
  Seed: LRMKWMMAMKYPITA
LRMKMMMTMTYPATA

SEQ ID NO: 238105 - protein, 15 aa, Artificial Sequence
  Description of Artificial Sequence: Synthetic peptide
  Seed: LRMKWMMAMKYPITA
LRMKMMMTMTYPETA

SEQ ID NO: 238106 - protein, 15 aa, Artificial Sequence
  Description of Artificial Sequence: Synthetic peptide
  Seed: LRMKWMMAMKYPITA
LRMKMMMTMTYPFTA

SEQ ID NO: 238107 - protein, 15 aa, Artificial Sequence
  Description of Artificial Sequence: Synthetic peptide
  Seed: LRMKWMMAMKYPITA
LRMKMMMTMTYPGTA

SEQ ID NO: 238108 - protein, 15 aa, Artificial Sequence
  Description of Artificial Sequence: Synthetic peptide
  Seed: LRMKWMMAMKYPITA
LRMKMMMTMTYPHTA

SEQ ID NO: 238109 - protein, 15 aa, Artificial Sequence
  Description of Artificial Sequence: Synthetic peptide
  Seed: LRMKWMMAMKYPITA
LRMKMMMTMTYPITA

SEQ ID NO: 238110 - protein, 15 aa, Artificial Sequence
  Description of Artificial Sequence: Synthetic peptide
  Seed: LRMKWMMAMKYPITA
LRMKMMMTMTYPKTA

SEQ ID NO: 238111 - protein, 15 aa, Artificial Sequence
  Description of Artificial Sequence: Synthetic peptide
  Seed: LRMKWMMAMKYPITA
LRMKMMMTMTYPLTA

SEQ ID NO: 238112 - protein, 15 aa, Artificial Sequence
  Description of Artificial Sequence: Synthetic peptide
  Seed: LRMKWMMAMKYPITA
LRMKMMMTMTYPMTA

SEQ ID NO: 238113 - protein, 15 aa, Artificial Sequence
  Description of Artificial Sequence: Synthetic peptide
  Seed: LRMKWMMAMKYPITA
LRMKMMMTMTYPNTA

SEQ ID NO: 238114 - protein, 15 aa, Artificial Sequence
  Description of Artificial Sequence: Synthetic peptide
  Seed: LRMKWMMAMKYPITA
LRMKMMMTMTYPQTA

SEQ ID NO: 238115 - protein, 15 aa, Artificial Sequence
  Description of Artificial Sequence: Synthetic peptide
  Seed: LRMKWMMAMKYPITA
LRMKMMMTMTYPRTA

SEQ ID NO: 238116 - protein, 15 aa, Artificial Sequence
  Description of Artificial Sequence: Synthetic peptide
  Seed: LRMKWMMAMKYPITA
LRMKMMMTMTYPSTA

SEQ ID NO: 238117 - protein, 15 aa, Artificial Sequence
  Description of Artificial Sequence: Synthetic peptide
  Seed: LRMKWMMAMKYPITA
LRMKMMMTMTYPTTA

SEQ ID NO: 238118 - protein, 15 aa, Artificial Sequence
  Description of Artificial Sequence: Synthetic peptide
  Seed: LRMKWMMAMKYPITA
LRMKMMMTMTYPVTA

SEQ ID NO: 238119 - protein, 15 aa, Artificial Sequence
  Description of Artificial Sequence: Synthetic peptide
  Seed: LRMKWMMAMKYPITA
LRMKMMMTMTYPYTA

SEQ ID NO: 238120 - protein, 15 aa, Artificial Sequence
  Description of Artificial Sequence: Synthetic peptide
  Seed: LRMKWMMAMKYPITA
LRMKMMMTMVYPATA

SEQ ID NO: 238121 - protein, 15 aa, Artificial Sequence
  Description of Artificial Sequence: Synthetic peptide
  Seed: LRMKWMMAMKYPITA
LRMKMMMTMVYPCTA

SEQ ID NO: 238122 - protein, 15 aa, Artificial Sequence
  Description of Artificial Sequence: Synthetic peptide
  Seed: LRMKWMMAMKYPITA
LRMKMMMTMVYPFTA

SEQ ID NO: 238123 - protein, 15 aa, Artificial Sequence
  Description of Artificial Sequence: Synthetic peptide
  Seed: LRMKWMMAMKYPITA
LRMKMMMTMVYPGTA

SEQ ID NO: 238124 - protein, 15 aa, Artificial Sequence
  Description of Artificial Sequence: Synthetic peptide
  Seed: LRMKWMMAMKYPITA
LRMKMMMTMVYPITA

SEQ ID NO: 238125 - protein, 15 aa, Artificial Sequence
  Description of Artificial Sequence: Synthetic peptide
  Seed: LRMKWMMAMKYPITA
LRMKMMMTMVYPLTA

SEQ ID NO: 238126 - protein, 15 aa, Artificial Sequence
  Description of Artificial Sequence: Synthetic peptide
  Seed: LRMKWMMAMKYPITA
LRMKMMMTMVYPMTA

SEQ ID NO: 238127 - protein, 15 aa, Artificial Sequence
  Description of Artificial Sequence: Synthetic peptide
  Seed: LRMKWMMAMKYPITA
LRMKMMMTMVYPNTA

SEQ ID NO: 238128 - protein, 15 aa, Artificial Sequence
  Description of Artificial Sequence: Synthetic peptide
  Seed: LRMKWMMAMKYPITA
LRMKMMMTMVYPRTA

SEQ ID NO: 238129 - protein, 15 aa, Artificial Sequence
  Description of Artificial Sequence: Synthetic peptide
  Seed: LRMKWMMAMKYPITA
LRMKMMMTMVYPSTA

SEQ ID NO: 238130 - protein, 15 aa, Artificial Sequence
  Description of Artificial Sequence: Synthetic peptide
  Seed: LRMKWMMAMKYPITA
LRMKMMMTMVYPTTA

SEQ ID NO: 238131 - protein, 15 aa, Artificial Sequence
  Description of Artificial Sequence: Synthetic peptide
  Seed: LRMKWMMAMKYPITA
LRMKMMMTMVYPVTA

SEQ ID NO: 238132 - protein, 15 aa, Artificial Sequence
  Description of Artificial Sequence: Synthetic peptide
  Seed: LRMKWMMAMKYPITA
LRMKMMMTMVYPYTA

SEQ ID NO: 238133 - protein, 15 aa, Artificial Sequence
  Description of Artificial Sequence: Synthetic peptide
  Seed: LRMKWMMAMKYPITA
LRMKMMMTMYYPITA

SEQ ID NO: 238134 - protein, 15 aa, Artificial Sequence
  Description of Artificial Sequence: Synthetic peptide
  Seed: LRMKWMMAMKYPITA
LRMKMMMVMAYPATA

SEQ ID NO: 238135 - protein, 15 aa, Artificial Sequence
  Description of Artificial Sequence: Synthetic peptide
  Seed: LRMKWMMAMKYPITA
LRMKMMMVMAYPCTA

SEQ ID NO: 238136 - protein, 15 aa, Artificial Sequence
  Description of Artificial Sequence: Synthetic peptide
  Seed: LRMKWMMAMKYPITA
LRMKMMMVMAYPDTA

SEQ ID NO: 238137 - protein, 15 aa, Artificial Sequence
  Description of Artificial Sequence: Synthetic peptide
  Seed: LRMKWMMAMKYPITA
LRMKMMMVMAYPFTA

SEQ ID NO: 238138 - protein, 15 aa, Artificial Sequence
  Description of Artificial Sequence: Synthetic peptide
  Seed: LRMKWMMAMKYPITA
LRMKMMMVMAYPGTA

SEQ ID NO: 238139 - protein, 15 aa, Artificial Sequence
  Description of Artificial Sequence: Synthetic peptide
  Seed: LRMKWMMAMKYPITA
LRMKMMMVMAYPITA

SEQ ID NO: 238140 - protein, 15 aa, Artificial Sequence
  Description of Artificial Sequence: Synthetic peptide
  Seed: LRMKWMMAMKYPITA
LRMKMMMVMAYPKTA

SEQ ID NO: 238141 - protein, 15 aa, Artificial Sequence
  Description of Artificial Sequence: Synthetic peptide
  Seed: LRMKWMMAMKYPITA
LRMKMMMVMAYPLTA

SEQ ID NO: 238142 - protein, 15 aa, Artificial Sequence
  Description of Artificial Sequence: Synthetic peptide
  Seed: LRMKWMMAMKYPITA
LRMKMMMVMAYPMTA

SEQ ID NO: 238143 - protein, 15 aa, Artificial Sequence
  Description of Artificial Sequence: Synthetic peptide
  Seed: LRMKWMMAMKYPITA
LRMKMMMVMAYPNTA

SEQ ID NO: 238144 - protein, 15 aa, Artificial Sequence
  Description of Artificial Sequence: Synthetic peptide
  Seed: LRMKWMMAMKYPITA
LRMKMMMVMAYPPTA

SEQ ID NO: 238145 - protein, 15 aa, Artificial Sequence
  Description of Artificial Sequence: Synthetic peptide
  Seed: LRMKWMMAMKYPITA
LRMKMMMVMAYPQTA

SEQ ID NO: 238146 - protein, 15 aa, Artificial Sequence
  Description of Artificial Sequence: Synthetic peptide
  Seed: LRMKWMMAMKYPITA
LRMKMMMVMAYPRTA

SEQ ID NO: 238147 - protein, 15 aa, Artificial Sequence
  Description of Artificial Sequence: Synthetic peptide
  Seed: LRMKWMMAMKYPITA
LRMKMMMVMAYPSTA

SEQ ID NO: 238148 - protein, 15 aa, Artificial Sequence
  Description of Artificial Sequence: Synthetic peptide
  Seed: LRMKWMMAMKYPITA
LRMKMMMVMAYPTTA

SEQ ID NO: 238149 - protein, 15 aa, Artificial Sequence
  Description of Artificial Sequence: Synthetic peptide
  Seed: LRMKWMMAMKYPITA
LRMKMMMVMAYPVTA

SEQ ID NO: 238150 - protein, 15 aa, Artificial Sequence
  Description of Artificial Sequence: Synthetic peptide
  Seed: LRMKWMMAMKYPITA
LRMKMMMVMAYPYTA

SEQ ID NO: 238151 - protein, 15 aa, Artificial Sequence
  Description of Artificial Sequence: Synthetic peptide
  Seed: LRMKWMMAMKYPITA
LRMKMMMVMGYPATA

SEQ ID NO: 238152 - protein, 15 aa, Artificial Sequence
  Description of Artificial Sequence: Synthetic peptide
  Seed: LRMKWMMAMKYPITA
LRMKMMMVMGYPCTA

SEQ ID NO: 238153 - protein, 15 aa, Artificial Sequence
  Description of Artificial Sequence: Synthetic peptide
  Seed: LRMKWMMAMKYPITA
LRMKMMMVMGYPFTA

SEQ ID NO: 238154 - protein, 15 aa, Artificial Sequence
  Description of Artificial Sequence: Synthetic peptide
  Seed: LRMKWMMAMKYPITA
LRMKMMMVMGYPGTA

SEQ ID NO: 238155 - protein, 15 aa, Artificial Sequence
  Description of Artificial Sequence: Synthetic peptide
  Seed: LRMKWMMAMKYPITA
LRMKMMMVMGYPHTA

SEQ ID NO: 238156 - protein, 15 aa, Artificial Sequence
  Description of Artificial Sequence: Synthetic peptide
  Seed: LRMKWMMAMKYPITA
LRMKMMMVMGYPITA

SEQ ID NO: 238157 - protein, 15 aa, Artificial Sequence
  Description of Artificial Sequence: Synthetic peptide
  Seed: LRMKWMMAMKYPITA
LRMKMMMVMGYPKTA

SEQ ID NO: 238158 - protein, 15 aa, Artificial Sequence
  Description of Artificial Sequence: Synthetic peptide
  Seed: LRMKWMMAMKYPITA
LRMKMMMVMGYPLTA

SEQ ID NO: 238159 - protein, 15 aa, Artificial Sequence
  Description of Artificial Sequence: Synthetic peptide
  Seed: LRMKWMMAMKYPITA
LRMKMMMVMGYPMTA

SEQ ID NO: 238160 - protein, 15 aa, Artificial Sequence
  Description of Artificial Sequence: Synthetic peptide
  Seed: LRMKWMMAMKYPITA
LRMKMMMVMGYPNTA

SEQ ID NO: 238161 - protein, 15 aa, Artificial Sequence
  Description of Artificial Sequence: Synthetic peptide
  Seed: LRMKWMMAMKYPITA
LRMKMMMVMGYPPTA

SEQ ID NO: 238162 - protein, 15 aa, Artificial Sequence
  Description of Artificial Sequence: Synthetic peptide
  Seed: LRMKWMMAMKYPITA
LRMKMMMVMGYPQTA

SEQ ID NO: 238163 - protein, 15 aa, Artificial Sequence
  Description of Artificial Sequence: Synthetic peptide
  Seed: LRMKWMMAMKYPITA
LRMKMMMVMGYPRTA

SEQ ID NO: 238164 - protein, 15 aa, Artificial Sequence
  Description of Artificial Sequence: Synthetic peptide
  Seed: LRMKWMMAMKYPITA
LRMKMMMVMGYPSTA

SEQ ID NO: 238165 - protein, 15 aa, Artificial Sequence
  Description of Artificial Sequence: Synthetic peptide
  Seed: LRMKWMMAMKYPITA
LRMKMMMVMGYPTTA

SEQ ID NO: 238166 - protein, 15 aa, Artificial Sequence
  Description of Artificial Sequence: Synthetic peptide
  Seed: LRMKWMMAMKYPITA
LRMKMMMVMGYPVTA

SEQ ID NO: 238167 - protein, 15 aa, Artificial Sequence
  Description of Artificial Sequence: Synthetic peptide
  Seed: LRMKWMMAMKYPITA
LRMKMMMVMGYPYTA

SEQ ID NO: 238168 - protein, 15 aa, Artificial Sequence
  Description of Artificial Sequence: Synthetic peptide
  Seed: LRMKWMMAMKYPITA
LRMKMMMVMHYPATA

SEQ ID NO: 238169 - protein, 15 aa, Artificial Sequence
  Description of Artificial Sequence: Synthetic peptide
  Seed: LRMKWMMAMKYPITA
LRMKMMMVMHYPGTA

SEQ ID NO: 238170 - protein, 15 aa, Artificial Sequence
  Description of Artificial Sequence: Synthetic peptide
  Seed: LRMKWMMAMKYPITA
LRMKMMMVMHYPHTA

SEQ ID NO: 238171 - protein, 15 aa, Artificial Sequence
  Description of Artificial Sequence: Synthetic peptide
  Seed: LRMKWMMAMKYPITA
LRMKMMMVMHYPITA

SEQ ID NO: 238172 - protein, 15 aa, Artificial Sequence
  Description of Artificial Sequence: Synthetic peptide
  Seed: LRMKWMMAMKYPITA
LRMKMMMVMHYPKTA

SEQ ID NO: 238173 - protein, 15 aa, Artificial Sequence
  Description of Artificial Sequence: Synthetic peptide
  Seed: LRMKWMMAMKYPITA
LRMKMMMVMHYPLTA

SEQ ID NO: 238174 - protein, 15 aa, Artificial Sequence
  Description of Artificial Sequence: Synthetic peptide
  Seed: LRMKWMMAMKYPITA
LRMKMMMVMHYPMTA

SEQ ID NO: 238175 - protein, 15 aa, Artificial Sequence
  Description of Artificial Sequence: Synthetic peptide
  Seed: LRMKWMMAMKYPITA
LRMKMMMVMHYPQTA

SEQ ID NO: 238176 - protein, 15 aa, Artificial Sequence
  Description of Artificial Sequence: Synthetic peptide
  Seed: LRMKWMMAMKYPITA
LRMKMMMVMHYPRTA

SEQ ID NO: 238177 - protein, 15 aa, Artificial Sequence
  Description of Artificial Sequence: Synthetic peptide
  Seed: LRMKWMMAMKYPITA
LRMKMMMVMHYPSTA

SEQ ID NO: 238178 - protein, 15 aa, Artificial Sequence
  Description of Artificial Sequence: Synthetic peptide
  Seed: LRMKWMMAMKYPITA
LRMKMMMVMHYPTTA

SEQ ID NO: 238179 - protein, 15 aa, Artificial Sequence
  Description of Artificial Sequence: Synthetic peptide
  Seed: LRMKWMMAMKYPITA
LRMKMMMVMHYPVTA

SEQ ID NO: 238180 - protein, 15 aa, Artificial Sequence
  Description of Artificial Sequence: Synthetic peptide
  Seed: LRMKWMMAMKYPITA
LRMKMMMVMHYPYTA

SEQ ID NO: 238181 - protein, 15 aa, Artificial Sequence
  Description of Artificial Sequence: Synthetic peptide
  Seed: LRMKWMMAMKYPITA
LRMKMMMVMIYPGTA

SEQ ID NO: 238182 - protein, 15 aa, Artificial Sequence
  Description of Artificial Sequence: Synthetic peptide
  Seed: LRMKWMMAMKYPITA
LRMKMMMVMIYPRTA

SEQ ID NO: 238183 - protein, 15 aa, Artificial Sequence
  Description of Artificial Sequence: Synthetic peptide
  Seed: LRMKWMMAMKYPITA
LRMKMMMVMIYPSTA

SEQ ID NO: 238184 - protein, 15 aa, Artificial Sequence
  Description of Artificial Sequence: Synthetic peptide
  Seed: LRMKWMMAMKYPITA
LRMKMMMVMKYPATA

SEQ ID NO: 238185 - protein, 15 aa, Artificial Sequence
  Description of Artificial Sequence: Synthetic peptide
  Seed: LRMKWMMAMKYPITA
LRMKMMMVMKYPCTA

SEQ ID NO: 238186 - protein, 15 aa, Artificial Sequence
  Description of Artificial Sequence: Synthetic peptide
  Seed: LRMKWMMAMKYPITA
LRMKMMMVMKYPDTA

SEQ ID NO: 238187 - protein, 15 aa, Artificial Sequence
  Description of Artificial Sequence: Synthetic peptide
  Seed: LRMKWMMAMKYPITA
LRMKMMMVMKYPETA

SEQ ID NO: 238188 - protein, 15 aa, Artificial Sequence
  Description of Artificial Sequence: Synthetic peptide
  Seed: LRMKWMMAMKYPITA
LRMKMMMVMKYPFTA

SEQ ID NO: 238189 - protein, 15 aa, Artificial Sequence
  Description of Artificial Sequence: Synthetic peptide
  Seed: LRMKWMMAMKYPITA
LRMKMMMVMKYPGTA

SEQ ID NO: 238190 - protein, 15 aa, Artificial Sequence
  Description of Artificial Sequence: Synthetic peptide
  Seed: LRMKWMMAMKYPITA
LRMKMMMVMKYPHTA

SEQ ID NO: 238191 - protein, 15 aa, Artificial Sequence
  Description of Artificial Sequence: Synthetic peptide
  Seed: LRMKWMMAMKYPITA
LRMKMMMVMKYPITA

SEQ ID NO: 238192 - protein, 15 aa, Artificial Sequence
  Description of Artificial Sequence: Synthetic peptide
  Seed: LRMKWMMAMKYPITA
LRMKMMMVMKYPKTA

SEQ ID NO: 238193 - protein, 15 aa, Artificial Sequence
  Description of Artificial Sequence: Synthetic peptide
  Seed: LRMKWMMAMKYPITA
LRMKMMMVMKYPLTA

SEQ ID NO: 238194 - protein, 15 aa, Artificial Sequence
  Description of Artificial Sequence: Synthetic peptide
  Seed: LRMKWMMAMKYPITA
LRMKMMMVMKYPMTA

SEQ ID NO: 238195 - protein, 15 aa, Artificial Sequence
  Description of Artificial Sequence: Synthetic peptide
  Seed: LRMKWMMAMKYPITA
LRMKMMMVMKYPNTA

SEQ ID NO: 238196 - protein, 15 aa, Artificial Sequence
  Description of Artificial Sequence: Synthetic peptide
  Seed: LRMKWMMAMKYPITA
LRMKMMMVMKYPPTA

SEQ ID NO: 238197 - protein, 15 aa, Artificial Sequence
  Description of Artificial Sequence: Synthetic peptide
  Seed: LRMKWMMAMKYPITA
LRMKMMMVMKYPQTA

SEQ ID NO: 238198 - protein, 15 aa, Artificial Sequence
  Description of Artificial Sequence: Synthetic peptide
  Seed: LRMKWMMAMKYPITA
LRMKMMMVMKYPRTA

SEQ ID NO: 238199 - protein, 15 aa, Artificial Sequence
  Description of Artificial Sequence: Synthetic peptide
  Seed: LRMKWMMAMKYPITA
LRMKMMMVMKYPSTA

SEQ ID NO: 238200 - protein, 15 aa, Artificial Sequence
  Description of Artificial Sequence: Synthetic peptide
  Seed: LRMKWMMAMKYPITA
LRMKMMMVMKYPTTA

SEQ ID NO: 238201 - protein, 15 aa, Artificial Sequence
  Description of Artificial Sequence: Synthetic peptide
  Seed: LRMKWMMAMKYPITA
LRMKMMMVMKYPVTA

SEQ ID NO: 238202 - protein, 15 aa, Artificial Sequence
  Description of Artificial Sequence: Synthetic peptide
  Seed: LRMKWMMAMKYPITA
LRMKMMMVMKYPWTA

SEQ ID NO: 238203 - protein, 15 aa, Artificial Sequence
  Description of Artificial Sequence: Synthetic peptide
  Seed: LRMKWMMAMKYPITA
LRMKMMMVMKYPYTA

SEQ ID NO: 238204 - protein, 15 aa, Artificial Sequence
  Description of Artificial Sequence: Synthetic peptide
  Seed: LRMKWMMAMKYPITA
LRMKMMMVMMYPRTA

SEQ ID NO: 238205 - protein, 15 aa, Artificial Sequence
  Description of Artificial Sequence: Synthetic peptide
  Seed: LRMKWMMAMKYPITA
LRMKMMMVMNYPATA

SEQ ID NO: 238206 - protein, 15 aa, Artificial Sequence
  Description of Artificial Sequence: Synthetic peptide
  Seed: LRMKWMMAMKYPITA
LRMKMMMVMNYPDTA

SEQ ID NO: 238207 - protein, 15 aa, Artificial Sequence
  Description of Artificial Sequence: Synthetic peptide
  Seed: LRMKWMMAMKYPITA
LRMKMMMVMNYPETA

SEQ ID NO: 238208 - protein, 15 aa, Artificial Sequence
  Description of Artificial Sequence: Synthetic peptide
  Seed: LRMKWMMAMKYPITA
LRMKMMMVMNYPGTA

SEQ ID NO: 238209 - protein, 15 aa, Artificial Sequence
  Description of Artificial Sequence: Synthetic peptide
  Seed: LRMKWMMAMKYPITA
LRMKMMMVMNYPITA

SEQ ID NO: 238210 - protein, 15 aa, Artificial Sequence
  Description of Artificial Sequence: Synthetic peptide
  Seed: LRMKWMMAMKYPITA
LRMKMMMVMNYPLTA

SEQ ID NO: 238211 - protein, 15 aa, Artificial Sequence
  Description of Artificial Sequence: Synthetic peptide
  Seed: LRMKWMMAMKYPITA
LRMKMMMVMNYPMTA

SEQ ID NO: 238212 - protein, 15 aa, Artificial Sequence
  Description of Artificial Sequence: Synthetic peptide
  Seed: LRMKWMMAMKYPITA
LRMKMMMVMNYPNTA

SEQ ID NO: 238213 - protein, 15 aa, Artificial Sequence
  Description of Artificial Sequence: Synthetic peptide
  Seed: LRMKWMMAMKYPITA
LRMKMMMVMNYPRTA

SEQ ID NO: 238214 - protein, 15 aa, Artificial Sequence
  Description of Artificial Sequence: Synthetic peptide
  Seed: LRMKWMMAMKYPITA
LRMKMMMVMNYPSTA

SEQ ID NO: 238215 - protein, 15 aa, Artificial Sequence
  Description of Artificial Sequence: Synthetic peptide
  Seed: LRMKWMMAMKYPITA
LRMKMMMVMNYPTTA

SEQ ID NO: 238216 - protein, 15 aa, Artificial Sequence
  Description of Artificial Sequence: Synthetic peptide
  Seed: LRMKWMMAMKYPITA
LRMKMMMVMNYPVTA

SEQ ID NO: 238217 - protein, 15 aa, Artificial Sequence
  Description of Artificial Sequence: Synthetic peptide
  Seed: LRMKWMMAMKYPITA
LRMKMMMVMNYPYTA

SEQ ID NO: 238218 - protein, 15 aa, Artificial Sequence
  Description of Artificial Sequence: Synthetic peptide
  Seed: LRMKWMMAMKYPITA
LRMKMMMVMPYPATA

SEQ ID NO: 238219 - protein, 15 aa, Artificial Sequence
  Description of Artificial Sequence: Synthetic peptide
  Seed: LRMKWMMAMKYPITA
LRMKMMMVMPYPCTA

SEQ ID NO: 238220 - protein, 15 aa, Artificial Sequence
  Description of Artificial Sequence: Synthetic peptide
  Seed: LRMKWMMAMKYPITA
LRMKMMMVMPYPDTA

SEQ ID NO: 238221 - protein, 15 aa, Artificial Sequence
  Description of Artificial Sequence: Synthetic peptide
  Seed: LRMKWMMAMKYPITA
LRMKMMMVMPYPETA

SEQ ID NO: 238222 - protein, 15 aa, Artificial Sequence
  Description of Artificial Sequence: Synthetic peptide
  Seed: LRMKWMMAMKYPITA
LRMKMMMVMPYPFTA

SEQ ID NO: 238223 - protein, 15 aa, Artificial Sequence
  Description of Artificial Sequence: Synthetic peptide
  Seed: LRMKWMMAMKYPITA
LRMKMMMVMPYPGTA

SEQ ID NO: 238224 - protein, 15 aa, Artificial Sequence
  Description of Artificial Sequence: Synthetic peptide
  Seed: LRMKWMMAMKYPITA
LRMKMMMVMPYPHTA

SEQ ID NO: 238225 - protein, 15 aa, Artificial Sequence
  Description of Artificial Sequence: Synthetic peptide
  Seed: LRMKWMMAMKYPITA
LRMKMMMVMPYPITA

SEQ ID NO: 238226 - protein, 15 aa, Artificial Sequence
  Description of Artificial Sequence: Synthetic peptide
  Seed: LRMKWMMAMKYPITA
LRMKMMMVMPYPKTA

SEQ ID NO: 238227 - protein, 15 aa, Artificial Sequence
  Description of Artificial Sequence: Synthetic peptide
  Seed: LRMKWMMAMKYPITA
LRMKMMMVMPYPLTA

SEQ ID NO: 238228 - protein, 15 aa, Artificial Sequence
  Description of Artificial Sequence: Synthetic peptide
  Seed: LRMKWMMAMKYPITA
LRMKMMMVMPYPMTA

SEQ ID NO: 238229 - protein, 15 aa, Artificial Sequence
  Description of Artificial Sequence: Synthetic peptide
  Seed: LRMKWMMAMKYPITA
LRMKMMMVMPYPNTA

SEQ ID NO: 238230 - protein, 15 aa, Artificial Sequence
  Description of Artificial Sequence: Synthetic peptide
  Seed: LRMKWMMAMKYPITA
LRMKMMMVMPYPPTA

SEQ ID NO: 238231 - protein, 15 aa, Artificial Sequence
  Description of Artificial Sequence: Synthetic peptide
  Seed: LRMKWMMAMKYPITA
LRMKMMMVMPYPQTA

SEQ ID NO: 238232 - protein, 15 aa, Artificial Sequence
  Description of Artificial Sequence: Synthetic peptide
  Seed: LRMKWMMAMKYPITA
LRMKMMMVMPYPRTA

SEQ ID NO: 238233 - protein, 15 aa, Artificial Sequence
  Description of Artificial Sequence: Synthetic peptide
  Seed: LRMKWMMAMKYPITA
LRMKMMMVMPYPSTA

SEQ ID NO: 238234 - protein, 15 aa, Artificial Sequence
  Description of Artificial Sequence: Synthetic peptide
  Seed: LRMKWMMAMKYPITA
LRMKMMMVMPYPTTA

SEQ ID NO: 238235 - protein, 15 aa, Artificial Sequence
  Description of Artificial Sequence: Synthetic peptide
  Seed: LRMKWMMAMKYPITA
LRMKMMMVMPYPVTA

SEQ ID NO: 238236 - protein, 15 aa, Artificial Sequence
  Description of Artificial Sequence: Synthetic peptide
  Seed: LRMKWMMAMKYPITA
LRMKMMMVMPYPWTA

SEQ ID NO: 238237 - protein, 15 aa, Artificial Sequence
  Description of Artificial Sequence: Synthetic peptide
  Seed: LRMKWMMAMKYPITA
LRMKMMMVMPYPYTA

SEQ ID NO: 238238 - protein, 15 aa, Artificial Sequence
  Description of Artificial Sequence: Synthetic peptide
  Seed: LRMKWMMAMKYPITA
LRMKMMMVMQYPKTA

SEQ ID NO: 238239 - protein, 15 aa, Artificial Sequence
  Description of Artificial Sequence: Synthetic peptide
  Seed: LRMKWMMAMKYPITA
LRMKMMMVMQYPRTA

SEQ ID NO: 238240 - protein, 15 aa, Artificial Sequence
  Description of Artificial Sequence: Synthetic peptide
  Seed: LRMKWMMAMKYPITA
LRMKMMMVMRYPATA

SEQ ID NO: 238241 - protein, 15 aa, Artificial Sequence
  Description of Artificial Sequence: Synthetic peptide
  Seed: LRMKWMMAMKYPITA
LRMKMMMVMRYPCTA

SEQ ID NO: 238242 - protein, 15 aa, Artificial Sequence
  Description of Artificial Sequence: Synthetic peptide
  Seed: LRMKWMMAMKYPITA
LRMKMMMVMRYPDTA

SEQ ID NO: 238243 - protein, 15 aa, Artificial Sequence
  Description of Artificial Sequence: Synthetic peptide
  Seed: LRMKWMMAMKYPITA
LRMKMMMVMRYPETA

SEQ ID NO: 238244 - protein, 15 aa, Artificial Sequence
  Description of Artificial Sequence: Synthetic peptide
  Seed: LRMKWMMAMKYPITA
LRMKMMMVMRYPFTA

SEQ ID NO: 238245 - protein, 15 aa, Artificial Sequence
  Description of Artificial Sequence: Synthetic peptide
  Seed: LRMKWMMAMKYPITA
LRMKMMMVMRYPGTA

SEQ ID NO: 238246 - protein, 15 aa, Artificial Sequence
  Description of Artificial Sequence: Synthetic peptide
  Seed: LRMKWMMAMKYPITA
LRMKMMMVMRYPHTA

SEQ ID NO: 238247 - protein, 15 aa, Artificial Sequence
  Description of Artificial Sequence: Synthetic peptide
  Seed: LRMKWMMAMKYPITA
LRMKMMMVMRYPITA

SEQ ID NO: 238248 - protein, 15 aa, Artificial Sequence
  Description of Artificial Sequence: Synthetic peptide
  Seed: LRMKWMMAMKYPITA
LRMKMMMVMRYPKTA

SEQ ID NO: 238249 - protein, 15 aa, Artificial Sequence
  Description of Artificial Sequence: Synthetic peptide
  Seed: LRMKWMMAMKYPITA
LRMKMMMVMRYPLTA

SEQ ID NO: 238250 - protein, 15 aa, Artificial Sequence
  Description of Artificial Sequence: Synthetic peptide
  Seed: LRMKWMMAMKYPITA
LRMKMMMVMRYPMTA

SEQ ID NO: 238251 - protein, 15 aa, Artificial Sequence
  Description of Artificial Sequence: Synthetic peptide
  Seed: LRMKWMMAMKYPITA
LRMKMMMVMRYPNTA

SEQ ID NO: 238252 - protein, 15 aa, Artificial Sequence
  Description of Artificial Sequence: Synthetic peptide
  Seed: LRMKWMMAMKYPITA
LRMKMMMVMRYPPTA

SEQ ID NO: 238253 - protein, 15 aa, Artificial Sequence
  Description of Artificial Sequence: Synthetic peptide
  Seed: LRMKWMMAMKYPITA
LRMKMMMVMRYPQTA

SEQ ID NO: 238254 - protein, 15 aa, Artificial Sequence
  Description of Artificial Sequence: Synthetic peptide
  Seed: LRMKWMMAMKYPITA
LRMKMMMVMRYPRTA

SEQ ID NO: 238255 - protein, 15 aa, Artificial Sequence
  Description of Artificial Sequence: Synthetic peptide
  Seed: LRMKWMMAMKYPITA
LRMKMMMVMRYPSTA

SEQ ID NO: 238256 - protein, 15 aa, Artificial Sequence
  Description of Artificial Sequence: Synthetic peptide
  Seed: LRMKWMMAMKYPITA
LRMKMMMVMRYPTTA

SEQ ID NO: 238257 - protein, 15 aa, Artificial Sequence
  Description of Artificial Sequence: Synthetic peptide
  Seed: LRMKWMMAMKYPITA
LRMKMMMVMRYPVTA

SEQ ID NO: 238258 - protein, 15 aa, Artificial Sequence
  Description of Artificial Sequence: Synthetic peptide
  Seed: LRMKWMMAMKYPITA
LRMKMMMVMRYPWTA

SEQ ID NO: 238259 - protein, 15 aa, Artificial Sequence
  Description of Artificial Sequence: Synthetic peptide
  Seed: LRMKWMMAMKYPITA
LRMKMMMVMRYPYTA

SEQ ID NO: 238260 - protein, 15 aa, Artificial Sequence
  Description of Artificial Sequence: Synthetic peptide
  Seed: LRMKWMMAMKYPITA
LRMKMMMVMSYPATA

SEQ ID NO: 238261 - protein, 15 aa, Artificial Sequence
  Description of Artificial Sequence: Synthetic peptide
  Seed: LRMKWMMAMKYPITA
LRMKMMMVMSYPCTA

SEQ ID NO: 238262 - protein, 15 aa, Artificial Sequence
  Description of Artificial Sequence: Synthetic peptide
  Seed: LRMKWMMAMKYPITA
LRMKMMMVMSYPDTA

SEQ ID NO: 238263 - protein, 15 aa, Artificial Sequence
  Description of Artificial Sequence: Synthetic peptide
  Seed: LRMKWMMAMKYPITA
LRMKMMMVMSYPETA

SEQ ID NO: 238264 - protein, 15 aa, Artificial Sequence
  Description of Artificial Sequence: Synthetic peptide
  Seed: LRMKWMMAMKYPITA
LRMKMMMVMSYPFTA

SEQ ID NO: 238265 - protein, 15 aa, Artificial Sequence
  Description of Artificial Sequence: Synthetic peptide
  Seed: LRMKWMMAMKYPITA
LRMKMMMVMSYPGTA

SEQ ID NO: 238266 - protein, 15 aa, Artificial Sequence
  Description of Artificial Sequence: Synthetic peptide
  Seed: LRMKWMMAMKYPITA
LRMKMMMVMSYPHTA

SEQ ID NO: 238267 - protein, 15 aa, Artificial Sequence
  Description of Artificial Sequence: Synthetic peptide
  Seed: LRMKWMMAMKYPITA
LRMKMMMVMSYPITA

SEQ ID NO: 238268 - protein, 15 aa, Artificial Sequence
  Description of Artificial Sequence: Synthetic peptide
  Seed: LRMKWMMAMKYPITA
LRMKMMMVMSYPKTA

SEQ ID NO: 238269 - protein, 15 aa, Artificial Sequence
  Description of Artificial Sequence: Synthetic peptide
  Seed: LRMKWMMAMKYPITA
LRMKMMMVMSYPLTA

SEQ ID NO: 238270 - protein, 15 aa, Artificial Sequence
  Description of Artificial Sequence: Synthetic peptide
  Seed: LRMKWMMAMKYPITA
LRMKMMMVMSYPMTA

SEQ ID NO: 238271 - protein, 15 aa, Artificial Sequence
  Description of Artificial Sequence: Synthetic peptide
  Seed: LRMKWMMAMKYPITA
LRMKMMMVMSYPNTA

SEQ ID NO: 238272 - protein, 15 aa, Artificial Sequence
  Description of Artificial Sequence: Synthetic peptide
  Seed: LRMKWMMAMKYPITA
LRMKMMMVMSYPPTA

SEQ ID NO: 238273 - protein, 15 aa, Artificial Sequence
  Description of Artificial Sequence: Synthetic peptide
  Seed: LRMKWMMAMKYPITA
LRMKMMMVMSYPQTA

SEQ ID NO: 238274 - protein, 15 aa, Artificial Sequence
  Description of Artificial Sequence: Synthetic peptide
  Seed: LRMKWMMAMKYPITA
LRMKMMMVMSYPRTA

SEQ ID NO: 238275 - protein, 15 aa, Artificial Sequence
  Description of Artificial Sequence: Synthetic peptide
  Seed: LRMKWMMAMKYPITA
LRMKMMMVMSYPSTA

SEQ ID NO: 238276 - protein, 15 aa, Artificial Sequence
  Description of Artificial Sequence: Synthetic peptide
  Seed: LRMKWMMAMKYPITA
LRMKMMMVMSYPTTA

SEQ ID NO: 238277 - protein, 15 aa, Artificial Sequence
  Description of Artificial Sequence: Synthetic peptide
  Seed: LRMKWMMAMKYPITA
LRMKMMMVMSYPVTA

SEQ ID NO: 238278 - protein, 15 aa, Artificial Sequence
  Description of Artificial Sequence: Synthetic peptide
  Seed: LRMKWMMAMKYPITA
LRMKMMMVMSYPYTA

SEQ ID NO: 238279 - protein, 15 aa, Artificial Sequence
  Description of Artificial Sequence: Synthetic peptide
  Seed: LRMKWMMAMKYPITA
LRMKMMMVMTYPATA

SEQ ID NO: 238280 - protein, 15 aa, Artificial Sequence
  Description of Artificial Sequence: Synthetic peptide
  Seed: LRMKWMMAMKYPITA
LRMKMMMVMTYPCTA

SEQ ID NO: 238281 - protein, 15 aa, Artificial Sequence
  Description of Artificial Sequence: Synthetic peptide
  Seed: LRMKWMMAMKYPITA
LRMKMMMVMTYPDTA

SEQ ID NO: 238282 - protein, 15 aa, Artificial Sequence
  Description of Artificial Sequence: Synthetic peptide
  Seed: LRMKWMMAMKYPITA
LRMKMMMVMTYPETA

SEQ ID NO: 238283 - protein, 15 aa, Artificial Sequence
  Description of Artificial Sequence: Synthetic peptide
  Seed: LRMKWMMAMKYPITA
LRMKMMMVMTYPFTA

SEQ ID NO: 238284 - protein, 15 aa, Artificial Sequence
  Description of Artificial Sequence: Synthetic peptide
  Seed: LRMKWMMAMKYPITA
LRMKMMMVMTYPGTA

SEQ ID NO: 238285 - protein, 15 aa, Artificial Sequence
  Description of Artificial Sequence: Synthetic peptide
  Seed: LRMKWMMAMKYPITA
LRMKMMMVMTYPHTA

SEQ ID NO: 238286 - protein, 15 aa, Artificial Sequence
  Description of Artificial Sequence: Synthetic peptide
  Seed: LRMKWMMAMKYPITA
LRMKMMMVMTYPITA

SEQ ID NO: 238287 - protein, 15 aa, Artificial Sequence
  Description of Artificial Sequence: Synthetic peptide
  Seed: LRMKWMMAMKYPITA
LRMKMMMVMTYPKTA

SEQ ID NO: 238288 - protein, 15 aa, Artificial Sequence
  Description of Artificial Sequence: Synthetic peptide
  Seed: LRMKWMMAMKYPITA
LRMKMMMVMTYPLTA

SEQ ID NO: 238289 - protein, 15 aa, Artificial Sequence
  Description of Artificial Sequence: Synthetic peptide
  Seed: LRMKWMMAMKYPITA
LRMKMMMVMTYPMTA

SEQ ID NO: 238290 - protein, 15 aa, Artificial Sequence
  Description of Artificial Sequence: Synthetic peptide
  Seed: LRMKWMMAMKYPITA
LRMKMMMVMTYPNTA

SEQ ID NO: 238291 - protein, 15 aa, Artificial Sequence
  Description of Artificial Sequence: Synthetic peptide
  Seed: LRMKWMMAMKYPITA
LRMKMMMVMTYPPTA

SEQ ID NO: 238292 - protein, 15 aa, Artificial Sequence
  Description of Artificial Sequence: Synthetic peptide
  Seed: LRMKWMMAMKYPITA
LRMKMMMVMTYPQTA

SEQ ID NO: 238293 - protein, 15 aa, Artificial Sequence
  Description of Artificial Sequence: Synthetic peptide
  Seed: LRMKWMMAMKYPITA
LRMKMMMVMTYPRTA

SEQ ID NO: 238294 - protein, 15 aa, Artificial Sequence
  Description of Artificial Sequence: Synthetic peptide
  Seed: LRMKWMMAMKYPITA
LRMKMMMVMTYPSTA

SEQ ID NO: 238295 - protein, 15 aa, Artificial Sequence
  Description of Artificial Sequence: Synthetic peptide
  Seed: LRMKWMMAMKYPITA
LRMKMMMVMTYPTTA

SEQ ID NO: 238296 - protein, 15 aa, Artificial Sequence
  Description of Artificial Sequence: Synthetic peptide
  Seed: LRMKWMMAMKYPITA
LRMKMMMVMTYPVTA

SEQ ID NO: 238297 - protein, 15 aa, Artificial Sequence
  Description of Artificial Sequence: Synthetic peptide
  Seed: LRMKWMMAMKYPITA
LRMKMMMVMTYPYTA

SEQ ID NO: 238298 - protein, 15 aa, Artificial Sequence
  Description of Artificial Sequence: Synthetic peptide
  Seed: LRMKWMMAMKYPITA
LRMKMMMVMVYPATA

SEQ ID NO: 238299 - protein, 15 aa, Artificial Sequence
  Description of Artificial Sequence: Synthetic peptide
  Seed: LRMKWMMAMKYPITA
LRMKMMMVMVYPDTA

SEQ ID NO: 238300 - protein, 15 aa, Artificial Sequence
  Description of Artificial Sequence: Synthetic peptide
  Seed: LRMKWMMAMKYPITA
LRMKMMMVMVYPGTA

SEQ ID NO: 238301 - protein, 15 aa, Artificial Sequence
  Description of Artificial Sequence: Synthetic peptide
  Seed: LRMKWMMAMKYPITA
LRMKMMMVMVYPITA

SEQ ID NO: 238302 - protein, 15 aa, Artificial Sequence
  Description of Artificial Sequence: Synthetic peptide
  Seed: LRMKWMMAMKYPITA
LRMKMMMVMVYPLTA

SEQ ID NO: 238303 - protein, 15 aa, Artificial Sequence
  Description of Artificial Sequence: Synthetic peptide
  Seed: LRMKWMMAMKYPITA
LRMKMMMVMVYPMTA

SEQ ID NO: 238304 - protein, 15 aa, Artificial Sequence
  Description of Artificial Sequence: Synthetic peptide
  Seed: LRMKWMMAMKYPITA
LRMKMMMVMVYPNTA

SEQ ID NO: 238305 - protein, 15 aa, Artificial Sequence
  Description of Artificial Sequence: Synthetic peptide
  Seed: LRMKWMMAMKYPITA
LRMKMMMVMVYPRTA

SEQ ID NO: 238306 - protein, 15 aa, Artificial Sequence
  Description of Artificial Sequence: Synthetic peptide
  Seed: LRMKWMMAMKYPITA
LRMKMMMVMVYPSTA

SEQ ID NO: 238307 - protein, 15 aa, Artificial Sequence
  Description of Artificial Sequence: Synthetic peptide
  Seed: LRMKWMMAMKYPITA
LRMKMMMVMVYPTTA

SEQ ID NO: 238308 - protein, 15 aa, Artificial Sequence
  Description of Artificial Sequence: Synthetic peptide
  Seed: LRMKWMMAMKYPITA
LRMKMMMVMVYPVTA

SEQ ID NO: 238309 - protein, 15 aa, Artificial Sequence
  Description of Artificial Sequence: Synthetic peptide
  Seed: LRMKWMMAMKYPITA
LRMKMMMVMYYPATA

SEQ ID NO: 238310 - protein, 15 aa, Artificial Sequence
  Description of Artificial Sequence: Synthetic peptide
  Seed: LRMKWMMAMKYPITA
LRMKMMMWMAYPATA

SEQ ID NO: 238311 - protein, 15 aa, Artificial Sequence
  Description of Artificial Sequence: Synthetic peptide
  Seed: LRMKWMMAMKYPITA
LRMKMMMWMAYPFTA

SEQ ID NO: 238312 - protein, 15 aa, Artificial Sequence
  Description of Artificial Sequence: Synthetic peptide
  Seed: LRMKWMMAMKYPITA
LRMKMMMWMAYPITA

SEQ ID NO: 238313 - protein, 15 aa, Artificial Sequence
  Description of Artificial Sequence: Synthetic peptide
  Seed: LRMKWMMAMKYPITA
LRMKMMMWMAYPLTA

SEQ ID NO: 238314 - protein, 15 aa, Artificial Sequence
  Description of Artificial Sequence: Synthetic peptide
  Seed: LRMKWMMAMKYPITA
LRMKMMMWMAYPMTA

SEQ ID NO: 238315 - protein, 15 aa, Artificial Sequence
  Description of Artificial Sequence: Synthetic peptide
  Seed: LRMKWMMAMKYPITA
LRMKMMMWMAYPRTA

SEQ ID NO: 238316 - protein, 15 aa, Artificial Sequence
  Description of Artificial Sequence: Synthetic peptide
  Seed: LRMKWMMAMKYPITA
LRMKMMMWMAYPSTA

SEQ ID NO: 238317 - protein, 15 aa, Artificial Sequence
  Description of Artificial Sequence: Synthetic peptide
  Seed: LRMKWMMAMKYPITA
LRMKMMMWMAYPTTA

SEQ ID NO: 238318 - protein, 15 aa, Artificial Sequence
  Description of Artificial Sequence: Synthetic peptide
  Seed: LRMKWMMAMKYPITA
LRMKMMMWMAYPVTA

SEQ ID NO: 238319 - protein, 15 aa, Artificial Sequence
  Description of Artificial Sequence: Synthetic peptide
  Seed: LRMKWMMAMKYPITA
LRMKMMMWMAYPYTA

SEQ ID NO: 238320 - protein, 15 aa, Artificial Sequence
  Description of Artificial Sequence: Synthetic peptide
  Seed: LRMKWMMAMKYPITA
LRMKMMMWMGYPITA

SEQ ID NO: 238321 - protein, 15 aa, Artificial Sequence
  Description of Artificial Sequence: Synthetic peptide
  Seed: LRMKWMMAMKYPITA
LRMKMMMWMGYPLTA

SEQ ID NO: 238322 - protein, 15 aa, Artificial Sequence
  Description of Artificial Sequence: Synthetic peptide
  Seed: LRMKWMMAMKYPITA
LRMKMMMWMGYPVTA

SEQ ID NO: 238323 - protein, 15 aa, Artificial Sequence
  Description of Artificial Sequence: Synthetic peptide
  Seed: LRMKWMMAMKYPITA
LRMKMMMWMHYPFTA

SEQ ID NO: 238324 - protein, 15 aa, Artificial Sequence
  Description of Artificial Sequence: Synthetic peptide
  Seed: LRMKWMMAMKYPITA
LRMKMMMWMHYPITA

SEQ ID NO: 238325 - protein, 15 aa, Artificial Sequence
  Description of Artificial Sequence: Synthetic peptide
  Seed: LRMKWMMAMKYPITA
LRMKMMMWMHYPLTA

SEQ ID NO: 238326 - protein, 15 aa, Artificial Sequence
  Description of Artificial Sequence: Synthetic peptide
  Seed: LRMKWMMAMKYPITA
LRMKMMMWMHYPMTA

SEQ ID NO: 238327 - protein, 15 aa, Artificial Sequence
  Description of Artificial Sequence: Synthetic peptide
  Seed: LRMKWMMAMKYPITA
LRMKMMMWMHYPRTA

SEQ ID NO: 238328 - protein, 15 aa, Artificial Sequence
  Description of Artificial Sequence: Synthetic peptide
  Seed: LRMKWMMAMKYPITA
LRMKMMMWMHYPVTA

SEQ ID NO: 238329 - protein, 15 aa, Artificial Sequence
  Description of Artificial Sequence: Synthetic peptide
  Seed: LRMKWMMAMKYPITA
LRMKMMMWMHYPYTA

SEQ ID NO: 238330 - protein, 15 aa, Artificial Sequence
  Description of Artificial Sequence: Synthetic peptide
  Seed: LRMKWMMAMKYPITA
LRMKMMMWMIYPSTA

SEQ ID NO: 238331 - protein, 15 aa, Artificial Sequence
  Description of Artificial Sequence: Synthetic peptide
  Seed: LRMKWMMAMKYPITA
LRMKMMMWMKYPATA

SEQ ID NO: 238332 - protein, 15 aa, Artificial Sequence
  Description of Artificial Sequence: Synthetic peptide
  Seed: LRMKWMMAMKYPITA
LRMKMMMWMKYPETA

SEQ ID NO: 238333 - protein, 15 aa, Artificial Sequence
  Description of Artificial Sequence: Synthetic peptide
  Seed: LRMKWMMAMKYPITA
LRMKMMMWMKYPFTA

SEQ ID NO: 238334 - protein, 15 aa, Artificial Sequence
  Description of Artificial Sequence: Synthetic peptide
  Seed: LRMKWMMAMKYPITA
LRMKMMMWMKYPGTA

SEQ ID NO: 238335 - protein, 15 aa, Artificial Sequence
  Description of Artificial Sequence: Synthetic peptide
  Seed: LRMKWMMAMKYPITA
LRMKMMMWMKYPHTA

SEQ ID NO: 238336 - protein, 15 aa, Artificial Sequence
  Description of Artificial Sequence: Synthetic peptide
  Seed: LRMKWMMAMKYPITA
LRMKMMMWMKYPITA

SEQ ID NO: 238337 - protein, 15 aa, Artificial Sequence
  Description of Artificial Sequence: Synthetic peptide
  Seed: LRMKWMMAMKYPITA
LRMKMMMWMKYPKTA

SEQ ID NO: 238338 - protein, 15 aa, Artificial Sequence
  Description of Artificial Sequence: Synthetic peptide
  Seed: LRMKWMMAMKYPITA
LRMKMMMWMKYPLTA

SEQ ID NO: 238339 - protein, 15 aa, Artificial Sequence
  Description of Artificial Sequence: Synthetic peptide
  Seed: LRMKWMMAMKYPITA
LRMKMMMWMKYPMTA

SEQ ID NO: 238340 - protein, 15 aa, Artificial Sequence
  Description of Artificial Sequence: Synthetic peptide
  Seed: LRMKWMMAMKYPITA
LRMKMMMWMKYPPTA

SEQ ID NO: 238341 - protein, 15 aa, Artificial Sequence
  Description of Artificial Sequence: Synthetic peptide
  Seed: LRMKWMMAMKYPITA
LRMKMMMWMKYPQTA

SEQ ID NO: 238342 - protein, 15 aa, Artificial Sequence
  Description of Artificial Sequence: Synthetic peptide
  Seed: LRMKWMMAMKYPITA
LRMKMMMWMKYPRTA

SEQ ID NO: 238343 - protein, 15 aa, Artificial Sequence
  Description of Artificial Sequence: Synthetic peptide
  Seed: LRMKWMMAMKYPITA
LRMKMMMWMKYPSTA

SEQ ID NO: 238344 - protein, 15 aa, Artificial Sequence
  Description of Artificial Sequence: Synthetic peptide
  Seed: LRMKWMMAMKYPITA
LRMKMMMWMKYPTTA

SEQ ID NO: 238345 - protein, 15 aa, Artificial Sequence
  Description of Artificial Sequence: Synthetic peptide
  Seed: LRMKWMMAMKYPITA
LRMKMMMWMKYPVTA

SEQ ID NO: 238346 - protein, 15 aa, Artificial Sequence
  Description of Artificial Sequence: Synthetic peptide
  Seed: LRMKWMMAMKYPITA
LRMKMMMWMKYPYTA

SEQ ID NO: 238347 - protein, 15 aa, Artificial Sequence
  Description of Artificial Sequence: Synthetic peptide
  Seed: LRMKWMMAMKYPITA
LRMKMMMWMNYPYTA

SEQ ID NO: 238348 - protein, 15 aa, Artificial Sequence
  Description of Artificial Sequence: Synthetic peptide
  Seed: LRMKWMMAMKYPITA
LRMKMMMWMPYPATA

SEQ ID NO: 238349 - protein, 15 aa, Artificial Sequence
  Description of Artificial Sequence: Synthetic peptide
  Seed: LRMKWMMAMKYPITA
LRMKMMMWMPYPFTA

SEQ ID NO: 238350 - protein, 15 aa, Artificial Sequence
  Description of Artificial Sequence: Synthetic peptide
  Seed: LRMKWMMAMKYPITA
LRMKMMMWMPYPITA

SEQ ID NO: 238351 - protein, 15 aa, Artificial Sequence
  Description of Artificial Sequence: Synthetic peptide
  Seed: LRMKWMMAMKYPITA
LRMKMMMWMPYPLTA

SEQ ID NO: 238352 - protein, 15 aa, Artificial Sequence
  Description of Artificial Sequence: Synthetic peptide
  Seed: LRMKWMMAMKYPITA
LRMKMMMWMPYPRTA

SEQ ID NO: 238353 - protein, 15 aa, Artificial Sequence
  Description of Artificial Sequence: Synthetic peptide
  Seed: LRMKWMMAMKYPITA
LRMKMMMWMPYPVTA

SEQ ID NO: 238354 - protein, 15 aa, Artificial Sequence
  Description of Artificial Sequence: Synthetic peptide
  Seed: LRMKWMMAMKYPITA
LRMKMMMWMPYPYTA

SEQ ID NO: 238355 - protein, 15 aa, Artificial Sequence
  Description of Artificial Sequence: Synthetic peptide
  Seed: LRMKWMMAMKYPITA
LRMKMMMWMRYPATA

SEQ ID NO: 238356 - protein, 15 aa, Artificial Sequence
  Description of Artificial Sequence: Synthetic peptide
  Seed: LRMKWMMAMKYPITA
LRMKMMMWMRYPDTA

SEQ ID NO: 238357 - protein, 15 aa, Artificial Sequence
  Description of Artificial Sequence: Synthetic peptide
  Seed: LRMKWMMAMKYPITA
LRMKMMMWMRYPETA

SEQ ID NO: 238358 - protein, 15 aa, Artificial Sequence
  Description of Artificial Sequence: Synthetic peptide
  Seed: LRMKWMMAMKYPITA
LRMKMMMWMRYPFTA

SEQ ID NO: 238359 - protein, 15 aa, Artificial Sequence
  Description of Artificial Sequence: Synthetic peptide
  Seed: LRMKWMMAMKYPITA
LRMKMMMWMRYPGTA

SEQ ID NO: 238360 - protein, 15 aa, Artificial Sequence
  Description of Artificial Sequence: Synthetic peptide
  Seed: LRMKWMMAMKYPITA
LRMKMMMWMRYPHTA

SEQ ID NO: 238361 - protein, 15 aa, Artificial Sequence
  Description of Artificial Sequence: Synthetic peptide
  Seed: LRMKWMMAMKYPITA
LRMKMMMWMRYPITA

SEQ ID NO: 238362 - protein, 15 aa, Artificial Sequence
  Description of Artificial Sequence: Synthetic peptide
  Seed: LRMKWMMAMKYPITA
LRMKMMMWMRYPKTA

SEQ ID NO: 238363 - protein, 15 aa, Artificial Sequence
  Description of Artificial Sequence: Synthetic peptide
  Seed: LRMKWMMAMKYPITA
LRMKMMMWMRYPLTA

SEQ ID NO: 238364 - protein, 15 aa, Artificial Sequence
  Description of Artificial Sequence: Synthetic peptide
  Seed: LRMKWMMAMKYPITA
LRMKMMMWMRYPMTA

SEQ ID NO: 238365 - protein, 15 aa, Artificial Sequence
  Description of Artificial Sequence: Synthetic peptide
  Seed: LRMKWMMAMKYPITA
LRMKMMMWMRYPNTA

SEQ ID NO: 238366 - protein, 15 aa, Artificial Sequence
  Description of Artificial Sequence: Synthetic peptide
  Seed: LRMKWMMAMKYPITA
LRMKMMMWMRYPPTA

SEQ ID NO: 238367 - protein, 15 aa, Artificial Sequence
  Description of Artificial Sequence: Synthetic peptide
  Seed: LRMKWMMAMKYPITA
LRMKMMMWMRYPQTA

SEQ ID NO: 238368 - protein, 15 aa, Artificial Sequence
  Description of Artificial Sequence: Synthetic peptide
  Seed: LRMKWMMAMKYPITA
LRMKMMMWMRYPRTA

SEQ ID NO: 238369 - protein, 15 aa, Artificial Sequence
  Description of Artificial Sequence: Synthetic peptide
  Seed: LRMKWMMAMKYPITA
LRMKMMMWMRYPSTA

SEQ ID NO: 238370 - protein, 15 aa, Artificial Sequence
  Description of Artificial Sequence: Synthetic peptide
  Seed: LRMKWMMAMKYPITA
LRMKMMMWMRYPTTA

SEQ ID NO: 238371 - protein, 15 aa, Artificial Sequence
  Description of Artificial Sequence: Synthetic peptide
  Seed: LRMKWMMAMKYPITA
LRMKMMMWMRYPVTA

SEQ ID NO: 238372 - protein, 15 aa, Artificial Sequence
  Description of Artificial Sequence: Synthetic peptide
  Seed: LRMKWMMAMKYPITA
LRMKMMMWMRYPWTA

SEQ ID NO: 238373 - protein, 15 aa, Artificial Sequence
  Description of Artificial Sequence: Synthetic peptide
  Seed: LRMKWMMAMKYPITA
LRMKMMMWMRYPYTA

SEQ ID NO: 238374 - protein, 15 aa, Artificial Sequence
  Description of Artificial Sequence: Synthetic peptide
  Seed: LRMKWMMAMKYPITA
LRMKMMMWMSYPATA

SEQ ID NO: 238375 - protein, 15 aa, Artificial Sequence
  Description of Artificial Sequence: Synthetic peptide
  Seed: LRMKWMMAMKYPITA
LRMKMMMWMSYPITA

SEQ ID NO: 238376 - protein, 15 aa, Artificial Sequence
  Description of Artificial Sequence: Synthetic peptide
  Seed: LRMKWMMAMKYPITA
LRMKMMMWMSYPLTA

SEQ ID NO: 238377 - protein, 15 aa, Artificial Sequence
  Description of Artificial Sequence: Synthetic peptide
  Seed: LRMKWMMAMKYPITA
LRMKMMMWMSYPRTA

SEQ ID NO: 238378 - protein, 15 aa, Artificial Sequence
  Description of Artificial Sequence: Synthetic peptide
  Seed: LRMKWMMAMKYPITA
LRMKMMMWMSYPVTA

SEQ ID NO: 238379 - protein, 15 aa, Artificial Sequence
  Description of Artificial Sequence: Synthetic peptide
  Seed: LRMKWMMAMKYPITA
LRMKMMMWMSYPYTA

SEQ ID NO: 238380 - protein, 15 aa, Artificial Sequence
  Description of Artificial Sequence: Synthetic peptide
  Seed: LRMKWMMAMKYPITA
LRMKMMMWMTYPATA

SEQ ID NO: 238381 - protein, 15 aa, Artificial Sequence
  Description of Artificial Sequence: Synthetic peptide
  Seed: LRMKWMMAMKYPITA
LRMKMMMWMTYPYTA

SEQ ID NO: 238382 - protein, 15 aa, Artificial Sequence
  Description of Artificial Sequence: Synthetic peptide
  Seed: LRMKWMMAMKYPITA
LRMKMMMWMVYPATA

SEQ ID NO: 238383 - protein, 15 aa, Artificial Sequence
  Description of Artificial Sequence: Synthetic peptide
  Seed: LRMKWMMAMKYPITA
LRMKMMMWMVYPRTA

SEQ ID NO: 238384 - protein, 15 aa, Artificial Sequence
  Description of Artificial Sequence: Synthetic peptide
  Seed: LRMKWMMAMKYPITA
LRMKMMMWMVYPSTA

SEQ ID NO: 238385 - protein, 15 aa, Artificial Sequence
  Description of Artificial Sequence: Synthetic peptide
  Seed: LRMKWMMAMKYPITA
LRMKMMMYMAYPATA

SEQ ID NO: 238386 - protein, 15 aa, Artificial Sequence
  Description of Artificial Sequence: Synthetic peptide
  Seed: LRMKWMMAMKYPITA
LRMKMMMYMAYPFTA

SEQ ID NO: 238387 - protein, 15 aa, Artificial Sequence
  Description of Artificial Sequence: Synthetic peptide
  Seed: LRMKWMMAMKYPITA
LRMKMMMYMAYPITA

SEQ ID NO: 238388 - protein, 15 aa, Artificial Sequence
  Description of Artificial Sequence: Synthetic peptide
  Seed: LRMKWMMAMKYPITA
LRMKMMMYMAYPKTA

SEQ ID NO: 238389 - protein, 15 aa, Artificial Sequence
  Description of Artificial Sequence: Synthetic peptide
  Seed: LRMKWMMAMKYPITA
LRMKMMMYMAYPLTA

SEQ ID NO: 238390 - protein, 15 aa, Artificial Sequence
  Description of Artificial Sequence: Synthetic peptide
  Seed: LRMKWMMAMKYPITA
LRMKMMMYMAYPMTA

SEQ ID NO: 238391 - protein, 15 aa, Artificial Sequence
  Description of Artificial Sequence: Synthetic peptide
  Seed: LRMKWMMAMKYPITA
LRMKMMMYMAYPRTA

SEQ ID NO: 238392 - protein, 15 aa, Artificial Sequence
  Description of Artificial Sequence: Synthetic peptide
  Seed: LRMKWMMAMKYPITA
LRMKMMMYMAYPSTA

SEQ ID NO: 238393 - protein, 15 aa, Artificial Sequence
  Description of Artificial Sequence: Synthetic peptide
  Seed: LRMKWMMAMKYPITA
LRMKMMMYMAYPTTA

SEQ ID NO: 238394 - protein, 15 aa, Artificial Sequence
  Description of Artificial Sequence: Synthetic peptide
  Seed: LRMKWMMAMKYPITA
LRMKMMMYMAYPVTA

SEQ ID NO: 238395 - protein, 15 aa, Artificial Sequence
  Description of Artificial Sequence: Synthetic peptide
  Seed: LRMKWMMAMKYPITA
LRMKMMMYMAYPYTA

SEQ ID NO: 238396 - protein, 15 aa, Artificial Sequence
  Description of Artificial Sequence: Synthetic peptide
  Seed: LRMKWMMAMKYPITA
LRMKMMMYMGYPATA

SEQ ID NO: 238397 - protein, 15 aa, Artificial Sequence
  Description of Artificial Sequence: Synthetic peptide
  Seed: LRMKWMMAMKYPITA
LRMKMMMYMGYPITA

SEQ ID NO: 238398 - protein, 15 aa, Artificial Sequence
  Description of Artificial Sequence: Synthetic peptide
  Seed: LRMKWMMAMKYPITA
LRMKMMMYMGYPLTA

SEQ ID NO: 238399 - protein, 15 aa, Artificial Sequence
  Description of Artificial Sequence: Synthetic peptide
  Seed: LRMKWMMAMKYPITA
LRMKMMMYMGYPMTA

SEQ ID NO: 238400 - protein, 15 aa, Artificial Sequence
  Description of Artificial Sequence: Synthetic peptide
  Seed: LRMKWMMAMKYPITA
LRMKMMMYMGYPVTA

SEQ ID NO: 238401 - protein, 15 aa, Artificial Sequence
  Description of Artificial Sequence: Synthetic peptide
  Seed: LRMKWMMAMKYPITA
LRMKMMMYMHYPFTA

SEQ ID NO: 238402 - protein, 15 aa, Artificial Sequence
  Description of Artificial Sequence: Synthetic peptide
  Seed: LRMKWMMAMKYPITA
LRMKMMMYMHYPITA

SEQ ID NO: 238403 - protein, 15 aa, Artificial Sequence
  Description of Artificial Sequence: Synthetic peptide
  Seed: LRMKWMMAMKYPITA
LRMKMMMYMHYPLTA

SEQ ID NO: 238404 - protein, 15 aa, Artificial Sequence
  Description of Artificial Sequence: Synthetic peptide
  Seed: LRMKWMMAMKYPITA
LRMKMMMYMHYPMTA

SEQ ID NO: 238405 - protein, 15 aa, Artificial Sequence
  Description of Artificial Sequence: Synthetic peptide
  Seed: LRMKWMMAMKYPITA
LRMKMMMYMHYPRTA

SEQ ID NO: 238406 - protein, 15 aa, Artificial Sequence
  Description of Artificial Sequence: Synthetic peptide
  Seed: LRMKWMMAMKYPITA
LRMKMMMYMHYPVTA

SEQ ID NO: 238407 - protein, 15 aa, Artificial Sequence
  Description of Artificial Sequence: Synthetic peptide
  Seed: LRMKWMMAMKYPITA
LRMKMMMYMHYPYTA

SEQ ID NO: 238408 - protein, 15 aa, Artificial Sequence
  Description of Artificial Sequence: Synthetic peptide
  Seed: LRMKWMMAMKYPITA
LRMKMMMYMIYPRTA

SEQ ID NO: 238409 - protein, 15 aa, Artificial Sequence
  Description of Artificial Sequence: Synthetic peptide
  Seed: LRMKWMMAMKYPITA
LRMKMMMYMKYPATA

SEQ ID NO: 238410 - protein, 15 aa, Artificial Sequence
  Description of Artificial Sequence: Synthetic peptide
  Seed: LRMKWMMAMKYPITA
LRMKMMMYMKYPETA

SEQ ID NO: 238411 - protein, 15 aa, Artificial Sequence
  Description of Artificial Sequence: Synthetic peptide
  Seed: LRMKWMMAMKYPITA
LRMKMMMYMKYPFTA

SEQ ID NO: 238412 - protein, 15 aa, Artificial Sequence
  Description of Artificial Sequence: Synthetic peptide
  Seed: LRMKWMMAMKYPITA
LRMKMMMYMKYPGTA

SEQ ID NO: 238413 - protein, 15 aa, Artificial Sequence
  Description of Artificial Sequence: Synthetic peptide
  Seed: LRMKWMMAMKYPITA
LRMKMMMYMKYPHTA

SEQ ID NO: 238414 - protein, 15 aa, Artificial Sequence
  Description of Artificial Sequence: Synthetic peptide
  Seed: LRMKWMMAMKYPITA
LRMKMMMYMKYPITA

SEQ ID NO: 238415 - protein, 15 aa, Artificial Sequence
  Description of Artificial Sequence: Synthetic peptide
  Seed: LRMKWMMAMKYPITA
LRMKMMMYMKYPKTA

SEQ ID NO: 238416 - protein, 15 aa, Artificial Sequence
  Description of Artificial Sequence: Synthetic peptide
  Seed: LRMKWMMAMKYPITA
LRMKMMMYMKYPLTA

SEQ ID NO: 238417 - protein, 15 aa, Artificial Sequence
  Description of Artificial Sequence: Synthetic peptide
  Seed: LRMKWMMAMKYPITA
LRMKMMMYMKYPMTA

SEQ ID NO: 238418 - protein, 15 aa, Artificial Sequence
  Description of Artificial Sequence: Synthetic peptide
  Seed: LRMKWMMAMKYPITA
LRMKMMMYMKYPQTA

SEQ ID NO: 238419 - protein, 15 aa, Artificial Sequence
  Description of Artificial Sequence: Synthetic peptide
  Seed: LRMKWMMAMKYPITA
LRMKMMMYMKYPRTA

SEQ ID NO: 238420 - protein, 15 aa, Artificial Sequence
  Description of Artificial Sequence: Synthetic peptide
  Seed: LRMKWMMAMKYPITA
LRMKMMMYMKYPSTA

SEQ ID NO: 238421 - protein, 15 aa, Artificial Sequence
  Description of Artificial Sequence: Synthetic peptide
  Seed: LRMKWMMAMKYPITA
LRMKMMMYMKYPTTA

SEQ ID NO: 238422 - protein, 15 aa, Artificial Sequence
  Description of Artificial Sequence: Synthetic peptide
  Seed: LRMKWMMAMKYPITA
LRMKMMMYMKYPVTA

SEQ ID NO: 238423 - protein, 15 aa, Artificial Sequence
  Description of Artificial Sequence: Synthetic peptide
  Seed: LRMKWMMAMKYPITA
LRMKMMMYMKYPYTA

SEQ ID NO: 238424 - protein, 15 aa, Artificial Sequence
  Description of Artificial Sequence: Synthetic peptide
  Seed: LRMKWMMAMKYPITA
LRMKMMMYMMYPRTA

SEQ ID NO: 238425 - protein, 15 aa, Artificial Sequence
  Description of Artificial Sequence: Synthetic peptide
  Seed: LRMKWMMAMKYPITA
LRMKMMMYMNYPITA

SEQ ID NO: 238426 - protein, 15 aa, Artificial Sequence
  Description of Artificial Sequence: Synthetic peptide
  Seed: LRMKWMMAMKYPITA
LRMKMMMYMNYPLTA

SEQ ID NO: 238427 - protein, 15 aa, Artificial Sequence
  Description of Artificial Sequence: Synthetic peptide
  Seed: LRMKWMMAMKYPITA
LRMKMMMYMNYPRTA

SEQ ID NO: 238428 - protein, 15 aa, Artificial Sequence
  Description of Artificial Sequence: Synthetic peptide
  Seed: LRMKWMMAMKYPITA
LRMKMMMYMNYPVTA

SEQ ID NO: 238429 - protein, 15 aa, Artificial Sequence
  Description of Artificial Sequence: Synthetic peptide
  Seed: LRMKWMMAMKYPITA
LRMKMMMYMNYPYTA

SEQ ID NO: 238430 - protein, 15 aa, Artificial Sequence
  Description of Artificial Sequence: Synthetic peptide
  Seed: LRMKWMMAMKYPITA
LRMKMMMYMPYPATA

SEQ ID NO: 238431 - protein, 15 aa, Artificial Sequence
  Description of Artificial Sequence: Synthetic peptide
  Seed: LRMKWMMAMKYPITA
LRMKMMMYMPYPFTA

SEQ ID NO: 238432 - protein, 15 aa, Artificial Sequence
  Description of Artificial Sequence: Synthetic peptide
  Seed: LRMKWMMAMKYPITA
LRMKMMMYMPYPITA

SEQ ID NO: 238433 - protein, 15 aa, Artificial Sequence
  Description of Artificial Sequence: Synthetic peptide
  Seed: LRMKWMMAMKYPITA
LRMKMMMYMPYPLTA

SEQ ID NO: 238434 - protein, 15 aa, Artificial Sequence
  Description of Artificial Sequence: Synthetic peptide
  Seed: LRMKWMMAMKYPITA
LRMKMMMYMPYPMTA

SEQ ID NO: 238435 - protein, 15 aa, Artificial Sequence
  Description of Artificial Sequence: Synthetic peptide
  Seed: LRMKWMMAMKYPITA
LRMKMMMYMPYPRTA

SEQ ID NO: 238436 - protein, 15 aa, Artificial Sequence
  Description of Artificial Sequence: Synthetic peptide
  Seed: LRMKWMMAMKYPITA
LRMKMMMYMPYPVTA

SEQ ID NO: 238437 - protein, 15 aa, Artificial Sequence
  Description of Artificial Sequence: Synthetic peptide
  Seed: LRMKWMMAMKYPITA
LRMKMMMYMPYPYTA

SEQ ID NO: 238438 - protein, 15 aa, Artificial Sequence
  Description of Artificial Sequence: Synthetic peptide
  Seed: LRMKWMMAMKYPITA
LRMKMMMYMRYPATA

SEQ ID NO: 238439 - protein, 15 aa, Artificial Sequence
  Description of Artificial Sequence: Synthetic peptide
  Seed: LRMKWMMAMKYPITA
LRMKMMMYMRYPDTA

SEQ ID NO: 238440 - protein, 15 aa, Artificial Sequence
  Description of Artificial Sequence: Synthetic peptide
  Seed: LRMKWMMAMKYPITA
LRMKMMMYMRYPETA

SEQ ID NO: 238441 - protein, 15 aa, Artificial Sequence
  Description of Artificial Sequence: Synthetic peptide
  Seed: LRMKWMMAMKYPITA
LRMKMMMYMRYPFTA

SEQ ID NO: 238442 - protein, 15 aa, Artificial Sequence
  Description of Artificial Sequence: Synthetic peptide
  Seed: LRMKWMMAMKYPITA
LRMKMMMYMRYPGTA

SEQ ID NO: 238443 - protein, 15 aa, Artificial Sequence
  Description of Artificial Sequence: Synthetic peptide
  Seed: LRMKWMMAMKYPITA
LRMKMMMYMRYPHTA

SEQ ID NO: 238444 - protein, 15 aa, Artificial Sequence
  Description of Artificial Sequence: Synthetic peptide
  Seed: LRMKWMMAMKYPITA
LRMKMMMYMRYPITA

SEQ ID NO: 238445 - protein, 15 aa, Artificial Sequence
  Description of Artificial Sequence: Synthetic peptide
  Seed: LRMKWMMAMKYPITA
LRMKMMMYMRYPKTA

SEQ ID NO: 238446 - protein, 15 aa, Artificial Sequence
  Description of Artificial Sequence: Synthetic peptide
  Seed: LRMKWMMAMKYPITA
LRMKMMMYMRYPLTA

SEQ ID NO: 238447 - protein, 15 aa, Artificial Sequence
  Description of Artificial Sequence: Synthetic peptide
  Seed: LRMKWMMAMKYPITA
LRMKMMMYMRYPMTA

SEQ ID NO: 238448 - protein, 15 aa, Artificial Sequence
  Description of Artificial Sequence: Synthetic peptide
  Seed: LRMKWMMAMKYPITA
LRMKMMMYMRYPNTA

SEQ ID NO: 238449 - protein, 15 aa, Artificial Sequence
  Description of Artificial Sequence: Synthetic peptide
  Seed: LRMKWMMAMKYPITA
LRMKMMMYMRYPPTA

SEQ ID NO: 238450 - protein, 15 aa, Artificial Sequence
  Description of Artificial Sequence: Synthetic peptide
  Seed: LRMKWMMAMKYPITA
LRMKMMMYMRYPQTA

SEQ ID NO: 238451 - protein, 15 aa, Artificial Sequence
  Description of Artificial Sequence: Synthetic peptide
  Seed: LRMKWMMAMKYPITA
LRMKMMMYMRYPRTA

SEQ ID NO: 238452 - protein, 15 aa, Artificial Sequence
  Description of Artificial Sequence: Synthetic peptide
  Seed: LRMKWMMAMKYPITA
LRMKMMMYMRYPSTA

SEQ ID NO: 238453 - protein, 15 aa, Artificial Sequence
  Description of Artificial Sequence: Synthetic peptide
  Seed: LRMKWMMAMKYPITA
LRMKMMMYMRYPTTA

SEQ ID NO: 238454 - protein, 15 aa, Artificial Sequence
  Description of Artificial Sequence: Synthetic peptide
  Seed: LRMKWMMAMKYPITA
LRMKMMMYMRYPVTA

SEQ ID NO: 238455 - protein, 15 aa, Artificial Sequence
  Description of Artificial Sequence: Synthetic peptide
  Seed: LRMKWMMAMKYPITA
LRMKMMMYMRYPYTA

SEQ ID NO: 238456 - protein, 15 aa, Artificial Sequence
  Description of Artificial Sequence: Synthetic peptide
  Seed: LRMKWMMAMKYPITA
LRMKMMMYMSYPATA

SEQ ID NO: 238457 - protein, 15 aa, Artificial Sequence
  Description of Artificial Sequence: Synthetic peptide
  Seed: LRMKWMMAMKYPITA
LRMKMMMYMSYPITA

SEQ ID NO: 238458 - protein, 15 aa, Artificial Sequence
  Description of Artificial Sequence: Synthetic peptide
  Seed: LRMKWMMAMKYPITA
LRMKMMMYMSYPLTA

SEQ ID NO: 238459 - protein, 15 aa, Artificial Sequence
  Description of Artificial Sequence: Synthetic peptide
  Seed: LRMKWMMAMKYPITA
LRMKMMMYMSYPMTA

SEQ ID NO: 238460 - protein, 15 aa, Artificial Sequence
  Description of Artificial Sequence: Synthetic peptide
  Seed: LRMKWMMAMKYPITA
LRMKMMMYMSYPRTA

SEQ ID NO: 238461 - protein, 15 aa, Artificial Sequence
  Description of Artificial Sequence: Synthetic peptide
  Seed: LRMKWMMAMKYPITA
LRMKMMMYMSYPVTA

SEQ ID NO: 238462 - protein, 15 aa, Artificial Sequence
  Description of Artificial Sequence: Synthetic peptide
  Seed: LRMKWMMAMKYPITA
LRMKMMMYMSYPYTA

SEQ ID NO: 238463 - protein, 15 aa, Artificial Sequence
  Description of Artificial Sequence: Synthetic peptide
  Seed: LRMKWMMAMKYPITA
LRMKMMMYMTYPATA

SEQ ID NO: 238464 - protein, 15 aa, Artificial Sequence
  Description of Artificial Sequence: Synthetic peptide
  Seed: LRMKWMMAMKYPITA
LRMKMMMYMTYPITA

SEQ ID NO: 238465 - protein, 15 aa, Artificial Sequence
  Description of Artificial Sequence: Synthetic peptide
  Seed: LRMKWMMAMKYPITA
LRMKMMMYMTYPLTA

SEQ ID NO: 238466 - protein, 15 aa, Artificial Sequence
  Description of Artificial Sequence: Synthetic peptide
  Seed: LRMKWMMAMKYPITA
LRMKMMMYMTYPRTA

SEQ ID NO: 238467 - protein, 15 aa, Artificial Sequence
  Description of Artificial Sequence: Synthetic peptide
  Seed: LRMKWMMAMKYPITA
LRMKMMMYMTYPSTA

SEQ ID NO: 238468 - protein, 15 aa, Artificial Sequence
  Description of Artificial Sequence: Synthetic peptide
  Seed: LRMKWMMAMKYPITA
LRMKMMMYMTYPVTA

SEQ ID NO: 238469 - protein, 15 aa, Artificial Sequence
  Description of Artificial Sequence: Synthetic peptide
  Seed: LRMKWMMAMKYPITA
LRMKMMMYMTYPYTA

SEQ ID NO: 238470 - protein, 15 aa, Artificial Sequence
  Description of Artificial Sequence: Synthetic peptide
  Seed: LRMKWMMAMKYPITA
LRMKMMMYMVYPRTA

SEQ ID NO: 238471 - protein, 15 aa, Artificial Sequence
  Description of Artificial Sequence: Synthetic peptide
  Seed: LRMKWMMAMKYPITA
LRMKNMMAMAYPATA

SEQ ID NO: 238472 - protein, 15 aa, Artificial Sequence
  Description of Artificial Sequence: Synthetic peptide
  Seed: LRMKWMMAMKYPITA
LRMKNMMAMAYPITA

SEQ ID NO: 238473 - protein, 15 aa, Artificial Sequence
  Description of Artificial Sequence: Synthetic peptide
  Seed: LRMKWMMAMKYPITA
LRMKNMMAMAYPLTA

SEQ ID NO: 238474 - protein, 15 aa, Artificial Sequence
  Description of Artificial Sequence: Synthetic peptide
  Seed: LRMKWMMAMKYPITA
LRMKNMMAMAYPMTA

SEQ ID NO: 238475 - protein, 15 aa, Artificial Sequence
  Description of Artificial Sequence: Synthetic peptide
  Seed: LRMKWMMAMKYPITA
LRMKNMMAMAYPSTA

SEQ ID NO: 238476 - protein, 15 aa, Artificial Sequence
  Description of Artificial Sequence: Synthetic peptide
  Seed: LRMKWMMAMKYPITA
LRMKNMMAMAYPTTA

SEQ ID NO: 238477 - protein, 15 aa, Artificial Sequence
  Description of Artificial Sequence: Synthetic peptide
  Seed: LRMKWMMAMKYPITA
LRMKNMMAMAYPVTA

SEQ ID NO: 238478 - protein, 15 aa, Artificial Sequence
  Description of Artificial Sequence: Synthetic peptide
  Seed: LRMKWMMAMKYPITA
LRMKNMMAMGYPATA

SEQ ID NO: 238479 - protein, 15 aa, Artificial Sequence
  Description of Artificial Sequence: Synthetic peptide
  Seed: LRMKWMMAMKYPITA
LRMKNMMAMGYPITA

SEQ ID NO: 238480 - protein, 15 aa, Artificial Sequence
  Description of Artificial Sequence: Synthetic peptide
  Seed: LRMKWMMAMKYPITA
LRMKNMMAMGYPLTA

SEQ ID NO: 238481 - protein, 15 aa, Artificial Sequence
  Description of Artificial Sequence: Synthetic peptide
  Seed: LRMKWMMAMKYPITA
LRMKNMMAMGYPMTA

SEQ ID NO: 238482 - protein, 15 aa, Artificial Sequence
  Description of Artificial Sequence: Synthetic peptide
  Seed: LRMKWMMAMKYPITA
LRMKNMMAMGYPVTA

SEQ ID NO: 238483 - protein, 15 aa, Artificial Sequence
  Description of Artificial Sequence: Synthetic peptide
  Seed: LRMKWMMAMKYPITA
LRMKNMMAMIYPATA

SEQ ID NO: 238484 - protein, 15 aa, Artificial Sequence
  Description of Artificial Sequence: Synthetic peptide
  Seed: LRMKWMMAMKYPITA
LRMKNMMAMIYPGTA

SEQ ID NO: 238485 - protein, 15 aa, Artificial Sequence
  Description of Artificial Sequence: Synthetic peptide
  Seed: LRMKWMMAMKYPITA
LRMKNMMAMIYPITA

SEQ ID NO: 238486 - protein, 15 aa, Artificial Sequence
  Description of Artificial Sequence: Synthetic peptide
  Seed: LRMKWMMAMKYPITA
LRMKNMMAMIYPMTA

SEQ ID NO: 238487 - protein, 15 aa, Artificial Sequence
  Description of Artificial Sequence: Synthetic peptide
  Seed: LRMKWMMAMKYPITA
LRMKNMMAMIYPNTA

SEQ ID NO: 238488 - protein, 15 aa, Artificial Sequence
  Description of Artificial Sequence: Synthetic peptide
  Seed: LRMKWMMAMKYPITA
LRMKNMMAMIYPQTA

SEQ ID NO: 238489 - protein, 15 aa, Artificial Sequence
  Description of Artificial Sequence: Synthetic peptide
  Seed: LRMKWMMAMKYPITA
LRMKNMMAMIYPSTA

SEQ ID NO: 238490 - protein, 15 aa, Artificial Sequence
  Description of Artificial Sequence: Synthetic peptide
  Seed: LRMKWMMAMKYPITA
LRMKNMMAMIYPTTA

SEQ ID NO: 238491 - protein, 15 aa, Artificial Sequence
  Description of Artificial Sequence: Synthetic peptide
  Seed: LRMKWMMAMKYPITA
LRMKNMMAMIYPVTA

SEQ ID NO: 238492 - protein, 15 aa, Artificial Sequence
  Description of Artificial Sequence: Synthetic peptide
  Seed: LRMKWMMAMKYPITA
LRMKNMMAMLYPATA

SEQ ID NO: 238493 - protein, 15 aa, Artificial Sequence
  Description of Artificial Sequence: Synthetic peptide
  Seed: LRMKWMMAMKYPITA
LRMKNMMAMLYPGTA

SEQ ID NO: 238494 - protein, 15 aa, Artificial Sequence
  Description of Artificial Sequence: Synthetic peptide
  Seed: LRMKWMMAMKYPITA
LRMKNMMAMLYPSTA

SEQ ID NO: 238495 - protein, 15 aa, Artificial Sequence
  Description of Artificial Sequence: Synthetic peptide
  Seed: LRMKWMMAMKYPITA
LRMKNMMAMLYPVTA

SEQ ID NO: 238496 - protein, 15 aa, Artificial Sequence
  Description of Artificial Sequence: Synthetic peptide
  Seed: LRMKWMMAMKYPITA
LRMKNMMAMMYPATA

SEQ ID NO: 238497 - protein, 15 aa, Artificial Sequence
  Description of Artificial Sequence: Synthetic peptide
  Seed: LRMKWMMAMKYPITA
LRMKNMMAMMYPGTA

SEQ ID NO: 238498 - protein, 15 aa, Artificial Sequence
  Description of Artificial Sequence: Synthetic peptide
  Seed: LRMKWMMAMKYPITA
LRMKNMMAMMYPSTA

SEQ ID NO: 238499 - protein, 15 aa, Artificial Sequence
  Description of Artificial Sequence: Synthetic peptide
  Seed: LRMKWMMAMKYPITA
LRMKNMMAMMYPVTA

SEQ ID NO: 238500 - protein, 15 aa, Artificial Sequence
  Description of Artificial Sequence: Synthetic peptide
  Seed: LRMKWMMAMKYPITA
LRMKNMMAMPYPATA

SEQ ID NO: 238501 - protein, 15 aa, Artificial Sequence
  Description of Artificial Sequence: Synthetic peptide
  Seed: LRMKWMMAMKYPITA
LRMKNMMAMPYPITA

SEQ ID NO: 238502 - protein, 15 aa, Artificial Sequence
  Description of Artificial Sequence: Synthetic peptide
  Seed: LRMKWMMAMKYPITA
LRMKNMMAMPYPLTA

SEQ ID NO: 238503 - protein, 15 aa, Artificial Sequence
  Description of Artificial Sequence: Synthetic peptide
  Seed: LRMKWMMAMKYPITA
LRMKNMMAMPYPMTA

SEQ ID NO: 238504 - protein, 15 aa, Artificial Sequence
  Description of Artificial Sequence: Synthetic peptide
  Seed: LRMKWMMAMKYPITA
LRMKNMMAMPYPVTA

SEQ ID NO: 238505 - protein, 15 aa, Artificial Sequence
  Description of Artificial Sequence: Synthetic peptide
  Seed: LRMKWMMAMKYPITA
LRMKNMMAMRYPATA

SEQ ID NO: 238506 - protein, 15 aa, Artificial Sequence
  Description of Artificial Sequence: Synthetic peptide
  Seed: LRMKWMMAMKYPITA
LRMKNMMAMRYPSTA

SEQ ID NO: 238507 - protein, 15 aa, Artificial Sequence
  Description of Artificial Sequence: Synthetic peptide
  Seed: LRMKWMMAMKYPITA
LRMKNMMAMSYPATA

SEQ ID NO: 238508 - protein, 15 aa, Artificial Sequence
  Description of Artificial Sequence: Synthetic peptide
  Seed: LRMKWMMAMKYPITA
LRMKNMMAMSYPITA

SEQ ID NO: 238509 - protein, 15 aa, Artificial Sequence
  Description of Artificial Sequence: Synthetic peptide
  Seed: LRMKWMMAMKYPITA
LRMKNMMAMSYPLTA

SEQ ID NO: 238510 - protein, 15 aa, Artificial Sequence
  Description of Artificial Sequence: Synthetic peptide
  Seed: LRMKWMMAMKYPITA
LRMKNMMAMSYPMTA

SEQ ID NO: 238511 - protein, 15 aa, Artificial Sequence
  Description of Artificial Sequence: Synthetic peptide
  Seed: LRMKWMMAMKYPITA
LRMKNMMAMSYPVTA

SEQ ID NO: 238512 - protein, 15 aa, Artificial Sequence
  Description of Artificial Sequence: Synthetic peptide
  Seed: LRMKWMMAMKYPITA
LRMKNMMAMTYPLTA

SEQ ID NO: 238513 - protein, 15 aa, Artificial Sequence
  Description of Artificial Sequence: Synthetic peptide
  Seed: LRMKWMMAMKYPITA
LRMKNMMAMTYPVTA

SEQ ID NO: 238514 - protein, 15 aa, Artificial Sequence
  Description of Artificial Sequence: Synthetic peptide
  Seed: LRMKWMMAMKYPITA
LRMKNMMAMVYPATA

SEQ ID NO: 238515 - protein, 15 aa, Artificial Sequence
  Description of Artificial Sequence: Synthetic peptide
  Seed: LRMKWMMAMKYPITA
LRMKNMMAMVYPGTA

SEQ ID NO: 238516 - protein, 15 aa, Artificial Sequence
  Description of Artificial Sequence: Synthetic peptide
  Seed: LRMKWMMAMKYPITA
LRMKNMMAMVYPITA

SEQ ID NO: 238517 - protein, 15 aa, Artificial Sequence
  Description of Artificial Sequence: Synthetic peptide
  Seed: LRMKWMMAMKYPITA
LRMKNMMAMVYPMTA

SEQ ID NO: 238518 - protein, 15 aa, Artificial Sequence
  Description of Artificial Sequence: Synthetic peptide
  Seed: LRMKWMMAMKYPITA
LRMKNMMAMVYPQTA

SEQ ID NO: 238519 - protein, 15 aa, Artificial Sequence
  Description of Artificial Sequence: Synthetic peptide
  Seed: LRMKWMMAMKYPITA
LRMKNMMAMVYPSTA

SEQ ID NO: 238520 - protein, 15 aa, Artificial Sequence
  Description of Artificial Sequence: Synthetic peptide
  Seed: LRMKWMMAMKYPITA
LRMKNMMAMVYPTTA

SEQ ID NO: 238521 - protein, 15 aa, Artificial Sequence
  Description of Artificial Sequence: Synthetic peptide
  Seed: LRMKWMMAMKYPITA
LRMKNMMAMVYPVTA

SEQ ID NO: 238522 - protein, 15 aa, Artificial Sequence
  Description of Artificial Sequence: Synthetic peptide
  Seed: LRMKWMMAMKYPITA
LRMKNMMGMAYPITA

SEQ ID NO: 238523 - protein, 15 aa, Artificial Sequence
  Description of Artificial Sequence: Synthetic peptide
  Seed: LRMKWMMAMKYPITA
LRMKNMMGMAYPLTA

SEQ ID NO: 238524 - protein, 15 aa, Artificial Sequence
  Description of Artificial Sequence: Synthetic peptide
  Seed: LRMKWMMAMKYPITA
LRMKNMMGMAYPVTA

SEQ ID NO: 238525 - protein, 15 aa, Artificial Sequence
  Description of Artificial Sequence: Synthetic peptide
  Seed: LRMKWMMAMKYPITA
LRMKNMMGMIYPATA

SEQ ID NO: 238526 - protein, 15 aa, Artificial Sequence
  Description of Artificial Sequence: Synthetic peptide
  Seed: LRMKWMMAMKYPITA
LRMKNMMIMGYPATA

SEQ ID NO: 238527 - protein, 15 aa, Artificial Sequence
  Description of Artificial Sequence: Synthetic peptide
  Seed: LRMKWMMAMKYPITA
LRMKNMMIMGYPITA

SEQ ID NO: 238528 - protein, 15 aa, Artificial Sequence
  Description of Artificial Sequence: Synthetic peptide
  Seed: LRMKWMMAMKYPITA
LRMKNMMIMGYPLTA

SEQ ID NO: 238529 - protein, 15 aa, Artificial Sequence
  Description of Artificial Sequence: Synthetic peptide
  Seed: LRMKWMMAMKYPITA
LRMKNMMIMGYPMTA

SEQ ID NO: 238530 - protein, 15 aa, Artificial Sequence
  Description of Artificial Sequence: Synthetic peptide
  Seed: LRMKWMMAMKYPITA
LRMKNMMIMGYPVTA

SEQ ID NO: 238531 - protein, 15 aa, Artificial Sequence
  Description of Artificial Sequence: Synthetic peptide
  Seed: LRMKWMMAMKYPITA
LRMKNMMIMKYPATA

SEQ ID NO: 238532 - protein, 15 aa, Artificial Sequence
  Description of Artificial Sequence: Synthetic peptide
  Seed: LRMKWMMAMKYPITA
LRMKNMMIMPYPITA

SEQ ID NO: 238533 - protein, 15 aa, Artificial Sequence
  Description of Artificial Sequence: Synthetic peptide
  Seed: LRMKWMMAMKYPITA
LRMKNMMIMPYPLTA

SEQ ID NO: 238534 - protein, 15 aa, Artificial Sequence
  Description of Artificial Sequence: Synthetic peptide
  Seed: LRMKWMMAMKYPITA
LRMKNMMIMPYPVTA

SEQ ID NO: 238535 - protein, 15 aa, Artificial Sequence
  Description of Artificial Sequence: Synthetic peptide
  Seed: LRMKWMMAMKYPITA
LRMKNMMIMRYPATA

SEQ ID NO: 238536 - protein, 15 aa, Artificial Sequence
  Description of Artificial Sequence: Synthetic peptide
  Seed: LRMKWMMAMKYPITA
LRMKNMMIMRYPFTA

SEQ ID NO: 238537 - protein, 15 aa, Artificial Sequence
  Description of Artificial Sequence: Synthetic peptide
  Seed: LRMKWMMAMKYPITA
LRMKNMMIMRYPITA

SEQ ID NO: 238538 - protein, 15 aa, Artificial Sequence
  Description of Artificial Sequence: Synthetic peptide
  Seed: LRMKWMMAMKYPITA
LRMKNMMIMRYPLTA

SEQ ID NO: 238539 - protein, 15 aa, Artificial Sequence
  Description of Artificial Sequence: Synthetic peptide
  Seed: LRMKWMMAMKYPITA
LRMKNMMIMRYPMTA

SEQ ID NO: 238540 - protein, 15 aa, Artificial Sequence
  Description of Artificial Sequence: Synthetic peptide
  Seed: LRMKWMMAMKYPITA
LRMKNMMIMRYPRTA

SEQ ID NO: 238541 - protein, 15 aa, Artificial Sequence
  Description of Artificial Sequence: Synthetic peptide
  Seed: LRMKWMMAMKYPITA
LRMKNMMIMRYPSTA

SEQ ID NO: 238542 - protein, 15 aa, Artificial Sequence
  Description of Artificial Sequence: Synthetic peptide
  Seed: LRMKWMMAMKYPITA
LRMKNMMIMRYPVTA

SEQ ID NO: 238543 - protein, 15 aa, Artificial Sequence
  Description of Artificial Sequence: Synthetic peptide
  Seed: LRMKWMMAMKYPITA
LRMKNMMIMRYPYTA

SEQ ID NO: 238544 - protein, 15 aa, Artificial Sequence
  Description of Artificial Sequence: Synthetic peptide
  Seed: LRMKWMMAMKYPITA
LRMKNMMIMSYPLTA

SEQ ID NO: 238545 - protein, 15 aa, Artificial Sequence
  Description of Artificial Sequence: Synthetic peptide
  Seed: LRMKWMMAMKYPITA
LRMKNMMIMSYPMTA

SEQ ID NO: 238546 - protein, 15 aa, Artificial Sequence
  Description of Artificial Sequence: Synthetic peptide
  Seed: LRMKWMMAMKYPITA
LRMKNMMIMSYPVTA

SEQ ID NO: 238547 - protein, 15 aa, Artificial Sequence
  Description of Artificial Sequence: Synthetic peptide
  Seed: LRMKWMMAMKYPITA
LRMKNMMLMAYPATA

SEQ ID NO: 238548 - protein, 15 aa, Artificial Sequence
  Description of Artificial Sequence: Synthetic peptide
  Seed: LRMKWMMAMKYPITA
LRMKNMMLMAYPCTA

SEQ ID NO: 238549 - protein, 15 aa, Artificial Sequence
  Description of Artificial Sequence: Synthetic peptide
  Seed: LRMKWMMAMKYPITA
LRMKNMMLMAYPITA

SEQ ID NO: 238550 - protein, 15 aa, Artificial Sequence
  Description of Artificial Sequence: Synthetic peptide
  Seed: LRMKWMMAMKYPITA
LRMKNMMLMAYPLTA

SEQ ID NO: 238551 - protein, 15 aa, Artificial Sequence
  Description of Artificial Sequence: Synthetic peptide
  Seed: LRMKWMMAMKYPITA
LRMKNMMLMAYPMTA

SEQ ID NO: 238552 - protein, 15 aa, Artificial Sequence
  Description of Artificial Sequence: Synthetic peptide
  Seed: LRMKWMMAMKYPITA
LRMKNMMLMAYPSTA

SEQ ID NO: 238553 - protein, 15 aa, Artificial Sequence
  Description of Artificial Sequence: Synthetic peptide
  Seed: LRMKWMMAMKYPITA
LRMKNMMLMAYPTTA

SEQ ID NO: 238554 - protein, 15 aa, Artificial Sequence
  Description of Artificial Sequence: Synthetic peptide
  Seed: LRMKWMMAMKYPITA
LRMKNMMLMAYPVTA

SEQ ID NO: 238555 - protein, 15 aa, Artificial Sequence
  Description of Artificial Sequence: Synthetic peptide
  Seed: LRMKWMMAMKYPITA
LRMKNMMLMGYPATA

SEQ ID NO: 238556 - protein, 15 aa, Artificial Sequence
  Description of Artificial Sequence: Synthetic peptide
  Seed: LRMKWMMAMKYPITA
LRMKNMMLMGYPITA

SEQ ID NO: 238557 - protein, 15 aa, Artificial Sequence
  Description of Artificial Sequence: Synthetic peptide
  Seed: LRMKWMMAMKYPITA
LRMKNMMLMGYPLTA

SEQ ID NO: 238558 - protein, 15 aa, Artificial Sequence
  Description of Artificial Sequence: Synthetic peptide
  Seed: LRMKWMMAMKYPITA
LRMKNMMLMGYPMTA

SEQ ID NO: 238559 - protein, 15 aa, Artificial Sequence
  Description of Artificial Sequence: Synthetic peptide
  Seed: LRMKWMMAMKYPITA
LRMKNMMLMGYPTTA

SEQ ID NO: 238560 - protein, 15 aa, Artificial Sequence
  Description of Artificial Sequence: Synthetic peptide
  Seed: LRMKWMMAMKYPITA
LRMKNMMLMGYPVTA

SEQ ID NO: 238561 - protein, 15 aa, Artificial Sequence
  Description of Artificial Sequence: Synthetic peptide
  Seed: LRMKWMMAMKYPITA
LRMKNMMLMKYPATA

SEQ ID NO: 238562 - protein, 15 aa, Artificial Sequence
  Description of Artificial Sequence: Synthetic peptide
  Seed: LRMKWMMAMKYPITA
LRMKNMMLMNYPITA

SEQ ID NO: 238563 - protein, 15 aa, Artificial Sequence
  Description of Artificial Sequence: Synthetic peptide
  Seed: LRMKWMMAMKYPITA
LRMKNMMLMNYPLTA

SEQ ID NO: 238564 - protein, 15 aa, Artificial Sequence
  Description of Artificial Sequence: Synthetic peptide
  Seed: LRMKWMMAMKYPITA
LRMKNMMLMNYPVTA

SEQ ID NO: 238565 - protein, 15 aa, Artificial Sequence
  Description of Artificial Sequence: Synthetic peptide
  Seed: LRMKWMMAMKYPITA
LRMKNMMLMPYPATA

SEQ ID NO: 238566 - protein, 15 aa, Artificial Sequence
  Description of Artificial Sequence: Synthetic peptide
  Seed: LRMKWMMAMKYPITA
LRMKNMMLMPYPITA

SEQ ID NO: 238567 - protein, 15 aa, Artificial Sequence
  Description of Artificial Sequence: Synthetic peptide
  Seed: LRMKWMMAMKYPITA
LRMKNMMLMPYPLTA

SEQ ID NO: 238568 - protein, 15 aa, Artificial Sequence
  Description of Artificial Sequence: Synthetic peptide
  Seed: LRMKWMMAMKYPITA
LRMKNMMLMPYPMTA

SEQ ID NO: 238569 - protein, 15 aa, Artificial Sequence
  Description of Artificial Sequence: Synthetic peptide
  Seed: LRMKWMMAMKYPITA
LRMKNMMLMPYPVTA

SEQ ID NO: 238570 - protein, 15 aa, Artificial Sequence
  Description of Artificial Sequence: Synthetic peptide
  Seed: LRMKWMMAMKYPITA
LRMKNMMLMRYPATA

SEQ ID NO: 238571 - protein, 15 aa, Artificial Sequence
  Description of Artificial Sequence: Synthetic peptide
  Seed: LRMKWMMAMKYPITA
LRMKNMMLMRYPKTA

SEQ ID NO: 238572 - protein, 15 aa, Artificial Sequence
  Description of Artificial Sequence: Synthetic peptide
  Seed: LRMKWMMAMKYPITA
LRMKNMMLMRYPMTA

SEQ ID NO: 238573 - protein, 15 aa, Artificial Sequence
  Description of Artificial Sequence: Synthetic peptide
  Seed: LRMKWMMAMKYPITA
LRMKNMMLMRYPRTA

SEQ ID NO: 238574 - protein, 15 aa, Artificial Sequence
  Description of Artificial Sequence: Synthetic peptide
  Seed: LRMKWMMAMKYPITA
LRMKNMMLMRYPSTA

SEQ ID NO: 238575 - protein, 15 aa, Artificial Sequence
  Description of Artificial Sequence: Synthetic peptide
  Seed: LRMKWMMAMKYPITA
LRMKNMMLMRYPVTA

SEQ ID NO: 238576 - protein, 15 aa, Artificial Sequence
  Description of Artificial Sequence: Synthetic peptide
  Seed: LRMKWMMAMKYPITA
LRMKNMMLMSYPATA

SEQ ID NO: 238577 - protein, 15 aa, Artificial Sequence
  Description of Artificial Sequence: Synthetic peptide
  Seed: LRMKWMMAMKYPITA
LRMKNMMLMSYPITA

SEQ ID NO: 238578 - protein, 15 aa, Artificial Sequence
  Description of Artificial Sequence: Synthetic peptide
  Seed: LRMKWMMAMKYPITA
LRMKNMMLMSYPLTA

SEQ ID NO: 238579 - protein, 15 aa, Artificial Sequence
  Description of Artificial Sequence: Synthetic peptide
  Seed: LRMKWMMAMKYPITA
LRMKNMMLMSYPMTA

SEQ ID NO: 238580 - protein, 15 aa, Artificial Sequence
  Description of Artificial Sequence: Synthetic peptide
  Seed: LRMKWMMAMKYPITA
LRMKNMMLMSYPSTA

SEQ ID NO: 238581 - protein, 15 aa, Artificial Sequence
  Description of Artificial Sequence: Synthetic peptide
  Seed: LRMKWMMAMKYPITA
LRMKNMMLMSYPTTA

SEQ ID NO: 238582 - protein, 15 aa, Artificial Sequence
  Description of Artificial Sequence: Synthetic peptide
  Seed: LRMKWMMAMKYPITA
LRMKNMMLMSYPVTA

SEQ ID NO: 238583 - protein, 15 aa, Artificial Sequence
  Description of Artificial Sequence: Synthetic peptide
  Seed: LRMKWMMAMKYPITA
LRMKNMMLMTYPATA

SEQ ID NO: 238584 - protein, 15 aa, Artificial Sequence
  Description of Artificial Sequence: Synthetic peptide
  Seed: LRMKWMMAMKYPITA
LRMKNMMLMTYPITA

SEQ ID NO: 238585 - protein, 15 aa, Artificial Sequence
  Description of Artificial Sequence: Synthetic peptide
  Seed: LRMKWMMAMKYPITA
LRMKNMMLMTYPLTA

SEQ ID NO: 238586 - protein, 15 aa, Artificial Sequence
  Description of Artificial Sequence: Synthetic peptide
  Seed: LRMKWMMAMKYPITA
LRMKNMMLMTYPMTA

SEQ ID NO: 238587 - protein, 15 aa, Artificial Sequence
  Description of Artificial Sequence: Synthetic peptide
  Seed: LRMKWMMAMKYPITA
LRMKNMMLMTYPVTA

SEQ ID NO: 238588 - protein, 15 aa, Artificial Sequence
  Description of Artificial Sequence: Synthetic peptide
  Seed: LRMKWMMAMKYPITA
LRMKNMMMMAYPATA

SEQ ID NO: 238589 - protein, 15 aa, Artificial Sequence
  Description of Artificial Sequence: Synthetic peptide
  Seed: LRMKWMMAMKYPITA
LRMKNMMMMAYPITA

SEQ ID NO: 238590 - protein, 15 aa, Artificial Sequence
  Description of Artificial Sequence: Synthetic peptide
  Seed: LRMKWMMAMKYPITA
LRMKNMMMMAYPLTA

SEQ ID NO: 238591 - protein, 15 aa, Artificial Sequence
  Description of Artificial Sequence: Synthetic peptide
  Seed: LRMKWMMAMKYPITA
LRMKNMMMMAYPMTA

SEQ ID NO: 238592 - protein, 15 aa, Artificial Sequence
  Description of Artificial Sequence: Synthetic peptide
  Seed: LRMKWMMAMKYPITA
LRMKNMMMMAYPSTA

SEQ ID NO: 238593 - protein, 15 aa, Artificial Sequence
  Description of Artificial Sequence: Synthetic peptide
  Seed: LRMKWMMAMKYPITA
LRMKNMMMMAYPTTA

SEQ ID NO: 238594 - protein, 15 aa, Artificial Sequence
  Description of Artificial Sequence: Synthetic peptide
  Seed: LRMKWMMAMKYPITA
LRMKNMMMMAYPVTA

SEQ ID NO: 238595 - protein, 15 aa, Artificial Sequence
  Description of Artificial Sequence: Synthetic peptide
  Seed: LRMKWMMAMKYPITA
LRMKNMMMMGYPATA

SEQ ID NO: 238596 - protein, 15 aa, Artificial Sequence
  Description of Artificial Sequence: Synthetic peptide
  Seed: LRMKWMMAMKYPITA
LRMKNMMMMGYPITA

SEQ ID NO: 238597 - protein, 15 aa, Artificial Sequence
  Description of Artificial Sequence: Synthetic peptide
  Seed: LRMKWMMAMKYPITA
LRMKNMMMMGYPLTA

SEQ ID NO: 238598 - protein, 15 aa, Artificial Sequence
  Description of Artificial Sequence: Synthetic peptide
  Seed: LRMKWMMAMKYPITA
LRMKNMMMMGYPMTA

SEQ ID NO: 238599 - protein, 15 aa, Artificial Sequence
  Description of Artificial Sequence: Synthetic peptide
  Seed: LRMKWMMAMKYPITA
LRMKNMMMMGYPTTA

SEQ ID NO: 238600 - protein, 15 aa, Artificial Sequence
  Description of Artificial Sequence: Synthetic peptide
  Seed: LRMKWMMAMKYPITA
LRMKNMMMMGYPVTA

SEQ ID NO: 238601 - protein, 15 aa, Artificial Sequence
  Description of Artificial Sequence: Synthetic peptide
  Seed: LRMKWMMAMKYPITA
LRMKNMMMMKYPATA

SEQ ID NO: 238602 - protein, 15 aa, Artificial Sequence
  Description of Artificial Sequence: Synthetic peptide
  Seed: LRMKWMMAMKYPITA
LRMKNMMMMNYPITA

SEQ ID NO: 238603 - protein, 15 aa, Artificial Sequence
  Description of Artificial Sequence: Synthetic peptide
  Seed: LRMKWMMAMKYPITA
LRMKNMMMMNYPLTA

SEQ ID NO: 238604 - protein, 15 aa, Artificial Sequence
  Description of Artificial Sequence: Synthetic peptide
  Seed: LRMKWMMAMKYPITA
LRMKNMMMMNYPVTA

SEQ ID NO: 238605 - protein, 15 aa, Artificial Sequence
  Description of Artificial Sequence: Synthetic peptide
  Seed: LRMKWMMAMKYPITA
LRMKNMMMMPYPATA

SEQ ID NO: 238606 - protein, 15 aa, Artificial Sequence
  Description of Artificial Sequence: Synthetic peptide
  Seed: LRMKWMMAMKYPITA
LRMKNMMMMPYPITA

SEQ ID NO: 238607 - protein, 15 aa, Artificial Sequence
  Description of Artificial Sequence: Synthetic peptide
  Seed: LRMKWMMAMKYPITA
LRMKNMMMMPYPLTA

SEQ ID NO: 238608 - protein, 15 aa, Artificial Sequence
  Description of Artificial Sequence: Synthetic peptide
  Seed: LRMKWMMAMKYPITA
LRMKNMMMMPYPMTA

SEQ ID NO: 238609 - protein, 15 aa, Artificial Sequence
  Description of Artificial Sequence: Synthetic peptide
  Seed: LRMKWMMAMKYPITA
LRMKNMMMMPYPVTA

SEQ ID NO: 238610 - protein, 15 aa, Artificial Sequence
  Description of Artificial Sequence: Synthetic peptide
  Seed: LRMKWMMAMKYPITA
LRMKNMMMMRYPATA

SEQ ID NO: 238611 - protein, 15 aa, Artificial Sequence
  Description of Artificial Sequence: Synthetic peptide
  Seed: LRMKWMMAMKYPITA
LRMKNMMMMRYPITA

SEQ ID NO: 238612 - protein, 15 aa, Artificial Sequence
  Description of Artificial Sequence: Synthetic peptide
  Seed: LRMKWMMAMKYPITA
LRMKNMMMMRYPKTA

SEQ ID NO: 238613 - protein, 15 aa, Artificial Sequence
  Description of Artificial Sequence: Synthetic peptide
  Seed: LRMKWMMAMKYPITA
LRMKNMMMMRYPLTA

SEQ ID NO: 238614 - protein, 15 aa, Artificial Sequence
  Description of Artificial Sequence: Synthetic peptide
  Seed: LRMKWMMAMKYPITA
LRMKNMMMMRYPMTA

SEQ ID NO: 238615 - protein, 15 aa, Artificial Sequence
  Description of Artificial Sequence: Synthetic peptide
  Seed: LRMKWMMAMKYPITA
LRMKNMMMMRYPRTA

SEQ ID NO: 238616 - protein, 15 aa, Artificial Sequence
  Description of Artificial Sequence: Synthetic peptide
  Seed: LRMKWMMAMKYPITA
LRMKNMMMMRYPSTA

SEQ ID NO: 238617 - protein, 15 aa, Artificial Sequence
  Description of Artificial Sequence: Synthetic peptide
  Seed: LRMKWMMAMKYPITA
LRMKNMMMMRYPVTA

SEQ ID NO: 238618 - protein, 15 aa, Artificial Sequence
  Description of Artificial Sequence: Synthetic peptide
  Seed: LRMKWMMAMKYPITA
LRMKNMMMMSYPATA

SEQ ID NO: 238619 - protein, 15 aa, Artificial Sequence
  Description of Artificial Sequence: Synthetic peptide
  Seed: LRMKWMMAMKYPITA
LRMKNMMMMSYPITA

SEQ ID NO: 238620 - protein, 15 aa, Artificial Sequence
  Description of Artificial Sequence: Synthetic peptide
  Seed: LRMKWMMAMKYPITA
LRMKNMMMMSYPLTA

SEQ ID NO: 238621 - protein, 15 aa, Artificial Sequence
  Description of Artificial Sequence: Synthetic peptide
  Seed: LRMKWMMAMKYPITA
LRMKNMMMMSYPMTA

SEQ ID NO: 238622 - protein, 15 aa, Artificial Sequence
  Description of Artificial Sequence: Synthetic peptide
  Seed: LRMKWMMAMKYPITA
LRMKNMMMMSYPTTA

SEQ ID NO: 238623 - protein, 15 aa, Artificial Sequence
  Description of Artificial Sequence: Synthetic peptide
  Seed: LRMKWMMAMKYPITA
LRMKNMMMMSYPVTA

SEQ ID NO: 238624 - protein, 15 aa, Artificial Sequence
  Description of Artificial Sequence: Synthetic peptide
  Seed: LRMKWMMAMKYPITA
LRMKNMMMMTYPATA

SEQ ID NO: 238625 - protein, 15 aa, Artificial Sequence
  Description of Artificial Sequence: Synthetic peptide
  Seed: LRMKWMMAMKYPITA
LRMKNMMMMTYPITA

SEQ ID NO: 238626 - protein, 15 aa, Artificial Sequence
  Description of Artificial Sequence: Synthetic peptide
  Seed: LRMKWMMAMKYPITA
LRMKNMMMMTYPLTA

SEQ ID NO: 238627 - protein, 15 aa, Artificial Sequence
  Description of Artificial Sequence: Synthetic peptide
  Seed: LRMKWMMAMKYPITA
LRMKNMMMMTYPMTA

SEQ ID NO: 238628 - protein, 15 aa, Artificial Sequence
  Description of Artificial Sequence: Synthetic peptide
  Seed: LRMKWMMAMKYPITA
LRMKNMMMMTYPVTA

SEQ ID NO: 238629 - protein, 15 aa, Artificial Sequence
  Description of Artificial Sequence: Synthetic peptide
  Seed: LRMKWMMAMKYPITA
LRMKNMMNMAYPITA

SEQ ID NO: 238630 - protein, 15 aa, Artificial Sequence
  Description of Artificial Sequence: Synthetic peptide
  Seed: LRMKWMMAMKYPITA
LRMKNMMNMAYPLTA

SEQ ID NO: 238631 - protein, 15 aa, Artificial Sequence
  Description of Artificial Sequence: Synthetic peptide
  Seed: LRMKWMMAMKYPITA
LRMKNMMNMAYPVTA

SEQ ID NO: 238632 - protein, 15 aa, Artificial Sequence
  Description of Artificial Sequence: Synthetic peptide
  Seed: LRMKWMMAMKYPITA
LRMKNMMNMIYPITA

SEQ ID NO: 238633 - protein, 15 aa, Artificial Sequence
  Description of Artificial Sequence: Synthetic peptide
  Seed: LRMKWMMAMKYPITA
LRMKNMMNMNYPITA

SEQ ID NO: 238634 - protein, 15 aa, Artificial Sequence
  Description of Artificial Sequence: Synthetic peptide
  Seed: LRMKWMMAMKYPITA
LRMKNMMNMNYPVTA

SEQ ID NO: 238635 - protein, 15 aa, Artificial Sequence
  Description of Artificial Sequence: Synthetic peptide
  Seed: LRMKWMMAMKYPITA
LRMKNMMNMSYPITA

SEQ ID NO: 238636 - protein, 15 aa, Artificial Sequence
  Description of Artificial Sequence: Synthetic peptide
  Seed: LRMKWMMAMKYPITA
LRMKNMMNMSYPVTA

SEQ ID NO: 238637 - protein, 15 aa, Artificial Sequence
  Description of Artificial Sequence: Synthetic peptide
  Seed: LRMKWMMAMKYPITA
LRMKNMMNMVYPITA

SEQ ID NO: 238638 - protein, 15 aa, Artificial Sequence
  Description of Artificial Sequence: Synthetic peptide
  Seed: LRMKWMMAMKYPITA
LRMKNMMQMGYPLTA

SEQ ID NO: 238639 - protein, 15 aa, Artificial Sequence
  Description of Artificial Sequence: Synthetic peptide
  Seed: LRMKWMMAMKYPITA
LRMKNMMQMSYPLTA

SEQ ID NO: 238640 - protein, 15 aa, Artificial Sequence
  Description of Artificial Sequence: Synthetic peptide
  Seed: LRMKWMMAMKYPITA
LRMKNMMSMAYPATA

SEQ ID NO: 238641 - protein, 15 aa, Artificial Sequence
  Description of Artificial Sequence: Synthetic peptide
  Seed: LRMKWMMAMKYPITA
LRMKNMMSMAYPITA

SEQ ID NO: 238642 - protein, 15 aa, Artificial Sequence
  Description of Artificial Sequence: Synthetic peptide
  Seed: LRMKWMMAMKYPITA
LRMKNMMSMAYPLTA

SEQ ID NO: 238643 - protein, 15 aa, Artificial Sequence
  Description of Artificial Sequence: Synthetic peptide
  Seed: LRMKWMMAMKYPITA
LRMKNMMSMAYPVTA

SEQ ID NO: 238644 - protein, 15 aa, Artificial Sequence
  Description of Artificial Sequence: Synthetic peptide
  Seed: LRMKWMMAMKYPITA
LRMKNMMSMGYPITA

SEQ ID NO: 238645 - protein, 15 aa, Artificial Sequence
  Description of Artificial Sequence: Synthetic peptide
  Seed: LRMKWMMAMKYPITA
LRMKNMMSMGYPLTA

SEQ ID NO: 238646 - protein, 15 aa, Artificial Sequence
  Description of Artificial Sequence: Synthetic peptide
  Seed: LRMKWMMAMKYPITA
LRMKNMMSMGYPVTA

SEQ ID NO: 238647 - protein, 15 aa, Artificial Sequence
  Description of Artificial Sequence: Synthetic peptide
  Seed: LRMKWMMAMKYPITA
LRMKNMMSMIYPATA

SEQ ID NO: 238648 - protein, 15 aa, Artificial Sequence
  Description of Artificial Sequence: Synthetic peptide
  Seed: LRMKWMMAMKYPITA
LRMKNMMSMIYPGTA

SEQ ID NO: 238649 - protein, 15 aa, Artificial Sequence
  Description of Artificial Sequence: Synthetic peptide
  Seed: LRMKWMMAMKYPITA
LRMKNMMSMIYPQTA

SEQ ID NO: 238650 - protein, 15 aa, Artificial Sequence
  Description of Artificial Sequence: Synthetic peptide
  Seed: LRMKWMMAMKYPITA
LRMKNMMSMIYPSTA

SEQ ID NO: 238651 - protein, 15 aa, Artificial Sequence
  Description of Artificial Sequence: Synthetic peptide
  Seed: LRMKWMMAMKYPITA
LRMKNMMSMIYPTTA

SEQ ID NO: 238652 - protein, 15 aa, Artificial Sequence
  Description of Artificial Sequence: Synthetic peptide
  Seed: LRMKWMMAMKYPITA
LRMKNMMSMIYPVTA

SEQ ID NO: 238653 - protein, 15 aa, Artificial Sequence
  Description of Artificial Sequence: Synthetic peptide
  Seed: LRMKWMMAMKYPITA
LRMKNMMSMLYPATA

SEQ ID NO: 238654 - protein, 15 aa, Artificial Sequence
  Description of Artificial Sequence: Synthetic peptide
  Seed: LRMKWMMAMKYPITA
LRMKNMMSMLYPSTA

SEQ ID NO: 238655 - protein, 15 aa, Artificial Sequence
  Description of Artificial Sequence: Synthetic peptide
  Seed: LRMKWMMAMKYPITA
LRMKNMMSMMYPATA

SEQ ID NO: 238656 - protein, 15 aa, Artificial Sequence
  Description of Artificial Sequence: Synthetic peptide
  Seed: LRMKWMMAMKYPITA
LRMKNMMSMMYPSTA

SEQ ID NO: 238657 - protein, 15 aa, Artificial Sequence
  Description of Artificial Sequence: Synthetic peptide
  Seed: LRMKWMMAMKYPITA
LRMKNMMSMPYPLTA

SEQ ID NO: 238658 - protein, 15 aa, Artificial Sequence
  Description of Artificial Sequence: Synthetic peptide
  Seed: LRMKWMMAMKYPITA
LRMKNMMSMSYPITA

SEQ ID NO: 238659 - protein, 15 aa, Artificial Sequence
  Description of Artificial Sequence: Synthetic peptide
  Seed: LRMKWMMAMKYPITA
LRMKNMMSMSYPLTA

SEQ ID NO: 238660 - protein, 15 aa, Artificial Sequence
  Description of Artificial Sequence: Synthetic peptide
  Seed: LRMKWMMAMKYPITA
LRMKNMMSMSYPVTA

SEQ ID NO: 238661 - protein, 15 aa, Artificial Sequence
  Description of Artificial Sequence: Synthetic peptide
  Seed: LRMKWMMAMKYPITA
LRMKNMMSMVYPATA

SEQ ID NO: 238662 - protein, 15 aa, Artificial Sequence
  Description of Artificial Sequence: Synthetic peptide
  Seed: LRMKWMMAMKYPITA
LRMKNMMSMVYPGTA

SEQ ID NO: 238663 - protein, 15 aa, Artificial Sequence
  Description of Artificial Sequence: Synthetic peptide
  Seed: LRMKWMMAMKYPITA
LRMKNMMSMVYPQTA

SEQ ID NO: 238664 - protein, 15 aa, Artificial Sequence
  Description of Artificial Sequence: Synthetic peptide
  Seed: LRMKWMMAMKYPITA
LRMKNMMSMVYPSTA

SEQ ID NO: 238665 - protein, 15 aa, Artificial Sequence
  Description of Artificial Sequence: Synthetic peptide
  Seed: LRMKWMMAMKYPITA
LRMKNMMSMVYPVTA

SEQ ID NO: 238666 - protein, 15 aa, Artificial Sequence
  Description of Artificial Sequence: Synthetic peptide
  Seed: LRMKWMMAMKYPITA
LRMKNMMTMAYPATA

SEQ ID NO: 238667 - protein, 15 aa, Artificial Sequence
  Description of Artificial Sequence: Synthetic peptide
  Seed: LRMKWMMAMKYPITA
LRMKNMMTMAYPITA

SEQ ID NO: 238668 - protein, 15 aa, Artificial Sequence
  Description of Artificial Sequence: Synthetic peptide
  Seed: LRMKWMMAMKYPITA
LRMKNMMTMAYPLTA

SEQ ID NO: 238669 - protein, 15 aa, Artificial Sequence
  Description of Artificial Sequence: Synthetic peptide
  Seed: LRMKWMMAMKYPITA
LRMKNMMTMAYPVTA

SEQ ID NO: 238670 - protein, 15 aa, Artificial Sequence
  Description of Artificial Sequence: Synthetic peptide
  Seed: LRMKWMMAMKYPITA
LRMKNMMTMGYPITA

SEQ ID NO: 238671 - protein, 15 aa, Artificial Sequence
  Description of Artificial Sequence: Synthetic peptide
  Seed: LRMKWMMAMKYPITA
LRMKNMMTMGYPLTA

SEQ ID NO: 238672 - protein, 15 aa, Artificial Sequence
  Description of Artificial Sequence: Synthetic peptide
  Seed: LRMKWMMAMKYPITA
LRMKNMMTMIYPATA

SEQ ID NO: 238673 - protein, 15 aa, Artificial Sequence
  Description of Artificial Sequence: Synthetic peptide
  Seed: LRMKWMMAMKYPITA
LRMKNMMTMIYPSTA

SEQ ID NO: 238674 - protein, 15 aa, Artificial Sequence
  Description of Artificial Sequence: Synthetic peptide
  Seed: LRMKWMMAMKYPITA
LRMKNMMTMLYPATA

SEQ ID NO: 238675 - protein, 15 aa, Artificial Sequence
  Description of Artificial Sequence: Synthetic peptide
  Seed: LRMKWMMAMKYPITA
LRMKNMMTMLYPSTA

SEQ ID NO: 238676 - protein, 15 aa, Artificial Sequence
  Description of Artificial Sequence: Synthetic peptide
  Seed: LRMKWMMAMKYPITA
LRMKNMMTMMYPATA

SEQ ID NO: 238677 - protein, 15 aa, Artificial Sequence
  Description of Artificial Sequence: Synthetic peptide
  Seed: LRMKWMMAMKYPITA
LRMKNMMTMMYPSTA

SEQ ID NO: 238678 - protein, 15 aa, Artificial Sequence
  Description of Artificial Sequence: Synthetic peptide
  Seed: LRMKWMMAMKYPITA
LRMKNMMTMSYPITA

SEQ ID NO: 238679 - protein, 15 aa, Artificial Sequence
  Description of Artificial Sequence: Synthetic peptide
  Seed: LRMKWMMAMKYPITA
LRMKNMMTMSYPLTA

SEQ ID NO: 238680 - protein, 15 aa, Artificial Sequence
  Description of Artificial Sequence: Synthetic peptide
  Seed: LRMKWMMAMKYPITA
LRMKNMMTMSYPVTA

SEQ ID NO: 238681 - protein, 15 aa, Artificial Sequence
  Description of Artificial Sequence: Synthetic peptide
  Seed: LRMKWMMAMKYPITA
LRMKNMMTMVYPATA

SEQ ID NO: 238682 - protein, 15 aa, Artificial Sequence
  Description of Artificial Sequence: Synthetic peptide
  Seed: LRMKWMMAMKYPITA
LRMKNMMTMVYPSTA

SEQ ID NO: 238683 - protein, 15 aa, Artificial Sequence
  Description of Artificial Sequence: Synthetic peptide
  Seed: LRMKWMMAMKYPITA
LRMKNMMVMGYPATA

SEQ ID NO: 238684 - protein, 15 aa, Artificial Sequence
  Description of Artificial Sequence: Synthetic peptide
  Seed: LRMKWMMAMKYPITA
LRMKNMMVMGYPITA

SEQ ID NO: 238685 - protein, 15 aa, Artificial Sequence
  Description of Artificial Sequence: Synthetic peptide
  Seed: LRMKWMMAMKYPITA
LRMKNMMVMGYPLTA

SEQ ID NO: 238686 - protein, 15 aa, Artificial Sequence
  Description of Artificial Sequence: Synthetic peptide
  Seed: LRMKWMMAMKYPITA
LRMKNMMVMGYPMTA

SEQ ID NO: 238687 - protein, 15 aa, Artificial Sequence
  Description of Artificial Sequence: Synthetic peptide
  Seed: LRMKWMMAMKYPITA
LRMKNMMVMGYPVTA

SEQ ID NO: 238688 - protein, 15 aa, Artificial Sequence
  Description of Artificial Sequence: Synthetic peptide
  Seed: LRMKWMMAMKYPITA
LRMKNMMVMIYPATA

SEQ ID NO: 238689 - protein, 15 aa, Artificial Sequence
  Description of Artificial Sequence: Synthetic peptide
  Seed: LRMKWMMAMKYPITA
LRMKNMMVMIYPSTA

SEQ ID NO: 238690 - protein, 15 aa, Artificial Sequence
  Description of Artificial Sequence: Synthetic peptide
  Seed: LRMKWMMAMKYPITA
LRMKNMMVMPYPLTA

SEQ ID NO: 238691 - protein, 15 aa, Artificial Sequence
  Description of Artificial Sequence: Synthetic peptide
  Seed: LRMKWMMAMKYPITA
LRMKNMMVMRYPATA

SEQ ID NO: 238692 - protein, 15 aa, Artificial Sequence
  Description of Artificial Sequence: Synthetic peptide
  Seed: LRMKWMMAMKYPITA
LRMKNMMVMRYPFTA

SEQ ID NO: 238693 - protein, 15 aa, Artificial Sequence
  Description of Artificial Sequence: Synthetic peptide
  Seed: LRMKWMMAMKYPITA
LRMKNMMVMRYPITA

SEQ ID NO: 238694 - protein, 15 aa, Artificial Sequence
  Description of Artificial Sequence: Synthetic peptide
  Seed: LRMKWMMAMKYPITA
LRMKNMMVMRYPLTA

SEQ ID NO: 238695 - protein, 15 aa, Artificial Sequence
  Description of Artificial Sequence: Synthetic peptide
  Seed: LRMKWMMAMKYPITA
LRMKNMMVMRYPRTA

SEQ ID NO: 238696 - protein, 15 aa, Artificial Sequence
  Description of Artificial Sequence: Synthetic peptide
  Seed: LRMKWMMAMKYPITA
LRMKNMMVMRYPSTA

SEQ ID NO: 238697 - protein, 15 aa, Artificial Sequence
  Description of Artificial Sequence: Synthetic peptide
  Seed: LRMKWMMAMKYPITA
LRMKNMMVMRYPVTA

SEQ ID NO: 238698 - protein, 15 aa, Artificial Sequence
  Description of Artificial Sequence: Synthetic peptide
  Seed: LRMKWMMAMKYPITA
LRMKNMMVMRYPYTA

SEQ ID NO: 238699 - protein, 15 aa, Artificial Sequence
  Description of Artificial Sequence: Synthetic peptide
  Seed: LRMKWMMAMKYPITA
LRMKNMMVMSYPITA

SEQ ID NO: 238700 - protein, 15 aa, Artificial Sequence
  Description of Artificial Sequence: Synthetic peptide
  Seed: LRMKWMMAMKYPITA
LRMKNMMVMVYPATA

SEQ ID NO: 238701 - protein, 15 aa, Artificial Sequence
  Description of Artificial Sequence: Synthetic peptide
  Seed: LRMKWMMAMKYPITA
LRMKNMMVMVYPSTA

SEQ ID NO: 238702 - protein, 15 aa, Artificial Sequence
  Description of Artificial Sequence: Synthetic peptide
  Seed: LRMKWMMAMKYPITA
LRMKPMMAMAYPATA

SEQ ID NO: 238703 - protein, 15 aa, Artificial Sequence
  Description of Artificial Sequence: Synthetic peptide
  Seed: LRMKWMMAMKYPITA
LRMKPMMAMAYPFTA

SEQ ID NO: 238704 - protein, 15 aa, Artificial Sequence
  Description of Artificial Sequence: Synthetic peptide
  Seed: LRMKWMMAMKYPITA
LRMKPMMAMAYPITA

SEQ ID NO: 238705 - protein, 15 aa, Artificial Sequence
  Description of Artificial Sequence: Synthetic peptide
  Seed: LRMKWMMAMKYPITA
LRMKPMMAMAYPLTA

SEQ ID NO: 238706 - protein, 15 aa, Artificial Sequence
  Description of Artificial Sequence: Synthetic peptide
  Seed: LRMKWMMAMKYPITA
LRMKPMMAMAYPMTA

SEQ ID NO: 238707 - protein, 15 aa, Artificial Sequence
  Description of Artificial Sequence: Synthetic peptide
  Seed: LRMKWMMAMKYPITA
LRMKPMMAMAYPSTA

SEQ ID NO: 238708 - protein, 15 aa, Artificial Sequence
  Description of Artificial Sequence: Synthetic peptide
  Seed: LRMKWMMAMKYPITA
LRMKPMMAMAYPTTA

SEQ ID NO: 238709 - protein, 15 aa, Artificial Sequence
  Description of Artificial Sequence: Synthetic peptide
  Seed: LRMKWMMAMKYPITA
LRMKPMMAMAYPVTA

SEQ ID NO: 238710 - protein, 15 aa, Artificial Sequence
  Description of Artificial Sequence: Synthetic peptide
  Seed: LRMKWMMAMKYPITA
LRMKPMMAMGYPITA

SEQ ID NO: 238711 - protein, 15 aa, Artificial Sequence
  Description of Artificial Sequence: Synthetic peptide
  Seed: LRMKWMMAMKYPITA
LRMKPMMAMGYPLTA

SEQ ID NO: 238712 - protein, 15 aa, Artificial Sequence
  Description of Artificial Sequence: Synthetic peptide
  Seed: LRMKWMMAMKYPITA
LRMKPMMAMGYPMTA

SEQ ID NO: 238713 - protein, 15 aa, Artificial Sequence
  Description of Artificial Sequence: Synthetic peptide
  Seed: LRMKWMMAMKYPITA
LRMKPMMAMGYPVTA

SEQ ID NO: 238714 - protein, 15 aa, Artificial Sequence
  Description of Artificial Sequence: Synthetic peptide
  Seed: LRMKWMMAMKYPITA
LRMKPMMAMPYPITA

SEQ ID NO: 238715 - protein, 15 aa, Artificial Sequence
  Description of Artificial Sequence: Synthetic peptide
  Seed: LRMKWMMAMKYPITA
LRMKPMMAMPYPLTA

SEQ ID NO: 238716 - protein, 15 aa, Artificial Sequence
  Description of Artificial Sequence: Synthetic peptide
  Seed: LRMKWMMAMKYPITA
LRMKPMMAMPYPMTA

SEQ ID NO: 238717 - protein, 15 aa, Artificial Sequence
  Description of Artificial Sequence: Synthetic peptide
  Seed: LRMKWMMAMKYPITA
LRMKPMMAMPYPVTA

SEQ ID NO: 238718 - protein, 15 aa, Artificial Sequence
  Description of Artificial Sequence: Synthetic peptide
  Seed: LRMKWMMAMKYPITA
LRMKPMMAMSYPATA

SEQ ID NO: 238719 - protein, 15 aa, Artificial Sequence
  Description of Artificial Sequence: Synthetic peptide
  Seed: LRMKWMMAMKYPITA
LRMKPMMAMSYPITA

SEQ ID NO: 238720 - protein, 15 aa, Artificial Sequence
  Description of Artificial Sequence: Synthetic peptide
  Seed: LRMKWMMAMKYPITA
LRMKPMMAMSYPLTA

SEQ ID NO: 238721 - protein, 15 aa, Artificial Sequence
  Description of Artificial Sequence: Synthetic peptide
  Seed: LRMKWMMAMKYPITA
LRMKPMMAMSYPMTA

SEQ ID NO: 238722 - protein, 15 aa, Artificial Sequence
  Description of Artificial Sequence: Synthetic peptide
  Seed: LRMKWMMAMKYPITA
LRMKPMMAMSYPVTA

SEQ ID NO: 238723 - protein, 15 aa, Artificial Sequence
  Description of Artificial Sequence: Synthetic peptide
  Seed: LRMKWMMAMKYPITA
LRMKPMMAMTYPLTA

SEQ ID NO: 238724 - protein, 15 aa, Artificial Sequence
  Description of Artificial Sequence: Synthetic peptide
  Seed: LRMKWMMAMKYPITA
LRMKPMMAMTYPVTA

SEQ ID NO: 238725 - protein, 15 aa, Artificial Sequence
  Description of Artificial Sequence: Synthetic peptide
  Seed: LRMKWMMAMKYPITA
LRMKPMMAMVYPLTA

SEQ ID NO: 238726 - protein, 15 aa, Artificial Sequence
  Description of Artificial Sequence: Synthetic peptide
  Seed: LRMKWMMAMKYPITA
LRMKPMMAMVYPMTA

SEQ ID NO: 238727 - protein, 15 aa, Artificial Sequence
  Description of Artificial Sequence: Synthetic peptide
  Seed: LRMKWMMAMKYPITA
LRMKPMMGMAYPITA

SEQ ID NO: 238728 - protein, 15 aa, Artificial Sequence
  Description of Artificial Sequence: Synthetic peptide
  Seed: LRMKWMMAMKYPITA
LRMKPMMGMAYPLTA

SEQ ID NO: 238729 - protein, 15 aa, Artificial Sequence
  Description of Artificial Sequence: Synthetic peptide
  Seed: LRMKWMMAMKYPITA
LRMKPMMHMRYPRTA

SEQ ID NO: 238730 - protein, 15 aa, Artificial Sequence
  Description of Artificial Sequence: Synthetic peptide
  Seed: LRMKWMMAMKYPITA
LRMKPMMIMAYPATA

SEQ ID NO: 238731 - protein, 15 aa, Artificial Sequence
  Description of Artificial Sequence: Synthetic peptide
  Seed: LRMKWMMAMKYPITA
LRMKPMMIMAYPLTA

SEQ ID NO: 238732 - protein, 15 aa, Artificial Sequence
  Description of Artificial Sequence: Synthetic peptide
  Seed: LRMKWMMAMKYPITA
LRMKPMMIMAYPMTA

SEQ ID NO: 238733 - protein, 15 aa, Artificial Sequence
  Description of Artificial Sequence: Synthetic peptide
  Seed: LRMKWMMAMKYPITA
LRMKPMMIMAYPSTA

SEQ ID NO: 238734 - protein, 15 aa, Artificial Sequence
  Description of Artificial Sequence: Synthetic peptide
  Seed: LRMKWMMAMKYPITA
LRMKPMMIMAYPTTA

SEQ ID NO: 238735 - protein, 15 aa, Artificial Sequence
  Description of Artificial Sequence: Synthetic peptide
  Seed: LRMKWMMAMKYPITA
LRMKPMMIMAYPVTA

SEQ ID NO: 238736 - protein, 15 aa, Artificial Sequence
  Description of Artificial Sequence: Synthetic peptide
  Seed: LRMKWMMAMKYPITA
LRMKPMMIMGYPATA

SEQ ID NO: 238737 - protein, 15 aa, Artificial Sequence
  Description of Artificial Sequence: Synthetic peptide
  Seed: LRMKWMMAMKYPITA
LRMKPMMIMGYPITA

SEQ ID NO: 238738 - protein, 15 aa, Artificial Sequence
  Description of Artificial Sequence: Synthetic peptide
  Seed: LRMKWMMAMKYPITA
LRMKPMMIMGYPLTA

SEQ ID NO: 238739 - protein, 15 aa, Artificial Sequence
  Description of Artificial Sequence: Synthetic peptide
  Seed: LRMKWMMAMKYPITA
LRMKPMMIMGYPMTA

SEQ ID NO: 238740 - protein, 15 aa, Artificial Sequence
  Description of Artificial Sequence: Synthetic peptide
  Seed: LRMKWMMAMKYPITA
LRMKPMMIMGYPVTA

SEQ ID NO: 238741 - protein, 15 aa, Artificial Sequence
  Description of Artificial Sequence: Synthetic peptide
  Seed: LRMKWMMAMKYPITA
LRMKPMMIMPYPITA

SEQ ID NO: 238742 - protein, 15 aa, Artificial Sequence
  Description of Artificial Sequence: Synthetic peptide
  Seed: LRMKWMMAMKYPITA
LRMKPMMIMPYPLTA

SEQ ID NO: 238743 - protein, 15 aa, Artificial Sequence
  Description of Artificial Sequence: Synthetic peptide
  Seed: LRMKWMMAMKYPITA
LRMKPMMIMPYPVTA

SEQ ID NO: 238744 - protein, 15 aa, Artificial Sequence
  Description of Artificial Sequence: Synthetic peptide
  Seed: LRMKWMMAMKYPITA
LRMKPMMIMRYPATA

SEQ ID NO: 238745 - protein, 15 aa, Artificial Sequence
  Description of Artificial Sequence: Synthetic peptide
  Seed: LRMKWMMAMKYPITA
LRMKPMMIMRYPFTA

SEQ ID NO: 238746 - protein, 15 aa, Artificial Sequence
  Description of Artificial Sequence: Synthetic peptide
  Seed: LRMKWMMAMKYPITA
LRMKPMMIMRYPITA

SEQ ID NO: 238747 - protein, 15 aa, Artificial Sequence
  Description of Artificial Sequence: Synthetic peptide
  Seed: LRMKWMMAMKYPITA
LRMKPMMIMRYPLTA

SEQ ID NO: 238748 - protein, 15 aa, Artificial Sequence
  Description of Artificial Sequence: Synthetic peptide
  Seed: LRMKWMMAMKYPITA
LRMKPMMIMRYPMTA

SEQ ID NO: 238749 - protein, 15 aa, Artificial Sequence
  Description of Artificial Sequence: Synthetic peptide
  Seed: LRMKWMMAMKYPITA
LRMKPMMIMRYPRTA

SEQ ID NO: 238750 - protein, 15 aa, Artificial Sequence
  Description of Artificial Sequence: Synthetic peptide
  Seed: LRMKWMMAMKYPITA
LRMKPMMIMRYPSTA

SEQ ID NO: 238751 - protein, 15 aa, Artificial Sequence
  Description of Artificial Sequence: Synthetic peptide
  Seed: LRMKWMMAMKYPITA
LRMKPMMIMRYPVTA

SEQ ID NO: 238752 - protein, 15 aa, Artificial Sequence
  Description of Artificial Sequence: Synthetic peptide
  Seed: LRMKWMMAMKYPITA
LRMKPMMIMRYPYTA

SEQ ID NO: 238753 - protein, 15 aa, Artificial Sequence
  Description of Artificial Sequence: Synthetic peptide
  Seed: LRMKWMMAMKYPITA
LRMKPMMIMSYPATA

SEQ ID NO: 238754 - protein, 15 aa, Artificial Sequence
  Description of Artificial Sequence: Synthetic peptide
  Seed: LRMKWMMAMKYPITA
LRMKPMMIMSYPLTA

SEQ ID NO: 238755 - protein, 15 aa, Artificial Sequence
  Description of Artificial Sequence: Synthetic peptide
  Seed: LRMKWMMAMKYPITA
LRMKPMMIMSYPMTA

SEQ ID NO: 238756 - protein, 15 aa, Artificial Sequence
  Description of Artificial Sequence: Synthetic peptide
  Seed: LRMKWMMAMKYPITA
LRMKPMMIMSYPVTA

SEQ ID NO: 238757 - protein, 15 aa, Artificial Sequence
  Description of Artificial Sequence: Synthetic peptide
  Seed: LRMKWMMAMKYPITA
LRMKPMMLMAYPATA

SEQ ID NO: 238758 - protein, 15 aa, Artificial Sequence
  Description of Artificial Sequence: Synthetic peptide
  Seed: LRMKWMMAMKYPITA
LRMKPMMLMAYPCTA

SEQ ID NO: 238759 - protein, 15 aa, Artificial Sequence
  Description of Artificial Sequence: Synthetic peptide
  Seed: LRMKWMMAMKYPITA
LRMKPMMLMAYPFTA

SEQ ID NO: 238760 - protein, 15 aa, Artificial Sequence
  Description of Artificial Sequence: Synthetic peptide
  Seed: LRMKWMMAMKYPITA
LRMKPMMLMAYPITA

SEQ ID NO: 238761 - protein, 15 aa, Artificial Sequence
  Description of Artificial Sequence: Synthetic peptide
  Seed: LRMKWMMAMKYPITA
LRMKPMMLMAYPLTA

SEQ ID NO: 238762 - protein, 15 aa, Artificial Sequence
  Description of Artificial Sequence: Synthetic peptide
  Seed: LRMKWMMAMKYPITA
LRMKPMMLMAYPMTA

SEQ ID NO: 238763 - protein, 15 aa, Artificial Sequence
  Description of Artificial Sequence: Synthetic peptide
  Seed: LRMKWMMAMKYPITA
LRMKPMMLMAYPSTA

SEQ ID NO: 238764 - protein, 15 aa, Artificial Sequence
  Description of Artificial Sequence: Synthetic peptide
  Seed: LRMKWMMAMKYPITA
LRMKPMMLMAYPTTA

SEQ ID NO: 238765 - protein, 15 aa, Artificial Sequence
  Description of Artificial Sequence: Synthetic peptide
  Seed: LRMKWMMAMKYPITA
LRMKPMMLMAYPVTA

SEQ ID NO: 238766 - protein, 15 aa, Artificial Sequence
  Description of Artificial Sequence: Synthetic peptide
  Seed: LRMKWMMAMKYPITA
LRMKPMMLMAYPYTA

SEQ ID NO: 238767 - protein, 15 aa, Artificial Sequence
  Description of Artificial Sequence: Synthetic peptide
  Seed: LRMKWMMAMKYPITA
LRMKPMMLMGYPATA

SEQ ID NO: 238768 - protein, 15 aa, Artificial Sequence
  Description of Artificial Sequence: Synthetic peptide
  Seed: LRMKWMMAMKYPITA
LRMKPMMLMGYPITA

SEQ ID NO: 238769 - protein, 15 aa, Artificial Sequence
  Description of Artificial Sequence: Synthetic peptide
  Seed: LRMKWMMAMKYPITA
LRMKPMMLMGYPLTA

SEQ ID NO: 238770 - protein, 15 aa, Artificial Sequence
  Description of Artificial Sequence: Synthetic peptide
  Seed: LRMKWMMAMKYPITA
LRMKPMMLMGYPMTA

SEQ ID NO: 238771 - protein, 15 aa, Artificial Sequence
  Description of Artificial Sequence: Synthetic peptide
  Seed: LRMKWMMAMKYPITA
LRMKPMMLMGYPTTA

SEQ ID NO: 238772 - protein, 15 aa, Artificial Sequence
  Description of Artificial Sequence: Synthetic peptide
  Seed: LRMKWMMAMKYPITA
LRMKPMMLMGYPVTA

SEQ ID NO: 238773 - protein, 15 aa, Artificial Sequence
  Description of Artificial Sequence: Synthetic peptide
  Seed: LRMKWMMAMKYPITA
LRMKPMMLMNYPITA

SEQ ID NO: 238774 - protein, 15 aa, Artificial Sequence
  Description of Artificial Sequence: Synthetic peptide
  Seed: LRMKWMMAMKYPITA
LRMKPMMLMNYPLTA

SEQ ID NO: 238775 - protein, 15 aa, Artificial Sequence
  Description of Artificial Sequence: Synthetic peptide
  Seed: LRMKWMMAMKYPITA
LRMKPMMLMNYPVTA

SEQ ID NO: 238776 - protein, 15 aa, Artificial Sequence
  Description of Artificial Sequence: Synthetic peptide
  Seed: LRMKWMMAMKYPITA
LRMKPMMLMPYPATA

SEQ ID NO: 238777 - protein, 15 aa, Artificial Sequence
  Description of Artificial Sequence: Synthetic peptide
  Seed: LRMKWMMAMKYPITA
LRMKPMMLMPYPITA

SEQ ID NO: 238778 - protein, 15 aa, Artificial Sequence
  Description of Artificial Sequence: Synthetic peptide
  Seed: LRMKWMMAMKYPITA
LRMKPMMLMPYPLTA

SEQ ID NO: 238779 - protein, 15 aa, Artificial Sequence
  Description of Artificial Sequence: Synthetic peptide
  Seed: LRMKWMMAMKYPITA
LRMKPMMLMPYPMTA

SEQ ID NO: 238780 - protein, 15 aa, Artificial Sequence
  Description of Artificial Sequence: Synthetic peptide
  Seed: LRMKWMMAMKYPITA
LRMKPMMLMPYPVTA

SEQ ID NO: 238781 - protein, 15 aa, Artificial Sequence
  Description of Artificial Sequence: Synthetic peptide
  Seed: LRMKWMMAMKYPITA
LRMKPMMLMRYPATA

SEQ ID NO: 238782 - protein, 15 aa, Artificial Sequence
  Description of Artificial Sequence: Synthetic peptide
  Seed: LRMKWMMAMKYPITA
LRMKPMMLMSYPATA

SEQ ID NO: 238783 - protein, 15 aa, Artificial Sequence
  Description of Artificial Sequence: Synthetic peptide
  Seed: LRMKWMMAMKYPITA
LRMKPMMLMSYPITA

SEQ ID NO: 238784 - protein, 15 aa, Artificial Sequence
  Description of Artificial Sequence: Synthetic peptide
  Seed: LRMKWMMAMKYPITA
LRMKPMMLMSYPLTA

SEQ ID NO: 238785 - protein, 15 aa, Artificial Sequence
  Description of Artificial Sequence: Synthetic peptide
  Seed: LRMKWMMAMKYPITA
LRMKPMMLMSYPMTA

SEQ ID NO: 238786 - protein, 15 aa, Artificial Sequence
  Description of Artificial Sequence: Synthetic peptide
  Seed: LRMKWMMAMKYPITA
LRMKPMMLMSYPSTA

SEQ ID NO: 238787 - protein, 15 aa, Artificial Sequence
  Description of Artificial Sequence: Synthetic peptide
  Seed: LRMKWMMAMKYPITA
LRMKPMMLMSYPTTA

SEQ ID NO: 238788 - protein, 15 aa, Artificial Sequence
  Description of Artificial Sequence: Synthetic peptide
  Seed: LRMKWMMAMKYPITA
LRMKPMMLMSYPVTA

SEQ ID NO: 238789 - protein, 15 aa, Artificial Sequence
  Description of Artificial Sequence: Synthetic peptide
  Seed: LRMKWMMAMKYPITA
LRMKPMMLMTYPATA

SEQ ID NO: 238790 - protein, 15 aa, Artificial Sequence
  Description of Artificial Sequence: Synthetic peptide
  Seed: LRMKWMMAMKYPITA
LRMKPMMLMTYPITA

SEQ ID NO: 238791 - protein, 15 aa, Artificial Sequence
  Description of Artificial Sequence: Synthetic peptide
  Seed: LRMKWMMAMKYPITA
LRMKPMMLMTYPLTA

SEQ ID NO: 238792 - protein, 15 aa, Artificial Sequence
  Description of Artificial Sequence: Synthetic peptide
  Seed: LRMKWMMAMKYPITA
LRMKPMMLMTYPMTA

SEQ ID NO: 238793 - protein, 15 aa, Artificial Sequence
  Description of Artificial Sequence: Synthetic peptide
  Seed: LRMKWMMAMKYPITA
LRMKPMMLMTYPVTA

SEQ ID NO: 238794 - protein, 15 aa, Artificial Sequence
  Description of Artificial Sequence: Synthetic peptide
  Seed: LRMKWMMAMKYPITA
LRMKPMMLMVYPATA

SEQ ID NO: 238795 - protein, 15 aa, Artificial Sequence
  Description of Artificial Sequence: Synthetic peptide
  Seed: LRMKWMMAMKYPITA
LRMKPMMLMVYPITA

SEQ ID NO: 238796 - protein, 15 aa, Artificial Sequence
  Description of Artificial Sequence: Synthetic peptide
  Seed: LRMKWMMAMKYPITA
LRMKPMMLMVYPLTA

SEQ ID NO: 238797 - protein, 15 aa, Artificial Sequence
  Description of Artificial Sequence: Synthetic peptide
  Seed: LRMKWMMAMKYPITA
LRMKPMMLMVYPMTA

SEQ ID NO: 238798 - protein, 15 aa, Artificial Sequence
  Description of Artificial Sequence: Synthetic peptide
  Seed: LRMKWMMAMKYPITA
LRMKPMMLMVYPVTA

SEQ ID NO: 238799 - protein, 15 aa, Artificial Sequence
  Description of Artificial Sequence: Synthetic peptide
  Seed: LRMKWMMAMKYPITA
LRMKPMMMMAYPATA

SEQ ID NO: 238800 - protein, 15 aa, Artificial Sequence
  Description of Artificial Sequence: Synthetic peptide
  Seed: LRMKWMMAMKYPITA
LRMKPMMMMAYPCTA

SEQ ID NO: 238801 - protein, 15 aa, Artificial Sequence
  Description of Artificial Sequence: Synthetic peptide
  Seed: LRMKWMMAMKYPITA
LRMKPMMMMAYPFTA

SEQ ID NO: 238802 - protein, 15 aa, Artificial Sequence
  Description of Artificial Sequence: Synthetic peptide
  Seed: LRMKWMMAMKYPITA
LRMKPMMMMAYPITA

SEQ ID NO: 238803 - protein, 15 aa, Artificial Sequence
  Description of Artificial Sequence: Synthetic peptide
  Seed: LRMKWMMAMKYPITA
LRMKPMMMMAYPLTA

SEQ ID NO: 238804 - protein, 15 aa, Artificial Sequence
  Description of Artificial Sequence: Synthetic peptide
  Seed: LRMKWMMAMKYPITA
LRMKPMMMMAYPMTA

SEQ ID NO: 238805 - protein, 15 aa, Artificial Sequence
  Description of Artificial Sequence: Synthetic peptide
  Seed: LRMKWMMAMKYPITA
LRMKPMMMMAYPSTA

SEQ ID NO: 238806 - protein, 15 aa, Artificial Sequence
  Description of Artificial Sequence: Synthetic peptide
  Seed: LRMKWMMAMKYPITA
LRMKPMMMMAYPTTA

SEQ ID NO: 238807 - protein, 15 aa, Artificial Sequence
  Description of Artificial Sequence: Synthetic peptide
  Seed: LRMKWMMAMKYPITA
LRMKPMMMMAYPVTA

SEQ ID NO: 238808 - protein, 15 aa, Artificial Sequence
  Description of Artificial Sequence: Synthetic peptide
  Seed: LRMKWMMAMKYPITA
LRMKPMMMMGYPATA

SEQ ID NO: 238809 - protein, 15 aa, Artificial Sequence
  Description of Artificial Sequence: Synthetic peptide
  Seed: LRMKWMMAMKYPITA
LRMKPMMMMGYPITA

SEQ ID NO: 238810 - protein, 15 aa, Artificial Sequence
  Description of Artificial Sequence: Synthetic peptide
  Seed: LRMKWMMAMKYPITA
LRMKPMMMMGYPLTA

SEQ ID NO: 238811 - protein, 15 aa, Artificial Sequence
  Description of Artificial Sequence: Synthetic peptide
  Seed: LRMKWMMAMKYPITA
LRMKPMMMMGYPMTA

SEQ ID NO: 238812 - protein, 15 aa, Artificial Sequence
  Description of Artificial Sequence: Synthetic peptide
  Seed: LRMKWMMAMKYPITA
LRMKPMMMMGYPVTA

SEQ ID NO: 238813 - protein, 15 aa, Artificial Sequence
  Description of Artificial Sequence: Synthetic peptide
  Seed: LRMKWMMAMKYPITA
LRMKPMMMMNYPITA

SEQ ID NO: 238814 - protein, 15 aa, Artificial Sequence
  Description of Artificial Sequence: Synthetic peptide
  Seed: LRMKWMMAMKYPITA
LRMKPMMMMNYPLTA

SEQ ID NO: 238815 - protein, 15 aa, Artificial Sequence
  Description of Artificial Sequence: Synthetic peptide
  Seed: LRMKWMMAMKYPITA
LRMKPMMMMNYPVTA

SEQ ID NO: 238816 - protein, 15 aa, Artificial Sequence
  Description of Artificial Sequence: Synthetic peptide
  Seed: LRMKWMMAMKYPITA
LRMKPMMMMPYPITA

SEQ ID NO: 238817 - protein, 15 aa, Artificial Sequence
  Description of Artificial Sequence: Synthetic peptide
  Seed: LRMKWMMAMKYPITA
LRMKPMMMMPYPLTA

SEQ ID NO: 238818 - protein, 15 aa, Artificial Sequence
  Description of Artificial Sequence: Synthetic peptide
  Seed: LRMKWMMAMKYPITA
LRMKPMMMMPYPMTA

SEQ ID NO: 238819 - protein, 15 aa, Artificial Sequence
  Description of Artificial Sequence: Synthetic peptide
  Seed: LRMKWMMAMKYPITA
LRMKPMMMMPYPVTA

SEQ ID NO: 238820 - protein, 15 aa, Artificial Sequence
  Description of Artificial Sequence: Synthetic peptide
  Seed: LRMKWMMAMKYPITA
LRMKPMMMMRYPATA

SEQ ID NO: 238821 - protein, 15 aa, Artificial Sequence
  Description of Artificial Sequence: Synthetic peptide
  Seed: LRMKWMMAMKYPITA
LRMKPMMMMRYPRTA

SEQ ID NO: 238822 - protein, 15 aa, Artificial Sequence
  Description of Artificial Sequence: Synthetic peptide
  Seed: LRMKWMMAMKYPITA
LRMKPMMMMSYPATA

SEQ ID NO: 238823 - protein, 15 aa, Artificial Sequence
  Description of Artificial Sequence: Synthetic peptide
  Seed: LRMKWMMAMKYPITA
LRMKPMMMMSYPITA

SEQ ID NO: 238824 - protein, 15 aa, Artificial Sequence
  Description of Artificial Sequence: Synthetic peptide
  Seed: LRMKWMMAMKYPITA
LRMKPMMMMSYPLTA

SEQ ID NO: 238825 - protein, 15 aa, Artificial Sequence
  Description of Artificial Sequence: Synthetic peptide
  Seed: LRMKWMMAMKYPITA
LRMKPMMMMSYPMTA

SEQ ID NO: 238826 - protein, 15 aa, Artificial Sequence
  Description of Artificial Sequence: Synthetic peptide
  Seed: LRMKWMMAMKYPITA
LRMKPMMMMSYPTTA

SEQ ID NO: 238827 - protein, 15 aa, Artificial Sequence
  Description of Artificial Sequence: Synthetic peptide
  Seed: LRMKWMMAMKYPITA
LRMKPMMMMSYPVTA

SEQ ID NO: 238828 - protein, 15 aa, Artificial Sequence
  Description of Artificial Sequence: Synthetic peptide
  Seed: LRMKWMMAMKYPITA
LRMKPMMMMTYPATA

SEQ ID NO: 238829 - protein, 15 aa, Artificial Sequence
  Description of Artificial Sequence: Synthetic peptide
  Seed: LRMKWMMAMKYPITA
LRMKPMMMMTYPITA

SEQ ID NO: 238830 - protein, 15 aa, Artificial Sequence
  Description of Artificial Sequence: Synthetic peptide
  Seed: LRMKWMMAMKYPITA
LRMKPMMMMTYPLTA

SEQ ID NO: 238831 - protein, 15 aa, Artificial Sequence
  Description of Artificial Sequence: Synthetic peptide
  Seed: LRMKWMMAMKYPITA
LRMKPMMMMTYPMTA

SEQ ID NO: 238832 - protein, 15 aa, Artificial Sequence
  Description of Artificial Sequence: Synthetic peptide
  Seed: LRMKWMMAMKYPITA
LRMKPMMMMTYPVTA

SEQ ID NO: 238833 - protein, 15 aa, Artificial Sequence
  Description of Artificial Sequence: Synthetic peptide
  Seed: LRMKWMMAMKYPITA
LRMKPMMMMVYPATA

SEQ ID NO: 238834 - protein, 15 aa, Artificial Sequence
  Description of Artificial Sequence: Synthetic peptide
  Seed: LRMKWMMAMKYPITA
LRMKPMMMMVYPITA

SEQ ID NO: 238835 - protein, 15 aa, Artificial Sequence
  Description of Artificial Sequence: Synthetic peptide
  Seed: LRMKWMMAMKYPITA
LRMKPMMMMVYPLTA

SEQ ID NO: 238836 - protein, 15 aa, Artificial Sequence
  Description of Artificial Sequence: Synthetic peptide
  Seed: LRMKWMMAMKYPITA
LRMKPMMMMVYPMTA

SEQ ID NO: 238837 - protein, 15 aa, Artificial Sequence
  Description of Artificial Sequence: Synthetic peptide
  Seed: LRMKWMMAMKYPITA
LRMKPMMMMVYPSTA

SEQ ID NO: 238838 - protein, 15 aa, Artificial Sequence
  Description of Artificial Sequence: Synthetic peptide
  Seed: LRMKWMMAMKYPITA
LRMKPMMMMVYPVTA

SEQ ID NO: 238839 - protein, 15 aa, Artificial Sequence
  Description of Artificial Sequence: Synthetic peptide
  Seed: LRMKWMMAMKYPITA
LRMKPMMNMAYPITA

SEQ ID NO: 238840 - protein, 15 aa, Artificial Sequence
  Description of Artificial Sequence: Synthetic peptide
  Seed: LRMKWMMAMKYPITA
LRMKPMMNMAYPLTA

SEQ ID NO: 238841 - protein, 15 aa, Artificial Sequence
  Description of Artificial Sequence: Synthetic peptide
  Seed: LRMKWMMAMKYPITA
LRMKPMMNMAYPVTA

SEQ ID NO: 238842 - protein, 15 aa, Artificial Sequence
  Description of Artificial Sequence: Synthetic peptide
  Seed: LRMKWMMAMKYPITA
LRMKPMMNMIYPITA

SEQ ID NO: 238843 - protein, 15 aa, Artificial Sequence
  Description of Artificial Sequence: Synthetic peptide
  Seed: LRMKWMMAMKYPITA
LRMKPMMNMNYPITA

SEQ ID NO: 238844 - protein, 15 aa, Artificial Sequence
  Description of Artificial Sequence: Synthetic peptide
  Seed: LRMKWMMAMKYPITA
LRMKPMMNMNYPLTA

SEQ ID NO: 238845 - protein, 15 aa, Artificial Sequence
  Description of Artificial Sequence: Synthetic peptide
  Seed: LRMKWMMAMKYPITA
LRMKPMMNMNYPVTA

SEQ ID NO: 238846 - protein, 15 aa, Artificial Sequence
  Description of Artificial Sequence: Synthetic peptide
  Seed: LRMKWMMAMKYPITA
LRMKPMMNMSYPITA

SEQ ID NO: 238847 - protein, 15 aa, Artificial Sequence
  Description of Artificial Sequence: Synthetic peptide
  Seed: LRMKWMMAMKYPITA
LRMKPMMNMSYPVTA

SEQ ID NO: 238848 - protein, 15 aa, Artificial Sequence
  Description of Artificial Sequence: Synthetic peptide
  Seed: LRMKWMMAMKYPITA
LRMKPMMNMVYPITA

SEQ ID NO: 238849 - protein, 15 aa, Artificial Sequence
  Description of Artificial Sequence: Synthetic peptide
  Seed: LRMKWMMAMKYPITA
LRMKPMMQMAYPITA

SEQ ID NO: 238850 - protein, 15 aa, Artificial Sequence
  Description of Artificial Sequence: Synthetic peptide
  Seed: LRMKWMMAMKYPITA
LRMKPMMQMAYPLTA

SEQ ID NO: 238851 - protein, 15 aa, Artificial Sequence
  Description of Artificial Sequence: Synthetic peptide
  Seed: LRMKWMMAMKYPITA
LRMKPMMQMAYPMTA

SEQ ID NO: 238852 - protein, 15 aa, Artificial Sequence
  Description of Artificial Sequence: Synthetic peptide
  Seed: LRMKWMMAMKYPITA
LRMKPMMQMAYPVTA

SEQ ID NO: 238853 - protein, 15 aa, Artificial Sequence
  Description of Artificial Sequence: Synthetic peptide
  Seed: LRMKWMMAMKYPITA
LRMKPMMSMAYPATA

SEQ ID NO: 238854 - protein, 15 aa, Artificial Sequence
  Description of Artificial Sequence: Synthetic peptide
  Seed: LRMKWMMAMKYPITA
LRMKPMMSMAYPITA

SEQ ID NO: 238855 - protein, 15 aa, Artificial Sequence
  Description of Artificial Sequence: Synthetic peptide
  Seed: LRMKWMMAMKYPITA
LRMKPMMSMAYPLTA

SEQ ID NO: 238856 - protein, 15 aa, Artificial Sequence
  Description of Artificial Sequence: Synthetic peptide
  Seed: LRMKWMMAMKYPITA
LRMKPMMSMAYPMTA

SEQ ID NO: 238857 - protein, 15 aa, Artificial Sequence
  Description of Artificial Sequence: Synthetic peptide
  Seed: LRMKWMMAMKYPITA
LRMKPMMSMAYPVTA

SEQ ID NO: 238858 - protein, 15 aa, Artificial Sequence
  Description of Artificial Sequence: Synthetic peptide
  Seed: LRMKWMMAMKYPITA
LRMKPMMSMGYPLTA

SEQ ID NO: 238859 - protein, 15 aa, Artificial Sequence
  Description of Artificial Sequence: Synthetic peptide
  Seed: LRMKWMMAMKYPITA
LRMKPMMSMSYPITA

SEQ ID NO: 238860 - protein, 15 aa, Artificial Sequence
  Description of Artificial Sequence: Synthetic peptide
  Seed: LRMKWMMAMKYPITA
LRMKPMMSMSYPLTA

SEQ ID NO: 238861 - protein, 15 aa, Artificial Sequence
  Description of Artificial Sequence: Synthetic peptide
  Seed: LRMKWMMAMKYPITA
LRMKPMMSMSYPVTA

SEQ ID NO: 238862 - protein, 15 aa, Artificial Sequence
  Description of Artificial Sequence: Synthetic peptide
  Seed: LRMKWMMAMKYPITA
LRMKPMMTMAYPATA

SEQ ID NO: 238863 - protein, 15 aa, Artificial Sequence
  Description of Artificial Sequence: Synthetic peptide
  Seed: LRMKWMMAMKYPITA
LRMKPMMTMAYPITA

SEQ ID NO: 238864 - protein, 15 aa, Artificial Sequence
  Description of Artificial Sequence: Synthetic peptide
  Seed: LRMKWMMAMKYPITA
LRMKPMMTMAYPLTA

SEQ ID NO: 238865 - protein, 15 aa, Artificial Sequence
  Description of Artificial Sequence: Synthetic peptide
  Seed: LRMKWMMAMKYPITA
LRMKPMMTMAYPMTA

SEQ ID NO: 238866 - protein, 15 aa, Artificial Sequence
  Description of Artificial Sequence: Synthetic peptide
  Seed: LRMKWMMAMKYPITA
LRMKPMMTMAYPVTA

SEQ ID NO: 238867 - protein, 15 aa, Artificial Sequence
  Description of Artificial Sequence: Synthetic peptide
  Seed: LRMKWMMAMKYPITA
LRMKPMMTMSYPITA

SEQ ID NO: 238868 - protein, 15 aa, Artificial Sequence
  Description of Artificial Sequence: Synthetic peptide
  Seed: LRMKWMMAMKYPITA
LRMKPMMTMSYPLTA

SEQ ID NO: 238869 - protein, 15 aa, Artificial Sequence
  Description of Artificial Sequence: Synthetic peptide
  Seed: LRMKWMMAMKYPITA
LRMKPMMTMSYPVTA

SEQ ID NO: 238870 - protein, 15 aa, Artificial Sequence
  Description of Artificial Sequence: Synthetic peptide
  Seed: LRMKWMMAMKYPITA
LRMKPMMVMGYPATA

SEQ ID NO: 238871 - protein, 15 aa, Artificial Sequence
  Description of Artificial Sequence: Synthetic peptide
  Seed: LRMKWMMAMKYPITA
LRMKPMMVMGYPITA

SEQ ID NO: 238872 - protein, 15 aa, Artificial Sequence
  Description of Artificial Sequence: Synthetic peptide
  Seed: LRMKWMMAMKYPITA
LRMKPMMVMGYPLTA

SEQ ID NO: 238873 - protein, 15 aa, Artificial Sequence
  Description of Artificial Sequence: Synthetic peptide
  Seed: LRMKWMMAMKYPITA
LRMKPMMVMGYPMTA

SEQ ID NO: 238874 - protein, 15 aa, Artificial Sequence
  Description of Artificial Sequence: Synthetic peptide
  Seed: LRMKWMMAMKYPITA
LRMKPMMVMGYPVTA

SEQ ID NO: 238875 - protein, 15 aa, Artificial Sequence
  Description of Artificial Sequence: Synthetic peptide
  Seed: LRMKWMMAMKYPITA
LRMKPMMVMRYPRTA

SEQ ID NO: 238876 - protein, 15 aa, Artificial Sequence
  Description of Artificial Sequence: Synthetic peptide
  Seed: LRMKWMMAMKYPITA
LRMKPMMVMRYPYTA

SEQ ID NO: 238877 - protein, 15 aa, Artificial Sequence
  Description of Artificial Sequence: Synthetic peptide
  Seed: LRMKWMMAMKYPITA
LRMKPMMVMSYPATA

SEQ ID NO: 238878 - protein, 15 aa, Artificial Sequence
  Description of Artificial Sequence: Synthetic peptide
  Seed: LRMKWMMAMKYPITA
LRMKPMMVMSYPITA

SEQ ID NO: 238879 - protein, 15 aa, Artificial Sequence
  Description of Artificial Sequence: Synthetic peptide
  Seed: LRMKWMMAMKYPITA
LRMKPMMVMSYPLTA

SEQ ID NO: 238880 - protein, 15 aa, Artificial Sequence
  Description of Artificial Sequence: Synthetic peptide
  Seed: LRMKWMMAMKYPITA
LRMKPMMVMSYPMTA

SEQ ID NO: 238881 - protein, 15 aa, Artificial Sequence
  Description of Artificial Sequence: Synthetic peptide
  Seed: LRMKWMMAMKYPITA
LRMKQMMAMAYPATA

SEQ ID NO: 238882 - protein, 15 aa, Artificial Sequence
  Description of Artificial Sequence: Synthetic peptide
  Seed: LRMKWMMAMKYPITA
LRMKQMMAMAYPCTA

SEQ ID NO: 238883 - protein, 15 aa, Artificial Sequence
  Description of Artificial Sequence: Synthetic peptide
  Seed: LRMKWMMAMKYPITA
LRMKQMMAMAYPITA

SEQ ID NO: 238884 - protein, 15 aa, Artificial Sequence
  Description of Artificial Sequence: Synthetic peptide
  Seed: LRMKWMMAMKYPITA
LRMKQMMAMAYPLTA

SEQ ID NO: 238885 - protein, 15 aa, Artificial Sequence
  Description of Artificial Sequence: Synthetic peptide
  Seed: LRMKWMMAMKYPITA
LRMKQMMAMAYPMTA

SEQ ID NO: 238886 - protein, 15 aa, Artificial Sequence
  Description of Artificial Sequence: Synthetic peptide
  Seed: LRMKWMMAMKYPITA
LRMKQMMAMAYPSTA

SEQ ID NO: 238887 - protein, 15 aa, Artificial Sequence
  Description of Artificial Sequence: Synthetic peptide
  Seed: LRMKWMMAMKYPITA
LRMKQMMAMAYPTTA

SEQ ID NO: 238888 - protein, 15 aa, Artificial Sequence
  Description of Artificial Sequence: Synthetic peptide
  Seed: LRMKWMMAMKYPITA
LRMKQMMAMAYPVTA

SEQ ID NO: 238889 - protein, 15 aa, Artificial Sequence
  Description of Artificial Sequence: Synthetic peptide
  Seed: LRMKWMMAMKYPITA
LRMKQMMAMGYPATA

SEQ ID NO: 238890 - protein, 15 aa, Artificial Sequence
  Description of Artificial Sequence: Synthetic peptide
  Seed: LRMKWMMAMKYPITA
LRMKQMMAMGYPITA

SEQ ID NO: 238891 - protein, 15 aa, Artificial Sequence
  Description of Artificial Sequence: Synthetic peptide
  Seed: LRMKWMMAMKYPITA
LRMKQMMAMGYPLTA

SEQ ID NO: 238892 - protein, 15 aa, Artificial Sequence
  Description of Artificial Sequence: Synthetic peptide
  Seed: LRMKWMMAMKYPITA
LRMKQMMAMGYPMTA

SEQ ID NO: 238893 - protein, 15 aa, Artificial Sequence
  Description of Artificial Sequence: Synthetic peptide
  Seed: LRMKWMMAMKYPITA
LRMKQMMAMGYPVTA

SEQ ID NO: 238894 - protein, 15 aa, Artificial Sequence
  Description of Artificial Sequence: Synthetic peptide
  Seed: LRMKWMMAMKYPITA
LRMKQMMAMIYPATA

SEQ ID NO: 238895 - protein, 15 aa, Artificial Sequence
  Description of Artificial Sequence: Synthetic peptide
  Seed: LRMKWMMAMKYPITA
LRMKQMMAMIYPSTA

SEQ ID NO: 238896 - protein, 15 aa, Artificial Sequence
  Description of Artificial Sequence: Synthetic peptide
  Seed: LRMKWMMAMKYPITA
LRMKQMMAMPYPATA

SEQ ID NO: 238897 - protein, 15 aa, Artificial Sequence
  Description of Artificial Sequence: Synthetic peptide
  Seed: LRMKWMMAMKYPITA
LRMKQMMAMPYPITA

SEQ ID NO: 238898 - protein, 15 aa, Artificial Sequence
  Description of Artificial Sequence: Synthetic peptide
  Seed: LRMKWMMAMKYPITA
LRMKQMMAMPYPLTA

SEQ ID NO: 238899 - protein, 15 aa, Artificial Sequence
  Description of Artificial Sequence: Synthetic peptide
  Seed: LRMKWMMAMKYPITA
LRMKQMMAMPYPMTA

SEQ ID NO: 238900 - protein, 15 aa, Artificial Sequence
  Description of Artificial Sequence: Synthetic peptide
  Seed: LRMKWMMAMKYPITA
LRMKQMMAMPYPVTA

SEQ ID NO: 238901 - protein, 15 aa, Artificial Sequence
  Description of Artificial Sequence: Synthetic peptide
  Seed: LRMKWMMAMKYPITA
LRMKQMMAMSYPATA

SEQ ID NO: 238902 - protein, 15 aa, Artificial Sequence
  Description of Artificial Sequence: Synthetic peptide
  Seed: LRMKWMMAMKYPITA
LRMKQMMAMSYPITA

SEQ ID NO: 238903 - protein, 15 aa, Artificial Sequence
  Description of Artificial Sequence: Synthetic peptide
  Seed: LRMKWMMAMKYPITA
LRMKQMMAMSYPLTA

SEQ ID NO: 238904 - protein, 15 aa, Artificial Sequence
  Description of Artificial Sequence: Synthetic peptide
  Seed: LRMKWMMAMKYPITA
LRMKQMMAMSYPMTA

SEQ ID NO: 238905 - protein, 15 aa, Artificial Sequence
  Description of Artificial Sequence: Synthetic peptide
  Seed: LRMKWMMAMKYPITA
LRMKQMMAMSYPTTA

SEQ ID NO: 238906 - protein, 15 aa, Artificial Sequence
  Description of Artificial Sequence: Synthetic peptide
  Seed: LRMKWMMAMKYPITA
LRMKQMMAMSYPVTA

SEQ ID NO: 238907 - protein, 15 aa, Artificial Sequence
  Description of Artificial Sequence: Synthetic peptide
  Seed: LRMKWMMAMKYPITA
LRMKQMMAMTYPITA

SEQ ID NO: 238908 - protein, 15 aa, Artificial Sequence
  Description of Artificial Sequence: Synthetic peptide
  Seed: LRMKWMMAMKYPITA
LRMKQMMAMTYPLTA

SEQ ID NO: 238909 - protein, 15 aa, Artificial Sequence
  Description of Artificial Sequence: Synthetic peptide
  Seed: LRMKWMMAMKYPITA
LRMKQMMAMTYPMTA

SEQ ID NO: 238910 - protein, 15 aa, Artificial Sequence
  Description of Artificial Sequence: Synthetic peptide
  Seed: LRMKWMMAMKYPITA
LRMKQMMAMTYPVTA

SEQ ID NO: 238911 - protein, 15 aa, Artificial Sequence
  Description of Artificial Sequence: Synthetic peptide
  Seed: LRMKWMMAMKYPITA
LRMKQMMAMVYPATA

SEQ ID NO: 238912 - protein, 15 aa, Artificial Sequence
  Description of Artificial Sequence: Synthetic peptide
  Seed: LRMKWMMAMKYPITA
LRMKQMMAMVYPLTA

SEQ ID NO: 238913 - protein, 15 aa, Artificial Sequence
  Description of Artificial Sequence: Synthetic peptide
  Seed: LRMKWMMAMKYPITA
LRMKQMMAMVYPMTA

SEQ ID NO: 238914 - protein, 15 aa, Artificial Sequence
  Description of Artificial Sequence: Synthetic peptide
  Seed: LRMKWMMAMKYPITA
LRMKQMMEMAYPLTA

SEQ ID NO: 238915 - protein, 15 aa, Artificial Sequence
  Description of Artificial Sequence: Synthetic peptide
  Seed: LRMKWMMAMKYPITA
LRMKQMMFMAYPATA

SEQ ID NO: 238916 - protein, 15 aa, Artificial Sequence
  Description of Artificial Sequence: Synthetic peptide
  Seed: LRMKWMMAMKYPITA
LRMKQMMGMAYPITA

SEQ ID NO: 238917 - protein, 15 aa, Artificial Sequence
  Description of Artificial Sequence: Synthetic peptide
  Seed: LRMKWMMAMKYPITA
LRMKQMMGMAYPLTA

SEQ ID NO: 238918 - protein, 15 aa, Artificial Sequence
  Description of Artificial Sequence: Synthetic peptide
  Seed: LRMKWMMAMKYPITA
LRMKQMMGMAYPMTA

SEQ ID NO: 238919 - protein, 15 aa, Artificial Sequence
  Description of Artificial Sequence: Synthetic peptide
  Seed: LRMKWMMAMKYPITA
LRMKQMMGMAYPVTA

SEQ ID NO: 238920 - protein, 15 aa, Artificial Sequence
  Description of Artificial Sequence: Synthetic peptide
  Seed: LRMKWMMAMKYPITA
LRMKQMMIMAYPATA

SEQ ID NO: 238921 - protein, 15 aa, Artificial Sequence
  Description of Artificial Sequence: Synthetic peptide
  Seed: LRMKWMMAMKYPITA
LRMKQMMIMAYPCTA

SEQ ID NO: 238922 - protein, 15 aa, Artificial Sequence
  Description of Artificial Sequence: Synthetic peptide
  Seed: LRMKWMMAMKYPITA
LRMKQMMIMAYPITA

SEQ ID NO: 238923 - protein, 15 aa, Artificial Sequence
  Description of Artificial Sequence: Synthetic peptide
  Seed: LRMKWMMAMKYPITA
LRMKQMMIMAYPLTA

SEQ ID NO: 238924 - protein, 15 aa, Artificial Sequence
  Description of Artificial Sequence: Synthetic peptide
  Seed: LRMKWMMAMKYPITA
LRMKQMMIMAYPMTA

SEQ ID NO: 238925 - protein, 15 aa, Artificial Sequence
  Description of Artificial Sequence: Synthetic peptide
  Seed: LRMKWMMAMKYPITA
LRMKQMMIMAYPSTA

SEQ ID NO: 238926 - protein, 15 aa, Artificial Sequence
  Description of Artificial Sequence: Synthetic peptide
  Seed: LRMKWMMAMKYPITA
LRMKQMMIMAYPTTA

SEQ ID NO: 238927 - protein, 15 aa, Artificial Sequence
  Description of Artificial Sequence: Synthetic peptide
  Seed: LRMKWMMAMKYPITA
LRMKQMMIMAYPVTA

SEQ ID NO: 238928 - protein, 15 aa, Artificial Sequence
  Description of Artificial Sequence: Synthetic peptide
  Seed: LRMKWMMAMKYPITA
LRMKQMMIMGYPATA

SEQ ID NO: 238929 - protein, 15 aa, Artificial Sequence
  Description of Artificial Sequence: Synthetic peptide
  Seed: LRMKWMMAMKYPITA
LRMKQMMIMGYPITA

SEQ ID NO: 238930 - protein, 15 aa, Artificial Sequence
  Description of Artificial Sequence: Synthetic peptide
  Seed: LRMKWMMAMKYPITA
LRMKQMMIMGYPLTA

SEQ ID NO: 238931 - protein, 15 aa, Artificial Sequence
  Description of Artificial Sequence: Synthetic peptide
  Seed: LRMKWMMAMKYPITA
LRMKQMMIMGYPMTA

SEQ ID NO: 238932 - protein, 15 aa, Artificial Sequence
  Description of Artificial Sequence: Synthetic peptide
  Seed: LRMKWMMAMKYPITA
LRMKQMMIMGYPTTA

SEQ ID NO: 238933 - protein, 15 aa, Artificial Sequence
  Description of Artificial Sequence: Synthetic peptide
  Seed: LRMKWMMAMKYPITA
LRMKQMMIMGYPVTA

SEQ ID NO: 238934 - protein, 15 aa, Artificial Sequence
  Description of Artificial Sequence: Synthetic peptide
  Seed: LRMKWMMAMKYPITA
LRMKQMMIMPYPATA

SEQ ID NO: 238935 - protein, 15 aa, Artificial Sequence
  Description of Artificial Sequence: Synthetic peptide
  Seed: LRMKWMMAMKYPITA
LRMKQMMIMPYPITA

SEQ ID NO: 238936 - protein, 15 aa, Artificial Sequence
  Description of Artificial Sequence: Synthetic peptide
  Seed: LRMKWMMAMKYPITA
LRMKQMMIMPYPLTA

SEQ ID NO: 238937 - protein, 15 aa, Artificial Sequence
  Description of Artificial Sequence: Synthetic peptide
  Seed: LRMKWMMAMKYPITA
LRMKQMMIMPYPMTA

SEQ ID NO: 238938 - protein, 15 aa, Artificial Sequence
  Description of Artificial Sequence: Synthetic peptide
  Seed: LRMKWMMAMKYPITA
LRMKQMMIMPYPVTA

SEQ ID NO: 238939 - protein, 15 aa, Artificial Sequence
  Description of Artificial Sequence: Synthetic peptide
  Seed: LRMKWMMAMKYPITA
LRMKQMMIMRYPATA

SEQ ID NO: 238940 - protein, 15 aa, Artificial Sequence
  Description of Artificial Sequence: Synthetic peptide
  Seed: LRMKWMMAMKYPITA
LRMKQMMIMRYPKTA

SEQ ID NO: 238941 - protein, 15 aa, Artificial Sequence
  Description of Artificial Sequence: Synthetic peptide
  Seed: LRMKWMMAMKYPITA
LRMKQMMIMRYPRTA

SEQ ID NO: 238942 - protein, 15 aa, Artificial Sequence
  Description of Artificial Sequence: Synthetic peptide
  Seed: LRMKWMMAMKYPITA
LRMKQMMIMRYPSTA

SEQ ID NO: 238943 - protein, 15 aa, Artificial Sequence
  Description of Artificial Sequence: Synthetic peptide
  Seed: LRMKWMMAMKYPITA
LRMKQMMIMSYPATA

SEQ ID NO: 238944 - protein, 15 aa, Artificial Sequence
  Description of Artificial Sequence: Synthetic peptide
  Seed: LRMKWMMAMKYPITA
LRMKQMMIMSYPITA

SEQ ID NO: 238945 - protein, 15 aa, Artificial Sequence
  Description of Artificial Sequence: Synthetic peptide
  Seed: LRMKWMMAMKYPITA
LRMKQMMIMSYPLTA

SEQ ID NO: 238946 - protein, 15 aa, Artificial Sequence
  Description of Artificial Sequence: Synthetic peptide
  Seed: LRMKWMMAMKYPITA
LRMKQMMIMSYPMTA

SEQ ID NO: 238947 - protein, 15 aa, Artificial Sequence
  Description of Artificial Sequence: Synthetic peptide
  Seed: LRMKWMMAMKYPITA
LRMKQMMIMSYPTTA

SEQ ID NO: 238948 - protein, 15 aa, Artificial Sequence
  Description of Artificial Sequence: Synthetic peptide
  Seed: LRMKWMMAMKYPITA
LRMKQMMIMSYPVTA

SEQ ID NO: 238949 - protein, 15 aa, Artificial Sequence
  Description of Artificial Sequence: Synthetic peptide
  Seed: LRMKWMMAMKYPITA
LRMKQMMLMAYPATA

SEQ ID NO: 238950 - protein, 15 aa, Artificial Sequence
  Description of Artificial Sequence: Synthetic peptide
  Seed: LRMKWMMAMKYPITA
LRMKQMMLMAYPCTA

SEQ ID NO: 238951 - protein, 15 aa, Artificial Sequence
  Description of Artificial Sequence: Synthetic peptide
  Seed: LRMKWMMAMKYPITA
LRMKQMMLMAYPGTA

SEQ ID NO: 238952 - protein, 15 aa, Artificial Sequence
  Description of Artificial Sequence: Synthetic peptide
  Seed: LRMKWMMAMKYPITA
LRMKQMMLMAYPITA

SEQ ID NO: 238953 - protein, 15 aa, Artificial Sequence
  Description of Artificial Sequence: Synthetic peptide
  Seed: LRMKWMMAMKYPITA
LRMKQMMLMAYPLTA

SEQ ID NO: 238954 - protein, 15 aa, Artificial Sequence
  Description of Artificial Sequence: Synthetic peptide
  Seed: LRMKWMMAMKYPITA
LRMKQMMLMAYPMTA

SEQ ID NO: 238955 - protein, 15 aa, Artificial Sequence
  Description of Artificial Sequence: Synthetic peptide
  Seed: LRMKWMMAMKYPITA
LRMKQMMLMAYPNTA

SEQ ID NO: 238956 - protein, 15 aa, Artificial Sequence
  Description of Artificial Sequence: Synthetic peptide
  Seed: LRMKWMMAMKYPITA
LRMKQMMLMAYPSTA

SEQ ID NO: 238957 - protein, 15 aa, Artificial Sequence
  Description of Artificial Sequence: Synthetic peptide
  Seed: LRMKWMMAMKYPITA
LRMKQMMLMAYPTTA

SEQ ID NO: 238958 - protein, 15 aa, Artificial Sequence
  Description of Artificial Sequence: Synthetic peptide
  Seed: LRMKWMMAMKYPITA
LRMKQMMLMAYPVTA

SEQ ID NO: 238959 - protein, 15 aa, Artificial Sequence
  Description of Artificial Sequence: Synthetic peptide
  Seed: LRMKWMMAMKYPITA
LRMKQMMLMGYPATA

SEQ ID NO: 238960 - protein, 15 aa, Artificial Sequence
  Description of Artificial Sequence: Synthetic peptide
  Seed: LRMKWMMAMKYPITA
LRMKQMMLMGYPITA

SEQ ID NO: 238961 - protein, 15 aa, Artificial Sequence
  Description of Artificial Sequence: Synthetic peptide
  Seed: LRMKWMMAMKYPITA
LRMKQMMLMGYPLTA

SEQ ID NO: 238962 - protein, 15 aa, Artificial Sequence
  Description of Artificial Sequence: Synthetic peptide
  Seed: LRMKWMMAMKYPITA
LRMKQMMLMGYPMTA

SEQ ID NO: 238963 - protein, 15 aa, Artificial Sequence
  Description of Artificial Sequence: Synthetic peptide
  Seed: LRMKWMMAMKYPITA
LRMKQMMLMGYPSTA

SEQ ID NO: 238964 - protein, 15 aa, Artificial Sequence
  Description of Artificial Sequence: Synthetic peptide
  Seed: LRMKWMMAMKYPITA
LRMKQMMLMGYPTTA

SEQ ID NO: 238965 - protein, 15 aa, Artificial Sequence
  Description of Artificial Sequence: Synthetic peptide
  Seed: LRMKWMMAMKYPITA
LRMKQMMLMGYPVTA

SEQ ID NO: 238966 - protein, 15 aa, Artificial Sequence
  Description of Artificial Sequence: Synthetic peptide
  Seed: LRMKWMMAMKYPITA
LRMKQMMLMKYPATA

SEQ ID NO: 238967 - protein, 15 aa, Artificial Sequence
  Description of Artificial Sequence: Synthetic peptide
  Seed: LRMKWMMAMKYPITA
LRMKQMMLMNYPATA

SEQ ID NO: 238968 - protein, 15 aa, Artificial Sequence
  Description of Artificial Sequence: Synthetic peptide
  Seed: LRMKWMMAMKYPITA
LRMKQMMLMNYPITA

SEQ ID NO: 238969 - protein, 15 aa, Artificial Sequence
  Description of Artificial Sequence: Synthetic peptide
  Seed: LRMKWMMAMKYPITA
LRMKQMMLMNYPLTA

SEQ ID NO: 238970 - protein, 15 aa, Artificial Sequence
  Description of Artificial Sequence: Synthetic peptide
  Seed: LRMKWMMAMKYPITA
LRMKQMMLMNYPVTA

SEQ ID NO: 238971 - protein, 15 aa, Artificial Sequence
  Description of Artificial Sequence: Synthetic peptide
  Seed: LRMKWMMAMKYPITA
LRMKQMMLMPYPATA

SEQ ID NO: 238972 - protein, 15 aa, Artificial Sequence
  Description of Artificial Sequence: Synthetic peptide
  Seed: LRMKWMMAMKYPITA
LRMKQMMLMPYPITA

SEQ ID NO: 238973 - protein, 15 aa, Artificial Sequence
  Description of Artificial Sequence: Synthetic peptide
  Seed: LRMKWMMAMKYPITA
LRMKQMMLMPYPLTA

SEQ ID NO: 238974 - protein, 15 aa, Artificial Sequence
  Description of Artificial Sequence: Synthetic peptide
  Seed: LRMKWMMAMKYPITA
LRMKQMMLMPYPMTA

SEQ ID NO: 238975 - protein, 15 aa, Artificial Sequence
  Description of Artificial Sequence: Synthetic peptide
  Seed: LRMKWMMAMKYPITA
LRMKQMMLMPYPVTA

SEQ ID NO: 238976 - protein, 15 aa, Artificial Sequence
  Description of Artificial Sequence: Synthetic peptide
  Seed: LRMKWMMAMKYPITA
LRMKQMMLMRYPATA

SEQ ID NO: 238977 - protein, 15 aa, Artificial Sequence
  Description of Artificial Sequence: Synthetic peptide
  Seed: LRMKWMMAMKYPITA
LRMKQMMLMRYPKTA

SEQ ID NO: 238978 - protein, 15 aa, Artificial Sequence
  Description of Artificial Sequence: Synthetic peptide
  Seed: LRMKWMMAMKYPITA
LRMKQMMLMRYPMTA

SEQ ID NO: 238979 - protein, 15 aa, Artificial Sequence
  Description of Artificial Sequence: Synthetic peptide
  Seed: LRMKWMMAMKYPITA
LRMKQMMLMRYPRTA

SEQ ID NO: 238980 - protein, 15 aa, Artificial Sequence
  Description of Artificial Sequence: Synthetic peptide
  Seed: LRMKWMMAMKYPITA
LRMKQMMLMRYPSTA

SEQ ID NO: 238981 - protein, 15 aa, Artificial Sequence
  Description of Artificial Sequence: Synthetic peptide
  Seed: LRMKWMMAMKYPITA
LRMKQMMLMRYPVTA

SEQ ID NO: 238982 - protein, 15 aa, Artificial Sequence
  Description of Artificial Sequence: Synthetic peptide
  Seed: LRMKWMMAMKYPITA
LRMKQMMLMSYPATA

SEQ ID NO: 238983 - protein, 15 aa, Artificial Sequence
  Description of Artificial Sequence: Synthetic peptide
  Seed: LRMKWMMAMKYPITA
LRMKQMMLMSYPITA

SEQ ID NO: 238984 - protein, 15 aa, Artificial Sequence
  Description of Artificial Sequence: Synthetic peptide
  Seed: LRMKWMMAMKYPITA
LRMKQMMLMSYPLTA

SEQ ID NO: 238985 - protein, 15 aa, Artificial Sequence
  Description of Artificial Sequence: Synthetic peptide
  Seed: LRMKWMMAMKYPITA
LRMKQMMLMSYPMTA

SEQ ID NO: 238986 - protein, 15 aa, Artificial Sequence
  Description of Artificial Sequence: Synthetic peptide
  Seed: LRMKWMMAMKYPITA
LRMKQMMLMSYPSTA

SEQ ID NO: 238987 - protein, 15 aa, Artificial Sequence
  Description of Artificial Sequence: Synthetic peptide
  Seed: LRMKWMMAMKYPITA
LRMKQMMLMSYPTTA

SEQ ID NO: 238988 - protein, 15 aa, Artificial Sequence
  Description of Artificial Sequence: Synthetic peptide
  Seed: LRMKWMMAMKYPITA
LRMKQMMLMSYPVTA

SEQ ID NO: 238989 - protein, 15 aa, Artificial Sequence
  Description of Artificial Sequence: Synthetic peptide
  Seed: LRMKWMMAMKYPITA
LRMKQMMLMTYPATA

SEQ ID NO: 238990 - protein, 15 aa, Artificial Sequence
  Description of Artificial Sequence: Synthetic peptide
  Seed: LRMKWMMAMKYPITA
LRMKQMMLMTYPITA

SEQ ID NO: 238991 - protein, 15 aa, Artificial Sequence
  Description of Artificial Sequence: Synthetic peptide
  Seed: LRMKWMMAMKYPITA
LRMKQMMLMTYPLTA

SEQ ID NO: 238992 - protein, 15 aa, Artificial Sequence
  Description of Artificial Sequence: Synthetic peptide
  Seed: LRMKWMMAMKYPITA
LRMKQMMLMTYPMTA

SEQ ID NO: 238993 - protein, 15 aa, Artificial Sequence
  Description of Artificial Sequence: Synthetic peptide
  Seed: LRMKWMMAMKYPITA
LRMKQMMLMTYPSTA

SEQ ID NO: 238994 - protein, 15 aa, Artificial Sequence
  Description of Artificial Sequence: Synthetic peptide
  Seed: LRMKWMMAMKYPITA
LRMKQMMLMTYPVTA

SEQ ID NO: 238995 - protein, 15 aa, Artificial Sequence
  Description of Artificial Sequence: Synthetic peptide
  Seed: LRMKWMMAMKYPITA
LRMKQMMLMVYPATA

SEQ ID NO: 238996 - protein, 15 aa, Artificial Sequence
  Description of Artificial Sequence: Synthetic peptide
  Seed: LRMKWMMAMKYPITA
LRMKQMMLMVYPITA

SEQ ID NO: 238997 - protein, 15 aa, Artificial Sequence
  Description of Artificial Sequence: Synthetic peptide
  Seed: LRMKWMMAMKYPITA
LRMKQMMLMVYPLTA

SEQ ID NO: 238998 - protein, 15 aa, Artificial Sequence
  Description of Artificial Sequence: Synthetic peptide
  Seed: LRMKWMMAMKYPITA
LRMKQMMLMVYPMTA

SEQ ID NO: 238999 - protein, 15 aa, Artificial Sequence
  Description of Artificial Sequence: Synthetic peptide
  Seed: LRMKWMMAMKYPITA
LRMKQMMLMVYPSTA

SEQ ID NO: 239000 - protein, 15 aa, Artificial Sequence
  Description of Artificial Sequence: Synthetic peptide
  Seed: LRMKWMMAMKYPITA
LRMKQMMLMVYPVTA

SEQ ID NO: 239001 - protein, 15 aa, Artificial Sequence
  Description of Artificial Sequence: Synthetic peptide
  Seed: LRMKWMMAMKYPITA
LRMKQMMMMAYPATA

SEQ ID NO: 239002 - protein, 15 aa, Artificial Sequence
  Description of Artificial Sequence: Synthetic peptide
  Seed: LRMKWMMAMKYPITA
LRMKQMMMMAYPCTA

SEQ ID NO: 239003 - protein, 15 aa, Artificial Sequence
  Description of Artificial Sequence: Synthetic peptide
  Seed: LRMKWMMAMKYPITA
LRMKQMMMMAYPITA

SEQ ID NO: 239004 - protein, 15 aa, Artificial Sequence
  Description of Artificial Sequence: Synthetic peptide
  Seed: LRMKWMMAMKYPITA
LRMKQMMMMAYPLTA

SEQ ID NO: 239005 - protein, 15 aa, Artificial Sequence
  Description of Artificial Sequence: Synthetic peptide
  Seed: LRMKWMMAMKYPITA
LRMKQMMMMAYPMTA

SEQ ID NO: 239006 - protein, 15 aa, Artificial Sequence
  Description of Artificial Sequence: Synthetic peptide
  Seed: LRMKWMMAMKYPITA
LRMKQMMMMAYPSTA

SEQ ID NO: 239007 - protein, 15 aa, Artificial Sequence
  Description of Artificial Sequence: Synthetic peptide
  Seed: LRMKWMMAMKYPITA
LRMKQMMMMAYPTTA

SEQ ID NO: 239008 - protein, 15 aa, Artificial Sequence
  Description of Artificial Sequence: Synthetic peptide
  Seed: LRMKWMMAMKYPITA
LRMKQMMMMAYPVTA

SEQ ID NO: 239009 - protein, 15 aa, Artificial Sequence
  Description of Artificial Sequence: Synthetic peptide
  Seed: LRMKWMMAMKYPITA
LRMKQMMMMGYPATA

SEQ ID NO: 239010 - protein, 15 aa, Artificial Sequence
  Description of Artificial Sequence: Synthetic peptide
  Seed: LRMKWMMAMKYPITA
LRMKQMMMMGYPITA

SEQ ID NO: 239011 - protein, 15 aa, Artificial Sequence
  Description of Artificial Sequence: Synthetic peptide
  Seed: LRMKWMMAMKYPITA
LRMKQMMMMGYPLTA

SEQ ID NO: 239012 - protein, 15 aa, Artificial Sequence
  Description of Artificial Sequence: Synthetic peptide
  Seed: LRMKWMMAMKYPITA
LRMKQMMMMGYPMTA

SEQ ID NO: 239013 - protein, 15 aa, Artificial Sequence
  Description of Artificial Sequence: Synthetic peptide
  Seed: LRMKWMMAMKYPITA
LRMKQMMMMGYPSTA

SEQ ID NO: 239014 - protein, 15 aa, Artificial Sequence
  Description of Artificial Sequence: Synthetic peptide
  Seed: LRMKWMMAMKYPITA
LRMKQMMMMGYPTTA

SEQ ID NO: 239015 - protein, 15 aa, Artificial Sequence
  Description of Artificial Sequence: Synthetic peptide
  Seed: LRMKWMMAMKYPITA
LRMKQMMMMGYPVTA

SEQ ID NO: 239016 - protein, 15 aa, Artificial Sequence
  Description of Artificial Sequence: Synthetic peptide
  Seed: LRMKWMMAMKYPITA
LRMKQMMMMHYPLTA

SEQ ID NO: 239017 - protein, 15 aa, Artificial Sequence
  Description of Artificial Sequence: Synthetic peptide
  Seed: LRMKWMMAMKYPITA
LRMKQMMMMKYPATA

SEQ ID NO: 239018 - protein, 15 aa, Artificial Sequence
  Description of Artificial Sequence: Synthetic peptide
  Seed: LRMKWMMAMKYPITA
LRMKQMMMMKYPSTA

SEQ ID NO: 239019 - protein, 15 aa, Artificial Sequence
  Description of Artificial Sequence: Synthetic peptide
  Seed: LRMKWMMAMKYPITA
LRMKQMMMMNYPATA

SEQ ID NO: 239020 - protein, 15 aa, Artificial Sequence
  Description of Artificial Sequence: Synthetic peptide
  Seed: LRMKWMMAMKYPITA
LRMKQMMMMNYPITA

SEQ ID NO: 239021 - protein, 15 aa, Artificial Sequence
  Description of Artificial Sequence: Synthetic peptide
  Seed: LRMKWMMAMKYPITA
LRMKQMMMMNYPLTA

SEQ ID NO: 239022 - protein, 15 aa, Artificial Sequence
  Description of Artificial Sequence: Synthetic peptide
  Seed: LRMKWMMAMKYPITA
LRMKQMMMMNYPMTA

SEQ ID NO: 239023 - protein, 15 aa, Artificial Sequence
  Description of Artificial Sequence: Synthetic peptide
  Seed: LRMKWMMAMKYPITA
LRMKQMMMMNYPVTA

SEQ ID NO: 239024 - protein, 15 aa, Artificial Sequence
  Description of Artificial Sequence: Synthetic peptide
  Seed: LRMKWMMAMKYPITA
LRMKQMMMMPYPATA

SEQ ID NO: 239025 - protein, 15 aa, Artificial Sequence
  Description of Artificial Sequence: Synthetic peptide
  Seed: LRMKWMMAMKYPITA
LRMKQMMMMPYPITA

SEQ ID NO: 239026 - protein, 15 aa, Artificial Sequence
  Description of Artificial Sequence: Synthetic peptide
  Seed: LRMKWMMAMKYPITA
LRMKQMMMMPYPLTA

SEQ ID NO: 239027 - protein, 15 aa, Artificial Sequence
  Description of Artificial Sequence: Synthetic peptide
  Seed: LRMKWMMAMKYPITA
LRMKQMMMMPYPMTA

SEQ ID NO: 239028 - protein, 15 aa, Artificial Sequence
  Description of Artificial Sequence: Synthetic peptide
  Seed: LRMKWMMAMKYPITA
LRMKQMMMMPYPVTA

SEQ ID NO: 239029 - protein, 15 aa, Artificial Sequence
  Description of Artificial Sequence: Synthetic peptide
  Seed: LRMKWMMAMKYPITA
LRMKQMMMMRYPATA

SEQ ID NO: 239030 - protein, 15 aa, Artificial Sequence
  Description of Artificial Sequence: Synthetic peptide
  Seed: LRMKWMMAMKYPITA
LRMKQMMMMRYPITA

SEQ ID NO: 239031 - protein, 15 aa, Artificial Sequence
  Description of Artificial Sequence: Synthetic peptide
  Seed: LRMKWMMAMKYPITA
LRMKQMMMMRYPKTA

SEQ ID NO: 239032 - protein, 15 aa, Artificial Sequence
  Description of Artificial Sequence: Synthetic peptide
  Seed: LRMKWMMAMKYPITA
LRMKQMMMMRYPLTA

SEQ ID NO: 239033 - protein, 15 aa, Artificial Sequence
  Description of Artificial Sequence: Synthetic peptide
  Seed: LRMKWMMAMKYPITA
LRMKQMMMMRYPMTA

SEQ ID NO: 239034 - protein, 15 aa, Artificial Sequence
  Description of Artificial Sequence: Synthetic peptide
  Seed: LRMKWMMAMKYPITA
LRMKQMMMMRYPQTA

SEQ ID NO: 239035 - protein, 15 aa, Artificial Sequence
  Description of Artificial Sequence: Synthetic peptide
  Seed: LRMKWMMAMKYPITA
LRMKQMMMMRYPRTA

SEQ ID NO: 239036 - protein, 15 aa, Artificial Sequence
  Description of Artificial Sequence: Synthetic peptide
  Seed: LRMKWMMAMKYPITA
LRMKQMMMMRYPSTA

SEQ ID NO: 239037 - protein, 15 aa, Artificial Sequence
  Description of Artificial Sequence: Synthetic peptide
  Seed: LRMKWMMAMKYPITA
LRMKQMMMMRYPTTA

SEQ ID NO: 239038 - protein, 15 aa, Artificial Sequence
  Description of Artificial Sequence: Synthetic peptide
  Seed: LRMKWMMAMKYPITA
LRMKQMMMMRYPVTA

SEQ ID NO: 239039 - protein, 15 aa, Artificial Sequence
  Description of Artificial Sequence: Synthetic peptide
  Seed: LRMKWMMAMKYPITA
LRMKQMMMMSYPATA

SEQ ID NO: 239040 - protein, 15 aa, Artificial Sequence
  Description of Artificial Sequence: Synthetic peptide
  Seed: LRMKWMMAMKYPITA
LRMKQMMMMSYPITA

SEQ ID NO: 239041 - protein, 15 aa, Artificial Sequence
  Description of Artificial Sequence: Synthetic peptide
  Seed: LRMKWMMAMKYPITA
LRMKQMMMMSYPLTA

SEQ ID NO: 239042 - protein, 15 aa, Artificial Sequence
  Description of Artificial Sequence: Synthetic peptide
  Seed: LRMKWMMAMKYPITA
LRMKQMMMMSYPMTA

SEQ ID NO: 239043 - protein, 15 aa, Artificial Sequence
  Description of Artificial Sequence: Synthetic peptide
  Seed: LRMKWMMAMKYPITA
LRMKQMMMMSYPSTA

SEQ ID NO: 239044 - protein, 15 aa, Artificial Sequence
  Description of Artificial Sequence: Synthetic peptide
  Seed: LRMKWMMAMKYPITA
LRMKQMMMMSYPTTA

SEQ ID NO: 239045 - protein, 15 aa, Artificial Sequence
  Description of Artificial Sequence: Synthetic peptide
  Seed: LRMKWMMAMKYPITA
LRMKQMMMMSYPVTA

SEQ ID NO: 239046 - protein, 15 aa, Artificial Sequence
  Description of Artificial Sequence: Synthetic peptide
  Seed: LRMKWMMAMKYPITA
LRMKQMMMMTYPATA

SEQ ID NO: 239047 - protein, 15 aa, Artificial Sequence
  Description of Artificial Sequence: Synthetic peptide
  Seed: LRMKWMMAMKYPITA
LRMKQMMMMTYPITA

SEQ ID NO: 239048 - protein, 15 aa, Artificial Sequence
  Description of Artificial Sequence: Synthetic peptide
  Seed: LRMKWMMAMKYPITA
LRMKQMMMMTYPLTA

SEQ ID NO: 239049 - protein, 15 aa, Artificial Sequence
  Description of Artificial Sequence: Synthetic peptide
  Seed: LRMKWMMAMKYPITA
LRMKQMMMMTYPMTA

SEQ ID NO: 239050 - protein, 15 aa, Artificial Sequence
  Description of Artificial Sequence: Synthetic peptide
  Seed: LRMKWMMAMKYPITA
LRMKQMMMMTYPSTA

SEQ ID NO: 239051 - protein, 15 aa, Artificial Sequence
  Description of Artificial Sequence: Synthetic peptide
  Seed: LRMKWMMAMKYPITA
LRMKQMMMMTYPVTA

SEQ ID NO: 239052 - protein, 15 aa, Artificial Sequence
  Description of Artificial Sequence: Synthetic peptide
  Seed: LRMKWMMAMKYPITA
LRMKQMMMMVYPATA

SEQ ID NO: 239053 - protein, 15 aa, Artificial Sequence
  Description of Artificial Sequence: Synthetic peptide
  Seed: LRMKWMMAMKYPITA
LRMKQMMMMVYPITA

SEQ ID NO: 239054 - protein, 15 aa, Artificial Sequence
  Description of Artificial Sequence: Synthetic peptide
  Seed: LRMKWMMAMKYPITA
LRMKQMMMMVYPLTA

SEQ ID NO: 239055 - protein, 15 aa, Artificial Sequence
  Description of Artificial Sequence: Synthetic peptide
  Seed: LRMKWMMAMKYPITA
LRMKQMMMMVYPMTA

SEQ ID NO: 239056 - protein, 15 aa, Artificial Sequence
  Description of Artificial Sequence: Synthetic peptide
  Seed: LRMKWMMAMKYPITA
LRMKQMMMMVYPSTA

SEQ ID NO: 239057 - protein, 15 aa, Artificial Sequence
  Description of Artificial Sequence: Synthetic peptide
  Seed: LRMKWMMAMKYPITA
LRMKQMMMMVYPVTA

SEQ ID NO: 239058 - protein, 15 aa, Artificial Sequence
  Description of Artificial Sequence: Synthetic peptide
  Seed: LRMKWMMAMKYPITA
LRMKQMMNMAYPITA

SEQ ID NO: 239059 - protein, 15 aa, Artificial Sequence
  Description of Artificial Sequence: Synthetic peptide
  Seed: LRMKWMMAMKYPITA
LRMKQMMNMAYPLTA

SEQ ID NO: 239060 - protein, 15 aa, Artificial Sequence
  Description of Artificial Sequence: Synthetic peptide
  Seed: LRMKWMMAMKYPITA
LRMKQMMNMAYPVTA

SEQ ID NO: 239061 - protein, 15 aa, Artificial Sequence
  Description of Artificial Sequence: Synthetic peptide
  Seed: LRMKWMMAMKYPITA
LRMKQMMNMGYPITA

SEQ ID NO: 239062 - protein, 15 aa, Artificial Sequence
  Description of Artificial Sequence: Synthetic peptide
  Seed: LRMKWMMAMKYPITA
LRMKQMMNMIYPITA

SEQ ID NO: 239063 - protein, 15 aa, Artificial Sequence
  Description of Artificial Sequence: Synthetic peptide
  Seed: LRMKWMMAMKYPITA
LRMKQMMNMNYPITA

SEQ ID NO: 239064 - protein, 15 aa, Artificial Sequence
  Description of Artificial Sequence: Synthetic peptide
  Seed: LRMKWMMAMKYPITA
LRMKQMMNMNYPLTA

SEQ ID NO: 239065 - protein, 15 aa, Artificial Sequence
  Description of Artificial Sequence: Synthetic peptide
  Seed: LRMKWMMAMKYPITA
LRMKQMMNMNYPVTA

SEQ ID NO: 239066 - protein, 15 aa, Artificial Sequence
  Description of Artificial Sequence: Synthetic peptide
  Seed: LRMKWMMAMKYPITA
LRMKQMMNMPYPITA

SEQ ID NO: 239067 - protein, 15 aa, Artificial Sequence
  Description of Artificial Sequence: Synthetic peptide
  Seed: LRMKWMMAMKYPITA
LRMKQMMNMSYPITA

SEQ ID NO: 239068 - protein, 15 aa, Artificial Sequence
  Description of Artificial Sequence: Synthetic peptide
  Seed: LRMKWMMAMKYPITA
LRMKQMMNMSYPVTA

SEQ ID NO: 239069 - protein, 15 aa, Artificial Sequence
  Description of Artificial Sequence: Synthetic peptide
  Seed: LRMKWMMAMKYPITA
LRMKQMMNMTYPITA

SEQ ID NO: 239070 - protein, 15 aa, Artificial Sequence
  Description of Artificial Sequence: Synthetic peptide
  Seed: LRMKWMMAMKYPITA
LRMKQMMNMVYPITA

SEQ ID NO: 239071 - protein, 15 aa, Artificial Sequence
  Description of Artificial Sequence: Synthetic peptide
  Seed: LRMKWMMAMKYPITA
LRMKQMMQMAYPATA

SEQ ID NO: 239072 - protein, 15 aa, Artificial Sequence
  Description of Artificial Sequence: Synthetic peptide
  Seed: LRMKWMMAMKYPITA
LRMKQMMQMAYPITA

SEQ ID NO: 239073 - protein, 15 aa, Artificial Sequence
  Description of Artificial Sequence: Synthetic peptide
  Seed: LRMKWMMAMKYPITA
LRMKQMMQMAYPLTA

SEQ ID NO: 239074 - protein, 15 aa, Artificial Sequence
  Description of Artificial Sequence: Synthetic peptide
  Seed: LRMKWMMAMKYPITA
LRMKQMMQMAYPMTA

SEQ ID NO: 239075 - protein, 15 aa, Artificial Sequence
  Description of Artificial Sequence: Synthetic peptide
  Seed: LRMKWMMAMKYPITA
LRMKQMMQMAYPVTA

SEQ ID NO: 239076 - protein, 15 aa, Artificial Sequence
  Description of Artificial Sequence: Synthetic peptide
  Seed: LRMKWMMAMKYPITA
LRMKQMMQMGYPITA

SEQ ID NO: 239077 - protein, 15 aa, Artificial Sequence
  Description of Artificial Sequence: Synthetic peptide
  Seed: LRMKWMMAMKYPITA
LRMKQMMQMGYPLTA

SEQ ID NO: 239078 - protein, 15 aa, Artificial Sequence
  Description of Artificial Sequence: Synthetic peptide
  Seed: LRMKWMMAMKYPITA
LRMKQMMQMGYPVTA

SEQ ID NO: 239079 - protein, 15 aa, Artificial Sequence
  Description of Artificial Sequence: Synthetic peptide
  Seed: LRMKWMMAMKYPITA
LRMKQMMQMSYPITA

SEQ ID NO: 239080 - protein, 15 aa, Artificial Sequence
  Description of Artificial Sequence: Synthetic peptide
  Seed: LRMKWMMAMKYPITA
LRMKQMMQMSYPLTA

SEQ ID NO: 239081 - protein, 15 aa, Artificial Sequence
  Description of Artificial Sequence: Synthetic peptide
  Seed: LRMKWMMAMKYPITA
LRMKQMMQMSYPVTA

SEQ ID NO: 239082 - protein, 15 aa, Artificial Sequence
  Description of Artificial Sequence: Synthetic peptide
  Seed: LRMKWMMAMKYPITA
LRMKQMMSMAYPATA

SEQ ID NO: 239083 - protein, 15 aa, Artificial Sequence
  Description of Artificial Sequence: Synthetic peptide
  Seed: LRMKWMMAMKYPITA
LRMKQMMSMAYPITA

SEQ ID NO: 239084 - protein, 15 aa, Artificial Sequence
  Description of Artificial Sequence: Synthetic peptide
  Seed: LRMKWMMAMKYPITA
LRMKQMMSMAYPLTA

SEQ ID NO: 239085 - protein, 15 aa, Artificial Sequence
  Description of Artificial Sequence: Synthetic peptide
  Seed: LRMKWMMAMKYPITA
LRMKQMMSMAYPMTA

SEQ ID NO: 239086 - protein, 15 aa, Artificial Sequence
  Description of Artificial Sequence: Synthetic peptide
  Seed: LRMKWMMAMKYPITA
LRMKQMMSMAYPVTA

SEQ ID NO: 239087 - protein, 15 aa, Artificial Sequence
  Description of Artificial Sequence: Synthetic peptide
  Seed: LRMKWMMAMKYPITA
LRMKQMMSMGYPITA

SEQ ID NO: 239088 - protein, 15 aa, Artificial Sequence
  Description of Artificial Sequence: Synthetic peptide
  Seed: LRMKWMMAMKYPITA
LRMKQMMSMGYPLTA

SEQ ID NO: 239089 - protein, 15 aa, Artificial Sequence
  Description of Artificial Sequence: Synthetic peptide
  Seed: LRMKWMMAMKYPITA
LRMKQMMSMGYPMTA

SEQ ID NO: 239090 - protein, 15 aa, Artificial Sequence
  Description of Artificial Sequence: Synthetic peptide
  Seed: LRMKWMMAMKYPITA
LRMKQMMSMGYPVTA

SEQ ID NO: 239091 - protein, 15 aa, Artificial Sequence
  Description of Artificial Sequence: Synthetic peptide
  Seed: LRMKWMMAMKYPITA
LRMKQMMSMPYPITA

SEQ ID NO: 239092 - protein, 15 aa, Artificial Sequence
  Description of Artificial Sequence: Synthetic peptide
  Seed: LRMKWMMAMKYPITA
LRMKQMMSMPYPLTA

SEQ ID NO: 239093 - protein, 15 aa, Artificial Sequence
  Description of Artificial Sequence: Synthetic peptide
  Seed: LRMKWMMAMKYPITA
LRMKQMMSMPYPVTA

SEQ ID NO: 239094 - protein, 15 aa, Artificial Sequence
  Description of Artificial Sequence: Synthetic peptide
  Seed: LRMKWMMAMKYPITA
LRMKQMMSMSYPITA

SEQ ID NO: 239095 - protein, 15 aa, Artificial Sequence
  Description of Artificial Sequence: Synthetic peptide
  Seed: LRMKWMMAMKYPITA
LRMKQMMSMSYPLTA

SEQ ID NO: 239096 - protein, 15 aa, Artificial Sequence
  Description of Artificial Sequence: Synthetic peptide
  Seed: LRMKWMMAMKYPITA
LRMKQMMSMSYPMTA

SEQ ID NO: 239097 - protein, 15 aa, Artificial Sequence
  Description of Artificial Sequence: Synthetic peptide
  Seed: LRMKWMMAMKYPITA
LRMKQMMSMSYPVTA

SEQ ID NO: 239098 - protein, 15 aa, Artificial Sequence
  Description of Artificial Sequence: Synthetic peptide
  Seed: LRMKWMMAMKYPITA
LRMKQMMSMTYPITA

SEQ ID NO: 239099 - protein, 15 aa, Artificial Sequence
  Description of Artificial Sequence: Synthetic peptide
  Seed: LRMKWMMAMKYPITA
LRMKQMMTMAYPATA

SEQ ID NO: 239100 - protein, 15 aa, Artificial Sequence
  Description of Artificial Sequence: Synthetic peptide
  Seed: LRMKWMMAMKYPITA
LRMKQMMTMAYPITA

SEQ ID NO: 239101 - protein, 15 aa, Artificial Sequence
  Description of Artificial Sequence: Synthetic peptide
  Seed: LRMKWMMAMKYPITA
LRMKQMMTMAYPLTA

SEQ ID NO: 239102 - protein, 15 aa, Artificial Sequence
  Description of Artificial Sequence: Synthetic peptide
  Seed: LRMKWMMAMKYPITA
LRMKQMMTMAYPMTA

SEQ ID NO: 239103 - protein, 15 aa, Artificial Sequence
  Description of Artificial Sequence: Synthetic peptide
  Seed: LRMKWMMAMKYPITA
LRMKQMMTMAYPVTA

SEQ ID NO: 239104 - protein, 15 aa, Artificial Sequence
  Description of Artificial Sequence: Synthetic peptide
  Seed: LRMKWMMAMKYPITA
LRMKQMMTMGYPITA

SEQ ID NO: 239105 - protein, 15 aa, Artificial Sequence
  Description of Artificial Sequence: Synthetic peptide
  Seed: LRMKWMMAMKYPITA
LRMKQMMTMGYPLTA

SEQ ID NO: 239106 - protein, 15 aa, Artificial Sequence
  Description of Artificial Sequence: Synthetic peptide
  Seed: LRMKWMMAMKYPITA
LRMKQMMTMSYPITA

SEQ ID NO: 239107 - protein, 15 aa, Artificial Sequence
  Description of Artificial Sequence: Synthetic peptide
  Seed: LRMKWMMAMKYPITA
LRMKQMMTMSYPLTA

SEQ ID NO: 239108 - protein, 15 aa, Artificial Sequence
  Description of Artificial Sequence: Synthetic peptide
  Seed: LRMKWMMAMKYPITA
LRMKQMMTMSYPMTA

SEQ ID NO: 239109 - protein, 15 aa, Artificial Sequence
  Description of Artificial Sequence: Synthetic peptide
  Seed: LRMKWMMAMKYPITA
LRMKQMMTMSYPVTA

SEQ ID NO: 239110 - protein, 15 aa, Artificial Sequence
  Description of Artificial Sequence: Synthetic peptide
  Seed: LRMKWMMAMKYPITA
LRMKQMMTMTYPITA

SEQ ID NO: 239111 - protein, 15 aa, Artificial Sequence
  Description of Artificial Sequence: Synthetic peptide
  Seed: LRMKWMMAMKYPITA
LRMKQMMTMTYPLTA

SEQ ID NO: 239112 - protein, 15 aa, Artificial Sequence
  Description of Artificial Sequence: Synthetic peptide
  Seed: LRMKWMMAMKYPITA
LRMKQMMVMAYPITA

SEQ ID NO: 239113 - protein, 15 aa, Artificial Sequence
  Description of Artificial Sequence: Synthetic peptide
  Seed: LRMKWMMAMKYPITA
LRMKQMMVMAYPLTA

SEQ ID NO: 239114 - protein, 15 aa, Artificial Sequence
  Description of Artificial Sequence: Synthetic peptide
  Seed: LRMKWMMAMKYPITA
LRMKQMMVMGYPATA

SEQ ID NO: 239115 - protein, 15 aa, Artificial Sequence
  Description of Artificial Sequence: Synthetic peptide
  Seed: LRMKWMMAMKYPITA
LRMKQMMVMGYPITA

SEQ ID NO: 239116 - protein, 15 aa, Artificial Sequence
  Description of Artificial Sequence: Synthetic peptide
  Seed: LRMKWMMAMKYPITA
LRMKQMMVMGYPLTA

SEQ ID NO: 239117 - protein, 15 aa, Artificial Sequence
  Description of Artificial Sequence: Synthetic peptide
  Seed: LRMKWMMAMKYPITA
LRMKQMMVMGYPMTA

SEQ ID NO: 239118 - protein, 15 aa, Artificial Sequence
  Description of Artificial Sequence: Synthetic peptide
  Seed: LRMKWMMAMKYPITA
LRMKQMMVMGYPVTA

SEQ ID NO: 239119 - protein, 15 aa, Artificial Sequence
  Description of Artificial Sequence: Synthetic peptide
  Seed: LRMKWMMAMKYPITA
LRMKQMMVMPYPATA

SEQ ID NO: 239120 - protein, 15 aa, Artificial Sequence
  Description of Artificial Sequence: Synthetic peptide
  Seed: LRMKWMMAMKYPITA
LRMKQMMVMPYPITA

SEQ ID NO: 239121 - protein, 15 aa, Artificial Sequence
  Description of Artificial Sequence: Synthetic peptide
  Seed: LRMKWMMAMKYPITA
LRMKQMMVMPYPLTA

SEQ ID NO: 239122 - protein, 15 aa, Artificial Sequence
  Description of Artificial Sequence: Synthetic peptide
  Seed: LRMKWMMAMKYPITA
LRMKQMMVMPYPVTA

SEQ ID NO: 239123 - protein, 15 aa, Artificial Sequence
  Description of Artificial Sequence: Synthetic peptide
  Seed: LRMKWMMAMKYPITA
LRMKQMMVMRYPATA

SEQ ID NO: 239124 - protein, 15 aa, Artificial Sequence
  Description of Artificial Sequence: Synthetic peptide
  Seed: LRMKWMMAMKYPITA
LRMKQMMVMRYPRTA

SEQ ID NO: 239125 - protein, 15 aa, Artificial Sequence
  Description of Artificial Sequence: Synthetic peptide
  Seed: LRMKWMMAMKYPITA
LRMKQMMVMRYPSTA

SEQ ID NO: 239126 - protein, 15 aa, Artificial Sequence
  Description of Artificial Sequence: Synthetic peptide
  Seed: LRMKWMMAMKYPITA
LRMKQMMVMSYPITA

SEQ ID NO: 239127 - protein, 15 aa, Artificial Sequence
  Description of Artificial Sequence: Synthetic peptide
  Seed: LRMKWMMAMKYPITA
LRMKQMMVMSYPLTA

SEQ ID NO: 239128 - protein, 15 aa, Artificial Sequence
  Description of Artificial Sequence: Synthetic peptide
  Seed: LRMKWMMAMKYPITA
LRMKQMMVMSYPVTA

SEQ ID NO: 239129 - protein, 15 aa, Artificial Sequence
  Description of Artificial Sequence: Synthetic peptide
  Seed: LRMKWMMAMKYPITA
LRMKRMMAMAYPCTA

SEQ ID NO: 239130 - protein, 15 aa, Artificial Sequence
  Description of Artificial Sequence: Synthetic peptide
  Seed: LRMKWMMAMKYPITA
LRMKRMMAMGYPITA

SEQ ID NO: 239131 - protein, 15 aa, Artificial Sequence
  Description of Artificial Sequence: Synthetic peptide
  Seed: LRMKWMMAMKYPITA
LRMKRMMAMGYPLTA

SEQ ID NO: 239132 - protein, 15 aa, Artificial Sequence
  Description of Artificial Sequence: Synthetic peptide
  Seed: LRMKWMMAMKYPITA
LRMKRMMAMGYPMTA

SEQ ID NO: 239133 - protein, 15 aa, Artificial Sequence
  Description of Artificial Sequence: Synthetic peptide
  Seed: LRMKWMMAMKYPITA
LRMKRMMAMGYPVTA

SEQ ID NO: 239134 - protein, 15 aa, Artificial Sequence
  Description of Artificial Sequence: Synthetic peptide
  Seed: LRMKWMMAMKYPITA
LRMKRMMAMNYPLTA

SEQ ID NO: 239135 - protein, 15 aa, Artificial Sequence
  Description of Artificial Sequence: Synthetic peptide
  Seed: LRMKWMMAMKYPITA
LRMKRMMAMNYPVTA

SEQ ID NO: 239136 - protein, 15 aa, Artificial Sequence
  Description of Artificial Sequence: Synthetic peptide
  Seed: LRMKWMMAMKYPITA
LRMKRMMAMVYPCTA

SEQ ID NO: 239137 - protein, 15 aa, Artificial Sequence
  Description of Artificial Sequence: Synthetic peptide
  Seed: LRMKWMMAMKYPITA
LRMKRMMGMAYPATA

SEQ ID NO: 239138 - protein, 15 aa, Artificial Sequence
  Description of Artificial Sequence: Synthetic peptide
  Seed: LRMKWMMAMKYPITA
LRMKRMMGMAYPFTA

SEQ ID NO: 239139 - protein, 15 aa, Artificial Sequence
  Description of Artificial Sequence: Synthetic peptide
  Seed: LRMKWMMAMKYPITA
LRMKRMMGMAYPITA

SEQ ID NO: 239140 - protein, 15 aa, Artificial Sequence
  Description of Artificial Sequence: Synthetic peptide
  Seed: LRMKWMMAMKYPITA
LRMKRMMGMAYPLTA

SEQ ID NO: 239141 - protein, 15 aa, Artificial Sequence
  Description of Artificial Sequence: Synthetic peptide
  Seed: LRMKWMMAMKYPITA
LRMKRMMGMAYPMTA

SEQ ID NO: 239142 - protein, 15 aa, Artificial Sequence
  Description of Artificial Sequence: Synthetic peptide
  Seed: LRMKWMMAMKYPITA
LRMKRMMGMAYPVTA

SEQ ID NO: 239143 - protein, 15 aa, Artificial Sequence
  Description of Artificial Sequence: Synthetic peptide
  Seed: LRMKWMMAMKYPITA
LRMKRMMIMKYPATA

SEQ ID NO: 239144 - protein, 15 aa, Artificial Sequence
  Description of Artificial Sequence: Synthetic peptide
  Seed: LRMKWMMAMKYPITA
LRMKRMMIMPYPATA

SEQ ID NO: 239145 - protein, 15 aa, Artificial Sequence
  Description of Artificial Sequence: Synthetic peptide
  Seed: LRMKWMMAMKYPITA
LRMKRMMIMPYPITA

SEQ ID NO: 239146 - protein, 15 aa, Artificial Sequence
  Description of Artificial Sequence: Synthetic peptide
  Seed: LRMKWMMAMKYPITA
LRMKRMMIMPYPVTA

SEQ ID NO: 239147 - protein, 15 aa, Artificial Sequence
  Description of Artificial Sequence: Synthetic peptide
  Seed: LRMKWMMAMKYPITA
LRMKRMMIMRYPATA

SEQ ID NO: 239148 - protein, 15 aa, Artificial Sequence
  Description of Artificial Sequence: Synthetic peptide
  Seed: LRMKWMMAMKYPITA
LRMKRMMIMRYPGTA

SEQ ID NO: 239149 - protein, 15 aa, Artificial Sequence
  Description of Artificial Sequence: Synthetic peptide
  Seed: LRMKWMMAMKYPITA
LRMKRMMIMRYPMTA

SEQ ID NO: 239150 - protein, 15 aa, Artificial Sequence
  Description of Artificial Sequence: Synthetic peptide
  Seed: LRMKWMMAMKYPITA
LRMKRMMIMRYPQTA

SEQ ID NO: 239151 - protein, 15 aa, Artificial Sequence
  Description of Artificial Sequence: Synthetic peptide
  Seed: LRMKWMMAMKYPITA
LRMKRMMIMRYPRTA

SEQ ID NO: 239152 - protein, 15 aa, Artificial Sequence
  Description of Artificial Sequence: Synthetic peptide
  Seed: LRMKWMMAMKYPITA
LRMKRMMIMRYPSTA

SEQ ID NO: 239153 - protein, 15 aa, Artificial Sequence
  Description of Artificial Sequence: Synthetic peptide
  Seed: LRMKWMMAMKYPITA
LRMKRMMIMRYPVTA

SEQ ID NO: 239154 - protein, 15 aa, Artificial Sequence
  Description of Artificial Sequence: Synthetic peptide
  Seed: LRMKWMMAMKYPITA
LRMKRMMIMRYPYTA

SEQ ID NO: 239155 - protein, 15 aa, Artificial Sequence
  Description of Artificial Sequence: Synthetic peptide
  Seed: LRMKWMMAMKYPITA
LRMKRMMLMAYPATA

SEQ ID NO: 239156 - protein, 15 aa, Artificial Sequence
  Description of Artificial Sequence: Synthetic peptide
  Seed: LRMKWMMAMKYPITA
LRMKRMMLMAYPCTA

SEQ ID NO: 239157 - protein, 15 aa, Artificial Sequence
  Description of Artificial Sequence: Synthetic peptide
  Seed: LRMKWMMAMKYPITA
LRMKRMMLMAYPLTA

SEQ ID NO: 239158 - protein, 15 aa, Artificial Sequence
  Description of Artificial Sequence: Synthetic peptide
  Seed: LRMKWMMAMKYPITA
LRMKRMMLMAYPVTA

SEQ ID NO: 239159 - protein, 15 aa, Artificial Sequence
  Description of Artificial Sequence: Synthetic peptide
  Seed: LRMKWMMAMKYPITA
LRMKRMMLMGYPATA

SEQ ID NO: 239160 - protein, 15 aa, Artificial Sequence
  Description of Artificial Sequence: Synthetic peptide
  Seed: LRMKWMMAMKYPITA
LRMKRMMLMGYPITA

SEQ ID NO: 239161 - protein, 15 aa, Artificial Sequence
  Description of Artificial Sequence: Synthetic peptide
  Seed: LRMKWMMAMKYPITA
LRMKRMMLMGYPLTA

SEQ ID NO: 239162 - protein, 15 aa, Artificial Sequence
  Description of Artificial Sequence: Synthetic peptide
  Seed: LRMKWMMAMKYPITA
LRMKRMMLMGYPMTA

SEQ ID NO: 239163 - protein, 15 aa, Artificial Sequence
  Description of Artificial Sequence: Synthetic peptide
  Seed: LRMKWMMAMKYPITA
LRMKRMMLMGYPVTA

SEQ ID NO: 239164 - protein, 15 aa, Artificial Sequence
  Description of Artificial Sequence: Synthetic peptide
  Seed: LRMKWMMAMKYPITA
LRMKRMMLMKYPATA

SEQ ID NO: 239165 - protein, 15 aa, Artificial Sequence
  Description of Artificial Sequence: Synthetic peptide
  Seed: LRMKWMMAMKYPITA
LRMKRMMLMKYPMTA

SEQ ID NO: 239166 - protein, 15 aa, Artificial Sequence
  Description of Artificial Sequence: Synthetic peptide
  Seed: LRMKWMMAMKYPITA
LRMKRMMLMKYPRTA

SEQ ID NO: 239167 - protein, 15 aa, Artificial Sequence
  Description of Artificial Sequence: Synthetic peptide
  Seed: LRMKWMMAMKYPITA
LRMKRMMLMNYPLTA

SEQ ID NO: 239168 - protein, 15 aa, Artificial Sequence
  Description of Artificial Sequence: Synthetic peptide
  Seed: LRMKWMMAMKYPITA
LRMKRMMLMNYPVTA

SEQ ID NO: 239169 - protein, 15 aa, Artificial Sequence
  Description of Artificial Sequence: Synthetic peptide
  Seed: LRMKWMMAMKYPITA
LRMKRMMLMPYPATA

SEQ ID NO: 239170 - protein, 15 aa, Artificial Sequence
  Description of Artificial Sequence: Synthetic peptide
  Seed: LRMKWMMAMKYPITA
LRMKRMMLMPYPITA

SEQ ID NO: 239171 - protein, 15 aa, Artificial Sequence
  Description of Artificial Sequence: Synthetic peptide
  Seed: LRMKWMMAMKYPITA
LRMKRMMLMPYPLTA

SEQ ID NO: 239172 - protein, 15 aa, Artificial Sequence
  Description of Artificial Sequence: Synthetic peptide
  Seed: LRMKWMMAMKYPITA
LRMKRMMLMPYPMTA

SEQ ID NO: 239173 - protein, 15 aa, Artificial Sequence
  Description of Artificial Sequence: Synthetic peptide
  Seed: LRMKWMMAMKYPITA
LRMKRMMLMPYPVTA

SEQ ID NO: 239174 - protein, 15 aa, Artificial Sequence
  Description of Artificial Sequence: Synthetic peptide
  Seed: LRMKWMMAMKYPITA
LRMKRMMLMRYPATA

SEQ ID NO: 239175 - protein, 15 aa, Artificial Sequence
  Description of Artificial Sequence: Synthetic peptide
  Seed: LRMKWMMAMKYPITA
LRMKRMMLMRYPMTA

SEQ ID NO: 239176 - protein, 15 aa, Artificial Sequence
  Description of Artificial Sequence: Synthetic peptide
  Seed: LRMKWMMAMKYPITA
LRMKRMMLMRYPQTA

SEQ ID NO: 239177 - protein, 15 aa, Artificial Sequence
  Description of Artificial Sequence: Synthetic peptide
  Seed: LRMKWMMAMKYPITA
LRMKRMMLMRYPRTA

SEQ ID NO: 239178 - protein, 15 aa, Artificial Sequence
  Description of Artificial Sequence: Synthetic peptide
  Seed: LRMKWMMAMKYPITA
LRMKRMMLMRYPSTA

SEQ ID NO: 239179 - protein, 15 aa, Artificial Sequence
  Description of Artificial Sequence: Synthetic peptide
  Seed: LRMKWMMAMKYPITA
LRMKRMMLMRYPVTA

SEQ ID NO: 239180 - protein, 15 aa, Artificial Sequence
  Description of Artificial Sequence: Synthetic peptide
  Seed: LRMKWMMAMKYPITA
LRMKRMMLMSYPATA

SEQ ID NO: 239181 - protein, 15 aa, Artificial Sequence
  Description of Artificial Sequence: Synthetic peptide
  Seed: LRMKWMMAMKYPITA
LRMKRMMLMSYPLTA

SEQ ID NO: 239182 - protein, 15 aa, Artificial Sequence
  Description of Artificial Sequence: Synthetic peptide
  Seed: LRMKWMMAMKYPITA
LRMKRMMLMSYPMTA

SEQ ID NO: 239183 - protein, 15 aa, Artificial Sequence
  Description of Artificial Sequence: Synthetic peptide
  Seed: LRMKWMMAMKYPITA
LRMKRMMLMSYPTTA

SEQ ID NO: 239184 - protein, 15 aa, Artificial Sequence
  Description of Artificial Sequence: Synthetic peptide
  Seed: LRMKWMMAMKYPITA
LRMKRMMLMSYPVTA

SEQ ID NO: 239185 - protein, 15 aa, Artificial Sequence
  Description of Artificial Sequence: Synthetic peptide
  Seed: LRMKWMMAMKYPITA
LRMKRMMMMAYPCTA

SEQ ID NO: 239186 - protein, 15 aa, Artificial Sequence
  Description of Artificial Sequence: Synthetic peptide
  Seed: LRMKWMMAMKYPITA
LRMKRMMMMGYPATA

SEQ ID NO: 239187 - protein, 15 aa, Artificial Sequence
  Description of Artificial Sequence: Synthetic peptide
  Seed: LRMKWMMAMKYPITA
LRMKRMMMMGYPITA

SEQ ID NO: 239188 - protein, 15 aa, Artificial Sequence
  Description of Artificial Sequence: Synthetic peptide
  Seed: LRMKWMMAMKYPITA
LRMKRMMMMGYPLTA

SEQ ID NO: 239189 - protein, 15 aa, Artificial Sequence
  Description of Artificial Sequence: Synthetic peptide
  Seed: LRMKWMMAMKYPITA
LRMKRMMMMGYPMTA

SEQ ID NO: 239190 - protein, 15 aa, Artificial Sequence
  Description of Artificial Sequence: Synthetic peptide
  Seed: LRMKWMMAMKYPITA
LRMKRMMMMGYPVTA

SEQ ID NO: 239191 - protein, 15 aa, Artificial Sequence
  Description of Artificial Sequence: Synthetic peptide
  Seed: LRMKWMMAMKYPITA
LRMKRMMMMKYPATA

SEQ ID NO: 239192 - protein, 15 aa, Artificial Sequence
  Description of Artificial Sequence: Synthetic peptide
  Seed: LRMKWMMAMKYPITA
LRMKRMMMMKYPMTA

SEQ ID NO: 239193 - protein, 15 aa, Artificial Sequence
  Description of Artificial Sequence: Synthetic peptide
  Seed: LRMKWMMAMKYPITA
LRMKRMMMMKYPRTA

SEQ ID NO: 239194 - protein, 15 aa, Artificial Sequence
  Description of Artificial Sequence: Synthetic peptide
  Seed: LRMKWMMAMKYPITA
LRMKRMMMMNYPITA

SEQ ID NO: 239195 - protein, 15 aa, Artificial Sequence
  Description of Artificial Sequence: Synthetic peptide
  Seed: LRMKWMMAMKYPITA
LRMKRMMMMNYPLTA

SEQ ID NO: 239196 - protein, 15 aa, Artificial Sequence
  Description of Artificial Sequence: Synthetic peptide
  Seed: LRMKWMMAMKYPITA
LRMKRMMMMNYPVTA

SEQ ID NO: 239197 - protein, 15 aa, Artificial Sequence
  Description of Artificial Sequence: Synthetic peptide
  Seed: LRMKWMMAMKYPITA
LRMKRMMMMPYPITA

SEQ ID NO: 239198 - protein, 15 aa, Artificial Sequence
  Description of Artificial Sequence: Synthetic peptide
  Seed: LRMKWMMAMKYPITA
LRMKRMMMMPYPLTA

SEQ ID NO: 239199 - protein, 15 aa, Artificial Sequence
  Description of Artificial Sequence: Synthetic peptide
  Seed: LRMKWMMAMKYPITA
LRMKRMMMMPYPMTA

SEQ ID NO: 239200 - protein, 15 aa, Artificial Sequence
  Description of Artificial Sequence: Synthetic peptide
  Seed: LRMKWMMAMKYPITA
LRMKRMMMMPYPVTA

SEQ ID NO: 239201 - protein, 15 aa, Artificial Sequence
  Description of Artificial Sequence: Synthetic peptide
  Seed: LRMKWMMAMKYPITA
LRMKRMMMMRYPATA

SEQ ID NO: 239202 - protein, 15 aa, Artificial Sequence
  Description of Artificial Sequence: Synthetic peptide
  Seed: LRMKWMMAMKYPITA
LRMKRMMMMRYPITA

SEQ ID NO: 239203 - protein, 15 aa, Artificial Sequence
  Description of Artificial Sequence: Synthetic peptide
  Seed: LRMKWMMAMKYPITA
LRMKRMMMMRYPLTA

SEQ ID NO: 239204 - protein, 15 aa, Artificial Sequence
  Description of Artificial Sequence: Synthetic peptide
  Seed: LRMKWMMAMKYPITA
LRMKRMMMMRYPMTA

SEQ ID NO: 239205 - protein, 15 aa, Artificial Sequence
  Description of Artificial Sequence: Synthetic peptide
  Seed: LRMKWMMAMKYPITA
LRMKRMMMMRYPRTA

SEQ ID NO: 239206 - protein, 15 aa, Artificial Sequence
  Description of Artificial Sequence: Synthetic peptide
  Seed: LRMKWMMAMKYPITA
LRMKRMMMMRYPSTA

SEQ ID NO: 239207 - protein, 15 aa, Artificial Sequence
  Description of Artificial Sequence: Synthetic peptide
  Seed: LRMKWMMAMKYPITA
LRMKRMMMMRYPVTA

SEQ ID NO: 239208 - protein, 15 aa, Artificial Sequence
  Description of Artificial Sequence: Synthetic peptide
  Seed: LRMKWMMAMKYPITA
LRMKRMMMMRYPYTA

SEQ ID NO: 239209 - protein, 15 aa, Artificial Sequence
  Description of Artificial Sequence: Synthetic peptide
  Seed: LRMKWMMAMKYPITA
LRMKRMMMMSYPATA

SEQ ID NO: 239210 - protein, 15 aa, Artificial Sequence
  Description of Artificial Sequence: Synthetic peptide
  Seed: LRMKWMMAMKYPITA
LRMKRMMMMSYPITA

SEQ ID NO: 239211 - protein, 15 aa, Artificial Sequence
  Description of Artificial Sequence: Synthetic peptide
  Seed: LRMKWMMAMKYPITA
LRMKRMMMMSYPLTA

SEQ ID NO: 239212 - protein, 15 aa, Artificial Sequence
  Description of Artificial Sequence: Synthetic peptide
  Seed: LRMKWMMAMKYPITA
LRMKRMMMMSYPMTA

SEQ ID NO: 239213 - protein, 15 aa, Artificial Sequence
  Description of Artificial Sequence: Synthetic peptide
  Seed: LRMKWMMAMKYPITA
LRMKRMMMMSYPTTA

SEQ ID NO: 239214 - protein, 15 aa, Artificial Sequence
  Description of Artificial Sequence: Synthetic peptide
  Seed: LRMKWMMAMKYPITA
LRMKRMMMMSYPVTA

SEQ ID NO: 239215 - protein, 15 aa, Artificial Sequence
  Description of Artificial Sequence: Synthetic peptide
  Seed: LRMKWMMAMKYPITA
LRMKRMMNMAYPITA

SEQ ID NO: 239216 - protein, 15 aa, Artificial Sequence
  Description of Artificial Sequence: Synthetic peptide
  Seed: LRMKWMMAMKYPITA
LRMKRMMNMAYPLTA

SEQ ID NO: 239217 - protein, 15 aa, Artificial Sequence
  Description of Artificial Sequence: Synthetic peptide
  Seed: LRMKWMMAMKYPITA
LRMKRMMNMAYPVTA

SEQ ID NO: 239218 - protein, 15 aa, Artificial Sequence
  Description of Artificial Sequence: Synthetic peptide
  Seed: LRMKWMMAMKYPITA
LRMKRMMNMIYPITA

SEQ ID NO: 239219 - protein, 15 aa, Artificial Sequence
  Description of Artificial Sequence: Synthetic peptide
  Seed: LRMKWMMAMKYPITA
LRMKRMMNMNYPFTA

SEQ ID NO: 239220 - protein, 15 aa, Artificial Sequence
  Description of Artificial Sequence: Synthetic peptide
  Seed: LRMKWMMAMKYPITA
LRMKRMMNMNYPITA

SEQ ID NO: 239221 - protein, 15 aa, Artificial Sequence
  Description of Artificial Sequence: Synthetic peptide
  Seed: LRMKWMMAMKYPITA
LRMKRMMNMNYPMTA

SEQ ID NO: 239222 - protein, 15 aa, Artificial Sequence
  Description of Artificial Sequence: Synthetic peptide
  Seed: LRMKWMMAMKYPITA
LRMKRMMNMNYPVTA

SEQ ID NO: 239223 - protein, 15 aa, Artificial Sequence
  Description of Artificial Sequence: Synthetic peptide
  Seed: LRMKWMMAMKYPITA
LRMKRMMNMSYPITA

SEQ ID NO: 239224 - protein, 15 aa, Artificial Sequence
  Description of Artificial Sequence: Synthetic peptide
  Seed: LRMKWMMAMKYPITA
LRMKRMMNMSYPLTA

SEQ ID NO: 239225 - protein, 15 aa, Artificial Sequence
  Description of Artificial Sequence: Synthetic peptide
  Seed: LRMKWMMAMKYPITA
LRMKRMMNMSYPVTA

SEQ ID NO: 239226 - protein, 15 aa, Artificial Sequence
  Description of Artificial Sequence: Synthetic peptide
  Seed: LRMKWMMAMKYPITA
LRMKRMMNMVYPITA

SEQ ID NO: 239227 - protein, 15 aa, Artificial Sequence
  Description of Artificial Sequence: Synthetic peptide
  Seed: LRMKWMMAMKYPITA
LRMKRMMPMAYPITA

SEQ ID NO: 239228 - protein, 15 aa, Artificial Sequence
  Description of Artificial Sequence: Synthetic peptide
  Seed: LRMKWMMAMKYPITA
LRMKRMMSMAYPITA

SEQ ID NO: 239229 - protein, 15 aa, Artificial Sequence
  Description of Artificial Sequence: Synthetic peptide
  Seed: LRMKWMMAMKYPITA
LRMKRMMSMFYPLTA

SEQ ID NO: 239230 - protein, 15 aa, Artificial Sequence
  Description of Artificial Sequence: Synthetic peptide
  Seed: LRMKWMMAMKYPITA
LRMKRMMSMGYPITA

SEQ ID NO: 239231 - protein, 15 aa, Artificial Sequence
  Description of Artificial Sequence: Synthetic peptide
  Seed: LRMKWMMAMKYPITA
LRMKRMMSMGYPLTA

SEQ ID NO: 239232 - protein, 15 aa, Artificial Sequence
  Description of Artificial Sequence: Synthetic peptide
  Seed: LRMKWMMAMKYPITA
LRMKRMMSMGYPVTA

SEQ ID NO: 239233 - protein, 15 aa, Artificial Sequence
  Description of Artificial Sequence: Synthetic peptide
  Seed: LRMKWMMAMKYPITA
LRMKRMMSMPYPITA

SEQ ID NO: 239234 - protein, 15 aa, Artificial Sequence
  Description of Artificial Sequence: Synthetic peptide
  Seed: LRMKWMMAMKYPITA
LRMKRMMSMPYPLTA

SEQ ID NO: 239235 - protein, 15 aa, Artificial Sequence
  Description of Artificial Sequence: Synthetic peptide
  Seed: LRMKWMMAMKYPITA
LRMKRMMSMPYPVTA

SEQ ID NO: 239236 - protein, 15 aa, Artificial Sequence
  Description of Artificial Sequence: Synthetic peptide
  Seed: LRMKWMMAMKYPITA
LRMKRMMSMSYPITA

SEQ ID NO: 239237 - protein, 15 aa, Artificial Sequence
  Description of Artificial Sequence: Synthetic peptide
  Seed: LRMKWMMAMKYPITA
LRMKRMMSMSYPLTA

SEQ ID NO: 239238 - protein, 15 aa, Artificial Sequence
  Description of Artificial Sequence: Synthetic peptide
  Seed: LRMKWMMAMKYPITA
LRMKRMMSMSYPVTA

SEQ ID NO: 239239 - protein, 15 aa, Artificial Sequence
  Description of Artificial Sequence: Synthetic peptide
  Seed: LRMKWMMAMKYPITA
LRMKRMMTMAYPITA

SEQ ID NO: 239240 - protein, 15 aa, Artificial Sequence
  Description of Artificial Sequence: Synthetic peptide
  Seed: LRMKWMMAMKYPITA
LRMKRMMTMFYPLTA

SEQ ID NO: 239241 - protein, 15 aa, Artificial Sequence
  Description of Artificial Sequence: Synthetic peptide
  Seed: LRMKWMMAMKYPITA
LRMKRMMTMSYPITA

SEQ ID NO: 239242 - protein, 15 aa, Artificial Sequence
  Description of Artificial Sequence: Synthetic peptide
  Seed: LRMKWMMAMKYPITA
LRMKRMMTMSYPLTA

SEQ ID NO: 239243 - protein, 15 aa, Artificial Sequence
  Description of Artificial Sequence: Synthetic peptide
  Seed: LRMKWMMAMKYPITA
LRMKRMMTMSYPVTA

SEQ ID NO: 239244 - protein, 15 aa, Artificial Sequence
  Description of Artificial Sequence: Synthetic peptide
  Seed: LRMKWMMAMKYPITA
LRMKRMMVMKYPATA

SEQ ID NO: 239245 - protein, 15 aa, Artificial Sequence
  Description of Artificial Sequence: Synthetic peptide
  Seed: LRMKWMMAMKYPITA
LRMKRMMVMPYPLTA

SEQ ID NO: 239246 - protein, 15 aa, Artificial Sequence
  Description of Artificial Sequence: Synthetic peptide
  Seed: LRMKWMMAMKYPITA
LRMKRMMVMRYPGTA

SEQ ID NO: 239247 - protein, 15 aa, Artificial Sequence
  Description of Artificial Sequence: Synthetic peptide
  Seed: LRMKWMMAMKYPITA
LRMKRMMVMSYPITA

SEQ ID NO: 239248 - protein, 15 aa, Artificial Sequence
  Description of Artificial Sequence: Synthetic peptide
  Seed: LRMKWMMAMKYPITA
LRMKSMMAMAYPATA

SEQ ID NO: 239249 - protein, 15 aa, Artificial Sequence
  Description of Artificial Sequence: Synthetic peptide
  Seed: LRMKWMMAMKYPITA
LRMKSMMAMAYPCTA

SEQ ID NO: 239250 - protein, 15 aa, Artificial Sequence
  Description of Artificial Sequence: Synthetic peptide
  Seed: LRMKWMMAMKYPITA
LRMKSMMAMAYPITA

SEQ ID NO: 239251 - protein, 15 aa, Artificial Sequence
  Description of Artificial Sequence: Synthetic peptide
  Seed: LRMKWMMAMKYPITA
LRMKSMMAMAYPLTA

SEQ ID NO: 239252 - protein, 15 aa, Artificial Sequence
  Description of Artificial Sequence: Synthetic peptide
  Seed: LRMKWMMAMKYPITA
LRMKSMMAMAYPMTA

SEQ ID NO: 239253 - protein, 15 aa, Artificial Sequence
  Description of Artificial Sequence: Synthetic peptide
  Seed: LRMKWMMAMKYPITA
LRMKSMMAMAYPVTA

SEQ ID NO: 239254 - protein, 15 aa, Artificial Sequence
  Description of Artificial Sequence: Synthetic peptide
  Seed: LRMKWMMAMKYPITA
LRMKSMMAMGYPITA

SEQ ID NO: 239255 - protein, 15 aa, Artificial Sequence
  Description of Artificial Sequence: Synthetic peptide
  Seed: LRMKWMMAMKYPITA
LRMKSMMAMGYPLTA

SEQ ID NO: 239256 - protein, 15 aa, Artificial Sequence
  Description of Artificial Sequence: Synthetic peptide
  Seed: LRMKWMMAMKYPITA
LRMKSMMAMGYPVTA

SEQ ID NO: 239257 - protein, 15 aa, Artificial Sequence
  Description of Artificial Sequence: Synthetic peptide
  Seed: LRMKWMMAMKYPITA
LRMKSMMAMIYPATA

SEQ ID NO: 239258 - protein, 15 aa, Artificial Sequence
  Description of Artificial Sequence: Synthetic peptide
  Seed: LRMKWMMAMKYPITA
LRMKSMMAMIYPSTA

SEQ ID NO: 239259 - protein, 15 aa, Artificial Sequence
  Description of Artificial Sequence: Synthetic peptide
  Seed: LRMKWMMAMKYPITA
LRMKSMMAMSYPITA

SEQ ID NO: 239260 - protein, 15 aa, Artificial Sequence
  Description of Artificial Sequence: Synthetic peptide
  Seed: LRMKWMMAMKYPITA
LRMKSMMAMSYPLTA

SEQ ID NO: 239261 - protein, 15 aa, Artificial Sequence
  Description of Artificial Sequence: Synthetic peptide
  Seed: LRMKWMMAMKYPITA
LRMKSMMAMSYPVTA

SEQ ID NO: 239262 - protein, 15 aa, Artificial Sequence
  Description of Artificial Sequence: Synthetic peptide
  Seed: LRMKWMMAMKYPITA
LRMKSMMAMVYPATA

SEQ ID NO: 239263 - protein, 15 aa, Artificial Sequence
  Description of Artificial Sequence: Synthetic peptide
  Seed: LRMKWMMAMKYPITA
LRMKSMMAMVYPSTA

SEQ ID NO: 239264 - protein, 15 aa, Artificial Sequence
  Description of Artificial Sequence: Synthetic peptide
  Seed: LRMKWMMAMKYPITA
LRMKSMMGMAYPITA

SEQ ID NO: 239265 - protein, 15 aa, Artificial Sequence
  Description of Artificial Sequence: Synthetic peptide
  Seed: LRMKWMMAMKYPITA
LRMKSMMGMAYPLTA

SEQ ID NO: 239266 - protein, 15 aa, Artificial Sequence
  Description of Artificial Sequence: Synthetic peptide
  Seed: LRMKWMMAMKYPITA
LRMKSMMGMAYPVTA

SEQ ID NO: 239267 - protein, 15 aa, Artificial Sequence
  Description of Artificial Sequence: Synthetic peptide
  Seed: LRMKWMMAMKYPITA
LRMKSMMHMRYPRTA

SEQ ID NO: 239268 - protein, 15 aa, Artificial Sequence
  Description of Artificial Sequence: Synthetic peptide
  Seed: LRMKWMMAMKYPITA
LRMKSMMIMGYPATA

SEQ ID NO: 239269 - protein, 15 aa, Artificial Sequence
  Description of Artificial Sequence: Synthetic peptide
  Seed: LRMKWMMAMKYPITA
LRMKSMMIMGYPITA

SEQ ID NO: 239270 - protein, 15 aa, Artificial Sequence
  Description of Artificial Sequence: Synthetic peptide
  Seed: LRMKWMMAMKYPITA
LRMKSMMIMGYPLTA

SEQ ID NO: 239271 - protein, 15 aa, Artificial Sequence
  Description of Artificial Sequence: Synthetic peptide
  Seed: LRMKWMMAMKYPITA
LRMKSMMIMGYPMTA

SEQ ID NO: 239272 - protein, 15 aa, Artificial Sequence
  Description of Artificial Sequence: Synthetic peptide
  Seed: LRMKWMMAMKYPITA
LRMKSMMIMGYPTTA

SEQ ID NO: 239273 - protein, 15 aa, Artificial Sequence
  Description of Artificial Sequence: Synthetic peptide
  Seed: LRMKWMMAMKYPITA
LRMKSMMIMGYPVTA

SEQ ID NO: 239274 - protein, 15 aa, Artificial Sequence
  Description of Artificial Sequence: Synthetic peptide
  Seed: LRMKWMMAMKYPITA
LRMKSMMIMKYPATA

SEQ ID NO: 239275 - protein, 15 aa, Artificial Sequence
  Description of Artificial Sequence: Synthetic peptide
  Seed: LRMKWMMAMKYPITA
LRMKSMMIMKYPSTA

SEQ ID NO: 239276 - protein, 15 aa, Artificial Sequence
  Description of Artificial Sequence: Synthetic peptide
  Seed: LRMKWMMAMKYPITA
LRMKSMMIMPYPATA

SEQ ID NO: 239277 - protein, 15 aa, Artificial Sequence
  Description of Artificial Sequence: Synthetic peptide
  Seed: LRMKWMMAMKYPITA
LRMKSMMIMPYPITA

SEQ ID NO: 239278 - protein, 15 aa, Artificial Sequence
  Description of Artificial Sequence: Synthetic peptide
  Seed: LRMKWMMAMKYPITA
LRMKSMMIMPYPLTA

SEQ ID NO: 239279 - protein, 15 aa, Artificial Sequence
  Description of Artificial Sequence: Synthetic peptide
  Seed: LRMKWMMAMKYPITA
LRMKSMMIMPYPMTA

SEQ ID NO: 239280 - protein, 15 aa, Artificial Sequence
  Description of Artificial Sequence: Synthetic peptide
  Seed: LRMKWMMAMKYPITA
LRMKSMMIMPYPVTA

SEQ ID NO: 239281 - protein, 15 aa, Artificial Sequence
  Description of Artificial Sequence: Synthetic peptide
  Seed: LRMKWMMAMKYPITA
LRMKSMMIMRYPATA

SEQ ID NO: 239282 - protein, 15 aa, Artificial Sequence
  Description of Artificial Sequence: Synthetic peptide
  Seed: LRMKWMMAMKYPITA
LRMKSMMIMRYPGTA

SEQ ID NO: 239283 - protein, 15 aa, Artificial Sequence
  Description of Artificial Sequence: Synthetic peptide
  Seed: LRMKWMMAMKYPITA
LRMKSMMIMRYPHTA

SEQ ID NO: 239284 - protein, 15 aa, Artificial Sequence
  Description of Artificial Sequence: Synthetic peptide
  Seed: LRMKWMMAMKYPITA
LRMKSMMIMRYPITA

SEQ ID NO: 239285 - protein, 15 aa, Artificial Sequence
  Description of Artificial Sequence: Synthetic peptide
  Seed: LRMKWMMAMKYPITA
LRMKSMMIMRYPLTA

SEQ ID NO: 239286 - protein, 15 aa, Artificial Sequence
  Description of Artificial Sequence: Synthetic peptide
  Seed: LRMKWMMAMKYPITA
LRMKSMMIMRYPMTA

SEQ ID NO: 239287 - protein, 15 aa, Artificial Sequence
  Description of Artificial Sequence: Synthetic peptide
  Seed: LRMKWMMAMKYPITA
LRMKSMMIMRYPQTA

SEQ ID NO: 239288 - protein, 15 aa, Artificial Sequence
  Description of Artificial Sequence: Synthetic peptide
  Seed: LRMKWMMAMKYPITA
LRMKSMMIMRYPRTA

SEQ ID NO: 239289 - protein, 15 aa, Artificial Sequence
  Description of Artificial Sequence: Synthetic peptide
  Seed: LRMKWMMAMKYPITA
LRMKSMMIMRYPSTA

SEQ ID NO: 239290 - protein, 15 aa, Artificial Sequence
  Description of Artificial Sequence: Synthetic peptide
  Seed: LRMKWMMAMKYPITA
LRMKSMMIMRYPTTA

SEQ ID NO: 239291 - protein, 15 aa, Artificial Sequence
  Description of Artificial Sequence: Synthetic peptide
  Seed: LRMKWMMAMKYPITA
LRMKSMMIMRYPVTA

SEQ ID NO: 239292 - protein, 15 aa, Artificial Sequence
  Description of Artificial Sequence: Synthetic peptide
  Seed: LRMKWMMAMKYPITA
LRMKSMMIMRYPYTA

SEQ ID NO: 239293 - protein, 15 aa, Artificial Sequence
  Description of Artificial Sequence: Synthetic peptide
  Seed: LRMKWMMAMKYPITA
LRMKSMMIMSYPITA

SEQ ID NO: 239294 - protein, 15 aa, Artificial Sequence
  Description of Artificial Sequence: Synthetic peptide
  Seed: LRMKWMMAMKYPITA
LRMKSMMLMAYPATA

SEQ ID NO: 239295 - protein, 15 aa, Artificial Sequence
  Description of Artificial Sequence: Synthetic peptide
  Seed: LRMKWMMAMKYPITA
LRMKSMMLMAYPCTA

SEQ ID NO: 239296 - protein, 15 aa, Artificial Sequence
  Description of Artificial Sequence: Synthetic peptide
  Seed: LRMKWMMAMKYPITA
LRMKSMMLMAYPITA

SEQ ID NO: 239297 - protein, 15 aa, Artificial Sequence
  Description of Artificial Sequence: Synthetic peptide
  Seed: LRMKWMMAMKYPITA
LRMKSMMLMAYPLTA

SEQ ID NO: 239298 - protein, 15 aa, Artificial Sequence
  Description of Artificial Sequence: Synthetic peptide
  Seed: LRMKWMMAMKYPITA
LRMKSMMLMAYPMTA

SEQ ID NO: 239299 - protein, 15 aa, Artificial Sequence
  Description of Artificial Sequence: Synthetic peptide
  Seed: LRMKWMMAMKYPITA
LRMKSMMLMAYPSTA

SEQ ID NO: 239300 - protein, 15 aa, Artificial Sequence
  Description of Artificial Sequence: Synthetic peptide
  Seed: LRMKWMMAMKYPITA
LRMKSMMLMAYPTTA

SEQ ID NO: 239301 - protein, 15 aa, Artificial Sequence
  Description of Artificial Sequence: Synthetic peptide
  Seed: LRMKWMMAMKYPITA
LRMKSMMLMAYPVTA

SEQ ID NO: 239302 - protein, 15 aa, Artificial Sequence
  Description of Artificial Sequence: Synthetic peptide
  Seed: LRMKWMMAMKYPITA
LRMKSMMLMGYPATA

SEQ ID NO: 239303 - protein, 15 aa, Artificial Sequence
  Description of Artificial Sequence: Synthetic peptide
  Seed: LRMKWMMAMKYPITA
LRMKSMMLMGYPITA

SEQ ID NO: 239304 - protein, 15 aa, Artificial Sequence
  Description of Artificial Sequence: Synthetic peptide
  Seed: LRMKWMMAMKYPITA
LRMKSMMLMGYPLTA

SEQ ID NO: 239305 - protein, 15 aa, Artificial Sequence
  Description of Artificial Sequence: Synthetic peptide
  Seed: LRMKWMMAMKYPITA
LRMKSMMLMGYPMTA

SEQ ID NO: 239306 - protein, 15 aa, Artificial Sequence
  Description of Artificial Sequence: Synthetic peptide
  Seed: LRMKWMMAMKYPITA
LRMKSMMLMGYPSTA

SEQ ID NO: 239307 - protein, 15 aa, Artificial Sequence
  Description of Artificial Sequence: Synthetic peptide
  Seed: LRMKWMMAMKYPITA
LRMKSMMLMGYPTTA

SEQ ID NO: 239308 - protein, 15 aa, Artificial Sequence
  Description of Artificial Sequence: Synthetic peptide
  Seed: LRMKWMMAMKYPITA
LRMKSMMLMGYPVTA

SEQ ID NO: 239309 - protein, 15 aa, Artificial Sequence
  Description of Artificial Sequence: Synthetic peptide
  Seed: LRMKWMMAMKYPITA
LRMKSMMLMKYPATA

SEQ ID NO: 239310 - protein, 15 aa, Artificial Sequence
  Description of Artificial Sequence: Synthetic peptide
  Seed: LRMKWMMAMKYPITA
LRMKSMMLMKYPRTA

SEQ ID NO: 239311 - protein, 15 aa, Artificial Sequence
  Description of Artificial Sequence: Synthetic peptide
  Seed: LRMKWMMAMKYPITA
LRMKSMMLMKYPSTA

SEQ ID NO: 239312 - protein, 15 aa, Artificial Sequence
  Description of Artificial Sequence: Synthetic peptide
  Seed: LRMKWMMAMKYPITA
LRMKSMMLMNYPITA

SEQ ID NO: 239313 - protein, 15 aa, Artificial Sequence
  Description of Artificial Sequence: Synthetic peptide
  Seed: LRMKWMMAMKYPITA
LRMKSMMLMNYPLTA

SEQ ID NO: 239314 - protein, 15 aa, Artificial Sequence
  Description of Artificial Sequence: Synthetic peptide
  Seed: LRMKWMMAMKYPITA
LRMKSMMLMNYPVTA

SEQ ID NO: 239315 - protein, 15 aa, Artificial Sequence
  Description of Artificial Sequence: Synthetic peptide
  Seed: LRMKWMMAMKYPITA
LRMKSMMLMPYPATA

SEQ ID NO: 239316 - protein, 15 aa, Artificial Sequence
  Description of Artificial Sequence: Synthetic peptide
  Seed: LRMKWMMAMKYPITA
LRMKSMMLMPYPITA

SEQ ID NO: 239317 - protein, 15 aa, Artificial Sequence
  Description of Artificial Sequence: Synthetic peptide
  Seed: LRMKWMMAMKYPITA
LRMKSMMLMPYPLTA

SEQ ID NO: 239318 - protein, 15 aa, Artificial Sequence
  Description of Artificial Sequence: Synthetic peptide
  Seed: LRMKWMMAMKYPITA
LRMKSMMLMPYPMTA

SEQ ID NO: 239319 - protein, 15 aa, Artificial Sequence
  Description of Artificial Sequence: Synthetic peptide
  Seed: LRMKWMMAMKYPITA
LRMKSMMLMPYPVTA

SEQ ID NO: 239320 - protein, 15 aa, Artificial Sequence
  Description of Artificial Sequence: Synthetic peptide
  Seed: LRMKWMMAMKYPITA
LRMKSMMLMRYPATA

SEQ ID NO: 239321 - protein, 15 aa, Artificial Sequence
  Description of Artificial Sequence: Synthetic peptide
  Seed: LRMKWMMAMKYPITA
LRMKSMMLMRYPHTA

SEQ ID NO: 239322 - protein, 15 aa, Artificial Sequence
  Description of Artificial Sequence: Synthetic peptide
  Seed: LRMKWMMAMKYPITA
LRMKSMMLMRYPKTA

SEQ ID NO: 239323 - protein, 15 aa, Artificial Sequence
  Description of Artificial Sequence: Synthetic peptide
  Seed: LRMKWMMAMKYPITA
LRMKSMMLMRYPMTA

SEQ ID NO: 239324 - protein, 15 aa, Artificial Sequence
  Description of Artificial Sequence: Synthetic peptide
  Seed: LRMKWMMAMKYPITA
LRMKSMMLMRYPQTA

SEQ ID NO: 239325 - protein, 15 aa, Artificial Sequence
  Description of Artificial Sequence: Synthetic peptide
  Seed: LRMKWMMAMKYPITA
LRMKSMMLMRYPRTA

SEQ ID NO: 239326 - protein, 15 aa, Artificial Sequence
  Description of Artificial Sequence: Synthetic peptide
  Seed: LRMKWMMAMKYPITA
LRMKSMMLMRYPSTA

SEQ ID NO: 239327 - protein, 15 aa, Artificial Sequence
  Description of Artificial Sequence: Synthetic peptide
  Seed: LRMKWMMAMKYPITA
LRMKSMMLMRYPVTA

SEQ ID NO: 239328 - protein, 15 aa, Artificial Sequence
  Description of Artificial Sequence: Synthetic peptide
  Seed: LRMKWMMAMKYPITA
LRMKSMMLMSYPATA

SEQ ID NO: 239329 - protein, 15 aa, Artificial Sequence
  Description of Artificial Sequence: Synthetic peptide
  Seed: LRMKWMMAMKYPITA
LRMKSMMLMSYPITA

SEQ ID NO: 239330 - protein, 15 aa, Artificial Sequence
  Description of Artificial Sequence: Synthetic peptide
  Seed: LRMKWMMAMKYPITA
LRMKSMMLMSYPLTA

SEQ ID NO: 239331 - protein, 15 aa, Artificial Sequence
  Description of Artificial Sequence: Synthetic peptide
  Seed: LRMKWMMAMKYPITA
LRMKSMMLMSYPMTA

SEQ ID NO: 239332 - protein, 15 aa, Artificial Sequence
  Description of Artificial Sequence: Synthetic peptide
  Seed: LRMKWMMAMKYPITA
LRMKSMMLMSYPSTA

SEQ ID NO: 239333 - protein, 15 aa, Artificial Sequence
  Description of Artificial Sequence: Synthetic peptide
  Seed: LRMKWMMAMKYPITA
LRMKSMMLMSYPTTA

SEQ ID NO: 239334 - protein, 15 aa, Artificial Sequence
  Description of Artificial Sequence: Synthetic peptide
  Seed: LRMKWMMAMKYPITA
LRMKSMMLMSYPVTA

SEQ ID NO: 239335 - protein, 15 aa, Artificial Sequence
  Description of Artificial Sequence: Synthetic peptide
  Seed: LRMKWMMAMKYPITA
LRMKSMMLMTYPMTA

SEQ ID NO: 239336 - protein, 15 aa, Artificial Sequence
  Description of Artificial Sequence: Synthetic peptide
  Seed: LRMKWMMAMKYPITA
LRMKSMMMMAYPATA

SEQ ID NO: 239337 - protein, 15 aa, Artificial Sequence
  Description of Artificial Sequence: Synthetic peptide
  Seed: LRMKWMMAMKYPITA
LRMKSMMMMAYPCTA

SEQ ID NO: 239338 - protein, 15 aa, Artificial Sequence
  Description of Artificial Sequence: Synthetic peptide
  Seed: LRMKWMMAMKYPITA
LRMKSMMMMAYPITA

SEQ ID NO: 239339 - protein, 15 aa, Artificial Sequence
  Description of Artificial Sequence: Synthetic peptide
  Seed: LRMKWMMAMKYPITA
LRMKSMMMMAYPLTA

SEQ ID NO: 239340 - protein, 15 aa, Artificial Sequence
  Description of Artificial Sequence: Synthetic peptide
  Seed: LRMKWMMAMKYPITA
LRMKSMMMMAYPMTA

SEQ ID NO: 239341 - protein, 15 aa, Artificial Sequence
  Description of Artificial Sequence: Synthetic peptide
  Seed: LRMKWMMAMKYPITA
LRMKSMMMMAYPSTA

SEQ ID NO: 239342 - protein, 15 aa, Artificial Sequence
  Description of Artificial Sequence: Synthetic peptide
  Seed: LRMKWMMAMKYPITA
LRMKSMMMMAYPTTA

SEQ ID NO: 239343 - protein, 15 aa, Artificial Sequence
  Description of Artificial Sequence: Synthetic peptide
  Seed: LRMKWMMAMKYPITA
LRMKSMMMMAYPVTA

SEQ ID NO: 239344 - protein, 15 aa, Artificial Sequence
  Description of Artificial Sequence: Synthetic peptide
  Seed: LRMKWMMAMKYPITA
LRMKSMMMMGYPATA

SEQ ID NO: 239345 - protein, 15 aa, Artificial Sequence
  Description of Artificial Sequence: Synthetic peptide
  Seed: LRMKWMMAMKYPITA
LRMKSMMMMGYPITA

SEQ ID NO: 239346 - protein, 15 aa, Artificial Sequence
  Description of Artificial Sequence: Synthetic peptide
  Seed: LRMKWMMAMKYPITA
LRMKSMMMMGYPLTA

SEQ ID NO: 239347 - protein, 15 aa, Artificial Sequence
  Description of Artificial Sequence: Synthetic peptide
  Seed: LRMKWMMAMKYPITA
LRMKSMMMMGYPMTA

SEQ ID NO: 239348 - protein, 15 aa, Artificial Sequence
  Description of Artificial Sequence: Synthetic peptide
  Seed: LRMKWMMAMKYPITA
LRMKSMMMMGYPSTA

SEQ ID NO: 239349 - protein, 15 aa, Artificial Sequence
  Description of Artificial Sequence: Synthetic peptide
  Seed: LRMKWMMAMKYPITA
LRMKSMMMMGYPTTA

SEQ ID NO: 239350 - protein, 15 aa, Artificial Sequence
  Description of Artificial Sequence: Synthetic peptide
  Seed: LRMKWMMAMKYPITA
LRMKSMMMMGYPVTA

SEQ ID NO: 239351 - protein, 15 aa, Artificial Sequence
  Description of Artificial Sequence: Synthetic peptide
  Seed: LRMKWMMAMKYPITA
LRMKSMMMMKYPATA

SEQ ID NO: 239352 - protein, 15 aa, Artificial Sequence
  Description of Artificial Sequence: Synthetic peptide
  Seed: LRMKWMMAMKYPITA
LRMKSMMMMKYPKTA

SEQ ID NO: 239353 - protein, 15 aa, Artificial Sequence
  Description of Artificial Sequence: Synthetic peptide
  Seed: LRMKWMMAMKYPITA
LRMKSMMMMKYPRTA

SEQ ID NO: 239354 - protein, 15 aa, Artificial Sequence
  Description of Artificial Sequence: Synthetic peptide
  Seed: LRMKWMMAMKYPITA
LRMKSMMMMKYPSTA

SEQ ID NO: 239355 - protein, 15 aa, Artificial Sequence
  Description of Artificial Sequence: Synthetic peptide
  Seed: LRMKWMMAMKYPITA
LRMKSMMMMNYPITA

SEQ ID NO: 239356 - protein, 15 aa, Artificial Sequence
  Description of Artificial Sequence: Synthetic peptide
  Seed: LRMKWMMAMKYPITA
LRMKSMMMMNYPLTA

SEQ ID NO: 239357 - protein, 15 aa, Artificial Sequence
  Description of Artificial Sequence: Synthetic peptide
  Seed: LRMKWMMAMKYPITA
LRMKSMMMMNYPVTA

SEQ ID NO: 239358 - protein, 15 aa, Artificial Sequence
  Description of Artificial Sequence: Synthetic peptide
  Seed: LRMKWMMAMKYPITA
LRMKSMMMMPYPATA

SEQ ID NO: 239359 - protein, 15 aa, Artificial Sequence
  Description of Artificial Sequence: Synthetic peptide
  Seed: LRMKWMMAMKYPITA
LRMKSMMMMPYPITA

SEQ ID NO: 239360 - protein, 15 aa, Artificial Sequence
  Description of Artificial Sequence: Synthetic peptide
  Seed: LRMKWMMAMKYPITA
LRMKSMMMMPYPLTA

SEQ ID NO: 239361 - protein, 15 aa, Artificial Sequence
  Description of Artificial Sequence: Synthetic peptide
  Seed: LRMKWMMAMKYPITA
LRMKSMMMMPYPMTA

SEQ ID NO: 239362 - protein, 15 aa, Artificial Sequence
  Description of Artificial Sequence: Synthetic peptide
  Seed: LRMKWMMAMKYPITA
LRMKSMMMMPYPVTA

SEQ ID NO: 239363 - protein, 15 aa, Artificial Sequence
  Description of Artificial Sequence: Synthetic peptide
  Seed: LRMKWMMAMKYPITA
LRMKSMMMMRYPATA

SEQ ID NO: 239364 - protein, 15 aa, Artificial Sequence
  Description of Artificial Sequence: Synthetic peptide
  Seed: LRMKWMMAMKYPITA
LRMKSMMMMRYPHTA

SEQ ID NO: 239365 - protein, 15 aa, Artificial Sequence
  Description of Artificial Sequence: Synthetic peptide
  Seed: LRMKWMMAMKYPITA
LRMKSMMMMRYPITA

SEQ ID NO: 239366 - protein, 15 aa, Artificial Sequence
  Description of Artificial Sequence: Synthetic peptide
  Seed: LRMKWMMAMKYPITA
LRMKSMMMMRYPKTA

SEQ ID NO: 239367 - protein, 15 aa, Artificial Sequence
  Description of Artificial Sequence: Synthetic peptide
  Seed: LRMKWMMAMKYPITA
LRMKSMMMMRYPLTA

SEQ ID NO: 239368 - protein, 15 aa, Artificial Sequence
  Description of Artificial Sequence: Synthetic peptide
  Seed: LRMKWMMAMKYPITA
LRMKSMMMMRYPMTA

SEQ ID NO: 239369 - protein, 15 aa, Artificial Sequence
  Description of Artificial Sequence: Synthetic peptide
  Seed: LRMKWMMAMKYPITA
LRMKSMMMMRYPQTA

SEQ ID NO: 239370 - protein, 15 aa, Artificial Sequence
  Description of Artificial Sequence: Synthetic peptide
  Seed: LRMKWMMAMKYPITA
LRMKSMMMMRYPRTA

SEQ ID NO: 239371 - protein, 15 aa, Artificial Sequence
  Description of Artificial Sequence: Synthetic peptide
  Seed: LRMKWMMAMKYPITA
LRMKSMMMMRYPSTA

SEQ ID NO: 239372 - protein, 15 aa, Artificial Sequence
  Description of Artificial Sequence: Synthetic peptide
  Seed: LRMKWMMAMKYPITA
LRMKSMMMMRYPTTA

SEQ ID NO: 239373 - protein, 15 aa, Artificial Sequence
  Description of Artificial Sequence: Synthetic peptide
  Seed: LRMKWMMAMKYPITA
LRMKSMMMMRYPVTA

SEQ ID NO: 239374 - protein, 15 aa, Artificial Sequence
  Description of Artificial Sequence: Synthetic peptide
  Seed: LRMKWMMAMKYPITA
LRMKSMMMMSYPATA

SEQ ID NO: 239375 - protein, 15 aa, Artificial Sequence
  Description of Artificial Sequence: Synthetic peptide
  Seed: LRMKWMMAMKYPITA
LRMKSMMMMSYPITA

SEQ ID NO: 239376 - protein, 15 aa, Artificial Sequence
  Description of Artificial Sequence: Synthetic peptide
  Seed: LRMKWMMAMKYPITA
LRMKSMMMMSYPLTA

SEQ ID NO: 239377 - protein, 15 aa, Artificial Sequence
  Description of Artificial Sequence: Synthetic peptide
  Seed: LRMKWMMAMKYPITA
LRMKSMMMMSYPMTA

SEQ ID NO: 239378 - protein, 15 aa, Artificial Sequence
  Description of Artificial Sequence: Synthetic peptide
  Seed: LRMKWMMAMKYPITA
LRMKSMMMMSYPSTA

SEQ ID NO: 239379 - protein, 15 aa, Artificial Sequence
  Description of Artificial Sequence: Synthetic peptide
  Seed: LRMKWMMAMKYPITA
LRMKSMMMMSYPTTA

SEQ ID NO: 239380 - protein, 15 aa, Artificial Sequence
  Description of Artificial Sequence: Synthetic peptide
  Seed: LRMKWMMAMKYPITA
LRMKSMMMMSYPVTA

SEQ ID NO: 239381 - protein, 15 aa, Artificial Sequence
  Description of Artificial Sequence: Synthetic peptide
  Seed: LRMKWMMAMKYPITA
LRMKSMMMMTYPMTA

SEQ ID NO: 239382 - protein, 15 aa, Artificial Sequence
  Description of Artificial Sequence: Synthetic peptide
  Seed: LRMKWMMAMKYPITA
LRMKSMMNMAYPITA

SEQ ID NO: 239383 - protein, 15 aa, Artificial Sequence
  Description of Artificial Sequence: Synthetic peptide
  Seed: LRMKWMMAMKYPITA
LRMKSMMNMAYPVTA

SEQ ID NO: 239384 - protein, 15 aa, Artificial Sequence
  Description of Artificial Sequence: Synthetic peptide
  Seed: LRMKWMMAMKYPITA
LRMKSMMNMNYPVTA

SEQ ID NO: 239385 - protein, 15 aa, Artificial Sequence
  Description of Artificial Sequence: Synthetic peptide
  Seed: LRMKWMMAMKYPITA
LRMKSMMNMSYPITA

SEQ ID NO: 239386 - protein, 15 aa, Artificial Sequence
  Description of Artificial Sequence: Synthetic peptide
  Seed: LRMKWMMAMKYPITA
LRMKSMMQMGYPLTA

SEQ ID NO: 239387 - protein, 15 aa, Artificial Sequence
  Description of Artificial Sequence: Synthetic peptide
  Seed: LRMKWMMAMKYPITA
LRMKSMMSMAYPITA

SEQ ID NO: 239388 - protein, 15 aa, Artificial Sequence
  Description of Artificial Sequence: Synthetic peptide
  Seed: LRMKWMMAMKYPITA
LRMKSMMSMAYPLTA

SEQ ID NO: 239389 - protein, 15 aa, Artificial Sequence
  Description of Artificial Sequence: Synthetic peptide
  Seed: LRMKWMMAMKYPITA
LRMKSMMSMAYPVTA

SEQ ID NO: 239390 - protein, 15 aa, Artificial Sequence
  Description of Artificial Sequence: Synthetic peptide
  Seed: LRMKWMMAMKYPITA
LRMKSMMSMGYPITA

SEQ ID NO: 239391 - protein, 15 aa, Artificial Sequence
  Description of Artificial Sequence: Synthetic peptide
  Seed: LRMKWMMAMKYPITA
LRMKSMMSMGYPLTA

SEQ ID NO: 239392 - protein, 15 aa, Artificial Sequence
  Description of Artificial Sequence: Synthetic peptide
  Seed: LRMKWMMAMKYPITA
LRMKSMMSMGYPVTA

SEQ ID NO: 239393 - protein, 15 aa, Artificial Sequence
  Description of Artificial Sequence: Synthetic peptide
  Seed: LRMKWMMAMKYPITA
LRMKSMMSMIYPATA

SEQ ID NO: 239394 - protein, 15 aa, Artificial Sequence
  Description of Artificial Sequence: Synthetic peptide
  Seed: LRMKWMMAMKYPITA
LRMKSMMSMSYPITA

SEQ ID NO: 239395 - protein, 15 aa, Artificial Sequence
  Description of Artificial Sequence: Synthetic peptide
  Seed: LRMKWMMAMKYPITA
LRMKSMMSMSYPLTA

SEQ ID NO: 239396 - protein, 15 aa, Artificial Sequence
  Description of Artificial Sequence: Synthetic peptide
  Seed: LRMKWMMAMKYPITA
LRMKSMMSMSYPVTA

SEQ ID NO: 239397 - protein, 15 aa, Artificial Sequence
  Description of Artificial Sequence: Synthetic peptide
  Seed: LRMKWMMAMKYPITA
LRMKSMMSMVYPATA

SEQ ID NO: 239398 - protein, 15 aa, Artificial Sequence
  Description of Artificial Sequence: Synthetic peptide
  Seed: LRMKWMMAMKYPITA
LRMKSMMTMAYPITA

SEQ ID NO: 239399 - protein, 15 aa, Artificial Sequence
  Description of Artificial Sequence: Synthetic peptide
  Seed: LRMKWMMAMKYPITA
LRMKSMMTMAYPLTA

SEQ ID NO: 239400 - protein, 15 aa, Artificial Sequence
  Description of Artificial Sequence: Synthetic peptide
  Seed: LRMKWMMAMKYPITA
LRMKSMMTMAYPVTA

SEQ ID NO: 239401 - protein, 15 aa, Artificial Sequence
  Description of Artificial Sequence: Synthetic peptide
  Seed: LRMKWMMAMKYPITA
LRMKSMMTMGYPITA

SEQ ID NO: 239402 - protein, 15 aa, Artificial Sequence
  Description of Artificial Sequence: Synthetic peptide
  Seed: LRMKWMMAMKYPITA
LRMKSMMTMGYPLTA

SEQ ID NO: 239403 - protein, 15 aa, Artificial Sequence
  Description of Artificial Sequence: Synthetic peptide
  Seed: LRMKWMMAMKYPITA
LRMKSMMTMGYPVTA

SEQ ID NO: 239404 - protein, 15 aa, Artificial Sequence
  Description of Artificial Sequence: Synthetic peptide
  Seed: LRMKWMMAMKYPITA
LRMKSMMTMPYPLTA

SEQ ID NO: 239405 - protein, 15 aa, Artificial Sequence
  Description of Artificial Sequence: Synthetic peptide
  Seed: LRMKWMMAMKYPITA
LRMKSMMTMSYPITA

SEQ ID NO: 239406 - protein, 15 aa, Artificial Sequence
  Description of Artificial Sequence: Synthetic peptide
  Seed: LRMKWMMAMKYPITA
LRMKSMMTMSYPLTA

SEQ ID NO: 239407 - protein, 15 aa, Artificial Sequence
  Description of Artificial Sequence: Synthetic peptide
  Seed: LRMKWMMAMKYPITA
LRMKSMMTMSYPVTA

SEQ ID NO: 239408 - protein, 15 aa, Artificial Sequence
  Description of Artificial Sequence: Synthetic peptide
  Seed: LRMKWMMAMKYPITA
LRMKSMMTMTYPITA

SEQ ID NO: 239409 - protein, 15 aa, Artificial Sequence
  Description of Artificial Sequence: Synthetic peptide
  Seed: LRMKWMMAMKYPITA
LRMKSMMVMAYPITA

SEQ ID NO: 239410 - protein, 15 aa, Artificial Sequence
  Description of Artificial Sequence: Synthetic peptide
  Seed: LRMKWMMAMKYPITA
LRMKSMMVMGYPATA

SEQ ID NO: 239411 - protein, 15 aa, Artificial Sequence
  Description of Artificial Sequence: Synthetic peptide
  Seed: LRMKWMMAMKYPITA
LRMKSMMVMGYPITA

SEQ ID NO: 239412 - protein, 15 aa, Artificial Sequence
  Description of Artificial Sequence: Synthetic peptide
  Seed: LRMKWMMAMKYPITA
LRMKSMMVMGYPLTA

SEQ ID NO: 239413 - protein, 15 aa, Artificial Sequence
  Description of Artificial Sequence: Synthetic peptide
  Seed: LRMKWMMAMKYPITA
LRMKSMMVMGYPMTA

SEQ ID NO: 239414 - protein, 15 aa, Artificial Sequence
  Description of Artificial Sequence: Synthetic peptide
  Seed: LRMKWMMAMKYPITA
LRMKSMMVMGYPVTA

SEQ ID NO: 239415 - protein, 15 aa, Artificial Sequence
  Description of Artificial Sequence: Synthetic peptide
  Seed: LRMKWMMAMKYPITA
LRMKSMMVMPYPITA

SEQ ID NO: 239416 - protein, 15 aa, Artificial Sequence
  Description of Artificial Sequence: Synthetic peptide
  Seed: LRMKWMMAMKYPITA
LRMKSMMVMPYPLTA

SEQ ID NO: 239417 - protein, 15 aa, Artificial Sequence
  Description of Artificial Sequence: Synthetic peptide
  Seed: LRMKWMMAMKYPITA
LRMKSMMVMPYPMTA

SEQ ID NO: 239418 - protein, 15 aa, Artificial Sequence
  Description of Artificial Sequence: Synthetic peptide
  Seed: LRMKWMMAMKYPITA
LRMKSMMVMPYPVTA

SEQ ID NO: 239419 - protein, 15 aa, Artificial Sequence
  Description of Artificial Sequence: Synthetic peptide
  Seed: LRMKWMMAMKYPITA
LRMKSMMVMRYPATA

SEQ ID NO: 239420 - protein, 15 aa, Artificial Sequence
  Description of Artificial Sequence: Synthetic peptide
  Seed: LRMKWMMAMKYPITA
LRMKSMMVMRYPMTA

SEQ ID NO: 239421 - protein, 15 aa, Artificial Sequence
  Description of Artificial Sequence: Synthetic peptide
  Seed: LRMKWMMAMKYPITA
LRMKSMMVMRYPQTA

SEQ ID NO: 239422 - protein, 15 aa, Artificial Sequence
  Description of Artificial Sequence: Synthetic peptide
  Seed: LRMKWMMAMKYPITA
LRMKSMMVMRYPRTA

SEQ ID NO: 239423 - protein, 15 aa, Artificial Sequence
  Description of Artificial Sequence: Synthetic peptide
  Seed: LRMKWMMAMKYPITA
LRMKSMMVMRYPSTA

SEQ ID NO: 239424 - protein, 15 aa, Artificial Sequence
  Description of Artificial Sequence: Synthetic peptide
  Seed: LRMKWMMAMKYPITA
LRMKSMMVMRYPVTA

SEQ ID NO: 239425 - protein, 15 aa, Artificial Sequence
  Description of Artificial Sequence: Synthetic peptide
  Seed: LRMKWMMAMKYPITA
LRMKSMMVMSYPITA

SEQ ID NO: 239426 - protein, 15 aa, Artificial Sequence
  Description of Artificial Sequence: Synthetic peptide
  Seed: LRMKWMMAMKYPITA
LRMKSMMVMSYPLTA

SEQ ID NO: 239427 - protein, 15 aa, Artificial Sequence
  Description of Artificial Sequence: Synthetic peptide
  Seed: LRMKWMMAMKYPITA
LRMKSMMVMSYPVTA

SEQ ID NO: 239428 - protein, 15 aa, Artificial Sequence
  Description of Artificial Sequence: Synthetic peptide
  Seed: LRMKWMMAMKYPITA
LRMKTMMAMAYPATA

SEQ ID NO: 239429 - protein, 15 aa, Artificial Sequence
  Description of Artificial Sequence: Synthetic peptide
  Seed: LRMKWMMAMKYPITA
LRMKTMMAMAYPCTA

SEQ ID NO: 239430 - protein, 15 aa, Artificial Sequence
  Description of Artificial Sequence: Synthetic peptide
  Seed: LRMKWMMAMKYPITA
LRMKTMMAMAYPITA

SEQ ID NO: 239431 - protein, 15 aa, Artificial Sequence
  Description of Artificial Sequence: Synthetic peptide
  Seed: LRMKWMMAMKYPITA
LRMKTMMAMAYPLTA

SEQ ID NO: 239432 - protein, 15 aa, Artificial Sequence
  Description of Artificial Sequence: Synthetic peptide
  Seed: LRMKWMMAMKYPITA
LRMKTMMAMAYPMTA

SEQ ID NO: 239433 - protein, 15 aa, Artificial Sequence
  Description of Artificial Sequence: Synthetic peptide
  Seed: LRMKWMMAMKYPITA
LRMKTMMAMAYPSTA

SEQ ID NO: 239434 - protein, 15 aa, Artificial Sequence
  Description of Artificial Sequence: Synthetic peptide
  Seed: LRMKWMMAMKYPITA
LRMKTMMAMAYPTTA

SEQ ID NO: 239435 - protein, 15 aa, Artificial Sequence
  Description of Artificial Sequence: Synthetic peptide
  Seed: LRMKWMMAMKYPITA
LRMKTMMAMAYPVTA

SEQ ID NO: 239436 - protein, 15 aa, Artificial Sequence
  Description of Artificial Sequence: Synthetic peptide
  Seed: LRMKWMMAMKYPITA
LRMKTMMAMGYPATA

SEQ ID NO: 239437 - protein, 15 aa, Artificial Sequence
  Description of Artificial Sequence: Synthetic peptide
  Seed: LRMKWMMAMKYPITA
LRMKTMMAMGYPITA

SEQ ID NO: 239438 - protein, 15 aa, Artificial Sequence
  Description of Artificial Sequence: Synthetic peptide
  Seed: LRMKWMMAMKYPITA
LRMKTMMAMGYPLTA

SEQ ID NO: 239439 - protein, 15 aa, Artificial Sequence
  Description of Artificial Sequence: Synthetic peptide
  Seed: LRMKWMMAMKYPITA
LRMKTMMAMGYPMTA

SEQ ID NO: 239440 - protein, 15 aa, Artificial Sequence
  Description of Artificial Sequence: Synthetic peptide
  Seed: LRMKWMMAMKYPITA
LRMKTMMAMGYPVTA

SEQ ID NO: 239441 - protein, 15 aa, Artificial Sequence
  Description of Artificial Sequence: Synthetic peptide
  Seed: LRMKWMMAMKYPITA
LRMKTMMAMIYPATA

SEQ ID NO: 239442 - protein, 15 aa, Artificial Sequence
  Description of Artificial Sequence: Synthetic peptide
  Seed: LRMKWMMAMKYPITA
LRMKTMMAMIYPSTA

SEQ ID NO: 239443 - protein, 15 aa, Artificial Sequence
  Description of Artificial Sequence: Synthetic peptide
  Seed: LRMKWMMAMKYPITA
LRMKTMMAMKYPRTA

SEQ ID NO: 239444 - protein, 15 aa, Artificial Sequence
  Description of Artificial Sequence: Synthetic peptide
  Seed: LRMKWMMAMKYPITA
LRMKTMMAMPYPATA

SEQ ID NO: 239445 - protein, 15 aa, Artificial Sequence
  Description of Artificial Sequence: Synthetic peptide
  Seed: LRMKWMMAMKYPITA
LRMKTMMAMPYPITA

SEQ ID NO: 239446 - protein, 15 aa, Artificial Sequence
  Description of Artificial Sequence: Synthetic peptide
  Seed: LRMKWMMAMKYPITA
LRMKTMMAMPYPLTA

SEQ ID NO: 239447 - protein, 15 aa, Artificial Sequence
  Description of Artificial Sequence: Synthetic peptide
  Seed: LRMKWMMAMKYPITA
LRMKTMMAMPYPSTA

SEQ ID NO: 239448 - protein, 15 aa, Artificial Sequence
  Description of Artificial Sequence: Synthetic peptide
  Seed: LRMKWMMAMKYPITA
LRMKTMMAMPYPVTA

SEQ ID NO: 239449 - protein, 15 aa, Artificial Sequence
  Description of Artificial Sequence: Synthetic peptide
  Seed: LRMKWMMAMKYPITA
LRMKTMMAMRYPATA

SEQ ID NO: 239450 - protein, 15 aa, Artificial Sequence
  Description of Artificial Sequence: Synthetic peptide
  Seed: LRMKWMMAMKYPITA
LRMKTMMAMRYPMTA

SEQ ID NO: 239451 - protein, 15 aa, Artificial Sequence
  Description of Artificial Sequence: Synthetic peptide
  Seed: LRMKWMMAMKYPITA
LRMKTMMAMRYPQTA

SEQ ID NO: 239452 - protein, 15 aa, Artificial Sequence
  Description of Artificial Sequence: Synthetic peptide
  Seed: LRMKWMMAMKYPITA
LRMKTMMAMRYPRTA

SEQ ID NO: 239453 - protein, 15 aa, Artificial Sequence
  Description of Artificial Sequence: Synthetic peptide
  Seed: LRMKWMMAMKYPITA
LRMKTMMAMRYPSTA

SEQ ID NO: 239454 - protein, 15 aa, Artificial Sequence
  Description of Artificial Sequence: Synthetic peptide
  Seed: LRMKWMMAMKYPITA
LRMKTMMAMRYPVTA

SEQ ID NO: 239455 - protein, 15 aa, Artificial Sequence
  Description of Artificial Sequence: Synthetic peptide
  Seed: LRMKWMMAMKYPITA
LRMKTMMAMRYPYTA

SEQ ID NO: 239456 - protein, 15 aa, Artificial Sequence
  Description of Artificial Sequence: Synthetic peptide
  Seed: LRMKWMMAMKYPITA
LRMKTMMAMSYPATA

SEQ ID NO: 239457 - protein, 15 aa, Artificial Sequence
  Description of Artificial Sequence: Synthetic peptide
  Seed: LRMKWMMAMKYPITA
LRMKTMMAMSYPITA

SEQ ID NO: 239458 - protein, 15 aa, Artificial Sequence
  Description of Artificial Sequence: Synthetic peptide
  Seed: LRMKWMMAMKYPITA
LRMKTMMAMSYPLTA

SEQ ID NO: 239459 - protein, 15 aa, Artificial Sequence
  Description of Artificial Sequence: Synthetic peptide
  Seed: LRMKWMMAMKYPITA
LRMKTMMAMSYPMTA

SEQ ID NO: 239460 - protein, 15 aa, Artificial Sequence
  Description of Artificial Sequence: Synthetic peptide
  Seed: LRMKWMMAMKYPITA
LRMKTMMAMSYPVTA

SEQ ID NO: 239461 - protein, 15 aa, Artificial Sequence
  Description of Artificial Sequence: Synthetic peptide
  Seed: LRMKWMMAMKYPITA
LRMKTMMAMTYPVTA

SEQ ID NO: 239462 - protein, 15 aa, Artificial Sequence
  Description of Artificial Sequence: Synthetic peptide
  Seed: LRMKWMMAMKYPITA
LRMKTMMAMVYPATA

SEQ ID NO: 239463 - protein, 15 aa, Artificial Sequence
  Description of Artificial Sequence: Synthetic peptide
  Seed: LRMKWMMAMKYPITA
LRMKTMMEMAYPLTA

SEQ ID NO: 239464 - protein, 15 aa, Artificial Sequence
  Description of Artificial Sequence: Synthetic peptide
  Seed: LRMKWMMAMKYPITA
LRMKTMMFMRYPRTA

SEQ ID NO: 239465 - protein, 15 aa, Artificial Sequence
  Description of Artificial Sequence: Synthetic peptide
  Seed: LRMKWMMAMKYPITA
LRMKTMMFMRYPYTA

SEQ ID NO: 239466 - protein, 15 aa, Artificial Sequence
  Description of Artificial Sequence: Synthetic peptide
  Seed: LRMKWMMAMKYPITA
LRMKTMMGMAYPATA

SEQ ID NO: 239467 - protein, 15 aa, Artificial Sequence
  Description of Artificial Sequence: Synthetic peptide
  Seed: LRMKWMMAMKYPITA
LRMKTMMGMAYPITA

SEQ ID NO: 239468 - protein, 15 aa, Artificial Sequence
  Description of Artificial Sequence: Synthetic peptide
  Seed: LRMKWMMAMKYPITA
LRMKTMMGMAYPLTA

SEQ ID NO: 239469 - protein, 15 aa, Artificial Sequence
  Description of Artificial Sequence: Synthetic peptide
  Seed: LRMKWMMAMKYPITA
LRMKTMMGMAYPMTA

SEQ ID NO: 239470 - protein, 15 aa, Artificial Sequence
  Description of Artificial Sequence: Synthetic peptide
  Seed: LRMKWMMAMKYPITA
LRMKTMMGMAYPVTA

SEQ ID NO: 239471 - protein, 15 aa, Artificial Sequence
  Description of Artificial Sequence: Synthetic peptide
  Seed: LRMKWMMAMKYPITA
LRMKTMMHMKYPITA

SEQ ID NO: 239472 - protein, 15 aa, Artificial Sequence
  Description of Artificial Sequence: Synthetic peptide
  Seed: LRMKWMMAMKYPITA
LRMKTMMHMKYPLTA

SEQ ID NO: 239473 - protein, 15 aa, Artificial Sequence
  Description of Artificial Sequence: Synthetic peptide
  Seed: LRMKWMMAMKYPITA
LRMKTMMHMRYPFTA

SEQ ID NO: 239474 - protein, 15 aa, Artificial Sequence
  Description of Artificial Sequence: Synthetic peptide
  Seed: LRMKWMMAMKYPITA
LRMKTMMHMRYPITA

SEQ ID NO: 239475 - protein, 15 aa, Artificial Sequence
  Description of Artificial Sequence: Synthetic peptide
  Seed: LRMKWMMAMKYPITA
LRMKTMMHMRYPLTA

SEQ ID NO: 239476 - protein, 15 aa, Artificial Sequence
  Description of Artificial Sequence: Synthetic peptide
  Seed: LRMKWMMAMKYPITA
LRMKTMMHMRYPMTA

SEQ ID NO: 239477 - protein, 15 aa, Artificial Sequence
  Description of Artificial Sequence: Synthetic peptide
  Seed: LRMKWMMAMKYPITA
LRMKTMMHMRYPRTA

SEQ ID NO: 239478 - protein, 15 aa, Artificial Sequence
  Description of Artificial Sequence: Synthetic peptide
  Seed: LRMKWMMAMKYPITA
LRMKTMMHMRYPVTA

SEQ ID NO: 239479 - protein, 15 aa, Artificial Sequence
  Description of Artificial Sequence: Synthetic peptide
  Seed: LRMKWMMAMKYPITA
LRMKTMMHMRYPYTA

SEQ ID NO: 239480 - protein, 15 aa, Artificial Sequence
  Description of Artificial Sequence: Synthetic peptide
  Seed: LRMKWMMAMKYPITA
LRMKTMMIMAYPATA

SEQ ID NO: 239481 - protein, 15 aa, Artificial Sequence
  Description of Artificial Sequence: Synthetic peptide
  Seed: LRMKWMMAMKYPITA
LRMKTMMIMAYPLTA

SEQ ID NO: 239482 - protein, 15 aa, Artificial Sequence
  Description of Artificial Sequence: Synthetic peptide
  Seed: LRMKWMMAMKYPITA
LRMKTMMIMAYPMTA

SEQ ID NO: 239483 - protein, 15 aa, Artificial Sequence
  Description of Artificial Sequence: Synthetic peptide
  Seed: LRMKWMMAMKYPITA
LRMKTMMIMAYPTTA

SEQ ID NO: 239484 - protein, 15 aa, Artificial Sequence
  Description of Artificial Sequence: Synthetic peptide
  Seed: LRMKWMMAMKYPITA
LRMKTMMIMAYPVTA

SEQ ID NO: 239485 - protein, 15 aa, Artificial Sequence
  Description of Artificial Sequence: Synthetic peptide
  Seed: LRMKWMMAMKYPITA
LRMKTMMIMGYPATA

SEQ ID NO: 239486 - protein, 15 aa, Artificial Sequence
  Description of Artificial Sequence: Synthetic peptide
  Seed: LRMKWMMAMKYPITA
LRMKTMMIMGYPITA

SEQ ID NO: 239487 - protein, 15 aa, Artificial Sequence
  Description of Artificial Sequence: Synthetic peptide
  Seed: LRMKWMMAMKYPITA
LRMKTMMIMGYPLTA

SEQ ID NO: 239488 - protein, 15 aa, Artificial Sequence
  Description of Artificial Sequence: Synthetic peptide
  Seed: LRMKWMMAMKYPITA
LRMKTMMIMGYPMTA

SEQ ID NO: 239489 - protein, 15 aa, Artificial Sequence
  Description of Artificial Sequence: Synthetic peptide
  Seed: LRMKWMMAMKYPITA
LRMKTMMIMGYPTTA

SEQ ID NO: 239490 - protein, 15 aa, Artificial Sequence
  Description of Artificial Sequence: Synthetic peptide
  Seed: LRMKWMMAMKYPITA
LRMKTMMIMGYPVTA

SEQ ID NO: 239491 - protein, 15 aa, Artificial Sequence
  Description of Artificial Sequence: Synthetic peptide
  Seed: LRMKWMMAMKYPITA
LRMKTMMIMKYPATA

SEQ ID NO: 239492 - protein, 15 aa, Artificial Sequence
  Description of Artificial Sequence: Synthetic peptide
  Seed: LRMKWMMAMKYPITA
LRMKTMMIMKYPRTA

SEQ ID NO: 239493 - protein, 15 aa, Artificial Sequence
  Description of Artificial Sequence: Synthetic peptide
  Seed: LRMKWMMAMKYPITA
LRMKTMMIMKYPSTA

SEQ ID NO: 239494 - protein, 15 aa, Artificial Sequence
  Description of Artificial Sequence: Synthetic peptide
  Seed: LRMKWMMAMKYPITA
LRMKTMMIMNYPLTA

SEQ ID NO: 239495 - protein, 15 aa, Artificial Sequence
  Description of Artificial Sequence: Synthetic peptide
  Seed: LRMKWMMAMKYPITA
LRMKTMMIMNYPVTA

SEQ ID NO: 239496 - protein, 15 aa, Artificial Sequence
  Description of Artificial Sequence: Synthetic peptide
  Seed: LRMKWMMAMKYPITA
LRMKTMMIMPYPATA

SEQ ID NO: 239497 - protein, 15 aa, Artificial Sequence
  Description of Artificial Sequence: Synthetic peptide
  Seed: LRMKWMMAMKYPITA
LRMKTMMIMPYPITA

SEQ ID NO: 239498 - protein, 15 aa, Artificial Sequence
  Description of Artificial Sequence: Synthetic peptide
  Seed: LRMKWMMAMKYPITA
LRMKTMMIMPYPLTA

SEQ ID NO: 239499 - protein, 15 aa, Artificial Sequence
  Description of Artificial Sequence: Synthetic peptide
  Seed: LRMKWMMAMKYPITA
LRMKTMMIMPYPMTA

SEQ ID NO: 239500 - protein, 15 aa, Artificial Sequence
  Description of Artificial Sequence: Synthetic peptide
  Seed: LRMKWMMAMKYPITA
LRMKTMMIMPYPSTA

SEQ ID NO: 239501 - protein, 15 aa, Artificial Sequence
  Description of Artificial Sequence: Synthetic peptide
  Seed: LRMKWMMAMKYPITA
LRMKTMMIMPYPVTA

SEQ ID NO: 239502 - protein, 15 aa, Artificial Sequence
  Description of Artificial Sequence: Synthetic peptide
  Seed: LRMKWMMAMKYPITA
LRMKTMMIMRYPATA

SEQ ID NO: 239503 - protein, 15 aa, Artificial Sequence
  Description of Artificial Sequence: Synthetic peptide
  Seed: LRMKWMMAMKYPITA
LRMKTMMIMRYPFTA

SEQ ID NO: 239504 - protein, 15 aa, Artificial Sequence
  Description of Artificial Sequence: Synthetic peptide
  Seed: LRMKWMMAMKYPITA
LRMKTMMIMRYPGTA

SEQ ID NO: 239505 - protein, 15 aa, Artificial Sequence
  Description of Artificial Sequence: Synthetic peptide
  Seed: LRMKWMMAMKYPITA
LRMKTMMIMRYPHTA

SEQ ID NO: 239506 - protein, 15 aa, Artificial Sequence
  Description of Artificial Sequence: Synthetic peptide
  Seed: LRMKWMMAMKYPITA
LRMKTMMIMRYPITA

SEQ ID NO: 239507 - protein, 15 aa, Artificial Sequence
  Description of Artificial Sequence: Synthetic peptide
  Seed: LRMKWMMAMKYPITA
LRMKTMMIMRYPKTA

SEQ ID NO: 239508 - protein, 15 aa, Artificial Sequence
  Description of Artificial Sequence: Synthetic peptide
  Seed: LRMKWMMAMKYPITA
LRMKTMMIMRYPLTA

SEQ ID NO: 239509 - protein, 15 aa, Artificial Sequence
  Description of Artificial Sequence: Synthetic peptide
  Seed: LRMKWMMAMKYPITA
LRMKTMMIMRYPMTA

SEQ ID NO: 239510 - protein, 15 aa, Artificial Sequence
  Description of Artificial Sequence: Synthetic peptide
  Seed: LRMKWMMAMKYPITA
LRMKTMMIMRYPQTA

SEQ ID NO: 239511 - protein, 15 aa, Artificial Sequence
  Description of Artificial Sequence: Synthetic peptide
  Seed: LRMKWMMAMKYPITA
LRMKTMMIMRYPRTA

SEQ ID NO: 239512 - protein, 15 aa, Artificial Sequence
  Description of Artificial Sequence: Synthetic peptide
  Seed: LRMKWMMAMKYPITA
LRMKTMMIMRYPSTA

SEQ ID NO: 239513 - protein, 15 aa, Artificial Sequence
  Description of Artificial Sequence: Synthetic peptide
  Seed: LRMKWMMAMKYPITA
LRMKTMMIMRYPTTA

SEQ ID NO: 239514 - protein, 15 aa, Artificial Sequence
  Description of Artificial Sequence: Synthetic peptide
  Seed: LRMKWMMAMKYPITA
LRMKTMMIMRYPVTA

SEQ ID NO: 239515 - protein, 15 aa, Artificial Sequence
  Description of Artificial Sequence: Synthetic peptide
  Seed: LRMKWMMAMKYPITA
LRMKTMMIMRYPYTA

SEQ ID NO: 239516 - protein, 15 aa, Artificial Sequence
  Description of Artificial Sequence: Synthetic peptide
  Seed: LRMKWMMAMKYPITA
LRMKTMMIMSYPITA

SEQ ID NO: 239517 - protein, 15 aa, Artificial Sequence
  Description of Artificial Sequence: Synthetic peptide
  Seed: LRMKWMMAMKYPITA
LRMKTMMIMSYPLTA

SEQ ID NO: 239518 - protein, 15 aa, Artificial Sequence
  Description of Artificial Sequence: Synthetic peptide
  Seed: LRMKWMMAMKYPITA
LRMKTMMIMSYPMTA

SEQ ID NO: 239519 - protein, 15 aa, Artificial Sequence
  Description of Artificial Sequence: Synthetic peptide
  Seed: LRMKWMMAMKYPITA
LRMKTMMIMSYPSTA

SEQ ID NO: 239520 - protein, 15 aa, Artificial Sequence
  Description of Artificial Sequence: Synthetic peptide
  Seed: LRMKWMMAMKYPITA
LRMKTMMIMSYPVTA

SEQ ID NO: 239521 - protein, 15 aa, Artificial Sequence
  Description of Artificial Sequence: Synthetic peptide
  Seed: LRMKWMMAMKYPITA
LRMKTMMLMAYPATA

SEQ ID NO: 239522 - protein, 15 aa, Artificial Sequence
  Description of Artificial Sequence: Synthetic peptide
  Seed: LRMKWMMAMKYPITA
LRMKTMMLMAYPCTA

SEQ ID NO: 239523 - protein, 15 aa, Artificial Sequence
  Description of Artificial Sequence: Synthetic peptide
  Seed: LRMKWMMAMKYPITA
LRMKTMMLMAYPGTA

SEQ ID NO: 239524 - protein, 15 aa, Artificial Sequence
  Description of Artificial Sequence: Synthetic peptide
  Seed: LRMKWMMAMKYPITA
LRMKTMMLMAYPITA

SEQ ID NO: 239525 - protein, 15 aa, Artificial Sequence
  Description of Artificial Sequence: Synthetic peptide
  Seed: LRMKWMMAMKYPITA
LRMKTMMLMAYPLTA

SEQ ID NO: 239526 - protein, 15 aa, Artificial Sequence
  Description of Artificial Sequence: Synthetic peptide
  Seed: LRMKWMMAMKYPITA
LRMKTMMLMAYPMTA

SEQ ID NO: 239527 - protein, 15 aa, Artificial Sequence
  Description of Artificial Sequence: Synthetic peptide
  Seed: LRMKWMMAMKYPITA
LRMKTMMLMAYPSTA

SEQ ID NO: 239528 - protein, 15 aa, Artificial Sequence
  Description of Artificial Sequence: Synthetic peptide
  Seed: LRMKWMMAMKYPITA
LRMKTMMLMAYPTTA

SEQ ID NO: 239529 - protein, 15 aa, Artificial Sequence
  Description of Artificial Sequence: Synthetic peptide
  Seed: LRMKWMMAMKYPITA
LRMKTMMLMAYPVTA

SEQ ID NO: 239530 - protein, 15 aa, Artificial Sequence
  Description of Artificial Sequence: Synthetic peptide
  Seed: LRMKWMMAMKYPITA
LRMKTMMLMGYPATA

SEQ ID NO: 239531 - protein, 15 aa, Artificial Sequence
  Description of Artificial Sequence: Synthetic peptide
  Seed: LRMKWMMAMKYPITA
LRMKTMMLMGYPITA

SEQ ID NO: 239532 - protein, 15 aa, Artificial Sequence
  Description of Artificial Sequence: Synthetic peptide
  Seed: LRMKWMMAMKYPITA
LRMKTMMLMGYPLTA

SEQ ID NO: 239533 - protein, 15 aa, Artificial Sequence
  Description of Artificial Sequence: Synthetic peptide
  Seed: LRMKWMMAMKYPITA
LRMKTMMLMGYPMTA

SEQ ID NO: 239534 - protein, 15 aa, Artificial Sequence
  Description of Artificial Sequence: Synthetic peptide
  Seed: LRMKWMMAMKYPITA
LRMKTMMLMGYPSTA

SEQ ID NO: 239535 - protein, 15 aa, Artificial Sequence
  Description of Artificial Sequence: Synthetic peptide
  Seed: LRMKWMMAMKYPITA
LRMKTMMLMGYPTTA

SEQ ID NO: 239536 - protein, 15 aa, Artificial Sequence
  Description of Artificial Sequence: Synthetic peptide
  Seed: LRMKWMMAMKYPITA
LRMKTMMLMGYPVTA

SEQ ID NO: 239537 - protein, 15 aa, Artificial Sequence
  Description of Artificial Sequence: Synthetic peptide
  Seed: LRMKWMMAMKYPITA
LRMKTMMLMKYPATA

SEQ ID NO: 239538 - protein, 15 aa, Artificial Sequence
  Description of Artificial Sequence: Synthetic peptide
  Seed: LRMKWMMAMKYPITA
LRMKTMMLMKYPKTA

SEQ ID NO: 239539 - protein, 15 aa, Artificial Sequence
  Description of Artificial Sequence: Synthetic peptide
  Seed: LRMKWMMAMKYPITA
LRMKTMMLMKYPRTA

SEQ ID NO: 239540 - protein, 15 aa, Artificial Sequence
  Description of Artificial Sequence: Synthetic peptide
  Seed: LRMKWMMAMKYPITA
LRMKTMMLMKYPSTA

SEQ ID NO: 239541 - protein, 15 aa, Artificial Sequence
  Description of Artificial Sequence: Synthetic peptide
  Seed: LRMKWMMAMKYPITA
LRMKTMMLMNYPATA

SEQ ID NO: 239542 - protein, 15 aa, Artificial Sequence
  Description of Artificial Sequence: Synthetic peptide
  Seed: LRMKWMMAMKYPITA
LRMKTMMLMNYPITA

SEQ ID NO: 239543 - protein, 15 aa, Artificial Sequence
  Description of Artificial Sequence: Synthetic peptide
  Seed: LRMKWMMAMKYPITA
LRMKTMMLMNYPLTA

SEQ ID NO: 239544 - protein, 15 aa, Artificial Sequence
  Description of Artificial Sequence: Synthetic peptide
  Seed: LRMKWMMAMKYPITA
LRMKTMMLMNYPVTA

SEQ ID NO: 239545 - protein, 15 aa, Artificial Sequence
  Description of Artificial Sequence: Synthetic peptide
  Seed: LRMKWMMAMKYPITA
LRMKTMMLMPYPATA

SEQ ID NO: 239546 - protein, 15 aa, Artificial Sequence
  Description of Artificial Sequence: Synthetic peptide
  Seed: LRMKWMMAMKYPITA
LRMKTMMLMPYPITA

SEQ ID NO: 239547 - protein, 15 aa, Artificial Sequence
  Description of Artificial Sequence: Synthetic peptide
  Seed: LRMKWMMAMKYPITA
LRMKTMMLMPYPLTA

SEQ ID NO: 239548 - protein, 15 aa, Artificial Sequence
  Description of Artificial Sequence: Synthetic peptide
  Seed: LRMKWMMAMKYPITA
LRMKTMMLMPYPMTA

SEQ ID NO: 239549 - protein, 15 aa, Artificial Sequence
  Description of Artificial Sequence: Synthetic peptide
  Seed: LRMKWMMAMKYPITA
LRMKTMMLMPYPSTA

SEQ ID NO: 239550 - protein, 15 aa, Artificial Sequence
  Description of Artificial Sequence: Synthetic peptide
  Seed: LRMKWMMAMKYPITA
LRMKTMMLMPYPVTA

SEQ ID NO: 239551 - protein, 15 aa, Artificial Sequence
  Description of Artificial Sequence: Synthetic peptide
  Seed: LRMKWMMAMKYPITA
LRMKTMMLMRYPATA

SEQ ID NO: 239552 - protein, 15 aa, Artificial Sequence
  Description of Artificial Sequence: Synthetic peptide
  Seed: LRMKWMMAMKYPITA
LRMKTMMLMRYPGTA

SEQ ID NO: 239553 - protein, 15 aa, Artificial Sequence
  Description of Artificial Sequence: Synthetic peptide
  Seed: LRMKWMMAMKYPITA
LRMKTMMLMRYPHTA

SEQ ID NO: 239554 - protein, 15 aa, Artificial Sequence
  Description of Artificial Sequence: Synthetic peptide
  Seed: LRMKWMMAMKYPITA
LRMKTMMLMRYPKTA

SEQ ID NO: 239555 - protein, 15 aa, Artificial Sequence
  Description of Artificial Sequence: Synthetic peptide
  Seed: LRMKWMMAMKYPITA
LRMKTMMLMRYPMTA

SEQ ID NO: 239556 - protein, 15 aa, Artificial Sequence
  Description of Artificial Sequence: Synthetic peptide
  Seed: LRMKWMMAMKYPITA
LRMKTMMLMRYPQTA

SEQ ID NO: 239557 - protein, 15 aa, Artificial Sequence
  Description of Artificial Sequence: Synthetic peptide
  Seed: LRMKWMMAMKYPITA
LRMKTMMLMRYPRTA

SEQ ID NO: 239558 - protein, 15 aa, Artificial Sequence
  Description of Artificial Sequence: Synthetic peptide
  Seed: LRMKWMMAMKYPITA
LRMKTMMLMRYPSTA

SEQ ID NO: 239559 - protein, 15 aa, Artificial Sequence
  Description of Artificial Sequence: Synthetic peptide
  Seed: LRMKWMMAMKYPITA
LRMKTMMLMRYPTTA

SEQ ID NO: 239560 - protein, 15 aa, Artificial Sequence
  Description of Artificial Sequence: Synthetic peptide
  Seed: LRMKWMMAMKYPITA
LRMKTMMLMRYPVTA

SEQ ID NO: 239561 - protein, 15 aa, Artificial Sequence
  Description of Artificial Sequence: Synthetic peptide
  Seed: LRMKWMMAMKYPITA
LRMKTMMLMSYPATA

SEQ ID NO: 239562 - protein, 15 aa, Artificial Sequence
  Description of Artificial Sequence: Synthetic peptide
  Seed: LRMKWMMAMKYPITA
LRMKTMMLMSYPITA

SEQ ID NO: 239563 - protein, 15 aa, Artificial Sequence
  Description of Artificial Sequence: Synthetic peptide
  Seed: LRMKWMMAMKYPITA
LRMKTMMLMSYPLTA

SEQ ID NO: 239564 - protein, 15 aa, Artificial Sequence
  Description of Artificial Sequence: Synthetic peptide
  Seed: LRMKWMMAMKYPITA
LRMKTMMLMSYPMTA

SEQ ID NO: 239565 - protein, 15 aa, Artificial Sequence
  Description of Artificial Sequence: Synthetic peptide
  Seed: LRMKWMMAMKYPITA
LRMKTMMLMSYPSTA

SEQ ID NO: 239566 - protein, 15 aa, Artificial Sequence
  Description of Artificial Sequence: Synthetic peptide
  Seed: LRMKWMMAMKYPITA
LRMKTMMLMSYPTTA

SEQ ID NO: 239567 - protein, 15 aa, Artificial Sequence
  Description of Artificial Sequence: Synthetic peptide
  Seed: LRMKWMMAMKYPITA
LRMKTMMLMSYPVTA

SEQ ID NO: 239568 - protein, 15 aa, Artificial Sequence
  Description of Artificial Sequence: Synthetic peptide
  Seed: LRMKWMMAMKYPITA
LRMKTMMLMTYPATA

SEQ ID NO: 239569 - protein, 15 aa, Artificial Sequence
  Description of Artificial Sequence: Synthetic peptide
  Seed: LRMKWMMAMKYPITA
LRMKTMMLMTYPITA

SEQ ID NO: 239570 - protein, 15 aa, Artificial Sequence
  Description of Artificial Sequence: Synthetic peptide
  Seed: LRMKWMMAMKYPITA
LRMKTMMLMTYPLTA

SEQ ID NO: 239571 - protein, 15 aa, Artificial Sequence
  Description of Artificial Sequence: Synthetic peptide
  Seed: LRMKWMMAMKYPITA
LRMKTMMLMTYPMTA

SEQ ID NO: 239572 - protein, 15 aa, Artificial Sequence
  Description of Artificial Sequence: Synthetic peptide
  Seed: LRMKWMMAMKYPITA
LRMKTMMLMTYPSTA

SEQ ID NO: 239573 - protein, 15 aa, Artificial Sequence
  Description of Artificial Sequence: Synthetic peptide
  Seed: LRMKWMMAMKYPITA
LRMKTMMLMTYPVTA

SEQ ID NO: 239574 - protein, 15 aa, Artificial Sequence
  Description of Artificial Sequence: Synthetic peptide
  Seed: LRMKWMMAMKYPITA
LRMKTMMLMVYPITA

SEQ ID NO: 239575 - protein, 15 aa, Artificial Sequence
  Description of Artificial Sequence: Synthetic peptide
  Seed: LRMKWMMAMKYPITA
LRMKTMMLMVYPLTA

SEQ ID NO: 239576 - protein, 15 aa, Artificial Sequence
  Description of Artificial Sequence: Synthetic peptide
  Seed: LRMKWMMAMKYPITA
LRMKTMMLMVYPVTA

SEQ ID NO: 239577 - protein, 15 aa, Artificial Sequence
  Description of Artificial Sequence: Synthetic peptide
  Seed: LRMKWMMAMKYPITA
LRMKTMMMMAYPATA

SEQ ID NO: 239578 - protein, 15 aa, Artificial Sequence
  Description of Artificial Sequence: Synthetic peptide
  Seed: LRMKWMMAMKYPITA
LRMKTMMMMAYPCTA

SEQ ID NO: 239579 - protein, 15 aa, Artificial Sequence
  Description of Artificial Sequence: Synthetic peptide
  Seed: LRMKWMMAMKYPITA
LRMKTMMMMAYPITA

SEQ ID NO: 239580 - protein, 15 aa, Artificial Sequence
  Description of Artificial Sequence: Synthetic peptide
  Seed: LRMKWMMAMKYPITA
LRMKTMMMMAYPLTA

SEQ ID NO: 239581 - protein, 15 aa, Artificial Sequence
  Description of Artificial Sequence: Synthetic peptide
  Seed: LRMKWMMAMKYPITA
LRMKTMMMMAYPMTA

SEQ ID NO: 239582 - protein, 15 aa, Artificial Sequence
  Description of Artificial Sequence: Synthetic peptide
  Seed: LRMKWMMAMKYPITA
LRMKTMMMMAYPSTA

SEQ ID NO: 239583 - protein, 15 aa, Artificial Sequence
  Description of Artificial Sequence: Synthetic peptide
  Seed: LRMKWMMAMKYPITA
LRMKTMMMMAYPTTA

SEQ ID NO: 239584 - protein, 15 aa, Artificial Sequence
  Description of Artificial Sequence: Synthetic peptide
  Seed: LRMKWMMAMKYPITA
LRMKTMMMMAYPVTA

SEQ ID NO: 239585 - protein, 15 aa, Artificial Sequence
  Description of Artificial Sequence: Synthetic peptide
  Seed: LRMKWMMAMKYPITA
LRMKTMMMMGYPATA

SEQ ID NO: 239586 - protein, 15 aa, Artificial Sequence
  Description of Artificial Sequence: Synthetic peptide
  Seed: LRMKWMMAMKYPITA
LRMKTMMMMGYPITA

SEQ ID NO: 239587 - protein, 15 aa, Artificial Sequence
  Description of Artificial Sequence: Synthetic peptide
  Seed: LRMKWMMAMKYPITA
LRMKTMMMMGYPLTA

SEQ ID NO: 239588 - protein, 15 aa, Artificial Sequence
  Description of Artificial Sequence: Synthetic peptide
  Seed: LRMKWMMAMKYPITA
LRMKTMMMMGYPMTA

SEQ ID NO: 239589 - protein, 15 aa, Artificial Sequence
  Description of Artificial Sequence: Synthetic peptide
  Seed: LRMKWMMAMKYPITA
LRMKTMMMMGYPSTA

SEQ ID NO: 239590 - protein, 15 aa, Artificial Sequence
  Description of Artificial Sequence: Synthetic peptide
  Seed: LRMKWMMAMKYPITA
LRMKTMMMMGYPTTA

SEQ ID NO: 239591 - protein, 15 aa, Artificial Sequence
  Description of Artificial Sequence: Synthetic peptide
  Seed: LRMKWMMAMKYPITA
LRMKTMMMMGYPVTA

SEQ ID NO: 239592 - protein, 15 aa, Artificial Sequence
  Description of Artificial Sequence: Synthetic peptide
  Seed: LRMKWMMAMKYPITA
LRMKTMMMMKYPATA

SEQ ID NO: 239593 - protein, 15 aa, Artificial Sequence
  Description of Artificial Sequence: Synthetic peptide
  Seed: LRMKWMMAMKYPITA
LRMKTMMMMKYPKTA

SEQ ID NO: 239594 - protein, 15 aa, Artificial Sequence
  Description of Artificial Sequence: Synthetic peptide
  Seed: LRMKWMMAMKYPITA
LRMKTMMMMKYPRTA

SEQ ID NO: 239595 - protein, 15 aa, Artificial Sequence
  Description of Artificial Sequence: Synthetic peptide
  Seed: LRMKWMMAMKYPITA
LRMKTMMMMKYPSTA

SEQ ID NO: 239596 - protein, 15 aa, Artificial Sequence
  Description of Artificial Sequence: Synthetic peptide
  Seed: LRMKWMMAMKYPITA
LRMKTMMMMKYPVTA

SEQ ID NO: 239597 - protein, 15 aa, Artificial Sequence
  Description of Artificial Sequence: Synthetic peptide
  Seed: LRMKWMMAMKYPITA
LRMKTMMMMNYPITA

SEQ ID NO: 239598 - protein, 15 aa, Artificial Sequence
  Description of Artificial Sequence: Synthetic peptide
  Seed: LRMKWMMAMKYPITA
LRMKTMMMMNYPLTA

SEQ ID NO: 239599 - protein, 15 aa, Artificial Sequence
  Description of Artificial Sequence: Synthetic peptide
  Seed: LRMKWMMAMKYPITA
LRMKTMMMMNYPMTA

SEQ ID NO: 239600 - protein, 15 aa, Artificial Sequence
  Description of Artificial Sequence: Synthetic peptide
  Seed: LRMKWMMAMKYPITA
LRMKTMMMMNYPVTA

SEQ ID NO: 239601 - protein, 15 aa, Artificial Sequence
  Description of Artificial Sequence: Synthetic peptide
  Seed: LRMKWMMAMKYPITA
LRMKTMMMMPYPATA

SEQ ID NO: 239602 - protein, 15 aa, Artificial Sequence
  Description of Artificial Sequence: Synthetic peptide
  Seed: LRMKWMMAMKYPITA
LRMKTMMMMPYPITA

SEQ ID NO: 239603 - protein, 15 aa, Artificial Sequence
  Description of Artificial Sequence: Synthetic peptide
  Seed: LRMKWMMAMKYPITA
LRMKTMMMMPYPLTA

SEQ ID NO: 239604 - protein, 15 aa, Artificial Sequence
  Description of Artificial Sequence: Synthetic peptide
  Seed: LRMKWMMAMKYPITA
LRMKTMMMMPYPMTA

SEQ ID NO: 239605 - protein, 15 aa, Artificial Sequence
  Description of Artificial Sequence: Synthetic peptide
  Seed: LRMKWMMAMKYPITA
LRMKTMMMMPYPSTA

SEQ ID NO: 239606 - protein, 15 aa, Artificial Sequence
  Description of Artificial Sequence: Synthetic peptide
  Seed: LRMKWMMAMKYPITA
LRMKTMMMMPYPVTA

SEQ ID NO: 239607 - protein, 15 aa, Artificial Sequence
  Description of Artificial Sequence: Synthetic peptide
  Seed: LRMKWMMAMKYPITA
LRMKTMMMMRYPATA

SEQ ID NO: 239608 - protein, 15 aa, Artificial Sequence
  Description of Artificial Sequence: Synthetic peptide
  Seed: LRMKWMMAMKYPITA
LRMKTMMMMRYPGTA

SEQ ID NO: 239609 - protein, 15 aa, Artificial Sequence
  Description of Artificial Sequence: Synthetic peptide
  Seed: LRMKWMMAMKYPITA
LRMKTMMMMRYPHTA

SEQ ID NO: 239610 - protein, 15 aa, Artificial Sequence
  Description of Artificial Sequence: Synthetic peptide
  Seed: LRMKWMMAMKYPITA
LRMKTMMMMRYPITA

SEQ ID NO: 239611 - protein, 15 aa, Artificial Sequence
  Description of Artificial Sequence: Synthetic peptide
  Seed: LRMKWMMAMKYPITA
LRMKTMMMMRYPKTA

SEQ ID NO: 239612 - protein, 15 aa, Artificial Sequence
  Description of Artificial Sequence: Synthetic peptide
  Seed: LRMKWMMAMKYPITA
LRMKTMMMMRYPLTA

SEQ ID NO: 239613 - protein, 15 aa, Artificial Sequence
  Description of Artificial Sequence: Synthetic peptide
  Seed: LRMKWMMAMKYPITA
LRMKTMMMMRYPMTA

SEQ ID NO: 239614 - protein, 15 aa, Artificial Sequence
  Description of Artificial Sequence: Synthetic peptide
  Seed: LRMKWMMAMKYPITA
LRMKTMMMMRYPQTA

SEQ ID NO: 239615 - protein, 15 aa, Artificial Sequence
  Description of Artificial Sequence: Synthetic peptide
  Seed: LRMKWMMAMKYPITA
LRMKTMMMMRYPRTA

SEQ ID NO: 239616 - protein, 15 aa, Artificial Sequence
  Description of Artificial Sequence: Synthetic peptide
  Seed: LRMKWMMAMKYPITA
LRMKTMMMMRYPSTA

SEQ ID NO: 239617 - protein, 15 aa, Artificial Sequence
  Description of Artificial Sequence: Synthetic peptide
  Seed: LRMKWMMAMKYPITA
LRMKTMMMMRYPTTA

SEQ ID NO: 239618 - protein, 15 aa, Artificial Sequence
  Description of Artificial Sequence: Synthetic peptide
  Seed: LRMKWMMAMKYPITA
LRMKTMMMMRYPVTA

SEQ ID NO: 239619 - protein, 15 aa, Artificial Sequence
  Description of Artificial Sequence: Synthetic peptide
  Seed: LRMKWMMAMKYPITA
LRMKTMMMMRYPYTA

SEQ ID NO: 239620 - protein, 15 aa, Artificial Sequence
  Description of Artificial Sequence: Synthetic peptide
  Seed: LRMKWMMAMKYPITA
LRMKTMMMMSYPATA

SEQ ID NO: 239621 - protein, 15 aa, Artificial Sequence
  Description of Artificial Sequence: Synthetic peptide
  Seed: LRMKWMMAMKYPITA
LRMKTMMMMSYPITA

SEQ ID NO: 239622 - protein, 15 aa, Artificial Sequence
  Description of Artificial Sequence: Synthetic peptide
  Seed: LRMKWMMAMKYPITA
LRMKTMMMMSYPLTA

SEQ ID NO: 239623 - protein, 15 aa, Artificial Sequence
  Description of Artificial Sequence: Synthetic peptide
  Seed: LRMKWMMAMKYPITA
LRMKTMMMMSYPMTA

SEQ ID NO: 239624 - protein, 15 aa, Artificial Sequence
  Description of Artificial Sequence: Synthetic peptide
  Seed: LRMKWMMAMKYPITA
LRMKTMMMMSYPSTA

SEQ ID NO: 239625 - protein, 15 aa, Artificial Sequence
  Description of Artificial Sequence: Synthetic peptide
  Seed: LRMKWMMAMKYPITA
LRMKTMMMMSYPTTA

SEQ ID NO: 239626 - protein, 15 aa, Artificial Sequence
  Description of Artificial Sequence: Synthetic peptide
  Seed: LRMKWMMAMKYPITA
LRMKTMMMMSYPVTA

SEQ ID NO: 239627 - protein, 15 aa, Artificial Sequence
  Description of Artificial Sequence: Synthetic peptide
  Seed: LRMKWMMAMKYPITA
LRMKTMMMMTYPATA

SEQ ID NO: 239628 - protein, 15 aa, Artificial Sequence
  Description of Artificial Sequence: Synthetic peptide
  Seed: LRMKWMMAMKYPITA
LRMKTMMMMTYPLTA

SEQ ID NO: 239629 - protein, 15 aa, Artificial Sequence
  Description of Artificial Sequence: Synthetic peptide
  Seed: LRMKWMMAMKYPITA
LRMKTMMMMTYPMTA

SEQ ID NO: 239630 - protein, 15 aa, Artificial Sequence
  Description of Artificial Sequence: Synthetic peptide
  Seed: LRMKWMMAMKYPITA
LRMKTMMMMTYPVTA

SEQ ID NO: 239631 - protein, 15 aa, Artificial Sequence
  Description of Artificial Sequence: Synthetic peptide
  Seed: LRMKWMMAMKYPITA
LRMKTMMMMVYPMTA

SEQ ID NO: 239632 - protein, 15 aa, Artificial Sequence
  Description of Artificial Sequence: Synthetic peptide
  Seed: LRMKWMMAMKYPITA
LRMKTMMNMAYPFTA

SEQ ID NO: 239633 - protein, 15 aa, Artificial Sequence
  Description of Artificial Sequence: Synthetic peptide
  Seed: LRMKWMMAMKYPITA
LRMKTMMNMAYPITA

SEQ ID NO: 239634 - protein, 15 aa, Artificial Sequence
  Description of Artificial Sequence: Synthetic peptide
  Seed: LRMKWMMAMKYPITA
LRMKTMMNMAYPLTA

SEQ ID NO: 239635 - protein, 15 aa, Artificial Sequence
  Description of Artificial Sequence: Synthetic peptide
  Seed: LRMKWMMAMKYPITA
LRMKTMMNMAYPVTA

SEQ ID NO: 239636 - protein, 15 aa, Artificial Sequence
  Description of Artificial Sequence: Synthetic peptide
  Seed: LRMKWMMAMKYPITA
LRMKTMMNMGYPITA

SEQ ID NO: 239637 - protein, 15 aa, Artificial Sequence
  Description of Artificial Sequence: Synthetic peptide
  Seed: LRMKWMMAMKYPITA
LRMKTMMNMIYPITA

SEQ ID NO: 239638 - protein, 15 aa, Artificial Sequence
  Description of Artificial Sequence: Synthetic peptide
  Seed: LRMKWMMAMKYPITA
LRMKTMMNMNYPITA

SEQ ID NO: 239639 - protein, 15 aa, Artificial Sequence
  Description of Artificial Sequence: Synthetic peptide
  Seed: LRMKWMMAMKYPITA
LRMKTMMNMNYPLTA

SEQ ID NO: 239640 - protein, 15 aa, Artificial Sequence
  Description of Artificial Sequence: Synthetic peptide
  Seed: LRMKWMMAMKYPITA
LRMKTMMNMNYPVTA

SEQ ID NO: 239641 - protein, 15 aa, Artificial Sequence
  Description of Artificial Sequence: Synthetic peptide
  Seed: LRMKWMMAMKYPITA
LRMKTMMNMPYPITA

SEQ ID NO: 239642 - protein, 15 aa, Artificial Sequence
  Description of Artificial Sequence: Synthetic peptide
  Seed: LRMKWMMAMKYPITA
LRMKTMMNMRYPRTA

SEQ ID NO: 239643 - protein, 15 aa, Artificial Sequence
  Description of Artificial Sequence: Synthetic peptide
  Seed: LRMKWMMAMKYPITA
LRMKTMMNMRYPYTA

SEQ ID NO: 239644 - protein, 15 aa, Artificial Sequence
  Description of Artificial Sequence: Synthetic peptide
  Seed: LRMKWMMAMKYPITA
LRMKTMMNMSYPITA

SEQ ID NO: 239645 - protein, 15 aa, Artificial Sequence
  Description of Artificial Sequence: Synthetic peptide
  Seed: LRMKWMMAMKYPITA
LRMKTMMNMSYPVTA

SEQ ID NO: 239646 - protein, 15 aa, Artificial Sequence
  Description of Artificial Sequence: Synthetic peptide
  Seed: LRMKWMMAMKYPITA
LRMKTMMNMTYPITA

SEQ ID NO: 239647 - protein, 15 aa, Artificial Sequence
  Description of Artificial Sequence: Synthetic peptide
  Seed: LRMKWMMAMKYPITA
LRMKTMMNMVYPITA

SEQ ID NO: 239648 - protein, 15 aa, Artificial Sequence
  Description of Artificial Sequence: Synthetic peptide
  Seed: LRMKWMMAMKYPITA
LRMKTMMQMAYPATA

SEQ ID NO: 239649 - protein, 15 aa, Artificial Sequence
  Description of Artificial Sequence: Synthetic peptide
  Seed: LRMKWMMAMKYPITA
LRMKTMMQMAYPITA

SEQ ID NO: 239650 - protein, 15 aa, Artificial Sequence
  Description of Artificial Sequence: Synthetic peptide
  Seed: LRMKWMMAMKYPITA
LRMKTMMQMAYPLTA

SEQ ID NO: 239651 - protein, 15 aa, Artificial Sequence
  Description of Artificial Sequence: Synthetic peptide
  Seed: LRMKWMMAMKYPITA
LRMKTMMQMAYPMTA

SEQ ID NO: 239652 - protein, 15 aa, Artificial Sequence
  Description of Artificial Sequence: Synthetic peptide
  Seed: LRMKWMMAMKYPITA
LRMKTMMQMAYPVTA

SEQ ID NO: 239653 - protein, 15 aa, Artificial Sequence
  Description of Artificial Sequence: Synthetic peptide
  Seed: LRMKWMMAMKYPITA
LRMKTMMQMGYPITA

SEQ ID NO: 239654 - protein, 15 aa, Artificial Sequence
  Description of Artificial Sequence: Synthetic peptide
  Seed: LRMKWMMAMKYPITA
LRMKTMMQMGYPLTA

SEQ ID NO: 239655 - protein, 15 aa, Artificial Sequence
  Description of Artificial Sequence: Synthetic peptide
  Seed: LRMKWMMAMKYPITA
LRMKTMMQMGYPVTA

SEQ ID NO: 239656 - protein, 15 aa, Artificial Sequence
  Description of Artificial Sequence: Synthetic peptide
  Seed: LRMKWMMAMKYPITA
LRMKTMMQMSYPLTA

SEQ ID NO: 239657 - protein, 15 aa, Artificial Sequence
  Description of Artificial Sequence: Synthetic peptide
  Seed: LRMKWMMAMKYPITA
LRMKTMMQMSYPVTA

SEQ ID NO: 239658 - protein, 15 aa, Artificial Sequence
  Description of Artificial Sequence: Synthetic peptide
  Seed: LRMKWMMAMKYPITA
LRMKTMMSMAYPATA

SEQ ID NO: 239659 - protein, 15 aa, Artificial Sequence
  Description of Artificial Sequence: Synthetic peptide
  Seed: LRMKWMMAMKYPITA
LRMKTMMSMAYPFTA

SEQ ID NO: 239660 - protein, 15 aa, Artificial Sequence
  Description of Artificial Sequence: Synthetic peptide
  Seed: LRMKWMMAMKYPITA
LRMKTMMSMAYPITA

SEQ ID NO: 239661 - protein, 15 aa, Artificial Sequence
  Description of Artificial Sequence: Synthetic peptide
  Seed: LRMKWMMAMKYPITA
LRMKTMMSMAYPLTA

SEQ ID NO: 239662 - protein, 15 aa, Artificial Sequence
  Description of Artificial Sequence: Synthetic peptide
  Seed: LRMKWMMAMKYPITA
LRMKTMMSMAYPMTA

SEQ ID NO: 239663 - protein, 15 aa, Artificial Sequence
  Description of Artificial Sequence: Synthetic peptide
  Seed: LRMKWMMAMKYPITA
LRMKTMMSMAYPSTA

SEQ ID NO: 239664 - protein, 15 aa, Artificial Sequence
  Description of Artificial Sequence: Synthetic peptide
  Seed: LRMKWMMAMKYPITA
LRMKTMMSMAYPTTA

SEQ ID NO: 239665 - protein, 15 aa, Artificial Sequence
  Description of Artificial Sequence: Synthetic peptide
  Seed: LRMKWMMAMKYPITA
LRMKTMMSMAYPVTA

SEQ ID NO: 239666 - protein, 15 aa, Artificial Sequence
  Description of Artificial Sequence: Synthetic peptide
  Seed: LRMKWMMAMKYPITA
LRMKTMMSMGYPITA

SEQ ID NO: 239667 - protein, 15 aa, Artificial Sequence
  Description of Artificial Sequence: Synthetic peptide
  Seed: LRMKWMMAMKYPITA
LRMKTMMSMGYPLTA

SEQ ID NO: 239668 - protein, 15 aa, Artificial Sequence
  Description of Artificial Sequence: Synthetic peptide
  Seed: LRMKWMMAMKYPITA
LRMKTMMSMGYPMTA

SEQ ID NO: 239669 - protein, 15 aa, Artificial Sequence
  Description of Artificial Sequence: Synthetic peptide
  Seed: LRMKWMMAMKYPITA
LRMKTMMSMGYPVTA

SEQ ID NO: 239670 - protein, 15 aa, Artificial Sequence
  Description of Artificial Sequence: Synthetic peptide
  Seed: LRMKWMMAMKYPITA
LRMKTMMSMIYPATA

SEQ ID NO: 239671 - protein, 15 aa, Artificial Sequence
  Description of Artificial Sequence: Synthetic peptide
  Seed: LRMKWMMAMKYPITA
LRMKTMMSMKYPRTA

SEQ ID NO: 239672 - protein, 15 aa, Artificial Sequence
  Description of Artificial Sequence: Synthetic peptide
  Seed: LRMKWMMAMKYPITA
LRMKTMMSMKYPYTA

SEQ ID NO: 239673 - protein, 15 aa, Artificial Sequence
  Description of Artificial Sequence: Synthetic peptide
  Seed: LRMKWMMAMKYPITA
LRMKTMMSMPYPATA

SEQ ID NO: 239674 - protein, 15 aa, Artificial Sequence
  Description of Artificial Sequence: Synthetic peptide
  Seed: LRMKWMMAMKYPITA
LRMKTMMSMPYPITA

SEQ ID NO: 239675 - protein, 15 aa, Artificial Sequence
  Description of Artificial Sequence: Synthetic peptide
  Seed: LRMKWMMAMKYPITA
LRMKTMMSMPYPLTA

SEQ ID NO: 239676 - protein, 15 aa, Artificial Sequence
  Description of Artificial Sequence: Synthetic peptide
  Seed: LRMKWMMAMKYPITA
LRMKTMMSMPYPMTA

SEQ ID NO: 239677 - protein, 15 aa, Artificial Sequence
  Description of Artificial Sequence: Synthetic peptide
  Seed: LRMKWMMAMKYPITA
LRMKTMMSMPYPVTA

SEQ ID NO: 239678 - protein, 15 aa, Artificial Sequence
  Description of Artificial Sequence: Synthetic peptide
  Seed: LRMKWMMAMKYPITA
LRMKTMMSMRYPATA

SEQ ID NO: 239679 - protein, 15 aa, Artificial Sequence
  Description of Artificial Sequence: Synthetic peptide
  Seed: LRMKWMMAMKYPITA
LRMKTMMSMRYPRTA

SEQ ID NO: 239680 - protein, 15 aa, Artificial Sequence
  Description of Artificial Sequence: Synthetic peptide
  Seed: LRMKWMMAMKYPITA
LRMKTMMSMRYPYTA

SEQ ID NO: 239681 - protein, 15 aa, Artificial Sequence
  Description of Artificial Sequence: Synthetic peptide
  Seed: LRMKWMMAMKYPITA
LRMKTMMSMSYPFTA

SEQ ID NO: 239682 - protein, 15 aa, Artificial Sequence
  Description of Artificial Sequence: Synthetic peptide
  Seed: LRMKWMMAMKYPITA
LRMKTMMSMSYPITA

SEQ ID NO: 239683 - protein, 15 aa, Artificial Sequence
  Description of Artificial Sequence: Synthetic peptide
  Seed: LRMKWMMAMKYPITA
LRMKTMMSMSYPLTA

SEQ ID NO: 239684 - protein, 15 aa, Artificial Sequence
  Description of Artificial Sequence: Synthetic peptide
  Seed: LRMKWMMAMKYPITA
LRMKTMMSMSYPMTA

SEQ ID NO: 239685 - protein, 15 aa, Artificial Sequence
  Description of Artificial Sequence: Synthetic peptide
  Seed: LRMKWMMAMKYPITA
LRMKTMMSMSYPVTA

SEQ ID NO: 239686 - protein, 15 aa, Artificial Sequence
  Description of Artificial Sequence: Synthetic peptide
  Seed: LRMKWMMAMKYPITA
LRMKTMMSMTYPITA

SEQ ID NO: 239687 - protein, 15 aa, Artificial Sequence
  Description of Artificial Sequence: Synthetic peptide
  Seed: LRMKWMMAMKYPITA
LRMKTMMTMAYPFTA

SEQ ID NO: 239688 - protein, 15 aa, Artificial Sequence
  Description of Artificial Sequence: Synthetic peptide
  Seed: LRMKWMMAMKYPITA
LRMKTMMTMAYPITA

SEQ ID NO: 239689 - protein, 15 aa, Artificial Sequence
  Description of Artificial Sequence: Synthetic peptide
  Seed: LRMKWMMAMKYPITA
LRMKTMMTMAYPLTA

SEQ ID NO: 239690 - protein, 15 aa, Artificial Sequence
  Description of Artificial Sequence: Synthetic peptide
  Seed: LRMKWMMAMKYPITA
LRMKTMMTMAYPMTA

SEQ ID NO: 239691 - protein, 15 aa, Artificial Sequence
  Description of Artificial Sequence: Synthetic peptide
  Seed: LRMKWMMAMKYPITA
LRMKTMMTMAYPVTA

SEQ ID NO: 239692 - protein, 15 aa, Artificial Sequence
  Description of Artificial Sequence: Synthetic peptide
  Seed: LRMKWMMAMKYPITA
LRMKTMMTMGYPITA

SEQ ID NO: 239693 - protein, 15 aa, Artificial Sequence
  Description of Artificial Sequence: Synthetic peptide
  Seed: LRMKWMMAMKYPITA
LRMKTMMTMGYPLTA

SEQ ID NO: 239694 - protein, 15 aa, Artificial Sequence
  Description of Artificial Sequence: Synthetic peptide
  Seed: LRMKWMMAMKYPITA
LRMKTMMTMGYPVTA

SEQ ID NO: 239695 - protein, 15 aa, Artificial Sequence
  Description of Artificial Sequence: Synthetic peptide
  Seed: LRMKWMMAMKYPITA
LRMKTMMTMPYPITA

SEQ ID NO: 239696 - protein, 15 aa, Artificial Sequence
  Description of Artificial Sequence: Synthetic peptide
  Seed: LRMKWMMAMKYPITA
LRMKTMMTMRYPATA

SEQ ID NO: 239697 - protein, 15 aa, Artificial Sequence
  Description of Artificial Sequence: Synthetic peptide
  Seed: LRMKWMMAMKYPITA
LRMKTMMTMRYPRTA

SEQ ID NO: 239698 - protein, 15 aa, Artificial Sequence
  Description of Artificial Sequence: Synthetic peptide
  Seed: LRMKWMMAMKYPITA
LRMKTMMTMRYPSTA

SEQ ID NO: 239699 - protein, 15 aa, Artificial Sequence
  Description of Artificial Sequence: Synthetic peptide
  Seed: LRMKWMMAMKYPITA
LRMKTMMTMRYPYTA

SEQ ID NO: 239700 - protein, 15 aa, Artificial Sequence
  Description of Artificial Sequence: Synthetic peptide
  Seed: LRMKWMMAMKYPITA
LRMKTMMTMSYPFTA

SEQ ID NO: 239701 - protein, 15 aa, Artificial Sequence
  Description of Artificial Sequence: Synthetic peptide
  Seed: LRMKWMMAMKYPITA
LRMKTMMTMSYPITA

SEQ ID NO: 239702 - protein, 15 aa, Artificial Sequence
  Description of Artificial Sequence: Synthetic peptide
  Seed: LRMKWMMAMKYPITA
LRMKTMMTMSYPLTA

SEQ ID NO: 239703 - protein, 15 aa, Artificial Sequence
  Description of Artificial Sequence: Synthetic peptide
  Seed: LRMKWMMAMKYPITA
LRMKTMMTMSYPMTA

SEQ ID NO: 239704 - protein, 15 aa, Artificial Sequence
  Description of Artificial Sequence: Synthetic peptide
  Seed: LRMKWMMAMKYPITA
LRMKTMMTMSYPVTA

SEQ ID NO: 239705 - protein, 15 aa, Artificial Sequence
  Description of Artificial Sequence: Synthetic peptide
  Seed: LRMKWMMAMKYPITA
LRMKTMMTMTYPITA

SEQ ID NO: 239706 - protein, 15 aa, Artificial Sequence
  Description of Artificial Sequence: Synthetic peptide
  Seed: LRMKWMMAMKYPITA
LRMKTMMTMTYPLTA

SEQ ID NO: 239707 - protein, 15 aa, Artificial Sequence
  Description of Artificial Sequence: Synthetic peptide
  Seed: LRMKWMMAMKYPITA
LRMKTMMTMTYPVTA

SEQ ID NO: 239708 - protein, 15 aa, Artificial Sequence
  Description of Artificial Sequence: Synthetic peptide
  Seed: LRMKWMMAMKYPITA
LRMKTMMVMAYPITA

SEQ ID NO: 239709 - protein, 15 aa, Artificial Sequence
  Description of Artificial Sequence: Synthetic peptide
  Seed: LRMKWMMAMKYPITA
LRMKTMMVMGYPATA

SEQ ID NO: 239710 - protein, 15 aa, Artificial Sequence
  Description of Artificial Sequence: Synthetic peptide
  Seed: LRMKWMMAMKYPITA
LRMKTMMVMGYPITA

SEQ ID NO: 239711 - protein, 15 aa, Artificial Sequence
  Description of Artificial Sequence: Synthetic peptide
  Seed: LRMKWMMAMKYPITA
LRMKTMMVMGYPLTA

SEQ ID NO: 239712 - protein, 15 aa, Artificial Sequence
  Description of Artificial Sequence: Synthetic peptide
  Seed: LRMKWMMAMKYPITA
LRMKTMMVMGYPMTA

SEQ ID NO: 239713 - protein, 15 aa, Artificial Sequence
  Description of Artificial Sequence: Synthetic peptide
  Seed: LRMKWMMAMKYPITA
LRMKTMMVMGYPVTA

SEQ ID NO: 239714 - protein, 15 aa, Artificial Sequence
  Description of Artificial Sequence: Synthetic peptide
  Seed: LRMKWMMAMKYPITA
LRMKTMMVMKYPATA

SEQ ID NO: 239715 - protein, 15 aa, Artificial Sequence
  Description of Artificial Sequence: Synthetic peptide
  Seed: LRMKWMMAMKYPITA
LRMKTMMVMKYPSTA

SEQ ID NO: 239716 - protein, 15 aa, Artificial Sequence
  Description of Artificial Sequence: Synthetic peptide
  Seed: LRMKWMMAMKYPITA
LRMKTMMVMPYPATA

SEQ ID NO: 239717 - protein, 15 aa, Artificial Sequence
  Description of Artificial Sequence: Synthetic peptide
  Seed: LRMKWMMAMKYPITA
LRMKTMMVMPYPITA

SEQ ID NO: 239718 - protein, 15 aa, Artificial Sequence
  Description of Artificial Sequence: Synthetic peptide
  Seed: LRMKWMMAMKYPITA
LRMKTMMVMPYPLTA

SEQ ID NO: 239719 - protein, 15 aa, Artificial Sequence
  Description of Artificial Sequence: Synthetic peptide
  Seed: LRMKWMMAMKYPITA
LRMKTMMVMPYPMTA

SEQ ID NO: 239720 - protein, 15 aa, Artificial Sequence
  Description of Artificial Sequence: Synthetic peptide
  Seed: LRMKWMMAMKYPITA
LRMKTMMVMPYPSTA

SEQ ID NO: 239721 - protein, 15 aa, Artificial Sequence
  Description of Artificial Sequence: Synthetic peptide
  Seed: LRMKWMMAMKYPITA
LRMKTMMVMPYPVTA

SEQ ID NO: 239722 - protein, 15 aa, Artificial Sequence
  Description of Artificial Sequence: Synthetic peptide
  Seed: LRMKWMMAMKYPITA
LRMKTMMVMRYPATA

SEQ ID NO: 239723 - protein, 15 aa, Artificial Sequence
  Description of Artificial Sequence: Synthetic peptide
  Seed: LRMKWMMAMKYPITA
LRMKTMMVMRYPFTA

SEQ ID NO: 239724 - protein, 15 aa, Artificial Sequence
  Description of Artificial Sequence: Synthetic peptide
  Seed: LRMKWMMAMKYPITA
LRMKTMMVMRYPGTA

SEQ ID NO: 239725 - protein, 15 aa, Artificial Sequence
  Description of Artificial Sequence: Synthetic peptide
  Seed: LRMKWMMAMKYPITA
LRMKTMMVMRYPHTA

SEQ ID NO: 239726 - protein, 15 aa, Artificial Sequence
  Description of Artificial Sequence: Synthetic peptide
  Seed: LRMKWMMAMKYPITA
LRMKTMMVMRYPITA

SEQ ID NO: 239727 - protein, 15 aa, Artificial Sequence
  Description of Artificial Sequence: Synthetic peptide
  Seed: LRMKWMMAMKYPITA
LRMKTMMVMRYPKTA

SEQ ID NO: 239728 - protein, 15 aa, Artificial Sequence
  Description of Artificial Sequence: Synthetic peptide
  Seed: LRMKWMMAMKYPITA
LRMKTMMVMRYPLTA

SEQ ID NO: 239729 - protein, 15 aa, Artificial Sequence
  Description of Artificial Sequence: Synthetic peptide
  Seed: LRMKWMMAMKYPITA
LRMKTMMVMRYPMTA

SEQ ID NO: 239730 - protein, 15 aa, Artificial Sequence
  Description of Artificial Sequence: Synthetic peptide
  Seed: LRMKWMMAMKYPITA
LRMKTMMVMRYPQTA

SEQ ID NO: 239731 - protein, 15 aa, Artificial Sequence
  Description of Artificial Sequence: Synthetic peptide
  Seed: LRMKWMMAMKYPITA
LRMKTMMVMRYPRTA

SEQ ID NO: 239732 - protein, 15 aa, Artificial Sequence
  Description of Artificial Sequence: Synthetic peptide
  Seed: LRMKWMMAMKYPITA
LRMKTMMVMRYPSTA

SEQ ID NO: 239733 - protein, 15 aa, Artificial Sequence
  Description of Artificial Sequence: Synthetic peptide
  Seed: LRMKWMMAMKYPITA
LRMKTMMVMRYPVTA

SEQ ID NO: 239734 - protein, 15 aa, Artificial Sequence
  Description of Artificial Sequence: Synthetic peptide
  Seed: LRMKWMMAMKYPITA
LRMKTMMVMRYPYTA

SEQ ID NO: 239735 - protein, 15 aa, Artificial Sequence
  Description of Artificial Sequence: Synthetic peptide
  Seed: LRMKWMMAMKYPITA
LRMKTMMVMSYPITA

SEQ ID NO: 239736 - protein, 15 aa, Artificial Sequence
  Description of Artificial Sequence: Synthetic peptide
  Seed: LRMKWMMAMKYPITA
LRMKTMMVMSYPLTA

SEQ ID NO: 239737 - protein, 15 aa, Artificial Sequence
  Description of Artificial Sequence: Synthetic peptide
  Seed: LRMKWMMAMKYPITA
LRMKTMMVMSYPVTA

SEQ ID NO: 239738 - protein, 15 aa, Artificial Sequence
  Description of Artificial Sequence: Synthetic peptide
  Seed: LRMKWMMAMKYPITA
LRMKTMMYMRYPRTA

SEQ ID NO: 239739 - protein, 15 aa, Artificial Sequence
  Description of Artificial Sequence: Synthetic peptide
  Seed: LRMKWMMAMKYPITA
LRMKTMMYMRYPVTA

SEQ ID NO: 239740 - protein, 15 aa, Artificial Sequence
  Description of Artificial Sequence: Synthetic peptide
  Seed: LRMKWMMAMKYPITA
LRMKTMMYMRYPYTA

SEQ ID NO: 239741 - protein, 15 aa, Artificial Sequence
  Description of Artificial Sequence: Synthetic peptide
  Seed: LRMKWMMAMKYPITA
LRMKVMMAMAYPATA

SEQ ID NO: 239742 - protein, 15 aa, Artificial Sequence
  Description of Artificial Sequence: Synthetic peptide
  Seed: LRMKWMMAMKYPITA
LRMKVMMAMAYPCTA

SEQ ID NO: 239743 - protein, 15 aa, Artificial Sequence
  Description of Artificial Sequence: Synthetic peptide
  Seed: LRMKWMMAMKYPITA
LRMKVMMAMAYPDTA

SEQ ID NO: 239744 - protein, 15 aa, Artificial Sequence
  Description of Artificial Sequence: Synthetic peptide
  Seed: LRMKWMMAMKYPITA
LRMKVMMAMAYPETA

SEQ ID NO: 239745 - protein, 15 aa, Artificial Sequence
  Description of Artificial Sequence: Synthetic peptide
  Seed: LRMKWMMAMKYPITA
LRMKVMMAMAYPFTA

SEQ ID NO: 239746 - protein, 15 aa, Artificial Sequence
  Description of Artificial Sequence: Synthetic peptide
  Seed: LRMKWMMAMKYPITA
LRMKVMMAMAYPGTA

SEQ ID NO: 239747 - protein, 15 aa, Artificial Sequence
  Description of Artificial Sequence: Synthetic peptide
  Seed: LRMKWMMAMKYPITA
LRMKVMMAMAYPHTA

SEQ ID NO: 239748 - protein, 15 aa, Artificial Sequence
  Description of Artificial Sequence: Synthetic peptide
  Seed: LRMKWMMAMKYPITA
LRMKVMMAMAYPITA

SEQ ID NO: 239749 - protein, 15 aa, Artificial Sequence
  Description of Artificial Sequence: Synthetic peptide
  Seed: LRMKWMMAMKYPITA
LRMKVMMAMAYPKTA

SEQ ID NO: 239750 - protein, 15 aa, Artificial Sequence
  Description of Artificial Sequence: Synthetic peptide
  Seed: LRMKWMMAMKYPITA
LRMKVMMAMAYPLTA

SEQ ID NO: 239751 - protein, 15 aa, Artificial Sequence
  Description of Artificial Sequence: Synthetic peptide
  Seed: LRMKWMMAMKYPITA
LRMKVMMAMAYPMTA

SEQ ID NO: 239752 - protein, 15 aa, Artificial Sequence
  Description of Artificial Sequence: Synthetic peptide
  Seed: LRMKWMMAMKYPITA
LRMKVMMAMAYPNTA

SEQ ID NO: 239753 - protein, 15 aa, Artificial Sequence
  Description of Artificial Sequence: Synthetic peptide
  Seed: LRMKWMMAMKYPITA
LRMKVMMAMAYPPTA

SEQ ID NO: 239754 - protein, 15 aa, Artificial Sequence
  Description of Artificial Sequence: Synthetic peptide
  Seed: LRMKWMMAMKYPITA
LRMKVMMAMAYPQTA

SEQ ID NO: 239755 - protein, 15 aa, Artificial Sequence
  Description of Artificial Sequence: Synthetic peptide
  Seed: LRMKWMMAMKYPITA
LRMKVMMAMAYPRTA

SEQ ID NO: 239756 - protein, 15 aa, Artificial Sequence
  Description of Artificial Sequence: Synthetic peptide
  Seed: LRMKWMMAMKYPITA
LRMKVMMAMAYPSTA

SEQ ID NO: 239757 - protein, 15 aa, Artificial Sequence
  Description of Artificial Sequence: Synthetic peptide
  Seed: LRMKWMMAMKYPITA
LRMKVMMAMAYPTTA

SEQ ID NO: 239758 - protein, 15 aa, Artificial Sequence
  Description of Artificial Sequence: Synthetic peptide
  Seed: LRMKWMMAMKYPITA
LRMKVMMAMAYPVTA

SEQ ID NO: 239759 - protein, 15 aa, Artificial Sequence
  Description of Artificial Sequence: Synthetic peptide
  Seed: LRMKWMMAMKYPITA
LRMKVMMAMAYPWTA

SEQ ID NO: 239760 - protein, 15 aa, Artificial Sequence
  Description of Artificial Sequence: Synthetic peptide
  Seed: LRMKWMMAMKYPITA
LRMKVMMAMAYPYTA

SEQ ID NO: 239761 - protein, 15 aa, Artificial Sequence
  Description of Artificial Sequence: Synthetic peptide
  Seed: LRMKWMMAMKYPITA
LRMKVMMAMCYPATA

SEQ ID NO: 239762 - protein, 15 aa, Artificial Sequence
  Description of Artificial Sequence: Synthetic peptide
  Seed: LRMKWMMAMKYPITA
LRMKVMMAMCYPITA

SEQ ID NO: 239763 - protein, 15 aa, Artificial Sequence
  Description of Artificial Sequence: Synthetic peptide
  Seed: LRMKWMMAMKYPITA
LRMKVMMAMCYPLTA

SEQ ID NO: 239764 - protein, 15 aa, Artificial Sequence
  Description of Artificial Sequence: Synthetic peptide
  Seed: LRMKWMMAMKYPITA
LRMKVMMAMCYPMTA

SEQ ID NO: 239765 - protein, 15 aa, Artificial Sequence
  Description of Artificial Sequence: Synthetic peptide
  Seed: LRMKWMMAMKYPITA
LRMKVMMAMCYPVTA

SEQ ID NO: 239766 - protein, 15 aa, Artificial Sequence
  Description of Artificial Sequence: Synthetic peptide
  Seed: LRMKWMMAMKYPITA
LRMKVMMAMDYPLTA

SEQ ID NO: 239767 - protein, 15 aa, Artificial Sequence
  Description of Artificial Sequence: Synthetic peptide
  Seed: LRMKWMMAMKYPITA
LRMKVMMAMDYPVTA

SEQ ID NO: 239768 - protein, 15 aa, Artificial Sequence
  Description of Artificial Sequence: Synthetic peptide
  Seed: LRMKWMMAMKYPITA
LRMKVMMAMEYPITA

SEQ ID NO: 239769 - protein, 15 aa, Artificial Sequence
  Description of Artificial Sequence: Synthetic peptide
  Seed: LRMKWMMAMKYPITA
LRMKVMMAMEYPLTA

SEQ ID NO: 239770 - protein, 15 aa, Artificial Sequence
  Description of Artificial Sequence: Synthetic peptide
  Seed: LRMKWMMAMKYPITA
LRMKVMMAMEYPVTA

SEQ ID NO: 239771 - protein, 15 aa, Artificial Sequence
  Description of Artificial Sequence: Synthetic peptide
  Seed: LRMKWMMAMKYPITA
LRMKVMMAMGYPATA

SEQ ID NO: 239772 - protein, 15 aa, Artificial Sequence
  Description of Artificial Sequence: Synthetic peptide
  Seed: LRMKWMMAMKYPITA
LRMKVMMAMGYPCTA

SEQ ID NO: 239773 - protein, 15 aa, Artificial Sequence
  Description of Artificial Sequence: Synthetic peptide
  Seed: LRMKWMMAMKYPITA
LRMKVMMAMGYPFTA

SEQ ID NO: 239774 - protein, 15 aa, Artificial Sequence
  Description of Artificial Sequence: Synthetic peptide
  Seed: LRMKWMMAMKYPITA
LRMKVMMAMGYPGTA

SEQ ID NO: 239775 - protein, 15 aa, Artificial Sequence
  Description of Artificial Sequence: Synthetic peptide
  Seed: LRMKWMMAMKYPITA
LRMKVMMAMGYPHTA

SEQ ID NO: 239776 - protein, 15 aa, Artificial Sequence
  Description of Artificial Sequence: Synthetic peptide
  Seed: LRMKWMMAMKYPITA
LRMKVMMAMGYPITA

SEQ ID NO: 239777 - protein, 15 aa, Artificial Sequence
  Description of Artificial Sequence: Synthetic peptide
  Seed: LRMKWMMAMKYPITA
LRMKVMMAMGYPKTA

SEQ ID NO: 239778 - protein, 15 aa, Artificial Sequence
  Description of Artificial Sequence: Synthetic peptide
  Seed: LRMKWMMAMKYPITA
LRMKVMMAMGYPLTA

SEQ ID NO: 239779 - protein, 15 aa, Artificial Sequence
  Description of Artificial Sequence: Synthetic peptide
  Seed: LRMKWMMAMKYPITA
LRMKVMMAMGYPMTA

SEQ ID NO: 239780 - protein, 15 aa, Artificial Sequence
  Description of Artificial Sequence: Synthetic peptide
  Seed: LRMKWMMAMKYPITA
LRMKVMMAMGYPNTA

SEQ ID NO: 239781 - protein, 15 aa, Artificial Sequence
  Description of Artificial Sequence: Synthetic peptide
  Seed: LRMKWMMAMKYPITA
LRMKVMMAMGYPPTA

SEQ ID NO: 239782 - protein, 15 aa, Artificial Sequence
  Description of Artificial Sequence: Synthetic peptide
  Seed: LRMKWMMAMKYPITA
LRMKVMMAMGYPQTA

SEQ ID NO: 239783 - protein, 15 aa, Artificial Sequence
  Description of Artificial Sequence: Synthetic peptide
  Seed: LRMKWMMAMKYPITA
LRMKVMMAMGYPRTA

SEQ ID NO: 239784 - protein, 15 aa, Artificial Sequence
  Description of Artificial Sequence: Synthetic peptide
  Seed: LRMKWMMAMKYPITA
LRMKVMMAMGYPSTA

SEQ ID NO: 239785 - protein, 15 aa, Artificial Sequence
  Description of Artificial Sequence: Synthetic peptide
  Seed: LRMKWMMAMKYPITA
LRMKVMMAMGYPTTA

SEQ ID NO: 239786 - protein, 15 aa, Artificial Sequence
  Description of Artificial Sequence: Synthetic peptide
  Seed: LRMKWMMAMKYPITA
LRMKVMMAMGYPVTA

SEQ ID NO: 239787 - protein, 15 aa, Artificial Sequence
  Description of Artificial Sequence: Synthetic peptide
  Seed: LRMKWMMAMKYPITA
LRMKVMMAMGYPWTA

SEQ ID NO: 239788 - protein, 15 aa, Artificial Sequence
  Description of Artificial Sequence: Synthetic peptide
  Seed: LRMKWMMAMKYPITA
LRMKVMMAMGYPYTA

SEQ ID NO: 239789 - protein, 15 aa, Artificial Sequence
  Description of Artificial Sequence: Synthetic peptide
  Seed: LRMKWMMAMKYPITA
LRMKVMMAMHYPATA

SEQ ID NO: 239790 - protein, 15 aa, Artificial Sequence
  Description of Artificial Sequence: Synthetic peptide
  Seed: LRMKWMMAMKYPITA
LRMKVMMAMHYPFTA

SEQ ID NO: 239791 - protein, 15 aa, Artificial Sequence
  Description of Artificial Sequence: Synthetic peptide
  Seed: LRMKWMMAMKYPITA
LRMKVMMAMHYPGTA

SEQ ID NO: 239792 - protein, 15 aa, Artificial Sequence
  Description of Artificial Sequence: Synthetic peptide
  Seed: LRMKWMMAMKYPITA
LRMKVMMAMHYPHTA

SEQ ID NO: 239793 - protein, 15 aa, Artificial Sequence
  Description of Artificial Sequence: Synthetic peptide
  Seed: LRMKWMMAMKYPITA
LRMKVMMAMHYPITA

SEQ ID NO: 239794 - protein, 15 aa, Artificial Sequence
  Description of Artificial Sequence: Synthetic peptide
  Seed: LRMKWMMAMKYPITA
LRMKVMMAMHYPKTA

SEQ ID NO: 239795 - protein, 15 aa, Artificial Sequence
  Description of Artificial Sequence: Synthetic peptide
  Seed: LRMKWMMAMKYPITA
LRMKVMMAMHYPLTA

SEQ ID NO: 239796 - protein, 15 aa, Artificial Sequence
  Description of Artificial Sequence: Synthetic peptide
  Seed: LRMKWMMAMKYPITA
LRMKVMMAMHYPMTA

SEQ ID NO: 239797 - protein, 15 aa, Artificial Sequence
  Description of Artificial Sequence: Synthetic peptide
  Seed: LRMKWMMAMKYPITA
LRMKVMMAMHYPQTA

SEQ ID NO: 239798 - protein, 15 aa, Artificial Sequence
  Description of Artificial Sequence: Synthetic peptide
  Seed: LRMKWMMAMKYPITA
LRMKVMMAMHYPRTA

SEQ ID NO: 239799 - protein, 15 aa, Artificial Sequence
  Description of Artificial Sequence: Synthetic peptide
  Seed: LRMKWMMAMKYPITA
LRMKVMMAMHYPSTA

SEQ ID NO: 239800 - protein, 15 aa, Artificial Sequence
  Description of Artificial Sequence: Synthetic peptide
  Seed: LRMKWMMAMKYPITA
LRMKVMMAMHYPVTA

SEQ ID NO: 239801 - protein, 15 aa, Artificial Sequence
  Description of Artificial Sequence: Synthetic peptide
  Seed: LRMKWMMAMKYPITA
LRMKVMMAMHYPYTA

SEQ ID NO: 239802 - protein, 15 aa, Artificial Sequence
  Description of Artificial Sequence: Synthetic peptide
  Seed: LRMKWMMAMKYPITA
LRMKVMMAMIYPATA

SEQ ID NO: 239803 - protein, 15 aa, Artificial Sequence
  Description of Artificial Sequence: Synthetic peptide
  Seed: LRMKWMMAMKYPITA
LRMKVMMAMIYPGTA

SEQ ID NO: 239804 - protein, 15 aa, Artificial Sequence
  Description of Artificial Sequence: Synthetic peptide
  Seed: LRMKWMMAMKYPITA
LRMKVMMAMIYPITA

SEQ ID NO: 239805 - protein, 15 aa, Artificial Sequence
  Description of Artificial Sequence: Synthetic peptide
  Seed: LRMKWMMAMKYPITA
LRMKVMMAMIYPLTA

SEQ ID NO: 239806 - protein, 15 aa, Artificial Sequence
  Description of Artificial Sequence: Synthetic peptide
  Seed: LRMKWMMAMKYPITA
LRMKVMMAMIYPMTA

SEQ ID NO: 239807 - protein, 15 aa, Artificial Sequence
  Description of Artificial Sequence: Synthetic peptide
  Seed: LRMKWMMAMKYPITA
LRMKVMMAMIYPNTA

SEQ ID NO: 239808 - protein, 15 aa, Artificial Sequence
  Description of Artificial Sequence: Synthetic peptide
  Seed: LRMKWMMAMKYPITA
LRMKVMMAMIYPRTA

SEQ ID NO: 239809 - protein, 15 aa, Artificial Sequence
  Description of Artificial Sequence: Synthetic peptide
  Seed: LRMKWMMAMKYPITA
LRMKVMMAMIYPSTA

SEQ ID NO: 239810 - protein, 15 aa, Artificial Sequence
  Description of Artificial Sequence: Synthetic peptide
  Seed: LRMKWMMAMKYPITA
LRMKVMMAMIYPTTA

SEQ ID NO: 239811 - protein, 15 aa, Artificial Sequence
  Description of Artificial Sequence: Synthetic peptide
  Seed: LRMKWMMAMKYPITA
LRMKVMMAMIYPVTA

SEQ ID NO: 239812 - protein, 15 aa, Artificial Sequence
  Description of Artificial Sequence: Synthetic peptide
  Seed: LRMKWMMAMKYPITA
LRMKVMMAMKYPATA

SEQ ID NO: 239813 - protein, 15 aa, Artificial Sequence
  Description of Artificial Sequence: Synthetic peptide
  Seed: LRMKWMMAMKYPITA
LRMKVMMAMKYPCTA

SEQ ID NO: 239814 - protein, 15 aa, Artificial Sequence
  Description of Artificial Sequence: Synthetic peptide
  Seed: LRMKWMMAMKYPITA
LRMKVMMAMKYPETA

SEQ ID NO: 239815 - protein, 15 aa, Artificial Sequence
  Description of Artificial Sequence: Synthetic peptide
  Seed: LRMKWMMAMKYPITA
LRMKVMMAMKYPFTA

SEQ ID NO: 239816 - protein, 15 aa, Artificial Sequence
  Description of Artificial Sequence: Synthetic peptide
  Seed: LRMKWMMAMKYPITA
LRMKVMMAMKYPGTA

SEQ ID NO: 239817 - protein, 15 aa, Artificial Sequence
  Description of Artificial Sequence: Synthetic peptide
  Seed: LRMKWMMAMKYPITA
LRMKVMMAMKYPHTA

SEQ ID NO: 239818 - protein, 15 aa, Artificial Sequence
  Description of Artificial Sequence: Synthetic peptide
  Seed: LRMKWMMAMKYPITA
LRMKVMMAMKYPITA

SEQ ID NO: 239819 - protein, 15 aa, Artificial Sequence
  Description of Artificial Sequence: Synthetic peptide
  Seed: LRMKWMMAMKYPITA
LRMKVMMAMKYPKTA

SEQ ID NO: 239820 - protein, 15 aa, Artificial Sequence
  Description of Artificial Sequence: Synthetic peptide
  Seed: LRMKWMMAMKYPITA
LRMKVMMAMKYPLTA

SEQ ID NO: 239821 - protein, 15 aa, Artificial Sequence
  Description of Artificial Sequence: Synthetic peptide
  Seed: LRMKWMMAMKYPITA
LRMKVMMAMKYPMTA

SEQ ID NO: 239822 - protein, 15 aa, Artificial Sequence
  Description of Artificial Sequence: Synthetic peptide
  Seed: LRMKWMMAMKYPITA
LRMKVMMAMKYPNTA

SEQ ID NO: 239823 - protein, 15 aa, Artificial Sequence
  Description of Artificial Sequence: Synthetic peptide
  Seed: LRMKWMMAMKYPITA
LRMKVMMAMKYPPTA

SEQ ID NO: 239824 - protein, 15 aa, Artificial Sequence
  Description of Artificial Sequence: Synthetic peptide
  Seed: LRMKWMMAMKYPITA
LRMKVMMAMKYPQTA

SEQ ID NO: 239825 - protein, 15 aa, Artificial Sequence
  Description of Artificial Sequence: Synthetic peptide
  Seed: LRMKWMMAMKYPITA
LRMKVMMAMKYPRTA

SEQ ID NO: 239826 - protein, 15 aa, Artificial Sequence
  Description of Artificial Sequence: Synthetic peptide
  Seed: LRMKWMMAMKYPITA
LRMKVMMAMKYPSTA

SEQ ID NO: 239827 - protein, 15 aa, Artificial Sequence
  Description of Artificial Sequence: Synthetic peptide
  Seed: LRMKWMMAMKYPITA
LRMKVMMAMKYPTTA

SEQ ID NO: 239828 - protein, 15 aa, Artificial Sequence
  Description of Artificial Sequence: Synthetic peptide
  Seed: LRMKWMMAMKYPITA
LRMKVMMAMKYPVTA

SEQ ID NO: 239829 - protein, 15 aa, Artificial Sequence
  Description of Artificial Sequence: Synthetic peptide
  Seed: LRMKWMMAMKYPITA
LRMKVMMAMKYPWTA

SEQ ID NO: 239830 - protein, 15 aa, Artificial Sequence
  Description of Artificial Sequence: Synthetic peptide
  Seed: LRMKWMMAMKYPITA
LRMKVMMAMKYPYTA

SEQ ID NO: 239831 - protein, 15 aa, Artificial Sequence
  Description of Artificial Sequence: Synthetic peptide
  Seed: LRMKWMMAMKYPITA
LRMKVMMAMMYPRTA

SEQ ID NO: 239832 - protein, 15 aa, Artificial Sequence
  Description of Artificial Sequence: Synthetic peptide
  Seed: LRMKWMMAMKYPITA
LRMKVMMAMNYPATA

SEQ ID NO: 239833 - protein, 15 aa, Artificial Sequence
  Description of Artificial Sequence: Synthetic peptide
  Seed: LRMKWMMAMKYPITA
LRMKVMMAMNYPCTA

SEQ ID NO: 239834 - protein, 15 aa, Artificial Sequence
  Description of Artificial Sequence: Synthetic peptide
  Seed: LRMKWMMAMKYPITA
LRMKVMMAMNYPDTA

SEQ ID NO: 239835 - protein, 15 aa, Artificial Sequence
  Description of Artificial Sequence: Synthetic peptide
  Seed: LRMKWMMAMKYPITA
LRMKVMMAMNYPETA

SEQ ID NO: 239836 - protein, 15 aa, Artificial Sequence
  Description of Artificial Sequence: Synthetic peptide
  Seed: LRMKWMMAMKYPITA
LRMKVMMAMNYPFTA

SEQ ID NO: 239837 - protein, 15 aa, Artificial Sequence
  Description of Artificial Sequence: Synthetic peptide
  Seed: LRMKWMMAMKYPITA
LRMKVMMAMNYPGTA

SEQ ID NO: 239838 - protein, 15 aa, Artificial Sequence
  Description of Artificial Sequence: Synthetic peptide
  Seed: LRMKWMMAMKYPITA
LRMKVMMAMNYPITA

SEQ ID NO: 239839 - protein, 15 aa, Artificial Sequence
  Description of Artificial Sequence: Synthetic peptide
  Seed: LRMKWMMAMKYPITA
LRMKVMMAMNYPLTA

SEQ ID NO: 239840 - protein, 15 aa, Artificial Sequence
  Description of Artificial Sequence: Synthetic peptide
  Seed: LRMKWMMAMKYPITA
LRMKVMMAMNYPMTA

SEQ ID NO: 239841 - protein, 15 aa, Artificial Sequence
  Description of Artificial Sequence: Synthetic peptide
  Seed: LRMKWMMAMKYPITA
LRMKVMMAMNYPNTA

SEQ ID NO: 239842 - protein, 15 aa, Artificial Sequence
  Description of Artificial Sequence: Synthetic peptide
  Seed: LRMKWMMAMKYPITA
LRMKVMMAMNYPRTA

SEQ ID NO: 239843 - protein, 15 aa, Artificial Sequence
  Description of Artificial Sequence: Synthetic peptide
  Seed: LRMKWMMAMKYPITA
LRMKVMMAMNYPSTA

SEQ ID NO: 239844 - protein, 15 aa, Artificial Sequence
  Description of Artificial Sequence: Synthetic peptide
  Seed: LRMKWMMAMKYPITA
LRMKVMMAMNYPTTA

SEQ ID NO: 239845 - protein, 15 aa, Artificial Sequence
  Description of Artificial Sequence: Synthetic peptide
  Seed: LRMKWMMAMKYPITA
LRMKVMMAMNYPVTA

SEQ ID NO: 239846 - protein, 15 aa, Artificial Sequence
  Description of Artificial Sequence: Synthetic peptide
  Seed: LRMKWMMAMKYPITA
LRMKVMMAMNYPYTA

SEQ ID NO: 239847 - protein, 15 aa, Artificial Sequence
  Description of Artificial Sequence: Synthetic peptide
  Seed: LRMKWMMAMKYPITA
LRMKVMMAMPYPATA

SEQ ID NO: 239848 - protein, 15 aa, Artificial Sequence
  Description of Artificial Sequence: Synthetic peptide
  Seed: LRMKWMMAMKYPITA
LRMKVMMAMPYPCTA

SEQ ID NO: 239849 - protein, 15 aa, Artificial Sequence
  Description of Artificial Sequence: Synthetic peptide
  Seed: LRMKWMMAMKYPITA
LRMKVMMAMPYPDTA

SEQ ID NO: 239850 - protein, 15 aa, Artificial Sequence
  Description of Artificial Sequence: Synthetic peptide
  Seed: LRMKWMMAMKYPITA
LRMKVMMAMPYPETA

SEQ ID NO: 239851 - protein, 15 aa, Artificial Sequence
  Description of Artificial Sequence: Synthetic peptide
  Seed: LRMKWMMAMKYPITA
LRMKVMMAMPYPFTA

SEQ ID NO: 239852 - protein, 15 aa, Artificial Sequence
  Description of Artificial Sequence: Synthetic peptide
  Seed: LRMKWMMAMKYPITA
LRMKVMMAMPYPGTA

SEQ ID NO: 239853 - protein, 15 aa, Artificial Sequence
  Description of Artificial Sequence: Synthetic peptide
  Seed: LRMKWMMAMKYPITA
LRMKVMMAMPYPHTA

SEQ ID NO: 239854 - protein, 15 aa, Artificial Sequence
  Description of Artificial Sequence: Synthetic peptide
  Seed: LRMKWMMAMKYPITA
LRMKVMMAMPYPITA

SEQ ID NO: 239855 - protein, 15 aa, Artificial Sequence
  Description of Artificial Sequence: Synthetic peptide
  Seed: LRMKWMMAMKYPITA
LRMKVMMAMPYPKTA

SEQ ID NO: 239856 - protein, 15 aa, Artificial Sequence
  Description of Artificial Sequence: Synthetic peptide
  Seed: LRMKWMMAMKYPITA
LRMKVMMAMPYPLTA

SEQ ID NO: 239857 - protein, 15 aa, Artificial Sequence
  Description of Artificial Sequence: Synthetic peptide
  Seed: LRMKWMMAMKYPITA
LRMKVMMAMPYPMTA

SEQ ID NO: 239858 - protein, 15 aa, Artificial Sequence
  Description of Artificial Sequence: Synthetic peptide
  Seed: LRMKWMMAMKYPITA
LRMKVMMAMPYPNTA

SEQ ID NO: 239859 - protein, 15 aa, Artificial Sequence
  Description of Artificial Sequence: Synthetic peptide
  Seed: LRMKWMMAMKYPITA
LRMKVMMAMPYPPTA

SEQ ID NO: 239860 - protein, 15 aa, Artificial Sequence
  Description of Artificial Sequence: Synthetic peptide
  Seed: LRMKWMMAMKYPITA
LRMKVMMAMPYPQTA

SEQ ID NO: 239861 - protein, 15 aa, Artificial Sequence
  Description of Artificial Sequence: Synthetic peptide
  Seed: LRMKWMMAMKYPITA
LRMKVMMAMPYPRTA

SEQ ID NO: 239862 - protein, 15 aa, Artificial Sequence
  Description of Artificial Sequence: Synthetic peptide
  Seed: LRMKWMMAMKYPITA
LRMKVMMAMPYPSTA

SEQ ID NO: 239863 - protein, 15 aa, Artificial Sequence
  Description of Artificial Sequence: Synthetic peptide
  Seed: LRMKWMMAMKYPITA
LRMKVMMAMPYPTTA

SEQ ID NO: 239864 - protein, 15 aa, Artificial Sequence
  Description of Artificial Sequence: Synthetic peptide
  Seed: LRMKWMMAMKYPITA
LRMKVMMAMPYPVTA

SEQ ID NO: 239865 - protein, 15 aa, Artificial Sequence
  Description of Artificial Sequence: Synthetic peptide
  Seed: LRMKWMMAMKYPITA
LRMKVMMAMPYPWTA

SEQ ID NO: 239866 - protein, 15 aa, Artificial Sequence
  Description of Artificial Sequence: Synthetic peptide
  Seed: LRMKWMMAMKYPITA
LRMKVMMAMPYPYTA

SEQ ID NO: 239867 - protein, 15 aa, Artificial Sequence
  Description of Artificial Sequence: Synthetic peptide
  Seed: LRMKWMMAMKYPITA
LRMKVMMAMQYPATA

SEQ ID NO: 239868 - protein, 15 aa, Artificial Sequence
  Description of Artificial Sequence: Synthetic peptide
  Seed: LRMKWMMAMKYPITA
LRMKVMMAMQYPITA

SEQ ID NO: 239869 - protein, 15 aa, Artificial Sequence
  Description of Artificial Sequence: Synthetic peptide
  Seed: LRMKWMMAMKYPITA
LRMKVMMAMQYPLTA

SEQ ID NO: 239870 - protein, 15 aa, Artificial Sequence
  Description of Artificial Sequence: Synthetic peptide
  Seed: LRMKWMMAMKYPITA
LRMKVMMAMQYPMTA

SEQ ID NO: 239871 - protein, 15 aa, Artificial Sequence
  Description of Artificial Sequence: Synthetic peptide
  Seed: LRMKWMMAMKYPITA
LRMKVMMAMQYPRTA

SEQ ID NO: 239872 - protein, 15 aa, Artificial Sequence
  Description of Artificial Sequence: Synthetic peptide
  Seed: LRMKWMMAMKYPITA
LRMKVMMAMQYPVTA

SEQ ID NO: 239873 - protein, 15 aa, Artificial Sequence
  Description of Artificial Sequence: Synthetic peptide
  Seed: LRMKWMMAMKYPITA
LRMKVMMAMRYPATA

SEQ ID NO: 239874 - protein, 15 aa, Artificial Sequence
  Description of Artificial Sequence: Synthetic peptide
  Seed: LRMKWMMAMKYPITA
LRMKVMMAMRYPCTA

SEQ ID NO: 239875 - protein, 15 aa, Artificial Sequence
  Description of Artificial Sequence: Synthetic peptide
  Seed: LRMKWMMAMKYPITA
LRMKVMMAMRYPDTA

SEQ ID NO: 239876 - protein, 15 aa, Artificial Sequence
  Description of Artificial Sequence: Synthetic peptide
  Seed: LRMKWMMAMKYPITA
LRMKVMMAMRYPETA

SEQ ID NO: 239877 - protein, 15 aa, Artificial Sequence
  Description of Artificial Sequence: Synthetic peptide
  Seed: LRMKWMMAMKYPITA
LRMKVMMAMRYPFTA

SEQ ID NO: 239878 - protein, 15 aa, Artificial Sequence
  Description of Artificial Sequence: Synthetic peptide
  Seed: LRMKWMMAMKYPITA
LRMKVMMAMRYPGTA

SEQ ID NO: 239879 - protein, 15 aa, Artificial Sequence
  Description of Artificial Sequence: Synthetic peptide
  Seed: LRMKWMMAMKYPITA
LRMKVMMAMRYPHTA

SEQ ID NO: 239880 - protein, 15 aa, Artificial Sequence
  Description of Artificial Sequence: Synthetic peptide
  Seed: LRMKWMMAMKYPITA
LRMKVMMAMRYPITA

SEQ ID NO: 239881 - protein, 15 aa, Artificial Sequence
  Description of Artificial Sequence: Synthetic peptide
  Seed: LRMKWMMAMKYPITA
LRMKVMMAMRYPKTA

SEQ ID NO: 239882 - protein, 15 aa, Artificial Sequence
  Description of Artificial Sequence: Synthetic peptide
  Seed: LRMKWMMAMKYPITA
LRMKVMMAMRYPLTA

SEQ ID NO: 239883 - protein, 15 aa, Artificial Sequence
  Description of Artificial Sequence: Synthetic peptide
  Seed: LRMKWMMAMKYPITA
LRMKVMMAMRYPMTA

SEQ ID NO: 239884 - protein, 15 aa, Artificial Sequence
  Description of Artificial Sequence: Synthetic peptide
  Seed: LRMKWMMAMKYPITA
LRMKVMMAMRYPNTA

SEQ ID NO: 239885 - protein, 15 aa, Artificial Sequence
  Description of Artificial Sequence: Synthetic peptide
  Seed: LRMKWMMAMKYPITA
LRMKVMMAMRYPPTA

SEQ ID NO: 239886 - protein, 15 aa, Artificial Sequence
  Description of Artificial Sequence: Synthetic peptide
  Seed: LRMKWMMAMKYPITA
LRMKVMMAMRYPQTA

SEQ ID NO: 239887 - protein, 15 aa, Artificial Sequence
  Description of Artificial Sequence: Synthetic peptide
  Seed: LRMKWMMAMKYPITA
LRMKVMMAMRYPRTA

SEQ ID NO: 239888 - protein, 15 aa, Artificial Sequence
  Description of Artificial Sequence: Synthetic peptide
  Seed: LRMKWMMAMKYPITA
LRMKVMMAMRYPSTA

SEQ ID NO: 239889 - protein, 15 aa, Artificial Sequence
  Description of Artificial Sequence: Synthetic peptide
  Seed: LRMKWMMAMKYPITA
LRMKVMMAMRYPTTA

SEQ ID NO: 239890 - protein, 15 aa, Artificial Sequence
  Description of Artificial Sequence: Synthetic peptide
  Seed: LRMKWMMAMKYPITA
LRMKVMMAMRYPVTA

SEQ ID NO: 239891 - protein, 15 aa, Artificial Sequence
  Description of Artificial Sequence: Synthetic peptide
  Seed: LRMKWMMAMKYPITA
LRMKVMMAMRYPWTA

SEQ ID NO: 239892 - protein, 15 aa, Artificial Sequence
  Description of Artificial Sequence: Synthetic peptide
  Seed: LRMKWMMAMKYPITA
LRMKVMMAMRYPYTA

SEQ ID NO: 239893 - protein, 15 aa, Artificial Sequence
  Description of Artificial Sequence: Synthetic peptide
  Seed: LRMKWMMAMKYPITA
LRMKVMMAMSYPATA

SEQ ID NO: 239894 - protein, 15 aa, Artificial Sequence
  Description of Artificial Sequence: Synthetic peptide
  Seed: LRMKWMMAMKYPITA
LRMKVMMAMSYPCTA

SEQ ID NO: 239895 - protein, 15 aa, Artificial Sequence
  Description of Artificial Sequence: Synthetic peptide
  Seed: LRMKWMMAMKYPITA
LRMKVMMAMSYPFTA

SEQ ID NO: 239896 - protein, 15 aa, Artificial Sequence
  Description of Artificial Sequence: Synthetic peptide
  Seed: LRMKWMMAMKYPITA
LRMKVMMAMSYPGTA

SEQ ID NO: 239897 - protein, 15 aa, Artificial Sequence
  Description of Artificial Sequence: Synthetic peptide
  Seed: LRMKWMMAMKYPITA
LRMKVMMAMSYPHTA

SEQ ID NO: 239898 - protein, 15 aa, Artificial Sequence
  Description of Artificial Sequence: Synthetic peptide
  Seed: LRMKWMMAMKYPITA
LRMKVMMAMSYPITA

SEQ ID NO: 239899 - protein, 15 aa, Artificial Sequence
  Description of Artificial Sequence: Synthetic peptide
  Seed: LRMKWMMAMKYPITA
LRMKVMMAMSYPKTA

SEQ ID NO: 239900 - protein, 15 aa, Artificial Sequence
  Description of Artificial Sequence: Synthetic peptide
  Seed: LRMKWMMAMKYPITA
LRMKVMMAMSYPLTA

SEQ ID NO: 239901 - protein, 15 aa, Artificial Sequence
  Description of Artificial Sequence: Synthetic peptide
  Seed: LRMKWMMAMKYPITA
LRMKVMMAMSYPMTA

SEQ ID NO: 239902 - protein, 15 aa, Artificial Sequence
  Description of Artificial Sequence: Synthetic peptide
  Seed: LRMKWMMAMKYPITA
LRMKVMMAMSYPNTA

SEQ ID NO: 239903 - protein, 15 aa, Artificial Sequence
  Description of Artificial Sequence: Synthetic peptide
  Seed: LRMKWMMAMKYPITA
LRMKVMMAMSYPPTA

SEQ ID NO: 239904 - protein, 15 aa, Artificial Sequence
  Description of Artificial Sequence: Synthetic peptide
  Seed: LRMKWMMAMKYPITA
LRMKVMMAMSYPQTA

SEQ ID NO: 239905 - protein, 15 aa, Artificial Sequence
  Description of Artificial Sequence: Synthetic peptide
  Seed: LRMKWMMAMKYPITA
LRMKVMMAMSYPRTA

SEQ ID NO: 239906 - protein, 15 aa, Artificial Sequence
  Description of Artificial Sequence: Synthetic peptide
  Seed: LRMKWMMAMKYPITA
LRMKVMMAMSYPSTA

SEQ ID NO: 239907 - protein, 15 aa, Artificial Sequence
  Description of Artificial Sequence: Synthetic peptide
  Seed: LRMKWMMAMKYPITA
LRMKVMMAMSYPTTA

SEQ ID NO: 239908 - protein, 15 aa, Artificial Sequence
  Description of Artificial Sequence: Synthetic peptide
  Seed: LRMKWMMAMKYPITA
LRMKVMMAMSYPVTA

SEQ ID NO: 239909 - protein, 15 aa, Artificial Sequence
  Description of Artificial Sequence: Synthetic peptide
  Seed: LRMKWMMAMKYPITA
LRMKVMMAMSYPWTA

SEQ ID NO: 239910 - protein, 15 aa, Artificial Sequence
  Description of Artificial Sequence: Synthetic peptide
  Seed: LRMKWMMAMKYPITA
LRMKVMMAMSYPYTA

SEQ ID NO: 239911 - protein, 15 aa, Artificial Sequence
  Description of Artificial Sequence: Synthetic peptide
  Seed: LRMKWMMAMKYPITA
LRMKVMMAMTYPATA

SEQ ID NO: 239912 - protein, 15 aa, Artificial Sequence
  Description of Artificial Sequence: Synthetic peptide
  Seed: LRMKWMMAMKYPITA
LRMKVMMAMTYPCTA

SEQ ID NO: 239913 - protein, 15 aa, Artificial Sequence
  Description of Artificial Sequence: Synthetic peptide
  Seed: LRMKWMMAMKYPITA
LRMKVMMAMTYPETA

SEQ ID NO: 239914 - protein, 15 aa, Artificial Sequence
  Description of Artificial Sequence: Synthetic peptide
  Seed: LRMKWMMAMKYPITA
LRMKVMMAMTYPFTA

SEQ ID NO: 239915 - protein, 15 aa, Artificial Sequence
  Description of Artificial Sequence: Synthetic peptide
  Seed: LRMKWMMAMKYPITA
LRMKVMMAMTYPGTA

SEQ ID NO: 239916 - protein, 15 aa, Artificial Sequence
  Description of Artificial Sequence: Synthetic peptide
  Seed: LRMKWMMAMKYPITA
LRMKVMMAMTYPHTA

SEQ ID NO: 239917 - protein, 15 aa, Artificial Sequence
  Description of Artificial Sequence: Synthetic peptide
  Seed: LRMKWMMAMKYPITA
LRMKVMMAMTYPITA

SEQ ID NO: 239918 - protein, 15 aa, Artificial Sequence
  Description of Artificial Sequence: Synthetic peptide
  Seed: LRMKWMMAMKYPITA
LRMKVMMAMTYPLTA

SEQ ID NO: 239919 - protein, 15 aa, Artificial Sequence
  Description of Artificial Sequence: Synthetic peptide
  Seed: LRMKWMMAMKYPITA
LRMKVMMAMTYPMTA

SEQ ID NO: 239920 - protein, 15 aa, Artificial Sequence
  Description of Artificial Sequence: Synthetic peptide
  Seed: LRMKWMMAMKYPITA
LRMKVMMAMTYPNTA

SEQ ID NO: 239921 - protein, 15 aa, Artificial Sequence
  Description of Artificial Sequence: Synthetic peptide
  Seed: LRMKWMMAMKYPITA
LRMKVMMAMTYPPTA

SEQ ID NO: 239922 - protein, 15 aa, Artificial Sequence
  Description of Artificial Sequence: Synthetic peptide
  Seed: LRMKWMMAMKYPITA
LRMKVMMAMTYPQTA

SEQ ID NO: 239923 - protein, 15 aa, Artificial Sequence
  Description of Artificial Sequence: Synthetic peptide
  Seed: LRMKWMMAMKYPITA
LRMKVMMAMTYPRTA

SEQ ID NO: 239924 - protein, 15 aa, Artificial Sequence
  Description of Artificial Sequence: Synthetic peptide
  Seed: LRMKWMMAMKYPITA
LRMKVMMAMTYPSTA

SEQ ID NO: 239925 - protein, 15 aa, Artificial Sequence
  Description of Artificial Sequence: Synthetic peptide
  Seed: LRMKWMMAMKYPITA
LRMKVMMAMTYPTTA

SEQ ID NO: 239926 - protein, 15 aa, Artificial Sequence
  Description of Artificial Sequence: Synthetic peptide
  Seed: LRMKWMMAMKYPITA
LRMKVMMAMTYPVTA

SEQ ID NO: 239927 - protein, 15 aa, Artificial Sequence
  Description of Artificial Sequence: Synthetic peptide
  Seed: LRMKWMMAMKYPITA
LRMKVMMAMTYPYTA

SEQ ID NO: 239928 - protein, 15 aa, Artificial Sequence
  Description of Artificial Sequence: Synthetic peptide
  Seed: LRMKWMMAMKYPITA
LRMKVMMAMVYPATA

SEQ ID NO: 239929 - protein, 15 aa, Artificial Sequence
  Description of Artificial Sequence: Synthetic peptide
  Seed: LRMKWMMAMKYPITA
LRMKVMMAMVYPCTA

SEQ ID NO: 239930 - protein, 15 aa, Artificial Sequence
  Description of Artificial Sequence: Synthetic peptide
  Seed: LRMKWMMAMKYPITA
LRMKVMMAMVYPETA

SEQ ID NO: 239931 - protein, 15 aa, Artificial Sequence
  Description of Artificial Sequence: Synthetic peptide
  Seed: LRMKWMMAMKYPITA
LRMKVMMAMVYPGTA

SEQ ID NO: 239932 - protein, 15 aa, Artificial Sequence
  Description of Artificial Sequence: Synthetic peptide
  Seed: LRMKWMMAMKYPITA
LRMKVMMAMVYPHTA

SEQ ID NO: 239933 - protein, 15 aa, Artificial Sequence
  Description of Artificial Sequence: Synthetic peptide
  Seed: LRMKWMMAMKYPITA
LRMKVMMAMVYPITA

SEQ ID NO: 239934 - protein, 15 aa, Artificial Sequence
  Description of Artificial Sequence: Synthetic peptide
  Seed: LRMKWMMAMKYPITA
LRMKVMMAMVYPLTA

SEQ ID NO: 239935 - protein, 15 aa, Artificial Sequence
  Description of Artificial Sequence: Synthetic peptide
  Seed: LRMKWMMAMKYPITA
LRMKVMMAMVYPMTA

SEQ ID NO: 239936 - protein, 15 aa, Artificial Sequence
  Description of Artificial Sequence: Synthetic peptide
  Seed: LRMKWMMAMKYPITA
LRMKVMMAMVYPNTA

SEQ ID NO: 239937 - protein, 15 aa, Artificial Sequence
  Description of Artificial Sequence: Synthetic peptide
  Seed: LRMKWMMAMKYPITA
LRMKVMMAMVYPQTA

SEQ ID NO: 239938 - protein, 15 aa, Artificial Sequence
  Description of Artificial Sequence: Synthetic peptide
  Seed: LRMKWMMAMKYPITA
LRMKVMMAMVYPRTA

SEQ ID NO: 239939 - protein, 15 aa, Artificial Sequence
  Description of Artificial Sequence: Synthetic peptide
  Seed: LRMKWMMAMKYPITA
LRMKVMMAMVYPSTA

SEQ ID NO: 239940 - protein, 15 aa, Artificial Sequence
  Description of Artificial Sequence: Synthetic peptide
  Seed: LRMKWMMAMKYPITA
LRMKVMMAMVYPTTA

SEQ ID NO: 239941 - protein, 15 aa, Artificial Sequence
  Description of Artificial Sequence: Synthetic peptide
  Seed: LRMKWMMAMKYPITA
LRMKVMMAMVYPVTA

SEQ ID NO: 239942 - protein, 15 aa, Artificial Sequence
  Description of Artificial Sequence: Synthetic peptide
  Seed: LRMKWMMAMKYPITA
LRMKVMMAMVYPYTA

SEQ ID NO: 239943 - protein, 15 aa, Artificial Sequence
  Description of Artificial Sequence: Synthetic peptide
  Seed: LRMKWMMAMKYPITA
LRMKVMMCMAYPATA

SEQ ID NO: 239944 - protein, 15 aa, Artificial Sequence
  Description of Artificial Sequence: Synthetic peptide
  Seed: LRMKWMMAMKYPITA
LRMKVMMCMAYPITA

SEQ ID NO: 239945 - protein, 15 aa, Artificial Sequence
  Description of Artificial Sequence: Synthetic peptide
  Seed: LRMKWMMAMKYPITA
LRMKVMMCMAYPLTA

SEQ ID NO: 239946 - protein, 15 aa, Artificial Sequence
  Description of Artificial Sequence: Synthetic peptide
  Seed: LRMKWMMAMKYPITA
LRMKVMMCMAYPMTA

SEQ ID NO: 239947 - protein, 15 aa, Artificial Sequence
  Description of Artificial Sequence: Synthetic peptide
  Seed: LRMKWMMAMKYPITA
LRMKVMMCMAYPSTA

SEQ ID NO: 239948 - protein, 15 aa, Artificial Sequence
  Description of Artificial Sequence: Synthetic peptide
  Seed: LRMKWMMAMKYPITA
LRMKVMMCMAYPTTA

SEQ ID NO: 239949 - protein, 15 aa, Artificial Sequence
  Description of Artificial Sequence: Synthetic peptide
  Seed: LRMKWMMAMKYPITA
LRMKVMMCMAYPVTA

SEQ ID NO: 239950 - protein, 15 aa, Artificial Sequence
  Description of Artificial Sequence: Synthetic peptide
  Seed: LRMKWMMAMKYPITA
LRMKVMMCMGYPATA

SEQ ID NO: 239951 - protein, 15 aa, Artificial Sequence
  Description of Artificial Sequence: Synthetic peptide
  Seed: LRMKWMMAMKYPITA
LRMKVMMCMGYPITA

SEQ ID NO: 239952 - protein, 15 aa, Artificial Sequence
  Description of Artificial Sequence: Synthetic peptide
  Seed: LRMKWMMAMKYPITA
LRMKVMMCMGYPLTA

SEQ ID NO: 239953 - protein, 15 aa, Artificial Sequence
  Description of Artificial Sequence: Synthetic peptide
  Seed: LRMKWMMAMKYPITA
LRMKVMMCMGYPMTA

SEQ ID NO: 239954 - protein, 15 aa, Artificial Sequence
  Description of Artificial Sequence: Synthetic peptide
  Seed: LRMKWMMAMKYPITA
LRMKVMMCMGYPVTA

SEQ ID NO: 239955 - protein, 15 aa, Artificial Sequence
  Description of Artificial Sequence: Synthetic peptide
  Seed: LRMKWMMAMKYPITA
LRMKVMMCMKYPATA

SEQ ID NO: 239956 - protein, 15 aa, Artificial Sequence
  Description of Artificial Sequence: Synthetic peptide
  Seed: LRMKWMMAMKYPITA
LRMKVMMCMKYPGTA

SEQ ID NO: 239957 - protein, 15 aa, Artificial Sequence
  Description of Artificial Sequence: Synthetic peptide
  Seed: LRMKWMMAMKYPITA
LRMKVMMCMKYPHTA

SEQ ID NO: 239958 - protein, 15 aa, Artificial Sequence
  Description of Artificial Sequence: Synthetic peptide
  Seed: LRMKWMMAMKYPITA
LRMKVMMCMKYPLTA

SEQ ID NO: 239959 - protein, 15 aa, Artificial Sequence
  Description of Artificial Sequence: Synthetic peptide
  Seed: LRMKWMMAMKYPITA
LRMKVMMCMKYPQTA

SEQ ID NO: 239960 - protein, 15 aa, Artificial Sequence
  Description of Artificial Sequence: Synthetic peptide
  Seed: LRMKWMMAMKYPITA
LRMKVMMCMKYPRTA

SEQ ID NO: 239961 - protein, 15 aa, Artificial Sequence
  Description of Artificial Sequence: Synthetic peptide
  Seed: LRMKWMMAMKYPITA
LRMKVMMCMKYPSTA

SEQ ID NO: 239962 - protein, 15 aa, Artificial Sequence
  Description of Artificial Sequence: Synthetic peptide
  Seed: LRMKWMMAMKYPITA
LRMKVMMCMKYPTTA

SEQ ID NO: 239963 - protein, 15 aa, Artificial Sequence
  Description of Artificial Sequence: Synthetic peptide
  Seed: LRMKWMMAMKYPITA
LRMKVMMCMKYPVTA

SEQ ID NO: 239964 - protein, 15 aa, Artificial Sequence
  Description of Artificial Sequence: Synthetic peptide
  Seed: LRMKWMMAMKYPITA
LRMKVMMCMNYPVTA

SEQ ID NO: 239965 - protein, 15 aa, Artificial Sequence
  Description of Artificial Sequence: Synthetic peptide
  Seed: LRMKWMMAMKYPITA
LRMKVMMCMPYPATA

SEQ ID NO: 239966 - protein, 15 aa, Artificial Sequence
  Description of Artificial Sequence: Synthetic peptide
  Seed: LRMKWMMAMKYPITA
LRMKVMMCMPYPITA

SEQ ID NO: 239967 - protein, 15 aa, Artificial Sequence
  Description of Artificial Sequence: Synthetic peptide
  Seed: LRMKWMMAMKYPITA
LRMKVMMCMPYPLTA

SEQ ID NO: 239968 - protein, 15 aa, Artificial Sequence
  Description of Artificial Sequence: Synthetic peptide
  Seed: LRMKWMMAMKYPITA
LRMKVMMCMPYPMTA

SEQ ID NO: 239969 - protein, 15 aa, Artificial Sequence
  Description of Artificial Sequence: Synthetic peptide
  Seed: LRMKWMMAMKYPITA
LRMKVMMCMPYPVTA

SEQ ID NO: 239970 - protein, 15 aa, Artificial Sequence
  Description of Artificial Sequence: Synthetic peptide
  Seed: LRMKWMMAMKYPITA
LRMKVMMCMRYPATA

SEQ ID NO: 239971 - protein, 15 aa, Artificial Sequence
  Description of Artificial Sequence: Synthetic peptide
  Seed: LRMKWMMAMKYPITA
LRMKVMMCMRYPFTA

SEQ ID NO: 239972 - protein, 15 aa, Artificial Sequence
  Description of Artificial Sequence: Synthetic peptide
  Seed: LRMKWMMAMKYPITA
LRMKVMMCMRYPGTA

SEQ ID NO: 239973 - protein, 15 aa, Artificial Sequence
  Description of Artificial Sequence: Synthetic peptide
  Seed: LRMKWMMAMKYPITA
LRMKVMMCMRYPHTA

SEQ ID NO: 239974 - protein, 15 aa, Artificial Sequence
  Description of Artificial Sequence: Synthetic peptide
  Seed: LRMKWMMAMKYPITA
LRMKVMMCMRYPITA

SEQ ID NO: 239975 - protein, 15 aa, Artificial Sequence
  Description of Artificial Sequence: Synthetic peptide
  Seed: LRMKWMMAMKYPITA
LRMKVMMCMRYPKTA

SEQ ID NO: 239976 - protein, 15 aa, Artificial Sequence
  Description of Artificial Sequence: Synthetic peptide
  Seed: LRMKWMMAMKYPITA
LRMKVMMCMRYPLTA

SEQ ID NO: 239977 - protein, 15 aa, Artificial Sequence
  Description of Artificial Sequence: Synthetic peptide
  Seed: LRMKWMMAMKYPITA
LRMKVMMCMRYPMTA

SEQ ID NO: 239978 - protein, 15 aa, Artificial Sequence
  Description of Artificial Sequence: Synthetic peptide
  Seed: LRMKWMMAMKYPITA
LRMKVMMCMRYPNTA

SEQ ID NO: 239979 - protein, 15 aa, Artificial Sequence
  Description of Artificial Sequence: Synthetic peptide
  Seed: LRMKWMMAMKYPITA
LRMKVMMCMRYPQTA

SEQ ID NO: 239980 - protein, 15 aa, Artificial Sequence
  Description of Artificial Sequence: Synthetic peptide
  Seed: LRMKWMMAMKYPITA
LRMKVMMCMRYPRTA

SEQ ID NO: 239981 - protein, 15 aa, Artificial Sequence
  Description of Artificial Sequence: Synthetic peptide
  Seed: LRMKWMMAMKYPITA
LRMKVMMCMRYPSTA

SEQ ID NO: 239982 - protein, 15 aa, Artificial Sequence
  Description of Artificial Sequence: Synthetic peptide
  Seed: LRMKWMMAMKYPITA
LRMKVMMCMRYPTTA

SEQ ID NO: 239983 - protein, 15 aa, Artificial Sequence
  Description of Artificial Sequence: Synthetic peptide
  Seed: LRMKWMMAMKYPITA
LRMKVMMCMRYPVTA

SEQ ID NO: 239984 - protein, 15 aa, Artificial Sequence
  Description of Artificial Sequence: Synthetic peptide
  Seed: LRMKWMMAMKYPITA
LRMKVMMCMRYPYTA

SEQ ID NO: 239985 - protein, 15 aa, Artificial Sequence
  Description of Artificial Sequence: Synthetic peptide
  Seed: LRMKWMMAMKYPITA
LRMKVMMCMSYPATA

SEQ ID NO: 239986 - protein, 15 aa, Artificial Sequence
  Description of Artificial Sequence: Synthetic peptide
  Seed: LRMKWMMAMKYPITA
LRMKVMMCMSYPITA

SEQ ID NO: 239987 - protein, 15 aa, Artificial Sequence
  Description of Artificial Sequence: Synthetic peptide
  Seed: LRMKWMMAMKYPITA
LRMKVMMCMSYPLTA

SEQ ID NO: 239988 - protein, 15 aa, Artificial Sequence
  Description of Artificial Sequence: Synthetic peptide
  Seed: LRMKWMMAMKYPITA
LRMKVMMCMSYPMTA

SEQ ID NO: 239989 - protein, 15 aa, Artificial Sequence
  Description of Artificial Sequence: Synthetic peptide
  Seed: LRMKWMMAMKYPITA
LRMKVMMCMSYPTTA

SEQ ID NO: 239990 - protein, 15 aa, Artificial Sequence
  Description of Artificial Sequence: Synthetic peptide
  Seed: LRMKWMMAMKYPITA
LRMKVMMCMSYPVTA

SEQ ID NO: 239991 - protein, 15 aa, Artificial Sequence
  Description of Artificial Sequence: Synthetic peptide
  Seed: LRMKWMMAMKYPITA
LRMKVMMCMTYPATA

SEQ ID NO: 239992 - protein, 15 aa, Artificial Sequence
  Description of Artificial Sequence: Synthetic peptide
  Seed: LRMKWMMAMKYPITA
LRMKVMMCMTYPITA

SEQ ID NO: 239993 - protein, 15 aa, Artificial Sequence
  Description of Artificial Sequence: Synthetic peptide
  Seed: LRMKWMMAMKYPITA
LRMKVMMCMTYPLTA

SEQ ID NO: 239994 - protein, 15 aa, Artificial Sequence
  Description of Artificial Sequence: Synthetic peptide
  Seed: LRMKWMMAMKYPITA
LRMKVMMCMTYPVTA

SEQ ID NO: 239995 - protein, 15 aa, Artificial Sequence
  Description of Artificial Sequence: Synthetic peptide
  Seed: LRMKWMMAMKYPITA
LRMKVMMDMAYPATA

SEQ ID NO: 239996 - protein, 15 aa, Artificial Sequence
  Description of Artificial Sequence: Synthetic peptide
  Seed: LRMKWMMAMKYPITA
LRMKVMMDMAYPFTA

SEQ ID NO: 239997 - protein, 15 aa, Artificial Sequence
  Description of Artificial Sequence: Synthetic peptide
  Seed: LRMKWMMAMKYPITA
LRMKVMMDMAYPITA

SEQ ID NO: 239998 - protein, 15 aa, Artificial Sequence
  Description of Artificial Sequence: Synthetic peptide
  Seed: LRMKWMMAMKYPITA
LRMKVMMDMAYPLTA

SEQ ID NO: 239999 - protein, 15 aa, Artificial Sequence
  Description of Artificial Sequence: Synthetic peptide
  Seed: LRMKWMMAMKYPITA
LRMKVMMDMAYPMTA

SEQ ID NO: 240000 - protein, 15 aa, Artificial Sequence
  Description of Artificial Sequence: Synthetic peptide
  Seed: LRMKWMMAMKYPITA
LRMKVMMDMAYPRTA

SEQ ID NO: 240001 - protein, 15 aa, Artificial Sequence
  Description of Artificial Sequence: Synthetic peptide
  Seed: LRMKWMMAMKYPITA
LRMKVMMDMAYPVTA

SEQ ID NO: 240002 - protein, 15 aa, Artificial Sequence
  Description of Artificial Sequence: Synthetic peptide
  Seed: LRMKWMMAMKYPITA
LRMKVMMDMAYPYTA

SEQ ID NO: 240003 - protein, 15 aa, Artificial Sequence
  Description of Artificial Sequence: Synthetic peptide
  Seed: LRMKWMMAMKYPITA
LRMKVMMDMFYPLTA

SEQ ID NO: 240004 - protein, 15 aa, Artificial Sequence
  Description of Artificial Sequence: Synthetic peptide
  Seed: LRMKWMMAMKYPITA
LRMKVMMDMFYPVTA

SEQ ID NO: 240005 - protein, 15 aa, Artificial Sequence
  Description of Artificial Sequence: Synthetic peptide
  Seed: LRMKWMMAMKYPITA
LRMKVMMDMGYPFTA

SEQ ID NO: 240006 - protein, 15 aa, Artificial Sequence
  Description of Artificial Sequence: Synthetic peptide
  Seed: LRMKWMMAMKYPITA
LRMKVMMDMGYPITA

SEQ ID NO: 240007 - protein, 15 aa, Artificial Sequence
  Description of Artificial Sequence: Synthetic peptide
  Seed: LRMKWMMAMKYPITA
LRMKVMMDMGYPMTA

SEQ ID NO: 240008 - protein, 15 aa, Artificial Sequence
  Description of Artificial Sequence: Synthetic peptide
  Seed: LRMKWMMAMKYPITA
LRMKVMMDMGYPVTA

SEQ ID NO: 240009 - protein, 15 aa, Artificial Sequence
  Description of Artificial Sequence: Synthetic peptide
  Seed: LRMKWMMAMKYPITA
LRMKVMMDMGYPYTA

SEQ ID NO: 240010 - protein, 15 aa, Artificial Sequence
  Description of Artificial Sequence: Synthetic peptide
  Seed: LRMKWMMAMKYPITA
LRMKVMMDMHYPFTA

SEQ ID NO: 240011 - protein, 15 aa, Artificial Sequence
  Description of Artificial Sequence: Synthetic peptide
  Seed: LRMKWMMAMKYPITA
LRMKVMMDMHYPLTA

SEQ ID NO: 240012 - protein, 15 aa, Artificial Sequence
  Description of Artificial Sequence: Synthetic peptide
  Seed: LRMKWMMAMKYPITA
LRMKVMMDMHYPMTA

SEQ ID NO: 240013 - protein, 15 aa, Artificial Sequence
  Description of Artificial Sequence: Synthetic peptide
  Seed: LRMKWMMAMKYPITA
LRMKVMMDMHYPRTA

SEQ ID NO: 240014 - protein, 15 aa, Artificial Sequence
  Description of Artificial Sequence: Synthetic peptide
  Seed: LRMKWMMAMKYPITA
LRMKVMMDMHYPVTA

SEQ ID NO: 240015 - protein, 15 aa, Artificial Sequence
  Description of Artificial Sequence: Synthetic peptide
  Seed: LRMKWMMAMKYPITA
LRMKVMMDMHYPYTA

SEQ ID NO: 240016 - protein, 15 aa, Artificial Sequence
  Description of Artificial Sequence: Synthetic peptide
  Seed: LRMKWMMAMKYPITA
LRMKVMMDMIYPFTA

SEQ ID NO: 240017 - protein, 15 aa, Artificial Sequence
  Description of Artificial Sequence: Synthetic peptide
  Seed: LRMKWMMAMKYPITA
LRMKVMMDMIYPITA

SEQ ID NO: 240018 - protein, 15 aa, Artificial Sequence
  Description of Artificial Sequence: Synthetic peptide
  Seed: LRMKWMMAMKYPITA
LRMKVMMDMIYPRTA

SEQ ID NO: 240019 - protein, 15 aa, Artificial Sequence
  Description of Artificial Sequence: Synthetic peptide
  Seed: LRMKWMMAMKYPITA
LRMKVMMDMIYPVTA

SEQ ID NO: 240020 - protein, 15 aa, Artificial Sequence
  Description of Artificial Sequence: Synthetic peptide
  Seed: LRMKWMMAMKYPITA
LRMKVMMDMIYPYTA

SEQ ID NO: 240021 - protein, 15 aa, Artificial Sequence
  Description of Artificial Sequence: Synthetic peptide
  Seed: LRMKWMMAMKYPITA
LRMKVMMDMKYPATA

SEQ ID NO: 240022 - protein, 15 aa, Artificial Sequence
  Description of Artificial Sequence: Synthetic peptide
  Seed: LRMKWMMAMKYPITA
LRMKVMMDMKYPFTA

SEQ ID NO: 240023 - protein, 15 aa, Artificial Sequence
  Description of Artificial Sequence: Synthetic peptide
  Seed: LRMKWMMAMKYPITA
LRMKVMMDMKYPHTA

SEQ ID NO: 240024 - protein, 15 aa, Artificial Sequence
  Description of Artificial Sequence: Synthetic peptide
  Seed: LRMKWMMAMKYPITA
LRMKVMMDMKYPITA

SEQ ID NO: 240025 - protein, 15 aa, Artificial Sequence
  Description of Artificial Sequence: Synthetic peptide
  Seed: LRMKWMMAMKYPITA
LRMKVMMDMKYPLTA

SEQ ID NO: 240026 - protein, 15 aa, Artificial Sequence
  Description of Artificial Sequence: Synthetic peptide
  Seed: LRMKWMMAMKYPITA
LRMKVMMDMKYPMTA

SEQ ID NO: 240027 - protein, 15 aa, Artificial Sequence
  Description of Artificial Sequence: Synthetic peptide
  Seed: LRMKWMMAMKYPITA
LRMKVMMDMKYPQTA

SEQ ID NO: 240028 - protein, 15 aa, Artificial Sequence
  Description of Artificial Sequence: Synthetic peptide
  Seed: LRMKWMMAMKYPITA
LRMKVMMDMKYPRTA

SEQ ID NO: 240029 - protein, 15 aa, Artificial Sequence
  Description of Artificial Sequence: Synthetic peptide
  Seed: LRMKWMMAMKYPITA
LRMKVMMDMKYPSTA

SEQ ID NO: 240030 - protein, 15 aa, Artificial Sequence
  Description of Artificial Sequence: Synthetic peptide
  Seed: LRMKWMMAMKYPITA
LRMKVMMDMKYPTTA

SEQ ID NO: 240031 - protein, 15 aa, Artificial Sequence
  Description of Artificial Sequence: Synthetic peptide
  Seed: LRMKWMMAMKYPITA
LRMKVMMDMKYPVTA

SEQ ID NO: 240032 - protein, 15 aa, Artificial Sequence
  Description of Artificial Sequence: Synthetic peptide
  Seed: LRMKWMMAMKYPITA
LRMKVMMDMKYPWTA

SEQ ID NO: 240033 - protein, 15 aa, Artificial Sequence
  Description of Artificial Sequence: Synthetic peptide
  Seed: LRMKWMMAMKYPITA
LRMKVMMDMKYPYTA

SEQ ID NO: 240034 - protein, 15 aa, Artificial Sequence
  Description of Artificial Sequence: Synthetic peptide
  Seed: LRMKWMMAMKYPITA
LRMKVMMDMNYPATA

SEQ ID NO: 240035 - protein, 15 aa, Artificial Sequence
  Description of Artificial Sequence: Synthetic peptide
  Seed: LRMKWMMAMKYPITA
LRMKVMMDMNYPFTA

SEQ ID NO: 240036 - protein, 15 aa, Artificial Sequence
  Description of Artificial Sequence: Synthetic peptide
  Seed: LRMKWMMAMKYPITA
LRMKVMMDMNYPITA

SEQ ID NO: 240037 - protein, 15 aa, Artificial Sequence
  Description of Artificial Sequence: Synthetic peptide
  Seed: LRMKWMMAMKYPITA
LRMKVMMDMNYPLTA

SEQ ID NO: 240038 - protein, 15 aa, Artificial Sequence
  Description of Artificial Sequence: Synthetic peptide
  Seed: LRMKWMMAMKYPITA
LRMKVMMDMNYPMTA

SEQ ID NO: 240039 - protein, 15 aa, Artificial Sequence
  Description of Artificial Sequence: Synthetic peptide
  Seed: LRMKWMMAMKYPITA
LRMKVMMDMNYPRTA

SEQ ID NO: 240040 - protein, 15 aa, Artificial Sequence
  Description of Artificial Sequence: Synthetic peptide
  Seed: LRMKWMMAMKYPITA
LRMKVMMDMNYPSTA

SEQ ID NO: 240041 - protein, 15 aa, Artificial Sequence
  Description of Artificial Sequence: Synthetic peptide
  Seed: LRMKWMMAMKYPITA
LRMKVMMDMNYPVTA

SEQ ID NO: 240042 - protein, 15 aa, Artificial Sequence
  Description of Artificial Sequence: Synthetic peptide
  Seed: LRMKWMMAMKYPITA
LRMKVMMDMNYPYTA

SEQ ID NO: 240043 - protein, 15 aa, Artificial Sequence
  Description of Artificial Sequence: Synthetic peptide
  Seed: LRMKWMMAMKYPITA
LRMKVMMDMPYPFTA

SEQ ID NO: 240044 - protein, 15 aa, Artificial Sequence
  Description of Artificial Sequence: Synthetic peptide
  Seed: LRMKWMMAMKYPITA
LRMKVMMDMPYPITA

SEQ ID NO: 240045 - protein, 15 aa, Artificial Sequence
  Description of Artificial Sequence: Synthetic peptide
  Seed: LRMKWMMAMKYPITA
LRMKVMMDMPYPLTA

SEQ ID NO: 240046 - protein, 15 aa, Artificial Sequence
  Description of Artificial Sequence: Synthetic peptide
  Seed: LRMKWMMAMKYPITA
LRMKVMMDMPYPMTA

SEQ ID NO: 240047 - protein, 15 aa, Artificial Sequence
  Description of Artificial Sequence: Synthetic peptide
  Seed: LRMKWMMAMKYPITA
LRMKVMMDMPYPRTA

SEQ ID NO: 240048 - protein, 15 aa, Artificial Sequence
  Description of Artificial Sequence: Synthetic peptide
  Seed: LRMKWMMAMKYPITA
LRMKVMMDMPYPVTA

SEQ ID NO: 240049 - protein, 15 aa, Artificial Sequence
  Description of Artificial Sequence: Synthetic peptide
  Seed: LRMKWMMAMKYPITA
LRMKVMMDMPYPYTA

SEQ ID NO: 240050 - protein, 15 aa, Artificial Sequence
  Description of Artificial Sequence: Synthetic peptide
  Seed: LRMKWMMAMKYPITA
LRMKVMMDMRYPATA

SEQ ID NO: 240051 - protein, 15 aa, Artificial Sequence
  Description of Artificial Sequence: Synthetic peptide
  Seed: LRMKWMMAMKYPITA
LRMKVMMDMRYPFTA

SEQ ID NO: 240052 - protein, 15 aa, Artificial Sequence
  Description of Artificial Sequence: Synthetic peptide
  Seed: LRMKWMMAMKYPITA
LRMKVMMDMRYPHTA

SEQ ID NO: 240053 - protein, 15 aa, Artificial Sequence
  Description of Artificial Sequence: Synthetic peptide
  Seed: LRMKWMMAMKYPITA
LRMKVMMDMRYPITA

SEQ ID NO: 240054 - protein, 15 aa, Artificial Sequence
  Description of Artificial Sequence: Synthetic peptide
  Seed: LRMKWMMAMKYPITA
LRMKVMMDMRYPLTA

SEQ ID NO: 240055 - protein, 15 aa, Artificial Sequence
  Description of Artificial Sequence: Synthetic peptide
  Seed: LRMKWMMAMKYPITA
LRMKVMMDMRYPMTA

SEQ ID NO: 240056 - protein, 15 aa, Artificial Sequence
  Description of Artificial Sequence: Synthetic peptide
  Seed: LRMKWMMAMKYPITA
LRMKVMMDMRYPQTA

SEQ ID NO: 240057 - protein, 15 aa, Artificial Sequence
  Description of Artificial Sequence: Synthetic peptide
  Seed: LRMKWMMAMKYPITA
LRMKVMMDMRYPRTA

SEQ ID NO: 240058 - protein, 15 aa, Artificial Sequence
  Description of Artificial Sequence: Synthetic peptide
  Seed: LRMKWMMAMKYPITA
LRMKVMMDMRYPSTA

SEQ ID NO: 240059 - protein, 15 aa, Artificial Sequence
  Description of Artificial Sequence: Synthetic peptide
  Seed: LRMKWMMAMKYPITA
LRMKVMMDMRYPTTA

SEQ ID NO: 240060 - protein, 15 aa, Artificial Sequence
  Description of Artificial Sequence: Synthetic peptide
  Seed: LRMKWMMAMKYPITA
LRMKVMMDMRYPVTA

SEQ ID NO: 240061 - protein, 15 aa, Artificial Sequence
  Description of Artificial Sequence: Synthetic peptide
  Seed: LRMKWMMAMKYPITA
LRMKVMMDMRYPYTA

SEQ ID NO: 240062 - protein, 15 aa, Artificial Sequence
  Description of Artificial Sequence: Synthetic peptide
  Seed: LRMKWMMAMKYPITA
LRMKVMMDMSYPATA

SEQ ID NO: 240063 - protein, 15 aa, Artificial Sequence
  Description of Artificial Sequence: Synthetic peptide
  Seed: LRMKWMMAMKYPITA
LRMKVMMDMSYPFTA

SEQ ID NO: 240064 - protein, 15 aa, Artificial Sequence
  Description of Artificial Sequence: Synthetic peptide
  Seed: LRMKWMMAMKYPITA
LRMKVMMDMSYPITA

SEQ ID NO: 240065 - protein, 15 aa, Artificial Sequence
  Description of Artificial Sequence: Synthetic peptide
  Seed: LRMKWMMAMKYPITA
LRMKVMMDMSYPLTA

SEQ ID NO: 240066 - protein, 15 aa, Artificial Sequence
  Description of Artificial Sequence: Synthetic peptide
  Seed: LRMKWMMAMKYPITA
LRMKVMMDMSYPMTA

SEQ ID NO: 240067 - protein, 15 aa, Artificial Sequence
  Description of Artificial Sequence: Synthetic peptide
  Seed: LRMKWMMAMKYPITA
LRMKVMMDMSYPRTA

SEQ ID NO: 240068 - protein, 15 aa, Artificial Sequence
  Description of Artificial Sequence: Synthetic peptide
  Seed: LRMKWMMAMKYPITA
LRMKVMMDMSYPVTA

SEQ ID NO: 240069 - protein, 15 aa, Artificial Sequence
  Description of Artificial Sequence: Synthetic peptide
  Seed: LRMKWMMAMKYPITA
LRMKVMMDMSYPYTA

SEQ ID NO: 240070 - protein, 15 aa, Artificial Sequence
  Description of Artificial Sequence: Synthetic peptide
  Seed: LRMKWMMAMKYPITA
LRMKVMMDMTYPATA

SEQ ID NO: 240071 - protein, 15 aa, Artificial Sequence
  Description of Artificial Sequence: Synthetic peptide
  Seed: LRMKWMMAMKYPITA
LRMKVMMDMTYPFTA

SEQ ID NO: 240072 - protein, 15 aa, Artificial Sequence
  Description of Artificial Sequence: Synthetic peptide
  Seed: LRMKWMMAMKYPITA
LRMKVMMDMTYPITA

SEQ ID NO: 240073 - protein, 15 aa, Artificial Sequence
  Description of Artificial Sequence: Synthetic peptide
  Seed: LRMKWMMAMKYPITA
LRMKVMMDMTYPLTA

SEQ ID NO: 240074 - protein, 15 aa, Artificial Sequence
  Description of Artificial Sequence: Synthetic peptide
  Seed: LRMKWMMAMKYPITA
LRMKVMMDMTYPMTA

SEQ ID NO: 240075 - protein, 15 aa, Artificial Sequence
  Description of Artificial Sequence: Synthetic peptide
  Seed: LRMKWMMAMKYPITA
LRMKVMMDMTYPRTA

SEQ ID NO: 240076 - protein, 15 aa, Artificial Sequence
  Description of Artificial Sequence: Synthetic peptide
  Seed: LRMKWMMAMKYPITA
LRMKVMMDMTYPSTA

SEQ ID NO: 240077 - protein, 15 aa, Artificial Sequence
  Description of Artificial Sequence: Synthetic peptide
  Seed: LRMKWMMAMKYPITA
LRMKVMMDMTYPVTA

SEQ ID NO: 240078 - protein, 15 aa, Artificial Sequence
  Description of Artificial Sequence: Synthetic peptide
  Seed: LRMKWMMAMKYPITA
LRMKVMMDMTYPYTA

SEQ ID NO: 240079 - protein, 15 aa, Artificial Sequence
  Description of Artificial Sequence: Synthetic peptide
  Seed: LRMKWMMAMKYPITA
LRMKVMMDMVYPFTA

SEQ ID NO: 240080 - protein, 15 aa, Artificial Sequence
  Description of Artificial Sequence: Synthetic peptide
  Seed: LRMKWMMAMKYPITA
LRMKVMMDMVYPITA

SEQ ID NO: 240081 - protein, 15 aa, Artificial Sequence
  Description of Artificial Sequence: Synthetic peptide
  Seed: LRMKWMMAMKYPITA
LRMKVMMDMVYPLTA

SEQ ID NO: 240082 - protein, 15 aa, Artificial Sequence
  Description of Artificial Sequence: Synthetic peptide
  Seed: LRMKWMMAMKYPITA
LRMKVMMDMVYPMTA

SEQ ID NO: 240083 - protein, 15 aa, Artificial Sequence
  Description of Artificial Sequence: Synthetic peptide
  Seed: LRMKWMMAMKYPITA
LRMKVMMDMVYPRTA

SEQ ID NO: 240084 - protein, 15 aa, Artificial Sequence
  Description of Artificial Sequence: Synthetic peptide
  Seed: LRMKWMMAMKYPITA
LRMKVMMDMVYPVTA

SEQ ID NO: 240085 - protein, 15 aa, Artificial Sequence
  Description of Artificial Sequence: Synthetic peptide
  Seed: LRMKWMMAMKYPITA
LRMKVMMDMVYPYTA

SEQ ID NO: 240086 - protein, 15 aa, Artificial Sequence
  Description of Artificial Sequence: Synthetic peptide
  Seed: LRMKWMMAMKYPITA
LRMKVMMEMAYPATA

SEQ ID NO: 240087 - protein, 15 aa, Artificial Sequence
  Description of Artificial Sequence: Synthetic peptide
  Seed: LRMKWMMAMKYPITA
LRMKVMMEMAYPCTA

SEQ ID NO: 240088 - protein, 15 aa, Artificial Sequence
  Description of Artificial Sequence: Synthetic peptide
  Seed: LRMKWMMAMKYPITA
LRMKVMMEMAYPFTA

SEQ ID NO: 240089 - protein, 15 aa, Artificial Sequence
  Description of Artificial Sequence: Synthetic peptide
  Seed: LRMKWMMAMKYPITA
LRMKVMMEMAYPGTA

SEQ ID NO: 240090 - protein, 15 aa, Artificial Sequence
  Description of Artificial Sequence: Synthetic peptide
  Seed: LRMKWMMAMKYPITA
LRMKVMMEMAYPITA

SEQ ID NO: 240091 - protein, 15 aa, Artificial Sequence
  Description of Artificial Sequence: Synthetic peptide
  Seed: LRMKWMMAMKYPITA
LRMKVMMEMAYPLTA

SEQ ID NO: 240092 - protein, 15 aa, Artificial Sequence
  Description of Artificial Sequence: Synthetic peptide
  Seed: LRMKWMMAMKYPITA
LRMKVMMEMAYPMTA

SEQ ID NO: 240093 - protein, 15 aa, Artificial Sequence
  Description of Artificial Sequence: Synthetic peptide
  Seed: LRMKWMMAMKYPITA
LRMKVMMEMAYPNTA

SEQ ID NO: 240094 - protein, 15 aa, Artificial Sequence
  Description of Artificial Sequence: Synthetic peptide
  Seed: LRMKWMMAMKYPITA
LRMKVMMEMAYPSTA

SEQ ID NO: 240095 - protein, 15 aa, Artificial Sequence
  Description of Artificial Sequence: Synthetic peptide
  Seed: LRMKWMMAMKYPITA
LRMKVMMEMAYPTTA

SEQ ID NO: 240096 - protein, 15 aa, Artificial Sequence
  Description of Artificial Sequence: Synthetic peptide
  Seed: LRMKWMMAMKYPITA
LRMKVMMEMAYPVTA

SEQ ID NO: 240097 - protein, 15 aa, Artificial Sequence
  Description of Artificial Sequence: Synthetic peptide
  Seed: LRMKWMMAMKYPITA
LRMKVMMEMFYPFTA

SEQ ID NO: 240098 - protein, 15 aa, Artificial Sequence
  Description of Artificial Sequence: Synthetic peptide
  Seed: LRMKWMMAMKYPITA
LRMKVMMEMFYPITA

SEQ ID NO: 240099 - protein, 15 aa, Artificial Sequence
  Description of Artificial Sequence: Synthetic peptide
  Seed: LRMKWMMAMKYPITA
LRMKVMMEMFYPLTA

SEQ ID NO: 240100 - protein, 15 aa, Artificial Sequence
  Description of Artificial Sequence: Synthetic peptide
  Seed: LRMKWMMAMKYPITA
LRMKVMMEMFYPVTA

SEQ ID NO: 240101 - protein, 15 aa, Artificial Sequence
  Description of Artificial Sequence: Synthetic peptide
  Seed: LRMKWMMAMKYPITA
LRMKVMMEMGYPATA

SEQ ID NO: 240102 - protein, 15 aa, Artificial Sequence
  Description of Artificial Sequence: Synthetic peptide
  Seed: LRMKWMMAMKYPITA
LRMKVMMEMGYPGTA

SEQ ID NO: 240103 - protein, 15 aa, Artificial Sequence
  Description of Artificial Sequence: Synthetic peptide
  Seed: LRMKWMMAMKYPITA
LRMKVMMEMGYPITA

SEQ ID NO: 240104 - protein, 15 aa, Artificial Sequence
  Description of Artificial Sequence: Synthetic peptide
  Seed: LRMKWMMAMKYPITA
LRMKVMMEMGYPLTA

SEQ ID NO: 240105 - protein, 15 aa, Artificial Sequence
  Description of Artificial Sequence: Synthetic peptide
  Seed: LRMKWMMAMKYPITA
LRMKVMMEMGYPMTA

SEQ ID NO: 240106 - protein, 15 aa, Artificial Sequence
  Description of Artificial Sequence: Synthetic peptide
  Seed: LRMKWMMAMKYPITA
LRMKVMMEMGYPSTA

SEQ ID NO: 240107 - protein, 15 aa, Artificial Sequence
  Description of Artificial Sequence: Synthetic peptide
  Seed: LRMKWMMAMKYPITA
LRMKVMMEMGYPTTA

SEQ ID NO: 240108 - protein, 15 aa, Artificial Sequence
  Description of Artificial Sequence: Synthetic peptide
  Seed: LRMKWMMAMKYPITA
LRMKVMMEMGYPVTA

SEQ ID NO: 240109 - protein, 15 aa, Artificial Sequence
  Description of Artificial Sequence: Synthetic peptide
  Seed: LRMKWMMAMKYPITA
LRMKVMMEMIYPATA

SEQ ID NO: 240110 - protein, 15 aa, Artificial Sequence
  Description of Artificial Sequence: Synthetic peptide
  Seed: LRMKWMMAMKYPITA
LRMKVMMEMKYPATA

SEQ ID NO: 240111 - protein, 15 aa, Artificial Sequence
  Description of Artificial Sequence: Synthetic peptide
  Seed: LRMKWMMAMKYPITA
LRMKVMMEMKYPSTA

SEQ ID NO: 240112 - protein, 15 aa, Artificial Sequence
  Description of Artificial Sequence: Synthetic peptide
  Seed: LRMKWMMAMKYPITA
LRMKVMMEMNYPATA

SEQ ID NO: 240113 - protein, 15 aa, Artificial Sequence
  Description of Artificial Sequence: Synthetic peptide
  Seed: LRMKWMMAMKYPITA
LRMKVMMEMNYPITA

SEQ ID NO: 240114 - protein, 15 aa, Artificial Sequence
  Description of Artificial Sequence: Synthetic peptide
  Seed: LRMKWMMAMKYPITA
LRMKVMMEMNYPLTA

SEQ ID NO: 240115 - protein, 15 aa, Artificial Sequence
  Description of Artificial Sequence: Synthetic peptide
  Seed: LRMKWMMAMKYPITA
LRMKVMMEMNYPVTA

SEQ ID NO: 240116 - protein, 15 aa, Artificial Sequence
  Description of Artificial Sequence: Synthetic peptide
  Seed: LRMKWMMAMKYPITA
LRMKVMMEMPYPATA

SEQ ID NO: 240117 - protein, 15 aa, Artificial Sequence
  Description of Artificial Sequence: Synthetic peptide
  Seed: LRMKWMMAMKYPITA
LRMKVMMEMPYPITA

SEQ ID NO: 240118 - protein, 15 aa, Artificial Sequence
  Description of Artificial Sequence: Synthetic peptide
  Seed: LRMKWMMAMKYPITA
LRMKVMMEMPYPLTA

SEQ ID NO: 240119 - protein, 15 aa, Artificial Sequence
  Description of Artificial Sequence: Synthetic peptide
  Seed: LRMKWMMAMKYPITA
LRMKVMMEMPYPMTA

SEQ ID NO: 240120 - protein, 15 aa, Artificial Sequence
  Description of Artificial Sequence: Synthetic peptide
  Seed: LRMKWMMAMKYPITA
LRMKVMMEMPYPSTA

SEQ ID NO: 240121 - protein, 15 aa, Artificial Sequence
  Description of Artificial Sequence: Synthetic peptide
  Seed: LRMKWMMAMKYPITA
LRMKVMMEMPYPTTA

SEQ ID NO: 240122 - protein, 15 aa, Artificial Sequence
  Description of Artificial Sequence: Synthetic peptide
  Seed: LRMKWMMAMKYPITA
LRMKVMMEMPYPVTA

SEQ ID NO: 240123 - protein, 15 aa, Artificial Sequence
  Description of Artificial Sequence: Synthetic peptide
  Seed: LRMKWMMAMKYPITA
LRMKVMMEMRYPATA

SEQ ID NO: 240124 - protein, 15 aa, Artificial Sequence
  Description of Artificial Sequence: Synthetic peptide
  Seed: LRMKWMMAMKYPITA
LRMKVMMEMRYPFTA

SEQ ID NO: 240125 - protein, 15 aa, Artificial Sequence
  Description of Artificial Sequence: Synthetic peptide
  Seed: LRMKWMMAMKYPITA
LRMKVMMEMRYPGTA

SEQ ID NO: 240126 - protein, 15 aa, Artificial Sequence
  Description of Artificial Sequence: Synthetic peptide
  Seed: LRMKWMMAMKYPITA
LRMKVMMEMRYPHTA

SEQ ID NO: 240127 - protein, 15 aa, Artificial Sequence
  Description of Artificial Sequence: Synthetic peptide
  Seed: LRMKWMMAMKYPITA
LRMKVMMEMRYPQTA

SEQ ID NO: 240128 - protein, 15 aa, Artificial Sequence
  Description of Artificial Sequence: Synthetic peptide
  Seed: LRMKWMMAMKYPITA
LRMKVMMEMRYPSTA

SEQ ID NO: 240129 - protein, 15 aa, Artificial Sequence
  Description of Artificial Sequence: Synthetic peptide
  Seed: LRMKWMMAMKYPITA
LRMKVMMEMRYPYTA

SEQ ID NO: 240130 - protein, 15 aa, Artificial Sequence
  Description of Artificial Sequence: Synthetic peptide
  Seed: LRMKWMMAMKYPITA
LRMKVMMEMSYPATA

SEQ ID NO: 240131 - protein, 15 aa, Artificial Sequence
  Description of Artificial Sequence: Synthetic peptide
  Seed: LRMKWMMAMKYPITA
LRMKVMMEMSYPITA

SEQ ID NO: 240132 - protein, 15 aa, Artificial Sequence
  Description of Artificial Sequence: Synthetic peptide
  Seed: LRMKWMMAMKYPITA
LRMKVMMEMSYPLTA

SEQ ID NO: 240133 - protein, 15 aa, Artificial Sequence
  Description of Artificial Sequence: Synthetic peptide
  Seed: LRMKWMMAMKYPITA
LRMKVMMEMSYPMTA

SEQ ID NO: 240134 - protein, 15 aa, Artificial Sequence
  Description of Artificial Sequence: Synthetic peptide
  Seed: LRMKWMMAMKYPITA
LRMKVMMEMSYPSTA

SEQ ID NO: 240135 - protein, 15 aa, Artificial Sequence
  Description of Artificial Sequence: Synthetic peptide
  Seed: LRMKWMMAMKYPITA
LRMKVMMEMSYPTTA

SEQ ID NO: 240136 - protein, 15 aa, Artificial Sequence
  Description of Artificial Sequence: Synthetic peptide
  Seed: LRMKWMMAMKYPITA
LRMKVMMEMSYPVTA

SEQ ID NO: 240137 - protein, 15 aa, Artificial Sequence
  Description of Artificial Sequence: Synthetic peptide
  Seed: LRMKWMMAMKYPITA
LRMKVMMEMTYPATA

SEQ ID NO: 240138 - protein, 15 aa, Artificial Sequence
  Description of Artificial Sequence: Synthetic peptide
  Seed: LRMKWMMAMKYPITA
LRMKVMMEMTYPITA

SEQ ID NO: 240139 - protein, 15 aa, Artificial Sequence
  Description of Artificial Sequence: Synthetic peptide
  Seed: LRMKWMMAMKYPITA
LRMKVMMEMTYPLTA

SEQ ID NO: 240140 - protein, 15 aa, Artificial Sequence
  Description of Artificial Sequence: Synthetic peptide
  Seed: LRMKWMMAMKYPITA
LRMKVMMEMTYPMTA

SEQ ID NO: 240141 - protein, 15 aa, Artificial Sequence
  Description of Artificial Sequence: Synthetic peptide
  Seed: LRMKWMMAMKYPITA
LRMKVMMEMTYPVTA

SEQ ID NO: 240142 - protein, 15 aa, Artificial Sequence
  Description of Artificial Sequence: Synthetic peptide
  Seed: LRMKWMMAMKYPITA
LRMKVMMEMVYPATA

SEQ ID NO: 240143 - protein, 15 aa, Artificial Sequence
  Description of Artificial Sequence: Synthetic peptide
  Seed: LRMKWMMAMKYPITA
LRMKVMMEMVYPITA

SEQ ID NO: 240144 - protein, 15 aa, Artificial Sequence
  Description of Artificial Sequence: Synthetic peptide
  Seed: LRMKWMMAMKYPITA
LRMKVMMEMVYPLTA

SEQ ID NO: 240145 - protein, 15 aa, Artificial Sequence
  Description of Artificial Sequence: Synthetic peptide
  Seed: LRMKWMMAMKYPITA
LRMKVMMEMVYPSTA

SEQ ID NO: 240146 - protein, 15 aa, Artificial Sequence
  Description of Artificial Sequence: Synthetic peptide
  Seed: LRMKWMMAMKYPITA
LRMKVMMEMVYPVTA

SEQ ID NO: 240147 - protein, 15 aa, Artificial Sequence
  Description of Artificial Sequence: Synthetic peptide
  Seed: LRMKWMMAMKYPITA
LRMKVMMFMAYPATA

SEQ ID NO: 240148 - protein, 15 aa, Artificial Sequence
  Description of Artificial Sequence: Synthetic peptide
  Seed: LRMKWMMAMKYPITA
LRMKVMMFMAYPFTA

SEQ ID NO: 240149 - protein, 15 aa, Artificial Sequence
  Description of Artificial Sequence: Synthetic peptide
  Seed: LRMKWMMAMKYPITA
LRMKVMMFMAYPITA

SEQ ID NO: 240150 - protein, 15 aa, Artificial Sequence
  Description of Artificial Sequence: Synthetic peptide
  Seed: LRMKWMMAMKYPITA
LRMKVMMFMAYPKTA

SEQ ID NO: 240151 - protein, 15 aa, Artificial Sequence
  Description of Artificial Sequence: Synthetic peptide
  Seed: LRMKWMMAMKYPITA
LRMKVMMFMAYPLTA

SEQ ID NO: 240152 - protein, 15 aa, Artificial Sequence
  Description of Artificial Sequence: Synthetic peptide
  Seed: LRMKWMMAMKYPITA
LRMKVMMFMAYPMTA

SEQ ID NO: 240153 - protein, 15 aa, Artificial Sequence
  Description of Artificial Sequence: Synthetic peptide
  Seed: LRMKWMMAMKYPITA
LRMKVMMFMAYPNTA

SEQ ID NO: 240154 - protein, 15 aa, Artificial Sequence
  Description of Artificial Sequence: Synthetic peptide
  Seed: LRMKWMMAMKYPITA
LRMKVMMFMAYPRTA

SEQ ID NO: 240155 - protein, 15 aa, Artificial Sequence
  Description of Artificial Sequence: Synthetic peptide
  Seed: LRMKWMMAMKYPITA
LRMKVMMFMAYPSTA

SEQ ID NO: 240156 - protein, 15 aa, Artificial Sequence
  Description of Artificial Sequence: Synthetic peptide
  Seed: LRMKWMMAMKYPITA
LRMKVMMFMAYPTTA

SEQ ID NO: 240157 - protein, 15 aa, Artificial Sequence
  Description of Artificial Sequence: Synthetic peptide
  Seed: LRMKWMMAMKYPITA
LRMKVMMFMAYPVTA

SEQ ID NO: 240158 - protein, 15 aa, Artificial Sequence
  Description of Artificial Sequence: Synthetic peptide
  Seed: LRMKWMMAMKYPITA
LRMKVMMFMAYPYTA

SEQ ID NO: 240159 - protein, 15 aa, Artificial Sequence
  Description of Artificial Sequence: Synthetic peptide
  Seed: LRMKWMMAMKYPITA
LRMKVMMFMDYPATA

SEQ ID NO: 240160 - protein, 15 aa, Artificial Sequence
  Description of Artificial Sequence: Synthetic peptide
  Seed: LRMKWMMAMKYPITA
LRMKVMMFMDYPVTA

SEQ ID NO: 240161 - protein, 15 aa, Artificial Sequence
  Description of Artificial Sequence: Synthetic peptide
  Seed: LRMKWMMAMKYPITA
LRMKVMMFMGYPATA

SEQ ID NO: 240162 - protein, 15 aa, Artificial Sequence
  Description of Artificial Sequence: Synthetic peptide
  Seed: LRMKWMMAMKYPITA
LRMKVMMFMGYPITA

SEQ ID NO: 240163 - protein, 15 aa, Artificial Sequence
  Description of Artificial Sequence: Synthetic peptide
  Seed: LRMKWMMAMKYPITA
LRMKVMMFMGYPLTA

SEQ ID NO: 240164 - protein, 15 aa, Artificial Sequence
  Description of Artificial Sequence: Synthetic peptide
  Seed: LRMKWMMAMKYPITA
LRMKVMMFMGYPMTA

SEQ ID NO: 240165 - protein, 15 aa, Artificial Sequence
  Description of Artificial Sequence: Synthetic peptide
  Seed: LRMKWMMAMKYPITA
LRMKVMMFMGYPRTA

SEQ ID NO: 240166 - protein, 15 aa, Artificial Sequence
  Description of Artificial Sequence: Synthetic peptide
  Seed: LRMKWMMAMKYPITA
LRMKVMMFMGYPVTA

SEQ ID NO: 240167 - protein, 15 aa, Artificial Sequence
  Description of Artificial Sequence: Synthetic peptide
  Seed: LRMKWMMAMKYPITA
LRMKVMMFMHYPKTA

SEQ ID NO: 240168 - protein, 15 aa, Artificial Sequence
  Description of Artificial Sequence: Synthetic peptide
  Seed: LRMKWMMAMKYPITA
LRMKVMMFMHYPRTA

SEQ ID NO: 240169 - protein, 15 aa, Artificial Sequence
  Description of Artificial Sequence: Synthetic peptide
  Seed: LRMKWMMAMKYPITA
LRMKVMMFMHYPYTA

SEQ ID NO: 240170 - protein, 15 aa, Artificial Sequence
  Description of Artificial Sequence: Synthetic peptide
  Seed: LRMKWMMAMKYPITA
LRMKVMMFMKYPATA

SEQ ID NO: 240171 - protein, 15 aa, Artificial Sequence
  Description of Artificial Sequence: Synthetic peptide
  Seed: LRMKWMMAMKYPITA
LRMKVMMFMKYPFTA

SEQ ID NO: 240172 - protein, 15 aa, Artificial Sequence
  Description of Artificial Sequence: Synthetic peptide
  Seed: LRMKWMMAMKYPITA
LRMKVMMFMKYPGTA

SEQ ID NO: 240173 - protein, 15 aa, Artificial Sequence
  Description of Artificial Sequence: Synthetic peptide
  Seed: LRMKWMMAMKYPITA
LRMKVMMFMKYPHTA

SEQ ID NO: 240174 - protein, 15 aa, Artificial Sequence
  Description of Artificial Sequence: Synthetic peptide
  Seed: LRMKWMMAMKYPITA
LRMKVMMFMKYPITA

SEQ ID NO: 240175 - protein, 15 aa, Artificial Sequence
  Description of Artificial Sequence: Synthetic peptide
  Seed: LRMKWMMAMKYPITA
LRMKVMMFMKYPKTA

SEQ ID NO: 240176 - protein, 15 aa, Artificial Sequence
  Description of Artificial Sequence: Synthetic peptide
  Seed: LRMKWMMAMKYPITA
LRMKVMMFMKYPLTA

SEQ ID NO: 240177 - protein, 15 aa, Artificial Sequence
  Description of Artificial Sequence: Synthetic peptide
  Seed: LRMKWMMAMKYPITA
LRMKVMMFMKYPMTA

SEQ ID NO: 240178 - protein, 15 aa, Artificial Sequence
  Description of Artificial Sequence: Synthetic peptide
  Seed: LRMKWMMAMKYPITA
LRMKVMMFMKYPNTA

SEQ ID NO: 240179 - protein, 15 aa, Artificial Sequence
  Description of Artificial Sequence: Synthetic peptide
  Seed: LRMKWMMAMKYPITA
LRMKVMMFMKYPQTA

SEQ ID NO: 240180 - protein, 15 aa, Artificial Sequence
  Description of Artificial Sequence: Synthetic peptide
  Seed: LRMKWMMAMKYPITA
LRMKVMMFMKYPRTA

SEQ ID NO: 240181 - protein, 15 aa, Artificial Sequence
  Description of Artificial Sequence: Synthetic peptide
  Seed: LRMKWMMAMKYPITA
LRMKVMMFMKYPSTA

SEQ ID NO: 240182 - protein, 15 aa, Artificial Sequence
  Description of Artificial Sequence: Synthetic peptide
  Seed: LRMKWMMAMKYPITA
LRMKVMMFMKYPTTA

SEQ ID NO: 240183 - protein, 15 aa, Artificial Sequence
  Description of Artificial Sequence: Synthetic peptide
  Seed: LRMKWMMAMKYPITA
LRMKVMMFMKYPVTA

SEQ ID NO: 240184 - protein, 15 aa, Artificial Sequence
  Description of Artificial Sequence: Synthetic peptide
  Seed: LRMKWMMAMKYPITA
LRMKVMMFMKYPYTA

SEQ ID NO: 240185 - protein, 15 aa, Artificial Sequence
  Description of Artificial Sequence: Synthetic peptide
  Seed: LRMKWMMAMKYPITA
LRMKVMMFMNYPATA

SEQ ID NO: 240186 - protein, 15 aa, Artificial Sequence
  Description of Artificial Sequence: Synthetic peptide
  Seed: LRMKWMMAMKYPITA
LRMKVMMFMNYPDTA

SEQ ID NO: 240187 - protein, 15 aa, Artificial Sequence
  Description of Artificial Sequence: Synthetic peptide
  Seed: LRMKWMMAMKYPITA
LRMKVMMFMNYPETA

SEQ ID NO: 240188 - protein, 15 aa, Artificial Sequence
  Description of Artificial Sequence: Synthetic peptide
  Seed: LRMKWMMAMKYPITA
LRMKVMMFMNYPITA

SEQ ID NO: 240189 - protein, 15 aa, Artificial Sequence
  Description of Artificial Sequence: Synthetic peptide
  Seed: LRMKWMMAMKYPITA
LRMKVMMFMNYPLTA

SEQ ID NO: 240190 - protein, 15 aa, Artificial Sequence
  Description of Artificial Sequence: Synthetic peptide
  Seed: LRMKWMMAMKYPITA
LRMKVMMFMNYPMTA

SEQ ID NO: 240191 - protein, 15 aa, Artificial Sequence
  Description of Artificial Sequence: Synthetic peptide
  Seed: LRMKWMMAMKYPITA
LRMKVMMFMNYPRTA

SEQ ID NO: 240192 - protein, 15 aa, Artificial Sequence
  Description of Artificial Sequence: Synthetic peptide
  Seed: LRMKWMMAMKYPITA
LRMKVMMFMNYPSTA

SEQ ID NO: 240193 - protein, 15 aa, Artificial Sequence
  Description of Artificial Sequence: Synthetic peptide
  Seed: LRMKWMMAMKYPITA
LRMKVMMFMNYPVTA

SEQ ID NO: 240194 - protein, 15 aa, Artificial Sequence
  Description of Artificial Sequence: Synthetic peptide
  Seed: LRMKWMMAMKYPITA
LRMKVMMFMPYPATA

SEQ ID NO: 240195 - protein, 15 aa, Artificial Sequence
  Description of Artificial Sequence: Synthetic peptide
  Seed: LRMKWMMAMKYPITA
LRMKVMMFMPYPITA

SEQ ID NO: 240196 - protein, 15 aa, Artificial Sequence
  Description of Artificial Sequence: Synthetic peptide
  Seed: LRMKWMMAMKYPITA
LRMKVMMFMPYPLTA

SEQ ID NO: 240197 - protein, 15 aa, Artificial Sequence
  Description of Artificial Sequence: Synthetic peptide
  Seed: LRMKWMMAMKYPITA
LRMKVMMFMPYPMTA

SEQ ID NO: 240198 - protein, 15 aa, Artificial Sequence
  Description of Artificial Sequence: Synthetic peptide
  Seed: LRMKWMMAMKYPITA
LRMKVMMFMPYPNTA

SEQ ID NO: 240199 - protein, 15 aa, Artificial Sequence
  Description of Artificial Sequence: Synthetic peptide
  Seed: LRMKWMMAMKYPITA
LRMKVMMFMPYPRTA

SEQ ID NO: 240200 - protein, 15 aa, Artificial Sequence
  Description of Artificial Sequence: Synthetic peptide
  Seed: LRMKWMMAMKYPITA
LRMKVMMFMPYPSTA

SEQ ID NO: 240201 - protein, 15 aa, Artificial Sequence
  Description of Artificial Sequence: Synthetic peptide
  Seed: LRMKWMMAMKYPITA
LRMKVMMFMPYPVTA

SEQ ID NO: 240202 - protein, 15 aa, Artificial Sequence
  Description of Artificial Sequence: Synthetic peptide
  Seed: LRMKWMMAMKYPITA
LRMKVMMFMPYPYTA

SEQ ID NO: 240203 - protein, 15 aa, Artificial Sequence
  Description of Artificial Sequence: Synthetic peptide
  Seed: LRMKWMMAMKYPITA
LRMKVMMFMRYPATA

SEQ ID NO: 240204 - protein, 15 aa, Artificial Sequence
  Description of Artificial Sequence: Synthetic peptide
  Seed: LRMKWMMAMKYPITA
LRMKVMMFMRYPETA

SEQ ID NO: 240205 - protein, 15 aa, Artificial Sequence
  Description of Artificial Sequence: Synthetic peptide
  Seed: LRMKWMMAMKYPITA
LRMKVMMFMRYPFTA

SEQ ID NO: 240206 - protein, 15 aa, Artificial Sequence
  Description of Artificial Sequence: Synthetic peptide
  Seed: LRMKWMMAMKYPITA
LRMKVMMFMRYPGTA

SEQ ID NO: 240207 - protein, 15 aa, Artificial Sequence
  Description of Artificial Sequence: Synthetic peptide
  Seed: LRMKWMMAMKYPITA
LRMKVMMFMRYPHTA

SEQ ID NO: 240208 - protein, 15 aa, Artificial Sequence
  Description of Artificial Sequence: Synthetic peptide
  Seed: LRMKWMMAMKYPITA
LRMKVMMFMRYPITA

SEQ ID NO: 240209 - protein, 15 aa, Artificial Sequence
  Description of Artificial Sequence: Synthetic peptide
  Seed: LRMKWMMAMKYPITA
LRMKVMMFMRYPKTA

SEQ ID NO: 240210 - protein, 15 aa, Artificial Sequence
  Description of Artificial Sequence: Synthetic peptide
  Seed: LRMKWMMAMKYPITA
LRMKVMMFMRYPLTA

SEQ ID NO: 240211 - protein, 15 aa, Artificial Sequence
  Description of Artificial Sequence: Synthetic peptide
  Seed: LRMKWMMAMKYPITA
LRMKVMMFMRYPMTA

SEQ ID NO: 240212 - protein, 15 aa, Artificial Sequence
  Description of Artificial Sequence: Synthetic peptide
  Seed: LRMKWMMAMKYPITA
LRMKVMMFMRYPNTA

SEQ ID NO: 240213 - protein, 15 aa, Artificial Sequence
  Description of Artificial Sequence: Synthetic peptide
  Seed: LRMKWMMAMKYPITA
LRMKVMMFMRYPPTA

SEQ ID NO: 240214 - protein, 15 aa, Artificial Sequence
  Description of Artificial Sequence: Synthetic peptide
  Seed: LRMKWMMAMKYPITA
LRMKVMMFMRYPQTA

SEQ ID NO: 240215 - protein, 15 aa, Artificial Sequence
  Description of Artificial Sequence: Synthetic peptide
  Seed: LRMKWMMAMKYPITA
LRMKVMMFMRYPRTA

SEQ ID NO: 240216 - protein, 15 aa, Artificial Sequence
  Description of Artificial Sequence: Synthetic peptide
  Seed: LRMKWMMAMKYPITA
LRMKVMMFMRYPSTA

SEQ ID NO: 240217 - protein, 15 aa, Artificial Sequence
  Description of Artificial Sequence: Synthetic peptide
  Seed: LRMKWMMAMKYPITA
LRMKVMMFMRYPTTA

SEQ ID NO: 240218 - protein, 15 aa, Artificial Sequence
  Description of Artificial Sequence: Synthetic peptide
  Seed: LRMKWMMAMKYPITA
LRMKVMMFMRYPVTA

SEQ ID NO: 240219 - protein, 15 aa, Artificial Sequence
  Description of Artificial Sequence: Synthetic peptide
  Seed: LRMKWMMAMKYPITA
LRMKVMMFMRYPYTA

SEQ ID NO: 240220 - protein, 15 aa, Artificial Sequence
  Description of Artificial Sequence: Synthetic peptide
  Seed: LRMKWMMAMKYPITA
LRMKVMMFMSYPATA

SEQ ID NO: 240221 - protein, 15 aa, Artificial Sequence
  Description of Artificial Sequence: Synthetic peptide
  Seed: LRMKWMMAMKYPITA
LRMKVMMFMSYPDTA

SEQ ID NO: 240222 - protein, 15 aa, Artificial Sequence
  Description of Artificial Sequence: Synthetic peptide
  Seed: LRMKWMMAMKYPITA
LRMKVMMFMSYPETA

SEQ ID NO: 240223 - protein, 15 aa, Artificial Sequence
  Description of Artificial Sequence: Synthetic peptide
  Seed: LRMKWMMAMKYPITA
LRMKVMMFMSYPHTA

SEQ ID NO: 240224 - protein, 15 aa, Artificial Sequence
  Description of Artificial Sequence: Synthetic peptide
  Seed: LRMKWMMAMKYPITA
LRMKVMMFMSYPITA

SEQ ID NO: 240225 - protein, 15 aa, Artificial Sequence
  Description of Artificial Sequence: Synthetic peptide
  Seed: LRMKWMMAMKYPITA
LRMKVMMFMSYPKTA

SEQ ID NO: 240226 - protein, 15 aa, Artificial Sequence
  Description of Artificial Sequence: Synthetic peptide
  Seed: LRMKWMMAMKYPITA
LRMKVMMFMSYPLTA

SEQ ID NO: 240227 - protein, 15 aa, Artificial Sequence
  Description of Artificial Sequence: Synthetic peptide
  Seed: LRMKWMMAMKYPITA
LRMKVMMFMSYPMTA

SEQ ID NO: 240228 - protein, 15 aa, Artificial Sequence
  Description of Artificial Sequence: Synthetic peptide
  Seed: LRMKWMMAMKYPITA
LRMKVMMFMSYPRTA

SEQ ID NO: 240229 - protein, 15 aa, Artificial Sequence
  Description of Artificial Sequence: Synthetic peptide
  Seed: LRMKWMMAMKYPITA
LRMKVMMFMSYPSTA

SEQ ID NO: 240230 - protein, 15 aa, Artificial Sequence
  Description of Artificial Sequence: Synthetic peptide
  Seed: LRMKWMMAMKYPITA
LRMKVMMFMSYPVTA

SEQ ID NO: 240231 - protein, 15 aa, Artificial Sequence
  Description of Artificial Sequence: Synthetic peptide
  Seed: LRMKWMMAMKYPITA
LRMKVMMFMTYPATA

SEQ ID NO: 240232 - protein, 15 aa, Artificial Sequence
  Description of Artificial Sequence: Synthetic peptide
  Seed: LRMKWMMAMKYPITA
LRMKVMMFMTYPDTA

SEQ ID NO: 240233 - protein, 15 aa, Artificial Sequence
  Description of Artificial Sequence: Synthetic peptide
  Seed: LRMKWMMAMKYPITA
LRMKVMMFMTYPETA

SEQ ID NO: 240234 - protein, 15 aa, Artificial Sequence
  Description of Artificial Sequence: Synthetic peptide
  Seed: LRMKWMMAMKYPITA
LRMKVMMFMTYPHTA

SEQ ID NO: 240235 - protein, 15 aa, Artificial Sequence
  Description of Artificial Sequence: Synthetic peptide
  Seed: LRMKWMMAMKYPITA
LRMKVMMFMTYPITA

SEQ ID NO: 240236 - protein, 15 aa, Artificial Sequence
  Description of Artificial Sequence: Synthetic peptide
  Seed: LRMKWMMAMKYPITA
LRMKVMMFMTYPLTA

SEQ ID NO: 240237 - protein, 15 aa, Artificial Sequence
  Description of Artificial Sequence: Synthetic peptide
  Seed: LRMKWMMAMKYPITA
LRMKVMMFMTYPMTA

SEQ ID NO: 240238 - protein, 15 aa, Artificial Sequence
  Description of Artificial Sequence: Synthetic peptide
  Seed: LRMKWMMAMKYPITA
LRMKVMMFMTYPQTA

SEQ ID NO: 240239 - protein, 15 aa, Artificial Sequence
  Description of Artificial Sequence: Synthetic peptide
  Seed: LRMKWMMAMKYPITA
LRMKVMMFMTYPRTA

SEQ ID NO: 240240 - protein, 15 aa, Artificial Sequence
  Description of Artificial Sequence: Synthetic peptide
  Seed: LRMKWMMAMKYPITA
LRMKVMMFMTYPSTA

SEQ ID NO: 240241 - protein, 15 aa, Artificial Sequence
  Description of Artificial Sequence: Synthetic peptide
  Seed: LRMKWMMAMKYPITA
LRMKVMMFMTYPVTA

SEQ ID NO: 240242 - protein, 15 aa, Artificial Sequence
  Description of Artificial Sequence: Synthetic peptide
  Seed: LRMKWMMAMKYPITA
LRMKVMMFMVYPATA

SEQ ID NO: 240243 - protein, 15 aa, Artificial Sequence
  Description of Artificial Sequence: Synthetic peptide
  Seed: LRMKWMMAMKYPITA
LRMKVMMFMVYPDTA

SEQ ID NO: 240244 - protein, 15 aa, Artificial Sequence
  Description of Artificial Sequence: Synthetic peptide
  Seed: LRMKWMMAMKYPITA
LRMKVMMFMVYPSTA

SEQ ID NO: 240245 - protein, 15 aa, Artificial Sequence
  Description of Artificial Sequence: Synthetic peptide
  Seed: LRMKWMMAMKYPITA
LRMKVMMGMAYPATA

SEQ ID NO: 240246 - protein, 15 aa, Artificial Sequence
  Description of Artificial Sequence: Synthetic peptide
  Seed: LRMKWMMAMKYPITA
LRMKVMMGMAYPCTA

SEQ ID NO: 240247 - protein, 15 aa, Artificial Sequence
  Description of Artificial Sequence: Synthetic peptide
  Seed: LRMKWMMAMKYPITA
LRMKVMMGMAYPFTA

SEQ ID NO: 240248 - protein, 15 aa, Artificial Sequence
  Description of Artificial Sequence: Synthetic peptide
  Seed: LRMKWMMAMKYPITA
LRMKVMMGMAYPGTA

SEQ ID NO: 240249 - protein, 15 aa, Artificial Sequence
  Description of Artificial Sequence: Synthetic peptide
  Seed: LRMKWMMAMKYPITA
LRMKVMMGMAYPHTA

SEQ ID NO: 240250 - protein, 15 aa, Artificial Sequence
  Description of Artificial Sequence: Synthetic peptide
  Seed: LRMKWMMAMKYPITA
LRMKVMMGMAYPITA

SEQ ID NO: 240251 - protein, 15 aa, Artificial Sequence
  Description of Artificial Sequence: Synthetic peptide
  Seed: LRMKWMMAMKYPITA
LRMKVMMGMAYPKTA

SEQ ID NO: 240252 - protein, 15 aa, Artificial Sequence
  Description of Artificial Sequence: Synthetic peptide
  Seed: LRMKWMMAMKYPITA
LRMKVMMGMAYPLTA

SEQ ID NO: 240253 - protein, 15 aa, Artificial Sequence
  Description of Artificial Sequence: Synthetic peptide
  Seed: LRMKWMMAMKYPITA
LRMKVMMGMAYPMTA

SEQ ID NO: 240254 - protein, 15 aa, Artificial Sequence
  Description of Artificial Sequence: Synthetic peptide
  Seed: LRMKWMMAMKYPITA
LRMKVMMGMAYPNTA

SEQ ID NO: 240255 - protein, 15 aa, Artificial Sequence
  Description of Artificial Sequence: Synthetic peptide
  Seed: LRMKWMMAMKYPITA
LRMKVMMGMAYPQTA

SEQ ID NO: 240256 - protein, 15 aa, Artificial Sequence
  Description of Artificial Sequence: Synthetic peptide
  Seed: LRMKWMMAMKYPITA
LRMKVMMGMAYPRTA

SEQ ID NO: 240257 - protein, 15 aa, Artificial Sequence
  Description of Artificial Sequence: Synthetic peptide
  Seed: LRMKWMMAMKYPITA
LRMKVMMGMAYPSTA

SEQ ID NO: 240258 - protein, 15 aa, Artificial Sequence
  Description of Artificial Sequence: Synthetic peptide
  Seed: LRMKWMMAMKYPITA
LRMKVMMGMAYPTTA

SEQ ID NO: 240259 - protein, 15 aa, Artificial Sequence
  Description of Artificial Sequence: Synthetic peptide
  Seed: LRMKWMMAMKYPITA
LRMKVMMGMAYPVTA

SEQ ID NO: 240260 - protein, 15 aa, Artificial Sequence
  Description of Artificial Sequence: Synthetic peptide
  Seed: LRMKWMMAMKYPITA
LRMKVMMGMAYPWTA

SEQ ID NO: 240261 - protein, 15 aa, Artificial Sequence
  Description of Artificial Sequence: Synthetic peptide
  Seed: LRMKWMMAMKYPITA
LRMKVMMGMAYPYTA

SEQ ID NO: 240262 - protein, 15 aa, Artificial Sequence
  Description of Artificial Sequence: Synthetic peptide
  Seed: LRMKWMMAMKYPITA
LRMKVMMGMGYPATA

SEQ ID NO: 240263 - protein, 15 aa, Artificial Sequence
  Description of Artificial Sequence: Synthetic peptide
  Seed: LRMKWMMAMKYPITA
LRMKVMMGMGYPFTA

SEQ ID NO: 240264 - protein, 15 aa, Artificial Sequence
  Description of Artificial Sequence: Synthetic peptide
  Seed: LRMKWMMAMKYPITA
LRMKVMMGMGYPITA

SEQ ID NO: 240265 - protein, 15 aa, Artificial Sequence
  Description of Artificial Sequence: Synthetic peptide
  Seed: LRMKWMMAMKYPITA
LRMKVMMGMGYPLTA

SEQ ID NO: 240266 - protein, 15 aa, Artificial Sequence
  Description of Artificial Sequence: Synthetic peptide
  Seed: LRMKWMMAMKYPITA
LRMKVMMGMGYPMTA

SEQ ID NO: 240267 - protein, 15 aa, Artificial Sequence
  Description of Artificial Sequence: Synthetic peptide
  Seed: LRMKWMMAMKYPITA
LRMKVMMGMGYPSTA

SEQ ID NO: 240268 - protein, 15 aa, Artificial Sequence
  Description of Artificial Sequence: Synthetic peptide
  Seed: LRMKWMMAMKYPITA
LRMKVMMGMGYPTTA

SEQ ID NO: 240269 - protein, 15 aa, Artificial Sequence
  Description of Artificial Sequence: Synthetic peptide
  Seed: LRMKWMMAMKYPITA
LRMKVMMGMGYPVTA

SEQ ID NO: 240270 - protein, 15 aa, Artificial Sequence
  Description of Artificial Sequence: Synthetic peptide
  Seed: LRMKWMMAMKYPITA
LRMKVMMGMIYPATA

SEQ ID NO: 240271 - protein, 15 aa, Artificial Sequence
  Description of Artificial Sequence: Synthetic peptide
  Seed: LRMKWMMAMKYPITA
LRMKVMMGMIYPITA

SEQ ID NO: 240272 - protein, 15 aa, Artificial Sequence
  Description of Artificial Sequence: Synthetic peptide
  Seed: LRMKWMMAMKYPITA
LRMKVMMGMIYPLTA

SEQ ID NO: 240273 - protein, 15 aa, Artificial Sequence
  Description of Artificial Sequence: Synthetic peptide
  Seed: LRMKWMMAMKYPITA
LRMKVMMGMIYPVTA

SEQ ID NO: 240274 - protein, 15 aa, Artificial Sequence
  Description of Artificial Sequence: Synthetic peptide
  Seed: LRMKWMMAMKYPITA
LRMKVMMGMKYPATA

SEQ ID NO: 240275 - protein, 15 aa, Artificial Sequence
  Description of Artificial Sequence: Synthetic peptide
  Seed: LRMKWMMAMKYPITA
LRMKVMMGMKYPFTA

SEQ ID NO: 240276 - protein, 15 aa, Artificial Sequence
  Description of Artificial Sequence: Synthetic peptide
  Seed: LRMKWMMAMKYPITA
LRMKVMMGMKYPITA

SEQ ID NO: 240277 - protein, 15 aa, Artificial Sequence
  Description of Artificial Sequence: Synthetic peptide
  Seed: LRMKWMMAMKYPITA
LRMKVMMGMKYPKTA

SEQ ID NO: 240278 - protein, 15 aa, Artificial Sequence
  Description of Artificial Sequence: Synthetic peptide
  Seed: LRMKWMMAMKYPITA
LRMKVMMGMKYPLTA

SEQ ID NO: 240279 - protein, 15 aa, Artificial Sequence
  Description of Artificial Sequence: Synthetic peptide
  Seed: LRMKWMMAMKYPITA
LRMKVMMGMKYPMTA

SEQ ID NO: 240280 - protein, 15 aa, Artificial Sequence
  Description of Artificial Sequence: Synthetic peptide
  Seed: LRMKWMMAMKYPITA
LRMKVMMGMKYPQTA

SEQ ID NO: 240281 - protein, 15 aa, Artificial Sequence
  Description of Artificial Sequence: Synthetic peptide
  Seed: LRMKWMMAMKYPITA
LRMKVMMGMKYPRTA

SEQ ID NO: 240282 - protein, 15 aa, Artificial Sequence
  Description of Artificial Sequence: Synthetic peptide
  Seed: LRMKWMMAMKYPITA
LRMKVMMGMKYPSTA

SEQ ID NO: 240283 - protein, 15 aa, Artificial Sequence
  Description of Artificial Sequence: Synthetic peptide
  Seed: LRMKWMMAMKYPITA
LRMKVMMGMKYPVTA

SEQ ID NO: 240284 - protein, 15 aa, Artificial Sequence
  Description of Artificial Sequence: Synthetic peptide
  Seed: LRMKWMMAMKYPITA
LRMKVMMGMKYPYTA

SEQ ID NO: 240285 - protein, 15 aa, Artificial Sequence
  Description of Artificial Sequence: Synthetic peptide
  Seed: LRMKWMMAMKYPITA
LRMKVMMGMNYPATA

SEQ ID NO: 240286 - protein, 15 aa, Artificial Sequence
  Description of Artificial Sequence: Synthetic peptide
  Seed: LRMKWMMAMKYPITA
LRMKVMMGMNYPITA

SEQ ID NO: 240287 - protein, 15 aa, Artificial Sequence
  Description of Artificial Sequence: Synthetic peptide
  Seed: LRMKWMMAMKYPITA
LRMKVMMGMNYPLTA

SEQ ID NO: 240288 - protein, 15 aa, Artificial Sequence
  Description of Artificial Sequence: Synthetic peptide
  Seed: LRMKWMMAMKYPITA
LRMKVMMGMNYPMTA

SEQ ID NO: 240289 - protein, 15 aa, Artificial Sequence
  Description of Artificial Sequence: Synthetic peptide
  Seed: LRMKWMMAMKYPITA
LRMKVMMGMNYPVTA

SEQ ID NO: 240290 - protein, 15 aa, Artificial Sequence
  Description of Artificial Sequence: Synthetic peptide
  Seed: LRMKWMMAMKYPITA
LRMKVMMGMPYPATA

SEQ ID NO: 240291 - protein, 15 aa, Artificial Sequence
  Description of Artificial Sequence: Synthetic peptide
  Seed: LRMKWMMAMKYPITA
LRMKVMMGMPYPFTA

SEQ ID NO: 240292 - protein, 15 aa, Artificial Sequence
  Description of Artificial Sequence: Synthetic peptide
  Seed: LRMKWMMAMKYPITA
LRMKVMMGMPYPGTA

SEQ ID NO: 240293 - protein, 15 aa, Artificial Sequence
  Description of Artificial Sequence: Synthetic peptide
  Seed: LRMKWMMAMKYPITA
LRMKVMMGMPYPITA

SEQ ID NO: 240294 - protein, 15 aa, Artificial Sequence
  Description of Artificial Sequence: Synthetic peptide
  Seed: LRMKWMMAMKYPITA
LRMKVMMGMPYPLTA

SEQ ID NO: 240295 - protein, 15 aa, Artificial Sequence
  Description of Artificial Sequence: Synthetic peptide
  Seed: LRMKWMMAMKYPITA
LRMKVMMGMPYPMTA

SEQ ID NO: 240296 - protein, 15 aa, Artificial Sequence
  Description of Artificial Sequence: Synthetic peptide
  Seed: LRMKWMMAMKYPITA
LRMKVMMGMPYPNTA

SEQ ID NO: 240297 - protein, 15 aa, Artificial Sequence
  Description of Artificial Sequence: Synthetic peptide
  Seed: LRMKWMMAMKYPITA
LRMKVMMGMPYPSTA

SEQ ID NO: 240298 - protein, 15 aa, Artificial Sequence
  Description of Artificial Sequence: Synthetic peptide
  Seed: LRMKWMMAMKYPITA
LRMKVMMGMPYPTTA

SEQ ID NO: 240299 - protein, 15 aa, Artificial Sequence
  Description of Artificial Sequence: Synthetic peptide
  Seed: LRMKWMMAMKYPITA
LRMKVMMGMPYPVTA

SEQ ID NO: 240300 - protein, 15 aa, Artificial Sequence
  Description of Artificial Sequence: Synthetic peptide
  Seed: LRMKWMMAMKYPITA
LRMKVMMGMPYPWTA

SEQ ID NO: 240301 - protein, 15 aa, Artificial Sequence
  Description of Artificial Sequence: Synthetic peptide
  Seed: LRMKWMMAMKYPITA
LRMKVMMGMPYPYTA

SEQ ID NO: 240302 - protein, 15 aa, Artificial Sequence
  Description of Artificial Sequence: Synthetic peptide
  Seed: LRMKWMMAMKYPITA
LRMKVMMGMRYPATA

SEQ ID NO: 240303 - protein, 15 aa, Artificial Sequence
  Description of Artificial Sequence: Synthetic peptide
  Seed: LRMKWMMAMKYPITA
LRMKVMMGMRYPFTA

SEQ ID NO: 240304 - protein, 15 aa, Artificial Sequence
  Description of Artificial Sequence: Synthetic peptide
  Seed: LRMKWMMAMKYPITA
LRMKVMMGMRYPGTA

SEQ ID NO: 240305 - protein, 15 aa, Artificial Sequence
  Description of Artificial Sequence: Synthetic peptide
  Seed: LRMKWMMAMKYPITA
LRMKVMMGMRYPHTA

SEQ ID NO: 240306 - protein, 15 aa, Artificial Sequence
  Description of Artificial Sequence: Synthetic peptide
  Seed: LRMKWMMAMKYPITA
LRMKVMMGMRYPITA

SEQ ID NO: 240307 - protein, 15 aa, Artificial Sequence
  Description of Artificial Sequence: Synthetic peptide
  Seed: LRMKWMMAMKYPITA
LRMKVMMGMRYPKTA

SEQ ID NO: 240308 - protein, 15 aa, Artificial Sequence
  Description of Artificial Sequence: Synthetic peptide
  Seed: LRMKWMMAMKYPITA
LRMKVMMGMRYPLTA

SEQ ID NO: 240309 - protein, 15 aa, Artificial Sequence
  Description of Artificial Sequence: Synthetic peptide
  Seed: LRMKWMMAMKYPITA
LRMKVMMGMRYPMTA

SEQ ID NO: 240310 - protein, 15 aa, Artificial Sequence
  Description of Artificial Sequence: Synthetic peptide
  Seed: LRMKWMMAMKYPITA
LRMKVMMGMRYPQTA

SEQ ID NO: 240311 - protein, 15 aa, Artificial Sequence
  Description of Artificial Sequence: Synthetic peptide
  Seed: LRMKWMMAMKYPITA
LRMKVMMGMRYPRTA

SEQ ID NO: 240312 - protein, 15 aa, Artificial Sequence
  Description of Artificial Sequence: Synthetic peptide
  Seed: LRMKWMMAMKYPITA
LRMKVMMGMRYPSTA

SEQ ID NO: 240313 - protein, 15 aa, Artificial Sequence
  Description of Artificial Sequence: Synthetic peptide
  Seed: LRMKWMMAMKYPITA
LRMKVMMGMRYPVTA

SEQ ID NO: 240314 - protein, 15 aa, Artificial Sequence
  Description of Artificial Sequence: Synthetic peptide
  Seed: LRMKWMMAMKYPITA
LRMKVMMGMRYPYTA

SEQ ID NO: 240315 - protein, 15 aa, Artificial Sequence
  Description of Artificial Sequence: Synthetic peptide
  Seed: LRMKWMMAMKYPITA
LRMKVMMGMSYPATA

SEQ ID NO: 240316 - protein, 15 aa, Artificial Sequence
  Description of Artificial Sequence: Synthetic peptide
  Seed: LRMKWMMAMKYPITA
LRMKVMMGMSYPFTA

SEQ ID NO: 240317 - protein, 15 aa, Artificial Sequence
  Description of Artificial Sequence: Synthetic peptide
  Seed: LRMKWMMAMKYPITA
LRMKVMMGMSYPITA

SEQ ID NO: 240318 - protein, 15 aa, Artificial Sequence
  Description of Artificial Sequence: Synthetic peptide
  Seed: LRMKWMMAMKYPITA
LRMKVMMGMSYPLTA

SEQ ID NO: 240319 - protein, 15 aa, Artificial Sequence
  Description of Artificial Sequence: Synthetic peptide
  Seed: LRMKWMMAMKYPITA
LRMKVMMGMSYPMTA

SEQ ID NO: 240320 - protein, 15 aa, Artificial Sequence
  Description of Artificial Sequence: Synthetic peptide
  Seed: LRMKWMMAMKYPITA
LRMKVMMGMSYPSTA

SEQ ID NO: 240321 - protein, 15 aa, Artificial Sequence
  Description of Artificial Sequence: Synthetic peptide
  Seed: LRMKWMMAMKYPITA
LRMKVMMGMSYPTTA

SEQ ID NO: 240322 - protein, 15 aa, Artificial Sequence
  Description of Artificial Sequence: Synthetic peptide
  Seed: LRMKWMMAMKYPITA
LRMKVMMGMSYPVTA

SEQ ID NO: 240323 - protein, 15 aa, Artificial Sequence
  Description of Artificial Sequence: Synthetic peptide
  Seed: LRMKWMMAMKYPITA
LRMKVMMGMTYPATA

SEQ ID NO: 240324 - protein, 15 aa, Artificial Sequence
  Description of Artificial Sequence: Synthetic peptide
  Seed: LRMKWMMAMKYPITA
LRMKVMMGMTYPITA

SEQ ID NO: 240325 - protein, 15 aa, Artificial Sequence
  Description of Artificial Sequence: Synthetic peptide
  Seed: LRMKWMMAMKYPITA
LRMKVMMGMTYPLTA

SEQ ID NO: 240326 - protein, 15 aa, Artificial Sequence
  Description of Artificial Sequence: Synthetic peptide
  Seed: LRMKWMMAMKYPITA
LRMKVMMGMTYPMTA

SEQ ID NO: 240327 - protein, 15 aa, Artificial Sequence
  Description of Artificial Sequence: Synthetic peptide
  Seed: LRMKWMMAMKYPITA
LRMKVMMGMTYPVTA

SEQ ID NO: 240328 - protein, 15 aa, Artificial Sequence
  Description of Artificial Sequence: Synthetic peptide
  Seed: LRMKWMMAMKYPITA
LRMKVMMGMVYPATA

SEQ ID NO: 240329 - protein, 15 aa, Artificial Sequence
  Description of Artificial Sequence: Synthetic peptide
  Seed: LRMKWMMAMKYPITA
LRMKVMMGMVYPITA

SEQ ID NO: 240330 - protein, 15 aa, Artificial Sequence
  Description of Artificial Sequence: Synthetic peptide
  Seed: LRMKWMMAMKYPITA
LRMKVMMGMVYPLTA

SEQ ID NO: 240331 - protein, 15 aa, Artificial Sequence
  Description of Artificial Sequence: Synthetic peptide
  Seed: LRMKWMMAMKYPITA
LRMKVMMGMVYPMTA

SEQ ID NO: 240332 - protein, 15 aa, Artificial Sequence
  Description of Artificial Sequence: Synthetic peptide
  Seed: LRMKWMMAMKYPITA
LRMKVMMGMVYPVTA

SEQ ID NO: 240333 - protein, 15 aa, Artificial Sequence
  Description of Artificial Sequence: Synthetic peptide
  Seed: LRMKWMMAMKYPITA
LRMKVMMHMAYPATA

SEQ ID NO: 240334 - protein, 15 aa, Artificial Sequence
  Description of Artificial Sequence: Synthetic peptide
  Seed: LRMKWMMAMKYPITA
LRMKVMMHMAYPCTA

SEQ ID NO: 240335 - protein, 15 aa, Artificial Sequence
  Description of Artificial Sequence: Synthetic peptide
  Seed: LRMKWMMAMKYPITA
LRMKVMMHMAYPFTA

SEQ ID NO: 240336 - protein, 15 aa, Artificial Sequence
  Description of Artificial Sequence: Synthetic peptide
  Seed: LRMKWMMAMKYPITA
LRMKVMMHMAYPHTA

SEQ ID NO: 240337 - protein, 15 aa, Artificial Sequence
  Description of Artificial Sequence: Synthetic peptide
  Seed: LRMKWMMAMKYPITA
LRMKVMMHMAYPITA

SEQ ID NO: 240338 - protein, 15 aa, Artificial Sequence
  Description of Artificial Sequence: Synthetic peptide
  Seed: LRMKWMMAMKYPITA
LRMKVMMHMAYPKTA

SEQ ID NO: 240339 - protein, 15 aa, Artificial Sequence
  Description of Artificial Sequence: Synthetic peptide
  Seed: LRMKWMMAMKYPITA
LRMKVMMHMAYPLTA

SEQ ID NO: 240340 - protein, 15 aa, Artificial Sequence
  Description of Artificial Sequence: Synthetic peptide
  Seed: LRMKWMMAMKYPITA
LRMKVMMHMAYPMTA

SEQ ID NO: 240341 - protein, 15 aa, Artificial Sequence
  Description of Artificial Sequence: Synthetic peptide
  Seed: LRMKWMMAMKYPITA
LRMKVMMHMAYPQTA

SEQ ID NO: 240342 - protein, 15 aa, Artificial Sequence
  Description of Artificial Sequence: Synthetic peptide
  Seed: LRMKWMMAMKYPITA
LRMKVMMHMAYPRTA

SEQ ID NO: 240343 - protein, 15 aa, Artificial Sequence
  Description of Artificial Sequence: Synthetic peptide
  Seed: LRMKWMMAMKYPITA
LRMKVMMHMAYPSTA

SEQ ID NO: 240344 - protein, 15 aa, Artificial Sequence
  Description of Artificial Sequence: Synthetic peptide
  Seed: LRMKWMMAMKYPITA
LRMKVMMHMAYPTTA

SEQ ID NO: 240345 - protein, 15 aa, Artificial Sequence
  Description of Artificial Sequence: Synthetic peptide
  Seed: LRMKWMMAMKYPITA
LRMKVMMHMAYPVTA

SEQ ID NO: 240346 - protein, 15 aa, Artificial Sequence
  Description of Artificial Sequence: Synthetic peptide
  Seed: LRMKWMMAMKYPITA
LRMKVMMHMAYPWTA

SEQ ID NO: 240347 - protein, 15 aa, Artificial Sequence
  Description of Artificial Sequence: Synthetic peptide
  Seed: LRMKWMMAMKYPITA
LRMKVMMHMAYPYTA

SEQ ID NO: 240348 - protein, 15 aa, Artificial Sequence
  Description of Artificial Sequence: Synthetic peptide
  Seed: LRMKWMMAMKYPITA
LRMKVMMHMGYPATA

SEQ ID NO: 240349 - protein, 15 aa, Artificial Sequence
  Description of Artificial Sequence: Synthetic peptide
  Seed: LRMKWMMAMKYPITA
LRMKVMMHMGYPFTA

SEQ ID NO: 240350 - protein, 15 aa, Artificial Sequence
  Description of Artificial Sequence: Synthetic peptide
  Seed: LRMKWMMAMKYPITA
LRMKVMMHMGYPITA

SEQ ID NO: 240351 - protein, 15 aa, Artificial Sequence
  Description of Artificial Sequence: Synthetic peptide
  Seed: LRMKWMMAMKYPITA
LRMKVMMHMGYPKTA

SEQ ID NO: 240352 - protein, 15 aa, Artificial Sequence
  Description of Artificial Sequence: Synthetic peptide
  Seed: LRMKWMMAMKYPITA
LRMKVMMHMGYPLTA

SEQ ID NO: 240353 - protein, 15 aa, Artificial Sequence
  Description of Artificial Sequence: Synthetic peptide
  Seed: LRMKWMMAMKYPITA
LRMKVMMHMGYPMTA

SEQ ID NO: 240354 - protein, 15 aa, Artificial Sequence
  Description of Artificial Sequence: Synthetic peptide
  Seed: LRMKWMMAMKYPITA
LRMKVMMHMGYPRTA

SEQ ID NO: 240355 - protein, 15 aa, Artificial Sequence
  Description of Artificial Sequence: Synthetic peptide
  Seed: LRMKWMMAMKYPITA
LRMKVMMHMGYPSTA

SEQ ID NO: 240356 - protein, 15 aa, Artificial Sequence
  Description of Artificial Sequence: Synthetic peptide
  Seed: LRMKWMMAMKYPITA
LRMKVMMHMGYPVTA

SEQ ID NO: 240357 - protein, 15 aa, Artificial Sequence
  Description of Artificial Sequence: Synthetic peptide
  Seed: LRMKWMMAMKYPITA
LRMKVMMHMGYPYTA

SEQ ID NO: 240358 - protein, 15 aa, Artificial Sequence
  Description of Artificial Sequence: Synthetic peptide
  Seed: LRMKWMMAMKYPITA
LRMKVMMHMHYPATA

SEQ ID NO: 240359 - protein, 15 aa, Artificial Sequence
  Description of Artificial Sequence: Synthetic peptide
  Seed: LRMKWMMAMKYPITA
LRMKVMMHMHYPFTA

SEQ ID NO: 240360 - protein, 15 aa, Artificial Sequence
  Description of Artificial Sequence: Synthetic peptide
  Seed: LRMKWMMAMKYPITA
LRMKVMMHMHYPHTA

SEQ ID NO: 240361 - protein, 15 aa, Artificial Sequence
  Description of Artificial Sequence: Synthetic peptide
  Seed: LRMKWMMAMKYPITA
LRMKVMMHMHYPITA

SEQ ID NO: 240362 - protein, 15 aa, Artificial Sequence
  Description of Artificial Sequence: Synthetic peptide
  Seed: LRMKWMMAMKYPITA
LRMKVMMHMHYPKTA

SEQ ID NO: 240363 - protein, 15 aa, Artificial Sequence
  Description of Artificial Sequence: Synthetic peptide
  Seed: LRMKWMMAMKYPITA
LRMKVMMHMHYPLTA

SEQ ID NO: 240364 - protein, 15 aa, Artificial Sequence
  Description of Artificial Sequence: Synthetic peptide
  Seed: LRMKWMMAMKYPITA
LRMKVMMHMHYPMTA

SEQ ID NO: 240365 - protein, 15 aa, Artificial Sequence
  Description of Artificial Sequence: Synthetic peptide
  Seed: LRMKWMMAMKYPITA
LRMKVMMHMHYPRTA

SEQ ID NO: 240366 - protein, 15 aa, Artificial Sequence
  Description of Artificial Sequence: Synthetic peptide
  Seed: LRMKWMMAMKYPITA
LRMKVMMHMHYPSTA

SEQ ID NO: 240367 - protein, 15 aa, Artificial Sequence
  Description of Artificial Sequence: Synthetic peptide
  Seed: LRMKWMMAMKYPITA
LRMKVMMHMHYPVTA

SEQ ID NO: 240368 - protein, 15 aa, Artificial Sequence
  Description of Artificial Sequence: Synthetic peptide
  Seed: LRMKWMMAMKYPITA
LRMKVMMHMHYPWTA

SEQ ID NO: 240369 - protein, 15 aa, Artificial Sequence
  Description of Artificial Sequence: Synthetic peptide
  Seed: LRMKWMMAMKYPITA
LRMKVMMHMHYPYTA

SEQ ID NO: 240370 - protein, 15 aa, Artificial Sequence
  Description of Artificial Sequence: Synthetic peptide
  Seed: LRMKWMMAMKYPITA
LRMKVMMHMIYPFTA

SEQ ID NO: 240371 - protein, 15 aa, Artificial Sequence
  Description of Artificial Sequence: Synthetic peptide
  Seed: LRMKWMMAMKYPITA
LRMKVMMHMIYPITA

SEQ ID NO: 240372 - protein, 15 aa, Artificial Sequence
  Description of Artificial Sequence: Synthetic peptide
  Seed: LRMKWMMAMKYPITA
LRMKVMMHMIYPKTA

SEQ ID NO: 240373 - protein, 15 aa, Artificial Sequence
  Description of Artificial Sequence: Synthetic peptide
  Seed: LRMKWMMAMKYPITA
LRMKVMMHMIYPLTA

SEQ ID NO: 240374 - protein, 15 aa, Artificial Sequence
  Description of Artificial Sequence: Synthetic peptide
  Seed: LRMKWMMAMKYPITA
LRMKVMMHMIYPMTA

SEQ ID NO: 240375 - protein, 15 aa, Artificial Sequence
  Description of Artificial Sequence: Synthetic peptide
  Seed: LRMKWMMAMKYPITA
LRMKVMMHMIYPRTA

SEQ ID NO: 240376 - protein, 15 aa, Artificial Sequence
  Description of Artificial Sequence: Synthetic peptide
  Seed: LRMKWMMAMKYPITA
LRMKVMMHMIYPVTA

SEQ ID NO: 240377 - protein, 15 aa, Artificial Sequence
  Description of Artificial Sequence: Synthetic peptide
  Seed: LRMKWMMAMKYPITA
LRMKVMMHMIYPYTA

SEQ ID NO: 240378 - protein, 15 aa, Artificial Sequence
  Description of Artificial Sequence: Synthetic peptide
  Seed: LRMKWMMAMKYPITA
LRMKVMMHMKYPATA

SEQ ID NO: 240379 - protein, 15 aa, Artificial Sequence
  Description of Artificial Sequence: Synthetic peptide
  Seed: LRMKWMMAMKYPITA
LRMKVMMHMKYPETA

SEQ ID NO: 240380 - protein, 15 aa, Artificial Sequence
  Description of Artificial Sequence: Synthetic peptide
  Seed: LRMKWMMAMKYPITA
LRMKVMMHMKYPFTA

SEQ ID NO: 240381 - protein, 15 aa, Artificial Sequence
  Description of Artificial Sequence: Synthetic peptide
  Seed: LRMKWMMAMKYPITA
LRMKVMMHMKYPGTA

SEQ ID NO: 240382 - protein, 15 aa, Artificial Sequence
  Description of Artificial Sequence: Synthetic peptide
  Seed: LRMKWMMAMKYPITA
LRMKVMMHMKYPHTA

SEQ ID NO: 240383 - protein, 15 aa, Artificial Sequence
  Description of Artificial Sequence: Synthetic peptide
  Seed: LRMKWMMAMKYPITA
LRMKVMMHMKYPITA

SEQ ID NO: 240384 - protein, 15 aa, Artificial Sequence
  Description of Artificial Sequence: Synthetic peptide
  Seed: LRMKWMMAMKYPITA
LRMKVMMHMKYPKTA

SEQ ID NO: 240385 - protein, 15 aa, Artificial Sequence
  Description of Artificial Sequence: Synthetic peptide
  Seed: LRMKWMMAMKYPITA
LRMKVMMHMKYPLTA

SEQ ID NO: 240386 - protein, 15 aa, Artificial Sequence
  Description of Artificial Sequence: Synthetic peptide
  Seed: LRMKWMMAMKYPITA
LRMKVMMHMKYPMTA

SEQ ID NO: 240387 - protein, 15 aa, Artificial Sequence
  Description of Artificial Sequence: Synthetic peptide
  Seed: LRMKWMMAMKYPITA
LRMKVMMHMKYPNTA

SEQ ID NO: 240388 - protein, 15 aa, Artificial Sequence
  Description of Artificial Sequence: Synthetic peptide
  Seed: LRMKWMMAMKYPITA
LRMKVMMHMKYPPTA

SEQ ID NO: 240389 - protein, 15 aa, Artificial Sequence
  Description of Artificial Sequence: Synthetic peptide
  Seed: LRMKWMMAMKYPITA
LRMKVMMHMKYPQTA

SEQ ID NO: 240390 - protein, 15 aa, Artificial Sequence
  Description of Artificial Sequence: Synthetic peptide
  Seed: LRMKWMMAMKYPITA
LRMKVMMHMKYPRTA

SEQ ID NO: 240391 - protein, 15 aa, Artificial Sequence
  Description of Artificial Sequence: Synthetic peptide
  Seed: LRMKWMMAMKYPITA
LRMKVMMHMKYPSTA

SEQ ID NO: 240392 - protein, 15 aa, Artificial Sequence
  Description of Artificial Sequence: Synthetic peptide
  Seed: LRMKWMMAMKYPITA
LRMKVMMHMKYPTTA

SEQ ID NO: 240393 - protein, 15 aa, Artificial Sequence
  Description of Artificial Sequence: Synthetic peptide
  Seed: LRMKWMMAMKYPITA
LRMKVMMHMKYPVTA

SEQ ID NO: 240394 - protein, 15 aa, Artificial Sequence
  Description of Artificial Sequence: Synthetic peptide
  Seed: LRMKWMMAMKYPITA
LRMKVMMHMKYPWTA

SEQ ID NO: 240395 - protein, 15 aa, Artificial Sequence
  Description of Artificial Sequence: Synthetic peptide
  Seed: LRMKWMMAMKYPITA
LRMKVMMHMKYPYTA

SEQ ID NO: 240396 - protein, 15 aa, Artificial Sequence
  Description of Artificial Sequence: Synthetic peptide
  Seed: LRMKWMMAMKYPITA
LRMKVMMHMLYPKTA

SEQ ID NO: 240397 - protein, 15 aa, Artificial Sequence
  Description of Artificial Sequence: Synthetic peptide
  Seed: LRMKWMMAMKYPITA
LRMKVMMHMLYPRTA

SEQ ID NO: 240398 - protein, 15 aa, Artificial Sequence
  Description of Artificial Sequence: Synthetic peptide
  Seed: LRMKWMMAMKYPITA
LRMKVMMHMMYPITA

SEQ ID NO: 240399 - protein, 15 aa, Artificial Sequence
  Description of Artificial Sequence: Synthetic peptide
  Seed: LRMKWMMAMKYPITA
LRMKVMMHMMYPKTA

SEQ ID NO: 240400 - protein, 15 aa, Artificial Sequence
  Description of Artificial Sequence: Synthetic peptide
  Seed: LRMKWMMAMKYPITA
LRMKVMMHMMYPLTA

SEQ ID NO: 240401 - protein, 15 aa, Artificial Sequence
  Description of Artificial Sequence: Synthetic peptide
  Seed: LRMKWMMAMKYPITA
LRMKVMMHMMYPMTA

SEQ ID NO: 240402 - protein, 15 aa, Artificial Sequence
  Description of Artificial Sequence: Synthetic peptide
  Seed: LRMKWMMAMKYPITA
LRMKVMMHMMYPRTA

SEQ ID NO: 240403 - protein, 15 aa, Artificial Sequence
  Description of Artificial Sequence: Synthetic peptide
  Seed: LRMKWMMAMKYPITA
LRMKVMMHMMYPVTA

SEQ ID NO: 240404 - protein, 15 aa, Artificial Sequence
  Description of Artificial Sequence: Synthetic peptide
  Seed: LRMKWMMAMKYPITA
LRMKVMMHMMYPYTA

SEQ ID NO: 240405 - protein, 15 aa, Artificial Sequence
  Description of Artificial Sequence: Synthetic peptide
  Seed: LRMKWMMAMKYPITA
LRMKVMMHMNYPATA

SEQ ID NO: 240406 - protein, 15 aa, Artificial Sequence
  Description of Artificial Sequence: Synthetic peptide
  Seed: LRMKWMMAMKYPITA
LRMKVMMHMNYPFTA

SEQ ID NO: 240407 - protein, 15 aa, Artificial Sequence
  Description of Artificial Sequence: Synthetic peptide
  Seed: LRMKWMMAMKYPITA
LRMKVMMHMNYPHTA

SEQ ID NO: 240408 - protein, 15 aa, Artificial Sequence
  Description of Artificial Sequence: Synthetic peptide
  Seed: LRMKWMMAMKYPITA
LRMKVMMHMNYPITA

SEQ ID NO: 240409 - protein, 15 aa, Artificial Sequence
  Description of Artificial Sequence: Synthetic peptide
  Seed: LRMKWMMAMKYPITA
LRMKVMMHMNYPKTA

SEQ ID NO: 240410 - protein, 15 aa, Artificial Sequence
  Description of Artificial Sequence: Synthetic peptide
  Seed: LRMKWMMAMKYPITA
LRMKVMMHMNYPLTA

SEQ ID NO: 240411 - protein, 15 aa, Artificial Sequence
  Description of Artificial Sequence: Synthetic peptide
  Seed: LRMKWMMAMKYPITA
LRMKVMMHMNYPMTA

SEQ ID NO: 240412 - protein, 15 aa, Artificial Sequence
  Description of Artificial Sequence: Synthetic peptide
  Seed: LRMKWMMAMKYPITA
LRMKVMMHMNYPRTA

SEQ ID NO: 240413 - protein, 15 aa, Artificial Sequence
  Description of Artificial Sequence: Synthetic peptide
  Seed: LRMKWMMAMKYPITA
LRMKVMMHMNYPSTA

SEQ ID NO: 240414 - protein, 15 aa, Artificial Sequence
  Description of Artificial Sequence: Synthetic peptide
  Seed: LRMKWMMAMKYPITA
LRMKVMMHMNYPTTA

SEQ ID NO: 240415 - protein, 15 aa, Artificial Sequence
  Description of Artificial Sequence: Synthetic peptide
  Seed: LRMKWMMAMKYPITA
LRMKVMMHMNYPVTA

SEQ ID NO: 240416 - protein, 15 aa, Artificial Sequence
  Description of Artificial Sequence: Synthetic peptide
  Seed: LRMKWMMAMKYPITA
LRMKVMMHMNYPYTA

SEQ ID NO: 240417 - protein, 15 aa, Artificial Sequence
  Description of Artificial Sequence: Synthetic peptide
  Seed: LRMKWMMAMKYPITA
LRMKVMMHMPYPATA

SEQ ID NO: 240418 - protein, 15 aa, Artificial Sequence
  Description of Artificial Sequence: Synthetic peptide
  Seed: LRMKWMMAMKYPITA
LRMKVMMHMPYPFTA

SEQ ID NO: 240419 - protein, 15 aa, Artificial Sequence
  Description of Artificial Sequence: Synthetic peptide
  Seed: LRMKWMMAMKYPITA
LRMKVMMHMPYPHTA

SEQ ID NO: 240420 - protein, 15 aa, Artificial Sequence
  Description of Artificial Sequence: Synthetic peptide
  Seed: LRMKWMMAMKYPITA
LRMKVMMHMPYPITA

SEQ ID NO: 240421 - protein, 15 aa, Artificial Sequence
  Description of Artificial Sequence: Synthetic peptide
  Seed: LRMKWMMAMKYPITA
LRMKVMMHMPYPKTA

SEQ ID NO: 240422 - protein, 15 aa, Artificial Sequence
  Description of Artificial Sequence: Synthetic peptide
  Seed: LRMKWMMAMKYPITA
LRMKVMMHMPYPLTA

SEQ ID NO: 240423 - protein, 15 aa, Artificial Sequence
  Description of Artificial Sequence: Synthetic peptide
  Seed: LRMKWMMAMKYPITA
LRMKVMMHMPYPMTA

SEQ ID NO: 240424 - protein, 15 aa, Artificial Sequence
  Description of Artificial Sequence: Synthetic peptide
  Seed: LRMKWMMAMKYPITA
LRMKVMMHMPYPQTA

SEQ ID NO: 240425 - protein, 15 aa, Artificial Sequence
  Description of Artificial Sequence: Synthetic peptide
  Seed: LRMKWMMAMKYPITA
LRMKVMMHMPYPRTA

SEQ ID NO: 240426 - protein, 15 aa, Artificial Sequence
  Description of Artificial Sequence: Synthetic peptide
  Seed: LRMKWMMAMKYPITA
LRMKVMMHMPYPSTA

SEQ ID NO: 240427 - protein, 15 aa, Artificial Sequence
  Description of Artificial Sequence: Synthetic peptide
  Seed: LRMKWMMAMKYPITA
LRMKVMMHMPYPVTA

SEQ ID NO: 240428 - protein, 15 aa, Artificial Sequence
  Description of Artificial Sequence: Synthetic peptide
  Seed: LRMKWMMAMKYPITA
LRMKVMMHMPYPYTA

SEQ ID NO: 240429 - protein, 15 aa, Artificial Sequence
  Description of Artificial Sequence: Synthetic peptide
  Seed: LRMKWMMAMKYPITA
LRMKVMMHMQYPFTA

SEQ ID NO: 240430 - protein, 15 aa, Artificial Sequence
  Description of Artificial Sequence: Synthetic peptide
  Seed: LRMKWMMAMKYPITA
LRMKVMMHMQYPITA

SEQ ID NO: 240431 - protein, 15 aa, Artificial Sequence
  Description of Artificial Sequence: Synthetic peptide
  Seed: LRMKWMMAMKYPITA
LRMKVMMHMQYPKTA

SEQ ID NO: 240432 - protein, 15 aa, Artificial Sequence
  Description of Artificial Sequence: Synthetic peptide
  Seed: LRMKWMMAMKYPITA
LRMKVMMHMQYPLTA

SEQ ID NO: 240433 - protein, 15 aa, Artificial Sequence
  Description of Artificial Sequence: Synthetic peptide
  Seed: LRMKWMMAMKYPITA
LRMKVMMHMQYPMTA

SEQ ID NO: 240434 - protein, 15 aa, Artificial Sequence
  Description of Artificial Sequence: Synthetic peptide
  Seed: LRMKWMMAMKYPITA
LRMKVMMHMQYPRTA

SEQ ID NO: 240435 - protein, 15 aa, Artificial Sequence
  Description of Artificial Sequence: Synthetic peptide
  Seed: LRMKWMMAMKYPITA
LRMKVMMHMQYPVTA

SEQ ID NO: 240436 - protein, 15 aa, Artificial Sequence
  Description of Artificial Sequence: Synthetic peptide
  Seed: LRMKWMMAMKYPITA
LRMKVMMHMQYPYTA

SEQ ID NO: 240437 - protein, 15 aa, Artificial Sequence
  Description of Artificial Sequence: Synthetic peptide
  Seed: LRMKWMMAMKYPITA
LRMKVMMHMRYPATA

SEQ ID NO: 240438 - protein, 15 aa, Artificial Sequence
  Description of Artificial Sequence: Synthetic peptide
  Seed: LRMKWMMAMKYPITA
LRMKVMMHMRYPCTA

SEQ ID NO: 240439 - protein, 15 aa, Artificial Sequence
  Description of Artificial Sequence: Synthetic peptide
  Seed: LRMKWMMAMKYPITA
LRMKVMMHMRYPDTA

SEQ ID NO: 240440 - protein, 15 aa, Artificial Sequence
  Description of Artificial Sequence: Synthetic peptide
  Seed: LRMKWMMAMKYPITA
LRMKVMMHMRYPETA

SEQ ID NO: 240441 - protein, 15 aa, Artificial Sequence
  Description of Artificial Sequence: Synthetic peptide
  Seed: LRMKWMMAMKYPITA
LRMKVMMHMRYPFTA

SEQ ID NO: 240442 - protein, 15 aa, Artificial Sequence
  Description of Artificial Sequence: Synthetic peptide
  Seed: LRMKWMMAMKYPITA
LRMKVMMHMRYPGTA

SEQ ID NO: 240443 - protein, 15 aa, Artificial Sequence
  Description of Artificial Sequence: Synthetic peptide
  Seed: LRMKWMMAMKYPITA
LRMKVMMHMRYPHTA

SEQ ID NO: 240444 - protein, 15 aa, Artificial Sequence
  Description of Artificial Sequence: Synthetic peptide
  Seed: LRMKWMMAMKYPITA
LRMKVMMHMRYPITA

SEQ ID NO: 240445 - protein, 15 aa, Artificial Sequence
  Description of Artificial Sequence: Synthetic peptide
  Seed: LRMKWMMAMKYPITA
LRMKVMMHMRYPKTA

SEQ ID NO: 240446 - protein, 15 aa, Artificial Sequence
  Description of Artificial Sequence: Synthetic peptide
  Seed: LRMKWMMAMKYPITA
LRMKVMMHMRYPLTA

SEQ ID NO: 240447 - protein, 15 aa, Artificial Sequence
  Description of Artificial Sequence: Synthetic peptide
  Seed: LRMKWMMAMKYPITA
LRMKVMMHMRYPMTA

SEQ ID NO: 240448 - protein, 15 aa, Artificial Sequence
  Description of Artificial Sequence: Synthetic peptide
  Seed: LRMKWMMAMKYPITA
LRMKVMMHMRYPNTA

SEQ ID NO: 240449 - protein, 15 aa, Artificial Sequence
  Description of Artificial Sequence: Synthetic peptide
  Seed: LRMKWMMAMKYPITA
LRMKVMMHMRYPPTA

SEQ ID NO: 240450 - protein, 15 aa, Artificial Sequence
  Description of Artificial Sequence: Synthetic peptide
  Seed: LRMKWMMAMKYPITA
LRMKVMMHMRYPQTA

SEQ ID NO: 240451 - protein, 15 aa, Artificial Sequence
  Description of Artificial Sequence: Synthetic peptide
  Seed: LRMKWMMAMKYPITA
LRMKVMMHMRYPRTA

SEQ ID NO: 240452 - protein, 15 aa, Artificial Sequence
  Description of Artificial Sequence: Synthetic peptide
  Seed: LRMKWMMAMKYPITA
LRMKVMMHMRYPSTA

SEQ ID NO: 240453 - protein, 15 aa, Artificial Sequence
  Description of Artificial Sequence: Synthetic peptide
  Seed: LRMKWMMAMKYPITA
LRMKVMMHMRYPTTA

SEQ ID NO: 240454 - protein, 15 aa, Artificial Sequence
  Description of Artificial Sequence: Synthetic peptide
  Seed: LRMKWMMAMKYPITA
LRMKVMMHMRYPVTA

SEQ ID NO: 240455 - protein, 15 aa, Artificial Sequence
  Description of Artificial Sequence: Synthetic peptide
  Seed: LRMKWMMAMKYPITA
LRMKVMMHMRYPWTA

SEQ ID NO: 240456 - protein, 15 aa, Artificial Sequence
  Description of Artificial Sequence: Synthetic peptide
  Seed: LRMKWMMAMKYPITA
LRMKVMMHMRYPYTA

SEQ ID NO: 240457 - protein, 15 aa, Artificial Sequence
  Description of Artificial Sequence: Synthetic peptide
  Seed: LRMKWMMAMKYPITA
LRMKVMMHMSYPATA

SEQ ID NO: 240458 - protein, 15 aa, Artificial Sequence
  Description of Artificial Sequence: Synthetic peptide
  Seed: LRMKWMMAMKYPITA
LRMKVMMHMSYPFTA

SEQ ID NO: 240459 - protein, 15 aa, Artificial Sequence
  Description of Artificial Sequence: Synthetic peptide
  Seed: LRMKWMMAMKYPITA
LRMKVMMHMSYPHTA

SEQ ID NO: 240460 - protein, 15 aa, Artificial Sequence
  Description of Artificial Sequence: Synthetic peptide
  Seed: LRMKWMMAMKYPITA
LRMKVMMHMSYPITA

SEQ ID NO: 240461 - protein, 15 aa, Artificial Sequence
  Description of Artificial Sequence: Synthetic peptide
  Seed: LRMKWMMAMKYPITA
LRMKVMMHMSYPKTA

SEQ ID NO: 240462 - protein, 15 aa, Artificial Sequence
  Description of Artificial Sequence: Synthetic peptide
  Seed: LRMKWMMAMKYPITA
LRMKVMMHMSYPLTA

SEQ ID NO: 240463 - protein, 15 aa, Artificial Sequence
  Description of Artificial Sequence: Synthetic peptide
  Seed: LRMKWMMAMKYPITA
LRMKVMMHMSYPMTA

SEQ ID NO: 240464 - protein, 15 aa, Artificial Sequence
  Description of Artificial Sequence: Synthetic peptide
  Seed: LRMKWMMAMKYPITA
LRMKVMMHMSYPRTA

SEQ ID NO: 240465 - protein, 15 aa, Artificial Sequence
  Description of Artificial Sequence: Synthetic peptide
  Seed: LRMKWMMAMKYPITA
LRMKVMMHMSYPSTA

SEQ ID NO: 240466 - protein, 15 aa, Artificial Sequence
  Description of Artificial Sequence: Synthetic peptide
  Seed: LRMKWMMAMKYPITA
LRMKVMMHMSYPTTA

SEQ ID NO: 240467 - protein, 15 aa, Artificial Sequence
  Description of Artificial Sequence: Synthetic peptide
  Seed: LRMKWMMAMKYPITA
LRMKVMMHMSYPVTA

SEQ ID NO: 240468 - protein, 15 aa, Artificial Sequence
  Description of Artificial Sequence: Synthetic peptide
  Seed: LRMKWMMAMKYPITA
LRMKVMMHMSYPYTA

SEQ ID NO: 240469 - protein, 15 aa, Artificial Sequence
  Description of Artificial Sequence: Synthetic peptide
  Seed: LRMKWMMAMKYPITA
LRMKVMMHMTYPATA

SEQ ID NO: 240470 - protein, 15 aa, Artificial Sequence
  Description of Artificial Sequence: Synthetic peptide
  Seed: LRMKWMMAMKYPITA
LRMKVMMHMTYPFTA

SEQ ID NO: 240471 - protein, 15 aa, Artificial Sequence
  Description of Artificial Sequence: Synthetic peptide
  Seed: LRMKWMMAMKYPITA
LRMKVMMHMTYPHTA

SEQ ID NO: 240472 - protein, 15 aa, Artificial Sequence
  Description of Artificial Sequence: Synthetic peptide
  Seed: LRMKWMMAMKYPITA
LRMKVMMHMTYPITA

SEQ ID NO: 240473 - protein, 15 aa, Artificial Sequence
  Description of Artificial Sequence: Synthetic peptide
  Seed: LRMKWMMAMKYPITA
LRMKVMMHMTYPKTA

SEQ ID NO: 240474 - protein, 15 aa, Artificial Sequence
  Description of Artificial Sequence: Synthetic peptide
  Seed: LRMKWMMAMKYPITA
LRMKVMMHMTYPLTA

SEQ ID NO: 240475 - protein, 15 aa, Artificial Sequence
  Description of Artificial Sequence: Synthetic peptide
  Seed: LRMKWMMAMKYPITA
LRMKVMMHMTYPMTA

SEQ ID NO: 240476 - protein, 15 aa, Artificial Sequence
  Description of Artificial Sequence: Synthetic peptide
  Seed: LRMKWMMAMKYPITA
LRMKVMMHMTYPRTA

SEQ ID NO: 240477 - protein, 15 aa, Artificial Sequence
  Description of Artificial Sequence: Synthetic peptide
  Seed: LRMKWMMAMKYPITA
LRMKVMMHMTYPSTA

SEQ ID NO: 240478 - protein, 15 aa, Artificial Sequence
  Description of Artificial Sequence: Synthetic peptide
  Seed: LRMKWMMAMKYPITA
LRMKVMMHMTYPVTA

SEQ ID NO: 240479 - protein, 15 aa, Artificial Sequence
  Description of Artificial Sequence: Synthetic peptide
  Seed: LRMKWMMAMKYPITA
LRMKVMMHMTYPYTA

SEQ ID NO: 240480 - protein, 15 aa, Artificial Sequence
  Description of Artificial Sequence: Synthetic peptide
  Seed: LRMKWMMAMKYPITA
LRMKVMMHMVYPATA

SEQ ID NO: 240481 - protein, 15 aa, Artificial Sequence
  Description of Artificial Sequence: Synthetic peptide
  Seed: LRMKWMMAMKYPITA
LRMKVMMHMVYPFTA

SEQ ID NO: 240482 - protein, 15 aa, Artificial Sequence
  Description of Artificial Sequence: Synthetic peptide
  Seed: LRMKWMMAMKYPITA
LRMKVMMHMVYPHTA

SEQ ID NO: 240483 - protein, 15 aa, Artificial Sequence
  Description of Artificial Sequence: Synthetic peptide
  Seed: LRMKWMMAMKYPITA
LRMKVMMHMVYPITA

SEQ ID NO: 240484 - protein, 15 aa, Artificial Sequence
  Description of Artificial Sequence: Synthetic peptide
  Seed: LRMKWMMAMKYPITA
LRMKVMMHMVYPKTA

SEQ ID NO: 240485 - protein, 15 aa, Artificial Sequence
  Description of Artificial Sequence: Synthetic peptide
  Seed: LRMKWMMAMKYPITA
LRMKVMMHMVYPLTA

SEQ ID NO: 240486 - protein, 15 aa, Artificial Sequence
  Description of Artificial Sequence: Synthetic peptide
  Seed: LRMKWMMAMKYPITA
LRMKVMMHMVYPMTA

SEQ ID NO: 240487 - protein, 15 aa, Artificial Sequence
  Description of Artificial Sequence: Synthetic peptide
  Seed: LRMKWMMAMKYPITA
LRMKVMMHMVYPRTA

SEQ ID NO: 240488 - protein, 15 aa, Artificial Sequence
  Description of Artificial Sequence: Synthetic peptide
  Seed: LRMKWMMAMKYPITA
LRMKVMMHMVYPSTA

SEQ ID NO: 240489 - protein, 15 aa, Artificial Sequence
  Description of Artificial Sequence: Synthetic peptide
  Seed: LRMKWMMAMKYPITA
LRMKVMMHMVYPVTA

SEQ ID NO: 240490 - protein, 15 aa, Artificial Sequence
  Description of Artificial Sequence: Synthetic peptide
  Seed: LRMKWMMAMKYPITA
LRMKVMMHMVYPYTA

SEQ ID NO: 240491 - protein, 15 aa, Artificial Sequence
  Description of Artificial Sequence: Synthetic peptide
  Seed: LRMKWMMAMKYPITA
LRMKVMMHMWYPRTA

SEQ ID NO: 240492 - protein, 15 aa, Artificial Sequence
  Description of Artificial Sequence: Synthetic peptide
  Seed: LRMKWMMAMKYPITA
LRMKVMMIMAYPATA

SEQ ID NO: 240493 - protein, 15 aa, Artificial Sequence
  Description of Artificial Sequence: Synthetic peptide
  Seed: LRMKWMMAMKYPITA
LRMKVMMIMAYPCTA

SEQ ID NO: 240494 - protein, 15 aa, Artificial Sequence
  Description of Artificial Sequence: Synthetic peptide
  Seed: LRMKWMMAMKYPITA
LRMKVMMIMAYPDTA

SEQ ID NO: 240495 - protein, 15 aa, Artificial Sequence
  Description of Artificial Sequence: Synthetic peptide
  Seed: LRMKWMMAMKYPITA
LRMKVMMIMAYPETA

SEQ ID NO: 240496 - protein, 15 aa, Artificial Sequence
  Description of Artificial Sequence: Synthetic peptide
  Seed: LRMKWMMAMKYPITA
LRMKVMMIMAYPFTA

SEQ ID NO: 240497 - protein, 15 aa, Artificial Sequence
  Description of Artificial Sequence: Synthetic peptide
  Seed: LRMKWMMAMKYPITA
LRMKVMMIMAYPGTA

SEQ ID NO: 240498 - protein, 15 aa, Artificial Sequence
  Description of Artificial Sequence: Synthetic peptide
  Seed: LRMKWMMAMKYPITA
LRMKVMMIMAYPHTA

SEQ ID NO: 240499 - protein, 15 aa, Artificial Sequence
  Description of Artificial Sequence: Synthetic peptide
  Seed: LRMKWMMAMKYPITA
LRMKVMMIMAYPITA

SEQ ID NO: 240500 - protein, 15 aa, Artificial Sequence
  Description of Artificial Sequence: Synthetic peptide
  Seed: LRMKWMMAMKYPITA
LRMKVMMIMAYPKTA

SEQ ID NO: 240501 - protein, 15 aa, Artificial Sequence
  Description of Artificial Sequence: Synthetic peptide
  Seed: LRMKWMMAMKYPITA
LRMKVMMIMAYPLTA

SEQ ID NO: 240502 - protein, 15 aa, Artificial Sequence
  Description of Artificial Sequence: Synthetic peptide
  Seed: LRMKWMMAMKYPITA
LRMKVMMIMAYPMTA

SEQ ID NO: 240503 - protein, 15 aa, Artificial Sequence
  Description of Artificial Sequence: Synthetic peptide
  Seed: LRMKWMMAMKYPITA
LRMKVMMIMAYPNTA

SEQ ID NO: 240504 - protein, 15 aa, Artificial Sequence
  Description of Artificial Sequence: Synthetic peptide
  Seed: LRMKWMMAMKYPITA
LRMKVMMIMAYPPTA

SEQ ID NO: 240505 - protein, 15 aa, Artificial Sequence
  Description of Artificial Sequence: Synthetic peptide
  Seed: LRMKWMMAMKYPITA
LRMKVMMIMAYPQTA

SEQ ID NO: 240506 - protein, 15 aa, Artificial Sequence
  Description of Artificial Sequence: Synthetic peptide
  Seed: LRMKWMMAMKYPITA
LRMKVMMIMAYPRTA

SEQ ID NO: 240507 - protein, 15 aa, Artificial Sequence
  Description of Artificial Sequence: Synthetic peptide
  Seed: LRMKWMMAMKYPITA
LRMKVMMIMAYPSTA

SEQ ID NO: 240508 - protein, 15 aa, Artificial Sequence
  Description of Artificial Sequence: Synthetic peptide
  Seed: LRMKWMMAMKYPITA
LRMKVMMIMAYPTTA

SEQ ID NO: 240509 - protein, 15 aa, Artificial Sequence
  Description of Artificial Sequence: Synthetic peptide
  Seed: LRMKWMMAMKYPITA
LRMKVMMIMAYPVTA

SEQ ID NO: 240510 - protein, 15 aa, Artificial Sequence
  Description of Artificial Sequence: Synthetic peptide
  Seed: LRMKWMMAMKYPITA
LRMKVMMIMAYPYTA

SEQ ID NO: 240511 - protein, 15 aa, Artificial Sequence
  Description of Artificial Sequence: Synthetic peptide
  Seed: LRMKWMMAMKYPITA
LRMKVMMIMGYPATA

SEQ ID NO: 240512 - protein, 15 aa, Artificial Sequence
  Description of Artificial Sequence: Synthetic peptide
  Seed: LRMKWMMAMKYPITA
LRMKVMMIMGYPCTA

SEQ ID NO: 240513 - protein, 15 aa, Artificial Sequence
  Description of Artificial Sequence: Synthetic peptide
  Seed: LRMKWMMAMKYPITA
LRMKVMMIMGYPFTA

SEQ ID NO: 240514 - protein, 15 aa, Artificial Sequence
  Description of Artificial Sequence: Synthetic peptide
  Seed: LRMKWMMAMKYPITA
LRMKVMMIMGYPGTA

SEQ ID NO: 240515 - protein, 15 aa, Artificial Sequence
  Description of Artificial Sequence: Synthetic peptide
  Seed: LRMKWMMAMKYPITA
LRMKVMMIMGYPHTA

SEQ ID NO: 240516 - protein, 15 aa, Artificial Sequence
  Description of Artificial Sequence: Synthetic peptide
  Seed: LRMKWMMAMKYPITA
LRMKVMMIMGYPITA

SEQ ID NO: 240517 - protein, 15 aa, Artificial Sequence
  Description of Artificial Sequence: Synthetic peptide
  Seed: LRMKWMMAMKYPITA
LRMKVMMIMGYPKTA

SEQ ID NO: 240518 - protein, 15 aa, Artificial Sequence
  Description of Artificial Sequence: Synthetic peptide
  Seed: LRMKWMMAMKYPITA
LRMKVMMIMGYPLTA

SEQ ID NO: 240519 - protein, 15 aa, Artificial Sequence
  Description of Artificial Sequence: Synthetic peptide
  Seed: LRMKWMMAMKYPITA
LRMKVMMIMGYPMTA

SEQ ID NO: 240520 - protein, 15 aa, Artificial Sequence
  Description of Artificial Sequence: Synthetic peptide
  Seed: LRMKWMMAMKYPITA
LRMKVMMIMGYPNTA

SEQ ID NO: 240521 - protein, 15 aa, Artificial Sequence
  Description of Artificial Sequence: Synthetic peptide
  Seed: LRMKWMMAMKYPITA
LRMKVMMIMGYPPTA

SEQ ID NO: 240522 - protein, 15 aa, Artificial Sequence
  Description of Artificial Sequence: Synthetic peptide
  Seed: LRMKWMMAMKYPITA
LRMKVMMIMGYPQTA

SEQ ID NO: 240523 - protein, 15 aa, Artificial Sequence
  Description of Artificial Sequence: Synthetic peptide
  Seed: LRMKWMMAMKYPITA
LRMKVMMIMGYPRTA

SEQ ID NO: 240524 - protein, 15 aa, Artificial Sequence
  Description of Artificial Sequence: Synthetic peptide
  Seed: LRMKWMMAMKYPITA
LRMKVMMIMGYPSTA

SEQ ID NO: 240525 - protein, 15 aa, Artificial Sequence
  Description of Artificial Sequence: Synthetic peptide
  Seed: LRMKWMMAMKYPITA
LRMKVMMIMGYPTTA

SEQ ID NO: 240526 - protein, 15 aa, Artificial Sequence
  Description of Artificial Sequence: Synthetic peptide
  Seed: LRMKWMMAMKYPITA
LRMKVMMIMGYPVTA

SEQ ID NO: 240527 - protein, 15 aa, Artificial Sequence
  Description of Artificial Sequence: Synthetic peptide
  Seed: LRMKWMMAMKYPITA
LRMKVMMIMGYPYTA

SEQ ID NO: 240528 - protein, 15 aa, Artificial Sequence
  Description of Artificial Sequence: Synthetic peptide
  Seed: LRMKWMMAMKYPITA
LRMKVMMIMHYPATA

SEQ ID NO: 240529 - protein, 15 aa, Artificial Sequence
  Description of Artificial Sequence: Synthetic peptide
  Seed: LRMKWMMAMKYPITA
LRMKVMMIMHYPGTA

SEQ ID NO: 240530 - protein, 15 aa, Artificial Sequence
  Description of Artificial Sequence: Synthetic peptide
  Seed: LRMKWMMAMKYPITA
LRMKVMMIMHYPHTA

SEQ ID NO: 240531 - protein, 15 aa, Artificial Sequence
  Description of Artificial Sequence: Synthetic peptide
  Seed: LRMKWMMAMKYPITA
LRMKVMMIMHYPITA

SEQ ID NO: 240532 - protein, 15 aa, Artificial Sequence
  Description of Artificial Sequence: Synthetic peptide
  Seed: LRMKWMMAMKYPITA
LRMKVMMIMHYPKTA

SEQ ID NO: 240533 - protein, 15 aa, Artificial Sequence
  Description of Artificial Sequence: Synthetic peptide
  Seed: LRMKWMMAMKYPITA
LRMKVMMIMHYPLTA

SEQ ID NO: 240534 - protein, 15 aa, Artificial Sequence
  Description of Artificial Sequence: Synthetic peptide
  Seed: LRMKWMMAMKYPITA
LRMKVMMIMHYPMTA

SEQ ID NO: 240535 - protein, 15 aa, Artificial Sequence
  Description of Artificial Sequence: Synthetic peptide
  Seed: LRMKWMMAMKYPITA
LRMKVMMIMHYPQTA

SEQ ID NO: 240536 - protein, 15 aa, Artificial Sequence
  Description of Artificial Sequence: Synthetic peptide
  Seed: LRMKWMMAMKYPITA
LRMKVMMIMHYPRTA

SEQ ID NO: 240537 - protein, 15 aa, Artificial Sequence
  Description of Artificial Sequence: Synthetic peptide
  Seed: LRMKWMMAMKYPITA
LRMKVMMIMHYPSTA

SEQ ID NO: 240538 - protein, 15 aa, Artificial Sequence
  Description of Artificial Sequence: Synthetic peptide
  Seed: LRMKWMMAMKYPITA
LRMKVMMIMHYPTTA

SEQ ID NO: 240539 - protein, 15 aa, Artificial Sequence
  Description of Artificial Sequence: Synthetic peptide
  Seed: LRMKWMMAMKYPITA
LRMKVMMIMHYPVTA

SEQ ID NO: 240540 - protein, 15 aa, Artificial Sequence
  Description of Artificial Sequence: Synthetic peptide
  Seed: LRMKWMMAMKYPITA
LRMKVMMIMHYPYTA

SEQ ID NO: 240541 - protein, 15 aa, Artificial Sequence
  Description of Artificial Sequence: Synthetic peptide
  Seed: LRMKWMMAMKYPITA
LRMKVMMIMIYPATA

SEQ ID NO: 240542 - protein, 15 aa, Artificial Sequence
  Description of Artificial Sequence: Synthetic peptide
  Seed: LRMKWMMAMKYPITA
LRMKVMMIMIYPGTA

SEQ ID NO: 240543 - protein, 15 aa, Artificial Sequence
  Description of Artificial Sequence: Synthetic peptide
  Seed: LRMKWMMAMKYPITA
LRMKVMMIMIYPSTA

SEQ ID NO: 240544 - protein, 15 aa, Artificial Sequence
  Description of Artificial Sequence: Synthetic peptide
  Seed: LRMKWMMAMKYPITA
LRMKVMMIMIYPVTA

SEQ ID NO: 240545 - protein, 15 aa, Artificial Sequence
  Description of Artificial Sequence: Synthetic peptide
  Seed: LRMKWMMAMKYPITA
LRMKVMMIMKYPATA

SEQ ID NO: 240546 - protein, 15 aa, Artificial Sequence
  Description of Artificial Sequence: Synthetic peptide
  Seed: LRMKWMMAMKYPITA
LRMKVMMIMKYPCTA

SEQ ID NO: 240547 - protein, 15 aa, Artificial Sequence
  Description of Artificial Sequence: Synthetic peptide
  Seed: LRMKWMMAMKYPITA
LRMKVMMIMKYPETA

SEQ ID NO: 240548 - protein, 15 aa, Artificial Sequence
  Description of Artificial Sequence: Synthetic peptide
  Seed: LRMKWMMAMKYPITA
LRMKVMMIMKYPFTA

SEQ ID NO: 240549 - protein, 15 aa, Artificial Sequence
  Description of Artificial Sequence: Synthetic peptide
  Seed: LRMKWMMAMKYPITA
LRMKVMMIMKYPGTA

SEQ ID NO: 240550 - protein, 15 aa, Artificial Sequence
  Description of Artificial Sequence: Synthetic peptide
  Seed: LRMKWMMAMKYPITA
LRMKVMMIMKYPHTA

SEQ ID NO: 240551 - protein, 15 aa, Artificial Sequence
  Description of Artificial Sequence: Synthetic peptide
  Seed: LRMKWMMAMKYPITA
LRMKVMMIMKYPITA

SEQ ID NO: 240552 - protein, 15 aa, Artificial Sequence
  Description of Artificial Sequence: Synthetic peptide
  Seed: LRMKWMMAMKYPITA
LRMKVMMIMKYPKTA

SEQ ID NO: 240553 - protein, 15 aa, Artificial Sequence
  Description of Artificial Sequence: Synthetic peptide
  Seed: LRMKWMMAMKYPITA
LRMKVMMIMKYPLTA

SEQ ID NO: 240554 - protein, 15 aa, Artificial Sequence
  Description of Artificial Sequence: Synthetic peptide
  Seed: LRMKWMMAMKYPITA
LRMKVMMIMKYPMTA

SEQ ID NO: 240555 - protein, 15 aa, Artificial Sequence
  Description of Artificial Sequence: Synthetic peptide
  Seed: LRMKWMMAMKYPITA
LRMKVMMIMKYPNTA

SEQ ID NO: 240556 - protein, 15 aa, Artificial Sequence
  Description of Artificial Sequence: Synthetic peptide
  Seed: LRMKWMMAMKYPITA
LRMKVMMIMKYPPTA

SEQ ID NO: 240557 - protein, 15 aa, Artificial Sequence
  Description of Artificial Sequence: Synthetic peptide
  Seed: LRMKWMMAMKYPITA
LRMKVMMIMKYPQTA

SEQ ID NO: 240558 - protein, 15 aa, Artificial Sequence
  Description of Artificial Sequence: Synthetic peptide
  Seed: LRMKWMMAMKYPITA
LRMKVMMIMKYPRTA

SEQ ID NO: 240559 - protein, 15 aa, Artificial Sequence
  Description of Artificial Sequence: Synthetic peptide
  Seed: LRMKWMMAMKYPITA
LRMKVMMIMKYPSTA

SEQ ID NO: 240560 - protein, 15 aa, Artificial Sequence
  Description of Artificial Sequence: Synthetic peptide
  Seed: LRMKWMMAMKYPITA
LRMKVMMIMKYPTTA

SEQ ID NO: 240561 - protein, 15 aa, Artificial Sequence
  Description of Artificial Sequence: Synthetic peptide
  Seed: LRMKWMMAMKYPITA
LRMKVMMIMKYPVTA

SEQ ID NO: 240562 - protein, 15 aa, Artificial Sequence
  Description of Artificial Sequence: Synthetic peptide
  Seed: LRMKWMMAMKYPITA
LRMKVMMIMKYPYTA

SEQ ID NO: 240563 - protein, 15 aa, Artificial Sequence
  Description of Artificial Sequence: Synthetic peptide
  Seed: LRMKWMMAMKYPITA
LRMKVMMIMMYPRTA

SEQ ID NO: 240564 - protein, 15 aa, Artificial Sequence
  Description of Artificial Sequence: Synthetic peptide
  Seed: LRMKWMMAMKYPITA
LRMKVMMIMNYPATA

SEQ ID NO: 240565 - protein, 15 aa, Artificial Sequence
  Description of Artificial Sequence: Synthetic peptide
  Seed: LRMKWMMAMKYPITA
LRMKVMMIMNYPCTA

SEQ ID NO: 240566 - protein, 15 aa, Artificial Sequence
  Description of Artificial Sequence: Synthetic peptide
  Seed: LRMKWMMAMKYPITA
LRMKVMMIMNYPDTA

SEQ ID NO: 240567 - protein, 15 aa, Artificial Sequence
  Description of Artificial Sequence: Synthetic peptide
  Seed: LRMKWMMAMKYPITA
LRMKVMMIMNYPETA

SEQ ID NO: 240568 - protein, 15 aa, Artificial Sequence
  Description of Artificial Sequence: Synthetic peptide
  Seed: LRMKWMMAMKYPITA
LRMKVMMIMNYPFTA

SEQ ID NO: 240569 - protein, 15 aa, Artificial Sequence
  Description of Artificial Sequence: Synthetic peptide
  Seed: LRMKWMMAMKYPITA
LRMKVMMIMNYPGTA

SEQ ID NO: 240570 - protein, 15 aa, Artificial Sequence
  Description of Artificial Sequence: Synthetic peptide
  Seed: LRMKWMMAMKYPITA
LRMKVMMIMNYPHTA

SEQ ID NO: 240571 - protein, 15 aa, Artificial Sequence
  Description of Artificial Sequence: Synthetic peptide
  Seed: LRMKWMMAMKYPITA
LRMKVMMIMNYPITA

SEQ ID NO: 240572 - protein, 15 aa, Artificial Sequence
  Description of Artificial Sequence: Synthetic peptide
  Seed: LRMKWMMAMKYPITA
LRMKVMMIMNYPLTA

SEQ ID NO: 240573 - protein, 15 aa, Artificial Sequence
  Description of Artificial Sequence: Synthetic peptide
  Seed: LRMKWMMAMKYPITA
LRMKVMMIMNYPMTA

SEQ ID NO: 240574 - protein, 15 aa, Artificial Sequence
  Description of Artificial Sequence: Synthetic peptide
  Seed: LRMKWMMAMKYPITA
LRMKVMMIMNYPNTA

SEQ ID NO: 240575 - protein, 15 aa, Artificial Sequence
  Description of Artificial Sequence: Synthetic peptide
  Seed: LRMKWMMAMKYPITA
LRMKVMMIMNYPQTA

SEQ ID NO: 240576 - protein, 15 aa, Artificial Sequence
  Description of Artificial Sequence: Synthetic peptide
  Seed: LRMKWMMAMKYPITA
LRMKVMMIMNYPRTA

SEQ ID NO: 240577 - protein, 15 aa, Artificial Sequence
  Description of Artificial Sequence: Synthetic peptide
  Seed: LRMKWMMAMKYPITA
LRMKVMMIMNYPSTA

SEQ ID NO: 240578 - protein, 15 aa, Artificial Sequence
  Description of Artificial Sequence: Synthetic peptide
  Seed: LRMKWMMAMKYPITA
LRMKVMMIMNYPTTA

SEQ ID NO: 240579 - protein, 15 aa, Artificial Sequence
  Description of Artificial Sequence: Synthetic peptide
  Seed: LRMKWMMAMKYPITA
LRMKVMMIMNYPVTA

SEQ ID NO: 240580 - protein, 15 aa, Artificial Sequence
  Description of Artificial Sequence: Synthetic peptide
  Seed: LRMKWMMAMKYPITA
LRMKVMMIMNYPYTA

SEQ ID NO: 240581 - protein, 15 aa, Artificial Sequence
  Description of Artificial Sequence: Synthetic peptide
  Seed: LRMKWMMAMKYPITA
LRMKVMMIMPYPATA

SEQ ID NO: 240582 - protein, 15 aa, Artificial Sequence
  Description of Artificial Sequence: Synthetic peptide
  Seed: LRMKWMMAMKYPITA
LRMKVMMIMPYPCTA

SEQ ID NO: 240583 - protein, 15 aa, Artificial Sequence
  Description of Artificial Sequence: Synthetic peptide
  Seed: LRMKWMMAMKYPITA
LRMKVMMIMPYPDTA

SEQ ID NO: 240584 - protein, 15 aa, Artificial Sequence
  Description of Artificial Sequence: Synthetic peptide
  Seed: LRMKWMMAMKYPITA
LRMKVMMIMPYPETA

SEQ ID NO: 240585 - protein, 15 aa, Artificial Sequence
  Description of Artificial Sequence: Synthetic peptide
  Seed: LRMKWMMAMKYPITA
LRMKVMMIMPYPFTA

SEQ ID NO: 240586 - protein, 15 aa, Artificial Sequence
  Description of Artificial Sequence: Synthetic peptide
  Seed: LRMKWMMAMKYPITA
LRMKVMMIMPYPGTA

SEQ ID NO: 240587 - protein, 15 aa, Artificial Sequence
  Description of Artificial Sequence: Synthetic peptide
  Seed: LRMKWMMAMKYPITA
LRMKVMMIMPYPHTA

SEQ ID NO: 240588 - protein, 15 aa, Artificial Sequence
  Description of Artificial Sequence: Synthetic peptide
  Seed: LRMKWMMAMKYPITA
LRMKVMMIMPYPITA

SEQ ID NO: 240589 - protein, 15 aa, Artificial Sequence
  Description of Artificial Sequence: Synthetic peptide
  Seed: LRMKWMMAMKYPITA
LRMKVMMIMPYPKTA

SEQ ID NO: 240590 - protein, 15 aa, Artificial Sequence
  Description of Artificial Sequence: Synthetic peptide
  Seed: LRMKWMMAMKYPITA
LRMKVMMIMPYPLTA

SEQ ID NO: 240591 - protein, 15 aa, Artificial Sequence
  Description of Artificial Sequence: Synthetic peptide
  Seed: LRMKWMMAMKYPITA
LRMKVMMIMPYPMTA

SEQ ID NO: 240592 - protein, 15 aa, Artificial Sequence
  Description of Artificial Sequence: Synthetic peptide
  Seed: LRMKWMMAMKYPITA
LRMKVMMIMPYPNTA

SEQ ID NO: 240593 - protein, 15 aa, Artificial Sequence
  Description of Artificial Sequence: Synthetic peptide
  Seed: LRMKWMMAMKYPITA
LRMKVMMIMPYPPTA

SEQ ID NO: 240594 - protein, 15 aa, Artificial Sequence
  Description of Artificial Sequence: Synthetic peptide
  Seed: LRMKWMMAMKYPITA
LRMKVMMIMPYPQTA

SEQ ID NO: 240595 - protein, 15 aa, Artificial Sequence
  Description of Artificial Sequence: Synthetic peptide
  Seed: LRMKWMMAMKYPITA
LRMKVMMIMPYPRTA

SEQ ID NO: 240596 - protein, 15 aa, Artificial Sequence
  Description of Artificial Sequence: Synthetic peptide
  Seed: LRMKWMMAMKYPITA
LRMKVMMIMPYPSTA

SEQ ID NO: 240597 - protein, 15 aa, Artificial Sequence
  Description of Artificial Sequence: Synthetic peptide
  Seed: LRMKWMMAMKYPITA
LRMKVMMIMPYPTTA

SEQ ID NO: 240598 - protein, 15 aa, Artificial Sequence
  Description of Artificial Sequence: Synthetic peptide
  Seed: LRMKWMMAMKYPITA
LRMKVMMIMPYPVTA

SEQ ID NO: 240599 - protein, 15 aa, Artificial Sequence
  Description of Artificial Sequence: Synthetic peptide
  Seed: LRMKWMMAMKYPITA
LRMKVMMIMPYPWTA

SEQ ID NO: 240600 - protein, 15 aa, Artificial Sequence
  Description of Artificial Sequence: Synthetic peptide
  Seed: LRMKWMMAMKYPITA
LRMKVMMIMPYPYTA

SEQ ID NO: 240601 - protein, 15 aa, Artificial Sequence
  Description of Artificial Sequence: Synthetic peptide
  Seed: LRMKWMMAMKYPITA
LRMKVMMIMRYPATA

SEQ ID NO: 240602 - protein, 15 aa, Artificial Sequence
  Description of Artificial Sequence: Synthetic peptide
  Seed: LRMKWMMAMKYPITA
LRMKVMMIMRYPCTA

SEQ ID NO: 240603 - protein, 15 aa, Artificial Sequence
  Description of Artificial Sequence: Synthetic peptide
  Seed: LRMKWMMAMKYPITA
LRMKVMMIMRYPDTA

SEQ ID NO: 240604 - protein, 15 aa, Artificial Sequence
  Description of Artificial Sequence: Synthetic peptide
  Seed: LRMKWMMAMKYPITA
LRMKVMMIMRYPETA

SEQ ID NO: 240605 - protein, 15 aa, Artificial Sequence
  Description of Artificial Sequence: Synthetic peptide
  Seed: LRMKWMMAMKYPITA
LRMKVMMIMRYPFTA

SEQ ID NO: 240606 - protein, 15 aa, Artificial Sequence
  Description of Artificial Sequence: Synthetic peptide
  Seed: LRMKWMMAMKYPITA
LRMKVMMIMRYPGTA

SEQ ID NO: 240607 - protein, 15 aa, Artificial Sequence
  Description of Artificial Sequence: Synthetic peptide
  Seed: LRMKWMMAMKYPITA
LRMKVMMIMRYPHTA

SEQ ID NO: 240608 - protein, 15 aa, Artificial Sequence
  Description of Artificial Sequence: Synthetic peptide
  Seed: LRMKWMMAMKYPITA
LRMKVMMIMRYPITA

SEQ ID NO: 240609 - protein, 15 aa, Artificial Sequence
  Description of Artificial Sequence: Synthetic peptide
  Seed: LRMKWMMAMKYPITA
LRMKVMMIMRYPKTA

SEQ ID NO: 240610 - protein, 15 aa, Artificial Sequence
  Description of Artificial Sequence: Synthetic peptide
  Seed: LRMKWMMAMKYPITA
LRMKVMMIMRYPLTA

SEQ ID NO: 240611 - protein, 15 aa, Artificial Sequence
  Description of Artificial Sequence: Synthetic peptide
  Seed: LRMKWMMAMKYPITA
LRMKVMMIMRYPMTA

SEQ ID NO: 240612 - protein, 15 aa, Artificial Sequence
  Description of Artificial Sequence: Synthetic peptide
  Seed: LRMKWMMAMKYPITA
LRMKVMMIMRYPNTA

SEQ ID NO: 240613 - protein, 15 aa, Artificial Sequence
  Description of Artificial Sequence: Synthetic peptide
  Seed: LRMKWMMAMKYPITA
LRMKVMMIMRYPPTA

SEQ ID NO: 240614 - protein, 15 aa, Artificial Sequence
  Description of Artificial Sequence: Synthetic peptide
  Seed: LRMKWMMAMKYPITA
LRMKVMMIMRYPQTA

SEQ ID NO: 240615 - protein, 15 aa, Artificial Sequence
  Description of Artificial Sequence: Synthetic peptide
  Seed: LRMKWMMAMKYPITA
LRMKVMMIMRYPRTA

SEQ ID NO: 240616 - protein, 15 aa, Artificial Sequence
  Description of Artificial Sequence: Synthetic peptide
  Seed: LRMKWMMAMKYPITA
LRMKVMMIMRYPSTA

SEQ ID NO: 240617 - protein, 15 aa, Artificial Sequence
  Description of Artificial Sequence: Synthetic peptide
  Seed: LRMKWMMAMKYPITA
LRMKVMMIMRYPTTA

SEQ ID NO: 240618 - protein, 15 aa, Artificial Sequence
  Description of Artificial Sequence: Synthetic peptide
  Seed: LRMKWMMAMKYPITA
LRMKVMMIMRYPVTA

SEQ ID NO: 240619 - protein, 15 aa, Artificial Sequence
  Description of Artificial Sequence: Synthetic peptide
  Seed: LRMKWMMAMKYPITA
LRMKVMMIMRYPWTA

SEQ ID NO: 240620 - protein, 15 aa, Artificial Sequence
  Description of Artificial Sequence: Synthetic peptide
  Seed: LRMKWMMAMKYPITA
LRMKVMMIMRYPYTA

SEQ ID NO: 240621 - protein, 15 aa, Artificial Sequence
  Description of Artificial Sequence: Synthetic peptide
  Seed: LRMKWMMAMKYPITA
LRMKVMMIMSYPATA

SEQ ID NO: 240622 - protein, 15 aa, Artificial Sequence
  Description of Artificial Sequence: Synthetic peptide
  Seed: LRMKWMMAMKYPITA
LRMKVMMIMSYPCTA

SEQ ID NO: 240623 - protein, 15 aa, Artificial Sequence
  Description of Artificial Sequence: Synthetic peptide
  Seed: LRMKWMMAMKYPITA
LRMKVMMIMSYPDTA

SEQ ID NO: 240624 - protein, 15 aa, Artificial Sequence
  Description of Artificial Sequence: Synthetic peptide
  Seed: LRMKWMMAMKYPITA
LRMKVMMIMSYPETA

SEQ ID NO: 240625 - protein, 15 aa, Artificial Sequence
  Description of Artificial Sequence: Synthetic peptide
  Seed: LRMKWMMAMKYPITA
LRMKVMMIMSYPFTA

SEQ ID NO: 240626 - protein, 15 aa, Artificial Sequence
  Description of Artificial Sequence: Synthetic peptide
  Seed: LRMKWMMAMKYPITA
LRMKVMMIMSYPGTA

SEQ ID NO: 240627 - protein, 15 aa, Artificial Sequence
  Description of Artificial Sequence: Synthetic peptide
  Seed: LRMKWMMAMKYPITA
LRMKVMMIMSYPHTA

SEQ ID NO: 240628 - protein, 15 aa, Artificial Sequence
  Description of Artificial Sequence: Synthetic peptide
  Seed: LRMKWMMAMKYPITA
LRMKVMMIMSYPITA

SEQ ID NO: 240629 - protein, 15 aa, Artificial Sequence
  Description of Artificial Sequence: Synthetic peptide
  Seed: LRMKWMMAMKYPITA
LRMKVMMIMSYPKTA

SEQ ID NO: 240630 - protein, 15 aa, Artificial Sequence
  Description of Artificial Sequence: Synthetic peptide
  Seed: LRMKWMMAMKYPITA
LRMKVMMIMSYPLTA

SEQ ID NO: 240631 - protein, 15 aa, Artificial Sequence
  Description of Artificial Sequence: Synthetic peptide
  Seed: LRMKWMMAMKYPITA
LRMKVMMIMSYPMTA

SEQ ID NO: 240632 - protein, 15 aa, Artificial Sequence
  Description of Artificial Sequence: Synthetic peptide
  Seed: LRMKWMMAMKYPITA
LRMKVMMIMSYPNTA

SEQ ID NO: 240633 - protein, 15 aa, Artificial Sequence
  Description of Artificial Sequence: Synthetic peptide
  Seed: LRMKWMMAMKYPITA
LRMKVMMIMSYPPTA

SEQ ID NO: 240634 - protein, 15 aa, Artificial Sequence
  Description of Artificial Sequence: Synthetic peptide
  Seed: LRMKWMMAMKYPITA
LRMKVMMIMSYPQTA

SEQ ID NO: 240635 - protein, 15 aa, Artificial Sequence
  Description of Artificial Sequence: Synthetic peptide
  Seed: LRMKWMMAMKYPITA
LRMKVMMIMSYPRTA

SEQ ID NO: 240636 - protein, 15 aa, Artificial Sequence
  Description of Artificial Sequence: Synthetic peptide
  Seed: LRMKWMMAMKYPITA
LRMKVMMIMSYPSTA

SEQ ID NO: 240637 - protein, 15 aa, Artificial Sequence
  Description of Artificial Sequence: Synthetic peptide
  Seed: LRMKWMMAMKYPITA
LRMKVMMIMSYPTTA

SEQ ID NO: 240638 - protein, 15 aa, Artificial Sequence
  Description of Artificial Sequence: Synthetic peptide
  Seed: LRMKWMMAMKYPITA
LRMKVMMIMSYPVTA

SEQ ID NO: 240639 - protein, 15 aa, Artificial Sequence
  Description of Artificial Sequence: Synthetic peptide
  Seed: LRMKWMMAMKYPITA
LRMKVMMIMSYPYTA

SEQ ID NO: 240640 - protein, 15 aa, Artificial Sequence
  Description of Artificial Sequence: Synthetic peptide
  Seed: LRMKWMMAMKYPITA
LRMKVMMIMTYPATA

SEQ ID NO: 240641 - protein, 15 aa, Artificial Sequence
  Description of Artificial Sequence: Synthetic peptide
  Seed: LRMKWMMAMKYPITA
LRMKVMMIMTYPCTA

SEQ ID NO: 240642 - protein, 15 aa, Artificial Sequence
  Description of Artificial Sequence: Synthetic peptide
  Seed: LRMKWMMAMKYPITA
LRMKVMMIMTYPDTA

SEQ ID NO: 240643 - protein, 15 aa, Artificial Sequence
  Description of Artificial Sequence: Synthetic peptide
  Seed: LRMKWMMAMKYPITA
LRMKVMMIMTYPETA

SEQ ID NO: 240644 - protein, 15 aa, Artificial Sequence
  Description of Artificial Sequence: Synthetic peptide
  Seed: LRMKWMMAMKYPITA
LRMKVMMIMTYPGTA

SEQ ID NO: 240645 - protein, 15 aa, Artificial Sequence
  Description of Artificial Sequence: Synthetic peptide
  Seed: LRMKWMMAMKYPITA
LRMKVMMIMTYPHTA

SEQ ID NO: 240646 - protein, 15 aa, Artificial Sequence
  Description of Artificial Sequence: Synthetic peptide
  Seed: LRMKWMMAMKYPITA
LRMKVMMIMTYPITA

SEQ ID NO: 240647 - protein, 15 aa, Artificial Sequence
  Description of Artificial Sequence: Synthetic peptide
  Seed: LRMKWMMAMKYPITA
LRMKVMMIMTYPKTA

SEQ ID NO: 240648 - protein, 15 aa, Artificial Sequence
  Description of Artificial Sequence: Synthetic peptide
  Seed: LRMKWMMAMKYPITA
LRMKVMMIMTYPLTA

SEQ ID NO: 240649 - protein, 15 aa, Artificial Sequence
  Description of Artificial Sequence: Synthetic peptide
  Seed: LRMKWMMAMKYPITA
LRMKVMMIMTYPMTA

SEQ ID NO: 240650 - protein, 15 aa, Artificial Sequence
  Description of Artificial Sequence: Synthetic peptide
  Seed: LRMKWMMAMKYPITA
LRMKVMMIMTYPNTA

SEQ ID NO: 240651 - protein, 15 aa, Artificial Sequence
  Description of Artificial Sequence: Synthetic peptide
  Seed: LRMKWMMAMKYPITA
LRMKVMMIMTYPPTA

SEQ ID NO: 240652 - protein, 15 aa, Artificial Sequence
  Description of Artificial Sequence: Synthetic peptide
  Seed: LRMKWMMAMKYPITA
LRMKVMMIMTYPQTA

SEQ ID NO: 240653 - protein, 15 aa, Artificial Sequence
  Description of Artificial Sequence: Synthetic peptide
  Seed: LRMKWMMAMKYPITA
LRMKVMMIMTYPRTA

SEQ ID NO: 240654 - protein, 15 aa, Artificial Sequence
  Description of Artificial Sequence: Synthetic peptide
  Seed: LRMKWMMAMKYPITA
LRMKVMMIMTYPSTA

SEQ ID NO: 240655 - protein, 15 aa, Artificial Sequence
  Description of Artificial Sequence: Synthetic peptide
  Seed: LRMKWMMAMKYPITA
LRMKVMMIMTYPTTA

SEQ ID NO: 240656 - protein, 15 aa, Artificial Sequence
  Description of Artificial Sequence: Synthetic peptide
  Seed: LRMKWMMAMKYPITA
LRMKVMMIMTYPVTA

SEQ ID NO: 240657 - protein, 15 aa, Artificial Sequence
  Description of Artificial Sequence: Synthetic peptide
  Seed: LRMKWMMAMKYPITA
LRMKVMMIMTYPYTA

SEQ ID NO: 240658 - protein, 15 aa, Artificial Sequence
  Description of Artificial Sequence: Synthetic peptide
  Seed: LRMKWMMAMKYPITA
LRMKVMMIMVYPATA

SEQ ID NO: 240659 - protein, 15 aa, Artificial Sequence
  Description of Artificial Sequence: Synthetic peptide
  Seed: LRMKWMMAMKYPITA
LRMKVMMIMVYPDTA

SEQ ID NO: 240660 - protein, 15 aa, Artificial Sequence
  Description of Artificial Sequence: Synthetic peptide
  Seed: LRMKWMMAMKYPITA
LRMKVMMIMVYPETA

SEQ ID NO: 240661 - protein, 15 aa, Artificial Sequence
  Description of Artificial Sequence: Synthetic peptide
  Seed: LRMKWMMAMKYPITA
LRMKVMMIMVYPGTA

SEQ ID NO: 240662 - protein, 15 aa, Artificial Sequence
  Description of Artificial Sequence: Synthetic peptide
  Seed: LRMKWMMAMKYPITA
LRMKVMMIMVYPITA

SEQ ID NO: 240663 - protein, 15 aa, Artificial Sequence
  Description of Artificial Sequence: Synthetic peptide
  Seed: LRMKWMMAMKYPITA
LRMKVMMIMVYPLTA

SEQ ID NO: 240664 - protein, 15 aa, Artificial Sequence
  Description of Artificial Sequence: Synthetic peptide
  Seed: LRMKWMMAMKYPITA
LRMKVMMIMVYPMTA

SEQ ID NO: 240665 - protein, 15 aa, Artificial Sequence
  Description of Artificial Sequence: Synthetic peptide
  Seed: LRMKWMMAMKYPITA
LRMKVMMIMVYPNTA

SEQ ID NO: 240666 - protein, 15 aa, Artificial Sequence
  Description of Artificial Sequence: Synthetic peptide
  Seed: LRMKWMMAMKYPITA
LRMKVMMIMVYPQTA

SEQ ID NO: 240667 - protein, 15 aa, Artificial Sequence
  Description of Artificial Sequence: Synthetic peptide
  Seed: LRMKWMMAMKYPITA
LRMKVMMIMVYPRTA

SEQ ID NO: 240668 - protein, 15 aa, Artificial Sequence
  Description of Artificial Sequence: Synthetic peptide
  Seed: LRMKWMMAMKYPITA
LRMKVMMIMVYPSTA

SEQ ID NO: 240669 - protein, 15 aa, Artificial Sequence
  Description of Artificial Sequence: Synthetic peptide
  Seed: LRMKWMMAMKYPITA
LRMKVMMIMVYPTTA

SEQ ID NO: 240670 - protein, 15 aa, Artificial Sequence
  Description of Artificial Sequence: Synthetic peptide
  Seed: LRMKWMMAMKYPITA
LRMKVMMIMVYPVTA

SEQ ID NO: 240671 - protein, 15 aa, Artificial Sequence
  Description of Artificial Sequence: Synthetic peptide
  Seed: LRMKWMMAMKYPITA
LRMKVMMKMAYPATA

SEQ ID NO: 240672 - protein, 15 aa, Artificial Sequence
  Description of Artificial Sequence: Synthetic peptide
  Seed: LRMKWMMAMKYPITA
LRMKVMMKMAYPFTA

SEQ ID NO: 240673 - protein, 15 aa, Artificial Sequence
  Description of Artificial Sequence: Synthetic peptide
  Seed: LRMKWMMAMKYPITA
LRMKVMMKMAYPITA

SEQ ID NO: 240674 - protein, 15 aa, Artificial Sequence
  Description of Artificial Sequence: Synthetic peptide
  Seed: LRMKWMMAMKYPITA
LRMKVMMKMAYPLTA

SEQ ID NO: 240675 - protein, 15 aa, Artificial Sequence
  Description of Artificial Sequence: Synthetic peptide
  Seed: LRMKWMMAMKYPITA
LRMKVMMKMAYPMTA

SEQ ID NO: 240676 - protein, 15 aa, Artificial Sequence
  Description of Artificial Sequence: Synthetic peptide
  Seed: LRMKWMMAMKYPITA
LRMKVMMKMAYPRTA

SEQ ID NO: 240677 - protein, 15 aa, Artificial Sequence
  Description of Artificial Sequence: Synthetic peptide
  Seed: LRMKWMMAMKYPITA
LRMKVMMKMAYPSTA

SEQ ID NO: 240678 - protein, 15 aa, Artificial Sequence
  Description of Artificial Sequence: Synthetic peptide
  Seed: LRMKWMMAMKYPITA
LRMKVMMKMAYPTTA

SEQ ID NO: 240679 - protein, 15 aa, Artificial Sequence
  Description of Artificial Sequence: Synthetic peptide
  Seed: LRMKWMMAMKYPITA
LRMKVMMKMAYPVTA

SEQ ID NO: 240680 - protein, 15 aa, Artificial Sequence
  Description of Artificial Sequence: Synthetic peptide
  Seed: LRMKWMMAMKYPITA
LRMKVMMKMAYPYTA

SEQ ID NO: 240681 - protein, 15 aa, Artificial Sequence
  Description of Artificial Sequence: Synthetic peptide
  Seed: LRMKWMMAMKYPITA
LRMKVMMKMGYPATA

SEQ ID NO: 240682 - protein, 15 aa, Artificial Sequence
  Description of Artificial Sequence: Synthetic peptide
  Seed: LRMKWMMAMKYPITA
LRMKVMMKMGYPITA

SEQ ID NO: 240683 - protein, 15 aa, Artificial Sequence
  Description of Artificial Sequence: Synthetic peptide
  Seed: LRMKWMMAMKYPITA
LRMKVMMKMGYPLTA

SEQ ID NO: 240684 - protein, 15 aa, Artificial Sequence
  Description of Artificial Sequence: Synthetic peptide
  Seed: LRMKWMMAMKYPITA
LRMKVMMKMGYPMTA

SEQ ID NO: 240685 - protein, 15 aa, Artificial Sequence
  Description of Artificial Sequence: Synthetic peptide
  Seed: LRMKWMMAMKYPITA
LRMKVMMKMGYPRTA

SEQ ID NO: 240686 - protein, 15 aa, Artificial Sequence
  Description of Artificial Sequence: Synthetic peptide
  Seed: LRMKWMMAMKYPITA
LRMKVMMKMGYPVTA

SEQ ID NO: 240687 - protein, 15 aa, Artificial Sequence
  Description of Artificial Sequence: Synthetic peptide
  Seed: LRMKWMMAMKYPITA
LRMKVMMKMGYPYTA

SEQ ID NO: 240688 - protein, 15 aa, Artificial Sequence
  Description of Artificial Sequence: Synthetic peptide
  Seed: LRMKWMMAMKYPITA
LRMKVMMKMHYPATA

SEQ ID NO: 240689 - protein, 15 aa, Artificial Sequence
  Description of Artificial Sequence: Synthetic peptide
  Seed: LRMKWMMAMKYPITA
LRMKVMMKMHYPGTA

SEQ ID NO: 240690 - protein, 15 aa, Artificial Sequence
  Description of Artificial Sequence: Synthetic peptide
  Seed: LRMKWMMAMKYPITA
LRMKVMMKMHYPLTA

SEQ ID NO: 240691 - protein, 15 aa, Artificial Sequence
  Description of Artificial Sequence: Synthetic peptide
  Seed: LRMKWMMAMKYPITA
LRMKVMMKMHYPQTA

SEQ ID NO: 240692 - protein, 15 aa, Artificial Sequence
  Description of Artificial Sequence: Synthetic peptide
  Seed: LRMKWMMAMKYPITA
LRMKVMMKMHYPRTA

SEQ ID NO: 240693 - protein, 15 aa, Artificial Sequence
  Description of Artificial Sequence: Synthetic peptide
  Seed: LRMKWMMAMKYPITA
LRMKVMMKMHYPSTA

SEQ ID NO: 240694 - protein, 15 aa, Artificial Sequence
  Description of Artificial Sequence: Synthetic peptide
  Seed: LRMKWMMAMKYPITA
LRMKVMMKMHYPVTA

SEQ ID NO: 240695 - protein, 15 aa, Artificial Sequence
  Description of Artificial Sequence: Synthetic peptide
  Seed: LRMKWMMAMKYPITA
LRMKVMMKMHYPYTA

SEQ ID NO: 240696 - protein, 15 aa, Artificial Sequence
  Description of Artificial Sequence: Synthetic peptide
  Seed: LRMKWMMAMKYPITA
LRMKVMMKMIYPRTA

SEQ ID NO: 240697 - protein, 15 aa, Artificial Sequence
  Description of Artificial Sequence: Synthetic peptide
  Seed: LRMKWMMAMKYPITA
LRMKVMMKMIYPYTA

SEQ ID NO: 240698 - protein, 15 aa, Artificial Sequence
  Description of Artificial Sequence: Synthetic peptide
  Seed: LRMKWMMAMKYPITA
LRMKVMMKMKYPATA

SEQ ID NO: 240699 - protein, 15 aa, Artificial Sequence
  Description of Artificial Sequence: Synthetic peptide
  Seed: LRMKWMMAMKYPITA
LRMKVMMKMKYPCTA

SEQ ID NO: 240700 - protein, 15 aa, Artificial Sequence
  Description of Artificial Sequence: Synthetic peptide
  Seed: LRMKWMMAMKYPITA
LRMKVMMKMKYPDTA

SEQ ID NO: 240701 - protein, 15 aa, Artificial Sequence
  Description of Artificial Sequence: Synthetic peptide
  Seed: LRMKWMMAMKYPITA
LRMKVMMKMKYPETA

SEQ ID NO: 240702 - protein, 15 aa, Artificial Sequence
  Description of Artificial Sequence: Synthetic peptide
  Seed: LRMKWMMAMKYPITA
LRMKVMMKMKYPFTA

SEQ ID NO: 240703 - protein, 15 aa, Artificial Sequence
  Description of Artificial Sequence: Synthetic peptide
  Seed: LRMKWMMAMKYPITA
LRMKVMMKMKYPGTA

SEQ ID NO: 240704 - protein, 15 aa, Artificial Sequence
  Description of Artificial Sequence: Synthetic peptide
  Seed: LRMKWMMAMKYPITA
LRMKVMMKMKYPHTA

SEQ ID NO: 240705 - protein, 15 aa, Artificial Sequence
  Description of Artificial Sequence: Synthetic peptide
  Seed: LRMKWMMAMKYPITA
LRMKVMMKMKYPITA

SEQ ID NO: 240706 - protein, 15 aa, Artificial Sequence
  Description of Artificial Sequence: Synthetic peptide
  Seed: LRMKWMMAMKYPITA
LRMKVMMKMKYPKTA

SEQ ID NO: 240707 - protein, 15 aa, Artificial Sequence
  Description of Artificial Sequence: Synthetic peptide
  Seed: LRMKWMMAMKYPITA
LRMKVMMKMKYPLTA

SEQ ID NO: 240708 - protein, 15 aa, Artificial Sequence
  Description of Artificial Sequence: Synthetic peptide
  Seed: LRMKWMMAMKYPITA
LRMKVMMKMKYPMTA

SEQ ID NO: 240709 - protein, 15 aa, Artificial Sequence
  Description of Artificial Sequence: Synthetic peptide
  Seed: LRMKWMMAMKYPITA
LRMKVMMKMKYPNTA

SEQ ID NO: 240710 - protein, 15 aa, Artificial Sequence
  Description of Artificial Sequence: Synthetic peptide
  Seed: LRMKWMMAMKYPITA
LRMKVMMKMKYPPTA

SEQ ID NO: 240711 - protein, 15 aa, Artificial Sequence
  Description of Artificial Sequence: Synthetic peptide
  Seed: LRMKWMMAMKYPITA
LRMKVMMKMKYPQTA

SEQ ID NO: 240712 - protein, 15 aa, Artificial Sequence
  Description of Artificial Sequence: Synthetic peptide
  Seed: LRMKWMMAMKYPITA
LRMKVMMKMKYPRTA

SEQ ID NO: 240713 - protein, 15 aa, Artificial Sequence
  Description of Artificial Sequence: Synthetic peptide
  Seed: LRMKWMMAMKYPITA
LRMKVMMKMKYPSTA

SEQ ID NO: 240714 - protein, 15 aa, Artificial Sequence
  Description of Artificial Sequence: Synthetic peptide
  Seed: LRMKWMMAMKYPITA
LRMKVMMKMKYPTTA

SEQ ID NO: 240715 - protein, 15 aa, Artificial Sequence
  Description of Artificial Sequence: Synthetic peptide
  Seed: LRMKWMMAMKYPITA
LRMKVMMKMKYPVTA

SEQ ID NO: 240716 - protein, 15 aa, Artificial Sequence
  Description of Artificial Sequence: Synthetic peptide
  Seed: LRMKWMMAMKYPITA
LRMKVMMKMKYPYTA

SEQ ID NO: 240717 - protein, 15 aa, Artificial Sequence
  Description of Artificial Sequence: Synthetic peptide
  Seed: LRMKWMMAMKYPITA
LRMKVMMKMLYPRTA

SEQ ID NO: 240718 - protein, 15 aa, Artificial Sequence
  Description of Artificial Sequence: Synthetic peptide
  Seed: LRMKWMMAMKYPITA
LRMKVMMKMNYPATA

SEQ ID NO: 240719 - protein, 15 aa, Artificial Sequence
  Description of Artificial Sequence: Synthetic peptide
  Seed: LRMKWMMAMKYPITA
LRMKVMMKMNYPFTA

SEQ ID NO: 240720 - protein, 15 aa, Artificial Sequence
  Description of Artificial Sequence: Synthetic peptide
  Seed: LRMKWMMAMKYPITA
LRMKVMMKMNYPITA

SEQ ID NO: 240721 - protein, 15 aa, Artificial Sequence
  Description of Artificial Sequence: Synthetic peptide
  Seed: LRMKWMMAMKYPITA
LRMKVMMKMNYPLTA

SEQ ID NO: 240722 - protein, 15 aa, Artificial Sequence
  Description of Artificial Sequence: Synthetic peptide
  Seed: LRMKWMMAMKYPITA
LRMKVMMKMNYPMTA

SEQ ID NO: 240723 - protein, 15 aa, Artificial Sequence
  Description of Artificial Sequence: Synthetic peptide
  Seed: LRMKWMMAMKYPITA
LRMKVMMKMNYPRTA

SEQ ID NO: 240724 - protein, 15 aa, Artificial Sequence
  Description of Artificial Sequence: Synthetic peptide
  Seed: LRMKWMMAMKYPITA
LRMKVMMKMNYPVTA

SEQ ID NO: 240725 - protein, 15 aa, Artificial Sequence
  Description of Artificial Sequence: Synthetic peptide
  Seed: LRMKWMMAMKYPITA
LRMKVMMKMNYPYTA

SEQ ID NO: 240726 - protein, 15 aa, Artificial Sequence
  Description of Artificial Sequence: Synthetic peptide
  Seed: LRMKWMMAMKYPITA
LRMKVMMKMQYPRTA

SEQ ID NO: 240727 - protein, 15 aa, Artificial Sequence
  Description of Artificial Sequence: Synthetic peptide
  Seed: LRMKWMMAMKYPITA
LRMKVMMKMQYPYTA

SEQ ID NO: 240728 - protein, 15 aa, Artificial Sequence
  Description of Artificial Sequence: Synthetic peptide
  Seed: LRMKWMMAMKYPITA
LRMKVMMKMRYPATA

SEQ ID NO: 240729 - protein, 15 aa, Artificial Sequence
  Description of Artificial Sequence: Synthetic peptide
  Seed: LRMKWMMAMKYPITA
LRMKVMMKMRYPCTA

SEQ ID NO: 240730 - protein, 15 aa, Artificial Sequence
  Description of Artificial Sequence: Synthetic peptide
  Seed: LRMKWMMAMKYPITA
LRMKVMMKMRYPDTA

SEQ ID NO: 240731 - protein, 15 aa, Artificial Sequence
  Description of Artificial Sequence: Synthetic peptide
  Seed: LRMKWMMAMKYPITA
LRMKVMMKMRYPETA

SEQ ID NO: 240732 - protein, 15 aa, Artificial Sequence
  Description of Artificial Sequence: Synthetic peptide
  Seed: LRMKWMMAMKYPITA
LRMKVMMKMRYPFTA

SEQ ID NO: 240733 - protein, 15 aa, Artificial Sequence
  Description of Artificial Sequence: Synthetic peptide
  Seed: LRMKWMMAMKYPITA
LRMKVMMKMRYPGTA

SEQ ID NO: 240734 - protein, 15 aa, Artificial Sequence
  Description of Artificial Sequence: Synthetic peptide
  Seed: LRMKWMMAMKYPITA
LRMKVMMKMRYPHTA

SEQ ID NO: 240735 - protein, 15 aa, Artificial Sequence
  Description of Artificial Sequence: Synthetic peptide
  Seed: LRMKWMMAMKYPITA
LRMKVMMKMRYPITA

SEQ ID NO: 240736 - protein, 15 aa, Artificial Sequence
  Description of Artificial Sequence: Synthetic peptide
  Seed: LRMKWMMAMKYPITA
LRMKVMMKMRYPKTA

SEQ ID NO: 240737 - protein, 15 aa, Artificial Sequence
  Description of Artificial Sequence: Synthetic peptide
  Seed: LRMKWMMAMKYPITA
LRMKVMMKMRYPLTA

SEQ ID NO: 240738 - protein, 15 aa, Artificial Sequence
  Description of Artificial Sequence: Synthetic peptide
  Seed: LRMKWMMAMKYPITA
LRMKVMMKMRYPMTA

SEQ ID NO: 240739 - protein, 15 aa, Artificial Sequence
  Description of Artificial Sequence: Synthetic peptide
  Seed: LRMKWMMAMKYPITA
LRMKVMMKMRYPNTA

SEQ ID NO: 240740 - protein, 15 aa, Artificial Sequence
  Description of Artificial Sequence: Synthetic peptide
  Seed: LRMKWMMAMKYPITA
LRMKVMMKMRYPPTA

SEQ ID NO: 240741 - protein, 15 aa, Artificial Sequence
  Description of Artificial Sequence: Synthetic peptide
  Seed: LRMKWMMAMKYPITA
LRMKVMMKMRYPQTA

SEQ ID NO: 240742 - protein, 15 aa, Artificial Sequence
  Description of Artificial Sequence: Synthetic peptide
  Seed: LRMKWMMAMKYPITA
LRMKVMMKMRYPRTA

SEQ ID NO: 240743 - protein, 15 aa, Artificial Sequence
  Description of Artificial Sequence: Synthetic peptide
  Seed: LRMKWMMAMKYPITA
LRMKVMMKMRYPSTA

SEQ ID NO: 240744 - protein, 15 aa, Artificial Sequence
  Description of Artificial Sequence: Synthetic peptide
  Seed: LRMKWMMAMKYPITA
LRMKVMMKMRYPTTA

SEQ ID NO: 240745 - protein, 15 aa, Artificial Sequence
  Description of Artificial Sequence: Synthetic peptide
  Seed: LRMKWMMAMKYPITA
LRMKVMMKMRYPVTA

SEQ ID NO: 240746 - protein, 15 aa, Artificial Sequence
  Description of Artificial Sequence: Synthetic peptide
  Seed: LRMKWMMAMKYPITA
LRMKVMMKMRYPYTA

SEQ ID NO: 240747 - protein, 15 aa, Artificial Sequence
  Description of Artificial Sequence: Synthetic peptide
  Seed: LRMKWMMAMKYPITA
LRMKVMMKMSYPATA

SEQ ID NO: 240748 - protein, 15 aa, Artificial Sequence
  Description of Artificial Sequence: Synthetic peptide
  Seed: LRMKWMMAMKYPITA
LRMKVMMKMSYPFTA

SEQ ID NO: 240749 - protein, 15 aa, Artificial Sequence
  Description of Artificial Sequence: Synthetic peptide
  Seed: LRMKWMMAMKYPITA
LRMKVMMKMSYPITA

SEQ ID NO: 240750 - protein, 15 aa, Artificial Sequence
  Description of Artificial Sequence: Synthetic peptide
  Seed: LRMKWMMAMKYPITA
LRMKVMMKMSYPLTA

SEQ ID NO: 240751 - protein, 15 aa, Artificial Sequence
  Description of Artificial Sequence: Synthetic peptide
  Seed: LRMKWMMAMKYPITA
LRMKVMMKMSYPMTA

SEQ ID NO: 240752 - protein, 15 aa, Artificial Sequence
  Description of Artificial Sequence: Synthetic peptide
  Seed: LRMKWMMAMKYPITA
LRMKVMMKMSYPRTA

SEQ ID NO: 240753 - protein, 15 aa, Artificial Sequence
  Description of Artificial Sequence: Synthetic peptide
  Seed: LRMKWMMAMKYPITA
LRMKVMMKMSYPSTA

SEQ ID NO: 240754 - protein, 15 aa, Artificial Sequence
  Description of Artificial Sequence: Synthetic peptide
  Seed: LRMKWMMAMKYPITA
LRMKVMMKMSYPVTA

SEQ ID NO: 240755 - protein, 15 aa, Artificial Sequence
  Description of Artificial Sequence: Synthetic peptide
  Seed: LRMKWMMAMKYPITA
LRMKVMMKMSYPYTA

SEQ ID NO: 240756 - protein, 15 aa, Artificial Sequence
  Description of Artificial Sequence: Synthetic peptide
  Seed: LRMKWMMAMKYPITA
LRMKVMMKMTYPATA

SEQ ID NO: 240757 - protein, 15 aa, Artificial Sequence
  Description of Artificial Sequence: Synthetic peptide
  Seed: LRMKWMMAMKYPITA
LRMKVMMKMTYPFTA

SEQ ID NO: 240758 - protein, 15 aa, Artificial Sequence
  Description of Artificial Sequence: Synthetic peptide
  Seed: LRMKWMMAMKYPITA
LRMKVMMKMTYPGTA

SEQ ID NO: 240759 - protein, 15 aa, Artificial Sequence
  Description of Artificial Sequence: Synthetic peptide
  Seed: LRMKWMMAMKYPITA
LRMKVMMKMTYPITA

SEQ ID NO: 240760 - protein, 15 aa, Artificial Sequence
  Description of Artificial Sequence: Synthetic peptide
  Seed: LRMKWMMAMKYPITA
LRMKVMMKMTYPKTA

SEQ ID NO: 240761 - protein, 15 aa, Artificial Sequence
  Description of Artificial Sequence: Synthetic peptide
  Seed: LRMKWMMAMKYPITA
LRMKVMMKMTYPLTA

SEQ ID NO: 240762 - protein, 15 aa, Artificial Sequence
  Description of Artificial Sequence: Synthetic peptide
  Seed: LRMKWMMAMKYPITA
LRMKVMMKMTYPMTA

SEQ ID NO: 240763 - protein, 15 aa, Artificial Sequence
  Description of Artificial Sequence: Synthetic peptide
  Seed: LRMKWMMAMKYPITA
LRMKVMMKMTYPQTA

SEQ ID NO: 240764 - protein, 15 aa, Artificial Sequence
  Description of Artificial Sequence: Synthetic peptide
  Seed: LRMKWMMAMKYPITA
LRMKVMMKMTYPRTA

SEQ ID NO: 240765 - protein, 15 aa, Artificial Sequence
  Description of Artificial Sequence: Synthetic peptide
  Seed: LRMKWMMAMKYPITA
LRMKVMMKMTYPSTA

SEQ ID NO: 240766 - protein, 15 aa, Artificial Sequence
  Description of Artificial Sequence: Synthetic peptide
  Seed: LRMKWMMAMKYPITA
LRMKVMMKMTYPVTA

SEQ ID NO: 240767 - protein, 15 aa, Artificial Sequence
  Description of Artificial Sequence: Synthetic peptide
  Seed: LRMKWMMAMKYPITA
LRMKVMMKMTYPYTA

SEQ ID NO: 240768 - protein, 15 aa, Artificial Sequence
  Description of Artificial Sequence: Synthetic peptide
  Seed: LRMKWMMAMKYPITA
LRMKVMMKMVYPFTA

SEQ ID NO: 240769 - protein, 15 aa, Artificial Sequence
  Description of Artificial Sequence: Synthetic peptide
  Seed: LRMKWMMAMKYPITA
LRMKVMMKMVYPITA

SEQ ID NO: 240770 - protein, 15 aa, Artificial Sequence
  Description of Artificial Sequence: Synthetic peptide
  Seed: LRMKWMMAMKYPITA
LRMKVMMKMVYPKTA

SEQ ID NO: 240771 - protein, 15 aa, Artificial Sequence
  Description of Artificial Sequence: Synthetic peptide
  Seed: LRMKWMMAMKYPITA
LRMKVMMKMVYPLTA

SEQ ID NO: 240772 - protein, 15 aa, Artificial Sequence
  Description of Artificial Sequence: Synthetic peptide
  Seed: LRMKWMMAMKYPITA
LRMKVMMKMVYPMTA

SEQ ID NO: 240773 - protein, 15 aa, Artificial Sequence
  Description of Artificial Sequence: Synthetic peptide
  Seed: LRMKWMMAMKYPITA
LRMKVMMKMVYPRTA

SEQ ID NO: 240774 - protein, 15 aa, Artificial Sequence
  Description of Artificial Sequence: Synthetic peptide
  Seed: LRMKWMMAMKYPITA
LRMKVMMKMVYPVTA

SEQ ID NO: 240775 - protein, 15 aa, Artificial Sequence
  Description of Artificial Sequence: Synthetic peptide
  Seed: LRMKWMMAMKYPITA
LRMKVMMKMVYPYTA

SEQ ID NO: 240776 - protein, 15 aa, Artificial Sequence
  Description of Artificial Sequence: Synthetic peptide
  Seed: LRMKWMMAMKYPITA
LRMKVMMLMAYPATA

SEQ ID NO: 240777 - protein, 15 aa, Artificial Sequence
  Description of Artificial Sequence: Synthetic peptide
  Seed: LRMKWMMAMKYPITA
LRMKVMMLMAYPCTA

SEQ ID NO: 240778 - protein, 15 aa, Artificial Sequence
  Description of Artificial Sequence: Synthetic peptide
  Seed: LRMKWMMAMKYPITA
LRMKVMMLMAYPDTA

SEQ ID NO: 240779 - protein, 15 aa, Artificial Sequence
  Description of Artificial Sequence: Synthetic peptide
  Seed: LRMKWMMAMKYPITA
LRMKVMMLMAYPETA

SEQ ID NO: 240780 - protein, 15 aa, Artificial Sequence
  Description of Artificial Sequence: Synthetic peptide
  Seed: LRMKWMMAMKYPITA
LRMKVMMLMAYPFTA

SEQ ID NO: 240781 - protein, 15 aa, Artificial Sequence
  Description of Artificial Sequence: Synthetic peptide
  Seed: LRMKWMMAMKYPITA
LRMKVMMLMAYPGTA

SEQ ID NO: 240782 - protein, 15 aa, Artificial Sequence
  Description of Artificial Sequence: Synthetic peptide
  Seed: LRMKWMMAMKYPITA
LRMKVMMLMAYPHTA

SEQ ID NO: 240783 - protein, 15 aa, Artificial Sequence
  Description of Artificial Sequence: Synthetic peptide
  Seed: LRMKWMMAMKYPITA
LRMKVMMLMAYPITA

SEQ ID NO: 240784 - protein, 15 aa, Artificial Sequence
  Description of Artificial Sequence: Synthetic peptide
  Seed: LRMKWMMAMKYPITA
LRMKVMMLMAYPKTA

SEQ ID NO: 240785 - protein, 15 aa, Artificial Sequence
  Description of Artificial Sequence: Synthetic peptide
  Seed: LRMKWMMAMKYPITA
LRMKVMMLMAYPLTA

SEQ ID NO: 240786 - protein, 15 aa, Artificial Sequence
  Description of Artificial Sequence: Synthetic peptide
  Seed: LRMKWMMAMKYPITA
LRMKVMMLMAYPMTA

SEQ ID NO: 240787 - protein, 15 aa, Artificial Sequence
  Description of Artificial Sequence: Synthetic peptide
  Seed: LRMKWMMAMKYPITA
LRMKVMMLMAYPNTA

SEQ ID NO: 240788 - protein, 15 aa, Artificial Sequence
  Description of Artificial Sequence: Synthetic peptide
  Seed: LRMKWMMAMKYPITA
LRMKVMMLMAYPPTA

SEQ ID NO: 240789 - protein, 15 aa, Artificial Sequence
  Description of Artificial Sequence: Synthetic peptide
  Seed: LRMKWMMAMKYPITA
LRMKVMMLMAYPQTA

SEQ ID NO: 240790 - protein, 15 aa, Artificial Sequence
  Description of Artificial Sequence: Synthetic peptide
  Seed: LRMKWMMAMKYPITA
LRMKVMMLMAYPRTA

SEQ ID NO: 240791 - protein, 15 aa, Artificial Sequence
  Description of Artificial Sequence: Synthetic peptide
  Seed: LRMKWMMAMKYPITA
LRMKVMMLMAYPSTA

SEQ ID NO: 240792 - protein, 15 aa, Artificial Sequence
  Description of Artificial Sequence: Synthetic peptide
  Seed: LRMKWMMAMKYPITA
LRMKVMMLMAYPTTA

SEQ ID NO: 240793 - protein, 15 aa, Artificial Sequence
  Description of Artificial Sequence: Synthetic peptide
  Seed: LRMKWMMAMKYPITA
LRMKVMMLMAYPVTA

SEQ ID NO: 240794 - protein, 15 aa, Artificial Sequence
  Description of Artificial Sequence: Synthetic peptide
  Seed: LRMKWMMAMKYPITA
LRMKVMMLMAYPYTA

SEQ ID NO: 240795 - protein, 15 aa, Artificial Sequence
  Description of Artificial Sequence: Synthetic peptide
  Seed: LRMKWMMAMKYPITA
LRMKVMMLMCYPATA

SEQ ID NO: 240796 - protein, 15 aa, Artificial Sequence
  Description of Artificial Sequence: Synthetic peptide
  Seed: LRMKWMMAMKYPITA
LRMKVMMLMCYPVTA

SEQ ID NO: 240797 - protein, 15 aa, Artificial Sequence
  Description of Artificial Sequence: Synthetic peptide
  Seed: LRMKWMMAMKYPITA
LRMKVMMLMDYPITA

SEQ ID NO: 240798 - protein, 15 aa, Artificial Sequence
  Description of Artificial Sequence: Synthetic peptide
  Seed: LRMKWMMAMKYPITA
LRMKVMMLMDYPLTA

SEQ ID NO: 240799 - protein, 15 aa, Artificial Sequence
  Description of Artificial Sequence: Synthetic peptide
  Seed: LRMKWMMAMKYPITA
LRMKVMMLMDYPVTA

SEQ ID NO: 240800 - protein, 15 aa, Artificial Sequence
  Description of Artificial Sequence: Synthetic peptide
  Seed: LRMKWMMAMKYPITA
LRMKVMMLMEYPATA

SEQ ID NO: 240801 - protein, 15 aa, Artificial Sequence
  Description of Artificial Sequence: Synthetic peptide
  Seed: LRMKWMMAMKYPITA
LRMKVMMLMEYPITA

SEQ ID NO: 240802 - protein, 15 aa, Artificial Sequence
  Description of Artificial Sequence: Synthetic peptide
  Seed: LRMKWMMAMKYPITA
LRMKVMMLMEYPLTA

SEQ ID NO: 240803 - protein, 15 aa, Artificial Sequence
  Description of Artificial Sequence: Synthetic peptide
  Seed: LRMKWMMAMKYPITA
LRMKVMMLMEYPVTA

SEQ ID NO: 240804 - protein, 15 aa, Artificial Sequence
  Description of Artificial Sequence: Synthetic peptide
  Seed: LRMKWMMAMKYPITA
LRMKVMMLMGYPATA

SEQ ID NO: 240805 - protein, 15 aa, Artificial Sequence
  Description of Artificial Sequence: Synthetic peptide
  Seed: LRMKWMMAMKYPITA
LRMKVMMLMGYPCTA

SEQ ID NO: 240806 - protein, 15 aa, Artificial Sequence
  Description of Artificial Sequence: Synthetic peptide
  Seed: LRMKWMMAMKYPITA
LRMKVMMLMGYPETA

SEQ ID NO: 240807 - protein, 15 aa, Artificial Sequence
  Description of Artificial Sequence: Synthetic peptide
  Seed: LRMKWMMAMKYPITA
LRMKVMMLMGYPFTA

SEQ ID NO: 240808 - protein, 15 aa, Artificial Sequence
  Description of Artificial Sequence: Synthetic peptide
  Seed: LRMKWMMAMKYPITA
LRMKVMMLMGYPGTA

SEQ ID NO: 240809 - protein, 15 aa, Artificial Sequence
  Description of Artificial Sequence: Synthetic peptide
  Seed: LRMKWMMAMKYPITA
LRMKVMMLMGYPHTA

SEQ ID NO: 240810 - protein, 15 aa, Artificial Sequence
  Description of Artificial Sequence: Synthetic peptide
  Seed: LRMKWMMAMKYPITA
LRMKVMMLMGYPITA

SEQ ID NO: 240811 - protein, 15 aa, Artificial Sequence
  Description of Artificial Sequence: Synthetic peptide
  Seed: LRMKWMMAMKYPITA
LRMKVMMLMGYPKTA

SEQ ID NO: 240812 - protein, 15 aa, Artificial Sequence
  Description of Artificial Sequence: Synthetic peptide
  Seed: LRMKWMMAMKYPITA
LRMKVMMLMGYPLTA

SEQ ID NO: 240813 - protein, 15 aa, Artificial Sequence
  Description of Artificial Sequence: Synthetic peptide
  Seed: LRMKWMMAMKYPITA
LRMKVMMLMGYPMTA

SEQ ID NO: 240814 - protein, 15 aa, Artificial Sequence
  Description of Artificial Sequence: Synthetic peptide
  Seed: LRMKWMMAMKYPITA
LRMKVMMLMGYPNTA

SEQ ID NO: 240815 - protein, 15 aa, Artificial Sequence
  Description of Artificial Sequence: Synthetic peptide
  Seed: LRMKWMMAMKYPITA
LRMKVMMLMGYPPTA

SEQ ID NO: 240816 - protein, 15 aa, Artificial Sequence
  Description of Artificial Sequence: Synthetic peptide
  Seed: LRMKWMMAMKYPITA
LRMKVMMLMGYPQTA

SEQ ID NO: 240817 - protein, 15 aa, Artificial Sequence
  Description of Artificial Sequence: Synthetic peptide
  Seed: LRMKWMMAMKYPITA
LRMKVMMLMGYPRTA

SEQ ID NO: 240818 - protein, 15 aa, Artificial Sequence
  Description of Artificial Sequence: Synthetic peptide
  Seed: LRMKWMMAMKYPITA
LRMKVMMLMGYPSTA

SEQ ID NO: 240819 - protein, 15 aa, Artificial Sequence
  Description of Artificial Sequence: Synthetic peptide
  Seed: LRMKWMMAMKYPITA
LRMKVMMLMGYPTTA

SEQ ID NO: 240820 - protein, 15 aa, Artificial Sequence
  Description of Artificial Sequence: Synthetic peptide
  Seed: LRMKWMMAMKYPITA
LRMKVMMLMGYPVTA

SEQ ID NO: 240821 - protein, 15 aa, Artificial Sequence
  Description of Artificial Sequence: Synthetic peptide
  Seed: LRMKWMMAMKYPITA
LRMKVMMLMGYPYTA

SEQ ID NO: 240822 - protein, 15 aa, Artificial Sequence
  Description of Artificial Sequence: Synthetic peptide
  Seed: LRMKWMMAMKYPITA
LRMKVMMLMHYPATA

SEQ ID NO: 240823 - protein, 15 aa, Artificial Sequence
  Description of Artificial Sequence: Synthetic peptide
  Seed: LRMKWMMAMKYPITA
LRMKVMMLMHYPGTA

SEQ ID NO: 240824 - protein, 15 aa, Artificial Sequence
  Description of Artificial Sequence: Synthetic peptide
  Seed: LRMKWMMAMKYPITA
LRMKVMMLMHYPHTA

SEQ ID NO: 240825 - protein, 15 aa, Artificial Sequence
  Description of Artificial Sequence: Synthetic peptide
  Seed: LRMKWMMAMKYPITA
LRMKVMMLMHYPITA

SEQ ID NO: 240826 - protein, 15 aa, Artificial Sequence
  Description of Artificial Sequence: Synthetic peptide
  Seed: LRMKWMMAMKYPITA
LRMKVMMLMHYPKTA

SEQ ID NO: 240827 - protein, 15 aa, Artificial Sequence
  Description of Artificial Sequence: Synthetic peptide
  Seed: LRMKWMMAMKYPITA
LRMKVMMLMHYPLTA

SEQ ID NO: 240828 - protein, 15 aa, Artificial Sequence
  Description of Artificial Sequence: Synthetic peptide
  Seed: LRMKWMMAMKYPITA
LRMKVMMLMHYPMTA

SEQ ID NO: 240829 - protein, 15 aa, Artificial Sequence
  Description of Artificial Sequence: Synthetic peptide
  Seed: LRMKWMMAMKYPITA
LRMKVMMLMHYPQTA

SEQ ID NO: 240830 - protein, 15 aa, Artificial Sequence
  Description of Artificial Sequence: Synthetic peptide
  Seed: LRMKWMMAMKYPITA
LRMKVMMLMHYPRTA

SEQ ID NO: 240831 - protein, 15 aa, Artificial Sequence
  Description of Artificial Sequence: Synthetic peptide
  Seed: LRMKWMMAMKYPITA
LRMKVMMLMHYPSTA

SEQ ID NO: 240832 - protein, 15 aa, Artificial Sequence
  Description of Artificial Sequence: Synthetic peptide
  Seed: LRMKWMMAMKYPITA
LRMKVMMLMHYPTTA

SEQ ID NO: 240833 - protein, 15 aa, Artificial Sequence
  Description of Artificial Sequence: Synthetic peptide
  Seed: LRMKWMMAMKYPITA
LRMKVMMLMHYPVTA

SEQ ID NO: 240834 - protein, 15 aa, Artificial Sequence
  Description of Artificial Sequence: Synthetic peptide
  Seed: LRMKWMMAMKYPITA
LRMKVMMLMIYPATA

SEQ ID NO: 240835 - protein, 15 aa, Artificial Sequence
  Description of Artificial Sequence: Synthetic peptide
  Seed: LRMKWMMAMKYPITA
LRMKVMMLMIYPGTA

SEQ ID NO: 240836 - protein, 15 aa, Artificial Sequence
  Description of Artificial Sequence: Synthetic peptide
  Seed: LRMKWMMAMKYPITA
LRMKVMMLMIYPITA

SEQ ID NO: 240837 - protein, 15 aa, Artificial Sequence
  Description of Artificial Sequence: Synthetic peptide
  Seed: LRMKWMMAMKYPITA
LRMKVMMLMIYPLTA

SEQ ID NO: 240838 - protein, 15 aa, Artificial Sequence
  Description of Artificial Sequence: Synthetic peptide
  Seed: LRMKWMMAMKYPITA
LRMKVMMLMIYPMTA

SEQ ID NO: 240839 - protein, 15 aa, Artificial Sequence
  Description of Artificial Sequence: Synthetic peptide
  Seed: LRMKWMMAMKYPITA
LRMKVMMLMIYPNTA

SEQ ID NO: 240840 - protein, 15 aa, Artificial Sequence
  Description of Artificial Sequence: Synthetic peptide
  Seed: LRMKWMMAMKYPITA
LRMKVMMLMIYPQTA

SEQ ID NO: 240841 - protein, 15 aa, Artificial Sequence
  Description of Artificial Sequence: Synthetic peptide
  Seed: LRMKWMMAMKYPITA
LRMKVMMLMIYPSTA

SEQ ID NO: 240842 - protein, 15 aa, Artificial Sequence
  Description of Artificial Sequence: Synthetic peptide
  Seed: LRMKWMMAMKYPITA
LRMKVMMLMIYPTTA

SEQ ID NO: 240843 - protein, 15 aa, Artificial Sequence
  Description of Artificial Sequence: Synthetic peptide
  Seed: LRMKWMMAMKYPITA
LRMKVMMLMIYPVTA

SEQ ID NO: 240844 - protein, 15 aa, Artificial Sequence
  Description of Artificial Sequence: Synthetic peptide
  Seed: LRMKWMMAMKYPITA
LRMKVMMLMKYPATA

SEQ ID NO: 240845 - protein, 15 aa, Artificial Sequence
  Description of Artificial Sequence: Synthetic peptide
  Seed: LRMKWMMAMKYPITA
LRMKVMMLMKYPCTA

SEQ ID NO: 240846 - protein, 15 aa, Artificial Sequence
  Description of Artificial Sequence: Synthetic peptide
  Seed: LRMKWMMAMKYPITA
LRMKVMMLMKYPDTA

SEQ ID NO: 240847 - protein, 15 aa, Artificial Sequence
  Description of Artificial Sequence: Synthetic peptide
  Seed: LRMKWMMAMKYPITA
LRMKVMMLMKYPETA

SEQ ID NO: 240848 - protein, 15 aa, Artificial Sequence
  Description of Artificial Sequence: Synthetic peptide
  Seed: LRMKWMMAMKYPITA
LRMKVMMLMKYPFTA

SEQ ID NO: 240849 - protein, 15 aa, Artificial Sequence
  Description of Artificial Sequence: Synthetic peptide
  Seed: LRMKWMMAMKYPITA
LRMKVMMLMKYPGTA

SEQ ID NO: 240850 - protein, 15 aa, Artificial Sequence
  Description of Artificial Sequence: Synthetic peptide
  Seed: LRMKWMMAMKYPITA
LRMKVMMLMKYPHTA

SEQ ID NO: 240851 - protein, 15 aa, Artificial Sequence
  Description of Artificial Sequence: Synthetic peptide
  Seed: LRMKWMMAMKYPITA
LRMKVMMLMKYPITA

SEQ ID NO: 240852 - protein, 15 aa, Artificial Sequence
  Description of Artificial Sequence: Synthetic peptide
  Seed: LRMKWMMAMKYPITA
LRMKVMMLMKYPKTA

SEQ ID NO: 240853 - protein, 15 aa, Artificial Sequence
  Description of Artificial Sequence: Synthetic peptide
  Seed: LRMKWMMAMKYPITA
LRMKVMMLMKYPLTA

SEQ ID NO: 240854 - protein, 15 aa, Artificial Sequence
  Description of Artificial Sequence: Synthetic peptide
  Seed: LRMKWMMAMKYPITA
LRMKVMMLMKYPMTA

SEQ ID NO: 240855 - protein, 15 aa, Artificial Sequence
  Description of Artificial Sequence: Synthetic peptide
  Seed: LRMKWMMAMKYPITA
LRMKVMMLMKYPNTA

SEQ ID NO: 240856 - protein, 15 aa, Artificial Sequence
  Description of Artificial Sequence: Synthetic peptide
  Seed: LRMKWMMAMKYPITA
LRMKVMMLMKYPPTA

SEQ ID NO: 240857 - protein, 15 aa, Artificial Sequence
  Description of Artificial Sequence: Synthetic peptide
  Seed: LRMKWMMAMKYPITA
LRMKVMMLMKYPQTA

SEQ ID NO: 240858 - protein, 15 aa, Artificial Sequence
  Description of Artificial Sequence: Synthetic peptide
  Seed: LRMKWMMAMKYPITA
LRMKVMMLMKYPRTA

SEQ ID NO: 240859 - protein, 15 aa, Artificial Sequence
  Description of Artificial Sequence: Synthetic peptide
  Seed: LRMKWMMAMKYPITA
LRMKVMMLMKYPSTA

SEQ ID NO: 240860 - protein, 15 aa, Artificial Sequence
  Description of Artificial Sequence: Synthetic peptide
  Seed: LRMKWMMAMKYPITA
LRMKVMMLMKYPTTA

SEQ ID NO: 240861 - protein, 15 aa, Artificial Sequence
  Description of Artificial Sequence: Synthetic peptide
  Seed: LRMKWMMAMKYPITA
LRMKVMMLMKYPVTA

SEQ ID NO: 240862 - protein, 15 aa, Artificial Sequence
  Description of Artificial Sequence: Synthetic peptide
  Seed: LRMKWMMAMKYPITA
LRMKVMMLMKYPYTA

SEQ ID NO: 240863 - protein, 15 aa, Artificial Sequence
  Description of Artificial Sequence: Synthetic peptide
  Seed: LRMKWMMAMKYPITA
LRMKVMMLMNYPATA

SEQ ID NO: 240864 - protein, 15 aa, Artificial Sequence
  Description of Artificial Sequence: Synthetic peptide
  Seed: LRMKWMMAMKYPITA
LRMKVMMLMNYPCTA

SEQ ID NO: 240865 - protein, 15 aa, Artificial Sequence
  Description of Artificial Sequence: Synthetic peptide
  Seed: LRMKWMMAMKYPITA
LRMKVMMLMNYPDTA

SEQ ID NO: 240866 - protein, 15 aa, Artificial Sequence
  Description of Artificial Sequence: Synthetic peptide
  Seed: LRMKWMMAMKYPITA
LRMKVMMLMNYPETA

SEQ ID NO: 240867 - protein, 15 aa, Artificial Sequence
  Description of Artificial Sequence: Synthetic peptide
  Seed: LRMKWMMAMKYPITA
LRMKVMMLMNYPFTA

SEQ ID NO: 240868 - protein, 15 aa, Artificial Sequence
  Description of Artificial Sequence: Synthetic peptide
  Seed: LRMKWMMAMKYPITA
LRMKVMMLMNYPGTA

SEQ ID NO: 240869 - protein, 15 aa, Artificial Sequence
  Description of Artificial Sequence: Synthetic peptide
  Seed: LRMKWMMAMKYPITA
LRMKVMMLMNYPHTA

SEQ ID NO: 240870 - protein, 15 aa, Artificial Sequence
  Description of Artificial Sequence: Synthetic peptide
  Seed: LRMKWMMAMKYPITA
LRMKVMMLMNYPITA

SEQ ID NO: 240871 - protein, 15 aa, Artificial Sequence
  Description of Artificial Sequence: Synthetic peptide
  Seed: LRMKWMMAMKYPITA
LRMKVMMLMNYPLTA

SEQ ID NO: 240872 - protein, 15 aa, Artificial Sequence
  Description of Artificial Sequence: Synthetic peptide
  Seed: LRMKWMMAMKYPITA
LRMKVMMLMNYPMTA

SEQ ID NO: 240873 - protein, 15 aa, Artificial Sequence
  Description of Artificial Sequence: Synthetic peptide
  Seed: LRMKWMMAMKYPITA
LRMKVMMLMNYPNTA

SEQ ID NO: 240874 - protein, 15 aa, Artificial Sequence
  Description of Artificial Sequence: Synthetic peptide
  Seed: LRMKWMMAMKYPITA
LRMKVMMLMNYPQTA

SEQ ID NO: 240875 - protein, 15 aa, Artificial Sequence
  Description of Artificial Sequence: Synthetic peptide
  Seed: LRMKWMMAMKYPITA
LRMKVMMLMNYPSTA

SEQ ID NO: 240876 - protein, 15 aa, Artificial Sequence
  Description of Artificial Sequence: Synthetic peptide
  Seed: LRMKWMMAMKYPITA
LRMKVMMLMNYPTTA

SEQ ID NO: 240877 - protein, 15 aa, Artificial Sequence
  Description of Artificial Sequence: Synthetic peptide
  Seed: LRMKWMMAMKYPITA
LRMKVMMLMNYPVTA

SEQ ID NO: 240878 - protein, 15 aa, Artificial Sequence
  Description of Artificial Sequence: Synthetic peptide
  Seed: LRMKWMMAMKYPITA
LRMKVMMLMNYPYTA

SEQ ID NO: 240879 - protein, 15 aa, Artificial Sequence
  Description of Artificial Sequence: Synthetic peptide
  Seed: LRMKWMMAMKYPITA
LRMKVMMLMPYPATA

SEQ ID NO: 240880 - protein, 15 aa, Artificial Sequence
  Description of Artificial Sequence: Synthetic peptide
  Seed: LRMKWMMAMKYPITA
LRMKVMMLMPYPCTA

SEQ ID NO: 240881 - protein, 15 aa, Artificial Sequence
  Description of Artificial Sequence: Synthetic peptide
  Seed: LRMKWMMAMKYPITA
LRMKVMMLMPYPDTA

SEQ ID NO: 240882 - protein, 15 aa, Artificial Sequence
  Description of Artificial Sequence: Synthetic peptide
  Seed: LRMKWMMAMKYPITA
LRMKVMMLMPYPETA

SEQ ID NO: 240883 - protein, 15 aa, Artificial Sequence
  Description of Artificial Sequence: Synthetic peptide
  Seed: LRMKWMMAMKYPITA
LRMKVMMLMPYPFTA

SEQ ID NO: 240884 - protein, 15 aa, Artificial Sequence
  Description of Artificial Sequence: Synthetic peptide
  Seed: LRMKWMMAMKYPITA
LRMKVMMLMPYPGTA

SEQ ID NO: 240885 - protein, 15 aa, Artificial Sequence
  Description of Artificial Sequence: Synthetic peptide
  Seed: LRMKWMMAMKYPITA
LRMKVMMLMPYPHTA

SEQ ID NO: 240886 - protein, 15 aa, Artificial Sequence
  Description of Artificial Sequence: Synthetic peptide
  Seed: LRMKWMMAMKYPITA
LRMKVMMLMPYPITA

SEQ ID NO: 240887 - protein, 15 aa, Artificial Sequence
  Description of Artificial Sequence: Synthetic peptide
  Seed: LRMKWMMAMKYPITA
LRMKVMMLMPYPKTA

SEQ ID NO: 240888 - protein, 15 aa, Artificial Sequence
  Description of Artificial Sequence: Synthetic peptide
  Seed: LRMKWMMAMKYPITA
LRMKVMMLMPYPLTA

SEQ ID NO: 240889 - protein, 15 aa, Artificial Sequence
  Description of Artificial Sequence: Synthetic peptide
  Seed: LRMKWMMAMKYPITA
LRMKVMMLMPYPMTA

SEQ ID NO: 240890 - protein, 15 aa, Artificial Sequence
  Description of Artificial Sequence: Synthetic peptide
  Seed: LRMKWMMAMKYPITA
LRMKVMMLMPYPNTA

SEQ ID NO: 240891 - protein, 15 aa, Artificial Sequence
  Description of Artificial Sequence: Synthetic peptide
  Seed: LRMKWMMAMKYPITA
LRMKVMMLMPYPPTA

SEQ ID NO: 240892 - protein, 15 aa, Artificial Sequence
  Description of Artificial Sequence: Synthetic peptide
  Seed: LRMKWMMAMKYPITA
LRMKVMMLMPYPQTA

SEQ ID NO: 240893 - protein, 15 aa, Artificial Sequence
  Description of Artificial Sequence: Synthetic peptide
  Seed: LRMKWMMAMKYPITA
LRMKVMMLMPYPRTA

SEQ ID NO: 240894 - protein, 15 aa, Artificial Sequence
  Description of Artificial Sequence: Synthetic peptide
  Seed: LRMKWMMAMKYPITA
LRMKVMMLMPYPSTA

SEQ ID NO: 240895 - protein, 15 aa, Artificial Sequence
  Description of Artificial Sequence: Synthetic peptide
  Seed: LRMKWMMAMKYPITA
LRMKVMMLMPYPTTA

SEQ ID NO: 240896 - protein, 15 aa, Artificial Sequence
  Description of Artificial Sequence: Synthetic peptide
  Seed: LRMKWMMAMKYPITA
LRMKVMMLMPYPVTA

SEQ ID NO: 240897 - protein, 15 aa, Artificial Sequence
  Description of Artificial Sequence: Synthetic peptide
  Seed: LRMKWMMAMKYPITA
LRMKVMMLMPYPYTA

SEQ ID NO: 240898 - protein, 15 aa, Artificial Sequence
  Description of Artificial Sequence: Synthetic peptide
  Seed: LRMKWMMAMKYPITA
LRMKVMMLMQYPATA

SEQ ID NO: 240899 - protein, 15 aa, Artificial Sequence
  Description of Artificial Sequence: Synthetic peptide
  Seed: LRMKWMMAMKYPITA
LRMKVMMLMQYPITA

SEQ ID NO: 240900 - protein, 15 aa, Artificial Sequence
  Description of Artificial Sequence: Synthetic peptide
  Seed: LRMKWMMAMKYPITA
LRMKVMMLMQYPLTA

SEQ ID NO: 240901 - protein, 15 aa, Artificial Sequence
  Description of Artificial Sequence: Synthetic peptide
  Seed: LRMKWMMAMKYPITA
LRMKVMMLMQYPMTA

SEQ ID NO: 240902 - protein, 15 aa, Artificial Sequence
  Description of Artificial Sequence: Synthetic peptide
  Seed: LRMKWMMAMKYPITA
LRMKVMMLMQYPVTA

SEQ ID NO: 240903 - protein, 15 aa, Artificial Sequence
  Description of Artificial Sequence: Synthetic peptide
  Seed: LRMKWMMAMKYPITA
LRMKVMMLMRYPATA

SEQ ID NO: 240904 - protein, 15 aa, Artificial Sequence
  Description of Artificial Sequence: Synthetic peptide
  Seed: LRMKWMMAMKYPITA
LRMKVMMLMRYPCTA

SEQ ID NO: 240905 - protein, 15 aa, Artificial Sequence
  Description of Artificial Sequence: Synthetic peptide
  Seed: LRMKWMMAMKYPITA
LRMKVMMLMRYPDTA

SEQ ID NO: 240906 - protein, 15 aa, Artificial Sequence
  Description of Artificial Sequence: Synthetic peptide
  Seed: LRMKWMMAMKYPITA
LRMKVMMLMRYPETA

SEQ ID NO: 240907 - protein, 15 aa, Artificial Sequence
  Description of Artificial Sequence: Synthetic peptide
  Seed: LRMKWMMAMKYPITA
LRMKVMMLMRYPFTA

SEQ ID NO: 240908 - protein, 15 aa, Artificial Sequence
  Description of Artificial Sequence: Synthetic peptide
  Seed: LRMKWMMAMKYPITA
LRMKVMMLMRYPGTA

SEQ ID NO: 240909 - protein, 15 aa, Artificial Sequence
  Description of Artificial Sequence: Synthetic peptide
  Seed: LRMKWMMAMKYPITA
LRMKVMMLMRYPHTA

SEQ ID NO: 240910 - protein, 15 aa, Artificial Sequence
  Description of Artificial Sequence: Synthetic peptide
  Seed: LRMKWMMAMKYPITA
LRMKVMMLMRYPITA

SEQ ID NO: 240911 - protein, 15 aa, Artificial Sequence
  Description of Artificial Sequence: Synthetic peptide
  Seed: LRMKWMMAMKYPITA
LRMKVMMLMRYPKTA

SEQ ID NO: 240912 - protein, 15 aa, Artificial Sequence
  Description of Artificial Sequence: Synthetic peptide
  Seed: LRMKWMMAMKYPITA
LRMKVMMLMRYPLTA

SEQ ID NO: 240913 - protein, 15 aa, Artificial Sequence
  Description of Artificial Sequence: Synthetic peptide
  Seed: LRMKWMMAMKYPITA
LRMKVMMLMRYPMTA

SEQ ID NO: 240914 - protein, 15 aa, Artificial Sequence
  Description of Artificial Sequence: Synthetic peptide
  Seed: LRMKWMMAMKYPITA
LRMKVMMLMRYPNTA

SEQ ID NO: 240915 - protein, 15 aa, Artificial Sequence
  Description of Artificial Sequence: Synthetic peptide
  Seed: LRMKWMMAMKYPITA
LRMKVMMLMRYPPTA

SEQ ID NO: 240916 - protein, 15 aa, Artificial Sequence
  Description of Artificial Sequence: Synthetic peptide
  Seed: LRMKWMMAMKYPITA
LRMKVMMLMRYPQTA

SEQ ID NO: 240917 - protein, 15 aa, Artificial Sequence
  Description of Artificial Sequence: Synthetic peptide
  Seed: LRMKWMMAMKYPITA
LRMKVMMLMRYPRTA

SEQ ID NO: 240918 - protein, 15 aa, Artificial Sequence
  Description of Artificial Sequence: Synthetic peptide
  Seed: LRMKWMMAMKYPITA
LRMKVMMLMRYPSTA

SEQ ID NO: 240919 - protein, 15 aa, Artificial Sequence
  Description of Artificial Sequence: Synthetic peptide
  Seed: LRMKWMMAMKYPITA
LRMKVMMLMRYPTTA

SEQ ID NO: 240920 - protein, 15 aa, Artificial Sequence
  Description of Artificial Sequence: Synthetic peptide
  Seed: LRMKWMMAMKYPITA
LRMKVMMLMRYPVTA

SEQ ID NO: 240921 - protein, 15 aa, Artificial Sequence
  Description of Artificial Sequence: Synthetic peptide
  Seed: LRMKWMMAMKYPITA
LRMKVMMLMRYPWTA

SEQ ID NO: 240922 - protein, 15 aa, Artificial Sequence
  Description of Artificial Sequence: Synthetic peptide
  Seed: LRMKWMMAMKYPITA
LRMKVMMLMRYPYTA

SEQ ID NO: 240923 - protein, 15 aa, Artificial Sequence
  Description of Artificial Sequence: Synthetic peptide
  Seed: LRMKWMMAMKYPITA
LRMKVMMLMSYPATA

SEQ ID NO: 240924 - protein, 15 aa, Artificial Sequence
  Description of Artificial Sequence: Synthetic peptide
  Seed: LRMKWMMAMKYPITA
LRMKVMMLMSYPCTA

SEQ ID NO: 240925 - protein, 15 aa, Artificial Sequence
  Description of Artificial Sequence: Synthetic peptide
  Seed: LRMKWMMAMKYPITA
LRMKVMMLMSYPDTA

SEQ ID NO: 240926 - protein, 15 aa, Artificial Sequence
  Description of Artificial Sequence: Synthetic peptide
  Seed: LRMKWMMAMKYPITA
LRMKVMMLMSYPETA

SEQ ID NO: 240927 - protein, 15 aa, Artificial Sequence
  Description of Artificial Sequence: Synthetic peptide
  Seed: LRMKWMMAMKYPITA
LRMKVMMLMSYPFTA

SEQ ID NO: 240928 - protein, 15 aa, Artificial Sequence
  Description of Artificial Sequence: Synthetic peptide
  Seed: LRMKWMMAMKYPITA
LRMKVMMLMSYPGTA

SEQ ID NO: 240929 - protein, 15 aa, Artificial Sequence
  Description of Artificial Sequence: Synthetic peptide
  Seed: LRMKWMMAMKYPITA
LRMKVMMLMSYPHTA

SEQ ID NO: 240930 - protein, 15 aa, Artificial Sequence
  Description of Artificial Sequence: Synthetic peptide
  Seed: LRMKWMMAMKYPITA
LRMKVMMLMSYPITA

SEQ ID NO: 240931 - protein, 15 aa, Artificial Sequence
  Description of Artificial Sequence: Synthetic peptide
  Seed: LRMKWMMAMKYPITA
LRMKVMMLMSYPKTA

SEQ ID NO: 240932 - protein, 15 aa, Artificial Sequence
  Description of Artificial Sequence: Synthetic peptide
  Seed: LRMKWMMAMKYPITA
LRMKVMMLMSYPLTA

SEQ ID NO: 240933 - protein, 15 aa, Artificial Sequence
  Description of Artificial Sequence: Synthetic peptide
  Seed: LRMKWMMAMKYPITA
LRMKVMMLMSYPMTA

SEQ ID NO: 240934 - protein, 15 aa, Artificial Sequence
  Description of Artificial Sequence: Synthetic peptide
  Seed: LRMKWMMAMKYPITA
LRMKVMMLMSYPNTA

SEQ ID NO: 240935 - protein, 15 aa, Artificial Sequence
  Description of Artificial Sequence: Synthetic peptide
  Seed: LRMKWMMAMKYPITA
LRMKVMMLMSYPPTA

SEQ ID NO: 240936 - protein, 15 aa, Artificial Sequence
  Description of Artificial Sequence: Synthetic peptide
  Seed: LRMKWMMAMKYPITA
LRMKVMMLMSYPQTA

SEQ ID NO: 240937 - protein, 15 aa, Artificial Sequence
  Description of Artificial Sequence: Synthetic peptide
  Seed: LRMKWMMAMKYPITA
LRMKVMMLMSYPRTA

SEQ ID NO: 240938 - protein, 15 aa, Artificial Sequence
  Description of Artificial Sequence: Synthetic peptide
  Seed: LRMKWMMAMKYPITA
LRMKVMMLMSYPSTA

SEQ ID NO: 240939 - protein, 15 aa, Artificial Sequence
  Description of Artificial Sequence: Synthetic peptide
  Seed: LRMKWMMAMKYPITA
LRMKVMMLMSYPTTA

SEQ ID NO: 240940 - protein, 15 aa, Artificial Sequence
  Description of Artificial Sequence: Synthetic peptide
  Seed: LRMKWMMAMKYPITA
LRMKVMMLMSYPVTA

SEQ ID NO: 240941 - protein, 15 aa, Artificial Sequence
  Description of Artificial Sequence: Synthetic peptide
  Seed: LRMKWMMAMKYPITA
LRMKVMMLMSYPYTA

SEQ ID NO: 240942 - protein, 15 aa, Artificial Sequence
  Description of Artificial Sequence: Synthetic peptide
  Seed: LRMKWMMAMKYPITA
LRMKVMMLMTYPATA

SEQ ID NO: 240943 - protein, 15 aa, Artificial Sequence
  Description of Artificial Sequence: Synthetic peptide
  Seed: LRMKWMMAMKYPITA
LRMKVMMLMTYPCTA

SEQ ID NO: 240944 - protein, 15 aa, Artificial Sequence
  Description of Artificial Sequence: Synthetic peptide
  Seed: LRMKWMMAMKYPITA
LRMKVMMLMTYPDTA

SEQ ID NO: 240945 - protein, 15 aa, Artificial Sequence
  Description of Artificial Sequence: Synthetic peptide
  Seed: LRMKWMMAMKYPITA
LRMKVMMLMTYPETA

SEQ ID NO: 240946 - protein, 15 aa, Artificial Sequence
  Description of Artificial Sequence: Synthetic peptide
  Seed: LRMKWMMAMKYPITA
LRMKVMMLMTYPFTA

SEQ ID NO: 240947 - protein, 15 aa, Artificial Sequence
  Description of Artificial Sequence: Synthetic peptide
  Seed: LRMKWMMAMKYPITA
LRMKVMMLMTYPGTA

SEQ ID NO: 240948 - protein, 15 aa, Artificial Sequence
  Description of Artificial Sequence: Synthetic peptide
  Seed: LRMKWMMAMKYPITA
LRMKVMMLMTYPHTA

SEQ ID NO: 240949 - protein, 15 aa, Artificial Sequence
  Description of Artificial Sequence: Synthetic peptide
  Seed: LRMKWMMAMKYPITA
LRMKVMMLMTYPITA

SEQ ID NO: 240950 - protein, 15 aa, Artificial Sequence
  Description of Artificial Sequence: Synthetic peptide
  Seed: LRMKWMMAMKYPITA
LRMKVMMLMTYPKTA

SEQ ID NO: 240951 - protein, 15 aa, Artificial Sequence
  Description of Artificial Sequence: Synthetic peptide
  Seed: LRMKWMMAMKYPITA
LRMKVMMLMTYPLTA

SEQ ID NO: 240952 - protein, 15 aa, Artificial Sequence
  Description of Artificial Sequence: Synthetic peptide
  Seed: LRMKWMMAMKYPITA
LRMKVMMLMTYPMTA

SEQ ID NO: 240953 - protein, 15 aa, Artificial Sequence
  Description of Artificial Sequence: Synthetic peptide
  Seed: LRMKWMMAMKYPITA
LRMKVMMLMTYPNTA

SEQ ID NO: 240954 - protein, 15 aa, Artificial Sequence
  Description of Artificial Sequence: Synthetic peptide
  Seed: LRMKWMMAMKYPITA
LRMKVMMLMTYPPTA

SEQ ID NO: 240955 - protein, 15 aa, Artificial Sequence
  Description of Artificial Sequence: Synthetic peptide
  Seed: LRMKWMMAMKYPITA
LRMKVMMLMTYPQTA

SEQ ID NO: 240956 - protein, 15 aa, Artificial Sequence
  Description of Artificial Sequence: Synthetic peptide
  Seed: LRMKWMMAMKYPITA
LRMKVMMLMTYPRTA

SEQ ID NO: 240957 - protein, 15 aa, Artificial Sequence
  Description of Artificial Sequence: Synthetic peptide
  Seed: LRMKWMMAMKYPITA
LRMKVMMLMTYPSTA

SEQ ID NO: 240958 - protein, 15 aa, Artificial Sequence
  Description of Artificial Sequence: Synthetic peptide
  Seed: LRMKWMMAMKYPITA
LRMKVMMLMTYPTTA

SEQ ID NO: 240959 - protein, 15 aa, Artificial Sequence
  Description of Artificial Sequence: Synthetic peptide
  Seed: LRMKWMMAMKYPITA
LRMKVMMLMTYPVTA

SEQ ID NO: 240960 - protein, 15 aa, Artificial Sequence
  Description of Artificial Sequence: Synthetic peptide
  Seed: LRMKWMMAMKYPITA
LRMKVMMLMTYPYTA

SEQ ID NO: 240961 - protein, 15 aa, Artificial Sequence
  Description of Artificial Sequence: Synthetic peptide
  Seed: LRMKWMMAMKYPITA
LRMKVMMLMVYPATA

SEQ ID NO: 240962 - protein, 15 aa, Artificial Sequence
  Description of Artificial Sequence: Synthetic peptide
  Seed: LRMKWMMAMKYPITA
LRMKVMMLMVYPDTA

SEQ ID NO: 240963 - protein, 15 aa, Artificial Sequence
  Description of Artificial Sequence: Synthetic peptide
  Seed: LRMKWMMAMKYPITA
LRMKVMMLMVYPETA

SEQ ID NO: 240964 - protein, 15 aa, Artificial Sequence
  Description of Artificial Sequence: Synthetic peptide
  Seed: LRMKWMMAMKYPITA
LRMKVMMLMVYPGTA

SEQ ID NO: 240965 - protein, 15 aa, Artificial Sequence
  Description of Artificial Sequence: Synthetic peptide
  Seed: LRMKWMMAMKYPITA
LRMKVMMLMVYPHTA

SEQ ID NO: 240966 - protein, 15 aa, Artificial Sequence
  Description of Artificial Sequence: Synthetic peptide
  Seed: LRMKWMMAMKYPITA
LRMKVMMLMVYPITA

SEQ ID NO: 240967 - protein, 15 aa, Artificial Sequence
  Description of Artificial Sequence: Synthetic peptide
  Seed: LRMKWMMAMKYPITA
LRMKVMMLMVYPLTA

SEQ ID NO: 240968 - protein, 15 aa, Artificial Sequence
  Description of Artificial Sequence: Synthetic peptide
  Seed: LRMKWMMAMKYPITA
LRMKVMMLMVYPMTA

SEQ ID NO: 240969 - protein, 15 aa, Artificial Sequence
  Description of Artificial Sequence: Synthetic peptide
  Seed: LRMKWMMAMKYPITA
LRMKVMMLMVYPNTA

SEQ ID NO: 240970 - protein, 15 aa, Artificial Sequence
  Description of Artificial Sequence: Synthetic peptide
  Seed: LRMKWMMAMKYPITA
LRMKVMMLMVYPPTA

SEQ ID NO: 240971 - protein, 15 aa, Artificial Sequence
  Description of Artificial Sequence: Synthetic peptide
  Seed: LRMKWMMAMKYPITA
LRMKVMMLMVYPQTA

SEQ ID NO: 240972 - protein, 15 aa, Artificial Sequence
  Description of Artificial Sequence: Synthetic peptide
  Seed: LRMKWMMAMKYPITA
LRMKVMMLMVYPSTA

SEQ ID NO: 240973 - protein, 15 aa, Artificial Sequence
  Description of Artificial Sequence: Synthetic peptide
  Seed: LRMKWMMAMKYPITA
LRMKVMMLMVYPTTA

SEQ ID NO: 240974 - protein, 15 aa, Artificial Sequence
  Description of Artificial Sequence: Synthetic peptide
  Seed: LRMKWMMAMKYPITA
LRMKVMMLMVYPVTA

SEQ ID NO: 240975 - protein, 15 aa, Artificial Sequence
  Description of Artificial Sequence: Synthetic peptide
  Seed: LRMKWMMAMKYPITA
LRMKVMMMMAYPATA

SEQ ID NO: 240976 - protein, 15 aa, Artificial Sequence
  Description of Artificial Sequence: Synthetic peptide
  Seed: LRMKWMMAMKYPITA
LRMKVMMMMAYPCTA

SEQ ID NO: 240977 - protein, 15 aa, Artificial Sequence
  Description of Artificial Sequence: Synthetic peptide
  Seed: LRMKWMMAMKYPITA
LRMKVMMMMAYPDTA

SEQ ID NO: 240978 - protein, 15 aa, Artificial Sequence
  Description of Artificial Sequence: Synthetic peptide
  Seed: LRMKWMMAMKYPITA
LRMKVMMMMAYPETA

SEQ ID NO: 240979 - protein, 15 aa, Artificial Sequence
  Description of Artificial Sequence: Synthetic peptide
  Seed: LRMKWMMAMKYPITA
LRMKVMMMMAYPFTA

SEQ ID NO: 240980 - protein, 15 aa, Artificial Sequence
  Description of Artificial Sequence: Synthetic peptide
  Seed: LRMKWMMAMKYPITA
LRMKVMMMMAYPGTA

SEQ ID NO: 240981 - protein, 15 aa, Artificial Sequence
  Description of Artificial Sequence: Synthetic peptide
  Seed: LRMKWMMAMKYPITA
LRMKVMMMMAYPHTA

SEQ ID NO: 240982 - protein, 15 aa, Artificial Sequence
  Description of Artificial Sequence: Synthetic peptide
  Seed: LRMKWMMAMKYPITA
LRMKVMMMMAYPITA

SEQ ID NO: 240983 - protein, 15 aa, Artificial Sequence
  Description of Artificial Sequence: Synthetic peptide
  Seed: LRMKWMMAMKYPITA
LRMKVMMMMAYPKTA

SEQ ID NO: 240984 - protein, 15 aa, Artificial Sequence
  Description of Artificial Sequence: Synthetic peptide
  Seed: LRMKWMMAMKYPITA
LRMKVMMMMAYPLTA

SEQ ID NO: 240985 - protein, 15 aa, Artificial Sequence
  Description of Artificial Sequence: Synthetic peptide
  Seed: LRMKWMMAMKYPITA
LRMKVMMMMAYPMTA

SEQ ID NO: 240986 - protein, 15 aa, Artificial Sequence
  Description of Artificial Sequence: Synthetic peptide
  Seed: LRMKWMMAMKYPITA
LRMKVMMMMAYPNTA

SEQ ID NO: 240987 - protein, 15 aa, Artificial Sequence
  Description of Artificial Sequence: Synthetic peptide
  Seed: LRMKWMMAMKYPITA
LRMKVMMMMAYPPTA

SEQ ID NO: 240988 - protein, 15 aa, Artificial Sequence
  Description of Artificial Sequence: Synthetic peptide
  Seed: LRMKWMMAMKYPITA
LRMKVMMMMAYPQTA

SEQ ID NO: 240989 - protein, 15 aa, Artificial Sequence
  Description of Artificial Sequence: Synthetic peptide
  Seed: LRMKWMMAMKYPITA
LRMKVMMMMAYPRTA

SEQ ID NO: 240990 - protein, 15 aa, Artificial Sequence
  Description of Artificial Sequence: Synthetic peptide
  Seed: LRMKWMMAMKYPITA
LRMKVMMMMAYPSTA

SEQ ID NO: 240991 - protein, 15 aa, Artificial Sequence
  Description of Artificial Sequence: Synthetic peptide
  Seed: LRMKWMMAMKYPITA
LRMKVMMMMAYPTTA

SEQ ID NO: 240992 - protein, 15 aa, Artificial Sequence
  Description of Artificial Sequence: Synthetic peptide
  Seed: LRMKWMMAMKYPITA
LRMKVMMMMAYPVTA

SEQ ID NO: 240993 - protein, 15 aa, Artificial Sequence
  Description of Artificial Sequence: Synthetic peptide
  Seed: LRMKWMMAMKYPITA
LRMKVMMMMAYPWTA

SEQ ID NO: 240994 - protein, 15 aa, Artificial Sequence
  Description of Artificial Sequence: Synthetic peptide
  Seed: LRMKWMMAMKYPITA
LRMKVMMMMAYPYTA

SEQ ID NO: 240995 - protein, 15 aa, Artificial Sequence
  Description of Artificial Sequence: Synthetic peptide
  Seed: LRMKWMMAMKYPITA
LRMKVMMMMCYPATA

SEQ ID NO: 240996 - protein, 15 aa, Artificial Sequence
  Description of Artificial Sequence: Synthetic peptide
  Seed: LRMKWMMAMKYPITA
LRMKVMMMMCYPITA

SEQ ID NO: 240997 - protein, 15 aa, Artificial Sequence
  Description of Artificial Sequence: Synthetic peptide
  Seed: LRMKWMMAMKYPITA
LRMKVMMMMCYPLTA

SEQ ID NO: 240998 - protein, 15 aa, Artificial Sequence
  Description of Artificial Sequence: Synthetic peptide
  Seed: LRMKWMMAMKYPITA
LRMKVMMMMCYPVTA

SEQ ID NO: 240999 - protein, 15 aa, Artificial Sequence
  Description of Artificial Sequence: Synthetic peptide
  Seed: LRMKWMMAMKYPITA
LRMKVMMMMDYPATA

SEQ ID NO: 241000 - protein, 15 aa, Artificial Sequence
  Description of Artificial Sequence: Synthetic peptide
  Seed: LRMKWMMAMKYPITA
LRMKVMMMMDYPITA

SEQ ID NO: 241001 - protein, 15 aa, Artificial Sequence
  Description of Artificial Sequence: Synthetic peptide
  Seed: LRMKWMMAMKYPITA
LRMKVMMMMDYPLTA

SEQ ID NO: 241002 - protein, 15 aa, Artificial Sequence
  Description of Artificial Sequence: Synthetic peptide
  Seed: LRMKWMMAMKYPITA
LRMKVMMMMDYPVTA

SEQ ID NO: 241003 - protein, 15 aa, Artificial Sequence
  Description of Artificial Sequence: Synthetic peptide
  Seed: LRMKWMMAMKYPITA
LRMKVMMMMEYPATA

SEQ ID NO: 241004 - protein, 15 aa, Artificial Sequence
  Description of Artificial Sequence: Synthetic peptide
  Seed: LRMKWMMAMKYPITA
LRMKVMMMMEYPITA

SEQ ID NO: 241005 - protein, 15 aa, Artificial Sequence
  Description of Artificial Sequence: Synthetic peptide
  Seed: LRMKWMMAMKYPITA
LRMKVMMMMEYPLTA

SEQ ID NO: 241006 - protein, 15 aa, Artificial Sequence
  Description of Artificial Sequence: Synthetic peptide
  Seed: LRMKWMMAMKYPITA
LRMKVMMMMEYPVTA

SEQ ID NO: 241007 - protein, 15 aa, Artificial Sequence
  Description of Artificial Sequence: Synthetic peptide
  Seed: LRMKWMMAMKYPITA
LRMKVMMMMGYPATA

SEQ ID NO: 241008 - protein, 15 aa, Artificial Sequence
  Description of Artificial Sequence: Synthetic peptide
  Seed: LRMKWMMAMKYPITA
LRMKVMMMMGYPCTA

SEQ ID NO: 241009 - protein, 15 aa, Artificial Sequence
  Description of Artificial Sequence: Synthetic peptide
  Seed: LRMKWMMAMKYPITA
LRMKVMMMMGYPFTA

SEQ ID NO: 241010 - protein, 15 aa, Artificial Sequence
  Description of Artificial Sequence: Synthetic peptide
  Seed: LRMKWMMAMKYPITA
LRMKVMMMMGYPGTA

SEQ ID NO: 241011 - protein, 15 aa, Artificial Sequence
  Description of Artificial Sequence: Synthetic peptide
  Seed: LRMKWMMAMKYPITA
LRMKVMMMMGYPHTA

SEQ ID NO: 241012 - protein, 15 aa, Artificial Sequence
  Description of Artificial Sequence: Synthetic peptide
  Seed: LRMKWMMAMKYPITA
LRMKVMMMMGYPITA

SEQ ID NO: 241013 - protein, 15 aa, Artificial Sequence
  Description of Artificial Sequence: Synthetic peptide
  Seed: LRMKWMMAMKYPITA
LRMKVMMMMGYPKTA

SEQ ID NO: 241014 - protein, 15 aa, Artificial Sequence
  Description of Artificial Sequence: Synthetic peptide
  Seed: LRMKWMMAMKYPITA
LRMKVMMMMGYPLTA

SEQ ID NO: 241015 - protein, 15 aa, Artificial Sequence
  Description of Artificial Sequence: Synthetic peptide
  Seed: LRMKWMMAMKYPITA
LRMKVMMMMGYPMTA

SEQ ID NO: 241016 - protein, 15 aa, Artificial Sequence
  Description of Artificial Sequence: Synthetic peptide
  Seed: LRMKWMMAMKYPITA
LRMKVMMMMGYPNTA

SEQ ID NO: 241017 - protein, 15 aa, Artificial Sequence
  Description of Artificial Sequence: Synthetic peptide
  Seed: LRMKWMMAMKYPITA
LRMKVMMMMGYPPTA

SEQ ID NO: 241018 - protein, 15 aa, Artificial Sequence
  Description of Artificial Sequence: Synthetic peptide
  Seed: LRMKWMMAMKYPITA
LRMKVMMMMGYPQTA

SEQ ID NO: 241019 - protein, 15 aa, Artificial Sequence
  Description of Artificial Sequence: Synthetic peptide
  Seed: LRMKWMMAMKYPITA
LRMKVMMMMGYPRTA

SEQ ID NO: 241020 - protein, 15 aa, Artificial Sequence
  Description of Artificial Sequence: Synthetic peptide
  Seed: LRMKWMMAMKYPITA
LRMKVMMMMGYPSTA

SEQ ID NO: 241021 - protein, 15 aa, Artificial Sequence
  Description of Artificial Sequence: Synthetic peptide
  Seed: LRMKWMMAMKYPITA
LRMKVMMMMGYPTTA

SEQ ID NO: 241022 - protein, 15 aa, Artificial Sequence
  Description of Artificial Sequence: Synthetic peptide
  Seed: LRMKWMMAMKYPITA
LRMKVMMMMGYPVTA

SEQ ID NO: 241023 - protein, 15 aa, Artificial Sequence
  Description of Artificial Sequence: Synthetic peptide
  Seed: LRMKWMMAMKYPITA
LRMKVMMMMGYPYTA

SEQ ID NO: 241024 - protein, 15 aa, Artificial Sequence
  Description of Artificial Sequence: Synthetic peptide
  Seed: LRMKWMMAMKYPITA
LRMKVMMMMHYPATA

SEQ ID NO: 241025 - protein, 15 aa, Artificial Sequence
  Description of Artificial Sequence: Synthetic peptide
  Seed: LRMKWMMAMKYPITA
LRMKVMMMMHYPGTA

SEQ ID NO: 241026 - protein, 15 aa, Artificial Sequence
  Description of Artificial Sequence: Synthetic peptide
  Seed: LRMKWMMAMKYPITA
LRMKVMMMMHYPHTA

SEQ ID NO: 241027 - protein, 15 aa, Artificial Sequence
  Description of Artificial Sequence: Synthetic peptide
  Seed: LRMKWMMAMKYPITA
LRMKVMMMMHYPITA

SEQ ID NO: 241028 - protein, 15 aa, Artificial Sequence
  Description of Artificial Sequence: Synthetic peptide
  Seed: LRMKWMMAMKYPITA
LRMKVMMMMHYPKTA

SEQ ID NO: 241029 - protein, 15 aa, Artificial Sequence
  Description of Artificial Sequence: Synthetic peptide
  Seed: LRMKWMMAMKYPITA
LRMKVMMMMHYPLTA

SEQ ID NO: 241030 - protein, 15 aa, Artificial Sequence
  Description of Artificial Sequence: Synthetic peptide
  Seed: LRMKWMMAMKYPITA
LRMKVMMMMHYPMTA

SEQ ID NO: 241031 - protein, 15 aa, Artificial Sequence
  Description of Artificial Sequence: Synthetic peptide
  Seed: LRMKWMMAMKYPITA
LRMKVMMMMHYPQTA

SEQ ID NO: 241032 - protein, 15 aa, Artificial Sequence
  Description of Artificial Sequence: Synthetic peptide
  Seed: LRMKWMMAMKYPITA
LRMKVMMMMHYPRTA

SEQ ID NO: 241033 - protein, 15 aa, Artificial Sequence
  Description of Artificial Sequence: Synthetic peptide
  Seed: LRMKWMMAMKYPITA
LRMKVMMMMHYPSTA

SEQ ID NO: 241034 - protein, 15 aa, Artificial Sequence
  Description of Artificial Sequence: Synthetic peptide
  Seed: LRMKWMMAMKYPITA
LRMKVMMMMHYPTTA

SEQ ID NO: 241035 - protein, 15 aa, Artificial Sequence
  Description of Artificial Sequence: Synthetic peptide
  Seed: LRMKWMMAMKYPITA
LRMKVMMMMHYPVTA

SEQ ID NO: 241036 - protein, 15 aa, Artificial Sequence
  Description of Artificial Sequence: Synthetic peptide
  Seed: LRMKWMMAMKYPITA
LRMKVMMMMHYPYTA

SEQ ID NO: 241037 - protein, 15 aa, Artificial Sequence
  Description of Artificial Sequence: Synthetic peptide
  Seed: LRMKWMMAMKYPITA
LRMKVMMMMIYPATA

SEQ ID NO: 241038 - protein, 15 aa, Artificial Sequence
  Description of Artificial Sequence: Synthetic peptide
  Seed: LRMKWMMAMKYPITA
LRMKVMMMMIYPDTA

SEQ ID NO: 241039 - protein, 15 aa, Artificial Sequence
  Description of Artificial Sequence: Synthetic peptide
  Seed: LRMKWMMAMKYPITA
LRMKVMMMMIYPETA

SEQ ID NO: 241040 - protein, 15 aa, Artificial Sequence
  Description of Artificial Sequence: Synthetic peptide
  Seed: LRMKWMMAMKYPITA
LRMKVMMMMIYPGTA

SEQ ID NO: 241041 - protein, 15 aa, Artificial Sequence
  Description of Artificial Sequence: Synthetic peptide
  Seed: LRMKWMMAMKYPITA
LRMKVMMMMIYPHTA

SEQ ID NO: 241042 - protein, 15 aa, Artificial Sequence
  Description of Artificial Sequence: Synthetic peptide
  Seed: LRMKWMMAMKYPITA
LRMKVMMMMIYPITA

SEQ ID NO: 241043 - protein, 15 aa, Artificial Sequence
  Description of Artificial Sequence: Synthetic peptide
  Seed: LRMKWMMAMKYPITA
LRMKVMMMMIYPKTA

SEQ ID NO: 241044 - protein, 15 aa, Artificial Sequence
  Description of Artificial Sequence: Synthetic peptide
  Seed: LRMKWMMAMKYPITA
LRMKVMMMMIYPLTA

SEQ ID NO: 241045 - protein, 15 aa, Artificial Sequence
  Description of Artificial Sequence: Synthetic peptide
  Seed: LRMKWMMAMKYPITA
LRMKVMMMMIYPMTA

SEQ ID NO: 241046 - protein, 15 aa, Artificial Sequence
  Description of Artificial Sequence: Synthetic peptide
  Seed: LRMKWMMAMKYPITA
LRMKVMMMMIYPNTA

SEQ ID NO: 241047 - protein, 15 aa, Artificial Sequence
  Description of Artificial Sequence: Synthetic peptide
  Seed: LRMKWMMAMKYPITA
LRMKVMMMMIYPQTA

SEQ ID NO: 241048 - protein, 15 aa, Artificial Sequence
  Description of Artificial Sequence: Synthetic peptide
  Seed: LRMKWMMAMKYPITA
LRMKVMMMMIYPRTA

SEQ ID NO: 241049 - protein, 15 aa, Artificial Sequence
  Description of Artificial Sequence: Synthetic peptide
  Seed: LRMKWMMAMKYPITA
LRMKVMMMMIYPSTA

SEQ ID NO: 241050 - protein, 15 aa, Artificial Sequence
  Description of Artificial Sequence: Synthetic peptide
  Seed: LRMKWMMAMKYPITA
LRMKVMMMMIYPTTA

SEQ ID NO: 241051 - protein, 15 aa, Artificial Sequence
  Description of Artificial Sequence: Synthetic peptide
  Seed: LRMKWMMAMKYPITA
LRMKVMMMMIYPVTA

SEQ ID NO: 241052 - protein, 15 aa, Artificial Sequence
  Description of Artificial Sequence: Synthetic peptide
  Seed: LRMKWMMAMKYPITA
LRMKVMMMMKYPATA

SEQ ID NO: 241053 - protein, 15 aa, Artificial Sequence
  Description of Artificial Sequence: Synthetic peptide
  Seed: LRMKWMMAMKYPITA
LRMKVMMMMKYPCTA

SEQ ID NO: 241054 - protein, 15 aa, Artificial Sequence
  Description of Artificial Sequence: Synthetic peptide
  Seed: LRMKWMMAMKYPITA
LRMKVMMMMKYPDTA

SEQ ID NO: 241055 - protein, 15 aa, Artificial Sequence
  Description of Artificial Sequence: Synthetic peptide
  Seed: LRMKWMMAMKYPITA
LRMKVMMMMKYPETA

SEQ ID NO: 241056 - protein, 15 aa, Artificial Sequence
  Description of Artificial Sequence: Synthetic peptide
  Seed: LRMKWMMAMKYPITA
LRMKVMMMMKYPFTA

SEQ ID NO: 241057 - protein, 15 aa, Artificial Sequence
  Description of Artificial Sequence: Synthetic peptide
  Seed: LRMKWMMAMKYPITA
LRMKVMMMMKYPGTA

SEQ ID NO: 241058 - protein, 15 aa, Artificial Sequence
  Description of Artificial Sequence: Synthetic peptide
  Seed: LRMKWMMAMKYPITA
LRMKVMMMMKYPHTA

SEQ ID NO: 241059 - protein, 15 aa, Artificial Sequence
  Description of Artificial Sequence: Synthetic peptide
  Seed: LRMKWMMAMKYPITA
LRMKVMMMMKYPITA

SEQ ID NO: 241060 - protein, 15 aa, Artificial Sequence
  Description of Artificial Sequence: Synthetic peptide
  Seed: LRMKWMMAMKYPITA
LRMKVMMMMKYPKTA

SEQ ID NO: 241061 - protein, 15 aa, Artificial Sequence
  Description of Artificial Sequence: Synthetic peptide
  Seed: LRMKWMMAMKYPITA
LRMKVMMMMKYPLTA

SEQ ID NO: 241062 - protein, 15 aa, Artificial Sequence
  Description of Artificial Sequence: Synthetic peptide
  Seed: LRMKWMMAMKYPITA
LRMKVMMMMKYPMTA

SEQ ID NO: 241063 - protein, 15 aa, Artificial Sequence
  Description of Artificial Sequence: Synthetic peptide
  Seed: LRMKWMMAMKYPITA
LRMKVMMMMKYPNTA

SEQ ID NO: 241064 - protein, 15 aa, Artificial Sequence
  Description of Artificial Sequence: Synthetic peptide
  Seed: LRMKWMMAMKYPITA
LRMKVMMMMKYPPTA

SEQ ID NO: 241065 - protein, 15 aa, Artificial Sequence
  Description of Artificial Sequence: Synthetic peptide
  Seed: LRMKWMMAMKYPITA
LRMKVMMMMKYPQTA

SEQ ID NO: 241066 - protein, 15 aa, Artificial Sequence
  Description of Artificial Sequence: Synthetic peptide
  Seed: LRMKWMMAMKYPITA
LRMKVMMMMKYPRTA

SEQ ID NO: 241067 - protein, 15 aa, Artificial Sequence
  Description of Artificial Sequence: Synthetic peptide
  Seed: LRMKWMMAMKYPITA
LRMKVMMMMKYPSTA

SEQ ID NO: 241068 - protein, 15 aa, Artificial Sequence
  Description of Artificial Sequence: Synthetic peptide
  Seed: LRMKWMMAMKYPITA
LRMKVMMMMKYPTTA

SEQ ID NO: 241069 - protein, 15 aa, Artificial Sequence
  Description of Artificial Sequence: Synthetic peptide
  Seed: LRMKWMMAMKYPITA
LRMKVMMMMKYPVTA

SEQ ID NO: 241070 - protein, 15 aa, Artificial Sequence
  Description of Artificial Sequence: Synthetic peptide
  Seed: LRMKWMMAMKYPITA
LRMKVMMMMKYPWTA

SEQ ID NO: 241071 - protein, 15 aa, Artificial Sequence
  Description of Artificial Sequence: Synthetic peptide
  Seed: LRMKWMMAMKYPITA
LRMKVMMMMKYPYTA

SEQ ID NO: 241072 - protein, 15 aa, Artificial Sequence
  Description of Artificial Sequence: Synthetic peptide
  Seed: LRMKWMMAMKYPITA
LRMKVMMMMMYPVTA

SEQ ID NO: 241073 - protein, 15 aa, Artificial Sequence
  Description of Artificial Sequence: Synthetic peptide
  Seed: LRMKWMMAMKYPITA
LRMKVMMMMNYPATA

SEQ ID NO: 241074 - protein, 15 aa, Artificial Sequence
  Description of Artificial Sequence: Synthetic peptide
  Seed: LRMKWMMAMKYPITA
LRMKVMMMMNYPCTA

SEQ ID NO: 241075 - protein, 15 aa, Artificial Sequence
  Description of Artificial Sequence: Synthetic peptide
  Seed: LRMKWMMAMKYPITA
LRMKVMMMMNYPDTA

SEQ ID NO: 241076 - protein, 15 aa, Artificial Sequence
  Description of Artificial Sequence: Synthetic peptide
  Seed: LRMKWMMAMKYPITA
LRMKVMMMMNYPETA

SEQ ID NO: 241077 - protein, 15 aa, Artificial Sequence
  Description of Artificial Sequence: Synthetic peptide
  Seed: LRMKWMMAMKYPITA
LRMKVMMMMNYPFTA

SEQ ID NO: 241078 - protein, 15 aa, Artificial Sequence
  Description of Artificial Sequence: Synthetic peptide
  Seed: LRMKWMMAMKYPITA
LRMKVMMMMNYPGTA

SEQ ID NO: 241079 - protein, 15 aa, Artificial Sequence
  Description of Artificial Sequence: Synthetic peptide
  Seed: LRMKWMMAMKYPITA
LRMKVMMMMNYPHTA

SEQ ID NO: 241080 - protein, 15 aa, Artificial Sequence
  Description of Artificial Sequence: Synthetic peptide
  Seed: LRMKWMMAMKYPITA
LRMKVMMMMNYPITA

SEQ ID NO: 241081 - protein, 15 aa, Artificial Sequence
  Description of Artificial Sequence: Synthetic peptide
  Seed: LRMKWMMAMKYPITA
LRMKVMMMMNYPLTA

SEQ ID NO: 241082 - protein, 15 aa, Artificial Sequence
  Description of Artificial Sequence: Synthetic peptide
  Seed: LRMKWMMAMKYPITA
LRMKVMMMMNYPMTA

SEQ ID NO: 241083 - protein, 15 aa, Artificial Sequence
  Description of Artificial Sequence: Synthetic peptide
  Seed: LRMKWMMAMKYPITA
LRMKVMMMMNYPNTA

SEQ ID NO: 241084 - protein, 15 aa, Artificial Sequence
  Description of Artificial Sequence: Synthetic peptide
  Seed: LRMKWMMAMKYPITA
LRMKVMMMMNYPQTA

SEQ ID NO: 241085 - protein, 15 aa, Artificial Sequence
  Description of Artificial Sequence: Synthetic peptide
  Seed: LRMKWMMAMKYPITA
LRMKVMMMMNYPRTA

SEQ ID NO: 241086 - protein, 15 aa, Artificial Sequence
  Description of Artificial Sequence: Synthetic peptide
  Seed: LRMKWMMAMKYPITA
LRMKVMMMMNYPSTA

SEQ ID NO: 241087 - protein, 15 aa, Artificial Sequence
  Description of Artificial Sequence: Synthetic peptide
  Seed: LRMKWMMAMKYPITA
LRMKVMMMMNYPTTA

SEQ ID NO: 241088 - protein, 15 aa, Artificial Sequence
  Description of Artificial Sequence: Synthetic peptide
  Seed: LRMKWMMAMKYPITA
LRMKVMMMMNYPVTA

SEQ ID NO: 241089 - protein, 15 aa, Artificial Sequence
  Description of Artificial Sequence: Synthetic peptide
  Seed: LRMKWMMAMKYPITA
LRMKVMMMMNYPYTA

SEQ ID NO: 241090 - protein, 15 aa, Artificial Sequence
  Description of Artificial Sequence: Synthetic peptide
  Seed: LRMKWMMAMKYPITA
LRMKVMMMMPYPATA

SEQ ID NO: 241091 - protein, 15 aa, Artificial Sequence
  Description of Artificial Sequence: Synthetic peptide
  Seed: LRMKWMMAMKYPITA
LRMKVMMMMPYPCTA

SEQ ID NO: 241092 - protein, 15 aa, Artificial Sequence
  Description of Artificial Sequence: Synthetic peptide
  Seed: LRMKWMMAMKYPITA
LRMKVMMMMPYPDTA

SEQ ID NO: 241093 - protein, 15 aa, Artificial Sequence
  Description of Artificial Sequence: Synthetic peptide
  Seed: LRMKWMMAMKYPITA
LRMKVMMMMPYPETA

SEQ ID NO: 241094 - protein, 15 aa, Artificial Sequence
  Description of Artificial Sequence: Synthetic peptide
  Seed: LRMKWMMAMKYPITA
LRMKVMMMMPYPFTA

SEQ ID NO: 241095 - protein, 15 aa, Artificial Sequence
  Description of Artificial Sequence: Synthetic peptide
  Seed: LRMKWMMAMKYPITA
LRMKVMMMMPYPGTA

SEQ ID NO: 241096 - protein, 15 aa, Artificial Sequence
  Description of Artificial Sequence: Synthetic peptide
  Seed: LRMKWMMAMKYPITA
LRMKVMMMMPYPHTA

SEQ ID NO: 241097 - protein, 15 aa, Artificial Sequence
  Description of Artificial Sequence: Synthetic peptide
  Seed: LRMKWMMAMKYPITA
LRMKVMMMMPYPITA

SEQ ID NO: 241098 - protein, 15 aa, Artificial Sequence
  Description of Artificial Sequence: Synthetic peptide
  Seed: LRMKWMMAMKYPITA
LRMKVMMMMPYPKTA

SEQ ID NO: 241099 - protein, 15 aa, Artificial Sequence
  Description of Artificial Sequence: Synthetic peptide
  Seed: LRMKWMMAMKYPITA
LRMKVMMMMPYPLTA

SEQ ID NO: 241100 - protein, 15 aa, Artificial Sequence
  Description of Artificial Sequence: Synthetic peptide
  Seed: LRMKWMMAMKYPITA
LRMKVMMMMPYPMTA

SEQ ID NO: 241101 - protein, 15 aa, Artificial Sequence
  Description of Artificial Sequence: Synthetic peptide
  Seed: LRMKWMMAMKYPITA
LRMKVMMMMPYPNTA

SEQ ID NO: 241102 - protein, 15 aa, Artificial Sequence
  Description of Artificial Sequence: Synthetic peptide
  Seed: LRMKWMMAMKYPITA
LRMKVMMMMPYPPTA

SEQ ID NO: 241103 - protein, 15 aa, Artificial Sequence
  Description of Artificial Sequence: Synthetic peptide
  Seed: LRMKWMMAMKYPITA
LRMKVMMMMPYPQTA

SEQ ID NO: 241104 - protein, 15 aa, Artificial Sequence
  Description of Artificial Sequence: Synthetic peptide
  Seed: LRMKWMMAMKYPITA
LRMKVMMMMPYPRTA

SEQ ID NO: 241105 - protein, 15 aa, Artificial Sequence
  Description of Artificial Sequence: Synthetic peptide
  Seed: LRMKWMMAMKYPITA
LRMKVMMMMPYPSTA

SEQ ID NO: 241106 - protein, 15 aa, Artificial Sequence
  Description of Artificial Sequence: Synthetic peptide
  Seed: LRMKWMMAMKYPITA
LRMKVMMMMPYPTTA

SEQ ID NO: 241107 - protein, 15 aa, Artificial Sequence
  Description of Artificial Sequence: Synthetic peptide
  Seed: LRMKWMMAMKYPITA
LRMKVMMMMPYPVTA

SEQ ID NO: 241108 - protein, 15 aa, Artificial Sequence
  Description of Artificial Sequence: Synthetic peptide
  Seed: LRMKWMMAMKYPITA
LRMKVMMMMPYPWTA

SEQ ID NO: 241109 - protein, 15 aa, Artificial Sequence
  Description of Artificial Sequence: Synthetic peptide
  Seed: LRMKWMMAMKYPITA
LRMKVMMMMPYPYTA

SEQ ID NO: 241110 - protein, 15 aa, Artificial Sequence
  Description of Artificial Sequence: Synthetic peptide
  Seed: LRMKWMMAMKYPITA
LRMKVMMMMQYPATA

SEQ ID NO: 241111 - protein, 15 aa, Artificial Sequence
  Description of Artificial Sequence: Synthetic peptide
  Seed: LRMKWMMAMKYPITA
LRMKVMMMMQYPITA

SEQ ID NO: 241112 - protein, 15 aa, Artificial Sequence
  Description of Artificial Sequence: Synthetic peptide
  Seed: LRMKWMMAMKYPITA
LRMKVMMMMQYPLTA

SEQ ID NO: 241113 - protein, 15 aa, Artificial Sequence
  Description of Artificial Sequence: Synthetic peptide
  Seed: LRMKWMMAMKYPITA
LRMKVMMMMQYPMTA

SEQ ID NO: 241114 - protein, 15 aa, Artificial Sequence
  Description of Artificial Sequence: Synthetic peptide
  Seed: LRMKWMMAMKYPITA
LRMKVMMMMQYPVTA

SEQ ID NO: 241115 - protein, 15 aa, Artificial Sequence
  Description of Artificial Sequence: Synthetic peptide
  Seed: LRMKWMMAMKYPITA
LRMKVMMMMRYPATA

SEQ ID NO: 241116 - protein, 15 aa, Artificial Sequence
  Description of Artificial Sequence: Synthetic peptide
  Seed: LRMKWMMAMKYPITA
LRMKVMMMMRYPCTA

SEQ ID NO: 241117 - protein, 15 aa, Artificial Sequence
  Description of Artificial Sequence: Synthetic peptide
  Seed: LRMKWMMAMKYPITA
LRMKVMMMMRYPDTA

SEQ ID NO: 241118 - protein, 15 aa, Artificial Sequence
  Description of Artificial Sequence: Synthetic peptide
  Seed: LRMKWMMAMKYPITA
LRMKVMMMMRYPETA

SEQ ID NO: 241119 - protein, 15 aa, Artificial Sequence
  Description of Artificial Sequence: Synthetic peptide
  Seed: LRMKWMMAMKYPITA
LRMKVMMMMRYPFTA

SEQ ID NO: 241120 - protein, 15 aa, Artificial Sequence
  Description of Artificial Sequence: Synthetic peptide
  Seed: LRMKWMMAMKYPITA
LRMKVMMMMRYPGTA

SEQ ID NO: 241121 - protein, 15 aa, Artificial Sequence
  Description of Artificial Sequence: Synthetic peptide
  Seed: LRMKWMMAMKYPITA
LRMKVMMMMRYPHTA

SEQ ID NO: 241122 - protein, 15 aa, Artificial Sequence
  Description of Artificial Sequence: Synthetic peptide
  Seed: LRMKWMMAMKYPITA
LRMKVMMMMRYPITA

SEQ ID NO: 241123 - protein, 15 aa, Artificial Sequence
  Description of Artificial Sequence: Synthetic peptide
  Seed: LRMKWMMAMKYPITA
LRMKVMMMMRYPKTA

SEQ ID NO: 241124 - protein, 15 aa, Artificial Sequence
  Description of Artificial Sequence: Synthetic peptide
  Seed: LRMKWMMAMKYPITA
LRMKVMMMMRYPLTA

SEQ ID NO: 241125 - protein, 15 aa, Artificial Sequence
  Description of Artificial Sequence: Synthetic peptide
  Seed: LRMKWMMAMKYPITA
LRMKVMMMMRYPMTA

SEQ ID NO: 241126 - protein, 15 aa, Artificial Sequence
  Description of Artificial Sequence: Synthetic peptide
  Seed: LRMKWMMAMKYPITA
LRMKVMMMMRYPNTA

SEQ ID NO: 241127 - protein, 15 aa, Artificial Sequence
  Description of Artificial Sequence: Synthetic peptide
  Seed: LRMKWMMAMKYPITA
LRMKVMMMMRYPPTA

SEQ ID NO: 241128 - protein, 15 aa, Artificial Sequence
  Description of Artificial Sequence: Synthetic peptide
  Seed: LRMKWMMAMKYPITA
LRMKVMMMMRYPQTA

SEQ ID NO: 241129 - protein, 15 aa, Artificial Sequence
  Description of Artificial Sequence: Synthetic peptide
  Seed: LRMKWMMAMKYPITA
LRMKVMMMMRYPRTA

SEQ ID NO: 241130 - protein, 15 aa, Artificial Sequence
  Description of Artificial Sequence: Synthetic peptide
  Seed: LRMKWMMAMKYPITA
LRMKVMMMMRYPSTA

SEQ ID NO: 241131 - protein, 15 aa, Artificial Sequence
  Description of Artificial Sequence: Synthetic peptide
  Seed: LRMKWMMAMKYPITA
LRMKVMMMMRYPTTA

SEQ ID NO: 241132 - protein, 15 aa, Artificial Sequence
  Description of Artificial Sequence: Synthetic peptide
  Seed: LRMKWMMAMKYPITA
LRMKVMMMMRYPVTA

SEQ ID NO: 241133 - protein, 15 aa, Artificial Sequence
  Description of Artificial Sequence: Synthetic peptide
  Seed: LRMKWMMAMKYPITA
LRMKVMMMMRYPWTA

SEQ ID NO: 241134 - protein, 15 aa, Artificial Sequence
  Description of Artificial Sequence: Synthetic peptide
  Seed: LRMKWMMAMKYPITA
LRMKVMMMMRYPYTA

SEQ ID NO: 241135 - protein, 15 aa, Artificial Sequence
  Description of Artificial Sequence: Synthetic peptide
  Seed: LRMKWMMAMKYPITA
LRMKVMMMMSYPATA

SEQ ID NO: 241136 - protein, 15 aa, Artificial Sequence
  Description of Artificial Sequence: Synthetic peptide
  Seed: LRMKWMMAMKYPITA
LRMKVMMMMSYPCTA

SEQ ID NO: 241137 - protein, 15 aa, Artificial Sequence
  Description of Artificial Sequence: Synthetic peptide
  Seed: LRMKWMMAMKYPITA
LRMKVMMMMSYPDTA

SEQ ID NO: 241138 - protein, 15 aa, Artificial Sequence
  Description of Artificial Sequence: Synthetic peptide
  Seed: LRMKWMMAMKYPITA
LRMKVMMMMSYPETA

SEQ ID NO: 241139 - protein, 15 aa, Artificial Sequence
  Description of Artificial Sequence: Synthetic peptide
  Seed: LRMKWMMAMKYPITA
LRMKVMMMMSYPFTA

SEQ ID NO: 241140 - protein, 15 aa, Artificial Sequence
  Description of Artificial Sequence: Synthetic peptide
  Seed: LRMKWMMAMKYPITA
LRMKVMMMMSYPGTA

SEQ ID NO: 241141 - protein, 15 aa, Artificial Sequence
  Description of Artificial Sequence: Synthetic peptide
  Seed: LRMKWMMAMKYPITA
LRMKVMMMMSYPHTA

SEQ ID NO: 241142 - protein, 15 aa, Artificial Sequence
  Description of Artificial Sequence: Synthetic peptide
  Seed: LRMKWMMAMKYPITA
LRMKVMMMMSYPITA

SEQ ID NO: 241143 - protein, 15 aa, Artificial Sequence
  Description of Artificial Sequence: Synthetic peptide
  Seed: LRMKWMMAMKYPITA
LRMKVMMMMSYPKTA

SEQ ID NO: 241144 - protein, 15 aa, Artificial Sequence
  Description of Artificial Sequence: Synthetic peptide
  Seed: LRMKWMMAMKYPITA
LRMKVMMMMSYPLTA

SEQ ID NO: 241145 - protein, 15 aa, Artificial Sequence
  Description of Artificial Sequence: Synthetic peptide
  Seed: LRMKWMMAMKYPITA
LRMKVMMMMSYPMTA

SEQ ID NO: 241146 - protein, 15 aa, Artificial Sequence
  Description of Artificial Sequence: Synthetic peptide
  Seed: LRMKWMMAMKYPITA
LRMKVMMMMSYPNTA

SEQ ID NO: 241147 - protein, 15 aa, Artificial Sequence
  Description of Artificial Sequence: Synthetic peptide
  Seed: LRMKWMMAMKYPITA
LRMKVMMMMSYPPTA

SEQ ID NO: 241148 - protein, 15 aa, Artificial Sequence
  Description of Artificial Sequence: Synthetic peptide
  Seed: LRMKWMMAMKYPITA
LRMKVMMMMSYPQTA

SEQ ID NO: 241149 - protein, 15 aa, Artificial Sequence
  Description of Artificial Sequence: Synthetic peptide
  Seed: LRMKWMMAMKYPITA
LRMKVMMMMSYPRTA

SEQ ID NO: 241150 - protein, 15 aa, Artificial Sequence
  Description of Artificial Sequence: Synthetic peptide
  Seed: LRMKWMMAMKYPITA
LRMKVMMMMSYPSTA

SEQ ID NO: 241151 - protein, 15 aa, Artificial Sequence
  Description of Artificial Sequence: Synthetic peptide
  Seed: LRMKWMMAMKYPITA
LRMKVMMMMSYPTTA

SEQ ID NO: 241152 - protein, 15 aa, Artificial Sequence
  Description of Artificial Sequence: Synthetic peptide
  Seed: LRMKWMMAMKYPITA
LRMKVMMMMSYPVTA

SEQ ID NO: 241153 - protein, 15 aa, Artificial Sequence
  Description of Artificial Sequence: Synthetic peptide
  Seed: LRMKWMMAMKYPITA
LRMKVMMMMSYPYTA

SEQ ID NO: 241154 - protein, 15 aa, Artificial Sequence
  Description of Artificial Sequence: Synthetic peptide
  Seed: LRMKWMMAMKYPITA
LRMKVMMMMTYPATA

SEQ ID NO: 241155 - protein, 15 aa, Artificial Sequence
  Description of Artificial Sequence: Synthetic peptide
  Seed: LRMKWMMAMKYPITA
LRMKVMMMMTYPCTA

SEQ ID NO: 241156 - protein, 15 aa, Artificial Sequence
  Description of Artificial Sequence: Synthetic peptide
  Seed: LRMKWMMAMKYPITA
LRMKVMMMMTYPDTA

SEQ ID NO: 241157 - protein, 15 aa, Artificial Sequence
  Description of Artificial Sequence: Synthetic peptide
  Seed: LRMKWMMAMKYPITA
LRMKVMMMMTYPETA

SEQ ID NO: 241158 - protein, 15 aa, Artificial Sequence
  Description of Artificial Sequence: Synthetic peptide
  Seed: LRMKWMMAMKYPITA
LRMKVMMMMTYPFTA

SEQ ID NO: 241159 - protein, 15 aa, Artificial Sequence
  Description of Artificial Sequence: Synthetic peptide
  Seed: LRMKWMMAMKYPITA
LRMKVMMMMTYPGTA

SEQ ID NO: 241160 - protein, 15 aa, Artificial Sequence
  Description of Artificial Sequence: Synthetic peptide
  Seed: LRMKWMMAMKYPITA
LRMKVMMMMTYPHTA

SEQ ID NO: 241161 - protein, 15 aa, Artificial Sequence
  Description of Artificial Sequence: Synthetic peptide
  Seed: LRMKWMMAMKYPITA
LRMKVMMMMTYPITA

SEQ ID NO: 241162 - protein, 15 aa, Artificial Sequence
  Description of Artificial Sequence: Synthetic peptide
  Seed: LRMKWMMAMKYPITA
LRMKVMMMMTYPKTA

SEQ ID NO: 241163 - protein, 15 aa, Artificial Sequence
  Description of Artificial Sequence: Synthetic peptide
  Seed: LRMKWMMAMKYPITA
LRMKVMMMMTYPLTA

SEQ ID NO: 241164 - protein, 15 aa, Artificial Sequence
  Description of Artificial Sequence: Synthetic peptide
  Seed: LRMKWMMAMKYPITA
LRMKVMMMMTYPMTA

SEQ ID NO: 241165 - protein, 15 aa, Artificial Sequence
  Description of Artificial Sequence: Synthetic peptide
  Seed: LRMKWMMAMKYPITA
LRMKVMMMMTYPNTA

SEQ ID NO: 241166 - protein, 15 aa, Artificial Sequence
  Description of Artificial Sequence: Synthetic peptide
  Seed: LRMKWMMAMKYPITA
LRMKVMMMMTYPPTA

SEQ ID NO: 241167 - protein, 15 aa, Artificial Sequence
  Description of Artificial Sequence: Synthetic peptide
  Seed: LRMKWMMAMKYPITA
LRMKVMMMMTYPQTA

SEQ ID NO: 241168 - protein, 15 aa, Artificial Sequence
  Description of Artificial Sequence: Synthetic peptide
  Seed: LRMKWMMAMKYPITA
LRMKVMMMMTYPRTA

SEQ ID NO: 241169 - protein, 15 aa, Artificial Sequence
  Description of Artificial Sequence: Synthetic peptide
  Seed: LRMKWMMAMKYPITA
LRMKVMMMMTYPSTA

SEQ ID NO: 241170 - protein, 15 aa, Artificial Sequence
  Description of Artificial Sequence: Synthetic peptide
  Seed: LRMKWMMAMKYPITA
LRMKVMMMMTYPTTA

SEQ ID NO: 241171 - protein, 15 aa, Artificial Sequence
  Description of Artificial Sequence: Synthetic peptide
  Seed: LRMKWMMAMKYPITA
LRMKVMMMMTYPVTA

SEQ ID NO: 241172 - protein, 15 aa, Artificial Sequence
  Description of Artificial Sequence: Synthetic peptide
  Seed: LRMKWMMAMKYPITA
LRMKVMMMMTYPYTA

SEQ ID NO: 241173 - protein, 15 aa, Artificial Sequence
  Description of Artificial Sequence: Synthetic peptide
  Seed: LRMKWMMAMKYPITA
LRMKVMMMMVYPATA

SEQ ID NO: 241174 - protein, 15 aa, Artificial Sequence
  Description of Artificial Sequence: Synthetic peptide
  Seed: LRMKWMMAMKYPITA
LRMKVMMMMVYPDTA

SEQ ID NO: 241175 - protein, 15 aa, Artificial Sequence
  Description of Artificial Sequence: Synthetic peptide
  Seed: LRMKWMMAMKYPITA
LRMKVMMMMVYPETA

SEQ ID NO: 241176 - protein, 15 aa, Artificial Sequence
  Description of Artificial Sequence: Synthetic peptide
  Seed: LRMKWMMAMKYPITA
LRMKVMMMMVYPGTA

SEQ ID NO: 241177 - protein, 15 aa, Artificial Sequence
  Description of Artificial Sequence: Synthetic peptide
  Seed: LRMKWMMAMKYPITA
LRMKVMMMMVYPHTA

SEQ ID NO: 241178 - protein, 15 aa, Artificial Sequence
  Description of Artificial Sequence: Synthetic peptide
  Seed: LRMKWMMAMKYPITA
LRMKVMMMMVYPITA

SEQ ID NO: 241179 - protein, 15 aa, Artificial Sequence
  Description of Artificial Sequence: Synthetic peptide
  Seed: LRMKWMMAMKYPITA
LRMKVMMMMVYPKTA

SEQ ID NO: 241180 - protein, 15 aa, Artificial Sequence
  Description of Artificial Sequence: Synthetic peptide
  Seed: LRMKWMMAMKYPITA
LRMKVMMMMVYPLTA

SEQ ID NO: 241181 - protein, 15 aa, Artificial Sequence
  Description of Artificial Sequence: Synthetic peptide
  Seed: LRMKWMMAMKYPITA
LRMKVMMMMVYPMTA

SEQ ID NO: 241182 - protein, 15 aa, Artificial Sequence
  Description of Artificial Sequence: Synthetic peptide
  Seed: LRMKWMMAMKYPITA
LRMKVMMMMVYPNTA

SEQ ID NO: 241183 - protein, 15 aa, Artificial Sequence
  Description of Artificial Sequence: Synthetic peptide
  Seed: LRMKWMMAMKYPITA
LRMKVMMMMVYPPTA

SEQ ID NO: 241184 - protein, 15 aa, Artificial Sequence
  Description of Artificial Sequence: Synthetic peptide
  Seed: LRMKWMMAMKYPITA
LRMKVMMMMVYPQTA

SEQ ID NO: 241185 - protein, 15 aa, Artificial Sequence
  Description of Artificial Sequence: Synthetic peptide
  Seed: LRMKWMMAMKYPITA
LRMKVMMMMVYPRTA

SEQ ID NO: 241186 - protein, 15 aa, Artificial Sequence
  Description of Artificial Sequence: Synthetic peptide
  Seed: LRMKWMMAMKYPITA
LRMKVMMMMVYPSTA

SEQ ID NO: 241187 - protein, 15 aa, Artificial Sequence
  Description of Artificial Sequence: Synthetic peptide
  Seed: LRMKWMMAMKYPITA
LRMKVMMMMVYPTTA

SEQ ID NO: 241188 - protein, 15 aa, Artificial Sequence
  Description of Artificial Sequence: Synthetic peptide
  Seed: LRMKWMMAMKYPITA
LRMKVMMMMVYPVTA

SEQ ID NO: 241189 - protein, 15 aa, Artificial Sequence
  Description of Artificial Sequence: Synthetic peptide
  Seed: LRMKWMMAMKYPITA
LRMKVMMMMVYPYTA

SEQ ID NO: 241190 - protein, 15 aa, Artificial Sequence
  Description of Artificial Sequence: Synthetic peptide
  Seed: LRMKWMMAMKYPITA
LRMKVMMNMAYPATA

SEQ ID NO: 241191 - protein, 15 aa, Artificial Sequence
  Description of Artificial Sequence: Synthetic peptide
  Seed: LRMKWMMAMKYPITA
LRMKVMMNMAYPCTA

SEQ ID NO: 241192 - protein, 15 aa, Artificial Sequence
  Description of Artificial Sequence: Synthetic peptide
  Seed: LRMKWMMAMKYPITA
LRMKVMMNMAYPDTA

SEQ ID NO: 241193 - protein, 15 aa, Artificial Sequence
  Description of Artificial Sequence: Synthetic peptide
  Seed: LRMKWMMAMKYPITA
LRMKVMMNMAYPETA

SEQ ID NO: 241194 - protein, 15 aa, Artificial Sequence
  Description of Artificial Sequence: Synthetic peptide
  Seed: LRMKWMMAMKYPITA
LRMKVMMNMAYPFTA

SEQ ID NO: 241195 - protein, 15 aa, Artificial Sequence
  Description of Artificial Sequence: Synthetic peptide
  Seed: LRMKWMMAMKYPITA
LRMKVMMNMAYPGTA

SEQ ID NO: 241196 - protein, 15 aa, Artificial Sequence
  Description of Artificial Sequence: Synthetic peptide
  Seed: LRMKWMMAMKYPITA
LRMKVMMNMAYPHTA

SEQ ID NO: 241197 - protein, 15 aa, Artificial Sequence
  Description of Artificial Sequence: Synthetic peptide
  Seed: LRMKWMMAMKYPITA
LRMKVMMNMAYPITA

SEQ ID NO: 241198 - protein, 15 aa, Artificial Sequence
  Description of Artificial Sequence: Synthetic peptide
  Seed: LRMKWMMAMKYPITA
LRMKVMMNMAYPKTA

SEQ ID NO: 241199 - protein, 15 aa, Artificial Sequence
  Description of Artificial Sequence: Synthetic peptide
  Seed: LRMKWMMAMKYPITA
LRMKVMMNMAYPLTA

SEQ ID NO: 241200 - protein, 15 aa, Artificial Sequence
  Description of Artificial Sequence: Synthetic peptide
  Seed: LRMKWMMAMKYPITA
LRMKVMMNMAYPMTA

SEQ ID NO: 241201 - protein, 15 aa, Artificial Sequence
  Description of Artificial Sequence: Synthetic peptide
  Seed: LRMKWMMAMKYPITA
LRMKVMMNMAYPNTA

SEQ ID NO: 241202 - protein, 15 aa, Artificial Sequence
  Description of Artificial Sequence: Synthetic peptide
  Seed: LRMKWMMAMKYPITA
LRMKVMMNMAYPPTA

SEQ ID NO: 241203 - protein, 15 aa, Artificial Sequence
  Description of Artificial Sequence: Synthetic peptide
  Seed: LRMKWMMAMKYPITA
LRMKVMMNMAYPQTA

SEQ ID NO: 241204 - protein, 15 aa, Artificial Sequence
  Description of Artificial Sequence: Synthetic peptide
  Seed: LRMKWMMAMKYPITA
LRMKVMMNMAYPRTA

SEQ ID NO: 241205 - protein, 15 aa, Artificial Sequence
  Description of Artificial Sequence: Synthetic peptide
  Seed: LRMKWMMAMKYPITA
LRMKVMMNMAYPSTA

SEQ ID NO: 241206 - protein, 15 aa, Artificial Sequence
  Description of Artificial Sequence: Synthetic peptide
  Seed: LRMKWMMAMKYPITA
LRMKVMMNMAYPTTA

SEQ ID NO: 241207 - protein, 15 aa, Artificial Sequence
  Description of Artificial Sequence: Synthetic peptide
  Seed: LRMKWMMAMKYPITA
LRMKVMMNMAYPVTA

SEQ ID NO: 241208 - protein, 15 aa, Artificial Sequence
  Description of Artificial Sequence: Synthetic peptide
  Seed: LRMKWMMAMKYPITA
LRMKVMMNMAYPWTA

SEQ ID NO: 241209 - protein, 15 aa, Artificial Sequence
  Description of Artificial Sequence: Synthetic peptide
  Seed: LRMKWMMAMKYPITA
LRMKVMMNMAYPYTA

SEQ ID NO: 241210 - protein, 15 aa, Artificial Sequence
  Description of Artificial Sequence: Synthetic peptide
  Seed: LRMKWMMAMKYPITA
LRMKVMMNMCYPFTA

SEQ ID NO: 241211 - protein, 15 aa, Artificial Sequence
  Description of Artificial Sequence: Synthetic peptide
  Seed: LRMKWMMAMKYPITA
LRMKVMMNMCYPITA

SEQ ID NO: 241212 - protein, 15 aa, Artificial Sequence
  Description of Artificial Sequence: Synthetic peptide
  Seed: LRMKWMMAMKYPITA
LRMKVMMNMCYPLTA

SEQ ID NO: 241213 - protein, 15 aa, Artificial Sequence
  Description of Artificial Sequence: Synthetic peptide
  Seed: LRMKWMMAMKYPITA
LRMKVMMNMCYPMTA

SEQ ID NO: 241214 - protein, 15 aa, Artificial Sequence
  Description of Artificial Sequence: Synthetic peptide
  Seed: LRMKWMMAMKYPITA
LRMKVMMNMCYPVTA

SEQ ID NO: 241215 - protein, 15 aa, Artificial Sequence
  Description of Artificial Sequence: Synthetic peptide
  Seed: LRMKWMMAMKYPITA
LRMKVMMNMCYPYTA

SEQ ID NO: 241216 - protein, 15 aa, Artificial Sequence
  Description of Artificial Sequence: Synthetic peptide
  Seed: LRMKWMMAMKYPITA
LRMKVMMNMDYPFTA

SEQ ID NO: 241217 - protein, 15 aa, Artificial Sequence
  Description of Artificial Sequence: Synthetic peptide
  Seed: LRMKWMMAMKYPITA
LRMKVMMNMDYPITA

SEQ ID NO: 241218 - protein, 15 aa, Artificial Sequence
  Description of Artificial Sequence: Synthetic peptide
  Seed: LRMKWMMAMKYPITA
LRMKVMMNMDYPLTA

SEQ ID NO: 241219 - protein, 15 aa, Artificial Sequence
  Description of Artificial Sequence: Synthetic peptide
  Seed: LRMKWMMAMKYPITA
LRMKVMMNMDYPMTA

SEQ ID NO: 241220 - protein, 15 aa, Artificial Sequence
  Description of Artificial Sequence: Synthetic peptide
  Seed: LRMKWMMAMKYPITA
LRMKVMMNMDYPVTA

SEQ ID NO: 241221 - protein, 15 aa, Artificial Sequence
  Description of Artificial Sequence: Synthetic peptide
  Seed: LRMKWMMAMKYPITA
LRMKVMMNMDYPYTA

SEQ ID NO: 241222 - protein, 15 aa, Artificial Sequence
  Description of Artificial Sequence: Synthetic peptide
  Seed: LRMKWMMAMKYPITA
LRMKVMMNMEYPITA

SEQ ID NO: 241223 - protein, 15 aa, Artificial Sequence
  Description of Artificial Sequence: Synthetic peptide
  Seed: LRMKWMMAMKYPITA
LRMKVMMNMEYPLTA

SEQ ID NO: 241224 - protein, 15 aa, Artificial Sequence
  Description of Artificial Sequence: Synthetic peptide
  Seed: LRMKWMMAMKYPITA
LRMKVMMNMEYPVTA

SEQ ID NO: 241225 - protein, 15 aa, Artificial Sequence
  Description of Artificial Sequence: Synthetic peptide
  Seed: LRMKWMMAMKYPITA
LRMKVMMNMFYPFTA

SEQ ID NO: 241226 - protein, 15 aa, Artificial Sequence
  Description of Artificial Sequence: Synthetic peptide
  Seed: LRMKWMMAMKYPITA
LRMKVMMNMFYPITA

SEQ ID NO: 241227 - protein, 15 aa, Artificial Sequence
  Description of Artificial Sequence: Synthetic peptide
  Seed: LRMKWMMAMKYPITA
LRMKVMMNMFYPLTA

SEQ ID NO: 241228 - protein, 15 aa, Artificial Sequence
  Description of Artificial Sequence: Synthetic peptide
  Seed: LRMKWMMAMKYPITA
LRMKVMMNMFYPMTA

SEQ ID NO: 241229 - protein, 15 aa, Artificial Sequence
  Description of Artificial Sequence: Synthetic peptide
  Seed: LRMKWMMAMKYPITA
LRMKVMMNMFYPVTA

SEQ ID NO: 241230 - protein, 15 aa, Artificial Sequence
  Description of Artificial Sequence: Synthetic peptide
  Seed: LRMKWMMAMKYPITA
LRMKVMMNMGYPATA

SEQ ID NO: 241231 - protein, 15 aa, Artificial Sequence
  Description of Artificial Sequence: Synthetic peptide
  Seed: LRMKWMMAMKYPITA
LRMKVMMNMGYPFTA

SEQ ID NO: 241232 - protein, 15 aa, Artificial Sequence
  Description of Artificial Sequence: Synthetic peptide
  Seed: LRMKWMMAMKYPITA
LRMKVMMNMGYPITA

SEQ ID NO: 241233 - protein, 15 aa, Artificial Sequence
  Description of Artificial Sequence: Synthetic peptide
  Seed: LRMKWMMAMKYPITA
LRMKVMMNMGYPKTA

SEQ ID NO: 241234 - protein, 15 aa, Artificial Sequence
  Description of Artificial Sequence: Synthetic peptide
  Seed: LRMKWMMAMKYPITA
LRMKVMMNMGYPLTA

SEQ ID NO: 241235 - protein, 15 aa, Artificial Sequence
  Description of Artificial Sequence: Synthetic peptide
  Seed: LRMKWMMAMKYPITA
LRMKVMMNMGYPMTA

SEQ ID NO: 241236 - protein, 15 aa, Artificial Sequence
  Description of Artificial Sequence: Synthetic peptide
  Seed: LRMKWMMAMKYPITA
LRMKVMMNMGYPNTA

SEQ ID NO: 241237 - protein, 15 aa, Artificial Sequence
  Description of Artificial Sequence: Synthetic peptide
  Seed: LRMKWMMAMKYPITA
LRMKVMMNMGYPQTA

SEQ ID NO: 241238 - protein, 15 aa, Artificial Sequence
  Description of Artificial Sequence: Synthetic peptide
  Seed: LRMKWMMAMKYPITA
LRMKVMMNMGYPRTA

SEQ ID NO: 241239 - protein, 15 aa, Artificial Sequence
  Description of Artificial Sequence: Synthetic peptide
  Seed: LRMKWMMAMKYPITA
LRMKVMMNMGYPSTA

SEQ ID NO: 241240 - protein, 15 aa, Artificial Sequence
  Description of Artificial Sequence: Synthetic peptide
  Seed: LRMKWMMAMKYPITA
LRMKVMMNMGYPTTA

SEQ ID NO: 241241 - protein, 15 aa, Artificial Sequence
  Description of Artificial Sequence: Synthetic peptide
  Seed: LRMKWMMAMKYPITA
LRMKVMMNMGYPVTA

SEQ ID NO: 241242 - protein, 15 aa, Artificial Sequence
  Description of Artificial Sequence: Synthetic peptide
  Seed: LRMKWMMAMKYPITA
LRMKVMMNMGYPWTA

SEQ ID NO: 241243 - protein, 15 aa, Artificial Sequence
  Description of Artificial Sequence: Synthetic peptide
  Seed: LRMKWMMAMKYPITA
LRMKVMMNMGYPYTA

SEQ ID NO: 241244 - protein, 15 aa, Artificial Sequence
  Description of Artificial Sequence: Synthetic peptide
  Seed: LRMKWMMAMKYPITA
LRMKVMMNMHYPATA

SEQ ID NO: 241245 - protein, 15 aa, Artificial Sequence
  Description of Artificial Sequence: Synthetic peptide
  Seed: LRMKWMMAMKYPITA
LRMKVMMNMHYPFTA

SEQ ID NO: 241246 - protein, 15 aa, Artificial Sequence
  Description of Artificial Sequence: Synthetic peptide
  Seed: LRMKWMMAMKYPITA
LRMKVMMNMHYPITA

SEQ ID NO: 241247 - protein, 15 aa, Artificial Sequence
  Description of Artificial Sequence: Synthetic peptide
  Seed: LRMKWMMAMKYPITA
LRMKVMMNMHYPLTA

SEQ ID NO: 241248 - protein, 15 aa, Artificial Sequence
  Description of Artificial Sequence: Synthetic peptide
  Seed: LRMKWMMAMKYPITA
LRMKVMMNMHYPMTA

SEQ ID NO: 241249 - protein, 15 aa, Artificial Sequence
  Description of Artificial Sequence: Synthetic peptide
  Seed: LRMKWMMAMKYPITA
LRMKVMMNMHYPRTA

SEQ ID NO: 241250 - protein, 15 aa, Artificial Sequence
  Description of Artificial Sequence: Synthetic peptide
  Seed: LRMKWMMAMKYPITA
LRMKVMMNMHYPSTA

SEQ ID NO: 241251 - protein, 15 aa, Artificial Sequence
  Description of Artificial Sequence: Synthetic peptide
  Seed: LRMKWMMAMKYPITA
LRMKVMMNMHYPVTA

SEQ ID NO: 241252 - protein, 15 aa, Artificial Sequence
  Description of Artificial Sequence: Synthetic peptide
  Seed: LRMKWMMAMKYPITA
LRMKVMMNMHYPYTA

SEQ ID NO: 241253 - protein, 15 aa, Artificial Sequence
  Description of Artificial Sequence: Synthetic peptide
  Seed: LRMKWMMAMKYPITA
LRMKVMMNMIYPATA

SEQ ID NO: 241254 - protein, 15 aa, Artificial Sequence
  Description of Artificial Sequence: Synthetic peptide
  Seed: LRMKWMMAMKYPITA
LRMKVMMNMIYPFTA

SEQ ID NO: 241255 - protein, 15 aa, Artificial Sequence
  Description of Artificial Sequence: Synthetic peptide
  Seed: LRMKWMMAMKYPITA
LRMKVMMNMIYPITA

SEQ ID NO: 241256 - protein, 15 aa, Artificial Sequence
  Description of Artificial Sequence: Synthetic peptide
  Seed: LRMKWMMAMKYPITA
LRMKVMMNMIYPKTA

SEQ ID NO: 241257 - protein, 15 aa, Artificial Sequence
  Description of Artificial Sequence: Synthetic peptide
  Seed: LRMKWMMAMKYPITA
LRMKVMMNMIYPLTA

SEQ ID NO: 241258 - protein, 15 aa, Artificial Sequence
  Description of Artificial Sequence: Synthetic peptide
  Seed: LRMKWMMAMKYPITA
LRMKVMMNMIYPMTA

SEQ ID NO: 241259 - protein, 15 aa, Artificial Sequence
  Description of Artificial Sequence: Synthetic peptide
  Seed: LRMKWMMAMKYPITA
LRMKVMMNMIYPNTA

SEQ ID NO: 241260 - protein, 15 aa, Artificial Sequence
  Description of Artificial Sequence: Synthetic peptide
  Seed: LRMKWMMAMKYPITA
LRMKVMMNMIYPRTA

SEQ ID NO: 241261 - protein, 15 aa, Artificial Sequence
  Description of Artificial Sequence: Synthetic peptide
  Seed: LRMKWMMAMKYPITA
LRMKVMMNMIYPSTA

SEQ ID NO: 241262 - protein, 15 aa, Artificial Sequence
  Description of Artificial Sequence: Synthetic peptide
  Seed: LRMKWMMAMKYPITA
LRMKVMMNMIYPTTA

SEQ ID NO: 241263 - protein, 15 aa, Artificial Sequence
  Description of Artificial Sequence: Synthetic peptide
  Seed: LRMKWMMAMKYPITA
LRMKVMMNMIYPVTA

SEQ ID NO: 241264 - protein, 15 aa, Artificial Sequence
  Description of Artificial Sequence: Synthetic peptide
  Seed: LRMKWMMAMKYPITA
LRMKVMMNMIYPWTA

SEQ ID NO: 241265 - protein, 15 aa, Artificial Sequence
  Description of Artificial Sequence: Synthetic peptide
  Seed: LRMKWMMAMKYPITA
LRMKVMMNMIYPYTA

SEQ ID NO: 241266 - protein, 15 aa, Artificial Sequence
  Description of Artificial Sequence: Synthetic peptide
  Seed: LRMKWMMAMKYPITA
LRMKVMMNMKYPATA

SEQ ID NO: 241267 - protein, 15 aa, Artificial Sequence
  Description of Artificial Sequence: Synthetic peptide
  Seed: LRMKWMMAMKYPITA
LRMKVMMNMKYPFTA

SEQ ID NO: 241268 - protein, 15 aa, Artificial Sequence
  Description of Artificial Sequence: Synthetic peptide
  Seed: LRMKWMMAMKYPITA
LRMKVMMNMKYPGTA

SEQ ID NO: 241269 - protein, 15 aa, Artificial Sequence
  Description of Artificial Sequence: Synthetic peptide
  Seed: LRMKWMMAMKYPITA
LRMKVMMNMKYPHTA

SEQ ID NO: 241270 - protein, 15 aa, Artificial Sequence
  Description of Artificial Sequence: Synthetic peptide
  Seed: LRMKWMMAMKYPITA
LRMKVMMNMKYPITA

SEQ ID NO: 241271 - protein, 15 aa, Artificial Sequence
  Description of Artificial Sequence: Synthetic peptide
  Seed: LRMKWMMAMKYPITA
LRMKVMMNMKYPKTA

SEQ ID NO: 241272 - protein, 15 aa, Artificial Sequence
  Description of Artificial Sequence: Synthetic peptide
  Seed: LRMKWMMAMKYPITA
LRMKVMMNMKYPLTA

SEQ ID NO: 241273 - protein, 15 aa, Artificial Sequence
  Description of Artificial Sequence: Synthetic peptide
  Seed: LRMKWMMAMKYPITA
LRMKVMMNMKYPMTA

SEQ ID NO: 241274 - protein, 15 aa, Artificial Sequence
  Description of Artificial Sequence: Synthetic peptide
  Seed: LRMKWMMAMKYPITA
LRMKVMMNMKYPNTA

SEQ ID NO: 241275 - protein, 15 aa, Artificial Sequence
  Description of Artificial Sequence: Synthetic peptide
  Seed: LRMKWMMAMKYPITA
LRMKVMMNMKYPQTA

SEQ ID NO: 241276 - protein, 15 aa, Artificial Sequence
  Description of Artificial Sequence: Synthetic peptide
  Seed: LRMKWMMAMKYPITA
LRMKVMMNMKYPRTA

SEQ ID NO: 241277 - protein, 15 aa, Artificial Sequence
  Description of Artificial Sequence: Synthetic peptide
  Seed: LRMKWMMAMKYPITA
LRMKVMMNMKYPSTA

SEQ ID NO: 241278 - protein, 15 aa, Artificial Sequence
  Description of Artificial Sequence: Synthetic peptide
  Seed: LRMKWMMAMKYPITA
LRMKVMMNMKYPTTA

SEQ ID NO: 241279 - protein, 15 aa, Artificial Sequence
  Description of Artificial Sequence: Synthetic peptide
  Seed: LRMKWMMAMKYPITA
LRMKVMMNMKYPVTA

SEQ ID NO: 241280 - protein, 15 aa, Artificial Sequence
  Description of Artificial Sequence: Synthetic peptide
  Seed: LRMKWMMAMKYPITA
LRMKVMMNMKYPWTA

SEQ ID NO: 241281 - protein, 15 aa, Artificial Sequence
  Description of Artificial Sequence: Synthetic peptide
  Seed: LRMKWMMAMKYPITA
LRMKVMMNMKYPYTA

SEQ ID NO: 241282 - protein, 15 aa, Artificial Sequence
  Description of Artificial Sequence: Synthetic peptide
  Seed: LRMKWMMAMKYPITA
LRMKVMMNMLYPATA

SEQ ID NO: 241283 - protein, 15 aa, Artificial Sequence
  Description of Artificial Sequence: Synthetic peptide
  Seed: LRMKWMMAMKYPITA
LRMKVMMNMLYPFTA

SEQ ID NO: 241284 - protein, 15 aa, Artificial Sequence
  Description of Artificial Sequence: Synthetic peptide
  Seed: LRMKWMMAMKYPITA
LRMKVMMNMLYPITA

SEQ ID NO: 241285 - protein, 15 aa, Artificial Sequence
  Description of Artificial Sequence: Synthetic peptide
  Seed: LRMKWMMAMKYPITA
LRMKVMMNMLYPLTA

SEQ ID NO: 241286 - protein, 15 aa, Artificial Sequence
  Description of Artificial Sequence: Synthetic peptide
  Seed: LRMKWMMAMKYPITA
LRMKVMMNMLYPMTA

SEQ ID NO: 241287 - protein, 15 aa, Artificial Sequence
  Description of Artificial Sequence: Synthetic peptide
  Seed: LRMKWMMAMKYPITA
LRMKVMMNMLYPRTA

SEQ ID NO: 241288 - protein, 15 aa, Artificial Sequence
  Description of Artificial Sequence: Synthetic peptide
  Seed: LRMKWMMAMKYPITA
LRMKVMMNMLYPTTA

SEQ ID NO: 241289 - protein, 15 aa, Artificial Sequence
  Description of Artificial Sequence: Synthetic peptide
  Seed: LRMKWMMAMKYPITA
LRMKVMMNMLYPVTA

SEQ ID NO: 241290 - protein, 15 aa, Artificial Sequence
  Description of Artificial Sequence: Synthetic peptide
  Seed: LRMKWMMAMKYPITA
LRMKVMMNMLYPYTA

SEQ ID NO: 241291 - protein, 15 aa, Artificial Sequence
  Description of Artificial Sequence: Synthetic peptide
  Seed: LRMKWMMAMKYPITA
LRMKVMMNMMYPATA

SEQ ID NO: 241292 - protein, 15 aa, Artificial Sequence
  Description of Artificial Sequence: Synthetic peptide
  Seed: LRMKWMMAMKYPITA
LRMKVMMNMMYPFTA

SEQ ID NO: 241293 - protein, 15 aa, Artificial Sequence
  Description of Artificial Sequence: Synthetic peptide
  Seed: LRMKWMMAMKYPITA
LRMKVMMNMMYPITA

SEQ ID NO: 241294 - protein, 15 aa, Artificial Sequence
  Description of Artificial Sequence: Synthetic peptide
  Seed: LRMKWMMAMKYPITA
LRMKVMMNMMYPLTA

SEQ ID NO: 241295 - protein, 15 aa, Artificial Sequence
  Description of Artificial Sequence: Synthetic peptide
  Seed: LRMKWMMAMKYPITA
LRMKVMMNMMYPMTA

SEQ ID NO: 241296 - protein, 15 aa, Artificial Sequence
  Description of Artificial Sequence: Synthetic peptide
  Seed: LRMKWMMAMKYPITA
LRMKVMMNMMYPRTA

SEQ ID NO: 241297 - protein, 15 aa, Artificial Sequence
  Description of Artificial Sequence: Synthetic peptide
  Seed: LRMKWMMAMKYPITA
LRMKVMMNMMYPSTA

SEQ ID NO: 241298 - protein, 15 aa, Artificial Sequence
  Description of Artificial Sequence: Synthetic peptide
  Seed: LRMKWMMAMKYPITA
LRMKVMMNMMYPTTA

SEQ ID NO: 241299 - protein, 15 aa, Artificial Sequence
  Description of Artificial Sequence: Synthetic peptide
  Seed: LRMKWMMAMKYPITA
LRMKVMMNMMYPVTA

SEQ ID NO: 241300 - protein, 15 aa, Artificial Sequence
  Description of Artificial Sequence: Synthetic peptide
  Seed: LRMKWMMAMKYPITA
LRMKVMMNMMYPYTA

SEQ ID NO: 241301 - protein, 15 aa, Artificial Sequence
  Description of Artificial Sequence: Synthetic peptide
  Seed: LRMKWMMAMKYPITA
LRMKVMMNMNYPATA

SEQ ID NO: 241302 - protein, 15 aa, Artificial Sequence
  Description of Artificial Sequence: Synthetic peptide
  Seed: LRMKWMMAMKYPITA
LRMKVMMNMNYPCTA

SEQ ID NO: 241303 - protein, 15 aa, Artificial Sequence
  Description of Artificial Sequence: Synthetic peptide
  Seed: LRMKWMMAMKYPITA
LRMKVMMNMNYPETA

SEQ ID NO: 241304 - protein, 15 aa, Artificial Sequence
  Description of Artificial Sequence: Synthetic peptide
  Seed: LRMKWMMAMKYPITA
LRMKVMMNMNYPFTA

SEQ ID NO: 241305 - protein, 15 aa, Artificial Sequence
  Description of Artificial Sequence: Synthetic peptide
  Seed: LRMKWMMAMKYPITA
LRMKVMMNMNYPGTA

SEQ ID NO: 241306 - protein, 15 aa, Artificial Sequence
  Description of Artificial Sequence: Synthetic peptide
  Seed: LRMKWMMAMKYPITA
LRMKVMMNMNYPHTA

SEQ ID NO: 241307 - protein, 15 aa, Artificial Sequence
  Description of Artificial Sequence: Synthetic peptide
  Seed: LRMKWMMAMKYPITA
LRMKVMMNMNYPITA

SEQ ID NO: 241308 - protein, 15 aa, Artificial Sequence
  Description of Artificial Sequence: Synthetic peptide
  Seed: LRMKWMMAMKYPITA
LRMKVMMNMNYPKTA

SEQ ID NO: 241309 - protein, 15 aa, Artificial Sequence
  Description of Artificial Sequence: Synthetic peptide
  Seed: LRMKWMMAMKYPITA
LRMKVMMNMNYPLTA

SEQ ID NO: 241310 - protein, 15 aa, Artificial Sequence
  Description of Artificial Sequence: Synthetic peptide
  Seed: LRMKWMMAMKYPITA
LRMKVMMNMNYPMTA

SEQ ID NO: 241311 - protein, 15 aa, Artificial Sequence
  Description of Artificial Sequence: Synthetic peptide
  Seed: LRMKWMMAMKYPITA
LRMKVMMNMNYPNTA

SEQ ID NO: 241312 - protein, 15 aa, Artificial Sequence
  Description of Artificial Sequence: Synthetic peptide
  Seed: LRMKWMMAMKYPITA
LRMKVMMNMNYPPTA

SEQ ID NO: 241313 - protein, 15 aa, Artificial Sequence
  Description of Artificial Sequence: Synthetic peptide
  Seed: LRMKWMMAMKYPITA
LRMKVMMNMNYPQTA

SEQ ID NO: 241314 - protein, 15 aa, Artificial Sequence
  Description of Artificial Sequence: Synthetic peptide
  Seed: LRMKWMMAMKYPITA
LRMKVMMNMNYPRTA

SEQ ID NO: 241315 - protein, 15 aa, Artificial Sequence
  Description of Artificial Sequence: Synthetic peptide
  Seed: LRMKWMMAMKYPITA
LRMKVMMNMNYPSTA

SEQ ID NO: 241316 - protein, 15 aa, Artificial Sequence
  Description of Artificial Sequence: Synthetic peptide
  Seed: LRMKWMMAMKYPITA
LRMKVMMNMNYPTTA

SEQ ID NO: 241317 - protein, 15 aa, Artificial Sequence
  Description of Artificial Sequence: Synthetic peptide
  Seed: LRMKWMMAMKYPITA
LRMKVMMNMNYPVTA

SEQ ID NO: 241318 - protein, 15 aa, Artificial Sequence
  Description of Artificial Sequence: Synthetic peptide
  Seed: LRMKWMMAMKYPITA
LRMKVMMNMNYPWTA

SEQ ID NO: 241319 - protein, 15 aa, Artificial Sequence
  Description of Artificial Sequence: Synthetic peptide
  Seed: LRMKWMMAMKYPITA
LRMKVMMNMNYPYTA

SEQ ID NO: 241320 - protein, 15 aa, Artificial Sequence
  Description of Artificial Sequence: Synthetic peptide
  Seed: LRMKWMMAMKYPITA
LRMKVMMNMPYPATA

SEQ ID NO: 241321 - protein, 15 aa, Artificial Sequence
  Description of Artificial Sequence: Synthetic peptide
  Seed: LRMKWMMAMKYPITA
LRMKVMMNMPYPFTA

SEQ ID NO: 241322 - protein, 15 aa, Artificial Sequence
  Description of Artificial Sequence: Synthetic peptide
  Seed: LRMKWMMAMKYPITA
LRMKVMMNMPYPGTA

SEQ ID NO: 241323 - protein, 15 aa, Artificial Sequence
  Description of Artificial Sequence: Synthetic peptide
  Seed: LRMKWMMAMKYPITA
LRMKVMMNMPYPHTA

SEQ ID NO: 241324 - protein, 15 aa, Artificial Sequence
  Description of Artificial Sequence: Synthetic peptide
  Seed: LRMKWMMAMKYPITA
LRMKVMMNMPYPITA

SEQ ID NO: 241325 - protein, 15 aa, Artificial Sequence
  Description of Artificial Sequence: Synthetic peptide
  Seed: LRMKWMMAMKYPITA
LRMKVMMNMPYPLTA

SEQ ID NO: 241326 - protein, 15 aa, Artificial Sequence
  Description of Artificial Sequence: Synthetic peptide
  Seed: LRMKWMMAMKYPITA
LRMKVMMNMPYPMTA

SEQ ID NO: 241327 - protein, 15 aa, Artificial Sequence
  Description of Artificial Sequence: Synthetic peptide
  Seed: LRMKWMMAMKYPITA
LRMKVMMNMPYPNTA

SEQ ID NO: 241328 - protein, 15 aa, Artificial Sequence
  Description of Artificial Sequence: Synthetic peptide
  Seed: LRMKWMMAMKYPITA
LRMKVMMNMPYPQTA

SEQ ID NO: 241329 - protein, 15 aa, Artificial Sequence
  Description of Artificial Sequence: Synthetic peptide
  Seed: LRMKWMMAMKYPITA
LRMKVMMNMPYPRTA

SEQ ID NO: 241330 - protein, 15 aa, Artificial Sequence
  Description of Artificial Sequence: Synthetic peptide
  Seed: LRMKWMMAMKYPITA
LRMKVMMNMPYPSTA

SEQ ID NO: 241331 - protein, 15 aa, Artificial Sequence
  Description of Artificial Sequence: Synthetic peptide
  Seed: LRMKWMMAMKYPITA
LRMKVMMNMPYPTTA

SEQ ID NO: 241332 - protein, 15 aa, Artificial Sequence
  Description of Artificial Sequence: Synthetic peptide
  Seed: LRMKWMMAMKYPITA
LRMKVMMNMPYPVTA

SEQ ID NO: 241333 - protein, 15 aa, Artificial Sequence
  Description of Artificial Sequence: Synthetic peptide
  Seed: LRMKWMMAMKYPITA
LRMKVMMNMPYPWTA

SEQ ID NO: 241334 - protein, 15 aa, Artificial Sequence
  Description of Artificial Sequence: Synthetic peptide
  Seed: LRMKWMMAMKYPITA
LRMKVMMNMPYPYTA

SEQ ID NO: 241335 - protein, 15 aa, Artificial Sequence
  Description of Artificial Sequence: Synthetic peptide
  Seed: LRMKWMMAMKYPITA
LRMKVMMNMQYPFTA

SEQ ID NO: 241336 - protein, 15 aa, Artificial Sequence
  Description of Artificial Sequence: Synthetic peptide
  Seed: LRMKWMMAMKYPITA
LRMKVMMNMQYPITA

SEQ ID NO: 241337 - protein, 15 aa, Artificial Sequence
  Description of Artificial Sequence: Synthetic peptide
  Seed: LRMKWMMAMKYPITA
LRMKVMMNMQYPLTA

SEQ ID NO: 241338 - protein, 15 aa, Artificial Sequence
  Description of Artificial Sequence: Synthetic peptide
  Seed: LRMKWMMAMKYPITA
LRMKVMMNMQYPMTA

SEQ ID NO: 241339 - protein, 15 aa, Artificial Sequence
  Description of Artificial Sequence: Synthetic peptide
  Seed: LRMKWMMAMKYPITA
LRMKVMMNMQYPVTA

SEQ ID NO: 241340 - protein, 15 aa, Artificial Sequence
  Description of Artificial Sequence: Synthetic peptide
  Seed: LRMKWMMAMKYPITA
LRMKVMMNMRYPATA

SEQ ID NO: 241341 - protein, 15 aa, Artificial Sequence
  Description of Artificial Sequence: Synthetic peptide
  Seed: LRMKWMMAMKYPITA
LRMKVMMNMRYPCTA

SEQ ID NO: 241342 - protein, 15 aa, Artificial Sequence
  Description of Artificial Sequence: Synthetic peptide
  Seed: LRMKWMMAMKYPITA
LRMKVMMNMRYPETA

SEQ ID NO: 241343 - protein, 15 aa, Artificial Sequence
  Description of Artificial Sequence: Synthetic peptide
  Seed: LRMKWMMAMKYPITA
LRMKVMMNMRYPFTA

SEQ ID NO: 241344 - protein, 15 aa, Artificial Sequence
  Description of Artificial Sequence: Synthetic peptide
  Seed: LRMKWMMAMKYPITA
LRMKVMMNMRYPGTA

SEQ ID NO: 241345 - protein, 15 aa, Artificial Sequence
  Description of Artificial Sequence: Synthetic peptide
  Seed: LRMKWMMAMKYPITA
LRMKVMMNMRYPHTA

SEQ ID NO: 241346 - protein, 15 aa, Artificial Sequence
  Description of Artificial Sequence: Synthetic peptide
  Seed: LRMKWMMAMKYPITA
LRMKVMMNMRYPITA

SEQ ID NO: 241347 - protein, 15 aa, Artificial Sequence
  Description of Artificial Sequence: Synthetic peptide
  Seed: LRMKWMMAMKYPITA
LRMKVMMNMRYPKTA

SEQ ID NO: 241348 - protein, 15 aa, Artificial Sequence
  Description of Artificial Sequence: Synthetic peptide
  Seed: LRMKWMMAMKYPITA
LRMKVMMNMRYPLTA

SEQ ID NO: 241349 - protein, 15 aa, Artificial Sequence
  Description of Artificial Sequence: Synthetic peptide
  Seed: LRMKWMMAMKYPITA
LRMKVMMNMRYPMTA

SEQ ID NO: 241350 - protein, 15 aa, Artificial Sequence
  Description of Artificial Sequence: Synthetic peptide
  Seed: LRMKWMMAMKYPITA
LRMKVMMNMRYPNTA

SEQ ID NO: 241351 - protein, 15 aa, Artificial Sequence
  Description of Artificial Sequence: Synthetic peptide
  Seed: LRMKWMMAMKYPITA
LRMKVMMNMRYPPTA

SEQ ID NO: 241352 - protein, 15 aa, Artificial Sequence
  Description of Artificial Sequence: Synthetic peptide
  Seed: LRMKWMMAMKYPITA
LRMKVMMNMRYPQTA

SEQ ID NO: 241353 - protein, 15 aa, Artificial Sequence
  Description of Artificial Sequence: Synthetic peptide
  Seed: LRMKWMMAMKYPITA
LRMKVMMNMRYPRTA

SEQ ID NO: 241354 - protein, 15 aa, Artificial Sequence
  Description of Artificial Sequence: Synthetic peptide
  Seed: LRMKWMMAMKYPITA
LRMKVMMNMRYPSTA

SEQ ID NO: 241355 - protein, 15 aa, Artificial Sequence
  Description of Artificial Sequence: Synthetic peptide
  Seed: LRMKWMMAMKYPITA
LRMKVMMNMRYPTTA

SEQ ID NO: 241356 - protein, 15 aa, Artificial Sequence
  Description of Artificial Sequence: Synthetic peptide
  Seed: LRMKWMMAMKYPITA
LRMKVMMNMRYPVTA

SEQ ID NO: 241357 - protein, 15 aa, Artificial Sequence
  Description of Artificial Sequence: Synthetic peptide
  Seed: LRMKWMMAMKYPITA
LRMKVMMNMRYPWTA

SEQ ID NO: 241358 - protein, 15 aa, Artificial Sequence
  Description of Artificial Sequence: Synthetic peptide
  Seed: LRMKWMMAMKYPITA
LRMKVMMNMRYPYTA

SEQ ID NO: 241359 - protein, 15 aa, Artificial Sequence
  Description of Artificial Sequence: Synthetic peptide
  Seed: LRMKWMMAMKYPITA
LRMKVMMNMSYPATA

SEQ ID NO: 241360 - protein, 15 aa, Artificial Sequence
  Description of Artificial Sequence: Synthetic peptide
  Seed: LRMKWMMAMKYPITA
LRMKVMMNMSYPCTA

SEQ ID NO: 241361 - protein, 15 aa, Artificial Sequence
  Description of Artificial Sequence: Synthetic peptide
  Seed: LRMKWMMAMKYPITA
LRMKVMMNMSYPFTA

SEQ ID NO: 241362 - protein, 15 aa, Artificial Sequence
  Description of Artificial Sequence: Synthetic peptide
  Seed: LRMKWMMAMKYPITA
LRMKVMMNMSYPGTA

SEQ ID NO: 241363 - protein, 15 aa, Artificial Sequence
  Description of Artificial Sequence: Synthetic peptide
  Seed: LRMKWMMAMKYPITA
LRMKVMMNMSYPHTA

SEQ ID NO: 241364 - protein, 15 aa, Artificial Sequence
  Description of Artificial Sequence: Synthetic peptide
  Seed: LRMKWMMAMKYPITA
LRMKVMMNMSYPITA

SEQ ID NO: 241365 - protein, 15 aa, Artificial Sequence
  Description of Artificial Sequence: Synthetic peptide
  Seed: LRMKWMMAMKYPITA
LRMKVMMNMSYPKTA

SEQ ID NO: 241366 - protein, 15 aa, Artificial Sequence
  Description of Artificial Sequence: Synthetic peptide
  Seed: LRMKWMMAMKYPITA
LRMKVMMNMSYPLTA

SEQ ID NO: 241367 - protein, 15 aa, Artificial Sequence
  Description of Artificial Sequence: Synthetic peptide
  Seed: LRMKWMMAMKYPITA
LRMKVMMNMSYPMTA

SEQ ID NO: 241368 - protein, 15 aa, Artificial Sequence
  Description of Artificial Sequence: Synthetic peptide
  Seed: LRMKWMMAMKYPITA
LRMKVMMNMSYPNTA

SEQ ID NO: 241369 - protein, 15 aa, Artificial Sequence
  Description of Artificial Sequence: Synthetic peptide
  Seed: LRMKWMMAMKYPITA
LRMKVMMNMSYPPTA

SEQ ID NO: 241370 - protein, 15 aa, Artificial Sequence
  Description of Artificial Sequence: Synthetic peptide
  Seed: LRMKWMMAMKYPITA
LRMKVMMNMSYPQTA

SEQ ID NO: 241371 - protein, 15 aa, Artificial Sequence
  Description of Artificial Sequence: Synthetic peptide
  Seed: LRMKWMMAMKYPITA
LRMKVMMNMSYPRTA

SEQ ID NO: 241372 - protein, 15 aa, Artificial Sequence
  Description of Artificial Sequence: Synthetic peptide
  Seed: LRMKWMMAMKYPITA
LRMKVMMNMSYPSTA

SEQ ID NO: 241373 - protein, 15 aa, Artificial Sequence
  Description of Artificial Sequence: Synthetic peptide
  Seed: LRMKWMMAMKYPITA
LRMKVMMNMSYPTTA

SEQ ID NO: 241374 - protein, 15 aa, Artificial Sequence
  Description of Artificial Sequence: Synthetic peptide
  Seed: LRMKWMMAMKYPITA
LRMKVMMNMSYPVTA

SEQ ID NO: 241375 - protein, 15 aa, Artificial Sequence
  Description of Artificial Sequence: Synthetic peptide
  Seed: LRMKWMMAMKYPITA
LRMKVMMNMSYPWTA

SEQ ID NO: 241376 - protein, 15 aa, Artificial Sequence
  Description of Artificial Sequence: Synthetic peptide
  Seed: LRMKWMMAMKYPITA
LRMKVMMNMSYPYTA

SEQ ID NO: 241377 - protein, 15 aa, Artificial Sequence
  Description of Artificial Sequence: Synthetic peptide
  Seed: LRMKWMMAMKYPITA
LRMKVMMNMTYPATA

SEQ ID NO: 241378 - protein, 15 aa, Artificial Sequence
  Description of Artificial Sequence: Synthetic peptide
  Seed: LRMKWMMAMKYPITA
LRMKVMMNMTYPFTA

SEQ ID NO: 241379 - protein, 15 aa, Artificial Sequence
  Description of Artificial Sequence: Synthetic peptide
  Seed: LRMKWMMAMKYPITA
LRMKVMMNMTYPITA

SEQ ID NO: 241380 - protein, 15 aa, Artificial Sequence
  Description of Artificial Sequence: Synthetic peptide
  Seed: LRMKWMMAMKYPITA
LRMKVMMNMTYPKTA

SEQ ID NO: 241381 - protein, 15 aa, Artificial Sequence
  Description of Artificial Sequence: Synthetic peptide
  Seed: LRMKWMMAMKYPITA
LRMKVMMNMTYPLTA

SEQ ID NO: 241382 - protein, 15 aa, Artificial Sequence
  Description of Artificial Sequence: Synthetic peptide
  Seed: LRMKWMMAMKYPITA
LRMKVMMNMTYPMTA

SEQ ID NO: 241383 - protein, 15 aa, Artificial Sequence
  Description of Artificial Sequence: Synthetic peptide
  Seed: LRMKWMMAMKYPITA
LRMKVMMNMTYPNTA

SEQ ID NO: 241384 - protein, 15 aa, Artificial Sequence
  Description of Artificial Sequence: Synthetic peptide
  Seed: LRMKWMMAMKYPITA
LRMKVMMNMTYPRTA

SEQ ID NO: 241385 - protein, 15 aa, Artificial Sequence
  Description of Artificial Sequence: Synthetic peptide
  Seed: LRMKWMMAMKYPITA
LRMKVMMNMTYPSTA

SEQ ID NO: 241386 - protein, 15 aa, Artificial Sequence
  Description of Artificial Sequence: Synthetic peptide
  Seed: LRMKWMMAMKYPITA
LRMKVMMNMTYPTTA

SEQ ID NO: 241387 - protein, 15 aa, Artificial Sequence
  Description of Artificial Sequence: Synthetic peptide
  Seed: LRMKWMMAMKYPITA
LRMKVMMNMTYPVTA

SEQ ID NO: 241388 - protein, 15 aa, Artificial Sequence
  Description of Artificial Sequence: Synthetic peptide
  Seed: LRMKWMMAMKYPITA
LRMKVMMNMTYPWTA

SEQ ID NO: 241389 - protein, 15 aa, Artificial Sequence
  Description of Artificial Sequence: Synthetic peptide
  Seed: LRMKWMMAMKYPITA
LRMKVMMNMTYPYTA

SEQ ID NO: 241390 - protein, 15 aa, Artificial Sequence
  Description of Artificial Sequence: Synthetic peptide
  Seed: LRMKWMMAMKYPITA
LRMKVMMNMVYPATA

SEQ ID NO: 241391 - protein, 15 aa, Artificial Sequence
  Description of Artificial Sequence: Synthetic peptide
  Seed: LRMKWMMAMKYPITA
LRMKVMMNMVYPFTA

SEQ ID NO: 241392 - protein, 15 aa, Artificial Sequence
  Description of Artificial Sequence: Synthetic peptide
  Seed: LRMKWMMAMKYPITA
LRMKVMMNMVYPITA

SEQ ID NO: 241393 - protein, 15 aa, Artificial Sequence
  Description of Artificial Sequence: Synthetic peptide
  Seed: LRMKWMMAMKYPITA
LRMKVMMNMVYPKTA

SEQ ID NO: 241394 - protein, 15 aa, Artificial Sequence
  Description of Artificial Sequence: Synthetic peptide
  Seed: LRMKWMMAMKYPITA
LRMKVMMNMVYPLTA

SEQ ID NO: 241395 - protein, 15 aa, Artificial Sequence
  Description of Artificial Sequence: Synthetic peptide
  Seed: LRMKWMMAMKYPITA
LRMKVMMNMVYPMTA

SEQ ID NO: 241396 - protein, 15 aa, Artificial Sequence
  Description of Artificial Sequence: Synthetic peptide
  Seed: LRMKWMMAMKYPITA
LRMKVMMNMVYPNTA

SEQ ID NO: 241397 - protein, 15 aa, Artificial Sequence
  Description of Artificial Sequence: Synthetic peptide
  Seed: LRMKWMMAMKYPITA
LRMKVMMNMVYPRTA

SEQ ID NO: 241398 - protein, 15 aa, Artificial Sequence
  Description of Artificial Sequence: Synthetic peptide
  Seed: LRMKWMMAMKYPITA
LRMKVMMNMVYPSTA

SEQ ID NO: 241399 - protein, 15 aa, Artificial Sequence
  Description of Artificial Sequence: Synthetic peptide
  Seed: LRMKWMMAMKYPITA
LRMKVMMNMVYPTTA

SEQ ID NO: 241400 - protein, 15 aa, Artificial Sequence
  Description of Artificial Sequence: Synthetic peptide
  Seed: LRMKWMMAMKYPITA
LRMKVMMNMVYPVTA

SEQ ID NO: 241401 - protein, 15 aa, Artificial Sequence
  Description of Artificial Sequence: Synthetic peptide
  Seed: LRMKWMMAMKYPITA
LRMKVMMNMVYPWTA

SEQ ID NO: 241402 - protein, 15 aa, Artificial Sequence
  Description of Artificial Sequence: Synthetic peptide
  Seed: LRMKWMMAMKYPITA
LRMKVMMNMVYPYTA

SEQ ID NO: 241403 - protein, 15 aa, Artificial Sequence
  Description of Artificial Sequence: Synthetic peptide
  Seed: LRMKWMMAMKYPITA
LRMKVMMNMWYPITA

SEQ ID NO: 241404 - protein, 15 aa, Artificial Sequence
  Description of Artificial Sequence: Synthetic peptide
  Seed: LRMKWMMAMKYPITA
LRMKVMMNMWYPLTA

SEQ ID NO: 241405 - protein, 15 aa, Artificial Sequence
  Description of Artificial Sequence: Synthetic peptide
  Seed: LRMKWMMAMKYPITA
LRMKVMMNMWYPVTA

SEQ ID NO: 241406 - protein, 15 aa, Artificial Sequence
  Description of Artificial Sequence: Synthetic peptide
  Seed: LRMKWMMAMKYPITA
LRMKVMMNMYYPFTA

SEQ ID NO: 241407 - protein, 15 aa, Artificial Sequence
  Description of Artificial Sequence: Synthetic peptide
  Seed: LRMKWMMAMKYPITA
LRMKVMMNMYYPITA

SEQ ID NO: 241408 - protein, 15 aa, Artificial Sequence
  Description of Artificial Sequence: Synthetic peptide
  Seed: LRMKWMMAMKYPITA
LRMKVMMNMYYPLTA

SEQ ID NO: 241409 - protein, 15 aa, Artificial Sequence
  Description of Artificial Sequence: Synthetic peptide
  Seed: LRMKWMMAMKYPITA
LRMKVMMNMYYPMTA

SEQ ID NO: 241410 - protein, 15 aa, Artificial Sequence
  Description of Artificial Sequence: Synthetic peptide
  Seed: LRMKWMMAMKYPITA
LRMKVMMNMYYPVTA

SEQ ID NO: 241411 - protein, 15 aa, Artificial Sequence
  Description of Artificial Sequence: Synthetic peptide
  Seed: LRMKWMMAMKYPITA
LRMKVMMNMYYPYTA

SEQ ID NO: 241412 - protein, 15 aa, Artificial Sequence
  Description of Artificial Sequence: Synthetic peptide
  Seed: LRMKWMMAMKYPITA
LRMKVMMPMAYPATA

SEQ ID NO: 241413 - protein, 15 aa, Artificial Sequence
  Description of Artificial Sequence: Synthetic peptide
  Seed: LRMKWMMAMKYPITA
LRMKVMMPMAYPFTA

SEQ ID NO: 241414 - protein, 15 aa, Artificial Sequence
  Description of Artificial Sequence: Synthetic peptide
  Seed: LRMKWMMAMKYPITA
LRMKVMMPMAYPITA

SEQ ID NO: 241415 - protein, 15 aa, Artificial Sequence
  Description of Artificial Sequence: Synthetic peptide
  Seed: LRMKWMMAMKYPITA
LRMKVMMPMAYPLTA

SEQ ID NO: 241416 - protein, 15 aa, Artificial Sequence
  Description of Artificial Sequence: Synthetic peptide
  Seed: LRMKWMMAMKYPITA
LRMKVMMPMAYPMTA

SEQ ID NO: 241417 - protein, 15 aa, Artificial Sequence
  Description of Artificial Sequence: Synthetic peptide
  Seed: LRMKWMMAMKYPITA
LRMKVMMPMAYPVTA

SEQ ID NO: 241418 - protein, 15 aa, Artificial Sequence
  Description of Artificial Sequence: Synthetic peptide
  Seed: LRMKWMMAMKYPITA
LRMKVMMPMGYPITA

SEQ ID NO: 241419 - protein, 15 aa, Artificial Sequence
  Description of Artificial Sequence: Synthetic peptide
  Seed: LRMKWMMAMKYPITA
LRMKVMMPMGYPLTA

SEQ ID NO: 241420 - protein, 15 aa, Artificial Sequence
  Description of Artificial Sequence: Synthetic peptide
  Seed: LRMKWMMAMKYPITA
LRMKVMMPMGYPVTA

SEQ ID NO: 241421 - protein, 15 aa, Artificial Sequence
  Description of Artificial Sequence: Synthetic peptide
  Seed: LRMKWMMAMKYPITA
LRMKVMMPMMYPITA

SEQ ID NO: 241422 - protein, 15 aa, Artificial Sequence
  Description of Artificial Sequence: Synthetic peptide
  Seed: LRMKWMMAMKYPITA
LRMKVMMPMMYPLTA

SEQ ID NO: 241423 - protein, 15 aa, Artificial Sequence
  Description of Artificial Sequence: Synthetic peptide
  Seed: LRMKWMMAMKYPITA
LRMKVMMPMMYPMTA

SEQ ID NO: 241424 - protein, 15 aa, Artificial Sequence
  Description of Artificial Sequence: Synthetic peptide
  Seed: LRMKWMMAMKYPITA
LRMKVMMPMMYPVTA

SEQ ID NO: 241425 - protein, 15 aa, Artificial Sequence
  Description of Artificial Sequence: Synthetic peptide
  Seed: LRMKWMMAMKYPITA
LRMKVMMPMPYPITA

SEQ ID NO: 241426 - protein, 15 aa, Artificial Sequence
  Description of Artificial Sequence: Synthetic peptide
  Seed: LRMKWMMAMKYPITA
LRMKVMMPMPYPLTA

SEQ ID NO: 241427 - protein, 15 aa, Artificial Sequence
  Description of Artificial Sequence: Synthetic peptide
  Seed: LRMKWMMAMKYPITA
LRMKVMMPMPYPVTA

SEQ ID NO: 241428 - protein, 15 aa, Artificial Sequence
  Description of Artificial Sequence: Synthetic peptide
  Seed: LRMKWMMAMKYPITA
LRMKVMMPMSYPITA

SEQ ID NO: 241429 - protein, 15 aa, Artificial Sequence
  Description of Artificial Sequence: Synthetic peptide
  Seed: LRMKWMMAMKYPITA
LRMKVMMPMSYPLTA

SEQ ID NO: 241430 - protein, 15 aa, Artificial Sequence
  Description of Artificial Sequence: Synthetic peptide
  Seed: LRMKWMMAMKYPITA
LRMKVMMPMSYPMTA

SEQ ID NO: 241431 - protein, 15 aa, Artificial Sequence
  Description of Artificial Sequence: Synthetic peptide
  Seed: LRMKWMMAMKYPITA
LRMKVMMPMSYPVTA

SEQ ID NO: 241432 - protein, 15 aa, Artificial Sequence
  Description of Artificial Sequence: Synthetic peptide
  Seed: LRMKWMMAMKYPITA
LRMKVMMPMTYPLTA

SEQ ID NO: 241433 - protein, 15 aa, Artificial Sequence
  Description of Artificial Sequence: Synthetic peptide
  Seed: LRMKWMMAMKYPITA
LRMKVMMQMAYPATA

SEQ ID NO: 241434 - protein, 15 aa, Artificial Sequence
  Description of Artificial Sequence: Synthetic peptide
  Seed: LRMKWMMAMKYPITA
LRMKVMMQMAYPCTA

SEQ ID NO: 241435 - protein, 15 aa, Artificial Sequence
  Description of Artificial Sequence: Synthetic peptide
  Seed: LRMKWMMAMKYPITA
LRMKVMMQMAYPFTA

SEQ ID NO: 241436 - protein, 15 aa, Artificial Sequence
  Description of Artificial Sequence: Synthetic peptide
  Seed: LRMKWMMAMKYPITA
LRMKVMMQMAYPGTA

SEQ ID NO: 241437 - protein, 15 aa, Artificial Sequence
  Description of Artificial Sequence: Synthetic peptide
  Seed: LRMKWMMAMKYPITA
LRMKVMMQMAYPHTA

SEQ ID NO: 241438 - protein, 15 aa, Artificial Sequence
  Description of Artificial Sequence: Synthetic peptide
  Seed: LRMKWMMAMKYPITA
LRMKVMMQMAYPITA

SEQ ID NO: 241439 - protein, 15 aa, Artificial Sequence
  Description of Artificial Sequence: Synthetic peptide
  Seed: LRMKWMMAMKYPITA
LRMKVMMQMAYPLTA

SEQ ID NO: 241440 - protein, 15 aa, Artificial Sequence
  Description of Artificial Sequence: Synthetic peptide
  Seed: LRMKWMMAMKYPITA
LRMKVMMQMAYPMTA

SEQ ID NO: 241441 - protein, 15 aa, Artificial Sequence
  Description of Artificial Sequence: Synthetic peptide
  Seed: LRMKWMMAMKYPITA
LRMKVMMQMAYPNTA

SEQ ID NO: 241442 - protein, 15 aa, Artificial Sequence
  Description of Artificial Sequence: Synthetic peptide
  Seed: LRMKWMMAMKYPITA
LRMKVMMQMAYPPTA

SEQ ID NO: 241443 - protein, 15 aa, Artificial Sequence
  Description of Artificial Sequence: Synthetic peptide
  Seed: LRMKWMMAMKYPITA
LRMKVMMQMAYPQTA

SEQ ID NO: 241444 - protein, 15 aa, Artificial Sequence
  Description of Artificial Sequence: Synthetic peptide
  Seed: LRMKWMMAMKYPITA
LRMKVMMQMAYPRTA

SEQ ID NO: 241445 - protein, 15 aa, Artificial Sequence
  Description of Artificial Sequence: Synthetic peptide
  Seed: LRMKWMMAMKYPITA
LRMKVMMQMAYPSTA

SEQ ID NO: 241446 - protein, 15 aa, Artificial Sequence
  Description of Artificial Sequence: Synthetic peptide
  Seed: LRMKWMMAMKYPITA
LRMKVMMQMAYPTTA

SEQ ID NO: 241447 - protein, 15 aa, Artificial Sequence
  Description of Artificial Sequence: Synthetic peptide
  Seed: LRMKWMMAMKYPITA
LRMKVMMQMAYPVTA

SEQ ID NO: 241448 - protein, 15 aa, Artificial Sequence
  Description of Artificial Sequence: Synthetic peptide
  Seed: LRMKWMMAMKYPITA
LRMKVMMQMAYPWTA

SEQ ID NO: 241449 - protein, 15 aa, Artificial Sequence
  Description of Artificial Sequence: Synthetic peptide
  Seed: LRMKWMMAMKYPITA
LRMKVMMQMAYPYTA

SEQ ID NO: 241450 - protein, 15 aa, Artificial Sequence
  Description of Artificial Sequence: Synthetic peptide
  Seed: LRMKWMMAMKYPITA
LRMKVMMQMGYPATA

SEQ ID NO: 241451 - protein, 15 aa, Artificial Sequence
  Description of Artificial Sequence: Synthetic peptide
  Seed: LRMKWMMAMKYPITA
LRMKVMMQMGYPCTA

SEQ ID NO: 241452 - protein, 15 aa, Artificial Sequence
  Description of Artificial Sequence: Synthetic peptide
  Seed: LRMKWMMAMKYPITA
LRMKVMMQMGYPFTA

SEQ ID NO: 241453 - protein, 15 aa, Artificial Sequence
  Description of Artificial Sequence: Synthetic peptide
  Seed: LRMKWMMAMKYPITA
LRMKVMMQMGYPGTA

SEQ ID NO: 241454 - protein, 15 aa, Artificial Sequence
  Description of Artificial Sequence: Synthetic peptide
  Seed: LRMKWMMAMKYPITA
LRMKVMMQMGYPITA

SEQ ID NO: 241455 - protein, 15 aa, Artificial Sequence
  Description of Artificial Sequence: Synthetic peptide
  Seed: LRMKWMMAMKYPITA
LRMKVMMQMGYPLTA

SEQ ID NO: 241456 - protein, 15 aa, Artificial Sequence
  Description of Artificial Sequence: Synthetic peptide
  Seed: LRMKWMMAMKYPITA
LRMKVMMQMGYPMTA

SEQ ID NO: 241457 - protein, 15 aa, Artificial Sequence
  Description of Artificial Sequence: Synthetic peptide
  Seed: LRMKWMMAMKYPITA
LRMKVMMQMGYPSTA

SEQ ID NO: 241458 - protein, 15 aa, Artificial Sequence
  Description of Artificial Sequence: Synthetic peptide
  Seed: LRMKWMMAMKYPITA
LRMKVMMQMGYPTTA

SEQ ID NO: 241459 - protein, 15 aa, Artificial Sequence
  Description of Artificial Sequence: Synthetic peptide
  Seed: LRMKWMMAMKYPITA
LRMKVMMQMGYPVTA

SEQ ID NO: 241460 - protein, 15 aa, Artificial Sequence
  Description of Artificial Sequence: Synthetic peptide
  Seed: LRMKWMMAMKYPITA
LRMKVMMQMGYPYTA

SEQ ID NO: 241461 - protein, 15 aa, Artificial Sequence
  Description of Artificial Sequence: Synthetic peptide
  Seed: LRMKWMMAMKYPITA
LRMKVMMQMHYPFTA

SEQ ID NO: 241462 - protein, 15 aa, Artificial Sequence
  Description of Artificial Sequence: Synthetic peptide
  Seed: LRMKWMMAMKYPITA
LRMKVMMQMHYPITA

SEQ ID NO: 241463 - protein, 15 aa, Artificial Sequence
  Description of Artificial Sequence: Synthetic peptide
  Seed: LRMKWMMAMKYPITA
LRMKVMMQMHYPLTA

SEQ ID NO: 241464 - protein, 15 aa, Artificial Sequence
  Description of Artificial Sequence: Synthetic peptide
  Seed: LRMKWMMAMKYPITA
LRMKVMMQMHYPVTA

SEQ ID NO: 241465 - protein, 15 aa, Artificial Sequence
  Description of Artificial Sequence: Synthetic peptide
  Seed: LRMKWMMAMKYPITA
LRMKVMMQMHYPYTA

SEQ ID NO: 241466 - protein, 15 aa, Artificial Sequence
  Description of Artificial Sequence: Synthetic peptide
  Seed: LRMKWMMAMKYPITA
LRMKVMMQMIYPATA

SEQ ID NO: 241467 - protein, 15 aa, Artificial Sequence
  Description of Artificial Sequence: Synthetic peptide
  Seed: LRMKWMMAMKYPITA
LRMKVMMQMIYPITA

SEQ ID NO: 241468 - protein, 15 aa, Artificial Sequence
  Description of Artificial Sequence: Synthetic peptide
  Seed: LRMKWMMAMKYPITA
LRMKVMMQMIYPLTA

SEQ ID NO: 241469 - protein, 15 aa, Artificial Sequence
  Description of Artificial Sequence: Synthetic peptide
  Seed: LRMKWMMAMKYPITA
LRMKVMMQMIYPMTA

SEQ ID NO: 241470 - protein, 15 aa, Artificial Sequence
  Description of Artificial Sequence: Synthetic peptide
  Seed: LRMKWMMAMKYPITA
LRMKVMMQMIYPNTA

SEQ ID NO: 241471 - protein, 15 aa, Artificial Sequence
  Description of Artificial Sequence: Synthetic peptide
  Seed: LRMKWMMAMKYPITA
LRMKVMMQMIYPSTA

SEQ ID NO: 241472 - protein, 15 aa, Artificial Sequence
  Description of Artificial Sequence: Synthetic peptide
  Seed: LRMKWMMAMKYPITA
LRMKVMMQMIYPTTA

SEQ ID NO: 241473 - protein, 15 aa, Artificial Sequence
  Description of Artificial Sequence: Synthetic peptide
  Seed: LRMKWMMAMKYPITA
LRMKVMMQMIYPVTA

SEQ ID NO: 241474 - protein, 15 aa, Artificial Sequence
  Description of Artificial Sequence: Synthetic peptide
  Seed: LRMKWMMAMKYPITA
LRMKVMMQMKYPATA

SEQ ID NO: 241475 - protein, 15 aa, Artificial Sequence
  Description of Artificial Sequence: Synthetic peptide
  Seed: LRMKWMMAMKYPITA
LRMKVMMQMKYPFTA

SEQ ID NO: 241476 - protein, 15 aa, Artificial Sequence
  Description of Artificial Sequence: Synthetic peptide
  Seed: LRMKWMMAMKYPITA
LRMKVMMQMKYPGTA

SEQ ID NO: 241477 - protein, 15 aa, Artificial Sequence
  Description of Artificial Sequence: Synthetic peptide
  Seed: LRMKWMMAMKYPITA
LRMKVMMQMKYPHTA

SEQ ID NO: 241478 - protein, 15 aa, Artificial Sequence
  Description of Artificial Sequence: Synthetic peptide
  Seed: LRMKWMMAMKYPITA
LRMKVMMQMKYPITA

SEQ ID NO: 241479 - protein, 15 aa, Artificial Sequence
  Description of Artificial Sequence: Synthetic peptide
  Seed: LRMKWMMAMKYPITA
LRMKVMMQMKYPKTA

SEQ ID NO: 241480 - protein, 15 aa, Artificial Sequence
  Description of Artificial Sequence: Synthetic peptide
  Seed: LRMKWMMAMKYPITA
LRMKVMMQMKYPLTA

SEQ ID NO: 241481 - protein, 15 aa, Artificial Sequence
  Description of Artificial Sequence: Synthetic peptide
  Seed: LRMKWMMAMKYPITA
LRMKVMMQMKYPMTA

SEQ ID NO: 241482 - protein, 15 aa, Artificial Sequence
  Description of Artificial Sequence: Synthetic peptide
  Seed: LRMKWMMAMKYPITA
LRMKVMMQMKYPQTA

SEQ ID NO: 241483 - protein, 15 aa, Artificial Sequence
  Description of Artificial Sequence: Synthetic peptide
  Seed: LRMKWMMAMKYPITA
LRMKVMMQMKYPRTA

SEQ ID NO: 241484 - protein, 15 aa, Artificial Sequence
  Description of Artificial Sequence: Synthetic peptide
  Seed: LRMKWMMAMKYPITA
LRMKVMMQMKYPSTA

SEQ ID NO: 241485 - protein, 15 aa, Artificial Sequence
  Description of Artificial Sequence: Synthetic peptide
  Seed: LRMKWMMAMKYPITA
LRMKVMMQMKYPTTA

SEQ ID NO: 241486 - protein, 15 aa, Artificial Sequence
  Description of Artificial Sequence: Synthetic peptide
  Seed: LRMKWMMAMKYPITA
LRMKVMMQMKYPVTA

SEQ ID NO: 241487 - protein, 15 aa, Artificial Sequence
  Description of Artificial Sequence: Synthetic peptide
  Seed: LRMKWMMAMKYPITA
LRMKVMMQMKYPYTA

SEQ ID NO: 241488 - protein, 15 aa, Artificial Sequence
  Description of Artificial Sequence: Synthetic peptide
  Seed: LRMKWMMAMKYPITA
LRMKVMMQMNYPATA

SEQ ID NO: 241489 - protein, 15 aa, Artificial Sequence
  Description of Artificial Sequence: Synthetic peptide
  Seed: LRMKWMMAMKYPITA
LRMKVMMQMNYPFTA

SEQ ID NO: 241490 - protein, 15 aa, Artificial Sequence
  Description of Artificial Sequence: Synthetic peptide
  Seed: LRMKWMMAMKYPITA
LRMKVMMQMNYPITA

SEQ ID NO: 241491 - protein, 15 aa, Artificial Sequence
  Description of Artificial Sequence: Synthetic peptide
  Seed: LRMKWMMAMKYPITA
LRMKVMMQMNYPLTA

SEQ ID NO: 241492 - protein, 15 aa, Artificial Sequence
  Description of Artificial Sequence: Synthetic peptide
  Seed: LRMKWMMAMKYPITA
LRMKVMMQMNYPMTA

SEQ ID NO: 241493 - protein, 15 aa, Artificial Sequence
  Description of Artificial Sequence: Synthetic peptide
  Seed: LRMKWMMAMKYPITA
LRMKVMMQMNYPSTA

SEQ ID NO: 241494 - protein, 15 aa, Artificial Sequence
  Description of Artificial Sequence: Synthetic peptide
  Seed: LRMKWMMAMKYPITA
LRMKVMMQMNYPTTA

SEQ ID NO: 241495 - protein, 15 aa, Artificial Sequence
  Description of Artificial Sequence: Synthetic peptide
  Seed: LRMKWMMAMKYPITA
LRMKVMMQMNYPVTA

SEQ ID NO: 241496 - protein, 15 aa, Artificial Sequence
  Description of Artificial Sequence: Synthetic peptide
  Seed: LRMKWMMAMKYPITA
LRMKVMMQMPYPATA

SEQ ID NO: 241497 - protein, 15 aa, Artificial Sequence
  Description of Artificial Sequence: Synthetic peptide
  Seed: LRMKWMMAMKYPITA
LRMKVMMQMPYPFTA

SEQ ID NO: 241498 - protein, 15 aa, Artificial Sequence
  Description of Artificial Sequence: Synthetic peptide
  Seed: LRMKWMMAMKYPITA
LRMKVMMQMPYPITA

SEQ ID NO: 241499 - protein, 15 aa, Artificial Sequence
  Description of Artificial Sequence: Synthetic peptide
  Seed: LRMKWMMAMKYPITA
LRMKVMMQMPYPLTA

SEQ ID NO: 241500 - protein, 15 aa, Artificial Sequence
  Description of Artificial Sequence: Synthetic peptide
  Seed: LRMKWMMAMKYPITA
LRMKVMMQMPYPMTA

SEQ ID NO: 241501 - protein, 15 aa, Artificial Sequence
  Description of Artificial Sequence: Synthetic peptide
  Seed: LRMKWMMAMKYPITA
LRMKVMMQMPYPNTA

SEQ ID NO: 241502 - protein, 15 aa, Artificial Sequence
  Description of Artificial Sequence: Synthetic peptide
  Seed: LRMKWMMAMKYPITA
LRMKVMMQMPYPSTA

SEQ ID NO: 241503 - protein, 15 aa, Artificial Sequence
  Description of Artificial Sequence: Synthetic peptide
  Seed: LRMKWMMAMKYPITA
LRMKVMMQMPYPTTA

SEQ ID NO: 241504 - protein, 15 aa, Artificial Sequence
  Description of Artificial Sequence: Synthetic peptide
  Seed: LRMKWMMAMKYPITA
LRMKVMMQMPYPVTA

SEQ ID NO: 241505 - protein, 15 aa, Artificial Sequence
  Description of Artificial Sequence: Synthetic peptide
  Seed: LRMKWMMAMKYPITA
LRMKVMMQMRYPATA

SEQ ID NO: 241506 - protein, 15 aa, Artificial Sequence
  Description of Artificial Sequence: Synthetic peptide
  Seed: LRMKWMMAMKYPITA
LRMKVMMQMRYPETA

SEQ ID NO: 241507 - protein, 15 aa, Artificial Sequence
  Description of Artificial Sequence: Synthetic peptide
  Seed: LRMKWMMAMKYPITA
LRMKVMMQMRYPFTA

SEQ ID NO: 241508 - protein, 15 aa, Artificial Sequence
  Description of Artificial Sequence: Synthetic peptide
  Seed: LRMKWMMAMKYPITA
LRMKVMMQMRYPGTA

SEQ ID NO: 241509 - protein, 15 aa, Artificial Sequence
  Description of Artificial Sequence: Synthetic peptide
  Seed: LRMKWMMAMKYPITA
LRMKVMMQMRYPHTA

SEQ ID NO: 241510 - protein, 15 aa, Artificial Sequence
  Description of Artificial Sequence: Synthetic peptide
  Seed: LRMKWMMAMKYPITA
LRMKVMMQMRYPITA

SEQ ID NO: 241511 - protein, 15 aa, Artificial Sequence
  Description of Artificial Sequence: Synthetic peptide
  Seed: LRMKWMMAMKYPITA
LRMKVMMQMRYPKTA

SEQ ID NO: 241512 - protein, 15 aa, Artificial Sequence
  Description of Artificial Sequence: Synthetic peptide
  Seed: LRMKWMMAMKYPITA
LRMKVMMQMRYPLTA

SEQ ID NO: 241513 - protein, 15 aa, Artificial Sequence
  Description of Artificial Sequence: Synthetic peptide
  Seed: LRMKWMMAMKYPITA
LRMKVMMQMRYPMTA

SEQ ID NO: 241514 - protein, 15 aa, Artificial Sequence
  Description of Artificial Sequence: Synthetic peptide
  Seed: LRMKWMMAMKYPITA
LRMKVMMQMRYPNTA

SEQ ID NO: 241515 - protein, 15 aa, Artificial Sequence
  Description of Artificial Sequence: Synthetic peptide
  Seed: LRMKWMMAMKYPITA
LRMKVMMQMRYPPTA

SEQ ID NO: 241516 - protein, 15 aa, Artificial Sequence
  Description of Artificial Sequence: Synthetic peptide
  Seed: LRMKWMMAMKYPITA
LRMKVMMQMRYPQTA

SEQ ID NO: 241517 - protein, 15 aa, Artificial Sequence
  Description of Artificial Sequence: Synthetic peptide
  Seed: LRMKWMMAMKYPITA
LRMKVMMQMRYPRTA

SEQ ID NO: 241518 - protein, 15 aa, Artificial Sequence
  Description of Artificial Sequence: Synthetic peptide
  Seed: LRMKWMMAMKYPITA
LRMKVMMQMRYPSTA

SEQ ID NO: 241519 - protein, 15 aa, Artificial Sequence
  Description of Artificial Sequence: Synthetic peptide
  Seed: LRMKWMMAMKYPITA
LRMKVMMQMRYPTTA

SEQ ID NO: 241520 - protein, 15 aa, Artificial Sequence
  Description of Artificial Sequence: Synthetic peptide
  Seed: LRMKWMMAMKYPITA
LRMKVMMQMRYPVTA

SEQ ID NO: 241521 - protein, 15 aa, Artificial Sequence
  Description of Artificial Sequence: Synthetic peptide
  Seed: LRMKWMMAMKYPITA
LRMKVMMQMRYPWTA

SEQ ID NO: 241522 - protein, 15 aa, Artificial Sequence
  Description of Artificial Sequence: Synthetic peptide
  Seed: LRMKWMMAMKYPITA
LRMKVMMQMRYPYTA

SEQ ID NO: 241523 - protein, 15 aa, Artificial Sequence
  Description of Artificial Sequence: Synthetic peptide
  Seed: LRMKWMMAMKYPITA
LRMKVMMQMSYPATA

SEQ ID NO: 241524 - protein, 15 aa, Artificial Sequence
  Description of Artificial Sequence: Synthetic peptide
  Seed: LRMKWMMAMKYPITA
LRMKVMMQMSYPCTA

SEQ ID NO: 241525 - protein, 15 aa, Artificial Sequence
  Description of Artificial Sequence: Synthetic peptide
  Seed: LRMKWMMAMKYPITA
LRMKVMMQMSYPFTA

SEQ ID NO: 241526 - protein, 15 aa, Artificial Sequence
  Description of Artificial Sequence: Synthetic peptide
  Seed: LRMKWMMAMKYPITA
LRMKVMMQMSYPGTA

SEQ ID NO: 241527 - protein, 15 aa, Artificial Sequence
  Description of Artificial Sequence: Synthetic peptide
  Seed: LRMKWMMAMKYPITA
LRMKVMMQMSYPITA

SEQ ID NO: 241528 - protein, 15 aa, Artificial Sequence
  Description of Artificial Sequence: Synthetic peptide
  Seed: LRMKWMMAMKYPITA
LRMKVMMQMSYPLTA

SEQ ID NO: 241529 - protein, 15 aa, Artificial Sequence
  Description of Artificial Sequence: Synthetic peptide
  Seed: LRMKWMMAMKYPITA
LRMKVMMQMSYPMTA

SEQ ID NO: 241530 - protein, 15 aa, Artificial Sequence
  Description of Artificial Sequence: Synthetic peptide
  Seed: LRMKWMMAMKYPITA
LRMKVMMQMSYPNTA

SEQ ID NO: 241531 - protein, 15 aa, Artificial Sequence
  Description of Artificial Sequence: Synthetic peptide
  Seed: LRMKWMMAMKYPITA
LRMKVMMQMSYPRTA

SEQ ID NO: 241532 - protein, 15 aa, Artificial Sequence
  Description of Artificial Sequence: Synthetic peptide
  Seed: LRMKWMMAMKYPITA
LRMKVMMQMSYPSTA

SEQ ID NO: 241533 - protein, 15 aa, Artificial Sequence
  Description of Artificial Sequence: Synthetic peptide
  Seed: LRMKWMMAMKYPITA
LRMKVMMQMSYPTTA

SEQ ID NO: 241534 - protein, 15 aa, Artificial Sequence
  Description of Artificial Sequence: Synthetic peptide
  Seed: LRMKWMMAMKYPITA
LRMKVMMQMSYPVTA

SEQ ID NO: 241535 - protein, 15 aa, Artificial Sequence
  Description of Artificial Sequence: Synthetic peptide
  Seed: LRMKWMMAMKYPITA
LRMKVMMQMSYPYTA

SEQ ID NO: 241536 - protein, 15 aa, Artificial Sequence
  Description of Artificial Sequence: Synthetic peptide
  Seed: LRMKWMMAMKYPITA
LRMKVMMQMTYPATA

SEQ ID NO: 241537 - protein, 15 aa, Artificial Sequence
  Description of Artificial Sequence: Synthetic peptide
  Seed: LRMKWMMAMKYPITA
LRMKVMMQMTYPITA

SEQ ID NO: 241538 - protein, 15 aa, Artificial Sequence
  Description of Artificial Sequence: Synthetic peptide
  Seed: LRMKWMMAMKYPITA
LRMKVMMQMTYPLTA

SEQ ID NO: 241539 - protein, 15 aa, Artificial Sequence
  Description of Artificial Sequence: Synthetic peptide
  Seed: LRMKWMMAMKYPITA
LRMKVMMQMTYPMTA

SEQ ID NO: 241540 - protein, 15 aa, Artificial Sequence
  Description of Artificial Sequence: Synthetic peptide
  Seed: LRMKWMMAMKYPITA
LRMKVMMQMTYPNTA

SEQ ID NO: 241541 - protein, 15 aa, Artificial Sequence
  Description of Artificial Sequence: Synthetic peptide
  Seed: LRMKWMMAMKYPITA
LRMKVMMQMTYPSTA

SEQ ID NO: 241542 - protein, 15 aa, Artificial Sequence
  Description of Artificial Sequence: Synthetic peptide
  Seed: LRMKWMMAMKYPITA
LRMKVMMQMTYPTTA

SEQ ID NO: 241543 - protein, 15 aa, Artificial Sequence
  Description of Artificial Sequence: Synthetic peptide
  Seed: LRMKWMMAMKYPITA
LRMKVMMQMTYPVTA

SEQ ID NO: 241544 - protein, 15 aa, Artificial Sequence
  Description of Artificial Sequence: Synthetic peptide
  Seed: LRMKWMMAMKYPITA
LRMKVMMQMVYPATA

SEQ ID NO: 241545 - protein, 15 aa, Artificial Sequence
  Description of Artificial Sequence: Synthetic peptide
  Seed: LRMKWMMAMKYPITA
LRMKVMMQMVYPITA

SEQ ID NO: 241546 - protein, 15 aa, Artificial Sequence
  Description of Artificial Sequence: Synthetic peptide
  Seed: LRMKWMMAMKYPITA
LRMKVMMQMVYPLTA

SEQ ID NO: 241547 - protein, 15 aa, Artificial Sequence
  Description of Artificial Sequence: Synthetic peptide
  Seed: LRMKWMMAMKYPITA
LRMKVMMQMVYPMTA

SEQ ID NO: 241548 - protein, 15 aa, Artificial Sequence
  Description of Artificial Sequence: Synthetic peptide
  Seed: LRMKWMMAMKYPITA
LRMKVMMQMVYPNTA

SEQ ID NO: 241549 - protein, 15 aa, Artificial Sequence
  Description of Artificial Sequence: Synthetic peptide
  Seed: LRMKWMMAMKYPITA
LRMKVMMQMVYPSTA

SEQ ID NO: 241550 - protein, 15 aa, Artificial Sequence
  Description of Artificial Sequence: Synthetic peptide
  Seed: LRMKWMMAMKYPITA
LRMKVMMQMVYPTTA

SEQ ID NO: 241551 - protein, 15 aa, Artificial Sequence
  Description of Artificial Sequence: Synthetic peptide
  Seed: LRMKWMMAMKYPITA
LRMKVMMQMVYPVTA

SEQ ID NO: 241552 - protein, 15 aa, Artificial Sequence
  Description of Artificial Sequence: Synthetic peptide
  Seed: LRMKWMMAMKYPITA
LRMKVMMRMAYPFTA

SEQ ID NO: 241553 - protein, 15 aa, Artificial Sequence
  Description of Artificial Sequence: Synthetic peptide
  Seed: LRMKWMMAMKYPITA
LRMKVMMRMAYPITA

SEQ ID NO: 241554 - protein, 15 aa, Artificial Sequence
  Description of Artificial Sequence: Synthetic peptide
  Seed: LRMKWMMAMKYPITA
LRMKVMMRMAYPLTA

SEQ ID NO: 241555 - protein, 15 aa, Artificial Sequence
  Description of Artificial Sequence: Synthetic peptide
  Seed: LRMKWMMAMKYPITA
LRMKVMMRMAYPRTA

SEQ ID NO: 241556 - protein, 15 aa, Artificial Sequence
  Description of Artificial Sequence: Synthetic peptide
  Seed: LRMKWMMAMKYPITA
LRMKVMMRMAYPVTA

SEQ ID NO: 241557 - protein, 15 aa, Artificial Sequence
  Description of Artificial Sequence: Synthetic peptide
  Seed: LRMKWMMAMKYPITA
LRMKVMMRMAYPYTA

SEQ ID NO: 241558 - protein, 15 aa, Artificial Sequence
  Description of Artificial Sequence: Synthetic peptide
  Seed: LRMKWMMAMKYPITA
LRMKVMMRMGYPITA

SEQ ID NO: 241559 - protein, 15 aa, Artificial Sequence
  Description of Artificial Sequence: Synthetic peptide
  Seed: LRMKWMMAMKYPITA
LRMKVMMRMGYPLTA

SEQ ID NO: 241560 - protein, 15 aa, Artificial Sequence
  Description of Artificial Sequence: Synthetic peptide
  Seed: LRMKWMMAMKYPITA
LRMKVMMRMGYPVTA

SEQ ID NO: 241561 - protein, 15 aa, Artificial Sequence
  Description of Artificial Sequence: Synthetic peptide
  Seed: LRMKWMMAMKYPITA
LRMKVMMRMGYPYTA

SEQ ID NO: 241562 - protein, 15 aa, Artificial Sequence
  Description of Artificial Sequence: Synthetic peptide
  Seed: LRMKWMMAMKYPITA
LRMKVMMRMHYPATA

SEQ ID NO: 241563 - protein, 15 aa, Artificial Sequence
  Description of Artificial Sequence: Synthetic peptide
  Seed: LRMKWMMAMKYPITA
LRMKVMMRMHYPGTA

SEQ ID NO: 241564 - protein, 15 aa, Artificial Sequence
  Description of Artificial Sequence: Synthetic peptide
  Seed: LRMKWMMAMKYPITA
LRMKVMMRMHYPQTA

SEQ ID NO: 241565 - protein, 15 aa, Artificial Sequence
  Description of Artificial Sequence: Synthetic peptide
  Seed: LRMKWMMAMKYPITA
LRMKVMMRMHYPRTA

SEQ ID NO: 241566 - protein, 15 aa, Artificial Sequence
  Description of Artificial Sequence: Synthetic peptide
  Seed: LRMKWMMAMKYPITA
LRMKVMMRMHYPYTA

SEQ ID NO: 241567 - protein, 15 aa, Artificial Sequence
  Description of Artificial Sequence: Synthetic peptide
  Seed: LRMKWMMAMKYPITA
LRMKVMMRMIYPRTA

SEQ ID NO: 241568 - protein, 15 aa, Artificial Sequence
  Description of Artificial Sequence: Synthetic peptide
  Seed: LRMKWMMAMKYPITA
LRMKVMMRMIYPYTA

SEQ ID NO: 241569 - protein, 15 aa, Artificial Sequence
  Description of Artificial Sequence: Synthetic peptide
  Seed: LRMKWMMAMKYPITA
LRMKVMMRMKYPATA

SEQ ID NO: 241570 - protein, 15 aa, Artificial Sequence
  Description of Artificial Sequence: Synthetic peptide
  Seed: LRMKWMMAMKYPITA
LRMKVMMRMKYPCTA

SEQ ID NO: 241571 - protein, 15 aa, Artificial Sequence
  Description of Artificial Sequence: Synthetic peptide
  Seed: LRMKWMMAMKYPITA
LRMKVMMRMKYPDTA

SEQ ID NO: 241572 - protein, 15 aa, Artificial Sequence
  Description of Artificial Sequence: Synthetic peptide
  Seed: LRMKWMMAMKYPITA
LRMKVMMRMKYPETA

SEQ ID NO: 241573 - protein, 15 aa, Artificial Sequence
  Description of Artificial Sequence: Synthetic peptide
  Seed: LRMKWMMAMKYPITA
LRMKVMMRMKYPFTA

SEQ ID NO: 241574 - protein, 15 aa, Artificial Sequence
  Description of Artificial Sequence: Synthetic peptide
  Seed: LRMKWMMAMKYPITA
LRMKVMMRMKYPGTA

SEQ ID NO: 241575 - protein, 15 aa, Artificial Sequence
  Description of Artificial Sequence: Synthetic peptide
  Seed: LRMKWMMAMKYPITA
LRMKVMMRMKYPHTA

SEQ ID NO: 241576 - protein, 15 aa, Artificial Sequence
  Description of Artificial Sequence: Synthetic peptide
  Seed: LRMKWMMAMKYPITA
LRMKVMMRMKYPITA

SEQ ID NO: 241577 - protein, 15 aa, Artificial Sequence
  Description of Artificial Sequence: Synthetic peptide
  Seed: LRMKWMMAMKYPITA
LRMKVMMRMKYPKTA

SEQ ID NO: 241578 - protein, 15 aa, Artificial Sequence
  Description of Artificial Sequence: Synthetic peptide
  Seed: LRMKWMMAMKYPITA
LRMKVMMRMKYPLTA

SEQ ID NO: 241579 - protein, 15 aa, Artificial Sequence
  Description of Artificial Sequence: Synthetic peptide
  Seed: LRMKWMMAMKYPITA
LRMKVMMRMKYPMTA

SEQ ID NO: 241580 - protein, 15 aa, Artificial Sequence
  Description of Artificial Sequence: Synthetic peptide
  Seed: LRMKWMMAMKYPITA
LRMKVMMRMKYPNTA

SEQ ID NO: 241581 - protein, 15 aa, Artificial Sequence
  Description of Artificial Sequence: Synthetic peptide
  Seed: LRMKWMMAMKYPITA
LRMKVMMRMKYPQTA

SEQ ID NO: 241582 - protein, 15 aa, Artificial Sequence
  Description of Artificial Sequence: Synthetic peptide
  Seed: LRMKWMMAMKYPITA
LRMKVMMRMKYPRTA

SEQ ID NO: 241583 - protein, 15 aa, Artificial Sequence
  Description of Artificial Sequence: Synthetic peptide
  Seed: LRMKWMMAMKYPITA
LRMKVMMRMKYPSTA

SEQ ID NO: 241584 - protein, 15 aa, Artificial Sequence
  Description of Artificial Sequence: Synthetic peptide
  Seed: LRMKWMMAMKYPITA
LRMKVMMRMKYPTTA

SEQ ID NO: 241585 - protein, 15 aa, Artificial Sequence
  Description of Artificial Sequence: Synthetic peptide
  Seed: LRMKWMMAMKYPITA
LRMKVMMRMKYPVTA

SEQ ID NO: 241586 - protein, 15 aa, Artificial Sequence
  Description of Artificial Sequence: Synthetic peptide
  Seed: LRMKWMMAMKYPITA
LRMKVMMRMKYPYTA

SEQ ID NO: 241587 - protein, 15 aa, Artificial Sequence
  Description of Artificial Sequence: Synthetic peptide
  Seed: LRMKWMMAMKYPITA
LRMKVMMRMLYPRTA

SEQ ID NO: 241588 - protein, 15 aa, Artificial Sequence
  Description of Artificial Sequence: Synthetic peptide
  Seed: LRMKWMMAMKYPITA
LRMKVMMRMNYPFTA

SEQ ID NO: 241589 - protein, 15 aa, Artificial Sequence
  Description of Artificial Sequence: Synthetic peptide
  Seed: LRMKWMMAMKYPITA
LRMKVMMRMNYPITA

SEQ ID NO: 241590 - protein, 15 aa, Artificial Sequence
  Description of Artificial Sequence: Synthetic peptide
  Seed: LRMKWMMAMKYPITA
LRMKVMMRMNYPLTA

SEQ ID NO: 241591 - protein, 15 aa, Artificial Sequence
  Description of Artificial Sequence: Synthetic peptide
  Seed: LRMKWMMAMKYPITA
LRMKVMMRMNYPMTA

SEQ ID NO: 241592 - protein, 15 aa, Artificial Sequence
  Description of Artificial Sequence: Synthetic peptide
  Seed: LRMKWMMAMKYPITA
LRMKVMMRMNYPRTA

SEQ ID NO: 241593 - protein, 15 aa, Artificial Sequence
  Description of Artificial Sequence: Synthetic peptide
  Seed: LRMKWMMAMKYPITA
LRMKVMMRMNYPVTA

SEQ ID NO: 241594 - protein, 15 aa, Artificial Sequence
  Description of Artificial Sequence: Synthetic peptide
  Seed: LRMKWMMAMKYPITA
LRMKVMMRMNYPYTA

SEQ ID NO: 241595 - protein, 15 aa, Artificial Sequence
  Description of Artificial Sequence: Synthetic peptide
  Seed: LRMKWMMAMKYPITA
LRMKVMMRMQYPRTA

SEQ ID NO: 241596 - protein, 15 aa, Artificial Sequence
  Description of Artificial Sequence: Synthetic peptide
  Seed: LRMKWMMAMKYPITA
LRMKVMMRMQYPYTA

SEQ ID NO: 241597 - protein, 15 aa, Artificial Sequence
  Description of Artificial Sequence: Synthetic peptide
  Seed: LRMKWMMAMKYPITA
LRMKVMMRMRYPATA

SEQ ID NO: 241598 - protein, 15 aa, Artificial Sequence
  Description of Artificial Sequence: Synthetic peptide
  Seed: LRMKWMMAMKYPITA
LRMKVMMRMRYPCTA

SEQ ID NO: 241599 - protein, 15 aa, Artificial Sequence
  Description of Artificial Sequence: Synthetic peptide
  Seed: LRMKWMMAMKYPITA
LRMKVMMRMRYPDTA

SEQ ID NO: 241600 - protein, 15 aa, Artificial Sequence
  Description of Artificial Sequence: Synthetic peptide
  Seed: LRMKWMMAMKYPITA
LRMKVMMRMRYPETA

SEQ ID NO: 241601 - protein, 15 aa, Artificial Sequence
  Description of Artificial Sequence: Synthetic peptide
  Seed: LRMKWMMAMKYPITA
LRMKVMMRMRYPFTA

SEQ ID NO: 241602 - protein, 15 aa, Artificial Sequence
  Description of Artificial Sequence: Synthetic peptide
  Seed: LRMKWMMAMKYPITA
LRMKVMMRMRYPGTA

SEQ ID NO: 241603 - protein, 15 aa, Artificial Sequence
  Description of Artificial Sequence: Synthetic peptide
  Seed: LRMKWMMAMKYPITA
LRMKVMMRMRYPHTA

SEQ ID NO: 241604 - protein, 15 aa, Artificial Sequence
  Description of Artificial Sequence: Synthetic peptide
  Seed: LRMKWMMAMKYPITA
LRMKVMMRMRYPITA

SEQ ID NO: 241605 - protein, 15 aa, Artificial Sequence
  Description of Artificial Sequence: Synthetic peptide
  Seed: LRMKWMMAMKYPITA
LRMKVMMRMRYPKTA

SEQ ID NO: 241606 - protein, 15 aa, Artificial Sequence
  Description of Artificial Sequence: Synthetic peptide
  Seed: LRMKWMMAMKYPITA
LRMKVMMRMRYPLTA

SEQ ID NO: 241607 - protein, 15 aa, Artificial Sequence
  Description of Artificial Sequence: Synthetic peptide
  Seed: LRMKWMMAMKYPITA
LRMKVMMRMRYPMTA

SEQ ID NO: 241608 - protein, 15 aa, Artificial Sequence
  Description of Artificial Sequence: Synthetic peptide
  Seed: LRMKWMMAMKYPITA
LRMKVMMRMRYPNTA

SEQ ID NO: 241609 - protein, 15 aa, Artificial Sequence
  Description of Artificial Sequence: Synthetic peptide
  Seed: LRMKWMMAMKYPITA
LRMKVMMRMRYPQTA

SEQ ID NO: 241610 - protein, 15 aa, Artificial Sequence
  Description of Artificial Sequence: Synthetic peptide
  Seed: LRMKWMMAMKYPITA
LRMKVMMRMRYPRTA

SEQ ID NO: 241611 - protein, 15 aa, Artificial Sequence
  Description of Artificial Sequence: Synthetic peptide
  Seed: LRMKWMMAMKYPITA
LRMKVMMRMRYPSTA

SEQ ID NO: 241612 - protein, 15 aa, Artificial Sequence
  Description of Artificial Sequence: Synthetic peptide
  Seed: LRMKWMMAMKYPITA
LRMKVMMRMRYPTTA

SEQ ID NO: 241613 - protein, 15 aa, Artificial Sequence
  Description of Artificial Sequence: Synthetic peptide
  Seed: LRMKWMMAMKYPITA
LRMKVMMRMRYPVTA

SEQ ID NO: 241614 - protein, 15 aa, Artificial Sequence
  Description of Artificial Sequence: Synthetic peptide
  Seed: LRMKWMMAMKYPITA
LRMKVMMRMRYPYTA

SEQ ID NO: 241615 - protein, 15 aa, Artificial Sequence
  Description of Artificial Sequence: Synthetic peptide
  Seed: LRMKWMMAMKYPITA
LRMKVMMRMSYPATA

SEQ ID NO: 241616 - protein, 15 aa, Artificial Sequence
  Description of Artificial Sequence: Synthetic peptide
  Seed: LRMKWMMAMKYPITA
LRMKVMMRMSYPFTA

SEQ ID NO: 241617 - protein, 15 aa, Artificial Sequence
  Description of Artificial Sequence: Synthetic peptide
  Seed: LRMKWMMAMKYPITA
LRMKVMMRMSYPITA

SEQ ID NO: 241618 - protein, 15 aa, Artificial Sequence
  Description of Artificial Sequence: Synthetic peptide
  Seed: LRMKWMMAMKYPITA
LRMKVMMRMSYPLTA

SEQ ID NO: 241619 - protein, 15 aa, Artificial Sequence
  Description of Artificial Sequence: Synthetic peptide
  Seed: LRMKWMMAMKYPITA
LRMKVMMRMSYPMTA

SEQ ID NO: 241620 - protein, 15 aa, Artificial Sequence
  Description of Artificial Sequence: Synthetic peptide
  Seed: LRMKWMMAMKYPITA
LRMKVMMRMSYPRTA

SEQ ID NO: 241621 - protein, 15 aa, Artificial Sequence
  Description of Artificial Sequence: Synthetic peptide
  Seed: LRMKWMMAMKYPITA
LRMKVMMRMSYPVTA

SEQ ID NO: 241622 - protein, 15 aa, Artificial Sequence
  Description of Artificial Sequence: Synthetic peptide
  Seed: LRMKWMMAMKYPITA
LRMKVMMRMSYPYTA

SEQ ID NO: 241623 - protein, 15 aa, Artificial Sequence
  Description of Artificial Sequence: Synthetic peptide
  Seed: LRMKWMMAMKYPITA
LRMKVMMRMTYPFTA

SEQ ID NO: 241624 - protein, 15 aa, Artificial Sequence
  Description of Artificial Sequence: Synthetic peptide
  Seed: LRMKWMMAMKYPITA
LRMKVMMRMTYPITA

SEQ ID NO: 241625 - protein, 15 aa, Artificial Sequence
  Description of Artificial Sequence: Synthetic peptide
  Seed: LRMKWMMAMKYPITA
LRMKVMMRMTYPKTA

SEQ ID NO: 241626 - protein, 15 aa, Artificial Sequence
  Description of Artificial Sequence: Synthetic peptide
  Seed: LRMKWMMAMKYPITA
LRMKVMMRMTYPLTA

SEQ ID NO: 241627 - protein, 15 aa, Artificial Sequence
  Description of Artificial Sequence: Synthetic peptide
  Seed: LRMKWMMAMKYPITA
LRMKVMMRMTYPMTA

SEQ ID NO: 241628 - protein, 15 aa, Artificial Sequence
  Description of Artificial Sequence: Synthetic peptide
  Seed: LRMKWMMAMKYPITA
LRMKVMMRMTYPRTA

SEQ ID NO: 241629 - protein, 15 aa, Artificial Sequence
  Description of Artificial Sequence: Synthetic peptide
  Seed: LRMKWMMAMKYPITA
LRMKVMMRMTYPVTA

SEQ ID NO: 241630 - protein, 15 aa, Artificial Sequence
  Description of Artificial Sequence: Synthetic peptide
  Seed: LRMKWMMAMKYPITA
LRMKVMMRMTYPYTA

SEQ ID NO: 241631 - protein, 15 aa, Artificial Sequence
  Description of Artificial Sequence: Synthetic peptide
  Seed: LRMKWMMAMKYPITA
LRMKVMMRMVYPFTA

SEQ ID NO: 241632 - protein, 15 aa, Artificial Sequence
  Description of Artificial Sequence: Synthetic peptide
  Seed: LRMKWMMAMKYPITA
LRMKVMMRMVYPITA

SEQ ID NO: 241633 - protein, 15 aa, Artificial Sequence
  Description of Artificial Sequence: Synthetic peptide
  Seed: LRMKWMMAMKYPITA
LRMKVMMRMVYPLTA

SEQ ID NO: 241634 - protein, 15 aa, Artificial Sequence
  Description of Artificial Sequence: Synthetic peptide
  Seed: LRMKWMMAMKYPITA
LRMKVMMRMVYPMTA

SEQ ID NO: 241635 - protein, 15 aa, Artificial Sequence
  Description of Artificial Sequence: Synthetic peptide
  Seed: LRMKWMMAMKYPITA
LRMKVMMRMVYPRTA

SEQ ID NO: 241636 - protein, 15 aa, Artificial Sequence
  Description of Artificial Sequence: Synthetic peptide
  Seed: LRMKWMMAMKYPITA
LRMKVMMRMVYPVTA

SEQ ID NO: 241637 - protein, 15 aa, Artificial Sequence
  Description of Artificial Sequence: Synthetic peptide
  Seed: LRMKWMMAMKYPITA
LRMKVMMRMVYPYTA

SEQ ID NO: 241638 - protein, 15 aa, Artificial Sequence
  Description of Artificial Sequence: Synthetic peptide
  Seed: LRMKWMMAMKYPITA
LRMKVMMSMAYPATA

SEQ ID NO: 241639 - protein, 15 aa, Artificial Sequence
  Description of Artificial Sequence: Synthetic peptide
  Seed: LRMKWMMAMKYPITA
LRMKVMMSMAYPCTA

SEQ ID NO: 241640 - protein, 15 aa, Artificial Sequence
  Description of Artificial Sequence: Synthetic peptide
  Seed: LRMKWMMAMKYPITA
LRMKVMMSMAYPETA

SEQ ID NO: 241641 - protein, 15 aa, Artificial Sequence
  Description of Artificial Sequence: Synthetic peptide
  Seed: LRMKWMMAMKYPITA
LRMKVMMSMAYPFTA

SEQ ID NO: 241642 - protein, 15 aa, Artificial Sequence
  Description of Artificial Sequence: Synthetic peptide
  Seed: LRMKWMMAMKYPITA
LRMKVMMSMAYPGTA

SEQ ID NO: 241643 - protein, 15 aa, Artificial Sequence
  Description of Artificial Sequence: Synthetic peptide
  Seed: LRMKWMMAMKYPITA
LRMKVMMSMAYPHTA

SEQ ID NO: 241644 - protein, 15 aa, Artificial Sequence
  Description of Artificial Sequence: Synthetic peptide
  Seed: LRMKWMMAMKYPITA
LRMKVMMSMAYPITA

SEQ ID NO: 241645 - protein, 15 aa, Artificial Sequence
  Description of Artificial Sequence: Synthetic peptide
  Seed: LRMKWMMAMKYPITA
LRMKVMMSMAYPKTA

SEQ ID NO: 241646 - protein, 15 aa, Artificial Sequence
  Description of Artificial Sequence: Synthetic peptide
  Seed: LRMKWMMAMKYPITA
LRMKVMMSMAYPLTA

SEQ ID NO: 241647 - protein, 15 aa, Artificial Sequence
  Description of Artificial Sequence: Synthetic peptide
  Seed: LRMKWMMAMKYPITA
LRMKVMMSMAYPMTA

SEQ ID NO: 241648 - protein, 15 aa, Artificial Sequence
  Description of Artificial Sequence: Synthetic peptide
  Seed: LRMKWMMAMKYPITA
LRMKVMMSMAYPNTA

SEQ ID NO: 241649 - protein, 15 aa, Artificial Sequence
  Description of Artificial Sequence: Synthetic peptide
  Seed: LRMKWMMAMKYPITA
LRMKVMMSMAYPPTA

SEQ ID NO: 241650 - protein, 15 aa, Artificial Sequence
  Description of Artificial Sequence: Synthetic peptide
  Seed: LRMKWMMAMKYPITA
LRMKVMMSMAYPQTA

SEQ ID NO: 241651 - protein, 15 aa, Artificial Sequence
  Description of Artificial Sequence: Synthetic peptide
  Seed: LRMKWMMAMKYPITA
LRMKVMMSMAYPRTA

SEQ ID NO: 241652 - protein, 15 aa, Artificial Sequence
  Description of Artificial Sequence: Synthetic peptide
  Seed: LRMKWMMAMKYPITA
LRMKVMMSMAYPSTA

SEQ ID NO: 241653 - protein, 15 aa, Artificial Sequence
  Description of Artificial Sequence: Synthetic peptide
  Seed: LRMKWMMAMKYPITA
LRMKVMMSMAYPTTA

SEQ ID NO: 241654 - protein, 15 aa, Artificial Sequence
  Description of Artificial Sequence: Synthetic peptide
  Seed: LRMKWMMAMKYPITA
LRMKVMMSMAYPVTA

SEQ ID NO: 241655 - protein, 15 aa, Artificial Sequence
  Description of Artificial Sequence: Synthetic peptide
  Seed: LRMKWMMAMKYPITA
LRMKVMMSMAYPWTA

SEQ ID NO: 241656 - protein, 15 aa, Artificial Sequence
  Description of Artificial Sequence: Synthetic peptide
  Seed: LRMKWMMAMKYPITA
LRMKVMMSMAYPYTA

SEQ ID NO: 241657 - protein, 15 aa, Artificial Sequence
  Description of Artificial Sequence: Synthetic peptide
  Seed: LRMKWMMAMKYPITA
LRMKVMMSMFYPITA

SEQ ID NO: 241658 - protein, 15 aa, Artificial Sequence
  Description of Artificial Sequence: Synthetic peptide
  Seed: LRMKWMMAMKYPITA
LRMKVMMSMFYPLTA

SEQ ID NO: 241659 - protein, 15 aa, Artificial Sequence
  Description of Artificial Sequence: Synthetic peptide
  Seed: LRMKWMMAMKYPITA
LRMKVMMSMFYPMTA

SEQ ID NO: 241660 - protein, 15 aa, Artificial Sequence
  Description of Artificial Sequence: Synthetic peptide
  Seed: LRMKWMMAMKYPITA
LRMKVMMSMFYPVTA

SEQ ID NO: 241661 - protein, 15 aa, Artificial Sequence
  Description of Artificial Sequence: Synthetic peptide
  Seed: LRMKWMMAMKYPITA
LRMKVMMSMGYPATA

SEQ ID NO: 241662 - protein, 15 aa, Artificial Sequence
  Description of Artificial Sequence: Synthetic peptide
  Seed: LRMKWMMAMKYPITA
LRMKVMMSMGYPCTA

SEQ ID NO: 241663 - protein, 15 aa, Artificial Sequence
  Description of Artificial Sequence: Synthetic peptide
  Seed: LRMKWMMAMKYPITA
LRMKVMMSMGYPFTA

SEQ ID NO: 241664 - protein, 15 aa, Artificial Sequence
  Description of Artificial Sequence: Synthetic peptide
  Seed: LRMKWMMAMKYPITA
LRMKVMMSMGYPGTA

SEQ ID NO: 241665 - protein, 15 aa, Artificial Sequence
  Description of Artificial Sequence: Synthetic peptide
  Seed: LRMKWMMAMKYPITA
LRMKVMMSMGYPITA

SEQ ID NO: 241666 - protein, 15 aa, Artificial Sequence
  Description of Artificial Sequence: Synthetic peptide
  Seed: LRMKWMMAMKYPITA
LRMKVMMSMGYPKTA

SEQ ID NO: 241667 - protein, 15 aa, Artificial Sequence
  Description of Artificial Sequence: Synthetic peptide
  Seed: LRMKWMMAMKYPITA
LRMKVMMSMGYPLTA

SEQ ID NO: 241668 - protein, 15 aa, Artificial Sequence
  Description of Artificial Sequence: Synthetic peptide
  Seed: LRMKWMMAMKYPITA
LRMKVMMSMGYPMTA

SEQ ID NO: 241669 - protein, 15 aa, Artificial Sequence
  Description of Artificial Sequence: Synthetic peptide
  Seed: LRMKWMMAMKYPITA
LRMKVMMSMGYPNTA

SEQ ID NO: 241670 - protein, 15 aa, Artificial Sequence
  Description of Artificial Sequence: Synthetic peptide
  Seed: LRMKWMMAMKYPITA
LRMKVMMSMGYPRTA

SEQ ID NO: 241671 - protein, 15 aa, Artificial Sequence
  Description of Artificial Sequence: Synthetic peptide
  Seed: LRMKWMMAMKYPITA
LRMKVMMSMGYPSTA

SEQ ID NO: 241672 - protein, 15 aa, Artificial Sequence
  Description of Artificial Sequence: Synthetic peptide
  Seed: LRMKWMMAMKYPITA
LRMKVMMSMGYPTTA

SEQ ID NO: 241673 - protein, 15 aa, Artificial Sequence
  Description of Artificial Sequence: Synthetic peptide
  Seed: LRMKWMMAMKYPITA
LRMKVMMSMGYPVTA

SEQ ID NO: 241674 - protein, 15 aa, Artificial Sequence
  Description of Artificial Sequence: Synthetic peptide
  Seed: LRMKWMMAMKYPITA
LRMKVMMSMGYPYTA

SEQ ID NO: 241675 - protein, 15 aa, Artificial Sequence
  Description of Artificial Sequence: Synthetic peptide
  Seed: LRMKWMMAMKYPITA
LRMKVMMSMHYPATA

SEQ ID NO: 241676 - protein, 15 aa, Artificial Sequence
  Description of Artificial Sequence: Synthetic peptide
  Seed: LRMKWMMAMKYPITA
LRMKVMMSMHYPFTA

SEQ ID NO: 241677 - protein, 15 aa, Artificial Sequence
  Description of Artificial Sequence: Synthetic peptide
  Seed: LRMKWMMAMKYPITA
LRMKVMMSMHYPITA

SEQ ID NO: 241678 - protein, 15 aa, Artificial Sequence
  Description of Artificial Sequence: Synthetic peptide
  Seed: LRMKWMMAMKYPITA
LRMKVMMSMHYPKTA

SEQ ID NO: 241679 - protein, 15 aa, Artificial Sequence
  Description of Artificial Sequence: Synthetic peptide
  Seed: LRMKWMMAMKYPITA
LRMKVMMSMHYPLTA

SEQ ID NO: 241680 - protein, 15 aa, Artificial Sequence
  Description of Artificial Sequence: Synthetic peptide
  Seed: LRMKWMMAMKYPITA
LRMKVMMSMHYPMTA

SEQ ID NO: 241681 - protein, 15 aa, Artificial Sequence
  Description of Artificial Sequence: Synthetic peptide
  Seed: LRMKWMMAMKYPITA
LRMKVMMSMHYPRTA

SEQ ID NO: 241682 - protein, 15 aa, Artificial Sequence
  Description of Artificial Sequence: Synthetic peptide
  Seed: LRMKWMMAMKYPITA
LRMKVMMSMHYPSTA

SEQ ID NO: 241683 - protein, 15 aa, Artificial Sequence
  Description of Artificial Sequence: Synthetic peptide
  Seed: LRMKWMMAMKYPITA
LRMKVMMSMHYPVTA

SEQ ID NO: 241684 - protein, 15 aa, Artificial Sequence
  Description of Artificial Sequence: Synthetic peptide
  Seed: LRMKWMMAMKYPITA
LRMKVMMSMHYPYTA

SEQ ID NO: 241685 - protein, 15 aa, Artificial Sequence
  Description of Artificial Sequence: Synthetic peptide
  Seed: LRMKWMMAMKYPITA
LRMKVMMSMIYPATA

SEQ ID NO: 241686 - protein, 15 aa, Artificial Sequence
  Description of Artificial Sequence: Synthetic peptide
  Seed: LRMKWMMAMKYPITA
LRMKVMMSMIYPITA

SEQ ID NO: 241687 - protein, 15 aa, Artificial Sequence
  Description of Artificial Sequence: Synthetic peptide
  Seed: LRMKWMMAMKYPITA
LRMKVMMSMIYPLTA

SEQ ID NO: 241688 - protein, 15 aa, Artificial Sequence
  Description of Artificial Sequence: Synthetic peptide
  Seed: LRMKWMMAMKYPITA
LRMKVMMSMIYPMTA

SEQ ID NO: 241689 - protein, 15 aa, Artificial Sequence
  Description of Artificial Sequence: Synthetic peptide
  Seed: LRMKWMMAMKYPITA
LRMKVMMSMIYPRTA

SEQ ID NO: 241690 - protein, 15 aa, Artificial Sequence
  Description of Artificial Sequence: Synthetic peptide
  Seed: LRMKWMMAMKYPITA
LRMKVMMSMIYPSTA

SEQ ID NO: 241691 - protein, 15 aa, Artificial Sequence
  Description of Artificial Sequence: Synthetic peptide
  Seed: LRMKWMMAMKYPITA
LRMKVMMSMIYPTTA

SEQ ID NO: 241692 - protein, 15 aa, Artificial Sequence
  Description of Artificial Sequence: Synthetic peptide
  Seed: LRMKWMMAMKYPITA
LRMKVMMSMIYPVTA

SEQ ID NO: 241693 - protein, 15 aa, Artificial Sequence
  Description of Artificial Sequence: Synthetic peptide
  Seed: LRMKWMMAMKYPITA
LRMKVMMSMIYPYTA

SEQ ID NO: 241694 - protein, 15 aa, Artificial Sequence
  Description of Artificial Sequence: Synthetic peptide
  Seed: LRMKWMMAMKYPITA
LRMKVMMSMKYPATA

SEQ ID NO: 241695 - protein, 15 aa, Artificial Sequence
  Description of Artificial Sequence: Synthetic peptide
  Seed: LRMKWMMAMKYPITA
LRMKVMMSMKYPCTA

SEQ ID NO: 241696 - protein, 15 aa, Artificial Sequence
  Description of Artificial Sequence: Synthetic peptide
  Seed: LRMKWMMAMKYPITA
LRMKVMMSMKYPETA

SEQ ID NO: 241697 - protein, 15 aa, Artificial Sequence
  Description of Artificial Sequence: Synthetic peptide
  Seed: LRMKWMMAMKYPITA
LRMKVMMSMKYPFTA

SEQ ID NO: 241698 - protein, 15 aa, Artificial Sequence
  Description of Artificial Sequence: Synthetic peptide
  Seed: LRMKWMMAMKYPITA
LRMKVMMSMKYPGTA

SEQ ID NO: 241699 - protein, 15 aa, Artificial Sequence
  Description of Artificial Sequence: Synthetic peptide
  Seed: LRMKWMMAMKYPITA
LRMKVMMSMKYPHTA

SEQ ID NO: 241700 - protein, 15 aa, Artificial Sequence
  Description of Artificial Sequence: Synthetic peptide
  Seed: LRMKWMMAMKYPITA
LRMKVMMSMKYPITA

SEQ ID NO: 241701 - protein, 15 aa, Artificial Sequence
  Description of Artificial Sequence: Synthetic peptide
  Seed: LRMKWMMAMKYPITA
LRMKVMMSMKYPKTA

SEQ ID NO: 241702 - protein, 15 aa, Artificial Sequence
  Description of Artificial Sequence: Synthetic peptide
  Seed: LRMKWMMAMKYPITA
LRMKVMMSMKYPLTA

SEQ ID NO: 241703 - protein, 15 aa, Artificial Sequence
  Description of Artificial Sequence: Synthetic peptide
  Seed: LRMKWMMAMKYPITA
LRMKVMMSMKYPMTA

SEQ ID NO: 241704 - protein, 15 aa, Artificial Sequence
  Description of Artificial Sequence: Synthetic peptide
  Seed: LRMKWMMAMKYPITA
LRMKVMMSMKYPNTA

SEQ ID NO: 241705 - protein, 15 aa, Artificial Sequence
  Description of Artificial Sequence: Synthetic peptide
  Seed: LRMKWMMAMKYPITA
LRMKVMMSMKYPPTA

SEQ ID NO: 241706 - protein, 15 aa, Artificial Sequence
  Description of Artificial Sequence: Synthetic peptide
  Seed: LRMKWMMAMKYPITA
LRMKVMMSMKYPQTA

SEQ ID NO: 241707 - protein, 15 aa, Artificial Sequence
  Description of Artificial Sequence: Synthetic peptide
  Seed: LRMKWMMAMKYPITA
LRMKVMMSMKYPRTA

SEQ ID NO: 241708 - protein, 15 aa, Artificial Sequence
  Description of Artificial Sequence: Synthetic peptide
  Seed: LRMKWMMAMKYPITA
LRMKVMMSMKYPSTA

SEQ ID NO: 241709 - protein, 15 aa, Artificial Sequence
  Description of Artificial Sequence: Synthetic peptide
  Seed: LRMKWMMAMKYPITA
LRMKVMMSMKYPTTA

SEQ ID NO: 241710 - protein, 15 aa, Artificial Sequence
  Description of Artificial Sequence: Synthetic peptide
  Seed: LRMKWMMAMKYPITA
LRMKVMMSMKYPVTA

SEQ ID NO: 241711 - protein, 15 aa, Artificial Sequence
  Description of Artificial Sequence: Synthetic peptide
  Seed: LRMKWMMAMKYPITA
LRMKVMMSMKYPWTA

SEQ ID NO: 241712 - protein, 15 aa, Artificial Sequence
  Description of Artificial Sequence: Synthetic peptide
  Seed: LRMKWMMAMKYPITA
LRMKVMMSMKYPYTA

SEQ ID NO: 241713 - protein, 15 aa, Artificial Sequence
  Description of Artificial Sequence: Synthetic peptide
  Seed: LRMKWMMAMKYPITA
LRMKVMMSMLYPRTA

SEQ ID NO: 241714 - protein, 15 aa, Artificial Sequence
  Description of Artificial Sequence: Synthetic peptide
  Seed: LRMKWMMAMKYPITA
LRMKVMMSMMYPITA

SEQ ID NO: 241715 - protein, 15 aa, Artificial Sequence
  Description of Artificial Sequence: Synthetic peptide
  Seed: LRMKWMMAMKYPITA
LRMKVMMSMMYPRTA

SEQ ID NO: 241716 - protein, 15 aa, Artificial Sequence
  Description of Artificial Sequence: Synthetic peptide
  Seed: LRMKWMMAMKYPITA
LRMKVMMSMMYPVTA

SEQ ID NO: 241717 - protein, 15 aa, Artificial Sequence
  Description of Artificial Sequence: Synthetic peptide
  Seed: LRMKWMMAMKYPITA
LRMKVMMSMMYPYTA

SEQ ID NO: 241718 - protein, 15 aa, Artificial Sequence
  Description of Artificial Sequence: Synthetic peptide
  Seed: LRMKWMMAMKYPITA
LRMKVMMSMNYPATA

SEQ ID NO: 241719 - protein, 15 aa, Artificial Sequence
  Description of Artificial Sequence: Synthetic peptide
  Seed: LRMKWMMAMKYPITA
LRMKVMMSMNYPFTA

SEQ ID NO: 241720 - protein, 15 aa, Artificial Sequence
  Description of Artificial Sequence: Synthetic peptide
  Seed: LRMKWMMAMKYPITA
LRMKVMMSMNYPITA

SEQ ID NO: 241721 - protein, 15 aa, Artificial Sequence
  Description of Artificial Sequence: Synthetic peptide
  Seed: LRMKWMMAMKYPITA
LRMKVMMSMNYPKTA

SEQ ID NO: 241722 - protein, 15 aa, Artificial Sequence
  Description of Artificial Sequence: Synthetic peptide
  Seed: LRMKWMMAMKYPITA
LRMKVMMSMNYPLTA

SEQ ID NO: 241723 - protein, 15 aa, Artificial Sequence
  Description of Artificial Sequence: Synthetic peptide
  Seed: LRMKWMMAMKYPITA
LRMKVMMSMNYPMTA

SEQ ID NO: 241724 - protein, 15 aa, Artificial Sequence
  Description of Artificial Sequence: Synthetic peptide
  Seed: LRMKWMMAMKYPITA
LRMKVMMSMNYPRTA

SEQ ID NO: 241725 - protein, 15 aa, Artificial Sequence
  Description of Artificial Sequence: Synthetic peptide
  Seed: LRMKWMMAMKYPITA
LRMKVMMSMNYPSTA

SEQ ID NO: 241726 - protein, 15 aa, Artificial Sequence
  Description of Artificial Sequence: Synthetic peptide
  Seed: LRMKWMMAMKYPITA
LRMKVMMSMNYPTTA

SEQ ID NO: 241727 - protein, 15 aa, Artificial Sequence
  Description of Artificial Sequence: Synthetic peptide
  Seed: LRMKWMMAMKYPITA
LRMKVMMSMNYPVTA

SEQ ID NO: 241728 - protein, 15 aa, Artificial Sequence
  Description of Artificial Sequence: Synthetic peptide
  Seed: LRMKWMMAMKYPITA
LRMKVMMSMNYPYTA

SEQ ID NO: 241729 - protein, 15 aa, Artificial Sequence
  Description of Artificial Sequence: Synthetic peptide
  Seed: LRMKWMMAMKYPITA
LRMKVMMSMPYPATA

SEQ ID NO: 241730 - protein, 15 aa, Artificial Sequence
  Description of Artificial Sequence: Synthetic peptide
  Seed: LRMKWMMAMKYPITA
LRMKVMMSMPYPCTA

SEQ ID NO: 241731 - protein, 15 aa, Artificial Sequence
  Description of Artificial Sequence: Synthetic peptide
  Seed: LRMKWMMAMKYPITA
LRMKVMMSMPYPFTA

SEQ ID NO: 241732 - protein, 15 aa, Artificial Sequence
  Description of Artificial Sequence: Synthetic peptide
  Seed: LRMKWMMAMKYPITA
LRMKVMMSMPYPGTA

SEQ ID NO: 241733 - protein, 15 aa, Artificial Sequence
  Description of Artificial Sequence: Synthetic peptide
  Seed: LRMKWMMAMKYPITA
LRMKVMMSMPYPHTA

SEQ ID NO: 241734 - protein, 15 aa, Artificial Sequence
  Description of Artificial Sequence: Synthetic peptide
  Seed: LRMKWMMAMKYPITA
LRMKVMMSMPYPITA

SEQ ID NO: 241735 - protein, 15 aa, Artificial Sequence
  Description of Artificial Sequence: Synthetic peptide
  Seed: LRMKWMMAMKYPITA
LRMKVMMSMPYPLTA

SEQ ID NO: 241736 - protein, 15 aa, Artificial Sequence
  Description of Artificial Sequence: Synthetic peptide
  Seed: LRMKWMMAMKYPITA
LRMKVMMSMPYPMTA

SEQ ID NO: 241737 - protein, 15 aa, Artificial Sequence
  Description of Artificial Sequence: Synthetic peptide
  Seed: LRMKWMMAMKYPITA
LRMKVMMSMPYPNTA

SEQ ID NO: 241738 - protein, 15 aa, Artificial Sequence
  Description of Artificial Sequence: Synthetic peptide
  Seed: LRMKWMMAMKYPITA
LRMKVMMSMPYPQTA

SEQ ID NO: 241739 - protein, 15 aa, Artificial Sequence
  Description of Artificial Sequence: Synthetic peptide
  Seed: LRMKWMMAMKYPITA
LRMKVMMSMPYPRTA

SEQ ID NO: 241740 - protein, 15 aa, Artificial Sequence
  Description of Artificial Sequence: Synthetic peptide
  Seed: LRMKWMMAMKYPITA
LRMKVMMSMPYPSTA

SEQ ID NO: 241741 - protein, 15 aa, Artificial Sequence
  Description of Artificial Sequence: Synthetic peptide
  Seed: LRMKWMMAMKYPITA
LRMKVMMSMPYPTTA

SEQ ID NO: 241742 - protein, 15 aa, Artificial Sequence
  Description of Artificial Sequence: Synthetic peptide
  Seed: LRMKWMMAMKYPITA
LRMKVMMSMPYPVTA

SEQ ID NO: 241743 - protein, 15 aa, Artificial Sequence
  Description of Artificial Sequence: Synthetic peptide
  Seed: LRMKWMMAMKYPITA
LRMKVMMSMPYPWTA

SEQ ID NO: 241744 - protein, 15 aa, Artificial Sequence
  Description of Artificial Sequence: Synthetic peptide
  Seed: LRMKWMMAMKYPITA
LRMKVMMSMPYPYTA

SEQ ID NO: 241745 - protein, 15 aa, Artificial Sequence
  Description of Artificial Sequence: Synthetic peptide
  Seed: LRMKWMMAMKYPITA
LRMKVMMSMQYPITA

SEQ ID NO: 241746 - protein, 15 aa, Artificial Sequence
  Description of Artificial Sequence: Synthetic peptide
  Seed: LRMKWMMAMKYPITA
LRMKVMMSMQYPKTA

SEQ ID NO: 241747 - protein, 15 aa, Artificial Sequence
  Description of Artificial Sequence: Synthetic peptide
  Seed: LRMKWMMAMKYPITA
LRMKVMMSMQYPLTA

SEQ ID NO: 241748 - protein, 15 aa, Artificial Sequence
  Description of Artificial Sequence: Synthetic peptide
  Seed: LRMKWMMAMKYPITA
LRMKVMMSMQYPRTA

SEQ ID NO: 241749 - protein, 15 aa, Artificial Sequence
  Description of Artificial Sequence: Synthetic peptide
  Seed: LRMKWMMAMKYPITA
LRMKVMMSMQYPVTA

SEQ ID NO: 241750 - protein, 15 aa, Artificial Sequence
  Description of Artificial Sequence: Synthetic peptide
  Seed: LRMKWMMAMKYPITA
LRMKVMMSMRYPATA

SEQ ID NO: 241751 - protein, 15 aa, Artificial Sequence
  Description of Artificial Sequence: Synthetic peptide
  Seed: LRMKWMMAMKYPITA
LRMKVMMSMRYPCTA

SEQ ID NO: 241752 - protein, 15 aa, Artificial Sequence
  Description of Artificial Sequence: Synthetic peptide
  Seed: LRMKWMMAMKYPITA
LRMKVMMSMRYPDTA

SEQ ID NO: 241753 - protein, 15 aa, Artificial Sequence
  Description of Artificial Sequence: Synthetic peptide
  Seed: LRMKWMMAMKYPITA
LRMKVMMSMRYPETA

SEQ ID NO: 241754 - protein, 15 aa, Artificial Sequence
  Description of Artificial Sequence: Synthetic peptide
  Seed: LRMKWMMAMKYPITA
LRMKVMMSMRYPFTA

SEQ ID NO: 241755 - protein, 15 aa, Artificial Sequence
  Description of Artificial Sequence: Synthetic peptide
  Seed: LRMKWMMAMKYPITA
LRMKVMMSMRYPGTA

SEQ ID NO: 241756 - protein, 15 aa, Artificial Sequence
  Description of Artificial Sequence: Synthetic peptide
  Seed: LRMKWMMAMKYPITA
LRMKVMMSMRYPHTA

SEQ ID NO: 241757 - protein, 15 aa, Artificial Sequence
  Description of Artificial Sequence: Synthetic peptide
  Seed: LRMKWMMAMKYPITA
LRMKVMMSMRYPITA

SEQ ID NO: 241758 - protein, 15 aa, Artificial Sequence
  Description of Artificial Sequence: Synthetic peptide
  Seed: LRMKWMMAMKYPITA
LRMKVMMSMRYPKTA

SEQ ID NO: 241759 - protein, 15 aa, Artificial Sequence
  Description of Artificial Sequence: Synthetic peptide
  Seed: LRMKWMMAMKYPITA
LRMKVMMSMRYPLTA

SEQ ID NO: 241760 - protein, 15 aa, Artificial Sequence
  Description of Artificial Sequence: Synthetic peptide
  Seed: LRMKWMMAMKYPITA
LRMKVMMSMRYPMTA

SEQ ID NO: 241761 - protein, 15 aa, Artificial Sequence
  Description of Artificial Sequence: Synthetic peptide
  Seed: LRMKWMMAMKYPITA
LRMKVMMSMRYPNTA

SEQ ID NO: 241762 - protein, 15 aa, Artificial Sequence
  Description of Artificial Sequence: Synthetic peptide
  Seed: LRMKWMMAMKYPITA
LRMKVMMSMRYPPTA

SEQ ID NO: 241763 - protein, 15 aa, Artificial Sequence
  Description of Artificial Sequence: Synthetic peptide
  Seed: LRMKWMMAMKYPITA
LRMKVMMSMRYPQTA

SEQ ID NO: 241764 - protein, 15 aa, Artificial Sequence
  Description of Artificial Sequence: Synthetic peptide
  Seed: LRMKWMMAMKYPITA
LRMKVMMSMRYPRTA

SEQ ID NO: 241765 - protein, 15 aa, Artificial Sequence
  Description of Artificial Sequence: Synthetic peptide
  Seed: LRMKWMMAMKYPITA
LRMKVMMSMRYPSTA

SEQ ID NO: 241766 - protein, 15 aa, Artificial Sequence
  Description of Artificial Sequence: Synthetic peptide
  Seed: LRMKWMMAMKYPITA
LRMKVMMSMRYPTTA

SEQ ID NO: 241767 - protein, 15 aa, Artificial Sequence
  Description of Artificial Sequence: Synthetic peptide
  Seed: LRMKWMMAMKYPITA
LRMKVMMSMRYPVTA

SEQ ID NO: 241768 - protein, 15 aa, Artificial Sequence
  Description of Artificial Sequence: Synthetic peptide
  Seed: LRMKWMMAMKYPITA
LRMKVMMSMRYPWTA

SEQ ID NO: 241769 - protein, 15 aa, Artificial Sequence
  Description of Artificial Sequence: Synthetic peptide
  Seed: LRMKWMMAMKYPITA
LRMKVMMSMRYPYTA

SEQ ID NO: 241770 - protein, 15 aa, Artificial Sequence
  Description of Artificial Sequence: Synthetic peptide
  Seed: LRMKWMMAMKYPITA
LRMKVMMSMSYPATA

SEQ ID NO: 241771 - protein, 15 aa, Artificial Sequence
  Description of Artificial Sequence: Synthetic peptide
  Seed: LRMKWMMAMKYPITA
LRMKVMMSMSYPCTA

SEQ ID NO: 241772 - protein, 15 aa, Artificial Sequence
  Description of Artificial Sequence: Synthetic peptide
  Seed: LRMKWMMAMKYPITA
LRMKVMMSMSYPFTA

SEQ ID NO: 241773 - protein, 15 aa, Artificial Sequence
  Description of Artificial Sequence: Synthetic peptide
  Seed: LRMKWMMAMKYPITA
LRMKVMMSMSYPGTA

SEQ ID NO: 241774 - protein, 15 aa, Artificial Sequence
  Description of Artificial Sequence: Synthetic peptide
  Seed: LRMKWMMAMKYPITA
LRMKVMMSMSYPITA

SEQ ID NO: 241775 - protein, 15 aa, Artificial Sequence
  Description of Artificial Sequence: Synthetic peptide
  Seed: LRMKWMMAMKYPITA
LRMKVMMSMSYPKTA

SEQ ID NO: 241776 - protein, 15 aa, Artificial Sequence
  Description of Artificial Sequence: Synthetic peptide
  Seed: LRMKWMMAMKYPITA
LRMKVMMSMSYPLTA

SEQ ID NO: 241777 - protein, 15 aa, Artificial Sequence
  Description of Artificial Sequence: Synthetic peptide
  Seed: LRMKWMMAMKYPITA
LRMKVMMSMSYPMTA

SEQ ID NO: 241778 - protein, 15 aa, Artificial Sequence
  Description of Artificial Sequence: Synthetic peptide
  Seed: LRMKWMMAMKYPITA
LRMKVMMSMSYPNTA

SEQ ID NO: 241779 - protein, 15 aa, Artificial Sequence
  Description of Artificial Sequence: Synthetic peptide
  Seed: LRMKWMMAMKYPITA
LRMKVMMSMSYPRTA

SEQ ID NO: 241780 - protein, 15 aa, Artificial Sequence
  Description of Artificial Sequence: Synthetic peptide
  Seed: LRMKWMMAMKYPITA
LRMKVMMSMSYPSTA

SEQ ID NO: 241781 - protein, 15 aa, Artificial Sequence
  Description of Artificial Sequence: Synthetic peptide
  Seed: LRMKWMMAMKYPITA
LRMKVMMSMSYPTTA

SEQ ID NO: 241782 - protein, 15 aa, Artificial Sequence
  Description of Artificial Sequence: Synthetic peptide
  Seed: LRMKWMMAMKYPITA
LRMKVMMSMSYPVTA

SEQ ID NO: 241783 - protein, 15 aa, Artificial Sequence
  Description of Artificial Sequence: Synthetic peptide
  Seed: LRMKWMMAMKYPITA
LRMKVMMSMSYPWTA

SEQ ID NO: 241784 - protein, 15 aa, Artificial Sequence
  Description of Artificial Sequence: Synthetic peptide
  Seed: LRMKWMMAMKYPITA
LRMKVMMSMSYPYTA

SEQ ID NO: 241785 - protein, 15 aa, Artificial Sequence
  Description of Artificial Sequence: Synthetic peptide
  Seed: LRMKWMMAMKYPITA
LRMKVMMSMTYPATA

SEQ ID NO: 241786 - protein, 15 aa, Artificial Sequence
  Description of Artificial Sequence: Synthetic peptide
  Seed: LRMKWMMAMKYPITA
LRMKVMMSMTYPFTA

SEQ ID NO: 241787 - protein, 15 aa, Artificial Sequence
  Description of Artificial Sequence: Synthetic peptide
  Seed: LRMKWMMAMKYPITA
LRMKVMMSMTYPITA

SEQ ID NO: 241788 - protein, 15 aa, Artificial Sequence
  Description of Artificial Sequence: Synthetic peptide
  Seed: LRMKWMMAMKYPITA
LRMKVMMSMTYPKTA

SEQ ID NO: 241789 - protein, 15 aa, Artificial Sequence
  Description of Artificial Sequence: Synthetic peptide
  Seed: LRMKWMMAMKYPITA
LRMKVMMSMTYPLTA

SEQ ID NO: 241790 - protein, 15 aa, Artificial Sequence
  Description of Artificial Sequence: Synthetic peptide
  Seed: LRMKWMMAMKYPITA
LRMKVMMSMTYPMTA

SEQ ID NO: 241791 - protein, 15 aa, Artificial Sequence
  Description of Artificial Sequence: Synthetic peptide
  Seed: LRMKWMMAMKYPITA
LRMKVMMSMTYPNTA

SEQ ID NO: 241792 - protein, 15 aa, Artificial Sequence
  Description of Artificial Sequence: Synthetic peptide
  Seed: LRMKWMMAMKYPITA
LRMKVMMSMTYPRTA

SEQ ID NO: 241793 - protein, 15 aa, Artificial Sequence
  Description of Artificial Sequence: Synthetic peptide
  Seed: LRMKWMMAMKYPITA
LRMKVMMSMTYPSTA

SEQ ID NO: 241794 - protein, 15 aa, Artificial Sequence
  Description of Artificial Sequence: Synthetic peptide
  Seed: LRMKWMMAMKYPITA
LRMKVMMSMTYPTTA

SEQ ID NO: 241795 - protein, 15 aa, Artificial Sequence
  Description of Artificial Sequence: Synthetic peptide
  Seed: LRMKWMMAMKYPITA
LRMKVMMSMTYPVTA

SEQ ID NO: 241796 - protein, 15 aa, Artificial Sequence
  Description of Artificial Sequence: Synthetic peptide
  Seed: LRMKWMMAMKYPITA
LRMKVMMSMTYPYTA

SEQ ID NO: 241797 - protein, 15 aa, Artificial Sequence
  Description of Artificial Sequence: Synthetic peptide
  Seed: LRMKWMMAMKYPITA
LRMKVMMSMVYPATA

SEQ ID NO: 241798 - protein, 15 aa, Artificial Sequence
  Description of Artificial Sequence: Synthetic peptide
  Seed: LRMKWMMAMKYPITA
LRMKVMMSMVYPFTA

SEQ ID NO: 241799 - protein, 15 aa, Artificial Sequence
  Description of Artificial Sequence: Synthetic peptide
  Seed: LRMKWMMAMKYPITA
LRMKVMMSMVYPGTA

SEQ ID NO: 241800 - protein, 15 aa, Artificial Sequence
  Description of Artificial Sequence: Synthetic peptide
  Seed: LRMKWMMAMKYPITA
LRMKVMMSMVYPITA

SEQ ID NO: 241801 - protein, 15 aa, Artificial Sequence
  Description of Artificial Sequence: Synthetic peptide
  Seed: LRMKWMMAMKYPITA
LRMKVMMSMVYPKTA

SEQ ID NO: 241802 - protein, 15 aa, Artificial Sequence
  Description of Artificial Sequence: Synthetic peptide
  Seed: LRMKWMMAMKYPITA
LRMKVMMSMVYPLTA

SEQ ID NO: 241803 - protein, 15 aa, Artificial Sequence
  Description of Artificial Sequence: Synthetic peptide
  Seed: LRMKWMMAMKYPITA
LRMKVMMSMVYPMTA

SEQ ID NO: 241804 - protein, 15 aa, Artificial Sequence
  Description of Artificial Sequence: Synthetic peptide
  Seed: LRMKWMMAMKYPITA
LRMKVMMSMVYPNTA

SEQ ID NO: 241805 - protein, 15 aa, Artificial Sequence
  Description of Artificial Sequence: Synthetic peptide
  Seed: LRMKWMMAMKYPITA
LRMKVMMSMVYPQTA

SEQ ID NO: 241806 - protein, 15 aa, Artificial Sequence
  Description of Artificial Sequence: Synthetic peptide
  Seed: LRMKWMMAMKYPITA
LRMKVMMSMVYPRTA

SEQ ID NO: 241807 - protein, 15 aa, Artificial Sequence
  Description of Artificial Sequence: Synthetic peptide
  Seed: LRMKWMMAMKYPITA
LRMKVMMSMVYPSTA

SEQ ID NO: 241808 - protein, 15 aa, Artificial Sequence
  Description of Artificial Sequence: Synthetic peptide
  Seed: LRMKWMMAMKYPITA
LRMKVMMSMVYPTTA

SEQ ID NO: 241809 - protein, 15 aa, Artificial Sequence
  Description of Artificial Sequence: Synthetic peptide
  Seed: LRMKWMMAMKYPITA
LRMKVMMSMVYPVTA

SEQ ID NO: 241810 - protein, 15 aa, Artificial Sequence
  Description of Artificial Sequence: Synthetic peptide
  Seed: LRMKWMMAMKYPITA
LRMKVMMSMVYPYTA

SEQ ID NO: 241811 - protein, 15 aa, Artificial Sequence
  Description of Artificial Sequence: Synthetic peptide
  Seed: LRMKWMMAMKYPITA
LRMKVMMTMAYPATA

SEQ ID NO: 241812 - protein, 15 aa, Artificial Sequence
  Description of Artificial Sequence: Synthetic peptide
  Seed: LRMKWMMAMKYPITA
LRMKVMMTMAYPCTA

SEQ ID NO: 241813 - protein, 15 aa, Artificial Sequence
  Description of Artificial Sequence: Synthetic peptide
  Seed: LRMKWMMAMKYPITA
LRMKVMMTMAYPFTA

SEQ ID NO: 241814 - protein, 15 aa, Artificial Sequence
  Description of Artificial Sequence: Synthetic peptide
  Seed: LRMKWMMAMKYPITA
LRMKVMMTMAYPGTA

SEQ ID NO: 241815 - protein, 15 aa, Artificial Sequence
  Description of Artificial Sequence: Synthetic peptide
  Seed: LRMKWMMAMKYPITA
LRMKVMMTMAYPHTA

SEQ ID NO: 241816 - protein, 15 aa, Artificial Sequence
  Description of Artificial Sequence: Synthetic peptide
  Seed: LRMKWMMAMKYPITA
LRMKVMMTMAYPITA

SEQ ID NO: 241817 - protein, 15 aa, Artificial Sequence
  Description of Artificial Sequence: Synthetic peptide
  Seed: LRMKWMMAMKYPITA
LRMKVMMTMAYPKTA

SEQ ID NO: 241818 - protein, 15 aa, Artificial Sequence
  Description of Artificial Sequence: Synthetic peptide
  Seed: LRMKWMMAMKYPITA
LRMKVMMTMAYPLTA

SEQ ID NO: 241819 - protein, 15 aa, Artificial Sequence
  Description of Artificial Sequence: Synthetic peptide
  Seed: LRMKWMMAMKYPITA
LRMKVMMTMAYPMTA

SEQ ID NO: 241820 - protein, 15 aa, Artificial Sequence
  Description of Artificial Sequence: Synthetic peptide
  Seed: LRMKWMMAMKYPITA
LRMKVMMTMAYPNTA

SEQ ID NO: 241821 - protein, 15 aa, Artificial Sequence
  Description of Artificial Sequence: Synthetic peptide
  Seed: LRMKWMMAMKYPITA
LRMKVMMTMAYPQTA

SEQ ID NO: 241822 - protein, 15 aa, Artificial Sequence
  Description of Artificial Sequence: Synthetic peptide
  Seed: LRMKWMMAMKYPITA
LRMKVMMTMAYPRTA

SEQ ID NO: 241823 - protein, 15 aa, Artificial Sequence
  Description of Artificial Sequence: Synthetic peptide
  Seed: LRMKWMMAMKYPITA
LRMKVMMTMAYPSTA

SEQ ID NO: 241824 - protein, 15 aa, Artificial Sequence
  Description of Artificial Sequence: Synthetic peptide
  Seed: LRMKWMMAMKYPITA
LRMKVMMTMAYPTTA

SEQ ID NO: 241825 - protein, 15 aa, Artificial Sequence
  Description of Artificial Sequence: Synthetic peptide
  Seed: LRMKWMMAMKYPITA
LRMKVMMTMAYPVTA

SEQ ID NO: 241826 - protein, 15 aa, Artificial Sequence
  Description of Artificial Sequence: Synthetic peptide
  Seed: LRMKWMMAMKYPITA
LRMKVMMTMAYPWTA

SEQ ID NO: 241827 - protein, 15 aa, Artificial Sequence
  Description of Artificial Sequence: Synthetic peptide
  Seed: LRMKWMMAMKYPITA
LRMKVMMTMAYPYTA

SEQ ID NO: 241828 - protein, 15 aa, Artificial Sequence
  Description of Artificial Sequence: Synthetic peptide
  Seed: LRMKWMMAMKYPITA
LRMKVMMTMFYPITA

SEQ ID NO: 241829 - protein, 15 aa, Artificial Sequence
  Description of Artificial Sequence: Synthetic peptide
  Seed: LRMKWMMAMKYPITA
LRMKVMMTMFYPLTA

SEQ ID NO: 241830 - protein, 15 aa, Artificial Sequence
  Description of Artificial Sequence: Synthetic peptide
  Seed: LRMKWMMAMKYPITA
LRMKVMMTMFYPMTA

SEQ ID NO: 241831 - protein, 15 aa, Artificial Sequence
  Description of Artificial Sequence: Synthetic peptide
  Seed: LRMKWMMAMKYPITA
LRMKVMMTMFYPVTA

SEQ ID NO: 241832 - protein, 15 aa, Artificial Sequence
  Description of Artificial Sequence: Synthetic peptide
  Seed: LRMKWMMAMKYPITA
LRMKVMMTMGYPATA

SEQ ID NO: 241833 - protein, 15 aa, Artificial Sequence
  Description of Artificial Sequence: Synthetic peptide
  Seed: LRMKWMMAMKYPITA
LRMKVMMTMGYPCTA

SEQ ID NO: 241834 - protein, 15 aa, Artificial Sequence
  Description of Artificial Sequence: Synthetic peptide
  Seed: LRMKWMMAMKYPITA
LRMKVMMTMGYPFTA

SEQ ID NO: 241835 - protein, 15 aa, Artificial Sequence
  Description of Artificial Sequence: Synthetic peptide
  Seed: LRMKWMMAMKYPITA
LRMKVMMTMGYPGTA

SEQ ID NO: 241836 - protein, 15 aa, Artificial Sequence
  Description of Artificial Sequence: Synthetic peptide
  Seed: LRMKWMMAMKYPITA
LRMKVMMTMGYPITA

SEQ ID NO: 241837 - protein, 15 aa, Artificial Sequence
  Description of Artificial Sequence: Synthetic peptide
  Seed: LRMKWMMAMKYPITA
LRMKVMMTMGYPLTA

SEQ ID NO: 241838 - protein, 15 aa, Artificial Sequence
  Description of Artificial Sequence: Synthetic peptide
  Seed: LRMKWMMAMKYPITA
LRMKVMMTMGYPMTA

SEQ ID NO: 241839 - protein, 15 aa, Artificial Sequence
  Description of Artificial Sequence: Synthetic peptide
  Seed: LRMKWMMAMKYPITA
LRMKVMMTMGYPRTA

SEQ ID NO: 241840 - protein, 15 aa, Artificial Sequence
  Description of Artificial Sequence: Synthetic peptide
  Seed: LRMKWMMAMKYPITA
LRMKVMMTMGYPSTA

SEQ ID NO: 241841 - protein, 15 aa, Artificial Sequence
  Description of Artificial Sequence: Synthetic peptide
  Seed: LRMKWMMAMKYPITA
LRMKVMMTMGYPTTA

SEQ ID NO: 241842 - protein, 15 aa, Artificial Sequence
  Description of Artificial Sequence: Synthetic peptide
  Seed: LRMKWMMAMKYPITA
LRMKVMMTMGYPVTA

SEQ ID NO: 241843 - protein, 15 aa, Artificial Sequence
  Description of Artificial Sequence: Synthetic peptide
  Seed: LRMKWMMAMKYPITA
LRMKVMMTMGYPYTA

SEQ ID NO: 241844 - protein, 15 aa, Artificial Sequence
  Description of Artificial Sequence: Synthetic peptide
  Seed: LRMKWMMAMKYPITA
LRMKVMMTMHYPATA

SEQ ID NO: 241845 - protein, 15 aa, Artificial Sequence
  Description of Artificial Sequence: Synthetic peptide
  Seed: LRMKWMMAMKYPITA
LRMKVMMTMHYPFTA

SEQ ID NO: 241846 - protein, 15 aa, Artificial Sequence
  Description of Artificial Sequence: Synthetic peptide
  Seed: LRMKWMMAMKYPITA
LRMKVMMTMHYPITA

SEQ ID NO: 241847 - protein, 15 aa, Artificial Sequence
  Description of Artificial Sequence: Synthetic peptide
  Seed: LRMKWMMAMKYPITA
LRMKVMMTMHYPKTA

SEQ ID NO: 241848 - protein, 15 aa, Artificial Sequence
  Description of Artificial Sequence: Synthetic peptide
  Seed: LRMKWMMAMKYPITA
LRMKVMMTMHYPLTA

SEQ ID NO: 241849 - protein, 15 aa, Artificial Sequence
  Description of Artificial Sequence: Synthetic peptide
  Seed: LRMKWMMAMKYPITA
LRMKVMMTMHYPMTA

SEQ ID NO: 241850 - protein, 15 aa, Artificial Sequence
  Description of Artificial Sequence: Synthetic peptide
  Seed: LRMKWMMAMKYPITA
LRMKVMMTMHYPRTA

SEQ ID NO: 241851 - protein, 15 aa, Artificial Sequence
  Description of Artificial Sequence: Synthetic peptide
  Seed: LRMKWMMAMKYPITA
LRMKVMMTMHYPSTA

SEQ ID NO: 241852 - protein, 15 aa, Artificial Sequence
  Description of Artificial Sequence: Synthetic peptide
  Seed: LRMKWMMAMKYPITA
LRMKVMMTMHYPVTA

SEQ ID NO: 241853 - protein, 15 aa, Artificial Sequence
  Description of Artificial Sequence: Synthetic peptide
  Seed: LRMKWMMAMKYPITA
LRMKVMMTMHYPYTA

SEQ ID NO: 241854 - protein, 15 aa, Artificial Sequence
  Description of Artificial Sequence: Synthetic peptide
  Seed: LRMKWMMAMKYPITA
LRMKVMMTMIYPITA

SEQ ID NO: 241855 - protein, 15 aa, Artificial Sequence
  Description of Artificial Sequence: Synthetic peptide
  Seed: LRMKWMMAMKYPITA
LRMKVMMTMIYPLTA

SEQ ID NO: 241856 - protein, 15 aa, Artificial Sequence
  Description of Artificial Sequence: Synthetic peptide
  Seed: LRMKWMMAMKYPITA
LRMKVMMTMIYPMTA

SEQ ID NO: 241857 - protein, 15 aa, Artificial Sequence
  Description of Artificial Sequence: Synthetic peptide
  Seed: LRMKWMMAMKYPITA
LRMKVMMTMIYPRTA

SEQ ID NO: 241858 - protein, 15 aa, Artificial Sequence
  Description of Artificial Sequence: Synthetic peptide
  Seed: LRMKWMMAMKYPITA
LRMKVMMTMIYPVTA

SEQ ID NO: 241859 - protein, 15 aa, Artificial Sequence
  Description of Artificial Sequence: Synthetic peptide
  Seed: LRMKWMMAMKYPITA
LRMKVMMTMKYPATA

SEQ ID NO: 241860 - protein, 15 aa, Artificial Sequence
  Description of Artificial Sequence: Synthetic peptide
  Seed: LRMKWMMAMKYPITA
LRMKVMMTMKYPFTA

SEQ ID NO: 241861 - protein, 15 aa, Artificial Sequence
  Description of Artificial Sequence: Synthetic peptide
  Seed: LRMKWMMAMKYPITA
LRMKVMMTMKYPGTA

SEQ ID NO: 241862 - protein, 15 aa, Artificial Sequence
  Description of Artificial Sequence: Synthetic peptide
  Seed: LRMKWMMAMKYPITA
LRMKVMMTMKYPHTA

SEQ ID NO: 241863 - protein, 15 aa, Artificial Sequence
  Description of Artificial Sequence: Synthetic peptide
  Seed: LRMKWMMAMKYPITA
LRMKVMMTMKYPITA

SEQ ID NO: 241864 - protein, 15 aa, Artificial Sequence
  Description of Artificial Sequence: Synthetic peptide
  Seed: LRMKWMMAMKYPITA
LRMKVMMTMKYPKTA

SEQ ID NO: 241865 - protein, 15 aa, Artificial Sequence
  Description of Artificial Sequence: Synthetic peptide
  Seed: LRMKWMMAMKYPITA
LRMKVMMTMKYPLTA

SEQ ID NO: 241866 - protein, 15 aa, Artificial Sequence
  Description of Artificial Sequence: Synthetic peptide
  Seed: LRMKWMMAMKYPITA
LRMKVMMTMKYPMTA

SEQ ID NO: 241867 - protein, 15 aa, Artificial Sequence
  Description of Artificial Sequence: Synthetic peptide
  Seed: LRMKWMMAMKYPITA
LRMKVMMTMKYPNTA

SEQ ID NO: 241868 - protein, 15 aa, Artificial Sequence
  Description of Artificial Sequence: Synthetic peptide
  Seed: LRMKWMMAMKYPITA
LRMKVMMTMKYPPTA

SEQ ID NO: 241869 - protein, 15 aa, Artificial Sequence
  Description of Artificial Sequence: Synthetic peptide
  Seed: LRMKWMMAMKYPITA
LRMKVMMTMKYPQTA

SEQ ID NO: 241870 - protein, 15 aa, Artificial Sequence
  Description of Artificial Sequence: Synthetic peptide
  Seed: LRMKWMMAMKYPITA
LRMKVMMTMKYPRTA

SEQ ID NO: 241871 - protein, 15 aa, Artificial Sequence
  Description of Artificial Sequence: Synthetic peptide
  Seed: LRMKWMMAMKYPITA
LRMKVMMTMKYPSTA

SEQ ID NO: 241872 - protein, 15 aa, Artificial Sequence
  Description of Artificial Sequence: Synthetic peptide
  Seed: LRMKWMMAMKYPITA
LRMKVMMTMKYPTTA

SEQ ID NO: 241873 - protein, 15 aa, Artificial Sequence
  Description of Artificial Sequence: Synthetic peptide
  Seed: LRMKWMMAMKYPITA
LRMKVMMTMKYPVTA

SEQ ID NO: 241874 - protein, 15 aa, Artificial Sequence
  Description of Artificial Sequence: Synthetic peptide
  Seed: LRMKWMMAMKYPITA
LRMKVMMTMKYPWTA

SEQ ID NO: 241875 - protein, 15 aa, Artificial Sequence
  Description of Artificial Sequence: Synthetic peptide
  Seed: LRMKWMMAMKYPITA
LRMKVMMTMKYPYTA

SEQ ID NO: 241876 - protein, 15 aa, Artificial Sequence
  Description of Artificial Sequence: Synthetic peptide
  Seed: LRMKWMMAMKYPITA
LRMKVMMTMMYPRTA

SEQ ID NO: 241877 - protein, 15 aa, Artificial Sequence
  Description of Artificial Sequence: Synthetic peptide
  Seed: LRMKWMMAMKYPITA
LRMKVMMTMNYPATA

SEQ ID NO: 241878 - protein, 15 aa, Artificial Sequence
  Description of Artificial Sequence: Synthetic peptide
  Seed: LRMKWMMAMKYPITA
LRMKVMMTMNYPFTA

SEQ ID NO: 241879 - protein, 15 aa, Artificial Sequence
  Description of Artificial Sequence: Synthetic peptide
  Seed: LRMKWMMAMKYPITA
LRMKVMMTMNYPITA

SEQ ID NO: 241880 - protein, 15 aa, Artificial Sequence
  Description of Artificial Sequence: Synthetic peptide
  Seed: LRMKWMMAMKYPITA
LRMKVMMTMNYPLTA

SEQ ID NO: 241881 - protein, 15 aa, Artificial Sequence
  Description of Artificial Sequence: Synthetic peptide
  Seed: LRMKWMMAMKYPITA
LRMKVMMTMNYPMTA

SEQ ID NO: 241882 - protein, 15 aa, Artificial Sequence
  Description of Artificial Sequence: Synthetic peptide
  Seed: LRMKWMMAMKYPITA
LRMKVMMTMNYPRTA

SEQ ID NO: 241883 - protein, 15 aa, Artificial Sequence
  Description of Artificial Sequence: Synthetic peptide
  Seed: LRMKWMMAMKYPITA
LRMKVMMTMNYPVTA

SEQ ID NO: 241884 - protein, 15 aa, Artificial Sequence
  Description of Artificial Sequence: Synthetic peptide
  Seed: LRMKWMMAMKYPITA
LRMKVMMTMNYPYTA

SEQ ID NO: 241885 - protein, 15 aa, Artificial Sequence
  Description of Artificial Sequence: Synthetic peptide
  Seed: LRMKWMMAMKYPITA
LRMKVMMTMPYPATA

SEQ ID NO: 241886 - protein, 15 aa, Artificial Sequence
  Description of Artificial Sequence: Synthetic peptide
  Seed: LRMKWMMAMKYPITA
LRMKVMMTMPYPCTA

SEQ ID NO: 241887 - protein, 15 aa, Artificial Sequence
  Description of Artificial Sequence: Synthetic peptide
  Seed: LRMKWMMAMKYPITA
LRMKVMMTMPYPFTA

SEQ ID NO: 241888 - protein, 15 aa, Artificial Sequence
  Description of Artificial Sequence: Synthetic peptide
  Seed: LRMKWMMAMKYPITA
LRMKVMMTMPYPGTA

SEQ ID NO: 241889 - protein, 15 aa, Artificial Sequence
  Description of Artificial Sequence: Synthetic peptide
  Seed: LRMKWMMAMKYPITA
LRMKVMMTMPYPHTA

SEQ ID NO: 241890 - protein, 15 aa, Artificial Sequence
  Description of Artificial Sequence: Synthetic peptide
  Seed: LRMKWMMAMKYPITA
LRMKVMMTMPYPITA

SEQ ID NO: 241891 - protein, 15 aa, Artificial Sequence
  Description of Artificial Sequence: Synthetic peptide
  Seed: LRMKWMMAMKYPITA
LRMKVMMTMPYPLTA

SEQ ID NO: 241892 - protein, 15 aa, Artificial Sequence
  Description of Artificial Sequence: Synthetic peptide
  Seed: LRMKWMMAMKYPITA
LRMKVMMTMPYPMTA

SEQ ID NO: 241893 - protein, 15 aa, Artificial Sequence
  Description of Artificial Sequence: Synthetic peptide
  Seed: LRMKWMMAMKYPITA
LRMKVMMTMPYPNTA

SEQ ID NO: 241894 - protein, 15 aa, Artificial Sequence
  Description of Artificial Sequence: Synthetic peptide
  Seed: LRMKWMMAMKYPITA
LRMKVMMTMPYPQTA

SEQ ID NO: 241895 - protein, 15 aa, Artificial Sequence
  Description of Artificial Sequence: Synthetic peptide
  Seed: LRMKWMMAMKYPITA
LRMKVMMTMPYPRTA

SEQ ID NO: 241896 - protein, 15 aa, Artificial Sequence
  Description of Artificial Sequence: Synthetic peptide
  Seed: LRMKWMMAMKYPITA
LRMKVMMTMPYPSTA

SEQ ID NO: 241897 - protein, 15 aa, Artificial Sequence
  Description of Artificial Sequence: Synthetic peptide
  Seed: LRMKWMMAMKYPITA
LRMKVMMTMPYPTTA

SEQ ID NO: 241898 - protein, 15 aa, Artificial Sequence
  Description of Artificial Sequence: Synthetic peptide
  Seed: LRMKWMMAMKYPITA
LRMKVMMTMPYPVTA

SEQ ID NO: 241899 - protein, 15 aa, Artificial Sequence
  Description of Artificial Sequence: Synthetic peptide
  Seed: LRMKWMMAMKYPITA
LRMKVMMTMPYPYTA

SEQ ID NO: 241900 - protein, 15 aa, Artificial Sequence
  Description of Artificial Sequence: Synthetic peptide
  Seed: LRMKWMMAMKYPITA
LRMKVMMTMQYPITA

SEQ ID NO: 241901 - protein, 15 aa, Artificial Sequence
  Description of Artificial Sequence: Synthetic peptide
  Seed: LRMKWMMAMKYPITA
LRMKVMMTMRYPATA

SEQ ID NO: 241902 - protein, 15 aa, Artificial Sequence
  Description of Artificial Sequence: Synthetic peptide
  Seed: LRMKWMMAMKYPITA
LRMKVMMTMRYPCTA

SEQ ID NO: 241903 - protein, 15 aa, Artificial Sequence
  Description of Artificial Sequence: Synthetic peptide
  Seed: LRMKWMMAMKYPITA
LRMKVMMTMRYPDTA

SEQ ID NO: 241904 - protein, 15 aa, Artificial Sequence
  Description of Artificial Sequence: Synthetic peptide
  Seed: LRMKWMMAMKYPITA
LRMKVMMTMRYPETA

SEQ ID NO: 241905 - protein, 15 aa, Artificial Sequence
  Description of Artificial Sequence: Synthetic peptide
  Seed: LRMKWMMAMKYPITA
LRMKVMMTMRYPFTA

SEQ ID NO: 241906 - protein, 15 aa, Artificial Sequence
  Description of Artificial Sequence: Synthetic peptide
  Seed: LRMKWMMAMKYPITA
LRMKVMMTMRYPGTA

SEQ ID NO: 241907 - protein, 15 aa, Artificial Sequence
  Description of Artificial Sequence: Synthetic peptide
  Seed: LRMKWMMAMKYPITA
LRMKVMMTMRYPHTA

SEQ ID NO: 241908 - protein, 15 aa, Artificial Sequence
  Description of Artificial Sequence: Synthetic peptide
  Seed: LRMKWMMAMKYPITA
LRMKVMMTMRYPITA

SEQ ID NO: 241909 - protein, 15 aa, Artificial Sequence
  Description of Artificial Sequence: Synthetic peptide
  Seed: LRMKWMMAMKYPITA
LRMKVMMTMRYPKTA

SEQ ID NO: 241910 - protein, 15 aa, Artificial Sequence
  Description of Artificial Sequence: Synthetic peptide
  Seed: LRMKWMMAMKYPITA
LRMKVMMTMRYPLTA

SEQ ID NO: 241911 - protein, 15 aa, Artificial Sequence
  Description of Artificial Sequence: Synthetic peptide
  Seed: LRMKWMMAMKYPITA
LRMKVMMTMRYPMTA

SEQ ID NO: 241912 - protein, 15 aa, Artificial Sequence
  Description of Artificial Sequence: Synthetic peptide
  Seed: LRMKWMMAMKYPITA
LRMKVMMTMRYPNTA

SEQ ID NO: 241913 - protein, 15 aa, Artificial Sequence
  Description of Artificial Sequence: Synthetic peptide
  Seed: LRMKWMMAMKYPITA
LRMKVMMTMRYPPTA

SEQ ID NO: 241914 - protein, 15 aa, Artificial Sequence
  Description of Artificial Sequence: Synthetic peptide
  Seed: LRMKWMMAMKYPITA
LRMKVMMTMRYPQTA

SEQ ID NO: 241915 - protein, 15 aa, Artificial Sequence
  Description of Artificial Sequence: Synthetic peptide
  Seed: LRMKWMMAMKYPITA
LRMKVMMTMRYPRTA

SEQ ID NO: 241916 - protein, 15 aa, Artificial Sequence
  Description of Artificial Sequence: Synthetic peptide
  Seed: LRMKWMMAMKYPITA
LRMKVMMTMRYPSTA

SEQ ID NO: 241917 - protein, 15 aa, Artificial Sequence
  Description of Artificial Sequence: Synthetic peptide
  Seed: LRMKWMMAMKYPITA
LRMKVMMTMRYPTTA

SEQ ID NO: 241918 - protein, 15 aa, Artificial Sequence
  Description of Artificial Sequence: Synthetic peptide
  Seed: LRMKWMMAMKYPITA
LRMKVMMTMRYPVTA

SEQ ID NO: 241919 - protein, 15 aa, Artificial Sequence
  Description of Artificial Sequence: Synthetic peptide
  Seed: LRMKWMMAMKYPITA
LRMKVMMTMRYPWTA

SEQ ID NO: 241920 - protein, 15 aa, Artificial Sequence
  Description of Artificial Sequence: Synthetic peptide
  Seed: LRMKWMMAMKYPITA
LRMKVMMTMRYPYTA

SEQ ID NO: 241921 - protein, 15 aa, Artificial Sequence
  Description of Artificial Sequence: Synthetic peptide
  Seed: LRMKWMMAMKYPITA
LRMKVMMTMSYPATA

SEQ ID NO: 241922 - protein, 15 aa, Artificial Sequence
  Description of Artificial Sequence: Synthetic peptide
  Seed: LRMKWMMAMKYPITA
LRMKVMMTMSYPCTA

SEQ ID NO: 241923 - protein, 15 aa, Artificial Sequence
  Description of Artificial Sequence: Synthetic peptide
  Seed: LRMKWMMAMKYPITA
LRMKVMMTMSYPFTA

SEQ ID NO: 241924 - protein, 15 aa, Artificial Sequence
  Description of Artificial Sequence: Synthetic peptide
  Seed: LRMKWMMAMKYPITA
LRMKVMMTMSYPHTA

SEQ ID NO: 241925 - protein, 15 aa, Artificial Sequence
  Description of Artificial Sequence: Synthetic peptide
  Seed: LRMKWMMAMKYPITA
LRMKVMMTMSYPITA

SEQ ID NO: 241926 - protein, 15 aa, Artificial Sequence
  Description of Artificial Sequence: Synthetic peptide
  Seed: LRMKWMMAMKYPITA
LRMKVMMTMSYPKTA

SEQ ID NO: 241927 - protein, 15 aa, Artificial Sequence
  Description of Artificial Sequence: Synthetic peptide
  Seed: LRMKWMMAMKYPITA
LRMKVMMTMSYPLTA

SEQ ID NO: 241928 - protein, 15 aa, Artificial Sequence
  Description of Artificial Sequence: Synthetic peptide
  Seed: LRMKWMMAMKYPITA
LRMKVMMTMSYPMTA

SEQ ID NO: 241929 - protein, 15 aa, Artificial Sequence
  Description of Artificial Sequence: Synthetic peptide
  Seed: LRMKWMMAMKYPITA
LRMKVMMTMSYPNTA

SEQ ID NO: 241930 - protein, 15 aa, Artificial Sequence
  Description of Artificial Sequence: Synthetic peptide
  Seed: LRMKWMMAMKYPITA
LRMKVMMTMSYPRTA

SEQ ID NO: 241931 - protein, 15 aa, Artificial Sequence
  Description of Artificial Sequence: Synthetic peptide
  Seed: LRMKWMMAMKYPITA
LRMKVMMTMSYPSTA

SEQ ID NO: 241932 - protein, 15 aa, Artificial Sequence
  Description of Artificial Sequence: Synthetic peptide
  Seed: LRMKWMMAMKYPITA
LRMKVMMTMSYPTTA

SEQ ID NO: 241933 - protein, 15 aa, Artificial Sequence
  Description of Artificial Sequence: Synthetic peptide
  Seed: LRMKWMMAMKYPITA
LRMKVMMTMSYPVTA

SEQ ID NO: 241934 - protein, 15 aa, Artificial Sequence
  Description of Artificial Sequence: Synthetic peptide
  Seed: LRMKWMMAMKYPITA
LRMKVMMTMSYPWTA

SEQ ID NO: 241935 - protein, 15 aa, Artificial Sequence
  Description of Artificial Sequence: Synthetic peptide
  Seed: LRMKWMMAMKYPITA
LRMKVMMTMSYPYTA

SEQ ID NO: 241936 - protein, 15 aa, Artificial Sequence
  Description of Artificial Sequence: Synthetic peptide
  Seed: LRMKWMMAMKYPITA
LRMKVMMTMTYPATA

SEQ ID NO: 241937 - protein, 15 aa, Artificial Sequence
  Description of Artificial Sequence: Synthetic peptide
  Seed: LRMKWMMAMKYPITA
LRMKVMMTMTYPFTA

SEQ ID NO: 241938 - protein, 15 aa, Artificial Sequence
  Description of Artificial Sequence: Synthetic peptide
  Seed: LRMKWMMAMKYPITA
LRMKVMMTMTYPITA

SEQ ID NO: 241939 - protein, 15 aa, Artificial Sequence
  Description of Artificial Sequence: Synthetic peptide
  Seed: LRMKWMMAMKYPITA
LRMKVMMTMTYPLTA

SEQ ID NO: 241940 - protein, 15 aa, Artificial Sequence
  Description of Artificial Sequence: Synthetic peptide
  Seed: LRMKWMMAMKYPITA
LRMKVMMTMTYPMTA

SEQ ID NO: 241941 - protein, 15 aa, Artificial Sequence
  Description of Artificial Sequence: Synthetic peptide
  Seed: LRMKWMMAMKYPITA
LRMKVMMTMTYPNTA

SEQ ID NO: 241942 - protein, 15 aa, Artificial Sequence
  Description of Artificial Sequence: Synthetic peptide
  Seed: LRMKWMMAMKYPITA
LRMKVMMTMTYPRTA

SEQ ID NO: 241943 - protein, 15 aa, Artificial Sequence
  Description of Artificial Sequence: Synthetic peptide
  Seed: LRMKWMMAMKYPITA
LRMKVMMTMTYPSTA

SEQ ID NO: 241944 - protein, 15 aa, Artificial Sequence
  Description of Artificial Sequence: Synthetic peptide
  Seed: LRMKWMMAMKYPITA
LRMKVMMTMTYPTTA

SEQ ID NO: 241945 - protein, 15 aa, Artificial Sequence
  Description of Artificial Sequence: Synthetic peptide
  Seed: LRMKWMMAMKYPITA
LRMKVMMTMTYPVTA

SEQ ID NO: 241946 - protein, 15 aa, Artificial Sequence
  Description of Artificial Sequence: Synthetic peptide
  Seed: LRMKWMMAMKYPITA
LRMKVMMTMTYPYTA

SEQ ID NO: 241947 - protein, 15 aa, Artificial Sequence
  Description of Artificial Sequence: Synthetic peptide
  Seed: LRMKWMMAMKYPITA
LRMKVMMTMVYPATA

SEQ ID NO: 241948 - protein, 15 aa, Artificial Sequence
  Description of Artificial Sequence: Synthetic peptide
  Seed: LRMKWMMAMKYPITA
LRMKVMMTMVYPFTA

SEQ ID NO: 241949 - protein, 15 aa, Artificial Sequence
  Description of Artificial Sequence: Synthetic peptide
  Seed: LRMKWMMAMKYPITA
LRMKVMMTMVYPITA

SEQ ID NO: 241950 - protein, 15 aa, Artificial Sequence
  Description of Artificial Sequence: Synthetic peptide
  Seed: LRMKWMMAMKYPITA
LRMKVMMTMVYPLTA

SEQ ID NO: 241951 - protein, 15 aa, Artificial Sequence
  Description of Artificial Sequence: Synthetic peptide
  Seed: LRMKWMMAMKYPITA
LRMKVMMTMVYPMTA

SEQ ID NO: 241952 - protein, 15 aa, Artificial Sequence
  Description of Artificial Sequence: Synthetic peptide
  Seed: LRMKWMMAMKYPITA
LRMKVMMTMVYPNTA

SEQ ID NO: 241953 - protein, 15 aa, Artificial Sequence
  Description of Artificial Sequence: Synthetic peptide
  Seed: LRMKWMMAMKYPITA
LRMKVMMTMVYPRTA

SEQ ID NO: 241954 - protein, 15 aa, Artificial Sequence
  Description of Artificial Sequence: Synthetic peptide
  Seed: LRMKWMMAMKYPITA
LRMKVMMTMVYPSTA

SEQ ID NO: 241955 - protein, 15 aa, Artificial Sequence
  Description of Artificial Sequence: Synthetic peptide
  Seed: LRMKWMMAMKYPITA
LRMKVMMTMVYPTTA

SEQ ID NO: 241956 - protein, 15 aa, Artificial Sequence
  Description of Artificial Sequence: Synthetic peptide
  Seed: LRMKWMMAMKYPITA
LRMKVMMTMVYPVTA

SEQ ID NO: 241957 - protein, 15 aa, Artificial Sequence
  Description of Artificial Sequence: Synthetic peptide
  Seed: LRMKWMMAMKYPITA
LRMKVMMVMAYPATA

SEQ ID NO: 241958 - protein, 15 aa, Artificial Sequence
  Description of Artificial Sequence: Synthetic peptide
  Seed: LRMKWMMAMKYPITA
LRMKVMMVMAYPCTA

SEQ ID NO: 241959 - protein, 15 aa, Artificial Sequence
  Description of Artificial Sequence: Synthetic peptide
  Seed: LRMKWMMAMKYPITA
LRMKVMMVMAYPDTA

SEQ ID NO: 241960 - protein, 15 aa, Artificial Sequence
  Description of Artificial Sequence: Synthetic peptide
  Seed: LRMKWMMAMKYPITA
LRMKVMMVMAYPFTA

SEQ ID NO: 241961 - protein, 15 aa, Artificial Sequence
  Description of Artificial Sequence: Synthetic peptide
  Seed: LRMKWMMAMKYPITA
LRMKVMMVMAYPGTA

SEQ ID NO: 241962 - protein, 15 aa, Artificial Sequence
  Description of Artificial Sequence: Synthetic peptide
  Seed: LRMKWMMAMKYPITA
LRMKVMMVMAYPITA

SEQ ID NO: 241963 - protein, 15 aa, Artificial Sequence
  Description of Artificial Sequence: Synthetic peptide
  Seed: LRMKWMMAMKYPITA
LRMKVMMVMAYPKTA

SEQ ID NO: 241964 - protein, 15 aa, Artificial Sequence
  Description of Artificial Sequence: Synthetic peptide
  Seed: LRMKWMMAMKYPITA
LRMKVMMVMAYPLTA

SEQ ID NO: 241965 - protein, 15 aa, Artificial Sequence
  Description of Artificial Sequence: Synthetic peptide
  Seed: LRMKWMMAMKYPITA
LRMKVMMVMAYPMTA

SEQ ID NO: 241966 - protein, 15 aa, Artificial Sequence
  Description of Artificial Sequence: Synthetic peptide
  Seed: LRMKWMMAMKYPITA
LRMKVMMVMAYPNTA

SEQ ID NO: 241967 - protein, 15 aa, Artificial Sequence
  Description of Artificial Sequence: Synthetic peptide
  Seed: LRMKWMMAMKYPITA
LRMKVMMVMAYPPTA

SEQ ID NO: 241968 - protein, 15 aa, Artificial Sequence
  Description of Artificial Sequence: Synthetic peptide
  Seed: LRMKWMMAMKYPITA
LRMKVMMVMAYPQTA

SEQ ID NO: 241969 - protein, 15 aa, Artificial Sequence
  Description of Artificial Sequence: Synthetic peptide
  Seed: LRMKWMMAMKYPITA
LRMKVMMVMAYPRTA

SEQ ID NO: 241970 - protein, 15 aa, Artificial Sequence
  Description of Artificial Sequence: Synthetic peptide
  Seed: LRMKWMMAMKYPITA
LRMKVMMVMAYPSTA

SEQ ID NO: 241971 - protein, 15 aa, Artificial Sequence
  Description of Artificial Sequence: Synthetic peptide
  Seed: LRMKWMMAMKYPITA
LRMKVMMVMAYPTTA

SEQ ID NO: 241972 - protein, 15 aa, Artificial Sequence
  Description of Artificial Sequence: Synthetic peptide
  Seed: LRMKWMMAMKYPITA
LRMKVMMVMAYPVTA

SEQ ID NO: 241973 - protein, 15 aa, Artificial Sequence
  Description of Artificial Sequence: Synthetic peptide
  Seed: LRMKWMMAMKYPITA
LRMKVMMVMAYPYTA

SEQ ID NO: 241974 - protein, 15 aa, Artificial Sequence
  Description of Artificial Sequence: Synthetic peptide
  Seed: LRMKWMMAMKYPITA
LRMKVMMVMGYPATA

SEQ ID NO: 241975 - protein, 15 aa, Artificial Sequence
  Description of Artificial Sequence: Synthetic peptide
  Seed: LRMKWMMAMKYPITA
LRMKVMMVMGYPCTA

SEQ ID NO: 241976 - protein, 15 aa, Artificial Sequence
  Description of Artificial Sequence: Synthetic peptide
  Seed: LRMKWMMAMKYPITA
LRMKVMMVMGYPFTA

SEQ ID NO: 241977 - protein, 15 aa, Artificial Sequence
  Description of Artificial Sequence: Synthetic peptide
  Seed: LRMKWMMAMKYPITA
LRMKVMMVMGYPGTA

SEQ ID NO: 241978 - protein, 15 aa, Artificial Sequence
  Description of Artificial Sequence: Synthetic peptide
  Seed: LRMKWMMAMKYPITA
LRMKVMMVMGYPITA

SEQ ID NO: 241979 - protein, 15 aa, Artificial Sequence
  Description of Artificial Sequence: Synthetic peptide
  Seed: LRMKWMMAMKYPITA
LRMKVMMVMGYPLTA

SEQ ID NO: 241980 - protein, 15 aa, Artificial Sequence
  Description of Artificial Sequence: Synthetic peptide
  Seed: LRMKWMMAMKYPITA
LRMKVMMVMGYPMTA

SEQ ID NO: 241981 - protein, 15 aa, Artificial Sequence
  Description of Artificial Sequence: Synthetic peptide
  Seed: LRMKWMMAMKYPITA
LRMKVMMVMGYPNTA

SEQ ID NO: 241982 - protein, 15 aa, Artificial Sequence
  Description of Artificial Sequence: Synthetic peptide
  Seed: LRMKWMMAMKYPITA
LRMKVMMVMGYPRTA

SEQ ID NO: 241983 - protein, 15 aa, Artificial Sequence
  Description of Artificial Sequence: Synthetic peptide
  Seed: LRMKWMMAMKYPITA
LRMKVMMVMGYPSTA

SEQ ID NO: 241984 - protein, 15 aa, Artificial Sequence
  Description of Artificial Sequence: Synthetic peptide
  Seed: LRMKWMMAMKYPITA
LRMKVMMVMGYPTTA

SEQ ID NO: 241985 - protein, 15 aa, Artificial Sequence
  Description of Artificial Sequence: Synthetic peptide
  Seed: LRMKWMMAMKYPITA
LRMKVMMVMGYPVTA

SEQ ID NO: 241986 - protein, 15 aa, Artificial Sequence
  Description of Artificial Sequence: Synthetic peptide
  Seed: LRMKWMMAMKYPITA
LRMKVMMVMGYPYTA

SEQ ID NO: 241987 - protein, 15 aa, Artificial Sequence
  Description of Artificial Sequence: Synthetic peptide
  Seed: LRMKWMMAMKYPITA
LRMKVMMVMHYPATA

SEQ ID NO: 241988 - protein, 15 aa, Artificial Sequence
  Description of Artificial Sequence: Synthetic peptide
  Seed: LRMKWMMAMKYPITA
LRMKVMMVMHYPGTA

SEQ ID NO: 241989 - protein, 15 aa, Artificial Sequence
  Description of Artificial Sequence: Synthetic peptide
  Seed: LRMKWMMAMKYPITA
LRMKVMMVMHYPHTA

SEQ ID NO: 241990 - protein, 15 aa, Artificial Sequence
  Description of Artificial Sequence: Synthetic peptide
  Seed: LRMKWMMAMKYPITA
LRMKVMMVMHYPKTA

SEQ ID NO: 241991 - protein, 15 aa, Artificial Sequence
  Description of Artificial Sequence: Synthetic peptide
  Seed: LRMKWMMAMKYPITA
LRMKVMMVMHYPLTA

SEQ ID NO: 241992 - protein, 15 aa, Artificial Sequence
  Description of Artificial Sequence: Synthetic peptide
  Seed: LRMKWMMAMKYPITA
LRMKVMMVMHYPMTA

SEQ ID NO: 241993 - protein, 15 aa, Artificial Sequence
  Description of Artificial Sequence: Synthetic peptide
  Seed: LRMKWMMAMKYPITA
LRMKVMMVMHYPQTA

SEQ ID NO: 241994 - protein, 15 aa, Artificial Sequence
  Description of Artificial Sequence: Synthetic peptide
  Seed: LRMKWMMAMKYPITA
LRMKVMMVMHYPRTA

SEQ ID NO: 241995 - protein, 15 aa, Artificial Sequence
  Description of Artificial Sequence: Synthetic peptide
  Seed: LRMKWMMAMKYPITA
LRMKVMMVMHYPSTA

SEQ ID NO: 241996 - protein, 15 aa, Artificial Sequence
  Description of Artificial Sequence: Synthetic peptide
  Seed: LRMKWMMAMKYPITA
LRMKVMMVMHYPVTA

SEQ ID NO: 241997 - protein, 15 aa, Artificial Sequence
  Description of Artificial Sequence: Synthetic peptide
  Seed: LRMKWMMAMKYPITA
LRMKVMMVMHYPYTA

SEQ ID NO: 241998 - protein, 15 aa, Artificial Sequence
  Description of Artificial Sequence: Synthetic peptide
  Seed: LRMKWMMAMKYPITA
LRMKVMMVMKYPATA

SEQ ID NO: 241999 - protein, 15 aa, Artificial Sequence
  Description of Artificial Sequence: Synthetic peptide
  Seed: LRMKWMMAMKYPITA
LRMKVMMVMKYPCTA

SEQ ID NO: 242000 - protein, 15 aa, Artificial Sequence
  Description of Artificial Sequence: Synthetic peptide
  Seed: LRMKWMMAMKYPITA
LRMKVMMVMKYPETA

SEQ ID NO: 242001 - protein, 15 aa, Artificial Sequence
  Description of Artificial Sequence: Synthetic peptide
  Seed: LRMKWMMAMKYPITA
LRMKVMMVMKYPFTA

SEQ ID NO: 242002 - protein, 15 aa, Artificial Sequence
  Description of Artificial Sequence: Synthetic peptide
  Seed: LRMKWMMAMKYPITA
LRMKVMMVMKYPGTA

SEQ ID NO: 242003 - protein, 15 aa, Artificial Sequence
  Description of Artificial Sequence: Synthetic peptide
  Seed: LRMKWMMAMKYPITA
LRMKVMMVMKYPHTA

SEQ ID NO: 242004 - protein, 15 aa, Artificial Sequence
  Description of Artificial Sequence: Synthetic peptide
  Seed: LRMKWMMAMKYPITA
LRMKVMMVMKYPITA

SEQ ID NO: 242005 - protein, 15 aa, Artificial Sequence
  Description of Artificial Sequence: Synthetic peptide
  Seed: LRMKWMMAMKYPITA
LRMKVMMVMKYPKTA

SEQ ID NO: 242006 - protein, 15 aa, Artificial Sequence
  Description of Artificial Sequence: Synthetic peptide
  Seed: LRMKWMMAMKYPITA
LRMKVMMVMKYPLTA

SEQ ID NO: 242007 - protein, 15 aa, Artificial Sequence
  Description of Artificial Sequence: Synthetic peptide
  Seed: LRMKWMMAMKYPITA
LRMKVMMVMKYPMTA

SEQ ID NO: 242008 - protein, 15 aa, Artificial Sequence
  Description of Artificial Sequence: Synthetic peptide
  Seed: LRMKWMMAMKYPITA
LRMKVMMVMKYPNTA

SEQ ID NO: 242009 - protein, 15 aa, Artificial Sequence
  Description of Artificial Sequence: Synthetic peptide
  Seed: LRMKWMMAMKYPITA
LRMKVMMVMKYPPTA

SEQ ID NO: 242010 - protein, 15 aa, Artificial Sequence
  Description of Artificial Sequence: Synthetic peptide
  Seed: LRMKWMMAMKYPITA
LRMKVMMVMKYPQTA

SEQ ID NO: 242011 - protein, 15 aa, Artificial Sequence
  Description of Artificial Sequence: Synthetic peptide
  Seed: LRMKWMMAMKYPITA
LRMKVMMVMKYPRTA

SEQ ID NO: 242012 - protein, 15 aa, Artificial Sequence
  Description of Artificial Sequence: Synthetic peptide
  Seed: LRMKWMMAMKYPITA
LRMKVMMVMKYPSTA

SEQ ID NO: 242013 - protein, 15 aa, Artificial Sequence
  Description of Artificial Sequence: Synthetic peptide
  Seed: LRMKWMMAMKYPITA
LRMKVMMVMKYPTTA

SEQ ID NO: 242014 - protein, 15 aa, Artificial Sequence
  Description of Artificial Sequence: Synthetic peptide
  Seed: LRMKWMMAMKYPITA
LRMKVMMVMKYPVTA

SEQ ID NO: 242015 - protein, 15 aa, Artificial Sequence
  Description of Artificial Sequence: Synthetic peptide
  Seed: LRMKWMMAMKYPITA
LRMKVMMVMKYPYTA

SEQ ID NO: 242016 - protein, 15 aa, Artificial Sequence
  Description of Artificial Sequence: Synthetic peptide
  Seed: LRMKWMMAMKYPITA
LRMKVMMVMNYPATA

SEQ ID NO: 242017 - protein, 15 aa, Artificial Sequence
  Description of Artificial Sequence: Synthetic peptide
  Seed: LRMKWMMAMKYPITA
LRMKVMMVMNYPDTA

SEQ ID NO: 242018 - protein, 15 aa, Artificial Sequence
  Description of Artificial Sequence: Synthetic peptide
  Seed: LRMKWMMAMKYPITA
LRMKVMMVMNYPETA

SEQ ID NO: 242019 - protein, 15 aa, Artificial Sequence
  Description of Artificial Sequence: Synthetic peptide
  Seed: LRMKWMMAMKYPITA
LRMKVMMVMNYPITA

SEQ ID NO: 242020 - protein, 15 aa, Artificial Sequence
  Description of Artificial Sequence: Synthetic peptide
  Seed: LRMKWMMAMKYPITA
LRMKVMMVMNYPLTA

SEQ ID NO: 242021 - protein, 15 aa, Artificial Sequence
  Description of Artificial Sequence: Synthetic peptide
  Seed: LRMKWMMAMKYPITA
LRMKVMMVMNYPMTA

SEQ ID NO: 242022 - protein, 15 aa, Artificial Sequence
  Description of Artificial Sequence: Synthetic peptide
  Seed: LRMKWMMAMKYPITA
LRMKVMMVMNYPRTA

SEQ ID NO: 242023 - protein, 15 aa, Artificial Sequence
  Description of Artificial Sequence: Synthetic peptide
  Seed: LRMKWMMAMKYPITA
LRMKVMMVMNYPSTA

SEQ ID NO: 242024 - protein, 15 aa, Artificial Sequence
  Description of Artificial Sequence: Synthetic peptide
  Seed: LRMKWMMAMKYPITA
LRMKVMMVMNYPTTA

SEQ ID NO: 242025 - protein, 15 aa, Artificial Sequence
  Description of Artificial Sequence: Synthetic peptide
  Seed: LRMKWMMAMKYPITA
LRMKVMMVMNYPVTA

SEQ ID NO: 242026 - protein, 15 aa, Artificial Sequence
  Description of Artificial Sequence: Synthetic peptide
  Seed: LRMKWMMAMKYPITA
LRMKVMMVMNYPYTA

SEQ ID NO: 242027 - protein, 15 aa, Artificial Sequence
  Description of Artificial Sequence: Synthetic peptide
  Seed: LRMKWMMAMKYPITA
LRMKVMMVMPYPATA

SEQ ID NO: 242028 - protein, 15 aa, Artificial Sequence
  Description of Artificial Sequence: Synthetic peptide
  Seed: LRMKWMMAMKYPITA
LRMKVMMVMPYPCTA

SEQ ID NO: 242029 - protein, 15 aa, Artificial Sequence
  Description of Artificial Sequence: Synthetic peptide
  Seed: LRMKWMMAMKYPITA
LRMKVMMVMPYPFTA

SEQ ID NO: 242030 - protein, 15 aa, Artificial Sequence
  Description of Artificial Sequence: Synthetic peptide
  Seed: LRMKWMMAMKYPITA
LRMKVMMVMPYPGTA

SEQ ID NO: 242031 - protein, 15 aa, Artificial Sequence
  Description of Artificial Sequence: Synthetic peptide
  Seed: LRMKWMMAMKYPITA
LRMKVMMVMPYPHTA

SEQ ID NO: 242032 - protein, 15 aa, Artificial Sequence
  Description of Artificial Sequence: Synthetic peptide
  Seed: LRMKWMMAMKYPITA
LRMKVMMVMPYPITA

SEQ ID NO: 242033 - protein, 15 aa, Artificial Sequence
  Description of Artificial Sequence: Synthetic peptide
  Seed: LRMKWMMAMKYPITA
LRMKVMMVMPYPKTA

SEQ ID NO: 242034 - protein, 15 aa, Artificial Sequence
  Description of Artificial Sequence: Synthetic peptide
  Seed: LRMKWMMAMKYPITA
LRMKVMMVMPYPLTA

SEQ ID NO: 242035 - protein, 15 aa, Artificial Sequence
  Description of Artificial Sequence: Synthetic peptide
  Seed: LRMKWMMAMKYPITA
LRMKVMMVMPYPMTA

SEQ ID NO: 242036 - protein, 15 aa, Artificial Sequence
  Description of Artificial Sequence: Synthetic peptide
  Seed: LRMKWMMAMKYPITA
LRMKVMMVMPYPNTA

SEQ ID NO: 242037 - protein, 15 aa, Artificial Sequence
  Description of Artificial Sequence: Synthetic peptide
  Seed: LRMKWMMAMKYPITA
LRMKVMMVMPYPPTA

SEQ ID NO: 242038 - protein, 15 aa, Artificial Sequence
  Description of Artificial Sequence: Synthetic peptide
  Seed: LRMKWMMAMKYPITA
LRMKVMMVMPYPQTA

SEQ ID NO: 242039 - protein, 15 aa, Artificial Sequence
  Description of Artificial Sequence: Synthetic peptide
  Seed: LRMKWMMAMKYPITA
LRMKVMMVMPYPRTA

SEQ ID NO: 242040 - protein, 15 aa, Artificial Sequence
  Description of Artificial Sequence: Synthetic peptide
  Seed: LRMKWMMAMKYPITA
LRMKVMMVMPYPSTA

SEQ ID NO: 242041 - protein, 15 aa, Artificial Sequence
  Description of Artificial Sequence: Synthetic peptide
  Seed: LRMKWMMAMKYPITA
LRMKVMMVMPYPTTA

SEQ ID NO: 242042 - protein, 15 aa, Artificial Sequence
  Description of Artificial Sequence: Synthetic peptide
  Seed: LRMKWMMAMKYPITA
LRMKVMMVMPYPVTA

SEQ ID NO: 242043 - protein, 15 aa, Artificial Sequence
  Description of Artificial Sequence: Synthetic peptide
  Seed: LRMKWMMAMKYPITA
LRMKVMMVMPYPYTA

SEQ ID NO: 242044 - protein, 15 aa, Artificial Sequence
  Description of Artificial Sequence: Synthetic peptide
  Seed: LRMKWMMAMKYPITA
LRMKVMMVMRYPATA

SEQ ID NO: 242045 - protein, 15 aa, Artificial Sequence
  Description of Artificial Sequence: Synthetic peptide
  Seed: LRMKWMMAMKYPITA
LRMKVMMVMRYPCTA

SEQ ID NO: 242046 - protein, 15 aa, Artificial Sequence
  Description of Artificial Sequence: Synthetic peptide
  Seed: LRMKWMMAMKYPITA
LRMKVMMVMRYPDTA

SEQ ID NO: 242047 - protein, 15 aa, Artificial Sequence
  Description of Artificial Sequence: Synthetic peptide
  Seed: LRMKWMMAMKYPITA
LRMKVMMVMRYPETA

SEQ ID NO: 242048 - protein, 15 aa, Artificial Sequence
  Description of Artificial Sequence: Synthetic peptide
  Seed: LRMKWMMAMKYPITA
LRMKVMMVMRYPFTA

SEQ ID NO: 242049 - protein, 15 aa, Artificial Sequence
  Description of Artificial Sequence: Synthetic peptide
  Seed: LRMKWMMAMKYPITA
LRMKVMMVMRYPGTA

SEQ ID NO: 242050 - protein, 15 aa, Artificial Sequence
  Description of Artificial Sequence: Synthetic peptide
  Seed: LRMKWMMAMKYPITA
LRMKVMMVMRYPHTA

SEQ ID NO: 242051 - protein, 15 aa, Artificial Sequence
  Description of Artificial Sequence: Synthetic peptide
  Seed: LRMKWMMAMKYPITA
LRMKVMMVMRYPITA

SEQ ID NO: 242052 - protein, 15 aa, Artificial Sequence
  Description of Artificial Sequence: Synthetic peptide
  Seed: LRMKWMMAMKYPITA
LRMKVMMVMRYPKTA

SEQ ID NO: 242053 - protein, 15 aa, Artificial Sequence
  Description of Artificial Sequence: Synthetic peptide
  Seed: LRMKWMMAMKYPITA
LRMKVMMVMRYPLTA

SEQ ID NO: 242054 - protein, 15 aa, Artificial Sequence
  Description of Artificial Sequence: Synthetic peptide
  Seed: LRMKWMMAMKYPITA
LRMKVMMVMRYPMTA

SEQ ID NO: 242055 - protein, 15 aa, Artificial Sequence
  Description of Artificial Sequence: Synthetic peptide
  Seed: LRMKWMMAMKYPITA
LRMKVMMVMRYPNTA

SEQ ID NO: 242056 - protein, 15 aa, Artificial Sequence
  Description of Artificial Sequence: Synthetic peptide
  Seed: LRMKWMMAMKYPITA
LRMKVMMVMRYPPTA

SEQ ID NO: 242057 - protein, 15 aa, Artificial Sequence
  Description of Artificial Sequence: Synthetic peptide
  Seed: LRMKWMMAMKYPITA
LRMKVMMVMRYPQTA

SEQ ID NO: 242058 - protein, 15 aa, Artificial Sequence
  Description of Artificial Sequence: Synthetic peptide
  Seed: LRMKWMMAMKYPITA
LRMKVMMVMRYPRTA

SEQ ID NO: 242059 - protein, 15 aa, Artificial Sequence
  Description of Artificial Sequence: Synthetic peptide
  Seed: LRMKWMMAMKYPITA
LRMKVMMVMRYPSTA

SEQ ID NO: 242060 - protein, 15 aa, Artificial Sequence
  Description of Artificial Sequence: Synthetic peptide
  Seed: LRMKWMMAMKYPITA
LRMKVMMVMRYPTTA

SEQ ID NO: 242061 - protein, 15 aa, Artificial Sequence
  Description of Artificial Sequence: Synthetic peptide
  Seed: LRMKWMMAMKYPITA
LRMKVMMVMRYPVTA

SEQ ID NO: 242062 - protein, 15 aa, Artificial Sequence
  Description of Artificial Sequence: Synthetic peptide
  Seed: LRMKWMMAMKYPITA
LRMKVMMVMRYPWTA

SEQ ID NO: 242063 - protein, 15 aa, Artificial Sequence
  Description of Artificial Sequence: Synthetic peptide
  Seed: LRMKWMMAMKYPITA
LRMKVMMVMRYPYTA

SEQ ID NO: 242064 - protein, 15 aa, Artificial Sequence
  Description of Artificial Sequence: Synthetic peptide
  Seed: LRMKWMMAMKYPITA
LRMKVMMVMSYPATA

SEQ ID NO: 242065 - protein, 15 aa, Artificial Sequence
  Description of Artificial Sequence: Synthetic peptide
  Seed: LRMKWMMAMKYPITA
LRMKVMMVMSYPCTA

SEQ ID NO: 242066 - protein, 15 aa, Artificial Sequence
  Description of Artificial Sequence: Synthetic peptide
  Seed: LRMKWMMAMKYPITA
LRMKVMMVMSYPDTA

SEQ ID NO: 242067 - protein, 15 aa, Artificial Sequence
  Description of Artificial Sequence: Synthetic peptide
  Seed: LRMKWMMAMKYPITA
LRMKVMMVMSYPFTA

SEQ ID NO: 242068 - protein, 15 aa, Artificial Sequence
  Description of Artificial Sequence: Synthetic peptide
  Seed: LRMKWMMAMKYPITA
LRMKVMMVMSYPGTA

SEQ ID NO: 242069 - protein, 15 aa, Artificial Sequence
  Description of Artificial Sequence: Synthetic peptide
  Seed: LRMKWMMAMKYPITA
LRMKVMMVMSYPITA

SEQ ID NO: 242070 - protein, 15 aa, Artificial Sequence
  Description of Artificial Sequence: Synthetic peptide
  Seed: LRMKWMMAMKYPITA
LRMKVMMVMSYPLTA

SEQ ID NO: 242071 - protein, 15 aa, Artificial Sequence
  Description of Artificial Sequence: Synthetic peptide
  Seed: LRMKWMMAMKYPITA
LRMKVMMVMSYPMTA

SEQ ID NO: 242072 - protein, 15 aa, Artificial Sequence
  Description of Artificial Sequence: Synthetic peptide
  Seed: LRMKWMMAMKYPITA
LRMKVMMVMSYPNTA

SEQ ID NO: 242073 - protein, 15 aa, Artificial Sequence
  Description of Artificial Sequence: Synthetic peptide
  Seed: LRMKWMMAMKYPITA
LRMKVMMVMSYPQTA

SEQ ID NO: 242074 - protein, 15 aa, Artificial Sequence
  Description of Artificial Sequence: Synthetic peptide
  Seed: LRMKWMMAMKYPITA
LRMKVMMVMSYPRTA

SEQ ID NO: 242075 - protein, 15 aa, Artificial Sequence
  Description of Artificial Sequence: Synthetic peptide
  Seed: LRMKWMMAMKYPITA
LRMKVMMVMSYPSTA

SEQ ID NO: 242076 - protein, 15 aa, Artificial Sequence
  Description of Artificial Sequence: Synthetic peptide
  Seed: LRMKWMMAMKYPITA
LRMKVMMVMSYPTTA

SEQ ID NO: 242077 - protein, 15 aa, Artificial Sequence
  Description of Artificial Sequence: Synthetic peptide
  Seed: LRMKWMMAMKYPITA
LRMKVMMVMSYPVTA

SEQ ID NO: 242078 - protein, 15 aa, Artificial Sequence
  Description of Artificial Sequence: Synthetic peptide
  Seed: LRMKWMMAMKYPITA
LRMKVMMVMSYPYTA

SEQ ID NO: 242079 - protein, 15 aa, Artificial Sequence
  Description of Artificial Sequence: Synthetic peptide
  Seed: LRMKWMMAMKYPITA
LRMKVMMVMTYPATA

SEQ ID NO: 242080 - protein, 15 aa, Artificial Sequence
  Description of Artificial Sequence: Synthetic peptide
  Seed: LRMKWMMAMKYPITA
LRMKVMMVMTYPDTA

SEQ ID NO: 242081 - protein, 15 aa, Artificial Sequence
  Description of Artificial Sequence: Synthetic peptide
  Seed: LRMKWMMAMKYPITA
LRMKVMMVMTYPETA

SEQ ID NO: 242082 - protein, 15 aa, Artificial Sequence
  Description of Artificial Sequence: Synthetic peptide
  Seed: LRMKWMMAMKYPITA
LRMKVMMVMTYPFTA

SEQ ID NO: 242083 - protein, 15 aa, Artificial Sequence
  Description of Artificial Sequence: Synthetic peptide
  Seed: LRMKWMMAMKYPITA
LRMKVMMVMTYPGTA

SEQ ID NO: 242084 - protein, 15 aa, Artificial Sequence
  Description of Artificial Sequence: Synthetic peptide
  Seed: LRMKWMMAMKYPITA
LRMKVMMVMTYPITA

SEQ ID NO: 242085 - protein, 15 aa, Artificial Sequence
  Description of Artificial Sequence: Synthetic peptide
  Seed: LRMKWMMAMKYPITA
LRMKVMMVMTYPLTA

SEQ ID NO: 242086 - protein, 15 aa, Artificial Sequence
  Description of Artificial Sequence: Synthetic peptide
  Seed: LRMKWMMAMKYPITA
LRMKVMMVMTYPMTA

SEQ ID NO: 242087 - protein, 15 aa, Artificial Sequence
  Description of Artificial Sequence: Synthetic peptide
  Seed: LRMKWMMAMKYPITA
LRMKVMMVMTYPNTA

SEQ ID NO: 242088 - protein, 15 aa, Artificial Sequence
  Description of Artificial Sequence: Synthetic peptide
  Seed: LRMKWMMAMKYPITA
LRMKVMMVMTYPQTA

SEQ ID NO: 242089 - protein, 15 aa, Artificial Sequence
  Description of Artificial Sequence: Synthetic peptide
  Seed: LRMKWMMAMKYPITA
LRMKVMMVMTYPRTA

SEQ ID NO: 242090 - protein, 15 aa, Artificial Sequence
  Description of Artificial Sequence: Synthetic peptide
  Seed: LRMKWMMAMKYPITA
LRMKVMMVMTYPSTA

SEQ ID NO: 242091 - protein, 15 aa, Artificial Sequence
  Description of Artificial Sequence: Synthetic peptide
  Seed: LRMKWMMAMKYPITA
LRMKVMMVMTYPTTA

SEQ ID NO: 242092 - protein, 15 aa, Artificial Sequence
  Description of Artificial Sequence: Synthetic peptide
  Seed: LRMKWMMAMKYPITA
LRMKVMMVMTYPVTA

SEQ ID NO: 242093 - protein, 15 aa, Artificial Sequence
  Description of Artificial Sequence: Synthetic peptide
  Seed: LRMKWMMAMKYPITA
LRMKVMMVMVYPATA

SEQ ID NO: 242094 - protein, 15 aa, Artificial Sequence
  Description of Artificial Sequence: Synthetic peptide
  Seed: LRMKWMMAMKYPITA
LRMKVMMVMVYPGTA

SEQ ID NO: 242095 - protein, 15 aa, Artificial Sequence
  Description of Artificial Sequence: Synthetic peptide
  Seed: LRMKWMMAMKYPITA
LRMKVMMVMVYPMTA

SEQ ID NO: 242096 - protein, 15 aa, Artificial Sequence
  Description of Artificial Sequence: Synthetic peptide
  Seed: LRMKWMMAMKYPITA
LRMKVMMVMVYPNTA

SEQ ID NO: 242097 - protein, 15 aa, Artificial Sequence
  Description of Artificial Sequence: Synthetic peptide
  Seed: LRMKWMMAMKYPITA
LRMKVMMVMVYPSTA

SEQ ID NO: 242098 - protein, 15 aa, Artificial Sequence
  Description of Artificial Sequence: Synthetic peptide
  Seed: LRMKWMMAMKYPITA
LRMKVMMVMVYPTTA

SEQ ID NO: 242099 - protein, 15 aa, Artificial Sequence
  Description of Artificial Sequence: Synthetic peptide
  Seed: LRMKWMMAMKYPITA
LRMKVMMVMVYPVTA

SEQ ID NO: 242100 - protein, 15 aa, Artificial Sequence
  Description of Artificial Sequence: Synthetic peptide
  Seed: LRMKWMMAMKYPITA
LRMKVMMWMAYPATA

SEQ ID NO: 242101 - protein, 15 aa, Artificial Sequence
  Description of Artificial Sequence: Synthetic peptide
  Seed: LRMKWMMAMKYPITA
LRMKVMMWMAYPITA

SEQ ID NO: 242102 - protein, 15 aa, Artificial Sequence
  Description of Artificial Sequence: Synthetic peptide
  Seed: LRMKWMMAMKYPITA
LRMKVMMWMAYPLTA

SEQ ID NO: 242103 - protein, 15 aa, Artificial Sequence
  Description of Artificial Sequence: Synthetic peptide
  Seed: LRMKWMMAMKYPITA
LRMKVMMWMAYPMTA

SEQ ID NO: 242104 - protein, 15 aa, Artificial Sequence
  Description of Artificial Sequence: Synthetic peptide
  Seed: LRMKWMMAMKYPITA
LRMKVMMWMAYPRTA

SEQ ID NO: 242105 - protein, 15 aa, Artificial Sequence
  Description of Artificial Sequence: Synthetic peptide
  Seed: LRMKWMMAMKYPITA
LRMKVMMWMAYPVTA

SEQ ID NO: 242106 - protein, 15 aa, Artificial Sequence
  Description of Artificial Sequence: Synthetic peptide
  Seed: LRMKWMMAMKYPITA
LRMKVMMWMAYPYTA

SEQ ID NO: 242107 - protein, 15 aa, Artificial Sequence
  Description of Artificial Sequence: Synthetic peptide
  Seed: LRMKWMMAMKYPITA
LRMKVMMWMHYPFTA

SEQ ID NO: 242108 - protein, 15 aa, Artificial Sequence
  Description of Artificial Sequence: Synthetic peptide
  Seed: LRMKWMMAMKYPITA
LRMKVMMWMHYPLTA

SEQ ID NO: 242109 - protein, 15 aa, Artificial Sequence
  Description of Artificial Sequence: Synthetic peptide
  Seed: LRMKWMMAMKYPITA
LRMKVMMWMHYPMTA

SEQ ID NO: 242110 - protein, 15 aa, Artificial Sequence
  Description of Artificial Sequence: Synthetic peptide
  Seed: LRMKWMMAMKYPITA
LRMKVMMWMHYPVTA

SEQ ID NO: 242111 - protein, 15 aa, Artificial Sequence
  Description of Artificial Sequence: Synthetic peptide
  Seed: LRMKWMMAMKYPITA
LRMKVMMWMHYPYTA

SEQ ID NO: 242112 - protein, 15 aa, Artificial Sequence
  Description of Artificial Sequence: Synthetic peptide
  Seed: LRMKWMMAMKYPITA
LRMKVMMWMKYPATA

SEQ ID NO: 242113 - protein, 15 aa, Artificial Sequence
  Description of Artificial Sequence: Synthetic peptide
  Seed: LRMKWMMAMKYPITA
LRMKVMMWMKYPFTA

SEQ ID NO: 242114 - protein, 15 aa, Artificial Sequence
  Description of Artificial Sequence: Synthetic peptide
  Seed: LRMKWMMAMKYPITA
LRMKVMMWMKYPGTA

SEQ ID NO: 242115 - protein, 15 aa, Artificial Sequence
  Description of Artificial Sequence: Synthetic peptide
  Seed: LRMKWMMAMKYPITA
LRMKVMMWMKYPHTA

SEQ ID NO: 242116 - protein, 15 aa, Artificial Sequence
  Description of Artificial Sequence: Synthetic peptide
  Seed: LRMKWMMAMKYPITA
LRMKVMMWMKYPITA

SEQ ID NO: 242117 - protein, 15 aa, Artificial Sequence
  Description of Artificial Sequence: Synthetic peptide
  Seed: LRMKWMMAMKYPITA
LRMKVMMWMKYPKTA

SEQ ID NO: 242118 - protein, 15 aa, Artificial Sequence
  Description of Artificial Sequence: Synthetic peptide
  Seed: LRMKWMMAMKYPITA
LRMKVMMWMKYPLTA

SEQ ID NO: 242119 - protein, 15 aa, Artificial Sequence
  Description of Artificial Sequence: Synthetic peptide
  Seed: LRMKWMMAMKYPITA
LRMKVMMWMKYPMTA

SEQ ID NO: 242120 - protein, 15 aa, Artificial Sequence
  Description of Artificial Sequence: Synthetic peptide
  Seed: LRMKWMMAMKYPITA
LRMKVMMWMKYPRTA

SEQ ID NO: 242121 - protein, 15 aa, Artificial Sequence
  Description of Artificial Sequence: Synthetic peptide
  Seed: LRMKWMMAMKYPITA
LRMKVMMWMKYPSTA

SEQ ID NO: 242122 - protein, 15 aa, Artificial Sequence
  Description of Artificial Sequence: Synthetic peptide
  Seed: LRMKWMMAMKYPITA
LRMKVMMWMKYPVTA

SEQ ID NO: 242123 - protein, 15 aa, Artificial Sequence
  Description of Artificial Sequence: Synthetic peptide
  Seed: LRMKWMMAMKYPITA
LRMKVMMWMKYPYTA

SEQ ID NO: 242124 - protein, 15 aa, Artificial Sequence
  Description of Artificial Sequence: Synthetic peptide
  Seed: LRMKWMMAMKYPITA
LRMKVMMWMNYPITA

SEQ ID NO: 242125 - protein, 15 aa, Artificial Sequence
  Description of Artificial Sequence: Synthetic peptide
  Seed: LRMKWMMAMKYPITA
LRMKVMMWMNYPVTA

SEQ ID NO: 242126 - protein, 15 aa, Artificial Sequence
  Description of Artificial Sequence: Synthetic peptide
  Seed: LRMKWMMAMKYPITA
LRMKVMMWMPYPLTA

SEQ ID NO: 242127 - protein, 15 aa, Artificial Sequence
  Description of Artificial Sequence: Synthetic peptide
  Seed: LRMKWMMAMKYPITA
LRMKVMMWMPYPVTA

SEQ ID NO: 242128 - protein, 15 aa, Artificial Sequence
  Description of Artificial Sequence: Synthetic peptide
  Seed: LRMKWMMAMKYPITA
LRMKVMMWMPYPYTA

SEQ ID NO: 242129 - protein, 15 aa, Artificial Sequence
  Description of Artificial Sequence: Synthetic peptide
  Seed: LRMKWMMAMKYPITA
LRMKVMMWMRYPATA

SEQ ID NO: 242130 - protein, 15 aa, Artificial Sequence
  Description of Artificial Sequence: Synthetic peptide
  Seed: LRMKWMMAMKYPITA
LRMKVMMWMRYPFTA

SEQ ID NO: 242131 - protein, 15 aa, Artificial Sequence
  Description of Artificial Sequence: Synthetic peptide
  Seed: LRMKWMMAMKYPITA
LRMKVMMWMRYPGTA

SEQ ID NO: 242132 - protein, 15 aa, Artificial Sequence
  Description of Artificial Sequence: Synthetic peptide
  Seed: LRMKWMMAMKYPITA
LRMKVMMWMRYPHTA

SEQ ID NO: 242133 - protein, 15 aa, Artificial Sequence
  Description of Artificial Sequence: Synthetic peptide
  Seed: LRMKWMMAMKYPITA
LRMKVMMWMRYPITA

SEQ ID NO: 242134 - protein, 15 aa, Artificial Sequence
  Description of Artificial Sequence: Synthetic peptide
  Seed: LRMKWMMAMKYPITA
LRMKVMMWMRYPKTA

SEQ ID NO: 242135 - protein, 15 aa, Artificial Sequence
  Description of Artificial Sequence: Synthetic peptide
  Seed: LRMKWMMAMKYPITA
LRMKVMMWMRYPLTA

SEQ ID NO: 242136 - protein, 15 aa, Artificial Sequence
  Description of Artificial Sequence: Synthetic peptide
  Seed: LRMKWMMAMKYPITA
LRMKVMMWMRYPMTA

SEQ ID NO: 242137 - protein, 15 aa, Artificial Sequence
  Description of Artificial Sequence: Synthetic peptide
  Seed: LRMKWMMAMKYPITA
LRMKVMMWMRYPQTA

SEQ ID NO: 242138 - protein, 15 aa, Artificial Sequence
  Description of Artificial Sequence: Synthetic peptide
  Seed: LRMKWMMAMKYPITA
LRMKVMMWMRYPRTA

SEQ ID NO: 242139 - protein, 15 aa, Artificial Sequence
  Description of Artificial Sequence: Synthetic peptide
  Seed: LRMKWMMAMKYPITA
LRMKVMMWMRYPSTA

SEQ ID NO: 242140 - protein, 15 aa, Artificial Sequence
  Description of Artificial Sequence: Synthetic peptide
  Seed: LRMKWMMAMKYPITA
LRMKVMMWMRYPTTA

SEQ ID NO: 242141 - protein, 15 aa, Artificial Sequence
  Description of Artificial Sequence: Synthetic peptide
  Seed: LRMKWMMAMKYPITA
LRMKVMMWMRYPVTA

SEQ ID NO: 242142 - protein, 15 aa, Artificial Sequence
  Description of Artificial Sequence: Synthetic peptide
  Seed: LRMKWMMAMKYPITA
LRMKVMMWMRYPYTA

SEQ ID NO: 242143 - protein, 15 aa, Artificial Sequence
  Description of Artificial Sequence: Synthetic peptide
  Seed: LRMKWMMAMKYPITA
LRMKVMMWMSYPITA

SEQ ID NO: 242144 - protein, 15 aa, Artificial Sequence
  Description of Artificial Sequence: Synthetic peptide
  Seed: LRMKWMMAMKYPITA
LRMKVMMWMSYPLTA

SEQ ID NO: 242145 - protein, 15 aa, Artificial Sequence
  Description of Artificial Sequence: Synthetic peptide
  Seed: LRMKWMMAMKYPITA
LRMKVMMWMSYPVTA

SEQ ID NO: 242146 - protein, 15 aa, Artificial Sequence
  Description of Artificial Sequence: Synthetic peptide
  Seed: LRMKWMMAMKYPITA
LRMKVMMYMAYPATA

SEQ ID NO: 242147 - protein, 15 aa, Artificial Sequence
  Description of Artificial Sequence: Synthetic peptide
  Seed: LRMKWMMAMKYPITA
LRMKVMMYMAYPFTA

SEQ ID NO: 242148 - protein, 15 aa, Artificial Sequence
  Description of Artificial Sequence: Synthetic peptide
  Seed: LRMKWMMAMKYPITA
LRMKVMMYMAYPITA

SEQ ID NO: 242149 - protein, 15 aa, Artificial Sequence
  Description of Artificial Sequence: Synthetic peptide
  Seed: LRMKWMMAMKYPITA
LRMKVMMYMAYPKTA

SEQ ID NO: 242150 - protein, 15 aa, Artificial Sequence
  Description of Artificial Sequence: Synthetic peptide
  Seed: LRMKWMMAMKYPITA
LRMKVMMYMAYPLTA

SEQ ID NO: 242151 - protein, 15 aa, Artificial Sequence
  Description of Artificial Sequence: Synthetic peptide
  Seed: LRMKWMMAMKYPITA
LRMKVMMYMAYPMTA

SEQ ID NO: 242152 - protein, 15 aa, Artificial Sequence
  Description of Artificial Sequence: Synthetic peptide
  Seed: LRMKWMMAMKYPITA
LRMKVMMYMAYPRTA

SEQ ID NO: 242153 - protein, 15 aa, Artificial Sequence
  Description of Artificial Sequence: Synthetic peptide
  Seed: LRMKWMMAMKYPITA
LRMKVMMYMAYPSTA

SEQ ID NO: 242154 - protein, 15 aa, Artificial Sequence
  Description of Artificial Sequence: Synthetic peptide
  Seed: LRMKWMMAMKYPITA
LRMKVMMYMAYPTTA

SEQ ID NO: 242155 - protein, 15 aa, Artificial Sequence
  Description of Artificial Sequence: Synthetic peptide
  Seed: LRMKWMMAMKYPITA
LRMKVMMYMAYPVTA

SEQ ID NO: 242156 - protein, 15 aa, Artificial Sequence
  Description of Artificial Sequence: Synthetic peptide
  Seed: LRMKWMMAMKYPITA
LRMKVMMYMAYPYTA

SEQ ID NO: 242157 - protein, 15 aa, Artificial Sequence
  Description of Artificial Sequence: Synthetic peptide
  Seed: LRMKWMMAMKYPITA
LRMKVMMYMDYPATA

SEQ ID NO: 242158 - protein, 15 aa, Artificial Sequence
  Description of Artificial Sequence: Synthetic peptide
  Seed: LRMKWMMAMKYPITA
LRMKVMMYMGYPATA

SEQ ID NO: 242159 - protein, 15 aa, Artificial Sequence
  Description of Artificial Sequence: Synthetic peptide
  Seed: LRMKWMMAMKYPITA
LRMKVMMYMGYPITA

SEQ ID NO: 242160 - protein, 15 aa, Artificial Sequence
  Description of Artificial Sequence: Synthetic peptide
  Seed: LRMKWMMAMKYPITA
LRMKVMMYMGYPLTA

SEQ ID NO: 242161 - protein, 15 aa, Artificial Sequence
  Description of Artificial Sequence: Synthetic peptide
  Seed: LRMKWMMAMKYPITA
LRMKVMMYMGYPVTA

SEQ ID NO: 242162 - protein, 15 aa, Artificial Sequence
  Description of Artificial Sequence: Synthetic peptide
  Seed: LRMKWMMAMKYPITA
LRMKVMMYMHYPMTA

SEQ ID NO: 242163 - protein, 15 aa, Artificial Sequence
  Description of Artificial Sequence: Synthetic peptide
  Seed: LRMKWMMAMKYPITA
LRMKVMMYMHYPRTA

SEQ ID NO: 242164 - protein, 15 aa, Artificial Sequence
  Description of Artificial Sequence: Synthetic peptide
  Seed: LRMKWMMAMKYPITA
LRMKVMMYMHYPVTA

SEQ ID NO: 242165 - protein, 15 aa, Artificial Sequence
  Description of Artificial Sequence: Synthetic peptide
  Seed: LRMKWMMAMKYPITA
LRMKVMMYMHYPYTA

SEQ ID NO: 242166 - protein, 15 aa, Artificial Sequence
  Description of Artificial Sequence: Synthetic peptide
  Seed: LRMKWMMAMKYPITA
LRMKVMMYMKYPATA

SEQ ID NO: 242167 - protein, 15 aa, Artificial Sequence
  Description of Artificial Sequence: Synthetic peptide
  Seed: LRMKWMMAMKYPITA
LRMKVMMYMKYPFTA

SEQ ID NO: 242168 - protein, 15 aa, Artificial Sequence
  Description of Artificial Sequence: Synthetic peptide
  Seed: LRMKWMMAMKYPITA
LRMKVMMYMKYPHTA

SEQ ID NO: 242169 - protein, 15 aa, Artificial Sequence
  Description of Artificial Sequence: Synthetic peptide
  Seed: LRMKWMMAMKYPITA
LRMKVMMYMKYPITA

SEQ ID NO: 242170 - protein, 15 aa, Artificial Sequence
  Description of Artificial Sequence: Synthetic peptide
  Seed: LRMKWMMAMKYPITA
LRMKVMMYMKYPKTA

SEQ ID NO: 242171 - protein, 15 aa, Artificial Sequence
  Description of Artificial Sequence: Synthetic peptide
  Seed: LRMKWMMAMKYPITA
LRMKVMMYMKYPLTA

SEQ ID NO: 242172 - protein, 15 aa, Artificial Sequence
  Description of Artificial Sequence: Synthetic peptide
  Seed: LRMKWMMAMKYPITA
LRMKVMMYMKYPMTA

SEQ ID NO: 242173 - protein, 15 aa, Artificial Sequence
  Description of Artificial Sequence: Synthetic peptide
  Seed: LRMKWMMAMKYPITA
LRMKVMMYMKYPRTA

SEQ ID NO: 242174 - protein, 15 aa, Artificial Sequence
  Description of Artificial Sequence: Synthetic peptide
  Seed: LRMKWMMAMKYPITA
LRMKVMMYMKYPSTA

SEQ ID NO: 242175 - protein, 15 aa, Artificial Sequence
  Description of Artificial Sequence: Synthetic peptide
  Seed: LRMKWMMAMKYPITA
LRMKVMMYMKYPVTA

SEQ ID NO: 242176 - protein, 15 aa, Artificial Sequence
  Description of Artificial Sequence: Synthetic peptide
  Seed: LRMKWMMAMKYPITA
LRMKVMMYMKYPYTA

SEQ ID NO: 242177 - protein, 15 aa, Artificial Sequence
  Description of Artificial Sequence: Synthetic peptide
  Seed: LRMKWMMAMKYPITA
LRMKVMMYMNYPITA

SEQ ID NO: 242178 - protein, 15 aa, Artificial Sequence
  Description of Artificial Sequence: Synthetic peptide
  Seed: LRMKWMMAMKYPITA
LRMKVMMYMNYPLTA

SEQ ID NO: 242179 - protein, 15 aa, Artificial Sequence
  Description of Artificial Sequence: Synthetic peptide
  Seed: LRMKWMMAMKYPITA
LRMKVMMYMNYPMTA

SEQ ID NO: 242180 - protein, 15 aa, Artificial Sequence
  Description of Artificial Sequence: Synthetic peptide
  Seed: LRMKWMMAMKYPITA
LRMKVMMYMNYPRTA

SEQ ID NO: 242181 - protein, 15 aa, Artificial Sequence
  Description of Artificial Sequence: Synthetic peptide
  Seed: LRMKWMMAMKYPITA
LRMKVMMYMNYPVTA

SEQ ID NO: 242182 - protein, 15 aa, Artificial Sequence
  Description of Artificial Sequence: Synthetic peptide
  Seed: LRMKWMMAMKYPITA
LRMKVMMYMPYPFTA

SEQ ID NO: 242183 - protein, 15 aa, Artificial Sequence
  Description of Artificial Sequence: Synthetic peptide
  Seed: LRMKWMMAMKYPITA
LRMKVMMYMPYPITA

SEQ ID NO: 242184 - protein, 15 aa, Artificial Sequence
  Description of Artificial Sequence: Synthetic peptide
  Seed: LRMKWMMAMKYPITA
LRMKVMMYMPYPLTA

SEQ ID NO: 242185 - protein, 15 aa, Artificial Sequence
  Description of Artificial Sequence: Synthetic peptide
  Seed: LRMKWMMAMKYPITA
LRMKVMMYMPYPMTA

SEQ ID NO: 242186 - protein, 15 aa, Artificial Sequence
  Description of Artificial Sequence: Synthetic peptide
  Seed: LRMKWMMAMKYPITA
LRMKVMMYMPYPRTA

SEQ ID NO: 242187 - protein, 15 aa, Artificial Sequence
  Description of Artificial Sequence: Synthetic peptide
  Seed: LRMKWMMAMKYPITA
LRMKVMMYMPYPVTA

SEQ ID NO: 242188 - protein, 15 aa, Artificial Sequence
  Description of Artificial Sequence: Synthetic peptide
  Seed: LRMKWMMAMKYPITA
LRMKVMMYMPYPYTA

SEQ ID NO: 242189 - protein, 15 aa, Artificial Sequence
  Description of Artificial Sequence: Synthetic peptide
  Seed: LRMKWMMAMKYPITA
LRMKVMMYMRYPATA

SEQ ID NO: 242190 - protein, 15 aa, Artificial Sequence
  Description of Artificial Sequence: Synthetic peptide
  Seed: LRMKWMMAMKYPITA
LRMKVMMYMRYPETA

SEQ ID NO: 242191 - protein, 15 aa, Artificial Sequence
  Description of Artificial Sequence: Synthetic peptide
  Seed: LRMKWMMAMKYPITA
LRMKVMMYMRYPFTA

SEQ ID NO: 242192 - protein, 15 aa, Artificial Sequence
  Description of Artificial Sequence: Synthetic peptide
  Seed: LRMKWMMAMKYPITA
LRMKVMMYMRYPGTA

SEQ ID NO: 242193 - protein, 15 aa, Artificial Sequence
  Description of Artificial Sequence: Synthetic peptide
  Seed: LRMKWMMAMKYPITA
LRMKVMMYMRYPHTA

SEQ ID NO: 242194 - protein, 15 aa, Artificial Sequence
  Description of Artificial Sequence: Synthetic peptide
  Seed: LRMKWMMAMKYPITA
LRMKVMMYMRYPITA

SEQ ID NO: 242195 - protein, 15 aa, Artificial Sequence
  Description of Artificial Sequence: Synthetic peptide
  Seed: LRMKWMMAMKYPITA
LRMKVMMYMRYPKTA

SEQ ID NO: 242196 - protein, 15 aa, Artificial Sequence
  Description of Artificial Sequence: Synthetic peptide
  Seed: LRMKWMMAMKYPITA
LRMKVMMYMRYPLTA

SEQ ID NO: 242197 - protein, 15 aa, Artificial Sequence
  Description of Artificial Sequence: Synthetic peptide
  Seed: LRMKWMMAMKYPITA
LRMKVMMYMRYPMTA

SEQ ID NO: 242198 - protein, 15 aa, Artificial Sequence
  Description of Artificial Sequence: Synthetic peptide
  Seed: LRMKWMMAMKYPITA
LRMKVMMYMRYPPTA

SEQ ID NO: 242199 - protein, 15 aa, Artificial Sequence
  Description of Artificial Sequence: Synthetic peptide
  Seed: LRMKWMMAMKYPITA
LRMKVMMYMRYPQTA

SEQ ID NO: 242200 - protein, 15 aa, Artificial Sequence
  Description of Artificial Sequence: Synthetic peptide
  Seed: LRMKWMMAMKYPITA
LRMKVMMYMRYPRTA

SEQ ID NO: 242201 - protein, 15 aa, Artificial Sequence
  Description of Artificial Sequence: Synthetic peptide
  Seed: LRMKWMMAMKYPITA
LRMKVMMYMRYPSTA

SEQ ID NO: 242202 - protein, 15 aa, Artificial Sequence
  Description of Artificial Sequence: Synthetic peptide
  Seed: LRMKWMMAMKYPITA
LRMKVMMYMRYPTTA

SEQ ID NO: 242203 - protein, 15 aa, Artificial Sequence
  Description of Artificial Sequence: Synthetic peptide
  Seed: LRMKWMMAMKYPITA
LRMKVMMYMRYPVTA

SEQ ID NO: 242204 - protein, 15 aa, Artificial Sequence
  Description of Artificial Sequence: Synthetic peptide
  Seed: LRMKWMMAMKYPITA
LRMKVMMYMRYPYTA

SEQ ID NO: 242205 - protein, 15 aa, Artificial Sequence
  Description of Artificial Sequence: Synthetic peptide
  Seed: LRMKWMMAMKYPITA
LRMKVMMYMSYPATA

SEQ ID NO: 242206 - protein, 15 aa, Artificial Sequence
  Description of Artificial Sequence: Synthetic peptide
  Seed: LRMKWMMAMKYPITA
LRMKVMMYMSYPITA

SEQ ID NO: 242207 - protein, 15 aa, Artificial Sequence
  Description of Artificial Sequence: Synthetic peptide
  Seed: LRMKWMMAMKYPITA
LRMKVMMYMSYPLTA

SEQ ID NO: 242208 - protein, 15 aa, Artificial Sequence
  Description of Artificial Sequence: Synthetic peptide
  Seed: LRMKWMMAMKYPITA
LRMKVMMYMSYPMTA

SEQ ID NO: 242209 - protein, 15 aa, Artificial Sequence
  Description of Artificial Sequence: Synthetic peptide
  Seed: LRMKWMMAMKYPITA
LRMKVMMYMSYPRTA

SEQ ID NO: 242210 - protein, 15 aa, Artificial Sequence
  Description of Artificial Sequence: Synthetic peptide
  Seed: LRMKWMMAMKYPITA
LRMKVMMYMSYPVTA

SEQ ID NO: 242211 - protein, 15 aa, Artificial Sequence
  Description of Artificial Sequence: Synthetic peptide
  Seed: LRMKWMMAMKYPITA
LRMKVMMYMTYPITA

SEQ ID NO: 242212 - protein, 15 aa, Artificial Sequence
  Description of Artificial Sequence: Synthetic peptide
  Seed: LRMKWMMAMKYPITA
LRMKVMMYMTYPLTA

SEQ ID NO: 242213 - protein, 15 aa, Artificial Sequence
  Description of Artificial Sequence: Synthetic peptide
  Seed: LRMKWMMAMKYPITA
LRMKVMMYMTYPVTA

SEQ ID NO: 242214 - protein, 15 aa, Artificial Sequence
  Description of Artificial Sequence: Synthetic peptide
  Seed: LRMKWMMAMKYPITA
LRMKWMMAMAYPATA

SEQ ID NO: 242215 - protein, 15 aa, Artificial Sequence
  Description of Artificial Sequence: Synthetic peptide
  Seed: LRMKWMMAMKYPITA
LRMKWMMAMAYPCTA

SEQ ID NO: 242216 - protein, 15 aa, Artificial Sequence
  Description of Artificial Sequence: Synthetic peptide
  Seed: LRMKWMMAMKYPITA
LRMKWMMAMAYPDTA

SEQ ID NO: 242217 - protein, 15 aa, Artificial Sequence
  Description of Artificial Sequence: Synthetic peptide
  Seed: LRMKWMMAMKYPITA
LRMKWMMAMAYPETA

SEQ ID NO: 242218 - protein, 15 aa, Artificial Sequence
  Description of Artificial Sequence: Synthetic peptide
  Seed: LRMKWMMAMKYPITA
LRMKWMMAMAYPFTA

SEQ ID NO: 242219 - protein, 15 aa, Artificial Sequence
  Description of Artificial Sequence: Synthetic peptide
  Seed: LRMKWMMAMKYPITA
LRMKWMMAMAYPGTA

SEQ ID NO: 242220 - protein, 15 aa, Artificial Sequence
  Description of Artificial Sequence: Synthetic peptide
  Seed: LRMKWMMAMKYPITA
LRMKWMMAMAYPHTA

SEQ ID NO: 242221 - protein, 15 aa, Artificial Sequence
  Description of Artificial Sequence: Synthetic peptide
  Seed: LRMKWMMAMKYPITA
LRMKWMMAMAYPKTA

SEQ ID NO: 242222 - protein, 15 aa, Artificial Sequence
  Description of Artificial Sequence: Synthetic peptide
  Seed: LRMKWMMAMKYPITA
LRMKWMMAMAYPLTA

SEQ ID NO: 242223 - protein, 15 aa, Artificial Sequence
  Description of Artificial Sequence: Synthetic peptide
  Seed: LRMKWMMAMKYPITA
LRMKWMMAMAYPMTA

SEQ ID NO: 242224 - protein, 15 aa, Artificial Sequence
  Description of Artificial Sequence: Synthetic peptide
  Seed: LRMKWMMAMKYPITA
LRMKWMMAMAYPNTA

SEQ ID NO: 242225 - protein, 15 aa, Artificial Sequence
  Description of Artificial Sequence: Synthetic peptide
  Seed: LRMKWMMAMKYPITA
LRMKWMMAMAYPPTA

SEQ ID NO: 242226 - protein, 15 aa, Artificial Sequence
  Description of Artificial Sequence: Synthetic peptide
  Seed: LRMKWMMAMKYPITA
LRMKWMMAMAYPQTA

SEQ ID NO: 242227 - protein, 15 aa, Artificial Sequence
  Description of Artificial Sequence: Synthetic peptide
  Seed: LRMKWMMAMKYPITA
LRMKWMMAMAYPRTA

SEQ ID NO: 242228 - protein, 15 aa, Artificial Sequence
  Description of Artificial Sequence: Synthetic peptide
  Seed: LRMKWMMAMKYPITA
LRMKWMMAMAYPSTA

SEQ ID NO: 242229 - protein, 15 aa, Artificial Sequence
  Description of Artificial Sequence: Synthetic peptide
  Seed: LRMKWMMAMKYPITA
LRMKWMMAMAYPTTA

SEQ ID NO: 242230 - protein, 15 aa, Artificial Sequence
  Description of Artificial Sequence: Synthetic peptide
  Seed: LRMKWMMAMKYPITA
LRMKWMMAMAYPVTA

SEQ ID NO: 242231 - protein, 15 aa, Artificial Sequence
  Description of Artificial Sequence: Synthetic peptide
  Seed: LRMKWMMAMKYPITA
LRMKWMMAMAYPWTA

SEQ ID NO: 242232 - protein, 15 aa, Artificial Sequence
  Description of Artificial Sequence: Synthetic peptide
  Seed: LRMKWMMAMKYPITA
LRMKWMMAMAYPYTA

SEQ ID NO: 242233 - protein, 15 aa, Artificial Sequence
  Description of Artificial Sequence: Synthetic peptide
  Seed: LRMKWMMAMKYPITA
LRMKWMMAMCYPATA

SEQ ID NO: 242234 - protein, 15 aa, Artificial Sequence
  Description of Artificial Sequence: Synthetic peptide
  Seed: LRMKWMMAMKYPITA
LRMKWMMAMCYPGTA

SEQ ID NO: 242235 - protein, 15 aa, Artificial Sequence
  Description of Artificial Sequence: Synthetic peptide
  Seed: LRMKWMMAMKYPITA
LRMKWMMAMCYPLTA

SEQ ID NO: 242236 - protein, 15 aa, Artificial Sequence
  Description of Artificial Sequence: Synthetic peptide
  Seed: LRMKWMMAMKYPITA
LRMKWMMAMCYPMTA

SEQ ID NO: 242237 - protein, 15 aa, Artificial Sequence
  Description of Artificial Sequence: Synthetic peptide
  Seed: LRMKWMMAMKYPITA
LRMKWMMAMCYPNTA

SEQ ID NO: 242238 - protein, 15 aa, Artificial Sequence
  Description of Artificial Sequence: Synthetic peptide
  Seed: LRMKWMMAMKYPITA
LRMKWMMAMCYPRTA

SEQ ID NO: 242239 - protein, 15 aa, Artificial Sequence
  Description of Artificial Sequence: Synthetic peptide
  Seed: LRMKWMMAMKYPITA
LRMKWMMAMCYPSTA

SEQ ID NO: 242240 - protein, 15 aa, Artificial Sequence
  Description of Artificial Sequence: Synthetic peptide
  Seed: LRMKWMMAMKYPITA
LRMKWMMAMCYPTTA

SEQ ID NO: 242241 - protein, 15 aa, Artificial Sequence
  Description of Artificial Sequence: Synthetic peptide
  Seed: LRMKWMMAMKYPITA
LRMKWMMAMCYPVTA

SEQ ID NO: 242242 - protein, 15 aa, Artificial Sequence
  Description of Artificial Sequence: Synthetic peptide
  Seed: LRMKWMMAMKYPITA
LRMKWMMAMDYPATA

SEQ ID NO: 242243 - protein, 15 aa, Artificial Sequence
  Description of Artificial Sequence: Synthetic peptide
  Seed: LRMKWMMAMKYPITA
LRMKWMMAMDYPLTA

SEQ ID NO: 242244 - protein, 15 aa, Artificial Sequence
  Description of Artificial Sequence: Synthetic peptide
  Seed: LRMKWMMAMKYPITA
LRMKWMMAMDYPMTA

SEQ ID NO: 242245 - protein, 15 aa, Artificial Sequence
  Description of Artificial Sequence: Synthetic peptide
  Seed: LRMKWMMAMKYPITA
LRMKWMMAMDYPNTA

SEQ ID NO: 242246 - protein, 15 aa, Artificial Sequence
  Description of Artificial Sequence: Synthetic peptide
  Seed: LRMKWMMAMKYPITA
LRMKWMMAMDYPSTA

SEQ ID NO: 242247 - protein, 15 aa, Artificial Sequence
  Description of Artificial Sequence: Synthetic peptide
  Seed: LRMKWMMAMKYPITA
LRMKWMMAMDYPTTA

SEQ ID NO: 242248 - protein, 15 aa, Artificial Sequence
  Description of Artificial Sequence: Synthetic peptide
  Seed: LRMKWMMAMKYPITA
LRMKWMMAMDYPVTA

SEQ ID NO: 242249 - protein, 15 aa, Artificial Sequence
  Description of Artificial Sequence: Synthetic peptide
  Seed: LRMKWMMAMKYPITA
LRMKWMMAMEYPATA

SEQ ID NO: 242250 - protein, 15 aa, Artificial Sequence
  Description of Artificial Sequence: Synthetic peptide
  Seed: LRMKWMMAMKYPITA
LRMKWMMAMEYPLTA

SEQ ID NO: 242251 - protein, 15 aa, Artificial Sequence
  Description of Artificial Sequence: Synthetic peptide
  Seed: LRMKWMMAMKYPITA
LRMKWMMAMEYPMTA

SEQ ID NO: 242252 - protein, 15 aa, Artificial Sequence
  Description of Artificial Sequence: Synthetic peptide
  Seed: LRMKWMMAMKYPITA
LRMKWMMAMEYPNTA

SEQ ID NO: 242253 - protein, 15 aa, Artificial Sequence
  Description of Artificial Sequence: Synthetic peptide
  Seed: LRMKWMMAMKYPITA
LRMKWMMAMEYPSTA

SEQ ID NO: 242254 - protein, 15 aa, Artificial Sequence
  Description of Artificial Sequence: Synthetic peptide
  Seed: LRMKWMMAMKYPITA
LRMKWMMAMEYPTTA

SEQ ID NO: 242255 - protein, 15 aa, Artificial Sequence
  Description of Artificial Sequence: Synthetic peptide
  Seed: LRMKWMMAMKYPITA
LRMKWMMAMEYPVTA

SEQ ID NO: 242256 - protein, 15 aa, Artificial Sequence
  Description of Artificial Sequence: Synthetic peptide
  Seed: LRMKWMMAMKYPITA
LRMKWMMAMFYPATA

SEQ ID NO: 242257 - protein, 15 aa, Artificial Sequence
  Description of Artificial Sequence: Synthetic peptide
  Seed: LRMKWMMAMKYPITA
LRMKWMMAMFYPLTA

SEQ ID NO: 242258 - protein, 15 aa, Artificial Sequence
  Description of Artificial Sequence: Synthetic peptide
  Seed: LRMKWMMAMKYPITA
LRMKWMMAMFYPMTA

SEQ ID NO: 242259 - protein, 15 aa, Artificial Sequence
  Description of Artificial Sequence: Synthetic peptide
  Seed: LRMKWMMAMKYPITA
LRMKWMMAMFYPNTA

SEQ ID NO: 242260 - protein, 15 aa, Artificial Sequence
  Description of Artificial Sequence: Synthetic peptide
  Seed: LRMKWMMAMKYPITA
LRMKWMMAMFYPSTA

SEQ ID NO: 242261 - protein, 15 aa, Artificial Sequence
  Description of Artificial Sequence: Synthetic peptide
  Seed: LRMKWMMAMKYPITA
LRMKWMMAMFYPVTA

SEQ ID NO: 242262 - protein, 15 aa, Artificial Sequence
  Description of Artificial Sequence: Synthetic peptide
  Seed: LRMKWMMAMKYPITA
LRMKWMMAMGYPATA

SEQ ID NO: 242263 - protein, 15 aa, Artificial Sequence
  Description of Artificial Sequence: Synthetic peptide
  Seed: LRMKWMMAMKYPITA
LRMKWMMAMGYPCTA

SEQ ID NO: 242264 - protein, 15 aa, Artificial Sequence
  Description of Artificial Sequence: Synthetic peptide
  Seed: LRMKWMMAMKYPITA
LRMKWMMAMGYPDTA

SEQ ID NO: 242265 - protein, 15 aa, Artificial Sequence
  Description of Artificial Sequence: Synthetic peptide
  Seed: LRMKWMMAMKYPITA
LRMKWMMAMGYPETA

SEQ ID NO: 242266 - protein, 15 aa, Artificial Sequence
  Description of Artificial Sequence: Synthetic peptide
  Seed: LRMKWMMAMKYPITA
LRMKWMMAMGYPFTA

SEQ ID NO: 242267 - protein, 15 aa, Artificial Sequence
  Description of Artificial Sequence: Synthetic peptide
  Seed: LRMKWMMAMKYPITA
LRMKWMMAMGYPGTA

SEQ ID NO: 242268 - protein, 15 aa, Artificial Sequence
  Description of Artificial Sequence: Synthetic peptide
  Seed: LRMKWMMAMKYPITA
LRMKWMMAMGYPHTA

SEQ ID NO: 242269 - protein, 15 aa, Artificial Sequence
  Description of Artificial Sequence: Synthetic peptide
  Seed: LRMKWMMAMKYPITA
LRMKWMMAMGYPKTA

SEQ ID NO: 242270 - protein, 15 aa, Artificial Sequence
  Description of Artificial Sequence: Synthetic peptide
  Seed: LRMKWMMAMKYPITA
LRMKWMMAMGYPLTA

SEQ ID NO: 242271 - protein, 15 aa, Artificial Sequence
  Description of Artificial Sequence: Synthetic peptide
  Seed: LRMKWMMAMKYPITA
LRMKWMMAMGYPMTA

SEQ ID NO: 242272 - protein, 15 aa, Artificial Sequence
  Description of Artificial Sequence: Synthetic peptide
  Seed: LRMKWMMAMKYPITA
LRMKWMMAMGYPNTA

SEQ ID NO: 242273 - protein, 15 aa, Artificial Sequence
  Description of Artificial Sequence: Synthetic peptide
  Seed: LRMKWMMAMKYPITA
LRMKWMMAMGYPPTA

SEQ ID NO: 242274 - protein, 15 aa, Artificial Sequence
  Description of Artificial Sequence: Synthetic peptide
  Seed: LRMKWMMAMKYPITA
LRMKWMMAMGYPQTA

SEQ ID NO: 242275 - protein, 15 aa, Artificial Sequence
  Description of Artificial Sequence: Synthetic peptide
  Seed: LRMKWMMAMKYPITA
LRMKWMMAMGYPRTA

SEQ ID NO: 242276 - protein, 15 aa, Artificial Sequence
  Description of Artificial Sequence: Synthetic peptide
  Seed: LRMKWMMAMKYPITA
LRMKWMMAMGYPSTA

SEQ ID NO: 242277 - protein, 15 aa, Artificial Sequence
  Description of Artificial Sequence: Synthetic peptide
  Seed: LRMKWMMAMKYPITA
LRMKWMMAMGYPTTA

SEQ ID NO: 242278 - protein, 15 aa, Artificial Sequence
  Description of Artificial Sequence: Synthetic peptide
  Seed: LRMKWMMAMKYPITA
LRMKWMMAMGYPVTA

SEQ ID NO: 242279 - protein, 15 aa, Artificial Sequence
  Description of Artificial Sequence: Synthetic peptide
  Seed: LRMKWMMAMKYPITA
LRMKWMMAMGYPWTA

SEQ ID NO: 242280 - protein, 15 aa, Artificial Sequence
  Description of Artificial Sequence: Synthetic peptide
  Seed: LRMKWMMAMKYPITA
LRMKWMMAMGYPYTA

SEQ ID NO: 242281 - protein, 15 aa, Artificial Sequence
  Description of Artificial Sequence: Synthetic peptide
  Seed: LRMKWMMAMKYPITA
LRMKWMMAMHYPATA

SEQ ID NO: 242282 - protein, 15 aa, Artificial Sequence
  Description of Artificial Sequence: Synthetic peptide
  Seed: LRMKWMMAMKYPITA
LRMKWMMAMHYPCTA

SEQ ID NO: 242283 - protein, 15 aa, Artificial Sequence
  Description of Artificial Sequence: Synthetic peptide
  Seed: LRMKWMMAMKYPITA
LRMKWMMAMHYPFTA

SEQ ID NO: 242284 - protein, 15 aa, Artificial Sequence
  Description of Artificial Sequence: Synthetic peptide
  Seed: LRMKWMMAMKYPITA
LRMKWMMAMHYPGTA

SEQ ID NO: 242285 - protein, 15 aa, Artificial Sequence
  Description of Artificial Sequence: Synthetic peptide
  Seed: LRMKWMMAMKYPITA
LRMKWMMAMHYPHTA

SEQ ID NO: 242286 - protein, 15 aa, Artificial Sequence
  Description of Artificial Sequence: Synthetic peptide
  Seed: LRMKWMMAMKYPITA
LRMKWMMAMHYPLTA

SEQ ID NO: 242287 - protein, 15 aa, Artificial Sequence
  Description of Artificial Sequence: Synthetic peptide
  Seed: LRMKWMMAMKYPITA
LRMKWMMAMHYPMTA

SEQ ID NO: 242288 - protein, 15 aa, Artificial Sequence
  Description of Artificial Sequence: Synthetic peptide
  Seed: LRMKWMMAMKYPITA
LRMKWMMAMHYPNTA

SEQ ID NO: 242289 - protein, 15 aa, Artificial Sequence
  Description of Artificial Sequence: Synthetic peptide
  Seed: LRMKWMMAMKYPITA
LRMKWMMAMHYPQTA

SEQ ID NO: 242290 - protein, 15 aa, Artificial Sequence
  Description of Artificial Sequence: Synthetic peptide
  Seed: LRMKWMMAMKYPITA
LRMKWMMAMHYPRTA

SEQ ID NO: 242291 - protein, 15 aa, Artificial Sequence
  Description of Artificial Sequence: Synthetic peptide
  Seed: LRMKWMMAMKYPITA
LRMKWMMAMHYPSTA

SEQ ID NO: 242292 - protein, 15 aa, Artificial Sequence
  Description of Artificial Sequence: Synthetic peptide
  Seed: LRMKWMMAMKYPITA
LRMKWMMAMHYPTTA

SEQ ID NO: 242293 - protein, 15 aa, Artificial Sequence
  Description of Artificial Sequence: Synthetic peptide
  Seed: LRMKWMMAMKYPITA
LRMKWMMAMHYPVTA

SEQ ID NO: 242294 - protein, 15 aa, Artificial Sequence
  Description of Artificial Sequence: Synthetic peptide
  Seed: LRMKWMMAMKYPITA
LRMKWMMAMHYPWTA

SEQ ID NO: 242295 - protein, 15 aa, Artificial Sequence
  Description of Artificial Sequence: Synthetic peptide
  Seed: LRMKWMMAMKYPITA
LRMKWMMAMHYPYTA

SEQ ID NO: 242296 - protein, 15 aa, Artificial Sequence
  Description of Artificial Sequence: Synthetic peptide
  Seed: LRMKWMMAMKYPITA
LRMKWMMAMIYPATA

SEQ ID NO: 242297 - protein, 15 aa, Artificial Sequence
  Description of Artificial Sequence: Synthetic peptide
  Seed: LRMKWMMAMKYPITA
LRMKWMMAMIYPCTA

SEQ ID NO: 242298 - protein, 15 aa, Artificial Sequence
  Description of Artificial Sequence: Synthetic peptide
  Seed: LRMKWMMAMKYPITA
LRMKWMMAMIYPDTA

SEQ ID NO: 242299 - protein, 15 aa, Artificial Sequence
  Description of Artificial Sequence: Synthetic peptide
  Seed: LRMKWMMAMKYPITA
LRMKWMMAMIYPETA

SEQ ID NO: 242300 - protein, 15 aa, Artificial Sequence
  Description of Artificial Sequence: Synthetic peptide
  Seed: LRMKWMMAMKYPITA
LRMKWMMAMIYPFTA

SEQ ID NO: 242301 - protein, 15 aa, Artificial Sequence
  Description of Artificial Sequence: Synthetic peptide
  Seed: LRMKWMMAMKYPITA
LRMKWMMAMIYPGTA

SEQ ID NO: 242302 - protein, 15 aa, Artificial Sequence
  Description of Artificial Sequence: Synthetic peptide
  Seed: LRMKWMMAMKYPITA
LRMKWMMAMIYPHTA

SEQ ID NO: 242303 - protein, 15 aa, Artificial Sequence
  Description of Artificial Sequence: Synthetic peptide
  Seed: LRMKWMMAMKYPITA
LRMKWMMAMIYPKTA

SEQ ID NO: 242304 - protein, 15 aa, Artificial Sequence
  Description of Artificial Sequence: Synthetic peptide
  Seed: LRMKWMMAMKYPITA
LRMKWMMAMIYPLTA

SEQ ID NO: 242305 - protein, 15 aa, Artificial Sequence
  Description of Artificial Sequence: Synthetic peptide
  Seed: LRMKWMMAMKYPITA
LRMKWMMAMIYPMTA

SEQ ID NO: 242306 - protein, 15 aa, Artificial Sequence
  Description of Artificial Sequence: Synthetic peptide
  Seed: LRMKWMMAMKYPITA
LRMKWMMAMIYPNTA

SEQ ID NO: 242307 - protein, 15 aa, Artificial Sequence
  Description of Artificial Sequence: Synthetic peptide
  Seed: LRMKWMMAMKYPITA
LRMKWMMAMIYPPTA

SEQ ID NO: 242308 - protein, 15 aa, Artificial Sequence
  Description of Artificial Sequence: Synthetic peptide
  Seed: LRMKWMMAMKYPITA
LRMKWMMAMIYPQTA

SEQ ID NO: 242309 - protein, 15 aa, Artificial Sequence
  Description of Artificial Sequence: Synthetic peptide
  Seed: LRMKWMMAMKYPITA
LRMKWMMAMIYPRTA

SEQ ID NO: 242310 - protein, 15 aa, Artificial Sequence
  Description of Artificial Sequence: Synthetic peptide
  Seed: LRMKWMMAMKYPITA
LRMKWMMAMIYPSTA

SEQ ID NO: 242311 - protein, 15 aa, Artificial Sequence
  Description of Artificial Sequence: Synthetic peptide
  Seed: LRMKWMMAMKYPITA
LRMKWMMAMIYPTTA

SEQ ID NO: 242312 - protein, 15 aa, Artificial Sequence
  Description of Artificial Sequence: Synthetic peptide
  Seed: LRMKWMMAMKYPITA
LRMKWMMAMIYPVTA

SEQ ID NO: 242313 - protein, 15 aa, Artificial Sequence
  Description of Artificial Sequence: Synthetic peptide
  Seed: LRMKWMMAMKYPITA
LRMKWMMAMIYPYTA

SEQ ID NO: 242314 - protein, 15 aa, Artificial Sequence
  Description of Artificial Sequence: Synthetic peptide
  Seed: LRMKWMMAMKYPITA
LRMKWMMAMKYPATA

SEQ ID NO: 242315 - protein, 15 aa, Artificial Sequence
  Description of Artificial Sequence: Synthetic peptide
  Seed: LRMKWMMAMKYPITA
LRMKWMMAMKYPFTA

SEQ ID NO: 242316 - protein, 15 aa, Artificial Sequence
  Description of Artificial Sequence: Synthetic peptide
  Seed: LRMKWMMAMKYPITA
LRMKWMMAMKYPGTA

SEQ ID NO: 242317 - protein, 15 aa, Artificial Sequence
  Description of Artificial Sequence: Synthetic peptide
  Seed: LRMKWMMAMKYPITA
LRMKWMMAMKYPHTA

SEQ ID NO: 242318 - protein, 15 aa, Artificial Sequence
  Description of Artificial Sequence: Synthetic peptide
  Seed: LRMKWMMAMKYPITA
LRMKWMMAMKYPKTA

SEQ ID NO: 242319 - protein, 15 aa, Artificial Sequence
  Description of Artificial Sequence: Synthetic peptide
  Seed: LRMKWMMAMKYPITA
LRMKWMMAMKYPLTA

SEQ ID NO: 242320 - protein, 15 aa, Artificial Sequence
  Description of Artificial Sequence: Synthetic peptide
  Seed: LRMKWMMAMKYPITA
LRMKWMMAMKYPMTA

SEQ ID NO: 242321 - protein, 15 aa, Artificial Sequence
  Description of Artificial Sequence: Synthetic peptide
  Seed: LRMKWMMAMKYPITA
LRMKWMMAMKYPNTA

SEQ ID NO: 242322 - protein, 15 aa, Artificial Sequence
  Description of Artificial Sequence: Synthetic peptide
  Seed: LRMKWMMAMKYPITA
LRMKWMMAMKYPPTA

SEQ ID NO: 242323 - protein, 15 aa, Artificial Sequence
  Description of Artificial Sequence: Synthetic peptide
  Seed: LRMKWMMAMKYPITA
LRMKWMMAMKYPQTA

SEQ ID NO: 242324 - protein, 15 aa, Artificial Sequence
  Description of Artificial Sequence: Synthetic peptide
  Seed: LRMKWMMAMKYPITA
LRMKWMMAMKYPRTA

SEQ ID NO: 242325 - protein, 15 aa, Artificial Sequence
  Description of Artificial Sequence: Synthetic peptide
  Seed: LRMKWMMAMKYPITA
LRMKWMMAMKYPSTA

SEQ ID NO: 242326 - protein, 15 aa, Artificial Sequence
  Description of Artificial Sequence: Synthetic peptide
  Seed: LRMKWMMAMKYPITA
LRMKWMMAMKYPTTA

SEQ ID NO: 242327 - protein, 15 aa, Artificial Sequence
  Description of Artificial Sequence: Synthetic peptide
  Seed: LRMKWMMAMKYPITA
LRMKWMMAMKYPVTA

SEQ ID NO: 242328 - protein, 15 aa, Artificial Sequence
  Description of Artificial Sequence: Synthetic peptide
  Seed: LRMKWMMAMKYPITA
LRMKWMMAMKYPYTA

SEQ ID NO: 242329 - protein, 15 aa, Artificial Sequence
  Description of Artificial Sequence: Synthetic peptide
  Seed: LRMKWMMAMKYPITA
LRMKWMMAMLYPATA

SEQ ID NO: 242330 - protein, 15 aa, Artificial Sequence
  Description of Artificial Sequence: Synthetic peptide
  Seed: LRMKWMMAMKYPITA
LRMKWMMAMLYPCTA

SEQ ID NO: 242331 - protein, 15 aa, Artificial Sequence
  Description of Artificial Sequence: Synthetic peptide
  Seed: LRMKWMMAMKYPITA
LRMKWMMAMLYPDTA

SEQ ID NO: 242332 - protein, 15 aa, Artificial Sequence
  Description of Artificial Sequence: Synthetic peptide
  Seed: LRMKWMMAMKYPITA
LRMKWMMAMLYPGTA

SEQ ID NO: 242333 - protein, 15 aa, Artificial Sequence
  Description of Artificial Sequence: Synthetic peptide
  Seed: LRMKWMMAMKYPITA
LRMKWMMAMLYPLTA

SEQ ID NO: 242334 - protein, 15 aa, Artificial Sequence
  Description of Artificial Sequence: Synthetic peptide
  Seed: LRMKWMMAMKYPITA
LRMKWMMAMLYPMTA

SEQ ID NO: 242335 - protein, 15 aa, Artificial Sequence
  Description of Artificial Sequence: Synthetic peptide
  Seed: LRMKWMMAMKYPITA
LRMKWMMAMLYPNTA

SEQ ID NO: 242336 - protein, 15 aa, Artificial Sequence
  Description of Artificial Sequence: Synthetic peptide
  Seed: LRMKWMMAMKYPITA
LRMKWMMAMLYPSTA

SEQ ID NO: 242337 - protein, 15 aa, Artificial Sequence
  Description of Artificial Sequence: Synthetic peptide
  Seed: LRMKWMMAMKYPITA
LRMKWMMAMLYPTTA

SEQ ID NO: 242338 - protein, 15 aa, Artificial Sequence
  Description of Artificial Sequence: Synthetic peptide
  Seed: LRMKWMMAMKYPITA
LRMKWMMAMLYPVTA

SEQ ID NO: 242339 - protein, 15 aa, Artificial Sequence
  Description of Artificial Sequence: Synthetic peptide
  Seed: LRMKWMMAMKYPITA
LRMKWMMAMMYPATA

SEQ ID NO: 242340 - protein, 15 aa, Artificial Sequence
  Description of Artificial Sequence: Synthetic peptide
  Seed: LRMKWMMAMKYPITA
LRMKWMMAMMYPCTA

SEQ ID NO: 242341 - protein, 15 aa, Artificial Sequence
  Description of Artificial Sequence: Synthetic peptide
  Seed: LRMKWMMAMKYPITA
LRMKWMMAMMYPDTA

SEQ ID NO: 242342 - protein, 15 aa, Artificial Sequence
  Description of Artificial Sequence: Synthetic peptide
  Seed: LRMKWMMAMKYPITA
LRMKWMMAMMYPGTA

SEQ ID NO: 242343 - protein, 15 aa, Artificial Sequence
  Description of Artificial Sequence: Synthetic peptide
  Seed: LRMKWMMAMKYPITA
LRMKWMMAMMYPLTA

SEQ ID NO: 242344 - protein, 15 aa, Artificial Sequence
  Description of Artificial Sequence: Synthetic peptide
  Seed: LRMKWMMAMKYPITA
LRMKWMMAMMYPMTA

SEQ ID NO: 242345 - protein, 15 aa, Artificial Sequence
  Description of Artificial Sequence: Synthetic peptide
  Seed: LRMKWMMAMKYPITA
LRMKWMMAMMYPNTA

SEQ ID NO: 242346 - protein, 15 aa, Artificial Sequence
  Description of Artificial Sequence: Synthetic peptide
  Seed: LRMKWMMAMKYPITA
LRMKWMMAMMYPSTA

SEQ ID NO: 242347 - protein, 15 aa, Artificial Sequence
  Description of Artificial Sequence: Synthetic peptide
  Seed: LRMKWMMAMKYPITA
LRMKWMMAMMYPTTA

SEQ ID NO: 242348 - protein, 15 aa, Artificial Sequence
  Description of Artificial Sequence: Synthetic peptide
  Seed: LRMKWMMAMKYPITA
LRMKWMMAMMYPVTA

SEQ ID NO: 242349 - protein, 15 aa, Artificial Sequence
  Description of Artificial Sequence: Synthetic peptide
  Seed: LRMKWMMAMKYPITA
LRMKWMMAMNYPATA

SEQ ID NO: 242350 - protein, 15 aa, Artificial Sequence
  Description of Artificial Sequence: Synthetic peptide
  Seed: LRMKWMMAMKYPITA
LRMKWMMAMNYPCTA

SEQ ID NO: 242351 - protein, 15 aa, Artificial Sequence
  Description of Artificial Sequence: Synthetic peptide
  Seed: LRMKWMMAMKYPITA
LRMKWMMAMNYPDTA

SEQ ID NO: 242352 - protein, 15 aa, Artificial Sequence
  Description of Artificial Sequence: Synthetic peptide
  Seed: LRMKWMMAMKYPITA
LRMKWMMAMNYPETA

SEQ ID NO: 242353 - protein, 15 aa, Artificial Sequence
  Description of Artificial Sequence: Synthetic peptide
  Seed: LRMKWMMAMKYPITA
LRMKWMMAMNYPFTA

SEQ ID NO: 242354 - protein, 15 aa, Artificial Sequence
  Description of Artificial Sequence: Synthetic peptide
  Seed: LRMKWMMAMKYPITA
LRMKWMMAMNYPGTA

SEQ ID NO: 242355 - protein, 15 aa, Artificial Sequence
  Description of Artificial Sequence: Synthetic peptide
  Seed: LRMKWMMAMKYPITA
LRMKWMMAMNYPHTA

SEQ ID NO: 242356 - protein, 15 aa, Artificial Sequence
  Description of Artificial Sequence: Synthetic peptide
  Seed: LRMKWMMAMKYPITA
LRMKWMMAMNYPKTA

SEQ ID NO: 242357 - protein, 15 aa, Artificial Sequence
  Description of Artificial Sequence: Synthetic peptide
  Seed: LRMKWMMAMKYPITA
LRMKWMMAMNYPLTA

SEQ ID NO: 242358 - protein, 15 aa, Artificial Sequence
  Description of Artificial Sequence: Synthetic peptide
  Seed: LRMKWMMAMKYPITA
LRMKWMMAMNYPMTA

SEQ ID NO: 242359 - protein, 15 aa, Artificial Sequence
  Description of Artificial Sequence: Synthetic peptide
  Seed: LRMKWMMAMKYPITA
LRMKWMMAMNYPNTA

SEQ ID NO: 242360 - protein, 15 aa, Artificial Sequence
  Description of Artificial Sequence: Synthetic peptide
  Seed: LRMKWMMAMKYPITA
LRMKWMMAMNYPPTA

SEQ ID NO: 242361 - protein, 15 aa, Artificial Sequence
  Description of Artificial Sequence: Synthetic peptide
  Seed: LRMKWMMAMKYPITA
LRMKWMMAMNYPQTA

SEQ ID NO: 242362 - protein, 15 aa, Artificial Sequence
  Description of Artificial Sequence: Synthetic peptide
  Seed: LRMKWMMAMKYPITA
LRMKWMMAMNYPRTA

SEQ ID NO: 242363 - protein, 15 aa, Artificial Sequence
  Description of Artificial Sequence: Synthetic peptide
  Seed: LRMKWMMAMKYPITA
LRMKWMMAMNYPSTA

SEQ ID NO: 242364 - protein, 15 aa, Artificial Sequence
  Description of Artificial Sequence: Synthetic peptide
  Seed: LRMKWMMAMKYPITA
LRMKWMMAMNYPTTA

SEQ ID NO: 242365 - protein, 15 aa, Artificial Sequence
  Description of Artificial Sequence: Synthetic peptide
  Seed: LRMKWMMAMKYPITA
LRMKWMMAMNYPVTA

SEQ ID NO: 242366 - protein, 15 aa, Artificial Sequence
  Description of Artificial Sequence: Synthetic peptide
  Seed: LRMKWMMAMKYPITA
LRMKWMMAMNYPWTA

SEQ ID NO: 242367 - protein, 15 aa, Artificial Sequence
  Description of Artificial Sequence: Synthetic peptide
  Seed: LRMKWMMAMKYPITA
LRMKWMMAMNYPYTA

SEQ ID NO: 242368 - protein, 15 aa, Artificial Sequence
  Description of Artificial Sequence: Synthetic peptide
  Seed: LRMKWMMAMKYPITA
LRMKWMMAMPYPATA

SEQ ID NO: 242369 - protein, 15 aa, Artificial Sequence
  Description of Artificial Sequence: Synthetic peptide
  Seed: LRMKWMMAMKYPITA
LRMKWMMAMPYPCTA

SEQ ID NO: 242370 - protein, 15 aa, Artificial Sequence
  Description of Artificial Sequence: Synthetic peptide
  Seed: LRMKWMMAMKYPITA
LRMKWMMAMPYPDTA

SEQ ID NO: 242371 - protein, 15 aa, Artificial Sequence
  Description of Artificial Sequence: Synthetic peptide
  Seed: LRMKWMMAMKYPITA
LRMKWMMAMPYPETA

SEQ ID NO: 242372 - protein, 15 aa, Artificial Sequence
  Description of Artificial Sequence: Synthetic peptide
  Seed: LRMKWMMAMKYPITA
LRMKWMMAMPYPFTA

SEQ ID NO: 242373 - protein, 15 aa, Artificial Sequence
  Description of Artificial Sequence: Synthetic peptide
  Seed: LRMKWMMAMKYPITA
LRMKWMMAMPYPGTA

SEQ ID NO: 242374 - protein, 15 aa, Artificial Sequence
  Description of Artificial Sequence: Synthetic peptide
  Seed: LRMKWMMAMKYPITA
LRMKWMMAMPYPHTA

SEQ ID NO: 242375 - protein, 15 aa, Artificial Sequence
  Description of Artificial Sequence: Synthetic peptide
  Seed: LRMKWMMAMKYPITA
LRMKWMMAMPYPKTA

SEQ ID NO: 242376 - protein, 15 aa, Artificial Sequence
  Description of Artificial Sequence: Synthetic peptide
  Seed: LRMKWMMAMKYPITA
LRMKWMMAMPYPLTA

SEQ ID NO: 242377 - protein, 15 aa, Artificial Sequence
  Description of Artificial Sequence: Synthetic peptide
  Seed: LRMKWMMAMKYPITA
LRMKWMMAMPYPMTA

SEQ ID NO: 242378 - protein, 15 aa, Artificial Sequence
  Description of Artificial Sequence: Synthetic peptide
  Seed: LRMKWMMAMKYPITA
LRMKWMMAMPYPNTA

SEQ ID NO: 242379 - protein, 15 aa, Artificial Sequence
  Description of Artificial Sequence: Synthetic peptide
  Seed: LRMKWMMAMKYPITA
LRMKWMMAMPYPPTA

SEQ ID NO: 242380 - protein, 15 aa, Artificial Sequence
  Description of Artificial Sequence: Synthetic peptide
  Seed: LRMKWMMAMKYPITA
LRMKWMMAMPYPQTA

SEQ ID NO: 242381 - protein, 15 aa, Artificial Sequence
  Description of Artificial Sequence: Synthetic peptide
  Seed: LRMKWMMAMKYPITA
LRMKWMMAMPYPRTA

SEQ ID NO: 242382 - protein, 15 aa, Artificial Sequence
  Description of Artificial Sequence: Synthetic peptide
  Seed: LRMKWMMAMKYPITA
LRMKWMMAMPYPSTA

SEQ ID NO: 242383 - protein, 15 aa, Artificial Sequence
  Description of Artificial Sequence: Synthetic peptide
  Seed: LRMKWMMAMKYPITA
LRMKWMMAMPYPTTA

SEQ ID NO: 242384 - protein, 15 aa, Artificial Sequence
  Description of Artificial Sequence: Synthetic peptide
  Seed: LRMKWMMAMKYPITA
LRMKWMMAMPYPVTA

SEQ ID NO: 242385 - protein, 15 aa, Artificial Sequence
  Description of Artificial Sequence: Synthetic peptide
  Seed: LRMKWMMAMKYPITA
LRMKWMMAMPYPWTA

SEQ ID NO: 242386 - protein, 15 aa, Artificial Sequence
  Description of Artificial Sequence: Synthetic peptide
  Seed: LRMKWMMAMKYPITA
LRMKWMMAMPYPYTA

SEQ ID NO: 242387 - protein, 15 aa, Artificial Sequence
  Description of Artificial Sequence: Synthetic peptide
  Seed: LRMKWMMAMKYPITA
LRMKWMMAMQYPATA

SEQ ID NO: 242388 - protein, 15 aa, Artificial Sequence
  Description of Artificial Sequence: Synthetic peptide
  Seed: LRMKWMMAMKYPITA
LRMKWMMAMQYPCTA

SEQ ID NO: 242389 - protein, 15 aa, Artificial Sequence
  Description of Artificial Sequence: Synthetic peptide
  Seed: LRMKWMMAMKYPITA
LRMKWMMAMQYPFTA

SEQ ID NO: 242390 - protein, 15 aa, Artificial Sequence
  Description of Artificial Sequence: Synthetic peptide
  Seed: LRMKWMMAMKYPITA
LRMKWMMAMQYPGTA

SEQ ID NO: 242391 - protein, 15 aa, Artificial Sequence
  Description of Artificial Sequence: Synthetic peptide
  Seed: LRMKWMMAMKYPITA
LRMKWMMAMQYPHTA

SEQ ID NO: 242392 - protein, 15 aa, Artificial Sequence
  Description of Artificial Sequence: Synthetic peptide
  Seed: LRMKWMMAMKYPITA
LRMKWMMAMQYPKTA

SEQ ID NO: 242393 - protein, 15 aa, Artificial Sequence
  Description of Artificial Sequence: Synthetic peptide
  Seed: LRMKWMMAMKYPITA
LRMKWMMAMQYPLTA

SEQ ID NO: 242394 - protein, 15 aa, Artificial Sequence
  Description of Artificial Sequence: Synthetic peptide
  Seed: LRMKWMMAMKYPITA
LRMKWMMAMQYPMTA

SEQ ID NO: 242395 - protein, 15 aa, Artificial Sequence
  Description of Artificial Sequence: Synthetic peptide
  Seed: LRMKWMMAMKYPITA
LRMKWMMAMQYPNTA

SEQ ID NO: 242396 - protein, 15 aa, Artificial Sequence
  Description of Artificial Sequence: Synthetic peptide
  Seed: LRMKWMMAMKYPITA
LRMKWMMAMQYPPTA

SEQ ID NO: 242397 - protein, 15 aa, Artificial Sequence
  Description of Artificial Sequence: Synthetic peptide
  Seed: LRMKWMMAMKYPITA
LRMKWMMAMQYPQTA

SEQ ID NO: 242398 - protein, 15 aa, Artificial Sequence
  Description of Artificial Sequence: Synthetic peptide
  Seed: LRMKWMMAMKYPITA
LRMKWMMAMQYPRTA

SEQ ID NO: 242399 - protein, 15 aa, Artificial Sequence
  Description of Artificial Sequence: Synthetic peptide
  Seed: LRMKWMMAMKYPITA
LRMKWMMAMQYPSTA

SEQ ID NO: 242400 - protein, 15 aa, Artificial Sequence
  Description of Artificial Sequence: Synthetic peptide
  Seed: LRMKWMMAMKYPITA
LRMKWMMAMQYPTTA

SEQ ID NO: 242401 - protein, 15 aa, Artificial Sequence
  Description of Artificial Sequence: Synthetic peptide
  Seed: LRMKWMMAMKYPITA
LRMKWMMAMQYPVTA

SEQ ID NO: 242402 - protein, 15 aa, Artificial Sequence
  Description of Artificial Sequence: Synthetic peptide
  Seed: LRMKWMMAMKYPITA
LRMKWMMAMQYPYTA

SEQ ID NO: 242403 - protein, 15 aa, Artificial Sequence
  Description of Artificial Sequence: Synthetic peptide
  Seed: LRMKWMMAMKYPITA
LRMKWMMAMRYPATA

SEQ ID NO: 242404 - protein, 15 aa, Artificial Sequence
  Description of Artificial Sequence: Synthetic peptide
  Seed: LRMKWMMAMKYPITA
LRMKWMMAMRYPFTA

SEQ ID NO: 242405 - protein, 15 aa, Artificial Sequence
  Description of Artificial Sequence: Synthetic peptide
  Seed: LRMKWMMAMKYPITA
LRMKWMMAMRYPGTA

SEQ ID NO: 242406 - protein, 15 aa, Artificial Sequence
  Description of Artificial Sequence: Synthetic peptide
  Seed: LRMKWMMAMKYPITA
LRMKWMMAMRYPHTA

SEQ ID NO: 242407 - protein, 15 aa, Artificial Sequence
  Description of Artificial Sequence: Synthetic peptide
  Seed: LRMKWMMAMKYPITA
LRMKWMMAMRYPKTA

SEQ ID NO: 242408 - protein, 15 aa, Artificial Sequence
  Description of Artificial Sequence: Synthetic peptide
  Seed: LRMKWMMAMKYPITA
LRMKWMMAMRYPLTA

SEQ ID NO: 242409 - protein, 15 aa, Artificial Sequence
  Description of Artificial Sequence: Synthetic peptide
  Seed: LRMKWMMAMKYPITA
LRMKWMMAMRYPMTA

SEQ ID NO: 242410 - protein, 15 aa, Artificial Sequence
  Description of Artificial Sequence: Synthetic peptide
  Seed: LRMKWMMAMKYPITA
LRMKWMMAMRYPNTA

SEQ ID NO: 242411 - protein, 15 aa, Artificial Sequence
  Description of Artificial Sequence: Synthetic peptide
  Seed: LRMKWMMAMKYPITA
LRMKWMMAMRYPPTA

SEQ ID NO: 242412 - protein, 15 aa, Artificial Sequence
  Description of Artificial Sequence: Synthetic peptide
  Seed: LRMKWMMAMKYPITA
LRMKWMMAMRYPQTA

SEQ ID NO: 242413 - protein, 15 aa, Artificial Sequence
  Description of Artificial Sequence: Synthetic peptide
  Seed: LRMKWMMAMKYPITA
LRMKWMMAMRYPRTA

SEQ ID NO: 242414 - protein, 15 aa, Artificial Sequence
  Description of Artificial Sequence: Synthetic peptide
  Seed: LRMKWMMAMKYPITA
LRMKWMMAMRYPSTA

SEQ ID NO: 242415 - protein, 15 aa, Artificial Sequence
  Description of Artificial Sequence: Synthetic peptide
  Seed: LRMKWMMAMKYPITA
LRMKWMMAMRYPTTA

SEQ ID NO: 242416 - protein, 15 aa, Artificial Sequence
  Description of Artificial Sequence: Synthetic peptide
  Seed: LRMKWMMAMKYPITA
LRMKWMMAMRYPVTA

SEQ ID NO: 242417 - protein, 15 aa, Artificial Sequence
  Description of Artificial Sequence: Synthetic peptide
  Seed: LRMKWMMAMKYPITA
LRMKWMMAMRYPWTA

SEQ ID NO: 242418 - protein, 15 aa, Artificial Sequence
  Description of Artificial Sequence: Synthetic peptide
  Seed: LRMKWMMAMKYPITA
LRMKWMMAMRYPYTA

SEQ ID NO: 242419 - protein, 15 aa, Artificial Sequence
  Description of Artificial Sequence: Synthetic peptide
  Seed: LRMKWMMAMKYPITA
LRMKWMMAMSYPATA

SEQ ID NO: 242420 - protein, 15 aa, Artificial Sequence
  Description of Artificial Sequence: Synthetic peptide
  Seed: LRMKWMMAMKYPITA
LRMKWMMAMSYPCTA

SEQ ID NO: 242421 - protein, 15 aa, Artificial Sequence
  Description of Artificial Sequence: Synthetic peptide
  Seed: LRMKWMMAMKYPITA
LRMKWMMAMSYPDTA

SEQ ID NO: 242422 - protein, 15 aa, Artificial Sequence
  Description of Artificial Sequence: Synthetic peptide
  Seed: LRMKWMMAMKYPITA
LRMKWMMAMSYPETA

SEQ ID NO: 242423 - protein, 15 aa, Artificial Sequence
  Description of Artificial Sequence: Synthetic peptide
  Seed: LRMKWMMAMKYPITA
LRMKWMMAMSYPFTA

SEQ ID NO: 242424 - protein, 15 aa, Artificial Sequence
  Description of Artificial Sequence: Synthetic peptide
  Seed: LRMKWMMAMKYPITA
LRMKWMMAMSYPGTA

SEQ ID NO: 242425 - protein, 15 aa, Artificial Sequence
  Description of Artificial Sequence: Synthetic peptide
  Seed: LRMKWMMAMKYPITA
LRMKWMMAMSYPHTA

SEQ ID NO: 242426 - protein, 15 aa, Artificial Sequence
  Description of Artificial Sequence: Synthetic peptide
  Seed: LRMKWMMAMKYPITA
LRMKWMMAMSYPKTA

SEQ ID NO: 242427 - protein, 15 aa, Artificial Sequence
  Description of Artificial Sequence: Synthetic peptide
  Seed: LRMKWMMAMKYPITA
LRMKWMMAMSYPLTA

SEQ ID NO: 242428 - protein, 15 aa, Artificial Sequence
  Description of Artificial Sequence: Synthetic peptide
  Seed: LRMKWMMAMKYPITA
LRMKWMMAMSYPMTA

SEQ ID NO: 242429 - protein, 15 aa, Artificial Sequence
  Description of Artificial Sequence: Synthetic peptide
  Seed: LRMKWMMAMKYPITA
LRMKWMMAMSYPNTA

SEQ ID NO: 242430 - protein, 15 aa, Artificial Sequence
  Description of Artificial Sequence: Synthetic peptide
  Seed: LRMKWMMAMKYPITA
LRMKWMMAMSYPPTA

SEQ ID NO: 242431 - protein, 15 aa, Artificial Sequence
  Description of Artificial Sequence: Synthetic peptide
  Seed: LRMKWMMAMKYPITA
LRMKWMMAMSYPQTA

SEQ ID NO: 242432 - protein, 15 aa, Artificial Sequence
  Description of Artificial Sequence: Synthetic peptide
  Seed: LRMKWMMAMKYPITA
LRMKWMMAMSYPRTA

SEQ ID NO: 242433 - protein, 15 aa, Artificial Sequence
  Description of Artificial Sequence: Synthetic peptide
  Seed: LRMKWMMAMKYPITA
LRMKWMMAMSYPSTA

SEQ ID NO: 242434 - protein, 15 aa, Artificial Sequence
  Description of Artificial Sequence: Synthetic peptide
  Seed: LRMKWMMAMKYPITA
LRMKWMMAMSYPTTA

SEQ ID NO: 242435 - protein, 15 aa, Artificial Sequence
  Description of Artificial Sequence: Synthetic peptide
  Seed: LRMKWMMAMKYPITA
LRMKWMMAMSYPVTA

SEQ ID NO: 242436 - protein, 15 aa, Artificial Sequence
  Description of Artificial Sequence: Synthetic peptide
  Seed: LRMKWMMAMKYPITA
LRMKWMMAMSYPWTA

SEQ ID NO: 242437 - protein, 15 aa, Artificial Sequence
  Description of Artificial Sequence: Synthetic peptide
  Seed: LRMKWMMAMKYPITA
LRMKWMMAMSYPYTA

SEQ ID NO: 242438 - protein, 15 aa, Artificial Sequence
  Description of Artificial Sequence: Synthetic peptide
  Seed: LRMKWMMAMKYPITA
LRMKWMMAMTYPATA

SEQ ID NO: 242439 - protein, 15 aa, Artificial Sequence
  Description of Artificial Sequence: Synthetic peptide
  Seed: LRMKWMMAMKYPITA
LRMKWMMAMTYPCTA

SEQ ID NO: 242440 - protein, 15 aa, Artificial Sequence
  Description of Artificial Sequence: Synthetic peptide
  Seed: LRMKWMMAMKYPITA
LRMKWMMAMTYPDTA

SEQ ID NO: 242441 - protein, 15 aa, Artificial Sequence
  Description of Artificial Sequence: Synthetic peptide
  Seed: LRMKWMMAMKYPITA
LRMKWMMAMTYPETA

SEQ ID NO: 242442 - protein, 15 aa, Artificial Sequence
  Description of Artificial Sequence: Synthetic peptide
  Seed: LRMKWMMAMKYPITA
LRMKWMMAMTYPFTA

SEQ ID NO: 242443 - protein, 15 aa, Artificial Sequence
  Description of Artificial Sequence: Synthetic peptide
  Seed: LRMKWMMAMKYPITA
LRMKWMMAMTYPGTA

SEQ ID NO: 242444 - protein, 15 aa, Artificial Sequence
  Description of Artificial Sequence: Synthetic peptide
  Seed: LRMKWMMAMKYPITA
LRMKWMMAMTYPHTA

SEQ ID NO: 242445 - protein, 15 aa, Artificial Sequence
  Description of Artificial Sequence: Synthetic peptide
  Seed: LRMKWMMAMKYPITA
LRMKWMMAMTYPKTA

SEQ ID NO: 242446 - protein, 15 aa, Artificial Sequence
  Description of Artificial Sequence: Synthetic peptide
  Seed: LRMKWMMAMKYPITA
LRMKWMMAMTYPLTA

SEQ ID NO: 242447 - protein, 15 aa, Artificial Sequence
  Description of Artificial Sequence: Synthetic peptide
  Seed: LRMKWMMAMKYPITA
LRMKWMMAMTYPMTA

SEQ ID NO: 242448 - protein, 15 aa, Artificial Sequence
  Description of Artificial Sequence: Synthetic peptide
  Seed: LRMKWMMAMKYPITA
LRMKWMMAMTYPNTA

SEQ ID NO: 242449 - protein, 15 aa, Artificial Sequence
  Description of Artificial Sequence: Synthetic peptide
  Seed: LRMKWMMAMKYPITA
LRMKWMMAMTYPPTA

SEQ ID NO: 242450 - protein, 15 aa, Artificial Sequence
  Description of Artificial Sequence: Synthetic peptide
  Seed: LRMKWMMAMKYPITA
LRMKWMMAMTYPQTA

SEQ ID NO: 242451 - protein, 15 aa, Artificial Sequence
  Description of Artificial Sequence: Synthetic peptide
  Seed: LRMKWMMAMKYPITA
LRMKWMMAMTYPRTA

SEQ ID NO: 242452 - protein, 15 aa, Artificial Sequence
  Description of Artificial Sequence: Synthetic peptide
  Seed: LRMKWMMAMKYPITA
LRMKWMMAMTYPSTA

SEQ ID NO: 242453 - protein, 15 aa, Artificial Sequence
  Description of Artificial Sequence: Synthetic peptide
  Seed: LRMKWMMAMKYPITA
LRMKWMMAMTYPTTA

SEQ ID NO: 242454 - protein, 15 aa, Artificial Sequence
  Description of Artificial Sequence: Synthetic peptide
  Seed: LRMKWMMAMKYPITA
LRMKWMMAMTYPVTA

SEQ ID NO: 242455 - protein, 15 aa, Artificial Sequence
  Description of Artificial Sequence: Synthetic peptide
  Seed: LRMKWMMAMKYPITA
LRMKWMMAMTYPWTA

SEQ ID NO: 242456 - protein, 15 aa, Artificial Sequence
  Description of Artificial Sequence: Synthetic peptide
  Seed: LRMKWMMAMKYPITA
LRMKWMMAMTYPYTA

SEQ ID NO: 242457 - protein, 15 aa, Artificial Sequence
  Description of Artificial Sequence: Synthetic peptide
  Seed: LRMKWMMAMKYPITA
LRMKWMMAMVYPATA

SEQ ID NO: 242458 - protein, 15 aa, Artificial Sequence
  Description of Artificial Sequence: Synthetic peptide
  Seed: LRMKWMMAMKYPITA
LRMKWMMAMVYPCTA

SEQ ID NO: 242459 - protein, 15 aa, Artificial Sequence
  Description of Artificial Sequence: Synthetic peptide
  Seed: LRMKWMMAMKYPITA
LRMKWMMAMVYPDTA

SEQ ID NO: 242460 - protein, 15 aa, Artificial Sequence
  Description of Artificial Sequence: Synthetic peptide
  Seed: LRMKWMMAMKYPITA
LRMKWMMAMVYPETA

SEQ ID NO: 242461 - protein, 15 aa, Artificial Sequence
  Description of Artificial Sequence: Synthetic peptide
  Seed: LRMKWMMAMKYPITA
LRMKWMMAMVYPFTA

SEQ ID NO: 242462 - protein, 15 aa, Artificial Sequence
  Description of Artificial Sequence: Synthetic peptide
  Seed: LRMKWMMAMKYPITA
LRMKWMMAMVYPGTA

SEQ ID NO: 242463 - protein, 15 aa, Artificial Sequence
  Description of Artificial Sequence: Synthetic peptide
  Seed: LRMKWMMAMKYPITA
LRMKWMMAMVYPHTA

SEQ ID NO: 242464 - protein, 15 aa, Artificial Sequence
  Description of Artificial Sequence: Synthetic peptide
  Seed: LRMKWMMAMKYPITA
LRMKWMMAMVYPKTA

SEQ ID NO: 242465 - protein, 15 aa, Artificial Sequence
  Description of Artificial Sequence: Synthetic peptide
  Seed: LRMKWMMAMKYPITA
LRMKWMMAMVYPLTA

SEQ ID NO: 242466 - protein, 15 aa, Artificial Sequence
  Description of Artificial Sequence: Synthetic peptide
  Seed: LRMKWMMAMKYPITA
LRMKWMMAMVYPMTA

SEQ ID NO: 242467 - protein, 15 aa, Artificial Sequence
  Description of Artificial Sequence: Synthetic peptide
  Seed: LRMKWMMAMKYPITA
LRMKWMMAMVYPNTA

SEQ ID NO: 242468 - protein, 15 aa, Artificial Sequence
  Description of Artificial Sequence: Synthetic peptide
  Seed: LRMKWMMAMKYPITA
LRMKWMMAMVYPPTA

SEQ ID NO: 242469 - protein, 15 aa, Artificial Sequence
  Description of Artificial Sequence: Synthetic peptide
  Seed: LRMKWMMAMKYPITA
LRMKWMMAMVYPQTA

SEQ ID NO: 242470 - protein, 15 aa, Artificial Sequence
  Description of Artificial Sequence: Synthetic peptide
  Seed: LRMKWMMAMKYPITA
LRMKWMMAMVYPRTA

SEQ ID NO: 242471 - protein, 15 aa, Artificial Sequence
  Description of Artificial Sequence: Synthetic peptide
  Seed: LRMKWMMAMKYPITA
LRMKWMMAMVYPSTA

SEQ ID NO: 242472 - protein, 15 aa, Artificial Sequence
  Description of Artificial Sequence: Synthetic peptide
  Seed: LRMKWMMAMKYPITA
LRMKWMMAMVYPTTA

SEQ ID NO: 242473 - protein, 15 aa, Artificial Sequence
  Description of Artificial Sequence: Synthetic peptide
  Seed: LRMKWMMAMKYPITA
LRMKWMMAMVYPVTA

SEQ ID NO: 242474 - protein, 15 aa, Artificial Sequence
  Description of Artificial Sequence: Synthetic peptide
  Seed: LRMKWMMAMKYPITA
LRMKWMMAMVYPWTA

SEQ ID NO: 242475 - protein, 15 aa, Artificial Sequence
  Description of Artificial Sequence: Synthetic peptide
  Seed: LRMKWMMAMKYPITA
LRMKWMMAMVYPYTA

SEQ ID NO: 242476 - protein, 15 aa, Artificial Sequence
  Description of Artificial Sequence: Synthetic peptide
  Seed: LRMKWMMAMKYPITA
LRMKWMMAMWYPATA

SEQ ID NO: 242477 - protein, 15 aa, Artificial Sequence
  Description of Artificial Sequence: Synthetic peptide
  Seed: LRMKWMMAMKYPITA
LRMKWMMAMWYPLTA

SEQ ID NO: 242478 - protein, 15 aa, Artificial Sequence
  Description of Artificial Sequence: Synthetic peptide
  Seed: LRMKWMMAMKYPITA
LRMKWMMAMWYPMTA

SEQ ID NO: 242479 - protein, 15 aa, Artificial Sequence
  Description of Artificial Sequence: Synthetic peptide
  Seed: LRMKWMMAMKYPITA
LRMKWMMAMWYPSTA

SEQ ID NO: 242480 - protein, 15 aa, Artificial Sequence
  Description of Artificial Sequence: Synthetic peptide
  Seed: LRMKWMMAMKYPITA
LRMKWMMAMWYPVTA

SEQ ID NO: 242481 - protein, 15 aa, Artificial Sequence
  Description of Artificial Sequence: Synthetic peptide
  Seed: LRMKWMMAMKYPITA
LRMKWMMAMYYPATA

SEQ ID NO: 242482 - protein, 15 aa, Artificial Sequence
  Description of Artificial Sequence: Synthetic peptide
  Seed: LRMKWMMAMKYPITA
LRMKWMMAMYYPLTA

SEQ ID NO: 242483 - protein, 15 aa, Artificial Sequence
  Description of Artificial Sequence: Synthetic peptide
  Seed: LRMKWMMAMKYPITA
LRMKWMMAMYYPMTA

SEQ ID NO: 242484 - protein, 15 aa, Artificial Sequence
  Description of Artificial Sequence: Synthetic peptide
  Seed: LRMKWMMAMKYPITA
LRMKWMMAMYYPNTA

SEQ ID NO: 242485 - protein, 15 aa, Artificial Sequence
  Description of Artificial Sequence: Synthetic peptide
  Seed: LRMKWMMAMKYPITA
LRMKWMMAMYYPSTA

SEQ ID NO: 242486 - protein, 15 aa, Artificial Sequence
  Description of Artificial Sequence: Synthetic peptide
  Seed: LRMKWMMAMKYPITA
LRMKWMMAMYYPTTA

SEQ ID NO: 242487 - protein, 15 aa, Artificial Sequence
  Description of Artificial Sequence: Synthetic peptide
  Seed: LRMKWMMAMKYPITA
LRMKWMMAMYYPVTA

SEQ ID NO: 242488 - protein, 15 aa, Artificial Sequence
  Description of Artificial Sequence: Synthetic peptide
  Seed: LRMKWMMAMKYPITA
LRMKWMMCMAYPATA

SEQ ID NO: 242489 - protein, 15 aa, Artificial Sequence
  Description of Artificial Sequence: Synthetic peptide
  Seed: LRMKWMMAMKYPITA
LRMKWMMCMAYPCTA

SEQ ID NO: 242490 - protein, 15 aa, Artificial Sequence
  Description of Artificial Sequence: Synthetic peptide
  Seed: LRMKWMMAMKYPITA
LRMKWMMCMAYPDTA

SEQ ID NO: 242491 - protein, 15 aa, Artificial Sequence
  Description of Artificial Sequence: Synthetic peptide
  Seed: LRMKWMMAMKYPITA
LRMKWMMCMAYPFTA

SEQ ID NO: 242492 - protein, 15 aa, Artificial Sequence
  Description of Artificial Sequence: Synthetic peptide
  Seed: LRMKWMMAMKYPITA
LRMKWMMCMAYPGTA

SEQ ID NO: 242493 - protein, 15 aa, Artificial Sequence
  Description of Artificial Sequence: Synthetic peptide
  Seed: LRMKWMMAMKYPITA
LRMKWMMCMAYPITA

SEQ ID NO: 242494 - protein, 15 aa, Artificial Sequence
  Description of Artificial Sequence: Synthetic peptide
  Seed: LRMKWMMAMKYPITA
LRMKWMMCMAYPLTA

SEQ ID NO: 242495 - protein, 15 aa, Artificial Sequence
  Description of Artificial Sequence: Synthetic peptide
  Seed: LRMKWMMAMKYPITA
LRMKWMMCMAYPMTA

SEQ ID NO: 242496 - protein, 15 aa, Artificial Sequence
  Description of Artificial Sequence: Synthetic peptide
  Seed: LRMKWMMAMKYPITA
LRMKWMMCMAYPNTA

SEQ ID NO: 242497 - protein, 15 aa, Artificial Sequence
  Description of Artificial Sequence: Synthetic peptide
  Seed: LRMKWMMAMKYPITA
LRMKWMMCMAYPQTA

SEQ ID NO: 242498 - protein, 15 aa, Artificial Sequence
  Description of Artificial Sequence: Synthetic peptide
  Seed: LRMKWMMAMKYPITA
LRMKWMMCMAYPSTA

SEQ ID NO: 242499 - protein, 15 aa, Artificial Sequence
  Description of Artificial Sequence: Synthetic peptide
  Seed: LRMKWMMAMKYPITA
LRMKWMMCMAYPTTA

SEQ ID NO: 242500 - protein, 15 aa, Artificial Sequence
  Description of Artificial Sequence: Synthetic peptide
  Seed: LRMKWMMAMKYPITA
LRMKWMMCMAYPVTA

SEQ ID NO: 242501 - protein, 15 aa, Artificial Sequence
  Description of Artificial Sequence: Synthetic peptide
  Seed: LRMKWMMAMKYPITA
LRMKWMMCMAYPYTA

SEQ ID NO: 242502 - protein, 15 aa, Artificial Sequence
  Description of Artificial Sequence: Synthetic peptide
  Seed: LRMKWMMAMKYPITA
LRMKWMMCMGYPATA

SEQ ID NO: 242503 - protein, 15 aa, Artificial Sequence
  Description of Artificial Sequence: Synthetic peptide
  Seed: LRMKWMMAMKYPITA
LRMKWMMCMGYPGTA

SEQ ID NO: 242504 - protein, 15 aa, Artificial Sequence
  Description of Artificial Sequence: Synthetic peptide
  Seed: LRMKWMMAMKYPITA
LRMKWMMCMGYPITA

SEQ ID NO: 242505 - protein, 15 aa, Artificial Sequence
  Description of Artificial Sequence: Synthetic peptide
  Seed: LRMKWMMAMKYPITA
LRMKWMMCMGYPLTA

SEQ ID NO: 242506 - protein, 15 aa, Artificial Sequence
  Description of Artificial Sequence: Synthetic peptide
  Seed: LRMKWMMAMKYPITA
LRMKWMMCMGYPMTA

SEQ ID NO: 242507 - protein, 15 aa, Artificial Sequence
  Description of Artificial Sequence: Synthetic peptide
  Seed: LRMKWMMAMKYPITA
LRMKWMMCMGYPSTA

SEQ ID NO: 242508 - protein, 15 aa, Artificial Sequence
  Description of Artificial Sequence: Synthetic peptide
  Seed: LRMKWMMAMKYPITA
LRMKWMMCMGYPTTA

SEQ ID NO: 242509 - protein, 15 aa, Artificial Sequence
  Description of Artificial Sequence: Synthetic peptide
  Seed: LRMKWMMAMKYPITA
LRMKWMMCMGYPVTA

SEQ ID NO: 242510 - protein, 15 aa, Artificial Sequence
  Description of Artificial Sequence: Synthetic peptide
  Seed: LRMKWMMAMKYPITA
LRMKWMMCMIYPATA

SEQ ID NO: 242511 - protein, 15 aa, Artificial Sequence
  Description of Artificial Sequence: Synthetic peptide
  Seed: LRMKWMMAMKYPITA
LRMKWMMCMIYPSTA

SEQ ID NO: 242512 - protein, 15 aa, Artificial Sequence
  Description of Artificial Sequence: Synthetic peptide
  Seed: LRMKWMMAMKYPITA
LRMKWMMCMIYPVTA

SEQ ID NO: 242513 - protein, 15 aa, Artificial Sequence
  Description of Artificial Sequence: Synthetic peptide
  Seed: LRMKWMMAMKYPITA
LRMKWMMCMKYPATA

SEQ ID NO: 242514 - protein, 15 aa, Artificial Sequence
  Description of Artificial Sequence: Synthetic peptide
  Seed: LRMKWMMAMKYPITA
LRMKWMMCMKYPSTA

SEQ ID NO: 242515 - protein, 15 aa, Artificial Sequence
  Description of Artificial Sequence: Synthetic peptide
  Seed: LRMKWMMAMKYPITA
LRMKWMMCMMYPVTA

SEQ ID NO: 242516 - protein, 15 aa, Artificial Sequence
  Description of Artificial Sequence: Synthetic peptide
  Seed: LRMKWMMAMKYPITA
LRMKWMMCMNYPATA

SEQ ID NO: 242517 - protein, 15 aa, Artificial Sequence
  Description of Artificial Sequence: Synthetic peptide
  Seed: LRMKWMMAMKYPITA
LRMKWMMCMNYPITA

SEQ ID NO: 242518 - protein, 15 aa, Artificial Sequence
  Description of Artificial Sequence: Synthetic peptide
  Seed: LRMKWMMAMKYPITA
LRMKWMMCMNYPLTA

SEQ ID NO: 242519 - protein, 15 aa, Artificial Sequence
  Description of Artificial Sequence: Synthetic peptide
  Seed: LRMKWMMAMKYPITA
LRMKWMMCMNYPMTA

SEQ ID NO: 242520 - protein, 15 aa, Artificial Sequence
  Description of Artificial Sequence: Synthetic peptide
  Seed: LRMKWMMAMKYPITA
LRMKWMMCMNYPVTA

SEQ ID NO: 242521 - protein, 15 aa, Artificial Sequence
  Description of Artificial Sequence: Synthetic peptide
  Seed: LRMKWMMAMKYPITA
LRMKWMMCMPYPATA

SEQ ID NO: 242522 - protein, 15 aa, Artificial Sequence
  Description of Artificial Sequence: Synthetic peptide
  Seed: LRMKWMMAMKYPITA
LRMKWMMCMPYPITA

SEQ ID NO: 242523 - protein, 15 aa, Artificial Sequence
  Description of Artificial Sequence: Synthetic peptide
  Seed: LRMKWMMAMKYPITA
LRMKWMMCMPYPLTA

SEQ ID NO: 242524 - protein, 15 aa, Artificial Sequence
  Description of Artificial Sequence: Synthetic peptide
  Seed: LRMKWMMAMKYPITA
LRMKWMMCMPYPMTA

SEQ ID NO: 242525 - protein, 15 aa, Artificial Sequence
  Description of Artificial Sequence: Synthetic peptide
  Seed: LRMKWMMAMKYPITA
LRMKWMMCMPYPNTA

SEQ ID NO: 242526 - protein, 15 aa, Artificial Sequence
  Description of Artificial Sequence: Synthetic peptide
  Seed: LRMKWMMAMKYPITA
LRMKWMMCMPYPSTA

SEQ ID NO: 242527 - protein, 15 aa, Artificial Sequence
  Description of Artificial Sequence: Synthetic peptide
  Seed: LRMKWMMAMKYPITA
LRMKWMMCMPYPTTA

SEQ ID NO: 242528 - protein, 15 aa, Artificial Sequence
  Description of Artificial Sequence: Synthetic peptide
  Seed: LRMKWMMAMKYPITA
LRMKWMMCMPYPVTA

SEQ ID NO: 242529 - protein, 15 aa, Artificial Sequence
  Description of Artificial Sequence: Synthetic peptide
  Seed: LRMKWMMAMKYPITA
LRMKWMMCMRYPATA

SEQ ID NO: 242530 - protein, 15 aa, Artificial Sequence
  Description of Artificial Sequence: Synthetic peptide
  Seed: LRMKWMMAMKYPITA
LRMKWMMCMRYPGTA

SEQ ID NO: 242531 - protein, 15 aa, Artificial Sequence
  Description of Artificial Sequence: Synthetic peptide
  Seed: LRMKWMMAMKYPITA
LRMKWMMCMRYPSTA

SEQ ID NO: 242532 - protein, 15 aa, Artificial Sequence
  Description of Artificial Sequence: Synthetic peptide
  Seed: LRMKWMMAMKYPITA
LRMKWMMCMSYPATA

SEQ ID NO: 242533 - protein, 15 aa, Artificial Sequence
  Description of Artificial Sequence: Synthetic peptide
  Seed: LRMKWMMAMKYPITA
LRMKWMMCMSYPCTA

SEQ ID NO: 242534 - protein, 15 aa, Artificial Sequence
  Description of Artificial Sequence: Synthetic peptide
  Seed: LRMKWMMAMKYPITA
LRMKWMMCMSYPGTA

SEQ ID NO: 242535 - protein, 15 aa, Artificial Sequence
  Description of Artificial Sequence: Synthetic peptide
  Seed: LRMKWMMAMKYPITA
LRMKWMMCMSYPITA

SEQ ID NO: 242536 - protein, 15 aa, Artificial Sequence
  Description of Artificial Sequence: Synthetic peptide
  Seed: LRMKWMMAMKYPITA
LRMKWMMCMSYPLTA

SEQ ID NO: 242537 - protein, 15 aa, Artificial Sequence
  Description of Artificial Sequence: Synthetic peptide
  Seed: LRMKWMMAMKYPITA
LRMKWMMCMSYPMTA

SEQ ID NO: 242538 - protein, 15 aa, Artificial Sequence
  Description of Artificial Sequence: Synthetic peptide
  Seed: LRMKWMMAMKYPITA
LRMKWMMCMSYPNTA

SEQ ID NO: 242539 - protein, 15 aa, Artificial Sequence
  Description of Artificial Sequence: Synthetic peptide
  Seed: LRMKWMMAMKYPITA
LRMKWMMCMSYPSTA

SEQ ID NO: 242540 - protein, 15 aa, Artificial Sequence
  Description of Artificial Sequence: Synthetic peptide
  Seed: LRMKWMMAMKYPITA
LRMKWMMCMSYPTTA

SEQ ID NO: 242541 - protein, 15 aa, Artificial Sequence
  Description of Artificial Sequence: Synthetic peptide
  Seed: LRMKWMMAMKYPITA
LRMKWMMCMSYPVTA

SEQ ID NO: 242542 - protein, 15 aa, Artificial Sequence
  Description of Artificial Sequence: Synthetic peptide
  Seed: LRMKWMMAMKYPITA
LRMKWMMCMTYPATA

SEQ ID NO: 242543 - protein, 15 aa, Artificial Sequence
  Description of Artificial Sequence: Synthetic peptide
  Seed: LRMKWMMAMKYPITA
LRMKWMMCMTYPITA

SEQ ID NO: 242544 - protein, 15 aa, Artificial Sequence
  Description of Artificial Sequence: Synthetic peptide
  Seed: LRMKWMMAMKYPITA
LRMKWMMCMTYPLTA

SEQ ID NO: 242545 - protein, 15 aa, Artificial Sequence
  Description of Artificial Sequence: Synthetic peptide
  Seed: LRMKWMMAMKYPITA
LRMKWMMCMTYPMTA

SEQ ID NO: 242546 - protein, 15 aa, Artificial Sequence
  Description of Artificial Sequence: Synthetic peptide
  Seed: LRMKWMMAMKYPITA
LRMKWMMCMTYPNTA

SEQ ID NO: 242547 - protein, 15 aa, Artificial Sequence
  Description of Artificial Sequence: Synthetic peptide
  Seed: LRMKWMMAMKYPITA
LRMKWMMCMTYPSTA

SEQ ID NO: 242548 - protein, 15 aa, Artificial Sequence
  Description of Artificial Sequence: Synthetic peptide
  Seed: LRMKWMMAMKYPITA
LRMKWMMCMTYPTTA

SEQ ID NO: 242549 - protein, 15 aa, Artificial Sequence
  Description of Artificial Sequence: Synthetic peptide
  Seed: LRMKWMMAMKYPITA
LRMKWMMCMTYPVTA

SEQ ID NO: 242550 - protein, 15 aa, Artificial Sequence
  Description of Artificial Sequence: Synthetic peptide
  Seed: LRMKWMMAMKYPITA
LRMKWMMCMVYPATA

SEQ ID NO: 242551 - protein, 15 aa, Artificial Sequence
  Description of Artificial Sequence: Synthetic peptide
  Seed: LRMKWMMAMKYPITA
LRMKWMMCMVYPITA

SEQ ID NO: 242552 - protein, 15 aa, Artificial Sequence
  Description of Artificial Sequence: Synthetic peptide
  Seed: LRMKWMMAMKYPITA
LRMKWMMCMVYPLTA

SEQ ID NO: 242553 - protein, 15 aa, Artificial Sequence
  Description of Artificial Sequence: Synthetic peptide
  Seed: LRMKWMMAMKYPITA
LRMKWMMCMVYPMTA

SEQ ID NO: 242554 - protein, 15 aa, Artificial Sequence
  Description of Artificial Sequence: Synthetic peptide
  Seed: LRMKWMMAMKYPITA
LRMKWMMCMVYPNTA

SEQ ID NO: 242555 - protein, 15 aa, Artificial Sequence
  Description of Artificial Sequence: Synthetic peptide
  Seed: LRMKWMMAMKYPITA
LRMKWMMCMVYPSTA

SEQ ID NO: 242556 - protein, 15 aa, Artificial Sequence
  Description of Artificial Sequence: Synthetic peptide
  Seed: LRMKWMMAMKYPITA
LRMKWMMCMVYPVTA

SEQ ID NO: 242557 - protein, 15 aa, Artificial Sequence
  Description of Artificial Sequence: Synthetic peptide
  Seed: LRMKWMMAMKYPITA
LRMKWMMDMAYPATA

SEQ ID NO: 242558 - protein, 15 aa, Artificial Sequence
  Description of Artificial Sequence: Synthetic peptide
  Seed: LRMKWMMAMKYPITA
LRMKWMMDMAYPFTA

SEQ ID NO: 242559 - protein, 15 aa, Artificial Sequence
  Description of Artificial Sequence: Synthetic peptide
  Seed: LRMKWMMAMKYPITA
LRMKWMMDMAYPGTA

SEQ ID NO: 242560 - protein, 15 aa, Artificial Sequence
  Description of Artificial Sequence: Synthetic peptide
  Seed: LRMKWMMAMKYPITA
LRMKWMMDMAYPITA

SEQ ID NO: 242561 - protein, 15 aa, Artificial Sequence
  Description of Artificial Sequence: Synthetic peptide
  Seed: LRMKWMMAMKYPITA
LRMKWMMDMAYPLTA

SEQ ID NO: 242562 - protein, 15 aa, Artificial Sequence
  Description of Artificial Sequence: Synthetic peptide
  Seed: LRMKWMMAMKYPITA
LRMKWMMDMAYPMTA

SEQ ID NO: 242563 - protein, 15 aa, Artificial Sequence
  Description of Artificial Sequence: Synthetic peptide
  Seed: LRMKWMMAMKYPITA
LRMKWMMDMAYPNTA

SEQ ID NO: 242564 - protein, 15 aa, Artificial Sequence
  Description of Artificial Sequence: Synthetic peptide
  Seed: LRMKWMMAMKYPITA
LRMKWMMDMAYPSTA

SEQ ID NO: 242565 - protein, 15 aa, Artificial Sequence
  Description of Artificial Sequence: Synthetic peptide
  Seed: LRMKWMMAMKYPITA
LRMKWMMDMAYPTTA

SEQ ID NO: 242566 - protein, 15 aa, Artificial Sequence
  Description of Artificial Sequence: Synthetic peptide
  Seed: LRMKWMMAMKYPITA
LRMKWMMDMAYPVTA

SEQ ID NO: 242567 - protein, 15 aa, Artificial Sequence
  Description of Artificial Sequence: Synthetic peptide
  Seed: LRMKWMMAMKYPITA
LRMKWMMDMDYPATA

SEQ ID NO: 242568 - protein, 15 aa, Artificial Sequence
  Description of Artificial Sequence: Synthetic peptide
  Seed: LRMKWMMAMKYPITA
LRMKWMMDMFYPFTA

SEQ ID NO: 242569 - protein, 15 aa, Artificial Sequence
  Description of Artificial Sequence: Synthetic peptide
  Seed: LRMKWMMAMKYPITA
LRMKWMMDMFYPITA

SEQ ID NO: 242570 - protein, 15 aa, Artificial Sequence
  Description of Artificial Sequence: Synthetic peptide
  Seed: LRMKWMMAMKYPITA
LRMKWMMDMFYPLTA

SEQ ID NO: 242571 - protein, 15 aa, Artificial Sequence
  Description of Artificial Sequence: Synthetic peptide
  Seed: LRMKWMMAMKYPITA
LRMKWMMDMFYPMTA

SEQ ID NO: 242572 - protein, 15 aa, Artificial Sequence
  Description of Artificial Sequence: Synthetic peptide
  Seed: LRMKWMMAMKYPITA
LRMKWMMDMFYPVTA

SEQ ID NO: 242573 - protein, 15 aa, Artificial Sequence
  Description of Artificial Sequence: Synthetic peptide
  Seed: LRMKWMMAMKYPITA
LRMKWMMDMGYPATA

SEQ ID NO: 242574 - protein, 15 aa, Artificial Sequence
  Description of Artificial Sequence: Synthetic peptide
  Seed: LRMKWMMAMKYPITA
LRMKWMMDMGYPITA

SEQ ID NO: 242575 - protein, 15 aa, Artificial Sequence
  Description of Artificial Sequence: Synthetic peptide
  Seed: LRMKWMMAMKYPITA
LRMKWMMDMGYPLTA

SEQ ID NO: 242576 - protein, 15 aa, Artificial Sequence
  Description of Artificial Sequence: Synthetic peptide
  Seed: LRMKWMMAMKYPITA
LRMKWMMDMGYPMTA

SEQ ID NO: 242577 - protein, 15 aa, Artificial Sequence
  Description of Artificial Sequence: Synthetic peptide
  Seed: LRMKWMMAMKYPITA
LRMKWMMDMGYPSTA

SEQ ID NO: 242578 - protein, 15 aa, Artificial Sequence
  Description of Artificial Sequence: Synthetic peptide
  Seed: LRMKWMMAMKYPITA
LRMKWMMDMGYPTTA

SEQ ID NO: 242579 - protein, 15 aa, Artificial Sequence
  Description of Artificial Sequence: Synthetic peptide
  Seed: LRMKWMMAMKYPITA
LRMKWMMDMGYPVTA

SEQ ID NO: 242580 - protein, 15 aa, Artificial Sequence
  Description of Artificial Sequence: Synthetic peptide
  Seed: LRMKWMMAMKYPITA
LRMKWMMDMIYPATA

SEQ ID NO: 242581 - protein, 15 aa, Artificial Sequence
  Description of Artificial Sequence: Synthetic peptide
  Seed: LRMKWMMAMKYPITA
LRMKWMMDMNYPATA

SEQ ID NO: 242582 - protein, 15 aa, Artificial Sequence
  Description of Artificial Sequence: Synthetic peptide
  Seed: LRMKWMMAMKYPITA
LRMKWMMDMNYPGTA

SEQ ID NO: 242583 - protein, 15 aa, Artificial Sequence
  Description of Artificial Sequence: Synthetic peptide
  Seed: LRMKWMMAMKYPITA
LRMKWMMDMNYPITA

SEQ ID NO: 242584 - protein, 15 aa, Artificial Sequence
  Description of Artificial Sequence: Synthetic peptide
  Seed: LRMKWMMAMKYPITA
LRMKWMMDMNYPLTA

SEQ ID NO: 242585 - protein, 15 aa, Artificial Sequence
  Description of Artificial Sequence: Synthetic peptide
  Seed: LRMKWMMAMKYPITA
LRMKWMMDMNYPMTA

SEQ ID NO: 242586 - protein, 15 aa, Artificial Sequence
  Description of Artificial Sequence: Synthetic peptide
  Seed: LRMKWMMAMKYPITA
LRMKWMMDMNYPQTA

SEQ ID NO: 242587 - protein, 15 aa, Artificial Sequence
  Description of Artificial Sequence: Synthetic peptide
  Seed: LRMKWMMAMKYPITA
LRMKWMMDMNYPSTA

SEQ ID NO: 242588 - protein, 15 aa, Artificial Sequence
  Description of Artificial Sequence: Synthetic peptide
  Seed: LRMKWMMAMKYPITA
LRMKWMMDMNYPTTA

SEQ ID NO: 242589 - protein, 15 aa, Artificial Sequence
  Description of Artificial Sequence: Synthetic peptide
  Seed: LRMKWMMAMKYPITA
LRMKWMMDMNYPVTA

SEQ ID NO: 242590 - protein, 15 aa, Artificial Sequence
  Description of Artificial Sequence: Synthetic peptide
  Seed: LRMKWMMAMKYPITA
LRMKWMMDMPYPATA

SEQ ID NO: 242591 - protein, 15 aa, Artificial Sequence
  Description of Artificial Sequence: Synthetic peptide
  Seed: LRMKWMMAMKYPITA
LRMKWMMDMPYPITA

SEQ ID NO: 242592 - protein, 15 aa, Artificial Sequence
  Description of Artificial Sequence: Synthetic peptide
  Seed: LRMKWMMAMKYPITA
LRMKWMMDMPYPLTA

SEQ ID NO: 242593 - protein, 15 aa, Artificial Sequence
  Description of Artificial Sequence: Synthetic peptide
  Seed: LRMKWMMAMKYPITA
LRMKWMMDMPYPVTA

SEQ ID NO: 242594 - protein, 15 aa, Artificial Sequence
  Description of Artificial Sequence: Synthetic peptide
  Seed: LRMKWMMAMKYPITA
LRMKWMMDMSYPATA

SEQ ID NO: 242595 - protein, 15 aa, Artificial Sequence
  Description of Artificial Sequence: Synthetic peptide
  Seed: LRMKWMMAMKYPITA
LRMKWMMDMSYPGTA

SEQ ID NO: 242596 - protein, 15 aa, Artificial Sequence
  Description of Artificial Sequence: Synthetic peptide
  Seed: LRMKWMMAMKYPITA
LRMKWMMDMSYPITA

SEQ ID NO: 242597 - protein, 15 aa, Artificial Sequence
  Description of Artificial Sequence: Synthetic peptide
  Seed: LRMKWMMAMKYPITA
LRMKWMMDMSYPLTA

SEQ ID NO: 242598 - protein, 15 aa, Artificial Sequence
  Description of Artificial Sequence: Synthetic peptide
  Seed: LRMKWMMAMKYPITA
LRMKWMMDMSYPMTA

SEQ ID NO: 242599 - protein, 15 aa, Artificial Sequence
  Description of Artificial Sequence: Synthetic peptide
  Seed: LRMKWMMAMKYPITA
LRMKWMMDMSYPQTA

SEQ ID NO: 242600 - protein, 15 aa, Artificial Sequence
  Description of Artificial Sequence: Synthetic peptide
  Seed: LRMKWMMAMKYPITA
LRMKWMMDMSYPSTA

SEQ ID NO: 242601 - protein, 15 aa, Artificial Sequence
  Description of Artificial Sequence: Synthetic peptide
  Seed: LRMKWMMAMKYPITA
LRMKWMMDMSYPTTA

SEQ ID NO: 242602 - protein, 15 aa, Artificial Sequence
  Description of Artificial Sequence: Synthetic peptide
  Seed: LRMKWMMAMKYPITA
LRMKWMMDMSYPVTA

SEQ ID NO: 242603 - protein, 15 aa, Artificial Sequence
  Description of Artificial Sequence: Synthetic peptide
  Seed: LRMKWMMAMKYPITA
LRMKWMMDMTYPATA

SEQ ID NO: 242604 - protein, 15 aa, Artificial Sequence
  Description of Artificial Sequence: Synthetic peptide
  Seed: LRMKWMMAMKYPITA
LRMKWMMDMTYPGTA

SEQ ID NO: 242605 - protein, 15 aa, Artificial Sequence
  Description of Artificial Sequence: Synthetic peptide
  Seed: LRMKWMMAMKYPITA
LRMKWMMDMTYPHTA

SEQ ID NO: 242606 - protein, 15 aa, Artificial Sequence
  Description of Artificial Sequence: Synthetic peptide
  Seed: LRMKWMMAMKYPITA
LRMKWMMDMTYPITA

SEQ ID NO: 242607 - protein, 15 aa, Artificial Sequence
  Description of Artificial Sequence: Synthetic peptide
  Seed: LRMKWMMAMKYPITA
LRMKWMMDMTYPLTA

SEQ ID NO: 242608 - protein, 15 aa, Artificial Sequence
  Description of Artificial Sequence: Synthetic peptide
  Seed: LRMKWMMAMKYPITA
LRMKWMMDMTYPMTA

SEQ ID NO: 242609 - protein, 15 aa, Artificial Sequence
  Description of Artificial Sequence: Synthetic peptide
  Seed: LRMKWMMAMKYPITA
LRMKWMMDMTYPNTA

SEQ ID NO: 242610 - protein, 15 aa, Artificial Sequence
  Description of Artificial Sequence: Synthetic peptide
  Seed: LRMKWMMAMKYPITA
LRMKWMMDMTYPQTA

SEQ ID NO: 242611 - protein, 15 aa, Artificial Sequence
  Description of Artificial Sequence: Synthetic peptide
  Seed: LRMKWMMAMKYPITA
LRMKWMMDMTYPSTA

SEQ ID NO: 242612 - protein, 15 aa, Artificial Sequence
  Description of Artificial Sequence: Synthetic peptide
  Seed: LRMKWMMAMKYPITA
LRMKWMMDMTYPTTA

SEQ ID NO: 242613 - protein, 15 aa, Artificial Sequence
  Description of Artificial Sequence: Synthetic peptide
  Seed: LRMKWMMAMKYPITA
LRMKWMMDMTYPVTA

SEQ ID NO: 242614 - protein, 15 aa, Artificial Sequence
  Description of Artificial Sequence: Synthetic peptide
  Seed: LRMKWMMAMKYPITA
LRMKWMMDMVYPATA

SEQ ID NO: 242615 - protein, 15 aa, Artificial Sequence
  Description of Artificial Sequence: Synthetic peptide
  Seed: LRMKWMMAMKYPITA
LRMKWMMDMVYPITA

SEQ ID NO: 242616 - protein, 15 aa, Artificial Sequence
  Description of Artificial Sequence: Synthetic peptide
  Seed: LRMKWMMAMKYPITA
LRMKWMMDMVYPLTA

SEQ ID NO: 242617 - protein, 15 aa, Artificial Sequence
  Description of Artificial Sequence: Synthetic peptide
  Seed: LRMKWMMAMKYPITA
LRMKWMMDMVYPRTA

SEQ ID NO: 242618 - protein, 15 aa, Artificial Sequence
  Description of Artificial Sequence: Synthetic peptide
  Seed: LRMKWMMAMKYPITA
LRMKWMMDMVYPSTA

SEQ ID NO: 242619 - protein, 15 aa, Artificial Sequence
  Description of Artificial Sequence: Synthetic peptide
  Seed: LRMKWMMAMKYPITA
LRMKWMMDMVYPVTA

SEQ ID NO: 242620 - protein, 15 aa, Artificial Sequence
  Description of Artificial Sequence: Synthetic peptide
  Seed: LRMKWMMAMKYPITA
LRMKWMMEMAYPATA

SEQ ID NO: 242621 - protein, 15 aa, Artificial Sequence
  Description of Artificial Sequence: Synthetic peptide
  Seed: LRMKWMMAMKYPITA
LRMKWMMEMAYPCTA

SEQ ID NO: 242622 - protein, 15 aa, Artificial Sequence
  Description of Artificial Sequence: Synthetic peptide
  Seed: LRMKWMMAMKYPITA
LRMKWMMEMAYPDTA

SEQ ID NO: 242623 - protein, 15 aa, Artificial Sequence
  Description of Artificial Sequence: Synthetic peptide
  Seed: LRMKWMMAMKYPITA
LRMKWMMEMAYPETA

SEQ ID NO: 242624 - protein, 15 aa, Artificial Sequence
  Description of Artificial Sequence: Synthetic peptide
  Seed: LRMKWMMAMKYPITA
LRMKWMMEMAYPFTA

SEQ ID NO: 242625 - protein, 15 aa, Artificial Sequence
  Description of Artificial Sequence: Synthetic peptide
  Seed: LRMKWMMAMKYPITA
LRMKWMMEMAYPGTA

SEQ ID NO: 242626 - protein, 15 aa, Artificial Sequence
  Description of Artificial Sequence: Synthetic peptide
  Seed: LRMKWMMAMKYPITA
LRMKWMMEMAYPHTA

SEQ ID NO: 242627 - protein, 15 aa, Artificial Sequence
  Description of Artificial Sequence: Synthetic peptide
  Seed: LRMKWMMAMKYPITA
LRMKWMMEMAYPITA

SEQ ID NO: 242628 - protein, 15 aa, Artificial Sequence
  Description of Artificial Sequence: Synthetic peptide
  Seed: LRMKWMMAMKYPITA
LRMKWMMEMAYPKTA

SEQ ID NO: 242629 - protein, 15 aa, Artificial Sequence
  Description of Artificial Sequence: Synthetic peptide
  Seed: LRMKWMMAMKYPITA
LRMKWMMEMAYPLTA

SEQ ID NO: 242630 - protein, 15 aa, Artificial Sequence
  Description of Artificial Sequence: Synthetic peptide
  Seed: LRMKWMMAMKYPITA
LRMKWMMEMAYPMTA

SEQ ID NO: 242631 - protein, 15 aa, Artificial Sequence
  Description of Artificial Sequence: Synthetic peptide
  Seed: LRMKWMMAMKYPITA
LRMKWMMEMAYPNTA

SEQ ID NO: 242632 - protein, 15 aa, Artificial Sequence
  Description of Artificial Sequence: Synthetic peptide
  Seed: LRMKWMMAMKYPITA
LRMKWMMEMAYPPTA

SEQ ID NO: 242633 - protein, 15 aa, Artificial Sequence
  Description of Artificial Sequence: Synthetic peptide
  Seed: LRMKWMMAMKYPITA
LRMKWMMEMAYPQTA

SEQ ID NO: 242634 - protein, 15 aa, Artificial Sequence
  Description of Artificial Sequence: Synthetic peptide
  Seed: LRMKWMMAMKYPITA
LRMKWMMEMAYPRTA

SEQ ID NO: 242635 - protein, 15 aa, Artificial Sequence
  Description of Artificial Sequence: Synthetic peptide
  Seed: LRMKWMMAMKYPITA
LRMKWMMEMAYPSTA

SEQ ID NO: 242636 - protein, 15 aa, Artificial Sequence
  Description of Artificial Sequence: Synthetic peptide
  Seed: LRMKWMMAMKYPITA
LRMKWMMEMAYPTTA

SEQ ID NO: 242637 - protein, 15 aa, Artificial Sequence
  Description of Artificial Sequence: Synthetic peptide
  Seed: LRMKWMMAMKYPITA
LRMKWMMEMAYPVTA

SEQ ID NO: 242638 - protein, 15 aa, Artificial Sequence
  Description of Artificial Sequence: Synthetic peptide
  Seed: LRMKWMMAMKYPITA
LRMKWMMEMAYPWTA

SEQ ID NO: 242639 - protein, 15 aa, Artificial Sequence
  Description of Artificial Sequence: Synthetic peptide
  Seed: LRMKWMMAMKYPITA
LRMKWMMEMAYPYTA

SEQ ID NO: 242640 - protein, 15 aa, Artificial Sequence
  Description of Artificial Sequence: Synthetic peptide
  Seed: LRMKWMMAMKYPITA
LRMKWMMEMFYPATA

SEQ ID NO: 242641 - protein, 15 aa, Artificial Sequence
  Description of Artificial Sequence: Synthetic peptide
  Seed: LRMKWMMAMKYPITA
LRMKWMMEMFYPFTA

SEQ ID NO: 242642 - protein, 15 aa, Artificial Sequence
  Description of Artificial Sequence: Synthetic peptide
  Seed: LRMKWMMAMKYPITA
LRMKWMMEMFYPITA

SEQ ID NO: 242643 - protein, 15 aa, Artificial Sequence
  Description of Artificial Sequence: Synthetic peptide
  Seed: LRMKWMMAMKYPITA
LRMKWMMEMFYPLTA

SEQ ID NO: 242644 - protein, 15 aa, Artificial Sequence
  Description of Artificial Sequence: Synthetic peptide
  Seed: LRMKWMMAMKYPITA
LRMKWMMEMFYPMTA

SEQ ID NO: 242645 - protein, 15 aa, Artificial Sequence
  Description of Artificial Sequence: Synthetic peptide
  Seed: LRMKWMMAMKYPITA
LRMKWMMEMFYPTTA

SEQ ID NO: 242646 - protein, 15 aa, Artificial Sequence
  Description of Artificial Sequence: Synthetic peptide
  Seed: LRMKWMMAMKYPITA
LRMKWMMEMFYPVTA

SEQ ID NO: 242647 - protein, 15 aa, Artificial Sequence
  Description of Artificial Sequence: Synthetic peptide
  Seed: LRMKWMMAMKYPITA
LRMKWMMEMFYPYTA

SEQ ID NO: 242648 - protein, 15 aa, Artificial Sequence
  Description of Artificial Sequence: Synthetic peptide
  Seed: LRMKWMMAMKYPITA
LRMKWMMEMGYPATA

SEQ ID NO: 242649 - protein, 15 aa, Artificial Sequence
  Description of Artificial Sequence: Synthetic peptide
  Seed: LRMKWMMAMKYPITA
LRMKWMMEMGYPCTA

SEQ ID NO: 242650 - protein, 15 aa, Artificial Sequence
  Description of Artificial Sequence: Synthetic peptide
  Seed: LRMKWMMAMKYPITA
LRMKWMMEMGYPFTA

SEQ ID NO: 242651 - protein, 15 aa, Artificial Sequence
  Description of Artificial Sequence: Synthetic peptide
  Seed: LRMKWMMAMKYPITA
LRMKWMMEMGYPGTA

SEQ ID NO: 242652 - protein, 15 aa, Artificial Sequence
  Description of Artificial Sequence: Synthetic peptide
  Seed: LRMKWMMAMKYPITA
LRMKWMMEMGYPHTA

SEQ ID NO: 242653 - protein, 15 aa, Artificial Sequence
  Description of Artificial Sequence: Synthetic peptide
  Seed: LRMKWMMAMKYPITA
LRMKWMMEMGYPITA

SEQ ID NO: 242654 - protein, 15 aa, Artificial Sequence
  Description of Artificial Sequence: Synthetic peptide
  Seed: LRMKWMMAMKYPITA
LRMKWMMEMGYPLTA

SEQ ID NO: 242655 - protein, 15 aa, Artificial Sequence
  Description of Artificial Sequence: Synthetic peptide
  Seed: LRMKWMMAMKYPITA
LRMKWMMEMGYPMTA

SEQ ID NO: 242656 - protein, 15 aa, Artificial Sequence
  Description of Artificial Sequence: Synthetic peptide
  Seed: LRMKWMMAMKYPITA
LRMKWMMEMGYPNTA

SEQ ID NO: 242657 - protein, 15 aa, Artificial Sequence
  Description of Artificial Sequence: Synthetic peptide
  Seed: LRMKWMMAMKYPITA
LRMKWMMEMGYPPTA

SEQ ID NO: 242658 - protein, 15 aa, Artificial Sequence
  Description of Artificial Sequence: Synthetic peptide
  Seed: LRMKWMMAMKYPITA
LRMKWMMEMGYPQTA

SEQ ID NO: 242659 - protein, 15 aa, Artificial Sequence
  Description of Artificial Sequence: Synthetic peptide
  Seed: LRMKWMMAMKYPITA
LRMKWMMEMGYPSTA

SEQ ID NO: 242660 - protein, 15 aa, Artificial Sequence
  Description of Artificial Sequence: Synthetic peptide
  Seed: LRMKWMMAMKYPITA
LRMKWMMEMGYPTTA

SEQ ID NO: 242661 - protein, 15 aa, Artificial Sequence
  Description of Artificial Sequence: Synthetic peptide
  Seed: LRMKWMMAMKYPITA
LRMKWMMEMGYPVTA

SEQ ID NO: 242662 - protein, 15 aa, Artificial Sequence
  Description of Artificial Sequence: Synthetic peptide
  Seed: LRMKWMMAMKYPITA
LRMKWMMEMGYPYTA

SEQ ID NO: 242663 - protein, 15 aa, Artificial Sequence
  Description of Artificial Sequence: Synthetic peptide
  Seed: LRMKWMMAMKYPITA
LRMKWMMEMHYPLTA

SEQ ID NO: 242664 - protein, 15 aa, Artificial Sequence
  Description of Artificial Sequence: Synthetic peptide
  Seed: LRMKWMMAMKYPITA
LRMKWMMEMIYPATA

SEQ ID NO: 242665 - protein, 15 aa, Artificial Sequence
  Description of Artificial Sequence: Synthetic peptide
  Seed: LRMKWMMAMKYPITA
LRMKWMMEMIYPGTA

SEQ ID NO: 242666 - protein, 15 aa, Artificial Sequence
  Description of Artificial Sequence: Synthetic peptide
  Seed: LRMKWMMAMKYPITA
LRMKWMMEMIYPHTA

SEQ ID NO: 242667 - protein, 15 aa, Artificial Sequence
  Description of Artificial Sequence: Synthetic peptide
  Seed: LRMKWMMAMKYPITA
LRMKWMMEMIYPITA

SEQ ID NO: 242668 - protein, 15 aa, Artificial Sequence
  Description of Artificial Sequence: Synthetic peptide
  Seed: LRMKWMMAMKYPITA
LRMKWMMEMIYPLTA

SEQ ID NO: 242669 - protein, 15 aa, Artificial Sequence
  Description of Artificial Sequence: Synthetic peptide
  Seed: LRMKWMMAMKYPITA
LRMKWMMEMIYPMTA

SEQ ID NO: 242670 - protein, 15 aa, Artificial Sequence
  Description of Artificial Sequence: Synthetic peptide
  Seed: LRMKWMMAMKYPITA
LRMKWMMEMIYPNTA

SEQ ID NO: 242671 - protein, 15 aa, Artificial Sequence
  Description of Artificial Sequence: Synthetic peptide
  Seed: LRMKWMMAMKYPITA
LRMKWMMEMIYPQTA

SEQ ID NO: 242672 - protein, 15 aa, Artificial Sequence
  Description of Artificial Sequence: Synthetic peptide
  Seed: LRMKWMMAMKYPITA
LRMKWMMEMIYPSTA

SEQ ID NO: 242673 - protein, 15 aa, Artificial Sequence
  Description of Artificial Sequence: Synthetic peptide
  Seed: LRMKWMMAMKYPITA
LRMKWMMEMIYPTTA

SEQ ID NO: 242674 - protein, 15 aa, Artificial Sequence
  Description of Artificial Sequence: Synthetic peptide
  Seed: LRMKWMMAMKYPITA
LRMKWMMEMIYPVTA

SEQ ID NO: 242675 - protein, 15 aa, Artificial Sequence
  Description of Artificial Sequence: Synthetic peptide
  Seed: LRMKWMMAMKYPITA
LRMKWMMEMLYPATA

SEQ ID NO: 242676 - protein, 15 aa, Artificial Sequence
  Description of Artificial Sequence: Synthetic peptide
  Seed: LRMKWMMAMKYPITA
LRMKWMMEMLYPITA

SEQ ID NO: 242677 - protein, 15 aa, Artificial Sequence
  Description of Artificial Sequence: Synthetic peptide
  Seed: LRMKWMMAMKYPITA
LRMKWMMEMLYPLTA

SEQ ID NO: 242678 - protein, 15 aa, Artificial Sequence
  Description of Artificial Sequence: Synthetic peptide
  Seed: LRMKWMMAMKYPITA
LRMKWMMEMLYPNTA

SEQ ID NO: 242679 - protein, 15 aa, Artificial Sequence
  Description of Artificial Sequence: Synthetic peptide
  Seed: LRMKWMMAMKYPITA
LRMKWMMEMLYPSTA

SEQ ID NO: 242680 - protein, 15 aa, Artificial Sequence
  Description of Artificial Sequence: Synthetic peptide
  Seed: LRMKWMMAMKYPITA
LRMKWMMEMLYPVTA

SEQ ID NO: 242681 - protein, 15 aa, Artificial Sequence
  Description of Artificial Sequence: Synthetic peptide
  Seed: LRMKWMMAMKYPITA
LRMKWMMEMMYPATA

SEQ ID NO: 242682 - protein, 15 aa, Artificial Sequence
  Description of Artificial Sequence: Synthetic peptide
  Seed: LRMKWMMAMKYPITA
LRMKWMMEMMYPITA

SEQ ID NO: 242683 - protein, 15 aa, Artificial Sequence
  Description of Artificial Sequence: Synthetic peptide
  Seed: LRMKWMMAMKYPITA
LRMKWMMEMMYPLTA

SEQ ID NO: 242684 - protein, 15 aa, Artificial Sequence
  Description of Artificial Sequence: Synthetic peptide
  Seed: LRMKWMMAMKYPITA
LRMKWMMEMMYPNTA

SEQ ID NO: 242685 - protein, 15 aa, Artificial Sequence
  Description of Artificial Sequence: Synthetic peptide
  Seed: LRMKWMMAMKYPITA
LRMKWMMEMMYPSTA

SEQ ID NO: 242686 - protein, 15 aa, Artificial Sequence
  Description of Artificial Sequence: Synthetic peptide
  Seed: LRMKWMMAMKYPITA
LRMKWMMEMMYPTTA

SEQ ID NO: 242687 - protein, 15 aa, Artificial Sequence
  Description of Artificial Sequence: Synthetic peptide
  Seed: LRMKWMMAMKYPITA
LRMKWMMEMMYPVTA

SEQ ID NO: 242688 - protein, 15 aa, Artificial Sequence
  Description of Artificial Sequence: Synthetic peptide
  Seed: LRMKWMMAMKYPITA
LRMKWMMEMNYPATA

SEQ ID NO: 242689 - protein, 15 aa, Artificial Sequence
  Description of Artificial Sequence: Synthetic peptide
  Seed: LRMKWMMAMKYPITA
LRMKWMMEMNYPGTA

SEQ ID NO: 242690 - protein, 15 aa, Artificial Sequence
  Description of Artificial Sequence: Synthetic peptide
  Seed: LRMKWMMAMKYPITA
LRMKWMMEMNYPITA

SEQ ID NO: 242691 - protein, 15 aa, Artificial Sequence
  Description of Artificial Sequence: Synthetic peptide
  Seed: LRMKWMMAMKYPITA
LRMKWMMEMNYPLTA

SEQ ID NO: 242692 - protein, 15 aa, Artificial Sequence
  Description of Artificial Sequence: Synthetic peptide
  Seed: LRMKWMMAMKYPITA
LRMKWMMEMNYPMTA

SEQ ID NO: 242693 - protein, 15 aa, Artificial Sequence
  Description of Artificial Sequence: Synthetic peptide
  Seed: LRMKWMMAMKYPITA
LRMKWMMEMNYPNTA

SEQ ID NO: 242694 - protein, 15 aa, Artificial Sequence
  Description of Artificial Sequence: Synthetic peptide
  Seed: LRMKWMMAMKYPITA
LRMKWMMEMNYPSTA

SEQ ID NO: 242695 - protein, 15 aa, Artificial Sequence
  Description of Artificial Sequence: Synthetic peptide
  Seed: LRMKWMMAMKYPITA
LRMKWMMEMNYPTTA

SEQ ID NO: 242696 - protein, 15 aa, Artificial Sequence
  Description of Artificial Sequence: Synthetic peptide
  Seed: LRMKWMMAMKYPITA
LRMKWMMEMNYPVTA

SEQ ID NO: 242697 - protein, 15 aa, Artificial Sequence
  Description of Artificial Sequence: Synthetic peptide
  Seed: LRMKWMMAMKYPITA
LRMKWMMEMPYPATA

SEQ ID NO: 242698 - protein, 15 aa, Artificial Sequence
  Description of Artificial Sequence: Synthetic peptide
  Seed: LRMKWMMAMKYPITA
LRMKWMMEMPYPCTA

SEQ ID NO: 242699 - protein, 15 aa, Artificial Sequence
  Description of Artificial Sequence: Synthetic peptide
  Seed: LRMKWMMAMKYPITA
LRMKWMMEMPYPFTA

SEQ ID NO: 242700 - protein, 15 aa, Artificial Sequence
  Description of Artificial Sequence: Synthetic peptide
  Seed: LRMKWMMAMKYPITA
LRMKWMMEMPYPGTA

SEQ ID NO: 242701 - protein, 15 aa, Artificial Sequence
  Description of Artificial Sequence: Synthetic peptide
  Seed: LRMKWMMAMKYPITA
LRMKWMMEMPYPITA

SEQ ID NO: 242702 - protein, 15 aa, Artificial Sequence
  Description of Artificial Sequence: Synthetic peptide
  Seed: LRMKWMMAMKYPITA
LRMKWMMEMPYPLTA

SEQ ID NO: 242703 - protein, 15 aa, Artificial Sequence
  Description of Artificial Sequence: Synthetic peptide
  Seed: LRMKWMMAMKYPITA
LRMKWMMEMPYPMTA

SEQ ID NO: 242704 - protein, 15 aa, Artificial Sequence
  Description of Artificial Sequence: Synthetic peptide
  Seed: LRMKWMMAMKYPITA
LRMKWMMEMPYPNTA

SEQ ID NO: 242705 - protein, 15 aa, Artificial Sequence
  Description of Artificial Sequence: Synthetic peptide
  Seed: LRMKWMMAMKYPITA
LRMKWMMEMPYPQTA

SEQ ID NO: 242706 - protein, 15 aa, Artificial Sequence
  Description of Artificial Sequence: Synthetic peptide
  Seed: LRMKWMMAMKYPITA
LRMKWMMEMPYPSTA

SEQ ID NO: 242707 - protein, 15 aa, Artificial Sequence
  Description of Artificial Sequence: Synthetic peptide
  Seed: LRMKWMMAMKYPITA
LRMKWMMEMPYPTTA

SEQ ID NO: 242708 - protein, 15 aa, Artificial Sequence
  Description of Artificial Sequence: Synthetic peptide
  Seed: LRMKWMMAMKYPITA
LRMKWMMEMPYPVTA

SEQ ID NO: 242709 - protein, 15 aa, Artificial Sequence
  Description of Artificial Sequence: Synthetic peptide
  Seed: LRMKWMMAMKYPITA
LRMKWMMEMSYPATA

SEQ ID NO: 242710 - protein, 15 aa, Artificial Sequence
  Description of Artificial Sequence: Synthetic peptide
  Seed: LRMKWMMAMKYPITA
LRMKWMMEMSYPCTA

SEQ ID NO: 242711 - protein, 15 aa, Artificial Sequence
  Description of Artificial Sequence: Synthetic peptide
  Seed: LRMKWMMAMKYPITA
LRMKWMMEMSYPFTA

SEQ ID NO: 242712 - protein, 15 aa, Artificial Sequence
  Description of Artificial Sequence: Synthetic peptide
  Seed: LRMKWMMAMKYPITA
LRMKWMMEMSYPGTA

SEQ ID NO: 242713 - protein, 15 aa, Artificial Sequence
  Description of Artificial Sequence: Synthetic peptide
  Seed: LRMKWMMAMKYPITA
LRMKWMMEMSYPHTA

SEQ ID NO: 242714 - protein, 15 aa, Artificial Sequence
  Description of Artificial Sequence: Synthetic peptide
  Seed: LRMKWMMAMKYPITA
LRMKWMMEMSYPITA

SEQ ID NO: 242715 - protein, 15 aa, Artificial Sequence
  Description of Artificial Sequence: Synthetic peptide
  Seed: LRMKWMMAMKYPITA
LRMKWMMEMSYPLTA

SEQ ID NO: 242716 - protein, 15 aa, Artificial Sequence
  Description of Artificial Sequence: Synthetic peptide
  Seed: LRMKWMMAMKYPITA
LRMKWMMEMSYPMTA

SEQ ID NO: 242717 - protein, 15 aa, Artificial Sequence
  Description of Artificial Sequence: Synthetic peptide
  Seed: LRMKWMMAMKYPITA
LRMKWMMEMSYPNTA

SEQ ID NO: 242718 - protein, 15 aa, Artificial Sequence
  Description of Artificial Sequence: Synthetic peptide
  Seed: LRMKWMMAMKYPITA
LRMKWMMEMSYPQTA

SEQ ID NO: 242719 - protein, 15 aa, Artificial Sequence
  Description of Artificial Sequence: Synthetic peptide
  Seed: LRMKWMMAMKYPITA
LRMKWMMEMSYPSTA

SEQ ID NO: 242720 - protein, 15 aa, Artificial Sequence
  Description of Artificial Sequence: Synthetic peptide
  Seed: LRMKWMMAMKYPITA
LRMKWMMEMSYPTTA

SEQ ID NO: 242721 - protein, 15 aa, Artificial Sequence
  Description of Artificial Sequence: Synthetic peptide
  Seed: LRMKWMMAMKYPITA
LRMKWMMEMSYPVTA

SEQ ID NO: 242722 - protein, 15 aa, Artificial Sequence
  Description of Artificial Sequence: Synthetic peptide
  Seed: LRMKWMMAMKYPITA
LRMKWMMEMSYPYTA

SEQ ID NO: 242723 - protein, 15 aa, Artificial Sequence
  Description of Artificial Sequence: Synthetic peptide
  Seed: LRMKWMMAMKYPITA
LRMKWMMEMTYPATA

SEQ ID NO: 242724 - protein, 15 aa, Artificial Sequence
  Description of Artificial Sequence: Synthetic peptide
  Seed: LRMKWMMAMKYPITA
LRMKWMMEMTYPGTA

SEQ ID NO: 242725 - protein, 15 aa, Artificial Sequence
  Description of Artificial Sequence: Synthetic peptide
  Seed: LRMKWMMAMKYPITA
LRMKWMMEMTYPHTA

SEQ ID NO: 242726 - protein, 15 aa, Artificial Sequence
  Description of Artificial Sequence: Synthetic peptide
  Seed: LRMKWMMAMKYPITA
LRMKWMMEMTYPITA

SEQ ID NO: 242727 - protein, 15 aa, Artificial Sequence
  Description of Artificial Sequence: Synthetic peptide
  Seed: LRMKWMMAMKYPITA
LRMKWMMEMTYPLTA

SEQ ID NO: 242728 - protein, 15 aa, Artificial Sequence
  Description of Artificial Sequence: Synthetic peptide
  Seed: LRMKWMMAMKYPITA
LRMKWMMEMTYPMTA

SEQ ID NO: 242729 - protein, 15 aa, Artificial Sequence
  Description of Artificial Sequence: Synthetic peptide
  Seed: LRMKWMMAMKYPITA
LRMKWMMEMTYPNTA

SEQ ID NO: 242730 - protein, 15 aa, Artificial Sequence
  Description of Artificial Sequence: Synthetic peptide
  Seed: LRMKWMMAMKYPITA
LRMKWMMEMTYPQTA

SEQ ID NO: 242731 - protein, 15 aa, Artificial Sequence
  Description of Artificial Sequence: Synthetic peptide
  Seed: LRMKWMMAMKYPITA
LRMKWMMEMTYPSTA

SEQ ID NO: 242732 - protein, 15 aa, Artificial Sequence
  Description of Artificial Sequence: Synthetic peptide
  Seed: LRMKWMMAMKYPITA
LRMKWMMEMTYPTTA

SEQ ID NO: 242733 - protein, 15 aa, Artificial Sequence
  Description of Artificial Sequence: Synthetic peptide
  Seed: LRMKWMMAMKYPITA
LRMKWMMEMTYPVTA

SEQ ID NO: 242734 - protein, 15 aa, Artificial Sequence
  Description of Artificial Sequence: Synthetic peptide
  Seed: LRMKWMMAMKYPITA
LRMKWMMEMVYPATA

SEQ ID NO: 242735 - protein, 15 aa, Artificial Sequence
  Description of Artificial Sequence: Synthetic peptide
  Seed: LRMKWMMAMKYPITA
LRMKWMMEMVYPGTA

SEQ ID NO: 242736 - protein, 15 aa, Artificial Sequence
  Description of Artificial Sequence: Synthetic peptide
  Seed: LRMKWMMAMKYPITA
LRMKWMMEMVYPHTA

SEQ ID NO: 242737 - protein, 15 aa, Artificial Sequence
  Description of Artificial Sequence: Synthetic peptide
  Seed: LRMKWMMAMKYPITA
LRMKWMMEMVYPITA

SEQ ID NO: 242738 - protein, 15 aa, Artificial Sequence
  Description of Artificial Sequence: Synthetic peptide
  Seed: LRMKWMMAMKYPITA
LRMKWMMEMVYPLTA

SEQ ID NO: 242739 - protein, 15 aa, Artificial Sequence
  Description of Artificial Sequence: Synthetic peptide
  Seed: LRMKWMMAMKYPITA
LRMKWMMEMVYPMTA

SEQ ID NO: 242740 - protein, 15 aa, Artificial Sequence
  Description of Artificial Sequence: Synthetic peptide
  Seed: LRMKWMMAMKYPITA
LRMKWMMEMVYPNTA

SEQ ID NO: 242741 - protein, 15 aa, Artificial Sequence
  Description of Artificial Sequence: Synthetic peptide
  Seed: LRMKWMMAMKYPITA
LRMKWMMEMVYPQTA

SEQ ID NO: 242742 - protein, 15 aa, Artificial Sequence
  Description of Artificial Sequence: Synthetic peptide
  Seed: LRMKWMMAMKYPITA
LRMKWMMEMVYPSTA

SEQ ID NO: 242743 - protein, 15 aa, Artificial Sequence
  Description of Artificial Sequence: Synthetic peptide
  Seed: LRMKWMMAMKYPITA
LRMKWMMEMVYPTTA

SEQ ID NO: 242744 - protein, 15 aa, Artificial Sequence
  Description of Artificial Sequence: Synthetic peptide
  Seed: LRMKWMMAMKYPITA
LRMKWMMEMVYPVTA

SEQ ID NO: 242745 - protein, 15 aa, Artificial Sequence
  Description of Artificial Sequence: Synthetic peptide
  Seed: LRMKWMMAMKYPITA
LRMKWMMEMYYPITA

SEQ ID NO: 242746 - protein, 15 aa, Artificial Sequence
  Description of Artificial Sequence: Synthetic peptide
  Seed: LRMKWMMAMKYPITA
LRMKWMMEMYYPLTA

SEQ ID NO: 242747 - protein, 15 aa, Artificial Sequence
  Description of Artificial Sequence: Synthetic peptide
  Seed: LRMKWMMAMKYPITA
LRMKWMMEMYYPVTA

SEQ ID NO: 242748 - protein, 15 aa, Artificial Sequence
  Description of Artificial Sequence: Synthetic peptide
  Seed: LRMKWMMAMKYPITA
LRMKWMMFMAYPATA

SEQ ID NO: 242749 - protein, 15 aa, Artificial Sequence
  Description of Artificial Sequence: Synthetic peptide
  Seed: LRMKWMMAMKYPITA
LRMKWMMFMAYPCTA

SEQ ID NO: 242750 - protein, 15 aa, Artificial Sequence
  Description of Artificial Sequence: Synthetic peptide
  Seed: LRMKWMMAMKYPITA
LRMKWMMFMAYPDTA

SEQ ID NO: 242751 - protein, 15 aa, Artificial Sequence
  Description of Artificial Sequence: Synthetic peptide
  Seed: LRMKWMMAMKYPITA
LRMKWMMFMAYPETA

SEQ ID NO: 242752 - protein, 15 aa, Artificial Sequence
  Description of Artificial Sequence: Synthetic peptide
  Seed: LRMKWMMAMKYPITA
LRMKWMMFMAYPFTA

SEQ ID NO: 242753 - protein, 15 aa, Artificial Sequence
  Description of Artificial Sequence: Synthetic peptide
  Seed: LRMKWMMAMKYPITA
LRMKWMMFMAYPGTA

SEQ ID NO: 242754 - protein, 15 aa, Artificial Sequence
  Description of Artificial Sequence: Synthetic peptide
  Seed: LRMKWMMAMKYPITA
LRMKWMMFMAYPHTA

SEQ ID NO: 242755 - protein, 15 aa, Artificial Sequence
  Description of Artificial Sequence: Synthetic peptide
  Seed: LRMKWMMAMKYPITA
LRMKWMMFMAYPITA

SEQ ID NO: 242756 - protein, 15 aa, Artificial Sequence
  Description of Artificial Sequence: Synthetic peptide
  Seed: LRMKWMMAMKYPITA
LRMKWMMFMAYPKTA

SEQ ID NO: 242757 - protein, 15 aa, Artificial Sequence
  Description of Artificial Sequence: Synthetic peptide
  Seed: LRMKWMMAMKYPITA
LRMKWMMFMAYPLTA

SEQ ID NO: 242758 - protein, 15 aa, Artificial Sequence
  Description of Artificial Sequence: Synthetic peptide
  Seed: LRMKWMMAMKYPITA
LRMKWMMFMAYPMTA

SEQ ID NO: 242759 - protein, 15 aa, Artificial Sequence
  Description of Artificial Sequence: Synthetic peptide
  Seed: LRMKWMMAMKYPITA
LRMKWMMFMAYPNTA

SEQ ID NO: 242760 - protein, 15 aa, Artificial Sequence
  Description of Artificial Sequence: Synthetic peptide
  Seed: LRMKWMMAMKYPITA
LRMKWMMFMAYPPTA

SEQ ID NO: 242761 - protein, 15 aa, Artificial Sequence
  Description of Artificial Sequence: Synthetic peptide
  Seed: LRMKWMMAMKYPITA
LRMKWMMFMAYPQTA

SEQ ID NO: 242762 - protein, 15 aa, Artificial Sequence
  Description of Artificial Sequence: Synthetic peptide
  Seed: LRMKWMMAMKYPITA
LRMKWMMFMAYPRTA

SEQ ID NO: 242763 - protein, 15 aa, Artificial Sequence
  Description of Artificial Sequence: Synthetic peptide
  Seed: LRMKWMMAMKYPITA
LRMKWMMFMAYPSTA

SEQ ID NO: 242764 - protein, 15 aa, Artificial Sequence
  Description of Artificial Sequence: Synthetic peptide
  Seed: LRMKWMMAMKYPITA
LRMKWMMFMAYPTTA

SEQ ID NO: 242765 - protein, 15 aa, Artificial Sequence
  Description of Artificial Sequence: Synthetic peptide
  Seed: LRMKWMMAMKYPITA
LRMKWMMFMAYPVTA

SEQ ID NO: 242766 - protein, 15 aa, Artificial Sequence
  Description of Artificial Sequence: Synthetic peptide
  Seed: LRMKWMMAMKYPITA
LRMKWMMFMAYPYTA

SEQ ID NO: 242767 - protein, 15 aa, Artificial Sequence
  Description of Artificial Sequence: Synthetic peptide
  Seed: LRMKWMMAMKYPITA
LRMKWMMFMGYPATA

SEQ ID NO: 242768 - protein, 15 aa, Artificial Sequence
  Description of Artificial Sequence: Synthetic peptide
  Seed: LRMKWMMAMKYPITA
LRMKWMMFMGYPGTA

SEQ ID NO: 242769 - protein, 15 aa, Artificial Sequence
  Description of Artificial Sequence: Synthetic peptide
  Seed: LRMKWMMAMKYPITA
LRMKWMMFMGYPITA

SEQ ID NO: 242770 - protein, 15 aa, Artificial Sequence
  Description of Artificial Sequence: Synthetic peptide
  Seed: LRMKWMMAMKYPITA
LRMKWMMFMGYPKTA

SEQ ID NO: 242771 - protein, 15 aa, Artificial Sequence
  Description of Artificial Sequence: Synthetic peptide
  Seed: LRMKWMMAMKYPITA
LRMKWMMFMGYPLTA

SEQ ID NO: 242772 - protein, 15 aa, Artificial Sequence
  Description of Artificial Sequence: Synthetic peptide
  Seed: LRMKWMMAMKYPITA
LRMKWMMFMGYPMTA

SEQ ID NO: 242773 - protein, 15 aa, Artificial Sequence
  Description of Artificial Sequence: Synthetic peptide
  Seed: LRMKWMMAMKYPITA
LRMKWMMFMGYPNTA

SEQ ID NO: 242774 - protein, 15 aa, Artificial Sequence
  Description of Artificial Sequence: Synthetic peptide
  Seed: LRMKWMMAMKYPITA
LRMKWMMFMGYPRTA

SEQ ID NO: 242775 - protein, 15 aa, Artificial Sequence
  Description of Artificial Sequence: Synthetic peptide
  Seed: LRMKWMMAMKYPITA
LRMKWMMFMGYPSTA

SEQ ID NO: 242776 - protein, 15 aa, Artificial Sequence
  Description of Artificial Sequence: Synthetic peptide
  Seed: LRMKWMMAMKYPITA
LRMKWMMFMGYPTTA

SEQ ID NO: 242777 - protein, 15 aa, Artificial Sequence
  Description of Artificial Sequence: Synthetic peptide
  Seed: LRMKWMMAMKYPITA
LRMKWMMFMGYPVTA

SEQ ID NO: 242778 - protein, 15 aa, Artificial Sequence
  Description of Artificial Sequence: Synthetic peptide
  Seed: LRMKWMMAMKYPITA
LRMKWMMFMIYPATA

SEQ ID NO: 242779 - protein, 15 aa, Artificial Sequence
  Description of Artificial Sequence: Synthetic peptide
  Seed: LRMKWMMAMKYPITA
LRMKWMMFMIYPMTA

SEQ ID NO: 242780 - protein, 15 aa, Artificial Sequence
  Description of Artificial Sequence: Synthetic peptide
  Seed: LRMKWMMAMKYPITA
LRMKWMMFMIYPNTA

SEQ ID NO: 242781 - protein, 15 aa, Artificial Sequence
  Description of Artificial Sequence: Synthetic peptide
  Seed: LRMKWMMAMKYPITA
LRMKWMMFMIYPSTA

SEQ ID NO: 242782 - protein, 15 aa, Artificial Sequence
  Description of Artificial Sequence: Synthetic peptide
  Seed: LRMKWMMAMKYPITA
LRMKWMMFMKYPATA

SEQ ID NO: 242783 - protein, 15 aa, Artificial Sequence
  Description of Artificial Sequence: Synthetic peptide
  Seed: LRMKWMMAMKYPITA
LRMKWMMFMKYPGTA

SEQ ID NO: 242784 - protein, 15 aa, Artificial Sequence
  Description of Artificial Sequence: Synthetic peptide
  Seed: LRMKWMMAMKYPITA
LRMKWMMFMKYPHTA

SEQ ID NO: 242785 - protein, 15 aa, Artificial Sequence
  Description of Artificial Sequence: Synthetic peptide
  Seed: LRMKWMMAMKYPITA
LRMKWMMFMKYPKTA

SEQ ID NO: 242786 - protein, 15 aa, Artificial Sequence
  Description of Artificial Sequence: Synthetic peptide
  Seed: LRMKWMMAMKYPITA
LRMKWMMFMKYPQTA

SEQ ID NO: 242787 - protein, 15 aa, Artificial Sequence
  Description of Artificial Sequence: Synthetic peptide
  Seed: LRMKWMMAMKYPITA
LRMKWMMFMKYPRTA

SEQ ID NO: 242788 - protein, 15 aa, Artificial Sequence
  Description of Artificial Sequence: Synthetic peptide
  Seed: LRMKWMMAMKYPITA
LRMKWMMFMKYPSTA

SEQ ID NO: 242789 - protein, 15 aa, Artificial Sequence
  Description of Artificial Sequence: Synthetic peptide
  Seed: LRMKWMMAMKYPITA
LRMKWMMFMKYPYTA

SEQ ID NO: 242790 - protein, 15 aa, Artificial Sequence
  Description of Artificial Sequence: Synthetic peptide
  Seed: LRMKWMMAMKYPITA
LRMKWMMFMNYPATA

SEQ ID NO: 242791 - protein, 15 aa, Artificial Sequence
  Description of Artificial Sequence: Synthetic peptide
  Seed: LRMKWMMAMKYPITA
LRMKWMMFMNYPDTA

SEQ ID NO: 242792 - protein, 15 aa, Artificial Sequence
  Description of Artificial Sequence: Synthetic peptide
  Seed: LRMKWMMAMKYPITA
LRMKWMMFMNYPITA

SEQ ID NO: 242793 - protein, 15 aa, Artificial Sequence
  Description of Artificial Sequence: Synthetic peptide
  Seed: LRMKWMMAMKYPITA
LRMKWMMFMNYPLTA

SEQ ID NO: 242794 - protein, 15 aa, Artificial Sequence
  Description of Artificial Sequence: Synthetic peptide
  Seed: LRMKWMMAMKYPITA
LRMKWMMFMNYPMTA

SEQ ID NO: 242795 - protein, 15 aa, Artificial Sequence
  Description of Artificial Sequence: Synthetic peptide
  Seed: LRMKWMMAMKYPITA
LRMKWMMFMNYPRTA

SEQ ID NO: 242796 - protein, 15 aa, Artificial Sequence
  Description of Artificial Sequence: Synthetic peptide
  Seed: LRMKWMMAMKYPITA
LRMKWMMFMNYPSTA

SEQ ID NO: 242797 - protein, 15 aa, Artificial Sequence
  Description of Artificial Sequence: Synthetic peptide
  Seed: LRMKWMMAMKYPITA
LRMKWMMFMNYPTTA

SEQ ID NO: 242798 - protein, 15 aa, Artificial Sequence
  Description of Artificial Sequence: Synthetic peptide
  Seed: LRMKWMMAMKYPITA
LRMKWMMFMNYPVTA

SEQ ID NO: 242799 - protein, 15 aa, Artificial Sequence
  Description of Artificial Sequence: Synthetic peptide
  Seed: LRMKWMMAMKYPITA
LRMKWMMFMPYPATA

SEQ ID NO: 242800 - protein, 15 aa, Artificial Sequence
  Description of Artificial Sequence: Synthetic peptide
  Seed: LRMKWMMAMKYPITA
LRMKWMMFMPYPFTA

SEQ ID NO: 242801 - protein, 15 aa, Artificial Sequence
  Description of Artificial Sequence: Synthetic peptide
  Seed: LRMKWMMAMKYPITA
LRMKWMMFMPYPGTA

SEQ ID NO: 242802 - protein, 15 aa, Artificial Sequence
  Description of Artificial Sequence: Synthetic peptide
  Seed: LRMKWMMAMKYPITA
LRMKWMMFMPYPHTA

SEQ ID NO: 242803 - protein, 15 aa, Artificial Sequence
  Description of Artificial Sequence: Synthetic peptide
  Seed: LRMKWMMAMKYPITA
LRMKWMMFMPYPITA

SEQ ID NO: 242804 - protein, 15 aa, Artificial Sequence
  Description of Artificial Sequence: Synthetic peptide
  Seed: LRMKWMMAMKYPITA
LRMKWMMFMPYPLTA

SEQ ID NO: 242805 - protein, 15 aa, Artificial Sequence
  Description of Artificial Sequence: Synthetic peptide
  Seed: LRMKWMMAMKYPITA
LRMKWMMFMPYPMTA

SEQ ID NO: 242806 - protein, 15 aa, Artificial Sequence
  Description of Artificial Sequence: Synthetic peptide
  Seed: LRMKWMMAMKYPITA
LRMKWMMFMPYPNTA

SEQ ID NO: 242807 - protein, 15 aa, Artificial Sequence
  Description of Artificial Sequence: Synthetic peptide
  Seed: LRMKWMMAMKYPITA
LRMKWMMFMPYPQTA

SEQ ID NO: 242808 - protein, 15 aa, Artificial Sequence
  Description of Artificial Sequence: Synthetic peptide
  Seed: LRMKWMMAMKYPITA
LRMKWMMFMPYPRTA

SEQ ID NO: 242809 - protein, 15 aa, Artificial Sequence
  Description of Artificial Sequence: Synthetic peptide
  Seed: LRMKWMMAMKYPITA
LRMKWMMFMPYPSTA

SEQ ID NO: 242810 - protein, 15 aa, Artificial Sequence
  Description of Artificial Sequence: Synthetic peptide
  Seed: LRMKWMMAMKYPITA
LRMKWMMFMPYPTTA

SEQ ID NO: 242811 - protein, 15 aa, Artificial Sequence
  Description of Artificial Sequence: Synthetic peptide
  Seed: LRMKWMMAMKYPITA
LRMKWMMFMPYPVTA

SEQ ID NO: 242812 - protein, 15 aa, Artificial Sequence
  Description of Artificial Sequence: Synthetic peptide
  Seed: LRMKWMMAMKYPITA
LRMKWMMFMQYPATA

SEQ ID NO: 242813 - protein, 15 aa, Artificial Sequence
  Description of Artificial Sequence: Synthetic peptide
  Seed: LRMKWMMAMKYPITA
LRMKWMMFMRYPATA

SEQ ID NO: 242814 - protein, 15 aa, Artificial Sequence
  Description of Artificial Sequence: Synthetic peptide
  Seed: LRMKWMMAMKYPITA
LRMKWMMFMRYPGTA

SEQ ID NO: 242815 - protein, 15 aa, Artificial Sequence
  Description of Artificial Sequence: Synthetic peptide
  Seed: LRMKWMMAMKYPITA
LRMKWMMFMRYPHTA

SEQ ID NO: 242816 - protein, 15 aa, Artificial Sequence
  Description of Artificial Sequence: Synthetic peptide
  Seed: LRMKWMMAMKYPITA
LRMKWMMFMRYPKTA

SEQ ID NO: 242817 - protein, 15 aa, Artificial Sequence
  Description of Artificial Sequence: Synthetic peptide
  Seed: LRMKWMMAMKYPITA
LRMKWMMFMRYPQTA

SEQ ID NO: 242818 - protein, 15 aa, Artificial Sequence
  Description of Artificial Sequence: Synthetic peptide
  Seed: LRMKWMMAMKYPITA
LRMKWMMFMRYPRTA

SEQ ID NO: 242819 - protein, 15 aa, Artificial Sequence
  Description of Artificial Sequence: Synthetic peptide
  Seed: LRMKWMMAMKYPITA
LRMKWMMFMRYPSTA

SEQ ID NO: 242820 - protein, 15 aa, Artificial Sequence
  Description of Artificial Sequence: Synthetic peptide
  Seed: LRMKWMMAMKYPITA
LRMKWMMFMRYPYTA

SEQ ID NO: 242821 - protein, 15 aa, Artificial Sequence
  Description of Artificial Sequence: Synthetic peptide
  Seed: LRMKWMMAMKYPITA
LRMKWMMFMSYPATA

SEQ ID NO: 242822 - protein, 15 aa, Artificial Sequence
  Description of Artificial Sequence: Synthetic peptide
  Seed: LRMKWMMAMKYPITA
LRMKWMMFMSYPDTA

SEQ ID NO: 242823 - protein, 15 aa, Artificial Sequence
  Description of Artificial Sequence: Synthetic peptide
  Seed: LRMKWMMAMKYPITA
LRMKWMMFMSYPFTA

SEQ ID NO: 242824 - protein, 15 aa, Artificial Sequence
  Description of Artificial Sequence: Synthetic peptide
  Seed: LRMKWMMAMKYPITA
LRMKWMMFMSYPGTA

SEQ ID NO: 242825 - protein, 15 aa, Artificial Sequence
  Description of Artificial Sequence: Synthetic peptide
  Seed: LRMKWMMAMKYPITA
LRMKWMMFMSYPHTA

SEQ ID NO: 242826 - protein, 15 aa, Artificial Sequence
  Description of Artificial Sequence: Synthetic peptide
  Seed: LRMKWMMAMKYPITA
LRMKWMMFMSYPITA

SEQ ID NO: 242827 - protein, 15 aa, Artificial Sequence
  Description of Artificial Sequence: Synthetic peptide
  Seed: LRMKWMMAMKYPITA
LRMKWMMFMSYPKTA

SEQ ID NO: 242828 - protein, 15 aa, Artificial Sequence
  Description of Artificial Sequence: Synthetic peptide
  Seed: LRMKWMMAMKYPITA
LRMKWMMFMSYPLTA

SEQ ID NO: 242829 - protein, 15 aa, Artificial Sequence
  Description of Artificial Sequence: Synthetic peptide
  Seed: LRMKWMMAMKYPITA
LRMKWMMFMSYPMTA

SEQ ID NO: 242830 - protein, 15 aa, Artificial Sequence
  Description of Artificial Sequence: Synthetic peptide
  Seed: LRMKWMMAMKYPITA
LRMKWMMFMSYPNTA

SEQ ID NO: 242831 - protein, 15 aa, Artificial Sequence
  Description of Artificial Sequence: Synthetic peptide
  Seed: LRMKWMMAMKYPITA
LRMKWMMFMSYPQTA

SEQ ID NO: 242832 - protein, 15 aa, Artificial Sequence
  Description of Artificial Sequence: Synthetic peptide
  Seed: LRMKWMMAMKYPITA
LRMKWMMFMSYPRTA

SEQ ID NO: 242833 - protein, 15 aa, Artificial Sequence
  Description of Artificial Sequence: Synthetic peptide
  Seed: LRMKWMMAMKYPITA
LRMKWMMFMSYPSTA

SEQ ID NO: 242834 - protein, 15 aa, Artificial Sequence
  Description of Artificial Sequence: Synthetic peptide
  Seed: LRMKWMMAMKYPITA
LRMKWMMFMSYPTTA

SEQ ID NO: 242835 - protein, 15 aa, Artificial Sequence
  Description of Artificial Sequence: Synthetic peptide
  Seed: LRMKWMMAMKYPITA
LRMKWMMFMSYPVTA

SEQ ID NO: 242836 - protein, 15 aa, Artificial Sequence
  Description of Artificial Sequence: Synthetic peptide
  Seed: LRMKWMMAMKYPITA
LRMKWMMFMTYPATA

SEQ ID NO: 242837 - protein, 15 aa, Artificial Sequence
  Description of Artificial Sequence: Synthetic peptide
  Seed: LRMKWMMAMKYPITA
LRMKWMMFMTYPDTA

SEQ ID NO: 242838 - protein, 15 aa, Artificial Sequence
  Description of Artificial Sequence: Synthetic peptide
  Seed: LRMKWMMAMKYPITA
LRMKWMMFMTYPETA

SEQ ID NO: 242839 - protein, 15 aa, Artificial Sequence
  Description of Artificial Sequence: Synthetic peptide
  Seed: LRMKWMMAMKYPITA
LRMKWMMFMTYPGTA

SEQ ID NO: 242840 - protein, 15 aa, Artificial Sequence
  Description of Artificial Sequence: Synthetic peptide
  Seed: LRMKWMMAMKYPITA
LRMKWMMFMTYPHTA

SEQ ID NO: 242841 - protein, 15 aa, Artificial Sequence
  Description of Artificial Sequence: Synthetic peptide
  Seed: LRMKWMMAMKYPITA
LRMKWMMFMTYPITA

SEQ ID NO: 242842 - protein, 15 aa, Artificial Sequence
  Description of Artificial Sequence: Synthetic peptide
  Seed: LRMKWMMAMKYPITA
LRMKWMMFMTYPKTA

SEQ ID NO: 242843 - protein, 15 aa, Artificial Sequence
  Description of Artificial Sequence: Synthetic peptide
  Seed: LRMKWMMAMKYPITA
LRMKWMMFMTYPLTA

SEQ ID NO: 242844 - protein, 15 aa, Artificial Sequence
  Description of Artificial Sequence: Synthetic peptide
  Seed: LRMKWMMAMKYPITA
LRMKWMMFMTYPMTA

SEQ ID NO: 242845 - protein, 15 aa, Artificial Sequence
  Description of Artificial Sequence: Synthetic peptide
  Seed: LRMKWMMAMKYPITA
LRMKWMMFMTYPNTA

SEQ ID NO: 242846 - protein, 15 aa, Artificial Sequence
  Description of Artificial Sequence: Synthetic peptide
  Seed: LRMKWMMAMKYPITA
LRMKWMMFMTYPPTA

SEQ ID NO: 242847 - protein, 15 aa, Artificial Sequence
  Description of Artificial Sequence: Synthetic peptide
  Seed: LRMKWMMAMKYPITA
LRMKWMMFMTYPQTA

SEQ ID NO: 242848 - protein, 15 aa, Artificial Sequence
  Description of Artificial Sequence: Synthetic peptide
  Seed: LRMKWMMAMKYPITA
LRMKWMMFMTYPRTA

SEQ ID NO: 242849 - protein, 15 aa, Artificial Sequence
  Description of Artificial Sequence: Synthetic peptide
  Seed: LRMKWMMAMKYPITA
LRMKWMMFMTYPSTA

SEQ ID NO: 242850 - protein, 15 aa, Artificial Sequence
  Description of Artificial Sequence: Synthetic peptide
  Seed: LRMKWMMAMKYPITA
LRMKWMMFMTYPTTA

SEQ ID NO: 242851 - protein, 15 aa, Artificial Sequence
  Description of Artificial Sequence: Synthetic peptide
  Seed: LRMKWMMAMKYPITA
LRMKWMMFMTYPVTA

SEQ ID NO: 242852 - protein, 15 aa, Artificial Sequence
  Description of Artificial Sequence: Synthetic peptide
  Seed: LRMKWMMAMKYPITA
LRMKWMMFMVYPATA

SEQ ID NO: 242853 - protein, 15 aa, Artificial Sequence
  Description of Artificial Sequence: Synthetic peptide
  Seed: LRMKWMMAMKYPITA
LRMKWMMFMVYPHTA

SEQ ID NO: 242854 - protein, 15 aa, Artificial Sequence
  Description of Artificial Sequence: Synthetic peptide
  Seed: LRMKWMMAMKYPITA
LRMKWMMFMVYPMTA

SEQ ID NO: 242855 - protein, 15 aa, Artificial Sequence
  Description of Artificial Sequence: Synthetic peptide
  Seed: LRMKWMMAMKYPITA
LRMKWMMFMVYPNTA

SEQ ID NO: 242856 - protein, 15 aa, Artificial Sequence
  Description of Artificial Sequence: Synthetic peptide
  Seed: LRMKWMMAMKYPITA
LRMKWMMFMVYPPTA

SEQ ID NO: 242857 - protein, 15 aa, Artificial Sequence
  Description of Artificial Sequence: Synthetic peptide
  Seed: LRMKWMMAMKYPITA
LRMKWMMFMVYPQTA

SEQ ID NO: 242858 - protein, 15 aa, Artificial Sequence
  Description of Artificial Sequence: Synthetic peptide
  Seed: LRMKWMMAMKYPITA
LRMKWMMFMVYPSTA

SEQ ID NO: 242859 - protein, 15 aa, Artificial Sequence
  Description of Artificial Sequence: Synthetic peptide
  Seed: LRMKWMMAMKYPITA
LRMKWMMFMVYPTTA

SEQ ID NO: 242860 - protein, 15 aa, Artificial Sequence
  Description of Artificial Sequence: Synthetic peptide
  Seed: LRMKWMMAMKYPITA
LRMKWMMFMVYPVTA

SEQ ID NO: 242861 - protein, 15 aa, Artificial Sequence
  Description of Artificial Sequence: Synthetic peptide
  Seed: LRMKWMMAMKYPITA
LRMKWMMGMAYPATA

SEQ ID NO: 242862 - protein, 15 aa, Artificial Sequence
  Description of Artificial Sequence: Synthetic peptide
  Seed: LRMKWMMAMKYPITA
LRMKWMMGMAYPCTA

SEQ ID NO: 242863 - protein, 15 aa, Artificial Sequence
  Description of Artificial Sequence: Synthetic peptide
  Seed: LRMKWMMAMKYPITA
LRMKWMMGMAYPDTA

SEQ ID NO: 242864 - protein, 15 aa, Artificial Sequence
  Description of Artificial Sequence: Synthetic peptide
  Seed: LRMKWMMAMKYPITA
LRMKWMMGMAYPETA

SEQ ID NO: 242865 - protein, 15 aa, Artificial Sequence
  Description of Artificial Sequence: Synthetic peptide
  Seed: LRMKWMMAMKYPITA
LRMKWMMGMAYPFTA

SEQ ID NO: 242866 - protein, 15 aa, Artificial Sequence
  Description of Artificial Sequence: Synthetic peptide
  Seed: LRMKWMMAMKYPITA
LRMKWMMGMAYPGTA

SEQ ID NO: 242867 - protein, 15 aa, Artificial Sequence
  Description of Artificial Sequence: Synthetic peptide
  Seed: LRMKWMMAMKYPITA
LRMKWMMGMAYPHTA

SEQ ID NO: 242868 - protein, 15 aa, Artificial Sequence
  Description of Artificial Sequence: Synthetic peptide
  Seed: LRMKWMMAMKYPITA
LRMKWMMGMAYPITA

SEQ ID NO: 242869 - protein, 15 aa, Artificial Sequence
  Description of Artificial Sequence: Synthetic peptide
  Seed: LRMKWMMAMKYPITA
LRMKWMMGMAYPKTA

SEQ ID NO: 242870 - protein, 15 aa, Artificial Sequence
  Description of Artificial Sequence: Synthetic peptide
  Seed: LRMKWMMAMKYPITA
LRMKWMMGMAYPLTA

SEQ ID NO: 242871 - protein, 15 aa, Artificial Sequence
  Description of Artificial Sequence: Synthetic peptide
  Seed: LRMKWMMAMKYPITA
LRMKWMMGMAYPMTA

SEQ ID NO: 242872 - protein, 15 aa, Artificial Sequence
  Description of Artificial Sequence: Synthetic peptide
  Seed: LRMKWMMAMKYPITA
LRMKWMMGMAYPNTA

SEQ ID NO: 242873 - protein, 15 aa, Artificial Sequence
  Description of Artificial Sequence: Synthetic peptide
  Seed: LRMKWMMAMKYPITA
LRMKWMMGMAYPPTA

SEQ ID NO: 242874 - protein, 15 aa, Artificial Sequence
  Description of Artificial Sequence: Synthetic peptide
  Seed: LRMKWMMAMKYPITA
LRMKWMMGMAYPQTA

SEQ ID NO: 242875 - protein, 15 aa, Artificial Sequence
  Description of Artificial Sequence: Synthetic peptide
  Seed: LRMKWMMAMKYPITA
LRMKWMMGMAYPRTA

SEQ ID NO: 242876 - protein, 15 aa, Artificial Sequence
  Description of Artificial Sequence: Synthetic peptide
  Seed: LRMKWMMAMKYPITA
LRMKWMMGMAYPSTA

SEQ ID NO: 242877 - protein, 15 aa, Artificial Sequence
  Description of Artificial Sequence: Synthetic peptide
  Seed: LRMKWMMAMKYPITA
LRMKWMMGMAYPTTA

SEQ ID NO: 242878 - protein, 15 aa, Artificial Sequence
  Description of Artificial Sequence: Synthetic peptide
  Seed: LRMKWMMAMKYPITA
LRMKWMMGMAYPVTA

SEQ ID NO: 242879 - protein, 15 aa, Artificial Sequence
  Description of Artificial Sequence: Synthetic peptide
  Seed: LRMKWMMAMKYPITA
LRMKWMMGMAYPWTA

SEQ ID NO: 242880 - protein, 15 aa, Artificial Sequence
  Description of Artificial Sequence: Synthetic peptide
  Seed: LRMKWMMAMKYPITA
LRMKWMMGMAYPYTA

SEQ ID NO: 242881 - protein, 15 aa, Artificial Sequence
  Description of Artificial Sequence: Synthetic peptide
  Seed: LRMKWMMAMKYPITA
LRMKWMMGMCYPATA

SEQ ID NO: 242882 - protein, 15 aa, Artificial Sequence
  Description of Artificial Sequence: Synthetic peptide
  Seed: LRMKWMMAMKYPITA
LRMKWMMGMCYPITA

SEQ ID NO: 242883 - protein, 15 aa, Artificial Sequence
  Description of Artificial Sequence: Synthetic peptide
  Seed: LRMKWMMAMKYPITA
LRMKWMMGMCYPLTA

SEQ ID NO: 242884 - protein, 15 aa, Artificial Sequence
  Description of Artificial Sequence: Synthetic peptide
  Seed: LRMKWMMAMKYPITA
LRMKWMMGMCYPVTA

SEQ ID NO: 242885 - protein, 15 aa, Artificial Sequence
  Description of Artificial Sequence: Synthetic peptide
  Seed: LRMKWMMAMKYPITA
LRMKWMMGMDYPVTA

SEQ ID NO: 242886 - protein, 15 aa, Artificial Sequence
  Description of Artificial Sequence: Synthetic peptide
  Seed: LRMKWMMAMKYPITA
LRMKWMMGMEYPLTA

SEQ ID NO: 242887 - protein, 15 aa, Artificial Sequence
  Description of Artificial Sequence: Synthetic peptide
  Seed: LRMKWMMAMKYPITA
LRMKWMMGMEYPVTA

SEQ ID NO: 242888 - protein, 15 aa, Artificial Sequence
  Description of Artificial Sequence: Synthetic peptide
  Seed: LRMKWMMAMKYPITA
LRMKWMMGMGYPATA

SEQ ID NO: 242889 - protein, 15 aa, Artificial Sequence
  Description of Artificial Sequence: Synthetic peptide
  Seed: LRMKWMMAMKYPITA
LRMKWMMGMGYPCTA

SEQ ID NO: 242890 - protein, 15 aa, Artificial Sequence
  Description of Artificial Sequence: Synthetic peptide
  Seed: LRMKWMMAMKYPITA
LRMKWMMGMGYPFTA

SEQ ID NO: 242891 - protein, 15 aa, Artificial Sequence
  Description of Artificial Sequence: Synthetic peptide
  Seed: LRMKWMMAMKYPITA
LRMKWMMGMGYPGTA

SEQ ID NO: 242892 - protein, 15 aa, Artificial Sequence
  Description of Artificial Sequence: Synthetic peptide
  Seed: LRMKWMMAMKYPITA
LRMKWMMGMGYPHTA

SEQ ID NO: 242893 - protein, 15 aa, Artificial Sequence
  Description of Artificial Sequence: Synthetic peptide
  Seed: LRMKWMMAMKYPITA
LRMKWMMGMGYPITA

SEQ ID NO: 242894 - protein, 15 aa, Artificial Sequence
  Description of Artificial Sequence: Synthetic peptide
  Seed: LRMKWMMAMKYPITA
LRMKWMMGMGYPLTA

SEQ ID NO: 242895 - protein, 15 aa, Artificial Sequence
  Description of Artificial Sequence: Synthetic peptide
  Seed: LRMKWMMAMKYPITA
LRMKWMMGMGYPMTA

SEQ ID NO: 242896 - protein, 15 aa, Artificial Sequence
  Description of Artificial Sequence: Synthetic peptide
  Seed: LRMKWMMAMKYPITA
LRMKWMMGMGYPNTA

SEQ ID NO: 242897 - protein, 15 aa, Artificial Sequence
  Description of Artificial Sequence: Synthetic peptide
  Seed: LRMKWMMAMKYPITA
LRMKWMMGMGYPQTA

SEQ ID NO: 242898 - protein, 15 aa, Artificial Sequence
  Description of Artificial Sequence: Synthetic peptide
  Seed: LRMKWMMAMKYPITA
LRMKWMMGMGYPSTA

SEQ ID NO: 242899 - protein, 15 aa, Artificial Sequence
  Description of Artificial Sequence: Synthetic peptide
  Seed: LRMKWMMAMKYPITA
LRMKWMMGMGYPTTA

SEQ ID NO: 242900 - protein, 15 aa, Artificial Sequence
  Description of Artificial Sequence: Synthetic peptide
  Seed: LRMKWMMAMKYPITA
LRMKWMMGMGYPVTA

SEQ ID NO: 242901 - protein, 15 aa, Artificial Sequence
  Description of Artificial Sequence: Synthetic peptide
  Seed: LRMKWMMAMKYPITA
LRMKWMMGMGYPYTA

SEQ ID NO: 242902 - protein, 15 aa, Artificial Sequence
  Description of Artificial Sequence: Synthetic peptide
  Seed: LRMKWMMAMKYPITA
LRMKWMMGMHYPATA

SEQ ID NO: 242903 - protein, 15 aa, Artificial Sequence
  Description of Artificial Sequence: Synthetic peptide
  Seed: LRMKWMMAMKYPITA
LRMKWMMGMHYPITA

SEQ ID NO: 242904 - protein, 15 aa, Artificial Sequence
  Description of Artificial Sequence: Synthetic peptide
  Seed: LRMKWMMAMKYPITA
LRMKWMMGMHYPLTA

SEQ ID NO: 242905 - protein, 15 aa, Artificial Sequence
  Description of Artificial Sequence: Synthetic peptide
  Seed: LRMKWMMAMKYPITA
LRMKWMMGMHYPMTA

SEQ ID NO: 242906 - protein, 15 aa, Artificial Sequence
  Description of Artificial Sequence: Synthetic peptide
  Seed: LRMKWMMAMKYPITA
LRMKWMMGMHYPVTA

SEQ ID NO: 242907 - protein, 15 aa, Artificial Sequence
  Description of Artificial Sequence: Synthetic peptide
  Seed: LRMKWMMAMKYPITA
LRMKWMMGMIYPATA

SEQ ID NO: 242908 - protein, 15 aa, Artificial Sequence
  Description of Artificial Sequence: Synthetic peptide
  Seed: LRMKWMMAMKYPITA
LRMKWMMGMIYPFTA

SEQ ID NO: 242909 - protein, 15 aa, Artificial Sequence
  Description of Artificial Sequence: Synthetic peptide
  Seed: LRMKWMMAMKYPITA
LRMKWMMGMIYPGTA

SEQ ID NO: 242910 - protein, 15 aa, Artificial Sequence
  Description of Artificial Sequence: Synthetic peptide
  Seed: LRMKWMMAMKYPITA
LRMKWMMGMIYPHTA

SEQ ID NO: 242911 - protein, 15 aa, Artificial Sequence
  Description of Artificial Sequence: Synthetic peptide
  Seed: LRMKWMMAMKYPITA
LRMKWMMGMIYPITA

SEQ ID NO: 242912 - protein, 15 aa, Artificial Sequence
  Description of Artificial Sequence: Synthetic peptide
  Seed: LRMKWMMAMKYPITA
LRMKWMMGMIYPLTA

SEQ ID NO: 242913 - protein, 15 aa, Artificial Sequence
  Description of Artificial Sequence: Synthetic peptide
  Seed: LRMKWMMAMKYPITA
LRMKWMMGMIYPMTA

SEQ ID NO: 242914 - protein, 15 aa, Artificial Sequence
  Description of Artificial Sequence: Synthetic peptide
  Seed: LRMKWMMAMKYPITA
LRMKWMMGMIYPNTA

SEQ ID NO: 242915 - protein, 15 aa, Artificial Sequence
  Description of Artificial Sequence: Synthetic peptide
  Seed: LRMKWMMAMKYPITA
LRMKWMMGMIYPQTA

SEQ ID NO: 242916 - protein, 15 aa, Artificial Sequence
  Description of Artificial Sequence: Synthetic peptide
  Seed: LRMKWMMAMKYPITA
LRMKWMMGMIYPSTA

SEQ ID NO: 242917 - protein, 15 aa, Artificial Sequence
  Description of Artificial Sequence: Synthetic peptide
  Seed: LRMKWMMAMKYPITA
LRMKWMMGMIYPTTA

SEQ ID NO: 242918 - protein, 15 aa, Artificial Sequence
  Description of Artificial Sequence: Synthetic peptide
  Seed: LRMKWMMAMKYPITA
LRMKWMMGMIYPVTA

SEQ ID NO: 242919 - protein, 15 aa, Artificial Sequence
  Description of Artificial Sequence: Synthetic peptide
  Seed: LRMKWMMAMKYPITA
LRMKWMMGMKYPLTA

SEQ ID NO: 242920 - protein, 15 aa, Artificial Sequence
  Description of Artificial Sequence: Synthetic peptide
  Seed: LRMKWMMAMKYPITA
LRMKWMMGMKYPVTA

SEQ ID NO: 242921 - protein, 15 aa, Artificial Sequence
  Description of Artificial Sequence: Synthetic peptide
  Seed: LRMKWMMAMKYPITA
LRMKWMMGMLYPATA

SEQ ID NO: 242922 - protein, 15 aa, Artificial Sequence
  Description of Artificial Sequence: Synthetic peptide
  Seed: LRMKWMMAMKYPITA
LRMKWMMGMLYPITA

SEQ ID NO: 242923 - protein, 15 aa, Artificial Sequence
  Description of Artificial Sequence: Synthetic peptide
  Seed: LRMKWMMAMKYPITA
LRMKWMMGMLYPLTA

SEQ ID NO: 242924 - protein, 15 aa, Artificial Sequence
  Description of Artificial Sequence: Synthetic peptide
  Seed: LRMKWMMAMKYPITA
LRMKWMMGMLYPMTA

SEQ ID NO: 242925 - protein, 15 aa, Artificial Sequence
  Description of Artificial Sequence: Synthetic peptide
  Seed: LRMKWMMAMKYPITA
LRMKWMMGMLYPNTA

SEQ ID NO: 242926 - protein, 15 aa, Artificial Sequence
  Description of Artificial Sequence: Synthetic peptide
  Seed: LRMKWMMAMKYPITA
LRMKWMMGMLYPSTA

SEQ ID NO: 242927 - protein, 15 aa, Artificial Sequence
  Description of Artificial Sequence: Synthetic peptide
  Seed: LRMKWMMAMKYPITA
LRMKWMMGMLYPTTA

SEQ ID NO: 242928 - protein, 15 aa, Artificial Sequence
  Description of Artificial Sequence: Synthetic peptide
  Seed: LRMKWMMAMKYPITA
LRMKWMMGMLYPVTA

SEQ ID NO: 242929 - protein, 15 aa, Artificial Sequence
  Description of Artificial Sequence: Synthetic peptide
  Seed: LRMKWMMAMKYPITA
LRMKWMMGMMYPATA

SEQ ID NO: 242930 - protein, 15 aa, Artificial Sequence
  Description of Artificial Sequence: Synthetic peptide
  Seed: LRMKWMMAMKYPITA
LRMKWMMGMMYPFTA

SEQ ID NO: 242931 - protein, 15 aa, Artificial Sequence
  Description of Artificial Sequence: Synthetic peptide
  Seed: LRMKWMMAMKYPITA
LRMKWMMGMMYPGTA

SEQ ID NO: 242932 - protein, 15 aa, Artificial Sequence
  Description of Artificial Sequence: Synthetic peptide
  Seed: LRMKWMMAMKYPITA
LRMKWMMGMMYPITA

SEQ ID NO: 242933 - protein, 15 aa, Artificial Sequence
  Description of Artificial Sequence: Synthetic peptide
  Seed: LRMKWMMAMKYPITA
LRMKWMMGMMYPLTA

SEQ ID NO: 242934 - protein, 15 aa, Artificial Sequence
  Description of Artificial Sequence: Synthetic peptide
  Seed: LRMKWMMAMKYPITA
LRMKWMMGMMYPMTA

SEQ ID NO: 242935 - protein, 15 aa, Artificial Sequence
  Description of Artificial Sequence: Synthetic peptide
  Seed: LRMKWMMAMKYPITA
LRMKWMMGMMYPNTA

SEQ ID NO: 242936 - protein, 15 aa, Artificial Sequence
  Description of Artificial Sequence: Synthetic peptide
  Seed: LRMKWMMAMKYPITA
LRMKWMMGMMYPSTA

SEQ ID NO: 242937 - protein, 15 aa, Artificial Sequence
  Description of Artificial Sequence: Synthetic peptide
  Seed: LRMKWMMAMKYPITA
LRMKWMMGMMYPTTA

SEQ ID NO: 242938 - protein, 15 aa, Artificial Sequence
  Description of Artificial Sequence: Synthetic peptide
  Seed: LRMKWMMAMKYPITA
LRMKWMMGMMYPVTA

SEQ ID NO: 242939 - protein, 15 aa, Artificial Sequence
  Description of Artificial Sequence: Synthetic peptide
  Seed: LRMKWMMAMKYPITA
LRMKWMMGMMYPYTA

SEQ ID NO: 242940 - protein, 15 aa, Artificial Sequence
  Description of Artificial Sequence: Synthetic peptide
  Seed: LRMKWMMAMKYPITA
LRMKWMMGMNYPATA

SEQ ID NO: 242941 - protein, 15 aa, Artificial Sequence
  Description of Artificial Sequence: Synthetic peptide
  Seed: LRMKWMMAMKYPITA
LRMKWMMGMNYPCTA

SEQ ID NO: 242942 - protein, 15 aa, Artificial Sequence
  Description of Artificial Sequence: Synthetic peptide
  Seed: LRMKWMMAMKYPITA
LRMKWMMGMNYPFTA

SEQ ID NO: 242943 - protein, 15 aa, Artificial Sequence
  Description of Artificial Sequence: Synthetic peptide
  Seed: LRMKWMMAMKYPITA
LRMKWMMGMNYPGTA

SEQ ID NO: 242944 - protein, 15 aa, Artificial Sequence
  Description of Artificial Sequence: Synthetic peptide
  Seed: LRMKWMMAMKYPITA
LRMKWMMGMNYPITA

SEQ ID NO: 242945 - protein, 15 aa, Artificial Sequence
  Description of Artificial Sequence: Synthetic peptide
  Seed: LRMKWMMAMKYPITA
LRMKWMMGMNYPLTA

SEQ ID NO: 242946 - protein, 15 aa, Artificial Sequence
  Description of Artificial Sequence: Synthetic peptide
  Seed: LRMKWMMAMKYPITA
LRMKWMMGMNYPMTA

SEQ ID NO: 242947 - protein, 15 aa, Artificial Sequence
  Description of Artificial Sequence: Synthetic peptide
  Seed: LRMKWMMAMKYPITA
LRMKWMMGMNYPNTA

SEQ ID NO: 242948 - protein, 15 aa, Artificial Sequence
  Description of Artificial Sequence: Synthetic peptide
  Seed: LRMKWMMAMKYPITA
LRMKWMMGMNYPSTA

SEQ ID NO: 242949 - protein, 15 aa, Artificial Sequence
  Description of Artificial Sequence: Synthetic peptide
  Seed: LRMKWMMAMKYPITA
LRMKWMMGMNYPTTA

SEQ ID NO: 242950 - protein, 15 aa, Artificial Sequence
  Description of Artificial Sequence: Synthetic peptide
  Seed: LRMKWMMAMKYPITA
LRMKWMMGMNYPVTA

SEQ ID NO: 242951 - protein, 15 aa, Artificial Sequence
  Description of Artificial Sequence: Synthetic peptide
  Seed: LRMKWMMAMKYPITA
LRMKWMMGMNYPYTA

SEQ ID NO: 242952 - protein, 15 aa, Artificial Sequence
  Description of Artificial Sequence: Synthetic peptide
  Seed: LRMKWMMAMKYPITA
LRMKWMMGMPYPATA

SEQ ID NO: 242953 - protein, 15 aa, Artificial Sequence
  Description of Artificial Sequence: Synthetic peptide
  Seed: LRMKWMMAMKYPITA
LRMKWMMGMPYPCTA

SEQ ID NO: 242954 - protein, 15 aa, Artificial Sequence
  Description of Artificial Sequence: Synthetic peptide
  Seed: LRMKWMMAMKYPITA
LRMKWMMGMPYPFTA

SEQ ID NO: 242955 - protein, 15 aa, Artificial Sequence
  Description of Artificial Sequence: Synthetic peptide
  Seed: LRMKWMMAMKYPITA
LRMKWMMGMPYPGTA

SEQ ID NO: 242956 - protein, 15 aa, Artificial Sequence
  Description of Artificial Sequence: Synthetic peptide
  Seed: LRMKWMMAMKYPITA
LRMKWMMGMPYPHTA

SEQ ID NO: 242957 - protein, 15 aa, Artificial Sequence
  Description of Artificial Sequence: Synthetic peptide
  Seed: LRMKWMMAMKYPITA
LRMKWMMGMPYPITA

SEQ ID NO: 242958 - protein, 15 aa, Artificial Sequence
  Description of Artificial Sequence: Synthetic peptide
  Seed: LRMKWMMAMKYPITA
LRMKWMMGMPYPKTA

SEQ ID NO: 242959 - protein, 15 aa, Artificial Sequence
  Description of Artificial Sequence: Synthetic peptide
  Seed: LRMKWMMAMKYPITA
LRMKWMMGMPYPLTA

SEQ ID NO: 242960 - protein, 15 aa, Artificial Sequence
  Description of Artificial Sequence: Synthetic peptide
  Seed: LRMKWMMAMKYPITA
LRMKWMMGMPYPMTA

SEQ ID NO: 242961 - protein, 15 aa, Artificial Sequence
  Description of Artificial Sequence: Synthetic peptide
  Seed: LRMKWMMAMKYPITA
LRMKWMMGMPYPNTA

SEQ ID NO: 242962 - protein, 15 aa, Artificial Sequence
  Description of Artificial Sequence: Synthetic peptide
  Seed: LRMKWMMAMKYPITA
LRMKWMMGMPYPPTA

SEQ ID NO: 242963 - protein, 15 aa, Artificial Sequence
  Description of Artificial Sequence: Synthetic peptide
  Seed: LRMKWMMAMKYPITA
LRMKWMMGMPYPQTA

SEQ ID NO: 242964 - protein, 15 aa, Artificial Sequence
  Description of Artificial Sequence: Synthetic peptide
  Seed: LRMKWMMAMKYPITA
LRMKWMMGMPYPRTA

SEQ ID NO: 242965 - protein, 15 aa, Artificial Sequence
  Description of Artificial Sequence: Synthetic peptide
  Seed: LRMKWMMAMKYPITA
LRMKWMMGMPYPSTA

SEQ ID NO: 242966 - protein, 15 aa, Artificial Sequence
  Description of Artificial Sequence: Synthetic peptide
  Seed: LRMKWMMAMKYPITA
LRMKWMMGMPYPTTA

SEQ ID NO: 242967 - protein, 15 aa, Artificial Sequence
  Description of Artificial Sequence: Synthetic peptide
  Seed: LRMKWMMAMKYPITA
LRMKWMMGMPYPVTA

SEQ ID NO: 242968 - protein, 15 aa, Artificial Sequence
  Description of Artificial Sequence: Synthetic peptide
  Seed: LRMKWMMAMKYPITA
LRMKWMMGMPYPWTA

SEQ ID NO: 242969 - protein, 15 aa, Artificial Sequence
  Description of Artificial Sequence: Synthetic peptide
  Seed: LRMKWMMAMKYPITA
LRMKWMMGMPYPYTA

SEQ ID NO: 242970 - protein, 15 aa, Artificial Sequence
  Description of Artificial Sequence: Synthetic peptide
  Seed: LRMKWMMAMKYPITA
LRMKWMMGMQYPATA

SEQ ID NO: 242971 - protein, 15 aa, Artificial Sequence
  Description of Artificial Sequence: Synthetic peptide
  Seed: LRMKWMMAMKYPITA
LRMKWMMGMQYPITA

SEQ ID NO: 242972 - protein, 15 aa, Artificial Sequence
  Description of Artificial Sequence: Synthetic peptide
  Seed: LRMKWMMAMKYPITA
LRMKWMMGMQYPLTA

SEQ ID NO: 242973 - protein, 15 aa, Artificial Sequence
  Description of Artificial Sequence: Synthetic peptide
  Seed: LRMKWMMAMKYPITA
LRMKWMMGMQYPMTA

SEQ ID NO: 242974 - protein, 15 aa, Artificial Sequence
  Description of Artificial Sequence: Synthetic peptide
  Seed: LRMKWMMAMKYPITA
LRMKWMMGMQYPVTA

SEQ ID NO: 242975 - protein, 15 aa, Artificial Sequence
  Description of Artificial Sequence: Synthetic peptide
  Seed: LRMKWMMAMKYPITA
LRMKWMMGMRYPATA

SEQ ID NO: 242976 - protein, 15 aa, Artificial Sequence
  Description of Artificial Sequence: Synthetic peptide
  Seed: LRMKWMMAMKYPITA
LRMKWMMGMRYPITA

SEQ ID NO: 242977 - protein, 15 aa, Artificial Sequence
  Description of Artificial Sequence: Synthetic peptide
  Seed: LRMKWMMAMKYPITA
LRMKWMMGMRYPLTA

SEQ ID NO: 242978 - protein, 15 aa, Artificial Sequence
  Description of Artificial Sequence: Synthetic peptide
  Seed: LRMKWMMAMKYPITA
LRMKWMMGMRYPRTA

SEQ ID NO: 242979 - protein, 15 aa, Artificial Sequence
  Description of Artificial Sequence: Synthetic peptide
  Seed: LRMKWMMAMKYPITA
LRMKWMMGMRYPVTA

SEQ ID NO: 242980 - protein, 15 aa, Artificial Sequence
  Description of Artificial Sequence: Synthetic peptide
  Seed: LRMKWMMAMKYPITA
LRMKWMMGMSYPATA

SEQ ID NO: 242981 - protein, 15 aa, Artificial Sequence
  Description of Artificial Sequence: Synthetic peptide
  Seed: LRMKWMMAMKYPITA
LRMKWMMGMSYPCTA

SEQ ID NO: 242982 - protein, 15 aa, Artificial Sequence
  Description of Artificial Sequence: Synthetic peptide
  Seed: LRMKWMMAMKYPITA
LRMKWMMGMSYPFTA

SEQ ID NO: 242983 - protein, 15 aa, Artificial Sequence
  Description of Artificial Sequence: Synthetic peptide
  Seed: LRMKWMMAMKYPITA
LRMKWMMGMSYPGTA

SEQ ID NO: 242984 - protein, 15 aa, Artificial Sequence
  Description of Artificial Sequence: Synthetic peptide
  Seed: LRMKWMMAMKYPITA
LRMKWMMGMSYPHTA

SEQ ID NO: 242985 - protein, 15 aa, Artificial Sequence
  Description of Artificial Sequence: Synthetic peptide
  Seed: LRMKWMMAMKYPITA
LRMKWMMGMSYPITA

SEQ ID NO: 242986 - protein, 15 aa, Artificial Sequence
  Description of Artificial Sequence: Synthetic peptide
  Seed: LRMKWMMAMKYPITA
LRMKWMMGMSYPLTA

SEQ ID NO: 242987 - protein, 15 aa, Artificial Sequence
  Description of Artificial Sequence: Synthetic peptide
  Seed: LRMKWMMAMKYPITA
LRMKWMMGMSYPMTA

SEQ ID NO: 242988 - protein, 15 aa, Artificial Sequence
  Description of Artificial Sequence: Synthetic peptide
  Seed: LRMKWMMAMKYPITA
LRMKWMMGMSYPNTA

SEQ ID NO: 242989 - protein, 15 aa, Artificial Sequence
  Description of Artificial Sequence: Synthetic peptide
  Seed: LRMKWMMAMKYPITA
LRMKWMMGMSYPPTA

SEQ ID NO: 242990 - protein, 15 aa, Artificial Sequence
  Description of Artificial Sequence: Synthetic peptide
  Seed: LRMKWMMAMKYPITA
LRMKWMMGMSYPQTA

SEQ ID NO: 242991 - protein, 15 aa, Artificial Sequence
  Description of Artificial Sequence: Synthetic peptide
  Seed: LRMKWMMAMKYPITA
LRMKWMMGMSYPRTA

SEQ ID NO: 242992 - protein, 15 aa, Artificial Sequence
  Description of Artificial Sequence: Synthetic peptide
  Seed: LRMKWMMAMKYPITA
LRMKWMMGMSYPSTA

SEQ ID NO: 242993 - protein, 15 aa, Artificial Sequence
  Description of Artificial Sequence: Synthetic peptide
  Seed: LRMKWMMAMKYPITA
LRMKWMMGMSYPTTA

SEQ ID NO: 242994 - protein, 15 aa, Artificial Sequence
  Description of Artificial Sequence: Synthetic peptide
  Seed: LRMKWMMAMKYPITA
LRMKWMMGMSYPVTA

SEQ ID NO: 242995 - protein, 15 aa, Artificial Sequence
  Description of Artificial Sequence: Synthetic peptide
  Seed: LRMKWMMAMKYPITA
LRMKWMMGMSYPWTA

SEQ ID NO: 242996 - protein, 15 aa, Artificial Sequence
  Description of Artificial Sequence: Synthetic peptide
  Seed: LRMKWMMAMKYPITA
LRMKWMMGMSYPYTA

SEQ ID NO: 242997 - protein, 15 aa, Artificial Sequence
  Description of Artificial Sequence: Synthetic peptide
  Seed: LRMKWMMAMKYPITA
LRMKWMMGMTYPATA

SEQ ID NO: 242998 - protein, 15 aa, Artificial Sequence
  Description of Artificial Sequence: Synthetic peptide
  Seed: LRMKWMMAMKYPITA
LRMKWMMGMTYPCTA

SEQ ID NO: 242999 - protein, 15 aa, Artificial Sequence
  Description of Artificial Sequence: Synthetic peptide
  Seed: LRMKWMMAMKYPITA
LRMKWMMGMTYPFTA

SEQ ID NO: 243000 - protein, 15 aa, Artificial Sequence
  Description of Artificial Sequence: Synthetic peptide
  Seed: LRMKWMMAMKYPITA
LRMKWMMGMTYPGTA

SEQ ID NO: 243001 - protein, 15 aa, Artificial Sequence
  Description of Artificial Sequence: Synthetic peptide
  Seed: LRMKWMMAMKYPITA
LRMKWMMGMTYPITA

SEQ ID NO: 243002 - protein, 15 aa, Artificial Sequence
  Description of Artificial Sequence: Synthetic peptide
  Seed: LRMKWMMAMKYPITA
LRMKWMMGMTYPLTA

SEQ ID NO: 243003 - protein, 15 aa, Artificial Sequence
  Description of Artificial Sequence: Synthetic peptide
  Seed: LRMKWMMAMKYPITA
LRMKWMMGMTYPMTA

SEQ ID NO: 243004 - protein, 15 aa, Artificial Sequence
  Description of Artificial Sequence: Synthetic peptide
  Seed: LRMKWMMAMKYPITA
LRMKWMMGMTYPNTA

SEQ ID NO: 243005 - protein, 15 aa, Artificial Sequence
  Description of Artificial Sequence: Synthetic peptide
  Seed: LRMKWMMAMKYPITA
LRMKWMMGMTYPQTA

SEQ ID NO: 243006 - protein, 15 aa, Artificial Sequence
  Description of Artificial Sequence: Synthetic peptide
  Seed: LRMKWMMAMKYPITA
LRMKWMMGMTYPSTA

SEQ ID NO: 243007 - protein, 15 aa, Artificial Sequence
  Description of Artificial Sequence: Synthetic peptide
  Seed: LRMKWMMAMKYPITA
LRMKWMMGMTYPTTA

SEQ ID NO: 243008 - protein, 15 aa, Artificial Sequence
  Description of Artificial Sequence: Synthetic peptide
  Seed: LRMKWMMAMKYPITA
LRMKWMMGMTYPVTA

SEQ ID NO: 243009 - protein, 15 aa, Artificial Sequence
  Description of Artificial Sequence: Synthetic peptide
  Seed: LRMKWMMAMKYPITA
LRMKWMMGMTYPYTA

SEQ ID NO: 243010 - protein, 15 aa, Artificial Sequence
  Description of Artificial Sequence: Synthetic peptide
  Seed: LRMKWMMAMKYPITA
LRMKWMMGMVYPATA

SEQ ID NO: 243011 - protein, 15 aa, Artificial Sequence
  Description of Artificial Sequence: Synthetic peptide
  Seed: LRMKWMMAMKYPITA
LRMKWMMGMVYPCTA

SEQ ID NO: 243012 - protein, 15 aa, Artificial Sequence
  Description of Artificial Sequence: Synthetic peptide
  Seed: LRMKWMMAMKYPITA
LRMKWMMGMVYPFTA

SEQ ID NO: 243013 - protein, 15 aa, Artificial Sequence
  Description of Artificial Sequence: Synthetic peptide
  Seed: LRMKWMMAMKYPITA
LRMKWMMGMVYPGTA

SEQ ID NO: 243014 - protein, 15 aa, Artificial Sequence
  Description of Artificial Sequence: Synthetic peptide
  Seed: LRMKWMMAMKYPITA
LRMKWMMGMVYPHTA

SEQ ID NO: 243015 - protein, 15 aa, Artificial Sequence
  Description of Artificial Sequence: Synthetic peptide
  Seed: LRMKWMMAMKYPITA
LRMKWMMGMVYPITA

SEQ ID NO: 243016 - protein, 15 aa, Artificial Sequence
  Description of Artificial Sequence: Synthetic peptide
  Seed: LRMKWMMAMKYPITA
LRMKWMMGMVYPLTA

SEQ ID NO: 243017 - protein, 15 aa, Artificial Sequence
  Description of Artificial Sequence: Synthetic peptide
  Seed: LRMKWMMAMKYPITA
LRMKWMMGMVYPMTA

SEQ ID NO: 243018 - protein, 15 aa, Artificial Sequence
  Description of Artificial Sequence: Synthetic peptide
  Seed: LRMKWMMAMKYPITA
LRMKWMMGMVYPNTA

SEQ ID NO: 243019 - protein, 15 aa, Artificial Sequence
  Description of Artificial Sequence: Synthetic peptide
  Seed: LRMKWMMAMKYPITA
LRMKWMMGMVYPQTA

SEQ ID NO: 243020 - protein, 15 aa, Artificial Sequence
  Description of Artificial Sequence: Synthetic peptide
  Seed: LRMKWMMAMKYPITA
LRMKWMMGMVYPRTA

SEQ ID NO: 243021 - protein, 15 aa, Artificial Sequence
  Description of Artificial Sequence: Synthetic peptide
  Seed: LRMKWMMAMKYPITA
LRMKWMMGMVYPSTA

SEQ ID NO: 243022 - protein, 15 aa, Artificial Sequence
  Description of Artificial Sequence: Synthetic peptide
  Seed: LRMKWMMAMKYPITA
LRMKWMMGMVYPTTA

SEQ ID NO: 243023 - protein, 15 aa, Artificial Sequence
  Description of Artificial Sequence: Synthetic peptide
  Seed: LRMKWMMAMKYPITA
LRMKWMMGMVYPVTA

SEQ ID NO: 243024 - protein, 15 aa, Artificial Sequence
  Description of Artificial Sequence: Synthetic peptide
  Seed: LRMKWMMAMKYPITA
LRMKWMMGMVYPYTA

SEQ ID NO: 243025 - protein, 15 aa, Artificial Sequence
  Description of Artificial Sequence: Synthetic peptide
  Seed: LRMKWMMAMKYPITA
LRMKWMMHMAYPATA

SEQ ID NO: 243026 - protein, 15 aa, Artificial Sequence
  Description of Artificial Sequence: Synthetic peptide
  Seed: LRMKWMMAMKYPITA
LRMKWMMHMAYPCTA

SEQ ID NO: 243027 - protein, 15 aa, Artificial Sequence
  Description of Artificial Sequence: Synthetic peptide
  Seed: LRMKWMMAMKYPITA
LRMKWMMHMAYPFTA

SEQ ID NO: 243028 - protein, 15 aa, Artificial Sequence
  Description of Artificial Sequence: Synthetic peptide
  Seed: LRMKWMMAMKYPITA
LRMKWMMHMAYPGTA

SEQ ID NO: 243029 - protein, 15 aa, Artificial Sequence
  Description of Artificial Sequence: Synthetic peptide
  Seed: LRMKWMMAMKYPITA
LRMKWMMHMAYPHTA

SEQ ID NO: 243030 - protein, 15 aa, Artificial Sequence
  Description of Artificial Sequence: Synthetic peptide
  Seed: LRMKWMMAMKYPITA
LRMKWMMHMAYPITA

SEQ ID NO: 243031 - protein, 15 aa, Artificial Sequence
  Description of Artificial Sequence: Synthetic peptide
  Seed: LRMKWMMAMKYPITA
LRMKWMMHMAYPKTA

SEQ ID NO: 243032 - protein, 15 aa, Artificial Sequence
  Description of Artificial Sequence: Synthetic peptide
  Seed: LRMKWMMAMKYPITA
LRMKWMMHMAYPLTA

SEQ ID NO: 243033 - protein, 15 aa, Artificial Sequence
  Description of Artificial Sequence: Synthetic peptide
  Seed: LRMKWMMAMKYPITA
LRMKWMMHMAYPMTA

SEQ ID NO: 243034 - protein, 15 aa, Artificial Sequence
  Description of Artificial Sequence: Synthetic peptide
  Seed: LRMKWMMAMKYPITA
LRMKWMMHMAYPNTA

SEQ ID NO: 243035 - protein, 15 aa, Artificial Sequence
  Description of Artificial Sequence: Synthetic peptide
  Seed: LRMKWMMAMKYPITA
LRMKWMMHMAYPQTA

SEQ ID NO: 243036 - protein, 15 aa, Artificial Sequence
  Description of Artificial Sequence: Synthetic peptide
  Seed: LRMKWMMAMKYPITA
LRMKWMMHMAYPRTA

SEQ ID NO: 243037 - protein, 15 aa, Artificial Sequence
  Description of Artificial Sequence: Synthetic peptide
  Seed: LRMKWMMAMKYPITA
LRMKWMMHMAYPSTA

SEQ ID NO: 243038 - protein, 15 aa, Artificial Sequence
  Description of Artificial Sequence: Synthetic peptide
  Seed: LRMKWMMAMKYPITA
LRMKWMMHMAYPTTA

SEQ ID NO: 243039 - protein, 15 aa, Artificial Sequence
  Description of Artificial Sequence: Synthetic peptide
  Seed: LRMKWMMAMKYPITA
LRMKWMMHMAYPVTA

SEQ ID NO: 243040 - protein, 15 aa, Artificial Sequence
  Description of Artificial Sequence: Synthetic peptide
  Seed: LRMKWMMAMKYPITA
LRMKWMMHMAYPWTA

SEQ ID NO: 243041 - protein, 15 aa, Artificial Sequence
  Description of Artificial Sequence: Synthetic peptide
  Seed: LRMKWMMAMKYPITA
LRMKWMMHMAYPYTA

SEQ ID NO: 243042 - protein, 15 aa, Artificial Sequence
  Description of Artificial Sequence: Synthetic peptide
  Seed: LRMKWMMAMKYPITA
LRMKWMMHMCYPLTA

SEQ ID NO: 243043 - protein, 15 aa, Artificial Sequence
  Description of Artificial Sequence: Synthetic peptide
  Seed: LRMKWMMAMKYPITA
LRMKWMMHMFYPITA

SEQ ID NO: 243044 - protein, 15 aa, Artificial Sequence
  Description of Artificial Sequence: Synthetic peptide
  Seed: LRMKWMMAMKYPITA
LRMKWMMHMFYPLTA

SEQ ID NO: 243045 - protein, 15 aa, Artificial Sequence
  Description of Artificial Sequence: Synthetic peptide
  Seed: LRMKWMMAMKYPITA
LRMKWMMHMFYPVTA

SEQ ID NO: 243046 - protein, 15 aa, Artificial Sequence
  Description of Artificial Sequence: Synthetic peptide
  Seed: LRMKWMMAMKYPITA
LRMKWMMHMGYPATA

SEQ ID NO: 243047 - protein, 15 aa, Artificial Sequence
  Description of Artificial Sequence: Synthetic peptide
  Seed: LRMKWMMAMKYPITA
LRMKWMMHMGYPCTA

SEQ ID NO: 243048 - protein, 15 aa, Artificial Sequence
  Description of Artificial Sequence: Synthetic peptide
  Seed: LRMKWMMAMKYPITA
LRMKWMMHMGYPFTA

SEQ ID NO: 243049 - protein, 15 aa, Artificial Sequence
  Description of Artificial Sequence: Synthetic peptide
  Seed: LRMKWMMAMKYPITA
LRMKWMMHMGYPGTA

SEQ ID NO: 243050 - protein, 15 aa, Artificial Sequence
  Description of Artificial Sequence: Synthetic peptide
  Seed: LRMKWMMAMKYPITA
LRMKWMMHMGYPITA

SEQ ID NO: 243051 - protein, 15 aa, Artificial Sequence
  Description of Artificial Sequence: Synthetic peptide
  Seed: LRMKWMMAMKYPITA
LRMKWMMHMGYPLTA

SEQ ID NO: 243052 - protein, 15 aa, Artificial Sequence
  Description of Artificial Sequence: Synthetic peptide
  Seed: LRMKWMMAMKYPITA
LRMKWMMHMGYPMTA

SEQ ID NO: 243053 - protein, 15 aa, Artificial Sequence
  Description of Artificial Sequence: Synthetic peptide
  Seed: LRMKWMMAMKYPITA
LRMKWMMHMGYPSTA

SEQ ID NO: 243054 - protein, 15 aa, Artificial Sequence
  Description of Artificial Sequence: Synthetic peptide
  Seed: LRMKWMMAMKYPITA
LRMKWMMHMGYPTTA

SEQ ID NO: 243055 - protein, 15 aa, Artificial Sequence
  Description of Artificial Sequence: Synthetic peptide
  Seed: LRMKWMMAMKYPITA
LRMKWMMHMGYPVTA

SEQ ID NO: 243056 - protein, 15 aa, Artificial Sequence
  Description of Artificial Sequence: Synthetic peptide
  Seed: LRMKWMMAMKYPITA
LRMKWMMHMHYPFTA

SEQ ID NO: 243057 - protein, 15 aa, Artificial Sequence
  Description of Artificial Sequence: Synthetic peptide
  Seed: LRMKWMMAMKYPITA
LRMKWMMHMHYPITA

SEQ ID NO: 243058 - protein, 15 aa, Artificial Sequence
  Description of Artificial Sequence: Synthetic peptide
  Seed: LRMKWMMAMKYPITA
LRMKWMMHMHYPLTA

SEQ ID NO: 243059 - protein, 15 aa, Artificial Sequence
  Description of Artificial Sequence: Synthetic peptide
  Seed: LRMKWMMAMKYPITA
LRMKWMMHMHYPVTA

SEQ ID NO: 243060 - protein, 15 aa, Artificial Sequence
  Description of Artificial Sequence: Synthetic peptide
  Seed: LRMKWMMAMKYPITA
LRMKWMMHMHYPYTA

SEQ ID NO: 243061 - protein, 15 aa, Artificial Sequence
  Description of Artificial Sequence: Synthetic peptide
  Seed: LRMKWMMAMKYPITA
LRMKWMMHMIYPATA

SEQ ID NO: 243062 - protein, 15 aa, Artificial Sequence
  Description of Artificial Sequence: Synthetic peptide
  Seed: LRMKWMMAMKYPITA
LRMKWMMHMIYPITA

SEQ ID NO: 243063 - protein, 15 aa, Artificial Sequence
  Description of Artificial Sequence: Synthetic peptide
  Seed: LRMKWMMAMKYPITA
LRMKWMMHMIYPLTA

SEQ ID NO: 243064 - protein, 15 aa, Artificial Sequence
  Description of Artificial Sequence: Synthetic peptide
  Seed: LRMKWMMAMKYPITA
LRMKWMMHMIYPMTA

SEQ ID NO: 243065 - protein, 15 aa, Artificial Sequence
  Description of Artificial Sequence: Synthetic peptide
  Seed: LRMKWMMAMKYPITA
LRMKWMMHMIYPNTA

SEQ ID NO: 243066 - protein, 15 aa, Artificial Sequence
  Description of Artificial Sequence: Synthetic peptide
  Seed: LRMKWMMAMKYPITA
LRMKWMMHMIYPRTA

SEQ ID NO: 243067 - protein, 15 aa, Artificial Sequence
  Description of Artificial Sequence: Synthetic peptide
  Seed: LRMKWMMAMKYPITA
LRMKWMMHMIYPSTA

SEQ ID NO: 243068 - protein, 15 aa, Artificial Sequence
  Description of Artificial Sequence: Synthetic peptide
  Seed: LRMKWMMAMKYPITA
LRMKWMMHMIYPTTA

SEQ ID NO: 243069 - protein, 15 aa, Artificial Sequence
  Description of Artificial Sequence: Synthetic peptide
  Seed: LRMKWMMAMKYPITA
LRMKWMMHMIYPVTA

SEQ ID NO: 243070 - protein, 15 aa, Artificial Sequence
  Description of Artificial Sequence: Synthetic peptide
  Seed: LRMKWMMAMKYPITA
LRMKWMMHMKYPATA

SEQ ID NO: 243071 - protein, 15 aa, Artificial Sequence
  Description of Artificial Sequence: Synthetic peptide
  Seed: LRMKWMMAMKYPITA
LRMKWMMHMKYPFTA

SEQ ID NO: 243072 - protein, 15 aa, Artificial Sequence
  Description of Artificial Sequence: Synthetic peptide
  Seed: LRMKWMMAMKYPITA
LRMKWMMHMKYPGTA

SEQ ID NO: 243073 - protein, 15 aa, Artificial Sequence
  Description of Artificial Sequence: Synthetic peptide
  Seed: LRMKWMMAMKYPITA
LRMKWMMHMKYPHTA

SEQ ID NO: 243074 - protein, 15 aa, Artificial Sequence
  Description of Artificial Sequence: Synthetic peptide
  Seed: LRMKWMMAMKYPITA
LRMKWMMHMKYPKTA

SEQ ID NO: 243075 - protein, 15 aa, Artificial Sequence
  Description of Artificial Sequence: Synthetic peptide
  Seed: LRMKWMMAMKYPITA
LRMKWMMHMKYPLTA

SEQ ID NO: 243076 - protein, 15 aa, Artificial Sequence
  Description of Artificial Sequence: Synthetic peptide
  Seed: LRMKWMMAMKYPITA
LRMKWMMHMKYPMTA

SEQ ID NO: 243077 - protein, 15 aa, Artificial Sequence
  Description of Artificial Sequence: Synthetic peptide
  Seed: LRMKWMMAMKYPITA
LRMKWMMHMKYPQTA

SEQ ID NO: 243078 - protein, 15 aa, Artificial Sequence
  Description of Artificial Sequence: Synthetic peptide
  Seed: LRMKWMMAMKYPITA
LRMKWMMHMKYPRTA

SEQ ID NO: 243079 - protein, 15 aa, Artificial Sequence
  Description of Artificial Sequence: Synthetic peptide
  Seed: LRMKWMMAMKYPITA
LRMKWMMHMKYPSTA

SEQ ID NO: 243080 - protein, 15 aa, Artificial Sequence
  Description of Artificial Sequence: Synthetic peptide
  Seed: LRMKWMMAMKYPITA
LRMKWMMHMKYPVTA

SEQ ID NO: 243081 - protein, 15 aa, Artificial Sequence
  Description of Artificial Sequence: Synthetic peptide
  Seed: LRMKWMMAMKYPITA
LRMKWMMHMKYPWTA

SEQ ID NO: 243082 - protein, 15 aa, Artificial Sequence
  Description of Artificial Sequence: Synthetic peptide
  Seed: LRMKWMMAMKYPITA
LRMKWMMHMKYPYTA

SEQ ID NO: 243083 - protein, 15 aa, Artificial Sequence
  Description of Artificial Sequence: Synthetic peptide
  Seed: LRMKWMMAMKYPITA
LRMKWMMHMLYPRTA

SEQ ID NO: 243084 - protein, 15 aa, Artificial Sequence
  Description of Artificial Sequence: Synthetic peptide
  Seed: LRMKWMMAMKYPITA
LRMKWMMHMMYPRTA

SEQ ID NO: 243085 - protein, 15 aa, Artificial Sequence
  Description of Artificial Sequence: Synthetic peptide
  Seed: LRMKWMMAMKYPITA
LRMKWMMHMNYPATA

SEQ ID NO: 243086 - protein, 15 aa, Artificial Sequence
  Description of Artificial Sequence: Synthetic peptide
  Seed: LRMKWMMAMKYPITA
LRMKWMMHMNYPITA

SEQ ID NO: 243087 - protein, 15 aa, Artificial Sequence
  Description of Artificial Sequence: Synthetic peptide
  Seed: LRMKWMMAMKYPITA
LRMKWMMHMNYPLTA

SEQ ID NO: 243088 - protein, 15 aa, Artificial Sequence
  Description of Artificial Sequence: Synthetic peptide
  Seed: LRMKWMMAMKYPITA
LRMKWMMHMNYPMTA

SEQ ID NO: 243089 - protein, 15 aa, Artificial Sequence
  Description of Artificial Sequence: Synthetic peptide
  Seed: LRMKWMMAMKYPITA
LRMKWMMHMNYPTTA

SEQ ID NO: 243090 - protein, 15 aa, Artificial Sequence
  Description of Artificial Sequence: Synthetic peptide
  Seed: LRMKWMMAMKYPITA
LRMKWMMHMNYPVTA

SEQ ID NO: 243091 - protein, 15 aa, Artificial Sequence
  Description of Artificial Sequence: Synthetic peptide
  Seed: LRMKWMMAMKYPITA
LRMKWMMHMNYPYTA

SEQ ID NO: 243092 - protein, 15 aa, Artificial Sequence
  Description of Artificial Sequence: Synthetic peptide
  Seed: LRMKWMMAMKYPITA
LRMKWMMHMPYPATA

SEQ ID NO: 243093 - protein, 15 aa, Artificial Sequence
  Description of Artificial Sequence: Synthetic peptide
  Seed: LRMKWMMAMKYPITA
LRMKWMMHMPYPFTA

SEQ ID NO: 243094 - protein, 15 aa, Artificial Sequence
  Description of Artificial Sequence: Synthetic peptide
  Seed: LRMKWMMAMKYPITA
LRMKWMMHMPYPITA

SEQ ID NO: 243095 - protein, 15 aa, Artificial Sequence
  Description of Artificial Sequence: Synthetic peptide
  Seed: LRMKWMMAMKYPITA
LRMKWMMHMPYPLTA

SEQ ID NO: 243096 - protein, 15 aa, Artificial Sequence
  Description of Artificial Sequence: Synthetic peptide
  Seed: LRMKWMMAMKYPITA
LRMKWMMHMPYPMTA

SEQ ID NO: 243097 - protein, 15 aa, Artificial Sequence
  Description of Artificial Sequence: Synthetic peptide
  Seed: LRMKWMMAMKYPITA
LRMKWMMHMPYPNTA

SEQ ID NO: 243098 - protein, 15 aa, Artificial Sequence
  Description of Artificial Sequence: Synthetic peptide
  Seed: LRMKWMMAMKYPITA
LRMKWMMHMPYPRTA

SEQ ID NO: 243099 - protein, 15 aa, Artificial Sequence
  Description of Artificial Sequence: Synthetic peptide
  Seed: LRMKWMMAMKYPITA
LRMKWMMHMPYPSTA

SEQ ID NO: 243100 - protein, 15 aa, Artificial Sequence
  Description of Artificial Sequence: Synthetic peptide
  Seed: LRMKWMMAMKYPITA
LRMKWMMHMPYPTTA

SEQ ID NO: 243101 - protein, 15 aa, Artificial Sequence
  Description of Artificial Sequence: Synthetic peptide
  Seed: LRMKWMMAMKYPITA
LRMKWMMHMPYPVTA

SEQ ID NO: 243102 - protein, 15 aa, Artificial Sequence
  Description of Artificial Sequence: Synthetic peptide
  Seed: LRMKWMMAMKYPITA
LRMKWMMHMQYPITA

SEQ ID NO: 243103 - protein, 15 aa, Artificial Sequence
  Description of Artificial Sequence: Synthetic peptide
  Seed: LRMKWMMAMKYPITA
LRMKWMMHMQYPLTA

SEQ ID NO: 243104 - protein, 15 aa, Artificial Sequence
  Description of Artificial Sequence: Synthetic peptide
  Seed: LRMKWMMAMKYPITA
LRMKWMMHMQYPVTA

SEQ ID NO: 243105 - protein, 15 aa, Artificial Sequence
  Description of Artificial Sequence: Synthetic peptide
  Seed: LRMKWMMAMKYPITA
LRMKWMMHMRYPATA

SEQ ID NO: 243106 - protein, 15 aa, Artificial Sequence
  Description of Artificial Sequence: Synthetic peptide
  Seed: LRMKWMMAMKYPITA
LRMKWMMHMRYPDTA

SEQ ID NO: 243107 - protein, 15 aa, Artificial Sequence
  Description of Artificial Sequence: Synthetic peptide
  Seed: LRMKWMMAMKYPITA
LRMKWMMHMRYPETA

SEQ ID NO: 243108 - protein, 15 aa, Artificial Sequence
  Description of Artificial Sequence: Synthetic peptide
  Seed: LRMKWMMAMKYPITA
LRMKWMMHMRYPFTA

SEQ ID NO: 243109 - protein, 15 aa, Artificial Sequence
  Description of Artificial Sequence: Synthetic peptide
  Seed: LRMKWMMAMKYPITA
LRMKWMMHMRYPGTA

SEQ ID NO: 243110 - protein, 15 aa, Artificial Sequence
  Description of Artificial Sequence: Synthetic peptide
  Seed: LRMKWMMAMKYPITA
LRMKWMMHMRYPHTA

SEQ ID NO: 243111 - protein, 15 aa, Artificial Sequence
  Description of Artificial Sequence: Synthetic peptide
  Seed: LRMKWMMAMKYPITA
LRMKWMMHMRYPITA

SEQ ID NO: 243112 - protein, 15 aa, Artificial Sequence
  Description of Artificial Sequence: Synthetic peptide
  Seed: LRMKWMMAMKYPITA
LRMKWMMHMRYPKTA

SEQ ID NO: 243113 - protein, 15 aa, Artificial Sequence
  Description of Artificial Sequence: Synthetic peptide
  Seed: LRMKWMMAMKYPITA
LRMKWMMHMRYPLTA

SEQ ID NO: 243114 - protein, 15 aa, Artificial Sequence
  Description of Artificial Sequence: Synthetic peptide
  Seed: LRMKWMMAMKYPITA
LRMKWMMHMRYPMTA

SEQ ID NO: 243115 - protein, 15 aa, Artificial Sequence
  Description of Artificial Sequence: Synthetic peptide
  Seed: LRMKWMMAMKYPITA
LRMKWMMHMRYPNTA

SEQ ID NO: 243116 - protein, 15 aa, Artificial Sequence
  Description of Artificial Sequence: Synthetic peptide
  Seed: LRMKWMMAMKYPITA
LRMKWMMHMRYPQTA

SEQ ID NO: 243117 - protein, 15 aa, Artificial Sequence
  Description of Artificial Sequence: Synthetic peptide
  Seed: LRMKWMMAMKYPITA
LRMKWMMHMRYPRTA

SEQ ID NO: 243118 - protein, 15 aa, Artificial Sequence
  Description of Artificial Sequence: Synthetic peptide
  Seed: LRMKWMMAMKYPITA
LRMKWMMHMRYPSTA

SEQ ID NO: 243119 - protein, 15 aa, Artificial Sequence
  Description of Artificial Sequence: Synthetic peptide
  Seed: LRMKWMMAMKYPITA
LRMKWMMHMRYPTTA

SEQ ID NO: 243120 - protein, 15 aa, Artificial Sequence
  Description of Artificial Sequence: Synthetic peptide
  Seed: LRMKWMMAMKYPITA
LRMKWMMHMRYPVTA

SEQ ID NO: 243121 - protein, 15 aa, Artificial Sequence
  Description of Artificial Sequence: Synthetic peptide
  Seed: LRMKWMMAMKYPITA
LRMKWMMHMRYPWTA

SEQ ID NO: 243122 - protein, 15 aa, Artificial Sequence
  Description of Artificial Sequence: Synthetic peptide
  Seed: LRMKWMMAMKYPITA
LRMKWMMHMRYPYTA

SEQ ID NO: 243123 - protein, 15 aa, Artificial Sequence
  Description of Artificial Sequence: Synthetic peptide
  Seed: LRMKWMMAMKYPITA
LRMKWMMHMSYPATA

SEQ ID NO: 243124 - protein, 15 aa, Artificial Sequence
  Description of Artificial Sequence: Synthetic peptide
  Seed: LRMKWMMAMKYPITA
LRMKWMMHMSYPCTA

SEQ ID NO: 243125 - protein, 15 aa, Artificial Sequence
  Description of Artificial Sequence: Synthetic peptide
  Seed: LRMKWMMAMKYPITA
LRMKWMMHMSYPFTA

SEQ ID NO: 243126 - protein, 15 aa, Artificial Sequence
  Description of Artificial Sequence: Synthetic peptide
  Seed: LRMKWMMAMKYPITA
LRMKWMMHMSYPGTA

SEQ ID NO: 243127 - protein, 15 aa, Artificial Sequence
  Description of Artificial Sequence: Synthetic peptide
  Seed: LRMKWMMAMKYPITA
LRMKWMMHMSYPITA

SEQ ID NO: 243128 - protein, 15 aa, Artificial Sequence
  Description of Artificial Sequence: Synthetic peptide
  Seed: LRMKWMMAMKYPITA
LRMKWMMHMSYPLTA

SEQ ID NO: 243129 - protein, 15 aa, Artificial Sequence
  Description of Artificial Sequence: Synthetic peptide
  Seed: LRMKWMMAMKYPITA
LRMKWMMHMSYPMTA

SEQ ID NO: 243130 - protein, 15 aa, Artificial Sequence
  Description of Artificial Sequence: Synthetic peptide
  Seed: LRMKWMMAMKYPITA
LRMKWMMHMSYPNTA

SEQ ID NO: 243131 - protein, 15 aa, Artificial Sequence
  Description of Artificial Sequence: Synthetic peptide
  Seed: LRMKWMMAMKYPITA
LRMKWMMHMSYPRTA

SEQ ID NO: 243132 - protein, 15 aa, Artificial Sequence
  Description of Artificial Sequence: Synthetic peptide
  Seed: LRMKWMMAMKYPITA
LRMKWMMHMSYPSTA

SEQ ID NO: 243133 - protein, 15 aa, Artificial Sequence
  Description of Artificial Sequence: Synthetic peptide
  Seed: LRMKWMMAMKYPITA
LRMKWMMHMSYPTTA

SEQ ID NO: 243134 - protein, 15 aa, Artificial Sequence
  Description of Artificial Sequence: Synthetic peptide
  Seed: LRMKWMMAMKYPITA
LRMKWMMHMSYPVTA

SEQ ID NO: 243135 - protein, 15 aa, Artificial Sequence
  Description of Artificial Sequence: Synthetic peptide
  Seed: LRMKWMMAMKYPITA
LRMKWMMHMSYPWTA

SEQ ID NO: 243136 - protein, 15 aa, Artificial Sequence
  Description of Artificial Sequence: Synthetic peptide
  Seed: LRMKWMMAMKYPITA
LRMKWMMHMSYPYTA

SEQ ID NO: 243137 - protein, 15 aa, Artificial Sequence
  Description of Artificial Sequence: Synthetic peptide
  Seed: LRMKWMMAMKYPITA
LRMKWMMHMTYPATA

SEQ ID NO: 243138 - protein, 15 aa, Artificial Sequence
  Description of Artificial Sequence: Synthetic peptide
  Seed: LRMKWMMAMKYPITA
LRMKWMMHMTYPFTA

SEQ ID NO: 243139 - protein, 15 aa, Artificial Sequence
  Description of Artificial Sequence: Synthetic peptide
  Seed: LRMKWMMAMKYPITA
LRMKWMMHMTYPITA

SEQ ID NO: 243140 - protein, 15 aa, Artificial Sequence
  Description of Artificial Sequence: Synthetic peptide
  Seed: LRMKWMMAMKYPITA
LRMKWMMHMTYPLTA

SEQ ID NO: 243141 - protein, 15 aa, Artificial Sequence
  Description of Artificial Sequence: Synthetic peptide
  Seed: LRMKWMMAMKYPITA
LRMKWMMHMTYPMTA

SEQ ID NO: 243142 - protein, 15 aa, Artificial Sequence
  Description of Artificial Sequence: Synthetic peptide
  Seed: LRMKWMMAMKYPITA
LRMKWMMHMTYPNTA

SEQ ID NO: 243143 - protein, 15 aa, Artificial Sequence
  Description of Artificial Sequence: Synthetic peptide
  Seed: LRMKWMMAMKYPITA
LRMKWMMHMTYPRTA

SEQ ID NO: 243144 - protein, 15 aa, Artificial Sequence
  Description of Artificial Sequence: Synthetic peptide
  Seed: LRMKWMMAMKYPITA
LRMKWMMHMTYPSTA

SEQ ID NO: 243145 - protein, 15 aa, Artificial Sequence
  Description of Artificial Sequence: Synthetic peptide
  Seed: LRMKWMMAMKYPITA
LRMKWMMHMTYPTTA

SEQ ID NO: 243146 - protein, 15 aa, Artificial Sequence
  Description of Artificial Sequence: Synthetic peptide
  Seed: LRMKWMMAMKYPITA
LRMKWMMHMTYPVTA

SEQ ID NO: 243147 - protein, 15 aa, Artificial Sequence
  Description of Artificial Sequence: Synthetic peptide
  Seed: LRMKWMMAMKYPITA
LRMKWMMHMTYPYTA

SEQ ID NO: 243148 - protein, 15 aa, Artificial Sequence
  Description of Artificial Sequence: Synthetic peptide
  Seed: LRMKWMMAMKYPITA
LRMKWMMHMVYPATA

SEQ ID NO: 243149 - protein, 15 aa, Artificial Sequence
  Description of Artificial Sequence: Synthetic peptide
  Seed: LRMKWMMAMKYPITA
LRMKWMMHMVYPFTA

SEQ ID NO: 243150 - protein, 15 aa, Artificial Sequence
  Description of Artificial Sequence: Synthetic peptide
  Seed: LRMKWMMAMKYPITA
LRMKWMMHMVYPITA

SEQ ID NO: 243151 - protein, 15 aa, Artificial Sequence
  Description of Artificial Sequence: Synthetic peptide
  Seed: LRMKWMMAMKYPITA
LRMKWMMHMVYPLTA

SEQ ID NO: 243152 - protein, 15 aa, Artificial Sequence
  Description of Artificial Sequence: Synthetic peptide
  Seed: LRMKWMMAMKYPITA
LRMKWMMHMVYPMTA

SEQ ID NO: 243153 - protein, 15 aa, Artificial Sequence
  Description of Artificial Sequence: Synthetic peptide
  Seed: LRMKWMMAMKYPITA
LRMKWMMHMVYPNTA

SEQ ID NO: 243154 - protein, 15 aa, Artificial Sequence
  Description of Artificial Sequence: Synthetic peptide
  Seed: LRMKWMMAMKYPITA
LRMKWMMHMVYPQTA

SEQ ID NO: 243155 - protein, 15 aa, Artificial Sequence
  Description of Artificial Sequence: Synthetic peptide
  Seed: LRMKWMMAMKYPITA
LRMKWMMHMVYPRTA

SEQ ID NO: 243156 - protein, 15 aa, Artificial Sequence
  Description of Artificial Sequence: Synthetic peptide
  Seed: LRMKWMMAMKYPITA
LRMKWMMHMVYPSTA

SEQ ID NO: 243157 - protein, 15 aa, Artificial Sequence
  Description of Artificial Sequence: Synthetic peptide
  Seed: LRMKWMMAMKYPITA
LRMKWMMHMVYPTTA

SEQ ID NO: 243158 - protein, 15 aa, Artificial Sequence
  Description of Artificial Sequence: Synthetic peptide
  Seed: LRMKWMMAMKYPITA
LRMKWMMHMVYPVTA

SEQ ID NO: 243159 - protein, 15 aa, Artificial Sequence
  Description of Artificial Sequence: Synthetic peptide
  Seed: LRMKWMMAMKYPITA
LRMKWMMHMVYPYTA

SEQ ID NO: 243160 - protein, 15 aa, Artificial Sequence
  Description of Artificial Sequence: Synthetic peptide
  Seed: LRMKWMMAMKYPITA
LRMKWMMIMAYPATA

SEQ ID NO: 243161 - protein, 15 aa, Artificial Sequence
  Description of Artificial Sequence: Synthetic peptide
  Seed: LRMKWMMAMKYPITA
LRMKWMMIMAYPCTA

SEQ ID NO: 243162 - protein, 15 aa, Artificial Sequence
  Description of Artificial Sequence: Synthetic peptide
  Seed: LRMKWMMAMKYPITA
LRMKWMMIMAYPDTA

SEQ ID NO: 243163 - protein, 15 aa, Artificial Sequence
  Description of Artificial Sequence: Synthetic peptide
  Seed: LRMKWMMAMKYPITA
LRMKWMMIMAYPETA

SEQ ID NO: 243164 - protein, 15 aa, Artificial Sequence
  Description of Artificial Sequence: Synthetic peptide
  Seed: LRMKWMMAMKYPITA
LRMKWMMIMAYPFTA

SEQ ID NO: 243165 - protein, 15 aa, Artificial Sequence
  Description of Artificial Sequence: Synthetic peptide
  Seed: LRMKWMMAMKYPITA
LRMKWMMIMAYPGTA

SEQ ID NO: 243166 - protein, 15 aa, Artificial Sequence
  Description of Artificial Sequence: Synthetic peptide
  Seed: LRMKWMMAMKYPITA
LRMKWMMIMAYPHTA

SEQ ID NO: 243167 - protein, 15 aa, Artificial Sequence
  Description of Artificial Sequence: Synthetic peptide
  Seed: LRMKWMMAMKYPITA
LRMKWMMIMAYPITA

SEQ ID NO: 243168 - protein, 15 aa, Artificial Sequence
  Description of Artificial Sequence: Synthetic peptide
  Seed: LRMKWMMAMKYPITA
LRMKWMMIMAYPKTA

SEQ ID NO: 243169 - protein, 15 aa, Artificial Sequence
  Description of Artificial Sequence: Synthetic peptide
  Seed: LRMKWMMAMKYPITA
LRMKWMMIMAYPLTA

SEQ ID NO: 243170 - protein, 15 aa, Artificial Sequence
  Description of Artificial Sequence: Synthetic peptide
  Seed: LRMKWMMAMKYPITA
LRMKWMMIMAYPMTA

SEQ ID NO: 243171 - protein, 15 aa, Artificial Sequence
  Description of Artificial Sequence: Synthetic peptide
  Seed: LRMKWMMAMKYPITA
LRMKWMMIMAYPNTA

SEQ ID NO: 243172 - protein, 15 aa, Artificial Sequence
  Description of Artificial Sequence: Synthetic peptide
  Seed: LRMKWMMAMKYPITA
LRMKWMMIMAYPPTA

SEQ ID NO: 243173 - protein, 15 aa, Artificial Sequence
  Description of Artificial Sequence: Synthetic peptide
  Seed: LRMKWMMAMKYPITA
LRMKWMMIMAYPQTA

SEQ ID NO: 243174 - protein, 15 aa, Artificial Sequence
  Description of Artificial Sequence: Synthetic peptide
  Seed: LRMKWMMAMKYPITA
LRMKWMMIMAYPRTA

SEQ ID NO: 243175 - protein, 15 aa, Artificial Sequence
  Description of Artificial Sequence: Synthetic peptide
  Seed: LRMKWMMAMKYPITA
LRMKWMMIMAYPSTA

SEQ ID NO: 243176 - protein, 15 aa, Artificial Sequence
  Description of Artificial Sequence: Synthetic peptide
  Seed: LRMKWMMAMKYPITA
LRMKWMMIMAYPTTA

SEQ ID NO: 243177 - protein, 15 aa, Artificial Sequence
  Description of Artificial Sequence: Synthetic peptide
  Seed: LRMKWMMAMKYPITA
LRMKWMMIMAYPVTA

SEQ ID NO: 243178 - protein, 15 aa, Artificial Sequence
  Description of Artificial Sequence: Synthetic peptide
  Seed: LRMKWMMAMKYPITA
LRMKWMMIMAYPWTA

SEQ ID NO: 243179 - protein, 15 aa, Artificial Sequence
  Description of Artificial Sequence: Synthetic peptide
  Seed: LRMKWMMAMKYPITA
LRMKWMMIMAYPYTA

SEQ ID NO: 243180 - protein, 15 aa, Artificial Sequence
  Description of Artificial Sequence: Synthetic peptide
  Seed: LRMKWMMAMKYPITA
LRMKWMMIMCYPATA

SEQ ID NO: 243181 - protein, 15 aa, Artificial Sequence
  Description of Artificial Sequence: Synthetic peptide
  Seed: LRMKWMMAMKYPITA
LRMKWMMIMCYPLTA

SEQ ID NO: 243182 - protein, 15 aa, Artificial Sequence
  Description of Artificial Sequence: Synthetic peptide
  Seed: LRMKWMMAMKYPITA
LRMKWMMIMCYPNTA

SEQ ID NO: 243183 - protein, 15 aa, Artificial Sequence
  Description of Artificial Sequence: Synthetic peptide
  Seed: LRMKWMMAMKYPITA
LRMKWMMIMCYPSTA

SEQ ID NO: 243184 - protein, 15 aa, Artificial Sequence
  Description of Artificial Sequence: Synthetic peptide
  Seed: LRMKWMMAMKYPITA
LRMKWMMIMCYPVTA

SEQ ID NO: 243185 - protein, 15 aa, Artificial Sequence
  Description of Artificial Sequence: Synthetic peptide
  Seed: LRMKWMMAMKYPITA
LRMKWMMIMDYPATA

SEQ ID NO: 243186 - protein, 15 aa, Artificial Sequence
  Description of Artificial Sequence: Synthetic peptide
  Seed: LRMKWMMAMKYPITA
LRMKWMMIMDYPDTA

SEQ ID NO: 243187 - protein, 15 aa, Artificial Sequence
  Description of Artificial Sequence: Synthetic peptide
  Seed: LRMKWMMAMKYPITA
LRMKWMMIMDYPITA

SEQ ID NO: 243188 - protein, 15 aa, Artificial Sequence
  Description of Artificial Sequence: Synthetic peptide
  Seed: LRMKWMMAMKYPITA
LRMKWMMIMDYPLTA

SEQ ID NO: 243189 - protein, 15 aa, Artificial Sequence
  Description of Artificial Sequence: Synthetic peptide
  Seed: LRMKWMMAMKYPITA
LRMKWMMIMDYPMTA

SEQ ID NO: 243190 - protein, 15 aa, Artificial Sequence
  Description of Artificial Sequence: Synthetic peptide
  Seed: LRMKWMMAMKYPITA
LRMKWMMIMDYPNTA

SEQ ID NO: 243191 - protein, 15 aa, Artificial Sequence
  Description of Artificial Sequence: Synthetic peptide
  Seed: LRMKWMMAMKYPITA
LRMKWMMIMDYPSTA

SEQ ID NO: 243192 - protein, 15 aa, Artificial Sequence
  Description of Artificial Sequence: Synthetic peptide
  Seed: LRMKWMMAMKYPITA
LRMKWMMIMDYPTTA

SEQ ID NO: 243193 - protein, 15 aa, Artificial Sequence
  Description of Artificial Sequence: Synthetic peptide
  Seed: LRMKWMMAMKYPITA
LRMKWMMIMDYPVTA

SEQ ID NO: 243194 - protein, 15 aa, Artificial Sequence
  Description of Artificial Sequence: Synthetic peptide
  Seed: LRMKWMMAMKYPITA
LRMKWMMIMEYPATA

SEQ ID NO: 243195 - protein, 15 aa, Artificial Sequence
  Description of Artificial Sequence: Synthetic peptide
  Seed: LRMKWMMAMKYPITA
LRMKWMMIMEYPITA

SEQ ID NO: 243196 - protein, 15 aa, Artificial Sequence
  Description of Artificial Sequence: Synthetic peptide
  Seed: LRMKWMMAMKYPITA
LRMKWMMIMEYPLTA

SEQ ID NO: 243197 - protein, 15 aa, Artificial Sequence
  Description of Artificial Sequence: Synthetic peptide
  Seed: LRMKWMMAMKYPITA
LRMKWMMIMEYPMTA

SEQ ID NO: 243198 - protein, 15 aa, Artificial Sequence
  Description of Artificial Sequence: Synthetic peptide
  Seed: LRMKWMMAMKYPITA
LRMKWMMIMEYPNTA

SEQ ID NO: 243199 - protein, 15 aa, Artificial Sequence
  Description of Artificial Sequence: Synthetic peptide
  Seed: LRMKWMMAMKYPITA
LRMKWMMIMEYPSTA

SEQ ID NO: 243200 - protein, 15 aa, Artificial Sequence
  Description of Artificial Sequence: Synthetic peptide
  Seed: LRMKWMMAMKYPITA
LRMKWMMIMEYPTTA

SEQ ID NO: 243201 - protein, 15 aa, Artificial Sequence
  Description of Artificial Sequence: Synthetic peptide
  Seed: LRMKWMMAMKYPITA
LRMKWMMIMEYPVTA

SEQ ID NO: 243202 - protein, 15 aa, Artificial Sequence
  Description of Artificial Sequence: Synthetic peptide
  Seed: LRMKWMMAMKYPITA
LRMKWMMIMGYPATA

SEQ ID NO: 243203 - protein, 15 aa, Artificial Sequence
  Description of Artificial Sequence: Synthetic peptide
  Seed: LRMKWMMAMKYPITA
LRMKWMMIMGYPCTA

SEQ ID NO: 243204 - protein, 15 aa, Artificial Sequence
  Description of Artificial Sequence: Synthetic peptide
  Seed: LRMKWMMAMKYPITA
LRMKWMMIMGYPDTA

SEQ ID NO: 243205 - protein, 15 aa, Artificial Sequence
  Description of Artificial Sequence: Synthetic peptide
  Seed: LRMKWMMAMKYPITA
LRMKWMMIMGYPETA

SEQ ID NO: 243206 - protein, 15 aa, Artificial Sequence
  Description of Artificial Sequence: Synthetic peptide
  Seed: LRMKWMMAMKYPITA
LRMKWMMIMGYPFTA

SEQ ID NO: 243207 - protein, 15 aa, Artificial Sequence
  Description of Artificial Sequence: Synthetic peptide
  Seed: LRMKWMMAMKYPITA
LRMKWMMIMGYPGTA

SEQ ID NO: 243208 - protein, 15 aa, Artificial Sequence
  Description of Artificial Sequence: Synthetic peptide
  Seed: LRMKWMMAMKYPITA
LRMKWMMIMGYPHTA

SEQ ID NO: 243209 - protein, 15 aa, Artificial Sequence
  Description of Artificial Sequence: Synthetic peptide
  Seed: LRMKWMMAMKYPITA
LRMKWMMIMGYPITA

SEQ ID NO: 243210 - protein, 15 aa, Artificial Sequence
  Description of Artificial Sequence: Synthetic peptide
  Seed: LRMKWMMAMKYPITA
LRMKWMMIMGYPKTA

SEQ ID NO: 243211 - protein, 15 aa, Artificial Sequence
  Description of Artificial Sequence: Synthetic peptide
  Seed: LRMKWMMAMKYPITA
LRMKWMMIMGYPLTA

SEQ ID NO: 243212 - protein, 15 aa, Artificial Sequence
  Description of Artificial Sequence: Synthetic peptide
  Seed: LRMKWMMAMKYPITA
LRMKWMMIMGYPMTA

SEQ ID NO: 243213 - protein, 15 aa, Artificial Sequence
  Description of Artificial Sequence: Synthetic peptide
  Seed: LRMKWMMAMKYPITA
LRMKWMMIMGYPNTA

SEQ ID NO: 243214 - protein, 15 aa, Artificial Sequence
  Description of Artificial Sequence: Synthetic peptide
  Seed: LRMKWMMAMKYPITA
LRMKWMMIMGYPPTA

SEQ ID NO: 243215 - protein, 15 aa, Artificial Sequence
  Description of Artificial Sequence: Synthetic peptide
  Seed: LRMKWMMAMKYPITA
LRMKWMMIMGYPQTA

SEQ ID NO: 243216 - protein, 15 aa, Artificial Sequence
  Description of Artificial Sequence: Synthetic peptide
  Seed: LRMKWMMAMKYPITA
LRMKWMMIMGYPRTA

SEQ ID NO: 243217 - protein, 15 aa, Artificial Sequence
  Description of Artificial Sequence: Synthetic peptide
  Seed: LRMKWMMAMKYPITA
LRMKWMMIMGYPSTA

SEQ ID NO: 243218 - protein, 15 aa, Artificial Sequence
  Description of Artificial Sequence: Synthetic peptide
  Seed: LRMKWMMAMKYPITA
LRMKWMMIMGYPTTA

SEQ ID NO: 243219 - protein, 15 aa, Artificial Sequence
  Description of Artificial Sequence: Synthetic peptide
  Seed: LRMKWMMAMKYPITA
LRMKWMMIMGYPVTA

SEQ ID NO: 243220 - protein, 15 aa, Artificial Sequence
  Description of Artificial Sequence: Synthetic peptide
  Seed: LRMKWMMAMKYPITA
LRMKWMMIMGYPWTA

SEQ ID NO: 243221 - protein, 15 aa, Artificial Sequence
  Description of Artificial Sequence: Synthetic peptide
  Seed: LRMKWMMAMKYPITA
LRMKWMMIMGYPYTA

SEQ ID NO: 243222 - protein, 15 aa, Artificial Sequence
  Description of Artificial Sequence: Synthetic peptide
  Seed: LRMKWMMAMKYPITA
LRMKWMMIMHYPATA

SEQ ID NO: 243223 - protein, 15 aa, Artificial Sequence
  Description of Artificial Sequence: Synthetic peptide
  Seed: LRMKWMMAMKYPITA
LRMKWMMIMHYPITA

SEQ ID NO: 243224 - protein, 15 aa, Artificial Sequence
  Description of Artificial Sequence: Synthetic peptide
  Seed: LRMKWMMAMKYPITA
LRMKWMMIMHYPLTA

SEQ ID NO: 243225 - protein, 15 aa, Artificial Sequence
  Description of Artificial Sequence: Synthetic peptide
  Seed: LRMKWMMAMKYPITA
LRMKWMMIMHYPMTA

SEQ ID NO: 243226 - protein, 15 aa, Artificial Sequence
  Description of Artificial Sequence: Synthetic peptide
  Seed: LRMKWMMAMKYPITA
LRMKWMMIMHYPNTA

SEQ ID NO: 243227 - protein, 15 aa, Artificial Sequence
  Description of Artificial Sequence: Synthetic peptide
  Seed: LRMKWMMAMKYPITA
LRMKWMMIMHYPQTA

SEQ ID NO: 243228 - protein, 15 aa, Artificial Sequence
  Description of Artificial Sequence: Synthetic peptide
  Seed: LRMKWMMAMKYPITA
LRMKWMMIMHYPSTA

SEQ ID NO: 243229 - protein, 15 aa, Artificial Sequence
  Description of Artificial Sequence: Synthetic peptide
  Seed: LRMKWMMAMKYPITA
LRMKWMMIMHYPTTA

SEQ ID NO: 243230 - protein, 15 aa, Artificial Sequence
  Description of Artificial Sequence: Synthetic peptide
  Seed: LRMKWMMAMKYPITA
LRMKWMMIMHYPVTA

SEQ ID NO: 243231 - protein, 15 aa, Artificial Sequence
  Description of Artificial Sequence: Synthetic peptide
  Seed: LRMKWMMAMKYPITA
LRMKWMMIMIYPATA

SEQ ID NO: 243232 - protein, 15 aa, Artificial Sequence
  Description of Artificial Sequence: Synthetic peptide
  Seed: LRMKWMMAMKYPITA
LRMKWMMIMIYPCTA

SEQ ID NO: 243233 - protein, 15 aa, Artificial Sequence
  Description of Artificial Sequence: Synthetic peptide
  Seed: LRMKWMMAMKYPITA
LRMKWMMIMIYPDTA

SEQ ID NO: 243234 - protein, 15 aa, Artificial Sequence
  Description of Artificial Sequence: Synthetic peptide
  Seed: LRMKWMMAMKYPITA
LRMKWMMIMIYPETA

SEQ ID NO: 243235 - protein, 15 aa, Artificial Sequence
  Description of Artificial Sequence: Synthetic peptide
  Seed: LRMKWMMAMKYPITA
LRMKWMMIMIYPGTA

SEQ ID NO: 243236 - protein, 15 aa, Artificial Sequence
  Description of Artificial Sequence: Synthetic peptide
  Seed: LRMKWMMAMKYPITA
LRMKWMMIMIYPHTA

SEQ ID NO: 243237 - protein, 15 aa, Artificial Sequence
  Description of Artificial Sequence: Synthetic peptide
  Seed: LRMKWMMAMKYPITA
LRMKWMMIMIYPITA

SEQ ID NO: 243238 - protein, 15 aa, Artificial Sequence
  Description of Artificial Sequence: Synthetic peptide
  Seed: LRMKWMMAMKYPITA
LRMKWMMIMIYPLTA

SEQ ID NO: 243239 - protein, 15 aa, Artificial Sequence
  Description of Artificial Sequence: Synthetic peptide
  Seed: LRMKWMMAMKYPITA
LRMKWMMIMIYPMTA

SEQ ID NO: 243240 - protein, 15 aa, Artificial Sequence
  Description of Artificial Sequence: Synthetic peptide
  Seed: LRMKWMMAMKYPITA
LRMKWMMIMIYPNTA

SEQ ID NO: 243241 - protein, 15 aa, Artificial Sequence
  Description of Artificial Sequence: Synthetic peptide
  Seed: LRMKWMMAMKYPITA
LRMKWMMIMIYPQTA

SEQ ID NO: 243242 - protein, 15 aa, Artificial Sequence
  Description of Artificial Sequence: Synthetic peptide
  Seed: LRMKWMMAMKYPITA
LRMKWMMIMIYPSTA

SEQ ID NO: 243243 - protein, 15 aa, Artificial Sequence
  Description of Artificial Sequence: Synthetic peptide
  Seed: LRMKWMMAMKYPITA
LRMKWMMIMIYPTTA

SEQ ID NO: 243244 - protein, 15 aa, Artificial Sequence
  Description of Artificial Sequence: Synthetic peptide
  Seed: LRMKWMMAMKYPITA
LRMKWMMIMIYPVTA

SEQ ID NO: 243245 - protein, 15 aa, Artificial Sequence
  Description of Artificial Sequence: Synthetic peptide
  Seed: LRMKWMMAMKYPITA
LRMKWMMIMKYPATA

SEQ ID NO: 243246 - protein, 15 aa, Artificial Sequence
  Description of Artificial Sequence: Synthetic peptide
  Seed: LRMKWMMAMKYPITA
LRMKWMMIMKYPGTA

SEQ ID NO: 243247 - protein, 15 aa, Artificial Sequence
  Description of Artificial Sequence: Synthetic peptide
  Seed: LRMKWMMAMKYPITA
LRMKWMMIMKYPHTA

SEQ ID NO: 243248 - protein, 15 aa, Artificial Sequence
  Description of Artificial Sequence: Synthetic peptide
  Seed: LRMKWMMAMKYPITA
LRMKWMMIMKYPKTA

SEQ ID NO: 243249 - protein, 15 aa, Artificial Sequence
  Description of Artificial Sequence: Synthetic peptide
  Seed: LRMKWMMAMKYPITA
LRMKWMMIMKYPLTA

SEQ ID NO: 243250 - protein, 15 aa, Artificial Sequence
  Description of Artificial Sequence: Synthetic peptide
  Seed: LRMKWMMAMKYPITA
LRMKWMMIMKYPMTA

SEQ ID NO: 243251 - protein, 15 aa, Artificial Sequence
  Description of Artificial Sequence: Synthetic peptide
  Seed: LRMKWMMAMKYPITA
LRMKWMMIMKYPNTA

SEQ ID NO: 243252 - protein, 15 aa, Artificial Sequence
  Description of Artificial Sequence: Synthetic peptide
  Seed: LRMKWMMAMKYPITA
LRMKWMMIMKYPPTA

SEQ ID NO: 243253 - protein, 15 aa, Artificial Sequence
  Description of Artificial Sequence: Synthetic peptide
  Seed: LRMKWMMAMKYPITA
LRMKWMMIMKYPQTA

SEQ ID NO: 243254 - protein, 15 aa, Artificial Sequence
  Description of Artificial Sequence: Synthetic peptide
  Seed: LRMKWMMAMKYPITA
LRMKWMMIMKYPRTA

SEQ ID NO: 243255 - protein, 15 aa, Artificial Sequence
  Description of Artificial Sequence: Synthetic peptide
  Seed: LRMKWMMAMKYPITA
LRMKWMMIMKYPSTA

SEQ ID NO: 243256 - protein, 15 aa, Artificial Sequence
  Description of Artificial Sequence: Synthetic peptide
  Seed: LRMKWMMAMKYPITA
LRMKWMMIMKYPTTA

SEQ ID NO: 243257 - protein, 15 aa, Artificial Sequence
  Description of Artificial Sequence: Synthetic peptide
  Seed: LRMKWMMAMKYPITA
LRMKWMMIMKYPVTA

SEQ ID NO: 243258 - protein, 15 aa, Artificial Sequence
  Description of Artificial Sequence: Synthetic peptide
  Seed: LRMKWMMAMKYPITA
LRMKWMMIMKYPYTA

SEQ ID NO: 243259 - protein, 15 aa, Artificial Sequence
  Description of Artificial Sequence: Synthetic peptide
  Seed: LRMKWMMAMKYPITA
LRMKWMMIMLYPGTA

SEQ ID NO: 243260 - protein, 15 aa, Artificial Sequence
  Description of Artificial Sequence: Synthetic peptide
  Seed: LRMKWMMAMKYPITA
LRMKWMMIMLYPSTA

SEQ ID NO: 243261 - protein, 15 aa, Artificial Sequence
  Description of Artificial Sequence: Synthetic peptide
  Seed: LRMKWMMAMKYPITA
LRMKWMMIMMYPATA

SEQ ID NO: 243262 - protein, 15 aa, Artificial Sequence
  Description of Artificial Sequence: Synthetic peptide
  Seed: LRMKWMMAMKYPITA
LRMKWMMIMMYPCTA

SEQ ID NO: 243263 - protein, 15 aa, Artificial Sequence
  Description of Artificial Sequence: Synthetic peptide
  Seed: LRMKWMMAMKYPITA
LRMKWMMIMMYPGTA

SEQ ID NO: 243264 - protein, 15 aa, Artificial Sequence
  Description of Artificial Sequence: Synthetic peptide
  Seed: LRMKWMMAMKYPITA
LRMKWMMIMMYPITA

SEQ ID NO: 243265 - protein, 15 aa, Artificial Sequence
  Description of Artificial Sequence: Synthetic peptide
  Seed: LRMKWMMAMKYPITA
LRMKWMMIMMYPLTA

SEQ ID NO: 243266 - protein, 15 aa, Artificial Sequence
  Description of Artificial Sequence: Synthetic peptide
  Seed: LRMKWMMAMKYPITA
LRMKWMMIMMYPMTA

SEQ ID NO: 243267 - protein, 15 aa, Artificial Sequence
  Description of Artificial Sequence: Synthetic peptide
  Seed: LRMKWMMAMKYPITA
LRMKWMMIMMYPSTA

SEQ ID NO: 243268 - protein, 15 aa, Artificial Sequence
  Description of Artificial Sequence: Synthetic peptide
  Seed: LRMKWMMAMKYPITA
LRMKWMMIMMYPTTA

SEQ ID NO: 243269 - protein, 15 aa, Artificial Sequence
  Description of Artificial Sequence: Synthetic peptide
  Seed: LRMKWMMAMKYPITA
LRMKWMMIMMYPVTA

SEQ ID NO: 243270 - protein, 15 aa, Artificial Sequence
  Description of Artificial Sequence: Synthetic peptide
  Seed: LRMKWMMAMKYPITA
LRMKWMMIMNYPATA

SEQ ID NO: 243271 - protein, 15 aa, Artificial Sequence
  Description of Artificial Sequence: Synthetic peptide
  Seed: LRMKWMMAMKYPITA
LRMKWMMIMNYPCTA

SEQ ID NO: 243272 - protein, 15 aa, Artificial Sequence
  Description of Artificial Sequence: Synthetic peptide
  Seed: LRMKWMMAMKYPITA
LRMKWMMIMNYPDTA

SEQ ID NO: 243273 - protein, 15 aa, Artificial Sequence
  Description of Artificial Sequence: Synthetic peptide
  Seed: LRMKWMMAMKYPITA
LRMKWMMIMNYPETA

SEQ ID NO: 243274 - protein, 15 aa, Artificial Sequence
  Description of Artificial Sequence: Synthetic peptide
  Seed: LRMKWMMAMKYPITA
LRMKWMMIMNYPFTA

SEQ ID NO: 243275 - protein, 15 aa, Artificial Sequence
  Description of Artificial Sequence: Synthetic peptide
  Seed: LRMKWMMAMKYPITA
LRMKWMMIMNYPGTA

SEQ ID NO: 243276 - protein, 15 aa, Artificial Sequence
  Description of Artificial Sequence: Synthetic peptide
  Seed: LRMKWMMAMKYPITA
LRMKWMMIMNYPHTA

SEQ ID NO: 243277 - protein, 15 aa, Artificial Sequence
  Description of Artificial Sequence: Synthetic peptide
  Seed: LRMKWMMAMKYPITA
LRMKWMMIMNYPITA

SEQ ID NO: 243278 - protein, 15 aa, Artificial Sequence
  Description of Artificial Sequence: Synthetic peptide
  Seed: LRMKWMMAMKYPITA
LRMKWMMIMNYPLTA

SEQ ID NO: 243279 - protein, 15 aa, Artificial Sequence
  Description of Artificial Sequence: Synthetic peptide
  Seed: LRMKWMMAMKYPITA
LRMKWMMIMNYPMTA

SEQ ID NO: 243280 - protein, 15 aa, Artificial Sequence
  Description of Artificial Sequence: Synthetic peptide
  Seed: LRMKWMMAMKYPITA
LRMKWMMIMNYPNTA

SEQ ID NO: 243281 - protein, 15 aa, Artificial Sequence
  Description of Artificial Sequence: Synthetic peptide
  Seed: LRMKWMMAMKYPITA
LRMKWMMIMNYPPTA

SEQ ID NO: 243282 - protein, 15 aa, Artificial Sequence
  Description of Artificial Sequence: Synthetic peptide
  Seed: LRMKWMMAMKYPITA
LRMKWMMIMNYPQTA

SEQ ID NO: 243283 - protein, 15 aa, Artificial Sequence
  Description of Artificial Sequence: Synthetic peptide
  Seed: LRMKWMMAMKYPITA
LRMKWMMIMNYPRTA

SEQ ID NO: 243284 - protein, 15 aa, Artificial Sequence
  Description of Artificial Sequence: Synthetic peptide
  Seed: LRMKWMMAMKYPITA
LRMKWMMIMNYPSTA

SEQ ID NO: 243285 - protein, 15 aa, Artificial Sequence
  Description of Artificial Sequence: Synthetic peptide
  Seed: LRMKWMMAMKYPITA
LRMKWMMIMNYPTTA

SEQ ID NO: 243286 - protein, 15 aa, Artificial Sequence
  Description of Artificial Sequence: Synthetic peptide
  Seed: LRMKWMMAMKYPITA
LRMKWMMIMNYPVTA

SEQ ID NO: 243287 - protein, 15 aa, Artificial Sequence
  Description of Artificial Sequence: Synthetic peptide
  Seed: LRMKWMMAMKYPITA
LRMKWMMIMNYPYTA

SEQ ID NO: 243288 - protein, 15 aa, Artificial Sequence
  Description of Artificial Sequence: Synthetic peptide
  Seed: LRMKWMMAMKYPITA
LRMKWMMIMPYPATA

SEQ ID NO: 243289 - protein, 15 aa, Artificial Sequence
  Description of Artificial Sequence: Synthetic peptide
  Seed: LRMKWMMAMKYPITA
LRMKWMMIMPYPCTA

SEQ ID NO: 243290 - protein, 15 aa, Artificial Sequence
  Description of Artificial Sequence: Synthetic peptide
  Seed: LRMKWMMAMKYPITA
LRMKWMMIMPYPDTA

SEQ ID NO: 243291 - protein, 15 aa, Artificial Sequence
  Description of Artificial Sequence: Synthetic peptide
  Seed: LRMKWMMAMKYPITA
LRMKWMMIMPYPETA

SEQ ID NO: 243292 - protein, 15 aa, Artificial Sequence
  Description of Artificial Sequence: Synthetic peptide
  Seed: LRMKWMMAMKYPITA
LRMKWMMIMPYPFTA

SEQ ID NO: 243293 - protein, 15 aa, Artificial Sequence
  Description of Artificial Sequence: Synthetic peptide
  Seed: LRMKWMMAMKYPITA
LRMKWMMIMPYPGTA

SEQ ID NO: 243294 - protein, 15 aa, Artificial Sequence
  Description of Artificial Sequence: Synthetic peptide
  Seed: LRMKWMMAMKYPITA
LRMKWMMIMPYPHTA

SEQ ID NO: 243295 - protein, 15 aa, Artificial Sequence
  Description of Artificial Sequence: Synthetic peptide
  Seed: LRMKWMMAMKYPITA
LRMKWMMIMPYPITA

SEQ ID NO: 243296 - protein, 15 aa, Artificial Sequence
  Description of Artificial Sequence: Synthetic peptide
  Seed: LRMKWMMAMKYPITA
LRMKWMMIMPYPKTA

SEQ ID NO: 243297 - protein, 15 aa, Artificial Sequence
  Description of Artificial Sequence: Synthetic peptide
  Seed: LRMKWMMAMKYPITA
LRMKWMMIMPYPLTA

SEQ ID NO: 243298 - protein, 15 aa, Artificial Sequence
  Description of Artificial Sequence: Synthetic peptide
  Seed: LRMKWMMAMKYPITA
LRMKWMMIMPYPMTA

SEQ ID NO: 243299 - protein, 15 aa, Artificial Sequence
  Description of Artificial Sequence: Synthetic peptide
  Seed: LRMKWMMAMKYPITA
LRMKWMMIMPYPNTA

SEQ ID NO: 243300 - protein, 15 aa, Artificial Sequence
  Description of Artificial Sequence: Synthetic peptide
  Seed: LRMKWMMAMKYPITA
LRMKWMMIMPYPPTA

SEQ ID NO: 243301 - protein, 15 aa, Artificial Sequence
  Description of Artificial Sequence: Synthetic peptide
  Seed: LRMKWMMAMKYPITA
LRMKWMMIMPYPQTA

SEQ ID NO: 243302 - protein, 15 aa, Artificial Sequence
  Description of Artificial Sequence: Synthetic peptide
  Seed: LRMKWMMAMKYPITA
LRMKWMMIMPYPRTA

SEQ ID NO: 243303 - protein, 15 aa, Artificial Sequence
  Description of Artificial Sequence: Synthetic peptide
  Seed: LRMKWMMAMKYPITA
LRMKWMMIMPYPSTA

SEQ ID NO: 243304 - protein, 15 aa, Artificial Sequence
  Description of Artificial Sequence: Synthetic peptide
  Seed: LRMKWMMAMKYPITA
LRMKWMMIMPYPTTA

SEQ ID NO: 243305 - protein, 15 aa, Artificial Sequence
  Description of Artificial Sequence: Synthetic peptide
  Seed: LRMKWMMAMKYPITA
LRMKWMMIMPYPVTA

SEQ ID NO: 243306 - protein, 15 aa, Artificial Sequence
  Description of Artificial Sequence: Synthetic peptide
  Seed: LRMKWMMAMKYPITA
LRMKWMMIMPYPWTA

SEQ ID NO: 243307 - protein, 15 aa, Artificial Sequence
  Description of Artificial Sequence: Synthetic peptide
  Seed: LRMKWMMAMKYPITA
LRMKWMMIMPYPYTA

SEQ ID NO: 243308 - protein, 15 aa, Artificial Sequence
  Description of Artificial Sequence: Synthetic peptide
  Seed: LRMKWMMAMKYPITA
LRMKWMMIMQYPATA

SEQ ID NO: 243309 - protein, 15 aa, Artificial Sequence
  Description of Artificial Sequence: Synthetic peptide
  Seed: LRMKWMMAMKYPITA
LRMKWMMIMQYPGTA

SEQ ID NO: 243310 - protein, 15 aa, Artificial Sequence
  Description of Artificial Sequence: Synthetic peptide
  Seed: LRMKWMMAMKYPITA
LRMKWMMIMQYPITA

SEQ ID NO: 243311 - protein, 15 aa, Artificial Sequence
  Description of Artificial Sequence: Synthetic peptide
  Seed: LRMKWMMAMKYPITA
LRMKWMMIMQYPLTA

SEQ ID NO: 243312 - protein, 15 aa, Artificial Sequence
  Description of Artificial Sequence: Synthetic peptide
  Seed: LRMKWMMAMKYPITA
LRMKWMMIMQYPMTA

SEQ ID NO: 243313 - protein, 15 aa, Artificial Sequence
  Description of Artificial Sequence: Synthetic peptide
  Seed: LRMKWMMAMKYPITA
LRMKWMMIMQYPNTA

SEQ ID NO: 243314 - protein, 15 aa, Artificial Sequence
  Description of Artificial Sequence: Synthetic peptide
  Seed: LRMKWMMAMKYPITA
LRMKWMMIMQYPQTA

SEQ ID NO: 243315 - protein, 15 aa, Artificial Sequence
  Description of Artificial Sequence: Synthetic peptide
  Seed: LRMKWMMAMKYPITA
LRMKWMMIMQYPSTA

SEQ ID NO: 243316 - protein, 15 aa, Artificial Sequence
  Description of Artificial Sequence: Synthetic peptide
  Seed: LRMKWMMAMKYPITA
LRMKWMMIMQYPTTA

SEQ ID NO: 243317 - protein, 15 aa, Artificial Sequence
  Description of Artificial Sequence: Synthetic peptide
  Seed: LRMKWMMAMKYPITA
LRMKWMMIMQYPVTA

SEQ ID NO: 243318 - protein, 15 aa, Artificial Sequence
  Description of Artificial Sequence: Synthetic peptide
  Seed: LRMKWMMAMKYPITA
LRMKWMMIMRYPATA

SEQ ID NO: 243319 - protein, 15 aa, Artificial Sequence
  Description of Artificial Sequence: Synthetic peptide
  Seed: LRMKWMMAMKYPITA
LRMKWMMIMRYPDTA

SEQ ID NO: 243320 - protein, 15 aa, Artificial Sequence
  Description of Artificial Sequence: Synthetic peptide
  Seed: LRMKWMMAMKYPITA
LRMKWMMIMRYPETA

SEQ ID NO: 243321 - protein, 15 aa, Artificial Sequence
  Description of Artificial Sequence: Synthetic peptide
  Seed: LRMKWMMAMKYPITA
LRMKWMMIMRYPFTA

SEQ ID NO: 243322 - protein, 15 aa, Artificial Sequence
  Description of Artificial Sequence: Synthetic peptide
  Seed: LRMKWMMAMKYPITA
LRMKWMMIMRYPGTA

SEQ ID NO: 243323 - protein, 15 aa, Artificial Sequence
  Description of Artificial Sequence: Synthetic peptide
  Seed: LRMKWMMAMKYPITA
LRMKWMMIMRYPHTA

SEQ ID NO: 243324 - protein, 15 aa, Artificial Sequence
  Description of Artificial Sequence: Synthetic peptide
  Seed: LRMKWMMAMKYPITA
LRMKWMMIMRYPITA

SEQ ID NO: 243325 - protein, 15 aa, Artificial Sequence
  Description of Artificial Sequence: Synthetic peptide
  Seed: LRMKWMMAMKYPITA
LRMKWMMIMRYPKTA

SEQ ID NO: 243326 - protein, 15 aa, Artificial Sequence
  Description of Artificial Sequence: Synthetic peptide
  Seed: LRMKWMMAMKYPITA
LRMKWMMIMRYPLTA

SEQ ID NO: 243327 - protein, 15 aa, Artificial Sequence
  Description of Artificial Sequence: Synthetic peptide
  Seed: LRMKWMMAMKYPITA
LRMKWMMIMRYPMTA

SEQ ID NO: 243328 - protein, 15 aa, Artificial Sequence
  Description of Artificial Sequence: Synthetic peptide
  Seed: LRMKWMMAMKYPITA
LRMKWMMIMRYPNTA

SEQ ID NO: 243329 - protein, 15 aa, Artificial Sequence
  Description of Artificial Sequence: Synthetic peptide
  Seed: LRMKWMMAMKYPITA
LRMKWMMIMRYPPTA

SEQ ID NO: 243330 - protein, 15 aa, Artificial Sequence
  Description of Artificial Sequence: Synthetic peptide
  Seed: LRMKWMMAMKYPITA
LRMKWMMIMRYPQTA

SEQ ID NO: 243331 - protein, 15 aa, Artificial Sequence
  Description of Artificial Sequence: Synthetic peptide
  Seed: LRMKWMMAMKYPITA
LRMKWMMIMRYPRTA

SEQ ID NO: 243332 - protein, 15 aa, Artificial Sequence
  Description of Artificial Sequence: Synthetic peptide
  Seed: LRMKWMMAMKYPITA
LRMKWMMIMRYPSTA

SEQ ID NO: 243333 - protein, 15 aa, Artificial Sequence
  Description of Artificial Sequence: Synthetic peptide
  Seed: LRMKWMMAMKYPITA
LRMKWMMIMRYPTTA

SEQ ID NO: 243334 - protein, 15 aa, Artificial Sequence
  Description of Artificial Sequence: Synthetic peptide
  Seed: LRMKWMMAMKYPITA
LRMKWMMIMRYPVTA

SEQ ID NO: 243335 - protein, 15 aa, Artificial Sequence
  Description of Artificial Sequence: Synthetic peptide
  Seed: LRMKWMMAMKYPITA
LRMKWMMIMRYPYTA

SEQ ID NO: 243336 - protein, 15 aa, Artificial Sequence
  Description of Artificial Sequence: Synthetic peptide
  Seed: LRMKWMMAMKYPITA
LRMKWMMIMSYPATA

SEQ ID NO: 243337 - protein, 15 aa, Artificial Sequence
  Description of Artificial Sequence: Synthetic peptide
  Seed: LRMKWMMAMKYPITA
LRMKWMMIMSYPCTA

SEQ ID NO: 243338 - protein, 15 aa, Artificial Sequence
  Description of Artificial Sequence: Synthetic peptide
  Seed: LRMKWMMAMKYPITA
LRMKWMMIMSYPDTA

SEQ ID NO: 243339 - protein, 15 aa, Artificial Sequence
  Description of Artificial Sequence: Synthetic peptide
  Seed: LRMKWMMAMKYPITA
LRMKWMMIMSYPETA

SEQ ID NO: 243340 - protein, 15 aa, Artificial Sequence
  Description of Artificial Sequence: Synthetic peptide
  Seed: LRMKWMMAMKYPITA
LRMKWMMIMSYPFTA

SEQ ID NO: 243341 - protein, 15 aa, Artificial Sequence
  Description of Artificial Sequence: Synthetic peptide
  Seed: LRMKWMMAMKYPITA
LRMKWMMIMSYPGTA

SEQ ID NO: 243342 - protein, 15 aa, Artificial Sequence
  Description of Artificial Sequence: Synthetic peptide
  Seed: LRMKWMMAMKYPITA
LRMKWMMIMSYPHTA

SEQ ID NO: 243343 - protein, 15 aa, Artificial Sequence
  Description of Artificial Sequence: Synthetic peptide
  Seed: LRMKWMMAMKYPITA
LRMKWMMIMSYPITA

SEQ ID NO: 243344 - protein, 15 aa, Artificial Sequence
  Description of Artificial Sequence: Synthetic peptide
  Seed: LRMKWMMAMKYPITA
LRMKWMMIMSYPKTA

SEQ ID NO: 243345 - protein, 15 aa, Artificial Sequence
  Description of Artificial Sequence: Synthetic peptide
  Seed: LRMKWMMAMKYPITA
LRMKWMMIMSYPLTA

SEQ ID NO: 243346 - protein, 15 aa, Artificial Sequence
  Description of Artificial Sequence: Synthetic peptide
  Seed: LRMKWMMAMKYPITA
LRMKWMMIMSYPMTA

SEQ ID NO: 243347 - protein, 15 aa, Artificial Sequence
  Description of Artificial Sequence: Synthetic peptide
  Seed: LRMKWMMAMKYPITA
LRMKWMMIMSYPNTA

SEQ ID NO: 243348 - protein, 15 aa, Artificial Sequence
  Description of Artificial Sequence: Synthetic peptide
  Seed: LRMKWMMAMKYPITA
LRMKWMMIMSYPPTA

SEQ ID NO: 243349 - protein, 15 aa, Artificial Sequence
  Description of Artificial Sequence: Synthetic peptide
  Seed: LRMKWMMAMKYPITA
LRMKWMMIMSYPQTA

SEQ ID NO: 243350 - protein, 15 aa, Artificial Sequence
  Description of Artificial Sequence: Synthetic peptide
  Seed: LRMKWMMAMKYPITA
LRMKWMMIMSYPRTA

SEQ ID NO: 243351 - protein, 15 aa, Artificial Sequence
  Description of Artificial Sequence: Synthetic peptide
  Seed: LRMKWMMAMKYPITA
LRMKWMMIMSYPSTA

SEQ ID NO: 243352 - protein, 15 aa, Artificial Sequence
  Description of Artificial Sequence: Synthetic peptide
  Seed: LRMKWMMAMKYPITA
LRMKWMMIMSYPTTA

SEQ ID NO: 243353 - protein, 15 aa, Artificial Sequence
  Description of Artificial Sequence: Synthetic peptide
  Seed: LRMKWMMAMKYPITA
LRMKWMMIMSYPVTA

SEQ ID NO: 243354 - protein, 15 aa, Artificial Sequence
  Description of Artificial Sequence: Synthetic peptide
  Seed: LRMKWMMAMKYPITA
LRMKWMMIMSYPYTA

SEQ ID NO: 243355 - protein, 15 aa, Artificial Sequence
  Description of Artificial Sequence: Synthetic peptide
  Seed: LRMKWMMAMKYPITA
LRMKWMMIMTYPATA

SEQ ID NO: 243356 - protein, 15 aa, Artificial Sequence
  Description of Artificial Sequence: Synthetic peptide
  Seed: LRMKWMMAMKYPITA
LRMKWMMIMTYPCTA

SEQ ID NO: 243357 - protein, 15 aa, Artificial Sequence
  Description of Artificial Sequence: Synthetic peptide
  Seed: LRMKWMMAMKYPITA
LRMKWMMIMTYPDTA

SEQ ID NO: 243358 - protein, 15 aa, Artificial Sequence
  Description of Artificial Sequence: Synthetic peptide
  Seed: LRMKWMMAMKYPITA
LRMKWMMIMTYPETA

SEQ ID NO: 243359 - protein, 15 aa, Artificial Sequence
  Description of Artificial Sequence: Synthetic peptide
  Seed: LRMKWMMAMKYPITA
LRMKWMMIMTYPFTA

SEQ ID NO: 243360 - protein, 15 aa, Artificial Sequence
  Description of Artificial Sequence: Synthetic peptide
  Seed: LRMKWMMAMKYPITA
LRMKWMMIMTYPGTA

SEQ ID NO: 243361 - protein, 15 aa, Artificial Sequence
  Description of Artificial Sequence: Synthetic peptide
  Seed: LRMKWMMAMKYPITA
LRMKWMMIMTYPHTA

SEQ ID NO: 243362 - protein, 15 aa, Artificial Sequence
  Description of Artificial Sequence: Synthetic peptide
  Seed: LRMKWMMAMKYPITA
LRMKWMMIMTYPITA

SEQ ID NO: 243363 - protein, 15 aa, Artificial Sequence
  Description of Artificial Sequence: Synthetic peptide
  Seed: LRMKWMMAMKYPITA
LRMKWMMIMTYPKTA

SEQ ID NO: 243364 - protein, 15 aa, Artificial Sequence
  Description of Artificial Sequence: Synthetic peptide
  Seed: LRMKWMMAMKYPITA
LRMKWMMIMTYPLTA

SEQ ID NO: 243365 - protein, 15 aa, Artificial Sequence
  Description of Artificial Sequence: Synthetic peptide
  Seed: LRMKWMMAMKYPITA
LRMKWMMIMTYPMTA

SEQ ID NO: 243366 - protein, 15 aa, Artificial Sequence
  Description of Artificial Sequence: Synthetic peptide
  Seed: LRMKWMMAMKYPITA
LRMKWMMIMTYPNTA

SEQ ID NO: 243367 - protein, 15 aa, Artificial Sequence
  Description of Artificial Sequence: Synthetic peptide
  Seed: LRMKWMMAMKYPITA
LRMKWMMIMTYPPTA

SEQ ID NO: 243368 - protein, 15 aa, Artificial Sequence
  Description of Artificial Sequence: Synthetic peptide
  Seed: LRMKWMMAMKYPITA
LRMKWMMIMTYPQTA

SEQ ID NO: 243369 - protein, 15 aa, Artificial Sequence
  Description of Artificial Sequence: Synthetic peptide
  Seed: LRMKWMMAMKYPITA
LRMKWMMIMTYPRTA

SEQ ID NO: 243370 - protein, 15 aa, Artificial Sequence
  Description of Artificial Sequence: Synthetic peptide
  Seed: LRMKWMMAMKYPITA
LRMKWMMIMTYPSTA

SEQ ID NO: 243371 - protein, 15 aa, Artificial Sequence
  Description of Artificial Sequence: Synthetic peptide
  Seed: LRMKWMMAMKYPITA
LRMKWMMIMTYPTTA

SEQ ID NO: 243372 - protein, 15 aa, Artificial Sequence
  Description of Artificial Sequence: Synthetic peptide
  Seed: LRMKWMMAMKYPITA
LRMKWMMIMTYPVTA

SEQ ID NO: 243373 - protein, 15 aa, Artificial Sequence
  Description of Artificial Sequence: Synthetic peptide
  Seed: LRMKWMMAMKYPITA
LRMKWMMIMTYPYTA

SEQ ID NO: 243374 - protein, 15 aa, Artificial Sequence
  Description of Artificial Sequence: Synthetic peptide
  Seed: LRMKWMMAMKYPITA
LRMKWMMIMVYPATA

SEQ ID NO: 243375 - protein, 15 aa, Artificial Sequence
  Description of Artificial Sequence: Synthetic peptide
  Seed: LRMKWMMAMKYPITA
LRMKWMMIMVYPCTA

SEQ ID NO: 243376 - protein, 15 aa, Artificial Sequence
  Description of Artificial Sequence: Synthetic peptide
  Seed: LRMKWMMAMKYPITA
LRMKWMMIMVYPDTA

SEQ ID NO: 243377 - protein, 15 aa, Artificial Sequence
  Description of Artificial Sequence: Synthetic peptide
  Seed: LRMKWMMAMKYPITA
LRMKWMMIMVYPETA

SEQ ID NO: 243378 - protein, 15 aa, Artificial Sequence
  Description of Artificial Sequence: Synthetic peptide
  Seed: LRMKWMMAMKYPITA
LRMKWMMIMVYPGTA

SEQ ID NO: 243379 - protein, 15 aa, Artificial Sequence
  Description of Artificial Sequence: Synthetic peptide
  Seed: LRMKWMMAMKYPITA
LRMKWMMIMVYPHTA

SEQ ID NO: 243380 - protein, 15 aa, Artificial Sequence
  Description of Artificial Sequence: Synthetic peptide
  Seed: LRMKWMMAMKYPITA
LRMKWMMIMVYPITA

SEQ ID NO: 243381 - protein, 15 aa, Artificial Sequence
  Description of Artificial Sequence: Synthetic peptide
  Seed: LRMKWMMAMKYPITA
LRMKWMMIMVYPKTA

SEQ ID NO: 243382 - protein, 15 aa, Artificial Sequence
  Description of Artificial Sequence: Synthetic peptide
  Seed: LRMKWMMAMKYPITA
LRMKWMMIMVYPLTA

SEQ ID NO: 243383 - protein, 15 aa, Artificial Sequence
  Description of Artificial Sequence: Synthetic peptide
  Seed: LRMKWMMAMKYPITA
LRMKWMMIMVYPMTA

SEQ ID NO: 243384 - protein, 15 aa, Artificial Sequence
  Description of Artificial Sequence: Synthetic peptide
  Seed: LRMKWMMAMKYPITA
LRMKWMMIMVYPNTA

SEQ ID NO: 243385 - protein, 15 aa, Artificial Sequence
  Description of Artificial Sequence: Synthetic peptide
  Seed: LRMKWMMAMKYPITA
LRMKWMMIMVYPPTA

SEQ ID NO: 243386 - protein, 15 aa, Artificial Sequence
  Description of Artificial Sequence: Synthetic peptide
  Seed: LRMKWMMAMKYPITA
LRMKWMMIMVYPQTA

SEQ ID NO: 243387 - protein, 15 aa, Artificial Sequence
  Description of Artificial Sequence: Synthetic peptide
  Seed: LRMKWMMAMKYPITA
LRMKWMMIMVYPRTA

SEQ ID NO: 243388 - protein, 15 aa, Artificial Sequence
  Description of Artificial Sequence: Synthetic peptide
  Seed: LRMKWMMAMKYPITA
LRMKWMMIMVYPSTA

SEQ ID NO: 243389 - protein, 15 aa, Artificial Sequence
  Description of Artificial Sequence: Synthetic peptide
  Seed: LRMKWMMAMKYPITA
LRMKWMMIMVYPTTA

SEQ ID NO: 243390 - protein, 15 aa, Artificial Sequence
  Description of Artificial Sequence: Synthetic peptide
  Seed: LRMKWMMAMKYPITA
LRMKWMMIMVYPVTA

SEQ ID NO: 243391 - protein, 15 aa, Artificial Sequence
  Description of Artificial Sequence: Synthetic peptide
  Seed: LRMKWMMAMKYPITA
LRMKWMMIMVYPYTA

SEQ ID NO: 243392 - protein, 15 aa, Artificial Sequence
  Description of Artificial Sequence: Synthetic peptide
  Seed: LRMKWMMAMKYPITA
LRMKWMMIMYYPATA

SEQ ID NO: 243393 - protein, 15 aa, Artificial Sequence
  Description of Artificial Sequence: Synthetic peptide
  Seed: LRMKWMMAMKYPITA
LRMKWMMKMAYPATA

SEQ ID NO: 243394 - protein, 15 aa, Artificial Sequence
  Description of Artificial Sequence: Synthetic peptide
  Seed: LRMKWMMAMKYPITA
LRMKWMMKMAYPCTA

SEQ ID NO: 243395 - protein, 15 aa, Artificial Sequence
  Description of Artificial Sequence: Synthetic peptide
  Seed: LRMKWMMAMKYPITA
LRMKWMMKMAYPFTA

SEQ ID NO: 243396 - protein, 15 aa, Artificial Sequence
  Description of Artificial Sequence: Synthetic peptide
  Seed: LRMKWMMAMKYPITA
LRMKWMMKMAYPGTA

SEQ ID NO: 243397 - protein, 15 aa, Artificial Sequence
  Description of Artificial Sequence: Synthetic peptide
  Seed: LRMKWMMAMKYPITA
LRMKWMMKMAYPITA

SEQ ID NO: 243398 - protein, 15 aa, Artificial Sequence
  Description of Artificial Sequence: Synthetic peptide
  Seed: LRMKWMMAMKYPITA
LRMKWMMKMAYPLTA

SEQ ID NO: 243399 - protein, 15 aa, Artificial Sequence
  Description of Artificial Sequence: Synthetic peptide
  Seed: LRMKWMMAMKYPITA
LRMKWMMKMAYPMTA

SEQ ID NO: 243400 - protein, 15 aa, Artificial Sequence
  Description of Artificial Sequence: Synthetic peptide
  Seed: LRMKWMMAMKYPITA
LRMKWMMKMAYPNTA

SEQ ID NO: 243401 - protein, 15 aa, Artificial Sequence
  Description of Artificial Sequence: Synthetic peptide
  Seed: LRMKWMMAMKYPITA
LRMKWMMKMAYPQTA

SEQ ID NO: 243402 - protein, 15 aa, Artificial Sequence
  Description of Artificial Sequence: Synthetic peptide
  Seed: LRMKWMMAMKYPITA
LRMKWMMKMAYPRTA

SEQ ID NO: 243403 - protein, 15 aa, Artificial Sequence
  Description of Artificial Sequence: Synthetic peptide
  Seed: LRMKWMMAMKYPITA
LRMKWMMKMAYPSTA

SEQ ID NO: 243404 - protein, 15 aa, Artificial Sequence
  Description of Artificial Sequence: Synthetic peptide
  Seed: LRMKWMMAMKYPITA
LRMKWMMKMAYPTTA

SEQ ID NO: 243405 - protein, 15 aa, Artificial Sequence
  Description of Artificial Sequence: Synthetic peptide
  Seed: LRMKWMMAMKYPITA
LRMKWMMKMAYPVTA

SEQ ID NO: 243406 - protein, 15 aa, Artificial Sequence
  Description of Artificial Sequence: Synthetic peptide
  Seed: LRMKWMMAMKYPITA
LRMKWMMKMAYPWTA

SEQ ID NO: 243407 - protein, 15 aa, Artificial Sequence
  Description of Artificial Sequence: Synthetic peptide
  Seed: LRMKWMMAMKYPITA
LRMKWMMKMAYPYTA

SEQ ID NO: 243408 - protein, 15 aa, Artificial Sequence
  Description of Artificial Sequence: Synthetic peptide
  Seed: LRMKWMMAMKYPITA
LRMKWMMKMGYPATA

SEQ ID NO: 243409 - protein, 15 aa, Artificial Sequence
  Description of Artificial Sequence: Synthetic peptide
  Seed: LRMKWMMAMKYPITA
LRMKWMMKMGYPFTA

SEQ ID NO: 243410 - protein, 15 aa, Artificial Sequence
  Description of Artificial Sequence: Synthetic peptide
  Seed: LRMKWMMAMKYPITA
LRMKWMMKMGYPITA

SEQ ID NO: 243411 - protein, 15 aa, Artificial Sequence
  Description of Artificial Sequence: Synthetic peptide
  Seed: LRMKWMMAMKYPITA
LRMKWMMKMGYPLTA

SEQ ID NO: 243412 - protein, 15 aa, Artificial Sequence
  Description of Artificial Sequence: Synthetic peptide
  Seed: LRMKWMMAMKYPITA
LRMKWMMKMGYPMTA

SEQ ID NO: 243413 - protein, 15 aa, Artificial Sequence
  Description of Artificial Sequence: Synthetic peptide
  Seed: LRMKWMMAMKYPITA
LRMKWMMKMGYPSTA

SEQ ID NO: 243414 - protein, 15 aa, Artificial Sequence
  Description of Artificial Sequence: Synthetic peptide
  Seed: LRMKWMMAMKYPITA
LRMKWMMKMGYPTTA

SEQ ID NO: 243415 - protein, 15 aa, Artificial Sequence
  Description of Artificial Sequence: Synthetic peptide
  Seed: LRMKWMMAMKYPITA
LRMKWMMKMGYPVTA

SEQ ID NO: 243416 - protein, 15 aa, Artificial Sequence
  Description of Artificial Sequence: Synthetic peptide
  Seed: LRMKWMMAMKYPITA
LRMKWMMKMIYPITA

SEQ ID NO: 243417 - protein, 15 aa, Artificial Sequence
  Description of Artificial Sequence: Synthetic peptide
  Seed: LRMKWMMAMKYPITA
LRMKWMMKMIYPLTA

SEQ ID NO: 243418 - protein, 15 aa, Artificial Sequence
  Description of Artificial Sequence: Synthetic peptide
  Seed: LRMKWMMAMKYPITA
LRMKWMMKMIYPNTA

SEQ ID NO: 243419 - protein, 15 aa, Artificial Sequence
  Description of Artificial Sequence: Synthetic peptide
  Seed: LRMKWMMAMKYPITA
LRMKWMMKMIYPSTA

SEQ ID NO: 243420 - protein, 15 aa, Artificial Sequence
  Description of Artificial Sequence: Synthetic peptide
  Seed: LRMKWMMAMKYPITA
LRMKWMMKMKYPATA

SEQ ID NO: 243421 - protein, 15 aa, Artificial Sequence
  Description of Artificial Sequence: Synthetic peptide
  Seed: LRMKWMMAMKYPITA
LRMKWMMKMKYPCTA

SEQ ID NO: 243422 - protein, 15 aa, Artificial Sequence
  Description of Artificial Sequence: Synthetic peptide
  Seed: LRMKWMMAMKYPITA
LRMKWMMKMKYPFTA

SEQ ID NO: 243423 - protein, 15 aa, Artificial Sequence
  Description of Artificial Sequence: Synthetic peptide
  Seed: LRMKWMMAMKYPITA
LRMKWMMKMKYPGTA

SEQ ID NO: 243424 - protein, 15 aa, Artificial Sequence
  Description of Artificial Sequence: Synthetic peptide
  Seed: LRMKWMMAMKYPITA
LRMKWMMKMKYPHTA

SEQ ID NO: 243425 - protein, 15 aa, Artificial Sequence
  Description of Artificial Sequence: Synthetic peptide
  Seed: LRMKWMMAMKYPITA
LRMKWMMKMKYPLTA

SEQ ID NO: 243426 - protein, 15 aa, Artificial Sequence
  Description of Artificial Sequence: Synthetic peptide
  Seed: LRMKWMMAMKYPITA
LRMKWMMKMKYPMTA

SEQ ID NO: 243427 - protein, 15 aa, Artificial Sequence
  Description of Artificial Sequence: Synthetic peptide
  Seed: LRMKWMMAMKYPITA
LRMKWMMKMKYPQTA

SEQ ID NO: 243428 - protein, 15 aa, Artificial Sequence
  Description of Artificial Sequence: Synthetic peptide
  Seed: LRMKWMMAMKYPITA
LRMKWMMKMKYPRTA

SEQ ID NO: 243429 - protein, 15 aa, Artificial Sequence
  Description of Artificial Sequence: Synthetic peptide
  Seed: LRMKWMMAMKYPITA
LRMKWMMKMKYPSTA

SEQ ID NO: 243430 - protein, 15 aa, Artificial Sequence
  Description of Artificial Sequence: Synthetic peptide
  Seed: LRMKWMMAMKYPITA
LRMKWMMKMKYPTTA

SEQ ID NO: 243431 - protein, 15 aa, Artificial Sequence
  Description of Artificial Sequence: Synthetic peptide
  Seed: LRMKWMMAMKYPITA
LRMKWMMKMKYPVTA

SEQ ID NO: 243432 - protein, 15 aa, Artificial Sequence
  Description of Artificial Sequence: Synthetic peptide
  Seed: LRMKWMMAMKYPITA
LRMKWMMKMKYPYTA

SEQ ID NO: 243433 - protein, 15 aa, Artificial Sequence
  Description of Artificial Sequence: Synthetic peptide
  Seed: LRMKWMMAMKYPITA
LRMKWMMKMNYPATA

SEQ ID NO: 243434 - protein, 15 aa, Artificial Sequence
  Description of Artificial Sequence: Synthetic peptide
  Seed: LRMKWMMAMKYPITA
LRMKWMMKMNYPITA

SEQ ID NO: 243435 - protein, 15 aa, Artificial Sequence
  Description of Artificial Sequence: Synthetic peptide
  Seed: LRMKWMMAMKYPITA
LRMKWMMKMNYPLTA

SEQ ID NO: 243436 - protein, 15 aa, Artificial Sequence
  Description of Artificial Sequence: Synthetic peptide
  Seed: LRMKWMMAMKYPITA
LRMKWMMKMNYPMTA

SEQ ID NO: 243437 - protein, 15 aa, Artificial Sequence
  Description of Artificial Sequence: Synthetic peptide
  Seed: LRMKWMMAMKYPITA
LRMKWMMKMNYPRTA

SEQ ID NO: 243438 - protein, 15 aa, Artificial Sequence
  Description of Artificial Sequence: Synthetic peptide
  Seed: LRMKWMMAMKYPITA
LRMKWMMKMNYPVTA

SEQ ID NO: 243439 - protein, 15 aa, Artificial Sequence
  Description of Artificial Sequence: Synthetic peptide
  Seed: LRMKWMMAMKYPITA
LRMKWMMKMNYPYTA

SEQ ID NO: 243440 - protein, 15 aa, Artificial Sequence
  Description of Artificial Sequence: Synthetic peptide
  Seed: LRMKWMMAMKYPITA
LRMKWMMKMPYPATA

SEQ ID NO: 243441 - protein, 15 aa, Artificial Sequence
  Description of Artificial Sequence: Synthetic peptide
  Seed: LRMKWMMAMKYPITA
LRMKWMMKMPYPITA

SEQ ID NO: 243442 - protein, 15 aa, Artificial Sequence
  Description of Artificial Sequence: Synthetic peptide
  Seed: LRMKWMMAMKYPITA
LRMKWMMKMPYPLTA

SEQ ID NO: 243443 - protein, 15 aa, Artificial Sequence
  Description of Artificial Sequence: Synthetic peptide
  Seed: LRMKWMMAMKYPITA
LRMKWMMKMPYPMTA

SEQ ID NO: 243444 - protein, 15 aa, Artificial Sequence
  Description of Artificial Sequence: Synthetic peptide
  Seed: LRMKWMMAMKYPITA
LRMKWMMKMPYPVTA

SEQ ID NO: 243445 - protein, 15 aa, Artificial Sequence
  Description of Artificial Sequence: Synthetic peptide
  Seed: LRMKWMMAMKYPITA
LRMKWMMKMQYPRTA

SEQ ID NO: 243446 - protein, 15 aa, Artificial Sequence
  Description of Artificial Sequence: Synthetic peptide
  Seed: LRMKWMMAMKYPITA
LRMKWMMKMRYPATA

SEQ ID NO: 243447 - protein, 15 aa, Artificial Sequence
  Description of Artificial Sequence: Synthetic peptide
  Seed: LRMKWMMAMKYPITA
LRMKWMMKMRYPCTA

SEQ ID NO: 243448 - protein, 15 aa, Artificial Sequence
  Description of Artificial Sequence: Synthetic peptide
  Seed: LRMKWMMAMKYPITA
LRMKWMMKMRYPFTA

SEQ ID NO: 243449 - protein, 15 aa, Artificial Sequence
  Description of Artificial Sequence: Synthetic peptide
  Seed: LRMKWMMAMKYPITA
LRMKWMMKMRYPGTA

SEQ ID NO: 243450 - protein, 15 aa, Artificial Sequence
  Description of Artificial Sequence: Synthetic peptide
  Seed: LRMKWMMAMKYPITA
LRMKWMMKMRYPHTA

SEQ ID NO: 243451 - protein, 15 aa, Artificial Sequence
  Description of Artificial Sequence: Synthetic peptide
  Seed: LRMKWMMAMKYPITA
LRMKWMMKMRYPITA

SEQ ID NO: 243452 - protein, 15 aa, Artificial Sequence
  Description of Artificial Sequence: Synthetic peptide
  Seed: LRMKWMMAMKYPITA
LRMKWMMKMRYPKTA

SEQ ID NO: 243453 - protein, 15 aa, Artificial Sequence
  Description of Artificial Sequence: Synthetic peptide
  Seed: LRMKWMMAMKYPITA
LRMKWMMKMRYPLTA

SEQ ID NO: 243454 - protein, 15 aa, Artificial Sequence
  Description of Artificial Sequence: Synthetic peptide
  Seed: LRMKWMMAMKYPITA
LRMKWMMKMRYPMTA

SEQ ID NO: 243455 - protein, 15 aa, Artificial Sequence
  Description of Artificial Sequence: Synthetic peptide
  Seed: LRMKWMMAMKYPITA
LRMKWMMKMRYPNTA

SEQ ID NO: 243456 - protein, 15 aa, Artificial Sequence
  Description of Artificial Sequence: Synthetic peptide
  Seed: LRMKWMMAMKYPITA
LRMKWMMKMRYPQTA

SEQ ID NO: 243457 - protein, 15 aa, Artificial Sequence
  Description of Artificial Sequence: Synthetic peptide
  Seed: LRMKWMMAMKYPITA
LRMKWMMKMRYPRTA

SEQ ID NO: 243458 - protein, 15 aa, Artificial Sequence
  Description of Artificial Sequence: Synthetic peptide
  Seed: LRMKWMMAMKYPITA
LRMKWMMKMRYPSTA

SEQ ID NO: 243459 - protein, 15 aa, Artificial Sequence
  Description of Artificial Sequence: Synthetic peptide
  Seed: LRMKWMMAMKYPITA
LRMKWMMKMRYPTTA

SEQ ID NO: 243460 - protein, 15 aa, Artificial Sequence
  Description of Artificial Sequence: Synthetic peptide
  Seed: LRMKWMMAMKYPITA
LRMKWMMKMRYPVTA

SEQ ID NO: 243461 - protein, 15 aa, Artificial Sequence
  Description of Artificial Sequence: Synthetic peptide
  Seed: LRMKWMMAMKYPITA
LRMKWMMKMRYPWTA

SEQ ID NO: 243462 - protein, 15 aa, Artificial Sequence
  Description of Artificial Sequence: Synthetic peptide
  Seed: LRMKWMMAMKYPITA
LRMKWMMKMRYPYTA

SEQ ID NO: 243463 - protein, 15 aa, Artificial Sequence
  Description of Artificial Sequence: Synthetic peptide
  Seed: LRMKWMMAMKYPITA
LRMKWMMKMSYPATA

SEQ ID NO: 243464 - protein, 15 aa, Artificial Sequence
  Description of Artificial Sequence: Synthetic peptide
  Seed: LRMKWMMAMKYPITA
LRMKWMMKMSYPFTA

SEQ ID NO: 243465 - protein, 15 aa, Artificial Sequence
  Description of Artificial Sequence: Synthetic peptide
  Seed: LRMKWMMAMKYPITA
LRMKWMMKMSYPITA

SEQ ID NO: 243466 - protein, 15 aa, Artificial Sequence
  Description of Artificial Sequence: Synthetic peptide
  Seed: LRMKWMMAMKYPITA
LRMKWMMKMSYPLTA

SEQ ID NO: 243467 - protein, 15 aa, Artificial Sequence
  Description of Artificial Sequence: Synthetic peptide
  Seed: LRMKWMMAMKYPITA
LRMKWMMKMSYPMTA

SEQ ID NO: 243468 - protein, 15 aa, Artificial Sequence
  Description of Artificial Sequence: Synthetic peptide
  Seed: LRMKWMMAMKYPITA
LRMKWMMKMSYPRTA

SEQ ID NO: 243469 - protein, 15 aa, Artificial Sequence
  Description of Artificial Sequence: Synthetic peptide
  Seed: LRMKWMMAMKYPITA
LRMKWMMKMSYPSTA

SEQ ID NO: 243470 - protein, 15 aa, Artificial Sequence
  Description of Artificial Sequence: Synthetic peptide
  Seed: LRMKWMMAMKYPITA
LRMKWMMKMSYPTTA

SEQ ID NO: 243471 - protein, 15 aa, Artificial Sequence
  Description of Artificial Sequence: Synthetic peptide
  Seed: LRMKWMMAMKYPITA
LRMKWMMKMSYPVTA

SEQ ID NO: 243472 - protein, 15 aa, Artificial Sequence
  Description of Artificial Sequence: Synthetic peptide
  Seed: LRMKWMMAMKYPITA
LRMKWMMKMSYPYTA

SEQ ID NO: 243473 - protein, 15 aa, Artificial Sequence
  Description of Artificial Sequence: Synthetic peptide
  Seed: LRMKWMMAMKYPITA
LRMKWMMKMTYPATA

SEQ ID NO: 243474 - protein, 15 aa, Artificial Sequence
  Description of Artificial Sequence: Synthetic peptide
  Seed: LRMKWMMAMKYPITA
LRMKWMMKMTYPGTA

SEQ ID NO: 243475 - protein, 15 aa, Artificial Sequence
  Description of Artificial Sequence: Synthetic peptide
  Seed: LRMKWMMAMKYPITA
LRMKWMMKMTYPITA

SEQ ID NO: 243476 - protein, 15 aa, Artificial Sequence
  Description of Artificial Sequence: Synthetic peptide
  Seed: LRMKWMMAMKYPITA
LRMKWMMKMTYPLTA

SEQ ID NO: 243477 - protein, 15 aa, Artificial Sequence
  Description of Artificial Sequence: Synthetic peptide
  Seed: LRMKWMMAMKYPITA
LRMKWMMKMTYPMTA

SEQ ID NO: 243478 - protein, 15 aa, Artificial Sequence
  Description of Artificial Sequence: Synthetic peptide
  Seed: LRMKWMMAMKYPITA
LRMKWMMKMTYPQTA

SEQ ID NO: 243479 - protein, 15 aa, Artificial Sequence
  Description of Artificial Sequence: Synthetic peptide
  Seed: LRMKWMMAMKYPITA
LRMKWMMKMTYPRTA

SEQ ID NO: 243480 - protein, 15 aa, Artificial Sequence
  Description of Artificial Sequence: Synthetic peptide
  Seed: LRMKWMMAMKYPITA
LRMKWMMKMTYPVTA

SEQ ID NO: 243481 - protein, 15 aa, Artificial Sequence
  Description of Artificial Sequence: Synthetic peptide
  Seed: LRMKWMMAMKYPITA
LRMKWMMKMTYPYTA

SEQ ID NO: 243482 - protein, 15 aa, Artificial Sequence
  Description of Artificial Sequence: Synthetic peptide
  Seed: LRMKWMMAMKYPITA
LRMKWMMKMVYPATA

SEQ ID NO: 243483 - protein, 15 aa, Artificial Sequence
  Description of Artificial Sequence: Synthetic peptide
  Seed: LRMKWMMAMKYPITA
LRMKWMMKMVYPITA

SEQ ID NO: 243484 - protein, 15 aa, Artificial Sequence
  Description of Artificial Sequence: Synthetic peptide
  Seed: LRMKWMMAMKYPITA
LRMKWMMKMVYPLTA

SEQ ID NO: 243485 - protein, 15 aa, Artificial Sequence
  Description of Artificial Sequence: Synthetic peptide
  Seed: LRMKWMMAMKYPITA
LRMKWMMKMVYPMTA

SEQ ID NO: 243486 - protein, 15 aa, Artificial Sequence
  Description of Artificial Sequence: Synthetic peptide
  Seed: LRMKWMMAMKYPITA
LRMKWMMKMVYPNTA

SEQ ID NO: 243487 - protein, 15 aa, Artificial Sequence
  Description of Artificial Sequence: Synthetic peptide
  Seed: LRMKWMMAMKYPITA
LRMKWMMKMVYPRTA

SEQ ID NO: 243488 - protein, 15 aa, Artificial Sequence
  Description of Artificial Sequence: Synthetic peptide
  Seed: LRMKWMMAMKYPITA
LRMKWMMKMVYPSTA

SEQ ID NO: 243489 - protein, 15 aa, Artificial Sequence
  Description of Artificial Sequence: Synthetic peptide
  Seed: LRMKWMMAMKYPITA
LRMKWMMKMVYPVTA

SEQ ID NO: 243490 - protein, 15 aa, Artificial Sequence
  Description of Artificial Sequence: Synthetic peptide
  Seed: LRMKWMMAMKYPITA
LRMKWMMKMVYPYTA

SEQ ID NO: 243491 - protein, 15 aa, Artificial Sequence
  Description of Artificial Sequence: Synthetic peptide
  Seed: LRMKWMMAMKYPITA
LRMKWMMLMAYPATA

SEQ ID NO: 243492 - protein, 15 aa, Artificial Sequence
  Description of Artificial Sequence: Synthetic peptide
  Seed: LRMKWMMAMKYPITA
LRMKWMMLMAYPCTA

SEQ ID NO: 243493 - protein, 15 aa, Artificial Sequence
  Description of Artificial Sequence: Synthetic peptide
  Seed: LRMKWMMAMKYPITA
LRMKWMMLMAYPDTA

SEQ ID NO: 243494 - protein, 15 aa, Artificial Sequence
  Description of Artificial Sequence: Synthetic peptide
  Seed: LRMKWMMAMKYPITA
LRMKWMMLMAYPETA

SEQ ID NO: 243495 - protein, 15 aa, Artificial Sequence
  Description of Artificial Sequence: Synthetic peptide
  Seed: LRMKWMMAMKYPITA
LRMKWMMLMAYPFTA

SEQ ID NO: 243496 - protein, 15 aa, Artificial Sequence
  Description of Artificial Sequence: Synthetic peptide
  Seed: LRMKWMMAMKYPITA
LRMKWMMLMAYPGTA

SEQ ID NO: 243497 - protein, 15 aa, Artificial Sequence
  Description of Artificial Sequence: Synthetic peptide
  Seed: LRMKWMMAMKYPITA
LRMKWMMLMAYPHTA

SEQ ID NO: 243498 - protein, 15 aa, Artificial Sequence
  Description of Artificial Sequence: Synthetic peptide
  Seed: LRMKWMMAMKYPITA
LRMKWMMLMAYPITA

SEQ ID NO: 243499 - protein, 15 aa, Artificial Sequence
  Description of Artificial Sequence: Synthetic peptide
  Seed: LRMKWMMAMKYPITA
LRMKWMMLMAYPKTA

SEQ ID NO: 243500 - protein, 15 aa, Artificial Sequence
  Description of Artificial Sequence: Synthetic peptide
  Seed: LRMKWMMAMKYPITA
LRMKWMMLMAYPLTA

SEQ ID NO: 243501 - protein, 15 aa, Artificial Sequence
  Description of Artificial Sequence: Synthetic peptide
  Seed: LRMKWMMAMKYPITA
LRMKWMMLMAYPMTA

SEQ ID NO: 243502 - protein, 15 aa, Artificial Sequence
  Description of Artificial Sequence: Synthetic peptide
  Seed: LRMKWMMAMKYPITA
LRMKWMMLMAYPNTA

SEQ ID NO: 243503 - protein, 15 aa, Artificial Sequence
  Description of Artificial Sequence: Synthetic peptide
  Seed: LRMKWMMAMKYPITA
LRMKWMMLMAYPPTA

SEQ ID NO: 243504 - protein, 15 aa, Artificial Sequence
  Description of Artificial Sequence: Synthetic peptide
  Seed: LRMKWMMAMKYPITA
LRMKWMMLMAYPQTA

SEQ ID NO: 243505 - protein, 15 aa, Artificial Sequence
  Description of Artificial Sequence: Synthetic peptide
  Seed: LRMKWMMAMKYPITA
LRMKWMMLMAYPRTA

SEQ ID NO: 243506 - protein, 15 aa, Artificial Sequence
  Description of Artificial Sequence: Synthetic peptide
  Seed: LRMKWMMAMKYPITA
LRMKWMMLMAYPSTA

SEQ ID NO: 243507 - protein, 15 aa, Artificial Sequence
  Description of Artificial Sequence: Synthetic peptide
  Seed: LRMKWMMAMKYPITA
LRMKWMMLMAYPTTA

SEQ ID NO: 243508 - protein, 15 aa, Artificial Sequence
  Description of Artificial Sequence: Synthetic peptide
  Seed: LRMKWMMAMKYPITA
LRMKWMMLMAYPVTA

SEQ ID NO: 243509 - protein, 15 aa, Artificial Sequence
  Description of Artificial Sequence: Synthetic peptide
  Seed: LRMKWMMAMKYPITA
LRMKWMMLMAYPWTA

SEQ ID NO: 243510 - protein, 15 aa, Artificial Sequence
  Description of Artificial Sequence: Synthetic peptide
  Seed: LRMKWMMAMKYPITA
LRMKWMMLMAYPYTA

SEQ ID NO: 243511 - protein, 15 aa, Artificial Sequence
  Description of Artificial Sequence: Synthetic peptide
  Seed: LRMKWMMAMKYPITA
LRMKWMMLMCYPATA

SEQ ID NO: 243512 - protein, 15 aa, Artificial Sequence
  Description of Artificial Sequence: Synthetic peptide
  Seed: LRMKWMMAMKYPITA
LRMKWMMLMCYPITA

SEQ ID NO: 243513 - protein, 15 aa, Artificial Sequence
  Description of Artificial Sequence: Synthetic peptide
  Seed: LRMKWMMAMKYPITA
LRMKWMMLMCYPLTA

SEQ ID NO: 243514 - protein, 15 aa, Artificial Sequence
  Description of Artificial Sequence: Synthetic peptide
  Seed: LRMKWMMAMKYPITA
LRMKWMMLMCYPMTA

SEQ ID NO: 243515 - protein, 15 aa, Artificial Sequence
  Description of Artificial Sequence: Synthetic peptide
  Seed: LRMKWMMAMKYPITA
LRMKWMMLMCYPNTA

SEQ ID NO: 243516 - protein, 15 aa, Artificial Sequence
  Description of Artificial Sequence: Synthetic peptide
  Seed: LRMKWMMAMKYPITA
LRMKWMMLMCYPSTA

SEQ ID NO: 243517 - protein, 15 aa, Artificial Sequence
  Description of Artificial Sequence: Synthetic peptide
  Seed: LRMKWMMAMKYPITA
LRMKWMMLMCYPTTA

SEQ ID NO: 243518 - protein, 15 aa, Artificial Sequence
  Description of Artificial Sequence: Synthetic peptide
  Seed: LRMKWMMAMKYPITA
LRMKWMMLMCYPVTA

SEQ ID NO: 243519 - protein, 15 aa, Artificial Sequence
  Description of Artificial Sequence: Synthetic peptide
  Seed: LRMKWMMAMKYPITA
LRMKWMMLMDYPATA

SEQ ID NO: 243520 - protein, 15 aa, Artificial Sequence
  Description of Artificial Sequence: Synthetic peptide
  Seed: LRMKWMMAMKYPITA
LRMKWMMLMDYPITA

SEQ ID NO: 243521 - protein, 15 aa, Artificial Sequence
  Description of Artificial Sequence: Synthetic peptide
  Seed: LRMKWMMAMKYPITA
LRMKWMMLMDYPLTA

SEQ ID NO: 243522 - protein, 15 aa, Artificial Sequence
  Description of Artificial Sequence: Synthetic peptide
  Seed: LRMKWMMAMKYPITA
LRMKWMMLMDYPMTA

SEQ ID NO: 243523 - protein, 15 aa, Artificial Sequence
  Description of Artificial Sequence: Synthetic peptide
  Seed: LRMKWMMAMKYPITA
LRMKWMMLMDYPNTA

SEQ ID NO: 243524 - protein, 15 aa, Artificial Sequence
  Description of Artificial Sequence: Synthetic peptide
  Seed: LRMKWMMAMKYPITA
LRMKWMMLMDYPSTA

SEQ ID NO: 243525 - protein, 15 aa, Artificial Sequence
  Description of Artificial Sequence: Synthetic peptide
  Seed: LRMKWMMAMKYPITA
LRMKWMMLMDYPTTA

SEQ ID NO: 243526 - protein, 15 aa, Artificial Sequence
  Description of Artificial Sequence: Synthetic peptide
  Seed: LRMKWMMAMKYPITA
LRMKWMMLMDYPVTA

SEQ ID NO: 243527 - protein, 15 aa, Artificial Sequence
  Description of Artificial Sequence: Synthetic peptide
  Seed: LRMKWMMAMKYPITA
LRMKWMMLMEYPATA

SEQ ID NO: 243528 - protein, 15 aa, Artificial Sequence
  Description of Artificial Sequence: Synthetic peptide
  Seed: LRMKWMMAMKYPITA
LRMKWMMLMEYPITA

SEQ ID NO: 243529 - protein, 15 aa, Artificial Sequence
  Description of Artificial Sequence: Synthetic peptide
  Seed: LRMKWMMAMKYPITA
LRMKWMMLMEYPLTA

SEQ ID NO: 243530 - protein, 15 aa, Artificial Sequence
  Description of Artificial Sequence: Synthetic peptide
  Seed: LRMKWMMAMKYPITA
LRMKWMMLMEYPMTA

SEQ ID NO: 243531 - protein, 15 aa, Artificial Sequence
  Description of Artificial Sequence: Synthetic peptide
  Seed: LRMKWMMAMKYPITA
LRMKWMMLMEYPNTA

SEQ ID NO: 243532 - protein, 15 aa, Artificial Sequence
  Description of Artificial Sequence: Synthetic peptide
  Seed: LRMKWMMAMKYPITA
LRMKWMMLMEYPSTA

SEQ ID NO: 243533 - protein, 15 aa, Artificial Sequence
  Description of Artificial Sequence: Synthetic peptide
  Seed: LRMKWMMAMKYPITA
LRMKWMMLMEYPTTA

SEQ ID NO: 243534 - protein, 15 aa, Artificial Sequence
  Description of Artificial Sequence: Synthetic peptide
  Seed: LRMKWMMAMKYPITA
LRMKWMMLMEYPVTA

SEQ ID NO: 243535 - protein, 15 aa, Artificial Sequence
  Description of Artificial Sequence: Synthetic peptide
  Seed: LRMKWMMAMKYPITA
LRMKWMMLMGYPATA

SEQ ID NO: 243536 - protein, 15 aa, Artificial Sequence
  Description of Artificial Sequence: Synthetic peptide
  Seed: LRMKWMMAMKYPITA
LRMKWMMLMGYPCTA

SEQ ID NO: 243537 - protein, 15 aa, Artificial Sequence
  Description of Artificial Sequence: Synthetic peptide
  Seed: LRMKWMMAMKYPITA
LRMKWMMLMGYPDTA

SEQ ID NO: 243538 - protein, 15 aa, Artificial Sequence
  Description of Artificial Sequence: Synthetic peptide
  Seed: LRMKWMMAMKYPITA
LRMKWMMLMGYPETA

SEQ ID NO: 243539 - protein, 15 aa, Artificial Sequence
  Description of Artificial Sequence: Synthetic peptide
  Seed: LRMKWMMAMKYPITA
LRMKWMMLMGYPFTA

SEQ ID NO: 243540 - protein, 15 aa, Artificial Sequence
  Description of Artificial Sequence: Synthetic peptide
  Seed: LRMKWMMAMKYPITA
LRMKWMMLMGYPGTA

SEQ ID NO: 243541 - protein, 15 aa, Artificial Sequence
  Description of Artificial Sequence: Synthetic peptide
  Seed: LRMKWMMAMKYPITA
LRMKWMMLMGYPHTA

SEQ ID NO: 243542 - protein, 15 aa, Artificial Sequence
  Description of Artificial Sequence: Synthetic peptide
  Seed: LRMKWMMAMKYPITA
LRMKWMMLMGYPITA

SEQ ID NO: 243543 - protein, 15 aa, Artificial Sequence
  Description of Artificial Sequence: Synthetic peptide
  Seed: LRMKWMMAMKYPITA
LRMKWMMLMGYPKTA

SEQ ID NO: 243544 - protein, 15 aa, Artificial Sequence
  Description of Artificial Sequence: Synthetic peptide
  Seed: LRMKWMMAMKYPITA
LRMKWMMLMGYPLTA

SEQ ID NO: 243545 - protein, 15 aa, Artificial Sequence
  Description of Artificial Sequence: Synthetic peptide
  Seed: LRMKWMMAMKYPITA
LRMKWMMLMGYPMTA

SEQ ID NO: 243546 - protein, 15 aa, Artificial Sequence
  Description of Artificial Sequence: Synthetic peptide
  Seed: LRMKWMMAMKYPITA
LRMKWMMLMGYPNTA

SEQ ID NO: 243547 - protein, 15 aa, Artificial Sequence
  Description of Artificial Sequence: Synthetic peptide
  Seed: LRMKWMMAMKYPITA
LRMKWMMLMGYPPTA

SEQ ID NO: 243548 - protein, 15 aa, Artificial Sequence
  Description of Artificial Sequence: Synthetic peptide
  Seed: LRMKWMMAMKYPITA
LRMKWMMLMGYPQTA

SEQ ID NO: 243549 - protein, 15 aa, Artificial Sequence
  Description of Artificial Sequence: Synthetic peptide
  Seed: LRMKWMMAMKYPITA
LRMKWMMLMGYPRTA

SEQ ID NO: 243550 - protein, 15 aa, Artificial Sequence
  Description of Artificial Sequence: Synthetic peptide
  Seed: LRMKWMMAMKYPITA
LRMKWMMLMGYPSTA

SEQ ID NO: 243551 - protein, 15 aa, Artificial Sequence
  Description of Artificial Sequence: Synthetic peptide
  Seed: LRMKWMMAMKYPITA
LRMKWMMLMGYPTTA

SEQ ID NO: 243552 - protein, 15 aa, Artificial Sequence
  Description of Artificial Sequence: Synthetic peptide
  Seed: LRMKWMMAMKYPITA
LRMKWMMLMGYPVTA

SEQ ID NO: 243553 - protein, 15 aa, Artificial Sequence
  Description of Artificial Sequence: Synthetic peptide
  Seed: LRMKWMMAMKYPITA
LRMKWMMLMGYPWTA

SEQ ID NO: 243554 - protein, 15 aa, Artificial Sequence
  Description of Artificial Sequence: Synthetic peptide
  Seed: LRMKWMMAMKYPITA
LRMKWMMLMGYPYTA

SEQ ID NO: 243555 - protein, 15 aa, Artificial Sequence
  Description of Artificial Sequence: Synthetic peptide
  Seed: LRMKWMMAMKYPITA
LRMKWMMLMHYPATA

SEQ ID NO: 243556 - protein, 15 aa, Artificial Sequence
  Description of Artificial Sequence: Synthetic peptide
  Seed: LRMKWMMAMKYPITA
LRMKWMMLMHYPCTA

SEQ ID NO: 243557 - protein, 15 aa, Artificial Sequence
  Description of Artificial Sequence: Synthetic peptide
  Seed: LRMKWMMAMKYPITA
LRMKWMMLMHYPITA

SEQ ID NO: 243558 - protein, 15 aa, Artificial Sequence
  Description of Artificial Sequence: Synthetic peptide
  Seed: LRMKWMMAMKYPITA
LRMKWMMLMHYPLTA

SEQ ID NO: 243559 - protein, 15 aa, Artificial Sequence
  Description of Artificial Sequence: Synthetic peptide
  Seed: LRMKWMMAMKYPITA
LRMKWMMLMHYPMTA

SEQ ID NO: 243560 - protein, 15 aa, Artificial Sequence
  Description of Artificial Sequence: Synthetic peptide
  Seed: LRMKWMMAMKYPITA
LRMKWMMLMHYPNTA

SEQ ID NO: 243561 - protein, 15 aa, Artificial Sequence
  Description of Artificial Sequence: Synthetic peptide
  Seed: LRMKWMMAMKYPITA
LRMKWMMLMHYPQTA

SEQ ID NO: 243562 - protein, 15 aa, Artificial Sequence
  Description of Artificial Sequence: Synthetic peptide
  Seed: LRMKWMMAMKYPITA
LRMKWMMLMHYPSTA

SEQ ID NO: 243563 - protein, 15 aa, Artificial Sequence
  Description of Artificial Sequence: Synthetic peptide
  Seed: LRMKWMMAMKYPITA
LRMKWMMLMHYPTTA

SEQ ID NO: 243564 - protein, 15 aa, Artificial Sequence
  Description of Artificial Sequence: Synthetic peptide
  Seed: LRMKWMMAMKYPITA
LRMKWMMLMHYPVTA

SEQ ID NO: 243565 - protein, 15 aa, Artificial Sequence
  Description of Artificial Sequence: Synthetic peptide
  Seed: LRMKWMMAMKYPITA
LRMKWMMLMIYPATA

SEQ ID NO: 243566 - protein, 15 aa, Artificial Sequence
  Description of Artificial Sequence: Synthetic peptide
  Seed: LRMKWMMAMKYPITA
LRMKWMMLMIYPDTA

SEQ ID NO: 243567 - protein, 15 aa, Artificial Sequence
  Description of Artificial Sequence: Synthetic peptide
  Seed: LRMKWMMAMKYPITA
LRMKWMMLMIYPETA

SEQ ID NO: 243568 - protein, 15 aa, Artificial Sequence
  Description of Artificial Sequence: Synthetic peptide
  Seed: LRMKWMMAMKYPITA
LRMKWMMLMIYPGTA

SEQ ID NO: 243569 - protein, 15 aa, Artificial Sequence
  Description of Artificial Sequence: Synthetic peptide
  Seed: LRMKWMMAMKYPITA
LRMKWMMLMIYPHTA

SEQ ID NO: 243570 - protein, 15 aa, Artificial Sequence
  Description of Artificial Sequence: Synthetic peptide
  Seed: LRMKWMMAMKYPITA
LRMKWMMLMIYPITA

SEQ ID NO: 243571 - protein, 15 aa, Artificial Sequence
  Description of Artificial Sequence: Synthetic peptide
  Seed: LRMKWMMAMKYPITA
LRMKWMMLMIYPKTA

SEQ ID NO: 243572 - protein, 15 aa, Artificial Sequence
  Description of Artificial Sequence: Synthetic peptide
  Seed: LRMKWMMAMKYPITA
LRMKWMMLMIYPLTA

SEQ ID NO: 243573 - protein, 15 aa, Artificial Sequence
  Description of Artificial Sequence: Synthetic peptide
  Seed: LRMKWMMAMKYPITA
LRMKWMMLMIYPMTA

SEQ ID NO: 243574 - protein, 15 aa, Artificial Sequence
  Description of Artificial Sequence: Synthetic peptide
  Seed: LRMKWMMAMKYPITA
LRMKWMMLMIYPNTA

SEQ ID NO: 243575 - protein, 15 aa, Artificial Sequence
  Description of Artificial Sequence: Synthetic peptide
  Seed: LRMKWMMAMKYPITA
LRMKWMMLMIYPPTA

SEQ ID NO: 243576 - protein, 15 aa, Artificial Sequence
  Description of Artificial Sequence: Synthetic peptide
  Seed: LRMKWMMAMKYPITA
LRMKWMMLMIYPQTA

SEQ ID NO: 243577 - protein, 15 aa, Artificial Sequence
  Description of Artificial Sequence: Synthetic peptide
  Seed: LRMKWMMAMKYPITA
LRMKWMMLMIYPRTA

SEQ ID NO: 243578 - protein, 15 aa, Artificial Sequence
  Description of Artificial Sequence: Synthetic peptide
  Seed: LRMKWMMAMKYPITA
LRMKWMMLMIYPSTA

SEQ ID NO: 243579 - protein, 15 aa, Artificial Sequence
  Description of Artificial Sequence: Synthetic peptide
  Seed: LRMKWMMAMKYPITA
LRMKWMMLMIYPTTA

SEQ ID NO: 243580 - protein, 15 aa, Artificial Sequence
  Description of Artificial Sequence: Synthetic peptide
  Seed: LRMKWMMAMKYPITA
LRMKWMMLMIYPVTA

SEQ ID NO: 243581 - protein, 15 aa, Artificial Sequence
  Description of Artificial Sequence: Synthetic peptide
  Seed: LRMKWMMAMKYPITA
LRMKWMMLMIYPYTA

SEQ ID NO: 243582 - protein, 15 aa, Artificial Sequence
  Description of Artificial Sequence: Synthetic peptide
  Seed: LRMKWMMAMKYPITA
LRMKWMMLMKYPATA

SEQ ID NO: 243583 - protein, 15 aa, Artificial Sequence
  Description of Artificial Sequence: Synthetic peptide
  Seed: LRMKWMMAMKYPITA
LRMKWMMLMKYPGTA

SEQ ID NO: 243584 - protein, 15 aa, Artificial Sequence
  Description of Artificial Sequence: Synthetic peptide
  Seed: LRMKWMMAMKYPITA
LRMKWMMLMKYPHTA

SEQ ID NO: 243585 - protein, 15 aa, Artificial Sequence
  Description of Artificial Sequence: Synthetic peptide
  Seed: LRMKWMMAMKYPITA
LRMKWMMLMKYPKTA

SEQ ID NO: 243586 - protein, 15 aa, Artificial Sequence
  Description of Artificial Sequence: Synthetic peptide
  Seed: LRMKWMMAMKYPITA
LRMKWMMLMKYPLTA

SEQ ID NO: 243587 - protein, 15 aa, Artificial Sequence
  Description of Artificial Sequence: Synthetic peptide
  Seed: LRMKWMMAMKYPITA
LRMKWMMLMKYPMTA

SEQ ID NO: 243588 - protein, 15 aa, Artificial Sequence
  Description of Artificial Sequence: Synthetic peptide
  Seed: LRMKWMMAMKYPITA
LRMKWMMLMKYPNTA

SEQ ID NO: 243589 - protein, 15 aa, Artificial Sequence
  Description of Artificial Sequence: Synthetic peptide
  Seed: LRMKWMMAMKYPITA
LRMKWMMLMKYPPTA

SEQ ID NO: 243590 - protein, 15 aa, Artificial Sequence
  Description of Artificial Sequence: Synthetic peptide
  Seed: LRMKWMMAMKYPITA
LRMKWMMLMKYPQTA

SEQ ID NO: 243591 - protein, 15 aa, Artificial Sequence
  Description of Artificial Sequence: Synthetic peptide
  Seed: LRMKWMMAMKYPITA
LRMKWMMLMKYPRTA

SEQ ID NO: 243592 - protein, 15 aa, Artificial Sequence
  Description of Artificial Sequence: Synthetic peptide
  Seed: LRMKWMMAMKYPITA
LRMKWMMLMKYPSTA

SEQ ID NO: 243593 - protein, 15 aa, Artificial Sequence
  Description of Artificial Sequence: Synthetic peptide
  Seed: LRMKWMMAMKYPITA
LRMKWMMLMKYPTTA

SEQ ID NO: 243594 - protein, 15 aa, Artificial Sequence
  Description of Artificial Sequence: Synthetic peptide
  Seed: LRMKWMMAMKYPITA
LRMKWMMLMKYPVTA

SEQ ID NO: 243595 - protein, 15 aa, Artificial Sequence
  Description of Artificial Sequence: Synthetic peptide
  Seed: LRMKWMMAMKYPITA
LRMKWMMLMKYPYTA

SEQ ID NO: 243596 - protein, 15 aa, Artificial Sequence
  Description of Artificial Sequence: Synthetic peptide
  Seed: LRMKWMMAMKYPITA
LRMKWMMLMLYPATA

SEQ ID NO: 243597 - protein, 15 aa, Artificial Sequence
  Description of Artificial Sequence: Synthetic peptide
  Seed: LRMKWMMAMKYPITA
LRMKWMMLMLYPDTA

SEQ ID NO: 243598 - protein, 15 aa, Artificial Sequence
  Description of Artificial Sequence: Synthetic peptide
  Seed: LRMKWMMAMKYPITA
LRMKWMMLMLYPGTA

SEQ ID NO: 243599 - protein, 15 aa, Artificial Sequence
  Description of Artificial Sequence: Synthetic peptide
  Seed: LRMKWMMAMKYPITA
LRMKWMMLMLYPITA

SEQ ID NO: 243600 - protein, 15 aa, Artificial Sequence
  Description of Artificial Sequence: Synthetic peptide
  Seed: LRMKWMMAMKYPITA
LRMKWMMLMLYPLTA

SEQ ID NO: 243601 - protein, 15 aa, Artificial Sequence
  Description of Artificial Sequence: Synthetic peptide
  Seed: LRMKWMMAMKYPITA
LRMKWMMLMLYPMTA

SEQ ID NO: 243602 - protein, 15 aa, Artificial Sequence
  Description of Artificial Sequence: Synthetic peptide
  Seed: LRMKWMMAMKYPITA
LRMKWMMLMLYPNTA

SEQ ID NO: 243603 - protein, 15 aa, Artificial Sequence
  Description of Artificial Sequence: Synthetic peptide
  Seed: LRMKWMMAMKYPITA
LRMKWMMLMLYPSTA

SEQ ID NO: 243604 - protein, 15 aa, Artificial Sequence
  Description of Artificial Sequence: Synthetic peptide
  Seed: LRMKWMMAMKYPITA
LRMKWMMLMLYPTTA

SEQ ID NO: 243605 - protein, 15 aa, Artificial Sequence
  Description of Artificial Sequence: Synthetic peptide
  Seed: LRMKWMMAMKYPITA
LRMKWMMLMLYPVTA

SEQ ID NO: 243606 - protein, 15 aa, Artificial Sequence
  Description of Artificial Sequence: Synthetic peptide
  Seed: LRMKWMMAMKYPITA
LRMKWMMLMMYPATA

SEQ ID NO: 243607 - protein, 15 aa, Artificial Sequence
  Description of Artificial Sequence: Synthetic peptide
  Seed: LRMKWMMAMKYPITA
LRMKWMMLMMYPCTA

SEQ ID NO: 243608 - protein, 15 aa, Artificial Sequence
  Description of Artificial Sequence: Synthetic peptide
  Seed: LRMKWMMAMKYPITA
LRMKWMMLMMYPDTA

SEQ ID NO: 243609 - protein, 15 aa, Artificial Sequence
  Description of Artificial Sequence: Synthetic peptide
  Seed: LRMKWMMAMKYPITA
LRMKWMMLMMYPGTA

SEQ ID NO: 243610 - protein, 15 aa, Artificial Sequence
  Description of Artificial Sequence: Synthetic peptide
  Seed: LRMKWMMAMKYPITA
LRMKWMMLMMYPITA

SEQ ID NO: 243611 - protein, 15 aa, Artificial Sequence
  Description of Artificial Sequence: Synthetic peptide
  Seed: LRMKWMMAMKYPITA
LRMKWMMLMMYPLTA

SEQ ID NO: 243612 - protein, 15 aa, Artificial Sequence
  Description of Artificial Sequence: Synthetic peptide
  Seed: LRMKWMMAMKYPITA
LRMKWMMLMMYPMTA

SEQ ID NO: 243613 - protein, 15 aa, Artificial Sequence
  Description of Artificial Sequence: Synthetic peptide
  Seed: LRMKWMMAMKYPITA
LRMKWMMLMMYPNTA

SEQ ID NO: 243614 - protein, 15 aa, Artificial Sequence
  Description of Artificial Sequence: Synthetic peptide
  Seed: LRMKWMMAMKYPITA
LRMKWMMLMMYPSTA

SEQ ID NO: 243615 - protein, 15 aa, Artificial Sequence
  Description of Artificial Sequence: Synthetic peptide
  Seed: LRMKWMMAMKYPITA
LRMKWMMLMMYPTTA

SEQ ID NO: 243616 - protein, 15 aa, Artificial Sequence
  Description of Artificial Sequence: Synthetic peptide
  Seed: LRMKWMMAMKYPITA
LRMKWMMLMMYPVTA

SEQ ID NO: 243617 - protein, 15 aa, Artificial Sequence
  Description of Artificial Sequence: Synthetic peptide
  Seed: LRMKWMMAMKYPITA
LRMKWMMLMNYPATA

SEQ ID NO: 243618 - protein, 15 aa, Artificial Sequence
  Description of Artificial Sequence: Synthetic peptide
  Seed: LRMKWMMAMKYPITA
LRMKWMMLMNYPCTA

SEQ ID NO: 243619 - protein, 15 aa, Artificial Sequence
  Description of Artificial Sequence: Synthetic peptide
  Seed: LRMKWMMAMKYPITA
LRMKWMMLMNYPDTA

SEQ ID NO: 243620 - protein, 15 aa, Artificial Sequence
  Description of Artificial Sequence: Synthetic peptide
  Seed: LRMKWMMAMKYPITA
LRMKWMMLMNYPETA

SEQ ID NO: 243621 - protein, 15 aa, Artificial Sequence
  Description of Artificial Sequence: Synthetic peptide
  Seed: LRMKWMMAMKYPITA
LRMKWMMLMNYPFTA

SEQ ID NO: 243622 - protein, 15 aa, Artificial Sequence
  Description of Artificial Sequence: Synthetic peptide
  Seed: LRMKWMMAMKYPITA
LRMKWMMLMNYPGTA

SEQ ID NO: 243623 - protein, 15 aa, Artificial Sequence
  Description of Artificial Sequence: Synthetic peptide
  Seed: LRMKWMMAMKYPITA
LRMKWMMLMNYPHTA

SEQ ID NO: 243624 - protein, 15 aa, Artificial Sequence
  Description of Artificial Sequence: Synthetic peptide
  Seed: LRMKWMMAMKYPITA
LRMKWMMLMNYPITA

SEQ ID NO: 243625 - protein, 15 aa, Artificial Sequence
  Description of Artificial Sequence: Synthetic peptide
  Seed: LRMKWMMAMKYPITA
LRMKWMMLMNYPKTA

SEQ ID NO: 243626 - protein, 15 aa, Artificial Sequence
  Description of Artificial Sequence: Synthetic peptide
  Seed: LRMKWMMAMKYPITA
LRMKWMMLMNYPLTA

SEQ ID NO: 243627 - protein, 15 aa, Artificial Sequence
  Description of Artificial Sequence: Synthetic peptide
  Seed: LRMKWMMAMKYPITA
LRMKWMMLMNYPMTA

SEQ ID NO: 243628 - protein, 15 aa, Artificial Sequence
  Description of Artificial Sequence: Synthetic peptide
  Seed: LRMKWMMAMKYPITA
LRMKWMMLMNYPNTA

SEQ ID NO: 243629 - protein, 15 aa, Artificial Sequence
  Description of Artificial Sequence: Synthetic peptide
  Seed: LRMKWMMAMKYPITA
LRMKWMMLMNYPPTA

SEQ ID NO: 243630 - protein, 15 aa, Artificial Sequence
  Description of Artificial Sequence: Synthetic peptide
  Seed: LRMKWMMAMKYPITA
LRMKWMMLMNYPQTA

SEQ ID NO: 243631 - protein, 15 aa, Artificial Sequence
  Description of Artificial Sequence: Synthetic peptide
  Seed: LRMKWMMAMKYPITA
LRMKWMMLMNYPRTA

SEQ ID NO: 243632 - protein, 15 aa, Artificial Sequence
  Description of Artificial Sequence: Synthetic peptide
  Seed: LRMKWMMAMKYPITA
LRMKWMMLMNYPSTA

SEQ ID NO: 243633 - protein, 15 aa, Artificial Sequence
  Description of Artificial Sequence: Synthetic peptide
  Seed: LRMKWMMAMKYPITA
LRMKWMMLMNYPTTA

SEQ ID NO: 243634 - protein, 15 aa, Artificial Sequence
  Description of Artificial Sequence: Synthetic peptide
  Seed: LRMKWMMAMKYPITA
LRMKWMMLMNYPVTA

SEQ ID NO: 243635 - protein, 15 aa, Artificial Sequence
  Description of Artificial Sequence: Synthetic peptide
  Seed: LRMKWMMAMKYPITA
LRMKWMMLMNYPYTA

SEQ ID NO: 243636 - protein, 15 aa, Artificial Sequence
  Description of Artificial Sequence: Synthetic peptide
  Seed: LRMKWMMAMKYPITA
LRMKWMMLMPYPATA

SEQ ID NO: 243637 - protein, 15 aa, Artificial Sequence
  Description of Artificial Sequence: Synthetic peptide
  Seed: LRMKWMMAMKYPITA
LRMKWMMLMPYPCTA

SEQ ID NO: 243638 - protein, 15 aa, Artificial Sequence
  Description of Artificial Sequence: Synthetic peptide
  Seed: LRMKWMMAMKYPITA
LRMKWMMLMPYPDTA

SEQ ID NO: 243639 - protein, 15 aa, Artificial Sequence
  Description of Artificial Sequence: Synthetic peptide
  Seed: LRMKWMMAMKYPITA
LRMKWMMLMPYPETA

SEQ ID NO: 243640 - protein, 15 aa, Artificial Sequence
  Description of Artificial Sequence: Synthetic peptide
  Seed: LRMKWMMAMKYPITA
LRMKWMMLMPYPFTA

SEQ ID NO: 243641 - protein, 15 aa, Artificial Sequence
  Description of Artificial Sequence: Synthetic peptide
  Seed: LRMKWMMAMKYPITA
LRMKWMMLMPYPGTA

SEQ ID NO: 243642 - protein, 15 aa, Artificial Sequence
  Description of Artificial Sequence: Synthetic peptide
  Seed: LRMKWMMAMKYPITA
LRMKWMMLMPYPHTA

SEQ ID NO: 243643 - protein, 15 aa, Artificial Sequence
  Description of Artificial Sequence: Synthetic peptide
  Seed: LRMKWMMAMKYPITA
LRMKWMMLMPYPITA

SEQ ID NO: 243644 - protein, 15 aa, Artificial Sequence
  Description of Artificial Sequence: Synthetic peptide
  Seed: LRMKWMMAMKYPITA
LRMKWMMLMPYPKTA

SEQ ID NO: 243645 - protein, 15 aa, Artificial Sequence
  Description of Artificial Sequence: Synthetic peptide
  Seed: LRMKWMMAMKYPITA
LRMKWMMLMPYPLTA

SEQ ID NO: 243646 - protein, 15 aa, Artificial Sequence
  Description of Artificial Sequence: Synthetic peptide
  Seed: LRMKWMMAMKYPITA
LRMKWMMLMPYPMTA

SEQ ID NO: 243647 - protein, 15 aa, Artificial Sequence
  Description of Artificial Sequence: Synthetic peptide
  Seed: LRMKWMMAMKYPITA
LRMKWMMLMPYPNTA

SEQ ID NO: 243648 - protein, 15 aa, Artificial Sequence
  Description of Artificial Sequence: Synthetic peptide
  Seed: LRMKWMMAMKYPITA
LRMKWMMLMPYPPTA

SEQ ID NO: 243649 - protein, 15 aa, Artificial Sequence
  Description of Artificial Sequence: Synthetic peptide
  Seed: LRMKWMMAMKYPITA
LRMKWMMLMPYPQTA

SEQ ID NO: 243650 - protein, 15 aa, Artificial Sequence
  Description of Artificial Sequence: Synthetic peptide
  Seed: LRMKWMMAMKYPITA
LRMKWMMLMPYPRTA

SEQ ID NO: 243651 - protein, 15 aa, Artificial Sequence
  Description of Artificial Sequence: Synthetic peptide
  Seed: LRMKWMMAMKYPITA
LRMKWMMLMPYPSTA

SEQ ID NO: 243652 - protein, 15 aa, Artificial Sequence
  Description of Artificial Sequence: Synthetic peptide
  Seed: LRMKWMMAMKYPITA
LRMKWMMLMPYPTTA

SEQ ID NO: 243653 - protein, 15 aa, Artificial Sequence
  Description of Artificial Sequence: Synthetic peptide
  Seed: LRMKWMMAMKYPITA
LRMKWMMLMPYPVTA

SEQ ID NO: 243654 - protein, 15 aa, Artificial Sequence
  Description of Artificial Sequence: Synthetic peptide
  Seed: LRMKWMMAMKYPITA
LRMKWMMLMPYPWTA

SEQ ID NO: 243655 - protein, 15 aa, Artificial Sequence
  Description of Artificial Sequence: Synthetic peptide
  Seed: LRMKWMMAMKYPITA
LRMKWMMLMPYPYTA

SEQ ID NO: 243656 - protein, 15 aa, Artificial Sequence
  Description of Artificial Sequence: Synthetic peptide
  Seed: LRMKWMMAMKYPITA
LRMKWMMLMQYPATA

SEQ ID NO: 243657 - protein, 15 aa, Artificial Sequence
  Description of Artificial Sequence: Synthetic peptide
  Seed: LRMKWMMAMKYPITA
LRMKWMMLMQYPHTA

SEQ ID NO: 243658 - protein, 15 aa, Artificial Sequence
  Description of Artificial Sequence: Synthetic peptide
  Seed: LRMKWMMAMKYPITA
LRMKWMMLMQYPITA

SEQ ID NO: 243659 - protein, 15 aa, Artificial Sequence
  Description of Artificial Sequence: Synthetic peptide
  Seed: LRMKWMMAMKYPITA
LRMKWMMLMQYPLTA

SEQ ID NO: 243660 - protein, 15 aa, Artificial Sequence
  Description of Artificial Sequence: Synthetic peptide
  Seed: LRMKWMMAMKYPITA
LRMKWMMLMQYPMTA

SEQ ID NO: 243661 - protein, 15 aa, Artificial Sequence
  Description of Artificial Sequence: Synthetic peptide
  Seed: LRMKWMMAMKYPITA
LRMKWMMLMQYPNTA

SEQ ID NO: 243662 - protein, 15 aa, Artificial Sequence
  Description of Artificial Sequence: Synthetic peptide
  Seed: LRMKWMMAMKYPITA
LRMKWMMLMQYPQTA

SEQ ID NO: 243663 - protein, 15 aa, Artificial Sequence
  Description of Artificial Sequence: Synthetic peptide
  Seed: LRMKWMMAMKYPITA
LRMKWMMLMQYPSTA

SEQ ID NO: 243664 - protein, 15 aa, Artificial Sequence
  Description of Artificial Sequence: Synthetic peptide
  Seed: LRMKWMMAMKYPITA
LRMKWMMLMQYPTTA

SEQ ID NO: 243665 - protein, 15 aa, Artificial Sequence
  Description of Artificial Sequence: Synthetic peptide
  Seed: LRMKWMMAMKYPITA
LRMKWMMLMQYPVTA

SEQ ID NO: 243666 - protein, 15 aa, Artificial Sequence
  Description of Artificial Sequence: Synthetic peptide
  Seed: LRMKWMMAMKYPITA
LRMKWMMLMRYPATA

SEQ ID NO: 243667 - protein, 15 aa, Artificial Sequence
  Description of Artificial Sequence: Synthetic peptide
  Seed: LRMKWMMAMKYPITA
LRMKWMMLMRYPDTA

SEQ ID NO: 243668 - protein, 15 aa, Artificial Sequence
  Description of Artificial Sequence: Synthetic peptide
  Seed: LRMKWMMAMKYPITA
LRMKWMMLMRYPETA

SEQ ID NO: 243669 - protein, 15 aa, Artificial Sequence
  Description of Artificial Sequence: Synthetic peptide
  Seed: LRMKWMMAMKYPITA
LRMKWMMLMRYPGTA

SEQ ID NO: 243670 - protein, 15 aa, Artificial Sequence
  Description of Artificial Sequence: Synthetic peptide
  Seed: LRMKWMMAMKYPITA
LRMKWMMLMRYPHTA

SEQ ID NO: 243671 - protein, 15 aa, Artificial Sequence
  Description of Artificial Sequence: Synthetic peptide
  Seed: LRMKWMMAMKYPITA
LRMKWMMLMRYPITA

SEQ ID NO: 243672 - protein, 15 aa, Artificial Sequence
  Description of Artificial Sequence: Synthetic peptide
  Seed: LRMKWMMAMKYPITA
LRMKWMMLMRYPKTA

SEQ ID NO: 243673 - protein, 15 aa, Artificial Sequence
  Description of Artificial Sequence: Synthetic peptide
  Seed: LRMKWMMAMKYPITA
LRMKWMMLMRYPLTA

SEQ ID NO: 243674 - protein, 15 aa, Artificial Sequence
  Description of Artificial Sequence: Synthetic peptide
  Seed: LRMKWMMAMKYPITA
LRMKWMMLMRYPMTA

SEQ ID NO: 243675 - protein, 15 aa, Artificial Sequence
  Description of Artificial Sequence: Synthetic peptide
  Seed: LRMKWMMAMKYPITA
LRMKWMMLMRYPNTA

SEQ ID NO: 243676 - protein, 15 aa, Artificial Sequence
  Description of Artificial Sequence: Synthetic peptide
  Seed: LRMKWMMAMKYPITA
LRMKWMMLMRYPPTA

SEQ ID NO: 243677 - protein, 15 aa, Artificial Sequence
  Description of Artificial Sequence: Synthetic peptide
  Seed: LRMKWMMAMKYPITA
LRMKWMMLMRYPQTA

SEQ ID NO: 243678 - protein, 15 aa, Artificial Sequence
  Description of Artificial Sequence: Synthetic peptide
  Seed: LRMKWMMAMKYPITA
LRMKWMMLMRYPRTA

SEQ ID NO: 243679 - protein, 15 aa, Artificial Sequence
  Description of Artificial Sequence: Synthetic peptide
  Seed: LRMKWMMAMKYPITA
LRMKWMMLMRYPSTA

SEQ ID NO: 243680 - protein, 15 aa, Artificial Sequence
  Description of Artificial Sequence: Synthetic peptide
  Seed: LRMKWMMAMKYPITA
LRMKWMMLMRYPTTA

SEQ ID NO: 243681 - protein, 15 aa, Artificial Sequence
  Description of Artificial Sequence: Synthetic peptide
  Seed: LRMKWMMAMKYPITA
LRMKWMMLMRYPVTA

SEQ ID NO: 243682 - protein, 15 aa, Artificial Sequence
  Description of Artificial Sequence: Synthetic peptide
  Seed: LRMKWMMAMKYPITA
LRMKWMMLMRYPYTA

SEQ ID NO: 243683 - protein, 15 aa, Artificial Sequence
  Description of Artificial Sequence: Synthetic peptide
  Seed: LRMKWMMAMKYPITA
LRMKWMMLMSYPATA

SEQ ID NO: 243684 - protein, 15 aa, Artificial Sequence
  Description of Artificial Sequence: Synthetic peptide
  Seed: LRMKWMMAMKYPITA
LRMKWMMLMSYPCTA

SEQ ID NO: 243685 - protein, 15 aa, Artificial Sequence
  Description of Artificial Sequence: Synthetic peptide
  Seed: LRMKWMMAMKYPITA
LRMKWMMLMSYPDTA

SEQ ID NO: 243686 - protein, 15 aa, Artificial Sequence
  Description of Artificial Sequence: Synthetic peptide
  Seed: LRMKWMMAMKYPITA
LRMKWMMLMSYPETA

SEQ ID NO: 243687 - protein, 15 aa, Artificial Sequence
  Description of Artificial Sequence: Synthetic peptide
  Seed: LRMKWMMAMKYPITA
LRMKWMMLMSYPFTA

SEQ ID NO: 243688 - protein, 15 aa, Artificial Sequence
  Description of Artificial Sequence: Synthetic peptide
  Seed: LRMKWMMAMKYPITA
LRMKWMMLMSYPGTA

SEQ ID NO: 243689 - protein, 15 aa, Artificial Sequence
  Description of Artificial Sequence: Synthetic peptide
  Seed: LRMKWMMAMKYPITA
LRMKWMMLMSYPHTA

SEQ ID NO: 243690 - protein, 15 aa, Artificial Sequence
  Description of Artificial Sequence: Synthetic peptide
  Seed: LRMKWMMAMKYPITA
LRMKWMMLMSYPITA

SEQ ID NO: 243691 - protein, 15 aa, Artificial Sequence
  Description of Artificial Sequence: Synthetic peptide
  Seed: LRMKWMMAMKYPITA
LRMKWMMLMSYPKTA

SEQ ID NO: 243692 - protein, 15 aa, Artificial Sequence
  Description of Artificial Sequence: Synthetic peptide
  Seed: LRMKWMMAMKYPITA
LRMKWMMLMSYPLTA

SEQ ID NO: 243693 - protein, 15 aa, Artificial Sequence
  Description of Artificial Sequence: Synthetic peptide
  Seed: LRMKWMMAMKYPITA
LRMKWMMLMSYPMTA

SEQ ID NO: 243694 - protein, 15 aa, Artificial Sequence
  Description of Artificial Sequence: Synthetic peptide
  Seed: LRMKWMMAMKYPITA
LRMKWMMLMSYPNTA

SEQ ID NO: 243695 - protein, 15 aa, Artificial Sequence
  Description of Artificial Sequence: Synthetic peptide
  Seed: LRMKWMMAMKYPITA
LRMKWMMLMSYPPTA

SEQ ID NO: 243696 - protein, 15 aa, Artificial Sequence
  Description of Artificial Sequence: Synthetic peptide
  Seed: LRMKWMMAMKYPITA
LRMKWMMLMSYPQTA

SEQ ID NO: 243697 - protein, 15 aa, Artificial Sequence
  Description of Artificial Sequence: Synthetic peptide
  Seed: LRMKWMMAMKYPITA
LRMKWMMLMSYPRTA

SEQ ID NO: 243698 - protein, 15 aa, Artificial Sequence
  Description of Artificial Sequence: Synthetic peptide
  Seed: LRMKWMMAMKYPITA
LRMKWMMLMSYPSTA

SEQ ID NO: 243699 - protein, 15 aa, Artificial Sequence
  Description of Artificial Sequence: Synthetic peptide
  Seed: LRMKWMMAMKYPITA
LRMKWMMLMSYPTTA

SEQ ID NO: 243700 - protein, 15 aa, Artificial Sequence
  Description of Artificial Sequence: Synthetic peptide
  Seed: LRMKWMMAMKYPITA
LRMKWMMLMSYPVTA

SEQ ID NO: 243701 - protein, 15 aa, Artificial Sequence
  Description of Artificial Sequence: Synthetic peptide
  Seed: LRMKWMMAMKYPITA
LRMKWMMLMSYPWTA

SEQ ID NO: 243702 - protein, 15 aa, Artificial Sequence
  Description of Artificial Sequence: Synthetic peptide
  Seed: LRMKWMMAMKYPITA
LRMKWMMLMSYPYTA

SEQ ID NO: 243703 - protein, 15 aa, Artificial Sequence
  Description of Artificial Sequence: Synthetic peptide
  Seed: LRMKWMMAMKYPITA
LRMKWMMLMTYPATA

SEQ ID NO: 243704 - protein, 15 aa, Artificial Sequence
  Description of Artificial Sequence: Synthetic peptide
  Seed: LRMKWMMAMKYPITA
LRMKWMMLMTYPCTA

SEQ ID NO: 243705 - protein, 15 aa, Artificial Sequence
  Description of Artificial Sequence: Synthetic peptide
  Seed: LRMKWMMAMKYPITA
LRMKWMMLMTYPDTA

SEQ ID NO: 243706 - protein, 15 aa, Artificial Sequence
  Description of Artificial Sequence: Synthetic peptide
  Seed: LRMKWMMAMKYPITA
LRMKWMMLMTYPETA

SEQ ID NO: 243707 - protein, 15 aa, Artificial Sequence
  Description of Artificial Sequence: Synthetic peptide
  Seed: LRMKWMMAMKYPITA
LRMKWMMLMTYPFTA

SEQ ID NO: 243708 - protein, 15 aa, Artificial Sequence
  Description of Artificial Sequence: Synthetic peptide
  Seed: LRMKWMMAMKYPITA
LRMKWMMLMTYPGTA

SEQ ID NO: 243709 - protein, 15 aa, Artificial Sequence
  Description of Artificial Sequence: Synthetic peptide
  Seed: LRMKWMMAMKYPITA
LRMKWMMLMTYPHTA

SEQ ID NO: 243710 - protein, 15 aa, Artificial Sequence
  Description of Artificial Sequence: Synthetic peptide
  Seed: LRMKWMMAMKYPITA
LRMKWMMLMTYPITA

SEQ ID NO: 243711 - protein, 15 aa, Artificial Sequence
  Description of Artificial Sequence: Synthetic peptide
  Seed: LRMKWMMAMKYPITA
LRMKWMMLMTYPKTA

SEQ ID NO: 243712 - protein, 15 aa, Artificial Sequence
  Description of Artificial Sequence: Synthetic peptide
  Seed: LRMKWMMAMKYPITA
LRMKWMMLMTYPLTA

SEQ ID NO: 243713 - protein, 15 aa, Artificial Sequence
  Description of Artificial Sequence: Synthetic peptide
  Seed: LRMKWMMAMKYPITA
LRMKWMMLMTYPMTA

SEQ ID NO: 243714 - protein, 15 aa, Artificial Sequence
  Description of Artificial Sequence: Synthetic peptide
  Seed: LRMKWMMAMKYPITA
LRMKWMMLMTYPNTA

SEQ ID NO: 243715 - protein, 15 aa, Artificial Sequence
  Description of Artificial Sequence: Synthetic peptide
  Seed: LRMKWMMAMKYPITA
LRMKWMMLMTYPPTA

SEQ ID NO: 243716 - protein, 15 aa, Artificial Sequence
  Description of Artificial Sequence: Synthetic peptide
  Seed: LRMKWMMAMKYPITA
LRMKWMMLMTYPQTA

SEQ ID NO: 243717 - protein, 15 aa, Artificial Sequence
  Description of Artificial Sequence: Synthetic peptide
  Seed: LRMKWMMAMKYPITA
LRMKWMMLMTYPRTA

SEQ ID NO: 243718 - protein, 15 aa, Artificial Sequence
  Description of Artificial Sequence: Synthetic peptide
  Seed: LRMKWMMAMKYPITA
LRMKWMMLMTYPSTA

SEQ ID NO: 243719 - protein, 15 aa, Artificial Sequence
  Description of Artificial Sequence: Synthetic peptide
  Seed: LRMKWMMAMKYPITA
LRMKWMMLMTYPTTA

SEQ ID NO: 243720 - protein, 15 aa, Artificial Sequence
  Description of Artificial Sequence: Synthetic peptide
  Seed: LRMKWMMAMKYPITA
LRMKWMMLMTYPVTA

SEQ ID NO: 243721 - protein, 15 aa, Artificial Sequence
  Description of Artificial Sequence: Synthetic peptide
  Seed: LRMKWMMAMKYPITA
LRMKWMMLMTYPYTA

SEQ ID NO: 243722 - protein, 15 aa, Artificial Sequence
  Description of Artificial Sequence: Synthetic peptide
  Seed: LRMKWMMAMKYPITA
LRMKWMMLMVYPATA

SEQ ID NO: 243723 - protein, 15 aa, Artificial Sequence
  Description of Artificial Sequence: Synthetic peptide
  Seed: LRMKWMMAMKYPITA
LRMKWMMLMVYPCTA

SEQ ID NO: 243724 - protein, 15 aa, Artificial Sequence
  Description of Artificial Sequence: Synthetic peptide
  Seed: LRMKWMMAMKYPITA
LRMKWMMLMVYPDTA

SEQ ID NO: 243725 - protein, 15 aa, Artificial Sequence
  Description of Artificial Sequence: Synthetic peptide
  Seed: LRMKWMMAMKYPITA
LRMKWMMLMVYPETA

SEQ ID NO: 243726 - protein, 15 aa, Artificial Sequence
  Description of Artificial Sequence: Synthetic peptide
  Seed: LRMKWMMAMKYPITA
LRMKWMMLMVYPFTA

SEQ ID NO: 243727 - protein, 15 aa, Artificial Sequence
  Description of Artificial Sequence: Synthetic peptide
  Seed: LRMKWMMAMKYPITA
LRMKWMMLMVYPGTA

SEQ ID NO: 243728 - protein, 15 aa, Artificial Sequence
  Description of Artificial Sequence: Synthetic peptide
  Seed: LRMKWMMAMKYPITA
LRMKWMMLMVYPHTA

SEQ ID NO: 243729 - protein, 15 aa, Artificial Sequence
  Description of Artificial Sequence: Synthetic peptide
  Seed: LRMKWMMAMKYPITA
LRMKWMMLMVYPITA

SEQ ID NO: 243730 - protein, 15 aa, Artificial Sequence
  Description of Artificial Sequence: Synthetic peptide
  Seed: LRMKWMMAMKYPITA
LRMKWMMLMVYPKTA

SEQ ID NO: 243731 - protein, 15 aa, Artificial Sequence
  Description of Artificial Sequence: Synthetic peptide
  Seed: LRMKWMMAMKYPITA
LRMKWMMLMVYPLTA

SEQ ID NO: 243732 - protein, 15 aa, Artificial Sequence
  Description of Artificial Sequence: Synthetic peptide
  Seed: LRMKWMMAMKYPITA
LRMKWMMLMVYPMTA

SEQ ID NO: 243733 - protein, 15 aa, Artificial Sequence
  Description of Artificial Sequence: Synthetic peptide
  Seed: LRMKWMMAMKYPITA
LRMKWMMLMVYPNTA

SEQ ID NO: 243734 - protein, 15 aa, Artificial Sequence
  Description of Artificial Sequence: Synthetic peptide
  Seed: LRMKWMMAMKYPITA
LRMKWMMLMVYPPTA

SEQ ID NO: 243735 - protein, 15 aa, Artificial Sequence
  Description of Artificial Sequence: Synthetic peptide
  Seed: LRMKWMMAMKYPITA
LRMKWMMLMVYPQTA

SEQ ID NO: 243736 - protein, 15 aa, Artificial Sequence
  Description of Artificial Sequence: Synthetic peptide
  Seed: LRMKWMMAMKYPITA
LRMKWMMLMVYPRTA

SEQ ID NO: 243737 - protein, 15 aa, Artificial Sequence
  Description of Artificial Sequence: Synthetic peptide
  Seed: LRMKWMMAMKYPITA
LRMKWMMLMVYPSTA

SEQ ID NO: 243738 - protein, 15 aa, Artificial Sequence
  Description of Artificial Sequence: Synthetic peptide
  Seed: LRMKWMMAMKYPITA
LRMKWMMLMVYPTTA

SEQ ID NO: 243739 - protein, 15 aa, Artificial Sequence
  Description of Artificial Sequence: Synthetic peptide
  Seed: LRMKWMMAMKYPITA
LRMKWMMLMVYPVTA

SEQ ID NO: 243740 - protein, 15 aa, Artificial Sequence
  Description of Artificial Sequence: Synthetic peptide
  Seed: LRMKWMMAMKYPITA
LRMKWMMLMVYPYTA

SEQ ID NO: 243741 - protein, 15 aa, Artificial Sequence
  Description of Artificial Sequence: Synthetic peptide
  Seed: LRMKWMMAMKYPITA
LRMKWMMLMYYPATA

SEQ ID NO: 243742 - protein, 15 aa, Artificial Sequence
  Description of Artificial Sequence: Synthetic peptide
  Seed: LRMKWMMAMKYPITA
LRMKWMMLMYYPVTA

SEQ ID NO: 243743 - protein, 15 aa, Artificial Sequence
  Description of Artificial Sequence: Synthetic peptide
  Seed: LRMKWMMAMKYPITA
LRMKWMMMMAYPATA

SEQ ID NO: 243744 - protein, 15 aa, Artificial Sequence
  Description of Artificial Sequence: Synthetic peptide
  Seed: LRMKWMMAMKYPITA
LRMKWMMMMAYPCTA

SEQ ID NO: 243745 - protein, 15 aa, Artificial Sequence
  Description of Artificial Sequence: Synthetic peptide
  Seed: LRMKWMMAMKYPITA
LRMKWMMMMAYPDTA

SEQ ID NO: 243746 - protein, 15 aa, Artificial Sequence
  Description of Artificial Sequence: Synthetic peptide
  Seed: LRMKWMMAMKYPITA
LRMKWMMMMAYPETA

SEQ ID NO: 243747 - protein, 15 aa, Artificial Sequence
  Description of Artificial Sequence: Synthetic peptide
  Seed: LRMKWMMAMKYPITA
LRMKWMMMMAYPFTA

SEQ ID NO: 243748 - protein, 15 aa, Artificial Sequence
  Description of Artificial Sequence: Synthetic peptide
  Seed: LRMKWMMAMKYPITA
LRMKWMMMMAYPGTA

SEQ ID NO: 243749 - protein, 15 aa, Artificial Sequence
  Description of Artificial Sequence: Synthetic peptide
  Seed: LRMKWMMAMKYPITA
LRMKWMMMMAYPHTA

SEQ ID NO: 243750 - protein, 15 aa, Artificial Sequence
  Description of Artificial Sequence: Synthetic peptide
  Seed: LRMKWMMAMKYPITA
LRMKWMMMMAYPITA

SEQ ID NO: 243751 - protein, 15 aa, Artificial Sequence
  Description of Artificial Sequence: Synthetic peptide
  Seed: LRMKWMMAMKYPITA
LRMKWMMMMAYPKTA

SEQ ID NO: 243752 - protein, 15 aa, Artificial Sequence
  Description of Artificial Sequence: Synthetic peptide
  Seed: LRMKWMMAMKYPITA
LRMKWMMMMAYPLTA

SEQ ID NO: 243753 - protein, 15 aa, Artificial Sequence
  Description of Artificial Sequence: Synthetic peptide
  Seed: LRMKWMMAMKYPITA
LRMKWMMMMAYPMTA

SEQ ID NO: 243754 - protein, 15 aa, Artificial Sequence
  Description of Artificial Sequence: Synthetic peptide
  Seed: LRMKWMMAMKYPITA
LRMKWMMMMAYPNTA

SEQ ID NO: 243755 - protein, 15 aa, Artificial Sequence
  Description of Artificial Sequence: Synthetic peptide
  Seed: LRMKWMMAMKYPITA
LRMKWMMMMAYPPTA

SEQ ID NO: 243756 - protein, 15 aa, Artificial Sequence
  Description of Artificial Sequence: Synthetic peptide
  Seed: LRMKWMMAMKYPITA
LRMKWMMMMAYPQTA

SEQ ID NO: 243757 - protein, 15 aa, Artificial Sequence
  Description of Artificial Sequence: Synthetic peptide
  Seed: LRMKWMMAMKYPITA
LRMKWMMMMAYPRTA

SEQ ID NO: 243758 - protein, 15 aa, Artificial Sequence
  Description of Artificial Sequence: Synthetic peptide
  Seed: LRMKWMMAMKYPITA
LRMKWMMMMAYPSTA

SEQ ID NO: 243759 - protein, 15 aa, Artificial Sequence
  Description of Artificial Sequence: Synthetic peptide
  Seed: LRMKWMMAMKYPITA
LRMKWMMMMAYPTTA

SEQ ID NO: 243760 - protein, 15 aa, Artificial Sequence
  Description of Artificial Sequence: Synthetic peptide
  Seed: LRMKWMMAMKYPITA
LRMKWMMMMAYPVTA

SEQ ID NO: 243761 - protein, 15 aa, Artificial Sequence
  Description of Artificial Sequence: Synthetic peptide
  Seed: LRMKWMMAMKYPITA
LRMKWMMMMAYPWTA

SEQ ID NO: 243762 - protein, 15 aa, Artificial Sequence
  Description of Artificial Sequence: Synthetic peptide
  Seed: LRMKWMMAMKYPITA
LRMKWMMMMAYPYTA

SEQ ID NO: 243763 - protein, 15 aa, Artificial Sequence
  Description of Artificial Sequence: Synthetic peptide
  Seed: LRMKWMMAMKYPITA
LRMKWMMMMCYPATA

SEQ ID NO: 243764 - protein, 15 aa, Artificial Sequence
  Description of Artificial Sequence: Synthetic peptide
  Seed: LRMKWMMAMKYPITA
LRMKWMMMMCYPHTA

SEQ ID NO: 243765 - protein, 15 aa, Artificial Sequence
  Description of Artificial Sequence: Synthetic peptide
  Seed: LRMKWMMAMKYPITA
LRMKWMMMMCYPITA

SEQ ID NO: 243766 - protein, 15 aa, Artificial Sequence
  Description of Artificial Sequence: Synthetic peptide
  Seed: LRMKWMMAMKYPITA
LRMKWMMMMCYPLTA

SEQ ID NO: 243767 - protein, 15 aa, Artificial Sequence
  Description of Artificial Sequence: Synthetic peptide
  Seed: LRMKWMMAMKYPITA
LRMKWMMMMCYPMTA

SEQ ID NO: 243768 - protein, 15 aa, Artificial Sequence
  Description of Artificial Sequence: Synthetic peptide
  Seed: LRMKWMMAMKYPITA
LRMKWMMMMCYPNTA

SEQ ID NO: 243769 - protein, 15 aa, Artificial Sequence
  Description of Artificial Sequence: Synthetic peptide
  Seed: LRMKWMMAMKYPITA
LRMKWMMMMCYPSTA

SEQ ID NO: 243770 - protein, 15 aa, Artificial Sequence
  Description of Artificial Sequence: Synthetic peptide
  Seed: LRMKWMMAMKYPITA
LRMKWMMMMCYPTTA

SEQ ID NO: 243771 - protein, 15 aa, Artificial Sequence
  Description of Artificial Sequence: Synthetic peptide
  Seed: LRMKWMMAMKYPITA
LRMKWMMMMCYPVTA

SEQ ID NO: 243772 - protein, 15 aa, Artificial Sequence
  Description of Artificial Sequence: Synthetic peptide
  Seed: LRMKWMMAMKYPITA
LRMKWMMMMDYPATA

SEQ ID NO: 243773 - protein, 15 aa, Artificial Sequence
  Description of Artificial Sequence: Synthetic peptide
  Seed: LRMKWMMAMKYPITA
LRMKWMMMMDYPDTA

SEQ ID NO: 243774 - protein, 15 aa, Artificial Sequence
  Description of Artificial Sequence: Synthetic peptide
  Seed: LRMKWMMAMKYPITA
LRMKWMMMMDYPITA

SEQ ID NO: 243775 - protein, 15 aa, Artificial Sequence
  Description of Artificial Sequence: Synthetic peptide
  Seed: LRMKWMMAMKYPITA
LRMKWMMMMDYPLTA

SEQ ID NO: 243776 - protein, 15 aa, Artificial Sequence
  Description of Artificial Sequence: Synthetic peptide
  Seed: LRMKWMMAMKYPITA
LRMKWMMMMDYPMTA

SEQ ID NO: 243777 - protein, 15 aa, Artificial Sequence
  Description of Artificial Sequence: Synthetic peptide
  Seed: LRMKWMMAMKYPITA
LRMKWMMMMDYPNTA

SEQ ID NO: 243778 - protein, 15 aa, Artificial Sequence
  Description of Artificial Sequence: Synthetic peptide
  Seed: LRMKWMMAMKYPITA
LRMKWMMMMDYPSTA

SEQ ID NO: 243779 - protein, 15 aa, Artificial Sequence
  Description of Artificial Sequence: Synthetic peptide
  Seed: LRMKWMMAMKYPITA
LRMKWMMMMDYPTTA

SEQ ID NO: 243780 - protein, 15 aa, Artificial Sequence
  Description of Artificial Sequence: Synthetic peptide
  Seed: LRMKWMMAMKYPITA
LRMKWMMMMDYPVTA

SEQ ID NO: 243781 - protein, 15 aa, Artificial Sequence
  Description of Artificial Sequence: Synthetic peptide
  Seed: LRMKWMMAMKYPITA
LRMKWMMMMEYPATA

SEQ ID NO: 243782 - protein, 15 aa, Artificial Sequence
  Description of Artificial Sequence: Synthetic peptide
  Seed: LRMKWMMAMKYPITA
LRMKWMMMMEYPHTA

SEQ ID NO: 243783 - protein, 15 aa, Artificial Sequence
  Description of Artificial Sequence: Synthetic peptide
  Seed: LRMKWMMAMKYPITA
LRMKWMMMMEYPITA

SEQ ID NO: 243784 - protein, 15 aa, Artificial Sequence
  Description of Artificial Sequence: Synthetic peptide
  Seed: LRMKWMMAMKYPITA
LRMKWMMMMEYPLTA

SEQ ID NO: 243785 - protein, 15 aa, Artificial Sequence
  Description of Artificial Sequence: Synthetic peptide
  Seed: LRMKWMMAMKYPITA
LRMKWMMMMEYPMTA

SEQ ID NO: 243786 - protein, 15 aa, Artificial Sequence
  Description of Artificial Sequence: Synthetic peptide
  Seed: LRMKWMMAMKYPITA
LRMKWMMMMEYPNTA

SEQ ID NO: 243787 - protein, 15 aa, Artificial Sequence
  Description of Artificial Sequence: Synthetic peptide
  Seed: LRMKWMMAMKYPITA
LRMKWMMMMEYPSTA

SEQ ID NO: 243788 - protein, 15 aa, Artificial Sequence
  Description of Artificial Sequence: Synthetic peptide
  Seed: LRMKWMMAMKYPITA
LRMKWMMMMEYPTTA

SEQ ID NO: 243789 - protein, 15 aa, Artificial Sequence
  Description of Artificial Sequence: Synthetic peptide
  Seed: LRMKWMMAMKYPITA
LRMKWMMMMEYPVTA

SEQ ID NO: 243790 - protein, 15 aa, Artificial Sequence
  Description of Artificial Sequence: Synthetic peptide
  Seed: LRMKWMMAMKYPITA
LRMKWMMMMFYPATA

SEQ ID NO: 243791 - protein, 15 aa, Artificial Sequence
  Description of Artificial Sequence: Synthetic peptide
  Seed: LRMKWMMAMKYPITA
LRMKWMMMMGYPATA

SEQ ID NO: 243792 - protein, 15 aa, Artificial Sequence
  Description of Artificial Sequence: Synthetic peptide
  Seed: LRMKWMMAMKYPITA
LRMKWMMMMGYPCTA

SEQ ID NO: 243793 - protein, 15 aa, Artificial Sequence
  Description of Artificial Sequence: Synthetic peptide
  Seed: LRMKWMMAMKYPITA
LRMKWMMMMGYPDTA

SEQ ID NO: 243794 - protein, 15 aa, Artificial Sequence
  Description of Artificial Sequence: Synthetic peptide
  Seed: LRMKWMMAMKYPITA
LRMKWMMMMGYPETA

SEQ ID NO: 243795 - protein, 15 aa, Artificial Sequence
  Description of Artificial Sequence: Synthetic peptide
  Seed: LRMKWMMAMKYPITA
LRMKWMMMMGYPFTA

SEQ ID NO: 243796 - protein, 15 aa, Artificial Sequence
  Description of Artificial Sequence: Synthetic peptide
  Seed: LRMKWMMAMKYPITA
LRMKWMMMMGYPGTA

SEQ ID NO: 243797 - protein, 15 aa, Artificial Sequence
  Description of Artificial Sequence: Synthetic peptide
  Seed: LRMKWMMAMKYPITA
LRMKWMMMMGYPHTA

SEQ ID NO: 243798 - protein, 15 aa, Artificial Sequence
  Description of Artificial Sequence: Synthetic peptide
  Seed: LRMKWMMAMKYPITA
LRMKWMMMMGYPITA

SEQ ID NO: 243799 - protein, 15 aa, Artificial Sequence
  Description of Artificial Sequence: Synthetic peptide
  Seed: LRMKWMMAMKYPITA
LRMKWMMMMGYPKTA

SEQ ID NO: 243800 - protein, 15 aa, Artificial Sequence
  Description of Artificial Sequence: Synthetic peptide
  Seed: LRMKWMMAMKYPITA
LRMKWMMMMGYPLTA

SEQ ID NO: 243801 - protein, 15 aa, Artificial Sequence
  Description of Artificial Sequence: Synthetic peptide
  Seed: LRMKWMMAMKYPITA
LRMKWMMMMGYPMTA

SEQ ID NO: 243802 - protein, 15 aa, Artificial Sequence
  Description of Artificial Sequence: Synthetic peptide
  Seed: LRMKWMMAMKYPITA
LRMKWMMMMGYPNTA

SEQ ID NO: 243803 - protein, 15 aa, Artificial Sequence
  Description of Artificial Sequence: Synthetic peptide
  Seed: LRMKWMMAMKYPITA
LRMKWMMMMGYPPTA

SEQ ID NO: 243804 - protein, 15 aa, Artificial Sequence
  Description of Artificial Sequence: Synthetic peptide
  Seed: LRMKWMMAMKYPITA
LRMKWMMMMGYPQTA

SEQ ID NO: 243805 - protein, 15 aa, Artificial Sequence
  Description of Artificial Sequence: Synthetic peptide
  Seed: LRMKWMMAMKYPITA
LRMKWMMMMGYPRTA

SEQ ID NO: 243806 - protein, 15 aa, Artificial Sequence
  Description of Artificial Sequence: Synthetic peptide
  Seed: LRMKWMMAMKYPITA
LRMKWMMMMGYPSTA

SEQ ID NO: 243807 - protein, 15 aa, Artificial Sequence
  Description of Artificial Sequence: Synthetic peptide
  Seed: LRMKWMMAMKYPITA
LRMKWMMMMGYPTTA

SEQ ID NO: 243808 - protein, 15 aa, Artificial Sequence
  Description of Artificial Sequence: Synthetic peptide
  Seed: LRMKWMMAMKYPITA
LRMKWMMMMGYPVTA

SEQ ID NO: 243809 - protein, 15 aa, Artificial Sequence
  Description of Artificial Sequence: Synthetic peptide
  Seed: LRMKWMMAMKYPITA
LRMKWMMMMGYPWTA

SEQ ID NO: 243810 - protein, 15 aa, Artificial Sequence
  Description of Artificial Sequence: Synthetic peptide
  Seed: LRMKWMMAMKYPITA
LRMKWMMMMGYPYTA

SEQ ID NO: 243811 - protein, 15 aa, Artificial Sequence
  Description of Artificial Sequence: Synthetic peptide
  Seed: LRMKWMMAMKYPITA
LRMKWMMMMHYPATA

SEQ ID NO: 243812 - protein, 15 aa, Artificial Sequence
  Description of Artificial Sequence: Synthetic peptide
  Seed: LRMKWMMAMKYPITA
LRMKWMMMMHYPCTA

SEQ ID NO: 243813 - protein, 15 aa, Artificial Sequence
  Description of Artificial Sequence: Synthetic peptide
  Seed: LRMKWMMAMKYPITA
LRMKWMMMMHYPFTA

SEQ ID NO: 243814 - protein, 15 aa, Artificial Sequence
  Description of Artificial Sequence: Synthetic peptide
  Seed: LRMKWMMAMKYPITA
LRMKWMMMMHYPGTA

SEQ ID NO: 243815 - protein, 15 aa, Artificial Sequence
  Description of Artificial Sequence: Synthetic peptide
  Seed: LRMKWMMAMKYPITA
LRMKWMMMMHYPHTA

SEQ ID NO: 243816 - protein, 15 aa, Artificial Sequence
  Description of Artificial Sequence: Synthetic peptide
  Seed: LRMKWMMAMKYPITA
LRMKWMMMMHYPITA

SEQ ID NO: 243817 - protein, 15 aa, Artificial Sequence
  Description of Artificial Sequence: Synthetic peptide
  Seed: LRMKWMMAMKYPITA
LRMKWMMMMHYPKTA

SEQ ID NO: 243818 - protein, 15 aa, Artificial Sequence
  Description of Artificial Sequence: Synthetic peptide
  Seed: LRMKWMMAMKYPITA
LRMKWMMMMHYPLTA

SEQ ID NO: 243819 - protein, 15 aa, Artificial Sequence
  Description of Artificial Sequence: Synthetic peptide
  Seed: LRMKWMMAMKYPITA
LRMKWMMMMHYPMTA

SEQ ID NO: 243820 - protein, 15 aa, Artificial Sequence
  Description of Artificial Sequence: Synthetic peptide
  Seed: LRMKWMMAMKYPITA
LRMKWMMMMHYPNTA

SEQ ID NO: 243821 - protein, 15 aa, Artificial Sequence
  Description of Artificial Sequence: Synthetic peptide
  Seed: LRMKWMMAMKYPITA
LRMKWMMMMHYPQTA

SEQ ID NO: 243822 - protein, 15 aa, Artificial Sequence
  Description of Artificial Sequence: Synthetic peptide
  Seed: LRMKWMMAMKYPITA
LRMKWMMMMHYPRTA

SEQ ID NO: 243823 - protein, 15 aa, Artificial Sequence
  Description of Artificial Sequence: Synthetic peptide
  Seed: LRMKWMMAMKYPITA
LRMKWMMMMHYPSTA

SEQ ID NO: 243824 - protein, 15 aa, Artificial Sequence
  Description of Artificial Sequence: Synthetic peptide
  Seed: LRMKWMMAMKYPITA
LRMKWMMMMHYPTTA

SEQ ID NO: 243825 - protein, 15 aa, Artificial Sequence
  Description of Artificial Sequence: Synthetic peptide
  Seed: LRMKWMMAMKYPITA
LRMKWMMMMHYPVTA

SEQ ID NO: 243826 - protein, 15 aa, Artificial Sequence
  Description of Artificial Sequence: Synthetic peptide
  Seed: LRMKWMMAMKYPITA
LRMKWMMMMHYPYTA

SEQ ID NO: 243827 - protein, 15 aa, Artificial Sequence
  Description of Artificial Sequence: Synthetic peptide
  Seed: LRMKWMMAMKYPITA
LRMKWMMMMIYPATA

SEQ ID NO: 243828 - protein, 15 aa, Artificial Sequence
  Description of Artificial Sequence: Synthetic peptide
  Seed: LRMKWMMAMKYPITA
LRMKWMMMMIYPCTA

SEQ ID NO: 243829 - protein, 15 aa, Artificial Sequence
  Description of Artificial Sequence: Synthetic peptide
  Seed: LRMKWMMAMKYPITA
LRMKWMMMMIYPDTA

SEQ ID NO: 243830 - protein, 15 aa, Artificial Sequence
  Description of Artificial Sequence: Synthetic peptide
  Seed: LRMKWMMAMKYPITA
LRMKWMMMMIYPETA

SEQ ID NO: 243831 - protein, 15 aa, Artificial Sequence
  Description of Artificial Sequence: Synthetic peptide
  Seed: LRMKWMMAMKYPITA
LRMKWMMMMIYPFTA

SEQ ID NO: 243832 - protein, 15 aa, Artificial Sequence
  Description of Artificial Sequence: Synthetic peptide
  Seed: LRMKWMMAMKYPITA
LRMKWMMMMIYPGTA

SEQ ID NO: 243833 - protein, 15 aa, Artificial Sequence
  Description of Artificial Sequence: Synthetic peptide
  Seed: LRMKWMMAMKYPITA
LRMKWMMMMIYPHTA

SEQ ID NO: 243834 - protein, 15 aa, Artificial Sequence
  Description of Artificial Sequence: Synthetic peptide
  Seed: LRMKWMMAMKYPITA
LRMKWMMMMIYPITA

SEQ ID NO: 243835 - protein, 15 aa, Artificial Sequence
  Description of Artificial Sequence: Synthetic peptide
  Seed: LRMKWMMAMKYPITA
LRMKWMMMMIYPKTA

SEQ ID NO: 243836 - protein, 15 aa, Artificial Sequence
  Description of Artificial Sequence: Synthetic peptide
  Seed: LRMKWMMAMKYPITA
LRMKWMMMMIYPLTA

SEQ ID NO: 243837 - protein, 15 aa, Artificial Sequence
  Description of Artificial Sequence: Synthetic peptide
  Seed: LRMKWMMAMKYPITA
LRMKWMMMMIYPMTA

SEQ ID NO: 243838 - protein, 15 aa, Artificial Sequence
  Description of Artificial Sequence: Synthetic peptide
  Seed: LRMKWMMAMKYPITA
LRMKWMMMMIYPNTA

SEQ ID NO: 243839 - protein, 15 aa, Artificial Sequence
  Description of Artificial Sequence: Synthetic peptide
  Seed: LRMKWMMAMKYPITA
LRMKWMMMMIYPPTA

SEQ ID NO: 243840 - protein, 15 aa, Artificial Sequence
  Description of Artificial Sequence: Synthetic peptide
  Seed: LRMKWMMAMKYPITA
LRMKWMMMMIYPQTA

SEQ ID NO: 243841 - protein, 15 aa, Artificial Sequence
  Description of Artificial Sequence: Synthetic peptide
  Seed: LRMKWMMAMKYPITA
LRMKWMMMMIYPRTA

SEQ ID NO: 243842 - protein, 15 aa, Artificial Sequence
  Description of Artificial Sequence: Synthetic peptide
  Seed: LRMKWMMAMKYPITA
LRMKWMMMMIYPSTA

SEQ ID NO: 243843 - protein, 15 aa, Artificial Sequence
  Description of Artificial Sequence: Synthetic peptide
  Seed: LRMKWMMAMKYPITA
LRMKWMMMMIYPTTA

SEQ ID NO: 243844 - protein, 15 aa, Artificial Sequence
  Description of Artificial Sequence: Synthetic peptide
  Seed: LRMKWMMAMKYPITA
LRMKWMMMMIYPVTA

SEQ ID NO: 243845 - protein, 15 aa, Artificial Sequence
  Description of Artificial Sequence: Synthetic peptide
  Seed: LRMKWMMAMKYPITA
LRMKWMMMMIYPYTA

SEQ ID NO: 243846 - protein, 15 aa, Artificial Sequence
  Description of Artificial Sequence: Synthetic peptide
  Seed: LRMKWMMAMKYPITA
LRMKWMMMMKYPATA

SEQ ID NO: 243847 - protein, 15 aa, Artificial Sequence
  Description of Artificial Sequence: Synthetic peptide
  Seed: LRMKWMMAMKYPITA
LRMKWMMMMKYPFTA

SEQ ID NO: 243848 - protein, 15 aa, Artificial Sequence
  Description of Artificial Sequence: Synthetic peptide
  Seed: LRMKWMMAMKYPITA
LRMKWMMMMKYPGTA

SEQ ID NO: 243849 - protein, 15 aa, Artificial Sequence
  Description of Artificial Sequence: Synthetic peptide
  Seed: LRMKWMMAMKYPITA
LRMKWMMMMKYPHTA

SEQ ID NO: 243850 - protein, 15 aa, Artificial Sequence
  Description of Artificial Sequence: Synthetic peptide
  Seed: LRMKWMMAMKYPITA
LRMKWMMMMKYPKTA

SEQ ID NO: 243851 - protein, 15 aa, Artificial Sequence
  Description of Artificial Sequence: Synthetic peptide
  Seed: LRMKWMMAMKYPITA
LRMKWMMMMKYPLTA

SEQ ID NO: 243852 - protein, 15 aa, Artificial Sequence
  Description of Artificial Sequence: Synthetic peptide
  Seed: LRMKWMMAMKYPITA
LRMKWMMMMKYPMTA

SEQ ID NO: 243853 - protein, 15 aa, Artificial Sequence
  Description of Artificial Sequence: Synthetic peptide
  Seed: LRMKWMMAMKYPITA
LRMKWMMMMKYPNTA

SEQ ID NO: 243854 - protein, 15 aa, Artificial Sequence
  Description of Artificial Sequence: Synthetic peptide
  Seed: LRMKWMMAMKYPITA
LRMKWMMMMKYPPTA

SEQ ID NO: 243855 - protein, 15 aa, Artificial Sequence
  Description of Artificial Sequence: Synthetic peptide
  Seed: LRMKWMMAMKYPITA
LRMKWMMMMKYPQTA

SEQ ID NO: 243856 - protein, 15 aa, Artificial Sequence
  Description of Artificial Sequence: Synthetic peptide
  Seed: LRMKWMMAMKYPITA
LRMKWMMMMKYPRTA

SEQ ID NO: 243857 - protein, 15 aa, Artificial Sequence
  Description of Artificial Sequence: Synthetic peptide
  Seed: LRMKWMMAMKYPITA
LRMKWMMMMKYPSTA

SEQ ID NO: 243858 - protein, 15 aa, Artificial Sequence
  Description of Artificial Sequence: Synthetic peptide
  Seed: LRMKWMMAMKYPITA
LRMKWMMMMKYPTTA

SEQ ID NO: 243859 - protein, 15 aa, Artificial Sequence
  Description of Artificial Sequence: Synthetic peptide
  Seed: LRMKWMMAMKYPITA
LRMKWMMMMKYPVTA

SEQ ID NO: 243860 - protein, 15 aa, Artificial Sequence
  Description of Artificial Sequence: Synthetic peptide
  Seed: LRMKWMMAMKYPITA
LRMKWMMMMKYPYTA

SEQ ID NO: 243861 - protein, 15 aa, Artificial Sequence
  Description of Artificial Sequence: Synthetic peptide
  Seed: LRMKWMMAMKYPITA
LRMKWMMMMLYPATA

SEQ ID NO: 243862 - protein, 15 aa, Artificial Sequence
  Description of Artificial Sequence: Synthetic peptide
  Seed: LRMKWMMAMKYPITA
LRMKWMMMMLYPCTA

SEQ ID NO: 243863 - protein, 15 aa, Artificial Sequence
  Description of Artificial Sequence: Synthetic peptide
  Seed: LRMKWMMAMKYPITA
LRMKWMMMMLYPDTA

SEQ ID NO: 243864 - protein, 15 aa, Artificial Sequence
  Description of Artificial Sequence: Synthetic peptide
  Seed: LRMKWMMAMKYPITA
LRMKWMMMMLYPGTA

SEQ ID NO: 243865 - protein, 15 aa, Artificial Sequence
  Description of Artificial Sequence: Synthetic peptide
  Seed: LRMKWMMAMKYPITA
LRMKWMMMMLYPITA

SEQ ID NO: 243866 - protein, 15 aa, Artificial Sequence
  Description of Artificial Sequence: Synthetic peptide
  Seed: LRMKWMMAMKYPITA
LRMKWMMMMLYPLTA

SEQ ID NO: 243867 - protein, 15 aa, Artificial Sequence
  Description of Artificial Sequence: Synthetic peptide
  Seed: LRMKWMMAMKYPITA
LRMKWMMMMLYPMTA

SEQ ID NO: 243868 - protein, 15 aa, Artificial Sequence
  Description of Artificial Sequence: Synthetic peptide
  Seed: LRMKWMMAMKYPITA
LRMKWMMMMLYPNTA

SEQ ID NO: 243869 - protein, 15 aa, Artificial Sequence
  Description of Artificial Sequence: Synthetic peptide
  Seed: LRMKWMMAMKYPITA
LRMKWMMMMLYPSTA

SEQ ID NO: 243870 - protein, 15 aa, Artificial Sequence
  Description of Artificial Sequence: Synthetic peptide
  Seed: LRMKWMMAMKYPITA
LRMKWMMMMLYPTTA

SEQ ID NO: 243871 - protein, 15 aa, Artificial Sequence
  Description of Artificial Sequence: Synthetic peptide
  Seed: LRMKWMMAMKYPITA
LRMKWMMMMLYPVTA

SEQ ID NO: 243872 - protein, 15 aa, Artificial Sequence
  Description of Artificial Sequence: Synthetic peptide
  Seed: LRMKWMMAMKYPITA
LRMKWMMMMMYPATA

SEQ ID NO: 243873 - protein, 15 aa, Artificial Sequence
  Description of Artificial Sequence: Synthetic peptide
  Seed: LRMKWMMAMKYPITA
LRMKWMMMMMYPCTA

SEQ ID NO: 243874 - protein, 15 aa, Artificial Sequence
  Description of Artificial Sequence: Synthetic peptide
  Seed: LRMKWMMAMKYPITA
LRMKWMMMMMYPDTA

SEQ ID NO: 243875 - protein, 15 aa, Artificial Sequence
  Description of Artificial Sequence: Synthetic peptide
  Seed: LRMKWMMAMKYPITA
LRMKWMMMMMYPFTA

SEQ ID NO: 243876 - protein, 15 aa, Artificial Sequence
  Description of Artificial Sequence: Synthetic peptide
  Seed: LRMKWMMAMKYPITA
LRMKWMMMMMYPGTA

SEQ ID NO: 243877 - protein, 15 aa, Artificial Sequence
  Description of Artificial Sequence: Synthetic peptide
  Seed: LRMKWMMAMKYPITA
LRMKWMMMMMYPITA

SEQ ID NO: 243878 - protein, 15 aa, Artificial Sequence
  Description of Artificial Sequence: Synthetic peptide
  Seed: LRMKWMMAMKYPITA
LRMKWMMMMMYPLTA

SEQ ID NO: 243879 - protein, 15 aa, Artificial Sequence
  Description of Artificial Sequence: Synthetic peptide
  Seed: LRMKWMMAMKYPITA
LRMKWMMMMMYPMTA

SEQ ID NO: 243880 - protein, 15 aa, Artificial Sequence
  Description of Artificial Sequence: Synthetic peptide
  Seed: LRMKWMMAMKYPITA
LRMKWMMMMMYPNTA

SEQ ID NO: 243881 - protein, 15 aa, Artificial Sequence
  Description of Artificial Sequence: Synthetic peptide
  Seed: LRMKWMMAMKYPITA
LRMKWMMMMMYPSTA

SEQ ID NO: 243882 - protein, 15 aa, Artificial Sequence
  Description of Artificial Sequence: Synthetic peptide
  Seed: LRMKWMMAMKYPITA
LRMKWMMMMMYPTTA

SEQ ID NO: 243883 - protein, 15 aa, Artificial Sequence
  Description of Artificial Sequence: Synthetic peptide
  Seed: LRMKWMMAMKYPITA
LRMKWMMMMMYPVTA

SEQ ID NO: 243884 - protein, 15 aa, Artificial Sequence
  Description of Artificial Sequence: Synthetic peptide
  Seed: LRMKWMMAMKYPITA
LRMKWMMMMNYPATA

SEQ ID NO: 243885 - protein, 15 aa, Artificial Sequence
  Description of Artificial Sequence: Synthetic peptide
  Seed: LRMKWMMAMKYPITA
LRMKWMMMMNYPCTA

SEQ ID NO: 243886 - protein, 15 aa, Artificial Sequence
  Description of Artificial Sequence: Synthetic peptide
  Seed: LRMKWMMAMKYPITA
LRMKWMMMMNYPDTA

SEQ ID NO: 243887 - protein, 15 aa, Artificial Sequence
  Description of Artificial Sequence: Synthetic peptide
  Seed: LRMKWMMAMKYPITA
LRMKWMMMMNYPETA

SEQ ID NO: 243888 - protein, 15 aa, Artificial Sequence
  Description of Artificial Sequence: Synthetic peptide
  Seed: LRMKWMMAMKYPITA
LRMKWMMMMNYPFTA

SEQ ID NO: 243889 - protein, 15 aa, Artificial Sequence
  Description of Artificial Sequence: Synthetic peptide
  Seed: LRMKWMMAMKYPITA
LRMKWMMMMNYPGTA

SEQ ID NO: 243890 - protein, 15 aa, Artificial Sequence
  Description of Artificial Sequence: Synthetic peptide
  Seed: LRMKWMMAMKYPITA
LRMKWMMMMNYPHTA

SEQ ID NO: 243891 - protein, 15 aa, Artificial Sequence
  Description of Artificial Sequence: Synthetic peptide
  Seed: LRMKWMMAMKYPITA
LRMKWMMMMNYPITA

SEQ ID NO: 243892 - protein, 15 aa, Artificial Sequence
  Description of Artificial Sequence: Synthetic peptide
  Seed: LRMKWMMAMKYPITA
LRMKWMMMMNYPKTA

SEQ ID NO: 243893 - protein, 15 aa, Artificial Sequence
  Description of Artificial Sequence: Synthetic peptide
  Seed: LRMKWMMAMKYPITA
LRMKWMMMMNYPLTA

SEQ ID NO: 243894 - protein, 15 aa, Artificial Sequence
  Description of Artificial Sequence: Synthetic peptide
  Seed: LRMKWMMAMKYPITA
LRMKWMMMMNYPMTA

SEQ ID NO: 243895 - protein, 15 aa, Artificial Sequence
  Description of Artificial Sequence: Synthetic peptide
  Seed: LRMKWMMAMKYPITA
LRMKWMMMMNYPNTA

SEQ ID NO: 243896 - protein, 15 aa, Artificial Sequence
  Description of Artificial Sequence: Synthetic peptide
  Seed: LRMKWMMAMKYPITA
LRMKWMMMMNYPPTA

SEQ ID NO: 243897 - protein, 15 aa, Artificial Sequence
  Description of Artificial Sequence: Synthetic peptide
  Seed: LRMKWMMAMKYPITA
LRMKWMMMMNYPQTA

SEQ ID NO: 243898 - protein, 15 aa, Artificial Sequence
  Description of Artificial Sequence: Synthetic peptide
  Seed: LRMKWMMAMKYPITA
LRMKWMMMMNYPRTA

SEQ ID NO: 243899 - protein, 15 aa, Artificial Sequence
  Description of Artificial Sequence: Synthetic peptide
  Seed: LRMKWMMAMKYPITA
LRMKWMMMMNYPSTA

SEQ ID NO: 243900 - protein, 15 aa, Artificial Sequence
  Description of Artificial Sequence: Synthetic peptide
  Seed: LRMKWMMAMKYPITA
LRMKWMMMMNYPTTA

SEQ ID NO: 243901 - protein, 15 aa, Artificial Sequence
  Description of Artificial Sequence: Synthetic peptide
  Seed: LRMKWMMAMKYPITA
LRMKWMMMMNYPVTA

SEQ ID NO: 243902 - protein, 15 aa, Artificial Sequence
  Description of Artificial Sequence: Synthetic peptide
  Seed: LRMKWMMAMKYPITA
LRMKWMMMMNYPYTA

SEQ ID NO: 243903 - protein, 15 aa, Artificial Sequence
  Description of Artificial Sequence: Synthetic peptide
  Seed: LRMKWMMAMKYPITA
LRMKWMMMMPYPATA

SEQ ID NO: 243904 - protein, 15 aa, Artificial Sequence
  Description of Artificial Sequence: Synthetic peptide
  Seed: LRMKWMMAMKYPITA
LRMKWMMMMPYPCTA

SEQ ID NO: 243905 - protein, 15 aa, Artificial Sequence
  Description of Artificial Sequence: Synthetic peptide
  Seed: LRMKWMMAMKYPITA
LRMKWMMMMPYPDTA

SEQ ID NO: 243906 - protein, 15 aa, Artificial Sequence
  Description of Artificial Sequence: Synthetic peptide
  Seed: LRMKWMMAMKYPITA
LRMKWMMMMPYPETA

SEQ ID NO: 243907 - protein, 15 aa, Artificial Sequence
  Description of Artificial Sequence: Synthetic peptide
  Seed: LRMKWMMAMKYPITA
LRMKWMMMMPYPFTA

SEQ ID NO: 243908 - protein, 15 aa, Artificial Sequence
  Description of Artificial Sequence: Synthetic peptide
  Seed: LRMKWMMAMKYPITA
LRMKWMMMMPYPGTA

SEQ ID NO: 243909 - protein, 15 aa, Artificial Sequence
  Description of Artificial Sequence: Synthetic peptide
  Seed: LRMKWMMAMKYPITA
LRMKWMMMMPYPHTA

SEQ ID NO: 243910 - protein, 15 aa, Artificial Sequence
  Description of Artificial Sequence: Synthetic peptide
  Seed: LRMKWMMAMKYPITA
LRMKWMMMMPYPITA

SEQ ID NO: 243911 - protein, 15 aa, Artificial Sequence
  Description of Artificial Sequence: Synthetic peptide
  Seed: LRMKWMMAMKYPITA
LRMKWMMMMPYPKTA

SEQ ID NO: 243912 - protein, 15 aa, Artificial Sequence
  Description of Artificial Sequence: Synthetic peptide
  Seed: LRMKWMMAMKYPITA
LRMKWMMMMPYPLTA

SEQ ID NO: 243913 - protein, 15 aa, Artificial Sequence
  Description of Artificial Sequence: Synthetic peptide
  Seed: LRMKWMMAMKYPITA
LRMKWMMMMPYPMTA

SEQ ID NO: 243914 - protein, 15 aa, Artificial Sequence
  Description of Artificial Sequence: Synthetic peptide
  Seed: LRMKWMMAMKYPITA
LRMKWMMMMPYPNTA

SEQ ID NO: 243915 - protein, 15 aa, Artificial Sequence
  Description of Artificial Sequence: Synthetic peptide
  Seed: LRMKWMMAMKYPITA
LRMKWMMMMPYPPTA

SEQ ID NO: 243916 - protein, 15 aa, Artificial Sequence
  Description of Artificial Sequence: Synthetic peptide
  Seed: LRMKWMMAMKYPITA
LRMKWMMMMPYPQTA

SEQ ID NO: 243917 - protein, 15 aa, Artificial Sequence
  Description of Artificial Sequence: Synthetic peptide
  Seed: LRMKWMMAMKYPITA
LRMKWMMMMPYPRTA

SEQ ID NO: 243918 - protein, 15 aa, Artificial Sequence
  Description of Artificial Sequence: Synthetic peptide
  Seed: LRMKWMMAMKYPITA
LRMKWMMMMPYPSTA

SEQ ID NO: 243919 - protein, 15 aa, Artificial Sequence
  Description of Artificial Sequence: Synthetic peptide
  Seed: LRMKWMMAMKYPITA
LRMKWMMMMPYPTTA

SEQ ID NO: 243920 - protein, 15 aa, Artificial Sequence
  Description of Artificial Sequence: Synthetic peptide
  Seed: LRMKWMMAMKYPITA
LRMKWMMMMPYPVTA

SEQ ID NO: 243921 - protein, 15 aa, Artificial Sequence
  Description of Artificial Sequence: Synthetic peptide
  Seed: LRMKWMMAMKYPITA
LRMKWMMMMPYPWTA

SEQ ID NO: 243922 - protein, 15 aa, Artificial Sequence
  Description of Artificial Sequence: Synthetic peptide
  Seed: LRMKWMMAMKYPITA
LRMKWMMMMPYPYTA

SEQ ID NO: 243923 - protein, 15 aa, Artificial Sequence
  Description of Artificial Sequence: Synthetic peptide
  Seed: LRMKWMMAMKYPITA
LRMKWMMMMQYPATA

SEQ ID NO: 243924 - protein, 15 aa, Artificial Sequence
  Description of Artificial Sequence: Synthetic peptide
  Seed: LRMKWMMAMKYPITA
LRMKWMMMMQYPCTA

SEQ ID NO: 243925 - protein, 15 aa, Artificial Sequence
  Description of Artificial Sequence: Synthetic peptide
  Seed: LRMKWMMAMKYPITA
LRMKWMMMMQYPFTA

SEQ ID NO: 243926 - protein, 15 aa, Artificial Sequence
  Description of Artificial Sequence: Synthetic peptide
  Seed: LRMKWMMAMKYPITA
LRMKWMMMMQYPGTA

SEQ ID NO: 243927 - protein, 15 aa, Artificial Sequence
  Description of Artificial Sequence: Synthetic peptide
  Seed: LRMKWMMAMKYPITA
LRMKWMMMMQYPHTA

SEQ ID NO: 243928 - protein, 15 aa, Artificial Sequence
  Description of Artificial Sequence: Synthetic peptide
  Seed: LRMKWMMAMKYPITA
LRMKWMMMMQYPITA

SEQ ID NO: 243929 - protein, 15 aa, Artificial Sequence
  Description of Artificial Sequence: Synthetic peptide
  Seed: LRMKWMMAMKYPITA
LRMKWMMMMQYPLTA

SEQ ID NO: 243930 - protein, 15 aa, Artificial Sequence
  Description of Artificial Sequence: Synthetic peptide
  Seed: LRMKWMMAMKYPITA
LRMKWMMMMQYPMTA

SEQ ID NO: 243931 - protein, 15 aa, Artificial Sequence
  Description of Artificial Sequence: Synthetic peptide
  Seed: LRMKWMMAMKYPITA
LRMKWMMMMQYPNTA

SEQ ID NO: 243932 - protein, 15 aa, Artificial Sequence
  Description of Artificial Sequence: Synthetic peptide
  Seed: LRMKWMMAMKYPITA
LRMKWMMMMQYPQTA

SEQ ID NO: 243933 - protein, 15 aa, Artificial Sequence
  Description of Artificial Sequence: Synthetic peptide
  Seed: LRMKWMMAMKYPITA
LRMKWMMMMQYPRTA

SEQ ID NO: 243934 - protein, 15 aa, Artificial Sequence
  Description of Artificial Sequence: Synthetic peptide
  Seed: LRMKWMMAMKYPITA
LRMKWMMMMQYPSTA

SEQ ID NO: 243935 - protein, 15 aa, Artificial Sequence
  Description of Artificial Sequence: Synthetic peptide
  Seed: LRMKWMMAMKYPITA
LRMKWMMMMQYPTTA

SEQ ID NO: 243936 - protein, 15 aa, Artificial Sequence
  Description of Artificial Sequence: Synthetic peptide
  Seed: LRMKWMMAMKYPITA
LRMKWMMMMQYPVTA

SEQ ID NO: 243937 - protein, 15 aa, Artificial Sequence
  Description of Artificial Sequence: Synthetic peptide
  Seed: LRMKWMMAMKYPITA
LRMKWMMMMRYPATA

SEQ ID NO: 243938 - protein, 15 aa, Artificial Sequence
  Description of Artificial Sequence: Synthetic peptide
  Seed: LRMKWMMAMKYPITA
LRMKWMMMMRYPDTA

SEQ ID NO: 243939 - protein, 15 aa, Artificial Sequence
  Description of Artificial Sequence: Synthetic peptide
  Seed: LRMKWMMAMKYPITA
LRMKWMMMMRYPETA

SEQ ID NO: 243940 - protein, 15 aa, Artificial Sequence
  Description of Artificial Sequence: Synthetic peptide
  Seed: LRMKWMMAMKYPITA
LRMKWMMMMRYPFTA

SEQ ID NO: 243941 - protein, 15 aa, Artificial Sequence
  Description of Artificial Sequence: Synthetic peptide
  Seed: LRMKWMMAMKYPITA
LRMKWMMMMRYPGTA

SEQ ID NO: 243942 - protein, 15 aa, Artificial Sequence
  Description of Artificial Sequence: Synthetic peptide
  Seed: LRMKWMMAMKYPITA
LRMKWMMMMRYPHTA

SEQ ID NO: 243943 - protein, 15 aa, Artificial Sequence
  Description of Artificial Sequence: Synthetic peptide
  Seed: LRMKWMMAMKYPITA
LRMKWMMMMRYPITA

SEQ ID NO: 243944 - protein, 15 aa, Artificial Sequence
  Description of Artificial Sequence: Synthetic peptide
  Seed: LRMKWMMAMKYPITA
LRMKWMMMMRYPKTA

SEQ ID NO: 243945 - protein, 15 aa, Artificial Sequence
  Description of Artificial Sequence: Synthetic peptide
  Seed: LRMKWMMAMKYPITA
LRMKWMMMMRYPLTA

SEQ ID NO: 243946 - protein, 15 aa, Artificial Sequence
  Description of Artificial Sequence: Synthetic peptide
  Seed: LRMKWMMAMKYPITA
LRMKWMMMMRYPMTA

SEQ ID NO: 243947 - protein, 15 aa, Artificial Sequence
  Description of Artificial Sequence: Synthetic peptide
  Seed: LRMKWMMAMKYPITA
LRMKWMMMMRYPNTA

SEQ ID NO: 243948 - protein, 15 aa, Artificial Sequence
  Description of Artificial Sequence: Synthetic peptide
  Seed: LRMKWMMAMKYPITA
LRMKWMMMMRYPPTA

SEQ ID NO: 243949 - protein, 15 aa, Artificial Sequence
  Description of Artificial Sequence: Synthetic peptide
  Seed: LRMKWMMAMKYPITA
LRMKWMMMMRYPQTA

SEQ ID NO: 243950 - protein, 15 aa, Artificial Sequence
  Description of Artificial Sequence: Synthetic peptide
  Seed: LRMKWMMAMKYPITA
LRMKWMMMMRYPRTA

SEQ ID NO: 243951 - protein, 15 aa, Artificial Sequence
  Description of Artificial Sequence: Synthetic peptide
  Seed: LRMKWMMAMKYPITA
LRMKWMMMMRYPSTA

SEQ ID NO: 243952 - protein, 15 aa, Artificial Sequence
  Description of Artificial Sequence: Synthetic peptide
  Seed: LRMKWMMAMKYPITA
LRMKWMMMMRYPTTA

SEQ ID NO: 243953 - protein, 15 aa, Artificial Sequence
  Description of Artificial Sequence: Synthetic peptide
  Seed: LRMKWMMAMKYPITA
LRMKWMMMMRYPVTA

SEQ ID NO: 243954 - protein, 15 aa, Artificial Sequence
  Description of Artificial Sequence: Synthetic peptide
  Seed: LRMKWMMAMKYPITA
LRMKWMMMMRYPYTA

SEQ ID NO: 243955 - protein, 15 aa, Artificial Sequence
  Description of Artificial Sequence: Synthetic peptide
  Seed: LRMKWMMAMKYPITA
LRMKWMMMMSYPATA

SEQ ID NO: 243956 - protein, 15 aa, Artificial Sequence
  Description of Artificial Sequence: Synthetic peptide
  Seed: LRMKWMMAMKYPITA
LRMKWMMMMSYPCTA

SEQ ID NO: 243957 - protein, 15 aa, Artificial Sequence
  Description of Artificial Sequence: Synthetic peptide
  Seed: LRMKWMMAMKYPITA
LRMKWMMMMSYPDTA

SEQ ID NO: 243958 - protein, 15 aa, Artificial Sequence
  Description of Artificial Sequence: Synthetic peptide
  Seed: LRMKWMMAMKYPITA
LRMKWMMMMSYPETA

SEQ ID NO: 243959 - protein, 15 aa, Artificial Sequence
  Description of Artificial Sequence: Synthetic peptide
  Seed: LRMKWMMAMKYPITA
LRMKWMMMMSYPFTA

SEQ ID NO: 243960 - protein, 15 aa, Artificial Sequence
  Description of Artificial Sequence: Synthetic peptide
  Seed: LRMKWMMAMKYPITA
LRMKWMMMMSYPGTA

SEQ ID NO: 243961 - protein, 15 aa, Artificial Sequence
  Description of Artificial Sequence: Synthetic peptide
  Seed: LRMKWMMAMKYPITA
LRMKWMMMMSYPHTA

SEQ ID NO: 243962 - protein, 15 aa, Artificial Sequence
  Description of Artificial Sequence: Synthetic peptide
  Seed: LRMKWMMAMKYPITA
LRMKWMMMMSYPITA

SEQ ID NO: 243963 - protein, 15 aa, Artificial Sequence
  Description of Artificial Sequence: Synthetic peptide
  Seed: LRMKWMMAMKYPITA
LRMKWMMMMSYPKTA

SEQ ID NO: 243964 - protein, 15 aa, Artificial Sequence
  Description of Artificial Sequence: Synthetic peptide
  Seed: LRMKWMMAMKYPITA
LRMKWMMMMSYPLTA

SEQ ID NO: 243965 - protein, 15 aa, Artificial Sequence
  Description of Artificial Sequence: Synthetic peptide
  Seed: LRMKWMMAMKYPITA
LRMKWMMMMSYPMTA

SEQ ID NO: 243966 - protein, 15 aa, Artificial Sequence
  Description of Artificial Sequence: Synthetic peptide
  Seed: LRMKWMMAMKYPITA
LRMKWMMMMSYPNTA

SEQ ID NO: 243967 - protein, 15 aa, Artificial Sequence
  Description of Artificial Sequence: Synthetic peptide
  Seed: LRMKWMMAMKYPITA
LRMKWMMMMSYPPTA

SEQ ID NO: 243968 - protein, 15 aa, Artificial Sequence
  Description of Artificial Sequence: Synthetic peptide
  Seed: LRMKWMMAMKYPITA
LRMKWMMMMSYPQTA

SEQ ID NO: 243969 - protein, 15 aa, Artificial Sequence
  Description of Artificial Sequence: Synthetic peptide
  Seed: LRMKWMMAMKYPITA
LRMKWMMMMSYPRTA

SEQ ID NO: 243970 - protein, 15 aa, Artificial Sequence
  Description of Artificial Sequence: Synthetic peptide
  Seed: LRMKWMMAMKYPITA
LRMKWMMMMSYPSTA

SEQ ID NO: 243971 - protein, 15 aa, Artificial Sequence
  Description of Artificial Sequence: Synthetic peptide
  Seed: LRMKWMMAMKYPITA
LRMKWMMMMSYPTTA

SEQ ID NO: 243972 - protein, 15 aa, Artificial Sequence
  Description of Artificial Sequence: Synthetic peptide
  Seed: LRMKWMMAMKYPITA
LRMKWMMMMSYPVTA

SEQ ID NO: 243973 - protein, 15 aa, Artificial Sequence
  Description of Artificial Sequence: Synthetic peptide
  Seed: LRMKWMMAMKYPITA
LRMKWMMMMSYPWTA

SEQ ID NO: 243974 - protein, 15 aa, Artificial Sequence
  Description of Artificial Sequence: Synthetic peptide
  Seed: LRMKWMMAMKYPITA
LRMKWMMMMSYPYTA

SEQ ID NO: 243975 - protein, 15 aa, Artificial Sequence
  Description of Artificial Sequence: Synthetic peptide
  Seed: LRMKWMMAMKYPITA
LRMKWMMMMTYPATA

SEQ ID NO: 243976 - protein, 15 aa, Artificial Sequence
  Description of Artificial Sequence: Synthetic peptide
  Seed: LRMKWMMAMKYPITA
LRMKWMMMMTYPCTA

SEQ ID NO: 243977 - protein, 15 aa, Artificial Sequence
  Description of Artificial Sequence: Synthetic peptide
  Seed: LRMKWMMAMKYPITA
LRMKWMMMMTYPDTA

SEQ ID NO: 243978 - protein, 15 aa, Artificial Sequence
  Description of Artificial Sequence: Synthetic peptide
  Seed: LRMKWMMAMKYPITA
LRMKWMMMMTYPETA

SEQ ID NO: 243979 - protein, 15 aa, Artificial Sequence
  Description of Artificial Sequence: Synthetic peptide
  Seed: LRMKWMMAMKYPITA
LRMKWMMMMTYPFTA

SEQ ID NO: 243980 - protein, 15 aa, Artificial Sequence
  Description of Artificial Sequence: Synthetic peptide
  Seed: LRMKWMMAMKYPITA
LRMKWMMMMTYPGTA

SEQ ID NO: 243981 - protein, 15 aa, Artificial Sequence
  Description of Artificial Sequence: Synthetic peptide
  Seed: LRMKWMMAMKYPITA
LRMKWMMMMTYPHTA

SEQ ID NO: 243982 - protein, 15 aa, Artificial Sequence
  Description of Artificial Sequence: Synthetic peptide
  Seed: LRMKWMMAMKYPITA
LRMKWMMMMTYPITA

SEQ ID NO: 243983 - protein, 15 aa, Artificial Sequence
  Description of Artificial Sequence: Synthetic peptide
  Seed: LRMKWMMAMKYPITA
LRMKWMMMMTYPKTA

SEQ ID NO: 243984 - protein, 15 aa, Artificial Sequence
  Description of Artificial Sequence: Synthetic peptide
  Seed: LRMKWMMAMKYPITA
LRMKWMMMMTYPLTA

SEQ ID NO: 243985 - protein, 15 aa, Artificial Sequence
  Description of Artificial Sequence: Synthetic peptide
  Seed: LRMKWMMAMKYPITA
LRMKWMMMMTYPMTA

SEQ ID NO: 243986 - protein, 15 aa, Artificial Sequence
  Description of Artificial Sequence: Synthetic peptide
  Seed: LRMKWMMAMKYPITA
LRMKWMMMMTYPNTA

SEQ ID NO: 243987 - protein, 15 aa, Artificial Sequence
  Description of Artificial Sequence: Synthetic peptide
  Seed: LRMKWMMAMKYPITA
LRMKWMMMMTYPPTA

SEQ ID NO: 243988 - protein, 15 aa, Artificial Sequence
  Description of Artificial Sequence: Synthetic peptide
  Seed: LRMKWMMAMKYPITA
LRMKWMMMMTYPQTA

SEQ ID NO: 243989 - protein, 15 aa, Artificial Sequence
  Description of Artificial Sequence: Synthetic peptide
  Seed: LRMKWMMAMKYPITA
LRMKWMMMMTYPRTA

SEQ ID NO: 243990 - protein, 15 aa, Artificial Sequence
  Description of Artificial Sequence: Synthetic peptide
  Seed: LRMKWMMAMKYPITA
LRMKWMMMMTYPSTA

SEQ ID NO: 243991 - protein, 15 aa, Artificial Sequence
  Description of Artificial Sequence: Synthetic peptide
  Seed: LRMKWMMAMKYPITA
LRMKWMMMMTYPTTA

SEQ ID NO: 243992 - protein, 15 aa, Artificial Sequence
  Description of Artificial Sequence: Synthetic peptide
  Seed: LRMKWMMAMKYPITA
LRMKWMMMMTYPVTA

SEQ ID NO: 243993 - protein, 15 aa, Artificial Sequence
  Description of Artificial Sequence: Synthetic peptide
  Seed: LRMKWMMAMKYPITA
LRMKWMMMMTYPWTA

SEQ ID NO: 243994 - protein, 15 aa, Artificial Sequence
  Description of Artificial Sequence: Synthetic peptide
  Seed: LRMKWMMAMKYPITA
LRMKWMMMMTYPYTA

SEQ ID NO: 243995 - protein, 15 aa, Artificial Sequence
  Description of Artificial Sequence: Synthetic peptide
  Seed: LRMKWMMAMKYPITA
LRMKWMMMMVYPATA

SEQ ID NO: 243996 - protein, 15 aa, Artificial Sequence
  Description of Artificial Sequence: Synthetic peptide
  Seed: LRMKWMMAMKYPITA
LRMKWMMMMVYPCTA

SEQ ID NO: 243997 - protein, 15 aa, Artificial Sequence
  Description of Artificial Sequence: Synthetic peptide
  Seed: LRMKWMMAMKYPITA
LRMKWMMMMVYPDTA

SEQ ID NO: 243998 - protein, 15 aa, Artificial Sequence
  Description of Artificial Sequence: Synthetic peptide
  Seed: LRMKWMMAMKYPITA
LRMKWMMMMVYPETA

SEQ ID NO: 243999 - protein, 15 aa, Artificial Sequence
  Description of Artificial Sequence: Synthetic peptide
  Seed: LRMKWMMAMKYPITA
LRMKWMMMMVYPFTA

SEQ ID NO: 244000 - protein, 15 aa, Artificial Sequence
  Description of Artificial Sequence: Synthetic peptide
  Seed: LRMKWMMAMKYPITA
LRMKWMMMMVYPGTA

SEQ ID NO: 244001 - protein, 15 aa, Artificial Sequence
  Description of Artificial Sequence: Synthetic peptide
  Seed: LRMKWMMAMKYPITA
LRMKWMMMMVYPHTA

SEQ ID NO: 244002 - protein, 15 aa, Artificial Sequence
  Description of Artificial Sequence: Synthetic peptide
  Seed: LRMKWMMAMKYPITA
LRMKWMMMMVYPITA

SEQ ID NO: 244003 - protein, 15 aa, Artificial Sequence
  Description of Artificial Sequence: Synthetic peptide
  Seed: LRMKWMMAMKYPITA
LRMKWMMMMVYPKTA

SEQ ID NO: 244004 - protein, 15 aa, Artificial Sequence
  Description of Artificial Sequence: Synthetic peptide
  Seed: LRMKWMMAMKYPITA
LRMKWMMMMVYPLTA

SEQ ID NO: 244005 - protein, 15 aa, Artificial Sequence
  Description of Artificial Sequence: Synthetic peptide
  Seed: LRMKWMMAMKYPITA
LRMKWMMMMVYPMTA

SEQ ID NO: 244006 - protein, 15 aa, Artificial Sequence
  Description of Artificial Sequence: Synthetic peptide
  Seed: LRMKWMMAMKYPITA
LRMKWMMMMVYPNTA

SEQ ID NO: 244007 - protein, 15 aa, Artificial Sequence
  Description of Artificial Sequence: Synthetic peptide
  Seed: LRMKWMMAMKYPITA
LRMKWMMMMVYPPTA

SEQ ID NO: 244008 - protein, 15 aa, Artificial Sequence
  Description of Artificial Sequence: Synthetic peptide
  Seed: LRMKWMMAMKYPITA
LRMKWMMMMVYPQTA

SEQ ID NO: 244009 - protein, 15 aa, Artificial Sequence
  Description of Artificial Sequence: Synthetic peptide
  Seed: LRMKWMMAMKYPITA
LRMKWMMMMVYPRTA

SEQ ID NO: 244010 - protein, 15 aa, Artificial Sequence
  Description of Artificial Sequence: Synthetic peptide
  Seed: LRMKWMMAMKYPITA
LRMKWMMMMVYPSTA

SEQ ID NO: 244011 - protein, 15 aa, Artificial Sequence
  Description of Artificial Sequence: Synthetic peptide
  Seed: LRMKWMMAMKYPITA
LRMKWMMMMVYPTTA

SEQ ID NO: 244012 - protein, 15 aa, Artificial Sequence
  Description of Artificial Sequence: Synthetic peptide
  Seed: LRMKWMMAMKYPITA
LRMKWMMMMVYPVTA

SEQ ID NO: 244013 - protein, 15 aa, Artificial Sequence
  Description of Artificial Sequence: Synthetic peptide
  Seed: LRMKWMMAMKYPITA
LRMKWMMMMVYPYTA

SEQ ID NO: 244014 - protein, 15 aa, Artificial Sequence
  Description of Artificial Sequence: Synthetic peptide
  Seed: LRMKWMMAMKYPITA
LRMKWMMMMWYPATA

SEQ ID NO: 244015 - protein, 15 aa, Artificial Sequence
  Description of Artificial Sequence: Synthetic peptide
  Seed: LRMKWMMAMKYPITA
LRMKWMMMMWYPVTA

SEQ ID NO: 244016 - protein, 15 aa, Artificial Sequence
  Description of Artificial Sequence: Synthetic peptide
  Seed: LRMKWMMAMKYPITA
LRMKWMMMMYYPATA

SEQ ID NO: 244017 - protein, 15 aa, Artificial Sequence
  Description of Artificial Sequence: Synthetic peptide
  Seed: LRMKWMMAMKYPITA
LRMKWMMMMYYPITA

SEQ ID NO: 244018 - protein, 15 aa, Artificial Sequence
  Description of Artificial Sequence: Synthetic peptide
  Seed: LRMKWMMAMKYPITA
LRMKWMMMMYYPLTA

SEQ ID NO: 244019 - protein, 15 aa, Artificial Sequence
  Description of Artificial Sequence: Synthetic peptide
  Seed: LRMKWMMAMKYPITA
LRMKWMMMMYYPMTA

SEQ ID NO: 244020 - protein, 15 aa, Artificial Sequence
  Description of Artificial Sequence: Synthetic peptide
  Seed: LRMKWMMAMKYPITA
LRMKWMMMMYYPSTA

SEQ ID NO: 244021 - protein, 15 aa, Artificial Sequence
  Description of Artificial Sequence: Synthetic peptide
  Seed: LRMKWMMAMKYPITA
LRMKWMMMMYYPVTA

SEQ ID NO: 244022 - protein, 15 aa, Artificial Sequence
  Description of Artificial Sequence: Synthetic peptide
  Seed: LRMKWMMAMKYPITA
LRMKWMMNMAYPATA

SEQ ID NO: 244023 - protein, 15 aa, Artificial Sequence
  Description of Artificial Sequence: Synthetic peptide
  Seed: LRMKWMMAMKYPITA
LRMKWMMNMAYPCTA

SEQ ID NO: 244024 - protein, 15 aa, Artificial Sequence
  Description of Artificial Sequence: Synthetic peptide
  Seed: LRMKWMMAMKYPITA
LRMKWMMNMAYPDTA

SEQ ID NO: 244025 - protein, 15 aa, Artificial Sequence
  Description of Artificial Sequence: Synthetic peptide
  Seed: LRMKWMMAMKYPITA
LRMKWMMNMAYPETA

SEQ ID NO: 244026 - protein, 15 aa, Artificial Sequence
  Description of Artificial Sequence: Synthetic peptide
  Seed: LRMKWMMAMKYPITA
LRMKWMMNMAYPFTA

SEQ ID NO: 244027 - protein, 15 aa, Artificial Sequence
  Description of Artificial Sequence: Synthetic peptide
  Seed: LRMKWMMAMKYPITA
LRMKWMMNMAYPGTA

SEQ ID NO: 244028 - protein, 15 aa, Artificial Sequence
  Description of Artificial Sequence: Synthetic peptide
  Seed: LRMKWMMAMKYPITA
LRMKWMMNMAYPHTA

SEQ ID NO: 244029 - protein, 15 aa, Artificial Sequence
  Description of Artificial Sequence: Synthetic peptide
  Seed: LRMKWMMAMKYPITA
LRMKWMMNMAYPITA

SEQ ID NO: 244030 - protein, 15 aa, Artificial Sequence
  Description of Artificial Sequence: Synthetic peptide
  Seed: LRMKWMMAMKYPITA
LRMKWMMNMAYPKTA

SEQ ID NO: 244031 - protein, 15 aa, Artificial Sequence
  Description of Artificial Sequence: Synthetic peptide
  Seed: LRMKWMMAMKYPITA
LRMKWMMNMAYPLTA

SEQ ID NO: 244032 - protein, 15 aa, Artificial Sequence
  Description of Artificial Sequence: Synthetic peptide
  Seed: LRMKWMMAMKYPITA
LRMKWMMNMAYPMTA

SEQ ID NO: 244033 - protein, 15 aa, Artificial Sequence
  Description of Artificial Sequence: Synthetic peptide
  Seed: LRMKWMMAMKYPITA
LRMKWMMNMAYPNTA

SEQ ID NO: 244034 - protein, 15 aa, Artificial Sequence
  Description of Artificial Sequence: Synthetic peptide
  Seed: LRMKWMMAMKYPITA
LRMKWMMNMAYPPTA

SEQ ID NO: 244035 - protein, 15 aa, Artificial Sequence
  Description of Artificial Sequence: Synthetic peptide
  Seed: LRMKWMMAMKYPITA
LRMKWMMNMAYPQTA

SEQ ID NO: 244036 - protein, 15 aa, Artificial Sequence
  Description of Artificial Sequence: Synthetic peptide
  Seed: LRMKWMMAMKYPITA
LRMKWMMNMAYPRTA

SEQ ID NO: 244037 - protein, 15 aa, Artificial Sequence
  Description of Artificial Sequence: Synthetic peptide
  Seed: LRMKWMMAMKYPITA
LRMKWMMNMAYPSTA

SEQ ID NO: 244038 - protein, 15 aa, Artificial Sequence
  Description of Artificial Sequence: Synthetic peptide
  Seed: LRMKWMMAMKYPITA
LRMKWMMNMAYPTTA

SEQ ID NO: 244039 - protein, 15 aa, Artificial Sequence
  Description of Artificial Sequence: Synthetic peptide
  Seed: LRMKWMMAMKYPITA
LRMKWMMNMAYPVTA

SEQ ID NO: 244040 - protein, 15 aa, Artificial Sequence
  Description of Artificial Sequence: Synthetic peptide
  Seed: LRMKWMMAMKYPITA
LRMKWMMNMAYPWTA

SEQ ID NO: 244041 - protein, 15 aa, Artificial Sequence
  Description of Artificial Sequence: Synthetic peptide
  Seed: LRMKWMMAMKYPITA
LRMKWMMNMAYPYTA

SEQ ID NO: 244042 - protein, 15 aa, Artificial Sequence
  Description of Artificial Sequence: Synthetic peptide
  Seed: LRMKWMMAMKYPITA
LRMKWMMNMCYPITA

SEQ ID NO: 244043 - protein, 15 aa, Artificial Sequence
  Description of Artificial Sequence: Synthetic peptide
  Seed: LRMKWMMAMKYPITA
LRMKWMMNMCYPLTA

SEQ ID NO: 244044 - protein, 15 aa, Artificial Sequence
  Description of Artificial Sequence: Synthetic peptide
  Seed: LRMKWMMAMKYPITA
LRMKWMMNMCYPVTA

SEQ ID NO: 244045 - protein, 15 aa, Artificial Sequence
  Description of Artificial Sequence: Synthetic peptide
  Seed: LRMKWMMAMKYPITA
LRMKWMMNMDYPITA

SEQ ID NO: 244046 - protein, 15 aa, Artificial Sequence
  Description of Artificial Sequence: Synthetic peptide
  Seed: LRMKWMMAMKYPITA
LRMKWMMNMDYPLTA

SEQ ID NO: 244047 - protein, 15 aa, Artificial Sequence
  Description of Artificial Sequence: Synthetic peptide
  Seed: LRMKWMMAMKYPITA
LRMKWMMNMDYPVTA

SEQ ID NO: 244048 - protein, 15 aa, Artificial Sequence
  Description of Artificial Sequence: Synthetic peptide
  Seed: LRMKWMMAMKYPITA
LRMKWMMNMEYPITA

SEQ ID NO: 244049 - protein, 15 aa, Artificial Sequence
  Description of Artificial Sequence: Synthetic peptide
  Seed: LRMKWMMAMKYPITA
LRMKWMMNMEYPVTA

SEQ ID NO: 244050 - protein, 15 aa, Artificial Sequence
  Description of Artificial Sequence: Synthetic peptide
  Seed: LRMKWMMAMKYPITA
LRMKWMMNMFYPFTA

SEQ ID NO: 244051 - protein, 15 aa, Artificial Sequence
  Description of Artificial Sequence: Synthetic peptide
  Seed: LRMKWMMAMKYPITA
LRMKWMMNMFYPITA

SEQ ID NO: 244052 - protein, 15 aa, Artificial Sequence
  Description of Artificial Sequence: Synthetic peptide
  Seed: LRMKWMMAMKYPITA
LRMKWMMNMFYPLTA

SEQ ID NO: 244053 - protein, 15 aa, Artificial Sequence
  Description of Artificial Sequence: Synthetic peptide
  Seed: LRMKWMMAMKYPITA
LRMKWMMNMFYPVTA

SEQ ID NO: 244054 - protein, 15 aa, Artificial Sequence
  Description of Artificial Sequence: Synthetic peptide
  Seed: LRMKWMMAMKYPITA
LRMKWMMNMGYPATA

SEQ ID NO: 244055 - protein, 15 aa, Artificial Sequence
  Description of Artificial Sequence: Synthetic peptide
  Seed: LRMKWMMAMKYPITA
LRMKWMMNMGYPCTA

SEQ ID NO: 244056 - protein, 15 aa, Artificial Sequence
  Description of Artificial Sequence: Synthetic peptide
  Seed: LRMKWMMAMKYPITA
LRMKWMMNMGYPFTA

SEQ ID NO: 244057 - protein, 15 aa, Artificial Sequence
  Description of Artificial Sequence: Synthetic peptide
  Seed: LRMKWMMAMKYPITA
LRMKWMMNMGYPGTA

SEQ ID NO: 244058 - protein, 15 aa, Artificial Sequence
  Description of Artificial Sequence: Synthetic peptide
  Seed: LRMKWMMAMKYPITA
LRMKWMMNMGYPITA

SEQ ID NO: 244059 - protein, 15 aa, Artificial Sequence
  Description of Artificial Sequence: Synthetic peptide
  Seed: LRMKWMMAMKYPITA
LRMKWMMNMGYPLTA

SEQ ID NO: 244060 - protein, 15 aa, Artificial Sequence
  Description of Artificial Sequence: Synthetic peptide
  Seed: LRMKWMMAMKYPITA
LRMKWMMNMGYPMTA

SEQ ID NO: 244061 - protein, 15 aa, Artificial Sequence
  Description of Artificial Sequence: Synthetic peptide
  Seed: LRMKWMMAMKYPITA
LRMKWMMNMGYPNTA

SEQ ID NO: 244062 - protein, 15 aa, Artificial Sequence
  Description of Artificial Sequence: Synthetic peptide
  Seed: LRMKWMMAMKYPITA
LRMKWMMNMGYPSTA

SEQ ID NO: 244063 - protein, 15 aa, Artificial Sequence
  Description of Artificial Sequence: Synthetic peptide
  Seed: LRMKWMMAMKYPITA
LRMKWMMNMGYPTTA

SEQ ID NO: 244064 - protein, 15 aa, Artificial Sequence
  Description of Artificial Sequence: Synthetic peptide
  Seed: LRMKWMMAMKYPITA
LRMKWMMNMGYPVTA

SEQ ID NO: 244065 - protein, 15 aa, Artificial Sequence
  Description of Artificial Sequence: Synthetic peptide
  Seed: LRMKWMMAMKYPITA
LRMKWMMNMGYPWTA

SEQ ID NO: 244066 - protein, 15 aa, Artificial Sequence
  Description of Artificial Sequence: Synthetic peptide
  Seed: LRMKWMMAMKYPITA
LRMKWMMNMGYPYTA

SEQ ID NO: 244067 - protein, 15 aa, Artificial Sequence
  Description of Artificial Sequence: Synthetic peptide
  Seed: LRMKWMMAMKYPITA
LRMKWMMNMHYPFTA

SEQ ID NO: 244068 - protein, 15 aa, Artificial Sequence
  Description of Artificial Sequence: Synthetic peptide
  Seed: LRMKWMMAMKYPITA
LRMKWMMNMHYPITA

SEQ ID NO: 244069 - protein, 15 aa, Artificial Sequence
  Description of Artificial Sequence: Synthetic peptide
  Seed: LRMKWMMAMKYPITA
LRMKWMMNMHYPLTA

SEQ ID NO: 244070 - protein, 15 aa, Artificial Sequence
  Description of Artificial Sequence: Synthetic peptide
  Seed: LRMKWMMAMKYPITA
LRMKWMMNMHYPMTA

SEQ ID NO: 244071 - protein, 15 aa, Artificial Sequence
  Description of Artificial Sequence: Synthetic peptide
  Seed: LRMKWMMAMKYPITA
LRMKWMMNMHYPVTA

SEQ ID NO: 244072 - protein, 15 aa, Artificial Sequence
  Description of Artificial Sequence: Synthetic peptide
  Seed: LRMKWMMAMKYPITA
LRMKWMMNMHYPYTA

SEQ ID NO: 244073 - protein, 15 aa, Artificial Sequence
  Description of Artificial Sequence: Synthetic peptide
  Seed: LRMKWMMAMKYPITA
LRMKWMMNMIYPATA

SEQ ID NO: 244074 - protein, 15 aa, Artificial Sequence
  Description of Artificial Sequence: Synthetic peptide
  Seed: LRMKWMMAMKYPITA
LRMKWMMNMIYPFTA

SEQ ID NO: 244075 - protein, 15 aa, Artificial Sequence
  Description of Artificial Sequence: Synthetic peptide
  Seed: LRMKWMMAMKYPITA
LRMKWMMNMIYPITA

SEQ ID NO: 244076 - protein, 15 aa, Artificial Sequence
  Description of Artificial Sequence: Synthetic peptide
  Seed: LRMKWMMAMKYPITA
LRMKWMMNMIYPLTA

SEQ ID NO: 244077 - protein, 15 aa, Artificial Sequence
  Description of Artificial Sequence: Synthetic peptide
  Seed: LRMKWMMAMKYPITA
LRMKWMMNMIYPMTA

SEQ ID NO: 244078 - protein, 15 aa, Artificial Sequence
  Description of Artificial Sequence: Synthetic peptide
  Seed: LRMKWMMAMKYPITA
LRMKWMMNMIYPNTA

SEQ ID NO: 244079 - protein, 15 aa, Artificial Sequence
  Description of Artificial Sequence: Synthetic peptide
  Seed: LRMKWMMAMKYPITA
LRMKWMMNMIYPQTA

SEQ ID NO: 244080 - protein, 15 aa, Artificial Sequence
  Description of Artificial Sequence: Synthetic peptide
  Seed: LRMKWMMAMKYPITA
LRMKWMMNMIYPSTA

SEQ ID NO: 244081 - protein, 15 aa, Artificial Sequence
  Description of Artificial Sequence: Synthetic peptide
  Seed: LRMKWMMAMKYPITA
LRMKWMMNMIYPTTA

SEQ ID NO: 244082 - protein, 15 aa, Artificial Sequence
  Description of Artificial Sequence: Synthetic peptide
  Seed: LRMKWMMAMKYPITA
LRMKWMMNMIYPVTA

SEQ ID NO: 244083 - protein, 15 aa, Artificial Sequence
  Description of Artificial Sequence: Synthetic peptide
  Seed: LRMKWMMAMKYPITA
LRMKWMMNMIYPYTA

SEQ ID NO: 244084 - protein, 15 aa, Artificial Sequence
  Description of Artificial Sequence: Synthetic peptide
  Seed: LRMKWMMAMKYPITA
LRMKWMMNMKYPFTA

SEQ ID NO: 244085 - protein, 15 aa, Artificial Sequence
  Description of Artificial Sequence: Synthetic peptide
  Seed: LRMKWMMAMKYPITA
LRMKWMMNMKYPLTA

SEQ ID NO: 244086 - protein, 15 aa, Artificial Sequence
  Description of Artificial Sequence: Synthetic peptide
  Seed: LRMKWMMAMKYPITA
LRMKWMMNMKYPMTA

SEQ ID NO: 244087 - protein, 15 aa, Artificial Sequence
  Description of Artificial Sequence: Synthetic peptide
  Seed: LRMKWMMAMKYPITA
LRMKWMMNMKYPSTA

SEQ ID NO: 244088 - protein, 15 aa, Artificial Sequence
  Description of Artificial Sequence: Synthetic peptide
  Seed: LRMKWMMAMKYPITA
LRMKWMMNMKYPVTA

SEQ ID NO: 244089 - protein, 15 aa, Artificial Sequence
  Description of Artificial Sequence: Synthetic peptide
  Seed: LRMKWMMAMKYPITA
LRMKWMMNMKYPYTA

SEQ ID NO: 244090 - protein, 15 aa, Artificial Sequence
  Description of Artificial Sequence: Synthetic peptide
  Seed: LRMKWMMAMKYPITA
LRMKWMMNMLYPFTA

SEQ ID NO: 244091 - protein, 15 aa, Artificial Sequence
  Description of Artificial Sequence: Synthetic peptide
  Seed: LRMKWMMAMKYPITA
LRMKWMMNMLYPITA

SEQ ID NO: 244092 - protein, 15 aa, Artificial Sequence
  Description of Artificial Sequence: Synthetic peptide
  Seed: LRMKWMMAMKYPITA
LRMKWMMNMLYPLTA

SEQ ID NO: 244093 - protein, 15 aa, Artificial Sequence
  Description of Artificial Sequence: Synthetic peptide
  Seed: LRMKWMMAMKYPITA
LRMKWMMNMLYPMTA

SEQ ID NO: 244094 - protein, 15 aa, Artificial Sequence
  Description of Artificial Sequence: Synthetic peptide
  Seed: LRMKWMMAMKYPITA
LRMKWMMNMLYPVTA

SEQ ID NO: 244095 - protein, 15 aa, Artificial Sequence
  Description of Artificial Sequence: Synthetic peptide
  Seed: LRMKWMMAMKYPITA
LRMKWMMNMLYPYTA

SEQ ID NO: 244096 - protein, 15 aa, Artificial Sequence
  Description of Artificial Sequence: Synthetic peptide
  Seed: LRMKWMMAMKYPITA
LRMKWMMNMMYPFTA

SEQ ID NO: 244097 - protein, 15 aa, Artificial Sequence
  Description of Artificial Sequence: Synthetic peptide
  Seed: LRMKWMMAMKYPITA
LRMKWMMNMMYPITA

SEQ ID NO: 244098 - protein, 15 aa, Artificial Sequence
  Description of Artificial Sequence: Synthetic peptide
  Seed: LRMKWMMAMKYPITA
LRMKWMMNMMYPLTA

SEQ ID NO: 244099 - protein, 15 aa, Artificial Sequence
  Description of Artificial Sequence: Synthetic peptide
  Seed: LRMKWMMAMKYPITA
LRMKWMMNMMYPMTA

SEQ ID NO: 244100 - protein, 15 aa, Artificial Sequence
  Description of Artificial Sequence: Synthetic peptide
  Seed: LRMKWMMAMKYPITA
LRMKWMMNMMYPVTA

SEQ ID NO: 244101 - protein, 15 aa, Artificial Sequence
  Description of Artificial Sequence: Synthetic peptide
  Seed: LRMKWMMAMKYPITA
LRMKWMMNMMYPYTA

SEQ ID NO: 244102 - protein, 15 aa, Artificial Sequence
  Description of Artificial Sequence: Synthetic peptide
  Seed: LRMKWMMAMKYPITA
LRMKWMMNMNYPATA

SEQ ID NO: 244103 - protein, 15 aa, Artificial Sequence
  Description of Artificial Sequence: Synthetic peptide
  Seed: LRMKWMMAMKYPITA
LRMKWMMNMNYPFTA

SEQ ID NO: 244104 - protein, 15 aa, Artificial Sequence
  Description of Artificial Sequence: Synthetic peptide
  Seed: LRMKWMMAMKYPITA
LRMKWMMNMNYPITA

SEQ ID NO: 244105 - protein, 15 aa, Artificial Sequence
  Description of Artificial Sequence: Synthetic peptide
  Seed: LRMKWMMAMKYPITA
LRMKWMMNMNYPLTA

SEQ ID NO: 244106 - protein, 15 aa, Artificial Sequence
  Description of Artificial Sequence: Synthetic peptide
  Seed: LRMKWMMAMKYPITA
LRMKWMMNMNYPMTA

SEQ ID NO: 244107 - protein, 15 aa, Artificial Sequence
  Description of Artificial Sequence: Synthetic peptide
  Seed: LRMKWMMAMKYPITA
LRMKWMMNMNYPNTA

SEQ ID NO: 244108 - protein, 15 aa, Artificial Sequence
  Description of Artificial Sequence: Synthetic peptide
  Seed: LRMKWMMAMKYPITA
LRMKWMMNMNYPSTA

SEQ ID NO: 244109 - protein, 15 aa, Artificial Sequence
  Description of Artificial Sequence: Synthetic peptide
  Seed: LRMKWMMAMKYPITA
LRMKWMMNMNYPTTA

SEQ ID NO: 244110 - protein, 15 aa, Artificial Sequence
  Description of Artificial Sequence: Synthetic peptide
  Seed: LRMKWMMAMKYPITA
LRMKWMMNMNYPVTA

SEQ ID NO: 244111 - protein, 15 aa, Artificial Sequence
  Description of Artificial Sequence: Synthetic peptide
  Seed: LRMKWMMAMKYPITA
LRMKWMMNMNYPWTA

SEQ ID NO: 244112 - protein, 15 aa, Artificial Sequence
  Description of Artificial Sequence: Synthetic peptide
  Seed: LRMKWMMAMKYPITA
LRMKWMMNMNYPYTA

SEQ ID NO: 244113 - protein, 15 aa, Artificial Sequence
  Description of Artificial Sequence: Synthetic peptide
  Seed: LRMKWMMAMKYPITA
LRMKWMMNMPYPATA

SEQ ID NO: 244114 - protein, 15 aa, Artificial Sequence
  Description of Artificial Sequence: Synthetic peptide
  Seed: LRMKWMMAMKYPITA
LRMKWMMNMPYPCTA

SEQ ID NO: 244115 - protein, 15 aa, Artificial Sequence
  Description of Artificial Sequence: Synthetic peptide
  Seed: LRMKWMMAMKYPITA
LRMKWMMNMPYPFTA

SEQ ID NO: 244116 - protein, 15 aa, Artificial Sequence
  Description of Artificial Sequence: Synthetic peptide
  Seed: LRMKWMMAMKYPITA
LRMKWMMNMPYPGTA

SEQ ID NO: 244117 - protein, 15 aa, Artificial Sequence
  Description of Artificial Sequence: Synthetic peptide
  Seed: LRMKWMMAMKYPITA
LRMKWMMNMPYPITA

SEQ ID NO: 244118 - protein, 15 aa, Artificial Sequence
  Description of Artificial Sequence: Synthetic peptide
  Seed: LRMKWMMAMKYPITA
LRMKWMMNMPYPLTA

SEQ ID NO: 244119 - protein, 15 aa, Artificial Sequence
  Description of Artificial Sequence: Synthetic peptide
  Seed: LRMKWMMAMKYPITA
LRMKWMMNMPYPMTA

SEQ ID NO: 244120 - protein, 15 aa, Artificial Sequence
  Description of Artificial Sequence: Synthetic peptide
  Seed: LRMKWMMAMKYPITA
LRMKWMMNMPYPNTA

SEQ ID NO: 244121 - protein, 15 aa, Artificial Sequence
  Description of Artificial Sequence: Synthetic peptide
  Seed: LRMKWMMAMKYPITA
LRMKWMMNMPYPSTA

SEQ ID NO: 244122 - protein, 15 aa, Artificial Sequence
  Description of Artificial Sequence: Synthetic peptide
  Seed: LRMKWMMAMKYPITA
LRMKWMMNMPYPTTA

SEQ ID NO: 244123 - protein, 15 aa, Artificial Sequence
  Description of Artificial Sequence: Synthetic peptide
  Seed: LRMKWMMAMKYPITA
LRMKWMMNMPYPVTA

SEQ ID NO: 244124 - protein, 15 aa, Artificial Sequence
  Description of Artificial Sequence: Synthetic peptide
  Seed: LRMKWMMAMKYPITA
LRMKWMMNMPYPWTA

SEQ ID NO: 244125 - protein, 15 aa, Artificial Sequence
  Description of Artificial Sequence: Synthetic peptide
  Seed: LRMKWMMAMKYPITA
LRMKWMMNMPYPYTA

SEQ ID NO: 244126 - protein, 15 aa, Artificial Sequence
  Description of Artificial Sequence: Synthetic peptide
  Seed: LRMKWMMAMKYPITA
LRMKWMMNMQYPITA

SEQ ID NO: 244127 - protein, 15 aa, Artificial Sequence
  Description of Artificial Sequence: Synthetic peptide
  Seed: LRMKWMMAMKYPITA
LRMKWMMNMQYPLTA

SEQ ID NO: 244128 - protein, 15 aa, Artificial Sequence
  Description of Artificial Sequence: Synthetic peptide
  Seed: LRMKWMMAMKYPITA
LRMKWMMNMQYPVTA

SEQ ID NO: 244129 - protein, 15 aa, Artificial Sequence
  Description of Artificial Sequence: Synthetic peptide
  Seed: LRMKWMMAMKYPITA
LRMKWMMNMRYPATA

SEQ ID NO: 244130 - protein, 15 aa, Artificial Sequence
  Description of Artificial Sequence: Synthetic peptide
  Seed: LRMKWMMAMKYPITA
LRMKWMMNMRYPFTA

SEQ ID NO: 244131 - protein, 15 aa, Artificial Sequence
  Description of Artificial Sequence: Synthetic peptide
  Seed: LRMKWMMAMKYPITA
LRMKWMMNMRYPITA

SEQ ID NO: 244132 - protein, 15 aa, Artificial Sequence
  Description of Artificial Sequence: Synthetic peptide
  Seed: LRMKWMMAMKYPITA
LRMKWMMNMRYPKTA

SEQ ID NO: 244133 - protein, 15 aa, Artificial Sequence
  Description of Artificial Sequence: Synthetic peptide
  Seed: LRMKWMMAMKYPITA
LRMKWMMNMRYPLTA

SEQ ID NO: 244134 - protein, 15 aa, Artificial Sequence
  Description of Artificial Sequence: Synthetic peptide
  Seed: LRMKWMMAMKYPITA
LRMKWMMNMRYPMTA

SEQ ID NO: 244135 - protein, 15 aa, Artificial Sequence
  Description of Artificial Sequence: Synthetic peptide
  Seed: LRMKWMMAMKYPITA
LRMKWMMNMRYPRTA

SEQ ID NO: 244136 - protein, 15 aa, Artificial Sequence
  Description of Artificial Sequence: Synthetic peptide
  Seed: LRMKWMMAMKYPITA
LRMKWMMNMRYPSTA

SEQ ID NO: 244137 - protein, 15 aa, Artificial Sequence
  Description of Artificial Sequence: Synthetic peptide
  Seed: LRMKWMMAMKYPITA
LRMKWMMNMRYPVTA

SEQ ID NO: 244138 - protein, 15 aa, Artificial Sequence
  Description of Artificial Sequence: Synthetic peptide
  Seed: LRMKWMMAMKYPITA
LRMKWMMNMRYPYTA

SEQ ID NO: 244139 - protein, 15 aa, Artificial Sequence
  Description of Artificial Sequence: Synthetic peptide
  Seed: LRMKWMMAMKYPITA
LRMKWMMNMSYPATA

SEQ ID NO: 244140 - protein, 15 aa, Artificial Sequence
  Description of Artificial Sequence: Synthetic peptide
  Seed: LRMKWMMAMKYPITA
LRMKWMMNMSYPCTA

SEQ ID NO: 244141 - protein, 15 aa, Artificial Sequence
  Description of Artificial Sequence: Synthetic peptide
  Seed: LRMKWMMAMKYPITA
LRMKWMMNMSYPFTA

SEQ ID NO: 244142 - protein, 15 aa, Artificial Sequence
  Description of Artificial Sequence: Synthetic peptide
  Seed: LRMKWMMAMKYPITA
LRMKWMMNMSYPGTA

SEQ ID NO: 244143 - protein, 15 aa, Artificial Sequence
  Description of Artificial Sequence: Synthetic peptide
  Seed: LRMKWMMAMKYPITA
LRMKWMMNMSYPITA

SEQ ID NO: 244144 - protein, 15 aa, Artificial Sequence
  Description of Artificial Sequence: Synthetic peptide
  Seed: LRMKWMMAMKYPITA
LRMKWMMNMSYPLTA

SEQ ID NO: 244145 - protein, 15 aa, Artificial Sequence
  Description of Artificial Sequence: Synthetic peptide
  Seed: LRMKWMMAMKYPITA
LRMKWMMNMSYPMTA

SEQ ID NO: 244146 - protein, 15 aa, Artificial Sequence
  Description of Artificial Sequence: Synthetic peptide
  Seed: LRMKWMMAMKYPITA
LRMKWMMNMSYPNTA

SEQ ID NO: 244147 - protein, 15 aa, Artificial Sequence
  Description of Artificial Sequence: Synthetic peptide
  Seed: LRMKWMMAMKYPITA
LRMKWMMNMSYPSTA

SEQ ID NO: 244148 - protein, 15 aa, Artificial Sequence
  Description of Artificial Sequence: Synthetic peptide
  Seed: LRMKWMMAMKYPITA
LRMKWMMNMSYPTTA

SEQ ID NO: 244149 - protein, 15 aa, Artificial Sequence
  Description of Artificial Sequence: Synthetic peptide
  Seed: LRMKWMMAMKYPITA
LRMKWMMNMSYPVTA

SEQ ID NO: 244150 - protein, 15 aa, Artificial Sequence
  Description of Artificial Sequence: Synthetic peptide
  Seed: LRMKWMMAMKYPITA
LRMKWMMNMSYPWTA

SEQ ID NO: 244151 - protein, 15 aa, Artificial Sequence
  Description of Artificial Sequence: Synthetic peptide
  Seed: LRMKWMMAMKYPITA
LRMKWMMNMSYPYTA

SEQ ID NO: 244152 - protein, 15 aa, Artificial Sequence
  Description of Artificial Sequence: Synthetic peptide
  Seed: LRMKWMMAMKYPITA
LRMKWMMNMTYPATA

SEQ ID NO: 244153 - protein, 15 aa, Artificial Sequence
  Description of Artificial Sequence: Synthetic peptide
  Seed: LRMKWMMAMKYPITA
LRMKWMMNMTYPFTA

SEQ ID NO: 244154 - protein, 15 aa, Artificial Sequence
  Description of Artificial Sequence: Synthetic peptide
  Seed: LRMKWMMAMKYPITA
LRMKWMMNMTYPGTA

SEQ ID NO: 244155 - protein, 15 aa, Artificial Sequence
  Description of Artificial Sequence: Synthetic peptide
  Seed: LRMKWMMAMKYPITA
LRMKWMMNMTYPITA

SEQ ID NO: 244156 - protein, 15 aa, Artificial Sequence
  Description of Artificial Sequence: Synthetic peptide
  Seed: LRMKWMMAMKYPITA
LRMKWMMNMTYPLTA

SEQ ID NO: 244157 - protein, 15 aa, Artificial Sequence
  Description of Artificial Sequence: Synthetic peptide
  Seed: LRMKWMMAMKYPITA
LRMKWMMNMTYPMTA

SEQ ID NO: 244158 - protein, 15 aa, Artificial Sequence
  Description of Artificial Sequence: Synthetic peptide
  Seed: LRMKWMMAMKYPITA
LRMKWMMNMTYPNTA

SEQ ID NO: 244159 - protein, 15 aa, Artificial Sequence
  Description of Artificial Sequence: Synthetic peptide
  Seed: LRMKWMMAMKYPITA
LRMKWMMNMTYPSTA

SEQ ID NO: 244160 - protein, 15 aa, Artificial Sequence
  Description of Artificial Sequence: Synthetic peptide
  Seed: LRMKWMMAMKYPITA
LRMKWMMNMTYPTTA

SEQ ID NO: 244161 - protein, 15 aa, Artificial Sequence
  Description of Artificial Sequence: Synthetic peptide
  Seed: LRMKWMMAMKYPITA
LRMKWMMNMTYPVTA

SEQ ID NO: 244162 - protein, 15 aa, Artificial Sequence
  Description of Artificial Sequence: Synthetic peptide
  Seed: LRMKWMMAMKYPITA
LRMKWMMNMTYPWTA

SEQ ID NO: 244163 - protein, 15 aa, Artificial Sequence
  Description of Artificial Sequence: Synthetic peptide
  Seed: LRMKWMMAMKYPITA
LRMKWMMNMTYPYTA

SEQ ID NO: 244164 - protein, 15 aa, Artificial Sequence
  Description of Artificial Sequence: Synthetic peptide
  Seed: LRMKWMMAMKYPITA
LRMKWMMNMVYPATA

SEQ ID NO: 244165 - protein, 15 aa, Artificial Sequence
  Description of Artificial Sequence: Synthetic peptide
  Seed: LRMKWMMAMKYPITA
LRMKWMMNMVYPCTA

SEQ ID NO: 244166 - protein, 15 aa, Artificial Sequence
  Description of Artificial Sequence: Synthetic peptide
  Seed: LRMKWMMAMKYPITA
LRMKWMMNMVYPFTA

SEQ ID NO: 244167 - protein, 15 aa, Artificial Sequence
  Description of Artificial Sequence: Synthetic peptide
  Seed: LRMKWMMAMKYPITA
LRMKWMMNMVYPGTA

SEQ ID NO: 244168 - protein, 15 aa, Artificial Sequence
  Description of Artificial Sequence: Synthetic peptide
  Seed: LRMKWMMAMKYPITA
LRMKWMMNMVYPHTA

SEQ ID NO: 244169 - protein, 15 aa, Artificial Sequence
  Description of Artificial Sequence: Synthetic peptide
  Seed: LRMKWMMAMKYPITA
LRMKWMMNMVYPITA

SEQ ID NO: 244170 - protein, 15 aa, Artificial Sequence
  Description of Artificial Sequence: Synthetic peptide
  Seed: LRMKWMMAMKYPITA
LRMKWMMNMVYPLTA

SEQ ID NO: 244171 - protein, 15 aa, Artificial Sequence
  Description of Artificial Sequence: Synthetic peptide
  Seed: LRMKWMMAMKYPITA
LRMKWMMNMVYPMTA

SEQ ID NO: 244172 - protein, 15 aa, Artificial Sequence
  Description of Artificial Sequence: Synthetic peptide
  Seed: LRMKWMMAMKYPITA
LRMKWMMNMVYPNTA

SEQ ID NO: 244173 - protein, 15 aa, Artificial Sequence
  Description of Artificial Sequence: Synthetic peptide
  Seed: LRMKWMMAMKYPITA
LRMKWMMNMVYPQTA

SEQ ID NO: 244174 - protein, 15 aa, Artificial Sequence
  Description of Artificial Sequence: Synthetic peptide
  Seed: LRMKWMMAMKYPITA
LRMKWMMNMVYPSTA

SEQ ID NO: 244175 - protein, 15 aa, Artificial Sequence
  Description of Artificial Sequence: Synthetic peptide
  Seed: LRMKWMMAMKYPITA
LRMKWMMNMVYPTTA

SEQ ID NO: 244176 - protein, 15 aa, Artificial Sequence
  Description of Artificial Sequence: Synthetic peptide
  Seed: LRMKWMMAMKYPITA
LRMKWMMNMVYPVTA

SEQ ID NO: 244177 - protein, 15 aa, Artificial Sequence
  Description of Artificial Sequence: Synthetic peptide
  Seed: LRMKWMMAMKYPITA
LRMKWMMNMVYPYTA

SEQ ID NO: 244178 - protein, 15 aa, Artificial Sequence
  Description of Artificial Sequence: Synthetic peptide
  Seed: LRMKWMMAMKYPITA
LRMKWMMNMYYPITA

SEQ ID NO: 244179 - protein, 15 aa, Artificial Sequence
  Description of Artificial Sequence: Synthetic peptide
  Seed: LRMKWMMAMKYPITA
LRMKWMMNMYYPVTA

SEQ ID NO: 244180 - protein, 15 aa, Artificial Sequence
  Description of Artificial Sequence: Synthetic peptide
  Seed: LRMKWMMAMKYPITA
LRMKWMMPMAYPATA

SEQ ID NO: 244181 - protein, 15 aa, Artificial Sequence
  Description of Artificial Sequence: Synthetic peptide
  Seed: LRMKWMMAMKYPITA
LRMKWMMPMAYPFTA

SEQ ID NO: 244182 - protein, 15 aa, Artificial Sequence
  Description of Artificial Sequence: Synthetic peptide
  Seed: LRMKWMMAMKYPITA
LRMKWMMPMAYPITA

SEQ ID NO: 244183 - protein, 15 aa, Artificial Sequence
  Description of Artificial Sequence: Synthetic peptide
  Seed: LRMKWMMAMKYPITA
LRMKWMMPMAYPLTA

SEQ ID NO: 244184 - protein, 15 aa, Artificial Sequence
  Description of Artificial Sequence: Synthetic peptide
  Seed: LRMKWMMAMKYPITA
LRMKWMMPMAYPMTA

SEQ ID NO: 244185 - protein, 15 aa, Artificial Sequence
  Description of Artificial Sequence: Synthetic peptide
  Seed: LRMKWMMAMKYPITA
LRMKWMMPMAYPSTA

SEQ ID NO: 244186 - protein, 15 aa, Artificial Sequence
  Description of Artificial Sequence: Synthetic peptide
  Seed: LRMKWMMAMKYPITA
LRMKWMMPMAYPTTA

SEQ ID NO: 244187 - protein, 15 aa, Artificial Sequence
  Description of Artificial Sequence: Synthetic peptide
  Seed: LRMKWMMAMKYPITA
LRMKWMMPMAYPVTA

SEQ ID NO: 244188 - protein, 15 aa, Artificial Sequence
  Description of Artificial Sequence: Synthetic peptide
  Seed: LRMKWMMAMKYPITA
LRMKWMMPMAYPYTA

SEQ ID NO: 244189 - protein, 15 aa, Artificial Sequence
  Description of Artificial Sequence: Synthetic peptide
  Seed: LRMKWMMAMKYPITA
LRMKWMMPMGYPITA

SEQ ID NO: 244190 - protein, 15 aa, Artificial Sequence
  Description of Artificial Sequence: Synthetic peptide
  Seed: LRMKWMMAMKYPITA
LRMKWMMPMGYPLTA

SEQ ID NO: 244191 - protein, 15 aa, Artificial Sequence
  Description of Artificial Sequence: Synthetic peptide
  Seed: LRMKWMMAMKYPITA
LRMKWMMPMGYPMTA

SEQ ID NO: 244192 - protein, 15 aa, Artificial Sequence
  Description of Artificial Sequence: Synthetic peptide
  Seed: LRMKWMMAMKYPITA
LRMKWMMPMGYPVTA

SEQ ID NO: 244193 - protein, 15 aa, Artificial Sequence
  Description of Artificial Sequence: Synthetic peptide
  Seed: LRMKWMMAMKYPITA
LRMKWMMPMIYPATA

SEQ ID NO: 244194 - protein, 15 aa, Artificial Sequence
  Description of Artificial Sequence: Synthetic peptide
  Seed: LRMKWMMAMKYPITA
LRMKWMMPMIYPITA

SEQ ID NO: 244195 - protein, 15 aa, Artificial Sequence
  Description of Artificial Sequence: Synthetic peptide
  Seed: LRMKWMMAMKYPITA
LRMKWMMPMIYPLTA

SEQ ID NO: 244196 - protein, 15 aa, Artificial Sequence
  Description of Artificial Sequence: Synthetic peptide
  Seed: LRMKWMMAMKYPITA
LRMKWMMPMIYPMTA

SEQ ID NO: 244197 - protein, 15 aa, Artificial Sequence
  Description of Artificial Sequence: Synthetic peptide
  Seed: LRMKWMMAMKYPITA
LRMKWMMPMIYPVTA

SEQ ID NO: 244198 - protein, 15 aa, Artificial Sequence
  Description of Artificial Sequence: Synthetic peptide
  Seed: LRMKWMMAMKYPITA
LRMKWMMPMLYPATA

SEQ ID NO: 244199 - protein, 15 aa, Artificial Sequence
  Description of Artificial Sequence: Synthetic peptide
  Seed: LRMKWMMAMKYPITA
LRMKWMMPMLYPVTA

SEQ ID NO: 244200 - protein, 15 aa, Artificial Sequence
  Description of Artificial Sequence: Synthetic peptide
  Seed: LRMKWMMAMKYPITA
LRMKWMMPMMYPATA

SEQ ID NO: 244201 - protein, 15 aa, Artificial Sequence
  Description of Artificial Sequence: Synthetic peptide
  Seed: LRMKWMMAMKYPITA
LRMKWMMPMMYPITA

SEQ ID NO: 244202 - protein, 15 aa, Artificial Sequence
  Description of Artificial Sequence: Synthetic peptide
  Seed: LRMKWMMAMKYPITA
LRMKWMMPMMYPLTA

SEQ ID NO: 244203 - protein, 15 aa, Artificial Sequence
  Description of Artificial Sequence: Synthetic peptide
  Seed: LRMKWMMAMKYPITA
LRMKWMMPMMYPVTA

SEQ ID NO: 244204 - protein, 15 aa, Artificial Sequence
  Description of Artificial Sequence: Synthetic peptide
  Seed: LRMKWMMAMKYPITA
LRMKWMMPMNYPITA

SEQ ID NO: 244205 - protein, 15 aa, Artificial Sequence
  Description of Artificial Sequence: Synthetic peptide
  Seed: LRMKWMMAMKYPITA
LRMKWMMPMNYPLTA

SEQ ID NO: 244206 - protein, 15 aa, Artificial Sequence
  Description of Artificial Sequence: Synthetic peptide
  Seed: LRMKWMMAMKYPITA
LRMKWMMPMNYPVTA

SEQ ID NO: 244207 - protein, 15 aa, Artificial Sequence
  Description of Artificial Sequence: Synthetic peptide
  Seed: LRMKWMMAMKYPITA
LRMKWMMPMPYPITA

SEQ ID NO: 244208 - protein, 15 aa, Artificial Sequence
  Description of Artificial Sequence: Synthetic peptide
  Seed: LRMKWMMAMKYPITA
LRMKWMMPMPYPLTA

SEQ ID NO: 244209 - protein, 15 aa, Artificial Sequence
  Description of Artificial Sequence: Synthetic peptide
  Seed: LRMKWMMAMKYPITA
LRMKWMMPMPYPMTA

SEQ ID NO: 244210 - protein, 15 aa, Artificial Sequence
  Description of Artificial Sequence: Synthetic peptide
  Seed: LRMKWMMAMKYPITA
LRMKWMMPMPYPVTA

SEQ ID NO: 244211 - protein, 15 aa, Artificial Sequence
  Description of Artificial Sequence: Synthetic peptide
  Seed: LRMKWMMAMKYPITA
LRMKWMMPMSYPATA

SEQ ID NO: 244212 - protein, 15 aa, Artificial Sequence
  Description of Artificial Sequence: Synthetic peptide
  Seed: LRMKWMMAMKYPITA
LRMKWMMPMSYPITA

SEQ ID NO: 244213 - protein, 15 aa, Artificial Sequence
  Description of Artificial Sequence: Synthetic peptide
  Seed: LRMKWMMAMKYPITA
LRMKWMMPMSYPLTA

SEQ ID NO: 244214 - protein, 15 aa, Artificial Sequence
  Description of Artificial Sequence: Synthetic peptide
  Seed: LRMKWMMAMKYPITA
LRMKWMMPMSYPMTA

SEQ ID NO: 244215 - protein, 15 aa, Artificial Sequence
  Description of Artificial Sequence: Synthetic peptide
  Seed: LRMKWMMAMKYPITA
LRMKWMMPMSYPVTA

SEQ ID NO: 244216 - protein, 15 aa, Artificial Sequence
  Description of Artificial Sequence: Synthetic peptide
  Seed: LRMKWMMAMKYPITA
LRMKWMMPMTYPITA

SEQ ID NO: 244217 - protein, 15 aa, Artificial Sequence
  Description of Artificial Sequence: Synthetic peptide
  Seed: LRMKWMMAMKYPITA
LRMKWMMPMTYPLTA

SEQ ID NO: 244218 - protein, 15 aa, Artificial Sequence
  Description of Artificial Sequence: Synthetic peptide
  Seed: LRMKWMMAMKYPITA
LRMKWMMPMTYPMTA

SEQ ID NO: 244219 - protein, 15 aa, Artificial Sequence
  Description of Artificial Sequence: Synthetic peptide
  Seed: LRMKWMMAMKYPITA
LRMKWMMPMTYPVTA

SEQ ID NO: 244220 - protein, 15 aa, Artificial Sequence
  Description of Artificial Sequence: Synthetic peptide
  Seed: LRMKWMMAMKYPITA
LRMKWMMPMVYPATA

SEQ ID NO: 244221 - protein, 15 aa, Artificial Sequence
  Description of Artificial Sequence: Synthetic peptide
  Seed: LRMKWMMAMKYPITA
LRMKWMMPMVYPITA

SEQ ID NO: 244222 - protein, 15 aa, Artificial Sequence
  Description of Artificial Sequence: Synthetic peptide
  Seed: LRMKWMMAMKYPITA
LRMKWMMPMVYPLTA

SEQ ID NO: 244223 - protein, 15 aa, Artificial Sequence
  Description of Artificial Sequence: Synthetic peptide
  Seed: LRMKWMMAMKYPITA
LRMKWMMPMVYPMTA

SEQ ID NO: 244224 - protein, 15 aa, Artificial Sequence
  Description of Artificial Sequence: Synthetic peptide
  Seed: LRMKWMMAMKYPITA
LRMKWMMPMVYPVTA

SEQ ID NO: 244225 - protein, 15 aa, Artificial Sequence
  Description of Artificial Sequence: Synthetic peptide
  Seed: LRMKWMMAMKYPITA
LRMKWMMQMAYPATA

SEQ ID NO: 244226 - protein, 15 aa, Artificial Sequence
  Description of Artificial Sequence: Synthetic peptide
  Seed: LRMKWMMAMKYPITA
LRMKWMMQMAYPCTA

SEQ ID NO: 244227 - protein, 15 aa, Artificial Sequence
  Description of Artificial Sequence: Synthetic peptide
  Seed: LRMKWMMAMKYPITA
LRMKWMMQMAYPDTA

SEQ ID NO: 244228 - protein, 15 aa, Artificial Sequence
  Description of Artificial Sequence: Synthetic peptide
  Seed: LRMKWMMAMKYPITA
LRMKWMMQMAYPETA

SEQ ID NO: 244229 - protein, 15 aa, Artificial Sequence
  Description of Artificial Sequence: Synthetic peptide
  Seed: LRMKWMMAMKYPITA
LRMKWMMQMAYPFTA

SEQ ID NO: 244230 - protein, 15 aa, Artificial Sequence
  Description of Artificial Sequence: Synthetic peptide
  Seed: LRMKWMMAMKYPITA
LRMKWMMQMAYPGTA

SEQ ID NO: 244231 - protein, 15 aa, Artificial Sequence
  Description of Artificial Sequence: Synthetic peptide
  Seed: LRMKWMMAMKYPITA
LRMKWMMQMAYPHTA

SEQ ID NO: 244232 - protein, 15 aa, Artificial Sequence
  Description of Artificial Sequence: Synthetic peptide
  Seed: LRMKWMMAMKYPITA
LRMKWMMQMAYPITA

SEQ ID NO: 244233 - protein, 15 aa, Artificial Sequence
  Description of Artificial Sequence: Synthetic peptide
  Seed: LRMKWMMAMKYPITA
LRMKWMMQMAYPKTA

SEQ ID NO: 244234 - protein, 15 aa, Artificial Sequence
  Description of Artificial Sequence: Synthetic peptide
  Seed: LRMKWMMAMKYPITA
LRMKWMMQMAYPLTA

SEQ ID NO: 244235 - protein, 15 aa, Artificial Sequence
  Description of Artificial Sequence: Synthetic peptide
  Seed: LRMKWMMAMKYPITA
LRMKWMMQMAYPMTA

SEQ ID NO: 244236 - protein, 15 aa, Artificial Sequence
  Description of Artificial Sequence: Synthetic peptide
  Seed: LRMKWMMAMKYPITA
LRMKWMMQMAYPNTA

SEQ ID NO: 244237 - protein, 15 aa, Artificial Sequence
  Description of Artificial Sequence: Synthetic peptide
  Seed: LRMKWMMAMKYPITA
LRMKWMMQMAYPPTA

SEQ ID NO: 244238 - protein, 15 aa, Artificial Sequence
  Description of Artificial Sequence: Synthetic peptide
  Seed: LRMKWMMAMKYPITA
LRMKWMMQMAYPQTA

SEQ ID NO: 244239 - protein, 15 aa, Artificial Sequence
  Description of Artificial Sequence: Synthetic peptide
  Seed: LRMKWMMAMKYPITA
LRMKWMMQMAYPRTA

SEQ ID NO: 244240 - protein, 15 aa, Artificial Sequence
  Description of Artificial Sequence: Synthetic peptide
  Seed: LRMKWMMAMKYPITA
LRMKWMMQMAYPSTA

SEQ ID NO: 244241 - protein, 15 aa, Artificial Sequence
  Description of Artificial Sequence: Synthetic peptide
  Seed: LRMKWMMAMKYPITA
LRMKWMMQMAYPTTA

SEQ ID NO: 244242 - protein, 15 aa, Artificial Sequence
  Description of Artificial Sequence: Synthetic peptide
  Seed: LRMKWMMAMKYPITA
LRMKWMMQMAYPVTA

SEQ ID NO: 244243 - protein, 15 aa, Artificial Sequence
  Description of Artificial Sequence: Synthetic peptide
  Seed: LRMKWMMAMKYPITA
LRMKWMMQMAYPWTA

SEQ ID NO: 244244 - protein, 15 aa, Artificial Sequence
  Description of Artificial Sequence: Synthetic peptide
  Seed: LRMKWMMAMKYPITA
LRMKWMMQMAYPYTA

SEQ ID NO: 244245 - protein, 15 aa, Artificial Sequence
  Description of Artificial Sequence: Synthetic peptide
  Seed: LRMKWMMAMKYPITA
LRMKWMMQMCYPATA

SEQ ID NO: 244246 - protein, 15 aa, Artificial Sequence
  Description of Artificial Sequence: Synthetic peptide
  Seed: LRMKWMMAMKYPITA
LRMKWMMQMCYPITA

SEQ ID NO: 244247 - protein, 15 aa, Artificial Sequence
  Description of Artificial Sequence: Synthetic peptide
  Seed: LRMKWMMAMKYPITA
LRMKWMMQMCYPLTA

SEQ ID NO: 244248 - protein, 15 aa, Artificial Sequence
  Description of Artificial Sequence: Synthetic peptide
  Seed: LRMKWMMAMKYPITA
LRMKWMMQMCYPVTA

SEQ ID NO: 244249 - protein, 15 aa, Artificial Sequence
  Description of Artificial Sequence: Synthetic peptide
  Seed: LRMKWMMAMKYPITA
LRMKWMMQMDYPITA

SEQ ID NO: 244250 - protein, 15 aa, Artificial Sequence
  Description of Artificial Sequence: Synthetic peptide
  Seed: LRMKWMMAMKYPITA
LRMKWMMQMDYPLTA

SEQ ID NO: 244251 - protein, 15 aa, Artificial Sequence
  Description of Artificial Sequence: Synthetic peptide
  Seed: LRMKWMMAMKYPITA
LRMKWMMQMDYPVTA

SEQ ID NO: 244252 - protein, 15 aa, Artificial Sequence
  Description of Artificial Sequence: Synthetic peptide
  Seed: LRMKWMMAMKYPITA
LRMKWMMQMEYPATA

SEQ ID NO: 244253 - protein, 15 aa, Artificial Sequence
  Description of Artificial Sequence: Synthetic peptide
  Seed: LRMKWMMAMKYPITA
LRMKWMMQMEYPITA

SEQ ID NO: 244254 - protein, 15 aa, Artificial Sequence
  Description of Artificial Sequence: Synthetic peptide
  Seed: LRMKWMMAMKYPITA
LRMKWMMQMEYPLTA

SEQ ID NO: 244255 - protein, 15 aa, Artificial Sequence
  Description of Artificial Sequence: Synthetic peptide
  Seed: LRMKWMMAMKYPITA
LRMKWMMQMEYPVTA

SEQ ID NO: 244256 - protein, 15 aa, Artificial Sequence
  Description of Artificial Sequence: Synthetic peptide
  Seed: LRMKWMMAMKYPITA
LRMKWMMQMFYPITA

SEQ ID NO: 244257 - protein, 15 aa, Artificial Sequence
  Description of Artificial Sequence: Synthetic peptide
  Seed: LRMKWMMAMKYPITA
LRMKWMMQMFYPLTA

SEQ ID NO: 244258 - protein, 15 aa, Artificial Sequence
  Description of Artificial Sequence: Synthetic peptide
  Seed: LRMKWMMAMKYPITA
LRMKWMMQMFYPVTA

SEQ ID NO: 244259 - protein, 15 aa, Artificial Sequence
  Description of Artificial Sequence: Synthetic peptide
  Seed: LRMKWMMAMKYPITA
LRMKWMMQMGYPATA

SEQ ID NO: 244260 - protein, 15 aa, Artificial Sequence
  Description of Artificial Sequence: Synthetic peptide
  Seed: LRMKWMMAMKYPITA
LRMKWMMQMGYPCTA

SEQ ID NO: 244261 - protein, 15 aa, Artificial Sequence
  Description of Artificial Sequence: Synthetic peptide
  Seed: LRMKWMMAMKYPITA
LRMKWMMQMGYPFTA

SEQ ID NO: 244262 - protein, 15 aa, Artificial Sequence
  Description of Artificial Sequence: Synthetic peptide
  Seed: LRMKWMMAMKYPITA
LRMKWMMQMGYPGTA

SEQ ID NO: 244263 - protein, 15 aa, Artificial Sequence
  Description of Artificial Sequence: Synthetic peptide
  Seed: LRMKWMMAMKYPITA
LRMKWMMQMGYPHTA

SEQ ID NO: 244264 - protein, 15 aa, Artificial Sequence
  Description of Artificial Sequence: Synthetic peptide
  Seed: LRMKWMMAMKYPITA
LRMKWMMQMGYPITA

SEQ ID NO: 244265 - protein, 15 aa, Artificial Sequence
  Description of Artificial Sequence: Synthetic peptide
  Seed: LRMKWMMAMKYPITA
LRMKWMMQMGYPLTA

SEQ ID NO: 244266 - protein, 15 aa, Artificial Sequence
  Description of Artificial Sequence: Synthetic peptide
  Seed: LRMKWMMAMKYPITA
LRMKWMMQMGYPMTA

SEQ ID NO: 244267 - protein, 15 aa, Artificial Sequence
  Description of Artificial Sequence: Synthetic peptide
  Seed: LRMKWMMAMKYPITA
LRMKWMMQMGYPNTA

SEQ ID NO: 244268 - protein, 15 aa, Artificial Sequence
  Description of Artificial Sequence: Synthetic peptide
  Seed: LRMKWMMAMKYPITA
LRMKWMMQMGYPPTA

SEQ ID NO: 244269 - protein, 15 aa, Artificial Sequence
  Description of Artificial Sequence: Synthetic peptide
  Seed: LRMKWMMAMKYPITA
LRMKWMMQMGYPQTA

SEQ ID NO: 244270 - protein, 15 aa, Artificial Sequence
  Description of Artificial Sequence: Synthetic peptide
  Seed: LRMKWMMAMKYPITA
LRMKWMMQMGYPSTA

SEQ ID NO: 244271 - protein, 15 aa, Artificial Sequence
  Description of Artificial Sequence: Synthetic peptide
  Seed: LRMKWMMAMKYPITA
LRMKWMMQMGYPTTA

SEQ ID NO: 244272 - protein, 15 aa, Artificial Sequence
  Description of Artificial Sequence: Synthetic peptide
  Seed: LRMKWMMAMKYPITA
LRMKWMMQMGYPVTA

SEQ ID NO: 244273 - protein, 15 aa, Artificial Sequence
  Description of Artificial Sequence: Synthetic peptide
  Seed: LRMKWMMAMKYPITA
LRMKWMMQMGYPWTA

SEQ ID NO: 244274 - protein, 15 aa, Artificial Sequence
  Description of Artificial Sequence: Synthetic peptide
  Seed: LRMKWMMAMKYPITA
LRMKWMMQMGYPYTA

SEQ ID NO: 244275 - protein, 15 aa, Artificial Sequence
  Description of Artificial Sequence: Synthetic peptide
  Seed: LRMKWMMAMKYPITA
LRMKWMMQMHYPATA

SEQ ID NO: 244276 - protein, 15 aa, Artificial Sequence
  Description of Artificial Sequence: Synthetic peptide
  Seed: LRMKWMMAMKYPITA
LRMKWMMQMHYPITA

SEQ ID NO: 244277 - protein, 15 aa, Artificial Sequence
  Description of Artificial Sequence: Synthetic peptide
  Seed: LRMKWMMAMKYPITA
LRMKWMMQMHYPLTA

SEQ ID NO: 244278 - protein, 15 aa, Artificial Sequence
  Description of Artificial Sequence: Synthetic peptide
  Seed: LRMKWMMAMKYPITA
LRMKWMMQMHYPVTA

SEQ ID NO: 244279 - protein, 15 aa, Artificial Sequence
  Description of Artificial Sequence: Synthetic peptide
  Seed: LRMKWMMAMKYPITA
LRMKWMMQMIYPATA

SEQ ID NO: 244280 - protein, 15 aa, Artificial Sequence
  Description of Artificial Sequence: Synthetic peptide
  Seed: LRMKWMMAMKYPITA
LRMKWMMQMIYPCTA

SEQ ID NO: 244281 - protein, 15 aa, Artificial Sequence
  Description of Artificial Sequence: Synthetic peptide
  Seed: LRMKWMMAMKYPITA
LRMKWMMQMIYPDTA

SEQ ID NO: 244282 - protein, 15 aa, Artificial Sequence
  Description of Artificial Sequence: Synthetic peptide
  Seed: LRMKWMMAMKYPITA
LRMKWMMQMIYPETA

SEQ ID NO: 244283 - protein, 15 aa, Artificial Sequence
  Description of Artificial Sequence: Synthetic peptide
  Seed: LRMKWMMAMKYPITA
LRMKWMMQMIYPGTA

SEQ ID NO: 244284 - protein, 15 aa, Artificial Sequence
  Description of Artificial Sequence: Synthetic peptide
  Seed: LRMKWMMAMKYPITA
LRMKWMMQMIYPHTA

SEQ ID NO: 244285 - protein, 15 aa, Artificial Sequence
  Description of Artificial Sequence: Synthetic peptide
  Seed: LRMKWMMAMKYPITA
LRMKWMMQMIYPITA

SEQ ID NO: 244286 - protein, 15 aa, Artificial Sequence
  Description of Artificial Sequence: Synthetic peptide
  Seed: LRMKWMMAMKYPITA
LRMKWMMQMIYPLTA

SEQ ID NO: 244287 - protein, 15 aa, Artificial Sequence
  Description of Artificial Sequence: Synthetic peptide
  Seed: LRMKWMMAMKYPITA
LRMKWMMQMIYPMTA

SEQ ID NO: 244288 - protein, 15 aa, Artificial Sequence
  Description of Artificial Sequence: Synthetic peptide
  Seed: LRMKWMMAMKYPITA
LRMKWMMQMIYPNTA

SEQ ID NO: 244289 - protein, 15 aa, Artificial Sequence
  Description of Artificial Sequence: Synthetic peptide
  Seed: LRMKWMMAMKYPITA
LRMKWMMQMIYPPTA

SEQ ID NO: 244290 - protein, 15 aa, Artificial Sequence
  Description of Artificial Sequence: Synthetic peptide
  Seed: LRMKWMMAMKYPITA
LRMKWMMQMIYPQTA

SEQ ID NO: 244291 - protein, 15 aa, Artificial Sequence
  Description of Artificial Sequence: Synthetic peptide
  Seed: LRMKWMMAMKYPITA
LRMKWMMQMIYPSTA

SEQ ID NO: 244292 - protein, 15 aa, Artificial Sequence
  Description of Artificial Sequence: Synthetic peptide
  Seed: LRMKWMMAMKYPITA
LRMKWMMQMIYPTTA

SEQ ID NO: 244293 - protein, 15 aa, Artificial Sequence
  Description of Artificial Sequence: Synthetic peptide
  Seed: LRMKWMMAMKYPITA
LRMKWMMQMIYPVTA

SEQ ID NO: 244294 - protein, 15 aa, Artificial Sequence
  Description of Artificial Sequence: Synthetic peptide
  Seed: LRMKWMMAMKYPITA
LRMKWMMQMKYPATA

SEQ ID NO: 244295 - protein, 15 aa, Artificial Sequence
  Description of Artificial Sequence: Synthetic peptide
  Seed: LRMKWMMAMKYPITA
LRMKWMMQMKYPFTA

SEQ ID NO: 244296 - protein, 15 aa, Artificial Sequence
  Description of Artificial Sequence: Synthetic peptide
  Seed: LRMKWMMAMKYPITA
LRMKWMMQMKYPGTA

SEQ ID NO: 244297 - protein, 15 aa, Artificial Sequence
  Description of Artificial Sequence: Synthetic peptide
  Seed: LRMKWMMAMKYPITA
LRMKWMMQMKYPLTA

SEQ ID NO: 244298 - protein, 15 aa, Artificial Sequence
  Description of Artificial Sequence: Synthetic peptide
  Seed: LRMKWMMAMKYPITA
LRMKWMMQMKYPQTA

SEQ ID NO: 244299 - protein, 15 aa, Artificial Sequence
  Description of Artificial Sequence: Synthetic peptide
  Seed: LRMKWMMAMKYPITA
LRMKWMMQMKYPRTA

SEQ ID NO: 244300 - protein, 15 aa, Artificial Sequence
  Description of Artificial Sequence: Synthetic peptide
  Seed: LRMKWMMAMKYPITA
LRMKWMMQMKYPSTA

SEQ ID NO: 244301 - protein, 15 aa, Artificial Sequence
  Description of Artificial Sequence: Synthetic peptide
  Seed: LRMKWMMAMKYPITA
LRMKWMMQMKYPVTA

SEQ ID NO: 244302 - protein, 15 aa, Artificial Sequence
  Description of Artificial Sequence: Synthetic peptide
  Seed: LRMKWMMAMKYPITA
LRMKWMMQMKYPYTA

SEQ ID NO: 244303 - protein, 15 aa, Artificial Sequence
  Description of Artificial Sequence: Synthetic peptide
  Seed: LRMKWMMAMKYPITA
LRMKWMMQMLYPATA

SEQ ID NO: 244304 - protein, 15 aa, Artificial Sequence
  Description of Artificial Sequence: Synthetic peptide
  Seed: LRMKWMMAMKYPITA
LRMKWMMQMLYPGTA

SEQ ID NO: 244305 - protein, 15 aa, Artificial Sequence
  Description of Artificial Sequence: Synthetic peptide
  Seed: LRMKWMMAMKYPITA
LRMKWMMQMLYPLTA

SEQ ID NO: 244306 - protein, 15 aa, Artificial Sequence
  Description of Artificial Sequence: Synthetic peptide
  Seed: LRMKWMMAMKYPITA
LRMKWMMQMLYPMTA

SEQ ID NO: 244307 - protein, 15 aa, Artificial Sequence
  Description of Artificial Sequence: Synthetic peptide
  Seed: LRMKWMMAMKYPITA
LRMKWMMQMLYPNTA

SEQ ID NO: 244308 - protein, 15 aa, Artificial Sequence
  Description of Artificial Sequence: Synthetic peptide
  Seed: LRMKWMMAMKYPITA
LRMKWMMQMLYPSTA

SEQ ID NO: 244309 - protein, 15 aa, Artificial Sequence
  Description of Artificial Sequence: Synthetic peptide
  Seed: LRMKWMMAMKYPITA
LRMKWMMQMLYPTTA

SEQ ID NO: 244310 - protein, 15 aa, Artificial Sequence
  Description of Artificial Sequence: Synthetic peptide
  Seed: LRMKWMMAMKYPITA
LRMKWMMQMLYPVTA

SEQ ID NO: 244311 - protein, 15 aa, Artificial Sequence
  Description of Artificial Sequence: Synthetic peptide
  Seed: LRMKWMMAMKYPITA
LRMKWMMQMMYPATA

SEQ ID NO: 244312 - protein, 15 aa, Artificial Sequence
  Description of Artificial Sequence: Synthetic peptide
  Seed: LRMKWMMAMKYPITA
LRMKWMMQMMYPGTA

SEQ ID NO: 244313 - protein, 15 aa, Artificial Sequence
  Description of Artificial Sequence: Synthetic peptide
  Seed: LRMKWMMAMKYPITA
LRMKWMMQMMYPITA

SEQ ID NO: 244314 - protein, 15 aa, Artificial Sequence
  Description of Artificial Sequence: Synthetic peptide
  Seed: LRMKWMMAMKYPITA
LRMKWMMQMMYPLTA

SEQ ID NO: 244315 - protein, 15 aa, Artificial Sequence
  Description of Artificial Sequence: Synthetic peptide
  Seed: LRMKWMMAMKYPITA
LRMKWMMQMMYPMTA

SEQ ID NO: 244316 - protein, 15 aa, Artificial Sequence
  Description of Artificial Sequence: Synthetic peptide
  Seed: LRMKWMMAMKYPITA
LRMKWMMQMMYPSTA

SEQ ID NO: 244317 - protein, 15 aa, Artificial Sequence
  Description of Artificial Sequence: Synthetic peptide
  Seed: LRMKWMMAMKYPITA
LRMKWMMQMMYPTTA

SEQ ID NO: 244318 - protein, 15 aa, Artificial Sequence
  Description of Artificial Sequence: Synthetic peptide
  Seed: LRMKWMMAMKYPITA
LRMKWMMQMMYPVTA

SEQ ID NO: 244319 - protein, 15 aa, Artificial Sequence
  Description of Artificial Sequence: Synthetic peptide
  Seed: LRMKWMMAMKYPITA
LRMKWMMQMNYPATA

SEQ ID NO: 244320 - protein, 15 aa, Artificial Sequence
  Description of Artificial Sequence: Synthetic peptide
  Seed: LRMKWMMAMKYPITA
LRMKWMMQMNYPCTA

SEQ ID NO: 244321 - protein, 15 aa, Artificial Sequence
  Description of Artificial Sequence: Synthetic peptide
  Seed: LRMKWMMAMKYPITA
LRMKWMMQMNYPDTA

SEQ ID NO: 244322 - protein, 15 aa, Artificial Sequence
  Description of Artificial Sequence: Synthetic peptide
  Seed: LRMKWMMAMKYPITA
LRMKWMMQMNYPFTA

SEQ ID NO: 244323 - protein, 15 aa, Artificial Sequence
  Description of Artificial Sequence: Synthetic peptide
  Seed: LRMKWMMAMKYPITA
LRMKWMMQMNYPGTA

SEQ ID NO: 244324 - protein, 15 aa, Artificial Sequence
  Description of Artificial Sequence: Synthetic peptide
  Seed: LRMKWMMAMKYPITA
LRMKWMMQMNYPITA

SEQ ID NO: 244325 - protein, 15 aa, Artificial Sequence
  Description of Artificial Sequence: Synthetic peptide
  Seed: LRMKWMMAMKYPITA
LRMKWMMQMNYPLTA

SEQ ID NO: 244326 - protein, 15 aa, Artificial Sequence
  Description of Artificial Sequence: Synthetic peptide
  Seed: LRMKWMMAMKYPITA
LRMKWMMQMNYPMTA

SEQ ID NO: 244327 - protein, 15 aa, Artificial Sequence
  Description of Artificial Sequence: Synthetic peptide
  Seed: LRMKWMMAMKYPITA
LRMKWMMQMNYPNTA

SEQ ID NO: 244328 - protein, 15 aa, Artificial Sequence
  Description of Artificial Sequence: Synthetic peptide
  Seed: LRMKWMMAMKYPITA
LRMKWMMQMNYPSTA

SEQ ID NO: 244329 - protein, 15 aa, Artificial Sequence
  Description of Artificial Sequence: Synthetic peptide
  Seed: LRMKWMMAMKYPITA
LRMKWMMQMNYPTTA

SEQ ID NO: 244330 - protein, 15 aa, Artificial Sequence
  Description of Artificial Sequence: Synthetic peptide
  Seed: LRMKWMMAMKYPITA
LRMKWMMQMNYPVTA

SEQ ID NO: 244331 - protein, 15 aa, Artificial Sequence
  Description of Artificial Sequence: Synthetic peptide
  Seed: LRMKWMMAMKYPITA
LRMKWMMQMPYPATA

SEQ ID NO: 244332 - protein, 15 aa, Artificial Sequence
  Description of Artificial Sequence: Synthetic peptide
  Seed: LRMKWMMAMKYPITA
LRMKWMMQMPYPCTA

SEQ ID NO: 244333 - protein, 15 aa, Artificial Sequence
  Description of Artificial Sequence: Synthetic peptide
  Seed: LRMKWMMAMKYPITA
LRMKWMMQMPYPFTA

SEQ ID NO: 244334 - protein, 15 aa, Artificial Sequence
  Description of Artificial Sequence: Synthetic peptide
  Seed: LRMKWMMAMKYPITA
LRMKWMMQMPYPGTA

SEQ ID NO: 244335 - protein, 15 aa, Artificial Sequence
  Description of Artificial Sequence: Synthetic peptide
  Seed: LRMKWMMAMKYPITA
LRMKWMMQMPYPHTA

SEQ ID NO: 244336 - protein, 15 aa, Artificial Sequence
  Description of Artificial Sequence: Synthetic peptide
  Seed: LRMKWMMAMKYPITA
LRMKWMMQMPYPITA

SEQ ID NO: 244337 - protein, 15 aa, Artificial Sequence
  Description of Artificial Sequence: Synthetic peptide
  Seed: LRMKWMMAMKYPITA
LRMKWMMQMPYPLTA

SEQ ID NO: 244338 - protein, 15 aa, Artificial Sequence
  Description of Artificial Sequence: Synthetic peptide
  Seed: LRMKWMMAMKYPITA
LRMKWMMQMPYPMTA

SEQ ID NO: 244339 - protein, 15 aa, Artificial Sequence
  Description of Artificial Sequence: Synthetic peptide
  Seed: LRMKWMMAMKYPITA
LRMKWMMQMPYPNTA

SEQ ID NO: 244340 - protein, 15 aa, Artificial Sequence
  Description of Artificial Sequence: Synthetic peptide
  Seed: LRMKWMMAMKYPITA
LRMKWMMQMPYPPTA

SEQ ID NO: 244341 - protein, 15 aa, Artificial Sequence
  Description of Artificial Sequence: Synthetic peptide
  Seed: LRMKWMMAMKYPITA
LRMKWMMQMPYPQTA

SEQ ID NO: 244342 - protein, 15 aa, Artificial Sequence
  Description of Artificial Sequence: Synthetic peptide
  Seed: LRMKWMMAMKYPITA
LRMKWMMQMPYPSTA

SEQ ID NO: 244343 - protein, 15 aa, Artificial Sequence
  Description of Artificial Sequence: Synthetic peptide
  Seed: LRMKWMMAMKYPITA
LRMKWMMQMPYPTTA

SEQ ID NO: 244344 - protein, 15 aa, Artificial Sequence
  Description of Artificial Sequence: Synthetic peptide
  Seed: LRMKWMMAMKYPITA
LRMKWMMQMPYPVTA

SEQ ID NO: 244345 - protein, 15 aa, Artificial Sequence
  Description of Artificial Sequence: Synthetic peptide
  Seed: LRMKWMMAMKYPITA
LRMKWMMQMPYPWTA

SEQ ID NO: 244346 - protein, 15 aa, Artificial Sequence
  Description of Artificial Sequence: Synthetic peptide
  Seed: LRMKWMMAMKYPITA
LRMKWMMQMPYPYTA

SEQ ID NO: 244347 - protein, 15 aa, Artificial Sequence
  Description of Artificial Sequence: Synthetic peptide
  Seed: LRMKWMMAMKYPITA
LRMKWMMQMQYPATA

SEQ ID NO: 244348 - protein, 15 aa, Artificial Sequence
  Description of Artificial Sequence: Synthetic peptide
  Seed: LRMKWMMAMKYPITA
LRMKWMMQMQYPITA

SEQ ID NO: 244349 - protein, 15 aa, Artificial Sequence
  Description of Artificial Sequence: Synthetic peptide
  Seed: LRMKWMMAMKYPITA
LRMKWMMQMQYPLTA

SEQ ID NO: 244350 - protein, 15 aa, Artificial Sequence
  Description of Artificial Sequence: Synthetic peptide
  Seed: LRMKWMMAMKYPITA
LRMKWMMQMQYPVTA

SEQ ID NO: 244351 - protein, 15 aa, Artificial Sequence
  Description of Artificial Sequence: Synthetic peptide
  Seed: LRMKWMMAMKYPITA
LRMKWMMQMRYPATA

SEQ ID NO: 244352 - protein, 15 aa, Artificial Sequence
  Description of Artificial Sequence: Synthetic peptide
  Seed: LRMKWMMAMKYPITA
LRMKWMMQMRYPFTA

SEQ ID NO: 244353 - protein, 15 aa, Artificial Sequence
  Description of Artificial Sequence: Synthetic peptide
  Seed: LRMKWMMAMKYPITA
LRMKWMMQMRYPGTA

SEQ ID NO: 244354 - protein, 15 aa, Artificial Sequence
  Description of Artificial Sequence: Synthetic peptide
  Seed: LRMKWMMAMKYPITA
LRMKWMMQMRYPHTA

SEQ ID NO: 244355 - protein, 15 aa, Artificial Sequence
  Description of Artificial Sequence: Synthetic peptide
  Seed: LRMKWMMAMKYPITA
LRMKWMMQMRYPITA

SEQ ID NO: 244356 - protein, 15 aa, Artificial Sequence
  Description of Artificial Sequence: Synthetic peptide
  Seed: LRMKWMMAMKYPITA
LRMKWMMQMRYPKTA

SEQ ID NO: 244357 - protein, 15 aa, Artificial Sequence
  Description of Artificial Sequence: Synthetic peptide
  Seed: LRMKWMMAMKYPITA
LRMKWMMQMRYPLTA

SEQ ID NO: 244358 - protein, 15 aa, Artificial Sequence
  Description of Artificial Sequence: Synthetic peptide
  Seed: LRMKWMMAMKYPITA
LRMKWMMQMRYPMTA

SEQ ID NO: 244359 - protein, 15 aa, Artificial Sequence
  Description of Artificial Sequence: Synthetic peptide
  Seed: LRMKWMMAMKYPITA
LRMKWMMQMRYPQTA

SEQ ID NO: 244360 - protein, 15 aa, Artificial Sequence
  Description of Artificial Sequence: Synthetic peptide
  Seed: LRMKWMMAMKYPITA
LRMKWMMQMRYPRTA

SEQ ID NO: 244361 - protein, 15 aa, Artificial Sequence
  Description of Artificial Sequence: Synthetic peptide
  Seed: LRMKWMMAMKYPITA
LRMKWMMQMRYPSTA

SEQ ID NO: 244362 - protein, 15 aa, Artificial Sequence
  Description of Artificial Sequence: Synthetic peptide
  Seed: LRMKWMMAMKYPITA
LRMKWMMQMRYPTTA

SEQ ID NO: 244363 - protein, 15 aa, Artificial Sequence
  Description of Artificial Sequence: Synthetic peptide
  Seed: LRMKWMMAMKYPITA
LRMKWMMQMRYPVTA

SEQ ID NO: 244364 - protein, 15 aa, Artificial Sequence
  Description of Artificial Sequence: Synthetic peptide
  Seed: LRMKWMMAMKYPITA
LRMKWMMQMRYPYTA

SEQ ID NO: 244365 - protein, 15 aa, Artificial Sequence
  Description of Artificial Sequence: Synthetic peptide
  Seed: LRMKWMMAMKYPITA
LRMKWMMQMSYPATA

SEQ ID NO: 244366 - protein, 15 aa, Artificial Sequence
  Description of Artificial Sequence: Synthetic peptide
  Seed: LRMKWMMAMKYPITA
LRMKWMMQMSYPCTA

SEQ ID NO: 244367 - protein, 15 aa, Artificial Sequence
  Description of Artificial Sequence: Synthetic peptide
  Seed: LRMKWMMAMKYPITA
LRMKWMMQMSYPDTA

SEQ ID NO: 244368 - protein, 15 aa, Artificial Sequence
  Description of Artificial Sequence: Synthetic peptide
  Seed: LRMKWMMAMKYPITA
LRMKWMMQMSYPFTA

SEQ ID NO: 244369 - protein, 15 aa, Artificial Sequence
  Description of Artificial Sequence: Synthetic peptide
  Seed: LRMKWMMAMKYPITA
LRMKWMMQMSYPGTA

SEQ ID NO: 244370 - protein, 15 aa, Artificial Sequence
  Description of Artificial Sequence: Synthetic peptide
  Seed: LRMKWMMAMKYPITA
LRMKWMMQMSYPHTA

SEQ ID NO: 244371 - protein, 15 aa, Artificial Sequence
  Description of Artificial Sequence: Synthetic peptide
  Seed: LRMKWMMAMKYPITA
LRMKWMMQMSYPITA

SEQ ID NO: 244372 - protein, 15 aa, Artificial Sequence
  Description of Artificial Sequence: Synthetic peptide
  Seed: LRMKWMMAMKYPITA
LRMKWMMQMSYPKTA

SEQ ID NO: 244373 - protein, 15 aa, Artificial Sequence
  Description of Artificial Sequence: Synthetic peptide
  Seed: LRMKWMMAMKYPITA
LRMKWMMQMSYPLTA

SEQ ID NO: 244374 - protein, 15 aa, Artificial Sequence
  Description of Artificial Sequence: Synthetic peptide
  Seed: LRMKWMMAMKYPITA
LRMKWMMQMSYPMTA

SEQ ID NO: 244375 - protein, 15 aa, Artificial Sequence
  Description of Artificial Sequence: Synthetic peptide
  Seed: LRMKWMMAMKYPITA
LRMKWMMQMSYPNTA

SEQ ID NO: 244376 - protein, 15 aa, Artificial Sequence
  Description of Artificial Sequence: Synthetic peptide
  Seed: LRMKWMMAMKYPITA
LRMKWMMQMSYPPTA

SEQ ID NO: 244377 - protein, 15 aa, Artificial Sequence
  Description of Artificial Sequence: Synthetic peptide
  Seed: LRMKWMMAMKYPITA
LRMKWMMQMSYPQTA

SEQ ID NO: 244378 - protein, 15 aa, Artificial Sequence
  Description of Artificial Sequence: Synthetic peptide
  Seed: LRMKWMMAMKYPITA
LRMKWMMQMSYPRTA

SEQ ID NO: 244379 - protein, 15 aa, Artificial Sequence
  Description of Artificial Sequence: Synthetic peptide
  Seed: LRMKWMMAMKYPITA
LRMKWMMQMSYPSTA

SEQ ID NO: 244380 - protein, 15 aa, Artificial Sequence
  Description of Artificial Sequence: Synthetic peptide
  Seed: LRMKWMMAMKYPITA
LRMKWMMQMSYPTTA

SEQ ID NO: 244381 - protein, 15 aa, Artificial Sequence
  Description of Artificial Sequence: Synthetic peptide
  Seed: LRMKWMMAMKYPITA
LRMKWMMQMSYPVTA

SEQ ID NO: 244382 - protein, 15 aa, Artificial Sequence
  Description of Artificial Sequence: Synthetic peptide
  Seed: LRMKWMMAMKYPITA
LRMKWMMQMSYPWTA

SEQ ID NO: 244383 - protein, 15 aa, Artificial Sequence
  Description of Artificial Sequence: Synthetic peptide
  Seed: LRMKWMMAMKYPITA
LRMKWMMQMSYPYTA

SEQ ID NO: 244384 - protein, 15 aa, Artificial Sequence
  Description of Artificial Sequence: Synthetic peptide
  Seed: LRMKWMMAMKYPITA
LRMKWMMQMTYPATA

SEQ ID NO: 244385 - protein, 15 aa, Artificial Sequence
  Description of Artificial Sequence: Synthetic peptide
  Seed: LRMKWMMAMKYPITA
LRMKWMMQMTYPCTA

SEQ ID NO: 244386 - protein, 15 aa, Artificial Sequence
  Description of Artificial Sequence: Synthetic peptide
  Seed: LRMKWMMAMKYPITA
LRMKWMMQMTYPDTA

SEQ ID NO: 244387 - protein, 15 aa, Artificial Sequence
  Description of Artificial Sequence: Synthetic peptide
  Seed: LRMKWMMAMKYPITA
LRMKWMMQMTYPFTA

SEQ ID NO: 244388 - protein, 15 aa, Artificial Sequence
  Description of Artificial Sequence: Synthetic peptide
  Seed: LRMKWMMAMKYPITA
LRMKWMMQMTYPGTA

SEQ ID NO: 244389 - protein, 15 aa, Artificial Sequence
  Description of Artificial Sequence: Synthetic peptide
  Seed: LRMKWMMAMKYPITA
LRMKWMMQMTYPHTA

SEQ ID NO: 244390 - protein, 15 aa, Artificial Sequence
  Description of Artificial Sequence: Synthetic peptide
  Seed: LRMKWMMAMKYPITA
LRMKWMMQMTYPITA

SEQ ID NO: 244391 - protein, 15 aa, Artificial Sequence
  Description of Artificial Sequence: Synthetic peptide
  Seed: LRMKWMMAMKYPITA
LRMKWMMQMTYPLTA

SEQ ID NO: 244392 - protein, 15 aa, Artificial Sequence
  Description of Artificial Sequence: Synthetic peptide
  Seed: LRMKWMMAMKYPITA
LRMKWMMQMTYPMTA

SEQ ID NO: 244393 - protein, 15 aa, Artificial Sequence
  Description of Artificial Sequence: Synthetic peptide
  Seed: LRMKWMMAMKYPITA
LRMKWMMQMTYPNTA

SEQ ID NO: 244394 - protein, 15 aa, Artificial Sequence
  Description of Artificial Sequence: Synthetic peptide
  Seed: LRMKWMMAMKYPITA
LRMKWMMQMTYPPTA

SEQ ID NO: 244395 - protein, 15 aa, Artificial Sequence
  Description of Artificial Sequence: Synthetic peptide
  Seed: LRMKWMMAMKYPITA
LRMKWMMQMTYPQTA

SEQ ID NO: 244396 - protein, 15 aa, Artificial Sequence
  Description of Artificial Sequence: Synthetic peptide
  Seed: LRMKWMMAMKYPITA
LRMKWMMQMTYPSTA

SEQ ID NO: 244397 - protein, 15 aa, Artificial Sequence
  Description of Artificial Sequence: Synthetic peptide
  Seed: LRMKWMMAMKYPITA
LRMKWMMQMTYPTTA

SEQ ID NO: 244398 - protein, 15 aa, Artificial Sequence
  Description of Artificial Sequence: Synthetic peptide
  Seed: LRMKWMMAMKYPITA
LRMKWMMQMTYPVTA

SEQ ID NO: 244399 - protein, 15 aa, Artificial Sequence
  Description of Artificial Sequence: Synthetic peptide
  Seed: LRMKWMMAMKYPITA
LRMKWMMQMTYPYTA

SEQ ID NO: 244400 - protein, 15 aa, Artificial Sequence
  Description of Artificial Sequence: Synthetic peptide
  Seed: LRMKWMMAMKYPITA
LRMKWMMQMVYPATA

SEQ ID NO: 244401 - protein, 15 aa, Artificial Sequence
  Description of Artificial Sequence: Synthetic peptide
  Seed: LRMKWMMAMKYPITA
LRMKWMMQMVYPCTA

SEQ ID NO: 244402 - protein, 15 aa, Artificial Sequence
  Description of Artificial Sequence: Synthetic peptide
  Seed: LRMKWMMAMKYPITA
LRMKWMMQMVYPDTA

SEQ ID NO: 244403 - protein, 15 aa, Artificial Sequence
  Description of Artificial Sequence: Synthetic peptide
  Seed: LRMKWMMAMKYPITA
LRMKWMMQMVYPETA

SEQ ID NO: 244404 - protein, 15 aa, Artificial Sequence
  Description of Artificial Sequence: Synthetic peptide
  Seed: LRMKWMMAMKYPITA
LRMKWMMQMVYPFTA

SEQ ID NO: 244405 - protein, 15 aa, Artificial Sequence
  Description of Artificial Sequence: Synthetic peptide
  Seed: LRMKWMMAMKYPITA
LRMKWMMQMVYPGTA

SEQ ID NO: 244406 - protein, 15 aa, Artificial Sequence
  Description of Artificial Sequence: Synthetic peptide
  Seed: LRMKWMMAMKYPITA
LRMKWMMQMVYPHTA

SEQ ID NO: 244407 - protein, 15 aa, Artificial Sequence
  Description of Artificial Sequence: Synthetic peptide
  Seed: LRMKWMMAMKYPITA
LRMKWMMQMVYPITA

SEQ ID NO: 244408 - protein, 15 aa, Artificial Sequence
  Description of Artificial Sequence: Synthetic peptide
  Seed: LRMKWMMAMKYPITA
LRMKWMMQMVYPLTA

SEQ ID NO: 244409 - protein, 15 aa, Artificial Sequence
  Description of Artificial Sequence: Synthetic peptide
  Seed: LRMKWMMAMKYPITA
LRMKWMMQMVYPMTA

SEQ ID NO: 244410 - protein, 15 aa, Artificial Sequence
  Description of Artificial Sequence: Synthetic peptide
  Seed: LRMKWMMAMKYPITA
LRMKWMMQMVYPNTA

SEQ ID NO: 244411 - protein, 15 aa, Artificial Sequence
  Description of Artificial Sequence: Synthetic peptide
  Seed: LRMKWMMAMKYPITA
LRMKWMMQMVYPPTA

SEQ ID NO: 244412 - protein, 15 aa, Artificial Sequence
  Description of Artificial Sequence: Synthetic peptide
  Seed: LRMKWMMAMKYPITA
LRMKWMMQMVYPQTA

SEQ ID NO: 244413 - protein, 15 aa, Artificial Sequence
  Description of Artificial Sequence: Synthetic peptide
  Seed: LRMKWMMAMKYPITA
LRMKWMMQMVYPSTA

SEQ ID NO: 244414 - protein, 15 aa, Artificial Sequence
  Description of Artificial Sequence: Synthetic peptide
  Seed: LRMKWMMAMKYPITA
LRMKWMMQMVYPTTA

SEQ ID NO: 244415 - protein, 15 aa, Artificial Sequence
  Description of Artificial Sequence: Synthetic peptide
  Seed: LRMKWMMAMKYPITA
LRMKWMMQMVYPVTA

SEQ ID NO: 244416 - protein, 15 aa, Artificial Sequence
  Description of Artificial Sequence: Synthetic peptide
  Seed: LRMKWMMAMKYPITA
LRMKWMMQMWYPVTA

SEQ ID NO: 244417 - protein, 15 aa, Artificial Sequence
  Description of Artificial Sequence: Synthetic peptide
  Seed: LRMKWMMAMKYPITA
LRMKWMMRMAYPATA

SEQ ID NO: 244418 - protein, 15 aa, Artificial Sequence
  Description of Artificial Sequence: Synthetic peptide
  Seed: LRMKWMMAMKYPITA
LRMKWMMRMAYPCTA

SEQ ID NO: 244419 - protein, 15 aa, Artificial Sequence
  Description of Artificial Sequence: Synthetic peptide
  Seed: LRMKWMMAMKYPITA
LRMKWMMRMAYPFTA

SEQ ID NO: 244420 - protein, 15 aa, Artificial Sequence
  Description of Artificial Sequence: Synthetic peptide
  Seed: LRMKWMMAMKYPITA
LRMKWMMRMAYPITA

SEQ ID NO: 244421 - protein, 15 aa, Artificial Sequence
  Description of Artificial Sequence: Synthetic peptide
  Seed: LRMKWMMAMKYPITA
LRMKWMMRMAYPLTA

SEQ ID NO: 244422 - protein, 15 aa, Artificial Sequence
  Description of Artificial Sequence: Synthetic peptide
  Seed: LRMKWMMAMKYPITA
LRMKWMMRMAYPMTA

SEQ ID NO: 244423 - protein, 15 aa, Artificial Sequence
  Description of Artificial Sequence: Synthetic peptide
  Seed: LRMKWMMAMKYPITA
LRMKWMMRMAYPNTA

SEQ ID NO: 244424 - protein, 15 aa, Artificial Sequence
  Description of Artificial Sequence: Synthetic peptide
  Seed: LRMKWMMAMKYPITA
LRMKWMMRMAYPSTA

SEQ ID NO: 244425 - protein, 15 aa, Artificial Sequence
  Description of Artificial Sequence: Synthetic peptide
  Seed: LRMKWMMAMKYPITA
LRMKWMMRMAYPTTA

SEQ ID NO: 244426 - protein, 15 aa, Artificial Sequence
  Description of Artificial Sequence: Synthetic peptide
  Seed: LRMKWMMAMKYPITA
LRMKWMMRMAYPVTA

SEQ ID NO: 244427 - protein, 15 aa, Artificial Sequence
  Description of Artificial Sequence: Synthetic peptide
  Seed: LRMKWMMAMKYPITA
LRMKWMMRMGYPATA

SEQ ID NO: 244428 - protein, 15 aa, Artificial Sequence
  Description of Artificial Sequence: Synthetic peptide
  Seed: LRMKWMMAMKYPITA
LRMKWMMRMGYPITA

SEQ ID NO: 244429 - protein, 15 aa, Artificial Sequence
  Description of Artificial Sequence: Synthetic peptide
  Seed: LRMKWMMAMKYPITA
LRMKWMMRMGYPLTA

SEQ ID NO: 244430 - protein, 15 aa, Artificial Sequence
  Description of Artificial Sequence: Synthetic peptide
  Seed: LRMKWMMAMKYPITA
LRMKWMMRMGYPMTA

SEQ ID NO: 244431 - protein, 15 aa, Artificial Sequence
  Description of Artificial Sequence: Synthetic peptide
  Seed: LRMKWMMAMKYPITA
LRMKWMMRMGYPVTA

SEQ ID NO: 244432 - protein, 15 aa, Artificial Sequence
  Description of Artificial Sequence: Synthetic peptide
  Seed: LRMKWMMAMKYPITA
LRMKWMMRMKYPATA

SEQ ID NO: 244433 - protein, 15 aa, Artificial Sequence
  Description of Artificial Sequence: Synthetic peptide
  Seed: LRMKWMMAMKYPITA
LRMKWMMRMKYPCTA

SEQ ID NO: 244434 - protein, 15 aa, Artificial Sequence
  Description of Artificial Sequence: Synthetic peptide
  Seed: LRMKWMMAMKYPITA
LRMKWMMRMKYPGTA

SEQ ID NO: 244435 - protein, 15 aa, Artificial Sequence
  Description of Artificial Sequence: Synthetic peptide
  Seed: LRMKWMMAMKYPITA
LRMKWMMRMKYPMTA

SEQ ID NO: 244436 - protein, 15 aa, Artificial Sequence
  Description of Artificial Sequence: Synthetic peptide
  Seed: LRMKWMMAMKYPITA
LRMKWMMRMKYPQTA

SEQ ID NO: 244437 - protein, 15 aa, Artificial Sequence
  Description of Artificial Sequence: Synthetic peptide
  Seed: LRMKWMMAMKYPITA
LRMKWMMRMKYPRTA

SEQ ID NO: 244438 - protein, 15 aa, Artificial Sequence
  Description of Artificial Sequence: Synthetic peptide
  Seed: LRMKWMMAMKYPITA
LRMKWMMRMKYPSTA

SEQ ID NO: 244439 - protein, 15 aa, Artificial Sequence
  Description of Artificial Sequence: Synthetic peptide
  Seed: LRMKWMMAMKYPITA
LRMKWMMRMKYPVTA

SEQ ID NO: 244440 - protein, 15 aa, Artificial Sequence
  Description of Artificial Sequence: Synthetic peptide
  Seed: LRMKWMMAMKYPITA
LRMKWMMRMKYPYTA

SEQ ID NO: 244441 - protein, 15 aa, Artificial Sequence
  Description of Artificial Sequence: Synthetic peptide
  Seed: LRMKWMMAMKYPITA
LRMKWMMRMNYPITA

SEQ ID NO: 244442 - protein, 15 aa, Artificial Sequence
  Description of Artificial Sequence: Synthetic peptide
  Seed: LRMKWMMAMKYPITA
LRMKWMMRMNYPLTA

SEQ ID NO: 244443 - protein, 15 aa, Artificial Sequence
  Description of Artificial Sequence: Synthetic peptide
  Seed: LRMKWMMAMKYPITA
LRMKWMMRMNYPRTA

SEQ ID NO: 244444 - protein, 15 aa, Artificial Sequence
  Description of Artificial Sequence: Synthetic peptide
  Seed: LRMKWMMAMKYPITA
LRMKWMMRMNYPVTA

SEQ ID NO: 244445 - protein, 15 aa, Artificial Sequence
  Description of Artificial Sequence: Synthetic peptide
  Seed: LRMKWMMAMKYPITA
LRMKWMMRMNYPYTA

SEQ ID NO: 244446 - protein, 15 aa, Artificial Sequence
  Description of Artificial Sequence: Synthetic peptide
  Seed: LRMKWMMAMKYPITA
LRMKWMMRMPYPITA

SEQ ID NO: 244447 - protein, 15 aa, Artificial Sequence
  Description of Artificial Sequence: Synthetic peptide
  Seed: LRMKWMMAMKYPITA
LRMKWMMRMPYPLTA

SEQ ID NO: 244448 - protein, 15 aa, Artificial Sequence
  Description of Artificial Sequence: Synthetic peptide
  Seed: LRMKWMMAMKYPITA
LRMKWMMRMPYPVTA

SEQ ID NO: 244449 - protein, 15 aa, Artificial Sequence
  Description of Artificial Sequence: Synthetic peptide
  Seed: LRMKWMMAMKYPITA
LRMKWMMRMRYPATA

SEQ ID NO: 244450 - protein, 15 aa, Artificial Sequence
  Description of Artificial Sequence: Synthetic peptide
  Seed: LRMKWMMAMKYPITA
LRMKWMMRMRYPGTA

SEQ ID NO: 244451 - protein, 15 aa, Artificial Sequence
  Description of Artificial Sequence: Synthetic peptide
  Seed: LRMKWMMAMKYPITA
LRMKWMMRMRYPHTA

SEQ ID NO: 244452 - protein, 15 aa, Artificial Sequence
  Description of Artificial Sequence: Synthetic peptide
  Seed: LRMKWMMAMKYPITA
LRMKWMMRMRYPITA

SEQ ID NO: 244453 - protein, 15 aa, Artificial Sequence
  Description of Artificial Sequence: Synthetic peptide
  Seed: LRMKWMMAMKYPITA
LRMKWMMRMRYPLTA

SEQ ID NO: 244454 - protein, 15 aa, Artificial Sequence
  Description of Artificial Sequence: Synthetic peptide
  Seed: LRMKWMMAMKYPITA
LRMKWMMRMRYPMTA

SEQ ID NO: 244455 - protein, 15 aa, Artificial Sequence
  Description of Artificial Sequence: Synthetic peptide
  Seed: LRMKWMMAMKYPITA
LRMKWMMRMRYPNTA

SEQ ID NO: 244456 - protein, 15 aa, Artificial Sequence
  Description of Artificial Sequence: Synthetic peptide
  Seed: LRMKWMMAMKYPITA
LRMKWMMRMRYPQTA

SEQ ID NO: 244457 - protein, 15 aa, Artificial Sequence
  Description of Artificial Sequence: Synthetic peptide
  Seed: LRMKWMMAMKYPITA
LRMKWMMRMRYPRTA

SEQ ID NO: 244458 - protein, 15 aa, Artificial Sequence
  Description of Artificial Sequence: Synthetic peptide
  Seed: LRMKWMMAMKYPITA
LRMKWMMRMRYPSTA

SEQ ID NO: 244459 - protein, 15 aa, Artificial Sequence
  Description of Artificial Sequence: Synthetic peptide
  Seed: LRMKWMMAMKYPITA
LRMKWMMRMRYPTTA

SEQ ID NO: 244460 - protein, 15 aa, Artificial Sequence
  Description of Artificial Sequence: Synthetic peptide
  Seed: LRMKWMMAMKYPITA
LRMKWMMRMRYPVTA

SEQ ID NO: 244461 - protein, 15 aa, Artificial Sequence
  Description of Artificial Sequence: Synthetic peptide
  Seed: LRMKWMMAMKYPITA
LRMKWMMRMRYPYTA

SEQ ID NO: 244462 - protein, 15 aa, Artificial Sequence
  Description of Artificial Sequence: Synthetic peptide
  Seed: LRMKWMMAMKYPITA
LRMKWMMRMSYPATA

SEQ ID NO: 244463 - protein, 15 aa, Artificial Sequence
  Description of Artificial Sequence: Synthetic peptide
  Seed: LRMKWMMAMKYPITA
LRMKWMMRMSYPITA

SEQ ID NO: 244464 - protein, 15 aa, Artificial Sequence
  Description of Artificial Sequence: Synthetic peptide
  Seed: LRMKWMMAMKYPITA
LRMKWMMRMSYPLTA

SEQ ID NO: 244465 - protein, 15 aa, Artificial Sequence
  Description of Artificial Sequence: Synthetic peptide
  Seed: LRMKWMMAMKYPITA
LRMKWMMRMSYPMTA

SEQ ID NO: 244466 - protein, 15 aa, Artificial Sequence
  Description of Artificial Sequence: Synthetic peptide
  Seed: LRMKWMMAMKYPITA
LRMKWMMRMSYPRTA

SEQ ID NO: 244467 - protein, 15 aa, Artificial Sequence
  Description of Artificial Sequence: Synthetic peptide
  Seed: LRMKWMMAMKYPITA
LRMKWMMRMSYPVTA

SEQ ID NO: 244468 - protein, 15 aa, Artificial Sequence
  Description of Artificial Sequence: Synthetic peptide
  Seed: LRMKWMMAMKYPITA
LRMKWMMRMSYPYTA

SEQ ID NO: 244469 - protein, 15 aa, Artificial Sequence
  Description of Artificial Sequence: Synthetic peptide
  Seed: LRMKWMMAMKYPITA
LRMKWMMRMTYPATA

SEQ ID NO: 244470 - protein, 15 aa, Artificial Sequence
  Description of Artificial Sequence: Synthetic peptide
  Seed: LRMKWMMAMKYPITA
LRMKWMMRMTYPITA

SEQ ID NO: 244471 - protein, 15 aa, Artificial Sequence
  Description of Artificial Sequence: Synthetic peptide
  Seed: LRMKWMMAMKYPITA
LRMKWMMRMTYPLTA

SEQ ID NO: 244472 - protein, 15 aa, Artificial Sequence
  Description of Artificial Sequence: Synthetic peptide
  Seed: LRMKWMMAMKYPITA
LRMKWMMRMTYPMTA

SEQ ID NO: 244473 - protein, 15 aa, Artificial Sequence
  Description of Artificial Sequence: Synthetic peptide
  Seed: LRMKWMMAMKYPITA
LRMKWMMRMTYPRTA

SEQ ID NO: 244474 - protein, 15 aa, Artificial Sequence
  Description of Artificial Sequence: Synthetic peptide
  Seed: LRMKWMMAMKYPITA
LRMKWMMRMTYPVTA

SEQ ID NO: 244475 - protein, 15 aa, Artificial Sequence
  Description of Artificial Sequence: Synthetic peptide
  Seed: LRMKWMMAMKYPITA
LRMKWMMRMTYPYTA

SEQ ID NO: 244476 - protein, 15 aa, Artificial Sequence
  Description of Artificial Sequence: Synthetic peptide
  Seed: LRMKWMMAMKYPITA
LRMKWMMRMVYPATA

SEQ ID NO: 244477 - protein, 15 aa, Artificial Sequence
  Description of Artificial Sequence: Synthetic peptide
  Seed: LRMKWMMAMKYPITA
LRMKWMMRMVYPITA

SEQ ID NO: 244478 - protein, 15 aa, Artificial Sequence
  Description of Artificial Sequence: Synthetic peptide
  Seed: LRMKWMMAMKYPITA
LRMKWMMRMVYPLTA

SEQ ID NO: 244479 - protein, 15 aa, Artificial Sequence
  Description of Artificial Sequence: Synthetic peptide
  Seed: LRMKWMMAMKYPITA
LRMKWMMRMVYPRTA

SEQ ID NO: 244480 - protein, 15 aa, Artificial Sequence
  Description of Artificial Sequence: Synthetic peptide
  Seed: LRMKWMMAMKYPITA
LRMKWMMRMVYPVTA

SEQ ID NO: 244481 - protein, 15 aa, Artificial Sequence
  Description of Artificial Sequence: Synthetic peptide
  Seed: LRMKWMMAMKYPITA
LRMKWMMRMVYPYTA

SEQ ID NO: 244482 - protein, 15 aa, Artificial Sequence
  Description of Artificial Sequence: Synthetic peptide
  Seed: LRMKWMMAMKYPITA
LRMKWMMSMAYPATA

SEQ ID NO: 244483 - protein, 15 aa, Artificial Sequence
  Description of Artificial Sequence: Synthetic peptide
  Seed: LRMKWMMAMKYPITA
LRMKWMMSMAYPCTA

SEQ ID NO: 244484 - protein, 15 aa, Artificial Sequence
  Description of Artificial Sequence: Synthetic peptide
  Seed: LRMKWMMAMKYPITA
LRMKWMMSMAYPDTA

SEQ ID NO: 244485 - protein, 15 aa, Artificial Sequence
  Description of Artificial Sequence: Synthetic peptide
  Seed: LRMKWMMAMKYPITA
LRMKWMMSMAYPETA

SEQ ID NO: 244486 - protein, 15 aa, Artificial Sequence
  Description of Artificial Sequence: Synthetic peptide
  Seed: LRMKWMMAMKYPITA
LRMKWMMSMAYPFTA

SEQ ID NO: 244487 - protein, 15 aa, Artificial Sequence
  Description of Artificial Sequence: Synthetic peptide
  Seed: LRMKWMMAMKYPITA
LRMKWMMSMAYPGTA

SEQ ID NO: 244488 - protein, 15 aa, Artificial Sequence
  Description of Artificial Sequence: Synthetic peptide
  Seed: LRMKWMMAMKYPITA
LRMKWMMSMAYPHTA

SEQ ID NO: 244489 - protein, 15 aa, Artificial Sequence
  Description of Artificial Sequence: Synthetic peptide
  Seed: LRMKWMMAMKYPITA
LRMKWMMSMAYPITA

SEQ ID NO: 244490 - protein, 15 aa, Artificial Sequence
  Description of Artificial Sequence: Synthetic peptide
  Seed: LRMKWMMAMKYPITA
LRMKWMMSMAYPKTA

SEQ ID NO: 244491 - protein, 15 aa, Artificial Sequence
  Description of Artificial Sequence: Synthetic peptide
  Seed: LRMKWMMAMKYPITA
LRMKWMMSMAYPLTA

SEQ ID NO: 244492 - protein, 15 aa, Artificial Sequence
  Description of Artificial Sequence: Synthetic peptide
  Seed: LRMKWMMAMKYPITA
LRMKWMMSMAYPMTA

SEQ ID NO: 244493 - protein, 15 aa, Artificial Sequence
  Description of Artificial Sequence: Synthetic peptide
  Seed: LRMKWMMAMKYPITA
LRMKWMMSMAYPNTA

SEQ ID NO: 244494 - protein, 15 aa, Artificial Sequence
  Description of Artificial Sequence: Synthetic peptide
  Seed: LRMKWMMAMKYPITA
LRMKWMMSMAYPPTA

SEQ ID NO: 244495 - protein, 15 aa, Artificial Sequence
  Description of Artificial Sequence: Synthetic peptide
  Seed: LRMKWMMAMKYPITA
LRMKWMMSMAYPQTA

SEQ ID NO: 244496 - protein, 15 aa, Artificial Sequence
  Description of Artificial Sequence: Synthetic peptide
  Seed: LRMKWMMAMKYPITA
LRMKWMMSMAYPRTA

SEQ ID NO: 244497 - protein, 15 aa, Artificial Sequence
  Description of Artificial Sequence: Synthetic peptide
  Seed: LRMKWMMAMKYPITA
LRMKWMMSMAYPSTA

SEQ ID NO: 244498 - protein, 15 aa, Artificial Sequence
  Description of Artificial Sequence: Synthetic peptide
  Seed: LRMKWMMAMKYPITA
LRMKWMMSMAYPTTA

SEQ ID NO: 244499 - protein, 15 aa, Artificial Sequence
  Description of Artificial Sequence: Synthetic peptide
  Seed: LRMKWMMAMKYPITA
LRMKWMMSMAYPVTA

SEQ ID NO: 244500 - protein, 15 aa, Artificial Sequence
  Description of Artificial Sequence: Synthetic peptide
  Seed: LRMKWMMAMKYPITA
LRMKWMMSMAYPWTA

SEQ ID NO: 244501 - protein, 15 aa, Artificial Sequence
  Description of Artificial Sequence: Synthetic peptide
  Seed: LRMKWMMAMKYPITA
LRMKWMMSMAYPYTA

SEQ ID NO: 244502 - protein, 15 aa, Artificial Sequence
  Description of Artificial Sequence: Synthetic peptide
  Seed: LRMKWMMAMKYPITA
LRMKWMMSMCYPATA

SEQ ID NO: 244503 - protein, 15 aa, Artificial Sequence
  Description of Artificial Sequence: Synthetic peptide
  Seed: LRMKWMMAMKYPITA
LRMKWMMSMCYPITA

SEQ ID NO: 244504 - protein, 15 aa, Artificial Sequence
  Description of Artificial Sequence: Synthetic peptide
  Seed: LRMKWMMAMKYPITA
LRMKWMMSMCYPLTA

SEQ ID NO: 244505 - protein, 15 aa, Artificial Sequence
  Description of Artificial Sequence: Synthetic peptide
  Seed: LRMKWMMAMKYPITA
LRMKWMMSMCYPMTA

SEQ ID NO: 244506 - protein, 15 aa, Artificial Sequence
  Description of Artificial Sequence: Synthetic peptide
  Seed: LRMKWMMAMKYPITA
LRMKWMMSMCYPVTA

SEQ ID NO: 244507 - protein, 15 aa, Artificial Sequence
  Description of Artificial Sequence: Synthetic peptide
  Seed: LRMKWMMAMKYPITA
LRMKWMMSMDYPATA

SEQ ID NO: 244508 - protein, 15 aa, Artificial Sequence
  Description of Artificial Sequence: Synthetic peptide
  Seed: LRMKWMMAMKYPITA
LRMKWMMSMDYPITA

SEQ ID NO: 244509 - protein, 15 aa, Artificial Sequence
  Description of Artificial Sequence: Synthetic peptide
  Seed: LRMKWMMAMKYPITA
LRMKWMMSMDYPLTA

SEQ ID NO: 244510 - protein, 15 aa, Artificial Sequence
  Description of Artificial Sequence: Synthetic peptide
  Seed: LRMKWMMAMKYPITA
LRMKWMMSMDYPVTA

SEQ ID NO: 244511 - protein, 15 aa, Artificial Sequence
  Description of Artificial Sequence: Synthetic peptide
  Seed: LRMKWMMAMKYPITA
LRMKWMMSMEYPATA

SEQ ID NO: 244512 - protein, 15 aa, Artificial Sequence
  Description of Artificial Sequence: Synthetic peptide
  Seed: LRMKWMMAMKYPITA
LRMKWMMSMEYPITA

SEQ ID NO: 244513 - protein, 15 aa, Artificial Sequence
  Description of Artificial Sequence: Synthetic peptide
  Seed: LRMKWMMAMKYPITA
LRMKWMMSMEYPLTA

SEQ ID NO: 244514 - protein, 15 aa, Artificial Sequence
  Description of Artificial Sequence: Synthetic peptide
  Seed: LRMKWMMAMKYPITA
LRMKWMMSMEYPVTA

SEQ ID NO: 244515 - protein, 15 aa, Artificial Sequence
  Description of Artificial Sequence: Synthetic peptide
  Seed: LRMKWMMAMKYPITA
LRMKWMMSMFYPATA

SEQ ID NO: 244516 - protein, 15 aa, Artificial Sequence
  Description of Artificial Sequence: Synthetic peptide
  Seed: LRMKWMMAMKYPITA
LRMKWMMSMFYPETA

SEQ ID NO: 244517 - protein, 15 aa, Artificial Sequence
  Description of Artificial Sequence: Synthetic peptide
  Seed: LRMKWMMAMKYPITA
LRMKWMMSMFYPFTA

SEQ ID NO: 244518 - protein, 15 aa, Artificial Sequence
  Description of Artificial Sequence: Synthetic peptide
  Seed: LRMKWMMAMKYPITA
LRMKWMMSMFYPITA

SEQ ID NO: 244519 - protein, 15 aa, Artificial Sequence
  Description of Artificial Sequence: Synthetic peptide
  Seed: LRMKWMMAMKYPITA
LRMKWMMSMFYPLTA

SEQ ID NO: 244520 - protein, 15 aa, Artificial Sequence
  Description of Artificial Sequence: Synthetic peptide
  Seed: LRMKWMMAMKYPITA
LRMKWMMSMFYPMTA

SEQ ID NO: 244521 - protein, 15 aa, Artificial Sequence
  Description of Artificial Sequence: Synthetic peptide
  Seed: LRMKWMMAMKYPITA
LRMKWMMSMFYPTTA

SEQ ID NO: 244522 - protein, 15 aa, Artificial Sequence
  Description of Artificial Sequence: Synthetic peptide
  Seed: LRMKWMMAMKYPITA
LRMKWMMSMFYPVTA

SEQ ID NO: 244523 - protein, 15 aa, Artificial Sequence
  Description of Artificial Sequence: Synthetic peptide
  Seed: LRMKWMMAMKYPITA
LRMKWMMSMFYPYTA

SEQ ID NO: 244524 - protein, 15 aa, Artificial Sequence
  Description of Artificial Sequence: Synthetic peptide
  Seed: LRMKWMMAMKYPITA
LRMKWMMSMGYPATA

SEQ ID NO: 244525 - protein, 15 aa, Artificial Sequence
  Description of Artificial Sequence: Synthetic peptide
  Seed: LRMKWMMAMKYPITA
LRMKWMMSMGYPCTA

SEQ ID NO: 244526 - protein, 15 aa, Artificial Sequence
  Description of Artificial Sequence: Synthetic peptide
  Seed: LRMKWMMAMKYPITA
LRMKWMMSMGYPFTA

SEQ ID NO: 244527 - protein, 15 aa, Artificial Sequence
  Description of Artificial Sequence: Synthetic peptide
  Seed: LRMKWMMAMKYPITA
LRMKWMMSMGYPGTA

SEQ ID NO: 244528 - protein, 15 aa, Artificial Sequence
  Description of Artificial Sequence: Synthetic peptide
  Seed: LRMKWMMAMKYPITA
LRMKWMMSMGYPHTA

SEQ ID NO: 244529 - protein, 15 aa, Artificial Sequence
  Description of Artificial Sequence: Synthetic peptide
  Seed: LRMKWMMAMKYPITA
LRMKWMMSMGYPITA

SEQ ID NO: 244530 - protein, 15 aa, Artificial Sequence
  Description of Artificial Sequence: Synthetic peptide
  Seed: LRMKWMMAMKYPITA
LRMKWMMSMGYPKTA

SEQ ID NO: 244531 - protein, 15 aa, Artificial Sequence
  Description of Artificial Sequence: Synthetic peptide
  Seed: LRMKWMMAMKYPITA
LRMKWMMSMGYPLTA

SEQ ID NO: 244532 - protein, 15 aa, Artificial Sequence
  Description of Artificial Sequence: Synthetic peptide
  Seed: LRMKWMMAMKYPITA
LRMKWMMSMGYPMTA

SEQ ID NO: 244533 - protein, 15 aa, Artificial Sequence
  Description of Artificial Sequence: Synthetic peptide
  Seed: LRMKWMMAMKYPITA
LRMKWMMSMGYPNTA

SEQ ID NO: 244534 - protein, 15 aa, Artificial Sequence
  Description of Artificial Sequence: Synthetic peptide
  Seed: LRMKWMMAMKYPITA
LRMKWMMSMGYPPTA

SEQ ID NO: 244535 - protein, 15 aa, Artificial Sequence
  Description of Artificial Sequence: Synthetic peptide
  Seed: LRMKWMMAMKYPITA
LRMKWMMSMGYPQTA

SEQ ID NO: 244536 - protein, 15 aa, Artificial Sequence
  Description of Artificial Sequence: Synthetic peptide
  Seed: LRMKWMMAMKYPITA
LRMKWMMSMGYPRTA

SEQ ID NO: 244537 - protein, 15 aa, Artificial Sequence
  Description of Artificial Sequence: Synthetic peptide
  Seed: LRMKWMMAMKYPITA
LRMKWMMSMGYPSTA

SEQ ID NO: 244538 - protein, 15 aa, Artificial Sequence
  Description of Artificial Sequence: Synthetic peptide
  Seed: LRMKWMMAMKYPITA
LRMKWMMSMGYPTTA

SEQ ID NO: 244539 - protein, 15 aa, Artificial Sequence
  Description of Artificial Sequence: Synthetic peptide
  Seed: LRMKWMMAMKYPITA
LRMKWMMSMGYPVTA

SEQ ID NO: 244540 - protein, 15 aa, Artificial Sequence
  Description of Artificial Sequence: Synthetic peptide
  Seed: LRMKWMMAMKYPITA
LRMKWMMSMGYPWTA

SEQ ID NO: 244541 - protein, 15 aa, Artificial Sequence
  Description of Artificial Sequence: Synthetic peptide
  Seed: LRMKWMMAMKYPITA
LRMKWMMSMGYPYTA

SEQ ID NO: 244542 - protein, 15 aa, Artificial Sequence
  Description of Artificial Sequence: Synthetic peptide
  Seed: LRMKWMMAMKYPITA
LRMKWMMSMHYPATA

SEQ ID NO: 244543 - protein, 15 aa, Artificial Sequence
  Description of Artificial Sequence: Synthetic peptide
  Seed: LRMKWMMAMKYPITA
LRMKWMMSMHYPITA

SEQ ID NO: 244544 - protein, 15 aa, Artificial Sequence
  Description of Artificial Sequence: Synthetic peptide
  Seed: LRMKWMMAMKYPITA
LRMKWMMSMHYPLTA

SEQ ID NO: 244545 - protein, 15 aa, Artificial Sequence
  Description of Artificial Sequence: Synthetic peptide
  Seed: LRMKWMMAMKYPITA
LRMKWMMSMHYPMTA

SEQ ID NO: 244546 - protein, 15 aa, Artificial Sequence
  Description of Artificial Sequence: Synthetic peptide
  Seed: LRMKWMMAMKYPITA
LRMKWMMSMHYPTTA

SEQ ID NO: 244547 - protein, 15 aa, Artificial Sequence
  Description of Artificial Sequence: Synthetic peptide
  Seed: LRMKWMMAMKYPITA
LRMKWMMSMHYPVTA

SEQ ID NO: 244548 - protein, 15 aa, Artificial Sequence
  Description of Artificial Sequence: Synthetic peptide
  Seed: LRMKWMMAMKYPITA
LRMKWMMSMIYPATA

SEQ ID NO: 244549 - protein, 15 aa, Artificial Sequence
  Description of Artificial Sequence: Synthetic peptide
  Seed: LRMKWMMAMKYPITA
LRMKWMMSMIYPCTA

SEQ ID NO: 244550 - protein, 15 aa, Artificial Sequence
  Description of Artificial Sequence: Synthetic peptide
  Seed: LRMKWMMAMKYPITA
LRMKWMMSMIYPDTA

SEQ ID NO: 244551 - protein, 15 aa, Artificial Sequence
  Description of Artificial Sequence: Synthetic peptide
  Seed: LRMKWMMAMKYPITA
LRMKWMMSMIYPETA

SEQ ID NO: 244552 - protein, 15 aa, Artificial Sequence
  Description of Artificial Sequence: Synthetic peptide
  Seed: LRMKWMMAMKYPITA
LRMKWMMSMIYPFTA

SEQ ID NO: 244553 - protein, 15 aa, Artificial Sequence
  Description of Artificial Sequence: Synthetic peptide
  Seed: LRMKWMMAMKYPITA
LRMKWMMSMIYPGTA

SEQ ID NO: 244554 - protein, 15 aa, Artificial Sequence
  Description of Artificial Sequence: Synthetic peptide
  Seed: LRMKWMMAMKYPITA
LRMKWMMSMIYPHTA

SEQ ID NO: 244555 - protein, 15 aa, Artificial Sequence
  Description of Artificial Sequence: Synthetic peptide
  Seed: LRMKWMMAMKYPITA
LRMKWMMSMIYPITA

SEQ ID NO: 244556 - protein, 15 aa, Artificial Sequence
  Description of Artificial Sequence: Synthetic peptide
  Seed: LRMKWMMAMKYPITA
LRMKWMMSMIYPKTA

SEQ ID NO: 244557 - protein, 15 aa, Artificial Sequence
  Description of Artificial Sequence: Synthetic peptide
  Seed: LRMKWMMAMKYPITA
LRMKWMMSMIYPLTA

SEQ ID NO: 244558 - protein, 15 aa, Artificial Sequence
  Description of Artificial Sequence: Synthetic peptide
  Seed: LRMKWMMAMKYPITA
LRMKWMMSMIYPMTA

SEQ ID NO: 244559 - protein, 15 aa, Artificial Sequence
  Description of Artificial Sequence: Synthetic peptide
  Seed: LRMKWMMAMKYPITA
LRMKWMMSMIYPNTA

SEQ ID NO: 244560 - protein, 15 aa, Artificial Sequence
  Description of Artificial Sequence: Synthetic peptide
  Seed: LRMKWMMAMKYPITA
LRMKWMMSMIYPPTA

SEQ ID NO: 244561 - protein, 15 aa, Artificial Sequence
  Description of Artificial Sequence: Synthetic peptide
  Seed: LRMKWMMAMKYPITA
LRMKWMMSMIYPQTA

SEQ ID NO: 244562 - protein, 15 aa, Artificial Sequence
  Description of Artificial Sequence: Synthetic peptide
  Seed: LRMKWMMAMKYPITA
LRMKWMMSMIYPSTA

SEQ ID NO: 244563 - protein, 15 aa, Artificial Sequence
  Description of Artificial Sequence: Synthetic peptide
  Seed: LRMKWMMAMKYPITA
LRMKWMMSMIYPTTA

SEQ ID NO: 244564 - protein, 15 aa, Artificial Sequence
  Description of Artificial Sequence: Synthetic peptide
  Seed: LRMKWMMAMKYPITA
LRMKWMMSMIYPVTA

SEQ ID NO: 244565 - protein, 15 aa, Artificial Sequence
  Description of Artificial Sequence: Synthetic peptide
  Seed: LRMKWMMAMKYPITA
LRMKWMMSMIYPYTA

SEQ ID NO: 244566 - protein, 15 aa, Artificial Sequence
  Description of Artificial Sequence: Synthetic peptide
  Seed: LRMKWMMAMKYPITA
LRMKWMMSMKYPATA

SEQ ID NO: 244567 - protein, 15 aa, Artificial Sequence
  Description of Artificial Sequence: Synthetic peptide
  Seed: LRMKWMMAMKYPITA
LRMKWMMSMKYPFTA

SEQ ID NO: 244568 - protein, 15 aa, Artificial Sequence
  Description of Artificial Sequence: Synthetic peptide
  Seed: LRMKWMMAMKYPITA
LRMKWMMSMKYPGTA

SEQ ID NO: 244569 - protein, 15 aa, Artificial Sequence
  Description of Artificial Sequence: Synthetic peptide
  Seed: LRMKWMMAMKYPITA
LRMKWMMSMKYPHTA

SEQ ID NO: 244570 - protein, 15 aa, Artificial Sequence
  Description of Artificial Sequence: Synthetic peptide
  Seed: LRMKWMMAMKYPITA
LRMKWMMSMKYPKTA

SEQ ID NO: 244571 - protein, 15 aa, Artificial Sequence
  Description of Artificial Sequence: Synthetic peptide
  Seed: LRMKWMMAMKYPITA
LRMKWMMSMKYPLTA

SEQ ID NO: 244572 - protein, 15 aa, Artificial Sequence
  Description of Artificial Sequence: Synthetic peptide
  Seed: LRMKWMMAMKYPITA
LRMKWMMSMKYPMTA

SEQ ID NO: 244573 - protein, 15 aa, Artificial Sequence
  Description of Artificial Sequence: Synthetic peptide
  Seed: LRMKWMMAMKYPITA
LRMKWMMSMKYPQTA

SEQ ID NO: 244574 - protein, 15 aa, Artificial Sequence
  Description of Artificial Sequence: Synthetic peptide
  Seed: LRMKWMMAMKYPITA
LRMKWMMSMKYPRTA

SEQ ID NO: 244575 - protein, 15 aa, Artificial Sequence
  Description of Artificial Sequence: Synthetic peptide
  Seed: LRMKWMMAMKYPITA
LRMKWMMSMKYPSTA

SEQ ID NO: 244576 - protein, 15 aa, Artificial Sequence
  Description of Artificial Sequence: Synthetic peptide
  Seed: LRMKWMMAMKYPITA
LRMKWMMSMKYPTTA

SEQ ID NO: 244577 - protein, 15 aa, Artificial Sequence
  Description of Artificial Sequence: Synthetic peptide
  Seed: LRMKWMMAMKYPITA
LRMKWMMSMKYPVTA

SEQ ID NO: 244578 - protein, 15 aa, Artificial Sequence
  Description of Artificial Sequence: Synthetic peptide
  Seed: LRMKWMMAMKYPITA
LRMKWMMSMKYPYTA

SEQ ID NO: 244579 - protein, 15 aa, Artificial Sequence
  Description of Artificial Sequence: Synthetic peptide
  Seed: LRMKWMMAMKYPITA
LRMKWMMSMLYPATA

SEQ ID NO: 244580 - protein, 15 aa, Artificial Sequence
  Description of Artificial Sequence: Synthetic peptide
  Seed: LRMKWMMAMKYPITA
LRMKWMMSMLYPGTA

SEQ ID NO: 244581 - protein, 15 aa, Artificial Sequence
  Description of Artificial Sequence: Synthetic peptide
  Seed: LRMKWMMAMKYPITA
LRMKWMMSMLYPITA

SEQ ID NO: 244582 - protein, 15 aa, Artificial Sequence
  Description of Artificial Sequence: Synthetic peptide
  Seed: LRMKWMMAMKYPITA
LRMKWMMSMLYPLTA

SEQ ID NO: 244583 - protein, 15 aa, Artificial Sequence
  Description of Artificial Sequence: Synthetic peptide
  Seed: LRMKWMMAMKYPITA
LRMKWMMSMLYPMTA

SEQ ID NO: 244584 - protein, 15 aa, Artificial Sequence
  Description of Artificial Sequence: Synthetic peptide
  Seed: LRMKWMMAMKYPITA
LRMKWMMSMLYPSTA

SEQ ID NO: 244585 - protein, 15 aa, Artificial Sequence
  Description of Artificial Sequence: Synthetic peptide
  Seed: LRMKWMMAMKYPITA
LRMKWMMSMLYPTTA

SEQ ID NO: 244586 - protein, 15 aa, Artificial Sequence
  Description of Artificial Sequence: Synthetic peptide
  Seed: LRMKWMMAMKYPITA
LRMKWMMSMLYPVTA

SEQ ID NO: 244587 - protein, 15 aa, Artificial Sequence
  Description of Artificial Sequence: Synthetic peptide
  Seed: LRMKWMMAMKYPITA
LRMKWMMSMMYPATA

SEQ ID NO: 244588 - protein, 15 aa, Artificial Sequence
  Description of Artificial Sequence: Synthetic peptide
  Seed: LRMKWMMAMKYPITA
LRMKWMMSMMYPCTA

SEQ ID NO: 244589 - protein, 15 aa, Artificial Sequence
  Description of Artificial Sequence: Synthetic peptide
  Seed: LRMKWMMAMKYPITA
LRMKWMMSMMYPFTA

SEQ ID NO: 244590 - protein, 15 aa, Artificial Sequence
  Description of Artificial Sequence: Synthetic peptide
  Seed: LRMKWMMAMKYPITA
LRMKWMMSMMYPGTA

SEQ ID NO: 244591 - protein, 15 aa, Artificial Sequence
  Description of Artificial Sequence: Synthetic peptide
  Seed: LRMKWMMAMKYPITA
LRMKWMMSMMYPITA

SEQ ID NO: 244592 - protein, 15 aa, Artificial Sequence
  Description of Artificial Sequence: Synthetic peptide
  Seed: LRMKWMMAMKYPITA
LRMKWMMSMMYPLTA

SEQ ID NO: 244593 - protein, 15 aa, Artificial Sequence
  Description of Artificial Sequence: Synthetic peptide
  Seed: LRMKWMMAMKYPITA
LRMKWMMSMMYPMTA

SEQ ID NO: 244594 - protein, 15 aa, Artificial Sequence
  Description of Artificial Sequence: Synthetic peptide
  Seed: LRMKWMMAMKYPITA
LRMKWMMSMMYPSTA

SEQ ID NO: 244595 - protein, 15 aa, Artificial Sequence
  Description of Artificial Sequence: Synthetic peptide
  Seed: LRMKWMMAMKYPITA
LRMKWMMSMMYPTTA

SEQ ID NO: 244596 - protein, 15 aa, Artificial Sequence
  Description of Artificial Sequence: Synthetic peptide
  Seed: LRMKWMMAMKYPITA
LRMKWMMSMMYPVTA

SEQ ID NO: 244597 - protein, 15 aa, Artificial Sequence
  Description of Artificial Sequence: Synthetic peptide
  Seed: LRMKWMMAMKYPITA
LRMKWMMSMNYPATA

SEQ ID NO: 244598 - protein, 15 aa, Artificial Sequence
  Description of Artificial Sequence: Synthetic peptide
  Seed: LRMKWMMAMKYPITA
LRMKWMMSMNYPCTA

SEQ ID NO: 244599 - protein, 15 aa, Artificial Sequence
  Description of Artificial Sequence: Synthetic peptide
  Seed: LRMKWMMAMKYPITA
LRMKWMMSMNYPDTA

SEQ ID NO: 244600 - protein, 15 aa, Artificial Sequence
  Description of Artificial Sequence: Synthetic peptide
  Seed: LRMKWMMAMKYPITA
LRMKWMMSMNYPFTA

SEQ ID NO: 244601 - protein, 15 aa, Artificial Sequence
  Description of Artificial Sequence: Synthetic peptide
  Seed: LRMKWMMAMKYPITA
LRMKWMMSMNYPGTA

SEQ ID NO: 244602 - protein, 15 aa, Artificial Sequence
  Description of Artificial Sequence: Synthetic peptide
  Seed: LRMKWMMAMKYPITA
LRMKWMMSMNYPITA

SEQ ID NO: 244603 - protein, 15 aa, Artificial Sequence
  Description of Artificial Sequence: Synthetic peptide
  Seed: LRMKWMMAMKYPITA
LRMKWMMSMNYPLTA

SEQ ID NO: 244604 - protein, 15 aa, Artificial Sequence
  Description of Artificial Sequence: Synthetic peptide
  Seed: LRMKWMMAMKYPITA
LRMKWMMSMNYPMTA

SEQ ID NO: 244605 - protein, 15 aa, Artificial Sequence
  Description of Artificial Sequence: Synthetic peptide
  Seed: LRMKWMMAMKYPITA
LRMKWMMSMNYPNTA

SEQ ID NO: 244606 - protein, 15 aa, Artificial Sequence
  Description of Artificial Sequence: Synthetic peptide
  Seed: LRMKWMMAMKYPITA
LRMKWMMSMNYPQTA

SEQ ID NO: 244607 - protein, 15 aa, Artificial Sequence
  Description of Artificial Sequence: Synthetic peptide
  Seed: LRMKWMMAMKYPITA
LRMKWMMSMNYPSTA

SEQ ID NO: 244608 - protein, 15 aa, Artificial Sequence
  Description of Artificial Sequence: Synthetic peptide
  Seed: LRMKWMMAMKYPITA
LRMKWMMSMNYPTTA

SEQ ID NO: 244609 - protein, 15 aa, Artificial Sequence
  Description of Artificial Sequence: Synthetic peptide
  Seed: LRMKWMMAMKYPITA
LRMKWMMSMNYPVTA

SEQ ID NO: 244610 - protein, 15 aa, Artificial Sequence
  Description of Artificial Sequence: Synthetic peptide
  Seed: LRMKWMMAMKYPITA
LRMKWMMSMNYPYTA

SEQ ID NO: 244611 - protein, 15 aa, Artificial Sequence
  Description of Artificial Sequence: Synthetic peptide
  Seed: LRMKWMMAMKYPITA
LRMKWMMSMPYPATA

SEQ ID NO: 244612 - protein, 15 aa, Artificial Sequence
  Description of Artificial Sequence: Synthetic peptide
  Seed: LRMKWMMAMKYPITA
LRMKWMMSMPYPCTA

SEQ ID NO: 244613 - protein, 15 aa, Artificial Sequence
  Description of Artificial Sequence: Synthetic peptide
  Seed: LRMKWMMAMKYPITA
LRMKWMMSMPYPDTA

SEQ ID NO: 244614 - protein, 15 aa, Artificial Sequence
  Description of Artificial Sequence: Synthetic peptide
  Seed: LRMKWMMAMKYPITA
LRMKWMMSMPYPETA

SEQ ID NO: 244615 - protein, 15 aa, Artificial Sequence
  Description of Artificial Sequence: Synthetic peptide
  Seed: LRMKWMMAMKYPITA
LRMKWMMSMPYPFTA

SEQ ID NO: 244616 - protein, 15 aa, Artificial Sequence
  Description of Artificial Sequence: Synthetic peptide
  Seed: LRMKWMMAMKYPITA
LRMKWMMSMPYPGTA

SEQ ID NO: 244617 - protein, 15 aa, Artificial Sequence
  Description of Artificial Sequence: Synthetic peptide
  Seed: LRMKWMMAMKYPITA
LRMKWMMSMPYPHTA

SEQ ID NO: 244618 - protein, 15 aa, Artificial Sequence
  Description of Artificial Sequence: Synthetic peptide
  Seed: LRMKWMMAMKYPITA
LRMKWMMSMPYPITA

SEQ ID NO: 244619 - protein, 15 aa, Artificial Sequence
  Description of Artificial Sequence: Synthetic peptide
  Seed: LRMKWMMAMKYPITA
LRMKWMMSMPYPKTA

SEQ ID NO: 244620 - protein, 15 aa, Artificial Sequence
  Description of Artificial Sequence: Synthetic peptide
  Seed: LRMKWMMAMKYPITA
LRMKWMMSMPYPLTA

SEQ ID NO: 244621 - protein, 15 aa, Artificial Sequence
  Description of Artificial Sequence: Synthetic peptide
  Seed: LRMKWMMAMKYPITA
LRMKWMMSMPYPMTA

SEQ ID NO: 244622 - protein, 15 aa, Artificial Sequence
  Description of Artificial Sequence: Synthetic peptide
  Seed: LRMKWMMAMKYPITA
LRMKWMMSMPYPNTA

SEQ ID NO: 244623 - protein, 15 aa, Artificial Sequence
  Description of Artificial Sequence: Synthetic peptide
  Seed: LRMKWMMAMKYPITA
LRMKWMMSMPYPPTA

SEQ ID NO: 244624 - protein, 15 aa, Artificial Sequence
  Description of Artificial Sequence: Synthetic peptide
  Seed: LRMKWMMAMKYPITA
LRMKWMMSMPYPQTA

SEQ ID NO: 244625 - protein, 15 aa, Artificial Sequence
  Description of Artificial Sequence: Synthetic peptide
  Seed: LRMKWMMAMKYPITA
LRMKWMMSMPYPRTA

SEQ ID NO: 244626 - protein, 15 aa, Artificial Sequence
  Description of Artificial Sequence: Synthetic peptide
  Seed: LRMKWMMAMKYPITA
LRMKWMMSMPYPSTA

SEQ ID NO: 244627 - protein, 15 aa, Artificial Sequence
  Description of Artificial Sequence: Synthetic peptide
  Seed: LRMKWMMAMKYPITA
LRMKWMMSMPYPTTA

SEQ ID NO: 244628 - protein, 15 aa, Artificial Sequence
  Description of Artificial Sequence: Synthetic peptide
  Seed: LRMKWMMAMKYPITA
LRMKWMMSMPYPVTA

SEQ ID NO: 244629 - protein, 15 aa, Artificial Sequence
  Description of Artificial Sequence: Synthetic peptide
  Seed: LRMKWMMAMKYPITA
LRMKWMMSMPYPWTA

SEQ ID NO: 244630 - protein, 15 aa, Artificial Sequence
  Description of Artificial Sequence: Synthetic peptide
  Seed: LRMKWMMAMKYPITA
LRMKWMMSMPYPYTA

SEQ ID NO: 244631 - protein, 15 aa, Artificial Sequence
  Description of Artificial Sequence: Synthetic peptide
  Seed: LRMKWMMAMKYPITA
LRMKWMMSMQYPATA

SEQ ID NO: 244632 - protein, 15 aa, Artificial Sequence
  Description of Artificial Sequence: Synthetic peptide
  Seed: LRMKWMMAMKYPITA
LRMKWMMSMQYPITA

SEQ ID NO: 244633 - protein, 15 aa, Artificial Sequence
  Description of Artificial Sequence: Synthetic peptide
  Seed: LRMKWMMAMKYPITA
LRMKWMMSMQYPLTA

SEQ ID NO: 244634 - protein, 15 aa, Artificial Sequence
  Description of Artificial Sequence: Synthetic peptide
  Seed: LRMKWMMAMKYPITA
LRMKWMMSMQYPMTA

SEQ ID NO: 244635 - protein, 15 aa, Artificial Sequence
  Description of Artificial Sequence: Synthetic peptide
  Seed: LRMKWMMAMKYPITA
LRMKWMMSMQYPSTA

SEQ ID NO: 244636 - protein, 15 aa, Artificial Sequence
  Description of Artificial Sequence: Synthetic peptide
  Seed: LRMKWMMAMKYPITA
LRMKWMMSMQYPTTA

SEQ ID NO: 244637 - protein, 15 aa, Artificial Sequence
  Description of Artificial Sequence: Synthetic peptide
  Seed: LRMKWMMAMKYPITA
LRMKWMMSMQYPVTA

SEQ ID NO: 244638 - protein, 15 aa, Artificial Sequence
  Description of Artificial Sequence: Synthetic peptide
  Seed: LRMKWMMAMKYPITA
LRMKWMMSMRYPATA

SEQ ID NO: 244639 - protein, 15 aa, Artificial Sequence
  Description of Artificial Sequence: Synthetic peptide
  Seed: LRMKWMMAMKYPITA
LRMKWMMSMRYPETA

SEQ ID NO: 244640 - protein, 15 aa, Artificial Sequence
  Description of Artificial Sequence: Synthetic peptide
  Seed: LRMKWMMAMKYPITA
LRMKWMMSMRYPFTA

SEQ ID NO: 244641 - protein, 15 aa, Artificial Sequence
  Description of Artificial Sequence: Synthetic peptide
  Seed: LRMKWMMAMKYPITA
LRMKWMMSMRYPGTA

SEQ ID NO: 244642 - protein, 15 aa, Artificial Sequence
  Description of Artificial Sequence: Synthetic peptide
  Seed: LRMKWMMAMKYPITA
LRMKWMMSMRYPHTA

SEQ ID NO: 244643 - protein, 15 aa, Artificial Sequence
  Description of Artificial Sequence: Synthetic peptide
  Seed: LRMKWMMAMKYPITA
LRMKWMMSMRYPITA

SEQ ID NO: 244644 - protein, 15 aa, Artificial Sequence
  Description of Artificial Sequence: Synthetic peptide
  Seed: LRMKWMMAMKYPITA
LRMKWMMSMRYPKTA

SEQ ID NO: 244645 - protein, 15 aa, Artificial Sequence
  Description of Artificial Sequence: Synthetic peptide
  Seed: LRMKWMMAMKYPITA
LRMKWMMSMRYPLTA

SEQ ID NO: 244646 - protein, 15 aa, Artificial Sequence
  Description of Artificial Sequence: Synthetic peptide
  Seed: LRMKWMMAMKYPITA
LRMKWMMSMRYPMTA

SEQ ID NO: 244647 - protein, 15 aa, Artificial Sequence
  Description of Artificial Sequence: Synthetic peptide
  Seed: LRMKWMMAMKYPITA
LRMKWMMSMRYPNTA

SEQ ID NO: 244648 - protein, 15 aa, Artificial Sequence
  Description of Artificial Sequence: Synthetic peptide
  Seed: LRMKWMMAMKYPITA
LRMKWMMSMRYPQTA

SEQ ID NO: 244649 - protein, 15 aa, Artificial Sequence
  Description of Artificial Sequence: Synthetic peptide
  Seed: LRMKWMMAMKYPITA
LRMKWMMSMRYPRTA

SEQ ID NO: 244650 - protein, 15 aa, Artificial Sequence
  Description of Artificial Sequence: Synthetic peptide
  Seed: LRMKWMMAMKYPITA
LRMKWMMSMRYPSTA

SEQ ID NO: 244651 - protein, 15 aa, Artificial Sequence
  Description of Artificial Sequence: Synthetic peptide
  Seed: LRMKWMMAMKYPITA
LRMKWMMSMRYPTTA

SEQ ID NO: 244652 - protein, 15 aa, Artificial Sequence
  Description of Artificial Sequence: Synthetic peptide
  Seed: LRMKWMMAMKYPITA
LRMKWMMSMRYPVTA

SEQ ID NO: 244653 - protein, 15 aa, Artificial Sequence
  Description of Artificial Sequence: Synthetic peptide
  Seed: LRMKWMMAMKYPITA
LRMKWMMSMRYPYTA

SEQ ID NO: 244654 - protein, 15 aa, Artificial Sequence
  Description of Artificial Sequence: Synthetic peptide
  Seed: LRMKWMMAMKYPITA
LRMKWMMSMSYPATA

SEQ ID NO: 244655 - protein, 15 aa, Artificial Sequence
  Description of Artificial Sequence: Synthetic peptide
  Seed: LRMKWMMAMKYPITA
LRMKWMMSMSYPCTA

SEQ ID NO: 244656 - protein, 15 aa, Artificial Sequence
  Description of Artificial Sequence: Synthetic peptide
  Seed: LRMKWMMAMKYPITA
LRMKWMMSMSYPDTA

SEQ ID NO: 244657 - protein, 15 aa, Artificial Sequence
  Description of Artificial Sequence: Synthetic peptide
  Seed: LRMKWMMAMKYPITA
LRMKWMMSMSYPETA

SEQ ID NO: 244658 - protein, 15 aa, Artificial Sequence
  Description of Artificial Sequence: Synthetic peptide
  Seed: LRMKWMMAMKYPITA
LRMKWMMSMSYPFTA

SEQ ID NO: 244659 - protein, 15 aa, Artificial Sequence
  Description of Artificial Sequence: Synthetic peptide
  Seed: LRMKWMMAMKYPITA
LRMKWMMSMSYPGTA

SEQ ID NO: 244660 - protein, 15 aa, Artificial Sequence
  Description of Artificial Sequence: Synthetic peptide
  Seed: LRMKWMMAMKYPITA
LRMKWMMSMSYPHTA

SEQ ID NO: 244661 - protein, 15 aa, Artificial Sequence
  Description of Artificial Sequence: Synthetic peptide
  Seed: LRMKWMMAMKYPITA
LRMKWMMSMSYPITA

SEQ ID NO: 244662 - protein, 15 aa, Artificial Sequence
  Description of Artificial Sequence: Synthetic peptide
  Seed: LRMKWMMAMKYPITA
LRMKWMMSMSYPKTA

SEQ ID NO: 244663 - protein, 15 aa, Artificial Sequence
  Description of Artificial Sequence: Synthetic peptide
  Seed: LRMKWMMAMKYPITA
LRMKWMMSMSYPLTA

SEQ ID NO: 244664 - protein, 15 aa, Artificial Sequence
  Description of Artificial Sequence: Synthetic peptide
  Seed: LRMKWMMAMKYPITA
LRMKWMMSMSYPMTA

SEQ ID NO: 244665 - protein, 15 aa, Artificial Sequence
  Description of Artificial Sequence: Synthetic peptide
  Seed: LRMKWMMAMKYPITA
LRMKWMMSMSYPNTA

SEQ ID NO: 244666 - protein, 15 aa, Artificial Sequence
  Description of Artificial Sequence: Synthetic peptide
  Seed: LRMKWMMAMKYPITA
LRMKWMMSMSYPPTA

SEQ ID NO: 244667 - protein, 15 aa, Artificial Sequence
  Description of Artificial Sequence: Synthetic peptide
  Seed: LRMKWMMAMKYPITA
LRMKWMMSMSYPQTA

SEQ ID NO: 244668 - protein, 15 aa, Artificial Sequence
  Description of Artificial Sequence: Synthetic peptide
  Seed: LRMKWMMAMKYPITA
LRMKWMMSMSYPRTA

SEQ ID NO: 244669 - protein, 15 aa, Artificial Sequence
  Description of Artificial Sequence: Synthetic peptide
  Seed: LRMKWMMAMKYPITA
LRMKWMMSMSYPSTA

SEQ ID NO: 244670 - protein, 15 aa, Artificial Sequence
  Description of Artificial Sequence: Synthetic peptide
  Seed: LRMKWMMAMKYPITA
LRMKWMMSMSYPTTA

SEQ ID NO: 244671 - protein, 15 aa, Artificial Sequence
  Description of Artificial Sequence: Synthetic peptide
  Seed: LRMKWMMAMKYPITA
LRMKWMMSMSYPVTA

SEQ ID NO: 244672 - protein, 15 aa, Artificial Sequence
  Description of Artificial Sequence: Synthetic peptide
  Seed: LRMKWMMAMKYPITA
LRMKWMMSMSYPWTA

SEQ ID NO: 244673 - protein, 15 aa, Artificial Sequence
  Description of Artificial Sequence: Synthetic peptide
  Seed: LRMKWMMAMKYPITA
LRMKWMMSMSYPYTA

SEQ ID NO: 244674 - protein, 15 aa, Artificial Sequence
  Description of Artificial Sequence: Synthetic peptide
  Seed: LRMKWMMAMKYPITA
LRMKWMMSMTYPATA

SEQ ID NO: 244675 - protein, 15 aa, Artificial Sequence
  Description of Artificial Sequence: Synthetic peptide
  Seed: LRMKWMMAMKYPITA
LRMKWMMSMTYPCTA

SEQ ID NO: 244676 - protein, 15 aa, Artificial Sequence
  Description of Artificial Sequence: Synthetic peptide
  Seed: LRMKWMMAMKYPITA
LRMKWMMSMTYPDTA

SEQ ID NO: 244677 - protein, 15 aa, Artificial Sequence
  Description of Artificial Sequence: Synthetic peptide
  Seed: LRMKWMMAMKYPITA
LRMKWMMSMTYPETA

SEQ ID NO: 244678 - protein, 15 aa, Artificial Sequence
  Description of Artificial Sequence: Synthetic peptide
  Seed: LRMKWMMAMKYPITA
LRMKWMMSMTYPFTA

SEQ ID NO: 244679 - protein, 15 aa, Artificial Sequence
  Description of Artificial Sequence: Synthetic peptide
  Seed: LRMKWMMAMKYPITA
LRMKWMMSMTYPGTA

SEQ ID NO: 244680 - protein, 15 aa, Artificial Sequence
  Description of Artificial Sequence: Synthetic peptide
  Seed: LRMKWMMAMKYPITA
LRMKWMMSMTYPHTA

SEQ ID NO: 244681 - protein, 15 aa, Artificial Sequence
  Description of Artificial Sequence: Synthetic peptide
  Seed: LRMKWMMAMKYPITA
LRMKWMMSMTYPITA

SEQ ID NO: 244682 - protein, 15 aa, Artificial Sequence
  Description of Artificial Sequence: Synthetic peptide
  Seed: LRMKWMMAMKYPITA
LRMKWMMSMTYPKTA

SEQ ID NO: 244683 - protein, 15 aa, Artificial Sequence
  Description of Artificial Sequence: Synthetic peptide
  Seed: LRMKWMMAMKYPITA
LRMKWMMSMTYPLTA

SEQ ID NO: 244684 - protein, 15 aa, Artificial Sequence
  Description of Artificial Sequence: Synthetic peptide
  Seed: LRMKWMMAMKYPITA
LRMKWMMSMTYPMTA

SEQ ID NO: 244685 - protein, 15 aa, Artificial Sequence
  Description of Artificial Sequence: Synthetic peptide
  Seed: LRMKWMMAMKYPITA
LRMKWMMSMTYPNTA

SEQ ID NO: 244686 - protein, 15 aa, Artificial Sequence
  Description of Artificial Sequence: Synthetic peptide
  Seed: LRMKWMMAMKYPITA
LRMKWMMSMTYPPTA

SEQ ID NO: 244687 - protein, 15 aa, Artificial Sequence
  Description of Artificial Sequence: Synthetic peptide
  Seed: LRMKWMMAMKYPITA
LRMKWMMSMTYPQTA

SEQ ID NO: 244688 - protein, 15 aa, Artificial Sequence
  Description of Artificial Sequence: Synthetic peptide
  Seed: LRMKWMMAMKYPITA
LRMKWMMSMTYPRTA

SEQ ID NO: 244689 - protein, 15 aa, Artificial Sequence
  Description of Artificial Sequence: Synthetic peptide
  Seed: LRMKWMMAMKYPITA
LRMKWMMSMTYPSTA

SEQ ID NO: 244690 - protein, 15 aa, Artificial Sequence
  Description of Artificial Sequence: Synthetic peptide
  Seed: LRMKWMMAMKYPITA
LRMKWMMSMTYPTTA

SEQ ID NO: 244691 - protein, 15 aa, Artificial Sequence
  Description of Artificial Sequence: Synthetic peptide
  Seed: LRMKWMMAMKYPITA
LRMKWMMSMTYPVTA

SEQ ID NO: 244692 - protein, 15 aa, Artificial Sequence
  Description of Artificial Sequence: Synthetic peptide
  Seed: LRMKWMMAMKYPITA
LRMKWMMSMTYPWTA

SEQ ID NO: 244693 - protein, 15 aa, Artificial Sequence
  Description of Artificial Sequence: Synthetic peptide
  Seed: LRMKWMMAMKYPITA
LRMKWMMSMTYPYTA

SEQ ID NO: 244694 - protein, 15 aa, Artificial Sequence
  Description of Artificial Sequence: Synthetic peptide
  Seed: LRMKWMMAMKYPITA
LRMKWMMSMVYPATA

SEQ ID NO: 244695 - protein, 15 aa, Artificial Sequence
  Description of Artificial Sequence: Synthetic peptide
  Seed: LRMKWMMAMKYPITA
LRMKWMMSMVYPCTA

SEQ ID NO: 244696 - protein, 15 aa, Artificial Sequence
  Description of Artificial Sequence: Synthetic peptide
  Seed: LRMKWMMAMKYPITA
LRMKWMMSMVYPDTA

SEQ ID NO: 244697 - protein, 15 aa, Artificial Sequence
  Description of Artificial Sequence: Synthetic peptide
  Seed: LRMKWMMAMKYPITA
LRMKWMMSMVYPETA

SEQ ID NO: 244698 - protein, 15 aa, Artificial Sequence
  Description of Artificial Sequence: Synthetic peptide
  Seed: LRMKWMMAMKYPITA
LRMKWMMSMVYPFTA

SEQ ID NO: 244699 - protein, 15 aa, Artificial Sequence
  Description of Artificial Sequence: Synthetic peptide
  Seed: LRMKWMMAMKYPITA
LRMKWMMSMVYPGTA

SEQ ID NO: 244700 - protein, 15 aa, Artificial Sequence
  Description of Artificial Sequence: Synthetic peptide
  Seed: LRMKWMMAMKYPITA
LRMKWMMSMVYPHTA

SEQ ID NO: 244701 - protein, 15 aa, Artificial Sequence
  Description of Artificial Sequence: Synthetic peptide
  Seed: LRMKWMMAMKYPITA
LRMKWMMSMVYPITA

SEQ ID NO: 244702 - protein, 15 aa, Artificial Sequence
  Description of Artificial Sequence: Synthetic peptide
  Seed: LRMKWMMAMKYPITA
LRMKWMMSMVYPKTA

SEQ ID NO: 244703 - protein, 15 aa, Artificial Sequence
  Description of Artificial Sequence: Synthetic peptide
  Seed: LRMKWMMAMKYPITA
LRMKWMMSMVYPLTA

SEQ ID NO: 244704 - protein, 15 aa, Artificial Sequence
  Description of Artificial Sequence: Synthetic peptide
  Seed: LRMKWMMAMKYPITA
LRMKWMMSMVYPMTA

SEQ ID NO: 244705 - protein, 15 aa, Artificial Sequence
  Description of Artificial Sequence: Synthetic peptide
  Seed: LRMKWMMAMKYPITA
LRMKWMMSMVYPNTA

SEQ ID NO: 244706 - protein, 15 aa, Artificial Sequence
  Description of Artificial Sequence: Synthetic peptide
  Seed: LRMKWMMAMKYPITA
LRMKWMMSMVYPPTA

SEQ ID NO: 244707 - protein, 15 aa, Artificial Sequence
  Description of Artificial Sequence: Synthetic peptide
  Seed: LRMKWMMAMKYPITA
LRMKWMMSMVYPQTA

SEQ ID NO: 244708 - protein, 15 aa, Artificial Sequence
  Description of Artificial Sequence: Synthetic peptide
  Seed: LRMKWMMAMKYPITA
LRMKWMMSMVYPRTA

SEQ ID NO: 244709 - protein, 15 aa, Artificial Sequence
  Description of Artificial Sequence: Synthetic peptide
  Seed: LRMKWMMAMKYPITA
LRMKWMMSMVYPSTA

SEQ ID NO: 244710 - protein, 15 aa, Artificial Sequence
  Description of Artificial Sequence: Synthetic peptide
  Seed: LRMKWMMAMKYPITA
LRMKWMMSMVYPTTA

SEQ ID NO: 244711 - protein, 15 aa, Artificial Sequence
  Description of Artificial Sequence: Synthetic peptide
  Seed: LRMKWMMAMKYPITA
LRMKWMMSMVYPVTA

SEQ ID NO: 244712 - protein, 15 aa, Artificial Sequence
  Description of Artificial Sequence: Synthetic peptide
  Seed: LRMKWMMAMKYPITA
LRMKWMMSMVYPYTA

SEQ ID NO: 244713 - protein, 15 aa, Artificial Sequence
  Description of Artificial Sequence: Synthetic peptide
  Seed: LRMKWMMAMKYPITA
LRMKWMMSMWYPATA

SEQ ID NO: 244714 - protein, 15 aa, Artificial Sequence
  Description of Artificial Sequence: Synthetic peptide
  Seed: LRMKWMMAMKYPITA
LRMKWMMSMWYPITA

SEQ ID NO: 244715 - protein, 15 aa, Artificial Sequence
  Description of Artificial Sequence: Synthetic peptide
  Seed: LRMKWMMAMKYPITA
LRMKWMMSMWYPLTA

SEQ ID NO: 244716 - protein, 15 aa, Artificial Sequence
  Description of Artificial Sequence: Synthetic peptide
  Seed: LRMKWMMAMKYPITA
LRMKWMMSMWYPMTA

SEQ ID NO: 244717 - protein, 15 aa, Artificial Sequence
  Description of Artificial Sequence: Synthetic peptide
  Seed: LRMKWMMAMKYPITA
LRMKWMMSMWYPVTA

SEQ ID NO: 244718 - protein, 15 aa, Artificial Sequence
  Description of Artificial Sequence: Synthetic peptide
  Seed: LRMKWMMAMKYPITA
LRMKWMMSMYYPATA

SEQ ID NO: 244719 - protein, 15 aa, Artificial Sequence
  Description of Artificial Sequence: Synthetic peptide
  Seed: LRMKWMMAMKYPITA
LRMKWMMSMYYPITA

SEQ ID NO: 244720 - protein, 15 aa, Artificial Sequence
  Description of Artificial Sequence: Synthetic peptide
  Seed: LRMKWMMAMKYPITA
LRMKWMMSMYYPLTA

SEQ ID NO: 244721 - protein, 15 aa, Artificial Sequence
  Description of Artificial Sequence: Synthetic peptide
  Seed: LRMKWMMAMKYPITA
LRMKWMMSMYYPVTA

SEQ ID NO: 244722 - protein, 15 aa, Artificial Sequence
  Description of Artificial Sequence: Synthetic peptide
  Seed: LRMKWMMAMKYPITA
LRMKWMMTMAYPATA

SEQ ID NO: 244723 - protein, 15 aa, Artificial Sequence
  Description of Artificial Sequence: Synthetic peptide
  Seed: LRMKWMMAMKYPITA
LRMKWMMTMAYPCTA

SEQ ID NO: 244724 - protein, 15 aa, Artificial Sequence
  Description of Artificial Sequence: Synthetic peptide
  Seed: LRMKWMMAMKYPITA
LRMKWMMTMAYPDTA

SEQ ID NO: 244725 - protein, 15 aa, Artificial Sequence
  Description of Artificial Sequence: Synthetic peptide
  Seed: LRMKWMMAMKYPITA
LRMKWMMTMAYPETA

SEQ ID NO: 244726 - protein, 15 aa, Artificial Sequence
  Description of Artificial Sequence: Synthetic peptide
  Seed: LRMKWMMAMKYPITA
LRMKWMMTMAYPFTA

SEQ ID NO: 244727 - protein, 15 aa, Artificial Sequence
  Description of Artificial Sequence: Synthetic peptide
  Seed: LRMKWMMAMKYPITA
LRMKWMMTMAYPGTA

SEQ ID NO: 244728 - protein, 15 aa, Artificial Sequence
  Description of Artificial Sequence: Synthetic peptide
  Seed: LRMKWMMAMKYPITA
LRMKWMMTMAYPHTA

SEQ ID NO: 244729 - protein, 15 aa, Artificial Sequence
  Description of Artificial Sequence: Synthetic peptide
  Seed: LRMKWMMAMKYPITA
LRMKWMMTMAYPITA

SEQ ID NO: 244730 - protein, 15 aa, Artificial Sequence
  Description of Artificial Sequence: Synthetic peptide
  Seed: LRMKWMMAMKYPITA
LRMKWMMTMAYPKTA

SEQ ID NO: 244731 - protein, 15 aa, Artificial Sequence
  Description of Artificial Sequence: Synthetic peptide
  Seed: LRMKWMMAMKYPITA
LRMKWMMTMAYPLTA

SEQ ID NO: 244732 - protein, 15 aa, Artificial Sequence
  Description of Artificial Sequence: Synthetic peptide
  Seed: LRMKWMMAMKYPITA
LRMKWMMTMAYPMTA

SEQ ID NO: 244733 - protein, 15 aa, Artificial Sequence
  Description of Artificial Sequence: Synthetic peptide
  Seed: LRMKWMMAMKYPITA
LRMKWMMTMAYPNTA

SEQ ID NO: 244734 - protein, 15 aa, Artificial Sequence
  Description of Artificial Sequence: Synthetic peptide
  Seed: LRMKWMMAMKYPITA
LRMKWMMTMAYPPTA

SEQ ID NO: 244735 - protein, 15 aa, Artificial Sequence
  Description of Artificial Sequence: Synthetic peptide
  Seed: LRMKWMMAMKYPITA
LRMKWMMTMAYPQTA

SEQ ID NO: 244736 - protein, 15 aa, Artificial Sequence
  Description of Artificial Sequence: Synthetic peptide
  Seed: LRMKWMMAMKYPITA
LRMKWMMTMAYPRTA

SEQ ID NO: 244737 - protein, 15 aa, Artificial Sequence
  Description of Artificial Sequence: Synthetic peptide
  Seed: LRMKWMMAMKYPITA
LRMKWMMTMAYPSTA

SEQ ID NO: 244738 - protein, 15 aa, Artificial Sequence
  Description of Artificial Sequence: Synthetic peptide
  Seed: LRMKWMMAMKYPITA
LRMKWMMTMAYPTTA

SEQ ID NO: 244739 - protein, 15 aa, Artificial Sequence
  Description of Artificial Sequence: Synthetic peptide
  Seed: LRMKWMMAMKYPITA
LRMKWMMTMAYPVTA

SEQ ID NO: 244740 - protein, 15 aa, Artificial Sequence
  Description of Artificial Sequence: Synthetic peptide
  Seed: LRMKWMMAMKYPITA
LRMKWMMTMAYPWTA

SEQ ID NO: 244741 - protein, 15 aa, Artificial Sequence
  Description of Artificial Sequence: Synthetic peptide
  Seed: LRMKWMMAMKYPITA
LRMKWMMTMAYPYTA

SEQ ID NO: 244742 - protein, 15 aa, Artificial Sequence
  Description of Artificial Sequence: Synthetic peptide
  Seed: LRMKWMMAMKYPITA
LRMKWMMTMCYPITA

SEQ ID NO: 244743 - protein, 15 aa, Artificial Sequence
  Description of Artificial Sequence: Synthetic peptide
  Seed: LRMKWMMAMKYPITA
LRMKWMMTMCYPLTA

SEQ ID NO: 244744 - protein, 15 aa, Artificial Sequence
  Description of Artificial Sequence: Synthetic peptide
  Seed: LRMKWMMAMKYPITA
LRMKWMMTMCYPVTA

SEQ ID NO: 244745 - protein, 15 aa, Artificial Sequence
  Description of Artificial Sequence: Synthetic peptide
  Seed: LRMKWMMAMKYPITA
LRMKWMMTMDYPITA

SEQ ID NO: 244746 - protein, 15 aa, Artificial Sequence
  Description of Artificial Sequence: Synthetic peptide
  Seed: LRMKWMMAMKYPITA
LRMKWMMTMDYPLTA

SEQ ID NO: 244747 - protein, 15 aa, Artificial Sequence
  Description of Artificial Sequence: Synthetic peptide
  Seed: LRMKWMMAMKYPITA
LRMKWMMTMDYPVTA

SEQ ID NO: 244748 - protein, 15 aa, Artificial Sequence
  Description of Artificial Sequence: Synthetic peptide
  Seed: LRMKWMMAMKYPITA
LRMKWMMTMEYPITA

SEQ ID NO: 244749 - protein, 15 aa, Artificial Sequence
  Description of Artificial Sequence: Synthetic peptide
  Seed: LRMKWMMAMKYPITA
LRMKWMMTMEYPLTA

SEQ ID NO: 244750 - protein, 15 aa, Artificial Sequence
  Description of Artificial Sequence: Synthetic peptide
  Seed: LRMKWMMAMKYPITA
LRMKWMMTMEYPVTA

SEQ ID NO: 244751 - protein, 15 aa, Artificial Sequence
  Description of Artificial Sequence: Synthetic peptide
  Seed: LRMKWMMAMKYPITA
LRMKWMMTMFYPATA

SEQ ID NO: 244752 - protein, 15 aa, Artificial Sequence
  Description of Artificial Sequence: Synthetic peptide
  Seed: LRMKWMMAMKYPITA
LRMKWMMTMFYPDTA

SEQ ID NO: 244753 - protein, 15 aa, Artificial Sequence
  Description of Artificial Sequence: Synthetic peptide
  Seed: LRMKWMMAMKYPITA
LRMKWMMTMFYPETA

SEQ ID NO: 244754 - protein, 15 aa, Artificial Sequence
  Description of Artificial Sequence: Synthetic peptide
  Seed: LRMKWMMAMKYPITA
LRMKWMMTMFYPFTA

SEQ ID NO: 244755 - protein, 15 aa, Artificial Sequence
  Description of Artificial Sequence: Synthetic peptide
  Seed: LRMKWMMAMKYPITA
LRMKWMMTMFYPITA

SEQ ID NO: 244756 - protein, 15 aa, Artificial Sequence
  Description of Artificial Sequence: Synthetic peptide
  Seed: LRMKWMMAMKYPITA
LRMKWMMTMFYPLTA

SEQ ID NO: 244757 - protein, 15 aa, Artificial Sequence
  Description of Artificial Sequence: Synthetic peptide
  Seed: LRMKWMMAMKYPITA
LRMKWMMTMFYPMTA

SEQ ID NO: 244758 - protein, 15 aa, Artificial Sequence
  Description of Artificial Sequence: Synthetic peptide
  Seed: LRMKWMMAMKYPITA
LRMKWMMTMFYPNTA

SEQ ID NO: 244759 - protein, 15 aa, Artificial Sequence
  Description of Artificial Sequence: Synthetic peptide
  Seed: LRMKWMMAMKYPITA
LRMKWMMTMFYPSTA

SEQ ID NO: 244760 - protein, 15 aa, Artificial Sequence
  Description of Artificial Sequence: Synthetic peptide
  Seed: LRMKWMMAMKYPITA
LRMKWMMTMFYPTTA

SEQ ID NO: 244761 - protein, 15 aa, Artificial Sequence
  Description of Artificial Sequence: Synthetic peptide
  Seed: LRMKWMMAMKYPITA
LRMKWMMTMFYPVTA

SEQ ID NO: 244762 - protein, 15 aa, Artificial Sequence
  Description of Artificial Sequence: Synthetic peptide
  Seed: LRMKWMMAMKYPITA
LRMKWMMTMFYPYTA

SEQ ID NO: 244763 - protein, 15 aa, Artificial Sequence
  Description of Artificial Sequence: Synthetic peptide
  Seed: LRMKWMMAMKYPITA
LRMKWMMTMGYPATA

SEQ ID NO: 244764 - protein, 15 aa, Artificial Sequence
  Description of Artificial Sequence: Synthetic peptide
  Seed: LRMKWMMAMKYPITA
LRMKWMMTMGYPCTA

SEQ ID NO: 244765 - protein, 15 aa, Artificial Sequence
  Description of Artificial Sequence: Synthetic peptide
  Seed: LRMKWMMAMKYPITA
LRMKWMMTMGYPFTA

SEQ ID NO: 244766 - protein, 15 aa, Artificial Sequence
  Description of Artificial Sequence: Synthetic peptide
  Seed: LRMKWMMAMKYPITA
LRMKWMMTMGYPGTA

SEQ ID NO: 244767 - protein, 15 aa, Artificial Sequence
  Description of Artificial Sequence: Synthetic peptide
  Seed: LRMKWMMAMKYPITA
LRMKWMMTMGYPHTA

SEQ ID NO: 244768 - protein, 15 aa, Artificial Sequence
  Description of Artificial Sequence: Synthetic peptide
  Seed: LRMKWMMAMKYPITA
LRMKWMMTMGYPITA

SEQ ID NO: 244769 - protein, 15 aa, Artificial Sequence
  Description of Artificial Sequence: Synthetic peptide
  Seed: LRMKWMMAMKYPITA
LRMKWMMTMGYPKTA

SEQ ID NO: 244770 - protein, 15 aa, Artificial Sequence
  Description of Artificial Sequence: Synthetic peptide
  Seed: LRMKWMMAMKYPITA
LRMKWMMTMGYPLTA

SEQ ID NO: 244771 - protein, 15 aa, Artificial Sequence
  Description of Artificial Sequence: Synthetic peptide
  Seed: LRMKWMMAMKYPITA
LRMKWMMTMGYPMTA

SEQ ID NO: 244772 - protein, 15 aa, Artificial Sequence
  Description of Artificial Sequence: Synthetic peptide
  Seed: LRMKWMMAMKYPITA
LRMKWMMTMGYPNTA

SEQ ID NO: 244773 - protein, 15 aa, Artificial Sequence
  Description of Artificial Sequence: Synthetic peptide
  Seed: LRMKWMMAMKYPITA
LRMKWMMTMGYPPTA

SEQ ID NO: 244774 - protein, 15 aa, Artificial Sequence
  Description of Artificial Sequence: Synthetic peptide
  Seed: LRMKWMMAMKYPITA
LRMKWMMTMGYPQTA

SEQ ID NO: 244775 - protein, 15 aa, Artificial Sequence
  Description of Artificial Sequence: Synthetic peptide
  Seed: LRMKWMMAMKYPITA
LRMKWMMTMGYPRTA

SEQ ID NO: 244776 - protein, 15 aa, Artificial Sequence
  Description of Artificial Sequence: Synthetic peptide
  Seed: LRMKWMMAMKYPITA
LRMKWMMTMGYPSTA

SEQ ID NO: 244777 - protein, 15 aa, Artificial Sequence
  Description of Artificial Sequence: Synthetic peptide
  Seed: LRMKWMMAMKYPITA
LRMKWMMTMGYPTTA

SEQ ID NO: 244778 - protein, 15 aa, Artificial Sequence
  Description of Artificial Sequence: Synthetic peptide
  Seed: LRMKWMMAMKYPITA
LRMKWMMTMGYPVTA

SEQ ID NO: 244779 - protein, 15 aa, Artificial Sequence
  Description of Artificial Sequence: Synthetic peptide
  Seed: LRMKWMMAMKYPITA
LRMKWMMTMGYPYTA

SEQ ID NO: 244780 - protein, 15 aa, Artificial Sequence
  Description of Artificial Sequence: Synthetic peptide
  Seed: LRMKWMMAMKYPITA
LRMKWMMTMHYPATA

SEQ ID NO: 244781 - protein, 15 aa, Artificial Sequence
  Description of Artificial Sequence: Synthetic peptide
  Seed: LRMKWMMAMKYPITA
LRMKWMMTMHYPITA

SEQ ID NO: 244782 - protein, 15 aa, Artificial Sequence
  Description of Artificial Sequence: Synthetic peptide
  Seed: LRMKWMMAMKYPITA
LRMKWMMTMHYPLTA

SEQ ID NO: 244783 - protein, 15 aa, Artificial Sequence
  Description of Artificial Sequence: Synthetic peptide
  Seed: LRMKWMMAMKYPITA
LRMKWMMTMHYPMTA

SEQ ID NO: 244784 - protein, 15 aa, Artificial Sequence
  Description of Artificial Sequence: Synthetic peptide
  Seed: LRMKWMMAMKYPITA
LRMKWMMTMHYPVTA

SEQ ID NO: 244785 - protein, 15 aa, Artificial Sequence
  Description of Artificial Sequence: Synthetic peptide
  Seed: LRMKWMMAMKYPITA
LRMKWMMTMIYPATA

SEQ ID NO: 244786 - protein, 15 aa, Artificial Sequence
  Description of Artificial Sequence: Synthetic peptide
  Seed: LRMKWMMAMKYPITA
LRMKWMMTMIYPETA

SEQ ID NO: 244787 - protein, 15 aa, Artificial Sequence
  Description of Artificial Sequence: Synthetic peptide
  Seed: LRMKWMMAMKYPITA
LRMKWMMTMIYPFTA

SEQ ID NO: 244788 - protein, 15 aa, Artificial Sequence
  Description of Artificial Sequence: Synthetic peptide
  Seed: LRMKWMMAMKYPITA
LRMKWMMTMIYPGTA

SEQ ID NO: 244789 - protein, 15 aa, Artificial Sequence
  Description of Artificial Sequence: Synthetic peptide
  Seed: LRMKWMMAMKYPITA
LRMKWMMTMIYPHTA

SEQ ID NO: 244790 - protein, 15 aa, Artificial Sequence
  Description of Artificial Sequence: Synthetic peptide
  Seed: LRMKWMMAMKYPITA
LRMKWMMTMIYPITA

SEQ ID NO: 244791 - protein, 15 aa, Artificial Sequence
  Description of Artificial Sequence: Synthetic peptide
  Seed: LRMKWMMAMKYPITA
LRMKWMMTMIYPLTA

SEQ ID NO: 244792 - protein, 15 aa, Artificial Sequence
  Description of Artificial Sequence: Synthetic peptide
  Seed: LRMKWMMAMKYPITA
LRMKWMMTMIYPMTA

SEQ ID NO: 244793 - protein, 15 aa, Artificial Sequence
  Description of Artificial Sequence: Synthetic peptide
  Seed: LRMKWMMAMKYPITA
LRMKWMMTMIYPNTA

SEQ ID NO: 244794 - protein, 15 aa, Artificial Sequence
  Description of Artificial Sequence: Synthetic peptide
  Seed: LRMKWMMAMKYPITA
LRMKWMMTMIYPQTA

SEQ ID NO: 244795 - protein, 15 aa, Artificial Sequence
  Description of Artificial Sequence: Synthetic peptide
  Seed: LRMKWMMAMKYPITA
LRMKWMMTMIYPSTA

SEQ ID NO: 244796 - protein, 15 aa, Artificial Sequence
  Description of Artificial Sequence: Synthetic peptide
  Seed: LRMKWMMAMKYPITA
LRMKWMMTMIYPTTA

SEQ ID NO: 244797 - protein, 15 aa, Artificial Sequence
  Description of Artificial Sequence: Synthetic peptide
  Seed: LRMKWMMAMKYPITA
LRMKWMMTMIYPVTA

SEQ ID NO: 244798 - protein, 15 aa, Artificial Sequence
  Description of Artificial Sequence: Synthetic peptide
  Seed: LRMKWMMAMKYPITA
LRMKWMMTMIYPYTA

SEQ ID NO: 244799 - protein, 15 aa, Artificial Sequence
  Description of Artificial Sequence: Synthetic peptide
  Seed: LRMKWMMAMKYPITA
LRMKWMMTMKYPATA

SEQ ID NO: 244800 - protein, 15 aa, Artificial Sequence
  Description of Artificial Sequence: Synthetic peptide
  Seed: LRMKWMMAMKYPITA
LRMKWMMTMKYPFTA

SEQ ID NO: 244801 - protein, 15 aa, Artificial Sequence
  Description of Artificial Sequence: Synthetic peptide
  Seed: LRMKWMMAMKYPITA
LRMKWMMTMKYPGTA

SEQ ID NO: 244802 - protein, 15 aa, Artificial Sequence
  Description of Artificial Sequence: Synthetic peptide
  Seed: LRMKWMMAMKYPITA
LRMKWMMTMKYPHTA

SEQ ID NO: 244803 - protein, 15 aa, Artificial Sequence
  Description of Artificial Sequence: Synthetic peptide
  Seed: LRMKWMMAMKYPITA
LRMKWMMTMKYPKTA

SEQ ID NO: 244804 - protein, 15 aa, Artificial Sequence
  Description of Artificial Sequence: Synthetic peptide
  Seed: LRMKWMMAMKYPITA
LRMKWMMTMKYPLTA

SEQ ID NO: 244805 - protein, 15 aa, Artificial Sequence
  Description of Artificial Sequence: Synthetic peptide
  Seed: LRMKWMMAMKYPITA
LRMKWMMTMKYPMTA

SEQ ID NO: 244806 - protein, 15 aa, Artificial Sequence
  Description of Artificial Sequence: Synthetic peptide
  Seed: LRMKWMMAMKYPITA
LRMKWMMTMKYPQTA

SEQ ID NO: 244807 - protein, 15 aa, Artificial Sequence
  Description of Artificial Sequence: Synthetic peptide
  Seed: LRMKWMMAMKYPITA
LRMKWMMTMKYPRTA

SEQ ID NO: 244808 - protein, 15 aa, Artificial Sequence
  Description of Artificial Sequence: Synthetic peptide
  Seed: LRMKWMMAMKYPITA
LRMKWMMTMKYPSTA

SEQ ID NO: 244809 - protein, 15 aa, Artificial Sequence
  Description of Artificial Sequence: Synthetic peptide
  Seed: LRMKWMMAMKYPITA
LRMKWMMTMKYPTTA

SEQ ID NO: 244810 - protein, 15 aa, Artificial Sequence
  Description of Artificial Sequence: Synthetic peptide
  Seed: LRMKWMMAMKYPITA
LRMKWMMTMKYPVTA

SEQ ID NO: 244811 - protein, 15 aa, Artificial Sequence
  Description of Artificial Sequence: Synthetic peptide
  Seed: LRMKWMMAMKYPITA
LRMKWMMTMKYPYTA

SEQ ID NO: 244812 - protein, 15 aa, Artificial Sequence
  Description of Artificial Sequence: Synthetic peptide
  Seed: LRMKWMMAMKYPITA
LRMKWMMTMLYPGTA

SEQ ID NO: 244813 - protein, 15 aa, Artificial Sequence
  Description of Artificial Sequence: Synthetic peptide
  Seed: LRMKWMMAMKYPITA
LRMKWMMTMLYPITA

SEQ ID NO: 244814 - protein, 15 aa, Artificial Sequence
  Description of Artificial Sequence: Synthetic peptide
  Seed: LRMKWMMAMKYPITA
LRMKWMMTMLYPLTA

SEQ ID NO: 244815 - protein, 15 aa, Artificial Sequence
  Description of Artificial Sequence: Synthetic peptide
  Seed: LRMKWMMAMKYPITA
LRMKWMMTMLYPMTA

SEQ ID NO: 244816 - protein, 15 aa, Artificial Sequence
  Description of Artificial Sequence: Synthetic peptide
  Seed: LRMKWMMAMKYPITA
LRMKWMMTMLYPVTA

SEQ ID NO: 244817 - protein, 15 aa, Artificial Sequence
  Description of Artificial Sequence: Synthetic peptide
  Seed: LRMKWMMAMKYPITA
LRMKWMMTMMYPATA

SEQ ID NO: 244818 - protein, 15 aa, Artificial Sequence
  Description of Artificial Sequence: Synthetic peptide
  Seed: LRMKWMMAMKYPITA
LRMKWMMTMMYPGTA

SEQ ID NO: 244819 - protein, 15 aa, Artificial Sequence
  Description of Artificial Sequence: Synthetic peptide
  Seed: LRMKWMMAMKYPITA
LRMKWMMTMMYPITA

SEQ ID NO: 244820 - protein, 15 aa, Artificial Sequence
  Description of Artificial Sequence: Synthetic peptide
  Seed: LRMKWMMAMKYPITA
LRMKWMMTMMYPLTA

SEQ ID NO: 244821 - protein, 15 aa, Artificial Sequence
  Description of Artificial Sequence: Synthetic peptide
  Seed: LRMKWMMAMKYPITA
LRMKWMMTMMYPMTA

SEQ ID NO: 244822 - protein, 15 aa, Artificial Sequence
  Description of Artificial Sequence: Synthetic peptide
  Seed: LRMKWMMAMKYPITA
LRMKWMMTMMYPTTA

SEQ ID NO: 244823 - protein, 15 aa, Artificial Sequence
  Description of Artificial Sequence: Synthetic peptide
  Seed: LRMKWMMAMKYPITA
LRMKWMMTMMYPVTA

SEQ ID NO: 244824 - protein, 15 aa, Artificial Sequence
  Description of Artificial Sequence: Synthetic peptide
  Seed: LRMKWMMAMKYPITA
LRMKWMMTMNYPATA

SEQ ID NO: 244825 - protein, 15 aa, Artificial Sequence
  Description of Artificial Sequence: Synthetic peptide
  Seed: LRMKWMMAMKYPITA
LRMKWMMTMNYPCTA

SEQ ID NO: 244826 - protein, 15 aa, Artificial Sequence
  Description of Artificial Sequence: Synthetic peptide
  Seed: LRMKWMMAMKYPITA
LRMKWMMTMNYPDTA

SEQ ID NO: 244827 - protein, 15 aa, Artificial Sequence
  Description of Artificial Sequence: Synthetic peptide
  Seed: LRMKWMMAMKYPITA
LRMKWMMTMNYPFTA

SEQ ID NO: 244828 - protein, 15 aa, Artificial Sequence
  Description of Artificial Sequence: Synthetic peptide
  Seed: LRMKWMMAMKYPITA
LRMKWMMTMNYPGTA

SEQ ID NO: 244829 - protein, 15 aa, Artificial Sequence
  Description of Artificial Sequence: Synthetic peptide
  Seed: LRMKWMMAMKYPITA
LRMKWMMTMNYPITA

SEQ ID NO: 244830 - protein, 15 aa, Artificial Sequence
  Description of Artificial Sequence: Synthetic peptide
  Seed: LRMKWMMAMKYPITA
LRMKWMMTMNYPLTA

SEQ ID NO: 244831 - protein, 15 aa, Artificial Sequence
  Description of Artificial Sequence: Synthetic peptide
  Seed: LRMKWMMAMKYPITA
LRMKWMMTMNYPMTA

SEQ ID NO: 244832 - protein, 15 aa, Artificial Sequence
  Description of Artificial Sequence: Synthetic peptide
  Seed: LRMKWMMAMKYPITA
LRMKWMMTMNYPNTA

SEQ ID NO: 244833 - protein, 15 aa, Artificial Sequence
  Description of Artificial Sequence: Synthetic peptide
  Seed: LRMKWMMAMKYPITA
LRMKWMMTMNYPSTA

SEQ ID NO: 244834 - protein, 15 aa, Artificial Sequence
  Description of Artificial Sequence: Synthetic peptide
  Seed: LRMKWMMAMKYPITA
LRMKWMMTMNYPTTA

SEQ ID NO: 244835 - protein, 15 aa, Artificial Sequence
  Description of Artificial Sequence: Synthetic peptide
  Seed: LRMKWMMAMKYPITA
LRMKWMMTMNYPVTA

SEQ ID NO: 244836 - protein, 15 aa, Artificial Sequence
  Description of Artificial Sequence: Synthetic peptide
  Seed: LRMKWMMAMKYPITA
LRMKWMMTMNYPYTA

SEQ ID NO: 244837 - protein, 15 aa, Artificial Sequence
  Description of Artificial Sequence: Synthetic peptide
  Seed: LRMKWMMAMKYPITA
LRMKWMMTMPYPATA

SEQ ID NO: 244838 - protein, 15 aa, Artificial Sequence
  Description of Artificial Sequence: Synthetic peptide
  Seed: LRMKWMMAMKYPITA
LRMKWMMTMPYPCTA

SEQ ID NO: 244839 - protein, 15 aa, Artificial Sequence
  Description of Artificial Sequence: Synthetic peptide
  Seed: LRMKWMMAMKYPITA
LRMKWMMTMPYPDTA

SEQ ID NO: 244840 - protein, 15 aa, Artificial Sequence
  Description of Artificial Sequence: Synthetic peptide
  Seed: LRMKWMMAMKYPITA
LRMKWMMTMPYPETA

SEQ ID NO: 244841 - protein, 15 aa, Artificial Sequence
  Description of Artificial Sequence: Synthetic peptide
  Seed: LRMKWMMAMKYPITA
LRMKWMMTMPYPFTA

SEQ ID NO: 244842 - protein, 15 aa, Artificial Sequence
  Description of Artificial Sequence: Synthetic peptide
  Seed: LRMKWMMAMKYPITA
LRMKWMMTMPYPGTA

SEQ ID NO: 244843 - protein, 15 aa, Artificial Sequence
  Description of Artificial Sequence: Synthetic peptide
  Seed: LRMKWMMAMKYPITA
LRMKWMMTMPYPHTA

SEQ ID NO: 244844 - protein, 15 aa, Artificial Sequence
  Description of Artificial Sequence: Synthetic peptide
  Seed: LRMKWMMAMKYPITA
LRMKWMMTMPYPITA

SEQ ID NO: 244845 - protein, 15 aa, Artificial Sequence
  Description of Artificial Sequence: Synthetic peptide
  Seed: LRMKWMMAMKYPITA
LRMKWMMTMPYPKTA

SEQ ID NO: 244846 - protein, 15 aa, Artificial Sequence
  Description of Artificial Sequence: Synthetic peptide
  Seed: LRMKWMMAMKYPITA
LRMKWMMTMPYPLTA

SEQ ID NO: 244847 - protein, 15 aa, Artificial Sequence
  Description of Artificial Sequence: Synthetic peptide
  Seed: LRMKWMMAMKYPITA
LRMKWMMTMPYPMTA

SEQ ID NO: 244848 - protein, 15 aa, Artificial Sequence
  Description of Artificial Sequence: Synthetic peptide
  Seed: LRMKWMMAMKYPITA
LRMKWMMTMPYPNTA

SEQ ID NO: 244849 - protein, 15 aa, Artificial Sequence
  Description of Artificial Sequence: Synthetic peptide
  Seed: LRMKWMMAMKYPITA
LRMKWMMTMPYPPTA

SEQ ID NO: 244850 - protein, 15 aa, Artificial Sequence
  Description of Artificial Sequence: Synthetic peptide
  Seed: LRMKWMMAMKYPITA
LRMKWMMTMPYPQTA

SEQ ID NO: 244851 - protein, 15 aa, Artificial Sequence
  Description of Artificial Sequence: Synthetic peptide
  Seed: LRMKWMMAMKYPITA
LRMKWMMTMPYPRTA

SEQ ID NO: 244852 - protein, 15 aa, Artificial Sequence
  Description of Artificial Sequence: Synthetic peptide
  Seed: LRMKWMMAMKYPITA
LRMKWMMTMPYPSTA

SEQ ID NO: 244853 - protein, 15 aa, Artificial Sequence
  Description of Artificial Sequence: Synthetic peptide
  Seed: LRMKWMMAMKYPITA
LRMKWMMTMPYPTTA

SEQ ID NO: 244854 - protein, 15 aa, Artificial Sequence
  Description of Artificial Sequence: Synthetic peptide
  Seed: LRMKWMMAMKYPITA
LRMKWMMTMPYPVTA

SEQ ID NO: 244855 - protein, 15 aa, Artificial Sequence
  Description of Artificial Sequence: Synthetic peptide
  Seed: LRMKWMMAMKYPITA
LRMKWMMTMPYPWTA

SEQ ID NO: 244856 - protein, 15 aa, Artificial Sequence
  Description of Artificial Sequence: Synthetic peptide
  Seed: LRMKWMMAMKYPITA
LRMKWMMTMPYPYTA

SEQ ID NO: 244857 - protein, 15 aa, Artificial Sequence
  Description of Artificial Sequence: Synthetic peptide
  Seed: LRMKWMMAMKYPITA
LRMKWMMTMQYPATA

SEQ ID NO: 244858 - protein, 15 aa, Artificial Sequence
  Description of Artificial Sequence: Synthetic peptide
  Seed: LRMKWMMAMKYPITA
LRMKWMMTMQYPITA

SEQ ID NO: 244859 - protein, 15 aa, Artificial Sequence
  Description of Artificial Sequence: Synthetic peptide
  Seed: LRMKWMMAMKYPITA
LRMKWMMTMQYPLTA

SEQ ID NO: 244860 - protein, 15 aa, Artificial Sequence
  Description of Artificial Sequence: Synthetic peptide
  Seed: LRMKWMMAMKYPITA
LRMKWMMTMQYPMTA

SEQ ID NO: 244861 - protein, 15 aa, Artificial Sequence
  Description of Artificial Sequence: Synthetic peptide
  Seed: LRMKWMMAMKYPITA
LRMKWMMTMQYPVTA

SEQ ID NO: 244862 - protein, 15 aa, Artificial Sequence
  Description of Artificial Sequence: Synthetic peptide
  Seed: LRMKWMMAMKYPITA
LRMKWMMTMRYPATA

SEQ ID NO: 244863 - protein, 15 aa, Artificial Sequence
  Description of Artificial Sequence: Synthetic peptide
  Seed: LRMKWMMAMKYPITA
LRMKWMMTMRYPFTA

SEQ ID NO: 244864 - protein, 15 aa, Artificial Sequence
  Description of Artificial Sequence: Synthetic peptide
  Seed: LRMKWMMAMKYPITA
LRMKWMMTMRYPGTA

SEQ ID NO: 244865 - protein, 15 aa, Artificial Sequence
  Description of Artificial Sequence: Synthetic peptide
  Seed: LRMKWMMAMKYPITA
LRMKWMMTMRYPHTA

SEQ ID NO: 244866 - protein, 15 aa, Artificial Sequence
  Description of Artificial Sequence: Synthetic peptide
  Seed: LRMKWMMAMKYPITA
LRMKWMMTMRYPITA

SEQ ID NO: 244867 - protein, 15 aa, Artificial Sequence
  Description of Artificial Sequence: Synthetic peptide
  Seed: LRMKWMMAMKYPITA
LRMKWMMTMRYPKTA

SEQ ID NO: 244868 - protein, 15 aa, Artificial Sequence
  Description of Artificial Sequence: Synthetic peptide
  Seed: LRMKWMMAMKYPITA
LRMKWMMTMRYPLTA

SEQ ID NO: 244869 - protein, 15 aa, Artificial Sequence
  Description of Artificial Sequence: Synthetic peptide
  Seed: LRMKWMMAMKYPITA
LRMKWMMTMRYPMTA

SEQ ID NO: 244870 - protein, 15 aa, Artificial Sequence
  Description of Artificial Sequence: Synthetic peptide
  Seed: LRMKWMMAMKYPITA
LRMKWMMTMRYPNTA

SEQ ID NO: 244871 - protein, 15 aa, Artificial Sequence
  Description of Artificial Sequence: Synthetic peptide
  Seed: LRMKWMMAMKYPITA
LRMKWMMTMRYPPTA

SEQ ID NO: 244872 - protein, 15 aa, Artificial Sequence
  Description of Artificial Sequence: Synthetic peptide
  Seed: LRMKWMMAMKYPITA
LRMKWMMTMRYPQTA

SEQ ID NO: 244873 - protein, 15 aa, Artificial Sequence
  Description of Artificial Sequence: Synthetic peptide
  Seed: LRMKWMMAMKYPITA
LRMKWMMTMRYPRTA

SEQ ID NO: 244874 - protein, 15 aa, Artificial Sequence
  Description of Artificial Sequence: Synthetic peptide
  Seed: LRMKWMMAMKYPITA
LRMKWMMTMRYPSTA

SEQ ID NO: 244875 - protein, 15 aa, Artificial Sequence
  Description of Artificial Sequence: Synthetic peptide
  Seed: LRMKWMMAMKYPITA
LRMKWMMTMRYPTTA

SEQ ID NO: 244876 - protein, 15 aa, Artificial Sequence
  Description of Artificial Sequence: Synthetic peptide
  Seed: LRMKWMMAMKYPITA
LRMKWMMTMRYPVTA

SEQ ID NO: 244877 - protein, 15 aa, Artificial Sequence
  Description of Artificial Sequence: Synthetic peptide
  Seed: LRMKWMMAMKYPITA
LRMKWMMTMRYPYTA

SEQ ID NO: 244878 - protein, 15 aa, Artificial Sequence
  Description of Artificial Sequence: Synthetic peptide
  Seed: LRMKWMMAMKYPITA
LRMKWMMTMSYPATA

SEQ ID NO: 244879 - protein, 15 aa, Artificial Sequence
  Description of Artificial Sequence: Synthetic peptide
  Seed: LRMKWMMAMKYPITA
LRMKWMMTMSYPCTA

SEQ ID NO: 244880 - protein, 15 aa, Artificial Sequence
  Description of Artificial Sequence: Synthetic peptide
  Seed: LRMKWMMAMKYPITA
LRMKWMMTMSYPDTA

SEQ ID NO: 244881 - protein, 15 aa, Artificial Sequence
  Description of Artificial Sequence: Synthetic peptide
  Seed: LRMKWMMAMKYPITA
LRMKWMMTMSYPETA

SEQ ID NO: 244882 - protein, 15 aa, Artificial Sequence
  Description of Artificial Sequence: Synthetic peptide
  Seed: LRMKWMMAMKYPITA
LRMKWMMTMSYPFTA

SEQ ID NO: 244883 - protein, 15 aa, Artificial Sequence
  Description of Artificial Sequence: Synthetic peptide
  Seed: LRMKWMMAMKYPITA
LRMKWMMTMSYPGTA

SEQ ID NO: 244884 - protein, 15 aa, Artificial Sequence
  Description of Artificial Sequence: Synthetic peptide
  Seed: LRMKWMMAMKYPITA
LRMKWMMTMSYPHTA

SEQ ID NO: 244885 - protein, 15 aa, Artificial Sequence
  Description of Artificial Sequence: Synthetic peptide
  Seed: LRMKWMMAMKYPITA
LRMKWMMTMSYPITA

SEQ ID NO: 244886 - protein, 15 aa, Artificial Sequence
  Description of Artificial Sequence: Synthetic peptide
  Seed: LRMKWMMAMKYPITA
LRMKWMMTMSYPKTA

SEQ ID NO: 244887 - protein, 15 aa, Artificial Sequence
  Description of Artificial Sequence: Synthetic peptide
  Seed: LRMKWMMAMKYPITA
LRMKWMMTMSYPLTA

SEQ ID NO: 244888 - protein, 15 aa, Artificial Sequence
  Description of Artificial Sequence: Synthetic peptide
  Seed: LRMKWMMAMKYPITA
LRMKWMMTMSYPMTA

SEQ ID NO: 244889 - protein, 15 aa, Artificial Sequence
  Description of Artificial Sequence: Synthetic peptide
  Seed: LRMKWMMAMKYPITA
LRMKWMMTMSYPNTA

SEQ ID NO: 244890 - protein, 15 aa, Artificial Sequence
  Description of Artificial Sequence: Synthetic peptide
  Seed: LRMKWMMAMKYPITA
LRMKWMMTMSYPPTA

SEQ ID NO: 244891 - protein, 15 aa, Artificial Sequence
  Description of Artificial Sequence: Synthetic peptide
  Seed: LRMKWMMAMKYPITA
LRMKWMMTMSYPQTA

SEQ ID NO: 244892 - protein, 15 aa, Artificial Sequence
  Description of Artificial Sequence: Synthetic peptide
  Seed: LRMKWMMAMKYPITA
LRMKWMMTMSYPRTA

SEQ ID NO: 244893 - protein, 15 aa, Artificial Sequence
  Description of Artificial Sequence: Synthetic peptide
  Seed: LRMKWMMAMKYPITA
LRMKWMMTMSYPSTA

SEQ ID NO: 244894 - protein, 15 aa, Artificial Sequence
  Description of Artificial Sequence: Synthetic peptide
  Seed: LRMKWMMAMKYPITA
LRMKWMMTMSYPTTA

SEQ ID NO: 244895 - protein, 15 aa, Artificial Sequence
  Description of Artificial Sequence: Synthetic peptide
  Seed: LRMKWMMAMKYPITA
LRMKWMMTMSYPVTA

SEQ ID NO: 244896 - protein, 15 aa, Artificial Sequence
  Description of Artificial Sequence: Synthetic peptide
  Seed: LRMKWMMAMKYPITA
LRMKWMMTMSYPWTA

SEQ ID NO: 244897 - protein, 15 aa, Artificial Sequence
  Description of Artificial Sequence: Synthetic peptide
  Seed: LRMKWMMAMKYPITA
LRMKWMMTMSYPYTA

SEQ ID NO: 244898 - protein, 15 aa, Artificial Sequence
  Description of Artificial Sequence: Synthetic peptide
  Seed: LRMKWMMAMKYPITA
LRMKWMMTMTYPATA

SEQ ID NO: 244899 - protein, 15 aa, Artificial Sequence
  Description of Artificial Sequence: Synthetic peptide
  Seed: LRMKWMMAMKYPITA
LRMKWMMTMTYPCTA

SEQ ID NO: 244900 - protein, 15 aa, Artificial Sequence
  Description of Artificial Sequence: Synthetic peptide
  Seed: LRMKWMMAMKYPITA
LRMKWMMTMTYPDTA

SEQ ID NO: 244901 - protein, 15 aa, Artificial Sequence
  Description of Artificial Sequence: Synthetic peptide
  Seed: LRMKWMMAMKYPITA
LRMKWMMTMTYPETA

SEQ ID NO: 244902 - protein, 15 aa, Artificial Sequence
  Description of Artificial Sequence: Synthetic peptide
  Seed: LRMKWMMAMKYPITA
LRMKWMMTMTYPFTA

SEQ ID NO: 244903 - protein, 15 aa, Artificial Sequence
  Description of Artificial Sequence: Synthetic peptide
  Seed: LRMKWMMAMKYPITA
LRMKWMMTMTYPGTA

SEQ ID NO: 244904 - protein, 15 aa, Artificial Sequence
  Description of Artificial Sequence: Synthetic peptide
  Seed: LRMKWMMAMKYPITA
LRMKWMMTMTYPHTA

SEQ ID NO: 244905 - protein, 15 aa, Artificial Sequence
  Description of Artificial Sequence: Synthetic peptide
  Seed: LRMKWMMAMKYPITA
LRMKWMMTMTYPITA

SEQ ID NO: 244906 - protein, 15 aa, Artificial Sequence
  Description of Artificial Sequence: Synthetic peptide
  Seed: LRMKWMMAMKYPITA
LRMKWMMTMTYPLTA

SEQ ID NO: 244907 - protein, 15 aa, Artificial Sequence
  Description of Artificial Sequence: Synthetic peptide
  Seed: LRMKWMMAMKYPITA
LRMKWMMTMTYPMTA

SEQ ID NO: 244908 - protein, 15 aa, Artificial Sequence
  Description of Artificial Sequence: Synthetic peptide
  Seed: LRMKWMMAMKYPITA
LRMKWMMTMTYPNTA

SEQ ID NO: 244909 - protein, 15 aa, Artificial Sequence
  Description of Artificial Sequence: Synthetic peptide
  Seed: LRMKWMMAMKYPITA
LRMKWMMTMTYPPTA

SEQ ID NO: 244910 - protein, 15 aa, Artificial Sequence
  Description of Artificial Sequence: Synthetic peptide
  Seed: LRMKWMMAMKYPITA
LRMKWMMTMTYPQTA

SEQ ID NO: 244911 - protein, 15 aa, Artificial Sequence
  Description of Artificial Sequence: Synthetic peptide
  Seed: LRMKWMMAMKYPITA
LRMKWMMTMTYPSTA

SEQ ID NO: 244912 - protein, 15 aa, Artificial Sequence
  Description of Artificial Sequence: Synthetic peptide
  Seed: LRMKWMMAMKYPITA
LRMKWMMTMTYPTTA

SEQ ID NO: 244913 - protein, 15 aa, Artificial Sequence
  Description of Artificial Sequence: Synthetic peptide
  Seed: LRMKWMMAMKYPITA
LRMKWMMTMTYPVTA

SEQ ID NO: 244914 - protein, 15 aa, Artificial Sequence
  Description of Artificial Sequence: Synthetic peptide
  Seed: LRMKWMMAMKYPITA
LRMKWMMTMTYPYTA

SEQ ID NO: 244915 - protein, 15 aa, Artificial Sequence
  Description of Artificial Sequence: Synthetic peptide
  Seed: LRMKWMMAMKYPITA
LRMKWMMTMVYPATA

SEQ ID NO: 244916 - protein, 15 aa, Artificial Sequence
  Description of Artificial Sequence: Synthetic peptide
  Seed: LRMKWMMAMKYPITA
LRMKWMMTMVYPCTA

SEQ ID NO: 244917 - protein, 15 aa, Artificial Sequence
  Description of Artificial Sequence: Synthetic peptide
  Seed: LRMKWMMAMKYPITA
LRMKWMMTMVYPDTA

SEQ ID NO: 244918 - protein, 15 aa, Artificial Sequence
  Description of Artificial Sequence: Synthetic peptide
  Seed: LRMKWMMAMKYPITA
LRMKWMMTMVYPETA

SEQ ID NO: 244919 - protein, 15 aa, Artificial Sequence
  Description of Artificial Sequence: Synthetic peptide
  Seed: LRMKWMMAMKYPITA
LRMKWMMTMVYPFTA

SEQ ID NO: 244920 - protein, 15 aa, Artificial Sequence
  Description of Artificial Sequence: Synthetic peptide
  Seed: LRMKWMMAMKYPITA
LRMKWMMTMVYPGTA

SEQ ID NO: 244921 - protein, 15 aa, Artificial Sequence
  Description of Artificial Sequence: Synthetic peptide
  Seed: LRMKWMMAMKYPITA
LRMKWMMTMVYPHTA

SEQ ID NO: 244922 - protein, 15 aa, Artificial Sequence
  Description of Artificial Sequence: Synthetic peptide
  Seed: LRMKWMMAMKYPITA
LRMKWMMTMVYPITA

SEQ ID NO: 244923 - protein, 15 aa, Artificial Sequence
  Description of Artificial Sequence: Synthetic peptide
  Seed: LRMKWMMAMKYPITA
LRMKWMMTMVYPKTA

SEQ ID NO: 244924 - protein, 15 aa, Artificial Sequence
  Description of Artificial Sequence: Synthetic peptide
  Seed: LRMKWMMAMKYPITA
LRMKWMMTMVYPLTA

SEQ ID NO: 244925 - protein, 15 aa, Artificial Sequence
  Description of Artificial Sequence: Synthetic peptide
  Seed: LRMKWMMAMKYPITA
LRMKWMMTMVYPMTA

SEQ ID NO: 244926 - protein, 15 aa, Artificial Sequence
  Description of Artificial Sequence: Synthetic peptide
  Seed: LRMKWMMAMKYPITA
LRMKWMMTMVYPNTA

SEQ ID NO: 244927 - protein, 15 aa, Artificial Sequence
  Description of Artificial Sequence: Synthetic peptide
  Seed: LRMKWMMAMKYPITA
LRMKWMMTMVYPPTA

SEQ ID NO: 244928 - protein, 15 aa, Artificial Sequence
  Description of Artificial Sequence: Synthetic peptide
  Seed: LRMKWMMAMKYPITA
LRMKWMMTMVYPQTA

SEQ ID NO: 244929 - protein, 15 aa, Artificial Sequence
  Description of Artificial Sequence: Synthetic peptide
  Seed: LRMKWMMAMKYPITA
LRMKWMMTMVYPRTA

SEQ ID NO: 244930 - protein, 15 aa, Artificial Sequence
  Description of Artificial Sequence: Synthetic peptide
  Seed: LRMKWMMAMKYPITA
LRMKWMMTMVYPSTA

SEQ ID NO: 244931 - protein, 15 aa, Artificial Sequence
  Description of Artificial Sequence: Synthetic peptide
  Seed: LRMKWMMAMKYPITA
LRMKWMMTMVYPTTA

SEQ ID NO: 244932 - protein, 15 aa, Artificial Sequence
  Description of Artificial Sequence: Synthetic peptide
  Seed: LRMKWMMAMKYPITA
LRMKWMMTMVYPVTA

SEQ ID NO: 244933 - protein, 15 aa, Artificial Sequence
  Description of Artificial Sequence: Synthetic peptide
  Seed: LRMKWMMAMKYPITA
LRMKWMMTMVYPYTA

SEQ ID NO: 244934 - protein, 15 aa, Artificial Sequence
  Description of Artificial Sequence: Synthetic peptide
  Seed: LRMKWMMAMKYPITA
LRMKWMMTMWYPITA

SEQ ID NO: 244935 - protein, 15 aa, Artificial Sequence
  Description of Artificial Sequence: Synthetic peptide
  Seed: LRMKWMMAMKYPITA
LRMKWMMTMWYPLTA

SEQ ID NO: 244936 - protein, 15 aa, Artificial Sequence
  Description of Artificial Sequence: Synthetic peptide
  Seed: LRMKWMMAMKYPITA
LRMKWMMTMWYPVTA

SEQ ID NO: 244937 - protein, 15 aa, Artificial Sequence
  Description of Artificial Sequence: Synthetic peptide
  Seed: LRMKWMMAMKYPITA
LRMKWMMTMYYPFTA

SEQ ID NO: 244938 - protein, 15 aa, Artificial Sequence
  Description of Artificial Sequence: Synthetic peptide
  Seed: LRMKWMMAMKYPITA
LRMKWMMTMYYPITA

SEQ ID NO: 244939 - protein, 15 aa, Artificial Sequence
  Description of Artificial Sequence: Synthetic peptide
  Seed: LRMKWMMAMKYPITA
LRMKWMMTMYYPLTA

SEQ ID NO: 244940 - protein, 15 aa, Artificial Sequence
  Description of Artificial Sequence: Synthetic peptide
  Seed: LRMKWMMAMKYPITA
LRMKWMMTMYYPVTA

SEQ ID NO: 244941 - protein, 15 aa, Artificial Sequence
  Description of Artificial Sequence: Synthetic peptide
  Seed: LRMKWMMAMKYPITA
LRMKWMMVMAYPATA

SEQ ID NO: 244942 - protein, 15 aa, Artificial Sequence
  Description of Artificial Sequence: Synthetic peptide
  Seed: LRMKWMMAMKYPITA
LRMKWMMVMAYPCTA

SEQ ID NO: 244943 - protein, 15 aa, Artificial Sequence
  Description of Artificial Sequence: Synthetic peptide
  Seed: LRMKWMMAMKYPITA
LRMKWMMVMAYPDTA

SEQ ID NO: 244944 - protein, 15 aa, Artificial Sequence
  Description of Artificial Sequence: Synthetic peptide
  Seed: LRMKWMMAMKYPITA
LRMKWMMVMAYPETA

SEQ ID NO: 244945 - protein, 15 aa, Artificial Sequence
  Description of Artificial Sequence: Synthetic peptide
  Seed: LRMKWMMAMKYPITA
LRMKWMMVMAYPFTA

SEQ ID NO: 244946 - protein, 15 aa, Artificial Sequence
  Description of Artificial Sequence: Synthetic peptide
  Seed: LRMKWMMAMKYPITA
LRMKWMMVMAYPGTA

SEQ ID NO: 244947 - protein, 15 aa, Artificial Sequence
  Description of Artificial Sequence: Synthetic peptide
  Seed: LRMKWMMAMKYPITA
LRMKWMMVMAYPHTA

SEQ ID NO: 244948 - protein, 15 aa, Artificial Sequence
  Description of Artificial Sequence: Synthetic peptide
  Seed: LRMKWMMAMKYPITA
LRMKWMMVMAYPITA

SEQ ID NO: 244949 - protein, 15 aa, Artificial Sequence
  Description of Artificial Sequence: Synthetic peptide
  Seed: LRMKWMMAMKYPITA
LRMKWMMVMAYPKTA

SEQ ID NO: 244950 - protein, 15 aa, Artificial Sequence
  Description of Artificial Sequence: Synthetic peptide
  Seed: LRMKWMMAMKYPITA
LRMKWMMVMAYPLTA

SEQ ID NO: 244951 - protein, 15 aa, Artificial Sequence
  Description of Artificial Sequence: Synthetic peptide
  Seed: LRMKWMMAMKYPITA
LRMKWMMVMAYPMTA

SEQ ID NO: 244952 - protein, 15 aa, Artificial Sequence
  Description of Artificial Sequence: Synthetic peptide
  Seed: LRMKWMMAMKYPITA
LRMKWMMVMAYPNTA

SEQ ID NO: 244953 - protein, 15 aa, Artificial Sequence
  Description of Artificial Sequence: Synthetic peptide
  Seed: LRMKWMMAMKYPITA
LRMKWMMVMAYPPTA

SEQ ID NO: 244954 - protein, 15 aa, Artificial Sequence
  Description of Artificial Sequence: Synthetic peptide
  Seed: LRMKWMMAMKYPITA
LRMKWMMVMAYPQTA

SEQ ID NO: 244955 - protein, 15 aa, Artificial Sequence
  Description of Artificial Sequence: Synthetic peptide
  Seed: LRMKWMMAMKYPITA
LRMKWMMVMAYPRTA

SEQ ID NO: 244956 - protein, 15 aa, Artificial Sequence
  Description of Artificial Sequence: Synthetic peptide
  Seed: LRMKWMMAMKYPITA
LRMKWMMVMAYPSTA

SEQ ID NO: 244957 - protein, 15 aa, Artificial Sequence
  Description of Artificial Sequence: Synthetic peptide
  Seed: LRMKWMMAMKYPITA
LRMKWMMVMAYPTTA

SEQ ID NO: 244958 - protein, 15 aa, Artificial Sequence
  Description of Artificial Sequence: Synthetic peptide
  Seed: LRMKWMMAMKYPITA
LRMKWMMVMAYPVTA

SEQ ID NO: 244959 - protein, 15 aa, Artificial Sequence
  Description of Artificial Sequence: Synthetic peptide
  Seed: LRMKWMMAMKYPITA
LRMKWMMVMAYPWTA

SEQ ID NO: 244960 - protein, 15 aa, Artificial Sequence
  Description of Artificial Sequence: Synthetic peptide
  Seed: LRMKWMMAMKYPITA
LRMKWMMVMAYPYTA

SEQ ID NO: 244961 - protein, 15 aa, Artificial Sequence
  Description of Artificial Sequence: Synthetic peptide
  Seed: LRMKWMMAMKYPITA
LRMKWMMVMCYPATA

SEQ ID NO: 244962 - protein, 15 aa, Artificial Sequence
  Description of Artificial Sequence: Synthetic peptide
  Seed: LRMKWMMAMKYPITA
LRMKWMMVMDYPATA

SEQ ID NO: 244963 - protein, 15 aa, Artificial Sequence
  Description of Artificial Sequence: Synthetic peptide
  Seed: LRMKWMMAMKYPITA
LRMKWMMVMDYPITA

SEQ ID NO: 244964 - protein, 15 aa, Artificial Sequence
  Description of Artificial Sequence: Synthetic peptide
  Seed: LRMKWMMAMKYPITA
LRMKWMMVMDYPLTA

SEQ ID NO: 244965 - protein, 15 aa, Artificial Sequence
  Description of Artificial Sequence: Synthetic peptide
  Seed: LRMKWMMAMKYPITA
LRMKWMMVMDYPVTA

SEQ ID NO: 244966 - protein, 15 aa, Artificial Sequence
  Description of Artificial Sequence: Synthetic peptide
  Seed: LRMKWMMAMKYPITA
LRMKWMMVMEYPATA

SEQ ID NO: 244967 - protein, 15 aa, Artificial Sequence
  Description of Artificial Sequence: Synthetic peptide
  Seed: LRMKWMMAMKYPITA
LRMKWMMVMEYPITA

SEQ ID NO: 244968 - protein, 15 aa, Artificial Sequence
  Description of Artificial Sequence: Synthetic peptide
  Seed: LRMKWMMAMKYPITA
LRMKWMMVMEYPLTA

SEQ ID NO: 244969 - protein, 15 aa, Artificial Sequence
  Description of Artificial Sequence: Synthetic peptide
  Seed: LRMKWMMAMKYPITA
LRMKWMMVMEYPMTA

SEQ ID NO: 244970 - protein, 15 aa, Artificial Sequence
  Description of Artificial Sequence: Synthetic peptide
  Seed: LRMKWMMAMKYPITA
LRMKWMMVMEYPNTA

SEQ ID NO: 244971 - protein, 15 aa, Artificial Sequence
  Description of Artificial Sequence: Synthetic peptide
  Seed: LRMKWMMAMKYPITA
LRMKWMMVMEYPSTA

SEQ ID NO: 244972 - protein, 15 aa, Artificial Sequence
  Description of Artificial Sequence: Synthetic peptide
  Seed: LRMKWMMAMKYPITA
LRMKWMMVMEYPVTA

SEQ ID NO: 244973 - protein, 15 aa, Artificial Sequence
  Description of Artificial Sequence: Synthetic peptide
  Seed: LRMKWMMAMKYPITA
LRMKWMMVMGYPATA

SEQ ID NO: 244974 - protein, 15 aa, Artificial Sequence
  Description of Artificial Sequence: Synthetic peptide
  Seed: LRMKWMMAMKYPITA
LRMKWMMVMGYPCTA

SEQ ID NO: 244975 - protein, 15 aa, Artificial Sequence
  Description of Artificial Sequence: Synthetic peptide
  Seed: LRMKWMMAMKYPITA
LRMKWMMVMGYPDTA

SEQ ID NO: 244976 - protein, 15 aa, Artificial Sequence
  Description of Artificial Sequence: Synthetic peptide
  Seed: LRMKWMMAMKYPITA
LRMKWMMVMGYPETA

SEQ ID NO: 244977 - protein, 15 aa, Artificial Sequence
  Description of Artificial Sequence: Synthetic peptide
  Seed: LRMKWMMAMKYPITA
LRMKWMMVMGYPFTA

SEQ ID NO: 244978 - protein, 15 aa, Artificial Sequence
  Description of Artificial Sequence: Synthetic peptide
  Seed: LRMKWMMAMKYPITA
LRMKWMMVMGYPGTA

SEQ ID NO: 244979 - protein, 15 aa, Artificial Sequence
  Description of Artificial Sequence: Synthetic peptide
  Seed: LRMKWMMAMKYPITA
LRMKWMMVMGYPHTA

SEQ ID NO: 244980 - protein, 15 aa, Artificial Sequence
  Description of Artificial Sequence: Synthetic peptide
  Seed: LRMKWMMAMKYPITA
LRMKWMMVMGYPITA

SEQ ID NO: 244981 - protein, 15 aa, Artificial Sequence
  Description of Artificial Sequence: Synthetic peptide
  Seed: LRMKWMMAMKYPITA
LRMKWMMVMGYPKTA

SEQ ID NO: 244982 - protein, 15 aa, Artificial Sequence
  Description of Artificial Sequence: Synthetic peptide
  Seed: LRMKWMMAMKYPITA
LRMKWMMVMGYPLTA

SEQ ID NO: 244983 - protein, 15 aa, Artificial Sequence
  Description of Artificial Sequence: Synthetic peptide
  Seed: LRMKWMMAMKYPITA
LRMKWMMVMGYPMTA

SEQ ID NO: 244984 - protein, 15 aa, Artificial Sequence
  Description of Artificial Sequence: Synthetic peptide
  Seed: LRMKWMMAMKYPITA
LRMKWMMVMGYPNTA

SEQ ID NO: 244985 - protein, 15 aa, Artificial Sequence
  Description of Artificial Sequence: Synthetic peptide
  Seed: LRMKWMMAMKYPITA
LRMKWMMVMGYPPTA

SEQ ID NO: 244986 - protein, 15 aa, Artificial Sequence
  Description of Artificial Sequence: Synthetic peptide
  Seed: LRMKWMMAMKYPITA
LRMKWMMVMGYPQTA

SEQ ID NO: 244987 - protein, 15 aa, Artificial Sequence
  Description of Artificial Sequence: Synthetic peptide
  Seed: LRMKWMMAMKYPITA
LRMKWMMVMGYPRTA

SEQ ID NO: 244988 - protein, 15 aa, Artificial Sequence
  Description of Artificial Sequence: Synthetic peptide
  Seed: LRMKWMMAMKYPITA
LRMKWMMVMGYPSTA

SEQ ID NO: 244989 - protein, 15 aa, Artificial Sequence
  Description of Artificial Sequence: Synthetic peptide
  Seed: LRMKWMMAMKYPITA
LRMKWMMVMGYPTTA

SEQ ID NO: 244990 - protein, 15 aa, Artificial Sequence
  Description of Artificial Sequence: Synthetic peptide
  Seed: LRMKWMMAMKYPITA
LRMKWMMVMGYPVTA

SEQ ID NO: 244991 - protein, 15 aa, Artificial Sequence
  Description of Artificial Sequence: Synthetic peptide
  Seed: LRMKWMMAMKYPITA
LRMKWMMVMGYPYTA

SEQ ID NO: 244992 - protein, 15 aa, Artificial Sequence
  Description of Artificial Sequence: Synthetic peptide
  Seed: LRMKWMMAMKYPITA
LRMKWMMVMHYPATA

SEQ ID NO: 244993 - protein, 15 aa, Artificial Sequence
  Description of Artificial Sequence: Synthetic peptide
  Seed: LRMKWMMAMKYPITA
LRMKWMMVMHYPITA

SEQ ID NO: 244994 - protein, 15 aa, Artificial Sequence
  Description of Artificial Sequence: Synthetic peptide
  Seed: LRMKWMMAMKYPITA
LRMKWMMVMHYPLTA

SEQ ID NO: 244995 - protein, 15 aa, Artificial Sequence
  Description of Artificial Sequence: Synthetic peptide
  Seed: LRMKWMMAMKYPITA
LRMKWMMVMHYPMTA

SEQ ID NO: 244996 - protein, 15 aa, Artificial Sequence
  Description of Artificial Sequence: Synthetic peptide
  Seed: LRMKWMMAMKYPITA
LRMKWMMVMHYPNTA

SEQ ID NO: 244997 - protein, 15 aa, Artificial Sequence
  Description of Artificial Sequence: Synthetic peptide
  Seed: LRMKWMMAMKYPITA
LRMKWMMVMHYPSTA

SEQ ID NO: 244998 - protein, 15 aa, Artificial Sequence
  Description of Artificial Sequence: Synthetic peptide
  Seed: LRMKWMMAMKYPITA
LRMKWMMVMHYPTTA

SEQ ID NO: 244999 - protein, 15 aa, Artificial Sequence
  Description of Artificial Sequence: Synthetic peptide
  Seed: LRMKWMMAMKYPITA
LRMKWMMVMHYPVTA

SEQ ID NO: 245000 - protein, 15 aa, Artificial Sequence
  Description of Artificial Sequence: Synthetic peptide
  Seed: LRMKWMMAMKYPITA
LRMKWMMVMIYPATA

SEQ ID NO: 245001 - protein, 15 aa, Artificial Sequence
  Description of Artificial Sequence: Synthetic peptide
  Seed: LRMKWMMAMKYPITA
LRMKWMMVMIYPDTA

SEQ ID NO: 245002 - protein, 15 aa, Artificial Sequence
  Description of Artificial Sequence: Synthetic peptide
  Seed: LRMKWMMAMKYPITA
LRMKWMMVMIYPGTA

SEQ ID NO: 245003 - protein, 15 aa, Artificial Sequence
  Description of Artificial Sequence: Synthetic peptide
  Seed: LRMKWMMAMKYPITA
LRMKWMMVMIYPHTA

SEQ ID NO: 245004 - protein, 15 aa, Artificial Sequence
  Description of Artificial Sequence: Synthetic peptide
  Seed: LRMKWMMAMKYPITA
LRMKWMMVMIYPITA

SEQ ID NO: 245005 - protein, 15 aa, Artificial Sequence
  Description of Artificial Sequence: Synthetic peptide
  Seed: LRMKWMMAMKYPITA
LRMKWMMVMIYPLTA

SEQ ID NO: 245006 - protein, 15 aa, Artificial Sequence
  Description of Artificial Sequence: Synthetic peptide
  Seed: LRMKWMMAMKYPITA
LRMKWMMVMIYPMTA

SEQ ID NO: 245007 - protein, 15 aa, Artificial Sequence
  Description of Artificial Sequence: Synthetic peptide
  Seed: LRMKWMMAMKYPITA
LRMKWMMVMIYPNTA

SEQ ID NO: 245008 - protein, 15 aa, Artificial Sequence
  Description of Artificial Sequence: Synthetic peptide
  Seed: LRMKWMMAMKYPITA
LRMKWMMVMIYPQTA

SEQ ID NO: 245009 - protein, 15 aa, Artificial Sequence
  Description of Artificial Sequence: Synthetic peptide
  Seed: LRMKWMMAMKYPITA
LRMKWMMVMIYPSTA

SEQ ID NO: 245010 - protein, 15 aa, Artificial Sequence
  Description of Artificial Sequence: Synthetic peptide
  Seed: LRMKWMMAMKYPITA
LRMKWMMVMIYPTTA

SEQ ID NO: 245011 - protein, 15 aa, Artificial Sequence
  Description of Artificial Sequence: Synthetic peptide
  Seed: LRMKWMMAMKYPITA
LRMKWMMVMIYPVTA

SEQ ID NO: 245012 - protein, 15 aa, Artificial Sequence
  Description of Artificial Sequence: Synthetic peptide
  Seed: LRMKWMMAMKYPITA
LRMKWMMVMKYPATA

SEQ ID NO: 245013 - protein, 15 aa, Artificial Sequence
  Description of Artificial Sequence: Synthetic peptide
  Seed: LRMKWMMAMKYPITA
LRMKWMMVMKYPGTA

SEQ ID NO: 245014 - protein, 15 aa, Artificial Sequence
  Description of Artificial Sequence: Synthetic peptide
  Seed: LRMKWMMAMKYPITA
LRMKWMMVMKYPHTA

SEQ ID NO: 245015 - protein, 15 aa, Artificial Sequence
  Description of Artificial Sequence: Synthetic peptide
  Seed: LRMKWMMAMKYPITA
LRMKWMMVMKYPKTA

SEQ ID NO: 245016 - protein, 15 aa, Artificial Sequence
  Description of Artificial Sequence: Synthetic peptide
  Seed: LRMKWMMAMKYPITA
LRMKWMMVMKYPLTA

SEQ ID NO: 245017 - protein, 15 aa, Artificial Sequence
  Description of Artificial Sequence: Synthetic peptide
  Seed: LRMKWMMAMKYPITA
LRMKWMMVMKYPMTA

SEQ ID NO: 245018 - protein, 15 aa, Artificial Sequence
  Description of Artificial Sequence: Synthetic peptide
  Seed: LRMKWMMAMKYPITA
LRMKWMMVMKYPNTA

SEQ ID NO: 245019 - protein, 15 aa, Artificial Sequence
  Description of Artificial Sequence: Synthetic peptide
  Seed: LRMKWMMAMKYPITA
LRMKWMMVMKYPPTA

SEQ ID NO: 245020 - protein, 15 aa, Artificial Sequence
  Description of Artificial Sequence: Synthetic peptide
  Seed: LRMKWMMAMKYPITA
LRMKWMMVMKYPQTA

SEQ ID NO: 245021 - protein, 15 aa, Artificial Sequence
  Description of Artificial Sequence: Synthetic peptide
  Seed: LRMKWMMAMKYPITA
LRMKWMMVMKYPRTA

SEQ ID NO: 245022 - protein, 15 aa, Artificial Sequence
  Description of Artificial Sequence: Synthetic peptide
  Seed: LRMKWMMAMKYPITA
LRMKWMMVMKYPSTA

SEQ ID NO: 245023 - protein, 15 aa, Artificial Sequence
  Description of Artificial Sequence: Synthetic peptide
  Seed: LRMKWMMAMKYPITA
LRMKWMMVMKYPTTA

SEQ ID NO: 245024 - protein, 15 aa, Artificial Sequence
  Description of Artificial Sequence: Synthetic peptide
  Seed: LRMKWMMAMKYPITA
LRMKWMMVMKYPVTA

SEQ ID NO: 245025 - protein, 15 aa, Artificial Sequence
  Description of Artificial Sequence: Synthetic peptide
  Seed: LRMKWMMAMKYPITA
LRMKWMMVMKYPYTA

SEQ ID NO: 245026 - protein, 15 aa, Artificial Sequence
  Description of Artificial Sequence: Synthetic peptide
  Seed: LRMKWMMAMKYPITA
LRMKWMMVMMYPCTA

SEQ ID NO: 245027 - protein, 15 aa, Artificial Sequence
  Description of Artificial Sequence: Synthetic peptide
  Seed: LRMKWMMAMKYPITA
LRMKWMMVMNYPATA

SEQ ID NO: 245028 - protein, 15 aa, Artificial Sequence
  Description of Artificial Sequence: Synthetic peptide
  Seed: LRMKWMMAMKYPITA
LRMKWMMVMNYPCTA

SEQ ID NO: 245029 - protein, 15 aa, Artificial Sequence
  Description of Artificial Sequence: Synthetic peptide
  Seed: LRMKWMMAMKYPITA
LRMKWMMVMNYPDTA

SEQ ID NO: 245030 - protein, 15 aa, Artificial Sequence
  Description of Artificial Sequence: Synthetic peptide
  Seed: LRMKWMMAMKYPITA
LRMKWMMVMNYPETA

SEQ ID NO: 245031 - protein, 15 aa, Artificial Sequence
  Description of Artificial Sequence: Synthetic peptide
  Seed: LRMKWMMAMKYPITA
LRMKWMMVMNYPFTA

SEQ ID NO: 245032 - protein, 15 aa, Artificial Sequence
  Description of Artificial Sequence: Synthetic peptide
  Seed: LRMKWMMAMKYPITA
LRMKWMMVMNYPGTA

SEQ ID NO: 245033 - protein, 15 aa, Artificial Sequence
  Description of Artificial Sequence: Synthetic peptide
  Seed: LRMKWMMAMKYPITA
LRMKWMMVMNYPHTA

SEQ ID NO: 245034 - protein, 15 aa, Artificial Sequence
  Description of Artificial Sequence: Synthetic peptide
  Seed: LRMKWMMAMKYPITA
LRMKWMMVMNYPITA

SEQ ID NO: 245035 - protein, 15 aa, Artificial Sequence
  Description of Artificial Sequence: Synthetic peptide
  Seed: LRMKWMMAMKYPITA
LRMKWMMVMNYPLTA

SEQ ID NO: 245036 - protein, 15 aa, Artificial Sequence
  Description of Artificial Sequence: Synthetic peptide
  Seed: LRMKWMMAMKYPITA
LRMKWMMVMNYPMTA

SEQ ID NO: 245037 - protein, 15 aa, Artificial Sequence
  Description of Artificial Sequence: Synthetic peptide
  Seed: LRMKWMMAMKYPITA
LRMKWMMVMNYPNTA

SEQ ID NO: 245038 - protein, 15 aa, Artificial Sequence
  Description of Artificial Sequence: Synthetic peptide
  Seed: LRMKWMMAMKYPITA
LRMKWMMVMNYPPTA

SEQ ID NO: 245039 - protein, 15 aa, Artificial Sequence
  Description of Artificial Sequence: Synthetic peptide
  Seed: LRMKWMMAMKYPITA
LRMKWMMVMNYPQTA

SEQ ID NO: 245040 - protein, 15 aa, Artificial Sequence
  Description of Artificial Sequence: Synthetic peptide
  Seed: LRMKWMMAMKYPITA
LRMKWMMVMNYPRTA

SEQ ID NO: 245041 - protein, 15 aa, Artificial Sequence
  Description of Artificial Sequence: Synthetic peptide
  Seed: LRMKWMMAMKYPITA
LRMKWMMVMNYPSTA

SEQ ID NO: 245042 - protein, 15 aa, Artificial Sequence
  Description of Artificial Sequence: Synthetic peptide
  Seed: LRMKWMMAMKYPITA
LRMKWMMVMNYPTTA

SEQ ID NO: 245043 - protein, 15 aa, Artificial Sequence
  Description of Artificial Sequence: Synthetic peptide
  Seed: LRMKWMMAMKYPITA
LRMKWMMVMNYPVTA

SEQ ID NO: 245044 - protein, 15 aa, Artificial Sequence
  Description of Artificial Sequence: Synthetic peptide
  Seed: LRMKWMMAMKYPITA
LRMKWMMVMNYPYTA

SEQ ID NO: 245045 - protein, 15 aa, Artificial Sequence
  Description of Artificial Sequence: Synthetic peptide
  Seed: LRMKWMMAMKYPITA
LRMKWMMVMPYPATA

SEQ ID NO: 245046 - protein, 15 aa, Artificial Sequence
  Description of Artificial Sequence: Synthetic peptide
  Seed: LRMKWMMAMKYPITA
LRMKWMMVMPYPCTA

SEQ ID NO: 245047 - protein, 15 aa, Artificial Sequence
  Description of Artificial Sequence: Synthetic peptide
  Seed: LRMKWMMAMKYPITA
LRMKWMMVMPYPDTA

SEQ ID NO: 245048 - protein, 15 aa, Artificial Sequence
  Description of Artificial Sequence: Synthetic peptide
  Seed: LRMKWMMAMKYPITA
LRMKWMMVMPYPETA

SEQ ID NO: 245049 - protein, 15 aa, Artificial Sequence
  Description of Artificial Sequence: Synthetic peptide
  Seed: LRMKWMMAMKYPITA
LRMKWMMVMPYPFTA

SEQ ID NO: 245050 - protein, 15 aa, Artificial Sequence
  Description of Artificial Sequence: Synthetic peptide
  Seed: LRMKWMMAMKYPITA
LRMKWMMVMPYPGTA

SEQ ID NO: 245051 - protein, 15 aa, Artificial Sequence
  Description of Artificial Sequence: Synthetic peptide
  Seed: LRMKWMMAMKYPITA
LRMKWMMVMPYPHTA

SEQ ID NO: 245052 - protein, 15 aa, Artificial Sequence
  Description of Artificial Sequence: Synthetic peptide
  Seed: LRMKWMMAMKYPITA
LRMKWMMVMPYPITA

SEQ ID NO: 245053 - protein, 15 aa, Artificial Sequence
  Description of Artificial Sequence: Synthetic peptide
  Seed: LRMKWMMAMKYPITA
LRMKWMMVMPYPKTA

SEQ ID NO: 245054 - protein, 15 aa, Artificial Sequence
  Description of Artificial Sequence: Synthetic peptide
  Seed: LRMKWMMAMKYPITA
LRMKWMMVMPYPLTA

SEQ ID NO: 245055 - protein, 15 aa, Artificial Sequence
  Description of Artificial Sequence: Synthetic peptide
  Seed: LRMKWMMAMKYPITA
LRMKWMMVMPYPMTA

SEQ ID NO: 245056 - protein, 15 aa, Artificial Sequence
  Description of Artificial Sequence: Synthetic peptide
  Seed: LRMKWMMAMKYPITA
LRMKWMMVMPYPNTA

SEQ ID NO: 245057 - protein, 15 aa, Artificial Sequence
  Description of Artificial Sequence: Synthetic peptide
  Seed: LRMKWMMAMKYPITA
LRMKWMMVMPYPPTA

SEQ ID NO: 245058 - protein, 15 aa, Artificial Sequence
  Description of Artificial Sequence: Synthetic peptide
  Seed: LRMKWMMAMKYPITA
LRMKWMMVMPYPQTA

SEQ ID NO: 245059 - protein, 15 aa, Artificial Sequence
  Description of Artificial Sequence: Synthetic peptide
  Seed: LRMKWMMAMKYPITA
LRMKWMMVMPYPRTA

SEQ ID NO: 245060 - protein, 15 aa, Artificial Sequence
  Description of Artificial Sequence: Synthetic peptide
  Seed: LRMKWMMAMKYPITA
LRMKWMMVMPYPSTA

SEQ ID NO: 245061 - protein, 15 aa, Artificial Sequence
  Description of Artificial Sequence: Synthetic peptide
  Seed: LRMKWMMAMKYPITA
LRMKWMMVMPYPTTA

SEQ ID NO: 245062 - protein, 15 aa, Artificial Sequence
  Description of Artificial Sequence: Synthetic peptide
  Seed: LRMKWMMAMKYPITA
LRMKWMMVMPYPVTA

SEQ ID NO: 245063 - protein, 15 aa, Artificial Sequence
  Description of Artificial Sequence: Synthetic peptide
  Seed: LRMKWMMAMKYPITA
LRMKWMMVMPYPWTA

SEQ ID NO: 245064 - protein, 15 aa, Artificial Sequence
  Description of Artificial Sequence: Synthetic peptide
  Seed: LRMKWMMAMKYPITA
LRMKWMMVMPYPYTA

SEQ ID NO: 245065 - protein, 15 aa, Artificial Sequence
  Description of Artificial Sequence: Synthetic peptide
  Seed: LRMKWMMAMKYPITA
LRMKWMMVMQYPATA

SEQ ID NO: 245066 - protein, 15 aa, Artificial Sequence
  Description of Artificial Sequence: Synthetic peptide
  Seed: LRMKWMMAMKYPITA
LRMKWMMVMQYPITA

SEQ ID NO: 245067 - protein, 15 aa, Artificial Sequence
  Description of Artificial Sequence: Synthetic peptide
  Seed: LRMKWMMAMKYPITA
LRMKWMMVMQYPLTA

SEQ ID NO: 245068 - protein, 15 aa, Artificial Sequence
  Description of Artificial Sequence: Synthetic peptide
  Seed: LRMKWMMAMKYPITA
LRMKWMMVMQYPMTA

SEQ ID NO: 245069 - protein, 15 aa, Artificial Sequence
  Description of Artificial Sequence: Synthetic peptide
  Seed: LRMKWMMAMKYPITA
LRMKWMMVMQYPNTA

SEQ ID NO: 245070 - protein, 15 aa, Artificial Sequence
  Description of Artificial Sequence: Synthetic peptide
  Seed: LRMKWMMAMKYPITA
LRMKWMMVMQYPSTA

SEQ ID NO: 245071 - protein, 15 aa, Artificial Sequence
  Description of Artificial Sequence: Synthetic peptide
  Seed: LRMKWMMAMKYPITA
LRMKWMMVMQYPTTA

SEQ ID NO: 245072 - protein, 15 aa, Artificial Sequence
  Description of Artificial Sequence: Synthetic peptide
  Seed: LRMKWMMAMKYPITA
LRMKWMMVMQYPVTA

SEQ ID NO: 245073 - protein, 15 aa, Artificial Sequence
  Description of Artificial Sequence: Synthetic peptide
  Seed: LRMKWMMAMKYPITA
LRMKWMMVMRYPATA

SEQ ID NO: 245074 - protein, 15 aa, Artificial Sequence
  Description of Artificial Sequence: Synthetic peptide
  Seed: LRMKWMMAMKYPITA
LRMKWMMVMRYPFTA

SEQ ID NO: 245075 - protein, 15 aa, Artificial Sequence
  Description of Artificial Sequence: Synthetic peptide
  Seed: LRMKWMMAMKYPITA
LRMKWMMVMRYPGTA

SEQ ID NO: 245076 - protein, 15 aa, Artificial Sequence
  Description of Artificial Sequence: Synthetic peptide
  Seed: LRMKWMMAMKYPITA
LRMKWMMVMRYPHTA

SEQ ID NO: 245077 - protein, 15 aa, Artificial Sequence
  Description of Artificial Sequence: Synthetic peptide
  Seed: LRMKWMMAMKYPITA
LRMKWMMVMRYPITA

SEQ ID NO: 245078 - protein, 15 aa, Artificial Sequence
  Description of Artificial Sequence: Synthetic peptide
  Seed: LRMKWMMAMKYPITA
LRMKWMMVMRYPKTA

SEQ ID NO: 245079 - protein, 15 aa, Artificial Sequence
  Description of Artificial Sequence: Synthetic peptide
  Seed: LRMKWMMAMKYPITA
LRMKWMMVMRYPLTA

SEQ ID NO: 245080 - protein, 15 aa, Artificial Sequence
  Description of Artificial Sequence: Synthetic peptide
  Seed: LRMKWMMAMKYPITA
LRMKWMMVMRYPMTA

SEQ ID NO: 245081 - protein, 15 aa, Artificial Sequence
  Description of Artificial Sequence: Synthetic peptide
  Seed: LRMKWMMAMKYPITA
LRMKWMMVMRYPNTA

SEQ ID NO: 245082 - protein, 15 aa, Artificial Sequence
  Description of Artificial Sequence: Synthetic peptide
  Seed: LRMKWMMAMKYPITA
LRMKWMMVMRYPPTA

SEQ ID NO: 245083 - protein, 15 aa, Artificial Sequence
  Description of Artificial Sequence: Synthetic peptide
  Seed: LRMKWMMAMKYPITA
LRMKWMMVMRYPQTA

SEQ ID NO: 245084 - protein, 15 aa, Artificial Sequence
  Description of Artificial Sequence: Synthetic peptide
  Seed: LRMKWMMAMKYPITA
LRMKWMMVMRYPRTA

SEQ ID NO: 245085 - protein, 15 aa, Artificial Sequence
  Description of Artificial Sequence: Synthetic peptide
  Seed: LRMKWMMAMKYPITA
LRMKWMMVMRYPSTA

SEQ ID NO: 245086 - protein, 15 aa, Artificial Sequence
  Description of Artificial Sequence: Synthetic peptide
  Seed: LRMKWMMAMKYPITA
LRMKWMMVMRYPTTA

SEQ ID NO: 245087 - protein, 15 aa, Artificial Sequence
  Description of Artificial Sequence: Synthetic peptide
  Seed: LRMKWMMAMKYPITA
LRMKWMMVMRYPVTA

SEQ ID NO: 245088 - protein, 15 aa, Artificial Sequence
  Description of Artificial Sequence: Synthetic peptide
  Seed: LRMKWMMAMKYPITA
LRMKWMMVMRYPYTA

SEQ ID NO: 245089 - protein, 15 aa, Artificial Sequence
  Description of Artificial Sequence: Synthetic peptide
  Seed: LRMKWMMAMKYPITA
LRMKWMMVMSYPATA

SEQ ID NO: 245090 - protein, 15 aa, Artificial Sequence
  Description of Artificial Sequence: Synthetic peptide
  Seed: LRMKWMMAMKYPITA
LRMKWMMVMSYPCTA

SEQ ID NO: 245091 - protein, 15 aa, Artificial Sequence
  Description of Artificial Sequence: Synthetic peptide
  Seed: LRMKWMMAMKYPITA
LRMKWMMVMSYPDTA

SEQ ID NO: 245092 - protein, 15 aa, Artificial Sequence
  Description of Artificial Sequence: Synthetic peptide
  Seed: LRMKWMMAMKYPITA
LRMKWMMVMSYPETA

SEQ ID NO: 245093 - protein, 15 aa, Artificial Sequence
  Description of Artificial Sequence: Synthetic peptide
  Seed: LRMKWMMAMKYPITA
LRMKWMMVMSYPFTA

SEQ ID NO: 245094 - protein, 15 aa, Artificial Sequence
  Description of Artificial Sequence: Synthetic peptide
  Seed: LRMKWMMAMKYPITA
LRMKWMMVMSYPGTA

SEQ ID NO: 245095 - protein, 15 aa, Artificial Sequence
  Description of Artificial Sequence: Synthetic peptide
  Seed: LRMKWMMAMKYPITA
LRMKWMMVMSYPHTA

SEQ ID NO: 245096 - protein, 15 aa, Artificial Sequence
  Description of Artificial Sequence: Synthetic peptide
  Seed: LRMKWMMAMKYPITA
LRMKWMMVMSYPITA

SEQ ID NO: 245097 - protein, 15 aa, Artificial Sequence
  Description of Artificial Sequence: Synthetic peptide
  Seed: LRMKWMMAMKYPITA
LRMKWMMVMSYPKTA

SEQ ID NO: 245098 - protein, 15 aa, Artificial Sequence
  Description of Artificial Sequence: Synthetic peptide
  Seed: LRMKWMMAMKYPITA
LRMKWMMVMSYPLTA

SEQ ID NO: 245099 - protein, 15 aa, Artificial Sequence
  Description of Artificial Sequence: Synthetic peptide
  Seed: LRMKWMMAMKYPITA
LRMKWMMVMSYPMTA

SEQ ID NO: 245100 - protein, 15 aa, Artificial Sequence
  Description of Artificial Sequence: Synthetic peptide
  Seed: LRMKWMMAMKYPITA
LRMKWMMVMSYPNTA

SEQ ID NO: 245101 - protein, 15 aa, Artificial Sequence
  Description of Artificial Sequence: Synthetic peptide
  Seed: LRMKWMMAMKYPITA
LRMKWMMVMSYPPTA

SEQ ID NO: 245102 - protein, 15 aa, Artificial Sequence
  Description of Artificial Sequence: Synthetic peptide
  Seed: LRMKWMMAMKYPITA
LRMKWMMVMSYPQTA

SEQ ID NO: 245103 - protein, 15 aa, Artificial Sequence
  Description of Artificial Sequence: Synthetic peptide
  Seed: LRMKWMMAMKYPITA
LRMKWMMVMSYPRTA

SEQ ID NO: 245104 - protein, 15 aa, Artificial Sequence
  Description of Artificial Sequence: Synthetic peptide
  Seed: LRMKWMMAMKYPITA
LRMKWMMVMSYPSTA

SEQ ID NO: 245105 - protein, 15 aa, Artificial Sequence
  Description of Artificial Sequence: Synthetic peptide
  Seed: LRMKWMMAMKYPITA
LRMKWMMVMSYPTTA

SEQ ID NO: 245106 - protein, 15 aa, Artificial Sequence
  Description of Artificial Sequence: Synthetic peptide
  Seed: LRMKWMMAMKYPITA
LRMKWMMVMSYPVTA

SEQ ID NO: 245107 - protein, 15 aa, Artificial Sequence
  Description of Artificial Sequence: Synthetic peptide
  Seed: LRMKWMMAMKYPITA
LRMKWMMVMSYPYTA

SEQ ID NO: 245108 - protein, 15 aa, Artificial Sequence
  Description of Artificial Sequence: Synthetic peptide
  Seed: LRMKWMMAMKYPITA
LRMKWMMVMTYPATA

SEQ ID NO: 245109 - protein, 15 aa, Artificial Sequence
  Description of Artificial Sequence: Synthetic peptide
  Seed: LRMKWMMAMKYPITA
LRMKWMMVMTYPCTA

SEQ ID NO: 245110 - protein, 15 aa, Artificial Sequence
  Description of Artificial Sequence: Synthetic peptide
  Seed: LRMKWMMAMKYPITA
LRMKWMMVMTYPDTA

SEQ ID NO: 245111 - protein, 15 aa, Artificial Sequence
  Description of Artificial Sequence: Synthetic peptide
  Seed: LRMKWMMAMKYPITA
LRMKWMMVMTYPETA

SEQ ID NO: 245112 - protein, 15 aa, Artificial Sequence
  Description of Artificial Sequence: Synthetic peptide
  Seed: LRMKWMMAMKYPITA
LRMKWMMVMTYPFTA

SEQ ID NO: 245113 - protein, 15 aa, Artificial Sequence
  Description of Artificial Sequence: Synthetic peptide
  Seed: LRMKWMMAMKYPITA
LRMKWMMVMTYPGTA

SEQ ID NO: 245114 - protein, 15 aa, Artificial Sequence
  Description of Artificial Sequence: Synthetic peptide
  Seed: LRMKWMMAMKYPITA
LRMKWMMVMTYPHTA

SEQ ID NO: 245115 - protein, 15 aa, Artificial Sequence
  Description of Artificial Sequence: Synthetic peptide
  Seed: LRMKWMMAMKYPITA
LRMKWMMVMTYPITA

SEQ ID NO: 245116 - protein, 15 aa, Artificial Sequence
  Description of Artificial Sequence: Synthetic peptide
  Seed: LRMKWMMAMKYPITA
LRMKWMMVMTYPKTA

SEQ ID NO: 245117 - protein, 15 aa, Artificial Sequence
  Description of Artificial Sequence: Synthetic peptide
  Seed: LRMKWMMAMKYPITA
LRMKWMMVMTYPLTA

SEQ ID NO: 245118 - protein, 15 aa, Artificial Sequence
  Description of Artificial Sequence: Synthetic peptide
  Seed: LRMKWMMAMKYPITA
LRMKWMMVMTYPMTA

SEQ ID NO: 245119 - protein, 15 aa, Artificial Sequence
  Description of Artificial Sequence: Synthetic peptide
  Seed: LRMKWMMAMKYPITA
LRMKWMMVMTYPNTA

SEQ ID NO: 245120 - protein, 15 aa, Artificial Sequence
  Description of Artificial Sequence: Synthetic peptide
  Seed: LRMKWMMAMKYPITA
LRMKWMMVMTYPPTA

SEQ ID NO: 245121 - protein, 15 aa, Artificial Sequence
  Description of Artificial Sequence: Synthetic peptide
  Seed: LRMKWMMAMKYPITA
LRMKWMMVMTYPQTA

SEQ ID NO: 245122 - protein, 15 aa, Artificial Sequence
  Description of Artificial Sequence: Synthetic peptide
  Seed: LRMKWMMAMKYPITA
LRMKWMMVMTYPRTA

SEQ ID NO: 245123 - protein, 15 aa, Artificial Sequence
  Description of Artificial Sequence: Synthetic peptide
  Seed: LRMKWMMAMKYPITA
LRMKWMMVMTYPSTA

SEQ ID NO: 245124 - protein, 15 aa, Artificial Sequence
  Description of Artificial Sequence: Synthetic peptide
  Seed: LRMKWMMAMKYPITA
LRMKWMMVMTYPTTA

SEQ ID NO: 245125 - protein, 15 aa, Artificial Sequence
  Description of Artificial Sequence: Synthetic peptide
  Seed: LRMKWMMAMKYPITA
LRMKWMMVMTYPVTA

SEQ ID NO: 245126 - protein, 15 aa, Artificial Sequence
  Description of Artificial Sequence: Synthetic peptide
  Seed: LRMKWMMAMKYPITA
LRMKWMMVMTYPYTA

SEQ ID NO: 245127 - protein, 15 aa, Artificial Sequence
  Description of Artificial Sequence: Synthetic peptide
  Seed: LRMKWMMAMKYPITA
LRMKWMMVMVYPATA

SEQ ID NO: 245128 - protein, 15 aa, Artificial Sequence
  Description of Artificial Sequence: Synthetic peptide
  Seed: LRMKWMMAMKYPITA
LRMKWMMVMVYPDTA

SEQ ID NO: 245129 - protein, 15 aa, Artificial Sequence
  Description of Artificial Sequence: Synthetic peptide
  Seed: LRMKWMMAMKYPITA
LRMKWMMVMVYPETA

SEQ ID NO: 245130 - protein, 15 aa, Artificial Sequence
  Description of Artificial Sequence: Synthetic peptide
  Seed: LRMKWMMAMKYPITA
LRMKWMMVMVYPGTA

SEQ ID NO: 245131 - protein, 15 aa, Artificial Sequence
  Description of Artificial Sequence: Synthetic peptide
  Seed: LRMKWMMAMKYPITA
LRMKWMMVMVYPHTA

SEQ ID NO: 245132 - protein, 15 aa, Artificial Sequence
  Description of Artificial Sequence: Synthetic peptide
  Seed: LRMKWMMAMKYPITA
LRMKWMMVMVYPITA

SEQ ID NO: 245133 - protein, 15 aa, Artificial Sequence
  Description of Artificial Sequence: Synthetic peptide
  Seed: LRMKWMMAMKYPITA
LRMKWMMVMVYPKTA

SEQ ID NO: 245134 - protein, 15 aa, Artificial Sequence
  Description of Artificial Sequence: Synthetic peptide
  Seed: LRMKWMMAMKYPITA
LRMKWMMVMVYPLTA

SEQ ID NO: 245135 - protein, 15 aa, Artificial Sequence
  Description of Artificial Sequence: Synthetic peptide
  Seed: LRMKWMMAMKYPITA
LRMKWMMVMVYPMTA

SEQ ID NO: 245136 - protein, 15 aa, Artificial Sequence
  Description of Artificial Sequence: Synthetic peptide
  Seed: LRMKWMMAMKYPITA
LRMKWMMVMVYPNTA

SEQ ID NO: 245137 - protein, 15 aa, Artificial Sequence
  Description of Artificial Sequence: Synthetic peptide
  Seed: LRMKWMMAMKYPITA
LRMKWMMVMVYPPTA

SEQ ID NO: 245138 - protein, 15 aa, Artificial Sequence
  Description of Artificial Sequence: Synthetic peptide
  Seed: LRMKWMMAMKYPITA
LRMKWMMVMVYPQTA

SEQ ID NO: 245139 - protein, 15 aa, Artificial Sequence
  Description of Artificial Sequence: Synthetic peptide
  Seed: LRMKWMMAMKYPITA
LRMKWMMVMVYPRTA

SEQ ID NO: 245140 - protein, 15 aa, Artificial Sequence
  Description of Artificial Sequence: Synthetic peptide
  Seed: LRMKWMMAMKYPITA
LRMKWMMVMVYPSTA

SEQ ID NO: 245141 - protein, 15 aa, Artificial Sequence
  Description of Artificial Sequence: Synthetic peptide
  Seed: LRMKWMMAMKYPITA
LRMKWMMVMVYPTTA

SEQ ID NO: 245142 - protein, 15 aa, Artificial Sequence
  Description of Artificial Sequence: Synthetic peptide
  Seed: LRMKWMMAMKYPITA
LRMKWMMVMVYPVTA

SEQ ID NO: 245143 - protein, 15 aa, Artificial Sequence
  Description of Artificial Sequence: Synthetic peptide
  Seed: LRMKWMMAMKYPITA
LRMKWMMVMVYPYTA

SEQ ID NO: 245144 - protein, 15 aa, Artificial Sequence
  Description of Artificial Sequence: Synthetic peptide
  Seed: LRMKWMMAMKYPITA
LRMKWMMVMYYPATA

SEQ ID NO: 245145 - protein, 15 aa, Artificial Sequence
  Description of Artificial Sequence: Synthetic peptide
  Seed: LRMKWMMAMKYPITA
LRMKWMMWMAYPATA

SEQ ID NO: 245146 - protein, 15 aa, Artificial Sequence
  Description of Artificial Sequence: Synthetic peptide
  Seed: LRMKWMMAMKYPITA
LRMKWMMWMAYPGTA

SEQ ID NO: 245147 - protein, 15 aa, Artificial Sequence
  Description of Artificial Sequence: Synthetic peptide
  Seed: LRMKWMMAMKYPITA
LRMKWMMWMAYPHTA

SEQ ID NO: 245148 - protein, 15 aa, Artificial Sequence
  Description of Artificial Sequence: Synthetic peptide
  Seed: LRMKWMMAMKYPITA
LRMKWMMWMAYPITA

SEQ ID NO: 245149 - protein, 15 aa, Artificial Sequence
  Description of Artificial Sequence: Synthetic peptide
  Seed: LRMKWMMAMKYPITA
LRMKWMMWMAYPLTA

SEQ ID NO: 245150 - protein, 15 aa, Artificial Sequence
  Description of Artificial Sequence: Synthetic peptide
  Seed: LRMKWMMAMKYPITA
LRMKWMMWMAYPMTA

SEQ ID NO: 245151 - protein, 15 aa, Artificial Sequence
  Description of Artificial Sequence: Synthetic peptide
  Seed: LRMKWMMAMKYPITA
LRMKWMMWMAYPNTA

SEQ ID NO: 245152 - protein, 15 aa, Artificial Sequence
  Description of Artificial Sequence: Synthetic peptide
  Seed: LRMKWMMAMKYPITA
LRMKWMMWMAYPRTA

SEQ ID NO: 245153 - protein, 15 aa, Artificial Sequence
  Description of Artificial Sequence: Synthetic peptide
  Seed: LRMKWMMAMKYPITA
LRMKWMMWMAYPSTA

SEQ ID NO: 245154 - protein, 15 aa, Artificial Sequence
  Description of Artificial Sequence: Synthetic peptide
  Seed: LRMKWMMAMKYPITA
LRMKWMMWMAYPTTA

SEQ ID NO: 245155 - protein, 15 aa, Artificial Sequence
  Description of Artificial Sequence: Synthetic peptide
  Seed: LRMKWMMAMKYPITA
LRMKWMMWMAYPVTA

SEQ ID NO: 245156 - protein, 15 aa, Artificial Sequence
  Description of Artificial Sequence: Synthetic peptide
  Seed: LRMKWMMAMKYPITA
LRMKWMMWMGYPATA

SEQ ID NO: 245157 - protein, 15 aa, Artificial Sequence
  Description of Artificial Sequence: Synthetic peptide
  Seed: LRMKWMMAMKYPITA
LRMKWMMWMGYPITA

SEQ ID NO: 245158 - protein, 15 aa, Artificial Sequence
  Description of Artificial Sequence: Synthetic peptide
  Seed: LRMKWMMAMKYPITA
LRMKWMMWMGYPLTA

SEQ ID NO: 245159 - protein, 15 aa, Artificial Sequence
  Description of Artificial Sequence: Synthetic peptide
  Seed: LRMKWMMAMKYPITA
LRMKWMMWMGYPMTA

SEQ ID NO: 245160 - protein, 15 aa, Artificial Sequence
  Description of Artificial Sequence: Synthetic peptide
  Seed: LRMKWMMAMKYPITA
LRMKWMMWMGYPVTA

SEQ ID NO: 245161 - protein, 15 aa, Artificial Sequence
  Description of Artificial Sequence: Synthetic peptide
  Seed: LRMKWMMAMKYPITA
LRMKWMMWMIYPATA

SEQ ID NO: 245162 - protein, 15 aa, Artificial Sequence
  Description of Artificial Sequence: Synthetic peptide
  Seed: LRMKWMMAMKYPITA
LRMKWMMWMIYPSTA

SEQ ID NO: 245163 - protein, 15 aa, Artificial Sequence
  Description of Artificial Sequence: Synthetic peptide
  Seed: LRMKWMMAMKYPITA
LRMKWMMWMKYPATA

SEQ ID NO: 245164 - protein, 15 aa, Artificial Sequence
  Description of Artificial Sequence: Synthetic peptide
  Seed: LRMKWMMAMKYPITA
LRMKWMMWMKYPMTA

SEQ ID NO: 245165 - protein, 15 aa, Artificial Sequence
  Description of Artificial Sequence: Synthetic peptide
  Seed: LRMKWMMAMKYPITA
LRMKWMMWMKYPRTA

SEQ ID NO: 245166 - protein, 15 aa, Artificial Sequence
  Description of Artificial Sequence: Synthetic peptide
  Seed: LRMKWMMAMKYPITA
LRMKWMMWMKYPYTA

SEQ ID NO: 245167 - protein, 15 aa, Artificial Sequence
  Description of Artificial Sequence: Synthetic peptide
  Seed: LRMKWMMAMKYPITA
LRMKWMMWMNYPLTA

SEQ ID NO: 245168 - protein, 15 aa, Artificial Sequence
  Description of Artificial Sequence: Synthetic peptide
  Seed: LRMKWMMAMKYPITA
LRMKWMMWMNYPVTA

SEQ ID NO: 245169 - protein, 15 aa, Artificial Sequence
  Description of Artificial Sequence: Synthetic peptide
  Seed: LRMKWMMAMKYPITA
LRMKWMMWMPYPATA

SEQ ID NO: 245170 - protein, 15 aa, Artificial Sequence
  Description of Artificial Sequence: Synthetic peptide
  Seed: LRMKWMMAMKYPITA
LRMKWMMWMPYPITA

SEQ ID NO: 245171 - protein, 15 aa, Artificial Sequence
  Description of Artificial Sequence: Synthetic peptide
  Seed: LRMKWMMAMKYPITA
LRMKWMMWMPYPLTA

SEQ ID NO: 245172 - protein, 15 aa, Artificial Sequence
  Description of Artificial Sequence: Synthetic peptide
  Seed: LRMKWMMAMKYPITA
LRMKWMMWMPYPMTA

SEQ ID NO: 245173 - protein, 15 aa, Artificial Sequence
  Description of Artificial Sequence: Synthetic peptide
  Seed: LRMKWMMAMKYPITA
LRMKWMMWMPYPVTA

SEQ ID NO: 245174 - protein, 15 aa, Artificial Sequence
  Description of Artificial Sequence: Synthetic peptide
  Seed: LRMKWMMAMKYPITA
LRMKWMMWMRYPATA

SEQ ID NO: 245175 - protein, 15 aa, Artificial Sequence
  Description of Artificial Sequence: Synthetic peptide
  Seed: LRMKWMMAMKYPITA
LRMKWMMWMRYPFTA

SEQ ID NO: 245176 - protein, 15 aa, Artificial Sequence
  Description of Artificial Sequence: Synthetic peptide
  Seed: LRMKWMMAMKYPITA
LRMKWMMWMRYPHTA

SEQ ID NO: 245177 - protein, 15 aa, Artificial Sequence
  Description of Artificial Sequence: Synthetic peptide
  Seed: LRMKWMMAMKYPITA
LRMKWMMWMRYPKTA

SEQ ID NO: 245178 - protein, 15 aa, Artificial Sequence
  Description of Artificial Sequence: Synthetic peptide
  Seed: LRMKWMMAMKYPITA
LRMKWMMWMRYPMTA

SEQ ID NO: 245179 - protein, 15 aa, Artificial Sequence
  Description of Artificial Sequence: Synthetic peptide
  Seed: LRMKWMMAMKYPITA
LRMKWMMWMRYPQTA

SEQ ID NO: 245180 - protein, 15 aa, Artificial Sequence
  Description of Artificial Sequence: Synthetic peptide
  Seed: LRMKWMMAMKYPITA
LRMKWMMWMRYPRTA

SEQ ID NO: 245181 - protein, 15 aa, Artificial Sequence
  Description of Artificial Sequence: Synthetic peptide
  Seed: LRMKWMMAMKYPITA
LRMKWMMWMRYPSTA

SEQ ID NO: 245182 - protein, 15 aa, Artificial Sequence
  Description of Artificial Sequence: Synthetic peptide
  Seed: LRMKWMMAMKYPITA
LRMKWMMWMRYPYTA

SEQ ID NO: 245183 - protein, 15 aa, Artificial Sequence
  Description of Artificial Sequence: Synthetic peptide
  Seed: LRMKWMMAMKYPITA
LRMKWMMWMSYPATA

SEQ ID NO: 245184 - protein, 15 aa, Artificial Sequence
  Description of Artificial Sequence: Synthetic peptide
  Seed: LRMKWMMAMKYPITA
LRMKWMMWMSYPITA

SEQ ID NO: 245185 - protein, 15 aa, Artificial Sequence
  Description of Artificial Sequence: Synthetic peptide
  Seed: LRMKWMMAMKYPITA
LRMKWMMWMSYPLTA

SEQ ID NO: 245186 - protein, 15 aa, Artificial Sequence
  Description of Artificial Sequence: Synthetic peptide
  Seed: LRMKWMMAMKYPITA
LRMKWMMWMSYPMTA

SEQ ID NO: 245187 - protein, 15 aa, Artificial Sequence
  Description of Artificial Sequence: Synthetic peptide
  Seed: LRMKWMMAMKYPITA
LRMKWMMWMSYPVTA

SEQ ID NO: 245188 - protein, 15 aa, Artificial Sequence
  Description of Artificial Sequence: Synthetic peptide
  Seed: LRMKWMMAMKYPITA
LRMKWMMWMTYPATA

SEQ ID NO: 245189 - protein, 15 aa, Artificial Sequence
  Description of Artificial Sequence: Synthetic peptide
  Seed: LRMKWMMAMKYPITA
LRMKWMMWMTYPITA

SEQ ID NO: 245190 - protein, 15 aa, Artificial Sequence
  Description of Artificial Sequence: Synthetic peptide
  Seed: LRMKWMMAMKYPITA
LRMKWMMWMTYPLTA

SEQ ID NO: 245191 - protein, 15 aa, Artificial Sequence
  Description of Artificial Sequence: Synthetic peptide
  Seed: LRMKWMMAMKYPITA
LRMKWMMWMTYPVTA

SEQ ID NO: 245192 - protein, 15 aa, Artificial Sequence
  Description of Artificial Sequence: Synthetic peptide
  Seed: LRMKWMMAMKYPITA
LRMKWMMWMVYPATA

SEQ ID NO: 245193 - protein, 15 aa, Artificial Sequence
  Description of Artificial Sequence: Synthetic peptide
  Seed: LRMKWMMAMKYPITA
LRMKWMMWMVYPMTA

SEQ ID NO: 245194 - protein, 15 aa, Artificial Sequence
  Description of Artificial Sequence: Synthetic peptide
  Seed: LRMKWMMAMKYPITA
LRMKWMMWMVYPNTA

SEQ ID NO: 245195 - protein, 15 aa, Artificial Sequence
  Description of Artificial Sequence: Synthetic peptide
  Seed: LRMKWMMAMKYPITA
LRMKWMMWMVYPSTA

SEQ ID NO: 245196 - protein, 15 aa, Artificial Sequence
  Description of Artificial Sequence: Synthetic peptide
  Seed: LRMKWMMAMKYPITA
LRMKWMMYMAYPATA

SEQ ID NO: 245197 - protein, 15 aa, Artificial Sequence
  Description of Artificial Sequence: Synthetic peptide
  Seed: LRMKWMMAMKYPITA
LRMKWMMYMAYPFTA

SEQ ID NO: 245198 - protein, 15 aa, Artificial Sequence
  Description of Artificial Sequence: Synthetic peptide
  Seed: LRMKWMMAMKYPITA
LRMKWMMYMAYPGTA

SEQ ID NO: 245199 - protein, 15 aa, Artificial Sequence
  Description of Artificial Sequence: Synthetic peptide
  Seed: LRMKWMMAMKYPITA
LRMKWMMYMAYPHTA

SEQ ID NO: 245200 - protein, 15 aa, Artificial Sequence
  Description of Artificial Sequence: Synthetic peptide
  Seed: LRMKWMMAMKYPITA
LRMKWMMYMAYPITA

SEQ ID NO: 245201 - protein, 15 aa, Artificial Sequence
  Description of Artificial Sequence: Synthetic peptide
  Seed: LRMKWMMAMKYPITA
LRMKWMMYMAYPKTA

SEQ ID NO: 245202 - protein, 15 aa, Artificial Sequence
  Description of Artificial Sequence: Synthetic peptide
  Seed: LRMKWMMAMKYPITA
LRMKWMMYMAYPLTA

SEQ ID NO: 245203 - protein, 15 aa, Artificial Sequence
  Description of Artificial Sequence: Synthetic peptide
  Seed: LRMKWMMAMKYPITA
LRMKWMMYMAYPMTA

SEQ ID NO: 245204 - protein, 15 aa, Artificial Sequence
  Description of Artificial Sequence: Synthetic peptide
  Seed: LRMKWMMAMKYPITA
LRMKWMMYMAYPRTA

SEQ ID NO: 245205 - protein, 15 aa, Artificial Sequence
  Description of Artificial Sequence: Synthetic peptide
  Seed: LRMKWMMAMKYPITA
LRMKWMMYMAYPSTA

SEQ ID NO: 245206 - protein, 15 aa, Artificial Sequence
  Description of Artificial Sequence: Synthetic peptide
  Seed: LRMKWMMAMKYPITA
LRMKWMMYMAYPTTA

SEQ ID NO: 245207 - protein, 15 aa, Artificial Sequence
  Description of Artificial Sequence: Synthetic peptide
  Seed: LRMKWMMAMKYPITA
LRMKWMMYMAYPVTA

SEQ ID NO: 245208 - protein, 15 aa, Artificial Sequence
  Description of Artificial Sequence: Synthetic peptide
  Seed: LRMKWMMAMKYPITA
LRMKWMMYMGYPATA

SEQ ID NO: 245209 - protein, 15 aa, Artificial Sequence
  Description of Artificial Sequence: Synthetic peptide
  Seed: LRMKWMMAMKYPITA
LRMKWMMYMGYPITA

SEQ ID NO: 245210 - protein, 15 aa, Artificial Sequence
  Description of Artificial Sequence: Synthetic peptide
  Seed: LRMKWMMAMKYPITA
LRMKWMMYMGYPLTA

SEQ ID NO: 245211 - protein, 15 aa, Artificial Sequence
  Description of Artificial Sequence: Synthetic peptide
  Seed: LRMKWMMAMKYPITA
LRMKWMMYMGYPMTA

SEQ ID NO: 245212 - protein, 15 aa, Artificial Sequence
  Description of Artificial Sequence: Synthetic peptide
  Seed: LRMKWMMAMKYPITA
LRMKWMMYMGYPVTA

SEQ ID NO: 245213 - protein, 15 aa, Artificial Sequence
  Description of Artificial Sequence: Synthetic peptide
  Seed: LRMKWMMAMKYPITA
LRMKWMMYMKYPRTA

SEQ ID NO: 245214 - protein, 15 aa, Artificial Sequence
  Description of Artificial Sequence: Synthetic peptide
  Seed: LRMKWMMAMKYPITA
LRMKWMMYMKYPYTA

SEQ ID NO: 245215 - protein, 15 aa, Artificial Sequence
  Description of Artificial Sequence: Synthetic peptide
  Seed: LRMKWMMAMKYPITA
LRMKWMMYMNYPATA

SEQ ID NO: 245216 - protein, 15 aa, Artificial Sequence
  Description of Artificial Sequence: Synthetic peptide
  Seed: LRMKWMMAMKYPITA
LRMKWMMYMNYPITA

SEQ ID NO: 245217 - protein, 15 aa, Artificial Sequence
  Description of Artificial Sequence: Synthetic peptide
  Seed: LRMKWMMAMKYPITA
LRMKWMMYMNYPLTA

SEQ ID NO: 245218 - protein, 15 aa, Artificial Sequence
  Description of Artificial Sequence: Synthetic peptide
  Seed: LRMKWMMAMKYPITA
LRMKWMMYMNYPMTA

SEQ ID NO: 245219 - protein, 15 aa, Artificial Sequence
  Description of Artificial Sequence: Synthetic peptide
  Seed: LRMKWMMAMKYPITA
LRMKWMMYMNYPVTA

SEQ ID NO: 245220 - protein, 15 aa, Artificial Sequence
  Description of Artificial Sequence: Synthetic peptide
  Seed: LRMKWMMAMKYPITA
LRMKWMMYMPYPATA

SEQ ID NO: 245221 - protein, 15 aa, Artificial Sequence
  Description of Artificial Sequence: Synthetic peptide
  Seed: LRMKWMMAMKYPITA
LRMKWMMYMPYPITA

SEQ ID NO: 245222 - protein, 15 aa, Artificial Sequence
  Description of Artificial Sequence: Synthetic peptide
  Seed: LRMKWMMAMKYPITA
LRMKWMMYMPYPLTA

SEQ ID NO: 245223 - protein, 15 aa, Artificial Sequence
  Description of Artificial Sequence: Synthetic peptide
  Seed: LRMKWMMAMKYPITA
LRMKWMMYMPYPVTA

SEQ ID NO: 245224 - protein, 15 aa, Artificial Sequence
  Description of Artificial Sequence: Synthetic peptide
  Seed: LRMKWMMAMKYPITA
LRMKWMMYMRYPHTA

SEQ ID NO: 245225 - protein, 15 aa, Artificial Sequence
  Description of Artificial Sequence: Synthetic peptide
  Seed: LRMKWMMAMKYPITA
LRMKWMMYMRYPKTA

SEQ ID NO: 245226 - protein, 15 aa, Artificial Sequence
  Description of Artificial Sequence: Synthetic peptide
  Seed: LRMKWMMAMKYPITA
LRMKWMMYMRYPMTA

SEQ ID NO: 245227 - protein, 15 aa, Artificial Sequence
  Description of Artificial Sequence: Synthetic peptide
  Seed: LRMKWMMAMKYPITA
LRMKWMMYMRYPRTA

SEQ ID NO: 245228 - protein, 15 aa, Artificial Sequence
  Description of Artificial Sequence: Synthetic peptide
  Seed: LRMKWMMAMKYPITA
LRMKWMMYMRYPYTA

SEQ ID NO: 245229 - protein, 15 aa, Artificial Sequence
  Description of Artificial Sequence: Synthetic peptide
  Seed: LRMKWMMAMKYPITA
LRMKWMMYMSYPATA

SEQ ID NO: 245230 - protein, 15 aa, Artificial Sequence
  Description of Artificial Sequence: Synthetic peptide
  Seed: LRMKWMMAMKYPITA
LRMKWMMYMSYPITA

SEQ ID NO: 245231 - protein, 15 aa, Artificial Sequence
  Description of Artificial Sequence: Synthetic peptide
  Seed: LRMKWMMAMKYPITA
LRMKWMMYMSYPKTA

SEQ ID NO: 245232 - protein, 15 aa, Artificial Sequence
  Description of Artificial Sequence: Synthetic peptide
  Seed: LRMKWMMAMKYPITA
LRMKWMMYMSYPLTA

SEQ ID NO: 245233 - protein, 15 aa, Artificial Sequence
  Description of Artificial Sequence: Synthetic peptide
  Seed: LRMKWMMAMKYPITA
LRMKWMMYMSYPMTA

SEQ ID NO: 245234 - protein, 15 aa, Artificial Sequence
  Description of Artificial Sequence: Synthetic peptide
  Seed: LRMKWMMAMKYPITA
LRMKWMMYMSYPRTA

SEQ ID NO: 245235 - protein, 15 aa, Artificial Sequence
  Description of Artificial Sequence: Synthetic peptide
  Seed: LRMKWMMAMKYPITA
LRMKWMMYMSYPSTA

SEQ ID NO: 245236 - protein, 15 aa, Artificial Sequence
  Description of Artificial Sequence: Synthetic peptide
  Seed: LRMKWMMAMKYPITA
LRMKWMMYMSYPVTA

SEQ ID NO: 245237 - protein, 15 aa, Artificial Sequence
  Description of Artificial Sequence: Synthetic peptide
  Seed: LRMKWMMAMKYPITA
LRMKWMMYMTYPATA

SEQ ID NO: 245238 - protein, 15 aa, Artificial Sequence
  Description of Artificial Sequence: Synthetic peptide
  Seed: LRMKWMMAMKYPITA
LRMKWMMYMTYPITA

SEQ ID NO: 245239 - protein, 15 aa, Artificial Sequence
  Description of Artificial Sequence: Synthetic peptide
  Seed: LRMKWMMAMKYPITA
LRMKWMMYMTYPLTA

SEQ ID NO: 245240 - protein, 15 aa, Artificial Sequence
  Description of Artificial Sequence: Synthetic peptide
  Seed: LRMKWMMAMKYPITA
LRMKWMMYMTYPMTA

SEQ ID NO: 245241 - protein, 15 aa, Artificial Sequence
  Description of Artificial Sequence: Synthetic peptide
  Seed: LRMKWMMAMKYPITA
LRMKWMMYMTYPVTA

SEQ ID NO: 245242 - protein, 15 aa, Artificial Sequence
  Description of Artificial Sequence: Synthetic peptide
  Seed: LRMKWMMAMKYPITA
LRMKWMMYMVYPATA

SEQ ID NO: 245243 - protein, 15 aa, Artificial Sequence
  Description of Artificial Sequence: Synthetic peptide
  Seed: LRMKWMMAMKYPITA
LRMKWMMYMVYPNTA

SEQ ID NO: 245244 - protein, 15 aa, Artificial Sequence
  Description of Artificial Sequence: Synthetic peptide
  Seed: LRMKWMMAMKYPITA
LRMKWMMYMVYPSTA

SEQ ID NO: 245245 - protein, 15 aa, Artificial Sequence
  Description of Artificial Sequence: Synthetic peptide
  Seed: LRMKWMMAMKYPITA
LRMKYMMAMAYPATA

SEQ ID NO: 245246 - protein, 15 aa, Artificial Sequence
  Description of Artificial Sequence: Synthetic peptide
  Seed: LRMKWMMAMKYPITA
LRMKYMMAMAYPCTA

SEQ ID NO: 245247 - protein, 15 aa, Artificial Sequence
  Description of Artificial Sequence: Synthetic peptide
  Seed: LRMKWMMAMKYPITA
LRMKYMMAMAYPDTA

SEQ ID NO: 245248 - protein, 15 aa, Artificial Sequence
  Description of Artificial Sequence: Synthetic peptide
  Seed: LRMKWMMAMKYPITA
LRMKYMMAMAYPETA

SEQ ID NO: 245249 - protein, 15 aa, Artificial Sequence
  Description of Artificial Sequence: Synthetic peptide
  Seed: LRMKWMMAMKYPITA
LRMKYMMAMAYPFTA

SEQ ID NO: 245250 - protein, 15 aa, Artificial Sequence
  Description of Artificial Sequence: Synthetic peptide
  Seed: LRMKWMMAMKYPITA
LRMKYMMAMAYPGTA

SEQ ID NO: 245251 - protein, 15 aa, Artificial Sequence
  Description of Artificial Sequence: Synthetic peptide
  Seed: LRMKWMMAMKYPITA
LRMKYMMAMAYPHTA

SEQ ID NO: 245252 - protein, 15 aa, Artificial Sequence
  Description of Artificial Sequence: Synthetic peptide
  Seed: LRMKWMMAMKYPITA
LRMKYMMAMAYPITA

SEQ ID NO: 245253 - protein, 15 aa, Artificial Sequence
  Description of Artificial Sequence: Synthetic peptide
  Seed: LRMKWMMAMKYPITA
LRMKYMMAMAYPKTA

SEQ ID NO: 245254 - protein, 15 aa, Artificial Sequence
  Description of Artificial Sequence: Synthetic peptide
  Seed: LRMKWMMAMKYPITA
LRMKYMMAMAYPLTA

SEQ ID NO: 245255 - protein, 15 aa, Artificial Sequence
  Description of Artificial Sequence: Synthetic peptide
  Seed: LRMKWMMAMKYPITA
LRMKYMMAMAYPMTA

SEQ ID NO: 245256 - protein, 15 aa, Artificial Sequence
  Description of Artificial Sequence: Synthetic peptide
  Seed: LRMKWMMAMKYPITA
LRMKYMMAMAYPNTA

SEQ ID NO: 245257 - protein, 15 aa, Artificial Sequence
  Description of Artificial Sequence: Synthetic peptide
  Seed: LRMKWMMAMKYPITA
LRMKYMMAMAYPPTA

SEQ ID NO: 245258 - protein, 15 aa, Artificial Sequence
  Description of Artificial Sequence: Synthetic peptide
  Seed: LRMKWMMAMKYPITA
LRMKYMMAMAYPQTA

SEQ ID NO: 245259 - protein, 15 aa, Artificial Sequence
  Description of Artificial Sequence: Synthetic peptide
  Seed: LRMKWMMAMKYPITA
LRMKYMMAMAYPRTA

SEQ ID NO: 245260 - protein, 15 aa, Artificial Sequence
  Description of Artificial Sequence: Synthetic peptide
  Seed: LRMKWMMAMKYPITA
LRMKYMMAMAYPSTA

SEQ ID NO: 245261 - protein, 15 aa, Artificial Sequence
  Description of Artificial Sequence: Synthetic peptide
  Seed: LRMKWMMAMKYPITA
LRMKYMMAMAYPTTA

SEQ ID NO: 245262 - protein, 15 aa, Artificial Sequence
  Description of Artificial Sequence: Synthetic peptide
  Seed: LRMKWMMAMKYPITA
LRMKYMMAMAYPVTA

SEQ ID NO: 245263 - protein, 15 aa, Artificial Sequence
  Description of Artificial Sequence: Synthetic peptide
  Seed: LRMKWMMAMKYPITA
LRMKYMMAMAYPWTA

SEQ ID NO: 245264 - protein, 15 aa, Artificial Sequence
  Description of Artificial Sequence: Synthetic peptide
  Seed: LRMKWMMAMKYPITA
LRMKYMMAMAYPYTA

SEQ ID NO: 245265 - protein, 15 aa, Artificial Sequence
  Description of Artificial Sequence: Synthetic peptide
  Seed: LRMKWMMAMKYPITA
LRMKYMMAMCYPATA

SEQ ID NO: 245266 - protein, 15 aa, Artificial Sequence
  Description of Artificial Sequence: Synthetic peptide
  Seed: LRMKWMMAMKYPITA
LRMKYMMAMCYPCTA

SEQ ID NO: 245267 - protein, 15 aa, Artificial Sequence
  Description of Artificial Sequence: Synthetic peptide
  Seed: LRMKWMMAMKYPITA
LRMKYMMAMCYPDTA

SEQ ID NO: 245268 - protein, 15 aa, Artificial Sequence
  Description of Artificial Sequence: Synthetic peptide
  Seed: LRMKWMMAMKYPITA
LRMKYMMAMCYPETA

SEQ ID NO: 245269 - protein, 15 aa, Artificial Sequence
  Description of Artificial Sequence: Synthetic peptide
  Seed: LRMKWMMAMKYPITA
LRMKYMMAMCYPFTA

SEQ ID NO: 245270 - protein, 15 aa, Artificial Sequence
  Description of Artificial Sequence: Synthetic peptide
  Seed: LRMKWMMAMKYPITA
LRMKYMMAMCYPGTA

SEQ ID NO: 245271 - protein, 15 aa, Artificial Sequence
  Description of Artificial Sequence: Synthetic peptide
  Seed: LRMKWMMAMKYPITA
LRMKYMMAMCYPHTA

SEQ ID NO: 245272 - protein, 15 aa, Artificial Sequence
  Description of Artificial Sequence: Synthetic peptide
  Seed: LRMKWMMAMKYPITA
LRMKYMMAMCYPITA

SEQ ID NO: 245273 - protein, 15 aa, Artificial Sequence
  Description of Artificial Sequence: Synthetic peptide
  Seed: LRMKWMMAMKYPITA
LRMKYMMAMCYPKTA

SEQ ID NO: 245274 - protein, 15 aa, Artificial Sequence
  Description of Artificial Sequence: Synthetic peptide
  Seed: LRMKWMMAMKYPITA
LRMKYMMAMCYPLTA

SEQ ID NO: 245275 - protein, 15 aa, Artificial Sequence
  Description of Artificial Sequence: Synthetic peptide
  Seed: LRMKWMMAMKYPITA
LRMKYMMAMCYPMTA

SEQ ID NO: 245276 - protein, 15 aa, Artificial Sequence
  Description of Artificial Sequence: Synthetic peptide
  Seed: LRMKWMMAMKYPITA
LRMKYMMAMCYPNTA

SEQ ID NO: 245277 - protein, 15 aa, Artificial Sequence
  Description of Artificial Sequence: Synthetic peptide
  Seed: LRMKWMMAMKYPITA
LRMKYMMAMCYPPTA

SEQ ID NO: 245278 - protein, 15 aa, Artificial Sequence
  Description of Artificial Sequence: Synthetic peptide
  Seed: LRMKWMMAMKYPITA
LRMKYMMAMCYPQTA

SEQ ID NO: 245279 - protein, 15 aa, Artificial Sequence
  Description of Artificial Sequence: Synthetic peptide
  Seed: LRMKWMMAMKYPITA
LRMKYMMAMCYPRTA

SEQ ID NO: 245280 - protein, 15 aa, Artificial Sequence
  Description of Artificial Sequence: Synthetic peptide
  Seed: LRMKWMMAMKYPITA
LRMKYMMAMCYPSTA

SEQ ID NO: 245281 - protein, 15 aa, Artificial Sequence
  Description of Artificial Sequence: Synthetic peptide
  Seed: LRMKWMMAMKYPITA
LRMKYMMAMCYPTTA

SEQ ID NO: 245282 - protein, 15 aa, Artificial Sequence
  Description of Artificial Sequence: Synthetic peptide
  Seed: LRMKWMMAMKYPITA
LRMKYMMAMCYPVTA

SEQ ID NO: 245283 - protein, 15 aa, Artificial Sequence
  Description of Artificial Sequence: Synthetic peptide
  Seed: LRMKWMMAMKYPITA
LRMKYMMAMCYPYTA

SEQ ID NO: 245284 - protein, 15 aa, Artificial Sequence
  Description of Artificial Sequence: Synthetic peptide
  Seed: LRMKWMMAMKYPITA
LRMKYMMAMDYPATA

SEQ ID NO: 245285 - protein, 15 aa, Artificial Sequence
  Description of Artificial Sequence: Synthetic peptide
  Seed: LRMKWMMAMKYPITA
LRMKYMMAMDYPDTA

SEQ ID NO: 245286 - protein, 15 aa, Artificial Sequence
  Description of Artificial Sequence: Synthetic peptide
  Seed: LRMKWMMAMKYPITA
LRMKYMMAMDYPFTA

SEQ ID NO: 245287 - protein, 15 aa, Artificial Sequence
  Description of Artificial Sequence: Synthetic peptide
  Seed: LRMKWMMAMKYPITA
LRMKYMMAMDYPGTA

SEQ ID NO: 245288 - protein, 15 aa, Artificial Sequence
  Description of Artificial Sequence: Synthetic peptide
  Seed: LRMKWMMAMKYPITA
LRMKYMMAMDYPHTA

SEQ ID NO: 245289 - protein, 15 aa, Artificial Sequence
  Description of Artificial Sequence: Synthetic peptide
  Seed: LRMKWMMAMKYPITA
LRMKYMMAMDYPITA

SEQ ID NO: 245290 - protein, 15 aa, Artificial Sequence
  Description of Artificial Sequence: Synthetic peptide
  Seed: LRMKWMMAMKYPITA
LRMKYMMAMDYPLTA

SEQ ID NO: 245291 - protein, 15 aa, Artificial Sequence
  Description of Artificial Sequence: Synthetic peptide
  Seed: LRMKWMMAMKYPITA
LRMKYMMAMDYPMTA

SEQ ID NO: 245292 - protein, 15 aa, Artificial Sequence
  Description of Artificial Sequence: Synthetic peptide
  Seed: LRMKWMMAMKYPITA
LRMKYMMAMDYPNTA

SEQ ID NO: 245293 - protein, 15 aa, Artificial Sequence
  Description of Artificial Sequence: Synthetic peptide
  Seed: LRMKWMMAMKYPITA
LRMKYMMAMDYPQTA

SEQ ID NO: 245294 - protein, 15 aa, Artificial Sequence
  Description of Artificial Sequence: Synthetic peptide
  Seed: LRMKWMMAMKYPITA
LRMKYMMAMDYPSTA

SEQ ID NO: 245295 - protein, 15 aa, Artificial Sequence
  Description of Artificial Sequence: Synthetic peptide
  Seed: LRMKWMMAMKYPITA
LRMKYMMAMDYPTTA

SEQ ID NO: 245296 - protein, 15 aa, Artificial Sequence
  Description of Artificial Sequence: Synthetic peptide
  Seed: LRMKWMMAMKYPITA
LRMKYMMAMDYPVTA

SEQ ID NO: 245297 - protein, 15 aa, Artificial Sequence
  Description of Artificial Sequence: Synthetic peptide
  Seed: LRMKWMMAMKYPITA
LRMKYMMAMEYPATA

SEQ ID NO: 245298 - protein, 15 aa, Artificial Sequence
  Description of Artificial Sequence: Synthetic peptide
  Seed: LRMKWMMAMKYPITA
LRMKYMMAMEYPCTA

SEQ ID NO: 245299 - protein, 15 aa, Artificial Sequence
  Description of Artificial Sequence: Synthetic peptide
  Seed: LRMKWMMAMKYPITA
LRMKYMMAMEYPETA

SEQ ID NO: 245300 - protein, 15 aa, Artificial Sequence
  Description of Artificial Sequence: Synthetic peptide
  Seed: LRMKWMMAMKYPITA
LRMKYMMAMEYPFTA

SEQ ID NO: 245301 - protein, 15 aa, Artificial Sequence
  Description of Artificial Sequence: Synthetic peptide
  Seed: LRMKWMMAMKYPITA
LRMKYMMAMEYPGTA

SEQ ID NO: 245302 - protein, 15 aa, Artificial Sequence
  Description of Artificial Sequence: Synthetic peptide
  Seed: LRMKWMMAMKYPITA
LRMKYMMAMEYPHTA

SEQ ID NO: 245303 - protein, 15 aa, Artificial Sequence
  Description of Artificial Sequence: Synthetic peptide
  Seed: LRMKWMMAMKYPITA
LRMKYMMAMEYPITA

SEQ ID NO: 245304 - protein, 15 aa, Artificial Sequence
  Description of Artificial Sequence: Synthetic peptide
  Seed: LRMKWMMAMKYPITA
LRMKYMMAMEYPKTA

SEQ ID NO: 245305 - protein, 15 aa, Artificial Sequence
  Description of Artificial Sequence: Synthetic peptide
  Seed: LRMKWMMAMKYPITA
LRMKYMMAMEYPLTA

SEQ ID NO: 245306 - protein, 15 aa, Artificial Sequence
  Description of Artificial Sequence: Synthetic peptide
  Seed: LRMKWMMAMKYPITA
LRMKYMMAMEYPMTA

SEQ ID NO: 245307 - protein, 15 aa, Artificial Sequence
  Description of Artificial Sequence: Synthetic peptide
  Seed: LRMKWMMAMKYPITA
LRMKYMMAMEYPNTA

SEQ ID NO: 245308 - protein, 15 aa, Artificial Sequence
  Description of Artificial Sequence: Synthetic peptide
  Seed: LRMKWMMAMKYPITA
LRMKYMMAMEYPPTA

SEQ ID NO: 245309 - protein, 15 aa, Artificial Sequence
  Description of Artificial Sequence: Synthetic peptide
  Seed: LRMKWMMAMKYPITA
LRMKYMMAMEYPQTA

SEQ ID NO: 245310 - protein, 15 aa, Artificial Sequence
  Description of Artificial Sequence: Synthetic peptide
  Seed: LRMKWMMAMKYPITA
LRMKYMMAMEYPRTA

SEQ ID NO: 245311 - protein, 15 aa, Artificial Sequence
  Description of Artificial Sequence: Synthetic peptide
  Seed: LRMKWMMAMKYPITA
LRMKYMMAMEYPSTA

SEQ ID NO: 245312 - protein, 15 aa, Artificial Sequence
  Description of Artificial Sequence: Synthetic peptide
  Seed: LRMKWMMAMKYPITA
LRMKYMMAMEYPTTA

SEQ ID NO: 245313 - protein, 15 aa, Artificial Sequence
  Description of Artificial Sequence: Synthetic peptide
  Seed: LRMKWMMAMKYPITA
LRMKYMMAMEYPVTA

SEQ ID NO: 245314 - protein, 15 aa, Artificial Sequence
  Description of Artificial Sequence: Synthetic peptide
  Seed: LRMKWMMAMKYPITA
LRMKYMMAMEYPWTA

SEQ ID NO: 245315 - protein, 15 aa, Artificial Sequence
  Description of Artificial Sequence: Synthetic peptide
  Seed: LRMKWMMAMKYPITA
LRMKYMMAMEYPYTA

SEQ ID NO: 245316 - protein, 15 aa, Artificial Sequence
  Description of Artificial Sequence: Synthetic peptide
  Seed: LRMKWMMAMKYPITA
LRMKYMMAMFYPATA

SEQ ID NO: 245317 - protein, 15 aa, Artificial Sequence
  Description of Artificial Sequence: Synthetic peptide
  Seed: LRMKWMMAMKYPITA
LRMKYMMAMFYPDTA

SEQ ID NO: 245318 - protein, 15 aa, Artificial Sequence
  Description of Artificial Sequence: Synthetic peptide
  Seed: LRMKWMMAMKYPITA
LRMKYMMAMFYPETA

SEQ ID NO: 245319 - protein, 15 aa, Artificial Sequence
  Description of Artificial Sequence: Synthetic peptide
  Seed: LRMKWMMAMKYPITA
LRMKYMMAMFYPFTA

SEQ ID NO: 245320 - protein, 15 aa, Artificial Sequence
  Description of Artificial Sequence: Synthetic peptide
  Seed: LRMKWMMAMKYPITA
LRMKYMMAMFYPGTA

SEQ ID NO: 245321 - protein, 15 aa, Artificial Sequence
  Description of Artificial Sequence: Synthetic peptide
  Seed: LRMKWMMAMKYPITA
LRMKYMMAMFYPHTA

SEQ ID NO: 245322 - protein, 15 aa, Artificial Sequence
  Description of Artificial Sequence: Synthetic peptide
  Seed: LRMKWMMAMKYPITA
LRMKYMMAMFYPITA

SEQ ID NO: 245323 - protein, 15 aa, Artificial Sequence
  Description of Artificial Sequence: Synthetic peptide
  Seed: LRMKWMMAMKYPITA
LRMKYMMAMFYPLTA

SEQ ID NO: 245324 - protein, 15 aa, Artificial Sequence
  Description of Artificial Sequence: Synthetic peptide
  Seed: LRMKWMMAMKYPITA
LRMKYMMAMFYPMTA

SEQ ID NO: 245325 - protein, 15 aa, Artificial Sequence
  Description of Artificial Sequence: Synthetic peptide
  Seed: LRMKWMMAMKYPITA
LRMKYMMAMFYPNTA

SEQ ID NO: 245326 - protein, 15 aa, Artificial Sequence
  Description of Artificial Sequence: Synthetic peptide
  Seed: LRMKWMMAMKYPITA
LRMKYMMAMFYPQTA

SEQ ID NO: 245327 - protein, 15 aa, Artificial Sequence
  Description of Artificial Sequence: Synthetic peptide
  Seed: LRMKWMMAMKYPITA
LRMKYMMAMFYPSTA

SEQ ID NO: 245328 - protein, 15 aa, Artificial Sequence
  Description of Artificial Sequence: Synthetic peptide
  Seed: LRMKWMMAMKYPITA
LRMKYMMAMFYPTTA

SEQ ID NO: 245329 - protein, 15 aa, Artificial Sequence
  Description of Artificial Sequence: Synthetic peptide
  Seed: LRMKWMMAMKYPITA
LRMKYMMAMFYPVTA

SEQ ID NO: 245330 - protein, 15 aa, Artificial Sequence
  Description of Artificial Sequence: Synthetic peptide
  Seed: LRMKWMMAMKYPITA
LRMKYMMAMGYPATA

SEQ ID NO: 245331 - protein, 15 aa, Artificial Sequence
  Description of Artificial Sequence: Synthetic peptide
  Seed: LRMKWMMAMKYPITA
LRMKYMMAMGYPCTA

SEQ ID NO: 245332 - protein, 15 aa, Artificial Sequence
  Description of Artificial Sequence: Synthetic peptide
  Seed: LRMKWMMAMKYPITA
LRMKYMMAMGYPDTA

SEQ ID NO: 245333 - protein, 15 aa, Artificial Sequence
  Description of Artificial Sequence: Synthetic peptide
  Seed: LRMKWMMAMKYPITA
LRMKYMMAMGYPETA

SEQ ID NO: 245334 - protein, 15 aa, Artificial Sequence
  Description of Artificial Sequence: Synthetic peptide
  Seed: LRMKWMMAMKYPITA
LRMKYMMAMGYPFTA

SEQ ID NO: 245335 - protein, 15 aa, Artificial Sequence
  Description of Artificial Sequence: Synthetic peptide
  Seed: LRMKWMMAMKYPITA
LRMKYMMAMGYPGTA

SEQ ID NO: 245336 - protein, 15 aa, Artificial Sequence
  Description of Artificial Sequence: Synthetic peptide
  Seed: LRMKWMMAMKYPITA
LRMKYMMAMGYPHTA

SEQ ID NO: 245337 - protein, 15 aa, Artificial Sequence
  Description of Artificial Sequence: Synthetic peptide
  Seed: LRMKWMMAMKYPITA
LRMKYMMAMGYPITA

SEQ ID NO: 245338 - protein, 15 aa, Artificial Sequence
  Description of Artificial Sequence: Synthetic peptide
  Seed: LRMKWMMAMKYPITA
LRMKYMMAMGYPKTA

SEQ ID NO: 245339 - protein, 15 aa, Artificial Sequence
  Description of Artificial Sequence: Synthetic peptide
  Seed: LRMKWMMAMKYPITA
LRMKYMMAMGYPLTA

SEQ ID NO: 245340 - protein, 15 aa, Artificial Sequence
  Description of Artificial Sequence: Synthetic peptide
  Seed: LRMKWMMAMKYPITA
LRMKYMMAMGYPMTA

SEQ ID NO: 245341 - protein, 15 aa, Artificial Sequence
  Description of Artificial Sequence: Synthetic peptide
  Seed: LRMKWMMAMKYPITA
LRMKYMMAMGYPNTA

SEQ ID NO: 245342 - protein, 15 aa, Artificial Sequence
  Description of Artificial Sequence: Synthetic peptide
  Seed: LRMKWMMAMKYPITA
LRMKYMMAMGYPPTA

SEQ ID NO: 245343 - protein, 15 aa, Artificial Sequence
  Description of Artificial Sequence: Synthetic peptide
  Seed: LRMKWMMAMKYPITA
LRMKYMMAMGYPQTA

SEQ ID NO: 245344 - protein, 15 aa, Artificial Sequence
  Description of Artificial Sequence: Synthetic peptide
  Seed: LRMKWMMAMKYPITA
LRMKYMMAMGYPRTA

SEQ ID NO: 245345 - protein, 15 aa, Artificial Sequence
  Description of Artificial Sequence: Synthetic peptide
  Seed: LRMKWMMAMKYPITA
LRMKYMMAMGYPSTA

SEQ ID NO: 245346 - protein, 15 aa, Artificial Sequence
  Description of Artificial Sequence: Synthetic peptide
  Seed: LRMKWMMAMKYPITA
LRMKYMMAMGYPTTA

SEQ ID NO: 245347 - protein, 15 aa, Artificial Sequence
  Description of Artificial Sequence: Synthetic peptide
  Seed: LRMKWMMAMKYPITA
LRMKYMMAMGYPVTA

SEQ ID NO: 245348 - protein, 15 aa, Artificial Sequence
  Description of Artificial Sequence: Synthetic peptide
  Seed: LRMKWMMAMKYPITA
LRMKYMMAMGYPWTA

SEQ ID NO: 245349 - protein, 15 aa, Artificial Sequence
  Description of Artificial Sequence: Synthetic peptide
  Seed: LRMKWMMAMKYPITA
LRMKYMMAMGYPYTA

SEQ ID NO: 245350 - protein, 15 aa, Artificial Sequence
  Description of Artificial Sequence: Synthetic peptide
  Seed: LRMKWMMAMKYPITA
LRMKYMMAMHYPATA

SEQ ID NO: 245351 - protein, 15 aa, Artificial Sequence
  Description of Artificial Sequence: Synthetic peptide
  Seed: LRMKWMMAMKYPITA
LRMKYMMAMHYPCTA

SEQ ID NO: 245352 - protein, 15 aa, Artificial Sequence
  Description of Artificial Sequence: Synthetic peptide
  Seed: LRMKWMMAMKYPITA
LRMKYMMAMHYPDTA

SEQ ID NO: 245353 - protein, 15 aa, Artificial Sequence
  Description of Artificial Sequence: Synthetic peptide
  Seed: LRMKWMMAMKYPITA
LRMKYMMAMHYPETA

SEQ ID NO: 245354 - protein, 15 aa, Artificial Sequence
  Description of Artificial Sequence: Synthetic peptide
  Seed: LRMKWMMAMKYPITA
LRMKYMMAMHYPFTA

SEQ ID NO: 245355 - protein, 15 aa, Artificial Sequence
  Description of Artificial Sequence: Synthetic peptide
  Seed: LRMKWMMAMKYPITA
LRMKYMMAMHYPGTA

SEQ ID NO: 245356 - protein, 15 aa, Artificial Sequence
  Description of Artificial Sequence: Synthetic peptide
  Seed: LRMKWMMAMKYPITA
LRMKYMMAMHYPHTA

SEQ ID NO: 245357 - protein, 15 aa, Artificial Sequence
  Description of Artificial Sequence: Synthetic peptide
  Seed: LRMKWMMAMKYPITA
LRMKYMMAMHYPITA

SEQ ID NO: 245358 - protein, 15 aa, Artificial Sequence
  Description of Artificial Sequence: Synthetic peptide
  Seed: LRMKWMMAMKYPITA
LRMKYMMAMHYPKTA

SEQ ID NO: 245359 - protein, 15 aa, Artificial Sequence
  Description of Artificial Sequence: Synthetic peptide
  Seed: LRMKWMMAMKYPITA
LRMKYMMAMHYPLTA

SEQ ID NO: 245360 - protein, 15 aa, Artificial Sequence
  Description of Artificial Sequence: Synthetic peptide
  Seed: LRMKWMMAMKYPITA
LRMKYMMAMHYPMTA

SEQ ID NO: 245361 - protein, 15 aa, Artificial Sequence
  Description of Artificial Sequence: Synthetic peptide
  Seed: LRMKWMMAMKYPITA
LRMKYMMAMHYPNTA

SEQ ID NO: 245362 - protein, 15 aa, Artificial Sequence
  Description of Artificial Sequence: Synthetic peptide
  Seed: LRMKWMMAMKYPITA
LRMKYMMAMHYPQTA

SEQ ID NO: 245363 - protein, 15 aa, Artificial Sequence
  Description of Artificial Sequence: Synthetic peptide
  Seed: LRMKWMMAMKYPITA
LRMKYMMAMHYPRTA

SEQ ID NO: 245364 - protein, 15 aa, Artificial Sequence
  Description of Artificial Sequence: Synthetic peptide
  Seed: LRMKWMMAMKYPITA
LRMKYMMAMHYPSTA

SEQ ID NO: 245365 - protein, 15 aa, Artificial Sequence
  Description of Artificial Sequence: Synthetic peptide
  Seed: LRMKWMMAMKYPITA
LRMKYMMAMHYPTTA

SEQ ID NO: 245366 - protein, 15 aa, Artificial Sequence
  Description of Artificial Sequence: Synthetic peptide
  Seed: LRMKWMMAMKYPITA
LRMKYMMAMHYPVTA

SEQ ID NO: 245367 - protein, 15 aa, Artificial Sequence
  Description of Artificial Sequence: Synthetic peptide
  Seed: LRMKWMMAMKYPITA
LRMKYMMAMHYPWTA

SEQ ID NO: 245368 - protein, 15 aa, Artificial Sequence
  Description of Artificial Sequence: Synthetic peptide
  Seed: LRMKWMMAMKYPITA
LRMKYMMAMHYPYTA

SEQ ID NO: 245369 - protein, 15 aa, Artificial Sequence
  Description of Artificial Sequence: Synthetic peptide
  Seed: LRMKWMMAMKYPITA
LRMKYMMAMIYPATA

SEQ ID NO: 245370 - protein, 15 aa, Artificial Sequence
  Description of Artificial Sequence: Synthetic peptide
  Seed: LRMKWMMAMKYPITA
LRMKYMMAMIYPCTA

SEQ ID NO: 245371 - protein, 15 aa, Artificial Sequence
  Description of Artificial Sequence: Synthetic peptide
  Seed: LRMKWMMAMKYPITA
LRMKYMMAMIYPDTA

SEQ ID NO: 245372 - protein, 15 aa, Artificial Sequence
  Description of Artificial Sequence: Synthetic peptide
  Seed: LRMKWMMAMKYPITA
LRMKYMMAMIYPETA

SEQ ID NO: 245373 - protein, 15 aa, Artificial Sequence
  Description of Artificial Sequence: Synthetic peptide
  Seed: LRMKWMMAMKYPITA
LRMKYMMAMIYPFTA

SEQ ID NO: 245374 - protein, 15 aa, Artificial Sequence
  Description of Artificial Sequence: Synthetic peptide
  Seed: LRMKWMMAMKYPITA
LRMKYMMAMIYPGTA

SEQ ID NO: 245375 - protein, 15 aa, Artificial Sequence
  Description of Artificial Sequence: Synthetic peptide
  Seed: LRMKWMMAMKYPITA
LRMKYMMAMIYPHTA

SEQ ID NO: 245376 - protein, 15 aa, Artificial Sequence
  Description of Artificial Sequence: Synthetic peptide
  Seed: LRMKWMMAMKYPITA
LRMKYMMAMIYPITA

SEQ ID NO: 245377 - protein, 15 aa, Artificial Sequence
  Description of Artificial Sequence: Synthetic peptide
  Seed: LRMKWMMAMKYPITA
LRMKYMMAMIYPKTA

SEQ ID NO: 245378 - protein, 15 aa, Artificial Sequence
  Description of Artificial Sequence: Synthetic peptide
  Seed: LRMKWMMAMKYPITA
LRMKYMMAMIYPLTA

SEQ ID NO: 245379 - protein, 15 aa, Artificial Sequence
  Description of Artificial Sequence: Synthetic peptide
  Seed: LRMKWMMAMKYPITA
LRMKYMMAMIYPMTA

SEQ ID NO: 245380 - protein, 15 aa, Artificial Sequence
  Description of Artificial Sequence: Synthetic peptide
  Seed: LRMKWMMAMKYPITA
LRMKYMMAMIYPNTA

SEQ ID NO: 245381 - protein, 15 aa, Artificial Sequence
  Description of Artificial Sequence: Synthetic peptide
  Seed: LRMKWMMAMKYPITA
LRMKYMMAMIYPPTA

SEQ ID NO: 245382 - protein, 15 aa, Artificial Sequence
  Description of Artificial Sequence: Synthetic peptide
  Seed: LRMKWMMAMKYPITA
LRMKYMMAMIYPQTA

SEQ ID NO: 245383 - protein, 15 aa, Artificial Sequence
  Description of Artificial Sequence: Synthetic peptide
  Seed: LRMKWMMAMKYPITA
LRMKYMMAMIYPRTA

SEQ ID NO: 245384 - protein, 15 aa, Artificial Sequence
  Description of Artificial Sequence: Synthetic peptide
  Seed: LRMKWMMAMKYPITA
LRMKYMMAMIYPSTA

SEQ ID NO: 245385 - protein, 15 aa, Artificial Sequence
  Description of Artificial Sequence: Synthetic peptide
  Seed: LRMKWMMAMKYPITA
LRMKYMMAMIYPTTA

SEQ ID NO: 245386 - protein, 15 aa, Artificial Sequence
  Description of Artificial Sequence: Synthetic peptide
  Seed: LRMKWMMAMKYPITA
LRMKYMMAMIYPVTA

SEQ ID NO: 245387 - protein, 15 aa, Artificial Sequence
  Description of Artificial Sequence: Synthetic peptide
  Seed: LRMKWMMAMKYPITA
LRMKYMMAMIYPWTA

SEQ ID NO: 245388 - protein, 15 aa, Artificial Sequence
  Description of Artificial Sequence: Synthetic peptide
  Seed: LRMKWMMAMKYPITA
LRMKYMMAMIYPYTA

SEQ ID NO: 245389 - protein, 15 aa, Artificial Sequence
  Description of Artificial Sequence: Synthetic peptide
  Seed: LRMKWMMAMKYPITA
LRMKYMMAMKYPATA

SEQ ID NO: 245390 - protein, 15 aa, Artificial Sequence
  Description of Artificial Sequence: Synthetic peptide
  Seed: LRMKWMMAMKYPITA
LRMKYMMAMKYPCTA

SEQ ID NO: 245391 - protein, 15 aa, Artificial Sequence
  Description of Artificial Sequence: Synthetic peptide
  Seed: LRMKWMMAMKYPITA
LRMKYMMAMKYPDTA

SEQ ID NO: 245392 - protein, 15 aa, Artificial Sequence
  Description of Artificial Sequence: Synthetic peptide
  Seed: LRMKWMMAMKYPITA
LRMKYMMAMKYPETA

SEQ ID NO: 245393 - protein, 15 aa, Artificial Sequence
  Description of Artificial Sequence: Synthetic peptide
  Seed: LRMKWMMAMKYPITA
LRMKYMMAMKYPFTA

SEQ ID NO: 245394 - protein, 15 aa, Artificial Sequence
  Description of Artificial Sequence: Synthetic peptide
  Seed: LRMKWMMAMKYPITA
LRMKYMMAMKYPGTA

SEQ ID NO: 245395 - protein, 15 aa, Artificial Sequence
  Description of Artificial Sequence: Synthetic peptide
  Seed: LRMKWMMAMKYPITA
LRMKYMMAMKYPHTA

SEQ ID NO: 245396 - protein, 15 aa, Artificial Sequence
  Description of Artificial Sequence: Synthetic peptide
  Seed: LRMKWMMAMKYPITA
LRMKYMMAMKYPITA

SEQ ID NO: 245397 - protein, 15 aa, Artificial Sequence
  Description of Artificial Sequence: Synthetic peptide
  Seed: LRMKWMMAMKYPITA
LRMKYMMAMKYPKTA

SEQ ID NO: 245398 - protein, 15 aa, Artificial Sequence
  Description of Artificial Sequence: Synthetic peptide
  Seed: LRMKWMMAMKYPITA
LRMKYMMAMKYPLTA

SEQ ID NO: 245399 - protein, 15 aa, Artificial Sequence
  Description of Artificial Sequence: Synthetic peptide
  Seed: LRMKWMMAMKYPITA
LRMKYMMAMKYPMTA

SEQ ID NO: 245400 - protein, 15 aa, Artificial Sequence
  Description of Artificial Sequence: Synthetic peptide
  Seed: LRMKWMMAMKYPITA
LRMKYMMAMKYPNTA

SEQ ID NO: 245401 - protein, 15 aa, Artificial Sequence
  Description of Artificial Sequence: Synthetic peptide
  Seed: LRMKWMMAMKYPITA
LRMKYMMAMKYPPTA

SEQ ID NO: 245402 - protein, 15 aa, Artificial Sequence
  Description of Artificial Sequence: Synthetic peptide
  Seed: LRMKWMMAMKYPITA
LRMKYMMAMKYPQTA

SEQ ID NO: 245403 - protein, 15 aa, Artificial Sequence
  Description of Artificial Sequence: Synthetic peptide
  Seed: LRMKWMMAMKYPITA
LRMKYMMAMKYPRTA

SEQ ID NO: 245404 - protein, 15 aa, Artificial Sequence
  Description of Artificial Sequence: Synthetic peptide
  Seed: LRMKWMMAMKYPITA
LRMKYMMAMKYPSTA

SEQ ID NO: 245405 - protein, 15 aa, Artificial Sequence
  Description of Artificial Sequence: Synthetic peptide
  Seed: LRMKWMMAMKYPITA
LRMKYMMAMKYPTTA

SEQ ID NO: 245406 - protein, 15 aa, Artificial Sequence
  Description of Artificial Sequence: Synthetic peptide
  Seed: LRMKWMMAMKYPITA
LRMKYMMAMKYPVTA

SEQ ID NO: 245407 - protein, 15 aa, Artificial Sequence
  Description of Artificial Sequence: Synthetic peptide
  Seed: LRMKWMMAMKYPITA
LRMKYMMAMKYPWTA

SEQ ID NO: 245408 - protein, 15 aa, Artificial Sequence
  Description of Artificial Sequence: Synthetic peptide
  Seed: LRMKWMMAMKYPITA
LRMKYMMAMKYPYTA

SEQ ID NO: 245409 - protein, 15 aa, Artificial Sequence
  Description of Artificial Sequence: Synthetic peptide
  Seed: LRMKWMMAMKYPITA
LRMKYMMAMLYPATA

SEQ ID NO: 245410 - protein, 15 aa, Artificial Sequence
  Description of Artificial Sequence: Synthetic peptide
  Seed: LRMKWMMAMKYPITA
LRMKYMMAMLYPCTA

SEQ ID NO: 245411 - protein, 15 aa, Artificial Sequence
  Description of Artificial Sequence: Synthetic peptide
  Seed: LRMKWMMAMKYPITA
LRMKYMMAMLYPDTA

SEQ ID NO: 245412 - protein, 15 aa, Artificial Sequence
  Description of Artificial Sequence: Synthetic peptide
  Seed: LRMKWMMAMKYPITA
LRMKYMMAMLYPGTA

SEQ ID NO: 245413 - protein, 15 aa, Artificial Sequence
  Description of Artificial Sequence: Synthetic peptide
  Seed: LRMKWMMAMKYPITA
LRMKYMMAMLYPITA

SEQ ID NO: 245414 - protein, 15 aa, Artificial Sequence
  Description of Artificial Sequence: Synthetic peptide
  Seed: LRMKWMMAMKYPITA
LRMKYMMAMLYPLTA

SEQ ID NO: 245415 - protein, 15 aa, Artificial Sequence
  Description of Artificial Sequence: Synthetic peptide
  Seed: LRMKWMMAMKYPITA
LRMKYMMAMLYPMTA

SEQ ID NO: 245416 - protein, 15 aa, Artificial Sequence
  Description of Artificial Sequence: Synthetic peptide
  Seed: LRMKWMMAMKYPITA
LRMKYMMAMLYPNTA

SEQ ID NO: 245417 - protein, 15 aa, Artificial Sequence
  Description of Artificial Sequence: Synthetic peptide
  Seed: LRMKWMMAMKYPITA
LRMKYMMAMLYPQTA

SEQ ID NO: 245418 - protein, 15 aa, Artificial Sequence
  Description of Artificial Sequence: Synthetic peptide
  Seed: LRMKWMMAMKYPITA
LRMKYMMAMLYPSTA

SEQ ID NO: 245419 - protein, 15 aa, Artificial Sequence
  Description of Artificial Sequence: Synthetic peptide
  Seed: LRMKWMMAMKYPITA
LRMKYMMAMLYPTTA

SEQ ID NO: 245420 - protein, 15 aa, Artificial Sequence
  Description of Artificial Sequence: Synthetic peptide
  Seed: LRMKWMMAMKYPITA
LRMKYMMAMLYPVTA

SEQ ID NO: 245421 - protein, 15 aa, Artificial Sequence
  Description of Artificial Sequence: Synthetic peptide
  Seed: LRMKWMMAMKYPITA
LRMKYMMAMMYPATA

SEQ ID NO: 245422 - protein, 15 aa, Artificial Sequence
  Description of Artificial Sequence: Synthetic peptide
  Seed: LRMKWMMAMKYPITA
LRMKYMMAMMYPCTA

SEQ ID NO: 245423 - protein, 15 aa, Artificial Sequence
  Description of Artificial Sequence: Synthetic peptide
  Seed: LRMKWMMAMKYPITA
LRMKYMMAMMYPDTA

SEQ ID NO: 245424 - protein, 15 aa, Artificial Sequence
  Description of Artificial Sequence: Synthetic peptide
  Seed: LRMKWMMAMKYPITA
LRMKYMMAMMYPETA

SEQ ID NO: 245425 - protein, 15 aa, Artificial Sequence
  Description of Artificial Sequence: Synthetic peptide
  Seed: LRMKWMMAMKYPITA
LRMKYMMAMMYPFTA

SEQ ID NO: 245426 - protein, 15 aa, Artificial Sequence
  Description of Artificial Sequence: Synthetic peptide
  Seed: LRMKWMMAMKYPITA
LRMKYMMAMMYPGTA

SEQ ID NO: 245427 - protein, 15 aa, Artificial Sequence
  Description of Artificial Sequence: Synthetic peptide
  Seed: LRMKWMMAMKYPITA
LRMKYMMAMMYPITA

SEQ ID NO: 245428 - protein, 15 aa, Artificial Sequence
  Description of Artificial Sequence: Synthetic peptide
  Seed: LRMKWMMAMKYPITA
LRMKYMMAMMYPLTA

SEQ ID NO: 245429 - protein, 15 aa, Artificial Sequence
  Description of Artificial Sequence: Synthetic peptide
  Seed: LRMKWMMAMKYPITA
LRMKYMMAMMYPMTA

SEQ ID NO: 245430 - protein, 15 aa, Artificial Sequence
  Description of Artificial Sequence: Synthetic peptide
  Seed: LRMKWMMAMKYPITA
LRMKYMMAMMYPNTA

SEQ ID NO: 245431 - protein, 15 aa, Artificial Sequence
  Description of Artificial Sequence: Synthetic peptide
  Seed: LRMKWMMAMKYPITA
LRMKYMMAMMYPPTA

SEQ ID NO: 245432 - protein, 15 aa, Artificial Sequence
  Description of Artificial Sequence: Synthetic peptide
  Seed: LRMKWMMAMKYPITA
LRMKYMMAMMYPQTA

SEQ ID NO: 245433 - protein, 15 aa, Artificial Sequence
  Description of Artificial Sequence: Synthetic peptide
  Seed: LRMKWMMAMKYPITA
LRMKYMMAMMYPRTA

SEQ ID NO: 245434 - protein, 15 aa, Artificial Sequence
  Description of Artificial Sequence: Synthetic peptide
  Seed: LRMKWMMAMKYPITA
LRMKYMMAMMYPSTA

SEQ ID NO: 245435 - protein, 15 aa, Artificial Sequence
  Description of Artificial Sequence: Synthetic peptide
  Seed: LRMKWMMAMKYPITA
LRMKYMMAMMYPTTA

SEQ ID NO: 245436 - protein, 15 aa, Artificial Sequence
  Description of Artificial Sequence: Synthetic peptide
  Seed: LRMKWMMAMKYPITA
LRMKYMMAMMYPVTA

SEQ ID NO: 245437 - protein, 15 aa, Artificial Sequence
  Description of Artificial Sequence: Synthetic peptide
  Seed: LRMKWMMAMKYPITA
LRMKYMMAMMYPYTA

SEQ ID NO: 245438 - protein, 15 aa, Artificial Sequence
  Description of Artificial Sequence: Synthetic peptide
  Seed: LRMKWMMAMKYPITA
LRMKYMMAMNYPATA

SEQ ID NO: 245439 - protein, 15 aa, Artificial Sequence
  Description of Artificial Sequence: Synthetic peptide
  Seed: LRMKWMMAMKYPITA
LRMKYMMAMNYPCTA

SEQ ID NO: 245440 - protein, 15 aa, Artificial Sequence
  Description of Artificial Sequence: Synthetic peptide
  Seed: LRMKWMMAMKYPITA
LRMKYMMAMNYPDTA

SEQ ID NO: 245441 - protein, 15 aa, Artificial Sequence
  Description of Artificial Sequence: Synthetic peptide
  Seed: LRMKWMMAMKYPITA
LRMKYMMAMNYPETA

SEQ ID NO: 245442 - protein, 15 aa, Artificial Sequence
  Description of Artificial Sequence: Synthetic peptide
  Seed: LRMKWMMAMKYPITA
LRMKYMMAMNYPFTA

SEQ ID NO: 245443 - protein, 15 aa, Artificial Sequence
  Description of Artificial Sequence: Synthetic peptide
  Seed: LRMKWMMAMKYPITA
LRMKYMMAMNYPGTA

SEQ ID NO: 245444 - protein, 15 aa, Artificial Sequence
  Description of Artificial Sequence: Synthetic peptide
  Seed: LRMKWMMAMKYPITA
LRMKYMMAMNYPHTA

SEQ ID NO: 245445 - protein, 15 aa, Artificial Sequence
  Description of Artificial Sequence: Synthetic peptide
  Seed: LRMKWMMAMKYPITA
LRMKYMMAMNYPITA

SEQ ID NO: 245446 - protein, 15 aa, Artificial Sequence
  Description of Artificial Sequence: Synthetic peptide
  Seed: LRMKWMMAMKYPITA
LRMKYMMAMNYPKTA

SEQ ID NO: 245447 - protein, 15 aa, Artificial Sequence
  Description of Artificial Sequence: Synthetic peptide
  Seed: LRMKWMMAMKYPITA
LRMKYMMAMNYPLTA

SEQ ID NO: 245448 - protein, 15 aa, Artificial Sequence
  Description of Artificial Sequence: Synthetic peptide
  Seed: LRMKWMMAMKYPITA
LRMKYMMAMNYPMTA

SEQ ID NO: 245449 - protein, 15 aa, Artificial Sequence
  Description of Artificial Sequence: Synthetic peptide
  Seed: LRMKWMMAMKYPITA
LRMKYMMAMNYPNTA

SEQ ID NO: 245450 - protein, 15 aa, Artificial Sequence
  Description of Artificial Sequence: Synthetic peptide
  Seed: LRMKWMMAMKYPITA
LRMKYMMAMNYPPTA

SEQ ID NO: 245451 - protein, 15 aa, Artificial Sequence
  Description of Artificial Sequence: Synthetic peptide
  Seed: LRMKWMMAMKYPITA
LRMKYMMAMNYPQTA

SEQ ID NO: 245452 - protein, 15 aa, Artificial Sequence
  Description of Artificial Sequence: Synthetic peptide
  Seed: LRMKWMMAMKYPITA
LRMKYMMAMNYPRTA

SEQ ID NO: 245453 - protein, 15 aa, Artificial Sequence
  Description of Artificial Sequence: Synthetic peptide
  Seed: LRMKWMMAMKYPITA
LRMKYMMAMNYPSTA

SEQ ID NO: 245454 - protein, 15 aa, Artificial Sequence
  Description of Artificial Sequence: Synthetic peptide
  Seed: LRMKWMMAMKYPITA
LRMKYMMAMNYPTTA

SEQ ID NO: 245455 - protein, 15 aa, Artificial Sequence
  Description of Artificial Sequence: Synthetic peptide
  Seed: LRMKWMMAMKYPITA
LRMKYMMAMNYPVTA

SEQ ID NO: 245456 - protein, 15 aa, Artificial Sequence
  Description of Artificial Sequence: Synthetic peptide
  Seed: LRMKWMMAMKYPITA
LRMKYMMAMNYPWTA

SEQ ID NO: 245457 - protein, 15 aa, Artificial Sequence
  Description of Artificial Sequence: Synthetic peptide
  Seed: LRMKWMMAMKYPITA
LRMKYMMAMNYPYTA

SEQ ID NO: 245458 - protein, 15 aa, Artificial Sequence
  Description of Artificial Sequence: Synthetic peptide
  Seed: LRMKWMMAMKYPITA
LRMKYMMAMPYPATA

SEQ ID NO: 245459 - protein, 15 aa, Artificial Sequence
  Description of Artificial Sequence: Synthetic peptide
  Seed: LRMKWMMAMKYPITA
LRMKYMMAMPYPCTA

SEQ ID NO: 245460 - protein, 15 aa, Artificial Sequence
  Description of Artificial Sequence: Synthetic peptide
  Seed: LRMKWMMAMKYPITA
LRMKYMMAMPYPDTA

SEQ ID NO: 245461 - protein, 15 aa, Artificial Sequence
  Description of Artificial Sequence: Synthetic peptide
  Seed: LRMKWMMAMKYPITA
LRMKYMMAMPYPETA

SEQ ID NO: 245462 - protein, 15 aa, Artificial Sequence
  Description of Artificial Sequence: Synthetic peptide
  Seed: LRMKWMMAMKYPITA
LRMKYMMAMPYPFTA

SEQ ID NO: 245463 - protein, 15 aa, Artificial Sequence
  Description of Artificial Sequence: Synthetic peptide
  Seed: LRMKWMMAMKYPITA
LRMKYMMAMPYPGTA

SEQ ID NO: 245464 - protein, 15 aa, Artificial Sequence
  Description of Artificial Sequence: Synthetic peptide
  Seed: LRMKWMMAMKYPITA
LRMKYMMAMPYPHTA

SEQ ID NO: 245465 - protein, 15 aa, Artificial Sequence
  Description of Artificial Sequence: Synthetic peptide
  Seed: LRMKWMMAMKYPITA
LRMKYMMAMPYPITA

SEQ ID NO: 245466 - protein, 15 aa, Artificial Sequence
  Description of Artificial Sequence: Synthetic peptide
  Seed: LRMKWMMAMKYPITA
LRMKYMMAMPYPKTA

SEQ ID NO: 245467 - protein, 15 aa, Artificial Sequence
  Description of Artificial Sequence: Synthetic peptide
  Seed: LRMKWMMAMKYPITA
LRMKYMMAMPYPLTA

SEQ ID NO: 245468 - protein, 15 aa, Artificial Sequence
  Description of Artificial Sequence: Synthetic peptide
  Seed: LRMKWMMAMKYPITA
LRMKYMMAMPYPMTA

SEQ ID NO: 245469 - protein, 15 aa, Artificial Sequence
  Description of Artificial Sequence: Synthetic peptide
  Seed: LRMKWMMAMKYPITA
LRMKYMMAMPYPNTA

SEQ ID NO: 245470 - protein, 15 aa, Artificial Sequence
  Description of Artificial Sequence: Synthetic peptide
  Seed: LRMKWMMAMKYPITA
LRMKYMMAMPYPPTA

SEQ ID NO: 245471 - protein, 15 aa, Artificial Sequence
  Description of Artificial Sequence: Synthetic peptide
  Seed: LRMKWMMAMKYPITA
LRMKYMMAMPYPQTA

SEQ ID NO: 245472 - protein, 15 aa, Artificial Sequence
  Description of Artificial Sequence: Synthetic peptide
  Seed: LRMKWMMAMKYPITA
LRMKYMMAMPYPRTA

SEQ ID NO: 245473 - protein, 15 aa, Artificial Sequence
  Description of Artificial Sequence: Synthetic peptide
  Seed: LRMKWMMAMKYPITA
LRMKYMMAMPYPSTA

SEQ ID NO: 245474 - protein, 15 aa, Artificial Sequence
  Description of Artificial Sequence: Synthetic peptide
  Seed: LRMKWMMAMKYPITA
LRMKYMMAMPYPTTA

SEQ ID NO: 245475 - protein, 15 aa, Artificial Sequence
  Description of Artificial Sequence: Synthetic peptide
  Seed: LRMKWMMAMKYPITA
LRMKYMMAMPYPVTA

SEQ ID NO: 245476 - protein, 15 aa, Artificial Sequence
  Description of Artificial Sequence: Synthetic peptide
  Seed: LRMKWMMAMKYPITA
LRMKYMMAMPYPWTA

SEQ ID NO: 245477 - protein, 15 aa, Artificial Sequence
  Description of Artificial Sequence: Synthetic peptide
  Seed: LRMKWMMAMKYPITA
LRMKYMMAMPYPYTA

SEQ ID NO: 245478 - protein, 15 aa, Artificial Sequence
  Description of Artificial Sequence: Synthetic peptide
  Seed: LRMKWMMAMKYPITA
LRMKYMMAMQYPATA

SEQ ID NO: 245479 - protein, 15 aa, Artificial Sequence
  Description of Artificial Sequence: Synthetic peptide
  Seed: LRMKWMMAMKYPITA
LRMKYMMAMQYPCTA

SEQ ID NO: 245480 - protein, 15 aa, Artificial Sequence
  Description of Artificial Sequence: Synthetic peptide
  Seed: LRMKWMMAMKYPITA
LRMKYMMAMQYPDTA

SEQ ID NO: 245481 - protein, 15 aa, Artificial Sequence
  Description of Artificial Sequence: Synthetic peptide
  Seed: LRMKWMMAMKYPITA
LRMKYMMAMQYPETA

SEQ ID NO: 245482 - protein, 15 aa, Artificial Sequence
  Description of Artificial Sequence: Synthetic peptide
  Seed: LRMKWMMAMKYPITA
LRMKYMMAMQYPFTA

SEQ ID NO: 245483 - protein, 15 aa, Artificial Sequence
  Description of Artificial Sequence: Synthetic peptide
  Seed: LRMKWMMAMKYPITA
LRMKYMMAMQYPGTA

SEQ ID NO: 245484 - protein, 15 aa, Artificial Sequence
  Description of Artificial Sequence: Synthetic peptide
  Seed: LRMKWMMAMKYPITA
LRMKYMMAMQYPHTA

SEQ ID NO: 245485 - protein, 15 aa, Artificial Sequence
  Description of Artificial Sequence: Synthetic peptide
  Seed: LRMKWMMAMKYPITA
LRMKYMMAMQYPITA

SEQ ID NO: 245486 - protein, 15 aa, Artificial Sequence
  Description of Artificial Sequence: Synthetic peptide
  Seed: LRMKWMMAMKYPITA
LRMKYMMAMQYPKTA

SEQ ID NO: 245487 - protein, 15 aa, Artificial Sequence
  Description of Artificial Sequence: Synthetic peptide
  Seed: LRMKWMMAMKYPITA
LRMKYMMAMQYPLTA

SEQ ID NO: 245488 - protein, 15 aa, Artificial Sequence
  Description of Artificial Sequence: Synthetic peptide
  Seed: LRMKWMMAMKYPITA
LRMKYMMAMQYPMTA

SEQ ID NO: 245489 - protein, 15 aa, Artificial Sequence
  Description of Artificial Sequence: Synthetic peptide
  Seed: LRMKWMMAMKYPITA
LRMKYMMAMQYPNTA

SEQ ID NO: 245490 - protein, 15 aa, Artificial Sequence
  Description of Artificial Sequence: Synthetic peptide
  Seed: LRMKWMMAMKYPITA
LRMKYMMAMQYPPTA

SEQ ID NO: 245491 - protein, 15 aa, Artificial Sequence
  Description of Artificial Sequence: Synthetic peptide
  Seed: LRMKWMMAMKYPITA
LRMKYMMAMQYPQTA

SEQ ID NO: 245492 - protein, 15 aa, Artificial Sequence
  Description of Artificial Sequence: Synthetic peptide
  Seed: LRMKWMMAMKYPITA
LRMKYMMAMQYPRTA

SEQ ID NO: 245493 - protein, 15 aa, Artificial Sequence
  Description of Artificial Sequence: Synthetic peptide
  Seed: LRMKWMMAMKYPITA
LRMKYMMAMQYPSTA

SEQ ID NO: 245494 - protein, 15 aa, Artificial Sequence
  Description of Artificial Sequence: Synthetic peptide
  Seed: LRMKWMMAMKYPITA
LRMKYMMAMQYPTTA

SEQ ID NO: 245495 - protein, 15 aa, Artificial Sequence
  Description of Artificial Sequence: Synthetic peptide
  Seed: LRMKWMMAMKYPITA
LRMKYMMAMQYPVTA

SEQ ID NO: 245496 - protein, 15 aa, Artificial Sequence
  Description of Artificial Sequence: Synthetic peptide
  Seed: LRMKWMMAMKYPITA
LRMKYMMAMQYPWTA

SEQ ID NO: 245497 - protein, 15 aa, Artificial Sequence
  Description of Artificial Sequence: Synthetic peptide
  Seed: LRMKWMMAMKYPITA
LRMKYMMAMQYPYTA

SEQ ID NO: 245498 - protein, 15 aa, Artificial Sequence
  Description of Artificial Sequence: Synthetic peptide
  Seed: LRMKWMMAMKYPITA
LRMKYMMAMRYPATA

SEQ ID NO: 245499 - protein, 15 aa, Artificial Sequence
  Description of Artificial Sequence: Synthetic peptide
  Seed: LRMKWMMAMKYPITA
LRMKYMMAMRYPCTA

SEQ ID NO: 245500 - protein, 15 aa, Artificial Sequence
  Description of Artificial Sequence: Synthetic peptide
  Seed: LRMKWMMAMKYPITA
LRMKYMMAMRYPDTA

SEQ ID NO: 245501 - protein, 15 aa, Artificial Sequence
  Description of Artificial Sequence: Synthetic peptide
  Seed: LRMKWMMAMKYPITA
LRMKYMMAMRYPETA

SEQ ID NO: 245502 - protein, 15 aa, Artificial Sequence
  Description of Artificial Sequence: Synthetic peptide
  Seed: LRMKWMMAMKYPITA
LRMKYMMAMRYPFTA

SEQ ID NO: 245503 - protein, 15 aa, Artificial Sequence
  Description of Artificial Sequence: Synthetic peptide
  Seed: LRMKWMMAMKYPITA
LRMKYMMAMRYPGTA

SEQ ID NO: 245504 - protein, 15 aa, Artificial Sequence
  Description of Artificial Sequence: Synthetic peptide
  Seed: LRMKWMMAMKYPITA
LRMKYMMAMRYPHTA

SEQ ID NO: 245505 - protein, 15 aa, Artificial Sequence
  Description of Artificial Sequence: Synthetic peptide
  Seed: LRMKWMMAMKYPITA
LRMKYMMAMRYPITA

SEQ ID NO: 245506 - protein, 15 aa, Artificial Sequence
  Description of Artificial Sequence: Synthetic peptide
  Seed: LRMKWMMAMKYPITA
LRMKYMMAMRYPKTA

SEQ ID NO: 245507 - protein, 15 aa, Artificial Sequence
  Description of Artificial Sequence: Synthetic peptide
  Seed: LRMKWMMAMKYPITA
LRMKYMMAMRYPLTA

SEQ ID NO: 245508 - protein, 15 aa, Artificial Sequence
  Description of Artificial Sequence: Synthetic peptide
  Seed: LRMKWMMAMKYPITA
LRMKYMMAMRYPMTA

SEQ ID NO: 245509 - protein, 15 aa, Artificial Sequence
  Description of Artificial Sequence: Synthetic peptide
  Seed: LRMKWMMAMKYPITA
LRMKYMMAMRYPNTA

SEQ ID NO: 245510 - protein, 15 aa, Artificial Sequence
  Description of Artificial Sequence: Synthetic peptide
  Seed: LRMKWMMAMKYPITA
LRMKYMMAMRYPPTA

SEQ ID NO: 245511 - protein, 15 aa, Artificial Sequence
  Description of Artificial Sequence: Synthetic peptide
  Seed: LRMKWMMAMKYPITA
LRMKYMMAMRYPQTA

SEQ ID NO: 245512 - protein, 15 aa, Artificial Sequence
  Description of Artificial Sequence: Synthetic peptide
  Seed: LRMKWMMAMKYPITA
LRMKYMMAMRYPRTA

SEQ ID NO: 245513 - protein, 15 aa, Artificial Sequence
  Description of Artificial Sequence: Synthetic peptide
  Seed: LRMKWMMAMKYPITA
LRMKYMMAMRYPSTA

SEQ ID NO: 245514 - protein, 15 aa, Artificial Sequence
  Description of Artificial Sequence: Synthetic peptide
  Seed: LRMKWMMAMKYPITA
LRMKYMMAMRYPTTA

SEQ ID NO: 245515 - protein, 15 aa, Artificial Sequence
  Description of Artificial Sequence: Synthetic peptide
  Seed: LRMKWMMAMKYPITA
LRMKYMMAMRYPVTA

SEQ ID NO: 245516 - protein, 15 aa, Artificial Sequence
  Description of Artificial Sequence: Synthetic peptide
  Seed: LRMKWMMAMKYPITA
LRMKYMMAMRYPWTA

SEQ ID NO: 245517 - protein, 15 aa, Artificial Sequence
  Description of Artificial Sequence: Synthetic peptide
  Seed: LRMKWMMAMKYPITA
LRMKYMMAMRYPYTA

SEQ ID NO: 245518 - protein, 15 aa, Artificial Sequence
  Description of Artificial Sequence: Synthetic peptide
  Seed: LRMKWMMAMKYPITA
LRMKYMMAMSYPATA

SEQ ID NO: 245519 - protein, 15 aa, Artificial Sequence
  Description of Artificial Sequence: Synthetic peptide
  Seed: LRMKWMMAMKYPITA
LRMKYMMAMSYPCTA

SEQ ID NO: 245520 - protein, 15 aa, Artificial Sequence
  Description of Artificial Sequence: Synthetic peptide
  Seed: LRMKWMMAMKYPITA
LRMKYMMAMSYPDTA

SEQ ID NO: 245521 - protein, 15 aa, Artificial Sequence
  Description of Artificial Sequence: Synthetic peptide
  Seed: LRMKWMMAMKYPITA
LRMKYMMAMSYPETA

SEQ ID NO: 245522 - protein, 15 aa, Artificial Sequence
  Description of Artificial Sequence: Synthetic peptide
  Seed: LRMKWMMAMKYPITA
LRMKYMMAMSYPFTA

SEQ ID NO: 245523 - protein, 15 aa, Artificial Sequence
  Description of Artificial Sequence: Synthetic peptide
  Seed: LRMKWMMAMKYPITA
LRMKYMMAMSYPGTA

SEQ ID NO: 245524 - protein, 15 aa, Artificial Sequence
  Description of Artificial Sequence: Synthetic peptide
  Seed: LRMKWMMAMKYPITA
LRMKYMMAMSYPHTA

SEQ ID NO: 245525 - protein, 15 aa, Artificial Sequence
  Description of Artificial Sequence: Synthetic peptide
  Seed: LRMKWMMAMKYPITA
LRMKYMMAMSYPITA

SEQ ID NO: 245526 - protein, 15 aa, Artificial Sequence
  Description of Artificial Sequence: Synthetic peptide
  Seed: LRMKWMMAMKYPITA
LRMKYMMAMSYPKTA

SEQ ID NO: 245527 - protein, 15 aa, Artificial Sequence
  Description of Artificial Sequence: Synthetic peptide
  Seed: LRMKWMMAMKYPITA
LRMKYMMAMSYPLTA

SEQ ID NO: 245528 - protein, 15 aa, Artificial Sequence
  Description of Artificial Sequence: Synthetic peptide
  Seed: LRMKWMMAMKYPITA
LRMKYMMAMSYPMTA

SEQ ID NO: 245529 - protein, 15 aa, Artificial Sequence
  Description of Artificial Sequence: Synthetic peptide
  Seed: LRMKWMMAMKYPITA
LRMKYMMAMSYPNTA

SEQ ID NO: 245530 - protein, 15 aa, Artificial Sequence
  Description of Artificial Sequence: Synthetic peptide
  Seed: LRMKWMMAMKYPITA
LRMKYMMAMSYPPTA

SEQ ID NO: 245531 - protein, 15 aa, Artificial Sequence
  Description of Artificial Sequence: Synthetic peptide
  Seed: LRMKWMMAMKYPITA
LRMKYMMAMSYPQTA

SEQ ID NO: 245532 - protein, 15 aa, Artificial Sequence
  Description of Artificial Sequence: Synthetic peptide
  Seed: LRMKWMMAMKYPITA
LRMKYMMAMSYPRTA

SEQ ID NO: 245533 - protein, 15 aa, Artificial Sequence
  Description of Artificial Sequence: Synthetic peptide
  Seed: LRMKWMMAMKYPITA
LRMKYMMAMSYPSTA

SEQ ID NO: 245534 - protein, 15 aa, Artificial Sequence
  Description of Artificial Sequence: Synthetic peptide
  Seed: LRMKWMMAMKYPITA
LRMKYMMAMSYPTTA

SEQ ID NO: 245535 - protein, 15 aa, Artificial Sequence
  Description of Artificial Sequence: Synthetic peptide
  Seed: LRMKWMMAMKYPITA
LRMKYMMAMSYPVTA

SEQ ID NO: 245536 - protein, 15 aa, Artificial Sequence
  Description of Artificial Sequence: Synthetic peptide
  Seed: LRMKWMMAMKYPITA
LRMKYMMAMSYPWTA

SEQ ID NO: 245537 - protein, 15 aa, Artificial Sequence
  Description of Artificial Sequence: Synthetic peptide
  Seed: LRMKWMMAMKYPITA
LRMKYMMAMSYPYTA

SEQ ID NO: 245538 - protein, 15 aa, Artificial Sequence
  Description of Artificial Sequence: Synthetic peptide
  Seed: LRMKWMMAMKYPITA
LRMKYMMAMTYPATA

SEQ ID NO: 245539 - protein, 15 aa, Artificial Sequence
  Description of Artificial Sequence: Synthetic peptide
  Seed: LRMKWMMAMKYPITA
LRMKYMMAMTYPCTA

SEQ ID NO: 245540 - protein, 15 aa, Artificial Sequence
  Description of Artificial Sequence: Synthetic peptide
  Seed: LRMKWMMAMKYPITA
LRMKYMMAMTYPDTA

SEQ ID NO: 245541 - protein, 15 aa, Artificial Sequence
  Description of Artificial Sequence: Synthetic peptide
  Seed: LRMKWMMAMKYPITA
LRMKYMMAMTYPETA

SEQ ID NO: 245542 - protein, 15 aa, Artificial Sequence
  Description of Artificial Sequence: Synthetic peptide
  Seed: LRMKWMMAMKYPITA
LRMKYMMAMTYPFTA

SEQ ID NO: 245543 - protein, 15 aa, Artificial Sequence
  Description of Artificial Sequence: Synthetic peptide
  Seed: LRMKWMMAMKYPITA
LRMKYMMAMTYPGTA

SEQ ID NO: 245544 - protein, 15 aa, Artificial Sequence
  Description of Artificial Sequence: Synthetic peptide
  Seed: LRMKWMMAMKYPITA
LRMKYMMAMTYPHTA

SEQ ID NO: 245545 - protein, 15 aa, Artificial Sequence
  Description of Artificial Sequence: Synthetic peptide
  Seed: LRMKWMMAMKYPITA
LRMKYMMAMTYPITA

SEQ ID NO: 245546 - protein, 15 aa, Artificial Sequence
  Description of Artificial Sequence: Synthetic peptide
  Seed: LRMKWMMAMKYPITA
LRMKYMMAMTYPKTA

SEQ ID NO: 245547 - protein, 15 aa, Artificial Sequence
  Description of Artificial Sequence: Synthetic peptide
  Seed: LRMKWMMAMKYPITA
LRMKYMMAMTYPLTA

SEQ ID NO: 245548 - protein, 15 aa, Artificial Sequence
  Description of Artificial Sequence: Synthetic peptide
  Seed: LRMKWMMAMKYPITA
LRMKYMMAMTYPMTA

SEQ ID NO: 245549 - protein, 15 aa, Artificial Sequence
  Description of Artificial Sequence: Synthetic peptide
  Seed: LRMKWMMAMKYPITA
LRMKYMMAMTYPNTA

SEQ ID NO: 245550 - protein, 15 aa, Artificial Sequence
  Description of Artificial Sequence: Synthetic peptide
  Seed: LRMKWMMAMKYPITA
LRMKYMMAMTYPPTA

SEQ ID NO: 245551 - protein, 15 aa, Artificial Sequence
  Description of Artificial Sequence: Synthetic peptide
  Seed: LRMKWMMAMKYPITA
LRMKYMMAMTYPQTA

SEQ ID NO: 245552 - protein, 15 aa, Artificial Sequence
  Description of Artificial Sequence: Synthetic peptide
  Seed: LRMKWMMAMKYPITA
LRMKYMMAMTYPRTA

SEQ ID NO: 245553 - protein, 15 aa, Artificial Sequence
  Description of Artificial Sequence: Synthetic peptide
  Seed: LRMKWMMAMKYPITA
LRMKYMMAMTYPSTA

SEQ ID NO: 245554 - protein, 15 aa, Artificial Sequence
  Description of Artificial Sequence: Synthetic peptide
  Seed: LRMKWMMAMKYPITA
LRMKYMMAMTYPTTA

SEQ ID NO: 245555 - protein, 15 aa, Artificial Sequence
  Description of Artificial Sequence: Synthetic peptide
  Seed: LRMKWMMAMKYPITA
LRMKYMMAMTYPVTA

SEQ ID NO: 245556 - protein, 15 aa, Artificial Sequence
  Description of Artificial Sequence: Synthetic peptide
  Seed: LRMKWMMAMKYPITA
LRMKYMMAMTYPWTA

SEQ ID NO: 245557 - protein, 15 aa, Artificial Sequence
  Description of Artificial Sequence: Synthetic peptide
  Seed: LRMKWMMAMKYPITA
LRMKYMMAMTYPYTA

SEQ ID NO: 245558 - protein, 15 aa, Artificial Sequence
  Description of Artificial Sequence: Synthetic peptide
  Seed: LRMKWMMAMKYPITA
LRMKYMMAMVYPATA

SEQ ID NO: 245559 - protein, 15 aa, Artificial Sequence
  Description of Artificial Sequence: Synthetic peptide
  Seed: LRMKWMMAMKYPITA
LRMKYMMAMVYPCTA

SEQ ID NO: 245560 - protein, 15 aa, Artificial Sequence
  Description of Artificial Sequence: Synthetic peptide
  Seed: LRMKWMMAMKYPITA
LRMKYMMAMVYPDTA

SEQ ID NO: 245561 - protein, 15 aa, Artificial Sequence
  Description of Artificial Sequence: Synthetic peptide
  Seed: LRMKWMMAMKYPITA
LRMKYMMAMVYPETA

SEQ ID NO: 245562 - protein, 15 aa, Artificial Sequence
  Description of Artificial Sequence: Synthetic peptide
  Seed: LRMKWMMAMKYPITA
LRMKYMMAMVYPFTA

SEQ ID NO: 245563 - protein, 15 aa, Artificial Sequence
  Description of Artificial Sequence: Synthetic peptide
  Seed: LRMKWMMAMKYPITA
LRMKYMMAMVYPGTA

SEQ ID NO: 245564 - protein, 15 aa, Artificial Sequence
  Description of Artificial Sequence: Synthetic peptide
  Seed: LRMKWMMAMKYPITA
LRMKYMMAMVYPHTA

SEQ ID NO: 245565 - protein, 15 aa, Artificial Sequence
  Description of Artificial Sequence: Synthetic peptide
  Seed: LRMKWMMAMKYPITA
LRMKYMMAMVYPITA

SEQ ID NO: 245566 - protein, 15 aa, Artificial Sequence
  Description of Artificial Sequence: Synthetic peptide
  Seed: LRMKWMMAMKYPITA
LRMKYMMAMVYPKTA

SEQ ID NO: 245567 - protein, 15 aa, Artificial Sequence
  Description of Artificial Sequence: Synthetic peptide
  Seed: LRMKWMMAMKYPITA
LRMKYMMAMVYPLTA

SEQ ID NO: 245568 - protein, 15 aa, Artificial Sequence
  Description of Artificial Sequence: Synthetic peptide
  Seed: LRMKWMMAMKYPITA
LRMKYMMAMVYPMTA

SEQ ID NO: 245569 - protein, 15 aa, Artificial Sequence
  Description of Artificial Sequence: Synthetic peptide
  Seed: LRMKWMMAMKYPITA
LRMKYMMAMVYPNTA

SEQ ID NO: 245570 - protein, 15 aa, Artificial Sequence
  Description of Artificial Sequence: Synthetic peptide
  Seed: LRMKWMMAMKYPITA
LRMKYMMAMVYPPTA

SEQ ID NO: 245571 - protein, 15 aa, Artificial Sequence
  Description of Artificial Sequence: Synthetic peptide
  Seed: LRMKWMMAMKYPITA
LRMKYMMAMVYPQTA

SEQ ID NO: 245572 - protein, 15 aa, Artificial Sequence
  Description of Artificial Sequence: Synthetic peptide
  Seed: LRMKWMMAMKYPITA
LRMKYMMAMVYPRTA

SEQ ID NO: 245573 - protein, 15 aa, Artificial Sequence
  Description of Artificial Sequence: Synthetic peptide
  Seed: LRMKWMMAMKYPITA
LRMKYMMAMVYPSTA

SEQ ID NO: 245574 - protein, 15 aa, Artificial Sequence
  Description of Artificial Sequence: Synthetic peptide
  Seed: LRMKWMMAMKYPITA
LRMKYMMAMVYPTTA

SEQ ID NO: 245575 - protein, 15 aa, Artificial Sequence
  Description of Artificial Sequence: Synthetic peptide
  Seed: LRMKWMMAMKYPITA
LRMKYMMAMVYPVTA

SEQ ID NO: 245576 - protein, 15 aa, Artificial Sequence
  Description of Artificial Sequence: Synthetic peptide
  Seed: LRMKWMMAMKYPITA
LRMKYMMAMVYPWTA

SEQ ID NO: 245577 - protein, 15 aa, Artificial Sequence
  Description of Artificial Sequence: Synthetic peptide
  Seed: LRMKWMMAMKYPITA
LRMKYMMAMVYPYTA

SEQ ID NO: 245578 - protein, 15 aa, Artificial Sequence
  Description of Artificial Sequence: Synthetic peptide
  Seed: LRMKWMMAMKYPITA
LRMKYMMAMWYPATA

SEQ ID NO: 245579 - protein, 15 aa, Artificial Sequence
  Description of Artificial Sequence: Synthetic peptide
  Seed: LRMKWMMAMKYPITA
LRMKYMMAMWYPFTA

SEQ ID NO: 245580 - protein, 15 aa, Artificial Sequence
  Description of Artificial Sequence: Synthetic peptide
  Seed: LRMKWMMAMKYPITA
LRMKYMMAMWYPGTA

SEQ ID NO: 245581 - protein, 15 aa, Artificial Sequence
  Description of Artificial Sequence: Synthetic peptide
  Seed: LRMKWMMAMKYPITA
LRMKYMMAMWYPHTA

SEQ ID NO: 245582 - protein, 15 aa, Artificial Sequence
  Description of Artificial Sequence: Synthetic peptide
  Seed: LRMKWMMAMKYPITA
LRMKYMMAMWYPITA

SEQ ID NO: 245583 - protein, 15 aa, Artificial Sequence
  Description of Artificial Sequence: Synthetic peptide
  Seed: LRMKWMMAMKYPITA
LRMKYMMAMWYPLTA

SEQ ID NO: 245584 - protein, 15 aa, Artificial Sequence
  Description of Artificial Sequence: Synthetic peptide
  Seed: LRMKWMMAMKYPITA
LRMKYMMAMWYPMTA

SEQ ID NO: 245585 - protein, 15 aa, Artificial Sequence
  Description of Artificial Sequence: Synthetic peptide
  Seed: LRMKWMMAMKYPITA
LRMKYMMAMWYPNTA

SEQ ID NO: 245586 - protein, 15 aa, Artificial Sequence
  Description of Artificial Sequence: Synthetic peptide
  Seed: LRMKWMMAMKYPITA
LRMKYMMAMWYPQTA

SEQ ID NO: 245587 - protein, 15 aa, Artificial Sequence
  Description of Artificial Sequence: Synthetic peptide
  Seed: LRMKWMMAMKYPITA
LRMKYMMAMWYPRTA

SEQ ID NO: 245588 - protein, 15 aa, Artificial Sequence
  Description of Artificial Sequence: Synthetic peptide
  Seed: LRMKWMMAMKYPITA
LRMKYMMAMWYPSTA

SEQ ID NO: 245589 - protein, 15 aa, Artificial Sequence
  Description of Artificial Sequence: Synthetic peptide
  Seed: LRMKWMMAMKYPITA
LRMKYMMAMWYPTTA

SEQ ID NO: 245590 - protein, 15 aa, Artificial Sequence
  Description of Artificial Sequence: Synthetic peptide
  Seed: LRMKWMMAMKYPITA
LRMKYMMAMWYPVTA

SEQ ID NO: 245591 - protein, 15 aa, Artificial Sequence
  Description of Artificial Sequence: Synthetic peptide
  Seed: LRMKWMMAMKYPITA
LRMKYMMAMWYPYTA

SEQ ID NO: 245592 - protein, 15 aa, Artificial Sequence
  Description of Artificial Sequence: Synthetic peptide
  Seed: LRMKWMMAMKYPITA
LRMKYMMAMYYPATA

SEQ ID NO: 245593 - protein, 15 aa, Artificial Sequence
  Description of Artificial Sequence: Synthetic peptide
  Seed: LRMKWMMAMKYPITA
LRMKYMMAMYYPDTA

SEQ ID NO: 245594 - protein, 15 aa, Artificial Sequence
  Description of Artificial Sequence: Synthetic peptide
  Seed: LRMKWMMAMKYPITA
LRMKYMMAMYYPETA

SEQ ID NO: 245595 - protein, 15 aa, Artificial Sequence
  Description of Artificial Sequence: Synthetic peptide
  Seed: LRMKWMMAMKYPITA
LRMKYMMAMYYPFTA

SEQ ID NO: 245596 - protein, 15 aa, Artificial Sequence
  Description of Artificial Sequence: Synthetic peptide
  Seed: LRMKWMMAMKYPITA
LRMKYMMAMYYPGTA

SEQ ID NO: 245597 - protein, 15 aa, Artificial Sequence
  Description of Artificial Sequence: Synthetic peptide
  Seed: LRMKWMMAMKYPITA
LRMKYMMAMYYPHTA

SEQ ID NO: 245598 - protein, 15 aa, Artificial Sequence
  Description of Artificial Sequence: Synthetic peptide
  Seed: LRMKWMMAMKYPITA
LRMKYMMAMYYPITA

SEQ ID NO: 245599 - protein, 15 aa, Artificial Sequence
  Description of Artificial Sequence: Synthetic peptide
  Seed: LRMKWMMAMKYPITA
LRMKYMMAMYYPLTA

SEQ ID NO: 245600 - protein, 15 aa, Artificial Sequence
  Description of Artificial Sequence: Synthetic peptide
  Seed: LRMKWMMAMKYPITA
LRMKYMMAMYYPMTA

SEQ ID NO: 245601 - protein, 15 aa, Artificial Sequence
  Description of Artificial Sequence: Synthetic peptide
  Seed: LRMKWMMAMKYPITA
LRMKYMMAMYYPNTA

SEQ ID NO: 245602 - protein, 15 aa, Artificial Sequence
  Description of Artificial Sequence: Synthetic peptide
  Seed: LRMKWMMAMKYPITA
LRMKYMMAMYYPQTA

SEQ ID NO: 245603 - protein, 15 aa, Artificial Sequence
  Description of Artificial Sequence: Synthetic peptide
  Seed: LRMKWMMAMKYPITA
LRMKYMMAMYYPSTA

SEQ ID NO: 245604 - protein, 15 aa, Artificial Sequence
  Description of Artificial Sequence: Synthetic peptide
  Seed: LRMKWMMAMKYPITA
LRMKYMMAMYYPTTA

SEQ ID NO: 245605 - protein, 15 aa, Artificial Sequence
  Description of Artificial Sequence: Synthetic peptide
  Seed: LRMKWMMAMKYPITA
LRMKYMMAMYYPVTA

SEQ ID NO: 245606 - protein, 15 aa, Artificial Sequence
  Description of Artificial Sequence: Synthetic peptide
  Seed: LRMKWMMAMKYPITA
LRMKYMMCMAYPATA

SEQ ID NO: 245607 - protein, 15 aa, Artificial Sequence
  Description of Artificial Sequence: Synthetic peptide
  Seed: LRMKWMMAMKYPITA
LRMKYMMCMAYPCTA

SEQ ID NO: 245608 - protein, 15 aa, Artificial Sequence
  Description of Artificial Sequence: Synthetic peptide
  Seed: LRMKWMMAMKYPITA
LRMKYMMCMAYPDTA

SEQ ID NO: 245609 - protein, 15 aa, Artificial Sequence
  Description of Artificial Sequence: Synthetic peptide
  Seed: LRMKWMMAMKYPITA
LRMKYMMCMAYPETA

SEQ ID NO: 245610 - protein, 15 aa, Artificial Sequence
  Description of Artificial Sequence: Synthetic peptide
  Seed: LRMKWMMAMKYPITA
LRMKYMMCMAYPFTA

SEQ ID NO: 245611 - protein, 15 aa, Artificial Sequence
  Description of Artificial Sequence: Synthetic peptide
  Seed: LRMKWMMAMKYPITA
LRMKYMMCMAYPGTA

SEQ ID NO: 245612 - protein, 15 aa, Artificial Sequence
  Description of Artificial Sequence: Synthetic peptide
  Seed: LRMKWMMAMKYPITA
LRMKYMMCMAYPHTA

SEQ ID NO: 245613 - protein, 15 aa, Artificial Sequence
  Description of Artificial Sequence: Synthetic peptide
  Seed: LRMKWMMAMKYPITA
LRMKYMMCMAYPITA

SEQ ID NO: 245614 - protein, 15 aa, Artificial Sequence
  Description of Artificial Sequence: Synthetic peptide
  Seed: LRMKWMMAMKYPITA
LRMKYMMCMAYPKTA

SEQ ID NO: 245615 - protein, 15 aa, Artificial Sequence
  Description of Artificial Sequence: Synthetic peptide
  Seed: LRMKWMMAMKYPITA
LRMKYMMCMAYPLTA

SEQ ID NO: 245616 - protein, 15 aa, Artificial Sequence
  Description of Artificial Sequence: Synthetic peptide
  Seed: LRMKWMMAMKYPITA
LRMKYMMCMAYPMTA

SEQ ID NO: 245617 - protein, 15 aa, Artificial Sequence
  Description of Artificial Sequence: Synthetic peptide
  Seed: LRMKWMMAMKYPITA
LRMKYMMCMAYPNTA

SEQ ID NO: 245618 - protein, 15 aa, Artificial Sequence
  Description of Artificial Sequence: Synthetic peptide
  Seed: LRMKWMMAMKYPITA
LRMKYMMCMAYPPTA

SEQ ID NO: 245619 - protein, 15 aa, Artificial Sequence
  Description of Artificial Sequence: Synthetic peptide
  Seed: LRMKWMMAMKYPITA
LRMKYMMCMAYPQTA

SEQ ID NO: 245620 - protein, 15 aa, Artificial Sequence
  Description of Artificial Sequence: Synthetic peptide
  Seed: LRMKWMMAMKYPITA
LRMKYMMCMAYPRTA

SEQ ID NO: 245621 - protein, 15 aa, Artificial Sequence
  Description of Artificial Sequence: Synthetic peptide
  Seed: LRMKWMMAMKYPITA
LRMKYMMCMAYPSTA

SEQ ID NO: 245622 - protein, 15 aa, Artificial Sequence
  Description of Artificial Sequence: Synthetic peptide
  Seed: LRMKWMMAMKYPITA
LRMKYMMCMAYPTTA

SEQ ID NO: 245623 - protein, 15 aa, Artificial Sequence
  Description of Artificial Sequence: Synthetic peptide
  Seed: LRMKWMMAMKYPITA
LRMKYMMCMAYPVTA

SEQ ID NO: 245624 - protein, 15 aa, Artificial Sequence
  Description of Artificial Sequence: Synthetic peptide
  Seed: LRMKWMMAMKYPITA
LRMKYMMCMAYPWTA

SEQ ID NO: 245625 - protein, 15 aa, Artificial Sequence
  Description of Artificial Sequence: Synthetic peptide
  Seed: LRMKWMMAMKYPITA
LRMKYMMCMAYPYTA

SEQ ID NO: 245626 - protein, 15 aa, Artificial Sequence
  Description of Artificial Sequence: Synthetic peptide
  Seed: LRMKWMMAMKYPITA
LRMKYMMCMCYPVTA

SEQ ID NO: 245627 - protein, 15 aa, Artificial Sequence
  Description of Artificial Sequence: Synthetic peptide
  Seed: LRMKWMMAMKYPITA
LRMKYMMCMGYPATA

SEQ ID NO: 245628 - protein, 15 aa, Artificial Sequence
  Description of Artificial Sequence: Synthetic peptide
  Seed: LRMKWMMAMKYPITA
LRMKYMMCMGYPCTA

SEQ ID NO: 245629 - protein, 15 aa, Artificial Sequence
  Description of Artificial Sequence: Synthetic peptide
  Seed: LRMKWMMAMKYPITA
LRMKYMMCMGYPFTA

SEQ ID NO: 245630 - protein, 15 aa, Artificial Sequence
  Description of Artificial Sequence: Synthetic peptide
  Seed: LRMKWMMAMKYPITA
LRMKYMMCMGYPGTA

SEQ ID NO: 245631 - protein, 15 aa, Artificial Sequence
  Description of Artificial Sequence: Synthetic peptide
  Seed: LRMKWMMAMKYPITA
LRMKYMMCMGYPITA

SEQ ID NO: 245632 - protein, 15 aa, Artificial Sequence
  Description of Artificial Sequence: Synthetic peptide
  Seed: LRMKWMMAMKYPITA
LRMKYMMCMGYPLTA

SEQ ID NO: 245633 - protein, 15 aa, Artificial Sequence
  Description of Artificial Sequence: Synthetic peptide
  Seed: LRMKWMMAMKYPITA
LRMKYMMCMGYPMTA

SEQ ID NO: 245634 - protein, 15 aa, Artificial Sequence
  Description of Artificial Sequence: Synthetic peptide
  Seed: LRMKWMMAMKYPITA
LRMKYMMCMGYPNTA

SEQ ID NO: 245635 - protein, 15 aa, Artificial Sequence
  Description of Artificial Sequence: Synthetic peptide
  Seed: LRMKWMMAMKYPITA
LRMKYMMCMGYPPTA

SEQ ID NO: 245636 - protein, 15 aa, Artificial Sequence
  Description of Artificial Sequence: Synthetic peptide
  Seed: LRMKWMMAMKYPITA
LRMKYMMCMGYPQTA

SEQ ID NO: 245637 - protein, 15 aa, Artificial Sequence
  Description of Artificial Sequence: Synthetic peptide
  Seed: LRMKWMMAMKYPITA
LRMKYMMCMGYPSTA

SEQ ID NO: 245638 - protein, 15 aa, Artificial Sequence
  Description of Artificial Sequence: Synthetic peptide
  Seed: LRMKWMMAMKYPITA
LRMKYMMCMGYPTTA

SEQ ID NO: 245639 - protein, 15 aa, Artificial Sequence
  Description of Artificial Sequence: Synthetic peptide
  Seed: LRMKWMMAMKYPITA
LRMKYMMCMGYPVTA

SEQ ID NO: 245640 - protein, 15 aa, Artificial Sequence
  Description of Artificial Sequence: Synthetic peptide
  Seed: LRMKWMMAMKYPITA
LRMKYMMCMGYPYTA

SEQ ID NO: 245641 - protein, 15 aa, Artificial Sequence
  Description of Artificial Sequence: Synthetic peptide
  Seed: LRMKWMMAMKYPITA
LRMKYMMCMHYPITA

SEQ ID NO: 245642 - protein, 15 aa, Artificial Sequence
  Description of Artificial Sequence: Synthetic peptide
  Seed: LRMKWMMAMKYPITA
LRMKYMMCMHYPLTA

SEQ ID NO: 245643 - protein, 15 aa, Artificial Sequence
  Description of Artificial Sequence: Synthetic peptide
  Seed: LRMKWMMAMKYPITA
LRMKYMMCMHYPVTA

SEQ ID NO: 245644 - protein, 15 aa, Artificial Sequence
  Description of Artificial Sequence: Synthetic peptide
  Seed: LRMKWMMAMKYPITA
LRMKYMMCMIYPATA

SEQ ID NO: 245645 - protein, 15 aa, Artificial Sequence
  Description of Artificial Sequence: Synthetic peptide
  Seed: LRMKWMMAMKYPITA
LRMKYMMCMIYPGTA

SEQ ID NO: 245646 - protein, 15 aa, Artificial Sequence
  Description of Artificial Sequence: Synthetic peptide
  Seed: LRMKWMMAMKYPITA
LRMKYMMCMIYPHTA

SEQ ID NO: 245647 - protein, 15 aa, Artificial Sequence
  Description of Artificial Sequence: Synthetic peptide
  Seed: LRMKWMMAMKYPITA
LRMKYMMCMIYPITA

SEQ ID NO: 245648 - protein, 15 aa, Artificial Sequence
  Description of Artificial Sequence: Synthetic peptide
  Seed: LRMKWMMAMKYPITA
LRMKYMMCMIYPLTA

SEQ ID NO: 245649 - protein, 15 aa, Artificial Sequence
  Description of Artificial Sequence: Synthetic peptide
  Seed: LRMKWMMAMKYPITA
LRMKYMMCMIYPMTA

SEQ ID NO: 245650 - protein, 15 aa, Artificial Sequence
  Description of Artificial Sequence: Synthetic peptide
  Seed: LRMKWMMAMKYPITA
LRMKYMMCMIYPNTA

SEQ ID NO: 245651 - protein, 15 aa, Artificial Sequence
  Description of Artificial Sequence: Synthetic peptide
  Seed: LRMKWMMAMKYPITA
LRMKYMMCMIYPQTA

SEQ ID NO: 245652 - protein, 15 aa, Artificial Sequence
  Description of Artificial Sequence: Synthetic peptide
  Seed: LRMKWMMAMKYPITA
LRMKYMMCMIYPSTA

SEQ ID NO: 245653 - protein, 15 aa, Artificial Sequence
  Description of Artificial Sequence: Synthetic peptide
  Seed: LRMKWMMAMKYPITA
LRMKYMMCMIYPTTA

SEQ ID NO: 245654 - protein, 15 aa, Artificial Sequence
  Description of Artificial Sequence: Synthetic peptide
  Seed: LRMKWMMAMKYPITA
LRMKYMMCMIYPVTA

SEQ ID NO: 245655 - protein, 15 aa, Artificial Sequence
  Description of Artificial Sequence: Synthetic peptide
  Seed: LRMKWMMAMKYPITA
LRMKYMMCMKYPATA

SEQ ID NO: 245656 - protein, 15 aa, Artificial Sequence
  Description of Artificial Sequence: Synthetic peptide
  Seed: LRMKWMMAMKYPITA
LRMKYMMCMKYPGTA

SEQ ID NO: 245657 - protein, 15 aa, Artificial Sequence
  Description of Artificial Sequence: Synthetic peptide
  Seed: LRMKWMMAMKYPITA
LRMKYMMCMKYPQTA

SEQ ID NO: 245658 - protein, 15 aa, Artificial Sequence
  Description of Artificial Sequence: Synthetic peptide
  Seed: LRMKWMMAMKYPITA
LRMKYMMCMKYPSTA

SEQ ID NO: 245659 - protein, 15 aa, Artificial Sequence
  Description of Artificial Sequence: Synthetic peptide
  Seed: LRMKWMMAMKYPITA
LRMKYMMCMKYPTTA

SEQ ID NO: 245660 - protein, 15 aa, Artificial Sequence
  Description of Artificial Sequence: Synthetic peptide
  Seed: LRMKWMMAMKYPITA
LRMKYMMCMKYPVTA

SEQ ID NO: 245661 - protein, 15 aa, Artificial Sequence
  Description of Artificial Sequence: Synthetic peptide
  Seed: LRMKWMMAMKYPITA
LRMKYMMCMLYPATA

SEQ ID NO: 245662 - protein, 15 aa, Artificial Sequence
  Description of Artificial Sequence: Synthetic peptide
  Seed: LRMKWMMAMKYPITA
LRMKYMMCMLYPITA

SEQ ID NO: 245663 - protein, 15 aa, Artificial Sequence
  Description of Artificial Sequence: Synthetic peptide
  Seed: LRMKWMMAMKYPITA
LRMKYMMCMLYPLTA

SEQ ID NO: 245664 - protein, 15 aa, Artificial Sequence
  Description of Artificial Sequence: Synthetic peptide
  Seed: LRMKWMMAMKYPITA
LRMKYMMCMLYPMTA

SEQ ID NO: 245665 - protein, 15 aa, Artificial Sequence
  Description of Artificial Sequence: Synthetic peptide
  Seed: LRMKWMMAMKYPITA
LRMKYMMCMLYPNTA

SEQ ID NO: 245666 - protein, 15 aa, Artificial Sequence
  Description of Artificial Sequence: Synthetic peptide
  Seed: LRMKWMMAMKYPITA
LRMKYMMCMLYPSTA

SEQ ID NO: 245667 - protein, 15 aa, Artificial Sequence
  Description of Artificial Sequence: Synthetic peptide
  Seed: LRMKWMMAMKYPITA
LRMKYMMCMLYPVTA

SEQ ID NO: 245668 - protein, 15 aa, Artificial Sequence
  Description of Artificial Sequence: Synthetic peptide
  Seed: LRMKWMMAMKYPITA
LRMKYMMCMMYPATA

SEQ ID NO: 245669 - protein, 15 aa, Artificial Sequence
  Description of Artificial Sequence: Synthetic peptide
  Seed: LRMKWMMAMKYPITA
LRMKYMMCMMYPITA

SEQ ID NO: 245670 - protein, 15 aa, Artificial Sequence
  Description of Artificial Sequence: Synthetic peptide
  Seed: LRMKWMMAMKYPITA
LRMKYMMCMMYPLTA

SEQ ID NO: 245671 - protein, 15 aa, Artificial Sequence
  Description of Artificial Sequence: Synthetic peptide
  Seed: LRMKWMMAMKYPITA
LRMKYMMCMMYPMTA

SEQ ID NO: 245672 - protein, 15 aa, Artificial Sequence
  Description of Artificial Sequence: Synthetic peptide
  Seed: LRMKWMMAMKYPITA
LRMKYMMCMMYPNTA

SEQ ID NO: 245673 - protein, 15 aa, Artificial Sequence
  Description of Artificial Sequence: Synthetic peptide
  Seed: LRMKWMMAMKYPITA
LRMKYMMCMMYPSTA

SEQ ID NO: 245674 - protein, 15 aa, Artificial Sequence
  Description of Artificial Sequence: Synthetic peptide
  Seed: LRMKWMMAMKYPITA
LRMKYMMCMMYPVTA

SEQ ID NO: 245675 - protein, 15 aa, Artificial Sequence
  Description of Artificial Sequence: Synthetic peptide
  Seed: LRMKWMMAMKYPITA
LRMKYMMCMNYPATA

SEQ ID NO: 245676 - protein, 15 aa, Artificial Sequence
  Description of Artificial Sequence: Synthetic peptide
  Seed: LRMKWMMAMKYPITA
LRMKYMMCMNYPDTA

SEQ ID NO: 245677 - protein, 15 aa, Artificial Sequence
  Description of Artificial Sequence: Synthetic peptide
  Seed: LRMKWMMAMKYPITA
LRMKYMMCMNYPGTA

SEQ ID NO: 245678 - protein, 15 aa, Artificial Sequence
  Description of Artificial Sequence: Synthetic peptide
  Seed: LRMKWMMAMKYPITA
LRMKYMMCMNYPITA

SEQ ID NO: 245679 - protein, 15 aa, Artificial Sequence
  Description of Artificial Sequence: Synthetic peptide
  Seed: LRMKWMMAMKYPITA
LRMKYMMCMNYPLTA

SEQ ID NO: 245680 - protein, 15 aa, Artificial Sequence
  Description of Artificial Sequence: Synthetic peptide
  Seed: LRMKWMMAMKYPITA
LRMKYMMCMNYPMTA

SEQ ID NO: 245681 - protein, 15 aa, Artificial Sequence
  Description of Artificial Sequence: Synthetic peptide
  Seed: LRMKWMMAMKYPITA
LRMKYMMCMNYPNTA

SEQ ID NO: 245682 - protein, 15 aa, Artificial Sequence
  Description of Artificial Sequence: Synthetic peptide
  Seed: LRMKWMMAMKYPITA
LRMKYMMCMNYPSTA

SEQ ID NO: 245683 - protein, 15 aa, Artificial Sequence
  Description of Artificial Sequence: Synthetic peptide
  Seed: LRMKWMMAMKYPITA
LRMKYMMCMNYPTTA

SEQ ID NO: 245684 - protein, 15 aa, Artificial Sequence
  Description of Artificial Sequence: Synthetic peptide
  Seed: LRMKWMMAMKYPITA
LRMKYMMCMNYPVTA

SEQ ID NO: 245685 - protein, 15 aa, Artificial Sequence
  Description of Artificial Sequence: Synthetic peptide
  Seed: LRMKWMMAMKYPITA
LRMKYMMCMPYPATA

SEQ ID NO: 245686 - protein, 15 aa, Artificial Sequence
  Description of Artificial Sequence: Synthetic peptide
  Seed: LRMKWMMAMKYPITA
LRMKYMMCMPYPCTA

SEQ ID NO: 245687 - protein, 15 aa, Artificial Sequence
  Description of Artificial Sequence: Synthetic peptide
  Seed: LRMKWMMAMKYPITA
LRMKYMMCMPYPDTA

SEQ ID NO: 245688 - protein, 15 aa, Artificial Sequence
  Description of Artificial Sequence: Synthetic peptide
  Seed: LRMKWMMAMKYPITA
LRMKYMMCMPYPETA

SEQ ID NO: 245689 - protein, 15 aa, Artificial Sequence
  Description of Artificial Sequence: Synthetic peptide
  Seed: LRMKWMMAMKYPITA
LRMKYMMCMPYPFTA

SEQ ID NO: 245690 - protein, 15 aa, Artificial Sequence
  Description of Artificial Sequence: Synthetic peptide
  Seed: LRMKWMMAMKYPITA
LRMKYMMCMPYPGTA

SEQ ID NO: 245691 - protein, 15 aa, Artificial Sequence
  Description of Artificial Sequence: Synthetic peptide
  Seed: LRMKWMMAMKYPITA
LRMKYMMCMPYPHTA

SEQ ID NO: 245692 - protein, 15 aa, Artificial Sequence
  Description of Artificial Sequence: Synthetic peptide
  Seed: LRMKWMMAMKYPITA
LRMKYMMCMPYPITA

SEQ ID NO: 245693 - protein, 15 aa, Artificial Sequence
  Description of Artificial Sequence: Synthetic peptide
  Seed: LRMKWMMAMKYPITA
LRMKYMMCMPYPLTA

SEQ ID NO: 245694 - protein, 15 aa, Artificial Sequence
  Description of Artificial Sequence: Synthetic peptide
  Seed: LRMKWMMAMKYPITA
LRMKYMMCMPYPMTA

SEQ ID NO: 245695 - protein, 15 aa, Artificial Sequence
  Description of Artificial Sequence: Synthetic peptide
  Seed: LRMKWMMAMKYPITA
LRMKYMMCMPYPNTA

SEQ ID NO: 245696 - protein, 15 aa, Artificial Sequence
  Description of Artificial Sequence: Synthetic peptide
  Seed: LRMKWMMAMKYPITA
LRMKYMMCMPYPPTA

SEQ ID NO: 245697 - protein, 15 aa, Artificial Sequence
  Description of Artificial Sequence: Synthetic peptide
  Seed: LRMKWMMAMKYPITA
LRMKYMMCMPYPQTA

SEQ ID NO: 245698 - protein, 15 aa, Artificial Sequence
  Description of Artificial Sequence: Synthetic peptide
  Seed: LRMKWMMAMKYPITA
LRMKYMMCMPYPSTA

SEQ ID NO: 245699 - protein, 15 aa, Artificial Sequence
  Description of Artificial Sequence: Synthetic peptide
  Seed: LRMKWMMAMKYPITA
LRMKYMMCMPYPTTA

SEQ ID NO: 245700 - protein, 15 aa, Artificial Sequence
  Description of Artificial Sequence: Synthetic peptide
  Seed: LRMKWMMAMKYPITA
LRMKYMMCMPYPVTA

SEQ ID NO: 245701 - protein, 15 aa, Artificial Sequence
  Description of Artificial Sequence: Synthetic peptide
  Seed: LRMKWMMAMKYPITA
LRMKYMMCMPYPYTA

SEQ ID NO: 245702 - protein, 15 aa, Artificial Sequence
  Description of Artificial Sequence: Synthetic peptide
  Seed: LRMKWMMAMKYPITA
LRMKYMMCMQYPATA

SEQ ID NO: 245703 - protein, 15 aa, Artificial Sequence
  Description of Artificial Sequence: Synthetic peptide
  Seed: LRMKWMMAMKYPITA
LRMKYMMCMQYPITA

SEQ ID NO: 245704 - protein, 15 aa, Artificial Sequence
  Description of Artificial Sequence: Synthetic peptide
  Seed: LRMKWMMAMKYPITA
LRMKYMMCMQYPLTA

SEQ ID NO: 245705 - protein, 15 aa, Artificial Sequence
  Description of Artificial Sequence: Synthetic peptide
  Seed: LRMKWMMAMKYPITA
LRMKYMMCMQYPVTA

SEQ ID NO: 245706 - protein, 15 aa, Artificial Sequence
  Description of Artificial Sequence: Synthetic peptide
  Seed: LRMKWMMAMKYPITA
LRMKYMMCMRYPATA

SEQ ID NO: 245707 - protein, 15 aa, Artificial Sequence
  Description of Artificial Sequence: Synthetic peptide
  Seed: LRMKWMMAMKYPITA
LRMKYMMCMRYPGTA

SEQ ID NO: 245708 - protein, 15 aa, Artificial Sequence
  Description of Artificial Sequence: Synthetic peptide
  Seed: LRMKWMMAMKYPITA
LRMKYMMCMRYPHTA

SEQ ID NO: 245709 - protein, 15 aa, Artificial Sequence
  Description of Artificial Sequence: Synthetic peptide
  Seed: LRMKWMMAMKYPITA
LRMKYMMCMRYPITA

SEQ ID NO: 245710 - protein, 15 aa, Artificial Sequence
  Description of Artificial Sequence: Synthetic peptide
  Seed: LRMKWMMAMKYPITA
LRMKYMMCMRYPLTA

SEQ ID NO: 245711 - protein, 15 aa, Artificial Sequence
  Description of Artificial Sequence: Synthetic peptide
  Seed: LRMKWMMAMKYPITA
LRMKYMMCMRYPMTA

SEQ ID NO: 245712 - protein, 15 aa, Artificial Sequence
  Description of Artificial Sequence: Synthetic peptide
  Seed: LRMKWMMAMKYPITA
LRMKYMMCMRYPNTA

SEQ ID NO: 245713 - protein, 15 aa, Artificial Sequence
  Description of Artificial Sequence: Synthetic peptide
  Seed: LRMKWMMAMKYPITA
LRMKYMMCMRYPQTA

SEQ ID NO: 245714 - protein, 15 aa, Artificial Sequence
  Description of Artificial Sequence: Synthetic peptide
  Seed: LRMKWMMAMKYPITA
LRMKYMMCMRYPRTA

SEQ ID NO: 245715 - protein, 15 aa, Artificial Sequence
  Description of Artificial Sequence: Synthetic peptide
  Seed: LRMKWMMAMKYPITA
LRMKYMMCMRYPSTA

SEQ ID NO: 245716 - protein, 15 aa, Artificial Sequence
  Description of Artificial Sequence: Synthetic peptide
  Seed: LRMKWMMAMKYPITA
LRMKYMMCMRYPTTA

SEQ ID NO: 245717 - protein, 15 aa, Artificial Sequence
  Description of Artificial Sequence: Synthetic peptide
  Seed: LRMKWMMAMKYPITA
LRMKYMMCMRYPVTA

SEQ ID NO: 245718 - protein, 15 aa, Artificial Sequence
  Description of Artificial Sequence: Synthetic peptide
  Seed: LRMKWMMAMKYPITA
LRMKYMMCMRYPYTA

SEQ ID NO: 245719 - protein, 15 aa, Artificial Sequence
  Description of Artificial Sequence: Synthetic peptide
  Seed: LRMKWMMAMKYPITA
LRMKYMMCMSYPATA

SEQ ID NO: 245720 - protein, 15 aa, Artificial Sequence
  Description of Artificial Sequence: Synthetic peptide
  Seed: LRMKWMMAMKYPITA
LRMKYMMCMSYPCTA

SEQ ID NO: 245721 - protein, 15 aa, Artificial Sequence
  Description of Artificial Sequence: Synthetic peptide
  Seed: LRMKWMMAMKYPITA
LRMKYMMCMSYPDTA

SEQ ID NO: 245722 - protein, 15 aa, Artificial Sequence
  Description of Artificial Sequence: Synthetic peptide
  Seed: LRMKWMMAMKYPITA
LRMKYMMCMSYPETA

SEQ ID NO: 245723 - protein, 15 aa, Artificial Sequence
  Description of Artificial Sequence: Synthetic peptide
  Seed: LRMKWMMAMKYPITA
LRMKYMMCMSYPFTA

SEQ ID NO: 245724 - protein, 15 aa, Artificial Sequence
  Description of Artificial Sequence: Synthetic peptide
  Seed: LRMKWMMAMKYPITA
LRMKYMMCMSYPGTA

SEQ ID NO: 245725 - protein, 15 aa, Artificial Sequence
  Description of Artificial Sequence: Synthetic peptide
  Seed: LRMKWMMAMKYPITA
LRMKYMMCMSYPHTA

SEQ ID NO: 245726 - protein, 15 aa, Artificial Sequence
  Description of Artificial Sequence: Synthetic peptide
  Seed: LRMKWMMAMKYPITA
LRMKYMMCMSYPITA

SEQ ID NO: 245727 - protein, 15 aa, Artificial Sequence
  Description of Artificial Sequence: Synthetic peptide
  Seed: LRMKWMMAMKYPITA
LRMKYMMCMSYPLTA

SEQ ID NO: 245728 - protein, 15 aa, Artificial Sequence
  Description of Artificial Sequence: Synthetic peptide
  Seed: LRMKWMMAMKYPITA
LRMKYMMCMSYPMTA

SEQ ID NO: 245729 - protein, 15 aa, Artificial Sequence
  Description of Artificial Sequence: Synthetic peptide
  Seed: LRMKWMMAMKYPITA
LRMKYMMCMSYPNTA

SEQ ID NO: 245730 - protein, 15 aa, Artificial Sequence
  Description of Artificial Sequence: Synthetic peptide
  Seed: LRMKWMMAMKYPITA
LRMKYMMCMSYPPTA

SEQ ID NO: 245731 - protein, 15 aa, Artificial Sequence
  Description of Artificial Sequence: Synthetic peptide
  Seed: LRMKWMMAMKYPITA
LRMKYMMCMSYPQTA

SEQ ID NO: 245732 - protein, 15 aa, Artificial Sequence
  Description of Artificial Sequence: Synthetic peptide
  Seed: LRMKWMMAMKYPITA
LRMKYMMCMSYPSTA

SEQ ID NO: 245733 - protein, 15 aa, Artificial Sequence
  Description of Artificial Sequence: Synthetic peptide
  Seed: LRMKWMMAMKYPITA
LRMKYMMCMSYPTTA

SEQ ID NO: 245734 - protein, 15 aa, Artificial Sequence
  Description of Artificial Sequence: Synthetic peptide
  Seed: LRMKWMMAMKYPITA
LRMKYMMCMSYPVTA

SEQ ID NO: 245735 - protein, 15 aa, Artificial Sequence
  Description of Artificial Sequence: Synthetic peptide
  Seed: LRMKWMMAMKYPITA
LRMKYMMCMSYPYTA

SEQ ID NO: 245736 - protein, 15 aa, Artificial Sequence
  Description of Artificial Sequence: Synthetic peptide
  Seed: LRMKWMMAMKYPITA
LRMKYMMCMTYPATA

SEQ ID NO: 245737 - protein, 15 aa, Artificial Sequence
  Description of Artificial Sequence: Synthetic peptide
  Seed: LRMKWMMAMKYPITA
LRMKYMMCMTYPCTA

SEQ ID NO: 245738 - protein, 15 aa, Artificial Sequence
  Description of Artificial Sequence: Synthetic peptide
  Seed: LRMKWMMAMKYPITA
LRMKYMMCMTYPDTA

SEQ ID NO: 245739 - protein, 15 aa, Artificial Sequence
  Description of Artificial Sequence: Synthetic peptide
  Seed: LRMKWMMAMKYPITA
LRMKYMMCMTYPFTA

SEQ ID NO: 245740 - protein, 15 aa, Artificial Sequence
  Description of Artificial Sequence: Synthetic peptide
  Seed: LRMKWMMAMKYPITA
LRMKYMMCMTYPGTA

SEQ ID NO: 245741 - protein, 15 aa, Artificial Sequence
  Description of Artificial Sequence: Synthetic peptide
  Seed: LRMKWMMAMKYPITA
LRMKYMMCMTYPHTA

SEQ ID NO: 245742 - protein, 15 aa, Artificial Sequence
  Description of Artificial Sequence: Synthetic peptide
  Seed: LRMKWMMAMKYPITA
LRMKYMMCMTYPITA

SEQ ID NO: 245743 - protein, 15 aa, Artificial Sequence
  Description of Artificial Sequence: Synthetic peptide
  Seed: LRMKWMMAMKYPITA
LRMKYMMCMTYPLTA

SEQ ID NO: 245744 - protein, 15 aa, Artificial Sequence
  Description of Artificial Sequence: Synthetic peptide
  Seed: LRMKWMMAMKYPITA
LRMKYMMCMTYPMTA

SEQ ID NO: 245745 - protein, 15 aa, Artificial Sequence
  Description of Artificial Sequence: Synthetic peptide
  Seed: LRMKWMMAMKYPITA
LRMKYMMCMTYPNTA

SEQ ID NO: 245746 - protein, 15 aa, Artificial Sequence
  Description of Artificial Sequence: Synthetic peptide
  Seed: LRMKWMMAMKYPITA
LRMKYMMCMTYPQTA

SEQ ID NO: 245747 - protein, 15 aa, Artificial Sequence
  Description of Artificial Sequence: Synthetic peptide
  Seed: LRMKWMMAMKYPITA
LRMKYMMCMTYPSTA

SEQ ID NO: 245748 - protein, 15 aa, Artificial Sequence
  Description of Artificial Sequence: Synthetic peptide
  Seed: LRMKWMMAMKYPITA
LRMKYMMCMTYPTTA

SEQ ID NO: 245749 - protein, 15 aa, Artificial Sequence
  Description of Artificial Sequence: Synthetic peptide
  Seed: LRMKWMMAMKYPITA
LRMKYMMCMTYPVTA

SEQ ID NO: 245750 - protein, 15 aa, Artificial Sequence
  Description of Artificial Sequence: Synthetic peptide
  Seed: LRMKWMMAMKYPITA
LRMKYMMCMTYPYTA

SEQ ID NO: 245751 - protein, 15 aa, Artificial Sequence
  Description of Artificial Sequence: Synthetic peptide
  Seed: LRMKWMMAMKYPITA
LRMKYMMCMVYPATA

SEQ ID NO: 245752 - protein, 15 aa, Artificial Sequence
  Description of Artificial Sequence: Synthetic peptide
  Seed: LRMKWMMAMKYPITA
LRMKYMMCMVYPDTA

SEQ ID NO: 245753 - protein, 15 aa, Artificial Sequence
  Description of Artificial Sequence: Synthetic peptide
  Seed: LRMKWMMAMKYPITA
LRMKYMMCMVYPETA

SEQ ID NO: 245754 - protein, 15 aa, Artificial Sequence
  Description of Artificial Sequence: Synthetic peptide
  Seed: LRMKWMMAMKYPITA
LRMKYMMCMVYPGTA

SEQ ID NO: 245755 - protein, 15 aa, Artificial Sequence
  Description of Artificial Sequence: Synthetic peptide
  Seed: LRMKWMMAMKYPITA
LRMKYMMCMVYPHTA

SEQ ID NO: 245756 - protein, 15 aa, Artificial Sequence
  Description of Artificial Sequence: Synthetic peptide
  Seed: LRMKWMMAMKYPITA
LRMKYMMCMVYPITA

SEQ ID NO: 245757 - protein, 15 aa, Artificial Sequence
  Description of Artificial Sequence: Synthetic peptide
  Seed: LRMKWMMAMKYPITA
LRMKYMMCMVYPLTA

SEQ ID NO: 245758 - protein, 15 aa, Artificial Sequence
  Description of Artificial Sequence: Synthetic peptide
  Seed: LRMKWMMAMKYPITA
LRMKYMMCMVYPMTA

SEQ ID NO: 245759 - protein, 15 aa, Artificial Sequence
  Description of Artificial Sequence: Synthetic peptide
  Seed: LRMKWMMAMKYPITA
LRMKYMMCMVYPNTA

SEQ ID NO: 245760 - protein, 15 aa, Artificial Sequence
  Description of Artificial Sequence: Synthetic peptide
  Seed: LRMKWMMAMKYPITA
LRMKYMMCMVYPPTA

SEQ ID NO: 245761 - protein, 15 aa, Artificial Sequence
  Description of Artificial Sequence: Synthetic peptide
  Seed: LRMKWMMAMKYPITA
LRMKYMMCMVYPQTA

SEQ ID NO: 245762 - protein, 15 aa, Artificial Sequence
  Description of Artificial Sequence: Synthetic peptide
  Seed: LRMKWMMAMKYPITA
LRMKYMMCMVYPSTA

SEQ ID NO: 245763 - protein, 15 aa, Artificial Sequence
  Description of Artificial Sequence: Synthetic peptide
  Seed: LRMKWMMAMKYPITA
LRMKYMMCMVYPTTA

SEQ ID NO: 245764 - protein, 15 aa, Artificial Sequence
  Description of Artificial Sequence: Synthetic peptide
  Seed: LRMKWMMAMKYPITA
LRMKYMMCMVYPVTA

SEQ ID NO: 245765 - protein, 15 aa, Artificial Sequence
  Description of Artificial Sequence: Synthetic peptide
  Seed: LRMKWMMAMKYPITA
LRMKYMMDMAYPATA

SEQ ID NO: 245766 - protein, 15 aa, Artificial Sequence
  Description of Artificial Sequence: Synthetic peptide
  Seed: LRMKWMMAMKYPITA
LRMKYMMDMAYPCTA

SEQ ID NO: 245767 - protein, 15 aa, Artificial Sequence
  Description of Artificial Sequence: Synthetic peptide
  Seed: LRMKWMMAMKYPITA
LRMKYMMDMAYPFTA

SEQ ID NO: 245768 - protein, 15 aa, Artificial Sequence
  Description of Artificial Sequence: Synthetic peptide
  Seed: LRMKWMMAMKYPITA
LRMKYMMDMAYPGTA

SEQ ID NO: 245769 - protein, 15 aa, Artificial Sequence
  Description of Artificial Sequence: Synthetic peptide
  Seed: LRMKWMMAMKYPITA
LRMKYMMDMAYPHTA

SEQ ID NO: 245770 - protein, 15 aa, Artificial Sequence
  Description of Artificial Sequence: Synthetic peptide
  Seed: LRMKWMMAMKYPITA
LRMKYMMDMAYPITA

SEQ ID NO: 245771 - protein, 15 aa, Artificial Sequence
  Description of Artificial Sequence: Synthetic peptide
  Seed: LRMKWMMAMKYPITA
LRMKYMMDMAYPLTA

SEQ ID NO: 245772 - protein, 15 aa, Artificial Sequence
  Description of Artificial Sequence: Synthetic peptide
  Seed: LRMKWMMAMKYPITA
LRMKYMMDMAYPMTA

SEQ ID NO: 245773 - protein, 15 aa, Artificial Sequence
  Description of Artificial Sequence: Synthetic peptide
  Seed: LRMKWMMAMKYPITA
LRMKYMMDMAYPNTA

SEQ ID NO: 245774 - protein, 15 aa, Artificial Sequence
  Description of Artificial Sequence: Synthetic peptide
  Seed: LRMKWMMAMKYPITA
LRMKYMMDMAYPQTA

SEQ ID NO: 245775 - protein, 15 aa, Artificial Sequence
  Description of Artificial Sequence: Synthetic peptide
  Seed: LRMKWMMAMKYPITA
LRMKYMMDMAYPSTA

SEQ ID NO: 245776 - protein, 15 aa, Artificial Sequence
  Description of Artificial Sequence: Synthetic peptide
  Seed: LRMKWMMAMKYPITA
LRMKYMMDMAYPTTA

SEQ ID NO: 245777 - protein, 15 aa, Artificial Sequence
  Description of Artificial Sequence: Synthetic peptide
  Seed: LRMKWMMAMKYPITA
LRMKYMMDMAYPVTA

SEQ ID NO: 245778 - protein, 15 aa, Artificial Sequence
  Description of Artificial Sequence: Synthetic peptide
  Seed: LRMKWMMAMKYPITA
LRMKYMMDMAYPYTA

SEQ ID NO: 245779 - protein, 15 aa, Artificial Sequence
  Description of Artificial Sequence: Synthetic peptide
  Seed: LRMKWMMAMKYPITA
LRMKYMMDMDYPATA

SEQ ID NO: 245780 - protein, 15 aa, Artificial Sequence
  Description of Artificial Sequence: Synthetic peptide
  Seed: LRMKWMMAMKYPITA
LRMKYMMDMDYPSTA

SEQ ID NO: 245781 - protein, 15 aa, Artificial Sequence
  Description of Artificial Sequence: Synthetic peptide
  Seed: LRMKWMMAMKYPITA
LRMKYMMDMFYPFTA

SEQ ID NO: 245782 - protein, 15 aa, Artificial Sequence
  Description of Artificial Sequence: Synthetic peptide
  Seed: LRMKWMMAMKYPITA
LRMKYMMDMFYPITA

SEQ ID NO: 245783 - protein, 15 aa, Artificial Sequence
  Description of Artificial Sequence: Synthetic peptide
  Seed: LRMKWMMAMKYPITA
LRMKYMMDMFYPLTA

SEQ ID NO: 245784 - protein, 15 aa, Artificial Sequence
  Description of Artificial Sequence: Synthetic peptide
  Seed: LRMKWMMAMKYPITA
LRMKYMMDMFYPMTA

SEQ ID NO: 245785 - protein, 15 aa, Artificial Sequence
  Description of Artificial Sequence: Synthetic peptide
  Seed: LRMKWMMAMKYPITA
LRMKYMMDMFYPTTA

SEQ ID NO: 245786 - protein, 15 aa, Artificial Sequence
  Description of Artificial Sequence: Synthetic peptide
  Seed: LRMKWMMAMKYPITA
LRMKYMMDMFYPVTA

SEQ ID NO: 245787 - protein, 15 aa, Artificial Sequence
  Description of Artificial Sequence: Synthetic peptide
  Seed: LRMKWMMAMKYPITA
LRMKYMMDMGYPATA

SEQ ID NO: 245788 - protein, 15 aa, Artificial Sequence
  Description of Artificial Sequence: Synthetic peptide
  Seed: LRMKWMMAMKYPITA
LRMKYMMDMGYPFTA

SEQ ID NO: 245789 - protein, 15 aa, Artificial Sequence
  Description of Artificial Sequence: Synthetic peptide
  Seed: LRMKWMMAMKYPITA
LRMKYMMDMGYPGTA

SEQ ID NO: 245790 - protein, 15 aa, Artificial Sequence
  Description of Artificial Sequence: Synthetic peptide
  Seed: LRMKWMMAMKYPITA
LRMKYMMDMGYPITA

SEQ ID NO: 245791 - protein, 15 aa, Artificial Sequence
  Description of Artificial Sequence: Synthetic peptide
  Seed: LRMKWMMAMKYPITA
LRMKYMMDMGYPLTA

SEQ ID NO: 245792 - protein, 15 aa, Artificial Sequence
  Description of Artificial Sequence: Synthetic peptide
  Seed: LRMKWMMAMKYPITA
LRMKYMMDMGYPMTA

SEQ ID NO: 245793 - protein, 15 aa, Artificial Sequence
  Description of Artificial Sequence: Synthetic peptide
  Seed: LRMKWMMAMKYPITA
LRMKYMMDMGYPSTA

SEQ ID NO: 245794 - protein, 15 aa, Artificial Sequence
  Description of Artificial Sequence: Synthetic peptide
  Seed: LRMKWMMAMKYPITA
LRMKYMMDMGYPTTA

SEQ ID NO: 245795 - protein, 15 aa, Artificial Sequence
  Description of Artificial Sequence: Synthetic peptide
  Seed: LRMKWMMAMKYPITA
LRMKYMMDMGYPVTA

SEQ ID NO: 245796 - protein, 15 aa, Artificial Sequence
  Description of Artificial Sequence: Synthetic peptide
  Seed: LRMKWMMAMKYPITA
LRMKYMMDMIYPATA

SEQ ID NO: 245797 - protein, 15 aa, Artificial Sequence
  Description of Artificial Sequence: Synthetic peptide
  Seed: LRMKWMMAMKYPITA
LRMKYMMDMIYPGTA

SEQ ID NO: 245798 - protein, 15 aa, Artificial Sequence
  Description of Artificial Sequence: Synthetic peptide
  Seed: LRMKWMMAMKYPITA
LRMKYMMDMIYPITA

SEQ ID NO: 245799 - protein, 15 aa, Artificial Sequence
  Description of Artificial Sequence: Synthetic peptide
  Seed: LRMKWMMAMKYPITA
LRMKYMMDMIYPLTA

SEQ ID NO: 245800 - protein, 15 aa, Artificial Sequence
  Description of Artificial Sequence: Synthetic peptide
  Seed: LRMKWMMAMKYPITA
LRMKYMMDMIYPMTA

SEQ ID NO: 245801 - protein, 15 aa, Artificial Sequence
  Description of Artificial Sequence: Synthetic peptide
  Seed: LRMKWMMAMKYPITA
LRMKYMMDMIYPNTA

SEQ ID NO: 245802 - protein, 15 aa, Artificial Sequence
  Description of Artificial Sequence: Synthetic peptide
  Seed: LRMKWMMAMKYPITA
LRMKYMMDMIYPSTA

SEQ ID NO: 245803 - protein, 15 aa, Artificial Sequence
  Description of Artificial Sequence: Synthetic peptide
  Seed: LRMKWMMAMKYPITA
LRMKYMMDMIYPTTA

SEQ ID NO: 245804 - protein, 15 aa, Artificial Sequence
  Description of Artificial Sequence: Synthetic peptide
  Seed: LRMKWMMAMKYPITA
LRMKYMMDMIYPVTA

SEQ ID NO: 245805 - protein, 15 aa, Artificial Sequence
  Description of Artificial Sequence: Synthetic peptide
  Seed: LRMKWMMAMKYPITA
LRMKYMMDMLYPATA

SEQ ID NO: 245806 - protein, 15 aa, Artificial Sequence
  Description of Artificial Sequence: Synthetic peptide
  Seed: LRMKWMMAMKYPITA
LRMKYMMDMLYPNTA

SEQ ID NO: 245807 - protein, 15 aa, Artificial Sequence
  Description of Artificial Sequence: Synthetic peptide
  Seed: LRMKWMMAMKYPITA
LRMKYMMDMLYPSTA

SEQ ID NO: 245808 - protein, 15 aa, Artificial Sequence
  Description of Artificial Sequence: Synthetic peptide
  Seed: LRMKWMMAMKYPITA
LRMKYMMDMLYPVTA

SEQ ID NO: 245809 - protein, 15 aa, Artificial Sequence
  Description of Artificial Sequence: Synthetic peptide
  Seed: LRMKWMMAMKYPITA
LRMKYMMDMMYPATA

SEQ ID NO: 245810 - protein, 15 aa, Artificial Sequence
  Description of Artificial Sequence: Synthetic peptide
  Seed: LRMKWMMAMKYPITA
LRMKYMMDMMYPITA

SEQ ID NO: 245811 - protein, 15 aa, Artificial Sequence
  Description of Artificial Sequence: Synthetic peptide
  Seed: LRMKWMMAMKYPITA
LRMKYMMDMMYPLTA

SEQ ID NO: 245812 - protein, 15 aa, Artificial Sequence
  Description of Artificial Sequence: Synthetic peptide
  Seed: LRMKWMMAMKYPITA
LRMKYMMDMMYPNTA

SEQ ID NO: 245813 - protein, 15 aa, Artificial Sequence
  Description of Artificial Sequence: Synthetic peptide
  Seed: LRMKWMMAMKYPITA
LRMKYMMDMMYPSTA

SEQ ID NO: 245814 - protein, 15 aa, Artificial Sequence
  Description of Artificial Sequence: Synthetic peptide
  Seed: LRMKWMMAMKYPITA
LRMKYMMDMMYPVTA

SEQ ID NO: 245815 - protein, 15 aa, Artificial Sequence
  Description of Artificial Sequence: Synthetic peptide
  Seed: LRMKWMMAMKYPITA
LRMKYMMDMNYPATA

SEQ ID NO: 245816 - protein, 15 aa, Artificial Sequence
  Description of Artificial Sequence: Synthetic peptide
  Seed: LRMKWMMAMKYPITA
LRMKYMMDMNYPDTA

SEQ ID NO: 245817 - protein, 15 aa, Artificial Sequence
  Description of Artificial Sequence: Synthetic peptide
  Seed: LRMKWMMAMKYPITA
LRMKYMMDMNYPETA

SEQ ID NO: 245818 - protein, 15 aa, Artificial Sequence
  Description of Artificial Sequence: Synthetic peptide
  Seed: LRMKWMMAMKYPITA
LRMKYMMDMNYPFTA

SEQ ID NO: 245819 - protein, 15 aa, Artificial Sequence
  Description of Artificial Sequence: Synthetic peptide
  Seed: LRMKWMMAMKYPITA
LRMKYMMDMNYPGTA

SEQ ID NO: 245820 - protein, 15 aa, Artificial Sequence
  Description of Artificial Sequence: Synthetic peptide
  Seed: LRMKWMMAMKYPITA
LRMKYMMDMNYPHTA

SEQ ID NO: 245821 - protein, 15 aa, Artificial Sequence
  Description of Artificial Sequence: Synthetic peptide
  Seed: LRMKWMMAMKYPITA
LRMKYMMDMNYPITA

SEQ ID NO: 245822 - protein, 15 aa, Artificial Sequence
  Description of Artificial Sequence: Synthetic peptide
  Seed: LRMKWMMAMKYPITA
LRMKYMMDMNYPLTA

SEQ ID NO: 245823 - protein, 15 aa, Artificial Sequence
  Description of Artificial Sequence: Synthetic peptide
  Seed: LRMKWMMAMKYPITA
LRMKYMMDMNYPMTA

SEQ ID NO: 245824 - protein, 15 aa, Artificial Sequence
  Description of Artificial Sequence: Synthetic peptide
  Seed: LRMKWMMAMKYPITA
LRMKYMMDMNYPNTA

SEQ ID NO: 245825 - protein, 15 aa, Artificial Sequence
  Description of Artificial Sequence: Synthetic peptide
  Seed: LRMKWMMAMKYPITA
LRMKYMMDMNYPQTA

SEQ ID NO: 245826 - protein, 15 aa, Artificial Sequence
  Description of Artificial Sequence: Synthetic peptide
  Seed: LRMKWMMAMKYPITA
LRMKYMMDMNYPSTA

SEQ ID NO: 245827 - protein, 15 aa, Artificial Sequence
  Description of Artificial Sequence: Synthetic peptide
  Seed: LRMKWMMAMKYPITA
LRMKYMMDMNYPTTA

SEQ ID NO: 245828 - protein, 15 aa, Artificial Sequence
  Description of Artificial Sequence: Synthetic peptide
  Seed: LRMKWMMAMKYPITA
LRMKYMMDMNYPVTA

SEQ ID NO: 245829 - protein, 15 aa, Artificial Sequence
  Description of Artificial Sequence: Synthetic peptide
  Seed: LRMKWMMAMKYPITA
LRMKYMMDMPYPATA

SEQ ID NO: 245830 - protein, 15 aa, Artificial Sequence
  Description of Artificial Sequence: Synthetic peptide
  Seed: LRMKWMMAMKYPITA
LRMKYMMDMPYPITA

SEQ ID NO: 245831 - protein, 15 aa, Artificial Sequence
  Description of Artificial Sequence: Synthetic peptide
  Seed: LRMKWMMAMKYPITA
LRMKYMMDMPYPLTA

SEQ ID NO: 245832 - protein, 15 aa, Artificial Sequence
  Description of Artificial Sequence: Synthetic peptide
  Seed: LRMKWMMAMKYPITA
LRMKYMMDMPYPMTA

SEQ ID NO: 245833 - protein, 15 aa, Artificial Sequence
  Description of Artificial Sequence: Synthetic peptide
  Seed: LRMKWMMAMKYPITA
LRMKYMMDMPYPNTA

SEQ ID NO: 245834 - protein, 15 aa, Artificial Sequence
  Description of Artificial Sequence: Synthetic peptide
  Seed: LRMKWMMAMKYPITA
LRMKYMMDMPYPSTA

SEQ ID NO: 245835 - protein, 15 aa, Artificial Sequence
  Description of Artificial Sequence: Synthetic peptide
  Seed: LRMKWMMAMKYPITA
LRMKYMMDMPYPTTA

SEQ ID NO: 245836 - protein, 15 aa, Artificial Sequence
  Description of Artificial Sequence: Synthetic peptide
  Seed: LRMKWMMAMKYPITA
LRMKYMMDMPYPVTA

SEQ ID NO: 245837 - protein, 15 aa, Artificial Sequence
  Description of Artificial Sequence: Synthetic peptide
  Seed: LRMKWMMAMKYPITA
LRMKYMMDMSYPATA

SEQ ID NO: 245838 - protein, 15 aa, Artificial Sequence
  Description of Artificial Sequence: Synthetic peptide
  Seed: LRMKWMMAMKYPITA
LRMKYMMDMSYPDTA

SEQ ID NO: 245839 - protein, 15 aa, Artificial Sequence
  Description of Artificial Sequence: Synthetic peptide
  Seed: LRMKWMMAMKYPITA
LRMKYMMDMSYPGTA

SEQ ID NO: 245840 - protein, 15 aa, Artificial Sequence
  Description of Artificial Sequence: Synthetic peptide
  Seed: LRMKWMMAMKYPITA
LRMKYMMDMSYPHTA

SEQ ID NO: 245841 - protein, 15 aa, Artificial Sequence
  Description of Artificial Sequence: Synthetic peptide
  Seed: LRMKWMMAMKYPITA
LRMKYMMDMSYPITA

SEQ ID NO: 245842 - protein, 15 aa, Artificial Sequence
  Description of Artificial Sequence: Synthetic peptide
  Seed: LRMKWMMAMKYPITA
LRMKYMMDMSYPLTA

SEQ ID NO: 245843 - protein, 15 aa, Artificial Sequence
  Description of Artificial Sequence: Synthetic peptide
  Seed: LRMKWMMAMKYPITA
LRMKYMMDMSYPMTA

SEQ ID NO: 245844 - protein, 15 aa, Artificial Sequence
  Description of Artificial Sequence: Synthetic peptide
  Seed: LRMKWMMAMKYPITA
LRMKYMMDMSYPNTA

SEQ ID NO: 245845 - protein, 15 aa, Artificial Sequence
  Description of Artificial Sequence: Synthetic peptide
  Seed: LRMKWMMAMKYPITA
LRMKYMMDMSYPQTA

SEQ ID NO: 245846 - protein, 15 aa, Artificial Sequence
  Description of Artificial Sequence: Synthetic peptide
  Seed: LRMKWMMAMKYPITA
LRMKYMMDMSYPSTA

SEQ ID NO: 245847 - protein, 15 aa, Artificial Sequence
  Description of Artificial Sequence: Synthetic peptide
  Seed: LRMKWMMAMKYPITA
LRMKYMMDMSYPTTA

SEQ ID NO: 245848 - protein, 15 aa, Artificial Sequence
  Description of Artificial Sequence: Synthetic peptide
  Seed: LRMKWMMAMKYPITA
LRMKYMMDMSYPVTA

SEQ ID NO: 245849 - protein, 15 aa, Artificial Sequence
  Description of Artificial Sequence: Synthetic peptide
  Seed: LRMKWMMAMKYPITA
LRMKYMMDMTYPATA

SEQ ID NO: 245850 - protein, 15 aa, Artificial Sequence
  Description of Artificial Sequence: Synthetic peptide
  Seed: LRMKWMMAMKYPITA
LRMKYMMDMTYPDTA

SEQ ID NO: 245851 - protein, 15 aa, Artificial Sequence
  Description of Artificial Sequence: Synthetic peptide
  Seed: LRMKWMMAMKYPITA
LRMKYMMDMTYPETA

SEQ ID NO: 245852 - protein, 15 aa, Artificial Sequence
  Description of Artificial Sequence: Synthetic peptide
  Seed: LRMKWMMAMKYPITA
LRMKYMMDMTYPFTA

SEQ ID NO: 245853 - protein, 15 aa, Artificial Sequence
  Description of Artificial Sequence: Synthetic peptide
  Seed: LRMKWMMAMKYPITA
LRMKYMMDMTYPGTA

SEQ ID NO: 245854 - protein, 15 aa, Artificial Sequence
  Description of Artificial Sequence: Synthetic peptide
  Seed: LRMKWMMAMKYPITA
LRMKYMMDMTYPHTA

SEQ ID NO: 245855 - protein, 15 aa, Artificial Sequence
  Description of Artificial Sequence: Synthetic peptide
  Seed: LRMKWMMAMKYPITA
LRMKYMMDMTYPITA

SEQ ID NO: 245856 - protein, 15 aa, Artificial Sequence
  Description of Artificial Sequence: Synthetic peptide
  Seed: LRMKWMMAMKYPITA
LRMKYMMDMTYPLTA

SEQ ID NO: 245857 - protein, 15 aa, Artificial Sequence
  Description of Artificial Sequence: Synthetic peptide
  Seed: LRMKWMMAMKYPITA
LRMKYMMDMTYPMTA

SEQ ID NO: 245858 - protein, 15 aa, Artificial Sequence
  Description of Artificial Sequence: Synthetic peptide
  Seed: LRMKWMMAMKYPITA
LRMKYMMDMTYPNTA

SEQ ID NO: 245859 - protein, 15 aa, Artificial Sequence
  Description of Artificial Sequence: Synthetic peptide
  Seed: LRMKWMMAMKYPITA
LRMKYMMDMTYPPTA

SEQ ID NO: 245860 - protein, 15 aa, Artificial Sequence
  Description of Artificial Sequence: Synthetic peptide
  Seed: LRMKWMMAMKYPITA
LRMKYMMDMTYPQTA

SEQ ID NO: 245861 - protein, 15 aa, Artificial Sequence
  Description of Artificial Sequence: Synthetic peptide
  Seed: LRMKWMMAMKYPITA
LRMKYMMDMTYPSTA

SEQ ID NO: 245862 - protein, 15 aa, Artificial Sequence
  Description of Artificial Sequence: Synthetic peptide
  Seed: LRMKWMMAMKYPITA
LRMKYMMDMTYPTTA

SEQ ID NO: 245863 - protein, 15 aa, Artificial Sequence
  Description of Artificial Sequence: Synthetic peptide
  Seed: LRMKWMMAMKYPITA
LRMKYMMDMTYPVTA

SEQ ID NO: 245864 - protein, 15 aa, Artificial Sequence
  Description of Artificial Sequence: Synthetic peptide
  Seed: LRMKWMMAMKYPITA
LRMKYMMDMVYPATA

SEQ ID NO: 245865 - protein, 15 aa, Artificial Sequence
  Description of Artificial Sequence: Synthetic peptide
  Seed: LRMKWMMAMKYPITA
LRMKYMMDMVYPDTA

SEQ ID NO: 245866 - protein, 15 aa, Artificial Sequence
  Description of Artificial Sequence: Synthetic peptide
  Seed: LRMKWMMAMKYPITA
LRMKYMMDMVYPGTA

SEQ ID NO: 245867 - protein, 15 aa, Artificial Sequence
  Description of Artificial Sequence: Synthetic peptide
  Seed: LRMKWMMAMKYPITA
LRMKYMMDMVYPHTA

SEQ ID NO: 245868 - protein, 15 aa, Artificial Sequence
  Description of Artificial Sequence: Synthetic peptide
  Seed: LRMKWMMAMKYPITA
LRMKYMMDMVYPITA

SEQ ID NO: 245869 - protein, 15 aa, Artificial Sequence
  Description of Artificial Sequence: Synthetic peptide
  Seed: LRMKWMMAMKYPITA
LRMKYMMDMVYPLTA

SEQ ID NO: 245870 - protein, 15 aa, Artificial Sequence
  Description of Artificial Sequence: Synthetic peptide
  Seed: LRMKWMMAMKYPITA
LRMKYMMDMVYPMTA

SEQ ID NO: 245871 - protein, 15 aa, Artificial Sequence
  Description of Artificial Sequence: Synthetic peptide
  Seed: LRMKWMMAMKYPITA
LRMKYMMDMVYPNTA

SEQ ID NO: 245872 - protein, 15 aa, Artificial Sequence
  Description of Artificial Sequence: Synthetic peptide
  Seed: LRMKWMMAMKYPITA
LRMKYMMDMVYPQTA

SEQ ID NO: 245873 - protein, 15 aa, Artificial Sequence
  Description of Artificial Sequence: Synthetic peptide
  Seed: LRMKWMMAMKYPITA
LRMKYMMDMVYPSTA

SEQ ID NO: 245874 - protein, 15 aa, Artificial Sequence
  Description of Artificial Sequence: Synthetic peptide
  Seed: LRMKWMMAMKYPITA
LRMKYMMDMVYPTTA

SEQ ID NO: 245875 - protein, 15 aa, Artificial Sequence
  Description of Artificial Sequence: Synthetic peptide
  Seed: LRMKWMMAMKYPITA
LRMKYMMDMVYPVTA

SEQ ID NO: 245876 - protein, 15 aa, Artificial Sequence
  Description of Artificial Sequence: Synthetic peptide
  Seed: LRMKWMMAMKYPITA
LRMKYMMEMAYPATA

SEQ ID NO: 245877 - protein, 15 aa, Artificial Sequence
  Description of Artificial Sequence: Synthetic peptide
  Seed: LRMKWMMAMKYPITA
LRMKYMMEMAYPCTA

SEQ ID NO: 245878 - protein, 15 aa, Artificial Sequence
  Description of Artificial Sequence: Synthetic peptide
  Seed: LRMKWMMAMKYPITA
LRMKYMMEMAYPDTA

SEQ ID NO: 245879 - protein, 15 aa, Artificial Sequence
  Description of Artificial Sequence: Synthetic peptide
  Seed: LRMKWMMAMKYPITA
LRMKYMMEMAYPETA

SEQ ID NO: 245880 - protein, 15 aa, Artificial Sequence
  Description of Artificial Sequence: Synthetic peptide
  Seed: LRMKWMMAMKYPITA
LRMKYMMEMAYPFTA

SEQ ID NO: 245881 - protein, 15 aa, Artificial Sequence
  Description of Artificial Sequence: Synthetic peptide
  Seed: LRMKWMMAMKYPITA
LRMKYMMEMAYPGTA

SEQ ID NO: 245882 - protein, 15 aa, Artificial Sequence
  Description of Artificial Sequence: Synthetic peptide
  Seed: LRMKWMMAMKYPITA
LRMKYMMEMAYPHTA

SEQ ID NO: 245883 - protein, 15 aa, Artificial Sequence
  Description of Artificial Sequence: Synthetic peptide
  Seed: LRMKWMMAMKYPITA
LRMKYMMEMAYPITA

SEQ ID NO: 245884 - protein, 15 aa, Artificial Sequence
  Description of Artificial Sequence: Synthetic peptide
  Seed: LRMKWMMAMKYPITA
LRMKYMMEMAYPKTA

SEQ ID NO: 245885 - protein, 15 aa, Artificial Sequence
  Description of Artificial Sequence: Synthetic peptide
  Seed: LRMKWMMAMKYPITA
LRMKYMMEMAYPLTA

SEQ ID NO: 245886 - protein, 15 aa, Artificial Sequence
  Description of Artificial Sequence: Synthetic peptide
  Seed: LRMKWMMAMKYPITA
LRMKYMMEMAYPMTA

SEQ ID NO: 245887 - protein, 15 aa, Artificial Sequence
  Description of Artificial Sequence: Synthetic peptide
  Seed: LRMKWMMAMKYPITA
LRMKYMMEMAYPNTA

SEQ ID NO: 245888 - protein, 15 aa, Artificial Sequence
  Description of Artificial Sequence: Synthetic peptide
  Seed: LRMKWMMAMKYPITA
LRMKYMMEMAYPPTA

SEQ ID NO: 245889 - protein, 15 aa, Artificial Sequence
  Description of Artificial Sequence: Synthetic peptide
  Seed: LRMKWMMAMKYPITA
LRMKYMMEMAYPQTA

SEQ ID NO: 245890 - protein, 15 aa, Artificial Sequence
  Description of Artificial Sequence: Synthetic peptide
  Seed: LRMKWMMAMKYPITA
LRMKYMMEMAYPRTA

SEQ ID NO: 245891 - protein, 15 aa, Artificial Sequence
  Description of Artificial Sequence: Synthetic peptide
  Seed: LRMKWMMAMKYPITA
LRMKYMMEMAYPSTA

SEQ ID NO: 245892 - protein, 15 aa, Artificial Sequence
  Description of Artificial Sequence: Synthetic peptide
  Seed: LRMKWMMAMKYPITA
LRMKYMMEMAYPTTA

SEQ ID NO: 245893 - protein, 15 aa, Artificial Sequence
  Description of Artificial Sequence: Synthetic peptide
  Seed: LRMKWMMAMKYPITA
LRMKYMMEMAYPVTA

SEQ ID NO: 245894 - protein, 15 aa, Artificial Sequence
  Description of Artificial Sequence: Synthetic peptide
  Seed: LRMKWMMAMKYPITA
LRMKYMMEMAYPWTA

SEQ ID NO: 245895 - protein, 15 aa, Artificial Sequence
  Description of Artificial Sequence: Synthetic peptide
  Seed: LRMKWMMAMKYPITA
LRMKYMMEMAYPYTA

SEQ ID NO: 245896 - protein, 15 aa, Artificial Sequence
  Description of Artificial Sequence: Synthetic peptide
  Seed: LRMKWMMAMKYPITA
LRMKYMMEMCYPATA

SEQ ID NO: 245897 - protein, 15 aa, Artificial Sequence
  Description of Artificial Sequence: Synthetic peptide
  Seed: LRMKWMMAMKYPITA
LRMKYMMEMCYPITA

SEQ ID NO: 245898 - protein, 15 aa, Artificial Sequence
  Description of Artificial Sequence: Synthetic peptide
  Seed: LRMKWMMAMKYPITA
LRMKYMMEMCYPLTA

SEQ ID NO: 245899 - protein, 15 aa, Artificial Sequence
  Description of Artificial Sequence: Synthetic peptide
  Seed: LRMKWMMAMKYPITA
LRMKYMMEMCYPSTA

SEQ ID NO: 245900 - protein, 15 aa, Artificial Sequence
  Description of Artificial Sequence: Synthetic peptide
  Seed: LRMKWMMAMKYPITA
LRMKYMMEMCYPVTA

SEQ ID NO: 245901 - protein, 15 aa, Artificial Sequence
  Description of Artificial Sequence: Synthetic peptide
  Seed: LRMKWMMAMKYPITA
LRMKYMMEMDYPITA

SEQ ID NO: 245902 - protein, 15 aa, Artificial Sequence
  Description of Artificial Sequence: Synthetic peptide
  Seed: LRMKWMMAMKYPITA
LRMKYMMEMDYPLTA

SEQ ID NO: 245903 - protein, 15 aa, Artificial Sequence
  Description of Artificial Sequence: Synthetic peptide
  Seed: LRMKWMMAMKYPITA
LRMKYMMEMDYPVTA

SEQ ID NO: 245904 - protein, 15 aa, Artificial Sequence
  Description of Artificial Sequence: Synthetic peptide
  Seed: LRMKWMMAMKYPITA
LRMKYMMEMEYPATA

SEQ ID NO: 245905 - protein, 15 aa, Artificial Sequence
  Description of Artificial Sequence: Synthetic peptide
  Seed: LRMKWMMAMKYPITA
LRMKYMMEMEYPITA

SEQ ID NO: 245906 - protein, 15 aa, Artificial Sequence
  Description of Artificial Sequence: Synthetic peptide
  Seed: LRMKWMMAMKYPITA
LRMKYMMEMEYPLTA

SEQ ID NO: 245907 - protein, 15 aa, Artificial Sequence
  Description of Artificial Sequence: Synthetic peptide
  Seed: LRMKWMMAMKYPITA
LRMKYMMEMEYPVTA

SEQ ID NO: 245908 - protein, 15 aa, Artificial Sequence
  Description of Artificial Sequence: Synthetic peptide
  Seed: LRMKWMMAMKYPITA
LRMKYMMEMFYPATA

SEQ ID NO: 245909 - protein, 15 aa, Artificial Sequence
  Description of Artificial Sequence: Synthetic peptide
  Seed: LRMKWMMAMKYPITA
LRMKYMMEMFYPDTA

SEQ ID NO: 245910 - protein, 15 aa, Artificial Sequence
  Description of Artificial Sequence: Synthetic peptide
  Seed: LRMKWMMAMKYPITA
LRMKYMMEMFYPETA

SEQ ID NO: 245911 - protein, 15 aa, Artificial Sequence
  Description of Artificial Sequence: Synthetic peptide
  Seed: LRMKWMMAMKYPITA
LRMKYMMEMFYPFTA

SEQ ID NO: 245912 - protein, 15 aa, Artificial Sequence
  Description of Artificial Sequence: Synthetic peptide
  Seed: LRMKWMMAMKYPITA
LRMKYMMEMFYPITA

SEQ ID NO: 245913 - protein, 15 aa, Artificial Sequence
  Description of Artificial Sequence: Synthetic peptide
  Seed: LRMKWMMAMKYPITA
LRMKYMMEMFYPLTA

SEQ ID NO: 245914 - protein, 15 aa, Artificial Sequence
  Description of Artificial Sequence: Synthetic peptide
  Seed: LRMKWMMAMKYPITA
LRMKYMMEMFYPMTA

SEQ ID NO: 245915 - protein, 15 aa, Artificial Sequence
  Description of Artificial Sequence: Synthetic peptide
  Seed: LRMKWMMAMKYPITA
LRMKYMMEMFYPNTA

SEQ ID NO: 245916 - protein, 15 aa, Artificial Sequence
  Description of Artificial Sequence: Synthetic peptide
  Seed: LRMKWMMAMKYPITA
LRMKYMMEMFYPSTA

SEQ ID NO: 245917 - protein, 15 aa, Artificial Sequence
  Description of Artificial Sequence: Synthetic peptide
  Seed: LRMKWMMAMKYPITA
LRMKYMMEMFYPTTA

SEQ ID NO: 245918 - protein, 15 aa, Artificial Sequence
  Description of Artificial Sequence: Synthetic peptide
  Seed: LRMKWMMAMKYPITA
LRMKYMMEMFYPVTA

SEQ ID NO: 245919 - protein, 15 aa, Artificial Sequence
  Description of Artificial Sequence: Synthetic peptide
  Seed: LRMKWMMAMKYPITA
LRMKYMMEMFYPYTA

SEQ ID NO: 245920 - protein, 15 aa, Artificial Sequence
  Description of Artificial Sequence: Synthetic peptide
  Seed: LRMKWMMAMKYPITA
LRMKYMMEMGYPATA

SEQ ID NO: 245921 - protein, 15 aa, Artificial Sequence
  Description of Artificial Sequence: Synthetic peptide
  Seed: LRMKWMMAMKYPITA
LRMKYMMEMGYPCTA

SEQ ID NO: 245922 - protein, 15 aa, Artificial Sequence
  Description of Artificial Sequence: Synthetic peptide
  Seed: LRMKWMMAMKYPITA
LRMKYMMEMGYPFTA

SEQ ID NO: 245923 - protein, 15 aa, Artificial Sequence
  Description of Artificial Sequence: Synthetic peptide
  Seed: LRMKWMMAMKYPITA
LRMKYMMEMGYPGTA

SEQ ID NO: 245924 - protein, 15 aa, Artificial Sequence
  Description of Artificial Sequence: Synthetic peptide
  Seed: LRMKWMMAMKYPITA
LRMKYMMEMGYPHTA

SEQ ID NO: 245925 - protein, 15 aa, Artificial Sequence
  Description of Artificial Sequence: Synthetic peptide
  Seed: LRMKWMMAMKYPITA
LRMKYMMEMGYPITA

SEQ ID NO: 245926 - protein, 15 aa, Artificial Sequence
  Description of Artificial Sequence: Synthetic peptide
  Seed: LRMKWMMAMKYPITA
LRMKYMMEMGYPKTA

SEQ ID NO: 245927 - protein, 15 aa, Artificial Sequence
  Description of Artificial Sequence: Synthetic peptide
  Seed: LRMKWMMAMKYPITA
LRMKYMMEMGYPLTA

SEQ ID NO: 245928 - protein, 15 aa, Artificial Sequence
  Description of Artificial Sequence: Synthetic peptide
  Seed: LRMKWMMAMKYPITA
LRMKYMMEMGYPMTA

SEQ ID NO: 245929 - protein, 15 aa, Artificial Sequence
  Description of Artificial Sequence: Synthetic peptide
  Seed: LRMKWMMAMKYPITA
LRMKYMMEMGYPNTA
